United States Patent Application Publication US 2005/0244851 A1 - sequence listing, part 106

SEQ ID NO: 4132852 - DNA, 25 bp, Homo sapien
cccaaagaaggtggcgataaactca

SEQ ID NO: 4132853 - DNA, 25 bp, Homo sapien
gcctgcatttgtagccttgcttgtt

SEQ ID NO: 4132854 - DNA, 25 bp, Homo sapien
cctgcatttgtagccttgcttgttg

SEQ ID NO: 4132855 - DNA, 25 bp, Homo sapien
ccgcagaggcccagcgcttgagtct

SEQ ID NO: 4132856 - DNA, 25 bp, Homo sapien
cgcagaggcccagcgcttgagtctt

SEQ ID NO: 4132857 - DNA, 25 bp, Homo sapien
gcagaggcccagcgcttgagtcttc

SEQ ID NO: 4132858 - DNA, 25 bp, Homo sapien
tgccagtgcatctgccgatgatctt

SEQ ID NO: 4132859 - DNA, 25 bp, Homo sapien
tatagtgtcccggctgttggccgcg

SEQ ID NO: 4132860 - DNA, 25 bp, Homo sapien
gatcttgtcgatgcatttcttgtgg

SEQ ID NO: 4132861 - DNA, 25 bp, Homo sapien
catttcttgtggatggcagcgttac

SEQ ID NO: 4132862 - DNA, 25 bp, Homo sapien
gcaggctgccgcagtggtcacagaa

SEQ ID NO: 4132863 - DNA, 25 bp, Homo sapien
acactttaatccctgcttcaccagt

SEQ ID NO: 4132864 - DNA, 25 bp, Homo sapien
gcatgtcgatgttgaagcgttcttt

SEQ ID NO: 4132865 - DNA, 25 bp, Homo sapien
aaccttgaagcggtgcggcatgtcg

SEQ ID NO: 4132866 - DNA, 25 bp, Homo sapien
agcccaggggcggggtggcacgcac

SEQ ID NO: 4132867 - DNA, 25 bp, Homo sapien
ctgggagtgcccctcctgcagccca

SEQ ID NO: 4132868 - DNA, 25 bp, Homo sapien
tgcagcccaggggcggggtggcacg

SEQ ID NO: 4132869 - DNA, 25 bp, Homo sapien
acagcagcaccagctgggagtgccc

SEQ ID NO: 4132870 - DNA, 25 bp, Homo sapien
ccggcatttatggtgcacattcatg

SEQ ID NO: 4132871 - DNA, 25 bp, Homo sapien
caaggcctcagccaaaagcttctgg

SEQ ID NO: 4132872 - DNA, 25 bp, Homo sapien
cttctggttgatgccgcagaggttg

SEQ ID NO: 4132873 - DNA, 25 bp, Homo sapien
tttatggtgcacattcatgccgcag

SEQ ID NO: 4132874 - DNA, 25 bp, Homo sapien
ggtcttcttctcgaaaccctgatat

SEQ ID NO: 4132875 - DNA, 25 bp, Homo sapien
gaaaccctgatatatcccaacaggc

SEQ ID NO: 4132876 - DNA, 25 bp, Homo sapien
gctgagtctgatctccgggaggctc

SEQ ID NO: 4132877 - DNA, 25 bp, Homo sapien
cagcaactccggtcttcttctcgaa

SEQ ID NO: 4132878 - DNA, 25 bp, Homo sapien
taatggggcaatggacccagcttca

SEQ ID NO: 4132879 - DNA, 25 bp, Homo sapien
aatggggcaatggacccagcttcac

SEQ ID NO: 4132880 - DNA, 25 bp, Homo sapien
accgtaatggggcaatggacccagc

SEQ ID NO: 4132881 - DNA, 25 bp, Homo sapien
cgtaatggggcaatggacccagctt

SEQ ID NO: 4132882 - DNA, 25 bp, Homo sapien
tgctgccctcccagatcttgccgta

SEQ ID NO: 4132883 - DNA, 25 bp, Homo sapien
ctcccagatcttgccgtaggtccca

SEQ ID NO: 4132884 - DNA, 25 bp, Homo sapien
cctcccagatcttgccgtaggtccc

SEQ ID NO: 4132885 - DNA, 25 bp, Homo sapien
tgccctcccagatcttgccgtaggt

SEQ ID NO: 4132886 - DNA, 25 bp, Homo sapien
acagcccgattcacagactcccacc

SEQ ID NO: 4132887 - DNA, 25 bp, Homo sapien
gcccgattcacagactcccacctca

SEQ ID NO: 4132888 - DNA, 25 bp, Homo sapien
ccacagcccgattcacagactccca

SEQ ID NO: 4132889 - DNA, 25 bp, Homo sapien
agcccgattcacagactcccacctc

SEQ ID NO: 4132890 - DNA, 25 bp, Homo sapien
gcaagtgtcagcacccgcttctcaa

SEQ ID NO: 4132891 - DNA, 25 bp, Homo sapien
ggtgcactccacgtcgtcgtcgatc

SEQ ID NO: 4132892 - DNA, 25 bp, Homo sapien
gtcgatcaggaccacatccttcttg

SEQ ID NO: 4132893 - DNA, 25 bp, Homo sapien
ggccttgatggcaaagtactctcct

SEQ ID NO: 4132894 - DNA, 25 bp, Homo sapien
cccgttgaggaactccatcacaaag

SEQ ID NO: 4132895 - DNA, 25 bp, Homo sapien
tcccccccgttgaggaactccatca

SEQ ID NO: 4132896 - DNA, 25 bp, Homo sapien
tgaggaactccatcacaaagaacag

SEQ ID NO: 4132897 - DNA, 25 bp, Homo sapien
gaactccatcacaaagaacaggtgg

SEQ ID NO: 4132898 - DNA, 25 bp, Homo sapien
tggcacggtagagttcaaagcggcc

SEQ ID NO: 4132899 - DNA, 25 bp, Homo sapien
cggtagagttcaaagcggcctttgt

SEQ ID NO: 4132900 - DNA, 25 bp, Homo sapien
gtagagttcaaagcggcctttgtcc

SEQ ID NO: 4132901 - DNA, 25 bp, Homo sapien
cacggtagagttcaaagcggccttt

SEQ ID NO: 4132902 - DNA, 25 bp, Homo sapien
gggaagaaggcatggagggcagact

SEQ ID NO: 4132903 - DNA, 25 bp, Homo sapien
tgccgacccaggctacccccacatc

SEQ ID NO: 4132904 - DNA, 25 bp, Homo sapien
cccacatctccccagttgccgctct

SEQ ID NO: 4132905 - DNA, 25 bp, Homo sapien
ccccagttgccgctctagcccaggc

SEQ ID NO: 4132906 - DNA, 25 bp, Homo sapien
atctccccagttgccgctctagccc

SEQ ID NO: 4132907 - DNA, 25 bp, Homo sapien
tagaaactgcagtccacacattatc

SEQ ID NO: 4132908 - DNA, 25 bp, Homo sapien
tgctgtgtagaaactgcagtccaca

SEQ ID NO: 4132909 - DNA, 25 bp, Homo sapien
ccacacattatctcagcggcataaa

SEQ ID NO: 4132910 - DNA, 25 bp, Homo sapien
cacacattatctcagcggcataaaa

SEQ ID NO: 4132911 - DNA, 25 bp, Homo sapien
aagcatatggcagcatgcagctcgc

SEQ ID NO: 4132912 - DNA, 25 bp, Homo sapien
atatggcagcatgcagctcgctccc

SEQ ID NO: 4132913 - DNA, 25 bp, Homo sapien
cgtggacaagcatatggcagcatgc

SEQ ID NO: 4132914 - DNA, 25 bp, Homo sapien
ctaggcgtggacaagcatatggcag

SEQ ID NO: 4132915 - DNA, 25 bp, Homo sapien
agctcaatcatgaggctctccttag

SEQ ID NO: 4132916 - DNA, 25 bp, Homo sapien
gagctcaatcatgaggctctcctta

SEQ ID NO: 4132917 - DNA, 25 bp, Homo sapien
actgagctcaatcatgaggctctcc

SEQ ID NO: 4132918 - DNA, 25 bp, Homo sapien
ctgagctcaatcatgaggctctcct

SEQ ID NO: 4132919 - DNA, 25 bp, Homo sapien
tactgtgtgctaaacgctgggcata

SEQ ID NO: 4132920 - DNA, 25 bp, Homo sapien
tattagtccaggactgtccccaagg

SEQ ID NO: 4132921 - DNA, 25 bp, Homo sapien
gaaagagatcctaaaaacaggtgct

SEQ ID NO: 4132922 - DNA, 25 bp, Homo sapien
ggtttgtctacttcccacaggcaga

SEQ ID NO: 4132923 - DNA, 25 bp, Homo sapien
tggcccggctctccccgaatatgtt

SEQ ID NO: 4132924 - DNA, 25 bp, Homo sapien
cttgatgtggccatcccggtccagc

SEQ ID NO: 4132925 - DNA, 25 bp, Homo sapien
cccgaatatgttctctttgcacatc

SEQ ID NO: 4132926 - DNA, 25 bp, Homo sapien
ggcgatatagtcaggggtgccgcag

SEQ ID NO: 4132927 - DNA, 25 bp, Homo sapien
gactgagcggggggctggaagggta

SEQ ID NO: 4132928 - DNA, 25 bp, Homo sapien
caaggtgcctgactgagcggggggc

SEQ ID NO: 4132929 - DNA, 25 bp, Homo sapien
ggcaaggtgcctgactgagcggggg

SEQ ID NO: 4132930 - DNA, 25 bp, Homo sapien
ggggggctggaagggtatcggctca

SEQ ID NO: 4132931 - DNA, 25 bp, Homo sapien
tctcgtacagaaggaccccgaaaga

SEQ ID NO: 4132932 - DNA, 25 bp, Homo sapien
ggactcgaagagttcatcctcatca

SEQ ID NO: 4132933 - DNA, 25 bp, Homo sapien
ggataatgtggcgtgtccacacgga

SEQ ID NO: 4132934 - DNA, 25 bp, Homo sapien
gggactggccaatgagcatctcgta

SEQ ID NO: 4132935 - DNA, 25 bp, Homo sapien
ggatgtccttggactccttggtgat

SEQ ID NO: 4132936 - DNA, 25 bp, Homo sapien
tccaggatgtccttggactccttgg

SEQ ID NO: 4132937 - DNA, 25 bp, Homo sapien
cttctccaggatgtccttggactcc

SEQ ID NO: 4132938 - DNA, 25 bp, Homo sapien
caggatgtccttggactccttggtg

SEQ ID NO: 4132939 - DNA, 25 bp, Homo sapien
aacctccgcttttccagcagagtcc

SEQ ID NO: 4132940 - DNA, 25 bp, Homo sapien
gattttgatgtttccggtcactccc

SEQ ID NO: 4132941 - DNA, 25 bp, Homo sapien
gagtccagtttatggtcttgaagaa

SEQ ID NO: 4132942 - DNA, 25 bp, Homo sapien
tgaaaggtggctccaacctccgctt

SEQ ID NO: 4132943 - DNA, 25 bp, Homo sapien
aactggcaagtacaatcatttcggc

SEQ ID NO: 4132944 - DNA, 25 bp, Homo sapien
tgagaccatcaagcctgaaaagcct

SEQ ID NO: 4132945 - DNA, 25 bp, Homo sapien
gtaatatagaaagaccgcaagctgg

SEQ ID NO: 4132946 - DNA, 25 bp, Homo sapien
tggtggcccttcagccaaactgaac

SEQ ID NO: 4132947 - DNA, 25 bp, Homo sapien
gcgccttctcgttcaggaactcctg

SEQ ID NO: 4132948 - DNA, 25 bp, Homo sapien
aaaggagaagccagcgaatgcagac

SEQ ID NO: 4132949 - DNA, 25 bp, Homo sapien
gccagcgaatgcagactggtccatg

SEQ ID NO: 4132950 - DNA, 25 bp, Homo sapien
aggttcttgtcgctgtaggagaggc

SEQ ID NO: 4132951 - DNA, 25 bp, Homo sapien
tcaatcttccaggaggtgctcgaat

SEQ ID NO: 4132952 - DNA, 25 bp, Homo sapien
cttccaggaggtgctcgaatttggg

SEQ ID NO: 4132953 - DNA, 25 bp, Homo sapien
ggaggtgctcgaatttggggttcac

SEQ ID NO: 4132954 - DNA, 25 bp, Homo sapien
atcttccaggaggtgctcgaatttg

SEQ ID NO: 4132955 - DNA, 25 bp, Homo sapien
tggtggttcaaacagcttgtgctcc

SEQ ID NO: 4132956 - DNA, 25 bp, Homo sapien
cagaggaagtaccatgagagcccgg

SEQ ID NO: 4132957 - DNA, 25 bp, Homo sapien
ggaaaagcagattcacacacagttc

SEQ ID NO: 4132958 - DNA, 25 bp, Homo sapien
tacaatttccctccgaaggcagagg

SEQ ID NO: 4132959 - DNA, 25 bp, Homo sapien
gaggaagagtgaaggcccctgtttc

SEQ ID NO: 4132960 - DNA, 25 bp, Homo sapien
agaggaagagtgaaggcccctgttt

SEQ ID NO: 4132961 - DNA, 25 bp, Homo sapien
gcccctgtttcagggactggagccc

SEQ ID NO: 4132962 - DNA, 25 bp, Homo sapien
aggaagagtgaaggcccctgtttca

SEQ ID NO: 4132963 - DNA, 25 bp, Homo sapien
cagtggtatgatcttggctcactgc

SEQ ID NO: 4132964 - DNA, 25 bp, Homo sapien
ggagtgcagtggtatgatcttggct

SEQ ID NO: 4132965 - DNA, 25 bp, Homo sapien
ggagtctcactgtgttgaccagact

SEQ ID NO: 4132966 - DNA, 25 bp, Homo sapien
aacctctgcctcctgggttcaagtg

SEQ ID NO: 4132967 - DNA, 25 bp, Homo sapien
cagtgcctcctggtcgttgtcacac

SEQ ID NO: 4132968 - DNA, 25 bp, Homo sapien
cattgctttgcaggcggtagtggcc

SEQ ID NO: 4132969 - DNA, 25 bp, Homo sapien
attcatcctcacaggcccacgttgc

SEQ ID NO: 4132970 - DNA, 25 bp, Homo sapien
ctgcagcgccacctgtagggctggg

SEQ ID NO: 4132971 - DNA, 25 bp, Homo sapien
tgtcacccacctggcagttaaccgg

SEQ ID NO: 4132972 - DNA, 25 bp, Homo sapien
tgtttggtatcgacagggatgccat

SEQ ID NO: 4132973 - DNA, 25 bp, Homo sapien
catcaccaaggcctagggcgggtat

SEQ ID NO: 4132974 - DNA, 25 bp, Homo sapien
agtagtgggcgagcctggcatcact

SEQ ID NO: 4132975 - DNA, 25 bp, Homo sapien
gacattgaccgtagtcgttggcaac

SEQ ID NO: 4132976 - DNA, 25 bp, Homo sapien
catcgctggtccacgagggaccctt

SEQ ID NO: 4132977 - DNA, 25 bp, Homo sapien
taggttcatggacctggtgcagcag

SEQ ID NO: 4132978 - DNA, 25 bp, Homo sapien
cactccaggtttctgtcccaaggga

SEQ ID NO: 4132979 - DNA, 25 bp, Homo sapien
tgtggagtgatcaaatgtgttcccc

SEQ ID NO: 4132980 - DNA, 25 bp, Homo sapien
gacagattccaaacccagtgcgctg

SEQ ID NO: 4132981 - DNA, 25 bp, Homo sapien
tgttccccaaataagaattgggcca

SEQ ID NO: 4132982 - DNA, 25 bp, Homo sapien
tcaagagaaagggtgctctgcccca

SEQ ID NO: 4132983 - DNA, 25 bp, Homo sapien
gctcaggcaataccaagcctcaggg

SEQ ID NO: 4132984 - DNA, 25 bp, Homo sapien
caaatgtcgaccttctgtttagggt

SEQ ID NO: 4132985 - DNA, 25 bp, Homo sapien
gagatgctataatccatctagccag

SEQ ID NO: 4132986 - DNA, 25 bp, Homo sapien
cagggttagcccaggctcctgtagg

SEQ ID NO: 4132987 - DNA, 25 bp, Homo sapien
gaccatcgctcccatttaatgtggg

SEQ ID NO: 4132988 - DNA, 25 bp, Homo sapien
ttaatgtgggtcctgcacaagaggc

SEQ ID NO: 4132989 - DNA, 25 bp, Homo sapien
tctttgctatcttaacctggaattc

SEQ ID NO: 4132990 - DNA, 25 bp, Homo sapien
tggccatggtgtgcggaccatcgct

SEQ ID NO: 4132991 - DNA, 25 bp, Homo sapien
aattctgcctcagccgcccacgtag

SEQ ID NO: 4132992 - DNA, 25 bp, Homo sapien
taatccacccgcctcggtctccgaa

SEQ ID NO: 4132993 - DNA, 25 bp, Homo sapien
ctgggactacaagcacatgccacca

SEQ ID NO: 4132994 - DNA, 25 bp, Homo sapien
ccaccatgcctggctactttttttt

SEQ ID NO: 4132995 - DNA, 25 bp, Homo sapien
tgtgccaaaggttgcatattaagca

SEQ ID NO: 4132996 - DNA, 25 bp, Homo sapien
gagtctgtgccaaaggttgcatatt

SEQ ID NO: 4132997 - DNA, 25 bp, Homo sapien
ctgagtctgtgccaaaggttgcata

SEQ ID NO: 4132998 - DNA, 25 bp, Homo sapien
gccaaaggttgcatattaagcagag

SEQ ID NO: 4132999 - DNA, 25 bp, Homo sapien
taaaatgagcgtttttcatcttaaa

SEQ ID NO: 4133000 - DNA, 25 bp, Homo sapien
taatggtatggattttatagcatct

SEQ ID NO: 4133001 - DNA, 25 bp, Homo sapien
tcatgactttcattgtaccagattc

SEQ ID NO: 4133002 - DNA, 25 bp, Homo sapien
tccatgagcgcaatactgtatcatt

SEQ ID NO: 4133003 - DNA, 25 bp, Homo sapien
aaagagttagctatggagcccagca

SEQ ID NO: 4133004 - DNA, 25 bp, Homo sapien
tagcctggcttctataagtaggaaa

SEQ ID NO: 4133005 - DNA, 25 bp, Homo sapien
tcctggcagagtccattgctgtggc

SEQ ID NO: 4133006 - DNA, 25 bp, Homo sapien
ttctgtggatctcgaggcgtctgca

SEQ ID NO: 4133007 - DNA, 25 bp, Homo sapien
acagtcaggtgagataattcactcc

SEQ ID NO: 4133008 - DNA, 25 bp, Homo sapien
tcaggtgagataattcactcccttt

SEQ ID NO: 4133009 - DNA, 25 bp, Homo sapien
cagtcaggtgagataattcactccc

SEQ ID NO: 4133010 - DNA, 25 bp, Homo sapien
gggtgccatagtgagaaagtagaaa

SEQ ID NO: 4133011 - DNA, 25 bp, Homo sapien
tgttgaaaatgccactgccaaatgg

SEQ ID NO: 4133012 - DNA, 25 bp, Homo sapien
tgaaaattagatcactagaaaaagt

SEQ ID NO: 4133013 - DNA, 25 bp, Homo sapien
gaggttcatttccatagtgttgaaa

SEQ ID NO: 4133014 - DNA, 25 bp, Homo sapien
aaagtagggaggttcatttccatag

SEQ ID NO: 4133015 - DNA, 25 bp, Homo sapien
tttcctttatatcgggcatcgatct

SEQ ID NO: 4133016 - DNA, 25 bp, Homo sapien
cctttatatcgggcatcgatctctt

SEQ ID NO: 4133017 - DNA, 25 bp, Homo sapien
acttttcctttatatcgggcatcga

SEQ ID NO: 4133018 - DNA, 25 bp, Homo sapien
ttttcctttatatcgggcatcgatc

SEQ ID NO: 4133019 - DNA, 25 bp, Homo sapien
ctcaagaccagtgtcagaggtcttt

SEQ ID NO: 4133020 - DNA, 25 bp, Homo sapien
cagtgtcagaggtcttttgattttc

SEQ ID NO: 4133021 - DNA, 25 bp, Homo sapien
ttcctcaagaccagtgtcagaggtc

SEQ ID NO: 4133022 - DNA, 25 bp, Homo sapien
gaccagtgtcagaggtcttttgatt

SEQ ID NO: 4133023 - DNA, 25 bp, Homo sapien
tccaaatggaacagctatttcttcc

SEQ ID NO: 4133024 - DNA, 25 bp, Homo sapien
tctaggtgcattactccaaatggaa

SEQ ID NO: 4133025 - DNA, 25 bp, Homo sapien
tattctaggtgcattactccaaatg

SEQ ID NO: 4133026 - DNA, 25 bp, Homo sapien
ccaaatggaacagctatttcttcct

SEQ ID NO: 4133027 - DNA, 25 bp, Homo sapien
atcttcgtctttgccaaaagacagt

SEQ ID NO: 4133028 - DNA, 25 bp, Homo sapien
accatctgcctctggattttcaata

SEQ ID NO: 4133029 - DNA, 25 bp, Homo sapien
cttcgtctttgccaaaagacagttt

SEQ ID NO: 4133030 - DNA, 25 bp, Homo sapien
tgcctctggattttcaataagacat

SEQ ID NO: 4133031 - DNA, 25 bp, Homo sapien
tccattgttaggagatggtgaggat

SEQ ID NO: 4133032 - DNA, 25 bp, Homo sapien
gctgagccatggccttgctgttgaa

SEQ ID NO: 4133033 - DNA, 25 bp, Homo sapien
tccagcagccccaatacataggagg

SEQ ID NO: 4133034 - DNA, 25 bp, Homo sapien
tctgacctacgcagctgtccatgga

SEQ ID NO: 4133035 - DNA, 25 bp, Homo sapien
tactacaacccttaggctaggcagg

SEQ ID NO: 4133036 - DNA, 25 bp, Homo sapien
tgagagtaaaccaaaccaagaactg

SEQ ID NO: 4133037 - DNA, 25 bp, Homo sapien
gaaaagtttgatgacccctaggcta

SEQ ID NO: 4133038 - DNA, 25 bp, Homo sapien
cagcagaaaggcgagaactggatct

SEQ ID NO: 4133039 - DNA, 25 bp, Homo sapien
tcctcaaagattgtgggcgtggcta

SEQ ID NO: 4133040 - DNA, 25 bp, Homo sapien
tggttgaccgaagctcagactcctc

SEQ ID NO: 4133041 - DNA, 25 bp, Homo sapien
gttctatttcggtggtgaatgcaga

SEQ ID NO: 4133042 - DNA, 25 bp, Homo sapien
aggtgccgcagccatagcctgagaa

SEQ ID NO: 4133043 - DNA, 25 bp, Homo sapien
ctagccagtgaagcaagcgttgatg

SEQ ID NO: 4133044 - DNA, 25 bp, Homo sapien
tgggactgctctgttcacatctaga

SEQ ID NO: 4133045 - DNA, 25 bp, Homo sapien
tgctgcaggagaatgccaagcttcc

SEQ ID NO: 4133046 - DNA, 25 bp, Homo sapien
gacaggacctcttattgctgcagga

SEQ ID NO: 4133047 - DNA, 25 bp, Homo sapien
gtggaatgtactcgctatcatctaa

SEQ ID NO: 4133048 - DNA, 25 bp, Homo sapien
gattgagtggaatgtactcgctatc

SEQ ID NO: 4133049 - DNA, 25 bp, Homo sapien
gagtgattgagtggaatgtactcgc

SEQ ID NO: 4133050 - DNA, 25 bp, Homo sapien
tgagtggaatgtactcgctatcatc

SEQ ID NO: 4133051 - DNA, 25 bp, Homo sapien
ctactgccaatcaaaggcaaatcca

SEQ ID NO: 4133052 - DNA, 25 bp, Homo sapien
tgtcggtttacacactatgaactgc

SEQ ID NO: 4133053 - DNA, 25 bp, Homo sapien
tatactcgagtgtcggtttacacac

SEQ ID NO: 4133054 - DNA, 25 bp, Homo sapien
cactatgaactgctttacaaagtcc

SEQ ID NO: 4133055 - DNA, 25 bp, Homo sapien
tgttcctttagtatactcgagtgtc

SEQ ID NO: 4133056 - DNA, 25 bp, Homo sapien
ggcattgaaaaactgatagtgagct

SEQ ID NO: 4133057 - DNA, 25 bp, Homo sapien
tattcaggtaagtggtatggatagc

SEQ ID NO: 4133058 - DNA, 25 bp, Homo sapien
taagtggtatggatagccagtgcaa

SEQ ID NO: 4133059 - DNA, 25 bp, Homo sapien
agtgcaataggcattgaaaaactga

SEQ ID NO: 4133060 - DNA, 25 bp, Homo sapien
gcctgcagctggaaccgcgaatcca

SEQ ID NO: 4133061 - DNA, 25 bp, Homo sapien
tgcctgcagctggaaccgcgaatcc

SEQ ID NO: 4133062 - DNA, 25 bp, Homo sapien
gctggaaccgcgaatccagggcgcc

SEQ ID NO: 4133063 - DNA, 25 bp, Homo sapien
tgcagctggaaccgcgaatccaggg

SEQ ID NO: 4133064 - DNA, 25 bp, Homo sapien
tagcccgggtctgtagagagcactc

SEQ ID NO: 4133065 - DNA, 25 bp, Homo sapien
ggggtagcccgggtctgtagagagc

SEQ ID NO: 4133066 - DNA, 25 bp, Homo sapien
ttggggtagcccgggtctgtagaga

SEQ ID NO: 4133067 - DNA, 25 bp, Homo sapien
gcccgggtctgtagagagcactcac

SEQ ID NO: 4133068 - DNA, 25 bp, Homo sapien
gagctcaggtgctagcgggcggtag

SEQ ID NO: 4133069 - DNA, 25 bp, Homo sapien
gctcatcctcgtcaaggctcggccg

SEQ ID NO: 4133070 - DNA, 25 bp, Homo sapien
tcatcctcgtcaaggctcggccggg

SEQ ID NO: 4133071 - DNA, 25 bp, Homo sapien
gctcaggtgctagcgggcggtagct

SEQ ID NO: 4133072 - DNA, 25 bp, Homo sapien
cacgaacatttattgagcgactact

SEQ ID NO: 4133073 - DNA, 25 bp, Homo sapien
atcaccaagaggtaggagccgcggt

SEQ ID NO: 4133074 - DNA, 25 bp, Homo sapien
ggagaactggcttgtcccctcctct

SEQ ID NO: 4133075 - DNA, 25 bp, Homo sapien
tgcccttattctcgcttcagcaggg

SEQ ID NO: 4133076 - DNA, 25 bp, Homo sapien
ctgctgccgttgatgctgcattttt

SEQ ID NO: 4133077 - DNA, 25 bp, Homo sapien
tgctgccgttgatgctgcatttttt

SEQ ID NO: 4133078 - DNA, 25 bp, Homo sapien
ttcgcgtggtccgcttgctgctgcc

SEQ ID NO: 4133079 - DNA, 25 bp, Homo sapien
cgttcgcgtggtccgcttgctgctg

SEQ ID NO: 4133080 - DNA, 25 bp, Homo sapien
gaattttccggatgccaccagggac

SEQ ID NO: 4133081 - DNA, 25 bp, Homo sapien
cgggcaatcctagaattttccggat

SEQ ID NO: 4133082 - DNA, 25 bp, Homo sapien
gcaatcctagaattttccggatgcc

SEQ ID NO: 4133083 - DNA, 25 bp, Homo sapien
tcctagaattttccggatgccacca

SEQ ID NO: 4133084 - DNA, 25 bp, Homo sapien
ccggccggcgtggaagctgcacgtg

SEQ ID NO: 4133085 - DNA, 25 bp, Homo sapien
gctgcacgtggtgcccgggccagag

SEQ ID NO: 4133086 - DNA, 25 bp, Homo sapien
gggcactggcggtctccaaagggga

SEQ ID NO: 4133087 - DNA, 25 bp, Homo sapien
agccccggccggcgtggaagctgca

SEQ ID NO: 4133088 - DNA, 25 bp, Homo sapien
tagcagcatcgattgcagcttgcca

SEQ ID NO: 4133089 - DNA, 25 bp, Homo sapien
gctattcggctgagaagttggtcct

SEQ ID NO: 4133090 - DNA, 25 bp, Homo sapien
ggcagccttggcctgtctagcagca

SEQ ID NO: 4133091 - DNA, 25 bp, Homo sapien
gacagtttgcttggagctattcggc

SEQ ID NO: 4133092 - DNA, 25 bp, Homo sapien
tcttggcgtattgctgacgttttct

SEQ ID NO: 4133093 - DNA, 25 bp, Homo sapien
tattgctgacgttttctttgggaga

SEQ ID NO: 4133094 - DNA, 25 bp, Homo sapien
tttgctcttggcgtattgctgacgt

SEQ ID NO: 4133095 - DNA, 25 bp, Homo sapien
ggcgtattgctgacgttttctttgg

SEQ ID NO: 4133096 - DNA, 25 bp, Homo sapien
ggttattgagtgataaacagaaaag

SEQ ID NO: 4133097 - DNA, 25 bp, Homo sapien
aaagggcgcgggcaggtcggctgtt

SEQ ID NO: 4133098 - DNA, 25 bp, Homo sapien
ttccactatactaatgcaggctctt

SEQ ID NO: 4133099 - DNA, 25 bp, Homo sapien
aatgcaggctcttcggatggggtta

SEQ ID NO: 4133100 - DNA, 25 bp, Homo sapien
tggtaaaagagaaaatgagaaagac

SEQ ID NO: 4133101 - DNA, 25 bp, Homo sapien
gagaaaatgagaaagacttccccca

SEQ ID NO: 4133102 - DNA, 25 bp, Homo sapien
acagatggtaaaagagaaaatgaga

SEQ ID NO: 4133103 - DNA, 25 bp, Homo sapien
taaaagagaaaatgagaaagacttc

SEQ ID NO: 4133104 - DNA, 25 bp, Homo sapien
cccagggatccaactttcagatagc

SEQ ID NO: 4133105 - DNA, 25 bp, Homo sapien
tcaagggccccaatgttgttctcca

SEQ ID NO: 4133106 - DNA, 25 bp, Homo sapien
agatagcccaccttaagacttcaga

SEQ ID NO: 4133107 - DNA, 25 bp, Homo sapien
tcacttctggactcgcaatctgctc

SEQ ID NO: 4133108 - DNA, 25 bp, Homo sapien
tgctgtgactgctaggttttcggca

SEQ ID NO: 4133109 - DNA, 25 bp, Homo sapien
tcggtggtcatctcacagtggagcc

SEQ ID NO: 4133110 - DNA, 25 bp, Homo sapien
gttacactcattcttcggctgcaca

SEQ ID NO: 4133111 - DNA, 25 bp, Homo sapien
cagtggagcctcctaccaaatgacc

SEQ ID NO: 4133112 - DNA, 25 bp, Homo sapien
gaatgggatgtaaatagctaaggcc

SEQ ID NO: 4133113 - DNA, 25 bp, Homo sapien
aaaataagtttcgttcagctgcctc

SEQ ID NO: 4133114 - DNA, 25 bp, Homo sapien
cagcgtctgccctttgattttacca

SEQ ID NO: 4133115 - DNA, 25 bp, Homo sapien
cagctgcctctaaaccaatcccaaa

SEQ ID NO: 4133116 - DNA, 25 bp, Homo sapien
aatgaaaggtatttactacagatga

SEQ ID NO: 4133117 - DNA, 25 bp, Homo sapien
tgaccatgcagatacaacggacttg

SEQ ID NO: 4133118 - DNA, 25 bp, Homo sapien
tctaggtgcaaaagccatgagatgc

SEQ ID NO: 4133119 - DNA, 25 bp, Homo sapien
catgagatgccgaactacgtgacca

SEQ ID NO: 4133120 - DNA, 25 bp, Homo sapien
taaggcatctggtgccacaggcaag

SEQ ID NO: 4133121 - DNA, 25 bp, Homo sapien
gaaattaaagacgaactctgccagg

SEQ ID NO: 4133122 - DNA, 25 bp, Homo sapien
tctacaagaatataccatggagtcc

SEQ ID NO: 4133123 - DNA, 25 bp, Homo sapien
catggagtccttgtatggtcattca

SEQ ID NO: 4133124 - DNA, 25 bp, Homo sapien
gcctctcaggcaaacattaatcatt

SEQ ID NO: 4133125 - DNA, 25 bp, Homo sapien
tactctggtcattttgaggctctct

SEQ ID NO: 4133126 - DNA, 25 bp, Homo sapien
tggaaaagccgtcaatactcaatca

SEQ ID NO: 4133127 - DNA, 25 bp, Homo sapien
tactacacgagtccatctactctgg

SEQ ID NO: 4133128 - DNA, 25 bp, Homo sapien
gtcaaaatgacgtaaggcttaacaa

SEQ ID NO: 4133129 - DNA, 25 bp, Homo sapien
cggattggatattcttcttccccaa

SEQ ID NO: 4133130 - DNA, 25 bp, Homo sapien
tcaaagtagtaagcttgggaagctg

SEQ ID NO: 4133131 - DNA, 25 bp, Homo sapien
ttcagagcccatgacacattgcact

SEQ ID NO: 4133132 - DNA, 25 bp, Homo sapien
gggaagctggacacgtaattctgat

SEQ ID NO: 4133133 - DNA, 25 bp, Homo sapien
tattgccattcctcaacgtaagacc

SEQ ID NO: 4133134 - DNA, 25 bp, Homo sapien
tgttagcaaagacgtacagaaattg

SEQ ID NO: 4133135 - DNA, 25 bp, Homo sapien
cagcttggcagtccctcaaaatggg

SEQ ID NO: 4133136 - DNA, 25 bp, Homo sapien
gagcaaaggatttgatacaaacggc

SEQ ID NO: 4133137 - DNA, 25 bp, Homo sapien
tgcctgtgaccatgtctgactattt

SEQ ID NO: 4133138 - DNA, 25 bp, Homo sapien
cctttcgaccctcagaaacagtggg

SEQ ID NO: 4133139 - DNA, 25 bp, Homo sapien
gaactgtgtgcttcagagcctacca

SEQ ID NO: 4133140 - DNA, 25 bp, Homo sapien
tgtggctccaggctatatagtgtac

SEQ ID NO: 4133141 - DNA, 25 bp, Homo sapien
gaatgtcccaaggtgaaagtccaga

SEQ ID NO: 4133142 - DNA, 25 bp, Homo sapien
cagcagtcattaagcttgtctttgg

SEQ ID NO: 4133143 - DNA, 25 bp, Homo sapien
tgcttaaatgtatcttgtagttttg

SEQ ID NO: 4133144 - DNA, 25 bp, Homo sapien
agcagtcattaagcttgtctttgga

SEQ ID NO: 4133145 - DNA, 25 bp, Homo sapien
caagtctaccaagagttgggttcac

SEQ ID NO: 4133146 - DNA, 25 bp, Homo sapien
ggttcactatatccacacggtctca

SEQ ID NO: 4133147 - DNA, 25 bp, Homo sapien
tccacacggtctcaagggcctatga

SEQ ID NO: 4133148 - DNA, 25 bp, Homo sapien
ccaagagttgggttcactatatcca

SEQ ID NO: 4133149 - DNA, 25 bp, Homo sapien
gcttatcacagtcctctctagagtg

SEQ ID NO: 4133150 - DNA, 25 bp, Homo sapien
ggaatcttctagaatgtccccaact

SEQ ID NO: 4133151 - DNA, 25 bp, Homo sapien
tagagtgagcacctaaagactgtgt

SEQ ID NO: 4133152 - DNA, 25 bp, Homo sapien
cagctgaggagtgttaagtccagaa

SEQ ID NO: 4133153 - DNA, 25 bp, Homo sapien
caagagaacacatgatcctttgagt

SEQ ID NO: 4133154 - DNA, 25 bp, Homo sapien
tcctatatggatttgcagaactgct

SEQ ID NO: 4133155 - DNA, 25 bp, Homo sapien
gaaacgatctgcacaccacttctgt

SEQ ID NO: 4133156 - DNA, 25 bp, Homo sapien
tactcaaagctaaagggtcaaggtg

SEQ ID NO: 4133157 - DNA, 25 bp, Homo sapien
gcagaaagggatcttgaaggccagc

SEQ ID NO: 4133158 - DNA, 25 bp, Homo sapien
acactgctcctctgcgctgcctgat

SEQ ID NO: 4133159 - DNA, 25 bp, Homo sapien
gttgaaccctgcttggtggttccag

SEQ ID NO: 4133160 - DNA, 25 bp, Homo sapien
gggatcagtgctgttgaaccctgct

SEQ ID NO: 4133161 - DNA, 25 bp, Homo sapien
ggctgactgcaaagacgactgagaa

SEQ ID NO: 4133162 - DNA, 25 bp, Homo sapien
taaaaaccagccaatacaagtgcgg

SEQ ID NO: 4133163 - DNA, 25 bp, Homo sapien
cacaggaaggccgacagttcatgaa

SEQ ID NO: 4133164 - DNA, 25 bp, Homo sapien
catggttttcctcagatatggagca

SEQ ID NO: 4133165 - DNA, 25 bp, Homo sapien
ttaaagactttcggctgggcaccca

SEQ ID NO: 4133166 - DNA, 25 bp, Homo sapien
cctccacgccctcactcgacccctt

SEQ ID NO: 4133167 - DNA, 25 bp, Homo sapien
cacgccctcactcgaccccttaaag

SEQ ID NO: 4133168 - DNA, 25 bp, Homo sapien
taaagactttcggctgggcacccat

SEQ ID NO: 4133169 - DNA, 25 bp, Homo sapien
gctccaagaatgtcccccagtcaag

SEQ ID NO: 4133170 - DNA, 25 bp, Homo sapien
ctgacttagaggacagctccaagaa

SEQ ID NO: 4133171 - DNA, 25 bp, Homo sapien
agtcaagagctgatggcggctcctc

SEQ ID NO: 4133172 - DNA, 25 bp, Homo sapien
tcaattgccgtttggaacaccaacg

SEQ ID NO: 4133173 - DNA, 25 bp, Homo sapien
gggctagtaccttatcgtctctaag

SEQ ID NO: 4133174 - DNA, 25 bp, Homo sapien
taaaggacctaggttcagtgcagtt

SEQ ID NO: 4133175 - DNA, 25 bp, Homo sapien
catcttgtctaatctggagaggtac

SEQ ID NO: 4133176 - DNA, 25 bp, Homo sapien
catgaagttcaacacgatgcctgtc

SEQ ID NO: 4133177 - DNA, 25 bp, Homo sapien
tctcctgaagagtgcagaatggcta

SEQ ID NO: 4133178 - DNA, 25 bp, Homo sapien
ccacagcaggtctgtaaagcaggga

SEQ ID NO: 4133179 - DNA, 25 bp, Homo sapien
tttattgaacacatggccccaggtt

SEQ ID NO: 4133180 - DNA, 25 bp, Homo sapien
taaaaggtttctgagctacagggag

SEQ ID NO: 4133181 - DNA, 25 bp, Homo sapien
cacatttgctgtaaccagaggtcac

SEQ ID NO: 4133182 - DNA, 25 bp, Homo sapien
tgttgtcacatttgctgtaaccaga

SEQ ID NO: 4133183 - DNA, 25 bp, Homo sapien
attgaaggtaattcatgttgtcaca

SEQ ID NO: 4133184 - DNA, 25 bp, Homo sapien
gaagctgctcacattaatcgtaact

SEQ ID NO: 4133185 - DNA, 25 bp, Homo sapien
tactattactataacaaaatccagt

SEQ ID NO: 4133186 - DNA, 25 bp, Homo sapien
aatgtctcgactgtaaaaataatca

SEQ ID NO: 4133187 - DNA, 25 bp, Homo sapien
tccatacgctataatcttcaaaaat

SEQ ID NO: 4133188 - DNA, 25 bp, Homo sapien
taggatgtagcaataatccatacgc

SEQ ID NO: 4133189 - DNA, 25 bp, Homo sapien
cgttgagggatatatgggttgcttc

SEQ ID NO: 4133190 - DNA, 25 bp, Homo sapien
tccacgttgttttatcagcagttca

SEQ ID NO: 4133191 - DNA, 25 bp, Homo sapien
cataatgtttctgacactcatccac

SEQ ID NO: 4133192 - DNA, 25 bp, Homo sapien
gagtttatccattcgcccgttgagg

SEQ ID NO: 4133193 - DNA, 25 bp, Homo sapien
gatttgccgcttgagtggttcccgc

SEQ ID NO: 4133194 - DNA, 25 bp, Homo sapien
gcactcctgacactagtcgaagtgg

SEQ ID NO: 4133195 - DNA, 25 bp, Homo sapien
ggcacggagggctttgacatcaaag

SEQ ID NO: 4133196 - DNA, 25 bp, Homo sapien
tcgcaacactcgaaaggcacggagg

SEQ ID NO: 4133197 - DNA, 25 bp, Homo sapien
aaagcaccagtgattctgaaaccca

SEQ ID NO: 4133198 - DNA, 25 bp, Homo sapien
ctcaaagcaccagtgattctgaaac

SEQ ID NO: 4133199 - DNA, 25 bp, Homo sapien
aagcaccagtgattctgaaacccac

SEQ ID NO: 4133200 - DNA, 25 bp, Homo sapien
caaagcaccagtgattctgaaaccc

SEQ ID NO: 4133201 - DNA, 25 bp, Homo sapien
gtttttctcaattgattccacacag

SEQ ID NO: 4133202 - DNA, 25 bp, Homo sapien
tctccaccttcaaactttccatctt

SEQ ID NO: 4133203 - DNA, 25 bp, Homo sapien
ctctccaccttcaaactttccatct

SEQ ID NO: 4133204 - DNA, 25 bp, Homo sapien
tctctccaccttcaaactttccatc

SEQ ID NO: 4133205 - DNA, 25 bp, Homo sapien
gtctctccaccttcaaactttccat

SEQ ID NO: 4133206 - DNA, 25 bp, Homo sapien
tcctataatagcatagattatgatt

SEQ ID NO: 4133207 - DNA, 25 bp, Homo sapien
tagcatagattatgattacaaataa

SEQ ID NO: 4133208 - DNA, 25 bp, Homo sapien
ataataccaaaagggctatgtgaag

SEQ ID NO: 4133209 - DNA, 25 bp, Homo sapien
aaataataccaaaagggctatgtga

SEQ ID NO: 4133210 - DNA, 25 bp, Homo sapien
gttggtgatgcctccgttcgggcca

SEQ ID NO: 4133211 - DNA, 25 bp, Homo sapien
tcctacattccgtgccattggcagt

SEQ ID NO: 4133212 - DNA, 25 bp, Homo sapien
ggtgatgcactgaaacacagtaagc

SEQ ID NO: 4133213 - DNA, 25 bp, Homo sapien
cagtacactggcgtccattccctga

SEQ ID NO: 4133214 - DNA, 25 bp, Homo sapien
ttatccaagcaaagaacactccata

SEQ ID NO: 4133215 - DNA, 25 bp, Homo sapien
agcaaagaacactccataaactctc

SEQ ID NO: 4133216 - DNA, 25 bp, Homo sapien
tccaagcaaagaacactccataaac

SEQ ID NO: 4133217 - DNA, 25 bp, Homo sapien
cataaactctctccccagggtactt

SEQ ID NO: 4133218 - DNA, 25 bp, Homo sapien
ttgaatcaggatagccctggcttcc

SEQ ID NO: 4133219 - DNA, 25 bp, Homo sapien
tcctccaaaggggaccactgggcac

SEQ ID NO: 4133220 - DNA, 25 bp, Homo sapien
tggctctcttaagagttgaatcagg

SEQ ID NO: 4133221 - DNA, 25 bp, Homo sapien
acccttggcaccaggtcttcaggca

SEQ ID NO: 4133222 - DNA, 25 bp, Homo sapien
tttatcaaagaactctaccataggt

SEQ ID NO: 4133223 - DNA, 25 bp, Homo sapien
tgcctttctacatattggacccacc

SEQ ID NO: 4133224 - DNA, 25 bp, Homo sapien
aaatagtcctgttctaagtgtgcct

SEQ ID NO: 4133225 - DNA, 25 bp, Homo sapien
gaacttaatgatcccacttcccaca

SEQ ID NO: 4133226 - DNA, 25 bp, Homo sapien
ttcccgtgaaggtctgacagccagc

SEQ ID NO: 4133227 - DNA, 25 bp, Homo sapien
gacagccagcacctccgtaggagtg

SEQ ID NO: 4133228 - DNA, 25 bp, Homo sapien
agcttgaccatgagtacttcccgtg

SEQ ID NO: 4133229 - DNA, 25 bp, Homo sapien
cctccgtaggagtgtgcactgagaa

SEQ ID NO: 4133230 - DNA, 25 bp, Homo sapien
tagccaaatcagagacaacagcagc

SEQ ID NO: 4133231 - DNA, 25 bp, Homo sapien
cgaataatagcagattttggcccca

SEQ ID NO: 4133232 - DNA, 25 bp, Homo sapien
gagtcatcaaggctttcaggccgaa

SEQ ID NO: 4133233 - DNA, 25 bp, Homo sapien
tcttggtagaggacaaaactcctgc

SEQ ID NO: 4133234 - DNA, 25 bp, Homo sapien
tacaagatttagtacgaaaaatgac

SEQ ID NO: 4133235 - DNA, 25 bp, Homo sapien
gggcaattcaaatcccatagcatca

SEQ ID NO: 4133236 - DNA, 25 bp, Homo sapien
tgacccaaagatgacgagactgaca

SEQ ID NO: 4133237 - DNA, 25 bp, Homo sapien
ccgctcaatacaccaagtacaagat

SEQ ID NO: 4133238 - DNA, 25 bp, Homo sapien
aataaggacaagctcagcggctgaa

SEQ ID NO: 4133239 - DNA, 25 bp, Homo sapien
gaaacagcttgatttgggaagcctc

SEQ ID NO: 4133240 - DNA, 25 bp, Homo sapien
gtggtcttggcaactgtcctcagga

SEQ ID NO: 4133241 - DNA, 25 bp, Homo sapien
taaaatgtctggcaacccctcttgg

SEQ ID NO: 4133242 - DNA, 25 bp, Homo sapien
caggttaaggacgaaaaatgagcca

SEQ ID NO: 4133243 - DNA, 25 bp, Homo sapien
aaatgagccaaggatgatcagacta

SEQ ID NO: 4133244 - DNA, 25 bp, Homo sapien
ggatgatcagactaacaaaatacac

SEQ ID NO: 4133245 - DNA, 25 bp, Homo sapien
gagccaaggatgatcagactaacaa

SEQ ID NO: 4133246 - DNA, 25 bp, Homo sapien
caggagaaggtgcaacacggatccg

SEQ ID NO: 4133247 - DNA, 25 bp, Homo sapien
acgcagagttgcctcacacgtggca

SEQ ID NO: 4133248 - DNA, 25 bp, Homo sapien
gcattggaaacacggaatctcacag

SEQ ID NO: 4133249 - DNA, 25 bp, Homo sapien
gagcagctaggagacacgcagagtt

SEQ ID NO: 4133250 - DNA, 25 bp, Homo sapien
ctgcccacaagggttctgggatggc

SEQ ID NO: 4133251 - DNA, 25 bp, Homo sapien
cagggctgcccacaagggttctggg

SEQ ID NO: 4133252 - DNA, 25 bp, Homo sapien
agaggcggtgtggatgcagggctgc

SEQ ID NO: 4133253 - DNA, 25 bp, Homo sapien
ttctgggggtgtctgagaggcggtg

SEQ ID NO: 4133254 - DNA, 25 bp, Homo sapien
ccttgtatagaaagctcctgtggca

SEQ ID NO: 4133255 - DNA, 25 bp, Homo sapien
catggcctccgtcagtttagctggg

SEQ ID NO: 4133256 - DNA, 25 bp, Homo sapien
taggagacatgaggcgccaaggaat

SEQ ID NO: 4133257 - DNA, 25 bp, Homo sapien
taaggccactgaggtttactaggag

SEQ ID NO: 4133258 - DNA, 25 bp, Homo sapien
tctgctggggcaacggttcctgcct

SEQ ID NO: 4133259 - DNA, 25 bp, Homo sapien
taatgaacgcctaagcacaaggccg

SEQ ID NO: 4133260 - DNA, 25 bp, Homo sapien
cactgcttcaaaatgggctacccca

SEQ ID NO: 4133261 - DNA, 25 bp, Homo sapien
gcagtacctctagtgttcccttaaa

SEQ ID NO: 4133262 - DNA, 25 bp, Homo sapien
agccgggcactctacaggatctcag

SEQ ID NO: 4133263 - DNA, 25 bp, Homo sapien
gcgtaatactttgcagctgacacag

SEQ ID NO: 4133264 - DNA, 25 bp, Homo sapien
aaatccagaaaatgctacactccag

SEQ ID NO: 4133265 - DNA, 25 bp, Homo sapien
tgacattgagtacaacgttgatgtg

SEQ ID NO: 4133266 - DNA, 25 bp, Homo sapien
gaatttccaaagagtaccctgcacc

SEQ ID NO: 4133267 - DNA, 25 bp, Homo sapien
agccagcggcagagaggttaccact

SEQ ID NO: 4133268 - DNA, 25 bp, Homo sapien
gccagggaaacagacgtcagcttga

SEQ ID NO: 4133269 - DNA, 25 bp, Homo sapien
tactgaatctgttgctagcgcctgg

SEQ ID NO: 4133270 - DNA, 25 bp, Homo sapien
caagccatgtgagggtaccgaagga

SEQ ID NO: 4133271 - DNA, 25 bp, Homo sapien
atccaggagggcacatgtggccaga

SEQ ID NO: 4133272 - DNA, 25 bp, Homo sapien
tctccatctgcaaaacgagcatcca

SEQ ID NO: 4133273 - DNA, 25 bp, Homo sapien
tctgcaaaacgagcatccaggaggg

SEQ ID NO: 4133274 - DNA, 25 bp, Homo sapien
tgtggccagaggtgcctcctgggtc

SEQ ID NO: 4133275 - DNA, 25 bp, Homo sapien
cggacagagaagtcaactcagcaca

SEQ ID NO: 4133276 - DNA, 25 bp, Homo sapien
aacagcctcccctgcaacactaata

SEQ ID NO: 4133277 - DNA, 25 bp, Homo sapien
tctaacctgcacatcaacaacccag

SEQ ID NO: 4133278 - DNA, 25 bp, Homo sapien
gcaacactaataccctcaacaacct

SEQ ID NO: 4133279 - DNA, 25 bp, Homo sapien
ctacgtgacctggattctgccggcc

SEQ ID NO: 4133280 - DNA, 25 bp, Homo sapien
ccttgcctggatatgtggactactc

SEQ ID NO: 4133281 - DNA, 25 bp, Homo sapien
tgtcactgcagtgcctacacggtgc

SEQ ID NO: 4133282 - DNA, 25 bp, Homo sapien
gacatagtctaaaggtcctacgtga

SEQ ID NO: 4133283 - DNA, 25 bp, Homo sapien
cataattaacacctgctaccttttc

SEQ ID NO: 4133284 - DNA, 25 bp, Homo sapien
gaacacccatatgcctacctcacct

SEQ ID NO: 4133285 - DNA, 25 bp, Homo sapien
cctacctcacctagattccataatt

SEQ ID NO: 4133286 - DNA, 25 bp, Homo sapien
tcacctagattccataattaacacc

SEQ ID NO: 4133287 - DNA, 25 bp, Homo sapien
ccatctcgttgttggtactatatgt

SEQ ID NO: 4133288 - DNA, 25 bp, Homo sapien
gcatccttaagttctcagtctacca

SEQ ID NO: 4133289 - DNA, 25 bp, Homo sapien
gatattactgggtttgtctaccatc

SEQ ID NO: 4133290 - DNA, 25 bp, Homo sapien
tactctggagattatcatatgcatc

SEQ ID NO: 4133291 - DNA, 25 bp, Homo sapien
caagcactgcattcaacggatcata

SEQ ID NO: 4133292 - DNA, 25 bp, Homo sapien
caatcgagaggtaatgagactttca

SEQ ID NO: 4133293 - DNA, 25 bp, Homo sapien
ggtctatgtcggtgaatgttccacg

SEQ ID NO: 4133294 - DNA, 25 bp, Homo sapien
gatatagctataaatgtccctccaa

SEQ ID NO: 4133295 - DNA, 25 bp, Homo sapien
agcgacctgggttttggcaaaacag

SEQ ID NO: 4133296 - DNA, 25 bp, Homo sapien
cagaatacgagcctgcacagctggg

SEQ ID NO: 4133297 - DNA, 25 bp, Homo sapien
ccagggtcccaggaataaccaacag

SEQ ID NO: 4133298 - DNA, 25 bp, Homo sapien
gcaaaacagcctgagtctctgccat

SEQ ID NO: 4133299 - DNA, 25 bp, Homo sapien
tcagggccccgtgacaccccatctg

SEQ ID NO: 4133300 - DNA, 25 bp, Homo sapien
tctcccctcatgtggaccttccttg

SEQ ID NO: 4133301 - DNA, 25 bp, Homo sapien
acaccagtgtaatcatctcccctca

SEQ ID NO: 4133302 - DNA, 25 bp, Homo sapien
tcccctgggtctagcacaccagtgt

SEQ ID NO: 4133303 - DNA, 25 bp, Homo sapien
accaccatgctacggtcactgtcac

SEQ ID NO: 4133304 - DNA, 25 bp, Homo sapien
caccaccatgctacggtcactgtca

SEQ ID NO: 4133305 - DNA, 25 bp, Homo sapien
aaccaccaccatgctacggtcactg

SEQ ID NO: 4133306 - DNA, 25 bp, Homo sapien
ccaaccaccaccatgctacggtcac

SEQ ID NO: 4133307 - DNA, 25 bp, Homo sapien
atgtctctatttccccttggcgcca

SEQ ID NO: 4133308 - DNA, 25 bp, Homo sapien
gccacttcatataggcatgcaggaa

SEQ ID NO: 4133309 - DNA, 25 bp, Homo sapien
ccttgcaggcaggaacggacaatgt

SEQ ID NO: 4133310 - DNA, 25 bp, Homo sapien
ggaacggacaatgttgtctgtccat

SEQ ID NO: 4133311 - DNA, 25 bp, Homo sapien
tttgggtccatatcatatatgggtt

SEQ ID NO: 4133312 - DNA, 25 bp, Homo sapien
tcattctccggatcgatgtcctcag

SEQ ID NO: 4133313 - DNA, 25 bp, Homo sapien
tcctcagcttgggtgatccaatcca

SEQ ID NO: 4133314 - DNA, 25 bp, Homo sapien
agtagccctttagatcctcctccag

SEQ ID NO: 4133315 - DNA, 25 bp, Homo sapien
gaaatctccccgtgcttttgccttc

SEQ ID NO: 4133316 - DNA, 25 bp, Homo sapien
caggtgctaaagtcctggccccttc

SEQ ID NO: 4133317 - DNA, 25 bp, Homo sapien
ttaccgtatgccactctaactgctg

SEQ ID NO: 4133318 - DNA, 25 bp, Homo sapien
ctggacgcatatttaccgtatgcca

SEQ ID NO: 4133319 - DNA, 25 bp, Homo sapien
gacgcatatttaccgtatgccactc

SEQ ID NO: 4133320 - DNA, 25 bp, Homo sapien
tatttaccgtatgccactctaactg

SEQ ID NO: 4133321 - DNA, 25 bp, Homo sapien
catgaacacgagcacgcagacacag

SEQ ID NO: 4133322 - DNA, 25 bp, Homo sapien
gtgcatcctttctgacacagcagac

SEQ ID NO: 4133323 - DNA, 25 bp, Homo sapien
tttctgacacagcagacccttttct

SEQ ID NO: 4133324 - DNA, 25 bp, Homo sapien
tgaacacgagcacgcagacacaggg

SEQ ID NO: 4133325 - DNA, 25 bp, Homo sapien
caacagcagccaaaccagggcccca

SEQ ID NO: 4133326 - DNA, 25 bp, Homo sapien
tgaacacaggcaatttcattatgaa

SEQ ID NO: 4133327 - DNA, 25 bp, Homo sapien
caggttgaacacaggcaatttcatt

SEQ ID NO: 4133328 - DNA, 25 bp, Homo sapien
aatttcattatgaagcagcagaggg

SEQ ID NO: 4133329 - DNA, 25 bp, Homo sapien
cctctttaagcaagtcggccactgt

SEQ ID NO: 4133330 - DNA, 25 bp, Homo sapien
tttagccctgcgttgccgaaagcag

SEQ ID NO: 4133331 - DNA, 25 bp, Homo sapien
tgatctttagccctgcgttgccgaa

SEQ ID NO: 4133332 - DNA, 25 bp, Homo sapien
tgccgaaagcagcaaaacttctttt

SEQ ID NO: 4133333 - DNA, 25 bp, Homo sapien
acagcagcctcggttctcgccttca

SEQ ID NO: 4133334 - DNA, 25 bp, Homo sapien
acagactcagtctcgctggtgggca

SEQ ID NO: 4133335 - DNA, 25 bp, Homo sapien
tgtgttcacagactcagtctcgctg

SEQ ID NO: 4133336 - DNA, 25 bp, Homo sapien
caccgctgacgttctctgtgttcac

SEQ ID NO: 4133337 - DNA, 25 bp, Homo sapien
ccttggccgcgcctctccgtctcca

SEQ ID NO: 4133338 - DNA, 25 bp, Homo sapien
gccttggccgcgcctctccgtctcc

SEQ ID NO: 4133339 - DNA, 25 bp, Homo sapien
caccgccgacacccagagggccccg

SEQ ID NO: 4133340 - DNA, 25 bp, Homo sapien
cgccttggccgcgcctctccgtctc

SEQ ID NO: 4133341 - DNA, 25 bp, Homo sapien
catttgctgctactaccgcagaggg

SEQ ID NO: 4133342 - DNA, 25 bp, Homo sapien
cacaaatggttgcatattctgccca

SEQ ID NO: 4133343 - DNA, 25 bp, Homo sapien
tgcttcatgatgtctcagagagggc

SEQ ID NO: 4133344 - DNA, 25 bp, Homo sapien
gagggagcactgcactaggagtccc

SEQ ID NO: 4133345 - DNA, 25 bp, Homo sapien
tgagtttggattttgagatggcttg

SEQ ID NO: 4133346 - DNA, 25 bp, Homo sapien
ctgagtttggattttgagatggctt

SEQ ID NO: 4133347 - DNA, 25 bp, Homo sapien
gagtttggattttgagatggcttga

SEQ ID NO: 4133348 - DNA, 25 bp, Homo sapien
catatgcagcccttaagtgggttag

SEQ ID NO: 4133349 - DNA, 25 bp, Homo sapien
tagatattcatagattcacgtgcag

SEQ ID NO: 4133350 - DNA, 25 bp, Homo sapien
tcctatatccaccatatgggacgtg

SEQ ID NO: 4133351 - DNA, 25 bp, Homo sapien
gcacacatatgcagttcctatatcc

SEQ ID NO: 4133352 - DNA, 25 bp, Homo sapien
gcggccctacatcttctgcgattga

SEQ ID NO: 4133353 - DNA, 25 bp, Homo sapien
tcagaaacaccaggacgataaccag

SEQ ID NO: 4133354 - DNA, 25 bp, Homo sapien
gattgaatcggttccagcgacgcca

SEQ ID NO: 4133355 - DNA, 25 bp, Homo sapien
gataaccagccagtaaaacgtgaca

SEQ ID NO: 4133356 - DNA, 25 bp, Homo sapien
gacatgatttccagttccaccaaga

SEQ ID NO: 4133357 - DNA, 25 bp, Homo sapien
gcatctcgcaggtgaacagagccaa

SEQ ID NO: 4133358 - DNA, 25 bp, Homo sapien
agattcttaagaggcgcacacaccg

SEQ ID NO: 4133359 - DNA, 25 bp, Homo sapien
gagacgaaatatgcttggaggccca

SEQ ID NO: 4133360 - DNA, 25 bp, Homo sapien
aaagcagaagcaacagcgaagcgat

SEQ ID NO: 4133361 - DNA, 25 bp, Homo sapien
aaaggtgctccgcttggtttgcgtt

SEQ ID NO: 4133362 - DNA, 25 bp, Homo sapien
tcatggagtttaataaggatgccac

SEQ ID NO: 4133363 - DNA, 25 bp, Homo sapien
acagcgaagcgatggacttcatgga

SEQ ID NO: 4133364 - DNA, 25 bp, Homo sapien
ggatgggcccccgtaagccatgatg

SEQ ID NO: 4133365 - DNA, 25 bp, Homo sapien
tacatcacagcattccagtcttcgc

SEQ ID NO: 4133366 - DNA, 25 bp, Homo sapien
gccatgatgccatcgtacatcacag

SEQ ID NO: 4133367 - DNA, 25 bp, Homo sapien
gatcattcctgaagaggatgggccc

SEQ ID NO: 4133368 - DNA, 25 bp, Homo sapien
accagataacgacggcaacaacaaa

SEQ ID NO: 4133369 - DNA, 25 bp, Homo sapien
gataacgacggcaacaacaaagcct

SEQ ID NO: 4133370 - DNA, 25 bp, Homo sapien
acaaaaccagataacgacggcaaca

SEQ ID NO: 4133371 - DNA, 25 bp, Homo sapien
aaaccagataacgacggcaacaaca

SEQ ID NO: 4133372 - DNA, 25 bp, Homo sapien
ttcaactttttaagggcacaacaca

SEQ ID NO: 4133373 - DNA, 25 bp, Homo sapien
tacagcgatggccaagaagacattc

SEQ ID NO: 4133374 - DNA, 25 bp, Homo sapien
gccaagaagacattcagtagaatat

SEQ ID NO: 4133375 - DNA, 25 bp, Homo sapien
gatggccaagaagacattcagtaga

SEQ ID NO: 4133376 - DNA, 25 bp, Homo sapien
tggccaagaagacattcagtagaat

SEQ ID NO: 4133377 - DNA, 25 bp, Homo sapien
agtgttcagactttcagcatcagcc

SEQ ID NO: 4133378 - DNA, 25 bp, Homo sapien
gtcactgttggctatctggttgact

SEQ ID NO: 4133379 - DNA, 25 bp, Homo sapien
actgttggctatctggttgacttct

SEQ ID NO: 4133380 - DNA, 25 bp, Homo sapien
ctgttggctatctggttgacttctg

SEQ ID NO: 4133381 - DNA, 25 bp, Homo sapien
cactgttggctatctggttgacttc

SEQ ID NO: 4133382 - DNA, 25 bp, Homo sapien
tcgcaaggcggataggggtccttgt

SEQ ID NO: 4133383 - DNA, 25 bp, Homo sapien
atcgcaaggcggataggggtccttg

SEQ ID NO: 4133384 - DNA, 25 bp, Homo sapien
aaggcgagctaactggtcccacggc

SEQ ID NO: 4133385 - DNA, 25 bp, Homo sapien
cagctcatgtgcacgctgctgggct

SEQ ID NO: 4133386 - DNA, 25 bp, Homo sapien
agctcatgtgcacgctgctgggctg

SEQ ID NO: 4133387 - DNA, 25 bp, Homo sapien
gaccatgggaaaaaggcgagctaac

SEQ ID NO: 4133388 - DNA, 25 bp, Homo sapien
aactccgagatccttcgaggacggg

SEQ ID NO: 4133389 - DNA, 25 bp, Homo sapien
gaagaaagcgctcccttcagggatg

SEQ ID NO: 4133390 - DNA, 25 bp, Homo sapien
ttgctaagaatgaagaaagcgctcc

SEQ ID NO: 4133391 - DNA, 25 bp, Homo sapien
ttcatgttcaactccgagatccttc

SEQ ID NO: 4133392 - DNA, 25 bp, Homo sapien
tcccagatagggtggaacacactgg

SEQ ID NO: 4133393 - DNA, 25 bp, Homo sapien
tgcttggaaacagtcccagataggg

SEQ ID NO: 4133394 - DNA, 25 bp, Homo sapien
ctgcagggaaaagccgctgcttgga

SEQ ID NO: 4133395 - DNA, 25 bp, Homo sapien
ggaaaagccgctgcttggaaacagt

SEQ ID NO: 4133396 - DNA, 25 bp, Homo sapien
catgatgaagacaaggatgaggttg

SEQ ID NO: 4133397 - DNA, 25 bp, Homo sapien
ctcagcatgatgaagacaaggatga

SEQ ID NO: 4133398 - DNA, 25 bp, Homo sapien
cgtgttccggaaggagtggctgcgg

SEQ ID NO: 4133399 - DNA, 25 bp, Homo sapien
tgagcttgtggcagcctacgcggat

SEQ ID NO: 4133400 - DNA, 25 bp, Homo sapien
tgtgaaggcatagtcaaagtaaccc

SEQ ID NO: 4133401 - DNA, 25 bp, Homo sapien
cttcaacaggatctcaacagtaaag

SEQ ID NO: 4133402 - DNA, 25 bp, Homo sapien
ggctgtgaaggcatagtcaaagtaa

SEQ ID NO: 4133403 - DNA, 25 bp, Homo sapien
aagatggctgtgaaggcatagtcaa

SEQ ID NO: 4133404 - DNA, 25 bp, Homo sapien
aagacatagtctgcgtaacctagca

SEQ ID NO: 4133405 - DNA, 25 bp, Homo sapien
gaagacatagtctgcgtaacctagc

SEQ ID NO: 4133406 - DNA, 25 bp, Homo sapien
agacatagtctgcgtaacctagcat

SEQ ID NO: 4133407 - DNA, 25 bp, Homo sapien
ggcccctttgtggaggaaagctcca

SEQ ID NO: 4133408 - DNA, 25 bp, Homo sapien
tgcagaaggcccctttgtggaggaa

SEQ ID NO: 4133409 - DNA, 25 bp, Homo sapien
cagaaggcccctttgtggaggaaag

SEQ ID NO: 4133410 - DNA, 25 bp, Homo sapien
gcccctttgtggaggaaagctccaa

SEQ ID NO: 4133411 - DNA, 25 bp, Homo sapien
aatgacaccagagacaccccaacca

SEQ ID NO: 4133412 - DNA, 25 bp, Homo sapien
caaatgacaccagagacaccccaac

SEQ ID NO: 4133413 - DNA, 25 bp, Homo sapien
atgacaccagagacaccccaaccac

SEQ ID NO: 4133414 - DNA, 25 bp, Homo sapien
aaatgacaccagagacaccccaacc

SEQ ID NO: 4133415 - DNA, 25 bp, Homo sapien
aggacccttaagaccctcagaatct

SEQ ID NO: 4133416 - DNA, 25 bp, Homo sapien
gacgcaggacccttaagaccctcag

SEQ ID NO: 4133417 - DNA, 25 bp, Homo sapien
tgatggccctgaggggacgcaggac

SEQ ID NO: 4133418 - DNA, 25 bp, Homo sapien
gcaggacccttaagaccctcagaat

SEQ ID NO: 4133419 - DNA, 25 bp, Homo sapien
ggtgagctaacatcagccgacagtt

SEQ ID NO: 4133420 - DNA, 25 bp, Homo sapien
cagaggggcgtgactcttctttgtg

SEQ ID NO: 4133421 - DNA, 25 bp, Homo sapien
gattttggccttgaggtgagctaac

SEQ ID NO: 4133422 - DNA, 25 bp, Homo sapien
ttgaggtgagctaacatcagccgac

SEQ ID NO: 4133423 - DNA, 25 bp, Homo sapien
caggagggtggtgacgatcatgatg

SEQ ID NO: 4133424 - DNA, 25 bp, Homo sapien
agggtggtgacgatcatgatgttgc

SEQ ID NO: 4133425 - DNA, 25 bp, Homo sapien
ccacgaagacgcactggaccacgtg

SEQ ID NO: 4133426 - DNA, 25 bp, Homo sapien
gatggccacgaagacgcactggacc

SEQ ID NO: 4133427 - DNA, 25 bp, Homo sapien
gcttcatccgtacagcgatagaact

SEQ ID NO: 4133428 - DNA, 25 bp, Homo sapien
ttttggcttcatccgtacagcgata

SEQ ID NO: 4133429 - DNA, 25 bp, Homo sapien
catccgtacagcgatagaacttccc

SEQ ID NO: 4133430 - DNA, 25 bp, Homo sapien
tggcttcatccgtacagcgatagaa

SEQ ID NO: 4133431 - DNA, 25 bp, Homo sapien
tcatagcagagaggacgttgtcgaa

SEQ ID NO: 4133432 - DNA, 25 bp, Homo sapien
cgttcacggaccacaggactgtcaa

SEQ ID NO: 4133433 - DNA, 25 bp, Homo sapien
gagactgtgaagagcgccatcatag

SEQ ID NO: 4133434 - DNA, 25 bp, Homo sapien
ctgttttgccagatccgttcacgga

SEQ ID NO: 4133435 - DNA, 25 bp, Homo sapien
tgaagaaagctacaatgatgatgta

SEQ ID NO: 4133436 - DNA, 25 bp, Homo sapien
gaaatgtaacgatgacaaagcccac

SEQ ID NO: 4133437 - DNA, 25 bp, Homo sapien
tctccacgcggtggttgtagattgg

SEQ ID NO: 4133438 - DNA, 25 bp, Homo sapien
gtagattgggccgatgttctctcca

SEQ ID NO: 4133439 - DNA, 25 bp, Homo sapien
gaagccaaaacagtgtgtgacttta

SEQ ID NO: 4133440 - DNA, 25 bp, Homo sapien
agccaaaacagtgtgtgactttaac

SEQ ID NO: 4133441 - DNA, 25 bp, Homo sapien
cagaagccaaaacagtgtgtgactt

SEQ ID NO: 4133442 - DNA, 25 bp, Homo sapien
caagggacagaagccaaaacagtgt

SEQ ID NO: 4133443 - DNA, 25 bp, Homo sapien
gatgtatctccgcaagggacgtgct

SEQ ID NO: 4133444 - DNA, 25 bp, Homo sapien
ctttcaaggcgtattcaacacactg

SEQ ID NO: 4133445 - DNA, 25 bp, Homo sapien
cgtaccagaacttgtactggtaggg

SEQ ID NO: 4133446 - DNA, 25 bp, Homo sapien
ggcgaagagttcaccacgtaccaga

SEQ ID NO: 4133447 - DNA, 25 bp, Homo sapien
gtgaacaccccggtgaagaccatgt

SEQ ID NO: 4133448 - DNA, 25 bp, Homo sapien
tgaacatcttggactgctcgtagtg

SEQ ID NO: 4133449 - DNA, 25 bp, Homo sapien
gactttcaaaaccatctcgacggtg

SEQ ID NO: 4133450 - DNA, 25 bp, Homo sapien
tgttcagaatgtccatggcatcatt

SEQ ID NO: 4133451 - DNA, 25 bp, Homo sapien
cgtataggggcgaatccgagtccct

SEQ ID NO: 4133452 - DNA, 25 bp, Homo sapien
aggggcgaatccgagtccctgccgc

SEQ ID NO: 4133453 - DNA, 25 bp, Homo sapien
cacacggaccgtataggggcgaatc

SEQ ID NO: 4133454 - DNA, 25 bp, Homo sapien
cacggaccgtataggggcgaatccg

SEQ ID NO: 4133455 - DNA, 25 bp, Homo sapien
acgatgagggagtcaaacgtgttcc

SEQ ID NO: 4133456 - DNA, 25 bp, Homo sapien
ctgagggccacgtctataatgctgc

SEQ ID NO: 4133457 - DNA, 25 bp, Homo sapien
attacgatgagggagtcaaacgtgt

SEQ ID NO: 4133458 - DNA, 25 bp, Homo sapien
gtctataatgctgccgattacgatg

SEQ ID NO: 4133459 - DNA, 25 bp, Homo sapien
aacgacgctaccaacaacaattaag

SEQ ID NO: 4133460 - DNA, 25 bp, Homo sapien
agtgttccatgcatcagtgaaatag

SEQ ID NO: 4133461 - DNA, 25 bp, Homo sapien
gcaatatcaacgacgctaccaacaa

SEQ ID NO: 4133462 - DNA, 25 bp, Homo sapien
ttcagttatagcaatatcaacgacg

SEQ ID NO: 4133463 - DNA, 25 bp, Homo sapien
ttatatatacttgccgctacaattt

SEQ ID NO: 4133464 - DNA, 25 bp, Homo sapien
cttatatatacttgccgctacaatt

SEQ ID NO: 4133465 - DNA, 25 bp, Homo sapien
tatatatacttgccgctacaatttt

SEQ ID NO: 4133466 - DNA, 25 bp, Homo sapien
gcttatatatacttgccgctacaat

SEQ ID NO: 4133467 - DNA, 25 bp, Homo sapien
gctggaacgcaagtgggctacgcta

SEQ ID NO: 4133468 - DNA, 25 bp, Homo sapien
taaagctggcccgagtagttaacag

SEQ ID NO: 4133469 - DNA, 25 bp, Homo sapien
actaggtagctttccaaacatggcc

SEQ ID NO: 4133470 - DNA, 25 bp, Homo sapien
taatgccctttagatctcgagcggc

SEQ ID NO: 4133471 - DNA, 25 bp, Homo sapien
caggtgtagcagttgggacagggac

SEQ ID NO: 4133472 - DNA, 25 bp, Homo sapien
cccaggtgtagcagttgggacaggg

SEQ ID NO: 4133473 - DNA, 25 bp, Homo sapien
tcggaaaactgcgtccacacagcac

SEQ ID NO: 4133474 - DNA, 25 bp, Homo sapien
tgctaacaacacagagctcggaaaa

SEQ ID NO: 4133475 - DNA, 25 bp, Homo sapien
acacagagctcggaaaactgcgtcc

SEQ ID NO: 4133476 - DNA, 25 bp, Homo sapien
agagttacatgctaacaacacagag

SEQ ID NO: 4133477 - DNA, 25 bp, Homo sapien
tatcatggagaggtcaaacccaatg

SEQ ID NO: 4133478 - DNA, 25 bp, Homo sapien
aacccaatggaaagtagaacatgca

SEQ ID NO: 4133479 - DNA, 25 bp, Homo sapien
gggttatcatggagaggtcaaaccc

SEQ ID NO: 4133480 - DNA, 25 bp, Homo sapien
gttatcatggagaggtcaaacccaa

SEQ ID NO: 4133481 - DNA, 25 bp, Homo sapien
gtgatggagattctattgctctctt

SEQ ID NO: 4133482 - DNA, 25 bp, Homo sapien
gaagcttcaccaatcgcatcactcg

SEQ ID NO: 4133483 - DNA, 25 bp, Homo sapien
tccacagcaatgtccggatgccttc

SEQ ID NO: 4133484 - DNA, 25 bp, Homo sapien
gcatcactcggaaaagacggaaaaa

SEQ ID NO: 4133485 - DNA, 25 bp, Homo sapien
agagaagtccttggcatggctctta

SEQ ID NO: 4133486 - DNA, 25 bp, Homo sapien
caaagagagaagtccttggcatggc

SEQ ID NO: 4133487 - DNA, 25 bp, Homo sapien
aagagagaagtccttggcatggctc

SEQ ID NO: 4133488 - DNA, 25 bp, Homo sapien
agacaaagagagaagtccttggcat

SEQ ID NO: 4133489 - DNA, 25 bp, Homo sapien
catcacatgtgaccaacacgtctac

SEQ ID NO: 4133490 - DNA, 25 bp, Homo sapien
tcatcacatgtgaccaacacgtcta

SEQ ID NO: 4133491 - DNA, 25 bp, Homo sapien
ctcatcacatgtgaccaacacgtct

SEQ ID NO: 4133492 - DNA, 25 bp, Homo sapien
tgtccccgtgacggcccgccacagc

SEQ ID NO: 4133493 - DNA, 25 bp, Homo sapien
ctgtccccgtgacggcccgccacag

SEQ ID NO: 4133494 - DNA, 25 bp, Homo sapien
tgggagagaaaaggcacttggctca

SEQ ID NO: 4133495 - DNA, 25 bp, Homo sapien
aaaggcacttggctcagcaccagcc

SEQ ID NO: 4133496 - DNA, 25 bp, Homo sapien
ctgggagagaaaaggcacttggctc

SEQ ID NO: 4133497 - DNA, 25 bp, Homo sapien
agaaaaggcacttggctcagcacca

SEQ ID NO: 4133498 - DNA, 25 bp, Homo sapien
tgaggagggccacatacgggagcgc

SEQ ID NO: 4133499 - DNA, 25 bp, Homo sapien
agaacagcatggctatgaggagggc

SEQ ID NO: 4133500 - DNA, 25 bp, Homo sapien
cagcatggctatgaggagggccaca

SEQ ID NO: 4133501 - DNA, 25 bp, Homo sapien
catggctatgaggagggccacatac

SEQ ID NO: 4133502 - DNA, 25 bp, Homo sapien
agcagcaccgcctggggaaacgtct

SEQ ID NO: 4133503 - DNA, 25 bp, Homo sapien
ctggaagttattgttcctattgatc

SEQ ID NO: 4133504 - DNA, 25 bp, Homo sapien
cctattgatctggttgttatctctc

SEQ ID NO: 4133505 - DNA, 25 bp, Homo sapien
tctggttgttatctctcatggcaac

SEQ ID NO: 4133506 - DNA, 25 bp, Homo sapien
aaactgatgaaatagacaatggcaa

SEQ ID NO: 4133507 - DNA, 25 bp, Homo sapien
cacatgtatactcctccccggggtt

SEQ ID NO: 4133508 - DNA, 25 bp, Homo sapien
aatgcacagagcatgtaaaaactga

SEQ ID NO: 4133509 - DNA, 25 bp, Homo sapien
ctccccggggttgtaatctgactca

SEQ ID NO: 4133510 - DNA, 25 bp, Homo sapien
ccagtcccgggtcagatagtcgaaa

SEQ ID NO: 4133511 - DNA, 25 bp, Homo sapien
tgacagccacaaacagattgatgat

SEQ ID NO: 4133512 - DNA, 25 bp, Homo sapien
ggtgaggccccaaaatagaccagtc

SEQ ID NO: 4133513 - DNA, 25 bp, Homo sapien
tgaattcatctaaatggtgaggccc

SEQ ID NO: 4133514 - DNA, 25 bp, Homo sapien
ctggatgcgtcgaagcagagtgacc

SEQ ID NO: 4133515 - DNA, 25 bp, Homo sapien
tgcacgctaccctgtgtggacataa

SEQ ID NO: 4133516 - DNA, 25 bp, Homo sapien
agcagagtgaccacatcaaggtgtt

SEQ ID NO: 4133517 - DNA, 25 bp, Homo sapien
taccctgtgtggacataacttccca

SEQ ID NO: 4133518 - DNA, 25 bp, Homo sapien
gagccgttcgaaccaaagcaaacag

SEQ ID NO: 4133519 - DNA, 25 bp, Homo sapien
cttcggtcttgatcttaagagccgt

SEQ ID NO: 4133520 - DNA, 25 bp, Homo sapien
agcaaacagggttgcattaaacatg

SEQ ID NO: 4133521 - DNA, 25 bp, Homo sapien
ttgatcttaagagccgttcgaacca

SEQ ID NO: 4133522 - DNA, 25 bp, Homo sapien
agctggagggacaacttggtcaagt

SEQ ID NO: 4133523 - DNA, 25 bp, Homo sapien
gctggagggacaacttggtcaagta

SEQ ID NO: 4133524 - DNA, 25 bp, Homo sapien
tggagggacaacttggtcaagtaat

SEQ ID NO: 4133525 - DNA, 25 bp, Homo sapien
ctggagggacaacttggtcaagtaa

SEQ ID NO: 4133526 - DNA, 25 bp, Homo sapien
gctctcccgaatcagcacattagac

SEQ ID NO: 4133527 - DNA, 25 bp, Homo sapien
tagaccaagagcctaaacacttgct

SEQ ID NO: 4133528 - DNA, 25 bp, Homo sapien
gagaccagacagagctctcccgaat

SEQ ID NO: 4133529 - DNA, 25 bp, Homo sapien
taaacggagagaccagacagagctc

SEQ ID NO: 4133530 - DNA, 25 bp, Homo sapien
tcttgaatttcctaaagtagtcctg

SEQ ID NO: 4133531 - DNA, 25 bp, Homo sapien
tagggcaattgtggtgttcttcgca

SEQ ID NO: 4133532 - DNA, 25 bp, Homo sapien
gaaagtggcatagaacttccccacg

SEQ ID NO: 4133533 - DNA, 25 bp, Homo sapien
agtagtcctgtatcaggaaagtggc

SEQ ID NO: 4133534 - DNA, 25 bp, Homo sapien
cactgcgacggccatgctccacttt

SEQ ID NO: 4133535 - DNA, 25 bp, Homo sapien
actttccattagcacgcagtctgcc

SEQ ID NO: 4133536 - DNA, 25 bp, Homo sapien
gcctaggtccgcacttctgcgctca

SEQ ID NO: 4133537 - DNA, 25 bp, Homo sapien
acttctgcgctcacactgcgacggc

SEQ ID NO: 4133538 - DNA, 25 bp, Homo sapien
acagactgcaccctacgcagcacaa

SEQ ID NO: 4133539 - DNA, 25 bp, Homo sapien
tcagacagactgcaccctacgcagc

SEQ ID NO: 4133540 - DNA, 25 bp, Homo sapien
tgcaccctacgcagcacaagcacgc

SEQ ID NO: 4133541 - DNA, 25 bp, Homo sapien
gactgcaccctacgcagcacaagca

SEQ ID NO: 4133542 - DNA, 25 bp, Homo sapien
tctcatctgttagcatctgttctcc

SEQ ID NO: 4133543 - DNA, 25 bp, Homo sapien
gcatctgttctcctcttagattaaa

SEQ ID NO: 4133544 - DNA, 25 bp, Homo sapien
tcatctgttagcatctgttctcctc

SEQ ID NO: 4133545 - DNA, 25 bp, Homo sapien
tgttagcatctgttctcctcttaga

SEQ ID NO: 4133546 - DNA, 25 bp, Homo sapien
tccgactaaccagcttggtgccgta

SEQ ID NO: 4133547 - DNA, 25 bp, Homo sapien
tttcaaggccttagccacaaacgcc

SEQ ID NO: 4133548 - DNA, 25 bp, Homo sapien
aaattctaaagcatccgttcaagca

SEQ ID NO: 4133549 - DNA, 25 bp, Homo sapien
ttggtgccgtagctcaggcagaaaa

SEQ ID NO: 4133550 - DNA, 25 bp, Homo sapien
gcggactggcatacaaaaggaactc

SEQ ID NO: 4133551 - DNA, 25 bp, Homo sapien
cactttgggtgtcttgggctcagca

SEQ ID NO: 4133552 - DNA, 25 bp, Homo sapien
ttccaaagaggcatccccagactgg

SEQ ID NO: 4133553 - DNA, 25 bp, Homo sapien
cctgtggacacgttaagatggaacc

SEQ ID NO: 4133554 - DNA, 25 bp, Homo sapien
acagctgccttcctcactgtggtcc

SEQ ID NO: 4133555 - DNA, 25 bp, Homo sapien
ctcccctggcgccctcacagctgcc

SEQ ID NO: 4133556 - DNA, 25 bp, Homo sapien
tcccctggcgccctcacagctgcct

SEQ ID NO: 4133557 - DNA, 25 bp, Homo sapien
gctgccttcctcactgtggtccctg

SEQ ID NO: 4133558 - DNA, 25 bp, Homo sapien
gaagatcacaacaaactgaaagtgg

SEQ ID NO: 4133559 - DNA, 25 bp, Homo sapien
gaagacacccctggtagatccctct

SEQ ID NO: 4133560 - DNA, 25 bp, Homo sapien
gaaagtggcttatcagcctttgcag

SEQ ID NO: 4133561 - DNA, 25 bp, Homo sapien
tgggcccgtcacagatactctgcat

SEQ ID NO: 4133562 - DNA, 25 bp, Homo sapien
ggatttctggcccaatgtcatgcag

SEQ ID NO: 4133563 - DNA, 25 bp, Homo sapien
tatagcacgccggatttctggccca

SEQ ID NO: 4133564 - DNA, 25 bp, Homo sapien
tgtcatgcagtgtccttaatcccgc

SEQ ID NO: 4133565 - DNA, 25 bp, Homo sapien
ttgcaaatcacacgatatagcacgc

SEQ ID NO: 4133566 - DNA, 25 bp, Homo sapien
catgggcagctttggacatattggc

SEQ ID NO: 4133567 - DNA, 25 bp, Homo sapien
gacatggtttccaagcagggcacca

SEQ ID NO: 4133568 - DNA, 25 bp, Homo sapien
gacacaccgaatttcctgctggagg

SEQ ID NO: 4133569 - DNA, 25 bp, Homo sapien
gaaacagcggtttctcagtatcact

SEQ ID NO: 4133570 - DNA, 25 bp, Homo sapien
ctaatgtaagtttcataatagcggg

SEQ ID NO: 4133571 - DNA, 25 bp, Homo sapien
aatgtaagtttcataatagcgggtt

SEQ ID NO: 4133572 - DNA, 25 bp, Homo sapien
taatgtaagtttcataatagcgggt

SEQ ID NO: 4133573 - DNA, 25 bp, Homo sapien
gggcgagctgtcatcctcgtagcat

SEQ ID NO: 4133574 - DNA, 25 bp, Homo sapien
gtgggggtccctgaaatagccatgt

SEQ ID NO: 4133575 - DNA, 25 bp, Homo sapien
tgtcatcctcgtagcattcctcact

SEQ ID NO: 4133576 - DNA, 25 bp, Homo sapien
gtcttcccggcaaatagttgggagc

SEQ ID NO: 4133577 - DNA, 25 bp, Homo sapien
gagtcgatgtttctgcctgggtatc

SEQ ID NO: 4133578 - DNA, 25 bp, Homo sapien
gagatctccgtgaatcatagcaaac

SEQ ID NO: 4133579 - DNA, 25 bp, Homo sapien
tgcctgggtatctgctgtagtagcc

SEQ ID NO: 4133580 - DNA, 25 bp, Homo sapien
ggcgagtcatcgtcctccaagaatc

SEQ ID NO: 4133581 - DNA, 25 bp, Homo sapien
tgcagttggcagactcagaagccga

SEQ ID NO: 4133582 - DNA, 25 bp, Homo sapien
ccaagtaggcagtagacaaaggccg

SEQ ID NO: 4133583 - DNA, 25 bp, Homo sapien
tcatttagctgcatgtgttcagggc

SEQ ID NO: 4133584 - DNA, 25 bp, Homo sapien
tggaaatgggtctggtcacactccc

SEQ ID NO: 4133585 - DNA, 25 bp, Homo sapien
gaaaatgcttgtcctgctaacagct

SEQ ID NO: 4133586 - DNA, 25 bp, Homo sapien
ccaggcccgggagatcagtctgaat

SEQ ID NO: 4133587 - DNA, 25 bp, Homo sapien
gaggttaacaagacaatccacagct

SEQ ID NO: 4133588 - DNA, 25 bp, Homo sapien
gaaagattcagcttctctagcactg

SEQ ID NO: 4133589 - DNA, 25 bp, Homo sapien
cagcccatagggcaactgatccgag

SEQ ID NO: 4133590 - DNA, 25 bp, Homo sapien
aactgatccgagtcagaagccctgg

SEQ ID NO: 4133591 - DNA, 25 bp, Homo sapien
aagccctggcgctgcatactgtggg

SEQ ID NO: 4133592 - DNA, 25 bp, Homo sapien
ttaaacgttcgcctgttctcaggag

SEQ ID NO: 4133593 - DNA, 25 bp, Homo sapien
tgaagcaagttctctgccgggacac

SEQ ID NO: 4133594 - DNA, 25 bp, Homo sapien
aagcaaagggcatcacacagctgtg

SEQ ID NO: 4133595 - DNA, 25 bp, Homo sapien
aagaagcatgcggtttgtccaagag

SEQ ID NO: 4133596 - DNA, 25 bp, Homo sapien
cgggacaccgtctttcagagtcagg

SEQ ID NO: 4133597 - DNA, 25 bp, Homo sapien
caggcactcaaagttgaaggaggat

SEQ ID NO: 4133598 - DNA, 25 bp, Homo sapien
tctgccggcgcaggcactcaaagtt

SEQ ID NO: 4133599 - DNA, 25 bp, Homo sapien
ctgcattagatgcagaggcagggcc

SEQ ID NO: 4133600 - DNA, 25 bp, Homo sapien
agacgacgggacctcttcctggctg

SEQ ID NO: 4133601 - DNA, 25 bp, Homo sapien
tacttgaatctaggccggcaactgc

SEQ ID NO: 4133602 - DNA, 25 bp, Homo sapien
tcgctgtttttgttccggaagctgc

SEQ ID NO: 4133603 - DNA, 25 bp, Homo sapien
gatgtcgggctcgtctgtgtaccag

SEQ ID NO: 4133604 - DNA, 25 bp, Homo sapien
gactcggtgagtacttctgggcttt

SEQ ID NO: 4133605 - DNA, 25 bp, Homo sapien
ggtcacaggcatcagcgatttcgtg

SEQ ID NO: 4133606 - DNA, 25 bp, Homo sapien
gggacgcacgttcccattaagcagg

SEQ ID NO: 4133607 - DNA, 25 bp, Homo sapien
tgtagctcatagtcctgccggtgtg

SEQ ID NO: 4133608 - DNA, 25 bp, Homo sapien
tgcatagcgtcccaagccttcggat

SEQ ID NO: 4133609 - DNA, 25 bp, Homo sapien
tgtgatgccacaagacccaacagag

SEQ ID NO: 4133610 - DNA, 25 bp, Homo sapien
tattcgatgagaggttgaaccaggc

SEQ ID NO: 4133611 - DNA, 25 bp, Homo sapien
tattaggacccatggatattgctgc

SEQ ID NO: 4133612 - DNA, 25 bp, Homo sapien
tgactgatatgctagaccgatggct

SEQ ID NO: 4133613 - DNA, 25 bp, Homo sapien
gactctctcatactggtcttgggaa

SEQ ID NO: 4133614 - DNA, 25 bp, Homo sapien
tgtagacgtccacaggaacagacta

SEQ ID NO: 4133615 - DNA, 25 bp, Homo sapien
gaaaacacagttaagcacagccatg

SEQ ID NO: 4133616 - DNA, 25 bp, Homo sapien
ggaatgccgcttggcttcactacca

SEQ ID NO: 4133617 - DNA, 25 bp, Homo sapien
gctgaggcagtaagtcacacagtag

SEQ ID NO: 4133618 - DNA, 25 bp, Homo sapien
ccagacccacggagggttcgcgaag

SEQ ID NO: 4133619 - DNA, 25 bp, Homo sapien
gggctggcacataagtccccagtgt

SEQ ID NO: 4133620 - DNA, 25 bp, Homo sapien
tcgctgcctaatttcactctcagag

SEQ ID NO: 4133621 - DNA, 25 bp, Homo sapien
cctgataagccaagagggccagcac

SEQ ID NO: 4133622 - DNA, 25 bp, Homo sapien
caatcatgatcgcagagaaggcagc

SEQ ID NO: 4133623 - DNA, 25 bp, Homo sapien
aggtggtaccctactcagtggctga

SEQ ID NO: 4133624 - DNA, 25 bp, Homo sapien
tatctagcacactaggacccaggtg

SEQ ID NO: 4133625 - DNA, 25 bp, Homo sapien
ccgcagacaagggtcctcggggtgg

SEQ ID NO: 4133626 - DNA, 25 bp, Homo sapien
atccgcagacaagggtcctcggggt

SEQ ID NO: 4133627 - DNA, 25 bp, Homo sapien
gatccgcagacaagggtcctcgggg

SEQ ID NO: 4133628 - DNA, 25 bp, Homo sapien
ggatccgcagacaagggtcctcggg

SEQ ID NO: 4133629 - DNA, 25 bp, Homo sapien
gctacccgctcaccgaggacatgaa

SEQ ID NO: 4133630 - DNA, 25 bp, Homo sapien
atccctcaatgccatggtctacgtc

SEQ ID NO: 4133631 - DNA, 25 bp, Homo sapien
tacgtccgtgggcacgccgaggact

SEQ ID NO: 4133632 - DNA, 25 bp, Homo sapien
cgctgcactgcgcattcctggaggc

SEQ ID NO: 4133633 - DNA, 25 bp, Homo sapien
gagtcaggaagtaatcgtctgtttc

SEQ ID NO: 4133634 - DNA, 25 bp, Homo sapien
gaagagactgtagagtactggtata

SEQ ID NO: 4133635 - DNA, 25 bp, Homo sapien
ttattagggtgatgttagcctcaca

SEQ ID NO: 4133636 - DNA, 25 bp, Homo sapien
tagtcaagcttggtgctgttttgga

SEQ ID NO: 4133637 - DNA, 25 bp, Homo sapien
ccagtgccgcgggaggactcatgtc

SEQ ID NO: 4133638 - DNA, 25 bp, Homo sapien
catgagtcttttcctcttgactgga

SEQ ID NO: 4133639 - DNA, 25 bp, Homo sapien
tcctcgtgcttgtcagttggcaaag

SEQ ID NO: 4133640 - DNA, 25 bp, Homo sapien
aggtagagcaggcaaaagtctgttc

SEQ ID NO: 4133641 - DNA, 25 bp, Homo sapien
ctgggtattcagacggttgtgctcc

SEQ ID NO: 4133642 - DNA, 25 bp, Homo sapien
cagggctgggtattcagacggttgt

SEQ ID NO: 4133643 - DNA, 25 bp, Homo sapien
gggctgggtattcagacggttgtgc

SEQ ID NO: 4133644 - DNA, 25 bp, Homo sapien
gctgggtattcagacggttgtgctc

SEQ ID NO: 4133645 - DNA, 25 bp, Homo sapien
taattgaggtgcaacagacatacga

SEQ ID NO: 4133646 - DNA, 25 bp, Homo sapien
cacatctcagactgcgcaggttggg

SEQ ID NO: 4133647 - DNA, 25 bp, Homo sapien
tgggtaaccatcaccaggtctggat

SEQ ID NO: 4133648 - DNA, 25 bp, Homo sapien
gaggtcccagtaagtggcacagaga

SEQ ID NO: 4133649 - DNA, 25 bp, Homo sapien
tgggtcacacggtgcggcctggcag

SEQ ID NO: 4133650 - DNA, 25 bp, Homo sapien
cagggctccacctcgggttttgttg

SEQ ID NO: 4133651 - DNA, 25 bp, Homo sapien
ttgttggcagcctgtagcctcagcc

SEQ ID NO: 4133652 - DNA, 25 bp, Homo sapien
gatgcgatgtcagacttcagggctc

SEQ ID NO: 4133653 - DNA, 25 bp, Homo sapien
gaatgtggagcacaaggttcccagg

SEQ ID NO: 4133654 - DNA, 25 bp, Homo sapien
gcttttggtatagaccaccgtgaag

SEQ ID NO: 4133655 - DNA, 25 bp, Homo sapien
aggttttagaaagtggtgaagcagc

SEQ ID NO: 4133656 - DNA, 25 bp, Homo sapien
ggtgaagcagctagagagtggaggg

SEQ ID NO: 4133657 - DNA, 25 bp, Homo sapien
ccatggctgggcgcccgcagcacct

SEQ ID NO: 4133658 - DNA, 25 bp, Homo sapien
agcacctgcacagactggatccaca

SEQ ID NO: 4133659 - DNA, 25 bp, Homo sapien
gagacaggtactgttgtcgttctct

SEQ ID NO: 4133660 - DNA, 25 bp, Homo sapien
tgttgttatcacactggggtctcaa

SEQ ID NO: 4133661 - DNA, 25 bp, Homo sapien
tgcagaggagacaggtactgttgtc

SEQ ID NO: 4133662 - DNA, 25 bp, Homo sapien
tactgttgtcgttctctcaaagctc

SEQ ID NO: 4133663 - DNA, 25 bp, Homo sapien
catacgtgtggagttgcaggtagca

SEQ ID NO: 4133664 - DNA, 25 bp, Homo sapien
caaaggtgaaccacacatgggtgct

SEQ ID NO: 4133665 - DNA, 25 bp, Homo sapien
gcttgattaaggcttgcatggactg

SEQ ID NO: 4133666 - DNA, 25 bp, Homo sapien
cacctctctgagttgctttgggccc

SEQ ID NO: 4133667 - DNA, 25 bp, Homo sapien
tttccctggcccgggatctctagcg

SEQ ID NO: 4133668 - DNA, 25 bp, Homo sapien
tggcgatttggagctgcggttctca

SEQ ID NO: 4133669 - DNA, 25 bp, Homo sapien
aagtgagttcggacagcaacacctg

SEQ ID NO: 4133670 - DNA, 25 bp, Homo sapien
gctcccaaagcggaagccgtcagca

SEQ ID NO: 4133671 - DNA, 25 bp, Homo sapien
actgcgcgggatccaggccacccgc

SEQ ID NO: 4133672 - DNA, 25 bp, Homo sapien
gccactgcgcgggatccaggccacc

SEQ ID NO: 4133673 - DNA, 25 bp, Homo sapien
gccacccgcacgctgcgcttttatc

SEQ ID NO: 4133674 - DNA, 25 bp, Homo sapien
ctgcgcttttatcccggcgccgccg

SEQ ID NO: 4133675 - DNA, 25 bp, Homo sapien
gtacggcgctcctgcacagcgcggc

SEQ ID NO: 4133676 - DNA, 25 bp, Homo sapien
cggctctcggggtacggcgctcctg

SEQ ID NO: 4133677 - DNA, 25 bp, Homo sapien
ccaggcttagcagcacgagcgacat

SEQ ID NO: 4133678 - DNA, 25 bp, Homo sapien
gccaggcttagcagcacgagcgaca

SEQ ID NO: 4133679 - DNA, 25 bp, Homo sapien
tttagtgcaaagagccaagagggct

SEQ ID NO: 4133680 - DNA, 25 bp, Homo sapien
tctaagagggcagcggtatcatttc

SEQ ID NO: 4133681 - DNA, 25 bp, Homo sapien
tgtccaccagcaggtgactacggag

SEQ ID NO: 4133682 - DNA, 25 bp, Homo sapien
gagttcttatcaaacggccggtgag

SEQ ID NO: 4133683 - DNA, 25 bp, Homo sapien
cagtttcagagccacattgaacggt

SEQ ID NO: 4133684 - DNA, 25 bp, Homo sapien
gaatagtcccctgttgcaacactag

SEQ ID NO: 4133685 - DNA, 25 bp, Homo sapien
aggttctactcggaggtccctcaag

SEQ ID NO: 4133686 - DNA, 25 bp, Homo sapien
caacactagttgtaacaggttctac

SEQ ID NO: 4133687 - DNA, 25 bp, Homo sapien
ggagtacccagcttacattcatcaa

SEQ ID NO: 4133688 - DNA, 25 bp, Homo sapien
ccaccgctcctggctactatcctga

SEQ ID NO: 4133689 - DNA, 25 bp, Homo sapien
gccaccgctcctggctactatcctg

SEQ ID NO: 4133690 - DNA, 25 bp, Homo sapien
gtggccttcaacaagcggatgctgg

SEQ ID NO: 4133691 - DNA, 25 bp, Homo sapien
cacacaaatcttggtggccttcaac

SEQ ID NO: 4133692 - DNA, 25 bp, Homo sapien
tttgcccgtcacacaaatcttggtg

SEQ ID NO: 4133693 - DNA, 25 bp, Homo sapien
gaagttgcttttgcccgtcacacaa

SEQ ID NO: 4133694 - DNA, 25 bp, Homo sapien
tctggtctgagtctggaaggcctct

SEQ ID NO: 4133695 - DNA, 25 bp, Homo sapien
tctgagtctggaaggcctctgtgta

SEQ ID NO: 4133696 - DNA, 25 bp, Homo sapien
ctggaaggcctctgtgtaattgcac

SEQ ID NO: 4133697 - DNA, 25 bp, Homo sapien
agtctggaaggcctctgtgtaattg

SEQ ID NO: 4133698 - DNA, 25 bp, Homo sapien
aatagactgtgttcagctctacagg

SEQ ID NO: 4133699 - DNA, 25 bp, Homo sapien
tacagggaagccgatgtaggaaaat

SEQ ID NO: 4133700 - DNA, 25 bp, Homo sapien
tatgggccccaatgaaatagactgt

SEQ ID NO: 4133701 - DNA, 25 bp, Homo sapien
tttgcattaggaatattatgggccc

SEQ ID NO: 4133702 - DNA, 25 bp, Homo sapien
tgtcatgtgggtgccatggacccct

SEQ ID NO: 4133703 - DNA, 25 bp, Homo sapien
tagatttacatggagaagtctggca

SEQ ID NO: 4133704 - DNA, 25 bp, Homo sapien
gcccggcacctctgtggtatgaatt

SEQ ID NO: 4133705 - DNA, 25 bp, Homo sapien
ggatgcctggtcagaactcaagact

SEQ ID NO: 4133706 - DNA, 25 bp, Homo sapien
tatctttgatccctaagagaggact

SEQ ID NO: 4133707 - DNA, 25 bp, Homo sapien
tttgatccctaagagaggactcgaa

SEQ ID NO: 4133708 - DNA, 25 bp, Homo sapien
aaaacagtatctttgatccctaaga

SEQ ID NO: 4133709 - DNA, 25 bp, Homo sapien
gagaggactcgaaaaccatccatca

SEQ ID NO: 4133710 - DNA, 25 bp, Homo sapien
aacattccagatgtaagatggcaaa

SEQ ID NO: 4133711 - DNA, 25 bp, Homo sapien
caaaacattccagatgtaagatggc

SEQ ID NO: 4133712 - DNA, 25 bp, Homo sapien
cacacatacgcataccacacctgta

SEQ ID NO: 4133713 - DNA, 25 bp, Homo sapien
ccagatgtaagatggcaaattcaaa

SEQ ID NO: 4133714 - DNA, 25 bp, Homo sapien
tatttcattatgtggtctaggcagc

SEQ ID NO: 4133715 - DNA, 25 bp, Homo sapien
gaagttcacttctactgtctcctca

SEQ ID NO: 4133716 - DNA, 25 bp, Homo sapien
caagcagtgatgttcggatcccaca

SEQ ID NO: 4133717 - DNA, 25 bp, Homo sapien
gagaaaacccgatgatagtgctgtg

SEQ ID NO: 4133718 - DNA, 25 bp, Homo sapien
ctgtgttggataagagccatgtatc

SEQ ID NO: 4133719 - DNA, 25 bp, Homo sapien
tggaatcaccactgaagctcgcgtt

SEQ ID NO: 4133720 - DNA, 25 bp, Homo sapien
gtagcaccttcactatccccagtca

SEQ ID NO: 4133721 - DNA, 25 bp, Homo sapien
agtcactggaatcaccactgaagct

SEQ ID NO: 4133722 - DNA, 25 bp, Homo sapien
caccactgaagctcgcgtttgtttc

SEQ ID NO: 4133723 - DNA, 25 bp, Homo sapien
atggaacagtcttctatgtcccttc

SEQ ID NO: 4133724 - DNA, 25 bp, Homo sapien
tgatggaacagtcttctatgtccct

SEQ ID NO: 4133725 - DNA, 25 bp, Homo sapien
gatggaacagtcttctatgtccctt

SEQ ID NO: 4133726 - DNA, 25 bp, Homo sapien
aatgatggaacagtcttctatgtcc

SEQ ID NO: 4133727 - DNA, 25 bp, Homo sapien
ttctccagaaaagggtagtagccat

SEQ ID NO: 4133728 - DNA, 25 bp, Homo sapien
ggtcagcagccattaatacaagcaa

SEQ ID NO: 4133729 - DNA, 25 bp, Homo sapien
taagggaagtctatggttctccaga

SEQ ID NO: 4133730 - DNA, 25 bp, Homo sapien
gtaaaatggtactgctatccctgag

SEQ ID NO: 4133731 - DNA, 25 bp, Homo sapien
cttccttcagccagtgctttaggac

SEQ ID NO: 4133732 - DNA, 25 bp, Homo sapien
ttccttcagccagtgctttaggaca

SEQ ID NO: 4133733 - DNA, 25 bp, Homo sapien
tccttcagccagtgctttaggacat

SEQ ID NO: 4133734 - DNA, 25 bp, Homo sapien
ggcttcgcccatacctctagtgttg

SEQ ID NO: 4133735 - DNA, 25 bp, Homo sapien
cataccagttcgcttacctaaaagg

SEQ ID NO: 4133736 - DNA, 25 bp, Homo sapien
taaagtcaaaaccagtgacccgaga

SEQ ID NO: 4133737 - DNA, 25 bp, Homo sapien
catctgtaacaaagccctaaagtca

SEQ ID NO: 4133738 - DNA, 25 bp, Homo sapien
gtcgctgccacaagtaggaaaatat

SEQ ID NO: 4133739 - DNA, 25 bp, Homo sapien
tgttatccagagggaaagggacgcc

SEQ ID NO: 4133740 - DNA, 25 bp, Homo sapien
tttgtgggcagagcacaactgttcc

SEQ ID NO: 4133741 - DNA, 25 bp, Homo sapien
aactgttcctttatgtcggatgcag

SEQ ID NO: 4133742 - DNA, 25 bp, Homo sapien
gaacatcaggtaagctcaggcacag

SEQ ID NO: 4133743 - DNA, 25 bp, Homo sapien
cagcagatccttgtggcactcagaa

SEQ ID NO: 4133744 - DNA, 25 bp, Homo sapien
caggcactagtgaggcggtaccatt

SEQ ID NO: 4133745 - DNA, 25 bp, Homo sapien
gaatctgtaaggcttcgcccacgca

SEQ ID NO: 4133746 - DNA, 25 bp, Homo sapien
gcctccacattagatagatccctgc

SEQ ID NO: 4133747 - DNA, 25 bp, Homo sapien
cctgccaccagcacccatgtggcca

SEQ ID NO: 4133748 - DNA, 25 bp, Homo sapien
tgcctccacattagatagatccctg

SEQ ID NO: 4133749 - DNA, 25 bp, Homo sapien
cctccacattagatagatccctgcc

SEQ ID NO: 4133750 - DNA, 25 bp, Homo sapien
caggaactgctcgtttggagatggt

SEQ ID NO: 4133751 - DNA, 25 bp, Homo sapien
tcacagcaggacagtacgcactgca

SEQ ID NO: 4133752 - DNA, 25 bp, Homo sapien
tcttgaaatggtgaacaatcacagc

SEQ ID NO: 4133753 - DNA, 25 bp, Homo sapien
gctgcagaccctcaatttatggtac

SEQ ID NO: 4133754 - DNA, 25 bp, Homo sapien
tcttgttgagtaggctgacgaggaa

SEQ ID NO: 4133755 - DNA, 25 bp, Homo sapien
gaaggggttagtcttgctgacttag

SEQ ID NO: 4133756 - DNA, 25 bp, Homo sapien
tcatcttgttgagtaggctgacgag

SEQ ID NO: 4133757 - DNA, 25 bp, Homo sapien
agaggtgggcgcctcagtgtaactt

SEQ ID NO: 4133758 - DNA, 25 bp, Homo sapien
ggggcagtagtgtggtggtagaaaa

SEQ ID NO: 4133759 - DNA, 25 bp, Homo sapien
gggcagtagtgtggtggtagaaaag

SEQ ID NO: 4133760 - DNA, 25 bp, Homo sapien
gggggcagtagtgtggtggtagaaa

SEQ ID NO: 4133761 - DNA, 25 bp, Homo sapien
cacactgttgacgtcattggaaaga

SEQ ID NO: 4133762 - DNA, 25 bp, Homo sapien
taaagtagaccaccacgtatttgtg

SEQ ID NO: 4133763 - DNA, 25 bp, Homo sapien
aaggatgacctcacttctgcaatgg

SEQ ID NO: 4133764 - DNA, 25 bp, Homo sapien
catccttcatgaggtggtacttggg

SEQ ID NO: 4133765 - DNA, 25 bp, Homo sapien
atcacacgttttttccctgtaattg

SEQ ID NO: 4133766 - DNA, 25 bp, Homo sapien
tgtttgtaggctgcatagtaagctt

SEQ ID NO: 4133767 - DNA, 25 bp, Homo sapien
ggctgcatagtaagcttcaggatca

SEQ ID NO: 4133768 - DNA, 25 bp, Homo sapien
ttcaggatcatcacacgttttttcc

SEQ ID NO: 4133769 - DNA, 25 bp, Homo sapien
cagctttgaagttgtaaatgtagtt

SEQ ID NO: 4133770 - DNA, 25 bp, Homo sapien
tgtagtttccaatcgttagttaatg

SEQ ID NO: 4133771 - DNA, 25 bp, Homo sapien
tttccaatcgttagttaatgctaca

SEQ ID NO: 4133772 - DNA, 25 bp, Homo sapien
cattatcaaaatggttatagttttc

SEQ ID NO: 4133773 - DNA, 25 bp, Homo sapien
cactgcaatgcatggtctatggaag

SEQ ID NO: 4133774 - DNA, 25 bp, Homo sapien
agtgaatcagtgaggggttcttaga

SEQ ID NO: 4133775 - DNA, 25 bp, Homo sapien
tgcatgtaatagaaggtttttcact

SEQ ID NO: 4133776 - DNA, 25 bp, Homo sapien
gttcttagagttagtattcattaat

SEQ ID NO: 4133777 - DNA, 25 bp, Homo sapien
ccaaatcatacaagtggttacacat

SEQ ID NO: 4133778 - DNA, 25 bp, Homo sapien
ctgacagtgacctctaataggtaac

SEQ ID NO: 4133779 - DNA, 25 bp, Homo sapien
tagcctggtcttgagcgatcctttt

SEQ ID NO: 4133780 - DNA, 25 bp, Homo sapien
aaaaggcacctgtacaagaatcaag

SEQ ID NO: 4133781 - DNA, 25 bp, Homo sapien
aaggcatgaggtggccctttaagga

SEQ ID NO: 4133782 - DNA, 25 bp, Homo sapien
tactaagcgtccacttgtaaagctg

SEQ ID NO: 4133783 - DNA, 25 bp, Homo sapien
tgtgctgtgtgaaataagcattccc

SEQ ID NO: 4133784 - DNA, 25 bp, Homo sapien
gaaaaagatgcttttaggccaggcg

SEQ ID NO: 4133785 - DNA, 25 bp, Homo sapien
caggtctcgatttccaaaggtaaag

SEQ ID NO: 4133786 - DNA, 25 bp, Homo sapien
tgacatgccgtagggtgagcttaga

SEQ ID NO: 4133787 - DNA, 25 bp, Homo sapien
cattgtccagaggtaggaacacagt

SEQ ID NO: 4133788 - DNA, 25 bp, Homo sapien
taatgcagctattaccactggtggt

SEQ ID NO: 4133789 - DNA, 25 bp, Homo sapien
agcactgttagtgtcaccttttcaa

SEQ ID NO: 4133790 - DNA, 25 bp, Homo sapien
ttaggttgcagaatggactcctcat

SEQ ID NO: 4133791 - DNA, 25 bp, Homo sapien
tcaacttctgaaacactgttcattg

SEQ ID NO: 4133792 - DNA, 25 bp, Homo sapien
cctcatctttatattcacgaaaaag

SEQ ID NO: 4133793 - DNA, 25 bp, Homo sapien
tgagcagtagatgaatgtgtatgtc

SEQ ID NO: 4133794 - DNA, 25 bp, Homo sapien
atgatgagcagtagatgaatgtgta

SEQ ID NO: 4133795 - DNA, 25 bp, Homo sapien
gtatgtctaaacaaggactgctctg

SEQ ID NO: 4133796 - DNA, 25 bp, Homo sapien
tgtcctcacagatgaatgaggtcat

SEQ ID NO: 4133797 - DNA, 25 bp, Homo sapien
ctggggatattggtggaagggacat

SEQ ID NO: 4133798 - DNA, 25 bp, Homo sapien
ttctctctggggatattggtggaag

SEQ ID NO: 4133799 - DNA, 25 bp, Homo sapien
ctctctggggatattggtggaaggg

SEQ ID NO: 4133800 - DNA, 25 bp, Homo sapien
ctctggggatattggtggaagggac

SEQ ID NO: 4133801 - DNA, 25 bp, Homo sapien
cctctctcgggtgtcggtatcctta

SEQ ID NO: 4133802 - DNA, 25 bp, Homo sapien
caatgatgccgacgctgtacacgta

SEQ ID NO: 4133803 - DNA, 25 bp, Homo sapien
taaaactagtaaggacaatgatgcc

SEQ ID NO: 4133804 - DNA, 25 bp, Homo sapien
caagcgcttgattgtggatttgcga

SEQ ID NO: 4133805 - DNA, 25 bp, Homo sapien
tcagccgatggtctctgagccggca

SEQ ID NO: 4133806 - DNA, 25 bp, Homo sapien
tgagccggcagtcgggggccgaggt

SEQ ID NO: 4133807 - DNA, 25 bp, Homo sapien
ccgatggtctctgagccggcagtcg

SEQ ID NO: 4133808 - DNA, 25 bp, Homo sapien
cagccgatggtctctgagccggcag

SEQ ID NO: 4133809 - DNA, 25 bp, Homo sapien
tacagggcagtccttaacgtcatat

SEQ ID NO: 4133810 - DNA, 25 bp, Homo sapien
tcatatccggttgtcagctcggccg

SEQ ID NO: 4133811 - DNA, 25 bp, Homo sapien
tcaatcgacgagaaaacagcttccc

SEQ ID NO: 4133812 - DNA, 25 bp, Homo sapien
caagtcggatagaggactggcaacc

SEQ ID NO: 4133813 - DNA, 25 bp, Homo sapien
cgtcaacacgtctggaaaattcgga

SEQ ID NO: 4133814 - DNA, 25 bp, Homo sapien
gaagagcctggcagtatattcccaa

SEQ ID NO: 4133815 - DNA, 25 bp, Homo sapien
tcccaaaggcgtgacaataaagttc

SEQ ID NO: 4133816 - DNA, 25 bp, Homo sapien
ggaagcgtttcctcctgtcagcggc

SEQ ID NO: 4133817 - DNA, 25 bp, Homo sapien
gggtaatgtttaggccttgctaaca

SEQ ID NO: 4133818 - DNA, 25 bp, Homo sapien
gtaatgtttaggccttgctaacatt

SEQ ID NO: 4133819 - DNA, 25 bp, Homo sapien
ctgggtaatgtttaggccttgctaa

SEQ ID NO: 4133820 - DNA, 25 bp, Homo sapien
tgggtaatgtttaggccttgctaac

SEQ ID NO: 4133821 - DNA, 25 bp, Homo sapien
cactgctgatgggacagcttgtcaa

SEQ ID NO: 4133822 - DNA, 25 bp, Homo sapien
ttatctccggcatcttatcttcacc

SEQ ID NO: 4133823 - DNA, 25 bp, Homo sapien
ctccttcgttatctccggcatctta

SEQ ID NO: 4133824 - DNA, 25 bp, Homo sapien
ttcacagaagagtgaccacaaaggg

SEQ ID NO: 4133825 - DNA, 25 bp, Homo sapien
gagaaaaagataattcacgtcctga

SEQ ID NO: 4133826 - DNA, 25 bp, Homo sapien
gatagatgaggtggagacctgtctt

SEQ ID NO: 4133827 - DNA, 25 bp, Homo sapien
agatagatgaggtggagacctgtct

SEQ ID NO: 4133828 - DNA, 25 bp, Homo sapien
aagataattcacgtcctgactcagc

SEQ ID NO: 4133829 - DNA, 25 bp, Homo sapien
cttccgacaagctggtgaagctgaa

SEQ ID NO: 4133830 - DNA, 25 bp, Homo sapien
ctggcggtttgtggaacacgacctt

SEQ ID NO: 4133831 - DNA, 25 bp, Homo sapien
ctacagctgaactggcggtttgtgg

SEQ ID NO: 4133832 - DNA, 25 bp, Homo sapien
cctttttcttccgacaagctggtga

SEQ ID NO: 4133833 - DNA, 25 bp, Homo sapien
ccttgaaggcaacagcactgaacaa

SEQ ID NO: 4133834 - DNA, 25 bp, Homo sapien
gacacccgcccccttgaaggcaaca

SEQ ID NO: 4133835 - DNA, 25 bp, Homo sapien
ccgcccccttgaaggcaacagcact

SEQ ID NO: 4133836 - DNA, 25 bp, Homo sapien
ccccttgaaggcaacagcactgaac

SEQ ID NO: 4133837 - DNA, 25 bp, Homo sapien
aaggtacttgatgctgtactgagcc

SEQ ID NO: 4133838 - DNA, 25 bp, Homo sapien
caactgttcactagaaggtacttga

SEQ ID NO: 4133839 - DNA, 25 bp, Homo sapien
gatgctgtactgagccccagtcaga

SEQ ID NO: 4133840 - DNA, 25 bp, Homo sapien
atggtgggaacagccaaagccttta

SEQ ID NO: 4133841 - DNA, 25 bp, Homo sapien
tctttgctttccactaggtctaaag

SEQ ID NO: 4133842 - DNA, 25 bp, Homo sapien
tccactaggtctaaagatgaaggct

SEQ ID NO: 4133843 - DNA, 25 bp, Homo sapien
aaagatgaaggctgacatttagagc

SEQ ID NO: 4133844 - DNA, 25 bp, Homo sapien
tttagagcttgtgaatacaacttcc

SEQ ID NO: 4133845 - DNA, 25 bp, Homo sapien
tacctgtcaatgatgaaccttaaat

SEQ ID NO: 4133846 - DNA, 25 bp, Homo sapien
cagcttcgtgactcattacagatga

SEQ ID NO: 4133847 - DNA, 25 bp, Homo sapien
agatgacagtagataaatccttagg

SEQ ID NO: 4133848 - DNA, 25 bp, Homo sapien
gggcatttcaagcttacctgtcaat

SEQ ID NO: 4133849 - DNA, 25 bp, Homo sapien
tctcccccgcctccacaggttcctc

SEQ ID NO: 4133850 - DNA, 25 bp, Homo sapien
cccgcctccacaggttcctcatctg

SEQ ID NO: 4133851 - DNA, 25 bp, Homo sapien
gttcctcatctgtgggccaggccat

SEQ ID NO: 4133852 - DNA, 25 bp, Homo sapien
ggttcctcatctgtgggccaggcca

SEQ ID NO: 4133853 - DNA, 25 bp, Homo sapien
cactaacggtggttgcagcatgagc

SEQ ID NO: 4133854 - DNA, 25 bp, Homo sapien
tattcagcccaacgcatatctagga

SEQ ID NO: 4133855 - DNA, 25 bp, Homo sapien
acccaggtccctgagctatgggcca

SEQ ID NO: 4133856 - DNA, 25 bp, Homo sapien
gaaaccagtgatccaacctgatgtt

SEQ ID NO: 4133857 - DNA, 25 bp, Homo sapien
cagaacagccttgtcaaagggtctc

SEQ ID NO: 4133858 - DNA, 25 bp, Homo sapien
tgtcaaagggtctccctgaactgca

SEQ ID NO: 4133859 - DNA, 25 bp, Homo sapien
gcaatgagcttgcattgctggagct

SEQ ID NO: 4133860 - DNA, 25 bp, Homo sapien
ttccaccagttcagaacagccttgt

SEQ ID NO: 4133861 - DNA, 25 bp, Homo sapien
cctgaaggtgatctgttgagcatct

SEQ ID NO: 4133862 - DNA, 25 bp, Homo sapien
cccttgcggctagtaggaaggccat

SEQ ID NO: 4133863 - DNA, 25 bp, Homo sapien
cagcccttgcggctagtaggaaggc

SEQ ID NO: 4133864 - DNA, 25 bp, Homo sapien
tctccccacacagtccatcctttaa

SEQ ID NO: 4133865 - DNA, 25 bp, Homo sapien
ttggtcacgctttgccactatgtga

SEQ ID NO: 4133866 - DNA, 25 bp, Homo sapien
ctagtttgacagatttcatccagag

SEQ ID NO: 4133867 - DNA, 25 bp, Homo sapien
cataagaaaagactgtcgaaaagac

SEQ ID NO: 4133868 - DNA, 25 bp, Homo sapien
ttctcctgctcaaaacaaaggttct

SEQ ID NO: 4133869 - DNA, 25 bp, Homo sapien
tggctcgagggctccacgaatctcc

SEQ ID NO: 4133870 - DNA, 25 bp, Homo sapien
gagggctccacgaatctccacttca

SEQ ID NO: 4133871 - DNA, 25 bp, Homo sapien
aaagaactggctcgagggctccacg

SEQ ID NO: 4133872 - DNA, 25 bp, Homo sapien
aaaccaaagaactggctcgagggct

SEQ ID NO: 4133873 - DNA, 25 bp, Homo sapien
tataactgataactgtctgtgaccg

SEQ ID NO: 4133874 - DNA, 25 bp, Homo sapien
ccaacagagacatcggaggcagtac

SEQ ID NO: 4133875 - DNA, 25 bp, Homo sapien
tgggcacttgggctcttcacaaata

SEQ ID NO: 4133876 - DNA, 25 bp, Homo sapien
gagagtcccgctattgtaccaagtg

SEQ ID NO: 4133877 - DNA, 25 bp, Homo sapien
ctcttgtatagtgtaccttcctagg

SEQ ID NO: 4133878 - DNA, 25 bp, Homo sapien
ctcctcctctcccactaatgccaca

SEQ ID NO: 4133879 - DNA, 25 bp, Homo sapien
ttgtatagtgtaccttcctagggat

SEQ ID NO: 4133880 - DNA, 25 bp, Homo sapien
tacagcttcttcgttggcttctctc

SEQ ID NO: 4133881 - DNA, 25 bp, Homo sapien
gcaactgctttgttatgtctgacca

SEQ ID NO: 4133882 - DNA, 25 bp, Homo sapien
tctgaccagctgtttgtgacaacat

SEQ ID NO: 4133883 - DNA, 25 bp, Homo sapien
tcctgttgtacgtcaaatgctcggg

SEQ ID NO: 4133884 - DNA, 25 bp, Homo sapien
ttaacatttcttgcccgagagagtc

SEQ ID NO: 4133885 - DNA, 25 bp, Homo sapien
tgccgctagtcctgcgatcccagga

SEQ ID NO: 4133886 - DNA, 25 bp, Homo sapien
tagggtgtgccgctagtcctgcgat

SEQ ID NO: 4133887 - DNA, 25 bp, Homo sapien
gcccgtagggtgtgccgctagtcct

SEQ ID NO: 4133888 - DNA, 25 bp, Homo sapien
agcgtgcggcccgtagggtgtgccg

SEQ ID NO: 4133889 - DNA, 25 bp, Homo sapien
tctcagggagagaaccatgcaacac

SEQ ID NO: 4133890 - DNA, 25 bp, Homo sapien
ggagagaaccatgcaacaccgccag

SEQ ID NO: 4133891 - DNA, 25 bp, Homo sapien
ttcctctcagggagagaaccatgca

SEQ ID NO: 4133892 - DNA, 25 bp, Homo sapien
agaaccatgcaacaccgccagcagt

SEQ ID NO: 4133893 - DNA, 25 bp, Homo sapien
acatgccaaaggagtccactctgtg

SEQ ID NO: 4133894 - DNA, 25 bp, Homo sapien
tacatgccaaaggagtccactctgt

SEQ ID NO: 4133895 - DNA, 25 bp, Homo sapien
catgccaaaggagtccactctgtgc

SEQ ID NO: 4133896 - DNA, 25 bp, Homo sapien
tgccaaaggagtccactctgtgctc

SEQ ID NO: 4133897 - DNA, 25 bp, Homo sapien
gcggcgacgagagcggccgcgggga

SEQ ID NO: 4133898 - DNA, 25 bp, Homo sapien
cggcggcgacgagagcggccgcggg

SEQ ID NO: 4133899 - DNA, 25 bp, Homo sapien
cccgctgcggcggcgacgagagcgg

SEQ ID NO: 4133900 - DNA, 25 bp, Homo sapien
cgcccgctgcggcggcgacgagagc

SEQ ID NO: 4133901 - DNA, 25 bp, Homo sapien
cggcgtagagaagcgcggcagcgag

SEQ ID NO: 4133902 - DNA, 25 bp, Homo sapien
acggagagcggtatctgctgctccg

SEQ ID NO: 4133903 - DNA, 25 bp, Homo sapien
ccccagcgcggcgtagagaagcgcg

SEQ ID NO: 4133904 - DNA, 25 bp, Homo sapien
gagagcggtatctgctgctccgagc

SEQ ID NO: 4133905 - DNA, 25 bp, Homo sapien
gaaggggcacaggaagatatgtaac

SEQ ID NO: 4133906 - DNA, 25 bp, Homo sapien
gggcacaggaagatatgtaacaccc

SEQ ID NO: 4133907 - DNA, 25 bp, Homo sapien
acaggaagatatgtaacacccgtgt

SEQ ID NO: 4133908 - DNA, 25 bp, Homo sapien
gcacaggaagatatgtaacacccgt

SEQ ID NO: 4133909 - DNA, 25 bp, Homo sapien
agctgggaaccggagtacttagcag

SEQ ID NO: 4133910 - DNA, 25 bp, Homo sapien
gggaaccggagtacttagcagcaat

SEQ ID NO: 4133911 - DNA, 25 bp, Homo sapien
ccaccaaaagccgaggcccagagct

SEQ ID NO: 4133912 - DNA, 25 bp, Homo sapien
cagaagctgggaaccggagtactta

SEQ ID NO: 4133913 - DNA, 25 bp, Homo sapien
gtttggaaaactaaatctgcctcca

SEQ ID NO: 4133914 - DNA, 25 bp, Homo sapien
ttctgtgccggaaaaatcatcgctt

SEQ ID NO: 4133915 - DNA, 25 bp, Homo sapien
gttggtaggaagaagtcactgcata

SEQ ID NO: 4133916 - DNA, 25 bp, Homo sapien
gagagtcctccgataactgatgctg

SEQ ID NO: 4133917 - DNA, 25 bp, Homo sapien
aaaacactcagtttccgagccccag

SEQ ID NO: 4133918 - DNA, 25 bp, Homo sapien
ccagccaggacagtgcgagtgagta

SEQ ID NO: 4133919 - DNA, 25 bp, Homo sapien
tctttgtggttagaatcaagtgtca

SEQ ID NO: 4133920 - DNA, 25 bp, Homo sapien
acacggagacgagagccatgcaaaa

SEQ ID NO: 4133921 - DNA, 25 bp, Homo sapien
caaacaatagtgcagcgtctttctc

SEQ ID NO: 4133922 - DNA, 25 bp, Homo sapien
tgaagttagcattttttggcccgag

SEQ ID NO: 4133923 - DNA, 25 bp, Homo sapien
tccaacgcaaggtgaaaggcatcac

SEQ ID NO: 4133924 - DNA, 25 bp, Homo sapien
gagcatctgctctggcactgaaaca

SEQ ID NO: 4133925 - DNA, 25 bp, Homo sapien
tattacccggcagtgcagctgagtg

SEQ ID NO: 4133926 - DNA, 25 bp, Homo sapien
cctttaagtgccgaggtgggccaca

SEQ ID NO: 4133927 - DNA, 25 bp, Homo sapien
tgccaagtaacccaaagccgtgagt

SEQ ID NO: 4133928 - DNA, 25 bp, Homo sapien
gatgtaatgcatcctagccctgggt

SEQ ID NO: 4133929 - DNA, 25 bp, Homo sapien
tctgaagccataacaaggtacattg

SEQ ID NO: 4133930 - DNA, 25 bp, Homo sapien
aggctaaagcggcaaaacccatggt

SEQ ID NO: 4133931 - DNA, 25 bp, Homo sapien
tatttctaaggacctaacaggttgc

SEQ ID NO: 4133932 - DNA, 25 bp, Homo sapien
tttcctaaaagatggcttactgcgt

SEQ ID NO: 4133933 - DNA, 25 bp, Homo sapien
tgaagtgaacggaaacccctgcagt

SEQ ID NO: 4133934 - DNA, 25 bp, Homo sapien
ttagcaaggcagcacacaggcatac

SEQ ID NO: 4133935 - DNA, 25 bp, Homo sapien
tacagcggtaatgaaactatgcctc

SEQ ID NO: 4133936 - DNA, 25 bp, Homo sapien
taggttcccggacctactagaatgc

SEQ ID NO: 4133937 - DNA, 25 bp, Homo sapien
ttgagtagcatctgttggtctcctg

SEQ ID NO: 4133938 - DNA, 25 bp, Homo sapien
ttttgagtagcatctgttggtctcc

SEQ ID NO: 4133939 - DNA, 25 bp, Homo sapien
taattttgagtagcatctgttggtc

SEQ ID NO: 4133940 - DNA, 25 bp, Homo sapien
tgagtagcatctgttggtctcctga

SEQ ID NO: 4133941 - DNA, 25 bp, Homo sapien
gacaggtcaacaaatttccctccat

SEQ ID NO: 4133942 - DNA, 25 bp, Homo sapien
gccatcggtgacaggtcaacaaatt

SEQ ID NO: 4133943 - DNA, 25 bp, Homo sapien
tctgttaaagggctagtaaccacag

SEQ ID NO: 4133944 - DNA, 25 bp, Homo sapien
gatggcgtctttcaaactgatgttc

SEQ ID NO: 4133945 - DNA, 25 bp, Homo sapien
gagcaggtcttcaggtcatgaacta

SEQ ID NO: 4133946 - DNA, 25 bp, Homo sapien
tccctgaactcacacaaggaggagc

SEQ ID NO: 4133947 - DNA, 25 bp, Homo sapien
tagattgtaatctccacgagggtgc

SEQ ID NO: 4133948 - DNA, 25 bp, Homo sapien
tctggtctcagtaaagaatcatgcc

SEQ ID NO: 4133949 - DNA, 25 bp, Homo sapien
acatagctgatacaatatgatctca

SEQ ID NO: 4133950 - DNA, 25 bp, Homo sapien
aaatattaacaatcggccaggcacg

SEQ ID NO: 4133951 - DNA, 25 bp, Homo sapien
tttttgtggtccctacagtactgcc

SEQ ID NO: 4133952 - DNA, 25 bp, Homo sapien
tatcttcccattataacatagctga

SEQ ID NO: 4133953 - DNA, 25 bp, Homo sapien
ggtttaacaccaggtcaagggcaga

SEQ ID NO: 4133954 - DNA, 25 bp, Homo sapien
gagattaggcccacctgaagagaaa

SEQ ID NO: 4133955 - DNA, 25 bp, Homo sapien
cagtactgcatacagggcttagggc

SEQ ID NO: 4133956 - DNA, 25 bp, Homo sapien
cagggaccagcgccttcaagaaagt

SEQ ID NO: 4133957 - DNA, 25 bp, Homo sapien
ttgttatccctcacttaaagaggaa

SEQ ID NO: 4133958 - DNA, 25 bp, Homo sapien
caccaaagtcacatcgttgtttgac

SEQ ID NO: 4133959 - DNA, 25 bp, Homo sapien
cttctttatgttcccaccaaagtca

SEQ ID NO: 4133960 - DNA, 25 bp, Homo sapien
cgttgtttgacttgttatccctcac

SEQ ID NO: 4133961 - DNA, 25 bp, Homo sapien
ccacaagtggcaaaccctggttata

SEQ ID NO: 4133962 - DNA, 25 bp, Homo sapien
tgtaatcgttacaaggaagctgctc

SEQ ID NO: 4133963 - DNA, 25 bp, Homo sapien
gaaaagtcggtttatcctggagaga

SEQ ID NO: 4133964 - DNA, 25 bp, Homo sapien
gaaccaaggccagagattacaggca

SEQ ID NO: 4133965 - DNA, 25 bp, Homo sapien
catgtggtctgtgtagcaaagggcc

SEQ ID NO: 4133966 - DNA, 25 bp, Homo sapien
tcactaatgaaacgcgagcaggaag

SEQ ID NO: 4133967 - DNA, 25 bp, Homo sapien
gatgttcaaactccaccgcgtggct

SEQ ID NO: 4133968 - DNA, 25 bp, Homo sapien
gagtctttgcaggtacaggtccctc

SEQ ID NO: 4133969 - DNA, 25 bp, Homo sapien
gaagctgtcccaatatcaaaggagc

SEQ ID NO: 4133970 - DNA, 25 bp, Homo sapien
tggaccgtcccacacaaagaactgt

SEQ ID NO: 4133971 - DNA, 25 bp, Homo sapien
gcagagggccctgttgaactgatct

SEQ ID NO: 4133972 - DNA, 25 bp, Homo sapien
tacttagctagttaagaggcagagc

SEQ ID NO: 4133973 - DNA, 25 bp, Homo sapien
caaaacactgtcatttttcataagt

SEQ ID NO: 4133974 - DNA, 25 bp, Homo sapien
aaaacactgtcatttttcataagtc

SEQ ID NO: 4133975 - DNA, 25 bp, Homo sapien
ccaaatgaatcctcccgtaagggct

SEQ ID NO: 4133976 - DNA, 25 bp, Homo sapien
caggacctttggctcagacctttgg

SEQ ID NO: 4133977 - DNA, 25 bp, Homo sapien
tacgtccctggtcactaagaagtca

SEQ ID NO: 4133978 - DNA, 25 bp, Homo sapien
ggtagtcacacaacgccaaatgaat

SEQ ID NO: 4133979 - DNA, 25 bp, Homo sapien
tttacatgcataatttaccacagtg

SEQ ID NO: 4133980 - DNA, 25 bp, Homo sapien
ttaccacagtgcacactagcctcat

SEQ ID NO: 4133981 - DNA, 25 bp, Homo sapien
gatctttcaaatacttccccaatgc

SEQ ID NO: 4133982 - DNA, 25 bp, Homo sapien
cctaaattatcattttcacccagct

SEQ ID NO: 4133983 - DNA, 25 bp, Homo sapien
ccagattccgtttgtcagtgacaag

SEQ ID NO: 4133984 - DNA, 25 bp, Homo sapien
tataccataggaaccactttataag

SEQ ID NO: 4133985 - DNA, 25 bp, Homo sapien
taacttgcaaactgacaaagccctg

SEQ ID NO: 4133986 - DNA, 25 bp, Homo sapien
gaaaacgcaatttaaatgaggactc

SEQ ID NO: 4133987 - DNA, 25 bp, Homo sapien
ttttctgattgttttcacctctctc

SEQ ID NO: 4133988 - DNA, 25 bp, Homo sapien
tccacaaaataaggggccctggctg

SEQ ID NO: 4133989 - DNA, 25 bp, Homo sapien
acgcacttgtcaccgcctggaatta

SEQ ID NO: 4133990 - DNA, 25 bp, Homo sapien
ctggctgaacttggccccacagcat

SEQ ID NO: 4133991 - DNA, 25 bp, Homo sapien
cctggaattactctttgagttctac

SEQ ID NO: 4133992 - DNA, 25 bp, Homo sapien
ggcctcgtaggcaaattcagcataa

SEQ ID NO: 4133993 - DNA, 25 bp, Homo sapien
ccacccaaggcctcgtaggcaaatt

SEQ ID NO: 4133994 - DNA, 25 bp, Homo sapien
attcccacccaaggcctcgtaggca

SEQ ID NO: 4133995 - DNA, 25 bp, Homo sapien
caaggcctcgtaggcaaattcagca

SEQ ID NO: 4133996 - DNA, 25 bp, Homo sapien
ccaaggcaattgatgggcgtgacac

SEQ ID NO: 4133997 - DNA, 25 bp, Homo sapien
ccaggccctggtgatacgagagtaa

SEQ ID NO: 4133998 - DNA, 25 bp, Homo sapien
tgctcggacgcatccacttatggtg

SEQ ID NO: 4133999 - DNA, 25 bp, Homo sapien
gtggtgctcacccttgcctaactgg

SEQ ID NO: 4134000 - DNA, 25 bp, Homo sapien
ctgacaacagaagcacttggatttt

SEQ ID NO: 4134001 - DNA, 25 bp, Homo sapien
agcccatgctgacaacagaagcact

SEQ ID NO: 4134002 - DNA, 25 bp, Homo sapien
catgctgacaacagaagcacttgga

SEQ ID NO: 4134003 - DNA, 25 bp, Homo sapien
ccatgctgacaacagaagcacttgg

SEQ ID NO: 4134004 - DNA, 25 bp, Homo sapien
ggagaaaatgcatgcgctgttggat

SEQ ID NO: 4134005 - DNA, 25 bp, Homo sapien
gaaaatgcatgcgctgttggatgct

SEQ ID NO: 4134006 - DNA, 25 bp, Homo sapien
aaaatgcatgcgctgttggatgctg

SEQ ID NO: 4134007 - DNA, 25 bp, Homo sapien
gagaaaatgcatgcgctgttggatg

SEQ ID NO: 4134008 - DNA, 25 bp, Homo sapien
tcgctctatgttgagaaggactggg

SEQ ID NO: 4134009 - DNA, 25 bp, Homo sapien
gtgctgtggtacttggacaccagga

SEQ ID NO: 4134010 - DNA, 25 bp, Homo sapien
aattcctcccaacatcgctctatgt

SEQ ID NO: 4134011 - DNA, 25 bp, Homo sapien
tcactccacggtcgcagtgctgtgg

SEQ ID NO: 4134012 - DNA, 25 bp, Homo sapien
gatgtcctattaatgctcttcacaa

SEQ ID NO: 4134013 - DNA, 25 bp, Homo sapien
gataaagcctccacattgcaggtaa

SEQ ID NO: 4134014 - DNA, 25 bp, Homo sapien
tcacaatagattccattgataaagc

SEQ ID NO: 4134015 - DNA, 25 bp, Homo sapien
tagagtatacaagctgctgtgcaca

SEQ ID NO: 4134016 - DNA, 25 bp, Homo sapien
gacagcccctatacggcatgagaag

SEQ ID NO: 4134017 - DNA, 25 bp, Homo sapien
tcagggtctgccatatccaggacag

SEQ ID NO: 4134018 - DNA, 25 bp, Homo sapien
tgcatacagaaaaatgtggaccctc

SEQ ID NO: 4134019 - DNA, 25 bp, Homo sapien
tgagaagatcacaaaagctgcccat

SEQ ID NO: 4134020 - DNA, 25 bp, Homo sapien
gcagttggctgcttcagattggaat

SEQ ID NO: 4134021 - DNA, 25 bp, Homo sapien
tgacggactgctctgatggctacca

SEQ ID NO: 4134022 - DNA, 25 bp, Homo sapien
catcctggcctcaatagtaagttga

SEQ ID NO: 4134023 - DNA, 25 bp, Homo sapien
gatatttgccgtacattacagcttg

SEQ ID NO: 4134024 - DNA, 25 bp, Homo sapien
tctatcgggatcttgattttatcca

SEQ ID NO: 4134025 - DNA, 25 bp, Homo sapien
tgtcgatgaggactgaataaccagg

SEQ ID NO: 4134026 - DNA, 25 bp, Homo sapien
taaccagggactattggactatccc

SEQ ID NO: 4134027 - DNA, 25 bp, Homo sapien
aacacttctctcaagttctatcggg

SEQ ID NO: 4134028 - DNA, 25 bp, Homo sapien
aggaatggggtccaaggtggccaga

SEQ ID NO: 4134029 - DNA, 25 bp, Homo sapien
ggaggaatggggtccaaggtggcca

SEQ ID NO: 4134030 - DNA, 25 bp, Homo sapien
ggaatggggtccaaggtggccagag

SEQ ID NO: 4134031 - DNA, 25 bp, Homo sapien
ctgggaggaatggggtccaaggtgg

SEQ ID NO: 4134032 - DNA, 25 bp, Homo sapien
taatgttctcaagcgcagggctcag

SEQ ID NO: 4134033 - DNA, 25 bp, Homo sapien
ttttaatgttctcaagcgcagggct

SEQ ID NO: 4134034 - DNA, 25 bp, Homo sapien
gggtccaaggcatggcttttaatgt

SEQ ID NO: 4134035 - DNA, 25 bp, Homo sapien
aacaagggggtccaaggcatggctt

SEQ ID NO: 4134036 - DNA, 25 bp, Homo sapien
agagtggccggctgtcctcacggcc

SEQ ID NO: 4134037 - DNA, 25 bp, Homo sapien
caggaagagtggccggctgtcctca

SEQ ID NO: 4134038 - DNA, 25 bp, Homo sapien
ggaagagtggccggctgtcctcacg

SEQ ID NO: 4134039 - DNA, 25 bp, Homo sapien
aagagtggccggctgtcctcacggc

SEQ ID NO: 4134040 - DNA, 25 bp, Homo sapien
ctgtggacactgtcggcttcccaca

SEQ ID NO: 4134041 - DNA, 25 bp, Homo sapien
ggacactgtcggcttcccacacttc

SEQ ID NO: 4134042 - DNA, 25 bp, Homo sapien
tgtggacactgtcggcttcccacac

SEQ ID NO: 4134043 - DNA, 25 bp, Homo sapien
cactgtcggcttcccacacttcccc

SEQ ID NO: 4134044 - DNA, 25 bp, Homo sapien
cgtggtctgacacaggcaggtagcc

SEQ ID NO: 4134045 - DNA, 25 bp, Homo sapien
caggtagccttgtgtttttcggcaa

SEQ ID NO: 4134046 - DNA, 25 bp, Homo sapien
gacacaggcaggtagccttgtgttt

SEQ ID NO: 4134047 - DNA, 25 bp, Homo sapien
ctagctcccacgtggtctgacacag

SEQ ID NO: 4134048 - DNA, 25 bp, Homo sapien
ccgagtgagacaatgcctcgtcctg

SEQ ID NO: 4134049 - DNA, 25 bp, Homo sapien
cttcccgagtgagacaatgcctcgt

SEQ ID NO: 4134050 - DNA, 25 bp, Homo sapien
tcccgagtgagacaatgcctcgtcc

SEQ ID NO: 4134051 - DNA, 25 bp, Homo sapien
cgagtgagacaatgcctcgtcctgc

SEQ ID NO: 4134052 - DNA, 25 bp, Homo sapien
cctggggaatggcaggcgaccctcc

SEQ ID NO: 4134053 - DNA, 25 bp, Homo sapien
atcaagcctggggaatggcaggcga

SEQ ID NO: 4134054 - DNA, 25 bp, Homo sapien
gagttcccggccgtgtgatgtgtct

SEQ ID NO: 4134055 - DNA, 25 bp, Homo sapien
tggggaatggcaggcgaccctcccc

SEQ ID NO: 4134056 - DNA, 25 bp, Homo sapien
ctcatctgttgatgcacattcgggc

SEQ ID NO: 4134057 - DNA, 25 bp, Homo sapien
ctaagaacattgttgtgccagtctc

SEQ ID NO: 4134058 - DNA, 25 bp, Homo sapien
actcatctgttgatgcacattcggg

SEQ ID NO: 4134059 - DNA, 25 bp, Homo sapien
gtggataatcctgctaagaacattg

SEQ ID NO: 4134060 - DNA, 25 bp, Homo sapien
tgacagggcatcacatcctatgaaa

SEQ ID NO: 4134061 - DNA, 25 bp, Homo sapien
tacatcaagtccatcacctggtgac

SEQ ID NO: 4134062 - DNA, 25 bp, Homo sapien
catttgggagaatatgccacgtggc

SEQ ID NO: 4134063 - DNA, 25 bp, Homo sapien
cccatcaggtaaactgctgctgtca

SEQ ID NO: 4134064 - DNA, 25 bp, Homo sapien
agctctacccctctccgttcagcag

SEQ ID NO: 4134065 - DNA, 25 bp, Homo sapien
cacagcccacatcctgaaggcgaag

SEQ ID NO: 4134066 - DNA, 25 bp, Homo sapien
agcccacatcctgaaggcgaagaag

SEQ ID NO: 4134067 - DNA, 25 bp, Homo sapien
aagctctacccctctccgttcagca

SEQ ID NO: 4134068 - DNA, 25 bp, Homo sapien
atgaacaatggaccggattagaatt

SEQ ID NO: 4134069 - DNA, 25 bp, Homo sapien
caatggaccggattagaattaagtc

SEQ ID NO: 4134070 - DNA, 25 bp, Homo sapien
gattagaattaagtcacgggcttac

SEQ ID NO: 4134071 - DNA, 25 bp, Homo sapien
tggaccggattagaattaagtcacg

SEQ ID NO: 4134072 - DNA, 25 bp, Homo sapien
aagatcccagccagctgaagcagag

SEQ ID NO: 4134073 - DNA, 25 bp, Homo sapien
caagatcccagccagctgaagcaga

SEQ ID NO: 4134074 - DNA, 25 bp, Homo sapien
gatcccagccagctgaagcagagcc

SEQ ID NO: 4134075 - DNA, 25 bp, Homo sapien
tcccagccagctgaagcagagccat

SEQ ID NO: 4134076 - DNA, 25 bp, Homo sapien
tcactgtcagaacacttaatgttgt

SEQ ID NO: 4134077 - DNA, 25 bp, Homo sapien
tgtcagaacacttaatgttgttcat

SEQ ID NO: 4134078 - DNA, 25 bp, Homo sapien
actgtcagaacacttaatgttgttc

SEQ ID NO: 4134079 - DNA, 25 bp, Homo sapien
ttcactgtcagaacacttaatgttg

SEQ ID NO: 4134080 - DNA, 25 bp, Homo sapien
ggagtttctcagcattaagttgacc

SEQ ID NO: 4134081 - DNA, 25 bp, Homo sapien
gcttggagtttctcagcattaagtt

SEQ ID NO: 4134082 - DNA, 25 bp, Homo sapien
tggagtttctcagcattaagttgac

SEQ ID NO: 4134083 - DNA, 25 bp, Homo sapien
ttggagtttctcagcattaagttga

SEQ ID NO: 4134084 - DNA, 25 bp, Homo sapien
ttcagaccacatctacccacaagga

SEQ ID NO: 4134085 - DNA, 25 bp, Homo sapien
gagagggcaacattcaagacacatg

SEQ ID NO: 4134086 - DNA, 25 bp, Homo sapien
gacaccgtaaaacaccacagctgtg

SEQ ID NO: 4134087 - DNA, 25 bp, Homo sapien
tattaagccaactagggagaagcat

SEQ ID NO: 4134088 - DNA, 25 bp, Homo sapien
ggcaacgtctttctcatactctttg

SEQ ID NO: 4134089 - DNA, 25 bp, Homo sapien
aatttcttctatggcaacgtctttc

SEQ ID NO: 4134090 - DNA, 25 bp, Homo sapien
gcttctttaccagttggaggccatc

SEQ ID NO: 4134091 - DNA, 25 bp, Homo sapien
tgccagcttctttaccagttggagg

SEQ ID NO: 4134092 - DNA, 25 bp, Homo sapien
ctgacggcctcagacttcttgtgaa

SEQ ID NO: 4134093 - DNA, 25 bp, Homo sapien
tgacggcctcagacttcttgtgaaa

SEQ ID NO: 4134094 - DNA, 25 bp, Homo sapien
cctgacggcctcagacttcttgtga

SEQ ID NO: 4134095 - DNA, 25 bp, Homo sapien
caaggcggcagtaaagaatgcggac

SEQ ID NO: 4134096 - DNA, 25 bp, Homo sapien
cgatacagggcacaaaacataggca

SEQ ID NO: 4134097 - DNA, 25 bp, Homo sapien
gaattggcacaaccttatctggaca

SEQ ID NO: 4134098 - DNA, 25 bp, Homo sapien
ggcacaggaaccctctatgaaaagg

SEQ ID NO: 4134099 - DNA, 25 bp, Homo sapien
ggcagaactgagattcgggacagtt

SEQ ID NO: 4134100 - DNA, 25 bp, Homo sapien
gagcccatgtctcactgaccacgtg

SEQ ID NO: 4134101 - DNA, 25 bp, Homo sapien
cagttccactactttcagagcccat

SEQ ID NO: 4134102 - DNA, 25 bp, Homo sapien
ctcaaggaggtgaggtctaggttct

SEQ ID NO: 4134103 - DNA, 25 bp, Homo sapien
tcattgacttctcgtaatgccgcca

SEQ ID NO: 4134104 - DNA, 25 bp, Homo sapien
aatcattgacttctcgtaatgccgc

SEQ ID NO: 4134105 - DNA, 25 bp, Homo sapien
ttaaatcattgacttctcgtaatgc

SEQ ID NO: 4134106 - DNA, 25 bp, Homo sapien
attgacttctcgtaatgccgccagg

SEQ ID NO: 4134107 - DNA, 25 bp, Homo sapien
aatgggcaggccactttaggtttca

SEQ ID NO: 4134108 - DNA, 25 bp, Homo sapien
taatgggcaggccactttaggtttc

SEQ ID NO: 4134109 - DNA, 25 bp, Homo sapien
tgtcaggttcattcgcttggagccg

SEQ ID NO: 4134110 - DNA, 25 bp, Homo sapien
ggattctggaaagtccatgaacccc

SEQ ID NO: 4134111 - DNA, 25 bp, Homo sapien
ctgaaaaatcagaactgggacaaac

SEQ ID NO: 4134112 - DNA, 25 bp, Homo sapien
caaacatcttggtgccacattgctg

SEQ ID NO: 4134113 - DNA, 25 bp, Homo sapien
tgacatccatcacgggctttgcaga

SEQ ID NO: 4134114 - DNA, 25 bp, Homo sapien
gggctgtctatgagcaactccaacc

SEQ ID NO: 4134115 - DNA, 25 bp, Homo sapien
cctgcttgaggtaggaagactcctg

SEQ ID NO: 4134116 - DNA, 25 bp, Homo sapien
gcagaggtactagagaagttcctct

SEQ ID NO: 4134117 - DNA, 25 bp, Homo sapien
attggaccctaaaggagccttctat

SEQ ID NO: 4134118 - DNA, 25 bp, Homo sapien
ggaccctaaaggagccttctatgaa

SEQ ID NO: 4134119 - DNA, 25 bp, Homo sapien
accctaaaggagccttctatgaaga

SEQ ID NO: 4134120 - DNA, 25 bp, Homo sapien
ttggaccctaaaggagccttctatg

SEQ ID NO: 4134121 - DNA, 25 bp, Homo sapien
cagcatgggctctactgctccctgg

SEQ ID NO: 4134122 - DNA, 25 bp, Homo sapien
cctgatccgattgggaagggccttt

SEQ ID NO: 4134123 - DNA, 25 bp, Homo sapien
gtgacctcctgagttacaactgact

SEQ ID NO: 4134124 - DNA, 25 bp, Homo sapien
gctgcaatttgtggaagtaccccaa

SEQ ID NO: 4134125 - DNA, 25 bp, Homo sapien
cactgacgccaataactctaaggag

SEQ ID NO: 4134126 - DNA, 25 bp, Homo sapien
gccctgggctgtccttaaaacaata

SEQ ID NO: 4134127 - DNA, 25 bp, Homo sapien
tgtttgcagcagactcataaagtgc

SEQ ID NO: 4134128 - DNA, 25 bp, Homo sapien
caatagcaaactggatcgtgtctcc

SEQ ID NO: 4134129 - DNA, 25 bp, Homo sapien
tgaccaaggacttagcagttccgtg

SEQ ID NO: 4134130 - DNA, 25 bp, Homo sapien
atcaatccaggatgtggttggtcca

SEQ ID NO: 4134131 - DNA, 25 bp, Homo sapien
gtcatcacagattacgtcagccagg

SEQ ID NO: 4134132 - DNA, 25 bp, Homo sapien
tcagggcattgtgggattgtcatca

SEQ ID NO: 4134133 - DNA, 25 bp, Homo sapien
gctaatcaacacaccctacatggag

SEQ ID NO: 4134134 - DNA, 25 bp, Homo sapien
tctctgagagctggctaaaaaccca

SEQ ID NO: 4134135 - DNA, 25 bp, Homo sapien
caaggtctttctattccgaagggag

SEQ ID NO: 4134136 - DNA, 25 bp, Homo sapien
caatgtttgagctacgaaagtgtca

SEQ ID NO: 4134137 - DNA, 25 bp, Homo sapien
aatgcacacgatgtgatgtgcatcc

SEQ ID NO: 4134138 - DNA, 25 bp, Homo sapien
gaaaatgcacacgatgtgatgtgca

SEQ ID NO: 4134139 - DNA, 25 bp, Homo sapien
gaggaaaatgcacacgatgtgatgt

SEQ ID NO: 4134140 - DNA, 25 bp, Homo sapien
tgcacacgatgtgatgtgcatccat

SEQ ID NO: 4134141 - DNA, 25 bp, Homo sapien
catgaccagagtggagtcttgcttc

SEQ ID NO: 4134142 - DNA, 25 bp, Homo sapien
ggctctgacatgaccagagtggagt

SEQ ID NO: 4134143 - DNA, 25 bp, Homo sapien
tgacatgaccagagtggagtcttgc

SEQ ID NO: 4134144 - DNA, 25 bp, Homo sapien
caaggctctgacatgaccagagtgg

SEQ ID NO: 4134145 - DNA, 25 bp, Homo sapien
aggagcaggggccaaagtgcagaga

SEQ ID NO: 4134146 - DNA, 25 bp, Homo sapien
ggagcaggggccaaagtgcagagag

SEQ ID NO: 4134147 - DNA, 25 bp, Homo sapien
ctgtgtaagaaccacttcagagcac

SEQ ID NO: 4134148 - DNA, 25 bp, Homo sapien
ggaaggagcaggggccaaagtgcag

SEQ ID NO: 4134149 - DNA, 25 bp, Homo sapien
gatcctagcagcgtgttacacagca

SEQ ID NO: 4134150 - DNA, 25 bp, Homo sapien
taagggcactgagcacatcaaaaga

SEQ ID NO: 4134151 - DNA, 25 bp, Homo sapien
tacctgggactaatgcgatcctagc

SEQ ID NO: 4134152 - DNA, 25 bp, Homo sapien
tgtaccaagggtcagaaatcatcca

SEQ ID NO: 4134153 - DNA, 25 bp, Homo sapien
ttcatgtttcaggtgtgcttcttct

SEQ ID NO: 4134154 - DNA, 25 bp, Homo sapien
aattcatgtttcaggtgtgcttctt

SEQ ID NO: 4134155 - DNA, 25 bp, Homo sapien
attcatgtttcaggtgtgcttcttc

SEQ ID NO: 4134156 - DNA, 25 bp, Homo sapien
gtattcctggtatacctggtacttg

SEQ ID NO: 4134157 - DNA, 25 bp, Homo sapien
attcctggtatacctggtacttgtc

SEQ ID NO: 4134158 - DNA, 25 bp, Homo sapien
cagtattcctggtatacctggtact

SEQ ID NO: 4134159 - DNA, 25 bp, Homo sapien
tcagtattcctggtatacctggtac

SEQ ID NO: 4134160 - DNA, 25 bp, Homo sapien
gtaaatggcccctagatctttgtga

SEQ ID NO: 4134161 - DNA, 25 bp, Homo sapien
tgggcattgcactcaagaggtcctt

SEQ ID NO: 4134162 - DNA, 25 bp, Homo sapien
cagcttcgctcaaagagctgggcca

SEQ ID NO: 4134163 - DNA, 25 bp, Homo sapien
gaaaagccttcaggaacttctgaga

SEQ ID NO: 4134164 - DNA, 25 bp, Homo sapien
aaactgaccacatgagccataaata

SEQ ID NO: 4134165 - DNA, 25 bp, Homo sapien
actctctcccgcacaatcactcctt

SEQ ID NO: 4134166 - DNA, 25 bp, Homo sapien
tacaaagcagtcatcacttccaata

SEQ ID NO: 4134167 - DNA, 25 bp, Homo sapien
tcactctctcccgcacaatcactcc

SEQ ID NO: 4134168 - DNA, 25 bp, Homo sapien
cctggcttgcaacgtttctcttaag

SEQ ID NO: 4134169 - DNA, 25 bp, Homo sapien
tataatgtacctcagagagaaccac

SEQ ID NO: 4134170 - DNA, 25 bp, Homo sapien
gacattctaacgatgatttccctta

SEQ ID NO: 4134171 - DNA, 25 bp, Homo sapien
taaattctctcaacgtttgcttgcc

SEQ ID NO: 4134172 - DNA, 25 bp, Homo sapien
agactagacgctccgcactggcagg

SEQ ID NO: 4134173 - DNA, 25 bp, Homo sapien
ctagacgctccgcactggcagggag

SEQ ID NO: 4134174 - DNA, 25 bp, Homo sapien
tagactagacgctccgcactggcag

SEQ ID NO: 4134175 - DNA, 25 bp, Homo sapien
actagacgctccgcactggcaggga

SEQ ID NO: 4134176 - DNA, 25 bp, Homo sapien
catcgccgtattcagtcttgatgat

SEQ ID NO: 4134177 - DNA, 25 bp, Homo sapien
ccagctcctcatcggcataggagaa

SEQ ID NO: 4134178 - DNA, 25 bp, Homo sapien
ttacaacatcccatttagtctcact

SEQ ID NO: 4134179 - DNA, 25 bp, Homo sapien
taggagaaggaatgttgatagccca

SEQ ID NO: 4134180 - DNA, 25 bp, Homo sapien
cagtcccagttggttagactcacat

SEQ ID NO: 4134181 - DNA, 25 bp, Homo sapien
agcatttgatgctttgctttgaact

SEQ ID NO: 4134182 - DNA, 25 bp, Homo sapien
gtcccagttggttagactcacattc

SEQ ID NO: 4134183 - DNA, 25 bp, Homo sapien
tgatgctttgctttgaacttatttt

SEQ ID NO: 4134184 - DNA, 25 bp, Homo sapien
gtacatcagtcaaaagtaagtttgg

SEQ ID NO: 4134185 - DNA, 25 bp, Homo sapien
acatcagtcaaaagtaagtttggtc

SEQ ID NO: 4134186 - DNA, 25 bp, Homo sapien
cttccgcttgatcggcttggctatt

SEQ ID NO: 4134187 - DNA, 25 bp, Homo sapien
tacatcagtcaaaagtaagtttggt

SEQ ID NO: 4134188 - DNA, 25 bp, Homo sapien
gaagccacggaagccaggtcactga

SEQ ID NO: 4134189 - DNA, 25 bp, Homo sapien
ggagatcacacaacttaaccatctg

SEQ ID NO: 4134190 - DNA, 25 bp, Homo sapien
taaccatctgcttaaggtttccaag

SEQ ID NO: 4134191 - DNA, 25 bp, Homo sapien
gaagtctttgatctttgccagagaa

SEQ ID NO: 4134192 - DNA, 25 bp, Homo sapien
tacatgtggcttagggaagagggct

SEQ ID NO: 4134193 - DNA, 25 bp, Homo sapien
gaagagggctgtgaactcacttaga

SEQ ID NO: 4134194 - DNA, 25 bp, Homo sapien
gagggctgtgaactcacttagacct

SEQ ID NO: 4134195 - DNA, 25 bp, Homo sapien
gctgtgaactcacttagacctgggc

SEQ ID NO: 4134196 - DNA, 25 bp, Homo sapien
ctttgttgtacatgttcgttggtac

SEQ ID NO: 4134197 - DNA, 25 bp, Homo sapien
cagctccaaaaaattcccgtctttg

SEQ ID NO: 4134198 - DNA, 25 bp, Homo sapien
tatcagcacagcattgaagtattca

SEQ ID NO: 4134199 - DNA, 25 bp, Homo sapien
ggtacttggacgtcacttagactga

SEQ ID NO: 4134200 - DNA, 25 bp, Homo sapien
tacgtcatcaataactagatctgag

SEQ ID NO: 4134201 - DNA, 25 bp, Homo sapien
agcatttgttttgagtacgtcatca

SEQ ID NO: 4134202 - DNA, 25 bp, Homo sapien
gatttccaacccaaaaacagcacag

SEQ ID NO: 4134203 - DNA, 25 bp, Homo sapien
gcacagccagtgaccaatctctgag

SEQ ID NO: 4134204 - DNA, 25 bp, Homo sapien
aaaggtatcagccattcatcttcaa

SEQ ID NO: 4134205 - DNA, 25 bp, Homo sapien
tctaaaggtatcagccattcatctt

SEQ ID NO: 4134206 - DNA, 25 bp, Homo sapien
atcttcaaagtctccgaaatagtaa

SEQ ID NO: 4134207 - DNA, 25 bp, Homo sapien
tctccgaaatagtaagactcacaag

SEQ ID NO: 4134208 - DNA, 25 bp, Homo sapien
aggacagttggcacctagaggcccc

SEQ ID NO: 4134209 - DNA, 25 bp, Homo sapien
ggtgtaggcatttcatgtctcccca

SEQ ID NO: 4134210 - DNA, 25 bp, Homo sapien
aatggctggccttcacaacacatgg

SEQ ID NO: 4134211 - DNA, 25 bp, Homo sapien
gactccacgagtgtgaaatggctgg

SEQ ID NO: 4134212 - DNA, 25 bp, Homo sapien
atgggacccatagtctcattggtgt

SEQ ID NO: 4134213 - DNA, 25 bp, Homo sapien
tgggacccatagtctcattggtgtc

SEQ ID NO: 4134214 - DNA, 25 bp, Homo sapien
gggacccatagtctcattggtgtca

SEQ ID NO: 4134215 - DNA, 25 bp, Homo sapien
caggagagctccaccagcagcgcag

SEQ ID NO: 4134216 - DNA, 25 bp, Homo sapien
gaacagtcccagctgtgaccacata

SEQ ID NO: 4134217 - DNA, 25 bp, Homo sapien
gagagctccaccagcagcgcaggca

SEQ ID NO: 4134218 - DNA, 25 bp, Homo sapien
agcagcgcaggcagaacagtcccag

SEQ ID NO: 4134219 - DNA, 25 bp, Homo sapien
caggctcttaaagggcttattccgg

SEQ ID NO: 4134220 - DNA, 25 bp, Homo sapien
tcacatcttaaaagccatggcagtt

SEQ ID NO: 4134221 - DNA, 25 bp, Homo sapien
cagctcaagtttctgcaggctctta

SEQ ID NO: 4134222 - DNA, 25 bp, Homo sapien
tattccgggtgtcctgaactctgtg

SEQ ID NO: 4134223 - DNA, 25 bp, Homo sapien
gcttggcagatactggcacaaggta

SEQ ID NO: 4134224 - DNA, 25 bp, Homo sapien
ttggcagatactggcacaaggtact

SEQ ID NO: 4134225 - DNA, 25 bp, Homo sapien
cttggcagatactggcacaaggtac

SEQ ID NO: 4134226 - DNA, 25 bp, Homo sapien
aagtactgccatatgagagatgggt

SEQ ID NO: 4134227 - DNA, 25 bp, Homo sapien
gggtcacggtcaaagttatctacaa

SEQ ID NO: 4134228 - DNA, 25 bp, Homo sapien
gagattcagaccaataaaccccatt

SEQ ID NO: 4134229 - DNA, 25 bp, Homo sapien
taaaccccattgacaattgcagggt

SEQ ID NO: 4134230 - DNA, 25 bp, Homo sapien
tcctgcagtcgaaggcaatgactcc

SEQ ID NO: 4134231 - DNA, 25 bp, Homo sapien
gcagtcgaaggcaatgactccattc

SEQ ID NO: 4134232 - DNA, 25 bp, Homo sapien
cattttcggttcctgcagtcgaagg

SEQ ID NO: 4134233 - DNA, 25 bp, Homo sapien
tcggttcctgcagtcgaaggcaatg

SEQ ID NO: 4134234 - DNA, 25 bp, Homo sapien
ttatgttgaagaagtcatcatcccc

SEQ ID NO: 4134235 - DNA, 25 bp, Homo sapien
tttgcttcgcgatagtcagacggag

SEQ ID NO: 4134236 - DNA, 25 bp, Homo sapien
gacggagtcctttcatgctgccact

SEQ ID NO: 4134237 - DNA, 25 bp, Homo sapien
cacgtctttcggagaagttgctgcc

SEQ ID NO: 4134238 - DNA, 25 bp, Homo sapien
gtgcaaagaaggcacaaaacggtgc

SEQ ID NO: 4134239 - DNA, 25 bp, Homo sapien
agaaggcacaaaacggtgcactcac

SEQ ID NO: 4134240 - DNA, 25 bp, Homo sapien
caaagaaggcacaaaacggtgcact

SEQ ID NO: 4134241 - DNA, 25 bp, Homo sapien
caagtgcaaagaaggcacaaaacgg

SEQ ID NO: 4134242 - DNA, 25 bp, Homo sapien
ctccaaactctccgccctgaaggca

SEQ ID NO: 4134243 - DNA, 25 bp, Homo sapien
tctgtgagcattccctagatctccc

SEQ ID NO: 4134244 - DNA, 25 bp, Homo sapien
cctgaaggcaagggacacatcatca

SEQ ID NO: 4134245 - DNA, 25 bp, Homo sapien
aaactctccgccctgaaggcaaggg

SEQ ID NO: 4134246 - DNA, 25 bp, Homo sapien
ggttccacatagtgaagctcctcat

SEQ ID NO: 4134247 - DNA, 25 bp, Homo sapien
tgtttgtcctgtcggcttgcaccaa

SEQ ID NO: 4134248 - DNA, 25 bp, Homo sapien
ggcttgcaccaaagttccattcagg

SEQ ID NO: 4134249 - DNA, 25 bp, Homo sapien
aaagttccattcaggcaaggttcca

SEQ ID NO: 4134250 - DNA, 25 bp, Homo sapien
cagaagctgtgacatggctgcagcc

SEQ ID NO: 4134251 - DNA, 25 bp, Homo sapien
gccacagctataccttcaagtgaaa

SEQ ID NO: 4134252 - DNA, 25 bp, Homo sapien
tcaggtacagaaaatcaacatgggc

SEQ ID NO: 4134253 - DNA, 25 bp, Homo sapien
ctgcagccacagctataccttcaag

SEQ ID NO: 4134254 - DNA, 25 bp, Homo sapien
aatgctcaacagtcatacccaaagg

SEQ ID NO: 4134255 - DNA, 25 bp, Homo sapien
tgcgttatgtctagggcttctcagt

SEQ ID NO: 4134256 - DNA, 25 bp, Homo sapien
tccatattggcagaataagaagtcc

SEQ ID NO: 4134257 - DNA, 25 bp, Homo sapien
gctcattggagcattgcggatttca

SEQ ID NO: 4134258 - DNA, 25 bp, Homo sapien
ttctatatttgaactccaggctcac

SEQ ID NO: 4134259 - DNA, 25 bp, Homo sapien
ttaaattctatatttgaactccagg

SEQ ID NO: 4134260 - DNA, 25 bp, Homo sapien
taaattctatatttgaactccaggc

SEQ ID NO: 4134261 - DNA, 25 bp, Homo sapien
aattctatatttgaactccaggctc

SEQ ID NO: 4134262 - DNA, 25 bp, Homo sapien
gacaactcgggatctagggttccta

SEQ ID NO: 4134263 - DNA, 25 bp, Homo sapien
tgtgatgtgacacaaccagtgccca

SEQ ID NO: 4134264 - DNA, 25 bp, Homo sapien
tactgatcctcgctctatggatggg

SEQ ID NO: 4134265 - DNA, 25 bp, Homo sapien
ggtcaccatggctaagactcaaagc

SEQ ID NO: 4134266 - DNA, 25 bp, Homo sapien
cgtcgtcttcttgttcatgacccag

SEQ ID NO: 4134267 - DNA, 25 bp, Homo sapien
cgcacagggctacatttgcagggct

SEQ ID NO: 4134268 - DNA, 25 bp, Homo sapien
tcaggccacgtcgtcttcttgttca

SEQ ID NO: 4134269 - DNA, 25 bp, Homo sapien
ccagtgtgtgcgcacagggctacat

SEQ ID NO: 4134270 - DNA, 25 bp, Homo sapien
ggctgcggagaccatacctcgtgaa

SEQ ID NO: 4134271 - DNA, 25 bp, Homo sapien
tttaccgcgcctgtgctagactgaa

SEQ ID NO: 4134272 - DNA, 25 bp, Homo sapien
gtatggtgcgatcggtttaccgcgc

SEQ ID NO: 4134273 - DNA, 25 bp, Homo sapien
tttgacgacccatggcacggaggat

SEQ ID NO: 4134274 - DNA, 25 bp, Homo sapien
caggcgtcccagctgtagttgggca

SEQ ID NO: 4134275 - DNA, 25 bp, Homo sapien
tgacatatacctgagcagtctggct

SEQ ID NO: 4134276 - DNA, 25 bp, Homo sapien
tccaggcaattaaccgagtccaagg

SEQ ID NO: 4134277 - DNA, 25 bp, Homo sapien
tcaggcttgtgaccaccatgaggac

SEQ ID NO: 4134278 - DNA, 25 bp, Homo sapien
ggtaggtgaacctgcggaaggtctg

SEQ ID NO: 4134279 - DNA, 25 bp, Homo sapien
cctgcggaaggtctgcttcttctgc

SEQ ID NO: 4134280 - DNA, 25 bp, Homo sapien
taggtgaacctgcggaaggtctgct

SEQ ID NO: 4134281 - DNA, 25 bp, Homo sapien
aacctgcggaaggtctgcttcttct

SEQ ID NO: 4134282 - DNA, 25 bp, Homo sapien
cagcagctggtccaggtccacgcca

SEQ ID NO: 4134283 - DNA, 25 bp, Homo sapien
gtccagcagctggtccaggtccacg

SEQ ID NO: 4134284 - DNA, 25 bp, Homo sapien
agcagctggtccaggtccacgccac

SEQ ID NO: 4134285 - DNA, 25 bp, Homo sapien
tccagcagctggtccaggtccacgc

SEQ ID NO: 4134286 - DNA, 25 bp, Homo sapien
acagcggcatcagccgcttgtagga

SEQ ID NO: 4134287 - DNA, 25 bp, Homo sapien
tgtacagcggcatcagccgcttgta

SEQ ID NO: 4134288 - DNA, 25 bp, Homo sapien
tacagcggcatcagccgcttgtagg

SEQ ID NO: 4134289 - DNA, 25 bp, Homo sapien
cactgtacagcggcatcagccgctt

SEQ ID NO: 4134290 - DNA, 25 bp, Homo sapien
cgatgccgggcccgccgtgctttat

SEQ ID NO: 4134291 - DNA, 25 bp, Homo sapien
ggcccgccgtgctttatgggcttgt

SEQ ID NO: 4134292 - DNA, 25 bp, Homo sapien
ccgggcccgccgtgctttatgggct

SEQ ID NO: 4134293 - DNA, 25 bp, Homo sapien
ccgccgtgctttatgggcttgtagg

SEQ ID NO: 4134294 - DNA, 25 bp, Homo sapien
ttttgactggaaccatgtgcgcctt

SEQ ID NO: 4134295 - DNA, 25 bp, Homo sapien
ttttttttgactggaaccatgtgcg

SEQ ID NO: 4134296 - DNA, 25 bp, Homo sapien
ttgactggaaccatgtgcgccttta

SEQ ID NO: 4134297 - DNA, 25 bp, Homo sapien
ttttttgactggaaccatgtgcgcc

SEQ ID NO: 4134298 - DNA, 25 bp, Homo sapien
cacatgcgtaatacacacagaaggg

SEQ ID NO: 4134299 - DNA, 25 bp, Homo sapien
gagtaggccctaagacccttctggc

SEQ ID NO: 4134300 - DNA, 25 bp, Homo sapien
gagtgaggctcttccagagtaggcc

SEQ ID NO: 4134301 - DNA, 25 bp, Homo sapien
cgcatgacgtattctcagagcacca

SEQ ID NO: 4134302 - DNA, 25 bp, Homo sapien
ttagcttcagttacagtttaggaag

SEQ ID NO: 4134303 - DNA, 25 bp, Homo sapien
tagcttcagttacagtttaggaaga

SEQ ID NO: 4134304 - DNA, 25 bp, Homo sapien
gcttcagttacagtttaggaagaaa

SEQ ID NO: 4134305 - DNA, 25 bp, Homo sapien
gtttagcttcagttacagtttagga

SEQ ID NO: 4134306 - DNA, 25 bp, Homo sapien
agcaaagcagaaaatccattagtgt

SEQ ID NO: 4134307 - DNA, 25 bp, Homo sapien
ctgaaacagcaaagcagaaaatcca

SEQ ID NO: 4134308 - DNA, 25 bp, Homo sapien
aacagcaaagcagaaaatccattag

SEQ ID NO: 4134309 - DNA, 25 bp, Homo sapien
tgaaacagcaaagcagaaaatccat

SEQ ID NO: 4134310 - DNA, 25 bp, Homo sapien
ctttggcgaaaagtttgtccagatg

SEQ ID NO: 4134311 - DNA, 25 bp, Homo sapien
ttcagagctatatccaacattccaa

SEQ ID NO: 4134312 - DNA, 25 bp, Homo sapien
cattcagagctatatccaacattcc

SEQ ID NO: 4134313 - DNA, 25 bp, Homo sapien
tcagagctatatccaacattccaat

SEQ ID NO: 4134314 - DNA, 25 bp, Homo sapien
agagctatatccaacattccaattc

SEQ ID NO: 4134315 - DNA, 25 bp, Homo sapien
agtaccttggcaggccggcattaaa

SEQ ID NO: 4134316 - DNA, 25 bp, Homo sapien
gcaggccggcattaaactgcgcatg

SEQ ID NO: 4134317 - DNA, 25 bp, Homo sapien
ttggcaggccggcattaaactgcgc

SEQ ID NO: 4134318 - DNA, 25 bp, Homo sapien
gtgggagtaccttggcaggccggca

SEQ ID NO: 4134319 - DNA, 25 bp, Homo sapien
tcgcttattttcacgccccaacctc

SEQ ID NO: 4134320 - DNA, 25 bp, Homo sapien
tttcagaccacgcagggatgcctgc

SEQ ID NO: 4134321 - DNA, 25 bp, Homo sapien
ttcacgtttcagaccacgcagggat

SEQ ID NO: 4134322 - DNA, 25 bp, Homo sapien
gcaagtcccgctttcctagggggca

SEQ ID NO: 4134323 - DNA, 25 bp, Homo sapien
cggacgcgcatgaaatttggtgccg

SEQ ID NO: 4134324 - DNA, 25 bp, Homo sapien
cgcatgaaatttggtgccgtgactc

SEQ ID NO: 4134325 - DNA, 25 bp, Homo sapien
tcccttgggagatcaatcccctgtc

SEQ ID NO: 4134326 - DNA, 25 bp, Homo sapien
gccgtgactcggatcgggggacctc

SEQ ID NO: 4134327 - DNA, 25 bp, Homo sapien
gatacttccttgtcccgtgtggttg

SEQ ID NO: 4134328 - DNA, 25 bp, Homo sapien
cctgactgcagatacttccttgtcc

SEQ ID NO: 4134329 - DNA, 25 bp, Homo sapien
tgcagatacttccttgtcccgtgtg

SEQ ID NO: 4134330 - DNA, 25 bp, Homo sapien
tgactgcagatacttccttgtcccg

SEQ ID NO: 4134331 - DNA, 25 bp, Homo sapien
gtatcataggtgtccaccgccccat

SEQ ID NO: 4134332 - DNA, 25 bp, Homo sapien
aagattgtatcataggtgtccaccg

SEQ ID NO: 4134333 - DNA, 25 bp, Homo sapien
tctggccaattgtattttgcaaaga

SEQ ID NO: 4134334 - DNA, 25 bp, Homo sapien
tttcgatctggccaattgtattttg

SEQ ID NO: 4134335 - DNA, 25 bp, Homo sapien
ggcaaggacaaatggcctctggctg

SEQ ID NO: 4134336 - DNA, 25 bp, Homo sapien
gcaaggacaaatggcctctggctgg

SEQ ID NO: 4134337 - DNA, 25 bp, Homo sapien
cagtagaagcagttaggatgggctc

SEQ ID NO: 4134338 - DNA, 25 bp, Homo sapien
tctaacaggtgtagatgggtcacca

SEQ ID NO: 4134339 - DNA, 25 bp, Homo sapien
cacaaccaggtgagggtcagttcat

SEQ ID NO: 4134340 - DNA, 25 bp, Homo sapien
tttatggataggtcaactctgcccc

SEQ ID NO: 4134341 - DNA, 25 bp, Homo sapien
gcacggaaatcgcactcatcttgaa

SEQ ID NO: 4134342 - DNA, 25 bp, Homo sapien
ggaaaaggacttactgtcccgatga

SEQ ID NO: 4134343 - DNA, 25 bp, Homo sapien
taaaacgcacagtacacagcacgga

SEQ ID NO: 4134344 - DNA, 25 bp, Homo sapien
agccccagtgggttctaatctaaga

SEQ ID NO: 4134345 - DNA, 25 bp, Homo sapien
ttcttcttgctggagtcacaagatg

SEQ ID NO: 4134346 - DNA, 25 bp, Homo sapien
tcttcttgctggagtcacaagatgt

SEQ ID NO: 4134347 - DNA, 25 bp, Homo sapien
gttcttcttgctggagtcacaagat

SEQ ID NO: 4134348 - DNA, 25 bp, Homo sapien
ggcttcgttcctaacttgtcttgtc

SEQ ID NO: 4134349 - DNA, 25 bp, Homo sapien
tcgtgggcccctgacatgaagtgat

SEQ ID NO: 4134350 - DNA, 25 bp, Homo sapien
ctggcagcagccgtgcatcagtggc

SEQ ID NO: 4134351 - DNA, 25 bp, Homo sapien
gaagtaccatgcatctgtcgtgggc

SEQ ID NO: 4134352 - DNA, 25 bp, Homo sapien
ggagagaatgtacactgtcctccca

SEQ ID NO: 4134353 - DNA, 25 bp, Homo sapien
ctggagagaatgtacactgtcctcc

SEQ ID NO: 4134354 - DNA, 25 bp, Homo sapien
tggagagaatgtacactgtcctccc

SEQ ID NO: 4134355 - DNA, 25 bp, Homo sapien
gagagaatgtacactgtcctcccac

SEQ ID NO: 4134356 - DNA, 25 bp, Homo sapien
gcacactgggcacttttcctagctg

SEQ ID NO: 4134357 - DNA, 25 bp, Homo sapien
cacactgggcacttttcctagctgg

SEQ ID NO: 4134358 - DNA, 25 bp, Homo sapien
acactgggcacttttcctagctggg

SEQ ID NO: 4134359 - DNA, 25 bp, Homo sapien
tgcacactgggcacttttcctagct

SEQ ID NO: 4134360 - DNA, 25 bp, Homo sapien
aggaaatcctaccatttacaacatg

SEQ ID NO: 4134361 - DNA, 25 bp, Homo sapien
gaaggaaatcctaccatttacaaca

SEQ ID NO: 4134362 - DNA, 25 bp, Homo sapien
ccagccttggaaagaaggaaatcct

SEQ ID NO: 4134363 - DNA, 25 bp, Homo sapien
gaaatcctaccatttacaacatgga

SEQ ID NO: 4134364 - DNA, 25 bp, Homo sapien
gcaagcccagcagacgcacttgctg

SEQ ID NO: 4134365 - DNA, 25 bp, Homo sapien
caggagagaagcaagcgcagcaaaa

SEQ ID NO: 4134366 - DNA, 25 bp, Homo sapien
cagcagacgcacttgctggcctgag

SEQ ID NO: 4134367 - DNA, 25 bp, Homo sapien
gaagcaagcgcagcaaaatccttgc

SEQ ID NO: 4134368 - DNA, 25 bp, Homo sapien
tttccaccaacagcaccagccaggt

SEQ ID NO: 4134369 - DNA, 25 bp, Homo sapien
actttccaccaacagcaccagccag

SEQ ID NO: 4134370 - DNA, 25 bp, Homo sapien
agcaccagccaggtggacctgaaca

SEQ ID NO: 4134371 - DNA, 25 bp, Homo sapien
accaacagcaccagccaggtggacc

SEQ ID NO: 4134372 - DNA, 25 bp, Homo sapien
tcgcctttcttgtcatcctgcctct

SEQ ID NO: 4134373 - DNA, 25 bp, Homo sapien
agttgtcttcatcgcctttcttgtc

SEQ ID NO: 4134374 - DNA, 25 bp, Homo sapien
catcgcctttcttgtcatcctgcct

SEQ ID NO: 4134375 - DNA, 25 bp, Homo sapien
ttagttgtcttcatcgcctttcttg

SEQ ID NO: 4134376 - DNA, 25 bp, Homo sapien
tgggagaggaggtgacttcacagca

SEQ ID NO: 4134377 - DNA, 25 bp, Homo sapien
aaaggacaagttgggagaggaggtg

SEQ ID NO: 4134378 - DNA, 25 bp, Homo sapien
tcacagcaaaaaatgtctttggtac

SEQ ID NO: 4134379 - DNA, 25 bp, Homo sapien
agaggaggtgacttcacagcaaaaa

SEQ ID NO: 4134380 - DNA, 25 bp, Homo sapien
actccaggaggaaacgccttgccag

SEQ ID NO: 4134381 - DNA, 25 bp, Homo sapien
cattatttgcgcctgtaaagggaaa

SEQ ID NO: 4134382 - DNA, 25 bp, Homo sapien
ttattaacagcttgtgccgacacag

SEQ ID NO: 4134383 - DNA, 25 bp, Homo sapien
gaaagattcattatggtccagccca

SEQ ID NO: 4134384 - DNA, 25 bp, Homo sapien
agtgattactgaagaggcaccagcc

SEQ ID NO: 4134385 - DNA, 25 bp, Homo sapien
tgtatatattacactctcacaggct

SEQ ID NO: 4134386 - DNA, 25 bp, Homo sapien
tagaaataggtcctgctgtatatat

SEQ ID NO: 4134387 - DNA, 25 bp, Homo sapien
cagccaagcctttacagaatagaat

SEQ ID NO: 4134388 - DNA, 25 bp, Homo sapien
cagggcaggtgcaggaatagggtac

SEQ ID NO: 4134389 - DNA, 25 bp, Homo sapien
tacagaagcataagggttgtccttg

SEQ ID NO: 4134390 - DNA, 25 bp, Homo sapien
agaagcataagggttgtccttgccc

SEQ ID NO: 4134391 - DNA, 25 bp, Homo sapien
gaatagggtacagaagcataagggt

SEQ ID NO: 4134392 - DNA, 25 bp, Homo sapien
gacattttgcaacttggcgcttggg

SEQ ID NO: 4134393 - DNA, 25 bp, Homo sapien
tttgtgctctactgtgagcttgccg

SEQ ID NO: 4134394 - DNA, 25 bp, Homo sapien
actcatgatacaacatcagtgtgaa

SEQ ID NO: 4134395 - DNA, 25 bp, Homo sapien
catgatacaacatcagtgtgaaggt

SEQ ID NO: 4134396 - DNA, 25 bp, Homo sapien
tctgaagagtcttggggtatatcaa

SEQ ID NO: 4134397 - DNA, 25 bp, Homo sapien
aatctgaagagtcttggggtatatc

SEQ ID NO: 4134398 - DNA, 25 bp, Homo sapien
ctgaagagtcttggggtatatcaag

SEQ ID NO: 4134399 - DNA, 25 bp, Homo sapien
atctgaagagtcttggggtatatca

SEQ ID NO: 4134400 - DNA, 25 bp, Homo sapien
caatttccactttccaagcacggcc

SEQ ID NO: 4134401 - DNA, 25 bp, Homo sapien
atttccactttccaagcacggccat

SEQ ID NO: 4134402 - DNA, 25 bp, Homo sapien
cttaccaatttccactttccaagca

SEQ ID NO: 4134403 - DNA, 25 bp, Homo sapien
taccaatttccactttccaagcacg

SEQ ID NO: 4134404 - DNA, 25 bp, Homo sapien
gatacccagtttattaagagctttg

SEQ ID NO: 4134405 - DNA, 25 bp, Homo sapien
tgcttatcagcctaaggagactcca

SEQ ID NO: 4134406 - DNA, 25 bp, Homo sapien
gactccactgagacgatgtggtttt

SEQ ID NO: 4134407 - DNA, 25 bp, Homo sapien
tattgatacccagtttattaagagc

SEQ ID NO: 4134408 - DNA, 25 bp, Homo sapien
aaggtgccaccagatcctatactga

SEQ ID NO: 4134409 - DNA, 25 bp, Homo sapien
tgtgcacaatcagtgagaaccaacg

SEQ ID NO: 4134410 - DNA, 25 bp, Homo sapien
gaaacagcaatctagaattagtggc

SEQ ID NO: 4134411 - DNA, 25 bp, Homo sapien
gctatgatggactatgtactgtcag

SEQ ID NO: 4134412 - DNA, 25 bp, Homo sapien
atgtacacaagtggtcatcaacaac

SEQ ID NO: 4134413 - DNA, 25 bp, Homo sapien
caagtggtcatcaacaacttttggg

SEQ ID NO: 4134414 - DNA, 25 bp, Homo sapien
aaaacagctcaatgtatgagggtct

SEQ ID NO: 4134415 - DNA, 25 bp, Homo sapien
ctcaatgtatgagggtctgaagaac

SEQ ID NO: 4134416 - DNA, 25 bp, Homo sapien
gagggtccacataaaactctgatga

SEQ ID NO: 4134417 - DNA, 25 bp, Homo sapien
tccacataaaactctgatgaccaca

SEQ ID NO: 4134418 - DNA, 25 bp, Homo sapien
ttcgagggtccacataaaactctga

SEQ ID NO: 4134419 - DNA, 25 bp, Homo sapien
acataaaactctgatgaccacaacg

SEQ ID NO: 4134420 - DNA, 25 bp, Homo sapien
tatagggatgatggcaaagggtgct

SEQ ID NO: 4134421 - DNA, 25 bp, Homo sapien
tgtatagggatgatggcaaagggtg

SEQ ID NO: 4134422 - DNA, 25 bp, Homo sapien
atggaaatgtatagggatgatggca

SEQ ID NO: 4134423 - DNA, 25 bp, Homo sapien
aaatgtatagggatgatggcaaagg

SEQ ID NO: 4134424 - DNA, 25 bp, Homo sapien
tctggacagtgtcccctctcgtacc

SEQ ID NO: 4134425 - DNA, 25 bp, Homo sapien
tggagtccttgtgattttctcattg

SEQ ID NO: 4134426 - DNA, 25 bp, Homo sapien
aaagccccacagtaagaagccgcat

SEQ ID NO: 4134427 - DNA, 25 bp, Homo sapien
aagaagccgcatgcctctggacagt

SEQ ID NO: 4134428 - DNA, 25 bp, Homo sapien
atcagggtacacaaccaagacccac

SEQ ID NO: 4134429 - DNA, 25 bp, Homo sapien
gcctctggatcagtgagaccccaaa

SEQ ID NO: 4134430 - DNA, 25 bp, Homo sapien
ctgcctctggatcagtgagacccca

SEQ ID NO: 4134431 - DNA, 25 bp, Homo sapien
catgagtttgtctccctttgcctcc

SEQ ID NO: 4134432 - DNA, 25 bp, Homo sapien
ctggatcagtgagaccccaaaggcc

SEQ ID NO: 4134433 - DNA, 25 bp, Homo sapien
tgaaggccaggtgcacggcacagac

SEQ ID NO: 4134434 - DNA, 25 bp, Homo sapien
gcaaggagtgtgaagcagagccaaa

SEQ ID NO: 4134435 - DNA, 25 bp, Homo sapien
cggcacagacaaccatgggaaggtg

SEQ ID NO: 4134436 - DNA, 25 bp, Homo sapien
tctggaatacaccagagctccccgg

SEQ ID NO: 4134437 - DNA, 25 bp, Homo sapien
ctagtctgatgggtcaagtgctcct

SEQ ID NO: 4134438 - DNA, 25 bp, Homo sapien
tcaaaggctttaccaggtgatgtcc

SEQ ID NO: 4134439 - DNA, 25 bp, Homo sapien
gctggtctgtgaagtcgatctgctc

SEQ ID NO: 4134440 - DNA, 25 bp, Homo sapien
ttatttatcacagctcctgcaaggg

SEQ ID NO: 4134441 - DNA, 25 bp, Homo sapien
tctgtggtgtctggcatgatattag

SEQ ID NO: 4134442 - DNA, 25 bp, Homo sapien
tctggcatgatattagaagataatt

SEQ ID NO: 4134443 - DNA, 25 bp, Homo sapien
gagactctttctagtcttcctaagc

SEQ ID NO: 4134444 - DNA, 25 bp, Homo sapien
ggagatctatggagactctttctag

SEQ ID NO: 4134445 - DNA, 25 bp, Homo sapien
caaacgcatggctgagcggcattca

SEQ ID NO: 4134446 - DNA, 25 bp, Homo sapien
gctgagcggcattcacttttcgcca

SEQ ID NO: 4134447 - DNA, 25 bp, Homo sapien
ctgaagggaagacaaacgcatggct

SEQ ID NO: 4134448 - DNA, 25 bp, Homo sapien
agggaagacaaacgcatggctgagc

SEQ ID NO: 4134449 - DNA, 25 bp, Homo sapien
tctcgtccaatgaggtatgtgaaga

SEQ ID NO: 4134450 - DNA, 25 bp, Homo sapien
ccatccactttagattgtctgcaaa

SEQ ID NO: 4134451 - DNA, 25 bp, Homo sapien
cactttagattgtctgcaaacgcag

SEQ ID NO: 4134452 - DNA, 25 bp, Homo sapien
aaacgcagcctctcgtccaatgagg

SEQ ID NO: 4134453 - DNA, 25 bp, Homo sapien
tatttgtcatgaacactatttataa

SEQ ID NO: 4134454 - DNA, 25 bp, Homo sapien
tgctgcatctcgtgactgttctgtc

SEQ ID NO: 4134455 - DNA, 25 bp, Homo sapien
ctatttataatccagtgtgggttgg

SEQ ID NO: 4134456 - DNA, 25 bp, Homo sapien
ctgctgcatctcgtgactgttctgt

SEQ ID NO: 4134457 - DNA, 25 bp, Homo sapien
taactgacgcaacgtgaagccaatg

SEQ ID NO: 4134458 - DNA, 25 bp, Homo sapien
gatgaaacgatcaagaagggctgac

SEQ ID NO: 4134459 - DNA, 25 bp, Homo sapien
cgatgttacatggtccaaaacccct

SEQ ID NO: 4134460 - DNA, 25 bp, Homo sapien
gaagagtggcaaacagtgacattcc

SEQ ID NO: 4134461 - DNA, 25 bp, Homo sapien
tgggctagtcggtagtcggccctct

SEQ ID NO: 4134462 - DNA, 25 bp, Homo sapien
gatgactgatcggttgagaacccaa

SEQ ID NO: 4134463 - DNA, 25 bp, Homo sapien
aatgttagagaaggtcaccatggct

SEQ ID NO: 4134464 - DNA, 25 bp, Homo sapien
atggaggcccttctttatttgcaca

SEQ ID NO: 4134465 - DNA, 25 bp, Homo sapien
ccatctttggagtgacgggtgtagc

SEQ ID NO: 4134466 - DNA, 25 bp, Homo sapien
tcctcagtgggcagatcctagctgt

SEQ ID NO: 4134467 - DNA, 25 bp, Homo sapien
gatccaagggtaccaggagtctgtc

SEQ ID NO: 4134468 - DNA, 25 bp, Homo sapien
gcaccaaaatatcagtctccagagg

SEQ ID NO: 4134469 - DNA, 25 bp, Homo sapien
gtctttagttccagggcgctgctat

SEQ ID NO: 4134470 - DNA, 25 bp, Homo sapien
gctatgttcctgtactgctgtagag

SEQ ID NO: 4134471 - DNA, 25 bp, Homo sapien
tgtgattggtgacactattttggtc

SEQ ID NO: 4134472 - DNA, 25 bp, Homo sapien
ctgttgtcttgtgattggtgacact

SEQ ID NO: 4134473 - DNA, 25 bp, Homo sapien
ttctcctgcacatcagccaaggtgg

SEQ ID NO: 4134474 - DNA, 25 bp, Homo sapien
ctgtcaatgtaagcttcggtccaca

SEQ ID NO: 4134475 - DNA, 25 bp, Homo sapien
tggtcgatgactttgggccggctaa

SEQ ID NO: 4134476 - DNA, 25 bp, Homo sapien
ggccggctaagcacgtgaaggtatt

SEQ ID NO: 4134477 - DNA, 25 bp, Homo sapien
ggcccatggtcagagttcaaacaac

SEQ ID NO: 4134478 - DNA, 25 bp, Homo sapien
tggtggccccaattcattattagag

SEQ ID NO: 4134479 - DNA, 25 bp, Homo sapien
gaaacccagccattgagccattact

SEQ ID NO: 4134480 - DNA, 25 bp, Homo sapien
tagaattcggctttagaatgggccc

SEQ ID NO: 4134481 - DNA, 25 bp, Homo sapien
agctgccttctcttcacccggcaga

SEQ ID NO: 4134482 - DNA, 25 bp, Homo sapien
agcagctgccttctcttcacccggc

SEQ ID NO: 4134483 - DNA, 25 bp, Homo sapien
gctgccttctcttcacccggcagac

SEQ ID NO: 4134484 - DNA, 25 bp, Homo sapien
ctgttgaagcagcagctgccttctc

SEQ ID NO: 4134485 - DNA, 25 bp, Homo sapien
tgtttgtttgttcgtgtcctggcag

SEQ ID NO: 4134486 - DNA, 25 bp, Homo sapien
cataaggagctggaagaaactgctg

SEQ ID NO: 4134487 - DNA, 25 bp, Homo sapien
gcagaatccaggtccacataaggag

SEQ ID NO: 4134488 - DNA, 25 bp, Homo sapien
tttgttcgtgtcctggcagaatcca

SEQ ID NO: 4134489 - DNA, 25 bp, Homo sapien
ctgcagatgagttcaccatgtgaac

SEQ ID NO: 4134490 - DNA, 25 bp, Homo sapien
tgcagatgagttcaccatgtgaacc

SEQ ID NO: 4134491 - DNA, 25 bp, Homo sapien
agatgagttcaccatgtgaaccctg

SEQ ID NO: 4134492 - DNA, 25 bp, Homo sapien
gcagatgagttcaccatgtgaaccc

SEQ ID NO: 4134493 - DNA, 25 bp, Homo sapien
tggatgtgtcaggacagtcataaat

SEQ ID NO: 4134494 - DNA, 25 bp, Homo sapien
ggtaatgctggcttgaaactgtcct

SEQ ID NO: 4134495 - DNA, 25 bp, Homo sapien
atgtgtcaggacagtcataaattca

SEQ ID NO: 4134496 - DNA, 25 bp, Homo sapien
aaattcaaaactgctcatctccccc

SEQ ID NO: 4134497 - DNA, 25 bp, Homo sapien
catggcctcatagataacacattta

SEQ ID NO: 4134498 - DNA, 25 bp, Homo sapien
agaatgaaatctttcacatggagaa

SEQ ID NO: 4134499 - DNA, 25 bp, Homo sapien
acatttatatttggcacatcgattc

SEQ ID NO: 4134500 - DNA, 25 bp, Homo sapien
tggagtaaaggtgaaagaatgaaat

SEQ ID NO: 4134501 - DNA, 25 bp, Homo sapien
aagtgtccctagaacactgatggcc

SEQ ID NO: 4134502 - DNA, 25 bp, Homo sapien
taggtaactttacatctggttctgc

SEQ ID NO: 4134503 - DNA, 25 bp, Homo sapien
tcttttgtcaatgaactaggtaact

SEQ ID NO: 4134504 - DNA, 25 bp, Homo sapien
gtagactctcctgtttactgaccag

SEQ ID NO: 4134505 - DNA, 25 bp, Homo sapien
tataggcgtggcatagtgctaaaca

SEQ ID NO: 4134506 - DNA, 25 bp, Homo sapien
ggccttgaccgcaaagagtgaagat

SEQ ID NO: 4134507 - DNA, 25 bp, Homo sapien
ggaaacacatgcatggcccagtctt

SEQ ID NO: 4134508 - DNA, 25 bp, Homo sapien
tttaggcaggacaagctggacacac

SEQ ID NO: 4134509 - DNA, 25 bp, Homo sapien
catatctcaaagtgggtaccatggg

SEQ ID NO: 4134510 - DNA, 25 bp, Homo sapien
tgttttcatatctcaaagtgggtac

SEQ ID NO: 4134511 - DNA, 25 bp, Homo sapien
atctcaaagtgggtaccatgggttt

SEQ ID NO: 4134512 - DNA, 25 bp, Homo sapien
tcagtagaggtgatataactcaaac

SEQ ID NO: 4134513 - DNA, 25 bp, Homo sapien
tccacttggttatcataaaggaatt

SEQ ID NO: 4134514 - DNA, 25 bp, Homo sapien
ctttacggtgtcaggaatctccact

SEQ ID NO: 4134515 - DNA, 25 bp, Homo sapien
gtcaggaatctccacttggttatca

SEQ ID NO: 4134516 - DNA, 25 bp, Homo sapien
gaatctccacttggttatcataaag

SEQ ID NO: 4134517 - DNA, 25 bp, Homo sapien
tgccacagcaccagcagatgagagg

SEQ ID NO: 4134518 - DNA, 25 bp, Homo sapien
tggctgccacagcaccagcagatga

SEQ ID NO: 4134519 - DNA, 25 bp, Homo sapien
cacagcaccagcagatgagagggga

SEQ ID NO: 4134520 - DNA, 25 bp, Homo sapien
gctgccacagcaccagcagatgaga

SEQ ID NO: 4134521 - DNA, 25 bp, Homo sapien
tcatatgcacacggatgttagcaaa

SEQ ID NO: 4134522 - DNA, 25 bp, Homo sapien
gtcatatgcacacggatgttagcaa

SEQ ID NO: 4134523 - DNA, 25 bp, Homo sapien
tgtcatatgcacacggatgttagca

SEQ ID NO: 4134524 - DNA, 25 bp, Homo sapien
tttcttcttcaaagccaccttgtca

SEQ ID NO: 4134525 - DNA, 25 bp, Homo sapien
tcttcaaagccaccttgtcaggcat

SEQ ID NO: 4134526 - DNA, 25 bp, Homo sapien
cttcttcaaagccaccttgtcaggc

SEQ ID NO: 4134527 - DNA, 25 bp, Homo sapien
ttcttcttcaaagccaccttgtcag

SEQ ID NO: 4134528 - DNA, 25 bp, Homo sapien
gaggcatatgccttccagcctctgg

SEQ ID NO: 4134529 - DNA, 25 bp, Homo sapien
ttggcctttgactcaagtcttgagg

SEQ ID NO: 4134530 - DNA, 25 bp, Homo sapien
ctgctttggcctttgactcaagtct

SEQ ID NO: 4134531 - DNA, 25 bp, Homo sapien
gactcaagtcttgaggcatatgcct

SEQ ID NO: 4134532 - DNA, 25 bp, Homo sapien
aaaggcctcttgcaagtgtcactga

SEQ ID NO: 4134533 - DNA, 25 bp, Homo sapien
aggcctcttgcaagtgtcactgagg

SEQ ID NO: 4134534 - DNA, 25 bp, Homo sapien
aaggcctcttgcaagtgtcactgag

SEQ ID NO: 4134535 - DNA, 25 bp, Homo sapien
tttaaagaccccctgaaatgctgct

SEQ ID NO: 4134536 - DNA, 25 bp, Homo sapien
cacaggcaactgtcagagctttggg

SEQ ID NO: 4134537 - DNA, 25 bp, Homo sapien
gaaatgctgcttcctccataaaacc

SEQ ID NO: 4134538 - DNA, 25 bp, Homo sapien
caagtagatgccctgaaaacacagg

SEQ ID NO: 4134539 - DNA, 25 bp, Homo sapien
atggaagagaaaagccagttaccgg

SEQ ID NO: 4134540 - DNA, 25 bp, Homo sapien
ggtctggaaaccacagttctggagg

SEQ ID NO: 4134541 - DNA, 25 bp, Homo sapien
gaacggtctggaaaccacagttctg

SEQ ID NO: 4134542 - DNA, 25 bp, Homo sapien
ttctggaggccacccccttgacaat

SEQ ID NO: 4134543 - DNA, 25 bp, Homo sapien
atggctacagtggtcatcaggacgg

SEQ ID NO: 4134544 - DNA, 25 bp, Homo sapien
gcatggctacagtggtcatcaggac

SEQ ID NO: 4134545 - DNA, 25 bp, Homo sapien
tggtcatcaggacggggccctgatc

SEQ ID NO: 4134546 - DNA, 25 bp, Homo sapien
acaggcatggctacagtggtcatca

SEQ ID NO: 4134547 - DNA, 25 bp, Homo sapien
ctcccagaagaatgcccttcgatct

SEQ ID NO: 4134548 - DNA, 25 bp, Homo sapien
tctgtgccaaccactcccagaagaa

SEQ ID NO: 4134549 - DNA, 25 bp, Homo sapien
actcccagaagaatgcccttcgatc

SEQ ID NO: 4134550 - DNA, 25 bp, Homo sapien
ctgtgccaaccactcccagaagaat

SEQ ID NO: 4134551 - DNA, 25 bp, Homo sapien
gcaaaggcataaccgtgaatcccta

SEQ ID NO: 4134552 - DNA, 25 bp, Homo sapien
ctgagttccggatgcgtcaggatat

SEQ ID NO: 4134553 - DNA, 25 bp, Homo sapien
tgattgcaaaggcataaccgtgaat

SEQ ID NO: 4134554 - DNA, 25 bp, Homo sapien
ggatatatccattatttgtgattgc

SEQ ID NO: 4134555 - DNA, 25 bp, Homo sapien
tcctagccatgcctgagagctctgg

SEQ ID NO: 4134556 - DNA, 25 bp, Homo sapien
tccctgcctgagctagccagagaag

SEQ ID NO: 4134557 - DNA, 25 bp, Homo sapien
ggagtttgaatgagggttccctgcc

SEQ ID NO: 4134558 - DNA, 25 bp, Homo sapien
cttgcgaggagacaaatggagtttg

SEQ ID NO: 4134559 - DNA, 25 bp, Homo sapien
ggccagaactaaggggatcgtccat

SEQ ID NO: 4134560 - DNA, 25 bp, Homo sapien
gaactaaggggatcgtccatttgta

SEQ ID NO: 4134561 - DNA, 25 bp, Homo sapien
ttggccagaactaaggggatcgtcc

SEQ ID NO: 4134562 - DNA, 25 bp, Homo sapien
agccttggccagaactaaggggatc

SEQ ID NO: 4134563 - DNA, 25 bp, Homo sapien
gggccgaaacaaagtccatggcaga

SEQ ID NO: 4134564 - DNA, 25 bp, Homo sapien
agagaaacccacctctttcctctgg

SEQ ID NO: 4134565 - DNA, 25 bp, Homo sapien
tattggtattgtgcttcagagaaac

SEQ ID NO: 4134566 - DNA, 25 bp, Homo sapien
agttattttaagtcagcttgctgtg

SEQ ID NO: 4134567 - DNA, 25 bp, Homo sapien
cctggggagactgtagagtatctgc

SEQ ID NO: 4134568 - DNA, 25 bp, Homo sapien
agactttgtctgtgagcccatagtt

SEQ ID NO: 4134569 - DNA, 25 bp, Homo sapien
cctgaggtcagtgatcctggggaga

SEQ ID NO: 4134570 - DNA, 25 bp, Homo sapien
ctttgtctgtgagcccatagttctt

SEQ ID NO: 4134571 - DNA, 25 bp, Homo sapien
accaccgaaagttccgtgaacaatg

SEQ ID NO: 4134572 - DNA, 25 bp, Homo sapien
cataggctgtggccggcagaatgca

SEQ ID NO: 4134573 - DNA, 25 bp, Homo sapien
cctgcatttggggaccaccgaaagt

SEQ ID NO: 4134574 - DNA, 25 bp, Homo sapien
gtgaacaatgctaggcccaactccc

SEQ ID NO: 4134575 - DNA, 25 bp, Homo sapien
ctaggttgcagtcgcccgggctctg

SEQ ID NO: 4134576 - DNA, 25 bp, Homo sapien
ttttttctcagagaacgctctcctc

SEQ ID NO: 4134577 - DNA, 25 bp, Homo sapien
taaacgaaatggactcagaccaggc

SEQ ID NO: 4134578 - DNA, 25 bp, Homo sapien
tctgagcagatacacttactaagcc

SEQ ID NO: 4134579 - DNA, 25 bp, Homo sapien
tgctaccagatttaaccccgcgagg

SEQ ID NO: 4134580 - DNA, 25 bp, Homo sapien
agtagatgagggtattgggaatcat

SEQ ID NO: 4134581 - DNA, 25 bp, Homo sapien
gatgtaatggctgttagggcatttc

SEQ ID NO: 4134582 - DNA, 25 bp, Homo sapien
tcatagccagatgtaatggctgtta

SEQ ID NO: 4134583 - DNA, 25 bp, Homo sapien
gagggtattgggaatcatagccaga

SEQ ID NO: 4134584 - DNA, 25 bp, Homo sapien
agcagggtgacagtcctagggactt

SEQ ID NO: 4134585 - DNA, 25 bp, Homo sapien
gcttgatatgaatttaccttgtaga

SEQ ID NO: 4134586 - DNA, 25 bp, Homo sapien
gccagggcaatctttaccttcccaa

SEQ ID NO: 4134587 - DNA, 25 bp, Homo sapien
acagggcttgggagtggaccgatga

SEQ ID NO: 4134588 - DNA, 25 bp, Homo sapien
gagaggtcaacgctactatagttag

SEQ ID NO: 4134589 - DNA, 25 bp, Homo sapien
acgtcatctcggtcttcccactcca

SEQ ID NO: 4134590 - DNA, 25 bp, Homo sapien
tcagagaggtcaacgctactatagt

SEQ ID NO: 4134591 - DNA, 25 bp, Homo sapien
gaggtcaacgctactatagttaggt

SEQ ID NO: 4134592 - DNA, 25 bp, Homo sapien
acttccccgtctttcgattcaccat

SEQ ID NO: 4134593 - DNA, 25 bp, Homo sapien
ttattccagatatagctttcaaagc

SEQ ID NO: 4134594 - DNA, 25 bp, Homo sapien
ttccagatatagctttcaaagctaa

SEQ ID NO: 4134595 - DNA, 25 bp, Homo sapien
tattccagatatagctttcaaagct

SEQ ID NO: 4134596 - DNA, 25 bp, Homo sapien
tcagcgaaagatatttattccagat

SEQ ID NO: 4134597 - DNA, 25 bp, Homo sapien
ggagtacccttgatgtctgtataat

SEQ ID NO: 4134598 - DNA, 25 bp, Homo sapien
gaaaggagtacccttgatgtctgta

SEQ ID NO: 4134599 - DNA, 25 bp, Homo sapien
ctgaaaggagtacccttgatgtctg

SEQ ID NO: 4134600 - DNA, 25 bp, Homo sapien
cccttgatgtctgtataatagtagt

SEQ ID NO: 4134601 - DNA, 25 bp, Homo sapien
ctcgaatagacttgtgggctaacat

SEQ ID NO: 4134602 - DNA, 25 bp, Homo sapien
caaatcttgaaatccctggcatcga

SEQ ID NO: 4134603 - DNA, 25 bp, Homo sapien
gcaaatcttgaaatccctggcatcg

SEQ ID NO: 4134604 - DNA, 25 bp, Homo sapien
tcgatggttacattccctcggaaga

SEQ ID NO: 4134605 - DNA, 25 bp, Homo sapien
tggttacattccctcggaagaaata

SEQ ID NO: 4134606 - DNA, 25 bp, Homo sapien
tcttcgatggttacattccctcgga

SEQ ID NO: 4134607 - DNA, 25 bp, Homo sapien
cttcttcgatggttacattccctcg

SEQ ID NO: 4134608 - DNA, 25 bp, Homo sapien
tggcttcatgggcagtgatgtccac

SEQ ID NO: 4134609 - DNA, 25 bp, Homo sapien
atggcttagacatgaattttctggc

SEQ ID NO: 4134610 - DNA, 25 bp, Homo sapien
gatgtccacagagccaacatggccc

SEQ ID NO: 4134611 - DNA, 25 bp, Homo sapien
acatgaattttctggcttcatgggc

SEQ ID NO: 4134612 - DNA, 25 bp, Homo sapien
gactgcttagcctcacagctgtgga

SEQ ID NO: 4134613 - DNA, 25 bp, Homo sapien
ctggcaaagcatgtggaaaattccc

SEQ ID NO: 4134614 - DNA, 25 bp, Homo sapien
tatggttgccaaccccaaggaactc

SEQ ID NO: 4134615 - DNA, 25 bp, Homo sapien
gctcctagagagatgacaagatcct

SEQ ID NO: 4134616 - DNA, 25 bp, Homo sapien
tcgggatgttctaagtcatgcaggc

SEQ ID NO: 4134617 - DNA, 25 bp, Homo sapien
catcgggatgttctaagtcatgcag

SEQ ID NO: 4134618 - DNA, 25 bp, Homo sapien
ggacacatcgggatgttctaagtca

SEQ ID NO: 4134619 - DNA, 25 bp, Homo sapien
tgccaaggacacatcgggatgttct

SEQ ID NO: 4134620 - DNA, 25 bp, Homo sapien
gctcagggtgtaggtcagtgttgca

SEQ ID NO: 4134621 - DNA, 25 bp, Homo sapien
taactgagacagatggcggtgctca

SEQ ID NO: 4134622 - DNA, 25 bp, Homo sapien
tctttgccttttaggtagagcttaa

SEQ ID NO: 4134623 - DNA, 25 bp, Homo sapien
gagcttaatcgcttctaactgagac

SEQ ID NO: 4134624 - DNA, 25 bp, Homo sapien
caccaccgcgtcaaaaaggacttct

SEQ ID NO: 4134625 - DNA, 25 bp, Homo sapien
ggacttcttggatcaattctttatc

SEQ ID NO: 4134626 - DNA, 25 bp, Homo sapien
aggctggtccaatacgcttcaatgg

SEQ ID NO: 4134627 - DNA, 25 bp, Homo sapien
ggctggtccaatacgcttcaatggg

SEQ ID NO: 4134628 - DNA, 25 bp, Homo sapien
caaacaggttgattctggagaggcc

SEQ ID NO: 4134629 - DNA, 25 bp, Homo sapien
aggaaggcaacctccacgcccttgt

SEQ ID NO: 4134630 - DNA, 25 bp, Homo sapien
ctgctcagccccgacaaacaggttg

SEQ ID NO: 4134631 - DNA, 25 bp, Homo sapien
tggagaggcccgtgcgagtgccgag

SEQ ID NO: 4134632 - DNA, 25 bp, Homo sapien
accgcctggttaggccacagtctgc

SEQ ID NO: 4134633 - DNA, 25 bp, Homo sapien
gggatgaccgcctggttaggccaca

SEQ ID NO: 4134634 - DNA, 25 bp, Homo sapien
ctgatacggtgcaactcaggcggtg

SEQ ID NO: 4134635 - DNA, 25 bp, Homo sapien
ctgaagcgcctcatcttggctgata

SEQ ID NO: 4134636 - DNA, 25 bp, Homo sapien
gaagctccctggaatctgctcagcg

SEQ ID NO: 4134637 - DNA, 25 bp, Homo sapien
ggctcttcggtaccagagagggaaa

SEQ ID NO: 4134638 - DNA, 25 bp, Homo sapien
ccagagagggaaatggtctgcgtta

SEQ ID NO: 4134639 - DNA, 25 bp, Homo sapien
tggtctgcgttaaaaatgttctcct

SEQ ID NO: 4134640 - DNA, 25 bp, Homo sapien
cagtgctgaatgggatcgagtagac

SEQ ID NO: 4134641 - DNA, 25 bp, Homo sapien
ggagatttccgttcatccaggagct

SEQ ID NO: 4134642 - DNA, 25 bp, Homo sapien
accacattgcttttattgactggtc

SEQ ID NO: 4134643 - DNA, 25 bp, Homo sapien
caggagctggatggatgtacttgct

SEQ ID NO: 4134644 - DNA, 25 bp, Homo sapien
gatgtacttgctgtcaccacattgc

SEQ ID NO: 4134645 - DNA, 25 bp, Homo sapien
atgaaagcccctagccatccacaga

SEQ ID NO: 4134646 - DNA, 25 bp, Homo sapien
tagttgccagccctttaggccaaat

SEQ ID NO: 4134647 - DNA, 25 bp, Homo sapien
gagggctttttggtagttgccagcc

SEQ ID NO: 4134648 - DNA, 25 bp, Homo sapien
gccctttaggccaaatgccaccaat

SEQ ID NO: 4134649 - DNA, 25 bp, Homo sapien
agtgatcagaataaaccatgtgcca

SEQ ID NO: 4134650 - DNA, 25 bp, Homo sapien
gatcagaataaaccatgtgccagac

SEQ ID NO: 4134651 - DNA, 25 bp, Homo sapien
atcagaataaaccatgtgccagaca

SEQ ID NO: 4134652 - DNA, 25 bp, Homo sapien
tgatcagaataaaccatgtgccaga

SEQ ID NO: 4134653 - DNA, 25 bp, Homo sapien
ggacatcgatgccaacagtgccctt

SEQ ID NO: 4134654 - DNA, 25 bp, Homo sapien
tcaattgacaatcgcctgacaccct

SEQ ID NO: 4134655 - DNA, 25 bp, Homo sapien
cttgtcatcaattgacaatcgcctg

SEQ ID NO: 4134656 - DNA, 25 bp, Homo sapien
tctctggacatcgatgccaacagtg

SEQ ID NO: 4134657 - DNA, 25 bp, Homo sapien
ttacccactaatgaaatgcagccgt

SEQ ID NO: 4134658 - DNA, 25 bp, Homo sapien
cccactaatgaaatgcagccgtgtc

SEQ ID NO: 4134659 - DNA, 25 bp, Homo sapien
gtccaccacccagattgtctactcc

SEQ ID NO: 4134660 - DNA, 25 bp, Homo sapien
cactaatgaaatgcagccgtgtcag

SEQ ID NO: 4134661 - DNA, 25 bp, Homo sapien
tcatcactggcgttgtgtgtgggat

SEQ ID NO: 4134662 - DNA, 25 bp, Homo sapien
tgggattgtgtgtctcatgatgttg

SEQ ID NO: 4134663 - DNA, 25 bp, Homo sapien
catctatggctgcacctatgcggca

SEQ ID NO: 4134664 - DNA, 25 bp, Homo sapien
gcgtcatgccattgccactgtcatc

SEQ ID NO: 4134665 - DNA, 25 bp, Homo sapien
cacagccagtaaatgttggaggcgg

SEQ ID NO: 4134666 - DNA, 25 bp, Homo sapien
gcctagatggtttcactccagattc

SEQ ID NO: 4134667 - DNA, 25 bp, Homo sapien
tcctttgcacagatgacgaagttaa

SEQ ID NO: 4134668 - DNA, 25 bp, Homo sapien
tccataaatctgcaagctgggttcc

SEQ ID NO: 4134669 - DNA, 25 bp, Homo sapien
tacgtcccatccaggcagtactgga

SEQ ID NO: 4134670 - DNA, 25 bp, Homo sapien
aaaggatttgcccacaactgccaac

SEQ ID NO: 4134671 - DNA, 25 bp, Homo sapien
tgccaactccacatcaaagctcagg

SEQ ID NO: 4134672 - DNA, 25 bp, Homo sapien
caggcagtactggagccccagcagg

SEQ ID NO: 4134673 - DNA, 25 bp, Homo sapien
ccagtgggaaggctgtaaggtcagc

SEQ ID NO: 4134674 - DNA, 25 bp, Homo sapien
agattgagctgtccagtgggaaggc

SEQ ID NO: 4134675 - DNA, 25 bp, Homo sapien
cccctctttctgagatgctcatctg

SEQ ID NO: 4134676 - DNA, 25 bp, Homo sapien
ctgctcagatgggagtcctagaggc

SEQ ID NO: 4134677 - DNA, 25 bp, Homo sapien
aaacatctttagcaccacttaagtt

SEQ ID NO: 4134678 - DNA, 25 bp, Homo sapien
aatagagatgcattaagaggagcat

SEQ ID NO: 4134679 - DNA, 25 bp, Homo sapien
tagagatgcattaagaggagcatat

SEQ ID NO: 4134680 - DNA, 25 bp, Homo sapien
acatctttagcaccacttaagtttt

SEQ ID NO: 4134681 - DNA, 25 bp, Homo sapien
ccagatgcgactgggtgactcagga

SEQ ID NO: 4134682 - DNA, 25 bp, Homo sapien
gcctgcatgatgacatgattaaata

SEQ ID NO: 4134683 - DNA, 25 bp, Homo sapien
tgatgacagaagaccagatgcgact

SEQ ID NO: 4134684 - DNA, 25 bp, Homo sapien
caggaaatgcctgcatgatgacatg

SEQ ID NO: 4134685 - DNA, 25 bp, Homo sapien
tggaatgaggaggccatagcactga

SEQ ID NO: 4134686 - DNA, 25 bp, Homo sapien
ttggaatgaggaggccatagcactg

SEQ ID NO: 4134687 - DNA, 25 bp, Homo sapien
ggaatgaggaggccatagcactgac

SEQ ID NO: 4134688 - DNA, 25 bp, Homo sapien
cttggaatgaggaggccatagcact

SEQ ID NO: 4134689 - DNA, 25 bp, Homo sapien
gctctaagccctgctactgccagaa

SEQ ID NO: 4134690 - DNA, 25 bp, Homo sapien
ggaagaatgtgaaagcatccctgct

SEQ ID NO: 4134691 - DNA, 25 bp, Homo sapien
gagctgccgactgactcgaaggtga

SEQ ID NO: 4134692 - DNA, 25 bp, Homo sapien
ggaagtgttcgtgctcccgcaggct

SEQ ID NO: 4134693 - DNA, 25 bp, Homo sapien
gagctgctcaggaaagatgatttgg

SEQ ID NO: 4134694 - DNA, 25 bp, Homo sapien
tccagcctcctgaacgagctgctca

SEQ ID NO: 4134695 - DNA, 25 bp, Homo sapien
tcctgaacgagctgctcaggaaaga

SEQ ID NO: 4134696 - DNA, 25 bp, Homo sapien
gcctcctgaacgagctgctcaggaa

SEQ ID NO: 4134697 - DNA, 25 bp, Homo sapien
gatgtagtgtgctctcggtgttctt

SEQ ID NO: 4134698 - DNA, 25 bp, Homo sapien
ttcaacctatacagcaaaggcaaag

SEQ ID NO: 4134699 - DNA, 25 bp, Homo sapien
tcacccctgttttcaacctatacag

SEQ ID NO: 4134700 - DNA, 25 bp, Homo sapien
tttccctaactgtaagatgtagtgt

SEQ ID NO: 4134701 - DNA, 25 bp, Homo sapien
tcttcacctccctgatgaagccagc

SEQ ID NO: 4134702 - DNA, 25 bp, Homo sapien
tgtcatctcttgagcttccatgagt

SEQ ID NO: 4134703 - DNA, 25 bp, Homo sapien
tccccgctgggtgtttatccatctc

SEQ ID NO: 4134704 - DNA, 25 bp, Homo sapien
ctgttctcatctgcccctgtcggtc

SEQ ID NO: 4134705 - DNA, 25 bp, Homo sapien
cacagtgcagatcgctctttggaga

SEQ ID NO: 4134706 - DNA, 25 bp, Homo sapien
aactctcgatacaaaacaaacagca

SEQ ID NO: 4134707 - DNA, 25 bp, Homo sapien
tctttggagacatgttacttcggca

SEQ ID NO: 4134708 - DNA, 25 bp, Homo sapien
caaacagcacagtgcagatcgctct

SEQ ID NO: 4134709 - DNA, 25 bp, Homo sapien
ctgtctgctggcagtccagaacttc

SEQ ID NO: 4134710 - DNA, 25 bp, Homo sapien
cagctgatggagcatttgccatcca

SEQ ID NO: 4134711 - DNA, 25 bp, Homo sapien
gatggagcatttgccatccagggaa

SEQ ID NO: 4134712 - DNA, 25 bp, Homo sapien
acagctgatggagcatttgccatcc

SEQ ID NO: 4134713 - DNA, 25 bp, Homo sapien
agctgatggagcatttgccatccag

SEQ ID NO: 4134714 - DNA, 25 bp, Homo sapien
tcttcttagaacgaggccctcctta

SEQ ID NO: 4134715 - DNA, 25 bp, Homo sapien
tataatgctccttataacagccagc

SEQ ID NO: 4134716 - DNA, 25 bp, Homo sapien
gaacgaggccctccttataatgctc

SEQ ID NO: 4134717 - DNA, 25 bp, Homo sapien
cagcaccagtagaagggagatcaga

SEQ ID NO: 4134718 - DNA, 25 bp, Homo sapien
cttggtcctggagggagtcttgata

SEQ ID NO: 4134719 - DNA, 25 bp, Homo sapien
gtcctggagggagtcttgataagct

SEQ ID NO: 4134720 - DNA, 25 bp, Homo sapien
agggagtcttgataagctttctcca

SEQ ID NO: 4134721 - DNA, 25 bp, Homo sapien
ctggagggagtcttgataagctttc

SEQ ID NO: 4134722 - DNA, 25 bp, Homo sapien
tcttcagacaccaaaataaatccat

SEQ ID NO: 4134723 - DNA, 25 bp, Homo sapien
gtcttcagacaccaaaataaatcca

SEQ ID NO: 4134724 - DNA, 25 bp, Homo sapien
tcttaaggtcattcgaagctttgca

SEQ ID NO: 4134725 - DNA, 25 bp, Homo sapien
ggctgtcttaaggtcattcgaagct

SEQ ID NO: 4134726 - DNA, 25 bp, Homo sapien
ctgaggctgtcttaaggtcattcga

SEQ ID NO: 4134727 - DNA, 25 bp, Homo sapien
aggtcattcgaagctttgcagtcat

SEQ ID NO: 4134728 - DNA, 25 bp, Homo sapien
atttgttcatcacagctccctcgat

SEQ ID NO: 4134729 - DNA, 25 bp, Homo sapien
acagctccctcgatctcaccaaaaa

SEQ ID NO: 4134730 - DNA, 25 bp, Homo sapien
tttgttcatcacagctccctcgatc

SEQ ID NO: 4134731 - DNA, 25 bp, Homo sapien
tccctcgatctcaccaaaaaagtct

SEQ ID NO: 4134732 - DNA, 25 bp, Homo sapien
ctccatcaagagcggattttgagaa

SEQ ID NO: 4134733 - DNA, 25 bp, Homo sapien
tccatcaagagcggattttgagaat

SEQ ID NO: 4134734 - DNA, 25 bp, Homo sapien
ccatcaagagcggattttgagaatt

SEQ ID NO: 4134735 - DNA, 25 bp, Homo sapien
cacaaatgtgtgattgcaaggactg

SEQ ID NO: 4134736 - DNA, 25 bp, Homo sapien
gcaaggactgtggtcctccaacacc

SEQ ID NO: 4134737 - DNA, 25 bp, Homo sapien
cccatcatatggtgtcataggaagc

SEQ ID NO: 4134738 - DNA, 25 bp, Homo sapien
gtgtcaaccttatgctctgagcaag

SEQ ID NO: 4134739 - DNA, 25 bp, Homo sapien
aacagccaatgggtcacgaggtgag

SEQ ID NO: 4134740 - DNA, 25 bp, Homo sapien
tgtcacccagacaagcatcaccttg

SEQ ID NO: 4134741 - DNA, 25 bp, Homo sapien
ccagaagtggatgttctttccctct

SEQ ID NO: 4134742 - DNA, 25 bp, Homo sapien
gcactgtcaggtagaacagccaatg

SEQ ID NO: 4134743 - DNA, 25 bp, Homo sapien
tgaactcttcttttgcaagcctgaa

SEQ ID NO: 4134744 - DNA, 25 bp, Homo sapien
cctgaattgcagatatgatggctgg

SEQ ID NO: 4134745 - DNA, 25 bp, Homo sapien
gggctcagcagctacattgaatcat

SEQ ID NO: 4134746 - DNA, 25 bp, Homo sapien
catgaggtaaccttgaacttaaaag

SEQ ID NO: 4134747 - DNA, 25 bp, Homo sapien
tggttagaaggtggctatgacaatc

SEQ ID NO: 4134748 - DNA, 25 bp, Homo sapien
acggacaggtggttagaaggtggct

SEQ ID NO: 4134749 - DNA, 25 bp, Homo sapien
tctgtgttcaggaccgcattgggca

SEQ ID NO: 4134750 - DNA, 25 bp, Homo sapien
ggctatgacaatctgtgttcaggac

SEQ ID NO: 4134751 - DNA, 25 bp, Homo sapien
gccagtcctcaaggtcttttcttca

SEQ ID NO: 4134752 - DNA, 25 bp, Homo sapien
agcaaagcccaaggggataccagtg

SEQ ID NO: 4134753 - DNA, 25 bp, Homo sapien
gggataccagtggtcacgtagccag

SEQ ID NO: 4134754 - DNA, 25 bp, Homo sapien
agtggtcacgtagccagtcctcaag

SEQ ID NO: 4134755 - DNA, 25 bp, Homo sapien
catgggcgccatcgctgctttcctt

SEQ ID NO: 4134756 - DNA, 25 bp, Homo sapien
ggcgccatcgctgctttccttgttg

SEQ ID NO: 4134757 - DNA, 25 bp, Homo sapien
tctacacatggcttggtagtcataa

SEQ ID NO: 4134758 - DNA, 25 bp, Homo sapien
ttccttgttggctctacacatggct

SEQ ID NO: 4134759 - DNA, 25 bp, Homo sapien
tgtacctagctatgccagttatgtg

SEQ ID NO: 4134760 - DNA, 25 bp, Homo sapien
tatcggagaattgaaatgcatgcca

SEQ ID NO: 4134761 - DNA, 25 bp, Homo sapien
gatgtcaggtccagaagaatctcag

SEQ ID NO: 4134762 - DNA, 25 bp, Homo sapien
agacaatgacgctggcaaatcccgg

SEQ ID NO: 4134763 - DNA, 25 bp, Homo sapien
aagacaagttctgtcatgatccatt

SEQ ID NO: 4134764 - DNA, 25 bp, Homo sapien
agacaagttctgtcatgatccattt

SEQ ID NO: 4134765 - DNA, 25 bp, Homo sapien
gacaagttctgtcatgatccatttt

SEQ ID NO: 4134766 - DNA, 25 bp, Homo sapien
caagttctgtcatgatccattttac

SEQ ID NO: 4134767 - DNA, 25 bp, Homo sapien
gagtgccaccaactgcagaggttaa

SEQ ID NO: 4134768 - DNA, 25 bp, Homo sapien
atatcggagtgccaccaactgcaga

SEQ ID NO: 4134769 - DNA, 25 bp, Homo sapien
ctttagctgtcatatcggagtgcca

SEQ ID NO: 4134770 - DNA, 25 bp, Homo sapien
tgtcatatcggagtgccaccaactg

SEQ ID NO: 4134771 - DNA, 25 bp, Homo sapien
gttcacaaccgggtgccagcaagct

SEQ ID NO: 4134772 - DNA, 25 bp, Homo sapien
tgtgataatcaagcagaaatgggct

SEQ ID NO: 4134773 - DNA, 25 bp, Homo sapien
gtttctgtgaatgcacccctgttca

SEQ ID NO: 4134774 - DNA, 25 bp, Homo sapien
ggcttccacagtccccttcattaag

SEQ ID NO: 4134775 - DNA, 25 bp, Homo sapien
tactcaaacttagcaacaacacata

SEQ ID NO: 4134776 - DNA, 25 bp, Homo sapien
tcagacttactcaaacttagcaaca

SEQ ID NO: 4134777 - DNA, 25 bp, Homo sapien
gacttactcaaacttagcaacaaca

SEQ ID NO: 4134778 - DNA, 25 bp, Homo sapien
gggtctctgacttcagacttactca

SEQ ID NO: 4134779 - DNA, 25 bp, Homo sapien
ttggagcagtcttcacaagcaatat

SEQ ID NO: 4134780 - DNA, 25 bp, Homo sapien
tcttcacaagcaatattccctgtag

SEQ ID NO: 4134781 - DNA, 25 bp, Homo sapien
gctcagagacgaatgctggatattc

SEQ ID NO: 4134782 - DNA, 25 bp, Homo sapien
gtctccttgatggtgcgctcagaga

SEQ ID NO: 4134783 - DNA, 25 bp, Homo sapien
gtttctatttagagcaactgagtca

SEQ ID NO: 4134784 - DNA, 25 bp, Homo sapien
agttgccaatttgaaggtttctatt

SEQ ID NO: 4134785 - DNA, 25 bp, Homo sapien
gagtcacctcttgatgtattttcca

SEQ ID NO: 4134786 - DNA, 25 bp, Homo sapien
tttccatacgaaaccatctaatgat

SEQ ID NO: 4134787 - DNA, 25 bp, Homo sapien
tcacaaatgcccagaaaatatgggc

SEQ ID NO: 4134788 - DNA, 25 bp, Homo sapien
agtcacaaatgcccagaaaatatgg

SEQ ID NO: 4134789 - DNA, 25 bp, Homo sapien
caaatgcccagaaaatatgggctga

SEQ ID NO: 4134790 - DNA, 25 bp, Homo sapien
cacaaatgcccagaaaatatgggct

SEQ ID NO: 4134791 - DNA, 25 bp, Homo sapien
tcttttccccgtagtcaatctctga

SEQ ID NO: 4134792 - DNA, 25 bp, Homo sapien
caatctctgaattatcgttttgggg

SEQ ID NO: 4134793 - DNA, 25 bp, Homo sapien
tcatcttttccaacgaccattaaaa

SEQ ID NO: 4134794 - DNA, 25 bp, Homo sapien
tttctcactcttctgcgtcttttcc

SEQ ID NO: 4134795 - DNA, 25 bp, Homo sapien
ctttataaaaggttggacatcttgc

SEQ ID NO: 4134796 - DNA, 25 bp, Homo sapien
cagaaagccaactggttcagaagtt

SEQ ID NO: 4134797 - DNA, 25 bp, Homo sapien
gataacagggtatgccagaaagcca

SEQ ID NO: 4134798 - DNA, 25 bp, Homo sapien
taagtgatttctaagatcccttccc

SEQ ID NO: 4134799 - DNA, 25 bp, Homo sapien
ccttctcaaagggaagtatgtcttc

SEQ ID NO: 4134800 - DNA, 25 bp, Homo sapien
gtcactttctccattaagccgtcct

SEQ ID NO: 4134801 - DNA, 25 bp, Homo sapien
tccattaagccgtccttctcaaagg

SEQ ID NO: 4134802 - DNA, 25 bp, Homo sapien
gccgtccttctcaaagggaagtatg

SEQ ID NO: 4134803 - DNA, 25 bp, Homo sapien
gaggggctgtggcctggtgggtttg

SEQ ID NO: 4134804 - DNA, 25 bp, Homo sapien
agtcagaggggctgtggcctggtgg

SEQ ID NO: 4134805 - DNA, 25 bp, Homo sapien
agaggggctgtggcctggtgggttt

SEQ ID NO: 4134806 - DNA, 25 bp, Homo sapien
aggggctgtggcctggtgggtttgc

SEQ ID NO: 4134807 - DNA, 25 bp, Homo sapien
ggcccagcagccaggctgacatcat

SEQ ID NO: 4134808 - DNA, 25 bp, Homo sapien
ccatccagctgggcccagcagccag

SEQ ID NO: 4134809 - DNA, 25 bp, Homo sapien
ctccatccagctgggcccagcagcc

SEQ ID NO: 4134810 - DNA, 25 bp, Homo sapien
tgggcccagcagccaggctgacatc

SEQ ID NO: 4134811 - DNA, 25 bp, Homo sapien
ctgggcaatgttagctgtacattta

SEQ ID NO: 4134812 - DNA, 25 bp, Homo sapien
ttaacatggtgcttcggaggggcct

SEQ ID NO: 4134813 - DNA, 25 bp, Homo sapien
cagggtgcagggttgaacttcataa

SEQ ID NO: 4134814 - DNA, 25 bp, Homo sapien
acatttatgtgtacaatgtgtattt

SEQ ID NO: 4134815 - DNA, 25 bp, Homo sapien
catccgtcaattaaagagccatgag

SEQ ID NO: 4134816 - DNA, 25 bp, Homo sapien
caattaaagagccatgaggaagact

SEQ ID NO: 4134817 - DNA, 25 bp, Homo sapien
tctcctgggtggtagcaactaccat

SEQ ID NO: 4134818 - DNA, 25 bp, Homo sapien
ttctctcctgggtggtagcaactac

SEQ ID NO: 4134819 - DNA, 25 bp, Homo sapien
gtgatgggggccacagattcacaga

SEQ ID NO: 4134820 - DNA, 25 bp, Homo sapien
ctgatttcaatgggtgccatggtga

SEQ ID NO: 4134821 - DNA, 25 bp, Homo sapien
catggtgatgggggccacagattca

SEQ ID NO: 4134822 - DNA, 25 bp, Homo sapien
tggtgatgggggccacagattcaca

SEQ ID NO: 4134823 - DNA, 25 bp, Homo sapien
ctctctccaacagtggaaaggatgt

SEQ ID NO: 4134824 - DNA, 25 bp, Homo sapien
aaaatttggcaatgacaactctctt

SEQ ID NO: 4134825 - DNA, 25 bp, Homo sapien
ctccaacagtggaaaggatgtaatt

SEQ ID NO: 4134826 - DNA, 25 bp, Homo sapien
tttggcaatgacaactctcttaact

SEQ ID NO: 4134827 - DNA, 25 bp, Homo sapien
aaggcatgtttccaaggattgcttt

SEQ ID NO: 4134828 - DNA, 25 bp, Homo sapien
gttaaggcatgtttccaaggattgc

SEQ ID NO: 4134829 - DNA, 25 bp, Homo sapien
ttaaggcatgtttccaaggattgct

SEQ ID NO: 4134830 - DNA, 25 bp, Homo sapien
agttaaggcatgtttccaaggattg

SEQ ID NO: 4134831 - DNA, 25 bp, Homo sapien
gatcttctgggcctttagacgttca

SEQ ID NO: 4134832 - DNA, 25 bp, Homo sapien
ccatgacaagattctgggcgccttc

SEQ ID NO: 4134833 - DNA, 25 bp, Homo sapien
ctttagacgttcacacttaagggat

SEQ ID NO: 4134834 - DNA, 25 bp, Homo sapien
gacgttcacacttaagggattcatt

SEQ ID NO: 4134835 - DNA, 25 bp, Homo sapien
cctctctaacgtaagaacgaagtct

SEQ ID NO: 4134836 - DNA, 25 bp, Homo sapien
tctctaacgtaagaacgaagtcttc

SEQ ID NO: 4134837 - DNA, 25 bp, Homo sapien
gactccaggacaccttcaactttcc

SEQ ID NO: 4134838 - DNA, 25 bp, Homo sapien
ggttagacggaaatagactccagga

SEQ ID NO: 4134839 - DNA, 25 bp, Homo sapien
tggagactcggcgcacccccacact

SEQ ID NO: 4134840 - DNA, 25 bp, Homo sapien
tgggcttggagactcggcgcacccc

SEQ ID NO: 4134841 - DNA, 25 bp, Homo sapien
ttggagactcggcgcacccccacac

SEQ ID NO: 4134842 - DNA, 25 bp, Homo sapien
gtctgggcttggagactcggcgcac

SEQ ID NO: 4134843 - DNA, 25 bp, Homo sapien
caaactcacatttgcatgactggca

SEQ ID NO: 4134844 - DNA, 25 bp, Homo sapien
cacttgcggtcccatttctgatgaa

SEQ ID NO: 4134845 - DNA, 25 bp, Homo sapien
tattcatgtctcgtatgttgcacca

SEQ ID NO: 4134846 - DNA, 25 bp, Homo sapien
tatccatgatttagcatgccaagag

SEQ ID NO: 4134847 - DNA, 25 bp, Homo sapien
gcgggtggttggctgaagatctttc

SEQ ID NO: 4134848 - DNA, 25 bp, Homo sapien
gtgaggggtgataaaagcttgaagg

SEQ ID NO: 4134849 - DNA, 25 bp, Homo sapien
aaggggcgggtggttggctgaagat

SEQ ID NO: 4134850 - DNA, 25 bp, Homo sapien
tgaggggtgataaaagcttgaagga

SEQ ID NO: 4134851 - DNA, 25 bp, Homo sapien
aacacggaggggatgcacgagagct

SEQ ID NO: 4134852 - DNA, 25 bp, Homo sapien
cagactggagtctgtgggcaacacg

SEQ ID NO: 4134853 - DNA, 25 bp, Homo sapien
caacacggaggggatgcacgagagc

SEQ ID NO: 4134854 - DNA, 25 bp, Homo sapien
aaatacggtaaatgtagggcctcag

SEQ ID NO: 4134855 - DNA, 25 bp, Homo sapien
tgagccttgctgctgctaagtgctt

SEQ ID NO: 4134856 - DNA, 25 bp, Homo sapien
tgcttttgagccttgctgctgctaa

SEQ ID NO: 4134857 - DNA, 25 bp, Homo sapien
atacggtaaatgtagggcctcagta

SEQ ID NO: 4134858 - DNA, 25 bp, Homo sapien
ttcttccaggaactcaggaatacct

SEQ ID NO: 4134859 - DNA, 25 bp, Homo sapien
tgctgaagaatagggcacatctttg

SEQ ID NO: 4134860 - DNA, 25 bp, Homo sapien
catggagacatgttgaacagttcac

SEQ ID NO: 4134861 - DNA, 25 bp, Homo sapien
cttttgagtatgctggtgctgaaga

SEQ ID NO: 4134862 - DNA, 25 bp, Homo sapien
agaaccacatcaaagccgcattggg

SEQ ID NO: 4134863 - DNA, 25 bp, Homo sapien
ggttttcctgagaagaaccacatca

SEQ ID NO: 4134864 - DNA, 25 bp, Homo sapien
agaatacagcatggatatgttctgc

SEQ ID NO: 4134865 - DNA, 25 bp, Homo sapien
tatttccctgggacattttggatgg

SEQ ID NO: 4134866 - DNA, 25 bp, Homo sapien
ttcggtttgtgtaaagacagtcagc

SEQ ID NO: 4134867 - DNA, 25 bp, Homo sapien
ccaaggccctgcacatgttcggttt

SEQ ID NO: 4134868 - DNA, 25 bp, Homo sapien
ccgacttcagagacaaaggcccaag

SEQ ID NO: 4134869 - DNA, 25 bp, Homo sapien
acactgggcataccgggtgtttata

SEQ ID NO: 4134870 - DNA, 25 bp, Homo sapien
gggagaagggtcacgactttcacca

SEQ ID NO: 4134871 - DNA, 25 bp, Homo sapien
tttcaccagatctgcaaaggagttc

SEQ ID NO: 4134872 - DNA, 25 bp, Homo sapien
gaagggtcacgactttcaccagatc

SEQ ID NO: 4134873 - DNA, 25 bp, Homo sapien
gtcacgactttcaccagatctgcaa

SEQ ID NO: 4134874 - DNA, 25 bp, Homo sapien
accgttttgcgggtctttgcacttg

SEQ ID NO: 4134875 - DNA, 25 bp, Homo sapien
gacatcataagcaccgttttgcggg

SEQ ID NO: 4134876 - DNA, 25 bp, Homo sapien
acactccttgacatcataagcaccg

SEQ ID NO: 4134877 - DNA, 25 bp, Homo sapien
taagcaccgttttgcgggtctttgc

SEQ ID NO: 4134878 - DNA, 25 bp, Homo sapien
ctctcacacgcatggccctgtcaca

SEQ ID NO: 4134879 - DNA, 25 bp, Homo sapien
ctgtcacaagggcagtcaattgccc

SEQ ID NO: 4134880 - DNA, 25 bp, Homo sapien
ctgtttgctttatggggcgcaccca

SEQ ID NO: 4134881 - DNA, 25 bp, Homo sapien
ttactgacagaattgtagccagaca

SEQ ID NO: 4134882 - DNA, 25 bp, Homo sapien
aaaagaacttgttcctggactatgt

SEQ ID NO: 4134883 - DNA, 25 bp, Homo sapien
aagaacttgttcctggactatgttt

SEQ ID NO: 4134884 - DNA, 25 bp, Homo sapien
aaagaacttgttcctggactatgtt

SEQ ID NO: 4134885 - DNA, 25 bp, Homo sapien
gaaaagaacttgttcctggactatg

SEQ ID NO: 4134886 - DNA, 25 bp, Homo sapien
catggctagaatctgctctcctctg

SEQ ID NO: 4134887 - DNA, 25 bp, Homo sapien
tctaattagagatgagcaaccacag

SEQ ID NO: 4134888 - DNA, 25 bp, Homo sapien
atgcttgtggctccaacggccccag

SEQ ID NO: 4134889 - DNA, 25 bp, Homo sapien
cacagccccattcgttcatggctag

SEQ ID NO: 4134890 - DNA, 25 bp, Homo sapien
aaagactgtctagatcaatttggtt

SEQ ID NO: 4134891 - DNA, 25 bp, Homo sapien
tctagatcaatttggttggaccacc

SEQ ID NO: 4134892 - DNA, 25 bp, Homo sapien
caatttggttggaccacctcatatc

SEQ ID NO: 4134893 - DNA, 25 bp, Homo sapien
aatttcctatcctgtgaattatgtc

SEQ ID NO: 4134894 - DNA, 25 bp, Homo sapien
cactggtgtggggtagttgcggaaa

SEQ ID NO: 4134895 - DNA, 25 bp, Homo sapien
gggtagttgcggaaatgctacatct

SEQ ID NO: 4134896 - DNA, 25 bp, Homo sapien
caatggatgtcattctcactttgtc

SEQ ID NO: 4134897 - DNA, 25 bp, Homo sapien
gctgtgcaatggatgtcattctcac

SEQ ID NO: 4134898 - DNA, 25 bp, Homo sapien
ctctaacgcactcgagctccctcgt

SEQ ID NO: 4134899 - DNA, 25 bp, Homo sapien
ttttggtgagttcacctctaacgca

SEQ ID NO: 4134900 - DNA, 25 bp, Homo sapien
cactcgagctccctcgtcagactct

SEQ ID NO: 4134901 - DNA, 25 bp, Homo sapien
ttcacaaacccttttggtgagttca

SEQ ID NO: 4134902 - DNA, 25 bp, Homo sapien
aactttaacccacacgatgctctcg

SEQ ID NO: 4134903 - DNA, 25 bp, Homo sapien
gatgctctcgcatctttactagcac

SEQ ID NO: 4134904 - DNA, 25 bp, Homo sapien
aacaggaaactcatgcttaacgagc

SEQ ID NO: 4134905 - DNA, 25 bp, Homo sapien
cagagttgcttagggtcaggaacaa

SEQ ID NO: 4134906 - DNA, 25 bp, Homo sapien
aatgaggggattaatgatgaccagg

SEQ ID NO: 4134907 - DNA, 25 bp, Homo sapien
gccacggccgttcccactgcttctt

SEQ ID NO: 4134908 - DNA, 25 bp, Homo sapien
ggatgtgagtggacgtcttcacata

SEQ ID NO: 4134909 - DNA, 25 bp, Homo sapien
tcttcacataagcagcccggctgta

SEQ ID NO: 4134910 - DNA, 25 bp, Homo sapien
gacagtggcccaaaatgatatcgtg

SEQ ID NO: 4134911 - DNA, 25 bp, Homo sapien
tacagggagcttacggacagatttg

SEQ ID NO: 4134912 - DNA, 25 bp, Homo sapien
tcatcaatacatacgtcaaagcagg

SEQ ID NO: 4134913 - DNA, 25 bp, Homo sapien
tcaaagcaggctaaccagagtattt

SEQ ID NO: 4134914 - DNA, 25 bp, Homo sapien
tcaagggcctggaaaactcattcat

SEQ ID NO: 4134915 - DNA, 25 bp, Homo sapien
gaaggataggcttgctacaccttga

SEQ ID NO: 4134916 - DNA, 25 bp, Homo sapien
tacaccttgaatcccacttagaagt

SEQ ID NO: 4134917 - DNA, 25 bp, Homo sapien
agtcctgtggaaggataggcttgct

SEQ ID NO: 4134918 - DNA, 25 bp, Homo sapien
cccgatttccaatcctgggcttgat

SEQ ID NO: 4134919 - DNA, 25 bp, Homo sapien
tattcagtcatgttgggcagattct

SEQ ID NO: 4134920 - DNA, 25 bp, Homo sapien
agtcatgttgggcagattctgtttt

SEQ ID NO: 4134921 - DNA, 25 bp, Homo sapien
ttattcagtcatgttgggcagattc

SEQ ID NO: 4134922 - DNA, 25 bp, Homo sapien
ttcagtcatgttgggcagattctgt

SEQ ID NO: 4134923 - DNA, 25 bp, Homo sapien
accttctggattcattggttttttg

SEQ ID NO: 4134924 - DNA, 25 bp, Homo sapien
gattggctcttttcacatagtgcca

SEQ ID NO: 4134925 - DNA, 25 bp, Homo sapien
cttccagttgacctcattggctact

SEQ ID NO: 4134926 - DNA, 25 bp, Homo sapien
tcctgaatgtgaatgtttacctgcc

SEQ ID NO: 4134927 - DNA, 25 bp, Homo sapien
aagcaaggctctagagcattcaaaa

SEQ ID NO: 4134928 - DNA, 25 bp, Homo sapien
gctctagagcattcaaaacaccagt

SEQ ID NO: 4134929 - DNA, 25 bp, Homo sapien
aaggctctagagcattcaaaacacc

SEQ ID NO: 4134930 - DNA, 25 bp, Homo sapien
tttccccagttctcttgaggctttc

SEQ ID NO: 4134931 - DNA, 25 bp, Homo sapien
tctgccacagcttattagtgttgtt

SEQ ID NO: 4134932 - DNA, 25 bp, Homo sapien
ttctctgccacagcttattagtgtt

SEQ ID NO: 4134933 - DNA, 25 bp, Homo sapien
cacagcttattagtgttgttgttca

SEQ ID NO: 4134934 - DNA, 25 bp, Homo sapien
ccacagcttattagtgttgttgttc

SEQ ID NO: 4134935 - DNA, 25 bp, Homo sapien
taagaaatccgggtacggcactgac

SEQ ID NO: 4134936 - DNA, 25 bp, Homo sapien
gggaacagagtgcaagaaaatgatc

SEQ ID NO: 4134937 - DNA, 25 bp, Homo sapien
caggttgcttggagtgaatgcacag

SEQ ID NO: 4134938 - DNA, 25 bp, Homo sapien
agataacaggccctaagaaatccgg

SEQ ID NO: 4134939 - DNA, 25 bp, Homo sapien
aggcaaggtaggctccagcaggctc

SEQ ID NO: 4134940 - DNA, 25 bp, Homo sapien
ggcaaggtaggctccagcaggctca

SEQ ID NO: 4134941 - DNA, 25 bp, Homo sapien
gcaaggtaggctccagcaggctcac

SEQ ID NO: 4134942 - DNA, 25 bp, Homo sapien
tcaggcaaggtaggctccagcaggc

SEQ ID NO: 4134943 - DNA, 25 bp, Homo sapien
gctgcttttatcacccttccaatag

SEQ ID NO: 4134944 - DNA, 25 bp, Homo sapien
gcagctgcttttatcacccttccaa

SEQ ID NO: 4134945 - DNA, 25 bp, Homo sapien
agctgcttttatcacccttccaata

SEQ ID NO: 4134946 - DNA, 25 bp, Homo sapien
cagctgcttttatcacccttccaat

SEQ ID NO: 4134947 - DNA, 25 bp, Homo sapien
gatggctgtcacagtcagggttttc

SEQ ID NO: 4134948 - DNA, 25 bp, Homo sapien
tgttgtcccgctagggagctggcca

SEQ ID NO: 4134949 - DNA, 25 bp, Homo sapien
ccctttcaatgttgtcccgctaggg

SEQ ID NO: 4134950 - DNA, 25 bp, Homo sapien
ctgtcacagtcagggttttctggcg

SEQ ID NO: 4134951 - DNA, 25 bp, Homo sapien
cttttcaaccacaactggttctgtg

SEQ ID NO: 4134952 - DNA, 25 bp, Homo sapien
ctaataaacttttcaaccacaactg

SEQ ID NO: 4134953 - DNA, 25 bp, Homo sapien
ttgctaataaacttttcaaccacaa

SEQ ID NO: 4134954 - DNA, 25 bp, Homo sapien
aacttttcaaccacaactggttctg

SEQ ID NO: 4134955 - DNA, 25 bp, Homo sapien
tgctgcaggtggatgtcggactggt

SEQ ID NO: 4134956 - DNA, 25 bp, Homo sapien
gcaggtggatgtcggactggttttg

SEQ ID NO: 4134957 - DNA, 25 bp, Homo sapien
gtggatgtcggactggttttggtaa

SEQ ID NO: 4134958 - DNA, 25 bp, Homo sapien
gctgcaggtggatgtcggactggtt

SEQ ID NO: 4134959 - DNA, 25 bp, Homo sapien
tccaatccagaacatcccacttctt

SEQ ID NO: 4134960 - DNA, 25 bp, Homo sapien
cttccaatccagaacatcccacttc

SEQ ID NO: 4134961 - DNA, 25 bp, Homo sapien
ttccaatccagaacatcccacttct

SEQ ID NO: 4134962 - DNA, 25 bp, Homo sapien
tcttccaatccagaacatcccactt

SEQ ID NO: 4134963 - DNA, 25 bp, Homo sapien
gaataactcattacgtttcttccca

SEQ ID NO: 4134964 - DNA, 25 bp, Homo sapien
cagcccccaggaataactcattacg

SEQ ID NO: 4134965 - DNA, 25 bp, Homo sapien
cccaggaataactcattacgtttct

SEQ ID NO: 4134966 - DNA, 25 bp, Homo sapien
cattacgtttcttcccatttgcaca

SEQ ID NO: 4134967 - DNA, 25 bp, Homo sapien
aggtgttccccaaactgacagtcca

SEQ ID NO: 4134968 - DNA, 25 bp, Homo sapien
ggtcactggtgatgcattgtgctcc

SEQ ID NO: 4134969 - DNA, 25 bp, Homo sapien
cactggtgatgcattgtgctccatc

SEQ ID NO: 4134970 - DNA, 25 bp, Homo sapien
tccccaaactgacagtccattcaga

SEQ ID NO: 4134971 - DNA, 25 bp, Homo sapien
ggtggaaacaagatgaggaaattag

SEQ ID NO: 4134972 - DNA, 25 bp, Homo sapien
ggaaattaggatgcacacatgttag

SEQ ID NO: 4134973 - DNA, 25 bp, Homo sapien
aaattaggatgcacacatgttagcc

SEQ ID NO: 4134974 - DNA, 25 bp, Homo sapien
atgaggaaattaggatgcacacatg

SEQ ID NO: 4134975 - DNA, 25 bp, Homo sapien
tgagtggtcatctcgagcatatctg

SEQ ID NO: 4134976 - DNA, 25 bp, Homo sapien
agcctgaagtactgagtggtcatct

SEQ ID NO: 4134977 - DNA, 25 bp, Homo sapien
gaagtactgagtggtcatctcgagc

SEQ ID NO: 4134978 - DNA, 25 bp, Homo sapien
ctcgagcatatctgtttggtctgac

SEQ ID NO: 4134979 - DNA, 25 bp, Homo sapien
gaacaatcgagatgagagaggatct

SEQ ID NO: 4134980 - DNA, 25 bp, Homo sapien
aaacctccatggtgataacagcaca

SEQ ID NO: 4134981 - DNA, 25 bp, Homo sapien
gaggatcttgccattgacagtcatc

SEQ ID NO: 4134982 - DNA, 25 bp, Homo sapien
tccttaccgtgatcagagctgtgtg

SEQ ID NO: 4134983 - DNA, 25 bp, Homo sapien
gcacatgtgtaaaggccataaaaga

SEQ ID NO: 4134984 - DNA, 25 bp, Homo sapien
tggagtgcagctctcgtaccaagag

SEQ ID NO: 4134985 - DNA, 25 bp, Homo sapien
ggaaaagccagggaaaactcatgat

SEQ ID NO: 4134986 - DNA, 25 bp, Homo sapien
gatctgcagggatggataaaccagg

SEQ ID NO: 4134987 - DNA, 25 bp, Homo sapien
aagttgccaccacctagaactacac

SEQ ID NO: 4134988 - DNA, 25 bp, Homo sapien
gttgccaccacctagaactacacag

SEQ ID NO: 4134989 - DNA, 25 bp, Homo sapien
gtaaagttgccaccacctagaacta

SEQ ID NO: 4134990 - DNA, 25 bp, Homo sapien
taaagttgccaccacctagaactac

SEQ ID NO: 4134991 - DNA, 25 bp, Homo sapien
ttttgttcccgtgaatgggtgaggc

SEQ ID NO: 4134992 - DNA, 25 bp, Homo sapien
tttgttcccgtgaatgggtgaggct

SEQ ID NO: 4134993 - DNA, 25 bp, Homo sapien
agaactcagacatggaatcaaaatc

SEQ ID NO: 4134994 - DNA, 25 bp, Homo sapien
ctcagacatggaatcaaaatctgtt

SEQ ID NO: 4134995 - DNA, 25 bp, Homo sapien
ttgattggggtccatggatttgtca

SEQ ID NO: 4134996 - DNA, 25 bp, Homo sapien
attggggtccatggatttgtcatca

SEQ ID NO: 4134997 - DNA, 25 bp, Homo sapien
cattgattggggtccatggatttgt

SEQ ID NO: 4134998 - DNA, 25 bp, Homo sapien
gattggggtccatggatttgtcatc

SEQ ID NO: 4134999 - DNA, 25 bp, Homo sapien
taaagtgggtccttgttaaagtgca

SEQ ID NO: 4135000 - DNA, 25 bp, Homo sapien
gttgaagaactgttgagcaagcact

SEQ ID NO: 4135001 - DNA, 25 bp, Homo sapien
cagaggtaattgcatatgagcaagc

SEQ ID NO: 4135002 - DNA, 25 bp, Homo sapien
taaagtgcatatcttgtgcccaaat

SEQ ID NO: 4135003 - DNA, 25 bp, Homo sapien
catatatcatctcacatggctgctt

SEQ ID NO: 4135004 - DNA, 25 bp, Homo sapien
ttgaggttcacaatataatatggga

SEQ ID NO: 4135005 - DNA, 25 bp, Homo sapien
gatatgtattgatagtaaaatggtt

SEQ ID NO: 4135006 - DNA, 25 bp, Homo sapien
gttactacagtgaaataaacaaaca

SEQ ID NO: 4135007 - DNA, 25 bp, Homo sapien
ctttgtcaggtaaaataaacacacg

SEQ ID NO: 4135008 - DNA, 25 bp, Homo sapien
aaaaatacagtactcgagtgctcca

SEQ ID NO: 4135009 - DNA, 25 bp, Homo sapien
tgctccaagcttttcagccatgggt

SEQ ID NO: 4135010 - DNA, 25 bp, Homo sapien
gttggacccagacagttaaattaca

SEQ ID NO: 4135011 - DNA, 25 bp, Homo sapien
tatgaacaagactagttaccagctt

SEQ ID NO: 4135012 - DNA, 25 bp, Homo sapien
agtggttgaacccatctcagtgtgc

SEQ ID NO: 4135013 - DNA, 25 bp, Homo sapien
ctcagtgtgcttggaactaagcatg

SEQ ID NO: 4135014 - DNA, 25 bp, Homo sapien
gctcttgcctgcagtggttgaaccc

SEQ ID NO: 4135015 - DNA, 25 bp, Homo sapien
aactgcgtgattgttgacttcctgc

SEQ ID NO: 4135016 - DNA, 25 bp, Homo sapien
tatcaccttctgcatagccctcatg

SEQ ID NO: 4135017 - DNA, 25 bp, Homo sapien
tggcatgtgcgccactgtctgaatt

SEQ ID NO: 4135018 - DNA, 25 bp, Homo sapien
gtgtgtcaggcaccctggcatgtgc

SEQ ID NO: 4135019 - DNA, 25 bp, Homo sapien
gacaagtggtcctttgctacaccca

SEQ ID NO: 4135020 - DNA, 25 bp, Homo sapien
tctgacaagtggtcctttgctacac

SEQ ID NO: 4135021 - DNA, 25 bp, Homo sapien
tgacaagtggtcctttgctacaccc

SEQ ID NO: 4135022 - DNA, 25 bp, Homo sapien
ctgacaagtggtcctttgctacacc

SEQ ID NO: 4135023 - DNA, 25 bp, Homo sapien
tcaagggcatttgaaactctttgca

SEQ ID NO: 4135024 - DNA, 25 bp, Homo sapien
gaaaggcctgagcagacagttggct

SEQ ID NO: 4135025 - DNA, 25 bp, Homo sapien
tcccatcttttcagtatcaagggca

SEQ ID NO: 4135026 - DNA, 25 bp, Homo sapien
gacccaaatatctagggcctggaaa

SEQ ID NO: 4135027 - DNA, 25 bp, Homo sapien
gatatcacccctgttgaagggactg

SEQ ID NO: 4135028 - DNA, 25 bp, Homo sapien
ctggctggtgatatcacccctgttg

SEQ ID NO: 4135029 - DNA, 25 bp, Homo sapien
cctgttgaagggactgttagaaaca

SEQ ID NO: 4135030 - DNA, 25 bp, Homo sapien
gaagggactgttagaaacagcttgt

SEQ ID NO: 4135031 - DNA, 25 bp, Homo sapien
gttctgggcctctcacaaattcctt

SEQ ID NO: 4135032 - DNA, 25 bp, Homo sapien
tcttagggctggtatctatgtctgg

SEQ ID NO: 4135033 - DNA, 25 bp, Homo sapien
tgagcatttggtacaaaatcttagg

SEQ ID NO: 4135034 - DNA, 25 bp, Homo sapien
gagcccagtcaagactgatttctaa

SEQ ID NO: 4135035 - DNA, 25 bp, Homo sapien
gtttctgggccagaaagctttgaca

SEQ ID NO: 4135036 - DNA, 25 bp, Homo sapien
ctgaaggaagcctgtcattgtttct

SEQ ID NO: 4135037 - DNA, 25 bp, Homo sapien
cctgaaggaagcctgtcattgtttc

SEQ ID NO: 4135038 - DNA, 25 bp, Homo sapien
tgggccagaaagctttgacaagccc

SEQ ID NO: 4135039 - DNA, 25 bp, Homo sapien
ccttcctgtaactggcccatttgga

SEQ ID NO: 4135040 - DNA, 25 bp, Homo sapien
cttcctgtaactggcccatttggag

SEQ ID NO: 4135041 - DNA, 25 bp, Homo sapien
aactggcccatttggagaagagcct

SEQ ID NO: 4135042 - DNA, 25 bp, Homo sapien
ctgtaactggcccatttggagaaga

SEQ ID NO: 4135043 - DNA, 25 bp, Homo sapien
ctactaaggatttcaagcccaccat

SEQ ID NO: 4135044 - DNA, 25 bp, Homo sapien
gatggaacttgtcctggaagggaac

SEQ ID NO: 4135045 - DNA, 25 bp, Homo sapien
ctggcatcttatgaggatggaactt

SEQ ID NO: 4135046 - DNA, 25 bp, Homo sapien
ggcaaggcctactaaggatttcaag

SEQ ID NO: 4135047 - DNA, 25 bp, Homo sapien
acaggacaaggcaatccttggtgac

SEQ ID NO: 4135048 - DNA, 25 bp, Homo sapien
tacaggacaaggcaatccttggtga

SEQ ID NO: 4135049 - DNA, 25 bp, Homo sapien
ttacaggacaaggcaatccttggtg

SEQ ID NO: 4135050 - DNA, 25 bp, Homo sapien
ttcagttttaggcttagagacaatg

SEQ ID NO: 4135051 - DNA, 25 bp, Homo sapien
tttactaagagatccacagactctg

SEQ ID NO: 4135052 - DNA, 25 bp, Homo sapien
ctagatggaaatcaagccttttcag

SEQ ID NO: 4135053 - DNA, 25 bp, Homo sapien
cagttttaggcttagagacaatgga

SEQ ID NO: 4135054 - DNA, 25 bp, Homo sapien
ttggaagaaatcataggccttacca

SEQ ID NO: 4135055 - DNA, 25 bp, Homo sapien
gaccacatgttgtcacctttgactg

SEQ ID NO: 4135056 - DNA, 25 bp, Homo sapien
ctttgactgttgagtaatgcgcttc

SEQ ID NO: 4135057 - DNA, 25 bp, Homo sapien
taggccttaccatctaatcccctgt

SEQ ID NO: 4135058 - DNA, 25 bp, Homo sapien
tagaaaagcgtattttgggctccca

SEQ ID NO: 4135059 - DNA, 25 bp, Homo sapien
tctctgctagcttcctgtggtgaca

SEQ ID NO: 4135060 - DNA, 25 bp, Homo sapien
agtctggaaggtcccacgtccagca

SEQ ID NO: 4135061 - DNA, 25 bp, Homo sapien
gctctctgctagcttcctgtggtga

SEQ ID NO: 4135062 - DNA, 25 bp, Homo sapien
agatgttgagtgtaccccaaagccg

SEQ ID NO: 4135063 - DNA, 25 bp, Homo sapien
aagatgttgagtgtaccccaaagcc

SEQ ID NO: 4135064 - DNA, 25 bp, Homo sapien
gggaagatgttgagtgtaccccaaa

SEQ ID NO: 4135065 - DNA, 25 bp, Homo sapien
gaagatgttgagtgtaccccaaagc

SEQ ID NO: 4135066 - DNA, 25 bp, Homo sapien
tccagaaacttcagatctttttcaa

SEQ ID NO: 4135067 - DNA, 25 bp, Homo sapien
ccagaaacttcagatctttttcaag

SEQ ID NO: 4135068 - DNA, 25 bp, Homo sapien
aaggttctcccacggctctctgatg

SEQ ID NO: 4135069 - DNA, 25 bp, Homo sapien
tgtgctaccacatggtgccgttgtt

SEQ ID NO: 4135070 - DNA, 25 bp, Homo sapien
gagatgggttctgtatggtctgact

SEQ ID NO: 4135071 - DNA, 25 bp, Homo sapien
cttgtgctaccacatggtgccgttg

SEQ ID NO: 4135072 - DNA, 25 bp, Homo sapien
cttgcagcccagaggagacagcagt

SEQ ID NO: 4135073 - DNA, 25 bp, Homo sapien
cagcccagaggagacagcagtggcc

SEQ ID NO: 4135074 - DNA, 25 bp, Homo sapien
agcccagaggagacagcagtggcca

SEQ ID NO: 4135075 - DNA, 25 bp, Homo sapien
tgcagcccagaggagacagcagtgg

SEQ ID NO: 4135076 - DNA, 25 bp, Homo sapien
tccaatgtggttgaggacaaatggg

SEQ ID NO: 4135077 - DNA, 25 bp, Homo sapien
caaatggggagtgtacatcatgtct

SEQ ID NO: 4135078 - DNA, 25 bp, Homo sapien
gggacaatggctccggtcagcaatg

SEQ ID NO: 4135079 - DNA, 25 bp, Homo sapien
tcaacatgcttccaatgtggttgag

SEQ ID NO: 4135080 - DNA, 25 bp, Homo sapien
taggttccaaaacaagcgtgtatgg

SEQ ID NO: 4135081 - DNA, 25 bp, Homo sapien
taatatatagggtggatggtcaagg

SEQ ID NO: 4135082 - DNA, 25 bp, Homo sapien
tctgctcaccagatgaataactgat

SEQ ID NO: 4135083 - DNA, 25 bp, Homo sapien
tatttgacataggagttaggttcca

SEQ ID NO: 4135084 - DNA, 25 bp, Homo sapien
aaggcagcagagggcgaaggcatgg

SEQ ID NO: 4135085 - DNA, 25 bp, Homo sapien
cgaaggcatgggtagtgccatgggg

SEQ ID NO: 4135086 - DNA, 25 bp, Homo sapien
ggcatgggtagtgccatggggtcct

SEQ ID NO: 4135087 - DNA, 25 bp, Homo sapien
aggcagcagagggcgaaggcatggg

SEQ ID NO: 4135088 - DNA, 25 bp, Homo sapien
caactatcaaccgtgatcagtttct

SEQ ID NO: 4135089 - DNA, 25 bp, Homo sapien
taaacaactatcaaccgtgatcagt

SEQ ID NO: 4135090 - DNA, 25 bp, Homo sapien
ctataaacaactatcaaccgtgatc

SEQ ID NO: 4135091 - DNA, 25 bp, Homo sapien
ctatcaaccgtgatcagtttctgaa

SEQ ID NO: 4135092 - DNA, 25 bp, Homo sapien
aatttgctgggctagaaatgagata

SEQ ID NO: 4135093 - DNA, 25 bp, Homo sapien
gatgtagaatgattaaaggttggta

SEQ ID NO: 4135094 - DNA, 25 bp, Homo sapien
tgaaacatcatcttgttagctaact

SEQ ID NO: 4135095 - DNA, 25 bp, Homo sapien
aatggtgaaagagagatgccgtgtt

SEQ ID NO: 4135096 - DNA, 25 bp, Homo sapien
gagatcgttagcagcatcagtccac

SEQ ID NO: 4135097 - DNA, 25 bp, Homo sapien
tgtgagctactgacctcctgagact

SEQ ID NO: 4135098 - DNA, 25 bp, Homo sapien
gaccggtactagctaactccaagag

SEQ ID NO: 4135099 - DNA, 25 bp, Homo sapien
aaagcccgggtctgcagagaatgaa

SEQ ID NO: 4135100 - DNA, 25 bp, Homo sapien
caaacatcgaaaggcttatgccaaa

SEQ ID NO: 4135101 - DNA, 25 bp, Homo sapien
accatgacggatagtttaggatgac

SEQ ID NO: 4135102 - DNA, 25 bp, Homo sapien
tcatatcacctcagccaactgtggc

SEQ ID NO: 4135103 - DNA, 25 bp, Homo sapien
gagatttttggagaaaccatgacgg

SEQ ID NO: 4135104 - DNA, 25 bp, Homo sapien
aaattctctggtgcaagataaaagg

SEQ ID NO: 4135105 - DNA, 25 bp, Homo sapien
tgtgtggacatggtacacatccaga

SEQ ID NO: 4135106 - DNA, 25 bp, Homo sapien
cacataccctaacttagctgtgtgg

SEQ ID NO: 4135107 - DNA, 25 bp, Homo sapien
catcatatgggatgggtaggttcca

SEQ ID NO: 4135108 - DNA, 25 bp, Homo sapien
cacagaacccaaggtaggtgccagg

SEQ ID NO: 4135109 - DNA, 25 bp, Homo sapien
tttgcagtcctcacgagtctcctgg

SEQ ID NO: 4135110 - DNA, 25 bp, Homo sapien
ggccaatcacaaagtagctctggag

SEQ ID NO: 4135111 - DNA, 25 bp, Homo sapien
agtacccagggaggaccatctttgc

SEQ ID NO: 4135112 - DNA, 25 bp, Homo sapien
caagtcttggtgaccggatgggccc

SEQ ID NO: 4135113 - DNA, 25 bp, Homo sapien
aatctgggccgctgactcggaaaca

SEQ ID NO: 4135114 - DNA, 25 bp, Homo sapien
aaagagatccgctgtaatccgccga

SEQ ID NO: 4135115 - DNA, 25 bp, Homo sapien
ttaatccgacgcgaaggctttgagg

SEQ ID NO: 4135116 - DNA, 25 bp, Homo sapien
gcgcgcgccaacacacatattgctg

SEQ ID NO: 4135117 - DNA, 25 bp, Homo sapien
gcctgggcggctctcttttgtcata

SEQ ID NO: 4135118 - DNA, 25 bp, Homo sapien
ccttcgctgccataagcctgggtca

SEQ ID NO: 4135119 - DNA, 25 bp, Homo sapien
tatacccgaacctggaacctgctgt

SEQ ID NO: 4135120 - DNA, 25 bp, Homo sapien
tgtgtgtatcctggggcctggaaag

SEQ ID NO: 4135121 - DNA, 25 bp, Homo sapien
gtgtgtgtatcctggggcctggaaa

SEQ ID NO: 4135122 - DNA, 25 bp, Homo sapien
tgtgtatcctggggcctggaaagcc

SEQ ID NO: 4135123 - DNA, 25 bp, Homo sapien
gtgtgtatcctggggcctggaaagc

SEQ ID NO: 4135124 - DNA, 25 bp, Homo sapien
gccgagagggctagacatcctatgt

SEQ ID NO: 4135125 - DNA, 25 bp, Homo sapien
cacctctggacaaagttgatcctct

SEQ ID NO: 4135126 - DNA, 25 bp, Homo sapien
caaagttgatcctctgccgagaggg

SEQ ID NO: 4135127 - DNA, 25 bp, Homo sapien
gagtgggggttggactatcatttca

SEQ ID NO: 4135128 - DNA, 25 bp, Homo sapien
ctctgccccaactcgggagtccagg

SEQ ID NO: 4135129 - DNA, 25 bp, Homo sapien
gctccggttcactgcgcccgccgga

SEQ ID NO: 4135130 - DNA, 25 bp, Homo sapien
ggacgcgcgccggaggactccgcag

SEQ ID NO: 4135131 - DNA, 25 bp, Homo sapien
gccagtgcccgcttcagctccggtt

SEQ ID NO: 4135132 - DNA, 25 bp, Homo sapien
tggacgttggaaacggagcgcctct

SEQ ID NO: 4135133 - DNA, 25 bp, Homo sapien
ggaccggcggctccctagttgcgcc

SEQ ID NO: 4135134 - DNA, 25 bp, Homo sapien
gagcgcctctccgtggaacagttgc

SEQ ID NO: 4135135 - DNA, 25 bp, Homo sapien
tggaacagttgcctgcgcgccctcg

SEQ ID NO: 4135136 - DNA, 25 bp, Homo sapien
tctggaagcagacgtttcggctaca

SEQ ID NO: 4135137 - DNA, 25 bp, Homo sapien
agacgtttcggctacagacccagag

SEQ ID NO: 4135138 - DNA, 25 bp, Homo sapien
tgcaggatcagcgtctggaagcaga

SEQ ID NO: 4135139 - DNA, 25 bp, Homo sapien
tcagcgtctggaagcagacgtttcg

SEQ ID NO: 4135140 - DNA, 25 bp, Homo sapien
tcagatggcgacttgtgcgttttca

SEQ ID NO: 4135141 - DNA, 25 bp, Homo sapien
tcagcggcatctcccggagaaaaag

SEQ ID NO: 4135142 - DNA, 25 bp, Homo sapien
tcttgcagctcagatggcgacttgt

SEQ ID NO: 4135143 - DNA, 25 bp, Homo sapien
tgtgcgttttcagcggcatctcccg

SEQ ID NO: 4135144 - DNA, 25 bp, Homo sapien
tgaaaggacacaatttggggctgac

SEQ ID NO: 4135145 - DNA, 25 bp, Homo sapien
aatgaaaggacacaatttggggctg

SEQ ID NO: 4135146 - DNA, 25 bp, Homo sapien
aaatgaaaggacacaatttggggct

SEQ ID NO: 4135147 - DNA, 25 bp, Homo sapien
ctaaaatgaaaggacacaatttggg

SEQ ID NO: 4135148 - DNA, 25 bp, Homo sapien
cggggcgactttcacctattttgct

SEQ ID NO: 4135149 - DNA, 25 bp, Homo sapien
ggcgactttcacctattttgctccc

SEQ ID NO: 4135150 - DNA, 25 bp, Homo sapien
cgcacagcaataagttccggggcga

SEQ ID NO: 4135151 - DNA, 25 bp, Homo sapien
cagcaataagttccggggcgacttt

SEQ ID NO: 4135152 - DNA, 25 bp, Homo sapien
cgcccgcggtgcactcgctgctctt

SEQ ID NO: 4135153 - DNA, 25 bp, Homo sapien
ccgcggtgcactcgctgctcttcgc

SEQ ID NO: 4135154 - DNA, 25 bp, Homo sapien
cccgcggtgcactcgctgctcttcg

SEQ ID NO: 4135155 - DNA, 25 bp, Homo sapien
gcccgcggtgcactcgctgctcttc

SEQ ID NO: 4135156 - DNA, 25 bp, Homo sapien
aggaggtgggcagcttcgccggcca

SEQ ID NO: 4135157 - DNA, 25 bp, Homo sapien
gccggccatggaccgccggagctga

SEQ ID NO: 4135158 - DNA, 25 bp, Homo sapien
cgggcgccaaacgaggaggtgggca

SEQ ID NO: 4135159 - DNA, 25 bp, Homo sapien
agcttcgccggccatggaccgccgg

SEQ ID NO: 4135160 - DNA, 25 bp, Homo sapien
gcacaggatcgcgtggaaatctgct

SEQ ID NO: 4135161 - DNA, 25 bp, Homo sapien
atctgctgcgagctccacggagccg

SEQ ID NO: 4135162 - DNA, 25 bp, Homo sapien
tggaaatctgctgcgagctccacgg

SEQ ID NO: 4135163 - DNA, 25 bp, Homo sapien
cgcgtggaaatctgctgcgagctcc

SEQ ID NO: 4135164 - DNA, 25 bp, Homo sapien
acccgccaagatctccgtggcagga

SEQ ID NO: 4135165 - DNA, 25 bp, Homo sapien
gcacccgccaagatctccgtggcag

SEQ ID NO: 4135166 - DNA, 25 bp, Homo sapien
agggcacccgccaagatctccgtgg

SEQ ID NO: 4135167 - DNA, 25 bp, Homo sapien
tgagggcacccgccaagatctccgt

SEQ ID NO: 4135168 - DNA, 25 bp, Homo sapien
gttttgccaaacttcgcaatctcct

SEQ ID NO: 4135169 - DNA, 25 bp, Homo sapien
gcagacggcggaaaataactattac

SEQ ID NO: 4135170 - DNA, 25 bp, Homo sapien
gcgtctagaaattccggtgcccgga

SEQ ID NO: 4135171 - DNA, 25 bp, Homo sapien
taactattacgctccagtgtgaggc

SEQ ID NO: 4135172 - DNA, 25 bp, Homo sapien
tatttctagactggctgtatgtgtg

SEQ ID NO: 4135173 - DNA, 25 bp, Homo sapien
gacactgggatgctagtttctccat

SEQ ID NO: 4135174 - DNA, 25 bp, Homo sapien
ggatcctctacacgaactgccttgg

SEQ ID NO: 4135175 - DNA, 25 bp, Homo sapien
cattcttcgggagcgccctttggca

SEQ ID NO: 4135176 - DNA, 25 bp, Homo sapien
cattgagtgccaggtaagggcctga

SEQ ID NO: 4135177 - DNA, 25 bp, Homo sapien
aagggcctgacccatgctaagagca

SEQ ID NO: 4135178 - DNA, 25 bp, Homo sapien
tgaaaaccgcagatgaggtcctgct

SEQ ID NO: 4135179 - DNA, 25 bp, Homo sapien
ttaatttgcaagcagcccagtgagg

SEQ ID NO: 4135180 - DNA, 25 bp, Homo sapien
aaagagatggtattactttgacggt

SEQ ID NO: 4135181 - DNA, 25 bp, Homo sapien
tcctctaatttcaaaggagcctttg

SEQ ID NO: 4135182 - DNA, 25 bp, Homo sapien
gatggtattactttgacggtggcca

SEQ ID NO: 4135183 - DNA, 25 bp, Homo sapien
ttactttgacggtggccatgtggtt

SEQ ID NO: 4135184 - DNA, 25 bp, Homo sapien
gaaagacttgtataattaccacttg

SEQ ID NO: 4135185 - DNA, 25 bp, Homo sapien
acagggaaggaaagacttgtataat

SEQ ID NO: 4135186 - DNA, 25 bp, Homo sapien
cctggttactgttgccaatgacagg

SEQ ID NO: 4135187 - DNA, 25 bp, Homo sapien
tcagatcccatttgccacgtcaggg

SEQ ID NO: 4135188 - DNA, 25 bp, Homo sapien
ctaccagtgggcatgtattagccag

SEQ ID NO: 4135189 - DNA, 25 bp, Homo sapien
ggcgattgaatgctgcccagggtca

SEQ ID NO: 4135190 - DNA, 25 bp, Homo sapien
gtatccagtatgcacgttaacagcg

SEQ ID NO: 4135191 - DNA, 25 bp, Homo sapien
taaacagtgtttatgacgagacctc

SEQ ID NO: 4135192 - DNA, 25 bp, Homo sapien
ggccacaaatgtgtcccagtgaaca

SEQ ID NO: 4135193 - DNA, 25 bp, Homo sapien
aactatcagagggatctaggtcttg

SEQ ID NO: 4135194 - DNA, 25 bp, Homo sapien
ccagtgaacagtttggatgtcctca

SEQ ID NO: 4135195 - DNA, 25 bp, Homo sapien
tgttgcactgaaaacccaggccaca

SEQ ID NO: 4135196 - DNA, 25 bp, Homo sapien
taaagcacatgccagggaaaaagac

SEQ ID NO: 4135197 - DNA, 25 bp, Homo sapien
gactgagtctggcaaacatgtgcaa

SEQ ID NO: 4135198 - DNA, 25 bp, Homo sapien
gaagaaacccttccacgtgtatgca

SEQ ID NO: 4135199 - DNA, 25 bp, Homo sapien
cagtgaatttaagcatgagtggcct

SEQ ID NO: 4135200 - DNA, 25 bp, Homo sapien
catgatgcatggagtgtttgacgaa

SEQ ID NO: 4135201 - DNA, 25 bp, Homo sapien
tgcatggagtgtttgacgaagaaac

SEQ ID NO: 4135202 - DNA, 25 bp, Homo sapien
tggagtgtttgacgaagaaacaaaa

SEQ ID NO: 4135203 - DNA, 25 bp, Homo sapien
gatgcatggagtgtttgacgaagaa

SEQ ID NO: 4135204 - DNA, 25 bp, Homo sapien
tctttctcacaactgaataaatgac

SEQ ID NO: 4135205 - DNA, 25 bp, Homo sapien
catcagacattcactgtaattattt

SEQ ID NO: 4135206 - DNA, 25 bp, Homo sapien
tgcccagctggaaatctttctcaca

SEQ ID NO: 4135207 - DNA, 25 bp, Homo sapien
acatcaaggacatcagacattcact

SEQ ID NO: 4135208 - DNA, 25 bp, Homo sapien
caattgtggggcattgtattctgcc

SEQ ID NO: 4135209 - DNA, 25 bp, Homo sapien
aaaagcagtttgctgcaattgtggg

SEQ ID NO: 4135210 - DNA, 25 bp, Homo sapien
ggggcattgtattctgccttgtgac

SEQ ID NO: 4135211 - DNA, 25 bp, Homo sapien
ccaaaagcagtttgctgcaattgtg

SEQ ID NO: 4135212 - DNA, 25 bp, Homo sapien
ttgttggctgctgcgttgaaagcgc

SEQ ID NO: 4135213 - DNA, 25 bp, Homo sapien
tcagggcaacgggattataaacagg

SEQ ID NO: 4135214 - DNA, 25 bp, Homo sapien
tgtaaactgtaaacgggaatgcact

SEQ ID NO: 4135215 - DNA, 25 bp, Homo sapien
ggaatgcactatggactggatgtca

SEQ ID NO: 4135216 - DNA, 25 bp, Homo sapien
gcatctgaagccgtcgtgaatgggt

SEQ ID NO: 4135217 - DNA, 25 bp, Homo sapien
ggcacactgcacacatttggaaagc

SEQ ID NO: 4135218 - DNA, 25 bp, Homo sapien
cataatggacattaacccagatgtc

SEQ ID NO: 4135219 - DNA, 25 bp, Homo sapien
cccagatgtcaaaaatagcctgcgt

SEQ ID NO: 4135220 - DNA, 25 bp, Homo sapien
cattgtctctgtgatgaaagccaca

SEQ ID NO: 4135221 - DNA, 25 bp, Homo sapien
tgtgtgaacagtttagggcaggaca

SEQ ID NO: 4135222 - DNA, 25 bp, Homo sapien
tgggagttctagacacaggcttagg

SEQ ID NO: 4135223 - DNA, 25 bp, Homo sapien
caggtaacctaataacctcaggcag

SEQ ID NO: 4135224 - DNA, 25 bp, Homo sapien
tccaggccacatacagggtgcaagg

SEQ ID NO: 4135225 - DNA, 25 bp, Homo sapien
ggctggtttcgtcatgtttcccagg

SEQ ID NO: 4135226 - DNA, 25 bp, Homo sapien
tacagggtgcaaggttttgtctaat

SEQ ID NO: 4135227 - DNA, 25 bp, Homo sapien
ttttgtttcttgagcctgtttggca

SEQ ID NO: 4135228 - DNA, 25 bp, Homo sapien
tggtttctttgcaccacaggcaagc

SEQ ID NO: 4135229 - DNA, 25 bp, Homo sapien
ctgcatagcatttcacctccaaggt

SEQ ID NO: 4135230 - DNA, 25 bp, Homo sapien
agcatttcacctccaaggtggtttc

SEQ ID NO: 4135231 - DNA, 25 bp, Homo sapien
tcttctccaagaaagtatgctgcat

SEQ ID NO: 4135232 - DNA, 25 bp, Homo sapien
tttccagataggtaagccaagggcc

SEQ ID NO: 4135233 - DNA, 25 bp, Homo sapien
catcctttgccaagataataggcag

SEQ ID NO: 4135234 - DNA, 25 bp, Homo sapien
aataggcagtctgtgcaggcagaaa

SEQ ID NO: 4135235 - DNA, 25 bp, Homo sapien
caagggccacttggttgtgccttca

SEQ ID NO: 4135236 - DNA, 25 bp, Homo sapien
ttcaccgttatgtcttccattgacc

SEQ ID NO: 4135237 - DNA, 25 bp, Homo sapien
gggaacctcctgtcatcaccttgtg

SEQ ID NO: 4135238 - DNA, 25 bp, Homo sapien
gggccatcactgttctgtttgggtc

SEQ ID NO: 4135239 - DNA, 25 bp, Homo sapien
tgctgcctcttcaccgttatgtctt

SEQ ID NO: 4135240 - DNA, 25 bp, Homo sapien
cggtggagcccatgcggcctcccag

SEQ ID NO: 4135241 - DNA, 25 bp, Homo sapien
tggagcccatgcggcctcccagcat

SEQ ID NO: 4135242 - DNA, 25 bp, Homo sapien
cggtgtcggtggagcccatgcggcc

SEQ ID NO: 4135243 - DNA, 25 bp, Homo sapien
ggtgtcggtggagcccatgcggcct

SEQ ID NO: 4135244 - DNA, 25 bp, Homo sapien
gacttcttgtggaaatgtggccggc

SEQ ID NO: 4135245 - DNA, 25 bp, Homo sapien
ggccagccccgctggtctgcagtga

SEQ ID NO: 4135246 - DNA, 25 bp, Homo sapien
gggagacttcttgtggaaatgtggc

SEQ ID NO: 4135247 - DNA, 25 bp, Homo sapien
gagacttcttgtggaaatgtggccg

SEQ ID NO: 4135248 - DNA, 25 bp, Homo sapien
ctgtcacttcagggggggaaaccat

SEQ ID NO: 4135249 - DNA, 25 bp, Homo sapien
acaggactcagcaccttctcggcat

SEQ ID NO: 4135250 - DNA, 25 bp, Homo sapien
gccatttagcgcagcaaactccaac

SEQ ID NO: 4135251 - DNA, 25 bp, Homo sapien
tgctgccaacaaaggttacccctgg

SEQ ID NO: 4135252 - DNA, 25 bp, Homo sapien
tggtggaacccctttggccctgtga

SEQ ID NO: 4135253 - DNA, 25 bp, Homo sapien
aaaatcccattttgccagcagcttt

SEQ ID NO: 4135254 - DNA, 25 bp, Homo sapien
cccattttgccagcagctttgctca

SEQ ID NO: 4135255 - DNA, 25 bp, Homo sapien
aaatggaaaaatcccattttgccag

SEQ ID NO: 4135256 - DNA, 25 bp, Homo sapien
gaaaaatcccattttgccagcagct

SEQ ID NO: 4135257 - DNA, 25 bp, Homo sapien
taaagcacgcaatgccgttcaacaa

SEQ ID NO: 4135258 - DNA, 25 bp, Homo sapien
gcgttcgttaaagcacgcaatgccg

SEQ ID NO: 4135259 - DNA, 25 bp, Homo sapien
cgttaaagcacgcaatgccgttcaa

SEQ ID NO: 4135260 - DNA, 25 bp, Homo sapien
tccaaaagcgttcgttaaagcacgc

SEQ ID NO: 4135261 - DNA, 25 bp, Homo sapien
cctccacagcccctgttatttcagc

SEQ ID NO: 4135262 - DNA, 25 bp, Homo sapien
tccctccaagtgcagatatttgact

SEQ ID NO: 4135263 - DNA, 25 bp, Homo sapien
atatttgactgcttacacgtggaca

SEQ ID NO: 4135264 - DNA, 25 bp, Homo sapien
tacacgtggacagccttttgctgct

SEQ ID NO: 4135265 - DNA, 25 bp, Homo sapien
catgcaagctgtagttccgaggaac

SEQ ID NO: 4135266 - DNA, 25 bp, Homo sapien
gcgcagcaggaacgaggagatccat

SEQ ID NO: 4135267 - DNA, 25 bp, Homo sapien
tgtgaatcggcctccctgaacggat

SEQ ID NO: 4135268 - DNA, 25 bp, Homo sapien
ccccagccatggttgattggatgag

SEQ ID NO: 4135269 - DNA, 25 bp, Homo sapien
gagctgccggagcaacaatgagaca

SEQ ID NO: 4135270 - DNA, 25 bp, Homo sapien
ttgatggaggcgcaccggaaacgtc

SEQ ID NO: 4135271 - DNA, 25 bp, Homo sapien
cattaaatgtggcttgatggaggcg

SEQ ID NO: 4135272 - DNA, 25 bp, Homo sapien
ggaaacgtccactggagcaatggca

SEQ ID NO: 4135273 - DNA, 25 bp, Homo sapien
gctgattaatctgcttctctgcctg

SEQ ID NO: 4135274 - DNA, 25 bp, Homo sapien
ctggagacactctagagctgagcac

SEQ ID NO: 4135275 - DNA, 25 bp, Homo sapien
gagacactctagagctgagcacagg

SEQ ID NO: 4135276 - DNA, 25 bp, Homo sapien
ctctagagctgagcacaggttgctg

SEQ ID NO: 4135277 - DNA, 25 bp, Homo sapien
ttcctcggtgacccgttttctgagc

SEQ ID NO: 4135278 - DNA, 25 bp, Homo sapien
tcctcggtgacccgttttctgagcg

SEQ ID NO: 4135279 - DNA, 25 bp, Homo sapien
tttcagcaactccacaggtagagag

SEQ ID NO: 4135280 - DNA, 25 bp, Homo sapien
cctcggtgacccgttttctgagcga

SEQ ID NO: 4135281 - DNA, 25 bp, Homo sapien
gggcaaatatgtctcccagcataga

SEQ ID NO: 4135282 - DNA, 25 bp, Homo sapien
gcaggtcctgccgtctaaattgaga

SEQ ID NO: 4135283 - DNA, 25 bp, Homo sapien
tatgtggattttgatatcccatggg

SEQ ID NO: 4135284 - DNA, 25 bp, Homo sapien
caaaacctcattataacatgacctg

SEQ ID NO: 4135285 - DNA, 25 bp, Homo sapien
ccacagcatgcgctgtatatttcat

SEQ ID NO: 4135286 - DNA, 25 bp, Homo sapien
gctttcccacagcatgcgctgtata

SEQ ID NO: 4135287 - DNA, 25 bp, Homo sapien
ttcccacagcatgcgctgtatattt

SEQ ID NO: 4135288 - DNA, 25 bp, Homo sapien
cacagcatgcgctgtatatttcatt

SEQ ID NO: 4135289 - DNA, 25 bp, Homo sapien
gaatgaatcatttctgccgtgcaca

SEQ ID NO: 4135290 - DNA, 25 bp, Homo sapien
aatgaatcatttctgccgtgcacac

SEQ ID NO: 4135291 - DNA, 25 bp, Homo sapien
tgattttcgttctgcggttctgctc

SEQ ID NO: 4135292 - DNA, 25 bp, Homo sapien
tcaaagccgaaaccagctgtgtttg

SEQ ID NO: 4135293 - DNA, 25 bp, Homo sapien
tgcagctttttctaggtcactctgt

SEQ ID NO: 4135294 - DNA, 25 bp, Homo sapien
gctgtgtttgtttgtggatctttca

SEQ ID NO: 4135295 - DNA, 25 bp, Homo sapien
ccaaatggctcgtgtaactgatgca

SEQ ID NO: 4135296 - DNA, 25 bp, Homo sapien
aactgatgcactccacatcaccctg

SEQ ID NO: 4135297 - DNA, 25 bp, Homo sapien
tctgattcagttgccgacgctttat

SEQ ID NO: 4135298 - DNA, 25 bp, Homo sapien
cgacgctttatgatgttgttccttc

SEQ ID NO: 4135299 - DNA, 25 bp, Homo sapien
ggtcctccgaaatgccccaagccat

SEQ ID NO: 4135300 - DNA, 25 bp, Homo sapien
tggtcctccgaaatgccccaagcca

SEQ ID NO: 4135301 - DNA, 25 bp, Homo sapien
caaaatggtcctccgaaatgcccca

SEQ ID NO: 4135302 - DNA, 25 bp, Homo sapien
gctctgaggaatgtccggctttcat

SEQ ID NO: 4135303 - DNA, 25 bp, Homo sapien
tagctcctgtaaaactgttgaattg

SEQ ID NO: 4135304 - DNA, 25 bp, Homo sapien
tctgcagagagccttaatgcgctgc

SEQ ID NO: 4135305 - DNA, 25 bp, Homo sapien
catttgagcccttgtaagtgatgat

SEQ ID NO: 4135306 - DNA, 25 bp, Homo sapien
tttagggaagggttgtgagcatctt

SEQ ID NO: 4135307 - DNA, 25 bp, Homo sapien
tagggaagggttgtgagcatcttca

SEQ ID NO: 4135308 - DNA, 25 bp, Homo sapien
cactattccatggagggatttgtat

SEQ ID NO: 4135309 - DNA, 25 bp, Homo sapien
tccatggagggatttgtatggcttt

SEQ ID NO: 4135310 - DNA, 25 bp, Homo sapien
ggttcctccaactcttatggtgcct

SEQ ID NO: 4135311 - DNA, 25 bp, Homo sapien
tccaactcttatggtgcctctgtct

SEQ ID NO: 4135312 - DNA, 25 bp, Homo sapien
ttcctggttcctccaactcttatgg

SEQ ID NO: 4135313 - DNA, 25 bp, Homo sapien
tcctccaactcttatggtgcctctg

SEQ ID NO: 4135314 - DNA, 25 bp, Homo sapien
taattcacagccagactgttccatg

SEQ ID NO: 4135315 - DNA, 25 bp, Homo sapien
catgatgtaaattgttgtgtcagcc

SEQ ID NO: 4135316 - DNA, 25 bp, Homo sapien
agaacaataatctaggtccatcatc

SEQ ID NO: 4135317 - DNA, 25 bp, Homo sapien
cccaccagtgtagaacaataatcta

SEQ ID NO: 4135318 - DNA, 25 bp, Homo sapien
tggcagtttaacaccagagcaggtc

SEQ ID NO: 4135319 - DNA, 25 bp, Homo sapien
aggatccggtggcagtttaacacca

SEQ ID NO: 4135320 - DNA, 25 bp, Homo sapien
ccagagcaggtccaatgtttacttt

SEQ ID NO: 4135321 - DNA, 25 bp, Homo sapien
tggaggtgggtaacggcaaatgctg

SEQ ID NO: 4135322 - DNA, 25 bp, Homo sapien
tctgtttcaacagtctccatgagga

SEQ ID NO: 4135323 - DNA, 25 bp, Homo sapien
taccccgatgctggtgtgcagaaag

SEQ ID NO: 4135324 - DNA, 25 bp, Homo sapien
cagaaaggattgctgcaattgggtc

SEQ ID NO: 4135325 - DNA, 25 bp, Homo sapien
catgaggatggcatctcccttaccc

SEQ ID NO: 4135326 - DNA, 25 bp, Homo sapien
tccaggaattggagagcaccagagt

SEQ ID NO: 4135327 - DNA, 25 bp, Homo sapien
aacagctgtctgagctccaaggaga

SEQ ID NO: 4135328 - DNA, 25 bp, Homo sapien
taactcgcagcatgaagcgacaggg

SEQ ID NO: 4135329 - DNA, 25 bp, Homo sapien
gcatttaactgtcgcaagcaggagg

SEQ ID NO: 4135330 - DNA, 25 bp, Homo sapien
tttgattactagactccagaaggga

SEQ ID NO: 4135331 - DNA, 25 bp, Homo sapien
ggacagcatgggatagccgagacat

SEQ ID NO: 4135332 - DNA, 25 bp, Homo sapien
gggacagtcctttatacagctcata

SEQ ID NO: 4135333 - DNA, 25 bp, Homo sapien
gacatggttgctccctaggcagtca

SEQ ID NO: 4135334 - DNA, 25 bp, Homo sapien
aagaggatatgcagagccctccggc

SEQ ID NO: 4135335 - DNA, 25 bp, Homo sapien
ctccggccaaatggctcggcaggca

SEQ ID NO: 4135336 - DNA, 25 bp, Homo sapien
ccgaaagaggatatgcagagccctc

SEQ ID NO: 4135337 - DNA, 25 bp, Homo sapien
atatgcagagccctccggccaaatg

SEQ ID NO: 4135338 - DNA, 25 bp, Homo sapien
actcttttgccatagtgtcttgcca

SEQ ID NO: 4135339 - DNA, 25 bp, Homo sapien
gcgtctgcacaaggacttcctctag

SEQ ID NO: 4135340 - DNA, 25 bp, Homo sapien
taatgtggttctgattaaggacatc

SEQ ID NO: 4135341 - DNA, 25 bp, Homo sapien
tagctgagtaatgtggttctgatta

SEQ ID NO: 4135342 - DNA, 25 bp, Homo sapien
ttgggtttttgcaatcacttcttcc

SEQ ID NO: 4135343 - DNA, 25 bp, Homo sapien
cctctggtccctctgagttctcaga

SEQ ID NO: 4135344 - DNA, 25 bp, Homo sapien
cttccatcggcaaagcctgcaggct

SEQ ID NO: 4135345 - DNA, 25 bp, Homo sapien
tgcatgagaagggaaggctatcagt

SEQ ID NO: 4135346 - DNA, 25 bp, Homo sapien
caagtgccgtacttaagaactgttc

SEQ ID NO: 4135347 - DNA, 25 bp, Homo sapien
gaaattccttcggatttcttcagaa

SEQ ID NO: 4135348 - DNA, 25 bp, Homo sapien
tccaggttccaataggaaaaacatg

SEQ ID NO: 4135349 - DNA, 25 bp, Homo sapien
aaaaatagtgctccagatttttcag

SEQ ID NO: 4135350 - DNA, 25 bp, Homo sapien
gcaagtccgtgctgctttagggctc

SEQ ID NO: 4135351 - DNA, 25 bp, Homo sapien
cagggtctgatgagacacctcattt

SEQ ID NO: 4135352 - DNA, 25 bp, Homo sapien
cgctccagggtctgatgagacacct

SEQ ID NO: 4135353 - DNA, 25 bp, Homo sapien
cgtgctgctttagggctcgctccag

SEQ ID NO: 4135354 - DNA, 25 bp, Homo sapien
ttatgccgatccttctccggaatgt

SEQ ID NO: 4135355 - DNA, 25 bp, Homo sapien
gatccttctccggaatgtgcagagt

SEQ ID NO: 4135356 - DNA, 25 bp, Homo sapien
ccttctccggaatgtgcagagtcat

SEQ ID NO: 4135357 - DNA, 25 bp, Homo sapien
gccgatccttctccggaatgtgcag

SEQ ID NO: 4135358 - DNA, 25 bp, Homo sapien
gaggaagcagacggtggggttagag

SEQ ID NO: 4135359 - DNA, 25 bp, Homo sapien
aggaagcagacggtggggttagagg

SEQ ID NO: 4135360 - DNA, 25 bp, Homo sapien
gcacagaggaagcagacggtggggt

SEQ ID NO: 4135361 - DNA, 25 bp, Homo sapien
cttgtaaagtctcccgtacactgtg

SEQ ID NO: 4135362 - DNA, 25 bp, Homo sapien
tcccgtacactgtgacaaatccaag

SEQ ID NO: 4135363 - DNA, 25 bp, Homo sapien
aagtctcccgtacactgtgacaaat

SEQ ID NO: 4135364 - DNA, 25 bp, Homo sapien
gtaaagtctcccgtacactgtgaca

SEQ ID NO: 4135365 - DNA, 25 bp, Homo sapien
tgaatcagcatggtccaagtctcgg

SEQ ID NO: 4135366 - DNA, 25 bp, Homo sapien
tgggtttgaatcagcatggtccaag

SEQ ID NO: 4135367 - DNA, 25 bp, Homo sapien
tggtccaagtctcggtcggaaccaa

SEQ ID NO: 4135368 - DNA, 25 bp, Homo sapien
tcagcatggtccaagtctcggtcgg

SEQ ID NO: 4135369 - DNA, 25 bp, Homo sapien
tgctcagctgataaagctcattggt

SEQ ID NO: 4135370 - DNA, 25 bp, Homo sapien
atgtgggcatggagaacaaatcaga

SEQ ID NO: 4135371 - DNA, 25 bp, Homo sapien
gcatggagaacaaatcagagaacat

SEQ ID NO: 4135372 - DNA, 25 bp, Homo sapien
cagctgataaagctcattggttccc

SEQ ID NO: 4135373 - DNA, 25 bp, Homo sapien
ggttcaactacctcagactcgtcct

SEQ ID NO: 4135374 - DNA, 25 bp, Homo sapien
tatttccaaccatattaggttcaac

SEQ ID NO: 4135375 - DNA, 25 bp, Homo sapien
actcgtcctcacattcctcccgcat

SEQ ID NO: 4135376 - DNA, 25 bp, Homo sapien
tgtccctcccgtggcgacacattgt

SEQ ID NO: 4135377 - DNA, 25 bp, Homo sapien
tgactgctttgccgagcccctcggg

SEQ ID NO: 4135378 - DNA, 25 bp, Homo sapien
tcactgacgtaatgccaaagctatg

SEQ ID NO: 4135379 - DNA, 25 bp, Homo sapien
ccaaagctatgcacaacgatgactg

SEQ ID NO: 4135380 - DNA, 25 bp, Homo sapien
tatgcacaacgatgactgctttgcc

SEQ ID NO: 4135381 - DNA, 25 bp, Homo sapien
ctgcaaaccgatatgcaagaaagaa

SEQ ID NO: 4135382 - DNA, 25 bp, Homo sapien
cccctatgtaaaaatgggctgttat

SEQ ID NO: 4135383 - DNA, 25 bp, Homo sapien
ttgcagaataggcaaccccctatgt

SEQ ID NO: 4135384 - DNA, 25 bp, Homo sapien
caggcacaccttgttatccagaaac

SEQ ID NO: 4135385 - DNA, 25 bp, Homo sapien
tgttgaatgcaatagaattaaagtg

SEQ ID NO: 4135386 - DNA, 25 bp, Homo sapien
ctgttgaatgcaatagaattaaagt

SEQ ID NO: 4135387 - DNA, 25 bp, Homo sapien
gttgaatgcaatagaattaaagtga

SEQ ID NO: 4135388 - DNA, 25 bp, Homo sapien
ttgaatgcaatagaattaaagtgaa

SEQ ID NO: 4135389 - DNA, 25 bp, Homo sapien
gaaggctgagttcagcatccttttc

SEQ ID NO: 4135390 - DNA, 25 bp, Homo sapien
ccagctatctgggccttcttggatg

SEQ ID NO: 4135391 - DNA, 25 bp, Homo sapien
ttcttggatgcaaagagcaagggca

SEQ ID NO: 4135392 - DNA, 25 bp, Homo sapien
ggagtgcaaactgttttcccagcta

SEQ ID NO: 4135393 - DNA, 25 bp, Homo sapien
tcatgcttagcatgggtggccctgc

SEQ ID NO: 4135394 - DNA, 25 bp, Homo sapien
aaatgctgagcatgtgaggtgatac

SEQ ID NO: 4135395 - DNA, 25 bp, Homo sapien
gatttgtgtcctgctgataggacag

SEQ ID NO: 4135396 - DNA, 25 bp, Homo sapien
taggacagacagtgcaccttctgaa

SEQ ID NO: 4135397 - DNA, 25 bp, Homo sapien
atgactacttcaaccaacatcccta

SEQ ID NO: 4135398 - DNA, 25 bp, Homo sapien
gactacttcaaccaacatccctagt

SEQ ID NO: 4135399 - DNA, 25 bp, Homo sapien
tccctagttttgaggatgccattct

SEQ ID NO: 4135400 - DNA, 25 bp, Homo sapien
aacatccctagttttgaggatgcca

SEQ ID NO: 4135401 - DNA, 25 bp, Homo sapien
agtcactctttccatcaaagccacc

SEQ ID NO: 4135402 - DNA, 25 bp, Homo sapien
gccaggaatccagcagtcactcttt

SEQ ID NO: 4135403 - DNA, 25 bp, Homo sapien
ccaggaatccagcagtcactctttc

SEQ ID NO: 4135404 - DNA, 25 bp, Homo sapien
cactatccaggagatgggtgtcata

SEQ ID NO: 4135405 - DNA, 25 bp, Homo sapien
gagatgggtgtcatagccacggagc

SEQ ID NO: 4135406 - DNA, 25 bp, Homo sapien
atgggtgtcatagccacggagcttc

SEQ ID NO: 4135407 - DNA, 25 bp, Homo sapien
ccaggagatgggtgtcatagccacg

SEQ ID NO: 4135408 - DNA, 25 bp, Homo sapien
agccaaccatggaggcaaaagcggg

SEQ ID NO: 4135409 - DNA, 25 bp, Homo sapien
tcagccaaccatggaggcaaaagcg

SEQ ID NO: 4135410 - DNA, 25 bp, Homo sapien
gaggatcttggggatgcccttcata

SEQ ID NO: 4135411 - DNA, 25 bp, Homo sapien
caaaagcgggggagtgaaagaggag

SEQ ID NO: 4135412 - DNA, 25 bp, Homo sapien
tcacttgcacagcaatggtccttca

SEQ ID NO: 4135413 - DNA, 25 bp, Homo sapien
ccttcagtcttctgattatgtggct

SEQ ID NO: 4135414 - DNA, 25 bp, Homo sapien
ttgcacagcaatggtccttcagtct

SEQ ID NO: 4135415 - DNA, 25 bp, Homo sapien
cttgcacagcaatggtccttcagtc

SEQ ID NO: 4135416 - DNA, 25 bp, Homo sapien
ggttgatgtgccaatttgctctcag

SEQ ID NO: 4135417 - DNA, 25 bp, Homo sapien
gacctcaaattcagccaatggaaag

SEQ ID NO: 4135418 - DNA, 25 bp, Homo sapien
tgctctcagttgcatgtacagaaat

SEQ ID NO: 4135419 - DNA, 25 bp, Homo sapien
catgtacagaaattgtgacctcaaa

SEQ ID NO: 4135420 - DNA, 25 bp, Homo sapien
aaccatctcccttccgttcatccat

SEQ ID NO: 4135421 - DNA, 25 bp, Homo sapien
tctgtaatggaaaccatctcccttc

SEQ ID NO: 4135422 - DNA, 25 bp, Homo sapien
attctgtaatggaaaccatctccct

SEQ ID NO: 4135423 - DNA, 25 bp, Homo sapien
ttctgtaatggaaaccatctccctt

SEQ ID NO: 4135424 - DNA, 25 bp, Homo sapien
aagagagagcctgaaatggatcctt

SEQ ID NO: 4135425 - DNA, 25 bp, Homo sapien
gcctgaaatggatccttggctctca

SEQ ID NO: 4135426 - DNA, 25 bp, Homo sapien
ctgaaatggatccttggctctcagc

SEQ ID NO: 4135427 - DNA, 25 bp, Homo sapien
agagcctgaaatggatccttggctc

SEQ ID NO: 4135428 - DNA, 25 bp, Homo sapien
ccgcggtatgtaggcagtaacagaa

SEQ ID NO: 4135429 - DNA, 25 bp, Homo sapien
gaagcctgtcatgtgggtgtaccac

SEQ ID NO: 4135430 - DNA, 25 bp, Homo sapien
gagcaaacttgatcttccaggttaa

SEQ ID NO: 4135431 - DNA, 25 bp, Homo sapien
tcaaaagctccctgcgttgcgagat

SEQ ID NO: 4135432 - DNA, 25 bp, Homo sapien
cctggcaaagcatattcaaccactg

SEQ ID NO: 4135433 - DNA, 25 bp, Homo sapien
ctggcaaagcatattcaaccactgt

SEQ ID NO: 4135434 - DNA, 25 bp, Homo sapien
ccctggcaaagcatattcaaccact

SEQ ID NO: 4135435 - DNA, 25 bp, Homo sapien
attgttctgggtttcttctagagac

SEQ ID NO: 4135436 - DNA, 25 bp, Homo sapien
gcctcattgttctgggtttcttcta

SEQ ID NO: 4135437 - DNA, 25 bp, Homo sapien
gactccacgggatcacttttccagc

SEQ ID NO: 4135438 - DNA, 25 bp, Homo sapien
ttcttctagagactccacgggatca

SEQ ID NO: 4135439 - DNA, 25 bp, Homo sapien
tatcctcaggatggaattggctcca

SEQ ID NO: 4135440 - DNA, 25 bp, Homo sapien
gtgaagctacttctgccatcatgag

SEQ ID NO: 4135441 - DNA, 25 bp, Homo sapien
ttcacaagattcatgacaccctgag

SEQ ID NO: 4135442 - DNA, 25 bp, Homo sapien
catcatgagtatcagggcgctaggc

SEQ ID NO: 4135443 - DNA, 25 bp, Homo sapien
ctaagaaggccgtttaatggattgt

SEQ ID NO: 4135444 - DNA, 25 bp, Homo sapien
tggattgtgctatctcttctatggc

SEQ ID NO: 4135445 - DNA, 25 bp, Homo sapien
agaaggccgtttaatggattgtgct

SEQ ID NO: 4135446 - DNA, 25 bp, Homo sapien
atggattgtgctatctcttctatgg

SEQ ID NO: 4135447 - DNA, 25 bp, Homo sapien
gcatagccgggcctgtaaaccaaag

SEQ ID NO: 4135448 - DNA, 25 bp, Homo sapien
gacgaggagggcatatgggcatagc

SEQ ID NO: 4135449 - DNA, 25 bp, Homo sapien
ggatgacgaggagggcatatgggca

SEQ ID NO: 4135450 - DNA, 25 bp, Homo sapien
catatgggcatagccgggcctgtaa

SEQ ID NO: 4135451 - DNA, 25 bp, Homo sapien
tcttctttcattctggtgctcccct

SEQ ID NO: 4135452 - DNA, 25 bp, Homo sapien
gtcgatctgaacatctggtttttaa

SEQ ID NO: 4135453 - DNA, 25 bp, Homo sapien
tcgacatctgggagcccctttttat

SEQ ID NO: 4135454 - DNA, 25 bp, Homo sapien
ttttaataaccctcgacatctggga

SEQ ID NO: 4135455 - DNA, 25 bp, Homo sapien
ttcactagcatacaagatgtcgatc

SEQ ID NO: 4135456 - DNA, 25 bp, Homo sapien
cagaaagttccccaatgcggcacat

SEQ ID NO: 4135457 - DNA, 25 bp, Homo sapien
tagcttctgcatcctctgacttcat

SEQ ID NO: 4135458 - DNA, 25 bp, Homo sapien
cacattcctttaatagcttctgcat

SEQ ID NO: 4135459 - DNA, 25 bp, Homo sapien
tccccaatgcggcacattcctttaa

SEQ ID NO: 4135460 - DNA, 25 bp, Homo sapien
agtgtccccaggcacatgctgtttc

SEQ ID NO: 4135461 - DNA, 25 bp, Homo sapien
cagtgtccccaggcacatgctgttt

SEQ ID NO: 4135462 - DNA, 25 bp, Homo sapien
taggacttggctggcagtgtcccca

SEQ ID NO: 4135463 - DNA, 25 bp, Homo sapien
ggtaggacttggctggcagtgtccc

SEQ ID NO: 4135464 - DNA, 25 bp, Homo sapien
caaagttagtatatgtgcctgctgg

SEQ ID NO: 4135465 - DNA, 25 bp, Homo sapien
tattcagggacaaagttagtatatg

SEQ ID NO: 4135466 - DNA, 25 bp, Homo sapien
acaccaaggtctttacgggcatgaa

SEQ ID NO: 4135467 - DNA, 25 bp, Homo sapien
ggtctttacgggcatgaaagcttcc

SEQ ID NO: 4135468 - DNA, 25 bp, Homo sapien
tcgaacaaaccaaacagaaaccaca

SEQ ID NO: 4135469 - DNA, 25 bp, Homo sapien
tccaaaaaagagcttctcgaacaaa

SEQ ID NO: 4135470 - DNA, 25 bp, Homo sapien
gcttctcgaacaaaccaaacagaaa

SEQ ID NO: 4135471 - DNA, 25 bp, Homo sapien
aagagcttctcgaacaaaccaaaca

SEQ ID NO: 4135472 - DNA, 25 bp, Homo sapien
gagctttctactgatgcaatccttg

SEQ ID NO: 4135473 - DNA, 25 bp, Homo sapien
tgagctttctactgatgcaatcctt

SEQ ID NO: 4135474 - DNA, 25 bp, Homo sapien
tcattgatcaccattgtggtgcaca

SEQ ID NO: 4135475 - DNA, 25 bp, Homo sapien
cattgatcaccattgtggtgcacac

SEQ ID NO: 4135476 - DNA, 25 bp, Homo sapien
tgtagcccaccttttgtgacaaatg

SEQ ID NO: 4135477 - DNA, 25 bp, Homo sapien
gtggagaaactcactctttgctttt

SEQ ID NO: 4135478 - DNA, 25 bp, Homo sapien
ttaaggatcccagtacaagtattgc

SEQ ID NO: 4135479 - DNA, 25 bp, Homo sapien
aattctgtgattggcaatctgtagc

SEQ ID NO: 4135480 - DNA, 25 bp, Homo sapien
ggcagttagttacaaatgcctccca

SEQ ID NO: 4135481 - DNA, 25 bp, Homo sapien
aatgcctcccatgattcagtgttca

SEQ ID NO: 4135482 - DNA, 25 bp, Homo sapien
atacttacaacctgagaactgaagt

SEQ ID NO: 4135483 - DNA, 25 bp, Homo sapien
cttacaacctgagaactgaagtata

SEQ ID NO: 4135484 - DNA, 25 bp, Homo sapien
tgtccaatttcccattccttgtgtc

SEQ ID NO: 4135485 - DNA, 25 bp, Homo sapien
caatttcccattccttgtgtcccat

SEQ ID NO: 4135486 - DNA, 25 bp, Homo sapien
tcatgtccaatttcccattccttgt

SEQ ID NO: 4135487 - DNA, 25 bp, Homo sapien
tgtcatgtccaatttcccattcctt

SEQ ID NO: 4135488 - DNA, 25 bp, Homo sapien
gtgatacccgtcagagaagaagtgg

SEQ ID NO: 4135489 - DNA, 25 bp, Homo sapien
tggtgatacccgtcagagaagaagt

SEQ ID NO: 4135490 - DNA, 25 bp, Homo sapien
ctttggtgatacccgtcagagaaga

SEQ ID NO: 4135491 - DNA, 25 bp, Homo sapien
tacccgtcagagaagaagtggttct

SEQ ID NO: 4135492 - DNA, 25 bp, Homo sapien
tgccaaagatagggccactgggagg

SEQ ID NO: 4135493 - DNA, 25 bp, Homo sapien
caggcatctgtaaaagttagaacac

SEQ ID NO: 4135494 - DNA, 25 bp, Homo sapien
ccaaagatagggccactgggaggct

SEQ ID NO: 4135495 - DNA, 25 bp, Homo sapien
gacaggcatctgtaaaagttagaac

SEQ ID NO: 4135496 - DNA, 25 bp, Homo sapien
ttgtctgaacgccagcccttggcgt

SEQ ID NO: 4135497 - DNA, 25 bp, Homo sapien
cagcccttggcgtgtaggctagcga

SEQ ID NO: 4135498 - DNA, 25 bp, Homo sapien
ccttggcgtgtaggctagcgatgtc

SEQ ID NO: 4135499 - DNA, 25 bp, Homo sapien
tgaacgccagcccttggcgtgtagg

SEQ ID NO: 4135500 - DNA, 25 bp, Homo sapien
gggtgagctccggtctggtttcttc

SEQ ID NO: 4135501 - DNA, 25 bp, Homo sapien
tattttaggggtgagctccggtctg

SEQ ID NO: 4135502 - DNA, 25 bp, Homo sapien
cccatcattattttaggggtgagct

SEQ ID NO: 4135503 - DNA, 25 bp, Homo sapien
tggtttcttctacatctacctgaaa

SEQ ID NO: 4135504 - DNA, 25 bp, Homo sapien
ggccagagggtgagtgccccctact

SEQ ID NO: 4135505 - DNA, 25 bp, Homo sapien
ggtcttcagtctatcccacaagctc

SEQ ID NO: 4135506 - DNA, 25 bp, Homo sapien
ttttgggtcttcagtctatcccaca

SEQ ID NO: 4135507 - DNA, 25 bp, Homo sapien
gtgagtgccccctactagataccct

SEQ ID NO: 4135508 - DNA, 25 bp, Homo sapien
tgtcttcaagattgccagcccttcc

SEQ ID NO: 4135509 - DNA, 25 bp, Homo sapien
tctcagtgttcctggtgtcttcaag

SEQ ID NO: 4135510 - DNA, 25 bp, Homo sapien
cctagagctgtgtccataactgcat

SEQ ID NO: 4135511 - DNA, 25 bp, Homo sapien
gaattctgggttatagtcctagagc

SEQ ID NO: 4135512 - DNA, 25 bp, Homo sapien
ctaggtagcatgggaaatcaggcaa

SEQ ID NO: 4135513 - DNA, 25 bp, Homo sapien
ctttagtgtactcccggagaacatc

SEQ ID NO: 4135514 - DNA, 25 bp, Homo sapien
tcagttatttgttgttcatccctga

SEQ ID NO: 4135515 - DNA, 25 bp, Homo sapien
tccctgatgccctttagtgtactcc

SEQ ID NO: 4135516 - DNA, 25 bp, Homo sapien
tatttgttgttcatccctgatgccc

SEQ ID NO: 4135517 - DNA, 25 bp, Homo sapien
tacataagatacacagtcgtgggtg

SEQ ID NO: 4135518 - DNA, 25 bp, Homo sapien
aatacataagatacacagtcgtggg

SEQ ID NO: 4135519 - DNA, 25 bp, Homo sapien
acataagatacacagtcgtgggtga

SEQ ID NO: 4135520 - DNA, 25 bp, Homo sapien
gaatacataagatacacagtcgtgg

SEQ ID NO: 4135521 - DNA, 25 bp, Homo sapien
cattactattgttggtcattgcata

SEQ ID NO: 4135522 - DNA, 25 bp, Homo sapien
ctttccattactattgttggtcatt

SEQ ID NO: 4135523 - DNA, 25 bp, Homo sapien
tattgttggtcattgcatattcacc

SEQ ID NO: 4135524 - DNA, 25 bp, Homo sapien
ttgcatattcaccttcacatttcat

SEQ ID NO: 4135525 - DNA, 25 bp, Homo sapien
caggggcactgaaggcattgtacca

SEQ ID NO: 4135526 - DNA, 25 bp, Homo sapien
tccaggaggtctggcaaccattaaa

SEQ ID NO: 4135527 - DNA, 25 bp, Homo sapien
caaagcaaggtgccccagcttatcc

SEQ ID NO: 4135528 - DNA, 25 bp, Homo sapien
tgccccagcttatccaggaggtctg

SEQ ID NO: 4135529 - DNA, 25 bp, Homo sapien
atgtagtagggagactaggaaagcc

SEQ ID NO: 4135530 - DNA, 25 bp, Homo sapien
ggccacatgggtcacagttttgata

SEQ ID NO: 4135531 - DNA, 25 bp, Homo sapien
aaggctcacactcatattcactaag

SEQ ID NO: 4135532 - DNA, 25 bp, Homo sapien
gctttcaggacagacaagccttgcc

SEQ ID NO: 4135533 - DNA, 25 bp, Homo sapien
gtcaggtagctcactcgtcactttc

SEQ ID NO: 4135534 - DNA, 25 bp, Homo sapien
tgtgctcagtggagcctgagactag

SEQ ID NO: 4135535 - DNA, 25 bp, Homo sapien
agtggttatttgaagcatcgtgtgc

SEQ ID NO: 4135536 - DNA, 25 bp, Homo sapien
tgaggaatcttgacacatttgacag

SEQ ID NO: 4135537 - DNA, 25 bp, Homo sapien
aggaggaggaggtaagctatcgtca

SEQ ID NO: 4135538 - DNA, 25 bp, Homo sapien
gaggaggaggaggtaagctatcgtc

SEQ ID NO: 4135539 - DNA, 25 bp, Homo sapien
ggaggaggaggtaagctatcgtcat

SEQ ID NO: 4135540 - DNA, 25 bp, Homo sapien
atcttctcgcctctctgtgaaagtg

SEQ ID NO: 4135541 - DNA, 25 bp, Homo sapien
tctcttcttgtgacgggttttgaag

SEQ ID NO: 4135542 - DNA, 25 bp, Homo sapien
ctctctgtgaaagtgtcggttcccc

SEQ ID NO: 4135543 - DNA, 25 bp, Homo sapien
tttgaagattcatctcctttggata

SEQ ID NO: 4135544 - DNA, 25 bp, Homo sapien
ttcaaaatgccgtaacagctgggtc

SEQ ID NO: 4135545 - DNA, 25 bp, Homo sapien
tgctctagagaggattgattcaaaa

SEQ ID NO: 4135546 - DNA, 25 bp, Homo sapien
tgtgttgggcttgaattgactttca

SEQ ID NO: 4135547 - DNA, 25 bp, Homo sapien
cttgagcagcattctagccctggct

SEQ ID NO: 4135548 - DNA, 25 bp, Homo sapien
gggaagcacttcttacaatgttcat

SEQ ID NO: 4135549 - DNA, 25 bp, Homo sapien
tctagggaagcacttcttacaatgt

SEQ ID NO: 4135550 - DNA, 25 bp, Homo sapien
tagggaagcacttcttacaatgttc

SEQ ID NO: 4135551 - DNA, 25 bp, Homo sapien
cctctgggtagccagatctttttct

SEQ ID NO: 4135552 - DNA, 25 bp, Homo sapien
atcagctagaacactgataaagcct

SEQ ID NO: 4135553 - DNA, 25 bp, Homo sapien
taaatcagctagaacactgataaag

SEQ ID NO: 4135554 - DNA, 25 bp, Homo sapien
agcctattgcagctttctgagttac

SEQ ID NO: 4135555 - DNA, 25 bp, Homo sapien
agttccaacaggtatttaaatcagc

SEQ ID NO: 4135556 - DNA, 25 bp, Homo sapien
gaagggcgttctgttgactttagtg

SEQ ID NO: 4135557 - DNA, 25 bp, Homo sapien
tgacacattttgaagggcgttctgt

SEQ ID NO: 4135558 - DNA, 25 bp, Homo sapien
tagtgatggatgagcctattctgcc

SEQ ID NO: 4135559 - DNA, 25 bp, Homo sapien
tgttgactttagtgatggatgagcc

SEQ ID NO: 4135560 - DNA, 25 bp, Homo sapien
gctgccacgcgtcaggaagagatgc

SEQ ID NO: 4135561 - DNA, 25 bp, Homo sapien
gccaagcaagcctcttgaaaagcat

SEQ ID NO: 4135562 - DNA, 25 bp, Homo sapien
tgaaaagcatgggaagctgccacgc

SEQ ID NO: 4135563 - DNA, 25 bp, Homo sapien
tgagtatcagctcttgccaagcaag

SEQ ID NO: 4135564 - DNA, 25 bp, Homo sapien
cgagaggagggagccaagtcactgt

SEQ ID NO: 4135565 - DNA, 25 bp, Homo sapien
taagaactttttccatgtcgcagta

SEQ ID NO: 4135566 - DNA, 25 bp, Homo sapien
ctgtttgggtgggcgtctttgttct

SEQ ID NO: 4135567 - DNA, 25 bp, Homo sapien
cagccgctttgtacgtggggagaac

SEQ ID NO: 4135568 - DNA, 25 bp, Homo sapien
ctcatgtggtgcctctcatactcct

SEQ ID NO: 4135569 - DNA, 25 bp, Homo sapien
ttaaaatgcagctaagttctgtcgg

SEQ ID NO: 4135570 - DNA, 25 bp, Homo sapien
taagttctgtcggtcagccttgctc

SEQ ID NO: 4135571 - DNA, 25 bp, Homo sapien
tcagccttgctcatgtggtgcctct

SEQ ID NO: 4135572 - DNA, 25 bp, Homo sapien
cactaaatagatccattctctatac

SEQ ID NO: 4135573 - DNA, 25 bp, Homo sapien
ctctatacaaacatatcctgctctt

SEQ ID NO: 4135574 - DNA, 25 bp, Homo sapien
tctggtaacactaaatagatccatt

SEQ ID NO: 4135575 - DNA, 25 bp, Homo sapien
tatacaaacatatcctgctctttgt

SEQ ID NO: 4135576 - DNA, 25 bp, Homo sapien
caaacggactttgacggctacttgg

SEQ ID NO: 4135577 - DNA, 25 bp, Homo sapien
tgtggccacgcggtttgcctgcagt

SEQ ID NO: 4135578 - DNA, 25 bp, Homo sapien
gaggccacaggagtgaggtgactga

SEQ ID NO: 4135579 - DNA, 25 bp, Homo sapien
cagttggtttgagccacatagagct

SEQ ID NO: 4135580 - DNA, 25 bp, Homo sapien
tccttgaagttgcagagggcacctt

SEQ ID NO: 4135581 - DNA, 25 bp, Homo sapien
ctccttgaagttgcagagggcacct

SEQ ID NO: 4135582 - DNA, 25 bp, Homo sapien
caggggagcaaggaccatcggtagg

SEQ ID NO: 4135583 - DNA, 25 bp, Homo sapien
aggaccatcggtagggagaggagga

SEQ ID NO: 4135584 - DNA, 25 bp, Homo sapien
agcaaggaccatcggtagggagagg

SEQ ID NO: 4135585 - DNA, 25 bp, Homo sapien
gggagcaaggaccatcggtagggag

SEQ ID NO: 4135586 - DNA, 25 bp, Homo sapien
taggaaagtcaatggtgagtgaagt

SEQ ID NO: 4135587 - DNA, 25 bp, Homo sapien
gcttgggtaggaaagtcaatggtga

SEQ ID NO: 4135588 - DNA, 25 bp, Homo sapien
cctgctaagattgctcccaaggttt

SEQ ID NO: 4135589 - DNA, 25 bp, Homo sapien
tgctgtgtcacctgctaagattgct

SEQ ID NO: 4135590 - DNA, 25 bp, Homo sapien
ggagggcatctgcagtcacccagga

SEQ ID NO: 4135591 - DNA, 25 bp, Homo sapien
caagtccatcaggaggggtaggagg

SEQ ID NO: 4135592 - DNA, 25 bp, Homo sapien
tctgcagtcacccaggatctctctg

SEQ ID NO: 4135593 - DNA, 25 bp, Homo sapien
gggcatctgcagtcacccaggatct

SEQ ID NO: 4135594 - DNA, 25 bp, Homo sapien
tcctcgtccaacttggacatgatgg

SEQ ID NO: 4135595 - DNA, 25 bp, Homo sapien
gcatcctcgtccaacttggacatga

SEQ ID NO: 4135596 - DNA, 25 bp, Homo sapien
gagagtggattgggtggacaattgg

SEQ ID NO: 4135597 - DNA, 25 bp, Homo sapien
cctcgtccaacttggacatgatggt

SEQ ID NO: 4135598 - DNA, 25 bp, Homo sapien
ttggcggtggaggataagataagac

SEQ ID NO: 4135599 - DNA, 25 bp, Homo sapien
tggcttggcggtggaggataagata

SEQ ID NO: 4135600 - DNA, 25 bp, Homo sapien
gataagacttggatggtaggagtta

SEQ ID NO: 4135601 - DNA, 25 bp, Homo sapien
tggaggataagataagacttggatg

SEQ ID NO: 4135602 - DNA, 25 bp, Homo sapien
gccctctcttgagccggaatgtgaa

SEQ ID NO: 4135603 - DNA, 25 bp, Homo sapien
cgcttcaaggatcgtggacggcaga

SEQ ID NO: 4135604 - DNA, 25 bp, Homo sapien
tggagacagtcagctctggatgcgc

SEQ ID NO: 4135605 - DNA, 25 bp, Homo sapien
tgagctgctggtccgagtctttgcc

SEQ ID NO: 4135606 - DNA, 25 bp, Homo sapien
catggagagttgctggggctctttc

SEQ ID NO: 4135607 - DNA, 25 bp, Homo sapien
gaagctgagttgtctacactggatg

SEQ ID NO: 4135608 - DNA, 25 bp, Homo sapien
atggagagttgctggggctctttct

SEQ ID NO: 4135609 - DNA, 25 bp, Homo sapien
aagtcctgccagagaatcaaccaag

SEQ ID NO: 4135610 - DNA, 25 bp, Homo sapien
ctgttggtgatggaccgcgtgcact

SEQ ID NO: 4135611 - DNA, 25 bp, Homo sapien
tcagcccactttggatcccaggtca

SEQ ID NO: 4135612 - DNA, 25 bp, Homo sapien
gggcctcagtgtcccctcttggaga

SEQ ID NO: 4135613 - DNA, 25 bp, Homo sapien
gatagatccaagtctgttacctact

SEQ ID NO: 4135614 - DNA, 25 bp, Homo sapien
tgctagtcagattaaagaactcatg

SEQ ID NO: 4135615 - DNA, 25 bp, Homo sapien
aggaagctcaggactcataattttg

SEQ ID NO: 4135616 - DNA, 25 bp, Homo sapien
tacttttgatctctatcgggagctg

SEQ ID NO: 4135617 - DNA, 25 bp, Homo sapien
gatacttgacaaccccatagtttgg

SEQ ID NO: 4135618 - DNA, 25 bp, Homo sapien
gccttgtttcacagcaggtttctgg

SEQ ID NO: 4135619 - DNA, 25 bp, Homo sapien
tactgctcatcccaagccatggtca

SEQ ID NO: 4135620 - DNA, 25 bp, Homo sapien
taatcaatgaccagtctttagaaga

SEQ ID NO: 4135621 - DNA, 25 bp, Homo sapien
aaagtacttttcaggacctctggct

SEQ ID NO: 4135622 - DNA, 25 bp, Homo sapien
tgcctgtgtcttctgttgggtagaa

SEQ ID NO: 4135623 - DNA, 25 bp, Homo sapien
gtgtcttctgttgggtagaaagtac

SEQ ID NO: 4135624 - DNA, 25 bp, Homo sapien
tagaaagtacttttcaggacctctg

SEQ ID NO: 4135625 - DNA, 25 bp, Homo sapien
tgttaagctacccatagggcatcct

SEQ ID NO: 4135626 - DNA, 25 bp, Homo sapien
tcttttaaagcgaagtggacagtgc

SEQ ID NO: 4135627 - DNA, 25 bp, Homo sapien
ggcatccttgatggcgcttcctctg

SEQ ID NO: 4135628 - DNA, 25 bp, Homo sapien
cctctgaacttggttggagacatgc

SEQ ID NO: 4135629 - DNA, 25 bp, Homo sapien
agcttgcttgggggttctaacaggg

SEQ ID NO: 4135630 - DNA, 25 bp, Homo sapien
tggcctctatgtagtacatcacagc

SEQ ID NO: 4135631 - DNA, 25 bp, Homo sapien
tagtacatcacagctgtacaacttc

SEQ ID NO: 4135632 - DNA, 25 bp, Homo sapien
tccctgagcactccttgaagtttca

SEQ ID NO: 4135633 - DNA, 25 bp, Homo sapien
cacagctgtacaacttccctgagca

SEQ ID NO: 4135634 - DNA, 25 bp, Homo sapien
tatgctgttcagatatttcctgctt

SEQ ID NO: 4135635 - DNA, 25 bp, Homo sapien
tatttatgctgttcagatatttcct

SEQ ID NO: 4135636 - DNA, 25 bp, Homo sapien
tgctgcttaaaagccatgtggctct

SEQ ID NO: 4135637 - DNA, 25 bp, Homo sapien
ccttctgagcgtgatgtcttggctt

SEQ ID NO: 4135638 - DNA, 25 bp, Homo sapien
gaaacagttcttgtgatgtccgttt

SEQ ID NO: 4135639 - DNA, 25 bp, Homo sapien
tgtccaacttgtaaatgctcttatc

SEQ ID NO: 4135640 - DNA, 25 bp, Homo sapien
gaagcacgtatgtggatgtttcctc

SEQ ID NO: 4135641 - DNA, 25 bp, Homo sapien
ttacaggaacaggtgaagcacgtat

SEQ ID NO: 4135642 - DNA, 25 bp, Homo sapien
tgctctctcaccccaatactaacca

SEQ ID NO: 4135643 - DNA, 25 bp, Homo sapien
tacagcacccagtttttccagctgc

SEQ ID NO: 4135644 - DNA, 25 bp, Homo sapien
cagctgctctctcaccccaatacta

SEQ ID NO: 4135645 - DNA, 25 bp, Homo sapien
cagatgagatgagatgcataggctg

SEQ ID NO: 4135646 - DNA, 25 bp, Homo sapien
ctctgtgccagtgttatgtgtccag

SEQ ID NO: 4135647 - DNA, 25 bp, Homo sapien
ctgtgccagtgttatgtgtccagaa

SEQ ID NO: 4135648 - DNA, 25 bp, Homo sapien
tgtgccagtgttatgtgtccagaat

SEQ ID NO: 4135649 - DNA, 25 bp, Homo sapien
gctctgtgccagtgttatgtgtcca

SEQ ID NO: 4135650 - DNA, 25 bp, Homo sapien
cactcacctaatgtactggccctgg

SEQ ID NO: 4135651 - DNA, 25 bp, Homo sapien
tgcagtaatggtgaggaagcctcct

SEQ ID NO: 4135652 - DNA, 25 bp, Homo sapien
ggtattcaatccattcagttgctga

SEQ ID NO: 4135653 - DNA, 25 bp, Homo sapien
cacagtaaccctaactcttgagaga

SEQ ID NO: 4135654 - DNA, 25 bp, Homo sapien
cccacgtccactgtaaatagtatca

SEQ ID NO: 4135655 - DNA, 25 bp, Homo sapien
atatggtcctcccacgtccactgta

SEQ ID NO: 4135656 - DNA, 25 bp, Homo sapien
tccactcatatggtcctcccacgtc

SEQ ID NO: 4135657 - DNA, 25 bp, Homo sapien
ggtcctcccacgtccactgtaaata

SEQ ID NO: 4135658 - DNA, 25 bp, Homo sapien
gtcgtccatggcctgaaaaagaaaa

SEQ ID NO: 4135659 - DNA, 25 bp, Homo sapien
actgggtctgctttttgtccaaaga

SEQ ID NO: 4135660 - DNA, 25 bp, Homo sapien
aacctggttatcatattccttgctg

SEQ ID NO: 4135661 - DNA, 25 bp, Homo sapien
ggagatgtcaaagcctgggtggcag

SEQ ID NO: 4135662 - DNA, 25 bp, Homo sapien
cagattccacagagctacatttgtc

SEQ ID NO: 4135663 - DNA, 25 bp, Homo sapien
tggatgctctattcctggttttcaa

SEQ ID NO: 4135664 - DNA, 25 bp, Homo sapien
tccagattccacagagctacatttg

SEQ ID NO: 4135665 - DNA, 25 bp, Homo sapien
gattccacagagctacatttgtcta

SEQ ID NO: 4135666 - DNA, 25 bp, Homo sapien
tatggcttcaggtaaggagccgtga

SEQ ID NO: 4135667 - DNA, 25 bp, Homo sapien
tctgatcctgtcacaattaatctct

SEQ ID NO: 4135668 - DNA, 25 bp, Homo sapien
tatgacacaacattgtccttgtccc

SEQ ID NO: 4135669 - DNA, 25 bp, Homo sapien
ttcagggatccaaaggactgtgttc

SEQ ID NO: 4135670 - DNA, 25 bp, Homo sapien
cagatggctggtcatactcatatgg

SEQ ID NO: 4135671 - DNA, 25 bp, Homo sapien
tgcagagttccattcatcctgtagg

SEQ ID NO: 4135672 - DNA, 25 bp, Homo sapien
gccgagccacaccagttgttagata

SEQ ID NO: 4135673 - DNA, 25 bp, Homo sapien
catgggatccatccatgccgagcca

SEQ ID NO: 4135674 - DNA, 25 bp, Homo sapien
cagagtttagccagacagaatttaa

SEQ ID NO: 4135675 - DNA, 25 bp, Homo sapien
tgaaaggttggattgtgaggctgtt

SEQ ID NO: 4135676 - DNA, 25 bp, Homo sapien
cagaatttaactggacatttgggtt

SEQ ID NO: 4135677 - DNA, 25 bp, Homo sapien
tctgttgatcaacttgaaaggttgg

SEQ ID NO: 4135678 - DNA, 25 bp, Homo sapien
tctcccaatccatctaaactaactg

SEQ ID NO: 4135679 - DNA, 25 bp, Homo sapien
ccatctaaactaactgacaatactt

SEQ ID NO: 4135680 - DNA, 25 bp, Homo sapien
ctgacaatactttagtctggtttcc

SEQ ID NO: 4135681 - DNA, 25 bp, Homo sapien
gcattttggtccctgttaatcccat

SEQ ID NO: 4135682 - DNA, 25 bp, Homo sapien
gttaaattgcctgaactgcaggtgg

SEQ ID NO: 4135683 - DNA, 25 bp, Homo sapien
tatgagctgctagagttattcaggg

SEQ ID NO: 4135684 - DNA, 25 bp, Homo sapien
ccatccctgatgaagactgtaacca

SEQ ID NO: 4135685 - DNA, 25 bp, Homo sapien
gccttgaacgtgatgccatggaaaa

SEQ ID NO: 4135686 - DNA, 25 bp, Homo sapien
gcacagggacgcattcagaagagag

SEQ ID NO: 4135687 - DNA, 25 bp, Homo sapien
taagctgccggtctgaaagcacagg

SEQ ID NO: 4135688 - DNA, 25 bp, Homo sapien
tatctccattgtgaactgaagtggc

SEQ ID NO: 4135689 - DNA, 25 bp, Homo sapien
gaaggtcaccctgaatatgtctaat

SEQ ID NO: 4135690 - DNA, 25 bp, Homo sapien
tgagggtcccccacaacattctcat

SEQ ID NO: 4135691 - DNA, 25 bp, Homo sapien
gagcttgctttccccgcttgcagac

SEQ ID NO: 4135692 - DNA, 25 bp, Homo sapien
tttccccgcttgcagaccaagtgga

SEQ ID NO: 4135693 - DNA, 25 bp, Homo sapien
cttgcagaccaagtggactgaggga

SEQ ID NO: 4135694 - DNA, 25 bp, Homo sapien
gtttgttgttatagctgactttgga

SEQ ID NO: 4135695 - DNA, 25 bp, Homo sapien
cggcttccaatgtggagcgtccata

SEQ ID NO: 4135696 - DNA, 25 bp, Homo sapien
tagggaggagatatctgtgcctttc

SEQ ID NO: 4135697 - DNA, 25 bp, Homo sapien
ctttggaatgctgtccttggaacgg

SEQ ID NO: 4135698 - DNA, 25 bp, Homo sapien
tgaattcagttatatttcccaaggg

SEQ ID NO: 4135699 - DNA, 25 bp, Homo sapien
caagggactgtgcataaccatatct

SEQ ID NO: 4135700 - DNA, 25 bp, Homo sapien
tatttcccaagggactgtgcataac

SEQ ID NO: 4135701 - DNA, 25 bp, Homo sapien
tgcataaccatatctccaggtgctg

SEQ ID NO: 4135702 - DNA, 25 bp, Homo sapien
gtactacactcactggtgctagtgg

SEQ ID NO: 4135703 - DNA, 25 bp, Homo sapien
tgatgatatcagagggtgaggaaaa

SEQ ID NO: 4135704 - DNA, 25 bp, Homo sapien
tcattggccgtactacactcactgg

SEQ ID NO: 4135705 - DNA, 25 bp, Homo sapien
gctgttttcattggccgtactacac

SEQ ID NO: 4135706 - DNA, 25 bp, Homo sapien
tgtcagtggtctctgttgcaatact

SEQ ID NO: 4135707 - DNA, 25 bp, Homo sapien
cagtggtgttcctgtcagtggtctc

SEQ ID NO: 4135708 - DNA, 25 bp, Homo sapien
tcatgatacacagtggtgttcctgt

SEQ ID NO: 4135709 - DNA, 25 bp, Homo sapien
atgatacacagtggtgttcctgtca

SEQ ID NO: 4135710 - DNA, 25 bp, Homo sapien
cactctaagcttaatttcttttagg

SEQ ID NO: 4135711 - DNA, 25 bp, Homo sapien
tctgtgccgctttctttttgtaccg

SEQ ID NO: 4135712 - DNA, 25 bp, Homo sapien
tgtaccgcttgtccagccttaaaaa

SEQ ID NO: 4135713 - DNA, 25 bp, Homo sapien
aggtttatctgtgccgctttctttt

SEQ ID NO: 4135714 - DNA, 25 bp, Homo sapien
ccaactgatgtgctaatgtgagcca

SEQ ID NO: 4135715 - DNA, 25 bp, Homo sapien
ttggaagaccaaaaccattgcgcag

SEQ ID NO: 4135716 - DNA, 25 bp, Homo sapien
agccaaagggttggccgaaactcag

SEQ ID NO: 4135717 - DNA, 25 bp, Homo sapien
ttgcgcaggaactccaactgatgtg

SEQ ID NO: 4135718 - DNA, 25 bp, Homo sapien
agttggcaggagttgcatatggggt

SEQ ID NO: 4135719 - DNA, 25 bp, Homo sapien
tatggggtgggttgctttagtgtct

SEQ ID NO: 4135720 - DNA, 25 bp, Homo sapien
cttattgttttaggagatttggagt

SEQ ID NO: 4135721 - DNA, 25 bp, Homo sapien
tcagcttattgttttaggagatttg

SEQ ID NO: 4135722 - DNA, 25 bp, Homo sapien
tgtgcccagcttggtaaatgagttt

SEQ ID NO: 4135723 - DNA, 25 bp, Homo sapien
gataagattacttcacatcccctcc

SEQ ID NO: 4135724 - DNA, 25 bp, Homo sapien
gattgatgtcttactctgcatgtgg

SEQ ID NO: 4135725 - DNA, 25 bp, Homo sapien
gatgatcaaggatctacaaggtatg

SEQ ID NO: 4135726 - DNA, 25 bp, Homo sapien
tgtggtctggattgagggactgtcc

SEQ ID NO: 4135727 - DNA, 25 bp, Homo sapien
tattgtttgatctctgggattctgt

SEQ ID NO: 4135728 - DNA, 25 bp, Homo sapien
ccctgtatctttagtgagttttgga

SEQ ID NO: 4135729 - DNA, 25 bp, Homo sapien
tggaaattttttagtcatgatctct

SEQ ID NO: 4135730 - DNA, 25 bp, Homo sapien
tagcccagcatgctacttccagtgt

SEQ ID NO: 4135731 - DNA, 25 bp, Homo sapien
gaactgcttagctgtgcctgtgatg

SEQ ID NO: 4135732 - DNA, 25 bp, Homo sapien
tgtttagggataggaactgtgctgt

SEQ ID NO: 4135733 - DNA, 25 bp, Homo sapien
gtgtgactcactaccaataagggtg

SEQ ID NO: 4135734 - DNA, 25 bp, Homo sapien
tttaatcttgtttcagttttctgac

SEQ ID NO: 4135735 - DNA, 25 bp, Homo sapien
cctttaatcttgtttcagttttctg

SEQ ID NO: 4135736 - DNA, 25 bp, Homo sapien
ttagtcatcctttaatcttgtttca

SEQ ID NO: 4135737 - DNA, 25 bp, Homo sapien
agtcatcctttaatcttgtttcagt

SEQ ID NO: 4135738 - DNA, 25 bp, Homo sapien
aaggagagtgaggagtagggccacg

SEQ ID NO: 4135739 - DNA, 25 bp, Homo sapien
ttagccgctagaagaaggagagtga

SEQ ID NO: 4135740 - DNA, 25 bp, Homo sapien
gagtagggccacgtgacatggagct

SEQ ID NO: 4135741 - DNA, 25 bp, Homo sapien
gacatggagcttggcggtggttgta

SEQ ID NO: 4135742 - DNA, 25 bp, Homo sapien
gcaccttcttgtaccttggcatcca

SEQ ID NO: 4135743 - DNA, 25 bp, Homo sapien
ttcttgtaccttggcatccaaggga

SEQ ID NO: 4135744 - DNA, 25 bp, Homo sapien
taccttggcatccaagggatttggg

SEQ ID NO: 4135745 - DNA, 25 bp, Homo sapien
ccaggcaccttcttgtaccttggca

SEQ ID NO: 4135746 - DNA, 25 bp, Homo sapien
gacatgtcgctgttaggttctctca

SEQ ID NO: 4135747 - DNA, 25 bp, Homo sapien
ctgagggcacttcgttacagtaatt

SEQ ID NO: 4135748 - DNA, 25 bp, Homo sapien
ctttgtgctcaacagaccatctgaa

SEQ ID NO: 4135749 - DNA, 25 bp, Homo sapien
ggcacttcgttacagtaattgtgag

SEQ ID NO: 4135750 - DNA, 25 bp, Homo sapien
ctgcttgtttaaagccattagcggt

SEQ ID NO: 4135751 - DNA, 25 bp, Homo sapien
agacccacgtcagaagccagaggct

SEQ ID NO: 4135752 - DNA, 25 bp, Homo sapien
agccattagcggtacactctgtagg

SEQ ID NO: 4135753 - DNA, 25 bp, Homo sapien
tgccagtctgtgagacccacgtcag

SEQ ID NO: 4135754 - DNA, 25 bp, Homo sapien
tgtgaacattgactttgatcagggc

SEQ ID NO: 4135755 - DNA, 25 bp, Homo sapien
cagtcaaccctaataatagacaggc

SEQ ID NO: 4135756 - DNA, 25 bp, Homo sapien
gacaggcttagatactgtgtgaaca

SEQ ID NO: 4135757 - DNA, 25 bp, Homo sapien
tatccaatagtggaggagatctgta

SEQ ID NO: 4135758 - DNA, 25 bp, Homo sapien
ctgctgtgcgctgaccccaagcagc

SEQ ID NO: 4135759 - DNA, 25 bp, Homo sapien
ctgtgcgctgaccccaagcagccac

SEQ ID NO: 4135760 - DNA, 25 bp, Homo sapien
tgctgtgcgctgaccccaagcagcc

SEQ ID NO: 4135761 - DNA, 25 bp, Homo sapien
tgcgctgaccccaagcagccaccat

SEQ ID NO: 4135762 - DNA, 25 bp, Homo sapien
taagactggggtgtcagtgacttcc

SEQ ID NO: 4135763 - DNA, 25 bp, Homo sapien
tgaatcctgggcacctaagactggg

SEQ ID NO: 4135764 - DNA, 25 bp, Homo sapien
gactggggtgtcagtgacttccctc

SEQ ID NO: 4135765 - DNA, 25 bp, Homo sapien
ccctccgtgaatgttcccggatcat

SEQ ID NO: 4135766 - DNA, 25 bp, Homo sapien
gctgttctccctcggactgaaagat

SEQ ID NO: 4135767 - DNA, 25 bp, Homo sapien
tgttctccctcggactgaaagatgc

SEQ ID NO: 4135768 - DNA, 25 bp, Homo sapien
gaaagatgctgtgcgtgccctctgt

SEQ ID NO: 4135769 - DNA, 25 bp, Homo sapien
gactgaaagatgctgtgcgtgccct

SEQ ID NO: 4135770 - DNA, 25 bp, Homo sapien
gtgggagtgtgggacttgacattgg

SEQ ID NO: 4135771 - DNA, 25 bp, Homo sapien
gtgggacttgacattgggaagagag

SEQ ID NO: 4135772 - DNA, 25 bp, Homo sapien
ggagtgtgggacttgacattgggaa

SEQ ID NO: 4135773 - DNA, 25 bp, Homo sapien
cttgtgggagtgtgggacttgacat

SEQ ID NO: 4135774 - DNA, 25 bp, Homo sapien
ttgttgctttgaagttgcatttcct

SEQ ID NO: 4135775 - DNA, 25 bp, Homo sapien
tgttgctttgaagttgcatttcctc

SEQ ID NO: 4135776 - DNA, 25 bp, Homo sapien
ctcttgggcattacttctccactta

SEQ ID NO: 4135777 - DNA, 25 bp, Homo sapien
tcttgggcattacttctccacttac

SEQ ID NO: 4135778 - DNA, 25 bp, Homo sapien
ataaacctggtccttaacttctgca

SEQ ID NO: 4135779 - DNA, 25 bp, Homo sapien
taaacctggtccttaacttctgcat

SEQ ID NO: 4135780 - DNA, 25 bp, Homo sapien
ctgcgtgacatataaacctggtcct

SEQ ID NO: 4135781 - DNA, 25 bp, Homo sapien
taagggagcgaatatttgatgaact

SEQ ID NO: 4135782 - DNA, 25 bp, Homo sapien
tagactctgttcacagtaagggagc

SEQ ID NO: 4135783 - DNA, 25 bp, Homo sapien
gacaacacttgtctgtaaacgtaga

SEQ ID NO: 4135784 - DNA, 25 bp, Homo sapien
agccaagaggcaaactacacgagca

SEQ ID NO: 4135785 - DNA, 25 bp, Homo sapien
atgggtcttcaggttgaccgtgatt

SEQ ID NO: 4135786 - DNA, 25 bp, Homo sapien
caggttgaccgtgatttggctggta

SEQ ID NO: 4135787 - DNA, 25 bp, Homo sapien
tttggctggtataggttgggctcct

SEQ ID NO: 4135788 - DNA, 25 bp, Homo sapien
ttggctggtataggttgggctcctt

SEQ ID NO: 4135789 - DNA, 25 bp, Homo sapien
agtagttgcggatgccgaggccact

SEQ ID NO: 4135790 - DNA, 25 bp, Homo sapien
cccctgattattagttgtagtagtt

SEQ ID NO: 4135791 - DNA, 25 bp, Homo sapien
tagttgtagtagttgcggatgccga

SEQ ID NO: 4135792 - DNA, 25 bp, Homo sapien
caccacccccctgattattagttgt

SEQ ID NO: 4135793 - DNA, 25 bp, Homo sapien
gcggggtcgggggtcttgagcaatc

SEQ ID NO: 4135794 - DNA, 25 bp, Homo sapien
tcgcggggtcgggggtcttgagcaa

SEQ ID NO: 4135795 - DNA, 25 bp, Homo sapien
ttgcctcgaggggtggggtgttcgc

SEQ ID NO: 4135796 - DNA, 25 bp, Homo sapien
gcctggcgtcccctcttgcctcgag

SEQ ID NO: 4135797 - DNA, 25 bp, Homo sapien
gaacaagtgcacggtttcctccagc

SEQ ID NO: 4135798 - DNA, 25 bp, Homo sapien
gtgcacggtttcctccagcgcgcgg

SEQ ID NO: 4135799 - DNA, 25 bp, Homo sapien
aagtgcacggtttcctccagcgcgc

SEQ ID NO: 4135800 - DNA, 25 bp, Homo sapien
ggcgccgctcgctagccccggctgc

SEQ ID NO: 4135801 - DNA, 25 bp, Homo sapien
agggcctctgcgagcgggcgagcgt

SEQ ID NO: 4135802 - DNA, 25 bp, Homo sapien
gcgcgtctcgggactgcggcgggtg

SEQ ID NO: 4135803 - DNA, 25 bp, Homo sapien
tcagggcctctgcgagcgggcgagc

SEQ ID NO: 4135804 - DNA, 25 bp, Homo sapien
cctctgcgagcgggcgagcgtgccg

SEQ ID NO: 4135805 - DNA, 25 bp, Homo sapien
ggggacaggtgcttcgcgccgcggc

SEQ ID NO: 4135806 - DNA, 25 bp, Homo sapien
tggggacaggtgcttcgcgccgcgg

SEQ ID NO: 4135807 - DNA, 25 bp, Homo sapien
ttggggacaggtgcttcgcgccgcg

SEQ ID NO: 4135808 - DNA, 25 bp, Homo sapien
ctgaggggtcttttggtctccaaag

SEQ ID NO: 4135809 - DNA, 25 bp, Homo sapien
gctgaggggtcttttggtctccaaa

SEQ ID NO: 4135810 - DNA, 25 bp, Homo sapien
ctggctgaggggtcttttggtctcc

SEQ ID NO: 4135811 - DNA, 25 bp, Homo sapien
ggctgaggggtcttttggtctccaa

SEQ ID NO: 4135812 - DNA, 25 bp, Homo sapien
cccacaaagtagactgaatggccag

SEQ ID NO: 4135813 - DNA, 25 bp, Homo sapien
gaatggccagaactacttgggcact

SEQ ID NO: 4135814 - DNA, 25 bp, Homo sapien
tgggcactgctgttgacgattaaaa

SEQ ID NO: 4135815 - DNA, 25 bp, Homo sapien
cccactccgagtaggctggtacaaa

SEQ ID NO: 4135816 - DNA, 25 bp, Homo sapien
ctttgctggactggtgggcctgagg

SEQ ID NO: 4135817 - DNA, 25 bp, Homo sapien
gcctgagggttataactcattagtt

SEQ ID NO: 4135818 - DNA, 25 bp, Homo sapien
gcacatcttcactccgagttacact

SEQ ID NO: 4135819 - DNA, 25 bp, Homo sapien
agttacacttaaggaacagggctct

SEQ ID NO: 4135820 - DNA, 25 bp, Homo sapien
tggcttgggccgatctgcctgccct

SEQ ID NO: 4135821 - DNA, 25 bp, Homo sapien
gaaagttaatctgtagttgaaagag

SEQ ID NO: 4135822 - DNA, 25 bp, Homo sapien
atgtggcttgggccgatctgcctgc

SEQ ID NO: 4135823 - DNA, 25 bp, Homo sapien
aaccagcacttggaaagttaatctg

SEQ ID NO: 4135824 - DNA, 25 bp, Homo sapien
tccttccccactggggacacagcca

SEQ ID NO: 4135825 - DNA, 25 bp, Homo sapien
ccttccccactggggacacagccat

SEQ ID NO: 4135826 - DNA, 25 bp, Homo sapien
cctgttgcagctgccagttctcgca

SEQ ID NO: 4135827 - DNA, 25 bp, Homo sapien
gtctcctgttgcagctgccagttct

SEQ ID NO: 4135828 - DNA, 25 bp, Homo sapien
ctatgcagtctcctgttgcagctgc

SEQ ID NO: 4135829 - DNA, 25 bp, Homo sapien
gcagtctcctgttgcagctgccagt

SEQ ID NO: 4135830 - DNA, 25 bp, Homo sapien
cttgaactcttatttctgtagggat

SEQ ID NO: 4135831 - DNA, 25 bp, Homo sapien
tgtaagggtgggtctgaaactccca

SEQ ID NO: 4135832 - DNA, 25 bp, Homo sapien
tctgtagggattgtaagggtgggtc

SEQ ID NO: 4135833 - DNA, 25 bp, Homo sapien
tgaaactcccagtttctacttctct

SEQ ID NO: 4135834 - DNA, 25 bp, Homo sapien
cacagaacgctcaagccccttgtgt

SEQ ID NO: 4135835 - DNA, 25 bp, Homo sapien
ctctctccacagaacgctcaagccc

SEQ ID NO: 4135836 - DNA, 25 bp, Homo sapien
agccccttgtgtacgtcggttgccg

SEQ ID NO: 4135837 - DNA, 25 bp, Homo sapien
gccccttgtgtacgtcggttgccgc

SEQ ID NO: 4135838 - DNA, 25 bp, Homo sapien
cctcctcatcctgaggtaaataagg

SEQ ID NO: 4135839 - DNA, 25 bp, Homo sapien
ctagtcattaagtgaaaacgtaagg

SEQ ID NO: 4135840 - DNA, 25 bp, Homo sapien
catcctgaggtaaataagggaccga

SEQ ID NO: 4135841 - DNA, 25 bp, Homo sapien
tctgtggagtcgctaagggccgacc

SEQ ID NO: 4135842 - DNA, 25 bp, Homo sapien
tattcacccctacttaaggagcgcc

SEQ ID NO: 4135843 - DNA, 25 bp, Homo sapien
atgaagaccatgcaccagccctttt

SEQ ID NO: 4135844 - DNA, 25 bp, Homo sapien
tcaaacttgcgagtgatgaagacca

SEQ ID NO: 4135845 - DNA, 25 bp, Homo sapien
taatctccttaagggacacactatc

SEQ ID NO: 4135846 - DNA, 25 bp, Homo sapien
tccatccagtaattcagtttcaagc

SEQ ID NO: 4135847 - DNA, 25 bp, Homo sapien
ttttccatccagtaattcagtttca

SEQ ID NO: 4135848 - DNA, 25 bp, Homo sapien
catatggagacaatattagcttggt

SEQ ID NO: 4135849 - DNA, 25 bp, Homo sapien
catccagtaattcagtttcaagctt

SEQ ID NO: 4135850 - DNA, 25 bp, Homo sapien
ttatttggctagaaggaaatctgca

SEQ ID NO: 4135851 - DNA, 25 bp, Homo sapien
ttcatcaggcaatgaggatatttgc

SEQ ID NO: 4135852 - DNA, 25 bp, Homo sapien
taatgaacacgcaatatactggaac

SEQ ID NO: 4135853 - DNA, 25 bp, Homo sapien
tgcgaaggagaaggtaccaaagtac

SEQ ID NO: 4135854 - DNA, 25 bp, Homo sapien
cttcacagaaatttttgatttatgt

SEQ ID NO: 4135855 - DNA, 25 bp, Homo sapien
ttcacagaaatttttgatttatgtt

SEQ ID NO: 4135856 - DNA, 25 bp, Homo sapien
ccatcaagggcttagagttgaagga

SEQ ID NO: 4135857 - DNA, 25 bp, Homo sapien
gtgatatttcgggtactccagcaac

SEQ ID NO: 4135858 - DNA, 25 bp, Homo sapien
ttaaacctgcaagtaaagccatcaa

SEQ ID NO: 4135859 - DNA, 25 bp, Homo sapien
ggttctatccacagacaagcaaaga

SEQ ID NO: 4135860 - DNA, 25 bp, Homo sapien
agtttgtggaattgttctgatcatc

SEQ ID NO: 4135861 - DNA, 25 bp, Homo sapien
gtttcaaataacagcagttagttgc

SEQ ID NO: 4135862 - DNA, 25 bp, Homo sapien
catggtatataactatatgatagag

SEQ ID NO: 4135863 - DNA, 25 bp, Homo sapien
gaataacatacaatctgtagtctgt

SEQ ID NO: 4135864 - DNA, 25 bp, Homo sapien
gatgttctgagttggttaaaatgac

SEQ ID NO: 4135865 - DNA, 25 bp, Homo sapien
tataaaggggatcttcagatgttct

SEQ ID NO: 4135866 - DNA, 25 bp, Homo sapien
aaaatccaagaccagtaattctgtt

SEQ ID NO: 4135867 - DNA, 25 bp, Homo sapien
ctgtttattataggcctataaaggg

SEQ ID NO: 4135868 - DNA, 25 bp, Homo sapien
cattttgctatttaggtaatataac

SEQ ID NO: 4135869 - DNA, 25 bp, Homo sapien
taatataaccataagaaactaactc

SEQ ID NO: 4135870 - DNA, 25 bp, Homo sapien
gaaactaactcttaatacttgcaaa

SEQ ID NO: 4135871 - DNA, 25 bp, Homo sapien
tcttaatacttgcaaatcttcatca

SEQ ID NO: 4135872 - DNA, 25 bp, Homo sapien
aacaccagaagcttattctttataa

SEQ ID NO: 4135873 - DNA, 25 bp, Homo sapien
ctgttaaaacaccagaagcttattc

SEQ ID NO: 4135874 - DNA, 25 bp, Homo sapien
taaaacaccagaagcttattcttta

SEQ ID NO: 4135875 - DNA, 25 bp, Homo sapien
tgttaaaacaccagaagcttattct

SEQ ID NO: 4135876 - DNA, 25 bp, Homo sapien
taaaggacattttgcaatcttggcc

SEQ ID NO: 4135877 - DNA, 25 bp, Homo sapien
gcaaaagtttttcactcccaataca

SEQ ID NO: 4135878 - DNA, 25 bp, Homo sapien
tacggtgtttctagtcttctgcata

SEQ ID NO: 4135879 - DNA, 25 bp, Homo sapien
ggcttctgtttacctactagagatg

SEQ ID NO: 4135880 - DNA, 25 bp, Homo sapien
cagtcagggaaagagatctatttcc

SEQ ID NO: 4135881 - DNA, 25 bp, Homo sapien
gttggtcttgtgttagacacaccaa

SEQ ID NO: 4135882 - DNA, 25 bp, Homo sapien
ggtttacagtcatcaaaatctgttg

SEQ ID NO: 4135883 - DNA, 25 bp, Homo sapien
tttccattctcagtcagggaaagag

SEQ ID NO: 4135884 - DNA, 25 bp, Homo sapien
aatagattgacaggttaaattagag

SEQ ID NO: 4135885 - DNA, 25 bp, Homo sapien
tgcatattagagaaagtcctctaaa

SEQ ID NO: 4135886 - DNA, 25 bp, Homo sapien
taaccttaaaatatggcacaactat

SEQ ID NO: 4135887 - DNA, 25 bp, Homo sapien
taatattctgaacactaaccttaaa

SEQ ID NO: 4135888 - DNA, 25 bp, Homo sapien
tttattttcagctgggacagatgaa

SEQ ID NO: 4135889 - DNA, 25 bp, Homo sapien
tagaaatactgtttaaatatagact

SEQ ID NO: 4135890 - DNA, 25 bp, Homo sapien
agatgtctcctgatgttcatttaag

SEQ ID NO: 4135891 - DNA, 25 bp, Homo sapien
cataatgttctcatcctttggctga

SEQ ID NO: 4135892 - DNA, 25 bp, Homo sapien
ccccagagtactgaatatatcagct

SEQ ID NO: 4135893 - DNA, 25 bp, Homo sapien
tactgaatatatcagctggtttcca

SEQ ID NO: 4135894 - DNA, 25 bp, Homo sapien
gcttccaacgaacttctatcacatt

SEQ ID NO: 4135895 - DNA, 25 bp, Homo sapien
tcctccactgggctttttttgcttc

SEQ ID NO: 4135896 - DNA, 25 bp, Homo sapien
gataaattaaccgagtctgacacct

SEQ ID NO: 4135897 - DNA, 25 bp, Homo sapien
taggataaattaaccgagtctgaca

SEQ ID NO: 4135898 - DNA, 25 bp, Homo sapien
attctcccctgtccagatctaggat

SEQ ID NO: 4135899 - DNA, 25 bp, Homo sapien
ccctgtccagatctaggataaatta

SEQ ID NO: 4135900 - DNA, 25 bp, Homo sapien
gccaaaccttctgatactgctaaca

SEQ ID NO: 4135901 - DNA, 25 bp, Homo sapien
gatataaacacacatcaagaccgcc

SEQ ID NO: 4135902 - DNA, 25 bp, Homo sapien
caactgctggtaagctttctaagcc

SEQ ID NO: 4135903 - DNA, 25 bp, Homo sapien
gcctatctcaatatagggcttggca

SEQ ID NO: 4135904 - DNA, 25 bp, Homo sapien
cattctgtcagcagcctggagtgca

SEQ ID NO: 4135905 - DNA, 25 bp, Homo sapien
attctgtcagcagcctggagtgcaa

SEQ ID NO: 4135906 - DNA, 25 bp, Homo sapien
ctcattctgtcagcagcctggagtg

SEQ ID NO: 4135907 - DNA, 25 bp, Homo sapien
tcattctgtcagcagcctggagtgc

SEQ ID NO: 4135908 - DNA, 25 bp, Homo sapien
tattatcacaattaccaataaggag

SEQ ID NO: 4135909 - DNA, 25 bp, Homo sapien
tcacaattaccaataaggagcagtt

SEQ ID NO: 4135910 - DNA, 25 bp, Homo sapien
tatcacaattaccaataaggagcag

SEQ ID NO: 4135911 - DNA, 25 bp, Homo sapien
caattaccaataaggagcagtttta

SEQ ID NO: 4135912 - DNA, 25 bp, Homo sapien
tttcttctttaaagcaacctgttca

SEQ ID NO: 4135913 - DNA, 25 bp, Homo sapien
ttcttctttaaagcaacctgttcat

SEQ ID NO: 4135914 - DNA, 25 bp, Homo sapien
ctagattggtcaagaatttgatgtt

SEQ ID NO: 4135915 - DNA, 25 bp, Homo sapien
tagattggtcaagaatttgatgttt

SEQ ID NO: 4135916 - DNA, 25 bp, Homo sapien
cctagattggtcaagaatttgatgt

SEQ ID NO: 4135917 - DNA, 25 bp, Homo sapien
tatgaacactgcttagtattttaaa

SEQ ID NO: 4135918 - DNA, 25 bp, Homo sapien
atgaacactgcttagtattttaaaa

SEQ ID NO: 4135919 - DNA, 25 bp, Homo sapien
taatatgaacactgcttagtatttt

SEQ ID NO: 4135920 - DNA, 25 bp, Homo sapien
atatgaacactgcttagtattttaa

SEQ ID NO: 4135921 - DNA, 25 bp, Homo sapien
tacattcacctaacgacataacgag

SEQ ID NO: 4135922 - DNA, 25 bp, Homo sapien
tctaaagggagcctctacattcacc

SEQ ID NO: 4135923 - DNA, 25 bp, Homo sapien
cacatagtggcagagttttgtattc

SEQ ID NO: 4135924 - DNA, 25 bp, Homo sapien
aaaaattgcacagctcctttataag

SEQ ID NO: 4135925 - DNA, 25 bp, Homo sapien
taagttgtgaatgccccatcagctt

SEQ ID NO: 4135926 - DNA, 25 bp, Homo sapien
aaagtctgactagctctaagttgtg

SEQ ID NO: 4135927 - DNA, 25 bp, Homo sapien
atcagcttggaccaccataacctgg

SEQ ID NO: 4135928 - DNA, 25 bp, Homo sapien
tacgagactgtgatagaatgcttga

SEQ ID NO: 4135929 - DNA, 25 bp, Homo sapien
gactaatggaatagaggagaccaga

SEQ ID NO: 4135930 - DNA, 25 bp, Homo sapien
gaagaaaatacagtccgatgatcag

SEQ ID NO: 4135931 - DNA, 25 bp, Homo sapien
tgaggcagtagcatacagacagact

SEQ ID NO: 4135932 - DNA, 25 bp, Homo sapien
tgaaatagttatggacaagggagcc

SEQ ID NO: 4135933 - DNA, 25 bp, Homo sapien
tttgcacaatattctaacaaaacaa

SEQ ID NO: 4135934 - DNA, 25 bp, Homo sapien
ctgcctttatggagagatcacacaa

SEQ ID NO: 4135935 - DNA, 25 bp, Homo sapien
tgcacaatattctaacaaaacaaat

SEQ ID NO: 4135936 - DNA, 25 bp, Homo sapien
tctgcctttatggagagatcacaca

SEQ ID NO: 4135937 - DNA, 25 bp, Homo sapien
tagggatgtcgggacactggattac

SEQ ID NO: 4135938 - DNA, 25 bp, Homo sapien
ctggattacaaagaccattcattac

SEQ ID NO: 4135939 - DNA, 25 bp, Homo sapien
ttgtctactggccacgcagaaaagg

SEQ ID NO: 4135940 - DNA, 25 bp, Homo sapien
cagaaaaggtattcatgtgggtggt

SEQ ID NO: 4135941 - DNA, 25 bp, Homo sapien
taagatatctaagtgtaagggaagg

SEQ ID NO: 4135942 - DNA, 25 bp, Homo sapien
cacttaatatgtgcaaatcttgcca

SEQ ID NO: 4135943 - DNA, 25 bp, Homo sapien
cactgaggcatttatctgtaagagg

SEQ ID NO: 4135944 - DNA, 25 bp, Homo sapien
taaaagccatctaaagttcagttct

SEQ ID NO: 4135945 - DNA, 25 bp, Homo sapien
gcagttcttgtttcacagcactgaa

SEQ ID NO: 4135946 - DNA, 25 bp, Homo sapien
cacagcactgaaagggtgctccagc

SEQ ID NO: 4135947 - DNA, 25 bp, Homo sapien
gcttattcaactcttcaatccattt

SEQ ID NO: 4135948 - DNA, 25 bp, Homo sapien
tctttgacggtcatcttctatttgc

SEQ ID NO: 4135949 - DNA, 25 bp, Homo sapien
gagaaccaggataactctttaatga

SEQ ID NO: 4135950 - DNA, 25 bp, Homo sapien
gaatcaaagtgcattgcccatctgt

SEQ ID NO: 4135951 - DNA, 25 bp, Homo sapien
taatgaatcaaagtgcattgcccat

SEQ ID NO: 4135952 - DNA, 25 bp, Homo sapien
gcattgcccatctgtcatgttcctc

SEQ ID NO: 4135953 - DNA, 25 bp, Homo sapien
cagaagtactcaggttgtttgtgtg

SEQ ID NO: 4135954 - DNA, 25 bp, Homo sapien
gaagtactcaggttgtttgtgtgtt

SEQ ID NO: 4135955 - DNA, 25 bp, Homo sapien
agaagtactcaggttgtttgtgtgt

SEQ ID NO: 4135956 - DNA, 25 bp, Homo sapien
ttactgtttgccataaccacatcct

SEQ ID NO: 4135957 - DNA, 25 bp, Homo sapien
tgccataaccacatccttaataggt

SEQ ID NO: 4135958 - DNA, 25 bp, Homo sapien
aataggttttgctatatgctcctcc

SEQ ID NO: 4135959 - DNA, 25 bp, Homo sapien
tctgaaggttcaacctggcttccgg

SEQ ID NO: 4135960 - DNA, 25 bp, Homo sapien
ctaattgtttttgtcgtcgtctgtc

SEQ ID NO: 4135961 - DNA, 25 bp, Homo sapien
ccaagagagcagtcatagaacggag

SEQ ID NO: 4135962 - DNA, 25 bp, Homo sapien
gagagcagtcatagaacggagaaag

SEQ ID NO: 4135963 - DNA, 25 bp, Homo sapien
tgtctcgttcctcaatctgagctgg

SEQ ID NO: 4135964 - DNA, 25 bp, Homo sapien
gattcgtgacacaactggacaggac

SEQ ID NO: 4135965 - DNA, 25 bp, Homo sapien
tacaatgccagttgtggtagggatt

SEQ ID NO: 4135966 - DNA, 25 bp, Homo sapien
tggacaggacctatgctgtaaagtt

SEQ ID NO: 4135967 - DNA, 25 bp, Homo sapien
tacttaggtatatgttcaccatgac

SEQ ID NO: 4135968 - DNA, 25 bp, Homo sapien
gcttggatcccagagggttgtccca

SEQ ID NO: 4135969 - DNA, 25 bp, Homo sapien
tgagcaagccatctagaagcccaat

SEQ ID NO: 4135970 - DNA, 25 bp, Homo sapien
tgagcactcctcctagagtatgggc

SEQ ID NO: 4135971 - DNA, 25 bp, Homo sapien
tagcatcctgcaacctaacgactgg

SEQ ID NO: 4135972 - DNA, 25 bp, Homo sapien
tcttgacaggattagctaggagtct

SEQ ID NO: 4135973 - DNA, 25 bp, Homo sapien
gggtctcaagactaacagggcgtta

SEQ ID NO: 4135974 - DNA, 25 bp, Homo sapien
caaacagccccttgactcttgtggg

SEQ ID NO: 4135975 - DNA, 25 bp, Homo sapien
cagaggctgcctaattggaggaaaa

SEQ ID NO: 4135976 - DNA, 25 bp, Homo sapien
ctttgctcttcctccagttgtttct

SEQ ID NO: 4135977 - DNA, 25 bp, Homo sapien
tccagttgtttcttcctgcgcttct

SEQ ID NO: 4135978 - DNA, 25 bp, Homo sapien
agttgtttcttcctgcgcttctctt

SEQ ID NO: 4135979 - DNA, 25 bp, Homo sapien
cctccagttgtttcttcctgcgctt

SEQ ID NO: 4135980 - DNA, 25 bp, Homo sapien
ttgtttttgcttaagtatgtcttct

SEQ ID NO: 4135981 - DNA, 25 bp, Homo sapien
tcttcacgttcctgtgctaagcgaa

SEQ ID NO: 4135982 - DNA, 25 bp, Homo sapien
tgtttttgcttaagtatgtcttctt

SEQ ID NO: 4135983 - DNA, 25 bp, Homo sapien
cttcacgttcctgtgctaagcgaag

SEQ ID NO: 4135984 - DNA, 25 bp, Homo sapien
ccttttgcgccaattctcggattct

SEQ ID NO: 4135985 - DNA, 25 bp, Homo sapien
ccaattctcggattctttgttcttg

SEQ ID NO: 4135986 - DNA, 25 bp, Homo sapien
gatttttaatcagtctagaagtgtc

SEQ ID NO: 4135987 - DNA, 25 bp, Homo sapien
tgctcgctgcattgtctggaatagc

SEQ ID NO: 4135988 - DNA, 25 bp, Homo sapien
ctgataaaacaacacttaaggaata

SEQ ID NO: 4135989 - DNA, 25 bp, Homo sapien
gaatttgaaatgttagatgcattat

SEQ ID NO: 4135990 - DNA, 25 bp, Homo sapien
tagaagtcgtagaattcatatatgt

SEQ ID NO: 4135991 - DNA, 25 bp, Homo sapien
ccttcttagaagtcgtagaattcat

SEQ ID NO: 4135992 - DNA, 25 bp, Homo sapien
caccagtatccttcttagaagtcgt

SEQ ID NO: 4135993 - DNA, 25 bp, Homo sapien
tggtaatggttgcaccactgaatac

SEQ ID NO: 4135994 - DNA, 25 bp, Homo sapien
tcagaacccacatgcactgatggtg

SEQ ID NO: 4135995 - DNA, 25 bp, Homo sapien
tatgtggtctaattccagttacgtg

SEQ ID NO: 4135996 - DNA, 25 bp, Homo sapien
agtacctgttactcatgactcagca

SEQ ID NO: 4135997 - DNA, 25 bp, Homo sapien
gtgaatattcctatatttaagtcat

SEQ ID NO: 4135998 - DNA, 25 bp, Homo sapien
tggtgaatattcctatatttaagtc

SEQ ID NO: 4135999 - DNA, 25 bp, Homo sapien
ctgcattggtgaatattcctatatt

SEQ ID NO: 4136000 - DNA, 25 bp, Homo sapien
attggtgaatattcctatatttaag

SEQ ID NO: 4136001 - DNA, 25 bp, Homo sapien
tgaacaatttgtgatgtccctctcc

SEQ ID NO: 4136002 - DNA, 25 bp, Homo sapien
tctaagctggctcctttatcctgag

SEQ ID NO: 4136003 - DNA, 25 bp, Homo sapien
taagttctgccgaaatctcaggaga

SEQ ID NO: 4136004 - DNA, 25 bp, Homo sapien
gattacactggtcattacaccgatt

SEQ ID NO: 4136005 - DNA, 25 bp, Homo sapien
actccgtttcttgatgagatgaatg

SEQ ID NO: 4136006 - DNA, 25 bp, Homo sapien
caaatgaagcaattccatctgcctc

SEQ ID NO: 4136007 - DNA, 25 bp, Homo sapien
acctcaactttgactccgtttcttg

SEQ ID NO: 4136008 - DNA, 25 bp, Homo sapien
actttgactccgtttcttgatgaga

SEQ ID NO: 4136009 - DNA, 25 bp, Homo sapien
aaactgtgttttgaatccagaaacg

SEQ ID NO: 4136010 - DNA, 25 bp, Homo sapien
gaatccagaaacgtcaacacatcat

SEQ ID NO: 4136011 - DNA, 25 bp, Homo sapien
tgttttgaatccagaaacgtcaaca

SEQ ID NO: 4136012 - DNA, 25 bp, Homo sapien
gaaacgtcaacacatcatctaagat

SEQ ID NO: 4136013 - DNA, 25 bp, Homo sapien
tagtctggtgtgtgaagtcagccac

SEQ ID NO: 4136014 - DNA, 25 bp, Homo sapien
gcagcctggatttgcccatgggata

SEQ ID NO: 4136015 - DNA, 25 bp, Homo sapien
tgctgatccctaatgtaaactgaaa

SEQ ID NO: 4136016 - DNA, 25 bp, Homo sapien
ggactcgataagcataaggaaacct

SEQ ID NO: 4136017 - DNA, 25 bp, Homo sapien
gaatgaatgaatattcagaggctct

SEQ ID NO: 4136018 - DNA, 25 bp, Homo sapien
gaatgaatattcagaggctcttctt

SEQ ID NO: 4136019 - DNA, 25 bp, Homo sapien
atgaatgaatattcagaggctcttc

SEQ ID NO: 4136020 - DNA, 25 bp, Homo sapien
tgaatgaatgaatattcagaggctc

SEQ ID NO: 4136021 - DNA, 25 bp, Homo sapien
tgtacctgtaacacctttgggaatg

SEQ ID NO: 4136022 - DNA, 25 bp, Homo sapien
gaatgtatgcatagaagcctgaact

SEQ ID NO: 4136023 - DNA, 25 bp, Homo sapien
catataccatatgatgctgtccaga

SEQ ID NO: 4136024 - DNA, 25 bp, Homo sapien
agtagctgcggaattaatctgatgc

SEQ ID NO: 4136025 - DNA, 25 bp, Homo sapien
taatagatctcatttgttcgaacat

SEQ ID NO: 4136026 - DNA, 25 bp, Homo sapien
ggttgaaggcccagacaatggtgca

SEQ ID NO: 4136027 - DNA, 25 bp, Homo sapien
cgaacatacggaataaaatgggatg

SEQ ID NO: 4136028 - DNA, 25 bp, Homo sapien
ggtgcatcgggatcaaggtaataga

SEQ ID NO: 4136029 - DNA, 25 bp, Homo sapien
tagtaaaatgacatagccctgtgct

SEQ ID NO: 4136030 - DNA, 25 bp, Homo sapien
gccagatgaaagtaacaagtcagtc

SEQ ID NO: 4136031 - DNA, 25 bp, Homo sapien
gaaactttatagaactaagtgcagg

SEQ ID NO: 4136032 - DNA, 25 bp, Homo sapien
taataagtatgtatcctaggaaagt

SEQ ID NO: 4136033 - DNA, 25 bp, Homo sapien
aaatagctgtcgtttttggccacag

SEQ ID NO: 4136034 - DNA, 25 bp, Homo sapien
tgtcgatccctatttttcaccatgt

SEQ ID NO: 4136035 - DNA, 25 bp, Homo sapien
tctcagttctgaaagtcccttaagg

SEQ ID NO: 4136036 - DNA, 25 bp, Homo sapien
aggattgcttgctgtcgatccctat

SEQ ID NO: 4136037 - DNA, 25 bp, Homo sapien
aaccgcccacgccacataaagaaca

SEQ ID NO: 4136038 - DNA, 25 bp, Homo sapien
gttaaatcctgggatgcaccgaagt

SEQ ID NO: 4136039 - DNA, 25 bp, Homo sapien
gatgcaccgaagtaacttaaaacaa

SEQ ID NO: 4136040 - DNA, 25 bp, Homo sapien
caaacatacaggaactgaaatattt

SEQ ID NO: 4136041 - DNA, 25 bp, Homo sapien
ccaagtgctcttagatactgaagga

SEQ ID NO: 4136042 - DNA, 25 bp, Homo sapien
tcacttggaaaacatatcgcttagg

SEQ ID NO: 4136043 - DNA, 25 bp, Homo sapien
gaaatgcttgtactagaccacctca

SEQ ID NO: 4136044 - DNA, 25 bp, Homo sapien
gaactcaagactccataactatggg

SEQ ID NO: 4136045 - DNA, 25 bp, Homo sapien
ctaaaggcaggagactactttccaa

SEQ ID NO: 4136046 - DNA, 25 bp, Homo sapien
aaggcaggagactactttccaactc

SEQ ID NO: 4136047 - DNA, 25 bp, Homo sapien
gctaaaggcaggagactactttcca

SEQ ID NO: 4136048 - DNA, 25 bp, Homo sapien
taaaggcaggagactactttccaac

SEQ ID NO: 4136049 - DNA, 25 bp, Homo sapien
taaatctaggctatttgaaaaatac

SEQ ID NO: 4136050 - DNA, 25 bp, Homo sapien
catagtatacaagtttttaatgagc

SEQ ID NO: 4136051 - DNA, 25 bp, Homo sapien
ttttattgtatagaacaagtacagc

SEQ ID NO: 4136052 - DNA, 25 bp, Homo sapien
caagtacagcattttactacatagt

SEQ ID NO: 4136053 - DNA, 25 bp, Homo sapien
aggtcccagcaacgccagactatat

SEQ ID NO: 4136054 - DNA, 25 bp, Homo sapien
tatagggcttcaatacccaggtggt

SEQ ID NO: 4136055 - DNA, 25 bp, Homo sapien
tgaaagaacactgtgaggtcccagc

SEQ ID NO: 4136056 - DNA, 25 bp, Homo sapien
ctttagaacaaatgcatgagtggta

SEQ ID NO: 4136057 - DNA, 25 bp, Homo sapien
catagtgcaaataaatgtcaggatt

SEQ ID NO: 4136058 - DNA, 25 bp, Homo sapien
aatgtcaggatttagagaaggagcc

SEQ ID NO: 4136059 - DNA, 25 bp, Homo sapien
tagagaaggagcctaaactgaattt

SEQ ID NO: 4136060 - DNA, 25 bp, Homo sapien
gaaggagcctaaactgaatttgtgt

SEQ ID NO: 4136061 - DNA, 25 bp, Homo sapien
gctttcaaacccgtatctattccta

SEQ ID NO: 4136062 - DNA, 25 bp, Homo sapien
gttgaacacattaatgctatactag

SEQ ID NO: 4136063 - DNA, 25 bp, Homo sapien
gacagatacagtggagatagctttc

SEQ ID NO: 4136064 - DNA, 25 bp, Homo sapien
ttgaggtggtcttagtagtaattac

SEQ ID NO: 4136065 - DNA, 25 bp, Homo sapien
caggattttggctcgatacctcaag

SEQ ID NO: 4136066 - DNA, 25 bp, Homo sapien
gagttgcaatcgtctcctgatgtgc

SEQ ID NO: 4136067 - DNA, 25 bp, Homo sapien
gaccaaaggatcacgtggaacagat

SEQ ID NO: 4136068 - DNA, 25 bp, Homo sapien
gatgcttgcaggaggacggtaaaca

SEQ ID NO: 4136069 - DNA, 25 bp, Homo sapien
cttagcaacctcgtaagtgagaaca

SEQ ID NO: 4136070 - DNA, 25 bp, Homo sapien
tacagaatggtagggaggcagaaac

SEQ ID NO: 4136071 - DNA, 25 bp, Homo sapien
gcttgagcgcttcaaaatagcagag

SEQ ID NO: 4136072 - DNA, 25 bp, Homo sapien
catcccataagtagggcacataggg

SEQ ID NO: 4136073 - DNA, 25 bp, Homo sapien
tgaggccccatgtctaataaataat

SEQ ID NO: 4136074 - DNA, 25 bp, Homo sapien
aagaaagtaatactgccccagcccg

SEQ ID NO: 4136075 - DNA, 25 bp, Homo sapien
tcataagctcgactcctagtgaggc

SEQ ID NO: 4136076 - DNA, 25 bp, Homo sapien
ggttcatgataaccaccaggattgg

SEQ ID NO: 4136077 - DNA, 25 bp, Homo sapien
gatgagttcccatgggctttagcac

SEQ ID NO: 4136078 - DNA, 25 bp, Homo sapien
tcagggtatacgtcttttccagtcc

SEQ ID NO: 4136079 - DNA, 25 bp, Homo sapien
gactggcctgtgaactaaactagaa

SEQ ID NO: 4136080 - DNA, 25 bp, Homo sapien
gaacctgctgagacttccgaggact

SEQ ID NO: 4136081 - DNA, 25 bp, Homo sapien
aacatggatttcgtagacaacagtc

SEQ ID NO: 4136082 - DNA, 25 bp, Homo sapien
tcattttacttagagaccagtttcc

SEQ ID NO: 4136083 - DNA, 25 bp, Homo sapien
taggtgcttcatcttaattggtgct

SEQ ID NO: 4136084 - DNA, 25 bp, Homo sapien
gaaactgattccaattacaggtaag

SEQ ID NO: 4136085 - DNA, 25 bp, Homo sapien
gacatatactacacctatataagag

SEQ ID NO: 4136086 - DNA, 25 bp, Homo sapien
cacttcggcctccctattcttgttt

SEQ ID NO: 4136087 - DNA, 25 bp, Homo sapien
tatatgaggtttgactataaagcaa

SEQ ID NO: 4136088 - DNA, 25 bp, Homo sapien
tgatgagctttagtgttaagttttt

SEQ ID NO: 4136089 - DNA, 25 bp, Homo sapien
gatacgtaaacacgcatgcagcgcc

SEQ ID NO: 4136090 - DNA, 25 bp, Homo sapien
agaagccgttgtgtcctcctaagga

SEQ ID NO: 4136091 - DNA, 25 bp, Homo sapien
cccgcggaagttggaagtagctcag

SEQ ID NO: 4136092 - DNA, 25 bp, Homo sapien
tgaagcttgtccgtaaggctgcagc

SEQ ID NO: 4136093 - DNA, 25 bp, Homo sapien
tttgcccacaaatgggcgacgcctg

SEQ ID NO: 4136094 - DNA, 25 bp, Homo sapien
tcataaaaccgagatcgtcccgcat

SEQ ID NO: 4136095 - DNA, 25 bp, Homo sapien
gctctgaagcccgtttgggccgaga

SEQ ID NO: 4136096 - DNA, 25 bp, Homo sapien
tgcgctccggagaagaggccaagct

SEQ ID NO: 4136097 - DNA, 25 bp, Homo sapien
gaagtaggattttgacgtgagccac

SEQ ID NO: 4136098 - DNA, 25 bp, Homo sapien
tacgagcttacaagtagagttgcct

SEQ ID NO: 4136099 - DNA, 25 bp, Homo sapien
gattgctttatgcatagcctacgag

SEQ ID NO: 4136100 - DNA, 25 bp, Homo sapien
tctgtggagggctaatggttctgtc

SEQ ID NO: 4136101 - DNA, 25 bp, Homo sapien
cagaatcagtaagggtccattgccc

SEQ ID NO: 4136102 - DNA, 25 bp, Homo sapien
tgtgccagacataggaagaaccaag

SEQ ID NO: 4136103 - DNA, 25 bp, Homo sapien
taagtgacagctcttgacttctggg

SEQ ID NO: 4136104 - DNA, 25 bp, Homo sapien
tatgcccctgtctgtataactacca

SEQ ID NO: 4136105 - DNA, 25 bp, Homo sapien
caggatggatctgcttgtttacagc

SEQ ID NO: 4136106 - DNA, 25 bp, Homo sapien
gaggcaatgggtatagaagcatcag

SEQ ID NO: 4136107 - DNA, 25 bp, Homo sapien
aagcccatcttagggcctggtagca

SEQ ID NO: 4136108 - DNA, 25 bp, Homo sapien
tacagctgtaacctcagaagcccat

SEQ ID NO: 4136109 - DNA, 25 bp, Homo sapien
tctacctggaattccactcatgcca

SEQ ID NO: 4136110 - DNA, 25 bp, Homo sapien
tacctggaattccactcatgccatt

SEQ ID NO: 4136111 - DNA, 25 bp, Homo sapien
ggaattccactcatgccattgccct

SEQ ID NO: 4136112 - DNA, 25 bp, Homo sapien
cctggaattccactcatgccattgc

SEQ ID NO: 4136113 - DNA, 25 bp, Homo sapien
ccagcgtgtcacatgtcaggagaga

SEQ ID NO: 4136114 - DNA, 25 bp, Homo sapien
cgtgtcacatgtcaggagagagtga

SEQ ID NO: 4136115 - DNA, 25 bp, Homo sapien
gtcacatgtcaggagagagtgagag

SEQ ID NO: 4136116 - DNA, 25 bp, Homo sapien
cagcgtgtcacatgtcaggagagag

SEQ ID NO: 4136117 - DNA, 25 bp, Homo sapien
acttttagaagccatcagccagtgt

SEQ ID NO: 4136118 - DNA, 25 bp, Homo sapien
taggcgccatcagccacttttagaa

SEQ ID NO: 4136119 - DNA, 25 bp, Homo sapien
tattgatacagcaagtgaacctgct

SEQ ID NO: 4136120 - DNA, 25 bp, Homo sapien
aatgaatgattctttgtaggcgcca

SEQ ID NO: 4136121 - DNA, 25 bp, Homo sapien
gaaagtatacatgttggcccagtct

SEQ ID NO: 4136122 - DNA, 25 bp, Homo sapien
tgtgagcgcatggaacagacagact

SEQ ID NO: 4136123 - DNA, 25 bp, Homo sapien
tgaggtcagcctcgactgtgagcgc

SEQ ID NO: 4136124 - DNA, 25 bp, Homo sapien
aaacagttttgtgtgctgccgggca

SEQ ID NO: 4136125 - DNA, 25 bp, Homo sapien
aaggtacacatgaaactattactag

SEQ ID NO: 4136126 - DNA, 25 bp, Homo sapien
attccgtcaggccaatcgctaacat

SEQ ID NO: 4136127 - DNA, 25 bp, Homo sapien
tattgacatatatccactaccaaaa

SEQ ID NO: 4136128 - DNA, 25 bp, Homo sapien
aaattctcatggtcaaaatgcagtt

SEQ ID NO: 4136129 - DNA, 25 bp, Homo sapien
tgcttagcggtggcactcatctata

SEQ ID NO: 4136130 - DNA, 25 bp, Homo sapien
tcaagagattgaggtggaagcatca

SEQ ID NO: 4136131 - DNA, 25 bp, Homo sapien
accttgttgatgagagtgtgagcaa

SEQ ID NO: 4136132 - DNA, 25 bp, Homo sapien
gaggcactttttgtaatagccagac

SEQ ID NO: 4136133 - DNA, 25 bp, Homo sapien
tagaccaaggaattccacttaagga

SEQ ID NO: 4136134 - DNA, 25 bp, Homo sapien
tatttggaggtcaacttagtggtac

SEQ ID NO: 4136135 - DNA, 25 bp, Homo sapien
cacagacctgattcttaatggactc

SEQ ID NO: 4136136 - DNA, 25 bp, Homo sapien
gctgtgatatccctcaagatagctc

SEQ ID NO: 4136137 - DNA, 25 bp, Homo sapien
gggtgtgaatactaaaggccgttga

SEQ ID NO: 4136138 - DNA, 25 bp, Homo sapien
ccgttgatacggcaaggcttctgtt

SEQ ID NO: 4136139 - DNA, 25 bp, Homo sapien
tctcgacaagttcatcgcaggcatc

SEQ ID NO: 4136140 - DNA, 25 bp, Homo sapien
acaagttcatcgcaggcatcccctg

SEQ ID NO: 4136141 - DNA, 25 bp, Homo sapien
tcttcagccctctcgacaagttcat

SEQ ID NO: 4136142 - DNA, 25 bp, Homo sapien
gccctctcgacaagttcatcgcagg

SEQ ID NO: 4136143 - DNA, 25 bp, Homo sapien
ctggtttagctgagcagcagtcttg

SEQ ID NO: 4136144 - DNA, 25 bp, Homo sapien
cagcagtcttgagtctgccatgtat

SEQ ID NO: 4136145 - DNA, 25 bp, Homo sapien
atgtatttgtcctgaatgcttttgc

SEQ ID NO: 4136146 - DNA, 25 bp, Homo sapien
ggcaatattttgtatctctgctttc

SEQ ID NO: 4136147 - DNA, 25 bp, Homo sapien
gggcagctgcagacatgacatagat

SEQ ID NO: 4136148 - DNA, 25 bp, Homo sapien
gatgatattcctactattcctcacc

SEQ ID NO: 4136149 - DNA, 25 bp, Homo sapien
tcaataggggtagagtctcagggca

SEQ ID NO: 4136150 - DNA, 25 bp, Homo sapien
catagatgatattcctactattcct

SEQ ID NO: 4136151 - DNA, 25 bp, Homo sapien
tttccagaccggcggatgggtgtgg

SEQ ID NO: 4136152 - DNA, 25 bp, Homo sapien
ccagaccggcggatgggtgtggcat

SEQ ID NO: 4136153 - DNA, 25 bp, Homo sapien
tccagaccggcggatgggtgtggca

SEQ ID NO: 4136154 - DNA, 25 bp, Homo sapien
ttccagaccggcggatgggtgtggc

SEQ ID NO: 4136155 - DNA, 25 bp, Homo sapien
tctgggtgcctcgttgtgtgaccag

SEQ ID NO: 4136156 - DNA, 25 bp, Homo sapien
gttggcatcatccaaccagggatgt

SEQ ID NO: 4136157 - DNA, 25 bp, Homo sapien
catcatccaaccagggatgtccagc

SEQ ID NO: 4136158 - DNA, 25 bp, Homo sapien
ctctgggtgcctcgttgtgtgacca

SEQ ID NO: 4136159 - DNA, 25 bp, Homo sapien
cagttattggtatgattctggcagg

SEQ ID NO: 4136160 - DNA, 25 bp, Homo sapien
ggccagagcagttattggtatgatt

SEQ ID NO: 4136161 - DNA, 25 bp, Homo sapien
ggaactctagctttgtccctggaag

SEQ ID NO: 4136162 - DNA, 25 bp, Homo sapien
tggaactctagctttgtccctggaa

SEQ ID NO: 4136163 - DNA, 25 bp, Homo sapien
tatagccttgaatcctgccagacca

SEQ ID NO: 4136164 - DNA, 25 bp, Homo sapien
ttttgccgtatccagccagagcttg

SEQ ID NO: 4136165 - DNA, 25 bp, Homo sapien
taggacttgggtccttatcttgaga

SEQ ID NO: 4136166 - DNA, 25 bp, Homo sapien
ctataaggacccaagattaggactt

SEQ ID NO: 4136167 - DNA, 25 bp, Homo sapien
cagatagcttgcatgagagcccacg

SEQ ID NO: 4136168 - DNA, 25 bp, Homo sapien
ggagctcagatagcttgcatgagag

SEQ ID NO: 4136169 - DNA, 25 bp, Homo sapien
gagagcccacgttcactgccaaaga

SEQ ID NO: 4136170 - DNA, 25 bp, Homo sapien
gcttgcatgagagcccacgttcact

SEQ ID NO: 4136171 - DNA, 25 bp, Homo sapien
tttctccactgtaggcagattctcg

SEQ ID NO: 4136172 - DNA, 25 bp, Homo sapien
cagattctcgtttcagctgtagggc

SEQ ID NO: 4136173 - DNA, 25 bp, Homo sapien
cttcctgagtattccaactatgggc

SEQ ID NO: 4136174 - DNA, 25 bp, Homo sapien
ggctgcagggatagctagagcttcc

SEQ ID NO: 4136175 - DNA, 25 bp, Homo sapien
gcccattttagctatccggcctggg

SEQ ID NO: 4136176 - DNA, 25 bp, Homo sapien
catgttctgtgtcgtatgaaaaggg

SEQ ID NO: 4136177 - DNA, 25 bp, Homo sapien
tgtgttggactttatgggtcatgtt

SEQ ID NO: 4136178 - DNA, 25 bp, Homo sapien
ccacagggccctttatttatcaggc

SEQ ID NO: 4136179 - DNA, 25 bp, Homo sapien
cctctgaccttgttattgtactcca

SEQ ID NO: 4136180 - DNA, 25 bp, Homo sapien
ctctgaccttgttattgtactccat

SEQ ID NO: 4136181 - DNA, 25 bp, Homo sapien
cctcctctgaccttgttattgtact

SEQ ID NO: 4136182 - DNA, 25 bp, Homo sapien
tcctctgaccttgttattgtactcc

SEQ ID NO: 4136183 - DNA, 25 bp, Homo sapien
tctgacggtaactgtgtcatcatca

SEQ ID NO: 4136184 - DNA, 25 bp, Homo sapien
ttaagcgtaagtatttggaatgcct

SEQ ID NO: 4136185 - DNA, 25 bp, Homo sapien
gccttttctgacggtaactgtgtca

SEQ ID NO: 4136186 - DNA, 25 bp, Homo sapien
ttttctgacggtaactgtgtcatca

SEQ ID NO: 4136187 - DNA, 25 bp, Homo sapien
ttatggactcagattgtccagaccc

SEQ ID NO: 4136188 - DNA, 25 bp, Homo sapien
accagacatctcgtccaccactggc

SEQ ID NO: 4136189 - DNA, 25 bp, Homo sapien
ggactcagattgtccagacccctac

SEQ ID NO: 4136190 - DNA, 25 bp, Homo sapien
tcagattgtccagacccctaccaga

SEQ ID NO: 4136191 - DNA, 25 bp, Homo sapien
tgccagtagccactgggttgatatg

SEQ ID NO: 4136192 - DNA, 25 bp, Homo sapien
gaatgccatgaagattgactcagac

SEQ ID NO: 4136193 - DNA, 25 bp, Homo sapien
ttgtccctgggtcaataatagtccc

SEQ ID NO: 4136194 - DNA, 25 bp, Homo sapien
cattaggtcacatgcttgtccctgg

SEQ ID NO: 4136195 - DNA, 25 bp, Homo sapien
tcctttctaaccaatctgtgcgctg

SEQ ID NO: 4136196 - DNA, 25 bp, Homo sapien
ctgtttgccgtagcggaatcattct

SEQ ID NO: 4136197 - DNA, 25 bp, Homo sapien
ctgtgcgctgtggtagcatgttctc

SEQ ID NO: 4136198 - DNA, 25 bp, Homo sapien
tcatagctgttgacaacttgctgtg

SEQ ID NO: 4136199 - DNA, 25 bp, Homo sapien
tgagcgttcacatagacatattgca

SEQ ID NO: 4136200 - DNA, 25 bp, Homo sapien
cctatgtttggtccaatggttgttc

SEQ ID NO: 4136201 - DNA, 25 bp, Homo sapien
atttacttgtgctttgagcgttcac

SEQ ID NO: 4136202 - DNA, 25 bp, Homo sapien
gacgctgccgcctctgatggcaaat

SEQ ID NO: 4136203 - DNA, 25 bp, Homo sapien
tcttaaagctcggtgatgggtgacg

SEQ ID NO: 4136204 - DNA, 25 bp, Homo sapien
gctagttgatgatataatcggtcac

SEQ ID NO: 4136205 - DNA, 25 bp, Homo sapien
caacttcctggtgggttagaacaca

SEQ ID NO: 4136206 - DNA, 25 bp, Homo sapien
caactcccagcacttggtggaaaat

SEQ ID NO: 4136207 - DNA, 25 bp, Homo sapien
gatgactgacgttattcttacagaa

SEQ ID NO: 4136208 - DNA, 25 bp, Homo sapien
gaacagggatcctcgattgtttggg

SEQ ID NO: 4136209 - DNA, 25 bp, Homo sapien
tcagacacccttcaggatgactgac

SEQ ID NO: 4136210 - DNA, 25 bp, Homo sapien
gtttggggggatgcatcacttaact

SEQ ID NO: 4136211 - DNA, 25 bp, Homo sapien
ctggatggtgaatcagtaaggatca

SEQ ID NO: 4136212 - DNA, 25 bp, Homo sapien
cagctgtgcccggagttgtgatcag

SEQ ID NO: 4136213 - DNA, 25 bp, Homo sapien
tgtacaaacgtgaagcatcctcaaa

SEQ ID NO: 4136214 - DNA, 25 bp, Homo sapien
tcagggccctgtacaaacgtgaagc

SEQ ID NO: 4136215 - DNA, 25 bp, Homo sapien
gataagacattaccagaaccaggag

SEQ ID NO: 4136216 - DNA, 25 bp, Homo sapien
cagacaccagtgattgaaagggagc

SEQ ID NO: 4136217 - DNA, 25 bp, Homo sapien
ttgccccaaggagtaggtgttccag

SEQ ID NO: 4136218 - DNA, 25 bp, Homo sapien
aaaggcctgcccgttggcatttggg

SEQ ID NO: 4136219 - DNA, 25 bp, Homo sapien
cagctgcgattagagggacattttc

SEQ ID NO: 4136220 - DNA, 25 bp, Homo sapien
aagaagtcagctgcgattagaggga

SEQ ID NO: 4136221 - DNA, 25 bp, Homo sapien
gctgcgattagagggacattttctt

SEQ ID NO: 4136222 - DNA, 25 bp, Homo sapien
agtcagctgcgattagagggacatt

SEQ ID NO: 4136223 - DNA, 25 bp, Homo sapien
tcagagtagtcatgactaactcggg

SEQ ID NO: 4136224 - DNA, 25 bp, Homo sapien
taactcgggaataatgctcttggcg

SEQ ID NO: 4136225 - DNA, 25 bp, Homo sapien
gggaggccaccagtctttcagagta

SEQ ID NO: 4136226 - DNA, 25 bp, Homo sapien
tagtccgtagagaatctgtcagaac

SEQ ID NO: 4136227 - DNA, 25 bp, Homo sapien
cacctggcccaaatactagcatttc

SEQ ID NO: 4136228 - DNA, 25 bp, Homo sapien
taccaagtctttagtatccagtgag

SEQ ID NO: 4136229 - DNA, 25 bp, Homo sapien
gagtattgtatacttagagcacatc

SEQ ID NO: 4136230 - DNA, 25 bp, Homo sapien
catttcaacctgcaatagctataaa

SEQ ID NO: 4136231 - DNA, 25 bp, Homo sapien
gaatacagggtccattctgatgtat

SEQ ID NO: 4136232 - DNA, 25 bp, Homo sapien
cagggtccattctgatgtatcagtt

SEQ ID NO: 4136233 - DNA, 25 bp, Homo sapien
tttcagaatacagggtccattctga

SEQ ID NO: 4136234 - DNA, 25 bp, Homo sapien
tacagggtccattctgatgtatcag

SEQ ID NO: 4136235 - DNA, 25 bp, Homo sapien
gctgcagccgatgggatgcttcaca

SEQ ID NO: 4136236 - DNA, 25 bp, Homo sapien
tctgtatcccggacagggctactga

SEQ ID NO: 4136237 - DNA, 25 bp, Homo sapien
cactgtttgtctcttacaggctggg

SEQ ID NO: 4136238 - DNA, 25 bp, Homo sapien
cagtgtttgggtctgcaaagctcca

SEQ ID NO: 4136239 - DNA, 25 bp, Homo sapien
caggaccagttaccttgggtgagag

SEQ ID NO: 4136240 - DNA, 25 bp, Homo sapien
gggtgagagttggaagccctttcca

SEQ ID NO: 4136241 - DNA, 25 bp, Homo sapien
caggaagtctgacttaaagggacag

SEQ ID NO: 4136242 - DNA, 25 bp, Homo sapien
tccacctgtctcatttggtttgcta

SEQ ID NO: 4136243 - DNA, 25 bp, Homo sapien
tctgttgaacaaaggaagctggtct

SEQ ID NO: 4136244 - DNA, 25 bp, Homo sapien
gagaccctgagaatggtccctggct

SEQ ID NO: 4136245 - DNA, 25 bp, Homo sapien
cctagtgcttcgaggctgtgggaac

SEQ ID NO: 4136246 - DNA, 25 bp, Homo sapien
gcattgtgtacaggtctgcgtctcc

SEQ ID NO: 4136247 - DNA, 25 bp, Homo sapien
tcttgcgtggaggttggtaaaagtc

SEQ ID NO: 4136248 - DNA, 25 bp, Homo sapien
tgagtgtggcccactgaatagactg

SEQ ID NO: 4136249 - DNA, 25 bp, Homo sapien
actggacgagattggattgtggctc

SEQ ID NO: 4136250 - DNA, 25 bp, Homo sapien
aatgggaattgaagcctcttgcgtg

SEQ ID NO: 4136251 - DNA, 25 bp, Homo sapien
ctcttagcacttttgcttggccaac

SEQ ID NO: 4136252 - DNA, 25 bp, Homo sapien
tctctgctcttagcacttttgcttg

SEQ ID NO: 4136253 - DNA, 25 bp, Homo sapien
ccatttctcagtacagttgaaacac

SEQ ID NO: 4136254 - DNA, 25 bp, Homo sapien
tttccatttctcagtacagttgaaa

SEQ ID NO: 4136255 - DNA, 25 bp, Homo sapien
gaagccaggctgtatagatcctgac

SEQ ID NO: 4136256 - DNA, 25 bp, Homo sapien
agccaggctgtatagatcctgacac

SEQ ID NO: 4136257 - DNA, 25 bp, Homo sapien
aagccaggctgtatagatcctgaca

SEQ ID NO: 4136258 - DNA, 25 bp, Homo sapien
agtttggtggacagtgcttggcagc

SEQ ID NO: 4136259 - DNA, 25 bp, Homo sapien
acatttcagagcatcgggtctctta

SEQ ID NO: 4136260 - DNA, 25 bp, Homo sapien
gcttagatggtgaaaaggtatatgc

SEQ ID NO: 4136261 - DNA, 25 bp, Homo sapien
ggtatatgctttggggtcagaatgc

SEQ ID NO: 4136262 - DNA, 25 bp, Homo sapien
ttttgacaagaggtcctcaaccttc

SEQ ID NO: 4136263 - DNA, 25 bp, Homo sapien
cttttgacaagaggtcctcaacctt

SEQ ID NO: 4136264 - DNA, 25 bp, Homo sapien
tgacaagaggtcctcaaccttctcc

SEQ ID NO: 4136265 - DNA, 25 bp, Homo sapien
tttgacaagaggtcctcaaccttct

SEQ ID NO: 4136266 - DNA, 25 bp, Homo sapien
tccaaccactgaataatgaatacat

SEQ ID NO: 4136267 - DNA, 25 bp, Homo sapien
tctcttctaggcctaaacggcagcg

SEQ ID NO: 4136268 - DNA, 25 bp, Homo sapien
ttcctctgaatatccaaccactgaa

SEQ ID NO: 4136269 - DNA, 25 bp, Homo sapien
ggcagcggcaaaacaactttcccat

SEQ ID NO: 4136270 - DNA, 25 bp, Homo sapien
tggagctcaaatgtaccccttgttg

SEQ ID NO: 4136271 - DNA, 25 bp, Homo sapien
gctaaatgtcccgttgatggttgct

SEQ ID NO: 4136272 - DNA, 25 bp, Homo sapien
tcaaatgtaccccttgttggaactc

SEQ ID NO: 4136273 - DNA, 25 bp, Homo sapien
taaaaacctggagctcaaatgtacc

SEQ ID NO: 4136274 - DNA, 25 bp, Homo sapien
ttattgcttacgtgtgggtgaagag

SEQ ID NO: 4136275 - DNA, 25 bp, Homo sapien
tttcagaaggacttaggccaacatg

SEQ ID NO: 4136276 - DNA, 25 bp, Homo sapien
tctctgtcttgcgatcttattagcc

SEQ ID NO: 4136277 - DNA, 25 bp, Homo sapien
ggcacatcaggtgggagttcccata

SEQ ID NO: 4136278 - DNA, 25 bp, Homo sapien
caggagcagtctaaatacatgttca

SEQ ID NO: 4136279 - DNA, 25 bp, Homo sapien
taaattctgcactaaccctaaggcc

SEQ ID NO: 4136280 - DNA, 25 bp, Homo sapien
tctcaaggtgacgagaaacagtcac

SEQ ID NO: 4136281 - DNA, 25 bp, Homo sapien
gtggtcgctaaacctcttctcaagg

SEQ ID NO: 4136282 - DNA, 25 bp, Homo sapien
tgtctggtctgttgacaggattgct

SEQ ID NO: 4136283 - DNA, 25 bp, Homo sapien
ctactgtcaggctgttgagctggaa

SEQ ID NO: 4136284 - DNA, 25 bp, Homo sapien
gctcttttgacagtcccagcaccat

SEQ ID NO: 4136285 - DNA, 25 bp, Homo sapien
cccactgaatgctggcatgtctccc

SEQ ID NO: 4136286 - DNA, 25 bp, Homo sapien
ttattcctgggcctgtgccttgtct

SEQ ID NO: 4136287 - DNA, 25 bp, Homo sapien
ccttgggaaggtgtggcatcttggg

SEQ ID NO: 4136288 - DNA, 25 bp, Homo sapien
tggcttgggcctcctgtggcagcag

SEQ ID NO: 4136289 - DNA, 25 bp, Homo sapien
gaggattttgaagagatgcctctgc

SEQ ID NO: 4136290 - DNA, 25 bp, Homo sapien
gaggacccatatccagaaagaggag

SEQ ID NO: 4136291 - DNA, 25 bp, Homo sapien
tttgctcggtgggaagaggacccat

SEQ ID NO: 4136292 - DNA, 25 bp, Homo sapien
tgacggtcaggttgcctggactgcg

SEQ ID NO: 4136293 - DNA, 25 bp, Homo sapien
tgggagcacactaggcactcactca

SEQ ID NO: 4136294 - DNA, 25 bp, Homo sapien
gccagggcccagtgcccaggaggca

SEQ ID NO: 4136295 - DNA, 25 bp, Homo sapien
tctggccagggcccagtgcccagga

SEQ ID NO: 4136296 - DNA, 25 bp, Homo sapien
tggccagggcccagtgcccaggagg

SEQ ID NO: 4136297 - DNA, 25 bp, Homo sapien
ccagggcccagtgcccaggaggcat

SEQ ID NO: 4136298 - DNA, 25 bp, Homo sapien
actgccttcgaggtgaccagccatc

SEQ ID NO: 4136299 - DNA, 25 bp, Homo sapien
tgaaactgccttcgaggtgaccagc

SEQ ID NO: 4136300 - DNA, 25 bp, Homo sapien
taccctgaaactgccttcgaggtga

SEQ ID NO: 4136301 - DNA, 25 bp, Homo sapien
cctgaaactgccttcgaggtgacca

SEQ ID NO: 4136302 - DNA, 25 bp, Homo sapien
cctgcctgcagattgggcctggagc

SEQ ID NO: 4136303 - DNA, 25 bp, Homo sapien
agccgttgcattgcccagagctcag

SEQ ID NO: 4136304 - DNA, 25 bp, Homo sapien
tactcctgctcagccgttgcattgc

SEQ ID NO: 4136305 - DNA, 25 bp, Homo sapien
cctgtgccaaacacttccctcctac

SEQ ID NO: 4136306 - DNA, 25 bp, Homo sapien
gctgtgttcttagccactgcatgtg

SEQ ID NO: 4136307 - DNA, 25 bp, Homo sapien
ctgtgttcttagccactgcatgtgt

SEQ ID NO: 4136308 - DNA, 25 bp, Homo sapien
tgatccaggaaacatagttctccca

SEQ ID NO: 4136309 - DNA, 25 bp, Homo sapien
tggctcatcccctgatgactgaagg

SEQ ID NO: 4136310 - DNA, 25 bp, Homo sapien
gaaggatggcatgatccaggaaaca

SEQ ID NO: 4136311 - DNA, 25 bp, Homo sapien
catcccctgatgactgaaggatggc

SEQ ID NO: 4136312 - DNA, 25 bp, Homo sapien
atccctgggcccgactgtcttccag

SEQ ID NO: 4136313 - DNA, 25 bp, Homo sapien
ccaagcatcgcaggcctcagtgctg

SEQ ID NO: 4136314 - DNA, 25 bp, Homo sapien
accaaatgtggaccctgctctgcag

SEQ ID NO: 4136315 - DNA, 25 bp, Homo sapien
tggcaagtgcttctgcagggctgga

SEQ ID NO: 4136316 - DNA, 25 bp, Homo sapien
aggctgtctctctgttgatcagggc

SEQ ID NO: 4136317 - DNA, 25 bp, Homo sapien
tcgtcatctcctactgggggcctct

SEQ ID NO: 4136318 - DNA, 25 bp, Homo sapien
tctcattgtactcgcaggctgtctc

SEQ ID NO: 4136319 - DNA, 25 bp, Homo sapien
ggcaaaggcatacgtggatgtgaaa

SEQ ID NO: 4136320 - DNA, 25 bp, Homo sapien
tgaaccaaggtccagccagtgttgc

SEQ ID NO: 4136321 - DNA, 25 bp, Homo sapien
gcaaggaaagtagggaagtgaacca

SEQ ID NO: 4136322 - DNA, 25 bp, Homo sapien
gcctggggtccccatagcaaggaaa

SEQ ID NO: 4136323 - DNA, 25 bp, Homo sapien
caaggtccagccagtgttgctcttg

SEQ ID NO: 4136324 - DNA, 25 bp, Homo sapien
tgactgctgaggtcatgaaggagct

SEQ ID NO: 4136325 - DNA, 25 bp, Homo sapien
ccccagatgactgctgaggtcatga

SEQ ID NO: 4136326 - DNA, 25 bp, Homo sapien
atgaaggagctcatagcaccattca

SEQ ID NO: 4136327 - DNA, 25 bp, Homo sapien
tcagctgtggcacccccagatgact

SEQ ID NO: 4136328 - DNA, 25 bp, Homo sapien
ccaggaagcgtgagcgtggtcttca

SEQ ID NO: 4136329 - DNA, 25 bp, Homo sapien
tgtggagctagcagagtgaccacag

SEQ ID NO: 4136330 - DNA, 25 bp, Homo sapien
tattgcaggtaaaggggtcatccaa

SEQ ID NO: 4136331 - DNA, 25 bp, Homo sapien
gagccccaggaagcgtgagcgtggt

SEQ ID NO: 4136332 - DNA, 25 bp, Homo sapien
gattcttggctgaggggctgaggga

SEQ ID NO: 4136333 - DNA, 25 bp, Homo sapien
ggattcttggctgaggggctgaggg

SEQ ID NO: 4136334 - DNA, 25 bp, Homo sapien
gcctctagcctcactgtcatgggtc

SEQ ID NO: 4136335 - DNA, 25 bp, Homo sapien
atgtagctaccaccccgctcagaga

SEQ ID NO: 4136336 - DNA, 25 bp, Homo sapien
gataaaatgcagatgtagctaccac

SEQ ID NO: 4136337 - DNA, 25 bp, Homo sapien
agccacccttcacatcctggcctgt

SEQ ID NO: 4136338 - DNA, 25 bp, Homo sapien
tcttcattaggctgcattccggtcc

SEQ ID NO: 4136339 - DNA, 25 bp, Homo sapien
ttgcctccttgtgccaaaaacgtct

SEQ ID NO: 4136340 - DNA, 25 bp, Homo sapien
cctcgccggttgcatgttcatcata

SEQ ID NO: 4136341 - DNA, 25 bp, Homo sapien
tgtgcttagcaccatcatgttcctg

SEQ ID NO: 4136342 - DNA, 25 bp, Homo sapien
tcactccaacgtcaggataacccat

SEQ ID NO: 4136343 - DNA, 25 bp, Homo sapien
agtgaagcctcaagggtggagtcca

SEQ ID NO: 4136344 - DNA, 25 bp, Homo sapien
tggtcctccagttccatgaacttca

SEQ ID NO: 4136345 - DNA, 25 bp, Homo sapien
cctcgtgggtgacatcactccaacg

SEQ ID NO: 4136346 - DNA, 25 bp, Homo sapien
tcttccgtatgtgttgagcacctcc

SEQ ID NO: 4136347 - DNA, 25 bp, Homo sapien
tgctaggctttactctcctggaggg

SEQ ID NO: 4136348 - DNA, 25 bp, Homo sapien
agtgatgcctgacatccggcccagg

SEQ ID NO: 4136349 - DNA, 25 bp, Homo sapien
agggccttgtctggtgcagtgatgc

SEQ ID NO: 4136350 - DNA, 25 bp, Homo sapien
ctaaacttgggcgtcatgcacccga

SEQ ID NO: 4136351 - DNA, 25 bp, Homo sapien
gggcgtcatgcacccgaatggtatt

SEQ ID NO: 4136352 - DNA, 25 bp, Homo sapien
catgcacccgaatggtattttacca

SEQ ID NO: 4136353 - DNA, 25 bp, Homo sapien
gcacccgaatggtattttaccagtc

SEQ ID NO: 4136354 - DNA, 25 bp, Homo sapien
gaggtatcagcaaataccaatgggt

SEQ ID NO: 4136355 - DNA, 25 bp, Homo sapien
taccaatgggtgctgatcctgccag

SEQ ID NO: 4136356 - DNA, 25 bp, Homo sapien
aaataccaatgggtgctgatcctgc

SEQ ID NO: 4136357 - DNA, 25 bp, Homo sapien
gcaggaggtatcagcaaataccaat

SEQ ID NO: 4136358 - DNA, 25 bp, Homo sapien
caagtggaccactttattgcttcag

SEQ ID NO: 4136359 - DNA, 25 bp, Homo sapien
ttattgcttcagctggtggtgatgc

SEQ ID NO: 4136360 - DNA, 25 bp, Homo sapien
ctgtgattctcgaatggccaacccc

SEQ ID NO: 4136361 - DNA, 25 bp, Homo sapien
gggtactgtgcagctttgcctcttg

SEQ ID NO: 4136362 - DNA, 25 bp, Homo sapien
cataagcatgctctctgtccatcaa

SEQ ID NO: 4136363 - DNA, 25 bp, Homo sapien
ccataagcatgctctctgtccatca

SEQ ID NO: 4136364 - DNA, 25 bp, Homo sapien
ataagcatgctctctgtccatcaac

SEQ ID NO: 4136365 - DNA, 25 bp, Homo sapien
tgagcagctcactaagatgcatctt

SEQ ID NO: 4136366 - DNA, 25 bp, Homo sapien
cactaactttagaattcgccctcca

SEQ ID NO: 4136367 - DNA, 25 bp, Homo sapien
tctagcactgtaggagaaccgagtt

SEQ ID NO: 4136368 - DNA, 25 bp, Homo sapien
gaactctgcaggattttcccactaa

SEQ ID NO: 4136369 - DNA, 25 bp, Homo sapien
gctgccttgggacagcccgagtgct

SEQ ID NO: 4136370 - DNA, 25 bp, Homo sapien
ctgacaggagaaggacgcacttcga

SEQ ID NO: 4136371 - DNA, 25 bp, Homo sapien
cgcacttcgattccaggcctgtgtg

SEQ ID NO: 4136372 - DNA, 25 bp, Homo sapien
ttgggacagcccgagtgctctggct

SEQ ID NO: 4136373 - DNA, 25 bp, Homo sapien
tggctttctgcttgggtactcctgc

SEQ ID NO: 4136374 - DNA, 25 bp, Homo sapien
gggtggtttgtgctctagatggtct

SEQ ID NO: 4136375 - DNA, 25 bp, Homo sapien
ggcagatctccaagctggatgggcc

SEQ ID NO: 4136376 - DNA, 25 bp, Homo sapien
gctgctccacggcaaattaaagcct

SEQ ID NO: 4136377 - DNA, 25 bp, Homo sapien
tcaaacagtagggatgtgcattgga

SEQ ID NO: 4136378 - DNA, 25 bp, Homo sapien
aaacagtagggatgtgcattggaat

SEQ ID NO: 4136379 - DNA, 25 bp, Homo sapien
tctgttgggcttcaggggcgaggag

SEQ ID NO: 4136380 - DNA, 25 bp, Homo sapien
caaacagtagggatgtgcattggaa

SEQ ID NO: 4136381 - DNA, 25 bp, Homo sapien
ctttgtgagtcacagctcaactccc

SEQ ID NO: 4136382 - DNA, 25 bp, Homo sapien
agcccgggaccagagcctttgtgag

SEQ ID NO: 4136383 - DNA, 25 bp, Homo sapien
ggtgagcctgcacaaagaattttct

SEQ ID NO: 4136384 - DNA, 25 bp, Homo sapien
caaacaaagggatatgccagggagg

SEQ ID NO: 4136385 - DNA, 25 bp, Homo sapien
ctccttttgaggtctgatactgcag

SEQ ID NO: 4136386 - DNA, 25 bp, Homo sapien
tccttttgaggtctgatactgcagg

SEQ ID NO: 4136387 - DNA, 25 bp, Homo sapien
gctccttttgaggtctgatactgca

SEQ ID NO: 4136388 - DNA, 25 bp, Homo sapien
tccactacttggaagctctttcacg

SEQ ID NO: 4136389 - DNA, 25 bp, Homo sapien
gaggagcatgcagcactcttgcaac

SEQ ID NO: 4136390 - DNA, 25 bp, Homo sapien
tgagtgcactgttccaattcacctt

SEQ ID NO: 4136391 - DNA, 25 bp, Homo sapien
ttggccggagccaatccctgaggag

SEQ ID NO: 4136392 - DNA, 25 bp, Homo sapien
taaggtggacccacaagtcagagca

SEQ ID NO: 4136393 - DNA, 25 bp, Homo sapien
aacgagtctggaagagtctagtgcc

SEQ ID NO: 4136394 - DNA, 25 bp, Homo sapien
tatctctgacaggtctcactttggc

SEQ ID NO: 4136395 - DNA, 25 bp, Homo sapien
tacagcgatgtcaagagagatggct

SEQ ID NO: 4136396 - DNA, 25 bp, Homo sapien
tactgggctcggcatctatatcctc

SEQ ID NO: 4136397 - DNA, 25 bp, Homo sapien
tagagagggacctgacaaagcagcc

SEQ ID NO: 4136398 - DNA, 25 bp, Homo sapien
tcagttggtttgaacggctgcaccc

SEQ ID NO: 4136399 - DNA, 25 bp, Homo sapien
acaactgccttgctgtatcaggaga

SEQ ID NO: 4136400 - DNA, 25 bp, Homo sapien
tgcaaaggcccagacaaacagctgc

SEQ ID NO: 4136401 - DNA, 25 bp, Homo sapien
gcagaaagggatggctacgagtcac

SEQ ID NO: 4136402 - DNA, 25 bp, Homo sapien
tgatggtcaactagaaggctggtac

SEQ ID NO: 4136403 - DNA, 25 bp, Homo sapien
cctagtggcacttacccagagggaa

SEQ ID NO: 4136404 - DNA, 25 bp, Homo sapien
ggctagacacccctttggcgggaca

SEQ ID NO: 4136405 - DNA, 25 bp, Homo sapien
tctcccggagtgagaccgtcttccg

SEQ ID NO: 4136406 - DNA, 25 bp, Homo sapien
cctgtagacctaggccgtgcatggg

SEQ ID NO: 4136407 - DNA, 25 bp, Homo sapien
gccgcggtgagttttccagcctgga

SEQ ID NO: 4136408 - DNA, 25 bp, Homo sapien
ctcggtcaattctctccgcctgagt

SEQ ID NO: 4136409 - DNA, 25 bp, Homo sapien
gcagggctgtttacccctcctccga

SEQ ID NO: 4136410 - DNA, 25 bp, Homo sapien
cctcctccgactcggtcaattctct

SEQ ID NO: 4136411 - DNA, 25 bp, Homo sapien
tccgactcggtcaattctctccgcc

SEQ ID NO: 4136412 - DNA, 25 bp, Homo sapien
agtccactcccactcgggtacctgg

SEQ ID NO: 4136413 - DNA, 25 bp, Homo sapien
tggaccgctagggtagcccctacca

SEQ ID NO: 4136414 - DNA, 25 bp, Homo sapien
gctctggccctggaccgctagggta

SEQ ID NO: 4136415 - DNA, 25 bp, Homo sapien
taccaccccggcacgagagtccact

SEQ ID NO: 4136416 - DNA, 25 bp, Homo sapien
tgcctgcagaaactcgctttattta

SEQ ID NO: 4136417 - DNA, 25 bp, Homo sapien
ttatttccgtatgcacgacccaggc

SEQ ID NO: 4136418 - DNA, 25 bp, Homo sapien
gaggcttgggcaagatctgacacac

SEQ ID NO: 4136419 - DNA, 25 bp, Homo sapien
tacaggccggcgattcctgagagct

SEQ ID NO: 4136420 - DNA, 25 bp, Homo sapien
taactaggtgaaagtagatcacagc

SEQ ID NO: 4136421 - DNA, 25 bp, Homo sapien
tatggtggttattgatggcgttgcc

SEQ ID NO: 4136422 - DNA, 25 bp, Homo sapien
tgacagaactcttaacagcgtgctg

SEQ ID NO: 4136423 - DNA, 25 bp, Homo sapien
tgtggaaactccctgttagtacgtc

SEQ ID NO: 4136424 - DNA, 25 bp, Homo sapien
gaggtgatggccagttaatctgctg

SEQ ID NO: 4136425 - DNA, 25 bp, Homo sapien
tcttaagagactgctacccagctgg

SEQ ID NO: 4136426 - DNA, 25 bp, Homo sapien
ccttctggtctaaagctgtgtcctg

SEQ ID NO: 4136427 - DNA, 25 bp, Homo sapien
gcagttcgtgctttggttggccttc

SEQ ID NO: 4136428 - DNA, 25 bp, Homo sapien
ttcaagcgaaagacctgtaagcagg

SEQ ID NO: 4136429 - DNA, 25 bp, Homo sapien
gaacactgcgtgtttcaaagcgacc

SEQ ID NO: 4136430 - DNA, 25 bp, Homo sapien
tgttacagccggacaatctagcttg

SEQ ID NO: 4136431 - DNA, 25 bp, Homo sapien
gtctggaagcctcggaacctgaaca

SEQ ID NO: 4136432 - DNA, 25 bp, Homo sapien
aagaggggcgctatatttagcacag

SEQ ID NO: 4136433 - DNA, 25 bp, Homo sapien
ggggcgctatatttagcacagttct

SEQ ID NO: 4136434 - DNA, 25 bp, Homo sapien
ggaagaggggcgctatatttagcac

SEQ ID NO: 4136435 - DNA, 25 bp, Homo sapien
tccactggaagaggggcgctatatt

SEQ ID NO: 4136436 - DNA, 25 bp, Homo sapien
cagctagagaacaggggcatttaaa

SEQ ID NO: 4136437 - DNA, 25 bp, Homo sapien
caggggcatttaaaaggatgcttga

SEQ ID NO: 4136438 - DNA, 25 bp, Homo sapien
agagaacaggggcatttaaaaggat

SEQ ID NO: 4136439 - DNA, 25 bp, Homo sapien
aaaggatgcttgaagcctgtctcct

SEQ ID NO: 4136440 - DNA, 25 bp, Homo sapien
tctaggaaatcaggtttggaggctc

SEQ ID NO: 4136441 - DNA, 25 bp, Homo sapien
ccttcttaaggcaggacggtggtat

SEQ ID NO: 4136442 - DNA, 25 bp, Homo sapien
ttttgtaaccagtgggcactcagcg

SEQ ID NO: 4136443 - DNA, 25 bp, Homo sapien
ggcagtgctgctcgcccaacattga

SEQ ID NO: 4136444 - DNA, 25 bp, Homo sapien
catccaagttacgttccctggcatt

SEQ ID NO: 4136445 - DNA, 25 bp, Homo sapien
atccaagttacgttccctggcattt

SEQ ID NO: 4136446 - DNA, 25 bp, Homo sapien
gaattcccagaaggaatgtattggc

SEQ ID NO: 4136447 - DNA, 25 bp, Homo sapien
tgaattcccagaaggaatgtattgg

SEQ ID NO: 4136448 - DNA, 25 bp, Homo sapien
atactcagagccagcatcaacccct

SEQ ID NO: 4136449 - DNA, 25 bp, Homo sapien
cttcaatactcagagccagcatcaa

SEQ ID NO: 4136450 - DNA, 25 bp, Homo sapien
tcaatactcagagccagcatcaacc

SEQ ID NO: 4136451 - DNA, 25 bp, Homo sapien
aatactcagagccagcatcaacccc

SEQ ID NO: 4136452 - DNA, 25 bp, Homo sapien
cctttgttgagattgtcgtagcctt

SEQ ID NO: 4136453 - DNA, 25 bp, Homo sapien
tcaaggtagagtggagataggtccc

SEQ ID NO: 4136454 - DNA, 25 bp, Homo sapien
tcgtagcctttgttgagattgtcaa

SEQ ID NO: 4136455 - DNA, 25 bp, Homo sapien
cactgatgagaatgacgtagccttt

SEQ ID NO: 4136456 - DNA, 25 bp, Homo sapien
tcctctgagggagtccctgttttta

SEQ ID NO: 4136457 - DNA, 25 bp, Homo sapien
cttcaggactggctcctctgaggga

SEQ ID NO: 4136458 - DNA, 25 bp, Homo sapien
ggactggctcctctgagggagtccc

SEQ ID NO: 4136459 - DNA, 25 bp, Homo sapien
ctcctctgagggagtccctgttttt

SEQ ID NO: 4136460 - DNA, 25 bp, Homo sapien
ttgcactctagggaggcagtagcag

SEQ ID NO: 4136461 - DNA, 25 bp, Homo sapien
tctgataggggtactggcagccttc

SEQ ID NO: 4136462 - DNA, 25 bp, Homo sapien
ttccttgcactctagggaggcagta

SEQ ID NO: 4136463 - DNA, 25 bp, Homo sapien
gactgaggctgtagaccctggagat

SEQ ID NO: 4136464 - DNA, 25 bp, Homo sapien
tggtgagaacatcttgaaatgggcc

SEQ ID NO: 4136465 - DNA, 25 bp, Homo sapien
cagcagtttactaggggctctttgc

SEQ ID NO: 4136466 - DNA, 25 bp, Homo sapien
gattgaagcttcagccacctttgca

SEQ ID NO: 4136467 - DNA, 25 bp, Homo sapien
tctgccctgggctgattgaagcttc

SEQ ID NO: 4136468 - DNA, 25 bp, Homo sapien
atagcttgcactggcatcctgtcgt

SEQ ID NO: 4136469 - DNA, 25 bp, Homo sapien
cactggcatcctgtcgtgggcagga

SEQ ID NO: 4136470 - DNA, 25 bp, Homo sapien
ttgcactggcatcctgtcgtgggca

SEQ ID NO: 4136471 - DNA, 25 bp, Homo sapien
ttatagcttgcactggcatcctgtc

SEQ ID NO: 4136472 - DNA, 25 bp, Homo sapien
gatccctggatatgataagaacatt

SEQ ID NO: 4136473 - DNA, 25 bp, Homo sapien
ccttaatacaccagagtgaagatcc

SEQ ID NO: 4136474 - DNA, 25 bp, Homo sapien
gaagagccctgtaaaagcaattcct

SEQ ID NO: 4136475 - DNA, 25 bp, Homo sapien
gaagatcctggacttagagtacatg

SEQ ID NO: 4136476 - DNA, 25 bp, Homo sapien
cctttgtctaaagttaccaattcat

SEQ ID NO: 4136477 - DNA, 25 bp, Homo sapien
aaaattttcgaatctgtagaagaat

SEQ ID NO: 4136478 - DNA, 25 bp, Homo sapien
cgttttgctacacttacctcacttg

SEQ ID NO: 4136479 - DNA, 25 bp, Homo sapien
aataacagtaaaatgaacacccatt

SEQ ID NO: 4136480 - DNA, 25 bp, Homo sapien
ggcctgaccagtgagtggacccagg

SEQ ID NO: 4136481 - DNA, 25 bp, Homo sapien
cagggcctgaccagtgagtggaccc

SEQ ID NO: 4136482 - DNA, 25 bp, Homo sapien
cctgaccagtgagtggacccaggcg

SEQ ID NO: 4136483 - DNA, 25 bp, Homo sapien
agggcctgaccagtgagtggaccca

SEQ ID NO: 4136484 - DNA, 25 bp, Homo sapien
tgcttggtggatttcatggacccag

SEQ ID NO: 4136485 - DNA, 25 bp, Homo sapien
ttggtggatttcatggacccagttt

SEQ ID NO: 4136486 - DNA, 25 bp, Homo sapien
ttccagattccaggctcatccaggc

SEQ ID NO: 4136487 - DNA, 25 bp, Homo sapien
atccaggctgatacatggttccttg

SEQ ID NO: 4136488 - DNA, 25 bp, Homo sapien
ttccttgggtcatcctcattcgcct

SEQ ID NO: 4136489 - DNA, 25 bp, Homo sapien
tttccttgggtcatcctcattcgcc

SEQ ID NO: 4136490 - DNA, 25 bp, Homo sapien
gcctcctggacgatcgtagaggcct

SEQ ID NO: 4136491 - DNA, 25 bp, Homo sapien
gacgatcgtagaggcctctgggcca

SEQ ID NO: 4136492 - DNA, 25 bp, Homo sapien
tatgctgacgttttctccaccacag

SEQ ID NO: 4136493 - DNA, 25 bp, Homo sapien
cagtcacctcacacttatgctgacg

SEQ ID NO: 4136494 - DNA, 25 bp, Homo sapien
ctcataaaatggtggctctgtccca

SEQ ID NO: 4136495 - DNA, 25 bp, Homo sapien
caaacctgcaccctcataaaatggt

SEQ ID NO: 4136496 - DNA, 25 bp, Homo sapien
cttctggccttgggcggccccagaa

SEQ ID NO: 4136497 - DNA, 25 bp, Homo sapien
ctgggcttctggccttgggcggccc

SEQ ID NO: 4136498 - DNA, 25 bp, Homo sapien
gggcttctggccttgggcggcccca

SEQ ID NO: 4136499 - DNA, 25 bp, Homo sapien
gcttctggccttgggcggccccaga

SEQ ID NO: 4136500 - DNA, 25 bp, Homo sapien
gactttcgccgtgtgcattgagccg

SEQ ID NO: 4136501 - DNA, 25 bp, Homo sapien
ttcgtcttgtgaaggtctcgcggct

SEQ ID NO: 4136502 - DNA, 25 bp, Homo sapien
cattgagccgtcttcgtggaaccga

SEQ ID NO: 4136503 - DNA, 25 bp, Homo sapien
tccgggacctcctgagaaacttcgc

SEQ ID NO: 4136504 - DNA, 25 bp, Homo sapien
gggagggatgcgccccgctcttcta

SEQ ID NO: 4136505 - DNA, 25 bp, Homo sapien
tcttctagtagctttgttcctcctc

SEQ ID NO: 4136506 - DNA, 25 bp, Homo sapien
agtagctttgttcctcctcgcctgg

SEQ ID NO: 4136507 - DNA, 25 bp, Homo sapien
gatgcgccccgctcttctagtagct

SEQ ID NO: 4136508 - DNA, 25 bp, Homo sapien
attctcccggactttcagtccacaa

SEQ ID NO: 4136509 - DNA, 25 bp, Homo sapien
tctcccggactttcagtccacaacc

SEQ ID NO: 4136510 - DNA, 25 bp, Homo sapien
gaccgggttgcgctttggagaggga

SEQ ID NO: 4136511 - DNA, 25 bp, Homo sapien
cgagccacccggaccgggttgcgct

SEQ ID NO: 4136512 - DNA, 25 bp, Homo sapien
gcgggcgtgaggggcggcggggctg

SEQ ID NO: 4136513 - DNA, 25 bp, Homo sapien
cgggcgtgaggggcggcggggctgg

SEQ ID NO: 4136514 - DNA, 25 bp, Homo sapien
cagagggcgggcgtgaggggcggcg

SEQ ID NO: 4136515 - DNA, 25 bp, Homo sapien
agagggcgggcgtgaggggcggcgg

SEQ ID NO: 4136516 - DNA, 25 bp, Homo sapien
ttaggaaggccatgtttttggcgtc

SEQ ID NO: 4136517 - DNA, 25 bp, Homo sapien
tgtgcaggaggcgccaaggctgggt

SEQ ID NO: 4136518 - DNA, 25 bp, Homo sapien
gaggcgccaaggctgggtttaggaa

SEQ ID NO: 4136519 - DNA, 25 bp, Homo sapien
ccaaggctgggtttaggaaggccat

SEQ ID NO: 4136520 - DNA, 25 bp, Homo sapien
tctgggcgcagggttgggtccgccg

SEQ ID NO: 4136521 - DNA, 25 bp, Homo sapien
ccggtgaattccgtgtagtggccaa

SEQ ID NO: 4136522 - DNA, 25 bp, Homo sapien
gtacgcaccgctccagaactatggg

SEQ ID NO: 4136523 - DNA, 25 bp, Homo sapien
caggttttctgttgtccgccgccct

SEQ ID NO: 4136524 - DNA, 25 bp, Homo sapien
tggagactagacatccgctcttctt

SEQ ID NO: 4136525 - DNA, 25 bp, Homo sapien
ggagactagacatccgctcttcttt

SEQ ID NO: 4136526 - DNA, 25 bp, Homo sapien
cttggagactagacatccgctcttc

SEQ ID NO: 4136527 - DNA, 25 bp, Homo sapien
agactagacatccgctcttcttttc

SEQ ID NO: 4136528 - DNA, 25 bp, Homo sapien
ttgtgcggtcgcagtgcagggtagt

SEQ ID NO: 4136529 - DNA, 25 bp, Homo sapien
cctggcggctttgatctagaaagac

SEQ ID NO: 4136530 - DNA, 25 bp, Homo sapien
ggcggtctccgacctggactgcgcg

SEQ ID NO: 4136531 - DNA, 25 bp, Homo sapien
gaaagacttgttgtgcggtcgcagt

SEQ ID NO: 4136532 - DNA, 25 bp, Homo sapien
tcccacctgaatctttgggtggctc

SEQ ID NO: 4136533 - DNA, 25 bp, Homo sapien
tgcaggggattccacctgtcccagg

SEQ ID NO: 4136534 - DNA, 25 bp, Homo sapien
ctgctgtcccacctgaatctttggg

SEQ ID NO: 4136535 - DNA, 25 bp, Homo sapien
gctgtcccacctgaatctttgggtg

SEQ ID NO: 4136536 - DNA, 25 bp, Homo sapien
atacccaggtccttcttgaggagca

SEQ ID NO: 4136537 - DNA, 25 bp, Homo sapien
tacccaggtccttcttgaggagcat

SEQ ID NO: 4136538 - DNA, 25 bp, Homo sapien
catacccaggtccttcttgaggagc

SEQ ID NO: 4136539 - DNA, 25 bp, Homo sapien
ttcctctatgagtggagactgtttt

SEQ ID NO: 4136540 - DNA, 25 bp, Homo sapien
tgaagatgagctccatcctatagag

SEQ ID NO: 4136541 - DNA, 25 bp, Homo sapien
gctccatcctatagaggctatttcc

SEQ ID NO: 4136542 - DNA, 25 bp, Homo sapien
gctatttcctctatgagtggagact

SEQ ID NO: 4136543 - DNA, 25 bp, Homo sapien
tgaaaacagcattcacgtggagcat

SEQ ID NO: 4136544 - DNA, 25 bp, Homo sapien
gaaaacagcattcacgtggagcatg

SEQ ID NO: 4136545 - DNA, 25 bp, Homo sapien
gtgaaaacagcattcacgtggagca

SEQ ID NO: 4136546 - DNA, 25 bp, Homo sapien
cggcccgccctctccggcaagggct

SEQ ID NO: 4136547 - DNA, 25 bp, Homo sapien
cgccctctccggcaagggctgcagc

SEQ ID NO: 4136548 - DNA, 25 bp, Homo sapien
gtccccgcccgcacagccttctcca

SEQ ID NO: 4136549 - DNA, 25 bp, Homo sapien
ccggcaagggctgcagccgtccccg

SEQ ID NO: 4136550 - DNA, 25 bp, Homo sapien
cggtggcaggagacgcagctgccgc

SEQ ID NO: 4136551 - DNA, 25 bp, Homo sapien
gggcggtggcaggagacgcagctgc

SEQ ID NO: 4136552 - DNA, 25 bp, Homo sapien
tggcaggagacgcagctgccgccca

SEQ ID NO: 4136553 - DNA, 25 bp, Homo sapien
tgccgcccacagctccccgcgccgg

SEQ ID NO: 4136554 - DNA, 25 bp, Homo sapien
tcgatgggcagcttgtcgatccccg

SEQ ID NO: 4136555 - DNA, 25 bp, Homo sapien
tgggcagcttgtcgatccccggcat

SEQ ID NO: 4136556 - DNA, 25 bp, Homo sapien
tcctcgatgggcagcttgtcgatcc

SEQ ID NO: 4136557 - DNA, 25 bp, Homo sapien
tcctccagcgtctcctcgatgggca

SEQ ID NO: 4136558 - DNA, 25 bp, Homo sapien
agtcacggccgcgacacgggcacat

SEQ ID NO: 4136559 - DNA, 25 bp, Homo sapien
cggagcggcgaaggcaccgtccatc

SEQ ID NO: 4136560 - DNA, 25 bp, Homo sapien
gctcgagtgacagcgaccacagtca

SEQ ID NO: 4136561 - DNA, 25 bp, Homo sapien
tgagtttattaaggccaagtctgca

SEQ ID NO: 4136562 - DNA, 25 bp, Homo sapien
agctagagcaaccacatcagcatca

SEQ ID NO: 4136563 - DNA, 25 bp, Homo sapien
ttaagctagagcaaccacatcagca

SEQ ID NO: 4136564 - DNA, 25 bp, Homo sapien
accacatcagcatcattccgacgca

SEQ ID NO: 4136565 - DNA, 25 bp, Homo sapien
ccacatcagcatcattccgacgcac

SEQ ID NO: 4136566 - DNA, 25 bp, Homo sapien
ttaaaagtcttcatattctttgctg

SEQ ID NO: 4136567 - DNA, 25 bp, Homo sapien
aaagtcttcatattctttgctgctc

SEQ ID NO: 4136568 - DNA, 25 bp, Homo sapien
gctgctctgcttcttggactctatt

SEQ ID NO: 4136569 - DNA, 25 bp, Homo sapien
gagctttaaaagtcttcatattctt

SEQ ID NO: 4136570 - DNA, 25 bp, Homo sapien
aatgctaactaggtttttccgaatg

SEQ ID NO: 4136571 - DNA, 25 bp, Homo sapien
tccccaacatggccgactcttcagc

SEQ ID NO: 4136572 - DNA, 25 bp, Homo sapien
taactaggtttttccgaatgcacaa

SEQ ID NO: 4136573 - DNA, 25 bp, Homo sapien
aggtttttccgaatgcacaatttgg

SEQ ID NO: 4136574 - DNA, 25 bp, Homo sapien
cttctacagtttttgctagaagagg

SEQ ID NO: 4136575 - DNA, 25 bp, Homo sapien
ttgctagaagaggccaaaccccttc

SEQ ID NO: 4136576 - DNA, 25 bp, Homo sapien
ctagaagaggccaaaccccttcctg

SEQ ID NO: 4136577 - DNA, 25 bp, Homo sapien
tcttctacagtttttgctagaagag

SEQ ID NO: 4136578 - DNA, 25 bp, Homo sapien
taaatccgatgcatagcttgataca

SEQ ID NO: 4136579 - DNA, 25 bp, Homo sapien
tcttcttcaaatacacctagtaaag

SEQ ID NO: 4136580 - DNA, 25 bp, Homo sapien
gcatagcttgatacaactggttcat

SEQ ID NO: 4136581 - DNA, 25 bp, Homo sapien
tacaactggttcatatagttggaaa

SEQ ID NO: 4136582 - DNA, 25 bp, Homo sapien
tgaggtcaggtgtgttgctgcactt

SEQ ID NO: 4136583 - DNA, 25 bp, Homo sapien
aagttttgaggtcaggtgtgttgct

SEQ ID NO: 4136584 - DNA, 25 bp, Homo sapien
aaagttttgaggtcaggtgtgttgc

SEQ ID NO: 4136585 - DNA, 25 bp, Homo sapien
caggtgtgttgctgcacttaattca

SEQ ID NO: 4136586 - DNA, 25 bp, Homo sapien
ttgaaaactgttgcaatgtagagct

SEQ ID NO: 4136587 - DNA, 25 bp, Homo sapien
aatgtagagctcataacttcatcat

SEQ ID NO: 4136588 - DNA, 25 bp, Homo sapien
tagagctcataacttcatcatcacc

SEQ ID NO: 4136589 - DNA, 25 bp, Homo sapien
catcatcacctcccaatggaaaacg

SEQ ID NO: 4136590 - DNA, 25 bp, Homo sapien
tctgggtacctactcaagagaactg

SEQ ID NO: 4136591 - DNA, 25 bp, Homo sapien
aaaattaccatgcaatgatccagca

SEQ ID NO: 4136592 - DNA, 25 bp, Homo sapien
cagatatataaagagatgaccagat

SEQ ID NO: 4136593 - DNA, 25 bp, Homo sapien
ctgaggcatattacaacatgaatga

SEQ ID NO: 4136594 - DNA, 25 bp, Homo sapien
ttaaactgggtaatggggaacatca

SEQ ID NO: 4136595 - DNA, 25 bp, Homo sapien
ctgggtaatggggaacatcatggca

SEQ ID NO: 4136596 - DNA, 25 bp, Homo sapien
taatggggaacatcatggcatcagc

SEQ ID NO: 4136597 - DNA, 25 bp, Homo sapien
tcatggcatcagcaagttgagttga

SEQ ID NO: 4136598 - DNA, 25 bp, Homo sapien
tgaaagtaaacataagcttgacttc

SEQ ID NO: 4136599 - DNA, 25 bp, Homo sapien
aagtaaacataagcttgacttcaat

SEQ ID NO: 4136600 - DNA, 25 bp, Homo sapien
gtaaacataagcttgacttcaatac

SEQ ID NO: 4136601 - DNA, 25 bp, Homo sapien
caatgaaagtaaacataagcttgac

SEQ ID NO: 4136602 - DNA, 25 bp, Homo sapien
aatctgaaatacttcctttaatgtt

SEQ ID NO: 4136603 - DNA, 25 bp, Homo sapien
aacggctatatctattaatcgcagc

SEQ ID NO: 4136604 - DNA, 25 bp, Homo sapien
gctatatctattaatcgcagcatca

SEQ ID NO: 4136605 - DNA, 25 bp, Homo sapien
gataaacggctatatctattaatcg

SEQ ID NO: 4136606 - DNA, 25 bp, Homo sapien
ttttttgataaacggctatatctat

SEQ ID NO: 4136607 - DNA, 25 bp, Homo sapien
tgagcttgcatgtacccaagtagag

SEQ ID NO: 4136608 - DNA, 25 bp, Homo sapien
tgcatcatggtctggtgttgtttct

SEQ ID NO: 4136609 - DNA, 25 bp, Homo sapien
caaaaataatgcatcatggtctggt

SEQ ID NO: 4136610 - DNA, 25 bp, Homo sapien
gaggttctaacaatgctattttctt

SEQ ID NO: 4136611 - DNA, 25 bp, Homo sapien
tcagaacccatcttaaagaaactta

SEQ ID NO: 4136612 - DNA, 25 bp, Homo sapien
cgcttgttccaatattagctaaaaa

SEQ ID NO: 4136613 - DNA, 25 bp, Homo sapien
taagattttcagaacccatcttaaa

SEQ ID NO: 4136614 - DNA, 25 bp, Homo sapien
tgaacgcttgttccaatattagcta

SEQ ID NO: 4136615 - DNA, 25 bp, Homo sapien
ctgcatatttgtttcgggtatgttt

SEQ ID NO: 4136616 - DNA, 25 bp, Homo sapien
tgcatatttgtttcgggtatgtttt

SEQ ID NO: 4136617 - DNA, 25 bp, Homo sapien
gttgcatggtctctatatcactgtc

SEQ ID NO: 4136618 - DNA, 25 bp, Homo sapien
aaatcctctattgtctgttgcatgg

SEQ ID NO: 4136619 - DNA, 25 bp, Homo sapien
tataagggatcactggctacttcca

SEQ ID NO: 4136620 - DNA, 25 bp, Homo sapien
ttcctagcattaaggtatccagcct

SEQ ID NO: 4136621 - DNA, 25 bp, Homo sapien
aggtagatgacaccaagcctgtttt

SEQ ID NO: 4136622 - DNA, 25 bp, Homo sapien
tcccaggtagatgacaccaagcctg

SEQ ID NO: 4136623 - DNA, 25 bp, Homo sapien
ctgtcccaggtagatgacaccaagc

SEQ ID NO: 4136624 - DNA, 25 bp, Homo sapien
ggtagatgacaccaagcctgtttta

SEQ ID NO: 4136625 - DNA, 25 bp, Homo sapien
acgggcctgactcattaaatttcca

SEQ ID NO: 4136626 - DNA, 25 bp, Homo sapien
tccaccctgcgtgaagtaaaactgt

SEQ ID NO: 4136627 - DNA, 25 bp, Homo sapien
ggtgatctgaaaacaatatcgtctg

SEQ ID NO: 4136628 - DNA, 25 bp, Homo sapien
actgaacagttgtctatgtccatgg

SEQ ID NO: 4136629 - DNA, 25 bp, Homo sapien
ttactctctgcttgcaaaattgaag

SEQ ID NO: 4136630 - DNA, 25 bp, Homo sapien
ttttttactctctgcttgcaaaatt

SEQ ID NO: 4136631 - DNA, 25 bp, Homo sapien
ttttactctctgcttgcaaaattga

SEQ ID NO: 4136632 - DNA, 25 bp, Homo sapien
tactctctgcttgcaaaattgaaga

SEQ ID NO: 4136633 - DNA, 25 bp, Homo sapien
ccatatctgatatactaggagtaaa

SEQ ID NO: 4136634 - DNA, 25 bp, Homo sapien
tctgatatactaggagtaaaaatgg

SEQ ID NO: 4136635 - DNA, 25 bp, Homo sapien
cttccatatctgatatactaggagt

SEQ ID NO: 4136636 - DNA, 25 bp, Homo sapien
ctgatatactaggagtaaaaatgga

SEQ ID NO: 4136637 - DNA, 25 bp, Homo sapien
taagtatatttgtttagatatgttg

SEQ ID NO: 4136638 - DNA, 25 bp, Homo sapien
aagtatatttgtttagatatgttgt

SEQ ID NO: 4136639 - DNA, 25 bp, Homo sapien
gctgattgatttactcgtgcagcag

SEQ ID NO: 4136640 - DNA, 25 bp, Homo sapien
tgattgatttactcgtgcagcagtt

SEQ ID NO: 4136641 - DNA, 25 bp, Homo sapien
attgatttactcgtgcagcagtttc

SEQ ID NO: 4136642 - DNA, 25 bp, Homo sapien
agagctgattgatttactcgtgcag

SEQ ID NO: 4136643 - DNA, 25 bp, Homo sapien
ctgctgctggccgcaggctctcgtg

SEQ ID NO: 4136644 - DNA, 25 bp, Homo sapien
ctggccgcaggctctcgtgcctctg

SEQ ID NO: 4136645 - DNA, 25 bp, Homo sapien
ctgctggccgcaggctctcgtgcct

SEQ ID NO: 4136646 - DNA, 25 bp, Homo sapien
tgctgctggccgcaggctctcgtgc

SEQ ID NO: 4136647 - DNA, 25 bp, Homo sapien
gagaaattatgtcaaactgtattgg

SEQ ID NO: 4136648 - DNA, 25 bp, Homo sapien
tgaactgctggttcgagctgtcggt

SEQ ID NO: 4136649 - DNA, 25 bp, Homo sapien
gagaatctagagagagggcagccaa

SEQ ID NO: 4136650 - DNA, 25 bp, Homo sapien
aatttgtagactcagatcctaagga

SEQ ID NO: 4136651 - DNA, 25 bp, Homo sapien
ggtcagttaccatgagccacataga

SEQ ID NO: 4136652 - DNA, 25 bp, Homo sapien
tggtgcactttagaagacacagatg

SEQ ID NO: 4136653 - DNA, 25 bp, Homo sapien
cactaactgatcaatgttggtgcac

SEQ ID NO: 4136654 - DNA, 25 bp, Homo sapien
gacacagatgaattggaagtttaga

SEQ ID NO: 4136655 - DNA, 25 bp, Homo sapien
gtttcagattttgtacttcctccag

SEQ ID NO: 4136656 - DNA, 25 bp, Homo sapien
cagtttcagattttgtacttcctcc

SEQ ID NO: 4136657 - DNA, 25 bp, Homo sapien
tacttcctccagattctccaaatgg

SEQ ID NO: 4136658 - DNA, 25 bp, Homo sapien
agattctccaaatggatttgtacgc

SEQ ID NO: 4136659 - DNA, 25 bp, Homo sapien
taaatgcgattctgtcatacgaaag

SEQ ID NO: 4136660 - DNA, 25 bp, Homo sapien
cccgggcagctaagatttggcgcat

SEQ ID NO: 4136661 - DNA, 25 bp, Homo sapien
gatttcacctccattgaaccaagga

SEQ ID NO: 4136662 - DNA, 25 bp, Homo sapien
aaagatgttatggatggcccgggca

SEQ ID NO: 4136663 - DNA, 25 bp, Homo sapien
ccttgtaacttgtgtctgtggatca

SEQ ID NO: 4136664 - DNA, 25 bp, Homo sapien
cgtgagccttgtaacttgtgtctgt

SEQ ID NO: 4136665 - DNA, 25 bp, Homo sapien
gagccttgtaacttgtgtctgtgga

SEQ ID NO: 4136666 - DNA, 25 bp, Homo sapien
tgagccttgtaacttgtgtctgtgg

SEQ ID NO: 4136667 - DNA, 25 bp, Homo sapien
ctacaacagccaaagaccaatcata

SEQ ID NO: 4136668 - DNA, 25 bp, Homo sapien
gaccaatcatagctgatactatcac

SEQ ID NO: 4136669 - DNA, 25 bp, Homo sapien
tggccatagacttaactacaacagc

SEQ ID NO: 4136670 - DNA, 25 bp, Homo sapien
cacacttgaatatacaggatcagga

SEQ ID NO: 4136671 - DNA, 25 bp, Homo sapien
caaatatatagcagactgatgacag

SEQ ID NO: 4136672 - DNA, 25 bp, Homo sapien
gattactttcacttctcccgcttga

SEQ ID NO: 4136673 - DNA, 25 bp, Homo sapien
cccgcttgatgtccgaagaacaaat

SEQ ID NO: 4136674 - DNA, 25 bp, Homo sapien
caaaaaggcgcttattttcctggtg

SEQ ID NO: 4136675 - DNA, 25 bp, Homo sapien
gctaatgctattctcagctgaagac

SEQ ID NO: 4136676 - DNA, 25 bp, Homo sapien
cagctgctaatgctattctcagctg

SEQ ID NO: 4136677 - DNA, 25 bp, Homo sapien
ccaacataatgtttggttcccaaca

SEQ ID NO: 4136678 - DNA, 25 bp, Homo sapien
cataatgtttggttcccaacataaa

SEQ ID NO: 4136679 - DNA, 25 bp, Homo sapien
tgttatgtcaaattcattactgtca

SEQ ID NO: 4136680 - DNA, 25 bp, Homo sapien
ttgttatgtcaaattcattactgtc

SEQ ID NO: 4136681 - DNA, 25 bp, Homo sapien
gttatgtcaaattcattactgtcac

SEQ ID NO: 4136682 - DNA, 25 bp, Homo sapien
tatgtcaaattcattactgtcacag

SEQ ID NO: 4136683 - DNA, 25 bp, Homo sapien
tcagcatgcaaagctatctgttttg

SEQ ID NO: 4136684 - DNA, 25 bp, Homo sapien
cagttcagcatgcaaagctatctgt

SEQ ID NO: 4136685 - DNA, 25 bp, Homo sapien
ttgccagtccaacagaatcacatat

SEQ ID NO: 4136686 - DNA, 25 bp, Homo sapien
tgttttgccagtccaacagaatcac

SEQ ID NO: 4136687 - DNA, 25 bp, Homo sapien
agtatcactgttaaccttgcttagc

SEQ ID NO: 4136688 - DNA, 25 bp, Homo sapien
tttcagttaatatcacatggtaacc

SEQ ID NO: 4136689 - DNA, 25 bp, Homo sapien
gaaagagctaatatactattttagt

SEQ ID NO: 4136690 - DNA, 25 bp, Homo sapien
caaattctaaatgctatgttggtaa

SEQ ID NO: 4136691 - DNA, 25 bp, Homo sapien
tttgtttattgagttctttctgttg

SEQ ID NO: 4136692 - DNA, 25 bp, Homo sapien
gtttattgagttctttctgttgctt

SEQ ID NO: 4136693 - DNA, 25 bp, Homo sapien
caatctgtttttgtttattgagttc

SEQ ID NO: 4136694 - DNA, 25 bp, Homo sapien
ttctgttgcttctcttttactctct

SEQ ID NO: 4136695 - DNA, 25 bp, Homo sapien
tattgatctgttctaagcatcccag

SEQ ID NO: 4136696 - DNA, 25 bp, Homo sapien
tcagcctcgcctatcaagaaagcct

SEQ ID NO: 4136697 - DNA, 25 bp, Homo sapien
taacacgctcttacaatttcatgga

SEQ ID NO: 4136698 - DNA, 25 bp, Homo sapien
gtcaatctacaacccataacacgct

SEQ ID NO: 4136699 - DNA, 25 bp, Homo sapien
tggtttggtctactggaagcagcta

SEQ ID NO: 4136700 - DNA, 25 bp, Homo sapien
aaactgcccctcactactggcttgg

SEQ ID NO: 4136701 - DNA, 25 bp, Homo sapien
gcccctcactactggcttggtttgg

SEQ ID NO: 4136702 - DNA, 25 bp, Homo sapien
tatcaaccgactttgttcttccaag

SEQ ID NO: 4136703 - DNA, 25 bp, Homo sapien
gaatgcacttcgatctgacctatgg

SEQ ID NO: 4136704 - DNA, 25 bp, Homo sapien
tctgcagcagtaattgaagtcccaa

SEQ ID NO: 4136705 - DNA, 25 bp, Homo sapien
taaagctgcctcctaatgatgaaca

SEQ ID NO: 4136706 - DNA, 25 bp, Homo sapien
taccacccctagattgtagagcctg

SEQ ID NO: 4136707 - DNA, 25 bp, Homo sapien
aaaataagttctccaccccacatgt

SEQ ID NO: 4136708 - DNA, 25 bp, Homo sapien
taccatgatcacataaagtcgagtt

SEQ ID NO: 4136709 - DNA, 25 bp, Homo sapien
caatctgaatgctaagaggctgttt

SEQ ID NO: 4136710 - DNA, 25 bp, Homo sapien
aaatttcatgagtgaagccacagag

SEQ ID NO: 4136711 - DNA, 25 bp, Homo sapien
gaaactataaagagcacatgggatg

SEQ ID NO: 4136712 - DNA, 25 bp, Homo sapien
taagtaggaccaaacagtagcaagt

SEQ ID NO: 4136713 - DNA, 25 bp, Homo sapien
ggtatgcacaataacctgcccctgt

SEQ ID NO: 4136714 - DNA, 25 bp, Homo sapien
tccaagctatactgtggtatgcaca

SEQ ID NO: 4136715 - DNA, 25 bp, Homo sapien
gctatcaaatacgtttgctaacaaa

SEQ ID NO: 4136716 - DNA, 25 bp, Homo sapien
tcacaggccagatccatgattgatg

SEQ ID NO: 4136717 - DNA, 25 bp, Homo sapien
aactgtttccctattgactttgcca

SEQ ID NO: 4136718 - DNA, 25 bp, Homo sapien
gattctaacttgacatggctctgga

SEQ ID NO: 4136719 - DNA, 25 bp, Homo sapien
caagttcggatctgttcaaagttga

SEQ ID NO: 4136720 - DNA, 25 bp, Homo sapien
tgtcatggctgcaacatctctctgg

SEQ ID NO: 4136721 - DNA, 25 bp, Homo sapien
taagtacagttgaccactaccatcc

SEQ ID NO: 4136722 - DNA, 25 bp, Homo sapien
caaagttgaaagctgtgctccaaaa

SEQ ID NO: 4136723 - DNA, 25 bp, Homo sapien
aagacccggttaactgcctccagat

SEQ ID NO: 4136724 - DNA, 25 bp, Homo sapien
gagctctgcctaatcaagacccggt

SEQ ID NO: 4136725 - DNA, 25 bp, Homo sapien
taacaaacactacgatgaccacagg

SEQ ID NO: 4136726 - DNA, 25 bp, Homo sapien
tagacaatatgggaagcctcaggcc

SEQ ID NO: 4136727 - DNA, 25 bp, Homo sapien
tctgaaccatagaccctggccaagt

SEQ ID NO: 4136728 - DNA, 25 bp, Homo sapien
cttgctggagtatggagctgatgcc

SEQ ID NO: 4136729 - DNA, 25 bp, Homo sapien
ggctttgagtcagcacatcgtgtga

SEQ ID NO: 4136730 - DNA, 25 bp, Homo sapien
gctaatgctcatggtcaggcctctg

SEQ ID NO: 4136731 - DNA, 25 bp, Homo sapien
tgctgcgtgactgctatgacatggc

SEQ ID NO: 4136732 - DNA, 25 bp, Homo sapien
gaagaactccttaagaaagcctgag

SEQ ID NO: 4136733 - DNA, 25 bp, Homo sapien
cccacagagcacgtatggattcact

SEQ ID NO: 4136734 - DNA, 25 bp, Homo sapien
gttgtgccaacgagaggacagctct

SEQ ID NO: 4136735 - DNA, 25 bp, Homo sapien
tcagaggggagcagaattacctcat

SEQ ID NO: 4136736 - DNA, 25 bp, Homo sapien
gggagcagaattacctcatggagca

SEQ ID NO: 4136737 - DNA, 25 bp, Homo sapien
gaggggagcagaattacctcatgga

SEQ ID NO: 4136738 - DNA, 25 bp, Homo sapien
agcagaattacctcatggagcaggg

SEQ ID NO: 4136739 - DNA, 25 bp, Homo sapien
catagttgcagcactgtcactctgt

SEQ ID NO: 4136740 - DNA, 25 bp, Homo sapien
caactgaccagacatgggtaccgac

SEQ ID NO: 4136741 - DNA, 25 bp, Homo sapien
caatggctgcaatccaaatgctaag

SEQ ID NO: 4136742 - DNA, 25 bp, Homo sapien
gatgcaaaacctctgcccagttaag

SEQ ID NO: 4136743 - DNA, 25 bp, Homo sapien
cttcagaccccagtctgtgggagca

SEQ ID NO: 4136744 - DNA, 25 bp, Homo sapien
ttcagcttcagaccccagtctgtgg

SEQ ID NO: 4136745 - DNA, 25 bp, Homo sapien
gaccccagtctgtgggagcaaacca

SEQ ID NO: 4136746 - DNA, 25 bp, Homo sapien
cagaccccagtctgtgggagcaaac

SEQ ID NO: 4136747 - DNA, 25 bp, Homo sapien
cagaggtagtacaagtagctgacca

SEQ ID NO: 4136748 - DNA, 25 bp, Homo sapien
tgccttgtgggtctttacagctttc

SEQ ID NO: 4136749 - DNA, 25 bp, Homo sapien
gcctggcatgtactaagcacttagt

SEQ ID NO: 4136750 - DNA, 25 bp, Homo sapien
gctgaccacagacactaatgacact

SEQ ID NO: 4136751 - DNA, 25 bp, Homo sapien
tgtccttccccaatcaatgttcttg

SEQ ID NO: 4136752 - DNA, 25 bp, Homo sapien
caccttgggtagtagagtcatttta

SEQ ID NO: 4136753 - DNA, 25 bp, Homo sapien
ttttggctatttgcggtctttcgtg

SEQ ID NO: 4136754 - DNA, 25 bp, Homo sapien
tagtatatttcgaagcctggtactg

SEQ ID NO: 4136755 - DNA, 25 bp, Homo sapien
tctgcatgtgctggcggatacgcta

SEQ ID NO: 4136756 - DNA, 25 bp, Homo sapien
tactatgggccaactttttggacag

SEQ ID NO: 4136757 - DNA, 25 bp, Homo sapien
cccagtgtctcatgaggtaacctaa

SEQ ID NO: 4136758 - DNA, 25 bp, Homo sapien
ggagagccttttgctgctaagacaa

SEQ ID NO: 4136759 - DNA, 25 bp, Homo sapien
tctcgaactcctgactttatgatct

SEQ ID NO: 4136760 - DNA, 25 bp, Homo sapien
ggagtgcagtggtgaggttttggct

SEQ ID NO: 4136761 - DNA, 25 bp, Homo sapien
cgaactcctgactttatgatctgcc

SEQ ID NO: 4136762 - DNA, 25 bp, Homo sapien
gagtgcagtggtgaggttttggctc

SEQ ID NO: 4136763 - DNA, 25 bp, Homo sapien
gagttgagttcaatttctggatatc

SEQ ID NO: 4136764 - DNA, 25 bp, Homo sapien
tgcagagttgagttcaatttctgga

SEQ ID NO: 4136765 - DNA, 25 bp, Homo sapien
gttgagttcaatttctggatatcct

SEQ ID NO: 4136766 - DNA, 25 bp, Homo sapien
cagagttgagttcaatttctggata

SEQ ID NO: 4136767 - DNA, 25 bp, Homo sapien
gactggtcaagtacccaataatgag

SEQ ID NO: 4136768 - DNA, 25 bp, Homo sapien
tcattccaattttagtatatgtgct

SEQ ID NO: 4136769 - DNA, 25 bp, Homo sapien
cacgaatttgtgtccatccttgcac

SEQ ID NO: 4136770 - DNA, 25 bp, Homo sapien
tgcttcacgaatttgtgtccatcct

SEQ ID NO: 4136771 - DNA, 25 bp, Homo sapien
aggggccatgctgatcttctctgta

SEQ ID NO: 4136772 - DNA, 25 bp, Homo sapien
gctattaaaaaggatgtacatcggc

SEQ ID NO: 4136773 - DNA, 25 bp, Homo sapien
cacacttttggaaacattggctatt

SEQ ID NO: 4136774 - DNA, 25 bp, Homo sapien
tctgcattatctgtagttttatagc

SEQ ID NO: 4136775 - DNA, 25 bp, Homo sapien
aaaggatgtacatcggccaggcgtg

SEQ ID NO: 4136776 - DNA, 25 bp, Homo sapien
gttttaatattatgtgctgccgaaa

SEQ ID NO: 4136777 - DNA, 25 bp, Homo sapien
gactcgcactttcgcctagcgcgtg

SEQ ID NO: 4136778 - DNA, 25 bp, Homo sapien
gaggccgccggctttgactcattca

SEQ ID NO: 4136779 - DNA, 25 bp, Homo sapien
gatcagcggcctactgtcaggtgga

SEQ ID NO: 4136780 - DNA, 25 bp, Homo sapien
cgtgggcacgcatgtctgtaatact

SEQ ID NO: 4136781 - DNA, 25 bp, Homo sapien
gctcccgccgctgtctggctccccg

SEQ ID NO: 4136782 - DNA, 25 bp, Homo sapien
ttctccaccgccgtccggatcaccc

SEQ ID NO: 4136783 - DNA, 25 bp, Homo sapien
ggatcacccgaagcgcggcgcgggc

SEQ ID NO: 4136784 - DNA, 25 bp, Homo sapien
ccgccgctgtctggctccccgcttc

SEQ ID NO: 4136785 - DNA, 25 bp, Homo sapien
tcctgcgctgatgggtacaaaacta

SEQ ID NO: 4136786 - DNA, 25 bp, Homo sapien
cttcgtgtagagatgccggtggtca

SEQ ID NO: 4136787 - DNA, 25 bp, Homo sapien
tcagcttgggttccgaaggtacgca

SEQ ID NO: 4136788 - DNA, 25 bp, Homo sapien
gcgggatccccaaattcgaggctga

SEQ ID NO: 4136789 - DNA, 25 bp, Homo sapien
catatccttttagaagagtcctttg

SEQ ID NO: 4136790 - DNA, 25 bp, Homo sapien
cctttgtagactgaagaactgaaac

SEQ ID NO: 4136791 - DNA, 25 bp, Homo sapien
cagtaaagatgggtattagcaacac

SEQ ID NO: 4136792 - DNA, 25 bp, Homo sapien
tagcaacacatatccttttagaaga

SEQ ID NO: 4136793 - DNA, 25 bp, Homo sapien
ttaagtcacttgtgataccaaataa

SEQ ID NO: 4136794 - DNA, 25 bp, Homo sapien
taagtcacttgtgataccaaataaa

SEQ ID NO: 4136795 - DNA, 25 bp, Homo sapien
tacagtctctgggtgacgttcaaga

SEQ ID NO: 4136796 - DNA, 25 bp, Homo sapien
aattacagtctctgggtgacgttca

SEQ ID NO: 4136797 - DNA, 25 bp, Homo sapien
aaaactacacaaattacagtctctg

SEQ ID NO: 4136798 - DNA, 25 bp, Homo sapien
tacacaaattacagtctctgggtga

SEQ ID NO: 4136799 - DNA, 25 bp, Homo sapien
cacaaaatataactggtatgccagg

SEQ ID NO: 4136800 - DNA, 25 bp, Homo sapien
ccatttgaatgaggcgaatataccc

SEQ ID NO: 4136801 - DNA, 25 bp, Homo sapien
tcttcatgatcctctggaatgctgc

SEQ ID NO: 4136802 - DNA, 25 bp, Homo sapien
catgtcttatgtgagccaaggctac

SEQ ID NO: 4136803 - DNA, 25 bp, Homo sapien
ggaatcacctgttcaacctctaaag

SEQ ID NO: 4136804 - DNA, 25 bp, Homo sapien
gatgggaaacactaggtaaggcctg

SEQ ID NO: 4136805 - DNA, 25 bp, Homo sapien
tgtaagcaggttcaccacaagcact

SEQ ID NO: 4136806 - DNA, 25 bp, Homo sapien
taatctagacatccatgaaagccac

SEQ ID NO: 4136807 - DNA, 25 bp, Homo sapien
tgtgtcaagtctctcaccttaggtc

SEQ ID NO: 4136808 - DNA, 25 bp, Homo sapien
catcaggaacataactaggagggct

SEQ ID NO: 4136809 - DNA, 25 bp, Homo sapien
aatgttactccttccatgtgtcaag

SEQ ID NO: 4136810 - DNA, 25 bp, Homo sapien
ctaaattgaggtagaggtagaccct

SEQ ID NO: 4136811 - DNA, 25 bp, Homo sapien
taaacaagatccgaagaaacttcca

SEQ ID NO: 4136812 - DNA, 25 bp, Homo sapien
tcagagatgcttaaaagtcccacta

SEQ ID NO: 4136813 - DNA, 25 bp, Homo sapien
catggttaccactctaggctagaca

SEQ ID NO: 4136814 - DNA, 25 bp, Homo sapien
caatgtcaaatgcagataaaacccc

SEQ ID NO: 4136815 - DNA, 25 bp, Homo sapien
ctgctgttaaaatgctctcaaaaat

SEQ ID NO: 4136816 - DNA, 25 bp, Homo sapien
aaactgctgttaaaatgctctcaaa

SEQ ID NO: 4136817 - DNA, 25 bp, Homo sapien
aactgctgttaaaatgctctcaaaa

SEQ ID NO: 4136818 - DNA, 25 bp, Homo sapien
actgctgttaaaatgctctcaaaaa

SEQ ID NO: 4136819 - DNA, 25 bp, Homo sapien
gatcacagtatatggcacttcacaa

SEQ ID NO: 4136820 - DNA, 25 bp, Homo sapien
cattacagccagaaacgattgtttg

SEQ ID NO: 4136821 - DNA, 25 bp, Homo sapien
ggtttaccatagaaagtcgctagat

SEQ ID NO: 4136822 - DNA, 25 bp, Homo sapien
gacacatttgctgtagcggcaactg

SEQ ID NO: 4136823 - DNA, 25 bp, Homo sapien
tatatataaatattggatttatccc

SEQ ID NO: 4136824 - DNA, 25 bp, Homo sapien
tataaatattggatttatcccaacc

SEQ ID NO: 4136825 - DNA, 25 bp, Homo sapien
tattggatttatcccaaccaaacta

SEQ ID NO: 4136826 - DNA, 25 bp, Homo sapien
taaatattggatttatcccaaccaa

SEQ ID NO: 4136827 - DNA, 25 bp, Homo sapien
ttatggaaggttgggcttgtaatct

SEQ ID NO: 4136828 - DNA, 25 bp, Homo sapien
ttcagttatggaaggttgggcttgt

SEQ ID NO: 4136829 - DNA, 25 bp, Homo sapien
attttctgagttgtcacatgggtct

SEQ ID NO: 4136830 - DNA, 25 bp, Homo sapien
tggaaggttgggcttgtaatctcaa

SEQ ID NO: 4136831 - DNA, 25 bp, Homo sapien
caagcagtactgtatggttattttg

SEQ ID NO: 4136832 - DNA, 25 bp, Homo sapien
cagaacttatatattacccatgtca

SEQ ID NO: 4136833 - DNA, 25 bp, Homo sapien
aatctagagtggttttttgaagaca

SEQ ID NO: 4136834 - DNA, 25 bp, Homo sapien
taaaatcacgaagttaatacagctc

SEQ ID NO: 4136835 - DNA, 25 bp, Homo sapien
catcattaaagtgaattactgggca

SEQ ID NO: 4136836 - DNA, 25 bp, Homo sapien
tggtatgaaactagcacaaatgcaa

SEQ ID NO: 4136837 - DNA, 25 bp, Homo sapien
taacactgacagtatgaacatggat

SEQ ID NO: 4136838 - DNA, 25 bp, Homo sapien
tttgacaacccagaatttgctagca

SEQ ID NO: 4136839 - DNA, 25 bp, Homo sapien
ctgcttgaactgagaatttcaagac

SEQ ID NO: 4136840 - DNA, 25 bp, Homo sapien
tatagatggccaacgagcacatgaa

SEQ ID NO: 4136841 - DNA, 25 bp, Homo sapien
gcaaaatagtgcaactgctttccgt

SEQ ID NO: 4136842 - DNA, 25 bp, Homo sapien
tccattccctgtatgtgcccaagag

SEQ ID NO: 4136843 - DNA, 25 bp, Homo sapien
gacaggttaagttgttgccaggagc

SEQ ID NO: 4136844 - DNA, 25 bp, Homo sapien
gaaagatttgcctcccggatggtcc

SEQ ID NO: 4136845 - DNA, 25 bp, Homo sapien
tcccggatggtcctgaaaaggcaag

SEQ ID NO: 4136846 - DNA, 25 bp, Homo sapien
tgcctcccggatggtcctgaaaagg

SEQ ID NO: 4136847 - DNA, 25 bp, Homo sapien
tttgcctcccggatggtcctgaaaa

SEQ ID NO: 4136848 - DNA, 25 bp, Homo sapien
acttggcagcatcagagttgaggat

SEQ ID NO: 4136849 - DNA, 25 bp, Homo sapien
gattcccttacaggatcacttggca

SEQ ID NO: 4136850 - DNA, 25 bp, Homo sapien
tattgagagataacccctagccttt

SEQ ID NO: 4136851 - DNA, 25 bp, Homo sapien
tgaccgcccctattgtacagaacag

SEQ ID NO: 4136852 - DNA, 25 bp, Homo sapien
tcccataagcgtaaatgcctggaca

SEQ ID NO: 4136853 - DNA, 25 bp, Homo sapien
ggacatagctcttgtgcaaccttta

SEQ ID NO: 4136854 - DNA, 25 bp, Homo sapien
taatactgcttgtaccagccagaga

SEQ ID NO: 4136855 - DNA, 25 bp, Homo sapien
ttttgagtgttttttgagccccaga

SEQ ID NO: 4136856 - DNA, 25 bp, Homo sapien
actagttgcttcctaattccttcca

SEQ ID NO: 4136857 - DNA, 25 bp, Homo sapien
ccccttttctagctgaaaattctat

SEQ ID NO: 4136858 - DNA, 25 bp, Homo sapien
tctatactttcccatttgaaagttc

SEQ ID NO: 4136859 - DNA, 25 bp, Homo sapien
cagttcaactagttgcttcctaatt

SEQ ID NO: 4136860 - DNA, 25 bp, Homo sapien
tgtcactttgggactgatagcatta

SEQ ID NO: 4136861 - DNA, 25 bp, Homo sapien
tctcaataatgtcactttgggactg

SEQ ID NO: 4136862 - DNA, 25 bp, Homo sapien
tctccttctcaataatgtcactttg

SEQ ID NO: 4136863 - DNA, 25 bp, Homo sapien
ttgggactgatagcattatttgcat

SEQ ID NO: 4136864 - DNA, 25 bp, Homo sapien
ctggcaagacaaccattctgtataa

SEQ ID NO: 4136865 - DNA, 25 bp, Homo sapien
gctggcaagacaaccattctgtata

SEQ ID NO: 4136866 - DNA, 25 bp, Homo sapien
tagataagattcatgccctcctgag

SEQ ID NO: 4136867 - DNA, 25 bp, Homo sapien
tcatcaaaggaagtatcaacgtacg

SEQ ID NO: 4136868 - DNA, 25 bp, Homo sapien
caacgtacgagggagatatgtgcat

SEQ ID NO: 4136869 - DNA, 25 bp, Homo sapien
caagatcgacatttatggtaactca

SEQ ID NO: 4136870 - DNA, 25 bp, Homo sapien
cattggtatgtaagccagcggccac

SEQ ID NO: 4136871 - DNA, 25 bp, Homo sapien
tcactttgctaaacttggccttgcg

SEQ ID NO: 4136872 - DNA, 25 bp, Homo sapien
cagggagcacccaaggtttccgaag

SEQ ID NO: 4136873 - DNA, 25 bp, Homo sapien
tggagtccttcagcgctcactttgc

SEQ ID NO: 4136874 - DNA, 25 bp, Homo sapien
tctcccgactatttggcaagaagca

SEQ ID NO: 4136875 - DNA, 25 bp, Homo sapien
ccctctcgtttagtttgcctgggag

SEQ ID NO: 4136876 - DNA, 25 bp, Homo sapien
tagcaggtcctctaccggcttattc

SEQ ID NO: 4136877 - DNA, 25 bp, Homo sapien
ggcttattcctgtgccggatcttca

SEQ ID NO: 4136878 - DNA, 25 bp, Homo sapien
ggccgggccgctgctggagtcgccg

SEQ ID NO: 4136879 - DNA, 25 bp, Homo sapien
tctgtccgcgttggaggggccgggc

SEQ ID NO: 4136880 - DNA, 25 bp, Homo sapien
gattctgtccgcgttggaggggccg

SEQ ID NO: 4136881 - DNA, 25 bp, Homo sapien
cgccgcgtgacgtggcacagccaga

SEQ ID NO: 4136882 - DNA, 25 bp, Homo sapien
tgtccgtctcccagtacgcatgtgc

SEQ ID NO: 4136883 - DNA, 25 bp, Homo sapien
tttggcagtgacgaagcgaggtatt

SEQ ID NO: 4136884 - DNA, 25 bp, Homo sapien
tgctcgtcagcgaaactggccaatc

SEQ ID NO: 4136885 - DNA, 25 bp, Homo sapien
tggcgccgtcgagagatgctcgtca

SEQ ID NO: 4136886 - DNA, 25 bp, Homo sapien
tcagctcgcctttccggaagcaagg

SEQ ID NO: 4136887 - DNA, 25 bp, Homo sapien
taacccataatgctcagctcgcctt

SEQ ID NO: 4136888 - DNA, 25 bp, Homo sapien
tccggaagcaaggactatcaccccg

SEQ ID NO: 4136889 - DNA, 25 bp, Homo sapien
ataatgctcagctcgcctttccgga

SEQ ID NO: 4136890 - DNA, 25 bp, Homo sapien
aatagaagagggcgaggttcctcac

SEQ ID NO: 4136891 - DNA, 25 bp, Homo sapien
cgtaatagaagagggcgaggttcct

SEQ ID NO: 4136892 - DNA, 25 bp, Homo sapien
gtaatagaagagggcgaggttcctc

SEQ ID NO: 4136893 - DNA, 25 bp, Homo sapien
taatagaagagggcgaggttcctca

SEQ ID NO: 4136894 - DNA, 25 bp, Homo sapien
aatcacttggcgtggtggtcgaagc

SEQ ID NO: 4136895 - DNA, 25 bp, Homo sapien
tcatgcgtcaactaaagcaagcgtc

SEQ ID NO: 4136896 - DNA, 25 bp, Homo sapien
caagcgtctggtcccgtgtgtgaaa

SEQ ID NO: 4136897 - DNA, 25 bp, Homo sapien
atgaacacgtgttggagcgctctcg

SEQ ID NO: 4136898 - DNA, 25 bp, Homo sapien
aggttgagtaagccgagatgatgcc

SEQ ID NO: 4136899 - DNA, 25 bp, Homo sapien
atcccaggaggttgagtaagccgag

SEQ ID NO: 4136900 - DNA, 25 bp, Homo sapien
gaggttgagtaagccgagatgatgc

SEQ ID NO: 4136901 - DNA, 25 bp, Homo sapien
ttgatcccaggaggttgagtaagcc

SEQ ID NO: 4136902 - DNA, 25 bp, Homo sapien
tgtattgatgaaaggtgaatagaaa

SEQ ID NO: 4136903 - DNA, 25 bp, Homo sapien
tattgatgaaaggtgaatagaaaaa

SEQ ID NO: 4136904 - DNA, 25 bp, Homo sapien
gtattgatgaaaggtgaatagaaaa

SEQ ID NO: 4136905 - DNA, 25 bp, Homo sapien
ttgtattgatgaaaggtgaatagaa

SEQ ID NO: 4136906 - DNA, 25 bp, Homo sapien
tgtgctgcaacttggacacattccc

SEQ ID NO: 4136907 - DNA, 25 bp, Homo sapien
caaggcaataaactgggacaatctc

SEQ ID NO: 4136908 - DNA, 25 bp, Homo sapien
ggtatccagtgtcttcaaaaaccat

SEQ ID NO: 4136909 - DNA, 25 bp, Homo sapien
gtcttggctagaagtgagagtccca

SEQ ID NO: 4136910 - DNA, 25 bp, Homo sapien
tatctcttttgagtgattattaagt

SEQ ID NO: 4136911 - DNA, 25 bp, Homo sapien
ttatctcttttgagtgattattaag

SEQ ID NO: 4136912 - DNA, 25 bp, Homo sapien
catgagccaccataatggaatattt

SEQ ID NO: 4136913 - DNA, 25 bp, Homo sapien
caaggctattaaggtagtctgtttc

SEQ ID NO: 4136914 - DNA, 25 bp, Homo sapien
ggacgtagaattttctatgggatgg

SEQ ID NO: 4136915 - DNA, 25 bp, Homo sapien
gcagttaagctatttggacgtagaa

SEQ ID NO: 4136916 - DNA, 25 bp, Homo sapien
cagaatgagttggaagtttgtgtca

SEQ ID NO: 4136917 - DNA, 25 bp, Homo sapien
aaatgatagttctatttttactact

SEQ ID NO: 4136918 - DNA, 25 bp, Homo sapien
attgctaggtcaaatgatagttcta

SEQ ID NO: 4136919 - DNA, 25 bp, Homo sapien
ttactactttttattagacaggatc

SEQ ID NO: 4136920 - DNA, 25 bp, Homo sapien
tactactttttattagacaggatct

SEQ ID NO: 4136921 - DNA, 25 bp, Homo sapien
ccaaccttgccaagggaagtgctaa

SEQ ID NO: 4136922 - DNA, 25 bp, Homo sapien
ttccaaccttgccaagggaagtgct

SEQ ID NO: 4136923 - DNA, 25 bp, Homo sapien
tcttccaaccttgccaagggaagtg

SEQ ID NO: 4136924 - DNA, 25 bp, Homo sapien
ggcctcttccaaccttgccaaggga

SEQ ID NO: 4136925 - DNA, 25 bp, Homo sapien
gaaactgagtggtgttagccctcca

SEQ ID NO: 4136926 - DNA, 25 bp, Homo sapien
tagttcaaaatagtagtacggtcca

SEQ ID NO: 4136927 - DNA, 25 bp, Homo sapien
tttctacacaaattcctgctgggat

SEQ ID NO: 4136928 - DNA, 25 bp, Homo sapien
tctgaaccatgaacaaagtatatgt

SEQ ID NO: 4136929 - DNA, 25 bp, Homo sapien
gatttagttctacttatgaatttgt

SEQ ID NO: 4136930 - DNA, 25 bp, Homo sapien
attttgatttagttctacttatgaa

SEQ ID NO: 4136931 - DNA, 25 bp, Homo sapien
caaggtcacaaagacctatgttttc

SEQ ID NO: 4136932 - DNA, 25 bp, Homo sapien
agtgttgtgttcttacccaaggtca

SEQ ID NO: 4136933 - DNA, 25 bp, Homo sapien
ggtcacttaaggtcgagagtccaag

SEQ ID NO: 4136934 - DNA, 25 bp, Homo sapien
aggtcacttaaggtcgagagtccaa

SEQ ID NO: 4136935 - DNA, 25 bp, Homo sapien
gtcacttaaggtcgagagtccaaga

SEQ ID NO: 4136936 - DNA, 25 bp, Homo sapien
gtagaaacagtagaccttgtcttga

SEQ ID NO: 4136937 - DNA, 25 bp, Homo sapien
tagaaacagtagaccttgtcttgaa

SEQ ID NO: 4136938 - DNA, 25 bp, Homo sapien
agtagaaacagtagaccttgtcttg

SEQ ID NO: 4136939 - DNA, 25 bp, Homo sapien
cagtagccttacctattgaaataga

SEQ ID NO: 4136940 - DNA, 25 bp, Homo sapien
ttcttgcttgatctaaaaaagccac

SEQ ID NO: 4136941 - DNA, 25 bp, Homo sapien
cttgcactataatgctatatctggg

SEQ ID NO: 4136942 - DNA, 25 bp, Homo sapien
gagaacttactgatttgggacttta

SEQ ID NO: 4136943 - DNA, 25 bp, Homo sapien
caatacagggattaggaatgccaac

SEQ ID NO: 4136944 - DNA, 25 bp, Homo sapien
gccaacttcctgtgtagtagaaaat

SEQ ID NO: 4136945 - DNA, 25 bp, Homo sapien
agggaatggtcttgctaactcaggg

SEQ ID NO: 4136946 - DNA, 25 bp, Homo sapien
gatcagagccttagcaataacataa

SEQ ID NO: 4136947 - DNA, 25 bp, Homo sapien
caaagtaaagagacctagaaaggca

SEQ ID NO: 4136948 - DNA, 25 bp, Homo sapien
gatagatttacaccaagactgagct

SEQ ID NO: 4136949 - DNA, 25 bp, Homo sapien
taggcgctcctttcactaggtcaag

SEQ ID NO: 4136950 - DNA, 25 bp, Homo sapien
tattccatggaccacgcctttggtt

SEQ ID NO: 4136951 - DNA, 25 bp, Homo sapien
ctaatgattagattaatgctttatt

SEQ ID NO: 4136952 - DNA, 25 bp, Homo sapien
tctaatgattagattaatgctttat

SEQ ID NO: 4136953 - DNA, 25 bp, Homo sapien
taatgattagattaatgctttattt

SEQ ID NO: 4136954 - DNA, 25 bp, Homo sapien
tatctaatgattagattaatgcttt

SEQ ID NO: 4136955 - DNA, 25 bp, Homo sapien
atgcaacaatgtgaaagacttccaa

SEQ ID NO: 4136956 - DNA, 25 bp, Homo sapien
cacaaccgaagtatccatcaactgg

SEQ ID NO: 4136957 - DNA, 25 bp, Homo sapien
ggcatttcgtgaggtgatggaacta

SEQ ID NO: 4136958 - DNA, 25 bp, Homo sapien
tctactacataagggctgcgggcat

SEQ ID NO: 4136959 - DNA, 25 bp, Homo sapien
tcttttaggtacggattcccacatg

SEQ ID NO: 4136960 - DNA, 25 bp, Homo sapien
cttttaggtacggattcccacatgt

SEQ ID NO: 4136961 - DNA, 25 bp, Homo sapien
tttaggtacggattcccacatgtca

SEQ ID NO: 4136962 - DNA, 25 bp, Homo sapien
ttttaggtacggattcccacatgtc

SEQ ID NO: 4136963 - DNA, 25 bp, Homo sapien
ccatgtgagaggaaactttagaact

SEQ ID NO: 4136964 - DNA, 25 bp, Homo sapien
tcagttaccgctgacaccattcaga

SEQ ID NO: 4136965 - DNA, 25 bp, Homo sapien
gggtgtcgctgcattgtctcctgga

SEQ ID NO: 4136966 - DNA, 25 bp, Homo sapien
taggttgtcttggagatacccagtt

SEQ ID NO: 4136967 - DNA, 25 bp, Homo sapien
ggcaataatttagaggagaaccaag

SEQ ID NO: 4136968 - DNA, 25 bp, Homo sapien
cacagttcagcgacattaagtttcc

SEQ ID NO: 4136969 - DNA, 25 bp, Homo sapien
taatcatagtagctgataaggccaa

SEQ ID NO: 4136970 - DNA, 25 bp, Homo sapien
gaagctactgctttcgtattcggcc

SEQ ID NO: 4136971 - DNA, 25 bp, Homo sapien
gacgttgttgaaggtctttttagca

SEQ ID NO: 4136972 - DNA, 25 bp, Homo sapien
acgttgttgaaggtctttttagcat

SEQ ID NO: 4136973 - DNA, 25 bp, Homo sapien
tgacgttgttgaaggtctttttagc

SEQ ID NO: 4136974 - DNA, 25 bp, Homo sapien
ggccaggaccctgtccgcggcgcat

SEQ ID NO: 4136975 - DNA, 25 bp, Homo sapien
gctgcggtcctacggcacttcccgt

SEQ ID NO: 4136976 - DNA, 25 bp, Homo sapien
acggcacttcccgtgggaggatctt

SEQ ID NO: 4136977 - DNA, 25 bp, Homo sapien
tcccgcgctctttcgggctgcggtc

SEQ ID NO: 4136978 - DNA, 25 bp, Homo sapien
cttcacaatccgagacaagcggcag

SEQ ID NO: 4136979 - DNA, 25 bp, Homo sapien
tattccctggtcgttgactgcgaac

SEQ ID NO: 4136980 - DNA, 25 bp, Homo sapien
cccaaagagcttttagacaaggaag

SEQ ID NO: 4136981 - DNA, 25 bp, Homo sapien
gttgacaaggattcataaacagcca

SEQ ID NO: 4136982 - DNA, 25 bp, Homo sapien
aattatgaactgtgtcattccacga

SEQ ID NO: 4136983 - DNA, 25 bp, Homo sapien
tgaatgagtgaaccgcaagccgata

SEQ ID NO: 4136984 - DNA, 25 bp, Homo sapien
tagagggaaataaagccatagctgc

SEQ ID NO: 4136985 - DNA, 25 bp, Homo sapien
gcgatcctccttgaacttagccggc

SEQ ID NO: 4136986 - DNA, 25 bp, Homo sapien
gcagcttgcctaccacgatcgtggt

SEQ ID NO: 4136987 - DNA, 25 bp, Homo sapien
cagtgcttagtgacctgtctcccag

SEQ ID NO: 4136988 - DNA, 25 bp, Homo sapien
agctgtcaccagcactcttactgct

SEQ ID NO: 4136989 - DNA, 25 bp, Homo sapien
ttcatctgaccagaaagctgtcacc

SEQ ID NO: 4136990 - DNA, 25 bp, Homo sapien
tcttactgctccttccagggtctca

SEQ ID NO: 4136991 - DNA, 25 bp, Homo sapien
gtaactgaataatcccacctttggc

SEQ ID NO: 4136992 - DNA, 25 bp, Homo sapien
tcacctttctactaccaggagctag

SEQ ID NO: 4136993 - DNA, 25 bp, Homo sapien
tagaacttagccaatcagtggatgt

SEQ ID NO: 4136994 - DNA, 25 bp, Homo sapien
taataagccaccaggtacaacatgg

SEQ ID NO: 4136995 - DNA, 25 bp, Homo sapien
aacgacgccacggaagccgtgttgg

SEQ ID NO: 4136996 - DNA, 25 bp, Homo sapien
gtgaacgacgccacggaagccgtgt

SEQ ID NO: 4136997 - DNA, 25 bp, Homo sapien
gccgtgttggtagagggcagaaaaa

SEQ ID NO: 4136998 - DNA, 25 bp, Homo sapien
cgacgccacggaagccgtgttggta

SEQ ID NO: 4136999 - DNA, 25 bp, Homo sapien
agcgccggccgccatagtgactctg

SEQ ID NO: 4137000 - DNA, 25 bp, Homo sapien
ggtgcaccgccacgggaacgcgcac

SEQ ID NO: 4137001 - DNA, 25 bp, Homo sapien
cacgggaacgcgcacccttcaaggg

SEQ ID NO: 4137002 - DNA, 25 bp, Homo sapien
cgccatagtgactctgactgaaacc

SEQ ID NO: 4137003 - DNA, 25 bp, Homo sapien
tgtttggtttgagatcgcggccgct

SEQ ID NO: 4137004 - DNA, 25 bp, Homo sapien
tttaaaacgctgcaacgccgtgatc

SEQ ID NO: 4137005 - DNA, 25 bp, Homo sapien
gaagaaaaggctcaaacatcgggca

SEQ ID NO: 4137006 - DNA, 25 bp, Homo sapien
ccttggtggcggaaacgttgcagca

SEQ ID NO: 4137007 - DNA, 25 bp, Homo sapien
cgaggatagactgggggtgtctctc

SEQ ID NO: 4137008 - DNA, 25 bp, Homo sapien
cgagttcgggcggcaagtgaagatg

SEQ ID NO: 4137009 - DNA, 25 bp, Homo sapien
gagttcgggcggcaagtgaagatgg

SEQ ID NO: 4137010 - DNA, 25 bp, Homo sapien
gcgagttcgggcggcaagtgaagat

SEQ ID NO: 4137011 - DNA, 25 bp, Homo sapien
agttcgggcggcaagtgaagatggc

SEQ ID NO: 4137012 - DNA, 25 bp, Homo sapien
tgtgatcaaaccagacgagagcgtg

SEQ ID NO: 4137013 - DNA, 25 bp, Homo sapien
cgagagcgtggttccttgatagcac

SEQ ID NO: 4137014 - DNA, 25 bp, Homo sapien
caaaagtggcattattctgcgctgg

SEQ ID NO: 4137015 - DNA, 25 bp, Homo sapien
cactgagcggccgattttgatgggc

SEQ ID NO: 4137016 - DNA, 25 bp, Homo sapien
aacagttgattcgtggctttgcgca

SEQ ID NO: 4137017 - DNA, 25 bp, Homo sapien
taaacaatgccgctggacaatgtgg

SEQ ID NO: 4137018 - DNA, 25 bp, Homo sapien
gataataatggccacggattccccg

SEQ ID NO: 4137019 - DNA, 25 bp, Homo sapien
tgcatacattagtcctctcagggag

SEQ ID NO: 4137020 - DNA, 25 bp, Homo sapien
ggaactgattcagtagctcagctaa

SEQ ID NO: 4137021 - DNA, 25 bp, Homo sapien
ggaggtgaaacctgagacagtccta

SEQ ID NO: 4137022 - DNA, 25 bp, Homo sapien
tgaggtttaggcacaaagatgagct

SEQ ID NO: 4137023 - DNA, 25 bp, Homo sapien
gagctctttagtatactctccacaa

SEQ ID NO: 4137024 - DNA, 25 bp, Homo sapien
gcttggacaattacatacaatattt

SEQ ID NO: 4137025 - DNA, 25 bp, Homo sapien
ttgcttggacaattacatacaatat

SEQ ID NO: 4137026 - DNA, 25 bp, Homo sapien
ttggacaattacatacaatattttc

SEQ ID NO: 4137027 - DNA, 25 bp, Homo sapien
cttttgcttggacaattacatacaa

SEQ ID NO: 4137028 - DNA, 25 bp, Homo sapien
taaagtggctgaacttgaaaaatac

SEQ ID NO: 4137029 - DNA, 25 bp, Homo sapien
gcgtaagccaatatgcctggcccag

SEQ ID NO: 4137030 - DNA, 25 bp, Homo sapien
gtatttttaaagtggctgaacttga

SEQ ID NO: 4137031 - DNA, 25 bp, Homo sapien
cctggcccagccacaagtattttta

SEQ ID NO: 4137032 - DNA, 25 bp, Homo sapien
tttccctcaatgtatgcttcctgta

SEQ ID NO: 4137033 - DNA, 25 bp, Homo sapien
tgcgcctggctattctatcttccaa

SEQ ID NO: 4137034 - DNA, 25 bp, Homo sapien
aattattatagcctccctgaattca

SEQ ID NO: 4137035 - DNA, 25 bp, Homo sapien
aatttcttacgctagtacttccata

SEQ ID NO: 4137036 - DNA, 25 bp, Homo sapien
cagtactccgtggtgtaatttaaca

SEQ ID NO: 4137037 - DNA, 25 bp, Homo sapien
taaacatgcttgaacacgtctcctg

SEQ ID NO: 4137038 - DNA, 25 bp, Homo sapien
cattcacgttcaatactgtacagta

SEQ ID NO: 4137039 - DNA, 25 bp, Homo sapien
cgtctcctggcaaacatataaaaaa

SEQ ID NO: 4137040 - DNA, 25 bp, Homo sapien
catacaagggcagaatcaccacagg

SEQ ID NO: 4137041 - DNA, 25 bp, Homo sapien
agagtgcctgacctgtactgctttt

SEQ ID NO: 4137042 - DNA, 25 bp, Homo sapien
tccttgggagcagcaacaattaaaa

SEQ ID NO: 4137043 - DNA, 25 bp, Homo sapien
tgacctgtactgcttttttaatgcc

SEQ ID NO: 4137044 - DNA, 25 bp, Homo sapien
cattcttccccatagtaagcagtcc

SEQ ID NO: 4137045 - DNA, 25 bp, Homo sapien
ctttggacatagtaagagctgaatg

SEQ ID NO: 4137046 - DNA, 25 bp, Homo sapien
aactcagaacatgattggctgggca

SEQ ID NO: 4137047 - DNA, 25 bp, Homo sapien
aagtcaggtgttcatcaggatcaat

SEQ ID NO: 4137048 - DNA, 25 bp, Homo sapien
aattaaaaagcccacataacttgct

SEQ ID NO: 4137049 - DNA, 25 bp, Homo sapien
catcatggtcaatttaaaggaacac

SEQ ID NO: 4137050 - DNA, 25 bp, Homo sapien
tggtacaaatacctacacactcaga

SEQ ID NO: 4137051 - DNA, 25 bp, Homo sapien
ggaaacataatgtagcccagacttt

SEQ ID NO: 4137052 - DNA, 25 bp, Homo sapien
tttcaaccacatcatgcaaagtctc

SEQ ID NO: 4137053 - DNA, 25 bp, Homo sapien
ctttcaaccacatcatgcaaagtct

SEQ ID NO: 4137054 - DNA, 25 bp, Homo sapien
tctttcaaccacatcatgcaaagtc

SEQ ID NO: 4137055 - DNA, 25 bp, Homo sapien
ttatagagacgggggtcctactaca

SEQ ID NO: 4137056 - DNA, 25 bp, Homo sapien
catatccagccccttgccttgaatt

SEQ ID NO: 4137057 - DNA, 25 bp, Homo sapien
tccagccccttgccttgaattttta

SEQ ID NO: 4137058 - DNA, 25 bp, Homo sapien
gagacgggggtcctactacattgcc

SEQ ID NO: 4137059 - DNA, 25 bp, Homo sapien
tactattatgcctcaatggaacatc

SEQ ID NO: 4137060 - DNA, 25 bp, Homo sapien
cctcaatggaacatccatggtcaac

SEQ ID NO: 4137061 - DNA, 25 bp, Homo sapien
tagcctccagagtagaatcagatca

SEQ ID NO: 4137062 - DNA, 25 bp, Homo sapien
tggtcaactgtaagaaactctgtat

SEQ ID NO: 4137063 - DNA, 25 bp, Homo sapien
ggcacagtgtaagtgatcctggagt

SEQ ID NO: 4137064 - DNA, 25 bp, Homo sapien
aggcacagtgtaagtgatcctggag

SEQ ID NO: 4137065 - DNA, 25 bp, Homo sapien
cctaaccattgccaagataattcca

SEQ ID NO: 4137066 - DNA, 25 bp, Homo sapien
cattgccaagataattccacactct

SEQ ID NO: 4137067 - DNA, 25 bp, Homo sapien
tccacactgatgctagacttatttc

SEQ ID NO: 4137068 - DNA, 25 bp, Homo sapien
ccctccacactgatgctagacttat

SEQ ID NO: 4137069 - DNA, 25 bp, Homo sapien
tagtaacacattttcgctgaatttc

SEQ ID NO: 4137070 - DNA, 25 bp, Homo sapien
ttttcgatttttctacactcttcag

SEQ ID NO: 4137071 - DNA, 25 bp, Homo sapien
cactcttcagccctacttattttag

SEQ ID NO: 4137072 - DNA, 25 bp, Homo sapien
cagccctacttattttagtaacaca

SEQ ID NO: 4137073 - DNA, 25 bp, Homo sapien
agagcctcgactcaatctctggcta

SEQ ID NO: 4137074 - DNA, 25 bp, Homo sapien
tctgtcacgtctactccaaactgga

SEQ ID NO: 4137075 - DNA, 25 bp, Homo sapien
ccattactacttttagtgtcttgaa

SEQ ID NO: 4137076 - DNA, 25 bp, Homo sapien
aactggataatgtcaccggaaagaa

SEQ ID NO: 4137077 - DNA, 25 bp, Homo sapien
gaagtcctgcttatcttacctaagt

SEQ ID NO: 4137078 - DNA, 25 bp, Homo sapien
gagttgcattctataatggccacct

SEQ ID NO: 4137079 - DNA, 25 bp, Homo sapien
ggaaccttgaatctcagggtcatct

SEQ ID NO: 4137080 - DNA, 25 bp, Homo sapien
gagtatccctcacagatagaccctc

SEQ ID NO: 4137081 - DNA, 25 bp, Homo sapien
tttatctgactaaaagacttactgt

SEQ ID NO: 4137082 - DNA, 25 bp, Homo sapien
attaataaaagaaccagcatctggg

SEQ ID NO: 4137083 - DNA, 25 bp, Homo sapien
ccatagatagccatataagattctc

SEQ ID NO: 4137084 - DNA, 25 bp, Homo sapien
ttgctaggaaaacatcaatttactc

SEQ ID NO: 4137085 - DNA, 25 bp, Homo sapien
ccaaaccctggcctagtatcttaat

SEQ ID NO: 4137086 - DNA, 25 bp, Homo sapien
atgagccactatgccaaaccctggc

SEQ ID NO: 4137087 - DNA, 25 bp, Homo sapien
accctggcctagtatcttaattgaa

SEQ ID NO: 4137088 - DNA, 25 bp, Homo sapien
aaaccctggcctagtatcttaattg

SEQ ID NO: 4137089 - DNA, 25 bp, Homo sapien
tcagcaaatgagctgatgcgcaaat

SEQ ID NO: 4137090 - DNA, 25 bp, Homo sapien
aaagttcagcaaatgagctgatgcg

SEQ ID NO: 4137091 - DNA, 25 bp, Homo sapien
agttcagcaaatgagctgatgcgca

SEQ ID NO: 4137092 - DNA, 25 bp, Homo sapien
cctgaaagttcagcaaatgagctga

SEQ ID NO: 4137093 - DNA, 25 bp, Homo sapien
ccatctggtagaaaaagttttattg

SEQ ID NO: 4137094 - DNA, 25 bp, Homo sapien
atctggtagaaaaagttttattgtg

SEQ ID NO: 4137095 - DNA, 25 bp, Homo sapien
catctggtagaaaaagttttattgt

SEQ ID NO: 4137096 - DNA, 25 bp, Homo sapien
caacaggacttggtaatggtgcatg

SEQ ID NO: 4137097 - DNA, 25 bp, Homo sapien
tttgtcaacaggacttggtaatggt

SEQ ID NO: 4137098 - DNA, 25 bp, Homo sapien
gacttggtaatggtgcatggatgac

SEQ ID NO: 4137099 - DNA, 25 bp, Homo sapien
caggacttggtaatggtgcatggat

SEQ ID NO: 4137100 - DNA, 25 bp, Homo sapien
tagttcctgagagtacatacttgga

SEQ ID NO: 4137101 - DNA, 25 bp, Homo sapien
tacatacttggagtgttagcagcaa

SEQ ID NO: 4137102 - DNA, 25 bp, Homo sapien
agctggaatagttcctgagagtaca

SEQ ID NO: 4137103 - DNA, 25 bp, Homo sapien
gagagtacatacttggagtgttagc

SEQ ID NO: 4137104 - DNA, 25 bp, Homo sapien
cagaaaatctgaggtctggctgtcc

SEQ ID NO: 4137105 - DNA, 25 bp, Homo sapien
taaatatggcattaacttgaagcag

SEQ ID NO: 4137106 - DNA, 25 bp, Homo sapien
tgctctacaccaagaaattattctg

SEQ ID NO: 4137107 - DNA, 25 bp, Homo sapien
tcccagctctaccatatacttgata

SEQ ID NO: 4137108 - DNA, 25 bp, Homo sapien
taaagtctacagtaatgtccagtaa

SEQ ID NO: 4137109 - DNA, 25 bp, Homo sapien
tgtccagtaatgtcacaggccttca

SEQ ID NO: 4137110 - DNA, 25 bp, Homo sapien
atatttaaagcagcctaagtgtaca

SEQ ID NO: 4137111 - DNA, 25 bp, Homo sapien
cattcacttaccactcacttaatga

SEQ ID NO: 4137112 - DNA, 25 bp, Homo sapien
gccgctgaagcgtggctaacttctg

SEQ ID NO: 4137113 - DNA, 25 bp, Homo sapien
gaagcgtggctaacttctgttccaa

SEQ ID NO: 4137114 - DNA, 25 bp, Homo sapien
tgatggctagtagccgctgaagcgt

SEQ ID NO: 4137115 - DNA, 25 bp, Homo sapien
aagcctcttgggtgatggctagtag

SEQ ID NO: 4137116 - DNA, 25 bp, Homo sapien
tttcccataacttctaaccgtgata

SEQ ID NO: 4137117 - DNA, 25 bp, Homo sapien
agagtctatcttcatctattaaagc

SEQ ID NO: 4137118 - DNA, 25 bp, Homo sapien
gagcatgcctgtaattggtttccca

SEQ ID NO: 4137119 - DNA, 25 bp, Homo sapien
cttctaaccgtgataagagtctatc

SEQ ID NO: 4137120 - DNA, 25 bp, Homo sapien
ctttggctgttgtctcatagttatg

SEQ ID NO: 4137121 - DNA, 25 bp, Homo sapien
tgctataagttcctttcgtaaacta

SEQ ID NO: 4137122 - DNA, 25 bp, Homo sapien
tcctcttgtaatgctataagttcct

SEQ ID NO: 4137123 - DNA, 25 bp, Homo sapien
ttgtctcatagttatgtttatcctc

SEQ ID NO: 4137124 - DNA, 25 bp, Homo sapien
caggcactatgggatgaggtagcaa

SEQ ID NO: 4137125 - DNA, 25 bp, Homo sapien
tacatttttgaaaggccaatgggta

SEQ ID NO: 4137126 - DNA, 25 bp, Homo sapien
gaggtagcaatacaaactatacctg

SEQ ID NO: 4137127 - DNA, 25 bp, Homo sapien
taatcacacaacagtgaatcaggca

SEQ ID NO: 4137128 - DNA, 25 bp, Homo sapien
aattctcttaattcttcctgagtcc

SEQ ID NO: 4137129 - DNA, 25 bp, Homo sapien
cattatatttgttggctaattctct

SEQ ID NO: 4137130 - DNA, 25 bp, Homo sapien
taatctcattaactgctccattata

SEQ ID NO: 4137131 - DNA, 25 bp, Homo sapien
catcttcagtattactcagacttcg

SEQ ID NO: 4137132 - DNA, 25 bp, Homo sapien
gtcccttctgttggatttcctcttg

SEQ ID NO: 4137133 - DNA, 25 bp, Homo sapien
tcatctattttatgttgtaattctt

SEQ ID NO: 4137134 - DNA, 25 bp, Homo sapien
aatcattatcagcttgcaaagcttc

SEQ ID NO: 4137135 - DNA, 25 bp, Homo sapien
cattatcagcttgcaaagcttctat

SEQ ID NO: 4137136 - DNA, 25 bp, Homo sapien
aagctgttagcctttcattggtgaa

SEQ ID NO: 4137137 - DNA, 25 bp, Homo sapien
cttgtaaagctgttagcctttcatt

SEQ ID NO: 4137138 - DNA, 25 bp, Homo sapien
gctgctgcattctttaagagttttc

SEQ ID NO: 4137139 - DNA, 25 bp, Homo sapien
attaagacagtatatcattgcctga

SEQ ID NO: 4137140 - DNA, 25 bp, Homo sapien
tatatcattgcctgatcaaagaagt

SEQ ID NO: 4137141 - DNA, 25 bp, Homo sapien
tggtctcaagtgtaaccatggcatt

SEQ ID NO: 4137142 - DNA, 25 bp, Homo sapien
tctcaagtgtaaccatggcattctg

SEQ ID NO: 4137143 - DNA, 25 bp, Homo sapien
ttattttaggtaagaagtcatcaac

SEQ ID NO: 4137144 - DNA, 25 bp, Homo sapien
ggtagtacagctcttcgaaaaacag

SEQ ID NO: 4137145 - DNA, 25 bp, Homo sapien
cagaaagaagggtcacagaaccaac

SEQ ID NO: 4137146 - DNA, 25 bp, Homo sapien
tatgtccaagggctcaataagctgt

SEQ ID NO: 4137147 - DNA, 25 bp, Homo sapien
ttttggcaagagagaacccacgctg

SEQ ID NO: 4137148 - DNA, 25 bp, Homo sapien
tgcagtccccgccactctttgaaag

SEQ ID NO: 4137149 - DNA, 25 bp, Homo sapien
attgatgaataaaagtgcagtcccc

SEQ ID NO: 4137150 - DNA, 25 bp, Homo sapien
gaataaaagtgcagtccccgccact

SEQ ID NO: 4137151 - DNA, 25 bp, Homo sapien
gatgaataaaagtgcagtccccgcc

SEQ ID NO: 4137152 - DNA, 25 bp, Homo sapien
tttaaaaattctgagacaaggtctc

SEQ ID NO: 4137153 - DNA, 25 bp, Homo sapien
cgaaagtgccggggttacaggcttg

SEQ ID NO: 4137154 - DNA, 25 bp, Homo sapien
cactgcgcccagccctaaaactctt

SEQ ID NO: 4137155 - DNA, 25 bp, Homo sapien
ctgcgcccagccctaaaactctttt

SEQ ID NO: 4137156 - DNA, 25 bp, Homo sapien
tgttgaagatctacatactgacatg

SEQ ID NO: 4137157 - DNA, 25 bp, Homo sapien
caaggtcccttgagatctatcccag

SEQ ID NO: 4137158 - DNA, 25 bp, Homo sapien
gaagattgtaatttattgctccaaa

SEQ ID NO: 4137159 - DNA, 25 bp, Homo sapien
gagtagctgccaagagaccttacag

SEQ ID NO: 4137160 - DNA, 25 bp, Homo sapien
aactatatgaacaatgctgtagaat

SEQ ID NO: 4137161 - DNA, 25 bp, Homo sapien
tcactatgttgtgcctagttccaaa

SEQ ID NO: 4137162 - DNA, 25 bp, Homo sapien
tgtttctctctagaaggtttcggaa

SEQ ID NO: 4137163 - DNA, 25 bp, Homo sapien
tattcctggtgctcttaaatttcat

SEQ ID NO: 4137164 - DNA, 25 bp, Homo sapien
cagcagagatgcctatataatgtat

SEQ ID NO: 4137165 - DNA, 25 bp, Homo sapien
tttctgtaaatgtataatgctactt

SEQ ID NO: 4137166 - DNA, 25 bp, Homo sapien
taaagcaatcctctttagatcaagg

SEQ ID NO: 4137167 - DNA, 25 bp, Homo sapien
aagttatatcgatagtttactgttc

SEQ ID NO: 4137168 - DNA, 25 bp, Homo sapien
atccaagcccaaactgagcagcatt

SEQ ID NO: 4137169 - DNA, 25 bp, Homo sapien
gttaccatccaagcccaaactgagc

SEQ ID NO: 4137170 - DNA, 25 bp, Homo sapien
aacgttaccatccaagcccaaactg

SEQ ID NO: 4137171 - DNA, 25 bp, Homo sapien
catccaagcccaaactgagcagcat

SEQ ID NO: 4137172 - DNA, 25 bp, Homo sapien
aagctttgtttcttctaccgctttg

SEQ ID NO: 4137173 - DNA, 25 bp, Homo sapien
tggttagatgcccttcgacgatcag

SEQ ID NO: 4137174 - DNA, 25 bp, Homo sapien
taccgctttggttagatgcccttcg

SEQ ID NO: 4137175 - DNA, 25 bp, Homo sapien
tcttctaccgctttggttagatgcc

SEQ ID NO: 4137176 - DNA, 25 bp, Homo sapien
tatccaaaagaactgtcaaaaaaca

SEQ ID NO: 4137177 - DNA, 25 bp, Homo sapien
caaaagaactgtcaaaaaacataga

SEQ ID NO: 4137178 - DNA, 25 bp, Homo sapien
tccaaaagaactgtcaaaaaacata

SEQ ID NO: 4137179 - DNA, 25 bp, Homo sapien
ccaaaagaactgtcaaaaaacatag

SEQ ID NO: 4137180 - DNA, 25 bp, Homo sapien
ggcatctgccgtgcacaaaattcag

SEQ ID NO: 4137181 - DNA, 25 bp, Homo sapien
actttgggcaattactggactactc

SEQ ID NO: 4137182 - DNA, 25 bp, Homo sapien
gacacattccagttacgataccctt

SEQ ID NO: 4137183 - DNA, 25 bp, Homo sapien
gctgaaattaatgctgggaatgaca

SEQ ID NO: 4137184 - DNA, 25 bp, Homo sapien
aatatgcacattatgtatcaataag

SEQ ID NO: 4137185 - DNA, 25 bp, Homo sapien
tgcacattatgtatcaataagataa

SEQ ID NO: 4137186 - DNA, 25 bp, Homo sapien
gcacattatgtatcaataagataaa

SEQ ID NO: 4137187 - DNA, 25 bp, Homo sapien
tatgcacattatgtatcaataagat

SEQ ID NO: 4137188 - DNA, 25 bp, Homo sapien
tggtcatgctagcttcattataggg

SEQ ID NO: 4137189 - DNA, 25 bp, Homo sapien
caaggcctcagtcaagctttacata

SEQ ID NO: 4137190 - DNA, 25 bp, Homo sapien
gaatttagccgtaatctggtcccta

SEQ ID NO: 4137191 - DNA, 25 bp, Homo sapien
cattatagggctaatacatgcctgc

SEQ ID NO: 4137192 - DNA, 25 bp, Homo sapien
aatgctggttattacacgtagctca

SEQ ID NO: 4137193 - DNA, 25 bp, Homo sapien
gatcatgtctgctttgctgagggct

SEQ ID NO: 4137194 - DNA, 25 bp, Homo sapien
tgtccaaaatggaatgctggttatt

SEQ ID NO: 4137195 - DNA, 25 bp, Homo sapien
aattataatgtggatcatgtctgct

SEQ ID NO: 4137196 - DNA, 25 bp, Homo sapien
caaaatctacaggtacgcaaagtac

SEQ ID NO: 4137197 - DNA, 25 bp, Homo sapien
caggctatgaatgctcaaaatctac

SEQ ID NO: 4137198 - DNA, 25 bp, Homo sapien
taaaactgcttcaggctatgaatgc

SEQ ID NO: 4137199 - DNA, 25 bp, Homo sapien
tctacaggtacgcaaagtactttta

SEQ ID NO: 4137200 - DNA, 25 bp, Homo sapien
ttgcttggactcagagtatctgaaa

SEQ ID NO: 4137201 - DNA, 25 bp, Homo sapien
cttgcttggactcagagtatctgaa

SEQ ID NO: 4137202 - DNA, 25 bp, Homo sapien
ctgtagtgtcgtcactgcttttttc

SEQ ID NO: 4137203 - DNA, 25 bp, Homo sapien
gctgcaggtctgtaaacattaggtt

SEQ ID NO: 4137204 - DNA, 25 bp, Homo sapien
gaaatctccactcacattgacctat

SEQ ID NO: 4137205 - DNA, 25 bp, Homo sapien
taactaaactgccattaacagctgc

SEQ ID NO: 4137206 - DNA, 25 bp, Homo sapien
gacagtattcagatctatcagcaag

SEQ ID NO: 4137207 - DNA, 25 bp, Homo sapien
agggacactttggcaagaggctcat

SEQ ID NO: 4137208 - DNA, 25 bp, Homo sapien
actttggcaagaggctcatttaggt

SEQ ID NO: 4137209 - DNA, 25 bp, Homo sapien
ggctcatttaggtcttgctcatcca

SEQ ID NO: 4137210 - DNA, 25 bp, Homo sapien
gcaagaggctcatttaggtcttgct

SEQ ID NO: 4137211 - DNA, 25 bp, Homo sapien
gataccctggtttacgatgtcataa

SEQ ID NO: 4137212 - DNA, 25 bp, Homo sapien
ctagaacagattttatggcaaaggg

SEQ ID NO: 4137213 - DNA, 25 bp, Homo sapien
gaacagattttatggcaaagggtga

SEQ ID NO: 4137214 - DNA, 25 bp, Homo sapien
ggcaaagggtgatttgataccctgg

SEQ ID NO: 4137215 - DNA, 25 bp, Homo sapien
ttagcccaaaatttctagaagagtg

SEQ ID NO: 4137216 - DNA, 25 bp, Homo sapien
ccctcgtaatcttgactgatccaaa

SEQ ID NO: 4137217 - DNA, 25 bp, Homo sapien
tagaagagtgtcataagaacctggg

SEQ ID NO: 4137218 - DNA, 25 bp, Homo sapien
gagtaaaccggtgagtctttcaaga

SEQ ID NO: 4137219 - DNA, 25 bp, Homo sapien
gcaaggtacaccatgcagggaacca

SEQ ID NO: 4137220 - DNA, 25 bp, Homo sapien
tatgtcctgcaaactggcagttgga

SEQ ID NO: 4137221 - DNA, 25 bp, Homo sapien
ggatcactccaacatagctgtggga

SEQ ID NO: 4137222 - DNA, 25 bp, Homo sapien
tactcaaaggtcctagagagggagg

SEQ ID NO: 4137223 - DNA, 25 bp, Homo sapien
ctataatactatgatcacactggaa

SEQ ID NO: 4137224 - DNA, 25 bp, Homo sapien
aaacactcaaaggattatgtgaaca

SEQ ID NO: 4137225 - DNA, 25 bp, Homo sapien
tatacttatcaatcctcaaaccaaa

SEQ ID NO: 4137226 - DNA, 25 bp, Homo sapien
gatcactctatcttacaaaacactc

SEQ ID NO: 4137227 - DNA, 25 bp, Homo sapien
taaatgaagccacttttctcactgt

SEQ ID NO: 4137228 - DNA, 25 bp, Homo sapien
tgctctgtgatcgagtttttcaacc

SEQ ID NO: 4137229 - DNA, 25 bp, Homo sapien
cctgtgttgaggactattgctgtat

SEQ ID NO: 4137230 - DNA, 25 bp, Homo sapien
catcgacattaattccttgagtagg

SEQ ID NO: 4137231 - DNA, 25 bp, Homo sapien
tgaaatttcttgataaccagtcaga

SEQ ID NO: 4137232 - DNA, 25 bp, Homo sapien
cttcaagtaacagctaaattttagc

SEQ ID NO: 4137233 - DNA, 25 bp, Homo sapien
aattttagcacaattaccctagttg

SEQ ID NO: 4137234 - DNA, 25 bp, Homo sapien
caattaccctagttgtggaacacaa

SEQ ID NO: 4137235 - DNA, 25 bp, Homo sapien
tattttaaaagcaagagttagtatc

SEQ ID NO: 4137236 - DNA, 25 bp, Homo sapien
ttaaaagcaagagttagtatcacac

SEQ ID NO: 4137237 - DNA, 25 bp, Homo sapien
aagcaagagttagtatcacactata

SEQ ID NO: 4137238 - DNA, 25 bp, Homo sapien
aaaagcaagagttagtatcacacta

SEQ ID NO: 4137239 - DNA, 25 bp, Homo sapien
ttcctttcgaagatgctgtatttct

SEQ ID NO: 4137240 - DNA, 25 bp, Homo sapien
tctagctagctcctgggcttcgatc

SEQ ID NO: 4137241 - DNA, 25 bp, Homo sapien
agctcctgggcttcgatcaattcct

SEQ ID NO: 4137242 - DNA, 25 bp, Homo sapien
ttgtttacttgttctagctagctcc

SEQ ID NO: 4137243 - DNA, 25 bp, Homo sapien
cttgaagaacctgtatttgtttagt

SEQ ID NO: 4137244 - DNA, 25 bp, Homo sapien
gattcctcaacttgatttcgatagg

SEQ ID NO: 4137245 - DNA, 25 bp, Homo sapien
gatttcgataggcttttctttcttc

SEQ ID NO: 4137246 - DNA, 25 bp, Homo sapien
gtatttgtttagtggattcctcaac

SEQ ID NO: 4137247 - DNA, 25 bp, Homo sapien
caaagagccttggggtcttccatac

SEQ ID NO: 4137248 - DNA, 25 bp, Homo sapien
tcaaagagccttggggtcttccata

SEQ ID NO: 4137249 - DNA, 25 bp, Homo sapien
atcctattccacgtgatatataatt

SEQ ID NO: 4137250 - DNA, 25 bp, Homo sapien
tcctattccacgtgatatataattt

SEQ ID NO: 4137251 - DNA, 25 bp, Homo sapien
tatttttgggcaagtatcttgggcc

SEQ ID NO: 4137252 - DNA, 25 bp, Homo sapien
tcttgggcctcgtacaatgactctc

SEQ ID NO: 4137253 - DNA, 25 bp, Homo sapien
taatgacattaaactacaataggag

SEQ ID NO: 4137254 - DNA, 25 bp, Homo sapien
aattgcccctacacagtctacgatg

SEQ ID NO: 4137255 - DNA, 25 bp, Homo sapien
tactggactgtacacctcatgtgtg

SEQ ID NO: 4137256 - DNA, 25 bp, Homo sapien
gggataccccaatatctaacacagt

SEQ ID NO: 4137257 - DNA, 25 bp, Homo sapien
gcaataaacagttgacgcccttgat

SEQ ID NO: 4137258 - DNA, 25 bp, Homo sapien
tttgtgctcatgacccaaactggaa

SEQ ID NO: 4137259 - DNA, 25 bp, Homo sapien
ctgcaaaagtatatccatcattttc

SEQ ID NO: 4137260 - DNA, 25 bp, Homo sapien
agtatatccatcattttcttggccc

SEQ ID NO: 4137261 - DNA, 25 bp, Homo sapien
tatatccatcattttcttggcccat

SEQ ID NO: 4137262 - DNA, 25 bp, Homo sapien
aaagtatatccatcattttcttggc

SEQ ID NO: 4137263 - DNA, 25 bp, Homo sapien
catattcagacgctgctttccgcca

SEQ ID NO: 4137264 - DNA, 25 bp, Homo sapien
tctcagtatcgatgtgtaacctctg

SEQ ID NO: 4137265 - DNA, 25 bp, Homo sapien
taaagaagcaatgtcagtgtcccgc

SEQ ID NO: 4137266 - DNA, 25 bp, Homo sapien
caaaatttcatctcgggcactaagc

SEQ ID NO: 4137267 - DNA, 25 bp, Homo sapien
gcagttctgatgatagcaaaacatt

SEQ ID NO: 4137268 - DNA, 25 bp, Homo sapien
cattcggtttccaatgcattccatt

SEQ ID NO: 4137269 - DNA, 25 bp, Homo sapien
cattttccctttttagagaatggca

SEQ ID NO: 4137270 - DNA, 25 bp, Homo sapien
tttcttgccgttgcagttctgatga

SEQ ID NO: 4137271 - DNA, 25 bp, Homo sapien
tctgaaaaacagagagttcttgcat

SEQ ID NO: 4137272 - DNA, 25 bp, Homo sapien
tgaaaaacagagagttcttgcatac

SEQ ID NO: 4137273 - DNA, 25 bp, Homo sapien
tttatatctgaaaaacagagagttc

SEQ ID NO: 4137274 - DNA, 25 bp, Homo sapien
tatctgaaaaacagagagttcttgc

SEQ ID NO: 4137275 - DNA, 25 bp, Homo sapien
gacatgtaggataatggtggtggca

SEQ ID NO: 4137276 - DNA, 25 bp, Homo sapien
atctgtattccatgagtacaaggaa

SEQ ID NO: 4137277 - DNA, 25 bp, Homo sapien
caaggaaaggacatgtaggataatg

SEQ ID NO: 4137278 - DNA, 25 bp, Homo sapien
gtatggttaacctgccaaatagcca

SEQ ID NO: 4137279 - DNA, 25 bp, Homo sapien
gaaagatttaactggtttcagagaa

SEQ ID NO: 4137280 - DNA, 25 bp, Homo sapien
ttcagagaattattggtcttatata

SEQ ID NO: 4137281 - DNA, 25 bp, Homo sapien
agaaagatttaactggtttcagaga

SEQ ID NO: 4137282 - DNA, 25 bp, Homo sapien
tattattacccttcatacaacccta

SEQ ID NO: 4137283 - DNA, 25 bp, Homo sapien
gagaatcgattgaccccagggggtg

SEQ ID NO: 4137284 - DNA, 25 bp, Homo sapien
cactgatctctagcctgggccacaa

SEQ ID NO: 4137285 - DNA, 25 bp, Homo sapien
agggggtggaggttgtgatgagctg

SEQ ID NO: 4137286 - DNA, 25 bp, Homo sapien
acatgtctgtaatccaagttactca

SEQ ID NO: 4137287 - DNA, 25 bp, Homo sapien
cagataccacgtaatacagacataa

SEQ ID NO: 4137288 - DNA, 25 bp, Homo sapien
gataccacgtaatacagacataact

SEQ ID NO: 4137289 - DNA, 25 bp, Homo sapien
tacagacataactaacacaagcaga

SEQ ID NO: 4137290 - DNA, 25 bp, Homo sapien
aactaacacaagcagagtctcagtg

SEQ ID NO: 4137291 - DNA, 25 bp, Homo sapien
agtttttaaatcagctgaatcccga

SEQ ID NO: 4137292 - DNA, 25 bp, Homo sapien
aaggatgctgagatcactggtaagc

SEQ ID NO: 4137293 - DNA, 25 bp, Homo sapien
ggtaagctctaaactctgcttctga

SEQ ID NO: 4137294 - DNA, 25 bp, Homo sapien
agatgctgttctttcaaggatccca

SEQ ID NO: 4137295 - DNA, 25 bp, Homo sapien
catggatatccgatttgcttttggc

SEQ ID NO: 4137296 - DNA, 25 bp, Homo sapien
tagcatggatatccgatttgctttt

SEQ ID NO: 4137297 - DNA, 25 bp, Homo sapien
tggctttaagtccaaccataattgg

SEQ ID NO: 4137298 - DNA, 25 bp, Homo sapien
gggctcataatgtcttttcgcttta

SEQ ID NO: 4137299 - DNA, 25 bp, Homo sapien
gaaacagttaaagcatcttgcaccg

SEQ ID NO: 4137300 - DNA, 25 bp, Homo sapien
gggtggtccctaatctgtagatcaa

SEQ ID NO: 4137301 - DNA, 25 bp, Homo sapien
tatggcatatggactggaaggacac

SEQ ID NO: 4137302 - DNA, 25 bp, Homo sapien
aatttagatgctgtgacaacatgcc

SEQ ID NO: 4137303 - DNA, 25 bp, Homo sapien
cagtacgtgagggggtggcaaggac

SEQ ID NO: 4137304 - DNA, 25 bp, Homo sapien
agtacgtgagggggtggcaaggact

SEQ ID NO: 4137305 - DNA, 25 bp, Homo sapien
ctccagtacgtgagggggtggcaag

SEQ ID NO: 4137306 - DNA, 25 bp, Homo sapien
tccagtacgtgagggggtggcaagg

SEQ ID NO: 4137307 - DNA, 25 bp, Homo sapien
tagccaatgttaggaagcctgagtt

SEQ ID NO: 4137308 - DNA, 25 bp, Homo sapien
cattactgggtattaaagtgttctg

SEQ ID NO: 4137309 - DNA, 25 bp, Homo sapien
caataggtttccctttacccagcat

SEQ ID NO: 4137310 - DNA, 25 bp, Homo sapien
tcctagtaaggagtgtcagccaagc

SEQ ID NO: 4137311 - DNA, 25 bp, Homo sapien
cagttctgagagtacagtctgtgtc

SEQ ID NO: 4137312 - DNA, 25 bp, Homo sapien
ctctcggagcagcttcaggttgttt

SEQ ID NO: 4137313 - DNA, 25 bp, Homo sapien
gagctcatctgtgattgactgcttt

SEQ ID NO: 4137314 - DNA, 25 bp, Homo sapien
ctttctctcggagcagcttcaggtt

SEQ ID NO: 4137315 - DNA, 25 bp, Homo sapien
ccagatgatagcttagtgacagagc

SEQ ID NO: 4137316 - DNA, 25 bp, Homo sapien
tactctctcttaaatggatccctgg

SEQ ID NO: 4137317 - DNA, 25 bp, Homo sapien
ggatccctggtggtacaatgcttca

SEQ ID NO: 4137318 - DNA, 25 bp, Homo sapien
gcctcagtgagaacattattggtat

SEQ ID NO: 4137319 - DNA, 25 bp, Homo sapien
ttataccaaaatgttcatctctctc

SEQ ID NO: 4137320 - DNA, 25 bp, Homo sapien
gaccatctgtctttctagcaaatga

SEQ ID NO: 4137321 - DNA, 25 bp, Homo sapien
acatctttttaaagaccatctgtct

SEQ ID NO: 4137322 - DNA, 25 bp, Homo sapien
tctctcacagccctacagaaactca

SEQ ID NO: 4137323 - DNA, 25 bp, Homo sapien
cagggcccacaaaggtaacgatcac

SEQ ID NO: 4137324 - DNA, 25 bp, Homo sapien
cacaaaggtaacgatcaccaaaacg

SEQ ID NO: 4137325 - DNA, 25 bp, Homo sapien
gcccacaaaggtaacgatcaccaaa

SEQ ID NO: 4137326 - DNA, 25 bp, Homo sapien
gggcccacaaaggtaacgatcacca

SEQ ID NO: 4137327 - DNA, 25 bp, Homo sapien
acactgcagtgtccaagccatgaca

SEQ ID NO: 4137328 - DNA, 25 bp, Homo sapien
gagcacaaccaaccacactaaacat

SEQ ID NO: 4137329 - DNA, 25 bp, Homo sapien
ttaaataagtcagagcacaaccaac

SEQ ID NO: 4137330 - DNA, 25 bp, Homo sapien
ccatgacagtggttttaaataagtc

SEQ ID NO: 4137331 - DNA, 25 bp, Homo sapien
tgagtaacacgatggccatgcaaca

SEQ ID NO: 4137332 - DNA, 25 bp, Homo sapien
tacttgtgctgcaaggtaagcgaag

SEQ ID NO: 4137333 - DNA, 25 bp, Homo sapien
taagcgaagtggcttcctccatagg

SEQ ID NO: 4137334 - DNA, 25 bp, Homo sapien
tctaaaaggcttctacctaagcagc

SEQ ID NO: 4137335 - DNA, 25 bp, Homo sapien
agtaatcagataagaggattcagac

SEQ ID NO: 4137336 - DNA, 25 bp, Homo sapien
gggaaggcatattaaaatcatttta

SEQ ID NO: 4137337 - DNA, 25 bp, Homo sapien
aagggaaggcatattaaaatcattt

SEQ ID NO: 4137338 - DNA, 25 bp, Homo sapien
gaagggaaggcatattaaaatcatt

SEQ ID NO: 4137339 - DNA, 25 bp, Homo sapien
aagaagggaaggcatattaaaatca

SEQ ID NO: 4137340 - DNA, 25 bp, Homo sapien
acaggaaagccaggaataggccgat

SEQ ID NO: 4137341 - DNA, 25 bp, Homo sapien
ataggccgatgaatacggctgggac

SEQ ID NO: 4137342 - DNA, 25 bp, Homo sapien
aagccaggaataggccgatgaatac

SEQ ID NO: 4137343 - DNA, 25 bp, Homo sapien
taccacaatggaccgaaacaccaaa

SEQ ID NO: 4137344 - DNA, 25 bp, Homo sapien
cattggtatgacacaaatacacggc

SEQ ID NO: 4137345 - DNA, 25 bp, Homo sapien
tacacggcatactaaatgaagggtt

SEQ ID NO: 4137346 - DNA, 25 bp, Homo sapien
aatacctgtgtgttcttgccatgca

SEQ ID NO: 4137347 - DNA, 25 bp, Homo sapien
cacataattggaaagagggtactaa

SEQ ID NO: 4137348 - DNA, 25 bp, Homo sapien
cagagagtcctgaatacttaacaga

SEQ ID NO: 4137349 - DNA, 25 bp, Homo sapien
ggttccagagagtcctgaatactta

SEQ ID NO: 4137350 - DNA, 25 bp, Homo sapien
cctgaatacttaacagaatattgga

SEQ ID NO: 4137351 - DNA, 25 bp, Homo sapien
tctgcatcataaatataaagtttga

SEQ ID NO: 4137352 - DNA, 25 bp, Homo sapien
aagaaaccaagagtcaatatcacat

SEQ ID NO: 4137353 - DNA, 25 bp, Homo sapien
ggaaagaaaccaagagtcaatatca

SEQ ID NO: 4137354 - DNA, 25 bp, Homo sapien
gtggaaagaaaccaagagtcaatat

SEQ ID NO: 4137355 - DNA, 25 bp, Homo sapien
gaaagaaaccaagagtcaatatcac

SEQ ID NO: 4137356 - DNA, 25 bp, Homo sapien
ggcacgtacagcacgatggctgtta

SEQ ID NO: 4137357 - DNA, 25 bp, Homo sapien
acgatggctgttactgcaaccaggg

SEQ ID NO: 4137358 - DNA, 25 bp, Homo sapien
gttactgcaaccagggcagccaaca

SEQ ID NO: 4137359 - DNA, 25 bp, Homo sapien
ctggcacgtacagcacgatggctgt

SEQ ID NO: 4137360 - DNA, 25 bp, Homo sapien
tctgtttgtccccagcatgagtgtg

SEQ ID NO: 4137361 - DNA, 25 bp, Homo sapien
cggtgtacggactcaaggaacgctc

SEQ ID NO: 4137362 - DNA, 25 bp, Homo sapien
ttaaagcaatgaccctacagctgta

SEQ ID NO: 4137363 - DNA, 25 bp, Homo sapien
tacagctgtattcttgtacttctgc

SEQ ID NO: 4137364 - DNA, 25 bp, Homo sapien
gaagcctactttaggccaccataat

SEQ ID NO: 4137365 - DNA, 25 bp, Homo sapien
tatttcaaactgataggcactgagc

SEQ ID NO: 4137366 - DNA, 25 bp, Homo sapien
tgttcccaatagctcagtggtttca

SEQ ID NO: 4137367 - DNA, 25 bp, Homo sapien
taatctggtgtaccaagaagcctac

SEQ ID NO: 4137368 - DNA, 25 bp, Homo sapien
tggtaggtacaacgctcaccctgaa

SEQ ID NO: 4137369 - DNA, 25 bp, Homo sapien
tgacataactatgatgccgcacaaa

SEQ ID NO: 4137370 - DNA, 25 bp, Homo sapien
ctatatacaagaggtactgggtacc

SEQ ID NO: 4137371 - DNA, 25 bp, Homo sapien
gaacaagcgtgcacatattccccaa

SEQ ID NO: 4137372 - DNA, 25 bp, Homo sapien
attttattaaatcatgcacgtcacg

SEQ ID NO: 4137373 - DNA, 25 bp, Homo sapien
gttattttattaaatcatgcacgtc

SEQ ID NO: 4137374 - DNA, 25 bp, Homo sapien
aagttattttattaaatcatgcacg

SEQ ID NO: 4137375 - DNA, 25 bp, Homo sapien
tattttattaaatcatgcacgtcac

SEQ ID NO: 4137376 - DNA, 25 bp, Homo sapien
gaccagtctagcaagtgactctcat

SEQ ID NO: 4137377 - DNA, 25 bp, Homo sapien
ttaacaacccaatagtagagtcagc

SEQ ID NO: 4137378 - DNA, 25 bp, Homo sapien
tgataaaaggtagaaccaagatgcc

SEQ ID NO: 4137379 - DNA, 25 bp, Homo sapien
taaccctgccatgtagcacctttga

SEQ ID NO: 4137380 - DNA, 25 bp, Homo sapien
aacgtattcaccactcgaatggtac

SEQ ID NO: 4137381 - DNA, 25 bp, Homo sapien
taaaaacgtattcaccactcgaatg

SEQ ID NO: 4137382 - DNA, 25 bp, Homo sapien
atgacattctcataaaaacgtattc

SEQ ID NO: 4137383 - DNA, 25 bp, Homo sapien
tttttcagtatgacattctcataaa

SEQ ID NO: 4137384 - DNA, 25 bp, Homo sapien
actgcactcaacagtgtgggactct

SEQ ID NO: 4137385 - DNA, 25 bp, Homo sapien
gaggtgaacaatagcttgagtccag

SEQ ID NO: 4137386 - DNA, 25 bp, Homo sapien
tacaaagacaaccactactaccagt

SEQ ID NO: 4137387 - DNA, 25 bp, Homo sapien
accagtctgggtataaatcttccta

SEQ ID NO: 4137388 - DNA, 25 bp, Homo sapien
ctggtaatacggggctcccagtggc

SEQ ID NO: 4137389 - DNA, 25 bp, Homo sapien
tggtaatacggggctcccagtggca

SEQ ID NO: 4137390 - DNA, 25 bp, Homo sapien
aggagatacggcccaagggcttgtc

SEQ ID NO: 4137391 - DNA, 25 bp, Homo sapien
cgttgacagcaatatcgaagaccat

SEQ ID NO: 4137392 - DNA, 25 bp, Homo sapien
gatacggcccaagggcttgtcgttg

SEQ ID NO: 4137393 - DNA, 25 bp, Homo sapien
aagggcttgtcgttgacagcaatat

SEQ ID NO: 4137394 - DNA, 25 bp, Homo sapien
atgaaaactgggaaccacttgtgtt

SEQ ID NO: 4137395 - DNA, 25 bp, Homo sapien
tcaggatgaagttcttgcaatcaaa

SEQ ID NO: 4137396 - DNA, 25 bp, Homo sapien
agatggatgtgccaccagtgtggca

SEQ ID NO: 4137397 - DNA, 25 bp, Homo sapien
ttggcagggcacatgaaaactggga

SEQ ID NO: 4137398 - DNA, 25 bp, Homo sapien
actatgaagtgttacattcaccata

SEQ ID NO: 4137399 - DNA, 25 bp, Homo sapien
tgaactgacatagttatttatagcc

SEQ ID NO: 4137400 - DNA, 25 bp, Homo sapien
tccacttagttgaatattcacatgg

SEQ ID NO: 4137401 - DNA, 25 bp, Homo sapien
aaactgtggattaggtgtatccttt

SEQ ID NO: 4137402 - DNA, 25 bp, Homo sapien
atgagtgggtggtgattctgctgca

SEQ ID NO: 4137403 - DNA, 25 bp, Homo sapien
tcatgagtgggtggtgattctgctg

SEQ ID NO: 4137404 - DNA, 25 bp, Homo sapien
catgagtgggtggtgattctgctgc

SEQ ID NO: 4137405 - DNA, 25 bp, Homo sapien
cctgggtcgttccagctttactctc

SEQ ID NO: 4137406 - DNA, 25 bp, Homo sapien
tgggtcgttccagctttactctctc

SEQ ID NO: 4137407 - DNA, 25 bp, Homo sapien
ccctgggtcgttccagctttactct

SEQ ID NO: 4137408 - DNA, 25 bp, Homo sapien
tccctgggtcgttccagctttactc

SEQ ID NO: 4137409 - DNA, 25 bp, Homo sapien
ctcttcaaggtccaaggccagacca

SEQ ID NO: 4137410 - DNA, 25 bp, Homo sapien
ctcctcttcaaggtccaaggccaga

SEQ ID NO: 4137411 - DNA, 25 bp, Homo sapien
tcctcttcaaggtccaaggccagac

SEQ ID NO: 4137412 - DNA, 25 bp, Homo sapien
tcttcaaggtccaaggccagaccat

SEQ ID NO: 4137413 - DNA, 25 bp, Homo sapien
catgtactgggtgtgcctggatgcc

SEQ ID NO: 4137414 - DNA, 25 bp, Homo sapien
aacatgtactgggtgtgcctggatg

SEQ ID NO: 4137415 - DNA, 25 bp, Homo sapien
aggaaggacaggaacatgtactggg

SEQ ID NO: 4137416 - DNA, 25 bp, Homo sapien
tactgggtgtgcctggatgcctgcc

SEQ ID NO: 4137417 - DNA, 25 bp, Homo sapien
gtcgggactgggtcccactccatac

SEQ ID NO: 4137418 - DNA, 25 bp, Homo sapien
agtctgtgtcgggactgggtcccac

SEQ ID NO: 4137419 - DNA, 25 bp, Homo sapien
tgtggttttagagggacagtgagtc

SEQ ID NO: 4137420 - DNA, 25 bp, Homo sapien
tttagagggacagtgagtctgtgtc

SEQ ID NO: 4137421 - DNA, 25 bp, Homo sapien
catcatctgagtgttggctttggat

SEQ ID NO: 4137422 - DNA, 25 bp, Homo sapien
gttatctgcattgacttttgcatca

SEQ ID NO: 4137423 - DNA, 25 bp, Homo sapien
ccttccttcctgtgagttatctgca

SEQ ID NO: 4137424 - DNA, 25 bp, Homo sapien
gaccttccttcctgtgagttatctg

SEQ ID NO: 4137425 - DNA, 25 bp, Homo sapien
ttaactgcaaacaccctcaatccag

SEQ ID NO: 4137426 - DNA, 25 bp, Homo sapien
ccacaagtgtgtggcctcgagcctg

SEQ ID NO: 4137427 - DNA, 25 bp, Homo sapien
gagggacagcgttcatcctgcaggc

SEQ ID NO: 4137428 - DNA, 25 bp, Homo sapien
gttcaggcctgaggaatctacatcc

SEQ ID NO: 4137429 - DNA, 25 bp, Homo sapien
tctggggtagtgcaccccgcagcca

SEQ ID NO: 4137430 - DNA, 25 bp, Homo sapien
ctctgctctacaccctggcggaatg

SEQ ID NO: 4137431 - DNA, 25 bp, Homo sapien
ggcaaaggtcgcttctggttcagga

SEQ ID NO: 4137432 - DNA, 25 bp, Homo sapien
ttggacatgaggacagaactctggg

SEQ ID NO: 4137433 - DNA, 25 bp, Homo sapien
cagccaaaacctgaagaggccttac

SEQ ID NO: 4137434 - DNA, 25 bp, Homo sapien
cctgcacagccaaaacctgaagagg

SEQ ID NO: 4137435 - DNA, 25 bp, Homo sapien
tgcacagccaaaacctgaagaggcc

SEQ ID NO: 4137436 - DNA, 25 bp, Homo sapien
cacagccaaaacctgaagaggcctt

SEQ ID NO: 4137437 - DNA, 25 bp, Homo sapien
ctgggaacaccagtcacatctctgc

SEQ ID NO: 4137438 - DNA, 25 bp, Homo sapien
accagtcacatctctgctttgtcca

SEQ ID NO: 4137439 - DNA, 25 bp, Homo sapien
tgggaacaccagtcacatctctgct

SEQ ID NO: 4137440 - DNA, 25 bp, Homo sapien
acaccagtcacatctctgctttgtc

SEQ ID NO: 4137441 - DNA, 25 bp, Homo sapien
ttaacagagtcccactggtcctggt

SEQ ID NO: 4137442 - DNA, 25 bp, Homo sapien
ggaggccggctctgtagtccagcac

SEQ ID NO: 4137443 - DNA, 25 bp, Homo sapien
gggtgttaacagatttaacagagtc

SEQ ID NO: 4137444 - DNA, 25 bp, Homo sapien
tgaggttttcatggcaggtggctgg

SEQ ID NO: 4137445 - DNA, 25 bp, Homo sapien
ccaggatctggtgactataaataaa

SEQ ID NO: 4137446 - DNA, 25 bp, Homo sapien
ccttctgaacagttgggagaggttt

SEQ ID NO: 4137447 - DNA, 25 bp, Homo sapien
ccacccaggagccttgatcgttggg

SEQ ID NO: 4137448 - DNA, 25 bp, Homo sapien
taaataaagggacatgcgcagaaga

SEQ ID NO: 4137449 - DNA, 25 bp, Homo sapien
aaggaacctagacttcgatgccaag

SEQ ID NO: 4137450 - DNA, 25 bp, Homo sapien
tctcttgaaggaacctagacttcga

SEQ ID NO: 4137451 - DNA, 25 bp, Homo sapien
ttgaaggaacctagacttcgatgcc

SEQ ID NO: 4137452 - DNA, 25 bp, Homo sapien
ggaacctagacttcgatgccaagcc

SEQ ID NO: 4137453 - DNA, 25 bp, Homo sapien
ccgaaggagcgagaaccgaagcgga

SEQ ID NO: 4137454 - DNA, 25 bp, Homo sapien
gagcggggttcgaacttgctgctac

SEQ ID NO: 4137455 - DNA, 25 bp, Homo sapien
agcgcaatgcgcaacgagctgccgg

SEQ ID NO: 4137456 - DNA, 25 bp, Homo sapien
ttgctgctaccggagccacggccgg

SEQ ID NO: 4137457 - DNA, 25 bp, Homo sapien
ttccaaggcgcgtcctcagctagat

SEQ ID NO: 4137458 - DNA, 25 bp, Homo sapien
aggcgcgtcctcagctagatccttc

SEQ ID NO: 4137459 - DNA, 25 bp, Homo sapien
ggttgccgatgcgtttgttcacgca

SEQ ID NO: 4137460 - DNA, 25 bp, Homo sapien
tcggtctgcaggttgccgatgcgtt

SEQ ID NO: 4137461 - DNA, 25 bp, Homo sapien
ctgcgggaaatcctcgccctccgca

SEQ ID NO: 4137462 - DNA, 25 bp, Homo sapien
gtgggggcgcgctgcgggaaatcct

SEQ ID NO: 4137463 - DNA, 25 bp, Homo sapien
tcgccctccgcaggggtgcacgcgc

SEQ ID NO: 4137464 - DNA, 25 bp, Homo sapien
gggcgggtcggcaccacagtgggcg

SEQ ID NO: 4137465 - DNA, 25 bp, Homo sapien
aacggttcctcctcaggtctcacgg

SEQ ID NO: 4137466 - DNA, 25 bp, Homo sapien
gggagcgatcacaacaggtcccatc

SEQ ID NO: 4137467 - DNA, 25 bp, Homo sapien
ggcgccccaggtgtagagaaatgca

SEQ ID NO: 4137468 - DNA, 25 bp, Homo sapien
gacagcgaacgagggtttctagtcc

SEQ ID NO: 4137469 - DNA, 25 bp, Homo sapien
acccattccagcgacggcaggggaa

SEQ ID NO: 4137470 - DNA, 25 bp, Homo sapien
gcaggggaaggtaccaggtctctgt

SEQ ID NO: 4137471 - DNA, 25 bp, Homo sapien
ccacacccattccagcgacggcagg

SEQ ID NO: 4137472 - DNA, 25 bp, Homo sapien
cggcaggggaaggtaccaggtctct

SEQ ID NO: 4137473 - DNA, 25 bp, Homo sapien
gcggcgcgcggccagagctgagctg

SEQ ID NO: 4137474 - DNA, 25 bp, Homo sapien
ttcaacctgcggcgcgcggccagag

SEQ ID NO: 4137475 - DNA, 25 bp, Homo sapien
cctgcggcgcgcggccagagctgag

SEQ ID NO: 4137476 - DNA, 25 bp, Homo sapien
ggagcagagagagcgaggacacaca

SEQ ID NO: 4137477 - DNA, 25 bp, Homo sapien
taacttagaaggctgacggtacaca

SEQ ID NO: 4137478 - DNA, 25 bp, Homo sapien
gctgggccctacttgctgaccttgg

SEQ ID NO: 4137479 - DNA, 25 bp, Homo sapien
tagttgggctccctacaagacagca

SEQ ID NO: 4137480 - DNA, 25 bp, Homo sapien
gtacacagtggacgctagttgggct

SEQ ID NO: 4137481 - DNA, 25 bp, Homo sapien
attccgtgtacatgcaaactctttg

SEQ ID NO: 4137482 - DNA, 25 bp, Homo sapien
tgtacacacgttctctgcacaaacg

SEQ ID NO: 4137483 - DNA, 25 bp, Homo sapien
cacgtgtaggtggatacacattctc

SEQ ID NO: 4137484 - DNA, 25 bp, Homo sapien
acactatcagtagccttgtggccct

SEQ ID NO: 4137485 - DNA, 25 bp, Homo sapien
tccccagtacaggagatggacccca

SEQ ID NO: 4137486 - DNA, 25 bp, Homo sapien
cagctgggccttgggattcttcaga

SEQ ID NO: 4137487 - DNA, 25 bp, Homo sapien
gaacagatccaaattgagcccagct

SEQ ID NO: 4137488 - DNA, 25 bp, Homo sapien
gaagacaacagcgtgccatgcagat

SEQ ID NO: 4137489 - DNA, 25 bp, Homo sapien
gaatcaggagaaccatgtaaaaaaa

SEQ ID NO: 4137490 - DNA, 25 bp, Homo sapien
atctagaatgagacccacagccccg

SEQ ID NO: 4137491 - DNA, 25 bp, Homo sapien
ggagaaccatgtaaaaaaatgtaga

SEQ ID NO: 4137492 - DNA, 25 bp, Homo sapien
agaatgagacccacagccccgggca

SEQ ID NO: 4137493 - DNA, 25 bp, Homo sapien
gagtgcagttacacaaagacctcgg

SEQ ID NO: 4137494 - DNA, 25 bp, Homo sapien
gtgcagttacacaaagacctcggct

SEQ ID NO: 4137495 - DNA, 25 bp, Homo sapien
cagttacacaaagacctcggctcac

SEQ ID NO: 4137496 - DNA, 25 bp, Homo sapien
ctggagtgcagttacacaaagacct

SEQ ID NO: 4137497 - DNA, 25 bp, Homo sapien
ccaatgctcagcagacggaaggtgt

SEQ ID NO: 4137498 - DNA, 25 bp, Homo sapien
caagggcattctactgcatgggatc

SEQ ID NO: 4137499 - DNA, 25 bp, Homo sapien
taactggctgtggtgccaaggcgcc

SEQ ID NO: 4137500 - DNA, 25 bp, Homo sapien
gaataaatcctgacactggccaggc

SEQ ID NO: 4137501 - DNA, 25 bp, Homo sapien
tttagctggtccctactgtccacac

SEQ ID NO: 4137502 - DNA, 25 bp, Homo sapien
tccacacctgcggtgacattactgc

SEQ ID NO: 4137503 - DNA, 25 bp, Homo sapien
cctttagctggtccctactgtccac

SEQ ID NO: 4137504 - DNA, 25 bp, Homo sapien
ctactgtccacacctgcggtgacat

SEQ ID NO: 4137505 - DNA, 25 bp, Homo sapien
cagcaaagaaccactgttttgcatt

SEQ ID NO: 4137506 - DNA, 25 bp, Homo sapien
gcagcaaagaaccactgttttgcat

SEQ ID NO: 4137507 - DNA, 25 bp, Homo sapien
ggccttgttctctaacagttgttga

SEQ ID NO: 4137508 - DNA, 25 bp, Homo sapien
gttgaagcaaatcacagatgtccag

SEQ ID NO: 4137509 - DNA, 25 bp, Homo sapien
cccagacccagttgtctactacata

SEQ ID NO: 4137510 - DNA, 25 bp, Homo sapien
cagtccaaaaacgaagtgttccact

SEQ ID NO: 4137511 - DNA, 25 bp, Homo sapien
gcattaacgtgaagacttatttttc

SEQ ID NO: 4137512 - DNA, 25 bp, Homo sapien
ctctccatctccaccctcctccaag

SEQ ID NO: 4137513 - DNA, 25 bp, Homo sapien
ccatctccaccctcctccaagaagc

SEQ ID NO: 4137514 - DNA, 25 bp, Homo sapien
ctgtctctccatctccaccctcctc

SEQ ID NO: 4137515 - DNA, 25 bp, Homo sapien
tccatctccaccctcctccaagaag

SEQ ID NO: 4137516 - DNA, 25 bp, Homo sapien
gaagaggtaatctcacttcacagat

SEQ ID NO: 4137517 - DNA, 25 bp, Homo sapien
ttaaaagaaacctcaagcactctgc

SEQ ID NO: 4137518 - DNA, 25 bp, Homo sapien
gattaccctaagtcacacagcctgt

SEQ ID NO: 4137519 - DNA, 25 bp, Homo sapien
gcctgtgacaccagggtttcatcaa

SEQ ID NO: 4137520 - DNA, 25 bp, Homo sapien
ggaaatcatctgaattggttcctga

SEQ ID NO: 4137521 - DNA, 25 bp, Homo sapien
gaaatcatctgaattggttcctgaa

SEQ ID NO: 4137522 - DNA, 25 bp, Homo sapien
gagggaaatcatctgaattggttcc

SEQ ID NO: 4137523 - DNA, 25 bp, Homo sapien
gggaaatcatctgaattggttcctg

SEQ ID NO: 4137524 - DNA, 25 bp, Homo sapien
ctgggggctttcgagaggacttcac

SEQ ID NO: 4137525 - DNA, 25 bp, Homo sapien
gacgtcagcagctttcacacaaatc

SEQ ID NO: 4137526 - DNA, 25 bp, Homo sapien
acaataagaacaggcctcaggctca

SEQ ID NO: 4137527 - DNA, 25 bp, Homo sapien
tttaacaataagaacaggccgagca

SEQ ID NO: 4137528 - DNA, 25 bp, Homo sapien
tcttgacttggtgccaaaaagacgt

SEQ ID NO: 4137529 - DNA, 25 bp, Homo sapien
tccattcaacagttctgatgatact

SEQ ID NO: 4137530 - DNA, 25 bp, Homo sapien
gcttttgagagtaaacaaagataca

SEQ ID NO: 4137531 - DNA, 25 bp, Homo sapien
caacaggttgggattatagtaccac

SEQ ID NO: 4137532 - DNA, 25 bp, Homo sapien
tcattccttgagcccacgtggtcaa

SEQ ID NO: 4137533 - DNA, 25 bp, Homo sapien
agctcatgggctagtcccactggtg

SEQ ID NO: 4137534 - DNA, 25 bp, Homo sapien
accactgaaggcctgctgacatcca

SEQ ID NO: 4137535 - DNA, 25 bp, Homo sapien
ctcatgggctagtcccactggtggt

SEQ ID NO: 4137536 - DNA, 25 bp, Homo sapien
gtggggagggtcgttcagcaaaagc

SEQ ID NO: 4137537 - DNA, 25 bp, Homo sapien
gggtggaacctgactcaatccaagc

SEQ ID NO: 4137538 - DNA, 25 bp, Homo sapien
ggctacaccgagtgaaatgtaaaca

SEQ ID NO: 4137539 - DNA, 25 bp, Homo sapien
ggtctctgcctatggctacaccgag

SEQ ID NO: 4137540 - DNA, 25 bp, Homo sapien
caagccgaatcaggttctccctgag

SEQ ID NO: 4137541 - DNA, 25 bp, Homo sapien
tcgagtcatgctgacttgggcctag

SEQ ID NO: 4137542 - DNA, 25 bp, Homo sapien
gaaattctcattcatgcctctcaga

SEQ ID NO: 4137543 - DNA, 25 bp, Homo sapien
gggaaatccttggctgtagcacact

SEQ ID NO: 4137544 - DNA, 25 bp, Homo sapien
gtcaaagccatcctcgagtcatgct

SEQ ID NO: 4137545 - DNA, 25 bp, Homo sapien
cacagcacagttattgaactttcgt

SEQ ID NO: 4137546 - DNA, 25 bp, Homo sapien
caaccattcctggtccaactcaagt

SEQ ID NO: 4137547 - DNA, 25 bp, Homo sapien
tcgtgagcttaagagaatcataaaa

SEQ ID NO: 4137548 - DNA, 25 bp, Homo sapien
catttggttcatccaagatcaagtt

SEQ ID NO: 4137549 - DNA, 25 bp, Homo sapien
cacagcacggagataccactacact

SEQ ID NO: 4137550 - DNA, 25 bp, Homo sapien
gctaatacctagcaagggcacattc

SEQ ID NO: 4137551 - DNA, 25 bp, Homo sapien
aagcttctgacaatggctccctgga

SEQ ID NO: 4137552 - DNA, 25 bp, Homo sapien
catgggtgaggtcatattcagctaa

SEQ ID NO: 4137553 - DNA, 25 bp, Homo sapien
aaaatgaaaaagagaccaggcatgg

SEQ ID NO: 4137554 - DNA, 25 bp, Homo sapien
ggccacacagtctctttgcaactat

SEQ ID NO: 4137555 - DNA, 25 bp, Homo sapien
caacactgatgtggcttggctatgt

SEQ ID NO: 4137556 - DNA, 25 bp, Homo sapien
actgctgttcaatagaagtttctgc

SEQ ID NO: 4137557 - DNA, 25 bp, Homo sapien
gcaccactgtggtgtgtaacaacac

SEQ ID NO: 4137558 - DNA, 25 bp, Homo sapien
agagtacagtcttcagagagcccaa

SEQ ID NO: 4137559 - DNA, 25 bp, Homo sapien
gggtccaagacatattaagttaaca

SEQ ID NO: 4137560 - DNA, 25 bp, Homo sapien
caggccatagttttccctactacac

SEQ ID NO: 4137561 - DNA, 25 bp, Homo sapien
ctgtctattagcaccactgatgtgg

SEQ ID NO: 4137562 - DNA, 25 bp, Homo sapien
caggagaggaaagataacttagtaa

SEQ ID NO: 4137563 - DNA, 25 bp, Homo sapien
cacaggagaggaaagataacttagt

SEQ ID NO: 4137564 - DNA, 25 bp, Homo sapien
ctacacaggagaggaaagataactt

SEQ ID NO: 4137565 - DNA, 25 bp, Homo sapien
tacacaggagaggaaagataactta

SEQ ID NO: 4137566 - DNA, 25 bp, Homo sapien
gcaactggaacatcaaattatgtga

SEQ ID NO: 4137567 - DNA, 25 bp, Homo sapien
gccaactgccgcttcactctaaact

SEQ ID NO: 4137568 - DNA, 25 bp, Homo sapien
gggaaaccttcagaacctccagcca

SEQ ID NO: 4137569 - DNA, 25 bp, Homo sapien
agggagtcgtcctgatgtgggcaac

SEQ ID NO: 4137570 - DNA, 25 bp, Homo sapien
gaaattcaggcgacaaccaactcac

SEQ ID NO: 4137571 - DNA, 25 bp, Homo sapien
gaatttgggcgaaaaccagcttctc

SEQ ID NO: 4137572 - DNA, 25 bp, Homo sapien
aaaacgctgtccctaattaaggatg

SEQ ID NO: 4137573 - DNA, 25 bp, Homo sapien
gtaattcttaaacaacaggcgatga

SEQ ID NO: 4137574 - DNA, 25 bp, Homo sapien
caagatgtttcttgctcggtgagct

SEQ ID NO: 4137575 - DNA, 25 bp, Homo sapien
cagtgtgctctagtctgcaggccac

SEQ ID NO: 4137576 - DNA, 25 bp, Homo sapien
taatgggacacagcattaaggctga

SEQ ID NO: 4137577 - DNA, 25 bp, Homo sapien
tcggtgagctgctgaatgaactggc

SEQ ID NO: 4137578 - DNA, 25 bp, Homo sapien
catgccagggaaagactcctaaaca

SEQ ID NO: 4137579 - DNA, 25 bp, Homo sapien
tccttagatccacagcaaccaaaat

SEQ ID NO: 4137580 - DNA, 25 bp, Homo sapien
caaaatacaatggcagctcgctctc

SEQ ID NO: 4137581 - DNA, 25 bp, Homo sapien
cagggaaagactcctaaacatctct

SEQ ID NO: 4137582 - DNA, 25 bp, Homo sapien
taatataaagttgacttggcaggtc

SEQ ID NO: 4137583 - DNA, 25 bp, Homo sapien
caagtggtgctagtacactgtgttg

SEQ ID NO: 4137584 - DNA, 25 bp, Homo sapien
gatgatacagtagatcaggagcacc

SEQ ID NO: 4137585 - DNA, 25 bp, Homo sapien
tcatgttagtagtttttcaagagat

SEQ ID NO: 4137586 - DNA, 25 bp, Homo sapien
tgtgcactttggctcaggtacccca

SEQ ID NO: 4137587 - DNA, 25 bp, Homo sapien
gaccaagctggcttatctcctcctg

SEQ ID NO: 4137588 - DNA, 25 bp, Homo sapien
ttccatccacacagccaatgaactg

SEQ ID NO: 4137589 - DNA, 25 bp, Homo sapien
tccagggccttgatccaataaaagg

SEQ ID NO: 4137590 - DNA, 25 bp, Homo sapien
taggcttcagctgtccaaacaaaag

SEQ ID NO: 4137591 - DNA, 25 bp, Homo sapien
ttctgaaccaaagcggggacagctg

SEQ ID NO: 4137592 - DNA, 25 bp, Homo sapien
caaacaaaagggcattctgaaccaa

SEQ ID NO: 4137593 - DNA, 25 bp, Homo sapien
aaaccatggctgaattgtaggcttc

SEQ ID NO: 4137594 - DNA, 25 bp, Homo sapien
caagaccaccccacattgaagagct

SEQ ID NO: 4137595 - DNA, 25 bp, Homo sapien
ccaccccacattgaagagctcagat

SEQ ID NO: 4137596 - DNA, 25 bp, Homo sapien
gaagagctcagatctcctgcatcca

SEQ ID NO: 4137597 - DNA, 25 bp, Homo sapien
agagctcagatctcctgcatccaga

SEQ ID NO: 4137598 - DNA, 25 bp, Homo sapien
tagaatagatcctgtccgtcttggc

SEQ ID NO: 4137599 - DNA, 25 bp, Homo sapien
aaactagaatagatcctgtccgtct

SEQ ID NO: 4137600 - DNA, 25 bp, Homo sapien
aatgcctcttctatatccaactctg

SEQ ID NO: 4137601 - DNA, 25 bp, Homo sapien
aatagatcctgtccgtcttggctgc

SEQ ID NO: 4137602 - DNA, 25 bp, Homo sapien
agcgaacctggggcacgtgagatct

SEQ ID NO: 4137603 - DNA, 25 bp, Homo sapien
cagcgaacctggggcacgtgagatc

SEQ ID NO: 4137604 - DNA, 25 bp, Homo sapien
aacgctgcagcgaacctggggcacg

SEQ ID NO: 4137605 - DNA, 25 bp, Homo sapien
ccctaacgctgcagcgaacctgggg

SEQ ID NO: 4137606 - DNA, 25 bp, Homo sapien
ctggggagagaagcacaggcttggt

SEQ ID NO: 4137607 - DNA, 25 bp, Homo sapien
tggggagagaagcacaggcttggtc

SEQ ID NO: 4137608 - DNA, 25 bp, Homo sapien
ggggagagaagcacaggcttggtca

SEQ ID NO: 4137609 - DNA, 25 bp, Homo sapien
gggagagaagcacaggcttggtcat

SEQ ID NO: 4137610 - DNA, 25 bp, Homo sapien
tgctttggcgtctgcttcttggcat

SEQ ID NO: 4137611 - DNA, 25 bp, Homo sapien
ctgctttggcgtctgcttcttggca

SEQ ID NO: 4137612 - DNA, 25 bp, Homo sapien
cctggacagatggtttaggcagccc

SEQ ID NO: 4137613 - DNA, 25 bp, Homo sapien
aagtctagaatagcatcctgtgtga

SEQ ID NO: 4137614 - DNA, 25 bp, Homo sapien
tgagacttctcctccgggtgctatg

SEQ ID NO: 4137615 - DNA, 25 bp, Homo sapien
aagcctggtgcctttatgcaggagg

SEQ ID NO: 4137616 - DNA, 25 bp, Homo sapien
taaaagcctttgtaagcacatgagg

SEQ ID NO: 4137617 - DNA, 25 bp, Homo sapien
gaacacaaaagattcttttagcatt

SEQ ID NO: 4137618 - DNA, 25 bp, Homo sapien
acacaaaagattcttttagcattag

SEQ ID NO: 4137619 - DNA, 25 bp, Homo sapien
ctgttaacagaacacaaaagattct

SEQ ID NO: 4137620 - DNA, 25 bp, Homo sapien
acagaacacaaaagattcttttagc

SEQ ID NO: 4137621 - DNA, 25 bp, Homo sapien
atccacaggcttctgcgggtcccag

SEQ ID NO: 4137622 - DNA, 25 bp, Homo sapien
aggcttctgcgggtcccaggattcc

SEQ ID NO: 4137623 - DNA, 25 bp, Homo sapien
cttctcgtgcattatccacaggctt

SEQ ID NO: 4137624 - DNA, 25 bp, Homo sapien
ggcttctcgtgcattatccacaggc

SEQ ID NO: 4137625 - DNA, 25 bp, Homo sapien
cctggctttcttcgggttgagtttg

SEQ ID NO: 4137626 - DNA, 25 bp, Homo sapien
gctgcctcgcagtcataaacaggat

SEQ ID NO: 4137627 - DNA, 25 bp, Homo sapien
gcaaaacggtgttccgcagctgcct

SEQ ID NO: 4137628 - DNA, 25 bp, Homo sapien
ggcttctacccactataatgttctg

SEQ ID NO: 4137629 - DNA, 25 bp, Homo sapien
taaacaggatgtcttagcaaggaag

SEQ ID NO: 4137630 - DNA, 25 bp, Homo sapien
gcaccacacttgctaagaggcagat

SEQ ID NO: 4137631 - DNA, 25 bp, Homo sapien
tagcagtggcggttgcacaacaacg

SEQ ID NO: 4137632 - DNA, 25 bp, Homo sapien
ccacctgtggtatgccttaaagaaa

SEQ ID NO: 4137633 - DNA, 25 bp, Homo sapien
cacattaacaacagggaagccggat

SEQ ID NO: 4137634 - DNA, 25 bp, Homo sapien
acctcgactgatgctcaagattggg

SEQ ID NO: 4137635 - DNA, 25 bp, Homo sapien
gaagtctaggctctccattcaacct

SEQ ID NO: 4137636 - DNA, 25 bp, Homo sapien
tggacctggagtagagcagtgactc

SEQ ID NO: 4137637 - DNA, 25 bp, Homo sapien
tagactgttgtcaaagcctaggctc

SEQ ID NO: 4137638 - DNA, 25 bp, Homo sapien
tggacttctgtagctatacagcaag

SEQ ID NO: 4137639 - DNA, 25 bp, Homo sapien
gaccaatactacaaaatctggactt

SEQ ID NO: 4137640 - DNA, 25 bp, Homo sapien
gcctagctctagatctcaaagattc

SEQ ID NO: 4137641 - DNA, 25 bp, Homo sapien
cctagggatgttcaatttctctgcc

SEQ ID NO: 4137642 - DNA, 25 bp, Homo sapien
ctcaacaaacaccatcacgtctcct

SEQ ID NO: 4137643 - DNA, 25 bp, Homo sapien
catcacgtctccttgcccggcgctg

SEQ ID NO: 4137644 - DNA, 25 bp, Homo sapien
gatggtgtccacagtgaacttggct

SEQ ID NO: 4137645 - DNA, 25 bp, Homo sapien
tgatggtgtccacagtgaacttggc

SEQ ID NO: 4137646 - DNA, 25 bp, Homo sapien
tgttcttgtcactgtcaggggtcac

SEQ ID NO: 4137647 - DNA, 25 bp, Homo sapien
tcttgttcttgtcactgtcaggggt

SEQ ID NO: 4137648 - DNA, 25 bp, Homo sapien
gaccttgggcagatactccacagag

SEQ ID NO: 4137649 - DNA, 25 bp, Homo sapien
ttgggcagatactccacagagtatg

SEQ ID NO: 4137650 - DNA, 25 bp, Homo sapien
ctttcttctcctagccccagagcag

SEQ ID NO: 4137651 - DNA, 25 bp, Homo sapien
tttcttctcctagccccagagcagc

SEQ ID NO: 4137652 - DNA, 25 bp, Homo sapien
gataggtgagaaatacataatcact

SEQ ID NO: 4137653 - DNA, 25 bp, Homo sapien
catgatggcacacacaaggtgtcta

SEQ ID NO: 4137654 - DNA, 25 bp, Homo sapien
tcacctctcctaccctcccatgatg

SEQ ID NO: 4137655 - DNA, 25 bp, Homo sapien
ctcccatgatggcacacacaaggtg

SEQ ID NO: 4137656 - DNA, 25 bp, Homo sapien
gcttccaaccctggaccttttgcag

SEQ ID NO: 4137657 - DNA, 25 bp, Homo sapien
tgcagtgactttactggcatctccc

SEQ ID NO: 4137658 - DNA, 25 bp, Homo sapien
tattggcgatgttccctacagcttc

SEQ ID NO: 4137659 - DNA, 25 bp, Homo sapien
gctcttggagatgtgctgtcctgca

SEQ ID NO: 4137660 - DNA, 25 bp, Homo sapien
tcttccacgagcaactccacggtgt

SEQ ID NO: 4137661 - DNA, 25 bp, Homo sapien
gaagatcttgaccacgtgagggcca

SEQ ID NO: 4137662 - DNA, 25 bp, Homo sapien
caacctgcacaacgaagggactctt

SEQ ID NO: 4137663 - DNA, 25 bp, Homo sapien
catgggtttgtacacacatcgatac

SEQ ID NO: 4137664 - DNA, 25 bp, Homo sapien
tggtctcaactaggaagccaacagc

SEQ ID NO: 4137665 - DNA, 25 bp, Homo sapien
taggattcggaagaggaagccacgt

SEQ ID NO: 4137666 - DNA, 25 bp, Homo sapien
gcccagtggtctcaactaggaagcc

SEQ ID NO: 4137667 - DNA, 25 bp, Homo sapien
cccagaggtaggattcggaagagga

SEQ ID NO: 4137668 - DNA, 25 bp, Homo sapien
tgggtggctataaaggcaataatta

SEQ ID NO: 4137669 - DNA, 25 bp, Homo sapien
gctgtctgttacaaggccttcagaa

SEQ ID NO: 4137670 - DNA, 25 bp, Homo sapien
gctgaggcagaccaatcttttcgtg

SEQ ID NO: 4137671 - DNA, 25 bp, Homo sapien
taattagcagtaaacaccattgctg

SEQ ID NO: 4137672 - DNA, 25 bp, Homo sapien
gcagctttggtgtcaaccttgaaat

SEQ ID NO: 4137673 - DNA, 25 bp, Homo sapien
ggtgtcaaccttgaaatctgtggtc

SEQ ID NO: 4137674 - DNA, 25 bp, Homo sapien
tgtggtctcccggatacggacgcct

SEQ ID NO: 4137675 - DNA, 25 bp, Homo sapien
taggacccttcatggttacaccgag

SEQ ID NO: 4137676 - DNA, 25 bp, Homo sapien
ctgagatagagaaacaaaggaacac

SEQ ID NO: 4137677 - DNA, 25 bp, Homo sapien
gatagagaaacaaaggaacacttac

SEQ ID NO: 4137678 - DNA, 25 bp, Homo sapien
gagatagagaaacaaaggaacactt

SEQ ID NO: 4137679 - DNA, 25 bp, Homo sapien
tgagatagagaaacaaaggaacact

SEQ ID NO: 4137680 - DNA, 25 bp, Homo sapien
ggaaggaaggagataatctttccaa

SEQ ID NO: 4137681 - DNA, 25 bp, Homo sapien
aggagataatctttccaacacaatc

SEQ ID NO: 4137682 - DNA, 25 bp, Homo sapien
ggaaggagataatctttccaacaca

SEQ ID NO: 4137683 - DNA, 25 bp, Homo sapien
gaaggaaggagataatctttccaac

SEQ ID NO: 4137684 - DNA, 25 bp, Homo sapien
cgaatgcgtagaccccatccagaaa

SEQ ID NO: 4137685 - DNA, 25 bp, Homo sapien
taatactcgaatgcgtagaccccat

SEQ ID NO: 4137686 - DNA, 25 bp, Homo sapien
gatggcaatgctgtatctccccggg

SEQ ID NO: 4137687 - DNA, 25 bp, Homo sapien
tttggaatgtggtgtcccccccatg

SEQ ID NO: 4137688 - DNA, 25 bp, Homo sapien
attctaccacgaagtccgctgaccg

SEQ ID NO: 4137689 - DNA, 25 bp, Homo sapien
cagggccccaagcacggactttctg

SEQ ID NO: 4137690 - DNA, 25 bp, Homo sapien
tcagagccaatggattctaccacga

SEQ ID NO: 4137691 - DNA, 25 bp, Homo sapien
gactttctgcatacccgcttcaggg

SEQ ID NO: 4137692 - DNA, 25 bp, Homo sapien
gccttgaaccaacacccactcttag

SEQ ID NO: 4137693 - DNA, 25 bp, Homo sapien
aaagccttgaaccaacacccactct

SEQ ID NO: 4137694 - DNA, 25 bp, Homo sapien
ctgttggagatgtggcaacatgtgg

SEQ ID NO: 4137695 - DNA, 25 bp, Homo sapien
ttggagatgtggcaacatgtggcaa

SEQ ID NO: 4137696 - DNA, 25 bp, Homo sapien
tgtcttcgtcgtcacacatgatgtg

SEQ ID NO: 4137697 - DNA, 25 bp, Homo sapien
gatgaaggccatgtacgggctgtcc

SEQ ID NO: 4137698 - DNA, 25 bp, Homo sapien
cagatcagggttgtagcctcccgtg

SEQ ID NO: 4137699 - DNA, 25 bp, Homo sapien
gatgtgaacagcatattcgccaggc

SEQ ID NO: 4137700 - DNA, 25 bp, Homo sapien
tgcttaaggcaacttcgggcatggg

SEQ ID NO: 4137701 - DNA, 25 bp, Homo sapien
ctcaacatgctgcttaaggcaactt

SEQ ID NO: 4137702 - DNA, 25 bp, Homo sapien
aagacagaagcacagcagctgattc

SEQ ID NO: 4137703 - DNA, 25 bp, Homo sapien
catgctgcttaaggcaacttcgggc

SEQ ID NO: 4137704 - DNA, 25 bp, Homo sapien
tagctaccagcccagactgacatca

SEQ ID NO: 4137705 - DNA, 25 bp, Homo sapien
gtcatgcccagtttcaacgttccca

SEQ ID NO: 4137706 - DNA, 25 bp, Homo sapien
aggaatatcatttggccaaaacggg

SEQ ID NO: 4137707 - DNA, 25 bp, Homo sapien
gggactcagaatctttaccacggac

SEQ ID NO: 4137708 - DNA, 25 bp, Homo sapien
ctgttctaaaaccatgcccaaacta

SEQ ID NO: 4137709 - DNA, 25 bp, Homo sapien
cctgttctaaaaccatgcccaaact

SEQ ID NO: 4137710 - DNA, 25 bp, Homo sapien
tgttctaaaaccatgcccaaactaa

SEQ ID NO: 4137711 - DNA, 25 bp, Homo sapien
gcccagggaaggcaaaatattggaa

SEQ ID NO: 4137712 - DNA, 25 bp, Homo sapien
agcaaaggcagatagtaagtctctt

SEQ ID NO: 4137713 - DNA, 25 bp, Homo sapien
gcaaaggcagatagtaagtctcttt

SEQ ID NO: 4137714 - DNA, 25 bp, Homo sapien
ctttaagggagcttttccagcatcc

SEQ ID NO: 4137715 - DNA, 25 bp, Homo sapien
tccagcatccttaggatccacagtg

SEQ ID NO: 4137716 - DNA, 25 bp, Homo sapien
tccacagtgaactcggccaggttgt

SEQ ID NO: 4137717 - DNA, 25 bp, Homo sapien
ggttgttgacaatgcatccagattt

SEQ ID NO: 4137718 - DNA, 25 bp, Homo sapien
ctgcacaggtggccccctgaaattt

SEQ ID NO: 4137719 - DNA, 25 bp, Homo sapien
tgcacaggtggccccctgaaattta

SEQ ID NO: 4137720 - DNA, 25 bp, Homo sapien
gcacaggtggccccctgaaatttac

SEQ ID NO: 4137721 - DNA, 25 bp, Homo sapien
tcatctggatgtcaatgcgttggcc

SEQ ID NO: 4137722 - DNA, 25 bp, Homo sapien
caatggtgtgcttgatggccttcac

SEQ ID NO: 4137723 - DNA, 25 bp, Homo sapien
ggctgtgcgggatgttcacgcctcc

SEQ ID NO: 4137724 - DNA, 25 bp, Homo sapien
tgtgccgtccatccggttcttcatc

SEQ ID NO: 4137725 - DNA, 25 bp, Homo sapien
ttcgggcccctccatcattcaaggc

SEQ ID NO: 4137726 - DNA, 25 bp, Homo sapien
cattgttagaaatagttcttctgag

SEQ ID NO: 4137727 - DNA, 25 bp, Homo sapien
tctcctccacttggacccagtaaaa

SEQ ID NO: 4137728 - DNA, 25 bp, Homo sapien
gacatggagaaggtcatcaagttct

SEQ ID NO: 4137729 - DNA, 25 bp, Homo sapien
agtgtgtaggttcatttgccttcag

SEQ ID NO: 4137730 - DNA, 25 bp, Homo sapien
ctggcccaaacactttgaccttctg

SEQ ID NO: 4137731 - DNA, 25 bp, Homo sapien
agtccaccgtgaagtgtgtaggttc

SEQ ID NO: 4137732 - DNA, 25 bp, Homo sapien
accttctgaggatggctaccttgcc

SEQ ID NO: 4137733 - DNA, 25 bp, Homo sapien
ttccccacggagcaatgatcactgg

SEQ ID NO: 4137734 - DNA, 25 bp, Homo sapien
aaaggcattgaaacgttatgaaaag

SEQ ID NO: 4137735 - DNA, 25 bp, Homo sapien
tgaaacgttatgaaaagaactgcct

SEQ ID NO: 4137736 - DNA, 25 bp, Homo sapien
gatggactacttcctagttcaaaag

SEQ ID NO: 4137737 - DNA, 25 bp, Homo sapien
acagcatgtcctgtgcaatctcttc

SEQ ID NO: 4137738 - DNA, 25 bp, Homo sapien
gaaacagcatgtcctgtgcaatctc

SEQ ID NO: 4137739 - DNA, 25 bp, Homo sapien
ctggaacagaccagcttattagcac

SEQ ID NO: 4137740 - DNA, 25 bp, Homo sapien
ttattagcaccagcttacaagaaac

SEQ ID NO: 4137741 - DNA, 25 bp, Homo sapien
gactgtgaacgtatcattggcattg

SEQ ID NO: 4137742 - DNA, 25 bp, Homo sapien
gcaggaggcacatatttgactgtga

SEQ ID NO: 4137743 - DNA, 25 bp, Homo sapien
tcatcttcacttaacacccgggcat

SEQ ID NO: 4137744 - DNA, 25 bp, Homo sapien
ttgatagtgtatcgcccagcagcag

SEQ ID NO: 4137745 - DNA, 25 bp, Homo sapien
gcatcgtgggaagggtcaactttga

SEQ ID NO: 4137746 - DNA, 25 bp, Homo sapien
tggcatcgtgggaagggtcaacttt

SEQ ID NO: 4137747 - DNA, 25 bp, Homo sapien
tcgtgggaagggtcaactttgactc

SEQ ID NO: 4137748 - DNA, 25 bp, Homo sapien
gctggcatcgtgggaagggtcaact

SEQ ID NO: 4137749 - DNA, 25 bp, Homo sapien
ctgagccctgggccttctgccttca

SEQ ID NO: 4137750 - DNA, 25 bp, Homo sapien
ctgctttgctgagccctgggccttc

SEQ ID NO: 4137751 - DNA, 25 bp, Homo sapien
ctttgctgagccctgggccttctgc

SEQ ID NO: 4137752 - DNA, 25 bp, Homo sapien
tgagccctgggccttctgccttcac

SEQ ID NO: 4137753 - DNA, 25 bp, Homo sapien
agggctgttgaactgcacgttgagc

SEQ ID NO: 4137754 - DNA, 25 bp, Homo sapien
tagacagtgaagtgggtcggtttcc

SEQ ID NO: 4137755 - DNA, 25 bp, Homo sapien
ttcactgcatcgccaggaagagggc

SEQ ID NO: 4137756 - DNA, 25 bp, Homo sapien
ccgtgtgagagtagtcataattatc

SEQ ID NO: 4137757 - DNA, 25 bp, Homo sapien
cagagtaagccagcctagatggtaa

SEQ ID NO: 4137758 - DNA, 25 bp, Homo sapien
ggcccttatggcctgaaataatcag

SEQ ID NO: 4137759 - DNA, 25 bp, Homo sapien
ccctaaatagtgtgctgggccttag

SEQ ID NO: 4137760 - DNA, 25 bp, Homo sapien
ggaaacacaaaggtgtagcagctct

SEQ ID NO: 4137761 - DNA, 25 bp, Homo sapien
agaggacccagacgggagcaaggct

SEQ ID NO: 4137762 - DNA, 25 bp, Homo sapien
gactgctcctcgctgagaggaccca

SEQ ID NO: 4137763 - DNA, 25 bp, Homo sapien
ctgcagaaagcgttgcccttcttct

SEQ ID NO: 4137764 - DNA, 25 bp, Homo sapien
gacccagacgggagcaaggcttctg

SEQ ID NO: 4137765 - DNA, 25 bp, Homo sapien
tggatgaatgtgaccttggggtgac

SEQ ID NO: 4137766 - DNA, 25 bp, Homo sapien
ctggatgaatgtgaccttggggtga

SEQ ID NO: 4137767 - DNA, 25 bp, Homo sapien
ggatgaatgtgaccttggggtgact

SEQ ID NO: 4137768 - DNA, 25 bp, Homo sapien
tccggacacaaagccctaagtgagt

SEQ ID NO: 4137769 - DNA, 25 bp, Homo sapien
gagcatccggacacaaagccctaag

SEQ ID NO: 4137770 - DNA, 25 bp, Homo sapien
cctaagtgagtactcagcatggcag

SEQ ID NO: 4137771 - DNA, 25 bp, Homo sapien
caaagccctaagtgagtactcagca

SEQ ID NO: 4137772 - DNA, 25 bp, Homo sapien
ttgccacttggtggcaacgaccgcc

SEQ ID NO: 4137773 - DNA, 25 bp, Homo sapien
tggtggcaacgaccgccaccaaggc

SEQ ID NO: 4137774 - DNA, 25 bp, Homo sapien
ttggtggcaacgaccgccaccaagg

SEQ ID NO: 4137775 - DNA, 25 bp, Homo sapien
cacttggtggcaacgaccgccacca

SEQ ID NO: 4137776 - DNA, 25 bp, Homo sapien
tgggtaccaaaaagctaacttggca

SEQ ID NO: 4137777 - DNA, 25 bp, Homo sapien
caagatccctcattcttctcacgga

SEQ ID NO: 4137778 - DNA, 25 bp, Homo sapien
tcacggacaggggagacttgattcc

SEQ ID NO: 4137779 - DNA, 25 bp, Homo sapien
tcaatgtagaaagtatcttagatct

SEQ ID NO: 4137780 - DNA, 25 bp, Homo sapien
cacccacagtgaaagggcttttagg

SEQ ID NO: 4137781 - DNA, 25 bp, Homo sapien
tcagatccagcggtgcagcaacacc

SEQ ID NO: 4137782 - DNA, 25 bp, Homo sapien
aagtcaccagaacctgcatgttgcc

SEQ ID NO: 4137783 - DNA, 25 bp, Homo sapien
ggatgggatcgccaccgtaagtcac

SEQ ID NO: 4137784 - DNA, 25 bp, Homo sapien
cacaaaagccaacagtgagctctca

SEQ ID NO: 4137785 - DNA, 25 bp, Homo sapien
cgtttacacactcagagctggctgc

SEQ ID NO: 4137786 - DNA, 25 bp, Homo sapien
agtggacgtttacacactcagagct

SEQ ID NO: 4137787 - DNA, 25 bp, Homo sapien
gtgagctctcactttggatctctgc

SEQ ID NO: 4137788 - DNA, 25 bp, Homo sapien
atcgctacttcccaccggaaaagag

SEQ ID NO: 4137789 - DNA, 25 bp, Homo sapien
cttgactctgaaggaacatagggcc

SEQ ID NO: 4137790 - DNA, 25 bp, Homo sapien
gaggctttcctaattggcaccctgc

SEQ ID NO: 4137791 - DNA, 25 bp, Homo sapien
aagatggacactgccgaaccacagg

SEQ ID NO: 4137792 - DNA, 25 bp, Homo sapien
agcaggaacaatccagagcacagaa

SEQ ID NO: 4137793 - DNA, 25 bp, Homo sapien
caatggttctttggacacggggact

SEQ ID NO: 4137794 - DNA, 25 bp, Homo sapien
acacggggacttatctcagcctcca

SEQ ID NO: 4137795 - DNA, 25 bp, Homo sapien
aagcaatggttctttggacacgggg

SEQ ID NO: 4137796 - DNA, 25 bp, Homo sapien
gaaacacaagctgaggtgaagagct

SEQ ID NO: 4137797 - DNA, 25 bp, Homo sapien
agaaacacaagctgaggtgaagagc

SEQ ID NO: 4137798 - DNA, 25 bp, Homo sapien
aaaagaaacacaagctgaggtgaag

SEQ ID NO: 4137799 - DNA, 25 bp, Homo sapien
acacaagctgaggtgaagagctgac

SEQ ID NO: 4137800 - DNA, 25 bp, Homo sapien
tgaacttggccgtgctgttctcccg

SEQ ID NO: 4137801 - DNA, 25 bp, Homo sapien
cacagggtgtccatcgtaggtcacg

SEQ ID NO: 4137802 - DNA, 25 bp, Homo sapien
tggcagcgaggcctccactgtgtag

SEQ ID NO: 4137803 - DNA, 25 bp, Homo sapien
tcacaggtgtcactaggcatggcac

SEQ ID NO: 4137804 - DNA, 25 bp, Homo sapien
gagcaggtcccatcaccattgtcgg

SEQ ID NO: 4137805 - DNA, 25 bp, Homo sapien
cagtcgacgctaaggaggccagctt

SEQ ID NO: 4137806 - DNA, 25 bp, Homo sapien
tggtcaacgtgtacatgccggccgt

SEQ ID NO: 4137807 - DNA, 25 bp, Homo sapien
gcactcgattttggcctcgcacgga

SEQ ID NO: 4137808 - DNA, 25 bp, Homo sapien
tggtaggtcccatccgcattgtctg

SEQ ID NO: 4137809 - DNA, 25 bp, Homo sapien
ctgtaaagtcggtggtagcttcccg

SEQ ID NO: 4137810 - DNA, 25 bp, Homo sapien
ggtcagcggccgagagtcaactgta

SEQ ID NO: 4137811 - DNA, 25 bp, Homo sapien
tgtgacaaagcactcggtggaggcc

SEQ ID NO: 4137812 - DNA, 25 bp, Homo sapien
cgagggtccagtccgaggacagggc

SEQ ID NO: 4137813 - DNA, 25 bp, Homo sapien
tccagtccgaggacagggcggctca

SEQ ID NO: 4137814 - DNA, 25 bp, Homo sapien
aagggcagctctgaacgagggtcca

SEQ ID NO: 4137815 - DNA, 25 bp, Homo sapien
gaggcaatgaccaagggcagctctg

SEQ ID NO: 4137816 - DNA, 25 bp, Homo sapien
ctggtaaccacggtgaagacattgg

SEQ ID NO: 4137817 - DNA, 25 bp, Homo sapien
gataggcacgtcatcatatgtcacc

SEQ ID NO: 4137818 - DNA, 25 bp, Homo sapien
ggcctctttcaatccaggtccttgg

SEQ ID NO: 4137819 - DNA, 25 bp, Homo sapien
accacggtgaagacattgggcttgt

SEQ ID NO: 4137820 - DNA, 25 bp, Homo sapien
ccccggtgcgaaaggaatgtactca

SEQ ID NO: 4137821 - DNA, 25 bp, Homo sapien
aacagttatgccaagcccaccaatt

SEQ ID NO: 4137822 - DNA, 25 bp, Homo sapien
aatttatcttcgactctgatggtcc

SEQ ID NO: 4137823 - DNA, 25 bp, Homo sapien
gtgggctcctccatatgtgatatta

SEQ ID NO: 4137824 - DNA, 25 bp, Homo sapien
agaactaggtcctccaacacacgca

SEQ ID NO: 4137825 - DNA, 25 bp, Homo sapien
catgttaccggttctactgggagtt

SEQ ID NO: 4137826 - DNA, 25 bp, Homo sapien
gctttcccctgaatcaagaactagg

SEQ ID NO: 4137827 - DNA, 25 bp, Homo sapien
tccagtcaaaattctaagccgatgc

SEQ ID NO: 4137828 - DNA, 25 bp, Homo sapien
tcctgagtgtaagctgagctcctgc

SEQ ID NO: 4137829 - DNA, 25 bp, Homo sapien
tcagccttctcggtcactcggccac

SEQ ID NO: 4137830 - DNA, 25 bp, Homo sapien
cttcctgagtgtaagctgagctcct

SEQ ID NO: 4137831 - DNA, 25 bp, Homo sapien
tcactcggccacctggtgaagcctt

SEQ ID NO: 4137832 - DNA, 25 bp, Homo sapien
aggacacgggctcggacgcctgagc

SEQ ID NO: 4137833 - DNA, 25 bp, Homo sapien
aaccctcacttccagcggagccagg

SEQ ID NO: 4137834 - DNA, 25 bp, Homo sapien
ggccggcaatcttgaccttgctggg

SEQ ID NO: 4137835 - DNA, 25 bp, Homo sapien
gggtccacaacatccttcacaggaa

SEQ ID NO: 4137836 - DNA, 25 bp, Homo sapien
gccaaattgccaacaaagcccattc

SEQ ID NO: 4137837 - DNA, 25 bp, Homo sapien
tgccaacaaggcaggccaaattgcc

SEQ ID NO: 4137838 - DNA, 25 bp, Homo sapien
aaacccaagttccaagctgccaaca

SEQ ID NO: 4137839 - DNA, 25 bp, Homo sapien
caagttccaagctgccaacaaggca

SEQ ID NO: 4137840 - DNA, 25 bp, Homo sapien
tcctctatgtgggagaaaggcacat

SEQ ID NO: 4137841 - DNA, 25 bp, Homo sapien
catgcaggtcctgaagctcagtaac

SEQ ID NO: 4137842 - DNA, 25 bp, Homo sapien
tacgtaagaaattaggcacactgtc

SEQ ID NO: 4137843 - DNA, 25 bp, Homo sapien
catatcattggcgaggaaaatccag

SEQ ID NO: 4137844 - DNA, 25 bp, Homo sapien
aaagggctttcaaggggctgcgcca

SEQ ID NO: 4137845 - DNA, 25 bp, Homo sapien
ggctgcgccatgactgggaatccgt

SEQ ID NO: 4137846 - DNA, 25 bp, Homo sapien
tgcgccatgactgggaatccgtgtc

SEQ ID NO: 4137847 - DNA, 25 bp, Homo sapien
catgactgggaatccgtgtcgtcag

SEQ ID NO: 4137848 - DNA, 25 bp, Homo sapien
taaccaatgggctggctagtcaaga

SEQ ID NO: 4137849 - DNA, 25 bp, Homo sapien
gacagtcaaggatgggtcaactcca

SEQ ID NO: 4137850 - DNA, 25 bp, Homo sapien
taaaacataatcaaggcacgcgttg

SEQ ID NO: 4137851 - DNA, 25 bp, Homo sapien
cacgcgttgggttgcagagtccaga

SEQ ID NO: 4137852 - DNA, 25 bp, Homo sapien
aactgagaccatgtaaggtccctcc

SEQ ID NO: 4137853 - DNA, 25 bp, Homo sapien
actgagaccatgtaaggtccctcct

SEQ ID NO: 4137854 - DNA, 25 bp, Homo sapien
taactgagaccatgtaaggtccctc

SEQ ID NO: 4137855 - DNA, 25 bp, Homo sapien
agatggggtgtaggttactgtgtgt

SEQ ID NO: 4137856 - DNA, 25 bp, Homo sapien
acaagttgcaggttctatgtaatac

SEQ ID NO: 4137857 - DNA, 25 bp, Homo sapien
caggcgaatcccaccacacgtggtt

SEQ ID NO: 4137858 - DNA, 25 bp, Homo sapien
agagcgggagccacaaatatcaagg

SEQ ID NO: 4137859 - DNA, 25 bp, Homo sapien
ctctatgaatgggtagacggactga

SEQ ID NO: 4137860 - DNA, 25 bp, Homo sapien
tccccggcatctcgggcatcaattg

SEQ ID NO: 4137861 - DNA, 25 bp, Homo sapien
tgctggcatcatatgtgggaaggac

SEQ ID NO: 4137862 - DNA, 25 bp, Homo sapien
gcacaccataggaactaaggccggg

SEQ ID NO: 4137863 - DNA, 25 bp, Homo sapien
catcatatgtgggaaggaccttgac

SEQ ID NO: 4137864 - DNA, 25 bp, Homo sapien
acccgtctgtgtggctcggatgcga

SEQ ID NO: 4137865 - DNA, 25 bp, Homo sapien
ggagaaagtgggatgtcgtcacccc

SEQ ID NO: 4137866 - DNA, 25 bp, Homo sapien
cgtaggtgactccaatcatatagcg

SEQ ID NO: 4137867 - DNA, 25 bp, Homo sapien
tcatatagcgcccagtcttgtcggg

SEQ ID NO: 4137868 - DNA, 25 bp, Homo sapien
attctcaatgacatcggcctcggcc

SEQ ID NO: 4137869 - DNA, 25 bp, Homo sapien
gggtcagaaccgtgcaggtcacttt

SEQ ID NO: 4137870 - DNA, 25 bp, Homo sapien
tttcacagtggaggcgattccagga

SEQ ID NO: 4137871 - DNA, 25 bp, Homo sapien
aggaatatcaacaccaccgaagcgc

SEQ ID NO: 4137872 - DNA, 25 bp, Homo sapien
tgtagcacgcagacctaagctggcg

SEQ ID NO: 4137873 - DNA, 25 bp, Homo sapien
aaagcagtatgtacggtgtgacccc

SEQ ID NO: 4137874 - DNA, 25 bp, Homo sapien
tcaactgtcagatgcgcatgccctg

SEQ ID NO: 4137875 - DNA, 25 bp, Homo sapien
tgtgaccccaggcatgaaagtgagg

SEQ ID NO: 4137876 - DNA, 25 bp, Homo sapien
gtgcctcctccacggctgtgacttc

SEQ ID NO: 4137877 - DNA, 25 bp, Homo sapien
cacggctgtgacttccccatctgtg

SEQ ID NO: 4137878 - DNA, 25 bp, Homo sapien
ctccacggctgtgacttccccatct

SEQ ID NO: 4137879 - DNA, 25 bp, Homo sapien
cctcctccacggctgtgacttcccc

SEQ ID NO: 4137880 - DNA, 25 bp, Homo sapien
gcctgaatccagggggacatgcatt

SEQ ID NO: 4137881 - DNA, 25 bp, Homo sapien
ctgggaattctacaagccagtgagg

SEQ ID NO: 4137882 - DNA, 25 bp, Homo sapien
aagcagacaacagcgggagctggtg

SEQ ID NO: 4137883 - DNA, 25 bp, Homo sapien
tgaagctacaggggttagagctgct

SEQ ID NO: 4137884 - DNA, 25 bp, Homo sapien
gagctgctgggaattctacaagcca

SEQ ID NO: 4137885 - DNA, 25 bp, Homo sapien
actgggacataggcctcttcggtca

SEQ ID NO: 4137886 - DNA, 25 bp, Homo sapien
ttcctgacagcaaacggaatgacca

SEQ ID NO: 4137887 - DNA, 25 bp, Homo sapien
tgaccaggtcaaaaggcttaaatcc

SEQ ID NO: 4137888 - DNA, 25 bp, Homo sapien
aatcccaggccgttcatgtcactca

SEQ ID NO: 4137889 - DNA, 25 bp, Homo sapien
gagaccaagaactcgtgaccctggg

SEQ ID NO: 4137890 - DNA, 25 bp, Homo sapien
gagcaagtgagaatgagacggcctt

SEQ ID NO: 4137891 - DNA, 25 bp, Homo sapien
accattctgggaagctcgtgagagc

SEQ ID NO: 4137892 - DNA, 25 bp, Homo sapien
taatgcaagttgtcagtgagccact

SEQ ID NO: 4137893 - DNA, 25 bp, Homo sapien
aacagtgaccgtgccgtccttgttg

SEQ ID NO: 4137894 - DNA, 25 bp, Homo sapien
acaatctcaggtgtggctgtcttcc

SEQ ID NO: 4137895 - DNA, 25 bp, Homo sapien
gccgtccttgttgtccacaatctca

SEQ ID NO: 4137896 - DNA, 25 bp, Homo sapien
cccgacctcagtgggggcatatcta

SEQ ID NO: 4137897 - DNA, 25 bp, Homo sapien
cggatgcccctgaatggtggagccc

SEQ ID NO: 4137898 - DNA, 25 bp, Homo sapien
tgctccctgcaaagcggctgaggag

SEQ ID NO: 4137899 - DNA, 25 bp, Homo sapien
tgcaaagcggctgaggagtgtctgc

SEQ ID NO: 4137900 - DNA, 25 bp, Homo sapien
tgcccggatgcccctgaatggtgga

SEQ ID NO: 4137901 - DNA, 25 bp, Homo sapien
atacacgaggcctggaccgtatgca

SEQ ID NO: 4137902 - DNA, 25 bp, Homo sapien
ggaccgtatgcagaaacacttccac

SEQ ID NO: 4137903 - DNA, 25 bp, Homo sapien
agttttgttggccactccatacacg

SEQ ID NO: 4137904 - DNA, 25 bp, Homo sapien
tcctgcatcctctgtgacgatggtg

SEQ ID NO: 4137905 - DNA, 25 bp, Homo sapien
ctgtagtcgcctggcagagtcggca

SEQ ID NO: 4137906 - DNA, 25 bp, Homo sapien
cttgaccagaatgctgtagtcgcct

SEQ ID NO: 4137907 - DNA, 25 bp, Homo sapien
ccatctttattgtcaatgcagctga

SEQ ID NO: 4137908 - DNA, 25 bp, Homo sapien
tcggcaggtaggtcactgtgcatgt

SEQ ID NO: 4137909 - DNA, 25 bp, Homo sapien
tgttgggcagcctcttcaggagaca

SEQ ID NO: 4137910 - DNA, 25 bp, Homo sapien
ggaagtcagcggctgagcccaactt

SEQ ID NO: 4137911 - DNA, 25 bp, Homo sapien
cactgatgtcgagcaggaagtcagc

SEQ ID NO: 4137912 - DNA, 25 bp, Homo sapien
gagacagggctcgtctcggccagat

SEQ ID NO: 4137913 - DNA, 25 bp, Homo sapien
gaagtcagacatctcgaaagtccgg

SEQ ID NO: 4137914 - DNA, 25 bp, Homo sapien
actggaccaccatgatagacacggg

SEQ ID NO: 4137915 - DNA, 25 bp, Homo sapien
catagactttggctcggcgggcgtc

SEQ ID NO: 4137916 - DNA, 25 bp, Homo sapien
gggcgtcaccaatctccgactggac

SEQ ID NO: 4137917 - DNA, 25 bp, Homo sapien
taaaagacaatgcaggcagaaggac

SEQ ID NO: 4137918 - DNA, 25 bp, Homo sapien
ggatgaaaagatgacgctgcctcag

SEQ ID NO: 4137919 - DNA, 25 bp, Homo sapien
gacctatagcttgaaggatgctcag

SEQ ID NO: 4137920 - DNA, 25 bp, Homo sapien
gctgcctcagcaaaataagtcggtt

SEQ ID NO: 4137921 - DNA, 25 bp, Homo sapien
tcagctaggtcagcatatccgaagg

SEQ ID NO: 4137922 - DNA, 25 bp, Homo sapien
tttgtctagaattcaccagcgtggc

SEQ ID NO: 4137923 - DNA, 25 bp, Homo sapien
gggtttatccacagccagatctgag

SEQ ID NO: 4137924 - DNA, 25 bp, Homo sapien
tgatgtgtcccgtacaaactgctgg

SEQ ID NO: 4137925 - DNA, 25 bp, Homo sapien
caggtcctccgtctggatgtccact

SEQ ID NO: 4137926 - DNA, 25 bp, Homo sapien
cacgtgctcgtcagcgaatttggtg

SEQ ID NO: 4137927 - DNA, 25 bp, Homo sapien
gaagtaggagactttgcaggtgcca

SEQ ID NO: 4137928 - DNA, 25 bp, Homo sapien
tggtggagacgatataaaccccagg

SEQ ID NO: 4137929 - DNA, 25 bp, Homo sapien
aaacccaagcatcccacctggaggg

SEQ ID NO: 4137930 - DNA, 25 bp, Homo sapien
cctggaggggaatggaatgcacata

SEQ ID NO: 4137931 - DNA, 25 bp, Homo sapien
cagaggccaaggcacagcatttaca

SEQ ID NO: 4137932 - DNA, 25 bp, Homo sapien
agcatttacagaaaacccaagcatc

SEQ ID NO: 4137933 - DNA, 25 bp, Homo sapien
ctgatcttcacggtaaatgggctcc

SEQ ID NO: 4137934 - DNA, 25 bp, Homo sapien
tttcaggttcaggtcacaaatgctc

SEQ ID NO: 4137935 - DNA, 25 bp, Homo sapien
aaatgctcccgacagtggccacgga

SEQ ID NO: 4137936 - DNA, 25 bp, Homo sapien
tgatgctctctttgactcttccctc

SEQ ID NO: 4137937 - DNA, 25 bp, Homo sapien
gacccgacgttgatgtgactacaca

SEQ ID NO: 4137938 - DNA, 25 bp, Homo sapien
ctaaagccaagaaggcggagtcgac

SEQ ID NO: 4137939 - DNA, 25 bp, Homo sapien
gacagctccgtgactcgttaggaag

SEQ ID NO: 4137940 - DNA, 25 bp, Homo sapien
gaacaattcaccaccaaagggctag

SEQ ID NO: 4137941 - DNA, 25 bp, Homo sapien
gcagagcagttcatgactctgaccc

SEQ ID NO: 4137942 - DNA, 25 bp, Homo sapien
aggcggccgcatgcggggcacggag

SEQ ID NO: 4137943 - DNA, 25 bp, Homo sapien
tgaaactgcaccctccagccccaca

SEQ ID NO: 4137944 - DNA, 25 bp, Homo sapien
tgccatcacctagagccagtatgaa

SEQ ID NO: 4137945 - DNA, 25 bp, Homo sapien
tgacgtgggccgacatatcactgct

SEQ ID NO: 4137946 - DNA, 25 bp, Homo sapien
tacttgacgctgaccgtgtgcacgc

SEQ ID NO: 4137947 - DNA, 25 bp, Homo sapien
aaaccggacgcagtgtgagttcttc

SEQ ID NO: 4137948 - DNA, 25 bp, Homo sapien
gttcttccccatgggcacaatctct

SEQ ID NO: 4137949 - DNA, 25 bp, Homo sapien
tccagcgcctgcttcccgggtccaa

SEQ ID NO: 4137950 - DNA, 25 bp, Homo sapien
agcgcctgcttcccgggtccaaatg

SEQ ID NO: 4137951 - DNA, 25 bp, Homo sapien
cctgcttcccgggtccaaatgctga

SEQ ID NO: 4137952 - DNA, 25 bp, Homo sapien
ggggccctcaacagcgatggagagg

SEQ ID NO: 4137953 - DNA, 25 bp, Homo sapien
tcatcgaatgtaatctcggccttac

SEQ ID NO: 4137954 - DNA, 25 bp, Homo sapien
tacaccgcacgacccatttttatgg

SEQ ID NO: 4137955 - DNA, 25 bp, Homo sapien
ggctcttgggcaatataagatacac

SEQ ID NO: 4137956 - DNA, 25 bp, Homo sapien
gacccatttttatggtcatcgaatg

SEQ ID NO: 4137957 - DNA, 25 bp, Homo sapien
tcaccaagggctaaaatgccttcag

SEQ ID NO: 4137958 - DNA, 25 bp, Homo sapien
gaggctgggccgatatgatttcctt

SEQ ID NO: 4137959 - DNA, 25 bp, Homo sapien
gggtccccaaatggcctgtattgaa

SEQ ID NO: 4137960 - DNA, 25 bp, Homo sapien
gaaatgttgacaagaaatcacagca

SEQ ID NO: 4137961 - DNA, 25 bp, Homo sapien
agggtgcgatgaccggcaccaggta

SEQ ID NO: 4137962 - DNA, 25 bp, Homo sapien
tgaacttgatggacacctcgtagtt

SEQ ID NO: 4137963 - DNA, 25 bp, Homo sapien
gaaggctcataacagtgaggcggcg

SEQ ID NO: 4137964 - DNA, 25 bp, Homo sapien
ggcggcgggcgtcgtcggagggtgc

SEQ ID NO: 4137965 - DNA, 25 bp, Homo sapien
catccccgatggttcttagtttggc

SEQ ID NO: 4137966 - DNA, 25 bp, Homo sapien
agtgtcctgggcaaaaacccagagg

SEQ ID NO: 4137967 - DNA, 25 bp, Homo sapien
gaaggtgctagtacaaccttgaatt

SEQ ID NO: 4137968 - DNA, 25 bp, Homo sapien
gaattaagtgacctgtttaggacga

SEQ ID NO: 4137969 - DNA, 25 bp, Homo sapien
ctgagaatttaatacatcagacagg

SEQ ID NO: 4137970 - DNA, 25 bp, Homo sapien
caggttatggccctcggcgttcctg

SEQ ID NO: 4137971 - DNA, 25 bp, Homo sapien
tttaatacatcagacaggttatggc

SEQ ID NO: 4137972 - DNA, 25 bp, Homo sapien
taatacatcagacaggttatggccc

SEQ ID NO: 4137973 - DNA, 25 bp, Homo sapien
gccttttgcgccattcaaccttata

SEQ ID NO: 4137974 - DNA, 25 bp, Homo sapien
gcaaaggatgctggctggttaactt

SEQ ID NO: 4137975 - DNA, 25 bp, Homo sapien
gggctgtgcacctttgcatcaatct

SEQ ID NO: 4137976 - DNA, 25 bp, Homo sapien
caaccttatagcaaaggatgctggc

SEQ ID NO: 4137977 - DNA, 25 bp, Homo sapien
atgaaactgatcagccctcccttgg

SEQ ID NO: 4137978 - DNA, 25 bp, Homo sapien
cttgggacacacatttacaggaaca

SEQ ID NO: 4137979 - DNA, 25 bp, Homo sapien
cagcaaagggaattcagaggctcac

SEQ ID NO: 4137980 - DNA, 25 bp, Homo sapien
aaagggtctccctatccctggcaca

SEQ ID NO: 4137981 - DNA, 25 bp, Homo sapien
tctccaggtagtctctcggtctctc

SEQ ID NO: 4137982 - DNA, 25 bp, Homo sapien
gcaccctacgtcctttggcactgaa

SEQ ID NO: 4137983 - DNA, 25 bp, Homo sapien
gggtgcagagcctgttctcctccta

SEQ ID NO: 4137984 - DNA, 25 bp, Homo sapien
gcctcccttaaagccaatgtgttgt

SEQ ID NO: 4137985 - DNA, 25 bp, Homo sapien
tcatgagggatgaagcgaacagcat

SEQ ID NO: 4137986 - DNA, 25 bp, Homo sapien
cacgtggctcccattgaacttgaca

SEQ ID NO: 4137987 - DNA, 25 bp, Homo sapien
cttcgagtcccgtgccataggcgga

SEQ ID NO: 4137988 - DNA, 25 bp, Homo sapien
ggctccccaacgcgcactttgaagg

SEQ ID NO: 4137989 - DNA, 25 bp, Homo sapien
ttatcgtgggtcaaaccgcaactcc

SEQ ID NO: 4137990 - DNA, 25 bp, Homo sapien
ggtgtgataacacggccatcgagct

SEQ ID NO: 4137991 - DNA, 25 bp, Homo sapien
caaaacagctttggacagcaagcgc

SEQ ID NO: 4137992 - DNA, 25 bp, Homo sapien
gaagtgtgcatgaccccagtttcca

SEQ ID NO: 4137993 - DNA, 25 bp, Homo sapien
ttggacgcatcatgaattctgtgca

SEQ ID NO: 4137994 - DNA, 25 bp, Homo sapien
ctgtgttccctgactatcagcatcc

SEQ ID NO: 4137995 - DNA, 25 bp, Homo sapien
ctgtgctgtgttccctgactatcag

SEQ ID NO: 4137996 - DNA, 25 bp, Homo sapien
ggacgcatcatgaattctgtgcagg

SEQ ID NO: 4137997 - DNA, 25 bp, Homo sapien
gcatttctgggagcctggtaccatg

SEQ ID NO: 4137998 - DNA, 25 bp, Homo sapien
tcagtgcatttctgggagcctggta

SEQ ID NO: 4137999 - DNA, 25 bp, Homo sapien
tgaaagaacagacgggtaggagccc

SEQ ID NO: 4138000 - DNA, 25 bp, Homo sapien
ggtaccatgaaagaacagacgggta

SEQ ID NO: 4138001 - DNA, 25 bp, Homo sapien
cctgggccctcaaaggtgagtacct

SEQ ID NO: 4138002 - DNA, 25 bp, Homo sapien
cccaagctcccaaaaaggtgtgcga

SEQ ID NO: 4138003 - DNA, 25 bp, Homo sapien
gctgcctggaaagtactcctgagtg

SEQ ID NO: 4138004 - DNA, 25 bp, Homo sapien
acgcgctccaagtgccgagaggacc

SEQ ID NO: 4138005 - DNA, 25 bp, Homo sapien
tggcggccaagcacagatacctttt

SEQ ID NO: 4138006 - DNA, 25 bp, Homo sapien
ttcagaaggtcaggatactgggcgc

SEQ ID NO: 4138007 - DNA, 25 bp, Homo sapien
acagagggaggtttgctttgttcag

SEQ ID NO: 4138008 - DNA, 25 bp, Homo sapien
gataccttttcattccatgcacact

SEQ ID NO: 4138009 - DNA, 25 bp, Homo sapien
tgtccaacttggagctaaagcactt

SEQ ID NO: 4138010 - DNA, 25 bp, Homo sapien
tatgggacaagagctactacttggc

SEQ ID NO: 4138011 - DNA, 25 bp, Homo sapien
caaacaagcctattaggtgggtcct

SEQ ID NO: 4138012 - DNA, 25 bp, Homo sapien
tacttggctgttacctcctctacag

SEQ ID NO: 4138013 - DNA, 25 bp, Homo sapien
gcgggaggtgagcaacaaggagaca

SEQ ID NO: 4138014 - DNA, 25 bp, Homo sapien
tggtatctaatctgtgcagccaaga

SEQ ID NO: 4138015 - DNA, 25 bp, Homo sapien
tatctcaacctcatcatggtatcta

SEQ ID NO: 4138016 - DNA, 25 bp, Homo sapien
ctggaagctcttgaggctcctgccc

SEQ ID NO: 4138017 - DNA, 25 bp, Homo sapien
aaaggaatagaaaatgctgtgttga

SEQ ID NO: 4138018 - DNA, 25 bp, Homo sapien
ttgatgacttggagggctttcctgg

SEQ ID NO: 4138019 - DNA, 25 bp, Homo sapien
tagaaaatgctgtgttgatgacttg

SEQ ID NO: 4138020 - DNA, 25 bp, Homo sapien
gctgtgttgatgacttggagggctt

SEQ ID NO: 4138021 - DNA, 25 bp, Homo sapien
gtgttaataaagaattccgactgga

SEQ ID NO: 4138022 - DNA, 25 bp, Homo sapien
ccttggatgggccttcgatggtgac

SEQ ID NO: 4138023 - DNA, 25 bp, Homo sapien
gtgacggataatgtccctggacctg

SEQ ID NO: 4138024 - DNA, 25 bp, Homo sapien
ggacctgctcgggtggtgttaataa

SEQ ID NO: 4138025 - DNA, 25 bp, Homo sapien
tcaggtagttaccaggagccatggg

SEQ ID NO: 4138026 - DNA, 25 bp, Homo sapien
ccacgatgtggttgggcccaccgta

SEQ ID NO: 4138027 - DNA, 25 bp, Homo sapien
tggttgggcccaccgtatttgacgc

SEQ ID NO: 4138028 - DNA, 25 bp, Homo sapien
ccgtatttgacgctgatcaggtagt

SEQ ID NO: 4138029 - DNA, 25 bp, Homo sapien
catgacgtgtggaagggatttacta

SEQ ID NO: 4138030 - DNA, 25 bp, Homo sapien
tacaactaggatctggctttctggg

SEQ ID NO: 4138031 - DNA, 25 bp, Homo sapien
gacaggcgagtaccctacacagtaa

SEQ ID NO: 4138032 - DNA, 25 bp, Homo sapien
taatgtcttctaaacccctaggatc

SEQ ID NO: 4138033 - DNA, 25 bp, Homo sapien
ggtctctgtagacgacctggtcact

SEQ ID NO: 4138034 - DNA, 25 bp, Homo sapien
ctgagccagggctaactagacgctg

SEQ ID NO: 4138035 - DNA, 25 bp, Homo sapien
tgggaatggcgctatagcaggtctc

SEQ ID NO: 4138036 - DNA, 25 bp, Homo sapien
accttgctggcgtccgaggatgcct

SEQ ID NO: 4138037 - DNA, 25 bp, Homo sapien
taaggtgcttccacgataatgctgg

SEQ ID NO: 4138038 - DNA, 25 bp, Homo sapien
gatggttacttgcaaacggctggcc

SEQ ID NO: 4138039 - DNA, 25 bp, Homo sapien
cgtggcaattacaagcagaggctca

SEQ ID NO: 4138040 - DNA, 25 bp, Homo sapien
tcatagagcctgacggtgtgggttc

SEQ ID NO: 4138041 - DNA, 25 bp, Homo sapien
tggttgcctacatgcttcatggaga

SEQ ID NO: 4138042 - DNA, 25 bp, Homo sapien
gcccctctccttgacgacgtatgtg

SEQ ID NO: 4138043 - DNA, 25 bp, Homo sapien
ttgcctacatgcttcatggagacct

SEQ ID NO: 4138044 - DNA, 25 bp, Homo sapien
ccctctccttgacgacgtatgtgac

SEQ ID NO: 4138045 - DNA, 25 bp, Homo sapien
ggctgccagggatgtgttcctcccc

SEQ ID NO: 4138046 - DNA, 25 bp, Homo sapien
gcactgtgacatgaaaagggctgcc

SEQ ID NO: 4138047 - DNA, 25 bp, Homo sapien
taaggcactgtgacatgaaaagggc

SEQ ID NO: 4138048 - DNA, 25 bp, Homo sapien
gggctgccagggatgtgttcctccc

SEQ ID NO: 4138049 - DNA, 25 bp, Homo sapien
tctgagtttctgtagggtgcccggc

SEQ ID NO: 4138050 - DNA, 25 bp, Homo sapien
cattaacacggacactggaagagat

SEQ ID NO: 4138051 - DNA, 25 bp, Homo sapien
ttatgtcatgggacggaccttggga

SEQ ID NO: 4138052 - DNA, 25 bp, Homo sapien
gatgagggcgttaatccatgggccc

SEQ ID NO: 4138053 - DNA, 25 bp, Homo sapien
tgtttctgccaatggtgaaaagacc

SEQ ID NO: 4138054 - DNA, 25 bp, Homo sapien
gccaaagacccgcaggagtttcatt

SEQ ID NO: 4138055 - DNA, 25 bp, Homo sapien
cagaaaaagtgacccatgaagttgg

SEQ ID NO: 4138056 - DNA, 25 bp, Homo sapien
tgaaaagaccaccaataagctgctg

SEQ ID NO: 4138057 - DNA, 25 bp, Homo sapien
tgcccagaccacactacacatttgg

SEQ ID NO: 4138058 - DNA, 25 bp, Homo sapien
gatactacacctgccacaagagtgg

SEQ ID NO: 4138059 - DNA, 25 bp, Homo sapien
aaacctaaaggtctgcctgcccaga

SEQ ID NO: 4138060 - DNA, 25 bp, Homo sapien
catttgggctcaggcaacgtccctg

SEQ ID NO: 4138061 - DNA, 25 bp, Homo sapien
cagtcggcgtttgattccagtttgg

SEQ ID NO: 4138062 - DNA, 25 bp, Homo sapien
tccagtttggcttccgtgtcccagc

SEQ ID NO: 4138063 - DNA, 25 bp, Homo sapien
aagatacaatttacagtcggcgttt

SEQ ID NO: 4138064 - DNA, 25 bp, Homo sapien
tacaacacccgtggtcctttcacat

SEQ ID NO: 4138065 - DNA, 25 bp, Homo sapien
aacaattgatcccaattgacagcca

SEQ ID NO: 4138066 - DNA, 25 bp, Homo sapien
gtgcaggccacagataaggctgctc

SEQ ID NO: 4138067 - DNA, 25 bp, Homo sapien
caattgacagccaggtgtcagaaga

SEQ ID NO: 4138068 - DNA, 25 bp, Homo sapien
tctcagataggagtccaggaagcag

SEQ ID NO: 4138069 - DNA, 25 bp, Homo sapien
caaaatacaaaacacccttggatat

SEQ ID NO: 4138070 - DNA, 25 bp, Homo sapien
caagtcaggctcgtagattctccat

SEQ ID NO: 4138071 - DNA, 25 bp, Homo sapien
cccttggatatgtggatccgtgcca

SEQ ID NO: 4138072 - DNA, 25 bp, Homo sapien
gggagataagcgagtccaaaataca

SEQ ID NO: 4138073 - DNA, 25 bp, Homo sapien
tgaatacaccctgccggggttcagc

SEQ ID NO: 4138074 - DNA, 25 bp, Homo sapien
caccctgccggggttcagcaccagc

SEQ ID NO: 4138075 - DNA, 25 bp, Homo sapien
ctgaatacaccctgccggggttcag

SEQ ID NO: 4138076 - DNA, 25 bp, Homo sapien
cctgccggggttcagcaccagcttt

SEQ ID NO: 4138077 - DNA, 25 bp, Homo sapien
gtatttcgcgtgtccaaggcgaccc

SEQ ID NO: 4138078 - DNA, 25 bp, Homo sapien
gcagggactccgctcgcggacgtat

SEQ ID NO: 4138079 - DNA, 25 bp, Homo sapien
aaggcgacccctagcggtcactgcg

SEQ ID NO: 4138080 - DNA, 25 bp, Homo sapien
ctggtctgggagagcccgcgccttc

SEQ ID NO: 4138081 - DNA, 25 bp, Homo sapien
tgatgaacctttcgcctgcaggctg

SEQ ID NO: 4138082 - DNA, 25 bp, Homo sapien
caggagctaagcaccagttagtcat

SEQ ID NO: 4138083 - DNA, 25 bp, Homo sapien
gtgactgatgaacctttcgcctgca

SEQ ID NO: 4138084 - DNA, 25 bp, Homo sapien
gcaggagctaagcaccagttagtca

SEQ ID NO: 4138085 - DNA, 25 bp, Homo sapien
gcctcggcggtaccacaaagtcagc

SEQ ID NO: 4138086 - DNA, 25 bp, Homo sapien
ctgacgcctcggcggtaccacaaag

SEQ ID NO: 4138087 - DNA, 25 bp, Homo sapien
acgcctcggcggtaccacaaagtca

SEQ ID NO: 4138088 - DNA, 25 bp, Homo sapien
gacgcctcggcggtaccacaaagtc

SEQ ID NO: 4138089 - DNA, 25 bp, Homo sapien
gtgcagagcctggccacaacccacc

SEQ ID NO: 4138090 - DNA, 25 bp, Homo sapien
tgcagagcctggccacaacccaccc

SEQ ID NO: 4138091 - DNA, 25 bp, Homo sapien
caacccacccaaggtgcctgtcctt

SEQ ID NO: 4138092 - DNA, 25 bp, Homo sapien
tctccaaggatacatgcagccgatg

SEQ ID NO: 4138093 - DNA, 25 bp, Homo sapien
tcccttaggtacttgtggccatcgt

SEQ ID NO: 4138094 - DNA, 25 bp, Homo sapien
tcatttctaaactctccggcctggt

SEQ ID NO: 4138095 - DNA, 25 bp, Homo sapien
tccttgctatcacgggagctggtgg

SEQ ID NO: 4138096 - DNA, 25 bp, Homo sapien
tcctcgggcttcagccgatgccgtg

SEQ ID NO: 4138097 - DNA, 25 bp, Homo sapien
agccgatgccgtgcctggaggtcca

SEQ ID NO: 4138098 - DNA, 25 bp, Homo sapien
catgactgggtactggaacttctcc

SEQ ID NO: 4138099 - DNA, 25 bp, Homo sapien
ggatgacatgactgggtactggaac

SEQ ID NO: 4138100 - DNA, 25 bp, Homo sapien
ctcctgttgtccctggataccccac

SEQ ID NO: 4138101 - DNA, 25 bp, Homo sapien
gttgtccctggataccccacccata

SEQ ID NO: 4138102 - DNA, 25 bp, Homo sapien
ggcacgtgggggctactcaaggctg

SEQ ID NO: 4138103 - DNA, 25 bp, Homo sapien
acgtgggggctactcaaggctgaac

SEQ ID NO: 4138104 - DNA, 25 bp, Homo sapien
tttgccgtgggaaatggcagatgcc

SEQ ID NO: 4138105 - DNA, 25 bp, Homo sapien
aaacacctttgtgatggactggacc

SEQ ID NO: 4138106 - DNA, 25 bp, Homo sapien
ggcagatgccactttgggtgtaaaa

SEQ ID NO: 4138107 - DNA, 25 bp, Homo sapien
gaccttggcataagttggaaccttg

SEQ ID NO: 4138108 - DNA, 25 bp, Homo sapien
cataggcataggataggagcagctc

SEQ ID NO: 4138109 - DNA, 25 bp, Homo sapien
cagagcaagggtgagtctggccgga

SEQ ID NO: 4138110 - DNA, 25 bp, Homo sapien
tctggccggagggtccagatgggcc

SEQ ID NO: 4138111 - DNA, 25 bp, Homo sapien
gtccagatgggccataggcatagga

SEQ ID NO: 4138112 - DNA, 25 bp, Homo sapien
gagggccaccgattggtccagaccc

SEQ ID NO: 4138113 - DNA, 25 bp, Homo sapien
cagaccccgccttagtcactctcat

SEQ ID NO: 4138114 - DNA, 25 bp, Homo sapien
cttggaggcagacagccgggaggga

SEQ ID NO: 4138115 - DNA, 25 bp, Homo sapien
ggagggagggccaccgattggtcca

SEQ ID NO: 4138116 - DNA, 25 bp, Homo sapien
atcattcgacatgtctgggattctg

SEQ ID NO: 4138117 - DNA, 25 bp, Homo sapien
ggtccacggacaatcattcgacatg

SEQ ID NO: 4138118 - DNA, 25 bp, Homo sapien
tcagatgggtccacggacaatcatt

SEQ ID NO: 4138119 - DNA, 25 bp, Homo sapien
ggacaatcattcgacatgtctggga

SEQ ID NO: 4138120 - DNA, 25 bp, Homo sapien
gcccaatctatccaagtatggtcat

SEQ ID NO: 4138121 - DNA, 25 bp, Homo sapien
ggataagactcattgcaaatgctca

SEQ ID NO: 4138122 - DNA, 25 bp, Homo sapien
gaaatcagcaaactatacagcctgt

SEQ ID NO: 4138123 - DNA, 25 bp, Homo sapien
tactatccagtctttcagagggaaa

SEQ ID NO: 4138124 - DNA, 25 bp, Homo sapien
tgagccggtgatacccctgagtgct

SEQ ID NO: 4138125 - DNA, 25 bp, Homo sapien
cctgagccggtgatacccctgagtg

SEQ ID NO: 4138126 - DNA, 25 bp, Homo sapien
gcccctccctgagccggtgataccc

SEQ ID NO: 4138127 - DNA, 25 bp, Homo sapien
tccctgagccggtgatacccctgag

SEQ ID NO: 4138128 - DNA, 25 bp, Homo sapien
tgcctcacagcgttaaacccggagg

SEQ ID NO: 4138129 - DNA, 25 bp, Homo sapien
ggttcgcgtcctccgacagaaaagc

SEQ ID NO: 4138130 - DNA, 25 bp, Homo sapien
tccttaaaggcgcagcgtgccggtt

SEQ ID NO: 4138131 - DNA, 25 bp, Homo sapien
cccggagggtacagttagcgtctcg

SEQ ID NO: 4138132 - DNA, 25 bp, Homo sapien
gagaggtcacggggccatcagggcg

SEQ ID NO: 4138133 - DNA, 25 bp, Homo sapien
ccatccccctaggagcgcaccaccg

SEQ ID NO: 4138134 - DNA, 25 bp, Homo sapien
acggggccatcagggcgccccatcc

SEQ ID NO: 4138135 - DNA, 25 bp, Homo sapien
atccccctaggagcgcaccaccgcc

SEQ ID NO: 4138136 - DNA, 25 bp, Homo sapien
aaaggcaagtgcagatcgccgactc

SEQ ID NO: 4138137 - DNA, 25 bp, Homo sapien
ggcgccgggtttcgggcatctcaaa

SEQ ID NO: 4138138 - DNA, 25 bp, Homo sapien
cgggcatctcaaacctatccaggca

SEQ ID NO: 4138139 - DNA, 25 bp, Homo sapien
gatcgccgactctttccactcgatg

SEQ ID NO: 4138140 - DNA, 25 bp, Homo sapien
tcctctcggcactgcgaggggcgcc

SEQ ID NO: 4138141 - DNA, 25 bp, Homo sapien
gcgcctaagggctgctgcgggcgca

SEQ ID NO: 4138142 - DNA, 25 bp, Homo sapien
gaggcgaagtagaaagagggtgcag

SEQ ID NO: 4138143 - DNA, 25 bp, Homo sapien
tctcggcactgcgaggggcgcctaa

SEQ ID NO: 4138144 - DNA, 25 bp, Homo sapien
taaggcagccgtgaaacctgtgtcg

SEQ ID NO: 4138145 - DNA, 25 bp, Homo sapien
accgcaagttgccggcgggtacctg

SEQ ID NO: 4138146 - DNA, 25 bp, Homo sapien
cgtgaaacctgtgtcgctgtaggcg

SEQ ID NO: 4138147 - DNA, 25 bp, Homo sapien
gattcaagtgtttcgacacggaagg

SEQ ID NO: 4138148 - DNA, 25 bp, Homo sapien
aggatagacctcacccaacgcatac

SEQ ID NO: 4138149 - DNA, 25 bp, Homo sapien
gaattacttcccagttgcacaaact

SEQ ID NO: 4138150 - DNA, 25 bp, Homo sapien
tgcaaaccaggatcacctctaagga

SEQ ID NO: 4138151 - DNA, 25 bp, Homo sapien
tggccactttgaggtgtgagcccac

SEQ ID NO: 4138152 - DNA, 25 bp, Homo sapien
catactagggaatatgaatgaagtg

SEQ ID NO: 4138153 - DNA, 25 bp, Homo sapien
taacagccggccaaattgctggctt

SEQ ID NO: 4138154 - DNA, 25 bp, Homo sapien
tgacaaagaattaactcatactagg

SEQ ID NO: 4138155 - DNA, 25 bp, Homo sapien
atgaagtgctaacagccggccaaat

SEQ ID NO: 4138156 - DNA, 25 bp, Homo sapien
ccaactgctactggctctggcagaa

SEQ ID NO: 4138157 - DNA, 25 bp, Homo sapien
ctgctactggctctggcagaagctg

SEQ ID NO: 4138158 - DNA, 25 bp, Homo sapien
aactgctactggctctggcagaagc

SEQ ID NO: 4138159 - DNA, 25 bp, Homo sapien
tttcccaactgctactggctctggc

SEQ ID NO: 4138160 - DNA, 25 bp, Homo sapien
cctgctctttcaggctggctgactc

SEQ ID NO: 4138161 - DNA, 25 bp, Homo sapien
ccaggattgggatggccagcgtgcc

SEQ ID NO: 4138162 - DNA, 25 bp, Homo sapien
gtgccgcccgcaatcacaaacatgt

SEQ ID NO: 4138163 - DNA, 25 bp, Homo sapien
caaacatgttaaccacatcaagatc

SEQ ID NO: 4138164 - DNA, 25 bp, Homo sapien
gattcttatcagtgctgaaggccac

SEQ ID NO: 4138165 - DNA, 25 bp, Homo sapien
taacctttacataatcacacctctg

SEQ ID NO: 4138166 - DNA, 25 bp, Homo sapien
cttcaatttcatgtcgttaataaaa

SEQ ID NO: 4138167 - DNA, 25 bp, Homo sapien
cattgaggctagtttccacatgagg

SEQ ID NO: 4138168 - DNA, 25 bp, Homo sapien
ccatggttacgagccacatcagtga

SEQ ID NO: 4138169 - DNA, 25 bp, Homo sapien
tcatcactggcagccgagcaaatga

SEQ ID NO: 4138170 - DNA, 25 bp, Homo sapien
taagggatataagtgactcatggtg

SEQ ID NO: 4138171 - DNA, 25 bp, Homo sapien
ctaggtctgcgaggtgaacccactg

SEQ ID NO: 4138172 - DNA, 25 bp, Homo sapien
cctttggaggagtcgctgtggttaa

SEQ ID NO: 4138173 - DNA, 25 bp, Homo sapien
cacgatgtgatgacttcaccaaacc

SEQ ID NO: 4138174 - DNA, 25 bp, Homo sapien
aactccaggagcttgcacgatgtga

SEQ ID NO: 4138175 - DNA, 25 bp, Homo sapien
ggagcttgcacgatgtgatgacttc

SEQ ID NO: 4138176 - DNA, 25 bp, Homo sapien
gcttgcacgatgtgatgacttcacc

SEQ ID NO: 4138177 - DNA, 25 bp, Homo sapien
gaagcatttggtacctcctgcagga

SEQ ID NO: 4138178 - DNA, 25 bp, Homo sapien
gagcagccatagtccacggtgttgt

SEQ ID NO: 4138179 - DNA, 25 bp, Homo sapien
cagggacacttagacccagagagag

SEQ ID NO: 4138180 - DNA, 25 bp, Homo sapien
tgaagacttgctgtggcctactggg

SEQ ID NO: 4138181 - DNA, 25 bp, Homo sapien
tgggccacaacgcctagcctctaat

SEQ ID NO: 4138182 - DNA, 25 bp, Homo sapien
ggccacaacgcctagcctctaattt

SEQ ID NO: 4138183 - DNA, 25 bp, Homo sapien
cgtgggccacaacgcctagcctcta

SEQ ID NO: 4138184 - DNA, 25 bp, Homo sapien
gcgtgggccacaacgcctagcctct

SEQ ID NO: 4138185 - DNA, 25 bp, Homo sapien
gaacatagcggacttgcatgcccaa

SEQ ID NO: 4138186 - DNA, 25 bp, Homo sapien
cagaactgatagtcttcatggtgaa

SEQ ID NO: 4138187 - DNA, 25 bp, Homo sapien
gccacatatccttgtgggcagagaa

SEQ ID NO: 4138188 - DNA, 25 bp, Homo sapien
ggcctgccccggaaggaataacaga

SEQ ID NO: 4138189 - DNA, 25 bp, Homo sapien
acttggatctggaagggatggttct

SEQ ID NO: 4138190 - DNA, 25 bp, Homo sapien
ggaagggatggttctgttctctcat

SEQ ID NO: 4138191 - DNA, 25 bp, Homo sapien
cagctgctgacttggatctggaagg

SEQ ID NO: 4138192 - DNA, 25 bp, Homo sapien
gatctggaagggatggttctgttct

SEQ ID NO: 4138193 - DNA, 25 bp, Homo sapien
gcccatctatggacaggtcatccag

SEQ ID NO: 4138194 - DNA, 25 bp, Homo sapien
agggaggagcgggtggtgccctcat

SEQ ID NO: 4138195 - DNA, 25 bp, Homo sapien
gcatgtccacgcagaccaagtgcag

SEQ ID NO: 4138196 - DNA, 25 bp, Homo sapien
ctggtgtatcctcttaacttgccca

SEQ ID NO: 4138197 - DNA, 25 bp, Homo sapien
gctgttgcagacaaaagcagtcaaa

SEQ ID NO: 4138198 - DNA, 25 bp, Homo sapien
gaagttttctataaaggtccagaga

SEQ ID NO: 4138199 - DNA, 25 bp, Homo sapien
agggctcctgtgctaatttaaagct

SEQ ID NO: 4138200 - DNA, 25 bp, Homo sapien
gctaaacatagctcatgggctgtag

SEQ ID NO: 4138201 - DNA, 25 bp, Homo sapien
cacccatggaggtgcctaccaggtg

SEQ ID NO: 4138202 - DNA, 25 bp, Homo sapien
ggtagtaagcagcatacaccccagc

SEQ ID NO: 4138203 - DNA, 25 bp, Homo sapien
cacaggctggagacatccgatgggt

SEQ ID NO: 4138204 - DNA, 25 bp, Homo sapien
ccacccatggaggtgcctaccaggt

SEQ ID NO: 4138205 - DNA, 25 bp, Homo sapien
caccttgaagcggacataggagcag

SEQ ID NO: 4138206 - DNA, 25 bp, Homo sapien
cagagctgaagcatttcactcatct

SEQ ID NO: 4138207 - DNA, 25 bp, Homo sapien
cctgcagttctttgagccgttgtac

SEQ ID NO: 4138208 - DNA, 25 bp, Homo sapien
aaattgattgtcagttgagtactgc

SEQ ID NO: 4138209 - DNA, 25 bp, Homo sapien
ctgcatatgctgtccctagaagagg

SEQ ID NO: 4138210 - DNA, 25 bp, Homo sapien
gaagaggcttatcaaagccacccct

SEQ ID NO: 4138211 - DNA, 25 bp, Homo sapien
cccagcgtgttgcaggcactgcaga

SEQ ID NO: 4138212 - DNA, 25 bp, Homo sapien
tgctataaaactcatgaccactggt

SEQ ID NO: 4138213 - DNA, 25 bp, Homo sapien
aagttgttatgagggatgcggacat

SEQ ID NO: 4138214 - DNA, 25 bp, Homo sapien
agggatgcggacatcgacaaggcct

SEQ ID NO: 4138215 - DNA, 25 bp, Homo sapien
tgcggacatcgacaaggccttgcag

SEQ ID NO: 4138216 - DNA, 25 bp, Homo sapien
gttatgagggatgcggacatcgaca

SEQ ID NO: 4138217 - DNA, 25 bp, Homo sapien
tgtgcctgtggcaccaccgcagaat

SEQ ID NO: 4138218 - DNA, 25 bp, Homo sapien
gggatagtcaccagatccaggccac

SEQ ID NO: 4138219 - DNA, 25 bp, Homo sapien
tggcaccaccgcagaatcaagggat

SEQ ID NO: 4138220 - DNA, 25 bp, Homo sapien
gcagaatcaagggatagtcaccaga

SEQ ID NO: 4138221 - DNA, 25 bp, Homo sapien
gtcggaaccttgatcttgtccatgt

SEQ ID NO: 4138222 - DNA, 25 bp, Homo sapien
ccccagatgatctgcgtcggaacct

SEQ ID NO: 4138223 - DNA, 25 bp, Homo sapien
tctggacttctcactgacgatttcc

SEQ ID NO: 4138224 - DNA, 25 bp, Homo sapien
agtatctggacttctcactgacgat

SEQ ID NO: 4138225 - DNA, 25 bp, Homo sapien
gtttttcctcagaggccctggtgac

SEQ ID NO: 4138226 - DNA, 25 bp, Homo sapien
tcaaggacgtttttcctcagaggcc

SEQ ID NO: 4138227 - DNA, 25 bp, Homo sapien
aggacgtttttcctcagaggccctg

SEQ ID NO: 4138228 - DNA, 25 bp, Homo sapien
acgtttttcctcagaggccctggtg

SEQ ID NO: 4138229 - DNA, 25 bp, Homo sapien
cacatgagatccccttctctccacg

SEQ ID NO: 4138230 - DNA, 25 bp, Homo sapien
agagagcacatgagatccccttctc

SEQ ID NO: 4138231 - DNA, 25 bp, Homo sapien
acatgagatccccttctctccacgt

SEQ ID NO: 4138232 - DNA, 25 bp, Homo sapien
agaagagagcacatgagatcccctt

SEQ ID NO: 4138233 - DNA, 25 bp, Homo sapien
tcctgatcaaatgactctctgctgg

SEQ ID NO: 4138234 - DNA, 25 bp, Homo sapien
gatcaaatgactctctgctggcata

SEQ ID NO: 4138235 - DNA, 25 bp, Homo sapien
aggctctgattcctgatcaaatgac

SEQ ID NO: 4138236 - DNA, 25 bp, Homo sapien
catagcccagggcacaaacaaagct

SEQ ID NO: 4138237 - DNA, 25 bp, Homo sapien
tgtctgtctctagatggccctccca

SEQ ID NO: 4138238 - DNA, 25 bp, Homo sapien
gtctgtctctagatggccctcccat

SEQ ID NO: 4138239 - DNA, 25 bp, Homo sapien
tctgtctctagatggccctcccatt

SEQ ID NO: 4138240 - DNA, 25 bp, Homo sapien
gggtctcctgcataccaggcacggt

SEQ ID NO: 4138241 - DNA, 25 bp, Homo sapien
ctctgggtctcctgcataccaggca

SEQ ID NO: 4138242 - DNA, 25 bp, Homo sapien
tactctgggtctcctgcataccagg

SEQ ID NO: 4138243 - DNA, 25 bp, Homo sapien
tgtgtactctgggtctcctgcatac

SEQ ID NO: 4138244 - DNA, 25 bp, Homo sapien
cacaaagattcagacacccacgtgt

SEQ ID NO: 4138245 - DNA, 25 bp, Homo sapien
aagtaaccatgatgcctcctgtttt

SEQ ID NO: 4138246 - DNA, 25 bp, Homo sapien
caagaaagggagctggatgatacac

SEQ ID NO: 4138247 - DNA, 25 bp, Homo sapien
gctggatgatacacaaagattcaga

SEQ ID NO: 4138248 - DNA, 25 bp, Homo sapien
aaagtcgattatgagcttggctgtc

SEQ ID NO: 4138249 - DNA, 25 bp, Homo sapien
actactgagtgcccacagttttcca

SEQ ID NO: 4138250 - DNA, 25 bp, Homo sapien
tgttgtgcacagaagctaaaaagtc

SEQ ID NO: 4138251 - DNA, 25 bp, Homo sapien
ctggcagttggcaattgacttggcc

SEQ ID NO: 4138252 - DNA, 25 bp, Homo sapien
tatcttggaggttttcgcgtggtcc

SEQ ID NO: 4138253 - DNA, 25 bp, Homo sapien
gagcaatgcccctccatgcgtgtaa

SEQ ID NO: 4138254 - DNA, 25 bp, Homo sapien
caatgggctgcagtcatacatgggt

SEQ ID NO: 4138255 - DNA, 25 bp, Homo sapien
ttcagcgaatgaggactaatgctcc

SEQ ID NO: 4138256 - DNA, 25 bp, Homo sapien
gaacattattgctttattaggccta

SEQ ID NO: 4138257 - DNA, 25 bp, Homo sapien
ctcattctgcgactgctgtgggttc

SEQ ID NO: 4138258 - DNA, 25 bp, Homo sapien
tgctcattctgcgactgctgtgggt

SEQ ID NO: 4138259 - DNA, 25 bp, Homo sapien
caggtgctcattctgcgactgctgt

SEQ ID NO: 4138260 - DNA, 25 bp, Homo sapien
caagggttcttagtagcacattgaa

SEQ ID NO: 4138261 - DNA, 25 bp, Homo sapien
ctaactagtatgttacatccaaggg

SEQ ID NO: 4138262 - DNA, 25 bp, Homo sapien
cacagaattcattaactaactagta

SEQ ID NO: 4138263 - DNA, 25 bp, Homo sapien
tcaatcacattactcttcacagaat

SEQ ID NO: 4138264 - DNA, 25 bp, Homo sapien
agaaagagtcaaaaagaatattttg

SEQ ID NO: 4138265 - DNA, 25 bp, Homo sapien
tagggctcctaaatcctacagaaag

SEQ ID NO: 4138266 - DNA, 25 bp, Homo sapien
gagtttagggctcctaaatcctaca

SEQ ID NO: 4138267 - DNA, 25 bp, Homo sapien
gggctcctaaatcctacagaaagag

SEQ ID NO: 4138268 - DNA, 25 bp, Homo sapien
cccagaatgacttggctgtagattt

SEQ ID NO: 4138269 - DNA, 25 bp, Homo sapien
tagcctcttcccttctaatatacgt

SEQ ID NO: 4138270 - DNA, 25 bp, Homo sapien
acgtattgaagcctatgaatttccc

SEQ ID NO: 4138271 - DNA, 25 bp, Homo sapien
gtgagctactccacctagcctcttc

SEQ ID NO: 4138272 - DNA, 25 bp, Homo sapien
caggctcgctatagtcacagaggca

SEQ ID NO: 4138273 - DNA, 25 bp, Homo sapien
tccaggcagtgagatcgagagacca

SEQ ID NO: 4138274 - DNA, 25 bp, Homo sapien
cctgggttcggatggatggcacaca

SEQ ID NO: 4138275 - DNA, 25 bp, Homo sapien
gaattgcagcaccaagcgagaacct

SEQ ID NO: 4138276 - DNA, 25 bp, Homo sapien
gagactgagccgagacttctcccaa

SEQ ID NO: 4138277 - DNA, 25 bp, Homo sapien
gatatcagcaaggtgaacgagccct

SEQ ID NO: 4138278 - DNA, 25 bp, Homo sapien
tgtccctggatatgtccttagcaga

SEQ ID NO: 4138279 - DNA, 25 bp, Homo sapien
gtagatgacacaccagtcctggttg

SEQ ID NO: 4138280 - DNA, 25 bp, Homo sapien
cagactaggctgatgatggtcacaa

SEQ ID NO: 4138281 - DNA, 25 bp, Homo sapien
tgaagggaaggttcctccaggagcc

SEQ ID NO: 4138282 - DNA, 25 bp, Homo sapien
cagatgcctgttcattgccttgagg

SEQ ID NO: 4138283 - DNA, 25 bp, Homo sapien
cctgttgctgaaaggagacccgagc

SEQ ID NO: 4138284 - DNA, 25 bp, Homo sapien
gctgggcccgagaaactcctggtgt

SEQ ID NO: 4138285 - DNA, 25 bp, Homo sapien
tcctggtgtctttacgtttggcttc

SEQ ID NO: 4138286 - DNA, 25 bp, Homo sapien
ttcgtcggactagcctgacgcctga

SEQ ID NO: 4138287 - DNA, 25 bp, Homo sapien
accagactcctattcgccgcaagga

SEQ ID NO: 4138288 - DNA, 25 bp, Homo sapien
ggtcgcggccaactgagacggctcc

SEQ ID NO: 4138289 - DNA, 25 bp, Homo sapien
agacaaccgccgctctttggaaggc

SEQ ID NO: 4138290 - DNA, 25 bp, Homo sapien
aactgagacggctcccagacaaccg

SEQ ID NO: 4138291 - DNA, 25 bp, Homo sapien
cgctctttggaaggcttccacctac

SEQ ID NO: 4138292 - DNA, 25 bp, Homo sapien
tcgcgccgggcgcatggagagcgct

SEQ ID NO: 4138293 - DNA, 25 bp, Homo sapien
tctcggccacgttctgcggccgaga

SEQ ID NO: 4138294 - DNA, 25 bp, Homo sapien
agcgctcaggacacggtcccgaagt

SEQ ID NO: 4138295 - DNA, 25 bp, Homo sapien
ctacgcggcgccgtacagaggccct

SEQ ID NO: 4138296 - DNA, 25 bp, Homo sapien
tacttacgataaattttatgtcacg

SEQ ID NO: 4138297 - DNA, 25 bp, Homo sapien
acaacattcacgagatggacagtgg

SEQ ID NO: 4138298 - DNA, 25 bp, Homo sapien
ttatgtcacgtattttttgcaatta

SEQ ID NO: 4138299 - DNA, 25 bp, Homo sapien
gaatgtactcaatgctacttacgat

SEQ ID NO: 4138300 - DNA, 25 bp, Homo sapien
tgatgcttctttcccagtcactaga

SEQ ID NO: 4138301 - DNA, 25 bp, Homo sapien
ttctttcccagtcactagagtctcc

SEQ ID NO: 4138302 - DNA, 25 bp, Homo sapien
ctgatgcttctttcccagtcactag

SEQ ID NO: 4138303 - DNA, 25 bp, Homo sapien
tcccagtcactagagtctcccctaa

SEQ ID NO: 4138304 - DNA, 25 bp, Homo sapien
agaaatgaccaatgcacatgctatt

SEQ ID NO: 4138305 - DNA, 25 bp, Homo sapien
ctctggctctcgaggctcaggtgat

SEQ ID NO: 4138306 - DNA, 25 bp, Homo sapien
gaaatgaccaatgcacatgctattt

SEQ ID NO: 4138307 - DNA, 25 bp, Homo sapien
gtaaactactctttcatatgtggca

SEQ ID NO: 4138308 - DNA, 25 bp, Homo sapien
agactttcatgtagtggtactcgga

SEQ ID NO: 4138309 - DNA, 25 bp, Homo sapien
catgtagtggtactcggaagggttt

SEQ ID NO: 4138310 - DNA, 25 bp, Homo sapien
aactactctttcatatgtggcagca

SEQ ID NO: 4138311 - DNA, 25 bp, Homo sapien
attcagtccaactccacaatcttga

SEQ ID NO: 4138312 - DNA, 25 bp, Homo sapien
aagcagctgtttgaactgtgcagca

SEQ ID NO: 4138313 - DNA, 25 bp, Homo sapien
ccttcacagccgaaataagcagctg

SEQ ID NO: 4138314 - DNA, 25 bp, Homo sapien
aggtccttcacagccgaaataagca

SEQ ID NO: 4138315 - DNA, 25 bp, Homo sapien
tttcttacaaagatctttggaatgt

SEQ ID NO: 4138316 - DNA, 25 bp, Homo sapien
acacccagcttatctttgcagtttt

SEQ ID NO: 4138317 - DNA, 25 bp, Homo sapien
cttatctttgcagttttagtacaga

SEQ ID NO: 4138318 - DNA, 25 bp, Homo sapien
cagcttatctttgcagttttagtac

SEQ ID NO: 4138319 - DNA, 25 bp, Homo sapien
tcttcataggttaggatgtccaaag

SEQ ID NO: 4138320 - DNA, 25 bp, Homo sapien
tctcttcataggttaggatgtccaa

SEQ ID NO: 4138321 - DNA, 25 bp, Homo sapien
ttcataggttaggatgtccaaaggt

SEQ ID NO: 4138322 - DNA, 25 bp, Homo sapien
tcttctcttcataggttaggatgtc

SEQ ID NO: 4138323 - DNA, 25 bp, Homo sapien
catttttgctccatcggtctctctg

SEQ ID NO: 4138324 - DNA, 25 bp, Homo sapien
cggtctctctgccctgttatactag

SEQ ID NO: 4138325 - DNA, 25 bp, Homo sapien
tactagaaatttcccactctctgtc

SEQ ID NO: 4138326 - DNA, 25 bp, Homo sapien
agagagcatttttgctccatcggtc

SEQ ID NO: 4138327 - DNA, 25 bp, Homo sapien
agagctccacaatttgacaagacca

SEQ ID NO: 4138328 - DNA, 25 bp, Homo sapien
tttgcctttataggatcctaacagg

SEQ ID NO: 4138329 - DNA, 25 bp, Homo sapien
taggatcctaacagggtcaaagagc

SEQ ID NO: 4138330 - DNA, 25 bp, Homo sapien
gggtcaaagagctccacaatttgac

SEQ ID NO: 4138331 - DNA, 25 bp, Homo sapien
aatactagttccctactattaccag

SEQ ID NO: 4138332 - DNA, 25 bp, Homo sapien
tcaatccaatactagttccctacta

SEQ ID NO: 4138333 - DNA, 25 bp, Homo sapien
gttccctactattaccagataatgc

SEQ ID NO: 4138334 - DNA, 25 bp, Homo sapien
ccctactattaccagataatgcaag

SEQ ID NO: 4138335 - DNA, 25 bp, Homo sapien
agtggatgaacgtttccaaaatgga

SEQ ID NO: 4138336 - DNA, 25 bp, Homo sapien
cttcagcaccctcaaatttcatcaa

SEQ ID NO: 4138337 - DNA, 25 bp, Homo sapien
agagcttttagcctgcttcagtctt

SEQ ID NO: 4138338 - DNA, 25 bp, Homo sapien
tggatgaacgtttccaaaatggaag

SEQ ID NO: 4138339 - DNA, 25 bp, Homo sapien
gatggctggaaattagtgggaacat

SEQ ID NO: 4138340 - DNA, 25 bp, Homo sapien
ctggcaggttcagacagactgtcct

SEQ ID NO: 4138341 - DNA, 25 bp, Homo sapien
ttcagacagactgtcctccgaagcc

SEQ ID NO: 4138342 - DNA, 25 bp, Homo sapien
caggttcagacagactgtcctccga

SEQ ID NO: 4138343 - DNA, 25 bp, Homo sapien
aaatgcaaaggattgacatcccctg

SEQ ID NO: 4138344 - DNA, 25 bp, Homo sapien
gagctgagataagtccgttgatcaa

SEQ ID NO: 4138345 - DNA, 25 bp, Homo sapien
tgaaggccctcctaagttcagcgcg

SEQ ID NO: 4138346 - DNA, 25 bp, Homo sapien
tctgagaaggtagccacatcagtct

SEQ ID NO: 4138347 - DNA, 25 bp, Homo sapien
gaaagtgggcatttgaacaaccctc

SEQ ID NO: 4138348 - DNA, 25 bp, Homo sapien
gaaatcctgcatacactcaagtctg

SEQ ID NO: 4138349 - DNA, 25 bp, Homo sapien
ggccaagtcaccaagcacagctagt

SEQ ID NO: 4138350 - DNA, 25 bp, Homo sapien
ctcaagtctgcatgaagcataaggc

SEQ ID NO: 4138351 - DNA, 25 bp, Homo sapien
gctgccacgcctgatttaaaagtag

SEQ ID NO: 4138352 - DNA, 25 bp, Homo sapien
ctgccacgcctgatttaaaagtaga

SEQ ID NO: 4138353 - DNA, 25 bp, Homo sapien
cactaatagaggttggctgacaccc

SEQ ID NO: 4138354 - DNA, 25 bp, Homo sapien
cactgaaggtagactaagatgccac

SEQ ID NO: 4138355 - DNA, 25 bp, Homo sapien
tagtagctactgctgacaggctggg

SEQ ID NO: 4138356 - DNA, 25 bp, Homo sapien
tacataactgagaccgaggatgcac

SEQ ID NO: 4138357 - DNA, 25 bp, Homo sapien
gccagttccaaaggatcatacattg

SEQ ID NO: 4138358 - DNA, 25 bp, Homo sapien
tagtaacatgttaggcacatctccc

SEQ ID NO: 4138359 - DNA, 25 bp, Homo sapien
ctggtgattcccaaagactggagga

SEQ ID NO: 4138360 - DNA, 25 bp, Homo sapien
ttgggatggccatttagtagtaaca

SEQ ID NO: 4138361 - DNA, 25 bp, Homo sapien
ctgcttattcgctgaacaaccttgg

SEQ ID NO: 4138362 - DNA, 25 bp, Homo sapien
tccgtatatttgtgcatgttcccca

SEQ ID NO: 4138363 - DNA, 25 bp, Homo sapien
taagactgctgctaaatcccaggga

SEQ ID NO: 4138364 - DNA, 25 bp, Homo sapien
gttatggacctaactttaagactgc

SEQ ID NO: 4138365 - DNA, 25 bp, Homo sapien
taggaaaacgctacaactctagcgg

SEQ ID NO: 4138366 - DNA, 25 bp, Homo sapien
catgttatgccactgatccgagccc

SEQ ID NO: 4138367 - DNA, 25 bp, Homo sapien
cagttccagcaacacgaatgaggga

SEQ ID NO: 4138368 - DNA, 25 bp, Homo sapien
cccttgtctggatctcgggaagatt

SEQ ID NO: 4138369 - DNA, 25 bp, Homo sapien
tgtgtgacctggtacagtcaaggcc

SEQ ID NO: 4138370 - DNA, 25 bp, Homo sapien
aatacccctatgtacaaagtgctcg

SEQ ID NO: 4138371 - DNA, 25 bp, Homo sapien
caaggccacttctcaattatctggg

SEQ ID NO: 4138372 - DNA, 25 bp, Homo sapien
gaataagcatgtcaggtccacaaga

SEQ ID NO: 4138373 - DNA, 25 bp, Homo sapien
taataagctatgctgacacatgagg

SEQ ID NO: 4138374 - DNA, 25 bp, Homo sapien
ggtgattctgctctaacccacagtt

SEQ ID NO: 4138375 - DNA, 25 bp, Homo sapien
tctgggacactggagatacctgtgg

SEQ ID NO: 4138376 - DNA, 25 bp, Homo sapien
tacctgtggaccaagactaattcag

SEQ ID NO: 4138377 - DNA, 25 bp, Homo sapien
taatcccaacatatctacaggacaa

SEQ ID NO: 4138378 - DNA, 25 bp, Homo sapien
aaagcaatttagcatccgtataatc

SEQ ID NO: 4138379 - DNA, 25 bp, Homo sapien
gagaaatgctcttgatataatagta

SEQ ID NO: 4138380 - DNA, 25 bp, Homo sapien
tagcatccgtataatcccaacatat

SEQ ID NO: 4138381 - DNA, 25 bp, Homo sapien
gacgcgaggtaggaacccgaggcgc

SEQ ID NO: 4138382 - DNA, 25 bp, Homo sapien
gaggcgccgactcccgccgcccgcc

SEQ ID NO: 4138383 - DNA, 25 bp, Homo sapien
ggttccaccgccgccgctgtcaaca

SEQ ID NO: 4138384 - DNA, 25 bp, Homo sapien
ccgcccggttccaccgccgccgctg

SEQ ID NO: 4138385 - DNA, 25 bp, Homo sapien
agcggcaccgtgtcgtccagcagca

SEQ ID NO: 4138386 - DNA, 25 bp, Homo sapien
ctggcggcttctccatgaaggccat

SEQ ID NO: 4138387 - DNA, 25 bp, Homo sapien
gctctggctcgcctcgatggctgct

SEQ ID NO: 4138388 - DNA, 25 bp, Homo sapien
tggctgctgtcagcggcaccgtgtc

SEQ ID NO: 4138389 - DNA, 25 bp, Homo sapien
taaaggagttgggcccgaagagcta

SEQ ID NO: 4138390 - DNA, 25 bp, Homo sapien
ctaagatccaaagcctaagaatggg

SEQ ID NO: 4138391 - DNA, 25 bp, Homo sapien
atgggcttcaggtcagtgaggttct

SEQ ID NO: 4138392 - DNA, 25 bp, Homo sapien
gcagtccctgtgatgagatccttaa

SEQ ID NO: 4138393 - DNA, 25 bp, Homo sapien
cctttgacaagggagcttttggtca

SEQ ID NO: 4138394 - DNA, 25 bp, Homo sapien
tcttctacttgtaacagggctgcta

SEQ ID NO: 4138395 - DNA, 25 bp, Homo sapien
cacaaatagctagctgtggtggcgc

SEQ ID NO: 4138396 - DNA, 25 bp, Homo sapien
aagagcctggtatgttatcaatgat

SEQ ID NO: 4138397 - DNA, 25 bp, Homo sapien
tggagactgaagcgctccctcctgg

SEQ ID NO: 4138398 - DNA, 25 bp, Homo sapien
gagactgaagcgctccctcctgggc

SEQ ID NO: 4138399 - DNA, 25 bp, Homo sapien
ctggagactgaagcgctccctcctg

SEQ ID NO: 4138400 - DNA, 25 bp, Homo sapien
tgctggagactgaagcgctccctcc

SEQ ID NO: 4138401 - DNA, 25 bp, Homo sapien
tgagcctctagaaatccctcacact

SEQ ID NO: 4138402 - DNA, 25 bp, Homo sapien
ctgtagtggtggctcccataggcac

SEQ ID NO: 4138403 - DNA, 25 bp, Homo sapien
cggttggtatctaacctgagcctct

SEQ ID NO: 4138404 - DNA, 25 bp, Homo sapien
tcttaaggactcagctcgtctgtct

SEQ ID NO: 4138405 - DNA, 25 bp, Homo sapien
agtaagcatccccatttgcaatttg

SEQ ID NO: 4138406 - DNA, 25 bp, Homo sapien
ccaagtaagcatccccatttgcaat

SEQ ID NO: 4138407 - DNA, 25 bp, Homo sapien
gtaagcatccccatttgcaatttgt

SEQ ID NO: 4138408 - DNA, 25 bp, Homo sapien
tttccaagtaagcatccccatttgc

SEQ ID NO: 4138409 - DNA, 25 bp, Homo sapien
gggctgttattcccacacctttgga

SEQ ID NO: 4138410 - DNA, 25 bp, Homo sapien
gagaagataaagcaccaaggcccat

SEQ ID NO: 4138411 - DNA, 25 bp, Homo sapien
tggaaaggagagctaacagccctgc

SEQ ID NO: 4138412 - DNA, 25 bp, Homo sapien
ccctatcttggcatgccagggaggc

SEQ ID NO: 4138413 - DNA, 25 bp, Homo sapien
agacggatttcagcctgccaccaaa

SEQ ID NO: 4138414 - DNA, 25 bp, Homo sapien
tagttatttcagagtatactccttc

SEQ ID NO: 4138415 - DNA, 25 bp, Homo sapien
tactccttctacttagaaatgaaag

SEQ ID NO: 4138416 - DNA, 25 bp, Homo sapien
gaggtgtccagaaggcattgctatc

SEQ ID NO: 4138417 - DNA, 25 bp, Homo sapien
tgatcttgatactgtgtaggcccag

SEQ ID NO: 4138418 - DNA, 25 bp, Homo sapien
aatgagcctccagaagtagagtagg

SEQ ID NO: 4138419 - DNA, 25 bp, Homo sapien
atgctgtggtgatctactgcacacc

SEQ ID NO: 4138420 - DNA, 25 bp, Homo sapien
gtagagtaggatggtggttaccaca

SEQ ID NO: 4138421 - DNA, 25 bp, Homo sapien
taagacacgaagaatatgctgtggt

SEQ ID NO: 4138422 - DNA, 25 bp, Homo sapien
taaaatgtagatggggccaagtcag

SEQ ID NO: 4138423 - DNA, 25 bp, Homo sapien
ccaagtcagcggctcatgactataa

SEQ ID NO: 4138424 - DNA, 25 bp, Homo sapien
gccaagtcagcggctcatgactata

SEQ ID NO: 4138425 - DNA, 25 bp, Homo sapien
agatggggccaagtcagcggctcat

SEQ ID NO: 4138426 - DNA, 25 bp, Homo sapien
tcctctttgcactcgaataatatat

SEQ ID NO: 4138427 - DNA, 25 bp, Homo sapien
ctctttgcactcgaataatatattc

SEQ ID NO: 4138428 - DNA, 25 bp, Homo sapien
attcctctttgcactcgaataatat

SEQ ID NO: 4138429 - DNA, 25 bp, Homo sapien
cctctttgcactcgaataatatatt

SEQ ID NO: 4138430 - DNA, 25 bp, Homo sapien
tgacagacagtccaccttccattgt

SEQ ID NO: 4138431 - DNA, 25 bp, Homo sapien
agggttccccctcttgacagacagt

SEQ ID NO: 4138432 - DNA, 25 bp, Homo sapien
tacatcgccctgattccccagggtt

SEQ ID NO: 4138433 - DNA, 25 bp, Homo sapien
gattaggctatagtcaaattctact

SEQ ID NO: 4138434 - DNA, 25 bp, Homo sapien
ctgttgttaagcaaatcaaagtcac

SEQ ID NO: 4138435 - DNA, 25 bp, Homo sapien
agctgttgttaagcaaatcaaagtc

SEQ ID NO: 4138436 - DNA, 25 bp, Homo sapien
gctgttgttaagcaaatcaaagtca

SEQ ID NO: 4138437 - DNA, 25 bp, Homo sapien
gtgtttctagatgaagaccttccag

SEQ ID NO: 4138438 - DNA, 25 bp, Homo sapien
tggctgtgtttctagatgaagacct

SEQ ID NO: 4138439 - DNA, 25 bp, Homo sapien
aagtgaagacatggcgggtattggc

SEQ ID NO: 4138440 - DNA, 25 bp, Homo sapien
gctgtgtttctagatgaagaccttc

SEQ ID NO: 4138441 - DNA, 25 bp, Homo sapien
taatccaaggcacttgaagaccagc

SEQ ID NO: 4138442 - DNA, 25 bp, Homo sapien
agtatgacacacaagagcacaatag

SEQ ID NO: 4138443 - DNA, 25 bp, Homo sapien
atagtcttcagtaatccaaggcact

SEQ ID NO: 4138444 - DNA, 25 bp, Homo sapien
taagccgtgcactcttcctcaggtt

SEQ ID NO: 4138445 - DNA, 25 bp, Homo sapien
tatgggcaagatcagaggtccctca

SEQ ID NO: 4138446 - DNA, 25 bp, Homo sapien
aacggctagctcaccaatgacggga

SEQ ID NO: 4138447 - DNA, 25 bp, Homo sapien
caatgacgggagcagtcctttccct

SEQ ID NO: 4138448 - DNA, 25 bp, Homo sapien
tccctcagaatgagcgataacggct

SEQ ID NO: 4138449 - DNA, 25 bp, Homo sapien
ctgagtccacatcactcagaaagga

SEQ ID NO: 4138450 - DNA, 25 bp, Homo sapien
caaactgattgtatatggagcaagg

SEQ ID NO: 4138451 - DNA, 25 bp, Homo sapien
gatttgcctgcactaccgcatagca

SEQ ID NO: 4138452 - DNA, 25 bp, Homo sapien
taccattacccagtatcgacagatt

SEQ ID NO: 4138453 - DNA, 25 bp, Homo sapien
taaggtctaaagagaagggcatcct

SEQ ID NO: 4138454 - DNA, 25 bp, Homo sapien
gaccttgaacttgatactggacaag

SEQ ID NO: 4138455 - DNA, 25 bp, Homo sapien
tccagtggcatgtgtattgatcgag

SEQ ID NO: 4138456 - DNA, 25 bp, Homo sapien
cttatattagagcagtccagtggca

SEQ ID NO: 4138457 - DNA, 25 bp, Homo sapien
caggaactgggatttaagggccaca

SEQ ID NO: 4138458 - DNA, 25 bp, Homo sapien
caccaagtaggtgaaactctaatgc

SEQ ID NO: 4138459 - DNA, 25 bp, Homo sapien
gccacacttcagaggtatcccagga

SEQ ID NO: 4138460 - DNA, 25 bp, Homo sapien
tgggagtcaggtatgaacaggaact

SEQ ID NO: 4138461 - DNA, 25 bp, Homo sapien
gaagacctttctgcctttcagctat

SEQ ID NO: 4138462 - DNA, 25 bp, Homo sapien
tgatcacgttgagatagttctgaag

SEQ ID NO: 4138463 - DNA, 25 bp, Homo sapien
caatcaattttttgggaggaagagg

SEQ ID NO: 4138464 - DNA, 25 bp, Homo sapien
tatgaattcacgatccatgttacca

SEQ ID NO: 4138465 - DNA, 25 bp, Homo sapien
tccgatttaatcagcatgcacgcag

SEQ ID NO: 4138466 - DNA, 25 bp, Homo sapien
ggctccatattggaatcacttggga

SEQ ID NO: 4138467 - DNA, 25 bp, Homo sapien
gactacaagctccaaccacaagact

SEQ ID NO: 4138468 - DNA, 25 bp, Homo sapien
cacttgggaagctttacagactaca

SEQ ID NO: 4138469 - DNA, 25 bp, Homo sapien
taattcaaatgaacacctcacaact

SEQ ID NO: 4138470 - DNA, 25 bp, Homo sapien
caacagctggccctcaattagactt

SEQ ID NO: 4138471 - DNA, 25 bp, Homo sapien
acaactccctcacagaagaccaagg

SEQ ID NO: 4138472 - DNA, 25 bp, Homo sapien
actccctcacagaagaccaagggtc

SEQ ID NO: 4138473 - DNA, 25 bp, Homo sapien
acattttagaaacccattagtcaga

SEQ ID NO: 4138474 - DNA, 25 bp, Homo sapien
aatgaaatccctatagtctatgacc

SEQ ID NO: 4138475 - DNA, 25 bp, Homo sapien
caatgtgggattttagattggaccc

SEQ ID NO: 4138476 - DNA, 25 bp, Homo sapien
catatcaggaaagggccatatgctg

SEQ ID NO: 4138477 - DNA, 25 bp, Homo sapien
ggttctgatcggaagaacatggaaa

SEQ ID NO: 4138478 - DNA, 25 bp, Homo sapien
catggaaacctgttgcaaggcaatc

SEQ ID NO: 4138479 - DNA, 25 bp, Homo sapien
gttctgatcggaagaacatggaaac

SEQ ID NO: 4138480 - DNA, 25 bp, Homo sapien
ttggttctgatcggaagaacatgga

SEQ ID NO: 4138481 - DNA, 25 bp, Homo sapien
cctgcatttaagcatgttcctggga

SEQ ID NO: 4138482 - DNA, 25 bp, Homo sapien
ctttttaacagaatgagcgtgccaa

SEQ ID NO: 4138483 - DNA, 25 bp, Homo sapien
aagcatgactaaggatccagttctg

SEQ ID NO: 4138484 - DNA, 25 bp, Homo sapien
ttcctgggatacgtatcagaaagca

SEQ ID NO: 4138485 - DNA, 25 bp, Homo sapien
aacactagccgttcctttggctgat

SEQ ID NO: 4138486 - DNA, 25 bp, Homo sapien
gatttttaatcttcatcaagaaata

SEQ ID NO: 4138487 - DNA, 25 bp, Homo sapien
ccagcttaacactagccgttccttt

SEQ ID NO: 4138488 - DNA, 25 bp, Homo sapien
agcttaacactagccgttcctttgg

SEQ ID NO: 4138489 - DNA, 25 bp, Homo sapien
cagaagtttgattagacactgaaaa

SEQ ID NO: 4138490 - DNA, 25 bp, Homo sapien
ggcagaagtttgattagacactgaa

SEQ ID NO: 4138491 - DNA, 25 bp, Homo sapien
gaagtttgattagacactgaaaatc

SEQ ID NO: 4138492 - DNA, 25 bp, Homo sapien
aaggcagaagtttgattagacactg

SEQ ID NO: 4138493 - DNA, 25 bp, Homo sapien
ttctgcaacataaagattcacagtg

SEQ ID NO: 4138494 - DNA, 25 bp, Homo sapien
agaagcatactagccagaaaacagg

SEQ ID NO: 4138495 - DNA, 25 bp, Homo sapien
cacagtagctggcatgaatcttcct

SEQ ID NO: 4138496 - DNA, 25 bp, Homo sapien
ctttgcctaacattccacactgctg

SEQ ID NO: 4138497 - DNA, 25 bp, Homo sapien
tcctaattagcaacgctgaggattc

SEQ ID NO: 4138498 - DNA, 25 bp, Homo sapien
tggcaaaggtaacccgatagatgta

SEQ ID NO: 4138499 - DNA, 25 bp, Homo sapien
gtagatcagatccttcaatgttccc

SEQ ID NO: 4138500 - DNA, 25 bp, Homo sapien
gaggattcattagctgtggcaaagg

SEQ ID NO: 4138501 - DNA, 25 bp, Homo sapien
ttagggttgcagtacttctttagaa

SEQ ID NO: 4138502 - DNA, 25 bp, Homo sapien
cttcttagggttgcagtacttcttt

SEQ ID NO: 4138503 - DNA, 25 bp, Homo sapien
ttccaggccctgaatcttcttaggg

SEQ ID NO: 4138504 - DNA, 25 bp, Homo sapien
aatatttgccgtccatatgttttta

SEQ ID NO: 4138505 - DNA, 25 bp, Homo sapien
ccatcgagcatcacattggaggcgt

SEQ ID NO: 4138506 - DNA, 25 bp, Homo sapien
taaggaattctcaaggtccagcagc

SEQ ID NO: 4138507 - DNA, 25 bp, Homo sapien
ggaaggcaggcccaataaggaattc

SEQ ID NO: 4138508 - DNA, 25 bp, Homo sapien
tgaagatgcccataagggaatccct

SEQ ID NO: 4138509 - DNA, 25 bp, Homo sapien
tggcggtcgtccataagtcatttca

SEQ ID NO: 4138510 - DNA, 25 bp, Homo sapien
gagtctggcggtcgtccataagtca

SEQ ID NO: 4138511 - DNA, 25 bp, Homo sapien
agcagtggacatccacactttccaa

SEQ ID NO: 4138512 - DNA, 25 bp, Homo sapien
tcatacagtaagtggccaaagcagt

SEQ ID NO: 4138513 - DNA, 25 bp, Homo sapien
aaaggtgctctcacttgtcctccag

SEQ ID NO: 4138514 - DNA, 25 bp, Homo sapien
taggtctgggcctgctaggctctta

SEQ ID NO: 4138515 - DNA, 25 bp, Homo sapien
taggctcttatctactaggcttctg

SEQ ID NO: 4138516 - DNA, 25 bp, Homo sapien
aatgctgtaagagctcctggatcca

SEQ ID NO: 4138517 - DNA, 25 bp, Homo sapien
gatgaaaagtttaacaccactttgc

SEQ ID NO: 4138518 - DNA, 25 bp, Homo sapien
agatacacattttagttccacagaa

SEQ ID NO: 4138519 - DNA, 25 bp, Homo sapien
acagaacacgctggcaaatccactt

SEQ ID NO: 4138520 - DNA, 25 bp, Homo sapien
gatacacattttagttccacagaac

SEQ ID NO: 4138521 - DNA, 25 bp, Homo sapien
ttacaggcttcacaagacagcgtag

SEQ ID NO: 4138522 - DNA, 25 bp, Homo sapien
catctgtaagagccgggagatggta

SEQ ID NO: 4138523 - DNA, 25 bp, Homo sapien
gagatggtaggcatgccatttttac

SEQ ID NO: 4138524 - DNA, 25 bp, Homo sapien
aagacagcgtagactccaacacggc

SEQ ID NO: 4138525 - DNA, 25 bp, Homo sapien
agaagtggttagtaaaacatcgctg

SEQ ID NO: 4138526 - DNA, 25 bp, Homo sapien
tcagaagtggttagtaaaacatcgc

SEQ ID NO: 4138527 - DNA, 25 bp, Homo sapien
cagaagtggttagtaaaacatcgct

SEQ ID NO: 4138528 - DNA, 25 bp, Homo sapien
tttcagaagtggttagtaaaacatc

SEQ ID NO: 4138529 - DNA, 25 bp, Homo sapien
tctgttcctcaattagtctcttctc

SEQ ID NO: 4138530 - DNA, 25 bp, Homo sapien
gtttctgttcctcaattagtctctt

SEQ ID NO: 4138531 - DNA, 25 bp, Homo sapien
caatgcctcttttaactttgtaggg

SEQ ID NO: 4138532 - DNA, 25 bp, Homo sapien
tctcaatgcctcttttaactttgta

SEQ ID NO: 4138533 - DNA, 25 bp, Homo sapien
gactgagctcttgtcagtcttcgat

SEQ ID NO: 4138534 - DNA, 25 bp, Homo sapien
tgagctcttgtcagtcttcgatgct

SEQ ID NO: 4138535 - DNA, 25 bp, Homo sapien
cttgtcagtcttcgatgctggtgaa

SEQ ID NO: 4138536 - DNA, 25 bp, Homo sapien
gctcttgtcagtcttcgatgctggt

SEQ ID NO: 4138537 - DNA, 25 bp, Homo sapien
tattggagttgctgtacttcgctga

SEQ ID NO: 4138538 - DNA, 25 bp, Homo sapien
ggagttgctgtacttcgctgaatgc

SEQ ID NO: 4138539 - DNA, 25 bp, Homo sapien
gctgtacttcgctgaatgctcttca

SEQ ID NO: 4138540 - DNA, 25 bp, Homo sapien
ctgaattattggagttgctgtactt

SEQ ID NO: 4138541 - DNA, 25 bp, Homo sapien
tgacggggacgtgagaggtgagctg

SEQ ID NO: 4138542 - DNA, 25 bp, Homo sapien
gcgatgacggggacgtgagaggtga

SEQ ID NO: 4138543 - DNA, 25 bp, Homo sapien
agttggcgatgacggggacgtgaga

SEQ ID NO: 4138544 - DNA, 25 bp, Homo sapien
ggagttggcgatgacggggacgtga

SEQ ID NO: 4138545 - DNA, 25 bp, Homo sapien
tagtggccctgaaaccggtccattc

SEQ ID NO: 4138546 - DNA, 25 bp, Homo sapien
aaagctgctgctatctaacccctga

SEQ ID NO: 4138547 - DNA, 25 bp, Homo sapien
cattccctgtgaaagccgagcttgg

SEQ ID NO: 4138548 - DNA, 25 bp, Homo sapien
gcaaagacagcaagctggagcccgg

SEQ ID NO: 4138549 - DNA, 25 bp, Homo sapien
acccctgggccacggcgcatttgtg

SEQ ID NO: 4138550 - DNA, 25 bp, Homo sapien
cgcatttgtgttgttcagctaagca

SEQ ID NO: 4138551 - DNA, 25 bp, Homo sapien
cagctaagcatgtaccaagacaggc

SEQ ID NO: 4138552 - DNA, 25 bp, Homo sapien
tgtgacaaaactgaccctatggacg

SEQ ID NO: 4138553 - DNA, 25 bp, Homo sapien
aacagagtcaaatcgttgccagaaa

SEQ ID NO: 4138554 - DNA, 25 bp, Homo sapien
tgcaaaagactttaggagagacatc

SEQ ID NO: 4138555 - DNA, 25 bp, Homo sapien
gaaaatcagaaacgcagtgactctt

SEQ ID NO: 4138556 - DNA, 25 bp, Homo sapien
tgaagcaaaggctaataacagaaaa

SEQ ID NO: 4138557 - DNA, 25 bp, Homo sapien
tactactgtatgagacagcacccat

SEQ ID NO: 4138558 - DNA, 25 bp, Homo sapien
caagaatatcctcccatggaccagg

SEQ ID NO: 4138559 - DNA, 25 bp, Homo sapien
atatagtccgggcagtagatcacca

SEQ ID NO: 4138560 - DNA, 25 bp, Homo sapien
ttaaacagacgcctcaagtgccttg

SEQ ID NO: 4138561 - DNA, 25 bp, Homo sapien
aaaccaatcagttctatgaatagag

SEQ ID NO: 4138562 - DNA, 25 bp, Homo sapien
taaatactagttggtgatactacca

SEQ ID NO: 4138563 - DNA, 25 bp, Homo sapien
aggcaacaggcctgtctaatcccaa

SEQ ID NO: 4138564 - DNA, 25 bp, Homo sapien
taaataacaatttagggtcctctgc

SEQ ID NO: 4138565 - DNA, 25 bp, Homo sapien
tccaaggtcatagcgggaatgtggc

SEQ ID NO: 4138566 - DNA, 25 bp, Homo sapien
tcagggttcttttcacaccagccaa

SEQ ID NO: 4138567 - DNA, 25 bp, Homo sapien
gctggagtccactcacactggataa

SEQ ID NO: 4138568 - DNA, 25 bp, Homo sapien
ccctaacttgtgtgacctcggtcaa

SEQ ID NO: 4138569 - DNA, 25 bp, Homo sapien
attcacgttcaaaatggtgcatgct

SEQ ID NO: 4138570 - DNA, 25 bp, Homo sapien
aattcacgttcaaaatggtgcatgc

SEQ ID NO: 4138571 - DNA, 25 bp, Homo sapien
tcagcaatcgagacactttgggtcc

SEQ ID NO: 4138572 - DNA, 25 bp, Homo sapien
gaatatagatgaagtcactgggtgc

SEQ ID NO: 4138573 - DNA, 25 bp, Homo sapien
taagttgtctccctgtaactaagag

SEQ ID NO: 4138574 - DNA, 25 bp, Homo sapien
tgcagcaacgggactttgagagtta

SEQ ID NO: 4138575 - DNA, 25 bp, Homo sapien
acagctcgagaattataaaggatgc

SEQ ID NO: 4138576 - DNA, 25 bp, Homo sapien
actcctgtcacagctcgagaattat

SEQ ID NO: 4138577 - DNA, 25 bp, Homo sapien
ttataaaggatgcttacaaaagaac

SEQ ID NO: 4138578 - DNA, 25 bp, Homo sapien
cagctctcgggagaaccaccttctc

SEQ ID NO: 4138579 - DNA, 25 bp, Homo sapien
ctttgtggtcacatacaggaaggga

SEQ ID NO: 4138580 - DNA, 25 bp, Homo sapien
tggacaggatgtctgagggtccctc

SEQ ID NO: 4138581 - DNA, 25 bp, Homo sapien
agccagcagtgggtaatctacagtc

SEQ ID NO: 4138582 - DNA, 25 bp, Homo sapien
taggtcagatctagggaggaatgcc

SEQ ID NO: 4138583 - DNA, 25 bp, Homo sapien
tcttctccaccaaaccacacgggaa

SEQ ID NO: 4138584 - DNA, 25 bp, Homo sapien
aaatccctgagagccaactacttac

SEQ ID NO: 4138585 - DNA, 25 bp, Homo sapien
caaaatccctgagagccaactactt

SEQ ID NO: 4138586 - DNA, 25 bp, Homo sapien
tagacaaaatccctgagagccaact

SEQ ID NO: 4138587 - DNA, 25 bp, Homo sapien
gacaaaatccctgagagccaactac

SEQ ID NO: 4138588 - DNA, 25 bp, Homo sapien
cagttacgaccaggtcagtcccgat

SEQ ID NO: 4138589 - DNA, 25 bp, Homo sapien
cttcagttacgaccaggtcagtccc

SEQ ID NO: 4138590 - DNA, 25 bp, Homo sapien
ttacgaccaggtcagtcccgatttc

SEQ ID NO: 4138591 - DNA, 25 bp, Homo sapien
tacgaccaggtcagtcccgatttct

SEQ ID NO: 4138592 - DNA, 25 bp, Homo sapien
tgacaaacctgggaacaactgcctg

SEQ ID NO: 4138593 - DNA, 25 bp, Homo sapien
gagagcagaccgattccatgttaga

SEQ ID NO: 4138594 - DNA, 25 bp, Homo sapien
tgaggccttcctgccaagagacctc

SEQ ID NO: 4138595 - DNA, 25 bp, Homo sapien
tatgatacctgaatttgcacccagg

SEQ ID NO: 4138596 - DNA, 25 bp, Homo sapien
ttttggccctttccatggtccacaa

SEQ ID NO: 4138597 - DNA, 25 bp, Homo sapien
cctgaaaggtccgttggggcttcag

SEQ ID NO: 4138598 - DNA, 25 bp, Homo sapien
ggtccgttggggcttcagctacaac

SEQ ID NO: 4138599 - DNA, 25 bp, Homo sapien
tccttttggccctttccatggtcca

SEQ ID NO: 4138600 - DNA, 25 bp, Homo sapien
acacagacctgggactcggtctcac

SEQ ID NO: 4138601 - DNA, 25 bp, Homo sapien
gcaggaacacagacctgggactcgg

SEQ ID NO: 4138602 - DNA, 25 bp, Homo sapien
ggaacacagacctgggactcggtct

SEQ ID NO: 4138603 - DNA, 25 bp, Homo sapien
gaggtctaggggtcagaaggtggaa

SEQ ID NO: 4138604 - DNA, 25 bp, Homo sapien
ggccagacccagcttgccagtttgg

SEQ ID NO: 4138605 - DNA, 25 bp, Homo sapien
gtacaaccagggcaaggaaggccag

SEQ ID NO: 4138606 - DNA, 25 bp, Homo sapien
tgggcctacaacaaccatggtggct

SEQ ID NO: 4138607 - DNA, 25 bp, Homo sapien
gctcttatgtacaaccagggcaagg

SEQ ID NO: 4138608 - DNA, 25 bp, Homo sapien
tgaagaggacttctggagagcaacc

SEQ ID NO: 4138609 - DNA, 25 bp, Homo sapien
cagatggaacgaaaggacaggcagc

SEQ ID NO: 4138610 - DNA, 25 bp, Homo sapien
cacgtagtgtaacagaaggagctcc

SEQ ID NO: 4138611 - DNA, 25 bp, Homo sapien
taaatacactgtccaaagggctcca

SEQ ID NO: 4138612 - DNA, 25 bp, Homo sapien
tgtcgtgctgtaccgcagtgggcaa

SEQ ID NO: 4138613 - DNA, 25 bp, Homo sapien
taagtttgtatggacgactggctca

SEQ ID NO: 4138614 - DNA, 25 bp, Homo sapien
tcctgagcacaacggactggtgaga

SEQ ID NO: 4138615 - DNA, 25 bp, Homo sapien
tcaggacagaataaacacccgagtt

SEQ ID NO: 4138616 - DNA, 25 bp, Homo sapien
tcacagcctgagacgagagctgggc

SEQ ID NO: 4138617 - DNA, 25 bp, Homo sapien
caggtgcctcggtgctcgcaggagg

SEQ ID NO: 4138618 - DNA, 25 bp, Homo sapien
tgagcaaggcccctcggctcatgcc

SEQ ID NO: 4138619 - DNA, 25 bp, Homo sapien
tcggctcatgccattcacagcctga

SEQ ID NO: 4138620 - DNA, 25 bp, Homo sapien
tcagccgatcttcggagcactgtga

SEQ ID NO: 4138621 - DNA, 25 bp, Homo sapien
cgatcttcggagcactgtgatcaca

SEQ ID NO: 4138622 - DNA, 25 bp, Homo sapien
gccgatcttcggagcactgtgatca

SEQ ID NO: 4138623 - DNA, 25 bp, Homo sapien
tcttcggagcactgtgatcacaggt

SEQ ID NO: 4138624 - DNA, 25 bp, Homo sapien
tggctgtactggctcagcaattact

SEQ ID NO: 4138625 - DNA, 25 bp, Homo sapien
ggctcagcaattactttcccaggaa

SEQ ID NO: 4138626 - DNA, 25 bp, Homo sapien
caaaatagtactgtttgtggctgta

SEQ ID NO: 4138627 - DNA, 25 bp, Homo sapien
tatttctctcgaaaagctgcttaca

SEQ ID NO: 4138628 - DNA, 25 bp, Homo sapien
gaagatcctctaattggcaagagct

SEQ ID NO: 4138629 - DNA, 25 bp, Homo sapien
aatatgctgctgtcccaaaagcctg

SEQ ID NO: 4138630 - DNA, 25 bp, Homo sapien
caaaagcctggccattagaggataa

SEQ ID NO: 4138631 - DNA, 25 bp, Homo sapien
tctagagtagttgctttagcagccc

SEQ ID NO: 4138632 - DNA, 25 bp, Homo sapien
gaaatatcttgtcaagctacagaca

SEQ ID NO: 4138633 - DNA, 25 bp, Homo sapien
ttctttgctaacaacagacgctaca

SEQ ID NO: 4138634 - DNA, 25 bp, Homo sapien
caacagacgctacaaaaagttctca

SEQ ID NO: 4138635 - DNA, 25 bp, Homo sapien
gactgtgtgaatctattctttgcta

SEQ ID NO: 4138636 - DNA, 25 bp, Homo sapien
gctaggagtggccaaacgacttcaa

SEQ ID NO: 4138637 - DNA, 25 bp, Homo sapien
tatttgaaatacttgctggcactgc

SEQ ID NO: 4138638 - DNA, 25 bp, Homo sapien
tgcaagacctgactattcataacgg

SEQ ID NO: 4138639 - DNA, 25 bp, Homo sapien
tcatcttgtaactgtggaaggaggc

SEQ ID NO: 4138640 - DNA, 25 bp, Homo sapien
ccccaaagagatttaacatcacctt

SEQ ID NO: 4138641 - DNA, 25 bp, Homo sapien
cccaaagagatttaacatcaccttt

SEQ ID NO: 4138642 - DNA, 25 bp, Homo sapien
aaagttgatttgaggcggctccagg

SEQ ID NO: 4138643 - DNA, 25 bp, Homo sapien
tgaagaggcgctttcactggaccgc

SEQ ID NO: 4138644 - DNA, 25 bp, Homo sapien
cccatcagtagagcgtgtgcaagca

SEQ ID NO: 4138645 - DNA, 25 bp, Homo sapien
tttggcagcggatagaggacacgac

SEQ ID NO: 4138646 - DNA, 25 bp, Homo sapien
gactagttggccaatttacaccttg

SEQ ID NO: 4138647 - DNA, 25 bp, Homo sapien
gaaaagatttagttccgagagaaga

SEQ ID NO: 4138648 - DNA, 25 bp, Homo sapien
gacaactgacaaagaacccaaaatg

SEQ ID NO: 4138649 - DNA, 25 bp, Homo sapien
tgttcttaagggcaaatattccgtg

SEQ ID NO: 4138650 - DNA, 25 bp, Homo sapien
cgagctctgagagcccacggtattt

SEQ ID NO: 4138651 - DNA, 25 bp, Homo sapien
tgagataatgggaacaggagcctag

SEQ ID NO: 4138652 - DNA, 25 bp, Homo sapien
tagagacagcagaatgtcgactgcc

SEQ ID NO: 4138653 - DNA, 25 bp, Homo sapien
ccatcactatgtatggaggctgcga

SEQ ID NO: 4138654 - DNA, 25 bp, Homo sapien
ggacaagtcatcttattgcaccacg

SEQ ID NO: 4138655 - DNA, 25 bp, Homo sapien
tagaagtgggatgcctgttctgcca

SEQ ID NO: 4138656 - DNA, 25 bp, Homo sapien
cacatgaagtatattggcaagggcg

SEQ ID NO: 4138657 - DNA, 25 bp, Homo sapien
gactcaaagtgggaacatgtgcaca

SEQ ID NO: 4138658 - DNA, 25 bp, Homo sapien
gctggaggaggcctaggcggccatg

SEQ ID NO: 4138659 - DNA, 25 bp, Homo sapien
atgactcttaacccttccctggctg

SEQ ID NO: 4138660 - DNA, 25 bp, Homo sapien
taggcggccatgactcttaaccctt

SEQ ID NO: 4138661 - DNA, 25 bp, Homo sapien
ggcctaggcggccatgactcttaac

SEQ ID NO: 4138662 - DNA, 25 bp, Homo sapien
ggaaactagtatccgtgctggcctc

SEQ ID NO: 4138663 - DNA, 25 bp, Homo sapien
tgcgtgcatgcccatataaactgag

SEQ ID NO: 4138664 - DNA, 25 bp, Homo sapien
ccaaatggacccatgtgtgtgcctg

SEQ ID NO: 4138665 - DNA, 25 bp, Homo sapien
gcgtgtgtacgcatgcgtgcatgcc

SEQ ID NO: 4138666 - DNA, 25 bp, Homo sapien
tacgcctctaaagctttcaaaaatg

SEQ ID NO: 4138667 - DNA, 25 bp, Homo sapien
aaatgaaattctatcaataaggtac

SEQ ID NO: 4138668 - DNA, 25 bp, Homo sapien
aaaaatgaaattctatcaataaggt

SEQ ID NO: 4138669 - DNA, 25 bp, Homo sapien
gcctctaaagctttcaaaaatgaaa

SEQ ID NO: 4138670 - DNA, 25 bp, Homo sapien
tggggaagaagccagctcaggtttc

SEQ ID NO: 4138671 - DNA, 25 bp, Homo sapien
ctgcacacacccagtggggaagaag

SEQ ID NO: 4138672 - DNA, 25 bp, Homo sapien
cccagtggggaagaagccagctcag

SEQ ID NO: 4138673 - DNA, 25 bp, Homo sapien
cacacacccagtggggaagaagcca

SEQ ID NO: 4138674 - DNA, 25 bp, Homo sapien
tccggtttgaagtggtaaaggcata

SEQ ID NO: 4138675 - DNA, 25 bp, Homo sapien
gatttgatttgacaccacagccttc

SEQ ID NO: 4138676 - DNA, 25 bp, Homo sapien
tggatttgatttgacaccacagcct

SEQ ID NO: 4138677 - DNA, 25 bp, Homo sapien
ggcataaggcctgcaaatttgtgga

SEQ ID NO: 4138678 - DNA, 25 bp, Homo sapien
cagtggatacaaaggtccgcaaatc

SEQ ID NO: 4138679 - DNA, 25 bp, Homo sapien
gagttgtggcccgaaattcctacca

SEQ ID NO: 4138680 - DNA, 25 bp, Homo sapien
ggtgtgaagaatttccagttgcttg

SEQ ID NO: 4138681 - DNA, 25 bp, Homo sapien
gtccgcaaatctcaaccaagagcag

SEQ ID NO: 4138682 - DNA, 25 bp, Homo sapien
tgggaataccgtccagagtctggaa

SEQ ID NO: 4138683 - DNA, 25 bp, Homo sapien
ggctgtgggcctggatcatgctata

SEQ ID NO: 4138684 - DNA, 25 bp, Homo sapien
tatagggtgttaatccacatggttg

SEQ ID NO: 4138685 - DNA, 25 bp, Homo sapien
agctgactctgggaataccgtccag

SEQ ID NO: 4138686 - DNA, 25 bp, Homo sapien
aaaaagtagatgtctgtaatctccc

SEQ ID NO: 4138687 - DNA, 25 bp, Homo sapien
ttgaaaaagtagatgtctgtaatct

SEQ ID NO: 4138688 - DNA, 25 bp, Homo sapien
ttttgaaaaagtagatgtctgtaat

SEQ ID NO: 4138689 - DNA, 25 bp, Homo sapien
aaagtagatgtctgtaatctcccac

SEQ ID NO: 4138690 - DNA, 25 bp, Homo sapien
cctgtggttgtccttggatgtcacc

SEQ ID NO: 4138691 - DNA, 25 bp, Homo sapien
tggttgtccttggatgtcaccatcc

SEQ ID NO: 4138692 - DNA, 25 bp, Homo sapien
tgtggttgtccttggatgtcaccat

SEQ ID NO: 4138693 - DNA, 25 bp, Homo sapien
ccctgtggttgtccttggatgtcac

SEQ ID NO: 4138694 - DNA, 25 bp, Homo sapien
gatctccttccaactacccgttgtg

SEQ ID NO: 4138695 - DNA, 25 bp, Homo sapien
cctaaagcagtgagttgcatcgatt

SEQ ID NO: 4138696 - DNA, 25 bp, Homo sapien
gttgcatcgattatctgaaccctca

SEQ ID NO: 4138697 - DNA, 25 bp, Homo sapien
gcaggaggtgaggaaccctaaagca

SEQ ID NO: 4138698 - DNA, 25 bp, Homo sapien
tccaggctcctgtggtaaagatact

SEQ ID NO: 4138699 - DNA, 25 bp, Homo sapien
aggtggccaccaagtatccaggctc

SEQ ID NO: 4138700 - DNA, 25 bp, Homo sapien
tccaggtggccaccaagtatccagg

SEQ ID NO: 4138701 - DNA, 25 bp, Homo sapien
taaagatactgatcctggtctgccc

SEQ ID NO: 4138702 - DNA, 25 bp, Homo sapien
tcgtgttcaagataacagtatggga

SEQ ID NO: 4138703 - DNA, 25 bp, Homo sapien
ggaaatacatcaaaccattgaccat

SEQ ID NO: 4138704 - DNA, 25 bp, Homo sapien
cattacttcataacgttcttctgaa

SEQ ID NO: 4138705 - DNA, 25 bp, Homo sapien
tacccaatactcagatctccagaat

SEQ ID NO: 4138706 - DNA, 25 bp, Homo sapien
gcggcgccacgagcgcgggcgcccc

SEQ ID NO: 4138707 - DNA, 25 bp, Homo sapien
gccgcggcgccacgagcgcgggcgc

SEQ ID NO: 4138708 - DNA, 25 bp, Homo sapien
cagagccgcggcgccacgagcgcgg

SEQ ID NO: 4138709 - DNA, 25 bp, Homo sapien
cggcggcagaggggacgactgagcc

SEQ ID NO: 4138710 - DNA, 25 bp, Homo sapien
tgcccgcggccggagagcgcgagcg

SEQ ID NO: 4138711 - DNA, 25 bp, Homo sapien
cgcggccggagagcgcgagcgcggg

SEQ ID NO: 4138712 - DNA, 25 bp, Homo sapien
tgcggccgggccgggagatgcccgc

SEQ ID NO: 4138713 - DNA, 25 bp, Homo sapien
ggccgggccgggagatgcccgcggc

SEQ ID NO: 4138714 - DNA, 25 bp, Homo sapien
catttaggcacaacacaaaggcaaa

SEQ ID NO: 4138715 - DNA, 25 bp, Homo sapien
tcagtttccgcaagataaaacggga

SEQ ID NO: 4138716 - DNA, 25 bp, Homo sapien
ggtcctgtagttgaattctgctccg

SEQ ID NO: 4138717 - DNA, 25 bp, Homo sapien
ccgttactgattatgagaccctgag

SEQ ID NO: 4138718 - DNA, 25 bp, Homo sapien
tatagtaactagttcagcgacatct

SEQ ID NO: 4138719 - DNA, 25 bp, Homo sapien
tcacatacaggccagcataagtagc

SEQ ID NO: 4138720 - DNA, 25 bp, Homo sapien
tgtgggagtttgaaagcgaaatact

SEQ ID NO: 4138721 - DNA, 25 bp, Homo sapien
ttatccttaaccataccactgcaga

SEQ ID NO: 4138722 - DNA, 25 bp, Homo sapien
tatctctacctgcttctaaatatct

SEQ ID NO: 4138723 - DNA, 25 bp, Homo sapien
gagatgcttaaatacagcaagaaac

SEQ ID NO: 4138724 - DNA, 25 bp, Homo sapien
ttgtgcattaaagagttcaaaggga

SEQ ID NO: 4138725 - DNA, 25 bp, Homo sapien
aatcaaattgtgcattaaagagttc

SEQ ID NO: 4138726 - DNA, 25 bp, Homo sapien
tgaagcaaagttactattagtcact

SEQ ID NO: 4138727 - DNA, 25 bp, Homo sapien
tagtcacttccaataacaatgagta

SEQ ID NO: 4138728 - DNA, 25 bp, Homo sapien
gaaagcaattatgggaatctacagc

SEQ ID NO: 4138729 - DNA, 25 bp, Homo sapien
aaagccttcctatacttgtgtataa

SEQ ID NO: 4138730 - DNA, 25 bp, Homo sapien
gaagagtctaggaagtaacccagtc

SEQ ID NO: 4138731 - DNA, 25 bp, Homo sapien
taatggtcctcaccaaaaaggtcat

SEQ ID NO: 4138732 - DNA, 25 bp, Homo sapien
ggataccagcatccctttccaagag

SEQ ID NO: 4138733 - DNA, 25 bp, Homo sapien
gaacccatctggaactaagagactg

SEQ ID NO: 4138734 - DNA, 25 bp, Homo sapien
cctagggccttctacatgtcctgta

SEQ ID NO: 4138735 - DNA, 25 bp, Homo sapien
aaacctactacagggcaaagatctg

SEQ ID NO: 4138736 - DNA, 25 bp, Homo sapien
tgctcagctgaaacctactacaggg

SEQ ID NO: 4138737 - DNA, 25 bp, Homo sapien
acaccagaaaaactactcgtccttg

SEQ ID NO: 4138738 - DNA, 25 bp, Homo sapien
ctgctccagtgatgcgtcttcaaga

SEQ ID NO: 4138739 - DNA, 25 bp, Homo sapien
tgctccagtgatgcgtcttcaagag

SEQ ID NO: 4138740 - DNA, 25 bp, Homo sapien
catatagccccagtctccattatcc

SEQ ID NO: 4138741 - DNA, 25 bp, Homo sapien
caggagttcaagaccagcctgggca

SEQ ID NO: 4138742 - DNA, 25 bp, Homo sapien
ggaggccggggcaggcagattgcct

SEQ ID NO: 4138743 - DNA, 25 bp, Homo sapien
ggccggggcaggcagattgcctgag

SEQ ID NO: 4138744 - DNA, 25 bp, Homo sapien
ccggggcaggcagattgcctgagct

SEQ ID NO: 4138745 - DNA, 25 bp, Homo sapien
tgcgttatgatgacagccactgggt

SEQ ID NO: 4138746 - DNA, 25 bp, Homo sapien
tatccatgggatacaaaggcttagg

SEQ ID NO: 4138747 - DNA, 25 bp, Homo sapien
tccgggctagcctacagaaagtcca

SEQ ID NO: 4138748 - DNA, 25 bp, Homo sapien
tccgggtaacgcgtcaatgtggtga

SEQ ID NO: 4138749 - DNA, 25 bp, Homo sapien
catggaggagtctgccaaagcacaa

SEQ ID NO: 4138750 - DNA, 25 bp, Homo sapien
tggagactctgaacaggcacatgca

SEQ ID NO: 4138751 - DNA, 25 bp, Homo sapien
tgcaccaggcataaagagtaagttt

SEQ ID NO: 4138752 - DNA, 25 bp, Homo sapien
tagccttctagttgagttagggacc

SEQ ID NO: 4138753 - DNA, 25 bp, Homo sapien
agttctggggtgaggaatgtccact

SEQ ID NO: 4138754 - DNA, 25 bp, Homo sapien
gaggaatgtccacttgctgctaaac

SEQ ID NO: 4138755 - DNA, 25 bp, Homo sapien
ctggggtgaggaatgtccacttgct

SEQ ID NO: 4138756 - DNA, 25 bp, Homo sapien
aatgtccacttgctgctaaactcca

SEQ ID NO: 4138757 - DNA, 25 bp, Homo sapien
gctggcaggacccgcatcagagccg

SEQ ID NO: 4138758 - DNA, 25 bp, Homo sapien
ggacccgcatcagagccgcatggct

SEQ ID NO: 4138759 - DNA, 25 bp, Homo sapien
gcatcagagccgcatggctcctgca

SEQ ID NO: 4138760 - DNA, 25 bp, Homo sapien
ggcaggacccgcatcagagccgcat

SEQ ID NO: 4138761 - DNA, 25 bp, Homo sapien
cacagatatccatttgctgggaagc

SEQ ID NO: 4138762 - DNA, 25 bp, Homo sapien
gcccacttgggcattcatcaatata

SEQ ID NO: 4138763 - DNA, 25 bp, Homo sapien
tgcccacttgggcattcatcaatat

SEQ ID NO: 4138764 - DNA, 25 bp, Homo sapien
cctgacccacagatatccatttgct

SEQ ID NO: 4138765 - DNA, 25 bp, Homo sapien
caggtgagggttacactgaagatgc

SEQ ID NO: 4138766 - DNA, 25 bp, Homo sapien
aggtgagggttacactgaagatgca

SEQ ID NO: 4138767 - DNA, 25 bp, Homo sapien
gggtgactgaagtcgtgcttttcct

SEQ ID NO: 4138768 - DNA, 25 bp, Homo sapien
cctgaatgtgactggcgtgctgaga

SEQ ID NO: 4138769 - DNA, 25 bp, Homo sapien
tgtataagtcaagctccaagaggct

SEQ ID NO: 4138770 - DNA, 25 bp, Homo sapien
aatgcagatattgcgcctgtgtgcg

SEQ ID NO: 4138771 - DNA, 25 bp, Homo sapien
tcctggaagcaaacgtgggactgtc

SEQ ID NO: 4138772 - DNA, 25 bp, Homo sapien
cacctttatggactggcccctttga

SEQ ID NO: 4138773 - DNA, 25 bp, Homo sapien
aaggcctttcctgtgtgagacccac

SEQ ID NO: 4138774 - DNA, 25 bp, Homo sapien
tttgagtctgaatccccggcctctg

SEQ ID NO: 4138775 - DNA, 25 bp, Homo sapien
ccctgttcatccatgaaactgcatt

SEQ ID NO: 4138776 - DNA, 25 bp, Homo sapien
actgcatttgggcagagaatggttc

SEQ ID NO: 4138777 - DNA, 25 bp, Homo sapien
gagaatggttctcatccccttccca

SEQ ID NO: 4138778 - DNA, 25 bp, Homo sapien
tcatccatgaaactgcatttgggca

SEQ ID NO: 4138779 - DNA, 25 bp, Homo sapien
cctaacagcagcctgtgatgggtca

SEQ ID NO: 4138780 - DNA, 25 bp, Homo sapien
ttgctcctcctaacagcagcctgtg

SEQ ID NO: 4138781 - DNA, 25 bp, Homo sapien
tcctcctaacagcagcctgtgatgg

SEQ ID NO: 4138782 - DNA, 25 bp, Homo sapien
ctaacagcagcctgtgatgggtcat

SEQ ID NO: 4138783 - DNA, 25 bp, Homo sapien
gaaggtctcagccaggtcaatcaca

SEQ ID NO: 4138784 - DNA, 25 bp, Homo sapien
gtatggggcgaaggtctcagccagg

SEQ ID NO: 4138785 - DNA, 25 bp, Homo sapien
gcgaaggtctcagccaggtcaatca

SEQ ID NO: 4138786 - DNA, 25 bp, Homo sapien
tggggcgaaggtctcagccaggtca

SEQ ID NO: 4138787 - DNA, 25 bp, Homo sapien
gttcagcaccctgagtggcaaaggc

SEQ ID NO: 4138788 - DNA, 25 bp, Homo sapien
taggtgtatacgtggatctcacagg

SEQ ID NO: 4138789 - DNA, 25 bp, Homo sapien
cccacccctcataggtgtatacgtg

SEQ ID NO: 4138790 - DNA, 25 bp, Homo sapien
ccctgagtggcaaaggcgatggttt

SEQ ID NO: 4138791 - DNA, 25 bp, Homo sapien
gaggacatgtctaatgcccacttcc

SEQ ID NO: 4138792 - DNA, 25 bp, Homo sapien
tttctttccagagaggacatgtcta

SEQ ID NO: 4138793 - DNA, 25 bp, Homo sapien
accccagagtcttggatctctcggg

SEQ ID NO: 4138794 - DNA, 25 bp, Homo sapien
tggatctctcgggatgcccagaagc

SEQ ID NO: 4138795 - DNA, 25 bp, Homo sapien
gtggtgggactcaggcactggaatt

SEQ ID NO: 4138796 - DNA, 25 bp, Homo sapien
ctgtggtgggactcaggcactggaa

SEQ ID NO: 4138797 - DNA, 25 bp, Homo sapien
tgtggtgggactcaggcactggaat

SEQ ID NO: 4138798 - DNA, 25 bp, Homo sapien
atgctgagcagtttcccctcccttt

SEQ ID NO: 4138799 - DNA, 25 bp, Homo sapien
ccaatgctgagcagtttcccctccc

SEQ ID NO: 4138800 - DNA, 25 bp, Homo sapien
tgagcagtttcccctccctttacac

SEQ ID NO: 4138801 - DNA, 25 bp, Homo sapien
gctgagcagtttcccctccctttac

SEQ ID NO: 4138802 - DNA, 25 bp, Homo sapien
tggttcatctgagccaccaaagacc

SEQ ID NO: 4138803 - DNA, 25 bp, Homo sapien
gactactgcccagttctccttggct

SEQ ID NO: 4138804 - DNA, 25 bp, Homo sapien
tgacgcccaacatccgaggactact

SEQ ID NO: 4138805 - DNA, 25 bp, Homo sapien
tccttggctgtcaggtgcgtgttcc

SEQ ID NO: 4138806 - DNA, 25 bp, Homo sapien
tgcgtgttcctctgaagtgtaccag

SEQ ID NO: 4138807 - DNA, 25 bp, Homo sapien
ggtttgtatacaagttggactgtga

SEQ ID NO: 4138808 - DNA, 25 bp, Homo sapien
gcagtctgatgggtttgtatacaag

SEQ ID NO: 4138809 - DNA, 25 bp, Homo sapien
gtatacaagttggactgtgagaaga

SEQ ID NO: 4138810 - DNA, 25 bp, Homo sapien
tgatgggtttgtatacaagttggac

SEQ ID NO: 4138811 - DNA, 25 bp, Homo sapien
gcaagatggtgctgtaacaagctca

SEQ ID NO: 4138812 - DNA, 25 bp, Homo sapien
tcggtgtcttcaggttaacaatagt

SEQ ID NO: 4138813 - DNA, 25 bp, Homo sapien
tattgagcccctcagtactgggaca

SEQ ID NO: 4138814 - DNA, 25 bp, Homo sapien
cagcgctgtcaaggttttcggtgtc

SEQ ID NO: 4138815 - DNA, 25 bp, Homo sapien
tgtagcatagtctcttgctgatgga

SEQ ID NO: 4138816 - DNA, 25 bp, Homo sapien
caggtcaatacatagacatgtttat

SEQ ID NO: 4138817 - DNA, 25 bp, Homo sapien
tttattggctgcatctcgtcttggg

SEQ ID NO: 4138818 - DNA, 25 bp, Homo sapien
ggtggttggccgctgatctcacgta

SEQ ID NO: 4138819 - DNA, 25 bp, Homo sapien
tgaaatccctcaactgggtaaattc

SEQ ID NO: 4138820 - DNA, 25 bp, Homo sapien
cacgcttgaaatccctcaactgggt

SEQ ID NO: 4138821 - DNA, 25 bp, Homo sapien
tgttgtaaaggcgactctcattcct

SEQ ID NO: 4138822 - DNA, 25 bp, Homo sapien
ttcaaacttgttgtaaaggcgactc

SEQ ID NO: 4138823 - DNA, 25 bp, Homo sapien
gaggtgaaacgctatctcgtgctgg

SEQ ID NO: 4138824 - DNA, 25 bp, Homo sapien
tggaggtccgtgattacaaagcgtc

SEQ ID NO: 4138825 - DNA, 25 bp, Homo sapien
agcaaagccccggtaagcatttggg

SEQ ID NO: 4138826 - DNA, 25 bp, Homo sapien
tatgaccagtgtccaaataattcgg

SEQ ID NO: 4138827 - DNA, 25 bp, Homo sapien
tgctgctccggtcgggtaagtggga

SEQ ID NO: 4138828 - DNA, 25 bp, Homo sapien
aggcgcttcggctccggactacgct

SEQ ID NO: 4138829 - DNA, 25 bp, Homo sapien
ggactacgctcctgctgtgcgctcg

SEQ ID NO: 4138830 - DNA, 25 bp, Homo sapien
gtaagtgggagcaacgccaccctcg

SEQ ID NO: 4138831 - DNA, 25 bp, Homo sapien
ggcggcgtctcctcgcccgcccctc

SEQ ID NO: 4138832 - DNA, 25 bp, Homo sapien
cggcggcgtctcctcgcccgcccct

SEQ ID NO: 4138833 - DNA, 25 bp, Homo sapien
gcggcgtctcctcgcccgcccctcc

SEQ ID NO: 4138834 - DNA, 25 bp, Homo sapien
ctgccctggcccctgcccccctcct

SEQ ID NO: 4138835 - DNA, 25 bp, Homo sapien
agtgaagcactgaggtggaggctcg

SEQ ID NO: 4138836 - DNA, 25 bp, Homo sapien
agcgttgcgacatccagtggctgtg

SEQ ID NO: 4138837 - DNA, 25 bp, Homo sapien
caacagggtggctttgtgagagtga

SEQ ID NO: 4138838 - DNA, 25 bp, Homo sapien
ctcggggtgagcgttgcgacatcca

SEQ ID NO: 4138839 - DNA, 25 bp, Homo sapien
gaggctggaaagatgccacagtcaa

SEQ ID NO: 4138840 - DNA, 25 bp, Homo sapien
ggaggctggaaagatgccacagtca

SEQ ID NO: 4138841 - DNA, 25 bp, Homo sapien
caggaggctggaaagatgccacagt

SEQ ID NO: 4138842 - DNA, 25 bp, Homo sapien
ggctggaaagatgccacagtcaagt

SEQ ID NO: 4138843 - DNA, 25 bp, Homo sapien
tgggggcaccttacctagctgctaa

SEQ ID NO: 4138844 - DNA, 25 bp, Homo sapien
gaggctcgactgagaaagagttcac

SEQ ID NO: 4138845 - DNA, 25 bp, Homo sapien
ttgccatgggggcaccttacctagc

SEQ ID NO: 4138846 - DNA, 25 bp, Homo sapien
ctgagaaagagttcacttccgtgct

SEQ ID NO: 4138847 - DNA, 25 bp, Homo sapien
tgaccacaaaatcagtggctgaaaa

SEQ ID NO: 4138848 - DNA, 25 bp, Homo sapien
gaccacaaaatcagtggctgaaaac

SEQ ID NO: 4138849 - DNA, 25 bp, Homo sapien
ccacaaaatcagtggctgaaaacca

SEQ ID NO: 4138850 - DNA, 25 bp, Homo sapien
cacaaaatcagtggctgaaaaccac

SEQ ID NO: 4138851 - DNA, 25 bp, Homo sapien
acacaactggtaagtagagcagaaa

SEQ ID NO: 4138852 - DNA, 25 bp, Homo sapien
caagtctgcacccatttgtagatga

SEQ ID NO: 4138853 - DNA, 25 bp, Homo sapien
acacccaagtctttcattcttcaaa

SEQ ID NO: 4138854 - DNA, 25 bp, Homo sapien
ctggtaagtagagcagaaatcacac

SEQ ID NO: 4138855 - DNA, 25 bp, Homo sapien
tgtccaggggaaagagatgcatgca

SEQ ID NO: 4138856 - DNA, 25 bp, Homo sapien
tgggaaccccatccctcagcactgg

SEQ ID NO: 4138857 - DNA, 25 bp, Homo sapien
caggggaaagagatgcatgcaaagc

SEQ ID NO: 4138858 - DNA, 25 bp, Homo sapien
aagtcccctctgagagccaagagtc

SEQ ID NO: 4138859 - DNA, 25 bp, Homo sapien
ttctcaggggcagggccttcgtcat

SEQ ID NO: 4138860 - DNA, 25 bp, Homo sapien
ctgacagcgagcttctcaggggcag

SEQ ID NO: 4138861 - DNA, 25 bp, Homo sapien
cactgacagcgagcttctcaggggc

SEQ ID NO: 4138862 - DNA, 25 bp, Homo sapien
gcttctcaggggcagggccttcgtc

SEQ ID NO: 4138863 - DNA, 25 bp, Homo sapien
gctctcaaccaagttgtcaaggctc

SEQ ID NO: 4138864 - DNA, 25 bp, Homo sapien
tctcaaccaagttgtcaaggctccc

SEQ ID NO: 4138865 - DNA, 25 bp, Homo sapien
tgctctcaaccaagttgtcaaggct

SEQ ID NO: 4138866 - DNA, 25 bp, Homo sapien
ctcaaccaagttgtcaaggctccct

SEQ ID NO: 4138867 - DNA, 25 bp, Homo sapien
tcagggcagagtcacggctggcgat

SEQ ID NO: 4138868 - DNA, 25 bp, Homo sapien
ctggcgatatggagctgccgaccat

SEQ ID NO: 4138869 - DNA, 25 bp, Homo sapien
gactgaagccccattggaggaggta

SEQ ID NO: 4138870 - DNA, 25 bp, Homo sapien
aaggacagcagtagaaactgttccc

SEQ ID NO: 4138871 - DNA, 25 bp, Homo sapien
aagtttcagcggcagtttttccagg

SEQ ID NO: 4138872 - DNA, 25 bp, Homo sapien
tgactgatgctgatccggtccagcc

SEQ ID NO: 4138873 - DNA, 25 bp, Homo sapien
tcaaccctgaaatggctacgggctc

SEQ ID NO: 4138874 - DNA, 25 bp, Homo sapien
gactgacttcccctagtgactgatg

SEQ ID NO: 4138875 - DNA, 25 bp, Homo sapien
ctggcggcacagaaattctttttag

SEQ ID NO: 4138876 - DNA, 25 bp, Homo sapien
cctgaagttctacattcctctggct

SEQ ID NO: 4138877 - DNA, 25 bp, Homo sapien
ttggtggacattcttctcgggcacc

SEQ ID NO: 4138878 - DNA, 25 bp, Homo sapien
caagtccaatgtagctcctgtccag

SEQ ID NO: 4138879 - DNA, 25 bp, Homo sapien
gggcctcaagtccaatgtagctcct

SEQ ID NO: 4138880 - DNA, 25 bp, Homo sapien
gaagaggcctgccattgagacctgc

SEQ ID NO: 4138881 - DNA, 25 bp, Homo sapien
gggtcattctgagttgtatgatgtg

SEQ ID NO: 4138882 - DNA, 25 bp, Homo sapien
tatgatgtggtgcacgttcaggaag

SEQ ID NO: 4138883 - DNA, 25 bp, Homo sapien
aggccctgaaccggccagcgtctgt

SEQ ID NO: 4138884 - DNA, 25 bp, Homo sapien
gaaaaagttagagttgacatttctc

SEQ ID NO: 4138885 - DNA, 25 bp, Homo sapien
tgaaaaagttagagttgacatttct

SEQ ID NO: 4138886 - DNA, 25 bp, Homo sapien
ctgaaaaagttagagttgacatttc

SEQ ID NO: 4138887 - DNA, 25 bp, Homo sapien
caagacactcatcgctttgcattca

SEQ ID NO: 4138888 - DNA, 25 bp, Homo sapien
tcctctgaccctgttgtttaccaag

SEQ ID NO: 4138889 - DNA, 25 bp, Homo sapien
tttaccaagacactcatcgctttgc

SEQ ID NO: 4138890 - DNA, 25 bp, Homo sapien
tgtggccctgaaagagtcctgtcct

SEQ ID NO: 4138891 - DNA, 25 bp, Homo sapien
catggcccatcagacctcctggatc

SEQ ID NO: 4138892 - DNA, 25 bp, Homo sapien
ctcatggcccatcagacctcctgga

SEQ ID NO: 4138893 - DNA, 25 bp, Homo sapien
tcatggcccatcagacctcctggat

SEQ ID NO: 4138894 - DNA, 25 bp, Homo sapien
ctggaaatgtgctctgcggacccct

SEQ ID NO: 4138895 - DNA, 25 bp, Homo sapien
acagcattgcctgagaactgtttct

SEQ ID NO: 4138896 - DNA, 25 bp, Homo sapien
cattgcctgagaactgtttctggaa

SEQ ID NO: 4138897 - DNA, 25 bp, Homo sapien
cttctaagcctgagctctcagctgg

SEQ ID NO: 4138898 - DNA, 25 bp, Homo sapien
gcttcagccggcagtgcccaccagc

SEQ ID NO: 4138899 - DNA, 25 bp, Homo sapien
ctgcagcttcagccggcagtgccca

SEQ ID NO: 4138900 - DNA, 25 bp, Homo sapien
caagaagggcatagaagccgcctgg

SEQ ID NO: 4138901 - DNA, 25 bp, Homo sapien
aagcctgtctgaggcgctccgggct

SEQ ID NO: 4138902 - DNA, 25 bp, Homo sapien
cactggcccctctgtcaggatcaat

SEQ ID NO: 4138903 - DNA, 25 bp, Homo sapien
cgctccgggcttaggagcagctgtg

SEQ ID NO: 4138904 - DNA, 25 bp, Homo sapien
gtgctgggctctggggcctccaccc

SEQ ID NO: 4138905 - DNA, 25 bp, Homo sapien
gctgggctctggggcctccaccccc

SEQ ID NO: 4138906 - DNA, 25 bp, Homo sapien
tgggctctggggcctccacccccat

SEQ ID NO: 4138907 - DNA, 25 bp, Homo sapien
agtgctgggctctggggcctccacc

SEQ ID NO: 4138908 - DNA, 25 bp, Homo sapien
cctcataaatcatctgttcacgtat

SEQ ID NO: 4138909 - DNA, 25 bp, Homo sapien
catctgttcacgtattccaagtaca

SEQ ID NO: 4138910 - DNA, 25 bp, Homo sapien
caagtacatcctctgcgccaggcat

SEQ ID NO: 4138911 - DNA, 25 bp, Homo sapien
tcacgtattccaagtacatcctctg

SEQ ID NO: 4138912 - DNA, 25 bp, Homo sapien
cttcaccagtaggtggcggcacaag

SEQ ID NO: 4138913 - DNA, 25 bp, Homo sapien
aattcttgtcttcaccagtaggtgg

SEQ ID NO: 4138914 - DNA, 25 bp, Homo sapien
gtcttcaccagtaggtggcggcaca

SEQ ID NO: 4138915 - DNA, 25 bp, Homo sapien
attcttgtcttcaccagtaggtggc

SEQ ID NO: 4138916 - DNA, 25 bp, Homo sapien
cacatcagtagactacctggaaaaa

SEQ ID NO: 4138917 - DNA, 25 bp, Homo sapien
gaataaccacttccaaccacatcag

SEQ ID NO: 4138918 - DNA, 25 bp, Homo sapien
cgggagcatgctggcaggcctgaat

SEQ ID NO: 4138919 - DNA, 25 bp, Homo sapien
cctcacggatgaaagcgggagcatg

SEQ ID NO: 4138920 - DNA, 25 bp, Homo sapien
catgggttcagacaggtctgtgaca

SEQ ID NO: 4138921 - DNA, 25 bp, Homo sapien
gtttctaggatttcccatgggcctg

SEQ ID NO: 4138922 - DNA, 25 bp, Homo sapien
tcctcagttcctgcataacatgtgg

SEQ ID NO: 4138923 - DNA, 25 bp, Homo sapien
ggattgaactgctccagactcagca

SEQ ID NO: 4138924 - DNA, 25 bp, Homo sapien
tttcgtcagggactgctgacggctg

SEQ ID NO: 4138925 - DNA, 25 bp, Homo sapien
tggggtgctttcgtcagggactgct

SEQ ID NO: 4138926 - DNA, 25 bp, Homo sapien
gagaatggggtgctttcgtcaggga

SEQ ID NO: 4138927 - DNA, 25 bp, Homo sapien
ctgtggagagaatggggtgctttcg

SEQ ID NO: 4138928 - DNA, 25 bp, Homo sapien
tgcaggtccttgcacgctgtgtcgc

SEQ ID NO: 4138929 - DNA, 25 bp, Homo sapien
tcctcggaaacagaaccctcccaca

SEQ ID NO: 4138930 - DNA, 25 bp, Homo sapien
tctcctcctcggaaacagaaccctc

SEQ ID NO: 4138931 - DNA, 25 bp, Homo sapien
ttaggagtcagagcccggcaggggc

SEQ ID NO: 4138932 - DNA, 25 bp, Homo sapien
tcttaaagaacagcccagacacaaa

SEQ ID NO: 4138933 - DNA, 25 bp, Homo sapien
tctctctagttcttaaagaacagcc

SEQ ID NO: 4138934 - DNA, 25 bp, Homo sapien
ccgaagccattttagggtggctgtg

SEQ ID NO: 4138935 - DNA, 25 bp, Homo sapien
tgcatgcccccgaagccattttagg

SEQ ID NO: 4138936 - DNA, 25 bp, Homo sapien
tcttctctgacttggggagttccta

SEQ ID NO: 4138937 - DNA, 25 bp, Homo sapien
tgacttggggagttcctacgcaaaa

SEQ ID NO: 4138938 - DNA, 25 bp, Homo sapien
ttcctacgcaaaacaactgggcttc

SEQ ID NO: 4138939 - DNA, 25 bp, Homo sapien
acaactgggcttccgggacagctgg

SEQ ID NO: 4138940 - DNA, 25 bp, Homo sapien
gttatgcacctagtgaaattcctta

SEQ ID NO: 4138941 - DNA, 25 bp, Homo sapien
atgttatgcacctagtgaaattcct

SEQ ID NO: 4138942 - DNA, 25 bp, Homo sapien
cctcctacgacgatccagggaccaa

SEQ ID NO: 4138943 - DNA, 25 bp, Homo sapien
ggcctcctacgacgatccagggacc

SEQ ID NO: 4138944 - DNA, 25 bp, Homo sapien
gctgggacagaaggcatttgacatg

SEQ ID NO: 4138945 - DNA, 25 bp, Homo sapien
ccaccgcacatccagagacaagggt

SEQ ID NO: 4138946 - DNA, 25 bp, Homo sapien
catatcagccagtcgctgtagctgg

SEQ ID NO: 4138947 - DNA, 25 bp, Homo sapien
aaccacctggcctgttcgtggagaa

SEQ ID NO: 4138948 - DNA, 25 bp, Homo sapien
gacgtaggatgctctgcttgtccac

SEQ ID NO: 4138949 - DNA, 25 bp, Homo sapien
ggaaacagccatttggcagtttgct

SEQ ID NO: 4138950 - DNA, 25 bp, Homo sapien
tccaggaaacagccatttggcagtt

SEQ ID NO: 4138951 - DNA, 25 bp, Homo sapien
gagtagtatcaaggagaaagttaaa

SEQ ID NO: 4138952 - DNA, 25 bp, Homo sapien
agagtagtatcaaggagaaagttaa

SEQ ID NO: 4138953 - DNA, 25 bp, Homo sapien
ggcctcttgatgtcttaggacactc

SEQ ID NO: 4138954 - DNA, 25 bp, Homo sapien
gctccataagtacaaaaggacttgg

SEQ ID NO: 4138955 - DNA, 25 bp, Homo sapien
tctaagcctgggatgtttgttttgg

SEQ ID NO: 4138956 - DNA, 25 bp, Homo sapien
gatgtcttaggacactcagcacctg

SEQ ID NO: 4138957 - DNA, 25 bp, Homo sapien
agcagtcagcagtgagatggtacgt

SEQ ID NO: 4138958 - DNA, 25 bp, Homo sapien
ggtacgtttttcattgcggctgcca

SEQ ID NO: 4138959 - DNA, 25 bp, Homo sapien
gttaaacctaggcaacagctccctg

SEQ ID NO: 4138960 - DNA, 25 bp, Homo sapien
tagacaattgtcgttaaacctaggc

SEQ ID NO: 4138961 - DNA, 25 bp, Homo sapien
ttgctcccaccattcacggcaaagg

SEQ ID NO: 4138962 - DNA, 25 bp, Homo sapien
aaagccatgggactgtcacctttgg

SEQ ID NO: 4138963 - DNA, 25 bp, Homo sapien
gctccaatgtgacctaaagccatgg

SEQ ID NO: 4138964 - DNA, 25 bp, Homo sapien
agcatgttcaggcaacgggtcatcc

SEQ ID NO: 4138965 - DNA, 25 bp, Homo sapien
tcagatgaggaacggggcctccaac

SEQ ID NO: 4138966 - DNA, 25 bp, Homo sapien
ccatccaggcccactgtcagatgag

SEQ ID NO: 4138967 - DNA, 25 bp, Homo sapien
gtcagatgaggaacggggcctccaa

SEQ ID NO: 4138968 - DNA, 25 bp, Homo sapien
tccaggcccactgtcagatgaggaa

SEQ ID NO: 4138969 - DNA, 25 bp, Homo sapien
gcctcgaaattgaattactgcctga

SEQ ID NO: 4138970 - DNA, 25 bp, Homo sapien
agaaaagcctcgaaattgaattact

SEQ ID NO: 4138971 - DNA, 25 bp, Homo sapien
cgtatttcaataggagaaaagcctc

SEQ ID NO: 4138972 - DNA, 25 bp, Homo sapien
tatttcaataggagaaaagcctcga

SEQ ID NO: 4138973 - DNA, 25 bp, Homo sapien
acgacagcgcttcaccatccacagg

SEQ ID NO: 4138974 - DNA, 25 bp, Homo sapien
ggaaatgaacagtaaccactcaaaa

SEQ ID NO: 4138975 - DNA, 25 bp, Homo sapien
cttacgacagcgcttcaccatccac

SEQ ID NO: 4138976 - DNA, 25 bp, Homo sapien
caggaaatgaacagtaaccactcaa

SEQ ID NO: 4138977 - DNA, 25 bp, Homo sapien
tcaatttgtttgaaaaaccttgctc

SEQ ID NO: 4138978 - DNA, 25 bp, Homo sapien
atttgtttgaaaaaccttgctccat

SEQ ID NO: 4138979 - DNA, 25 bp, Homo sapien
atcctgcaaacaggaatctttgcta

SEQ ID NO: 4138980 - DNA, 25 bp, Homo sapien
gaatctttgctagcagagcggcatg

SEQ ID NO: 4138981 - DNA, 25 bp, Homo sapien
catgaatgttgcttcaacacagtgt

SEQ ID NO: 4138982 - DNA, 25 bp, Homo sapien
gcagagcggcatgaatgttgcttca

SEQ ID NO: 4138983 - DNA, 25 bp, Homo sapien
ttttcctaactctaagagtcctctg

SEQ ID NO: 4138984 - DNA, 25 bp, Homo sapien
cattcacaggacagtatccaaccaa

SEQ ID NO: 4138985 - DNA, 25 bp, Homo sapien
aaggtagaaaatggcttcctccttg

SEQ ID NO: 4138986 - DNA, 25 bp, Homo sapien
tcccttgggctaggcctttctgcca

SEQ ID NO: 4138987 - DNA, 25 bp, Homo sapien
cttaggcagattggcagtgcccgca

SEQ ID NO: 4138988 - DNA, 25 bp, Homo sapien
gaattggctctcaggtggatctgcc

SEQ ID NO: 4138989 - DNA, 25 bp, Homo sapien
tccagaatgaagaggtgccttaggc

SEQ ID NO: 4138990 - DNA, 25 bp, Homo sapien
taattctgatataccaggtgcccca

SEQ ID NO: 4138991 - DNA, 25 bp, Homo sapien
taataatagcagaacctctgctccc

SEQ ID NO: 4138992 - DNA, 25 bp, Homo sapien
ctttctgggactcccctggcaatgc

SEQ ID NO: 4138993 - DNA, 25 bp, Homo sapien
tccatcaaagtgttgctcagctctt

SEQ ID NO: 4138994 - DNA, 25 bp, Homo sapien
tggcaatgctccactaatctgtttg

SEQ ID NO: 4138995 - DNA, 25 bp, Homo sapien
gggacttcgaagaatactgctacat

SEQ ID NO: 4138996 - DNA, 25 bp, Homo sapien
caaacttgaagtgataattcttgaa

SEQ ID NO: 4138997 - DNA, 25 bp, Homo sapien
tcttgaaggcaattattgggacttc

SEQ ID NO: 4138998 - DNA, 25 bp, Homo sapien
cttgaagtgataattcttgaaggca

SEQ ID NO: 4138999 - DNA, 25 bp, Homo sapien
accaggatagtatgggctgtggcca

SEQ ID NO: 4139000 - DNA, 25 bp, Homo sapien
aggacaccaggatagtatgggctgt

SEQ ID NO: 4139001 - DNA, 25 bp, Homo sapien
caaggacaccaggatagtatgggct

SEQ ID NO: 4139002 - DNA, 25 bp, Homo sapien
acaccaggatagtatgggctgtggc

SEQ ID NO: 4139003 - DNA, 25 bp, Homo sapien
gaaattcaggagtgctctaactgag

SEQ ID NO: 4139004 - DNA, 25 bp, Homo sapien
aaagtacaagttttctgtgcacaaa

SEQ ID NO: 4139005 - DNA, 25 bp, Homo sapien
gaattcgttaatgttgttggataaa

SEQ ID NO: 4139006 - DNA, 25 bp, Homo sapien
tgttttactgtatacaagacacaaa

SEQ ID NO: 4139007 - DNA, 25 bp, Homo sapien
tattcctgtggcatttctactgagc

SEQ ID NO: 4139008 - DNA, 25 bp, Homo sapien
cccattagagtgagaagcagttttt

SEQ ID NO: 4139009 - DNA, 25 bp, Homo sapien
tgattcatcctggaccactcgaggt

SEQ ID NO: 4139010 - DNA, 25 bp, Homo sapien
tcgtgccacgttgggtgttataaac

SEQ ID NO: 4139011 - DNA, 25 bp, Homo sapien
ctttaggcgcaaactgtgtttaata

SEQ ID NO: 4139012 - DNA, 25 bp, Homo sapien
ttaataagaataatgtagtcacaga

SEQ ID NO: 4139013 - DNA, 25 bp, Homo sapien
agttcaccagtttgtttgttccagg

SEQ ID NO: 4139014 - DNA, 25 bp, Homo sapien
cccaaccatgcagaaatgttaactc

SEQ ID NO: 4139015 - DNA, 25 bp, Homo sapien
gttaactcccaatgtcaattcaaaa

SEQ ID NO: 4139016 - DNA, 25 bp, Homo sapien
agctactcagtccacctgccagagc

SEQ ID NO: 4139017 - DNA, 25 bp, Homo sapien
cctccagactgaccacggtggtatc

SEQ ID NO: 4139018 - DNA, 25 bp, Homo sapien
ttgtcacgatgcaacctgatgggca

SEQ ID NO: 4139019 - DNA, 25 bp, Homo sapien
caatctggcctgtcgttgtaacccg

SEQ ID NO: 4139020 - DNA, 25 bp, Homo sapien
gcagattgtgttagggcctgaatcc

SEQ ID NO: 4139021 - DNA, 25 bp, Homo sapien
cttcatttcgctccctcaccccaaa

SEQ ID NO: 4139022 - DNA, 25 bp, Homo sapien
atggcaggattatcttatctccggt

SEQ ID NO: 4139023 - DNA, 25 bp, Homo sapien
tttagccttcatttcgctccctcac

SEQ ID NO: 4139024 - DNA, 25 bp, Homo sapien
tcaccccaaaatctctagcagcttg

SEQ ID NO: 4139025 - DNA, 25 bp, Homo sapien
tatggtcttgattaaccttgcaaca

SEQ ID NO: 4139026 - DNA, 25 bp, Homo sapien
gattaaccttgcaacattatcgcca

SEQ ID NO: 4139027 - DNA, 25 bp, Homo sapien
caacattatcgccattttcataggt

SEQ ID NO: 4139028 - DNA, 25 bp, Homo sapien
agacaagttatttatggtcttgatt

SEQ ID NO: 4139029 - DNA, 25 bp, Homo sapien
tgccgcaataaacatgtgtgcacgt

SEQ ID NO: 4139030 - DNA, 25 bp, Homo sapien
taaacatgtgtgcacgtgtctttat

SEQ ID NO: 4139031 - DNA, 25 bp, Homo sapien
cgcaataaacatgtgtgcacgtgtc

SEQ ID NO: 4139032 - DNA, 25 bp, Homo sapien
aaacatgtgtgcacgtgtctttata

SEQ ID NO: 4139033 - DNA, 25 bp, Homo sapien
acagcatcctctccgtctgtctttg

SEQ ID NO: 4139034 - DNA, 25 bp, Homo sapien
aattgccagcagtctttcggattcc

SEQ ID NO: 4139035 - DNA, 25 bp, Homo sapien
cggattcctttgtttgtaggtgtat

SEQ ID NO: 4139036 - DNA, 25 bp, Homo sapien
tgcttccattgtcgcacagcatcct

SEQ ID NO: 4139037 - DNA, 25 bp, Homo sapien
gttacctgccttgagacgatttcca

SEQ ID NO: 4139038 - DNA, 25 bp, Homo sapien
tagatccttatggtggacctccaag

SEQ ID NO: 4139039 - DNA, 25 bp, Homo sapien
tgggagtacctctagagcttaattg

SEQ ID NO: 4139040 - DNA, 25 bp, Homo sapien
taatagcgctatatataccattgca

SEQ ID NO: 4139041 - DNA, 25 bp, Homo sapien
ttaccagagaataggccatgtccag

SEQ ID NO: 4139042 - DNA, 25 bp, Homo sapien
caaacacggaaggtgtgaggctgct

SEQ ID NO: 4139043 - DNA, 25 bp, Homo sapien
gccagtggtatgtaaaccctcagta

SEQ ID NO: 4139044 - DNA, 25 bp, Homo sapien
ttcattctagggaggaaccacctca

SEQ ID NO: 4139045 - DNA, 25 bp, Homo sapien
cacatttaaataccaggactgctga

SEQ ID NO: 4139046 - DNA, 25 bp, Homo sapien
acatttaaataccaggactgctgat

SEQ ID NO: 4139047 - DNA, 25 bp, Homo sapien
catttaaataccaggactgctgatc

SEQ ID NO: 4139048 - DNA, 25 bp, Homo sapien
tttaaataccaggactgctgatctg

SEQ ID NO: 4139049 - DNA, 25 bp, Homo sapien
tctaactcactgcttgcagtcagtc

SEQ ID NO: 4139050 - DNA, 25 bp, Homo sapien
tgatctggtcagtgaacaagaaatt

SEQ ID NO: 4139051 - DNA, 25 bp, Homo sapien
ctctaggcagcagctgagctaaacc

SEQ ID NO: 4139052 - DNA, 25 bp, Homo sapien
caaggccatccatcactctaggcag

SEQ ID NO: 4139053 - DNA, 25 bp, Homo sapien
gggcatggaagccagtactagttcc

SEQ ID NO: 4139054 - DNA, 25 bp, Homo sapien
tctagtccaccaggcaatttcaaaa

SEQ ID NO: 4139055 - DNA, 25 bp, Homo sapien
atttctagtccaccaggcaatttca

SEQ ID NO: 4139056 - DNA, 25 bp, Homo sapien
gtactagttccccttaagcactctc

SEQ ID NO: 4139057 - DNA, 25 bp, Homo sapien
taaaatggatcacactctagcccct

SEQ ID NO: 4139058 - DNA, 25 bp, Homo sapien
tcctcagctcggtgatggaaccatg

SEQ ID NO: 4139059 - DNA, 25 bp, Homo sapien
tgaattaaagcacagcgggagcttc

SEQ ID NO: 4139060 - DNA, 25 bp, Homo sapien
gtttgggtatctcccctggccagtg

SEQ ID NO: 4139061 - DNA, 25 bp, Homo sapien
gccaaaaatcaacatgaggagacag

SEQ ID NO: 4139062 - DNA, 25 bp, Homo sapien
gagacagataaccttggtacctggc

SEQ ID NO: 4139063 - DNA, 25 bp, Homo sapien
acacagcagcatgcctgttgactgc

SEQ ID NO: 4139064 - DNA, 25 bp, Homo sapien
gaggagacagataaccttggtacct

SEQ ID NO: 4139065 - DNA, 25 bp, Homo sapien
tacctgatgcactaataaaacaacc

SEQ ID NO: 4139066 - DNA, 25 bp, Homo sapien
gtctaggtgaatagagcaacaaagt

SEQ ID NO: 4139067 - DNA, 25 bp, Homo sapien
cttagccgattaggtctaggtgaat

SEQ ID NO: 4139068 - DNA, 25 bp, Homo sapien
gagcaacaaagtagctgcatgtacc

SEQ ID NO: 4139069 - DNA, 25 bp, Homo sapien
tccagaatgtgcaccactaagaggg

SEQ ID NO: 4139070 - DNA, 25 bp, Homo sapien
taagttgtcaatactggcgagttcc

SEQ ID NO: 4139071 - DNA, 25 bp, Homo sapien
tagggatacttacattggcagagcc

SEQ ID NO: 4139072 - DNA, 25 bp, Homo sapien
tagaagaggcataccaggaggagaa

SEQ ID NO: 4139073 - DNA, 25 bp, Homo sapien
acttaagtggttcaagcccccatca

SEQ ID NO: 4139074 - DNA, 25 bp, Homo sapien
ttagccttgaggatagaaatggagg

SEQ ID NO: 4139075 - DNA, 25 bp, Homo sapien
gggtcccctctctaaatgtaatctg

SEQ ID NO: 4139076 - DNA, 25 bp, Homo sapien
cacaggtattaccagcccaatggcc

SEQ ID NO: 4139077 - DNA, 25 bp, Homo sapien
agggaagtgatcaggcctgaagcat

SEQ ID NO: 4139078 - DNA, 25 bp, Homo sapien
cagaagttcacaagtcgtacccaaa

SEQ ID NO: 4139079 - DNA, 25 bp, Homo sapien
gaagcatgtgtaccctcttttgcca

SEQ ID NO: 4139080 - DNA, 25 bp, Homo sapien
tcttacacagaagttcaaacacaga

SEQ ID NO: 4139081 - DNA, 25 bp, Homo sapien
atctggggagcaaacagcatgtact

SEQ ID NO: 4139082 - DNA, 25 bp, Homo sapien
aaacagcatgtactccttgatgaga

SEQ ID NO: 4139083 - DNA, 25 bp, Homo sapien
ggccaaccgaccagctgtgaaaaaa

SEQ ID NO: 4139084 - DNA, 25 bp, Homo sapien
tgatgagaaactctggccaaccgac

SEQ ID NO: 4139085 - DNA, 25 bp, Homo sapien
taatggaccaatatcacacactttc

SEQ ID NO: 4139086 - DNA, 25 bp, Homo sapien
cagcagggcttattttacgatgggt

SEQ ID NO: 4139087 - DNA, 25 bp, Homo sapien
tacgatgggttattatgctaataga

SEQ ID NO: 4139088 - DNA, 25 bp, Homo sapien
aaaatagtatacaagaacgcggctt

SEQ ID NO: 4139089 - DNA, 25 bp, Homo sapien
gtgtacagcccatgcaacctccatt

SEQ ID NO: 4139090 - DNA, 25 bp, Homo sapien
tcatggttcggccagtgtgtacagc

SEQ ID NO: 4139091 - DNA, 25 bp, Homo sapien
tcctgcagtaatgacaaagcctcgg

SEQ ID NO: 4139092 - DNA, 25 bp, Homo sapien
gaaattcttgacttgtggtaaacca

SEQ ID NO: 4139093 - DNA, 25 bp, Homo sapien
gattccagtcgtgtcgtaagacccc

SEQ ID NO: 4139094 - DNA, 25 bp, Homo sapien
gccgggaaagtaatgtaccagtcta

SEQ ID NO: 4139095 - DNA, 25 bp, Homo sapien
gcatgatccaagagcataggcagta

SEQ ID NO: 4139096 - DNA, 25 bp, Homo sapien
gagaaatacgaagtccattccatga

SEQ ID NO: 4139097 - DNA, 25 bp, Homo sapien
gagaagagaggggattcaggcagca

SEQ ID NO: 4139098 - DNA, 25 bp, Homo sapien
ctgagaagagaggggattcaggcag

SEQ ID NO: 4139099 - DNA, 25 bp, Homo sapien
agaagagaggggattcaggcagcat

SEQ ID NO: 4139100 - DNA, 25 bp, Homo sapien
tgagaagagaggggattcaggcagc

SEQ ID NO: 4139101 - DNA, 25 bp, Homo sapien
agcttcatgaatccctgtccaggcc

SEQ ID NO: 4139102 - DNA, 25 bp, Homo sapien
ctactccagcttcatgaatccctgt

SEQ ID NO: 4139103 - DNA, 25 bp, Homo sapien
tccagcttcatgaatccctgtccag

SEQ ID NO: 4139104 - DNA, 25 bp, Homo sapien
cttcatgaatccctgtccaggccag

SEQ ID NO: 4139105 - DNA, 25 bp, Homo sapien
tcgaatgtcttcgaaatcacactgg

SEQ ID NO: 4139106 - DNA, 25 bp, Homo sapien
aaagtcgaatgtcttcgaaatcaca

SEQ ID NO: 4139107 - DNA, 25 bp, Homo sapien
tgtcttcgaaatcacactggtaatt

SEQ ID NO: 4139108 - DNA, 25 bp, Homo sapien
ttaaagtcgaatgtcttcgaaatca

SEQ ID NO: 4139109 - DNA, 25 bp, Homo sapien
tcactgttcaggttaaattcttcag

SEQ ID NO: 4139110 - DNA, 25 bp, Homo sapien
actgttgcagattttaacacttcac

SEQ ID NO: 4139111 - DNA, 25 bp, Homo sapien
ttttaacacttcactgttcaggtta

SEQ ID NO: 4139112 - DNA, 25 bp, Homo sapien
cacttcactgttcaggttaaattct

SEQ ID NO: 4139113 - DNA, 25 bp, Homo sapien
tggctacagatctaaacttctgcag

SEQ ID NO: 4139114 - DNA, 25 bp, Homo sapien
tcctgctggctacagatctaaactt

SEQ ID NO: 4139115 - DNA, 25 bp, Homo sapien
tgctggctacagatctaaacttctg

SEQ ID NO: 4139116 - DNA, 25 bp, Homo sapien
ctacagatctaaacttctgcagggt

SEQ ID NO: 4139117 - DNA, 25 bp, Homo sapien
tccaagaaaaggtcatcaccagtag

SEQ ID NO: 4139118 - DNA, 25 bp, Homo sapien
ggtcctagaaggaggagctatgaaa

SEQ ID NO: 4139119 - DNA, 25 bp, Homo sapien
aacctaccagcctagaattttctat

SEQ ID NO: 4139120 - DNA, 25 bp, Homo sapien
tcaccagtagacttacagtagtttt

SEQ ID NO: 4139121 - DNA, 25 bp, Homo sapien
ggaacaacaggccaactgtggactc

SEQ ID NO: 4139122 - DNA, 25 bp, Homo sapien
ggggaataaatagagtcagggaaca

SEQ ID NO: 4139123 - DNA, 25 bp, Homo sapien
tcagggaacaacaggccaactgtgg

SEQ ID NO: 4139124 - DNA, 25 bp, Homo sapien
aacaacaggccaactgtggactcag

SEQ ID NO: 4139125 - DNA, 25 bp, Homo sapien
tgactcgtcaagcttggctcctgtg

SEQ ID NO: 4139126 - DNA, 25 bp, Homo sapien
tggaaactctggcaacacacgctta

SEQ ID NO: 4139127 - DNA, 25 bp, Homo sapien
cttgacacgcgatagcagctctgct

SEQ ID NO: 4139128 - DNA, 25 bp, Homo sapien
gaagatcttttcgagccactgatgc

SEQ ID NO: 4139129 - DNA, 25 bp, Homo sapien
acgtacctcagacccatacaaagac

SEQ ID NO: 4139130 - DNA, 25 bp, Homo sapien
gtctttgtatgggtctgaggtacgt

SEQ ID NO: 4139131 - DNA, 25 bp, Homo sapien
gtgtccatccttgtagggacccacc

SEQ ID NO: 4139132 - DNA, 25 bp, Homo sapien
cagtgtccatccttgtagggaccca

SEQ ID NO: 4139133 - DNA, 25 bp, Homo sapien
cctcacaccattgactgtatgggtc

SEQ ID NO: 4139134 - DNA, 25 bp, Homo sapien
cattgactgtatgggtctgctgttt

SEQ ID NO: 4139135 - DNA, 25 bp, Homo sapien
gctatagaacctctcattcacattc

SEQ ID NO: 4139136 - DNA, 25 bp, Homo sapien
ttgtgggttggcagtcattctctct

SEQ ID NO: 4139137 - DNA, 25 bp, Homo sapien
tcagctatagaacctctcattcaca

SEQ ID NO: 4139138 - DNA, 25 bp, Homo sapien
tcctccaccctaataccacttccac

SEQ ID NO: 4139139 - DNA, 25 bp, Homo sapien
tagctgctacacaataaggcctttc

SEQ ID NO: 4139140 - DNA, 25 bp, Homo sapien
tgccagagggtagtctaggagcctt

SEQ ID NO: 4139141 - DNA, 25 bp, Homo sapien
gagcctggctccatacgtgtctatt

SEQ ID NO: 4139142 - DNA, 25 bp, Homo sapien
tgtcctcaggaattaaccaccatga

SEQ ID NO: 4139143 - DNA, 25 bp, Homo sapien
tttacaccgtggacaacaagaagtc

SEQ ID NO: 4139144 - DNA, 25 bp, Homo sapien
ggttcatcccagaagacttgtaggc

SEQ ID NO: 4139145 - DNA, 25 bp, Homo sapien
gccaaggacttgaaccacacagacg

SEQ ID NO: 4139146 - DNA, 25 bp, Homo sapien
taactctggaggcagttctggaacc

SEQ ID NO: 4139147 - DNA, 25 bp, Homo sapien
gcggtaattggagacgcccttgaaa

SEQ ID NO: 4139148 - DNA, 25 bp, Homo sapien
agctcagtgtcttgtcttcactctc

SEQ ID NO: 4139149 - DNA, 25 bp, Homo sapien
tgtcttccctatttgagcttttctc

SEQ ID NO: 4139150 - DNA, 25 bp, Homo sapien
cttttctcagagttaatgagcggta

SEQ ID NO: 4139151 - DNA, 25 bp, Homo sapien
tggttccacgagagttttaactatc

SEQ ID NO: 4139152 - DNA, 25 bp, Homo sapien
tcaagttctggttccacgagagttt

SEQ ID NO: 4139153 - DNA, 25 bp, Homo sapien
tctggttccacgagagttttaacta

SEQ ID NO: 4139154 - DNA, 25 bp, Homo sapien
gttccacgagagttttaactatcat

SEQ ID NO: 4139155 - DNA, 25 bp, Homo sapien
ttctggggtggacttgtcctcaggc

SEQ ID NO: 4139156 - DNA, 25 bp, Homo sapien
tagagcgtacatatgagtttctggg

SEQ ID NO: 4139157 - DNA, 25 bp, Homo sapien
tcaagaacagaatcttagtagagcg

SEQ ID NO: 4139158 - DNA, 25 bp, Homo sapien
tgtttgctcggaaccccttccagct

SEQ ID NO: 4139159 - DNA, 25 bp, Homo sapien
gtttccattggaagtgcttcccaga

SEQ ID NO: 4139160 - DNA, 25 bp, Homo sapien
aagtgcttcccagattccgtgtaac

SEQ ID NO: 4139161 - DNA, 25 bp, Homo sapien
gcttcccagattccgtgtaacataa

SEQ ID NO: 4139162 - DNA, 25 bp, Homo sapien
agtgcttcccagattccgtgtaaca

SEQ ID NO: 4139163 - DNA, 25 bp, Homo sapien
tacgtgaacaaaaagaagattctca

SEQ ID NO: 4139164 - DNA, 25 bp, Homo sapien
ccagactggctcctgtcccaaacat

SEQ ID NO: 4139165 - DNA, 25 bp, Homo sapien
tctcatttctaatacccagactggc

SEQ ID NO: 4139166 - DNA, 25 bp, Homo sapien
ctctttacgtgaacaaaaagaagat

SEQ ID NO: 4139167 - DNA, 25 bp, Homo sapien
ctgggttctgcatgttcacaggaag

SEQ ID NO: 4139168 - DNA, 25 bp, Homo sapien
gaagggcatattgcactcacccagc

SEQ ID NO: 4139169 - DNA, 25 bp, Homo sapien
gttctgcatgttcacaggaagggca

SEQ ID NO: 4139170 - DNA, 25 bp, Homo sapien
tccagtgctacaagttgttcgctgg

SEQ ID NO: 4139171 - DNA, 25 bp, Homo sapien
aaagtaaagactccattagaagtgt

SEQ ID NO: 4139172 - DNA, 25 bp, Homo sapien
attagaagtgttgtcacccaatccg

SEQ ID NO: 4139173 - DNA, 25 bp, Homo sapien
agactccattagaagtgttgtcacc

SEQ ID NO: 4139174 - DNA, 25 bp, Homo sapien
acccaatccgattctctctcccctt

SEQ ID NO: 4139175 - DNA, 25 bp, Homo sapien
catagtaactaaaacgattgcattg

SEQ ID NO: 4139176 - DNA, 25 bp, Homo sapien
gtcatagtaactaaaacgattgcat

SEQ ID NO: 4139177 - DNA, 25 bp, Homo sapien
agtcatagtaactaaaacgattgca

SEQ ID NO: 4139178 - DNA, 25 bp, Homo sapien
tagtaactaaaacgattgcattgac

SEQ ID NO: 4139179 - DNA, 25 bp, Homo sapien
gcagcttgacagctagacctgccat

SEQ ID NO: 4139180 - DNA, 25 bp, Homo sapien
agcagcttgacagctagacctgcca

SEQ ID NO: 4139181 - DNA, 25 bp, Homo sapien
acagggagatctacacaaaggccat

SEQ ID NO: 4139182 - DNA, 25 bp, Homo sapien
cacaaaggccattgttcagtgccaa

SEQ ID NO: 4139183 - DNA, 25 bp, Homo sapien
caatgtgagctatggcctgctgcac

SEQ ID NO: 4139184 - DNA, 25 bp, Homo sapien
tgttcagtgccaatgtgagctatgg

SEQ ID NO: 4139185 - DNA, 25 bp, Homo sapien
gtcgccatgccacaatagctcctct

SEQ ID NO: 4139186 - DNA, 25 bp, Homo sapien
tttcttactgccagaaccacaactt

SEQ ID NO: 4139187 - DNA, 25 bp, Homo sapien
tctgttgaaccaggccatatgcaat

SEQ ID NO: 4139188 - DNA, 25 bp, Homo sapien
ttaagactttagacaggcaggcagc

SEQ ID NO: 4139189 - DNA, 25 bp, Homo sapien
cacagagcctcttagattcagggaa

SEQ ID NO: 4139190 - DNA, 25 bp, Homo sapien
ttataacaacggagtcaacagagtg

SEQ ID NO: 4139191 - DNA, 25 bp, Homo sapien
gacttggacatgaatagctgcctga

SEQ ID NO: 4139192 - DNA, 25 bp, Homo sapien
tgcccactataaggaaaggtctctc

SEQ ID NO: 4139193 - DNA, 25 bp, Homo sapien
cgactatatgtagaaatatctggaa

SEQ ID NO: 4139194 - DNA, 25 bp, Homo sapien
aaagacagtatcgactatatgtaga

SEQ ID NO: 4139195 - DNA, 25 bp, Homo sapien
actatatgtagaaatatctggaatg

SEQ ID NO: 4139196 - DNA, 25 bp, Homo sapien
gaaagacagtatcgactatatgtag

SEQ ID NO: 4139197 - DNA, 25 bp, Homo sapien
tgtttggcccttttatgatgttagc

SEQ ID NO: 4139198 - DNA, 25 bp, Homo sapien
ttagcagagctgatgtctcctttct

SEQ ID NO: 4139199 - DNA, 25 bp, Homo sapien
tatccccatgttcagtgtttggccc

SEQ ID NO: 4139200 - DNA, 25 bp, Homo sapien
tcaaatatccccatgttcagtgttt

SEQ ID NO: 4139201 - DNA, 25 bp, Homo sapien
tggctgatttcagggccaaggctgc

SEQ ID NO: 4139202 - DNA, 25 bp, Homo sapien
gttgttggcttcacttgatcctcct

SEQ ID NO: 4139203 - DNA, 25 bp, Homo sapien
actccaagttgttggcttcacttga

SEQ ID NO: 4139204 - DNA, 25 bp, Homo sapien
cttggctgatttcagggccaaggct

SEQ ID NO: 4139205 - DNA, 25 bp, Homo sapien
agatgtcacacttgcggctctgatc

SEQ ID NO: 4139206 - DNA, 25 bp, Homo sapien
ttgtgtgtcagtgaatttgagtccc

SEQ ID NO: 4139207 - DNA, 25 bp, Homo sapien
tgcggctctgatcagtcctgtgcca

SEQ ID NO: 4139208 - DNA, 25 bp, Homo sapien
accaccacaccgcaggactcagctt

SEQ ID NO: 4139209 - DNA, 25 bp, Homo sapien
ctgcccggtggtttgagatccaagg

SEQ ID NO: 4139210 - DNA, 25 bp, Homo sapien
gaatccgtctgccatgctcctgcat

SEQ ID NO: 4139211 - DNA, 25 bp, Homo sapien
tgcctgtctctcaggacaacacctg

SEQ ID NO: 4139212 - DNA, 25 bp, Homo sapien
ctggagggtcacagcttgaatccgt

SEQ ID NO: 4139213 - DNA, 25 bp, Homo sapien
aaggtgcaggaaggctgacagtcac

SEQ ID NO: 4139214 - DNA, 25 bp, Homo sapien
ggtaaaggtgcaggaaggctgacag

SEQ ID NO: 4139215 - DNA, 25 bp, Homo sapien
taaaggtgcaggaaggctgacagtc

SEQ ID NO: 4139216 - DNA, 25 bp, Homo sapien
gggtggtaaaggtgcaggaaggctg

SEQ ID NO: 4139217 - DNA, 25 bp, Homo sapien
tggccactcggagaactgctcggga

SEQ ID NO: 4139218 - DNA, 25 bp, Homo sapien
caattgaaagcctctgtctggaaca

SEQ ID NO: 4139219 - DNA, 25 bp, Homo sapien
acaagagaaattccgccatctgctg

SEQ ID NO: 4139220 - DNA, 25 bp, Homo sapien
gcagtggaaatgctacgccaattga

SEQ ID NO: 4139221 - DNA, 25 bp, Homo sapien
tgtggacccctaggaaaaacatgga

SEQ ID NO: 4139222 - DNA, 25 bp, Homo sapien
cagactagtaccatggaggtttcca

SEQ ID NO: 4139223 - DNA, 25 bp, Homo sapien
ggttgttgacacagaggcctggtct

SEQ ID NO: 4139224 - DNA, 25 bp, Homo sapien
gcatccaggcatacatggagaccat

SEQ ID NO: 4139225 - DNA, 25 bp, Homo sapien
tgaagactggaagtttccacccagt

SEQ ID NO: 4139226 - DNA, 25 bp, Homo sapien
gtttccacccagtggttgggcacta

SEQ ID NO: 4139227 - DNA, 25 bp, Homo sapien
aagactggaagtttccacccagtgg

SEQ ID NO: 4139228 - DNA, 25 bp, Homo sapien
cacccagtggttgggcactaagtgc

SEQ ID NO: 4139229 - DNA, 25 bp, Homo sapien
ggtaggtgcctgcaagatactgact

SEQ ID NO: 4139230 - DNA, 25 bp, Homo sapien
tgcctgcaagatactgactgattgg

SEQ ID NO: 4139231 - DNA, 25 bp, Homo sapien
tagaatttgtagaatggcaatgttt

SEQ ID NO: 4139232 - DNA, 25 bp, Homo sapien
ggcaatgttttgcttcaattgtcat

SEQ ID NO: 4139233 - DNA, 25 bp, Homo sapien
gcctgaggaataaagtgcattgctc

SEQ ID NO: 4139234 - DNA, 25 bp, Homo sapien
caggattgcaaaaacctgagggctg

SEQ ID NO: 4139235 - DNA, 25 bp, Homo sapien
cgacagcctgaggaataaagtgcat

SEQ ID NO: 4139236 - DNA, 25 bp, Homo sapien
gagaggccatgtagacaggattgca

SEQ ID NO: 4139237 - DNA, 25 bp, Homo sapien
agaaaggaagattccttctggtggg

SEQ ID NO: 4139238 - DNA, 25 bp, Homo sapien
gattttgtgcgtggtagtgattaga

SEQ ID NO: 4139239 - DNA, 25 bp, Homo sapien
tctggtgggaatttgggctggattc

SEQ ID NO: 4139240 - DNA, 25 bp, Homo sapien
tttgccagtgatgaatatatcacaa

SEQ ID NO: 4139241 - DNA, 25 bp, Homo sapien
tggcatagcgctttttagcttccat

SEQ ID NO: 4139242 - DNA, 25 bp, Homo sapien
ttggaaaagcatgccaacagccagt

SEQ ID NO: 4139243 - DNA, 25 bp, Homo sapien
aacagccagtcctactggcatagcg

SEQ ID NO: 4139244 - DNA, 25 bp, Homo sapien
tcctactggcatagcgctttttagc

SEQ ID NO: 4139245 - DNA, 25 bp, Homo sapien
ctctgttcgctattgatctcttccg

SEQ ID NO: 4139246 - DNA, 25 bp, Homo sapien
tgaccagcaaaattagcaccacatc

SEQ ID NO: 4139247 - DNA, 25 bp, Homo sapien
catcctctgccattaagaggacaga

SEQ ID NO: 4139248 - DNA, 25 bp, Homo sapien
gatctcttccgattgctgaccagca

SEQ ID NO: 4139249 - DNA, 25 bp, Homo sapien
ttgttgcacagcatagaaagttctg

SEQ ID NO: 4139250 - DNA, 25 bp, Homo sapien
gctgtagtcacaaaaagttgttgca

SEQ ID NO: 4139251 - DNA, 25 bp, Homo sapien
ccaggtaagactgataaatggattt

SEQ ID NO: 4139252 - DNA, 25 bp, Homo sapien
agaattctgataggtgaaatcgtgt

SEQ ID NO: 4139253 - DNA, 25 bp, Homo sapien
cggctgactcctactttcagcagtt

SEQ ID NO: 4139254 - DNA, 25 bp, Homo sapien
gctgctcggctgactcctactttca

SEQ ID NO: 4139255 - DNA, 25 bp, Homo sapien
ttggctgctcggctgactcctactt

SEQ ID NO: 4139256 - DNA, 25 bp, Homo sapien
agcttgtttaaggcccctcaaatgg

SEQ ID NO: 4139257 - DNA, 25 bp, Homo sapien
gacacctaaggtgaatcctgctcta

SEQ ID NO: 4139258 - DNA, 25 bp, Homo sapien
ctcggacacctaaggtgaatcctgc

SEQ ID NO: 4139259 - DNA, 25 bp, Homo sapien
ggacacctaaggtgaatcctgctct

SEQ ID NO: 4139260 - DNA, 25 bp, Homo sapien
acctaaggtgaatcctgctctaatc

SEQ ID NO: 4139261 - DNA, 25 bp, Homo sapien
gctgcttgatttctgcatcatcatt

SEQ ID NO: 4139262 - DNA, 25 bp, Homo sapien
ctgctgcttgatttctgcatcatca

SEQ ID NO: 4139263 - DNA, 25 bp, Homo sapien
catcatcatttaacttccttagaaa

SEQ ID NO: 4139264 - DNA, 25 bp, Homo sapien
gatttctgcatcatcatttaacttc

SEQ ID NO: 4139265 - DNA, 25 bp, Homo sapien
cctgagagacatggcaactggactg

SEQ ID NO: 4139266 - DNA, 25 bp, Homo sapien
ctgagagacatggcaactggactga

SEQ ID NO: 4139267 - DNA, 25 bp, Homo sapien
gaatctttgcctatctatgggttcc

SEQ ID NO: 4139268 - DNA, 25 bp, Homo sapien
caagaacagaagttggcccaactgg

SEQ ID NO: 4139269 - DNA, 25 bp, Homo sapien
cagtgagctcgctggcaaagcattt

SEQ ID NO: 4139270 - DNA, 25 bp, Homo sapien
gacgcatccgtggagcagcaaatat

SEQ ID NO: 4139271 - DNA, 25 bp, Homo sapien
ggtctgctcagatcctgactttcat

SEQ ID NO: 4139272 - DNA, 25 bp, Homo sapien
actgcaggtctgctcagatcctgac

SEQ ID NO: 4139273 - DNA, 25 bp, Homo sapien
tgcaggtctgctcagatcctgactt

SEQ ID NO: 4139274 - DNA, 25 bp, Homo sapien
aggtctgctcagatcctgactttca

SEQ ID NO: 4139275 - DNA, 25 bp, Homo sapien
tctcagagtcagtaactcaggatga

SEQ ID NO: 4139276 - DNA, 25 bp, Homo sapien
cagagtcagtaactcaggatgattt

SEQ ID NO: 4139277 - DNA, 25 bp, Homo sapien
tgtatctcagagtcagtaactcagg

SEQ ID NO: 4139278 - DNA, 25 bp, Homo sapien
gtctgtatctcagagtcagtaactc

SEQ ID NO: 4139279 - DNA, 25 bp, Homo sapien
caaattcttcaagccctaacctgcc

SEQ ID NO: 4139280 - DNA, 25 bp, Homo sapien
ctgcctcctaccatcgctgcctctg

SEQ ID NO: 4139281 - DNA, 25 bp, Homo sapien
aagccctaacctgcctcctaccatc

SEQ ID NO: 4139282 - DNA, 25 bp, Homo sapien
ttcttcaagccctaacctgcctcct

SEQ ID NO: 4139283 - DNA, 25 bp, Homo sapien
tgtttcctcaggattcttcatgaga

SEQ ID NO: 4139284 - DNA, 25 bp, Homo sapien
agaggattgtttcctcaggattctt

SEQ ID NO: 4139285 - DNA, 25 bp, Homo sapien
tgctttcttgtagaggattgtttcc

SEQ ID NO: 4139286 - DNA, 25 bp, Homo sapien
tcatgagaataagaacctgctcccc

SEQ ID NO: 4139287 - DNA, 25 bp, Homo sapien
ctgatgcccatgaagcaggacctcc

SEQ ID NO: 4139288 - DNA, 25 bp, Homo sapien
atgcccatgaagcaggacctcctga

SEQ ID NO: 4139289 - DNA, 25 bp, Homo sapien
tgcccatgaagcaggacctcctgac

SEQ ID NO: 4139290 - DNA, 25 bp, Homo sapien
tgatgcccatgaagcaggacctcct

SEQ ID NO: 4139291 - DNA, 25 bp, Homo sapien
atttttatgtgcatactctgctgcg

SEQ ID NO: 4139292 - DNA, 25 bp, Homo sapien
tttatgtgcatactctgctgcgtgg

SEQ ID NO: 4139293 - DNA, 25 bp, Homo sapien
tttttatgtgcatactctgctgcgt

SEQ ID NO: 4139294 - DNA, 25 bp, Homo sapien
ttttatgtgcatactctgctgcgtg

SEQ ID NO: 4139295 - DNA, 25 bp, Homo sapien
ctaccacatttcaggcatggaggat

SEQ ID NO: 4139296 - DNA, 25 bp, Homo sapien
acatcactgctagggttgaccaaga

SEQ ID NO: 4139297 - DNA, 25 bp, Homo sapien
tcatggactgcctcttcaaccgaga

SEQ ID NO: 4139298 - DNA, 25 bp, Homo sapien
tgatctttttagacttgtgccacag

SEQ ID NO: 4139299 - DNA, 25 bp, Homo sapien
caaagacttttcccaatgcatcatg

SEQ ID NO: 4139300 - DNA, 25 bp, Homo sapien
aagtccattgcaggatgagacccca

SEQ ID NO: 4139301 - DNA, 25 bp, Homo sapien
tactccatggcaagggaaagtccat

SEQ ID NO: 4139302 - DNA, 25 bp, Homo sapien
tctgaggctgttaggagcaaagact

SEQ ID NO: 4139303 - DNA, 25 bp, Homo sapien
atcctgtctgtgacctgacaaatca

SEQ ID NO: 4139304 - DNA, 25 bp, Homo sapien
gatgctccatactagagactcatcc

SEQ ID NO: 4139305 - DNA, 25 bp, Homo sapien
tccccaatttccggttatgacacat

SEQ ID NO: 4139306 - DNA, 25 bp, Homo sapien
atgctccatactagagactcatcct

SEQ ID NO: 4139307 - DNA, 25 bp, Homo sapien
tacatctgggcctttgagtcctgct

SEQ ID NO: 4139308 - DNA, 25 bp, Homo sapien
tatgtgggtcattcgccctgtgggt

SEQ ID NO: 4139309 - DNA, 25 bp, Homo sapien
tgctgctttttatgtgggtcattcg

SEQ ID NO: 4139310 - DNA, 25 bp, Homo sapien
gggtcattgtccaaatctttccaca

SEQ ID NO: 4139311 - DNA, 25 bp, Homo sapien
cctgataggctagcaagaaactcat

SEQ ID NO: 4139312 - DNA, 25 bp, Homo sapien
gatactgtcagttcagttggagaag

SEQ ID NO: 4139313 - DNA, 25 bp, Homo sapien
tcatgggccttggatctggtttttc

SEQ ID NO: 4139314 - DNA, 25 bp, Homo sapien
aatggacgagggcaaaacctttgat

SEQ ID NO: 4139315 - DNA, 25 bp, Homo sapien
ggacttctattggagccatactcat

SEQ ID NO: 4139316 - DNA, 25 bp, Homo sapien
cagctgactgcatgagtgtggaaag

SEQ ID NO: 4139317 - DNA, 25 bp, Homo sapien
ttcttctggacttctattggagcca

SEQ ID NO: 4139318 - DNA, 25 bp, Homo sapien
catgagtgtggaaagctcatcattc

SEQ ID NO: 4139319 - DNA, 25 bp, Homo sapien
gagccttcagtaaccttagaaaggc

SEQ ID NO: 4139320 - DNA, 25 bp, Homo sapien
aatattcagagccttcagtaacctt

SEQ ID NO: 4139321 - DNA, 25 bp, Homo sapien
tcagagccttcagtaaccttagaaa

SEQ ID NO: 4139322 - DNA, 25 bp, Homo sapien
ccttcagtaaccttagaaaggcatt

SEQ ID NO: 4139323 - DNA, 25 bp, Homo sapien
cccagggccatcatgagcttcgtct

SEQ ID NO: 4139324 - DNA, 25 bp, Homo sapien
ccagggccatcatgagcttcgtctg

SEQ ID NO: 4139325 - DNA, 25 bp, Homo sapien
tggaaaagaatgatcctccattttt

SEQ ID NO: 4139326 - DNA, 25 bp, Homo sapien
gaatgatcctccatttttggcaagg

SEQ ID NO: 4139327 - DNA, 25 bp, Homo sapien
ccaaaatccacatggtggaaaagaa

SEQ ID NO: 4139328 - DNA, 25 bp, Homo sapien
tgtcaccaaaatccacatggtggaa

SEQ ID NO: 4139329 - DNA, 25 bp, Homo sapien
ggtccaatttctgagaccagtttat

SEQ ID NO: 4139330 - DNA, 25 bp, Homo sapien
tttctgagaccagtttattaagaaa

SEQ ID NO: 4139331 - DNA, 25 bp, Homo sapien
tagaagagattgccgccagcagctt

SEQ ID NO: 4139332 - DNA, 25 bp, Homo sapien
gcagcttctgtggtccaatttctga

SEQ ID NO: 4139333 - DNA, 25 bp, Homo sapien
aatctgcatactcttatatagcaaa

SEQ ID NO: 4139334 - DNA, 25 bp, Homo sapien
ggtaataccatcaaattgtaataca

SEQ ID NO: 4139335 - DNA, 25 bp, Homo sapien
catagtgtgctcctttcagtgttgc

SEQ ID NO: 4139336 - DNA, 25 bp, Homo sapien
aatggataactgcatattaatctgc

SEQ ID NO: 4139337 - DNA, 25 bp, Homo sapien
aggaaatggcagcagaagccgcagc

SEQ ID NO: 4139338 - DNA, 25 bp, Homo sapien
catgacaaggaggactttcctgcct

SEQ ID NO: 4139339 - DNA, 25 bp, Homo sapien
tgacaaggaggactttcctgcctct

SEQ ID NO: 4139340 - DNA, 25 bp, Homo sapien
atgacaaggaggactttcctgcctc

SEQ ID NO: 4139341 - DNA, 25 bp, Homo sapien
tgttgcatcagaaggaaaccagtat

SEQ ID NO: 4139342 - DNA, 25 bp, Homo sapien
agcagagtcacatttaacttacgtg

SEQ ID NO: 4139343 - DNA, 25 bp, Homo sapien
tacatcagcgttggtgttgagcatt

SEQ ID NO: 4139344 - DNA, 25 bp, Homo sapien
gaaaccagtatgtaatacatcagcg

SEQ ID NO: 4139345 - DNA, 25 bp, Homo sapien
agaaagtccagcgtgggcgccagtc

SEQ ID NO: 4139346 - DNA, 25 bp, Homo sapien
ctggtgattcattgggccaccaaga

SEQ ID NO: 4139347 - DNA, 25 bp, Homo sapien
gccagtctgctcagtaaccagcaca

SEQ ID NO: 4139348 - DNA, 25 bp, Homo sapien
ttgggccaccaagaaagtccagcgt

SEQ ID NO: 4139349 - DNA, 25 bp, Homo sapien
tgcttgaaaagagtgatgtgactga

SEQ ID NO: 4139350 - DNA, 25 bp, Homo sapien
agtctctcgtcttctagccctttcg

SEQ ID NO: 4139351 - DNA, 25 bp, Homo sapien
tgtttaatagtcttctgcgcctagc

SEQ ID NO: 4139352 - DNA, 25 bp, Homo sapien
ttctgcgcctagcacaaagtaggtg

SEQ ID NO: 4139353 - DNA, 25 bp, Homo sapien
cagggcatgtaacttccaacgggtg

SEQ ID NO: 4139354 - DNA, 25 bp, Homo sapien
ctttgaagggcgttggaatagctcc

SEQ ID NO: 4139355 - DNA, 25 bp, Homo sapien
ccaacgggtgagtagcagcttcaga

SEQ ID NO: 4139356 - DNA, 25 bp, Homo sapien
aatggatttgtaggctgcacagggc

SEQ ID NO: 4139357 - DNA, 25 bp, Homo sapien
tgtaatcttacatgcctctcaagga

SEQ ID NO: 4139358 - DNA, 25 bp, Homo sapien
gatacatcagtttcagacatctgga

SEQ ID NO: 4139359 - DNA, 25 bp, Homo sapien
gagtatctgcaaacccattgcccag

SEQ ID NO: 4139360 - DNA, 25 bp, Homo sapien
tactatgttgcaactttggtggaca

SEQ ID NO: 4139361 - DNA, 25 bp, Homo sapien
ccaggacctgatcgggatgaataga

SEQ ID NO: 4139362 - DNA, 25 bp, Homo sapien
tgcatctgccggagcctgtggcctg

SEQ ID NO: 4139363 - DNA, 25 bp, Homo sapien
cactacaggcgggtaaggaatgtta

SEQ ID NO: 4139364 - DNA, 25 bp, Homo sapien
tccagcattgcagtggtttgaacct

SEQ ID NO: 4139365 - DNA, 25 bp, Homo sapien
ttgtaaaggtaaagctccaggtaga

SEQ ID NO: 4139366 - DNA, 25 bp, Homo sapien
cttcaagtgctacaaatttgtaaag

SEQ ID NO: 4139367 - DNA, 25 bp, Homo sapien
caaatttgtaaaggtaaagctccag

SEQ ID NO: 4139368 - DNA, 25 bp, Homo sapien
ttcattgaattctcgcaaggactga

SEQ ID NO: 4139369 - DNA, 25 bp, Homo sapien
tttcattgaattctcgcaaggactg

SEQ ID NO: 4139370 - DNA, 25 bp, Homo sapien
tcattgaattctcgcaaggactgag

SEQ ID NO: 4139371 - DNA, 25 bp, Homo sapien
tgaccaaagtcatgtaaatcctgca

SEQ ID NO: 4139372 - DNA, 25 bp, Homo sapien
tttccttacattgtcttcggaccat

SEQ ID NO: 4139373 - DNA, 25 bp, Homo sapien
gaccaaagtcatgtaaatcctgcat

SEQ ID NO: 4139374 - DNA, 25 bp, Homo sapien
aaatcctgcatttccttacattgtc

SEQ ID NO: 4139375 - DNA, 25 bp, Homo sapien
ggaggcattcgtgctataatggaaa

SEQ ID NO: 4139376 - DNA, 25 bp, Homo sapien
tgcaaaacgtctgaaagaaagtctg

SEQ ID NO: 4139377 - DNA, 25 bp, Homo sapien
tggtaatgttcgtgtcctggtgcgt

SEQ ID NO: 4139378 - DNA, 25 bp, Homo sapien
cctggtgcgttttcaattggtgcca

SEQ ID NO: 4139379 - DNA, 25 bp, Homo sapien
ttcctatagccatggaaacctatcc

SEQ ID NO: 4139380 - DNA, 25 bp, Homo sapien
aaccacacagcagggcgcactcagt

SEQ ID NO: 4139381 - DNA, 25 bp, Homo sapien
gaaacctatcccaagaccagggata

SEQ ID NO: 4139382 - DNA, 25 bp, Homo sapien
acagcagggcgcactcagtcgagtt

SEQ ID NO: 4139383 - DNA, 25 bp, Homo sapien
taatggagccttaccagtgtcaact

SEQ ID NO: 4139384 - DNA, 25 bp, Homo sapien
agccagccaagaaaatgtactcgtt

SEQ ID NO: 4139385 - DNA, 25 bp, Homo sapien
gattgatttgggagggtcactctga

SEQ ID NO: 4139386 - DNA, 25 bp, Homo sapien
caaaccgtgcctttgatgtggctgg

SEQ ID NO: 4139387 - DNA, 25 bp, Homo sapien
atctctatgtgcttgtgcttgcttc

SEQ ID NO: 4139388 - DNA, 25 bp, Homo sapien
tcatctctatgtgcttgtgcttgct

SEQ ID NO: 4139389 - DNA, 25 bp, Homo sapien
cctcatctctatgtgcttgtgcttg

SEQ ID NO: 4139390 - DNA, 25 bp, Homo sapien
ctcatctctatgtgcttgtgcttgc

SEQ ID NO: 4139391 - DNA, 25 bp, Homo sapien
tctttgtacatggtgttggtgtcca

SEQ ID NO: 4139392 - DNA, 25 bp, Homo sapien
ctttgtacatggtgttggtgtccat

SEQ ID NO: 4139393 - DNA, 25 bp, Homo sapien
catcatctttgtacatggtgttggt

SEQ ID NO: 4139394 - DNA, 25 bp, Homo sapien
cctcatcatctttgtacatggtgtt

SEQ ID NO: 4139395 - DNA, 25 bp, Homo sapien
gagcatttgggccagttttacttcc

SEQ ID NO: 4139396 - DNA, 25 bp, Homo sapien
tgcagagcatttgggccagttttac

SEQ ID NO: 4139397 - DNA, 25 bp, Homo sapien
catttgggccagttttacttcccag

SEQ ID NO: 4139398 - DNA, 25 bp, Homo sapien
cagagcatttgggccagttttactt

SEQ ID NO: 4139399 - DNA, 25 bp, Homo sapien
gtcaaaaagggaagcacttgccgaa

SEQ ID NO: 4139400 - DNA, 25 bp, Homo sapien
tgaaaaatggaagctgtcttgtggg

SEQ ID NO: 4139401 - DNA, 25 bp, Homo sapien
gagtgattgaaggtgctgattagca

SEQ ID NO: 4139402 - DNA, 25 bp, Homo sapien
aaggtgctgattagcagctgatgaa

SEQ ID NO: 4139403 - DNA, 25 bp, Homo sapien
aggcaggatggcttcgcccacactt

SEQ ID NO: 4139404 - DNA, 25 bp, Homo sapien
gaacaaagattatagacccagagag

SEQ ID NO: 4139405 - DNA, 25 bp, Homo sapien
acaagagtcttgaggacgccaggca

SEQ ID NO: 4139406 - DNA, 25 bp, Homo sapien
cactgcacaggagggattaacaaat

SEQ ID NO: 4139407 - DNA, 25 bp, Homo sapien
catatcttcatgtcgcagaggttgt

SEQ ID NO: 4139408 - DNA, 25 bp, Homo sapien
gcagccatatcttcatgtcgcagag

SEQ ID NO: 4139409 - DNA, 25 bp, Homo sapien
gctctgggccttcctgcttgttatc

SEQ ID NO: 4139410 - DNA, 25 bp, Homo sapien
gccatatcttcatgtcgcagaggtt

SEQ ID NO: 4139411 - DNA, 25 bp, Homo sapien
tggttcctttggatgtggcacttgg

SEQ ID NO: 4139412 - DNA, 25 bp, Homo sapien
tttccatatggacttctcctcttct

SEQ ID NO: 4139413 - DNA, 25 bp, Homo sapien
ttggatgtggcacttggccacgttg

SEQ ID NO: 4139414 - DNA, 25 bp, Homo sapien
cttctctcttggttcctttggatgt

SEQ ID NO: 4139415 - DNA, 25 bp, Homo sapien
catttttgttcctgcggtcactgta

SEQ ID NO: 4139416 - DNA, 25 bp, Homo sapien
tatccttcagactatcttcagtgga

SEQ ID NO: 4139417 - DNA, 25 bp, Homo sapien
ggctgtttctgagggcatttttgtt

SEQ ID NO: 4139418 - DNA, 25 bp, Homo sapien
cccgtgctcaatgctgcttcctgtt

SEQ ID NO: 4139419 - DNA, 25 bp, Homo sapien
ccctggtgattgtgccggatgactg

SEQ ID NO: 4139420 - DNA, 25 bp, Homo sapien
tgactgtgaagagcctctgctctgc

SEQ ID NO: 4139421 - DNA, 25 bp, Homo sapien
catgctttgcccctggtgattgtgc

SEQ ID NO: 4139422 - DNA, 25 bp, Homo sapien
gaatccaacaggctgcttcatgctt

SEQ ID NO: 4139423 - DNA, 25 bp, Homo sapien
aactgctgggaggaaccattcatgg

SEQ ID NO: 4139424 - DNA, 25 bp, Homo sapien
cttttggagcctcggaacccgatcg

SEQ ID NO: 4139425 - DNA, 25 bp, Homo sapien
tgatcagggatgaggtttgaccctc

SEQ ID NO: 4139426 - DNA, 25 bp, Homo sapien
aacccgatcgcagtaatcaggaagg

SEQ ID NO: 4139427 - DNA, 25 bp, Homo sapien
tgcctctctctatttaagctcttca

SEQ ID NO: 4139428 - DNA, 25 bp, Homo sapien
caattgctgagagatccgtgactgg

SEQ ID NO: 4139429 - DNA, 25 bp, Homo sapien
gcctcggctttaatagcgtgtcact

SEQ ID NO: 4139430 - DNA, 25 bp, Homo sapien
tattctggcaaaagcgtgtcactct

SEQ ID NO: 4139431 - DNA, 25 bp, Homo sapien
tcattgactggcgaatattctggca

SEQ ID NO: 4139432 - DNA, 25 bp, Homo sapien
ctaagaatttggtttcatgggtagt

SEQ ID NO: 4139433 - DNA, 25 bp, Homo sapien
aatttggtttcatgggtagtttgtg

SEQ ID NO: 4139434 - DNA, 25 bp, Homo sapien
agaatttggtttcatgggtagtttg

SEQ ID NO: 4139435 - DNA, 25 bp, Homo sapien
tactcgtgtttccagggatcatcca

SEQ ID NO: 4139436 - DNA, 25 bp, Homo sapien
tctcaaccagtgaggacaaaagttg

SEQ ID NO: 4139437 - DNA, 25 bp, Homo sapien
caccttggctgggataactctggga

SEQ ID NO: 4139438 - DNA, 25 bp, Homo sapien
gcaggttttataagctccagtcaca

SEQ ID NO: 4139439 - DNA, 25 bp, Homo sapien
acccacaccttgagggagcatccat

SEQ ID NO: 4139440 - DNA, 25 bp, Homo sapien
ctcctgcgccgcaaattctgaccca

SEQ ID NO: 4139441 - DNA, 25 bp, Homo sapien
aattctgacccacaccttgagggag

SEQ ID NO: 4139442 - DNA, 25 bp, Homo sapien
cgcaaattctgacccacaccttgag

SEQ ID NO: 4139443 - DNA, 25 bp, Homo sapien
tgttctgtctcgtaaatatgccttc

SEQ ID NO: 4139444 - DNA, 25 bp, Homo sapien
gagggtgaaaatgagacctgcgctc

SEQ ID NO: 4139445 - DNA, 25 bp, Homo sapien
caaacttgtccacaggcgtatgagg

SEQ ID NO: 4139446 - DNA, 25 bp, Homo sapien
cctcactcttggtcgaatatttaac

SEQ ID NO: 4139447 - DNA, 25 bp, Homo sapien
ctctgctgtaattcttcacaggctc

SEQ ID NO: 4139448 - DNA, 25 bp, Homo sapien
tagaattatctttctctggatacct

SEQ ID NO: 4139449 - DNA, 25 bp, Homo sapien
gcagttttatctgcaaattctagaa

SEQ ID NO: 4139450 - DNA, 25 bp, Homo sapien
agctgactggccccgtgtgagacag

SEQ ID NO: 4139451 - DNA, 25 bp, Homo sapien
ctggccccgtgtgagacaggtgaca

SEQ ID NO: 4139452 - DNA, 25 bp, Homo sapien
ctgactggccccgtgtgagacaggt

SEQ ID NO: 4139453 - DNA, 25 bp, Homo sapien
gaaaaagctgactggccccgtgtga

SEQ ID NO: 4139454 - DNA, 25 bp, Homo sapien
gacttggattccacttgtcagggag

SEQ ID NO: 4139455 - DNA, 25 bp, Homo sapien
gtcagggagtttgattggttcagaa

SEQ ID NO: 4139456 - DNA, 25 bp, Homo sapien
gctgtgaagactttaagctgtgaac

SEQ ID NO: 4139457 - DNA, 25 bp, Homo sapien
caggcattggtctgacttgctgtga

SEQ ID NO: 4139458 - DNA, 25 bp, Homo sapien
ccagggtattcgaagtctttggaga

SEQ ID NO: 4139459 - DNA, 25 bp, Homo sapien
tattactagcctccagggtattcga

SEQ ID NO: 4139460 - DNA, 25 bp, Homo sapien
cacgtattactagcctccagggtat

SEQ ID NO: 4139461 - DNA, 25 bp, Homo sapien
cagggtattcgaagtctttggagat

SEQ ID NO: 4139462 - DNA, 25 bp, Homo sapien
ctctttgtatgcaccctgaatacag

SEQ ID NO: 4139463 - DNA, 25 bp, Homo sapien
tctctctttgtatgcaccctgaata

SEQ ID NO: 4139464 - DNA, 25 bp, Homo sapien
gactgggcagttacttctgttctat

SEQ ID NO: 4139465 - DNA, 25 bp, Homo sapien
ctgttgactgggcagttacttctgt

SEQ ID NO: 4139466 - DNA, 25 bp, Homo sapien
tcttgaagccctccgaaccaatttc

SEQ ID NO: 4139467 - DNA, 25 bp, Homo sapien
tctcccctagtcctaaatctttatg

SEQ ID NO: 4139468 - DNA, 25 bp, Homo sapien
tctttatgatacaggcttagcctcc

SEQ ID NO: 4139469 - DNA, 25 bp, Homo sapien
ttagcctccgcagttctcttgaagc

SEQ ID NO: 4139470 - DNA, 25 bp, Homo sapien
ccacaacttaaagctggtatttcac

SEQ ID NO: 4139471 - DNA, 25 bp, Homo sapien
tggttgtgcctgaagcacttccaca

SEQ ID NO: 4139472 - DNA, 25 bp, Homo sapien
aatgagacttggttgtgcctgaagc

SEQ ID NO: 4139473 - DNA, 25 bp, Homo sapien
tcacgtgtctggacattatccaaaa

SEQ ID NO: 4139474 - DNA, 25 bp, Homo sapien
gtgtatgtgcacatgcaaactttgc

SEQ ID NO: 4139475 - DNA, 25 bp, Homo sapien
tgttctccttcattctcagtgtgct

SEQ ID NO: 4139476 - DNA, 25 bp, Homo sapien
tccttcattctcagtgtgcttgtgt

SEQ ID NO: 4139477 - DNA, 25 bp, Homo sapien
tgtatgtgcacatgcaaactttgct

SEQ ID NO: 4139478 - DNA, 25 bp, Homo sapien
agtgcagtcatctgttgaccatgag

SEQ ID NO: 4139479 - DNA, 25 bp, Homo sapien
tagtttcaaacttggatgataggag

SEQ ID NO: 4139480 - DNA, 25 bp, Homo sapien
tatgtaagcagtcacaacttctgtg

SEQ ID NO: 4139481 - DNA, 25 bp, Homo sapien
ggcatttagtaacacagtgcagtca

SEQ ID NO: 4139482 - DNA, 25 bp, Homo sapien
tattcactttgtgcccataccccat

SEQ ID NO: 4139483 - DNA, 25 bp, Homo sapien
ggaactgtactgtcacagctattca

SEQ ID NO: 4139484 - DNA, 25 bp, Homo sapien
tggctgaggaactgtactgtcacag

SEQ ID NO: 4139485 - DNA, 25 bp, Homo sapien
tgtcacagctattcactttgtgccc

SEQ ID NO: 4139486 - DNA, 25 bp, Homo sapien
gaaaatggcagccataaacactggg

SEQ ID NO: 4139487 - DNA, 25 bp, Homo sapien
taatcataccccaaacatgagcatc

SEQ ID NO: 4139488 - DNA, 25 bp, Homo sapien
catgtctgttgcagcaccatgaatg

SEQ ID NO: 4139489 - DNA, 25 bp, Homo sapien
cagacaaacatggtacacatggaca

SEQ ID NO: 4139490 - DNA, 25 bp, Homo sapien
tcacttccaccttgcggaccttacc

SEQ ID NO: 4139491 - DNA, 25 bp, Homo sapien
ttcacttccaccttgcggaccttac

SEQ ID NO: 4139492 - DNA, 25 bp, Homo sapien
gtttagtttgaacagatgcacaatc

SEQ ID NO: 4139493 - DNA, 25 bp, Homo sapien
gtttgagcatgaagtggaatttttc

SEQ ID NO: 4139494 - DNA, 25 bp, Homo sapien
tcctgtcgaagttcatggtgtttga

SEQ ID NO: 4139495 - DNA, 25 bp, Homo sapien
tgacagagatgtctttggcaccaag

SEQ ID NO: 4139496 - DNA, 25 bp, Homo sapien
tttctttgtccatgcgtctgcctca

SEQ ID NO: 4139497 - DNA, 25 bp, Homo sapien
ttgtccatgcgtctgcctcagcttg

SEQ ID NO: 4139498 - DNA, 25 bp, Homo sapien
tcattccctcttgcatcctcctgcc

SEQ ID NO: 4139499 - DNA, 25 bp, Homo sapien
gctctgtatttagccagcagtttgt

SEQ ID NO: 4139500 - DNA, 25 bp, Homo sapien
ctggacgtttcctgccgtccatcaa

SEQ ID NO: 4139501 - DNA, 25 bp, Homo sapien
cagatactggacgtttcctgccgtc

SEQ ID NO: 4139502 - DNA, 25 bp, Homo sapien
gcccagatactggacgtttcctgcc

SEQ ID NO: 4139503 - DNA, 25 bp, Homo sapien
gatactggacgtttcctgccgtcca

SEQ ID NO: 4139504 - DNA, 25 bp, Homo sapien
cagaggaactgtatgattggagctg

SEQ ID NO: 4139505 - DNA, 25 bp, Homo sapien
tccatacagaggaactgtatgattg

SEQ ID NO: 4139506 - DNA, 25 bp, Homo sapien
tacagaggaactgtatgattggagc

SEQ ID NO: 4139507 - DNA, 25 bp, Homo sapien
aggaactgtatgattggagctggat

SEQ ID NO: 4139508 - DNA, 25 bp, Homo sapien
tcaggcttctgaaactcgggaccac

SEQ ID NO: 4139509 - DNA, 25 bp, Homo sapien
taaacgtagctgtggcaatgtccag

SEQ ID NO: 4139510 - DNA, 25 bp, Homo sapien
ttttacgaaatggttgggatggcag

SEQ ID NO: 4139511 - DNA, 25 bp, Homo sapien
gcagtggcagcgctatgatcaggct

SEQ ID NO: 4139512 - DNA, 25 bp, Homo sapien
tgttcgagttccaagacgttcatgt

SEQ ID NO: 4139513 - DNA, 25 bp, Homo sapien
gttccaagacgttcatgtttcctca

SEQ ID NO: 4139514 - DNA, 25 bp, Homo sapien
cctgttcgagttccaagacgttcat

SEQ ID NO: 4139515 - DNA, 25 bp, Homo sapien
tcgagttccaagacgttcatgtttc

SEQ ID NO: 4139516 - DNA, 25 bp, Homo sapien
ctgtacagcagaccatgtaggtgac

SEQ ID NO: 4139517 - DNA, 25 bp, Homo sapien
tgtctacatttgtcggtgtctctct

SEQ ID NO: 4139518 - DNA, 25 bp, Homo sapien
gtgtctacatttgtcggtgtctctc

SEQ ID NO: 4139519 - DNA, 25 bp, Homo sapien
ttggaggattggctggcaagagaga

SEQ ID NO: 4139520 - DNA, 25 bp, Homo sapien
tctctcttggaggattggctggcaa

SEQ ID NO: 4139521 - DNA, 25 bp, Homo sapien
tcagtgactttgaagcaccccattc

SEQ ID NO: 4139522 - DNA, 25 bp, Homo sapien
aagtagtggtactcctcgtggtcat

SEQ ID NO: 4139523 - DNA, 25 bp, Homo sapien
gacagtctacttctaataatgattc

SEQ ID NO: 4139524 - DNA, 25 bp, Homo sapien
tgtacttcgaaaagctcaaccctgc

SEQ ID NO: 4139525 - DNA, 25 bp, Homo sapien
gacagaattgagactgaagccaact

SEQ ID NO: 4139526 - DNA, 25 bp, Homo sapien
ctttgctggctagaacattggagga

SEQ ID NO: 4139527 - DNA, 25 bp, Homo sapien
tccagatgctttacagctaaggccc

SEQ ID NO: 4139528 - DNA, 25 bp, Homo sapien
gagacatcgggcttttgggcactca

SEQ ID NO: 4139529 - DNA, 25 bp, Homo sapien
gaacctcgggacgtaattccataca

SEQ ID NO: 4139530 - DNA, 25 bp, Homo sapien
tacttaaggtaaagagagcattttc

SEQ ID NO: 4139531 - DNA, 25 bp, Homo sapien
ggagctttcgtttatgggccaggca

SEQ ID NO: 4139532 - DNA, 25 bp, Homo sapien
tagatgattgatagtggaaggaacc

SEQ ID NO: 4139533 - DNA, 25 bp, Homo sapien
tccaatcactacagtttaaacagaa

SEQ ID NO: 4139534 - DNA, 25 bp, Homo sapien
ccccatgtctgtcataaatatgcct

SEQ ID NO: 4139535 - DNA, 25 bp, Homo sapien
taccagtacagatatgtttagcgca

SEQ ID NO: 4139536 - DNA, 25 bp, Homo sapien
taaaatgtcaactgctaatagctta

SEQ ID NO: 4139537 - DNA, 25 bp, Homo sapien
tcttgatgtgcctgctaccatttct

SEQ ID NO: 4139538 - DNA, 25 bp, Homo sapien
gatgtgcctgctaccatttctgagt

SEQ ID NO: 4139539 - DNA, 25 bp, Homo sapien
acatccttggccgacataaccgatc

SEQ ID NO: 4139540 - DNA, 25 bp, Homo sapien
tcattcactgtggtctttcgtacca

SEQ ID NO: 4139541 - DNA, 25 bp, Homo sapien
tttctttctctactcgattgtgtaa

SEQ ID NO: 4139542 - DNA, 25 bp, Homo sapien
gagaagtcctgtgagtggatggctt

SEQ ID NO: 4139543 - DNA, 25 bp, Homo sapien
tctttctctactcgattgtgtaaaa

SEQ ID NO: 4139544 - DNA, 25 bp, Homo sapien
ttctctactcgattgtgtaaaatca

SEQ ID NO: 4139545 - DNA, 25 bp, Homo sapien
tacaagcttcgtgatgcccatggga

SEQ ID NO: 4139546 - DNA, 25 bp, Homo sapien
gacaacgcagttggcaatgctaccg

SEQ ID NO: 4139547 - DNA, 25 bp, Homo sapien
gcttttcagccatagggacaacgca

SEQ ID NO: 4139548 - DNA, 25 bp, Homo sapien
gagagaccaaacatagccacacaag

SEQ ID NO: 4139549 - DNA, 25 bp, Homo sapien
gggctgctgataacctctcaacacc

SEQ ID NO: 4139550 - DNA, 25 bp, Homo sapien
gataacctctcaacacctttggcag

SEQ ID NO: 4139551 - DNA, 25 bp, Homo sapien
tgctgataacctctcaacacctttg

SEQ ID NO: 4139552 - DNA, 25 bp, Homo sapien
tctcaacacctttggcagaaagttc

SEQ ID NO: 4139553 - DNA, 25 bp, Homo sapien
catcacggaaacgtgggatggtgca

SEQ ID NO: 4139554 - DNA, 25 bp, Homo sapien
ccatggctgcatggcaatacttgaa

SEQ ID NO: 4139555 - DNA, 25 bp, Homo sapien
gatttgacacatcccagcagtgcca

SEQ ID NO: 4139556 - DNA, 25 bp, Homo sapien
caaagatgtcaggtcgtggtgtgtg

SEQ ID NO: 4139557 - DNA, 25 bp, Homo sapien
ttcattggaatttctcttcgtgtgt

SEQ ID NO: 4139558 - DNA, 25 bp, Homo sapien
ggaatttctcttcgtgtgtttctat

SEQ ID NO: 4139559 - DNA, 25 bp, Homo sapien
ccctgaaagctgtgagatccttcag

SEQ ID NO: 4139560 - DNA, 25 bp, Homo sapien
tgaaagctgtgagatccttcagata

SEQ ID NO: 4139561 - DNA, 25 bp, Homo sapien
tctgcggaatgtcaccagggaacct

SEQ ID NO: 4139562 - DNA, 25 bp, Homo sapien
taacagctggagatttctgcggaat

SEQ ID NO: 4139563 - DNA, 25 bp, Homo sapien
cattcttaagttgaagtttgggtgg

SEQ ID NO: 4139564 - DNA, 25 bp, Homo sapien
tggcctcggagatccaagttcttct

SEQ ID NO: 4139565 - DNA, 25 bp, Homo sapien
catgctctttcgcacagatttttca

SEQ ID NO: 4139566 - DNA, 25 bp, Homo sapien
ttcatcattttcaccctgggagcat

SEQ ID NO: 4139567 - DNA, 25 bp, Homo sapien
gagcatccagtctccctatgagcat

SEQ ID NO: 4139568 - DNA, 25 bp, Homo sapien
taactgcttgggcatgctctttcgc

SEQ ID NO: 4139569 - DNA, 25 bp, Homo sapien
gctggcagtctctcaactcctgtga

SEQ ID NO: 4139570 - DNA, 25 bp, Homo sapien
ggctcccaatccagaatgtttctaa

SEQ ID NO: 4139571 - DNA, 25 bp, Homo sapien
tgaagccagtcttaggagaaactac

SEQ ID NO: 4139572 - DNA, 25 bp, Homo sapien
tttgaggacccacagttaaatgaca

SEQ ID NO: 4139573 - DNA, 25 bp, Homo sapien
aatcacacagtgggttagtaaaggc

SEQ ID NO: 4139574 - DNA, 25 bp, Homo sapien
atcacacagtgggttagtaaaggcc

SEQ ID NO: 4139575 - DNA, 25 bp, Homo sapien
cacacagtgggttagtaaaggcctt

SEQ ID NO: 4139576 - DNA, 25 bp, Homo sapien
tcacacagtgggttagtaaaggcct

SEQ ID NO: 4139577 - DNA, 25 bp, Homo sapien
caggttgtcatggctccacttagac

SEQ ID NO: 4139578 - DNA, 25 bp, Homo sapien
tcaggttgtcatggctccacttaga

SEQ ID NO: 4139579 - DNA, 25 bp, Homo sapien
tcataatgtgggcatttaggatttt

SEQ ID NO: 4139580 - DNA, 25 bp, Homo sapien
ttctcataatgtgggcatttaggat

SEQ ID NO: 4139581 - DNA, 25 bp, Homo sapien
tctcataatgtgggcatttaggatt

SEQ ID NO: 4139582 - DNA, 25 bp, Homo sapien
cataatgtgggcatttaggattttc

SEQ ID NO: 4139583 - DNA, 25 bp, Homo sapien
aatcttttatgtaatcactggtatc

SEQ ID NO: 4139584 - DNA, 25 bp, Homo sapien
gaatcttttatgtaatcactggtat

SEQ ID NO: 4139585 - DNA, 25 bp, Homo sapien
ggaatcttttatgtaatcactggta

SEQ ID NO: 4139586 - DNA, 25 bp, Homo sapien
gaatatgccccagcgattgttccag

SEQ ID NO: 4139587 - DNA, 25 bp, Homo sapien
cccatgtagctgtcagtaagattgc

SEQ ID NO: 4139588 - DNA, 25 bp, Homo sapien
ccccatcctgtatggttgtggtgga

SEQ ID NO: 4139589 - DNA, 25 bp, Homo sapien
tgaatcacaggaatatgccccagcg

SEQ ID NO: 4139590 - DNA, 25 bp, Homo sapien
gctggtgaaactatcacacttctcc

SEQ ID NO: 4139591 - DNA, 25 bp, Homo sapien
agctgggtagttggataaaatggaa

SEQ ID NO: 4139592 - DNA, 25 bp, Homo sapien
gaactagtatttgtgtagctggtga

SEQ ID NO: 4139593 - DNA, 25 bp, Homo sapien
tttttatattctcggagctgggtag

SEQ ID NO: 4139594 - DNA, 25 bp, Homo sapien
catgctaatgctttaatatagccat

SEQ ID NO: 4139595 - DNA, 25 bp, Homo sapien
gctaatgctttaatatagccattac

SEQ ID NO: 4139596 - DNA, 25 bp, Homo sapien
tcaacatgctaatgctttaatatag

SEQ ID NO: 4139597 - DNA, 25 bp, Homo sapien
aacatgctaatgctttaatatagcc

SEQ ID NO: 4139598 - DNA, 25 bp, Homo sapien
gggactgatgtccatgagccactcc

SEQ ID NO: 4139599 - DNA, 25 bp, Homo sapien
agccactccaaaggattttcctcgg

SEQ ID NO: 4139600 - DNA, 25 bp, Homo sapien
tatcctgacttgtaattctttgcca

SEQ ID NO: 4139601 - DNA, 25 bp, Homo sapien
taagcttttgtatcagggggactga

SEQ ID NO: 4139602 - DNA, 25 bp, Homo sapien
gatgagacttgtgggccagaaccaa

SEQ ID NO: 4139603 - DNA, 25 bp, Homo sapien
cagcacgggcacagaattaacttga

SEQ ID NO: 4139604 - DNA, 25 bp, Homo sapien
cagaaccaagtcagccatggagtga

SEQ ID NO: 4139605 - DNA, 25 bp, Homo sapien
gatcaagcaccacgaccaagaattg

SEQ ID NO: 4139606 - DNA, 25 bp, Homo sapien
cagctccggtgaactgggccttcat

SEQ ID NO: 4139607 - DNA, 25 bp, Homo sapien
cctcatggatggcttaggagggata

SEQ ID NO: 4139608 - DNA, 25 bp, Homo sapien
tgtgaggggaacatttcgaagattc

SEQ ID NO: 4139609 - DNA, 25 bp, Homo sapien
gagggatatgagcataaggagaaac

SEQ ID NO: 4139610 - DNA, 25 bp, Homo sapien
ctccagcacttggtgtatcattgat

SEQ ID NO: 4139611 - DNA, 25 bp, Homo sapien
ttgatctcacaactctcaaattttc

SEQ ID NO: 4139612 - DNA, 25 bp, Homo sapien
cattggcaggacagtaagagtttgc

SEQ ID NO: 4139613 - DNA, 25 bp, Homo sapien
tgttctccaggtacagatactctgt

SEQ ID NO: 4139614 - DNA, 25 bp, Homo sapien
tttccctttggtatggtcacattcc

SEQ ID NO: 4139615 - DNA, 25 bp, Homo sapien
cctggtcaggacttggtcctctgca

SEQ ID NO: 4139616 - DNA, 25 bp, Homo sapien
ttcctggtcaggacttggtcctctg

SEQ ID NO: 4139617 - DNA, 25 bp, Homo sapien
acattcctggtcaggacttggtcct

SEQ ID NO: 4139618 - DNA, 25 bp, Homo sapien
ctataggtcaatgggaaaatcttca

SEQ ID NO: 4139619 - DNA, 25 bp, Homo sapien
ataggtcaatgggaaaatcttcaaa

SEQ ID NO: 4139620 - DNA, 25 bp, Homo sapien
tataggtcaatgggaaaatcttcaa

SEQ ID NO: 4139621 - DNA, 25 bp, Homo sapien
gcttagggaggcgaactgaccaact

SEQ ID NO: 4139622 - DNA, 25 bp, Homo sapien
gtcataaggccaataatagggagag

SEQ ID NO: 4139623 - DNA, 25 bp, Homo sapien
gagaaccaaggtctcaacttcttag

SEQ ID NO: 4139624 - DNA, 25 bp, Homo sapien
tagcagtcctgtgaatttgctctgt

SEQ ID NO: 4139625 - DNA, 25 bp, Homo sapien
tatatcttcaacgtttaagaaggtg

SEQ ID NO: 4139626 - DNA, 25 bp, Homo sapien
ctgccactgtcgtacagattatatc

SEQ ID NO: 4139627 - DNA, 25 bp, Homo sapien
gattatatcttcaacgtttaagaag

SEQ ID NO: 4139628 - DNA, 25 bp, Homo sapien
tgtcgtacagattatatcttcaacg

SEQ ID NO: 4139629 - DNA, 25 bp, Homo sapien
ttgcatattcatttttgaaggtgtc

SEQ ID NO: 4139630 - DNA, 25 bp, Homo sapien
cttgcatattcatttttgaaggtgt

SEQ ID NO: 4139631 - DNA, 25 bp, Homo sapien
gcatattcatttttgaaggtgtcat

SEQ ID NO: 4139632 - DNA, 25 bp, Homo sapien
tgcatattcatttttgaaggtgtca

SEQ ID NO: 4139633 - DNA, 25 bp, Homo sapien
attctactctgaagtaacgaattcc

SEQ ID NO: 4139634 - DNA, 25 bp, Homo sapien
tctactctgaagtaacgaattccaa

SEQ ID NO: 4139635 - DNA, 25 bp, Homo sapien
aaattctactctgaagtaacgaatt

SEQ ID NO: 4139636 - DNA, 25 bp, Homo sapien
tactctgaagtaacgaattccaaac

SEQ ID NO: 4139637 - DNA, 25 bp, Homo sapien
cattttccaacacgctgtctcatac

SEQ ID NO: 4139638 - DNA, 25 bp, Homo sapien
ttttccaacacgctgtctcatacac

SEQ ID NO: 4139639 - DNA, 25 bp, Homo sapien
tttccaacacgctgtctcatacacc

SEQ ID NO: 4139640 - DNA, 25 bp, Homo sapien
tccattttccaacacgctgtctcat

SEQ ID NO: 4139641 - DNA, 25 bp, Homo sapien
gttctctttctgaataaagccaaga

SEQ ID NO: 4139642 - DNA, 25 bp, Homo sapien
tctttctgaataaagccaagaatca

SEQ ID NO: 4139643 - DNA, 25 bp, Homo sapien
tctctttctgaataaagccaagaat

SEQ ID NO: 4139644 - DNA, 25 bp, Homo sapien
ctttctgaataaagccaagaatcat

SEQ ID NO: 4139645 - DNA, 25 bp, Homo sapien
cctcgattgcataaagctcaaaagg

SEQ ID NO: 4139646 - DNA, 25 bp, Homo sapien
tttcccctcgattgcataaagctca

SEQ ID NO: 4139647 - DNA, 25 bp, Homo sapien
taaagctcaaaaggtatgtcttcat

SEQ ID NO: 4139648 - DNA, 25 bp, Homo sapien
tgaaagctctttcccctcgattgca

SEQ ID NO: 4139649 - DNA, 25 bp, Homo sapien
aagaaaggtatgctgtgtagaagaa

SEQ ID NO: 4139650 - DNA, 25 bp, Homo sapien
agcaagatttccataggtggaaatg

SEQ ID NO: 4139651 - DNA, 25 bp, Homo sapien
aagcaagatttccataggtggaaat

SEQ ID NO: 4139652 - DNA, 25 bp, Homo sapien
ggaaaagaaaggtatgctgtgtaga

SEQ ID NO: 4139653 - DNA, 25 bp, Homo sapien
tcttgctttggtctgcaggatgcca

SEQ ID NO: 4139654 - DNA, 25 bp, Homo sapien
ggatgccatgacttttattcttgtt

SEQ ID NO: 4139655 - DNA, 25 bp, Homo sapien
tacctcacacaagggttaggtcttg

SEQ ID NO: 4139656 - DNA, 25 bp, Homo sapien
tcactcaagatactgattatacctc

SEQ ID NO: 4139657 - DNA, 25 bp, Homo sapien
aactgaatattagagctctgcctag

SEQ ID NO: 4139658 - DNA, 25 bp, Homo sapien
ggccaaagccgaactaatctctgaa

SEQ ID NO: 4139659 - DNA, 25 bp, Homo sapien
ttgccattaccttcttcgccccatc

SEQ ID NO: 4139660 - DNA, 25 bp, Homo sapien
tcgccccatccctctttcacacttg

SEQ ID NO: 4139661 - DNA, 25 bp, Homo sapien
tctttcggtgcactcttctcaacct

SEQ ID NO: 4139662 - DNA, 25 bp, Homo sapien
ctctttcggtgcactcttctcaacc

SEQ ID NO: 4139663 - DNA, 25 bp, Homo sapien
taacatccaagttaggaggacaccc

SEQ ID NO: 4139664 - DNA, 25 bp, Homo sapien
gaaatggacggcagctaacatccaa

SEQ ID NO: 4139665 - DNA, 25 bp, Homo sapien
tcaagagaaatggacggcagctaac

SEQ ID NO: 4139666 - DNA, 25 bp, Homo sapien
gacggcagctaacatccaagttagg

SEQ ID NO: 4139667 - DNA, 25 bp, Homo sapien
caaactcagtgtatgctcttgccat

SEQ ID NO: 4139668 - DNA, 25 bp, Homo sapien
ccactacatcaaactcagtgtatgc

SEQ ID NO: 4139669 - DNA, 25 bp, Homo sapien
tttatgatttgtccccactacatca

SEQ ID NO: 4139670 - DNA, 25 bp, Homo sapien
tattttatgatttgtccccactaca

SEQ ID NO: 4139671 - DNA, 25 bp, Homo sapien
ccatagtctgctgagttttgcgtac

SEQ ID NO: 4139672 - DNA, 25 bp, Homo sapien
gaagttgagttgacgtaaatcctct

SEQ ID NO: 4139673 - DNA, 25 bp, Homo sapien
gtcaccagtgaaataatgcgggatg

SEQ ID NO: 4139674 - DNA, 25 bp, Homo sapien
caaattgggactaaagtcaccagtg

SEQ ID NO: 4139675 - DNA, 25 bp, Homo sapien
caaataacaggtcatgggctctgtg

SEQ ID NO: 4139676 - DNA, 25 bp, Homo sapien
tgtggagacctgaaatccatgaaat

SEQ ID NO: 4139677 - DNA, 25 bp, Homo sapien
aagccttcaaataacaggtcatggg

SEQ ID NO: 4139678 - DNA, 25 bp, Homo sapien
gagacctgaaatccatgaaatccat

SEQ ID NO: 4139679 - DNA, 25 bp, Homo sapien
ctgcacctgtgcctttttggtctgt

SEQ ID NO: 4139680 - DNA, 25 bp, Homo sapien
tcttttatcagtactgacccctagg

SEQ ID NO: 4139681 - DNA, 25 bp, Homo sapien
caggaatacgtagagtgcttttgtc

SEQ ID NO: 4139682 - DNA, 25 bp, Homo sapien
caggttaggttggactggaggctcc

SEQ ID NO: 4139683 - DNA, 25 bp, Homo sapien
cctgtgctcccttacagttggattg

SEQ ID NO: 4139684 - DNA, 25 bp, Homo sapien
cagttggattggatctgggattgac

SEQ ID NO: 4139685 - DNA, 25 bp, Homo sapien
cttttccaatagactacattgcctg

SEQ ID NO: 4139686 - DNA, 25 bp, Homo sapien
tctgtgttcagtgcctgccctttcc

SEQ ID NO: 4139687 - DNA, 25 bp, Homo sapien
tgaatcctgatcgagcattgctgtc

SEQ ID NO: 4139688 - DNA, 25 bp, Homo sapien
ggaatacttgctctgtcagtctgag

SEQ ID NO: 4139689 - DNA, 25 bp, Homo sapien
tagggagacatcaccacccacttga

SEQ ID NO: 4139690 - DNA, 25 bp, Homo sapien
ggtttatgacccgtttgaatcctga

SEQ ID NO: 4139691 - DNA, 25 bp, Homo sapien
tgctcgaattttcctccatcgtaga

SEQ ID NO: 4139692 - DNA, 25 bp, Homo sapien
tagctcgttcttcattcataatcag

SEQ ID NO: 4139693 - DNA, 25 bp, Homo sapien
ccatcgtagatactctagtgtctga

SEQ ID NO: 4139694 - DNA, 25 bp, Homo sapien
tgtccatttgacacctagctcgttc

SEQ ID NO: 4139695 - DNA, 25 bp, Homo sapien
gactcagtaactgttggtcaggcag

SEQ ID NO: 4139696 - DNA, 25 bp, Homo sapien
gtaatacaaccttgtgccaactggg

SEQ ID NO: 4139697 - DNA, 25 bp, Homo sapien
tacacactcaggattggctcagcat

SEQ ID NO: 4139698 - DNA, 25 bp, Homo sapien
gatgctagaagtgactccaagtcca

SEQ ID NO: 4139699 - DNA, 25 bp, Homo sapien
cttttggtcagggtttttgtgcagg

SEQ ID NO: 4139700 - DNA, 25 bp, Homo sapien
ccttttggtcagggtttttgtgcag

SEQ ID NO: 4139701 - DNA, 25 bp, Homo sapien
gtttttgtgcaggtcttgaatgttt

SEQ ID NO: 4139702 - DNA, 25 bp, Homo sapien
agggtttttgtgcaggtcttgaatg

SEQ ID NO: 4139703 - DNA, 25 bp, Homo sapien
tactggatgtccctaataggaggac

SEQ ID NO: 4139704 - DNA, 25 bp, Homo sapien
ataggaggacaacatatatcatctc

SEQ ID NO: 4139705 - DNA, 25 bp, Homo sapien
gaatacttgtcatggacacgtactg

SEQ ID NO: 4139706 - DNA, 25 bp, Homo sapien
tctgttgtacacacttagtaatttg

SEQ ID NO: 4139707 - DNA, 25 bp, Homo sapien
tactgaggttcaggttctgtgtgcc

SEQ ID NO: 4139708 - DNA, 25 bp, Homo sapien
tggtactgaggttcaggttctgtgt

SEQ ID NO: 4139709 - DNA, 25 bp, Homo sapien
aggagatgtagggaacacctggtac

SEQ ID NO: 4139710 - DNA, 25 bp, Homo sapien
tgtagggaacacctggtactgaggt

SEQ ID NO: 4139711 - DNA, 25 bp, Homo sapien
agaagagtaattcaggtttagactc

SEQ ID NO: 4139712 - DNA, 25 bp, Homo sapien
ctgtggttatcatataagaaaagaa

SEQ ID NO: 4139713 - DNA, 25 bp, Homo sapien
tgtggttatcatataagaaaagaaa

SEQ ID NO: 4139714 - DNA, 25 bp, Homo sapien
gagatattggagtcctgtcgcagcc

SEQ ID NO: 4139715 - DNA, 25 bp, Homo sapien
tctgtaagacacagtagagggtgcc

SEQ ID NO: 4139716 - DNA, 25 bp, Homo sapien
ttaacagcctagaagctcagttggg

SEQ ID NO: 4139717 - DNA, 25 bp, Homo sapien
tgtcgcagccagtgtagaaggtctt

SEQ ID NO: 4139718 - DNA, 25 bp, Homo sapien
tctataaacttaacacaggtgacgt

SEQ ID NO: 4139719 - DNA, 25 bp, Homo sapien
tttaaactcttgaggaggcgcgacc

SEQ ID NO: 4139720 - DNA, 25 bp, Homo sapien
caagttctaactgaattgggcttca

SEQ ID NO: 4139721 - DNA, 25 bp, Homo sapien
ttgacactagtgaaagccctgggag

SEQ ID NO: 4139722 - DNA, 25 bp, Homo sapien
taatgataataatcgatatttggct

SEQ ID NO: 4139723 - DNA, 25 bp, Homo sapien
cgggtcaaaatgctcaggggtgtta

SEQ ID NO: 4139724 - DNA, 25 bp, Homo sapien
tgttagaaactggtaatgataataa

SEQ ID NO: 4139725 - DNA, 25 bp, Homo sapien
aatgctcaggggtgttagaaactgg

SEQ ID NO: 4139726 - DNA, 25 bp, Homo sapien
gaatccctgttctgtacccactaga

SEQ ID NO: 4139727 - DNA, 25 bp, Homo sapien
tcatatgtagctttagggcatggtt

SEQ ID NO: 4139728 - DNA, 25 bp, Homo sapien
tccagtgcattgaagtatatttagc

SEQ ID NO: 4139729 - DNA, 25 bp, Homo sapien
tcataagtggcaaattattaaggcc

SEQ ID NO: 4139730 - DNA, 25 bp, Homo sapien
tatgtccatgactgaccagtttcgt

SEQ ID NO: 4139731 - DNA, 25 bp, Homo sapien
tatgtgagtgaaagcctgccttatc

SEQ ID NO: 4139732 - DNA, 25 bp, Homo sapien
ccagtttcgtggtaataaagcgaca

SEQ ID NO: 4139733 - DNA, 25 bp, Homo sapien
acatacgactctctcctcgcatggg

SEQ ID NO: 4139734 - DNA, 25 bp, Homo sapien
gtgctctactaacccaaggttggtg

SEQ ID NO: 4139735 - DNA, 25 bp, Homo sapien
taacaccaacattgttagaacattc

SEQ ID NO: 4139736 - DNA, 25 bp, Homo sapien
tacaagccccagtgctctactaacc

SEQ ID NO: 4139737 - DNA, 25 bp, Homo sapien
cccagtgctctactaacccaaggtt

SEQ ID NO: 4139738 - DNA, 25 bp, Homo sapien
tgccatcttgtaccatctggataac

SEQ ID NO: 4139739 - DNA, 25 bp, Homo sapien
tctattcctattatcttctcagtgg

SEQ ID NO: 4139740 - DNA, 25 bp, Homo sapien
taatacctcacctagctttggcaga

SEQ ID NO: 4139741 - DNA, 25 bp, Homo sapien
tggcagaaatgcctgatacctcctt

SEQ ID NO: 4139742 - DNA, 25 bp, Homo sapien
ttctagagagggtgttgactaagga

SEQ ID NO: 4139743 - DNA, 25 bp, Homo sapien
gatgatcaaacggtgaataatttgt

SEQ ID NO: 4139744 - DNA, 25 bp, Homo sapien
tgacagagcctaggaagtagaaaat

SEQ ID NO: 4139745 - DNA, 25 bp, Homo sapien
gaaaattgtgatgatcaaacggtga

SEQ ID NO: 4139746 - DNA, 25 bp, Homo sapien
taaaagttactcaatctgaatgcct

SEQ ID NO: 4139747 - DNA, 25 bp, Homo sapien
gaaactaaaaggctaatatgtctag

SEQ ID NO: 4139748 - DNA, 25 bp, Homo sapien
tatgtctaggacatataaaagccta

SEQ ID NO: 4139749 - DNA, 25 bp, Homo sapien
taaaagcctagagcttctgttggtc

SEQ ID NO: 4139750 - DNA, 25 bp, Homo sapien
aatggaagcaatggctctattttct

SEQ ID NO: 4139751 - DNA, 25 bp, Homo sapien
caattcgatttatctcatctttcga

SEQ ID NO: 4139752 - DNA, 25 bp, Homo sapien
tctcatctttcgaaaaaagtaatgg

SEQ ID NO: 4139753 - DNA, 25 bp, Homo sapien
aagtaatggaagcaatggctctatt

SEQ ID NO: 4139754 - DNA, 25 bp, Homo sapien
ctaatataaagccaatcactctcac

SEQ ID NO: 4139755 - DNA, 25 bp, Homo sapien
tccatctaatataaagccaatcact

SEQ ID NO: 4139756 - DNA, 25 bp, Homo sapien
tctccatctaatataaagccaatca

SEQ ID NO: 4139757 - DNA, 25 bp, Homo sapien
catctaatataaagccaatcactct

SEQ ID NO: 4139758 - DNA, 25 bp, Homo sapien
tgggactttgcaagaggtacagcag

SEQ ID NO: 4139759 - DNA, 25 bp, Homo sapien
tatgggactttgcaagaggtacagc

SEQ ID NO: 4139760 - DNA, 25 bp, Homo sapien
ctggttctaccttatgggactttgc

SEQ ID NO: 4139761 - DNA, 25 bp, Homo sapien
taccttatgggactttgcaagaggt

SEQ ID NO: 4139762 - DNA, 25 bp, Homo sapien
ttttggtgatctcataaggctgaag

SEQ ID NO: 4139763 - DNA, 25 bp, Homo sapien
agcatagaagtttgggtctgccaaa

SEQ ID NO: 4139764 - DNA, 25 bp, Homo sapien
catagaagtttgggtctgccaaagc

SEQ ID NO: 4139765 - DNA, 25 bp, Homo sapien
ttggtgatctcataaggctgaagag

SEQ ID NO: 4139766 - DNA, 25 bp, Homo sapien
cgtgcatgtaggcaagttgctttca

SEQ ID NO: 4139767 - DNA, 25 bp, Homo sapien
ggttggttttgaagacgtgcatgta

SEQ ID NO: 4139768 - DNA, 25 bp, Homo sapien
ttttgaagacgtgcatgtaggcaag

SEQ ID NO: 4139769 - DNA, 25 bp, Homo sapien
tggttttgttctgtaattggttcat

SEQ ID NO: 4139770 - DNA, 25 bp, Homo sapien
gaagatcctgcttcggcatagccta

SEQ ID NO: 4139771 - DNA, 25 bp, Homo sapien
tcagggacagctgcgttgtctgtac

SEQ ID NO: 4139772 - DNA, 25 bp, Homo sapien
ctgtacagcgttggagagaagatcc

SEQ ID NO: 4139773 - DNA, 25 bp, Homo sapien
gaaggctactctatagctgccacct

SEQ ID NO: 4139774 - DNA, 25 bp, Homo sapien
agcgcacaagtgcacctccaattca

SEQ ID NO: 4139775 - DNA, 25 bp, Homo sapien
ttttaagcgcacaagtgcacctcca

SEQ ID NO: 4139776 - DNA, 25 bp, Homo sapien
gctgcagttttaagcgcacaagtgc

SEQ ID NO: 4139777 - DNA, 25 bp, Homo sapien
catcagctgctgcagttttaagcgc

SEQ ID NO: 4139778 - DNA, 25 bp, Homo sapien
tcatgtcgtacatgaagagcactga

SEQ ID NO: 4139779 - DNA, 25 bp, Homo sapien
tggtcaaaagtagccttgttaaatg

SEQ ID NO: 4139780 - DNA, 25 bp, Homo sapien
agcagatgacttggtttggagcctc

SEQ ID NO: 4139781 - DNA, 25 bp, Homo sapien
ggatgatttcctgcctgtcatgtcg

SEQ ID NO: 4139782 - DNA, 25 bp, Homo sapien
ttgaggctgctttggatatagttta

SEQ ID NO: 4139783 - DNA, 25 bp, Homo sapien
ttggatatagtttatcccctgaatt

SEQ ID NO: 4139784 - DNA, 25 bp, Homo sapien
tagtttatcccctgaatttcctcca

SEQ ID NO: 4139785 - DNA, 25 bp, Homo sapien
tttgaggctgctttggatatagttt

SEQ ID NO: 4139786 - DNA, 25 bp, Homo sapien
gatatcattaggttgtcgaataaca

SEQ ID NO: 4139787 - DNA, 25 bp, Homo sapien
cattaggttgtcgaataacatcatt

SEQ ID NO: 4139788 - DNA, 25 bp, Homo sapien
ggttgtcgaataacatcattattca

SEQ ID NO: 4139789 - DNA, 25 bp, Homo sapien
tatcattaggttgtcgaataacatc

SEQ ID NO: 4139790 - DNA, 25 bp, Homo sapien
cttgacaaagacagatggattgaag

SEQ ID NO: 4139791 - DNA, 25 bp, Homo sapien
cttcttgacaaagacagatggattg

SEQ ID NO: 4139792 - DNA, 25 bp, Homo sapien
agacagatggattgaagctacacac

SEQ ID NO: 4139793 - DNA, 25 bp, Homo sapien
aagacagatggattgaagctacaca

SEQ ID NO: 4139794 - DNA, 25 bp, Homo sapien
caggtcttgtagaggctctgtagaa

SEQ ID NO: 4139795 - DNA, 25 bp, Homo sapien
ccccttcaactccttggtcactcat

SEQ ID NO: 4139796 - DNA, 25 bp, Homo sapien
cccaagggtccaggtcttgtagagg

SEQ ID NO: 4139797 - DNA, 25 bp, Homo sapien
aggctctgtagaaacagtgaatggg

SEQ ID NO: 4139798 - DNA, 25 bp, Homo sapien
tcaatttcttgcatttcacgtcccg

SEQ ID NO: 4139799 - DNA, 25 bp, Homo sapien
cataaatactgatattaatggtgtc

SEQ ID NO: 4139800 - DNA, 25 bp, Homo sapien
ttcacgtcccgtaaatgtatagatt

SEQ ID NO: 4139801 - DNA, 25 bp, Homo sapien
ccttcctggacgaattccctcaatt

SEQ ID NO: 4139802 - DNA, 25 bp, Homo sapien
aagaggtaggtgtgtgaaaaatgct

SEQ ID NO: 4139803 - DNA, 25 bp, Homo sapien
tcaggtagatgctgggccaactgag

SEQ ID NO: 4139804 - DNA, 25 bp, Homo sapien
gattgggtcatggaacaccggcaga

SEQ ID NO: 4139805 - DNA, 25 bp, Homo sapien
cctgtaaatgaccatgaatgtccga

SEQ ID NO: 4139806 - DNA, 25 bp, Homo sapien
gaggcaggcaccactaggttgctca

SEQ ID NO: 4139807 - DNA, 25 bp, Homo sapien
tttgaagaagcccagaagcaccaac

SEQ ID NO: 4139808 - DNA, 25 bp, Homo sapien
cctttgaagaagcccagaagcacca

SEQ ID NO: 4139809 - DNA, 25 bp, Homo sapien
ttcggtagccctttgaagaagccca

SEQ ID NO: 4139810 - DNA, 25 bp, Homo sapien
gccctttgaagaagcccagaagcac

SEQ ID NO: 4139811 - DNA, 25 bp, Homo sapien
aagaagtcactgaagaggagtagtg

SEQ ID NO: 4139812 - DNA, 25 bp, Homo sapien
gcaagaagtcactgaagaggagtag

SEQ ID NO: 4139813 - DNA, 25 bp, Homo sapien
gagcaagaagtcactgaagaggagt

SEQ ID NO: 4139814 - DNA, 25 bp, Homo sapien
caagaagtcactgaagaggagtagt

SEQ ID NO: 4139815 - DNA, 25 bp, Homo sapien
gcttgatgctacgaagctgtaggac

SEQ ID NO: 4139816 - DNA, 25 bp, Homo sapien
ggtactgtcatgatctgggagtgca

SEQ ID NO: 4139817 - DNA, 25 bp, Homo sapien
ggaataattactcccactgcctcaa

SEQ ID NO: 4139818 - DNA, 25 bp, Homo sapien
ggatgctttccacaaaatgacactg

SEQ ID NO: 4139819 - DNA, 25 bp, Homo sapien
tcctttgtccattacaattctgttt

SEQ ID NO: 4139820 - DNA, 25 bp, Homo sapien
tcatcctttgtccattacaattctg

SEQ ID NO: 4139821 - DNA, 25 bp, Homo sapien
catcctttgtccattacaattctgt

SEQ ID NO: 4139822 - DNA, 25 bp, Homo sapien
gtttacaagcgtgtgagtgtaggga

SEQ ID NO: 4139823 - DNA, 25 bp, Homo sapien
tttggccaacatctcatcaagccct

SEQ ID NO: 4139824 - DNA, 25 bp, Homo sapien
cagaactgtccttcgctcttgtgaa

SEQ ID NO: 4139825 - DNA, 25 bp, Homo sapien
ggacatgtcgttcagatttggccaa

SEQ ID NO: 4139826 - DNA, 25 bp, Homo sapien
ttagacttcaactgtgaggacatgt

SEQ ID NO: 4139827 - DNA, 25 bp, Homo sapien
tggagccctggataatgctgttctg

SEQ ID NO: 4139828 - DNA, 25 bp, Homo sapien
cctggataatgctgttctgtaaaac

SEQ ID NO: 4139829 - DNA, 25 bp, Homo sapien
cttgaatggagccctggataatgct

SEQ ID NO: 4139830 - DNA, 25 bp, Homo sapien
agccctggataatgctgttctgtaa

SEQ ID NO: 4139831 - DNA, 25 bp, Homo sapien
tcagggtgttgctattccaaaaccc

SEQ ID NO: 4139832 - DNA, 25 bp, Homo sapien
ttcagggtgttgctattccaaaacc

SEQ ID NO: 4139833 - DNA, 25 bp, Homo sapien
ccttcagggtgttgctattccaaaa

SEQ ID NO: 4139834 - DNA, 25 bp, Homo sapien
cttcagggtgttgctattccaaaac

SEQ ID NO: 4139835 - DNA, 25 bp, Homo sapien
cttttttgactggaggtcggagctc

SEQ ID NO: 4139836 - DNA, 25 bp, Homo sapien
acttttttgactggaggtcggagct

SEQ ID NO: 4139837 - DNA, 25 bp, Homo sapien
gagatcaggatagtatgtcactgca

SEQ ID NO: 4139838 - DNA, 25 bp, Homo sapien
tcagtctccatatggcaagcaggcc

SEQ ID NO: 4139839 - DNA, 25 bp, Homo sapien
caagcaggccagataaggcctgcct

SEQ ID NO: 4139840 - DNA, 25 bp, Homo sapien
ttttcaacctcaaacagaaagagga

SEQ ID NO: 4139841 - DNA, 25 bp, Homo sapien
gtaaaggaccggctctattctgtcc

SEQ ID NO: 4139842 - DNA, 25 bp, Homo sapien
agtaaaggaccggctctattctgtc

SEQ ID NO: 4139843 - DNA, 25 bp, Homo sapien
taaaggaccggctctattctgtcct

SEQ ID NO: 4139844 - DNA, 25 bp, Homo sapien
aaagtaaaggaccggctctattctg

SEQ ID NO: 4139845 - DNA, 25 bp, Homo sapien
ttgggaaatgacagccctctgtgac

SEQ ID NO: 4139846 - DNA, 25 bp, Homo sapien
gctctggagaatgcctttgggaaat

SEQ ID NO: 4139847 - DNA, 25 bp, Homo sapien
gcttggaggctctggagaatgcctt

SEQ ID NO: 4139848 - DNA, 25 bp, Homo sapien
cagctgtgaggagcttggaggctct

SEQ ID NO: 4139849 - DNA, 25 bp, Homo sapien
gactgcatcagcagtttttctcaaa

SEQ ID NO: 4139850 - DNA, 25 bp, Homo sapien
cagactgcatcagcagtttttctca

SEQ ID NO: 4139851 - DNA, 25 bp, Homo sapien
actgcatcagcagtttttctcaaaa

SEQ ID NO: 4139852 - DNA, 25 bp, Homo sapien
tctcataggcaagaaccaggtgccc

SEQ ID NO: 4139853 - DNA, 25 bp, Homo sapien
tcataggcaagaaccaggtgcccca

SEQ ID NO: 4139854 - DNA, 25 bp, Homo sapien
ataggcaagaaccaggtgccccatt

SEQ ID NO: 4139855 - DNA, 25 bp, Homo sapien
ctctcataggcaagaaccaggtgcc

SEQ ID NO: 4139856 - DNA, 25 bp, Homo sapien
gatggttaaccggtgtgttcctgaa

SEQ ID NO: 4139857 - DNA, 25 bp, Homo sapien
cattgaccttgagagaagccttctg

SEQ ID NO: 4139858 - DNA, 25 bp, Homo sapien
tactcgttgtatagcacagtgcctg

SEQ ID NO: 4139859 - DNA, 25 bp, Homo sapien
ttcctgaagacacgccgaaacgagg

SEQ ID NO: 4139860 - DNA, 25 bp, Homo sapien
gagcggatgtccctctggaactatc

SEQ ID NO: 4139861 - DNA, 25 bp, Homo sapien
tatcagacaagttcaacgctaccag

SEQ ID NO: 4139862 - DNA, 25 bp, Homo sapien
aaagagattaattggaagcctcgcc

SEQ ID NO: 4139863 - DNA, 25 bp, Homo sapien
gatcctcccctgtctagagtcactg

SEQ ID NO: 4139864 - DNA, 25 bp, Homo sapien
ccccactgttttcttcgacattgct

SEQ ID NO: 4139865 - DNA, 25 bp, Homo sapien
tttcttcgacattgctgtcaatagc

SEQ ID NO: 4139866 - DNA, 25 bp, Homo sapien
actgttttcttcgacattgctgtca

SEQ ID NO: 4139867 - DNA, 25 bp, Homo sapien
gacattgctgtcaatagcgagccct

SEQ ID NO: 4139868 - DNA, 25 bp, Homo sapien
atctcctggaagacagttctagagc

SEQ ID NO: 4139869 - DNA, 25 bp, Homo sapien
gacagaacagtaattggcacttcca

SEQ ID NO: 4139870 - DNA, 25 bp, Homo sapien
taccttgtaggcagaacttttggct

SEQ ID NO: 4139871 - DNA, 25 bp, Homo sapien
gatgggttccctctgattactgaca

SEQ ID NO: 4139872 - DNA, 25 bp, Homo sapien
ccgaacccatgtaaggaatgaatga

SEQ ID NO: 4139873 - DNA, 25 bp, Homo sapien
gtgactgattggcagacactgagct

SEQ ID NO: 4139874 - DNA, 25 bp, Homo sapien
tccagtgtgactgattggcagacac

SEQ ID NO: 4139875 - DNA, 25 bp, Homo sapien
actgtaggttaataatgatcgtccg

SEQ ID NO: 4139876 - DNA, 25 bp, Homo sapien
gaatgcacaattgattctccccttt

SEQ ID NO: 4139877 - DNA, 25 bp, Homo sapien
tgctgctgcacagaagccttagttt

SEQ ID NO: 4139878 - DNA, 25 bp, Homo sapien
gagctccctgtgaaaaatcgaatgc

SEQ ID NO: 4139879 - DNA, 25 bp, Homo sapien
gaagccttagtttcatgagctccct

SEQ ID NO: 4139880 - DNA, 25 bp, Homo sapien
gaactgtcccagagtttatgtctga

SEQ ID NO: 4139881 - DNA, 25 bp, Homo sapien
tgaatttgttctgatgtaaggaacc

SEQ ID NO: 4139882 - DNA, 25 bp, Homo sapien
tatgtctgaatttgttctgatgtaa

SEQ ID NO: 4139883 - DNA, 25 bp, Homo sapien
aactgtcccagagtttatgtctgaa

SEQ ID NO: 4139884 - DNA, 25 bp, Homo sapien
aattaacatccaaatgagtggatcc

SEQ ID NO: 4139885 - DNA, 25 bp, Homo sapien
aaatgagtggatccgccctctgctc

SEQ ID NO: 4139886 - DNA, 25 bp, Homo sapien
ggatgtgagattattgaattccaga

SEQ ID NO: 4139887 - DNA, 25 bp, Homo sapien
gaatgtttctgttacccgccagagg

SEQ ID NO: 4139888 - DNA, 25 bp, Homo sapien
gagttcccacaagaggtacttcaga

SEQ ID NO: 4139889 - DNA, 25 bp, Homo sapien
tttcatctgtatcttgtgagttccc

SEQ ID NO: 4139890 - DNA, 25 bp, Homo sapien
catctgtatcttgtgagttcccaca

SEQ ID NO: 4139891 - DNA, 25 bp, Homo sapien
cccacaagaggtacttcagagttta

SEQ ID NO: 4139892 - DNA, 25 bp, Homo sapien
gcagcctggagcttgatcatgccca

SEQ ID NO: 4139893 - DNA, 25 bp, Homo sapien
gacgaattgcagactcatcaggctt

SEQ ID NO: 4139894 - DNA, 25 bp, Homo sapien
cagcacttttgtgtggtgaagcact

SEQ ID NO: 4139895 - DNA, 25 bp, Homo sapien
catcaggcttttcgtttggcatcgt

SEQ ID NO: 4139896 - DNA, 25 bp, Homo sapien
ctctttggtgaatttgttgcttctc

SEQ ID NO: 4139897 - DNA, 25 bp, Homo sapien
tctttttaccttatgacatccattc

SEQ ID NO: 4139898 - DNA, 25 bp, Homo sapien
gccttcttgtttcaatctcccggta

SEQ ID NO: 4139899 - DNA, 25 bp, Homo sapien
ttcaatctcccggtaactgccattc

SEQ ID NO: 4139900 - DNA, 25 bp, Homo sapien
tttttctatgagcttcaaatcttgc

SEQ ID NO: 4139901 - DNA, 25 bp, Homo sapien
ccgttggcctgcactagtcacatgg

SEQ ID NO: 4139902 - DNA, 25 bp, Homo sapien
tcgtagcccgttggcctgcactagt

SEQ ID NO: 4139903 - DNA, 25 bp, Homo sapien
tgtttcctcgtagcccgttggcctg

SEQ ID NO: 4139904 - DNA, 25 bp, Homo sapien
tctgtttcctcgtagcccgttggcc

SEQ ID NO: 4139905 - DNA, 25 bp, Homo sapien
tgcaggtcaggcggtatgccttgcc

SEQ ID NO: 4139906 - DNA, 25 bp, Homo sapien
caggtcaggcggtatgccttgccag

SEQ ID NO: 4139907 - DNA, 25 bp, Homo sapien
tgtgcaggtcaggcggtatgccttg

SEQ ID NO: 4139908 - DNA, 25 bp, Homo sapien
gtgtgcaggtcaggcggtatgcctt

SEQ ID NO: 4139909 - DNA, 25 bp, Homo sapien
gcctggattgggcactcctctgagt

SEQ ID NO: 4139910 - DNA, 25 bp, Homo sapien
gcagaaatctttgtcaatcattgta

SEQ ID NO: 4139911 - DNA, 25 bp, Homo sapien
cagtgccagtgctaatctgctgttg

SEQ ID NO: 4139912 - DNA, 25 bp, Homo sapien
ttttaagaacctgtcagcagtgcca

SEQ ID NO: 4139913 - DNA, 25 bp, Homo sapien
tcagttaggagaatcgatggtaggt

SEQ ID NO: 4139914 - DNA, 25 bp, Homo sapien
aagtgatttactaccattggtgtcc

SEQ ID NO: 4139915 - DNA, 25 bp, Homo sapien
gagagctagcaataggatatgtact

SEQ ID NO: 4139916 - DNA, 25 bp, Homo sapien
tgtagaagaccttaagcttccctaa

SEQ ID NO: 4139917 - DNA, 25 bp, Homo sapien
agcatgtcatttgggtgcagcatct

SEQ ID NO: 4139918 - DNA, 25 bp, Homo sapien
aagcatgtcatttgggtgcagcatc

SEQ ID NO: 4139919 - DNA, 25 bp, Homo sapien
aataaagcatgtcatttgggtgcag

SEQ ID NO: 4139920 - DNA, 25 bp, Homo sapien
taaagcatgtcatttgggtgcagca

SEQ ID NO: 4139921 - DNA, 25 bp, Homo sapien
cttccaatggctgcttcggcaatgg

SEQ ID NO: 4139922 - DNA, 25 bp, Homo sapien
caggaccaattggagctgctggctt

SEQ ID NO: 4139923 - DNA, 25 bp, Homo sapien
caatggctgcttcggcaatggtctt

SEQ ID NO: 4139924 - DNA, 25 bp, Homo sapien
caatggtctttgcaggaccaattgg

SEQ ID NO: 4139925 - DNA, 25 bp, Homo sapien
ctttgaggggaaaatggcagggagg

SEQ ID NO: 4139926 - DNA, 25 bp, Homo sapien
aatggcagggaggagctagctggca

SEQ ID NO: 4139927 - DNA, 25 bp, Homo sapien
aaaatggcagggaggagctagctgg

SEQ ID NO: 4139928 - DNA, 25 bp, Homo sapien
ggggaaaatggcagggaggagctag

SEQ ID NO: 4139929 - DNA, 25 bp, Homo sapien
caaaaatcgcattgctcccctctcc

SEQ ID NO: 4139930 - DNA, 25 bp, Homo sapien
aaaaatcgcattgctcccctctccc

SEQ ID NO: 4139931 - DNA, 25 bp, Homo sapien
tggctgagttggcattcagcgagaa

SEQ ID NO: 4139932 - DNA, 25 bp, Homo sapien
gcattcagcgagaaactgggtcctt

SEQ ID NO: 4139933 - DNA, 25 bp, Homo sapien
agaaggcttggcctgttcggtgcca

SEQ ID NO: 4139934 - DNA, 25 bp, Homo sapien
cctgttcggtgccagctggctgagt

SEQ ID NO: 4139935 - DNA, 25 bp, Homo sapien
agaaatcagcttgtctataaattct

SEQ ID NO: 4139936 - DNA, 25 bp, Homo sapien
ctccaccagcatccaaaagggggga

SEQ ID NO: 4139937 - DNA, 25 bp, Homo sapien
aatccacagaaatcagcttgtctat

SEQ ID NO: 4139938 - DNA, 25 bp, Homo sapien
tccaccagcatccaaaaggggggaa

SEQ ID NO: 4139939 - DNA, 25 bp, Homo sapien
cgattaccatgcacacagtatatgc

SEQ ID NO: 4139940 - DNA, 25 bp, Homo sapien
aatgagcaaactgtcagcttgccga

SEQ ID NO: 4139941 - DNA, 25 bp, Homo sapien
ggttgtcaaactgcttaattgaaaa

SEQ ID NO: 4139942 - DNA, 25 bp, Homo sapien
aatcatgcactgtgggtttcttcag

SEQ ID NO: 4139943 - DNA, 25 bp, Homo sapien
ggctgcttccggtgttctggtgttc

SEQ ID NO: 4139944 - DNA, 25 bp, Homo sapien
gaactgaaattcagccctccacgct

SEQ ID NO: 4139945 - DNA, 25 bp, Homo sapien
tccaaatgacagatggttccctctg

SEQ ID NO: 4139946 - DNA, 25 bp, Homo sapien
cctctgcgggctgaactgaaattca

SEQ ID NO: 4139947 - DNA, 25 bp, Homo sapien
gtttactttgtgtgttcctgtgtcc

SEQ ID NO: 4139948 - DNA, 25 bp, Homo sapien
ggtttactttgtgtgttcctgtgtc

SEQ ID NO: 4139949 - DNA, 25 bp, Homo sapien
tggtttactttgtgtgttcctgtgt

SEQ ID NO: 4139950 - DNA, 25 bp, Homo sapien
ctgtttggttattgggctgctttac

SEQ ID NO: 4139951 - DNA, 25 bp, Homo sapien
tggttattgggctgctttacaatga

SEQ ID NO: 4139952 - DNA, 25 bp, Homo sapien
gttattgggctgctttacaatgaaa

SEQ ID NO: 4139953 - DNA, 25 bp, Homo sapien
tcttttggtttatgtggtgcttctg

SEQ ID NO: 4139954 - DNA, 25 bp, Homo sapien
ttaaattgatttctccgattcccga

SEQ ID NO: 4139955 - DNA, 25 bp, Homo sapien
tatcgataatgtaggtgtcttccaa

SEQ ID NO: 4139956 - DNA, 25 bp, Homo sapien
gattcccgatagttagccagatagg

SEQ ID NO: 4139957 - DNA, 25 bp, Homo sapien
gccagataggccatattatagcttt

SEQ ID NO: 4139958 - DNA, 25 bp, Homo sapien
aatcacaatcttatgttctgagttt

SEQ ID NO: 4139959 - DNA, 25 bp, Homo sapien
taatcacaatcttatgttctgagtt

SEQ ID NO: 4139960 - DNA, 25 bp, Homo sapien
tcacaatcttatgttctgagtttct

SEQ ID NO: 4139961 - DNA, 25 bp, Homo sapien
atcacaatcttatgttctgagtttc

SEQ ID NO: 4139962 - DNA, 25 bp, Homo sapien
catacgtttttcagcttcaactcgt

SEQ ID NO: 4139963 - DNA, 25 bp, Homo sapien
taaaaacatacgtttttcagcttca

SEQ ID NO: 4139964 - DNA, 25 bp, Homo sapien
tacgtttttcagcttcaactcgttc

SEQ ID NO: 4139965 - DNA, 25 bp, Homo sapien
aaacatacgtttttcagcttcaact

SEQ ID NO: 4139966 - DNA, 25 bp, Homo sapien
ctgatgtatctctttcttgctggtt

SEQ ID NO: 4139967 - DNA, 25 bp, Homo sapien
tctctttcttgctggtttctattga

SEQ ID NO: 4139968 - DNA, 25 bp, Homo sapien
gatgtatctctttcttgctggtttc

SEQ ID NO: 4139969 - DNA, 25 bp, Homo sapien
ttcttgctggtttctattgaaattg

SEQ ID NO: 4139970 - DNA, 25 bp, Homo sapien
ttgggaatggtctccttgtcttcca

SEQ ID NO: 4139971 - DNA, 25 bp, Homo sapien
ggtctccttgtcttccacatcaaat

SEQ ID NO: 4139972 - DNA, 25 bp, Homo sapien
ctccttgtcttccacatcaaataat

SEQ ID NO: 4139973 - DNA, 25 bp, Homo sapien
gttgggaatggtctccttgtcttcc

SEQ ID NO: 4139974 - DNA, 25 bp, Homo sapien
tgatggcctctgaacgttttccatc

SEQ ID NO: 4139975 - DNA, 25 bp, Homo sapien
gatggcctctgaacgttttccatca

SEQ ID NO: 4139976 - DNA, 25 bp, Homo sapien
agaagcaactttatctgcctcgaat

SEQ ID NO: 4139977 - DNA, 25 bp, Homo sapien
gcaactttatctgcctcgaatgcat

SEQ ID NO: 4139978 - DNA, 25 bp, Homo sapien
gaagcaactttatctgcctcgaatg

SEQ ID NO: 4139979 - DNA, 25 bp, Homo sapien
actttatctgcctcgaatgcattac

SEQ ID NO: 4139980 - DNA, 25 bp, Homo sapien
gaaaccctgaagtaggctaactgct

SEQ ID NO: 4139981 - DNA, 25 bp, Homo sapien
gctgggactacacaaactagctttt

SEQ ID NO: 4139982 - DNA, 25 bp, Homo sapien
tcatggctactggagaggttactac

SEQ ID NO: 4139983 - DNA, 25 bp, Homo sapien
atcggaggcgattttgcaggtgaca

SEQ ID NO: 4139984 - DNA, 25 bp, Homo sapien
gctgttgcactttctatacatcgaa

SEQ ID NO: 4139985 - DNA, 25 bp, Homo sapien
tctaaatattgtaaagggctttgct

SEQ ID NO: 4139986 - DNA, 25 bp, Homo sapien
ctaaatattgtaaagggctttgctg

SEQ ID NO: 4139987 - DNA, 25 bp, Homo sapien
tctatacatcgaagtttatctaaat

SEQ ID NO: 4139988 - DNA, 25 bp, Homo sapien
cctgcatgctgaacaagcacaatga

SEQ ID NO: 4139989 - DNA, 25 bp, Homo sapien
taacctaaatttgataactttcatg

SEQ ID NO: 4139990 - DNA, 25 bp, Homo sapien
gttttcactcgaataactatggatg

SEQ ID NO: 4139991 - DNA, 25 bp, Homo sapien
cattaaattaaaggtccctgcatgc

SEQ ID NO: 4139992 - DNA, 25 bp, Homo sapien
tgctggctttgaatgactcttctgt

SEQ ID NO: 4139993 - DNA, 25 bp, Homo sapien
gctggctttgaatgactcttctgtg

SEQ ID NO: 4139994 - DNA, 25 bp, Homo sapien
ctggctttgaatgactcttctgtgt

SEQ ID NO: 4139995 - DNA, 25 bp, Homo sapien
ttgctggctttgaatgactcttctg

SEQ ID NO: 4139996 - DNA, 25 bp, Homo sapien
gaaaatgactaattgaaactgctta

SEQ ID NO: 4139997 - DNA, 25 bp, Homo sapien
cgagaatgctggaacgatgggttcc

SEQ ID NO: 4139998 - DNA, 25 bp, Homo sapien
aaactgcttattgatataatagagc

SEQ ID NO: 4139999 - DNA, 25 bp, Homo sapien
agcaggttgtgacacttggcgagaa

SEQ ID NO: 4140000 - DNA, 25 bp, Homo sapien
tctgtttcagcagcggaattctctg

SEQ ID NO: 4140001 - DNA, 25 bp, Homo sapien
gcagtttttctagtaagtgtaagga

SEQ ID NO: 4140002 - DNA, 25 bp, Homo sapien
gtgtaaggaatgaacatttcacttt

SEQ ID NO: 4140003 - DNA, 25 bp, Homo sapien
gacaaagggaaggtctgatcatatt

SEQ ID NO: 4140004 - DNA, 25 bp, Homo sapien
taatatggagtttcgtttacaaaca

SEQ ID NO: 4140005 - DNA, 25 bp, Homo sapien
gaggcgatttgaccgcttcattttc

SEQ ID NO: 4140006 - DNA, 25 bp, Homo sapien
cttctgaggcgatttgaccgcttca

SEQ ID NO: 4140007 - DNA, 25 bp, Homo sapien
ggtggaagccggaagcttctgaggc

SEQ ID NO: 4140008 - DNA, 25 bp, Homo sapien
atcagattctaggtgattgctcctg

SEQ ID NO: 4140009 - DNA, 25 bp, Homo sapien
cgtcagttactccttagggacagaa

SEQ ID NO: 4140010 - DNA, 25 bp, Homo sapien
cagattctaggtgattgctcctgcc

SEQ ID NO: 4140011 - DNA, 25 bp, Homo sapien
cttctttcttcagctacgtcagtta

SEQ ID NO: 4140012 - DNA, 25 bp, Homo sapien
atgtatcatgccgatcaaatgctgg

SEQ ID NO: 4140013 - DNA, 25 bp, Homo sapien
taaaactaggagacttgagatgcaa

SEQ ID NO: 4140014 - DNA, 25 bp, Homo sapien
tatactcagttctataaagagcagc

SEQ ID NO: 4140015 - DNA, 25 bp, Homo sapien
taaggttctcaaggctgtcttccat

SEQ ID NO: 4140016 - DNA, 25 bp, Homo sapien
tgatcactcctatggcacttcagca

SEQ ID NO: 4140017 - DNA, 25 bp, Homo sapien
gaaccgtgatcactcctatggcact

SEQ ID NO: 4140018 - DNA, 25 bp, Homo sapien
agtgaaccgtgatcactcctatggc

SEQ ID NO: 4140019 - DNA, 25 bp, Homo sapien
cactcctatggcacttcagcaagac

SEQ ID NO: 4140020 - DNA, 25 bp, Homo sapien
gacaagcccaggaatcattaacgat

SEQ ID NO: 4140021 - DNA, 25 bp, Homo sapien
tcctttgttctgctcaatgcgtggg

SEQ ID NO: 4140022 - DNA, 25 bp, Homo sapien
gatatctttagtaacgagctgctcc

SEQ ID NO: 4140023 - DNA, 25 bp, Homo sapien
taaataacaagctgccactttggca

SEQ ID NO: 4140024 - DNA, 25 bp, Homo sapien
tgtgcggcttgcttgctaggacact

SEQ ID NO: 4140025 - DNA, 25 bp, Homo sapien
ctgtgcggcttgcttgctaggacac

SEQ ID NO: 4140026 - DNA, 25 bp, Homo sapien
cggcttgcttgctaggacacttgca

SEQ ID NO: 4140027 - DNA, 25 bp, Homo sapien
tgcggcttgcttgctaggacacttg

SEQ ID NO: 4140028 - DNA, 25 bp, Homo sapien
acctgtagtcgcagcaactgtgttc

SEQ ID NO: 4140029 - DNA, 25 bp, Homo sapien
ctttgaaacattctgcataacatcc

SEQ ID NO: 4140030 - DNA, 25 bp, Homo sapien
cacgtgtctcctgtaaaaagtcctt

SEQ ID NO: 4140031 - DNA, 25 bp, Homo sapien
tcacgtgtctcctgtaaaaagtcct

SEQ ID NO: 4140032 - DNA, 25 bp, Homo sapien
tttgaaacattctgcataacatcca

SEQ ID NO: 4140033 - DNA, 25 bp, Homo sapien
cagaatagtctgtgtttgataggca

SEQ ID NO: 4140034 - DNA, 25 bp, Homo sapien
tctgtgtttgataggcacgaactac

SEQ ID NO: 4140035 - DNA, 25 bp, Homo sapien
gataggcacgaactacaacaaaaac

SEQ ID NO: 4140036 - DNA, 25 bp, Homo sapien
gtttgataggcacgaactacaacaa

SEQ ID NO: 4140037 - DNA, 25 bp, Homo sapien
gtcactattgactcctctcgtatct

SEQ ID NO: 4140038 - DNA, 25 bp, Homo sapien
agtagtgctgtcactattgactcct

SEQ ID NO: 4140039 - DNA, 25 bp, Homo sapien
gtgctgtcactattgactcctctcg

SEQ ID NO: 4140040 - DNA, 25 bp, Homo sapien
tttttctctttagccacttctgtgt

SEQ ID NO: 4140041 - DNA, 25 bp, Homo sapien
gaataaatctcaggcgatggcgctc

SEQ ID NO: 4140042 - DNA, 25 bp, Homo sapien
ggctacagtgacctacagttcatag

SEQ ID NO: 4140043 - DNA, 25 bp, Homo sapien
cagaattctggctggatcacagttg

SEQ ID NO: 4140044 - DNA, 25 bp, Homo sapien
tcttagtgaacacaggccttgaagc

SEQ ID NO: 4140045 - DNA, 25 bp, Homo sapien
gcagttagttcccaatgacccaaca

SEQ ID NO: 4140046 - DNA, 25 bp, Homo sapien
gagcatctgagcagttagttcccaa

SEQ ID NO: 4140047 - DNA, 25 bp, Homo sapien
tctgagcagttagttcccaatgacc

SEQ ID NO: 4140048 - DNA, 25 bp, Homo sapien
gccatgagcatctgagcagttagtt

SEQ ID NO: 4140049 - DNA, 25 bp, Homo sapien
caagatgcataccagggcagagagg

SEQ ID NO: 4140050 - DNA, 25 bp, Homo sapien
gacatccagtgtccaagatgcatac

SEQ ID NO: 4140051 - DNA, 25 bp, Homo sapien
gtccaagatgcataccagggcagag

SEQ ID NO: 4140052 - DNA, 25 bp, Homo sapien
ccagtgtccaagatgcataccaggg

SEQ ID NO: 4140053 - DNA, 25 bp, Homo sapien
cattgacagccttccatctggagct

SEQ ID NO: 4140054 - DNA, 25 bp, Homo sapien
cagccaggctgtaagaacagtgact

SEQ ID NO: 4140055 - DNA, 25 bp, Homo sapien
gaacagtgactgattgacattgaca

SEQ ID NO: 4140056 - DNA, 25 bp, Homo sapien
taatctgtccgcatacatctgtgac

SEQ ID NO: 4140057 - DNA, 25 bp, Homo sapien
ccagagccttattgtttttgtcatc

SEQ ID NO: 4140058 - DNA, 25 bp, Homo sapien
ctccagagccttattgtttttgtca

SEQ ID NO: 4140059 - DNA, 25 bp, Homo sapien
cagagccttattgtttttgtcatca

SEQ ID NO: 4140060 - DNA, 25 bp, Homo sapien
tccagagccttattgtttttgtcat

SEQ ID NO: 4140061 - DNA, 25 bp, Homo sapien
gttccatagtaatgcacagtcaagc

SEQ ID NO: 4140062 - DNA, 25 bp, Homo sapien
aaggagattgaaaaggcccttgcgg

SEQ ID NO: 4140063 - DNA, 25 bp, Homo sapien
gacaggcttagaattgttccatagt

SEQ ID NO: 4140064 - DNA, 25 bp, Homo sapien
tctgtatcttatatgtaggtgagac

SEQ ID NO: 4140065 - DNA, 25 bp, Homo sapien
agaagaaaggtattcaggccaggct

SEQ ID NO: 4140066 - DNA, 25 bp, Homo sapien
ttaagtgagcgttgagccaggaatg

SEQ ID NO: 4140067 - DNA, 25 bp, Homo sapien
cttgtaatgaacttctctatagaac

SEQ ID NO: 4140068 - DNA, 25 bp, Homo sapien
tagaacaagatagcaaatctgttac

SEQ ID NO: 4140069 - DNA, 25 bp, Homo sapien
tactttctccagtaaccttgtcaat

SEQ ID NO: 4140070 - DNA, 25 bp, Homo sapien
taaccttgtcaatttgagctccatc

SEQ ID NO: 4140071 - DNA, 25 bp, Homo sapien
caatttgagctccatctatatcacc

SEQ ID NO: 4140072 - DNA, 25 bp, Homo sapien
gagctccatctatatcaccaaaatg

SEQ ID NO: 4140073 - DNA, 25 bp, Homo sapien
gatggccgaaagcaatgcagaaatc

SEQ ID NO: 4140074 - DNA, 25 bp, Homo sapien
caatgcagaaatcccatgtccccaa

SEQ ID NO: 4140075 - DNA, 25 bp, Homo sapien
agagctgcaatatcagatggccgaa

SEQ ID NO: 4140076 - DNA, 25 bp, Homo sapien
gctgcaatatcagatggccgaaagc

SEQ ID NO: 4140077 - DNA, 25 bp, Homo sapien
aaacgtgaaaaaccctgatgctggc

SEQ ID NO: 4140078 - DNA, 25 bp, Homo sapien
gtgaaaaaccctgatgctggcaaac

SEQ ID NO: 4140079 - DNA, 25 bp, Homo sapien
ttgtaaacgtgaaaaaccctgatgc

SEQ ID NO: 4140080 - DNA, 25 bp, Homo sapien
tgaaaaaccctgatgctggcaaaca

SEQ ID NO: 4140081 - DNA, 25 bp, Homo sapien
aggactctctagcaggtcagctttg

SEQ ID NO: 4140082 - DNA, 25 bp, Homo sapien
ctggaggactctctagcaggtcagc

SEQ ID NO: 4140083 - DNA, 25 bp, Homo sapien
cgtgctccttgctgtgagtcatccc

SEQ ID NO: 4140084 - DNA, 25 bp, Homo sapien
tcaaaaattttgatcccgtgctcct

SEQ ID NO: 4140085 - DNA, 25 bp, Homo sapien
tgactgactgatgcattcaatacta

SEQ ID NO: 4140086 - DNA, 25 bp, Homo sapien
tcaatactattgatcttctgtaata

SEQ ID NO: 4140087 - DNA, 25 bp, Homo sapien
ttctgtaatatgctaggaatgtgct

SEQ ID NO: 4140088 - DNA, 25 bp, Homo sapien
tgctgtgtgaggtacaaggaacatg

SEQ ID NO: 4140089 - DNA, 25 bp, Homo sapien
tgggaaggcattatagaatcctggc

SEQ ID NO: 4140090 - DNA, 25 bp, Homo sapien
ctgccccagggatgtcatgattgat

SEQ ID NO: 4140091 - DNA, 25 bp, Homo sapien
accagggtgcctttgatggttgtca

SEQ ID NO: 4140092 - DNA, 25 bp, Homo sapien
tgtctggaatctaactgcaatccac

SEQ ID NO: 4140093 - DNA, 25 bp, Homo sapien
ggtagtcctgttgtatctgtgcaaa

SEQ ID NO: 4140094 - DNA, 25 bp, Homo sapien
cctgaactttagtccactctggtca

SEQ ID NO: 4140095 - DNA, 25 bp, Homo sapien
ggattttcgctgtggcttcaaggcc

SEQ ID NO: 4140096 - DNA, 25 bp, Homo sapien
tgagaggcttcttgtccatgcattg

SEQ ID NO: 4140097 - DNA, 25 bp, Homo sapien
aataaccaattccttaacgtggcag

SEQ ID NO: 4140098 - DNA, 25 bp, Homo sapien
caataatttgtctgcagtaacagct

SEQ ID NO: 4140099 - DNA, 25 bp, Homo sapien
tcaccgatatgcaggaaaaggtttt

SEQ ID NO: 4140100 - DNA, 25 bp, Homo sapien
gaatgcacagactctttcctaggta

SEQ ID NO: 4140101 - DNA, 25 bp, Homo sapien
tccttggactgacttgcatgttcca

SEQ ID NO: 4140102 - DNA, 25 bp, Homo sapien
tgttccagtcagcaggggtttggta

SEQ ID NO: 4140103 - DNA, 25 bp, Homo sapien
acagtggtggccctgcatccttgga

SEQ ID NO: 4140104 - DNA, 25 bp, Homo sapien
ggtttggtaaggtactgacagtcac

SEQ ID NO: 4140105 - DNA, 25 bp, Homo sapien
ttgttctgcccctgtgattatgcca

SEQ ID NO: 4140106 - DNA, 25 bp, Homo sapien
ccctgtgattatgccagccatgaag

SEQ ID NO: 4140107 - DNA, 25 bp, Homo sapien
aagatgaactttggtctgctctgag

SEQ ID NO: 4140108 - DNA, 25 bp, Homo sapien
gaactttggtctgctctgagtttcc

SEQ ID NO: 4140109 - DNA, 25 bp, Homo sapien
tactcatgaatatatccggtttttc

SEQ ID NO: 4140110 - DNA, 25 bp, Homo sapien
cactcgggctttagtagaaagggca

SEQ ID NO: 4140111 - DNA, 25 bp, Homo sapien
cattccaatttgttgatcccatgga

SEQ ID NO: 4140112 - DNA, 25 bp, Homo sapien
ggaaaaaagttctatgctgtaagag

SEQ ID NO: 4140113 - DNA, 25 bp, Homo sapien
ggtactccacctcgtggcgtgccat

SEQ ID NO: 4140114 - DNA, 25 bp, Homo sapien
cttgtttctcgtcgggcaggtactc

SEQ ID NO: 4140115 - DNA, 25 bp, Homo sapien
agcctgcggcctgaggccttggccg

SEQ ID NO: 4140116 - DNA, 25 bp, Homo sapien
tgggagttgcagtcccgcctcttgt

SEQ ID NO: 4140117 - DNA, 25 bp, Homo sapien
gggggaaggcgtggctgtgagtgca

SEQ ID NO: 4140118 - DNA, 25 bp, Homo sapien
cctgctgaccctgaagagagcagcg

SEQ ID NO: 4140119 - DNA, 25 bp, Homo sapien
catctggcgggtgccactttgggat

SEQ ID NO: 4140120 - DNA, 25 bp, Homo sapien
gcaaactccagcagattggcagcag

SEQ ID NO: 4140121 - DNA, 25 bp, Homo sapien
cacagttttggtgctggtagagcag

SEQ ID NO: 4140122 - DNA, 25 bp, Homo sapien
tcgttctcaggctaacatctccagt

SEQ ID NO: 4140123 - DNA, 25 bp, Homo sapien
caaagtagaccttcacacgtttgag

SEQ ID NO: 4140124 - DNA, 25 bp, Homo sapien
gctgatctggctttaggtccggaga

SEQ ID NO: 4140125 - DNA, 25 bp, Homo sapien
cattatgtcagctaggatggctttc

SEQ ID NO: 4140126 - DNA, 25 bp, Homo sapien
tgtttgagggtcacattatgtcagc

SEQ ID NO: 4140127 - DNA, 25 bp, Homo sapien
ataaaggaagtgtttgagggtcaca

SEQ ID NO: 4140128 - DNA, 25 bp, Homo sapien
tgtcagctaggatggctttcattgt

SEQ ID NO: 4140129 - DNA, 25 bp, Homo sapien
tatctcagttcctcaacacataggc

SEQ ID NO: 4140130 - DNA, 25 bp, Homo sapien
tcatagctgttatgagacagaagtc

SEQ ID NO: 4140131 - DNA, 25 bp, Homo sapien
gaagtctgggcgcagcttagcctca

SEQ ID NO: 4140132 - DNA, 25 bp, Homo sapien
cataggctttaagtgtccgaacaca

SEQ ID NO: 4140133 - DNA, 25 bp, Homo sapien
atgaatacagctcaaactttctttc

SEQ ID NO: 4140134 - DNA, 25 bp, Homo sapien
tgaatacagctcaaactttctttca

SEQ ID NO: 4140135 - DNA, 25 bp, Homo sapien
tgagagcctgaactctttgagttcc

SEQ ID NO: 4140136 - DNA, 25 bp, Homo sapien
aggtttgagagcctgaactctttga

SEQ ID NO: 4140137 - DNA, 25 bp, Homo sapien
aggcaagtcaaagaggtttgagagc

SEQ ID NO: 4140138 - DNA, 25 bp, Homo sapien
ttagtttggatttgaaggcaagtca

SEQ ID NO: 4140139 - DNA, 25 bp, Homo sapien
tctcattggcttctagatgaccatc

SEQ ID NO: 4140140 - DNA, 25 bp, Homo sapien
gaggtaccatagcttaggatttcaa

SEQ ID NO: 4140141 - DNA, 25 bp, Homo sapien
cagaactagaaggatctagctccag

SEQ ID NO: 4140142 - DNA, 25 bp, Homo sapien
taccttgactacctctgtaaagatg

SEQ ID NO: 4140143 - DNA, 25 bp, Homo sapien
tgttttcctgaagatggatttcttc

SEQ ID NO: 4140144 - DNA, 25 bp, Homo sapien
gcttttgttttcctgaagatggatt

SEQ ID NO: 4140145 - DNA, 25 bp, Homo sapien
cttttgttttcctgaagatggattt

SEQ ID NO: 4140146 - DNA, 25 bp, Homo sapien
tttgttttcctgaagatggatttct

SEQ ID NO: 4140147 - DNA, 25 bp, Homo sapien
ggtaagacttaaatatcggtgttca

SEQ ID NO: 4140148 - DNA, 25 bp, Homo sapien
taaatatcggtgttcaccaactctc

SEQ ID NO: 4140149 - DNA, 25 bp, Homo sapien
ggtgttcaccaactctcttcttcat

SEQ ID NO: 4140150 - DNA, 25 bp, Homo sapien
agacttaaatatcggtgttcaccaa

SEQ ID NO: 4140151 - DNA, 25 bp, Homo sapien
gaaaacgtcattgatgcactgtgaa

SEQ ID NO: 4140152 - DNA, 25 bp, Homo sapien
cagctctttcgttttgggtcctcac

SEQ ID NO: 4140153 - DNA, 25 bp, Homo sapien
cactgtgaaattccgatagtcttgg

SEQ ID NO: 4140154 - DNA, 25 bp, Homo sapien
taaaagtgtgagctgggtgttttcc

SEQ ID NO: 4140155 - DNA, 25 bp, Homo sapien
cagccagttgttttgagggctttat

SEQ ID NO: 4140156 - DNA, 25 bp, Homo sapien
ggcaggtgtctcaattttctttgag

SEQ ID NO: 4140157 - DNA, 25 bp, Homo sapien
gactgattttcgctgcctcttggca

SEQ ID NO: 4140158 - DNA, 25 bp, Homo sapien
cctggttgaagtatgccacttttga

SEQ ID NO: 4140159 - DNA, 25 bp, Homo sapien
cttgagctgttgtagaagtgtaggt

SEQ ID NO: 4140160 - DNA, 25 bp, Homo sapien
gccttgagctgttgtagaagtgtag

SEQ ID NO: 4140161 - DNA, 25 bp, Homo sapien
agctgttgtagaagtgtaggtgtta

SEQ ID NO: 4140162 - DNA, 25 bp, Homo sapien
tgagctgttgtagaagtgtaggtgt

SEQ ID NO: 4140163 - DNA, 25 bp, Homo sapien
caccagtctctttattgtgacagtc

SEQ ID NO: 4140164 - DNA, 25 bp, Homo sapien
tgctaaactaacagaaatcagagac

SEQ ID NO: 4140165 - DNA, 25 bp, Homo sapien
catcctgcgatttagaaagaaagca

SEQ ID NO: 4140166 - DNA, 25 bp, Homo sapien
tccaccagtctctttattgtgacag

SEQ ID NO: 4140167 - DNA, 25 bp, Homo sapien
ttcttgagtagctacagtgtggtag

SEQ ID NO: 4140168 - DNA, 25 bp, Homo sapien
ggtaggcattgtacccacactttgt

SEQ ID NO: 4140169 - DNA, 25 bp, Homo sapien
ggcattgtacccacactttgtcatc

SEQ ID NO: 4140170 - DNA, 25 bp, Homo sapien
tgagtagctacagtgtggtaggcat

SEQ ID NO: 4140171 - DNA, 25 bp, Homo sapien
ggtagtaaccattcagttcttgaaa

SEQ ID NO: 4140172 - DNA, 25 bp, Homo sapien
taaccattcagttcttgaaagatgg

SEQ ID NO: 4140173 - DNA, 25 bp, Homo sapien
gatggtctggatgcagaacatcacc

SEQ ID NO: 4140174 - DNA, 25 bp, Homo sapien
cattcagttcttgaaagatggtctg

SEQ ID NO: 4140175 - DNA, 25 bp, Homo sapien
cagcacccagcaaccacttatgtgt

SEQ ID NO: 4140176 - DNA, 25 bp, Homo sapien
cacccagcaaccacttatgtgttct

SEQ ID NO: 4140177 - DNA, 25 bp, Homo sapien
taagccttgtatgtgtgtgattata

SEQ ID NO: 4140178 - DNA, 25 bp, Homo sapien
gtgattatataacagcacccagcaa

SEQ ID NO: 4140179 - DNA, 25 bp, Homo sapien
tttagctccaacactaaatcagcct

SEQ ID NO: 4140180 - DNA, 25 bp, Homo sapien
agcacagacagactaggcaggcctt

SEQ ID NO: 4140181 - DNA, 25 bp, Homo sapien
catttggatacttctgggcactgac

SEQ ID NO: 4140182 - DNA, 25 bp, Homo sapien
aagatgttagtccagtttgctccag

SEQ ID NO: 4140183 - DNA, 25 bp, Homo sapien
gaactaaattaactctgtcctgggc

SEQ ID NO: 4140184 - DNA, 25 bp, Homo sapien
tccgtgcttgcatagctgaagatat

SEQ ID NO: 4140185 - DNA, 25 bp, Homo sapien
caacagaggagaacatgaaatgcct

SEQ ID NO: 4140186 - DNA, 25 bp, Homo sapien
gtagtgctcacatcaaaggctatgg

SEQ ID NO: 4140187 - DNA, 25 bp, Homo sapien
ggatcatggcccaacagggaaatgt

SEQ ID NO: 4140188 - DNA, 25 bp, Homo sapien
cttcggggaataatgctgttaacca

SEQ ID NO: 4140189 - DNA, 25 bp, Homo sapien
cggggaataatgctgttaaccattt

SEQ ID NO: 4140190 - DNA, 25 bp, Homo sapien
tttggtgcccttcggggaataatgc

SEQ ID NO: 4140191 - DNA, 25 bp, Homo sapien
gtgcccttcggggaataatgctgtt

SEQ ID NO: 4140192 - DNA, 25 bp, Homo sapien
agctgcaaggggagtgtgggagcca

SEQ ID NO: 4140193 - DNA, 25 bp, Homo sapien
gctgcaaggggagtgtgggagccac

SEQ ID NO: 4140194 - DNA, 25 bp, Homo sapien
gagctgcaaggggagtgtgggagcc

SEQ ID NO: 4140195 - DNA, 25 bp, Homo sapien
ctcctctccaggaagttgcttcagc

SEQ ID NO: 4140196 - DNA, 25 bp, Homo sapien
acaagatttatctgggttttcagcc

SEQ ID NO: 4140197 - DNA, 25 bp, Homo sapien
taagacaagatttatctgggttttc

SEQ ID NO: 4140198 - DNA, 25 bp, Homo sapien
gttgcttcagctttttaagacaaga

SEQ ID NO: 4140199 - DNA, 25 bp, Homo sapien
ggctctgaggattcaagctctgact

SEQ ID NO: 4140200 - DNA, 25 bp, Homo sapien
tctgaggattcaagctctgactgct

SEQ ID NO: 4140201 - DNA, 25 bp, Homo sapien
tgaggattcaagctctgactgctca

SEQ ID NO: 4140202 - DNA, 25 bp, Homo sapien
aggattcaagctctgactgctcagc

SEQ ID NO: 4140203 - DNA, 25 bp, Homo sapien
tgatgatcatgacaatggcaacaac

SEQ ID NO: 4140204 - DNA, 25 bp, Homo sapien
tgacaatggcaacaacagggatgac

SEQ ID NO: 4140205 - DNA, 25 bp, Homo sapien
tgacaacaccagtccacgtaggcct

SEQ ID NO: 4140206 - DNA, 25 bp, Homo sapien
acagggatgacaacaccagtccacg

SEQ ID NO: 4140207 - DNA, 25 bp, Homo sapien
taggccccaaactgtttctagatat

SEQ ID NO: 4140208 - DNA, 25 bp, Homo sapien
catctggctgcattttaaattgatt

SEQ ID NO: 4140209 - DNA, 25 bp, Homo sapien
gccagtctgctttgtgggctatctg

SEQ ID NO: 4140210 - DNA, 25 bp, Homo sapien
catcagtgtctgtggtagaagtcaa

SEQ ID NO: 4140211 - DNA, 25 bp, Homo sapien
tgatcttctgaagataactcatcaa

SEQ ID NO: 4140212 - DNA, 25 bp, Homo sapien
atcttctgaagataactcatcaaag

SEQ ID NO: 4140213 - DNA, 25 bp, Homo sapien
gatcttctgaagataactcatcaaa

SEQ ID NO: 4140214 - DNA, 25 bp, Homo sapien
ttgctacaaagttcgttaacacttg

SEQ ID NO: 4140215 - DNA, 25 bp, Homo sapien
taaaaacacatcgttgaaatgccaa

SEQ ID NO: 4140216 - DNA, 25 bp, Homo sapien
ggtgcttatacccaaatagggtgaa

SEQ ID NO: 4140217 - DNA, 25 bp, Homo sapien
cgttaacacttgatgcacgaaatag

SEQ ID NO: 4140218 - DNA, 25 bp, Homo sapien
atggtgttgtgaacatctggtggtt

SEQ ID NO: 4140219 - DNA, 25 bp, Homo sapien
ccatcttatctaccctaggtttcag

SEQ ID NO: 4140220 - DNA, 25 bp, Homo sapien
taggtttcagctgggaacctctagg

SEQ ID NO: 4140221 - DNA, 25 bp, Homo sapien
caccagcagccgttcatctttcccc

SEQ ID NO: 4140222 - DNA, 25 bp, Homo sapien
gcatctctaatcctattgtagacaa

SEQ ID NO: 4140223 - DNA, 25 bp, Homo sapien
tcagggtagatggatatctcccctg

SEQ ID NO: 4140224 - DNA, 25 bp, Homo sapien
acttatgcttgaaataggcgattca

SEQ ID NO: 4140225 - DNA, 25 bp, Homo sapien
caaatatgatttgtttaaccagagc

SEQ ID NO: 4140226 - DNA, 25 bp, Homo sapien
cacaatttatattctttctctgggt

SEQ ID NO: 4140227 - DNA, 25 bp, Homo sapien
acaatttatattctttctctgggtc

SEQ ID NO: 4140228 - DNA, 25 bp, Homo sapien
tcacaatttatattctttctctggg

SEQ ID NO: 4140229 - DNA, 25 bp, Homo sapien
ggaaaaactgcagaagtccaaatca

SEQ ID NO: 4140230 - DNA, 25 bp, Homo sapien
tagaaaacaatgtggtaatctggtt

SEQ ID NO: 4140231 - DNA, 25 bp, Homo sapien
caagcctgaagtttagtatagtagt

SEQ ID NO: 4140232 - DNA, 25 bp, Homo sapien
tagtattgagtgtttagtacctatg

SEQ ID NO: 4140233 - DNA, 25 bp, Homo sapien
gatgtggatattgaggttatttaac

SEQ ID NO: 4140234 - DNA, 25 bp, Homo sapien
ttctaaaaatagagactatcactag

SEQ ID NO: 4140235 - DNA, 25 bp, Homo sapien
tagtaagctgaaagtagataagtag

SEQ ID NO: 4140236 - DNA, 25 bp, Homo sapien
tgagtttaactgcagattagagaac

SEQ ID NO: 4140237 - DNA, 25 bp, Homo sapien
cttggtcacttagatgccgtgagct

SEQ ID NO: 4140238 - DNA, 25 bp, Homo sapien
tggtcacttagatgccgtgagcttt

SEQ ID NO: 4140239 - DNA, 25 bp, Homo sapien
ggtcacttagatgccgtgagctttg

SEQ ID NO: 4140240 - DNA, 25 bp, Homo sapien
gtcacttagatgccgtgagctttga

SEQ ID NO: 4140241 - DNA, 25 bp, Homo sapien
aatgtttggtggttgggcagagcag

SEQ ID NO: 4140242 - DNA, 25 bp, Homo sapien
acatcaacacgtagagaaattcctt

SEQ ID NO: 4140243 - DNA, 25 bp, Homo sapien
ttttaagttgctgcccagtgggaat

SEQ ID NO: 4140244 - DNA, 25 bp, Homo sapien
tcttttaagttgctgcccagtggga

SEQ ID NO: 4140245 - DNA, 25 bp, Homo sapien
actgatttagcaggtattctgtctg

SEQ ID NO: 4140246 - DNA, 25 bp, Homo sapien
tatccccactccttctcaaattatg

SEQ ID NO: 4140247 - DNA, 25 bp, Homo sapien
tatgagaaatagcttcaatacagtc

SEQ ID NO: 4140248 - DNA, 25 bp, Homo sapien
atacagtccagagggactgatttag

SEQ ID NO: 4140249 - DNA, 25 bp, Homo sapien
tgccttaactctccatagtgctgtt

SEQ ID NO: 4140250 - DNA, 25 bp, Homo sapien
tctctgaggcctgccttaactctcc

SEQ ID NO: 4140251 - DNA, 25 bp, Homo sapien
tgtaaaaccagatcaaatgcccctc

SEQ ID NO: 4140252 - DNA, 25 bp, Homo sapien
cagaggaatgcctgttcatctgtaa

SEQ ID NO: 4140253 - DNA, 25 bp, Homo sapien
ttcccactctcccaccgcccacact

SEQ ID NO: 4140254 - DNA, 25 bp, Homo sapien
cacttcaaatcagtccgaattcccg

SEQ ID NO: 4140255 - DNA, 25 bp, Homo sapien
acacttcaaatcagtccgaattccc

SEQ ID NO: 4140256 - DNA, 25 bp, Homo sapien
cttcaaatcagtccgaattcccgtg

SEQ ID NO: 4140257 - DNA, 25 bp, Homo sapien
ctgaggaagagaaaaatcccatgac

SEQ ID NO: 4140258 - DNA, 25 bp, Homo sapien
actggaagtaatggatcccgctgcc

SEQ ID NO: 4140259 - DNA, 25 bp, Homo sapien
ggaagtaatggatcccgctgcctct

SEQ ID NO: 4140260 - DNA, 25 bp, Homo sapien
tggtgctgggaaagcggtgaactgg

SEQ ID NO: 4140261 - DNA, 25 bp, Homo sapien
ctgggaaagcggtgaactggaagta

SEQ ID NO: 4140262 - DNA, 25 bp, Homo sapien
taattgcaaagatccagggcgaggg

SEQ ID NO: 4140263 - DNA, 25 bp, Homo sapien
ggagacgcaggcataccaagaggtc

SEQ ID NO: 4140264 - DNA, 25 bp, Homo sapien
aactgactggagagtccacagaacc

SEQ ID NO: 4140265 - DNA, 25 bp, Homo sapien
cagaaccccgagattttttcacaga

SEQ ID NO: 4140266 - DNA, 25 bp, Homo sapien
atttctcttgtgaatgatgctgtga

SEQ ID NO: 4140267 - DNA, 25 bp, Homo sapien
tttctcttgtgaatgatgctgtgat

SEQ ID NO: 4140268 - DNA, 25 bp, Homo sapien
ttctcttgtgaatgatgctgtgatg

SEQ ID NO: 4140269 - DNA, 25 bp, Homo sapien
tgaaatgtgtaagccaaatcaccag

SEQ ID NO: 4140270 - DNA, 25 bp, Homo sapien
gtaatgtaacccgaatacttgtcta

SEQ ID NO: 4140271 - DNA, 25 bp, Homo sapien
ttacattcccataggtggtagcttg

SEQ ID NO: 4140272 - DNA, 25 bp, Homo sapien
taattcgaccaacttgtgaactgcc

SEQ ID NO: 4140273 - DNA, 25 bp, Homo sapien
ccatccaggagattgggcaaaaact

SEQ ID NO: 4140274 - DNA, 25 bp, Homo sapien
caagcaccatgtgagtggcaaggat

SEQ ID NO: 4140275 - DNA, 25 bp, Homo sapien
ggcataatttgtgatccatccagga

SEQ ID NO: 4140276 - DNA, 25 bp, Homo sapien
tatggatgcctaaagtgaccagcag

SEQ ID NO: 4140277 - DNA, 25 bp, Homo sapien
tcaacttcacgagtgtccgttccct

SEQ ID NO: 4140278 - DNA, 25 bp, Homo sapien
ttgaatagaccttcagttctgcttc

SEQ ID NO: 4140279 - DNA, 25 bp, Homo sapien
tctcagagggttgcccttcctcctc

SEQ ID NO: 4140280 - DNA, 25 bp, Homo sapien
gtgtccgttcccttaactttgctca

SEQ ID NO: 4140281 - DNA, 25 bp, Homo sapien
tctttcaactctgcatctatatcaa

SEQ ID NO: 4140282 - DNA, 25 bp, Homo sapien
cagtgagaggagtgataatgaggag

SEQ ID NO: 4140283 - DNA, 25 bp, Homo sapien
gcatctatatcaactccatgtgggt

SEQ ID NO: 4140284 - DNA, 25 bp, Homo sapien
gagtaaggattgtccagagccacct

SEQ ID NO: 4140285 - DNA, 25 bp, Homo sapien
gtctgataagctacttacttcttct

SEQ ID NO: 4140286 - DNA, 25 bp, Homo sapien
tgtctaatgtgtctgataagctact

SEQ ID NO: 4140287 - DNA, 25 bp, Homo sapien
tctatgtctaatgtgtctgataagc

SEQ ID NO: 4140288 - DNA, 25 bp, Homo sapien
taatgtgtctgataagctacttact

SEQ ID NO: 4140289 - DNA, 25 bp, Homo sapien
gaaagtcagggcatcaagaacctgc

SEQ ID NO: 4140290 - DNA, 25 bp, Homo sapien
agttcataagttatgttaacaggag

SEQ ID NO: 4140291 - DNA, 25 bp, Homo sapien
tcttggcgtttgttctgagcactga

SEQ ID NO: 4140292 - DNA, 25 bp, Homo sapien
tcacaatagatgaactcttggcgtt

SEQ ID NO: 4140293 - DNA, 25 bp, Homo sapien
catgcctccatacaggaagtaacat

SEQ ID NO: 4140294 - DNA, 25 bp, Homo sapien
ggccatgcctccatacaggaagtaa

SEQ ID NO: 4140295 - DNA, 25 bp, Homo sapien
ctggaaactggccatgcctccatac

SEQ ID NO: 4140296 - DNA, 25 bp, Homo sapien
aactggccatgcctccatacaggaa

SEQ ID NO: 4140297 - DNA, 25 bp, Homo sapien
ggcgcggcgtctccgggcttcaggc

SEQ ID NO: 4140298 - DNA, 25 bp, Homo sapien
ggcgagggcgccttcagtccatgct

SEQ ID NO: 4140299 - DNA, 25 bp, Homo sapien
aggaaggaggcatgtttgcgagagg

SEQ ID NO: 4140300 - DNA, 25 bp, Homo sapien
aaggatctcagaggggcgctggggc

SEQ ID NO: 4140301 - DNA, 25 bp, Homo sapien
tcctctcggcggagaaaggctgctt

SEQ ID NO: 4140302 - DNA, 25 bp, Homo sapien
gaataagttcttgcctccgtgcgag

SEQ ID NO: 4140303 - DNA, 25 bp, Homo sapien
gaggatccccaacttgagtcggcag

SEQ ID NO: 4140304 - DNA, 25 bp, Homo sapien
tctcaaaaagtgaccgggaacgcag

SEQ ID NO: 4140305 - DNA, 25 bp, Homo sapien
caaaatccaccaacacggttccagt

SEQ ID NO: 4140306 - DNA, 25 bp, Homo sapien
gggaagcacacgacataatggagca

SEQ ID NO: 4140307 - DNA, 25 bp, Homo sapien
acggaactggtgattttcaggaaca

SEQ ID NO: 4140308 - DNA, 25 bp, Homo sapien
cataatggagcacggaactggtgat

SEQ ID NO: 4140309 - DNA, 25 bp, Homo sapien
cgttacgtgcggtgatttattctta

SEQ ID NO: 4140310 - DNA, 25 bp, Homo sapien
ttatcaacggccagtattgttcctg

SEQ ID NO: 4140311 - DNA, 25 bp, Homo sapien
gagactgggtctgccagccgcgaac

SEQ ID NO: 4140312 - DNA, 25 bp, Homo sapien
ttcctgtcttaacctggccagaaag

SEQ ID NO: 4140313 - DNA, 25 bp, Homo sapien
gctggaagtggagggtcgccgagcc

SEQ ID NO: 4140314 - DNA, 25 bp, Homo sapien
tggaagtggagggtcgccgagccgc

SEQ ID NO: 4140315 - DNA, 25 bp, Homo sapien
agctggaagtggagggtcgccgagc

SEQ ID NO: 4140316 - DNA, 25 bp, Homo sapien
ggaagtggagggtcgccgagccgca

SEQ ID NO: 4140317 - DNA, 25 bp, Homo sapien
ccaagggacagctacgagggagctc

SEQ ID NO: 4140318 - DNA, 25 bp, Homo sapien
ctacgagggagctcggggctgctgc

SEQ ID NO: 4140319 - DNA, 25 bp, Homo sapien
cagctacgagggagctcggggctgc

SEQ ID NO: 4140320 - DNA, 25 bp, Homo sapien
cccaagggacagctacgagggagct

SEQ ID NO: 4140321 - DNA, 25 bp, Homo sapien
gcagaataccagacggtgttttccc

SEQ ID NO: 4140322 - DNA, 25 bp, Homo sapien
gccgcccgaggacaggcgtctgtaa

SEQ ID NO: 4140323 - DNA, 25 bp, Homo sapien
aggccatccccgattctgcaaaggg

SEQ ID NO: 4140324 - DNA, 25 bp, Homo sapien
cgtctgtaaccaggcagagcggaga

SEQ ID NO: 4140325 - DNA, 25 bp, Homo sapien
cccatggcctacactaccgtagagg

SEQ ID NO: 4140326 - DNA, 25 bp, Homo sapien
cctacactaccgtagaggccgtaga

SEQ ID NO: 4140327 - DNA, 25 bp, Homo sapien
cactaccgtagaggccgtagaggca

SEQ ID NO: 4140328 - DNA, 25 bp, Homo sapien
taaggggagatgtccccatggccta

SEQ ID NO: 4140329 - DNA, 25 bp, Homo sapien
accaagggctaatttctgggcacca

SEQ ID NO: 4140330 - DNA, 25 bp, Homo sapien
tgctttagagggaacttcagatgcc

SEQ ID NO: 4140331 - DNA, 25 bp, Homo sapien
aagctccgggttatggaatgtgacc

SEQ ID NO: 4140332 - DNA, 25 bp, Homo sapien
ggatacagccgaaaacagtttcagt

SEQ ID NO: 4140333 - DNA, 25 bp, Homo sapien
gtagtggggacaaaagagtgcaccc

SEQ ID NO: 4140334 - DNA, 25 bp, Homo sapien
ccaagtagtggggacaaaagagtgc

SEQ ID NO: 4140335 - DNA, 25 bp, Homo sapien
gggacaaaagagtgcacccagctaa

SEQ ID NO: 4140336 - DNA, 25 bp, Homo sapien
tggggacaaaagagtgcacccagct

SEQ ID NO: 4140337 - DNA, 25 bp, Homo sapien
tcttgccacaaatgataccaggtga

SEQ ID NO: 4140338 - DNA, 25 bp, Homo sapien
ggacaatcactcaagaagccctcta

SEQ ID NO: 4140339 - DNA, 25 bp, Homo sapien
aaccttaggcctgcatagatccagc

SEQ ID NO: 4140340 - DNA, 25 bp, Homo sapien
tacagttgtattaagggctgcaatc

SEQ ID NO: 4140341 - DNA, 25 bp, Homo sapien
gataatggaagggttctcaacgcct

SEQ ID NO: 4140342 - DNA, 25 bp, Homo sapien
gacacaagatccagaacgagcttcg

SEQ ID NO: 4140343 - DNA, 25 bp, Homo sapien
tcaacgccttaggaagcaaaccctc

SEQ ID NO: 4140344 - DNA, 25 bp, Homo sapien
caggataatccgtagcaaggttagc

SEQ ID NO: 4140345 - DNA, 25 bp, Homo sapien
ccacttcgcatcataaggagcagca

SEQ ID NO: 4140346 - DNA, 25 bp, Homo sapien
ttcgcatcataaggagcagcagaaa

SEQ ID NO: 4140347 - DNA, 25 bp, Homo sapien
cacttcgcatcataaggagcagcag

SEQ ID NO: 4140348 - DNA, 25 bp, Homo sapien
ctccacttcgcatcataaggagcag

SEQ ID NO: 4140349 - DNA, 25 bp, Homo sapien
ttttctaggtagcagggaccagtct

SEQ ID NO: 4140350 - DNA, 25 bp, Homo sapien
ggtcccacgatgtagcaccaacagg

SEQ ID NO: 4140351 - DNA, 25 bp, Homo sapien
ggaccagtctgcaacccacacaggt

SEQ ID NO: 4140352 - DNA, 25 bp, Homo sapien
tgagcaggagctcaagcgagatgtt

SEQ ID NO: 4140353 - DNA, 25 bp, Homo sapien
cttccgcaggccgtgtgcaatctct

SEQ ID NO: 4140354 - DNA, 25 bp, Homo sapien
tcagtctgtcaagaagcttccgcag

SEQ ID NO: 4140355 - DNA, 25 bp, Homo sapien
tctgtcaagaagcttccgcaggccg

SEQ ID NO: 4140356 - DNA, 25 bp, Homo sapien
gtgtgcaatctctgaaaatctccaa

SEQ ID NO: 4140357 - DNA, 25 bp, Homo sapien
tgtgtccagcccctaagatgaagtt

SEQ ID NO: 4140358 - DNA, 25 bp, Homo sapien
aacacgtgtcggaatagcagcagaa

SEQ ID NO: 4140359 - DNA, 25 bp, Homo sapien
tccaagttacgtgatacagggcaaa

SEQ ID NO: 4140360 - DNA, 25 bp, Homo sapien
catgtatccctacagtggccaagtg

SEQ ID NO: 4140361 - DNA, 25 bp, Homo sapien
taccacgtgtctcggaaagcatcag

SEQ ID NO: 4140362 - DNA, 25 bp, Homo sapien
aaggattgtgcccaatggtacacgg

SEQ ID NO: 4140363 - DNA, 25 bp, Homo sapien
cctaaactgtgggtctcttgctcta

SEQ ID NO: 4140364 - DNA, 25 bp, Homo sapien
tggtacacggacacaagctctaggc

SEQ ID NO: 4140365 - DNA, 25 bp, Homo sapien
taacagggctattcaaccggtggaa

SEQ ID NO: 4140366 - DNA, 25 bp, Homo sapien
gaagaaaacccattgcaggcccagt

SEQ ID NO: 4140367 - DNA, 25 bp, Homo sapien
taatggagactgaatcttgccctcg

SEQ ID NO: 4140368 - DNA, 25 bp, Homo sapien
tgcctagaaacaggaatcgcaccgt

SEQ ID NO: 4140369 - DNA, 25 bp, Homo sapien
acatcttgttcggtttcgtccaggg

SEQ ID NO: 4140370 - DNA, 25 bp, Homo sapien
caaactttgaggacacattcccagc

SEQ ID NO: 4140371 - DNA, 25 bp, Homo sapien
agttcccacattcagagtacaaagg

SEQ ID NO: 4140372 - DNA, 25 bp, Homo sapien
gcaacactgctgacccatcttggag

SEQ ID NO: 4140373 - DNA, 25 bp, Homo sapien
aatggtttaatgcacagtaggtgct

SEQ ID NO: 4140374 - DNA, 25 bp, Homo sapien
agctatcttcctatccatctgtatg

SEQ ID NO: 4140375 - DNA, 25 bp, Homo sapien
ctgtaggttgcttgactgaggttgc

SEQ ID NO: 4140376 - DNA, 25 bp, Homo sapien
tgactgcagccactcttaactaaga

SEQ ID NO: 4140377 - DNA, 25 bp, Homo sapien
cttgtctataaagttcattctattt

SEQ ID NO: 4140378 - DNA, 25 bp, Homo sapien
ttgtctataaagttcattctatttt

SEQ ID NO: 4140379 - DNA, 25 bp, Homo sapien
gcttgtctataaagttcattctatt

SEQ ID NO: 4140380 - DNA, 25 bp, Homo sapien
tctttaattgtgacagcagtgctga

SEQ ID NO: 4140381 - DNA, 25 bp, Homo sapien
tcaaagagctgattgagccacaagg

SEQ ID NO: 4140382 - DNA, 25 bp, Homo sapien
cctgatgctttgcttaaaggaacgc

SEQ ID NO: 4140383 - DNA, 25 bp, Homo sapien
gaacgctggctttgctagatgaaaa

SEQ ID NO: 4140384 - DNA, 25 bp, Homo sapien
ttaaaactataacgggtggagcgca

SEQ ID NO: 4140385 - DNA, 25 bp, Homo sapien
tccaaagggcagacataataatgag

SEQ ID NO: 4140386 - DNA, 25 bp, Homo sapien
gaatccaagtagttcagcgaggaaa

SEQ ID NO: 4140387 - DNA, 25 bp, Homo sapien
ggaagcggtaggttctttcagaagc

SEQ ID NO: 4140388 - DNA, 25 bp, Homo sapien
tactctgcataaaaaagcacacggc

SEQ ID NO: 4140389 - DNA, 25 bp, Homo sapien
agattctccaagtaccacctggccg

SEQ ID NO: 4140390 - DNA, 25 bp, Homo sapien
gaataccccaccatgctttagtctt

SEQ ID NO: 4140391 - DNA, 25 bp, Homo sapien
taatcaggcccaatttagaataccc

SEQ ID NO: 4140392 - DNA, 25 bp, Homo sapien
ggtctcgtgggtgtacatactcatc

SEQ ID NO: 4140393 - DNA, 25 bp, Homo sapien
taattctttcctgcggtggctgtcc

SEQ ID NO: 4140394 - DNA, 25 bp, Homo sapien
tgtcctgtgcactactggatgccca

SEQ ID NO: 4140395 - DNA, 25 bp, Homo sapien
tgacagtcgaaaatgcttccagaca

SEQ ID NO: 4140396 - DNA, 25 bp, Homo sapien
gaagatctcaagaggctggccaaga

SEQ ID NO: 4140397 - DNA, 25 bp, Homo sapien
tgtccattcactacaaagggcagta

SEQ ID NO: 4140398 - DNA, 25 bp, Homo sapien
taccaagtgtcgatgtctcatgccc

SEQ ID NO: 4140399 - DNA, 25 bp, Homo sapien
gaaaggtcctcgcatatgagcagca

SEQ ID NO: 4140400 - DNA, 25 bp, Homo sapien
cacaaagttattattggacctagaa

SEQ ID NO: 4140401 - DNA, 25 bp, Homo sapien
gccccatttccaatcagggttcaaa

SEQ ID NO: 4140402 - DNA, 25 bp, Homo sapien
taaggtacatatggagatcagttgg

SEQ ID NO: 4140403 - DNA, 25 bp, Homo sapien
cgcccagccaataggtgcttttaaa

SEQ ID NO: 4140404 - DNA, 25 bp, Homo sapien
gccaattccagttatcacgtgctta

SEQ ID NO: 4140405 - DNA, 25 bp, Homo sapien
gaatagtctggcagtttcccataaa

SEQ ID NO: 4140406 - DNA, 25 bp, Homo sapien
taatcgcacataccatgtggctcag

SEQ ID NO: 4140407 - DNA, 25 bp, Homo sapien
ccagataatggtgtgaaagacggta

SEQ ID NO: 4140408 - DNA, 25 bp, Homo sapien
ttccatggaaaagagcactctggtt

SEQ ID NO: 4140409 - DNA, 25 bp, Homo sapien
gaaacacatgggctcaaacacaaaa

SEQ ID NO: 4140410 - DNA, 25 bp, Homo sapien
tcatcctgaggtctacggtcttccc

SEQ ID NO: 4140411 - DNA, 25 bp, Homo sapien
aacagtggtaaaagaccctcaaatg

SEQ ID NO: 4140412 - DNA, 25 bp, Homo sapien
gatgcctgctatcgatcaacttaag

SEQ ID NO: 4140413 - DNA, 25 bp, Homo sapien
ttaagcgtgggaactctaaatgctc

SEQ ID NO: 4140414 - DNA, 25 bp, Homo sapien
ctctcagcagccatgggaacagctc

SEQ ID NO: 4140415 - DNA, 25 bp, Homo sapien
gacggcacatacaggagacactagg

SEQ ID NO: 4140416 - DNA, 25 bp, Homo sapien
tgcacactcatgtcacccacagcag

SEQ ID NO: 4140417 - DNA, 25 bp, Homo sapien
gcagcacaaccagggtcacactgcc

SEQ ID NO: 4140418 - DNA, 25 bp, Homo sapien
gtttaacaagcaaagtacaaagcat

SEQ ID NO: 4140419 - DNA, 25 bp, Homo sapien
tcacactgccacagctgcttagcag

SEQ ID NO: 4140420 - DNA, 25 bp, Homo sapien
gtgtctgtccatagggtgggtgccc

SEQ ID NO: 4140421 - DNA, 25 bp, Homo sapien
tgtgtctgtccatagggtgggtgcc

SEQ ID NO: 4140422 - DNA, 25 bp, Homo sapien
gtgtgtctgtccatagggtgggtgc

SEQ ID NO: 4140423 - DNA, 25 bp, Homo sapien
aggtccttcccatttcatcccatgg

SEQ ID NO: 4140424 - DNA, 25 bp, Homo sapien
tcatcccatggcctggagctcttat

SEQ ID NO: 4140425 - DNA, 25 bp, Homo sapien
atcccatggcctggagctcttatac

SEQ ID NO: 4140426 - DNA, 25 bp, Homo sapien
ttaggtccttcccatttcatcccat

SEQ ID NO: 4140427 - DNA, 25 bp, Homo sapien
aaccgtcaaatatgtgccagaacaa

SEQ ID NO: 4140428 - DNA, 25 bp, Homo sapien
cttgaagacaaccaaaccgtcaaat

SEQ ID NO: 4140429 - DNA, 25 bp, Homo sapien
aaccaaaccgtcaaatatgtgccag

SEQ ID NO: 4140430 - DNA, 25 bp, Homo sapien
gaagacaaccaaaccgtcaaatatg

SEQ ID NO: 4140431 - DNA, 25 bp, Homo sapien
taggacaccgtctcatcagggacat

SEQ ID NO: 4140432 - DNA, 25 bp, Homo sapien
gggtgcctgcttgcatcaggccaga

SEQ ID NO: 4140433 - DNA, 25 bp, Homo sapien
ttctggcaactttcgcagcccctga

SEQ ID NO: 4140434 - DNA, 25 bp, Homo sapien
catctgaattcataatgtccagctg

SEQ ID NO: 4140435 - DNA, 25 bp, Homo sapien
cagtctaatacctacaaccggaggc

SEQ ID NO: 4140436 - DNA, 25 bp, Homo sapien
tcaaacgacagcagactcaaccatg

SEQ ID NO: 4140437 - DNA, 25 bp, Homo sapien
gagcagggatttcgatagtcacaac

SEQ ID NO: 4140438 - DNA, 25 bp, Homo sapien
tgttgtgaaaactcgcgcccagtct

SEQ ID NO: 4140439 - DNA, 25 bp, Homo sapien
ttctcatgcaaagccatgtttcttt

SEQ ID NO: 4140440 - DNA, 25 bp, Homo sapien
ttttctcatgcaaagccatgtttct

SEQ ID NO: 4140441 - DNA, 25 bp, Homo sapien
aggcttttctcatgcaaagccatgt

SEQ ID NO: 4140442 - DNA, 25 bp, Homo sapien
gcttttctcatgcaaagccatgttt

SEQ ID NO: 4140443 - DNA, 25 bp, Homo sapien
aacagtaattcccacccagagtttg

SEQ ID NO: 4140444 - DNA, 25 bp, Homo sapien
gtaaccatgacactcacacagaggg

SEQ ID NO: 4140445 - DNA, 25 bp, Homo sapien
cttttagaggcaaaaaagcatactg

SEQ ID NO: 4140446 - DNA, 25 bp, Homo sapien
tgcacaaaagaacgaatgtgttgga

SEQ ID NO: 4140447 - DNA, 25 bp, Homo sapien
aactatccctgatgagaggaaggcc

SEQ ID NO: 4140448 - DNA, 25 bp, Homo sapien
gataatactcctcactcaggtcagg

SEQ ID NO: 4140449 - DNA, 25 bp, Homo sapien
gctaactggaggctcacaggacaga

SEQ ID NO: 4140450 - DNA, 25 bp, Homo sapien
gaaggcctataatagctctcagctg

SEQ ID NO: 4140451 - DNA, 25 bp, Homo sapien
tcttggtcgggctgctaaatttctg

SEQ ID NO: 4140452 - DNA, 25 bp, Homo sapien
taaggttctgcatgtactgaccagg

SEQ ID NO: 4140453 - DNA, 25 bp, Homo sapien
cattccgtgacttataagcctggct

SEQ ID NO: 4140454 - DNA, 25 bp, Homo sapien
ccaagtcctctgaaactgagcaact

SEQ ID NO: 4140455 - DNA, 25 bp, Homo sapien
tctggcttcaattccctgcatcagg

SEQ ID NO: 4140456 - DNA, 25 bp, Homo sapien
cacttggacaagctggcattaatgg

SEQ ID NO: 4140457 - DNA, 25 bp, Homo sapien
gatggccatcctattgggttgcccg

SEQ ID NO: 4140458 - DNA, 25 bp, Homo sapien
taggagcacattcatgcaggccgat

SEQ ID NO: 4140459 - DNA, 25 bp, Homo sapien
tagttattgcctgctgtgaccctag

SEQ ID NO: 4140460 - DNA, 25 bp, Homo sapien
cctaaaagccatgaccgcatttgaa

SEQ ID NO: 4140461 - DNA, 25 bp, Homo sapien
agctgctcatctaaaccggttttgg

SEQ ID NO: 4140462 - DNA, 25 bp, Homo sapien
cctgaaagcctataccagaggctgg

SEQ ID NO: 4140463 - DNA, 25 bp, Homo sapien
ttagtagcgaaaagttttcactatg

SEQ ID NO: 4140464 - DNA, 25 bp, Homo sapien
tagtagcgaaaagttttcactatgt

SEQ ID NO: 4140465 - DNA, 25 bp, Homo sapien
tactaatccaaaattcaggagctta

SEQ ID NO: 4140466 - DNA, 25 bp, Homo sapien
caacattactaatccaaaattcagg

SEQ ID NO: 4140467 - DNA, 25 bp, Homo sapien
ctgatctctttgctagtcccagtgg

SEQ ID NO: 4140468 - DNA, 25 bp, Homo sapien
gctagtcccagtggtcaacggttga

SEQ ID NO: 4140469 - DNA, 25 bp, Homo sapien
tttgctagtcccagtggtcaacggt

SEQ ID NO: 4140470 - DNA, 25 bp, Homo sapien
tcccagtggtcaacggttgatgcat

SEQ ID NO: 4140471 - DNA, 25 bp, Homo sapien
taatcaccgacaaagcttgagacct

SEQ ID NO: 4140472 - DNA, 25 bp, Homo sapien
ggaaaatgcgaagagccttccccgc

SEQ ID NO: 4140473 - DNA, 25 bp, Homo sapien
cctttggtatggaaaacactagcgg

SEQ ID NO: 4140474 - DNA, 25 bp, Homo sapien
tgctcagtgaggagcccgatttgcc

SEQ ID NO: 4140475 - DNA, 25 bp, Homo sapien
tacaacataactgtcccttagggca

SEQ ID NO: 4140476 - DNA, 25 bp, Homo sapien
tgccattgaagagggcacctcacgg

SEQ ID NO: 4140477 - DNA, 25 bp, Homo sapien
cactgcaaagtgtcgatagatggca

SEQ ID NO: 4140478 - DNA, 25 bp, Homo sapien
cggagtatgcttgtgtattgctaca

SEQ ID NO: 4140479 - DNA, 25 bp, Homo sapien
caatgtcatatgcagaagctgctat

SEQ ID NO: 4140480 - DNA, 25 bp, Homo sapien
tgcagaagctgctatatatgacctt

SEQ ID NO: 4140481 - DNA, 25 bp, Homo sapien
cagaagctgctatatatgacctttc

SEQ ID NO: 4140482 - DNA, 25 bp, Homo sapien
catatgcagaagctgctatatatga

SEQ ID NO: 4140483 - DNA, 25 bp, Homo sapien
gaggaaaactggcagtggggagacc

SEQ ID NO: 4140484 - DNA, 25 bp, Homo sapien
ccaccgaaggctgtatcacagagga

SEQ ID NO: 4140485 - DNA, 25 bp, Homo sapien
ggagacccgggagagccaagagtca

SEQ ID NO: 4140486 - DNA, 25 bp, Homo sapien
ccactgccaagcctgctgacaaaga

SEQ ID NO: 4140487 - DNA, 25 bp, Homo sapien
tccagtatctggacttcagcagtgg

SEQ ID NO: 4140488 - DNA, 25 bp, Homo sapien
tatatgagataaaatgtccacgacc

SEQ ID NO: 4140489 - DNA, 25 bp, Homo sapien
tactgtaatcctgtaagatggaacc

SEQ ID NO: 4140490 - DNA, 25 bp, Homo sapien
gggaccgctctgtactatcttggca

SEQ ID NO: 4140491 - DNA, 25 bp, Homo sapien
taaagtatgaaactcgtaagtggta

SEQ ID NO: 4140492 - DNA, 25 bp, Homo sapien
caacgtaaatctcacaacttacaca

SEQ ID NO: 4140493 - DNA, 25 bp, Homo sapien
gatatgacaaccaaagcatcggcca

SEQ ID NO: 4140494 - DNA, 25 bp, Homo sapien
tcttctgtacctggtgcttggtgaa

SEQ ID NO: 4140495 - DNA, 25 bp, Homo sapien
tgatgcgcagactgggctcgaactc

SEQ ID NO: 4140496 - DNA, 25 bp, Homo sapien
cctggtccttttaagcatatgggtt

SEQ ID NO: 4140497 - DNA, 25 bp, Homo sapien
aaaatacatagctcttagctagatc

SEQ ID NO: 4140498 - DNA, 25 bp, Homo sapien
aattgaaaacttactgtgtgtgtgc

SEQ ID NO: 4140499 - DNA, 25 bp, Homo sapien
gaagtatgatgcgtttttggcctca

SEQ ID NO: 4140500 - DNA, 25 bp, Homo sapien
gaccagcagcactgtgacgaggcta

SEQ ID NO: 4140501 - DNA, 25 bp, Homo sapien
tcctcggcccaggtctaaataaggc

SEQ ID NO: 4140502 - DNA, 25 bp, Homo sapien
ccacatggacatcgaggcgctgaaa

SEQ ID NO: 4140503 - DNA, 25 bp, Homo sapien
agtacgggtcgcctgaagccttgcg

SEQ ID NO: 4140504 - DNA, 25 bp, Homo sapien
agccttgcgcctgcggatctgcact

SEQ ID NO: 4140505 - DNA, 25 bp, Homo sapien
gggccccaacgtagccttctgtcaa

SEQ ID NO: 4140506 - DNA, 25 bp, Homo sapien
cgtgtctattctcgtgcagggcccc

SEQ ID NO: 4140507 - DNA, 25 bp, Homo sapien
gttgaatgggatgttaactggcctg

SEQ ID NO: 4140508 - DNA, 25 bp, Homo sapien
tgatctccattagaacaactggact

SEQ ID NO: 4140509 - DNA, 25 bp, Homo sapien
aagtgattcaaagtgtgctttcaag

SEQ ID NO: 4140510 - DNA, 25 bp, Homo sapien
ggcataaaagtgattcaaagtgtgc

SEQ ID NO: 4140511 - DNA, 25 bp, Homo sapien
ggaaacaggtggtagagataaatta

SEQ ID NO: 4140512 - DNA, 25 bp, Homo sapien
aaaacaggctcgaatatttcaactt

SEQ ID NO: 4140513 - DNA, 25 bp, Homo sapien
gacaagactacgtctttcagaaaat

SEQ ID NO: 4140514 - DNA, 25 bp, Homo sapien
taaggtgcttataaccttgaggaaa

SEQ ID NO: 4140515 - DNA, 25 bp, Homo sapien
gacatttagcagctcaagactagcc

SEQ ID NO: 4140516 - DNA, 25 bp, Homo sapien
ttagcagacatttagcagctcaaga

SEQ ID NO: 4140517 - DNA, 25 bp, Homo sapien
tagcagctcaagactagccatatat

SEQ ID NO: 4140518 - DNA, 25 bp, Homo sapien
caagactagccatatattttctgct

SEQ ID NO: 4140519 - DNA, 25 bp, Homo sapien
taattctaatcacaaggtactgggt

SEQ ID NO: 4140520 - DNA, 25 bp, Homo sapien
taaatagcaagccactttgtgcctc

SEQ ID NO: 4140521 - DNA, 25 bp, Homo sapien
cagttgcaacaaagacgacatggct

SEQ ID NO: 4140522 - DNA, 25 bp, Homo sapien
taaatttttatcagagcacagccag

SEQ ID NO: 4140523 - DNA, 25 bp, Homo sapien
caagatattaacaaaacttcgcttt

SEQ ID NO: 4140524 - DNA, 25 bp, Homo sapien
ccctgtaacaatcctatgtgggaag

SEQ ID NO: 4140525 - DNA, 25 bp, Homo sapien
tgaactatggtttgtctatatgact

SEQ ID NO: 4140526 - DNA, 25 bp, Homo sapien
ccctaaagcacccatggcattatct

SEQ ID NO: 4140527 - DNA, 25 bp, Homo sapien
tgaaaaacatgcaccaaatctccac

SEQ ID NO: 4140528 - DNA, 25 bp, Homo sapien
aacatgcaccaaatctccacaaaac

SEQ ID NO: 4140529 - DNA, 25 bp, Homo sapien
ttatccgtgtatccacttgtccact

SEQ ID NO: 4140530 - DNA, 25 bp, Homo sapien
tgcaccaaatctccacaaaacaaga

SEQ ID NO: 4140531 - DNA, 25 bp, Homo sapien
gagctcgaaactgtataggaatgaa

SEQ ID NO: 4140532 - DNA, 25 bp, Homo sapien
ctcttttggaattagtctgggatgt

SEQ ID NO: 4140533 - DNA, 25 bp, Homo sapien
catgtgtgatacgaacaaagtttcc

SEQ ID NO: 4140534 - DNA, 25 bp, Homo sapien
tataatgcagtctactaaagagagc

SEQ ID NO: 4140535 - DNA, 25 bp, Homo sapien
tcctaattctactttctaagtaaca

SEQ ID NO: 4140536 - DNA, 25 bp, Homo sapien
catgtatgcattttggatttgtcta

SEQ ID NO: 4140537 - DNA, 25 bp, Homo sapien
tcatcatgtactagaataagcaaaa

SEQ ID NO: 4140538 - DNA, 25 bp, Homo sapien
ccaagggcagcgctcagctgaggtt

SEQ ID NO: 4140539 - DNA, 25 bp, Homo sapien
atctaaatgccaaccaattaatatg

SEQ ID NO: 4140540 - DNA, 25 bp, Homo sapien
aatcctcctatgtaagcctccacag

SEQ ID NO: 4140541 - DNA, 25 bp, Homo sapien
tcctcctatgtaagcctccacagta

SEQ ID NO: 4140542 - DNA, 25 bp, Homo sapien
tccatggcagatatagcacgaatcc

SEQ ID NO: 4140543 - DNA, 25 bp, Homo sapien
taagaagtccaagacacaggagagc

SEQ ID NO: 4140544 - DNA, 25 bp, Homo sapien
tctaccaaaaaggagtctgcccctg

SEQ ID NO: 4140545 - DNA, 25 bp, Homo sapien
cacgttctacagcagagggttctct

SEQ ID NO: 4140546 - DNA, 25 bp, Homo sapien
gattttgcctcatgtaggaaactca

SEQ ID NO: 4140547 - DNA, 25 bp, Homo sapien
acagagtattcctcattagtttcaa

SEQ ID NO: 4140548 - DNA, 25 bp, Homo sapien
ttcactgatccacacaaaacagagt

SEQ ID NO: 4140549 - DNA, 25 bp, Homo sapien
gatgatatgtatcccaaattcactg

SEQ ID NO: 4140550 - DNA, 25 bp, Homo sapien
tctgcattattgtagttatcacatg

SEQ ID NO: 4140551 - DNA, 25 bp, Homo sapien
ggtgatactgtgtgaactggcatct

SEQ ID NO: 4140552 - DNA, 25 bp, Homo sapien
ggacacattatagctggttcctata

SEQ ID NO: 4140553 - DNA, 25 bp, Homo sapien
tctactcaaccctaaatacaatgaa

SEQ ID NO: 4140554 - DNA, 25 bp, Homo sapien
gagttatcactgctgggttacgacc

SEQ ID NO: 4140555 - DNA, 25 bp, Homo sapien
tacgtaatgatgacagacagtgaca

SEQ ID NO: 4140556 - DNA, 25 bp, Homo sapien
tacagtgccacttcgtacttggaaa

SEQ ID NO: 4140557 - DNA, 25 bp, Homo sapien
gagcacaccacagaaattacagacg

SEQ ID NO: 4140558 - DNA, 25 bp, Homo sapien
gaaaaactagcattgacacatggga

SEQ ID NO: 4140559 - DNA, 25 bp, Homo sapien
tttaaagaaggataccagatcacca

SEQ ID NO: 4140560 - DNA, 25 bp, Homo sapien
tcttttagcctacgttatgaggagc

SEQ ID NO: 4140561 - DNA, 25 bp, Homo sapien
gacacatgggagatcatggtgataa

SEQ ID NO: 4140562 - DNA, 25 bp, Homo sapien
aaatatctgcaacctctggtctaga

SEQ ID NO: 4140563 - DNA, 25 bp, Homo sapien
tttaccaatgtaggaaaatccacag

SEQ ID NO: 4140564 - DNA, 25 bp, Homo sapien
ccagtgatctgtgaacttgcattga

SEQ ID NO: 4140565 - DNA, 25 bp, Homo sapien
tagaacaaactgtagctagaactcc

SEQ ID NO: 4140566 - DNA, 25 bp, Homo sapien
tctaggccaggaagttgccatcaca

SEQ ID NO: 4140567 - DNA, 25 bp, Homo sapien
cattcaagtgaaagagactgggctg

SEQ ID NO: 4140568 - DNA, 25 bp, Homo sapien
tagccttgctttgagacacataacc

SEQ ID NO: 4140569 - DNA, 25 bp, Homo sapien
caggctggaccaataaagagacaaa

SEQ ID NO: 4140570 - DNA, 25 bp, Homo sapien
catagggaccagatttttgaaagcc

SEQ ID NO: 4140571 - DNA, 25 bp, Homo sapien
gcaaagcatgctatcactgacgtct

SEQ ID NO: 4140572 - DNA, 25 bp, Homo sapien
catgggcggtatgttgactactgaa

SEQ ID NO: 4140573 - DNA, 25 bp, Homo sapien
gtcaaggcagttgggcaaacgaaac

SEQ ID NO: 4140574 - DNA, 25 bp, Homo sapien
ggattaaatgagacacttgacactg

SEQ ID NO: 4140575 - DNA, 25 bp, Homo sapien
aatacagtggtcaagcacatgagca

SEQ ID NO: 4140576 - DNA, 25 bp, Homo sapien
tcttaagccctataccacaatgaag

SEQ ID NO: 4140577 - DNA, 25 bp, Homo sapien
gctactactagtaacagtgaggtca

SEQ ID NO: 4140578 - DNA, 25 bp, Homo sapien
gctcctgggaagaatacgaacattt

SEQ ID NO: 4140579 - DNA, 25 bp, Homo sapien
catatggattaagccaacagctggc

SEQ ID NO: 4140580 - DNA, 25 bp, Homo sapien
tagtatacacctaagaccaatgcgg

SEQ ID NO: 4140581 - DNA, 25 bp, Homo sapien
ccttcacccgggagaaaacagatga

SEQ ID NO: 4140582 - DNA, 25 bp, Homo sapien
gctactggtaatcagtggcactaga

SEQ ID NO: 4140583 - DNA, 25 bp, Homo sapien
ggacttggctttacaactctactca

SEQ ID NO: 4140584 - DNA, 25 bp, Homo sapien
cagtcagcatgatctaacaccagca

SEQ ID NO: 4140585 - DNA, 25 bp, Homo sapien
tctactcaagcacagagctctcatg

SEQ ID NO: 4140586 - DNA, 25 bp, Homo sapien
acctcacaagcactcccctgggctg

SEQ ID NO: 4140587 - DNA, 25 bp, Homo sapien
cacatatgcgtgtgcgcacaccacc

SEQ ID NO: 4140588 - DNA, 25 bp, Homo sapien
gaccactggggggtaatcatgaaaa

SEQ ID NO: 4140589 - DNA, 25 bp, Homo sapien
ttcccagagggaagctacggcaggc

SEQ ID NO: 4140590 - DNA, 25 bp, Homo sapien
tgaggccaacacagacgttattctt

SEQ ID NO: 4140591 - DNA, 25 bp, Homo sapien
gctaacaatatggatggcagagccc

SEQ ID NO: 4140592 - DNA, 25 bp, Homo sapien
tgaacagcccaccataatgcagagc

SEQ ID NO: 4140593 - DNA, 25 bp, Homo sapien
taaccgtcttgagaagcggaaccca

SEQ ID NO: 4140594 - DNA, 25 bp, Homo sapien
tataaaagaccctagcgttgcaact

SEQ ID NO: 4140595 - DNA, 25 bp, Homo sapien
ccaagggcatttaagtgaccaaagc

SEQ ID NO: 4140596 - DNA, 25 bp, Homo sapien
gatgtttacttacagaaagcccaag

SEQ ID NO: 4140597 - DNA, 25 bp, Homo sapien
tctaacagacccagaagacccatga

SEQ ID NO: 4140598 - DNA, 25 bp, Homo sapien
aacaatcagcacttttatgctatcc

SEQ ID NO: 4140599 - DNA, 25 bp, Homo sapien
gctatccttaaacagaaagacactg

SEQ ID NO: 4140600 - DNA, 25 bp, Homo sapien
aagacactgatgagacagatctatg

SEQ ID NO: 4140601 - DNA, 25 bp, Homo sapien
ggaccaagtgaagttaacaatcagc

SEQ ID NO: 4140602 - DNA, 25 bp, Homo sapien
cttggcactatcaacaattcaggac

SEQ ID NO: 4140603 - DNA, 25 bp, Homo sapien
tttattatgaacatactgcatggct

SEQ ID NO: 4140604 - DNA, 25 bp, Homo sapien
tccaagtcttgctgtaacaaccaaa

SEQ ID NO: 4140605 - DNA, 25 bp, Homo sapien
catacaggccactgtttaagcctag

SEQ ID NO: 4140606 - DNA, 25 bp, Homo sapien
gacactggttttatgaggcttctaa

SEQ ID NO: 4140607 - DNA, 25 bp, Homo sapien
tgggcccatcggagcctatttctgt

SEQ ID NO: 4140608 - DNA, 25 bp, Homo sapien
actctgtaattcagccatgggccca

SEQ ID NO: 4140609 - DNA, 25 bp, Homo sapien
caagccacggagtatgaaacctaat

SEQ ID NO: 4140610 - DNA, 25 bp, Homo sapien
ggcataccatatacgctggcccaga

SEQ ID NO: 4140611 - DNA, 25 bp, Homo sapien
tggcccagagacagaccggatgtaa

SEQ ID NO: 4140612 - DNA, 25 bp, Homo sapien
catttttcccctgaccaatggtaga

SEQ ID NO: 4140613 - DNA, 25 bp, Homo sapien
aaagaacaacgcacagctctcaggg

SEQ ID NO: 4140614 - DNA, 25 bp, Homo sapien
taaggtatcccttcgcactgtcgtt

SEQ ID NO: 4140615 - DNA, 25 bp, Homo sapien
cactgtcgttgcttatacagggcac

SEQ ID NO: 4140616 - DNA, 25 bp, Homo sapien
taatcctaaattactcctgcccatg

SEQ ID NO: 4140617 - DNA, 25 bp, Homo sapien
taagcttgttatctggttcttgtcc

SEQ ID NO: 4140618 - DNA, 25 bp, Homo sapien
caaatggagggcaagttacatggcc

SEQ ID NO: 4140619 - DNA, 25 bp, Homo sapien
catattagtcaacttgtctgctgtg

SEQ ID NO: 4140620 - DNA, 25 bp, Homo sapien
tacatggccctagatgcaactaatt

SEQ ID NO: 4140621 - DNA, 25 bp, Homo sapien
ttttggtattgaacaacagtaggca

SEQ ID NO: 4140622 - DNA, 25 bp, Homo sapien
tgaacctagcatcctaaaccagtag

SEQ ID NO: 4140623 - DNA, 25 bp, Homo sapien
caaacaacaattggtgggaaacagt

SEQ ID NO: 4140624 - DNA, 25 bp, Homo sapien
gggaaacagtttcaggtgatctaca

SEQ ID NO: 4140625 - DNA, 25 bp, Homo sapien
gtgcccagccatacccacaaagatt

SEQ ID NO: 4140626 - DNA, 25 bp, Homo sapien
gattagatcaaatgagagatgacac

SEQ ID NO: 4140627 - DNA, 25 bp, Homo sapien
ggttatccccattataatgtattcc

SEQ ID NO: 4140628 - DNA, 25 bp, Homo sapien
ctcgtattctctgattagatcaaat

SEQ ID NO: 4140629 - DNA, 25 bp, Homo sapien
gacactgagacatggttatccccat

SEQ ID NO: 4140630 - DNA, 25 bp, Homo sapien
atggagatacctcataacctagttt

SEQ ID NO: 4140631 - DNA, 25 bp, Homo sapien
ggagatacctcataacctagtttca

SEQ ID NO: 4140632 - DNA, 25 bp, Homo sapien
tggagatacctcataacctagtttc

SEQ ID NO: 4140633 - DNA, 25 bp, Homo sapien
gagatacctcataacctagtttcat

SEQ ID NO: 4140634 - DNA, 25 bp, Homo sapien
tctggggccaattccacgcaggtct

SEQ ID NO: 4140635 - DNA, 25 bp, Homo sapien
caggtctcgtagctgtaggtggttt

SEQ ID NO: 4140636 - DNA, 25 bp, Homo sapien
cgtagctgtaggtggtttgtcccat

SEQ ID NO: 4140637 - DNA, 25 bp, Homo sapien
gtctcgtagctgtaggtggtttgtc

SEQ ID NO: 4140638 - DNA, 25 bp, Homo sapien
cactgttatctgaaccttgtctata

SEQ ID NO: 4140639 - DNA, 25 bp, Homo sapien
tgtcttctcaacttccacactgtta

SEQ ID NO: 4140640 - DNA, 25 bp, Homo sapien
tgttcattctgacttctacccccag

SEQ ID NO: 4140641 - DNA, 25 bp, Homo sapien
ttgtctatacttgactctcaccgcc

SEQ ID NO: 4140642 - DNA, 25 bp, Homo sapien
gatagatgtagaagcttgatcagac

SEQ ID NO: 4140643 - DNA, 25 bp, Homo sapien
cgtgtttgcttcaatcaggatccaa

SEQ ID NO: 4140644 - DNA, 25 bp, Homo sapien
taccctctgttgtataaagattccc

SEQ ID NO: 4140645 - DNA, 25 bp, Homo sapien
ggtgccatttaacatgatactcagt

SEQ ID NO: 4140646 - DNA, 25 bp, Homo sapien
caacgtgaaacccaacggctactca

SEQ ID NO: 4140647 - DNA, 25 bp, Homo sapien
caacattcccaacaggccagaatta

SEQ ID NO: 4140648 - DNA, 25 bp, Homo sapien
aagcttccattagtgaattactgca

SEQ ID NO: 4140649 - DNA, 25 bp, Homo sapien
ttcagagacaacactaacatgttag

SEQ ID NO: 4140650 - DNA, 25 bp, Homo sapien
ctgtccaataacctgaaaactttct

SEQ ID NO: 4140651 - DNA, 25 bp, Homo sapien
attctgtccaataacctgaaaactt

SEQ ID NO: 4140652 - DNA, 25 bp, Homo sapien
actgatgtatctcgaatattcttac

SEQ ID NO: 4140653 - DNA, 25 bp, Homo sapien
catttactgatgtatctcgaatatt

SEQ ID NO: 4140654 - DNA, 25 bp, Homo sapien
tgggtgactccaagattactgtaaa

SEQ ID NO: 4140655 - DNA, 25 bp, Homo sapien
ggattaatcaacaataacccgcatg

SEQ ID NO: 4140656 - DNA, 25 bp, Homo sapien
gatacagatcaaatttccacgagag

SEQ ID NO: 4140657 - DNA, 25 bp, Homo sapien
tagcatcactgcaggttggtcccct

SEQ ID NO: 4140658 - DNA, 25 bp, Homo sapien
tacgcagtcattttaatagcagctt

SEQ ID NO: 4140659 - DNA, 25 bp, Homo sapien
ccatgaattctgaaatacgcagtca

SEQ ID NO: 4140660 - DNA, 25 bp, Homo sapien
tagaccctaatactaccaggaaatg

SEQ ID NO: 4140661 - DNA, 25 bp, Homo sapien
gacattacaagtgcctagaccctaa

SEQ ID NO: 4140662 - DNA, 25 bp, Homo sapien
gagtcaaggattgctgctcaccaga

SEQ ID NO: 4140663 - DNA, 25 bp, Homo sapien
ggtactttcgaaggtgcagactgaa

SEQ ID NO: 4140664 - DNA, 25 bp, Homo sapien
ctcttgccctggaatacaaggaggg

SEQ ID NO: 4140665 - DNA, 25 bp, Homo sapien
caccagactggcgagagagcatata

SEQ ID NO: 4140666 - DNA, 25 bp, Homo sapien
tatggtgagtcagtatgctcccctc

SEQ ID NO: 4140667 - DNA, 25 bp, Homo sapien
tataaatcaggctagagcaacagag

SEQ ID NO: 4140668 - DNA, 25 bp, Homo sapien
tccaggttgtcattcagggaccaag

SEQ ID NO: 4140669 - DNA, 25 bp, Homo sapien
cactggaaacctgccgatagaataa

SEQ ID NO: 4140670 - DNA, 25 bp, Homo sapien
ttccaagctatcaatgacatgaaca

SEQ ID NO: 4140671 - DNA, 25 bp, Homo sapien
ccaagctatcaatgacatgaacata

SEQ ID NO: 4140672 - DNA, 25 bp, Homo sapien
agctatcaatgacatgaacataaac

SEQ ID NO: 4140673 - DNA, 25 bp, Homo sapien
ctatcaatgacatgaacataaacta

SEQ ID NO: 4140674 - DNA, 25 bp, Homo sapien
aactcaagtaatagctttgcatgag

SEQ ID NO: 4140675 - DNA, 25 bp, Homo sapien
ttaactcaagtaatagctttgcatg

SEQ ID NO: 4140676 - DNA, 25 bp, Homo sapien
aggtttaactcaagtaatagctttg

SEQ ID NO: 4140677 - DNA, 25 bp, Homo sapien
gtttaactcaagtaatagctttgca

SEQ ID NO: 4140678 - DNA, 25 bp, Homo sapien
caatatacacctttacagagagaat

SEQ ID NO: 4140679 - DNA, 25 bp, Homo sapien
gcagccaccccgtgtaacagagaac

SEQ ID NO: 4140680 - DNA, 25 bp, Homo sapien
tcatcttccacaatatacaccttta

SEQ ID NO: 4140681 - DNA, 25 bp, Homo sapien
gccaccccgtgtaacagagaaccaa

SEQ ID NO: 4140682 - DNA, 25 bp, Homo sapien
tgtttcaagaggaatacttggagtg

SEQ ID NO: 4140683 - DNA, 25 bp, Homo sapien
ggtgttgtccaaaaatgactccaca

SEQ ID NO: 4140684 - DNA, 25 bp, Homo sapien
tgggtttgtcccaactgcaaaaggc

SEQ ID NO: 4140685 - DNA, 25 bp, Homo sapien
tgtacaaatttaggagaaactgtgg

SEQ ID NO: 4140686 - DNA, 25 bp, Homo sapien
tattgtctcacgtaactattcaggg

SEQ ID NO: 4140687 - DNA, 25 bp, Homo sapien
caaagggcaaggaggttattgtctc

SEQ ID NO: 4140688 - DNA, 25 bp, Homo sapien
tcagggcactggtttaaagtgaaac

SEQ ID NO: 4140689 - DNA, 25 bp, Homo sapien
tgctaccttctagcagcacagggct

SEQ ID NO: 4140690 - DNA, 25 bp, Homo sapien
ccccatgccagttgaagaaactctg

SEQ ID NO: 4140691 - DNA, 25 bp, Homo sapien
cccatgccagttgaagaaactctgc

SEQ ID NO: 4140692 - DNA, 25 bp, Homo sapien
gggcatcggcatgcattaagtgccc

SEQ ID NO: 4140693 - DNA, 25 bp, Homo sapien
catgcattaagtgccctactgtagc

SEQ ID NO: 4140694 - DNA, 25 bp, Homo sapien
cattcctggatgcaggaggaccggt

SEQ ID NO: 4140695 - DNA, 25 bp, Homo sapien
gagtgaacagatcaatgtcagccca

SEQ ID NO: 4140696 - DNA, 25 bp, Homo sapien
gaccggtgctgcatgacttatccat

SEQ ID NO: 4140697 - DNA, 25 bp, Homo sapien
caagtagttgagacagcatccctga

SEQ ID NO: 4140698 - DNA, 25 bp, Homo sapien
cttcaggcaaccaagtcagctcaat

SEQ ID NO: 4140699 - DNA, 25 bp, Homo sapien
ccacatgcaattgctccttggccat

SEQ ID NO: 4140700 - DNA, 25 bp, Homo sapien
catgcaattgctccttggccatgga

SEQ ID NO: 4140701 - DNA, 25 bp, Homo sapien
catttaaccattctcacttcaggca

SEQ ID NO: 4140702 - DNA, 25 bp, Homo sapien
tggatgcaagataaacgctcagagt

SEQ ID NO: 4140703 - DNA, 25 bp, Homo sapien
ctaactggatgcaagataaacgctc

SEQ ID NO: 4140704 - DNA, 25 bp, Homo sapien
actggatgcaagataaacgctcaga

SEQ ID NO: 4140705 - DNA, 25 bp, Homo sapien
gatgcaagataaacgctcagagtat

SEQ ID NO: 4140706 - DNA, 25 bp, Homo sapien
tcttctgggaatatatggactggac

SEQ ID NO: 4140707 - DNA, 25 bp, Homo sapien
taaggcagatggcttcaaaagctcc

SEQ ID NO: 4140708 - DNA, 25 bp, Homo sapien
caaactggcccaaagattgcttacc

SEQ ID NO: 4140709 - DNA, 25 bp, Homo sapien
tactttgatggccatgacttctgga

SEQ ID NO: 4140710 - DNA, 25 bp, Homo sapien
gcaaatggacctatcactcagaacg

SEQ ID NO: 4140711 - DNA, 25 bp, Homo sapien
tacaaagcaccatacggagctgagc

SEQ ID NO: 4140712 - DNA, 25 bp, Homo sapien
taaacactctattgtgcgaggagct

SEQ ID NO: 4140713 - DNA, 25 bp, Homo sapien
cagtatgagctgatcgtgaggacgc

SEQ ID NO: 4140714 - DNA, 25 bp, Homo sapien
tctgccaccaagatagaattatgac

SEQ ID NO: 4140715 - DNA, 25 bp, Homo sapien
gaaacaacttcccaactagtcactg

SEQ ID NO: 4140716 - DNA, 25 bp, Homo sapien
agcaagcaattccagctgagcaagt

SEQ ID NO: 4140717 - DNA, 25 bp, Homo sapien
ctcagaacagtatagtttcagggac

SEQ ID NO: 4140718 - DNA, 25 bp, Homo sapien
aattggaaggaaggatcgagcagga

SEQ ID NO: 4140719 - DNA, 25 bp, Homo sapien
cgaagttatcttccaagttatctaa

SEQ ID NO: 4140720 - DNA, 25 bp, Homo sapien
gcaggaatagcgaagttatcttcca

SEQ ID NO: 4140721 - DNA, 25 bp, Homo sapien
tatctaaactgtgggataacttttc

SEQ ID NO: 4140722 - DNA, 25 bp, Homo sapien
gatcgtccatgaacactgtgcgctg

SEQ ID NO: 4140723 - DNA, 25 bp, Homo sapien
actgtgcgctgtttgacctcgtccc

SEQ ID NO: 4140724 - DNA, 25 bp, Homo sapien
gacctcgtccctaatcaaagcttca

SEQ ID NO: 4140725 - DNA, 25 bp, Homo sapien
cactggtttgcttgatcgtccatga

SEQ ID NO: 4140726 - DNA, 25 bp, Homo sapien
ggaggaaaccaccactcctattagc

SEQ ID NO: 4140727 - DNA, 25 bp, Homo sapien
tcagtcccaaatactctcaggtaac

SEQ ID NO: 4140728 - DNA, 25 bp, Homo sapien
cagtagtaagtgacctgaccagcac

SEQ ID NO: 4140729 - DNA, 25 bp, Homo sapien
aattctttcgcctcagctcccagta

SEQ ID NO: 4140730 - DNA, 25 bp, Homo sapien
gatgtgtctaatgacaggaggagca

SEQ ID NO: 4140731 - DNA, 25 bp, Homo sapien
aactctgcaggtgtgcgtccattta

SEQ ID NO: 4140732 - DNA, 25 bp, Homo sapien
aggtgtgcgtccatttacagacttc

SEQ ID NO: 4140733 - DNA, 25 bp, Homo sapien
gacttctaacagatccacagatgtg

SEQ ID NO: 4140734 - DNA, 25 bp, Homo sapien
gtttgcaataacacactgctgaagg

SEQ ID NO: 4140735 - DNA, 25 bp, Homo sapien
catactgtgttatctgtatgaaaaa

SEQ ID NO: 4140736 - DNA, 25 bp, Homo sapien
ggatgcacaaagcatcatactgtgt

SEQ ID NO: 4140737 - DNA, 25 bp, Homo sapien
tgctgaaggatgcacaaagcatcat

SEQ ID NO: 4140738 - DNA, 25 bp, Homo sapien
gattactgagtgctcactatatgtt

SEQ ID NO: 4140739 - DNA, 25 bp, Homo sapien
tatgttaagacactgctgatacttt

SEQ ID NO: 4140740 - DNA, 25 bp, Homo sapien
tactatctaatgtggtccttagaaa

SEQ ID NO: 4140741 - DNA, 25 bp, Homo sapien
tactttacaggtatactatctaatg

SEQ ID NO: 4140742 - DNA, 25 bp, Homo sapien
tgccaatacctgaatgacatccatc

SEQ ID NO: 4140743 - DNA, 25 bp, Homo sapien
gaccaccatatgacctgattgtaag

SEQ ID NO: 4140744 - DNA, 25 bp, Homo sapien
cacaggctggatcagtcccggctgt

SEQ ID NO: 4140745 - DNA, 25 bp, Homo sapien
cccagcaggaaaactgaacacccag

SEQ ID NO: 4140746 - DNA, 25 bp, Homo sapien
agatcaaagcaaccaagaattcttc

SEQ ID NO: 4140747 - DNA, 25 bp, Homo sapien
agaattcttccaggccaatcgttat

SEQ ID NO: 4140748 - DNA, 25 bp, Homo sapien
catctgtgttcccttaattacagga

SEQ ID NO: 4140749 - DNA, 25 bp, Homo sapien
gacagtccgatttcagataagatca

SEQ ID NO: 4140750 - DNA, 25 bp, Homo sapien
agttccttcagacctgtaccttggt

SEQ ID NO: 4140751 - DNA, 25 bp, Homo sapien
tacaaaggaaatcggctccttagct

SEQ ID NO: 4140752 - DNA, 25 bp, Homo sapien
caaaatactgactttataagttcct

SEQ ID NO: 4140753 - DNA, 25 bp, Homo sapien
ttacaaaggaaatcggctccttagc

SEQ ID NO: 4140754 - DNA, 25 bp, Homo sapien
ttaatcaaagcagggaccgtctggg

SEQ ID NO: 4140755 - DNA, 25 bp, Homo sapien
ctgcaccgaacagaggcagggggtt

SEQ ID NO: 4140756 - DNA, 25 bp, Homo sapien
tctggggcttgctcagatttcctcc

SEQ ID NO: 4140757 - DNA, 25 bp, Homo sapien
tttcctcctggctgcaccgaacaga

SEQ ID NO: 4140758 - DNA, 25 bp, Homo sapien
tgattccgtagcattccagtcccca

SEQ ID NO: 4140759 - DNA, 25 bp, Homo sapien
ccatcagccagtagagctgattccg

SEQ ID NO: 4140760 - DNA, 25 bp, Homo sapien
tgacccaaaacgcatctgccatcag

SEQ ID NO: 4140761 - DNA, 25 bp, Homo sapien
gggacgcaaaaagcattggcggcca

SEQ ID NO: 4140762 - DNA, 25 bp, Homo sapien
atagcaatgcactgatgtgagccac

SEQ ID NO: 4140763 - DNA, 25 bp, Homo sapien
gcataatgaggagccgagcgtctaa

SEQ ID NO: 4140764 - DNA, 25 bp, Homo sapien
gaacgtgtgagttcccaaagcataa

SEQ ID NO: 4140765 - DNA, 25 bp, Homo sapien
gagcgtctaacttggcaggcctcca

SEQ ID NO: 4140766 - DNA, 25 bp, Homo sapien
tccatcccgttatcctactagattt

SEQ ID NO: 4140767 - DNA, 25 bp, Homo sapien
caagggctaaagatccatcccgtta

SEQ ID NO: 4140768 - DNA, 25 bp, Homo sapien
actagattttagcatgctattttcc

SEQ ID NO: 4140769 - DNA, 25 bp, Homo sapien
gctaaagatccatcccgttatccta

SEQ ID NO: 4140770 - DNA, 25 bp, Homo sapien
caagttatatgacagctgagggtga

SEQ ID NO: 4140771 - DNA, 25 bp, Homo sapien
gagtctgtaccaaagaaggattccc

SEQ ID NO: 4140772 - DNA, 25 bp, Homo sapien
gaaatagttaagtgcaggctcctga

SEQ ID NO: 4140773 - DNA, 25 bp, Homo sapien
ggtcctgcagcaataacaaacgcgc

SEQ ID NO: 4140774 - DNA, 25 bp, Homo sapien
gagagaacacactacagcagtacac

SEQ ID NO: 4140775 - DNA, 25 bp, Homo sapien
ggacaggccacctgactgccggcca

SEQ ID NO: 4140776 - DNA, 25 bp, Homo sapien
agagagaacacactacagcagtaca

SEQ ID NO: 4140777 - DNA, 25 bp, Homo sapien
ggccacctgactgccggccaactgg

SEQ ID NO: 4140778 - DNA, 25 bp, Homo sapien
tgtgacctgcaagtgcaggtcagga

SEQ ID NO: 4140779 - DNA, 25 bp, Homo sapien
ccaaattaggacttgccatatccag

SEQ ID NO: 4140780 - DNA, 25 bp, Homo sapien
caagtgcaggtcaggatctgcatgg

SEQ ID NO: 4140781 - DNA, 25 bp, Homo sapien
cagtttccaaattaggacttgccat

SEQ ID NO: 4140782 - DNA, 25 bp, Homo sapien
tttggactctgcaatgtaaggccag

SEQ ID NO: 4140783 - DNA, 25 bp, Homo sapien
gaaccattttggacccacaaggtga

SEQ ID NO: 4140784 - DNA, 25 bp, Homo sapien
ggctccatgaggctagtggaaccat

SEQ ID NO: 4140785 - DNA, 25 bp, Homo sapien
aagtttgctgggcttccggtgatga

SEQ ID NO: 4140786 - DNA, 25 bp, Homo sapien
agatggctttctgaccaccgccaac

SEQ ID NO: 4140787 - DNA, 25 bp, Homo sapien
ctctttgaacgcacgtatacctcac

SEQ ID NO: 4140788 - DNA, 25 bp, Homo sapien
gccccatccctctttgaacgcacgt

SEQ ID NO: 4140789 - DNA, 25 bp, Homo sapien
ccatccctctttgaacgcacgtata

SEQ ID NO: 4140790 - DNA, 25 bp, Homo sapien
tctgggcaatgtttagggaggcttc

SEQ ID NO: 4140791 - DNA, 25 bp, Homo sapien
tgtaagatgcgctccgatcacaggg

SEQ ID NO: 4140792 - DNA, 25 bp, Homo sapien
tggaaccaaggcatatagcacctgc

SEQ ID NO: 4140793 - DNA, 25 bp, Homo sapien
ggtgtccacctgctgtacaatgcca

SEQ ID NO: 4140794 - DNA, 25 bp, Homo sapien
gcagccagctgactgtgagctctga

SEQ ID NO: 4140795 - DNA, 25 bp, Homo sapien
cttcatctaatccccagacttccac

SEQ ID NO: 4140796 - DNA, 25 bp, Homo sapien
tctaatccccagacttccactgcag

SEQ ID NO: 4140797 - DNA, 25 bp, Homo sapien
tgcagccagctgactgtgagctctg

SEQ ID NO: 4140798 - DNA, 25 bp, Homo sapien
cgcgaggctgtctggccctgtgaaa

SEQ ID NO: 4140799 - DNA, 25 bp, Homo sapien
ttgccagtgatagtacattccagtg

SEQ ID NO: 4140800 - DNA, 25 bp, Homo sapien
aagcagaggctgacaactatcctag

SEQ ID NO: 4140801 - DNA, 25 bp, Homo sapien
aacagattatcatgtagcgcgaggc

SEQ ID NO: 4140802 - DNA, 25 bp, Homo sapien
gcagacaggatgattaactcacttc

SEQ ID NO: 4140803 - DNA, 25 bp, Homo sapien
tgtgggactaggaaacacttcacag

SEQ ID NO: 4140804 - DNA, 25 bp, Homo sapien
atgtgggactaggaaacacttcaca

SEQ ID NO: 4140805 - DNA, 25 bp, Homo sapien
gggtgcagacaggatgattaactca

SEQ ID NO: 4140806 - DNA, 25 bp, Homo sapien
gaagccatcgagttgcagttcctgg

SEQ ID NO: 4140807 - DNA, 25 bp, Homo sapien
cacgcgcatactggtctaaaatgtc

SEQ ID NO: 4140808 - DNA, 25 bp, Homo sapien
tgtcaataggagactggtgacggcc

SEQ ID NO: 4140809 - DNA, 25 bp, Homo sapien
ctagacgtgacccagtgctcaggac

SEQ ID NO: 4140810 - DNA, 25 bp, Homo sapien
aggaaaacaccagagacatccaaaa

SEQ ID NO: 4140811 - DNA, 25 bp, Homo sapien
catggttaaggaaaacaccagagac

SEQ ID NO: 4140812 - DNA, 25 bp, Homo sapien
tgccccagcggaggcaaatgcaaga

SEQ ID NO: 4140813 - DNA, 25 bp, Homo sapien
caaaaaatgtaaaggctcgtggaga

SEQ ID NO: 4140814 - DNA, 25 bp, Homo sapien
tatcgagtccaacagaatacaaaga

SEQ ID NO: 4140815 - DNA, 25 bp, Homo sapien
tccgtagagaaagacatatcgagtc

SEQ ID NO: 4140816 - DNA, 25 bp, Homo sapien
aaatcatttatatctctgtcagggg

SEQ ID NO: 4140817 - DNA, 25 bp, Homo sapien
catttatatctctgtcaggggtcat

SEQ ID NO: 4140818 - DNA, 25 bp, Homo sapien
ctaaatcatttatatctctgtcagg

SEQ ID NO: 4140819 - DNA, 25 bp, Homo sapien
atcatttatatctctgtcaggggtc

SEQ ID NO: 4140820 - DNA, 25 bp, Homo sapien
aagccaagcttgtgtaagccatggg

SEQ ID NO: 4140821 - DNA, 25 bp, Homo sapien
cgaatggtttgtgatcaaaagccaa

SEQ ID NO: 4140822 - DNA, 25 bp, Homo sapien
gaaagtacttatcctcattgtctcc

SEQ ID NO: 4140823 - DNA, 25 bp, Homo sapien
cctagttagagctttagcgagaaat

SEQ ID NO: 4140824 - DNA, 25 bp, Homo sapien
tgaatctgccaggtagaccagctcc

SEQ ID NO: 4140825 - DNA, 25 bp, Homo sapien
gctgtggccccagtgaaattccacc

SEQ ID NO: 4140826 - DNA, 25 bp, Homo sapien
ggtagaccagctccactgacaaaat

SEQ ID NO: 4140827 - DNA, 25 bp, Homo sapien
tagtcgtctttcagaaggatggcga

SEQ ID NO: 4140828 - DNA, 25 bp, Homo sapien
cacgttgagatcttgactttctctc

SEQ ID NO: 4140829 - DNA, 25 bp, Homo sapien
cgttgagatcttgactttctctcac

SEQ ID NO: 4140830 - DNA, 25 bp, Homo sapien
tacacgttgagatcttgactttctc

SEQ ID NO: 4140831 - DNA, 25 bp, Homo sapien
ctacacgttgagatcttgactttct

SEQ ID NO: 4140832 - DNA, 25 bp, Homo sapien
tgttgccgccgttggaagagaagaa

SEQ ID NO: 4140833 - DNA, 25 bp, Homo sapien
taatccacacgtttagcaaaaatcc

SEQ ID NO: 4140834 - DNA, 25 bp, Homo sapien
gaatgtactatgtctcagcgatacc

SEQ ID NO: 4140835 - DNA, 25 bp, Homo sapien
ctgcaagagcagagataatccacac

SEQ ID NO: 4140836 - DNA, 25 bp, Homo sapien
cacaagatttgaatactggatagtc

SEQ ID NO: 4140837 - DNA, 25 bp, Homo sapien
tataaaccgcatgccctgagataac

SEQ ID NO: 4140838 - DNA, 25 bp, Homo sapien
tactgactggtaagttgtccatgat

SEQ ID NO: 4140839 - DNA, 25 bp, Homo sapien
atcaacatgatatcccctccacgag

SEQ ID NO: 4140840 - DNA, 25 bp, Homo sapien
gaacaagttcaacagatgaccagag

SEQ ID NO: 4140841 - DNA, 25 bp, Homo sapien
tcaagggcctcagctatgcagcatt

SEQ ID NO: 4140842 - DNA, 25 bp, Homo sapien
taatgaaatatgaaccccagggatc

SEQ ID NO: 4140843 - DNA, 25 bp, Homo sapien
aaaactcttatcacgcaggtattcg

SEQ ID NO: 4140844 - DNA, 25 bp, Homo sapien
ggcaatttttaaggacaggtagata

SEQ ID NO: 4140845 - DNA, 25 bp, Homo sapien
gcaatttttaaggacaggtagatac

SEQ ID NO: 4140846 - DNA, 25 bp, Homo sapien
ctctttgaagacagtcgaaattttc

SEQ ID NO: 4140847 - DNA, 25 bp, Homo sapien
gtgcaacttcgaataaactctttga

SEQ ID NO: 4140848 - DNA, 25 bp, Homo sapien
aagacagtcgaaattttctgtactg

SEQ ID NO: 4140849 - DNA, 25 bp, Homo sapien
ctttgaagacagtcgaaattttctg

SEQ ID NO: 4140850 - DNA, 25 bp, Homo sapien
tttggaatgttaacggcacagcaga

SEQ ID NO: 4140851 - DNA, 25 bp, Homo sapien
taagatgcagataccttgacgtgtc

SEQ ID NO: 4140852 - DNA, 25 bp, Homo sapien
cagcacattaggacccatttggagt

SEQ ID NO: 4140853 - DNA, 25 bp, Homo sapien
ggtaacaccactgtctaagatgcag

SEQ ID NO: 4140854 - DNA, 25 bp, Homo sapien
gagtaacagccacatgattcaccat

SEQ ID NO: 4140855 - DNA, 25 bp, Homo sapien
taatatgaaactttttagaaattgc

SEQ ID NO: 4140856 - DNA, 25 bp, Homo sapien
cttgggagtaacagccacatgattc

SEQ ID NO: 4140857 - DNA, 25 bp, Homo sapien
gtttgtgctctttgtaatatgaaac

SEQ ID NO: 4140858 - DNA, 25 bp, Homo sapien
gcctttgaactcaagactgcaagat

SEQ ID NO: 4140859 - DNA, 25 bp, Homo sapien
cacagattgagctcaggtttccagc

SEQ ID NO: 4140860 - DNA, 25 bp, Homo sapien
gcaagatcaacttagctagagtaac

SEQ ID NO: 4140861 - DNA, 25 bp, Homo sapien
ggaattctgcctctacactgcaaca

SEQ ID NO: 4140862 - DNA, 25 bp, Homo sapien
gcatcatcatcgaccaggaaacatg

SEQ ID NO: 4140863 - DNA, 25 bp, Homo sapien
attaaaagcatcatcatcgaccagg

SEQ ID NO: 4140864 - DNA, 25 bp, Homo sapien
aaagcatcatcatcgaccaggaaac

SEQ ID NO: 4140865 - DNA, 25 bp, Homo sapien
atcatcatcgaccaggaaacatgtc

SEQ ID NO: 4140866 - DNA, 25 bp, Homo sapien
tatggccatggctccgattattctg

SEQ ID NO: 4140867 - DNA, 25 bp, Homo sapien
ggctccgattattctgttctcagaa

SEQ ID NO: 4140868 - DNA, 25 bp, Homo sapien
aaaaaatatggccatggctccgatt

SEQ ID NO: 4140869 - DNA, 25 bp, Homo sapien
ggccatggctccgattattctgttc

SEQ ID NO: 4140870 - DNA, 25 bp, Homo sapien
aaggaagcgagggtgcatctgacgg

SEQ ID NO: 4140871 - DNA, 25 bp, Homo sapien
ctatgaagtagaatcttggaggtct

SEQ ID NO: 4140872 - DNA, 25 bp, Homo sapien
gtctgagcacaggttggcatgacag

SEQ ID NO: 4140873 - DNA, 25 bp, Homo sapien
cagaggtccagctgcatgaaaagca

SEQ ID NO: 4140874 - DNA, 25 bp, Homo sapien
tcagaaagatctgtgcagactggtc

SEQ ID NO: 4140875 - DNA, 25 bp, Homo sapien
gtgggtcacagggatactcaagaga

SEQ ID NO: 4140876 - DNA, 25 bp, Homo sapien
tttcgcaagagacaacagtaaccct

SEQ ID NO: 4140877 - DNA, 25 bp, Homo sapien
ctcaatgcctagatggccagatagt

SEQ ID NO: 4140878 - DNA, 25 bp, Homo sapien
tctcagccgacttggctgctccaat

SEQ ID NO: 4140879 - DNA, 25 bp, Homo sapien
ggcatctgggtccatatcaatgtgt

SEQ ID NO: 4140880 - DNA, 25 bp, Homo sapien
catatcaatgtgttacttgtctctc

SEQ ID NO: 4140881 - DNA, 25 bp, Homo sapien
gccgacttggctgctccaattaaat

SEQ ID NO: 4140882 - DNA, 25 bp, Homo sapien
taatcccttgtacctgagttgatag

SEQ ID NO: 4140883 - DNA, 25 bp, Homo sapien
cctgagttgataggccaggcaggcc

SEQ ID NO: 4140884 - DNA, 25 bp, Homo sapien
cccttgtacctgagttgataggcca

SEQ ID NO: 4140885 - DNA, 25 bp, Homo sapien
tgctcctaatcccttgtacctgagt

SEQ ID NO: 4140886 - DNA, 25 bp, Homo sapien
agaagtggttccaaagtacaagatc

SEQ ID NO: 4140887 - DNA, 25 bp, Homo sapien
agtggttccaaagtacaagatctcc

SEQ ID NO: 4140888 - DNA, 25 bp, Homo sapien
gtggttccaaagtacaagatctcca

SEQ ID NO: 4140889 - DNA, 25 bp, Homo sapien
ctgcagaagaagtggttccaaagta

SEQ ID NO: 4140890 - DNA, 25 bp, Homo sapien
ttttactgaagcaatgggaccaggg

SEQ ID NO: 4140891 - DNA, 25 bp, Homo sapien
cagagcctggtacatcctggcacag

SEQ ID NO: 4140892 - DNA, 25 bp, Homo sapien
aacaaattctcagcataggccctgg

SEQ ID NO: 4140893 - DNA, 25 bp, Homo sapien
tggaaaacacgaagctctcacgacc

SEQ ID NO: 4140894 - DNA, 25 bp, Homo sapien
tcatttgctggaacggacacaggtc

SEQ ID NO: 4140895 - DNA, 25 bp, Homo sapien
cactcggtgctgttgtgggacttat

SEQ ID NO: 4140896 - DNA, 25 bp, Homo sapien
cagtcctttagagaacactcggtgc

SEQ ID NO: 4140897 - DNA, 25 bp, Homo sapien
gacacaggtctggagtaatatcgcc

SEQ ID NO: 4140898 - DNA, 25 bp, Homo sapien
tggccatgcttgttgccccactaaa

SEQ ID NO: 4140899 - DNA, 25 bp, Homo sapien
gcttcacgagataatgtttggccat

SEQ ID NO: 4140900 - DNA, 25 bp, Homo sapien
ttcaaacctgggaaagcatgatggt

SEQ ID NO: 4140901 - DNA, 25 bp, Homo sapien
tatacctgtcacacgagcatgttga

SEQ ID NO: 4140902 - DNA, 25 bp, Homo sapien
tagcgacggttagtaaggaatcaaa

SEQ ID NO: 4140903 - DNA, 25 bp, Homo sapien
ccaacttcaggatggacctaattta

SEQ ID NO: 4140904 - DNA, 25 bp, Homo sapien
gcggccacaacttttctagtatttg

SEQ ID NO: 4140905 - DNA, 25 bp, Homo sapien
ggaatcaacacttttgcggccacaa

SEQ ID NO: 4140906 - DNA, 25 bp, Homo sapien
tctaactgaagggatgccaaatcca

SEQ ID NO: 4140907 - DNA, 25 bp, Homo sapien
tcattcggccacaaggaaatcccag

SEQ ID NO: 4140908 - DNA, 25 bp, Homo sapien
caccagagctgagaattgggtcata

SEQ ID NO: 4140909 - DNA, 25 bp, Homo sapien
ccaaatccatggtgaagaaagcccc

SEQ ID NO: 4140910 - DNA, 25 bp, Homo sapien
ggtcaccggcagagagtagtgatga

SEQ ID NO: 4140911 - DNA, 25 bp, Homo sapien
gggtcaccggcagagagtagtgatg

SEQ ID NO: 4140912 - DNA, 25 bp, Homo sapien
gatggcaaaaccatatagatttaga

SEQ ID NO: 4140913 - DNA, 25 bp, Homo sapien
gatttagaaaatctgcccatatcac

SEQ ID NO: 4140914 - DNA, 25 bp, Homo sapien
gcccatatcaccttcttttcagttt

SEQ ID NO: 4140915 - DNA, 25 bp, Homo sapien
cagttttgctatagataaaagtttt

SEQ ID NO: 4140916 - DNA, 25 bp, Homo sapien
cttctctaggttcttctacctctgt

SEQ ID NO: 4140917 - DNA, 25 bp, Homo sapien
ttagaatggggatcattacaaagcc

SEQ ID NO: 4140918 - DNA, 25 bp, Homo sapien
atggggatcattacaaagccaggaa

SEQ ID NO: 4140919 - DNA, 25 bp, Homo sapien
gaatggggatcattacaaagccagg

SEQ ID NO: 4140920 - DNA, 25 bp, Homo sapien
caaaagacatttaagcagccaacag

SEQ ID NO: 4140921 - DNA, 25 bp, Homo sapien
aaaacttgcaaggtagagcgtatca

SEQ ID NO: 4140922 - DNA, 25 bp, Homo sapien
cacttagtctagaaatatgaagcaa

SEQ ID NO: 4140923 - DNA, 25 bp, Homo sapien
tcatgctcttagaaatgtgaacgga

SEQ ID NO: 4140924 - DNA, 25 bp, Homo sapien
gaacagaatactggtgttctgcaac

SEQ ID NO: 4140925 - DNA, 25 bp, Homo sapien
ttccaggagtactgctcctcaaagg

SEQ ID NO: 4140926 - DNA, 25 bp, Homo sapien
caggacttgatcgaggtggagcatc

SEQ ID NO: 4140927 - DNA, 25 bp, Homo sapien
gttcaccaacagtttccgagctccg

SEQ ID NO: 4140928 - DNA, 25 bp, Homo sapien
aaaggctggcctcgtggattccaga

SEQ ID NO: 4140929 - DNA, 25 bp, Homo sapien
gcaaaaccccggtggatgacctgat

SEQ ID NO: 4140930 - DNA, 25 bp, Homo sapien
gacctgatgagcctgctgtaaaaca

SEQ ID NO: 4140931 - DNA, 25 bp, Homo sapien
ctcccagagcaaaaccccggtggat

SEQ ID NO: 4140932 - DNA, 25 bp, Homo sapien
ccccggtggatgacctgatgagcct

SEQ ID NO: 4140933 - DNA, 25 bp, Homo sapien
cttgtgggaaaaaaggatttatgca

SEQ ID NO: 4140934 - DNA, 25 bp, Homo sapien
ttgtgggaaaaaaggatttatgcat

SEQ ID NO: 4140935 - DNA, 25 bp, Homo sapien
tgtgggaaaaaaggatttatgcatg

SEQ ID NO: 4140936 - DNA, 25 bp, Homo sapien
cataaacatcacatccagccgatat

SEQ ID NO: 4140937 - DNA, 25 bp, Homo sapien
ccataaacatcacatccagccgata

SEQ ID NO: 4140938 - DNA, 25 bp, Homo sapien
tccgacaccgccagctgctccttta

SEQ ID NO: 4140939 - DNA, 25 bp, Homo sapien
tgccttgaatccgacaccgccagct

SEQ ID NO: 4140940 - DNA, 25 bp, Homo sapien
tgtgctcctccaaaaaggtgttatc

SEQ ID NO: 4140941 - DNA, 25 bp, Homo sapien
ggtgttatcccttctctaccatggc

SEQ ID NO: 4140942 - DNA, 25 bp, Homo sapien
gagaaacaggctatgataccagtag

SEQ ID NO: 4140943 - DNA, 25 bp, Homo sapien
gacacaacatttgctggccacctga

SEQ ID NO: 4140944 - DNA, 25 bp, Homo sapien
cgtggataataggatccagtgcaga

SEQ ID NO: 4140945 - DNA, 25 bp, Homo sapien
gtgcagaattgtccctcggactgac

SEQ ID NO: 4140946 - DNA, 25 bp, Homo sapien
atgatgtacgacacccttcaacccg

SEQ ID NO: 4140947 - DNA, 25 bp, Homo sapien
ccttcaacccgtggataataggatc

SEQ ID NO: 4140948 - DNA, 25 bp, Homo sapien
tacttgctccaattgacccctgaca

SEQ ID NO: 4140949 - DNA, 25 bp, Homo sapien
gactgaccaattttgagaacggaac

SEQ ID NO: 4140950 - DNA, 25 bp, Homo sapien
tactattgttacctgctgcatgact

SEQ ID NO: 4140951 - DNA, 25 bp, Homo sapien
cctctatgtggtgttttcagtaacc

SEQ ID NO: 4140952 - DNA, 25 bp, Homo sapien
taatgaacatacagtgcagcagtgg

SEQ ID NO: 4140953 - DNA, 25 bp, Homo sapien
agcactggtcgacagaaagggccca

SEQ ID NO: 4140954 - DNA, 25 bp, Homo sapien
ctggcgaacccatgacaactgagaa

SEQ ID NO: 4140955 - DNA, 25 bp, Homo sapien
tcagactgtgacatgcgacgaagag

SEQ ID NO: 4140956 - DNA, 25 bp, Homo sapien
tttcccaaaagtcgcttgttctaga

SEQ ID NO: 4140957 - DNA, 25 bp, Homo sapien
cccaaaagtcgcttgttctagaatt

SEQ ID NO: 4140958 - DNA, 25 bp, Homo sapien
cttcagccatttggcctcagatggc

SEQ ID NO: 4140959 - DNA, 25 bp, Homo sapien
aacttcagccatttggcctcagatg

SEQ ID NO: 4140960 - DNA, 25 bp, Homo sapien
taatcagatccctgtcttgaagcac

SEQ ID NO: 4140961 - DNA, 25 bp, Homo sapien
aatacatatgagcatgaatagggcc

SEQ ID NO: 4140962 - DNA, 25 bp, Homo sapien
gagacagtccaccttattaatcaga

SEQ ID NO: 4140963 - DNA, 25 bp, Homo sapien
tcatgaatagccaccccacagggtt

SEQ ID NO: 4140964 - DNA, 25 bp, Homo sapien
cctgggctgtgtaaagagtcaacac

SEQ ID NO: 4140965 - DNA, 25 bp, Homo sapien
agcctaatgacaggggaaatctctg

SEQ ID NO: 4140966 - DNA, 25 bp, Homo sapien
aaagccccaagcgatagagggtgtg

SEQ ID NO: 4140967 - DNA, 25 bp, Homo sapien
tctgcaagcatgcttggcggggact

SEQ ID NO: 4140968 - DNA, 25 bp, Homo sapien
catccccagactcgagaagtctgtg

SEQ ID NO: 4140969 - DNA, 25 bp, Homo sapien
tgcatccccagactcgagaagtctg

SEQ ID NO: 4140970 - DNA, 25 bp, Homo sapien
tacagaaatttgggcaactgtgcat

SEQ ID NO: 4140971 - DNA, 25 bp, Homo sapien
ccccagactcgagaagtctgtgtaa

SEQ ID NO: 4140972 - DNA, 25 bp, Homo sapien
tcattcccaagcctcatacctcctc

SEQ ID NO: 4140973 - DNA, 25 bp, Homo sapien
cattcccaagcctcatacctcctcc

SEQ ID NO: 4140974 - DNA, 25 bp, Homo sapien
attcccaagcctcatacctcctcct

SEQ ID NO: 4140975 - DNA, 25 bp, Homo sapien
ttcccaagcctcatacctcctcctt

SEQ ID NO: 4140976 - DNA, 25 bp, Homo sapien
tgtggtcaaggaacctgtgtaccga

SEQ ID NO: 4140977 - DNA, 25 bp, Homo sapien
tgtgtaccgataatagctgcccagg

SEQ ID NO: 4140978 - DNA, 25 bp, Homo sapien
tcccggaggacgaaaggatccagaa

SEQ ID NO: 4140979 - DNA, 25 bp, Homo sapien
gacgggtctccggaagactatccac

SEQ ID NO: 4140980 - DNA, 25 bp, Homo sapien
tgacttaaagacctctcactgcctg

SEQ ID NO: 4140981 - DNA, 25 bp, Homo sapien
tacttgacataagacccagaaggtc

SEQ ID NO: 4140982 - DNA, 25 bp, Homo sapien
ggacagtcttggttaatggctcaaa

SEQ ID NO: 4140983 - DNA, 25 bp, Homo sapien
ggtactagaacaatcagactggagg

SEQ ID NO: 4140984 - DNA, 25 bp, Homo sapien
tgaaacaatgttggcatcaccatta

SEQ ID NO: 4140985 - DNA, 25 bp, Homo sapien
caaataaatttgttcagcctggcct

SEQ ID NO: 4140986 - DNA, 25 bp, Homo sapien
tttacccactgacaggtaacactgg

SEQ ID NO: 4140987 - DNA, 25 bp, Homo sapien
agccactgagccgtaaacctttcaa

SEQ ID NO: 4140988 - DNA, 25 bp, Homo sapien
tggctgttcgcctttctgaaatgaa

SEQ ID NO: 4140989 - DNA, 25 bp, Homo sapien
tggcttttccgaattggctgttcgc

SEQ ID NO: 4140990 - DNA, 25 bp, Homo sapien
caaggatccagtttggccacatgaa

SEQ ID NO: 4140991 - DNA, 25 bp, Homo sapien
taatacttggatggcgaatgctttc

SEQ ID NO: 4140992 - DNA, 25 bp, Homo sapien
gatactccaccgacttgacatggtc

SEQ ID NO: 4140993 - DNA, 25 bp, Homo sapien
tggacaccaccctgtcatgcagacg

SEQ ID NO: 4140994 - DNA, 25 bp, Homo sapien
gaagtctgtcatgtcgtggttccag

SEQ ID NO: 4140995 - DNA, 25 bp, Homo sapien
cagacgctgctgtggtcgaaagtta

SEQ ID NO: 4140996 - DNA, 25 bp, Homo sapien
agcatttccggagctctgtgaccca

SEQ ID NO: 4140997 - DNA, 25 bp, Homo sapien
agctctgtgacccaattctgataaa

SEQ ID NO: 4140998 - DNA, 25 bp, Homo sapien
tcagcatttccggagctctgtgacc

SEQ ID NO: 4140999 - DNA, 25 bp, Homo sapien
gacccaattctgataaatcccagag

SEQ ID NO: 4141000 - DNA, 25 bp, Homo sapien
catcttttggcctatagtggcgctg

SEQ ID NO: 4141001 - DNA, 25 bp, Homo sapien
agccctccaggctgtttgatgatgt

SEQ ID NO: 4141002 - DNA, 25 bp, Homo sapien
gagttacctgagtcttcgtagggaa

SEQ ID NO: 4141003 - DNA, 25 bp, Homo sapien
ttggcctatagtggcgctgagttac

SEQ ID NO: 4141004 - DNA, 25 bp, Homo sapien
gaatggaaacacagatccaacacat

SEQ ID NO: 4141005 - DNA, 25 bp, Homo sapien
aatggaaacacagatccaacacatt

SEQ ID NO: 4141006 - DNA, 25 bp, Homo sapien
taaatggccccacggtacagatcaa

SEQ ID NO: 4141007 - DNA, 25 bp, Homo sapien
cagtctaggtatgcttgaatcccaa

SEQ ID NO: 4141008 - DNA, 25 bp, Homo sapien
caggtactgtgttaggccctcctca

SEQ ID NO: 4141009 - DNA, 25 bp, Homo sapien
taaactgtgttgttcaagtcacccg

SEQ ID NO: 4141010 - DNA, 25 bp, Homo sapien
cctgacctaaacttggggagttgct

SEQ ID NO: 4141011 - DNA, 25 bp, Homo sapien
caatgagtaggtgtttatagaggaa

SEQ ID NO: 4141012 - DNA, 25 bp, Homo sapien
tgagcatagtttgaactgaaatctc

SEQ ID NO: 4141013 - DNA, 25 bp, Homo sapien
tgaaatctcaacaatgagtaggtgt

SEQ ID NO: 4141014 - DNA, 25 bp, Homo sapien
tccattgaagaggattccatgtaca

SEQ ID NO: 4141015 - DNA, 25 bp, Homo sapien
gatgctgttttgagcgtcctccatt

SEQ ID NO: 4141016 - DNA, 25 bp, Homo sapien
ggctcgcgtttctctgacggaatga

SEQ ID NO: 4141017 - DNA, 25 bp, Homo sapien
ccttatcactggtacccttggcagg

SEQ ID NO: 4141018 - DNA, 25 bp, Homo sapien
tctgaggccgatgggccacccgtgt

SEQ ID NO: 4141019 - DNA, 25 bp, Homo sapien
aaaatccagcttcaacaccctgctt

SEQ ID NO: 4141020 - DNA, 25 bp, Homo sapien
tgtcctcctgcactctcactgcttc

SEQ ID NO: 4141021 - DNA, 25 bp, Homo sapien
aaaaaatccagcttcaacaccctgc

SEQ ID NO: 4141022 - DNA, 25 bp, Homo sapien
aacccaaaacccaaggcagctctgg

SEQ ID NO: 4141023 - DNA, 25 bp, Homo sapien
gactcccgtatttcctactcaagaa

SEQ ID NO: 4141024 - DNA, 25 bp, Homo sapien
tgcaggaaccgggtaagaagtaagc

SEQ ID NO: 4141025 - DNA, 25 bp, Homo sapien
gcttggttctgacccgctggcatct

SEQ ID NO: 4141026 - DNA, 25 bp, Homo sapien
gaagatgcccttgaggaaggttcat

SEQ ID NO: 4141027 - DNA, 25 bp, Homo sapien
ggttcatgtaactgagagctgagag

SEQ ID NO: 4141028 - DNA, 25 bp, Homo sapien
aggtggctcgggctttggcacccag

SEQ ID NO: 4141029 - DNA, 25 bp, Homo sapien
gaggaaggttcatgtaactgagagc

SEQ ID NO: 4141030 - DNA, 25 bp, Homo sapien
caaagaatcccatgcgcagagccat

SEQ ID NO: 4141031 - DNA, 25 bp, Homo sapien
aaagaatcccatgcgcagagccatc

SEQ ID NO: 4141032 - DNA, 25 bp, Homo sapien
aagaatcccatgcgcagagccatca

SEQ ID NO: 4141033 - DNA, 25 bp, Homo sapien
tgcagtgccgtctggttcagaggct

SEQ ID NO: 4141034 - DNA, 25 bp, Homo sapien
ccagctgtaggagatcatgtagttc

SEQ ID NO: 4141035 - DNA, 25 bp, Homo sapien
ttgtcgctgtcctttgtaaacgtct

SEQ ID NO: 4141036 - DNA, 25 bp, Homo sapien
ggtggtagatagtctccggctggct

SEQ ID NO: 4141037 - DNA, 25 bp, Homo sapien
gattccatgacctgtaaagcctcag

SEQ ID NO: 4141038 - DNA, 25 bp, Homo sapien
tcactgatctcgtttggaaaaggcg

SEQ ID NO: 4141039 - DNA, 25 bp, Homo sapien
tgggccaagtatagaagcagctctg

SEQ ID NO: 4141040 - DNA, 25 bp, Homo sapien
catcaaagcatgtgttctgggccaa

SEQ ID NO: 4141041 - DNA, 25 bp, Homo sapien
tctgtttctttacagttcaaaggcc

SEQ ID NO: 4141042 - DNA, 25 bp, Homo sapien
gcctctgctatcttctgtaaaatgg

SEQ ID NO: 4141043 - DNA, 25 bp, Homo sapien
gaggaagagctacttcataggtact

SEQ ID NO: 4141044 - DNA, 25 bp, Homo sapien
ggacatagtctcctcataccactca

SEQ ID NO: 4141045 - DNA, 25 bp, Homo sapien
cttgaaacagcatcgtctggctaaa

SEQ ID NO: 4141046 - DNA, 25 bp, Homo sapien
gactcggaacaggtaaaggctatcg

SEQ ID NO: 4141047 - DNA, 25 bp, Homo sapien
aaagtcgctgcgcatgtcgttccga

SEQ ID NO: 4141048 - DNA, 25 bp, Homo sapien
aaggctatcgggtgagacatggcta

SEQ ID NO: 4141049 - DNA, 25 bp, Homo sapien
ctaaattactagggcttcccgcata

SEQ ID NO: 4141050 - DNA, 25 bp, Homo sapien
aattactagggcttcccgcataggc

SEQ ID NO: 4141051 - DNA, 25 bp, Homo sapien
tagggcttcccgcataggctttaaa

SEQ ID NO: 4141052 - DNA, 25 bp, Homo sapien
ttactagggcttcccgcataggctt

SEQ ID NO: 4141053 - DNA, 25 bp, Homo sapien
cccttggaatattcgagtggtatta

SEQ ID NO: 4141054 - DNA, 25 bp, Homo sapien
ctgttttcactattctggtcccttg

SEQ ID NO: 4141055 - DNA, 25 bp, Homo sapien
ctggtcccttggaatattcgagtgg

SEQ ID NO: 4141056 - DNA, 25 bp, Homo sapien
gtcccttggaatattcgagtggtat

SEQ ID NO: 4141057 - DNA, 25 bp, Homo sapien
ggtgacagttttaactgcaagcaaa

SEQ ID NO: 4141058 - DNA, 25 bp, Homo sapien
acaacattatactgccacttcgtgg

SEQ ID NO: 4141059 - DNA, 25 bp, Homo sapien
cagccacgacaaagcaatttcccat

SEQ ID NO: 4141060 - DNA, 25 bp, Homo sapien
caagcaaattaacaaccagccacga

SEQ ID NO: 4141061 - DNA, 25 bp, Homo sapien
ctgaagaggcaggagacgctgtggg

SEQ ID NO: 4141062 - DNA, 25 bp, Homo sapien
aaatgagaatgggatgccagaggac

SEQ ID NO: 4141063 - DNA, 25 bp, Homo sapien
tccaggtagaagaccccgagctgat

SEQ ID NO: 4141064 - DNA, 25 bp, Homo sapien
aggggcccatcccagttgccatgga

SEQ ID NO: 4141065 - DNA, 25 bp, Homo sapien
tggtgaccaccgaggccactgtggc

SEQ ID NO: 4141066 - DNA, 25 bp, Homo sapien
gcggccgtcgggaggcgcgtgggcc

SEQ ID NO: 4141067 - DNA, 25 bp, Homo sapien
gtggctaggactggcctagccgcct

SEQ ID NO: 4141068 - DNA, 25 bp, Homo sapien
gctgaggcggccgtcgggaggcgcg

SEQ ID NO: 4141069 - DNA, 25 bp, Homo sapien
aggactggcctagccgcctgcttgc

SEQ ID NO: 4141070 - DNA, 25 bp, Homo sapien
tccttcttttcggagtccttctctc

SEQ ID NO: 4141071 - DNA, 25 bp, Homo sapien
ggcagcgtgggtcaccccactcttc

SEQ ID NO: 4141072 - DNA, 25 bp, Homo sapien
gccgtccttggttggtgacgaatca

SEQ ID NO: 4141073 - DNA, 25 bp, Homo sapien
gggctgggctccgtctgattccgct

SEQ ID NO: 4141074 - DNA, 25 bp, Homo sapien
tgcccaggtatagtctgatgccctc

SEQ ID NO: 4141075 - DNA, 25 bp, Homo sapien
ctgctcatgcccaggtatagtctga

SEQ ID NO: 4141076 - DNA, 25 bp, Homo sapien
tcatgcccaggtatagtctgatgcc

SEQ ID NO: 4141077 - DNA, 25 bp, Homo sapien
tgtgatcctgctcatgcccaggtat

SEQ ID NO: 4141078 - DNA, 25 bp, Homo sapien
gccggcatccctccttccgcccgtc

SEQ ID NO: 4141079 - DNA, 25 bp, Homo sapien
cctgggccggcatccctccttccgc

SEQ ID NO: 4141080 - DNA, 25 bp, Homo sapien
gcatccctccttccgcccgtctggt

SEQ ID NO: 4141081 - DNA, 25 bp, Homo sapien
ctgggccggcatccctccttccgcc

SEQ ID NO: 4141082 - DNA, 25 bp, Homo sapien
gcatttcgggcctcttgggatcact

SEQ ID NO: 4141083 - DNA, 25 bp, Homo sapien
ctgtcttcagaaaatcggtccccgc

SEQ ID NO: 4141084 - DNA, 25 bp, Homo sapien
tgggatcactccctgcatactgctc

SEQ ID NO: 4141085 - DNA, 25 bp, Homo sapien
cccgcgggacataggctttttagat

SEQ ID NO: 4141086 - DNA, 25 bp, Homo sapien
cattgcctggttgaagtccctggag

SEQ ID NO: 4141087 - DNA, 25 bp, Homo sapien
ctccagcgtaagagagtaggctttt

SEQ ID NO: 4141088 - DNA, 25 bp, Homo sapien
tattcacaggagcaggaaccctcga

SEQ ID NO: 4141089 - DNA, 25 bp, Homo sapien
cctggagttattccgaggcaagaaa

SEQ ID NO: 4141090 - DNA, 25 bp, Homo sapien
tcaccatcattgtgtggcacctggg

SEQ ID NO: 4141091 - DNA, 25 bp, Homo sapien
gagccaactgggttgatctgactcc

SEQ ID NO: 4141092 - DNA, 25 bp, Homo sapien
ccctgagtgaataagggacagagcc

SEQ ID NO: 4141093 - DNA, 25 bp, Homo sapien
tgcaaacgaggacacgggactaaga

SEQ ID NO: 4141094 - DNA, 25 bp, Homo sapien
tcttgctctgtcagtggtgtgatct

SEQ ID NO: 4141095 - DNA, 25 bp, Homo sapien
tgagccgctgtgccctgctaattgt

SEQ ID NO: 4141096 - DNA, 25 bp, Homo sapien
gctgtgccctgctaattgttgtatt

SEQ ID NO: 4141097 - DNA, 25 bp, Homo sapien
gccgctgtgccctgctaattgttgt

SEQ ID NO: 4141098 - DNA, 25 bp, Homo sapien
tggcagtcatacagaacttcagatg

SEQ ID NO: 4141099 - DNA, 25 bp, Homo sapien
taagtggcagtcatacagaacttca

SEQ ID NO: 4141100 - DNA, 25 bp, Homo sapien
catctgagtgtgtaagtggcagtca

SEQ ID NO: 4141101 - DNA, 25 bp, Homo sapien
ctctgtaacatctgagtgtgtaagt

SEQ ID NO: 4141102 - DNA, 25 bp, Homo sapien
ggttggagcctatctgaaatcccac

SEQ ID NO: 4141103 - DNA, 25 bp, Homo sapien
ttatatcgtccctcaagccacaggg

SEQ ID NO: 4141104 - DNA, 25 bp, Homo sapien
gaatgaaggtcctgaagacaaggct

SEQ ID NO: 4141105 - DNA, 25 bp, Homo sapien
catctggttgtgtggatcagtggca

SEQ ID NO: 4141106 - DNA, 25 bp, Homo sapien
caatgagaaggatgaggcacacgaa

SEQ ID NO: 4141107 - DNA, 25 bp, Homo sapien
gcagggcggcttatcattccagagg

SEQ ID NO: 4141108 - DNA, 25 bp, Homo sapien
caaggctgataccacaatcagaggg

SEQ ID NO: 4141109 - DNA, 25 bp, Homo sapien
tccagtaaacgagcacagcaatgag

SEQ ID NO: 4141110 - DNA, 25 bp, Homo sapien
tgtccggtttatcagaagaagccag

SEQ ID NO: 4141111 - DNA, 25 bp, Homo sapien
taacaaaggagtaactaggccagcc

SEQ ID NO: 4141112 - DNA, 25 bp, Homo sapien
tatgagccccttaaatgcaggaact

SEQ ID NO: 4141113 - DNA, 25 bp, Homo sapien
gggagagcctctcaaaaatgggcca

SEQ ID NO: 4141114 - DNA, 25 bp, Homo sapien
tctccccagaagaaggcacttcacg

SEQ ID NO: 4141115 - DNA, 25 bp, Homo sapien
gaaggcacttcacggaaacgtctgg

SEQ ID NO: 4141116 - DNA, 25 bp, Homo sapien
cacttcacggaaacgtctgggaaag

SEQ ID NO: 4141117 - DNA, 25 bp, Homo sapien
cagaagaaggcacttcacggaaacg

SEQ ID NO: 4141118 - DNA, 25 bp, Homo sapien
gttgaagggcttgcattccagcctc

SEQ ID NO: 4141119 - DNA, 25 bp, Homo sapien
gcgtcttagcggcacagtctccttc

SEQ ID NO: 4141120 - DNA, 25 bp, Homo sapien
aattctctgtgcaacgcgtcttagc

SEQ ID NO: 4141121 - DNA, 25 bp, Homo sapien
gggttgcaatttagctatcactggg

SEQ ID NO: 4141122 - DNA, 25 bp, Homo sapien
gactgaagtactggtaatactttcc

SEQ ID NO: 4141123 - DNA, 25 bp, Homo sapien
ggtctgactgaagtactggtaatac

SEQ ID NO: 4141124 - DNA, 25 bp, Homo sapien
gtactggtaatactttccaggagat

SEQ ID NO: 4141125 - DNA, 25 bp, Homo sapien
acattttgatgagaccgtgacagtt

SEQ ID NO: 4141126 - DNA, 25 bp, Homo sapien
gctcccagatgggtacaagaaagag

SEQ ID NO: 4141127 - DNA, 25 bp, Homo sapien
gaatgctcccagatgggtacaagaa

SEQ ID NO: 4141128 - DNA, 25 bp, Homo sapien
gaaagagctcagtttgcacaagtta

SEQ ID NO: 4141129 - DNA, 25 bp, Homo sapien
agaaagagctcagtttgcacaagtt

SEQ ID NO: 4141130 - DNA, 25 bp, Homo sapien
cactggtcatcataggacaggcaat

SEQ ID NO: 4141131 - DNA, 25 bp, Homo sapien
gagcacacactggtcatcataggac

SEQ ID NO: 4141132 - DNA, 25 bp, Homo sapien
catcataggacaggcaatgaagaga

SEQ ID NO: 4141133 - DNA, 25 bp, Homo sapien
cacacactggtcatcataggacagg

SEQ ID NO: 4141134 - DNA, 25 bp, Homo sapien
acagcactgagggtaaactcatgta

SEQ ID NO: 4141135 - DNA, 25 bp, Homo sapien
tcttattttatagatcttcccagct

SEQ ID NO: 4141136 - DNA, 25 bp, Homo sapien
gcccaaaattgctacagcatatcca

SEQ ID NO: 4141137 - DNA, 25 bp, Homo sapien
aactcatgtaaaagtaacaagatac

SEQ ID NO: 4141138 - DNA, 25 bp, Homo sapien
gatactttcattagggaccactcga

SEQ ID NO: 4141139 - DNA, 25 bp, Homo sapien
ggaccactcgaggtgaactgctgtc

SEQ ID NO: 4141140 - DNA, 25 bp, Homo sapien
tcattagggaccactcgaggtgaac

SEQ ID NO: 4141141 - DNA, 25 bp, Homo sapien
atagggatactttcattagggacca

SEQ ID NO: 4141142 - DNA, 25 bp, Homo sapien
actgccacagatgcttttcttagca

SEQ ID NO: 4141143 - DNA, 25 bp, Homo sapien
ggcaaacgcacaaacatctaaactg

SEQ ID NO: 4141144 - DNA, 25 bp, Homo sapien
caaagggtatgaagatctgtatgtg

SEQ ID NO: 4141145 - DNA, 25 bp, Homo sapien
gagtgaaagatctttggcaaacgca

SEQ ID NO: 4141146 - DNA, 25 bp, Homo sapien
tcagagaacccatgctggttattag

SEQ ID NO: 4141147 - DNA, 25 bp, Homo sapien
gtgtttgacaaactgtttgacagga

SEQ ID NO: 4141148 - DNA, 25 bp, Homo sapien
tagagctcaccgatgtgtttgacaa

SEQ ID NO: 4141149 - DNA, 25 bp, Homo sapien
ggttattagaatagagctcaccgat

SEQ ID NO: 4141150 - DNA, 25 bp, Homo sapien
ggcagcagtcggtgcagcattacac

SEQ ID NO: 4141151 - DNA, 25 bp, Homo sapien
tgatttaagatgaacaaccagccca

SEQ ID NO: 4141152 - DNA, 25 bp, Homo sapien
tgattgtggccactggtccctcaga

SEQ ID NO: 4141153 - DNA, 25 bp, Homo sapien
tgggctcaggtggactaagctttgt

SEQ ID NO: 4141154 - DNA, 25 bp, Homo sapien
tatcagcagtacagcgctggacttc

SEQ ID NO: 4141155 - DNA, 25 bp, Homo sapien
atgttcatatcagcagtacagcgct

SEQ ID NO: 4141156 - DNA, 25 bp, Homo sapien
tctggatgattggaatgctctgcag

SEQ ID NO: 4141157 - DNA, 25 bp, Homo sapien
ttctggatgattggaatgctctgca

SEQ ID NO: 4141158 - DNA, 25 bp, Homo sapien
gaggacatcatgtatacagaaattc

SEQ ID NO: 4141159 - DNA, 25 bp, Homo sapien
tatttatataaactagcaatgagca

SEQ ID NO: 4141160 - DNA, 25 bp, Homo sapien
aaaagacggattcagcaaggttgta

SEQ ID NO: 4141161 - DNA, 25 bp, Homo sapien
caaggttgtaggatacaacctacaa

SEQ ID NO: 4141162 - DNA, 25 bp, Homo sapien
gctgtgcttagagtcttttcctggt

SEQ ID NO: 4141163 - DNA, 25 bp, Homo sapien
aaggtcttaacttcaccctactgtg

SEQ ID NO: 4141164 - DNA, 25 bp, Homo sapien
aatgtagtcgctgtgcttagagtct

SEQ ID NO: 4141165 - DNA, 25 bp, Homo sapien
ggtcttaacttcaccctactgtgat

SEQ ID NO: 4141166 - DNA, 25 bp, Homo sapien
cacaaggttcgtaatcatcacaatg

SEQ ID NO: 4141167 - DNA, 25 bp, Homo sapien
tcaaaggtccttgggtggcaatgta

SEQ ID NO: 4141168 - DNA, 25 bp, Homo sapien
ctttttccacaaggttcgtaatcat

SEQ ID NO: 4141169 - DNA, 25 bp, Homo sapien
cttcaaatgtagacttcaaaggtcc

SEQ ID NO: 4141170 - DNA, 25 bp, Homo sapien
tcactgttctctgttggccaatact

SEQ ID NO: 4141171 - DNA, 25 bp, Homo sapien
tatttctgattgaaaaacgacgaac

SEQ ID NO: 4141172 - DNA, 25 bp, Homo sapien
gtatttttgtgctcttcagcgtgac

SEQ ID NO: 4141173 - DNA, 25 bp, Homo sapien
cgacgaacagtgtagcaggcatgta

SEQ ID NO: 4141174 - DNA, 25 bp, Homo sapien
ccgtttctggcatccgagctgctga

SEQ ID NO: 4141175 - DNA, 25 bp, Homo sapien
tactggaagggcatactcgggaact

SEQ ID NO: 4141176 - DNA, 25 bp, Homo sapien
gaggatctcctcacgaaagtcagta

SEQ ID NO: 4141177 - DNA, 25 bp, Homo sapien
ctttcattctgacgacccttgggat

SEQ ID NO: 4141178 - DNA, 25 bp, Homo sapien
ttacgctgtgtcctgatatgcttca

SEQ ID NO: 4141179 - DNA, 25 bp, Homo sapien
tcagtctggacgaggtagttacgct

SEQ ID NO: 4141180 - DNA, 25 bp, Homo sapien
cttttatctgttgcagcatgctgtc

SEQ ID NO: 4141181 - DNA, 25 bp, Homo sapien
ggaatcccaggacgttaactgtgct

SEQ ID NO: 4141182 - DNA, 25 bp, Homo sapien
atttgccagaatgtcgtgaggacgc

SEQ ID NO: 4141183 - DNA, 25 bp, Homo sapien
tttgccagaatgtcgtgaggacgct

SEQ ID NO: 4141184 - DNA, 25 bp, Homo sapien
tgttaacatagctgtgcagctgatt

SEQ ID NO: 4141185 - DNA, 25 bp, Homo sapien
gtcgtgtctttcctcctactcctgg

SEQ ID NO: 4141186 - DNA, 25 bp, Homo sapien
cttccaacaaggcatcatggatgaa

SEQ ID NO: 4141187 - DNA, 25 bp, Homo sapien
cctggtataaggatgctgttaacat

SEQ ID NO: 4141188 - DNA, 25 bp, Homo sapien
ttctgagcactgaaacattccacat

SEQ ID NO: 4141189 - DNA, 25 bp, Homo sapien
tctttgttacactctttctgagcac

SEQ ID NO: 4141190 - DNA, 25 bp, Homo sapien
tattttgcattacactgtgtgacca

SEQ ID NO: 4141191 - DNA, 25 bp, Homo sapien
tttctttgttacactctttctgagc

SEQ ID NO: 4141192 - DNA, 25 bp, Homo sapien
atgatataagaagcattaatgtaat

SEQ ID NO: 4141193 - DNA, 25 bp, Homo sapien
aatggtgcaagacccactcgagcac

SEQ ID NO: 4141194 - DNA, 25 bp, Homo sapien
ggtgcaagacccactcgagcacgct

SEQ ID NO: 4141195 - DNA, 25 bp, Homo sapien
catgatataagaagcattaatgtaa

SEQ ID NO: 4141196 - DNA, 25 bp, Homo sapien
cattcgccagaaatctttcgtagta

SEQ ID NO: 4141197 - DNA, 25 bp, Homo sapien
tttcgtagtatgtggcagaggatgc

SEQ ID NO: 4141198 - DNA, 25 bp, Homo sapien
gttatgatcccaaatcattcgccag

SEQ ID NO: 4141199 - DNA, 25 bp, Homo sapien
tggcagcatgacaatgatctgtgcg

SEQ ID NO: 4141200 - DNA, 25 bp, Homo sapien
tagacctgacttgcctatggagtgg

SEQ ID NO: 4141201 - DNA, 25 bp, Homo sapien
gattatataagcatggtctctggag

SEQ ID NO: 4141202 - DNA, 25 bp, Homo sapien
tagcctatccctgcagtagacctga

SEQ ID NO: 4141203 - DNA, 25 bp, Homo sapien
gaagcagtcttggtatcctgaagct

SEQ ID NO: 4141204 - DNA, 25 bp, Homo sapien
attagagaggcacagtctgtctttg

SEQ ID NO: 4141205 - DNA, 25 bp, Homo sapien
cacagttcatggattcttctcgact

SEQ ID NO: 4141206 - DNA, 25 bp, Homo sapien
tctttgctgataagggtgacggtaa

SEQ ID NO: 4141207 - DNA, 25 bp, Homo sapien
caaggataaagtcatggatgataat

SEQ ID NO: 4141208 - DNA, 25 bp, Homo sapien
tctgggttaggccatttgggacact

SEQ ID NO: 4141209 - DNA, 25 bp, Homo sapien
tcatcatgaacaatggtgggaccat

SEQ ID NO: 4141210 - DNA, 25 bp, Homo sapien
tgggaccatcccttgttaaggcctc

SEQ ID NO: 4141211 - DNA, 25 bp, Homo sapien
gacactgaaagtgccgaacttctaa

SEQ ID NO: 4141212 - DNA, 25 bp, Homo sapien
taatactttatgctacttgggtagc

SEQ ID NO: 4141213 - DNA, 25 bp, Homo sapien
ggaatgtataattgattccatattg

SEQ ID NO: 4141214 - DNA, 25 bp, Homo sapien
aggtttgtgatttgaaacgattcaa

SEQ ID NO: 4141215 - DNA, 25 bp, Homo sapien
gggtagctagttggtaatttaatga

SEQ ID NO: 4141216 - DNA, 25 bp, Homo sapien
gacacgactgaatgaaatgctggtg

SEQ ID NO: 4141217 - DNA, 25 bp, Homo sapien
tggaactttcctaatgagagcactt

SEQ ID NO: 4141218 - DNA, 25 bp, Homo sapien
taactagacgttattggacaagcag

SEQ ID NO: 4141219 - DNA, 25 bp, Homo sapien
tccatcaggccaggttggcaactcc

SEQ ID NO: 4141220 - DNA, 25 bp, Homo sapien
ggtggtaagggcacataacattcct

SEQ ID NO: 4141221 - DNA, 25 bp, Homo sapien
gtgaatactccaggcctcataagat

SEQ ID NO: 4141222 - DNA, 25 bp, Homo sapien
tgctgggacagggtggtaagggcac

SEQ ID NO: 4141223 - DNA, 25 bp, Homo sapien
ccaggcctcataagattgatcattt

SEQ ID NO: 4141224 - DNA, 25 bp, Homo sapien
gtctactgtcatgggaccatttcca

SEQ ID NO: 4141225 - DNA, 25 bp, Homo sapien
gcaataagaacagcaccatttttgt

SEQ ID NO: 4141226 - DNA, 25 bp, Homo sapien
gggactccatgctctcagcagggtc

SEQ ID NO: 4141227 - DNA, 25 bp, Homo sapien
cagggtctgattcatctgcaataag

SEQ ID NO: 4141228 - DNA, 25 bp, Homo sapien
ctagagtctggcaaaaaaggcctca

SEQ ID NO: 4141229 - DNA, 25 bp, Homo sapien
cagtagcctgctagtctgtaaaaga

SEQ ID NO: 4141230 - DNA, 25 bp, Homo sapien
tgcctgctagtagaatgcaaccact

SEQ ID NO: 4141231 - DNA, 25 bp, Homo sapien
gggatctcttaaccagcataaatgg

SEQ ID NO: 4141232 - DNA, 25 bp, Homo sapien
taactaaagggtctcataactgagt

SEQ ID NO: 4141233 - DNA, 25 bp, Homo sapien
agtttcaaaattacacacctgcaga

SEQ ID NO: 4141234 - DNA, 25 bp, Homo sapien
gatgtagctattttagagagtcaaa

SEQ ID NO: 4141235 - DNA, 25 bp, Homo sapien
tggtattacaaactaagaagcatta

SEQ ID NO: 4141236 - DNA, 25 bp, Homo sapien
tattataaaacatttggcaaagaag

SEQ ID NO: 4141237 - DNA, 25 bp, Homo sapien
ttataaaacatttggcaaagaagga

SEQ ID NO: 4141238 - DNA, 25 bp, Homo sapien
agagatttattataaaacatttggc

SEQ ID NO: 4141239 - DNA, 25 bp, Homo sapien
gatttattataaaacatttggcaaa

SEQ ID NO: 4141240 - DNA, 25 bp, Homo sapien
gaggctgcacctaataacttccttg

SEQ ID NO: 4141241 - DNA, 25 bp, Homo sapien
cagcgtgagtatggctccagaggct

SEQ ID NO: 4141242 - DNA, 25 bp, Homo sapien
aatgtttaatgcatacccagatggc

SEQ ID NO: 4141243 - DNA, 25 bp, Homo sapien
cagatggcatgacagcagccagcgt

SEQ ID NO: 4141244 - DNA, 25 bp, Homo sapien
tatgaaaactccattgacctggcct

SEQ ID NO: 4141245 - DNA, 25 bp, Homo sapien
cattggagggtatgcctttctacga

SEQ ID NO: 4141246 - DNA, 25 bp, Homo sapien
ttatctcaggactagcttacgcagc

SEQ ID NO: 4141247 - DNA, 25 bp, Homo sapien
cgtaacccttctttggcctcgctgg

SEQ ID NO: 4141248 - DNA, 25 bp, Homo sapien
tccaaatgggtcaatgtgacgaatg

SEQ ID NO: 4141249 - DNA, 25 bp, Homo sapien
tcccagaagatgcttacccaagcaa

SEQ ID NO: 4141250 - DNA, 25 bp, Homo sapien
tatataccatagatacaaagttccc

SEQ ID NO: 4141251 - DNA, 25 bp, Homo sapien
ttatcctctgtagaaaatgcttccc

SEQ ID NO: 4141252 - DNA, 25 bp, Homo sapien
cactcttggttgttggtttactagc

SEQ ID NO: 4141253 - DNA, 25 bp, Homo sapien
gctggttgtctaggattttcatgat

SEQ ID NO: 4141254 - DNA, 25 bp, Homo sapien
cccactgggctgtgtgctggttgtc

SEQ ID NO: 4141255 - DNA, 25 bp, Homo sapien
tcatcttgggtggacttagaggtag

SEQ ID NO: 4141256 - DNA, 25 bp, Homo sapien
gctctaagcaggattgacaagatta

SEQ ID NO: 4141257 - DNA, 25 bp, Homo sapien
caatacatccgttaaacatattggc

SEQ ID NO: 4141258 - DNA, 25 bp, Homo sapien
taaatggtagtagtaaagtgaggaa

SEQ ID NO: 4141259 - DNA, 25 bp, Homo sapien
aaagaactattgaatgctctaagca

SEQ ID NO: 4141260 - DNA, 25 bp, Homo sapien
gtcagggcacccacccactgtccga

SEQ ID NO: 4141261 - DNA, 25 bp, Homo sapien
tctcagagtcatctgccctccggcc

SEQ ID NO: 4141262 - DNA, 25 bp, Homo sapien
gctctttacgttaacaacatcctcc

SEQ ID NO: 4141263 - DNA, 25 bp, Homo sapien
ggcagtcagggcacccacccactgt

SEQ ID NO: 4141264 - DNA, 25 bp, Homo sapien
cattctccccttagaatcgaagatc

SEQ ID NO: 4141265 - DNA, 25 bp, Homo sapien
tagacaaaaccaaatcacattctcc

SEQ ID NO: 4141266 - DNA, 25 bp, Homo sapien
ctttagacaaaaccaaatcacattc

SEQ ID NO: 4141267 - DNA, 25 bp, Homo sapien
aaccaaatcacattctccccttaga

SEQ ID NO: 4141268 - DNA, 25 bp, Homo sapien
tcggtttccttttgcaacgaggcca

SEQ ID NO: 4141269 - DNA, 25 bp, Homo sapien
aagtcggttcatggtaacttttctg

SEQ ID NO: 4141270 - DNA, 25 bp, Homo sapien
cagcgccaagggaatcccggaaagt

SEQ ID NO: 4141271 - DNA, 25 bp, Homo sapien
gcaggccaagtcttgccgccttcct

SEQ ID NO: 4141272 - DNA, 25 bp, Homo sapien
gagtgtccagtcctgctagaaagcc

SEQ ID NO: 4141273 - DNA, 25 bp, Homo sapien
tctatgcactctataaagattgtct

SEQ ID NO: 4141274 - DNA, 25 bp, Homo sapien
taaagattgacacaccgcctgagtg

SEQ ID NO: 4141275 - DNA, 25 bp, Homo sapien
gaaagcccacgcttattgagtgtag

SEQ ID NO: 4141276 - DNA, 25 bp, Homo sapien
cagacagaggtctagtgaaatgctc

SEQ ID NO: 4141277 - DNA, 25 bp, Homo sapien
aactcatctggttgggcttaaaagg

SEQ ID NO: 4141278 - DNA, 25 bp, Homo sapien
gaaatgctctgaaggcctccaaaac

SEQ ID NO: 4141279 - DNA, 25 bp, Homo sapien
tggctaaagacactggaccgacaca

SEQ ID NO: 4141280 - DNA, 25 bp, Homo sapien
gctgctaagcactctcatttgtgga

SEQ ID NO: 4141281 - DNA, 25 bp, Homo sapien
caggaaagcccattttcgtggcaca

SEQ ID NO: 4141282 - DNA, 25 bp, Homo sapien
tattggaagagtgcccagttctacc

SEQ ID NO: 4141283 - DNA, 25 bp, Homo sapien
tacttttcatgtgtaactgcgagga

SEQ ID NO: 4141284 - DNA, 25 bp, Homo sapien
ctaaacgttttattgaatcaacaga

SEQ ID NO: 4141285 - DNA, 25 bp, Homo sapien
cagctggtactaagactactaaacg

SEQ ID NO: 4141286 - DNA, 25 bp, Homo sapien
ctatgaattaggtaaacccaacata

SEQ ID NO: 4141287 - DNA, 25 bp, Homo sapien
tttctagactctaaccttaatcaga

SEQ ID NO: 4141288 - DNA, 25 bp, Homo sapien
gcgaatttcttgagcaaacaaggaa

SEQ ID NO: 4141289 - DNA, 25 bp, Homo sapien
gaatttcttgagcaaacaaggaagt

SEQ ID NO: 4141290 - DNA, 25 bp, Homo sapien
catgtcttttagaaaggcgaatttc

SEQ ID NO: 4141291 - DNA, 25 bp, Homo sapien
cttcatgtcttttagaaaggcgaat

SEQ ID NO: 4141292 - DNA, 25 bp, Homo sapien
tgtgtgttgatcacccaatttattc

SEQ ID NO: 4141293 - DNA, 25 bp, Homo sapien
gaagtaacattaatctttgtgatac

SEQ ID NO: 4141294 - DNA, 25 bp, Homo sapien
ttctgtgtgttgatcacccaattta

SEQ ID NO: 4141295 - DNA, 25 bp, Homo sapien
tgttgatcacccaatttattctcca

SEQ ID NO: 4141296 - DNA, 25 bp, Homo sapien
cattgggcaagtaagacatatggca

SEQ ID NO: 4141297 - DNA, 25 bp, Homo sapien
taagacatatggcaatatagaatgc

SEQ ID NO: 4141298 - DNA, 25 bp, Homo sapien
tatagaatgctttggtagcactatg

SEQ ID NO: 4141299 - DNA, 25 bp, Homo sapien
tggtagcactatggctgtgacttaa

SEQ ID NO: 4141300 - DNA, 25 bp, Homo sapien
ctcaagagaaaccacctcaggccgt

SEQ ID NO: 4141301 - DNA, 25 bp, Homo sapien
caagagaaaccacctcaggccgtgg

SEQ ID NO: 4141302 - DNA, 25 bp, Homo sapien
ccgtggaagtgggtgaatcctggtc

SEQ ID NO: 4141303 - DNA, 25 bp, Homo sapien
ggtctgtagtgacttttctgctgct

SEQ ID NO: 4141304 - DNA, 25 bp, Homo sapien
ccaagacacaactttgtaccagagt

SEQ ID NO: 4141305 - DNA, 25 bp, Homo sapien
cacaactttgtaccagagttttttg

SEQ ID NO: 4141306 - DNA, 25 bp, Homo sapien
tatccttgatcactgccttgtttta

SEQ ID NO: 4141307 - DNA, 25 bp, Homo sapien
gagttttttgtatccttgatcactg

SEQ ID NO: 4141308 - DNA, 25 bp, Homo sapien
ttttcaacagcaaaaggatatggtg

SEQ ID NO: 4141309 - DNA, 25 bp, Homo sapien
tatcgctgtgcctcattttgaatgg

SEQ ID NO: 4141310 - DNA, 25 bp, Homo sapien
gttcccatttgggaatatattcttc

SEQ ID NO: 4141311 - DNA, 25 bp, Homo sapien
tcttctactgatgcccagtaacgag

SEQ ID NO: 4141312 - DNA, 25 bp, Homo sapien
tagtagtaggtgataacatgtgact

SEQ ID NO: 4141313 - DNA, 25 bp, Homo sapien
taacattcagctttattaaacaggc

SEQ ID NO: 4141314 - DNA, 25 bp, Homo sapien
cacatctatgggtttggtagaaagc

SEQ ID NO: 4141315 - DNA, 25 bp, Homo sapien
taattcctaaagttcctgcaataac

SEQ ID NO: 4141316 - DNA, 25 bp, Homo sapien
tgaaactggctacttattgactgct

SEQ ID NO: 4141317 - DNA, 25 bp, Homo sapien
caaagctgtttagggttgtgaccca

SEQ ID NO: 4141318 - DNA, 25 bp, Homo sapien
gaaccaagatacctgcttagaggag

SEQ ID NO: 4141319 - DNA, 25 bp, Homo sapien
tgtgacccaacgctttctgactgac

SEQ ID NO: 4141320 - DNA, 25 bp, Homo sapien
taaaggaacttatcggcacaacgga

SEQ ID NO: 4141321 - DNA, 25 bp, Homo sapien
tagagaagtgtgctaatctgccagc

SEQ ID NO: 4141322 - DNA, 25 bp, Homo sapien
agcataggtaccctttactagcaga

SEQ ID NO: 4141323 - DNA, 25 bp, Homo sapien
tgaaattgtcatcggactgacaccc

SEQ ID NO: 4141324 - DNA, 25 bp, Homo sapien
caccatgtggtgcaatctgttacag

SEQ ID NO: 4141325 - DNA, 25 bp, Homo sapien
tgggaaaaacactacagcaggagcc

SEQ ID NO: 4141326 - DNA, 25 bp, Homo sapien
ttctgccctcgatcgtaacccaggg

SEQ ID NO: 4141327 - DNA, 25 bp, Homo sapien
ggaatttgcctactcgcttgacaca

SEQ ID NO: 4141328 - DNA, 25 bp, Homo sapien
tgcaacagtccacaaacggctttgg

SEQ ID NO: 4141329 - DNA, 25 bp, Homo sapien
gaaaaactgtagcttcttctgatct

SEQ ID NO: 4141330 - DNA, 25 bp, Homo sapien
taaaacaccttgtgcataatgcaga

SEQ ID NO: 4141331 - DNA, 25 bp, Homo sapien
tacgcatgagaaagaccagatgtct

SEQ ID NO: 4141332 - DNA, 25 bp, Homo sapien
aatttaagcctgaaataatgctgta

SEQ ID NO: 4141333 - DNA, 25 bp, Homo sapien
gttgtcattgatgagtctggctgat

SEQ ID NO: 4141334 - DNA, 25 bp, Homo sapien
tcattgatgagtctggctgatcatc

SEQ ID NO: 4141335 - DNA, 25 bp, Homo sapien
aaataatgtcttctctcgccatctt

SEQ ID NO: 4141336 - DNA, 25 bp, Homo sapien
cggagtatagggtactaagaagagc

SEQ ID NO: 4141337 - DNA, 25 bp, Homo sapien
tatagggtactaagaagagcttttc

SEQ ID NO: 4141338 - DNA, 25 bp, Homo sapien
cctcggagtatagggtactaagaag

SEQ ID NO: 4141339 - DNA, 25 bp, Homo sapien
gagtatagggtactaagaagagctt

SEQ ID NO: 4141340 - DNA, 25 bp, Homo sapien
ataagctctcgtataggctcataag

SEQ ID NO: 4141341 - DNA, 25 bp, Homo sapien
cctcttcaaccttaaatgttgtgaa

SEQ ID NO: 4141342 - DNA, 25 bp, Homo sapien
aaatgttgtgaagtatgtgttcata

SEQ ID NO: 4141343 - DNA, 25 bp, Homo sapien
ctcgtataggctcataagtcttaac

SEQ ID NO: 4141344 - DNA, 25 bp, Homo sapien
taggaacttgagactcttaacagac

SEQ ID NO: 4141345 - DNA, 25 bp, Homo sapien
ggtgagagctttccaggataccact

SEQ ID NO: 4141346 - DNA, 25 bp, Homo sapien
ggtggttgcttgtcttaggaacttg

SEQ ID NO: 4141347 - DNA, 25 bp, Homo sapien
gaagtcacagaagtcggagacctag

SEQ ID NO: 4141348 - DNA, 25 bp, Homo sapien
tacattgcgttctatgcctagcccc

SEQ ID NO: 4141349 - DNA, 25 bp, Homo sapien
catccctggcgatcccttttggaaa

SEQ ID NO: 4141350 - DNA, 25 bp, Homo sapien
gaaagcgttagttcttggcacaatg

SEQ ID NO: 4141351 - DNA, 25 bp, Homo sapien
gcacaatgagcttaggagacacact

SEQ ID NO: 4141352 - DNA, 25 bp, Homo sapien
gtatttttagtacctccgattcaga

SEQ ID NO: 4141353 - DNA, 25 bp, Homo sapien
agaggacggcgacagcttcctcagg

SEQ ID NO: 4141354 - DNA, 25 bp, Homo sapien
gaattgtcgattttgtttgcacaga

SEQ ID NO: 4141355 - DNA, 25 bp, Homo sapien
ccaattcgcagacccattgcgcggg

SEQ ID NO: 4141356 - DNA, 25 bp, Homo sapien
gcgccggttccgtgggtaaatggca

SEQ ID NO: 4141357 - DNA, 25 bp, Homo sapien
taattatcatttgcgcgtgttcggg

SEQ ID NO: 4141358 - DNA, 25 bp, Homo sapien
gcagtttattagcacgatgcccagc

SEQ ID NO: 4141359 - DNA, 25 bp, Homo sapien
cgtccatgcgccacatcctaatgag

SEQ ID NO: 4141360 - DNA, 25 bp, Homo sapien
tagtcagtgggagctttctcccgac

SEQ ID NO: 4141361 - DNA, 25 bp, Homo sapien
gagcggccttgctctccgtgacgct

SEQ ID NO: 4141362 - DNA, 25 bp, Homo sapien
ccgacgccagccaaggcgagctcat

SEQ ID NO: 4141363 - DNA, 25 bp, Homo sapien
ggtcgtccttagtcagtgggagctt

SEQ ID NO: 4141364 - DNA, 25 bp, Homo sapien
ggcaagccagttcgaatgttttcaa

SEQ ID NO: 4141365 - DNA, 25 bp, Homo sapien
tgtctcccaacagcactaatcctga

SEQ ID NO: 4141366 - DNA, 25 bp, Homo sapien
taatcctgagaacaacgcgcaccga

SEQ ID NO: 4141367 - DNA, 25 bp, Homo sapien
tgtgctttggacaagcccgccacgg

SEQ ID NO: 4141368 - DNA, 25 bp, Homo sapien
ctggaaagtttgaggcagtctctag

SEQ ID NO: 4141369 - DNA, 25 bp, Homo sapien
aagtttgaggcagtctctagcctga

SEQ ID NO: 4141370 - DNA, 25 bp, Homo sapien
aaggcaacctgccagataatgtctc

SEQ ID NO: 4141371 - DNA, 25 bp, Homo sapien
ggcaacctgccagataatgtctctg

SEQ ID NO: 4141372 - DNA, 25 bp, Homo sapien
ctgtaatttggcacccaagtctgcc

SEQ ID NO: 4141373 - DNA, 25 bp, Homo sapien
attacctaggtctgcaccgttcttt

SEQ ID NO: 4141374 - DNA, 25 bp, Homo sapien
gatgtgacacgggtctcctttttct

SEQ ID NO: 4141375 - DNA, 25 bp, Homo sapien
taggtctgcaccgttctttctacat

SEQ ID NO: 4141376 - DNA, 25 bp, Homo sapien
tgcaccgttctttctacattctaag

SEQ ID NO: 4141377 - DNA, 25 bp, Homo sapien
aggccatgaacaatccaacccttgc

SEQ ID NO: 4141378 - DNA, 25 bp, Homo sapien
actcctgaatgggttatgtacactg

SEQ ID NO: 4141379 - DNA, 25 bp, Homo sapien
tgtgcaccgtagttcttcccacctg

SEQ ID NO: 4141380 - DNA, 25 bp, Homo sapien
ggtacaggctataccagcttcccca

SEQ ID NO: 4141381 - DNA, 25 bp, Homo sapien
tatttccttcagtagattgtaacca

SEQ ID NO: 4141382 - DNA, 25 bp, Homo sapien
tgcttttacgtctcaactgtgtatg

SEQ ID NO: 4141383 - DNA, 25 bp, Homo sapien
gtagtggatccatcttgcttttgcc

SEQ ID NO: 4141384 - DNA, 25 bp, Homo sapien
attacaaccctagactaaaaatgtg

SEQ ID NO: 4141385 - DNA, 25 bp, Homo sapien
caatggattgattctcttaattgcc

SEQ ID NO: 4141386 - DNA, 25 bp, Homo sapien
tcttaattgccacggcaagggggcg

SEQ ID NO: 4141387 - DNA, 25 bp, Homo sapien
ttgccacggcaagggggcgatccta

SEQ ID NO: 4141388 - DNA, 25 bp, Homo sapien
aaggatggctacataccaatggatt

SEQ ID NO: 4141389 - DNA, 25 bp, Homo sapien
agggccctgttgtctatgatgggca

SEQ ID NO: 4141390 - DNA, 25 bp, Homo sapien
gttgtctatgatgggcatccttttg

SEQ ID NO: 4141391 - DNA, 25 bp, Homo sapien
ggccctgttgtctatgatgggcatc

SEQ ID NO: 4141392 - DNA, 25 bp, Homo sapien
cctgttgtctatgatgggcatcctt

SEQ ID NO: 4141393 - DNA, 25 bp, Homo sapien
tcagcaatgattgtctctcatccat

SEQ ID NO: 4141394 - DNA, 25 bp, Homo sapien
atcatttcccttaagagtcagcaat

SEQ ID NO: 4141395 - DNA, 25 bp, Homo sapien
gagtcagcaatgattgtctctcatc

SEQ ID NO: 4141396 - DNA, 25 bp, Homo sapien
catttcccttaagagtcagcaatga

SEQ ID NO: 4141397 - DNA, 25 bp, Homo sapien
tctgaaactggttgtagcacgttgt

SEQ ID NO: 4141398 - DNA, 25 bp, Homo sapien
catagtctctgaaactggttgtagc

SEQ ID NO: 4141399 - DNA, 25 bp, Homo sapien
gttgtagcacgttgtctcagactcc

SEQ ID NO: 4141400 - DNA, 25 bp, Homo sapien
gttgtctcagactcctccgtcagtg

SEQ ID NO: 4141401 - DNA, 25 bp, Homo sapien
gccacaatcagtgtgctacttgcag

SEQ ID NO: 4141402 - DNA, 25 bp, Homo sapien
ccgagcaaccgagcgccgttttttg

SEQ ID NO: 4141403 - DNA, 25 bp, Homo sapien
ggcaaggaacaggaggtcatgcctc

SEQ ID NO: 4141404 - DNA, 25 bp, Homo sapien
gcctccattcagttctaagtaaaga

SEQ ID NO: 4141405 - DNA, 25 bp, Homo sapien
tgtaaaatatgagtgtgaactcagg

SEQ ID NO: 4141406 - DNA, 25 bp, Homo sapien
ctgtaacatgtaaaatatgagtgtg

SEQ ID NO: 4141407 - DNA, 25 bp, Homo sapien
atatgagtgtgaactcagggttcat

SEQ ID NO: 4141408 - DNA, 25 bp, Homo sapien
taaaatatgagtgtgaactcagggt

SEQ ID NO: 4141409 - DNA, 25 bp, Homo sapien
cgtgtctgtttgcagcacccctggg

SEQ ID NO: 4141410 - DNA, 25 bp, Homo sapien
tgccggcttcttcaggtgcattaag

SEQ ID NO: 4141411 - DNA, 25 bp, Homo sapien
taagctacgagcatgtcagcttttg

SEQ ID NO: 4141412 - DNA, 25 bp, Homo sapien
tcagcttttgaatgtcgagttgccg

SEQ ID NO: 4141413 - DNA, 25 bp, Homo sapien
aaaccatctgtagctgtcgagggca

SEQ ID NO: 4141414 - DNA, 25 bp, Homo sapien
gctggtggatcccaaaccatctgta

SEQ ID NO: 4141415 - DNA, 25 bp, Homo sapien
ctggctggtggatcccaaaccatct

SEQ ID NO: 4141416 - DNA, 25 bp, Homo sapien
accatctgtagctgtcgagggcacc

SEQ ID NO: 4141417 - DNA, 25 bp, Homo sapien
catttgcttgattaacttgctcgac

SEQ ID NO: 4141418 - DNA, 25 bp, Homo sapien
cacggcgcagttccgcctttgtaca

SEQ ID NO: 4141419 - DNA, 25 bp, Homo sapien
tgcatgcggataagctgcacggcgc

SEQ ID NO: 4141420 - DNA, 25 bp, Homo sapien
gctcgacaaaagtgacagctgctgt

SEQ ID NO: 4141421 - DNA, 25 bp, Homo sapien
gaatccacattggtagtaatgccgc

SEQ ID NO: 4141422 - DNA, 25 bp, Homo sapien
gccccgtgtcattgggaaccaggcc

SEQ ID NO: 4141423 - DNA, 25 bp, Homo sapien
gattaaaaagccatctcgaacttgg

SEQ ID NO: 4141424 - DNA, 25 bp, Homo sapien
acctcacaggctcggagatgagtga

SEQ ID NO: 4141425 - DNA, 25 bp, Homo sapien
gacggtatggtttctttcatcagga

SEQ ID NO: 4141426 - DNA, 25 bp, Homo sapien
tgagggtaaacccacttcactttca

SEQ ID NO: 4141427 - DNA, 25 bp, Homo sapien
ttcatcatgttcaccaaccctcctg

SEQ ID NO: 4141428 - DNA, 25 bp, Homo sapien
ttcagataagaagacggtatggttt

SEQ ID NO: 4141429 - DNA, 25 bp, Homo sapien
tgcagtgcagttgacctatttcccc

SEQ ID NO: 4141430 - DNA, 25 bp, Homo sapien
tgacggccatgtttcaaaagctccc

SEQ ID NO: 4141431 - DNA, 25 bp, Homo sapien
gctcccacatacctggtcagatggt

SEQ ID NO: 4141432 - DNA, 25 bp, Homo sapien
tttctaaggatggtgctaggccagg

SEQ ID NO: 4141433 - DNA, 25 bp, Homo sapien
catcaagcccactttaaaggccctg

SEQ ID NO: 4141434 - DNA, 25 bp, Homo sapien
aacaatctcttaggcttcatcaagc

SEQ ID NO: 4141435 - DNA, 25 bp, Homo sapien
tgtaaaatggtagcactattctagt

SEQ ID NO: 4141436 - DNA, 25 bp, Homo sapien
caaagcaaatcaagaaggccagcat

SEQ ID NO: 4141437 - DNA, 25 bp, Homo sapien
caaagggaagtgttattatcaaagg

SEQ ID NO: 4141438 - DNA, 25 bp, Homo sapien
gatccttttcttagaccacagctaa

SEQ ID NO: 4141439 - DNA, 25 bp, Homo sapien
aaatggtctgaaactggcagtgatg

SEQ ID NO: 4141440 - DNA, 25 bp, Homo sapien
gctaattacggaccagataagcttt

SEQ ID NO: 4141441 - DNA, 25 bp, Homo sapien
ttttcggcaccgtcatggatggctg

SEQ ID NO: 4141442 - DNA, 25 bp, Homo sapien
cagtaacctacccaatgtgaaccta

SEQ ID NO: 4141443 - DNA, 25 bp, Homo sapien
tcttccacaggagtttaaccagtaa

SEQ ID NO: 4141444 - DNA, 25 bp, Homo sapien
tacaattgtcgtgtgcttctgccac

SEQ ID NO: 4141445 - DNA, 25 bp, Homo sapien
gccacgagaattccaaattgaaaat

SEQ ID NO: 4141446 - DNA, 25 bp, Homo sapien
aatataaaagccacgagaattccaa

SEQ ID NO: 4141447 - DNA, 25 bp, Homo sapien
aatgagctggaaacaatcagatacc

SEQ ID NO: 4141448 - DNA, 25 bp, Homo sapien
taaatgagctggaaacaatcagata

SEQ ID NO: 4141449 - DNA, 25 bp, Homo sapien
ggatgcatctcttccttggcttaga

SEQ ID NO: 4141450 - DNA, 25 bp, Homo sapien
taaacatgagcaatggtaattgggt

SEQ ID NO: 4141451 - DNA, 25 bp, Homo sapien
gcttagataagcctgctgcggaatt

SEQ ID NO: 4141452 - DNA, 25 bp, Homo sapien
tttaagggctaattggagtgtctct

SEQ ID NO: 4141453 - DNA, 25 bp, Homo sapien
caactgcaaaggtgatgaagagtca

SEQ ID NO: 4141454 - DNA, 25 bp, Homo sapien
tgaaggctgtttatgcaaagggatg

SEQ ID NO: 4141455 - DNA, 25 bp, Homo sapien
cagaagaaagattccacaggtctca

SEQ ID NO: 4141456 - DNA, 25 bp, Homo sapien
aacttgaaaatcatgccaaccttgg

SEQ ID NO: 4141457 - DNA, 25 bp, Homo sapien
gacaaatggttagtgggagcctacc

SEQ ID NO: 4141458 - DNA, 25 bp, Homo sapien
tagcaggtacagtgttaaaagccag

SEQ ID NO: 4141459 - DNA, 25 bp, Homo sapien
gggcattgtcagaaaaccatggaag

SEQ ID NO: 4141460 - DNA, 25 bp, Homo sapien
acaagagggaaacggctattagcct

SEQ ID NO: 4141461 - DNA, 25 bp, Homo sapien
tgcccgccgtgtcagatgcgatata

SEQ ID NO: 4141462 - DNA, 25 bp, Homo sapien
ccaaaaatgactgcgcttgacctgc

SEQ ID NO: 4141463 - DNA, 25 bp, Homo sapien
ttctggctccagtgatggcccgcag

SEQ ID NO: 4141464 - DNA, 25 bp, Homo sapien
tgaaaggtggattccggagatgccc

SEQ ID NO: 4141465 - DNA, 25 bp, Homo sapien
tataaataactagcaggcaggcagc

SEQ ID NO: 4141466 - DNA, 25 bp, Homo sapien
gagccaaactgagcatgaagccacc

SEQ ID NO: 4141467 - DNA, 25 bp, Homo sapien
aatgcttccatcatcgacatgggcg

SEQ ID NO: 4141468 - DNA, 25 bp, Homo sapien
gaggagctgaagtcatctgtcaacc

SEQ ID NO: 4141469 - DNA, 25 bp, Homo sapien
catcagcagtaatgatggttcccca

SEQ ID NO: 4141470 - DNA, 25 bp, Homo sapien
gggtggctttcagcccatgtattgg

SEQ ID NO: 4141471 - DNA, 25 bp, Homo sapien
tgtattgggatcttcagtcctgcag

SEQ ID NO: 4141472 - DNA, 25 bp, Homo sapien
actgacatcagcagtaatgatggtt

SEQ ID NO: 4141473 - DNA, 25 bp, Homo sapien
aagggccctactgcaaagtccgtga

SEQ ID NO: 4141474 - DNA, 25 bp, Homo sapien
tcaagatagggaggcctccaccttc

SEQ ID NO: 4141475 - DNA, 25 bp, Homo sapien
tccaccttcacgagtggtaaagggc

SEQ ID NO: 4141476 - DNA, 25 bp, Homo sapien
ccgtgatcaaattaatgaggaaagt

SEQ ID NO: 4141477 - DNA, 25 bp, Homo sapien
aatggtgattaacaatatgtgggct

SEQ ID NO: 4141478 - DNA, 25 bp, Homo sapien
acaaacaagctgattttgcataatt

SEQ ID NO: 4141479 - DNA, 25 bp, Homo sapien
tttgcttggcttccttgagcctaat

SEQ ID NO: 4141480 - DNA, 25 bp, Homo sapien
agtaaagcagaatcaggccccatct

SEQ ID NO: 4141481 - DNA, 25 bp, Homo sapien
cgctctgatgagcagaagcacttta

SEQ ID NO: 4141482 - DNA, 25 bp, Homo sapien
tcccagccgctctgatgagcagaag

SEQ ID NO: 4141483 - DNA, 25 bp, Homo sapien
tctgatgagcagaagcactttatgc

SEQ ID NO: 4141484 - DNA, 25 bp, Homo sapien
tgagcagaagcactttatgccttct

SEQ ID NO: 4141485 - DNA, 25 bp, Homo sapien
cctgaataaaaccttcatagctcct

SEQ ID NO: 4141486 - DNA, 25 bp, Homo sapien
ttttcctgaataaaaccttcatagc

SEQ ID NO: 4141487 - DNA, 25 bp, Homo sapien
cattttcctgaataaaaccttcata

SEQ ID NO: 4141488 - DNA, 25 bp, Homo sapien
ttcctgaataaaaccttcatagctc

SEQ ID NO: 4141489 - DNA, 25 bp, Homo sapien
agctgcctgagcaaaacattaggtg

SEQ ID NO: 4141490 - DNA, 25 bp, Homo sapien
tacagcattgatgccattgttcagc

SEQ ID NO: 4141491 - DNA, 25 bp, Homo sapien
accaattacagcattgatgccattg

SEQ ID NO: 4141492 - DNA, 25 bp, Homo sapien
agcccttgccctgtatgaaagaatt

SEQ ID NO: 4141493 - DNA, 25 bp, Homo sapien
cagctgatgaggatttaatacgcac

SEQ ID NO: 4141494 - DNA, 25 bp, Homo sapien
tcagctgatgaggatttaatacgca

SEQ ID NO: 4141495 - DNA, 25 bp, Homo sapien
cagaaaggggtccaacatcaatttc

SEQ ID NO: 4141496 - DNA, 25 bp, Homo sapien
tcagaaaggggtccaacatcaattt

SEQ ID NO: 4141497 - DNA, 25 bp, Homo sapien
tatgaaccgcttcacgaatttatgt

SEQ ID NO: 4141498 - DNA, 25 bp, Homo sapien
gaaccgcttcacgaatttatgtcat

SEQ ID NO: 4141499 - DNA, 25 bp, Homo sapien
tgaaccgcttcacgaatttatgtca

SEQ ID NO: 4141500 - DNA, 25 bp, Homo sapien
atatgaaccgcttcacgaatttatg

SEQ ID NO: 4141501 - DNA, 25 bp, Homo sapien
agttctgcactaaggtaggttcctg

SEQ ID NO: 4141502 - DNA, 25 bp, Homo sapien
tgaggtcatgtttatctagtagtgc

SEQ ID NO: 4141503 - DNA, 25 bp, Homo sapien
cactaaggtaggttcctgcaaaggt

SEQ ID NO: 4141504 - DNA, 25 bp, Homo sapien
atctagtagtgctgggaaggcttca

SEQ ID NO: 4141505 - DNA, 25 bp, Homo sapien
gatttacacagtacaccgaataagc

SEQ ID NO: 4141506 - DNA, 25 bp, Homo sapien
aatgttggcttctttctactaggta

SEQ ID NO: 4141507 - DNA, 25 bp, Homo sapien
ttacacagtacaccgaataagctac

SEQ ID NO: 4141508 - DNA, 25 bp, Homo sapien
ctttctactaggtaatttcttgaat

SEQ ID NO: 4141509 - DNA, 25 bp, Homo sapien
ctcattcagtgcaccggaataaatg

SEQ ID NO: 4141510 - DNA, 25 bp, Homo sapien
gaataaatgtagtctgcttttctga

SEQ ID NO: 4141511 - DNA, 25 bp, Homo sapien
ggactgtaactgtcaatcaaaggat

SEQ ID NO: 4141512 - DNA, 25 bp, Homo sapien
ttcagtgcaccggaataaatgtagt

SEQ ID NO: 4141513 - DNA, 25 bp, Homo sapien
ccaaatcctcttgatgtgagattat

SEQ ID NO: 4141514 - DNA, 25 bp, Homo sapien
ctgtttttccccttgcacattatgt

SEQ ID NO: 4141515 - DNA, 25 bp, Homo sapien
aatcctcttgatgtgagattatttc

SEQ ID NO: 4141516 - DNA, 25 bp, Homo sapien
tttccccttgcacattatgtaatgc

SEQ ID NO: 4141517 - DNA, 25 bp, Homo sapien
tcaaggatgtcttaagagagaggaa

SEQ ID NO: 4141518 - DNA, 25 bp, Homo sapien
aaatcaaggatgtcttaagagagag

SEQ ID NO: 4141519 - DNA, 25 bp, Homo sapien
caaggatgtcttaagagagaggaat

SEQ ID NO: 4141520 - DNA, 25 bp, Homo sapien
aaggatgtcttaagagagaggaatc

SEQ ID NO: 4141521 - DNA, 25 bp, Homo sapien
ttccatggcgtaagtagatctttgc

SEQ ID NO: 4141522 - DNA, 25 bp, Homo sapien
tccatggcgtaagtagatctttgct

SEQ ID NO: 4141523 - DNA, 25 bp, Homo sapien
catggcgtaagtagatctttgctcc

SEQ ID NO: 4141524 - DNA, 25 bp, Homo sapien
ccatggcgtaagtagatctttgctc

SEQ ID NO: 4141525 - DNA, 25 bp, Homo sapien
tacttgtgagatgtggttcctgaac

SEQ ID NO: 4141526 - DNA, 25 bp, Homo sapien
taacatatatgtcaaataagctgaa

SEQ ID NO: 4141527 - DNA, 25 bp, Homo sapien
cttgatggcagaagaaattggtact

SEQ ID NO: 4141528 - DNA, 25 bp, Homo sapien
gaaagttttagttgtaagacgctga

SEQ ID NO: 4141529 - DNA, 25 bp, Homo sapien
tgagcagcagcgctctcgctccctg

SEQ ID NO: 4141530 - DNA, 25 bp, Homo sapien
ctcgcgaccgccgggcagaggatca

SEQ ID NO: 4141531 - DNA, 25 bp, Homo sapien
cagaggatcagtcgcggcggccgag

SEQ ID NO: 4141532 - DNA, 25 bp, Homo sapien
cgccgggcagaggatcagtcgcggc

SEQ ID NO: 4141533 - DNA, 25 bp, Homo sapien
cccctcctcccttcgcgcttctggg

SEQ ID NO: 4141534 - DNA, 25 bp, Homo sapien
tcccttcgcgcttctgggtctgagc

SEQ ID NO: 4141535 - DNA, 25 bp, Homo sapien
tcctcccttcgcgcttctgggtctg

SEQ ID NO: 4141536 - DNA, 25 bp, Homo sapien
cctcctcccttcgcgcttctgggtc

SEQ ID NO: 4141537 - DNA, 25 bp, Homo sapien
tcggggctcgcaattgattctcccc

SEQ ID NO: 4141538 - DNA, 25 bp, Homo sapien
tgcccacctcgagtccacggacgca

SEQ ID NO: 4141539 - DNA, 25 bp, Homo sapien
ctcggggctcgcaattgattctccc

SEQ ID NO: 4141540 - DNA, 25 bp, Homo sapien
ccccttgcccacctcgagtccacgg

SEQ ID NO: 4141541 - DNA, 25 bp, Homo sapien
cgctccctccccaatcggcaagatg

SEQ ID NO: 4141542 - DNA, 25 bp, Homo sapien
acagcttgcaacactcggcatcttt

SEQ ID NO: 4141543 - DNA, 25 bp, Homo sapien
caatcggcaagatgcctcttcggct

SEQ ID NO: 4141544 - DNA, 25 bp, Homo sapien
tgcaacactcggcatcttttctgga

SEQ ID NO: 4141545 - DNA, 25 bp, Homo sapien
gccgcggacacgggagagttaagcc

SEQ ID NO: 4141546 - DNA, 25 bp, Homo sapien
ccgcggacacgggagagttaagcca

SEQ ID NO: 4141547 - DNA, 25 bp, Homo sapien
gaggcaatgagagccagatatcaac

SEQ ID NO: 4141548 - DNA, 25 bp, Homo sapien
caaggtattggggtcagaagtactg

SEQ ID NO: 4141549 - DNA, 25 bp, Homo sapien
ttagcgtctccaaacagcccgctcg

SEQ ID NO: 4141550 - DNA, 25 bp, Homo sapien
tattggggtcagaagtactgaggct

SEQ ID NO: 4141551 - DNA, 25 bp, Homo sapien
gcggaataagttgctggaatcagag

SEQ ID NO: 4141552 - DNA, 25 bp, Homo sapien
tattttaattagactgggcgcatgc

SEQ ID NO: 4141553 - DNA, 25 bp, Homo sapien
tacacaggtgggacaaacacgctgc

SEQ ID NO: 4141554 - DNA, 25 bp, Homo sapien
tctttcccgtataagatctcacgga

SEQ ID NO: 4141555 - DNA, 25 bp, Homo sapien
caaattatcagagttctgtgttggg

SEQ ID NO: 4141556 - DNA, 25 bp, Homo sapien
tctgtgttgggggagttttgagccc

SEQ ID NO: 4141557 - DNA, 25 bp, Homo sapien
tttcaaattatcagagttctgtgtt

SEQ ID NO: 4141558 - DNA, 25 bp, Homo sapien
ttctgtgttgggggagttttgagcc

SEQ ID NO: 4141559 - DNA, 25 bp, Homo sapien
ttgaaccgtaggatgaagttactcc

SEQ ID NO: 4141560 - DNA, 25 bp, Homo sapien
gaatacgtaattgaaccgtaggatg

SEQ ID NO: 4141561 - DNA, 25 bp, Homo sapien
ctgcaatagccctgaatacgtaatt

SEQ ID NO: 4141562 - DNA, 25 bp, Homo sapien
tagccctgaatacgtaattgaaccg

SEQ ID NO: 4141563 - DNA, 25 bp, Homo sapien
cacgttccgtttccatcaaactgaa

SEQ ID NO: 4141564 - DNA, 25 bp, Homo sapien
tcctctgggaggagtagtacttagg

SEQ ID NO: 4141565 - DNA, 25 bp, Homo sapien
cagaaccttagagtaagaagcagga

SEQ ID NO: 4141566 - DNA, 25 bp, Homo sapien
aagcaggatcaggagtgctgatagt

SEQ ID NO: 4141567 - DNA, 25 bp, Homo sapien
ctgttcttgctaaggcccatttgtc

SEQ ID NO: 4141568 - DNA, 25 bp, Homo sapien
gaatcaaggatgcagaaacgtgttg

SEQ ID NO: 4141569 - DNA, 25 bp, Homo sapien
cgtgttgataataggagatccagct

SEQ ID NO: 4141570 - DNA, 25 bp, Homo sapien
tccactgggtagctgtagtttttcc

SEQ ID NO: 4141571 - DNA, 25 bp, Homo sapien
gaaacattcccttcttagtggtcat

SEQ ID NO: 4141572 - DNA, 25 bp, Homo sapien
agctgaacttccactataagaacca

SEQ ID NO: 4141573 - DNA, 25 bp, Homo sapien
tgaacttccactataagaaccacgg

SEQ ID NO: 4141574 - DNA, 25 bp, Homo sapien
gaaccacggtctaaagcgtactgag

SEQ ID NO: 4141575 - DNA, 25 bp, Homo sapien
gctgggtagtttccctgcaatgagg

SEQ ID NO: 4141576 - DNA, 25 bp, Homo sapien
aggggtgtgaaggtcaatttcattc

SEQ ID NO: 4141577 - DNA, 25 bp, Homo sapien
tcaggggtgtgaaggtcaatttcat

SEQ ID NO: 4141578 - DNA, 25 bp, Homo sapien
ttatcaggggtgtgaaggtcaattt

SEQ ID NO: 4141579 - DNA, 25 bp, Homo sapien
ctactttttatcaggggtgtgaagg

SEQ ID NO: 4141580 - DNA, 25 bp, Homo sapien
cttcttctactgggatctctccaga

SEQ ID NO: 4141581 - DNA, 25 bp, Homo sapien
atctctccagagatgagcaatagtg

SEQ ID NO: 4141582 - DNA, 25 bp, Homo sapien
ctctccagagatgagcaatagtgtg

SEQ ID NO: 4141583 - DNA, 25 bp, Homo sapien
acttcttctactgggatctctccag

SEQ ID NO: 4141584 - DNA, 25 bp, Homo sapien
gctgtgactgggactacccctggcc

SEQ ID NO: 4141585 - DNA, 25 bp, Homo sapien
aattgctgtgactgggactacccct

SEQ ID NO: 4141586 - DNA, 25 bp, Homo sapien
cacaattgctgtgactgggactacc

SEQ ID NO: 4141587 - DNA, 25 bp, Homo sapien
ccagagacacaattgctgtgactgg

SEQ ID NO: 4141588 - DNA, 25 bp, Homo sapien
ctgtggtagcccccagaatggacat

SEQ ID NO: 4141589 - DNA, 25 bp, Homo sapien
ctggtttaccttaggaaaagctgtg

SEQ ID NO: 4141590 - DNA, 25 bp, Homo sapien
gcagaggtgggctggtttaccttag

SEQ ID NO: 4141591 - DNA, 25 bp, Homo sapien
taccttaggaaaagctgtggtagcc

SEQ ID NO: 4141592 - DNA, 25 bp, Homo sapien
ctacccatgctgttgttgggttttc

SEQ ID NO: 4141593 - DNA, 25 bp, Homo sapien
actacccatgctgttgttgggtttt

SEQ ID NO: 4141594 - DNA, 25 bp, Homo sapien
tacccatgctgttgttgggttttca

SEQ ID NO: 4141595 - DNA, 25 bp, Homo sapien
cataaacgacaatgtggttcttctt

SEQ ID NO: 4141596 - DNA, 25 bp, Homo sapien
tcataaacgacaatgtggttcttct

SEQ ID NO: 4141597 - DNA, 25 bp, Homo sapien
ataaacgacaatgtggttcttctta

SEQ ID NO: 4141598 - DNA, 25 bp, Homo sapien
cagcatagagtaacaggcacagtct

SEQ ID NO: 4141599 - DNA, 25 bp, Homo sapien
gcacaggaagctgtcggcttcccct

SEQ ID NO: 4141600 - DNA, 25 bp, Homo sapien
tggcacaggaagctgtcggcttccc

SEQ ID NO: 4141601 - DNA, 25 bp, Homo sapien
ctatggcacaggaagctgtcggctt

SEQ ID NO: 4141602 - DNA, 25 bp, Homo sapien
ctgtaggaatgctatggcacaggaa

SEQ ID NO: 4141603 - DNA, 25 bp, Homo sapien
ctcagctttctcatcggcaccaggg

SEQ ID NO: 4141604 - DNA, 25 bp, Homo sapien
gcctcagctttctcatcggcaccag

SEQ ID NO: 4141605 - DNA, 25 bp, Homo sapien
cacatccatgaccaaatctgcctct

SEQ ID NO: 4141606 - DNA, 25 bp, Homo sapien
cagcctcagctttctcatcggcacc

SEQ ID NO: 4141607 - DNA, 25 bp, Homo sapien
tcctctctgattttactgaggtagc

SEQ ID NO: 4141608 - DNA, 25 bp, Homo sapien
ctctgattttactgaggtagctgac

SEQ ID NO: 4141609 - DNA, 25 bp, Homo sapien
caaaataatcctctctgattttact

SEQ ID NO: 4141610 - DNA, 25 bp, Homo sapien
ctctctgattttactgaggtagctg

SEQ ID NO: 4141611 - DNA, 25 bp, Homo sapien
tcacggttttctttctccccatatg

SEQ ID NO: 4141612 - DNA, 25 bp, Homo sapien
tttctccccatatgacttaatttct

SEQ ID NO: 4141613 - DNA, 25 bp, Homo sapien
cggttttctttctccccatatgact

SEQ ID NO: 4141614 - DNA, 25 bp, Homo sapien
tttctttctccccatatgacttaat

SEQ ID NO: 4141615 - DNA, 25 bp, Homo sapien
cacctttctgtgtacccatttctgt

SEQ ID NO: 4141616 - DNA, 25 bp, Homo sapien
caatcaaaactggtatgaaattcta

SEQ ID NO: 4141617 - DNA, 25 bp, Homo sapien
tctgtagggttattgagaatgaatc

SEQ ID NO: 4141618 - DNA, 25 bp, Homo sapien
tgagaatgaatctggctgacaatca

SEQ ID NO: 4141619 - DNA, 25 bp, Homo sapien
tctctttatataaccttcagatctt

SEQ ID NO: 4141620 - DNA, 25 bp, Homo sapien
cagaagtggtgtagggaacttctct

SEQ ID NO: 4141621 - DNA, 25 bp, Homo sapien
tctttatataaccttcagatcttgt

SEQ ID NO: 4141622 - DNA, 25 bp, Homo sapien
cagcaggcaaagacagaagtggtgt

SEQ ID NO: 4141623 - DNA, 25 bp, Homo sapien
acaaggcaagtctcttatgcctata

SEQ ID NO: 4141624 - DNA, 25 bp, Homo sapien
caaggcaagtctcttatgcctataa

SEQ ID NO: 4141625 - DNA, 25 bp, Homo sapien
aaggcaagtctcttatgcctataag

SEQ ID NO: 4141626 - DNA, 25 bp, Homo sapien
aggcaagtctcttatgcctataagc

SEQ ID NO: 4141627 - DNA, 25 bp, Homo sapien
tagcataatggctgtctgtggttac

SEQ ID NO: 4141628 - DNA, 25 bp, Homo sapien
ctgtggttaccatagagagttgttc

SEQ ID NO: 4141629 - DNA, 25 bp, Homo sapien
tcgttaatcctatcaaaggctgtcc

SEQ ID NO: 4141630 - DNA, 25 bp, Homo sapien
caaaggctgtcctcttgctgaaaga

SEQ ID NO: 4141631 - DNA, 25 bp, Homo sapien
gagctttgttcctttctttccacta

SEQ ID NO: 4141632 - DNA, 25 bp, Homo sapien
ctgagctttgttcctttctttccac

SEQ ID NO: 4141633 - DNA, 25 bp, Homo sapien
tgagctttgttcctttctttccact

SEQ ID NO: 4141634 - DNA, 25 bp, Homo sapien
cagcagattcactgggcttattcac

SEQ ID NO: 4141635 - DNA, 25 bp, Homo sapien
cactgggcttattcacaaagggtaa

SEQ ID NO: 4141636 - DNA, 25 bp, Homo sapien
gcttattcacaaagggtaagcagag

SEQ ID NO: 4141637 - DNA, 25 bp, Homo sapien
agattcactgggcttattcacaaag

SEQ ID NO: 4141638 - DNA, 25 bp, Homo sapien
tatgttgtaactgcactatgctgtg

SEQ ID NO: 4141639 - DNA, 25 bp, Homo sapien
gccatgcaccgtagagacacaaaga

SEQ ID NO: 4141640 - DNA, 25 bp, Homo sapien
tggaagaaacatggtacagaataac

SEQ ID NO: 4141641 - DNA, 25 bp, Homo sapien
cagttcacagactcaaggagatccc

SEQ ID NO: 4141642 - DNA, 25 bp, Homo sapien
catacatggcttagatttatctgtc

SEQ ID NO: 4141643 - DNA, 25 bp, Homo sapien
caatgtggtaatgagctgttggtgc

SEQ ID NO: 4141644 - DNA, 25 bp, Homo sapien
gttggtgctaaaaaattggtatgcc

SEQ ID NO: 4141645 - DNA, 25 bp, Homo sapien
tggtatgccattggcaaaagggacg

SEQ ID NO: 4141646 - DNA, 25 bp, Homo sapien
gaagcattcagtctaatggaggaga

SEQ ID NO: 4141647 - DNA, 25 bp, Homo sapien
aatgtactgggcagtgagatcagca

SEQ ID NO: 4141648 - DNA, 25 bp, Homo sapien
ttttctgagaaagggacatgagcta

SEQ ID NO: 4141649 - DNA, 25 bp, Homo sapien
gaggagaaacatcagtcaggtaatc

SEQ ID NO: 4141650 - DNA, 25 bp, Homo sapien
attcttcctggtgcctccaagaaag

SEQ ID NO: 4141651 - DNA, 25 bp, Homo sapien
gattcttcctggtgcctccaagaaa

SEQ ID NO: 4141652 - DNA, 25 bp, Homo sapien
aaaactcaaggctcgctctctctcg

SEQ ID NO: 4141653 - DNA, 25 bp, Homo sapien
gtaaaaactcaaggctcgctctctc

SEQ ID NO: 4141654 - DNA, 25 bp, Homo sapien
aattaggtacaggagccagaagaag

SEQ ID NO: 4141655 - DNA, 25 bp, Homo sapien
gcttcggtcacaagccacctctttg

SEQ ID NO: 4141656 - DNA, 25 bp, Homo sapien
gagttaccaagacggtatgcaatgg

SEQ ID NO: 4141657 - DNA, 25 bp, Homo sapien
caaagggacagcagggtatctggaa

SEQ ID NO: 4141658 - DNA, 25 bp, Homo sapien
gattttcctcctatgcattcgctaa

SEQ ID NO: 4141659 - DNA, 25 bp, Homo sapien
gatgctaactccactcatgacgtag

SEQ ID NO: 4141660 - DNA, 25 bp, Homo sapien
taaagcagccaaaacccaataagag

SEQ ID NO: 4141661 - DNA, 25 bp, Homo sapien
tatccctagtgtagagacccatcag

SEQ ID NO: 4141662 - DNA, 25 bp, Homo sapien
catgctagggtagaaactccattta

SEQ ID NO: 4141663 - DNA, 25 bp, Homo sapien
tcttggatccgattttctctcttcc

SEQ ID NO: 4141664 - DNA, 25 bp, Homo sapien
ccatttaatattgaactgtgcagga

SEQ ID NO: 4141665 - DNA, 25 bp, Homo sapien
gggaatgttggagccgaatttctct

SEQ ID NO: 4141666 - DNA, 25 bp, Homo sapien
aataacattttgaattccagatggt

SEQ ID NO: 4141667 - DNA, 25 bp, Homo sapien
taacattttgaattccagatggtct

SEQ ID NO: 4141668 - DNA, 25 bp, Homo sapien
acattttgaattccagatggtctca

SEQ ID NO: 4141669 - DNA, 25 bp, Homo sapien
cattttgaattccagatggtctcac

SEQ ID NO: 4141670 - DNA, 25 bp, Homo sapien
ttgggcagctgcagtaatactcaca

SEQ ID NO: 4141671 - DNA, 25 bp, Homo sapien
gaatatttacatcttcaacataacc

SEQ ID NO: 4141672 - DNA, 25 bp, Homo sapien
atatttacatcttcaacataaccac

SEQ ID NO: 4141673 - DNA, 25 bp, Homo sapien
ggcagctgcagtaatactcacagca

SEQ ID NO: 4141674 - DNA, 25 bp, Homo sapien
gcagaaatcttcaccaatcttggct

SEQ ID NO: 4141675 - DNA, 25 bp, Homo sapien
ttgtgattagaaactcaggtattgc

SEQ ID NO: 4141676 - DNA, 25 bp, Homo sapien
tccaaaatagatgtcccaattgcca

SEQ ID NO: 4141677 - DNA, 25 bp, Homo sapien
gaaggtcctcagtacattcttcagt

SEQ ID NO: 4141678 - DNA, 25 bp, Homo sapien
aagctcccaggatgattctgatatt

SEQ ID NO: 4141679 - DNA, 25 bp, Homo sapien
aaccagctacgtgatgcccatcaat

SEQ ID NO: 4141680 - DNA, 25 bp, Homo sapien
tcctggccttcacttgttttgaaga

SEQ ID NO: 4141681 - DNA, 25 bp, Homo sapien
catagctcttcatagatggctggag

SEQ ID NO: 4141682 - DNA, 25 bp, Homo sapien
ccttgcttggatgagtcattttctc

SEQ ID NO: 4141683 - DNA, 25 bp, Homo sapien
aaaccttgcttggatgagtcatttt

SEQ ID NO: 4141684 - DNA, 25 bp, Homo sapien
caaaccttgcttggatgagtcattt

SEQ ID NO: 4141685 - DNA, 25 bp, Homo sapien
aaccttgcttggatgagtcattttc

SEQ ID NO: 4141686 - DNA, 25 bp, Homo sapien
ggaagagacctgatatgccatatgc

SEQ ID NO: 4141687 - DNA, 25 bp, Homo sapien
ctttagcactggaagagacctgata

SEQ ID NO: 4141688 - DNA, 25 bp, Homo sapien
gacctgatatgccatatgcttgtct

SEQ ID NO: 4141689 - DNA, 25 bp, Homo sapien
tccatcctatctcatgcttcatttc

SEQ ID NO: 4141690 - DNA, 25 bp, Homo sapien
tagaagaaaaagagaaatgatcaga

SEQ ID NO: 4141691 - DNA, 25 bp, Homo sapien
ctagaagaaaaagagaaatgatcag

SEQ ID NO: 4141692 - DNA, 25 bp, Homo sapien
aagaaaaagagaaatgatcagagct

SEQ ID NO: 4141693 - DNA, 25 bp, Homo sapien
gaagaaaaagagaaatgatcagagc

SEQ ID NO: 4141694 - DNA, 25 bp, Homo sapien
gcaacactgtgcaggagaaatcagg

SEQ ID NO: 4141695 - DNA, 25 bp, Homo sapien
tctgacttcgccagtgacaaggcaa

SEQ ID NO: 4141696 - DNA, 25 bp, Homo sapien
tgtaaggaaagtctcagccatcccc

SEQ ID NO: 4141697 - DNA, 25 bp, Homo sapien
tccaggagccctagatcatgcagag

SEQ ID NO: 4141698 - DNA, 25 bp, Homo sapien
taaattgggctgaaatgatacgggc

SEQ ID NO: 4141699 - DNA, 25 bp, Homo sapien
tatggtctaatatgtgcgcctggca

SEQ ID NO: 4141700 - DNA, 25 bp, Homo sapien
tcaacaaagctgtcctaaattgggc

SEQ ID NO: 4141701 - DNA, 25 bp, Homo sapien
tcagccattggttgtgagtccccag

SEQ ID NO: 4141702 - DNA, 25 bp, Homo sapien
tcttggggttccttgctgtctctct

SEQ ID NO: 4141703 - DNA, 25 bp, Homo sapien
cttggggttccttgctgtctctctc

SEQ ID NO: 4141704 - DNA, 25 bp, Homo sapien
gctcactagaatgacattgtccagt

SEQ ID NO: 4141705 - DNA, 25 bp, Homo sapien
gtatattcctctgactgtttaatgt

SEQ ID NO: 4141706 - DNA, 25 bp, Homo sapien
ggctgctcactagaatgacattgtc

SEQ ID NO: 4141707 - DNA, 25 bp, Homo sapien
cactagaatgacattgtccagtaga

SEQ ID NO: 4141708 - DNA, 25 bp, Homo sapien
taacatctctgcacattgagtcaat

SEQ ID NO: 4141709 - DNA, 25 bp, Homo sapien
tctgcacattgagtcaatctcttgg

SEQ ID NO: 4141710 - DNA, 25 bp, Homo sapien
gacctcctctaacatctctgcacat

SEQ ID NO: 4141711 - DNA, 25 bp, Homo sapien
tcctctaacatctctgcacattgag

SEQ ID NO: 4141712 - DNA, 25 bp, Homo sapien
aaaatactgcacattgccaatagga

SEQ ID NO: 4141713 - DNA, 25 bp, Homo sapien
cattgccaataggacctgaaacatc

SEQ ID NO: 4141714 - DNA, 25 bp, Homo sapien
tgcatgcacgtcaacttcattctgt

SEQ ID NO: 4141715 - DNA, 25 bp, Homo sapien
gaaacatcaggaaccaaacttcctc

SEQ ID NO: 4141716 - DNA, 25 bp, Homo sapien
cttctttgaagtactcttctaggag

SEQ ID NO: 4141717 - DNA, 25 bp, Homo sapien
ggaggatgaataccaaattggcttt

SEQ ID NO: 4141718 - DNA, 25 bp, Homo sapien
ttgaagtactcttctaggaggatga

SEQ ID NO: 4141719 - DNA, 25 bp, Homo sapien
gaagtactcttctaggaggatgaat

SEQ ID NO: 4141720 - DNA, 25 bp, Homo sapien
gacaggagcatcaaaagttaggagt

SEQ ID NO: 4141721 - DNA, 25 bp, Homo sapien
gttttctggacaggagcatcaaaag

SEQ ID NO: 4141722 - DNA, 25 bp, Homo sapien
tgctcagttttctggacaggagcat

SEQ ID NO: 4141723 - DNA, 25 bp, Homo sapien
gcatcaaaagttaggagtggtgatt

SEQ ID NO: 4141724 - DNA, 25 bp, Homo sapien
cataaggctaccaggaaattctctc

SEQ ID NO: 4141725 - DNA, 25 bp, Homo sapien
gatggcggccatcaatagtttccgg

SEQ ID NO: 4141726 - DNA, 25 bp, Homo sapien
tcagcataggtttaacccatgaaaa

SEQ ID NO: 4141727 - DNA, 25 bp, Homo sapien
cagagtaaaacacccgtaaatgagt

SEQ ID NO: 4141728 - DNA, 25 bp, Homo sapien
tgtctccatacattggtggctgcct

SEQ ID NO: 4141729 - DNA, 25 bp, Homo sapien
ctgtctccatacattggtggctgcc

SEQ ID NO: 4141730 - DNA, 25 bp, Homo sapien
cactgtctccatacattggtggctg

SEQ ID NO: 4141731 - DNA, 25 bp, Homo sapien
actgtctccatacattggtggctgc

SEQ ID NO: 4141732 - DNA, 25 bp, Homo sapien
ctttggccaggtttgctagagtctg

SEQ ID NO: 4141733 - DNA, 25 bp, Homo sapien
gaaggctgtcattggccagccgcgc

SEQ ID NO: 4141734 - DNA, 25 bp, Homo sapien
cccacagacattggtgcaggctcag

SEQ ID NO: 4141735 - DNA, 25 bp, Homo sapien
ttggtgcaggctcagccgtgcgccc

SEQ ID NO: 4141736 - DNA, 25 bp, Homo sapien
ccagccgcgctccagaggggagggc

SEQ ID NO: 4141737 - DNA, 25 bp, Homo sapien
agggtccatagctcgccctcgctcg

SEQ ID NO: 4141738 - DNA, 25 bp, Homo sapien
agaggagcgacaccctggagcagcc

SEQ ID NO: 4141739 - DNA, 25 bp, Homo sapien
aagccccttcgggagcagccagagg

SEQ ID NO: 4141740 - DNA, 25 bp, Homo sapien
gttcgcttggcaccaccgtcctcag

SEQ ID NO: 4141741 - DNA, 25 bp, Homo sapien
aaggcaaggggctccttcagcaccc

SEQ ID NO: 4141742 - DNA, 25 bp, Homo sapien
caattccagggctcgcaggaaggca

SEQ ID NO: 4141743 - DNA, 25 bp, Homo sapien
cagcacccggaaggtgcccgcagag

SEQ ID NO: 4141744 - DNA, 25 bp, Homo sapien
aattccagggctcgcaggaaggcaa

SEQ ID NO: 4141745 - DNA, 25 bp, Homo sapien
cggctcctccgctcaactatgggtc

SEQ ID NO: 4141746 - DNA, 25 bp, Homo sapien
ccgccgccgtttataacagtctgta

SEQ ID NO: 4141747 - DNA, 25 bp, Homo sapien
taatagcttcgcagcatctttccct

SEQ ID NO: 4141748 - DNA, 25 bp, Homo sapien
agcagttgaacacgcgcttccagca

SEQ ID NO: 4141749 - DNA, 25 bp, Homo sapien
gacgaaacgtgtgacctgcagattt

SEQ ID NO: 4141750 - DNA, 25 bp, Homo sapien
ttggagttcctagcaagacgaaacg

SEQ ID NO: 4141751 - DNA, 25 bp, Homo sapien
caaattgcaataagagcgtcagggt

SEQ ID NO: 4141752 - DNA, 25 bp, Homo sapien
aaagcccagtcgctgaagaaagcca

SEQ ID NO: 4141753 - DNA, 25 bp, Homo sapien
ctcacatatcgacatgctgcatctt

SEQ ID NO: 4141754 - DNA, 25 bp, Homo sapien
gccgccttggttaggcagggaggta

SEQ ID NO: 4141755 - DNA, 25 bp, Homo sapien
tctttggattcactggccgccttgg

SEQ ID NO: 4141756 - DNA, 25 bp, Homo sapien
atctttggattcactggccgccttg

SEQ ID NO: 4141757 - DNA, 25 bp, Homo sapien
gccaagtgcttgcaattcttccatt

SEQ ID NO: 4141758 - DNA, 25 bp, Homo sapien
tttaggttcaatactggccttgctg

SEQ ID NO: 4141759 - DNA, 25 bp, Homo sapien
cattagacgttctcgtttaggttca

SEQ ID NO: 4141760 - DNA, 25 bp, Homo sapien
tattccaaggagcaagcgcctgaag

SEQ ID NO: 4141761 - DNA, 25 bp, Homo sapien
tgcagaacaaagaactaaggatggt

SEQ ID NO: 4141762 - DNA, 25 bp, Homo sapien
tgtccccatacctcagtcagtgaga

SEQ ID NO: 4141763 - DNA, 25 bp, Homo sapien
gagatgtgggtcgtctgcagaacaa

SEQ ID NO: 4141764 - DNA, 25 bp, Homo sapien
tctacttcagcataactccagggtt

SEQ ID NO: 4141765 - DNA, 25 bp, Homo sapien
aatcatttagctccaagacctagga

SEQ ID NO: 4141766 - DNA, 25 bp, Homo sapien
catgatggaagctgcctgacttagg

SEQ ID NO: 4141767 - DNA, 25 bp, Homo sapien
tatgaacatccttagtcatgagggc

SEQ ID NO: 4141768 - DNA, 25 bp, Homo sapien
taagagcatggaatctggcatccag

SEQ ID NO: 4141769 - DNA, 25 bp, Homo sapien
ttggacttttctccagtatccacat

SEQ ID NO: 4141770 - DNA, 25 bp, Homo sapien
cttctttggacttttctccagtatc

SEQ ID NO: 4141771 - DNA, 25 bp, Homo sapien
tttggacttttctccagtatccaca

SEQ ID NO: 4141772 - DNA, 25 bp, Homo sapien
tctttggacttttctccagtatcca

SEQ ID NO: 4141773 - DNA, 25 bp, Homo sapien
ttttatagcccacgtctcctagagc

SEQ ID NO: 4141774 - DNA, 25 bp, Homo sapien
ggtcaccatttgctctgggactggg

SEQ ID NO: 4141775 - DNA, 25 bp, Homo sapien
ggagatgaggtacccaaagcttccc

SEQ ID NO: 4141776 - DNA, 25 bp, Homo sapien
tggttctatcttggacatgcaggga

SEQ ID NO: 4141777 - DNA, 25 bp, Homo sapien
tccagaaagagtcactgagcttctt

SEQ ID NO: 4141778 - DNA, 25 bp, Homo sapien
gtccagaaagagtcactgagcttct

SEQ ID NO: 4141779 - DNA, 25 bp, Homo sapien
ccatagggtacatttgctggagaaa

SEQ ID NO: 4141780 - DNA, 25 bp, Homo sapien
acttttccatagggtacatttgctg

SEQ ID NO: 4141781 - DNA, 25 bp, Homo sapien
ccagtagaacctagaggaaactgac

SEQ ID NO: 4141782 - DNA, 25 bp, Homo sapien
atgcaccagtagaacctagaggaaa

SEQ ID NO: 4141783 - DNA, 25 bp, Homo sapien
tattccagaagaatgcaccagtaga

SEQ ID NO: 4141784 - DNA, 25 bp, Homo sapien
tcatgtattccagaagaatgcacca

SEQ ID NO: 4141785 - DNA, 25 bp, Homo sapien
tctttctgcggtctcaagcaggaag

SEQ ID NO: 4141786 - DNA, 25 bp, Homo sapien
cccgtggctgcatgaggtgagactc

SEQ ID NO: 4141787 - DNA, 25 bp, Homo sapien
tcacttaaacttgaacccgtggctg

SEQ ID NO: 4141788 - DNA, 25 bp, Homo sapien
actgagagagaaatagtctctctct

SEQ ID NO: 4141789 - DNA, 25 bp, Homo sapien
tggatatactcagccatgcatggga

SEQ ID NO: 4141790 - DNA, 25 bp, Homo sapien
ccagagtggttgtgctagagtccga

SEQ ID NO: 4141791 - DNA, 25 bp, Homo sapien
gaaatgccagcatagcaaccaggtc

SEQ ID NO: 4141792 - DNA, 25 bp, Homo sapien
tgtagaaccgcctccgactaaagtg

SEQ ID NO: 4141793 - DNA, 25 bp, Homo sapien
gcagctgccagcaacttacatgtaa

SEQ ID NO: 4141794 - DNA, 25 bp, Homo sapien
cctccattatccttctagggcagtg

SEQ ID NO: 4141795 - DNA, 25 bp, Homo sapien
taagccaaaagtatgcagagtgttg

SEQ ID NO: 4141796 - DNA, 25 bp, Homo sapien
gcataactgtactctgccaaagtgg

SEQ ID NO: 4141797 - DNA, 25 bp, Homo sapien
gagctaccagcatgctgttgttgaa

SEQ ID NO: 4141798 - DNA, 25 bp, Homo sapien
cagtctctggtctagacaattaaaa

SEQ ID NO: 4141799 - DNA, 25 bp, Homo sapien
ggatgtataggagcacaccatttta

SEQ ID NO: 4141800 - DNA, 25 bp, Homo sapien
ttttggccagatttgccagtctctg

SEQ ID NO: 4141801 - DNA, 25 bp, Homo sapien
tctggtgaacgctgcctgcttggtg

SEQ ID NO: 4141802 - DNA, 25 bp, Homo sapien
ccatggtgagctcccacacttggct

SEQ ID NO: 4141803 - DNA, 25 bp, Homo sapien
gaagtgcaggactgctttgcacgag

SEQ ID NO: 4141804 - DNA, 25 bp, Homo sapien
ggaacctgatactcccctctggtga

SEQ ID NO: 4141805 - DNA, 25 bp, Homo sapien
aaataaagcttctctgtccacagca

SEQ ID NO: 4141806 - DNA, 25 bp, Homo sapien
gatgttataccaatcagatagcagc

SEQ ID NO: 4141807 - DNA, 25 bp, Homo sapien
agatagcagcttcagcctcatttgc

SEQ ID NO: 4141808 - DNA, 25 bp, Homo sapien
gataatccaacttccctctcctgaa

SEQ ID NO: 4141809 - DNA, 25 bp, Homo sapien
taaatggaaatgactcttgcattct

SEQ ID NO: 4141810 - DNA, 25 bp, Homo sapien
gatcctgtggtaaagtccaagttga

SEQ ID NO: 4141811 - DNA, 25 bp, Homo sapien
tgacaaataagtagagatcctgtgg

SEQ ID NO: 4141812 - DNA, 25 bp, Homo sapien
aagttgaatttggagaatgaggacc

SEQ ID NO: 4141813 - DNA, 25 bp, Homo sapien
tatgggaggttttcaagggattgac

SEQ ID NO: 4141814 - DNA, 25 bp, Homo sapien
agtttgttaggtgttgcagcacttg

SEQ ID NO: 4141815 - DNA, 25 bp, Homo sapien
tctgatctttcactaagtacacaaa

SEQ ID NO: 4141816 - DNA, 25 bp, Homo sapien
gcagcacttgaagatctcttcaatc

SEQ ID NO: 4141817 - DNA, 25 bp, Homo sapien
gatctttcactaagtacacaaattt

SEQ ID NO: 4141818 - DNA, 25 bp, Homo sapien
tgtgcctcagcaacacccaagcctc

SEQ ID NO: 4141819 - DNA, 25 bp, Homo sapien
taccagacattgaaggtgtaaccca

SEQ ID NO: 4141820 - DNA, 25 bp, Homo sapien
ccagacattgaaggtgtaacccagg

SEQ ID NO: 4141821 - DNA, 25 bp, Homo sapien
cagacattgaaggtgtaacccaggg

SEQ ID NO: 4141822 - DNA, 25 bp, Homo sapien
cttaccagacattgaaggtgtaacc

SEQ ID NO: 4141823 - DNA, 25 bp, Homo sapien
gcctccagaatagccaccgcatgtt

SEQ ID NO: 4141824 - DNA, 25 bp, Homo sapien
tgaatgggtaggcaaacgctatgtc

SEQ ID NO: 4141825 - DNA, 25 bp, Homo sapien
ggcaaacgctatgtcgatgctgagg

SEQ ID NO: 4141826 - DNA, 25 bp, Homo sapien
ttgttgacgcagtccacactcagcc

SEQ ID NO: 4141827 - DNA, 25 bp, Homo sapien
actgtgtttgggcattccgtgggtg

SEQ ID NO: 4141828 - DNA, 25 bp, Homo sapien
tttgggcattccgtgggtgcaggca

SEQ ID NO: 4141829 - DNA, 25 bp, Homo sapien
gggtgcaggcagaatactttctgtt

SEQ ID NO: 4141830 - DNA, 25 bp, Homo sapien
tgggcattccgtgggtgcaggcaga

SEQ ID NO: 4141831 - DNA, 25 bp, Homo sapien
actttctgggtcatccaacttcttt

SEQ ID NO: 4141832 - DNA, 25 bp, Homo sapien
ctttctgggtcatccaacttctttt

SEQ ID NO: 4141833 - DNA, 25 bp, Homo sapien
tttctgggtcatccaacttcttttc

SEQ ID NO: 4141834 - DNA, 25 bp, Homo sapien
aaaagtcttaatacatcctagggca

SEQ ID NO: 4141835 - DNA, 25 bp, Homo sapien
tctcaagggtaattttgctaattaa

SEQ ID NO: 4141836 - DNA, 25 bp, Homo sapien
atatgtgcaccctttaatgttttta

SEQ ID NO: 4141837 - DNA, 25 bp, Homo sapien
taaaagcacgttaatcaagagacag

SEQ ID NO: 4141838 - DNA, 25 bp, Homo sapien
cttccctatgggagctcaacagaaa

SEQ ID NO: 4141839 - DNA, 25 bp, Homo sapien
ttaatgggaccatggtgcaggcacc

SEQ ID NO: 4141840 - DNA, 25 bp, Homo sapien
gcaggcaccacacattttcaaggca

SEQ ID NO: 4141841 - DNA, 25 bp, Homo sapien
taaaaggcccactcagcatacaatg

SEQ ID NO: 4141842 - DNA, 25 bp, Homo sapien
tagcgagtcagtttgaatacttgcc

SEQ ID NO: 4141843 - DNA, 25 bp, Homo sapien
tctgtttgaacctctcagccctgga

SEQ ID NO: 4141844 - DNA, 25 bp, Homo sapien
gatggtttcatgtctcggctctggc

SEQ ID NO: 4141845 - DNA, 25 bp, Homo sapien
acaggtctccaccactcagttgaca

SEQ ID NO: 4141846 - DNA, 25 bp, Homo sapien
gtctctgaattcccacagtgggata

SEQ ID NO: 4141847 - DNA, 25 bp, Homo sapien
tttcaacctatcattgagagagtct

SEQ ID NO: 4141848 - DNA, 25 bp, Homo sapien
tctgatcacatccagggtctctgaa

SEQ ID NO: 4141849 - DNA, 25 bp, Homo sapien
atgcaggtaggggagctttcaacct

SEQ ID NO: 4141850 - DNA, 25 bp, Homo sapien
gattacagcaagcagtgtaccgtgc

SEQ ID NO: 4141851 - DNA, 25 bp, Homo sapien
tttaaatgagctttctacacgttac

SEQ ID NO: 4141852 - DNA, 25 bp, Homo sapien
gcaagcagtgtaccgtgcctggctg

SEQ ID NO: 4141853 - DNA, 25 bp, Homo sapien
gcttggattacagcaagcagtgtac

SEQ ID NO: 4141854 - DNA, 25 bp, Homo sapien
gtgacagctgctagtttggcaaaga

SEQ ID NO: 4141855 - DNA, 25 bp, Homo sapien
taagtgacagctgctagtttggcaa

SEQ ID NO: 4141856 - DNA, 25 bp, Homo sapien
aagtgacagctgctagtttggcaaa

SEQ ID NO: 4141857 - DNA, 25 bp, Homo sapien
ctaagtgacagctgctagtttggca

SEQ ID NO: 4141858 - DNA, 25 bp, Homo sapien
tacacacttgacacagatggactga

SEQ ID NO: 4141859 - DNA, 25 bp, Homo sapien
gaatgaacgagtctttttgccagga

SEQ ID NO: 4141860 - DNA, 25 bp, Homo sapien
gatggtggtgcccttagatcgcaaa

SEQ ID NO: 4141861 - DNA, 25 bp, Homo sapien
tgaagctccatgagaaggccccaat

SEQ ID NO: 4141862 - DNA, 25 bp, Homo sapien
cccactgtccaatcatggcattggg

SEQ ID NO: 4141863 - DNA, 25 bp, Homo sapien
ttcccactgtccaatcatggcattg

SEQ ID NO: 4141864 - DNA, 25 bp, Homo sapien
ttaggcctttcccactgtccaatca

SEQ ID NO: 4141865 - DNA, 25 bp, Homo sapien
ctttcccactgtccaatcatggcat

SEQ ID NO: 4141866 - DNA, 25 bp, Homo sapien
tttttgggtatcattaactgagaag

SEQ ID NO: 4141867 - DNA, 25 bp, Homo sapien
gaaagaagcatatgtactccatcag

SEQ ID NO: 4141868 - DNA, 25 bp, Homo sapien
gaagcatatgtactccatcagtcac

SEQ ID NO: 4141869 - DNA, 25 bp, Homo sapien
tgggtatcattaactgagaagtaga

SEQ ID NO: 4141870 - DNA, 25 bp, Homo sapien
cttcttttcttctgggaatagcttt

SEQ ID NO: 4141871 - DNA, 25 bp, Homo sapien
tcttttcttctgggaatagctttcc

SEQ ID NO: 4141872 - DNA, 25 bp, Homo sapien
ttcttttcttctgggaatagctttc

SEQ ID NO: 4141873 - DNA, 25 bp, Homo sapien
gacacaaaagcagcctcgactccaa

SEQ ID NO: 4141874 - DNA, 25 bp, Homo sapien
caaggacacaaaagcagcctcgact

SEQ ID NO: 4141875 - DNA, 25 bp, Homo sapien
aggacacaaaagcagcctcgactcc

SEQ ID NO: 4141876 - DNA, 25 bp, Homo sapien
acaaggacacaaaagcagcctcgac

SEQ ID NO: 4141877 - DNA, 25 bp, Homo sapien
cattatagggatccaagttaaaaga

SEQ ID NO: 4141878 - DNA, 25 bp, Homo sapien
ggattataaatacgtgcattatagg

SEQ ID NO: 4141879 - DNA, 25 bp, Homo sapien
tataaatacgtgcattatagggatc

SEQ ID NO: 4141880 - DNA, 25 bp, Homo sapien
tacgtgcattatagggatccaagtt

SEQ ID NO: 4141881 - DNA, 25 bp, Homo sapien
gccttaaaagcacaagctcgtccta

SEQ ID NO: 4141882 - DNA, 25 bp, Homo sapien
agctcgtcctagttctctttcttgc

SEQ ID NO: 4141883 - DNA, 25 bp, Homo sapien
aaagcacaagctcgtcctagttctc

SEQ ID NO: 4141884 - DNA, 25 bp, Homo sapien
ggcaagccttaaaagcacaagctcg

SEQ ID NO: 4141885 - DNA, 25 bp, Homo sapien
gatgtcttccggtccaggtccacat

SEQ ID NO: 4141886 - DNA, 25 bp, Homo sapien
tgatgtcttccggtccaggtccaca

SEQ ID NO: 4141887 - DNA, 25 bp, Homo sapien
aaagccttaaacattgagcctgcca

SEQ ID NO: 4141888 - DNA, 25 bp, Homo sapien
ttgagcctgccactcaggattactg

SEQ ID NO: 4141889 - DNA, 25 bp, Homo sapien
tcaggattactgacaacatttatct

SEQ ID NO: 4141890 - DNA, 25 bp, Homo sapien
taaacattgagcctgccactcagga

SEQ ID NO: 4141891 - DNA, 25 bp, Homo sapien
cagcgtgcatctgtcagggttctga

SEQ ID NO: 4141892 - DNA, 25 bp, Homo sapien
gggattgtcagcgtgcatctgtcag

SEQ ID NO: 4141893 - DNA, 25 bp, Homo sapien
ggagatctgccctagtgggattgtc

SEQ ID NO: 4141894 - DNA, 25 bp, Homo sapien
ctgtcagggttctgatggttactac

SEQ ID NO: 4141895 - DNA, 25 bp, Homo sapien
tgcagccagagataggcaacttttt

SEQ ID NO: 4141896 - DNA, 25 bp, Homo sapien
gaatagtaagtgtgaataaaccctg

SEQ ID NO: 4141897 - DNA, 25 bp, Homo sapien
taggcaacaatggtaaccgccctgg

SEQ ID NO: 4141898 - DNA, 25 bp, Homo sapien
gggatgatcaagagggagacacact

SEQ ID NO: 4141899 - DNA, 25 bp, Homo sapien
taagctttgggctctgtagggcttt

SEQ ID NO: 4141900 - DNA, 25 bp, Homo sapien
cttaagctttgggctctgtagggct

SEQ ID NO: 4141901 - DNA, 25 bp, Homo sapien
aagctttgggctctgtagggctttc

SEQ ID NO: 4141902 - DNA, 25 bp, Homo sapien
ttaagctttgggctctgtagggctt

SEQ ID NO: 4141903 - DNA, 25 bp, Homo sapien
ttaaacaagctgcttgggcttattt

SEQ ID NO: 4141904 - DNA, 25 bp, Homo sapien
taaacaagctgcttgggcttatttt

SEQ ID NO: 4141905 - DNA, 25 bp, Homo sapien
aaacaagctgcttgggcttattttc

SEQ ID NO: 4141906 - DNA, 25 bp, Homo sapien
aacaagctgcttgggcttattttct

SEQ ID NO: 4141907 - DNA, 25 bp, Homo sapien
cttatggacgtcagtgggatttagc

SEQ ID NO: 4141908 - DNA, 25 bp, Homo sapien
tgtaaaaccttgcacgtctgtgcct

SEQ ID NO: 4141909 - DNA, 25 bp, Homo sapien
gacctattgtttgcgtcttatggac

SEQ ID NO: 4141910 - DNA, 25 bp, Homo sapien
gtctgtgcctaagcgtctgggacct

SEQ ID NO: 4141911 - DNA, 25 bp, Homo sapien
ttggattaacctccatattgtccat

SEQ ID NO: 4141912 - DNA, 25 bp, Homo sapien
agcttctgagatcagggcgtgttca

SEQ ID NO: 4141913 - DNA, 25 bp, Homo sapien
gttcagggtggtatggctgtagact

SEQ ID NO: 4141914 - DNA, 25 bp, Homo sapien
cgtgttcagggtggtatggctgtag

SEQ ID NO: 4141915 - DNA, 25 bp, Homo sapien
gcttctgagatcagggcgtgttcag

SEQ ID NO: 4141916 - DNA, 25 bp, Homo sapien
aagagatgaactccatatcttcgga

SEQ ID NO: 4141917 - DNA, 25 bp, Homo sapien
actccatatcttcggataaatggca

SEQ ID NO: 4141918 - DNA, 25 bp, Homo sapien
catatcttcggataaatggcatttt

SEQ ID NO: 4141919 - DNA, 25 bp, Homo sapien
gatgaactccatatcttcggataaa

SEQ ID NO: 4141920 - DNA, 25 bp, Homo sapien
aaaaggcagacaaattcgaagtagg

SEQ ID NO: 4141921 - DNA, 25 bp, Homo sapien
ttcgaagtagggactgagaacaggc

SEQ ID NO: 4141922 - DNA, 25 bp, Homo sapien
aggcacattacgctgtcctcaaaat

SEQ ID NO: 4141923 - DNA, 25 bp, Homo sapien
cattacgctgtcctcaaaatgtggg

SEQ ID NO: 4141924 - DNA, 25 bp, Homo sapien
gattggaataagattctcctttatg

SEQ ID NO: 4141925 - DNA, 25 bp, Homo sapien
attggaataagattctcctttatgc

SEQ ID NO: 4141926 - DNA, 25 bp, Homo sapien
gaaaatgtaaacgacagtggcagcc

SEQ ID NO: 4141927 - DNA, 25 bp, Homo sapien
ctctgctgaagacgaggagtcacca

SEQ ID NO: 4141928 - DNA, 25 bp, Homo sapien
cagtggcagccaaagagtagaggaa

SEQ ID NO: 4141929 - DNA, 25 bp, Homo sapien
ggaaggcgaagacagcaacagtgac

SEQ ID NO: 4141930 - DNA, 25 bp, Homo sapien
ttgggcctcttgcatggtgattatg

SEQ ID NO: 4141931 - DNA, 25 bp, Homo sapien
gctctggatttcaacccacactctg

SEQ ID NO: 4141932 - DNA, 25 bp, Homo sapien
ttctgtagcacattggctatcagga

SEQ ID NO: 4141933 - DNA, 25 bp, Homo sapien
ggtgattatgaattgagctctggat

SEQ ID NO: 4141934 - DNA, 25 bp, Homo sapien
tactttatgacaagtccacagcaca

SEQ ID NO: 4141935 - DNA, 25 bp, Homo sapien
gattcaataatgttcctcagcagac

SEQ ID NO: 4141936 - DNA, 25 bp, Homo sapien
tctaggcaagattatgcacctcctc

SEQ ID NO: 4141937 - DNA, 25 bp, Homo sapien
ctagcaagccatttgtaggagagtt

SEQ ID NO: 4141938 - DNA, 25 bp, Homo sapien
caccaaaggcacagactccagcaaa

SEQ ID NO: 4141939 - DNA, 25 bp, Homo sapien
ctaagtttctgcaagatcttgattt

SEQ ID NO: 4141940 - DNA, 25 bp, Homo sapien
gatcttgattttctaactgaatgag

SEQ ID NO: 4141941 - DNA, 25 bp, Homo sapien
gattttctaactgaatgaggaattc

SEQ ID NO: 4141942 - DNA, 25 bp, Homo sapien
tgcggaaagggctaactttgtgcca

SEQ ID NO: 4141943 - DNA, 25 bp, Homo sapien
taactttgtgccaactgtttgaaag

SEQ ID NO: 4141944 - DNA, 25 bp, Homo sapien
gcaatggaaatgaagatgtccccct

SEQ ID NO: 4141945 - DNA, 25 bp, Homo sapien
taggatcctgctaatcagcaatgga

SEQ ID NO: 4141946 - DNA, 25 bp, Homo sapien
tgtcaagcattttggcaaataccag

SEQ ID NO: 4141947 - DNA, 25 bp, Homo sapien
aatagtcattataaagccacataaa

SEQ ID NO: 4141948 - DNA, 25 bp, Homo sapien
ataccaggtgcctgtaaatgttaaa

SEQ ID NO: 4141949 - DNA, 25 bp, Homo sapien
tggcaaataccaggtgcctgtaaat

SEQ ID NO: 4141950 - DNA, 25 bp, Homo sapien
tatctttgaacactggaattgcttc

SEQ ID NO: 4141951 - DNA, 25 bp, Homo sapien
gaattgcttcagttcagaaagagct

SEQ ID NO: 4141952 - DNA, 25 bp, Homo sapien
tgagatggacgcatactcgtgctta

SEQ ID NO: 4141953 - DNA, 25 bp, Homo sapien
taggaccgtgttgtacaaaaataca

SEQ ID NO: 4141954 - DNA, 25 bp, Homo sapien
gtgttttctccaagcatggttttct

SEQ ID NO: 4141955 - DNA, 25 bp, Homo sapien
tgtgtgttttctccaagcatggttt

SEQ ID NO: 4141956 - DNA, 25 bp, Homo sapien
tgtgttttctccaagcatggttttc

SEQ ID NO: 4141957 - DNA, 25 bp, Homo sapien
gtgtgttttctccaagcatggtttt

SEQ ID NO: 4141958 - DNA, 25 bp, Homo sapien
ctgatgaacccaccaaccacaagaa

SEQ ID NO: 4141959 - DNA, 25 bp, Homo sapien
caagaacgaaaagactacagtgaca

SEQ ID NO: 4141960 - DNA, 25 bp, Homo sapien
caaccacaagaacgaaaagactaca

SEQ ID NO: 4141961 - DNA, 25 bp, Homo sapien
ccacaagaacgaaaagactacagtg

SEQ ID NO: 4141962 - DNA, 25 bp, Homo sapien
tgtggatagccatgcatttgttgga

SEQ ID NO: 4141963 - DNA, 25 bp, Homo sapien
taagcttgacataacagggctgtgg

SEQ ID NO: 4141964 - DNA, 25 bp, Homo sapien
ccttgggatccgttgcaactttgac

SEQ ID NO: 4141965 - DNA, 25 bp, Homo sapien
gacattagtagcaatacttccttgg

SEQ ID NO: 4141966 - DNA, 25 bp, Homo sapien
ctgacaataagaaacctgagggcca

SEQ ID NO: 4141967 - DNA, 25 bp, Homo sapien
actggactgtcacctaagcagcagc

SEQ ID NO: 4141968 - DNA, 25 bp, Homo sapien
gaagtatctcaccttttgattggcc

SEQ ID NO: 4141969 - DNA, 25 bp, Homo sapien
aagtgatcatcctgtacctgaggtg

SEQ ID NO: 4141970 - DNA, 25 bp, Homo sapien
taatacagtgcagcttttccgaagt

SEQ ID NO: 4141971 - DNA, 25 bp, Homo sapien
tgtattccagctacatgtggcttga

SEQ ID NO: 4141972 - DNA, 25 bp, Homo sapien
taactaaaccggaagcatggagaaa

SEQ ID NO: 4141973 - DNA, 25 bp, Homo sapien
gaaacacaggttaatcttgaagcaa

SEQ ID NO: 4141974 - DNA, 25 bp, Homo sapien
tatgaggattggtttgccttagcca

SEQ ID NO: 4141975 - DNA, 25 bp, Homo sapien
cactaggaactagaagactgttaac

SEQ ID NO: 4141976 - DNA, 25 bp, Homo sapien
gatacatcactacagcaccactgga

SEQ ID NO: 4141977 - DNA, 25 bp, Homo sapien
cagtccagtcagagtagcaaccctt

SEQ ID NO: 4141978 - DNA, 25 bp, Homo sapien
gaatcaaagccaatgaattgataga

SEQ ID NO: 4141979 - DNA, 25 bp, Homo sapien
agaatcaaagccaatgaattgatag

SEQ ID NO: 4141980 - DNA, 25 bp, Homo sapien
tgaaggagaatcaaagccaatgaat

SEQ ID NO: 4141981 - DNA, 25 bp, Homo sapien
aggagaatcaaagccaatgaattga

SEQ ID NO: 4141982 - DNA, 25 bp, Homo sapien
agaataaagttcaagaatccaaaga

SEQ ID NO: 4141983 - DNA, 25 bp, Homo sapien
gaaaacaaaccatatgtttccagcc

SEQ ID NO: 4141984 - DNA, 25 bp, Homo sapien
aaacaaaccatatgtttccagccca

SEQ ID NO: 4141985 - DNA, 25 bp, Homo sapien
ccagagaataaagttcaagaatcca

SEQ ID NO: 4141986 - DNA, 25 bp, Homo sapien
gccagtaggctgttggccaaactca

SEQ ID NO: 4141987 - DNA, 25 bp, Homo sapien
actcatctgaggttggccccaaact

SEQ ID NO: 4141988 - DNA, 25 bp, Homo sapien
tgaaagatatctctgtcccgaagaa

SEQ ID NO: 4141989 - DNA, 25 bp, Homo sapien
gattatagctgctggagtgcttctc

SEQ ID NO: 4141990 - DNA, 25 bp, Homo sapien
taagtatcatttttcacaacccagg

SEQ ID NO: 4141991 - DNA, 25 bp, Homo sapien
gataagagccacaaaacaccataga

SEQ ID NO: 4141992 - DNA, 25 bp, Homo sapien
cattcagaacttgggtaaagccaga

SEQ ID NO: 4141993 - DNA, 25 bp, Homo sapien
taaatacttcagcaaggcggtacct

SEQ ID NO: 4141994 - DNA, 25 bp, Homo sapien
taaagccaaccaggttctactgttg

SEQ ID NO: 4141995 - DNA, 25 bp, Homo sapien
ttgtcattgttaaagccaaccaggt

SEQ ID NO: 4141996 - DNA, 25 bp, Homo sapien
caaccaggttctactgttgtaattg

SEQ ID NO: 4141997 - DNA, 25 bp, Homo sapien
ctgttgtaattgttcactgtccagc

SEQ ID NO: 4141998 - DNA, 25 bp, Homo sapien
caaggtgccagtaaacttggttcct

SEQ ID NO: 4141999 - DNA, 25 bp, Homo sapien
tcttattagcttgcggacagctacc

SEQ ID NO: 4142000 - DNA, 25 bp, Homo sapien
taaggccctacctgcaaaacacagt

SEQ ID NO: 4142001 - DNA, 25 bp, Homo sapien
taaatttgacccgagaaagccagtc

SEQ ID NO: 4142002 - DNA, 25 bp, Homo sapien
cctgaatggtttgatgttccaaaat

SEQ ID NO: 4142003 - DNA, 25 bp, Homo sapien
taagcaagtggagacacgctcaggc

SEQ ID NO: 4142004 - DNA, 25 bp, Homo sapien
atgactaagcaagtggagacacgct

SEQ ID NO: 4142005 - DNA, 25 bp, Homo sapien
caagtggagacacgctcaggcttgg

SEQ ID NO: 4142006 - DNA, 25 bp, Homo sapien
ggtaacaggctttctgagagatgga

SEQ ID NO: 4142007 - DNA, 25 bp, Homo sapien
tgatggttcctcctgatccatatag

SEQ ID NO: 4142008 - DNA, 25 bp, Homo sapien
gaagatagcaggcaagtgcagacag

SEQ ID NO: 4142009 - DNA, 25 bp, Homo sapien
agaacggctgcagggactttcacgg

SEQ ID NO: 4142010 - DNA, 25 bp, Homo sapien
gttcaacattgtattggtctgagct

SEQ ID NO: 4142011 - DNA, 25 bp, Homo sapien
tcaacattgtattggtctgagcttt

SEQ ID NO: 4142012 - DNA, 25 bp, Homo sapien
aacattgtattggtctgagctttaa

SEQ ID NO: 4142013 - DNA, 25 bp, Homo sapien
cattgtattggtctgagctttaatt

SEQ ID NO: 4142014 - DNA, 25 bp, Homo sapien
aagactatgtctttatcattggccc

SEQ ID NO: 4142015 - DNA, 25 bp, Homo sapien
ccagcagctggcctaaagcatttaa

SEQ ID NO: 4142016 - DNA, 25 bp, Homo sapien
aaatgcctgtctgatgtagtggaaa

SEQ ID NO: 4142017 - DNA, 25 bp, Homo sapien
cacccagtaaagttgccagcagctg

SEQ ID NO: 4142018 - DNA, 25 bp, Homo sapien
agaaggattgggatctccttccaag

SEQ ID NO: 4142019 - DNA, 25 bp, Homo sapien
cctaggtgcgcaggtggatgttggg

SEQ ID NO: 4142020 - DNA, 25 bp, Homo sapien
tttgggcattttcctaggtgcgcag

SEQ ID NO: 4142021 - DNA, 25 bp, Homo sapien
gagatttgtcctgggtactgtgcat

SEQ ID NO: 4142022 - DNA, 25 bp, Homo sapien
aggaagcgtgttccatgcagaggaa

SEQ ID NO: 4142023 - DNA, 25 bp, Homo sapien
ggtaataacctagtctacagtgagg

SEQ ID NO: 4142024 - DNA, 25 bp, Homo sapien
caccatatgattgaagaaccagagg

SEQ ID NO: 4142025 - DNA, 25 bp, Homo sapien
tacagtgagggtaatggcactctgc

SEQ ID NO: 4142026 - DNA, 25 bp, Homo sapien
actgaagccagttgtttggatattg

SEQ ID NO: 4142027 - DNA, 25 bp, Homo sapien
ctttttccagatctgagcacttcct

SEQ ID NO: 4142028 - DNA, 25 bp, Homo sapien
ctctgcgaaattcctaaattgggtt

SEQ ID NO: 4142029 - DNA, 25 bp, Homo sapien
ttttcaagtttaccatcagagtcag

SEQ ID NO: 4142030 - DNA, 25 bp, Homo sapien
tttgcagcagatctttggcaatagc

SEQ ID NO: 4142031 - DNA, 25 bp, Homo sapien
tcagccatgagggtgtagtttctgt

SEQ ID NO: 4142032 - DNA, 25 bp, Homo sapien
cagccatgagggtgtagtttctgtt

SEQ ID NO: 4142033 - DNA, 25 bp, Homo sapien
tctttatgcaagttaattctctcac

SEQ ID NO: 4142034 - DNA, 25 bp, Homo sapien
ccatgagggtgtagtttctgtttct

SEQ ID NO: 4142035 - DNA, 25 bp, Homo sapien
tcaggcatctgcatgtggtgaggac

SEQ ID NO: 4142036 - DNA, 25 bp, Homo sapien
agatcaggcatctgcatgtggtgag

SEQ ID NO: 4142037 - DNA, 25 bp, Homo sapien
tcaagatcaggcatctgcatgtggt

SEQ ID NO: 4142038 - DNA, 25 bp, Homo sapien
agttcaagatcaggcatctgcatgt

SEQ ID NO: 4142039 - DNA, 25 bp, Homo sapien
tgctcatcaagttcagaaaggatct

SEQ ID NO: 4142040 - DNA, 25 bp, Homo sapien
tgcttaagagcaagatcatgaagtc

SEQ ID NO: 4142041 - DNA, 25 bp, Homo sapien
tctgtgtgctcatcaagttcagaaa

SEQ ID NO: 4142042 - DNA, 25 bp, Homo sapien
taagagcaagatcatgaagtcttca

SEQ ID NO: 4142043 - DNA, 25 bp, Homo sapien
aatgcatgcaatcttgtagccacca

SEQ ID NO: 4142044 - DNA, 25 bp, Homo sapien
tagagtgctctaggtcgctactgac

SEQ ID NO: 4142045 - DNA, 25 bp, Homo sapien
tatcctcagcagttccatcaagtag

SEQ ID NO: 4142046 - DNA, 25 bp, Homo sapien
aaactccccttgtgccatttgtgga

SEQ ID NO: 4142047 - DNA, 25 bp, Homo sapien
tctgaacactcacccaaagtggaag

SEQ ID NO: 4142048 - DNA, 25 bp, Homo sapien
gggctggcccaaccttttcatattg

SEQ ID NO: 4142049 - DNA, 25 bp, Homo sapien
gaggacttttacagagctacccagc

SEQ ID NO: 4142050 - DNA, 25 bp, Homo sapien
gaaatcggaatccatgtggcctaga

SEQ ID NO: 4142051 - DNA, 25 bp, Homo sapien
caagaccaaggtgcccttcagatcc

SEQ ID NO: 4142052 - DNA, 25 bp, Homo sapien
ccttatcatagtcaatttgggctac

SEQ ID NO: 4142053 - DNA, 25 bp, Homo sapien
tataacagcccaccatagatgaatg

SEQ ID NO: 4142054 - DNA, 25 bp, Homo sapien
cagatccagtgtctactaagggtag

SEQ ID NO: 4142055 - DNA, 25 bp, Homo sapien
catctctgaataggcctgatacttt

SEQ ID NO: 4142056 - DNA, 25 bp, Homo sapien
taggcctgatactttctcaggatct

SEQ ID NO: 4142057 - DNA, 25 bp, Homo sapien
tctgaataggcctgatactttctca

SEQ ID NO: 4142058 - DNA, 25 bp, Homo sapien
ttcctcatctctgaataggcctgat

SEQ ID NO: 4142059 - DNA, 25 bp, Homo sapien
gaactaccttgtcttggaaccctga

SEQ ID NO: 4142060 - DNA, 25 bp, Homo sapien
gaactctatgattcaggtgccacca

SEQ ID NO: 4142061 - DNA, 25 bp, Homo sapien
caagattgcctgttgatgcagtcca

SEQ ID NO: 4142062 - DNA, 25 bp, Homo sapien
catactaggtccagggtgcttcatc

SEQ ID NO: 4142063 - DNA, 25 bp, Homo sapien
tattgcttgggacatatttatactg

SEQ ID NO: 4142064 - DNA, 25 bp, Homo sapien
caaaatattgcttgggacatattta

SEQ ID NO: 4142065 - DNA, 25 bp, Homo sapien
atttatactgtaaaaggtatttgct

SEQ ID NO: 4142066 - DNA, 25 bp, Homo sapien
tatgttcaaaatattgcttgggaca

SEQ ID NO: 4142067 - DNA, 25 bp, Homo sapien
cacaggagagttgtgacacactgca

SEQ ID NO: 4142068 - DNA, 25 bp, Homo sapien
tatcagaggatcttaaagttacacg

SEQ ID NO: 4142069 - DNA, 25 bp, Homo sapien
tgcagaggagcgtataactaggact

SEQ ID NO: 4142070 - DNA, 25 bp, Homo sapien
ttaactcagatgtgacaggtgtcag

SEQ ID NO: 4142071 - DNA, 25 bp, Homo sapien
gaaagatgcccagttttgtgtcctt

SEQ ID NO: 4142072 - DNA, 25 bp, Homo sapien
tgaaagatgcccagttttgtgtcct

SEQ ID NO: 4142073 - DNA, 25 bp, Homo sapien
gtgaaagatgcccagttttgtgtcc

SEQ ID NO: 4142074 - DNA, 25 bp, Homo sapien
ggctctctgtcttgttctgctccat

SEQ ID NO: 4142075 - DNA, 25 bp, Homo sapien
tctgctccatcgtctcccacatcta

SEQ ID NO: 4142076 - DNA, 25 bp, Homo sapien
tacttgttccacttccggccttgtg

SEQ ID NO: 4142077 - DNA, 25 bp, Homo sapien
tctcccacatctagatttattcttc

SEQ ID NO: 4142078 - DNA, 25 bp, Homo sapien
cctgacattgcgtgtttatacttaa

SEQ ID NO: 4142079 - DNA, 25 bp, Homo sapien
aatggtgggaactctgacatcccag

SEQ ID NO: 4142080 - DNA, 25 bp, Homo sapien
tgctatgttcgtccctttcaaacaa

SEQ ID NO: 4142081 - DNA, 25 bp, Homo sapien
tctgagaaagactctcatgaagcaa

SEQ ID NO: 4142082 - DNA, 25 bp, Homo sapien
acccaacaccgctcctcacaccctc

SEQ ID NO: 4142083 - DNA, 25 bp, Homo sapien
acccacacacccaacaccgctcctc

SEQ ID NO: 4142084 - DNA, 25 bp, Homo sapien
acacacccaacaccgctcctcacac

SEQ ID NO: 4142085 - DNA, 25 bp, Homo sapien
caacaccgctcctcacaccctcgca

SEQ ID NO: 4142086 - DNA, 25 bp, Homo sapien
gatattgcaattataggtcttactc

SEQ ID NO: 4142087 - DNA, 25 bp, Homo sapien
atattgcaattataggtcttactca

SEQ ID NO: 4142088 - DNA, 25 bp, Homo sapien
tccagacccagttgattttcaggta

SEQ ID NO: 4142089 - DNA, 25 bp, Homo sapien
agacccagttgattttcaggtacca

SEQ ID NO: 4142090 - DNA, 25 bp, Homo sapien
ttcttccagacccagttgattttca

SEQ ID NO: 4142091 - DNA, 25 bp, Homo sapien
tggttttcttccagacccagttgat

SEQ ID NO: 4142092 - DNA, 25 bp, Homo sapien
gatggcatgataattctccaccagg

SEQ ID NO: 4142093 - DNA, 25 bp, Homo sapien
cgtctgcgaaaggagtatactgtct

SEQ ID NO: 4142094 - DNA, 25 bp, Homo sapien
gatcaaaaattgtctgggaaaatgc

SEQ ID NO: 4142095 - DNA, 25 bp, Homo sapien
gatggatatagatgtgtgagtctcc

SEQ ID NO: 4142096 - DNA, 25 bp, Homo sapien
accgcatgttctcagtcatagatgg

SEQ ID NO: 4142097 - DNA, 25 bp, Homo sapien
caccgcatgttctcagtcatagatg

SEQ ID NO: 4142098 - DNA, 25 bp, Homo sapien
ccgcatgttctcagtcatagatggg

SEQ ID NO: 4142099 - DNA, 25 bp, Homo sapien
tcagggttttaaagtgccaggtaca

SEQ ID NO: 4142100 - DNA, 25 bp, Homo sapien
tgagatattaatcccatcttgatga

SEQ ID NO: 4142101 - DNA, 25 bp, Homo sapien
gaggctcagatattggagtggccac

SEQ ID NO: 4142102 - DNA, 25 bp, Homo sapien
gagtggccactaactggagagaatt

SEQ ID NO: 4142103 - DNA, 25 bp, Homo sapien
ttcacctgtagtagccgttttggat

SEQ ID NO: 4142104 - DNA, 25 bp, Homo sapien
ctgtagtagccgttttggattgttt

SEQ ID NO: 4142105 - DNA, 25 bp, Homo sapien
cacctgtagtagccgttttggattg

SEQ ID NO: 4142106 - DNA, 25 bp, Homo sapien
cctgtagtagccgttttggattgtt

SEQ ID NO: 4142107 - DNA, 25 bp, Homo sapien
gaatcttcggcactgtccaactttt

SEQ ID NO: 4142108 - DNA, 25 bp, Homo sapien
caacttttctgtaggcaatcttaaa

SEQ ID NO: 4142109 - DNA, 25 bp, Homo sapien
cttaaagggttctggtagatacagc

SEQ ID NO: 4142110 - DNA, 25 bp, Homo sapien
tatccccttccttttgaatgagcca

SEQ ID NO: 4142111 - DNA, 25 bp, Homo sapien
aagttggtagacacagctctatgcc

SEQ ID NO: 4142112 - DNA, 25 bp, Homo sapien
tctgcgtgtttgacaggagggcttc

SEQ ID NO: 4142113 - DNA, 25 bp, Homo sapien
tgaaatcccatgtcactatcactgg

SEQ ID NO: 4142114 - DNA, 25 bp, Homo sapien
caatcctagggagaaggctctgcgt

SEQ ID NO: 4142115 - DNA, 25 bp, Homo sapien
aaggaagagatgtcacagataaccg

SEQ ID NO: 4142116 - DNA, 25 bp, Homo sapien
cagataaccgcttggtggttctcct

SEQ ID NO: 4142117 - DNA, 25 bp, Homo sapien
tgtttccctgggttatctcctctgt

SEQ ID NO: 4142118 - DNA, 25 bp, Homo sapien
tcctggcccgaaggagtgtgtttcc

SEQ ID NO: 4142119 - DNA, 25 bp, Homo sapien
ctggaaagtgtggtctcttttttgg

SEQ ID NO: 4142120 - DNA, 25 bp, Homo sapien
gcatttgaagctttcctactgtcaa

SEQ ID NO: 4142121 - DNA, 25 bp, Homo sapien
ggatgttttccatgccacgcttctt

SEQ ID NO: 4142122 - DNA, 25 bp, Homo sapien
tcaaatctgattttcgaaggatgtt

SEQ ID NO: 4142123 - DNA, 25 bp, Homo sapien
atcagtcactgtttctatgaggtca

SEQ ID NO: 4142124 - DNA, 25 bp, Homo sapien
tcagcatgtctttgggccagtagct

SEQ ID NO: 4142125 - DNA, 25 bp, Homo sapien
tcactgtttctatgaggtcatccac

SEQ ID NO: 4142126 - DNA, 25 bp, Homo sapien
gtctttgggccagtagcttcatgga

SEQ ID NO: 4142127 - DNA, 25 bp, Homo sapien
catggttctcttggatatcctctgg

SEQ ID NO: 4142128 - DNA, 25 bp, Homo sapien
ggttctcttggatatcctctggaac

SEQ ID NO: 4142129 - DNA, 25 bp, Homo sapien
aagactgaagaatttcatcccccag

SEQ ID NO: 4142130 - DNA, 25 bp, Homo sapien
gactgaagaatttcatcccccagaa

SEQ ID NO: 4142131 - DNA, 25 bp, Homo sapien
ttaaagaatcaggaacaaagtcaga

SEQ ID NO: 4142132 - DNA, 25 bp, Homo sapien
ttttaaagaatcaggaacaaagtca

SEQ ID NO: 4142133 - DNA, 25 bp, Homo sapien
gaatcaggaacaaagtcagaagcag

SEQ ID NO: 4142134 - DNA, 25 bp, Homo sapien
gaagataacttttaaagaatcagga

SEQ ID NO: 4142135 - DNA, 25 bp, Homo sapien
gacatcaagtgatccactcgctcgg

SEQ ID NO: 4142136 - DNA, 25 bp, Homo sapien
catcaagtgatccactcgctcggcc

SEQ ID NO: 4142137 - DNA, 25 bp, Homo sapien
ccagacatcaagtgatccactcgct

SEQ ID NO: 4142138 - DNA, 25 bp, Homo sapien
agacatcaagtgatccactcgctcg

SEQ ID NO: 4142139 - DNA, 25 bp, Homo sapien
tcccaggaatattgaaatagctaca

SEQ ID NO: 4142140 - DNA, 25 bp, Homo sapien
gaaatagctacatgaccataatgtg

SEQ ID NO: 4142141 - DNA, 25 bp, Homo sapien
taaaatgtggtatgctcttgagata

SEQ ID NO: 4142142 - DNA, 25 bp, Homo sapien
cttaagtggtaggaagcaacatcca

SEQ ID NO: 4142143 - DNA, 25 bp, Homo sapien
tgtctccaggtccttttgtggtcat

SEQ ID NO: 4142144 - DNA, 25 bp, Homo sapien
tttcctgtgttcctcaaggagtctc

SEQ ID NO: 4142145 - DNA, 25 bp, Homo sapien
cttttcctgtgttcctcaaggagtc

SEQ ID NO: 4142146 - DNA, 25 bp, Homo sapien
tcctgtgttcctcaaggagtctcag

SEQ ID NO: 4142147 - DNA, 25 bp, Homo sapien
cctgtgttcctcaaggagtctcagg

SEQ ID NO: 4142148 - DNA, 25 bp, Homo sapien
ccaagccttttatggcatcatgcat

SEQ ID NO: 4142149 - DNA, 25 bp, Homo sapien
ttccctctggtcatatgctggtcac

SEQ ID NO: 4142150 - DNA, 25 bp, Homo sapien
gtatttctgtccagccacattcttc

SEQ ID NO: 4142151 - DNA, 25 bp, Homo sapien
ggtcaccaatgggatgcaacccgta

SEQ ID NO: 4142152 - DNA, 25 bp, Homo sapien
gcagccctttatggtagccacagag

SEQ ID NO: 4142153 - DNA, 25 bp, Homo sapien
ggtagccacagagagtgtaacgcac

SEQ ID NO: 4142154 - DNA, 25 bp, Homo sapien
cagccctttatggtagccacagaga

SEQ ID NO: 4142155 - DNA, 25 bp, Homo sapien
caggcagacatcaatgaatacacgt

SEQ ID NO: 4142156 - DNA, 25 bp, Homo sapien
gatgtgccgaaggtggttgaattac

SEQ ID NO: 4142157 - DNA, 25 bp, Homo sapien
gaaggacttccagctcataggtgga

SEQ ID NO: 4142158 - DNA, 25 bp, Homo sapien
tatattggttcagtacagaaaagca

SEQ ID NO: 4142159 - DNA, 25 bp, Homo sapien
atctgcacaggttgccttttcctgc

SEQ ID NO: 4142160 - DNA, 25 bp, Homo sapien
ggtgacactccacttattcctcaag

SEQ ID NO: 4142161 - DNA, 25 bp, Homo sapien
gctgctgtcacccttaatacgttat

SEQ ID NO: 4142162 - DNA, 25 bp, Homo sapien
caaaaagaacattgagattaggaaa

SEQ ID NO: 4142163 - DNA, 25 bp, Homo sapien
tgcctaaggtcgcacagatagtagt

SEQ ID NO: 4142164 - DNA, 25 bp, Homo sapien
tagtagttatagagggtcaaaggca

SEQ ID NO: 4142165 - DNA, 25 bp, Homo sapien
gagctaagtttcctcgccacttact

SEQ ID NO: 4142166 - DNA, 25 bp, Homo sapien
actattatgcgtcctgtgtctgcta

SEQ ID NO: 4142167 - DNA, 25 bp, Homo sapien
tgaggtatccggagggtgatcagga

SEQ ID NO: 4142168 - DNA, 25 bp, Homo sapien
taaaaggaatagatagggatgaggt

SEQ ID NO: 4142169 - DNA, 25 bp, Homo sapien
aggccttgaactgcgagtggattgt

SEQ ID NO: 4142170 - DNA, 25 bp, Homo sapien
gagtcgatggcaatgaggccttgaa

SEQ ID NO: 4142171 - DNA, 25 bp, Homo sapien
atggcaacacgctcctggtcgcttc

SEQ ID NO: 4142172 - DNA, 25 bp, Homo sapien
tggtcgcttcgcgaactcctccggg

SEQ ID NO: 4142173 - DNA, 25 bp, Homo sapien
tcccgactctgtggtggaattgggt

SEQ ID NO: 4142174 - DNA, 25 bp, Homo sapien
ctccgggaggtcgccaagtttctct

SEQ ID NO: 4142175 - DNA, 25 bp, Homo sapien
gccatttacgagaaagctatcgaag

SEQ ID NO: 4142176 - DNA, 25 bp, Homo sapien
ggtcaaatcagctgcactggtgcct

SEQ ID NO: 4142177 - DNA, 25 bp, Homo sapien
cacacaaggcaacgtttctcattga

SEQ ID NO: 4142178 - DNA, 25 bp, Homo sapien
tgggttcaaaatgagacacgatcct

SEQ ID NO: 4142179 - DNA, 25 bp, Homo sapien
aactgttatccaaaagatacgtagc

SEQ ID NO: 4142180 - DNA, 25 bp, Homo sapien
tatttactgtacatttggaggggga

SEQ ID NO: 4142181 - DNA, 25 bp, Homo sapien
caatacccaaataatctctagtggt

SEQ ID NO: 4142182 - DNA, 25 bp, Homo sapien
tgagtcatgcctcttatactgtatt

SEQ ID NO: 4142183 - DNA, 25 bp, Homo sapien
ctgtatccccggcttcttgagaagc

SEQ ID NO: 4142184 - DNA, 25 bp, Homo sapien
tgtatccccggcttcttgagaagct

SEQ ID NO: 4142185 - DNA, 25 bp, Homo sapien
gtcaacgctgcagtaagccacgatt

SEQ ID NO: 4142186 - DNA, 25 bp, Homo sapien
atccccggcttcttgagaagctgca

SEQ ID NO: 4142187 - DNA, 25 bp, Homo sapien
gagataactaaattgcccagactgg

SEQ ID NO: 4142188 - DNA, 25 bp, Homo sapien
tatgctaataaaatctctggtgacc

SEQ ID NO: 4142189 - DNA, 25 bp, Homo sapien
ctggtgacctcagacttttttaaag

SEQ ID NO: 4142190 - DNA, 25 bp, Homo sapien
gttaatcccatgcaacacacactgg

SEQ ID NO: 4142191 - DNA, 25 bp, Homo sapien
tacaggagctccctagcctatgttg

SEQ ID NO: 4142192 - DNA, 25 bp, Homo sapien
gctggacacacgacacaaactgaga

SEQ ID NO: 4142193 - DNA, 25 bp, Homo sapien
tgttactgccatagcccctgagtgg

SEQ ID NO: 4142194 - DNA, 25 bp, Homo sapien
cagagtgaatctgacccaagaggcc

SEQ ID NO: 4142195 - DNA, 25 bp, Homo sapien
aatttaccaatggatcttcatctgc

SEQ ID NO: 4142196 - DNA, 25 bp, Homo sapien
ggatcttcatctgctgcaattgtga

SEQ ID NO: 4142197 - DNA, 25 bp, Homo sapien
tgcaattgtgaaagctcgttcgtct

SEQ ID NO: 4142198 - DNA, 25 bp, Homo sapien
agctcgttcgtcttaattctgttca

SEQ ID NO: 4142199 - DNA, 25 bp, Homo sapien
aaaaattccagattgacttatcttg

SEQ ID NO: 4142200 - DNA, 25 bp, Homo sapien
aacagttatacaatcaatactgtga

SEQ ID NO: 4142201 - DNA, 25 bp, Homo sapien
acatgagttggagatgaagctggtc

SEQ ID NO: 4142202 - DNA, 25 bp, Homo sapien
agccacagcattcctcataggaaca

SEQ ID NO: 4142203 - DNA, 25 bp, Homo sapien
gcagcaatcacaagcgggcaattag

SEQ ID NO: 4142204 - DNA, 25 bp, Homo sapien
gggttggaatctgacttaccaggta

SEQ ID NO: 4142205 - DNA, 25 bp, Homo sapien
caaaattgctcctggtgagaaatct

SEQ ID NO: 4142206 - DNA, 25 bp, Homo sapien
cacgtctacatcaaggtgttctaag

SEQ ID NO: 4142207 - DNA, 25 bp, Homo sapien
tgagaaaaatgcacaggagtaaaac

SEQ ID NO: 4142208 - DNA, 25 bp, Homo sapien
catggttacttcctgtccttatcaa

SEQ ID NO: 4142209 - DNA, 25 bp, Homo sapien
ccaaacataaggtgggattgctaga

SEQ ID NO: 4142210 - DNA, 25 bp, Homo sapien
tcctggattgcgtgcaaacaagtcc

SEQ ID NO: 4142211 - DNA, 25 bp, Homo sapien
tgcccaggtgtcaggacgaagtacc

SEQ ID NO: 4142212 - DNA, 25 bp, Homo sapien
tgtacatattttagaggcaccaccc

SEQ ID NO: 4142213 - DNA, 25 bp, Homo sapien
gaacttgaattcgtccagcaaagag

SEQ ID NO: 4142214 - DNA, 25 bp, Homo sapien
cgagagaagctttaacccgtgtaca

SEQ ID NO: 4142215 - DNA, 25 bp, Homo sapien
ccagggcgaagtcggaaatgcagcc

SEQ ID NO: 4142216 - DNA, 25 bp, Homo sapien
aatgcagccacctatggaggagccg

SEQ ID NO: 4142217 - DNA, 25 bp, Homo sapien
tccggcgaagtttgcacgtcaagcc

SEQ ID NO: 4142218 - DNA, 25 bp, Homo sapien
ggccggctcccttaagcggagacgc

SEQ ID NO: 4142219 - DNA, 25 bp, Homo sapien
ccccctgacgtcatccgcggcccgc

SEQ ID NO: 4142220 - DNA, 25 bp, Homo sapien
ggctcccccctgacgtcatccgcgg

SEQ ID NO: 4142221 - DNA, 25 bp, Homo sapien
gctcccccctgacgtcatccgcggc

SEQ ID NO: 4142222 - DNA, 25 bp, Homo sapien
cgcggctcccccctgacgtcatccg

SEQ ID NO: 4142223 - DNA, 25 bp, Homo sapien
cgaccgtcgccattgcggcggccga

SEQ ID NO: 4142224 - DNA, 25 bp, Homo sapien
cgccgtcctccggccgtgtgcgccg

SEQ ID NO: 4142225 - DNA, 25 bp, Homo sapien
gtttggaagcctcaacccacagatt

SEQ ID NO: 4142226 - DNA, 25 bp, Homo sapien
acagattccacgactgtcccagcat

SEQ ID NO: 4142227 - DNA, 25 bp, Homo sapien
ctccttgaaactttcgtccaattct

SEQ ID NO: 4142228 - DNA, 25 bp, Homo sapien
gagccccatgacttcgcggtttttc

SEQ ID NO: 4142229 - DNA, 25 bp, Homo sapien
tccttgaaactttcgtccaattctg

SEQ ID NO: 4142230 - DNA, 25 bp, Homo sapien
cagagccccatgacttcgcggtttt

SEQ ID NO: 4142231 - DNA, 25 bp, Homo sapien
ccaggggtttgtacaaactccatca

SEQ ID NO: 4142232 - DNA, 25 bp, Homo sapien
gaactgtcaatgaaacttcccaggg

SEQ ID NO: 4142233 - DNA, 25 bp, Homo sapien
gggagtcggtatggtgggctgatgt

SEQ ID NO: 4142234 - DNA, 25 bp, Homo sapien
agtcggtatggtgggctgatgttcc

SEQ ID NO: 4142235 - DNA, 25 bp, Homo sapien
aaaccaaactttccaagcgctctgc

SEQ ID NO: 4142236 - DNA, 25 bp, Homo sapien
ccaaaccaaactttccaagcgctct

SEQ ID NO: 4142237 - DNA, 25 bp, Homo sapien
ccaaactttccaagcgctctgcccc

SEQ ID NO: 4142238 - DNA, 25 bp, Homo sapien
cctcaggcagcatcttcgcaggcac

SEQ ID NO: 4142239 - DNA, 25 bp, Homo sapien
tggacttcagaagtcctttctgacc

SEQ ID NO: 4142240 - DNA, 25 bp, Homo sapien
gaacccgaagttcactggacttcag

SEQ ID NO: 4142241 - DNA, 25 bp, Homo sapien
cttgaaactgaacccgaagttcact

SEQ ID NO: 4142242 - DNA, 25 bp, Homo sapien
cagaagtcctttctgaccacggtat

SEQ ID NO: 4142243 - DNA, 25 bp, Homo sapien
tatccttgggccatagacaacaatt

SEQ ID NO: 4142244 - DNA, 25 bp, Homo sapien
ctatccttgggccatagacaacaat

SEQ ID NO: 4142245 - DNA, 25 bp, Homo sapien
cgagtgtgatttgccctaagtccaa

SEQ ID NO: 4142246 - DNA, 25 bp, Homo sapien
ccttgatcgagtgtgatttgcccta

SEQ ID NO: 4142247 - DNA, 25 bp, Homo sapien
cataggtgtccttgatcgagtgtga

SEQ ID NO: 4142248 - DNA, 25 bp, Homo sapien
tgtccttgatcgagtgtgatttgcc

SEQ ID NO: 4142249 - DNA, 25 bp, Homo sapien
tccttaggtctcactttatgcataa

SEQ ID NO: 4142250 - DNA, 25 bp, Homo sapien
ctttatgcataaaacccatgtgtac

SEQ ID NO: 4142251 - DNA, 25 bp, Homo sapien
aacccatgtgtacagctgctttctc

SEQ ID NO: 4142252 - DNA, 25 bp, Homo sapien
tgaatgcattttccttaggtctcac

SEQ ID NO: 4142253 - DNA, 25 bp, Homo sapien
tattgacctaggtaaggaaggcagc

SEQ ID NO: 4142254 - DNA, 25 bp, Homo sapien
taaacacatgaagggttaggcacag

SEQ ID NO: 4142255 - DNA, 25 bp, Homo sapien
catggtctagagtaccctgcaaaga

SEQ ID NO: 4142256 - DNA, 25 bp, Homo sapien
cacagactactaggaggactacacg

SEQ ID NO: 4142257 - DNA, 25 bp, Homo sapien
tcccactagactacattccatatct

SEQ ID NO: 4142258 - DNA, 25 bp, Homo sapien
cagtgcctaatggtgcctaacctgg

SEQ ID NO: 4142259 - DNA, 25 bp, Homo sapien
tatcttgttgactgctctggtggca

SEQ ID NO: 4142260 - DNA, 25 bp, Homo sapien
agcagcaatgaatatgtgctaaata

SEQ ID NO: 4142261 - DNA, 25 bp, Homo sapien
ttcgacaagaactagccccaatgcc

SEQ ID NO: 4142262 - DNA, 25 bp, Homo sapien
tacaaatggaaacctcagtagtcct

SEQ ID NO: 4142263 - DNA, 25 bp, Homo sapien
ggacagaacagctcctacagcatag

SEQ ID NO: 4142264 - DNA, 25 bp, Homo sapien
tctacaattcccaccgttcgacaag

SEQ ID NO: 4142265 - DNA, 25 bp, Homo sapien
cggtttgacaacctgattacagtcg

SEQ ID NO: 4142266 - DNA, 25 bp, Homo sapien
cataatgtgattgaaatgcctgcgg

SEQ ID NO: 4142267 - DNA, 25 bp, Homo sapien
tcatcatgggctggacagaaaccaa

SEQ ID NO: 4142268 - DNA, 25 bp, Homo sapien
gtcgttacacaccaccaagtagaaa

SEQ ID NO: 4142269 - DNA, 25 bp, Homo sapien
agtatcttattaggagataccgtgc

SEQ ID NO: 4142270 - DNA, 25 bp, Homo sapien
acaagtatcttattaggagataccg

SEQ ID NO: 4142271 - DNA, 25 bp, Homo sapien
tcttattaggagataccgtgctagg

SEQ ID NO: 4142272 - DNA, 25 bp, Homo sapien
ttattaggagataccgtgctaggga

SEQ ID NO: 4142273 - DNA, 25 bp, Homo sapien
gccacggtagcatgttttcttgtcc

SEQ ID NO: 4142274 - DNA, 25 bp, Homo sapien
atgttttcttgtcctggtagcagtg

SEQ ID NO: 4142275 - DNA, 25 bp, Homo sapien
gacttgctgccacggtagcatgttt

SEQ ID NO: 4142276 - DNA, 25 bp, Homo sapien
tttacaagacttgctgccacggtag

SEQ ID NO: 4142277 - DNA, 25 bp, Homo sapien
caacatcaagaaatcatggtattac

SEQ ID NO: 4142278 - DNA, 25 bp, Homo sapien
ttccaagaaagcaaactatgctgtg

SEQ ID NO: 4142279 - DNA, 25 bp, Homo sapien
aagagaaatatgaggcacactggag

SEQ ID NO: 4142280 - DNA, 25 bp, Homo sapien
gaaatgccaaaatggcagcacaatc

SEQ ID NO: 4142281 - DNA, 25 bp, Homo sapien
cgactgctggagaaagacctggtac

SEQ ID NO: 4142282 - DNA, 25 bp, Homo sapien
gacctggtacaagtcttccaagcaa

SEQ ID NO: 4142283 - DNA, 25 bp, Homo sapien
tgttttggttagctcccatccctgg

SEQ ID NO: 4142284 - DNA, 25 bp, Homo sapien
gctacgagtctcatacaaaaagagg

SEQ ID NO: 4142285 - DNA, 25 bp, Homo sapien
ctaagaatcaagtcgttctgcaacc

SEQ ID NO: 4142286 - DNA, 25 bp, Homo sapien
cttagacgatacagcttctgtgggc

SEQ ID NO: 4142287 - DNA, 25 bp, Homo sapien
ctgccttagacgatacagcttctgt

SEQ ID NO: 4142288 - DNA, 25 bp, Homo sapien
tgccttagacgatacagcttctgtg

SEQ ID NO: 4142289 - DNA, 25 bp, Homo sapien
gccttagacgatacagcttctgtgg

SEQ ID NO: 4142290 - DNA, 25 bp, Homo sapien
tggaagaacggttgcttccacttgc

SEQ ID NO: 4142291 - DNA, 25 bp, Homo sapien
gggaactctactttgctgaatggga

SEQ ID NO: 4142292 - DNA, 25 bp, Homo sapien
cttgatgaggatgcgctaagaacac

SEQ ID NO: 4142293 - DNA, 25 bp, Homo sapien
tgggtgatttcaacaacttggaact

SEQ ID NO: 4142294 - DNA, 25 bp, Homo sapien
tgattaagtctataagcccttctgg

SEQ ID NO: 4142295 - DNA, 25 bp, Homo sapien
gactatttgcagaacccttggagaa

SEQ ID NO: 4142296 - DNA, 25 bp, Homo sapien
ggcaatgggaaactcagacctgata

SEQ ID NO: 4142297 - DNA, 25 bp, Homo sapien
tctggtgaggcaaaaccctcagtgg

SEQ ID NO: 4142298 - DNA, 25 bp, Homo sapien
ggcagttaaggccaggcttgactaa

SEQ ID NO: 4142299 - DNA, 25 bp, Homo sapien
ttggccccaccgcagatttcagtag

SEQ ID NO: 4142300 - DNA, 25 bp, Homo sapien
gcttgactaaggaactcacagtagc

SEQ ID NO: 4142301 - DNA, 25 bp, Homo sapien
caggaagccctttgccattcagaat

SEQ ID NO: 4142302 - DNA, 25 bp, Homo sapien
ccacagtggatgtcaggatcaaact

SEQ ID NO: 4142303 - DNA, 25 bp, Homo sapien
ggcttcttggtgtcgagatcaataa

SEQ ID NO: 4142304 - DNA, 25 bp, Homo sapien
cttgcatgtcaaagaccgggtgcag

SEQ ID NO: 4142305 - DNA, 25 bp, Homo sapien
gtcaaagaccgggtgcagggcttct

SEQ ID NO: 4142306 - DNA, 25 bp, Homo sapien
cagccctgcgctgggttaaggaatg

SEQ ID NO: 4142307 - DNA, 25 bp, Homo sapien
gctgagagtccggatggcgaatcaa

SEQ ID NO: 4142308 - DNA, 25 bp, Homo sapien
cggaaggaatcactccgtgagggtt

SEQ ID NO: 4142309 - DNA, 25 bp, Homo sapien
tggtgcggctcctgtgacgttctag

SEQ ID NO: 4142310 - DNA, 25 bp, Homo sapien
gcctgagatatgtttctcaacagca

SEQ ID NO: 4142311 - DNA, 25 bp, Homo sapien
tgcaagtctcatctctgaaggtggg

SEQ ID NO: 4142312 - DNA, 25 bp, Homo sapien
cagtatctgcaagtctcatctctga

SEQ ID NO: 4142313 - DNA, 25 bp, Homo sapien
caacagcatgaccatactgaaattt

SEQ ID NO: 4142314 - DNA, 25 bp, Homo sapien
gatgcaaaaacttcaatgagaagat

SEQ ID NO: 4142315 - DNA, 25 bp, Homo sapien
tagatgcaaaaacttcaatgagaag

SEQ ID NO: 4142316 - DNA, 25 bp, Homo sapien
ttctagatgcaaaaacttcaatgag

SEQ ID NO: 4142317 - DNA, 25 bp, Homo sapien
atttttctagatgcaaaaacttcaa

SEQ ID NO: 4142318 - DNA, 25 bp, Homo sapien
ggataaccgagaagctggctcagtg

SEQ ID NO: 4142319 - DNA, 25 bp, Homo sapien
ctggataaccgagaagctggctcag

SEQ ID NO: 4142320 - DNA, 25 bp, Homo sapien
agggtgtggagattcatggactgga

SEQ ID NO: 4142321 - DNA, 25 bp, Homo sapien
gggagggtgtggagattcatggact

SEQ ID NO: 4142322 - DNA, 25 bp, Homo sapien
ctcttctttgtcatcgccttcgccc

SEQ ID NO: 4142323 - DNA, 25 bp, Homo sapien
ctttgtcatcgccttcgccctcctc

SEQ ID NO: 4142324 - DNA, 25 bp, Homo sapien
tcttctttgtcatcgccttcgccct

SEQ ID NO: 4142325 - DNA, 25 bp, Homo sapien
ttctttgtcatcgccttcgccctcc

SEQ ID NO: 4142326 - DNA, 25 bp, Homo sapien
tctgagtaccggaggctgtgaagca

SEQ ID NO: 4142327 - DNA, 25 bp, Homo sapien
ctgcaagagaaaacatagccgcgtg

SEQ ID NO: 4142328 - DNA, 25 bp, Homo sapien
aatgcctagccctgagcgtcatgga

SEQ ID NO: 4142329 - DNA, 25 bp, Homo sapien
tggcatgcccagtcagggttctaga

SEQ ID NO: 4142330 - DNA, 25 bp, Homo sapien
tatctgccggctcccaaatgtgcaa

SEQ ID NO: 4142331 - DNA, 25 bp, Homo sapien
cagcgaagtcgattccacctggagt

SEQ ID NO: 4142332 - DNA, 25 bp, Homo sapien
cacctggagtcaaacacgtaatagc

SEQ ID NO: 4142333 - DNA, 25 bp, Homo sapien
accatgaggttgagggcgcagcgaa

SEQ ID NO: 4142334 - DNA, 25 bp, Homo sapien
cataacatcagtctcacaggaaata

SEQ ID NO: 4142335 - DNA, 25 bp, Homo sapien
tgtgtaaagtcagctcctctcccaa

SEQ ID NO: 4142336 - DNA, 25 bp, Homo sapien
gtttagataagcatatcttcataac

SEQ ID NO: 4142337 - DNA, 25 bp, Homo sapien
gtgtaaagtcagctcctctcccaag

SEQ ID NO: 4142338 - DNA, 25 bp, Homo sapien
ttagaggacagtgaatgacactgac

SEQ ID NO: 4142339 - DNA, 25 bp, Homo sapien
aattagaggacagtgaatgacactg

SEQ ID NO: 4142340 - DNA, 25 bp, Homo sapien
tgaaaaaaattagaggacagtgaat

SEQ ID NO: 4142341 - DNA, 25 bp, Homo sapien
aaaattagaggacagtgaatgacac

SEQ ID NO: 4142342 - DNA, 25 bp, Homo sapien
gagctggtaccgatttgctatttgg

SEQ ID NO: 4142343 - DNA, 25 bp, Homo sapien
cacttgtctggattgcatactgcac

SEQ ID NO: 4142344 - DNA, 25 bp, Homo sapien
cacagagtttgtccggtgaggaata

SEQ ID NO: 4142345 - DNA, 25 bp, Homo sapien
caggctgtgcatttagtgtggttcc

SEQ ID NO: 4142346 - DNA, 25 bp, Homo sapien
ttcctgagccgccactggtactgct

SEQ ID NO: 4142347 - DNA, 25 bp, Homo sapien
tgagccgccactggtactgctactg

SEQ ID NO: 4142348 - DNA, 25 bp, Homo sapien
ctgagccgccactggtactgctact

SEQ ID NO: 4142349 - DNA, 25 bp, Homo sapien
ctttcctgagccgccactggtactg

SEQ ID NO: 4142350 - DNA, 25 bp, Homo sapien
gcccagagtgagccacacagttttt

SEQ ID NO: 4142351 - DNA, 25 bp, Homo sapien
gtgagccacacagtttttcctaaaa

SEQ ID NO: 4142352 - DNA, 25 bp, Homo sapien
ctatgggaagatgttaccgttgagg

SEQ ID NO: 4142353 - DNA, 25 bp, Homo sapien
tttcctaaaagactccatggaatga

SEQ ID NO: 4142354 - DNA, 25 bp, Homo sapien
ctttattcgtcacacagttgaggcc

SEQ ID NO: 4142355 - DNA, 25 bp, Homo sapien
tttattcgtcacacagttgaggccg

SEQ ID NO: 4142356 - DNA, 25 bp, Homo sapien
attcgtcacacagttgaggccgatg

SEQ ID NO: 4142357 - DNA, 25 bp, Homo sapien
tattcgtcacacagttgaggccgat

SEQ ID NO: 4142358 - DNA, 25 bp, Homo sapien
ccgtgggagttgacaggcagttcat

SEQ ID NO: 4142359 - DNA, 25 bp, Homo sapien
cctgactggtcatgccggacgttca

SEQ ID NO: 4142360 - DNA, 25 bp, Homo sapien
tgtggacattgttcacggctggcac

SEQ ID NO: 4142361 - DNA, 25 bp, Homo sapien
tcatcagtccttgtgcccctgggat

SEQ ID NO: 4142362 - DNA, 25 bp, Homo sapien
ccatgaagctgaatatctgtttaca

SEQ ID NO: 4142363 - DNA, 25 bp, Homo sapien
agacaccatgaagctgaatatctgt

SEQ ID NO: 4142364 - DNA, 25 bp, Homo sapien
tgaagctgaatatctgtttacaaac

SEQ ID NO: 4142365 - DNA, 25 bp, Homo sapien
caccatgaagctgaatatctgttta

SEQ ID NO: 4142366 - DNA, 25 bp, Homo sapien
attcctgttcgtaagcaaggtgagg

SEQ ID NO: 4142367 - DNA, 25 bp, Homo sapien
ttgctgaaattcctgttcgtaagca

SEQ ID NO: 4142368 - DNA, 25 bp, Homo sapien
gctgaaattcctgttcgtaagcaag

SEQ ID NO: 4142369 - DNA, 25 bp, Homo sapien
gaaattcctgttcgtaagcaaggtg

SEQ ID NO: 4142370 - DNA, 25 bp, Homo sapien
aagggaacaaggtcaagggctagca

SEQ ID NO: 4142371 - DNA, 25 bp, Homo sapien
tgtgacagttcgcactcaaggcagt

SEQ ID NO: 4142372 - DNA, 25 bp, Homo sapien
tcgcactcaaggcagtgcccatgct

SEQ ID NO: 4142373 - DNA, 25 bp, Homo sapien
aaggtcaagggctagcacacacagg

SEQ ID NO: 4142374 - DNA, 25 bp, Homo sapien
gtaagtaagcgtttgtacactgcac

SEQ ID NO: 4142375 - DNA, 25 bp, Homo sapien
aaaggctgcacgctactaaagtctc

SEQ ID NO: 4142376 - DNA, 25 bp, Homo sapien
tctccattgactgagtgacaccagg

SEQ ID NO: 4142377 - DNA, 25 bp, Homo sapien
ccaggaacagtcagctatagatttt

SEQ ID NO: 4142378 - DNA, 25 bp, Homo sapien
aaagtgtccgcattattcctccccg

SEQ ID NO: 4142379 - DNA, 25 bp, Homo sapien
tcaaaggcatcgtggagtccagagt

SEQ ID NO: 4142380 - DNA, 25 bp, Homo sapien
tgctgagtggaggtgtaacttgtcc

SEQ ID NO: 4142381 - DNA, 25 bp, Homo sapien
tattcctccccgtgctattttcagc

SEQ ID NO: 4142382 - DNA, 25 bp, Homo sapien
tagtcccaggacagtatccaaagag

SEQ ID NO: 4142383 - DNA, 25 bp, Homo sapien
aggtttctacccttgaggcccacag

SEQ ID NO: 4142384 - DNA, 25 bp, Homo sapien
aaattactctcaaaaggctgggcta

SEQ ID NO: 4142385 - DNA, 25 bp, Homo sapien
caattcggtggctgaacttgatcca

SEQ ID NO: 4142386 - DNA, 25 bp, Homo sapien
cttggtgtctgctctcgtccccaac

SEQ ID NO: 4142387 - DNA, 25 bp, Homo sapien
gtctgctctcgtccccaaccacatc

SEQ ID NO: 4142388 - DNA, 25 bp, Homo sapien
gtgtctgctctcgtccccaaccaca

SEQ ID NO: 4142389 - DNA, 25 bp, Homo sapien
ttggtgtctgctctcgtccccaacc

SEQ ID NO: 4142390 - DNA, 25 bp, Homo sapien
caatcctatacatgcatcacaaaag

SEQ ID NO: 4142391 - DNA, 25 bp, Homo sapien
tcagggcaatcctatacatgcatca

SEQ ID NO: 4142392 - DNA, 25 bp, Homo sapien
tatacatgcatcacaaaagaccttc

SEQ ID NO: 4142393 - DNA, 25 bp, Homo sapien
gggcaatcctatacatgcatcacaa

SEQ ID NO: 4142394 - DNA, 25 bp, Homo sapien
caggaagatggctggtataatccca

SEQ ID NO: 4142395 - DNA, 25 bp, Homo sapien
tagagggctccaaaactctcaggaa

SEQ ID NO: 4142396 - DNA, 25 bp, Homo sapien
caacagtgcctgttactcgtgtcag

SEQ ID NO: 4142397 - DNA, 25 bp, Homo sapien
gagcctgtagtggtggaagcaccca

SEQ ID NO: 4142398 - DNA, 25 bp, Homo sapien
tcattctacctgttgttgacttgaa

SEQ ID NO: 4142399 - DNA, 25 bp, Homo sapien
ttgttgacttgaaattccctgaaac

SEQ ID NO: 4142400 - DNA, 25 bp, Homo sapien
tgttgttgacttgaaattccctgaa

SEQ ID NO: 4142401 - DNA, 25 bp, Homo sapien
ttgacttgaaattccctgaaactga

SEQ ID NO: 4142402 - DNA, 25 bp, Homo sapien
tcttccccgactgggatggaaacca

SEQ ID NO: 4142403 - DNA, 25 bp, Homo sapien
acttgtcaccaaggaatcaactagg

SEQ ID NO: 4142404 - DNA, 25 bp, Homo sapien
tcaactaggtacgttctgattccct

SEQ ID NO: 4142405 - DNA, 25 bp, Homo sapien
gatgctctgtgtattaccgggagaa

SEQ ID NO: 4142406 - DNA, 25 bp, Homo sapien
gatctgtaacccttggtgccaccag

SEQ ID NO: 4142407 - DNA, 25 bp, Homo sapien
cacatcgtgtaagttgctggctgac

SEQ ID NO: 4142408 - DNA, 25 bp, Homo sapien
catgtagtctatcgggaaaccaggc

SEQ ID NO: 4142409 - DNA, 25 bp, Homo sapien
cttttcacagaacagaggcatccct

SEQ ID NO: 4142410 - DNA, 25 bp, Homo sapien
tgagaagtcctaattttattgcccg

SEQ ID NO: 4142411 - DNA, 25 bp, Homo sapien
cgtacaatatttcatgcagccaacc

SEQ ID NO: 4142412 - DNA, 25 bp, Homo sapien
aagggtttagtatcacaacgaggca

SEQ ID NO: 4142413 - DNA, 25 bp, Homo sapien
gccaaccttatttattgagaagtcc

SEQ ID NO: 4142414 - DNA, 25 bp, Homo sapien
ggatttacctacagagagcacctca

SEQ ID NO: 4142415 - DNA, 25 bp, Homo sapien
cctattcgttgtgggaccttaagca

SEQ ID NO: 4142416 - DNA, 25 bp, Homo sapien
gatcatcttgttatgcagggccggg

SEQ ID NO: 4142417 - DNA, 25 bp, Homo sapien
taagcctgatcccatgtgttcctgg

SEQ ID NO: 4142418 - DNA, 25 bp, Homo sapien
gtgcctcggtcagacaggatgcata

SEQ ID NO: 4142419 - DNA, 25 bp, Homo sapien
gatgggcttcaggtttgtgatatcc

SEQ ID NO: 4142420 - DNA, 25 bp, Homo sapien
tgcataacttcatgtgactcctgga

SEQ ID NO: 4142421 - DNA, 25 bp, Homo sapien
cctggaagcggaatataaaaatgtg

SEQ ID NO: 4142422 - DNA, 25 bp, Homo sapien
atagtcttctccaaggttttgtcct

SEQ ID NO: 4142423 - DNA, 25 bp, Homo sapien
tctctttttactctactgctccttc

SEQ ID NO: 4142424 - DNA, 25 bp, Homo sapien
gctccttctccatttgtcttcatga

SEQ ID NO: 4142425 - DNA, 25 bp, Homo sapien
cttcatgaaaatagtcttctccaag

SEQ ID NO: 4142426 - DNA, 25 bp, Homo sapien
tacctggaaggagattcctaagacc

SEQ ID NO: 4142427 - DNA, 25 bp, Homo sapien
tggacaacctatacaacacccttgg

SEQ ID NO: 4142428 - DNA, 25 bp, Homo sapien
cactttgataactctggcccctgga

SEQ ID NO: 4142429 - DNA, 25 bp, Homo sapien
caatgtcttaagagcacctgcatag

SEQ ID NO: 4142430 - DNA, 25 bp, Homo sapien
taagactaccaacaggtgacaccct

SEQ ID NO: 4142431 - DNA, 25 bp, Homo sapien
caatgatgagcctttaatccaacca

SEQ ID NO: 4142432 - DNA, 25 bp, Homo sapien
tccttagatcccttgaagagaccat

SEQ ID NO: 4142433 - DNA, 25 bp, Homo sapien
ggtgaccagagacctgtgcttttcc

SEQ ID NO: 4142434 - DNA, 25 bp, Homo sapien
taacaaacctgtgcctccacaatgg

SEQ ID NO: 4142435 - DNA, 25 bp, Homo sapien
ggctagaaggatgcctacaacttga

SEQ ID NO: 4142436 - DNA, 25 bp, Homo sapien
gtctcttaggacagaaacagtgtaa

SEQ ID NO: 4142437 - DNA, 25 bp, Homo sapien
catattctgaattagtccttggtgc

SEQ ID NO: 4142438 - DNA, 25 bp, Homo sapien
catggattgtacaggcagctggatt

SEQ ID NO: 4142439 - DNA, 25 bp, Homo sapien
ttcggtggcatggattgtacaggca

SEQ ID NO: 4142440 - DNA, 25 bp, Homo sapien
cttttacgtctcacttacggcattc

SEQ ID NO: 4142441 - DNA, 25 bp, Homo sapien
cacttacggcattcggtggcatgga

SEQ ID NO: 4142442 - DNA, 25 bp, Homo sapien
ttaatatgtaaagccatgtaactaa

SEQ ID NO: 4142443 - DNA, 25 bp, Homo sapien
caaaggatttgctttagagataatt

SEQ ID NO: 4142444 - DNA, 25 bp, Homo sapien
ggagatctgctactaaacagagttc

SEQ ID NO: 4142445 - DNA, 25 bp, Homo sapien
aaaactttccagagtaattaatatg

SEQ ID NO: 4142446 - DNA, 25 bp, Homo sapien
gcacacaccgcagtattccttaagt

SEQ ID NO: 4142447 - DNA, 25 bp, Homo sapien
cctttcaggtagtagttgaattcag

SEQ ID NO: 4142448 - DNA, 25 bp, Homo sapien
cactgagctctagttgttgttacct

SEQ ID NO: 4142449 - DNA, 25 bp, Homo sapien
tcttgatgacaagtgaatgcaaggc

SEQ ID NO: 4142450 - DNA, 25 bp, Homo sapien
ttaagagggctgttcattagggtgc

SEQ ID NO: 4142451 - DNA, 25 bp, Homo sapien
taaatgatccctaccaaaatggaag

SEQ ID NO: 4142452 - DNA, 25 bp, Homo sapien
cagtgcatgagaaaaacggcttggc

SEQ ID NO: 4142453 - DNA, 25 bp, Homo sapien
gtctgatgaccactcttaagagggc

SEQ ID NO: 4142454 - DNA, 25 bp, Homo sapien
cattggttccctcaatcttaacggg

SEQ ID NO: 4142455 - DNA, 25 bp, Homo sapien
ggctttttgcccctcattatcgata

SEQ ID NO: 4142456 - DNA, 25 bp, Homo sapien
gccccttgcattaacagatgggaag

SEQ ID NO: 4142457 - DNA, 25 bp, Homo sapien
tcagctgctggaatcatataggtca

SEQ ID NO: 4142458 - DNA, 25 bp, Homo sapien
tacttaaggcataagaagttctccg

SEQ ID NO: 4142459 - DNA, 25 bp, Homo sapien
atgtcaaatagccacctgttacttg

SEQ ID NO: 4142460 - DNA, 25 bp, Homo sapien
gaagctgagctctgatagtgatgtc

SEQ ID NO: 4142461 - DNA, 25 bp, Homo sapien
acgtgaactttgtcatctatgaaca

SEQ ID NO: 4142462 - DNA, 25 bp, Homo sapien
tagtggccattgatctccatgttgc

SEQ ID NO: 4142463 - DNA, 25 bp, Homo sapien
tcttggttctgcagtaacgtgctct

SEQ ID NO: 4142464 - DNA, 25 bp, Homo sapien
tattagtgagaatacgcaccatctc

SEQ ID NO: 4142465 - DNA, 25 bp, Homo sapien
tatagcatttgagagaacctgtccc

SEQ ID NO: 4142466 - DNA, 25 bp, Homo sapien
ctttaatatctgatcaccagtgtcc

SEQ ID NO: 4142467 - DNA, 25 bp, Homo sapien
aaaccgaagttatatgtacacatgg

SEQ ID NO: 4142468 - DNA, 25 bp, Homo sapien
gagtggctatcgtgtactaacattg

SEQ ID NO: 4142469 - DNA, 25 bp, Homo sapien
tatccagagataagagcatgtaaca

SEQ ID NO: 4142470 - DNA, 25 bp, Homo sapien
gaatcagcttgcatcaagttgaccc

SEQ ID NO: 4142471 - DNA, 25 bp, Homo sapien
gctatttggtttcctaataatgacc

SEQ ID NO: 4142472 - DNA, 25 bp, Homo sapien
tgtttatgctgcaaatttcagaagg

SEQ ID NO: 4142473 - DNA, 25 bp, Homo sapien
ggacggttccaaatgacgattgtta

SEQ ID NO: 4142474 - DNA, 25 bp, Homo sapien
taaacccttgtgtacttatcaccca

SEQ ID NO: 4142475 - DNA, 25 bp, Homo sapien
caattaacagttaatggccatcttg

SEQ ID NO: 4142476 - DNA, 25 bp, Homo sapien
tccaaaacccttcagatgatgttat

SEQ ID NO: 4142477 - DNA, 25 bp, Homo sapien
catattctaatagcgactaagatac

SEQ ID NO: 4142478 - DNA, 25 bp, Homo sapien
cagggggcttgcgtcgccaagcaca

SEQ ID NO: 4142479 - DNA, 25 bp, Homo sapien
gggcttgcgtcgccaagcacaagca

SEQ ID NO: 4142480 - DNA, 25 bp, Homo sapien
tcactcagggggcttgcgtcgccaa

SEQ ID NO: 4142481 - DNA, 25 bp, Homo sapien
ggcttgcgtcgccaagcacaagcat

SEQ ID NO: 4142482 - DNA, 25 bp, Homo sapien
gagagccagtgtagagattttatat

SEQ ID NO: 4142483 - DNA, 25 bp, Homo sapien
ttaaaagagagccagtgtagagatt

SEQ ID NO: 4142484 - DNA, 25 bp, Homo sapien
gcacagccaactgttctagccacag

SEQ ID NO: 4142485 - DNA, 25 bp, Homo sapien
tcaggatgggcaggattaaaagaga

SEQ ID NO: 4142486 - DNA, 25 bp, Homo sapien
gaaggagagctcagaatcaaccaac

SEQ ID NO: 4142487 - DNA, 25 bp, Homo sapien
gattccagactgaaacgctgctgca

SEQ ID NO: 4142488 - DNA, 25 bp, Homo sapien
tcttttgcttggaatgtcacgctgc

SEQ ID NO: 4142489 - DNA, 25 bp, Homo sapien
ccaaattgagcatcctggtatctgc

SEQ ID NO: 4142490 - DNA, 25 bp, Homo sapien
gaatttactccacagtgattgtctt

SEQ ID NO: 4142491 - DNA, 25 bp, Homo sapien
ctaagaggaactgcttgatttaagt

SEQ ID NO: 4142492 - DNA, 25 bp, Homo sapien
atgtatttatgggaataaaggcaga

SEQ ID NO: 4142493 - DNA, 25 bp, Homo sapien
cacaggagccctggaatttactcca

SEQ ID NO: 4142494 - DNA, 25 bp, Homo sapien
gaaattatccgactgtcaagacagg

SEQ ID NO: 4142495 - DNA, 25 bp, Homo sapien
ttctgctttatggaccgggagggtc

SEQ ID NO: 4142496 - DNA, 25 bp, Homo sapien
caaaagccttttggcaattactgag

SEQ ID NO: 4142497 - DNA, 25 bp, Homo sapien
tgagctgccgactgaggtctgctga

SEQ ID NO: 4142498 - DNA, 25 bp, Homo sapien
tctcatagtcaggtactcctggtgc

SEQ ID NO: 4142499 - DNA, 25 bp, Homo sapien
cgtatccgccaagagtaggactcat

SEQ ID NO: 4142500 - DNA, 25 bp, Homo sapien
tctcggtggaagctatgctggtctg

SEQ ID NO: 4142501 - DNA, 25 bp, Homo sapien
aagcatctgttgtctctataactgg

SEQ ID NO: 4142502 - DNA, 25 bp, Homo sapien
catggtatcatcttcaggtcatctc

SEQ ID NO: 4142503 - DNA, 25 bp, Homo sapien
caggtactctcacttcccctgagga

SEQ ID NO: 4142504 - DNA, 25 bp, Homo sapien
ggctgcttgaagcatggtatcatct

SEQ ID NO: 4142505 - DNA, 25 bp, Homo sapien
tacaccgtgtcagatatcctgctcg

SEQ ID NO: 4142506 - DNA, 25 bp, Homo sapien
gagccctctgaatccgagggtttct

SEQ ID NO: 4142507 - DNA, 25 bp, Homo sapien
tctgcccaagtgaacaatggaccac

SEQ ID NO: 4142508 - DNA, 25 bp, Homo sapien
aagagccctctgaatccgagggttt

SEQ ID NO: 4142509 - DNA, 25 bp, Homo sapien
agggtttctgcccaagtgaacaatg

SEQ ID NO: 4142510 - DNA, 25 bp, Homo sapien
cagatatgaaatcttggacttctcc

SEQ ID NO: 4142511 - DNA, 25 bp, Homo sapien
tggcgaggacagtggccattcatgc

SEQ ID NO: 4142512 - DNA, 25 bp, Homo sapien
cataccatccagatttggcgaggac

SEQ ID NO: 4142513 - DNA, 25 bp, Homo sapien
ggcttgaaattaactcaggactccc

SEQ ID NO: 4142514 - DNA, 25 bp, Homo sapien
ctgtgttctgtgttgagtgtcaagc

SEQ ID NO: 4142515 - DNA, 25 bp, Homo sapien
tttcaagtgcataaacaaaacctca

SEQ ID NO: 4142516 - DNA, 25 bp, Homo sapien
tttgttaagaaggtctgcaacaggc

SEQ ID NO: 4142517 - DNA, 25 bp, Homo sapien
gaacactttgcttgagatccgtgcc

SEQ ID NO: 4142518 - DNA, 25 bp, Homo sapien
catgattctgtcatagaccctgact

SEQ ID NO: 4142519 - DNA, 25 bp, Homo sapien
taatagtagcctagtcaacacaaga

SEQ ID NO: 4142520 - DNA, 25 bp, Homo sapien
cctgtgttttgaatacgatgaatcc

SEQ ID NO: 4142521 - DNA, 25 bp, Homo sapien
ggaagtagtcctcaaagtaaagatc

SEQ ID NO: 4142522 - DNA, 25 bp, Homo sapien
gccaattactataggcagtcttcat

SEQ ID NO: 4142523 - DNA, 25 bp, Homo sapien
tctctgccaattactataggcagtc

SEQ ID NO: 4142524 - DNA, 25 bp, Homo sapien
catgttctctgccaattactatagg

SEQ ID NO: 4142525 - DNA, 25 bp, Homo sapien
tgttctctgccaattactataggca

SEQ ID NO: 4142526 - DNA, 25 bp, Homo sapien
aaattgtgcgagtccaatttggagt

SEQ ID NO: 4142527 - DNA, 25 bp, Homo sapien
tgcgagtccaatttggagttttaag

SEQ ID NO: 4142528 - DNA, 25 bp, Homo sapien
aaataatttgcaataccgtgctact

SEQ ID NO: 4142529 - DNA, 25 bp, Homo sapien
ccgtgctactaaagtggcaggtttc

SEQ ID NO: 4142530 - DNA, 25 bp, Homo sapien
tgccaattagagaaaccaaccggtg

SEQ ID NO: 4142531 - DNA, 25 bp, Homo sapien
tgaccaatttatgcgccagcggagc

SEQ ID NO: 4142532 - DNA, 25 bp, Homo sapien
tagtattgaaatgtggcccggtacc

SEQ ID NO: 4142533 - DNA, 25 bp, Homo sapien
gatacgtcacaagcgatgagctgct

SEQ ID NO: 4142534 - DNA, 25 bp, Homo sapien
gagcgcagagtcagttcgcagcctg

SEQ ID NO: 4142535 - DNA, 25 bp, Homo sapien
caaccccattggctacagagacctg

SEQ ID NO: 4142536 - DNA, 25 bp, Homo sapien
tcccacggaaggatgcatcagagct

SEQ ID NO: 4142537 - DNA, 25 bp, Homo sapien
gtccatgcagttccggagcgcagag

SEQ ID NO: 4142538 - DNA, 25 bp, Homo sapien
catacataggatacacagtgggctc

SEQ ID NO: 4142539 - DNA, 25 bp, Homo sapien
aagacacttttgatagggagccacc

SEQ ID NO: 4142540 - DNA, 25 bp, Homo sapien
taatgaccctagatagatgaccagc

SEQ ID NO: 4142541 - DNA, 25 bp, Homo sapien
gctaacagagaagtgaactggccca

SEQ ID NO: 4142542 - DNA, 25 bp, Homo sapien
tgttgtctatgaccaggaatggcaa

SEQ ID NO: 4142543 - DNA, 25 bp, Homo sapien
taatgggccattgcaatccaaaggc

SEQ ID NO: 4142544 - DNA, 25 bp, Homo sapien
aatgctgagactttgccacctggcc

SEQ ID NO: 4142545 - DNA, 25 bp, Homo sapien
cactgctttaggttttgtcacggaa

SEQ ID NO: 4142546 - DNA, 25 bp, Homo sapien
gagcaggttccagtccaggatcagg

SEQ ID NO: 4142547 - DNA, 25 bp, Homo sapien
tgtgaacttactctactgacagcgg

SEQ ID NO: 4142548 - DNA, 25 bp, Homo sapien
gtgtgaagcactctacctccaatgg

SEQ ID NO: 4142549 - DNA, 25 bp, Homo sapien
tacatctcaactggaggcatgcagg

SEQ ID NO: 4142550 - DNA, 25 bp, Homo sapien
aaggcagtacacctcccagcagaat

SEQ ID NO: 4142551 - DNA, 25 bp, Homo sapien
ggtgcctcaggttatcccgagcttt

SEQ ID NO: 4142552 - DNA, 25 bp, Homo sapien
gaggtcacctcctcacggaaatagg

SEQ ID NO: 4142553 - DNA, 25 bp, Homo sapien
aataggaatctgttcacaagcagga

SEQ ID NO: 4142554 - DNA, 25 bp, Homo sapien
catctcaagaggtttacaaatttcc

SEQ ID NO: 4142555 - DNA, 25 bp, Homo sapien
gcccatcttactgatgcatctcaag

SEQ ID NO: 4142556 - DNA, 25 bp, Homo sapien
tccagttctgttcgtagttagaggg

SEQ ID NO: 4142557 - DNA, 25 bp, Homo sapien
tgcttctcaagttggagtgtgacct

SEQ ID NO: 4142558 - DNA, 25 bp, Homo sapien
cctactgaaagggagctaaatcatc

SEQ ID NO: 4142559 - DNA, 25 bp, Homo sapien
ggttcactggccattgcagtttgca

SEQ ID NO: 4142560 - DNA, 25 bp, Homo sapien
taaatgtctggagggcattcacagt

SEQ ID NO: 4142561 - DNA, 25 bp, Homo sapien
tcagggctagcaaacaggagcacag

SEQ ID NO: 4142562 - DNA, 25 bp, Homo sapien
cactctcttttcaagggttctggtt

SEQ ID NO: 4142563 - DNA, 25 bp, Homo sapien
tctggtttaatcagtgcctgctgcc

SEQ ID NO: 4142564 - DNA, 25 bp, Homo sapien
ctggtttaatcagtgcctgctgccc

SEQ ID NO: 4142565 - DNA, 25 bp, Homo sapien
tcacctaatggtcgagatgactcac

SEQ ID NO: 4142566 - DNA, 25 bp, Homo sapien
gccttctgttaacatcatttgggag

SEQ ID NO: 4142567 - DNA, 25 bp, Homo sapien
tgacactagaaaggccaagaagtat

SEQ ID NO: 4142568 - DNA, 25 bp, Homo sapien
catagcctccttgggacaagttggg

SEQ ID NO: 4142569 - DNA, 25 bp, Homo sapien
ggtttgccgagtgccaaagactggc

SEQ ID NO: 4142570 - DNA, 25 bp, Homo sapien
ccccagttgttagggttgaatgagc

SEQ ID NO: 4142571 - DNA, 25 bp, Homo sapien
aattagctgcttggtgctttcccca

SEQ ID NO: 4142572 - DNA, 25 bp, Homo sapien
caaaagtctcgaaacctggagggct

SEQ ID NO: 4142573 - DNA, 25 bp, Homo sapien
caagacctagtccaggaagcatctg

SEQ ID NO: 4142574 - DNA, 25 bp, Homo sapien
agcaagacctagtccaggaagcatc

SEQ ID NO: 4142575 - DNA, 25 bp, Homo sapien
gtaggccaggcttgatagtataact

SEQ ID NO: 4142576 - DNA, 25 bp, Homo sapien
aagcatctggattgttccatttaga

SEQ ID NO: 4142577 - DNA, 25 bp, Homo sapien
cattctttatcactaacagcaagaa

SEQ ID NO: 4142578 - DNA, 25 bp, Homo sapien
tctgcattgacaaaggctgtacctt

SEQ ID NO: 4142579 - DNA, 25 bp, Homo sapien
gcaagaaattgttgtcgacacacaa

SEQ ID NO: 4142580 - DNA, 25 bp, Homo sapien
aattgttgtcgacacacaaaggtga

SEQ ID NO: 4142581 - DNA, 25 bp, Homo sapien
cagccatttgcagagtgttgtcttt

SEQ ID NO: 4142582 - DNA, 25 bp, Homo sapien
gccatttgcagagtgttgtctttat

SEQ ID NO: 4142583 - DNA, 25 bp, Homo sapien
tgtctttatttcattactccatcag

SEQ ID NO: 4142584 - DNA, 25 bp, Homo sapien
tatttcattactccatcagcacatg

SEQ ID NO: 4142585 - DNA, 25 bp, Homo sapien
tttacaagttgcttctcacttaatg

SEQ ID NO: 4142586 - DNA, 25 bp, Homo sapien
acaagttgcttctcacttaatgtat

SEQ ID NO: 4142587 - DNA, 25 bp, Homo sapien
ttacaagttgcttctcacttaatgt

SEQ ID NO: 4142588 - DNA, 25 bp, Homo sapien
tacaagttgcttctcacttaatgta

SEQ ID NO: 4142589 - DNA, 25 bp, Homo sapien
tgaaaaagtggggatcccacgttgc

SEQ ID NO: 4142590 - DNA, 25 bp, Homo sapien
taatatggtcgagtattcagcagag

SEQ ID NO: 4142591 - DNA, 25 bp, Homo sapien
tagttccagcttagaacagttgttg

SEQ ID NO: 4142592 - DNA, 25 bp, Homo sapien
cacgttgcttgagcagatccctgag

SEQ ID NO: 4142593 - DNA, 25 bp, Homo sapien
ctttggaagagtatgcctgggtccc

SEQ ID NO: 4142594 - DNA, 25 bp, Homo sapien
tatcagaacgttcaggcacatctgg

SEQ ID NO: 4142595 - DNA, 25 bp, Homo sapien
tgttctggaacactgctcgcgatgc

SEQ ID NO: 4142596 - DNA, 25 bp, Homo sapien
taaaaacatatatccgactgagggc

SEQ ID NO: 4142597 - DNA, 25 bp, Homo sapien
gcagatgtctcttaattatgcattt

SEQ ID NO: 4142598 - DNA, 25 bp, Homo sapien
gatgtctcttaattatgcatttgtg

SEQ ID NO: 4142599 - DNA, 25 bp, Homo sapien
catttgtgttcataattttccttcc

SEQ ID NO: 4142600 - DNA, 25 bp, Homo sapien
tgcatttgtgttcataattttcctt

SEQ ID NO: 4142601 - DNA, 25 bp, Homo sapien
tgctgctgttttgctgtcttgtgtc

SEQ ID NO: 4142602 - DNA, 25 bp, Homo sapien
tgctgttttgctgtcttgtgtccat

SEQ ID NO: 4142603 - DNA, 25 bp, Homo sapien
gttgctgctgttttgctgtcttgtg

SEQ ID NO: 4142604 - DNA, 25 bp, Homo sapien
gctgctgttttgctgtcttgtgtcc

SEQ ID NO: 4142605 - DNA, 25 bp, Homo sapien
attagtagttcccaaaacctgccat

SEQ ID NO: 4142606 - DNA, 25 bp, Homo sapien
aacctgccattataagtgcagcttt

SEQ ID NO: 4142607 - DNA, 25 bp, Homo sapien
cctgccattataagtgcagctttct

SEQ ID NO: 4142608 - DNA, 25 bp, Homo sapien
acctgccattataagtgcagctttc

SEQ ID NO: 4142609 - DNA, 25 bp, Homo sapien
cagagcatccctgtacagatctttg

SEQ ID NO: 4142610 - DNA, 25 bp, Homo sapien
ttagggaatactgaaaaaccagagc

SEQ ID NO: 4142611 - DNA, 25 bp, Homo sapien
gaacctgagtgttcgtatttaggga

SEQ ID NO: 4142612 - DNA, 25 bp, Homo sapien
caagagaaacgtgtaggaacctgag

SEQ ID NO: 4142613 - DNA, 25 bp, Homo sapien
tcataactaaccaaggatgtagaac

SEQ ID NO: 4142614 - DNA, 25 bp, Homo sapien
ttaacattgaccaaggatggatcat

SEQ ID NO: 4142615 - DNA, 25 bp, Homo sapien
tgaccaaggatggatcatcataact

SEQ ID NO: 4142616 - DNA, 25 bp, Homo sapien
tctggttagtaagagagagaggtta

SEQ ID NO: 4142617 - DNA, 25 bp, Homo sapien
tcacccataggaaggtctgaccaga

SEQ ID NO: 4142618 - DNA, 25 bp, Homo sapien
taaatgatgtctatgtgcaaatggc

SEQ ID NO: 4142619 - DNA, 25 bp, Homo sapien
accatgttgggttgattgaaatgca

SEQ ID NO: 4142620 - DNA, 25 bp, Homo sapien
gtctccagtgtgttccattaaaatg

SEQ ID NO: 4142621 - DNA, 25 bp, Homo sapien
cccccatagcatgtggttgacctga

SEQ ID NO: 4142622 - DNA, 25 bp, Homo sapien
cagtggtgaccaagcttgaactttc

SEQ ID NO: 4142623 - DNA, 25 bp, Homo sapien
gcatagtcagtggtgaccaagcttg

SEQ ID NO: 4142624 - DNA, 25 bp, Homo sapien
cagctggcccccatagcatgtggtt

SEQ ID NO: 4142625 - DNA, 25 bp, Homo sapien
tcttccctgactgccttaaggagag

SEQ ID NO: 4142626 - DNA, 25 bp, Homo sapien
cattgccaaatcagccttttcttcc

SEQ ID NO: 4142627 - DNA, 25 bp, Homo sapien
ccctgactgccttaaggagagacat

SEQ ID NO: 4142628 - DNA, 25 bp, Homo sapien
cccactgccattgccaaatcagcct

SEQ ID NO: 4142629 - DNA, 25 bp, Homo sapien
ctcttgggtcccgttagtgcgttca

SEQ ID NO: 4142630 - DNA, 25 bp, Homo sapien
tcagtgtggtgtactgcagcacttc

SEQ ID NO: 4142631 - DNA, 25 bp, Homo sapien
agcttggcaaagtgataactcttag

SEQ ID NO: 4142632 - DNA, 25 bp, Homo sapien
catgagcttggcaaagtgataactc

SEQ ID NO: 4142633 - DNA, 25 bp, Homo sapien
catgaggtccccatttagacaatcc

SEQ ID NO: 4142634 - DNA, 25 bp, Homo sapien
gacccaagataaggctgattgactg

SEQ ID NO: 4142635 - DNA, 25 bp, Homo sapien
caagggccctttctacctggatgta

SEQ ID NO: 4142636 - DNA, 25 bp, Homo sapien
gttctgaaccaagatgacccaagat

SEQ ID NO: 4142637 - DNA, 25 bp, Homo sapien
taagaggcaactgagggacatgcgt

SEQ ID NO: 4142638 - DNA, 25 bp, Homo sapien
gacatgcgtgctgctttgtgtagct

SEQ ID NO: 4142639 - DNA, 25 bp, Homo sapien
tgaagtacatcaacaatatagaaaa

SEQ ID NO: 4142640 - DNA, 25 bp, Homo sapien
tgaaaagacggtaagaggcaactga

SEQ ID NO: 4142641 - DNA, 25 bp, Homo sapien
caggctaagtggtcttgtgttgggt

SEQ ID NO: 4142642 - DNA, 25 bp, Homo sapien
agagcaggctaagtggtcttgtgtt

SEQ ID NO: 4142643 - DNA, 25 bp, Homo sapien
tgcagagcaggctaagtggtcttgt

SEQ ID NO: 4142644 - DNA, 25 bp, Homo sapien
taagtggtcttgtgttgggtttgcc

SEQ ID NO: 4142645 - DNA, 25 bp, Homo sapien
acaaatctggagtgcctgggcagcc

SEQ ID NO: 4142646 - DNA, 25 bp, Homo sapien
ggattacaaatctggagtgcctggg

SEQ ID NO: 4142647 - DNA, 25 bp, Homo sapien
gttgccaaatgcaccctctcagatg

SEQ ID NO: 4142648 - DNA, 25 bp, Homo sapien
gctggaagagtcaggacttggtgaa

SEQ ID NO: 4142649 - DNA, 25 bp, Homo sapien
gcgccgcagcgtcggagcaatgcaa

SEQ ID NO: 4142650 - DNA, 25 bp, Homo sapien
tgggttccttagctgcggccgctac

SEQ ID NO: 4142651 - DNA, 25 bp, Homo sapien
ctgccttgtgcggagcccctgcagg

SEQ ID NO: 4142652 - DNA, 25 bp, Homo sapien
cttcggctccgggcagttggctgcc

SEQ ID NO: 4142653 - DNA, 25 bp, Homo sapien
tggatccggagctgcgcacagagca

SEQ ID NO: 4142654 - DNA, 25 bp, Homo sapien
ctgagcgattttcctggatccggag

SEQ ID NO: 4142655 - DNA, 25 bp, Homo sapien
attttcctggatccggagctgcgca

SEQ ID NO: 4142656 - DNA, 25 bp, Homo sapien
gcgattttcctggatccggagctgc

SEQ ID NO: 4142657 - DNA, 25 bp, Homo sapien
aagtgttgatagattgggcatagac

SEQ ID NO: 4142658 - DNA, 25 bp, Homo sapien
tatctgttgtccgtttttaccattc

SEQ ID NO: 4142659 - DNA, 25 bp, Homo sapien
atctgttgtccgtttttaccattct

SEQ ID NO: 4142660 - DNA, 25 bp, Homo sapien
ggattctttgtgattggactgggtg

SEQ ID NO: 4142661 - DNA, 25 bp, Homo sapien
tgtttggtctcactggcataactca

SEQ ID NO: 4142662 - DNA, 25 bp, Homo sapien
taacttgtggacctctgtttggtct

SEQ ID NO: 4142663 - DNA, 25 bp, Homo sapien
cttcccaaggccgtagtactctgct

SEQ ID NO: 4142664 - DNA, 25 bp, Homo sapien
gccgtagtactctgcttggtaactt

SEQ ID NO: 4142665 - DNA, 25 bp, Homo sapien
gttgtcgttgtttgtttgtgatttc

SEQ ID NO: 4142666 - DNA, 25 bp, Homo sapien
aatgacttgttttggacctccaggg

SEQ ID NO: 4142667 - DNA, 25 bp, Homo sapien
cgtttttgtatttgtgcatgtgctg

SEQ ID NO: 4142668 - DNA, 25 bp, Homo sapien
tccagggctgccttctagcatggcc

SEQ ID NO: 4142669 - DNA, 25 bp, Homo sapien
tctggaagcatgttgggtggtttgg

SEQ ID NO: 4142670 - DNA, 25 bp, Homo sapien
tggtttggtgcgttgttaagtttca

SEQ ID NO: 4142671 - DNA, 25 bp, Homo sapien
ggctgctagaacctgagttacaaat

SEQ ID NO: 4142672 - DNA, 25 bp, Homo sapien
cgttgttaagtttcaggctgctaga

SEQ ID NO: 4142673 - DNA, 25 bp, Homo sapien
gaaaaagtgcaattcctgttgattt

SEQ ID NO: 4142674 - DNA, 25 bp, Homo sapien
catggcctttactcagagttgagca

SEQ ID NO: 4142675 - DNA, 25 bp, Homo sapien
aagttgagactttgcaatgggatgc

SEQ ID NO: 4142676 - DNA, 25 bp, Homo sapien
aatgtgctccctaatgcgagagtgg

SEQ ID NO: 4142677 - DNA, 25 bp, Homo sapien
aagttatctcctgtagttctagaat

SEQ ID NO: 4142678 - DNA, 25 bp, Homo sapien
gtcccacagtaggaacagggggcat

SEQ ID NO: 4142679 - DNA, 25 bp, Homo sapien
ggaagttatctcctgtagttctaga

SEQ ID NO: 4142680 - DNA, 25 bp, Homo sapien
gaagttatctcctgtagttctagaa

SEQ ID NO: 4142681 - DNA, 25 bp, Homo sapien
tctggtgcttaacaactgtgccaca

SEQ ID NO: 4142682 - DNA, 25 bp, Homo sapien
gcttaacaactgtgccacatgcatt

SEQ ID NO: 4142683 - DNA, 25 bp, Homo sapien
tttttggtctggtgcttaacaactg

SEQ ID NO: 4142684 - DNA, 25 bp, Homo sapien
tggtctggtgcttaacaactgtgcc

SEQ ID NO: 4142685 - DNA, 25 bp, Homo sapien
agtactgttttgtaccccacagcat

SEQ ID NO: 4142686 - DNA, 25 bp, Homo sapien
agcataacaggaatagttatatgct

SEQ ID NO: 4142687 - DNA, 25 bp, Homo sapien
ccacagcataacaggaatagttata

SEQ ID NO: 4142688 - DNA, 25 bp, Homo sapien
cagcataacaggaatagttatatgc

SEQ ID NO: 4142689 - DNA, 25 bp, Homo sapien
actgctgcctaaagctgtggctatg

SEQ ID NO: 4142690 - DNA, 25 bp, Homo sapien
ttctcattagaaattcaccagcttg

SEQ ID NO: 4142691 - DNA, 25 bp, Homo sapien
ctcattagaaattcaccagcttggt

SEQ ID NO: 4142692 - DNA, 25 bp, Homo sapien
tcactgctgcctaaagctgtggcta

SEQ ID NO: 4142693 - DNA, 25 bp, Homo sapien
agctggaaaggtccccttgatttgt

SEQ ID NO: 4142694 - DNA, 25 bp, Homo sapien
tagctggaaaggtccccttgatttg

SEQ ID NO: 4142695 - DNA, 25 bp, Homo sapien
catagctggaaaggtccccttgatt

SEQ ID NO: 4142696 - DNA, 25 bp, Homo sapien
aggtccccttgatttgtttagtgat

SEQ ID NO: 4142697 - DNA, 25 bp, Homo sapien
agcagtgttgttctgacctccacag

SEQ ID NO: 4142698 - DNA, 25 bp, Homo sapien
cagactgcaaaataccagcggtttg

SEQ ID NO: 4142699 - DNA, 25 bp, Homo sapien
atgaggtaaataatcgacgggcggt

SEQ ID NO: 4142700 - DNA, 25 bp, Homo sapien
tcttagcgggtaaatcaggcagcag

SEQ ID NO: 4142701 - DNA, 25 bp, Homo sapien
cttgaagcagaagacatcaggttct

SEQ ID NO: 4142702 - DNA, 25 bp, Homo sapien
gaagcagaagacatcaggttctcta

SEQ ID NO: 4142703 - DNA, 25 bp, Homo sapien
cttaactcttgaagcagaagacatc

SEQ ID NO: 4142704 - DNA, 25 bp, Homo sapien
agcagaagacatcaggttctctaat

SEQ ID NO: 4142705 - DNA, 25 bp, Homo sapien
catttaattcataagagccatggaa

SEQ ID NO: 4142706 - DNA, 25 bp, Homo sapien
taattcataagagccatggaagttt

SEQ ID NO: 4142707 - DNA, 25 bp, Homo sapien
ttcataagagccatggaagtttaga

SEQ ID NO: 4142708 - DNA, 25 bp, Homo sapien
cttcatttaattcataagagccatg

SEQ ID NO: 4142709 - DNA, 25 bp, Homo sapien
ctggcagagccaagaaagaacaggc

SEQ ID NO: 4142710 - DNA, 25 bp, Homo sapien
agaacaggctgagatgcagttggtt

SEQ ID NO: 4142711 - DNA, 25 bp, Homo sapien
tggcagagccaagaaagaacaggct

SEQ ID NO: 4142712 - DNA, 25 bp, Homo sapien
caagaaagaacaggctgagatgcag

SEQ ID NO: 4142713 - DNA, 25 bp, Homo sapien
ggtcctcctgtccaaacagagccag

SEQ ID NO: 4142714 - DNA, 25 bp, Homo sapien
ccagcagtctgtgggtggtcccagg

SEQ ID NO: 4142715 - DNA, 25 bp, Homo sapien
ctctttgcagttgggtcctcctgtc

SEQ ID NO: 4142716 - DNA, 25 bp, Homo sapien
agcagtctgtgggtggtcccaggca

SEQ ID NO: 4142717 - DNA, 25 bp, Homo sapien
acattcatccgagagtaagtccaag

SEQ ID NO: 4142718 - DNA, 25 bp, Homo sapien
aaggcagtctgtggcaacacgttcc

SEQ ID NO: 4142719 - DNA, 25 bp, Homo sapien
agtccaagctaaggatacaaaaggc

SEQ ID NO: 4142720 - DNA, 25 bp, Homo sapien
gagtaagtccaagctaaggatacaa

SEQ ID NO: 4142721 - DNA, 25 bp, Homo sapien
ccatttcatgttcccgtcctcgttt

SEQ ID NO: 4142722 - DNA, 25 bp, Homo sapien
aatttgtggcccatacgtcttcttg

SEQ ID NO: 4142723 - DNA, 25 bp, Homo sapien
cgtcttcttggtatgcaatttagcc

SEQ ID NO: 4142724 - DNA, 25 bp, Homo sapien
tccttataagctgccttaaattctc

SEQ ID NO: 4142725 - DNA, 25 bp, Homo sapien
taattttcccagagcacttggactg

SEQ ID NO: 4142726 - DNA, 25 bp, Homo sapien
aattttcccagagcacttggactga

SEQ ID NO: 4142727 - DNA, 25 bp, Homo sapien
cccagagcacttggactgattttac

SEQ ID NO: 4142728 - DNA, 25 bp, Homo sapien
tttcccagagcacttggactgattt

SEQ ID NO: 4142729 - DNA, 25 bp, Homo sapien
gaatatccactagcagtcgaggagg

SEQ ID NO: 4142730 - DNA, 25 bp, Homo sapien
tctatagaagacaactcctgggaat

SEQ ID NO: 4142731 - DNA, 25 bp, Homo sapien
tagttcttagtttcactccagatgc

SEQ ID NO: 4142732 - DNA, 25 bp, Homo sapien
tcctgtaggatgagtgagagaacga

SEQ ID NO: 4142733 - DNA, 25 bp, Homo sapien
cattggctttgaacattggatgtcc

SEQ ID NO: 4142734 - DNA, 25 bp, Homo sapien
gctttgaacattggatgtccatcca

SEQ ID NO: 4142735 - DNA, 25 bp, Homo sapien
ccccacaaccattggctttgaacat

SEQ ID NO: 4142736 - DNA, 25 bp, Homo sapien
caaccattggctttgaacattggat

SEQ ID NO: 4142737 - DNA, 25 bp, Homo sapien
gactctgggtactaagggatgagaa

SEQ ID NO: 4142738 - DNA, 25 bp, Homo sapien
tgagtttccgtcaccttctgagccc

SEQ ID NO: 4142739 - DNA, 25 bp, Homo sapien
cagattacgggaagtgatggatgct

SEQ ID NO: 4142740 - DNA, 25 bp, Homo sapien
tgacttatagaattgacaggcggct

SEQ ID NO: 4142741 - DNA, 25 bp, Homo sapien
tctcttttgttctctcatcaaccat

SEQ ID NO: 4142742 - DNA, 25 bp, Homo sapien
tcttctcttttgttctctcatcaac

SEQ ID NO: 4142743 - DNA, 25 bp, Homo sapien
catcttctcttttgttctctcatca

SEQ ID NO: 4142744 - DNA, 25 bp, Homo sapien
ttctcttttgttctctcatcaacca

SEQ ID NO: 4142745 - DNA, 25 bp, Homo sapien
aagagcctggaccaacttcggtatc

SEQ ID NO: 4142746 - DNA, 25 bp, Homo sapien
ctcccaaaatcccatgggccaaaag

SEQ ID NO: 4142747 - DNA, 25 bp, Homo sapien
gcacttccctaacagtaaatgggaa

SEQ ID NO: 4142748 - DNA, 25 bp, Homo sapien
cagaacaagggagccatcatgcagg

SEQ ID NO: 4142749 - DNA, 25 bp, Homo sapien
caggcaactagaccaagggcagtca

SEQ ID NO: 4142750 - DNA, 25 bp, Homo sapien
tgaacccaagtgagaaacagctaga

SEQ ID NO: 4142751 - DNA, 25 bp, Homo sapien
cagtctacttggaagaagagccctc

SEQ ID NO: 4142752 - DNA, 25 bp, Homo sapien
tcagatgtagtgcttatggtgatgc

SEQ ID NO: 4142753 - DNA, 25 bp, Homo sapien
gaactaattgtgacattcatcctag

SEQ ID NO: 4142754 - DNA, 25 bp, Homo sapien
tctcacacatggaactaattgtgac

SEQ ID NO: 4142755 - DNA, 25 bp, Homo sapien
taattgtgacattcatcctagagcc

SEQ ID NO: 4142756 - DNA, 25 bp, Homo sapien
gacattcatcctagagcccagtttc

SEQ ID NO: 4142757 - DNA, 25 bp, Homo sapien
aagagagagacgtaagttggagcct

SEQ ID NO: 4142758 - DNA, 25 bp, Homo sapien
cctaaggacaagctctaagaaagga

SEQ ID NO: 4142759 - DNA, 25 bp, Homo sapien
gggtgaggtgccaagataaagggtc

SEQ ID NO: 4142760 - DNA, 25 bp, Homo sapien
ggcagaagttgagaaacacaggttc

SEQ ID NO: 4142761 - DNA, 25 bp, Homo sapien
aatagggacttattgccagtgttct

SEQ ID NO: 4142762 - DNA, 25 bp, Homo sapien
cagaacccagataatagggacttat

SEQ ID NO: 4142763 - DNA, 25 bp, Homo sapien
acccagataatagggacttattgcc

SEQ ID NO: 4142764 - DNA, 25 bp, Homo sapien
gataatagggacttattgccagtgt

SEQ ID NO: 4142765 - DNA, 25 bp, Homo sapien
gcgctgcgagcaggaggcgtccggc

SEQ ID NO: 4142766 - DNA, 25 bp, Homo sapien
accgacggacggcgctgcgagcagg

SEQ ID NO: 4142767 - DNA, 25 bp, Homo sapien
ctgcgagcaggaggcgtccggccat

SEQ ID NO: 4142768 - DNA, 25 bp, Homo sapien
ggacggcgctgcgagcaggaggcgt

SEQ ID NO: 4142769 - DNA, 25 bp, Homo sapien
gataagccggcatgtggcctgaacc

SEQ ID NO: 4142770 - DNA, 25 bp, Homo sapien
cagacttactacgtttgacagctaa

SEQ ID NO: 4142771 - DNA, 25 bp, Homo sapien
ggcatgtggcctgaacctctcagac

SEQ ID NO: 4142772 - DNA, 25 bp, Homo sapien
gtagaaacatcaatgataagccggc

SEQ ID NO: 4142773 - DNA, 25 bp, Homo sapien
cagcatacgtgtcggggaagtcaca

SEQ ID NO: 4142774 - DNA, 25 bp, Homo sapien
cgtgtcggggaagtcacacagcttc

SEQ ID NO: 4142775 - DNA, 25 bp, Homo sapien
tacgtgtcggggaagtcacacagct

SEQ ID NO: 4142776 - DNA, 25 bp, Homo sapien
catacgtgtcggggaagtcacacag

SEQ ID NO: 4142777 - DNA, 25 bp, Homo sapien
ccaaaatatgctgttacctcagacc

SEQ ID NO: 4142778 - DNA, 25 bp, Homo sapien
gctgttacctcagacccatgctggt

SEQ ID NO: 4142779 - DNA, 25 bp, Homo sapien
catgctggtccttcaaatgcatttt

SEQ ID NO: 4142780 - DNA, 25 bp, Homo sapien
actgggtgcacccagaaggtgcaca

SEQ ID NO: 4142781 - DNA, 25 bp, Homo sapien
gcaggtcggattcagacaatccggt

SEQ ID NO: 4142782 - DNA, 25 bp, Homo sapien
tcttgtctgcaggtcggattcagac

SEQ ID NO: 4142783 - DNA, 25 bp, Homo sapien
cggattcagacaatccggtggagca

SEQ ID NO: 4142784 - DNA, 25 bp, Homo sapien
tcttttcttgtctgcaggtcggatt

SEQ ID NO: 4142785 - DNA, 25 bp, Homo sapien
tagttccctccctctgataatgtct

SEQ ID NO: 4142786 - DNA, 25 bp, Homo sapien
ccagtgacttatagtgaattatgcc

SEQ ID NO: 4142787 - DNA, 25 bp, Homo sapien
taatgtctatggctaagttcttccc

SEQ ID NO: 4142788 - DNA, 25 bp, Homo sapien
taaacaatactgcttcatgcaccag

SEQ ID NO: 4142789 - DNA, 25 bp, Homo sapien
caaaggagagcccatgaaatgtcta

SEQ ID NO: 4142790 - DNA, 25 bp, Homo sapien
gagagcccatgaaatgtctaacaaa

SEQ ID NO: 4142791 - DNA, 25 bp, Homo sapien
ctttcttccgttctacctgggcctg

SEQ ID NO: 4142792 - DNA, 25 bp, Homo sapien
tttctttttgcccaacatcctgatt

SEQ ID NO: 4142793 - DNA, 25 bp, Homo sapien
tattgggaccatgcttggaacgtcc

SEQ ID NO: 4142794 - DNA, 25 bp, Homo sapien
ttgggaggttattgggaccatgctt

SEQ ID NO: 4142795 - DNA, 25 bp, Homo sapien
atgaacgtgggccactccaaaccca

SEQ ID NO: 4142796 - DNA, 25 bp, Homo sapien
tgcttggaacgtcccatgaacgtgg

SEQ ID NO: 4142797 - DNA, 25 bp, Homo sapien
accatccccatcctttgaatgccaa

SEQ ID NO: 4142798 - DNA, 25 bp, Homo sapien
cactcttgcggtactacacaccatc

SEQ ID NO: 4142799 - DNA, 25 bp, Homo sapien
actcttgcggtactacacaccatcc

SEQ ID NO: 4142800 - DNA, 25 bp, Homo sapien
ttgaatgccaaacctcttcatcgag

SEQ ID NO: 4142801 - DNA, 25 bp, Homo sapien
ggcatttttgatgggcattgctttg

SEQ ID NO: 4142802 - DNA, 25 bp, Homo sapien
ggcaactcatccttcggcagggcat

SEQ ID NO: 4142803 - DNA, 25 bp, Homo sapien
tttgggaaagggcaagattctgcct

SEQ ID NO: 4142804 - DNA, 25 bp, Homo sapien
cacttggctccaagatattcatggg

SEQ ID NO: 4142805 - DNA, 25 bp, Homo sapien
aacaagcagatttggcaatcaagtc

SEQ ID NO: 4142806 - DNA, 25 bp, Homo sapien
agcagatttggcaatcaagtccaaa

SEQ ID NO: 4142807 - DNA, 25 bp, Homo sapien
acacctgaagggcaagatttgaggg

SEQ ID NO: 4142808 - DNA, 25 bp, Homo sapien
aaaaacacctgaagggcaagatttg

SEQ ID NO: 4142809 - DNA, 25 bp, Homo sapien
taatagagccactgaggtgtggagt

SEQ ID NO: 4142810 - DNA, 25 bp, Homo sapien
tgaggtgtggagtttcctgttttac

SEQ ID NO: 4142811 - DNA, 25 bp, Homo sapien
tcagaactctagacaacccggggat

SEQ ID NO: 4142812 - DNA, 25 bp, Homo sapien
cccagagcatctttgtaggagaaat

SEQ ID NO: 4142813 - DNA, 25 bp, Homo sapien
ctggctctgacccagttaagaccaa

SEQ ID NO: 4142814 - DNA, 25 bp, Homo sapien
tcctgttctggccacagggcggaca

SEQ ID NO: 4142815 - DNA, 25 bp, Homo sapien
ccagttaagaccaagcccctctcct

SEQ ID NO: 4142816 - DNA, 25 bp, Homo sapien
cctgttctggccacagggcggacat

SEQ ID NO: 4142817 - DNA, 25 bp, Homo sapien
tgaatttaagatcaaggtggccctt

SEQ ID NO: 4142818 - DNA, 25 bp, Homo sapien
aatttaagatcaaggtggcccttct

SEQ ID NO: 4142819 - DNA, 25 bp, Homo sapien
gaatttaagatcaaggtggcccttc

SEQ ID NO: 4142820 - DNA, 25 bp, Homo sapien
gacctctactcatgcaattctgcct

SEQ ID NO: 4142821 - DNA, 25 bp, Homo sapien
gaggttgacaccctgtgctctcaga

SEQ ID NO: 4142822 - DNA, 25 bp, Homo sapien
ttgtgaaacgttacactctgcttcc

SEQ ID NO: 4142823 - DNA, 25 bp, Homo sapien
gcaagggaggctttgtgaaacgtta

SEQ ID NO: 4142824 - DNA, 25 bp, Homo sapien
ggaggagaccacgtgacccaggtca

SEQ ID NO: 4142825 - DNA, 25 bp, Homo sapien
tattcaatatctgccaggcgggcaa

SEQ ID NO: 4142826 - DNA, 25 bp, Homo sapien
ggcaaccgttccaagacactgcttt

SEQ ID NO: 4142827 - DNA, 25 bp, Homo sapien
aactctgtgccccaaagtcgtgaac

SEQ ID NO: 4142828 - DNA, 25 bp, Homo sapien
aatgtgcttactgtcttttaggttc

SEQ ID NO: 4142829 - DNA, 25 bp, Homo sapien
tgaatgtgcttactgtcttttaggt

SEQ ID NO: 4142830 - DNA, 25 bp, Homo sapien
aaactgaatgtgcttactgtctttt

SEQ ID NO: 4142831 - DNA, 25 bp, Homo sapien
actgaatgtgcttactgtcttttag

SEQ ID NO: 4142832 - DNA, 25 bp, Homo sapien
aatagccttgtctgaggtttcaagc

SEQ ID NO: 4142833 - DNA, 25 bp, Homo sapien
aaaaagtccttgatcactgctttga

SEQ ID NO: 4142834 - DNA, 25 bp, Homo sapien
ggtttcaagcagagggtctggaaca

SEQ ID NO: 4142835 - DNA, 25 bp, Homo sapien
cagggaagtggctggtctttacttt

SEQ ID NO: 4142836 - DNA, 25 bp, Homo sapien
ttggcagcatctttgagtaagaaca

SEQ ID NO: 4142837 - DNA, 25 bp, Homo sapien
cattggcagcatctttgagtaagaa

SEQ ID NO: 4142838 - DNA, 25 bp, Homo sapien
attggcagcatctttgagtaagaac

SEQ ID NO: 4142839 - DNA, 25 bp, Homo sapien
tggcagcatctttgagtaagaacat

SEQ ID NO: 4142840 - DNA, 25 bp, Homo sapien
gaataaaagttgtgtgctcgtaata

SEQ ID NO: 4142841 - DNA, 25 bp, Homo sapien
cactcttggcatgaataaaagttgt

SEQ ID NO: 4142842 - DNA, 25 bp, Homo sapien
ctcgtaatacctattgtagagccag

SEQ ID NO: 4142843 - DNA, 25 bp, Homo sapien
gttgtgtgctcgtaatacctattgt

SEQ ID NO: 4142844 - DNA, 25 bp, Homo sapien
cttccctgtacaactccagttttag

SEQ ID NO: 4142845 - DNA, 25 bp, Homo sapien
ccaatatatgaagagcagttatctc

SEQ ID NO: 4142846 - DNA, 25 bp, Homo sapien
attttatatagcacgtatatacaat

SEQ ID NO: 4142847 - DNA, 25 bp, Homo sapien
ataccaatatatgaagagcagttat

SEQ ID NO: 4142848 - DNA, 25 bp, Homo sapien
caatatatgaagagcagttatctca

SEQ ID NO: 4142849 - DNA, 25 bp, Homo sapien
cagatgtagtgccttgtgcccataa

SEQ ID NO: 4142850 - DNA, 25 bp, Homo sapien
tccagagaagcatgtcctagcaatg

SEQ ID NO: 4142851 - DNA, 25 bp, Homo sapien
taagcattagcatgtgaggtgggac

SEQ ID NO: 4142852 - DNA, 25 bp, Homo sapien
gggcctgtcgagtactcctcatgaa

SEQ ID NO: 4142853 - DNA, 25 bp, Homo sapien
catgtgggctgtcagatcggaacac

SEQ ID NO: 4142854 - DNA, 25 bp, Homo sapien
tcgcgcattcgctccaacaagggtg

SEQ ID NO: 4142855 - DNA, 25 bp, Homo sapien
caaaatagccagagagaccgagtgc

SEQ ID NO: 4142856 - DNA, 25 bp, Homo sapien
taaagccagagaagtcaccgagcac

SEQ ID NO: 4142857 - DNA, 25 bp, Homo sapien
tacattaacttgagggattcctcca

SEQ ID NO: 4142858 - DNA, 25 bp, Homo sapien
gacacaaattctttagtgaattctg

SEQ ID NO: 4142859 - DNA, 25 bp, Homo sapien
tcatggcagcactatttccaggttg

SEQ ID NO: 4142860 - DNA, 25 bp, Homo sapien
gccttatctccatgaataggagcaa

SEQ ID NO: 4142861 - DNA, 25 bp, Homo sapien
tctatagatagggtcatcacttgtg

SEQ ID NO: 4142862 - DNA, 25 bp, Homo sapien
tgtgggtcacaaactcattcaatcc

SEQ ID NO: 4142863 - DNA, 25 bp, Homo sapien
caattgagcccaaacaatagtagct

SEQ ID NO: 4142864 - DNA, 25 bp, Homo sapien
tacacccaggacataatgactttaa

SEQ ID NO: 4142865 - DNA, 25 bp, Homo sapien
tattcccatgatacaaaaagcgttt

SEQ ID NO: 4142866 - DNA, 25 bp, Homo sapien
ggaatgcctatgaacttttacgaca

SEQ ID NO: 4142867 - DNA, 25 bp, Homo sapien
tcaggatgggcttcacaaactatgc

SEQ ID NO: 4142868 - DNA, 25 bp, Homo sapien
cagattagaatgaaggtaacacacc

SEQ ID NO: 4142869 - DNA, 25 bp, Homo sapien
tctcttgtggtcgagggcataaaca

SEQ ID NO: 4142870 - DNA, 25 bp, Homo sapien
tgagatattatccaaactggcgctg

SEQ ID NO: 4142871 - DNA, 25 bp, Homo sapien
caaaaatgccacacaggattgctgc

SEQ ID NO: 4142872 - DNA, 25 bp, Homo sapien
ggaaatgcacctttatcccagtcag

SEQ ID NO: 4142873 - DNA, 25 bp, Homo sapien
tgcagatcaaagttgaaaggtaatg

SEQ ID NO: 4142874 - DNA, 25 bp, Homo sapien
aattggcacagacttacctgctagc

SEQ ID NO: 4142875 - DNA, 25 bp, Homo sapien
caaagttgaaaggtaatgcctccct

SEQ ID NO: 4142876 - DNA, 25 bp, Homo sapien
ggcacagacttacctgctagcttac

SEQ ID NO: 4142877 - DNA, 25 bp, Homo sapien
tcagcttccctcactggtctgtaag

SEQ ID NO: 4142878 - DNA, 25 bp, Homo sapien
caggaagtacctcagtgagccctct

SEQ ID NO: 4142879 - DNA, 25 bp, Homo sapien
aatttctggaacattgtaggtgctc

SEQ ID NO: 4142880 - DNA, 25 bp, Homo sapien
tagctttgctgcctgaccccaggaa

SEQ ID NO: 4142881 - DNA, 25 bp, Homo sapien
tcttgagagagagccctcgatagag

SEQ ID NO: 4142882 - DNA, 25 bp, Homo sapien
tattcgtctgcaccatatccagtgc

SEQ ID NO: 4142883 - DNA, 25 bp, Homo sapien
gggcatccctaaaaccagagacagc

SEQ ID NO: 4142884 - DNA, 25 bp, Homo sapien
cacgttcctctgtataagtgaaagg

SEQ ID NO: 4142885 - DNA, 25 bp, Homo sapien
ggtaataagtgccagggtggtccca

SEQ ID NO: 4142886 - DNA, 25 bp, Homo sapien
ctgccaatctcaggcgctctcagct

SEQ ID NO: 4142887 - DNA, 25 bp, Homo sapien
tgtcaacactggctttacgccctga

SEQ ID NO: 4142888 - DNA, 25 bp, Homo sapien
ccagacataaacagccatcaggcag

SEQ ID NO: 4142889 - DNA, 25 bp, Homo sapien
gcaaaggctggagtgttggggggca

SEQ ID NO: 4142890 - DNA, 25 bp, Homo sapien
tgggaggatggcctaatgccccatc

SEQ ID NO: 4142891 - DNA, 25 bp, Homo sapien
atgggaggatggcctaatgccccat

SEQ ID NO: 4142892 - DNA, 25 bp, Homo sapien
taatgccccatccggctgggatgac

SEQ ID NO: 4142893 - DNA, 25 bp, Homo sapien
gatatagccacgatagaattcacca

SEQ ID NO: 4142894 - DNA, 25 bp, Homo sapien
cagttccccagggtactcctggata

SEQ ID NO: 4142895 - DNA, 25 bp, Homo sapien
caccaggtgctacatttgcagattt

SEQ ID NO: 4142896 - DNA, 25 bp, Homo sapien
aattcaccaggtgctacatttgcag

SEQ ID NO: 4142897 - DNA, 25 bp, Homo sapien
caacctcccgatagagcaatgctaa

SEQ ID NO: 4142898 - DNA, 25 bp, Homo sapien
aatgacctttatccctgctgctgag

SEQ ID NO: 4142899 - DNA, 25 bp, Homo sapien
gatagtctacctgacatgctggcct

SEQ ID NO: 4142900 - DNA, 25 bp, Homo sapien
tacaggctcagacacgtatgcaaat

SEQ ID NO: 4142901 - DNA, 25 bp, Homo sapien
tattgtaaatgtgtgcagatgtgcc

SEQ ID NO: 4142902 - DNA, 25 bp, Homo sapien
cagagcttcccatatcagtgataga

SEQ ID NO: 4142903 - DNA, 25 bp, Homo sapien
gattggtcagacttgagcatcagag

SEQ ID NO: 4142904 - DNA, 25 bp, Homo sapien
tcagcagtatctagggattggtcag

SEQ ID NO: 4142905 - DNA, 25 bp, Homo sapien
gcctcattcaaaagcgaaagctgaa

SEQ ID NO: 4142906 - DNA, 25 bp, Homo sapien
tgcaagtcccgcagctatctgaaag

SEQ ID NO: 4142907 - DNA, 25 bp, Homo sapien
aatgtaggtgagattccagggagcc

SEQ ID NO: 4142908 - DNA, 25 bp, Homo sapien
cagtcaaatcgaagaaaggttttca

SEQ ID NO: 4142909 - DNA, 25 bp, Homo sapien
gcttaatagtctacaatgcacagca

SEQ ID NO: 4142910 - DNA, 25 bp, Homo sapien
ttacaatggggatgcaggtgctatg

SEQ ID NO: 4142911 - DNA, 25 bp, Homo sapien
atgcaggtgctatgggcatctagtg

SEQ ID NO: 4142912 - DNA, 25 bp, Homo sapien
atagtctacaatgcacagcacaacc

SEQ ID NO: 4142913 - DNA, 25 bp, Homo sapien
gctaccatatcggacagggcaacct

SEQ ID NO: 4142914 - DNA, 25 bp, Homo sapien
tgaaaagatggcctatcagaaccag

SEQ ID NO: 4142915 - DNA, 25 bp, Homo sapien
gagttcaagttcatcgtggccataa

SEQ ID NO: 4142916 - DNA, 25 bp, Homo sapien
gatgactcatgtaggctgaacccag

SEQ ID NO: 4142917 - DNA, 25 bp, Homo sapien
ttgtcatgaatggttttaacaacca

SEQ ID NO: 4142918 - DNA, 25 bp, Homo sapien
tctctaaagtgggatcattgtcatg

SEQ ID NO: 4142919 - DNA, 25 bp, Homo sapien
aagatgtggaatgtgcggatctcca

SEQ ID NO: 4142920 - DNA, 25 bp, Homo sapien
gctgttgttttctctaaagtgggat

SEQ ID NO: 4142921 - DNA, 25 bp, Homo sapien
gcttttaaacgtgcaactggccagt

SEQ ID NO: 4142922 - DNA, 25 bp, Homo sapien
cctattgtaggccagggactgttcc

SEQ ID NO: 4142923 - DNA, 25 bp, Homo sapien
gaaagactgatcctgccttctgatg

SEQ ID NO: 4142924 - DNA, 25 bp, Homo sapien
gcataattggctaggagggaatcct

SEQ ID NO: 4142925 - DNA, 25 bp, Homo sapien
tgttaggaacccatttgactagccg

SEQ ID NO: 4142926 - DNA, 25 bp, Homo sapien
tcaagagagcctacccttttcaaaa

SEQ ID NO: 4142927 - DNA, 25 bp, Homo sapien
tattcatgggtgaaaggaccaaggt

SEQ ID NO: 4142928 - DNA, 25 bp, Homo sapien
tcataaaaatgacccggaggcctat

SEQ ID NO: 4142929 - DNA, 25 bp, Homo sapien
caactatgaaatatgcatgctccat

SEQ ID NO: 4142930 - DNA, 25 bp, Homo sapien
tctagctttgtgtaattagacagct

SEQ ID NO: 4142931 - DNA, 25 bp, Homo sapien
cacataagagacagctaggtacagg

SEQ ID NO: 4142932 - DNA, 25 bp, Homo sapien
cctcaaatctgagtagccaagtatc

SEQ ID NO: 4142933 - DNA, 25 bp, Homo sapien
gtttatcagcagactgtaaaggcaa

SEQ ID NO: 4142934 - DNA, 25 bp, Homo sapien
agtaggctctgtggattagaaatga

SEQ ID NO: 4142935 - DNA, 25 bp, Homo sapien
gactgtaaaggcaagtaggctctgt

SEQ ID NO: 4142936 - DNA, 25 bp, Homo sapien
agtgtttatcagcagactgtaaagg

SEQ ID NO: 4142937 - DNA, 25 bp, Homo sapien
tgtacgcagatgacctcagttcata

SEQ ID NO: 4142938 - DNA, 25 bp, Homo sapien
tgttatatgaagtccaggcattggc

SEQ ID NO: 4142939 - DNA, 25 bp, Homo sapien
tcagttcataacagggacttcgtct

SEQ ID NO: 4142940 - DNA, 25 bp, Homo sapien
gcattggccaattgaatacaccttt

SEQ ID NO: 4142941 - DNA, 25 bp, Homo sapien
ccacatcactggtcagtgagtcaag

SEQ ID NO: 4142942 - DNA, 25 bp, Homo sapien
cttctaatatctgaaaggtatctga

SEQ ID NO: 4142943 - DNA, 25 bp, Homo sapien
gaaaggtatctgattcagcaaagac

SEQ ID NO: 4142944 - DNA, 25 bp, Homo sapien
tgtaaacgagtcttgtgtctgtagc

SEQ ID NO: 4142945 - DNA, 25 bp, Homo sapien
tatctcaggacatagtggcttagaa

SEQ ID NO: 4142946 - DNA, 25 bp, Homo sapien
tgggagcagcatatacgggtgtttc

SEQ ID NO: 4142947 - DNA, 25 bp, Homo sapien
taatatgtgctaacaatgggaggca

SEQ ID NO: 4142948 - DNA, 25 bp, Homo sapien
cattttggcactcgattcaagcagt

SEQ ID NO: 4142949 - DNA, 25 bp, Homo sapien
tttcagcttcatcaagggatacttg

SEQ ID NO: 4142950 - DNA, 25 bp, Homo sapien
tgaaagtctggatttaacagtgaaa

SEQ ID NO: 4142951 - DNA, 25 bp, Homo sapien
gcaaagtagtatattcttgactgaa

SEQ ID NO: 4142952 - DNA, 25 bp, Homo sapien
tcaagtcacataatagcaaagtagt

SEQ ID NO: 4142953 - DNA, 25 bp, Homo sapien
tgggataatctgaggcccagagttt

SEQ ID NO: 4142954 - DNA, 25 bp, Homo sapien
gtgggataatctgaggcccagagtt

SEQ ID NO: 4142955 - DNA, 25 bp, Homo sapien
ggtgggataatctgaggcccagagt

SEQ ID NO: 4142956 - DNA, 25 bp, Homo sapien
aggtgggataatctgaggcccagag

SEQ ID NO: 4142957 - DNA, 25 bp, Homo sapien
cattctctatgcagacttccaggcc

SEQ ID NO: 4142958 - DNA, 25 bp, Homo sapien
taaaaactaagtatcattctctatg

SEQ ID NO: 4142959 - DNA, 25 bp, Homo sapien
aaaaccacagtaaatttgcacgatt

SEQ ID NO: 4142960 - DNA, 25 bp, Homo sapien
tatgtttctaacaagcactgcccaa

SEQ ID NO: 4142961 - DNA, 25 bp, Homo sapien
tagttctagcctgctgggattcaag

SEQ ID NO: 4142962 - DNA, 25 bp, Homo sapien
cgtggctcccgaaatgcgctgtcga

SEQ ID NO: 4142963 - DNA, 25 bp, Homo sapien
tcagtgcgctgtcgttcgtgggtct

SEQ ID NO: 4142964 - DNA, 25 bp, Homo sapien
tccaggaccgtagggataggactgc

SEQ ID NO: 4142965 - DNA, 25 bp, Homo sapien
cacgtagcaatttaagagggcaggc

SEQ ID NO: 4142966 - DNA, 25 bp, Homo sapien
tctgaaaatctttgtagtgggcccc

SEQ ID NO: 4142967 - DNA, 25 bp, Homo sapien
agaagaatagtgctcccaagggcca

SEQ ID NO: 4142968 - DNA, 25 bp, Homo sapien
ttttgcaactacaagacaggcctct

SEQ ID NO: 4142969 - DNA, 25 bp, Homo sapien
caaagagcccaacagtagctgaagt

SEQ ID NO: 4142970 - DNA, 25 bp, Homo sapien
taactgtaccgcttacaaagagccc

SEQ ID NO: 4142971 - DNA, 25 bp, Homo sapien
gggaccaaagtcaccagtcagagaa

SEQ ID NO: 4142972 - DNA, 25 bp, Homo sapien
tctgatagggacttgatgaagcgct

SEQ ID NO: 4142973 - DNA, 25 bp, Homo sapien
aaatcagaaggggatataagttgca

SEQ ID NO: 4142974 - DNA, 25 bp, Homo sapien
cttctggtcagtgaagactttgaat

SEQ ID NO: 4142975 - DNA, 25 bp, Homo sapien
aaaggattgggagatacattccttc

SEQ ID NO: 4142976 - DNA, 25 bp, Homo sapien
cattatttcagaaccccaaacaaag

SEQ ID NO: 4142977 - DNA, 25 bp, Homo sapien
cctgtagtctatgcatgattgagaa

SEQ ID NO: 4142978 - DNA, 25 bp, Homo sapien
tggcaacatcctttggtgaaaatag

SEQ ID NO: 4142979 - DNA, 25 bp, Homo sapien
tagtatattagatcgcaagagcttc

SEQ ID NO: 4142980 - DNA, 25 bp, Homo sapien
gctatggaaggcaagctgctgttct

SEQ ID NO: 4142981 - DNA, 25 bp, Homo sapien
gaaattagcaacagttctggtccca

SEQ ID NO: 4142982 - DNA, 25 bp, Homo sapien
tgcctactgtatccaggagagtacc

SEQ ID NO: 4142983 - DNA, 25 bp, Homo sapien
cattgctaccatgagcagtgctggc

SEQ ID NO: 4142984 - DNA, 25 bp, Homo sapien
tcagccacgacggactacatatatg

SEQ ID NO: 4142985 - DNA, 25 bp, Homo sapien
tgaaagtaattgatcctagggcaca

SEQ ID NO: 4142986 - DNA, 25 bp, Homo sapien
caggcttcgaatagaaaggctacac

SEQ ID NO: 4142987 - DNA, 25 bp, Homo sapien
taaatcagatcgtgtcatgccctgc

SEQ ID NO: 4142988 - DNA, 25 bp, Homo sapien
tctcaatatgtagcacagtgccagc

SEQ ID NO: 4142989 - DNA, 25 bp, Homo sapien
gtgccggcccatgcagcagttctaa

SEQ ID NO: 4142990 - DNA, 25 bp, Homo sapien
cagcttcagaatggaggctagacac

SEQ ID NO: 4142991 - DNA, 25 bp, Homo sapien
aacggcctgcctacaaatatgcgtg

SEQ ID NO: 4142992 - DNA, 25 bp, Homo sapien
cagaaagcccttcatggtaaagtgg

SEQ ID NO: 4142993 - DNA, 25 bp, Homo sapien
gtaccgactacgacctgacacatag

SEQ ID NO: 4142994 - DNA, 25 bp, Homo sapien
gtttctgaaactaacgtgggactca

SEQ ID NO: 4142995 - DNA, 25 bp, Homo sapien
aaatatgggctgaatctgtaatacc

SEQ ID NO: 4142996 - DNA, 25 bp, Homo sapien
taaatgggtgaaccaataagtgatc

SEQ ID NO: 4142997 - DNA, 25 bp, Homo sapien
gctaggtcacaggatatatggatta

SEQ ID NO: 4142998 - DNA, 25 bp, Homo sapien
taaataagcctcttgtgtacacaaa

SEQ ID NO: 4142999 - DNA, 25 bp, Homo sapien
tctgggtcatcttcaaatgtttgca

SEQ ID NO: 4143000 - DNA, 25 bp, Homo sapien
gcctcttgtggcacacgtataaata

SEQ ID NO: 4143001 - DNA, 25 bp, Homo sapien
aaacctgggtagctcctgggcaagc

SEQ ID NO: 4143002 - DNA, 25 bp, Homo sapien
tgaatttccagcaaacctgggtagc

SEQ ID NO: 4143003 - DNA, 25 bp, Homo sapien
ctccaatatcttgttgaggcacatt

SEQ ID NO: 4143004 - DNA, 25 bp, Homo sapien
tgttgaggcacatttttgtccattg

SEQ ID NO: 4143005 - DNA, 25 bp, Homo sapien
tgatattaggaaacagtgcccgtag

SEQ ID NO: 4143006 - DNA, 25 bp, Homo sapien
tcctcttggcattgtaggtgacaca

SEQ ID NO: 4143007 - DNA, 25 bp, Homo sapien
gtgcccgtagctctgtaaacatgac

SEQ ID NO: 4143008 - DNA, 25 bp, Homo sapien
ggaacagaattctaacacccaggcg

SEQ ID NO: 4143009 - DNA, 25 bp, Homo sapien
ccactctcgtcactgctgtctagaa

SEQ ID NO: 4143010 - DNA, 25 bp, Homo sapien
tcaggcagcactccattccaaaatt

SEQ ID NO: 4143011 - DNA, 25 bp, Homo sapien
atggctgccactctcgtcactgctg

SEQ ID NO: 4143012 - DNA, 25 bp, Homo sapien
tgccactctcgtcactgctgtctag

SEQ ID NO: 4143013 - DNA, 25 bp, Homo sapien
ttcccagcatattctggaaatgcag

SEQ ID NO: 4143014 - DNA, 25 bp, Homo sapien
gatccttgggaaatgctcacgcatc

SEQ ID NO: 4143015 - DNA, 25 bp, Homo sapien
gaaatgcagcctgtgacaacattct

SEQ ID NO: 4143016 - DNA, 25 bp, Homo sapien
tagcatcagaggagctggttaacac

SEQ ID NO: 4143017 - DNA, 25 bp, Homo sapien
gaacttaggacactcaaacgctgaa

SEQ ID NO: 4143018 - DNA, 25 bp, Homo sapien
gagtttgtagtaaccagcagcccca

SEQ ID NO: 4143019 - DNA, 25 bp, Homo sapien
gctcagtgtcgtacaaatggccgcc

SEQ ID NO: 4143020 - DNA, 25 bp, Homo sapien
agaaaagcgtagtgtctgggccaga

SEQ ID NO: 4143021 - DNA, 25 bp, Homo sapien
aggacaaggcgggacacagcaacat

SEQ ID NO: 4143022 - DNA, 25 bp, Homo sapien
ttagctcttacgcaggacaaggcgg

SEQ ID NO: 4143023 - DNA, 25 bp, Homo sapien
tctctctttagctcttacgcaggac

SEQ ID NO: 4143024 - DNA, 25 bp, Homo sapien
tcttacgcaggacaaggcgggacac

SEQ ID NO: 4143025 - DNA, 25 bp, Homo sapien
ggttctctatcctttcccatacgtg

SEQ ID NO: 4143026 - DNA, 25 bp, Homo sapien
tgcagtctgcaatttacctttcagt

SEQ ID NO: 4143027 - DNA, 25 bp, Homo sapien
tgggcccctcaagtatctataaaat

SEQ ID NO: 4143028 - DNA, 25 bp, Homo sapien
gattgtgtgtagctagatattgcag

SEQ ID NO: 4143029 - DNA, 25 bp, Homo sapien
gagaccaaaaaagaccagtggagcc

SEQ ID NO: 4143030 - DNA, 25 bp, Homo sapien
aaaaagaccagtggagccacacttg

SEQ ID NO: 4143031 - DNA, 25 bp, Homo sapien
agaccaaaaaagaccagtggagcca

SEQ ID NO: 4143032 - DNA, 25 bp, Homo sapien
agagaccaaaaaagaccagtggagc

SEQ ID NO: 4143033 - DNA, 25 bp, Homo sapien
gatggcagagccatccctcaagcca

SEQ ID NO: 4143034 - DNA, 25 bp, Homo sapien
caaggctcctttcaaagtcagcagg

SEQ ID NO: 4143035 - DNA, 25 bp, Homo sapien
aggaagtagaaatacacatcatctc

SEQ ID NO: 4143036 - DNA, 25 bp, Homo sapien
catgggagctaaactgacaactggg

SEQ ID NO: 4143037 - DNA, 25 bp, Homo sapien
gactgagccctcagcgtttgaaggg

SEQ ID NO: 4143038 - DNA, 25 bp, Homo sapien
ctgaatgaatgaacctcgaggactt

SEQ ID NO: 4143039 - DNA, 25 bp, Homo sapien
tctcactcagcgcatggtaaaggct

SEQ ID NO: 4143040 - DNA, 25 bp, Homo sapien
tagcaaagttgcgtcatgcttcggc

SEQ ID NO: 4143041 - DNA, 25 bp, Homo sapien
taaacttgggaaccatgttgaccgc

SEQ ID NO: 4143042 - DNA, 25 bp, Homo sapien
tgtgaggccacgcagttcaggtttc

SEQ ID NO: 4143043 - DNA, 25 bp, Homo sapien
taagtgggacctccagtgctgctag

SEQ ID NO: 4143044 - DNA, 25 bp, Homo sapien
ctagtagggcgtaagcagggacacc

SEQ ID NO: 4143045 - DNA, 25 bp, Homo sapien
taccagtctcaagatgtctgtcagc

SEQ ID NO: 4143046 - DNA, 25 bp, Homo sapien
taatccatggagttcttggcgccag

SEQ ID NO: 4143047 - DNA, 25 bp, Homo sapien
cctacagtcctgtggtgcattgttg

SEQ ID NO: 4143048 - DNA, 25 bp, Homo sapien
taagctgacaggaagggaatcctcc

SEQ ID NO: 4143049 - DNA, 25 bp, Homo sapien
cccttccatctcctacagatgtggg

SEQ ID NO: 4143050 - DNA, 25 bp, Homo sapien
cttgaatttattgctgcatattctc

SEQ ID NO: 4143051 - DNA, 25 bp, Homo sapien
actggattgggtgctccctcccatc

SEQ ID NO: 4143052 - DNA, 25 bp, Homo sapien
aaacacttcactggattgggtgctc

SEQ ID NO: 4143053 - DNA, 25 bp, Homo sapien
catcactgcgttggcttggtaagac

SEQ ID NO: 4143054 - DNA, 25 bp, Homo sapien
aaattccctttgctgcaatgtcctc

SEQ ID NO: 4143055 - DNA, 25 bp, Homo sapien
cattgcccagcacaaagcaggtttc

SEQ ID NO: 4143056 - DNA, 25 bp, Homo sapien
tccccaacatctggcacattgccca

SEQ ID NO: 4143057 - DNA, 25 bp, Homo sapien
cccagcacaaagcaggtttcaataa

SEQ ID NO: 4143058 - DNA, 25 bp, Homo sapien
cacattgcccagcacaaagcaggtt

SEQ ID NO: 4143059 - DNA, 25 bp, Homo sapien
gacaggcacaggatctgtctgctca

SEQ ID NO: 4143060 - DNA, 25 bp, Homo sapien
tcatacatactaggctccaagctca

SEQ ID NO: 4143061 - DNA, 25 bp, Homo sapien
tactaggctccaagctcaataaaga

SEQ ID NO: 4143062 - DNA, 25 bp, Homo sapien
caagctcaataaagacaggcacagg

SEQ ID NO: 4143063 - DNA, 25 bp, Homo sapien
tttgctctcaggaaccccttacact

SEQ ID NO: 4143064 - DNA, 25 bp, Homo sapien
catgcactaggtaggatcctcaaaa

SEQ ID NO: 4143065 - DNA, 25 bp, Homo sapien
gcttgatgatcatatctgttctgcc

SEQ ID NO: 4143066 - DNA, 25 bp, Homo sapien
gataataggatatacccaggcaggc

SEQ ID NO: 4143067 - DNA, 25 bp, Homo sapien
gcgtctgttgtactggacatgctca

SEQ ID NO: 4143068 - DNA, 25 bp, Homo sapien
tccagcacatgacacaatcagaggg

SEQ ID NO: 4143069 - DNA, 25 bp, Homo sapien
caagtggatcatcaggtttaccctc

SEQ ID NO: 4143070 - DNA, 25 bp, Homo sapien
tggtttggctagcactgcctcagat

SEQ ID NO: 4143071 - DNA, 25 bp, Homo sapien
aatgcattgcataatcttggcttgt

SEQ ID NO: 4143072 - DNA, 25 bp, Homo sapien
caaatgcattgcataatcttggctt

SEQ ID NO: 4143073 - DNA, 25 bp, Homo sapien
tcaaatgcattgcataatcttggct

SEQ ID NO: 4143074 - DNA, 25 bp, Homo sapien
aaatgcattgcataatcttggcttg

SEQ ID NO: 4143075 - DNA, 25 bp, Homo sapien
tttgtagccaccaaatcccagaact

SEQ ID NO: 4143076 - DNA, 25 bp, Homo sapien
aagtttgtagccaccaaatcccaga

SEQ ID NO: 4143077 - DNA, 25 bp, Homo sapien
agtttgtagccaccaaatcccagaa

SEQ ID NO: 4143078 - DNA, 25 bp, Homo sapien
aaagtttgtagccaccaaatcccag

SEQ ID NO: 4143079 - DNA, 25 bp, Homo sapien
tgagtgatcacttaaagaggacagg

SEQ ID NO: 4143080 - DNA, 25 bp, Homo sapien
gaacatgtcatgtcctctttgagtg

SEQ ID NO: 4143081 - DNA, 25 bp, Homo sapien
ggatttctaaaatagggctgactgg

SEQ ID NO: 4143082 - DNA, 25 bp, Homo sapien
tcctctaattgggaaatgaaccagc

SEQ ID NO: 4143083 - DNA, 25 bp, Homo sapien
cataaatatccaagaaccctaattg

SEQ ID NO: 4143084 - DNA, 25 bp, Homo sapien
aatgaccagaagcatatgcactctt

SEQ ID NO: 4143085 - DNA, 25 bp, Homo sapien
cgtgtggatggacttaacaaaagta

SEQ ID NO: 4143086 - DNA, 25 bp, Homo sapien
tcatttcattaacgtgtggatggac

SEQ ID NO: 4143087 - DNA, 25 bp, Homo sapien
ccaatccgagtgggacttttctatg

SEQ ID NO: 4143088 - DNA, 25 bp, Homo sapien
gggacttttctatgtgctggccagc

SEQ ID NO: 4143089 - DNA, 25 bp, Homo sapien
agctgcctcatcagtaattaattca

SEQ ID NO: 4143090 - DNA, 25 bp, Homo sapien
cagtatattgctaccaggcagcagc

SEQ ID NO: 4143091 - DNA, 25 bp, Homo sapien
ataagaacacaatatctcagagaaa

SEQ ID NO: 4143092 - DNA, 25 bp, Homo sapien
ccactcagggccagtatattgctac

SEQ ID NO: 4143093 - DNA, 25 bp, Homo sapien
gagaaagatgctcatcttcaaaccc

SEQ ID NO: 4143094 - DNA, 25 bp, Homo sapien
acccacgtagtctgctgtaaaatag

SEQ ID NO: 4143095 - DNA, 25 bp, Homo sapien
gactaagacaaccaagcctcatggg

SEQ ID NO: 4143096 - DNA, 25 bp, Homo sapien
tccattcatgtgtggacaacccacg

SEQ ID NO: 4143097 - DNA, 25 bp, Homo sapien
gagcaaaccactcagtaatctagag

SEQ ID NO: 4143098 - DNA, 25 bp, Homo sapien
caaaagcaggctccaaattaggcct

SEQ ID NO: 4143099 - DNA, 25 bp, Homo sapien
tgactgtaatctgcactgttgaatg

SEQ ID NO: 4143100 - DNA, 25 bp, Homo sapien
ggttcacactcattactctcttgat

SEQ ID NO: 4143101 - DNA, 25 bp, Homo sapien
ccctctgtttagcatggttcacact

SEQ ID NO: 4143102 - DNA, 25 bp, Homo sapien
taaacatatatggtttcccctgttg

SEQ ID NO: 4143103 - DNA, 25 bp, Homo sapien
caatcatactttggcatgactgtcc

SEQ ID NO: 4143104 - DNA, 25 bp, Homo sapien
tttttgtcttccaatcatactttgg

SEQ ID NO: 4143105 - DNA, 25 bp, Homo sapien
gcatgactgtccataaacatatatg

SEQ ID NO: 4143106 - DNA, 25 bp, Homo sapien
gactctcaatgtctatgctgacctg

SEQ ID NO: 4143107 - DNA, 25 bp, Homo sapien
gaaagtagacagattggccccagat

SEQ ID NO: 4143108 - DNA, 25 bp, Homo sapien
gaatccaaagacctcaagcctgggc

SEQ ID NO: 4143109 - DNA, 25 bp, Homo sapien
gacctgatcttggactggtttcaga

SEQ ID NO: 4143110 - DNA, 25 bp, Homo sapien
atacagattgctgggacctagctca

SEQ ID NO: 4143111 - DNA, 25 bp, Homo sapien
tctaatgcagaagatcttggtaggg

SEQ ID NO: 4143112 - DNA, 25 bp, Homo sapien
ttagaagaaggtacacttatcctgg

SEQ ID NO: 4143113 - DNA, 25 bp, Homo sapien
tggagatggtcccagtacaactaaa

SEQ ID NO: 4143114 - DNA, 25 bp, Homo sapien
tcaggagggaagagcaaatatatcg

SEQ ID NO: 4143115 - DNA, 25 bp, Homo sapien
caagctaggtggctgtcagggtcta

SEQ ID NO: 4143116 - DNA, 25 bp, Homo sapien
gattagcagtgtctgtcaagggcag

SEQ ID NO: 4143117 - DNA, 25 bp, Homo sapien
caacccagatagattggtagcagct

SEQ ID NO: 4143118 - DNA, 25 bp, Homo sapien
gggaattgattggaaaagctcaggc

SEQ ID NO: 4143119 - DNA, 25 bp, Homo sapien
cttatctggggaattgattggaaaa

SEQ ID NO: 4143120 - DNA, 25 bp, Homo sapien
tctacacaaagtgataccagggaac

SEQ ID NO: 4143121 - DNA, 25 bp, Homo sapien
tctggggaattgattggaaaagctc

SEQ ID NO: 4143122 - DNA, 25 bp, Homo sapien
cagcccaagttggttcctaaggatt

SEQ ID NO: 4143123 - DNA, 25 bp, Homo sapien
tatttgagcaattatatgagacatg

SEQ ID NO: 4143124 - DNA, 25 bp, Homo sapien
tgtaaagatcaagcccaaagtccgc

SEQ ID NO: 4143125 - DNA, 25 bp, Homo sapien
tgtagttgtccctaattccaggatc

SEQ ID NO: 4143126 - DNA, 25 bp, Homo sapien
cactgtttgcacgaggatgaaagga

SEQ ID NO: 4143127 - DNA, 25 bp, Homo sapien
cagaatggcccatcaacactgtttg

SEQ ID NO: 4143128 - DNA, 25 bp, Homo sapien
tgaaaggatcttggtgggcatacca

SEQ ID NO: 4143129 - DNA, 25 bp, Homo sapien
ggcctagcccacttctgcagtttga

SEQ ID NO: 4143130 - DNA, 25 bp, Homo sapien
gaccttgagctatctaaacatggaa

SEQ ID NO: 4143131 - DNA, 25 bp, Homo sapien
tccgacaaaacctgggcaatgaagc

SEQ ID NO: 4143132 - DNA, 25 bp, Homo sapien
cagctcatctagacatcggtttaag

SEQ ID NO: 4143133 - DNA, 25 bp, Homo sapien
tgcgtacactctcaaggtcactccg

SEQ ID NO: 4143134 - DNA, 25 bp, Homo sapien
cacgttttggcgagaagatgctttt

SEQ ID NO: 4143135 - DNA, 25 bp, Homo sapien
tcacgttttggcgagaagatgcttt

SEQ ID NO: 4143136 - DNA, 25 bp, Homo sapien
gctttttacagctgtctctttgctc

SEQ ID NO: 4143137 - DNA, 25 bp, Homo sapien
gagaagatgctttttacagctgtct

SEQ ID NO: 4143138 - DNA, 25 bp, Homo sapien
aatgccttcctagttcaaacaatgg

SEQ ID NO: 4143139 - DNA, 25 bp, Homo sapien
caagaggatactgatagttgctacc

SEQ ID NO: 4143140 - DNA, 25 bp, Homo sapien
gaagatacggtgatagagtctgcac

SEQ ID NO: 4143141 - DNA, 25 bp, Homo sapien
caacactggctatcatctaagggca

SEQ ID NO: 4143142 - DNA, 25 bp, Homo sapien
tgtactgctactgtgtttccagctg

SEQ ID NO: 4143143 - DNA, 25 bp, Homo sapien
actcagaaagtgacataggtgaatt

SEQ ID NO: 4143144 - DNA, 25 bp, Homo sapien
ccagctgtatcagtgcattcttacc

SEQ ID NO: 4143145 - DNA, 25 bp, Homo sapien
gctggtccctgttatgtcttactca

SEQ ID NO: 4143146 - DNA, 25 bp, Homo sapien
gacattgccaaatatagcctgagga

SEQ ID NO: 4143147 - DNA, 25 bp, Homo sapien
tattatgtgagtgcctctgcatgag

SEQ ID NO: 4143148 - DNA, 25 bp, Homo sapien
cccagtgtagcaccccaaagtgatt

SEQ ID NO: 4143149 - DNA, 25 bp, Homo sapien
gatacctgtggtgctttgcctagca

SEQ ID NO: 4143150 - DNA, 25 bp, Homo sapien
tgggctagtttctcagctgcttcag

SEQ ID NO: 4143151 - DNA, 25 bp, Homo sapien
caccggcatagagtcgctacctgat

SEQ ID NO: 4143152 - DNA, 25 bp, Homo sapien
gctacctgattctctgtgcacttca

SEQ ID NO: 4143153 - DNA, 25 bp, Homo sapien
gaaacaagatcaattccctgtccag

SEQ ID NO: 4143154 - DNA, 25 bp, Homo sapien
tttaagtaaaacagggctgacctca

SEQ ID NO: 4143155 - DNA, 25 bp, Homo sapien
ccagatggtacttgtatgagtgcaa

SEQ ID NO: 4143156 - DNA, 25 bp, Homo sapien
tgacctcagagtgtaaggagcacgt

SEQ ID NO: 4143157 - DNA, 25 bp, Homo sapien
cacgtttttgcagattattagacca

SEQ ID NO: 4143158 - DNA, 25 bp, Homo sapien
taaggctagttgactgtgcttccgg

SEQ ID NO: 4143159 - DNA, 25 bp, Homo sapien
tccagtcctggcaagcagatcaatg

SEQ ID NO: 4143160 - DNA, 25 bp, Homo sapien
gcatctgtggatcaactggctggca

SEQ ID NO: 4143161 - DNA, 25 bp, Homo sapien
tacaggagtggtccatttccagtcc

SEQ ID NO: 4143162 - DNA, 25 bp, Homo sapien
cacagatcgtcttggcaaaaatggc

SEQ ID NO: 4143163 - DNA, 25 bp, Homo sapien
gaggccatggtgtcctttttcacaa

SEQ ID NO: 4143164 - DNA, 25 bp, Homo sapien
gaatcagtgagccttagagaaagac

SEQ ID NO: 4143165 - DNA, 25 bp, Homo sapien
tttatttggccatggagatcgaggc

SEQ ID NO: 4143166 - DNA, 25 bp, Homo sapien
tgtgaggccactggagatcttgatg

SEQ ID NO: 4143167 - DNA, 25 bp, Homo sapien
gccacatggtgaaagacctcgatga

SEQ ID NO: 4143168 - DNA, 25 bp, Homo sapien
gaagtaggccccagcaagactgttc

SEQ ID NO: 4143169 - DNA, 25 bp, Homo sapien
gattttgtacactccttccaacgag

SEQ ID NO: 4143170 - DNA, 25 bp, Homo sapien
gacacagatttcattccgcctggta

SEQ ID NO: 4143171 - DNA, 25 bp, Homo sapien
ctctggttggactaactaactgcca

SEQ ID NO: 4143172 - DNA, 25 bp, Homo sapien
tcaagagtgtgacaagggacacatg

SEQ ID NO: 4143173 - DNA, 25 bp, Homo sapien
tgtagtcctacatgcctctggttgg

SEQ ID NO: 4143174 - DNA, 25 bp, Homo sapien
catctgacatagtgtggtctcttcc

SEQ ID NO: 4143175 - DNA, 25 bp, Homo sapien
gggacaagggcccattgttctagca

SEQ ID NO: 4143176 - DNA, 25 bp, Homo sapien
gaactgttattgtagcctgagggac

SEQ ID NO: 4143177 - DNA, 25 bp, Homo sapien
tagcacctcgtaagctgttttcctg

SEQ ID NO: 4143178 - DNA, 25 bp, Homo sapien
gacaatcagtaaatgccacgggata

SEQ ID NO: 4143179 - DNA, 25 bp, Homo sapien
cgggatagtttcttgccctgtgaaa

SEQ ID NO: 4143180 - DNA, 25 bp, Homo sapien
ctgagggtctccaatctggcagcat

SEQ ID NO: 4143181 - DNA, 25 bp, Homo sapien
caaagtctgccaaagctgagggtct

SEQ ID NO: 4143182 - DNA, 25 bp, Homo sapien
ttattagccgggtaacctagcgcaa

SEQ ID NO: 4143183 - DNA, 25 bp, Homo sapien
tcccagctgggccacttattagccg

SEQ ID NO: 4143184 - DNA, 25 bp, Homo sapien
cccggccggcttgtgagagtattaa

SEQ ID NO: 4143185 - DNA, 25 bp, Homo sapien
tagttagcaattagagagacagccc

SEQ ID NO: 4143186 - DNA, 25 bp, Homo sapien
taagcagggatagctacagtgccaa

SEQ ID NO: 4143187 - DNA, 25 bp, Homo sapien
ttagttctgaggcaaaggatcccaa

SEQ ID NO: 4143188 - DNA, 25 bp, Homo sapien
gcagttcaggattcggagtttccca

SEQ ID NO: 4143189 - DNA, 25 bp, Homo sapien
tcccaaagtatagggcaggcagttc

SEQ ID NO: 4143190 - DNA, 25 bp, Homo sapien
atagcgggtgcgtgcccaccctgga

SEQ ID NO: 4143191 - DNA, 25 bp, Homo sapien
caatagcataaggagcatagcgggt

SEQ ID NO: 4143192 - DNA, 25 bp, Homo sapien
taagggagggagatatgctactgtt

SEQ ID NO: 4143193 - DNA, 25 bp, Homo sapien
ttcagttaggacagtggcaatagca

SEQ ID NO: 4143194 - DNA, 25 bp, Homo sapien
gctgcttcactctcccaagagtcca

SEQ ID NO: 4143195 - DNA, 25 bp, Homo sapien
tcagctgctaatttgagctttcctc

SEQ ID NO: 4143196 - DNA, 25 bp, Homo sapien
tctgaacagtcaggataacacccct

SEQ ID NO: 4143197 - DNA, 25 bp, Homo sapien
tgagaacccctatcagattttgtgt

SEQ ID NO: 4143198 - DNA, 25 bp, Homo sapien
ccatatcgagtgttcttgcttttct

SEQ ID NO: 4143199 - DNA, 25 bp, Homo sapien
cccatatcgagtgttcttgcttttc

SEQ ID NO: 4143200 - DNA, 25 bp, Homo sapien
taagaaagatgttagtgtgacacaa

SEQ ID NO: 4143201 - DNA, 25 bp, Homo sapien
cttaagaaagatgttagtgtgacac

SEQ ID NO: 4143202 - DNA, 25 bp, Homo sapien
gatgttagtgtgacacaaattggca

SEQ ID NO: 4143203 - DNA, 25 bp, Homo sapien
aagtttttttgctcacagcaaattc

SEQ ID NO: 4143204 - DNA, 25 bp, Homo sapien
aaggttcacatttccgaagtccacg

SEQ ID NO: 4143205 - DNA, 25 bp, Homo sapien
ccagagccaaaggttcacatttccg

SEQ ID NO: 4143206 - DNA, 25 bp, Homo sapien
ttcacatttccgaagtccacgttca

SEQ ID NO: 4143207 - DNA, 25 bp, Homo sapien
tgactgtgttcaccagagccaaagg

SEQ ID NO: 4143208 - DNA, 25 bp, Homo sapien
tatcttggatcatggactcctgtga

SEQ ID NO: 4143209 - DNA, 25 bp, Homo sapien
tggttcttaaccatatcttggatca

SEQ ID NO: 4143210 - DNA, 25 bp, Homo sapien
cacaagccatgtatggcatctcttt

SEQ ID NO: 4143211 - DNA, 25 bp, Homo sapien
ccaacacaagccatgtatggcatct

SEQ ID NO: 4143212 - DNA, 25 bp, Homo sapien
tttcagtcaaatcaatcagccacag

SEQ ID NO: 4143213 - DNA, 25 bp, Homo sapien
gcctttcaatgatttgcctctttca

SEQ ID NO: 4143214 - DNA, 25 bp, Homo sapien
caattatgttccagaatggctgatc

SEQ ID NO: 4143215 - DNA, 25 bp, Homo sapien
gctgggttgacagttaagaacatcc

SEQ ID NO: 4143216 - DNA, 25 bp, Homo sapien
aacactatggtatcagcaggacaac

SEQ ID NO: 4143217 - DNA, 25 bp, Homo sapien
gacaacagacatatgggccaatgga

SEQ ID NO: 4143218 - DNA, 25 bp, Homo sapien
tcatatggaaacgtgacgagcccca

SEQ ID NO: 4143219 - DNA, 25 bp, Homo sapien
tcttgcaggaatggaaatgccaatc

SEQ ID NO: 4143220 - DNA, 25 bp, Homo sapien
tcggtgccacacctgacaagggata

SEQ ID NO: 4143221 - DNA, 25 bp, Homo sapien
taaacaaacggatgactgcacttct

SEQ ID NO: 4143222 - DNA, 25 bp, Homo sapien
taacagaatagagacatcggtgcca

SEQ ID NO: 4143223 - DNA, 25 bp, Homo sapien
gaaccgtgtgcttcaaagatcaggg

SEQ ID NO: 4143224 - DNA, 25 bp, Homo sapien
aaagacgcagtcactccaccagtgc

SEQ ID NO: 4143225 - DNA, 25 bp, Homo sapien
tgtggtgttaacacacaagcaggga

SEQ ID NO: 4143226 - DNA, 25 bp, Homo sapien
tggaattcaccacggaatgctttct

SEQ ID NO: 4143227 - DNA, 25 bp, Homo sapien
tgttacaacccatggtgctagtgtt

SEQ ID NO: 4143228 - DNA, 25 bp, Homo sapien
gagattgcacatccacgaagttggg

SEQ ID NO: 4143229 - DNA, 25 bp, Homo sapien
tctcaccagggacattaatggacgg

SEQ ID NO: 4143230 - DNA, 25 bp, Homo sapien
caaaattagcttcggactgggcagc

SEQ ID NO: 4143231 - DNA, 25 bp, Homo sapien
tagctccaaacaacatcaaggtagg

SEQ ID NO: 4143232 - DNA, 25 bp, Homo sapien
ggtaatttttatgcctcaatagaaa

SEQ ID NO: 4143233 - DNA, 25 bp, Homo sapien
ttcactaaatctctgtaagataggg

SEQ ID NO: 4143234 - DNA, 25 bp, Homo sapien
cccacctggctggtaatttttatgc

SEQ ID NO: 4143235 - DNA, 25 bp, Homo sapien
aaatctctgtaagatagggctatca

SEQ ID NO: 4143236 - DNA, 25 bp, Homo sapien
gagaaacctagctagacaccatcag

SEQ ID NO: 4143237 - DNA, 25 bp, Homo sapien
taagggagaagtacctagccgagcc

SEQ ID NO: 4143238 - DNA, 25 bp, Homo sapien
tgcctgcaaccatgtaaaggactct

SEQ ID NO: 4143239 - DNA, 25 bp, Homo sapien
gagaagtcagcaaccttgagcccac

SEQ ID NO: 4143240 - DNA, 25 bp, Homo sapien
tacgtggtctctacaaggtcttccc

SEQ ID NO: 4143241 - DNA, 25 bp, Homo sapien
agatggcccattacatgtctggtgc

SEQ ID NO: 4143242 - DNA, 25 bp, Homo sapien
gaatgggttatagaagtcacaggcc

SEQ ID NO: 4143243 - DNA, 25 bp, Homo sapien
aggccagcccatattcagtgagtga

SEQ ID NO: 4143244 - DNA, 25 bp, Homo sapien
tcttctggagggactaccattgtga

SEQ ID NO: 4143245 - DNA, 25 bp, Homo sapien
cagctcgtaaaagatcatggccagc

SEQ ID NO: 4143246 - DNA, 25 bp, Homo sapien
tgtgccacgtgatgtatttgatccc

SEQ ID NO: 4143247 - DNA, 25 bp, Homo sapien
tataatttctagaggctgtataacc

SEQ ID NO: 4143248 - DNA, 25 bp, Homo sapien
gttgggaaattccaccctgaggagc

SEQ ID NO: 4143249 - DNA, 25 bp, Homo sapien
ggttgaacccacctggctattggga

SEQ ID NO: 4143250 - DNA, 25 bp, Homo sapien
taacaggtatgcagcggttgaaccc

SEQ ID NO: 4143251 - DNA, 25 bp, Homo sapien
ccgagtgtgagatcagatgtgagca

SEQ ID NO: 4143252 - DNA, 25 bp, Homo sapien
aagctttggcgcaataattctatgc

SEQ ID NO: 4143253 - DNA, 25 bp, Homo sapien
caggtgatattctatggtcgaaaag

SEQ ID NO: 4143254 - DNA, 25 bp, Homo sapien
tgcaaagcgtattcctcaggtgata

SEQ ID NO: 4143255 - DNA, 25 bp, Homo sapien
gtagcaatttgcaaagcgtattcct

SEQ ID NO: 4143256 - DNA, 25 bp, Homo sapien
gaattaagcattctaccagacctag

SEQ ID NO: 4143257 - DNA, 25 bp, Homo sapien
gacaaagtcctaatcaagagctctg

SEQ ID NO: 4143258 - DNA, 25 bp, Homo sapien
cacaggacctccaaacggtgaaagg

SEQ ID NO: 4143259 - DNA, 25 bp, Homo sapien
tcaagtccggaaaagctgagctaat

SEQ ID NO: 4143260 - DNA, 25 bp, Homo sapien
atgtgaactttgtgtccgattccat

SEQ ID NO: 4143261 - DNA, 25 bp, Homo sapien
gattccatatcatcactccccggga

SEQ ID NO: 4143262 - DNA, 25 bp, Homo sapien
tgtgtccgattccatatcatcactc

SEQ ID NO: 4143263 - DNA, 25 bp, Homo sapien
tcactccccgggatatttctaccca

SEQ ID NO: 4143264 - DNA, 25 bp, Homo sapien
cttgactggaacatctcctgtccat

SEQ ID NO: 4143265 - DNA, 25 bp, Homo sapien
gactggaacatctcctgtccatcct

SEQ ID NO: 4143266 - DNA, 25 bp, Homo sapien
tgcactgcccgttgcaaatctccat

SEQ ID NO: 4143267 - DNA, 25 bp, Homo sapien
cctgtccatcctggatgcactgccc

SEQ ID NO: 4143268 - DNA, 25 bp, Homo sapien
taagtacaggtagggtttgatcaca

SEQ ID NO: 4143269 - DNA, 25 bp, Homo sapien
taaggcattaccagaatcaaaggga

SEQ ID NO: 4143270 - DNA, 25 bp, Homo sapien
acagtggcattggtctcagggaaga

SEQ ID NO: 4143271 - DNA, 25 bp, Homo sapien
caatttccgataactagcaagaggt

SEQ ID NO: 4143272 - DNA, 25 bp, Homo sapien
tgcagtgtttcgtttgctgtccttg

SEQ ID NO: 4143273 - DNA, 25 bp, Homo sapien
aacatgcagtgtttcgtttgctgtc

SEQ ID NO: 4143274 - DNA, 25 bp, Homo sapien
agtgtttcgtttgctgtccttgtga

SEQ ID NO: 4143275 - DNA, 25 bp, Homo sapien
catgcagtgtttcgtttgctgtcct

SEQ ID NO: 4143276 - DNA, 25 bp, Homo sapien
tggcttttactttctgagttcccat

SEQ ID NO: 4143277 - DNA, 25 bp, Homo sapien
cactggcttttactttctgagttcc

SEQ ID NO: 4143278 - DNA, 25 bp, Homo sapien
ctcactggcttttactttctgagtt

SEQ ID NO: 4143279 - DNA, 25 bp, Homo sapien
ctggcttttactttctgagttccca

SEQ ID NO: 4143280 - DNA, 25 bp, Homo sapien
tatagcaacgtgcagaacttctgag

SEQ ID NO: 4143281 - DNA, 25 bp, Homo sapien
gcctagatctgcaattatagcaacg

SEQ ID NO: 4143282 - DNA, 25 bp, Homo sapien
ccagcaaggatattaggaggtatac

SEQ ID NO: 4143283 - DNA, 25 bp, Homo sapien
agattttgcaagtgttcccatgtga

SEQ ID NO: 4143284 - DNA, 25 bp, Homo sapien
aggtaatggaaactgccgattctcg

SEQ ID NO: 4143285 - DNA, 25 bp, Homo sapien
ccaacccagttaccctttgatggag

SEQ ID NO: 4143286 - DNA, 25 bp, Homo sapien
gatgttagtgagcagtgaattggcc

SEQ ID NO: 4143287 - DNA, 25 bp, Homo sapien
gaaactgccgattctcgtttccttc

SEQ ID NO: 4143288 - DNA, 25 bp, Homo sapien
taggctacagactacaaaggacagc

SEQ ID NO: 4143289 - DNA, 25 bp, Homo sapien
tagcgatgagtagaacccctttcct

SEQ ID NO: 4143290 - DNA, 25 bp, Homo sapien
gggtctcttggcttcgtatctcaca

SEQ ID NO: 4143291 - DNA, 25 bp, Homo sapien
agtttgggcacgcagttgactctcc

SEQ ID NO: 4143292 - DNA, 25 bp, Homo sapien
accgcatccggccatgcccggttaa

SEQ ID NO: 4143293 - DNA, 25 bp, Homo sapien
caccgcatccggccatgcccggtta

SEQ ID NO: 4143294 - DNA, 25 bp, Homo sapien
agaacaagtatggagtacagtagcc

SEQ ID NO: 4143295 - DNA, 25 bp, Homo sapien
ccctgaacctgattgctattgattg

SEQ ID NO: 4143296 - DNA, 25 bp, Homo sapien
tattgattggaatgcctctctgttc

SEQ ID NO: 4143297 - DNA, 25 bp, Homo sapien
gcactttgcatgaaccgtggtggta

SEQ ID NO: 4143298 - DNA, 25 bp, Homo sapien
gctgcttaatgttgttgacattcat

SEQ ID NO: 4143299 - DNA, 25 bp, Homo sapien
tctggctgcttaatgttgttgacat

SEQ ID NO: 4143300 - DNA, 25 bp, Homo sapien
tggctgcttaatgttgttgacattc

SEQ ID NO: 4143301 - DNA, 25 bp, Homo sapien
ggtttctggctgcttaatgttgttg

SEQ ID NO: 4143302 - DNA, 25 bp, Homo sapien
taaagcctcagggaagttatccttc

SEQ ID NO: 4143303 - DNA, 25 bp, Homo sapien
taacggagcccagccaaagatcttt

SEQ ID NO: 4143304 - DNA, 25 bp, Homo sapien
gctgtaatacacatggcacccgagg

SEQ ID NO: 4143305 - DNA, 25 bp, Homo sapien
tgtgagaaccgagaaggacctagct

SEQ ID NO: 4143306 - DNA, 25 bp, Homo sapien
tgcattctaagccacatttagttat

SEQ ID NO: 4143307 - DNA, 25 bp, Homo sapien
ttggaacaaataggatcataacaga

SEQ ID NO: 4143308 - DNA, 25 bp, Homo sapien
gactgtgaaatcaaacaggtcactt

SEQ ID NO: 4143309 - DNA, 25 bp, Homo sapien
ggtgtctcatgagtagaaactaaaa

SEQ ID NO: 4143310 - DNA, 25 bp, Homo sapien
taagaattacgatgtggctgccaca

SEQ ID NO: 4143311 - DNA, 25 bp, Homo sapien
tagagttcaagtaggtaacagcccc

SEQ ID NO: 4143312 - DNA, 25 bp, Homo sapien
taagtgtccattgcagtaccatccc

SEQ ID NO: 4143313 - DNA, 25 bp, Homo sapien
tgacaatgatccatgcgaggcttct

SEQ ID NO: 4143314 - DNA, 25 bp, Homo sapien
gaaccaaagttgttgacagagctca

SEQ ID NO: 4143315 - DNA, 25 bp, Homo sapien
gctcctcaagggtgactcttagcaa

SEQ ID NO: 4143316 - DNA, 25 bp, Homo sapien
ctgcgttttggagagtgagtttaac

SEQ ID NO: 4143317 - DNA, 25 bp, Homo sapien
tcttagcaaatcttcagccttatga

SEQ ID NO: 4143318 - DNA, 25 bp, Homo sapien
gactgagactcctgacttggtatgc

SEQ ID NO: 4143319 - DNA, 25 bp, Homo sapien
tgtttttggagcgagaaagacctgg

SEQ ID NO: 4143320 - DNA, 25 bp, Homo sapien
tgtagtgtaacaacctatagctttg

SEQ ID NO: 4143321 - DNA, 25 bp, Homo sapien
tgtccagtggccaagtgtatgtttt

SEQ ID NO: 4143322 - DNA, 25 bp, Homo sapien
cagtgccagtgaaaacgatacagac

SEQ ID NO: 4143323 - DNA, 25 bp, Homo sapien
gggaaatacttcaccacagtgccag

SEQ ID NO: 4143324 - DNA, 25 bp, Homo sapien
ttatgaccaagatgggcagggatcc

SEQ ID NO: 4143325 - DNA, 25 bp, Homo sapien
gcagggatccacatgaagttcacag

SEQ ID NO: 4143326 - DNA, 25 bp, Homo sapien
acttcatcatgtatgtctctgggac

SEQ ID NO: 4143327 - DNA, 25 bp, Homo sapien
aatagccccttgacacttcatcatg

SEQ ID NO: 4143328 - DNA, 25 bp, Homo sapien
tctgggacccgaagttctttgatca

SEQ ID NO: 4143329 - DNA, 25 bp, Homo sapien
catgtatgtctctgggacccgaagt

SEQ ID NO: 4143330 - DNA, 25 bp, Homo sapien
gagaggggaggctgaagaccatttc

SEQ ID NO: 4143331 - DNA, 25 bp, Homo sapien
tgtttctcaaacaggcctgagaggg

SEQ ID NO: 4143332 - DNA, 25 bp, Homo sapien
tactcctgtttctcaaacaggcctg

SEQ ID NO: 4143333 - DNA, 25 bp, Homo sapien
agaggggaggctgaagaccatttct

SEQ ID NO: 4143334 - DNA, 25 bp, Homo sapien
tctggtttaatcttgggagggccta

SEQ ID NO: 4143335 - DNA, 25 bp, Homo sapien
attgcatgtcatctgagagacagtt

SEQ ID NO: 4143336 - DNA, 25 bp, Homo sapien
tggtttaatcttgggagggcctatg

SEQ ID NO: 4143337 - DNA, 25 bp, Homo sapien
tctaatttgattgcatgtcatctga

SEQ ID NO: 4143338 - DNA, 25 bp, Homo sapien
tatatgatttcttcaccctagttaa

SEQ ID NO: 4143339 - DNA, 25 bp, Homo sapien
tcttcaccctagttaagtcaatcct

SEQ ID NO: 4143340 - DNA, 25 bp, Homo sapien
ccctagttaagtcaatcctaatcat

SEQ ID NO: 4143341 - DNA, 25 bp, Homo sapien
gatttcttcaccctagttaagtcaa

SEQ ID NO: 4143342 - DNA, 25 bp, Homo sapien
gaaaagattgtttctcagatcccca

SEQ ID NO: 4143343 - DNA, 25 bp, Homo sapien
aattagggaactagcaaggtcacct

SEQ ID NO: 4143344 - DNA, 25 bp, Homo sapien
ggatggcaatatactcagaggcttt

SEQ ID NO: 4143345 - DNA, 25 bp, Homo sapien
tttaaatacaaagtggcacagcctc

SEQ ID NO: 4143346 - DNA, 25 bp, Homo sapien
aaaacaatagcattcttgctttaac

SEQ ID NO: 4143347 - DNA, 25 bp, Homo sapien
atctgtacagccgtttaaagcaaac

SEQ ID NO: 4143348 - DNA, 25 bp, Homo sapien
tgctttaaccaattcgaacaattaa

SEQ ID NO: 4143349 - DNA, 25 bp, Homo sapien
tagagaattcagtacattttttgga

SEQ ID NO: 4143350 - DNA, 25 bp, Homo sapien
agaagggccactcctcctacaagtg

SEQ ID NO: 4143351 - DNA, 25 bp, Homo sapien
tcagtgtggaggttgattttacccc

SEQ ID NO: 4143352 - DNA, 25 bp, Homo sapien
ccctaaggcaagcatcaagaagggc

SEQ ID NO: 4143353 - DNA, 25 bp, Homo sapien
gaattgtggacaaggctgattgcca

SEQ ID NO: 4143354 - DNA, 25 bp, Homo sapien
tgaaggttctcctaatagttttata

SEQ ID NO: 4143355 - DNA, 25 bp, Homo sapien
ccataatggctaaccatgttcagaa

SEQ ID NO: 4143356 - DNA, 25 bp, Homo sapien
tattgcccaacctaagatcttgaag

SEQ ID NO: 4143357 - DNA, 25 bp, Homo sapien
cattttgtggattgtccttttactt

SEQ ID NO: 4143358 - DNA, 25 bp, Homo sapien
tgaaatttcaactgcgtttacagct

SEQ ID NO: 4143359 - DNA, 25 bp, Homo sapien
caatatagtgagaagatatttctga

SEQ ID NO: 4143360 - DNA, 25 bp, Homo sapien
caactgcgtttacagctatgaaaat

SEQ ID NO: 4143361 - DNA, 25 bp, Homo sapien
gagtgtttttggcatcttgttgttt

SEQ ID NO: 4143362 - DNA, 25 bp, Homo sapien
agccacagctgttgcaggtacccag

SEQ ID NO: 4143363 - DNA, 25 bp, Homo sapien
ccacagctgttgcaggtacccaggc

SEQ ID NO: 4143364 - DNA, 25 bp, Homo sapien
ccaaatcttcacaaagccacagctg

SEQ ID NO: 4143365 - DNA, 25 bp, Homo sapien
gccacagctgttgcaggtacccagg

SEQ ID NO: 4143366 - DNA, 25 bp, Homo sapien
ctcttctttgggggggttgtcatat

SEQ ID NO: 4143367 - DNA, 25 bp, Homo sapien
tgtgaagggagagatgttctgtttc

SEQ ID NO: 4143368 - DNA, 25 bp, Homo sapien
tctcttctttgggggggttgtcata

SEQ ID NO: 4143369 - DNA, 25 bp, Homo sapien
agggagagatgttctgtttctcttc

SEQ ID NO: 4143370 - DNA, 25 bp, Homo sapien
agcattataacaagatccagaactg

SEQ ID NO: 4143371 - DNA, 25 bp, Homo sapien
tataacaagatccagaactggctgt

SEQ ID NO: 4143372 - DNA, 25 bp, Homo sapien
ttataacaagatccagaactggctg

SEQ ID NO: 4143373 - DNA, 25 bp, Homo sapien
cattataacaagatccagaactggc

SEQ ID NO: 4143374 - DNA, 25 bp, Homo sapien
tccatcagatcccacatgtgaatgg

SEQ ID NO: 4143375 - DNA, 25 bp, Homo sapien
tgtcctctgtcccattccatcagat

SEQ ID NO: 4143376 - DNA, 25 bp, Homo sapien
ccacatgtgaatggctgtgggtggc

SEQ ID NO: 4143377 - DNA, 25 bp, Homo sapien
ctgtgggtggctgaatgttacccat

SEQ ID NO: 4143378 - DNA, 25 bp, Homo sapien
gcacctccatcccttagagtgtcaa

SEQ ID NO: 4143379 - DNA, 25 bp, Homo sapien
tgaagattgctaagagggtgaatgc

SEQ ID NO: 4143380 - DNA, 25 bp, Homo sapien
gggtgaatgctgtgttctcaccaca

SEQ ID NO: 4143381 - DNA, 25 bp, Homo sapien
tgttgtcaaaacttacctgtctggt

SEQ ID NO: 4143382 - DNA, 25 bp, Homo sapien
aactggaggcaactttaatcatcat

SEQ ID NO: 4143383 - DNA, 25 bp, Homo sapien
gagatgtgcttcttgaattgatgag

SEQ ID NO: 4143384 - DNA, 25 bp, Homo sapien
tggtagggtgttattgtctgtatga

SEQ ID NO: 4143385 - DNA, 25 bp, Homo sapien
aatcatcatgtcaattaaatggtag

SEQ ID NO: 4143386 - DNA, 25 bp, Homo sapien
ctgccttgcccttttgccagtttta

SEQ ID NO: 4143387 - DNA, 25 bp, Homo sapien
cagcctgccttgcccttttgccagt

SEQ ID NO: 4143388 - DNA, 25 bp, Homo sapien
ctggctttcagcctgccttgccctt

SEQ ID NO: 4143389 - DNA, 25 bp, Homo sapien
gcctgccttgcccttttgccagttt

SEQ ID NO: 4143390 - DNA, 25 bp, Homo sapien
tatgtgaatgtcctgcaaatgactg

SEQ ID NO: 4143391 - DNA, 25 bp, Homo sapien
cctgcaaatgactggtcacagattt

SEQ ID NO: 4143392 - DNA, 25 bp, Homo sapien
tgtcctgcaaatgactggtcacaga

SEQ ID NO: 4143393 - DNA, 25 bp, Homo sapien
tgaatgtcctgcaaatgactggtca

SEQ ID NO: 4143394 - DNA, 25 bp, Homo sapien
ccttgacgtgccttgaaatatgagc

SEQ ID NO: 4143395 - DNA, 25 bp, Homo sapien
ttgcctccaccaagcctctcttcac

SEQ ID NO: 4143396 - DNA, 25 bp, Homo sapien
ttccactgttagctgcacatcatcc

SEQ ID NO: 4143397 - DNA, 25 bp, Homo sapien
ctgtgtgggcctgatctttgtgttt

SEQ ID NO: 4143398 - DNA, 25 bp, Homo sapien
tgtgcagctgcactgtaattgccat

SEQ ID NO: 4143399 - DNA, 25 bp, Homo sapien
gctgcagttcctgctatagtacagt

SEQ ID NO: 4143400 - DNA, 25 bp, Homo sapien
ttttcttcagctggtcgagagccca

SEQ ID NO: 4143401 - DNA, 25 bp, Homo sapien
tgccccgcgatggtacgctgcagtt

SEQ ID NO: 4143402 - DNA, 25 bp, Homo sapien
catggcagtaaaggggagcctggaa

SEQ ID NO: 4143403 - DNA, 25 bp, Homo sapien
aatccaagttgtgcatggcagtaaa

SEQ ID NO: 4143404 - DNA, 25 bp, Homo sapien
gcatggcagtaaaggggagcctgga

SEQ ID NO: 4143405 - DNA, 25 bp, Homo sapien
ccaagttgtgcatggcagtaaaggg

SEQ ID NO: 4143406 - DNA, 25 bp, Homo sapien
ggatcttaatcacagctcccaaagt

SEQ ID NO: 4143407 - DNA, 25 bp, Homo sapien
ttggccatagctcacttctgacagg

SEQ ID NO: 4143408 - DNA, 25 bp, Homo sapien
catgaacttaatcagcaggctctcc

SEQ ID NO: 4143409 - DNA, 25 bp, Homo sapien
tctgacaggccagtttggatcttaa

SEQ ID NO: 4143410 - DNA, 25 bp, Homo sapien
ggaagtcaacatagctagagccaac

SEQ ID NO: 4143411 - DNA, 25 bp, Homo sapien
gtggcatcaccccatgttaaagctg

SEQ ID NO: 4143412 - DNA, 25 bp, Homo sapien
tgcagagcatcttctataccctggg

SEQ ID NO: 4143413 - DNA, 25 bp, Homo sapien
cattttagaccagcacagtggcatc

SEQ ID NO: 4143414 - DNA, 25 bp, Homo sapien
gagtggaatggtacattaatcaagg

SEQ ID NO: 4143415 - DNA, 25 bp, Homo sapien
gccattccacgatgcaggcaccttg

SEQ ID NO: 4143416 - DNA, 25 bp, Homo sapien
aaatgaaggctcttgtggagtggaa

SEQ ID NO: 4143417 - DNA, 25 bp, Homo sapien
ttaatcaaggaaattggaatcctca

SEQ ID NO: 4143418 - DNA, 25 bp, Homo sapien
cttgtagtcctctttaaattgcaga

SEQ ID NO: 4143419 - DNA, 25 bp, Homo sapien
tgtagtcctctttaaattgcagaca

SEQ ID NO: 4143420 - DNA, 25 bp, Homo sapien
ttgtagtcctctttaaattgcagac

SEQ ID NO: 4143421 - DNA, 25 bp, Homo sapien
taggtcgctggcttgatcaccaact

SEQ ID NO: 4143422 - DNA, 25 bp, Homo sapien
ggcttgatcaccaacttcttggttt

SEQ ID NO: 4143423 - DNA, 25 bp, Homo sapien
tcctgctccacctaataggtcgctg

SEQ ID NO: 4143424 - DNA, 25 bp, Homo sapien
tccacctaataggtcgctggcttga

SEQ ID NO: 4143425 - DNA, 25 bp, Homo sapien
gctctaggggaatgaatgtgccaaa

SEQ ID NO: 4143426 - DNA, 25 bp, Homo sapien
tcttgctttaggtcagaactggcca

SEQ ID NO: 4143427 - DNA, 25 bp, Homo sapien
caggccatggaactgctctagggga

SEQ ID NO: 4143428 - DNA, 25 bp, Homo sapien
tataagtactagcagtcaggattcc

SEQ ID NO: 4143429 - DNA, 25 bp, Homo sapien
tgttttctcttgactacttccctgg

SEQ ID NO: 4143430 - DNA, 25 bp, Homo sapien
ctgccttctccagatgacgtggctg

SEQ ID NO: 4143431 - DNA, 25 bp, Homo sapien
ccttctccagatgacgtggctgtca

SEQ ID NO: 4143432 - DNA, 25 bp, Homo sapien
tttctcttgactacttccctggctg

SEQ ID NO: 4143433 - DNA, 25 bp, Homo sapien
gcatctgagagctgttttttgcctc

SEQ ID NO: 4143434 - DNA, 25 bp, Homo sapien
gagtccgttggattccctctagaaa

SEQ ID NO: 4143435 - DNA, 25 bp, Homo sapien
ggagagaccaccaacggcagaattg

SEQ ID NO: 4143436 - DNA, 25 bp, Homo sapien
tgcacaaagctgattggcctcaggt

SEQ ID NO: 4143437 - DNA, 25 bp, Homo sapien
ggcctgtttctgtcacgcatgcgta

SEQ ID NO: 4143438 - DNA, 25 bp, Homo sapien
tctcacaggaatcttcagccagtgt

SEQ ID NO: 4143439 - DNA, 25 bp, Homo sapien
tgagaatttacaacacaatgctggc

SEQ ID NO: 4143440 - DNA, 25 bp, Homo sapien
ccctgttagttaaatatgatgagaa

SEQ ID NO: 4143441 - DNA, 25 bp, Homo sapien
tacaacacaatgctggcatcccatg

SEQ ID NO: 4143442 - DNA, 25 bp, Homo sapien
cctcatgccagtatccttcaaggtg

SEQ ID NO: 4143443 - DNA, 25 bp, Homo sapien
tccctcatgccagtatccttcaagg

SEQ ID NO: 4143444 - DNA, 25 bp, Homo sapien
attctccctcatgccagtatccttc

SEQ ID NO: 4143445 - DNA, 25 bp, Homo sapien
catgccagtatccttcaaggtggcc

SEQ ID NO: 4143446 - DNA, 25 bp, Homo sapien
tggcttattttgccttgtttccttg

SEQ ID NO: 4143447 - DNA, 25 bp, Homo sapien
tccttgggggcaccgggaatttgca

SEQ ID NO: 4143448 - DNA, 25 bp, Homo sapien
ccttgggggcaccgggaatttgcat

SEQ ID NO: 4143449 - DNA, 25 bp, Homo sapien
ctttcgtggcttattttgccttgtt

SEQ ID NO: 4143450 - DNA, 25 bp, Homo sapien
catctcctgtgacatccagtgatgg

SEQ ID NO: 4143451 - DNA, 25 bp, Homo sapien
caaaaacctggcaacctgcatttat

SEQ ID NO: 4143452 - DNA, 25 bp, Homo sapien
ttgataaaaccaagggatggcataa

SEQ ID NO: 4143453 - DNA, 25 bp, Homo sapien
tttattgataaaaccaagggatggc

SEQ ID NO: 4143454 - DNA, 25 bp, Homo sapien
ctgcagtgcaaagaatagggacaaa

SEQ ID NO: 4143455 - DNA, 25 bp, Homo sapien
tgtgcatctggtgttcgtggtatgc

SEQ ID NO: 4143456 - DNA, 25 bp, Homo sapien
ccttgtgcatctggtgttcgtggta

SEQ ID NO: 4143457 - DNA, 25 bp, Homo sapien
gcatctggtgttcgtggtatgccag

SEQ ID NO: 4143458 - DNA, 25 bp, Homo sapien
ttccttgtgcatctggtgttcgtgg

SEQ ID NO: 4143459 - DNA, 25 bp, Homo sapien
gagggtgaggctcttcttcccaaac

SEQ ID NO: 4143460 - DNA, 25 bp, Homo sapien
tagaggttccatcaatagcatcatc

SEQ ID NO: 4143461 - DNA, 25 bp, Homo sapien
gggaatttcaatgatgctgaggcga

SEQ ID NO: 4143462 - DNA, 25 bp, Homo sapien
cagccataactgtaagtagagggaa

SEQ ID NO: 4143463 - DNA, 25 bp, Homo sapien
gctgaggcgagtgcaaagcaatcct

SEQ ID NO: 4143464 - DNA, 25 bp, Homo sapien
ccagccaactcacgtagagacctag

SEQ ID NO: 4143465 - DNA, 25 bp, Homo sapien
aatgaaaaggccagccaactcacgt

SEQ ID NO: 4143466 - DNA, 25 bp, Homo sapien
gactggagcccttgaagagttagaa

SEQ ID NO: 4143467 - DNA, 25 bp, Homo sapien
cacacagtttaatatccttgactta

SEQ ID NO: 4143468 - DNA, 25 bp, Homo sapien
aagcgttggtgttcccacgtctgca

SEQ ID NO: 4143469 - DNA, 25 bp, Homo sapien
aggaagcgttggtgttcccacgtct

SEQ ID NO: 4143470 - DNA, 25 bp, Homo sapien
tctgcaaggtgctagccaaggggta

SEQ ID NO: 4143471 - DNA, 25 bp, Homo sapien
tgaaccaagccaacttccttgtctt

SEQ ID NO: 4143472 - DNA, 25 bp, Homo sapien
gatattgatgcatttccttgcctat

SEQ ID NO: 4143473 - DNA, 25 bp, Homo sapien
actcttggatattgatgcatttcct

SEQ ID NO: 4143474 - DNA, 25 bp, Homo sapien
attgatgcatttccttgcctattca

SEQ ID NO: 4143475 - DNA, 25 bp, Homo sapien
ggatattgatgcatttccttgccta

SEQ ID NO: 4143476 - DNA, 25 bp, Homo sapien
gtaatattcacctctatgtggcagg

SEQ ID NO: 4143477 - DNA, 25 bp, Homo sapien
gcaagcattgtaatattcacctcta

SEQ ID NO: 4143478 - DNA, 25 bp, Homo sapien
gcattgtaatattcacctctatgtg

SEQ ID NO: 4143479 - DNA, 25 bp, Homo sapien
ctctacgtggcaagcattgtaatat

SEQ ID NO: 4143480 - DNA, 25 bp, Homo sapien
gaataagtagtgtaagcagctagat

SEQ ID NO: 4143481 - DNA, 25 bp, Homo sapien
gagcgtccatgaatgctcttgctag

SEQ ID NO: 4143482 - DNA, 25 bp, Homo sapien
catgattgtgtctgttggcagaggc

SEQ ID NO: 4143483 - DNA, 25 bp, Homo sapien
acctgagttggagggaaccgtgaat

SEQ ID NO: 4143484 - DNA, 25 bp, Homo sapien
ctgggaccatctgtaaggatctcac

SEQ ID NO: 4143485 - DNA, 25 bp, Homo sapien
ctatttcttgctacacatgaagctg

SEQ ID NO: 4143486 - DNA, 25 bp, Homo sapien
agctgggaccatctgtaaggatctc

SEQ ID NO: 4143487 - DNA, 25 bp, Homo sapien
atttcttgctacacatgaagctggg

SEQ ID NO: 4143488 - DNA, 25 bp, Homo sapien
gggaaaacttggatatccattacat

SEQ ID NO: 4143489 - DNA, 25 bp, Homo sapien
ttttcctgagtgataatcctcgctc

SEQ ID NO: 4143490 - DNA, 25 bp, Homo sapien
tacatacggtagaatcaaatgtctc

SEQ ID NO: 4143491 - DNA, 25 bp, Homo sapien
tttgtcaaaatgcaccgtgtgcatg

SEQ ID NO: 4143492 - DNA, 25 bp, Homo sapien
taaggcatttgagccttcaaagggc

SEQ ID NO: 4143493 - DNA, 25 bp, Homo sapien
tcccttgtgcagaaaataaggcatt

SEQ ID NO: 4143494 - DNA, 25 bp, Homo sapien
gaattgtgaccaagtggatggaatg

SEQ ID NO: 4143495 - DNA, 25 bp, Homo sapien
attgtgaccaagtggatggaatgtg

SEQ ID NO: 4143496 - DNA, 25 bp, Homo sapien
ttgtgaccaagtggatggaatgtgt

SEQ ID NO: 4143497 - DNA, 25 bp, Homo sapien
aattgtgaccaagtggatggaatgt

SEQ ID NO: 4143498 - DNA, 25 bp, Homo sapien
gttactcccgaaccagggcaagcag

SEQ ID NO: 4143499 - DNA, 25 bp, Homo sapien
ccaattcagggacatggcatctgcc

SEQ ID NO: 4143500 - DNA, 25 bp, Homo sapien
gcattccagtgttctcatagtaccc

SEQ ID NO: 4143501 - DNA, 25 bp, Homo sapien
tgcacgataatgaagctccattggt

SEQ ID NO: 4143502 - DNA, 25 bp, Homo sapien
cagtcctagagcatggcctggccct

SEQ ID NO: 4143503 - DNA, 25 bp, Homo sapien
ccagtcctagagcatggcctggccc

SEQ ID NO: 4143504 - DNA, 25 bp, Homo sapien
ctccagtcctagagcatggcctggc

SEQ ID NO: 4143505 - DNA, 25 bp, Homo sapien
tccagtcctagagcatggcctggcc

SEQ ID NO: 4143506 - DNA, 25 bp, Homo sapien
caagtaaaccacaggttacatccag

SEQ ID NO: 4143507 - DNA, 25 bp, Homo sapien
taactcctctagagtttgcctcctt

SEQ ID NO: 4143508 - DNA, 25 bp, Homo sapien
cagaaaaggaaagcgtgatgacgag

SEQ ID NO: 4143509 - DNA, 25 bp, Homo sapien
gagactctgctgaaactctatcaag

SEQ ID NO: 4143510 - DNA, 25 bp, Homo sapien
tgaggaatgatccagctctgtatca

SEQ ID NO: 4143511 - DNA, 25 bp, Homo sapien
cacgttggaaggcacctcctcacgg

SEQ ID NO: 4143512 - DNA, 25 bp, Homo sapien
ggaaacttatgatcacgttggaagg

SEQ ID NO: 4143513 - DNA, 25 bp, Homo sapien
cacaggaaagcctcccataatgagg

SEQ ID NO: 4143514 - DNA, 25 bp, Homo sapien
cctttggtggcctgcattaatcata

SEQ ID NO: 4143515 - DNA, 25 bp, Homo sapien
cagagactcaattatgccgtcagga

SEQ ID NO: 4143516 - DNA, 25 bp, Homo sapien
tcctccaagcgatttctcctttgag

SEQ ID NO: 4143517 - DNA, 25 bp, Homo sapien
gggcaatccgagaccacctttggtg

SEQ ID NO: 4143518 - DNA, 25 bp, Homo sapien
cagcaaaccgctgcttacagtgcat

SEQ ID NO: 4143519 - DNA, 25 bp, Homo sapien
tacagcaaaccgctgcttacagtgc

SEQ ID NO: 4143520 - DNA, 25 bp, Homo sapien
ctgttggaccactacagcaaaccgc

SEQ ID NO: 4143521 - DNA, 25 bp, Homo sapien
ggaccactacagcaaaccgctgctt

SEQ ID NO: 4143522 - DNA, 25 bp, Homo sapien
ggagctgtggttgggtcggccgtag

SEQ ID NO: 4143523 - DNA, 25 bp, Homo sapien
gctgtggttgggtcggccgtagccc

SEQ ID NO: 4143524 - DNA, 25 bp, Homo sapien
ttactgcctagctgagccaaaatgt

SEQ ID NO: 4143525 - DNA, 25 bp, Homo sapien
ggattactgcctagctgagccaaaa

SEQ ID NO: 4143526 - DNA, 25 bp, Homo sapien
tgaatagtagatggaatggggggac

SEQ ID NO: 4143527 - DNA, 25 bp, Homo sapien
ctgaatagtagatggaatgggggga

SEQ ID NO: 4143528 - DNA, 25 bp, Homo sapien
tagatggaatggggggacagtgtgc

SEQ ID NO: 4143529 - DNA, 25 bp, Homo sapien
tagtagatggaatggggggacagtg

SEQ ID NO: 4143530 - DNA, 25 bp, Homo sapien
aaatctcattgaaggcaatgccatc

SEQ ID NO: 4143531 - DNA, 25 bp, Homo sapien
gcatctttcgtgttgtctcgtctga

SEQ ID NO: 4143532 - DNA, 25 bp, Homo sapien
gacagtcaggttcgtgatcatcacc

SEQ ID NO: 4143533 - DNA, 25 bp, Homo sapien
cagctttgctcaattactacgagga

SEQ ID NO: 4143534 - DNA, 25 bp, Homo sapien
taatgatctatgtctcgggtatgga

SEQ ID NO: 4143535 - DNA, 25 bp, Homo sapien
cgggtatggagaacattcagtcagc

SEQ ID NO: 4143536 - DNA, 25 bp, Homo sapien
tcagtcagccagacgctgaaagcca

SEQ ID NO: 4143537 - DNA, 25 bp, Homo sapien
tccacaaggtgttccggaagtgagg

SEQ ID NO: 4143538 - DNA, 25 bp, Homo sapien
gggctttgctaacctcccttatgct

SEQ ID NO: 4143539 - DNA, 25 bp, Homo sapien
tgtgactatacctttcctatgagga

SEQ ID NO: 4143540 - DNA, 25 bp, Homo sapien
taaattcccagtgctcatcatgagg

SEQ ID NO: 4143541 - DNA, 25 bp, Homo sapien
aactggtgtcttaccccaaatcaga

SEQ ID NO: 4143542 - DNA, 25 bp, Homo sapien
gaactcgctgaacacggtgagctcg

SEQ ID NO: 4143543 - DNA, 25 bp, Homo sapien
gaagcaggcacgacctttggtgagt

SEQ ID NO: 4143544 - DNA, 25 bp, Homo sapien
ggcttcgtcatcgtgtcctcggtga

SEQ ID NO: 4143545 - DNA, 25 bp, Homo sapien
tggtgcagccctacgacgtggagat

SEQ ID NO: 4143546 - DNA, 25 bp, Homo sapien
tatctatgaagccaagatggcggtc

SEQ ID NO: 4143547 - DNA, 25 bp, Homo sapien
tcgatgttgacacctggaagctaag

SEQ ID NO: 4143548 - DNA, 25 bp, Homo sapien
gacaatgtgaacgtgcatccaaggt

SEQ ID NO: 4143549 - DNA, 25 bp, Homo sapien
tgtcatgaaccccacatagggcggg

SEQ ID NO: 4143550 - DNA, 25 bp, Homo sapien
taggagagcaatgtttcatccatcg

SEQ ID NO: 4143551 - DNA, 25 bp, Homo sapien
caataaatgtttgcggcatgcctgc

SEQ ID NO: 4143552 - DNA, 25 bp, Homo sapien
tattggtcacatcgtaccactgggt

SEQ ID NO: 4143553 - DNA, 25 bp, Homo sapien
actgggtgctgctgatactgacggc

SEQ ID NO: 4143554 - DNA, 25 bp, Homo sapien
taagctctcctccttttggtgatcc

SEQ ID NO: 4143555 - DNA, 25 bp, Homo sapien
tagagatgtggtgcatggatatcct

SEQ ID NO: 4143556 - DNA, 25 bp, Homo sapien
agagatgtggtgcatggatatcctt

SEQ ID NO: 4143557 - DNA, 25 bp, Homo sapien
agtagagatgtggtgcatggatatc

SEQ ID NO: 4143558 - DNA, 25 bp, Homo sapien
cgctcttggcagataagtgaactgt

SEQ ID NO: 4143559 - DNA, 25 bp, Homo sapien
tcagcacttggagtttttcctgttg

SEQ ID NO: 4143560 - DNA, 25 bp, Homo sapien
tcctgttgtccatgtaaatcgctgc

SEQ ID NO: 4143561 - DNA, 25 bp, Homo sapien
tgtaaatcgctgcagtagccttcgc

SEQ ID NO: 4143562 - DNA, 25 bp, Homo sapien
tggaagaaatcgtttgacttagacc

SEQ ID NO: 4143563 - DNA, 25 bp, Homo sapien
gaagaaatcgtttgacttagaccca

SEQ ID NO: 4143564 - DNA, 25 bp, Homo sapien
ttggaagaaatcgtttgacttagac

SEQ ID NO: 4143565 - DNA, 25 bp, Homo sapien
tttggaagaaatcgtttgacttaga

SEQ ID NO: 4143566 - DNA, 25 bp, Homo sapien
ttttccctgatgccacttgtgtgac

SEQ ID NO: 4143567 - DNA, 25 bp, Homo sapien
acacagttgtgtggcacctgtcttc

SEQ ID NO: 4143568 - DNA, 25 bp, Homo sapien
ctcagactcacacagttgtgtggca

SEQ ID NO: 4143569 - DNA, 25 bp, Homo sapien
gactcacacagttgtgtggcacctg

SEQ ID NO: 4143570 - DNA, 25 bp, Homo sapien
catggaagcaagtacgcacataatg

SEQ ID NO: 4143571 - DNA, 25 bp, Homo sapien
tgccaacacccacgattgaataagt

SEQ ID NO: 4143572 - DNA, 25 bp, Homo sapien
tggagtactttggagttccccagca

SEQ ID NO: 4143573 - DNA, 25 bp, Homo sapien
tacaaagatcctcacctcataggga

SEQ ID NO: 4143574 - DNA, 25 bp, Homo sapien
tctcagtctaaatcacccacaagga

SEQ ID NO: 4143575 - DNA, 25 bp, Homo sapien
tcaggttttagacctctctgggaaa

SEQ ID NO: 4143576 - DNA, 25 bp, Homo sapien
taagtcagtatccaccgttttcgta

SEQ ID NO: 4143577 - DNA, 25 bp, Homo sapien
tctgtggcccaacttaatcatcctg

SEQ ID NO: 4143578 - DNA, 25 bp, Homo sapien
ctgtgatcagtgagagttctgtaca

SEQ ID NO: 4143579 - DNA, 25 bp, Homo sapien
aatttgggagctgtcggccaagggc

SEQ ID NO: 4143580 - DNA, 25 bp, Homo sapien
taaagtgctgctaacatctgtgatc

SEQ ID NO: 4143581 - DNA, 25 bp, Homo sapien
ccaagggctgctgttggatgtaaag

SEQ ID NO: 4143582 - DNA, 25 bp, Homo sapien
atttctgtgccaggacagggttgag

SEQ ID NO: 4143583 - DNA, 25 bp, Homo sapien
agggttgagggttttcacagcattg

SEQ ID NO: 4143584 - DNA, 25 bp, Homo sapien
ttttcacagcattgctggcacacac

SEQ ID NO: 4143585 - DNA, 25 bp, Homo sapien
ttgagggttttcacagcattgctgg

SEQ ID NO: 4143586 - DNA, 25 bp, Homo sapien
agctgaattctttccacctgtctcc

SEQ ID NO: 4143587 - DNA, 25 bp, Homo sapien
ctgcagctgaattctttccacctgt

SEQ ID NO: 4143588 - DNA, 25 bp, Homo sapien
ggcgctgcagctgaattctttccac

SEQ ID NO: 4143589 - DNA, 25 bp, Homo sapien
gcagctgaattctttccacctgtct

SEQ ID NO: 4143590 - DNA, 25 bp, Homo sapien
ctggtgttcccagccgttcacatgt

SEQ ID NO: 4143591 - DNA, 25 bp, Homo sapien
aactggtgttcccagccgttcacat

SEQ ID NO: 4143592 - DNA, 25 bp, Homo sapien
cgtgagtagcattgctctcaactgg

SEQ ID NO: 4143593 - DNA, 25 bp, Homo sapien
ctgctccgtgagtagcattgctctc

SEQ ID NO: 4143594 - DNA, 25 bp, Homo sapien
caagtgttcaatttcccaggccgct

SEQ ID NO: 4143595 - DNA, 25 bp, Homo sapien
gatatgaacagcctggtaactccga

SEQ ID NO: 4143596 - DNA, 25 bp, Homo sapien
taactctgcagatggctaggttgcc

SEQ ID NO: 4143597 - DNA, 25 bp, Homo sapien
gccgctgaggtctgtgaatttcttt

SEQ ID NO: 4143598 - DNA, 25 bp, Homo sapien
cgttgtgaatgcacctttgaatgtg

SEQ ID NO: 4143599 - DNA, 25 bp, Homo sapien
agctttgtaggttggctgccccaca

SEQ ID NO: 4143600 - DNA, 25 bp, Homo sapien
accaacaatattgcactgaacatcg

SEQ ID NO: 4143601 - DNA, 25 bp, Homo sapien
ctagctttgtaggttggctgcccca

SEQ ID NO: 4143602 - DNA, 25 bp, Homo sapien
gaacatatccatttgctggagtggg

SEQ ID NO: 4143603 - DNA, 25 bp, Homo sapien
gatatgaagctatccttacctgaag

SEQ ID NO: 4143604 - DNA, 25 bp, Homo sapien
agaggcattgaacccagtgctgtaa

SEQ ID NO: 4143605 - DNA, 25 bp, Homo sapien
aagagattcatggatttgccctaag

SEQ ID NO: 4143606 - DNA, 25 bp, Homo sapien
catcatctcaaaatcccagtaactg

SEQ ID NO: 4143607 - DNA, 25 bp, Homo sapien
caaaatcccagtaactggcaacttt

SEQ ID NO: 4143608 - DNA, 25 bp, Homo sapien
ttcaccatcatctcaaaatcccagt

SEQ ID NO: 4143609 - DNA, 25 bp, Homo sapien
atctcaaaatcccagtaactggcaa

SEQ ID NO: 4143610 - DNA, 25 bp, Homo sapien
catgaatgtgcaggcctgttgtgga

SEQ ID NO: 4143611 - DNA, 25 bp, Homo sapien
atcaagaaaggcaatgatatcatac

SEQ ID NO: 4143612 - DNA, 25 bp, Homo sapien
gaaaggcaatgatatcatacatgaa

SEQ ID NO: 4143613 - DNA, 25 bp, Homo sapien
aatgtgcaggcctgttgtggatcca

SEQ ID NO: 4143614 - DNA, 25 bp, Homo sapien
cctctgctaagaacagctggactaa

SEQ ID NO: 4143615 - DNA, 25 bp, Homo sapien
taaagttaccaactggtccatgggc

SEQ ID NO: 4143616 - DNA, 25 bp, Homo sapien
tgaatgcatttagctggagccaaca

SEQ ID NO: 4143617 - DNA, 25 bp, Homo sapien
cggtgacagtcaaaaacatctccag

SEQ ID NO: 4143618 - DNA, 25 bp, Homo sapien
gtacggaggatggacaacagtctgc

SEQ ID NO: 4143619 - DNA, 25 bp, Homo sapien
gtcagtaatatgtagtctgagtctg

SEQ ID NO: 4143620 - DNA, 25 bp, Homo sapien
agtaatatgtagtctgagtctgtgc

SEQ ID NO: 4143621 - DNA, 25 bp, Homo sapien
cagtttgtcattttgggccagacag

SEQ ID NO: 4143622 - DNA, 25 bp, Homo sapien
ctagtagtaatagccacaagcctct

SEQ ID NO: 4143623 - DNA, 25 bp, Homo sapien
agtaatagccacaagcctctttcca

SEQ ID NO: 4143624 - DNA, 25 bp, Homo sapien
cctctttccatttgacccattcttg

SEQ ID NO: 4143625 - DNA, 25 bp, Homo sapien
ggactgaggatattgtttgtgcaca

SEQ ID NO: 4143626 - DNA, 25 bp, Homo sapien
tatttatttgaggctttcctattta

SEQ ID NO: 4143627 - DNA, 25 bp, Homo sapien
ctatttatttgaggctttcctattt

SEQ ID NO: 4143628 - DNA, 25 bp, Homo sapien
gattcattgcactccctctttgcag

SEQ ID NO: 4143629 - DNA, 25 bp, Homo sapien
tatggatagggatgactcaaaagac

SEQ ID NO: 4143630 - DNA, 25 bp, Homo sapien
gggttagtctgtgtaaactgtgcag

SEQ ID NO: 4143631 - DNA, 25 bp, Homo sapien
tgagagataccacagcgttcttgtg

SEQ ID NO: 4143632 - DNA, 25 bp, Homo sapien
ggcatgtgccatcttgtgaggctaa

SEQ ID NO: 4143633 - DNA, 25 bp, Homo sapien
cttctcttgatacagggtcctgctc

SEQ ID NO: 4143634 - DNA, 25 bp, Homo sapien
tctgatatacaaccagagttgcaaa

SEQ ID NO: 4143635 - DNA, 25 bp, Homo sapien
catcttgtgaggctaatctctttta

SEQ ID NO: 4143636 - DNA, 25 bp, Homo sapien
tcagaactggcctcgatgattgagt

SEQ ID NO: 4143637 - DNA, 25 bp, Homo sapien
tcctctcttgccacactgaagagct

SEQ ID NO: 4143638 - DNA, 25 bp, Homo sapien
ggtgaaatctgagcgctgacaccct

SEQ ID NO: 4143639 - DNA, 25 bp, Homo sapien
gacaccctcgtgtggtcagaactgg

SEQ ID NO: 4143640 - DNA, 25 bp, Homo sapien
gaaggctacactgggcactgagcgt

SEQ ID NO: 4143641 - DNA, 25 bp, Homo sapien
ttagtacctaacatgtgcagaaggc

SEQ ID NO: 4143642 - DNA, 25 bp, Homo sapien
tgaagcttataggagccacttgccc

SEQ ID NO: 4143643 - DNA, 25 bp, Homo sapien
cactgagcgtattgtggtactgaaa

SEQ ID NO: 4143644 - DNA, 25 bp, Homo sapien
cttaggaggcatgaccaagatgttt

SEQ ID NO: 4143645 - DNA, 25 bp, Homo sapien
taaatgacatagactattgtgttgg

SEQ ID NO: 4143646 - DNA, 25 bp, Homo sapien
aaagtccttctaacttaggaggcat

SEQ ID NO: 4143647 - DNA, 25 bp, Homo sapien
gactattgtgttggtatttatctga

SEQ ID NO: 4143648 - DNA, 25 bp, Homo sapien
gattaccattcacctggacactatg

SEQ ID NO: 4143649 - DNA, 25 bp, Homo sapien
tgtttgtaatagaaatctcactgct

SEQ ID NO: 4143650 - DNA, 25 bp, Homo sapien
gacactatggtaaccacccaactgg

SEQ ID NO: 4143651 - DNA, 25 bp, Homo sapien
tgttctatggactatgctgtagctc

SEQ ID NO: 4143652 - DNA, 25 bp, Homo sapien
taagtgctaggatacttacctatga

SEQ ID NO: 4143653 - DNA, 25 bp, Homo sapien
gctaggatacttacctatgacatgc

SEQ ID NO: 4143654 - DNA, 25 bp, Homo sapien
tacttacctatgacatgcaggtttg

SEQ ID NO: 4143655 - DNA, 25 bp, Homo sapien
tattttaagtgctaggatacttacc

SEQ ID NO: 4143656 - DNA, 25 bp, Homo sapien
tcgaacagagaaacgagtctgctct

SEQ ID NO: 4143657 - DNA, 25 bp, Homo sapien
actatagttggtatgtttgtcttag

SEQ ID NO: 4143658 - DNA, 25 bp, Homo sapien
gttggtttgtatgactgcttgacta

SEQ ID NO: 4143659 - DNA, 25 bp, Homo sapien
cctgtccgtctggtgtggatattaa

SEQ ID NO: 4143660 - DNA, 25 bp, Homo sapien
tctgtttgccggtgttagtatgtgt

SEQ ID NO: 4143661 - DNA, 25 bp, Homo sapien
tttgatggtagttgctacgtgtgtc

SEQ ID NO: 4143662 - DNA, 25 bp, Homo sapien
tgatggtacttgatatgtgtgcctg

SEQ ID NO: 4143663 - DNA, 25 bp, Homo sapien
tgacagtagttggtatgtgtttcca

SEQ ID NO: 4143664 - DNA, 25 bp, Homo sapien
gcaatattgtgcagaagaggttttc

SEQ ID NO: 4143665 - DNA, 25 bp, Homo sapien
tcttggtcccagagaacacggtatc

SEQ ID NO: 4143666 - DNA, 25 bp, Homo sapien
gaggttttctctttgacagtagctg

SEQ ID NO: 4143667 - DNA, 25 bp, Homo sapien
cacggtatccatttcagatggttgc

SEQ ID NO: 4143668 - DNA, 25 bp, Homo sapien
ctcccatgagcaaaaggcagagaac

SEQ ID NO: 4143669 - DNA, 25 bp, Homo sapien
tcccatgagcaaaaggcagagaaca

SEQ ID NO: 4143670 - DNA, 25 bp, Homo sapien
cactcccatgagcaaaaggcagaga

SEQ ID NO: 4143671 - DNA, 25 bp, Homo sapien
ccatgagcaaaaggcagagaacagg

SEQ ID NO: 4143672 - DNA, 25 bp, Homo sapien
ccatctggactaatcactgagcagt

SEQ ID NO: 4143673 - DNA, 25 bp, Homo sapien
cgaatgtagtagttcccatctggac

SEQ ID NO: 4143674 - DNA, 25 bp, Homo sapien
tgactttgtaccagatgggtttcac

SEQ ID NO: 4143675 - DNA, 25 bp, Homo sapien
tagtagaaaacccacccacattggc

SEQ ID NO: 4143676 - DNA, 25 bp, Homo sapien
taaatagattcccttaggactgtgc

SEQ ID NO: 4143677 - DNA, 25 bp, Homo sapien
tctgtgttggaattgacatggattc

SEQ ID NO: 4143678 - DNA, 25 bp, Homo sapien
tgcctctggttgtgtcctttacccg

SEQ ID NO: 4143679 - DNA, 25 bp, Homo sapien
ttctgacctcaggatttatatcctg

SEQ ID NO: 4143680 - DNA, 25 bp, Homo sapien
tgcacaaggttttgcccagagcagg

SEQ ID NO: 4143681 - DNA, 25 bp, Homo sapien
ggaatcacctatattgcctgcatgg

SEQ ID NO: 4143682 - DNA, 25 bp, Homo sapien
ccagagcaggcgctaaacaggtgta

SEQ ID NO: 4143683 - DNA, 25 bp, Homo sapien
ctgcatggatataacaagggctttc

SEQ ID NO: 4143684 - DNA, 25 bp, Homo sapien
tggtccatgggagtgcagtttatag

SEQ ID NO: 4143685 - DNA, 25 bp, Homo sapien
tgttcaaacactaagagctggtcca

SEQ ID NO: 4143686 - DNA, 25 bp, Homo sapien
tatcttttggtagtggtgttggcag

SEQ ID NO: 4143687 - DNA, 25 bp, Homo sapien
agtgagaaggtgattgtacttgaac

SEQ ID NO: 4143688 - DNA, 25 bp, Homo sapien
aattccagcattggcctcctgaaaa

SEQ ID NO: 4143689 - DNA, 25 bp, Homo sapien
ccagcattggcctcctgaaaaccat

SEQ ID NO: 4143690 - DNA, 25 bp, Homo sapien
ttccagcattggcctcctgaaaacc

SEQ ID NO: 4143691 - DNA, 25 bp, Homo sapien
caattccagcattggcctcctgaaa

SEQ ID NO: 4143692 - DNA, 25 bp, Homo sapien
cacagcaatagttagggatctcggg

SEQ ID NO: 4143693 - DNA, 25 bp, Homo sapien
tgagcacgtttaagataggccagcc

SEQ ID NO: 4143694 - DNA, 25 bp, Homo sapien
tagcaaagtcttgggcccagcaata

SEQ ID NO: 4143695 - DNA, 25 bp, Homo sapien
gaggagcatctgtatcccaatggca

SEQ ID NO: 4143696 - DNA, 25 bp, Homo sapien
taaggaaagccggagaataggctct

SEQ ID NO: 4143697 - DNA, 25 bp, Homo sapien
catcgttacaggagttgaaagcatc

SEQ ID NO: 4143698 - DNA, 25 bp, Homo sapien
tctttggtaggcagatgagccagcg

SEQ ID NO: 4143699 - DNA, 25 bp, Homo sapien
aataaaggagcatagagtttccggc

SEQ ID NO: 4143700 - DNA, 25 bp, Homo sapien
gtgttggtaaatgtatgttgctgca

SEQ ID NO: 4143701 - DNA, 25 bp, Homo sapien
tgcatattaataggctccagcaggt

SEQ ID NO: 4143702 - DNA, 25 bp, Homo sapien
gtccccgtgcatattaataggctcc

SEQ ID NO: 4143703 - DNA, 25 bp, Homo sapien
gcaggtgttggtaaatgtatgttgc

SEQ ID NO: 4143704 - DNA, 25 bp, Homo sapien
agtgtgctcgtcagcccgggctttt

SEQ ID NO: 4143705 - DNA, 25 bp, Homo sapien
tggagcagatgcctggcgaacaatg

SEQ ID NO: 4143706 - DNA, 25 bp, Homo sapien
taatgaagtgcattccaaagtgtgc

SEQ ID NO: 4143707 - DNA, 25 bp, Homo sapien
gcaggttggaatcgggcagctaaat

SEQ ID NO: 4143708 - DNA, 25 bp, Homo sapien
caccaggcaggcccgtttggccagg

SEQ ID NO: 4143709 - DNA, 25 bp, Homo sapien
ggctgcgttttaattcaccaggcag

SEQ ID NO: 4143710 - DNA, 25 bp, Homo sapien
ggtgaagatgccgtgtgtggtgtgt

SEQ ID NO: 4143711 - DNA, 25 bp, Homo sapien
gggccagatggctgcggctgcgttt

SEQ ID NO: 4143712 - DNA, 25 bp, Homo sapien
ctgccaccggaggtttgagcttggg

SEQ ID NO: 4143713 - DNA, 25 bp, Homo sapien
tctggattcgaacgctccgctgccg

SEQ ID NO: 4143714 - DNA, 25 bp, Homo sapien
ccaccggaggtttgagcttgggttg

SEQ ID NO: 4143715 - DNA, 25 bp, Homo sapien
gattcgaacgctccgctgccggagg

SEQ ID NO: 4143716 - DNA, 25 bp, Homo sapien
tcctcctgtccaagttgtagtaatg

SEQ ID NO: 4143717 - DNA, 25 bp, Homo sapien
ccagaaagaggtatgcccttgcttc

SEQ ID NO: 4143718 - DNA, 25 bp, Homo sapien
ggatgcttgcacgtgactctgtagc

SEQ ID NO: 4143719 - DNA, 25 bp, Homo sapien
tctcagaacatcttgcagccccttt

SEQ ID NO: 4143720 - DNA, 25 bp, Homo sapien
tcccgcacccgtaaagcctgctttg

SEQ ID NO: 4143721 - DNA, 25 bp, Homo sapien
ctttctcccgcacccgtaaagcctg

SEQ ID NO: 4143722 - DNA, 25 bp, Homo sapien
ctgctttgccatcctatgatccacc

SEQ ID NO: 4143723 - DNA, 25 bp, Homo sapien
tcctatgatccacccatttgtaatc

SEQ ID NO: 4143724 - DNA, 25 bp, Homo sapien
aatccagccgatactgcattcgaag

SEQ ID NO: 4143725 - DNA, 25 bp, Homo sapien
cattcgaaggaaagatctgtgctgc

SEQ ID NO: 4143726 - DNA, 25 bp, Homo sapien
tcatctgctatgaaatccagccgat

SEQ ID NO: 4143727 - DNA, 25 bp, Homo sapien
tctgtgctgccttgttatctaaatg

SEQ ID NO: 4143728 - DNA, 25 bp, Homo sapien
ttattgccaactgttaggctctcca

SEQ ID NO: 4143729 - DNA, 25 bp, Homo sapien
ccaactgttaggctctccatcattg

SEQ ID NO: 4143730 - DNA, 25 bp, Homo sapien
taggctctccatcattgagtttgtc

SEQ ID NO: 4143731 - DNA, 25 bp, Homo sapien
aactgttaggctctccatcattgag

SEQ ID NO: 4143732 - DNA, 25 bp, Homo sapien
tgagatatgtttcctatataagtaa

SEQ ID NO: 4143733 - DNA, 25 bp, Homo sapien
taccctgcacaaagtaggactcgcc

SEQ ID NO: 4143734 - DNA, 25 bp, Homo sapien
tgtttcctagagcagttgcaattga

SEQ ID NO: 4143735 - DNA, 25 bp, Homo sapien
cctatataagtaatctaccattgaa

SEQ ID NO: 4143736 - DNA, 25 bp, Homo sapien
tctgtctgatcccagggaagcgtgc

SEQ ID NO: 4143737 - DNA, 25 bp, Homo sapien
ctgatcccagggaagcgtgcattca

SEQ ID NO: 4143738 - DNA, 25 bp, Homo sapien
tctgatcccagggaagcgtgcattc

SEQ ID NO: 4143739 - DNA, 25 bp, Homo sapien
tgtctgatcccagggaagcgtgcat

SEQ ID NO: 4143740 - DNA, 25 bp, Homo sapien
ctgtgttcaggttgtgttggacact

SEQ ID NO: 4143741 - DNA, 25 bp, Homo sapien
ggtggaatgcttccggtcataactc

SEQ ID NO: 4143742 - DNA, 25 bp, Homo sapien
gacactggtggaatgcttccggtca

SEQ ID NO: 4143743 - DNA, 25 bp, Homo sapien
gttggacactggtggaatgcttccg

SEQ ID NO: 4143744 - DNA, 25 bp, Homo sapien
ctatactgctgctgtcaaaacgaga

SEQ ID NO: 4143745 - DNA, 25 bp, Homo sapien
atgctgtacaatgcccctcccattc

SEQ ID NO: 4143746 - DNA, 25 bp, Homo sapien
gatacaactcatccagtagttctgg

SEQ ID NO: 4143747 - DNA, 25 bp, Homo sapien
tcaaaacgagatacaactcatccag

SEQ ID NO: 4143748 - DNA, 25 bp, Homo sapien
tgtgacaacatctgagattcttgct

SEQ ID NO: 4143749 - DNA, 25 bp, Homo sapien
tcttgtcctagctgatgtgacaaca

SEQ ID NO: 4143750 - DNA, 25 bp, Homo sapien
tcttgctttggaatggccgcttttc

SEQ ID NO: 4143751 - DNA, 25 bp, Homo sapien
gttttatgacttcttgtcctagctg

SEQ ID NO: 4143752 - DNA, 25 bp, Homo sapien
tctatggcccatgtgactgagaaag

SEQ ID NO: 4143753 - DNA, 25 bp, Homo sapien
gaaatgggctcgtgtaatctgtata

SEQ ID NO: 4143754 - DNA, 25 bp, Homo sapien
ggtattttgaacagaggtgacctca

SEQ ID NO: 4143755 - DNA, 25 bp, Homo sapien
gctaatggattaggaagccgtggat

SEQ ID NO: 4143756 - DNA, 25 bp, Homo sapien
tcatgagctccagcagaccataagg

SEQ ID NO: 4143757 - DNA, 25 bp, Homo sapien
cagaaggggtctcctgatcatgagc

SEQ ID NO: 4143758 - DNA, 25 bp, Homo sapien
cataagggataacctttaccgccat

SEQ ID NO: 4143759 - DNA, 25 bp, Homo sapien
ttctcaatcagcgattccagaaggg

SEQ ID NO: 4143760 - DNA, 25 bp, Homo sapien
tctgcatgtgtgttgaggtaccccg

SEQ ID NO: 4143761 - DNA, 25 bp, Homo sapien
tgtgttgaggtaccccgtgtctgga

SEQ ID NO: 4143762 - DNA, 25 bp, Homo sapien
tgaggtaccccgtgtctggagtcat

SEQ ID NO: 4143763 - DNA, 25 bp, Homo sapien
catgtgtgttgaggtaccccgtgtc

SEQ ID NO: 4143764 - DNA, 25 bp, Homo sapien
aacaggtttctatgtagctggagcc

SEQ ID NO: 4143765 - DNA, 25 bp, Homo sapien
attacttctaagctgattagctggg

SEQ ID NO: 4143766 - DNA, 25 bp, Homo sapien
agaagcacagccgaattaattttgg

SEQ ID NO: 4143767 - DNA, 25 bp, Homo sapien
ggagctttgtcgctttttctgagaa

SEQ ID NO: 4143768 - DNA, 25 bp, Homo sapien
ttctccgctctacgtctctgtctgt

SEQ ID NO: 4143769 - DNA, 25 bp, Homo sapien
cactgttttttctccgctctacgtc

SEQ ID NO: 4143770 - DNA, 25 bp, Homo sapien
tttttctccgctctacgtctctgtc

SEQ ID NO: 4143771 - DNA, 25 bp, Homo sapien
gttttttctccgctctacgtctctg

SEQ ID NO: 4143772 - DNA, 25 bp, Homo sapien
tcccagtgggataattgtaggtatg

SEQ ID NO: 4143773 - DNA, 25 bp, Homo sapien
gaaagggtattgaagcgcagcgctc

SEQ ID NO: 4143774 - DNA, 25 bp, Homo sapien
catctagtttgggatggatgttttc

SEQ ID NO: 4143775 - DNA, 25 bp, Homo sapien
aggtatgtctgaaggcttcatctag

SEQ ID NO: 4143776 - DNA, 25 bp, Homo sapien
gaatcggccaccgtggaattctgat

SEQ ID NO: 4143777 - DNA, 25 bp, Homo sapien
ccaggaatcggccaccgtggaattc

SEQ ID NO: 4143778 - DNA, 25 bp, Homo sapien
tttctcccaggaatcggccaccgtg

SEQ ID NO: 4143779 - DNA, 25 bp, Homo sapien
tcggccaccgtggaattctgatgaa

SEQ ID NO: 4143780 - DNA, 25 bp, Homo sapien
cattgcaggtaaagacctttgttat

SEQ ID NO: 4143781 - DNA, 25 bp, Homo sapien
ttctgtagtccataatgtctatggc

SEQ ID NO: 4143782 - DNA, 25 bp, Homo sapien
caagattgtaaactcattgcaggta

SEQ ID NO: 4143783 - DNA, 25 bp, Homo sapien
tgtctatggctatgtcagacatatt

SEQ ID NO: 4143784 - DNA, 25 bp, Homo sapien
agtctatcacgggtcagcttttggc

SEQ ID NO: 4143785 - DNA, 25 bp, Homo sapien
ggatttccttatgaggattggagtt

SEQ ID NO: 4143786 - DNA, 25 bp, Homo sapien
gcttttggccagatttccttatgag

SEQ ID NO: 4143787 - DNA, 25 bp, Homo sapien
ctatggtgaactgattgtaagtcta

SEQ ID NO: 4143788 - DNA, 25 bp, Homo sapien
tcgcagaacctgtcataacacatac

SEQ ID NO: 4143789 - DNA, 25 bp, Homo sapien
ctgtcataacacatacattgagaaa

SEQ ID NO: 4143790 - DNA, 25 bp, Homo sapien
cttcgcagaacctgtcataacacat

SEQ ID NO: 4143791 - DNA, 25 bp, Homo sapien
acctgtcataacacatacattgaga

SEQ ID NO: 4143792 - DNA, 25 bp, Homo sapien
agtgcagctctggaatatcaatgga

SEQ ID NO: 4143793 - DNA, 25 bp, Homo sapien
ttatcttacgagatacagcagagcc

SEQ ID NO: 4143794 - DNA, 25 bp, Homo sapien
tctgattcctttatcttacgagata

SEQ ID NO: 4143795 - DNA, 25 bp, Homo sapien
cagctctggaatatcaatggagccc

SEQ ID NO: 4143796 - DNA, 25 bp, Homo sapien
agtcgtgggccttgagtcacaggca

SEQ ID NO: 4143797 - DNA, 25 bp, Homo sapien
gatgctccctgtatctggttctgtg

SEQ ID NO: 4143798 - DNA, 25 bp, Homo sapien
acaggcagcgtgcagaacctcctga

SEQ ID NO: 4143799 - DNA, 25 bp, Homo sapien
gtgccctggactgccgttctccttt

SEQ ID NO: 4143800 - DNA, 25 bp, Homo sapien
ctgccagagatggtgccgtatagct

SEQ ID NO: 4143801 - DNA, 25 bp, Homo sapien
tggtgccgtatagcttgtcgaagac

SEQ ID NO: 4143802 - DNA, 25 bp, Homo sapien
gccagagatggtgccgtatagcttg

SEQ ID NO: 4143803 - DNA, 25 bp, Homo sapien
atagcttgtcgaagacctgctgagg

SEQ ID NO: 4143804 - DNA, 25 bp, Homo sapien
cctctgagtacgctaaaagctaacc

SEQ ID NO: 4143805 - DNA, 25 bp, Homo sapien
tttttcctctgagtacgctaaaagc

SEQ ID NO: 4143806 - DNA, 25 bp, Homo sapien
ttcctctgagtacgctaaaagctaa

SEQ ID NO: 4143807 - DNA, 25 bp, Homo sapien
tttcctctgagtacgctaaaagcta

SEQ ID NO: 4143808 - DNA, 25 bp, Homo sapien
tcaggtgttggcttgacccagggga

SEQ ID NO: 4143809 - DNA, 25 bp, Homo sapien
ttgcatcaggtgttggcttgaccca

SEQ ID NO: 4143810 - DNA, 25 bp, Homo sapien
atcaggtgttggcttgacccagggg

SEQ ID NO: 4143811 - DNA, 25 bp, Homo sapien
gcatcaggtgttggcttgacccagg

SEQ ID NO: 4143812 - DNA, 25 bp, Homo sapien
aatttgcacttcagatgtccctgga

SEQ ID NO: 4143813 - DNA, 25 bp, Homo sapien
caatttgcacttcagatgtccctgg

SEQ ID NO: 4143814 - DNA, 25 bp, Homo sapien
gccacagattgtcaatcacattgtt

SEQ ID NO: 4143815 - DNA, 25 bp, Homo sapien
gaatcaggagctgggtcctgattgc

SEQ ID NO: 4143816 - DNA, 25 bp, Homo sapien
accattctctttttataggatccca

SEQ ID NO: 4143817 - DNA, 25 bp, Homo sapien
ggcctgtagtgaccattctcttttt

SEQ ID NO: 4143818 - DNA, 25 bp, Homo sapien
tgaccattctctttttataggatcc

SEQ ID NO: 4143819 - DNA, 25 bp, Homo sapien
ctgcactgtggcctgtagtgaccat

SEQ ID NO: 4143820 - DNA, 25 bp, Homo sapien
ccagtttcgtcagcatggtaggcat

SEQ ID NO: 4143821 - DNA, 25 bp, Homo sapien
agtttcgtcagcatggtaggcatgg

SEQ ID NO: 4143822 - DNA, 25 bp, Homo sapien
cagtttcgtcagcatggtaggcatg

SEQ ID NO: 4143823 - DNA, 25 bp, Homo sapien
gccagtttcgtcagcatggtaggca

SEQ ID NO: 4143824 - DNA, 25 bp, Homo sapien
ttccttgaaccagcgggcatgccga

SEQ ID NO: 4143825 - DNA, 25 bp, Homo sapien
tgaaccagcgggcatgccgaatggc

SEQ ID NO: 4143826 - DNA, 25 bp, Homo sapien
tatccaaacggagttctgggtccag

SEQ ID NO: 4143827 - DNA, 25 bp, Homo sapien
tttaactgtgaactgagagccattt

SEQ ID NO: 4143828 - DNA, 25 bp, Homo sapien
ctcaagtccttcagtagtctgatga

SEQ ID NO: 4143829 - DNA, 25 bp, Homo sapien
caagtccttcagtagtctgatgata

SEQ ID NO: 4143830 - DNA, 25 bp, Homo sapien
cctcaagtccttcagtagtctgatg

SEQ ID NO: 4143831 - DNA, 25 bp, Homo sapien
agtccttcagtagtctgatgataac

SEQ ID NO: 4143832 - DNA, 25 bp, Homo sapien
cagcataatgacttagtaggcctag

SEQ ID NO: 4143833 - DNA, 25 bp, Homo sapien
taatgacttagtaggcctaggatcc

SEQ ID NO: 4143834 - DNA, 25 bp, Homo sapien
cacagcataatgacttagtaggcct

SEQ ID NO: 4143835 - DNA, 25 bp, Homo sapien
tgacttagtaggcctaggatccagg

SEQ ID NO: 4143836 - DNA, 25 bp, Homo sapien
ggtcagtgatacccatggaccctgg

SEQ ID NO: 4143837 - DNA, 25 bp, Homo sapien
tcagtgatacccatggaccctggca

SEQ ID NO: 4143838 - DNA, 25 bp, Homo sapien
gaagttgccgctctcacgggggtca

SEQ ID NO: 4143839 - DNA, 25 bp, Homo sapien
ctgaagttgccgctctcacgggggt

SEQ ID NO: 4143840 - DNA, 25 bp, Homo sapien
ggctgtgtagcagactatgtcctgc

SEQ ID NO: 4143841 - DNA, 25 bp, Homo sapien
tgggctgtgtagcagactatgtcct

SEQ ID NO: 4143842 - DNA, 25 bp, Homo sapien
gtctgggctgtgtagcagactatgt

SEQ ID NO: 4143843 - DNA, 25 bp, Homo sapien
ctgtgtagcagactatgtcctgctg

SEQ ID NO: 4143844 - DNA, 25 bp, Homo sapien
cttttgagtttccatgctttcttct

SEQ ID NO: 4143845 - DNA, 25 bp, Homo sapien
tcttcctctccttgaggtggttctt

SEQ ID NO: 4143846 - DNA, 25 bp, Homo sapien
tcctctccttgaggtggttcttctg

SEQ ID NO: 4143847 - DNA, 25 bp, Homo sapien
tccttgaggtggttcttctgtcttc

SEQ ID NO: 4143848 - DNA, 25 bp, Homo sapien
cacagaatttgtgaggcattgggag

SEQ ID NO: 4143849 - DNA, 25 bp, Homo sapien
tcatgttcatcacctacccaggtat

SEQ ID NO: 4143850 - DNA, 25 bp, Homo sapien
gatgggtgatagagttggaaattac

SEQ ID NO: 4143851 - DNA, 25 bp, Homo sapien
tgcttgggtggatttaccgtttctc

SEQ ID NO: 4143852 - DNA, 25 bp, Homo sapien
gatgttctgcatgaaaagtccagga

SEQ ID NO: 4143853 - DNA, 25 bp, Homo sapien
ttcctccgaggtgtacccacagtgc

SEQ ID NO: 4143854 - DNA, 25 bp, Homo sapien
tctaaggcaggttctccattgcgcc

SEQ ID NO: 4143855 - DNA, 25 bp, Homo sapien
tgtatgatgacagtccgggcaacct

SEQ ID NO: 4143856 - DNA, 25 bp, Homo sapien
tatcaccaatgaactgagggtggca

SEQ ID NO: 4143857 - DNA, 25 bp, Homo sapien
tgggcttcgtgaatgctgcagaaac

SEQ ID NO: 4143858 - DNA, 25 bp, Homo sapien
tctgaggtccctaggtgcctgaaac

SEQ ID NO: 4143859 - DNA, 25 bp, Homo sapien
tgagggcgtcagtgtttctaggaac

SEQ ID NO: 4143860 - DNA, 25 bp, Homo sapien
cccagtgcctagagcatataggaga

SEQ ID NO: 4143861 - DNA, 25 bp, Homo sapien
gggagactgggtgtcccagtgccta

SEQ ID NO: 4143862 - DNA, 25 bp, Homo sapien
tataggagacactcatagttactca

SEQ ID NO: 4143863 - DNA, 25 bp, Homo sapien
cttgttgatccatcttgtctgtctc

SEQ ID NO: 4143864 - DNA, 25 bp, Homo sapien
atattttgtctcaatctgctcttca

SEQ ID NO: 4143865 - DNA, 25 bp, Homo sapien
gatgtaatggagatattcaccaatt

SEQ ID NO: 4143866 - DNA, 25 bp, Homo sapien
tgtaatggagatattcaccaattcc

SEQ ID NO: 4143867 - DNA, 25 bp, Homo sapien
ggagatattcaccaattccacagca

SEQ ID NO: 4143868 - DNA, 25 bp, Homo sapien
tatatgtgctggaaaaccaaaaaat

SEQ ID NO: 4143869 - DNA, 25 bp, Homo sapien
aatacaatgagaccacatctccaca

SEQ ID NO: 4143870 - DNA, 25 bp, Homo sapien
caatattcactttatggcggtcatc

SEQ ID NO: 4143871 - DNA, 25 bp, Homo sapien
ggaggatggcaaaagtttaaatata

SEQ ID NO: 4143872 - DNA, 25 bp, Homo sapien
gcaggtttctgcaattaacagcatc

SEQ ID NO: 4143873 - DNA, 25 bp, Homo sapien
attaacagcatcttcttaagcctgt

SEQ ID NO: 4143874 - DNA, 25 bp, Homo sapien
ctgattgactgtatgacaaatgctg

SEQ ID NO: 4143875 - DNA, 25 bp, Homo sapien
gagaaggttaccagctcagcagaat

SEQ ID NO: 4143876 - DNA, 25 bp, Homo sapien
cttatttgatggatgctcagttata

SEQ ID NO: 4143877 - DNA, 25 bp, Homo sapien
gatggatgctcagttataaggatag

SEQ ID NO: 4143878 - DNA, 25 bp, Homo sapien
taaggatagctatggtaacagtaac

SEQ ID NO: 4143879 - DNA, 25 bp, Homo sapien
gctcagttataaggatagctatggt

SEQ ID NO: 4143880 - DNA, 25 bp, Homo sapien
ggttcgctccttctgggcccttctg

SEQ ID NO: 4143881 - DNA, 25 bp, Homo sapien
ttcccatgcctatgatccgaaagtt

SEQ ID NO: 4143882 - DNA, 25 bp, Homo sapien
aaagttaggtggttcgctccttctg

SEQ ID NO: 4143883 - DNA, 25 bp, Homo sapien
gatccgaaagttaggtggttcgctc

SEQ ID NO: 4143884 - DNA, 25 bp, Homo sapien
gtcagacattctctacagtctatac

SEQ ID NO: 4143885 - DNA, 25 bp, Homo sapien
tcagtcagacattctctacagtcta

SEQ ID NO: 4143886 - DNA, 25 bp, Homo sapien
cagtcagacattctctacagtctat

SEQ ID NO: 4143887 - DNA, 25 bp, Homo sapien
ttcagtcagacattctctacagtct

SEQ ID NO: 4143888 - DNA, 25 bp, Homo sapien
catctttgaaaaggacgaatgacct

SEQ ID NO: 4143889 - DNA, 25 bp, Homo sapien
tattatgaatatgctgcagactggg

SEQ ID NO: 4143890 - DNA, 25 bp, Homo sapien
tggaaaggtgattggctcaacagct

SEQ ID NO: 4143891 - DNA, 25 bp, Homo sapien
tgcaaaatctggctcactgaggacc

SEQ ID NO: 4143892 - DNA, 25 bp, Homo sapien
tagcatcctccatttgtgacaacca

SEQ ID NO: 4143893 - DNA, 25 bp, Homo sapien
ccttgccatatttgaggccgaatac

SEQ ID NO: 4143894 - DNA, 25 bp, Homo sapien
gaaacactgccctcattgaatgaag

SEQ ID NO: 4143895 - DNA, 25 bp, Homo sapien
gatcatatatgagaaagcttgcaag

SEQ ID NO: 4143896 - DNA, 25 bp, Homo sapien
cctgctgtgcagtaatgagattcgt

SEQ ID NO: 4143897 - DNA, 25 bp, Homo sapien
taatgatggcatcctttggagatct

SEQ ID NO: 4143898 - DNA, 25 bp, Homo sapien
caagtcgcctctgctacatgtatct

SEQ ID NO: 4143899 - DNA, 25 bp, Homo sapien
tgaattaatgccttgcaagtcgcct

SEQ ID NO: 4143900 - DNA, 25 bp, Homo sapien
tgattctccagtgaatgaacaaatg

SEQ ID NO: 4143901 - DNA, 25 bp, Homo sapien
aacaaatgaacaatgagtagttcac

SEQ ID NO: 4143902 - DNA, 25 bp, Homo sapien
ttatgattctccagtgaatgaacaa

SEQ ID NO: 4143903 - DNA, 25 bp, Homo sapien
tgaacaaatgaacaatgagtagttc

SEQ ID NO: 4143904 - DNA, 25 bp, Homo sapien
catgaattggagagcatgacatcca

SEQ ID NO: 4143905 - DNA, 25 bp, Homo sapien
ttcatgccagctagaactgcctgag

SEQ ID NO: 4143906 - DNA, 25 bp, Homo sapien
tccattgggcatgcagaatggtcag

SEQ ID NO: 4143907 - DNA, 25 bp, Homo sapien
cttaagccaggaacaatgaaattgc

SEQ ID NO: 4143908 - DNA, 25 bp, Homo sapien
cagtaatagcatcatgggcccaaga

SEQ ID NO: 4143909 - DNA, 25 bp, Homo sapien
taaactcatggtaagcagacagagc

SEQ ID NO: 4143910 - DNA, 25 bp, Homo sapien
tgtatttccgcaggcaggagtctaa

SEQ ID NO: 4143911 - DNA, 25 bp, Homo sapien
cagtaataaggttcatgagagcagt

SEQ ID NO: 4143912 - DNA, 25 bp, Homo sapien
catctagtggacagggtccaggcat

SEQ ID NO: 4143913 - DNA, 25 bp, Homo sapien
gaagtttccgagattccaacgcagt

SEQ ID NO: 4143914 - DNA, 25 bp, Homo sapien
gacatcactgattggtgtgcacaat

SEQ ID NO: 4143915 - DNA, 25 bp, Homo sapien
cgcagttatgtggtgggagacttac

SEQ ID NO: 4143916 - DNA, 25 bp, Homo sapien
tcagcttccccttggaaatggtgac

SEQ ID NO: 4143917 - DNA, 25 bp, Homo sapien
agcttccccttggaaatggtgacaa

SEQ ID NO: 4143918 - DNA, 25 bp, Homo sapien
tggaaatggtgacaactgttaccat

SEQ ID NO: 4143919 - DNA, 25 bp, Homo sapien
cccttggaaatggtgacaactgtta

SEQ ID NO: 4143920 - DNA, 25 bp, Homo sapien
cctctgacttgggtaagcagtatta

SEQ ID NO: 4143921 - DNA, 25 bp, Homo sapien
gacttgggtaagcagtattatttct

SEQ ID NO: 4143922 - DNA, 25 bp, Homo sapien
tttctataggaacttgaaatggatg

SEQ ID NO: 4143923 - DNA, 25 bp, Homo sapien
gatgacgttggagaactgaatttct

SEQ ID NO: 4143924 - DNA, 25 bp, Homo sapien
aggtatttctggaagacctgtaatt

SEQ ID NO: 4143925 - DNA, 25 bp, Homo sapien
taaaaggagcctcagttgttacagg

SEQ ID NO: 4143926 - DNA, 25 bp, Homo sapien
tgaacaataaaaggagcctcagttg

SEQ ID NO: 4143927 - DNA, 25 bp, Homo sapien
ggagcctcagttgttacaggcctca

SEQ ID NO: 4143928 - DNA, 25 bp, Homo sapien
gttgttacaggcctcacccaatcca

SEQ ID NO: 4143929 - DNA, 25 bp, Homo sapien
ttttgcttaaggatggttttgccat

SEQ ID NO: 4143930 - DNA, 25 bp, Homo sapien
tagcttttgcttaaggatggttttg

SEQ ID NO: 4143931 - DNA, 25 bp, Homo sapien
ttgcttaaggatggttttgccatgc

SEQ ID NO: 4143932 - DNA, 25 bp, Homo sapien
gcttaaggatggttttgccatgctg

SEQ ID NO: 4143933 - DNA, 25 bp, Homo sapien
tcataattcgcatctccttcctatt

SEQ ID NO: 4143934 - DNA, 25 bp, Homo sapien
gtcttacttcccaatttggcatcaa

SEQ ID NO: 4143935 - DNA, 25 bp, Homo sapien
tgtcttacttcccaatttggcatca

SEQ ID NO: 4143936 - DNA, 25 bp, Homo sapien
ccaatttggcatcaactttcgacat

SEQ ID NO: 4143937 - DNA, 25 bp, Homo sapien
ttcccaatttggcatcaactttcga

SEQ ID NO: 4143938 - DNA, 25 bp, Homo sapien
gttcagctccacagttagcctgtga

SEQ ID NO: 4143939 - DNA, 25 bp, Homo sapien
gctccacagttagcctgtgatgttg

SEQ ID NO: 4143940 - DNA, 25 bp, Homo sapien
caggtttggacagaacctgatggtc

SEQ ID NO: 4143941 - DNA, 25 bp, Homo sapien
gtgatgttggtgcttgatgttcacc

SEQ ID NO: 4143942 - DNA, 25 bp, Homo sapien
tttttgcattgaagaaaaccttcat

SEQ ID NO: 4143943 - DNA, 25 bp, Homo sapien
acttcgtggagaagcaagttctgtg

SEQ ID NO: 4143944 - DNA, 25 bp, Homo sapien
taatacttcgtggagaagcaagttc

SEQ ID NO: 4143945 - DNA, 25 bp, Homo sapien
tacttcgtggagaagcaagttctgt

SEQ ID NO: 4143946 - DNA, 25 bp, Homo sapien
tctagcaggaggtgattcccatatt

SEQ ID NO: 4143947 - DNA, 25 bp, Homo sapien
ctagcaggaggtgattcccatattt

SEQ ID NO: 4143948 - DNA, 25 bp, Homo sapien
gcaggaggtgattcccatattttac

SEQ ID NO: 4143949 - DNA, 25 bp, Homo sapien
tagcaggaggtgattcccatatttt

SEQ ID NO: 4143950 - DNA, 25 bp, Homo sapien
gctttatcttccgtcagcaggtgtg

SEQ ID NO: 4143951 - DNA, 25 bp, Homo sapien
gcagctgaagttgatactcatctgt

SEQ ID NO: 4143952 - DNA, 25 bp, Homo sapien
tgtggcagctgaagttgatactcat

SEQ ID NO: 4143953 - DNA, 25 bp, Homo sapien
tctgtggggttgttcagacagctgc

SEQ ID NO: 4143954 - DNA, 25 bp, Homo sapien
ttggcccagacacacctaccaactc

SEQ ID NO: 4143955 - DNA, 25 bp, Homo sapien
ttgtagctttggaatggcacacatt

SEQ ID NO: 4143956 - DNA, 25 bp, Homo sapien
tttggcccagacacacctaccaact

SEQ ID NO: 4143957 - DNA, 25 bp, Homo sapien
tgttgtagctttggaatggcacaca

SEQ ID NO: 4143958 - DNA, 25 bp, Homo sapien
tctgcaagtcctgtagcacatctta

SEQ ID NO: 4143959 - DNA, 25 bp, Homo sapien
gttcacccggatctgctcaatgacc

SEQ ID NO: 4143960 - DNA, 25 bp, Homo sapien
ttgttcacccggatctgctcaatga

SEQ ID NO: 4143961 - DNA, 25 bp, Homo sapien
gctctgcaagtcctgtagcacatct

SEQ ID NO: 4143962 - DNA, 25 bp, Homo sapien
gagctcgtgtatcagttaatctgac

SEQ ID NO: 4143963 - DNA, 25 bp, Homo sapien
gcagggagagctcgtgtatcagtta

SEQ ID NO: 4143964 - DNA, 25 bp, Homo sapien
agggagagctcgtgtatcagttaat

SEQ ID NO: 4143965 - DNA, 25 bp, Homo sapien
gagagctcgtgtatcagttaatctg

SEQ ID NO: 4143966 - DNA, 25 bp, Homo sapien
tcttctgagtaactttctgttctgc

SEQ ID NO: 4143967 - DNA, 25 bp, Homo sapien
gccacatgggagtgaacttaacaca

SEQ ID NO: 4143968 - DNA, 25 bp, Homo sapien
ccacatgggagtgaacttaacacat

SEQ ID NO: 4143969 - DNA, 25 bp, Homo sapien
tgccacatgggagtgaacttaacac

SEQ ID NO: 4143970 - DNA, 25 bp, Homo sapien
cacatgggagtgaacttaacacatc

SEQ ID NO: 4143971 - DNA, 25 bp, Homo sapien
aaccagagaaggtcgagacaggtgt

SEQ ID NO: 4143972 - DNA, 25 bp, Homo sapien
ccagagaaggtcgagacaggtgtgg

SEQ ID NO: 4143973 - DNA, 25 bp, Homo sapien
gaaccagagaaggtcgagacaggtg

SEQ ID NO: 4143974 - DNA, 25 bp, Homo sapien
ggaaccagagaaggtcgagacaggt

SEQ ID NO: 4143975 - DNA, 25 bp, Homo sapien
ggctggcatcctgaatgatactgga

SEQ ID NO: 4143976 - DNA, 25 bp, Homo sapien
tagttttcaggcagactctagccaa

SEQ ID NO: 4143977 - DNA, 25 bp, Homo sapien
tgagaccgcactacataagggcttg

SEQ ID NO: 4143978 - DNA, 25 bp, Homo sapien
caggttaacttgtctggcggatcac

SEQ ID NO: 4143979 - DNA, 25 bp, Homo sapien
tagggagatggactgtgctcatcac

SEQ ID NO: 4143980 - DNA, 25 bp, Homo sapien
aaagaggctacccaacattgctggt

SEQ ID NO: 4143981 - DNA, 25 bp, Homo sapien
gatacttgtgcagcaaataggtcaa

SEQ ID NO: 4143982 - DNA, 25 bp, Homo sapien
cactgtcattcagactgacaaagag

SEQ ID NO: 4143983 - DNA, 25 bp, Homo sapien
gggaggacagactcttgacaccatc

SEQ ID NO: 4143984 - DNA, 25 bp, Homo sapien
accatcctaggggacctttctctgg

SEQ ID NO: 4143985 - DNA, 25 bp, Homo sapien
cacctggctgagcatgccattacca

SEQ ID NO: 4143986 - DNA, 25 bp, Homo sapien
catggaatctgttcagcagcactgg

SEQ ID NO: 4143987 - DNA, 25 bp, Homo sapien
gctgtccctctcacatccatggaga

SEQ ID NO: 4143988 - DNA, 25 bp, Homo sapien
tgtccctctcacatccatggagatg

SEQ ID NO: 4143989 - DNA, 25 bp, Homo sapien
tcaaaggccgcgttgtggctgtgct

SEQ ID NO: 4143990 - DNA, 25 bp, Homo sapien
caaaggccgcgttgtggctgtgctt

SEQ ID NO: 4143991 - DNA, 25 bp, Homo sapien
taacctggttcaatctgggaaacca

SEQ ID NO: 4143992 - DNA, 25 bp, Homo sapien
tcgctgacgggtggccttgacagtc

SEQ ID NO: 4143993 - DNA, 25 bp, Homo sapien
tctcctctctgtagtaacctggttc

SEQ ID NO: 4143994 - DNA, 25 bp, Homo sapien
gacatggagtctgccgtctcgctga

SEQ ID NO: 4143995 - DNA, 25 bp, Homo sapien
ggacagcaccaaagctcgccatctt

SEQ ID NO: 4143996 - DNA, 25 bp, Homo sapien
atcagcactttacccacggacagca

SEQ ID NO: 4143997 - DNA, 25 bp, Homo sapien
catgaggttatctgaggtctcagcc

SEQ ID NO: 4143998 - DNA, 25 bp, Homo sapien
tccttctcatacatgaggttatctg

SEQ ID NO: 4143999 - DNA, 25 bp, Homo sapien
aaattttcggccgagtctggtgcat

SEQ ID NO: 4144000 - DNA, 25 bp, Homo sapien
tctccgcttccaccttaatgtctag

SEQ ID NO: 4144001 - DNA, 25 bp, Homo sapien
gggactcccagcgaacttaaatgct

SEQ ID NO: 4144002 - DNA, 25 bp, Homo sapien
tgcaaaatgattgccgaaaacaggg

SEQ ID NO: 4144003 - DNA, 25 bp, Homo sapien
cttcctaaggcgatttcttcagctt

SEQ ID NO: 4144004 - DNA, 25 bp, Homo sapien
cctaaggcgatttcttcagctttgt

SEQ ID NO: 4144005 - DNA, 25 bp, Homo sapien
ttcctaaggcgatttcttcagcttt

SEQ ID NO: 4144006 - DNA, 25 bp, Homo sapien
tcctaaggcgatttcttcagctttg

SEQ ID NO: 4144007 - DNA, 25 bp, Homo sapien
tgctgcagccattgtttctccctct

SEQ ID NO: 4144008 - DNA, 25 bp, Homo sapien
actgctgcagccattgtttctccct

SEQ ID NO: 4144009 - DNA, 25 bp, Homo sapien
ctgcagccattgtttctccctctgt

SEQ ID NO: 4144010 - DNA, 25 bp, Homo sapien
ttactgctgcagccattgtttctcc

SEQ ID NO: 4144011 - DNA, 25 bp, Homo sapien
taatgagtctgcacttggatacctc

SEQ ID NO: 4144012 - DNA, 25 bp, Homo sapien
cagtatcgctatgtgctatatgcac

SEQ ID NO: 4144013 - DNA, 25 bp, Homo sapien
tctagatgggagcttggtcaagttc

SEQ ID NO: 4144014 - DNA, 25 bp, Homo sapien
tctaagaaaaggcagcacatggcag

SEQ ID NO: 4144015 - DNA, 25 bp, Homo sapien
tggttcatagtttttgggagcattg

SEQ ID NO: 4144016 - DNA, 25 bp, Homo sapien
tagtttttgggagcattgaattgga

SEQ ID NO: 4144017 - DNA, 25 bp, Homo sapien
ttttttagcgcacagataatttctg

SEQ ID NO: 4144018 - DNA, 25 bp, Homo sapien
tctggtgtacctgtagaatcccaaa

SEQ ID NO: 4144019 - DNA, 25 bp, Homo sapien
aaattgaggttgttagtgtccttct

SEQ ID NO: 4144020 - DNA, 25 bp, Homo sapien
gaaattgaggttgttagtgtccttc

SEQ ID NO: 4144021 - DNA, 25 bp, Homo sapien
gcagtcttcccagtgtaagattcag

SEQ ID NO: 4144022 - DNA, 25 bp, Homo sapien
tcagatgattctagccctgggccat

SEQ ID NO: 4144023 - DNA, 25 bp, Homo sapien
gattctagccctgggccattgagtt

SEQ ID NO: 4144024 - DNA, 25 bp, Homo sapien
ctgggccattgagttgcctgcagtc

SEQ ID NO: 4144025 - DNA, 25 bp, Homo sapien
ctcatcattggaaagaccaccctgg

SEQ ID NO: 4144026 - DNA, 25 bp, Homo sapien
tcctcatcattggaaagaccaccct

SEQ ID NO: 4144027 - DNA, 25 bp, Homo sapien
catcattggaaagaccaccctgggc

SEQ ID NO: 4144028 - DNA, 25 bp, Homo sapien
tcatcattggaaagaccaccctggg

SEQ ID NO: 4144029 - DNA, 25 bp, Homo sapien
ccttccaccgaggatgaacagaaat

SEQ ID NO: 4144030 - DNA, 25 bp, Homo sapien
tctgagctcccagtctctggtctgg

SEQ ID NO: 4144031 - DNA, 25 bp, Homo sapien
ccaccgaggatgaacagaaatgtca

SEQ ID NO: 4144032 - DNA, 25 bp, Homo sapien
tctctgagctcccagtctctggtct

SEQ ID NO: 4144033 - DNA, 25 bp, Homo sapien
cctgatggggagcatgctcagtttc

SEQ ID NO: 4144034 - DNA, 25 bp, Homo sapien
acttggcaggatccgccccgttcag

SEQ ID NO: 4144035 - DNA, 25 bp, Homo sapien
gatccgccccgttcagagttgcagg

SEQ ID NO: 4144036 - DNA, 25 bp, Homo sapien
cattcaggtacgagcagagacttgg

SEQ ID NO: 4144037 - DNA, 25 bp, Homo sapien
ctgtggatgtagtcatatggtgcat

SEQ ID NO: 4144038 - DNA, 25 bp, Homo sapien
ttgattgtagtatgccctgaggtga

SEQ ID NO: 4144039 - DNA, 25 bp, Homo sapien
ggtgattttgatcatgaagctaaac

SEQ ID NO: 4144040 - DNA, 25 bp, Homo sapien
gatgtttggttgattgtagtatgcc

SEQ ID NO: 4144041 - DNA, 25 bp, Homo sapien
agataatttggggatgcgggatggc

SEQ ID NO: 4144042 - DNA, 25 bp, Homo sapien
taatttggggatgcgggatggcctc

SEQ ID NO: 4144043 - DNA, 25 bp, Homo sapien
aggtagataatttggggatgcggga

SEQ ID NO: 4144044 - DNA, 25 bp, Homo sapien
ggtagataatttggggatgcgggat

SEQ ID NO: 4144045 - DNA, 25 bp, Homo sapien
caatggaagtagacgaggcagagac

SEQ ID NO: 4144046 - DNA, 25 bp, Homo sapien
cagagacacagtcgtcatggagcag

SEQ ID NO: 4144047 - DNA, 25 bp, Homo sapien
gacaaatttggctaagaccggcata

SEQ ID NO: 4144048 - DNA, 25 bp, Homo sapien
ccatggtgagctctacaggacttga

SEQ ID NO: 4144049 - DNA, 25 bp, Homo sapien
ctgagcacggccattcaaaacagac

SEQ ID NO: 4144050 - DNA, 25 bp, Homo sapien
tgacttctaaacaatttcctggtga

SEQ ID NO: 4144051 - DNA, 25 bp, Homo sapien
cagacaaagctagcaagcgttggaa

SEQ ID NO: 4144052 - DNA, 25 bp, Homo sapien
agctgaacactgagcacggccattc

SEQ ID NO: 4144053 - DNA, 25 bp, Homo sapien
tgtaggcagatgacataaccagcag

SEQ ID NO: 4144054 - DNA, 25 bp, Homo sapien
tctctaacctggaggaggttgctga

SEQ ID NO: 4144055 - DNA, 25 bp, Homo sapien
gaatgccattgccaagacaaatagg

SEQ ID NO: 4144056 - DNA, 25 bp, Homo sapien
gcagatgacataaccagcagctcac

SEQ ID NO: 4144057 - DNA, 25 bp, Homo sapien
gcctatggctctacccaggtaaaaa

SEQ ID NO: 4144058 - DNA, 25 bp, Homo sapien
agagcaaccccgttctagctggcct

SEQ ID NO: 4144059 - DNA, 25 bp, Homo sapien
attaaccaccttggcaagcgctgcc

SEQ ID NO: 4144060 - DNA, 25 bp, Homo sapien
tctaacaaatttcatctggcccaaa

SEQ ID NO: 4144061 - DNA, 25 bp, Homo sapien
tttccggatccgccgtgtcacagac

SEQ ID NO: 4144062 - DNA, 25 bp, Homo sapien
tgtttccggatccgccgtgtcacag

SEQ ID NO: 4144063 - DNA, 25 bp, Homo sapien
gtttccggatccgccgtgtcacaga

SEQ ID NO: 4144064 - DNA, 25 bp, Homo sapien
tccggatccgccgtgtcacagacat

SEQ ID NO: 4144065 - DNA, 25 bp, Homo sapien
agtttggcataacttcctttgtaat

SEQ ID NO: 4144066 - DNA, 25 bp, Homo sapien
ttcctttgtaatttgtagcaacaaa

SEQ ID NO: 4144067 - DNA, 25 bp, Homo sapien
tcctttgtaatttgtagcaacaaac

SEQ ID NO: 4144068 - DNA, 25 bp, Homo sapien
gataactatttcagtttggcataac

SEQ ID NO: 4144069 - DNA, 25 bp, Homo sapien
tcccatgttcaagtgtttcttgtgt

SEQ ID NO: 4144070 - DNA, 25 bp, Homo sapien
agtgtttcttgtgtctcaacctcct

SEQ ID NO: 4144071 - DNA, 25 bp, Homo sapien
cagatgtgggccaccacgcccagcg

SEQ ID NO: 4144072 - DNA, 25 bp, Homo sapien
acagatgtgggccaccacgcccagc

SEQ ID NO: 4144073 - DNA, 25 bp, Homo sapien
cctagattgtggcattgataccgtc

SEQ ID NO: 4144074 - DNA, 25 bp, Homo sapien
tgataccgtcttctatctctgagaa

SEQ ID NO: 4144075 - DNA, 25 bp, Homo sapien
tttggcagtgccatcattggtcacc

SEQ ID NO: 4144076 - DNA, 25 bp, Homo sapien
tgagaagtaacccatagtaagcagt

SEQ ID NO: 4144077 - DNA, 25 bp, Homo sapien
tcagtggcaattttatcccctaggg

SEQ ID NO: 4144078 - DNA, 25 bp, Homo sapien
tcccctagggagcacttggcaatat

SEQ ID NO: 4144079 - DNA, 25 bp, Homo sapien
caagcgtgctctagttattcagcca

SEQ ID NO: 4144080 - DNA, 25 bp, Homo sapien
ggaaagccctatagcagtggtaaag

SEQ ID NO: 4144081 - DNA, 25 bp, Homo sapien
aaggatctgaggcttagtggacctt

SEQ ID NO: 4144082 - DNA, 25 bp, Homo sapien
tgaggcttagtggaccttttaaata

SEQ ID NO: 4144083 - DNA, 25 bp, Homo sapien
gatctgaggcttagtggacctttta

SEQ ID NO: 4144084 - DNA, 25 bp, Homo sapien
gcttagtggaccttttaaataatga

SEQ ID NO: 4144085 - DNA, 25 bp, Homo sapien
tggctttcataggagcaccgctgtc

SEQ ID NO: 4144086 - DNA, 25 bp, Homo sapien
gagaacaagacttgattgattggct

SEQ ID NO: 4144087 - DNA, 25 bp, Homo sapien
ttggtaaccaccaggaggtagtata

SEQ ID NO: 4144088 - DNA, 25 bp, Homo sapien
ccaggaggtagtatactagtgaagt

SEQ ID NO: 4144089 - DNA, 25 bp, Homo sapien
tctgggacactgaaagcatacttac

SEQ ID NO: 4144090 - DNA, 25 bp, Homo sapien
tacctgtacctaagtgtgttttcag

SEQ ID NO: 4144091 - DNA, 25 bp, Homo sapien
gaatacgctgttctgggacactgaa

SEQ ID NO: 4144092 - DNA, 25 bp, Homo sapien
cggtggcgtgatctggtttcgaata

SEQ ID NO: 4144093 - DNA, 25 bp, Homo sapien
ccaccactgtttgcttgtataatta

SEQ ID NO: 4144094 - DNA, 25 bp, Homo sapien
taaaagctggaccttaaagccacca

SEQ ID NO: 4144095 - DNA, 25 bp, Homo sapien
tgtataattaatcccaccactgttc

SEQ ID NO: 4144096 - DNA, 25 bp, Homo sapien
ccaaaagtatggcttagagaggcta

SEQ ID NO: 4144097 - DNA, 25 bp, Homo sapien
gcacccaaggtaagtggctcgcctg

SEQ ID NO: 4144098 - DNA, 25 bp, Homo sapien
acccaaggtaagtggctcgcctgcc

SEQ ID NO: 4144099 - DNA, 25 bp, Homo sapien
taattcttgagggttttggtgcctc

SEQ ID NO: 4144100 - DNA, 25 bp, Homo sapien
aaggtaagtggctcgcctgcctcac

SEQ ID NO: 4144101 - DNA, 25 bp, Homo sapien
gggccagtcgccaacattgtcaaca

SEQ ID NO: 4144102 - DNA, 25 bp, Homo sapien
tgatgtgactgaggagagacctcca

SEQ ID NO: 4144103 - DNA, 25 bp, Homo sapien
gccttgcagccgctgatggctcatc

SEQ ID NO: 4144104 - DNA, 25 bp, Homo sapien
tcaaaaatagctgaccactctggct

SEQ ID NO: 4144105 - DNA, 25 bp, Homo sapien
gaccaaactccgactttctctggca

SEQ ID NO: 4144106 - DNA, 25 bp, Homo sapien
tccgactttctctggcacccaaacc

SEQ ID NO: 4144107 - DNA, 25 bp, Homo sapien
actccgactttctctggcacccaaa

SEQ ID NO: 4144108 - DNA, 25 bp, Homo sapien
catgaccaaactccgactttctctg

SEQ ID NO: 4144109 - DNA, 25 bp, Homo sapien
cttgttctgtcaacataggtccaca

SEQ ID NO: 4144110 - DNA, 25 bp, Homo sapien
tgttctgtcaacataggtccacacc

SEQ ID NO: 4144111 - DNA, 25 bp, Homo sapien
gttcttgttctgtcaacataggtcc

SEQ ID NO: 4144112 - DNA, 25 bp, Homo sapien
gggttcttgttctgtcaacataggt

SEQ ID NO: 4144113 - DNA, 25 bp, Homo sapien
attattggctattgctgaactcctc

SEQ ID NO: 4144114 - DNA, 25 bp, Homo sapien
tggacagcaccattgtgtaacaagt

SEQ ID NO: 4144115 - DNA, 25 bp, Homo sapien
cagcaccattgtgtaacaagtccat

SEQ ID NO: 4144116 - DNA, 25 bp, Homo sapien
cattgtaattattggctattgctga

SEQ ID NO: 4144117 - DNA, 25 bp, Homo sapien
tttagtggtttggatcttgtataag

SEQ ID NO: 4144118 - DNA, 25 bp, Homo sapien
ctgtggataagttggtggaggtttt

SEQ ID NO: 4144119 - DNA, 25 bp, Homo sapien
gatcttgtataaggtcttgcacagt

SEQ ID NO: 4144120 - DNA, 25 bp, Homo sapien
gtttggatcttgtataaggtcttgc

SEQ ID NO: 4144121 - DNA, 25 bp, Homo sapien
gacacactgtcatttcagcacatac

SEQ ID NO: 4144122 - DNA, 25 bp, Homo sapien
gggaaactgtgctgtatgtgtctca

SEQ ID NO: 4144123 - DNA, 25 bp, Homo sapien
cagcacatacccagagcaagtcagg

SEQ ID NO: 4144124 - DNA, 25 bp, Homo sapien
gggaagtatagtcttcccatgaagg

SEQ ID NO: 4144125 - DNA, 25 bp, Homo sapien
ggcttcttttcaacacacactggtg

SEQ ID NO: 4144126 - DNA, 25 bp, Homo sapien
ggcttaatacctaagggatggctga

SEQ ID NO: 4144127 - DNA, 25 bp, Homo sapien
gggcttcttttcaacacacactggt

SEQ ID NO: 4144128 - DNA, 25 bp, Homo sapien
tacctaagggatggctgataggtgc

SEQ ID NO: 4144129 - DNA, 25 bp, Homo sapien
gagagctttcagcttccgtgttttt

SEQ ID NO: 4144130 - DNA, 25 bp, Homo sapien
tttctaaaggctttaacagcttggc

SEQ ID NO: 4144131 - DNA, 25 bp, Homo sapien
tttaatatatgtgagagctttcagc

SEQ ID NO: 4144132 - DNA, 25 bp, Homo sapien
cagcttccgtgtttttctaaaggct

SEQ ID NO: 4144133 - DNA, 25 bp, Homo sapien
gagtgatactgcatctctaataaac

SEQ ID NO: 4144134 - DNA, 25 bp, Homo sapien
tatgattgagctactacattccaga

SEQ ID NO: 4144135 - DNA, 25 bp, Homo sapien
tagactttacgtgacatatgtgatc

SEQ ID NO: 4144136 - DNA, 25 bp, Homo sapien
tgagtgtagtcaagcttaatagact

SEQ ID NO: 4144137 - DNA, 25 bp, Homo sapien
tgtcattgggaagataggatcgccg

SEQ ID NO: 4144138 - DNA, 25 bp, Homo sapien
gataaagttctaccgaggcaggtcc

SEQ ID NO: 4144139 - DNA, 25 bp, Homo sapien
gggactccttccctcttgagcgcca

SEQ ID NO: 4144140 - DNA, 25 bp, Homo sapien
gagacaatgagatagaactgataaa

SEQ ID NO: 4144141 - DNA, 25 bp, Homo sapien
cacttcacatattcataggtgataa

SEQ ID NO: 4144142 - DNA, 25 bp, Homo sapien
accacttcacatattcataggtgat

SEQ ID NO: 4144143 - DNA, 25 bp, Homo sapien
ccacttcacatattcataggtgata

SEQ ID NO: 4144144 - DNA, 25 bp, Homo sapien
acttcacatattcataggtgataaa

SEQ ID NO: 4144145 - DNA, 25 bp, Homo sapien
agcagaggcagccaacatatgtttc

SEQ ID NO: 4144146 - DNA, 25 bp, Homo sapien
ttctccagcagaggcagccaacata

SEQ ID NO: 4144147 - DNA, 25 bp, Homo sapien
ctccagcagaggcagccaacatatg

SEQ ID NO: 4144148 - DNA, 25 bp, Homo sapien
ccagcagaggcagccaacatatgtt

SEQ ID NO: 4144149 - DNA, 25 bp, Homo sapien
tgcagctaaggactgaatgtttcct

SEQ ID NO: 4144150 - DNA, 25 bp, Homo sapien
agaaccaggtgcacatgcatgctgc

SEQ ID NO: 4144151 - DNA, 25 bp, Homo sapien
caccaagaaccaggtgcacatgcat

SEQ ID NO: 4144152 - DNA, 25 bp, Homo sapien
ttgactgctgcagctaaggactgaa

SEQ ID NO: 4144153 - DNA, 25 bp, Homo sapien
gtagaggcaagctgaccatcagctg

SEQ ID NO: 4144154 - DNA, 25 bp, Homo sapien
tcatataagatgttagagaaaatct

SEQ ID NO: 4144155 - DNA, 25 bp, Homo sapien
tcttgtagaagcagatacctgtgcc

SEQ ID NO: 4144156 - DNA, 25 bp, Homo sapien
tgtgccctctgcttaaccacttcag

SEQ ID NO: 4144157 - DNA, 25 bp, Homo sapien
gatggaactcgaatcaggcaggcaa

SEQ ID NO: 4144158 - DNA, 25 bp, Homo sapien
tatagcctcgatacaacccttggat

SEQ ID NO: 4144159 - DNA, 25 bp, Homo sapien
ttttatagcctcgatacaacccttg

SEQ ID NO: 4144160 - DNA, 25 bp, Homo sapien
tagcctcgatacaacccttggatac

SEQ ID NO: 4144161 - DNA, 25 bp, Homo sapien
gcttttatagcctcgatacaaccct

SEQ ID NO: 4144162 - DNA, 25 bp, Homo sapien
ctgaaggttcccgtttccagccact

SEQ ID NO: 4144163 - DNA, 25 bp, Homo sapien
gacttatataacatgagtgttcggg

SEQ ID NO: 4144164 - DNA, 25 bp, Homo sapien
ggagggcagtccttgacgcttgatc

SEQ ID NO: 4144165 - DNA, 25 bp, Homo sapien
gggaatccccactgcctaacatgga

SEQ ID NO: 4144166 - DNA, 25 bp, Homo sapien
atgtctgtaatgtccaccaactggg

SEQ ID NO: 4144167 - DNA, 25 bp, Homo sapien
acaatggtttgtttatacaatggac

SEQ ID NO: 4144168 - DNA, 25 bp, Homo sapien
cagaagatctaggatagagtgtctc

SEQ ID NO: 4144169 - DNA, 25 bp, Homo sapien
aatgatctccaaaacaaagtaggtt

SEQ ID NO: 4144170 - DNA, 25 bp, Homo sapien
tacaatacgtggatcaagacacagg

SEQ ID NO: 4144171 - DNA, 25 bp, Homo sapien
tgtttgtcatttaccctgtgaagga

SEQ ID NO: 4144172 - DNA, 25 bp, Homo sapien
cacaggcaagctgtatcagaaactt

SEQ ID NO: 4144173 - DNA, 25 bp, Homo sapien
tgagaatggttatcatcggctgtct

SEQ ID NO: 4144174 - DNA, 25 bp, Homo sapien
gactttttgtgcctcctggtataac

SEQ ID NO: 4144175 - DNA, 25 bp, Homo sapien
ccagattatgggaccgtttacagga

SEQ ID NO: 4144176 - DNA, 25 bp, Homo sapien
tagattgcctcttaacatcaaagga

SEQ ID NO: 4144177 - DNA, 25 bp, Homo sapien
caggataaatatctcggactctaca

SEQ ID NO: 4144178 - DNA, 25 bp, Homo sapien
taatagagataggggtttcatcatg

SEQ ID NO: 4144179 - DNA, 25 bp, Homo sapien
ttggcctggctggttttgaacttct

SEQ ID NO: 4144180 - DNA, 25 bp, Homo sapien
ttaatagagataggggtttcatcat

SEQ ID NO: 4144181 - DNA, 25 bp, Homo sapien
gaaacgctaacagctgaaactcaga

SEQ ID NO: 4144182 - DNA, 25 bp, Homo sapien
gaaactcagatgctgcgtgcaaaga

SEQ ID NO: 4144183 - DNA, 25 bp, Homo sapien
tcccagagcaaaggagaaacgctaa

SEQ ID NO: 4144184 - DNA, 25 bp, Homo sapien
tatgaaaagggctgacacagcaagc

SEQ ID NO: 4144185 - DNA, 25 bp, Homo sapien
tatacaagccacacacaacaactca

SEQ ID NO: 4144186 - DNA, 25 bp, Homo sapien
gcatgtatacaagccacacacaaca

SEQ ID NO: 4144187 - DNA, 25 bp, Homo sapien
caactcacagaagctcacaagcctc

SEQ ID NO: 4144188 - DNA, 25 bp, Homo sapien
acagcatgtatacaagccacacaca

SEQ ID NO: 4144189 - DNA, 25 bp, Homo sapien
ctagccagaccaatgaagagagaag

SEQ ID NO: 4144190 - DNA, 25 bp, Homo sapien
gaccactagccagaccaatgaagag

SEQ ID NO: 4144191 - DNA, 25 bp, Homo sapien
cactagccagaccaatgaagagaga

SEQ ID NO: 4144192 - DNA, 25 bp, Homo sapien
ccactagccagaccaatgaagagag

SEQ ID NO: 4144193 - DNA, 25 bp, Homo sapien
aaaggtcaggctacctacaaggtga

SEQ ID NO: 4144194 - DNA, 25 bp, Homo sapien
gaaaatcccataccagctactgcaa

SEQ ID NO: 4144195 - DNA, 25 bp, Homo sapien
caggctacctacaaggtgaagccca

SEQ ID NO: 4144196 - DNA, 25 bp, Homo sapien
aaaggaaaatcccataccagctact

SEQ ID NO: 4144197 - DNA, 25 bp, Homo sapien
cactataaggttgactggaaaatgt

SEQ ID NO: 4144198 - DNA, 25 bp, Homo sapien
cttgttgggtggttacaataactga

SEQ ID NO: 4144199 - DNA, 25 bp, Homo sapien
ctgaggctgagtaatataaaactcc

SEQ ID NO: 4144200 - DNA, 25 bp, Homo sapien
agtctcccatttacccagctctatg

SEQ ID NO: 4144201 - DNA, 25 bp, Homo sapien
gcttccaggaggtcatcacactgat

SEQ ID NO: 4144202 - DNA, 25 bp, Homo sapien
aattggcatactgctctacagccca

SEQ ID NO: 4144203 - DNA, 25 bp, Homo sapien
caacatggtggtccttgcttccagg

SEQ ID NO: 4144204 - DNA, 25 bp, Homo sapien
cacccaattggcatactgctctaca

SEQ ID NO: 4144205 - DNA, 25 bp, Homo sapien
agagcagcggactctaccagggcag

SEQ ID NO: 4144206 - DNA, 25 bp, Homo sapien
ccttcaaggagagcagcggactcta

SEQ ID NO: 4144207 - DNA, 25 bp, Homo sapien
tcaaggagagcagcggactctacca

SEQ ID NO: 4144208 - DNA, 25 bp, Homo sapien
agcggactctaccagggcaggcaac

SEQ ID NO: 4144209 - DNA, 25 bp, Homo sapien
ttctcccgtggagcacatgccactt

SEQ ID NO: 4144210 - DNA, 25 bp, Homo sapien
catgccacttgacaccactcttgtg

SEQ ID NO: 4144211 - DNA, 25 bp, Homo sapien
cttgacaccactcttgtggagattc

SEQ ID NO: 4144212 - DNA, 25 bp, Homo sapien
cttcctgcttctcgggaacccaggc

SEQ ID NO: 4144213 - DNA, 25 bp, Homo sapien
agccccgggacctgcagacagctaa

SEQ ID NO: 4144214 - DNA, 25 bp, Homo sapien
gacctgcagacagctaaatggaagc

SEQ ID NO: 4144215 - DNA, 25 bp, Homo sapien
taaatggaagcgaagacttgcactc

SEQ ID NO: 4144216 - DNA, 25 bp, Homo sapien
tgcagacagctaaatggaagcgaag

SEQ ID NO: 4144217 - DNA, 25 bp, Homo sapien
gggcccagtactggcactgcacagg

SEQ ID NO: 4144218 - DNA, 25 bp, Homo sapien
gtggcgatgcccacgaacacgcaca

SEQ ID NO: 4144219 - DNA, 25 bp, Homo sapien
acgccacgggcccagtactggcact

SEQ ID NO: 4144220 - DNA, 25 bp, Homo sapien
ctggtggtggcgatgcccacgaaca

SEQ ID NO: 4144221 - DNA, 25 bp, Homo sapien
gactcccataagggaaactggacca

SEQ ID NO: 4144222 - DNA, 25 bp, Homo sapien
cttccccaaggttgtctgacaactc

SEQ ID NO: 4144223 - DNA, 25 bp, Homo sapien
cccaaggttgtctgacaactcacca

SEQ ID NO: 4144224 - DNA, 25 bp, Homo sapien
caaggttgtctgacaactcaccaca

SEQ ID NO: 4144225 - DNA, 25 bp, Homo sapien
ttgtctgacaactcaccacactctg

SEQ ID NO: 4144226 - DNA, 25 bp, Homo sapien
tatactaatggaacgtgaccttctc

SEQ ID NO: 4144227 - DNA, 25 bp, Homo sapien
aaacattcctttgcagaattagggc

SEQ ID NO: 4144228 - DNA, 25 bp, Homo sapien
tatcatatgtaaagcgttcctcaag

SEQ ID NO: 4144229 - DNA, 25 bp, Homo sapien
tgaatgctggttattgagacactaa

SEQ ID NO: 4144230 - DNA, 25 bp, Homo sapien
cagtaaggaggctattctggctgga

SEQ ID NO: 4144231 - DNA, 25 bp, Homo sapien
gttgggtgccactctgacggactct

SEQ ID NO: 4144232 - DNA, 25 bp, Homo sapien
aatctgtggtaagggcaattcttca

SEQ ID NO: 4144233 - DNA, 25 bp, Homo sapien
tcttgtgacatgcaaccatatccag

SEQ ID NO: 4144234 - DNA, 25 bp, Homo sapien
gggcttgccatggagctataaacat

SEQ ID NO: 4144235 - DNA, 25 bp, Homo sapien
gaagtggaccaactaggaaggaaca

SEQ ID NO: 4144236 - DNA, 25 bp, Homo sapien
tgtcaactaggcagctggtgatctg

SEQ ID NO: 4144237 - DNA, 25 bp, Homo sapien
gaggccagtgtagcaattcaaacaa

SEQ ID NO: 4144238 - DNA, 25 bp, Homo sapien
gaatgtaggatatagtacaggtaac

SEQ ID NO: 4144239 - DNA, 25 bp, Homo sapien
catctatttggagggacaacagaat

SEQ ID NO: 4144240 - DNA, 25 bp, Homo sapien
ggaagactatgtattgattatgaca

SEQ ID NO: 4144241 - DNA, 25 bp, Homo sapien
tcacaggaagactatgtattgatta

SEQ ID NO: 4144242 - DNA, 25 bp, Homo sapien
gaaattcattaggtacaagactctg

SEQ ID NO: 4144243 - DNA, 25 bp, Homo sapien
ggtatgcattgcaatagtgaccaca

SEQ ID NO: 4144244 - DNA, 25 bp, Homo sapien
gggataatcaaatacacagcaacta

SEQ ID NO: 4144245 - DNA, 25 bp, Homo sapien
caaattaaatatgtgacagcgtgtg

SEQ ID NO: 4144246 - DNA, 25 bp, Homo sapien
caggctggagtgctggagtacagtg

SEQ ID NO: 4144247 - DNA, 25 bp, Homo sapien
acctccagctcctgggttcatatga

SEQ ID NO: 4144248 - DNA, 25 bp, Homo sapien
acagtggtgcaatcttggctcactg

SEQ ID NO: 4144249 - DNA, 25 bp, Homo sapien
tccagctcctgggttcatatgattc

SEQ ID NO: 4144250 - DNA, 25 bp, Homo sapien
ttactgatgacataagtgactttcc

SEQ ID NO: 4144251 - DNA, 25 bp, Homo sapien
ttttggtggcattctttactgatga

SEQ ID NO: 4144252 - DNA, 25 bp, Homo sapien
ggatgggaacttaagtgagaagcta

SEQ ID NO: 4144253 - DNA, 25 bp, Homo sapien
gtgactttcccaaagacttaacagc

SEQ ID NO: 4144254 - DNA, 25 bp, Homo sapien
aagaatccaccacatgatcctgcct

SEQ ID NO: 4144255 - DNA, 25 bp, Homo sapien
gctgactgccaagaatccaccacat

SEQ ID NO: 4144256 - DNA, 25 bp, Homo sapien
gactgccaagaatccaccacatgat

SEQ ID NO: 4144257 - DNA, 25 bp, Homo sapien
gccaagaatccaccacatgatcctg

SEQ ID NO: 4144258 - DNA, 25 bp, Homo sapien
accccctaagcactgcccaaggcag

SEQ ID NO: 4144259 - DNA, 25 bp, Homo sapien
atcatctttaaggtaattccagggc

SEQ ID NO: 4144260 - DNA, 25 bp, Homo sapien
aaccccctaagcactgcccaaggca

SEQ ID NO: 4144261 - DNA, 25 bp, Homo sapien
taaatcatctttaaggtaattccag

SEQ ID NO: 4144262 - DNA, 25 bp, Homo sapien
cagtaagttatggaggagcctctgc

SEQ ID NO: 4144263 - DNA, 25 bp, Homo sapien
gctgtcaaacatgtcacacaaaccg

SEQ ID NO: 4144264 - DNA, 25 bp, Homo sapien
taacacggtattgcatattgtcacc

SEQ ID NO: 4144265 - DNA, 25 bp, Homo sapien
tcgaaaatgcccagatgtgtagatc

SEQ ID NO: 4144266 - DNA, 25 bp, Homo sapien
gctctttaaagcatttgagttctcg

SEQ ID NO: 4144267 - DNA, 25 bp, Homo sapien
agctctttaaagcatttgagttctc

SEQ ID NO: 4144268 - DNA, 25 bp, Homo sapien
aagctctttaaagcatttgagttct

SEQ ID NO: 4144269 - DNA, 25 bp, Homo sapien
ctctttaaagcatttgagttctcgt

SEQ ID NO: 4144270 - DNA, 25 bp, Homo sapien
gatatttgcgccaagtagtttacaa

SEQ ID NO: 4144271 - DNA, 25 bp, Homo sapien
gatttctgatttgagggcaagtttc

SEQ ID NO: 4144272 - DNA, 25 bp, Homo sapien
cacacagaatggttcatctgcaatg

SEQ ID NO: 4144273 - DNA, 25 bp, Homo sapien
aacaagaaagagtgccaaggatggc

SEQ ID NO: 4144274 - DNA, 25 bp, Homo sapien
gaatttctgtgcatgacaagccatc

SEQ ID NO: 4144275 - DNA, 25 bp, Homo sapien
caacacctccaagatcacgggacat

SEQ ID NO: 4144276 - DNA, 25 bp, Homo sapien
catcaacacctccaagatcacggga

SEQ ID NO: 4144277 - DNA, 25 bp, Homo sapien
tcaacacctccaagatcacgggaca

SEQ ID NO: 4144278 - DNA, 25 bp, Homo sapien
tagaagttaactcgaagcaaggaag

SEQ ID NO: 4144279 - DNA, 25 bp, Homo sapien
cctcttatgtgcgtgacctccagtg

SEQ ID NO: 4144280 - DNA, 25 bp, Homo sapien
taggctaactgctttcgaggacagg

SEQ ID NO: 4144281 - DNA, 25 bp, Homo sapien
ttcctacaataaggctggagctgtc

SEQ ID NO: 4144282 - DNA, 25 bp, Homo sapien
ggtcctaactttactaccatgagag

SEQ ID NO: 4144283 - DNA, 25 bp, Homo sapien
tgttaaacccactttcgtatgtgaa

SEQ ID NO: 4144284 - DNA, 25 bp, Homo sapien
catgtatgcttcaataggtcctaac

SEQ ID NO: 4144285 - DNA, 25 bp, Homo sapien
tgttactaatagaccaatttgcctg

SEQ ID NO: 4144286 - DNA, 25 bp, Homo sapien
ggtatacatggctggattctttgaa

SEQ ID NO: 4144287 - DNA, 25 bp, Homo sapien
tcttcttagcctgagtctcgcttca

SEQ ID NO: 4144288 - DNA, 25 bp, Homo sapien
gtgtttcacgggctcctgacagcag

SEQ ID NO: 4144289 - DNA, 25 bp, Homo sapien
gacagcaggctagtcaaagttacct

SEQ ID NO: 4144290 - DNA, 25 bp, Homo sapien
ccaaaatgcgtctatcatttctgtt

SEQ ID NO: 4144291 - DNA, 25 bp, Homo sapien
cagcctggaccactgttctttaaag

SEQ ID NO: 4144292 - DNA, 25 bp, Homo sapien
agtgactccaaaatgcgtctatcat

SEQ ID NO: 4144293 - DNA, 25 bp, Homo sapien
cctggaccactgttctttaaagtga

SEQ ID NO: 4144294 - DNA, 25 bp, Homo sapien
ttgccagcgtaattcttgtctttgc

SEQ ID NO: 4144295 - DNA, 25 bp, Homo sapien
gtggtgactgcagcggcaaatccac

SEQ ID NO: 4144296 - DNA, 25 bp, Homo sapien
tgccacgtctagaggggtggtgact

SEQ ID NO: 4144297 - DNA, 25 bp, Homo sapien
tgccagcgtaattcttgtctttgcc

SEQ ID NO: 4144298 - DNA, 25 bp, Homo sapien
ctgcttatcagagctcacgagatga

SEQ ID NO: 4144299 - DNA, 25 bp, Homo sapien
tgcttatcagagctcacgagatgac

SEQ ID NO: 4144300 - DNA, 25 bp, Homo sapien
gctgcttatcagagctcacgagatg

SEQ ID NO: 4144301 - DNA, 25 bp, Homo sapien
agaccccatgcaggacagagagcac

SEQ ID NO: 4144302 - DNA, 25 bp, Homo sapien
cagaccccatgcaggacagagagca

SEQ ID NO: 4144303 - DNA, 25 bp, Homo sapien
ccccatgcaggacagagagcacatt

SEQ ID NO: 4144304 - DNA, 25 bp, Homo sapien
cctgtgaccgccagaccccatgcag

SEQ ID NO: 4144305 - DNA, 25 bp, Homo sapien
tgagacgcccgaagtccaggcagct

SEQ ID NO: 4144306 - DNA, 25 bp, Homo sapien
tacttcatgtcctccagatcatcaa

SEQ ID NO: 4144307 - DNA, 25 bp, Homo sapien
gatccaactcggcatcaggatgagg

SEQ ID NO: 4144308 - DNA, 25 bp, Homo sapien
ttgcaagaaaatccctggtatatgg

SEQ ID NO: 4144309 - DNA, 25 bp, Homo sapien
aactgcaatattgtgtctcacagaa

SEQ ID NO: 4144310 - DNA, 25 bp, Homo sapien
caatattgtgtctcacagaatagag

SEQ ID NO: 4144311 - DNA, 25 bp, Homo sapien
tgtgtctcacagaatagaggcctaa

SEQ ID NO: 4144312 - DNA, 25 bp, Homo sapien
gaggccactggaggattattaattg

SEQ ID NO: 4144313 - DNA, 25 bp, Homo sapien
gatggctgccattcgagggaagaca

SEQ ID NO: 4144314 - DNA, 25 bp, Homo sapien
tggctgccattcgagggaagacacc

SEQ ID NO: 4144315 - DNA, 25 bp, Homo sapien
actgatggctgccattcgagggaag

SEQ ID NO: 4144316 - DNA, 25 bp, Homo sapien
caacttccaacagcaagctgtgcgt

SEQ ID NO: 4144317 - DNA, 25 bp, Homo sapien
tagcacaactggtcttcagcactgg

SEQ ID NO: 4144318 - DNA, 25 bp, Homo sapien
tgctcagcggaagagggtttgcact

SEQ ID NO: 4144319 - DNA, 25 bp, Homo sapien
caggcccctctcttgacagaagtgg

SEQ ID NO: 4144320 - DNA, 25 bp, Homo sapien
ggatggcacaatctccatgccggta

SEQ ID NO: 4144321 - DNA, 25 bp, Homo sapien
gctctctggcatacaggccaatgac

SEQ ID NO: 4144322 - DNA, 25 bp, Homo sapien
tagctctctggcatacaggccaatg

SEQ ID NO: 4144323 - DNA, 25 bp, Homo sapien
ctcttagctctctggcatacaggcc

SEQ ID NO: 4144324 - DNA, 25 bp, Homo sapien
ctctggcatacaggccaatgacttc

SEQ ID NO: 4144325 - DNA, 25 bp, Homo sapien
ctgaggaaattgttcagagtaccgc

SEQ ID NO: 4144326 - DNA, 25 bp, Homo sapien
caaacttatttattaagaggttctg

SEQ ID NO: 4144327 - DNA, 25 bp, Homo sapien
ggaaattgttcagagtaccgccaca

SEQ ID NO: 4144328 - DNA, 25 bp, Homo sapien
atttattaagaggttctgaggaaat

SEQ ID NO: 4144329 - DNA, 25 bp, Homo sapien
caaagcctacccttacacaacagga

SEQ ID NO: 4144330 - DNA, 25 bp, Homo sapien
aaatgaaagctctaaaaggcctggc

SEQ ID NO: 4144331 - DNA, 25 bp, Homo sapien
cagcagcctagttacccagaaagag

SEQ ID NO: 4144332 - DNA, 25 bp, Homo sapien
gaaagagtgcttgctatgcacctgt

SEQ ID NO: 4144333 - DNA, 25 bp, Homo sapien
cccacctagtcacttgagttgcagc

SEQ ID NO: 4144334 - DNA, 25 bp, Homo sapien
cctgcacgaagccagctgggcccac

SEQ ID NO: 4144335 - DNA, 25 bp, Homo sapien
acgaagccagctgggcccacctagt

SEQ ID NO: 4144336 - DNA, 25 bp, Homo sapien
ggcccacctagtcacttgagttgca

SEQ ID NO: 4144337 - DNA, 25 bp, Homo sapien
gacaacactgctagattcctgacat

SEQ ID NO: 4144338 - DNA, 25 bp, Homo sapien
tctaaaatccctaagtgtggtgacc

SEQ ID NO: 4144339 - DNA, 25 bp, Homo sapien
gagaatggcgagaatggctcaccca

SEQ ID NO: 4144340 - DNA, 25 bp, Homo sapien
taggcgaagcaaaatcacatactgt

SEQ ID NO: 4144341 - DNA, 25 bp, Homo sapien
tttctactaaggacccagagcaggc

SEQ ID NO: 4144342 - DNA, 25 bp, Homo sapien
ttcgcacagatgaaactgagctggg

SEQ ID NO: 4144343 - DNA, 25 bp, Homo sapien
cctgggttctgggtataatttgcac

SEQ ID NO: 4144344 - DNA, 25 bp, Homo sapien
tcctttggccaaaagctgaagggag

SEQ ID NO: 4144345 - DNA, 25 bp, Homo sapien
tgtctgtaaggcgtagaatctgtcc

SEQ ID NO: 4144346 - DNA, 25 bp, Homo sapien
cactgctcatgtgtggatgcccctg

SEQ ID NO: 4144347 - DNA, 25 bp, Homo sapien
gaaatagttctggtgccttaacgca

SEQ ID NO: 4144348 - DNA, 25 bp, Homo sapien
ttgcacttcatagacccctaggctg

SEQ ID NO: 4144349 - DNA, 25 bp, Homo sapien
gcttgagaatcatcagaatggtgga

SEQ ID NO: 4144350 - DNA, 25 bp, Homo sapien
gcattggagtcagaggctagctact

SEQ ID NO: 4144351 - DNA, 25 bp, Homo sapien
tctttgagtagatggcacagcattg

SEQ ID NO: 4144352 - DNA, 25 bp, Homo sapien
tgaagagtttactgtcccaccccag

SEQ ID NO: 4144353 - DNA, 25 bp, Homo sapien
gatctctgcagtcatgaccagtggt

SEQ ID NO: 4144354 - DNA, 25 bp, Homo sapien
caggcagagccagttgtcttaagga

SEQ ID NO: 4144355 - DNA, 25 bp, Homo sapien
cacagacttctaattagatgaggtc

SEQ ID NO: 4144356 - DNA, 25 bp, Homo sapien
ctgccggctggctggtttgagaact

SEQ ID NO: 4144357 - DNA, 25 bp, Homo sapien
ctaatggttggacagagaagtcacc

SEQ ID NO: 4144358 - DNA, 25 bp, Homo sapien
ttagtgaatctaagtctgggctccc

SEQ ID NO: 4144359 - DNA, 25 bp, Homo sapien
gccccatgggtattgtcccctcaga

SEQ ID NO: 4144360 - DNA, 25 bp, Homo sapien
tgcatgtggctgtctagatccccag

SEQ ID NO: 4144361 - DNA, 25 bp, Homo sapien
gactaatgtgagaagtattgccatc

SEQ ID NO: 4144362 - DNA, 25 bp, Homo sapien
attgaatctatagactaatgtgaga

SEQ ID NO: 4144363 - DNA, 25 bp, Homo sapien
agtgggatgtgggttgcattgaatc

SEQ ID NO: 4144364 - DNA, 25 bp, Homo sapien
gtcactttcagtgtacacatcttca

SEQ ID NO: 4144365 - DNA, 25 bp, Homo sapien
tgaatagataccgtccttgcaaggg

SEQ ID NO: 4144366 - DNA, 25 bp, Homo sapien
aatgaggtgcattccccatagctgg

SEQ ID NO: 4144367 - DNA, 25 bp, Homo sapien
cactcttgatgaaccctcagttggg

SEQ ID NO: 4144368 - DNA, 25 bp, Homo sapien
tccatctgtcgggtgagacggaaca

SEQ ID NO: 4144369 - DNA, 25 bp, Homo sapien
cagttacagaacatatggccagtgg

SEQ ID NO: 4144370 - DNA, 25 bp, Homo sapien
tctgtggctaagagagcattctcgg

SEQ ID NO: 4144371 - DNA, 25 bp, Homo sapien
gcctggagcacctgtgagtatctca

SEQ ID NO: 4144372 - DNA, 25 bp, Homo sapien
ggccagtggatgtgctcccagttaa

SEQ ID NO: 4144373 - DNA, 25 bp, Homo sapien
aggcctgcgtgcctcaaacccgtaa

SEQ ID NO: 4144374 - DNA, 25 bp, Homo sapien
taggccagacggcacatgcaattcc

SEQ ID NO: 4144375 - DNA, 25 bp, Homo sapien
gacaaggtgatttctgcctaacact

SEQ ID NO: 4144376 - DNA, 25 bp, Homo sapien
taatctcagcgcaggtcagctttcc

SEQ ID NO: 4144377 - DNA, 25 bp, Homo sapien
gttcccctggcagtagagagtgctg

SEQ ID NO: 4144378 - DNA, 25 bp, Homo sapien
ttcgctaccacaggcatatattccc

SEQ ID NO: 4144379 - DNA, 25 bp, Homo sapien
tccatgaagtttagacttcgctacc

SEQ ID NO: 4144380 - DNA, 25 bp, Homo sapien
ccctgtctctaaatgcacatccatg

SEQ ID NO: 4144381 - DNA, 25 bp, Homo sapien
gctgggagatgccacccgttcccca

SEQ ID NO: 4144382 - DNA, 25 bp, Homo sapien
gaagcgaaggtggagagtcactgca

SEQ ID NO: 4144383 - DNA, 25 bp, Homo sapien
tctcccagtctctgctcgcttgttt

SEQ ID NO: 4144384 - DNA, 25 bp, Homo sapien
ccagtctctgctcgcttgtttgagg

SEQ ID NO: 4144385 - DNA, 25 bp, Homo sapien
gtttgggaaaggctttctgtgaagc

SEQ ID NO: 4144386 - DNA, 25 bp, Homo sapien
taaattgtgcgtaaggaaagcccac

SEQ ID NO: 4144387 - DNA, 25 bp, Homo sapien
tgaatgactctgagggaccaagtgg

SEQ ID NO: 4144388 - DNA, 25 bp, Homo sapien
ggacaaagtcccagctctttcagag

SEQ ID NO: 4144389 - DNA, 25 bp, Homo sapien
tctttcagagttggccctggctcca

SEQ ID NO: 4144390 - DNA, 25 bp, Homo sapien
ccttggctcccaagcatccagatgt

SEQ ID NO: 4144391 - DNA, 25 bp, Homo sapien
cttcgggtccggtgccaaatctggg

SEQ ID NO: 4144392 - DNA, 25 bp, Homo sapien
tatgaattctgtggagaaggccggc

SEQ ID NO: 4144393 - DNA, 25 bp, Homo sapien
tgtgctctatgttgcagagtctgcg

SEQ ID NO: 4144394 - DNA, 25 bp, Homo sapien
tgttgtgggtgaccctgtagttctg

SEQ ID NO: 4144395 - DNA, 25 bp, Homo sapien
tgctgttgtgggtgaccctgtagtt

SEQ ID NO: 4144396 - DNA, 25 bp, Homo sapien
aactgctgttgtgggtgaccctgta

SEQ ID NO: 4144397 - DNA, 25 bp, Homo sapien
gaactgctgttgtgggtgaccctgt

SEQ ID NO: 4144398 - DNA, 25 bp, Homo sapien
ggaagccctctcaccgtcctcttgt

SEQ ID NO: 4144399 - DNA, 25 bp, Homo sapien
aatttctgcagtggtatctctgctg

SEQ ID NO: 4144400 - DNA, 25 bp, Homo sapien
ttgtcgggacgtaacccaaggctca

SEQ ID NO: 4144401 - DNA, 25 bp, Homo sapien
aacccaaggctcattccaactcttg

SEQ ID NO: 4144402 - DNA, 25 bp, Homo sapien
cagtagagggcattggtccattttt

SEQ ID NO: 4144403 - DNA, 25 bp, Homo sapien
gtagagggcattggtccatttttgc

SEQ ID NO: 4144404 - DNA, 25 bp, Homo sapien
ccctttgtgggcatttcagtagagg

SEQ ID NO: 4144405 - DNA, 25 bp, Homo sapien
ttcagtagagggcattggtccattt

SEQ ID NO: 4144406 - DNA, 25 bp, Homo sapien
tatttggttccaagtaagagcccag

SEQ ID NO: 4144407 - DNA, 25 bp, Homo sapien
gagattcaatacgtcatcaaaggaa

SEQ ID NO: 4144408 - DNA, 25 bp, Homo sapien
gaaccctgatttggtgatgctatag

SEQ ID NO: 4144409 - DNA, 25 bp, Homo sapien
tggtgatgctatagcaactatttgg

SEQ ID NO: 4144410 - DNA, 25 bp, Homo sapien
aaaccctcgtatatgtatctgttca

SEQ ID NO: 4144411 - DNA, 25 bp, Homo sapien
cttacgggagctgttgaggacagca

SEQ ID NO: 4144412 - DNA, 25 bp, Homo sapien
agaaaaccctcgtatatgtatctgt

SEQ ID NO: 4144413 - DNA, 25 bp, Homo sapien
tatctgttcattcctcttacgggag

SEQ ID NO: 4144414 - DNA, 25 bp, Homo sapien
ctcctataaaccagttgaagcttac

SEQ ID NO: 4144415 - DNA, 25 bp, Homo sapien
cctcctataaaccagttgaagctta

SEQ ID NO: 4144416 - DNA, 25 bp, Homo sapien
acagtaattttgtctgatgcatcaa

SEQ ID NO: 4144417 - DNA, 25 bp, Homo sapien
tgctgcacttgtactgtcgagaaga

SEQ ID NO: 4144418 - DNA, 25 bp, Homo sapien
caagttacgattcccacagcaacag

SEQ ID NO: 4144419 - DNA, 25 bp, Homo sapien
tgtttttccggtggtgttgctgcac

SEQ ID NO: 4144420 - DNA, 25 bp, Homo sapien
ctctggccgcccttcatccccgcca

SEQ ID NO: 4144421 - DNA, 25 bp, Homo sapien
tctggccgcccttcatccccgccat

SEQ ID NO: 4144422 - DNA, 25 bp, Homo sapien
gtattggttgctgaattaatcctgc

SEQ ID NO: 4144423 - DNA, 25 bp, Homo sapien
tgctgaattaatcctgcagtgtaag

SEQ ID NO: 4144424 - DNA, 25 bp, Homo sapien
tggttgctgaattaatcctgcagtg

SEQ ID NO: 4144425 - DNA, 25 bp, Homo sapien
ctgaattaatcctgcagtgtaagtc

SEQ ID NO: 4144426 - DNA, 25 bp, Homo sapien
ttgtgattaggcccttatctggggg

SEQ ID NO: 4144427 - DNA, 25 bp, Homo sapien
aattgtgattaggcccttatctggg

SEQ ID NO: 4144428 - DNA, 25 bp, Homo sapien
tgtgattaggcccttatctggggga

SEQ ID NO: 4144429 - DNA, 25 bp, Homo sapien
tgattaggcccttatctgggggaga

SEQ ID NO: 4144430 - DNA, 25 bp, Homo sapien
gattttggtatagataccagtgtag

SEQ ID NO: 4144431 - DNA, 25 bp, Homo sapien
ggtatagataccagtgtagttggga

SEQ ID NO: 4144432 - DNA, 25 bp, Homo sapien
aggatccagagtcctcatgaggatt

SEQ ID NO: 4144433 - DNA, 25 bp, Homo sapien
gatccagagtcctcatgaggatttt

SEQ ID NO: 4144434 - DNA, 25 bp, Homo sapien
gatgtataagtaggatgatccctac

SEQ ID NO: 4144435 - DNA, 25 bp, Homo sapien
acggaagtgttttgcagcctgctgg

SEQ ID NO: 4144436 - DNA, 25 bp, Homo sapien
ttgaagggaacggaagtgttttgca

SEQ ID NO: 4144437 - DNA, 25 bp, Homo sapien
agcctgctgggatgtataagtagga

SEQ ID NO: 4144438 - DNA, 25 bp, Homo sapien
cctctgttccgaggcaggtctgcct

SEQ ID NO: 4144439 - DNA, 25 bp, Homo sapien
tgcctttgccgacggagctttgcag

SEQ ID NO: 4144440 - DNA, 25 bp, Homo sapien
tatggaagagcctgaccgttttctc

SEQ ID NO: 4144441 - DNA, 25 bp, Homo sapien
gcatttcctctgttccgaggcaggt

SEQ ID NO: 4144442 - DNA, 25 bp, Homo sapien
cgagtataggacaatctgggaagca

SEQ ID NO: 4144443 - DNA, 25 bp, Homo sapien
taatttttgaatggccactgggagc

SEQ ID NO: 4144444 - DNA, 25 bp, Homo sapien
cagtctggaattctgagagcctgct

SEQ ID NO: 4144445 - DNA, 25 bp, Homo sapien
catttatctcctggcacgtagaggg

SEQ ID NO: 4144446 - DNA, 25 bp, Homo sapien
gtttaactgcatctttgctggcgag

SEQ ID NO: 4144447 - DNA, 25 bp, Homo sapien
tgatgttgtgtagcatcctggcccc

SEQ ID NO: 4144448 - DNA, 25 bp, Homo sapien
tctttgatgttgtgtagcatcctgg

SEQ ID NO: 4144449 - DNA, 25 bp, Homo sapien
aactgcatctttgctggcgagggca

SEQ ID NO: 4144450 - DNA, 25 bp, Homo sapien
gacatctcgtcctttcccggaggaa

SEQ ID NO: 4144451 - DNA, 25 bp, Homo sapien
tctgagtctatctgattaggtaact

SEQ ID NO: 4144452 - DNA, 25 bp, Homo sapien
tcccggaggaatctctgagtctatc

SEQ ID NO: 4144453 - DNA, 25 bp, Homo sapien
tattgttgacatctcgtcctttccc

SEQ ID NO: 4144454 - DNA, 25 bp, Homo sapien
ttttaccagggagatctttcgtgta

SEQ ID NO: 4144455 - DNA, 25 bp, Homo sapien
ccttttaccagggagatctttcgtg

SEQ ID NO: 4144456 - DNA, 25 bp, Homo sapien
ttaccagggagatctttcgtgtatc

SEQ ID NO: 4144457 - DNA, 25 bp, Homo sapien
taccagggagatctttcgtgtatcc

SEQ ID NO: 4144458 - DNA, 25 bp, Homo sapien
ggatgggccacctgtcacattctat

SEQ ID NO: 4144459 - DNA, 25 bp, Homo sapien
tgcctttaaggactggatgggccac

SEQ ID NO: 4144460 - DNA, 25 bp, Homo sapien
cagtgaatacttgccataagtgaag

SEQ ID NO: 4144461 - DNA, 25 bp, Homo sapien
tctcaggcagtccttcagtgaatac

SEQ ID NO: 4144462 - DNA, 25 bp, Homo sapien
tccaggaagtgaattgttgatgcaa

SEQ ID NO: 4144463 - DNA, 25 bp, Homo sapien
tcagaagagctcgttgcttccagga

SEQ ID NO: 4144464 - DNA, 25 bp, Homo sapien
attgttgatgcaatgaagtgatgga

SEQ ID NO: 4144465 - DNA, 25 bp, Homo sapien
ctgcagctcgaagggagcagggttt

SEQ ID NO: 4144466 - DNA, 25 bp, Homo sapien
tcagtttgttttggcaaaaggtgac

SEQ ID NO: 4144467 - DNA, 25 bp, Homo sapien
tagagggtttaaagaaagcatggcc

SEQ ID NO: 4144468 - DNA, 25 bp, Homo sapien
gaaatgagtgaaggtctctcttaca

SEQ ID NO: 4144469 - DNA, 25 bp, Homo sapien
cattctcaagatctcacattattgg

SEQ ID NO: 4144470 - DNA, 25 bp, Homo sapien
ttgcccacgtgaacggccacgattg

SEQ ID NO: 4144471 - DNA, 25 bp, Homo sapien
taatctagcataaccggtaaggccc

SEQ ID NO: 4144472 - DNA, 25 bp, Homo sapien
gaatggccatgattcacagccttgc

SEQ ID NO: 4144473 - DNA, 25 bp, Homo sapien
cttccccagtgaatggccatgattc

SEQ ID NO: 4144474 - DNA, 25 bp, Homo sapien
cagactttagggctaactgaatcct

SEQ ID NO: 4144475 - DNA, 25 bp, Homo sapien
ctttagggctaactgaatcctcact

SEQ ID NO: 4144476 - DNA, 25 bp, Homo sapien
gaatcctcactgtacccgcttctct

SEQ ID NO: 4144477 - DNA, 25 bp, Homo sapien
agttacagactttagggctaactga

SEQ ID NO: 4144478 - DNA, 25 bp, Homo sapien
gctgtgcacctgctaaagccctgaa

SEQ ID NO: 4144479 - DNA, 25 bp, Homo sapien
tgtgcacctgctaaagccctgaagg

SEQ ID NO: 4144480 - DNA, 25 bp, Homo sapien
gtgcacctgctaaagccctgaaggt

SEQ ID NO: 4144481 - DNA, 25 bp, Homo sapien
agtgctgtgcacctgctaaagccct

SEQ ID NO: 4144482 - DNA, 25 bp, Homo sapien
tcacaatgaaagggcctctcccgct

SEQ ID NO: 4144483 - DNA, 25 bp, Homo sapien
cacaatgaaagggcctctcccgctt

SEQ ID NO: 4144484 - DNA, 25 bp, Homo sapien
acaatgaaagggcctctcccgcttc

SEQ ID NO: 4144485 - DNA, 25 bp, Homo sapien
caatgaaagggcctctcccgcttct

SEQ ID NO: 4144486 - DNA, 25 bp, Homo sapien
gtccattgggacggcctctggctga

SEQ ID NO: 4144487 - DNA, 25 bp, Homo sapien
gagtccattgggacggcctctggct

SEQ ID NO: 4144488 - DNA, 25 bp, Homo sapien
tccattgggacggcctctggctgac

SEQ ID NO: 4144489 - DNA, 25 bp, Homo sapien
agtccattgggacggcctctggctg

SEQ ID NO: 4144490 - DNA, 25 bp, Homo sapien
tacgtaggtgagattggcatggtcc

SEQ ID NO: 4144491 - DNA, 25 bp, Homo sapien
ggcatggtccaactagcacattcat

SEQ ID NO: 4144492 - DNA, 25 bp, Homo sapien
ggaagttgcttctaggcctgatata

SEQ ID NO: 4144493 - DNA, 25 bp, Homo sapien
agtctcccagcccattacgtaggtg

SEQ ID NO: 4144494 - DNA, 25 bp, Homo sapien
taaatagtccgcatttcggttgaat

SEQ ID NO: 4144495 - DNA, 25 bp, Homo sapien
tcggttgaataattggacatttttc

SEQ ID NO: 4144496 - DNA, 25 bp, Homo sapien
aaaggcctagcttaaatagtccgca

SEQ ID NO: 4144497 - DNA, 25 bp, Homo sapien
catttcggttgaataattggacatt

SEQ ID NO: 4144498 - DNA, 25 bp, Homo sapien
ctgggggtgagtgagtgggagtctg

SEQ ID NO: 4144499 - DNA, 25 bp, Homo sapien
agccagcacgcgtcgtgcgggccat

SEQ ID NO: 4144500 - DNA, 25 bp, Homo sapien
ctggagacgagcgagcgtgggtcgt

SEQ ID NO: 4144501 - DNA, 25 bp, Homo sapien
cgagcgtgggtcgtagagatttggg

SEQ ID NO: 4144502 - DNA, 25 bp, Homo sapien
atttgggggttagccagcacgcgtc

SEQ ID NO: 4144503 - DNA, 25 bp, Homo sapien
aagggagattctgcgtggaggtccg

SEQ ID NO: 4144504 - DNA, 25 bp, Homo sapien
cctggagaagaagagcgtgcctcgt

SEQ ID NO: 4144505 - DNA, 25 bp, Homo sapien
gcggagcctgtgagtgccgcccttt

SEQ ID NO: 4144506 - DNA, 25 bp, Homo sapien
tgcttgtgcgtgttggaagactgtc

SEQ ID NO: 4144507 - DNA, 25 bp, Homo sapien
ggtgggcgcgggctggctgcgttgc

SEQ ID NO: 4144508 - DNA, 25 bp, Homo sapien
tgcggtgggcgcgggctggctgcgt

SEQ ID NO: 4144509 - DNA, 25 bp, Homo sapien
tggggactcgctggactgcggtggg

SEQ ID NO: 4144510 - DNA, 25 bp, Homo sapien
actgcggtgggcgcgggctggctgc

SEQ ID NO: 4144511 - DNA, 25 bp, Homo sapien
tctccccttcttgacgcagagggcg

SEQ ID NO: 4144512 - DNA, 25 bp, Homo sapien
gagggcgtatcttcacgcctccttt

SEQ ID NO: 4144513 - DNA, 25 bp, Homo sapien
caacaacaacctgcgtgtctccttt

SEQ ID NO: 4144514 - DNA, 25 bp, Homo sapien
aacctgcgtgtctcctttaagaggc

SEQ ID NO: 4144515 - DNA, 25 bp, Homo sapien
acggacgcgggtttgcttctaatct

SEQ ID NO: 4144516 - DNA, 25 bp, Homo sapien
taaacctgtgtcttcgcttttggaa

SEQ ID NO: 4144517 - DNA, 25 bp, Homo sapien
aataaccaaggatgtcccagtcagg

SEQ ID NO: 4144518 - DNA, 25 bp, Homo sapien
gggaccacgcctaatgaaataacca

SEQ ID NO: 4144519 - DNA, 25 bp, Homo sapien
tcagtcaacctagaggtttcatgtc

SEQ ID NO: 4144520 - DNA, 25 bp, Homo sapien
tcagtccttcagtcaacctagaggt

SEQ ID NO: 4144521 - DNA, 25 bp, Homo sapien
agaggtttcatgtctactgcattca

SEQ ID NO: 4144522 - DNA, 25 bp, Homo sapien
caacctagaggtttcatgtctactg

SEQ ID NO: 4144523 - DNA, 25 bp, Homo sapien
tcccctccactaacgtccacatcga

SEQ ID NO: 4144524 - DNA, 25 bp, Homo sapien
cactaacgtccacatcgagaagcag

SEQ ID NO: 4144525 - DNA, 25 bp, Homo sapien
ctccactaacgtccacatcgagaag

SEQ ID NO: 4144526 - DNA, 25 bp, Homo sapien
ccctccactaacgtccacatcgaga

SEQ ID NO: 4144527 - DNA, 25 bp, Homo sapien
gtttcagtggggtcaagaagggaca

SEQ ID NO: 4144528 - DNA, 25 bp, Homo sapien
ttacaaggtagaggtcttggtcctg

SEQ ID NO: 4144529 - DNA, 25 bp, Homo sapien
gtaaagtccacatgggacgaacacc

SEQ ID NO: 4144530 - DNA, 25 bp, Homo sapien
aaagtccacatgggacgaacaccac

SEQ ID NO: 4144531 - DNA, 25 bp, Homo sapien
taaagtccacatgggacgaacacca

SEQ ID NO: 4144532 - DNA, 25 bp, Homo sapien
aaggcaccctttgggacttcgctgg

SEQ ID NO: 4144533 - DNA, 25 bp, Homo sapien
cactttggaatcctacacttagaca

SEQ ID NO: 4144534 - DNA, 25 bp, Homo sapien
gaatcctacacttagacattgctgc

SEQ ID NO: 4144535 - DNA, 25 bp, Homo sapien
tcaccttaattctcaaggcaccctt

SEQ ID NO: 4144536 - DNA, 25 bp, Homo sapien
gaatgctctggcctactgctttacc

SEQ ID NO: 4144537 - DNA, 25 bp, Homo sapien
cccaggagccaattacaagctgaca

SEQ ID NO: 4144538 - DNA, 25 bp, Homo sapien
tggagctcttcccaaagtcataggc

SEQ ID NO: 4144539 - DNA, 25 bp, Homo sapien
tatctgagaggcactattacggttc

SEQ ID NO: 4144540 - DNA, 25 bp, Homo sapien
atgaaatctcatctcgatctcatcc

SEQ ID NO: 4144541 - DNA, 25 bp, Homo sapien
ttggttcctgtatccaacctgaagt

SEQ ID NO: 4144542 - DNA, 25 bp, Homo sapien
aatctcatctcgatctcatccactt

SEQ ID NO: 4144543 - DNA, 25 bp, Homo sapien
gaaatctcatctcgatctcatccac

SEQ ID NO: 4144544 - DNA, 25 bp, Homo sapien
gagggcgatagcattccaaacaggg

SEQ ID NO: 4144545 - DNA, 25 bp, Homo sapien
gggagggcgatagcattccaaacag

SEQ ID NO: 4144546 - DNA, 25 bp, Homo sapien
tcacctgagctgtgacacatgaccg

SEQ ID NO: 4144547 - DNA, 25 bp, Homo sapien
agctgtgacacatgaccgggaagag

SEQ ID NO: 4144548 - DNA, 25 bp, Homo sapien
tgctcggtgtcccatgcatgcatac

SEQ ID NO: 4144549 - DNA, 25 bp, Homo sapien
ttgaccaatgctttcctgatggtga

SEQ ID NO: 4144550 - DNA, 25 bp, Homo sapien
gcatacaggagttgaccaatgcttt

SEQ ID NO: 4144551 - DNA, 25 bp, Homo sapien
cttgctcggtgtcccatgcatgcat

SEQ ID NO: 4144552 - DNA, 25 bp, Homo sapien
ctgtgacagcgagtggtttccaaag

SEQ ID NO: 4144553 - DNA, 25 bp, Homo sapien
cagcgagtggtttccaaagcagtga

SEQ ID NO: 4144554 - DNA, 25 bp, Homo sapien
tgacagcgagtggtttccaaagcag

SEQ ID NO: 4144555 - DNA, 25 bp, Homo sapien
gacagcgagtggtttccaaagcagt

SEQ ID NO: 4144556 - DNA, 25 bp, Homo sapien
gtgttactagaaggagtaaaacgca

SEQ ID NO: 4144557 - DNA, 25 bp, Homo sapien
tctcccaccggtgttactagaagga

SEQ ID NO: 4144558 - DNA, 25 bp, Homo sapien
tgttactagaaggagtaaaacgcat

SEQ ID NO: 4144559 - DNA, 25 bp, Homo sapien
ctcccaccggtgttactagaaggag

SEQ ID NO: 4144560 - DNA, 25 bp, Homo sapien
gagcaggccaattctagagcagaaa

SEQ ID NO: 4144561 - DNA, 25 bp, Homo sapien
ggccatcacagaaactcaatgtgtt

SEQ ID NO: 4144562 - DNA, 25 bp, Homo sapien
ctgatgtccaaaggctaccaggcca

SEQ ID NO: 4144563 - DNA, 25 bp, Homo sapien
cacagagcaggccaattctagagca

SEQ ID NO: 4144564 - DNA, 25 bp, Homo sapien
ctatggcacagaggaggcagtcact

SEQ ID NO: 4144565 - DNA, 25 bp, Homo sapien
tggcacagaggaggcagtcacttta

SEQ ID NO: 4144566 - DNA, 25 bp, Homo sapien
tatggcacagaggaggcagtcactt

SEQ ID NO: 4144567 - DNA, 25 bp, Homo sapien
ggcacagaggaggcagtcactttac

SEQ ID NO: 4144568 - DNA, 25 bp, Homo sapien
attgagaggcgcctttcttctgaag

SEQ ID NO: 4144569 - DNA, 25 bp, Homo sapien
ttttatcccagaacgctgaaagcgt

SEQ ID NO: 4144570 - DNA, 25 bp, Homo sapien
ttttgagcaccattcattgagaggc

SEQ ID NO: 4144571 - DNA, 25 bp, Homo sapien
tcctcctcggcttcagaagaagttt

SEQ ID NO: 4144572 - DNA, 25 bp, Homo sapien
tggacatccaatgggcaacaagaga

SEQ ID NO: 4144573 - DNA, 25 bp, Homo sapien
tgcctgtttgctcggtggacatcca

SEQ ID NO: 4144574 - DNA, 25 bp, Homo sapien
gagggccttattgcttttctcaagg

SEQ ID NO: 4144575 - DNA, 25 bp, Homo sapien
tgtgaaaaactatttgagggcctta

SEQ ID NO: 4144576 - DNA, 25 bp, Homo sapien
aggcctggagaacatatatcagtgc

SEQ ID NO: 4144577 - DNA, 25 bp, Homo sapien
gaacatatatcagtgcctcttctct

SEQ ID NO: 4144578 - DNA, 25 bp, Homo sapien
cctggagaacatatatcagtgcctc

SEQ ID NO: 4144579 - DNA, 25 bp, Homo sapien
aacatatatcagtgcctcttctctt

SEQ ID NO: 4144580 - DNA, 25 bp, Homo sapien
ctttggtgtctacaatatcatcttt

SEQ ID NO: 4144581 - DNA, 25 bp, Homo sapien
cctttggtgtctacaatatcatctt

SEQ ID NO: 4144582 - DNA, 25 bp, Homo sapien
tcctttggtgtctacaatatcatct

SEQ ID NO: 4144583 - DNA, 25 bp, Homo sapien
gcaggcaggcacagttgaacccagg

SEQ ID NO: 4144584 - DNA, 25 bp, Homo sapien
agcaggcaggcacagttgaacccag

SEQ ID NO: 4144585 - DNA, 25 bp, Homo sapien
ttacaaagcatgcttctctaggtgg

SEQ ID NO: 4144586 - DNA, 25 bp, Homo sapien
aagcatgcttctctaggtggagcag

SEQ ID NO: 4144587 - DNA, 25 bp, Homo sapien
caattcatagggactaggtgccagc

SEQ ID NO: 4144588 - DNA, 25 bp, Homo sapien
tcaattcatagggactaggtgccag

SEQ ID NO: 4144589 - DNA, 25 bp, Homo sapien
gccatcaattcatagggactaggtg

SEQ ID NO: 4144590 - DNA, 25 bp, Homo sapien
catcaattcatagggactaggtgcc

SEQ ID NO: 4144591 - DNA, 25 bp, Homo sapien
accacatcagcattccagttccagc

SEQ ID NO: 4144592 - DNA, 25 bp, Homo sapien
tgtcaccacatcagcattccagttc

SEQ ID NO: 4144593 - DNA, 25 bp, Homo sapien
ctcagctgtcaccacatcagcattc

SEQ ID NO: 4144594 - DNA, 25 bp, Homo sapien
agctgtcaccacatcagcattccag

SEQ ID NO: 4144595 - DNA, 25 bp, Homo sapien
atctgattggccctttggagttagc

SEQ ID NO: 4144596 - DNA, 25 bp, Homo sapien
taaggcaagtaaagcctctttgtaa

SEQ ID NO: 4144597 - DNA, 25 bp, Homo sapien
tctttgtaatggcttaagactagca

SEQ ID NO: 4144598 - DNA, 25 bp, Homo sapien
ggccctttggagttagcagatgtaa

SEQ ID NO: 4144599 - DNA, 25 bp, Homo sapien
aaacattggtggtagcttcagtaac

SEQ ID NO: 4144600 - DNA, 25 bp, Homo sapien
tctctgggccatatcagtaacagca

SEQ ID NO: 4144601 - DNA, 25 bp, Homo sapien
cagtaactagaaccagtaggctgtc

SEQ ID NO: 4144602 - DNA, 25 bp, Homo sapien
gaatagatctgcacgatggtctctg

SEQ ID NO: 4144603 - DNA, 25 bp, Homo sapien
gggcagcatctgactggaacggaga

SEQ ID NO: 4144604 - DNA, 25 bp, Homo sapien
tctctgtacaaaggtccatgggcag

SEQ ID NO: 4144605 - DNA, 25 bp, Homo sapien
ctctgtacaaaggtccatgggcagc

SEQ ID NO: 4144606 - DNA, 25 bp, Homo sapien
ctgagccttattactggataataag

SEQ ID NO: 4144607 - DNA, 25 bp, Homo sapien
ggtaaggaacgctccatttgtcttg

SEQ ID NO: 4144608 - DNA, 25 bp, Homo sapien
ccgtgggtaaggaacgctccatttg

SEQ ID NO: 4144609 - DNA, 25 bp, Homo sapien
catattttattcctgccgtgggtaa

SEQ ID NO: 4144610 - DNA, 25 bp, Homo sapien
tgaataaaggaaaggtggccctcag

SEQ ID NO: 4144611 - DNA, 25 bp, Homo sapien
aaaggtggccctcagggaaagtgag

SEQ ID NO: 4144612 - DNA, 25 bp, Homo sapien
ctatggtgaataaaggaaaggtggc

SEQ ID NO: 4144613 - DNA, 25 bp, Homo sapien
aggtggccctcagggaaagtgagga

SEQ ID NO: 4144614 - DNA, 25 bp, Homo sapien
gaagggatgcaattcctttaatgaa

SEQ ID NO: 4144615 - DNA, 25 bp, Homo sapien
tgttggcaggattttccggaatgtt

SEQ ID NO: 4144616 - DNA, 25 bp, Homo sapien
aatgttatcttcagtcattcgaagg

SEQ ID NO: 4144617 - DNA, 25 bp, Homo sapien
tggcaggattttccggaatgttatc

SEQ ID NO: 4144618 - DNA, 25 bp, Homo sapien
tttatacatattcttacaccctcac

SEQ ID NO: 4144619 - DNA, 25 bp, Homo sapien
cctgaaatcctgtgtatgtctcttt

SEQ ID NO: 4144620 - DNA, 25 bp, Homo sapien
cctgtgtatgtctctttatacatat

SEQ ID NO: 4144621 - DNA, 25 bp, Homo sapien
tacatattcttacaccctcacaggt

SEQ ID NO: 4144622 - DNA, 25 bp, Homo sapien
gaaatgtgccatgtgcttaaaaact

SEQ ID NO: 4144623 - DNA, 25 bp, Homo sapien
tttttcaggcaagagaaactgtaca

SEQ ID NO: 4144624 - DNA, 25 bp, Homo sapien
tgagtaaggacttgctgagaccagt

SEQ ID NO: 4144625 - DNA, 25 bp, Homo sapien
ctttgtccaagtgcgtttttcaggc

SEQ ID NO: 4144626 - DNA, 25 bp, Homo sapien
gttgcaacaactccgctcagctgga

SEQ ID NO: 4144627 - DNA, 25 bp, Homo sapien
tggagtttctcagaagcccggcatt

SEQ ID NO: 4144628 - DNA, 25 bp, Homo sapien
gcccggcattcacccatgactgagt

SEQ ID NO: 4144629 - DNA, 25 bp, Homo sapien
aacagttctgaagttgcaacaactc

SEQ ID NO: 4144630 - DNA, 25 bp, Homo sapien
aatacatggcgttatgttttctcag

SEQ ID NO: 4144631 - DNA, 25 bp, Homo sapien
ggtattgcaccggattcttttgaat

SEQ ID NO: 4144632 - DNA, 25 bp, Homo sapien
ctctccaatacatggcgttatgttt

SEQ ID NO: 4144633 - DNA, 25 bp, Homo sapien
ctcctccttggtattgcaccggatt

SEQ ID NO: 4144634 - DNA, 25 bp, Homo sapien
ctttgcctctgtccaaaatccagaa

SEQ ID NO: 4144635 - DNA, 25 bp, Homo sapien
aatccagaaacctcttacagttcca

SEQ ID NO: 4144636 - DNA, 25 bp, Homo sapien
ggctttgcctctgtccaaaatccag

SEQ ID NO: 4144637 - DNA, 25 bp, Homo sapien
tccaggttcataagacatgctaaaa

SEQ ID NO: 4144638 - DNA, 25 bp, Homo sapien
ggttaatgaagctgtgttgttctaa

SEQ ID NO: 4144639 - DNA, 25 bp, Homo sapien
gttgttctaatctcatcttaaatga

SEQ ID NO: 4144640 - DNA, 25 bp, Homo sapien
gaagctgtgttgttctaatctcatc

SEQ ID NO: 4144641 - DNA, 25 bp, Homo sapien
gccaggctgccaaggttaatgaagc

SEQ ID NO: 4144642 - DNA, 25 bp, Homo sapien
gtcccgggttgaaggccaatgccat

SEQ ID NO: 4144643 - DNA, 25 bp, Homo sapien
gctggtcccgggttgaaggccaatg

SEQ ID NO: 4144644 - DNA, 25 bp, Homo sapien
tggctggtcccgggttgaaggccaa

SEQ ID NO: 4144645 - DNA, 25 bp, Homo sapien
tggtcccgggttgaaggccaatgcc

SEQ ID NO: 4144646 - DNA, 25 bp, Homo sapien
aatgacacatggatcaatacagcag

SEQ ID NO: 4144647 - DNA, 25 bp, Homo sapien
ttgctttcaggagaatgacacatgg

SEQ ID NO: 4144648 - DNA, 25 bp, Homo sapien
gctttcaggagaatgacacatggat

SEQ ID NO: 4144649 - DNA, 25 bp, Homo sapien
gacacatggatcaatacagcagcca

SEQ ID NO: 4144650 - DNA, 25 bp, Homo sapien
ggatttggagcttcctaaaccctga

SEQ ID NO: 4144651 - DNA, 25 bp, Homo sapien
tttggagcttcctaaaccctgattc

SEQ ID NO: 4144652 - DNA, 25 bp, Homo sapien
tggatttggagcttcctaaaccctg

SEQ ID NO: 4144653 - DNA, 25 bp, Homo sapien
gatttggagcttcctaaaccctgat

SEQ ID NO: 4144654 - DNA, 25 bp, Homo sapien
gatcccgcaaccttatcagaagctg

SEQ ID NO: 4144655 - DNA, 25 bp, Homo sapien
gaactggtggattcctgcagacagg

SEQ ID NO: 4144656 - DNA, 25 bp, Homo sapien
tgcagacagggagcaattgaggtcc

SEQ ID NO: 4144657 - DNA, 25 bp, Homo sapien
ttcagaatgtagatgctgggcctgc

SEQ ID NO: 4144658 - DNA, 25 bp, Homo sapien
tgagtgagtgtacaaaaccaatgct

SEQ ID NO: 4144659 - DNA, 25 bp, Homo sapien
tgaaggcccctagagtactgagtga

SEQ ID NO: 4144660 - DNA, 25 bp, Homo sapien
gggtggtgtccttaagatcctgtct

SEQ ID NO: 4144661 - DNA, 25 bp, Homo sapien
tccacagctcttgttgccttagggt

SEQ ID NO: 4144662 - DNA, 25 bp, Homo sapien
cactggtcattagtggcaggaacct

SEQ ID NO: 4144663 - DNA, 25 bp, Homo sapien
gaagcctgtgccctgtttaccaatg

SEQ ID NO: 4144664 - DNA, 25 bp, Homo sapien
ggtcattagtggcaggaacctccaa

SEQ ID NO: 4144665 - DNA, 25 bp, Homo sapien
tgtgccctgtttaccaatgacacag

SEQ ID NO: 4144666 - DNA, 25 bp, Homo sapien
aatgaccatctttattctgggagaa

SEQ ID NO: 4144667 - DNA, 25 bp, Homo sapien
ggagaaaagggactgctgtttctct

SEQ ID NO: 4144668 - DNA, 25 bp, Homo sapien
tgggagaaaagggactgctgtttct

SEQ ID NO: 4144669 - DNA, 25 bp, Homo sapien
ttgcacaaggcaggaatgaccatct

SEQ ID NO: 4144670 - DNA, 25 bp, Homo sapien
gagtcaggtggcctttaagatcaca

SEQ ID NO: 4144671 - DNA, 25 bp, Homo sapien
agtcaggtggcctttaagatcacac

SEQ ID NO: 4144672 - DNA, 25 bp, Homo sapien
tttaatcagtaatttctggccaaaa

SEQ ID NO: 4144673 - DNA, 25 bp, Homo sapien
caggtctgttaaacactgaatttcc

SEQ ID NO: 4144674 - DNA, 25 bp, Homo sapien
tattatcaggtctgttaaacactga

SEQ ID NO: 4144675 - DNA, 25 bp, Homo sapien
ccaggcattcacttctcgagaggcc

SEQ ID NO: 4144676 - DNA, 25 bp, Homo sapien
ttcacttctcgagaggcctcatttt

SEQ ID NO: 4144677 - DNA, 25 bp, Homo sapien
aaatatggcttcagactcttaacca

SEQ ID NO: 4144678 - DNA, 25 bp, Homo sapien
tgcaaattggttgtttccatgtcct

SEQ ID NO: 4144679 - DNA, 25 bp, Homo sapien
tgagattactgctaaagtgttgatc

SEQ ID NO: 4144680 - DNA, 25 bp, Homo sapien
cagccagtcgatgaatggagattta

SEQ ID NO: 4144681 - DNA, 25 bp, Homo sapien
ggagcttacgttcaatgcggctcat

SEQ ID NO: 4144682 - DNA, 25 bp, Homo sapien
acttggagcttacgttcaatgcggc

SEQ ID NO: 4144683 - DNA, 25 bp, Homo sapien
agacacagtctgcacttggagctta

SEQ ID NO: 4144684 - DNA, 25 bp, Homo sapien
cagtctgcacttggagcttacgttc

SEQ ID NO: 4144685 - DNA, 25 bp, Homo sapien
taaatagggaaagaatgccttgtaa

SEQ ID NO: 4144686 - DNA, 25 bp, Homo sapien
agggagaaagcctctctaaataggg

SEQ ID NO: 4144687 - DNA, 25 bp, Homo sapien
tgccttgtaaatctacatcataaag

SEQ ID NO: 4144688 - DNA, 25 bp, Homo sapien
tgtaaatctacatcataaagggcca

SEQ ID NO: 4144689 - DNA, 25 bp, Homo sapien
ccttgtgttcttaggaagcatatct

SEQ ID NO: 4144690 - DNA, 25 bp, Homo sapien
gcatatctgcacgactgtctgtcat

SEQ ID NO: 4144691 - DNA, 25 bp, Homo sapien
gaagcatatctgcacgactgtctgt

SEQ ID NO: 4144692 - DNA, 25 bp, Homo sapien
taggaagcatatctgcacgactgtc

SEQ ID NO: 4144693 - DNA, 25 bp, Homo sapien
caatggtaaataatttcagcaggat

SEQ ID NO: 4144694 - DNA, 25 bp, Homo sapien
tagtcctattttgtatctaaacggc

SEQ ID NO: 4144695 - DNA, 25 bp, Homo sapien
ggctccaatggtaaataatttcagc

SEQ ID NO: 4144696 - DNA, 25 bp, Homo sapien
aagcttcactgcctttaggagtaca

SEQ ID NO: 4144697 - DNA, 25 bp, Homo sapien
tctcagcgtcccatatgtataataa

SEQ ID NO: 4144698 - DNA, 25 bp, Homo sapien
tcatctctttctcagcgtcccatat

SEQ ID NO: 4144699 - DNA, 25 bp, Homo sapien
cagcgtcccatatgtataataatag

SEQ ID NO: 4144700 - DNA, 25 bp, Homo sapien
tctttctcagcgtcccatatgtata

SEQ ID NO: 4144701 - DNA, 25 bp, Homo sapien
tatgtggcagtttcaacagtaagtc

SEQ ID NO: 4144702 - DNA, 25 bp, Homo sapien
tccaagtccaggcactggtatgtgg

SEQ ID NO: 4144703 - DNA, 25 bp, Homo sapien
caacagtaagtcgatacaagagctc

SEQ ID NO: 4144704 - DNA, 25 bp, Homo sapien
taagtcgatacaagagctcggatgg

SEQ ID NO: 4144705 - DNA, 25 bp, Homo sapien
aagctcgcgggctgtttcagctgaa

SEQ ID NO: 4144706 - DNA, 25 bp, Homo sapien
cagacatctcctcggagtctcgccc

SEQ ID NO: 4144707 - DNA, 25 bp, Homo sapien
ccccacgtggagctcgaatgaagct

SEQ ID NO: 4144708 - DNA, 25 bp, Homo sapien
agctcgaatgaagctcgcgggctgt

SEQ ID NO: 4144709 - DNA, 25 bp, Homo sapien
cactgaccattgacgataagcttca

SEQ ID NO: 4144710 - DNA, 25 bp, Homo sapien
gcatgacataatcggacactgacca

SEQ ID NO: 4144711 - DNA, 25 bp, Homo sapien
aaacaacacggcatgacataatcgg

SEQ ID NO: 4144712 - DNA, 25 bp, Homo sapien
ttggaaaaacaacacggcatgacat

SEQ ID NO: 4144713 - DNA, 25 bp, Homo sapien
gaaattgaagtgtaggattttctcc

SEQ ID NO: 4144714 - DNA, 25 bp, Homo sapien
ggttctttgtctaacacaaggtcaa

SEQ ID NO: 4144715 - DNA, 25 bp, Homo sapien
tttctccctattgaacatgtctggt

SEQ ID NO: 4144716 - DNA, 25 bp, Homo sapien
taacagcatgtaaaggtctgggaat

SEQ ID NO: 4144717 - DNA, 25 bp, Homo sapien
gagggctgttgtccaaaaatgcaaa

SEQ ID NO: 4144718 - DNA, 25 bp, Homo sapien
gggctgttgtccaaaaatgcaaagg

SEQ ID NO: 4144719 - DNA, 25 bp, Homo sapien
gctgttgtccaaaaatgcaaaggaa

SEQ ID NO: 4144720 - DNA, 25 bp, Homo sapien
aatgcaaaggaaatctgacgtccca

SEQ ID NO: 4144721 - DNA, 25 bp, Homo sapien
gactagcttccggtatgaaatcaag

SEQ ID NO: 4144722 - DNA, 25 bp, Homo sapien
tccggtatgaaatcaagctctgcgt

SEQ ID NO: 4144723 - DNA, 25 bp, Homo sapien
tatgaaatcaagctctgcgtgagag

SEQ ID NO: 4144724 - DNA, 25 bp, Homo sapien
cctgccagtgactagcttccggtat

SEQ ID NO: 4144725 - DNA, 25 bp, Homo sapien
gccatttctcgatggggccccgact

SEQ ID NO: 4144726 - DNA, 25 bp, Homo sapien
tggggccccgactccagctatttaa

SEQ ID NO: 4144727 - DNA, 25 bp, Homo sapien
ctgccgacgcggccatttctcgatg

SEQ ID NO: 4144728 - DNA, 25 bp, Homo sapien
gatggggccccgactccagctattt

SEQ ID NO: 4144729 - DNA, 25 bp, Homo sapien
acgagggaagctcgaacaacggcgg

SEQ ID NO: 4144730 - DNA, 25 bp, Homo sapien
ggcagagcctcacgagggaagctcg

SEQ ID NO: 4144731 - DNA, 25 bp, Homo sapien
gaagctcgaacaacggcggccgccg

SEQ ID NO: 4144732 - DNA, 25 bp, Homo sapien
agggaagctcgaacaacggcggccg

SEQ ID NO: 4144733 - DNA, 25 bp, Homo sapien
gaatcccattcggtgttggggaaga

SEQ ID NO: 4144734 - DNA, 25 bp, Homo sapien
agatggaatcccattcggtgttggg

SEQ ID NO: 4144735 - DNA, 25 bp, Homo sapien
cattcggtgttggggaagacttact

SEQ ID NO: 4144736 - DNA, 25 bp, Homo sapien
tgaagatggaatcccattcggtgtt

SEQ ID NO: 4144737 - DNA, 25 bp, Homo sapien
gcaagaacgtttctatgacaggaaa

SEQ ID NO: 4144738 - DNA, 25 bp, Homo sapien
aatgttttcccgtgatccacttcca

SEQ ID NO: 4144739 - DNA, 25 bp, Homo sapien
taagggctgattgcagcaagaacgt

SEQ ID NO: 4144740 - DNA, 25 bp, Homo sapien
tgtctgtcaactgtccttcatcgta

SEQ ID NO: 4144741 - DNA, 25 bp, Homo sapien
caatataaacatcaagtggacaata

SEQ ID NO: 4144742 - DNA, 25 bp, Homo sapien
aatataaacatcaagtggacaatac

SEQ ID NO: 4144743 - DNA, 25 bp, Homo sapien
ttggtgcagataccaacagaagttc

SEQ ID NO: 4144744 - DNA, 25 bp, Homo sapien
tggtgcagataccaacagaagttcc

SEQ ID NO: 4144745 - DNA, 25 bp, Homo sapien
gtagtccaatgacctaccctaggca

SEQ ID NO: 4144746 - DNA, 25 bp, Homo sapien
caaaagaagttaagcccatgcagaa

SEQ ID NO: 4144747 - DNA, 25 bp, Homo sapien
taaacggttacatcacaagcatcag

SEQ ID NO: 4144748 - DNA, 25 bp, Homo sapien
gaggaaccagaaactactgttggaa

SEQ ID NO: 4144749 - DNA, 25 bp, Homo sapien
gcctattctggctcgaagcaaggat

SEQ ID NO: 4144750 - DNA, 25 bp, Homo sapien
tactttctgtaaggccgctagtgaa

SEQ ID NO: 4144751 - DNA, 25 bp, Homo sapien
tatatctagacaaggcactgtttgc

SEQ ID NO: 4144752 - DNA, 25 bp, Homo sapien
taaagaccccaatagaattctgtgg

SEQ ID NO: 4144753 - DNA, 25 bp, Homo sapien
ttgtatacagctgctaagccctgga

SEQ ID NO: 4144754 - DNA, 25 bp, Homo sapien
gaggatacagtttagcaacagcaca

SEQ ID NO: 4144755 - DNA, 25 bp, Homo sapien
caacagtcacttgagtagctcgaac

SEQ ID NO: 4144756 - DNA, 25 bp, Homo sapien
gcacattcaaaatgccggccaaggt

SEQ ID NO: 4144757 - DNA, 25 bp, Homo sapien
cctaagaatgagatgccagtgatgc

SEQ ID NO: 4144758 - DNA, 25 bp, Homo sapien
tgaaagataggcataggctcagacc

SEQ ID NO: 4144759 - DNA, 25 bp, Homo sapien
tcagctagaaggaggattccaacgt

SEQ ID NO: 4144760 - DNA, 25 bp, Homo sapien
gacattaaattagaccactgcagga

SEQ ID NO: 4144761 - DNA, 25 bp, Homo sapien
agcgctgaccggtatttgggtgact

SEQ ID NO: 4144762 - DNA, 25 bp, Homo sapien
ctgaccggtatttgggtgactgcca

SEQ ID NO: 4144763 - DNA, 25 bp, Homo sapien
tgccttgagcgctgaccggtatttg

SEQ ID NO: 4144764 - DNA, 25 bp, Homo sapien
tgtaagtgccttgagcgctgaccgg

SEQ ID NO: 4144765 - DNA, 25 bp, Homo sapien
ccattttacatatagtgggtccgtg

SEQ ID NO: 4144766 - DNA, 25 bp, Homo sapien
ttttacatatagtgggtccgtggag

SEQ ID NO: 4144767 - DNA, 25 bp, Homo sapien
tttacatatagtgggtccgtggagg

SEQ ID NO: 4144768 - DNA, 25 bp, Homo sapien
cattttacatatagtgggtccgtgg

SEQ ID NO: 4144769 - DNA, 25 bp, Homo sapien
tgcatactcacttcctgcatattca

SEQ ID NO: 4144770 - DNA, 25 bp, Homo sapien
tcaccacttcctgcatataccactt

SEQ ID NO: 4144771 - DNA, 25 bp, Homo sapien
gcatactcacttcctgcatattcac

SEQ ID NO: 4144772 - DNA, 25 bp, Homo sapien
ctgcatactcacttcctgcatattc

SEQ ID NO: 4144773 - DNA, 25 bp, Homo sapien
aggtcaccacttcctgtgtactcac

SEQ ID NO: 4144774 - DNA, 25 bp, Homo sapien
gtgggcaggtcaccacttcctgtgt

SEQ ID NO: 4144775 - DNA, 25 bp, Homo sapien
ggcaggtcaccacttcctgtgtact

SEQ ID NO: 4144776 - DNA, 25 bp, Homo sapien
tgggcaggtcaccacttcctgtgta

SEQ ID NO: 4144777 - DNA, 25 bp, Homo sapien
gagatccctgatgctgacattggaa

SEQ ID NO: 4144778 - DNA, 25 bp, Homo sapien
tgctgacattggaactcagtttctt

SEQ ID NO: 4144779 - DNA, 25 bp, Homo sapien
atagagatccctgatgctgacattg

SEQ ID NO: 4144780 - DNA, 25 bp, Homo sapien
tgatgctgacattggaactcagttt

SEQ ID NO: 4144781 - DNA, 25 bp, Homo sapien
tctgaaaaggcatagagacccagtt

SEQ ID NO: 4144782 - DNA, 25 bp, Homo sapien
gctctgaaaaggcatagagacccag

SEQ ID NO: 4144783 - DNA, 25 bp, Homo sapien
tgaaaaggcatagagacccagtttg

SEQ ID NO: 4144784 - DNA, 25 bp, Homo sapien
aaaaggcatagagacccagtttggt

SEQ ID NO: 4144785 - DNA, 25 bp, Homo sapien
tgggaaaaccttaatgcaaggtaga

SEQ ID NO: 4144786 - DNA, 25 bp, Homo sapien
aagagatttaatgagctcactccgg

SEQ ID NO: 4144787 - DNA, 25 bp, Homo sapien
taatgcaaggtagagagcaagccca

SEQ ID NO: 4144788 - DNA, 25 bp, Homo sapien
gctcctttccaaggcaagagattta

SEQ ID NO: 4144789 - DNA, 25 bp, Homo sapien
caggtttttgatccataacagttat

SEQ ID NO: 4144790 - DNA, 25 bp, Homo sapien
gccaaggcatcaggtttttgatcca

SEQ ID NO: 4144791 - DNA, 25 bp, Homo sapien
cttgtgccaaggcatcaggtttttg

SEQ ID NO: 4144792 - DNA, 25 bp, Homo sapien
taacagttattactgctgtgttcat

SEQ ID NO: 4144793 - DNA, 25 bp, Homo sapien
agagcaagagcatttgagccatgtt

SEQ ID NO: 4144794 - DNA, 25 bp, Homo sapien
caatcttgcactggactaattcgtg

SEQ ID NO: 4144795 - DNA, 25 bp, Homo sapien
tcatccaacaatcttgcactggact

SEQ ID NO: 4144796 - DNA, 25 bp, Homo sapien
taattcgtgcaaagtgaataatatc

SEQ ID NO: 4144797 - DNA, 25 bp, Homo sapien
cacgtatccctttgacggaagtccg

SEQ ID NO: 4144798 - DNA, 25 bp, Homo sapien
cagtgttgcatttccactcagattc

SEQ ID NO: 4144799 - DNA, 25 bp, Homo sapien
taaatgactcttcttataggcaaat

SEQ ID NO: 4144800 - DNA, 25 bp, Homo sapien
gatccaaaatatcagtgttgcattt

SEQ ID NO: 4144801 - DNA, 25 bp, Homo sapien
cagaatcatcccttgactcatcttt

SEQ ID NO: 4144802 - DNA, 25 bp, Homo sapien
ctcttcttataagcaaattcaggac

SEQ ID NO: 4144803 - DNA, 25 bp, Homo sapien
attatattgcagaatcatcccttga

SEQ ID NO: 4144804 - DNA, 25 bp, Homo sapien
ttacatcctccaattatattgcaga

SEQ ID NO: 4144805 - DNA, 25 bp, Homo sapien
ggatttggacagtgaggctcgaact

SEQ ID NO: 4144806 - DNA, 25 bp, Homo sapien
attctatttccatctatatccatcc

SEQ ID NO: 4144807 - DNA, 25 bp, Homo sapien
gaggctcgaactaggggcaacatga

SEQ ID NO: 4144808 - DNA, 25 bp, Homo sapien
ggcttgtctgtcaactcttctgaaa

SEQ ID NO: 4144809 - DNA, 25 bp, Homo sapien
ttgcgtctttgccacagtttgagtt

SEQ ID NO: 4144810 - DNA, 25 bp, Homo sapien
tgtattcttgtcattgatgggtcct

SEQ ID NO: 4144811 - DNA, 25 bp, Homo sapien
tggttgtcgagacaatttctcctgg

SEQ ID NO: 4144812 - DNA, 25 bp, Homo sapien
gaatgatctgtttcaagagtggcca

SEQ ID NO: 4144813 - DNA, 25 bp, Homo sapien
tcatccccgataccttcataacaat

SEQ ID NO: 4144814 - DNA, 25 bp, Homo sapien
ttcttcatccccgataccttcataa

SEQ ID NO: 4144815 - DNA, 25 bp, Homo sapien
cttcatccccgataccttcataaca

SEQ ID NO: 4144816 - DNA, 25 bp, Homo sapien
cacttcttcatccccgataccttca

SEQ ID NO: 4144817 - DNA, 25 bp, Homo sapien
cctgtgggtttccagcacagaactg

SEQ ID NO: 4144818 - DNA, 25 bp, Homo sapien
gagggaagggaggcttcggcctgtg

SEQ ID NO: 4144819 - DNA, 25 bp, Homo sapien
cacagaactgtctgtctgggttgca

SEQ ID NO: 4144820 - DNA, 25 bp, Homo sapien
agagagaccctgtaggtgtcaggag

SEQ ID NO: 4144821 - DNA, 25 bp, Homo sapien
atgagccatgaatacaattgaattc

SEQ ID NO: 4144822 - DNA, 25 bp, Homo sapien
tcatgagccatgaatacaattgaat

SEQ ID NO: 4144823 - DNA, 25 bp, Homo sapien
catgagccatgaatacaattgaatt

SEQ ID NO: 4144824 - DNA, 25 bp, Homo sapien
tgatttggataaactgctgtcctta

SEQ ID NO: 4144825 - DNA, 25 bp, Homo sapien
gtctgctttttgaagtcatgtttat

SEQ ID NO: 4144826 - DNA, 25 bp, Homo sapien
gctgtccttatttgcaaactcttaa

SEQ ID NO: 4144827 - DNA, 25 bp, Homo sapien
gcaaactcttaaactttattgccat

SEQ ID NO: 4144828 - DNA, 25 bp, Homo sapien
tcaacagatccccttccttccagca

SEQ ID NO: 4144829 - DNA, 25 bp, Homo sapien
acagatccccttccttccagcaatg

SEQ ID NO: 4144830 - DNA, 25 bp, Homo sapien
agatccccttccttccagcaatgag

SEQ ID NO: 4144831 - DNA, 25 bp, Homo sapien
aacagatccccttccttccagcaat

SEQ ID NO: 4144832 - DNA, 25 bp, Homo sapien
cattagctgccatgatgacgatgag

SEQ ID NO: 4144833 - DNA, 25 bp, Homo sapien
atgatgacgatgagggttaatgggt

SEQ ID NO: 4144834 - DNA, 25 bp, Homo sapien
gcattagctgccatgatgacgatga

SEQ ID NO: 4144835 - DNA, 25 bp, Homo sapien
tgacgatgagggttaatgggtaaat

SEQ ID NO: 4144836 - DNA, 25 bp, Homo sapien
gtgcaggtctgtgctctctggcaag

SEQ ID NO: 4144837 - DNA, 25 bp, Homo sapien
gcaggtctgtgctctctggcaagtt

SEQ ID NO: 4144838 - DNA, 25 bp, Homo sapien
aggtctgtgctctctggcaagtttc

SEQ ID NO: 4144839 - DNA, 25 bp, Homo sapien
tgcaggtctgtgctctctggcaagt

SEQ ID NO: 4144840 - DNA, 25 bp, Homo sapien
tcttctgatgcagggacctgatacc

SEQ ID NO: 4144841 - DNA, 25 bp, Homo sapien
cagccctttgcaccttgaatgaaca

SEQ ID NO: 4144842 - DNA, 25 bp, Homo sapien
cagtacacctttgtcccaacctggg

SEQ ID NO: 4144843 - DNA, 25 bp, Homo sapien
gagcacatcattacatggccctgga

SEQ ID NO: 4144844 - DNA, 25 bp, Homo sapien
tgtggaccacaagtcgcatgcatgc

SEQ ID NO: 4144845 - DNA, 25 bp, Homo sapien
agtcgcatgcatgctatggctgcag

SEQ ID NO: 4144846 - DNA, 25 bp, Homo sapien
tggagataagagtatctggcatgtg

SEQ ID NO: 4144847 - DNA, 25 bp, Homo sapien
caaggactggtgtgaatgtacattt

SEQ ID NO: 4144848 - DNA, 25 bp, Homo sapien
caagagaactgtagtgactcttttg

SEQ ID NO: 4144849 - DNA, 25 bp, Homo sapien
ggcactattctcttggactgttcgt

SEQ ID NO: 4144850 - DNA, 25 bp, Homo sapien
tcaagagaactgtagtgactctttt

SEQ ID NO: 4144851 - DNA, 25 bp, Homo sapien
tttgatataggcactattctcttgg

SEQ ID NO: 4144852 - DNA, 25 bp, Homo sapien
tcttttcataggctgtaaataaatt

SEQ ID NO: 4144853 - DNA, 25 bp, Homo sapien
tcataggctgtaaataaatttgcaa

SEQ ID NO: 4144854 - DNA, 25 bp, Homo sapien
cattcatttccgaagtcgttttctt

SEQ ID NO: 4144855 - DNA, 25 bp, Homo sapien
gcaacattcatttccgaagtcgttt

SEQ ID NO: 4144856 - DNA, 25 bp, Homo sapien
tataaattctgcattgggccagtca

SEQ ID NO: 4144857 - DNA, 25 bp, Homo sapien
aaattctgcattgggccagtcatcc

SEQ ID NO: 4144858 - DNA, 25 bp, Homo sapien
ctcataacaaaggaacatataaatt

SEQ ID NO: 4144859 - DNA, 25 bp, Homo sapien
taacaaaggaacatataaattctgc

SEQ ID NO: 4144860 - DNA, 25 bp, Homo sapien
tggacttccataggttccaaggttc

SEQ ID NO: 4144861 - DNA, 25 bp, Homo sapien
cataggttccaaggttcttgtttat

SEQ ID NO: 4144862 - DNA, 25 bp, Homo sapien
ccttctatgcaaatatgggaaactc

SEQ ID NO: 4144863 - DNA, 25 bp, Homo sapien
cagttcccttctatgcaaatatggg

SEQ ID NO: 4144864 - DNA, 25 bp, Homo sapien
tcccttctatgcaaatatgggaaac

SEQ ID NO: 4144865 - DNA, 25 bp, Homo sapien
ccacagttcccttctatgcaaatat

SEQ ID NO: 4144866 - DNA, 25 bp, Homo sapien
tctctctgccattgggaaaggcggg

SEQ ID NO: 4144867 - DNA, 25 bp, Homo sapien
gaactctttgcaagggtgccccagt

SEQ ID NO: 4144868 - DNA, 25 bp, Homo sapien
gtctgagtcttaaggtctctctgcc

SEQ ID NO: 4144869 - DNA, 25 bp, Homo sapien
ggctttggtccactcatgtctgaaa

SEQ ID NO: 4144870 - DNA, 25 bp, Homo sapien
aaaattgagttttgctttgcccaca

SEQ ID NO: 4144871 - DNA, 25 bp, Homo sapien
atgttgcaaaattgagttttgcttt

SEQ ID NO: 4144872 - DNA, 25 bp, Homo sapien
tgttgcaaaattgagttttgctttg

SEQ ID NO: 4144873 - DNA, 25 bp, Homo sapien
caaagacagtagctgttctcctaca

SEQ ID NO: 4144874 - DNA, 25 bp, Homo sapien
atcatccctggagcaaggccttgtc

SEQ ID NO: 4144875 - DNA, 25 bp, Homo sapien
tcagttcatcaaagacagtagctgt

SEQ ID NO: 4144876 - DNA, 25 bp, Homo sapien
tcatccctggagcaaggccttgtca

SEQ ID NO: 4144877 - DNA, 25 bp, Homo sapien
ctctttgagaaaccataggcacaat

SEQ ID NO: 4144878 - DNA, 25 bp, Homo sapien
tgagaaaccataggcacaatctcct

SEQ ID NO: 4144879 - DNA, 25 bp, Homo sapien
aaagtagaaatcacacaggtcctct

SEQ ID NO: 4144880 - DNA, 25 bp, Homo sapien
accataggcacaatctcctccttga

SEQ ID NO: 4144881 - DNA, 25 bp, Homo sapien
tctagagatcatgaagggccagact

SEQ ID NO: 4144882 - DNA, 25 bp, Homo sapien
ctgttggttagcagaaaaggcctcc

SEQ ID NO: 4144883 - DNA, 25 bp, Homo sapien
cctggccaatgtagcgagatcctat

SEQ ID NO: 4144884 - DNA, 25 bp, Homo sapien
tatttgccagggttactgggccacc

SEQ ID NO: 4144885 - DNA, 25 bp, Homo sapien
gtcatgtgtcccaaccagttcaact

SEQ ID NO: 4144886 - DNA, 25 bp, Homo sapien
agttcaactagcgaaaggcttttag

SEQ ID NO: 4144887 - DNA, 25 bp, Homo sapien
tgtgtcccaaccagttcaactagcg

SEQ ID NO: 4144888 - DNA, 25 bp, Homo sapien
caaccagttcaactagcgaaaggct

SEQ ID NO: 4144889 - DNA, 25 bp, Homo sapien
ctctcatactgcaggcataaagcaa

SEQ ID NO: 4144890 - DNA, 25 bp, Homo sapien
tgcaggcataaagcaaccgagtcat

SEQ ID NO: 4144891 - DNA, 25 bp, Homo sapien
tactgcaggcataaagcaaccgagt

SEQ ID NO: 4144892 - DNA, 25 bp, Homo sapien
tcatactgcaggcataaagcaaccg

SEQ ID NO: 4144893 - DNA, 25 bp, Homo sapien
caacattgaaatagtcactttgaga

SEQ ID NO: 4144894 - DNA, 25 bp, Homo sapien
tggctcccctgagattagagtggac

SEQ ID NO: 4144895 - DNA, 25 bp, Homo sapien
tatcaacattgaaatagtcactttg

SEQ ID NO: 4144896 - DNA, 25 bp, Homo sapien
gagtggaccatattgctgcccaatt

SEQ ID NO: 4144897 - DNA, 25 bp, Homo sapien
gacatcgttctatttggtcatttgg

SEQ ID NO: 4144898 - DNA, 25 bp, Homo sapien
ctggtggtttgaagacatcgttcta

SEQ ID NO: 4144899 - DNA, 25 bp, Homo sapien
tggtcatttggtttattggctgttg

SEQ ID NO: 4144900 - DNA, 25 bp, Homo sapien
ggtcatttggtttattggctgttga

SEQ ID NO: 4144901 - DNA, 25 bp, Homo sapien
tggtgaggagaatgaagcctctaat

SEQ ID NO: 4144902 - DNA, 25 bp, Homo sapien
gtctctcccatgtgctttttcattc

SEQ ID NO: 4144903 - DNA, 25 bp, Homo sapien
cattcttgatgctttcttgatcaca

SEQ ID NO: 4144904 - DNA, 25 bp, Homo sapien
taatgcttctcttttggatttgtca

SEQ ID NO: 4144905 - DNA, 25 bp, Homo sapien
aatctgagaaactccattcgacttc

SEQ ID NO: 4144906 - DNA, 25 bp, Homo sapien
atctgagaaactccattcgacttca

SEQ ID NO: 4144907 - DNA, 25 bp, Homo sapien
tctgagaaactccattcgacttcat

SEQ ID NO: 4144908 - DNA, 25 bp, Homo sapien
gcaggtaggctttcagcatatttcc

SEQ ID NO: 4144909 - DNA, 25 bp, Homo sapien
tatttcccatttggagctgcattct

SEQ ID NO: 4144910 - DNA, 25 bp, Homo sapien
tttcccatttggagctgcattcttc

SEQ ID NO: 4144911 - DNA, 25 bp, Homo sapien
tatgcaggtaggctttcagcatatt

SEQ ID NO: 4144912 - DNA, 25 bp, Homo sapien
ctgtaagtgccacaaattcaaatgt

SEQ ID NO: 4144913 - DNA, 25 bp, Homo sapien
agagtcttcaccctgagattgctgg

SEQ ID NO: 4144914 - DNA, 25 bp, Homo sapien
taacttctgcaatagcccatggctt

SEQ ID NO: 4144915 - DNA, 25 bp, Homo sapien
tcagtgagcagatttccatgtgcac

SEQ ID NO: 4144916 - DNA, 25 bp, Homo sapien
tcaggggcttaacttctgcaatagc

SEQ ID NO: 4144917 - DNA, 25 bp, Homo sapien
catgttagactgaacatgtatgctt

SEQ ID NO: 4144918 - DNA, 25 bp, Homo sapien
gcttagtcatacatgttagattgta

SEQ ID NO: 4144919 - DNA, 25 bp, Homo sapien
tgctgatactgcctgcatactcagt

SEQ ID NO: 4144920 - DNA, 25 bp, Homo sapien
cacgtgcttagtcacacatgttaga

SEQ ID NO: 4144921 - DNA, 25 bp, Homo sapien
ggttttaggcattcactcgggagtc

SEQ ID NO: 4144922 - DNA, 25 bp, Homo sapien
gaacagtagtaaccttgctccctgg

SEQ ID NO: 4144923 - DNA, 25 bp, Homo sapien
aacaggtgaccttgccaattggtgc

SEQ ID NO: 4144924 - DNA, 25 bp, Homo sapien
tacctgtggtcagctacagtcagaa

SEQ ID NO: 4144925 - DNA, 25 bp, Homo sapien
tctgcattaatataccatccatgtg

SEQ ID NO: 4144926 - DNA, 25 bp, Homo sapien
tgaatatactgtttacctcacacta

SEQ ID NO: 4144927 - DNA, 25 bp, Homo sapien
caagatgagacaacactgaagatca

SEQ ID NO: 4144928 - DNA, 25 bp, Homo sapien
accatccatgtgtttttaccatttg

SEQ ID NO: 4144929 - DNA, 25 bp, Homo sapien
acctggaggatgcagccaagaaggc

SEQ ID NO: 4144930 - DNA, 25 bp, Homo sapien
ttacttcagccattgacctggagga

SEQ ID NO: 4144931 - DNA, 25 bp, Homo sapien
gatgtctttgtcctgatccaatgga

SEQ ID NO: 4144932 - DNA, 25 bp, Homo sapien
tcactgtaagcctgcccagtaggca

SEQ ID NO: 4144933 - DNA, 25 bp, Homo sapien
cttctggtccaaagactggtttgct

SEQ ID NO: 4144934 - DNA, 25 bp, Homo sapien
ctgtgtccatcagggcttttgtttc

SEQ ID NO: 4144935 - DNA, 25 bp, Homo sapien
ctggtttgctcctgtgtccatcagg

SEQ ID NO: 4144936 - DNA, 25 bp, Homo sapien
ggtccaaagactggtttgctcctgt

SEQ ID NO: 4144937 - DNA, 25 bp, Homo sapien
tgccttcaaggagaaaccaggttga

SEQ ID NO: 4144938 - DNA, 25 bp, Homo sapien
tagttaacgacaagggcagggtcag

SEQ ID NO: 4144939 - DNA, 25 bp, Homo sapien
gtcagtgggcagtagagctatgcct

SEQ ID NO: 4144940 - DNA, 25 bp, Homo sapien
aagcaagtggtagttaacgacaagg

SEQ ID NO: 4144941 - DNA, 25 bp, Homo sapien
acttgggcaccagaatacaggactc

SEQ ID NO: 4144942 - DNA, 25 bp, Homo sapien
tatggagctggaactcctgactcat

SEQ ID NO: 4144943 - DNA, 25 bp, Homo sapien
tggaaataggaccaatatggagctg

SEQ ID NO: 4144944 - DNA, 25 bp, Homo sapien
tacaggactcagaagcacgttcttg

SEQ ID NO: 4144945 - DNA, 25 bp, Homo sapien
agatcaaatttccaacccattgact

SEQ ID NO: 4144946 - DNA, 25 bp, Homo sapien
ctgacagctctctgcagatcaaatt

SEQ ID NO: 4144947 - DNA, 25 bp, Homo sapien
gcgtgggatcgcttctgtcccaatg

SEQ ID NO: 4144948 - DNA, 25 bp, Homo sapien
ctggcagcgtgggatcgcttctgtc

SEQ ID NO: 4144949 - DNA, 25 bp, Homo sapien
gggctggcagcgtgggatcgcttct

SEQ ID NO: 4144950 - DNA, 25 bp, Homo sapien
gcagcgtgggatcgcttctgtccca

SEQ ID NO: 4144951 - DNA, 25 bp, Homo sapien
tcctatctttatcctcagtgggcat

SEQ ID NO: 4144952 - DNA, 25 bp, Homo sapien
ttcctatctttatcctcagtgggca

SEQ ID NO: 4144953 - DNA, 25 bp, Homo sapien
cttcctatctttatcctcagtgggc

SEQ ID NO: 4144954 - DNA, 25 bp, Homo sapien
tatacctcatttcgcagttctctgc

SEQ ID NO: 4144955 - DNA, 25 bp, Homo sapien
tgtggtaggctcatctacctcgcta

SEQ ID NO: 4144956 - DNA, 25 bp, Homo sapien
catctacctcgctactcagtttata

SEQ ID NO: 4144957 - DNA, 25 bp, Homo sapien
tactcagtttatacctcatttcgca

SEQ ID NO: 4144958 - DNA, 25 bp, Homo sapien
catttatgagtttctattgcagctt

SEQ ID NO: 4144959 - DNA, 25 bp, Homo sapien
tttaataaccacttttacactgagc

SEQ ID NO: 4144960 - DNA, 25 bp, Homo sapien
cttttacactgagcagaatatgtct

SEQ ID NO: 4144961 - DNA, 25 bp, Homo sapien
tgagcagaatatgtctctcattctc

SEQ ID NO: 4144962 - DNA, 25 bp, Homo sapien
aggtccgtctagaagcctaagttgg

SEQ ID NO: 4144963 - DNA, 25 bp, Homo sapien
aggtccctgatagccccaaaacttg

SEQ ID NO: 4144964 - DNA, 25 bp, Homo sapien
taaaatctctaatagtgggtcacca

SEQ ID NO: 4144965 - DNA, 25 bp, Homo sapien
tggaacaggtctcccgataggtccg

SEQ ID NO: 4144966 - DNA, 25 bp, Homo sapien
aagatcccagataaagctcataggc

SEQ ID NO: 4144967 - DNA, 25 bp, Homo sapien
tgatgactgctataggaaaaggagg

SEQ ID NO: 4144968 - DNA, 25 bp, Homo sapien
acttcaatatgtgacagtgactgcc

SEQ ID NO: 4144969 - DNA, 25 bp, Homo sapien
cacttaatcagagtggtttgccaaa

SEQ ID NO: 4144970 - DNA, 25 bp, Homo sapien
gcacaggtcttaaccattagcagca

SEQ ID NO: 4144971 - DNA, 25 bp, Homo sapien
gcacccaaaaatggagattggagag

SEQ ID NO: 4144972 - DNA, 25 bp, Homo sapien
catttaatgctgaagatctggagaa

SEQ ID NO: 4144973 - DNA, 25 bp, Homo sapien
tctggagaaccatactagagtctac

SEQ ID NO: 4144974 - DNA, 25 bp, Homo sapien
tatccacagttttcctcgggcatct

SEQ ID NO: 4144975 - DNA, 25 bp, Homo sapien
atccacagttttcctcgggcatctt

SEQ ID NO: 4144976 - DNA, 25 bp, Homo sapien
ctatccacagttttcctcgggcatc

SEQ ID NO: 4144977 - DNA, 25 bp, Homo sapien
gcatttataaacgttgacaaggttc

SEQ ID NO: 4144978 - DNA, 25 bp, Homo sapien
gactatcccaagcatgtaccactgt

SEQ ID NO: 4144979 - DNA, 25 bp, Homo sapien
tcatgcatggtaaaggtcccataaa

SEQ ID NO: 4144980 - DNA, 25 bp, Homo sapien
gctctcttgcagtatagtagtaata

SEQ ID NO: 4144981 - DNA, 25 bp, Homo sapien
gatagcgacaaacttcagtgtcatc

SEQ ID NO: 4144982 - DNA, 25 bp, Homo sapien
ttgccatataaaaatcgatagcgac

SEQ ID NO: 4144983 - DNA, 25 bp, Homo sapien
tcttgatagcatgactgcttttcca

SEQ ID NO: 4144984 - DNA, 25 bp, Homo sapien
tcatctcatcttgccggatgccatc

SEQ ID NO: 4144985 - DNA, 25 bp, Homo sapien
ttactgtccatacgtttcctgatag

SEQ ID NO: 4144986 - DNA, 25 bp, Homo sapien
ccatacgtttcctgatagtaatcaa

SEQ ID NO: 4144987 - DNA, 25 bp, Homo sapien
tagtaatcaatccattttgtcgtta

SEQ ID NO: 4144988 - DNA, 25 bp, Homo sapien
cgttatcacacttgcttgcactgtg

SEQ ID NO: 4144989 - DNA, 25 bp, Homo sapien
gaacatcactgtgttaacaatgcct

SEQ ID NO: 4144990 - DNA, 25 bp, Homo sapien
ggactctaaacataggaaggtgtat

SEQ ID NO: 4144991 - DNA, 25 bp, Homo sapien
gaaacagttctttgtgtctacttgt

SEQ ID NO: 4144992 - DNA, 25 bp, Homo sapien
agtccaagaaagaagttgtttgctt

SEQ ID NO: 4144993 - DNA, 25 bp, Homo sapien
ttgcagtctatttatggccatgttt

SEQ ID NO: 4144994 - DNA, 25 bp, Homo sapien
gcccccaagcatagtattgaatgct

SEQ ID NO: 4144995 - DNA, 25 bp, Homo sapien
cccaagcatagtattgaatgctttc

SEQ ID NO: 4144996 - DNA, 25 bp, Homo sapien
tttgcagtctatttatggccatgtt

SEQ ID NO: 4144997 - DNA, 25 bp, Homo sapien
caaggtcattcaaggcaatgtgcag

SEQ ID NO: 4144998 - DNA, 25 bp, Homo sapien
tggaaattcgcctgtgtgctaaaat

SEQ ID NO: 4144999 - DNA, 25 bp, Homo sapien
taccatggtacaatttcaagtcaaa

SEQ ID NO: 4145000 - DNA, 25 bp, Homo sapien
gatttcatgaatcaacataccatgg

SEQ ID NO: 4145001 - DNA, 25 bp, Homo sapien
cttggcgatgcagcgcacaactgtg

SEQ ID NO: 4145002 - DNA, 25 bp, Homo sapien
aggccattcctccttatgctccttt

SEQ ID NO: 4145003 - DNA, 25 bp, Homo sapien
cattcctccttatgctccttttgag

SEQ ID NO: 4145004 - DNA, 25 bp, Homo sapien
tgcctgcacgattctgaggccattc

SEQ ID NO: 4145005 - DNA, 25 bp, Homo sapien
ttccagggatatgtcgtattccgct

SEQ ID NO: 4145006 - DNA, 25 bp, Homo sapien
tattccgctgggtagagggtcgagg

SEQ ID NO: 4145007 - DNA, 25 bp, Homo sapien
ggtagagggtcgagggtggagtggc

SEQ ID NO: 4145008 - DNA, 25 bp, Homo sapien
tgctgggtttccagggatatgtcgt

SEQ ID NO: 4145009 - DNA, 25 bp, Homo sapien
gaattgtcaacatgtgcctctaagg

SEQ ID NO: 4145010 - DNA, 25 bp, Homo sapien
ggcaatacttcgtgagggacatcta

SEQ ID NO: 4145011 - DNA, 25 bp, Homo sapien
tgggcttctcatgacctcctggcaa

SEQ ID NO: 4145012 - DNA, 25 bp, Homo sapien
taacttggacctcagtagaccatgg

SEQ ID NO: 4145013 - DNA, 25 bp, Homo sapien
tattgcatgtggacacatacacttc

SEQ ID NO: 4145014 - DNA, 25 bp, Homo sapien
tgctggtacttagccacctggcagg

SEQ ID NO: 4145015 - DNA, 25 bp, Homo sapien
tgacaactcccgagaggcttattgt

SEQ ID NO: 4145016 - DNA, 25 bp, Homo sapien
catgtgatacagctcattcgaactt

SEQ ID NO: 4145017 - DNA, 25 bp, Homo sapien
tagaataacacttgtggtaaagaat

SEQ ID NO: 4145018 - DNA, 25 bp, Homo sapien
gttataattcagctgatagactaaa

SEQ ID NO: 4145019 - DNA, 25 bp, Homo sapien
tattatctagcatgtgactattggg

SEQ ID NO: 4145020 - DNA, 25 bp, Homo sapien
ccacagagtaaggttttgcttagac

SEQ ID NO: 4145021 - DNA, 25 bp, Homo sapien
cccttcagtgttgtagccagctggg

SEQ ID NO: 4145022 - DNA, 25 bp, Homo sapien
tcccttcagtgttgtagccagctgg

SEQ ID NO: 4145023 - DNA, 25 bp, Homo sapien
ctttaaaatctattcgatgctttcc

SEQ ID NO: 4145024 - DNA, 25 bp, Homo sapien
tctattcgatgctttcccttcagtg

SEQ ID NO: 4145025 - DNA, 25 bp, Homo sapien
ttctggattgcttgattgtttcctt

SEQ ID NO: 4145026 - DNA, 25 bp, Homo sapien
gcatttcacaggtggttgtattagg

SEQ ID NO: 4145027 - DNA, 25 bp, Homo sapien
ggtaactctcatatgtgatataaac

SEQ ID NO: 4145028 - DNA, 25 bp, Homo sapien
tgtattaggtggactacaatctcct

SEQ ID NO: 4145029 - DNA, 25 bp, Homo sapien
tgcccttatttgaggaaaaggatcc

SEQ ID NO: 4145030 - DNA, 25 bp, Homo sapien
gcaaaatgtgttaggtctccacagg

SEQ ID NO: 4145031 - DNA, 25 bp, Homo sapien
gcataccactttctgaggctctgaa

SEQ ID NO: 4145032 - DNA, 25 bp, Homo sapien
gaaatgccaccagattttaagaact

SEQ ID NO: 4145033 - DNA, 25 bp, Homo sapien
tgtgctcctagaacagactttccaa

SEQ ID NO: 4145034 - DNA, 25 bp, Homo sapien
atctgttcgaattttacccctgatt

SEQ ID NO: 4145035 - DNA, 25 bp, Homo sapien
ggtttgtaatttagtggcagtaagc

SEQ ID NO: 4145036 - DNA, 25 bp, Homo sapien
aagcttattaacatctgttcgaatt

SEQ ID NO: 4145037 - DNA, 25 bp, Homo sapien
ggcttctcctatgttgcttatctga

SEQ ID NO: 4145038 - DNA, 25 bp, Homo sapien
tatatatcatggcaacaggtactgg

SEQ ID NO: 4145039 - DNA, 25 bp, Homo sapien
cagccacgaaacatggctgtatctg

SEQ ID NO: 4145040 - DNA, 25 bp, Homo sapien
gtaagtgcatacacacagccacgaa

SEQ ID NO: 4145041 - DNA, 25 bp, Homo sapien
aatgattttggaagatgaaacagct

SEQ ID NO: 4145042 - DNA, 25 bp, Homo sapien
gattttggaagatgaaacagcttca

SEQ ID NO: 4145043 - DNA, 25 bp, Homo sapien
tttatgacccataggtaacgttcgc

SEQ ID NO: 4145044 - DNA, 25 bp, Homo sapien
tatgacccataggtaacgttcgcac

SEQ ID NO: 4145045 - DNA, 25 bp, Homo sapien
ctcagtggtaaaagaaagacagtgt

SEQ ID NO: 4145046 - DNA, 25 bp, Homo sapien
gaggtatgtcatggactcagtggta

SEQ ID NO: 4145047 - DNA, 25 bp, Homo sapien
cactggtgagtctcagtgggaggct

SEQ ID NO: 4145048 - DNA, 25 bp, Homo sapien
cccagagccttggtgattgaacata

SEQ ID NO: 4145049 - DNA, 25 bp, Homo sapien
ctcaagtgtctgcatattagtgggt

SEQ ID NO: 4145050 - DNA, 25 bp, Homo sapien
agtgtctgcatattagtgggttgag

SEQ ID NO: 4145051 - DNA, 25 bp, Homo sapien
cttggctgcaaactgcaggttgggt

SEQ ID NO: 4145052 - DNA, 25 bp, Homo sapien
gggtccaggcctgtaccacgtgcct

SEQ ID NO: 4145053 - DNA, 25 bp, Homo sapien
taatgtcattgggtcatgattgtaa

SEQ ID NO: 4145054 - DNA, 25 bp, Homo sapien
atgtcattgggtcatgattgtaagc

SEQ ID NO: 4145055 - DNA, 25 bp, Homo sapien
aatgtcattgggtcatgattgtaag

SEQ ID NO: 4145056 - DNA, 25 bp, Homo sapien
tctaatgtcattgggtcatgattgt

SEQ ID NO: 4145057 - DNA, 25 bp, Homo sapien
tagtactaaggctgtacttgagttt

SEQ ID NO: 4145058 - DNA, 25 bp, Homo sapien
caaggtggttgtaacaggcattggc

SEQ ID NO: 4145059 - DNA, 25 bp, Homo sapien
tgttcataaatagtactaaggctgt

SEQ ID NO: 4145060 - DNA, 25 bp, Homo sapien
aggcattggcaatgtttaacagatg

SEQ ID NO: 4145061 - DNA, 25 bp, Homo sapien
tagaatttctctgtgctagaatatc

SEQ ID NO: 4145062 - DNA, 25 bp, Homo sapien
gtgtcttgtggtattcactgaatac

SEQ ID NO: 4145063 - DNA, 25 bp, Homo sapien
ttctctgtgctagaatatcttttcc

SEQ ID NO: 4145064 - DNA, 25 bp, Homo sapien
tcttttccctaagtgtcttgtggta

SEQ ID NO: 4145065 - DNA, 25 bp, Homo sapien
tattcagttggtcgccaaattcagt

SEQ ID NO: 4145066 - DNA, 25 bp, Homo sapien
gctgaaatagctctgcatcattaat

SEQ ID NO: 4145067 - DNA, 25 bp, Homo sapien
tctctcatgtctactatattcagtt

SEQ ID NO: 4145068 - DNA, 25 bp, Homo sapien
gctctgcatcattaatgtctctcat

SEQ ID NO: 4145069 - DNA, 25 bp, Homo sapien
ggcagttcaattaacctccagaaga

SEQ ID NO: 4145070 - DNA, 25 bp, Homo sapien
gttcaattaacctccagaagatggc

SEQ ID NO: 4145071 - DNA, 25 bp, Homo sapien
tcaattaacctccagaagatggctg

SEQ ID NO: 4145072 - DNA, 25 bp, Homo sapien
tctgtaggcagttcaattaacctcc

SEQ ID NO: 4145073 - DNA, 25 bp, Homo sapien
cagcaggaatcttccgtgagccata

SEQ ID NO: 4145074 - DNA, 25 bp, Homo sapien
ggaaatggtgttggccgagtctagg

SEQ ID NO: 4145075 - DNA, 25 bp, Homo sapien
tctagggctagctgttacaagcaga

SEQ ID NO: 4145076 - DNA, 25 bp, Homo sapien
gccggaaagattgtaaggcacacag

SEQ ID NO: 4145077 - DNA, 25 bp, Homo sapien
gtctcttaaaagttttggcatacta

SEQ ID NO: 4145078 - DNA, 25 bp, Homo sapien
agttttggcatactagctacaagag

SEQ ID NO: 4145079 - DNA, 25 bp, Homo sapien
aaagttttggcatactagctacaag

SEQ ID NO: 4145080 - DNA, 25 bp, Homo sapien
cttaaaagttttggcatactagcta

SEQ ID NO: 4145081 - DNA, 25 bp, Homo sapien
gttgtaactcttataatccagccta

SEQ ID NO: 4145082 - DNA, 25 bp, Homo sapien
tcaggtgacatcccccatgttgtaa

SEQ ID NO: 4145083 - DNA, 25 bp, Homo sapien
gacatcccccatgttgtaactctta

SEQ ID NO: 4145084 - DNA, 25 bp, Homo sapien
atgttgtaactcttataatccagcc

SEQ ID NO: 4145085 - DNA, 25 bp, Homo sapien
aaagagaagttgacgtgctgttgtc

SEQ ID NO: 4145086 - DNA, 25 bp, Homo sapien
cgtgctgttgtcatcgtattaaggc

SEQ ID NO: 4145087 - DNA, 25 bp, Homo sapien
gctgaaagagaagttgacgtgctgt

SEQ ID NO: 4145088 - DNA, 25 bp, Homo sapien
tgaaagagaagttgacgtgctgttg

SEQ ID NO: 4145089 - DNA, 25 bp, Homo sapien
tggaacaaaaatggtctcggacgct

SEQ ID NO: 4145090 - DNA, 25 bp, Homo sapien
tttgccaaggcaccccaagaagaat

SEQ ID NO: 4145091 - DNA, 25 bp, Homo sapien
tctcacgaggtaatgctttccaagt

SEQ ID NO: 4145092 - DNA, 25 bp, Homo sapien
caacgctggcttttcaggtaccata

SEQ ID NO: 4145093 - DNA, 25 bp, Homo sapien
attttactttgccagcaaacttgta

SEQ ID NO: 4145094 - DNA, 25 bp, Homo sapien
ttactttgccagcaaacttgtaagg

SEQ ID NO: 4145095 - DNA, 25 bp, Homo sapien
tttgccagcaaacttgtaaggtcat

SEQ ID NO: 4145096 - DNA, 25 bp, Homo sapien
actttgccagcaaacttgtaaggtc

SEQ ID NO: 4145097 - DNA, 25 bp, Homo sapien
ctggtggaaggtcatagaaccaaat

SEQ ID NO: 4145098 - DNA, 25 bp, Homo sapien
ggtggaaggtcatagaaccaaatcc

SEQ ID NO: 4145099 - DNA, 25 bp, Homo sapien
tggaaggtcatagaaccaaatcccc

SEQ ID NO: 4145100 - DNA, 25 bp, Homo sapien
gaaggtcatagaaccaaatccccac

SEQ ID NO: 4145101 - DNA, 25 bp, Homo sapien
agttttgtgctatgtcctccttcaa

SEQ ID NO: 4145102 - DNA, 25 bp, Homo sapien
tcttgctcttgtgccctagaccatc

SEQ ID NO: 4145103 - DNA, 25 bp, Homo sapien
ttctccttcagcgttagttcttcta

SEQ ID NO: 4145104 - DNA, 25 bp, Homo sapien
atgttggtctgtgttgtttcatcat

SEQ ID NO: 4145105 - DNA, 25 bp, Homo sapien
gccatttccagctggtcagagttaa

SEQ ID NO: 4145106 - DNA, 25 bp, Homo sapien
ctaggtaaggcaaaagaactgtgtt

SEQ ID NO: 4145107 - DNA, 25 bp, Homo sapien
aagaactgtgtttgcattcagctgt

SEQ ID NO: 4145108 - DNA, 25 bp, Homo sapien
aggcaaaagaactgtgtttgcattc

SEQ ID NO: 4145109 - DNA, 25 bp, Homo sapien
actgtgtttgcattcagctgtgtgc

SEQ ID NO: 4145110 - DNA, 25 bp, Homo sapien
tatgttcgattgtccacttgctggc

SEQ ID NO: 4145111 - DNA, 25 bp, Homo sapien
cagctgtagggcatctcctgatcca

SEQ ID NO: 4145112 - DNA, 25 bp, Homo sapien
tagggcatctcctgatccatggagc

SEQ ID NO: 4145113 - DNA, 25 bp, Homo sapien
ttctttatccaccaaacttgcctgt

SEQ ID NO: 4145114 - DNA, 25 bp, Homo sapien
agactttgatgaccagtaattccaa

SEQ ID NO: 4145115 - DNA, 25 bp, Homo sapien
gactttgatgaccagtaattccaaa

SEQ ID NO: 4145116 - DNA, 25 bp, Homo sapien
ttagactttgatgaccagtaattcc

SEQ ID NO: 4145117 - DNA, 25 bp, Homo sapien
tagactttgatgaccagtaattcca

SEQ ID NO: 4145118 - DNA, 25 bp, Homo sapien
tgctatgctataccatctggacttg

SEQ ID NO: 4145119 - DNA, 25 bp, Homo sapien
tgttgttgagatgctatgctatacc

SEQ ID NO: 4145120 - DNA, 25 bp, Homo sapien
tgttgagatgctatgctataccatc

SEQ ID NO: 4145121 - DNA, 25 bp, Homo sapien
tgagatgctatgctataccatctgg

SEQ ID NO: 4145122 - DNA, 25 bp, Homo sapien
tagaccacggttctctgcggagggc

SEQ ID NO: 4145123 - DNA, 25 bp, Homo sapien
tctgcagccttaagaacgcctgtgc

SEQ ID NO: 4145124 - DNA, 25 bp, Homo sapien
cttgggaccgctcaaagtgaaccgg

SEQ ID NO: 4145125 - DNA, 25 bp, Homo sapien
cactgtcccagataggcctcgtgac

SEQ ID NO: 4145126 - DNA, 25 bp, Homo sapien
ctgaagccctgggctgcaggaacct

SEQ ID NO: 4145127 - DNA, 25 bp, Homo sapien
gaagccctgggctgcaggaacctca

SEQ ID NO: 4145128 - DNA, 25 bp, Homo sapien
tgaagccctgggctgcaggaacctc

SEQ ID NO: 4145129 - DNA, 25 bp, Homo sapien
aagccctgggctgcaggaacctcac

SEQ ID NO: 4145130 - DNA, 25 bp, Homo sapien
gaatctcatctcttatcagacctgc

SEQ ID NO: 4145131 - DNA, 25 bp, Homo sapien
tcatatgctcaagaatgagtaaggt

SEQ ID NO: 4145132 - DNA, 25 bp, Homo sapien
gcaacagctgtctacttatgtcaca

SEQ ID NO: 4145133 - DNA, 25 bp, Homo sapien
gattaggaaagaagctagtagcaac

SEQ ID NO: 4145134 - DNA, 25 bp, Homo sapien
ggaggctgctaaccctggaaagacc

SEQ ID NO: 4145135 - DNA, 25 bp, Homo sapien
tagggagaaatcttacgaggaactc

SEQ ID NO: 4145136 - DNA, 25 bp, Homo sapien
gaaccaaggatgagacagtcttcca

SEQ ID NO: 4145137 - DNA, 25 bp, Homo sapien
gataatacgagtaaagacactgagg

SEQ ID NO: 4145138 - DNA, 25 bp, Homo sapien
ggtaacagccactgggatctcaagt

SEQ ID NO: 4145139 - DNA, 25 bp, Homo sapien
taagaaacagtatagccaaggtgct

SEQ ID NO: 4145140 - DNA, 25 bp, Homo sapien
gaggatgcatctcattggcaaaata

SEQ ID NO: 4145141 - DNA, 25 bp, Homo sapien
taatgaaggtatggtaggtaacagc

SEQ ID NO: 4145142 - DNA, 25 bp, Homo sapien
tatgtctctctggtaaatctgcgcc

SEQ ID NO: 4145143 - DNA, 25 bp, Homo sapien
acaccaccagaactgctagatgcag

SEQ ID NO: 4145144 - DNA, 25 bp, Homo sapien
tctgcgcccctagagtaatcagtgc

SEQ ID NO: 4145145 - DNA, 25 bp, Homo sapien
ctagatgcagtatccctttgctggg

SEQ ID NO: 4145146 - DNA, 25 bp, Homo sapien
gaactccgcaggttccaattgcaat

SEQ ID NO: 4145147 - DNA, 25 bp, Homo sapien
tcaagaacctccacagtcctttgtg

SEQ ID NO: 4145148 - DNA, 25 bp, Homo sapien
ttttccacagtcaatctaatgctac

SEQ ID NO: 4145149 - DNA, 25 bp, Homo sapien
taatattgaaggtgctgaactccgc

SEQ ID NO: 4145150 - DNA, 25 bp, Homo sapien
tcagagcaggtgtgaatgcccctag

SEQ ID NO: 4145151 - DNA, 25 bp, Homo sapien
tgcagctcagaaggatagacccagc

SEQ ID NO: 4145152 - DNA, 25 bp, Homo sapien
gatcagttccgtgctcctcaatgaa

SEQ ID NO: 4145153 - DNA, 25 bp, Homo sapien
taaggctttatctaggtacagtggc

SEQ ID NO: 4145154 - DNA, 25 bp, Homo sapien
tatctctgatggaactctgctaaca

SEQ ID NO: 4145155 - DNA, 25 bp, Homo sapien
taaactctctttagctcatggccag

SEQ ID NO: 4145156 - DNA, 25 bp, Homo sapien
tagagatatctctacaggcaggttc

SEQ ID NO: 4145157 - DNA, 25 bp, Homo sapien
tgagcagacctccttcagaagctga

SEQ ID NO: 4145158 - DNA, 25 bp, Homo sapien
tctgttccatggttatattgtgtaa

SEQ ID NO: 4145159 - DNA, 25 bp, Homo sapien
tgcattcaggggtgtctgttccatg

SEQ ID NO: 4145160 - DNA, 25 bp, Homo sapien
cattctcaacctatccccatcttca

SEQ ID NO: 4145161 - DNA, 25 bp, Homo sapien
tcaactaggtagtgggcatagtacc

SEQ ID NO: 4145162 - DNA, 25 bp, Homo sapien
aacgaaatgaggtagacacttccag

SEQ ID NO: 4145163 - DNA, 25 bp, Homo sapien
gagctattcagagaacgaaatgagg

SEQ ID NO: 4145164 - DNA, 25 bp, Homo sapien
tcagagaacgaaatgaggtagacac

SEQ ID NO: 4145165 - DNA, 25 bp, Homo sapien
tcttagagctattcagagaacgaaa

SEQ ID NO: 4145166 - DNA, 25 bp, Homo sapien
gatacctttaacaacagcactcttt

SEQ ID NO: 4145167 - DNA, 25 bp, Homo sapien
ctttaacaacagcactctttttcct

SEQ ID NO: 4145168 - DNA, 25 bp, Homo sapien
tccatgatgccagatacctttaaca

SEQ ID NO: 4145169 - DNA, 25 bp, Homo sapien
gttgggtccatgatgccagatacct

SEQ ID NO: 4145170 - DNA, 25 bp, Homo sapien
atgtgtgccattattgtatgcaaat

SEQ ID NO: 4145171 - DNA, 25 bp, Homo sapien
acttctggggtaagcgagatgttca

SEQ ID NO: 4145172 - DNA, 25 bp, Homo sapien
tggtgccggcttcatggatgtatac

SEQ ID NO: 4145173 - DNA, 25 bp, Homo sapien
ggatggaggaatacggaggagtgac

SEQ ID NO: 4145174 - DNA, 25 bp, Homo sapien
ggtaagcgagatgttcattatcttg

SEQ ID NO: 4145175 - DNA, 25 bp, Homo sapien
ttctatctctatgtattctttcctc

SEQ ID NO: 4145176 - DNA, 25 bp, Homo sapien
tctatctctatgtattctttcctca

SEQ ID NO: 4145177 - DNA, 25 bp, Homo sapien
ctgcaagggaagatggcttggacgc

SEQ ID NO: 4145178 - DNA, 25 bp, Homo sapien
aagggaagatggcttggacgctggg

SEQ ID NO: 4145179 - DNA, 25 bp, Homo sapien
ttggacgctggggcttcatgagcat

SEQ ID NO: 4145180 - DNA, 25 bp, Homo sapien
cttggacgctggggcttcatgagca

SEQ ID NO: 4145181 - DNA, 25 bp, Homo sapien
ggcacgtgtcccttcctctacaaag

SEQ ID NO: 4145182 - DNA, 25 bp, Homo sapien
cattggatcaaactgaggcacgtgt

SEQ ID NO: 4145183 - DNA, 25 bp, Homo sapien
tgtaatgatacccaaacgatgcctt

SEQ ID NO: 4145184 - DNA, 25 bp, Homo sapien
taagtgaggtctagatcatgtgccc

SEQ ID NO: 4145185 - DNA, 25 bp, Homo sapien
gacacccagtactcttgttgaagca

SEQ ID NO: 4145186 - DNA, 25 bp, Homo sapien
acttaatgatctaatggttgtcccc

SEQ ID NO: 4145187 - DNA, 25 bp, Homo sapien
gatatatgggactctctacaaggaa

SEQ ID NO: 4145188 - DNA, 25 bp, Homo sapien
tcttggacgacagcagaaagcttca

SEQ ID NO: 4145189 - DNA, 25 bp, Homo sapien
gtgcagcagaccatttgatgaaatc

SEQ ID NO: 4145190 - DNA, 25 bp, Homo sapien
gctccacagctctataatgggtgtt

SEQ ID NO: 4145191 - DNA, 25 bp, Homo sapien
tctgtctaatttgttgcagcatagc

SEQ ID NO: 4145192 - DNA, 25 bp, Homo sapien
cactatatcgtaagggctccacagc

SEQ ID NO: 4145193 - DNA, 25 bp, Homo sapien
tgggttcctggaacagagaaatggc

SEQ ID NO: 4145194 - DNA, 25 bp, Homo sapien
taattatagggtgaggcaactttcc

SEQ ID NO: 4145195 - DNA, 25 bp, Homo sapien
tttggccctgaaactgtacctacga

SEQ ID NO: 4145196 - DNA, 25 bp, Homo sapien
caatactggttcaataattgtgaca

SEQ ID NO: 4145197 - DNA, 25 bp, Homo sapien
ttttactccgtgcactatcctagtg

SEQ ID NO: 4145198 - DNA, 25 bp, Homo sapien
gttacattggtaatcactagcagaa

SEQ ID NO: 4145199 - DNA, 25 bp, Homo sapien
gaagaacctagtgccaagaacttga

SEQ ID NO: 4145200 - DNA, 25 bp, Homo sapien
actagagcctcttgtagtgccaaaa

SEQ ID NO: 4145201 - DNA, 25 bp, Homo sapien
ctccagcctgggcaatagagtgaga

SEQ ID NO: 4145202 - DNA, 25 bp, Homo sapien
agacagagcttgcagtgtaccgaga

SEQ ID NO: 4145203 - DNA, 25 bp, Homo sapien
aggagacagagcttgcagtgtaccg

SEQ ID NO: 4145204 - DNA, 25 bp, Homo sapien
tgtaccgagatcatgccactgcact

SEQ ID NO: 4145205 - DNA, 25 bp, Homo sapien
ttagaaagcactgtattgccactca

SEQ ID NO: 4145206 - DNA, 25 bp, Homo sapien
catgatcttcaggttggtttctaat

SEQ ID NO: 4145207 - DNA, 25 bp, Homo sapien
ttctaatgatctttcaaaagcccac

SEQ ID NO: 4145208 - DNA, 25 bp, Homo sapien
tttcaatcatggaaagtagggaggg

SEQ ID NO: 4145209 - DNA, 25 bp, Homo sapien
cccactctgtttgttatctgtttgc

SEQ ID NO: 4145210 - DNA, 25 bp, Homo sapien
agcgaacgtccagccctatacaaaa

SEQ ID NO: 4145211 - DNA, 25 bp, Homo sapien
aatccttgcctaagcgaacgtccag

SEQ ID NO: 4145212 - DNA, 25 bp, Homo sapien
gtccagccctatacaaaaaatcagc

SEQ ID NO: 4145213 - DNA, 25 bp, Homo sapien
aagtaggcctttggttcatgcaaag

SEQ ID NO: 4145214 - DNA, 25 bp, Homo sapien
tactggactttattagacactgcca

SEQ ID NO: 4145215 - DNA, 25 bp, Homo sapien
tagtagcctgtatattcactgttcc

SEQ ID NO: 4145216 - DNA, 25 bp, Homo sapien
tcccagatgactcataaagttgagc

SEQ ID NO: 4145217 - DNA, 25 bp, Homo sapien
ttttccatagctatagatgccagag

SEQ ID NO: 4145218 - DNA, 25 bp, Homo sapien
tccgttgaggagtaaaccttggcta

SEQ ID NO: 4145219 - DNA, 25 bp, Homo sapien
tctgcctagcagatgggttgtgctt

SEQ ID NO: 4145220 - DNA, 25 bp, Homo sapien
ccttggctatggagaatgctctagg

SEQ ID NO: 4145221 - DNA, 25 bp, Homo sapien
tgcttggttctgagtattgttataa

SEQ ID NO: 4145222 - DNA, 25 bp, Homo sapien
cttggttctgagtattgttataatt

SEQ ID NO: 4145223 - DNA, 25 bp, Homo sapien
tgtgcttggttctgagtattgttat

SEQ ID NO: 4145224 - DNA, 25 bp, Homo sapien
gtgcttggttctgagtattgttata

SEQ ID NO: 4145225 - DNA, 25 bp, Homo sapien
tgcactaattaggacatccagtagg

SEQ ID NO: 4145226 - DNA, 25 bp, Homo sapien
tccagtaggatggtgaataagagtg

SEQ ID NO: 4145227 - DNA, 25 bp, Homo sapien
aaatgtcagatcagtctggtatgcc

SEQ ID NO: 4145228 - DNA, 25 bp, Homo sapien
ccataaaatagcgtgaagtcccatt

SEQ ID NO: 4145229 - DNA, 25 bp, Homo sapien
ttctactcctgccttagtatcagct

SEQ ID NO: 4145230 - DNA, 25 bp, Homo sapien
tctactcctgccttagtatcagctg

SEQ ID NO: 4145231 - DNA, 25 bp, Homo sapien
tgttgatgttgacctcaataacctg

SEQ ID NO: 4145232 - DNA, 25 bp, Homo sapien
taacctggctgatgtagtatgtgtc

SEQ ID NO: 4145233 - DNA, 25 bp, Homo sapien
ccctctcccagttattattcaattg

SEQ ID NO: 4145234 - DNA, 25 bp, Homo sapien
gctattcgttacatcataccaagtg

SEQ ID NO: 4145235 - DNA, 25 bp, Homo sapien
ttgagagatggcagaaatgcagcac

SEQ ID NO: 4145236 - DNA, 25 bp, Homo sapien
ccaagttattgtggccacccattca

SEQ ID NO: 4145237 - DNA, 25 bp, Homo sapien
tgcagcacatggttcacaatcccct

SEQ ID NO: 4145238 - DNA, 25 bp, Homo sapien
gcattccactatcagtgtgggcacg

SEQ ID NO: 4145239 - DNA, 25 bp, Homo sapien
tgttccagtcttagccacaccctag

SEQ ID NO: 4145240 - DNA, 25 bp, Homo sapien
tccatgaagaggttcgacttgcaca

SEQ ID NO: 4145241 - DNA, 25 bp, Homo sapien
caaagtttgacctatgctgttccag

SEQ ID NO: 4145242 - DNA, 25 bp, Homo sapien
ggatgactgcatgactgacattgct

SEQ ID NO: 4145243 - DNA, 25 bp, Homo sapien
tctttcattagatcggtgctttgga

SEQ ID NO: 4145244 - DNA, 25 bp, Homo sapien
tttctttcattagatcggtgctttg

SEQ ID NO: 4145245 - DNA, 25 bp, Homo sapien
tttcattagatcggtgctttggaga

SEQ ID NO: 4145246 - DNA, 25 bp, Homo sapien
ttcattagatcggtgctttggagat

SEQ ID NO: 4145247 - DNA, 25 bp, Homo sapien
ctgcagatcaaatttgaagtttctc

SEQ ID NO: 4145248 - DNA, 25 bp, Homo sapien
ttcctgcagatcaaatttgaagttt

SEQ ID NO: 4145249 - DNA, 25 bp, Homo sapien
atatcttgggttttgtatatgcata

SEQ ID NO: 4145250 - DNA, 25 bp, Homo sapien
aatatcttgggttttgtatatgcat

SEQ ID NO: 4145251 - DNA, 25 bp, Homo sapien
gaaggctttttctctacgtaggcat

SEQ ID NO: 4145252 - DNA, 25 bp, Homo sapien
cagtgtgagaggataattgcaggcc

SEQ ID NO: 4145253 - DNA, 25 bp, Homo sapien
tcagggtgcacttcccagttggctt

SEQ ID NO: 4145254 - DNA, 25 bp, Homo sapien
tcctatgggctataaaagtcggtcc

SEQ ID NO: 4145255 - DNA, 25 bp, Homo sapien
aagtattaggattcgttgctgtttc

SEQ ID NO: 4145256 - DNA, 25 bp, Homo sapien
catgcctggtaaagtggatggcttc

SEQ ID NO: 4145257 - DNA, 25 bp, Homo sapien
gctgtttcttccactcatgcctggt

SEQ ID NO: 4145258 - DNA, 25 bp, Homo sapien
actcagttttcctgcaagtattagg

SEQ ID NO: 4145259 - DNA, 25 bp, Homo sapien
ccgcagcacagctctgagctgacct

SEQ ID NO: 4145260 - DNA, 25 bp, Homo sapien
gcacagctctgagctgacctgccat

SEQ ID NO: 4145261 - DNA, 25 bp, Homo sapien
gctctgagctgacctgccatcatgt

SEQ ID NO: 4145262 - DNA, 25 bp, Homo sapien
ctcatatctccgcagcacagctctg

SEQ ID NO: 4145263 - DNA, 25 bp, Homo sapien
ggtttcatgagaattgaatacagag

SEQ ID NO: 4145264 - DNA, 25 bp, Homo sapien
tgagaattgaatacagagagacata

SEQ ID NO: 4145265 - DNA, 25 bp, Homo sapien
tctgcaaacaggtactttaacctca

SEQ ID NO: 4145266 - DNA, 25 bp, Homo sapien
cttctgcaaacaggtactttaacct

SEQ ID NO: 4145267 - DNA, 25 bp, Homo sapien
aacttctggatagatgtggactccc

SEQ ID NO: 4145268 - DNA, 25 bp, Homo sapien
caggttgggacaacatcatttcaga

SEQ ID NO: 4145269 - DNA, 25 bp, Homo sapien
tggactcccttgcacaaactggtac

SEQ ID NO: 4145270 - DNA, 25 bp, Homo sapien
cagccgagatctggcactgtttttc

SEQ ID NO: 4145271 - DNA, 25 bp, Homo sapien
cagaaaatgtggctctcccactagt

SEQ ID NO: 4145272 - DNA, 25 bp, Homo sapien
tggctctcccactagtctaatgtca

SEQ ID NO: 4145273 - DNA, 25 bp, Homo sapien
aaatgtggctctcccactagtctaa

SEQ ID NO: 4145274 - DNA, 25 bp, Homo sapien
tgtggctctcccactagtctaatgt

SEQ ID NO: 4145275 - DNA, 25 bp, Homo sapien
tggccccagttgttactaagagaga

SEQ ID NO: 4145276 - DNA, 25 bp, Homo sapien
ccactcccaatcagaattttggcca

SEQ ID NO: 4145277 - DNA, 25 bp, Homo sapien
cacataaacgttaaatactataaca

SEQ ID NO: 4145278 - DNA, 25 bp, Homo sapien
gccatggccccagttgttactaaga

SEQ ID NO: 4145279 - DNA, 25 bp, Homo sapien
taatagctagatttgcattattcat

SEQ ID NO: 4145280 - DNA, 25 bp, Homo sapien
tttaatagctagatttgcattattc

SEQ ID NO: 4145281 - DNA, 25 bp, Homo sapien
acccagtaagatgtcatcccttcct

SEQ ID NO: 4145282 - DNA, 25 bp, Homo sapien
aagatgtcatcccttccttctattt

SEQ ID NO: 4145283 - DNA, 25 bp, Homo sapien
acaaggtcacttgtagaaatggtga

SEQ ID NO: 4145284 - DNA, 25 bp, Homo sapien
ctgggacagcaactcacagccactt

SEQ ID NO: 4145285 - DNA, 25 bp, Homo sapien
gactgttccactggacacatttgtc

SEQ ID NO: 4145286 - DNA, 25 bp, Homo sapien
ccactggacacatttgtctgcctct

SEQ ID NO: 4145287 - DNA, 25 bp, Homo sapien
gcctgtggtctattagttttcaatg

SEQ ID NO: 4145288 - DNA, 25 bp, Homo sapien
ctgtggtctattagttttcaatgca

SEQ ID NO: 4145289 - DNA, 25 bp, Homo sapien
tgcccggcctgtggtctattagttt

SEQ ID NO: 4145290 - DNA, 25 bp, Homo sapien
ccggcctgtggtctattagttttca

SEQ ID NO: 4145291 - DNA, 25 bp, Homo sapien
tctttccaggaaagactattctgcc

SEQ ID NO: 4145292 - DNA, 25 bp, Homo sapien
ctgtggtctattgcatcaggcagcc

SEQ ID NO: 4145293 - DNA, 25 bp, Homo sapien
ttgctggttttcactatgactgtgg

SEQ ID NO: 4145294 - DNA, 25 bp, Homo sapien
cacttggtgagatggaagtcaggtc

SEQ ID NO: 4145295 - DNA, 25 bp, Homo sapien
tgtgaagaagaaaaattggcaggga

SEQ ID NO: 4145296 - DNA, 25 bp, Homo sapien
tgaagaagaaaaattggcagggaac

SEQ ID NO: 4145297 - DNA, 25 bp, Homo sapien
gtgaagaagaaaaattggcagggaa

SEQ ID NO: 4145298 - DNA, 25 bp, Homo sapien
tgaaacaatgcccaggtctgcttgt

SEQ ID NO: 4145299 - DNA, 25 bp, Homo sapien
gagcccacggaaaaggatgccattg

SEQ ID NO: 4145300 - DNA, 25 bp, Homo sapien
caaattggcgcaaactgtatagaga

SEQ ID NO: 4145301 - DNA, 25 bp, Homo sapien
gctacaggactataaatattcatcg

SEQ ID NO: 4145302 - DNA, 25 bp, Homo sapien
tatgttggttgggccgcagcttcta

SEQ ID NO: 4145303 - DNA, 25 bp, Homo sapien
tgggccgcagcttctaacacagtta

SEQ ID NO: 4145304 - DNA, 25 bp, Homo sapien
aacacagttagtcgtttgaatcaca

SEQ ID NO: 4145305 - DNA, 25 bp, Homo sapien
tagtcgtttgaatcacaaatggtaa

SEQ ID NO: 4145306 - DNA, 25 bp, Homo sapien
ctatcgtgctatttctggctgagtc

SEQ ID NO: 4145307 - DNA, 25 bp, Homo sapien
tatcgtgctatttctggctgagtca

SEQ ID NO: 4145308 - DNA, 25 bp, Homo sapien
cacagctcctatgacactagcaaca

SEQ ID NO: 4145309 - DNA, 25 bp, Homo sapien
tgaagactctaatccagaaggaagt

SEQ ID NO: 4145310 - DNA, 25 bp, Homo sapien
cttcaccagctctgtttctgaggcc

SEQ ID NO: 4145311 - DNA, 25 bp, Homo sapien
gggtggcaggaatacaaatgcagat

SEQ ID NO: 4145312 - DNA, 25 bp, Homo sapien
tgaaaaaagttggtatgcttcctcc

SEQ ID NO: 4145313 - DNA, 25 bp, Homo sapien
actgatctgtttccttgagtctaca

SEQ ID NO: 4145314 - DNA, 25 bp, Homo sapien
ggactcaacaggacacatcatgaaa

SEQ ID NO: 4145315 - DNA, 25 bp, Homo sapien
gagataacacccaaagcttctctgg

SEQ ID NO: 4145316 - DNA, 25 bp, Homo sapien
tgccttttgggcagaagacacttcc

SEQ ID NO: 4145317 - DNA, 25 bp, Homo sapien
gaagacacttccacgcttcggcact

SEQ ID NO: 4145318 - DNA, 25 bp, Homo sapien
gcactcttcaaattgttctctcacc

SEQ ID NO: 4145319 - DNA, 25 bp, Homo sapien
cacgcttcggcactcttcaaattgt

SEQ ID NO: 4145320 - DNA, 25 bp, Homo sapien
cattgctctggaactgaccactcct

SEQ ID NO: 4145321 - DNA, 25 bp, Homo sapien
acctggtactctggcgtggttttct

SEQ ID NO: 4145322 - DNA, 25 bp, Homo sapien
tcaccatcaagactttgccttctat

SEQ ID NO: 4145323 - DNA, 25 bp, Homo sapien
tggaatagaacaattcaccatcaag

SEQ ID NO: 4145324 - DNA, 25 bp, Homo sapien
tggggacctgtttgtcctggatact

SEQ ID NO: 4145325 - DNA, 25 bp, Homo sapien
ggggacctgtttgtcctggatactc

SEQ ID NO: 4145326 - DNA, 25 bp, Homo sapien
gggacctgtttgtcctggatactca

SEQ ID NO: 4145327 - DNA, 25 bp, Homo sapien
ctggggacctgtttgtcctggatac

SEQ ID NO: 4145328 - DNA, 25 bp, Homo sapien
ggctcgacgattgcccatcatgaaa

SEQ ID NO: 4145329 - DNA, 25 bp, Homo sapien
aaaaatagaatgatgcaccacaagc

SEQ ID NO: 4145330 - DNA, 25 bp, Homo sapien
ctttcagaggaacatttgtggctcg

SEQ ID NO: 4145331 - DNA, 25 bp, Homo sapien
gcaccacaagcacatctaaattcct

SEQ ID NO: 4145332 - DNA, 25 bp, Homo sapien
cagtcgctattcacccataagatta

SEQ ID NO: 4145333 - DNA, 25 bp, Homo sapien
tggtaaattcctagtaaaagccaca

SEQ ID NO: 4145334 - DNA, 25 bp, Homo sapien
gtaaaatagagccagtaaccacact

SEQ ID NO: 4145335 - DNA, 25 bp, Homo sapien
cacttatcatgtgccaggtaggatg

SEQ ID NO: 4145336 - DNA, 25 bp, Homo sapien
gtgaattttctggaactatattatc

SEQ ID NO: 4145337 - DNA, 25 bp, Homo sapien
tctggaactatattatccagtaatt

SEQ ID NO: 4145338 - DNA, 25 bp, Homo sapien
ttctggaactatattatccagtaat

SEQ ID NO: 4145339 - DNA, 25 bp, Homo sapien
gtgactaccaagacttgatgacaga

SEQ ID NO: 4145340 - DNA, 25 bp, Homo sapien
agcaggacctgtgactaccaagact

SEQ ID NO: 4145341 - DNA, 25 bp, Homo sapien
caggacctgtgactaccaagacttg

SEQ ID NO: 4145342 - DNA, 25 bp, Homo sapien
gacctgtgactaccaagacttgatg

SEQ ID NO: 4145343 - DNA, 25 bp, Homo sapien
taagaacccagcaggttgcttgtgt

SEQ ID NO: 4145344 - DNA, 25 bp, Homo sapien
gcttgtgtcagtcctgaagtccaaa

SEQ ID NO: 4145345 - DNA, 25 bp, Homo sapien
ccagcaggttgcttgtgtcagtcct

SEQ ID NO: 4145346 - DNA, 25 bp, Homo sapien
caaaagtctcaggaccagggaagct

SEQ ID NO: 4145347 - DNA, 25 bp, Homo sapien
aaagacatcgggttcattcagactg

SEQ ID NO: 4145348 - DNA, 25 bp, Homo sapien
tcagtttatagttgccgatggacca

SEQ ID NO: 4145349 - DNA, 25 bp, Homo sapien
tctgcctgacgagacctttgaagtg

SEQ ID NO: 4145350 - DNA, 25 bp, Homo sapien
gactgtattgtcagaaaaggagcca

SEQ ID NO: 4145351 - DNA, 25 bp, Homo sapien
gaaagcccttttcagatgatcatac

SEQ ID NO: 4145352 - DNA, 25 bp, Homo sapien
cattcgacaggaaaggttacctccg

SEQ ID NO: 4145353 - DNA, 25 bp, Homo sapien
ggaggtctcagacgtcatgttcctt

SEQ ID NO: 4145354 - DNA, 25 bp, Homo sapien
taaactatagttatcccaggcactg

SEQ ID NO: 4145355 - DNA, 25 bp, Homo sapien
tatccacaaatacaggacccaggac

SEQ ID NO: 4145356 - DNA, 25 bp, Homo sapien
ggacccaggacatcgcagagaccat

SEQ ID NO: 4145357 - DNA, 25 bp, Homo sapien
gcagagtagcattgcacaagcactt

SEQ ID NO: 4145358 - DNA, 25 bp, Homo sapien
caagcacttatccacaaatacagga

SEQ ID NO: 4145359 - DNA, 25 bp, Homo sapien
cagcgccccctcgccttccctgtca

SEQ ID NO: 4145360 - DNA, 25 bp, Homo sapien
tctcggctgcactgagggtttgagt

SEQ ID NO: 4145361 - DNA, 25 bp, Homo sapien
cctccatctcggctgcactgagggt

SEQ ID NO: 4145362 - DNA, 25 bp, Homo sapien
tcctgaagagggcggtttccctgcc

SEQ ID NO: 4145363 - DNA, 25 bp, Homo sapien
aagcgcgtcctgaagagggcggttt

SEQ ID NO: 4145364 - DNA, 25 bp, Homo sapien
ccacgcattggttgataatacacaa

SEQ ID NO: 4145365 - DNA, 25 bp, Homo sapien
gacgcacagatcaaccacgcattgg

SEQ ID NO: 4145366 - DNA, 25 bp, Homo sapien
tcttggggtatttgacgcacagatc

SEQ ID NO: 4145367 - DNA, 25 bp, Homo sapien
tatttgacgcacagatcaaccacgc

SEQ ID NO: 4145368 - DNA, 25 bp, Homo sapien
taggcattcatccatgacaaatgga

SEQ ID NO: 4145369 - DNA, 25 bp, Homo sapien
tatcatcatcaaggcatgtataggc

SEQ ID NO: 4145370 - DNA, 25 bp, Homo sapien
cagcatccacccttacaaggttttg

SEQ ID NO: 4145371 - DNA, 25 bp, Homo sapien
gacaaatggatgcatttgatccata

SEQ ID NO: 4145372 - DNA, 25 bp, Homo sapien
tcccatgaccaaagagtcatgcagt

SEQ ID NO: 4145373 - DNA, 25 bp, Homo sapien
tcatcttcacaaggattcgtctgtg

SEQ ID NO: 4145374 - DNA, 25 bp, Homo sapien
aggattcgtctgtgggccaacccct

SEQ ID NO: 4145375 - DNA, 25 bp, Homo sapien
gagtcatgcagttcagaggaccagg

SEQ ID NO: 4145376 - DNA, 25 bp, Homo sapien
tcattcccccgctgctggaccagtc

SEQ ID NO: 4145377 - DNA, 25 bp, Homo sapien
cattcccccgctgctggaccagtca

SEQ ID NO: 4145378 - DNA, 25 bp, Homo sapien
attcccccgctgctggaccagtcac

SEQ ID NO: 4145379 - DNA, 25 bp, Homo sapien
tttgttttcctggacaggatgatat

SEQ ID NO: 4145380 - DNA, 25 bp, Homo sapien
caagaaacggcttgaggttccactg

SEQ ID NO: 4145381 - DNA, 25 bp, Homo sapien
aacggcttgaggttccactgaagga

SEQ ID NO: 4145382 - DNA, 25 bp, Homo sapien
caggatgatatgagggtgaagctca

SEQ ID NO: 4145383 - DNA, 25 bp, Homo sapien
tctctcatttgatatgtgcatgaca

SEQ ID NO: 4145384 - DNA, 25 bp, Homo sapien
tgacataagacctagccttcacatt

SEQ ID NO: 4145385 - DNA, 25 bp, Homo sapien
gtattttgtttctggatagagccct

SEQ ID NO: 4145386 - DNA, 25 bp, Homo sapien
ctgattttagaagctctctctcatt

SEQ ID NO: 4145387 - DNA, 25 bp, Homo sapien
aagcatgatcatgaaaaatccgaag

SEQ ID NO: 4145388 - DNA, 25 bp, Homo sapien
gaagcatgatcatgaaaaatccgaa

SEQ ID NO: 4145389 - DNA, 25 bp, Homo sapien
tcaaaagacagaagtggcacagcat

SEQ ID NO: 4145390 - DNA, 25 bp, Homo sapien
tattggtgtgccgtgcagcaaacac

SEQ ID NO: 4145391 - DNA, 25 bp, Homo sapien
tcacaattgagaaacctgaggcttg

SEQ ID NO: 4145392 - DNA, 25 bp, Homo sapien
tgcatgaggtttgccagctacccca

SEQ ID NO: 4145393 - DNA, 25 bp, Homo sapien
ggtctgtatcagaggatggagggtg

SEQ ID NO: 4145394 - DNA, 25 bp, Homo sapien
tgggttggttcctaatgctaaatga

SEQ ID NO: 4145395 - DNA, 25 bp, Homo sapien
tattctctactacaaaccctcatga

SEQ ID NO: 4145396 - DNA, 25 bp, Homo sapien
gaaatcacacctaccttgagggcct

SEQ ID NO: 4145397 - DNA, 25 bp, Homo sapien
taaagaacagtcatatcagagacct

SEQ ID NO: 4145398 - DNA, 25 bp, Homo sapien
gctggccatatgctggaatgggaaa

SEQ ID NO: 4145399 - DNA, 25 bp, Homo sapien
gacctagacagagaagagtatcatg

SEQ ID NO: 4145400 - DNA, 25 bp, Homo sapien
taagtgttcctgtcatgtggattgc

SEQ ID NO: 4145401 - DNA, 25 bp, Homo sapien
tgctattccgaaggcaacagcccag

SEQ ID NO: 4145402 - DNA, 25 bp, Homo sapien
tattgcagtgggacaaataaccagt

SEQ ID NO: 4145403 - DNA, 25 bp, Homo sapien
ggaccctttgccaagcccttagatg

SEQ ID NO: 4145404 - DNA, 25 bp, Homo sapien
tggagatcactgcaaacatgtcaac

SEQ ID NO: 4145405 - DNA, 25 bp, Homo sapien
ctctctagccaacgactccaatgaa

SEQ ID NO: 4145406 - DNA, 25 bp, Homo sapien
gccaacgactccaatgaatcaatca

SEQ ID NO: 4145407 - DNA, 25 bp, Homo sapien
cacaggccattctagaaggctttcc

SEQ ID NO: 4145408 - DNA, 25 bp, Homo sapien
tcttcccttttgcacaggccattct

SEQ ID NO: 4145409 - DNA, 25 bp, Homo sapien
cattgaatccattcactatcaaatc

SEQ ID NO: 4145410 - DNA, 25 bp, Homo sapien
aacattgaatccattcactatcaaa

SEQ ID NO: 4145411 - DNA, 25 bp, Homo sapien
gaacattgaatccattcactatcaa

SEQ ID NO: 4145412 - DNA, 25 bp, Homo sapien
ttgaatccattcactatcaaatctc

SEQ ID NO: 4145413 - DNA, 25 bp, Homo sapien
gactgacagtaagaaccagctgttc

SEQ ID NO: 4145414 - DNA, 25 bp, Homo sapien
tgactgacagtaagaaccagctgtt

SEQ ID NO: 4145415 - DNA, 25 bp, Homo sapien
ctgactgacagtaagaaccagctgt

SEQ ID NO: 4145416 - DNA, 25 bp, Homo sapien
taaccgaaccctaatgacaatgctt

SEQ ID NO: 4145417 - DNA, 25 bp, Homo sapien
gagaagcaacgaatgcgccctgtga

SEQ ID NO: 4145418 - DNA, 25 bp, Homo sapien
gaacagtggcatgcaacttgtcagc

SEQ ID NO: 4145419 - DNA, 25 bp, Homo sapien
taaagaacagtcactacggaacagt

SEQ ID NO: 4145420 - DNA, 25 bp, Homo sapien
aaggtaactgtggagtagcaaggca

SEQ ID NO: 4145421 - DNA, 25 bp, Homo sapien
gacatctttcgtgctttagggctac

SEQ ID NO: 4145422 - DNA, 25 bp, Homo sapien
taagtgccagccagacgtgaagatg

SEQ ID NO: 4145423 - DNA, 25 bp, Homo sapien
cgtgaagatgacctatctgggcctt

SEQ ID NO: 4145424 - DNA, 25 bp, Homo sapien
tattcatgtcattacggagcaaaca

SEQ ID NO: 4145425 - DNA, 25 bp, Homo sapien
ttattcatgtcattacggagcaaac

SEQ ID NO: 4145426 - DNA, 25 bp, Homo sapien
ttcatgtcattacggagcaaacata

SEQ ID NO: 4145427 - DNA, 25 bp, Homo sapien
tcatgtcattacggagcaaacataa

SEQ ID NO: 4145428 - DNA, 25 bp, Homo sapien
taagtgcttccataattggctggac

SEQ ID NO: 4145429 - DNA, 25 bp, Homo sapien
atagatcccagggaaatctctctgc

SEQ ID NO: 4145430 - DNA, 25 bp, Homo sapien
agcgttgatggttgtatagatccca

SEQ ID NO: 4145431 - DNA, 25 bp, Homo sapien
ctctaagtgcttccataattggctg

SEQ ID NO: 4145432 - DNA, 25 bp, Homo sapien
gaaagccacataatccgtcagtctg

SEQ ID NO: 4145433 - DNA, 25 bp, Homo sapien
gaagatgaatcttgaactcagagtg

SEQ ID NO: 4145434 - DNA, 25 bp, Homo sapien
aatgctgaggtgcttaagccatcca

SEQ ID NO: 4145435 - DNA, 25 bp, Homo sapien
gcagaaccattcttgtggtggaatc

SEQ ID NO: 4145436 - DNA, 25 bp, Homo sapien
gtcctttgggtgttgaacatctcct

SEQ ID NO: 4145437 - DNA, 25 bp, Homo sapien
tcctgagattcttgttccacactag

SEQ ID NO: 4145438 - DNA, 25 bp, Homo sapien
cctgagattcttgttccacactagc

SEQ ID NO: 4145439 - DNA, 25 bp, Homo sapien
agtcctttgggtgttgaacatctcc

SEQ ID NO: 4145440 - DNA, 25 bp, Homo sapien
ggccaaacgcttttctgaagtctct

SEQ ID NO: 4145441 - DNA, 25 bp, Homo sapien
acagacacaggccaaacgcttttct

SEQ ID NO: 4145442 - DNA, 25 bp, Homo sapien
gcttttctgaagtctctctgacatt

SEQ ID NO: 4145443 - DNA, 25 bp, Homo sapien
gacattcccagaacgaactttctca

SEQ ID NO: 4145444 - DNA, 25 bp, Homo sapien
gaatgtgacaaagacagcgctgaga

SEQ ID NO: 4145445 - DNA, 25 bp, Homo sapien
ctttggaaagctgccggagttggga

SEQ ID NO: 4145446 - DNA, 25 bp, Homo sapien
cacagcacggaatgtgacaaagaca

SEQ ID NO: 4145447 - DNA, 25 bp, Homo sapien
ggctgaacacagcacggaatgtgac

SEQ ID NO: 4145448 - DNA, 25 bp, Homo sapien
taattattgcaaccacctgcctgca

SEQ ID NO: 4145449 - DNA, 25 bp, Homo sapien
gaactcagatgtcagaaacggtacc

SEQ ID NO: 4145450 - DNA, 25 bp, Homo sapien
cctgcaaccgctgttgtgttcctga

SEQ ID NO: 4145451 - DNA, 25 bp, Homo sapien
acccttgggccaaatacagtctgct

SEQ ID NO: 4145452 - DNA, 25 bp, Homo sapien
cctttatggtacgaattgtgctgca

SEQ ID NO: 4145453 - DNA, 25 bp, Homo sapien
tgtaagggactagtctgaaagagcc

SEQ ID NO: 4145454 - DNA, 25 bp, Homo sapien
gcaatttgagagtagaagccatacc

SEQ ID NO: 4145455 - DNA, 25 bp, Homo sapien
tgatagactgcctgacaagtgagag

SEQ ID NO: 4145456 - DNA, 25 bp, Homo sapien
gattcgcagaactttcctctgatga

SEQ ID NO: 4145457 - DNA, 25 bp, Homo sapien
ggcacctctgtacgaaaatgttccc

SEQ ID NO: 4145458 - DNA, 25 bp, Homo sapien
gagttctgccctccatttgattcgc

SEQ ID NO: 4145459 - DNA, 25 bp, Homo sapien
aaatgggcaattaaacctccagcct

SEQ ID NO: 4145460 - DNA, 25 bp, Homo sapien
tgctaaagacgaaaagaggcagcgt

SEQ ID NO: 4145461 - DNA, 25 bp, Homo sapien
cacattttcattcggcagacctgag

SEQ ID NO: 4145462 - DNA, 25 bp, Homo sapien
catgtctactgggtaaggcttcacg

SEQ ID NO: 4145463 - DNA, 25 bp, Homo sapien
tagaggacactaccacaggacaatg

SEQ ID NO: 4145464 - DNA, 25 bp, Homo sapien
gtttcactgtaattacagcaattgc

SEQ ID NO: 4145465 - DNA, 25 bp, Homo sapien
tgtaattacagcaattgccactggg

SEQ ID NO: 4145466 - DNA, 25 bp, Homo sapien
catcaagtttcactgtaattacagc

SEQ ID NO: 4145467 - DNA, 25 bp, Homo sapien
tcactgtaattacagcaattgccac

SEQ ID NO: 4145468 - DNA, 25 bp, Homo sapien
tatccactggtttgtaattgccctg

SEQ ID NO: 4145469 - DNA, 25 bp, Homo sapien
ggacctgtttagaagttatccactg

SEQ ID NO: 4145470 - DNA, 25 bp, Homo sapien
acaccaggacctgtttagaagttat

SEQ ID NO: 4145471 - DNA, 25 bp, Homo sapien
gttatccactggtttgtaattgccc

SEQ ID NO: 4145472 - DNA, 25 bp, Homo sapien
aagtctgaccatctaaaactgctga

SEQ ID NO: 4145473 - DNA, 25 bp, Homo sapien
cagtccctgagaacataatcgttag

SEQ ID NO: 4145474 - DNA, 25 bp, Homo sapien
tctaaaactgctgaccagtctggac

SEQ ID NO: 4145475 - DNA, 25 bp, Homo sapien
taatcgttagtgtaccaccaattgg

SEQ ID NO: 4145476 - DNA, 25 bp, Homo sapien
gagtaccagtcattggcccagggtg

SEQ ID NO: 4145477 - DNA, 25 bp, Homo sapien
ggtgtgaacttctaaaggcccagag

SEQ ID NO: 4145478 - DNA, 25 bp, Homo sapien
ttgctccctttcttgactgagtacc

SEQ ID NO: 4145479 - DNA, 25 bp, Homo sapien
cagggtgtgaacttctaaaggccca

SEQ ID NO: 4145480 - DNA, 25 bp, Homo sapien
gaagataattagcttcactctgacc

SEQ ID NO: 4145481 - DNA, 25 bp, Homo sapien
tgaaccggcttaataaataccgcca

SEQ ID NO: 4145482 - DNA, 25 bp, Homo sapien
tttccattgcttgaaccggcttaat

SEQ ID NO: 4145483 - DNA, 25 bp, Homo sapien
tctgaccatagttacgtttttccat

SEQ ID NO: 4145484 - DNA, 25 bp, Homo sapien
catcataatggtgctcaatgagcaa

SEQ ID NO: 4145485 - DNA, 25 bp, Homo sapien
gagcaacttgcggtattcccatcag

SEQ ID NO: 4145486 - DNA, 25 bp, Homo sapien
tgatgaaggcacatcataatggtgc

SEQ ID NO: 4145487 - DNA, 25 bp, Homo sapien
tatacagctctctagagatgctcct

SEQ ID NO: 4145488 - DNA, 25 bp, Homo sapien
ccccagaggcatctgtagggccaac

SEQ ID NO: 4145489 - DNA, 25 bp, Homo sapien
gaggcatctgtagggccaactttca

SEQ ID NO: 4145490 - DNA, 25 bp, Homo sapien
atctaaaatccaggccttcagacag

SEQ ID NO: 4145491 - DNA, 25 bp, Homo sapien
ctgtagggccaactttcatttcaga

SEQ ID NO: 4145492 - DNA, 25 bp, Homo sapien
gctgtagccatatttccctagtgat

SEQ ID NO: 4145493 - DNA, 25 bp, Homo sapien
caaaagtagatctaactgctctagg

SEQ ID NO: 4145494 - DNA, 25 bp, Homo sapien
caaggacactcaaaaggatttcaca

SEQ ID NO: 4145495 - DNA, 25 bp, Homo sapien
ttctcactgtcaagctatgcctaag

SEQ ID NO: 4145496 - DNA, 25 bp, Homo sapien
ctgtgagttctaaactatattttga

SEQ ID NO: 4145497 - DNA, 25 bp, Homo sapien
cactgtgagttctaaactatatttt

SEQ ID NO: 4145498 - DNA, 25 bp, Homo sapien
gcactgtgagttctaaactatattt

SEQ ID NO: 4145499 - DNA, 25 bp, Homo sapien
aagcactgtgagttctaaactatat

SEQ ID NO: 4145500 - DNA, 25 bp, Homo sapien
gttctttgatttcactctcaaatgc

SEQ ID NO: 4145501 - DNA, 25 bp, Homo sapien
ctttgatttcactctcaaatgccat

SEQ ID NO: 4145502 - DNA, 25 bp, Homo sapien
ctgccactgctgttctttgatttca

SEQ ID NO: 4145503 - DNA, 25 bp, Homo sapien
tgccactgctgttctttgatttcac

SEQ ID NO: 4145504 - DNA, 25 bp, Homo sapien
tgggatgctagtgtgcctgccacac

SEQ ID NO: 4145505 - DNA, 25 bp, Homo sapien
ttaaatgggatgctagtgtgcctgc

SEQ ID NO: 4145506 - DNA, 25 bp, Homo sapien
taaatgggatgctagtgtgcctgcc

SEQ ID NO: 4145507 - DNA, 25 bp, Homo sapien
aatgggatgctagtgtgcctgccac

SEQ ID NO: 4145508 - DNA, 25 bp, Homo sapien
tttctgttagtcctgcttttggctt

SEQ ID NO: 4145509 - DNA, 25 bp, Homo sapien
atggactttttgggttttcatccat

SEQ ID NO: 4145510 - DNA, 25 bp, Homo sapien
ctttctgttagtcctgcttttggct

SEQ ID NO: 4145511 - DNA, 25 bp, Homo sapien
tcaagattttccaattacagatttt

SEQ ID NO: 4145512 - DNA, 25 bp, Homo sapien
caagattttccaattacagatttta

SEQ ID NO: 4145513 - DNA, 25 bp, Homo sapien
ccaattacagattttatgtctttct

SEQ ID NO: 4145514 - DNA, 25 bp, Homo sapien
ttttccaattacagattttatgtct

SEQ ID NO: 4145515 - DNA, 25 bp, Homo sapien
ctccttttgacctaggaaaaatgag

SEQ ID NO: 4145516 - DNA, 25 bp, Homo sapien
cttttgacctaggaaaaatgaggct

SEQ ID NO: 4145517 - DNA, 25 bp, Homo sapien
tggaactaggacaggtgttagtgct

SEQ ID NO: 4145518 - DNA, 25 bp, Homo sapien
caaaactgacaaggtccctaatgct

SEQ ID NO: 4145519 - DNA, 25 bp, Homo sapien
aactaggacaggtgttagtgctggt

SEQ ID NO: 4145520 - DNA, 25 bp, Homo sapien
tgacaaggtccctaatgctgtccac

SEQ ID NO: 4145521 - DNA, 25 bp, Homo sapien
ctgcagcatgagggacctgaggtgg

SEQ ID NO: 4145522 - DNA, 25 bp, Homo sapien
gcagcatgagggacctgaggtggct

SEQ ID NO: 4145523 - DNA, 25 bp, Homo sapien
tgcagcatgagggacctgaggtggc

SEQ ID NO: 4145524 - DNA, 25 bp, Homo sapien
ttgagagacttgctccttcacattc

SEQ ID NO: 4145525 - DNA, 25 bp, Homo sapien
tatcccatacaggactgcattcaga

SEQ ID NO: 4145526 - DNA, 25 bp, Homo sapien
cattctgcaacagagtcatgaatcg

SEQ ID NO: 4145527 - DNA, 25 bp, Homo sapien
tgcattcagattgcggccaaaagga

SEQ ID NO: 4145528 - DNA, 25 bp, Homo sapien
tgaaaatagatccttgtcctgcagg

SEQ ID NO: 4145529 - DNA, 25 bp, Homo sapien
ctgattttgtaggtaattatatccc

SEQ ID NO: 4145530 - DNA, 25 bp, Homo sapien
tcccttaggaattgtaattgacttg

SEQ ID NO: 4145531 - DNA, 25 bp, Homo sapien
gagaaatagggttcctttgctgatt

SEQ ID NO: 4145532 - DNA, 25 bp, Homo sapien
ctgtaaagtgatttctatctttggc

SEQ ID NO: 4145533 - DNA, 25 bp, Homo sapien
tctgtaaagtgatttctatctttgg

SEQ ID NO: 4145534 - DNA, 25 bp, Homo sapien
tgtaaagtgatttctatctttggca

SEQ ID NO: 4145535 - DNA, 25 bp, Homo sapien
gaagctcacattgatctgccagcag

SEQ ID NO: 4145536 - DNA, 25 bp, Homo sapien
actctgaagagtagccaaagcaggc

SEQ ID NO: 4145537 - DNA, 25 bp, Homo sapien
gccaaagcaggctgtgtcttgtcct

SEQ ID NO: 4145538 - DNA, 25 bp, Homo sapien
tccttgaggatattagctgcagaac

SEQ ID NO: 4145539 - DNA, 25 bp, Homo sapien
attccactttggcttgtgtccgctt

SEQ ID NO: 4145540 - DNA, 25 bp, Homo sapien
actttggcttgtgtccgcttttcca

SEQ ID NO: 4145541 - DNA, 25 bp, Homo sapien
ccagttcctcatgtaatagggcgat

SEQ ID NO: 4145542 - DNA, 25 bp, Homo sapien
taatagggcgataatgggagtcaca

SEQ ID NO: 4145543 - DNA, 25 bp, Homo sapien
tgagaaatgacgagagaggcactct

SEQ ID NO: 4145544 - DNA, 25 bp, Homo sapien
ctaactcgctaagcacaagggatgt

SEQ ID NO: 4145545 - DNA, 25 bp, Homo sapien
tctgatcatataaagttgaggcttt

SEQ ID NO: 4145546 - DNA, 25 bp, Homo sapien
tgaaggatatttgcctacagcataa

SEQ ID NO: 4145547 - DNA, 25 bp, Homo sapien
caatctgtgggaatttggcaggaag

SEQ ID NO: 4145548 - DNA, 25 bp, Homo sapien
tctggttcaaaatggtgatctcttc

SEQ ID NO: 4145549 - DNA, 25 bp, Homo sapien
gaagtagggtatctccagaggttca

SEQ ID NO: 4145550 - DNA, 25 bp, Homo sapien
ctgctttggtgaccaatctgtggga

SEQ ID NO: 4145551 - DNA, 25 bp, Homo sapien
aaggattagatctggccctggttgc

SEQ ID NO: 4145552 - DNA, 25 bp, Homo sapien
tctgcctgaacgaggtaaggattag

SEQ ID NO: 4145553 - DNA, 25 bp, Homo sapien
ggtaaggattagatctggccctggt

SEQ ID NO: 4145554 - DNA, 25 bp, Homo sapien
aacgaggtaaggattagatctggcc

SEQ ID NO: 4145555 - DNA, 25 bp, Homo sapien
aattgcattctgttatggaaggaag

SEQ ID NO: 4145556 - DNA, 25 bp, Homo sapien
ctttggaaattgcattctgttatgg

SEQ ID NO: 4145557 - DNA, 25 bp, Homo sapien
tttggaaattgcattctgttatgga

SEQ ID NO: 4145558 - DNA, 25 bp, Homo sapien
gcattctgttatggaaggaagggct

SEQ ID NO: 4145559 - DNA, 25 bp, Homo sapien
caccctgagtgctgttaatcccctt

SEQ ID NO: 4145560 - DNA, 25 bp, Homo sapien
ttcctcgagtcagaggattttcctg

SEQ ID NO: 4145561 - DNA, 25 bp, Homo sapien
tcctgtgtaaaagggcagctctatt

SEQ ID NO: 4145562 - DNA, 25 bp, Homo sapien
tcacgttttcccctgacttcttaca

SEQ ID NO: 4145563 - DNA, 25 bp, Homo sapien
tctgccaaatcaccacgacatttag

SEQ ID NO: 4145564 - DNA, 25 bp, Homo sapien
aatcaccacgacatttagcatgagg

SEQ ID NO: 4145565 - DNA, 25 bp, Homo sapien
tattctctgccaaatcaccacgaca

SEQ ID NO: 4145566 - DNA, 25 bp, Homo sapien
gtaaatattctctgccaaatcacca

SEQ ID NO: 4145567 - DNA, 25 bp, Homo sapien
agtccctctaggcctgtagcacaaa

SEQ ID NO: 4145568 - DNA, 25 bp, Homo sapien
gcagtccctctaggcctgtagcaca

SEQ ID NO: 4145569 - DNA, 25 bp, Homo sapien
ttgcagtccctctaggcctgtagca

SEQ ID NO: 4145570 - DNA, 25 bp, Homo sapien
tccctctaggcctgtagcacaaatc

SEQ ID NO: 4145571 - DNA, 25 bp, Homo sapien
ttgtgccctctgttctttctgaaag

SEQ ID NO: 4145572 - DNA, 25 bp, Homo sapien
cacactcatcctgtgacaattctct

SEQ ID NO: 4145573 - DNA, 25 bp, Homo sapien
aagactatgaattgctgctttacac

SEQ ID NO: 4145574 - DNA, 25 bp, Homo sapien
gctgctttacacaagaatccttgtg

SEQ ID NO: 4145575 - DNA, 25 bp, Homo sapien
ccatactgtcagtttctgggactga

SEQ ID NO: 4145576 - DNA, 25 bp, Homo sapien
gcttccatactgtcagtttctggga

SEQ ID NO: 4145577 - DNA, 25 bp, Homo sapien
gagtttgggcttccatactgtcagt

SEQ ID NO: 4145578 - DNA, 25 bp, Homo sapien
tcattaacacagagtttgggcttcc

SEQ ID NO: 4145579 - DNA, 25 bp, Homo sapien
gacgaagccatcaccgagagagaaa

SEQ ID NO: 4145580 - DNA, 25 bp, Homo sapien
ttttgcactggaggatgattttgca

SEQ ID NO: 4145581 - DNA, 25 bp, Homo sapien
tgcgatccataaagaatgtatagag

SEQ ID NO: 4145582 - DNA, 25 bp, Homo sapien
gaggtgttgaaagtaatgcgatcca

SEQ ID NO: 4145583 - DNA, 25 bp, Homo sapien
ggtcctgtcattatgattccagctg

SEQ ID NO: 4145584 - DNA, 25 bp, Homo sapien
ctcaggagctctggtatggcaggcc

SEQ ID NO: 4145585 - DNA, 25 bp, Homo sapien
tgcttcctcaggagctctggtatgg

SEQ ID NO: 4145586 - DNA, 25 bp, Homo sapien
tcctcaggagctctggtatggcagg

SEQ ID NO: 4145587 - DNA, 25 bp, Homo sapien
tctgtaaatcattgacaagagagac

SEQ ID NO: 4145588 - DNA, 25 bp, Homo sapien
agctgcttgatttgtttatgcttga

SEQ ID NO: 4145589 - DNA, 25 bp, Homo sapien
tgcttgagattaaacaaattcccat

SEQ ID NO: 4145590 - DNA, 25 bp, Homo sapien
tctttaagcatgttttggttgagga

SEQ ID NO: 4145591 - DNA, 25 bp, Homo sapien
gctcctcaatgcgattcttgttaca

SEQ ID NO: 4145592 - DNA, 25 bp, Homo sapien
catcgacgcaagaaggccggtttct

SEQ ID NO: 4145593 - DNA, 25 bp, Homo sapien
ggaacactttactgtttgtgaccgc

SEQ ID NO: 4145594 - DNA, 25 bp, Homo sapien
ggtgtgctgctatcacttcacacgt

SEQ ID NO: 4145595 - DNA, 25 bp, Homo sapien
cacttcggatgcaccttgttcatta

SEQ ID NO: 4145596 - DNA, 25 bp, Homo sapien
tgaggctggcaattgtataactttc

SEQ ID NO: 4145597 - DNA, 25 bp, Homo sapien
gctggcaattgtataactttctaac

SEQ ID NO: 4145598 - DNA, 25 bp, Homo sapien
tctaacacttcggatgcaccttgtt

SEQ ID NO: 4145599 - DNA, 25 bp, Homo sapien
gctatcttcgggcatcacactatcc

SEQ ID NO: 4145600 - DNA, 25 bp, Homo sapien
aactcggaagacttgaaagacattc

SEQ ID NO: 4145601 - DNA, 25 bp, Homo sapien
ctatccattaactcggaagacttga

SEQ ID NO: 4145602 - DNA, 25 bp, Homo sapien
ggcatcacactatccattaactcgg

SEQ ID NO: 4145603 - DNA, 25 bp, Homo sapien
gattagaagatgtcctcagtacctt

SEQ ID NO: 4145604 - DNA, 25 bp, Homo sapien
tagaagatgtcctcagtaccttcac

SEQ ID NO: 4145605 - DNA, 25 bp, Homo sapien
gactgggattagaagatgtcctcag

SEQ ID NO: 4145606 - DNA, 25 bp, Homo sapien
tgggattagaagatgtcctcagtac

SEQ ID NO: 4145607 - DNA, 25 bp, Homo sapien
cattattagatgaccaattaatgaa

SEQ ID NO: 4145608 - DNA, 25 bp, Homo sapien
gggactacattattagatgaccaat

SEQ ID NO: 4145609 - DNA, 25 bp, Homo sapien
gactacattattagatgaccaatta

SEQ ID NO: 4145610 - DNA, 25 bp, Homo sapien
ttattagatgaccaattaatgaaca

SEQ ID NO: 4145611 - DNA, 25 bp, Homo sapien
tgtctagagctttggaataaacctt

SEQ ID NO: 4145612 - DNA, 25 bp, Homo sapien
aaacctttggcttgttaatgatcag

SEQ ID NO: 4145613 - DNA, 25 bp, Homo sapien
ctaactgttgtctagagctttggaa

SEQ ID NO: 4145614 - DNA, 25 bp, Homo sapien
gagcaatggttctggaacaaggaca

SEQ ID NO: 4145615 - DNA, 25 bp, Homo sapien
tggtgtagcttttgatgagttggca

SEQ ID NO: 4145616 - DNA, 25 bp, Homo sapien
cagcaaacatacgtctttcttagaa

SEQ ID NO: 4145617 - DNA, 25 bp, Homo sapien
tgcagacagcaaacatacgtctttc

SEQ ID NO: 4145618 - DNA, 25 bp, Homo sapien
tctaaagtcatgcagacagcaaaca

SEQ ID NO: 4145619 - DNA, 25 bp, Homo sapien
tctgttaactggagaacctacacgt

SEQ ID NO: 4145620 - DNA, 25 bp, Homo sapien
ttcaactgggctggatggacacatc

SEQ ID NO: 4145621 - DNA, 25 bp, Homo sapien
cagcccatagggaccattgcaagat

SEQ ID NO: 4145622 - DNA, 25 bp, Homo sapien
tattggtcaaggaagcactcaggac

SEQ ID NO: 4145623 - DNA, 25 bp, Homo sapien
cttttcatggttaaattgaagatat

SEQ ID NO: 4145624 - DNA, 25 bp, Homo sapien
catggttaaattgaagatatttatg

SEQ ID NO: 4145625 - DNA, 25 bp, Homo sapien
tttcatggttaaattgaagatattt

SEQ ID NO: 4145626 - DNA, 25 bp, Homo sapien
tggttaaattgaagatatttatgat

SEQ ID NO: 4145627 - DNA, 25 bp, Homo sapien
tatttcagccttgtacgtcacatac

SEQ ID NO: 4145628 - DNA, 25 bp, Homo sapien
tgcttagggtaggaataggcaaact

SEQ ID NO: 4145629 - DNA, 25 bp, Homo sapien
ggtgtgccttcatcttgattaatca

SEQ ID NO: 4145630 - DNA, 25 bp, Homo sapien
aatcgtgatcttctggtcacagtga

SEQ ID NO: 4145631 - DNA, 25 bp, Homo sapien
cctcacttttagcaggaataacttg

SEQ ID NO: 4145632 - DNA, 25 bp, Homo sapien
ctcacttttagcaggaataacttgc

SEQ ID NO: 4145633 - DNA, 25 bp, Homo sapien
gcatgcccacaaatgttacaatctg

SEQ ID NO: 4145634 - DNA, 25 bp, Homo sapien
gttacaatctgacaaccttttctta

SEQ ID NO: 4145635 - DNA, 25 bp, Homo sapien
gaatcttccatagttaagcctccag

SEQ ID NO: 4145636 - DNA, 25 bp, Homo sapien
aatcttccatagttaagcctccaga

SEQ ID NO: 4145637 - DNA, 25 bp, Homo sapien
tggaatcttccatagttaagcctcc

SEQ ID NO: 4145638 - DNA, 25 bp, Homo sapien
aaatggaatcttccatagttaagcc

SEQ ID NO: 4145639 - DNA, 25 bp, Homo sapien
tctaggatgttgagcaggctccatc

SEQ ID NO: 4145640 - DNA, 25 bp, Homo sapien
cttgtggcagggaattgcaagtagc

SEQ ID NO: 4145641 - DNA, 25 bp, Homo sapien
gactccttcttggtagactaaagag

SEQ ID NO: 4145642 - DNA, 25 bp, Homo sapien
aaaccaccatgttgcaaactgcctg

SEQ ID NO: 4145643 - DNA, 25 bp, Homo sapien
cctcacctctgaaatgtctactttc

SEQ ID NO: 4145644 - DNA, 25 bp, Homo sapien
gatggtatgattgggcctgaatcct

SEQ ID NO: 4145645 - DNA, 25 bp, Homo sapien
gcaatggacatacaatgatggccaa

SEQ ID NO: 4145646 - DNA, 25 bp, Homo sapien
gtgcttcctgtagttcaagatggta

SEQ ID NO: 4145647 - DNA, 25 bp, Homo sapien
tcccccatgttccaaagatgctctc

SEQ ID NO: 4145648 - DNA, 25 bp, Homo sapien
ccatgttccaaagatgctctccacc

SEQ ID NO: 4145649 - DNA, 25 bp, Homo sapien
cccatgttccaaagatgctctccac

SEQ ID NO: 4145650 - DNA, 25 bp, Homo sapien
ccatcccccatgttccaaagatgct

SEQ ID NO: 4145651 - DNA, 25 bp, Homo sapien
caccaccatttcccaatcactatgg

SEQ ID NO: 4145652 - DNA, 25 bp, Homo sapien
tccatccagaattgtcagggagtgt

SEQ ID NO: 4145653 - DNA, 25 bp, Homo sapien
cttctccttctaggcaaggctccat

SEQ ID NO: 4145654 - DNA, 25 bp, Homo sapien
tgtcagggagtgtcttacattcttc

SEQ ID NO: 4145655 - DNA, 25 bp, Homo sapien
aattttgttgcctgttgcgcacatc

SEQ ID NO: 4145656 - DNA, 25 bp, Homo sapien
cacagaatagatggttcctatatac

SEQ ID NO: 4145657 - DNA, 25 bp, Homo sapien
tatacatcatctggacttagttggt

SEQ ID NO: 4145658 - DNA, 25 bp, Homo sapien
gctccttgtgtttaaaagtgcttat

SEQ ID NO: 4145659 - DNA, 25 bp, Homo sapien
gacttagttggtgctccttgtgttt

SEQ ID NO: 4145660 - DNA, 25 bp, Homo sapien
tggcctgttgtaagatatagagggc

SEQ ID NO: 4145661 - DNA, 25 bp, Homo sapien
ggtcgttgtcaaggttagaccacat

SEQ ID NO: 4145662 - DNA, 25 bp, Homo sapien
ggtaagttattccatggtcttgtga

SEQ ID NO: 4145663 - DNA, 25 bp, Homo sapien
tttgaactgggtaagttattccatg

SEQ ID NO: 4145664 - DNA, 25 bp, Homo sapien
tggtgttgccaaaacgctgtgtctt

SEQ ID NO: 4145665 - DNA, 25 bp, Homo sapien
ttaagcccactttccatggtgttgc

SEQ ID NO: 4145666 - DNA, 25 bp, Homo sapien
aacgcactgtgattatctggtagcc

SEQ ID NO: 4145667 - DNA, 25 bp, Homo sapien
tctggtagccagtcaaagtgcaagt

SEQ ID NO: 4145668 - DNA, 25 bp, Homo sapien
taatagcatggtggagtggctccct

SEQ ID NO: 4145669 - DNA, 25 bp, Homo sapien
caataaaacaggacgatgtgcttcc

SEQ ID NO: 4145670 - DNA, 25 bp, Homo sapien
cactatgtagttaacgatgccagac

SEQ ID NO: 4145671 - DNA, 25 bp, Homo sapien
taatagggctgtccaacatttggtc

SEQ ID NO: 4145672 - DNA, 25 bp, Homo sapien
tggatttggttaaggttgattcagt

SEQ ID NO: 4145673 - DNA, 25 bp, Homo sapien
tctggatttggttaaggttgattca

SEQ ID NO: 4145674 - DNA, 25 bp, Homo sapien
tctctggatttggttaaggttgatt

SEQ ID NO: 4145675 - DNA, 25 bp, Homo sapien
gatttggttaaggttgattcagtaa

SEQ ID NO: 4145676 - DNA, 25 bp, Homo sapien
tgacatttcggcttgctgactgagg

SEQ ID NO: 4145677 - DNA, 25 bp, Homo sapien
tacacttacaagatgactggaacgg

SEQ ID NO: 4145678 - DNA, 25 bp, Homo sapien
gggcccaatgtgctactaacctaat

SEQ ID NO: 4145679 - DNA, 25 bp, Homo sapien
cagacttcaggctatcttggtagag

SEQ ID NO: 4145680 - DNA, 25 bp, Homo sapien
tgctctttccccacgtgtgaatttt

SEQ ID NO: 4145681 - DNA, 25 bp, Homo sapien
tggttgtcacaagttcctgacactt

SEQ ID NO: 4145682 - DNA, 25 bp, Homo sapien
gataggatgggtattttatccgtct

SEQ ID NO: 4145683 - DNA, 25 bp, Homo sapien
ttatccgtcttacttccacaactgc

SEQ ID NO: 4145684 - DNA, 25 bp, Homo sapien
tcttggtcaacaaagaaggtcagcc

SEQ ID NO: 4145685 - DNA, 25 bp, Homo sapien
agagacggactcagaaaaggcttca

SEQ ID NO: 4145686 - DNA, 25 bp, Homo sapien
tagttgcatctcagactacagagtg

SEQ ID NO: 4145687 - DNA, 25 bp, Homo sapien
ctagtagtaggtgcgtagagaccca

SEQ ID NO: 4145688 - DNA, 25 bp, Homo sapien
gcccgtgtgacctctgctatcactg

SEQ ID NO: 4145689 - DNA, 25 bp, Homo sapien
cccgtgtgacctctgctatcactgc

SEQ ID NO: 4145690 - DNA, 25 bp, Homo sapien
tctgtgcccagaaaaccatgctgag

SEQ ID NO: 4145691 - DNA, 25 bp, Homo sapien
caggcattaggcatcaccaccaaaa

SEQ ID NO: 4145692 - DNA, 25 bp, Homo sapien
ccagttggagccgtcagttgggtca

SEQ ID NO: 4145693 - DNA, 25 bp, Homo sapien
gaaatcgtaagggatgtgcagctca

SEQ ID NO: 4145694 - DNA, 25 bp, Homo sapien
gacacgatggcatgattgtcatcaa

SEQ ID NO: 4145695 - DNA, 25 bp, Homo sapien
cagtaattttaaccggcactgagtg

SEQ ID NO: 4145696 - DNA, 25 bp, Homo sapien
gatgtagacacgatggcatgattgt

SEQ ID NO: 4145697 - DNA, 25 bp, Homo sapien
ggcagcatctggtccctttgttttc

SEQ ID NO: 4145698 - DNA, 25 bp, Homo sapien
ctatcacggcatgcaccttgtggtt

SEQ ID NO: 4145699 - DNA, 25 bp, Homo sapien
caaatgaaagaatgctgacgtagtg

SEQ ID NO: 4145700 - DNA, 25 bp, Homo sapien
aaagaatgctgacgtagtgttctga

SEQ ID NO: 4145701 - DNA, 25 bp, Homo sapien
gaatgctgacgtagtgttctgagcc

SEQ ID NO: 4145702 - DNA, 25 bp, Homo sapien
tggttgtccaaccccccaatatctg

SEQ ID NO: 4145703 - DNA, 25 bp, Homo sapien
gtccaaccccccaatatctgcatag

SEQ ID NO: 4145704 - DNA, 25 bp, Homo sapien
ccaaccccccaatatctgcataggt

SEQ ID NO: 4145705 - DNA, 25 bp, Homo sapien
aaccccccaatatctgcataggtct

SEQ ID NO: 4145706 - DNA, 25 bp, Homo sapien
agtggctgaggtttggtttgctact

SEQ ID NO: 4145707 - DNA, 25 bp, Homo sapien
gaataagttcagagccaaccactct

SEQ ID NO: 4145708 - DNA, 25 bp, Homo sapien
aaccactctcaagaaagtggctgag

SEQ ID NO: 4145709 - DNA, 25 bp, Homo sapien
tctgaataagttcagagccaaccac

SEQ ID NO: 4145710 - DNA, 25 bp, Homo sapien
cttcagcaactcggaacaattcccg

SEQ ID NO: 4145711 - DNA, 25 bp, Homo sapien
caactcggaacaattcccgtacgag

SEQ ID NO: 4145712 - DNA, 25 bp, Homo sapien
tcagcaactcggaacaattcccgta

SEQ ID NO: 4145713 - DNA, 25 bp, Homo sapien
agcaactcggaacaattcccgtacg

SEQ ID NO: 4145714 - DNA, 25 bp, Homo sapien
ctttttgtcccaatggcgtcaattt

SEQ ID NO: 4145715 - DNA, 25 bp, Homo sapien
atctttttgtcccaatggcgtcaat

SEQ ID NO: 4145716 - DNA, 25 bp, Homo sapien
ttatctttttgtcccaatggcgtca

SEQ ID NO: 4145717 - DNA, 25 bp, Homo sapien
tggcgtcaatttcatcaataaacac

SEQ ID NO: 4145718 - DNA, 25 bp, Homo sapien
gttccaacattgttcgctgaatttc

SEQ ID NO: 4145719 - DNA, 25 bp, Homo sapien
cagcagttccaacattgttcgctga

SEQ ID NO: 4145720 - DNA, 25 bp, Homo sapien
tccaacattgttcgctgaatttctc

SEQ ID NO: 4145721 - DNA, 25 bp, Homo sapien
gcagttccaacattgttcgctgaat

SEQ ID NO: 4145722 - DNA, 25 bp, Homo sapien
atctcccctagaatcaaatccatcc

SEQ ID NO: 4145723 - DNA, 25 bp, Homo sapien
gataactttcacatctcccctagaa

SEQ ID NO: 4145724 - DNA, 25 bp, Homo sapien
acatctcccctagaatcaaatccat

SEQ ID NO: 4145725 - DNA, 25 bp, Homo sapien
aactttcacatctcccctagaatca

SEQ ID NO: 4145726 - DNA, 25 bp, Homo sapien
tagccatgatcaggtcgtccagggt

SEQ ID NO: 4145727 - DNA, 25 bp, Homo sapien
aggcagggggaactcaatcttcctg

SEQ ID NO: 4145728 - DNA, 25 bp, Homo sapien
ggggaactcaatcttcctgtcaatg

SEQ ID NO: 4145729 - DNA, 25 bp, Homo sapien
cagggggaactcaatcttcctgtca

SEQ ID NO: 4145730 - DNA, 25 bp, Homo sapien
agactgctgcacagtgaccaacagg

SEQ ID NO: 4145731 - DNA, 25 bp, Homo sapien
actgctgcacagtgaccaacaggcc

SEQ ID NO: 4145732 - DNA, 25 bp, Homo sapien
gactgctgcacagtgaccaacaggc

SEQ ID NO: 4145733 - DNA, 25 bp, Homo sapien
tgctgcacagtgaccaacaggccac

SEQ ID NO: 4145734 - DNA, 25 bp, Homo sapien
cctggcagggacataacaaaaatag

SEQ ID NO: 4145735 - DNA, 25 bp, Homo sapien
caaaccaggcatcgaaggaaactac

SEQ ID NO: 4145736 - DNA, 25 bp, Homo sapien
aggtcaatatccctcacgaacaggg

SEQ ID NO: 4145737 - DNA, 25 bp, Homo sapien
cactgccaagagcataccgaatggg

SEQ ID NO: 4145738 - DNA, 25 bp, Homo sapien
tgagctgagtcttggcaccctgaaa

SEQ ID NO: 4145739 - DNA, 25 bp, Homo sapien
cctcaagggcactgaagaatacaaa

SEQ ID NO: 4145740 - DNA, 25 bp, Homo sapien
accctccagggttagagcacacagc

SEQ ID NO: 4145741 - DNA, 25 bp, Homo sapien
caagagctcaaccaaactgatctga

SEQ ID NO: 4145742 - DNA, 25 bp, Homo sapien
ctttaggagaggtgtatttgcatgg

SEQ ID NO: 4145743 - DNA, 25 bp, Homo sapien
agagcatagcattcagggccagtgc

SEQ ID NO: 4145744 - DNA, 25 bp, Homo sapien
gagaggtgtatttgcatggtgtatc

SEQ ID NO: 4145745 - DNA, 25 bp, Homo sapien
cattcagggccagtgctttaggaga

SEQ ID NO: 4145746 - DNA, 25 bp, Homo sapien
aaaaatgcttccctgcaggcagggc

SEQ ID NO: 4145747 - DNA, 25 bp, Homo sapien
gaaaaaatgcttccctgcaggcagg

SEQ ID NO: 4145748 - DNA, 25 bp, Homo sapien
ctgtcacagcaaggagaaaaaatgc

SEQ ID NO: 4145749 - DNA, 25 bp, Homo sapien
ggagaaaaaatgcttccctgcaggc

SEQ ID NO: 4145750 - DNA, 25 bp, Homo sapien
gcacaggagtgtccacaaatctcca

SEQ ID NO: 4145751 - DNA, 25 bp, Homo sapien
tgggtataaagggaactcattgctg

SEQ ID NO: 4145752 - DNA, 25 bp, Homo sapien
taaagcagtagccatagccctaatg

SEQ ID NO: 4145753 - DNA, 25 bp, Homo sapien
gcatccttaccatgcagcacaggag

SEQ ID NO: 4145754 - DNA, 25 bp, Homo sapien
ctgctgagaacaagaggagatagga

SEQ ID NO: 4145755 - DNA, 25 bp, Homo sapien
tgctgagaacaagaggagataggat

SEQ ID NO: 4145756 - DNA, 25 bp, Homo sapien
ataggataactgtggacagcgggat

SEQ ID NO: 4145757 - DNA, 25 bp, Homo sapien
aagaggagataggataactgtggac

SEQ ID NO: 4145758 - DNA, 25 bp, Homo sapien
gcacagggctggggaggggtctctg

SEQ ID NO: 4145759 - DNA, 25 bp, Homo sapien
gggctgctggcacagggctggggag

SEQ ID NO: 4145760 - DNA, 25 bp, Homo sapien
tgggctgctggcacagggctgggga

SEQ ID NO: 4145761 - DNA, 25 bp, Homo sapien
cagggctggggaggggtctctgggt

SEQ ID NO: 4145762 - DNA, 25 bp, Homo sapien
taactaggattcaaataaagagccc

SEQ ID NO: 4145763 - DNA, 25 bp, Homo sapien
aaagagcccgactcgaggctggcca

SEQ ID NO: 4145764 - DNA, 25 bp, Homo sapien
ttcaaataaagagcccgactcgagg

SEQ ID NO: 4145765 - DNA, 25 bp, Homo sapien
ggattcaaataaagagcccgactcg

SEQ ID NO: 4145766 - DNA, 25 bp, Homo sapien
aaagatcaagagtcattcctaagtc

SEQ ID NO: 4145767 - DNA, 25 bp, Homo sapien
gaaagaagtagtttgttcaattctc

SEQ ID NO: 4145768 - DNA, 25 bp, Homo sapien
cttgcttgtatcagctggagctctc

SEQ ID NO: 4145769 - DNA, 25 bp, Homo sapien
tttcctgtggcttgcttgtatcagc

SEQ ID NO: 4145770 - DNA, 25 bp, Homo sapien
caaacagagttcacctcaggtacca

SEQ ID NO: 4145771 - DNA, 25 bp, Homo sapien
ttaattgtgtccctgctgtactaga

SEQ ID NO: 4145772 - DNA, 25 bp, Homo sapien
tatccttcttgctatgaaaatccca

SEQ ID NO: 4145773 - DNA, 25 bp, Homo sapien
caaagacggcaaacagagttcacct

SEQ ID NO: 4145774 - DNA, 25 bp, Homo sapien
agtcctagggtttatgtgaggaagc

SEQ ID NO: 4145775 - DNA, 25 bp, Homo sapien
tctgggagtcctagggtttatgtga

SEQ ID NO: 4145776 - DNA, 25 bp, Homo sapien
gacattaacaggacctctgggagtc

SEQ ID NO: 4145777 - DNA, 25 bp, Homo sapien
aaggcttggatctgggacattaaca

SEQ ID NO: 4145778 - DNA, 25 bp, Homo sapien
ggtcatcgtagcttggactgaagta

SEQ ID NO: 4145779 - DNA, 25 bp, Homo sapien
cgtagcttggactgaagtatttctc

SEQ ID NO: 4145780 - DNA, 25 bp, Homo sapien
ctggtcatcgtagcttggactgaag

SEQ ID NO: 4145781 - DNA, 25 bp, Homo sapien
catcgtagcttggactgaagtattt

SEQ ID NO: 4145782 - DNA, 25 bp, Homo sapien
gcccttagctgtcgatttggcagaa

SEQ ID NO: 4145783 - DNA, 25 bp, Homo sapien
tcaaacactcgagaagcattgcttc

SEQ ID NO: 4145784 - DNA, 25 bp, Homo sapien
tcatggacaagtaaatgccttggcc

SEQ ID NO: 4145785 - DNA, 25 bp, Homo sapien
actatctggtggacatcagagcacc

SEQ ID NO: 4145786 - DNA, 25 bp, Homo sapien
tacagaatggaagcaacagttttgt

SEQ ID NO: 4145787 - DNA, 25 bp, Homo sapien
tcctcaaatggctctctaatctgcc

SEQ ID NO: 4145788 - DNA, 25 bp, Homo sapien
cagaatggaagcaacagttttgtct

SEQ ID NO: 4145789 - DNA, 25 bp, Homo sapien
ggctctctaatctgcctgtccctta

SEQ ID NO: 4145790 - DNA, 25 bp, Homo sapien
gaactgtttgaatgcactggctgcc

SEQ ID NO: 4145791 - DNA, 25 bp, Homo sapien
tagtagctcagtatattcggccaga

SEQ ID NO: 4145792 - DNA, 25 bp, Homo sapien
gaaattgtcccgtgctctcatcatg

SEQ ID NO: 4145793 - DNA, 25 bp, Homo sapien
ttcggccagaatcgggtacaatgtg

SEQ ID NO: 4145794 - DNA, 25 bp, Homo sapien
ttccaaagtacacgggttctcactc

SEQ ID NO: 4145795 - DNA, 25 bp, Homo sapien
ggaaccgtcactgtcgctcctgtct

SEQ ID NO: 4145796 - DNA, 25 bp, Homo sapien
gacctctggccacctgtcaagactg

SEQ ID NO: 4145797 - DNA, 25 bp, Homo sapien
cctgtcttcagttgtggacctctgg

SEQ ID NO: 4145798 - DNA, 25 bp, Homo sapien
gatagagcttttacacggcagttgt

SEQ ID NO: 4145799 - DNA, 25 bp, Homo sapien
cagttctgtggccattgatagagct

SEQ ID NO: 4145800 - DNA, 25 bp, Homo sapien
gcttttacacggcagttgttttctg

SEQ ID NO: 4145801 - DNA, 25 bp, Homo sapien
tgttttctgtgttagtgtaagccat

SEQ ID NO: 4145802 - DNA, 25 bp, Homo sapien
ctctgtattcatggtcttatctttc

SEQ ID NO: 4145803 - DNA, 25 bp, Homo sapien
agagtgtggagagaattttcctttc

SEQ ID NO: 4145804 - DNA, 25 bp, Homo sapien
caacatttactgatattccatttaa

SEQ ID NO: 4145805 - DNA, 25 bp, Homo sapien
ctgatgttgcttgagactagagagt

SEQ ID NO: 4145806 - DNA, 25 bp, Homo sapien
caccaaaatgatcgacagagatgtc

SEQ ID NO: 4145807 - DNA, 25 bp, Homo sapien
tagtgagatcactacacagtgtgga

SEQ ID NO: 4145808 - DNA, 25 bp, Homo sapien
ttcttggcttattgggctgcaggca

SEQ ID NO: 4145809 - DNA, 25 bp, Homo sapien
taggcatagccgttcactagtgaga

SEQ ID NO: 4145810 - DNA, 25 bp, Homo sapien
tcctcatgggcacactttgtggcag

SEQ ID NO: 4145811 - DNA, 25 bp, Homo sapien
gggcacactttgtggcagtgtttct

SEQ ID NO: 4145812 - DNA, 25 bp, Homo sapien
ctcatgggcacactttgtggcagtg

SEQ ID NO: 4145813 - DNA, 25 bp, Homo sapien
catgggcacactttgtggcagtgtt

SEQ ID NO: 4145814 - DNA, 25 bp, Homo sapien
tctgggaatgcaagccccagagagg

SEQ ID NO: 4145815 - DNA, 25 bp, Homo sapien
caaatacgagtatgttctgggaatg

SEQ ID NO: 4145816 - DNA, 25 bp, Homo sapien
tgtcagccactcctcctttagatgc

SEQ ID NO: 4145817 - DNA, 25 bp, Homo sapien
gaagaaagtcccaggctcagtttat

SEQ ID NO: 4145818 - DNA, 25 bp, Homo sapien
taggccccacttggctcagaactga

SEQ ID NO: 4145819 - DNA, 25 bp, Homo sapien
cacaggcctccacacaggaataggc

SEQ ID NO: 4145820 - DNA, 25 bp, Homo sapien
ggaataggccccacttggctcagaa

SEQ ID NO: 4145821 - DNA, 25 bp, Homo sapien
aataggccccacttggctcagaact

SEQ ID NO: 4145822 - DNA, 25 bp, Homo sapien
tccctgcttgtggagtgagaagtaa

SEQ ID NO: 4145823 - DNA, 25 bp, Homo sapien
gtaagtgaatgtttgaagtcttcca

SEQ ID NO: 4145824 - DNA, 25 bp, Homo sapien
ccagtgagaatccaatgacgggtca

SEQ ID NO: 4145825 - DNA, 25 bp, Homo sapien
cttgtggagtgagaagtaagtgaat

SEQ ID NO: 4145826 - DNA, 25 bp, Homo sapien
agaactataactaagtccgacaggg

SEQ ID NO: 4145827 - DNA, 25 bp, Homo sapien
tccgacagggttagaagggcctgag

SEQ ID NO: 4145828 - DNA, 25 bp, Homo sapien
gcctgagattgttgggtgtctccaa

SEQ ID NO: 4145829 - DNA, 25 bp, Homo sapien
tgggtgtctccaactgggctctgtt

SEQ ID NO: 4145830 - DNA, 25 bp, Homo sapien
cctcaagttctggttgtaatgcgtt

SEQ ID NO: 4145831 - DNA, 25 bp, Homo sapien
tcctgaataggaggaatggcttcct

SEQ ID NO: 4145832 - DNA, 25 bp, Homo sapien
tgatgtcaaaccatggaagaagttt

SEQ ID NO: 4145833 - DNA, 25 bp, Homo sapien
gcttcctaggcctttatctgagtca

SEQ ID NO: 4145834 - DNA, 25 bp, Homo sapien
attgatggctatgtaaatacagcca

SEQ ID NO: 4145835 - DNA, 25 bp, Homo sapien
cattaaccttaagcacctcagacag

SEQ ID NO: 4145836 - DNA, 25 bp, Homo sapien
ttcctaactggttgaagcagtggac

SEQ ID NO: 4145837 - DNA, 25 bp, Homo sapien
tgaaaacaagacgatgtcattaaga

SEQ ID NO: 4145838 - DNA, 25 bp, Homo sapien
tctggacaagtcgaccttagcgctt

SEQ ID NO: 4145839 - DNA, 25 bp, Homo sapien
tctttccgcgggaggcatctcagat

SEQ ID NO: 4145840 - DNA, 25 bp, Homo sapien
atcttgcttgaagggcgcagcgagc

SEQ ID NO: 4145841 - DNA, 25 bp, Homo sapien
tctttctaggagcaagcaggtggga

SEQ ID NO: 4145842 - DNA, 25 bp, Homo sapien
aatcagcgcgttccgcggcgggccc

SEQ ID NO: 4145843 - DNA, 25 bp, Homo sapien
cggccaatcagcgcgttccgcggcg

SEQ ID NO: 4145844 - DNA, 25 bp, Homo sapien
gccaatcagcgcgttccgcggcggg

SEQ ID NO: 4145845 - DNA, 25 bp, Homo sapien
ccaatcagcgcgttccgcggcgggc

SEQ ID NO: 4145846 - DNA, 25 bp, Homo sapien
gagttccagaagtctaaaacaagtc

SEQ ID NO: 4145847 - DNA, 25 bp, Homo sapien
cagacaccttgtctgagttccagaa

SEQ ID NO: 4145848 - DNA, 25 bp, Homo sapien
tctaaaacaagtctgaccaagccat

SEQ ID NO: 4145849 - DNA, 25 bp, Homo sapien
gaccaagccatccaaggcaggaagt

SEQ ID NO: 4145850 - DNA, 25 bp, Homo sapien
ctcactagattgagtcgtttcaggg

SEQ ID NO: 4145851 - DNA, 25 bp, Homo sapien
gctcagaacccaagttccaaagata

SEQ ID NO: 4145852 - DNA, 25 bp, Homo sapien
ttgcaagacacaaactcagcacgct

SEQ ID NO: 4145853 - DNA, 25 bp, Homo sapien
tttgccaccatcctcactagattga

SEQ ID NO: 4145854 - DNA, 25 bp, Homo sapien
tggcgcccagctgatacccgctttt

SEQ ID NO: 4145855 - DNA, 25 bp, Homo sapien
tcatgacacctagaagcatggtcac

SEQ ID NO: 4145856 - DNA, 25 bp, Homo sapien
tttcagaccaggcatactacgaggg

SEQ ID NO: 4145857 - DNA, 25 bp, Homo sapien
tagactacagttgcccaatcatagc

SEQ ID NO: 4145858 - DNA, 25 bp, Homo sapien
ttccagggagctcctgttcattttc

SEQ ID NO: 4145859 - DNA, 25 bp, Homo sapien
agtaagcagctttaatcattgtttc

SEQ ID NO: 4145860 - DNA, 25 bp, Homo sapien
agggaagattggaaacaatcttcct

SEQ ID NO: 4145861 - DNA, 25 bp, Homo sapien
tcaggatcgagacgctttcatcttt

SEQ ID NO: 4145862 - DNA, 25 bp, Homo sapien
agattggaaacaatcttccttaaag

SEQ ID NO: 4145863 - DNA, 25 bp, Homo sapien
gttaattagagcacctgtctgaggc

SEQ ID NO: 4145864 - DNA, 25 bp, Homo sapien
cggaatgttctagatcctgactggg

SEQ ID NO: 4145865 - DNA, 25 bp, Homo sapien
tagagaggagttcattcctactagc

SEQ ID NO: 4145866 - DNA, 25 bp, Homo sapien
tccccttgtgggaggcttacattca

SEQ ID NO: 4145867 - DNA, 25 bp, Homo sapien
aacagagagctaggaactaaggcaa

SEQ ID NO: 4145868 - DNA, 25 bp, Homo sapien
ctaaggcaaatagctggcttcctgt

SEQ ID NO: 4145869 - DNA, 25 bp, Homo sapien
cgtaaaaggaagcacccctgaggtg

SEQ ID NO: 4145870 - DNA, 25 bp, Homo sapien
gagcagcgatagctgaatgaagtgc

SEQ ID NO: 4145871 - DNA, 25 bp, Homo sapien
tataaaattagcatcagttgctcag

SEQ ID NO: 4145872 - DNA, 25 bp, Homo sapien
ttcaccttgtgttggtctaaagagc

SEQ ID NO: 4145873 - DNA, 25 bp, Homo sapien
tggatgacttggttctagctacaga

SEQ ID NO: 4145874 - DNA, 25 bp, Homo sapien
caggtacgaacttccttggatgact

SEQ ID NO: 4145875 - DNA, 25 bp, Homo sapien
gctttatttctaggaacagcagctg

SEQ ID NO: 4145876 - DNA, 25 bp, Homo sapien
tcagctggttgctttcatccgaaaa

SEQ ID NO: 4145877 - DNA, 25 bp, Homo sapien
ggagtgtttagcacgttggcatgca

SEQ ID NO: 4145878 - DNA, 25 bp, Homo sapien
ggtgacttctgaacacggcacaaag

SEQ ID NO: 4145879 - DNA, 25 bp, Homo sapien
ggtgcaagcaataaatctagaggac

SEQ ID NO: 4145880 - DNA, 25 bp, Homo sapien
aaaagtctgtggtgtaaaagtctgc

SEQ ID NO: 4145881 - DNA, 25 bp, Homo sapien
aagtcatacccatagaaaggtgccc

SEQ ID NO: 4145882 - DNA, 25 bp, Homo sapien
tttatggtggaagctacgtggtgca

SEQ ID NO: 4145883 - DNA, 25 bp, Homo sapien
cacccgagtgttaggagtaaggcct

SEQ ID NO: 4145884 - DNA, 25 bp, Homo sapien
tagtgcacaggaccacaaggtggca

SEQ ID NO: 4145885 - DNA, 25 bp, Homo sapien
caaggtggcagtcaagcccttccaa

SEQ ID NO: 4145886 - DNA, 25 bp, Homo sapien
tcattgtagattccaggcacccgag

SEQ ID NO: 4145887 - DNA, 25 bp, Homo sapien
ttatgagactttttgtgggaacaga

SEQ ID NO: 4145888 - DNA, 25 bp, Homo sapien
gactactgagaatttcagaaattga

SEQ ID NO: 4145889 - DNA, 25 bp, Homo sapien
taaaacggctatatttgaagagaga

SEQ ID NO: 4145890 - DNA, 25 bp, Homo sapien
gaaaatgggatactatagactactg

SEQ ID NO: 4145891 - DNA, 25 bp, Homo sapien
tacagaagacgtttgctgaccccca

SEQ ID NO: 4145892 - DNA, 25 bp, Homo sapien
acagaagacgtttgctgacccccac

SEQ ID NO: 4145893 - DNA, 25 bp, Homo sapien
agaagacgtttgctgacccccactt

SEQ ID NO: 4145894 - DNA, 25 bp, Homo sapien
cagaagacgtttgctgacccccact

SEQ ID NO: 4145895 - DNA, 25 bp, Homo sapien
tataggaccatgttatagatcagcg

SEQ ID NO: 4145896 - DNA, 25 bp, Homo sapien
gtgattctcagtaccaagctatagg

SEQ ID NO: 4145897 - DNA, 25 bp, Homo sapien
agatcagcgtttagtcacctccagg

SEQ ID NO: 4145898 - DNA, 25 bp, Homo sapien
cacctccaggttatatgcatcgaga

SEQ ID NO: 4145899 - DNA, 25 bp, Homo sapien
gacttggtgccttgtgtcctagccg

SEQ ID NO: 4145900 - DNA, 25 bp, Homo sapien
tccccatgctgtatgcagcctaggg

SEQ ID NO: 4145901 - DNA, 25 bp, Homo sapien
aagactgtgggaacccacttcatgc

SEQ ID NO: 4145902 - DNA, 25 bp, Homo sapien
caaacagagtccttagtggggtgct

SEQ ID NO: 4145903 - DNA, 25 bp, Homo sapien
agttagggcggcaacttctgcttga

SEQ ID NO: 4145904 - DNA, 25 bp, Homo sapien
catcacaaagtgtattcggtgaacg

SEQ ID NO: 4145905 - DNA, 25 bp, Homo sapien
tcagtgcaacgcagaagacacgaag

SEQ ID NO: 4145906 - DNA, 25 bp, Homo sapien
aacgatgttcagtccccaaatttgg

SEQ ID NO: 4145907 - DNA, 25 bp, Homo sapien
taatgatcaactctactgtgctgta

SEQ ID NO: 4145908 - DNA, 25 bp, Homo sapien
taatttagcaggtcactaatggaac

SEQ ID NO: 4145909 - DNA, 25 bp, Homo sapien
tgctgtagatggaatactaggcctg

SEQ ID NO: 4145910 - DNA, 25 bp, Homo sapien
tccacagagtagcatttgaacttga

SEQ ID NO: 4145911 - DNA, 25 bp, Homo sapien
gaagtgtattcttccagcaggagac

SEQ ID NO: 4145912 - DNA, 25 bp, Homo sapien
tctaacagttggatgagagaaccag

SEQ ID NO: 4145913 - DNA, 25 bp, Homo sapien
tgttagtgtgttccgcctcctgtgt

SEQ ID NO: 4145914 - DNA, 25 bp, Homo sapien
gaaccagtatactacattctgctga

SEQ ID NO: 4145915 - DNA, 25 bp, Homo sapien
ctgtgtaaggaattcacttatgtag

SEQ ID NO: 4145916 - DNA, 25 bp, Homo sapien
tggtaataggaaatatagtcttttc

SEQ ID NO: 4145917 - DNA, 25 bp, Homo sapien
tcttgcttttacaggtataggcaca

SEQ ID NO: 4145918 - DNA, 25 bp, Homo sapien
tggtagatagaggtattccttccat

SEQ ID NO: 4145919 - DNA, 25 bp, Homo sapien
agtacaccatcttgaagaatttgga

SEQ ID NO: 4145920 - DNA, 25 bp, Homo sapien
aattaaaacactagtacttcagaat

SEQ ID NO: 4145921 - DNA, 25 bp, Homo sapien
tctttttgtattccagacagtgttt

SEQ ID NO: 4145922 - DNA, 25 bp, Homo sapien
ggatctctgattggtagtgttaata

SEQ ID NO: 4145923 - DNA, 25 bp, Homo sapien
cacaattaagtctgtataaaatgtg

SEQ ID NO: 4145924 - DNA, 25 bp, Homo sapien
caatgttatctagatgtgattggat

SEQ ID NO: 4145925 - DNA, 25 bp, Homo sapien
taccttttggtacctatccagagaa

SEQ ID NO: 4145926 - DNA, 25 bp, Homo sapien
ccagctttcacaattaagtctgtat

SEQ ID NO: 4145927 - DNA, 25 bp, Homo sapien
tcagtggaggatgggatacttcaac

SEQ ID NO: 4145928 - DNA, 25 bp, Homo sapien
caatcacaaagccagttcggaggac

SEQ ID NO: 4145929 - DNA, 25 bp, Homo sapien
cattcagaagagtccagtggtatca

SEQ ID NO: 4145930 - DNA, 25 bp, Homo sapien
gaataagttcccctgtcagtggagg

SEQ ID NO: 4145931 - DNA, 25 bp, Homo sapien
cattttacaatctgacatctggagt

SEQ ID NO: 4145932 - DNA, 25 bp, Homo sapien
tgttatagctgaatacctgtgcatg

SEQ ID NO: 4145933 - DNA, 25 bp, Homo sapien
catctggagtatattgaacataggc

SEQ ID NO: 4145934 - DNA, 25 bp, Homo sapien
gtttacttgtagtgccatagaggcc

SEQ ID NO: 4145935 - DNA, 25 bp, Homo sapien
tatcataccactacagagtcctggc

SEQ ID NO: 4145936 - DNA, 25 bp, Homo sapien
ggccacgtcaaaagcaagacctgta

SEQ ID NO: 4145937 - DNA, 25 bp, Homo sapien
tgaaagaccctcttaaacggatgaa

SEQ ID NO: 4145938 - DNA, 25 bp, Homo sapien
tactaaaaaggatgacgaaaagcac

SEQ ID NO: 4145939 - DNA, 25 bp, Homo sapien
caagacctgtggagtaacaccataa

SEQ ID NO: 4145940 - DNA, 25 bp, Homo sapien
tttggaccattagcaagggttgaca

SEQ ID NO: 4145941 - DNA, 25 bp, Homo sapien
gctttatctgggaggaagaacactg

SEQ ID NO: 4145942 - DNA, 25 bp, Homo sapien
taaggttctgagctctaagagtggg

SEQ ID NO: 4145943 - DNA, 25 bp, Homo sapien
ttgaaatgctattagtagcagctct

SEQ ID NO: 4145944 - DNA, 25 bp, Homo sapien
actgtttgaaatgctattagtagca

SEQ ID NO: 4145945 - DNA, 25 bp, Homo sapien
ctgtttgaaatgctattagtagcag

SEQ ID NO: 4145946 - DNA, 25 bp, Homo sapien
aatgctattagtagcagctctttgt

SEQ ID NO: 4145947 - DNA, 25 bp, Homo sapien
gcctcagtgctcagttacaggaagt

SEQ ID NO: 4145948 - DNA, 25 bp, Homo sapien
tatgattactccttgatcacaggca

SEQ ID NO: 4145949 - DNA, 25 bp, Homo sapien
caaaacttctgcaatccagtggaaa

SEQ ID NO: 4145950 - DNA, 25 bp, Homo sapien
cactgtgggcaagctgagtaaatca

SEQ ID NO: 4145951 - DNA, 25 bp, Homo sapien
acctctgttctctctaggctaaatt

SEQ ID NO: 4145952 - DNA, 25 bp, Homo sapien
tatgccattctgataaagtaggcac

SEQ ID NO: 4145953 - DNA, 25 bp, Homo sapien
ttgttggactgctatgccattctga

SEQ ID NO: 4145954 - DNA, 25 bp, Homo sapien
tctggccacttcagtcctgagctgg

SEQ ID NO: 4145955 - DNA, 25 bp, Homo sapien
tctacacatctgaatgcaattccca

SEQ ID NO: 4145956 - DNA, 25 bp, Homo sapien
ctctacacatctgaatgcaattccc

SEQ ID NO: 4145957 - DNA, 25 bp, Homo sapien
ctacacatctgaatgcaattcccat

SEQ ID NO: 4145958 - DNA, 25 bp, Homo sapien
gttggagagttgacagcggctccgt

SEQ ID NO: 4145959 - DNA, 25 bp, Homo sapien
tgcgttcttcgcctccagaatctgg

SEQ ID NO: 4145960 - DNA, 25 bp, Homo sapien
gttctcagctttgcgttcttcgcct

SEQ ID NO: 4145961 - DNA, 25 bp, Homo sapien
agctttgcgttcttcgcctccagaa

SEQ ID NO: 4145962 - DNA, 25 bp, Homo sapien
tcttcgcctccagaatctggcggcg

SEQ ID NO: 4145963 - DNA, 25 bp, Homo sapien
ccgggaagaaatcgtcccaggcgcg

SEQ ID NO: 4145964 - DNA, 25 bp, Homo sapien
cactacgcggttgttccatttggaa

SEQ ID NO: 4145965 - DNA, 25 bp, Homo sapien
cacaatggaaatcatcatggcagcc

SEQ ID NO: 4145966 - DNA, 25 bp, Homo sapien
gcaaagcgatcggaacccgggaaga

SEQ ID NO: 4145967 - DNA, 25 bp, Homo sapien
tcccacacccttcaagtgcaaattt

SEQ ID NO: 4145968 - DNA, 25 bp, Homo sapien
ctttcccacacccttcaagtgcaaa

SEQ ID NO: 4145969 - DNA, 25 bp, Homo sapien
acccttcaagtgcaaatttctccct

SEQ ID NO: 4145970 - DNA, 25 bp, Homo sapien
cacccttcaagtgcaaatttctccc

SEQ ID NO: 4145971 - DNA, 25 bp, Homo sapien
ggccaaatgatcaggccacatggtg

SEQ ID NO: 4145972 - DNA, 25 bp, Homo sapien
tgcaacatctccataggccaaatga

SEQ ID NO: 4145973 - DNA, 25 bp, Homo sapien
taaagtggcagctgtcaattccacc

SEQ ID NO: 4145974 - DNA, 25 bp, Homo sapien
ttccttcagcagctacatggttcta

SEQ ID NO: 4145975 - DNA, 25 bp, Homo sapien
ggttgagtgcctaaagtccaggaca

SEQ ID NO: 4145976 - DNA, 25 bp, Homo sapien
tgcataccctgcaagtaggagtggg

SEQ ID NO: 4145977 - DNA, 25 bp, Homo sapien
aaagcaagcaagtttccaagctgga

SEQ ID NO: 4145978 - DNA, 25 bp, Homo sapien
caaagggctcctactcagttcattc

SEQ ID NO: 4145979 - DNA, 25 bp, Homo sapien
cttctgagacaaccccggaattggt

SEQ ID NO: 4145980 - DNA, 25 bp, Homo sapien
gtcttctgagacaaccccggaattg

SEQ ID NO: 4145981 - DNA, 25 bp, Homo sapien
tttattttatctggattatgccctg

SEQ ID NO: 4145982 - DNA, 25 bp, Homo sapien
ttttatctggattatgccctgtctt

SEQ ID NO: 4145983 - DNA, 25 bp, Homo sapien
ggtagcgcttcttcatccggcgaag

SEQ ID NO: 4145984 - DNA, 25 bp, Homo sapien
tgaccaccataacgaacgtcgtggg

SEQ ID NO: 4145985 - DNA, 25 bp, Homo sapien
taaggaaatagctcgccaacatgac

SEQ ID NO: 4145986 - DNA, 25 bp, Homo sapien
aaagaccatgactcctccaaacatg

SEQ ID NO: 4145987 - DNA, 25 bp, Homo sapien
tctcaacgatgcatggataaacatc

SEQ ID NO: 4145988 - DNA, 25 bp, Homo sapien
ggacaatgcccatcggtgtcctctt

SEQ ID NO: 4145989 - DNA, 25 bp, Homo sapien
tttgttcttgaggttccgaagtctc

SEQ ID NO: 4145990 - DNA, 25 bp, Homo sapien
agtcagtgagtctgttgatgccttc

SEQ ID NO: 4145991 - DNA, 25 bp, Homo sapien
ggtacgtgcacctcctgtttcaaaa

SEQ ID NO: 4145992 - DNA, 25 bp, Homo sapien
tagttcggcctatacatgcatgctg

SEQ ID NO: 4145993 - DNA, 25 bp, Homo sapien
aaacgcaagcagaacataggtctgg

SEQ ID NO: 4145994 - DNA, 25 bp, Homo sapien
ataggtctggacaagggcaagctgc

SEQ ID NO: 4145995 - DNA, 25 bp, Homo sapien
taaacacacgtgaaacttcagacac

SEQ ID NO: 4145996 - DNA, 25 bp, Homo sapien
gatttcataaacacacgtgaaactt

SEQ ID NO: 4145997 - DNA, 25 bp, Homo sapien
tcccttaaagaaatcgtgtgatcca

SEQ ID NO: 4145998 - DNA, 25 bp, Homo sapien
aaagaaatcgtgtgatccatttccc

SEQ ID NO: 4145999 - DNA, 25 bp, Homo sapien
tgatgtcatctactttaacagcctt

SEQ ID NO: 4146000 - DNA, 25 bp, Homo sapien
tggcaaagtgatagagatcatcttt

SEQ ID NO: 4146001 - DNA, 25 bp, Homo sapien
catagctgtaaccatcttaaggaaa

SEQ ID NO: 4146002 - DNA, 25 bp, Homo sapien
tttccactgcacatcaaacaggtgg

SEQ ID NO: 4146003 - DNA, 25 bp, Homo sapien
ttgtctgtttgtattttaataagtc

SEQ ID NO: 4146004 - DNA, 25 bp, Homo sapien
tgtctgtttgtattttaataagtcc

SEQ ID NO: 4146005 - DNA, 25 bp, Homo sapien
tacgaaatcattcaattggcaggca

SEQ ID NO: 4146006 - DNA, 25 bp, Homo sapien
gtttcttcagtaagtaccactccag

SEQ ID NO: 4146007 - DNA, 25 bp, Homo sapien
tattagctgcagtagctgcattcca

SEQ ID NO: 4146008 - DNA, 25 bp, Homo sapien
tctaatgtctagctataaaggcata

SEQ ID NO: 4146009 - DNA, 25 bp, Homo sapien
gtttctcaggtatttaagacagatg

SEQ ID NO: 4146010 - DNA, 25 bp, Homo sapien
ttaggcctagtggttgcttctggtt

SEQ ID NO: 4146011 - DNA, 25 bp, Homo sapien
ctggttcccagttttctgtcttatc

SEQ ID NO: 4146012 - DNA, 25 bp, Homo sapien
ttttaggcctagtggttgcttctgg

SEQ ID NO: 4146013 - DNA, 25 bp, Homo sapien
ttcccagttttctgtcttatctcca

SEQ ID NO: 4146014 - DNA, 25 bp, Homo sapien
tagcacgttcaatctgtccccaaac

SEQ ID NO: 4146015 - DNA, 25 bp, Homo sapien
tcatcacataatgggaaattttctc

SEQ ID NO: 4146016 - DNA, 25 bp, Homo sapien
cactcagggttttcttagcacgttc

SEQ ID NO: 4146017 - DNA, 25 bp, Homo sapien
caaaagactccatgacacattaggg

SEQ ID NO: 4146018 - DNA, 25 bp, Homo sapien
ggttctaaagtcagcccataagatg

SEQ ID NO: 4146019 - DNA, 25 bp, Homo sapien
tcacacctgcatgtacagatacagt

SEQ ID NO: 4146020 - DNA, 25 bp, Homo sapien
tgctacattaaagagcgatatgccc

SEQ ID NO: 4146021 - DNA, 25 bp, Homo sapien
catttgagtcccagatgaagtagac

SEQ ID NO: 4146022 - DNA, 25 bp, Homo sapien
tatcagattatacaggcagcggctc

SEQ ID NO: 4146023 - DNA, 25 bp, Homo sapien
cactgtaggcaaatagtaagcaaca

SEQ ID NO: 4146024 - DNA, 25 bp, Homo sapien
caaaccacatgttcaactagctgat

SEQ ID NO: 4146025 - DNA, 25 bp, Homo sapien
taatgttgcctgactatgtaaaagg

SEQ ID NO: 4146026 - DNA, 25 bp, Homo sapien
gtaggtgccacatagacaattataa

SEQ ID NO: 4146027 - DNA, 25 bp, Homo sapien
tcactagcagcatagattttgtcta

SEQ ID NO: 4146028 - DNA, 25 bp, Homo sapien
ttgatatcaaaaggcacaactagtg

SEQ ID NO: 4146029 - DNA, 25 bp, Homo sapien
aactcgtagcttctagtaggtgcca

SEQ ID NO: 4146030 - DNA, 25 bp, Homo sapien
cagtgattgatcagtactcaaaaaa

SEQ ID NO: 4146031 - DNA, 25 bp, Homo sapien
cctattaacgcacattttagttgct

SEQ ID NO: 4146032 - DNA, 25 bp, Homo sapien
aaatgatcctaatccacttccctat

SEQ ID NO: 4146033 - DNA, 25 bp, Homo sapien
tgatcctaatccacttccctattaa

SEQ ID NO: 4146034 - DNA, 25 bp, Homo sapien
ttcccagatgagatgagatcgagtg

SEQ ID NO: 4146035 - DNA, 25 bp, Homo sapien
gcacccagtatttccgggctgtctc

SEQ ID NO: 4146036 - DNA, 25 bp, Homo sapien
agtatttccgggctgtctcccatcc

SEQ ID NO: 4146037 - DNA, 25 bp, Homo sapien
cttcccagatgagatgagatcgagt

SEQ ID NO: 4146038 - DNA, 25 bp, Homo sapien
aaattaccatgctctccctatctga

SEQ ID NO: 4146039 - DNA, 25 bp, Homo sapien
tgggactggaaatcacgcagactgg

SEQ ID NO: 4146040 - DNA, 25 bp, Homo sapien
tcaaaacaatggctttgcaggttgg

SEQ ID NO: 4146041 - DNA, 25 bp, Homo sapien
gactggcaacatccctctgagtggc

SEQ ID NO: 4146042 - DNA, 25 bp, Homo sapien
aagcctggcctctacgatgttaatg

SEQ ID NO: 4146043 - DNA, 25 bp, Homo sapien
ttgctgcggagacacttaatggttc

SEQ ID NO: 4146044 - DNA, 25 bp, Homo sapien
aatggttctaactgcctcactggcc

SEQ ID NO: 4146045 - DNA, 25 bp, Homo sapien
taatgtgccccttaacggactaaca

SEQ ID NO: 4146046 - DNA, 25 bp, Homo sapien
cttgccttcacaaaacaaccacctg

SEQ ID NO: 4146047 - DNA, 25 bp, Homo sapien
tgtggtgatgtggaaatgccgaaac

SEQ ID NO: 4146048 - DNA, 25 bp, Homo sapien
tggaaatgccgaaactgatactggg

SEQ ID NO: 4146049 - DNA, 25 bp, Homo sapien
tggggaacccgggaagcattcaaca

SEQ ID NO: 4146050 - DNA, 25 bp, Homo sapien
tcactaatgagtggttaagccaacc

SEQ ID NO: 4146051 - DNA, 25 bp, Homo sapien
tgtgtgcctattcaaaaagcctggg

SEQ ID NO: 4146052 - DNA, 25 bp, Homo sapien
tacacttgtgaagccgaggtttgtc

SEQ ID NO: 4146053 - DNA, 25 bp, Homo sapien
taagaaaaccttagtgaaatcgctc

SEQ ID NO: 4146054 - DNA, 25 bp, Homo sapien
ttccaaacaactgggtgttgtgctc

SEQ ID NO: 4146055 - DNA, 25 bp, Homo sapien
gacgaaaatattggccacataaatt

SEQ ID NO: 4146056 - DNA, 25 bp, Homo sapien
gctctttgacatccatgtgttgcca

SEQ ID NO: 4146057 - DNA, 25 bp, Homo sapien
taaatttaagcgactcttcaaagga

SEQ ID NO: 4146058 - DNA, 25 bp, Homo sapien
cctagtgttgacttgtgaccactag

SEQ ID NO: 4146059 - DNA, 25 bp, Homo sapien
acttgtgaccactagaaataaatac

SEQ ID NO: 4146060 - DNA, 25 bp, Homo sapien
tgttgacttgtgaccactagaaata

SEQ ID NO: 4146061 - DNA, 25 bp, Homo sapien
tagtgttgacttgtgaccactagaa

SEQ ID NO: 4146062 - DNA, 25 bp, Homo sapien
gatgttcccaactaagtcagtgcct

SEQ ID NO: 4146063 - DNA, 25 bp, Homo sapien
gcgcctggccagatacttggaattt

SEQ ID NO: 4146064 - DNA, 25 bp, Homo sapien
aatagtcaccgccactcattggctg

SEQ ID NO: 4146065 - DNA, 25 bp, Homo sapien
tattacagtcacatcggtagagaga

SEQ ID NO: 4146066 - DNA, 25 bp, Homo sapien
cactggacgccagtcacaaactcag

SEQ ID NO: 4146067 - DNA, 25 bp, Homo sapien
gaagataccactgggacctcgcaaa

SEQ ID NO: 4146068 - DNA, 25 bp, Homo sapien
gacgccagtcacaaactcagcattg

SEQ ID NO: 4146069 - DNA, 25 bp, Homo sapien
gttcttgcccaattcaccttctttg

SEQ ID NO: 4146070 - DNA, 25 bp, Homo sapien
gattctcctacttaggctgagctga

SEQ ID NO: 4146071 - DNA, 25 bp, Homo sapien
tatttctcggtgtattccctgggca

SEQ ID NO: 4146072 - DNA, 25 bp, Homo sapien
gagctcaagaaagacacggaatcct

SEQ ID NO: 4146073 - DNA, 25 bp, Homo sapien
cagaccatgggtaatacaaaggcca

SEQ ID NO: 4146074 - DNA, 25 bp, Homo sapien
ccttgactgacttactgatctggga

SEQ ID NO: 4146075 - DNA, 25 bp, Homo sapien
cacagcctgcattaggtgacaagga

SEQ ID NO: 4146076 - DNA, 25 bp, Homo sapien
gattcaataaccacaagagcaaagg

SEQ ID NO: 4146077 - DNA, 25 bp, Homo sapien
acagtgggctttcgtgagtggccaa

SEQ ID NO: 4146078 - DNA, 25 bp, Homo sapien
gcatttgagttgaaagaataggagg

SEQ ID NO: 4146079 - DNA, 25 bp, Homo sapien
tcatctgtaaatctgcagagatttt

SEQ ID NO: 4146080 - DNA, 25 bp, Homo sapien
tgaaagtaattgttctgttcaccag

SEQ ID NO: 4146081 - DNA, 25 bp, Homo sapien
cagtcatctggctttaggggattca

SEQ ID NO: 4146082 - DNA, 25 bp, Homo sapien
gagtcagacattgagatgctgtcca

SEQ ID NO: 4146083 - DNA, 25 bp, Homo sapien
gattgaaatttgacactggcccttg

SEQ ID NO: 4146084 - DNA, 25 bp, Homo sapien
taaaagtcagcacatattccctggg

SEQ ID NO: 4146085 - DNA, 25 bp, Homo sapien
aatggatgcagctcttagattgaaa

SEQ ID NO: 4146086 - DNA, 25 bp, Homo sapien
aatggcaggtcccagcgcatgcttc

SEQ ID NO: 4146087 - DNA, 25 bp, Homo sapien
ctggcataccattagcacccagtct

SEQ ID NO: 4146088 - DNA, 25 bp, Homo sapien
gcttggctaaacttgcatgttcctg

SEQ ID NO: 4146089 - DNA, 25 bp, Homo sapien
ctgtctgtcccctggttcagcttgg

SEQ ID NO: 4146090 - DNA, 25 bp, Homo sapien
gtatgcaaagcacctgtccaagaac

SEQ ID NO: 4146091 - DNA, 25 bp, Homo sapien
tgcaaagcacctgtccaagaacgac

SEQ ID NO: 4146092 - DNA, 25 bp, Homo sapien
aagcacctgtccaagaacgacaagg

SEQ ID NO: 4146093 - DNA, 25 bp, Homo sapien
acgacaaggggggtaggcacaggct

SEQ ID NO: 4146094 - DNA, 25 bp, Homo sapien
gtatcaagtgtaaggcagaagagtg

SEQ ID NO: 4146095 - DNA, 25 bp, Homo sapien
gaggactgagtatcaagtgtaaggc

SEQ ID NO: 4146096 - DNA, 25 bp, Homo sapien
gactgagtatcaagtgtaaggcaga

SEQ ID NO: 4146097 - DNA, 25 bp, Homo sapien
gagtatcaagtgtaaggcagaagag

SEQ ID NO: 4146098 - DNA, 25 bp, Homo sapien
taggccttatgcttggcactttgca

SEQ ID NO: 4146099 - DNA, 25 bp, Homo sapien
taacagatatacatcctggcatcct

SEQ ID NO: 4146100 - DNA, 25 bp, Homo sapien
taacagctactagatattaagcagc

SEQ ID NO: 4146101 - DNA, 25 bp, Homo sapien
gacttacaacatggaaagcagacag

SEQ ID NO: 4146102 - DNA, 25 bp, Homo sapien
ttccttcctctcaatggccgtttct

SEQ ID NO: 4146103 - DNA, 25 bp, Homo sapien
agagaagatgctgaacccgtaggta

SEQ ID NO: 4146104 - DNA, 25 bp, Homo sapien
ctctcaatggccgtttctgggccat

SEQ ID NO: 4146105 - DNA, 25 bp, Homo sapien
gatgctgaacccgtaggtaaaatat

SEQ ID NO: 4146106 - DNA, 25 bp, Homo sapien
agattaatgaggcaatcaagtcaaa

SEQ ID NO: 4146107 - DNA, 25 bp, Homo sapien
ttaatgaggcaatcaagtcaaactc

SEQ ID NO: 4146108 - DNA, 25 bp, Homo sapien
taatgaggcaatcaagtcaaactct

SEQ ID NO: 4146109 - DNA, 25 bp, Homo sapien
atgaggcaatcaagtcaaactctaa

SEQ ID NO: 4146110 - DNA, 25 bp, Homo sapien
acgtgtggtgaatgcgtcacattcc

SEQ ID NO: 4146111 - DNA, 25 bp, Homo sapien
tgcagctcccggcataggagatgca

SEQ ID NO: 4146112 - DNA, 25 bp, Homo sapien
ggttgtattgtcttcattctgctgc

SEQ ID NO: 4146113 - DNA, 25 bp, Homo sapien
gaaacgctgcacatcttttggacgt

SEQ ID NO: 4146114 - DNA, 25 bp, Homo sapien
actgggcagtggtcaatgccttaaa

SEQ ID NO: 4146115 - DNA, 25 bp, Homo sapien
caatgccttaaaaagtttgtaagct

SEQ ID NO: 4146116 - DNA, 25 bp, Homo sapien
ggtgcccagccttgagaagtcagta

SEQ ID NO: 4146117 - DNA, 25 bp, Homo sapien
tgatggattcactcatattgttgcc

SEQ ID NO: 4146118 - DNA, 25 bp, Homo sapien
acaggctttgatgagaaatccagaa

SEQ ID NO: 4146119 - DNA, 25 bp, Homo sapien
gctttgatgagaaatccagaagaaa

SEQ ID NO: 4146120 - DNA, 25 bp, Homo sapien
gatgagaaatccagaagaaagagtg

SEQ ID NO: 4146121 - DNA, 25 bp, Homo sapien
tgatgagaaatccagaagaaagagt

SEQ ID NO: 4146122 - DNA, 25 bp, Homo sapien
ctcatttgagttaagctccttgaat

SEQ ID NO: 4146123 - DNA, 25 bp, Homo sapien
gaatatggagttcctgctagaaaaa

SEQ ID NO: 4146124 - DNA, 25 bp, Homo sapien
tgtttgtgaggaaatccccttgact

SEQ ID NO: 4146125 - DNA, 25 bp, Homo sapien
aatgactttgttccatggcatcagg

SEQ ID NO: 4146126 - DNA, 25 bp, Homo sapien
ttttcagcagacacccgttcagggc

SEQ ID NO: 4146127 - DNA, 25 bp, Homo sapien
tttctggctgctgtcgtttctggcg

SEQ ID NO: 4146128 - DNA, 25 bp, Homo sapien
tctggcgggtatgtcacttgtatgc

SEQ ID NO: 4146129 - DNA, 25 bp, Homo sapien
gcaagctccaaaccctttctggctg

SEQ ID NO: 4146130 - DNA, 25 bp, Homo sapien
tatacaatggcgaacaagacagaca

SEQ ID NO: 4146131 - DNA, 25 bp, Homo sapien
gcaaccaatctctcctttacgggca

SEQ ID NO: 4146132 - DNA, 25 bp, Homo sapien
gactgcactgtcaaacatttttggg

SEQ ID NO: 4146133 - DNA, 25 bp, Homo sapien
caggagacacgattaacatagtaag

SEQ ID NO: 4146134 - DNA, 25 bp, Homo sapien
cacgggcaccatctgagtataaagc

SEQ ID NO: 4146135 - DNA, 25 bp, Homo sapien
gaacgccttccctttatcacgggca

SEQ ID NO: 4146136 - DNA, 25 bp, Homo sapien
tgatggaaatctctgaagcgaaagg

SEQ ID NO: 4146137 - DNA, 25 bp, Homo sapien
taactttcacgcatgccagaacgcc

SEQ ID NO: 4146138 - DNA, 25 bp, Homo sapien
tctactgggtggatctctaatagcc

SEQ ID NO: 4146139 - DNA, 25 bp, Homo sapien
gagagagccctccttttgcaaattt

SEQ ID NO: 4146140 - DNA, 25 bp, Homo sapien
gaggcagtcatttctttgtgcagag

SEQ ID NO: 4146141 - DNA, 25 bp, Homo sapien
atagcctttcaaagctgtactcagg

SEQ ID NO: 4146142 - DNA, 25 bp, Homo sapien
tgccaataattggtcttctgccatc

SEQ ID NO: 4146143 - DNA, 25 bp, Homo sapien
gcccagagggaattagtcaaaaata

SEQ ID NO: 4146144 - DNA, 25 bp, Homo sapien
caatttacaatcataaggagtggga

SEQ ID NO: 4146145 - DNA, 25 bp, Homo sapien
cccctatatggaagttagatcttaa

SEQ ID NO: 4146146 - DNA, 25 bp, Homo sapien
ctcagtcgtagggcctggccagacc

SEQ ID NO: 4146147 - DNA, 25 bp, Homo sapien
gcagaagtcaaagtaccttcctcag

SEQ ID NO: 4146148 - DNA, 25 bp, Homo sapien
gaggcagaagtcaaagtaccttcct

SEQ ID NO: 4146149 - DNA, 25 bp, Homo sapien
agtcaaagtaccttcctcagtcgta

SEQ ID NO: 4146150 - DNA, 25 bp, Homo sapien
ggatctgcatgtgttgattatgaac

SEQ ID NO: 4146151 - DNA, 25 bp, Homo sapien
tatgaacttctgataatgccgggcc

SEQ ID NO: 4146152 - DNA, 25 bp, Homo sapien
cagtgcttttcaacagtgactccat

SEQ ID NO: 4146153 - DNA, 25 bp, Homo sapien
tccatccctctgaggtaccatcaaa

SEQ ID NO: 4146154 - DNA, 25 bp, Homo sapien
ctccttttcgggacctccactcact

SEQ ID NO: 4146155 - DNA, 25 bp, Homo sapien
ctctgggtgttctcttcaaagggga

SEQ ID NO: 4146156 - DNA, 25 bp, Homo sapien
ctccaccccggaagggctctgggtg

SEQ ID NO: 4146157 - DNA, 25 bp, Homo sapien
caggtgcttggcaggtttgcgctcc

SEQ ID NO: 4146158 - DNA, 25 bp, Homo sapien
aaagccccggctgacagcgagagga

SEQ ID NO: 4146159 - DNA, 25 bp, Homo sapien
gctgcgtagctcacgtgctgagctg

SEQ ID NO: 4146160 - DNA, 25 bp, Homo sapien
ggtgcgcagccgagacaataaagta

SEQ ID NO: 4146161 - DNA, 25 bp, Homo sapien
cacagcgcagagtggacttgcagga

SEQ ID NO: 4146162 - DNA, 25 bp, Homo sapien
ggcttttcttgacttgttcgtgtcc

SEQ ID NO: 4146163 - DNA, 25 bp, Homo sapien
gcttttcttgacttgttcgtgtccc

SEQ ID NO: 4146164 - DNA, 25 bp, Homo sapien
tttcttgacttgttcgtgtccctgc

SEQ ID NO: 4146165 - DNA, 25 bp, Homo sapien
ttttcttgacttgttcgtgtccctg

SEQ ID NO: 4146166 - DNA, 25 bp, Homo sapien
tctggcaatattccacactaataat

SEQ ID NO: 4146167 - DNA, 25 bp, Homo sapien
gcaatattccacactaataatactg

SEQ ID NO: 4146168 - DNA, 25 bp, Homo sapien
ctctggcaatattccacactaataa

SEQ ID NO: 4146169 - DNA, 25 bp, Homo sapien
tggcaatattccacactaataatac

SEQ ID NO: 4146170 - DNA, 25 bp, Homo sapien
tgttgtcggtgaaaagtgcattcca

SEQ ID NO: 4146171 - DNA, 25 bp, Homo sapien
cgttgttagagagccagatgttgtc

SEQ ID NO: 4146172 - DNA, 25 bp, Homo sapien
tgcattccacagtaacgaatggaac

SEQ ID NO: 4146173 - DNA, 25 bp, Homo sapien
cacagtaacgaatggaacaatataa

SEQ ID NO: 4146174 - DNA, 25 bp, Homo sapien
tatacatcgccatacaggctcaaca

SEQ ID NO: 4146175 - DNA, 25 bp, Homo sapien
catccgttgctgatatacatcgcca

SEQ ID NO: 4146176 - DNA, 25 bp, Homo sapien
gaaaccatcctcaggtgagttcatc

SEQ ID NO: 4146177 - DNA, 25 bp, Homo sapien
tcttttcaagtgctgattctaaata

SEQ ID NO: 4146178 - DNA, 25 bp, Homo sapien
ctactctttgtgcttgtctctcttt

SEQ ID NO: 4146179 - DNA, 25 bp, Homo sapien
actctttgtgcttgtctctcttttg

SEQ ID NO: 4146180 - DNA, 25 bp, Homo sapien
tgcttgtctctcttttggggttcac

SEQ ID NO: 4146181 - DNA, 25 bp, Homo sapien
tctttgtgcttgtctctcttttggg

SEQ ID NO: 4146182 - DNA, 25 bp, Homo sapien
ctgttgcctcaatgtttttagctca

SEQ ID NO: 4146183 - DNA, 25 bp, Homo sapien
gacctaatcgcaaccagtcaacagc

SEQ ID NO: 4146184 - DNA, 25 bp, Homo sapien
gagcaaagtccattgacctaatcgc

SEQ ID NO: 4146185 - DNA, 25 bp, Homo sapien
caggagccagtaatgtgacagttaa

SEQ ID NO: 4146186 - DNA, 25 bp, Homo sapien
ttcatgattcattgaattcctcccg

SEQ ID NO: 4146187 - DNA, 25 bp, Homo sapien
cttttcttcatgattcattgaattc

SEQ ID NO: 4146188 - DNA, 25 bp, Homo sapien
tcattgaattcctcccgacccacga

SEQ ID NO: 4146189 - DNA, 25 bp, Homo sapien
tcttcatgattcattgaattcctcc

SEQ ID NO: 4146190 - DNA, 25 bp, Homo sapien
tccaatgggaactccagatcacaag

SEQ ID NO: 4146191 - DNA, 25 bp, Homo sapien
cagtgggcacatcagccttttgggt

SEQ ID NO: 4146192 - DNA, 25 bp, Homo sapien
cccatggcacgtggtagatgcttaa

SEQ ID NO: 4146193 - DNA, 25 bp, Homo sapien
tgttttgtcggtctccctcattgga

SEQ ID NO: 4146194 - DNA, 25 bp, Homo sapien
tgtctctggtaagcctgccaacccc

SEQ ID NO: 4146195 - DNA, 25 bp, Homo sapien
actgtctctggtaagcctgccaacc

SEQ ID NO: 4146196 - DNA, 25 bp, Homo sapien
aactgtctctggtaagcctgccaac

SEQ ID NO: 4146197 - DNA, 25 bp, Homo sapien
ctctggtaagcctgccaaccccagc

SEQ ID NO: 4146198 - DNA, 25 bp, Homo sapien
cagggatccctcggtatttttagtg

SEQ ID NO: 4146199 - DNA, 25 bp, Homo sapien
cctctatacatgaaacccagggatc

SEQ ID NO: 4146200 - DNA, 25 bp, Homo sapien
tcccctctatacatgaaacccaggg

SEQ ID NO: 4146201 - DNA, 25 bp, Homo sapien
ccctctatacatgaaacccagggat

SEQ ID NO: 4146202 - DNA, 25 bp, Homo sapien
catagcccctttctgagtacagccc

SEQ ID NO: 4146203 - DNA, 25 bp, Homo sapien
atagcccctttctgagtacagcccc

SEQ ID NO: 4146204 - DNA, 25 bp, Homo sapien
gcatagcccctttctgagtacagcc

SEQ ID NO: 4146205 - DNA, 25 bp, Homo sapien
tgcatagcccctttctgagtacagc

SEQ ID NO: 4146206 - DNA, 25 bp, Homo sapien
caaaataactacttacatctccccg

SEQ ID NO: 4146207 - DNA, 25 bp, Homo sapien
cacactgaacagaagttactcaggt

SEQ ID NO: 4146208 - DNA, 25 bp, Homo sapien
taacgtcttgttggttcaaggctcc

SEQ ID NO: 4146209 - DNA, 25 bp, Homo sapien
catctccccgggtaacgtcttgttg

SEQ ID NO: 4146210 - DNA, 25 bp, Homo sapien
cgtgcgccccggcgcagtgccgagc

SEQ ID NO: 4146211 - DNA, 25 bp, Homo sapien
ccgtgcgccccggcgcagtgccgag

SEQ ID NO: 4146212 - DNA, 25 bp, Homo sapien
gctcccgcttcccgtccttccactg

SEQ ID NO: 4146213 - DNA, 25 bp, Homo sapien
tgctcttcagcggttgacttttgag

SEQ ID NO: 4146214 - DNA, 25 bp, Homo sapien
tgagttcgtaataggttttgggctc

SEQ ID NO: 4146215 - DNA, 25 bp, Homo sapien
ggcacgatccccgattcggactgca

SEQ ID NO: 4146216 - DNA, 25 bp, Homo sapien
tttgggctcttcatgaaactcctcc

SEQ ID NO: 4146217 - DNA, 25 bp, Homo sapien
cattggaaccttttcccacagcatg

SEQ ID NO: 4146218 - DNA, 25 bp, Homo sapien
ccttgtcggaggaaacggtgtgcaa

SEQ ID NO: 4146219 - DNA, 25 bp, Homo sapien
cattcccaggagaacacaaggtttc

SEQ ID NO: 4146220 - DNA, 25 bp, Homo sapien
acagccttaaccaccaatatgacca

SEQ ID NO: 4146221 - DNA, 25 bp, Homo sapien
gaggtcctattcctgacagtaagca

SEQ ID NO: 4146222 - DNA, 25 bp, Homo sapien
tgatttgtcccaagatacatttttt

SEQ ID NO: 4146223 - DNA, 25 bp, Homo sapien
tttttacactgaggtcctattcctg

SEQ ID NO: 4146224 - DNA, 25 bp, Homo sapien
taagcacatgtgatctgttctaaaa

SEQ ID NO: 4146225 - DNA, 25 bp, Homo sapien
catctttagatgctcagactcatgg

SEQ ID NO: 4146226 - DNA, 25 bp, Homo sapien
tagggagatgactgtcgagataaac

SEQ ID NO: 4146227 - DNA, 25 bp, Homo sapien
ctgtcgagataaaccagggcaggag

SEQ ID NO: 4146228 - DNA, 25 bp, Homo sapien
gaggattcaatcttctgctgtaggg

SEQ ID NO: 4146229 - DNA, 25 bp, Homo sapien
tgcaccttctctcaacactaggaag

SEQ ID NO: 4146230 - DNA, 25 bp, Homo sapien
cactaggaaggctaaattagagata

SEQ ID NO: 4146231 - DNA, 25 bp, Homo sapien
agagtgataattaacaggatccttg

SEQ ID NO: 4146232 - DNA, 25 bp, Homo sapien
tagagatagagtgataattaacagg

SEQ ID NO: 4146233 - DNA, 25 bp, Homo sapien
cttcagagatggagcggaataggtc

SEQ ID NO: 4146234 - DNA, 25 bp, Homo sapien
tcagagatggagcggaataggtctg

SEQ ID NO: 4146235 - DNA, 25 bp, Homo sapien
ttcagagatggagcggaataggtct

SEQ ID NO: 4146236 - DNA, 25 bp, Homo sapien
gacttcagagatggagcggaatagg

SEQ ID NO: 4146237 - DNA, 25 bp, Homo sapien
caggcacagagtcaatttcctggtt

SEQ ID NO: 4146238 - DNA, 25 bp, Homo sapien
actgaagtattttcaaggtgtccca

SEQ ID NO: 4146239 - DNA, 25 bp, Homo sapien
gagagaaaatagctcgtgggaaaac

SEQ ID NO: 4146240 - DNA, 25 bp, Homo sapien
aaaatagctcgtgggaaaaccactg

SEQ ID NO: 4146241 - DNA, 25 bp, Homo sapien
ataatccaaatggtttccattccag

SEQ ID NO: 4146242 - DNA, 25 bp, Homo sapien
ttgaaataatccaaatggtttccat

SEQ ID NO: 4146243 - DNA, 25 bp, Homo sapien
taagtcagcagtttgcatatggcta

SEQ ID NO: 4146244 - DNA, 25 bp, Homo sapien
attccagggaaaatagtaagtcagc

SEQ ID NO: 4146245 - DNA, 25 bp, Homo sapien
tacattcaaccatcctgggacctag

SEQ ID NO: 4146246 - DNA, 25 bp, Homo sapien
aaatgtggccaccttcggatacttg

SEQ ID NO: 4146247 - DNA, 25 bp, Homo sapien
cacacatgagagaagcggttgctgt

SEQ ID NO: 4146248 - DNA, 25 bp, Homo sapien
tgttaatgctaagcccacacctaga

SEQ ID NO: 4146249 - DNA, 25 bp, Homo sapien
caacttgtccaaacttaaaagacat

SEQ ID NO: 4146250 - DNA, 25 bp, Homo sapien
gtccaaacttaaaagacatacatca

SEQ ID NO: 4146251 - DNA, 25 bp, Homo sapien
tccacaaagaacaacttgtccaaac

SEQ ID NO: 4146252 - DNA, 25 bp, Homo sapien
cagaccttggtgtgccaaacatcat

SEQ ID NO: 4146253 - DNA, 25 bp, Homo sapien
caaggaatacattgcgtcagtggat

SEQ ID NO: 4146254 - DNA, 25 bp, Homo sapien
taaccatggcaactttcctcagcag

SEQ ID NO: 4146255 - DNA, 25 bp, Homo sapien
gacagctgaggtgctaacatgctag

SEQ ID NO: 4146256 - DNA, 25 bp, Homo sapien
gataaaatgactagggctccacgtg

SEQ ID NO: 4146257 - DNA, 25 bp, Homo sapien
tcagccggcgaacaccaaatggaat

SEQ ID NO: 4146258 - DNA, 25 bp, Homo sapien
aaatggaattttccgcacttgctcg

SEQ ID NO: 4146259 - DNA, 25 bp, Homo sapien
gagaggtccactgagaatttagtaa

SEQ ID NO: 4146260 - DNA, 25 bp, Homo sapien
ttttccgcacttgctcgaaacccag

SEQ ID NO: 4146261 - DNA, 25 bp, Homo sapien
gacggtatttccacggatgtatgcc

SEQ ID NO: 4146262 - DNA, 25 bp, Homo sapien
gattgtcaccagtcatctcggtgca

SEQ ID NO: 4146263 - DNA, 25 bp, Homo sapien
aatgttactcgaggattgtcaccag

SEQ ID NO: 4146264 - DNA, 25 bp, Homo sapien
tcaaaaggataagcccatacaagca

SEQ ID NO: 4146265 - DNA, 25 bp, Homo sapien
gggcccaatactgagattcacttct

SEQ ID NO: 4146266 - DNA, 25 bp, Homo sapien
tatctggggcccaatactgagattc

SEQ ID NO: 4146267 - DNA, 25 bp, Homo sapien
gagattcacttctaatgcatgtgac

SEQ ID NO: 4146268 - DNA, 25 bp, Homo sapien
tctaatgcatgtgacattacattca

SEQ ID NO: 4146269 - DNA, 25 bp, Homo sapien
ctcagagctccctcactgaagatgg

SEQ ID NO: 4146270 - DNA, 25 bp, Homo sapien
ctccaggactctgagaccctgcaga

SEQ ID NO: 4146271 - DNA, 25 bp, Homo sapien
tccctcactgaagatggtctctgcc

SEQ ID NO: 4146272 - DNA, 25 bp, Homo sapien
cagccaactcccagatcttccttca

SEQ ID NO: 4146273 - DNA, 25 bp, Homo sapien
tttcaaattcaagggacaggattca

SEQ ID NO: 4146274 - DNA, 25 bp, Homo sapien
ttttatggctctgataagcaggaca

SEQ ID NO: 4146275 - DNA, 25 bp, Homo sapien
taagtctagagacgtcatcacgctg

SEQ ID NO: 4146276 - DNA, 25 bp, Homo sapien
tacacatgtgtgaaagagctgtgcc

SEQ ID NO: 4146277 - DNA, 25 bp, Homo sapien
atctgacacttttgtctttcatctt

SEQ ID NO: 4146278 - DNA, 25 bp, Homo sapien
ttatcctcataaattgctgcaaacc

SEQ ID NO: 4146279 - DNA, 25 bp, Homo sapien
tcctcataaattgctgcaaacccaa

SEQ ID NO: 4146280 - DNA, 25 bp, Homo sapien
tcttcagcacgaattattatcctca

SEQ ID NO: 4146281 - DNA, 25 bp, Homo sapien
ctccagaatgagttagctgtgtgtt

SEQ ID NO: 4146282 - DNA, 25 bp, Homo sapien
tgagttagctgtgtgtttgccagct

SEQ ID NO: 4146283 - DNA, 25 bp, Homo sapien
ggctttgactgaatgttcaccactg

SEQ ID NO: 4146284 - DNA, 25 bp, Homo sapien
ctttgactgaatgttcaccactggc

SEQ ID NO: 4146285 - DNA, 25 bp, Homo sapien
gactgatgtagagcggtccactaga

SEQ ID NO: 4146286 - DNA, 25 bp, Homo sapien
actgggatactgaagctaagatttg

SEQ ID NO: 4146287 - DNA, 25 bp, Homo sapien
gggatactgaagctaagatttgact

SEQ ID NO: 4146288 - DNA, 25 bp, Homo sapien
gctaagatttgactgatgtagagcg

SEQ ID NO: 4146289 - DNA, 25 bp, Homo sapien
ggacatttagcagggcttaaattag

SEQ ID NO: 4146290 - DNA, 25 bp, Homo sapien
ctagcttaagcgcttccaaattctg

SEQ ID NO: 4146291 - DNA, 25 bp, Homo sapien
gcatctggacatttagcagggctta

SEQ ID NO: 4146292 - DNA, 25 bp, Homo sapien
tagcttaagcgcttccaaattctga

SEQ ID NO: 4146293 - DNA, 25 bp, Homo sapien
gtggagcttactggaatccatcctc

SEQ ID NO: 4146294 - DNA, 25 bp, Homo sapien
ttatccccagggctaagagccagaa

SEQ ID NO: 4146295 - DNA, 25 bp, Homo sapien
tggtgcttcagtggtggagcttact

SEQ ID NO: 4146296 - DNA, 25 bp, Homo sapien
tccccagggctaagagccagaaatc

SEQ ID NO: 4146297 - DNA, 25 bp, Homo sapien
tggaaagtcggttcccttctgagcc

SEQ ID NO: 4146298 - DNA, 25 bp, Homo sapien
gaaacgaagtgggtaggacagctca

SEQ ID NO: 4146299 - DNA, 25 bp, Homo sapien
ctatgctaggcaccggaagaaaaaa

SEQ ID NO: 4146300 - DNA, 25 bp, Homo sapien
gctgggaggatgcaactagactctt

SEQ ID NO: 4146301 - DNA, 25 bp, Homo sapien
agctgcaactcttctgaagccactt

SEQ ID NO: 4146302 - DNA, 25 bp, Homo sapien
cagctgcaactcttctgaagccact

SEQ ID NO: 4146303 - DNA, 25 bp, Homo sapien
ttcctgcattaaaggttatgtagag

SEQ ID NO: 4146304 - DNA, 25 bp, Homo sapien
atattctctcagtgttcatctcaaa

SEQ ID NO: 4146305 - DNA, 25 bp, Homo sapien
aaggttatgtagaggcttttctttg

SEQ ID NO: 4146306 - DNA, 25 bp, Homo sapien
gcattaaaggttatgtagaggcttt

SEQ ID NO: 4146307 - DNA, 25 bp, Homo sapien
tcaaagttagttctggcactggctg

SEQ ID NO: 4146308 - DNA, 25 bp, Homo sapien
cccttggcgaagagtgaaagtcaaa

SEQ ID NO: 4146309 - DNA, 25 bp, Homo sapien
gataaggccctggaaactccaatcc

SEQ ID NO: 4146310 - DNA, 25 bp, Homo sapien
agctctgtgctagaacggtgcctgg

SEQ ID NO: 4146311 - DNA, 25 bp, Homo sapien
tacaagctttcaaaggagcatggca

SEQ ID NO: 4146312 - DNA, 25 bp, Homo sapien
acatctgaactctaagcgcctccat

SEQ ID NO: 4146313 - DNA, 25 bp, Homo sapien
agatacaagctttcaaaggagcatg

SEQ ID NO: 4146314 - DNA, 25 bp, Homo sapien
gctttcaaaggagcatggcatgaac

SEQ ID NO: 4146315 - DNA, 25 bp, Homo sapien
agctgctgaacataatgcctttctg

SEQ ID NO: 4146316 - DNA, 25 bp, Homo sapien
acataatgcctttctgacttaatca

SEQ ID NO: 4146317 - DNA, 25 bp, Homo sapien
gctgaacataatgcctttctgactt

SEQ ID NO: 4146318 - DNA, 25 bp, Homo sapien
gaacataatgcctttctgacttaat

SEQ ID NO: 4146319 - DNA, 25 bp, Homo sapien
gggaaaaccaaaatgcatacaacat

SEQ ID NO: 4146320 - DNA, 25 bp, Homo sapien
tgtgggaaaaccaaaatgcatacaa

SEQ ID NO: 4146321 - DNA, 25 bp, Homo sapien
gtgggaaaaccaaaatgcatacaac

SEQ ID NO: 4146322 - DNA, 25 bp, Homo sapien
ctgtgggaaaaccaaaatgcataca

SEQ ID NO: 4146323 - DNA, 25 bp, Homo sapien
aggagcttatcggaggcttggaggc

SEQ ID NO: 4146324 - DNA, 25 bp, Homo sapien
ggagcttatcggaggcttggaggcc

SEQ ID NO: 4146325 - DNA, 25 bp, Homo sapien
gagcttatcggaggcttggaggccc

SEQ ID NO: 4146326 - DNA, 25 bp, Homo sapien
ggaggagcttatcggaggcttggag

SEQ ID NO: 4146327 - DNA, 25 bp, Homo sapien
tctgctcacgcatgagttgctggcg

SEQ ID NO: 4146328 - DNA, 25 bp, Homo sapien
gtgtctgactcacgggcactctctg

SEQ ID NO: 4146329 - DNA, 25 bp, Homo sapien
tggtgggcacactgacgtttatggc

SEQ ID NO: 4146330 - DNA, 25 bp, Homo sapien
ttaaggacttccatcggcacctgcg

SEQ ID NO: 4146331 - DNA, 25 bp, Homo sapien
cttcaatcttatatgtgaagagctc

SEQ ID NO: 4146332 - DNA, 25 bp, Homo sapien
cagattttacaaccaatattacata

SEQ ID NO: 4146333 - DNA, 25 bp, Homo sapien
tcttatatgtgaagagctctctaaa

SEQ ID NO: 4146334 - DNA, 25 bp, Homo sapien
tatgtgaagagctctctaaaacagt

SEQ ID NO: 4146335 - DNA, 25 bp, Homo sapien
gagtctatgtaaccagggatcagtg

SEQ ID NO: 4146336 - DNA, 25 bp, Homo sapien
gtttagagcatgtccttacagtagg

SEQ ID NO: 4146337 - DNA, 25 bp, Homo sapien
ggatcagtgataatctaagcctcag

SEQ ID NO: 4146338 - DNA, 25 bp, Homo sapien
tacagtaggatgtgtgcttataagc

SEQ ID NO: 4146339 - DNA, 25 bp, Homo sapien
cagagcaagcttatgagctagggac

SEQ ID NO: 4146340 - DNA, 25 bp, Homo sapien
gcataatcaaatgcctctgggcagg

SEQ ID NO: 4146341 - DNA, 25 bp, Homo sapien
cattaaaaagtattgcgcctggcac

SEQ ID NO: 4146342 - DNA, 25 bp, Homo sapien
gatatcgcccgatctaactccagag

SEQ ID NO: 4146343 - DNA, 25 bp, Homo sapien
catagaagtccaccttaaccacctt

SEQ ID NO: 4146344 - DNA, 25 bp, Homo sapien
tccaccagctcccatagaagtccac

SEQ ID NO: 4146345 - DNA, 25 bp, Homo sapien
attcctccaaaaccaacgccaccat

SEQ ID NO: 4146346 - DNA, 25 bp, Homo sapien
agctcccatagaagtccaccttaac

SEQ ID NO: 4146347 - DNA, 25 bp, Homo sapien
cttacgtcttctggagccaacactt

SEQ ID NO: 4146348 - DNA, 25 bp, Homo sapien
caaatcattttgatcgcctccccac

SEQ ID NO: 4146349 - DNA, 25 bp, Homo sapien
cactttcatcactcattccccaaat

SEQ ID NO: 4146350 - DNA, 25 bp, Homo sapien
tccccaaatcattttgatcgcctcc

SEQ ID NO: 4146351 - DNA, 25 bp, Homo sapien
tcagaaaggtctaacaggtttacgc

SEQ ID NO: 4146352 - DNA, 25 bp, Homo sapien
ggcataagttatatctgagctggag

SEQ ID NO: 4146353 - DNA, 25 bp, Homo sapien
tgaagagcttagatgactccacact

SEQ ID NO: 4146354 - DNA, 25 bp, Homo sapien
tctccgtgccatgtacccatgttgg

SEQ ID NO: 4146355 - DNA, 25 bp, Homo sapien
aatcacactggttcgttatccctga

SEQ ID NO: 4146356 - DNA, 25 bp, Homo sapien
ttctggtgctcaaggtgtgttaaac

SEQ ID NO: 4146357 - DNA, 25 bp, Homo sapien
gaaaatgaacataggacagcttctg

SEQ ID NO: 4146358 - DNA, 25 bp, Homo sapien
tctagctggtctaggagtgtactgc

SEQ ID NO: 4146359 - DNA, 25 bp, Homo sapien
ggggcctgcaagatgtagaagccat

SEQ ID NO: 4146360 - DNA, 25 bp, Homo sapien
tgggacggtcttaagagccaggggc

SEQ ID NO: 4146361 - DNA, 25 bp, Homo sapien
ctgggacggtcttaagagccagggg

SEQ ID NO: 4146362 - DNA, 25 bp, Homo sapien
ctatagcaagatcaaaaggcaaaag

SEQ ID NO: 4146363 - DNA, 25 bp, Homo sapien
tctgtctcatgtatccatctagatt

SEQ ID NO: 4146364 - DNA, 25 bp, Homo sapien
aattgggtggcccaaccactttgag

SEQ ID NO: 4146365 - DNA, 25 bp, Homo sapien
tttctgtatccttctgtctcatgta

SEQ ID NO: 4146366 - DNA, 25 bp, Homo sapien
tctcagattgtcacttattcctttc

SEQ ID NO: 4146367 - DNA, 25 bp, Homo sapien
tcagattgtcacttattcctttctt

SEQ ID NO: 4146368 - DNA, 25 bp, Homo sapien
ttctcagattgtcacttattccttt

SEQ ID NO: 4146369 - DNA, 25 bp, Homo sapien
tattctcagattgtcacttattcct

SEQ ID NO: 4146370 - DNA, 25 bp, Homo sapien
gacaataactgcacgatgaagtggc

SEQ ID NO: 4146371 - DNA, 25 bp, Homo sapien
caatgatgacatcagcccagtgctc

SEQ ID NO: 4146372 - DNA, 25 bp, Homo sapien
ggtgtcactactgccaactcacaag

SEQ ID NO: 4146373 - DNA, 25 bp, Homo sapien
gatgaagtatcccaagccagaagaa

SEQ ID NO: 4146374 - DNA, 25 bp, Homo sapien
agccctccacttcctctggaatata

SEQ ID NO: 4146375 - DNA, 25 bp, Homo sapien
atatatctgtagagtataatggcct

SEQ ID NO: 4146376 - DNA, 25 bp, Homo sapien
ctggaatatatctgtagagtataat

SEQ ID NO: 4146377 - DNA, 25 bp, Homo sapien
atatctgtagagtataatggcctta

SEQ ID NO: 4146378 - DNA, 25 bp, Homo sapien
agctgcgagtgcagcattccacatg

SEQ ID NO: 4146379 - DNA, 25 bp, Homo sapien
tgcagcattccacatgctagaactt

SEQ ID NO: 4146380 - DNA, 25 bp, Homo sapien
cctgcctcagaatcgcagacgtctt

SEQ ID NO: 4146381 - DNA, 25 bp, Homo sapien
gcgagtgcagcattccacatgctag

SEQ ID NO: 4146382 - DNA, 25 bp, Homo sapien
gcaaaagttgagtactgctgaacac

SEQ ID NO: 4146383 - DNA, 25 bp, Homo sapien
gatagcaaaagttgagtactgctga

SEQ ID NO: 4146384 - DNA, 25 bp, Homo sapien
tagcaaaagttgagtactgctgaac

SEQ ID NO: 4146385 - DNA, 25 bp, Homo sapien
agcaaaagttgagtactgctgaaca

SEQ ID NO: 4146386 - DNA, 25 bp, Homo sapien
caaatttttcaagggtagctggcaa

SEQ ID NO: 4146387 - DNA, 25 bp, Homo sapien
gccatgtgggaatatgagtccagcc

SEQ ID NO: 4146388 - DNA, 25 bp, Homo sapien
cattcccttggagatagcctaggtt

SEQ ID NO: 4146389 - DNA, 25 bp, Homo sapien
gcctcggcccacaaactactagaaa

SEQ ID NO: 4146390 - DNA, 25 bp, Homo sapien
gaataactgccacttccgactgcag

SEQ ID NO: 4146391 - DNA, 25 bp, Homo sapien
aatgttcaagttcaacagcctcttc

SEQ ID NO: 4146392 - DNA, 25 bp, Homo sapien
tttccaatggccgaataactgccac

SEQ ID NO: 4146393 - DNA, 25 bp, Homo sapien
cgactgcaggatgactatcttttag

SEQ ID NO: 4146394 - DNA, 25 bp, Homo sapien
gagagacggtagactatccctccct

SEQ ID NO: 4146395 - DNA, 25 bp, Homo sapien
ctggcaaagagaaggtactataaac

SEQ ID NO: 4146396 - DNA, 25 bp, Homo sapien
ggtggcaccaatccagtgagagacg

SEQ ID NO: 4146397 - DNA, 25 bp, Homo sapien
ctataattccaatttgaagatggac

SEQ ID NO: 4146398 - DNA, 25 bp, Homo sapien
tgaacatagccatggagggaaaaga

SEQ ID NO: 4146399 - DNA, 25 bp, Homo sapien
ctgaacatagccatggagggaaaag

SEQ ID NO: 4146400 - DNA, 25 bp, Homo sapien
gaaaagaaaacagcgctgttatttg

SEQ ID NO: 4146401 - DNA, 25 bp, Homo sapien
cagcgctgttatttgtgagtttcag

SEQ ID NO: 4146402 - DNA, 25 bp, Homo sapien
ctgctgccgttgggcttgctgtatg

SEQ ID NO: 4146403 - DNA, 25 bp, Homo sapien
ctgtatgtggtacttggtggggttt

SEQ ID NO: 4146404 - DNA, 25 bp, Homo sapien
tgccgttgggcttgctgtatgtggt

SEQ ID NO: 4146405 - DNA, 25 bp, Homo sapien
gctgccgttgggcttgctgtatgtg

SEQ ID NO: 4146406 - DNA, 25 bp, Homo sapien
atgtttatttgctaaagtggtagaa

SEQ ID NO: 4146407 - DNA, 25 bp, Homo sapien
catggcaagctcaggacttggttgg

SEQ ID NO: 4146408 - DNA, 25 bp, Homo sapien
ggcatgtttatttgctaaagtggta

SEQ ID NO: 4146409 - DNA, 25 bp, Homo sapien
caggctggtttggacatggcaagct

SEQ ID NO: 4146410 - DNA, 25 bp, Homo sapien
gggctgttgggtgcgctgctccccg

SEQ ID NO: 4146411 - DNA, 25 bp, Homo sapien
ggggctgttgggtgcgctgctcccc

SEQ ID NO: 4146412 - DNA, 25 bp, Homo sapien
ggctgttgggtgcgctgctccccgg

SEQ ID NO: 4146413 - DNA, 25 bp, Homo sapien
cagttggagttaagcgtaagcatag

SEQ ID NO: 4146414 - DNA, 25 bp, Homo sapien
acagttggagttaagcgtaagcata

SEQ ID NO: 4146415 - DNA, 25 bp, Homo sapien
caaagcagatttaacgggcagtggc

SEQ ID NO: 4146416 - DNA, 25 bp, Homo sapien
gcgtttccgttaaagtctcatgtgc

SEQ ID NO: 4146417 - DNA, 25 bp, Homo sapien
gaaaagttgcctccgaatttgcata

SEQ ID NO: 4146418 - DNA, 25 bp, Homo sapien
catagtacggtaaatcccattgaga

SEQ ID NO: 4146419 - DNA, 25 bp, Homo sapien
tgtgttcatgcctgggcactcgctc

SEQ ID NO: 4146420 - DNA, 25 bp, Homo sapien
tgtgtgttcatgcctgggcactcgc

SEQ ID NO: 4146421 - DNA, 25 bp, Homo sapien
gtgtgttcatgcctgggcactcgct

SEQ ID NO: 4146422 - DNA, 25 bp, Homo sapien
tgttcatgcctgggcactcgctctc

SEQ ID NO: 4146423 - DNA, 25 bp, Homo sapien
catcctcaggctgccaagtcattca

SEQ ID NO: 4146424 - DNA, 25 bp, Homo sapien
tcctcaggctgccaagtcattcagt

SEQ ID NO: 4146425 - DNA, 25 bp, Homo sapien
tcatcctcaggctgccaagtcattc

SEQ ID NO: 4146426 - DNA, 25 bp, Homo sapien
ctcaggctgccaagtcattcagtac

SEQ ID NO: 4146427 - DNA, 25 bp, Homo sapien
tataacttgattctaggctaatgat

SEQ ID NO: 4146428 - DNA, 25 bp, Homo sapien
tgcaaagcaggatccatcaagccca

SEQ ID NO: 4146429 - DNA, 25 bp, Homo sapien
gctaatgatgtcatcgattacatca

SEQ ID NO: 4146430 - DNA, 25 bp, Homo sapien
caggatccatcaagcccaagatttc

SEQ ID NO: 4146431 - DNA, 25 bp, Homo sapien
tgtgtttagttttattcttgtccaa

SEQ ID NO: 4146432 - DNA, 25 bp, Homo sapien
tcagggtcaaccttgctctgtgtgt

SEQ ID NO: 4146433 - DNA, 25 bp, Homo sapien
aatttaacgcaaagtgaaaggcact

SEQ ID NO: 4146434 - DNA, 25 bp, Homo sapien
gtgaaaggcactcacatgtttcaaa

SEQ ID NO: 4146435 - DNA, 25 bp, Homo sapien
ttccataaagatcaatcaagtttcc

SEQ ID NO: 4146436 - DNA, 25 bp, Homo sapien
atattccatattctcagtctgttca

SEQ ID NO: 4146437 - DNA, 25 bp, Homo sapien
tcaggttgtgattgtcctttttctg

SEQ ID NO: 4146438 - DNA, 25 bp, Homo sapien
ttggccagtgctcttgcttcagact

SEQ ID NO: 4146439 - DNA, 25 bp, Homo sapien
caggttgtgattgtcctttttctgc

SEQ ID NO: 4146440 - DNA, 25 bp, Homo sapien
tctgcctctctttggccagtgctct

SEQ ID NO: 4146441 - DNA, 25 bp, Homo sapien
acctagttctttaatgcggtcattt

SEQ ID NO: 4146442 - DNA, 25 bp, Homo sapien
agtacctagttctttaatgcggtca

SEQ ID NO: 4146443 - DNA, 25 bp, Homo sapien
cttgggaatcaaagtacctagttct

SEQ ID NO: 4146444 - DNA, 25 bp, Homo sapien
tcaaagtacctagttctttaatgcg

SEQ ID NO: 4146445 - DNA, 25 bp, Homo sapien
tttgtctgtggagtatcattaaact

SEQ ID NO: 4146446 - DNA, 25 bp, Homo sapien
taattgaccctttttgtctgtggag

SEQ ID NO: 4146447 - DNA, 25 bp, Homo sapien
taaaacatacaaagagtaggcaagt

SEQ ID NO: 4146448 - DNA, 25 bp, Homo sapien
tcatcagtgcctatttagaggtact

SEQ ID NO: 4146449 - DNA, 25 bp, Homo sapien
tgctaaagagattcacatgctacag

SEQ ID NO: 4146450 - DNA, 25 bp, Homo sapien
gatatgcaaatagaggctttcactg

SEQ ID NO: 4146451 - DNA, 25 bp, Homo sapien
gcaagactgactataggaaatgaag

SEQ ID NO: 4146452 - DNA, 25 bp, Homo sapien
ggtcacagccctttagtaggataaa

SEQ ID NO: 4146453 - DNA, 25 bp, Homo sapien
gagaagtaactttagcagccagaga

SEQ ID NO: 4146454 - DNA, 25 bp, Homo sapien
acacagaagttctcccataagaggg

SEQ ID NO: 4146455 - DNA, 25 bp, Homo sapien
tctacaagtatcaggtggaaccggt

SEQ ID NO: 4146456 - DNA, 25 bp, Homo sapien
gagatacccacagtgagcgcagaga

SEQ ID NO: 4146457 - DNA, 25 bp, Homo sapien
ttcaagttcttttgcgcgttgctgt

SEQ ID NO: 4146458 - DNA, 25 bp, Homo sapien
caacaaatgccggttggcgtgctcc

SEQ ID NO: 4146459 - DNA, 25 bp, Homo sapien
gcgcgttgctgttctcgttgcaact

SEQ ID NO: 4146460 - DNA, 25 bp, Homo sapien
tttcggatatagtccacggatgctt

SEQ ID NO: 4146461 - DNA, 25 bp, Homo sapien
gaggacttttaagcctgtgaaacca

SEQ ID NO: 4146462 - DNA, 25 bp, Homo sapien
acagaggacttttaagcctgtgaaa

SEQ ID NO: 4146463 - DNA, 25 bp, Homo sapien
cagaggacttttaagcctgtgaaac

SEQ ID NO: 4146464 - DNA, 25 bp, Homo sapien
gatccgattcaccaaatctggagag

SEQ ID NO: 4146465 - DNA, 25 bp, Homo sapien
tggatcagtgacaccgacgggagaa

SEQ ID NO: 4146466 - DNA, 25 bp, Homo sapien
aaagggtgtcgtccatcaggatgtc

SEQ ID NO: 4146467 - DNA, 25 bp, Homo sapien
tgatggtgccatccgtgagatcgag

SEQ ID NO: 4146468 - DNA, 25 bp, Homo sapien
tacagttcagtcagtgctagtccaa

SEQ ID NO: 4146469 - DNA, 25 bp, Homo sapien
gacgatcctcatgaaaaggccgcat

SEQ ID NO: 4146470 - DNA, 25 bp, Homo sapien
caaagaatgcggaaaaccaccagtg

SEQ ID NO: 4146471 - DNA, 25 bp, Homo sapien
tgtaggctgctactgagaaattcca

SEQ ID NO: 4146472 - DNA, 25 bp, Homo sapien
tttggtcactccatatagaggccca

SEQ ID NO: 4146473 - DNA, 25 bp, Homo sapien
tagctagcccctgaaatgaatccac

SEQ ID NO: 4146474 - DNA, 25 bp, Homo sapien
cagtcagggcagtggtacaagatgc

SEQ ID NO: 4146475 - DNA, 25 bp, Homo sapien
tacaattctgcacccgggaatcggg

SEQ ID NO: 4146476 - DNA, 25 bp, Homo sapien
tatactgttattgacatcaactttt

SEQ ID NO: 4146477 - DNA, 25 bp, Homo sapien
gctgttttatactgttattgacatc

SEQ ID NO: 4146478 - DNA, 25 bp, Homo sapien
gttttatactgttattgacatcaac

SEQ ID NO: 4146479 - DNA, 25 bp, Homo sapien
tagggctgttttatactgttattga

SEQ ID NO: 4146480 - DNA, 25 bp, Homo sapien
cattacagtaccaagcatccgcaag

SEQ ID NO: 4146481 - DNA, 25 bp, Homo sapien
gctatggaccatacagaaattattg

SEQ ID NO: 4146482 - DNA, 25 bp, Homo sapien
tatcgatccataatatacagtgcta

SEQ ID NO: 4146483 - DNA, 25 bp, Homo sapien
taatgaggctatcaagaacaagtcg

SEQ ID NO: 4146484 - DNA, 25 bp, Homo sapien
tgagccaactaatagcttgtcttcg

SEQ ID NO: 4146485 - DNA, 25 bp, Homo sapien
cttcttgagccaactaatagcttgt

SEQ ID NO: 4146486 - DNA, 25 bp, Homo sapien
taatagcttgtcttcgctgaaccat

SEQ ID NO: 4146487 - DNA, 25 bp, Homo sapien
aactaatagcttgtcttcgctgaac

SEQ ID NO: 4146488 - DNA, 25 bp, Homo sapien
ccaagatacgatggctagtaacaga

SEQ ID NO: 4146489 - DNA, 25 bp, Homo sapien
tttgacagagataagacaactattg

SEQ ID NO: 4146490 - DNA, 25 bp, Homo sapien
tgccgtttggactttacaacctcta

SEQ ID NO: 4146491 - DNA, 25 bp, Homo sapien
tttaaacactgtgatcaaatgccgt

SEQ ID NO: 4146492 - DNA, 25 bp, Homo sapien
ttatccttggtgaaaagcccatagg

SEQ ID NO: 4146493 - DNA, 25 bp, Homo sapien
aagagaacattgagggagcaaggca

SEQ ID NO: 4146494 - DNA, 25 bp, Homo sapien
tttggtccacaatgccatcctcttt

SEQ ID NO: 4146495 - DNA, 25 bp, Homo sapien
gtctttctcgactccctctgcaagg

SEQ ID NO: 4146496 - DNA, 25 bp, Homo sapien
tgtgaatgtcgcattagttatgcat

SEQ ID NO: 4146497 - DNA, 25 bp, Homo sapien
taacgtgatttggtttgatgttcac

SEQ ID NO: 4146498 - DNA, 25 bp, Homo sapien
gaatagagctgatcatatggaacta

SEQ ID NO: 4146499 - DNA, 25 bp, Homo sapien
tgttatgtgattttcgtgggtgcca

SEQ ID NO: 4146500 - DNA, 25 bp, Homo sapien
caaatcttgcattgttgacatcgag

SEQ ID NO: 4146501 - DNA, 25 bp, Homo sapien
cattgttgacatcgaggaagctctc

SEQ ID NO: 4146502 - DNA, 25 bp, Homo sapien
caattgcccgcagcacaaatcttgc

SEQ ID NO: 4146503 - DNA, 25 bp, Homo sapien
tcaggaagctgattctactccaatt

SEQ ID NO: 4146504 - DNA, 25 bp, Homo sapien
ttcttccccggatgtgttcctcaaa

SEQ ID NO: 4146505 - DNA, 25 bp, Homo sapien
cttcttccccggatgtgttcctcaa

SEQ ID NO: 4146506 - DNA, 25 bp, Homo sapien
catatcacctctaactcacagcgtt

SEQ ID NO: 4146507 - DNA, 25 bp, Homo sapien
ttgagaccattcacaccatcccttt

SEQ ID NO: 4146508 - DNA, 25 bp, Homo sapien
ctggcctaaagaccatatcacctct

SEQ ID NO: 4146509 - DNA, 25 bp, Homo sapien
cacagcgttgccatttctggttgtc

SEQ ID NO: 4146510 - DNA, 25 bp, Homo sapien
aggtcagacattacagtgggtcagc

SEQ ID NO: 4146511 - DNA, 25 bp, Homo sapien
gaggctctagtggaaaatttgtttc

SEQ ID NO: 4146512 - DNA, 25 bp, Homo sapien
tccgcagtgtagtatcttcaagtct

SEQ ID NO: 4146513 - DNA, 25 bp, Homo sapien
cctcttaagcacccttgtgatgaca

SEQ ID NO: 4146514 - DNA, 25 bp, Homo sapien
ctttgagtaaagttgactttccagg

SEQ ID NO: 4146515 - DNA, 25 bp, Homo sapien
ctttccaggaggatgtgccatgttt

SEQ ID NO: 4146516 - DNA, 25 bp, Homo sapien
tgaggaataagaatttaacagtgcc

SEQ ID NO: 4146517 - DNA, 25 bp, Homo sapien
agttttgagttgcatagttgaggaa

SEQ ID NO: 4146518 - DNA, 25 bp, Homo sapien
aagtttcaacttataggcgcagtaa

SEQ ID NO: 4146519 - DNA, 25 bp, Homo sapien
tcacagagttttccagagagccgtt

SEQ ID NO: 4146520 - DNA, 25 bp, Homo sapien
gttggatctagccacacctctgaaa

SEQ ID NO: 4146521 - DNA, 25 bp, Homo sapien
tataggcgcagtaatgtcttttctg

SEQ ID NO: 4146522 - DNA, 25 bp, Homo sapien
aacaagaggaaccaagcaacaattt

SEQ ID NO: 4146523 - DNA, 25 bp, Homo sapien
ccaagcaacaatttcctgagcttct

SEQ ID NO: 4146524 - DNA, 25 bp, Homo sapien
ctgtaggtcgttgaataatctctgc

SEQ ID NO: 4146525 - DNA, 25 bp, Homo sapien
cctgtaggtcgttgaataatctctg

SEQ ID NO: 4146526 - DNA, 25 bp, Homo sapien
tgaagtctcctcgtagtgaacagcg

SEQ ID NO: 4146527 - DNA, 25 bp, Homo sapien
ttccatggagtagataggcacaggc

SEQ ID NO: 4146528 - DNA, 25 bp, Homo sapien
gagtaaagaccatcattgccatgag

SEQ ID NO: 4146529 - DNA, 25 bp, Homo sapien
gaatcagggactatgctccccagaa

SEQ ID NO: 4146530 - DNA, 25 bp, Homo sapien
gttgattcatctgccactaccacag

SEQ ID NO: 4146531 - DNA, 25 bp, Homo sapien
tctgttgattcatctgccactacca

SEQ ID NO: 4146532 - DNA, 25 bp, Homo sapien
tgttgattcatctgccactaccaca

SEQ ID NO: 4146533 - DNA, 25 bp, Homo sapien
ttctgttgattcatctgccactacc

SEQ ID NO: 4146534 - DNA, 25 bp, Homo sapien
gaagactctgcaataaacaccacca

SEQ ID NO: 4146535 - DNA, 25 bp, Homo sapien
cgaagagaaatgtgtggatgaaagc

SEQ ID NO: 4146536 - DNA, 25 bp, Homo sapien
tcagatgattagaaggcgaagagaa

SEQ ID NO: 4146537 - DNA, 25 bp, Homo sapien
agctgtggagtatgaggagtttgca

SEQ ID NO: 4146538 - DNA, 25 bp, Homo sapien
tgctatcaatgttaagatccaagat

SEQ ID NO: 4146539 - DNA, 25 bp, Homo sapien
tttgctatcaatgttaagatccaag

SEQ ID NO: 4146540 - DNA, 25 bp, Homo sapien
ttgctatcaatgttaagatccaaga

SEQ ID NO: 4146541 - DNA, 25 bp, Homo sapien
gttttgctatcaatgttaagatcca

SEQ ID NO: 4146542 - DNA, 25 bp, Homo sapien
tcccacaaagagagagtaaggcctc

SEQ ID NO: 4146543 - DNA, 25 bp, Homo sapien
tagacaggaatttgccacctaccca

SEQ ID NO: 4146544 - DNA, 25 bp, Homo sapien
gtaaagacctgaaagcaaacacaac

SEQ ID NO: 4146545 - DNA, 25 bp, Homo sapien
gaacaagagtctcacagccacaaat

SEQ ID NO: 4146546 - DNA, 25 bp, Homo sapien
agcccaaaggaatgtcttctaccaa

SEQ ID NO: 4146547 - DNA, 25 bp, Homo sapien
gcccaaaggaatgtcttctaccaaa

SEQ ID NO: 4146548 - DNA, 25 bp, Homo sapien
cagcccaaaggaatgtcttctacca

SEQ ID NO: 4146549 - DNA, 25 bp, Homo sapien
acagcccaaaggaatgtcttctacc

SEQ ID NO: 4146550 - DNA, 25 bp, Homo sapien
gatcaggtcttaagctattccttgg

SEQ ID NO: 4146551 - DNA, 25 bp, Homo sapien
tactgactgtgactcgagaaatcct

SEQ ID NO: 4146552 - DNA, 25 bp, Homo sapien
gatattgtattcaggacatagctgg

SEQ ID NO: 4146553 - DNA, 25 bp, Homo sapien
tcaatgtgcacgaactacaggagag

SEQ ID NO: 4146554 - DNA, 25 bp, Homo sapien
atcttcaacatcaactgatttgttc

SEQ ID NO: 4146555 - DNA, 25 bp, Homo sapien
ctacataagttctaagggaggctct

SEQ ID NO: 4146556 - DNA, 25 bp, Homo sapien
tccaaacaagcccactacataagtt

SEQ ID NO: 4146557 - DNA, 25 bp, Homo sapien
tcttaggccaacatcaggacagagt

SEQ ID NO: 4146558 - DNA, 25 bp, Homo sapien
taattagtgttaattgctatggtgg

SEQ ID NO: 4146559 - DNA, 25 bp, Homo sapien
gtgttaattgctatggtggtttctg

SEQ ID NO: 4146560 - DNA, 25 bp, Homo sapien
gttcgccactttacccttacatgat

SEQ ID NO: 4146561 - DNA, 25 bp, Homo sapien
tgtttcaaatccattcttgttcgcc

SEQ ID NO: 4146562 - DNA, 25 bp, Homo sapien
tagacacaacatgggttgaggtttc

SEQ ID NO: 4146563 - DNA, 25 bp, Homo sapien
cctcctagaggttatactgggaaca

SEQ ID NO: 4146564 - DNA, 25 bp, Homo sapien
tgggaacaacaccagctggctttga

SEQ ID NO: 4146565 - DNA, 25 bp, Homo sapien
tttaacataagtgtacagtaggccc

SEQ ID NO: 4146566 - DNA, 25 bp, Homo sapien
tatgcattttaagcactggttcaca

SEQ ID NO: 4146567 - DNA, 25 bp, Homo sapien
tctgagccctttcgaataagtgact

SEQ ID NO: 4146568 - DNA, 25 bp, Homo sapien
caatttgccgtaataattctgagcc

SEQ ID NO: 4146569 - DNA, 25 bp, Homo sapien
aatgattgcgagtaacctttgagga

SEQ ID NO: 4146570 - DNA, 25 bp, Homo sapien
tttagatcaattactgcgcagcctc

SEQ ID NO: 4146571 - DNA, 25 bp, Homo sapien
gaatttgcccacagcttttagatca

SEQ ID NO: 4146572 - DNA, 25 bp, Homo sapien
gatgaccctgttgaagacgataaag

SEQ ID NO: 4146573 - DNA, 25 bp, Homo sapien
caagcgtgcctaagttctatgtaca

SEQ ID NO: 4146574 - DNA, 25 bp, Homo sapien
tggtgcatgacctgtcagataaggg

SEQ ID NO: 4146575 - DNA, 25 bp, Homo sapien
cacggttggtgcatgacctgtcaga

SEQ ID NO: 4146576 - DNA, 25 bp, Homo sapien
aggcacggttggtgcatgacctgtc

SEQ ID NO: 4146577 - DNA, 25 bp, Homo sapien
cggttggtgcatgacctgtcagata

SEQ ID NO: 4146578 - DNA, 25 bp, Homo sapien
agaggaatgaggattccatcttcca

SEQ ID NO: 4146579 - DNA, 25 bp, Homo sapien
gaggaatgaggattccatcttccat

SEQ ID NO: 4146580 - DNA, 25 bp, Homo sapien
gagctggatggcacattttccgatg

SEQ ID NO: 4146581 - DNA, 25 bp, Homo sapien
ggcacattttccgatggcaatagct

SEQ ID NO: 4146582 - DNA, 25 bp, Homo sapien
gggaatatgatgcattgaattttgg

SEQ ID NO: 4146583 - DNA, 25 bp, Homo sapien
ggcaatagctttgggaatatgatgc

SEQ ID NO: 4146584 - DNA, 25 bp, Homo sapien
gaagcctatcgctgtagtcatctcc

SEQ ID NO: 4146585 - DNA, 25 bp, Homo sapien
ccatgaaagatttagcagctagggt

SEQ ID NO: 4146586 - DNA, 25 bp, Homo sapien
cagcgtggcccattaccatgaaaga

SEQ ID NO: 4146587 - DNA, 25 bp, Homo sapien
gcaattggtgctgacgttcatcagg

SEQ ID NO: 4146588 - DNA, 25 bp, Homo sapien
gtgataaggacagcatcggcaccac

SEQ ID NO: 4146589 - DNA, 25 bp, Homo sapien
agtgataaggacagcatcggcacca

SEQ ID NO: 4146590 - DNA, 25 bp, Homo sapien
cagtgataaggacagcatcggcacc

SEQ ID NO: 4146591 - DNA, 25 bp, Homo sapien
ctagaagaaggcaggtatctgtggc

SEQ ID NO: 4146592 - DNA, 25 bp, Homo sapien
taaaaggcgccactactgacctgtg

SEQ ID NO: 4146593 - DNA, 25 bp, Homo sapien
gcttcgttgactggctttgcatcca

SEQ ID NO: 4146594 - DNA, 25 bp, Homo sapien
tactgaaggtcactagcctgcgtga

SEQ ID NO: 4146595 - DNA, 25 bp, Homo sapien
aaaggcataaatctgggtattgatt

SEQ ID NO: 4146596 - DNA, 25 bp, Homo sapien
tctgggtattgatttaactataaaa

SEQ ID NO: 4146597 - DNA, 25 bp, Homo sapien
atcataaaactcccggtagtcttct

SEQ ID NO: 4146598 - DNA, 25 bp, Homo sapien
tcataaaactcccggtagtcttcta

SEQ ID NO: 4146599 - DNA, 25 bp, Homo sapien
tggcagtagcagtttcttaatggca

SEQ ID NO: 4146600 - DNA, 25 bp, Homo sapien
caggtgggaccataaactctttcta

SEQ ID NO: 4146601 - DNA, 25 bp, Homo sapien
ccctttgaataacgccagaaagctg

SEQ ID NO: 4146602 - DNA, 25 bp, Homo sapien
tctagcatgacgcagagagtacccc

SEQ ID NO: 4146603 - DNA, 25 bp, Homo sapien
tggctggcacaacctctttgaatga

SEQ ID NO: 4146604 - DNA, 25 bp, Homo sapien
tctgtctgcaagagggtggcaaact

SEQ ID NO: 4146605 - DNA, 25 bp, Homo sapien
ttcaatcatgggagagctctgggcc

SEQ ID NO: 4146606 - DNA, 25 bp, Homo sapien
aacccaagggttattcatgctctct

SEQ ID NO: 4146607 - DNA, 25 bp, Homo sapien
cacatcttgattggcaactgaggag

SEQ ID NO: 4146608 - DNA, 25 bp, Homo sapien
ctttccatatatcgctgttagggca

SEQ ID NO: 4146609 - DNA, 25 bp, Homo sapien
gcagaactacttaggcctggagatc

SEQ ID NO: 4146610 - DNA, 25 bp, Homo sapien
cagccaaagggttatcttgattcaa

SEQ ID NO: 4146611 - DNA, 25 bp, Homo sapien
tgctgaaatgtaaggactgtacaca

SEQ ID NO: 4146612 - DNA, 25 bp, Homo sapien
cacatttcttggatgctataggcca

SEQ ID NO: 4146613 - DNA, 25 bp, Homo sapien
tgtaaggactgtacacatttcttgg

SEQ ID NO: 4146614 - DNA, 25 bp, Homo sapien
ggactgtacacatttcttggatgct

SEQ ID NO: 4146615 - DNA, 25 bp, Homo sapien
cactctcggaatgattgcagctgca

SEQ ID NO: 4146616 - DNA, 25 bp, Homo sapien
tgaatcttgccatgagaccagcgag

SEQ ID NO: 4146617 - DNA, 25 bp, Homo sapien
acggtgtgtaccaaaatgtgctgcc

SEQ ID NO: 4146618 - DNA, 25 bp, Homo sapien
tgaagtaaccacattccggcagtcc

SEQ ID NO: 4146619 - DNA, 25 bp, Homo sapien
cctccttggctatctctggaatttt

SEQ ID NO: 4146620 - DNA, 25 bp, Homo sapien
tccttggctatctctggaattttct

SEQ ID NO: 4146621 - DNA, 25 bp, Homo sapien
ttggctatctctggaattttctctt

SEQ ID NO: 4146622 - DNA, 25 bp, Homo sapien
ccttggctatctctggaattttctc

SEQ ID NO: 4146623 - DNA, 25 bp, Homo sapien
gctttcactcaggaaggcgtcggga

SEQ ID NO: 4146624 - DNA, 25 bp, Homo sapien
gcaggagcgtcgtcttaagcgaacg

SEQ ID NO: 4146625 - DNA, 25 bp, Homo sapien
caagtttgcgttgacagcttgatcc

SEQ ID NO: 4146626 - DNA, 25 bp, Homo sapien
tgtgccgccagtgttaaaggaacta

SEQ ID NO: 4146627 - DNA, 25 bp, Homo sapien
cttactgtcacaggtcattattcca

SEQ ID NO: 4146628 - DNA, 25 bp, Homo sapien
ttattccacgctgaaatcttgctcc

SEQ ID NO: 4146629 - DNA, 25 bp, Homo sapien
tgtcacttgcttactgtcacaggtc

SEQ ID NO: 4146630 - DNA, 25 bp, Homo sapien
tgtgaactgtgtcacttgcttactg

SEQ ID NO: 4146631 - DNA, 25 bp, Homo sapien
agtgagtcctttcaattgatttcct

SEQ ID NO: 4146632 - DNA, 25 bp, Homo sapien
catccagtgagtcctttcaattgat

SEQ ID NO: 4146633 - DNA, 25 bp, Homo sapien
gtgagtcctttcaattgatttcctt

SEQ ID NO: 4146634 - DNA, 25 bp, Homo sapien
agtcctttcaattgatttcctttca

SEQ ID NO: 4146635 - DNA, 25 bp, Homo sapien
ctctcctgccatgaacaggttctct

SEQ ID NO: 4146636 - DNA, 25 bp, Homo sapien
tctcctgccatgaacaggttctctg

SEQ ID NO: 4146637 - DNA, 25 bp, Homo sapien
tgtaggtttttagcatagactatga

SEQ ID NO: 4146638 - DNA, 25 bp, Homo sapien
catagactatgaatagaatgtgttc

SEQ ID NO: 4146639 - DNA, 25 bp, Homo sapien
gaaatggctagagctcaggttgtaa

SEQ ID NO: 4146640 - DNA, 25 bp, Homo sapien
agagctcaggttgtaactggaaaaa

SEQ ID NO: 4146641 - DNA, 25 bp, Homo sapien
ccagacaaaacttgggtcactggct

SEQ ID NO: 4146642 - DNA, 25 bp, Homo sapien
cccagacaaaacttgggtcactggc

SEQ ID NO: 4146643 - DNA, 25 bp, Homo sapien
tcagtgatcaccgggatgaatctta

SEQ ID NO: 4146644 - DNA, 25 bp, Homo sapien
gaatcttagatttgtcagtcctttt

SEQ ID NO: 4146645 - DNA, 25 bp, Homo sapien
cagtccttttaggattgtattcatc

SEQ ID NO: 4146646 - DNA, 25 bp, Homo sapien
ccttttaggattgtattcatcttcc

SEQ ID NO: 4146647 - DNA, 25 bp, Homo sapien
tgattatttactagaaggcacggtt

SEQ ID NO: 4146648 - DNA, 25 bp, Homo sapien
tcactgcaattagagaagccacctt

SEQ ID NO: 4146649 - DNA, 25 bp, Homo sapien
gagtacagatttgcgcacttttgaa

SEQ ID NO: 4146650 - DNA, 25 bp, Homo sapien
tgggctccgcatgcgtaaaatggtt

SEQ ID NO: 4146651 - DNA, 25 bp, Homo sapien
tactgactgtcccttggccattggt

SEQ ID NO: 4146652 - DNA, 25 bp, Homo sapien
tggaaatgccggcatcaccaataat

SEQ ID NO: 4146653 - DNA, 25 bp, Homo sapien
ggccattggtttaatgtttctgtca

SEQ ID NO: 4146654 - DNA, 25 bp, Homo sapien
tgacttcaggcaatactgactgtcc

SEQ ID NO: 4146655 - DNA, 25 bp, Homo sapien
gcctgcagccgagttcatgttgaaa

SEQ ID NO: 4146656 - DNA, 25 bp, Homo sapien
tgatcttcacttgcggtgaaaatgt

SEQ ID NO: 4146657 - DNA, 25 bp, Homo sapien
actatattgaggtgcagtttgaaac

SEQ ID NO: 4146658 - DNA, 25 bp, Homo sapien
cagtttgaaacgtgacagcatatgt

SEQ ID NO: 4146659 - DNA, 25 bp, Homo sapien
tgaaatacatcccaacagagaaatc

SEQ ID NO: 4146660 - DNA, 25 bp, Homo sapien
tggggatctgaccaaggcatctgtt

SEQ ID NO: 4146661 - DNA, 25 bp, Homo sapien
taccaagtcctgatggggaaggcac

SEQ ID NO: 4146662 - DNA, 25 bp, Homo sapien
gaatagtggaatgattaccaagtcc

SEQ ID NO: 4146663 - DNA, 25 bp, Homo sapien
agcattttccccaagtatggtataa

SEQ ID NO: 4146664 - DNA, 25 bp, Homo sapien
cattttccccaagtatggtataatc

SEQ ID NO: 4146665 - DNA, 25 bp, Homo sapien
tttccccaagtatggtataatcata

SEQ ID NO: 4146666 - DNA, 25 bp, Homo sapien
cagcattttccccaagtatggtata

SEQ ID NO: 4146667 - DNA, 25 bp, Homo sapien
aacgaccagtcttcttaaggccttg

SEQ ID NO: 4146668 - DNA, 25 bp, Homo sapien
ttagcatccagaaaaaacgaccagt

SEQ ID NO: 4146669 - DNA, 25 bp, Homo sapien
taaggccttgacctcagatgtctca

SEQ ID NO: 4146670 - DNA, 25 bp, Homo sapien
tttgctccaaatgctccactcggat

SEQ ID NO: 4146671 - DNA, 25 bp, Homo sapien
caagatcaaaactgccatatggaaa

SEQ ID NO: 4146672 - DNA, 25 bp, Homo sapien
ttgacaagatcaaaactgccatatg

SEQ ID NO: 4146673 - DNA, 25 bp, Homo sapien
tgaatccaggtcaatataatgtcca

SEQ ID NO: 4146674 - DNA, 25 bp, Homo sapien
tatataggctaaatttgatacacaa

SEQ ID NO: 4146675 - DNA, 25 bp, Homo sapien
gcgcttattaatgacagtaatgaga

SEQ ID NO: 4146676 - DNA, 25 bp, Homo sapien
ttgtaactagatgtactccagcgct

SEQ ID NO: 4146677 - DNA, 25 bp, Homo sapien
taatgagatgcagacaagacaatgc

SEQ ID NO: 4146678 - DNA, 25 bp, Homo sapien
gacaatgcattaaacatcattggca

SEQ ID NO: 4146679 - DNA, 25 bp, Homo sapien
ctctactatccaaggacatggacac

SEQ ID NO: 4146680 - DNA, 25 bp, Homo sapien
tggacactgagccagaaaattcagg

SEQ ID NO: 4146681 - DNA, 25 bp, Homo sapien
tgagccagaaaattcagggaccttt

SEQ ID NO: 4146682 - DNA, 25 bp, Homo sapien
tactatccaaggacatggacactga

SEQ ID NO: 4146683 - DNA, 25 bp, Homo sapien
gttttctggtacttatagctgagag

SEQ ID NO: 4146684 - DNA, 25 bp, Homo sapien
cactgattgcctgactgttttctgg

SEQ ID NO: 4146685 - DNA, 25 bp, Homo sapien
catcactgattggaagttcaatgct

SEQ ID NO: 4146686 - DNA, 25 bp, Homo sapien
tacttatagctgagagagaaattaa

SEQ ID NO: 4146687 - DNA, 25 bp, Homo sapien
catgaacacctttcgatgtccgctt

SEQ ID NO: 4146688 - DNA, 25 bp, Homo sapien
tcagggttttattacggatttgaca

SEQ ID NO: 4146689 - DNA, 25 bp, Homo sapien
caaacacagtaatgatttagatgac

SEQ ID NO: 4146690 - DNA, 25 bp, Homo sapien
gacatagtgtaaagatgaaatccgt

SEQ ID NO: 4146691 - DNA, 25 bp, Homo sapien
taatacagtcgccttaaaaagccaa

SEQ ID NO: 4146692 - DNA, 25 bp, Homo sapien
tatgctgaccagataaataagaatc

SEQ ID NO: 4146693 - DNA, 25 bp, Homo sapien
tacatcagaaacaggagctatgctg

SEQ ID NO: 4146694 - DNA, 25 bp, Homo sapien
caaagcccaagtagaattccctgta

SEQ ID NO: 4146695 - DNA, 25 bp, Homo sapien
tgatacctcattcttgtgacaaaaa

SEQ ID NO: 4146696 - DNA, 25 bp, Homo sapien
tgacaaaaattgtaatgagaacagg

SEQ ID NO: 4146697 - DNA, 25 bp, Homo sapien
ggtaccacatgaatccattgtcctg

SEQ ID NO: 4146698 - DNA, 25 bp, Homo sapien
aagactatgggaagcattgaaattc

SEQ ID NO: 4146699 - DNA, 25 bp, Homo sapien
agtaattgatagacattttctctct

SEQ ID NO: 4146700 - DNA, 25 bp, Homo sapien
tgttcataaacagtccttctgtgaa

SEQ ID NO: 4146701 - DNA, 25 bp, Homo sapien
ctgttcataaacagtccttctgtga

SEQ ID NO: 4146702 - DNA, 25 bp, Homo sapien
tcagtaattgatagacattttctct

SEQ ID NO: 4146703 - DNA, 25 bp, Homo sapien
tttagtttataaagtgatgaacatt

SEQ ID NO: 4146704 - DNA, 25 bp, Homo sapien
acattttgctgtgttgggtttagct

SEQ ID NO: 4146705 - DNA, 25 bp, Homo sapien
tagtttataaagtgatgaacatttt

SEQ ID NO: 4146706 - DNA, 25 bp, Homo sapien
ttttgctgtgttgggtttagcttta

SEQ ID NO: 4146707 - DNA, 25 bp, Homo sapien
aaaatgaaaggatcctgctaccttg

SEQ ID NO: 4146708 - DNA, 25 bp, Homo sapien
ccactgaggacaaagagaggctatc

SEQ ID NO: 4146709 - DNA, 25 bp, Homo sapien
gatttagtcaattccaggacatgga

SEQ ID NO: 4146710 - DNA, 25 bp, Homo sapien
caacctaatgtcattaagtgcgcaa

SEQ ID NO: 4146711 - DNA, 25 bp, Homo sapien
cttcccagatagagtatgcttcgaa

SEQ ID NO: 4146712 - DNA, 25 bp, Homo sapien
cagatagagtatgcttcgaaagatt

SEQ ID NO: 4146713 - DNA, 25 bp, Homo sapien
tagagtatgcttcgaaagattctgg

SEQ ID NO: 4146714 - DNA, 25 bp, Homo sapien
tatgcttcgaaagattctggcttca

SEQ ID NO: 4146715 - DNA, 25 bp, Homo sapien
cattcctcgttaagccctttctcca

SEQ ID NO: 4146716 - DNA, 25 bp, Homo sapien
attcctcgttaagccctttctccat

SEQ ID NO: 4146717 - DNA, 25 bp, Homo sapien
tgtgaaggagatctacggccaagcg

SEQ ID NO: 4146718 - DNA, 25 bp, Homo sapien
tcaacctggtccacccgagtgtgtg

SEQ ID NO: 4146719 - DNA, 25 bp, Homo sapien
cacccgagtgtgtgcattgcataaa

SEQ ID NO: 4146720 - DNA, 25 bp, Homo sapien
gaaggagatctacggccaagcggtc

SEQ ID NO: 4146721 - DNA, 25 bp, Homo sapien
acaggcacggtagggtgttacaata

SEQ ID NO: 4146722 - DNA, 25 bp, Homo sapien
ctcggtgtgtgaatttaacaggcac

SEQ ID NO: 4146723 - DNA, 25 bp, Homo sapien
gcctggatggtttcgagttctctcg

SEQ ID NO: 4146724 - DNA, 25 bp, Homo sapien
tcttctgggagacgccattttcttc

SEQ ID NO: 4146725 - DNA, 25 bp, Homo sapien
gaaatacagtatgatccctgacctc

SEQ ID NO: 4146726 - DNA, 25 bp, Homo sapien
aaatacagtatgatccctgacctca

SEQ ID NO: 4146727 - DNA, 25 bp, Homo sapien
agaaatacagtatgatccctgacct

SEQ ID NO: 4146728 - DNA, 25 bp, Homo sapien
ccttctttactggagtactgagtct

SEQ ID NO: 4146729 - DNA, 25 bp, Homo sapien
tcatcaagaggtctctgaaggactg

SEQ ID NO: 4146730 - DNA, 25 bp, Homo sapien
taaccgttgaataactgcttctgcc

SEQ ID NO: 4146731 - DNA, 25 bp, Homo sapien
tactgagtcttggaacaacaagatc

SEQ ID NO: 4146732 - DNA, 25 bp, Homo sapien
gcaaggatgaacctccttgcaatgg

SEQ ID NO: 4146733 - DNA, 25 bp, Homo sapien
gccttgaaaggtatattctttgtac

SEQ ID NO: 4146734 - DNA, 25 bp, Homo sapien
tctgtgttgatctgaatttaatggt

SEQ ID NO: 4146735 - DNA, 25 bp, Homo sapien
aaaacataatgactctcccctattt

SEQ ID NO: 4146736 - DNA, 25 bp, Homo sapien
tatgttgctaatgtgaaagagaggc

SEQ ID NO: 4146737 - DNA, 25 bp, Homo sapien
cttactggttctcccttctcttgca

SEQ ID NO: 4146738 - DNA, 25 bp, Homo sapien
tcttactggttctcccttctcttgc

SEQ ID NO: 4146739 - DNA, 25 bp, Homo sapien
ctcttactggttctcccttctcttg

SEQ ID NO: 4146740 - DNA, 25 bp, Homo sapien
ttactggttctcccttctcttgcat

SEQ ID NO: 4146741 - DNA, 25 bp, Homo sapien
ttgctgatgtaggaagccactatgg

SEQ ID NO: 4146742 - DNA, 25 bp, Homo sapien
ctgatgtaggaagccactatgggca

SEQ ID NO: 4146743 - DNA, 25 bp, Homo sapien
gctgatgtaggaagccactatgggc

SEQ ID NO: 4146744 - DNA, 25 bp, Homo sapien
tattgctgatgtaggaagccactat

SEQ ID NO: 4146745 - DNA, 25 bp, Homo sapien
aaaatgagcagatcgtgaggagccc

SEQ ID NO: 4146746 - DNA, 25 bp, Homo sapien
tggaagagcttctagtgagatcagt

SEQ ID NO: 4146747 - DNA, 25 bp, Homo sapien
taaaggtgaagacctgtacacaggt

SEQ ID NO: 4146748 - DNA, 25 bp, Homo sapien
cactagaggtagataagagtaggga

SEQ ID NO: 4146749 - DNA, 25 bp, Homo sapien
gaatggtgagaactaagcaggttca

SEQ ID NO: 4146750 - DNA, 25 bp, Homo sapien
tttggtaaataacatgtccagtggt

SEQ ID NO: 4146751 - DNA, 25 bp, Homo sapien
tcttccatgctcaaaacttccgttg

SEQ ID NO: 4146752 - DNA, 25 bp, Homo sapien
ccagaagtatcacaagccgctgtgt

SEQ ID NO: 4146753 - DNA, 25 bp, Homo sapien
ggattcccacttgacatacttgata

SEQ ID NO: 4146754 - DNA, 25 bp, Homo sapien
tattggctagttggaaacgtccctg

SEQ ID NO: 4146755 - DNA, 25 bp, Homo sapien
tgtacaactgtttgagcggatggat

SEQ ID NO: 4146756 - DNA, 25 bp, Homo sapien
tcgcaaactcagtgcacaggattcc

SEQ ID NO: 4146757 - DNA, 25 bp, Homo sapien
cgagggggtccttgctcccgagctc

SEQ ID NO: 4146758 - DNA, 25 bp, Homo sapien
tacgagggggtccttgctcccgagc

SEQ ID NO: 4146759 - DNA, 25 bp, Homo sapien
aagatggtggcaggccacttccaag

SEQ ID NO: 4146760 - DNA, 25 bp, Homo sapien
gatggtggcaggccacttccaagat

SEQ ID NO: 4146761 - DNA, 25 bp, Homo sapien
cagtgcctcgtacttatcggaattc

SEQ ID NO: 4146762 - DNA, 25 bp, Homo sapien
actttaacaattggtctcaggctgc

SEQ ID NO: 4146763 - DNA, 25 bp, Homo sapien
ctaaagaatgtatctgcccactgat

SEQ ID NO: 4146764 - DNA, 25 bp, Homo sapien
caatctgctgaacctatctgatgaa

SEQ ID NO: 4146765 - DNA, 25 bp, Homo sapien
catagttgctgtgctttctagcaga

SEQ ID NO: 4146766 - DNA, 25 bp, Homo sapien
ttgaataaaatttggccactggtat

SEQ ID NO: 4146767 - DNA, 25 bp, Homo sapien
aaaatttggccactggtatctcata

SEQ ID NO: 4146768 - DNA, 25 bp, Homo sapien
tcatagttgctgtgctttctagcag

SEQ ID NO: 4146769 - DNA, 25 bp, Homo sapien
tggtttcccaccatggcttataagg

SEQ ID NO: 4146770 - DNA, 25 bp, Homo sapien
ggcaggatgtgacagagaatctaca

SEQ ID NO: 4146771 - DNA, 25 bp, Homo sapien
ccttaatgtcatggagagttactct

SEQ ID NO: 4146772 - DNA, 25 bp, Homo sapien
aatccaggataaggccagtgtcaac

SEQ ID NO: 4146773 - DNA, 25 bp, Homo sapien
aatgtcctgctctgtgttgaattgg

SEQ ID NO: 4146774 - DNA, 25 bp, Homo sapien
cactgactaatgtcctgctctgtgt

SEQ ID NO: 4146775 - DNA, 25 bp, Homo sapien
aattctaattcacactgactaatgt

SEQ ID NO: 4146776 - DNA, 25 bp, Homo sapien
taattcacactgactaatgtcctgc

SEQ ID NO: 4146777 - DNA, 25 bp, Homo sapien
cagccacatcggcagctttgtcctt

SEQ ID NO: 4146778 - DNA, 25 bp, Homo sapien
attggcagccacatcggcagctttg

SEQ ID NO: 4146779 - DNA, 25 bp, Homo sapien
gccacatcggcagctttgtccttgc

SEQ ID NO: 4146780 - DNA, 25 bp, Homo sapien
tggcagccacatcggcagctttgtc

SEQ ID NO: 4146781 - DNA, 25 bp, Homo sapien
gatgggtaatgcctccaagacattg

SEQ ID NO: 4146782 - DNA, 25 bp, Homo sapien
ggtaatgcctccaagacattgaacg

SEQ ID NO: 4146783 - DNA, 25 bp, Homo sapien
taatgcctccaagacattgaacgtg

SEQ ID NO: 4146784 - DNA, 25 bp, Homo sapien
ggcttgatgggtaatgcctccaaga

SEQ ID NO: 4146785 - DNA, 25 bp, Homo sapien
cagtgaagggggtgactctgagtca

SEQ ID NO: 4146786 - DNA, 25 bp, Homo sapien
gcagtgaagggggtgactctgagtc

SEQ ID NO: 4146787 - DNA, 25 bp, Homo sapien
tgtttcatcattgatagccaagcca

SEQ ID NO: 4146788 - DNA, 25 bp, Homo sapien
tcttggtaggaaactttcgcagctg

SEQ ID NO: 4146789 - DNA, 25 bp, Homo sapien
tgctttcctatactgcctgctgtcg

SEQ ID NO: 4146790 - DNA, 25 bp, Homo sapien
gaatttcgtgactttcatcttggta

SEQ ID NO: 4146791 - DNA, 25 bp, Homo sapien
cactcaatttatcagccttctgctg

SEQ ID NO: 4146792 - DNA, 25 bp, Homo sapien
aggcactcaatttatcagccttctg

SEQ ID NO: 4146793 - DNA, 25 bp, Homo sapien
tctgctggggtgaccccgctcggat

SEQ ID NO: 4146794 - DNA, 25 bp, Homo sapien
tcggatttgaacctctggctccagg

SEQ ID NO: 4146795 - DNA, 25 bp, Homo sapien
tcatcgtatgtgtctgcatttgcat

SEQ ID NO: 4146796 - DNA, 25 bp, Homo sapien
accttggcattcatcgtatgtgtct

SEQ ID NO: 4146797 - DNA, 25 bp, Homo sapien
taagggctcctctgcatggtcacag

SEQ ID NO: 4146798 - DNA, 25 bp, Homo sapien
atggtcacaggggtaagaccttggc

SEQ ID NO: 4146799 - DNA, 25 bp, Homo sapien
tccaggaggtacatgaggattccca

SEQ ID NO: 4146800 - DNA, 25 bp, Homo sapien
cataccttagggcaaaattggcatt

SEQ ID NO: 4146801 - DNA, 25 bp, Homo sapien
ccataatcatggagtggcccaaata

SEQ ID NO: 4146802 - DNA, 25 bp, Homo sapien
ccttgaggacgggagataaataatc

SEQ ID NO: 4146803 - DNA, 25 bp, Homo sapien
ccaaatagctcttggtgataattct

SEQ ID NO: 4146804 - DNA, 25 bp, Homo sapien
gttatttgtgtgaagataaaatcca

SEQ ID NO: 4146805 - DNA, 25 bp, Homo sapien
gataattctatgcacaaaattttca

SEQ ID NO: 4146806 - DNA, 25 bp, Homo sapien
aaatggtggcaagagttatttgtgt

SEQ ID NO: 4146807 - DNA, 25 bp, Homo sapien
aaggttggagaattagcttcctcat

SEQ ID NO: 4146808 - DNA, 25 bp, Homo sapien
agaaggttggagaattagcttcctc

SEQ ID NO: 4146809 - DNA, 25 bp, Homo sapien
gaaggttggagaattagcttcctca

SEQ ID NO: 4146810 - DNA, 25 bp, Homo sapien
ttagaaggttggagaattagcttcc

SEQ ID NO: 4146811 - DNA, 25 bp, Homo sapien
tctgtattcccactgtctacagaca

SEQ ID NO: 4146812 - DNA, 25 bp, Homo sapien
tcatgtctgtattcccactgtctac

SEQ ID NO: 4146813 - DNA, 25 bp, Homo sapien
tgtctgtattcccactgtctacaga

SEQ ID NO: 4146814 - DNA, 25 bp, Homo sapien
ctgtattcccactgtctacagacat

SEQ ID NO: 4146815 - DNA, 25 bp, Homo sapien
ctcaagggaacttctattctgacct

SEQ ID NO: 4146816 - DNA, 25 bp, Homo sapien
catgtgtgcaactaggacaaagtcc

SEQ ID NO: 4146817 - DNA, 25 bp, Homo sapien
tttgaatggacaatctcaccagcaa

SEQ ID NO: 4146818 - DNA, 25 bp, Homo sapien
catccttaaatcagtacccagatta

SEQ ID NO: 4146819 - DNA, 25 bp, Homo sapien
gattccatgtatatgcatgcctcca

SEQ ID NO: 4146820 - DNA, 25 bp, Homo sapien
tgggagagacggtccatccggttcg

SEQ ID NO: 4146821 - DNA, 25 bp, Homo sapien
tatatgcatgcctccaccaggaccc

SEQ ID NO: 4146822 - DNA, 25 bp, Homo sapien
gagagacggtccatccggttcgccc

SEQ ID NO: 4146823 - DNA, 25 bp, Homo sapien
taatctcggtttaagactttcactc

SEQ ID NO: 4146824 - DNA, 25 bp, Homo sapien
atctcggtttaagactttcactcac

SEQ ID NO: 4146825 - DNA, 25 bp, Homo sapien
ttttatctaatttgagcttcaaggt

SEQ ID NO: 4146826 - DNA, 25 bp, Homo sapien
gagcttcaaggttaatctcggttta

SEQ ID NO: 4146827 - DNA, 25 bp, Homo sapien
gaaatcgcagatgcttggcccaaag

SEQ ID NO: 4146828 - DNA, 25 bp, Homo sapien
cccagggatacaacaaatactccaa

SEQ ID NO: 4146829 - DNA, 25 bp, Homo sapien
tggcccaaagtccatgcatctgagg

SEQ ID NO: 4146830 - DNA, 25 bp, Homo sapien
acttaaagagagctacaacccccag

SEQ ID NO: 4146831 - DNA, 25 bp, Homo sapien
acatctctatcagtttccttgcagc

SEQ ID NO: 4146832 - DNA, 25 bp, Homo sapien
tacatctctatcagtttccttgcag

SEQ ID NO: 4146833 - DNA, 25 bp, Homo sapien
ctacatctctatcagtttccttgca

SEQ ID NO: 4146834 - DNA, 25 bp, Homo sapien
caatagtgatacacacttctgctca

SEQ ID NO: 4146835 - DNA, 25 bp, Homo sapien
gctcaaatatgtgtttgccccttga

SEQ ID NO: 4146836 - DNA, 25 bp, Homo sapien
ggagaaattagttcctatgtccatg

SEQ ID NO: 4146837 - DNA, 25 bp, Homo sapien
tccatgctcacgctgatccacattg

SEQ ID NO: 4146838 - DNA, 25 bp, Homo sapien
gaagatgctgtattctagacatgcg

SEQ ID NO: 4146839 - DNA, 25 bp, Homo sapien
cttggtatccctccagctgagaaga

SEQ ID NO: 4146840 - DNA, 25 bp, Homo sapien
tagatctgagatgtccacttggtat

SEQ ID NO: 4146841 - DNA, 25 bp, Homo sapien
tgggattaaattctgcctagatctg

SEQ ID NO: 4146842 - DNA, 25 bp, Homo sapien
gcacatgagtacacacagtcttctg

SEQ ID NO: 4146843 - DNA, 25 bp, Homo sapien
gccactatgttgaggagagagcaaa

SEQ ID NO: 4146844 - DNA, 25 bp, Homo sapien
gaagcagtccctagttcctcaaagg

SEQ ID NO: 4146845 - DNA, 25 bp, Homo sapien
aaggtgggatccagtccacatggca

SEQ ID NO: 4146846 - DNA, 25 bp, Homo sapien
tgcttgaagatcaggttacgccaac

SEQ ID NO: 4146847 - DNA, 25 bp, Homo sapien
aatagtttgacccagagttttggat

SEQ ID NO: 4146848 - DNA, 25 bp, Homo sapien
tcttctcacagaggtaccaggaata

SEQ ID NO: 4146849 - DNA, 25 bp, Homo sapien
aaaattgttcctgtgcttgaagatc

SEQ ID NO: 4146850 - DNA, 25 bp, Homo sapien
tactgtcgcaaagtcattcccaagt

SEQ ID NO: 4146851 - DNA, 25 bp, Homo sapien
ccctgattgaatttgccctgtgaca

SEQ ID NO: 4146852 - DNA, 25 bp, Homo sapien
ttttttgccttcaaatactgtcgca

SEQ ID NO: 4146853 - DNA, 25 bp, Homo sapien
cagtgaaaatagtacaaataacggc

SEQ ID NO: 4146854 - DNA, 25 bp, Homo sapien
gtatatgtgctttgaactgagtact

SEQ ID NO: 4146855 - DNA, 25 bp, Homo sapien
agagaacgtgaactgctttgatgac

SEQ ID NO: 4146856 - DNA, 25 bp, Homo sapien
aagagaacgtgaactgctttgatga

SEQ ID NO: 4146857 - DNA, 25 bp, Homo sapien
ggcgctggtgtgcaatagacctgca

SEQ ID NO: 4146858 - DNA, 25 bp, Homo sapien
gatattgtaaactggcacttagcac

SEQ ID NO: 4146859 - DNA, 25 bp, Homo sapien
cggcgctgcatggtttactcggtaa

SEQ ID NO: 4146860 - DNA, 25 bp, Homo sapien
agttaaattgacacacggcgctgca

SEQ ID NO: 4146861 - DNA, 25 bp, Homo sapien
ccttccaggaaagtctgccattcat

SEQ ID NO: 4146862 - DNA, 25 bp, Homo sapien
ttctcccttccaggaaagtctgcca

SEQ ID NO: 4146863 - DNA, 25 bp, Homo sapien
tgttctccaaattctcccttccagg

SEQ ID NO: 4146864 - DNA, 25 bp, Homo sapien
caaattctcccttccaggaaagtct

SEQ ID NO: 4146865 - DNA, 25 bp, Homo sapien
tttcacctcatttgcacagtaatca

SEQ ID NO: 4146866 - DNA, 25 bp, Homo sapien
gctttcacctcatttgcacagtaat

SEQ ID NO: 4146867 - DNA, 25 bp, Homo sapien
aactttcttcacctacaatctctct

SEQ ID NO: 4146868 - DNA, 25 bp, Homo sapien
tacaatctctctatggtgccaaagt

SEQ ID NO: 4146869 - DNA, 25 bp, Homo sapien
gccatggttggctgagctttctgtt

SEQ ID NO: 4146870 - DNA, 25 bp, Homo sapien
ccatggttggctgagctttctgttg

SEQ ID NO: 4146871 - DNA, 25 bp, Homo sapien
cccatggaggttacccatgcacaga

SEQ ID NO: 4146872 - DNA, 25 bp, Homo sapien
gagtctgattctttagcccccaaag

SEQ ID NO: 4146873 - DNA, 25 bp, Homo sapien
ctaataaagaatggactccccatgg

SEQ ID NO: 4146874 - DNA, 25 bp, Homo sapien
ggactccccatggaggttacccatg

SEQ ID NO: 4146875 - DNA, 25 bp, Homo sapien
gtgggccacacttcctgttttgtgt

SEQ ID NO: 4146876 - DNA, 25 bp, Homo sapien
tcatttttccttgtgggccacactt

SEQ ID NO: 4146877 - DNA, 25 bp, Homo sapien
ttttccttgtgggccacacttcctg

SEQ ID NO: 4146878 - DNA, 25 bp, Homo sapien
gggccacacttcctgttttgtgtat

SEQ ID NO: 4146879 - DNA, 25 bp, Homo sapien
ggttttcagggtaatgatcggagcc

SEQ ID NO: 4146880 - DNA, 25 bp, Homo sapien
cagggtaatgatcggagcccgacat

SEQ ID NO: 4146881 - DNA, 25 bp, Homo sapien
tagggttttcagggtaatgatcgga

SEQ ID NO: 4146882 - DNA, 25 bp, Homo sapien
ttttcagggtaatgatcggagcccg

SEQ ID NO: 4146883 - DNA, 25 bp, Homo sapien
ggctctgtggtacatgcaccgtcca

SEQ ID NO: 4146884 - DNA, 25 bp, Homo sapien
tggcaggaaggcacaaacgctattt

SEQ ID NO: 4146885 - DNA, 25 bp, Homo sapien
gctatttccgtgagcgtgcggtctg

SEQ ID NO: 4146886 - DNA, 25 bp, Homo sapien
gatggcctcgctgacattctccaaa

SEQ ID NO: 4146887 - DNA, 25 bp, Homo sapien
ctctgcccttgtgcctcactctcag

SEQ ID NO: 4146888 - DNA, 25 bp, Homo sapien
tctgcccttgtgcctcactctcagc

SEQ ID NO: 4146889 - DNA, 25 bp, Homo sapien
aaagaaagatctaccctcctccgtg

SEQ ID NO: 4146890 - DNA, 25 bp, Homo sapien
ggcttaattgctgctggacccgagt

SEQ ID NO: 4146891 - DNA, 25 bp, Homo sapien
aagaggcctgcgtacttgggtaaag

SEQ ID NO: 4146892 - DNA, 25 bp, Homo sapien
tctataacgtgaccacaaggactca

SEQ ID NO: 4146893 - DNA, 25 bp, Homo sapien
ctctgctacccataagccttgatga

SEQ ID NO: 4146894 - DNA, 25 bp, Homo sapien
atttcttgggcccagtgtagctcac

SEQ ID NO: 4146895 - DNA, 25 bp, Homo sapien
gatgatacagtccggactgtgagca

SEQ ID NO: 4146896 - DNA, 25 bp, Homo sapien
ctacccataagccttgatgaagatg

SEQ ID NO: 4146897 - DNA, 25 bp, Homo sapien
catatatcccgatgtgtctgtgtga

SEQ ID NO: 4146898 - DNA, 25 bp, Homo sapien
gacatttcctgacatgtgggaggga

SEQ ID NO: 4146899 - DNA, 25 bp, Homo sapien
cctggctatcttaaacaagttcata

SEQ ID NO: 4146900 - DNA, 25 bp, Homo sapien
tgtaacggaattgcagaatatgctg

SEQ ID NO: 4146901 - DNA, 25 bp, Homo sapien
tgcaacctgagaaagagaactgctc

SEQ ID NO: 4146902 - DNA, 25 bp, Homo sapien
tatgccactgcaattagagtatcca

SEQ ID NO: 4146903 - DNA, 25 bp, Homo sapien
gcttggtacaaaaacttctctggca

SEQ ID NO: 4146904 - DNA, 25 bp, Homo sapien
tagaggcaaatgacaagcgataggc

SEQ ID NO: 4146905 - DNA, 25 bp, Homo sapien
gacaaactctaggaacaatgccgat

SEQ ID NO: 4146906 - DNA, 25 bp, Homo sapien
gcggcggcgctgagtttatacatta

SEQ ID NO: 4146907 - DNA, 25 bp, Homo sapien
gaagatatcatgtaggccctgggct

SEQ ID NO: 4146908 - DNA, 25 bp, Homo sapien
cagacgtgacgtcctgccagaaaga

SEQ ID NO: 4146909 - DNA, 25 bp, Homo sapien
tccttcgcctgaaataaatgccttc

SEQ ID NO: 4146910 - DNA, 25 bp, Homo sapien
cacatgggcactgaagggaacctat

SEQ ID NO: 4146911 - DNA, 25 bp, Homo sapien
taggaagtcgaagcatgaggcagac

SEQ ID NO: 4146912 - DNA, 25 bp, Homo sapien
tgaaaggatctttagccatgaatgc

SEQ ID NO: 4146913 - DNA, 25 bp, Homo sapien
cacaattaatattcagcagacttca

SEQ ID NO: 4146914 - DNA, 25 bp, Homo sapien
tccttctggcctttgataactttaa

SEQ ID NO: 4146915 - DNA, 25 bp, Homo sapien
caaggtataattgctacatcaacaa

SEQ ID NO: 4146916 - DNA, 25 bp, Homo sapien
tattgttcagcatgacagactactg

SEQ ID NO: 4146917 - DNA, 25 bp, Homo sapien
cagtggctcgggtgcaatacacaaa

SEQ ID NO: 4146918 - DNA, 25 bp, Homo sapien
cagagttttgtttctcacgagtgag

SEQ ID NO: 4146919 - DNA, 25 bp, Homo sapien
gccttaaaatgattagtcctcctga

SEQ ID NO: 4146920 - DNA, 25 bp, Homo sapien
gagatgacctatttcggccaaaggg

SEQ ID NO: 4146921 - DNA, 25 bp, Homo sapien
gtttgccgtaatggaagaagggaca

SEQ ID NO: 4146922 - DNA, 25 bp, Homo sapien
gaagaagggacaggctaattctgac

SEQ ID NO: 4146923 - DNA, 25 bp, Homo sapien
gacaggctaattctgacgtgttcca

SEQ ID NO: 4146924 - DNA, 25 bp, Homo sapien
tgatgttcctcgtaatgtttttgtc

SEQ ID NO: 4146925 - DNA, 25 bp, Homo sapien
gaagttagtacaatgtggtcgttac

SEQ ID NO: 4146926 - DNA, 25 bp, Homo sapien
gctttgatagacatcaaagatgatc

SEQ ID NO: 4146927 - DNA, 25 bp, Homo sapien
gatgatctggccagaagttagtaca

SEQ ID NO: 4146928 - DNA, 25 bp, Homo sapien
tcagctttgatagacatcaaagatg

SEQ ID NO: 4146929 - DNA, 25 bp, Homo sapien
tcaagtaagtgaaggccttgctttt

SEQ ID NO: 4146930 - DNA, 25 bp, Homo sapien
gtagatccactgctagcggagtaat

SEQ ID NO: 4146931 - DNA, 25 bp, Homo sapien
cactgctagcggagtaatcaagtaa

SEQ ID NO: 4146932 - DNA, 25 bp, Homo sapien
cattatcttcaaccccttgtagatc

SEQ ID NO: 4146933 - DNA, 25 bp, Homo sapien
agtggtgtgaagctcatcggcgttc

SEQ ID NO: 4146934 - DNA, 25 bp, Homo sapien
tggcatcctccgataacagaaaaac

SEQ ID NO: 4146935 - DNA, 25 bp, Homo sapien
aaaacaagtcccgtatcatccagag

SEQ ID NO: 4146936 - DNA, 25 bp, Homo sapien
ctaatgaaatcgtccagccctgcat

SEQ ID NO: 4146937 - DNA, 25 bp, Homo sapien
attcaaaggcgtaagtcttagtaag

SEQ ID NO: 4146938 - DNA, 25 bp, Homo sapien
gtcttagtaagagcccatatttacc

SEQ ID NO: 4146939 - DNA, 25 bp, Homo sapien
caaaggcgtaagtcttagtaagagc

SEQ ID NO: 4146940 - DNA, 25 bp, Homo sapien
gcgtaagtcttagtaagagcccata

SEQ ID NO: 4146941 - DNA, 25 bp, Homo sapien
aaagatgctatcgaggcacctctgc

SEQ ID NO: 4146942 - DNA, 25 bp, Homo sapien
taaacccgaatggtaaatgatgcct

SEQ ID NO: 4146943 - DNA, 25 bp, Homo sapien
taactgattgcgttctaaggcccta

SEQ ID NO: 4146944 - DNA, 25 bp, Homo sapien
taaggccctagtgtgtcgttatctg

SEQ ID NO: 4146945 - DNA, 25 bp, Homo sapien
gaatgtgaagaaactttacctgtcg

SEQ ID NO: 4146946 - DNA, 25 bp, Homo sapien
agggaaacgcatgcggcccttgcat

SEQ ID NO: 4146947 - DNA, 25 bp, Homo sapien
gaaaggtcatttttacaaagctgcc

SEQ ID NO: 4146948 - DNA, 25 bp, Homo sapien
tcctccgatgctacagtatggaatg

SEQ ID NO: 4146949 - DNA, 25 bp, Homo sapien
taagtccagaacgaccgtgaggctc

SEQ ID NO: 4146950 - DNA, 25 bp, Homo sapien
tagatagcttacaaatgagatgccc

SEQ ID NO: 4146951 - DNA, 25 bp, Homo sapien
gccagttgctggtcacatagatagc

SEQ ID NO: 4146952 - DNA, 25 bp, Homo sapien
ggaagaagctctagtcctaaaagca

SEQ ID NO: 4146953 - DNA, 25 bp, Homo sapien
gaagcagtaaggatgattataccca

SEQ ID NO: 4146954 - DNA, 25 bp, Homo sapien
ttatggtgcactagggaaagggaca

SEQ ID NO: 4146955 - DNA, 25 bp, Homo sapien
cctgggataccggtacatatgaaga

SEQ ID NO: 4146956 - DNA, 25 bp, Homo sapien
caagcactggctagacttttgcata

SEQ ID NO: 4146957 - DNA, 25 bp, Homo sapien
tgatgggcaaggaaagagtctctgc

SEQ ID NO: 4146958 - DNA, 25 bp, Homo sapien
tgtgccagttgtctcaggagtctct

SEQ ID NO: 4146959 - DNA, 25 bp, Homo sapien
tgaaatacgtgtccttccaagctct

SEQ ID NO: 4146960 - DNA, 25 bp, Homo sapien
ccatgaccttgatcgtgggttagca

SEQ ID NO: 4146961 - DNA, 25 bp, Homo sapien
taactgaatgtagccatcaagacaa

SEQ ID NO: 4146962 - DNA, 25 bp, Homo sapien
tcaagacaaatgagcaccttcagtt

SEQ ID NO: 4146963 - DNA, 25 bp, Homo sapien
tatctagtaggttcctaaacgtggc

SEQ ID NO: 4146964 - DNA, 25 bp, Homo sapien
aaaaaatcaattaggcctggtacag

SEQ ID NO: 4146965 - DNA, 25 bp, Homo sapien
cacttcatgaggcgggtctgcacgg

SEQ ID NO: 4146966 - DNA, 25 bp, Homo sapien
aggcgggtctgcacgggtttcccat

SEQ ID NO: 4146967 - DNA, 25 bp, Homo sapien
atgaggcgggtctgcacgggtttcc

SEQ ID NO: 4146968 - DNA, 25 bp, Homo sapien
gggtctgcacgggtttcccatttgc

SEQ ID NO: 4146969 - DNA, 25 bp, Homo sapien
agcccgagggttctgaagttgagtc

SEQ ID NO: 4146970 - DNA, 25 bp, Homo sapien
catcctcgctgtttaccaagttggg

SEQ ID NO: 4146971 - DNA, 25 bp, Homo sapien
gatctttgccggtttcgctctcctt

SEQ ID NO: 4146972 - DNA, 25 bp, Homo sapien
tggtccttctgattgatctttgccg

SEQ ID NO: 4146973 - DNA, 25 bp, Homo sapien
tgacagtgttcgagattattgagca

SEQ ID NO: 4146974 - DNA, 25 bp, Homo sapien
tttaatccatatttctggtggttct

SEQ ID NO: 4146975 - DNA, 25 bp, Homo sapien
ctgtatgtactacaagttgttgatg

SEQ ID NO: 4146976 - DNA, 25 bp, Homo sapien
gtttcatagggcttatgacctagag

SEQ ID NO: 4146977 - DNA, 25 bp, Homo sapien
gcaggctagacgcattttctcaaga

SEQ ID NO: 4146978 - DNA, 25 bp, Homo sapien
tccagtctaaaccttagctgtggct

SEQ ID NO: 4146979 - DNA, 25 bp, Homo sapien
aaatgtcccttgcaatccagtctaa

SEQ ID NO: 4146980 - DNA, 25 bp, Homo sapien
tactgcttttcctcatgaaggatga

SEQ ID NO: 4146981 - DNA, 25 bp, Homo sapien
tgcttatggttgaccgtcagctttg

SEQ ID NO: 4146982 - DNA, 25 bp, Homo sapien
ttatggttgaccgtcagctttgctt

SEQ ID NO: 4146983 - DNA, 25 bp, Homo sapien
tgcactgcttatggttgaccgtcag

SEQ ID NO: 4146984 - DNA, 25 bp, Homo sapien
cactgcttatggttgaccgtcagct

SEQ ID NO: 4146985 - DNA, 25 bp, Homo sapien
aagaactggtccttaatctgaaatc

SEQ ID NO: 4146986 - DNA, 25 bp, Homo sapien
gcaaagaactggtccttaatctgaa

SEQ ID NO: 4146987 - DNA, 25 bp, Homo sapien
ttgatgctgtgacattccgcaccat

SEQ ID NO: 4146988 - DNA, 25 bp, Homo sapien
cagcaaagaactggtccttaatctg

SEQ ID NO: 4146989 - DNA, 25 bp, Homo sapien
gcagcgagagggccatctcactggc

SEQ ID NO: 4146990 - DNA, 25 bp, Homo sapien
actggctctgagtgctgagagctgg

SEQ ID NO: 4146991 - DNA, 25 bp, Homo sapien
gtgctgagagctggccgtggaccat

SEQ ID NO: 4146992 - DNA, 25 bp, Homo sapien
agcagcgagagggccatctcactgg

SEQ ID NO: 4146993 - DNA, 25 bp, Homo sapien
gaatgtttggtaagagtcagagtca

SEQ ID NO: 4146994 - DNA, 25 bp, Homo sapien
tagctcaatatttggcctcttaggc

SEQ ID NO: 4146995 - DNA, 25 bp, Homo sapien
taggcagccattcctgcattgagaa

SEQ ID NO: 4146996 - DNA, 25 bp, Homo sapien
tgatagtatcaccaccagtatcatc

SEQ ID NO: 4146997 - DNA, 25 bp, Homo sapien
tcagactccttcgttgaaagctttt

SEQ ID NO: 4146998 - DNA, 25 bp, Homo sapien
agaaaactccacagtagggtggagg

SEQ ID NO: 4146999 - DNA, 25 bp, Homo sapien
cagaaaactccacagtagggtggag

SEQ ID NO: 4147000 - DNA, 25 bp, Homo sapien
atgtgcgtgattctagcacagtgcc

SEQ ID NO: 4147001 - DNA, 25 bp, Homo sapien
agtgcctggcccagtcgtatcaaga

SEQ ID NO: 4147002 - DNA, 25 bp, Homo sapien
gtgcctggcccagtcgtatcaagac

SEQ ID NO: 4147003 - DNA, 25 bp, Homo sapien
gaagaagtgatgtgcgtgattctag

SEQ ID NO: 4147004 - DNA, 25 bp, Homo sapien
cgttttgtcgaaggctatattctga

SEQ ID NO: 4147005 - DNA, 25 bp, Homo sapien
catgaatagctcaactaaaggaaag

SEQ ID NO: 4147006 - DNA, 25 bp, Homo sapien
gaaagtataccatagtgtctgtggc

SEQ ID NO: 4147007 - DNA, 25 bp, Homo sapien
tgtctgtggctagggtacaacgtaa

SEQ ID NO: 4147008 - DNA, 25 bp, Homo sapien
tgtgacattgtttcgtgttgccttc

SEQ ID NO: 4147009 - DNA, 25 bp, Homo sapien
ttctgcatctacagaattgtcccct

SEQ ID NO: 4147010 - DNA, 25 bp, Homo sapien
tcctgttatcacaagtagtaagaga

SEQ ID NO: 4147011 - DNA, 25 bp, Homo sapien
gggatggtgcctttgtaattctgca

SEQ ID NO: 4147012 - DNA, 25 bp, Homo sapien
gacagtacgggctcccttcgccaaa

SEQ ID NO: 4147013 - DNA, 25 bp, Homo sapien
agccagaacccatctacagcaagaa

SEQ ID NO: 4147014 - DNA, 25 bp, Homo sapien
aaatccaaaggcagacagtacgggc

SEQ ID NO: 4147015 - DNA, 25 bp, Homo sapien
ccccgcttcgcagaaacagccagaa

SEQ ID NO: 4147016 - DNA, 25 bp, Homo sapien
ggaattcttgtggtttctttgtcat

SEQ ID NO: 4147017 - DNA, 25 bp, Homo sapien
gaggaattcttgtggtttctttgtc

SEQ ID NO: 4147018 - DNA, 25 bp, Homo sapien
aggaattcttgtggtttctttgtca

SEQ ID NO: 4147019 - DNA, 25 bp, Homo sapien
ttgaggaattcttgtggtttctttg

SEQ ID NO: 4147020 - DNA, 25 bp, Homo sapien
tatttgctgaattactccggtgacg

SEQ ID NO: 4147021 - DNA, 25 bp, Homo sapien
ggaagacaggactgtgacaatcatt

SEQ ID NO: 4147022 - DNA, 25 bp, Homo sapien
cattaggcaagctaggcatctggag

SEQ ID NO: 4147023 - DNA, 25 bp, Homo sapien
agaaaatgtaaaggacagccagtca

SEQ ID NO: 4147024 - DNA, 25 bp, Homo sapien
caactcttcctcctgtttttcaagc

SEQ ID NO: 4147025 - DNA, 25 bp, Homo sapien
tcaactcttcctcctgtttttcaag

SEQ ID NO: 4147026 - DNA, 25 bp, Homo sapien
actcttcctcctgtttttcaagctg

SEQ ID NO: 4147027 - DNA, 25 bp, Homo sapien
tcttcctcctgtttttcaagctgac

SEQ ID NO: 4147028 - DNA, 25 bp, Homo sapien
atgtgagatcaaaagaagatgaatt

SEQ ID NO: 4147029 - DNA, 25 bp, Homo sapien
tgtgagatcaaaagaagatgaattc

SEQ ID NO: 4147030 - DNA, 25 bp, Homo sapien
tcaggcgacatgctgttctcttcat

SEQ ID NO: 4147031 - DNA, 25 bp, Homo sapien
gatttctgctattgtaatactcagg

SEQ ID NO: 4147032 - DNA, 25 bp, Homo sapien
ctgcctgtcattttctggcggttta

SEQ ID NO: 4147033 - DNA, 25 bp, Homo sapien
tggcggtttatcttcagcgtctgga

SEQ ID NO: 4147034 - DNA, 25 bp, Homo sapien
ggtctatggtgacattcaagtccag

SEQ ID NO: 4147035 - DNA, 25 bp, Homo sapien
cagcaattagcgtgaagccatttca

SEQ ID NO: 4147036 - DNA, 25 bp, Homo sapien
cacattcaaggattcaaggtctatg

SEQ ID NO: 4147037 - DNA, 25 bp, Homo sapien
tcttcaagcaattacagcaattagc

SEQ ID NO: 4147038 - DNA, 25 bp, Homo sapien
aatggccacggggatcaggtttcac

SEQ ID NO: 4147039 - DNA, 25 bp, Homo sapien
taaacattccgtgttgttcttggtc

SEQ ID NO: 4147040 - DNA, 25 bp, Homo sapien
tctacaatggccacggggatcaggt

SEQ ID NO: 4147041 - DNA, 25 bp, Homo sapien
taaaatcaaaccactgtgtaaacat

SEQ ID NO: 4147042 - DNA, 25 bp, Homo sapien
cagaccgtatggaggatgttttgct

SEQ ID NO: 4147043 - DNA, 25 bp, Homo sapien
tcagaccgtatggaggatgttttgc

SEQ ID NO: 4147044 - DNA, 25 bp, Homo sapien
agaccgtatggaggatgttttgctg

SEQ ID NO: 4147045 - DNA, 25 bp, Homo sapien
ctctgtgcactcaagacgctgggcc

SEQ ID NO: 4147046 - DNA, 25 bp, Homo sapien
cctagtaagttgctgctatccaaca

SEQ ID NO: 4147047 - DNA, 25 bp, Homo sapien
cacagcttccgggttgcatttttca

SEQ ID NO: 4147048 - DNA, 25 bp, Homo sapien
gcatcctgtttgttccctctctgtg

SEQ ID NO: 4147049 - DNA, 25 bp, Homo sapien
cgggaagacatcacctttacgtggc

SEQ ID NO: 4147050 - DNA, 25 bp, Homo sapien
ctaaaaacagaggacgggaagacat

SEQ ID NO: 4147051 - DNA, 25 bp, Homo sapien
gaggacgggaagacatcacctttac

SEQ ID NO: 4147052 - DNA, 25 bp, Homo sapien
aacagaggacgggaagacatcacct

SEQ ID NO: 4147053 - DNA, 25 bp, Homo sapien
gggacatggcaactggcttcacagg

SEQ ID NO: 4147054 - DNA, 25 bp, Homo sapien
tctaggaagttgaaagatggggaca

SEQ ID NO: 4147055 - DNA, 25 bp, Homo sapien
caactggcttcacagggccagtatc

SEQ ID NO: 4147056 - DNA, 25 bp, Homo sapien
aaagatggggacatggcaactggct

SEQ ID NO: 4147057 - DNA, 25 bp, Homo sapien
ctactgttcgtggattgttctccag

SEQ ID NO: 4147058 - DNA, 25 bp, Homo sapien
ctgttcgtggattgttctccagctt

SEQ ID NO: 4147059 - DNA, 25 bp, Homo sapien
tactgttcgtggattgttctccagc

SEQ ID NO: 4147060 - DNA, 25 bp, Homo sapien
actgttcgtggattgttctccagct

SEQ ID NO: 4147061 - DNA, 25 bp, Homo sapien
ctgatttcaagaaggaatgtatgca

SEQ ID NO: 4147062 - DNA, 25 bp, Homo sapien
actgatttcaagaaggaatgtatgc

SEQ ID NO: 4147063 - DNA, 25 bp, Homo sapien
tgatttcaagaaggaatgtatgcat

SEQ ID NO: 4147064 - DNA, 25 bp, Homo sapien
cactgatttcaagaaggaatgtatg

SEQ ID NO: 4147065 - DNA, 25 bp, Homo sapien
tctgaaagatcactcagtcgttcag

SEQ ID NO: 4147066 - DNA, 25 bp, Homo sapien
ccttttccttgtgatgctttgctct

SEQ ID NO: 4147067 - DNA, 25 bp, Homo sapien
gatcactcagtcgttcagcagtcct

SEQ ID NO: 4147068 - DNA, 25 bp, Homo sapien
tctcaattaagtgttcatctctggg

SEQ ID NO: 4147069 - DNA, 25 bp, Homo sapien
aatgctgctgggttgtagttaatgg

SEQ ID NO: 4147070 - DNA, 25 bp, Homo sapien
tcctgtttggtgcacccctccattg

SEQ ID NO: 4147071 - DNA, 25 bp, Homo sapien
gcacccctccattgaagcacaaatg

SEQ ID NO: 4147072 - DNA, 25 bp, Homo sapien
gcctttgaggctggcaatgttgtat

SEQ ID NO: 4147073 - DNA, 25 bp, Homo sapien
tgtgcttttcctgtaccctctgaac

SEQ ID NO: 4147074 - DNA, 25 bp, Homo sapien
tctctgcattggaagtgtatgctcc

SEQ ID NO: 4147075 - DNA, 25 bp, Homo sapien
gcttttctttagtcacctcgtggtc

SEQ ID NO: 4147076 - DNA, 25 bp, Homo sapien
gtggtcaggacatgcactgttcacc

SEQ ID NO: 4147077 - DNA, 25 bp, Homo sapien
tctgttgcctgtaccatatatgaaa

SEQ ID NO: 4147078 - DNA, 25 bp, Homo sapien
gtgtctttgtcatccataccttagg

SEQ ID NO: 4147079 - DNA, 25 bp, Homo sapien
cattcagcagacagtgaaaagggaa

SEQ ID NO: 4147080 - DNA, 25 bp, Homo sapien
ggaacatgctttgattactgagctc

SEQ ID NO: 4147081 - DNA, 25 bp, Homo sapien
tggttcttgagccttctgcagtaaa

SEQ ID NO: 4147082 - DNA, 25 bp, Homo sapien
ggttcttgagccttctgcagtaaat

SEQ ID NO: 4147083 - DNA, 25 bp, Homo sapien
gttcttgagccttctgcagtaaatg

SEQ ID NO: 4147084 - DNA, 25 bp, Homo sapien
ctccaagtggttcgtggcatgccat

SEQ ID NO: 4147085 - DNA, 25 bp, Homo sapien
tttgcacagacctccaagtggttcg

SEQ ID NO: 4147086 - DNA, 25 bp, Homo sapien
acagacctccaagtggttcgtggca

SEQ ID NO: 4147087 - DNA, 25 bp, Homo sapien
tgaattttgcacagacctccaagtg

SEQ ID NO: 4147088 - DNA, 25 bp, Homo sapien
caattcagaaggatcgtcaagaaca

SEQ ID NO: 4147089 - DNA, 25 bp, Homo sapien
cacaattcagaaggatcgtcaagaa

SEQ ID NO: 4147090 - DNA, 25 bp, Homo sapien
gcacacaattcagaaggatcgtcaa

SEQ ID NO: 4147091 - DNA, 25 bp, Homo sapien
cacacaattcagaaggatcgtcaag

SEQ ID NO: 4147092 - DNA, 25 bp, Homo sapien
tccacaatcaaaagtgagggcatta

SEQ ID NO: 4147093 - DNA, 25 bp, Homo sapien
caagataaccggatcagtaaatacc

SEQ ID NO: 4147094 - DNA, 25 bp, Homo sapien
acaatcaaaagtgagggcattacgg

SEQ ID NO: 4147095 - DNA, 25 bp, Homo sapien
taaataccctgtgcacttcaacatc

SEQ ID NO: 4147096 - DNA, 25 bp, Homo sapien
atatgtaagtgcaaagctggcctct

SEQ ID NO: 4147097 - DNA, 25 bp, Homo sapien
tgtaagtgcaaagctggcctcttga

SEQ ID NO: 4147098 - DNA, 25 bp, Homo sapien
gcaaagctggcctcttgattgattg

SEQ ID NO: 4147099 - DNA, 25 bp, Homo sapien
aagtgcaaagctggcctcttgattg

SEQ ID NO: 4147100 - DNA, 25 bp, Homo sapien
tataaaagctgtcagtgcggtccag

SEQ ID NO: 4147101 - DNA, 25 bp, Homo sapien
tgtgatctcgtatcctgaagtgcgg

SEQ ID NO: 4147102 - DNA, 25 bp, Homo sapien
catctgagattgctgtggcacaggg

SEQ ID NO: 4147103 - DNA, 25 bp, Homo sapien
tttggctggataacactgtgatctc

SEQ ID NO: 4147104 - DNA, 25 bp, Homo sapien
atggaaaacagtacgtcacttagag

SEQ ID NO: 4147105 - DNA, 25 bp, Homo sapien
cacttagagtgggtgttttgtctac

SEQ ID NO: 4147106 - DNA, 25 bp, Homo sapien
ttttcctgtaaattttctgtctgga

SEQ ID NO: 4147107 - DNA, 25 bp, Homo sapien
gtgttttgtctaccggccatttggc

SEQ ID NO: 4147108 - DNA, 25 bp, Homo sapien
gaaggatctgaaccatacctccagc

SEQ ID NO: 4147109 - DNA, 25 bp, Homo sapien
taaggcattagggtcctgaaggatc

SEQ ID NO: 4147110 - DNA, 25 bp, Homo sapien
gaaatagcagaaattcggcagtgcc

SEQ ID NO: 4147111 - DNA, 25 bp, Homo sapien
gacgtttgcagcatgctataggcaa

SEQ ID NO: 4147112 - DNA, 25 bp, Homo sapien
gtctctccacattgaagggaaggtg

SEQ ID NO: 4147113 - DNA, 25 bp, Homo sapien
gtctcatcttcaacttcggtctctc

SEQ ID NO: 4147114 - DNA, 25 bp, Homo sapien
ttcggtctctccacattgaagggaa

SEQ ID NO: 4147115 - DNA, 25 bp, Homo sapien
ctccacattgaagggaaggtgacat

SEQ ID NO: 4147116 - DNA, 25 bp, Homo sapien
tcaataactgcaggccacagttgag

SEQ ID NO: 4147117 - DNA, 25 bp, Homo sapien
cacagttgagtaaacagttgcactg

SEQ ID NO: 4147118 - DNA, 25 bp, Homo sapien
gattccgtagtacaaagacaacagg

SEQ ID NO: 4147119 - DNA, 25 bp, Homo sapien
gttagaagtccatggaacacaaaga

SEQ ID NO: 4147120 - DNA, 25 bp, Homo sapien
tcataaaccatcagccctctaggag

SEQ ID NO: 4147121 - DNA, 25 bp, Homo sapien
tgctgagacgaagatgagtggacct

SEQ ID NO: 4147122 - DNA, 25 bp, Homo sapien
agtggacctgtgtgtcagcctaacc

SEQ ID NO: 4147123 - DNA, 25 bp, Homo sapien
ttttacacttaatcgcgatctcgcg

SEQ ID NO: 4147124 - DNA, 25 bp, Homo sapien
ggcggtccaacggagagacgccggc

SEQ ID NO: 4147125 - DNA, 25 bp, Homo sapien
cagcagcaacaggtactgggctttg

SEQ ID NO: 4147126 - DNA, 25 bp, Homo sapien
tagagtgcggcggtcttcgggaggg

SEQ ID NO: 4147127 - DNA, 25 bp, Homo sapien
gggcagctgacctcgcccacgccca

SEQ ID NO: 4147128 - DNA, 25 bp, Homo sapien
caggtttttgagtcatgatgcaaga

SEQ ID NO: 4147129 - DNA, 25 bp, Homo sapien
aattgggaatgacagtttcagaccc

SEQ ID NO: 4147130 - DNA, 25 bp, Homo sapien
tactactgaaacttgaattgggaat

SEQ ID NO: 4147131 - DNA, 25 bp, Homo sapien
ggcgactgagccgtgctccatctca

SEQ ID NO: 4147132 - DNA, 25 bp, Homo sapien
aagcatggccctcatgctagcaaat

SEQ ID NO: 4147133 - DNA, 25 bp, Homo sapien
tggccctcatgctagcaaatgtgat

SEQ ID NO: 4147134 - DNA, 25 bp, Homo sapien
agcagcatctcgccaggtgacgggt

SEQ ID NO: 4147135 - DNA, 25 bp, Homo sapien
tctgggatttccattgcttgattcc

SEQ ID NO: 4147136 - DNA, 25 bp, Homo sapien
tcagtgcctcatctcctcattgcca

SEQ ID NO: 4147137 - DNA, 25 bp, Homo sapien
cattaaaatagccctccggctcatt

SEQ ID NO: 4147138 - DNA, 25 bp, Homo sapien
ttaaaatagccctccggctcattcc

SEQ ID NO: 4147139 - DNA, 25 bp, Homo sapien
cggctcattcccttgattacttttt

SEQ ID NO: 4147140 - DNA, 25 bp, Homo sapien
ctccggctcattcccttgattactt

SEQ ID NO: 4147141 - DNA, 25 bp, Homo sapien
cctagagcggcttctttctaacttc

SEQ ID NO: 4147142 - DNA, 25 bp, Homo sapien
tatgattacggcacttaaactcttg

SEQ ID NO: 4147143 - DNA, 25 bp, Homo sapien
aacttccctcgtttgcccacagttg

SEQ ID NO: 4147144 - DNA, 25 bp, Homo sapien
ttgcccacagttgctatgattacgg

SEQ ID NO: 4147145 - DNA, 25 bp, Homo sapien
agggagtgggtatgcattctgcttt

SEQ ID NO: 4147146 - DNA, 25 bp, Homo sapien
gcgagggagtgggtatgcattctgc

SEQ ID NO: 4147147 - DNA, 25 bp, Homo sapien
cgagggagtgggtatgcattctgct

SEQ ID NO: 4147148 - DNA, 25 bp, Homo sapien
gagggagtgggtatgcattctgctt

SEQ ID NO: 4147149 - DNA, 25 bp, Homo sapien
tcttatcttttgcttggatgaaggg

SEQ ID NO: 4147150 - DNA, 25 bp, Homo sapien
agtgtaatgatatctatgcagttgt

SEQ ID NO: 4147151 - DNA, 25 bp, Homo sapien
ggaatgtggttgaaacagacttagg

SEQ ID NO: 4147152 - DNA, 25 bp, Homo sapien
tctaagagatttccttagtgtaatg

SEQ ID NO: 4147153 - DNA, 25 bp, Homo sapien
tgaagcacgttgcagctgccccagc

SEQ ID NO: 4147154 - DNA, 25 bp, Homo sapien
ctgaagcacgttgcagctgccccag

SEQ ID NO: 4147155 - DNA, 25 bp, Homo sapien
gcgaacctacttgttggagggagaa

SEQ ID NO: 4147156 - DNA, 25 bp, Homo sapien
tgtagtcctttcaggcagctggcaa

SEQ ID NO: 4147157 - DNA, 25 bp, Homo sapien
gatgattttatgattggcgaaccta

SEQ ID NO: 4147158 - DNA, 25 bp, Homo sapien
tgatagggacagtttcagcaaagag

SEQ ID NO: 4147159 - DNA, 25 bp, Homo sapien
tacatacatggagacctattacatc

SEQ ID NO: 4147160 - DNA, 25 bp, Homo sapien
taaattcctaaagtttgtgagttca

SEQ ID NO: 4147161 - DNA, 25 bp, Homo sapien
ttgtacatacatggagacctattac

SEQ ID NO: 4147162 - DNA, 25 bp, Homo sapien
tttgtgagttcacgggaaatgagga

SEQ ID NO: 4147163 - DNA, 25 bp, Homo sapien
gatttcagcagatgatttgattctt

SEQ ID NO: 4147164 - DNA, 25 bp, Homo sapien
tacaactcgttaatcttaattcctc

SEQ ID NO: 4147165 - DNA, 25 bp, Homo sapien
cttcttttactatacagatggtaca

SEQ ID NO: 4147166 - DNA, 25 bp, Homo sapien
cagatggtacaactcgttaatctta

SEQ ID NO: 4147167 - DNA, 25 bp, Homo sapien
tgtttcctccaccattagtatttga

SEQ ID NO: 4147168 - DNA, 25 bp, Homo sapien
cactgttcaaaagatttgtttcctc

SEQ ID NO: 4147169 - DNA, 25 bp, Homo sapien
tcctccaccattagtatttgaggga

SEQ ID NO: 4147170 - DNA, 25 bp, Homo sapien
gtttcctccaccattagtatttgag

SEQ ID NO: 4147171 - DNA, 25 bp, Homo sapien
ttctgtaggcggtgcaacttgtgcc

SEQ ID NO: 4147172 - DNA, 25 bp, Homo sapien
ttttgtcctgtgcataactggagag

SEQ ID NO: 4147173 - DNA, 25 bp, Homo sapien
tgtgcctccaaggatttgaagagca

SEQ ID NO: 4147174 - DNA, 25 bp, Homo sapien
cagttcttttgcaagggtgaaggca

SEQ ID NO: 4147175 - DNA, 25 bp, Homo sapien
catttgtaggcccatcgctgctacc

SEQ ID NO: 4147176 - DNA, 25 bp, Homo sapien
tcgtgaacggattctccccatggct

SEQ ID NO: 4147177 - DNA, 25 bp, Homo sapien
tggaaacgctttgcacatagatgct

SEQ ID NO: 4147178 - DNA, 25 bp, Homo sapien
gctctcgccgaagccagtgggagtt

SEQ ID NO: 4147179 - DNA, 25 bp, Homo sapien
gtttcggcaccacaataatgcacga

SEQ ID NO: 4147180 - DNA, 25 bp, Homo sapien
gcccactttgtaatagtcctgatga

SEQ ID NO: 4147181 - DNA, 25 bp, Homo sapien
taatgcacgacagaagatgtaacat

SEQ ID NO: 4147182 - DNA, 25 bp, Homo sapien
ttaaaggattcattatcttgctgag

SEQ ID NO: 4147183 - DNA, 25 bp, Homo sapien
ttccctgcagtcatgataccccggt

SEQ ID NO: 4147184 - DNA, 25 bp, Homo sapien
ccagaggttggaataaatggccttc

SEQ ID NO: 4147185 - DNA, 25 bp, Homo sapien
aatggcattccgtaaggtgtgacag

SEQ ID NO: 4147186 - DNA, 25 bp, Homo sapien
tgtgacagaggaggccatctggcac

SEQ ID NO: 4147187 - DNA, 25 bp, Homo sapien
gacaacatgtgttctggatataata

SEQ ID NO: 4147188 - DNA, 25 bp, Homo sapien
cctgtgattacgttcagaaaagact

SEQ ID NO: 4147189 - DNA, 25 bp, Homo sapien
cagttagaggcaagggaggatccac

SEQ ID NO: 4147190 - DNA, 25 bp, Homo sapien
gtgctaagtagggttaaacctgtga

SEQ ID NO: 4147191 - DNA, 25 bp, Homo sapien
aaatcagtcgattggggtcgtctcc

SEQ ID NO: 4147192 - DNA, 25 bp, Homo sapien
tagttcgtctatgaaaaatcagtcg

SEQ ID NO: 4147193 - DNA, 25 bp, Homo sapien
ctccctttaccagacgcccataggg

SEQ ID NO: 4147194 - DNA, 25 bp, Homo sapien
gtcgtctccctttaccagacgccca

SEQ ID NO: 4147195 - DNA, 25 bp, Homo sapien
taggtattccacaggacgggaagtc

SEQ ID NO: 4147196 - DNA, 25 bp, Homo sapien
ggaagtctgattctgtccatggctg

SEQ ID NO: 4147197 - DNA, 25 bp, Homo sapien
gacgggaagtctgattctgtccatg

SEQ ID NO: 4147198 - DNA, 25 bp, Homo sapien
tccacaggacgggaagtctgattct

SEQ ID NO: 4147199 - DNA, 25 bp, Homo sapien
ccactggtattcctggctttcgtgg

SEQ ID NO: 4147200 - DNA, 25 bp, Homo sapien
actggtattcctggctttcgtggtg

SEQ ID NO: 4147201 - DNA, 25 bp, Homo sapien
tcagcagccactggtattcctggct

SEQ ID NO: 4147202 - DNA, 25 bp, Homo sapien
agcagccactggtattcctggcttt

SEQ ID NO: 4147203 - DNA, 25 bp, Homo sapien
caaactgtgtctctattcttgcatt

SEQ ID NO: 4147204 - DNA, 25 bp, Homo sapien
ccttgtccttccttatacaatcgct

SEQ ID NO: 4147205 - DNA, 25 bp, Homo sapien
gtccttccttatacaatcgcttttg

SEQ ID NO: 4147206 - DNA, 25 bp, Homo sapien
gcaaactgtgtctctattcttgcat

SEQ ID NO: 4147207 - DNA, 25 bp, Homo sapien
ttataacgcccccagaaagagtcga

SEQ ID NO: 4147208 - DNA, 25 bp, Homo sapien
ccaaggtgtccactccacttggtaa

SEQ ID NO: 4147209 - DNA, 25 bp, Homo sapien
aaatttattggccaaggtgtccact

SEQ ID NO: 4147210 - DNA, 25 bp, Homo sapien
gaaagagtcgaagatgaaacatgac

SEQ ID NO: 4147211 - DNA, 25 bp, Homo sapien
gactgatgcatgtggcaagaggcta

SEQ ID NO: 4147212 - DNA, 25 bp, Homo sapien
tcgatagtggacaggcaaggaacag

SEQ ID NO: 4147213 - DNA, 25 bp, Homo sapien
aaactgtccagcgatgcatgaatgg

SEQ ID NO: 4147214 - DNA, 25 bp, Homo sapien
gaagcagcaactaatgtccagtcct

SEQ ID NO: 4147215 - DNA, 25 bp, Homo sapien
gcagtagtgtccatttaagctctaa

SEQ ID NO: 4147216 - DNA, 25 bp, Homo sapien
cttactcaatgagccagcatcctct

SEQ ID NO: 4147217 - DNA, 25 bp, Homo sapien
tcagctccttactcaatgagccagc

SEQ ID NO: 4147218 - DNA, 25 bp, Homo sapien
cagtagtgtccatttaagctctaag

SEQ ID NO: 4147219 - DNA, 25 bp, Homo sapien
taaaaaagggttgtcatccagatcc

SEQ ID NO: 4147220 - DNA, 25 bp, Homo sapien
cacagtaagagtaagcagttgctgc

SEQ ID NO: 4147221 - DNA, 25 bp, Homo sapien
taccagtggcccttgtaccaggact

SEQ ID NO: 4147222 - DNA, 25 bp, Homo sapien
gagtgcttactggttctggacaagt

SEQ ID NO: 4147223 - DNA, 25 bp, Homo sapien
aagaaaagaagagttccaggatctg

SEQ ID NO: 4147224 - DNA, 25 bp, Homo sapien
agaaaagaagagttccaggatctgg

SEQ ID NO: 4147225 - DNA, 25 bp, Homo sapien
tgagactcttatctctacattaaaa

SEQ ID NO: 4147226 - DNA, 25 bp, Homo sapien
taaaaaatggaatcagcggccaggc

SEQ ID NO: 4147227 - DNA, 25 bp, Homo sapien
gattattgcagtctatggcttgcca

SEQ ID NO: 4147228 - DNA, 25 bp, Homo sapien
tagtgtagtggcttgtacccaagac

SEQ ID NO: 4147229 - DNA, 25 bp, Homo sapien
ctggaggccagaggaaatatcctaa

SEQ ID NO: 4147230 - DNA, 25 bp, Homo sapien
ctggtcaacatggcgaaacctggta

SEQ ID NO: 4147231 - DNA, 25 bp, Homo sapien
gtcaacatggcgaaacctggtatct

SEQ ID NO: 4147232 - DNA, 25 bp, Homo sapien
ggtcaacatggcgaaacctggtatc

SEQ ID NO: 4147233 - DNA, 25 bp, Homo sapien
tcaacatggcgaaacctggtatctg

SEQ ID NO: 4147234 - DNA, 25 bp, Homo sapien
actggtaagattgtggtcataaggc

SEQ ID NO: 4147235 - DNA, 25 bp, Homo sapien
tgtctctacctaggtggccaggagc

SEQ ID NO: 4147236 - DNA, 25 bp, Homo sapien
ggaagtgtctctacctaggtggcca

SEQ ID NO: 4147237 - DNA, 25 bp, Homo sapien
ggcccagcaaactttgagggctgct

SEQ ID NO: 4147238 - DNA, 25 bp, Homo sapien
tagcatttgaattatgtgaccatta

SEQ ID NO: 4147239 - DNA, 25 bp, Homo sapien
ccattaattaaggaagttgttatga

SEQ ID NO: 4147240 - DNA, 25 bp, Homo sapien
aagcagtcgttactgagttaccaga

SEQ ID NO: 4147241 - DNA, 25 bp, Homo sapien
gacactggaagcagtcgttactgag

SEQ ID NO: 4147242 - DNA, 25 bp, Homo sapien
tcaaagactaatttgtatatatctt

SEQ ID NO: 4147243 - DNA, 25 bp, Homo sapien
aggtgaaagatctttcaaagactaa

SEQ ID NO: 4147244 - DNA, 25 bp, Homo sapien
ttcaaagactaatttgtatatatct

SEQ ID NO: 4147245 - DNA, 25 bp, Homo sapien
caagtgcatgatctatgggattatt

SEQ ID NO: 4147246 - DNA, 25 bp, Homo sapien
tttaatatcgtgcaaataatgcccc

SEQ ID NO: 4147247 - DNA, 25 bp, Homo sapien
taatgtccgttctttcacctgttac

SEQ ID NO: 4147248 - DNA, 25 bp, Homo sapien
tatgctcagtctctatagttgttct

SEQ ID NO: 4147249 - DNA, 25 bp, Homo sapien
gagataactttattcgaaggaggca

SEQ ID NO: 4147250 - DNA, 25 bp, Homo sapien
gaaagtgttccgcaggttcaaatgc

SEQ ID NO: 4147251 - DNA, 25 bp, Homo sapien
gcactggagataactttattcgaag

SEQ ID NO: 4147252 - DNA, 25 bp, Homo sapien
tgttccgcaggttcaaatgcagcac

SEQ ID NO: 4147253 - DNA, 25 bp, Homo sapien
tgtggtcactgtgtaacttcaggta

SEQ ID NO: 4147254 - DNA, 25 bp, Homo sapien
tactgttgcaatcaatagtgaagag

SEQ ID NO: 4147255 - DNA, 25 bp, Homo sapien
tagaaatttggtgtcctggacatgg

SEQ ID NO: 4147256 - DNA, 25 bp, Homo sapien
caattctggtgttcacaggatctta

SEQ ID NO: 4147257 - DNA, 25 bp, Homo sapien
tgaaccatccaaggaagatatgtcc

SEQ ID NO: 4147258 - DNA, 25 bp, Homo sapien
tccaggctcagtgtgcataatggca

SEQ ID NO: 4147259 - DNA, 25 bp, Homo sapien
cacaattaacaagggtgaaccatcc

SEQ ID NO: 4147260 - DNA, 25 bp, Homo sapien
tagtgtacacttagatcattctggg

SEQ ID NO: 4147261 - DNA, 25 bp, Homo sapien
tctgtggaaatcgaatcgtctcttc

SEQ ID NO: 4147262 - DNA, 25 bp, Homo sapien
ggaaatcgaatcgtctcttcattga

SEQ ID NO: 4147263 - DNA, 25 bp, Homo sapien
aggtctgtgccggaataggaaaggt

SEQ ID NO: 4147264 - DNA, 25 bp, Homo sapien
tcttctgtggaaatcgaatcgtctc

SEQ ID NO: 4147265 - DNA, 25 bp, Homo sapien
tcctgggccgttgtcagcttctggc

SEQ ID NO: 4147266 - DNA, 25 bp, Homo sapien
tttggactcgcagagaaaggctcgt

SEQ ID NO: 4147267 - DNA, 25 bp, Homo sapien
ttctgagcgcctcctgaaagcagtc

SEQ ID NO: 4147268 - DNA, 25 bp, Homo sapien
tagacaagtacaggtgcctcttagg

SEQ ID NO: 4147269 - DNA, 25 bp, Homo sapien
tcattttactaatgttgagagggta

SEQ ID NO: 4147270 - DNA, 25 bp, Homo sapien
cattttactaatgttgagagggtac

SEQ ID NO: 4147271 - DNA, 25 bp, Homo sapien
taagtgtgtgcgaagccaaggctga

SEQ ID NO: 4147272 - DNA, 25 bp, Homo sapien
acgggtaagtgtgtgcgaagccaag

SEQ ID NO: 4147273 - DNA, 25 bp, Homo sapien
gtgcgaagccaaggctgacactttt

SEQ ID NO: 4147274 - DNA, 25 bp, Homo sapien
tgtgtgcgaagccaaggctgacact

SEQ ID NO: 4147275 - DNA, 25 bp, Homo sapien
tgtcccctggaataggcagtgtctc

SEQ ID NO: 4147276 - DNA, 25 bp, Homo sapien
ccagggatgggtatactacaagttc

SEQ ID NO: 4147277 - DNA, 25 bp, Homo sapien
gactcctgtttagtggtgtcccctg

SEQ ID NO: 4147278 - DNA, 25 bp, Homo sapien
cacagcgggcgtctgattgagccag

SEQ ID NO: 4147279 - DNA, 25 bp, Homo sapien
gaagccattgtacgcatcgtatctg

SEQ ID NO: 4147280 - DNA, 25 bp, Homo sapien
taaccttattgaaatctctgccggg

SEQ ID NO: 4147281 - DNA, 25 bp, Homo sapien
tgaggcgactccttccaataatgaa

SEQ ID NO: 4147282 - DNA, 25 bp, Homo sapien
tctctgccgggtttagtcacaagtc

SEQ ID NO: 4147283 - DNA, 25 bp, Homo sapien
gaaagaagcagcatatgcgtacacc

SEQ ID NO: 4147284 - DNA, 25 bp, Homo sapien
gcatatgcgtacacccttgccaggc

SEQ ID NO: 4147285 - DNA, 25 bp, Homo sapien
gaagcagcatatgcgtacacccttg

SEQ ID NO: 4147286 - DNA, 25 bp, Homo sapien
gcagcatatgcgtacacccttgcca

SEQ ID NO: 4147287 - DNA, 25 bp, Homo sapien
tcgctgaagtccagatgctgagctt

SEQ ID NO: 4147288 - DNA, 25 bp, Homo sapien
ttcgctgaagtccagatgctgagct

SEQ ID NO: 4147289 - DNA, 25 bp, Homo sapien
tttcgctgaagtccagatgctgagc

SEQ ID NO: 4147290 - DNA, 25 bp, Homo sapien
ctttcgctgaagtccagatgctgag

SEQ ID NO: 4147291 - DNA, 25 bp, Homo sapien
tccccacccaagtgaagaaggacat

SEQ ID NO: 4147292 - DNA, 25 bp, Homo sapien
ttccccacccaagtgaagaaggaca

SEQ ID NO: 4147293 - DNA, 25 bp, Homo sapien
tgttgctgataaagcgccctggtgt

SEQ ID NO: 4147294 - DNA, 25 bp, Homo sapien
gaatcaggtttgtgcttgctatcat

SEQ ID NO: 4147295 - DNA, 25 bp, Homo sapien
taatttctgttgctgataaagcgcc

SEQ ID NO: 4147296 - DNA, 25 bp, Homo sapien
gctatcattattaataggagtatta

SEQ ID NO: 4147297 - DNA, 25 bp, Homo sapien
tgtttcccagcgagtacacaagtat

SEQ ID NO: 4147298 - DNA, 25 bp, Homo sapien
tcctagatgagataccggtgggtcc

SEQ ID NO: 4147299 - DNA, 25 bp, Homo sapien
gctgcctcttaacggaagtgtggaa

SEQ ID NO: 4147300 - DNA, 25 bp, Homo sapien
ttagcactttgttcaggcgacccgt

SEQ ID NO: 4147301 - DNA, 25 bp, Homo sapien
tgtactaagtcacgtgaaaggcagt

SEQ ID NO: 4147302 - DNA, 25 bp, Homo sapien
tgtatagaaacgtctttgtctccag

SEQ ID NO: 4147303 - DNA, 25 bp, Homo sapien
gagcccgcctgtgcgaattcccatt

SEQ ID NO: 4147304 - DNA, 25 bp, Homo sapien
cctgatcaagtgacagcgtggcgtc

SEQ ID NO: 4147305 - DNA, 25 bp, Homo sapien
tgtccatttagtacttattggcaat

SEQ ID NO: 4147306 - DNA, 25 bp, Homo sapien
tttagtacttattggcaatactggg

SEQ ID NO: 4147307 - DNA, 25 bp, Homo sapien
catttagtacttattggcaatactg

SEQ ID NO: 4147308 - DNA, 25 bp, Homo sapien
tccatttagtacttattggcaatac

SEQ ID NO: 4147309 - DNA, 25 bp, Homo sapien
taggttacagacaagtaatgacatg

SEQ ID NO: 4147310 - DNA, 25 bp, Homo sapien
tctgaacttttagcagggtggctgt

SEQ ID NO: 4147311 - DNA, 25 bp, Homo sapien
gctggcttcaaactcgtgagtgcaa

SEQ ID NO: 4147312 - DNA, 25 bp, Homo sapien
tgtaattctttcaggccgtatatct

SEQ ID NO: 4147313 - DNA, 25 bp, Homo sapien
gttgtatctatttgctatctgtccc

SEQ ID NO: 4147314 - DNA, 25 bp, Homo sapien
tcagtattcgatactttcccttaaa

SEQ ID NO: 4147315 - DNA, 25 bp, Homo sapien
cctgacccagggattcctattttct

SEQ ID NO: 4147316 - DNA, 25 bp, Homo sapien
gatctcctttacctgtcttcagtat

SEQ ID NO: 4147317 - DNA, 25 bp, Homo sapien
tgtccagccctgtgaaacgagcgct

SEQ ID NO: 4147318 - DNA, 25 bp, Homo sapien
tccttgtgtataacggaggtacata

SEQ ID NO: 4147319 - DNA, 25 bp, Homo sapien
gtacagaggtatgatgactgtgacc

SEQ ID NO: 4147320 - DNA, 25 bp, Homo sapien
catatcttgagtcccttgtttggag

SEQ ID NO: 4147321 - DNA, 25 bp, Homo sapien
gtacacctctttcgaatctcttcag

SEQ ID NO: 4147322 - DNA, 25 bp, Homo sapien
aatctcttcagaggaaattcctcct

SEQ ID NO: 4147323 - DNA, 25 bp, Homo sapien
ttcagaggaaattcctccttaatac

SEQ ID NO: 4147324 - DNA, 25 bp, Homo sapien
tcctttcgtacacctctttcgaatc

SEQ ID NO: 4147325 - DNA, 25 bp, Homo sapien
tcgtcagtagcacctgagtcatttg

SEQ ID NO: 4147326 - DNA, 25 bp, Homo sapien
cagtagcacctgagtcatttgactg

SEQ ID NO: 4147327 - DNA, 25 bp, Homo sapien
cctgagtcatttgactgttggaaac

SEQ ID NO: 4147328 - DNA, 25 bp, Homo sapien
gggcatcgtcagtagcacctgagtc

SEQ ID NO: 4147329 - DNA, 25 bp, Homo sapien
tcatggttctaataggtatttcagg

SEQ ID NO: 4147330 - DNA, 25 bp, Homo sapien
gctcccccatctgcactgaatttct

SEQ ID NO: 4147331 - DNA, 25 bp, Homo sapien
catggttctaataggtatttcagga

SEQ ID NO: 4147332 - DNA, 25 bp, Homo sapien
ccccatctgcactgaatttctgcac

SEQ ID NO: 4147333 - DNA, 25 bp, Homo sapien
tgtgtccatctctaaaggcatggat

SEQ ID NO: 4147334 - DNA, 25 bp, Homo sapien
catgtgtccatctctaaaggcatgg

SEQ ID NO: 4147335 - DNA, 25 bp, Homo sapien
gtcatgtgtccatctctaaaggcat

SEQ ID NO: 4147336 - DNA, 25 bp, Homo sapien
gtccatctctaaaggcatggatggc

SEQ ID NO: 4147337 - DNA, 25 bp, Homo sapien
ccattaagtcttggtggcagtcttc

SEQ ID NO: 4147338 - DNA, 25 bp, Homo sapien
gattcattcacggaggcgattccct

SEQ ID NO: 4147339 - DNA, 25 bp, Homo sapien
caggaggttccgatcatgccattaa

SEQ ID NO: 4147340 - DNA, 25 bp, Homo sapien
tcagattgtggaactagctccaggg

SEQ ID NO: 4147341 - DNA, 25 bp, Homo sapien
tacagccttgggagcttgtcctgct

SEQ ID NO: 4147342 - DNA, 25 bp, Homo sapien
cttgggagcttgtcctgctgcacat

SEQ ID NO: 4147343 - DNA, 25 bp, Homo sapien
attcccttgtaaatgcaagtacagc

SEQ ID NO: 4147344 - DNA, 25 bp, Homo sapien
atgcaagtacagccttgggagcttg

SEQ ID NO: 4147345 - DNA, 25 bp, Homo sapien
cctgttgctggttcactggtcgttg

SEQ ID NO: 4147346 - DNA, 25 bp, Homo sapien
cactggtcgttgttttactgataga

SEQ ID NO: 4147347 - DNA, 25 bp, Homo sapien
actgatagatgacgcatgtttcgca

SEQ ID NO: 4147348 - DNA, 25 bp, Homo sapien
tgtttcgcagtccattgctcctcac

SEQ ID NO: 4147349 - DNA, 25 bp, Homo sapien
tagcatgaggtcttagtggcacgca

SEQ ID NO: 4147350 - DNA, 25 bp, Homo sapien
tgcacgggacaagtaagccactcct

SEQ ID NO: 4147351 - DNA, 25 bp, Homo sapien
tctgctgaaagcttaccgtgggagt

SEQ ID NO: 4147352 - DNA, 25 bp, Homo sapien
tagactcaaggacgggacagaactc

SEQ ID NO: 4147353 - DNA, 25 bp, Homo sapien
actgagtgcattgagataggctaaa

SEQ ID NO: 4147354 - DNA, 25 bp, Homo sapien
tatgtttcgctagtagggcgcctgt

SEQ ID NO: 4147355 - DNA, 25 bp, Homo sapien
tcaggagagagcttgtatgtttcgc

SEQ ID NO: 4147356 - DNA, 25 bp, Homo sapien
taagaaattataagccgagcatggt

SEQ ID NO: 4147357 - DNA, 25 bp, Homo sapien
tctcagcacatgaacagagtgactg

SEQ ID NO: 4147358 - DNA, 25 bp, Homo sapien
tggaattggatttggtaaatattct

SEQ ID NO: 4147359 - DNA, 25 bp, Homo sapien
taaccaagcgatgaaagctttgcag

SEQ ID NO: 4147360 - DNA, 25 bp, Homo sapien
ctactaataacctaaccaagcgatg

SEQ ID NO: 4147361 - DNA, 25 bp, Homo sapien
gacagctattcgcaaaaactttctg

SEQ ID NO: 4147362 - DNA, 25 bp, Homo sapien
gatctatgcagaaaagacccggcat

SEQ ID NO: 4147363 - DNA, 25 bp, Homo sapien
tgtgaaaccttgctactgacagcta

SEQ ID NO: 4147364 - DNA, 25 bp, Homo sapien
taatcttgaggaccatatagatggc

SEQ ID NO: 4147365 - DNA, 25 bp, Homo sapien
cgtgcagacaattttagtacctact

SEQ ID NO: 4147366 - DNA, 25 bp, Homo sapien
gagtcgtccagggtagaggagctca

SEQ ID NO: 4147367 - DNA, 25 bp, Homo sapien
gagctcagcgtgcagacaattttag

SEQ ID NO: 4147368 - DNA, 25 bp, Homo sapien
tttcggagtcgtccagggtagagga

SEQ ID NO: 4147369 - DNA, 25 bp, Homo sapien
aatgtcgttcacatttcttctgaga

SEQ ID NO: 4147370 - DNA, 25 bp, Homo sapien
caactcagaatgtcgttcacatttc

SEQ ID NO: 4147371 - DNA, 25 bp, Homo sapien
cagtgtcaactcagaatgtcgttca

SEQ ID NO: 4147372 - DNA, 25 bp, Homo sapien
gaatgtcgttcacatttcttctgag

SEQ ID NO: 4147373 - DNA, 25 bp, Homo sapien
gcagctgattggggcaggttctgct

SEQ ID NO: 4147374 - DNA, 25 bp, Homo sapien
cagctgattggggcaggttctgctc

SEQ ID NO: 4147375 - DNA, 25 bp, Homo sapien
gagcagctgattggggcaggttctg

SEQ ID NO: 4147376 - DNA, 25 bp, Homo sapien
agcagctgattggggcaggttctgc

SEQ ID NO: 4147377 - DNA, 25 bp, Homo sapien
tatgtattcttgggagcctttccca

SEQ ID NO: 4147378 - DNA, 25 bp, Homo sapien
atatgtattcttgggagcctttccc

SEQ ID NO: 4147379 - DNA, 25 bp, Homo sapien
acagatgattgggagaatggagttg

SEQ ID NO: 4147380 - DNA, 25 bp, Homo sapien
tttgggcggtacttggtgtgaaaga

SEQ ID NO: 4147381 - DNA, 25 bp, Homo sapien
gatgattgggagaatggagttggta

SEQ ID NO: 4147382 - DNA, 25 bp, Homo sapien
tggtgtgaaagacagatgattggga

SEQ ID NO: 4147383 - DNA, 25 bp, Homo sapien
tgccaagaggaacgcaggtgtcgct

SEQ ID NO: 4147384 - DNA, 25 bp, Homo sapien
ggtaacccttactgcaacagcactt

SEQ ID NO: 4147385 - DNA, 25 bp, Homo sapien
tcgctcatgaaagtgatgcaggcct

SEQ ID NO: 4147386 - DNA, 25 bp, Homo sapien
tatcgagatgatcctgtgccaagag

SEQ ID NO: 4147387 - DNA, 25 bp, Homo sapien
tatttgagttggcagcgacttctct

SEQ ID NO: 4147388 - DNA, 25 bp, Homo sapien
tgcctcggcaagaaaccgcagcctg

SEQ ID NO: 4147389 - DNA, 25 bp, Homo sapien
tgctgaaggtttccactggcaggat

SEQ ID NO: 4147390 - DNA, 25 bp, Homo sapien
gccttcgccatgcacacagtttgtt

SEQ ID NO: 4147391 - DNA, 25 bp, Homo sapien
gcagaagccttgcagtaaggatatt

SEQ ID NO: 4147392 - DNA, 25 bp, Homo sapien
gagctttctgcctttggtttacaaa

SEQ ID NO: 4147393 - DNA, 25 bp, Homo sapien
tgtaacttgcaggaccttttaagca

SEQ ID NO: 4147394 - DNA, 25 bp, Homo sapien
gacgcccatccatgaggcacaactg

SEQ ID NO: 4147395 - DNA, 25 bp, Homo sapien
gtgggcaatccgttcattcatgacc

SEQ ID NO: 4147396 - DNA, 25 bp, Homo sapien
cagttaacttgaaccttgtggcctg

SEQ ID NO: 4147397 - DNA, 25 bp, Homo sapien
attcatgaccagatgttcagtgtag

SEQ ID NO: 4147398 - DNA, 25 bp, Homo sapien
gtgtagtaacgctccgcagttaact

SEQ ID NO: 4147399 - DNA, 25 bp, Homo sapien
ttgagatgtggtaagaggaaatttc

SEQ ID NO: 4147400 - DNA, 25 bp, Homo sapien
ctttcaaaggttgagatgtggtaag

SEQ ID NO: 4147401 - DNA, 25 bp, Homo sapien
tttcaggtgtatgcctttcaaaggt

SEQ ID NO: 4147402 - DNA, 25 bp, Homo sapien
caggtgtatgcctttcaaaggttga

SEQ ID NO: 4147403 - DNA, 25 bp, Homo sapien
gttgtagggaagggagtcgttggca

SEQ ID NO: 4147404 - DNA, 25 bp, Homo sapien
tgctgggagcctccggaataacttt

SEQ ID NO: 4147405 - DNA, 25 bp, Homo sapien
agcctccggaataactttaatgtag

SEQ ID NO: 4147406 - DNA, 25 bp, Homo sapien
actgctgggagcctccggaataact

SEQ ID NO: 4147407 - DNA, 25 bp, Homo sapien
gattaatacacctctggaagttagc

SEQ ID NO: 4147408 - DNA, 25 bp, Homo sapien
gaccacttcttcagctcggcagtga

SEQ ID NO: 4147409 - DNA, 25 bp, Homo sapien
cccaggctggacgttgtttcatgaa

SEQ ID NO: 4147410 - DNA, 25 bp, Homo sapien
gaaagtgtttggcttctccaatggg

SEQ ID NO: 4147411 - DNA, 25 bp, Homo sapien
atggatttggaaaccagagtctgta

SEQ ID NO: 4147412 - DNA, 25 bp, Homo sapien
ccagagtctgtattaagaacagtaa

SEQ ID NO: 4147413 - DNA, 25 bp, Homo sapien
aatggatttggaaaccagagtctgt

SEQ ID NO: 4147414 - DNA, 25 bp, Homo sapien
taagaacagtaaaatggctgggtgt

SEQ ID NO: 4147415 - DNA, 25 bp, Homo sapien
gttctgatgccttcccctcgtgctt

SEQ ID NO: 4147416 - DNA, 25 bp, Homo sapien
agcctgcatgaagccggaactccca

SEQ ID NO: 4147417 - DNA, 25 bp, Homo sapien
gggtgataactccatgggccatgca

SEQ ID NO: 4147418 - DNA, 25 bp, Homo sapien
tgtccccttgggaatgatgtcacct

SEQ ID NO: 4147419 - DNA, 25 bp, Homo sapien
gggtgaagacagacagaacccagac

SEQ ID NO: 4147420 - DNA, 25 bp, Homo sapien
ttcaccaaaaagggtgaagacagac

SEQ ID NO: 4147421 - DNA, 25 bp, Homo sapien
caccaaaaagggtgaagacagacag

SEQ ID NO: 4147422 - DNA, 25 bp, Homo sapien
ccacacttcaccaaaaagggtgaag

SEQ ID NO: 4147423 - DNA, 25 bp, Homo sapien
cacgctgcaaagtcctcgagtcagg

SEQ ID NO: 4147424 - DNA, 25 bp, Homo sapien
tgagttagcaatgccgaaatcgctc

SEQ ID NO: 4147425 - DNA, 25 bp, Homo sapien
ttataagtaaggaccgtcggattga

SEQ ID NO: 4147426 - DNA, 25 bp, Homo sapien
tcgagtcaggctttccgtggtatgg

SEQ ID NO: 4147427 - DNA, 25 bp, Homo sapien
ccattggagatttgtgatactcctc

SEQ ID NO: 4147428 - DNA, 25 bp, Homo sapien
ccagagaacggccactgaactctgc

SEQ ID NO: 4147429 - DNA, 25 bp, Homo sapien
gtgatactcctcaagagtggattcc

SEQ ID NO: 4147430 - DNA, 25 bp, Homo sapien
gatttgtgatactcctcaagagtgg

SEQ ID NO: 4147431 - DNA, 25 bp, Homo sapien
tcgcactctgtctatggagaataag

SEQ ID NO: 4147432 - DNA, 25 bp, Homo sapien
ttattctcgcactctgtctatggag

SEQ ID NO: 4147433 - DNA, 25 bp, Homo sapien
tatggagaataaggcttcctcatcc

SEQ ID NO: 4147434 - DNA, 25 bp, Homo sapien
tctgtctatggagaataaggcttcc

SEQ ID NO: 4147435 - DNA, 25 bp, Homo sapien
tcatgagtagcgctggtgatctgat

SEQ ID NO: 4147436 - DNA, 25 bp, Homo sapien
ctgcaggcgcccagggtgttaggcc

SEQ ID NO: 4147437 - DNA, 25 bp, Homo sapien
gctggtgatctgatcccaggattct

SEQ ID NO: 4147438 - DNA, 25 bp, Homo sapien
ccctatgttaggtggggcgtagcct

SEQ ID NO: 4147439 - DNA, 25 bp, Homo sapien
tctgatgtagggaagaagccgcact

SEQ ID NO: 4147440 - DNA, 25 bp, Homo sapien
ggcctgctgaattggaagcgcccca

SEQ ID NO: 4147441 - DNA, 25 bp, Homo sapien
gtgggctggcccgtaataatacaat

SEQ ID NO: 4147442 - DNA, 25 bp, Homo sapien
ccctgacagttgacggaagtgctgc

SEQ ID NO: 4147443 - DNA, 25 bp, Homo sapien
ctgagaataagtagtgcatgttgag

SEQ ID NO: 4147444 - DNA, 25 bp, Homo sapien
gaggtttatcttcgcttttatgtgc

SEQ ID NO: 4147445 - DNA, 25 bp, Homo sapien
cacttgcttaacattgagcacattt

SEQ ID NO: 4147446 - DNA, 25 bp, Homo sapien
tgagcacatttgagttgcatttcat

SEQ ID NO: 4147447 - DNA, 25 bp, Homo sapien
ggtagcctggagttagcacacacat

SEQ ID NO: 4147448 - DNA, 25 bp, Homo sapien
gaggtagcctggagttagcacacac

SEQ ID NO: 4147449 - DNA, 25 bp, Homo sapien
aggtagcctggagttagcacacaca

SEQ ID NO: 4147450 - DNA, 25 bp, Homo sapien
cttttgggggctccgagagtgatta

SEQ ID NO: 4147451 - DNA, 25 bp, Homo sapien
aatatttggcaatgacatgtacgtc

SEQ ID NO: 4147452 - DNA, 25 bp, Homo sapien
tgattaattttagagacgtcgccag

SEQ ID NO: 4147453 - DNA, 25 bp, Homo sapien
tctttaccctcctggcgctgacttt

SEQ ID NO: 4147454 - DNA, 25 bp, Homo sapien
ctttacgcttgtgttccttacaggg

SEQ ID NO: 4147455 - DNA, 25 bp, Homo sapien
aaaatggtccattgcaagagattgc

SEQ ID NO: 4147456 - DNA, 25 bp, Homo sapien
tgttattagataaacctacggtgcc

SEQ ID NO: 4147457 - DNA, 25 bp, Homo sapien
tcagtgctgtgaagtctggcaagaa

SEQ ID NO: 4147458 - DNA, 25 bp, Homo sapien
tatgttgcatgagatctccttgaac

SEQ ID NO: 4147459 - DNA, 25 bp, Homo sapien
aattcgtcgatctgtgtttttagac

SEQ ID NO: 4147460 - DNA, 25 bp, Homo sapien
acactcgtttctgggtaattcgtcg

SEQ ID NO: 4147461 - DNA, 25 bp, Homo sapien
tttttagacgtgatgttagtttgac

SEQ ID NO: 4147462 - DNA, 25 bp, Homo sapien
attacaaaatatatgcctctgcagg

SEQ ID NO: 4147463 - DNA, 25 bp, Homo sapien
ttacaaaatatatgcctctgcaggt

SEQ ID NO: 4147464 - DNA, 25 bp, Homo sapien
tattacaaaatatatgcctctgcag

SEQ ID NO: 4147465 - DNA, 25 bp, Homo sapien
actggacactcagcctttgcagaaa

SEQ ID NO: 4147466 - DNA, 25 bp, Homo sapien
aatgtatatttgatgccacctctca

SEQ ID NO: 4147467 - DNA, 25 bp, Homo sapien
tttgcagaaatgtatatttgatgcc

SEQ ID NO: 4147468 - DNA, 25 bp, Homo sapien
caatcctgttcaggctggatcccct

SEQ ID NO: 4147469 - DNA, 25 bp, Homo sapien
tatttggcttcttgacttcccaact

SEQ ID NO: 4147470 - DNA, 25 bp, Homo sapien
cccaggagccagaggaaccctggct

SEQ ID NO: 4147471 - DNA, 25 bp, Homo sapien
ttcttgacttcccaactcccaggag

SEQ ID NO: 4147472 - DNA, 25 bp, Homo sapien
cttgctatttggcttcttgacttcc

SEQ ID NO: 4147473 - DNA, 25 bp, Homo sapien
gggtgaaaagggtagagcagaggcc

SEQ ID NO: 4147474 - DNA, 25 bp, Homo sapien
ggtgaaaagggtagagcagaggcca

SEQ ID NO: 4147475 - DNA, 25 bp, Homo sapien
gcttcttggcagtgcctatggagaa

SEQ ID NO: 4147476 - DNA, 25 bp, Homo sapien
gcagtgcctatggagaagggctgtt

SEQ ID NO: 4147477 - DNA, 25 bp, Homo sapien
tcactgggggggaactgatatttga

SEQ ID NO: 4147478 - DNA, 25 bp, Homo sapien
gttccagtgaaaaatcgggctttca

SEQ ID NO: 4147479 - DNA, 25 bp, Homo sapien
tggtctgcagcttttacggttttta

SEQ ID NO: 4147480 - DNA, 25 bp, Homo sapien
tgaaaaatcgggctttcagttgagg

SEQ ID NO: 4147481 - DNA, 25 bp, Homo sapien
tctgacaggatttcagtcatgtgca

SEQ ID NO: 4147482 - DNA, 25 bp, Homo sapien
attgtcacttgaataatctgacagg

SEQ ID NO: 4147483 - DNA, 25 bp, Homo sapien
ccattgtcacttgaataatctgaca

SEQ ID NO: 4147484 - DNA, 25 bp, Homo sapien
ctgacaggatttcagtcatgtgcat

SEQ ID NO: 4147485 - DNA, 25 bp, Homo sapien
ttcagtgccattaatgcatactgac

SEQ ID NO: 4147486 - DNA, 25 bp, Homo sapien
gaaggttctctggttttcagtgcca

SEQ ID NO: 4147487 - DNA, 25 bp, Homo sapien
taacttgcagttggaaggttctctg

SEQ ID NO: 4147488 - DNA, 25 bp, Homo sapien
gccattaatgcatactgactcccat

SEQ ID NO: 4147489 - DNA, 25 bp, Homo sapien
cagcaggcgacatgtgcgtgtcagc

SEQ ID NO: 4147490 - DNA, 25 bp, Homo sapien
catgtgcgtgtcagctgattgcgtc

SEQ ID NO: 4147491 - DNA, 25 bp, Homo sapien
tgtcagctgattgcgtctgaagaaa

SEQ ID NO: 4147492 - DNA, 25 bp, Homo sapien
tccttaatttatcatgagggaagac

SEQ ID NO: 4147493 - DNA, 25 bp, Homo sapien
cctcttggcccgtaataataggatg

SEQ ID NO: 4147494 - DNA, 25 bp, Homo sapien
aggcccccgaaacagcaggcctgtt

SEQ ID NO: 4147495 - DNA, 25 bp, Homo sapien
cctacagatattctatgtagcacca

SEQ ID NO: 4147496 - DNA, 25 bp, Homo sapien
cggttgactttgattaagggtgaca

SEQ ID NO: 4147497 - DNA, 25 bp, Homo sapien
tttccacatagctaactggctaggg

SEQ ID NO: 4147498 - DNA, 25 bp, Homo sapien
tggctaggggccaaggtggaaacca

SEQ ID NO: 4147499 - DNA, 25 bp, Homo sapien
taacccaatacaagtaatgtaattg

SEQ ID NO: 4147500 - DNA, 25 bp, Homo sapien
tacaagtaatgtaattggctaaata

SEQ ID NO: 4147501 - DNA, 25 bp, Homo sapien
gtgaagtattttcgatgcgtttatt

SEQ ID NO: 4147502 - DNA, 25 bp, Homo sapien
tgtgaagtattttcgatgcgtttat

SEQ ID NO: 4147503 - DNA, 25 bp, Homo sapien
tttcgatgcgtttattttgcctttc

SEQ ID NO: 4147504 - DNA, 25 bp, Homo sapien
ctgtgaagtattttcgatgcgttta

SEQ ID NO: 4147505 - DNA, 25 bp, Homo sapien
aggagagccagccgacagggttcct

SEQ ID NO: 4147506 - DNA, 25 bp, Homo sapien
gagccagccgacagggttcctttct

SEQ ID NO: 4147507 - DNA, 25 bp, Homo sapien
cgaagacttggtgaagggctacttt

SEQ ID NO: 4147508 - DNA, 25 bp, Homo sapien
tggtgaagggctacttttttggctg

SEQ ID NO: 4147509 - DNA, 25 bp, Homo sapien
tccagaaggtatgtgcagctggcag

SEQ ID NO: 4147510 - DNA, 25 bp, Homo sapien
agaatatggactttccgtgaccggt

SEQ ID NO: 4147511 - DNA, 25 bp, Homo sapien
actaggttgtcccttgctggtagat

SEQ ID NO: 4147512 - DNA, 25 bp, Homo sapien
taatcggcagttagccacagtgtta

SEQ ID NO: 4147513 - DNA, 25 bp, Homo sapien
tgttggtttgttcgtctgtctctgc

SEQ ID NO: 4147514 - DNA, 25 bp, Homo sapien
tgcatcgtctctaccactaggttgt

SEQ ID NO: 4147515 - DNA, 25 bp, Homo sapien
aaaacatttcggcaatggtgagggc

SEQ ID NO: 4147516 - DNA, 25 bp, Homo sapien
tgtgttgcagtgtcccagaagcttt

SEQ ID NO: 4147517 - DNA, 25 bp, Homo sapien
tgacaattccagtttccgaacaaaa

SEQ ID NO: 4147518 - DNA, 25 bp, Homo sapien
tgctgtcagccatgaacggatggat

SEQ ID NO: 4147519 - DNA, 25 bp, Homo sapien
tagaaagctcttatctgcccagaca

SEQ ID NO: 4147520 - DNA, 25 bp, Homo sapien
tgtgtcacccgtactgcttctctgt

SEQ ID NO: 4147521 - DNA, 25 bp, Homo sapien
gaaatgcgttttccacccaatcttc

SEQ ID NO: 4147522 - DNA, 25 bp, Homo sapien
caagccttcgagtatgatattctga

SEQ ID NO: 4147523 - DNA, 25 bp, Homo sapien
acatttgcagtccatggccttggtg

SEQ ID NO: 4147524 - DNA, 25 bp, Homo sapien
acactcacatttgcagtccatggcc

SEQ ID NO: 4147525 - DNA, 25 bp, Homo sapien
gggtatctgttgggtagaacagcag

SEQ ID NO: 4147526 - DNA, 25 bp, Homo sapien
ggcttcaagctggtgcctccctgca

SEQ ID NO: 4147527 - DNA, 25 bp, Homo sapien
tggaaaggacttagtagccactgcc

SEQ ID NO: 4147528 - DNA, 25 bp, Homo sapien
ggcatttggagtagccacaggactt

SEQ ID NO: 4147529 - DNA, 25 bp, Homo sapien
cacaggacttggaaagcgttggaaa

SEQ ID NO: 4147530 - DNA, 25 bp, Homo sapien
ctgttttgcaaccacaggccctggg

SEQ ID NO: 4147531 - DNA, 25 bp, Homo sapien
tccctgcagacttttgtactgagca

SEQ ID NO: 4147532 - DNA, 25 bp, Homo sapien
cagacttttgtactgagcagggatt

SEQ ID NO: 4147533 - DNA, 25 bp, Homo sapien
tgcagacttttgtactgagcaggga

SEQ ID NO: 4147534 - DNA, 25 bp, Homo sapien
cctgcagacttttgtactgagcagg

SEQ ID NO: 4147535 - DNA, 25 bp, Homo sapien
acaacttgattgctaggtcccggcc

SEQ ID NO: 4147536 - DNA, 25 bp, Homo sapien
aacaacttgattgctaggtcccggc

SEQ ID NO: 4147537 - DNA, 25 bp, Homo sapien
ttccagggcagacttttggaggttg

SEQ ID NO: 4147538 - DNA, 25 bp, Homo sapien
cttttggaggttgaaaaatagatgc

SEQ ID NO: 4147539 - DNA, 25 bp, Homo sapien
tttcagggcactgggtaccacaata

SEQ ID NO: 4147540 - DNA, 25 bp, Homo sapien
tcagaaacgtgaaggtggattgtgt

SEQ ID NO: 4147541 - DNA, 25 bp, Homo sapien
gacaccgagttcagaaacgtgaagg

SEQ ID NO: 4147542 - DNA, 25 bp, Homo sapien
tgtaaaagacaccgagttcagaaac

SEQ ID NO: 4147543 - DNA, 25 bp, Homo sapien
cactctgcgaaagaaaccaaagagc

SEQ ID NO: 4147544 - DNA, 25 bp, Homo sapien
agtcagtagaaaagacaaggccatc

SEQ ID NO: 4147545 - DNA, 25 bp, Homo sapien
tcactctgcgaaagaaaccaaagag

SEQ ID NO: 4147546 - DNA, 25 bp, Homo sapien
agagcttgaacaggaagtcagtaga

SEQ ID NO: 4147547 - DNA, 25 bp, Homo sapien
tgtccccagagcatgttataacctt

SEQ ID NO: 4147548 - DNA, 25 bp, Homo sapien
gaaactcaggttccgagaagctcac

SEQ ID NO: 4147549 - DNA, 25 bp, Homo sapien
tcaaaaagatgggattcaaatgcct

SEQ ID NO: 4147550 - DNA, 25 bp, Homo sapien
gaagctcactgacttgcgaaacatc

SEQ ID NO: 4147551 - DNA, 25 bp, Homo sapien
ccagggtgaaggaccagcgtgttcc

SEQ ID NO: 4147552 - DNA, 25 bp, Homo sapien
tggaagtacccaggagaatatccaa

SEQ ID NO: 4147553 - DNA, 25 bp, Homo sapien
caccacttgggctccgtgacacttt

SEQ ID NO: 4147554 - DNA, 25 bp, Homo sapien
gtcctacgaccgcattgaacaccag

SEQ ID NO: 4147555 - DNA, 25 bp, Homo sapien
gtagtccagcgagtttgttttccca

SEQ ID NO: 4147556 - DNA, 25 bp, Homo sapien
gaacaatcattctatgcaggcaaca

SEQ ID NO: 4147557 - DNA, 25 bp, Homo sapien
taatgacacttatatgccagcggaa

SEQ ID NO: 4147558 - DNA, 25 bp, Homo sapien
catttgagatagcatccagtgcacc

SEQ ID NO: 4147559 - DNA, 25 bp, Homo sapien
gccgccaagtggttctcatctgata

SEQ ID NO: 4147560 - DNA, 25 bp, Homo sapien
ggactatttctaatgagccgccaag

SEQ ID NO: 4147561 - DNA, 25 bp, Homo sapien
tgtggagttgcacaagatgggcttt

SEQ ID NO: 4147562 - DNA, 25 bp, Homo sapien
aattctgcaaggattcctgtggagt

SEQ ID NO: 4147563 - DNA, 25 bp, Homo sapien
gtccaatgcgcctttccatgagcag

SEQ ID NO: 4147564 - DNA, 25 bp, Homo sapien
gccatcagtgatgtgcttaaaagtc

SEQ ID NO: 4147565 - DNA, 25 bp, Homo sapien
tcagcgggcttcataaaaagtttgg

SEQ ID NO: 4147566 - DNA, 25 bp, Homo sapien
caaggccgaggtttcttgggccatc

SEQ ID NO: 4147567 - DNA, 25 bp, Homo sapien
tagctcatcatgtatcagtgtggcc

SEQ ID NO: 4147568 - DNA, 25 bp, Homo sapien
atttccctggcagagaaggtccact

SEQ ID NO: 4147569 - DNA, 25 bp, Homo sapien
tctggattcttactgcatgtgcata

SEQ ID NO: 4147570 - DNA, 25 bp, Homo sapien
aaggtccactttgtcggctgaggca

SEQ ID NO: 4147571 - DNA, 25 bp, Homo sapien
gacaatacaggagtggaacgccagc

SEQ ID NO: 4147572 - DNA, 25 bp, Homo sapien
cctctacataaatcagggtaaatga

SEQ ID NO: 4147573 - DNA, 25 bp, Homo sapien
tcagggtaaatgactccgcatcact

SEQ ID NO: 4147574 - DNA, 25 bp, Homo sapien
tgatctgtgacctctgtgttccatg

SEQ ID NO: 4147575 - DNA, 25 bp, Homo sapien
tgtgctagtggaaatggcaggcccc

SEQ ID NO: 4147576 - DNA, 25 bp, Homo sapien
ccaggccgatagctgagtggcttct

SEQ ID NO: 4147577 - DNA, 25 bp, Homo sapien
tcctaagcccggatttgaaccgata

SEQ ID NO: 4147578 - DNA, 25 bp, Homo sapien
catcagggtccagggattgaatcct

SEQ ID NO: 4147579 - DNA, 25 bp, Homo sapien
tattctgcacatgtgttgccactgg

SEQ ID NO: 4147580 - DNA, 25 bp, Homo sapien
aaacgatcatcatgttggatttgca

SEQ ID NO: 4147581 - DNA, 25 bp, Homo sapien
acactatatagagggtgtcttctcc

SEQ ID NO: 4147582 - DNA, 25 bp, Homo sapien
gggagaacccacaccaaacgatcat

SEQ ID NO: 4147583 - DNA, 25 bp, Homo sapien
tcacttctacatctctgcgtggccg

SEQ ID NO: 4147584 - DNA, 25 bp, Homo sapien
tcagcaggggtgttaagtcacttct

SEQ ID NO: 4147585 - DNA, 25 bp, Homo sapien
ttctacatctctgcgtggccgtcat

SEQ ID NO: 4147586 - DNA, 25 bp, Homo sapien
gggtgttaagtcacttctacatctc

SEQ ID NO: 4147587 - DNA, 25 bp, Homo sapien
cacgtccacctgacatcctgggaca

SEQ ID NO: 4147588 - DNA, 25 bp, Homo sapien
cagtcttctactcgcctttcccacg

SEQ ID NO: 4147589 - DNA, 25 bp, Homo sapien
tcccacgtccacctgacatcctggg

SEQ ID NO: 4147590 - DNA, 25 bp, Homo sapien
tcagtcttctactcgcctttcccac

SEQ ID NO: 4147591 - DNA, 25 bp, Homo sapien
tggaactgagttcgccttgctggct

SEQ ID NO: 4147592 - DNA, 25 bp, Homo sapien
cttttgaccctaaatccagctggaa

SEQ ID NO: 4147593 - DNA, 25 bp, Homo sapien
gatcatctgtctttcgggaggcaga

SEQ ID NO: 4147594 - DNA, 25 bp, Homo sapien
gaaggcaatgcctcggccacctttt

SEQ ID NO: 4147595 - DNA, 25 bp, Homo sapien
tactgctgagccaatacccacactg

SEQ ID NO: 4147596 - DNA, 25 bp, Homo sapien
ctcccttctagtacacttttccata

SEQ ID NO: 4147597 - DNA, 25 bp, Homo sapien
ttccatactgctgagccaataccca

SEQ ID NO: 4147598 - DNA, 25 bp, Homo sapien
cttcactcccttctagtacactttt

SEQ ID NO: 4147599 - DNA, 25 bp, Homo sapien
caagtggaaattttgcaagtcgact

SEQ ID NO: 4147600 - DNA, 25 bp, Homo sapien
gcagcgtgcgtagtacaatttggct

SEQ ID NO: 4147601 - DNA, 25 bp, Homo sapien
caagtcgacttctgcagcgtgcgta

SEQ ID NO: 4147602 - DNA, 25 bp, Homo sapien
cagaggttggtgcccattttgcccc

SEQ ID NO: 4147603 - DNA, 25 bp, Homo sapien
tcctcaaagaagagcgttcttgctg

SEQ ID NO: 4147604 - DNA, 25 bp, Homo sapien
gtcctgcactgtttgttccttgatc

SEQ ID NO: 4147605 - DNA, 25 bp, Homo sapien
agaagagcgttcttgctgggtttcc

SEQ ID NO: 4147606 - DNA, 25 bp, Homo sapien
cactgtttgttccttgatctggtgg

SEQ ID NO: 4147607 - DNA, 25 bp, Homo sapien
tcatctcatttcttttgggggggta

SEQ ID NO: 4147608 - DNA, 25 bp, Homo sapien
gctttgtaccatcgccaactccaat

SEQ ID NO: 4147609 - DNA, 25 bp, Homo sapien
ccccgctttgtaccatcgccaactc

SEQ ID NO: 4147610 - DNA, 25 bp, Homo sapien
ccatcgccaactccaatgatgtggc

SEQ ID NO: 4147611 - DNA, 25 bp, Homo sapien
ttgtaccatcgccaactccaatgat

SEQ ID NO: 4147612 - DNA, 25 bp, Homo sapien
caggaaacgttatgcatgtgaatca

SEQ ID NO: 4147613 - DNA, 25 bp, Homo sapien
cacctatgtggcaatgatcctgtct

SEQ ID NO: 4147614 - DNA, 25 bp, Homo sapien
tgtgaattatactagaagcccgatc

SEQ ID NO: 4147615 - DNA, 25 bp, Homo sapien
caaagacaggcacttagtaaaggat

SEQ ID NO: 4147616 - DNA, 25 bp, Homo sapien
taggtaaggtgactctgttctcagc

SEQ ID NO: 4147617 - DNA, 25 bp, Homo sapien
gttgccgatctttgcatgcactgag

SEQ ID NO: 4147618 - DNA, 25 bp, Homo sapien
gatttagagagaacccacagttgct

SEQ ID NO: 4147619 - DNA, 25 bp, Homo sapien
cagttgctttgcctttgcggtaggt

SEQ ID NO: 4147620 - DNA, 25 bp, Homo sapien
agagatgtggatgttcatatacctg

SEQ ID NO: 4147621 - DNA, 25 bp, Homo sapien
cagtgagagatgtggatgttcatat

SEQ ID NO: 4147622 - DNA, 25 bp, Homo sapien
tgagagatgtggatgttcatatacc

SEQ ID NO: 4147623 - DNA, 25 bp, Homo sapien
gtgagagatgtggatgttcatatac

SEQ ID NO: 4147624 - DNA, 25 bp, Homo sapien
gagcggctcgggcagaatctttaac

SEQ ID NO: 4147625 - DNA, 25 bp, Homo sapien
agcggctcgggcagaatctttaact

SEQ ID NO: 4147626 - DNA, 25 bp, Homo sapien
gcggctcgggcagaatctttaactg

SEQ ID NO: 4147627 - DNA, 25 bp, Homo sapien
gtgatcataacccccgtgagacgca

SEQ ID NO: 4147628 - DNA, 25 bp, Homo sapien
cgtgatcataacccccgtgagacgc

SEQ ID NO: 4147629 - DNA, 25 bp, Homo sapien
tgatcataacccccgtgagacgcac

SEQ ID NO: 4147630 - DNA, 25 bp, Homo sapien
ttcaggagggtgctctttcaaaatc

SEQ ID NO: 4147631 - DNA, 25 bp, Homo sapien
caaaatcaatggagggcacagtgct

SEQ ID NO: 4147632 - DNA, 25 bp, Homo sapien
tggtgtcagcccagcgccttcagga

SEQ ID NO: 4147633 - DNA, 25 bp, Homo sapien
agcattgacttccccacccatgggt

SEQ ID NO: 4147634 - DNA, 25 bp, Homo sapien
cttccctgcccttcttcattgtcac

SEQ ID NO: 4147635 - DNA, 25 bp, Homo sapien
ttccatctcagtcaccttccctgcc

SEQ ID NO: 4147636 - DNA, 25 bp, Homo sapien
cctgcccttcttcattgtcacctgc

SEQ ID NO: 4147637 - DNA, 25 bp, Homo sapien
cattttgactgtatcttccatctca

SEQ ID NO: 4147638 - DNA, 25 bp, Homo sapien
ccaagtatccttcacccttggattg

SEQ ID NO: 4147639 - DNA, 25 bp, Homo sapien
gagagtcttacaatgaataactcag

SEQ ID NO: 4147640 - DNA, 25 bp, Homo sapien
cttgaactggcattgtgttgtgtcc

SEQ ID NO: 4147641 - DNA, 25 bp, Homo sapien
gaggatggaacacttcccttgaact

SEQ ID NO: 4147642 - DNA, 25 bp, Homo sapien
taaggcaggccaattgggtcaaatc

SEQ ID NO: 4147643 - DNA, 25 bp, Homo sapien
catttttatgtgtgtccaaagccaa

SEQ ID NO: 4147644 - DNA, 25 bp, Homo sapien
ccactgagagctaagattgggccag

SEQ ID NO: 4147645 - DNA, 25 bp, Homo sapien
gctggatccctctgtattttcgaac

SEQ ID NO: 4147646 - DNA, 25 bp, Homo sapien
tctgctgctccagcagtggccttct

SEQ ID NO: 4147647 - DNA, 25 bp, Homo sapien
accatctgctgctccagcagtggcc

SEQ ID NO: 4147648 - DNA, 25 bp, Homo sapien
cagcagtaccatctgctgctccagc

SEQ ID NO: 4147649 - DNA, 25 bp, Homo sapien
catctgctgctccagcagtggcctt

SEQ ID NO: 4147650 - DNA, 25 bp, Homo sapien
tagcaatgttctgtaggacatgaaa

SEQ ID NO: 4147651 - DNA, 25 bp, Homo sapien
tctacgagagaaggaaatcagatcg

SEQ ID NO: 4147652 - DNA, 25 bp, Homo sapien
catgaaaagtgattgaagtctacga

SEQ ID NO: 4147653 - DNA, 25 bp, Homo sapien
tactgtatgacagtacctggtgaca

SEQ ID NO: 4147654 - DNA, 25 bp, Homo sapien
aagatattcttggtgctctcaggac

SEQ ID NO: 4147655 - DNA, 25 bp, Homo sapien
acttggatgaattaaggataaaggc

SEQ ID NO: 4147656 - DNA, 25 bp, Homo sapien
tcttctccggtacttggatgaatta

SEQ ID NO: 4147657 - DNA, 25 bp, Homo sapien
tgaattaaggataaaggctccaaaa

SEQ ID NO: 4147658 - DNA, 25 bp, Homo sapien
ttctcttctccggtacttggatgaa

SEQ ID NO: 4147659 - DNA, 25 bp, Homo sapien
tggcgcgagcctagcgataaggcac

SEQ ID NO: 4147660 - DNA, 25 bp, Homo sapien
caggccggtaggtgcttcgaaatac

SEQ ID NO: 4147661 - DNA, 25 bp, Homo sapien
tgtatccaaatacccttgctgggct

SEQ ID NO: 4147662 - DNA, 25 bp, Homo sapien
taaaatatggtgacatcctcgcccc

SEQ ID NO: 4147663 - DNA, 25 bp, Homo sapien
gccccggtttcttgtcgactgcaga

SEQ ID NO: 4147664 - DNA, 25 bp, Homo sapien
tgcagaacccgaaagtttgtaagag

SEQ ID NO: 4147665 - DNA, 25 bp, Homo sapien
aagacttgctgagggtcgccccggt

SEQ ID NO: 4147666 - DNA, 25 bp, Homo sapien
agcctgcacggggaagacttgctga

SEQ ID NO: 4147667 - DNA, 25 bp, Homo sapien
tttgcttcgaaatcgctgcctgcag

SEQ ID NO: 4147668 - DNA, 25 bp, Homo sapien
gctcccggaaacaaagtcgcatgcc

SEQ ID NO: 4147669 - DNA, 25 bp, Homo sapien
gtcgcgctcggaaacttagattcct

SEQ ID NO: 4147670 - DNA, 25 bp, Homo sapien
tccttttcagacaacgtcgcgctcg

SEQ ID NO: 4147671 - DNA, 25 bp, Homo sapien
ccgggagccgaggagtttgccagtt

SEQ ID NO: 4147672 - DNA, 25 bp, Homo sapien
cgcggggtcgcggtcatttgctgcc

SEQ ID NO: 4147673 - DNA, 25 bp, Homo sapien
cgaggcggcgtgcgcttcgagtggg

SEQ ID NO: 4147674 - DNA, 25 bp, Homo sapien
agccgaggagtttgccagttgccgc

SEQ ID NO: 4147675 - DNA, 25 bp, Homo sapien
tgcgctctattcctgtcccgccgag

SEQ ID NO: 4147676 - DNA, 25 bp, Homo sapien
atttcccaagctccgatttgtcctg

SEQ ID NO: 4147677 - DNA, 25 bp, Homo sapien
tttgtcctgcgtcgcgcgcgtgtcg

SEQ ID NO: 4147678 - DNA, 25 bp, Homo sapien
gtcctggcggccgatggctctccgt

SEQ ID NO: 4147679 - DNA, 25 bp, Homo sapien
tgcagcgggtgagtttgtatttttc

SEQ ID NO: 4147680 - DNA, 25 bp, Homo sapien
ttagtttgcaccgagagaccatttg

SEQ ID NO: 4147681 - DNA, 25 bp, Homo sapien
caagccgcctcctgtcttgtttccg

SEQ ID NO: 4147682 - DNA, 25 bp, Homo sapien
ccgagagaccatttgcagcgggtga

SEQ ID NO: 4147683 - DNA, 25 bp, Homo sapien
gatgtgacgtcagggacgcacaaca

SEQ ID NO: 4147684 - DNA, 25 bp, Homo sapien
ccagcaggtggatgtgacgtcaggg

SEQ ID NO: 4147685 - DNA, 25 bp, Homo sapien
gttggcctctctcgcgcgccttatt

SEQ ID NO: 4147686 - DNA, 25 bp, Homo sapien
tccctccgcgacgtgttggcctctc

SEQ ID NO: 4147687 - DNA, 25 bp, Homo sapien
ccttcccccaaagtggactcgattg

SEQ ID NO: 4147688 - DNA, 25 bp, Homo sapien
acaagggggcagaagctcgtcccac

SEQ ID NO: 4147689 - DNA, 25 bp, Homo sapien
aagtggactcgattgcacattcctg

SEQ ID NO: 4147690 - DNA, 25 bp, Homo sapien
cacactctcctgattccgagaaaca

SEQ ID NO: 4147691 - DNA, 25 bp, Homo sapien
tttgtgttaaacaacggactgacat

SEQ ID NO: 4147692 - DNA, 25 bp, Homo sapien
taatttgtgttaaacaacggactga

SEQ ID NO: 4147693 - DNA, 25 bp, Homo sapien
cacgtgactgatcactgggagagca

SEQ ID NO: 4147694 - DNA, 25 bp, Homo sapien
ttggacaaagctttttgcacgtgac

SEQ ID NO: 4147695 - DNA, 25 bp, Homo sapien
gatacaatttcaaagcgatagtctt

SEQ ID NO: 4147696 - DNA, 25 bp, Homo sapien
tatgccacccttgaaattaagattt

SEQ ID NO: 4147697 - DNA, 25 bp, Homo sapien
gcgatagtcttatgccacccttgaa

SEQ ID NO: 4147698 - DNA, 25 bp, Homo sapien
tgtaaaggggcattacgcgaaagaa

SEQ ID NO: 4147699 - DNA, 25 bp, Homo sapien
cacagcacattagacagtatcatac

SEQ ID NO: 4147700 - DNA, 25 bp, Homo sapien
aaacttgttgccaacctgactgtgg

SEQ ID NO: 4147701 - DNA, 25 bp, Homo sapien
gttctttaataaggcagcacagcac

SEQ ID NO: 4147702 - DNA, 25 bp, Homo sapien
catgggatttacaaccaggatttcc

SEQ ID NO: 4147703 - DNA, 25 bp, Homo sapien
ccccacgaatgtaacgtgacagtgt

SEQ ID NO: 4147704 - DNA, 25 bp, Homo sapien
aaaagaaacttccagttgattactg

SEQ ID NO: 4147705 - DNA, 25 bp, Homo sapien
tctgttttcagaagggatttctatt

SEQ ID NO: 4147706 - DNA, 25 bp, Homo sapien
gcagttaagtttccctctaatgtaa

SEQ ID NO: 4147707 - DNA, 25 bp, Homo sapien
ggtggagagaaaggacggtgagcag

SEQ ID NO: 4147708 - DNA, 25 bp, Homo sapien
tttctttgctgtgttgacccccacc

SEQ ID NO: 4147709 - DNA, 25 bp, Homo sapien
ctgtcacatctatggagagagggtg

SEQ ID NO: 4147710 - DNA, 25 bp, Homo sapien
tctgtaaaggggtctgtaggttagc

SEQ ID NO: 4147711 - DNA, 25 bp, Homo sapien
gctattctgcatccagaagaggctg

SEQ ID NO: 4147712 - DNA, 25 bp, Homo sapien
ctgttgtctggaggaacggctggtt

SEQ ID NO: 4147713 - DNA, 25 bp, Homo sapien
tagggatgccagtatcataatcttc

SEQ ID NO: 4147714 - DNA, 25 bp, Homo sapien
ggctggttttgttgtgccaatcgga

SEQ ID NO: 4147715 - DNA, 25 bp, Homo sapien
tgttcccctcgagcatgtgatttca

SEQ ID NO: 4147716 - DNA, 25 bp, Homo sapien
caatttgttcccctcgagcatgtga

SEQ ID NO: 4147717 - DNA, 25 bp, Homo sapien
cttggggatgaccatataaattata

SEQ ID NO: 4147718 - DNA, 25 bp, Homo sapien
cgagcatgtgatttcatgttgcccc

SEQ ID NO: 4147719 - DNA, 25 bp, Homo sapien
cagccgtgcttgattcttttggagc

SEQ ID NO: 4147720 - DNA, 25 bp, Homo sapien
caaacaactgggtaatatgcttcca

SEQ ID NO: 4147721 - DNA, 25 bp, Homo sapien
gcttccaaacattcagacacatgtg

SEQ ID NO: 4147722 - DNA, 25 bp, Homo sapien
ttcagccagcgcaaagatccatgag

SEQ ID NO: 4147723 - DNA, 25 bp, Homo sapien
ctgtcatgtaggaccaggcactggt

SEQ ID NO: 4147724 - DNA, 25 bp, Homo sapien
gtaagtacatatgctgaaccaagag

SEQ ID NO: 4147725 - DNA, 25 bp, Homo sapien
agagttcaccaaaggcccaagcctc

SEQ ID NO: 4147726 - DNA, 25 bp, Homo sapien
tccctttgtcctgtcatgtaggacc

SEQ ID NO: 4147727 - DNA, 25 bp, Homo sapien
ttgaaggtgtctgggccaacaagca

SEQ ID NO: 4147728 - DNA, 25 bp, Homo sapien
caacaagcacatgagttccaagtca

SEQ ID NO: 4147729 - DNA, 25 bp, Homo sapien
gtcctgatcagtttgcacaagcaaa

SEQ ID NO: 4147730 - DNA, 25 bp, Homo sapien
acatctgtcctgatcagtttgcaca

SEQ ID NO: 4147731 - DNA, 25 bp, Homo sapien
ccttaatgtatgaaccactttctct

SEQ ID NO: 4147732 - DNA, 25 bp, Homo sapien
cactttcccttaatgtatgaaccac

SEQ ID NO: 4147733 - DNA, 25 bp, Homo sapien
ctttcccttaatgtatgaaccactt

SEQ ID NO: 4147734 - DNA, 25 bp, Homo sapien
tcccttaatgtatgaaccactttct

SEQ ID NO: 4147735 - DNA, 25 bp, Homo sapien
cttggttcagctggggatctgctag

SEQ ID NO: 4147736 - DNA, 25 bp, Homo sapien
tggttcagctggggatctgctagaa

SEQ ID NO: 4147737 - DNA, 25 bp, Homo sapien
ctgcttggttcagctggggatctgc

SEQ ID NO: 4147738 - DNA, 25 bp, Homo sapien
gcttggttcagctggggatctgcta

SEQ ID NO: 4147739 - DNA, 25 bp, Homo sapien
gtttgctcccctgaactgtatctca

SEQ ID NO: 4147740 - DNA, 25 bp, Homo sapien
cgggtgggcgaattacttgaagtca

SEQ ID NO: 4147741 - DNA, 25 bp, Homo sapien
cagttagtattacgtggagcgcagg

SEQ ID NO: 4147742 - DNA, 25 bp, Homo sapien
tctggttctgtaggcttgagaacta

SEQ ID NO: 4147743 - DNA, 25 bp, Homo sapien
gcaaagcttattgcaagaagtagga

SEQ ID NO: 4147744 - DNA, 25 bp, Homo sapien
aacagagaacgcaggtcgctgagtg

SEQ ID NO: 4147745 - DNA, 25 bp, Homo sapien
gccggggtagtgcaaagcttattgc

SEQ ID NO: 4147746 - DNA, 25 bp, Homo sapien
cttcagaaacagagaacgcaggtcg

SEQ ID NO: 4147747 - DNA, 25 bp, Homo sapien
cagccagcaacttctttttcccaga

SEQ ID NO: 4147748 - DNA, 25 bp, Homo sapien
agccagcaacttctttttcccagag

SEQ ID NO: 4147749 - DNA, 25 bp, Homo sapien
ccagccagcaacttctttttcccag

SEQ ID NO: 4147750 - DNA, 25 bp, Homo sapien
ctgctcatgactccttgtttgggtt

SEQ ID NO: 4147751 - DNA, 25 bp, Homo sapien
tgggttttggctgttgttgaagcag

SEQ ID NO: 4147752 - DNA, 25 bp, Homo sapien
gggttctgctcatgactccttgttt

SEQ ID NO: 4147753 - DNA, 25 bp, Homo sapien
ttgacagttagattgtggacaggag

SEQ ID NO: 4147754 - DNA, 25 bp, Homo sapien
ttgtttgacagttagattgtggaca

SEQ ID NO: 4147755 - DNA, 25 bp, Homo sapien
gtttgacagttagattgtggacagg

SEQ ID NO: 4147756 - DNA, 25 bp, Homo sapien
ctttgtttgacagttagattgtgga

SEQ ID NO: 4147757 - DNA, 25 bp, Homo sapien
tcctgtgtcttgctaggatttccag

SEQ ID NO: 4147758 - DNA, 25 bp, Homo sapien
ttccagggacggcaattccagaagt

SEQ ID NO: 4147759 - DNA, 25 bp, Homo sapien
tccagaagttttccgattagttggc

SEQ ID NO: 4147760 - DNA, 25 bp, Homo sapien
agttggcatccgtttaattagccca

SEQ ID NO: 4147761 - DNA, 25 bp, Homo sapien
gagtaaggagagctaaataacgtca

SEQ ID NO: 4147762 - DNA, 25 bp, Homo sapien
tgccgctgaaagacctgactacttg

SEQ ID NO: 4147763 - DNA, 25 bp, Homo sapien
gaaagatgataacaccgtgcagctg

SEQ ID NO: 4147764 - DNA, 25 bp, Homo sapien
gatgttaaccacctgcgaattgctc

SEQ ID NO: 4147765 - DNA, 25 bp, Homo sapien
gaattgattcatacaaaacaagaag

SEQ ID NO: 4147766 - DNA, 25 bp, Homo sapien
cttgtgaattgattcatacaaaaca

SEQ ID NO: 4147767 - DNA, 25 bp, Homo sapien
ccagcaattatcatcagagagcaca

SEQ ID NO: 4147768 - DNA, 25 bp, Homo sapien
agagtgtgagccagcaattatcatc

SEQ ID NO: 4147769 - DNA, 25 bp, Homo sapien
ctgctaatgtgttgctcgctagatc

SEQ ID NO: 4147770 - DNA, 25 bp, Homo sapien
tacgtgtatatttccctagctgcag

SEQ ID NO: 4147771 - DNA, 25 bp, Homo sapien
tatattggagtttttgtgtgctacg

SEQ ID NO: 4147772 - DNA, 25 bp, Homo sapien
cgctagatcatgagcaatgggcttc

SEQ ID NO: 4147773 - DNA, 25 bp, Homo sapien
ccaaaagcttttaaggaagtgtctg

SEQ ID NO: 4147774 - DNA, 25 bp, Homo sapien
gaaattgagtaatcaaaatgactta

SEQ ID NO: 4147775 - DNA, 25 bp, Homo sapien
gaagtgtctgtgtttaagtgagtcc

SEQ ID NO: 4147776 - DNA, 25 bp, Homo sapien
aatgacttacattcacatcgaacca

SEQ ID NO: 4147777 - DNA, 25 bp, Homo sapien
cccatcgatcgagtgccacagttca

SEQ ID NO: 4147778 - DNA, 25 bp, Homo sapien
ccaactgattgccaaggaccaaaat

SEQ ID NO: 4147779 - DNA, 25 bp, Homo sapien
gaaagggtaattgactgccgtgtcc

SEQ ID NO: 4147780 - DNA, 25 bp, Homo sapien
gattgagagtattgatcccaactga

SEQ ID NO: 4147781 - DNA, 25 bp, Homo sapien
gctgaagggatctcacttgcaactc

SEQ ID NO: 4147782 - DNA, 25 bp, Homo sapien
tgaagggatctcacttgcaactcag

SEQ ID NO: 4147783 - DNA, 25 bp, Homo sapien
aagggatctcacttgcaactcaggg

SEQ ID NO: 4147784 - DNA, 25 bp, Homo sapien
ctcacttgcaactcaggggtctttc

SEQ ID NO: 4147785 - DNA, 25 bp, Homo sapien
aagaatgaaattagagtgtcgaggg

SEQ ID NO: 4147786 - DNA, 25 bp, Homo sapien
ttggagagatatattcataactttc

SEQ ID NO: 4147787 - DNA, 25 bp, Homo sapien
aatcagcagtcaatgtgttgtgttc

SEQ ID NO: 4147788 - DNA, 25 bp, Homo sapien
cccttgccagatatgaagaatgaaa

SEQ ID NO: 4147789 - DNA, 25 bp, Homo sapien
ctctacttatggcaaagaggctgtt

SEQ ID NO: 4147790 - DNA, 25 bp, Homo sapien
ggagtatatgaagacttgcccatct

SEQ ID NO: 4147791 - DNA, 25 bp, Homo sapien
gcccatcttgtacctctcgactatg

SEQ ID NO: 4147792 - DNA, 25 bp, Homo sapien
aatttcacagcctctacttatggca

SEQ ID NO: 4147793 - DNA, 25 bp, Homo sapien
catcatttggagcttttgaaacgct

SEQ ID NO: 4147794 - DNA, 25 bp, Homo sapien
tttgaaacgctctccttcctggtgt

SEQ ID NO: 4147795 - DNA, 25 bp, Homo sapien
tggagcttttgaaacgctctccttc

SEQ ID NO: 4147796 - DNA, 25 bp, Homo sapien
ctacatcatttggagcttttgaaac

SEQ ID NO: 4147797 - DNA, 25 bp, Homo sapien
agcggtttgtccctggttctgtcat

SEQ ID NO: 4147798 - DNA, 25 bp, Homo sapien
agcctctaagcggtttgtccctggt

SEQ ID NO: 4147799 - DNA, 25 bp, Homo sapien
ttcctcaccagcctctaagcggttt

SEQ ID NO: 4147800 - DNA, 25 bp, Homo sapien
tcaccagcctctaagcggtttgtcc

SEQ ID NO: 4147801 - DNA, 25 bp, Homo sapien
caggctgagcacacacgaatgattc

SEQ ID NO: 4147802 - DNA, 25 bp, Homo sapien
ccaggagttcaatgtggacaggccc

SEQ ID NO: 4147803 - DNA, 25 bp, Homo sapien
ttcatcggtgagaggtgatccagga

SEQ ID NO: 4147804 - DNA, 25 bp, Homo sapien
tacgagcacgttacattcgcattga

SEQ ID NO: 4147805 - DNA, 25 bp, Homo sapien
gaactggcaagttctgttggaggaa

SEQ ID NO: 4147806 - DNA, 25 bp, Homo sapien
tttctttgcgcgttcctgagagtga

SEQ ID NO: 4147807 - DNA, 25 bp, Homo sapien
cacgatgcacgttaactttgtgggt

SEQ ID NO: 4147808 - DNA, 25 bp, Homo sapien
cctgagagtgactggcagtgcagcc

SEQ ID NO: 4147809 - DNA, 25 bp, Homo sapien
taaattggaacagcgatgaaaaacc

SEQ ID NO: 4147810 - DNA, 25 bp, Homo sapien
cagacccagctgaatgtgttggagt

SEQ ID NO: 4147811 - DNA, 25 bp, Homo sapien
tgaaaaaccatacacgtcgggagat

SEQ ID NO: 4147812 - DNA, 25 bp, Homo sapien
cctaatgggtacagtcagttcagac

SEQ ID NO: 4147813 - DNA, 25 bp, Homo sapien
ccttcctgctcttattgcagacttt

SEQ ID NO: 4147814 - DNA, 25 bp, Homo sapien
cttcctgctcttattgcagactttt

SEQ ID NO: 4147815 - DNA, 25 bp, Homo sapien
tccttcctgctcttattgcagactt

SEQ ID NO: 4147816 - DNA, 25 bp, Homo sapien
tattgcagactttttataattcctg

SEQ ID NO: 4147817 - DNA, 25 bp, Homo sapien
tgtggttcaggaccaagaaggtctg

SEQ ID NO: 4147818 - DNA, 25 bp, Homo sapien
cgcttgtggttcaggaccaagaagg

SEQ ID NO: 4147819 - DNA, 25 bp, Homo sapien
aaacgcttgtggttcaggaccaaga

SEQ ID NO: 4147820 - DNA, 25 bp, Homo sapien
tggttcaggaccaagaaggtctgac

SEQ ID NO: 4147821 - DNA, 25 bp, Homo sapien
ggaatcaagccagcccttgcttggc

SEQ ID NO: 4147822 - DNA, 25 bp, Homo sapien
tttacatcccctagaggaacgggca

SEQ ID NO: 4147823 - DNA, 25 bp, Homo sapien
gctgcaggttggtgaagtattccag

SEQ ID NO: 4147824 - DNA, 25 bp, Homo sapien
cctgccaaaccgactcaggagagga

SEQ ID NO: 4147825 - DNA, 25 bp, Homo sapien
caaggcctgaaagtcaatacagccc

SEQ ID NO: 4147826 - DNA, 25 bp, Homo sapien
gctccgagcagatcacacgttttac

SEQ ID NO: 4147827 - DNA, 25 bp, Homo sapien
caagccgggcttgtaaaggagaaag

SEQ ID NO: 4147828 - DNA, 25 bp, Homo sapien
ggatggaactaaaagcaagccgggc

SEQ ID NO: 4147829 - DNA, 25 bp, Homo sapien
tagaaaatttatgctacctctcatc

SEQ ID NO: 4147830 - DNA, 25 bp, Homo sapien
taattttagcactttacattacatg

SEQ ID NO: 4147831 - DNA, 25 bp, Homo sapien
ttttagcactttacattacatgatg

SEQ ID NO: 4147832 - DNA, 25 bp, Homo sapien
gcattatagaactgaacatgaagta

SEQ ID NO: 4147833 - DNA, 25 bp, Homo sapien
ttgtcactttcaaaacgtagcttag

SEQ ID NO: 4147834 - DNA, 25 bp, Homo sapien
ctttcaaaacgtagcttagcaaagc

SEQ ID NO: 4147835 - DNA, 25 bp, Homo sapien
tcactttcaaaacgtagcttagcaa

SEQ ID NO: 4147836 - DNA, 25 bp, Homo sapien
tgtcactttcaaaacgtagcttagc

SEQ ID NO: 4147837 - DNA, 25 bp, Homo sapien
cattcctatgtactgtgagctgggc

SEQ ID NO: 4147838 - DNA, 25 bp, Homo sapien
aatcaagctctaagtctttggaccc

SEQ ID NO: 4147839 - DNA, 25 bp, Homo sapien
ggtttccctttaagtagctctgctg

SEQ ID NO: 4147840 - DNA, 25 bp, Homo sapien
tacaaggaggaacactagcttggag

SEQ ID NO: 4147841 - DNA, 25 bp, Homo sapien
aacacacacacatagggaagaagcc

SEQ ID NO: 4147842 - DNA, 25 bp, Homo sapien
caatgtccagcaaatcgagttgtaa

SEQ ID NO: 4147843 - DNA, 25 bp, Homo sapien
cctgcccagtggaagtcccgtgttt

SEQ ID NO: 4147844 - DNA, 25 bp, Homo sapien
gaagaagccctgtatatactctcct

SEQ ID NO: 4147845 - DNA, 25 bp, Homo sapien
tccagagagtgcacattacagtgcc

SEQ ID NO: 4147846 - DNA, 25 bp, Homo sapien
ggtgagccatcatatacagctgtca

SEQ ID NO: 4147847 - DNA, 25 bp, Homo sapien
gactactggccctttccttggatag

SEQ ID NO: 4147848 - DNA, 25 bp, Homo sapien
ttcctggtcacgtcagactactggc

SEQ ID NO: 4147849 - DNA, 25 bp, Homo sapien
gaggcggccactccctgcgccctag

SEQ ID NO: 4147850 - DNA, 25 bp, Homo sapien
ggcttcactgcggacagggcctcgc

SEQ ID NO: 4147851 - DNA, 25 bp, Homo sapien
catctcaggaatggtgcgcgcagga

SEQ ID NO: 4147852 - DNA, 25 bp, Homo sapien
cgcggcctcaccaggccgtgcgctc

SEQ ID NO: 4147853 - DNA, 25 bp, Homo sapien
ctaggctcacgcacagcagcaggct

SEQ ID NO: 4147854 - DNA, 25 bp, Homo sapien
gaacagcacgttgcccgctaggctc

SEQ ID NO: 4147855 - DNA, 25 bp, Homo sapien
cacccggctcgctcgcgttcgccat

SEQ ID NO: 4147856 - DNA, 25 bp, Homo sapien
agcagcgcgaacagcacgttgcccg

SEQ ID NO: 4147857 - DNA, 25 bp, Homo sapien
aggcacaggtcgagcagcaggtagt

SEQ ID NO: 4147858 - DNA, 25 bp, Homo sapien
cacaggtcgagcagcaggtagtacg

SEQ ID NO: 4147859 - DNA, 25 bp, Homo sapien
gcaggtagtacggggcgcggtgcag

SEQ ID NO: 4147860 - DNA, 25 bp, Homo sapien
caggtagtacggggcgcggtgcagg

SEQ ID NO: 4147861 - DNA, 25 bp, Homo sapien
cagcccagcgcgcccggcggcgccc

SEQ ID NO: 4147862 - DNA, 25 bp, Homo sapien
ccgcacgccgcgccgccagcatgac

SEQ ID NO: 4147863 - DNA, 25 bp, Homo sapien
ccgccgcacgccgcgccgccagcat

SEQ ID NO: 4147864 - DNA, 25 bp, Homo sapien
cttgcagcccagcgcgcccggcggc

SEQ ID NO: 4147865 - DNA, 25 bp, Homo sapien
gccggccaggcgctctgcatagaag

SEQ ID NO: 4147866 - DNA, 25 bp, Homo sapien
ccaggcgctctgcatagaagcggtg

SEQ ID NO: 4147867 - DNA, 25 bp, Homo sapien
aggtagcgggtgacgcccacgccca

SEQ ID NO: 4147868 - DNA, 25 bp, Homo sapien
tgcatagaagcggtggtgcgcgatg

SEQ ID NO: 4147869 - DNA, 25 bp, Homo sapien
tagacgaggtgcgtggcgcccacca

SEQ ID NO: 4147870 - DNA, 25 bp, Homo sapien
ccaccgccgtccagcactggcggga

SEQ ID NO: 4147871 - DNA, 25 bp, Homo sapien
gcgcacggcgcgtcctcgtcgtcgc

SEQ ID NO: 4147872 - DNA, 25 bp, Homo sapien
tcttgcggcggtcgtggatgaagaa

SEQ ID NO: 4147873 - DNA, 25 bp, Homo sapien
ccgaagcccgccgtccagttggcgg

SEQ ID NO: 4147874 - DNA, 25 bp, Homo sapien
ccgccgtccagttggcggccgcctg

SEQ ID NO: 4147875 - DNA, 25 bp, Homo sapien
ggccgtggaaggtccagtcgtggct

SEQ ID NO: 4147876 - DNA, 25 bp, Homo sapien
gccgcctggccggtggcgcccgggc

SEQ ID NO: 4147877 - DNA, 25 bp, Homo sapien
tgaattcttccagcacgaggaggcg

SEQ ID NO: 4147878 - DNA, 25 bp, Homo sapien
aattcttccagcacgaggaggcggc

SEQ ID NO: 4147879 - DNA, 25 bp, Homo sapien
cttgaattcttccagcacgaggagg

SEQ ID NO: 4147880 - DNA, 25 bp, Homo sapien
attcttccagcacgaggaggcggcg

SEQ ID NO: 4147881 - DNA, 25 bp, Homo sapien
agagcagcgtgacggcgtagaacat

SEQ ID NO: 4147882 - DNA, 25 bp, Homo sapien
ggtagctggccacgacgtagggccc

SEQ ID NO: 4147883 - DNA, 25 bp, Homo sapien
aggaagagcagcgtgacggcgtaga

SEQ ID NO: 4147884 - DNA, 25 bp, Homo sapien
gcgccgggccgcaccaggacccgca

SEQ ID NO: 4147885 - DNA, 25 bp, Homo sapien
ggtcagccacacggaggccgtcagg

SEQ ID NO: 4147886 - DNA, 25 bp, Homo sapien
gccacacggaggccgtcaggtaggc

SEQ ID NO: 4147887 - DNA, 25 bp, Homo sapien
cagccacacggaggccgtcaggtag

SEQ ID NO: 4147888 - DNA, 25 bp, Homo sapien
gtcagccacacggaggccgtcaggt

SEQ ID NO: 4147889 - DNA, 25 bp, Homo sapien
aatgcctttcaggtcgcagggatgg

SEQ ID NO: 4147890 - DNA, 25 bp, Homo sapien
tgttgaagaggaagcacacgacggg

SEQ ID NO: 4147891 - DNA, 25 bp, Homo sapien
tcaggtcgcagggatgggtcgcctg

SEQ ID NO: 4147892 - DNA, 25 bp, Homo sapien
tgaagcagtccctcagctccctgtt

SEQ ID NO: 4147893 - DNA, 25 bp, Homo sapien
caaccatcagtagaacagcacagct

SEQ ID NO: 4147894 - DNA, 25 bp, Homo sapien
tggaataaaagacgtcagtaccgct

SEQ ID NO: 4147895 - DNA, 25 bp, Homo sapien
tcagagggcatttcggacaacttcc

SEQ ID NO: 4147896 - DNA, 25 bp, Homo sapien
cctgcagccggcaattcagagggca

SEQ ID NO: 4147897 - DNA, 25 bp, Homo sapien
tctatctcagacaaagcaaaaatct

SEQ ID NO: 4147898 - DNA, 25 bp, Homo sapien
aagcaaaaatctggtgctgaggttt

SEQ ID NO: 4147899 - DNA, 25 bp, Homo sapien
tgggatgacattcatacatgatgcc

SEQ ID NO: 4147900 - DNA, 25 bp, Homo sapien
tgatgccttctgagacctgacccat

SEQ ID NO: 4147901 - DNA, 25 bp, Homo sapien
tacgttttgcctgctcggagctggg

SEQ ID NO: 4147902 - DNA, 25 bp, Homo sapien
ttacgttttgcctgctcggagctgg

SEQ ID NO: 4147903 - DNA, 25 bp, Homo sapien
acgttttgcctgctcggagctgggc

SEQ ID NO: 4147904 - DNA, 25 bp, Homo sapien
gacaaatcctttcacgtcgcgggtg

SEQ ID NO: 4147905 - DNA, 25 bp, Homo sapien
aggagtcccgcagctggaaggacaa

SEQ ID NO: 4147906 - DNA, 25 bp, Homo sapien
ggattggggcgattttgctctccct

SEQ ID NO: 4147907 - DNA, 25 bp, Homo sapien
tcccgcagctggaaggacaaatcct

SEQ ID NO: 4147908 - DNA, 25 bp, Homo sapien
cctcaggctggcactcgaaaccagg

SEQ ID NO: 4147909 - DNA, 25 bp, Homo sapien
tggcactcgaaaccaggcgttctca

SEQ ID NO: 4147910 - DNA, 25 bp, Homo sapien
caggctggcactcgaaaccaggcgt

SEQ ID NO: 4147911 - DNA, 25 bp, Homo sapien
cgaaaccaggcgttctcatttccct

SEQ ID NO: 4147912 - DNA, 25 bp, Homo sapien
agtttgcggttcttaagagaccagg

SEQ ID NO: 4147913 - DNA, 25 bp, Homo sapien
ccaaaacgggcaagcaagttcggtg

SEQ ID NO: 4147914 - DNA, 25 bp, Homo sapien
ttaaagaggctgaaagacgcatctg

SEQ ID NO: 4147915 - DNA, 25 bp, Homo sapien
tttcgtctgaatgctttggcacggg

SEQ ID NO: 4147916 - DNA, 25 bp, Homo sapien
gctgccaacaccgttagcagaggcc

SEQ ID NO: 4147917 - DNA, 25 bp, Homo sapien
tttgctgccaacaccgttagcagag

SEQ ID NO: 4147918 - DNA, 25 bp, Homo sapien
tgccaacaccgttagcagaggccac

SEQ ID NO: 4147919 - DNA, 25 bp, Homo sapien
ctctttgctgccaacaccgttagca

SEQ ID NO: 4147920 - DNA, 25 bp, Homo sapien
caccagtaaacagagagagcctcaa

SEQ ID NO: 4147921 - DNA, 25 bp, Homo sapien
agtccccacttagaacgctgacaaa

SEQ ID NO: 4147922 - DNA, 25 bp, Homo sapien
tttagcaaacccaaactctgccaaa

SEQ ID NO: 4147923 - DNA, 25 bp, Homo sapien
catttagcaaacccaaactctgcca

SEQ ID NO: 4147924 - DNA, 25 bp, Homo sapien
gtatacatttagcaaacccaaactc

SEQ ID NO: 4147925 - DNA, 25 bp, Homo sapien
atacatttagcaaacccaaactctg

SEQ ID NO: 4147926 - DNA, 25 bp, Homo sapien
ggattggcattcaggccgctggctc

SEQ ID NO: 4147927 - DNA, 25 bp, Homo sapien
actttcactgcccaaggattggcat

SEQ ID NO: 4147928 - DNA, 25 bp, Homo sapien
tcactgcccaaggattggcattcag

SEQ ID NO: 4147929 - DNA, 25 bp, Homo sapien
ccaaggattggcattcaggccgctg

SEQ ID NO: 4147930 - DNA, 25 bp, Homo sapien
ttcaccttgacccagtgacgataat

SEQ ID NO: 4147931 - DNA, 25 bp, Homo sapien
cagactcagagcctgactcgtcagc

SEQ ID NO: 4147932 - DNA, 25 bp, Homo sapien
gactcgtcagcaccagaggtctcct

SEQ ID NO: 4147933 - DNA, 25 bp, Homo sapien
ccagtgacgataatccagggtctct

SEQ ID NO: 4147934 - DNA, 25 bp, Homo sapien
agggggactgtccatgtcagccaga

SEQ ID NO: 4147935 - DNA, 25 bp, Homo sapien
gacccttgtagattaggctcctgct

SEQ ID NO: 4147936 - DNA, 25 bp, Homo sapien
gagactccgattccagagtctgaag

SEQ ID NO: 4147937 - DNA, 25 bp, Homo sapien
gcctggttctccattgacccttgta

SEQ ID NO: 4147938 - DNA, 25 bp, Homo sapien
tggcatagccatggccatgcagata

SEQ ID NO: 4147939 - DNA, 25 bp, Homo sapien
ggttgaccatgacaatagcccagct

SEQ ID NO: 4147940 - DNA, 25 bp, Homo sapien
acagagttgctttttgggttgacca

SEQ ID NO: 4147941 - DNA, 25 bp, Homo sapien
cggccgcaggaaatgtgcaatggca

SEQ ID NO: 4147942 - DNA, 25 bp, Homo sapien
tggcattctgtctgcaagcacaaag

SEQ ID NO: 4147943 - DNA, 25 bp, Homo sapien
ggctgccactagagaggagatggca

SEQ ID NO: 4147944 - DNA, 25 bp, Homo sapien
tgtttgccccaacatcctttggctg

SEQ ID NO: 4147945 - DNA, 25 bp, Homo sapien
taattaatgagggactgtttgcccc

SEQ ID NO: 4147946 - DNA, 25 bp, Homo sapien
gatgctatcctgctgctgatcagca

SEQ ID NO: 4147947 - DNA, 25 bp, Homo sapien
ggatatagctttggccaccatttcc

SEQ ID NO: 4147948 - DNA, 25 bp, Homo sapien
cgcattttaagtttggcagcttcga

SEQ ID NO: 4147949 - DNA, 25 bp, Homo sapien
ggctcagacattgctgaaggatctg

SEQ ID NO: 4147950 - DNA, 25 bp, Homo sapien
cacagacgacaagtgggatatagct

SEQ ID NO: 4147951 - DNA, 25 bp, Homo sapien
atccacagtgggcatctattaattt

SEQ ID NO: 4147952 - DNA, 25 bp, Homo sapien
ccacagtgggcatctattaattttg

SEQ ID NO: 4147953 - DNA, 25 bp, Homo sapien
catctattaattttgtctgcctgcc

SEQ ID NO: 4147954 - DNA, 25 bp, Homo sapien
ttttgtctgcctgccattcattctc

SEQ ID NO: 4147955 - DNA, 25 bp, Homo sapien
cactgaaaatggcaagaaaatcacc

SEQ ID NO: 4147956 - DNA, 25 bp, Homo sapien
tcactgagagccactgaaaatggca

SEQ ID NO: 4147957 - DNA, 25 bp, Homo sapien
caggtcactgagagccactgaaaat

SEQ ID NO: 4147958 - DNA, 25 bp, Homo sapien
ctgaaaatggcaagaaaatcaccat

SEQ ID NO: 4147959 - DNA, 25 bp, Homo sapien
tacgacatcaaataggaatggaggt

SEQ ID NO: 4147960 - DNA, 25 bp, Homo sapien
tgtgtcgagtgtgtctgttttttgg

SEQ ID NO: 4147961 - DNA, 25 bp, Homo sapien
tctacaacattgctaaactcggtta

SEQ ID NO: 4147962 - DNA, 25 bp, Homo sapien
ggctaggaattacagtacgacatca

SEQ ID NO: 4147963 - DNA, 25 bp, Homo sapien
tggtcccatcggcagtctgcccttt

SEQ ID NO: 4147964 - DNA, 25 bp, Homo sapien
agtcctctggtcccatcggcagtct

SEQ ID NO: 4147965 - DNA, 25 bp, Homo sapien
cattctcgaagtagaggttaggcct

SEQ ID NO: 4147966 - DNA, 25 bp, Homo sapien
aaaggtgcaagaaaagcgcttttct

SEQ ID NO: 4147967 - DNA, 25 bp, Homo sapien
tagtccatatgctgtgtcaccagtg

SEQ ID NO: 4147968 - DNA, 25 bp, Homo sapien
cactcacttctagcaggctctgaag

SEQ ID NO: 4147969 - DNA, 25 bp, Homo sapien
tcccagttttcctggtctaggcctg

SEQ ID NO: 4147970 - DNA, 25 bp, Homo sapien
tgtcaggaagccagagcaaatttct

SEQ ID NO: 4147971 - DNA, 25 bp, Homo sapien
ggtggccaccatatgcataaaactt

SEQ ID NO: 4147972 - DNA, 25 bp, Homo sapien
tgcaagcgtggcactgaaagggtct

SEQ ID NO: 4147973 - DNA, 25 bp, Homo sapien
tgaggctcgtgatgattgtccaccc

SEQ ID NO: 4147974 - DNA, 25 bp, Homo sapien
tcttttgtgaatctcatgaggctcg

SEQ ID NO: 4147975 - DNA, 25 bp, Homo sapien
agccatgcagaatccctctaccgga

SEQ ID NO: 4147976 - DNA, 25 bp, Homo sapien
gggaccaccacagctgtagtggaag

SEQ ID NO: 4147977 - DNA, 25 bp, Homo sapien
catcagtatcccaaagcaaagccat

SEQ ID NO: 4147978 - DNA, 25 bp, Homo sapien
ctaccggacacacgtctggctccat

SEQ ID NO: 4147979 - DNA, 25 bp, Homo sapien
gaattggtcaggaccctgactgccg

SEQ ID NO: 4147980 - DNA, 25 bp, Homo sapien
cgagtggtaatattagatgaattgg

SEQ ID NO: 4147981 - DNA, 25 bp, Homo sapien
caagcttgtcctctgtcatacaaat

SEQ ID NO: 4147982 - DNA, 25 bp, Homo sapien
ttttcatgacacaaatacgagtggt

SEQ ID NO: 4147983 - DNA, 25 bp, Homo sapien
cctcttcaggactaggcggggacca

SEQ ID NO: 4147984 - DNA, 25 bp, Homo sapien
aggactaggcggggaccactgtgct

SEQ ID NO: 4147985 - DNA, 25 bp, Homo sapien
ttcaggactaggcggggaccactgt

SEQ ID NO: 4147986 - DNA, 25 bp, Homo sapien
tcttcaggactaggcggggaccact

SEQ ID NO: 4147987 - DNA, 25 bp, Homo sapien
tgtttttgagcgcatccctgagagg

SEQ ID NO: 4147988 - DNA, 25 bp, Homo sapien
catccctgagaggttgatcctacgg

SEQ ID NO: 4147989 - DNA, 25 bp, Homo sapien
ctgttttctcacaacgtgacaaaaa

SEQ ID NO: 4147990 - DNA, 25 bp, Homo sapien
agggaccttccccttgcttggtgct

SEQ ID NO: 4147991 - DNA, 25 bp, Homo sapien
caggagccctgatgctgacgtttcc

SEQ ID NO: 4147992 - DNA, 25 bp, Homo sapien
ctttattaagtgaccgtggtgcatc

SEQ ID NO: 4147993 - DNA, 25 bp, Homo sapien
tctgccactggctaatgctacaggg

SEQ ID NO: 4147994 - DNA, 25 bp, Homo sapien
gaccaagacactagagtcctcactg

SEQ ID NO: 4147995 - DNA, 25 bp, Homo sapien
ctcttgtatcttccctctagagagc

SEQ ID NO: 4147996 - DNA, 25 bp, Homo sapien
cacttttgtaattgtgtgattggtg

SEQ ID NO: 4147997 - DNA, 25 bp, Homo sapien
tgtgtgattggtggctcttgtatct

SEQ ID NO: 4147998 - DNA, 25 bp, Homo sapien
ttggtggctcttgtatcttccctct

SEQ ID NO: 4147999 - DNA, 25 bp, Homo sapien
gtcacacatgttggggtctaggcca

SEQ ID NO: 4148000 - DNA, 25 bp, Homo sapien
ccaggtcacacatgttggggtctag

SEQ ID NO: 4148001 - DNA, 25 bp, Homo sapien
cacatgttggggtctaggccacctg

SEQ ID NO: 4148002 - DNA, 25 bp, Homo sapien
acacatgttggggtctaggccacct

SEQ ID NO: 4148003 - DNA, 25 bp, Homo sapien
ctgatcaaagtgttaaccaccctgc

SEQ ID NO: 4148004 - DNA, 25 bp, Homo sapien
tgatcaaagtgttaaccaccctgct

SEQ ID NO: 4148005 - DNA, 25 bp, Homo sapien
gatcaaagtgttaaccaccctgctc

SEQ ID NO: 4148006 - DNA, 25 bp, Homo sapien
cctcactttacagcaccctgaagga

SEQ ID NO: 4148007 - DNA, 25 bp, Homo sapien
accctgaaggagctaccagcctcat

SEQ ID NO: 4148008 - DNA, 25 bp, Homo sapien
ttacagcaccctgaaggagctacca

SEQ ID NO: 4148009 - DNA, 25 bp, Homo sapien
tgagttccaacctcactttacagca

SEQ ID NO: 4148010 - DNA, 25 bp, Homo sapien
gcaggacgaggagaaaatgaggcat

SEQ ID NO: 4148011 - DNA, 25 bp, Homo sapien
aatccagggaagttgcgagagccca

SEQ ID NO: 4148012 - DNA, 25 bp, Homo sapien
catgttgattggggaatccgaaaac

SEQ ID NO: 4148013 - DNA, 25 bp, Homo sapien
ccggggcttgtactctcattctggg

SEQ ID NO: 4148014 - DNA, 25 bp, Homo sapien
cgaaaaccggggcttgtactctcat

SEQ ID NO: 4148015 - DNA, 25 bp, Homo sapien
taacttgtcccagatcctagtgctg

SEQ ID NO: 4148016 - DNA, 25 bp, Homo sapien
ttcgggcagtaggaagcaggcatta

SEQ ID NO: 4148017 - DNA, 25 bp, Homo sapien
ggagaactagactcatgtcccagct

SEQ ID NO: 4148018 - DNA, 25 bp, Homo sapien
tacgggctacccaactgcatatgat

SEQ ID NO: 4148019 - DNA, 25 bp, Homo sapien
ccagttaggacaccattgcagtagc

SEQ ID NO: 4148020 - DNA, 25 bp, Homo sapien
ccagtggatgggcttaatctaagga

SEQ ID NO: 4148021 - DNA, 25 bp, Homo sapien
gcccaggtaagatacaatagtgtca

SEQ ID NO: 4148022 - DNA, 25 bp, Homo sapien
tgtaaatacaccgaaaagccagtgg

SEQ ID NO: 4148023 - DNA, 25 bp, Homo sapien
ggagcatctcagttatcaggccaac

SEQ ID NO: 4148024 - DNA, 25 bp, Homo sapien
tgaaatatcatgctgctcctcccca

SEQ ID NO: 4148025 - DNA, 25 bp, Homo sapien
gagttttcaattgtacgccgttctg

SEQ ID NO: 4148026 - DNA, 25 bp, Homo sapien
tactcgcccactagtcatttaggag

SEQ ID NO: 4148027 - DNA, 25 bp, Homo sapien
tccaaacatagataaagccagacag

SEQ ID NO: 4148028 - DNA, 25 bp, Homo sapien
acagagtctctatatacaccatggg

SEQ ID NO: 4148029 - DNA, 25 bp, Homo sapien
gttacaattggaacatcctgggtcc

SEQ ID NO: 4148030 - DNA, 25 bp, Homo sapien
gaaaacaggcaatggccatactttg

SEQ ID NO: 4148031 - DNA, 25 bp, Homo sapien
cacaaggccactgctcacatgaaca

SEQ ID NO: 4148032 - DNA, 25 bp, Homo sapien
ccatttcccagtgtcggtaaccaga

SEQ ID NO: 4148033 - DNA, 25 bp, Homo sapien
ggtaaccagaggcaatgaaagacac

SEQ ID NO: 4148034 - DNA, 25 bp, Homo sapien
cacatgaacaggtgccttccatttc

SEQ ID NO: 4148035 - DNA, 25 bp, Homo sapien
ttgtgttaagagactcttgctgaag

SEQ ID NO: 4148036 - DNA, 25 bp, Homo sapien
aagagactcttgctgaagtctcctc

SEQ ID NO: 4148037 - DNA, 25 bp, Homo sapien
ttaagagactcttgctgaagtctcc

SEQ ID NO: 4148038 - DNA, 25 bp, Homo sapien
tgttaagagactcttgctgaagtct

SEQ ID NO: 4148039 - DNA, 25 bp, Homo sapien
cttgggcaatgctacgtggcacaat

SEQ ID NO: 4148040 - DNA, 25 bp, Homo sapien
tcagggtagtgggtatctgctattc

SEQ ID NO: 4148041 - DNA, 25 bp, Homo sapien
tacgtggcacaatagctagtaccgc

SEQ ID NO: 4148042 - DNA, 25 bp, Homo sapien
taccgccttcactctgatactcaga

SEQ ID NO: 4148043 - DNA, 25 bp, Homo sapien
ctgtgctgaatgatgacatgtggac

SEQ ID NO: 4148044 - DNA, 25 bp, Homo sapien
ggaatgcacagagctttcaaaaaag

SEQ ID NO: 4148045 - DNA, 25 bp, Homo sapien
ctggaatgcacagagctttcaaaaa

SEQ ID NO: 4148046 - DNA, 25 bp, Homo sapien
atgcacagagctttcaaaaaagtgt

SEQ ID NO: 4148047 - DNA, 25 bp, Homo sapien
gaatgcacagagctttcaaaaaagt

SEQ ID NO: 4148048 - DNA, 25 bp, Homo sapien
ttctctttctacacccagtggcaag

SEQ ID NO: 4148049 - DNA, 25 bp, Homo sapien
acccagtggcaagcacggaacgttc

SEQ ID NO: 4148050 - DNA, 25 bp, Homo sapien
gcacggaacgttccaccagcatgtc

SEQ ID NO: 4148051 - DNA, 25 bp, Homo sapien
ttctacacccagtggcaagcacgga

SEQ ID NO: 4148052 - DNA, 25 bp, Homo sapien
ccttctgagccagaatcaacgccat

SEQ ID NO: 4148053 - DNA, 25 bp, Homo sapien
ctgagccagaatcaacgccatgagt

SEQ ID NO: 4148054 - DNA, 25 bp, Homo sapien
agccagaatcaacgccatgagtagg

SEQ ID NO: 4148055 - DNA, 25 bp, Homo sapien
ttctgagccagaatcaacgccatga

SEQ ID NO: 4148056 - DNA, 25 bp, Homo sapien
gaggtatcccgccttccttgggtca

SEQ ID NO: 4148057 - DNA, 25 bp, Homo sapien
gagggcgccttccagagacatgagt

SEQ ID NO: 4148058 - DNA, 25 bp, Homo sapien
atctctgctcttgcgtcatcataag

SEQ ID NO: 4148059 - DNA, 25 bp, Homo sapien
tggtcaacacttccaggaagcaggg

SEQ ID NO: 4148060 - DNA, 25 bp, Homo sapien
ctgccagtgtaacaagagagggagg

SEQ ID NO: 4148061 - DNA, 25 bp, Homo sapien
acgtccagcacctttcccagaccag

SEQ ID NO: 4148062 - DNA, 25 bp, Homo sapien
atgaagcgacgtccagcacctttcc

SEQ ID NO: 4148063 - DNA, 25 bp, Homo sapien
caggatgaagcgacgtccagcacct

SEQ ID NO: 4148064 - DNA, 25 bp, Homo sapien
agaacaggatgaagcgacgtccagc

SEQ ID NO: 4148065 - DNA, 25 bp, Homo sapien
cgtccatcgggatcttcagttcaaa

SEQ ID NO: 4148066 - DNA, 25 bp, Homo sapien
tttccttcgtccatcgggatcttca

SEQ ID NO: 4148067 - DNA, 25 bp, Homo sapien
tcaagccaaactctagccagccctc

SEQ ID NO: 4148068 - DNA, 25 bp, Homo sapien
gccacttttccttcgtccatcggga

SEQ ID NO: 4148069 - DNA, 25 bp, Homo sapien
agtgctctgggctaattggacctga

SEQ ID NO: 4148070 - DNA, 25 bp, Homo sapien
tgctccaaattgaggctgaaaacca

SEQ ID NO: 4148071 - DNA, 25 bp, Homo sapien
cacaattcagaatgtctagtgggct

SEQ ID NO: 4148072 - DNA, 25 bp, Homo sapien
tgacagccccaaatggattagatgc

SEQ ID NO: 4148073 - DNA, 25 bp, Homo sapien
cccatactctattccgggggtgctg

SEQ ID NO: 4148074 - DNA, 25 bp, Homo sapien
tggtcacattacctctgaaggtatc

SEQ ID NO: 4148075 - DNA, 25 bp, Homo sapien
acattacctctgaaggtatctaggg

SEQ ID NO: 4148076 - DNA, 25 bp, Homo sapien
tcctcttggtcacattacctctgaa

SEQ ID NO: 4148077 - DNA, 25 bp, Homo sapien
tgaagttggaagttccagagccttc

SEQ ID NO: 4148078 - DNA, 25 bp, Homo sapien
tcacataatgggacatgcaaggggg

SEQ ID NO: 4148079 - DNA, 25 bp, Homo sapien
tgggacatgcaagggggaaaccaaa

SEQ ID NO: 4148080 - DNA, 25 bp, Homo sapien
agaatgcgtcgctggatgtctttga

SEQ ID NO: 4148081 - DNA, 25 bp, Homo sapien
ttagttccatgaaggtagtctggcc

SEQ ID NO: 4148082 - DNA, 25 bp, Homo sapien
cagggcagatcccaggcacctctga

SEQ ID NO: 4148083 - DNA, 25 bp, Homo sapien
ttccagaaagcgtttcccaggacga

SEQ ID NO: 4148084 - DNA, 25 bp, Homo sapien
tccatgaactttagttccatgaagg

SEQ ID NO: 4148085 - DNA, 25 bp, Homo sapien
cagtgtgcctacctgcagcagactt

SEQ ID NO: 4148086 - DNA, 25 bp, Homo sapien
aaggcctacagaagaaagtctccag

SEQ ID NO: 4148087 - DNA, 25 bp, Homo sapien
ctttggtaaataactgggcagctgg

SEQ ID NO: 4148088 - DNA, 25 bp, Homo sapien
cgacaggtaattagcagggccagct

SEQ ID NO: 4148089 - DNA, 25 bp, Homo sapien
actctttcccctatagtcacattca

SEQ ID NO: 4148090 - DNA, 25 bp, Homo sapien
cagttcactcgaataaaagaatctt

SEQ ID NO: 4148091 - DNA, 25 bp, Homo sapien
gtgaacactctttcccctatagtca

SEQ ID NO: 4148092 - DNA, 25 bp, Homo sapien
gaggaacagttcactcgaataaaag

SEQ ID NO: 4148093 - DNA, 25 bp, Homo sapien
aggtaacttgccaagaagttcaagt

SEQ ID NO: 4148094 - DNA, 25 bp, Homo sapien
ttccttcatggtaatcttgctgctt

SEQ ID NO: 4148095 - DNA, 25 bp, Homo sapien
aaggtaacttgccaagaagttcaag

SEQ ID NO: 4148096 - DNA, 25 bp, Homo sapien
cttttccttcatggtaatcttgctg

SEQ ID NO: 4148097 - DNA, 25 bp, Homo sapien
tgtgtctattttctcctctagtggg

SEQ ID NO: 4148098 - DNA, 25 bp, Homo sapien
ccttgtgtctattttctcctctagt

SEQ ID NO: 4148099 - DNA, 25 bp, Homo sapien
tgtctattttctcctctagtgggat

SEQ ID NO: 4148100 - DNA, 25 bp, Homo sapien
ccccttgtgtctattttctcctcta

SEQ ID NO: 4148101 - DNA, 25 bp, Homo sapien
cacctccagcttgtgccatccccac

SEQ ID NO: 4148102 - DNA, 25 bp, Homo sapien
ccagcttgtgccatccccacgctgg

SEQ ID NO: 4148103 - DNA, 25 bp, Homo sapien
cctccagcttgtgccatccccacgc

SEQ ID NO: 4148104 - DNA, 25 bp, Homo sapien
cacgctggaagcttccctagcgaag

SEQ ID NO: 4148105 - DNA, 25 bp, Homo sapien
tgggttttgggcttgcaattcactt

SEQ ID NO: 4148106 - DNA, 25 bp, Homo sapien
ctgggttttgggcttgcaattcact

SEQ ID NO: 4148107 - DNA, 25 bp, Homo sapien
cctgggttttgggcttgcaattcac

SEQ ID NO: 4148108 - DNA, 25 bp, Homo sapien
gggacggcaatgtcgggctccactc

SEQ ID NO: 4148109 - DNA, 25 bp, Homo sapien
cttgaacttggggacggcaatgtcg

SEQ ID NO: 4148110 - DNA, 25 bp, Homo sapien
tggggacggcaatgtcgggctccac

SEQ ID NO: 4148111 - DNA, 25 bp, Homo sapien
ggggacggcaatgtcgggctccact

SEQ ID NO: 4148112 - DNA, 25 bp, Homo sapien
catgtgctggataaggcctagtcgg

SEQ ID NO: 4148113 - DNA, 25 bp, Homo sapien
tgtgctggataaggcctagtcggac

SEQ ID NO: 4148114 - DNA, 25 bp, Homo sapien
gaatagcatgtgctggataaggcct

SEQ ID NO: 4148115 - DNA, 25 bp, Homo sapien
tagcatgtgctggataaggcctagt

SEQ ID NO: 4148116 - DNA, 25 bp, Homo sapien
tgcttttttcagctcagacttctcc

SEQ ID NO: 4148117 - DNA, 25 bp, Homo sapien
cttttttcagctcagacttctcctt

SEQ ID NO: 4148118 - DNA, 25 bp, Homo sapien
tcagacttctccttgggagctgcct

SEQ ID NO: 4148119 - DNA, 25 bp, Homo sapien
acttctccttgggagctgcctggac

SEQ ID NO: 4148120 - DNA, 25 bp, Homo sapien
gccagactttatctagtcgtcgctt

SEQ ID NO: 4148121 - DNA, 25 bp, Homo sapien
ccaaacttcactgcgtctcggagca

SEQ ID NO: 4148122 - DNA, 25 bp, Homo sapien
tttttctgccagactttatctagtc

SEQ ID NO: 4148123 - DNA, 25 bp, Homo sapien
caccaaacttcactgcgtctcggag

SEQ ID NO: 4148124 - DNA, 25 bp, Homo sapien
ctccggggcctggtagtcagctctg

SEQ ID NO: 4148125 - DNA, 25 bp, Homo sapien
ggcctggtagtcagctctgggtgct

SEQ ID NO: 4148126 - DNA, 25 bp, Homo sapien
cggggcctggtagtcagctctgggt

SEQ ID NO: 4148127 - DNA, 25 bp, Homo sapien
ctcctccggggcctggtagtcagct

SEQ ID NO: 4148128 - DNA, 25 bp, Homo sapien
cctcccccacaatccgctggtaggc

SEQ ID NO: 4148129 - DNA, 25 bp, Homo sapien
aggctggaatacacctcgggggctc

SEQ ID NO: 4148130 - DNA, 25 bp, Homo sapien
ccccacaatccgctggtaggccagg

SEQ ID NO: 4148131 - DNA, 25 bp, Homo sapien
tggaatacacctcgggggctcagaa

SEQ ID NO: 4148132 - DNA, 25 bp, Homo sapien
ctcactccccatgcagccgccactg

SEQ ID NO: 4148133 - DNA, 25 bp, Homo sapien
gctcactccccatgcagccgccact

SEQ ID NO: 4148134 - DNA, 25 bp, Homo sapien
gagatgcaactgtgagtgaccccac

SEQ ID NO: 4148135 - DNA, 25 bp, Homo sapien
cgtgtgaacgagtacctggaagcct

SEQ ID NO: 4148136 - DNA, 25 bp, Homo sapien
gctgcgactcagaatggatgttcag

SEQ ID NO: 4148137 - DNA, 25 bp, Homo sapien
actcaacccttgcaagacgtggacc

SEQ ID NO: 4148138 - DNA, 25 bp, Homo sapien
ttctccgcttaaggtccaaattgtc

SEQ ID NO: 4148139 - DNA, 25 bp, Homo sapien
aggtccaaattgtctggtgtaacat

SEQ ID NO: 4148140 - DNA, 25 bp, Homo sapien
gaggttggcccttgttgtgcctgag

SEQ ID NO: 4148141 - DNA, 25 bp, Homo sapien
ggatggagctgtgtgcgttgtgagg

SEQ ID NO: 4148142 - DNA, 25 bp, Homo sapien
acagtcctaatcctctccagtgtga

SEQ ID NO: 4148143 - DNA, 25 bp, Homo sapien
tcgagtgcctatttcaggagttgaa

SEQ ID NO: 4148144 - DNA, 25 bp, Homo sapien
caggagttgaaatctgaacatcagc

SEQ ID NO: 4148145 - DNA, 25 bp, Homo sapien
ctattgaattctcggaaatgggctt

SEQ ID NO: 4148146 - DNA, 25 bp, Homo sapien
ttctgttcctccctagtaaaagcag

SEQ ID NO: 4148147 - DNA, 25 bp, Homo sapien
ttgtcggggagatcaagcagtttct

SEQ ID NO: 4148148 - DNA, 25 bp, Homo sapien
caggtggcgcttgtcggggagatca

SEQ ID NO: 4148149 - DNA, 25 bp, Homo sapien
tgttcctccctagtaaaagcaggaa

SEQ ID NO: 4148150 - DNA, 25 bp, Homo sapien
gctaattggatagtgaagtgaccga

SEQ ID NO: 4148151 - DNA, 25 bp, Homo sapien
tacagaggcgagtttgatcctaaac

SEQ ID NO: 4148152 - DNA, 25 bp, Homo sapien
taaaaggagctcattcggaggcagg

SEQ ID NO: 4148153 - DNA, 25 bp, Homo sapien
gagtccctccggtaggtggtacaga

SEQ ID NO: 4148154 - DNA, 25 bp, Homo sapien
tgaagattgtacagttgcttgcttt

SEQ ID NO: 4148155 - DNA, 25 bp, Homo sapien
tgcctcataaaagtagatccagttt

SEQ ID NO: 4148156 - DNA, 25 bp, Homo sapien
cataaaagtagatccagtttggaga

SEQ ID NO: 4148157 - DNA, 25 bp, Homo sapien
tcaagtagaggtggtgatatggtat

SEQ ID NO: 4148158 - DNA, 25 bp, Homo sapien
tcaatccaaattctgagaaccacca

SEQ ID NO: 4148159 - DNA, 25 bp, Homo sapien
agaaccaccaactgcctggaccaac

SEQ ID NO: 4148160 - DNA, 25 bp, Homo sapien
ttggctgagtccccaatgccatcag

SEQ ID NO: 4148161 - DNA, 25 bp, Homo sapien
tggctgagtccccaatgccatcagc

SEQ ID NO: 4148162 - DNA, 25 bp, Homo sapien
gggagcaccagtaccttagctttgt

SEQ ID NO: 4148163 - DNA, 25 bp, Homo sapien
gaacttgcgacacggtggaagttct

SEQ ID NO: 4148164 - DNA, 25 bp, Homo sapien
gtaccttagctttgtggaacttgcg

SEQ ID NO: 4148165 - DNA, 25 bp, Homo sapien
tggaacttgcgacacggtggaagtt

SEQ ID NO: 4148166 - DNA, 25 bp, Homo sapien
gaagttccaggatttgtgaatgacc

SEQ ID NO: 4148167 - DNA, 25 bp, Homo sapien
tgaatgacccagaggtccatgatcc

SEQ ID NO: 4148168 - DNA, 25 bp, Homo sapien
agcatgaatttggatggtgtgcatc

SEQ ID NO: 4148169 - DNA, 25 bp, Homo sapien
gatccacagtcatgcgccatttgaa

SEQ ID NO: 4148170 - DNA, 25 bp, Homo sapien
cagagaacagagtggatagttcttt

SEQ ID NO: 4148171 - DNA, 25 bp, Homo sapien
gagcaaaggtggaagttgggagaga

SEQ ID NO: 4148172 - DNA, 25 bp, Homo sapien
agagaacagagtggatagttctttg

SEQ ID NO: 4148173 - DNA, 25 bp, Homo sapien
ctgagcaaaggtggaagttgggaga

SEQ ID NO: 4148174 - DNA, 25 bp, Homo sapien
tgcccttgccaggcataaagccctg

SEQ ID NO: 4148175 - DNA, 25 bp, Homo sapien
cagacttcagacgtgcctcctctgg

SEQ ID NO: 4148176 - DNA, 25 bp, Homo sapien
ggcctgagcaggaattcgttggaag

SEQ ID NO: 4148177 - DNA, 25 bp, Homo sapien
ccctgtgcaactgggtttctacagc

SEQ ID NO: 4148178 - DNA, 25 bp, Homo sapien
ctctgtccacaaatacaggcttctg

SEQ ID NO: 4148179 - DNA, 25 bp, Homo sapien
gaagagctctgtccacaaatacagg

SEQ ID NO: 4148180 - DNA, 25 bp, Homo sapien
gaaccttcggaagagctctgtccac

SEQ ID NO: 4148181 - DNA, 25 bp, Homo sapien
cctcctggaaccttcggaagagctc

SEQ ID NO: 4148182 - DNA, 25 bp, Homo sapien
cggcgtgtgctctcctcggtaaata

SEQ ID NO: 4148183 - DNA, 25 bp, Homo sapien
gagccaagcccgtggaaaagcactt

SEQ ID NO: 4148184 - DNA, 25 bp, Homo sapien
caggaccctctgcaatcgtaaaatg

SEQ ID NO: 4148185 - DNA, 25 bp, Homo sapien
taaatatgggaactgccaagagcca

SEQ ID NO: 4148186 - DNA, 25 bp, Homo sapien
tcctaggcgctctcatagctctcat

SEQ ID NO: 4148187 - DNA, 25 bp, Homo sapien
tgccctctcctaggcgctctcatag

SEQ ID NO: 4148188 - DNA, 25 bp, Homo sapien
tttccaaagtgccctctcctaggcg

SEQ ID NO: 4148189 - DNA, 25 bp, Homo sapien
catttgctcactctcatctcccaaa

SEQ ID NO: 4148190 - DNA, 25 bp, Homo sapien
tgaaaaaacacgctgcttgtctgag

SEQ ID NO: 4148191 - DNA, 25 bp, Homo sapien
cagatgtctgtgcacctcggatttc

SEQ ID NO: 4148192 - DNA, 25 bp, Homo sapien
tccagggacctctgagcaaactgat

SEQ ID NO: 4148193 - DNA, 25 bp, Homo sapien
gatttgtgattgcaaggccaagccg

SEQ ID NO: 4148194 - DNA, 25 bp, Homo sapien
tcagctcatgtcatataaactccaa

SEQ ID NO: 4148195 - DNA, 25 bp, Homo sapien
atgcctggcacagcgtgtgcgttcc

SEQ ID NO: 4148196 - DNA, 25 bp, Homo sapien
ggcacagcgtgtgcgttccataaac

SEQ ID NO: 4148197 - DNA, 25 bp, Homo sapien
cagcgtgtgcgttccataaacgagt

SEQ ID NO: 4148198 - DNA, 25 bp, Homo sapien
tcacacagttggaaacgaaaggacg

SEQ ID NO: 4148199 - DNA, 25 bp, Homo sapien
aataccctcttcagataactgtggc

SEQ ID NO: 4148200 - DNA, 25 bp, Homo sapien
tactggttagatgcaacatgaaatc

SEQ ID NO: 4148201 - DNA, 25 bp, Homo sapien
gaaatctgaaaacctatcagtgagc

SEQ ID NO: 4148202 - DNA, 25 bp, Homo sapien
tcatgtttctgtctcgactgagtca

SEQ ID NO: 4148203 - DNA, 25 bp, Homo sapien
gacttgttttcaggtcccaggccac

SEQ ID NO: 4148204 - DNA, 25 bp, Homo sapien
gaagaattaacacacaatgacttgt

SEQ ID NO: 4148205 - DNA, 25 bp, Homo sapien
catttggccaaagcattaatttcac

SEQ ID NO: 4148206 - DNA, 25 bp, Homo sapien
tcttctaggcgcagatcagcagtgg

SEQ ID NO: 4148207 - DNA, 25 bp, Homo sapien
caactggagcttgtacccatggaga

SEQ ID NO: 4148208 - DNA, 25 bp, Homo sapien
taattaagccaagcactactgtggg

SEQ ID NO: 4148209 - DNA, 25 bp, Homo sapien
aaagaatcgcttcctgagcaggcca

SEQ ID NO: 4148210 - DNA, 25 bp, Homo sapien
tcctaggcccacccctgggatgagt

SEQ ID NO: 4148211 - DNA, 25 bp, Homo sapien
ctggactctgggctcgggatcctcc

SEQ ID NO: 4148212 - DNA, 25 bp, Homo sapien
gtaactgccgatggctttgagcctg

SEQ ID NO: 4148213 - DNA, 25 bp, Homo sapien
ccgggaataaattgccaagtaactg

SEQ ID NO: 4148214 - DNA, 25 bp, Homo sapien
taattaaatcatctcgggcatgtcc

SEQ ID NO: 4148215 - DNA, 25 bp, Homo sapien
agaagcaaagaacgggctggtccca

SEQ ID NO: 4148216 - DNA, 25 bp, Homo sapien
cctggagaaaccacaccgatggaag

SEQ ID NO: 4148217 - DNA, 25 bp, Homo sapien
caaggaactgcatttgataagcccc

SEQ ID NO: 4148218 - DNA, 25 bp, Homo sapien
tattcctcagaacaacgcaggtgag

SEQ ID NO: 4148219 - DNA, 25 bp, Homo sapien
tatagggtcctaggccactttgagg

SEQ ID NO: 4148220 - DNA, 25 bp, Homo sapien
gcttgacagcaagaggaatacgcag

SEQ ID NO: 4148221 - DNA, 25 bp, Homo sapien
gagtttgcctctgaaatcccagtgg

SEQ ID NO: 4148222 - DNA, 25 bp, Homo sapien
tatatgctgaattcgaaatggttct

SEQ ID NO: 4148223 - DNA, 25 bp, Homo sapien
gaagataaagaactaccgcccacag

SEQ ID NO: 4148224 - DNA, 25 bp, Homo sapien
tcttgtagagtttggctggtggccc

SEQ ID NO: 4148225 - DNA, 25 bp, Homo sapien
gcctccagctgtagtagtagtggca

SEQ ID NO: 4148226 - DNA, 25 bp, Homo sapien
tcatcgacttgtcactggagccagc

SEQ ID NO: 4148227 - DNA, 25 bp, Homo sapien
tgtgctagatatcttcccactgttc

SEQ ID NO: 4148228 - DNA, 25 bp, Homo sapien
tgctagatatcttcccactgttccc

SEQ ID NO: 4148229 - DNA, 25 bp, Homo sapien
cactggagccagcagaacatgatgt

SEQ ID NO: 4148230 - DNA, 25 bp, Homo sapien
gaggaaacctcattgccatagggaa

SEQ ID NO: 4148231 - DNA, 25 bp, Homo sapien
taacgggtcttgctgacaccagtgt

SEQ ID NO: 4148232 - DNA, 25 bp, Homo sapien
catggccattcgctgaagacaagga

SEQ ID NO: 4148233 - DNA, 25 bp, Homo sapien
tctctgatcgattggtggtctctgc

SEQ ID NO: 4148234 - DNA, 25 bp, Homo sapien
tgtgtggcctctagcacgtgtccaa

SEQ ID NO: 4148235 - DNA, 25 bp, Homo sapien
gccatttgcaattgtgtggcctcta

SEQ ID NO: 4148236 - DNA, 25 bp, Homo sapien
ttgcaattgtgtggcctctagcacg

SEQ ID NO: 4148237 - DNA, 25 bp, Homo sapien
cctgagctgggccatttgcaattgt

SEQ ID NO: 4148238 - DNA, 25 bp, Homo sapien
aaatgtatcagtaaggtcttgacct

SEQ ID NO: 4148239 - DNA, 25 bp, Homo sapien
agaaatgtatcagtaaggtcttgac

SEQ ID NO: 4148240 - DNA, 25 bp, Homo sapien
gtatcagtaaggtcttgaccttggc

SEQ ID NO: 4148241 - DNA, 25 bp, Homo sapien
atgtatcagtaaggtcttgaccttg

SEQ ID NO: 4148242 - DNA, 25 bp, Homo sapien
cctctggcctcgatatttgggttgc

SEQ ID NO: 4148243 - DNA, 25 bp, Homo sapien
tcataaaagactcgtaggaaatcct

SEQ ID NO: 4148244 - DNA, 25 bp, Homo sapien
taatgtgctattgaagaccagtgag

SEQ ID NO: 4148245 - DNA, 25 bp, Homo sapien
aaactccaggcttgggaatcagggc

SEQ ID NO: 4148246 - DNA, 25 bp, Homo sapien
cacagtgctggcgttttaagtcatc

SEQ ID NO: 4148247 - DNA, 25 bp, Homo sapien
gtcacagtgctggcgttttaagtca

SEQ ID NO: 4148248 - DNA, 25 bp, Homo sapien
tgtcacagtgctggcgttttaagtc

SEQ ID NO: 4148249 - DNA, 25 bp, Homo sapien
cagtgctggcgttttaagtcatctt

SEQ ID NO: 4148250 - DNA, 25 bp, Homo sapien
ttgtgcaaggccaagtttgacacat

SEQ ID NO: 4148251 - DNA, 25 bp, Homo sapien
tttggagactgtgtcagctctctct

SEQ ID NO: 4148252 - DNA, 25 bp, Homo sapien
catcacctttgctaagcgtcccagg

SEQ ID NO: 4148253 - DNA, 25 bp, Homo sapien
ccctgcatccataagccagtgtttt

SEQ ID NO: 4148254 - DNA, 25 bp, Homo sapien
gctgaaggagcaccattccctggac

SEQ ID NO: 4148255 - DNA, 25 bp, Homo sapien
actggggacctgtgagggaagaatt

SEQ ID NO: 4148256 - DNA, 25 bp, Homo sapien
agaggaactggggacctgtgaggga

SEQ ID NO: 4148257 - DNA, 25 bp, Homo sapien
aggctgaaggagcaccattccctgg

SEQ ID NO: 4148258 - DNA, 25 bp, Homo sapien
gttctggagcctctttaagctgttc

SEQ ID NO: 4148259 - DNA, 25 bp, Homo sapien
cttggagagccccaagcacggggac

SEQ ID NO: 4148260 - DNA, 25 bp, Homo sapien
ttcaaagtaaaggttgcagatctgg

SEQ ID NO: 4148261 - DNA, 25 bp, Homo sapien
cccaagcacggggacagtggccact

SEQ ID NO: 4148262 - DNA, 25 bp, Homo sapien
tctgccacaaggagcatggtctttg

SEQ ID NO: 4148263 - DNA, 25 bp, Homo sapien
tctccattgtttatctctgccacaa

SEQ ID NO: 4148264 - DNA, 25 bp, Homo sapien
tcccatctccattgtttatctctgc

SEQ ID NO: 4148265 - DNA, 25 bp, Homo sapien
cacaaggagcatggtctttgctgct

SEQ ID NO: 4148266 - DNA, 25 bp, Homo sapien
aactggctgcttggaaaattccaag

SEQ ID NO: 4148267 - DNA, 25 bp, Homo sapien
cctggagtcgctggacccagatggt

SEQ ID NO: 4148268 - DNA, 25 bp, Homo sapien
tccaagtttggctggcggctctggt

SEQ ID NO: 4148269 - DNA, 25 bp, Homo sapien
gagggcttccatggctgaactggct

SEQ ID NO: 4148270 - DNA, 25 bp, Homo sapien
cttaggtgccaagccggccagatgt

SEQ ID NO: 4148271 - DNA, 25 bp, Homo sapien
aaatgcgtctgttgccattcagcag

SEQ ID NO: 4148272 - DNA, 25 bp, Homo sapien
catctgctgtaatggcatggtgcct

SEQ ID NO: 4148273 - DNA, 25 bp, Homo sapien
ggtgcctgctcacaagatggcatgc

SEQ ID NO: 4148274 - DNA, 25 bp, Homo sapien
agggtcctgacttccgccctctgac

SEQ ID NO: 4148275 - DNA, 25 bp, Homo sapien
tagggtcctgacttccgccctctga

SEQ ID NO: 4148276 - DNA, 25 bp, Homo sapien
aaggtcccggcttttgcgcaggctg

SEQ ID NO: 4148277 - DNA, 25 bp, Homo sapien
tgcggcagccaagggcctgcagtca

SEQ ID NO: 4148278 - DNA, 25 bp, Homo sapien
gcttgagcaggcaaggtcccggctt

SEQ ID NO: 4148279 - DNA, 25 bp, Homo sapien
tgtgccatgctcgggccagggcaat

SEQ ID NO: 4148280 - DNA, 25 bp, Homo sapien
gcgtgcacatatctttatgatggag

SEQ ID NO: 4148281 - DNA, 25 bp, Homo sapien
gaagaaagtgcatcttcggatctag

SEQ ID NO: 4148282 - DNA, 25 bp, Homo sapien
tatcttaggctcaggtatacatgtg

SEQ ID NO: 4148283 - DNA, 25 bp, Homo sapien
tctattgggaatagtactgccatga

SEQ ID NO: 4148284 - DNA, 25 bp, Homo sapien
tgaggaggttgggttaggtgagggc

SEQ ID NO: 4148285 - DNA, 25 bp, Homo sapien
gggtagggtgacctgggtggatcag

SEQ ID NO: 4148286 - DNA, 25 bp, Homo sapien
gagggctttttcagttgtatactcc

SEQ ID NO: 4148287 - DNA, 25 bp, Homo sapien
ccaggcaccttgtggaaaaagctgc

SEQ ID NO: 4148288 - DNA, 25 bp, Homo sapien
cgagagaaagctgaccaaactgccc

SEQ ID NO: 4148289 - DNA, 25 bp, Homo sapien
acagcgagagaaagctgaccaaact

SEQ ID NO: 4148290 - DNA, 25 bp, Homo sapien
gagagaaagctgaccaaactgccct

SEQ ID NO: 4148291 - DNA, 25 bp, Homo sapien
agcgagagaaagctgaccaaactgc

SEQ ID NO: 4148292 - DNA, 25 bp, Homo sapien
tttgggggcttctctgagtggatcc

SEQ ID NO: 4148293 - DNA, 25 bp, Homo sapien
tgggggcttctctgagtggatcctt

SEQ ID NO: 4148294 - DNA, 25 bp, Homo sapien
ggggcttctctgagtggatccttac

SEQ ID NO: 4148295 - DNA, 25 bp, Homo sapien
tgtttgggggcttctctgagtggat

SEQ ID NO: 4148296 - DNA, 25 bp, Homo sapien
ttgtggggctcctgcggcttccaca

SEQ ID NO: 4148297 - DNA, 25 bp, Homo sapien
ggctcctgcggcttccacagggagc

SEQ ID NO: 4148298 - DNA, 25 bp, Homo sapien
gggctcctgcggcttccacagggag

SEQ ID NO: 4148299 - DNA, 25 bp, Homo sapien
tggggctcctgcggcttccacaggg

SEQ ID NO: 4148300 - DNA, 25 bp, Homo sapien
atgggactggcttagtcctaatgag

SEQ ID NO: 4148301 - DNA, 25 bp, Homo sapien
gctcgaagcagctctgatttccagg

SEQ ID NO: 4148302 - DNA, 25 bp, Homo sapien
gaacggcttggctcattggcctctt

SEQ ID NO: 4148303 - DNA, 25 bp, Homo sapien
aaagagcccgcgcagagcttgctcg

SEQ ID NO: 4148304 - DNA, 25 bp, Homo sapien
ggtgggatggcagctggtgaaattg

SEQ ID NO: 4148305 - DNA, 25 bp, Homo sapien
tgctgcggaccgagggttggagaca

SEQ ID NO: 4148306 - DNA, 25 bp, Homo sapien
aattggacagatccctgagaaaatg

SEQ ID NO: 4148307 - DNA, 25 bp, Homo sapien
aatgtagcaggctctctcaggaggg

SEQ ID NO: 4148308 - DNA, 25 bp, Homo sapien
ttcatgttcttagggctcgttgctc

SEQ ID NO: 4148309 - DNA, 25 bp, Homo sapien
agtgttttcatgttcttagggctcg

SEQ ID NO: 4148310 - DNA, 25 bp, Homo sapien
gaagtgttttcatgttcttagggct

SEQ ID NO: 4148311 - DNA, 25 bp, Homo sapien
ttcttagggctcgttgctcttgctg

SEQ ID NO: 4148312 - DNA, 25 bp, Homo sapien
agtggacgggcccacccactgatct

SEQ ID NO: 4148313 - DNA, 25 bp, Homo sapien
tctccaacggatgccgacaagtgga

SEQ ID NO: 4148314 - DNA, 25 bp, Homo sapien
tcagaacgactggctgggtttgcag

SEQ ID NO: 4148315 - DNA, 25 bp, Homo sapien
gtttgctttgatctccaacggatgc

SEQ ID NO: 4148316 - DNA, 25 bp, Homo sapien
gttttggtcaggattattcccacat

SEQ ID NO: 4148317 - DNA, 25 bp, Homo sapien
ggttttggtcaggattattcccaca

SEQ ID NO: 4148318 - DNA, 25 bp, Homo sapien
ttttggtcaggattattcccacatc

SEQ ID NO: 4148319 - DNA, 25 bp, Homo sapien
gcagccaatttggtgcttgccatgt

SEQ ID NO: 4148320 - DNA, 25 bp, Homo sapien
tgccatgtgtctcccgctgatgatt

SEQ ID NO: 4148321 - DNA, 25 bp, Homo sapien
tctagccaggtgtgtttcccaagca

SEQ ID NO: 4148322 - DNA, 25 bp, Homo sapien
cccatgggatgagaattctagccag

SEQ ID NO: 4148323 - DNA, 25 bp, Homo sapien
ggctacccagatatagcctgtgagt

SEQ ID NO: 4148324 - DNA, 25 bp, Homo sapien
tgagtcttcttggtgcagcatttgg

SEQ ID NO: 4148325 - DNA, 25 bp, Homo sapien
cccctccagaggattgaatgctgta

SEQ ID NO: 4148326 - DNA, 25 bp, Homo sapien
gaatgctgtatagttctcttcccgc

SEQ ID NO: 4148327 - DNA, 25 bp, Homo sapien
tctgggatcatcctcggtcaaacct

SEQ ID NO: 4148328 - DNA, 25 bp, Homo sapien
tcaggctgatggcagaatctttgtc

SEQ ID NO: 4148329 - DNA, 25 bp, Homo sapien
agaatctttgtcttaccatcttttc

SEQ ID NO: 4148330 - DNA, 25 bp, Homo sapien
tcccactccgactttgttaatagag

SEQ ID NO: 4148331 - DNA, 25 bp, Homo sapien
tatcctgtgggccaagacagagcag

SEQ ID NO: 4148332 - DNA, 25 bp, Homo sapien
tactgtgggttcctctaagtggcca

SEQ ID NO: 4148333 - DNA, 25 bp, Homo sapien
ggccacaagatgtcataatgtcatt

SEQ ID NO: 4148334 - DNA, 25 bp, Homo sapien
caagtctgggtgtcaagttacatcc

SEQ ID NO: 4148335 - DNA, 25 bp, Homo sapien
atgatgctggtgtgtcgctgttgta

SEQ ID NO: 4148336 - DNA, 25 bp, Homo sapien
caggatgatgctggtgtgtcgctgt

SEQ ID NO: 4148337 - DNA, 25 bp, Homo sapien
atgctggtgtgtcgctgttgtagca

SEQ ID NO: 4148338 - DNA, 25 bp, Homo sapien
aggatgatgctggtgtgtcgctgtt

SEQ ID NO: 4148339 - DNA, 25 bp, Homo sapien
gatgtttcgcacaatggatgctctg

SEQ ID NO: 4148340 - DNA, 25 bp, Homo sapien
gagtctcctctaactatttctgggc

SEQ ID NO: 4148341 - DNA, 25 bp, Homo sapien
ctgctgttgatgccctctgtgcgca

SEQ ID NO: 4148342 - DNA, 25 bp, Homo sapien
gcatccgtggggatgtttcgcacaa

SEQ ID NO: 4148343 - DNA, 25 bp, Homo sapien
taagtgatgttgagtcgatgagcca

SEQ ID NO: 4148344 - DNA, 25 bp, Homo sapien
ttgagtcgatgagccaagagcacat

SEQ ID NO: 4148345 - DNA, 25 bp, Homo sapien
tcgatgagccaagagcacatctgtt

SEQ ID NO: 4148346 - DNA, 25 bp, Homo sapien
ccaagagcacatctgttatttctgt

SEQ ID NO: 4148347 - DNA, 25 bp, Homo sapien
gcttctccactagggatgttgtagg

SEQ ID NO: 4148348 - DNA, 25 bp, Homo sapien
ccgtgaaccagcaaaaggaagggct

SEQ ID NO: 4148349 - DNA, 25 bp, Homo sapien
tgttgtaggtaattgggagaagcat

SEQ ID NO: 4148350 - DNA, 25 bp, Homo sapien
tagacaccggaacatcagggctccg

SEQ ID NO: 4148351 - DNA, 25 bp, Homo sapien
aaaaataggccataatccatactgg

SEQ ID NO: 4148352 - DNA, 25 bp, Homo sapien
cataatccatactggtggtcaccaa

SEQ ID NO: 4148353 - DNA, 25 bp, Homo sapien
caccaaagattgagctccgtagtca

SEQ ID NO: 4148354 - DNA, 25 bp, Homo sapien
tctttctgaggctgagagtactgca

SEQ ID NO: 4148355 - DNA, 25 bp, Homo sapien
ccactgccctaatgatgaacgcccg

SEQ ID NO: 4148356 - DNA, 25 bp, Homo sapien
ctgccctaatgatgaacgcccgttg

SEQ ID NO: 4148357 - DNA, 25 bp, Homo sapien
actgccctaatgatgaacgcccgtt

SEQ ID NO: 4148358 - DNA, 25 bp, Homo sapien
cactgccctaatgatgaacgcccgt

SEQ ID NO: 4148359 - DNA, 25 bp, Homo sapien
cttaatgggtaacaaggctctgtgc

SEQ ID NO: 4148360 - DNA, 25 bp, Homo sapien
gaacctagtgttatccctgaccctg

SEQ ID NO: 4148361 - DNA, 25 bp, Homo sapien
tgctcagcgtccagcgacaataaag

SEQ ID NO: 4148362 - DNA, 25 bp, Homo sapien
aggaattttctggacctcatcaagg

SEQ ID NO: 4148363 - DNA, 25 bp, Homo sapien
tccacggatattgggggtgatgctt

SEQ ID NO: 4148364 - DNA, 25 bp, Homo sapien
gggtgatgcttgagttgggaccagg

SEQ ID NO: 4148365 - DNA, 25 bp, Homo sapien
tgggggtgatgcttgagttgggacc

SEQ ID NO: 4148366 - DNA, 25 bp, Homo sapien
gtgtccacggatattgggggtgatg

SEQ ID NO: 4148367 - DNA, 25 bp, Homo sapien
gataattctgtcaagttggagcact

SEQ ID NO: 4148368 - DNA, 25 bp, Homo sapien
gcaaattgagtcgaggattctcccc

SEQ ID NO: 4148369 - DNA, 25 bp, Homo sapien
tgttcgctcactgctgataattctg

SEQ ID NO: 4148370 - DNA, 25 bp, Homo sapien
gagcacttgcctggtttggcagcaa

SEQ ID NO: 4148371 - DNA, 25 bp, Homo sapien
catacagagtgtcaatgagggggct

SEQ ID NO: 4148372 - DNA, 25 bp, Homo sapien
tccaattgatgggtggactgtccag

SEQ ID NO: 4148373 - DNA, 25 bp, Homo sapien
gtccaggcattgagcttcccggtca

SEQ ID NO: 4148374 - DNA, 25 bp, Homo sapien
tcacttagcagctcatacagagtgt

SEQ ID NO: 4148375 - DNA, 25 bp, Homo sapien
tctttcttgattcttataggcagct

SEQ ID NO: 4148376 - DNA, 25 bp, Homo sapien
tcttgattcttataggcagctctgg

SEQ ID NO: 4148377 - DNA, 25 bp, Homo sapien
gattcttataggcagctctggcact

SEQ ID NO: 4148378 - DNA, 25 bp, Homo sapien
cttataggcagctctggcactctgg

SEQ ID NO: 4148379 - DNA, 25 bp, Homo sapien
ccaatcccatttgaagggagatgga

SEQ ID NO: 4148380 - DNA, 25 bp, Homo sapien
aagaataaggttcatcactcccacc

SEQ ID NO: 4148381 - DNA, 25 bp, Homo sapien
tggggtgagctccttggtccgtcca

SEQ ID NO: 4148382 - DNA, 25 bp, Homo sapien
gcctcctgcgatgttgtgaatcaca

SEQ ID NO: 4148383 - DNA, 25 bp, Homo sapien
aagtgcgactccctgtttcctagga

SEQ ID NO: 4148384 - DNA, 25 bp, Homo sapien
gagtcacgtgacagctccaaatgcg

SEQ ID NO: 4148385 - DNA, 25 bp, Homo sapien
tcccagcaaaggtgcaagtgcgact

SEQ ID NO: 4148386 - DNA, 25 bp, Homo sapien
ctaaaaatagctccccgagtcacgt

SEQ ID NO: 4148387 - DNA, 25 bp, Homo sapien
aattgcacttggcagtgatgacact

SEQ ID NO: 4148388 - DNA, 25 bp, Homo sapien
aggtggctctgcgaaggcgtctctt

SEQ ID NO: 4148389 - DNA, 25 bp, Homo sapien
tgcagggtggaagtcggcagcagaa

SEQ ID NO: 4148390 - DNA, 25 bp, Homo sapien
agcagaagcccttaattcccagacc

SEQ ID NO: 4148391 - DNA, 25 bp, Homo sapien
ggggaacaggtgctcccattccagg

SEQ ID NO: 4148392 - DNA, 25 bp, Homo sapien
ctttctccagctcctccctgtccta

SEQ ID NO: 4148393 - DNA, 25 bp, Homo sapien
cctttctccagctcctccctgtcct

SEQ ID NO: 4148394 - DNA, 25 bp, Homo sapien
tttctccagctcctccctgtcctac

SEQ ID NO: 4148395 - DNA, 25 bp, Homo sapien
ccctttctccagctcctccctgtcc

SEQ ID NO: 4148396 - DNA, 25 bp, Homo sapien
ctcctgcttaagtgagtcgttcttg

SEQ ID NO: 4148397 - DNA, 25 bp, Homo sapien
ctggcagcctcttgacatgaccatt

SEQ ID NO: 4148398 - DNA, 25 bp, Homo sapien
tcttgacatgaccattcacttcagt

SEQ ID NO: 4148399 - DNA, 25 bp, Homo sapien
taagtgagtcgttcttgattccctg

SEQ ID NO: 4148400 - DNA, 25 bp, Homo sapien
gttaatgccattaatcgtgtcgtgg

SEQ ID NO: 4148401 - DNA, 25 bp, Homo sapien
tcgtggtgtcgcgtgtggcctgtgc

SEQ ID NO: 4148402 - DNA, 25 bp, Homo sapien
cattaatcgtgtcgtggtgtcgcgt

SEQ ID NO: 4148403 - DNA, 25 bp, Homo sapien
cggcctccggcgctgttaatgccat

SEQ ID NO: 4148404 - DNA, 25 bp, Homo sapien
cacagtgttacgcttgcaagtttcc

SEQ ID NO: 4148405 - DNA, 25 bp, Homo sapien
tattcctgttactggcatgtgcacg

SEQ ID NO: 4148406 - DNA, 25 bp, Homo sapien
taacctttgcttgtatgtaaccgaa

SEQ ID NO: 4148407 - DNA, 25 bp, Homo sapien
tgtgcgcgcacacagagcttacctg

SEQ ID NO: 4148408 - DNA, 25 bp, Homo sapien
ggagggcagcctgatttgtaatgaa

SEQ ID NO: 4148409 - DNA, 25 bp, Homo sapien
taacagcttgaattgagtagccaac

SEQ ID NO: 4148410 - DNA, 25 bp, Homo sapien
acagagtttgtagtacttcagagac

SEQ ID NO: 4148411 - DNA, 25 bp, Homo sapien
tctgtctgtggaggcaacaaataaa

SEQ ID NO: 4148412 - DNA, 25 bp, Homo sapien
cattgaacagttacagatctgggac

SEQ ID NO: 4148413 - DNA, 25 bp, Homo sapien
tgaaaccaatccatggcaacgctgg

SEQ ID NO: 4148414 - DNA, 25 bp, Homo sapien
aactccagtggtgaacggcttgcgc

SEQ ID NO: 4148415 - DNA, 25 bp, Homo sapien
tcccctgctgtggtaggaactccag

SEQ ID NO: 4148416 - DNA, 25 bp, Homo sapien
cagtgcagggtcagaacagcagaac

SEQ ID NO: 4148417 - DNA, 25 bp, Homo sapien
caaagggcgacatgtcagcagtcaa

SEQ ID NO: 4148418 - DNA, 25 bp, Homo sapien
taactgtgggcaacgtcaccgtcat

SEQ ID NO: 4148419 - DNA, 25 bp, Homo sapien
tgaaaaacgtggacaggagcactgc

SEQ ID NO: 4148420 - DNA, 25 bp, Homo sapien
tttgattctctctgtgtttaggata

SEQ ID NO: 4148421 - DNA, 25 bp, Homo sapien
cctctcttgttcttggatcagattt

SEQ ID NO: 4148422 - DNA, 25 bp, Homo sapien
gatttctctggcgtaaagtacccat

SEQ ID NO: 4148423 - DNA, 25 bp, Homo sapien
gatagtcttaaattggtgttcagct

SEQ ID NO: 4148424 - DNA, 25 bp, Homo sapien
tgaagaattctgagcgtgcatttgc

SEQ ID NO: 4148425 - DNA, 25 bp, Homo sapien
tcctgtagataccagattgtgttgc

SEQ ID NO: 4148426 - DNA, 25 bp, Homo sapien
taccagattgtgttgcatgcactga

SEQ ID NO: 4148427 - DNA, 25 bp, Homo sapien
ttttgtacatacagacttcatcctg

SEQ ID NO: 4148428 - DNA, 25 bp, Homo sapien
caagagctaagtgaatggtacctaa

SEQ ID NO: 4148429 - DNA, 25 bp, Homo sapien
aaagtagtgctttggaatgtatgta

SEQ ID NO: 4148430 - DNA, 25 bp, Homo sapien
tggaatatctctctacatgtcctgt

SEQ ID NO: 4148431 - DNA, 25 bp, Homo sapien
cttgtacagggaattgtcttgtgga

SEQ ID NO: 4148432 - DNA, 25 bp, Homo sapien
tgccttccagtatctgaagaagggt

SEQ ID NO: 4148433 - DNA, 25 bp, Homo sapien
cagtagacttgcacagtccagtatt

SEQ ID NO: 4148434 - DNA, 25 bp, Homo sapien
tctcaagactgtctctttctttgcc

SEQ ID NO: 4148435 - DNA, 25 bp, Homo sapien
gacttgcacagtccagtattgggca

SEQ ID NO: 4148436 - DNA, 25 bp, Homo sapien
ttctttgcccgcgatgcagtagact

SEQ ID NO: 4148437 - DNA, 25 bp, Homo sapien
cagattggattgctttagtgtaatg

SEQ ID NO: 4148438 - DNA, 25 bp, Homo sapien
cagagcagattggattgctttagtg

SEQ ID NO: 4148439 - DNA, 25 bp, Homo sapien
gagcagattggattgctttagtgta

SEQ ID NO: 4148440 - DNA, 25 bp, Homo sapien
gcagattggattgctttagtgtaat

SEQ ID NO: 4148441 - DNA, 25 bp, Homo sapien
catattgatgagaatgtaggacagg

SEQ ID NO: 4148442 - DNA, 25 bp, Homo sapien
tctgatttcactaagaccaaagttt

SEQ ID NO: 4148443 - DNA, 25 bp, Homo sapien
aagagccagggctaaaattccattt

SEQ ID NO: 4148444 - DNA, 25 bp, Homo sapien
gctgtggttcgttcttaaaagtcat

SEQ ID NO: 4148445 - DNA, 25 bp, Homo sapien
ccttgtcagccgggggtttgtcatg

SEQ ID NO: 4148446 - DNA, 25 bp, Homo sapien
catagttaatctgtgggacagtttg

SEQ ID NO: 4148447 - DNA, 25 bp, Homo sapien
taaacatgctcatagttaatctgtg

SEQ ID NO: 4148448 - DNA, 25 bp, Homo sapien
catgctcatagttaatctgtgggac

SEQ ID NO: 4148449 - DNA, 25 bp, Homo sapien
ctgtctgaagggcgagtctatgctg

SEQ ID NO: 4148450 - DNA, 25 bp, Homo sapien
tctgaagggcgagtctatgctggtg

SEQ ID NO: 4148451 - DNA, 25 bp, Homo sapien
gggcgagtctatgctggtgtgtctg

SEQ ID NO: 4148452 - DNA, 25 bp, Homo sapien
tggggtagggtaacactgggatgct

SEQ ID NO: 4148453 - DNA, 25 bp, Homo sapien
atttgtggcacatgtagcttgatcc

SEQ ID NO: 4148454 - DNA, 25 bp, Homo sapien
ggcccactagactgatttcaaggct

SEQ ID NO: 4148455 - DNA, 25 bp, Homo sapien
attcaggatcatagattggcccact

SEQ ID NO: 4148456 - DNA, 25 bp, Homo sapien
ttgatcctgttatttttcctatggg

SEQ ID NO: 4148457 - DNA, 25 bp, Homo sapien
cctggtgggcacctggttggaaaat

SEQ ID NO: 4148458 - DNA, 25 bp, Homo sapien
tccgtggcagtatcttgaaggcttc

SEQ ID NO: 4148459 - DNA, 25 bp, Homo sapien
tggaaaattttccatgcaaaggtta

SEQ ID NO: 4148460 - DNA, 25 bp, Homo sapien
tagtggctaagctcatccgaaagca

SEQ ID NO: 4148461 - DNA, 25 bp, Homo sapien
tgatgtaacatatgaagcacctgct

SEQ ID NO: 4148462 - DNA, 25 bp, Homo sapien
gaaatgtggataacaggtgactgga

SEQ ID NO: 4148463 - DNA, 25 bp, Homo sapien
tctctggtgatgataggtactactg

SEQ ID NO: 4148464 - DNA, 25 bp, Homo sapien
taaactgaatggattgcccaagctg

SEQ ID NO: 4148465 - DNA, 25 bp, Homo sapien
gttactagatacgtgaggattttcc

SEQ ID NO: 4148466 - DNA, 25 bp, Homo sapien
tcgaatagtgttagcatggcatccc

SEQ ID NO: 4148467 - DNA, 25 bp, Homo sapien
accactccagctttgtttcgaatag

SEQ ID NO: 4148468 - DNA, 25 bp, Homo sapien
aattgaccccttttccattctgaag

SEQ ID NO: 4148469 - DNA, 25 bp, Homo sapien
tgttcataacaggtacaacagttga

SEQ ID NO: 4148470 - DNA, 25 bp, Homo sapien
ttcagaaacagagcgactagagtgg

SEQ ID NO: 4148471 - DNA, 25 bp, Homo sapien
aaacggtgatccctcttagtagagc

SEQ ID NO: 4148472 - DNA, 25 bp, Homo sapien
tagagctcccatagaatgccttccg

SEQ ID NO: 4148473 - DNA, 25 bp, Homo sapien
ctgtgttctaatgtgtagattttgt

SEQ ID NO: 4148474 - DNA, 25 bp, Homo sapien
gttttcactgtatgcgttgctggct

SEQ ID NO: 4148475 - DNA, 25 bp, Homo sapien
tatggaggaagtcacaggacatcca

SEQ ID NO: 4148476 - DNA, 25 bp, Homo sapien
gtatgcgttgctggctttatttcca

SEQ ID NO: 4148477 - DNA, 25 bp, Homo sapien
ttttatcaaaccttccaagctgaaa

SEQ ID NO: 4148478 - DNA, 25 bp, Homo sapien
gaaagctggtacaatttaagatcat

SEQ ID NO: 4148479 - DNA, 25 bp, Homo sapien
tgtcttccaaatcaaacttttatca

SEQ ID NO: 4148480 - DNA, 25 bp, Homo sapien
tcaaaccttccaagctgaaagctgg

SEQ ID NO: 4148481 - DNA, 25 bp, Homo sapien
gaaatgtatcgctgtgttgagatca

SEQ ID NO: 4148482 - DNA, 25 bp, Homo sapien
aggtttagaactttctggtcttcag

SEQ ID NO: 4148483 - DNA, 25 bp, Homo sapien
cataggtttagaactttctggtctt

SEQ ID NO: 4148484 - DNA, 25 bp, Homo sapien
cttcagctccagaaatgtatcgctg

SEQ ID NO: 4148485 - DNA, 25 bp, Homo sapien
cactcctcggaaggccaaaaagaca

SEQ ID NO: 4148486 - DNA, 25 bp, Homo sapien
gttttgggattgtagcgtctgcacc

SEQ ID NO: 4148487 - DNA, 25 bp, Homo sapien
aaaagacaagcgaaacctgccgcag

SEQ ID NO: 4148488 - DNA, 25 bp, Homo sapien
catctgcgatgtgaggaaaggcacc

SEQ ID NO: 4148489 - DNA, 25 bp, Homo sapien
tggggtcgtcctcctaccagatctc

SEQ ID NO: 4148490 - DNA, 25 bp, Homo sapien
acagccgcgtctgtgtcttttatca

SEQ ID NO: 4148491 - DNA, 25 bp, Homo sapien
tatcatctggggtcgtcctcctacc

SEQ ID NO: 4148492 - DNA, 25 bp, Homo sapien
gcgtctgtgtcttttatcatctggg

SEQ ID NO: 4148493 - DNA, 25 bp, Homo sapien
ttataggtttaggtttcacatgttg

SEQ ID NO: 4148494 - DNA, 25 bp, Homo sapien
tgacgtataagccaggacaattttg

SEQ ID NO: 4148495 - DNA, 25 bp, Homo sapien
gagttaatttttgtcgagggtgtga

SEQ ID NO: 4148496 - DNA, 25 bp, Homo sapien
catgttggtctatgatacagtttga

SEQ ID NO: 4148497 - DNA, 25 bp, Homo sapien
tgttttcattaggtggcttgtcttc

SEQ ID NO: 4148498 - DNA, 25 bp, Homo sapien
ttgtcccttcatattcttaacagtg

SEQ ID NO: 4148499 - DNA, 25 bp, Homo sapien
tcttcttattgcacggtaaaagttc

SEQ ID NO: 4148500 - DNA, 25 bp, Homo sapien
cccttcatattcttaacagtgtctt

SEQ ID NO: 4148501 - DNA, 25 bp, Homo sapien
gaggaactgtaccatattgcactcc

SEQ ID NO: 4148502 - DNA, 25 bp, Homo sapien
ggaactgtaccatattgcactccca

SEQ ID NO: 4148503 - DNA, 25 bp, Homo sapien
agaggaactgtaccatattgcactc

SEQ ID NO: 4148504 - DNA, 25 bp, Homo sapien
aggaactgtaccatattgcactccc

SEQ ID NO: 4148505 - DNA, 25 bp, Homo sapien
tcctaagacgggcagcatcaacagt

SEQ ID NO: 4148506 - DNA, 25 bp, Homo sapien
gaggcagagattgacgggccttttt

SEQ ID NO: 4148507 - DNA, 25 bp, Homo sapien
ctctgccacatttcctaagacgggc

SEQ ID NO: 4148508 - DNA, 25 bp, Homo sapien
ttacggatcagggaacacgagaggc

SEQ ID NO: 4148509 - DNA, 25 bp, Homo sapien
tgattacacggagctcactcgcaag

SEQ ID NO: 4148510 - DNA, 25 bp, Homo sapien
cacacactggccctaagtggaggaa

SEQ ID NO: 4148511 - DNA, 25 bp, Homo sapien
gctgtgcccagcaacctcatggtct

SEQ ID NO: 4148512 - DNA, 25 bp, Homo sapien
gctctccacctgatgacctgaaatg

SEQ ID NO: 4148513 - DNA, 25 bp, Homo sapien
gacagcatcctcatgtcaagcccct

SEQ ID NO: 4148514 - DNA, 25 bp, Homo sapien
tgtcagctccaggaacctaggagct

SEQ ID NO: 4148515 - DNA, 25 bp, Homo sapien
ctgggtgcgtgtggttgcaggtcac

SEQ ID NO: 4148516 - DNA, 25 bp, Homo sapien
caaaacaccaaagtgtgtgataggg

SEQ ID NO: 4148517 - DNA, 25 bp, Homo sapien
gcatcggttcgcacaggcattttgt

SEQ ID NO: 4148518 - DNA, 25 bp, Homo sapien
gaaataaagcttcgaagtactggca

SEQ ID NO: 4148519 - DNA, 25 bp, Homo sapien
gagaggagactattctgtgaacagc

SEQ ID NO: 4148520 - DNA, 25 bp, Homo sapien
gatgggaaggcacctaaactgaact

SEQ ID NO: 4148521 - DNA, 25 bp, Homo sapien
gctgtcggcccaaccttagctgcat

SEQ ID NO: 4148522 - DNA, 25 bp, Homo sapien
gatgctgtcggcccaaccttagctg

SEQ ID NO: 4148523 - DNA, 25 bp, Homo sapien
tggatgctgtcggcccaaccttagc

SEQ ID NO: 4148524 - DNA, 25 bp, Homo sapien
tgctgtcggcccaaccttagctgca

SEQ ID NO: 4148525 - DNA, 25 bp, Homo sapien
gcagggtctgaaacaggtttcaagc

SEQ ID NO: 4148526 - DNA, 25 bp, Homo sapien
ttgcagaatccagctggcttctcat

SEQ ID NO: 4148527 - DNA, 25 bp, Homo sapien
gccgttgcagttcataggagctaca

SEQ ID NO: 4148528 - DNA, 25 bp, Homo sapien
gctgacttcgttctgtgcctcatgc

SEQ ID NO: 4148529 - DNA, 25 bp, Homo sapien
ctaaggtggcagacagatagctttc

SEQ ID NO: 4148530 - DNA, 25 bp, Homo sapien
taaggtggcagacagatagctttca

SEQ ID NO: 4148531 - DNA, 25 bp, Homo sapien
aaggtggcagacagatagctttcaa

SEQ ID NO: 4148532 - DNA, 25 bp, Homo sapien
gagcctcggtccaggaccttatgat

SEQ ID NO: 4148533 - DNA, 25 bp, Homo sapien
tccaggaccttatgatatttgccaa

SEQ ID NO: 4148534 - DNA, 25 bp, Homo sapien
caggaccttatgatatttgccaaca

SEQ ID NO: 4148535 - DNA, 25 bp, Homo sapien
tcggtccaggaccttatgatatttg

SEQ ID NO: 4148536 - DNA, 25 bp, Homo sapien
ggaccgatgacgacagcctgtagct

SEQ ID NO: 4148537 - DNA, 25 bp, Homo sapien
cacaaatgctggaagagagaccttc

SEQ ID NO: 4148538 - DNA, 25 bp, Homo sapien
tgttcttttgctggaccgatgacga

SEQ ID NO: 4148539 - DNA, 25 bp, Homo sapien
gccaatacacaaagacagaagtgga

SEQ ID NO: 4148540 - DNA, 25 bp, Homo sapien
ctccttgtccaaccctgtgagttgg

SEQ ID NO: 4148541 - DNA, 25 bp, Homo sapien
gtccaaccctgtgagttggccttgg

SEQ ID NO: 4148542 - DNA, 25 bp, Homo sapien
ccccaggctcgtgcccctccgtggg

SEQ ID NO: 4148543 - DNA, 25 bp, Homo sapien
ttccttgttgccgaccttggcccca

SEQ ID NO: 4148544 - DNA, 25 bp, Homo sapien
tcctgggtctctagttcttttccaa

SEQ ID NO: 4148545 - DNA, 25 bp, Homo sapien
atccccgttgctttcttgatcctgg

SEQ ID NO: 4148546 - DNA, 25 bp, Homo sapien
catccccgttgctttcttgatcctg

SEQ ID NO: 4148547 - DNA, 25 bp, Homo sapien
tcttgatcctgggtctctagttctt

SEQ ID NO: 4148548 - DNA, 25 bp, Homo sapien
gtaaatttcagagcccgaaggtgac

SEQ ID NO: 4148549 - DNA, 25 bp, Homo sapien
tcttcacagctatatcaagttctca

SEQ ID NO: 4148550 - DNA, 25 bp, Homo sapien
cacgtagggaagcacattgtaaatt

SEQ ID NO: 4148551 - DNA, 25 bp, Homo sapien
taaagataactttcctcttgcaccc

SEQ ID NO: 4148552 - DNA, 25 bp, Homo sapien
taaatagaggcaccaacagagtaat

SEQ ID NO: 4148553 - DNA, 25 bp, Homo sapien
gttgagtacttgctctgggctaaaa

SEQ ID NO: 4148554 - DNA, 25 bp, Homo sapien
tcctaataacctataaagtagatgt

SEQ ID NO: 4148555 - DNA, 25 bp, Homo sapien
tttagttcccactatgcaaatgagt

SEQ ID NO: 4148556 - DNA, 25 bp, Homo sapien
ctgccaaaggtcgcccaacacccag

SEQ ID NO: 4148557 - DNA, 25 bp, Homo sapien
caaaggtcgcccaacacccagtcct

SEQ ID NO: 4148558 - DNA, 25 bp, Homo sapien
gccaaaggtcgcccaacacccagtc

SEQ ID NO: 4148559 - DNA, 25 bp, Homo sapien
aaggtcgcccaacacccagtcctgc

SEQ ID NO: 4148560 - DNA, 25 bp, Homo sapien
cctgtcagccattgaatgtaggacc

SEQ ID NO: 4148561 - DNA, 25 bp, Homo sapien
ccattgaatgtaggaccaggtccca

SEQ ID NO: 4148562 - DNA, 25 bp, Homo sapien
aatgtcggccacgaaccggcaatgt

SEQ ID NO: 4148563 - DNA, 25 bp, Homo sapien
tagtcacacctgctaggcgatgtac

SEQ ID NO: 4148564 - DNA, 25 bp, Homo sapien
gatgctgactgaggccagatggctt

SEQ ID NO: 4148565 - DNA, 25 bp, Homo sapien
gccagcagtgcatatgggatgcatg

SEQ ID NO: 4148566 - DNA, 25 bp, Homo sapien
tccacctcgaatgctccagaacaaa

SEQ ID NO: 4148567 - DNA, 25 bp, Homo sapien
ggtaccatcagagtctccacctcga

SEQ ID NO: 4148568 - DNA, 25 bp, Homo sapien
agtgctttgcacaccctgggaacga

SEQ ID NO: 4148569 - DNA, 25 bp, Homo sapien
taagtgcccaaaatacgagcttgta

SEQ ID NO: 4148570 - DNA, 25 bp, Homo sapien
tcccttccaggcagtattgattgct

SEQ ID NO: 4148571 - DNA, 25 bp, Homo sapien
tctagctcggtggttctcaaaggtt

SEQ ID NO: 4148572 - DNA, 25 bp, Homo sapien
ttggcggcagctcagtaaccacctg

SEQ ID NO: 4148573 - DNA, 25 bp, Homo sapien
tgctcctcacgctgtttgatggctc

SEQ ID NO: 4148574 - DNA, 25 bp, Homo sapien
gatggctctgttcgctctttgccct

SEQ ID NO: 4148575 - DNA, 25 bp, Homo sapien
ttttctggaccaatagcactgcaga

SEQ ID NO: 4148576 - DNA, 25 bp, Homo sapien
tcagacaggtaacgtgctgacttca

SEQ ID NO: 4148577 - DNA, 25 bp, Homo sapien
ggtaacgtgctgacttcaaaatgag

SEQ ID NO: 4148578 - DNA, 25 bp, Homo sapien
tgagtgtgagcacccgatcatcaca

SEQ ID NO: 4148579 - DNA, 25 bp, Homo sapien
gagcacccgatcatcacactcaaga

SEQ ID NO: 4148580 - DNA, 25 bp, Homo sapien
tgtgaggacttcgactagattgttt

SEQ ID NO: 4148581 - DNA, 25 bp, Homo sapien
gctgtgaggacttcgactagattgt

SEQ ID NO: 4148582 - DNA, 25 bp, Homo sapien
agctgtgaggacttcgactagattg

SEQ ID NO: 4148583 - DNA, 25 bp, Homo sapien
tgaggacttcgactagattgttttc

SEQ ID NO: 4148584 - DNA, 25 bp, Homo sapien
tcccctaccaccagaaattatgtag

SEQ ID NO: 4148585 - DNA, 25 bp, Homo sapien
gtcccctaccaccagaaattatgta

SEQ ID NO: 4148586 - DNA, 25 bp, Homo sapien
ctaccaccagaaattatgtagtcga

SEQ ID NO: 4148587 - DNA, 25 bp, Homo sapien
ccctaccaccagaaattatgtagtc

SEQ ID NO: 4148588 - DNA, 25 bp, Homo sapien
cttgcagcgagagtgaagaagcatc

SEQ ID NO: 4148589 - DNA, 25 bp, Homo sapien
ttgcagcgagagtgaagaagcatct

SEQ ID NO: 4148590 - DNA, 25 bp, Homo sapien
ctgagccttgcagcgagagtgaaga

SEQ ID NO: 4148591 - DNA, 25 bp, Homo sapien
catcctgagccttgcagcgagagtg

SEQ ID NO: 4148592 - DNA, 25 bp, Homo sapien
tgaaaccagaatggccttctcccca

SEQ ID NO: 4148593 - DNA, 25 bp, Homo sapien
gtaaatgaaaccagaatggccttct

SEQ ID NO: 4148594 - DNA, 25 bp, Homo sapien
aagtaaatgaaaccagaatggcctt

SEQ ID NO: 4148595 - DNA, 25 bp, Homo sapien
aatgaaaccagaatggccttctccc

SEQ ID NO: 4148596 - DNA, 25 bp, Homo sapien
gttggccacaggtgtcgtcatcccc

SEQ ID NO: 4148597 - DNA, 25 bp, Homo sapien
aggtgtcgtcatccccagccttact

SEQ ID NO: 4148598 - DNA, 25 bp, Homo sapien
cttcattcacgaacattttattcct

SEQ ID NO: 4148599 - DNA, 25 bp, Homo sapien
tccatcactgggttggccacaggtg

SEQ ID NO: 4148600 - DNA, 25 bp, Homo sapien
caggtcctcggtggcttcacattca

SEQ ID NO: 4148601 - DNA, 25 bp, Homo sapien
gacatccaggtcctcggtggcttca

SEQ ID NO: 4148602 - DNA, 25 bp, Homo sapien
ggtcctcggtggcttcacattcatc

SEQ ID NO: 4148603 - DNA, 25 bp, Homo sapien
tccaggtcctcggtggcttcacatt

SEQ ID NO: 4148604 - DNA, 25 bp, Homo sapien
atcacatctcactgggtaaaccaat

SEQ ID NO: 4148605 - DNA, 25 bp, Homo sapien
tcacatctcactgggtaaaccaatg

SEQ ID NO: 4148606 - DNA, 25 bp, Homo sapien
catctcactgggtaaaccaatggga

SEQ ID NO: 4148607 - DNA, 25 bp, Homo sapien
acatctcactgggtaaaccaatggg

SEQ ID NO: 4148608 - DNA, 25 bp, Homo sapien
tccctgttatcaatatgttatatgt

SEQ ID NO: 4148609 - DNA, 25 bp, Homo sapien
aatggcttgaggtagtctgaaaatc

SEQ ID NO: 4148610 - DNA, 25 bp, Homo sapien
tatgtgtccttgcaattcactggag

SEQ ID NO: 4148611 - DNA, 25 bp, Homo sapien
gaccaacggtccaggagaaggtcaa

SEQ ID NO: 4148612 - DNA, 25 bp, Homo sapien
aagaaagaatcagtaaacagtagaa

SEQ ID NO: 4148613 - DNA, 25 bp, Homo sapien
aaagaatcagtaaacagtagaaaag

SEQ ID NO: 4148614 - DNA, 25 bp, Homo sapien
tgaaatatgaagaaagaatcagtaa

SEQ ID NO: 4148615 - DNA, 25 bp, Homo sapien
ctgaaatatgaagaaagaatcagta

SEQ ID NO: 4148616 - DNA, 25 bp, Homo sapien
ggacagccaataggagctgctcagg

SEQ ID NO: 4148617 - DNA, 25 bp, Homo sapien
aagaggtgccacaatcagcagtgcc

SEQ ID NO: 4148618 - DNA, 25 bp, Homo sapien
tgctgtgcccaagaggtgccacaat

SEQ ID NO: 4148619 - DNA, 25 bp, Homo sapien
agggacagccaataggagctgctca

SEQ ID NO: 4148620 - DNA, 25 bp, Homo sapien
taatgcagtcctgaatgagtgaggc

SEQ ID NO: 4148621 - DNA, 25 bp, Homo sapien
tagaagtagaagtgcagagcaggcc

SEQ ID NO: 4148622 - DNA, 25 bp, Homo sapien
tgattggaccagcatgcaaccctga

SEQ ID NO: 4148623 - DNA, 25 bp, Homo sapien
aaaatgaagtgacggccaacctagc

SEQ ID NO: 4148624 - DNA, 25 bp, Homo sapien
tctgtggggctgtcagttggcatct

SEQ ID NO: 4148625 - DNA, 25 bp, Homo sapien
tcaagaactgaattaacttgtcgtc

SEQ ID NO: 4148626 - DNA, 25 bp, Homo sapien
ttcaagaactgaattaacttgtcgt

SEQ ID NO: 4148627 - DNA, 25 bp, Homo sapien
tggggctgtcagttggcatcttttt

SEQ ID NO: 4148628 - DNA, 25 bp, Homo sapien
gatgctgctgccaagatgcctcagg

SEQ ID NO: 4148629 - DNA, 25 bp, Homo sapien
ctgccagactcggggatgctgctgc

SEQ ID NO: 4148630 - DNA, 25 bp, Homo sapien
tgctgctgccaagatgcctcagggc

SEQ ID NO: 4148631 - DNA, 25 bp, Homo sapien
gctgccaagatgcctcagggcctgt

SEQ ID NO: 4148632 - DNA, 25 bp, Homo sapien
tgaatctcctctcctaatatgaatg

SEQ ID NO: 4148633 - DNA, 25 bp, Homo sapien
ggtaaacaaaccgtgatgaatgaat

SEQ ID NO: 4148634 - DNA, 25 bp, Homo sapien
cgtgatgaatgaatctcctctccta

SEQ ID NO: 4148635 - DNA, 25 bp, Homo sapien
tctcctctcctaatatgaatgcctt

SEQ ID NO: 4148636 - DNA, 25 bp, Homo sapien
caacgtttttcctgcgggcttccag

SEQ ID NO: 4148637 - DNA, 25 bp, Homo sapien
tgctgggaatggctcttctagaccg

SEQ ID NO: 4148638 - DNA, 25 bp, Homo sapien
tctgcttgacatcgcgctctggttc

SEQ ID NO: 4148639 - DNA, 25 bp, Homo sapien
caatggtttacctcgcctttcatga

SEQ ID NO: 4148640 - DNA, 25 bp, Homo sapien
agggaaactcctggccactggacca

SEQ ID NO: 4148641 - DNA, 25 bp, Homo sapien
gggaaactcctggccactggaccac

SEQ ID NO: 4148642 - DNA, 25 bp, Homo sapien
ggaaactcctggccactggaccaca

SEQ ID NO: 4148643 - DNA, 25 bp, Homo sapien
ctttcgccccactaccttatgtgtg

SEQ ID NO: 4148644 - DNA, 25 bp, Homo sapien
actgctgacacgagcggccacatct

SEQ ID NO: 4148645 - DNA, 25 bp, Homo sapien
aatgcaaactcttgttcatttgctc

SEQ ID NO: 4148646 - DNA, 25 bp, Homo sapien
tgcctccagcgactgctgacacgag

SEQ ID NO: 4148647 - DNA, 25 bp, Homo sapien
gtggggattttgcagggactccatc

SEQ ID NO: 4148648 - DNA, 25 bp, Homo sapien
tttgcagggactccatcagtgtgca

SEQ ID NO: 4148649 - DNA, 25 bp, Homo sapien
ggattttgcagggactccatcagtg

SEQ ID NO: 4148650 - DNA, 25 bp, Homo sapien
ggactccatcagtgtgcagcatctg

SEQ ID NO: 4148651 - DNA, 25 bp, Homo sapien
aaggtccacattgtgtttccccagg

SEQ ID NO: 4148652 - DNA, 25 bp, Homo sapien
tccacattgtgtttccccagggctc

SEQ ID NO: 4148653 - DNA, 25 bp, Homo sapien
tacagtaaaaccaaggtccacattg

SEQ ID NO: 4148654 - DNA, 25 bp, Homo sapien
cacattgtgtttccccagggctccc

SEQ ID NO: 4148655 - DNA, 25 bp, Homo sapien
ggccgtctgcccttcccaagagaat

SEQ ID NO: 4148656 - DNA, 25 bp, Homo sapien
gccgtctgcccttcccaagagaata

SEQ ID NO: 4148657 - DNA, 25 bp, Homo sapien
gaggccgtctgcccttcccaagaga

SEQ ID NO: 4148658 - DNA, 25 bp, Homo sapien
ccgtctgcccttcccaagagaatac

SEQ ID NO: 4148659 - DNA, 25 bp, Homo sapien
gggcagaaatctgtgcctcctaggt

SEQ ID NO: 4148660 - DNA, 25 bp, Homo sapien
aaagtatagccacggacttgccagg

SEQ ID NO: 4148661 - DNA, 25 bp, Homo sapien
tcacttagccatgcagtcttggaca

SEQ ID NO: 4148662 - DNA, 25 bp, Homo sapien
gacttggagtcctgactttgaccct

SEQ ID NO: 4148663 - DNA, 25 bp, Homo sapien
tattagatggcagaagtagccttga

SEQ ID NO: 4148664 - DNA, 25 bp, Homo sapien
tgggggtcatggatccgcccatgtc

SEQ ID NO: 4148665 - DNA, 25 bp, Homo sapien
ggtcatggatccgcccatgtcttgg

SEQ ID NO: 4148666 - DNA, 25 bp, Homo sapien
ggtattagatggcagaagtagcctt

SEQ ID NO: 4148667 - DNA, 25 bp, Homo sapien
tggttgaggaccaatcttctgttgt

SEQ ID NO: 4148668 - DNA, 25 bp, Homo sapien
tctgttgttatcaccaagtgtgggt

SEQ ID NO: 4148669 - DNA, 25 bp, Homo sapien
caagtgtgggtttattatagggtct

SEQ ID NO: 4148670 - DNA, 25 bp, Homo sapien
gaccaatcttctgttgttatcacca

SEQ ID NO: 4148671 - DNA, 25 bp, Homo sapien
ggctggggaccgaggaaggagccag

SEQ ID NO: 4148672 - DNA, 25 bp, Homo sapien
gctggggaccgaggaaggagccagg

SEQ ID NO: 4148673 - DNA, 25 bp, Homo sapien
gagccaggcagattttgttagccat

SEQ ID NO: 4148674 - DNA, 25 bp, Homo sapien
aaggagccaggcagattttgttagc

SEQ ID NO: 4148675 - DNA, 25 bp, Homo sapien
ccctctggcgttgcaaggactgggt

SEQ ID NO: 4148676 - DNA, 25 bp, Homo sapien
cctctggcgttgcaaggactgggta

SEQ ID NO: 4148677 - DNA, 25 bp, Homo sapien
gggtagcctgtgttcatatgagctt

SEQ ID NO: 4148678 - DNA, 25 bp, Homo sapien
agcctgtgttcatatgagcttcctg

SEQ ID NO: 4148679 - DNA, 25 bp, Homo sapien
gcctccatggcccttcgtggacccc

SEQ ID NO: 4148680 - DNA, 25 bp, Homo sapien
cgcctccatggcccttcgtggaccc

SEQ ID NO: 4148681 - DNA, 25 bp, Homo sapien
tccatggcccttcgtggaccccctg

SEQ ID NO: 4148682 - DNA, 25 bp, Homo sapien
catggcccttcgtggaccccctggt

SEQ ID NO: 4148683 - DNA, 25 bp, Homo sapien
tggtgaggcttgggagggggcagcc

SEQ ID NO: 4148684 - DNA, 25 bp, Homo sapien
gcttgggagggggcagccgcatggg

SEQ ID NO: 4148685 - DNA, 25 bp, Homo sapien
tggggtggggctgctttgaagccat

SEQ ID NO: 4148686 - DNA, 25 bp, Homo sapien
ctgcacgaggttgggtggtgaggct

SEQ ID NO: 4148687 - DNA, 25 bp, Homo sapien
agccaataaggaaatccacgtgtcc

SEQ ID NO: 4148688 - DNA, 25 bp, Homo sapien
ctgtttttatcctgtagacctccgg

SEQ ID NO: 4148689 - DNA, 25 bp, Homo sapien
gaaatccacgtgtcctggcttcttg

SEQ ID NO: 4148690 - DNA, 25 bp, Homo sapien
tagacctccggagggttgtttggca

SEQ ID NO: 4148691 - DNA, 25 bp, Homo sapien
tagctctgatgtgtggccatttcct

SEQ ID NO: 4148692 - DNA, 25 bp, Homo sapien
gctctgatgtgtggccatttccttt

SEQ ID NO: 4148693 - DNA, 25 bp, Homo sapien
ctagctctgatgtgtggccatttcc

SEQ ID NO: 4148694 - DNA, 25 bp, Homo sapien
agctctgatgtgtggccatttcctt

SEQ ID NO: 4148695 - DNA, 25 bp, Homo sapien
gaattccttggcaggaaccccactg

SEQ ID NO: 4148696 - DNA, 25 bp, Homo sapien
ccacgcctggcactcccattccaca

SEQ ID NO: 4148697 - DNA, 25 bp, Homo sapien
ccattccacagccatactgggcagc

SEQ ID NO: 4148698 - DNA, 25 bp, Homo sapien
ccatactgggcagctcctactgcag

SEQ ID NO: 4148699 - DNA, 25 bp, Homo sapien
tggaacagagaagacgatcaaaaac

SEQ ID NO: 4148700 - DNA, 25 bp, Homo sapien
ggatggaacagagaagacgatcaaa

SEQ ID NO: 4148701 - DNA, 25 bp, Homo sapien
gaagacgatcaaaaacagggccttc

SEQ ID NO: 4148702 - DNA, 25 bp, Homo sapien
cagagaagacgatcaaaaacagggc

SEQ ID NO: 4148703 - DNA, 25 bp, Homo sapien
gctctcggggcacattgaagcttca

SEQ ID NO: 4148704 - DNA, 25 bp, Homo sapien
ggctctcggggcacattgaagcttc

SEQ ID NO: 4148705 - DNA, 25 bp, Homo sapien
ctctcggggcacattgaagcttcac

SEQ ID NO: 4148706 - DNA, 25 bp, Homo sapien
gcatcgtccaccaatgtgtctaatg

SEQ ID NO: 4148707 - DNA, 25 bp, Homo sapien
ggcatcgtccaccaatgtgtctaat

SEQ ID NO: 4148708 - DNA, 25 bp, Homo sapien
taatgaggtggcataaccacccagc

SEQ ID NO: 4148709 - DNA, 25 bp, Homo sapien
aatgtgtctaatgaggtggcataac

SEQ ID NO: 4148710 - DNA, 25 bp, Homo sapien
cacgctcccggatcagtgagaaagc

SEQ ID NO: 4148711 - DNA, 25 bp, Homo sapien
cccacgctcccggatcagtgagaaa

SEQ ID NO: 4148712 - DNA, 25 bp, Homo sapien
cgctcccggatcagtgagaaagcct

SEQ ID NO: 4148713 - DNA, 25 bp, Homo sapien
ggatggccccgcgttgcccctgctc

SEQ ID NO: 4148714 - DNA, 25 bp, Homo sapien
cagacgttgctcgagggcccggaaa

SEQ ID NO: 4148715 - DNA, 25 bp, Homo sapien
aagtcagacgttgctcgagggcccg

SEQ ID NO: 4148716 - DNA, 25 bp, Homo sapien
agggcaaagtcagacgttgctcgag

SEQ ID NO: 4148717 - DNA, 25 bp, Homo sapien
gcaaagtcagacgttgctcgagggc

SEQ ID NO: 4148718 - DNA, 25 bp, Homo sapien
gacacggcttcgtttgtacacaaac

SEQ ID NO: 4148719 - DNA, 25 bp, Homo sapien
acacttgagaagtgacacggcttcg

SEQ ID NO: 4148720 - DNA, 25 bp, Homo sapien
ttgtcggtggatgggcaggatctct

SEQ ID NO: 4148721 - DNA, 25 bp, Homo sapien
gggcgttgccacgttgagcaccgac

SEQ ID NO: 4148722 - DNA, 25 bp, Homo sapien
tcacccctggctcaatggaagagga

SEQ ID NO: 4148723 - DNA, 25 bp, Homo sapien
cctgatgtcacccatgcaacaaggg

SEQ ID NO: 4148724 - DNA, 25 bp, Homo sapien
agcccgtgctctctaccagctgtag

SEQ ID NO: 4148725 - DNA, 25 bp, Homo sapien
tgtagacgctgttcctggtagagcc

SEQ ID NO: 4148726 - DNA, 25 bp, Homo sapien
ttcaggagaggcttaaccagccatc

SEQ ID NO: 4148727 - DNA, 25 bp, Homo sapien
cacctttcatgtctcaagatggctg

SEQ ID NO: 4148728 - DNA, 25 bp, Homo sapien
ccaacaatgtgatcaaaggccctat

SEQ ID NO: 4148729 - DNA, 25 bp, Homo sapien
gtttatgaactgtaaagtccagcag

SEQ ID NO: 4148730 - DNA, 25 bp, Homo sapien
ttatcccagtgaatcagggccaggt

SEQ ID NO: 4148731 - DNA, 25 bp, Homo sapien
agtgggttccagagttctgtattga

SEQ ID NO: 4148732 - DNA, 25 bp, Homo sapien
gaagagccttaaatccaaggcaagc

SEQ ID NO: 4148733 - DNA, 25 bp, Homo sapien
tatcttctaaagcagtgggttccag

SEQ ID NO: 4148734 - DNA, 25 bp, Homo sapien
acagccatccacagttgacacaact

SEQ ID NO: 4148735 - DNA, 25 bp, Homo sapien
gggcacagccatccacagttgacac

SEQ ID NO: 4148736 - DNA, 25 bp, Homo sapien
catccacagttgacacaactcttgt

SEQ ID NO: 4148737 - DNA, 25 bp, Homo sapien
agttgacacaactcttgtctcaagg

SEQ ID NO: 4148738 - DNA, 25 bp, Homo sapien
aactgaagtgaggaacggacccatc

SEQ ID NO: 4148739 - DNA, 25 bp, Homo sapien
caagtgcccttgtgccctgttatta

SEQ ID NO: 4148740 - DNA, 25 bp, Homo sapien
cattgacctatcgatggacacctgg

SEQ ID NO: 4148741 - DNA, 25 bp, Homo sapien
caatgtgttggcgtatgtataccct

SEQ ID NO: 4148742 - DNA, 25 bp, Homo sapien
tcttgatggtttgcctgcaggacaa

SEQ ID NO: 4148743 - DNA, 25 bp, Homo sapien
gagttggattccacaccgtctgcat

SEQ ID NO: 4148744 - DNA, 25 bp, Homo sapien
caaaagcctaaatgcctgggctgag

SEQ ID NO: 4148745 - DNA, 25 bp, Homo sapien
tctgtatgtgcatttgaagatccag

SEQ ID NO: 4148746 - DNA, 25 bp, Homo sapien
attccatctacatcttccagaggtg

SEQ ID NO: 4148747 - DNA, 25 bp, Homo sapien
gggagtagcatcaataggaattcca

SEQ ID NO: 4148748 - DNA, 25 bp, Homo sapien
ggaattccatctacatcttccagag

SEQ ID NO: 4148749 - DNA, 25 bp, Homo sapien
ggagtagcatcaataggaattccat

SEQ ID NO: 4148750 - DNA, 25 bp, Homo sapien
tttgtttttcttccgattcttcatg

SEQ ID NO: 4148751 - DNA, 25 bp, Homo sapien
tttttcttccgattcttcatgctgg

SEQ ID NO: 4148752 - DNA, 25 bp, Homo sapien
ttttcttccgattcttcatgctggt

SEQ ID NO: 4148753 - DNA, 25 bp, Homo sapien
tgtttttcttccgattcttcatgct

SEQ ID NO: 4148754 - DNA, 25 bp, Homo sapien
cgagtacttagagaacatggactca

SEQ ID NO: 4148755 - DNA, 25 bp, Homo sapien
tttccgagtacttagagaacatgga

SEQ ID NO: 4148756 - DNA, 25 bp, Homo sapien
ccgagtacttagagaacatggactc

SEQ ID NO: 4148757 - DNA, 25 bp, Homo sapien
tccgagtacttagagaacatggact

SEQ ID NO: 4148758 - DNA, 25 bp, Homo sapien
ttttccaaaattccaactcatcctg

SEQ ID NO: 4148759 - DNA, 25 bp, Homo sapien
tctttttccaaaattccaactcatc

SEQ ID NO: 4148760 - DNA, 25 bp, Homo sapien
aaaattccaactcatcctgaaactt

SEQ ID NO: 4148761 - DNA, 25 bp, Homo sapien
ccaactcatcctgaaacttcatgac

SEQ ID NO: 4148762 - DNA, 25 bp, Homo sapien
tagtgttctacttgctcctgaaaac

SEQ ID NO: 4148763 - DNA, 25 bp, Homo sapien
tctgtagtgttctacttgctcctga

SEQ ID NO: 4148764 - DNA, 25 bp, Homo sapien
ttctacttgctcctgaaaactctgg

SEQ ID NO: 4148765 - DNA, 25 bp, Homo sapien
gtttatctctgtagtgttctacttg

SEQ ID NO: 4148766 - DNA, 25 bp, Homo sapien
agtgtgagtgtgtgtagatgtatgt

SEQ ID NO: 4148767 - DNA, 25 bp, Homo sapien
tgagtgtgtgtagatgtatgtgcat

SEQ ID NO: 4148768 - DNA, 25 bp, Homo sapien
tgtgtgtagatgtatgtgcattcat

SEQ ID NO: 4148769 - DNA, 25 bp, Homo sapien
agtgtgtgtagatgtatgtgcattc

SEQ ID NO: 4148770 - DNA, 25 bp, Homo sapien
actttgagtccccataggcttctgg

SEQ ID NO: 4148771 - DNA, 25 bp, Homo sapien
tggatagatccccacaggaaccgtg

SEQ ID NO: 4148772 - DNA, 25 bp, Homo sapien
tgctcatagctgctagataagtggc

SEQ ID NO: 4148773 - DNA, 25 bp, Homo sapien
tatgcccatatcgtgtatgatgagc

SEQ ID NO: 4148774 - DNA, 25 bp, Homo sapien
tggacctcttgacaccaaattagcc

SEQ ID NO: 4148775 - DNA, 25 bp, Homo sapien
ccaggccgccttctgttgatctatc

SEQ ID NO: 4148776 - DNA, 25 bp, Homo sapien
gcgcgcgctgacatctccgtgactt

SEQ ID NO: 4148777 - DNA, 25 bp, Homo sapien
tgatctatctcttgtctgtccgctc

SEQ ID NO: 4148778 - DNA, 25 bp, Homo sapien
tgcgttttagatgctgcggaagccc

SEQ ID NO: 4148779 - DNA, 25 bp, Homo sapien
gacgtttccgcagcttctcttggtg

SEQ ID NO: 4148780 - DNA, 25 bp, Homo sapien
gagagcagtgctcgattgcgcgaat

SEQ ID NO: 4148781 - DNA, 25 bp, Homo sapien
tggccgcaggaaaggcgcattcgtt

SEQ ID NO: 4148782 - DNA, 25 bp, Homo sapien
cctcgaaaaaggctcggttgctagt

SEQ ID NO: 4148783 - DNA, 25 bp, Homo sapien
gaaaaaggctcggttgctagtcatc

SEQ ID NO: 4148784 - DNA, 25 bp, Homo sapien
aaggctcggttgctagtcatcccgc

SEQ ID NO: 4148785 - DNA, 25 bp, Homo sapien
ggttgctagtcatcccgccggttca

SEQ ID NO: 4148786 - DNA, 25 bp, Homo sapien
tgcggctaggctgggtttccccaca

SEQ ID NO: 4148787 - DNA, 25 bp, Homo sapien
gcggttttaggatactggatttctg

SEQ ID NO: 4148788 - DNA, 25 bp, Homo sapien
tccccacagcattgcggttttagga

SEQ ID NO: 4148789 - DNA, 25 bp, Homo sapien
cacatagcctctccatgcggctagg

SEQ ID NO: 4148790 - DNA, 25 bp, Homo sapien
ttttgatatgcatgactgagctggt

SEQ ID NO: 4148791 - DNA, 25 bp, Homo sapien
gtccttcaattgtgcataaacttct

SEQ ID NO: 4148792 - DNA, 25 bp, Homo sapien
tttagttggtgtccttcaattgtgc

SEQ ID NO: 4148793 - DNA, 25 bp, Homo sapien
caaattttagttggtgtccttcaat

SEQ ID NO: 4148794 - DNA, 25 bp, Homo sapien
tcaaaactagtttgtctcattctaa

SEQ ID NO: 4148795 - DNA, 25 bp, Homo sapien
ctgaactcaaaactagtttgtctca

SEQ ID NO: 4148796 - DNA, 25 bp, Homo sapien
tagggagaattaaaatcttcatgat

SEQ ID NO: 4148797 - DNA, 25 bp, Homo sapien
aattagggagaattaaaatcttcat

SEQ ID NO: 4148798 - DNA, 25 bp, Homo sapien
tgtaagaatggcttctttggagact

SEQ ID NO: 4148799 - DNA, 25 bp, Homo sapien
aacacaatgtaagaatggcttcttt

SEQ ID NO: 4148800 - DNA, 25 bp, Homo sapien
tttaacagctgcaatcgccagatga

SEQ ID NO: 4148801 - DNA, 25 bp, Homo sapien
gaaggtcgtaatttccagacgattc

SEQ ID NO: 4148802 - DNA, 25 bp, Homo sapien
gcggcggcggcaggatgagtgcagc

SEQ ID NO: 4148803 - DNA, 25 bp, Homo sapien
cggcaggatgagtgcagcagcgcgc

SEQ ID NO: 4148804 - DNA, 25 bp, Homo sapien
atgagtgcagcagcgcgcggcggtc

SEQ ID NO: 4148805 - DNA, 25 bp, Homo sapien
cagcgcgcggcggtcgcctcctccg

SEQ ID NO: 4148806 - DNA, 25 bp, Homo sapien
ccaggcggctcggcccctctgcgca

SEQ ID NO: 4148807 - DNA, 25 bp, Homo sapien
ggcggcggcccccaggcggctcggc

SEQ ID NO: 4148808 - DNA, 25 bp, Homo sapien
gcccccaggcggctcggcccctctg

SEQ ID NO: 4148809 - DNA, 25 bp, Homo sapien
gcggcggcccccaggcggctcggcc

SEQ ID NO: 4148810 - DNA, 25 bp, Homo sapien
gccagcgcgagcaagagcagcgccg

SEQ ID NO: 4148811 - DNA, 25 bp, Homo sapien
gacaggcgcggggtggcgctgcggg

SEQ ID NO: 4148812 - DNA, 25 bp, Homo sapien
agcgcggccagcgcgagcaagagca

SEQ ID NO: 4148813 - DNA, 25 bp, Homo sapien
ctcgccaacttctccagtctcgcag

SEQ ID NO: 4148814 - DNA, 25 bp, Homo sapien
gctttggaaagcatgaatcccgaca

SEQ ID NO: 4148815 - DNA, 25 bp, Homo sapien
tactaaagttccctgcaaaccacag

SEQ ID NO: 4148816 - DNA, 25 bp, Homo sapien
gagtccggcgatggataattatagc

SEQ ID NO: 4148817 - DNA, 25 bp, Homo sapien
tatggcccctagaagaagagtccgg

SEQ ID NO: 4148818 - DNA, 25 bp, Homo sapien
acaacaataaagtctcagcttgatg

SEQ ID NO: 4148819 - DNA, 25 bp, Homo sapien
aggcctggtctcttccttggcttca

SEQ ID NO: 4148820 - DNA, 25 bp, Homo sapien
ggcctggtctcttccttggcttcat

SEQ ID NO: 4148821 - DNA, 25 bp, Homo sapien
tggagagacggccattcataatcat

SEQ ID NO: 4148822 - DNA, 25 bp, Homo sapien
ctggagagacggccattcataatca

SEQ ID NO: 4148823 - DNA, 25 bp, Homo sapien
caacttgaacaagaggagtgtgggt

SEQ ID NO: 4148824 - DNA, 25 bp, Homo sapien
gctttcccatgtgaaacgagcaaca

SEQ ID NO: 4148825 - DNA, 25 bp, Homo sapien
cacaggccgtggaaattagatttga

SEQ ID NO: 4148826 - DNA, 25 bp, Homo sapien
taaacttcgacagctgacacaaggg

SEQ ID NO: 4148827 - DNA, 25 bp, Homo sapien
tcctgtggctaaaaagcacagctga

SEQ ID NO: 4148828 - DNA, 25 bp, Homo sapien
acagccaggtggatccagagctcgg

SEQ ID NO: 4148829 - DNA, 25 bp, Homo sapien
gatttgagcatgaccagcgtctcct

SEQ ID NO: 4148830 - DNA, 25 bp, Homo sapien
gaagatgtggaattggatcttcctg

SEQ ID NO: 4148831 - DNA, 25 bp, Homo sapien
gggtagattctgtgctcaaacttct

SEQ ID NO: 4148832 - DNA, 25 bp, Homo sapien
cttctttgtatatgagtcaggccac

SEQ ID NO: 4148833 - DNA, 25 bp, Homo sapien
cactcctgagggtttccaacagaaa

SEQ ID NO: 4148834 - DNA, 25 bp, Homo sapien
gcagcacagggtttgaacaatttct

SEQ ID NO: 4148835 - DNA, 25 bp, Homo sapien
aagcttctgaattacctgaaatatg

SEQ ID NO: 4148836 - DNA, 25 bp, Homo sapien
tgcattttagaacgcttaaccaagc

SEQ ID NO: 4148837 - DNA, 25 bp, Homo sapien
tcataatgatcccatgtcataggac

SEQ ID NO: 4148838 - DNA, 25 bp, Homo sapien
gatgtaaaggatttctggcctgtac

SEQ ID NO: 4148839 - DNA, 25 bp, Homo sapien
ccaagagttgtagctaatatcctga

SEQ ID NO: 4148840 - DNA, 25 bp, Homo sapien
tgcttggaatcagccctacagtgtg

SEQ ID NO: 4148841 - DNA, 25 bp, Homo sapien
gaagacatcattggtaagcatgcag

SEQ ID NO: 4148842 - DNA, 25 bp, Homo sapien
tatggagtagccttgcaagggactg

SEQ ID NO: 4148843 - DNA, 25 bp, Homo sapien
tggctctcccttgtaaactaactgg

SEQ ID NO: 4148844 - DNA, 25 bp, Homo sapien
tgttctcattaaggtgcaagcctcc

SEQ ID NO: 4148845 - DNA, 25 bp, Homo sapien
ccaggagggcacgttttacctgcat

SEQ ID NO: 4148846 - DNA, 25 bp, Homo sapien
tcctcagtggagcacaaattgcccc

SEQ ID NO: 4148847 - DNA, 25 bp, Homo sapien
tggggcggtaccgagggcgcggtga

SEQ ID NO: 4148848 - DNA, 25 bp, Homo sapien
ggcgcggtgaagtggtgacggagga

SEQ ID NO: 4148849 - DNA, 25 bp, Homo sapien
cgcggtgaagtggtgacggaggact

SEQ ID NO: 4148850 - DNA, 25 bp, Homo sapien
taccgagggcgcggtgaagtggtga

SEQ ID NO: 4148851 - DNA, 25 bp, Homo sapien
caacgtcatcagtttctcggcatgt

SEQ ID NO: 4148852 - DNA, 25 bp, Homo sapien
ctcgttggttctgcaacgtcatcag

SEQ ID NO: 4148853 - DNA, 25 bp, Homo sapien
ttctgcaacgtcatcagtttctcgg

SEQ ID NO: 4148854 - DNA, 25 bp, Homo sapien
tggacaggtaaacgtaggaggcgta

SEQ ID NO: 4148855 - DNA, 25 bp, Homo sapien
ccgctctcccagtcgtcacagtctg

SEQ ID NO: 4148856 - DNA, 25 bp, Homo sapien
ttcagcccgctctcccagtcgtcac

SEQ ID NO: 4148857 - DNA, 25 bp, Homo sapien
cccgctctcccagtcgtcacagtct

SEQ ID NO: 4148858 - DNA, 25 bp, Homo sapien
agcccgctctcccagtcgtcacagt

SEQ ID NO: 4148859 - DNA, 25 bp, Homo sapien
agtgactgactcatatttttttttc

SEQ ID NO: 4148860 - DNA, 25 bp, Homo sapien
ttttttccccaaatgtaatgcacac

SEQ ID NO: 4148861 - DNA, 25 bp, Homo sapien
gcagttccagtagtgactgactcat

SEQ ID NO: 4148862 - DNA, 25 bp, Homo sapien
ccagtagtgactgactcatattttt

SEQ ID NO: 4148863 - DNA, 25 bp, Homo sapien
ctcaatgaagtcacacaaatggggg

SEQ ID NO: 4148864 - DNA, 25 bp, Homo sapien
cacacaaatgggggtcatttttgtc

SEQ ID NO: 4148865 - DNA, 25 bp, Homo sapien
acacaaatgggggtcatttttgtca

SEQ ID NO: 4148866 - DNA, 25 bp, Homo sapien
agtcacacaaatgggggtcattttt

SEQ ID NO: 4148867 - DNA, 25 bp, Homo sapien
ctgccgagccagattcgggtgctcc

SEQ ID NO: 4148868 - DNA, 25 bp, Homo sapien
tcttgcacaagttggtcacgtggcc

SEQ ID NO: 4148869 - DNA, 25 bp, Homo sapien
acaagttggtcacgtggccacccaa

SEQ ID NO: 4148870 - DNA, 25 bp, Homo sapien
tcccagcgtgtgcttgtcaaagaga

SEQ ID NO: 4148871 - DNA, 25 bp, Homo sapien
tgcccgcatcagctagaattacagg

SEQ ID NO: 4148872 - DNA, 25 bp, Homo sapien
aggcatgaacacctcctatagagag

SEQ ID NO: 4148873 - DNA, 25 bp, Homo sapien
cctatagagagcacacagttcgact

SEQ ID NO: 4148874 - DNA, 25 bp, Homo sapien
cagttcgactgtattctttatcaac

SEQ ID NO: 4148875 - DNA, 25 bp, Homo sapien
ctagctcagtctacctaaaggtttg

SEQ ID NO: 4148876 - DNA, 25 bp, Homo sapien
agttttggtgttactcctctactgt

SEQ ID NO: 4148877 - DNA, 25 bp, Homo sapien
tgttttctagctcagtctacctaaa

SEQ ID NO: 4148878 - DNA, 25 bp, Homo sapien
tggtaatgttggtagttatgttccc

SEQ ID NO: 4148879 - DNA, 25 bp, Homo sapien
tagcatttactagcaactactgcaa

SEQ ID NO: 4148880 - DNA, 25 bp, Homo sapien
tgtgattcttacactaggcttcgta

SEQ ID NO: 4148881 - DNA, 25 bp, Homo sapien
tcaaccaaagaactacgttacagta

SEQ ID NO: 4148882 - DNA, 25 bp, Homo sapien
gactcttcagttgtagaactattgc

SEQ ID NO: 4148883 - DNA, 25 bp, Homo sapien
gatactcctttcacgtcccctttga

SEQ ID NO: 4148884 - DNA, 25 bp, Homo sapien
aggatgctgtgcagctatcatctcc

SEQ ID NO: 4148885 - DNA, 25 bp, Homo sapien
ctgattttctccaaccaggatgctg

SEQ ID NO: 4148886 - DNA, 25 bp, Homo sapien
tgtgcagctatcatctcctttcccc

SEQ ID NO: 4148887 - DNA, 25 bp, Homo sapien
ttctgagttgagcaaagcaatgatg

SEQ ID NO: 4148888 - DNA, 25 bp, Homo sapien
tttttgtgacgttctaacaaagagc

SEQ ID NO: 4148889 - DNA, 25 bp, Homo sapien
caaagagcagggtgtaccaatgtca

SEQ ID NO: 4148890 - DNA, 25 bp, Homo sapien
aagtagcctcttctgatcagtttag

SEQ ID NO: 4148891 - DNA, 25 bp, Homo sapien
cagatgttgagtatccataattact

SEQ ID NO: 4148892 - DNA, 25 bp, Homo sapien
tttttcacagatgttgagtatccat

SEQ ID NO: 4148893 - DNA, 25 bp, Homo sapien
cacagatgttgagtatccataatta

SEQ ID NO: 4148894 - DNA, 25 bp, Homo sapien
tttcacagatgttgagtatccataa

SEQ ID NO: 4148895 - DNA, 25 bp, Homo sapien
caatattctccacagtcaactaagg

SEQ ID NO: 4148896 - DNA, 25 bp, Homo sapien
cacaggtagatcttacccgcagtaa

SEQ ID NO: 4148897 - DNA, 25 bp, Homo sapien
gaagaacagaggtgaaacacgcctg

SEQ ID NO: 4148898 - DNA, 25 bp, Homo sapien
tatacgatgttgaccgggccaagtg

SEQ ID NO: 4148899 - DNA, 25 bp, Homo sapien
gctggctataatgtaatggatcttc

SEQ ID NO: 4148900 - DNA, 25 bp, Homo sapien
cgatgctgctggctataatgtaatg

SEQ ID NO: 4148901 - DNA, 25 bp, Homo sapien
gctataatgtaatggatcttcctgc

SEQ ID NO: 4148902 - DNA, 25 bp, Homo sapien
gctgctggctataatgtaatggatc

SEQ ID NO: 4148903 - DNA, 25 bp, Homo sapien
cctgcagagccatagaaaggatgcc

SEQ ID NO: 4148904 - DNA, 25 bp, Homo sapien
tagcaaagcggctgtaccagccaat

SEQ ID NO: 4148905 - DNA, 25 bp, Homo sapien
tccacgtagagaagtgagtccacat

SEQ ID NO: 4148906 - DNA, 25 bp, Homo sapien
ttgaactgggtacttcttatccgag

SEQ ID NO: 4148907 - DNA, 25 bp, Homo sapien
acaattaatggtctcttaggtattc

SEQ ID NO: 4148908 - DNA, 25 bp, Homo sapien
tccacagttaacaattaatggtctc

SEQ ID NO: 4148909 - DNA, 25 bp, Homo sapien
cattttccccagacgtatccacagt

SEQ ID NO: 4148910 - DNA, 25 bp, Homo sapien
cagacgtatccacagttaacaatta

SEQ ID NO: 4148911 - DNA, 25 bp, Homo sapien
gtctccccacgtgatggcattcttg

SEQ ID NO: 4148912 - DNA, 25 bp, Homo sapien
aacatgtcctcccaagccaggcctg

SEQ ID NO: 4148913 - DNA, 25 bp, Homo sapien
ccaggcctgttggaatcatgctgtt

SEQ ID NO: 4148914 - DNA, 25 bp, Homo sapien
cctggtctccccacgtgatggcatt

SEQ ID NO: 4148915 - DNA, 25 bp, Homo sapien
tatgtgcattggttcacccatggca

SEQ ID NO: 4148916 - DNA, 25 bp, Homo sapien
caggatttagaacaacgtcacgatt

SEQ ID NO: 4148917 - DNA, 25 bp, Homo sapien
caaatgcaggctgtacgaaggacag

SEQ ID NO: 4148918 - DNA, 25 bp, Homo sapien
ggacagtcagggagttaacctaaca

SEQ ID NO: 4148919 - DNA, 25 bp, Homo sapien
actcagttttccaccccttgatgaa

SEQ ID NO: 4148920 - DNA, 25 bp, Homo sapien
ttttccaccccttgatgaagctgcg

SEQ ID NO: 4148921 - DNA, 25 bp, Homo sapien
caccccttgatgaagctgcgttggc

SEQ ID NO: 4148922 - DNA, 25 bp, Homo sapien
ccttgatgaagctgcgttggctcac

SEQ ID NO: 4148923 - DNA, 25 bp, Homo sapien
aatcagactggcacggagagaagca

SEQ ID NO: 4148924 - DNA, 25 bp, Homo sapien
catcatcattgattgtggacttgtg

SEQ ID NO: 4148925 - DNA, 25 bp, Homo sapien
gagagaagcaaagatcacagaaacc

SEQ ID NO: 4148926 - DNA, 25 bp, Homo sapien
ggtctgagagacagaatagaatcag

SEQ ID NO: 4148927 - DNA, 25 bp, Homo sapien
tatttcagaatgctccttgttccaa

SEQ ID NO: 4148928 - DNA, 25 bp, Homo sapien
tctctcaacccctcatttgtttcct

SEQ ID NO: 4148929 - DNA, 25 bp, Homo sapien
gcttttctgatcacacaatctaagg

SEQ ID NO: 4148930 - DNA, 25 bp, Homo sapien
tcctccaacaaaaggtaggcttcat

SEQ ID NO: 4148931 - DNA, 25 bp, Homo sapien
gaaagacatatatgtccacggttag

SEQ ID NO: 4148932 - DNA, 25 bp, Homo sapien
agagaaagacatatatgtccacggt

SEQ ID NO: 4148933 - DNA, 25 bp, Homo sapien
catatatgtccacggttagtgccag

SEQ ID NO: 4148934 - DNA, 25 bp, Homo sapien
gacatatatgtccacggttagtgcc

SEQ ID NO: 4148935 - DNA, 25 bp, Homo sapien
gcagttgcttccgtacatgcagtga

SEQ ID NO: 4148936 - DNA, 25 bp, Homo sapien
tcccgtattgcttcatagagtgctc

SEQ ID NO: 4148937 - DNA, 25 bp, Homo sapien
cttatcgtcatggtagacgcctcgg

SEQ ID NO: 4148938 - DNA, 25 bp, Homo sapien
tgcagtgatcgggacggtagttcca

SEQ ID NO: 4148939 - DNA, 25 bp, Homo sapien
tcatgctgataagcacatctgctaa

SEQ ID NO: 4148940 - DNA, 25 bp, Homo sapien
tcaaagggacaggtgactaaagcgc

SEQ ID NO: 4148941 - DNA, 25 bp, Homo sapien
tgactaaagcgccaatattgcttca

SEQ ID NO: 4148942 - DNA, 25 bp, Homo sapien
acatctgctaacagcagcaagggca

SEQ ID NO: 4148943 - DNA, 25 bp, Homo sapien
tcatcctgttattatagtgccaaca

SEQ ID NO: 4148944 - DNA, 25 bp, Homo sapien
gactctgtagaccatatgtcctttg

SEQ ID NO: 4148945 - DNA, 25 bp, Homo sapien
tgttactatgttacaggatttaccc

SEQ ID NO: 4148946 - DNA, 25 bp, Homo sapien
gagaattcgatctttaacaacaaag

SEQ ID NO: 4148947 - DNA, 25 bp, Homo sapien
ggcaaatcaccagaaagcggcaaaa

SEQ ID NO: 4148948 - DNA, 25 bp, Homo sapien
ccagcaaggtaagggcacagttaat

SEQ ID NO: 4148949 - DNA, 25 bp, Homo sapien
caagctctgacccactacacaatgg

SEQ ID NO: 4148950 - DNA, 25 bp, Homo sapien
taacacttgtttgaggtagataatc

SEQ ID NO: 4148951 - DNA, 25 bp, Homo sapien
gatgacgtgtttctcataagccctt

SEQ ID NO: 4148952 - DNA, 25 bp, Homo sapien
gggccaacatggatgatgacgtgtt

SEQ ID NO: 4148953 - DNA, 25 bp, Homo sapien
tcagaaaaacttgcgggattcgtcc

SEQ ID NO: 4148954 - DNA, 25 bp, Homo sapien
catggattgaaagagattgtcttga

SEQ ID NO: 4148955 - DNA, 25 bp, Homo sapien
tcagttgcatagaaagagtctcagg

SEQ ID NO: 4148956 - DNA, 25 bp, Homo sapien
tagatcaatataacacctcaggtgc

SEQ ID NO: 4148957 - DNA, 25 bp, Homo sapien
gacgtttaggaattagaaggctcac

SEQ ID NO: 4148958 - DNA, 25 bp, Homo sapien
ttcacacaaaaagacccaggcagct

SEQ ID NO: 4148959 - DNA, 25 bp, Homo sapien
tcttaccaatagaagcagctgaact

SEQ ID NO: 4148960 - DNA, 25 bp, Homo sapien
gataaaacctgtatggaccagctag

SEQ ID NO: 4148961 - DNA, 25 bp, Homo sapien
tatagagatgattcaggaccctacc

SEQ ID NO: 4148962 - DNA, 25 bp, Homo sapien
tatgagcaactagggattaagccag

SEQ ID NO: 4148963 - DNA, 25 bp, Homo sapien
tcttacacagactgtatgtcttaca

SEQ ID NO: 4148964 - DNA, 25 bp, Homo sapien
acatcttacacagactgtatgtctt

SEQ ID NO: 4148965 - DNA, 25 bp, Homo sapien
cttacacagactgtatgtcttacag

SEQ ID NO: 4148966 - DNA, 25 bp, Homo sapien
catcttacacagactgtatgtctta

SEQ ID NO: 4148967 - DNA, 25 bp, Homo sapien
caggaattccaaggcagacaaccgc

SEQ ID NO: 4148968 - DNA, 25 bp, Homo sapien
ggtgagccatcaacaaatctgagtg

SEQ ID NO: 4148969 - DNA, 25 bp, Homo sapien
ccgcacgaggttctaaggtttcaca

SEQ ID NO: 4148970 - DNA, 25 bp, Homo sapien
tatcattgacctttgcgggcaaccc

SEQ ID NO: 4148971 - DNA, 25 bp, Homo sapien
catgttttagcaggccactgaatta

SEQ ID NO: 4148972 - DNA, 25 bp, Homo sapien
cagagaaaatattgctccatggtaa

SEQ ID NO: 4148973 - DNA, 25 bp, Homo sapien
gcaaactttaaaccagagagtgcat

SEQ ID NO: 4148974 - DNA, 25 bp, Homo sapien
ctggatttcaaaggcggttaatgta

SEQ ID NO: 4148975 - DNA, 25 bp, Homo sapien
aaagagagaatatgtcctgtgttag

SEQ ID NO: 4148976 - DNA, 25 bp, Homo sapien
gagagaatatgtcctgtgttagctt

SEQ ID NO: 4148977 - DNA, 25 bp, Homo sapien
agagaatatgtcctgtgttagcttg

SEQ ID NO: 4148978 - DNA, 25 bp, Homo sapien
aagagagaatatgtcctgtgttagc

SEQ ID NO: 4148979 - DNA, 25 bp, Homo sapien
gccagttttgacctatgaagaacaa

SEQ ID NO: 4148980 - DNA, 25 bp, Homo sapien
tcatgcatatggtgatagaagcaca

SEQ ID NO: 4148981 - DNA, 25 bp, Homo sapien
tttgttctagcctgcaagggatccc

SEQ ID NO: 4148982 - DNA, 25 bp, Homo sapien
catcatagacagaaacggaaaggca

SEQ ID NO: 4148983 - DNA, 25 bp, Homo sapien
gacaagacagtaattaaatcatagt

SEQ ID NO: 4148984 - DNA, 25 bp, Homo sapien
atcatagtaccgtgtcccttttaat

SEQ ID NO: 4148985 - DNA, 25 bp, Homo sapien
aagacaagacagtaattaaatcata

SEQ ID NO: 4148986 - DNA, 25 bp, Homo sapien
agacaagacagtaattaaatcatag

SEQ ID NO: 4148987 - DNA, 25 bp, Homo sapien
acctccagaataatacccaaagaca

SEQ ID NO: 4148988 - DNA, 25 bp, Homo sapien
tgtagtatggcattcttaaaaacaa

SEQ ID NO: 4148989 - DNA, 25 bp, Homo sapien
tagactaagctaattactaaaccaa

SEQ ID NO: 4148990 - DNA, 25 bp, Homo sapien
taacatcatttgtagtatggcattc

SEQ ID NO: 4148991 - DNA, 25 bp, Homo sapien
gggaagcgtgcgagagagcaagacc

SEQ ID NO: 4148992 - DNA, 25 bp, Homo sapien
cgtgcgagagagcaagaccgacaga

SEQ ID NO: 4148993 - DNA, 25 bp, Homo sapien
cacacactccggcacgcaggcgacc

SEQ ID NO: 4148994 - DNA, 25 bp, Homo sapien
agagcaagaccgacagagcgagcac

SEQ ID NO: 4148995 - DNA, 25 bp, Homo sapien
agcgcctcctggagcctctcgacgt

SEQ ID NO: 4148996 - DNA, 25 bp, Homo sapien
cctcctggagcctctcgacgtccat

SEQ ID NO: 4148997 - DNA, 25 bp, Homo sapien
ctttcagcgcctcctggagcctctc

SEQ ID NO: 4148998 - DNA, 25 bp, Homo sapien
ttcagcgcctcctggagcctctcga

SEQ ID NO: 4148999 - DNA, 25 bp, Homo sapien
tctctctactcgaagtttgtaagcc

SEQ ID NO: 4149000 - DNA, 25 bp, Homo sapien
tctctactcgaagtttgtaagccac

SEQ ID NO: 4149001 - DNA, 25 bp, Homo sapien
ctgaaatctctctactcgaagtttg

SEQ ID NO: 4149002 - DNA, 25 bp, Homo sapien
atctctctactcgaagtttgtaagc

SEQ ID NO: 4149003 - DNA, 25 bp, Homo sapien
gaaactgatccaggacaggacaaac

SEQ ID NO: 4149004 - DNA, 25 bp, Homo sapien
tccagtcttggctacatgacaaaga

SEQ ID NO: 4149005 - DNA, 25 bp, Homo sapien
attgtttctccagtcttggctacat

SEQ ID NO: 4149006 - DNA, 25 bp, Homo sapien
gacaaagaaactgatccaggacagg

SEQ ID NO: 4149007 - DNA, 25 bp, Homo sapien
tatttcaaaggcctaggaacaggag

SEQ ID NO: 4149008 - DNA, 25 bp, Homo sapien
gaggtaagccccacaatgaggagaa

SEQ ID NO: 4149009 - DNA, 25 bp, Homo sapien
caacattactgggatctgtgacaga

SEQ ID NO: 4149010 - DNA, 25 bp, Homo sapien
tgaaagtgacccaacagtgctccaa

SEQ ID NO: 4149011 - DNA, 25 bp, Homo sapien
ccactaagggcattattactactgt

SEQ ID NO: 4149012 - DNA, 25 bp, Homo sapien
gagacttgaattagctattattcac

SEQ ID NO: 4149013 - DNA, 25 bp, Homo sapien
gaaaaagccctacttccatgccaca

SEQ ID NO: 4149014 - DNA, 25 bp, Homo sapien
tatcattactaatttgagacttgaa

SEQ ID NO: 4149015 - DNA, 25 bp, Homo sapien
caatccccgcagtttgggaagttga

SEQ ID NO: 4149016 - DNA, 25 bp, Homo sapien
atctgcaatccccgcagtttgggaa

SEQ ID NO: 4149017 - DNA, 25 bp, Homo sapien
tagaagaatcgctcgaaccagggag

SEQ ID NO: 4149018 - DNA, 25 bp, Homo sapien
tgaggtagaagaatcgctcgaacca

SEQ ID NO: 4149019 - DNA, 25 bp, Homo sapien
aggaggataaggcaggacaatggca

SEQ ID NO: 4149020 - DNA, 25 bp, Homo sapien
ggataaggcaggacaatggcatgaa

SEQ ID NO: 4149021 - DNA, 25 bp, Homo sapien
aaaactatgtttcagatagtagagg

SEQ ID NO: 4149022 - DNA, 25 bp, Homo sapien
ttaaaactatgtttcagatagtaga

SEQ ID NO: 4149023 - DNA, 25 bp, Homo sapien
aactatgtttcagatagtagaggcc

SEQ ID NO: 4149024 - DNA, 25 bp, Homo sapien
aaactatgtttcagatagtagaggc

SEQ ID NO: 4149025 - DNA, 25 bp, Homo sapien
tccttcaagagtgaatgtctcttcc

SEQ ID NO: 4149026 - DNA, 25 bp, Homo sapien
gcttgtactatccaatatcctaagg

SEQ ID NO: 4149027 - DNA, 25 bp, Homo sapien
taaaagcaacatactaaactgtctc

SEQ ID NO: 4149028 - DNA, 25 bp, Homo sapien
gatctgaacttctgagcaaacaata

SEQ ID NO: 4149029 - DNA, 25 bp, Homo sapien
aactgggaccaatgggcactgctga

SEQ ID NO: 4149030 - DNA, 25 bp, Homo sapien
gagaaactgggaccaatgggcactg

SEQ ID NO: 4149031 - DNA, 25 bp, Homo sapien
aatggcgcggccattgtggaataca

SEQ ID NO: 4149032 - DNA, 25 bp, Homo sapien
ctgatgggaacgtaaaatggcgcgg

SEQ ID NO: 4149033 - DNA, 25 bp, Homo sapien
gtaataatagtcagcaagtgttctg

SEQ ID NO: 4149034 - DNA, 25 bp, Homo sapien
caagtgttctgcgttacctggaaaa

SEQ ID NO: 4149035 - DNA, 25 bp, Homo sapien
atctccatagcctgagtaataatag

SEQ ID NO: 4149036 - DNA, 25 bp, Homo sapien
catagcctgagtaataatagtcagc

SEQ ID NO: 4149037 - DNA, 25 bp, Homo sapien
tagttatcaaatggagctaggattc

SEQ ID NO: 4149038 - DNA, 25 bp, Homo sapien
cactactcatagttatcaaatggag

SEQ ID NO: 4149039 - DNA, 25 bp, Homo sapien
gttattcaaaaagcactactcatag

SEQ ID NO: 4149040 - DNA, 25 bp, Homo sapien
aagaagttattcaaaaagcactact

SEQ ID NO: 4149041 - DNA, 25 bp, Homo sapien
tctactgactcttcccttgtgcgga

SEQ ID NO: 4149042 - DNA, 25 bp, Homo sapien
gggtgtataacatctcatcgtggtt

SEQ ID NO: 4149043 - DNA, 25 bp, Homo sapien
tcgtggttgcgatttacattttcct

SEQ ID NO: 4149044 - DNA, 25 bp, Homo sapien
tttgcttttgagttgaattccttac

SEQ ID NO: 4149045 - DNA, 25 bp, Homo sapien
cttccattttcccatttttgcagtt

SEQ ID NO: 4149046 - DNA, 25 bp, Homo sapien
cccttccattttcccatttttgcag

SEQ ID NO: 4149047 - DNA, 25 bp, Homo sapien
tccattttcccatttttgcagtttc

SEQ ID NO: 4149048 - DNA, 25 bp, Homo sapien
cattttcccatttttgcagtttctc

SEQ ID NO: 4149049 - DNA, 25 bp, Homo sapien
tctttccttcatttcatcaaaggga

SEQ ID NO: 4149050 - DNA, 25 bp, Homo sapien
cattaaatccagtgacaattttcag

SEQ ID NO: 4149051 - DNA, 25 bp, Homo sapien
tagcctttaaattgggaccactgaa

SEQ ID NO: 4149052 - DNA, 25 bp, Homo sapien
gaatatattcgacattagggttggg

SEQ ID NO: 4149053 - DNA, 25 bp, Homo sapien
caaggcctaagggtttgacatttca

SEQ ID NO: 4149054 - DNA, 25 bp, Homo sapien
taatttcaacagtccaacagggtgc

SEQ ID NO: 4149055 - DNA, 25 bp, Homo sapien
gtgcacagtgaaaataggtctcctt

SEQ ID NO: 4149056 - DNA, 25 bp, Homo sapien
gatataaagcaaaccgttaactgga

SEQ ID NO: 4149057 - DNA, 25 bp, Homo sapien
catacaccgcttttgtaatttaaag

SEQ ID NO: 4149058 - DNA, 25 bp, Homo sapien
ggaaaataccactagcatatagcat

SEQ ID NO: 4149059 - DNA, 25 bp, Homo sapien
ttttaaaagcgtgaacatacaccgc

SEQ ID NO: 4149060 - DNA, 25 bp, Homo sapien
gacatgttgaagcttctctaaaagg

SEQ ID NO: 4149061 - DNA, 25 bp, Homo sapien
agctctccagaagcttatagttcag

SEQ ID NO: 4149062 - DNA, 25 bp, Homo sapien
tcaagtaaacaagtgcatggacaat

SEQ ID NO: 4149063 - DNA, 25 bp, Homo sapien
ctccagaagcttatagttcaggaaa

SEQ ID NO: 4149064 - DNA, 25 bp, Homo sapien
gctctccagaagcttatagttcagg

SEQ ID NO: 4149065 - DNA, 25 bp, Homo sapien
gttcctgtatagtttctccttggat

SEQ ID NO: 4149066 - DNA, 25 bp, Homo sapien
tctccttggatctgttaacaattca

SEQ ID NO: 4149067 - DNA, 25 bp, Homo sapien
ggtcacacaactatgaaacactgca

SEQ ID NO: 4149068 - DNA, 25 bp, Homo sapien
caaccctgatttaaaggcagggcac

SEQ ID NO: 4149069 - DNA, 25 bp, Homo sapien
gttgcatcatatatcccacagaaag

SEQ ID NO: 4149070 - DNA, 25 bp, Homo sapien
taactaagctcagatggaatcaaca

SEQ ID NO: 4149071 - DNA, 25 bp, Homo sapien
tatgaagaaaagtactacaacataa

SEQ ID NO: 4149072 - DNA, 25 bp, Homo sapien
taacaaaaatcagtgatttagtatg

SEQ ID NO: 4149073 - DNA, 25 bp, Homo sapien
gtatgaagaaaagtactacaacata

SEQ ID NO: 4149074 - DNA, 25 bp, Homo sapien
aaatcagtgatttagtatgaagaaa

SEQ ID NO: 4149075 - DNA, 25 bp, Homo sapien
gataaacacagctaacaaccatcac

SEQ ID NO: 4149076 - DNA, 25 bp, Homo sapien
ctgaagaaggataaacacagctaac

SEQ ID NO: 4149077 - DNA, 25 bp, Homo sapien
ggataaacacagctaacaaccatca

SEQ ID NO: 4149078 - DNA, 25 bp, Homo sapien
taggttcacaagtatgttatcacac

SEQ ID NO: 4149079 - DNA, 25 bp, Homo sapien
accacagtatgtaaatccaacaata

SEQ ID NO: 4149080 - DNA, 25 bp, Homo sapien
caaacatgggaattatgccctagag

SEQ ID NO: 4149081 - DNA, 25 bp, Homo sapien
cctggaaaggcatctagaatggcat

SEQ ID NO: 4149082 - DNA, 25 bp, Homo sapien
cagagtagtctatgaaagcagagcc

SEQ ID NO: 4149083 - DNA, 25 bp, Homo sapien
ctaaaaacaaattgactgggctggg

SEQ ID NO: 4149084 - DNA, 25 bp, Homo sapien
tagtcgctatgacttgactctgcac

SEQ ID NO: 4149085 - DNA, 25 bp, Homo sapien
gaggatcactagagtttaaggctgc

SEQ ID NO: 4149086 - DNA, 25 bp, Homo sapien
taacataagcatacaatttaagaaa

SEQ ID NO: 4149087 - DNA, 25 bp, Homo sapien
aagactgtgagaattaacataagca

SEQ ID NO: 4149088 - DNA, 25 bp, Homo sapien
tgtcacagacccaaacaaaaagact

SEQ ID NO: 4149089 - DNA, 25 bp, Homo sapien
cccaaacaaaaagactgtgagaatt

SEQ ID NO: 4149090 - DNA, 25 bp, Homo sapien
tgtgagtcctttcttagatgagaca

SEQ ID NO: 4149091 - DNA, 25 bp, Homo sapien
cctttcttagatgagacattgtgga

SEQ ID NO: 4149092 - DNA, 25 bp, Homo sapien
tgttaagaatcataggtctaaaaga

SEQ ID NO: 4149093 - DNA, 25 bp, Homo sapien
taggtctaaaagatcttttgtaaga

SEQ ID NO: 4149094 - DNA, 25 bp, Homo sapien
tcaaaaggtcacagcagtggcggag

SEQ ID NO: 4149095 - DNA, 25 bp, Homo sapien
ttccttgaaggtcagggagcccact

SEQ ID NO: 4149096 - DNA, 25 bp, Homo sapien
aatctgctagcataaggagtacccc

SEQ ID NO: 4149097 - DNA, 25 bp, Homo sapien
cagtaatgcctggtgtaacccatca

SEQ ID NO: 4149098 - DNA, 25 bp, Homo sapien
cccgtagagcaatggagccatccat

SEQ ID NO: 4149099 - DNA, 25 bp, Homo sapien
gaaacattctcacagcattaatagg

SEQ ID NO: 4149100 - DNA, 25 bp, Homo sapien
gtggtgacagctccccaataatggg

SEQ ID NO: 4149101 - DNA, 25 bp, Homo sapien
tctcagacacaatggcccgtagagc

SEQ ID NO: 4149102 - DNA, 25 bp, Homo sapien
taacatcaggagctttaaatcccaa

SEQ ID NO: 4149103 - DNA, 25 bp, Homo sapien
ttgatcctggtataacatcaggagc

SEQ ID NO: 4149104 - DNA, 25 bp, Homo sapien
ggtataacatcaggagctttaaatc

SEQ ID NO: 4149105 - DNA, 25 bp, Homo sapien
cctggtataacatcaggagctttaa

SEQ ID NO: 4149106 - DNA, 25 bp, Homo sapien
gagtgcatggatctatgattccacc

SEQ ID NO: 4149107 - DNA, 25 bp, Homo sapien
tagttcatgttaggagtgcatggat

SEQ ID NO: 4149108 - DNA, 25 bp, Homo sapien
ggatctatgattccacccaacactc

SEQ ID NO: 4149109 - DNA, 25 bp, Homo sapien
ataatgagaattagttcatgttagg

SEQ ID NO: 4149110 - DNA, 25 bp, Homo sapien
attcattcgatttaaactattggaa

SEQ ID NO: 4149111 - DNA, 25 bp, Homo sapien
cgattaagtggcctgggtgtcccag

SEQ ID NO: 4149112 - DNA, 25 bp, Homo sapien
ctttggtcgattaagtggcctgggt

SEQ ID NO: 4149113 - DNA, 25 bp, Homo sapien
tgtcccaggcccatttatattagac

SEQ ID NO: 4149114 - DNA, 25 bp, Homo sapien
aacctttggtcgattaagtggcctg

SEQ ID NO: 4149115 - DNA, 25 bp, Homo sapien
ttttctcctcattttgctgcaaatt

SEQ ID NO: 4149116 - DNA, 25 bp, Homo sapien
tgcaaatttgcctctttgctgtctg

SEQ ID NO: 4149117 - DNA, 25 bp, Homo sapien
tctcaggcaacccatttgttgtcat

SEQ ID NO: 4149118 - DNA, 25 bp, Homo sapien
gtgctctcaggcaacccatttgttg

SEQ ID NO: 4149119 - DNA, 25 bp, Homo sapien
gctggaagtcgtttgactggctgtt

SEQ ID NO: 4149120 - DNA, 25 bp, Homo sapien
tcgctggaagtcgtttgactggctg

SEQ ID NO: 4149121 - DNA, 25 bp, Homo sapien
cgctggaagtcgtttgactggctgt

SEQ ID NO: 4149122 - DNA, 25 bp, Homo sapien
ctggaagtcgtttgactggctgttt

SEQ ID NO: 4149123 - DNA, 25 bp, Homo sapien
agtgctgccgggtacaacggctatc

SEQ ID NO: 4149124 - DNA, 25 bp, Homo sapien
tctttatcctgagatgaagatgatg

SEQ ID NO: 4149125 - DNA, 25 bp, Homo sapien
ctttatcctgagatgaagatgatgc

SEQ ID NO: 4149126 - DNA, 25 bp, Homo sapien
acaacggctatctttgtctttatcc

SEQ ID NO: 4149127 - DNA, 25 bp, Homo sapien
catcctcttcttcatcctcttctgt

SEQ ID NO: 4149128 - DNA, 25 bp, Homo sapien
ctcttcatcctcttcttcatcctct

SEQ ID NO: 4149129 - DNA, 25 bp, Homo sapien
tcctcttcttcatcctcttctgtac

SEQ ID NO: 4149130 - DNA, 25 bp, Homo sapien
tcctcttcatcctcttcttcatcct

SEQ ID NO: 4149131 - DNA, 25 bp, Homo sapien
agcattataaggagttccattacgt

SEQ ID NO: 4149132 - DNA, 25 bp, Homo sapien
cattataaggagttccattacgtaa

SEQ ID NO: 4149133 - DNA, 25 bp, Homo sapien
caaatgttgttgtagttaaattgta

SEQ ID NO: 4149134 - DNA, 25 bp, Homo sapien
cagttaagtttcatgaattctgata

SEQ ID NO: 4149135 - DNA, 25 bp, Homo sapien
tctatagttcaaatcacatcccctg

SEQ ID NO: 4149136 - DNA, 25 bp, Homo sapien
catgaattctgatattctatagttc

SEQ ID NO: 4149137 - DNA, 25 bp, Homo sapien
gttttcactaccttcagaatgtagc

SEQ ID NO: 4149138 - DNA, 25 bp, Homo sapien
ctcttcattcacagttaaggcatca

SEQ ID NO: 4149139 - DNA, 25 bp, Homo sapien
tcacagttaaggcatcatcagattc

SEQ ID NO: 4149140 - DNA, 25 bp, Homo sapien
cactaccttcagaatgtagcaaatc

SEQ ID NO: 4149141 - DNA, 25 bp, Homo sapien
cttctgtttcacggcagtcagaaga

SEQ ID NO: 4149142 - DNA, 25 bp, Homo sapien
ttctgtttcacggcagtcagaagaa

SEQ ID NO: 4149143 - DNA, 25 bp, Homo sapien
tctgtttcacggcagtcagaagaac

SEQ ID NO: 4149144 - DNA, 25 bp, Homo sapien
cagtgttaaaaccagaactgtatgt

SEQ ID NO: 4149145 - DNA, 25 bp, Homo sapien
tattacacaaaagttttatacagtg

SEQ ID NO: 4149146 - DNA, 25 bp, Homo sapien
actgtatgtaaaatactgcatctaa

SEQ ID NO: 4149147 - DNA, 25 bp, Homo sapien
ttattttacaacctgcttctcttgt

SEQ ID NO: 4149148 - DNA, 25 bp, Homo sapien
gaaacaggtataaatttggcagcca

SEQ ID NO: 4149149 - DNA, 25 bp, Homo sapien
gtcagcggtaaggtaagcaggaccc

SEQ ID NO: 4149150 - DNA, 25 bp, Homo sapien
tataacactggctgtcgaagaagca

SEQ ID NO: 4149151 - DNA, 25 bp, Homo sapien
taaagttccattgtacgtagccaaa

SEQ ID NO: 4149152 - DNA, 25 bp, Homo sapien
caccttctggccgaggatttctggg

SEQ ID NO: 4149153 - DNA, 25 bp, Homo sapien
taagtgcacctatgaatacctgcgg

SEQ ID NO: 4149154 - DNA, 25 bp, Homo sapien
tcatctagctgttgtgaacctgaca

SEQ ID NO: 4149155 - DNA, 25 bp, Homo sapien
tactccaaaacacacgtctgaaagg

SEQ ID NO: 4149156 - DNA, 25 bp, Homo sapien
tgaaatagtaagatgtagtctaacc

SEQ ID NO: 4149157 - DNA, 25 bp, Homo sapien
ggcaaagtaatctaggctccaagtt

SEQ ID NO: 4149158 - DNA, 25 bp, Homo sapien
gcacaaatcttgagaactgaccctc

SEQ ID NO: 4149159 - DNA, 25 bp, Homo sapien
atacatactagcactcttattaggc

SEQ ID NO: 4149160 - DNA, 25 bp, Homo sapien
tcaaacggggaatgtgccaacatcg

SEQ ID NO: 4149161 - DNA, 25 bp, Homo sapien
cacatacgagcgtgaaaacccaatc

SEQ ID NO: 4149162 - DNA, 25 bp, Homo sapien
catcgtaacaaagtctgagggaggc

SEQ ID NO: 4149163 - DNA, 25 bp, Homo sapien
catctcacatacgagcgtgaaaacc

SEQ ID NO: 4149164 - DNA, 25 bp, Homo sapien
ttcccttgcagatgtcattgttcgt

SEQ ID NO: 4149165 - DNA, 25 bp, Homo sapien
cagatgtcattgttcgtccctcaaa

SEQ ID NO: 4149166 - DNA, 25 bp, Homo sapien
ttgttcgtccctcaaaatgtttgtg

SEQ ID NO: 4149167 - DNA, 25 bp, Homo sapien
cattgttcgtccctcaaaatgtttg

SEQ ID NO: 4149168 - DNA, 25 bp, Homo sapien
gagctgtttcctccggagcgtccta

SEQ ID NO: 4149169 - DNA, 25 bp, Homo sapien
ttgtttgcggctgcgcagcaagccc

SEQ ID NO: 4149170 - DNA, 25 bp, Homo sapien
cctaggggaggatctacaaagaggc

SEQ ID NO: 4149171 - DNA, 25 bp, Homo sapien
tgaatgctgaataccgcttcgaggg

SEQ ID NO: 4149172 - DNA, 25 bp, Homo sapien
gatggccaggtatactgagtgagaa

SEQ ID NO: 4149173 - DNA, 25 bp, Homo sapien
tgtacagttccatgtcagacaccct

SEQ ID NO: 4149174 - DNA, 25 bp, Homo sapien
cagacaccctgtaagtggccagcaa

SEQ ID NO: 4149175 - DNA, 25 bp, Homo sapien
caccctgtaagtggccagcaaggtt

SEQ ID NO: 4149176 - DNA, 25 bp, Homo sapien
acggcattccacaccacggaatggg

SEQ ID NO: 4149177 - DNA, 25 bp, Homo sapien
accataaatggccaaaacccagaca

SEQ ID NO: 4149178 - DNA, 25 bp, Homo sapien
acacaaggctgaagcccgtccatgg

SEQ ID NO: 4149179 - DNA, 25 bp, Homo sapien
aaagacggtgtgtaagcctcgacgc

SEQ ID NO: 4149180 - DNA, 25 bp, Homo sapien
tcctcttctgaacagctctttccaa

SEQ ID NO: 4149181 - DNA, 25 bp, Homo sapien
ccttcttgtcctcttctgaacagct

SEQ ID NO: 4149182 - DNA, 25 bp, Homo sapien
tcttgtcctcttctgaacagctctt

SEQ ID NO: 4149183 - DNA, 25 bp, Homo sapien
tgtcctcttctgaacagctctttcc

SEQ ID NO: 4149184 - DNA, 25 bp, Homo sapien
tttgccaaaatgaggccacacctcg

SEQ ID NO: 4149185 - DNA, 25 bp, Homo sapien
ggccacacctcgaaatcctttgctg

SEQ ID NO: 4149186 - DNA, 25 bp, Homo sapien
tgaggccacacctcgaaatcctttg

SEQ ID NO: 4149187 - DNA, 25 bp, Homo sapien
caaaatgaggccacacctcgaaatc

SEQ ID NO: 4149188 - DNA, 25 bp, Homo sapien
tgcacagttcgtggagctactgcaa

SEQ ID NO: 4149189 - DNA, 25 bp, Homo sapien
cttagcccaaaggtcaagaagcgtt

SEQ ID NO: 4149190 - DNA, 25 bp, Homo sapien
ttagcccaaaggtcaagaagcgtta

SEQ ID NO: 4149191 - DNA, 25 bp, Homo sapien
cagatacagaaacgggtagtctcgt

SEQ ID NO: 4149192 - DNA, 25 bp, Homo sapien
acattgaacacgctctctctgcatg

SEQ ID NO: 4149193 - DNA, 25 bp, Homo sapien
aaggtcaccaccactcgactgccaa

SEQ ID NO: 4149194 - DNA, 25 bp, Homo sapien
acctccaagaaacattgaacacgct

SEQ ID NO: 4149195 - DNA, 25 bp, Homo sapien
cccagggcaatctcctcatggccat

SEQ ID NO: 4149196 - DNA, 25 bp, Homo sapien
cctcggggagccatcccagggcaat

SEQ ID NO: 4149197 - DNA, 25 bp, Homo sapien
gggagccatcccagggcaatctcct

SEQ ID NO: 4149198 - DNA, 25 bp, Homo sapien
atctgtcacatcttcagacagggca

SEQ ID NO: 4149199 - DNA, 25 bp, Homo sapien
gagaatgctgtttcgctgtccagaa

SEQ ID NO: 4149200 - DNA, 25 bp, Homo sapien
cagtgcggaaagtacaagcgaaatt

SEQ ID NO: 4149201 - DNA, 25 bp, Homo sapien
ctcactagtgctcccaaagaagaaa

SEQ ID NO: 4149202 - DNA, 25 bp, Homo sapien
tctcaattgcactggctctgtggcc

SEQ ID NO: 4149203 - DNA, 25 bp, Homo sapien
cctggccagctgactcttggaacaa

SEQ ID NO: 4149204 - DNA, 25 bp, Homo sapien
tgggctccaggcaacttagaaggct

SEQ ID NO: 4149205 - DNA, 25 bp, Homo sapien
ggatgggcgaaaggaatcaattccc

SEQ ID NO: 4149206 - DNA, 25 bp, Homo sapien
gaaatggtgagaagacagtcgttac

SEQ ID NO: 4149207 - DNA, 25 bp, Homo sapien
gaatcctaggagaaaccattgcacc

SEQ ID NO: 4149208 - DNA, 25 bp, Homo sapien
tatctgtggacctactacctggcag

SEQ ID NO: 4149209 - DNA, 25 bp, Homo sapien
tgaaagactatgcttcagccaggac

SEQ ID NO: 4149210 - DNA, 25 bp, Homo sapien
tgctaatcgcctgtctgtgcagccg

SEQ ID NO: 4149211 - DNA, 25 bp, Homo sapien
gtttctcagaccgtaagtgcatcat

SEQ ID NO: 4149212 - DNA, 25 bp, Homo sapien
cagtatagactggacaaggaggcat

SEQ ID NO: 4149213 - DNA, 25 bp, Homo sapien
tgcatcatatgcacctggaggacgt

SEQ ID NO: 4149214 - DNA, 25 bp, Homo sapien
gagaagtgagtatgtgacgacccca

SEQ ID NO: 4149215 - DNA, 25 bp, Homo sapien
ctcattaagcaaacccccctggatt

SEQ ID NO: 4149216 - DNA, 25 bp, Homo sapien
ctggccgcatctctgagtccgtatt

SEQ ID NO: 4149217 - DNA, 25 bp, Homo sapien
tattcacccctcattaagcaaaccc

SEQ ID NO: 4149218 - DNA, 25 bp, Homo sapien
aaaacaactggccgcatctctgagt

SEQ ID NO: 4149219 - DNA, 25 bp, Homo sapien
gaggagttctatctcatcttttggc

SEQ ID NO: 4149220 - DNA, 25 bp, Homo sapien
agttctatctcatcttttggcccaa

SEQ ID NO: 4149221 - DNA, 25 bp, Homo sapien
catttctgaggagttctatctcatc

SEQ ID NO: 4149222 - DNA, 25 bp, Homo sapien
tccatttctgaggagttctatctca

SEQ ID NO: 4149223 - DNA, 25 bp, Homo sapien
ataaatggccaaaggcttgcaattt

SEQ ID NO: 4149224 - DNA, 25 bp, Homo sapien
tggtgaaagactaagctgacttaga

SEQ ID NO: 4149225 - DNA, 25 bp, Homo sapien
gacttagactggaaaaagaggccgc

SEQ ID NO: 4149226 - DNA, 25 bp, Homo sapien
gaaaaagaggccgccatgaattggg

SEQ ID NO: 4149227 - DNA, 25 bp, Homo sapien
tctgagctgagcgagtaatggtgaa

SEQ ID NO: 4149228 - DNA, 25 bp, Homo sapien
ccctccgaagggttgtgataatcgt

SEQ ID NO: 4149229 - DNA, 25 bp, Homo sapien
taatcgtagctgttgtctgagctga

SEQ ID NO: 4149230 - DNA, 25 bp, Homo sapien
ggacccataatagctccctccgaag

SEQ ID NO: 4149231 - DNA, 25 bp, Homo sapien
ctcacagctccccaaaaggtgcaca

SEQ ID NO: 4149232 - DNA, 25 bp, Homo sapien
aggggagagagatctctcacagctc

SEQ ID NO: 4149233 - DNA, 25 bp, Homo sapien
cagctccccaaaaggtgcacacaat

SEQ ID NO: 4149234 - DNA, 25 bp, Homo sapien
ggagagagatctctcacagctcccc

SEQ ID NO: 4149235 - DNA, 25 bp, Homo sapien
gcagaataggaagagggctgtctaa

SEQ ID NO: 4149236 - DNA, 25 bp, Homo sapien
agggctgtctaagaggaggttctac

SEQ ID NO: 4149237 - DNA, 25 bp, Homo sapien
tgtctaagaggaggttctacatccc

SEQ ID NO: 4149238 - DNA, 25 bp, Homo sapien
agttctgcagaataggaagagggct

SEQ ID NO: 4149239 - DNA, 25 bp, Homo sapien
cgatacccacaacttggacaaaagg

SEQ ID NO: 4149240 - DNA, 25 bp, Homo sapien
gctatataggtatttacgcaagaag

SEQ ID NO: 4149241 - DNA, 25 bp, Homo sapien
catgtattggttaggtttccccaga

SEQ ID NO: 4149242 - DNA, 25 bp, Homo sapien
tctaagttagtgttccctgccatca

SEQ ID NO: 4149243 - DNA, 25 bp, Homo sapien
gtgtctcccagcgagcaaggaagga

SEQ ID NO: 4149244 - DNA, 25 bp, Homo sapien
gaaaactggcataacatggaggagc

SEQ ID NO: 4149245 - DNA, 25 bp, Homo sapien
aggatgaactctcagcgaccttgga

SEQ ID NO: 4149246 - DNA, 25 bp, Homo sapien
cagtttattctgaagctagcccagt

SEQ ID NO: 4149247 - DNA, 25 bp, Homo sapien
ctgctccataacattaccccttgtg

SEQ ID NO: 4149248 - DNA, 25 bp, Homo sapien
catgagaagctaacccaagttctgc

SEQ ID NO: 4149249 - DNA, 25 bp, Homo sapien
gaagctaacccaagttctgcctgtt

SEQ ID NO: 4149250 - DNA, 25 bp, Homo sapien
ggagggcatgagaagctaacccaag

SEQ ID NO: 4149251 - DNA, 25 bp, Homo sapien
gccttggattttgcaatggattctt

SEQ ID NO: 4149252 - DNA, 25 bp, Homo sapien
ggccttggattttgcaatggattct

SEQ ID NO: 4149253 - DNA, 25 bp, Homo sapien
cttgctgtgtaaattaatgtgggtg

SEQ ID NO: 4149254 - DNA, 25 bp, Homo sapien
gaagagcaaggttctgcaatccctg

SEQ ID NO: 4149255 - DNA, 25 bp, Homo sapien
tccttccgtaaatgatctccaaagc

SEQ ID NO: 4149256 - DNA, 25 bp, Homo sapien
caaggtttcacaggcactaaacagc

SEQ ID NO: 4149257 - DNA, 25 bp, Homo sapien
tacgtggccacaggaaccgctttaa

SEQ ID NO: 4149258 - DNA, 25 bp, Homo sapien
ctacgtggccacaggaaccgcttta

SEQ ID NO: 4149259 - DNA, 25 bp, Homo sapien
cctggttaaggttcccaagagagtg

SEQ ID NO: 4149260 - DNA, 25 bp, Homo sapien
gaaggtacagacttatacaggcaag

SEQ ID NO: 4149261 - DNA, 25 bp, Homo sapien
aatacatataaccaaaccggcagcg

SEQ ID NO: 4149262 - DNA, 25 bp, Homo sapien
ccggcagcgtttagagttgggatat

SEQ ID NO: 4149263 - DNA, 25 bp, Homo sapien
gacttgggtggccataccatctctg

SEQ ID NO: 4149264 - DNA, 25 bp, Homo sapien
taaaagtgatatccagccaggctca

SEQ ID NO: 4149265 - DNA, 25 bp, Homo sapien
tatgaaacccgattgaaaaagccga

SEQ ID NO: 4149266 - DNA, 25 bp, Homo sapien
tcatgagctcaaagggaacttcagc

SEQ ID NO: 4149267 - DNA, 25 bp, Homo sapien
gactgtgaatattaagggaacgcaa

SEQ ID NO: 4149268 - DNA, 25 bp, Homo sapien
tcttgacgctgagtgaaatatgggt

SEQ ID NO: 4149269 - DNA, 25 bp, Homo sapien
ggagaacattaattgcacgctatca

SEQ ID NO: 4149270 - DNA, 25 bp, Homo sapien
gaaaggtcagaaatgccgtaggcat

SEQ ID NO: 4149271 - DNA, 25 bp, Homo sapien
taaggttgtcaaggagtacagtctc

SEQ ID NO: 4149272 - DNA, 25 bp, Homo sapien
gcaccagccttgtttgtagccatgt

SEQ ID NO: 4149273 - DNA, 25 bp, Homo sapien
tagccatgtactgtcaagtcaaggg

SEQ ID NO: 4149274 - DNA, 25 bp, Homo sapien
gatagggagcctcacagctcttggg

SEQ ID NO: 4149275 - DNA, 25 bp, Homo sapien
tcagtaagccctcgtaacagcagca

SEQ ID NO: 4149276 - DNA, 25 bp, Homo sapien
gcaaaagcgctttcaccactggcga

SEQ ID NO: 4149277 - DNA, 25 bp, Homo sapien
cctaaagataaaatgaccctgggtg

SEQ ID NO: 4149278 - DNA, 25 bp, Homo sapien
gcaaaaggtgggttggctgcctctc

SEQ ID NO: 4149279 - DNA, 25 bp, Homo sapien
caaattggtacttctcacttgccat

SEQ ID NO: 4149280 - DNA, 25 bp, Homo sapien
gcaattcttgtagtgggacatatgg

SEQ ID NO: 4149281 - DNA, 25 bp, Homo sapien
agtgggacatatggttcaaattggt

SEQ ID NO: 4149282 - DNA, 25 bp, Homo sapien
gggacatatggttcaaattggtact

SEQ ID NO: 4149283 - DNA, 25 bp, Homo sapien
tctccaaggataccttcaatgcctg

SEQ ID NO: 4149284 - DNA, 25 bp, Homo sapien
tcaatgcctgcactgtaagggagct

SEQ ID NO: 4149285 - DNA, 25 bp, Homo sapien
gtgctggcgagaacggaagccttcc

SEQ ID NO: 4149286 - DNA, 25 bp, Homo sapien
tgcttttcccgggtgctggcgagaa

SEQ ID NO: 4149287 - DNA, 25 bp, Homo sapien
gcagcgccaatgtgaagcgttgcag

SEQ ID NO: 4149288 - DNA, 25 bp, Homo sapien
gaagcgttgcagtcgcttgactcac

SEQ ID NO: 4149289 - DNA, 25 bp, Homo sapien
cgccaatgtgaagcgttgcagtcgc

SEQ ID NO: 4149290 - DNA, 25 bp, Homo sapien
caatgtgaagcgttgcagtcgcttg

SEQ ID NO: 4149291 - DNA, 25 bp, Homo sapien
gtcactgtgcctcgtcttcggtgtc

SEQ ID NO: 4149292 - DNA, 25 bp, Homo sapien
caagtcagggctgttagctggtgta

SEQ ID NO: 4149293 - DNA, 25 bp, Homo sapien
cctccagcaagtcagggctgttagc

SEQ ID NO: 4149294 - DNA, 25 bp, Homo sapien
tcttcggtgtctgagaaatgggtcc

SEQ ID NO: 4149295 - DNA, 25 bp, Homo sapien
cgtgtgaatcgtgccataaggaggc

SEQ ID NO: 4149296 - DNA, 25 bp, Homo sapien
aaacagaaagtgaccatccgtgtga

SEQ ID NO: 4149297 - DNA, 25 bp, Homo sapien
tcttgcactggaagagtgctctcca

SEQ ID NO: 4149298 - DNA, 25 bp, Homo sapien
aagttggtgggcatataccgctgac

SEQ ID NO: 4149299 - DNA, 25 bp, Homo sapien
catctccctcgaggatttgtaacac

SEQ ID NO: 4149300 - DNA, 25 bp, Homo sapien
gttcacgtgccctgtagcgccagtt

SEQ ID NO: 4149301 - DNA, 25 bp, Homo sapien
taagcctggcttaagctacctagga

SEQ ID NO: 4149302 - DNA, 25 bp, Homo sapien
aacagcccactatagagtttgtgac

SEQ ID NO: 4149303 - DNA, 25 bp, Homo sapien
tattccacagaagggagggtttcac

SEQ ID NO: 4149304 - DNA, 25 bp, Homo sapien
catgataacaaggagaagcgcacgc

SEQ ID NO: 4149305 - DNA, 25 bp, Homo sapien
gctcctgtgatatcagggtcagata

SEQ ID NO: 4149306 - DNA, 25 bp, Homo sapien
ggaaagtttcaccatctgaccttaa

SEQ ID NO: 4149307 - DNA, 25 bp, Homo sapien
ggtcagatggaacatcagatagggt

SEQ ID NO: 4149308 - DNA, 25 bp, Homo sapien
tccctagattatgactgtagacaat

SEQ ID NO: 4149309 - DNA, 25 bp, Homo sapien
ggtctgatgacagtccctagattat

SEQ ID NO: 4149310 - DNA, 25 bp, Homo sapien
aataaactgggggtatcttagcagc

SEQ ID NO: 4149311 - DNA, 25 bp, Homo sapien
agagaaccaggccttcattagaaag

SEQ ID NO: 4149312 - DNA, 25 bp, Homo sapien
cagagaaccaggccttcattagaaa

SEQ ID NO: 4149313 - DNA, 25 bp, Homo sapien
aacttcagatataacagatctctgc

SEQ ID NO: 4149314 - DNA, 25 bp, Homo sapien
ggcggaacttcagatataacagatc

SEQ ID NO: 4149315 - DNA, 25 bp, Homo sapien
cttctctggcggaacttcagatata

SEQ ID NO: 4149316 - DNA, 25 bp, Homo sapien
tctggcggaacttcagatataacag

SEQ ID NO: 4149317 - DNA, 25 bp, Homo sapien
catttaacatccttgaccgagctgc

SEQ ID NO: 4149318 - DNA, 25 bp, Homo sapien
cattcgtttcaactgagagaggagg

SEQ ID NO: 4149319 - DNA, 25 bp, Homo sapien
ggtaccacgtcttgatcattcgttt

SEQ ID NO: 4149320 - DNA, 25 bp, Homo sapien
gggctgcagtctcaatgataccagg

SEQ ID NO: 4149321 - DNA, 25 bp, Homo sapien
agatgcatgtcagggccgaattgag

SEQ ID NO: 4149322 - DNA, 25 bp, Homo sapien
gctgagatgaggagtccagaaaaat

SEQ ID NO: 4149323 - DNA, 25 bp, Homo sapien
cagggccgaattgagtccactggtg

SEQ ID NO: 4149324 - DNA, 25 bp, Homo sapien
agcagcccaggttaataatggctgt

SEQ ID NO: 4149325 - DNA, 25 bp, Homo sapien
gctgctcagcaagggtgtccagcat

SEQ ID NO: 4149326 - DNA, 25 bp, Homo sapien
tgttcaaggcaacactatgggaggg

SEQ ID NO: 4149327 - DNA, 25 bp, Homo sapien
gaggccttgctccttgttcaaggca

SEQ ID NO: 4149328 - DNA, 25 bp, Homo sapien
tgaagtacatttctagtcgatagcc

SEQ ID NO: 4149329 - DNA, 25 bp, Homo sapien
tggccatcacgatgacagaattctg

SEQ ID NO: 4149330 - DNA, 25 bp, Homo sapien
tcatctgttgcattgctccaaggtg

SEQ ID NO: 4149331 - DNA, 25 bp, Homo sapien
gctccaaggtgaaattggccatcac

SEQ ID NO: 4149332 - DNA, 25 bp, Homo sapien
tgcaaggagaaacttcggttgactt

SEQ ID NO: 4149333 - DNA, 25 bp, Homo sapien
atggaaatattgtgtattcgcccag

SEQ ID NO: 4149334 - DNA, 25 bp, Homo sapien
aaatattgtgtattcgcccagacgg

SEQ ID NO: 4149335 - DNA, 25 bp, Homo sapien
ggaaatattgtgtattcgcccagac

SEQ ID NO: 4149336 - DNA, 25 bp, Homo sapien
aatattgtgtattcgcccagacggt

SEQ ID NO: 4149337 - DNA, 25 bp, Homo sapien
ggagcgcgttaacttctgcaagtgt

SEQ ID NO: 4149338 - DNA, 25 bp, Homo sapien
cattcgtaccaatcagaagtttact

SEQ ID NO: 4149339 - DNA, 25 bp, Homo sapien
agtgtataggctctgctgcttaaac

SEQ ID NO: 4149340 - DNA, 25 bp, Homo sapien
caaaggagcgcgttaacttctgcaa

SEQ ID NO: 4149341 - DNA, 25 bp, Homo sapien
catttgcgtaattcatccatctgcc

SEQ ID NO: 4149342 - DNA, 25 bp, Homo sapien
tttgcgtaattcatccatctgcctc

SEQ ID NO: 4149343 - DNA, 25 bp, Homo sapien
tccatttgcgtaattcatccatctg

SEQ ID NO: 4149344 - DNA, 25 bp, Homo sapien
tagtccatttgcgtaattcatccat

SEQ ID NO: 4149345 - DNA, 25 bp, Homo sapien
aatgcttgtctttgtaccgggaaca

SEQ ID NO: 4149346 - DNA, 25 bp, Homo sapien
tagaaccagcactggtcaaccagga

SEQ ID NO: 4149347 - DNA, 25 bp, Homo sapien
caaccgttggctaggtgcctgatga

SEQ ID NO: 4149348 - DNA, 25 bp, Homo sapien
gtcagaagatcagccctcaaccgtt

SEQ ID NO: 4149349 - DNA, 25 bp, Homo sapien
cagcatggctgtgataaccgagcac

SEQ ID NO: 4149350 - DNA, 25 bp, Homo sapien
tagtgtttgctttgacccgaaaggc

SEQ ID NO: 4149351 - DNA, 25 bp, Homo sapien
gactgtttcaacatgccccagatgg

SEQ ID NO: 4149352 - DNA, 25 bp, Homo sapien
tagcccattccataggcacatgagc

SEQ ID NO: 4149353 - DNA, 25 bp, Homo sapien
gagttcctgattgcacactgctgtg

SEQ ID NO: 4149354 - DNA, 25 bp, Homo sapien
gcgagcgagcccagcatctttttaa

SEQ ID NO: 4149355 - DNA, 25 bp, Homo sapien
tgtgctggaggcaattcagagacct

SEQ ID NO: 4149356 - DNA, 25 bp, Homo sapien
tgcagcagccatcgacttcagcagg

SEQ ID NO: 4149357 - DNA, 25 bp, Homo sapien
aatatctcttcgttttggccaggca

SEQ ID NO: 4149358 - DNA, 25 bp, Homo sapien
cacacatcattgaggtttgagtgaa

SEQ ID NO: 4149359 - DNA, 25 bp, Homo sapien
catcctgtgctatcataacttttca

SEQ ID NO: 4149360 - DNA, 25 bp, Homo sapien
tatgtcctagagtagtaattccaat

SEQ ID NO: 4149361 - DNA, 25 bp, Homo sapien
gccagggtctcagtgaatgcgttct

SEQ ID NO: 4149362 - DNA, 25 bp, Homo sapien
tacagaatgctttggatcctttgcc

SEQ ID NO: 4149363 - DNA, 25 bp, Homo sapien
gaaactatccattactgatttttgc

SEQ ID NO: 4149364 - DNA, 25 bp, Homo sapien
tcctttctgccagttgcatctgttc

SEQ ID NO: 4149365 - DNA, 25 bp, Homo sapien
gtcccggggaagtgtaagcatgccc

SEQ ID NO: 4149366 - DNA, 25 bp, Homo sapien
aatatagtgccttgtgaaaggagag

SEQ ID NO: 4149367 - DNA, 25 bp, Homo sapien
cctgaatatagtgccttgtgaaagg

SEQ ID NO: 4149368 - DNA, 25 bp, Homo sapien
ccggggaagtgtaagcatgccctgt

SEQ ID NO: 4149369 - DNA, 25 bp, Homo sapien
tgctcctggatgcaaagttgatgtg

SEQ ID NO: 4149370 - DNA, 25 bp, Homo sapien
tgttcttcatagatatattgtactt

SEQ ID NO: 4149371 - DNA, 25 bp, Homo sapien
tttgtttcatggctacagatttgtt

SEQ ID NO: 4149372 - DNA, 25 bp, Homo sapien
tgtttcatggctacagatttgttct

SEQ ID NO: 4149373 - DNA, 25 bp, Homo sapien
gagatccaaggcaaccacgtcagta

SEQ ID NO: 4149374 - DNA, 25 bp, Homo sapien
tgcatcccaggcaggtctaaggagg

SEQ ID NO: 4149375 - DNA, 25 bp, Homo sapien
cacgtcagtaataaggagccatcca

SEQ ID NO: 4149376 - DNA, 25 bp, Homo sapien
gagtgtcagcaagagcgatttgtcc

SEQ ID NO: 4149377 - DNA, 25 bp, Homo sapien
tcagttccgtaaaggtatcttagaa

SEQ ID NO: 4149378 - DNA, 25 bp, Homo sapien
tatgcatcagttgggctgccatgag

SEQ ID NO: 4149379 - DNA, 25 bp, Homo sapien
ccatgaggctgtaattaccaggtct

SEQ ID NO: 4149380 - DNA, 25 bp, Homo sapien
caatcaaatgttctatgcaggagaa

SEQ ID NO: 4149381 - DNA, 25 bp, Homo sapien
gaggagagccttcatatcactgtaa

SEQ ID NO: 4149382 - DNA, 25 bp, Homo sapien
gaattgtgtagctatacctagcagg

SEQ ID NO: 4149383 - DNA, 25 bp, Homo sapien
gaatcttcatccgtgcagtacttta

SEQ ID NO: 4149384 - DNA, 25 bp, Homo sapien
tatctaagtcgttagagacacggca

SEQ ID NO: 4149385 - DNA, 25 bp, Homo sapien
gaagtattatcctgagccatgaatc

SEQ ID NO: 4149386 - DNA, 25 bp, Homo sapien
atttagggtcacagataaatcacat

SEQ ID NO: 4149387 - DNA, 25 bp, Homo sapien
tatatatttagggtcacagataaat

SEQ ID NO: 4149388 - DNA, 25 bp, Homo sapien
caccagttatttgctttgttagctc

SEQ ID NO: 4149389 - DNA, 25 bp, Homo sapien
tatatttagggtcacagataaatca

SEQ ID NO: 4149390 - DNA, 25 bp, Homo sapien
gtttgtcttggcatgccactcctaa

SEQ ID NO: 4149391 - DNA, 25 bp, Homo sapien
gcttgcctgctaaaaccaaatcctt

SEQ ID NO: 4149392 - DNA, 25 bp, Homo sapien
ggcctccaaggtgcagggcactgga

SEQ ID NO: 4149393 - DNA, 25 bp, Homo sapien
cttgcttgcctgctaaaaccaaatc

SEQ ID NO: 4149394 - DNA, 25 bp, Homo sapien
tgaaaattgaagtcgtgcactgcca

SEQ ID NO: 4149395 - DNA, 25 bp, Homo sapien
aattgaagtcgtgcactgccactgc

SEQ ID NO: 4149396 - DNA, 25 bp, Homo sapien
gacagaccgctaatgaatagtaatc

SEQ ID NO: 4149397 - DNA, 25 bp, Homo sapien
agcctattctatccatttgacagac

SEQ ID NO: 4149398 - DNA, 25 bp, Homo sapien
gccatgcaacttctctcgggtacag

SEQ ID NO: 4149399 - DNA, 25 bp, Homo sapien
tatagaagtgtgaacttgtataagc

SEQ ID NO: 4149400 - DNA, 25 bp, Homo sapien
caaagacttgggatttgggcttgca

SEQ ID NO: 4149401 - DNA, 25 bp, Homo sapien
tggactttgaacctaagcctgcagc

SEQ ID NO: 4149402 - DNA, 25 bp, Homo sapien
gtgtacttgctgcatcatcgtccat

SEQ ID NO: 4149403 - DNA, 25 bp, Homo sapien
gagtgtacttgctgcatcatcgtcc

SEQ ID NO: 4149404 - DNA, 25 bp, Homo sapien
agtgtacttgctgcatcatcgtcca

SEQ ID NO: 4149405 - DNA, 25 bp, Homo sapien
ttcctggcttgctgcagttgacttg

SEQ ID NO: 4149406 - DNA, 25 bp, Homo sapien
cctggcttgctgcagttgacttgct

SEQ ID NO: 4149407 - DNA, 25 bp, Homo sapien
tcctggcttgctgcagttgacttgc

SEQ ID NO: 4149408 - DNA, 25 bp, Homo sapien
tcttattgagggtaggaactgtgtc

SEQ ID NO: 4149409 - DNA, 25 bp, Homo sapien
gggtaaacttgaagcctcccacagc

SEQ ID NO: 4149410 - DNA, 25 bp, Homo sapien
gaagcacttgtgatccctttgcgta

SEQ ID NO: 4149411 - DNA, 25 bp, Homo sapien
gagcagacgcatgtccttggaagca

SEQ ID NO: 4149412 - DNA, 25 bp, Homo sapien
gctgtggaatcagctggaatgctca

SEQ ID NO: 4149413 - DNA, 25 bp, Homo sapien
cccttcttgacatgctgtggaatca

SEQ ID NO: 4149414 - DNA, 25 bp, Homo sapien
aagctctagacttctgaggcacccc

SEQ ID NO: 4149415 - DNA, 25 bp, Homo sapien
tcccttcttgacatgctgtggaatc

SEQ ID NO: 4149416 - DNA, 25 bp, Homo sapien
taagagaacgtgacatggaagagac

SEQ ID NO: 4149417 - DNA, 25 bp, Homo sapien
tactcttgtacaggtatgcggcaca

SEQ ID NO: 4149418 - DNA, 25 bp, Homo sapien
cagactgaagtatttatgaaggacc

SEQ ID NO: 4149419 - DNA, 25 bp, Homo sapien
catgtttgaaccaaggcactgtgct

SEQ ID NO: 4149420 - DNA, 25 bp, Homo sapien
gctggaaacctgatacattgccaca

SEQ ID NO: 4149421 - DNA, 25 bp, Homo sapien
ctggaaacctgatacattgccacat

SEQ ID NO: 4149422 - DNA, 25 bp, Homo sapien
tgctcttccggttctgagcagccgt

SEQ ID NO: 4149423 - DNA, 25 bp, Homo sapien
aacggtgctcgggacacatttgtga

SEQ ID NO: 4149424 - DNA, 25 bp, Homo sapien
tcttagaggtcaactcttggagcag

SEQ ID NO: 4149425 - DNA, 25 bp, Homo sapien
tcaaaacggtgctcgggacacattt

SEQ ID NO: 4149426 - DNA, 25 bp, Homo sapien
gcacacagggtagatattcatgtct

SEQ ID NO: 4149427 - DNA, 25 bp, Homo sapien
aaagttggatgatttcaccaggctc

SEQ ID NO: 4149428 - DNA, 25 bp, Homo sapien
tatttaggcagtgaattcaatcatg

SEQ ID NO: 4149429 - DNA, 25 bp, Homo sapien
gaaacttgtgtttggtggtgatgct

SEQ ID NO: 4149430 - DNA, 25 bp, Homo sapien
gccgctgagcccagctaatctgcgt

SEQ ID NO: 4149431 - DNA, 25 bp, Homo sapien
gcccagctaatctgcgttttgacaa

SEQ ID NO: 4149432 - DNA, 25 bp, Homo sapien
gcttagcattaaagagcttgtaaaa

SEQ ID NO: 4149433 - DNA, 25 bp, Homo sapien
ttcagattgcttagcattaaagagc

SEQ ID NO: 4149434 - DNA, 25 bp, Homo sapien
cagttgactgtcatatggagttttt

SEQ ID NO: 4149435 - DNA, 25 bp, Homo sapien
tgcacagcattggatcacctcactg

SEQ ID NO: 4149436 - DNA, 25 bp, Homo sapien
tcttcgtaagtccagccagctggtt

SEQ ID NO: 4149437 - DNA, 25 bp, Homo sapien
cacctcactgtttctcagttgactg

SEQ ID NO: 4149438 - DNA, 25 bp, Homo sapien
caggaacagagttgggaactggggg

SEQ ID NO: 4149439 - DNA, 25 bp, Homo sapien
gagcaggaacagagttgggaactgg

SEQ ID NO: 4149440 - DNA, 25 bp, Homo sapien
agcaggaacagagttgggaactggg

SEQ ID NO: 4149441 - DNA, 25 bp, Homo sapien
tggagcaggaacagagttgggaact

SEQ ID NO: 4149442 - DNA, 25 bp, Homo sapien
gacccctgagctagaagaaagcggt

SEQ ID NO: 4149443 - DNA, 25 bp, Homo sapien
aggggtggggattggcgctcataca

SEQ ID NO: 4149444 - DNA, 25 bp, Homo sapien
ctgtgaagacccctgagctagaaga

SEQ ID NO: 4149445 - DNA, 25 bp, Homo sapien
agctagaagaaagcggttggacgct

SEQ ID NO: 4149446 - DNA, 25 bp, Homo sapien
tccagactggaagcctgatcttgag

SEQ ID NO: 4149447 - DNA, 25 bp, Homo sapien
cagagacaattctctaatttgtggg

SEQ ID NO: 4149448 - DNA, 25 bp, Homo sapien
ttgaccaccacattcatcagcagac

SEQ ID NO: 4149449 - DNA, 25 bp, Homo sapien
tctaatttgtgggtgactgcatccc

SEQ ID NO: 4149450 - DNA, 25 bp, Homo sapien
gctccagagtcaaaactgcgttcaa

SEQ ID NO: 4149451 - DNA, 25 bp, Homo sapien
cactgtggtcctttatagtctagac

SEQ ID NO: 4149452 - DNA, 25 bp, Homo sapien
gaattgtatccgtgcatcctctagg

SEQ ID NO: 4149453 - DNA, 25 bp, Homo sapien
cagctgtatcactacttgcaggtcg

SEQ ID NO: 4149454 - DNA, 25 bp, Homo sapien
tgggcttcgagctggaccgcttcga

SEQ ID NO: 4149455 - DNA, 25 bp, Homo sapien
caagctggacatcaagtgcgcgtac

SEQ ID NO: 4149456 - DNA, 25 bp, Homo sapien
tcaagcgccttatcctcaagctgga

SEQ ID NO: 4149457 - DNA, 25 bp, Homo sapien
tctggatcaattaggctcagtccgg

SEQ ID NO: 4149458 - DNA, 25 bp, Homo sapien
cgctcgcgcaaatacggccggagga

SEQ ID NO: 4149459 - DNA, 25 bp, Homo sapien
ctcgcgcaaatacggccggaggagt

SEQ ID NO: 4149460 - DNA, 25 bp, Homo sapien
cacgatgtatgtgcgctcgcgctcg

SEQ ID NO: 4149461 - DNA, 25 bp, Homo sapien
gggaggcatccaaggcacgatgtat

SEQ ID NO: 4149462 - DNA, 25 bp, Homo sapien
tctgcaatcagccactagaggaagg

SEQ ID NO: 4149463 - DNA, 25 bp, Homo sapien
gtaagtgctgagatagcgggcccca

SEQ ID NO: 4149464 - DNA, 25 bp, Homo sapien
ggctcgaagagaacccttgggagaa

SEQ ID NO: 4149465 - DNA, 25 bp, Homo sapien
tttcccgagaagattcaggctggcg

SEQ ID NO: 4149466 - DNA, 25 bp, Homo sapien
gtagattcacccaccggtcctggaa

SEQ ID NO: 4149467 - DNA, 25 bp, Homo sapien
ttagaagcgctcagcaccacgcttg

SEQ ID NO: 4149468 - DNA, 25 bp, Homo sapien
acagctggcgagcagctcttgtcca

SEQ ID NO: 4149469 - DNA, 25 bp, Homo sapien
gaaggttcacagaacctctggtcag

SEQ ID NO: 4149470 - DNA, 25 bp, Homo sapien
cattatctgagagcccatgagcagt

SEQ ID NO: 4149471 - DNA, 25 bp, Homo sapien
aatatactgatggaggattccctgg

SEQ ID NO: 4149472 - DNA, 25 bp, Homo sapien
tttgcaaagtgaccaatccagctgt

SEQ ID NO: 4149473 - DNA, 25 bp, Homo sapien
gatcgccagggttttccaatcaagt

SEQ ID NO: 4149474 - DNA, 25 bp, Homo sapien
tgagaaggaagctaacccaagggaa

SEQ ID NO: 4149475 - DNA, 25 bp, Homo sapien
taatgtgttcatgtgagcacctgga

SEQ ID NO: 4149476 - DNA, 25 bp, Homo sapien
gagttggcagataacctaaggcagg

SEQ ID NO: 4149477 - DNA, 25 bp, Homo sapien
catgccttgaacacttattggaact

SEQ ID NO: 4149478 - DNA, 25 bp, Homo sapien
caatcaaggtgggaaatgccatccc

SEQ ID NO: 4149479 - DNA, 25 bp, Homo sapien
gactggcaagtagggatgagcccac

SEQ ID NO: 4149480 - DNA, 25 bp, Homo sapien
taaaggcaaggttcggctcctggct

SEQ ID NO: 4149481 - DNA, 25 bp, Homo sapien
ccaagacagctacgtgaaggagggt

SEQ ID NO: 4149482 - DNA, 25 bp, Homo sapien
gaactccgaggtatccttgagcaag

SEQ ID NO: 4149483 - DNA, 25 bp, Homo sapien
ttaaaaggtgaactctgaactccga

SEQ ID NO: 4149484 - DNA, 25 bp, Homo sapien
tgagagggttgactagctgcatttc

SEQ ID NO: 4149485 - DNA, 25 bp, Homo sapien
gcaagtaggtccatgtccacataat

SEQ ID NO: 4149486 - DNA, 25 bp, Homo sapien
tgaagtgaggcagtgcatacacgat

SEQ ID NO: 4149487 - DNA, 25 bp, Homo sapien
caggtcgtgggtaccagaaatgaag

SEQ ID NO: 4149488 - DNA, 25 bp, Homo sapien
tacacgatatacgaaaagaatggtt

SEQ ID NO: 4149489 - DNA, 25 bp, Homo sapien
aatctagttgggaagacaggtcgtg

SEQ ID NO: 4149490 - DNA, 25 bp, Homo sapien
cacagtaaggatgtactcatgagct

SEQ ID NO: 4149491 - DNA, 25 bp, Homo sapien
cataggtcgtgggactatgcaggca

SEQ ID NO: 4149492 - DNA, 25 bp, Homo sapien
ctcatgagctctgctaggaaattca

SEQ ID NO: 4149493 - DNA, 25 bp, Homo sapien
ggttgtcagctgagactttatttcc

SEQ ID NO: 4149494 - DNA, 25 bp, Homo sapien
acttgccctcggaatggaacccatc

SEQ ID NO: 4149495 - DNA, 25 bp, Homo sapien
tatagtctggtatcacttgccctcg

SEQ ID NO: 4149496 - DNA, 25 bp, Homo sapien
ggtactggcggcagagcttatagtc

SEQ ID NO: 4149497 - DNA, 25 bp, Homo sapien
cttgcctctgagggtactggcggca

SEQ ID NO: 4149498 - DNA, 25 bp, Homo sapien
gccaatcaggtctgtacatctgtaa

SEQ ID NO: 4149499 - DNA, 25 bp, Homo sapien
acatctgtaatttagtcgaggggaa

SEQ ID NO: 4149500 - DNA, 25 bp, Homo sapien
caattgccaatcaggtctgtacatc

SEQ ID NO: 4149501 - DNA, 25 bp, Homo sapien
ctccaattgccaatcaggtctgtac

SEQ ID NO: 4149502 - DNA, 25 bp, Homo sapien
tctgggtttgtggtggttggtctgt

SEQ ID NO: 4149503 - DNA, 25 bp, Homo sapien
tcccaggcatgagtacaggctccgt

SEQ ID NO: 4149504 - DNA, 25 bp, Homo sapien
ggaagatcctcaaagaaggcagtat

SEQ ID NO: 4149505 - DNA, 25 bp, Homo sapien
gagagggaagcaaggacaaatccca

SEQ ID NO: 4149506 - DNA, 25 bp, Homo sapien
ctgttagaaaaaatactcaaaccag

SEQ ID NO: 4149507 - DNA, 25 bp, Homo sapien
ttagaaaaaatactcaaaccagctg

SEQ ID NO: 4149508 - DNA, 25 bp, Homo sapien
tgttagaaaaaatactcaaaccagc

SEQ ID NO: 4149509 - DNA, 25 bp, Homo sapien
ttttccccatgtagcctctcagtct

SEQ ID NO: 4149510 - DNA, 25 bp, Homo sapien
ctgtctctcgtctttttccccatgt

SEQ ID NO: 4149511 - DNA, 25 bp, Homo sapien
tgtatgaaatcttgtcccagcccca

SEQ ID NO: 4149512 - DNA, 25 bp, Homo sapien
taaatgtagagtcacttctttcttc

SEQ ID NO: 4149513 - DNA, 25 bp, Homo sapien
agttaggtcataaaacgcatgtccc

SEQ ID NO: 4149514 - DNA, 25 bp, Homo sapien
tatgcgaacaataaagcgggacagg

SEQ ID NO: 4149515 - DNA, 25 bp, Homo sapien
tcccctgtgcgttgtgaggcaagac

SEQ ID NO: 4149516 - DNA, 25 bp, Homo sapien
gaggcaagacgccaacggccttgtg

SEQ ID NO: 4149517 - DNA, 25 bp, Homo sapien
gacctggctctttgccccttagaac

SEQ ID NO: 4149518 - DNA, 25 bp, Homo sapien
gacacagatggcaattccttgacca

SEQ ID NO: 4149519 - DNA, 25 bp, Homo sapien
agctgtgcccatgcacccttctgtg

SEQ ID NO: 4149520 - DNA, 25 bp, Homo sapien
cacaaatgaccaaagtgccgtttcc

SEQ ID NO: 4149521 - DNA, 25 bp, Homo sapien
tctcaatgtgctctggacgaatggc

SEQ ID NO: 4149522 - DNA, 25 bp, Homo sapien
catgtttccgatagctgtgtctcaa

SEQ ID NO: 4149523 - DNA, 25 bp, Homo sapien
tgtgtgaggagcttagcccagctgc

SEQ ID NO: 4149524 - DNA, 25 bp, Homo sapien
tgatggtggatgaccaagtcttccc

SEQ ID NO: 4149525 - DNA, 25 bp, Homo sapien
ctcagactgtgagaacaacccacca

SEQ ID NO: 4149526 - DNA, 25 bp, Homo sapien
acagacctcagactgtgagaacaac

SEQ ID NO: 4149527 - DNA, 25 bp, Homo sapien
gacctcagactgtgagaacaaccca

SEQ ID NO: 4149528 - DNA, 25 bp, Homo sapien
agaacaaggctactttcctcacaca

SEQ ID NO: 4149529 - DNA, 25 bp, Homo sapien
tccagccctctggatatccggagag

SEQ ID NO: 4149530 - DNA, 25 bp, Homo sapien
cagcatcatgacaggctggacttcc

SEQ ID NO: 4149531 - DNA, 25 bp, Homo sapien
taggataactatcatcactgcctgc

SEQ ID NO: 4149532 - DNA, 25 bp, Homo sapien
cctctgagtcagtaagccattgata

SEQ ID NO: 4149533 - DNA, 25 bp, Homo sapien
cagccacttcaaattggcagtgttt

SEQ ID NO: 4149534 - DNA, 25 bp, Homo sapien
cttgtacagccacttcaaattggca

SEQ ID NO: 4149535 - DNA, 25 bp, Homo sapien
ttgtacagccacttcaaattggcag

SEQ ID NO: 4149536 - DNA, 25 bp, Homo sapien
gtacagccacttcaaattggcagtg

SEQ ID NO: 4149537 - DNA, 25 bp, Homo sapien
cctgtagtcccgacaacagagtctt

SEQ ID NO: 4149538 - DNA, 25 bp, Homo sapien
gaaaacacccagaaggcctgtagtc

SEQ ID NO: 4149539 - DNA, 25 bp, Homo sapien
tagtcccgacaacagagtcttatac

SEQ ID NO: 4149540 - DNA, 25 bp, Homo sapien
tctcagaatagagtttgtcctcatc

SEQ ID NO: 4149541 - DNA, 25 bp, Homo sapien
gctggggggacttcagaatcatggc

SEQ ID NO: 4149542 - DNA, 25 bp, Homo sapien
catggctggggggacttcagaatca

SEQ ID NO: 4149543 - DNA, 25 bp, Homo sapien
tccacatggctggggggacttcaga

SEQ ID NO: 4149544 - DNA, 25 bp, Homo sapien
ctggggggacttcagaatcatggca

SEQ ID NO: 4149545 - DNA, 25 bp, Homo sapien
acattctgccctgtcactttccaca

SEQ ID NO: 4149546 - DNA, 25 bp, Homo sapien
cattctgccctgtcactttccacag

SEQ ID NO: 4149547 - DNA, 25 bp, Homo sapien
atacattctgccctgtcactttcca

SEQ ID NO: 4149548 - DNA, 25 bp, Homo sapien
tacattctgccctgtcactttccac

SEQ ID NO: 4149549 - DNA, 25 bp, Homo sapien
tctacaaatgtatatgtctccttac

SEQ ID NO: 4149550 - DNA, 25 bp, Homo sapien
ctcgtacatgttctacaaatgtata

SEQ ID NO: 4149551 - DNA, 25 bp, Homo sapien
gttctacaaatgtatatgtctcctt

SEQ ID NO: 4149552 - DNA, 25 bp, Homo sapien
cgtacatgttctacaaatgtatatg

SEQ ID NO: 4149553 - DNA, 25 bp, Homo sapien
agagtcaagacatcaatcacctctg

SEQ ID NO: 4149554 - DNA, 25 bp, Homo sapien
gacttccagagtcaagacatcaatc

SEQ ID NO: 4149555 - DNA, 25 bp, Homo sapien
aaattgctacccatggcatcaggag

SEQ ID NO: 4149556 - DNA, 25 bp, Homo sapien
catgagcttaaaactgacttccaga

SEQ ID NO: 4149557 - DNA, 25 bp, Homo sapien
ttcactagctgttcatattggtact

SEQ ID NO: 4149558 - DNA, 25 bp, Homo sapien
tttccctgtcacaacccaggtcatg

SEQ ID NO: 4149559 - DNA, 25 bp, Homo sapien
gtcatgtttttcactagctgttcat

SEQ ID NO: 4149560 - DNA, 25 bp, Homo sapien
ggtactgcatttctaccctctccat

SEQ ID NO: 4149561 - DNA, 25 bp, Homo sapien
ttccttttagcatccatccatgtcc

SEQ ID NO: 4149562 - DNA, 25 bp, Homo sapien
tccatgtcctcacttccctttgggt

SEQ ID NO: 4149563 - DNA, 25 bp, Homo sapien
atccatgtcctcacttccctttggg

SEQ ID NO: 4149564 - DNA, 25 bp, Homo sapien
gggtcttccttttagcatccatcca

SEQ ID NO: 4149565 - DNA, 25 bp, Homo sapien
cctcagtccagtcagtttagcctca

SEQ ID NO: 4149566 - DNA, 25 bp, Homo sapien
gcagattggtaaggccaacttctcc

SEQ ID NO: 4149567 - DNA, 25 bp, Homo sapien
gtcagtttagcctcagtagcatctg

SEQ ID NO: 4149568 - DNA, 25 bp, Homo sapien
agaatggatttctctggttcaaagt

SEQ ID NO: 4149569 - DNA, 25 bp, Homo sapien
cattgggtaagcgttattagtctcc

SEQ ID NO: 4149570 - DNA, 25 bp, Homo sapien
cccaagttgtaaatgccaaggcaag

SEQ ID NO: 4149571 - DNA, 25 bp, Homo sapien
gaactcaggtctgtgctacgattca

SEQ ID NO: 4149572 - DNA, 25 bp, Homo sapien
tctgcccctaatcatttagacgact

SEQ ID NO: 4149573 - DNA, 25 bp, Homo sapien
aattggcccagaaactttgagtgat

SEQ ID NO: 4149574 - DNA, 25 bp, Homo sapien
gaaattggcccagaaactttgagtg

SEQ ID NO: 4149575 - DNA, 25 bp, Homo sapien
ttgaaattggcccagaaactttgag

SEQ ID NO: 4149576 - DNA, 25 bp, Homo sapien
tggcccagaaactttgagtgatcat

SEQ ID NO: 4149577 - DNA, 25 bp, Homo sapien
tcattcacaggtagcctcgcagatc

SEQ ID NO: 4149578 - DNA, 25 bp, Homo sapien
tgaaaaacttgcaagtagtgaccaa

SEQ ID NO: 4149579 - DNA, 25 bp, Homo sapien
tatgcagtaatctttcaggagctcc

SEQ ID NO: 4149580 - DNA, 25 bp, Homo sapien
tccatcttcccttatttatgcagta

SEQ ID NO: 4149581 - DNA, 25 bp, Homo sapien
gcatatagagaatgttcagtaaata

SEQ ID NO: 4149582 - DNA, 25 bp, Homo sapien
ctggcatatagagaatgttcagtaa

SEQ ID NO: 4149583 - DNA, 25 bp, Homo sapien
tatagagaatgttcagtaaataggg

SEQ ID NO: 4149584 - DNA, 25 bp, Homo sapien
tggcatatagagaatgttcagtaaa

SEQ ID NO: 4149585 - DNA, 25 bp, Homo sapien
catgtcaaaggtgctcttaccagca

SEQ ID NO: 4149586 - DNA, 25 bp, Homo sapien
atgtcaaaggtgctcttaccagcag

SEQ ID NO: 4149587 - DNA, 25 bp, Homo sapien
agtctgcagttctgaaatttccttc

SEQ ID NO: 4149588 - DNA, 25 bp, Homo sapien
catagtacctaaaccccaaagtctg

SEQ ID NO: 4149589 - DNA, 25 bp, Homo sapien
ccaaagtctgcagttctgaaatttc

SEQ ID NO: 4149590 - DNA, 25 bp, Homo sapien
cttctctgcataaaggccacctact

SEQ ID NO: 4149591 - DNA, 25 bp, Homo sapien
gtgtgtcagcgtctgcatccctttt

SEQ ID NO: 4149592 - DNA, 25 bp, Homo sapien
ctctgaagtaaatctctttgccaaa

SEQ ID NO: 4149593 - DNA, 25 bp, Homo sapien
tctctgaagtaaatctctttgccaa

SEQ ID NO: 4149594 - DNA, 25 bp, Homo sapien
aagcacccccggtgtctactgacat

SEQ ID NO: 4149595 - DNA, 25 bp, Homo sapien
aaagcacccccggtgtctactgaca

SEQ ID NO: 4149596 - DNA, 25 bp, Homo sapien
tctgtggatgtcgtctaggaaatgg

SEQ ID NO: 4149597 - DNA, 25 bp, Homo sapien
gcccagagtcaccaaatattgctcc

SEQ ID NO: 4149598 - DNA, 25 bp, Homo sapien
gagtcaccaaatattgctccggtcc

SEQ ID NO: 4149599 - DNA, 25 bp, Homo sapien
ttgaactcccagcattttctctttg

SEQ ID NO: 4149600 - DNA, 25 bp, Homo sapien
gcactgtttatgcaatatggcacct

SEQ ID NO: 4149601 - DNA, 25 bp, Homo sapien
caaggtctgtttcagtgttggagga

SEQ ID NO: 4149602 - DNA, 25 bp, Homo sapien
gagctgggtccataatctttagttg

SEQ ID NO: 4149603 - DNA, 25 bp, Homo sapien
aactgactctgttggactcgttgag

SEQ ID NO: 4149604 - DNA, 25 bp, Homo sapien
tgtcgtaatcacatcatgctgagtg

SEQ ID NO: 4149605 - DNA, 25 bp, Homo sapien
taagcatgatttagtccctatggaa

SEQ ID NO: 4149606 - DNA, 25 bp, Homo sapien
tgtaaaactgctctgcctaagcatg

SEQ ID NO: 4149607 - DNA, 25 bp, Homo sapien
aacacatgccctaaagtgaatgggc

SEQ ID NO: 4149608 - DNA, 25 bp, Homo sapien
gaattatcataagaaccatccttcc

SEQ ID NO: 4149609 - DNA, 25 bp, Homo sapien
cataagaaccatccttccaagagga

SEQ ID NO: 4149610 - DNA, 25 bp, Homo sapien
agcccaaaagaaggacggtctggca

SEQ ID NO: 4149611 - DNA, 25 bp, Homo sapien
aaagaaggacggtctggcagaaact

SEQ ID NO: 4149612 - DNA, 25 bp, Homo sapien
ggctttctctatatgttcagtatcc

SEQ ID NO: 4149613 - DNA, 25 bp, Homo sapien
gaagcaccagagattgggctttctc

SEQ ID NO: 4149614 - DNA, 25 bp, Homo sapien
gaaagcttttgtgaagcaccagaga

SEQ ID NO: 4149615 - DNA, 25 bp, Homo sapien
ccccacaggaaagcttttgtgaagc

SEQ ID NO: 4149616 - DNA, 25 bp, Homo sapien
ccataaccacgatggagagagttat

SEQ ID NO: 4149617 - DNA, 25 bp, Homo sapien
aaggtttttgcaatatctccacgcc

SEQ ID NO: 4149618 - DNA, 25 bp, Homo sapien
cacgccttttggcagccgtttttgt

SEQ ID NO: 4149619 - DNA, 25 bp, Homo sapien
taaattttgcaacatccccatgcct

SEQ ID NO: 4149620 - DNA, 25 bp, Homo sapien
aaacagaagaggagcctgattcatc

SEQ ID NO: 4149621 - DNA, 25 bp, Homo sapien
gaaacagaagaggagcctgattcat

SEQ ID NO: 4149622 - DNA, 25 bp, Homo sapien
aacagaagaggagcctgattcatcc

SEQ ID NO: 4149623 - DNA, 25 bp, Homo sapien
gaacagtcagaggacagaaaggagc

SEQ ID NO: 4149624 - DNA, 25 bp, Homo sapien
ctgtagaaggaacagtcagaggaca

SEQ ID NO: 4149625 - DNA, 25 bp, Homo sapien
aaggaacagtcagaggacagaaagg

SEQ ID NO: 4149626 - DNA, 25 bp, Homo sapien
tgtagaaggaacagtcagaggacag

SEQ ID NO: 4149627 - DNA, 25 bp, Homo sapien
cattattatctctcacgtctactat

SEQ ID NO: 4149628 - DNA, 25 bp, Homo sapien
tactaactattctctgaggcaatgg

SEQ ID NO: 4149629 - DNA, 25 bp, Homo sapien
gaggcaatggataatccccagtctt

SEQ ID NO: 4149630 - DNA, 25 bp, Homo sapien
agctccgcagggcttttgaagctca

SEQ ID NO: 4149631 - DNA, 25 bp, Homo sapien
tcttgtgccgaggagaaaagtttaa

SEQ ID NO: 4149632 - DNA, 25 bp, Homo sapien
aaccctgctccaaggccaaactgaa

SEQ ID NO: 4149633 - DNA, 25 bp, Homo sapien
tctctagtgagattgtcttgtgccg

SEQ ID NO: 4149634 - DNA, 25 bp, Homo sapien
gttgaacaaattctggaaccctgct

SEQ ID NO: 4149635 - DNA, 25 bp, Homo sapien
tctatgggacagtcatcaagtgtgc

SEQ ID NO: 4149636 - DNA, 25 bp, Homo sapien
tccagtacagaatttatgcttgtgt

SEQ ID NO: 4149637 - DNA, 25 bp, Homo sapien
ttatgcttgtgtatctctatgggac

SEQ ID NO: 4149638 - DNA, 25 bp, Homo sapien
ggtgcttttgttccattgctatgtt

SEQ ID NO: 4149639 - DNA, 25 bp, Homo sapien
tatcttaacccacttgcatgctggg

SEQ ID NO: 4149640 - DNA, 25 bp, Homo sapien
attggattagggaccgaccctgagg

SEQ ID NO: 4149641 - DNA, 25 bp, Homo sapien
tgctgggactagataagcattctct

SEQ ID NO: 4149642 - DNA, 25 bp, Homo sapien
catagcaccatagggatagcaagtc

SEQ ID NO: 4149643 - DNA, 25 bp, Homo sapien
tgaacaaagcccatagatcctttca

SEQ ID NO: 4149644 - DNA, 25 bp, Homo sapien
gaacaaagcccatagatcctttcag

SEQ ID NO: 4149645 - DNA, 25 bp, Homo sapien
ccctcttccccaagaatgacaccca

SEQ ID NO: 4149646 - DNA, 25 bp, Homo sapien
ctgaacaaagcccatagatcctttc

SEQ ID NO: 4149647 - DNA, 25 bp, Homo sapien
catgtggagagctgataagcgacat

SEQ ID NO: 4149648 - DNA, 25 bp, Homo sapien
caccatgtggagagctgataagcga

SEQ ID NO: 4149649 - DNA, 25 bp, Homo sapien
ccatgtggagagctgataagcgaca

SEQ ID NO: 4149650 - DNA, 25 bp, Homo sapien
cacaccatgtggagagctgataagc

SEQ ID NO: 4149651 - DNA, 25 bp, Homo sapien
tgttgctcagctgggtgctaagttt

SEQ ID NO: 4149652 - DNA, 25 bp, Homo sapien
gactgtgttgctcagctgggtgcta

SEQ ID NO: 4149653 - DNA, 25 bp, Homo sapien
tgctcagctgggtgctaagtttcat

SEQ ID NO: 4149654 - DNA, 25 bp, Homo sapien
tgtgttgctcagctgggtgctaagt

SEQ ID NO: 4149655 - DNA, 25 bp, Homo sapien
ctggagcaatcgttcaggttttgcc

SEQ ID NO: 4149656 - DNA, 25 bp, Homo sapien
caatcgttcaggttttgccggtgat

SEQ ID NO: 4149657 - DNA, 25 bp, Homo sapien
ggtgtcgtgttcataaggaggtaat

SEQ ID NO: 4149658 - DNA, 25 bp, Homo sapien
ttttgccggtgatcaaaggtgtcgt

SEQ ID NO: 4149659 - DNA, 25 bp, Homo sapien
taacctttccacctcagtacctgaa

SEQ ID NO: 4149660 - DNA, 25 bp, Homo sapien
tcatgaagcggaagtagattgtctc

SEQ ID NO: 4149661 - DNA, 25 bp, Homo sapien
tgctgtggtcacaagcttcaggaag

SEQ ID NO: 4149662 - DNA, 25 bp, Homo sapien
tcagtacctgaagcgtcattgagac

SEQ ID NO: 4149663 - DNA, 25 bp, Homo sapien
tctcccaggatcttgtgccaaaaaa

SEQ ID NO: 4149664 - DNA, 25 bp, Homo sapien
cccaggatcttgtgccaaaaaagat

SEQ ID NO: 4149665 - DNA, 25 bp, Homo sapien
caggatcttgtgccaaaaaagatca

SEQ ID NO: 4149666 - DNA, 25 bp, Homo sapien
gctctcccaggatcttgtgccaaaa

SEQ ID NO: 4149667 - DNA, 25 bp, Homo sapien
tggtggagaccgtgggaccaaattc

SEQ ID NO: 4149668 - DNA, 25 bp, Homo sapien
gagaccgtgggaccaaattcagctt

SEQ ID NO: 4149669 - DNA, 25 bp, Homo sapien
tggactcagagccatatcaaagagt

SEQ ID NO: 4149670 - DNA, 25 bp, Homo sapien
gactcagagccatatcaaagagtag

SEQ ID NO: 4149671 - DNA, 25 bp, Homo sapien
gtgtctgcgatgtccatttctggtt

SEQ ID NO: 4149672 - DNA, 25 bp, Homo sapien
aatgaaatgctcttttggcaggcta

SEQ ID NO: 4149673 - DNA, 25 bp, Homo sapien
aaatgctcttttggcaggctactgg

SEQ ID NO: 4149674 - DNA, 25 bp, Homo sapien
atgctcttttggcaggctactggtt

SEQ ID NO: 4149675 - DNA, 25 bp, Homo sapien
tgaaatgctcttttggcaggctact

SEQ ID NO: 4149676 - DNA, 25 bp, Homo sapien
gttgcgccttcagaaaatgctgcag

SEQ ID NO: 4149677 - DNA, 25 bp, Homo sapien
tgcagaatttctttcaggatcagct

SEQ ID NO: 4149678 - DNA, 25 bp, Homo sapien
taaacacagtatgaggttgcgcctt

SEQ ID NO: 4149679 - DNA, 25 bp, Homo sapien
tgagttatatactgacgctttccct

SEQ ID NO: 4149680 - DNA, 25 bp, Homo sapien
cttctttaattccagcccattcttt

SEQ ID NO: 4149681 - DNA, 25 bp, Homo sapien
tccagcccattctttaattccaatg

SEQ ID NO: 4149682 - DNA, 25 bp, Homo sapien
cagtggattacggtctcatagtcaa

SEQ ID NO: 4149683 - DNA, 25 bp, Homo sapien
ggtctcatagtcaactctgtccttc

SEQ ID NO: 4149684 - DNA, 25 bp, Homo sapien
aatggtgtgacctgtggtagcagac

SEQ ID NO: 4149685 - DNA, 25 bp, Homo sapien
tcctgtggacttcaaaccattttgt

SEQ ID NO: 4149686 - DNA, 25 bp, Homo sapien
tccagaaaagcttttgccttgctat

SEQ ID NO: 4149687 - DNA, 25 bp, Homo sapien
ttttgtcacagagttaggtgggata

SEQ ID NO: 4149688 - DNA, 25 bp, Homo sapien
tggacaactcttgtaaactccccca

SEQ ID NO: 4149689 - DNA, 25 bp, Homo sapien
tctggacaactcttgtaaactcccc

SEQ ID NO: 4149690 - DNA, 25 bp, Homo sapien
tatctggacaactcttgtaaactcc

SEQ ID NO: 4149691 - DNA, 25 bp, Homo sapien
atctggacaactcttgtaaactccc

SEQ ID NO: 4149692 - DNA, 25 bp, Homo sapien
caactcccagatgaaaatctctttg

SEQ ID NO: 4149693 - DNA, 25 bp, Homo sapien
aaaatctctttgttgtaatagcaga

SEQ ID NO: 4149694 - DNA, 25 bp, Homo sapien
ctaggaaggtcctgtcaggttctca

SEQ ID NO: 4149695 - DNA, 25 bp, Homo sapien
tattgatgatgagacacacgagttg

SEQ ID NO: 4149696 - DNA, 25 bp, Homo sapien
gcgtccaccaaagtagggtgtgttc

SEQ ID NO: 4149697 - DNA, 25 bp, Homo sapien
tgcgtccaccaaagtagggtgtgtt

SEQ ID NO: 4149698 - DNA, 25 bp, Homo sapien
ctgcgtccaccaaagtagggtgtgt

SEQ ID NO: 4149699 - DNA, 25 bp, Homo sapien
taacaccagacttggcaatagttcc

SEQ ID NO: 4149700 - DNA, 25 bp, Homo sapien
tttaacaccagacttggcaatagtt

SEQ ID NO: 4149701 - DNA, 25 bp, Homo sapien
tgctttaacaccagacttggcaata

SEQ ID NO: 4149702 - DNA, 25 bp, Homo sapien
aacaccagacttggcaatagttccc

SEQ ID NO: 4149703 - DNA, 25 bp, Homo sapien
ggcatagtgtttatcatcattgtgc

SEQ ID NO: 4149704 - DNA, 25 bp, Homo sapien
aggcatagtgtttatcatcattgtg

SEQ ID NO: 4149705 - DNA, 25 bp, Homo sapien
caggcatagtgtttatcatcattgt

SEQ ID NO: 4149706 - DNA, 25 bp, Homo sapien
ggatcaacagggtcagcacatacag

SEQ ID NO: 4149707 - DNA, 25 bp, Homo sapien
tttggtgccactgccaatgggatca

SEQ ID NO: 4149708 - DNA, 25 bp, Homo sapien
cagcacatacagttaagaaacccct

SEQ ID NO: 4149709 - DNA, 25 bp, Homo sapien
ttaagaaacccctagcataagactc

SEQ ID NO: 4149710 - DNA, 25 bp, Homo sapien
agtcttctttaaagtggaggatcac

SEQ ID NO: 4149711 - DNA, 25 bp, Homo sapien
ctagtcttctttaaagtggaggatc

SEQ ID NO: 4149712 - DNA, 25 bp, Homo sapien
tagtcttctttaaagtggaggatca

SEQ ID NO: 4149713 - DNA, 25 bp, Homo sapien
gaccctctacagagacgtgcttgag

SEQ ID NO: 4149714 - DNA, 25 bp, Homo sapien
cccaatcatttgtgaggctctcata

SEQ ID NO: 4149715 - DNA, 25 bp, Homo sapien
tgcttgagtggcaagcggtcttccc

SEQ ID NO: 4149716 - DNA, 25 bp, Homo sapien
ggctttctgatccaaatgggcttgg

SEQ ID NO: 4149717 - DNA, 25 bp, Homo sapien
ttgacagctttgtcgtccttgtcca

SEQ ID NO: 4149718 - DNA, 25 bp, Homo sapien
gtgtctccacaataggttggtcaag

SEQ ID NO: 4149719 - DNA, 25 bp, Homo sapien
gctttgtcgtccttgtccacctcag

SEQ ID NO: 4149720 - DNA, 25 bp, Homo sapien
caataggttggtcaaggttgatttc

SEQ ID NO: 4149721 - DNA, 25 bp, Homo sapien
tcatctgtagctagaccgagcttgt

SEQ ID NO: 4149722 - DNA, 25 bp, Homo sapien
ccgagcttgttcatggtagatgcta

SEQ ID NO: 4149723 - DNA, 25 bp, Homo sapien
tagatgctattggagtaggtctgag

SEQ ID NO: 4149724 - DNA, 25 bp, Homo sapien
taggtctgagaatcctcaggggaga

SEQ ID NO: 4149725 - DNA, 25 bp, Homo sapien
ttggtgctgtcggtgaggacaaggt

SEQ ID NO: 4149726 - DNA, 25 bp, Homo sapien
cttattctggtgcatgtaggcacag

SEQ ID NO: 4149727 - DNA, 25 bp, Homo sapien
catgtaggcacagtcaatatggcag

SEQ ID NO: 4149728 - DNA, 25 bp, Homo sapien
cccctacctcgttcttattctggtg

SEQ ID NO: 4149729 - DNA, 25 bp, Homo sapien
caccaccccttgctgatgagcctca

SEQ ID NO: 4149730 - DNA, 25 bp, Homo sapien
taaagtcggtcagccagtgaataag

SEQ ID NO: 4149731 - DNA, 25 bp, Homo sapien
tccacctggagatgattacagttgg

SEQ ID NO: 4149732 - DNA, 25 bp, Homo sapien
tgggatccacgttgtctgactcatc

SEQ ID NO: 4149733 - DNA, 25 bp, Homo sapien
tctgagtgaggtacaggtggaactc

SEQ ID NO: 4149734 - DNA, 25 bp, Homo sapien
gcctgggggaagtggatcagaatct

SEQ ID NO: 4149735 - DNA, 25 bp, Homo sapien
cctgggggaagtggatcagaatctg

SEQ ID NO: 4149736 - DNA, 25 bp, Homo sapien
tgcctgggggaagtggatcagaatc

SEQ ID NO: 4149737 - DNA, 25 bp, Homo sapien
ctggtgtcacagacttggggatcac

SEQ ID NO: 4149738 - DNA, 25 bp, Homo sapien
gaccttaaagttctcagcaatgcat

SEQ ID NO: 4149739 - DNA, 25 bp, Homo sapien
gcttagttcaaagtcaaagacctta

SEQ ID NO: 4149740 - DNA, 25 bp, Homo sapien
caaagaccttaaagttctcagcaat

SEQ ID NO: 4149741 - DNA, 25 bp, Homo sapien
tggctgcttagttcaaagtcaaaga

SEQ ID NO: 4149742 - DNA, 25 bp, Homo sapien
caggcacccgcagcttcaaaacttc

SEQ ID NO: 4149743 - DNA, 25 bp, Homo sapien
cacccgcagcttcaaaacttcatgg

SEQ ID NO: 4149744 - DNA, 25 bp, Homo sapien
ggcacccgcagcttcaaaacttcat

SEQ ID NO: 4149745 - DNA, 25 bp, Homo sapien
gcacccgcagcttcaaaacttcatg

SEQ ID NO: 4149746 - DNA, 25 bp, Homo sapien
gaagggattacagttccaagcagtc

SEQ ID NO: 4149747 - DNA, 25 bp, Homo sapien
cactttttacttgaggcaaagagaa

SEQ ID NO: 4149748 - DNA, 25 bp, Homo sapien
gggattacagttccaagcagtcaaa

SEQ ID NO: 4149749 - DNA, 25 bp, Homo sapien
gaagtcttgctgaagggattacagt

SEQ ID NO: 4149750 - DNA, 25 bp, Homo sapien
tctccaacctatttcttcaaatcta

SEQ ID NO: 4149751 - DNA, 25 bp, Homo sapien
ttcttcaaatctagttttatttctc

SEQ ID NO: 4149752 - DNA, 25 bp, Homo sapien
ccaacctatttcttcaaatctagtt

SEQ ID NO: 4149753 - DNA, 25 bp, Homo sapien
cttcaaatctagttttatttctctc

SEQ ID NO: 4149754 - DNA, 25 bp, Homo sapien
gctgccgtctttggagccccacacc

SEQ ID NO: 4149755 - DNA, 25 bp, Homo sapien
ttgctgccgtctttggagccccaca

SEQ ID NO: 4149756 - DNA, 25 bp, Homo sapien
tgctgccgtctttggagccccacac

SEQ ID NO: 4149757 - DNA, 25 bp, Homo sapien
cttgctgccgtctttggagccccac

SEQ ID NO: 4149758 - DNA, 25 bp, Homo sapien
gaatcatttgtgcacatgatttaat

SEQ ID NO: 4149759 - DNA, 25 bp, Homo sapien
tgtttgggccataagtctggctttg

SEQ ID NO: 4149760 - DNA, 25 bp, Homo sapien
gttgagtcaatcttgcatgaatgca

SEQ ID NO: 4149761 - DNA, 25 bp, Homo sapien
ggtggattggcttttgttatgaatc

SEQ ID NO: 4149762 - DNA, 25 bp, Homo sapien
tttaggcataactgtgatttgttct

SEQ ID NO: 4149763 - DNA, 25 bp, Homo sapien
ttcagatttaggcataactgtgatt

SEQ ID NO: 4149764 - DNA, 25 bp, Homo sapien
tcatctccggtgctttgctgccttt

SEQ ID NO: 4149765 - DNA, 25 bp, Homo sapien
tatgagaagagtagttcttcagatt

SEQ ID NO: 4149766 - DNA, 25 bp, Homo sapien
ggagcatacgtcttatattttatgg

SEQ ID NO: 4149767 - DNA, 25 bp, Homo sapien
tggagcatacgtcttatattttatg

SEQ ID NO: 4149768 - DNA, 25 bp, Homo sapien
caaagaaatatataattggttgtaa

SEQ ID NO: 4149769 - DNA, 25 bp, Homo sapien
agttgtaaacaccacaccagccagg

SEQ ID NO: 4149770 - DNA, 25 bp, Homo sapien
tagtcaagtgaatcaataagagaat

SEQ ID NO: 4149771 - DNA, 25 bp, Homo sapien
gaatcaataagagaatggacaaaga

SEQ ID NO: 4149772 - DNA, 25 bp, Homo sapien
tcaaaacttcagaacatagctttcc

SEQ ID NO: 4149773 - DNA, 25 bp, Homo sapien
ggtctcacggaatgcccaattatgg

SEQ ID NO: 4149774 - DNA, 25 bp, Homo sapien
ttcccaggtctcacggaatgcccaa

SEQ ID NO: 4149775 - DNA, 25 bp, Homo sapien
tcttttgaacgcagctgccactatg

SEQ ID NO: 4149776 - DNA, 25 bp, Homo sapien
ccaattatggcttgtcctctatatg

SEQ ID NO: 4149777 - DNA, 25 bp, Homo sapien
gaaatgtgtgcataactcaaactca

SEQ ID NO: 4149778 - DNA, 25 bp, Homo sapien
atgtgtgcataactcaaactcaatt

SEQ ID NO: 4149779 - DNA, 25 bp, Homo sapien
aaatgtgtgcataactcaaactcaa

SEQ ID NO: 4149780 - DNA, 25 bp, Homo sapien
aatgtgtgcataactcaaactcaat

SEQ ID NO: 4149781 - DNA, 25 bp, Homo sapien
acagctagtttgaagaagatgccaa

SEQ ID NO: 4149782 - DNA, 25 bp, Homo sapien
ttctacagctagtttgaagaagatg

SEQ ID NO: 4149783 - DNA, 25 bp, Homo sapien
ctacagctagtttgaagaagatgcc

SEQ ID NO: 4149784 - DNA, 25 bp, Homo sapien
tacagctagtttgaagaagatgcca

SEQ ID NO: 4149785 - DNA, 25 bp, Homo sapien
ccttaggctcttgtttcagctgaaa

SEQ ID NO: 4149786 - DNA, 25 bp, Homo sapien
cagttgactgccttgttaccatgaa

SEQ ID NO: 4149787 - DNA, 25 bp, Homo sapien
gacacacacttcaggtgttccagat

SEQ ID NO: 4149788 - DNA, 25 bp, Homo sapien
ttaaggcaacacgaaggcctcctta

SEQ ID NO: 4149789 - DNA, 25 bp, Homo sapien
gaaccaattcaattatgatgttggt

SEQ ID NO: 4149790 - DNA, 25 bp, Homo sapien
taggcagaaagagaaccaattcaat

SEQ ID NO: 4149791 - DNA, 25 bp, Homo sapien
ttccatcagtgtaaaatcattatcc

SEQ ID NO: 4149792 - DNA, 25 bp, Homo sapien
tccttagaatctaataaagattcca

SEQ ID NO: 4149793 - DNA, 25 bp, Homo sapien
tcatgggtatcccttgacagttgcc

SEQ ID NO: 4149794 - DNA, 25 bp, Homo sapien
catctgattggtttaagccaaagtc

SEQ ID NO: 4149795 - DNA, 25 bp, Homo sapien
ccaaggctaagatgtgatcatctga

SEQ ID NO: 4149796 - DNA, 25 bp, Homo sapien
aagtcatatgatccactcttgggct

SEQ ID NO: 4149797 - DNA, 25 bp, Homo sapien
tgaagcaggatgaatcagtgccctc

SEQ ID NO: 4149798 - DNA, 25 bp, Homo sapien
gtttgaagcaggatgaatcagtgcc

SEQ ID NO: 4149799 - DNA, 25 bp, Homo sapien
tttgaagcaggatgaatcagtgccc

SEQ ID NO: 4149800 - DNA, 25 bp, Homo sapien
aagcaggatgaatcagtgccctcat

SEQ ID NO: 4149801 - DNA, 25 bp, Homo sapien
atttttcacatgaccaaatgagccc

SEQ ID NO: 4149802 - DNA, 25 bp, Homo sapien
tgttcctgatctaaaggcgagctca

SEQ ID NO: 4149803 - DNA, 25 bp, Homo sapien
gttcctgatctaaaggcgagctcat

SEQ ID NO: 4149804 - DNA, 25 bp, Homo sapien
ttgctggtgctcctgttcctgatct

SEQ ID NO: 4149805 - DNA, 25 bp, Homo sapien
aaggatcttatggaagcaatgactt

SEQ ID NO: 4149806 - DNA, 25 bp, Homo sapien
tcttccttttagaccacatatggta

SEQ ID NO: 4149807 - DNA, 25 bp, Homo sapien
ggtaacctctagatgttgccatggc

SEQ ID NO: 4149808 - DNA, 25 bp, Homo sapien
tgggatctttgtgacccgtatcttg

SEQ ID NO: 4149809 - DNA, 25 bp, Homo sapien
tagggtataacaagcagcaaggatg

SEQ ID NO: 4149810 - DNA, 25 bp, Homo sapien
atgtgcgtaatattatttttcccca

SEQ ID NO: 4149811 - DNA, 25 bp, Homo sapien
tgtgcgtaatattatttttccccag

SEQ ID NO: 4149812 - DNA, 25 bp, Homo sapien
cagtttggaagttcaacctaacaat

SEQ ID NO: 4149813 - DNA, 25 bp, Homo sapien
ttatccacctccaatattaccaact

SEQ ID NO: 4149814 - DNA, 25 bp, Homo sapien
tttaggagaataagtgattttggtg

SEQ ID NO: 4149815 - DNA, 25 bp, Homo sapien
caatattaccaactaagcaaagcct

SEQ ID NO: 4149816 - DNA, 25 bp, Homo sapien
tgattttggtgttccccgttgctgg

SEQ ID NO: 4149817 - DNA, 25 bp, Homo sapien
ctttcattgtaagtggtacgatgct

SEQ ID NO: 4149818 - DNA, 25 bp, Homo sapien
taaaacacaagctgagacttggctg

SEQ ID NO: 4149819 - DNA, 25 bp, Homo sapien
cattgtaagtggtacgatgctttca

SEQ ID NO: 4149820 - DNA, 25 bp, Homo sapien
gagacttggctggatatactgtata

SEQ ID NO: 4149821 - DNA, 25 bp, Homo sapien
gtgagtctattcacagtcatgttcc

SEQ ID NO: 4149822 - DNA, 25 bp, Homo sapien
tagaaactcgggtctctataagagg

SEQ ID NO: 4149823 - DNA, 25 bp, Homo sapien
tactatgggaagcttgtgggatttt

SEQ ID NO: 4149824 - DNA, 25 bp, Homo sapien
gaagaagagtattactatgggaagc

SEQ ID NO: 4149825 - DNA, 25 bp, Homo sapien
tgcttgcatcgctttccactgccag

SEQ ID NO: 4149826 - DNA, 25 bp, Homo sapien
ttgtttttgtctgccgcctcagaca

SEQ ID NO: 4149827 - DNA, 25 bp, Homo sapien
ttgcatcgctttccactgccagtat

SEQ ID NO: 4149828 - DNA, 25 bp, Homo sapien
cttaagctcctccagttgtttttgt

SEQ ID NO: 4149829 - DNA, 25 bp, Homo sapien
caaagcacagtaaacttgtttgaca

SEQ ID NO: 4149830 - DNA, 25 bp, Homo sapien
aacaaagcacagtaaacttgtttga

SEQ ID NO: 4149831 - DNA, 25 bp, Homo sapien
caacaaagcacagtaaacttgtttg

SEQ ID NO: 4149832 - DNA, 25 bp, Homo sapien
acaaagcacagtaaacttgtttgac

SEQ ID NO: 4149833 - DNA, 25 bp, Homo sapien
attggccataggagtcacatctcca

SEQ ID NO: 4149834 - DNA, 25 bp, Homo sapien
gattggccataggagtcacatctcc

SEQ ID NO: 4149835 - DNA, 25 bp, Homo sapien
tgttgaagttgtaaaggccagtccg

SEQ ID NO: 4149836 - DNA, 25 bp, Homo sapien
ctgtatgcttgtaggcaattttgtg

SEQ ID NO: 4149837 - DNA, 25 bp, Homo sapien
cttgtaggcaattttgtgggatgcc

SEQ ID NO: 4149838 - DNA, 25 bp, Homo sapien
ttgttgaagttgtaaaggccagtcc

SEQ ID NO: 4149839 - DNA, 25 bp, Homo sapien
aatggccagagtacgtgtatcgatc

SEQ ID NO: 4149840 - DNA, 25 bp, Homo sapien
tgcacacaaagttggttgaagctgc

SEQ ID NO: 4149841 - DNA, 25 bp, Homo sapien
tgttgacggtatgaatccaaactga

SEQ ID NO: 4149842 - DNA, 25 bp, Homo sapien
aaaaattaatcagtcgtgtaagacg

SEQ ID NO: 4149843 - DNA, 25 bp, Homo sapien
ctgtggaagcagagccaattattct

SEQ ID NO: 4149844 - DNA, 25 bp, Homo sapien
ccaaatgggttaactctgtttcttg

SEQ ID NO: 4149845 - DNA, 25 bp, Homo sapien
gaacactgacatagagaactgtgga

SEQ ID NO: 4149846 - DNA, 25 bp, Homo sapien
tttttcccccaaagcagctcaaagc

SEQ ID NO: 4149847 - DNA, 25 bp, Homo sapien
gtaagcctgtaatgtcctgaaaacc

SEQ ID NO: 4149848 - DNA, 25 bp, Homo sapien
tgactaatagccagcatggcctggg

SEQ ID NO: 4149849 - DNA, 25 bp, Homo sapien
tttactcctggcaataaccctgtga

SEQ ID NO: 4149850 - DNA, 25 bp, Homo sapien
tataaataggtacccattggaagcc

SEQ ID NO: 4149851 - DNA, 25 bp, Homo sapien
gaaagccaatgattgtctgggccat

SEQ ID NO: 4149852 - DNA, 25 bp, Homo sapien
actgcagaaagccaatgattgtctg

SEQ ID NO: 4149853 - DNA, 25 bp, Homo sapien
ccctgagctataagctgactgcaga

SEQ ID NO: 4149854 - DNA, 25 bp, Homo sapien
cttccctgagctataagctgactgc

SEQ ID NO: 4149855 - DNA, 25 bp, Homo sapien
cagattcacaggttaggcagagggc

SEQ ID NO: 4149856 - DNA, 25 bp, Homo sapien
tgttctctgcagtacaagagtagag

SEQ ID NO: 4149857 - DNA, 25 bp, Homo sapien
tccacagggtgcagtcaaggcattc

SEQ ID NO: 4149858 - DNA, 25 bp, Homo sapien
cctgagccatacaatgggaggattc

SEQ ID NO: 4149859 - DNA, 25 bp, Homo sapien
ctgttgtatttcctcttatatcagc

SEQ ID NO: 4149860 - DNA, 25 bp, Homo sapien
tatctgttgtatttcctcttatatc

SEQ ID NO: 4149861 - DNA, 25 bp, Homo sapien
tgattactgaagatacaatcatatt

SEQ ID NO: 4149862 - DNA, 25 bp, Homo sapien
ttttctgattactgaagatacaatc

SEQ ID NO: 4149863 - DNA, 25 bp, Homo sapien
gttagctatattcacttcacatttc

SEQ ID NO: 4149864 - DNA, 25 bp, Homo sapien
ggtatatcagtacaactgatgaagg

SEQ ID NO: 4149865 - DNA, 25 bp, Homo sapien
tccctgcaggacatgtgcttgccct

SEQ ID NO: 4149866 - DNA, 25 bp, Homo sapien
ctctgtctcccatactttgtgttag

SEQ ID NO: 4149867 - DNA, 25 bp, Homo sapien
ggattgacagatcagagtaaactct

SEQ ID NO: 4149868 - DNA, 25 bp, Homo sapien
agcagctggtatcagccccgcttca

SEQ ID NO: 4149869 - DNA, 25 bp, Homo sapien
aatgacctgggtgccaaccagacag

SEQ ID NO: 4149870 - DNA, 25 bp, Homo sapien
taattcagtagagggtatgagccag

SEQ ID NO: 4149871 - DNA, 25 bp, Homo sapien
gacattactggtttccgtagaacta

SEQ ID NO: 4149872 - DNA, 25 bp, Homo sapien
tggaggagacattactggtttccgt

SEQ ID NO: 4149873 - DNA, 25 bp, Homo sapien
gagacattactggtttccgtagaac

SEQ ID NO: 4149874 - DNA, 25 bp, Homo sapien
gaggagacattactggtttccgtag

SEQ ID NO: 4149875 - DNA, 25 bp, Homo sapien
ggtagagtagcacacacagctgatg

SEQ ID NO: 4149876 - DNA, 25 bp, Homo sapien
tctggtagagtagcacacacagctg

SEQ ID NO: 4149877 - DNA, 25 bp, Homo sapien
ggctctggtagagtagcacacacag

SEQ ID NO: 4149878 - DNA, 25 bp, Homo sapien
tgggctctggtagagtagcacacac

SEQ ID NO: 4149879 - DNA, 25 bp, Homo sapien
tgttgacttcggagatactggcccc

SEQ ID NO: 4149880 - DNA, 25 bp, Homo sapien
gttgacttcggagatactggcccca

SEQ ID NO: 4149881 - DNA, 25 bp, Homo sapien
ttgacttcggagatactggccccat

SEQ ID NO: 4149882 - DNA, 25 bp, Homo sapien
ctcttcctaaatttcactagtagaa

SEQ ID NO: 4149883 - DNA, 25 bp, Homo sapien
tatcctgatgttctaattcctgtgt

SEQ ID NO: 4149884 - DNA, 25 bp, Homo sapien
taactttggtgggaagacccatgat

SEQ ID NO: 4149885 - DNA, 25 bp, Homo sapien
aaagttaggaactctgcaatgcaga

SEQ ID NO: 4149886 - DNA, 25 bp, Homo sapien
ttgtaggtgaagtttctatggactg

SEQ ID NO: 4149887 - DNA, 25 bp, Homo sapien
tgaaaaggaatcaggagcttaagct

SEQ ID NO: 4149888 - DNA, 25 bp, Homo sapien
taggtgaagtttctatggactgaaa

SEQ ID NO: 4149889 - DNA, 25 bp, Homo sapien
cttaagctttaatttggttgtgttg

SEQ ID NO: 4149890 - DNA, 25 bp, Homo sapien
gctactgtcctccttagggttgaaa

SEQ ID NO: 4149891 - DNA, 25 bp, Homo sapien
taaagctgctactgtcctccttagg

SEQ ID NO: 4149892 - DNA, 25 bp, Homo sapien
ttcccacttgcctttctgattaaac

SEQ ID NO: 4149893 - DNA, 25 bp, Homo sapien
gctgctactgtcctccttagggttg

SEQ ID NO: 4149894 - DNA, 25 bp, Homo sapien
ggatgaactgcttggtctgtgcctt

SEQ ID NO: 4149895 - DNA, 25 bp, Homo sapien
tggatgaactgcttggtctgtgcct

SEQ ID NO: 4149896 - DNA, 25 bp, Homo sapien
gatgaactgcttggtctgtgccttt

SEQ ID NO: 4149897 - DNA, 25 bp, Homo sapien
cacggaagactttagacaacagcgt

SEQ ID NO: 4149898 - DNA, 25 bp, Homo sapien
cgtcatttcattagagaggaagtga

SEQ ID NO: 4149899 - DNA, 25 bp, Homo sapien
tgaataagacatgccgactctccag

SEQ ID NO: 4149900 - DNA, 25 bp, Homo sapien
gctgctggtggacaacacggaagac

SEQ ID NO: 4149901 - DNA, 25 bp, Homo sapien
tgtatccccggaatggaacacaaag

SEQ ID NO: 4149902 - DNA, 25 bp, Homo sapien
gttgttgcttctacctgtccgcacg

SEQ ID NO: 4149903 - DNA, 25 bp, Homo sapien
cgcacgatacttaatactccttggg

SEQ ID NO: 4149904 - DNA, 25 bp, Homo sapien
cccacactctttgactgagtcgtga

SEQ ID NO: 4149905 - DNA, 25 bp, Homo sapien
cccacgatccatcttcggtaactga

SEQ ID NO: 4149906 - DNA, 25 bp, Homo sapien
gatccatcttcggtaactgaaattc

SEQ ID NO: 4149907 - DNA, 25 bp, Homo sapien
catcttcggtaactgaaattcaatc

SEQ ID NO: 4149908 - DNA, 25 bp, Homo sapien
cacgatccatcttcggtaactgaaa

SEQ ID NO: 4149909 - DNA, 25 bp, Homo sapien
cctcattacaggtacagtgaaaagt

SEQ ID NO: 4149910 - DNA, 25 bp, Homo sapien
tgaagcaagaggcaatccatcacct

SEQ ID NO: 4149911 - DNA, 25 bp, Homo sapien
tataggtgagcttctcttacaaggc

SEQ ID NO: 4149912 - DNA, 25 bp, Homo sapien
tatttatcaaagaacccagcaacag

SEQ ID NO: 4149913 - DNA, 25 bp, Homo sapien
tccctgtagggctgtagtctatgaa

SEQ ID NO: 4149914 - DNA, 25 bp, Homo sapien
gagtcactgttcctcctagtagaca

SEQ ID NO: 4149915 - DNA, 25 bp, Homo sapien
gaataaaatcccatagtagactgct

SEQ ID NO: 4149916 - DNA, 25 bp, Homo sapien
tgtgctctgtcaatatggaactgct

SEQ ID NO: 4149917 - DNA, 25 bp, Homo sapien
taattccccgtgtggtaccaactga

SEQ ID NO: 4149918 - DNA, 25 bp, Homo sapien
ccaactgaattgtaggagtccagag

SEQ ID NO: 4149919 - DNA, 25 bp, Homo sapien
tgctgaatcagagagttgtacccgt

SEQ ID NO: 4149920 - DNA, 25 bp, Homo sapien
gagatttaggtctgtgtatcgcgca

SEQ ID NO: 4149921 - DNA, 25 bp, Homo sapien
cgtctaccctctactgtacctttca

SEQ ID NO: 4149922 - DNA, 25 bp, Homo sapien
ggctttcatagaaacgtctaccctc

SEQ ID NO: 4149923 - DNA, 25 bp, Homo sapien
tctcatttaggctttcatagaaacg

SEQ ID NO: 4149924 - DNA, 25 bp, Homo sapien
ttaggctttcatagaaacgtctacc

SEQ ID NO: 4149925 - DNA, 25 bp, Homo sapien
ccaagacgagcctgatggttctcca

SEQ ID NO: 4149926 - DNA, 25 bp, Homo sapien
ctccaagacgagcctgatggttctc

SEQ ID NO: 4149927 - DNA, 25 bp, Homo sapien
tccaagacgagcctgatggttctcc

SEQ ID NO: 4149928 - DNA, 25 bp, Homo sapien
cctccaagacgagcctgatggttct

SEQ ID NO: 4149929 - DNA, 25 bp, Homo sapien
gcaagctctgggttaccattcttct

SEQ ID NO: 4149930 - DNA, 25 bp, Homo sapien
catctatctaggttgtctctgtcca

SEQ ID NO: 4149931 - DNA, 25 bp, Homo sapien
tcttgtagatccatctccttgcaag

SEQ ID NO: 4149932 - DNA, 25 bp, Homo sapien
tttctgggtcttggaatctcttgta

SEQ ID NO: 4149933 - DNA, 25 bp, Homo sapien
cagcaactgccacacgccaaagctt

SEQ ID NO: 4149934 - DNA, 25 bp, Homo sapien
cctgataacaaggaatcctctgagc

SEQ ID NO: 4149935 - DNA, 25 bp, Homo sapien
tgtgtaagcacaaggtacacagcaa

SEQ ID NO: 4149936 - DNA, 25 bp, Homo sapien
aggtaggctgtgtaagcacaaggta

SEQ ID NO: 4149937 - DNA, 25 bp, Homo sapien
gacgatctgttattgagttgcatga

SEQ ID NO: 4149938 - DNA, 25 bp, Homo sapien
ttgagtggcggaatgtatagaaacc

SEQ ID NO: 4149939 - DNA, 25 bp, Homo sapien
tatagaaaccaatagatggaaccca

SEQ ID NO: 4149940 - DNA, 25 bp, Homo sapien
cagtggaatgttgagctaatcaggc

SEQ ID NO: 4149941 - DNA, 25 bp, Homo sapien
tgcgaagagctaatgtagcattttc

SEQ ID NO: 4149942 - DNA, 25 bp, Homo sapien
cacgtatgccattattaattcataa

SEQ ID NO: 4149943 - DNA, 25 bp, Homo sapien
gaatttggcacttgtagatgtaagc

SEQ ID NO: 4149944 - DNA, 25 bp, Homo sapien
gttttagcttccacaatgcgaagag

SEQ ID NO: 4149945 - DNA, 25 bp, Homo sapien
acaggtacccagaagcatcatcgac

SEQ ID NO: 4149946 - DNA, 25 bp, Homo sapien
gattcagaagtcatgctaggccagg

SEQ ID NO: 4149947 - DNA, 25 bp, Homo sapien
catcatcgactgtcagcagaggaaa

SEQ ID NO: 4149948 - DNA, 25 bp, Homo sapien
ttcttggaggatatgcaagtgcccc

SEQ ID NO: 4149949 - DNA, 25 bp, Homo sapien
tcagagaattggtgattcttcagca

SEQ ID NO: 4149950 - DNA, 25 bp, Homo sapien
ttggtgattcttcagcagctgccgg

SEQ ID NO: 4149951 - DNA, 25 bp, Homo sapien
agaattggtgattcttcagcagctg

SEQ ID NO: 4149952 - DNA, 25 bp, Homo sapien
agagaattggtgattcttcagcagc

SEQ ID NO: 4149953 - DNA, 25 bp, Homo sapien
cattgattctttcctcacctctcca

SEQ ID NO: 4149954 - DNA, 25 bp, Homo sapien
ccaggccactcacttatctcgatgg

SEQ ID NO: 4149955 - DNA, 25 bp, Homo sapien
ttatctcgatggagtcttctttgca

SEQ ID NO: 4149956 - DNA, 25 bp, Homo sapien
ccagagaccttggagttaccattga

SEQ ID NO: 4149957 - DNA, 25 bp, Homo sapien
tcccagacatagcttcttgccttac

SEQ ID NO: 4149958 - DNA, 25 bp, Homo sapien
tttcccagacatagcttcttgcctt

SEQ ID NO: 4149959 - DNA, 25 bp, Homo sapien
tcatcctttttcccagacatagctt

SEQ ID NO: 4149960 - DNA, 25 bp, Homo sapien
atcctttttcccagacatagcttct

SEQ ID NO: 4149961 - DNA, 25 bp, Homo sapien
tggccgcctccctgaatgtaaagta

SEQ ID NO: 4149962 - DNA, 25 bp, Homo sapien
caattactaattccggtgaatattc

SEQ ID NO: 4149963 - DNA, 25 bp, Homo sapien
agtagccgaaagttgctgattacca

SEQ ID NO: 4149964 - DNA, 25 bp, Homo sapien
taccaattactaattccggtgaata

SEQ ID NO: 4149965 - DNA, 25 bp, Homo sapien
tccgctacggtaaggacagcaaacc

SEQ ID NO: 4149966 - DNA, 25 bp, Homo sapien
ggctctgcttgtgcaaagctccgta

SEQ ID NO: 4149967 - DNA, 25 bp, Homo sapien
tgctaacctcaacccaagatgcagg

SEQ ID NO: 4149968 - DNA, 25 bp, Homo sapien
gaaatgaacgaacagcttctgggct

SEQ ID NO: 4149969 - DNA, 25 bp, Homo sapien
caggaagtgccaaccgggcaccggg

SEQ ID NO: 4149970 - DNA, 25 bp, Homo sapien
accaggaagtgccaaccgggcaccg

SEQ ID NO: 4149971 - DNA, 25 bp, Homo sapien
agtgccaaccgggcaccggggtcat

SEQ ID NO: 4149972 - DNA, 25 bp, Homo sapien
cagaaaaccaggaagtgccaaccgg

SEQ ID NO: 4149973 - DNA, 25 bp, Homo sapien
tgagctcggaccctggtttcagctg

SEQ ID NO: 4149974 - DNA, 25 bp, Homo sapien
ttcctgagctcggaccctggtttca

SEQ ID NO: 4149975 - DNA, 25 bp, Homo sapien
cctgctgcgctgtagtccaggtttc

SEQ ID NO: 4149976 - DNA, 25 bp, Homo sapien
gctgcgctgtagtccaggtttcctg

SEQ ID NO: 4149977 - DNA, 25 bp, Homo sapien
agcagcttgggacggagttccccgt

SEQ ID NO: 4149978 - DNA, 25 bp, Homo sapien
tcagcagcttgggacggagttcccc

SEQ ID NO: 4149979 - DNA, 25 bp, Homo sapien
agatcagcagcttgggacggagttc

SEQ ID NO: 4149980 - DNA, 25 bp, Homo sapien
cagcttgggacggagttccccgtcg

SEQ ID NO: 4149981 - DNA, 25 bp, Homo sapien
gagaaagctagggtggccgattctt

SEQ ID NO: 4149982 - DNA, 25 bp, Homo sapien
tcattagcgatcaagttttctaagc

SEQ ID NO: 4149983 - DNA, 25 bp, Homo sapien
gctagggtggccgattctttcatta

SEQ ID NO: 4149984 - DNA, 25 bp, Homo sapien
ggccgattctttcattagcgatcaa

SEQ ID NO: 4149985 - DNA, 25 bp, Homo sapien
ccagctggagcgctgaaaattgagt

SEQ ID NO: 4149986 - DNA, 25 bp, Homo sapien
ttgggcttgcccttcgcgcagtgga

SEQ ID NO: 4149987 - DNA, 25 bp, Homo sapien
tctctcatcggacttgctctgggga

SEQ ID NO: 4149988 - DNA, 25 bp, Homo sapien
aattgagtggtaggtcccttgggct

SEQ ID NO: 4149989 - DNA, 25 bp, Homo sapien
gtttgcccaggttgcttctcttgat

SEQ ID NO: 4149990 - DNA, 25 bp, Homo sapien
tgcttctcttgatgaggtgttgctt

SEQ ID NO: 4149991 - DNA, 25 bp, Homo sapien
ctcttgatgaggtgttgcttcattc

SEQ ID NO: 4149992 - DNA, 25 bp, Homo sapien
ttgatgaggtgttgcttcattccat

SEQ ID NO: 4149993 - DNA, 25 bp, Homo sapien
tctgaattgcagaggaccacgcacg

SEQ ID NO: 4149994 - DNA, 25 bp, Homo sapien
cattctgaattgcagaggaccacgc

SEQ ID NO: 4149995 - DNA, 25 bp, Homo sapien
gaccacgcacgtatctcttgagaaa

SEQ ID NO: 4149996 - DNA, 25 bp, Homo sapien
ttgcagaggaccacgcacgtatctc

SEQ ID NO: 4149997 - DNA, 25 bp, Homo sapien
gagtttcctggcttgtagctatgca

SEQ ID NO: 4149998 - DNA, 25 bp, Homo sapien
tagctatgcaatgccaatcacagcc

SEQ ID NO: 4149999 - DNA, 25 bp, Homo sapien
acctctctactaacttctggaggtt

SEQ ID NO: 4150000 - DNA, 25 bp, Homo sapien
caaggtatcagcaggcttagttcct

SEQ ID NO: 4150001 - DNA, 25 bp, Homo sapien
gagtgaagagttgcccccaggtcat

SEQ ID NO: 4150002 - DNA, 25 bp, Homo sapien
agctctacatctttgcatatgcctt

SEQ ID NO: 4150003 - DNA, 25 bp, Homo sapien
tctacatctttgcatatgccttgag

SEQ ID NO: 4150004 - DNA, 25 bp, Homo sapien
catatgccttgagtgaagagttgcc

SEQ ID NO: 4150005 - DNA, 25 bp, Homo sapien
gaggagagggtcgttattattagca

SEQ ID NO: 4150006 - DNA, 25 bp, Homo sapien
ctttctgaggagagggtcgttatta

SEQ ID NO: 4150007 - DNA, 25 bp, Homo sapien
gagggtcgttattattagcaatcat

SEQ ID NO: 4150008 - DNA, 25 bp, Homo sapien
gggaatttgcaaaaccaggatcata

SEQ ID NO: 4150009 - DNA, 25 bp, Homo sapien
ctagagctttgctgatctggagata

SEQ ID NO: 4150010 - DNA, 25 bp, Homo sapien
aaaaatccacgaaacactgactctt

SEQ ID NO: 4150011 - DNA, 25 bp, Homo sapien
tcatattcagtatctaaggccttag

SEQ ID NO: 4150012 - DNA, 25 bp, Homo sapien
taaaggccagtgtagggaggagatg

SEQ ID NO: 4150013 - DNA, 25 bp, Homo sapien
acacagtccgggcagtatttgcttt

SEQ ID NO: 4150014 - DNA, 25 bp, Homo sapien
gcttatctgctgtggagagaacatc

SEQ ID NO: 4150015 - DNA, 25 bp, Homo sapien
aacaagcctctggactggatgtgcc

SEQ ID NO: 4150016 - DNA, 25 bp, Homo sapien
tggatgtgccagtagcttatctgct

SEQ ID NO: 4150017 - DNA, 25 bp, Homo sapien
tttgaggaaagtagcacaacaagcc

SEQ ID NO: 4150018 - DNA, 25 bp, Homo sapien
tcagcactgcacttatgggaagaca

SEQ ID NO: 4150019 - DNA, 25 bp, Homo sapien
aacatccctgttacacaggccaatg

SEQ ID NO: 4150020 - DNA, 25 bp, Homo sapien
tgtgcagagcgtggtccaggctaca

SEQ ID NO: 4150021 - DNA, 25 bp, Homo sapien
catccctgttacacaggccaatgag

SEQ ID NO: 4150022 - DNA, 25 bp, Homo sapien
cgctcaggatcagagatggtgatca

SEQ ID NO: 4150023 - DNA, 25 bp, Homo sapien
taacccatggttcttgagcgaagta

SEQ ID NO: 4150024 - DNA, 25 bp, Homo sapien
taaatttcctcctagatatggaccg

SEQ ID NO: 4150025 - DNA, 25 bp, Homo sapien
aaaggcctgcaagaataccttggtt

SEQ ID NO: 4150026 - DNA, 25 bp, Homo sapien
ctttatgttggttatatatgaagga

SEQ ID NO: 4150027 - DNA, 25 bp, Homo sapien
ttatgttggttatatatgaaggatg

SEQ ID NO: 4150028 - DNA, 25 bp, Homo sapien
atgttggttatatatgaaggatgca

SEQ ID NO: 4150029 - DNA, 25 bp, Homo sapien
ttggttatatatgaaggatgcatgc

SEQ ID NO: 4150030 - DNA, 25 bp, Homo sapien
ccaattaatttagcctttactatat

SEQ ID NO: 4150031 - DNA, 25 bp, Homo sapien
aattaatttagcctttactatatgt

SEQ ID NO: 4150032 - DNA, 25 bp, Homo sapien
ttaatttagcctttactatatgttc

SEQ ID NO: 4150033 - DNA, 25 bp, Homo sapien
taatttagcctttactatatgttct

SEQ ID NO: 4150034 - DNA, 25 bp, Homo sapien
tgtggagcactctattgtttgtttc

SEQ ID NO: 4150035 - DNA, 25 bp, Homo sapien
taataaccactaagtacctgaaagc

SEQ ID NO: 4150036 - DNA, 25 bp, Homo sapien
tacaatgtggtttcagacctctccc

SEQ ID NO: 4150037 - DNA, 25 bp, Homo sapien
tgaaagccctaacattgctgacccc

SEQ ID NO: 4150038 - DNA, 25 bp, Homo sapien
tgagtttgtgaccaaaaattgaatt

SEQ ID NO: 4150039 - DNA, 25 bp, Homo sapien
attgaatttatgagacctgtgacaa

SEQ ID NO: 4150040 - DNA, 25 bp, Homo sapien
aggttgggtaactcatgcaatatga

SEQ ID NO: 4150041 - DNA, 25 bp, Homo sapien
gaatttatgagacctgtgacaaaca

SEQ ID NO: 4150042 - DNA, 25 bp, Homo sapien
caatggcgtattgttgaagtgacag

SEQ ID NO: 4150043 - DNA, 25 bp, Homo sapien
gcagaaaacaatggcgtattgttga

SEQ ID NO: 4150044 - DNA, 25 bp, Homo sapien
tattgttgaagtgacagacgctcaa

SEQ ID NO: 4150045 - DNA, 25 bp, Homo sapien
ttgaagtgacagacgctcaaagtta

SEQ ID NO: 4150046 - DNA, 25 bp, Homo sapien
ttggtactccaacgcgtagaaagtg

SEQ ID NO: 4150047 - DNA, 25 bp, Homo sapien
ttaagatgctgcttggtactccaac

SEQ ID NO: 4150048 - DNA, 25 bp, Homo sapien
tgctgcttggtactccaacgcgtag

SEQ ID NO: 4150049 - DNA, 25 bp, Homo sapien
tactccaacgcgtagaaagtgtaaa

SEQ ID NO: 4150050 - DNA, 25 bp, Homo sapien
acctggtgtatctgcagtgattgca

SEQ ID NO: 4150051 - DNA, 25 bp, Homo sapien
cattccagcacctggtgtatctgca

SEQ ID NO: 4150052 - DNA, 25 bp, Homo sapien
ccagcacctggtgtatctgcagtga

SEQ ID NO: 4150053 - DNA, 25 bp, Homo sapien
gtatctgcagtgattgcatttctgc

SEQ ID NO: 4150054 - DNA, 25 bp, Homo sapien
cagttgtaattgtcctacacgccac

SEQ ID NO: 4150055 - DNA, 25 bp, Homo sapien
ctagaccatcggcaccagcctgggt

SEQ ID NO: 4150056 - DNA, 25 bp, Homo sapien
tcctggaaattgctagaccatcggc

SEQ ID NO: 4150057 - DNA, 25 bp, Homo sapien
tgaaaatccacgttcatctcagatt

SEQ ID NO: 4150058 - DNA, 25 bp, Homo sapien
acatatattccagctcccatgtcgt

SEQ ID NO: 4150059 - DNA, 25 bp, Homo sapien
ccagctcccatgtcgtttatccaag

SEQ ID NO: 4150060 - DNA, 25 bp, Homo sapien
tgtcgtttatccaagatgtgtcagc

SEQ ID NO: 4150061 - DNA, 25 bp, Homo sapien
tcccatgtcgtttatccaagatgtg

SEQ ID NO: 4150062 - DNA, 25 bp, Homo sapien
ctttggaaatgctgattctcctcct

SEQ ID NO: 4150063 - DNA, 25 bp, Homo sapien
gctgccaactttctcttatccctgg

SEQ ID NO: 4150064 - DNA, 25 bp, Homo sapien
gatgctgccaactttctcttatccc

SEQ ID NO: 4150065 - DNA, 25 bp, Homo sapien
tcctcctgacacggccccagatgct

SEQ ID NO: 4150066 - DNA, 25 bp, Homo sapien
aatatgattgattgtaatgttagtg

SEQ ID NO: 4150067 - DNA, 25 bp, Homo sapien
ttctccaggataagaaatatgattg

SEQ ID NO: 4150068 - DNA, 25 bp, Homo sapien
gctattgctaactcatcaagtttta

SEQ ID NO: 4150069 - DNA, 25 bp, Homo sapien
atgttctccaggataagaaatatga

SEQ ID NO: 4150070 - DNA, 25 bp, Homo sapien
gggacttctgggtttagatcaacag

SEQ ID NO: 4150071 - DNA, 25 bp, Homo sapien
gacttctgggtttagatcaacagaa

SEQ ID NO: 4150072 - DNA, 25 bp, Homo sapien
cttctgggtttagatcaacagaaaa

SEQ ID NO: 4150073 - DNA, 25 bp, Homo sapien
cgcaaggggacttctgggtttagat

SEQ ID NO: 4150074 - DNA, 25 bp, Homo sapien
tagctattacctttcttgtgtcact

SEQ ID NO: 4150075 - DNA, 25 bp, Homo sapien
gagtcctggtacacttataatagcc

SEQ ID NO: 4150076 - DNA, 25 bp, Homo sapien
aaaatgggtcataacacgcatcagg

SEQ ID NO: 4150077 - DNA, 25 bp, Homo sapien
gatcatgggaggcttaaaatgggtc

SEQ ID NO: 4150078 - DNA, 25 bp, Homo sapien
cttcagggggcgttgtatcaatgcc

SEQ ID NO: 4150079 - DNA, 25 bp, Homo sapien
gggcgttgtatcaatgccctgaaaa

SEQ ID NO: 4150080 - DNA, 25 bp, Homo sapien
cctgaaaatgtctgaaagcctgctt

SEQ ID NO: 4150081 - DNA, 25 bp, Homo sapien
tatcaatgccctgaaaatgtctgaa

SEQ ID NO: 4150082 - DNA, 25 bp, Homo sapien
aatagagccagatggcaaggaagaa

SEQ ID NO: 4150083 - DNA, 25 bp, Homo sapien
aaatagagccagatggcaaggaaga

SEQ ID NO: 4150084 - DNA, 25 bp, Homo sapien
ccaggaatttgcatgctaaacagac

SEQ ID NO: 4150085 - DNA, 25 bp, Homo sapien
ggaatttgcatgctaaacagacatt

SEQ ID NO: 4150086 - DNA, 25 bp, Homo sapien
aggaatttgcatgctaaacagacat

SEQ ID NO: 4150087 - DNA, 25 bp, Homo sapien
caggaatttgcatgctaaacagaca

SEQ ID NO: 4150088 - DNA, 25 bp, Homo sapien
tatcatttcttcagtacgttcaatt

SEQ ID NO: 4150089 - DNA, 25 bp, Homo sapien
tttcttcagtacgttcaatttgcat

SEQ ID NO: 4150090 - DNA, 25 bp, Homo sapien
catttcttcagtacgttcaatttgc

SEQ ID NO: 4150091 - DNA, 25 bp, Homo sapien
tcatttcttcagtacgttcaatttg

SEQ ID NO: 4150092 - DNA, 25 bp, Homo sapien
gaaatgccctctcgtgttcccaaga

SEQ ID NO: 4150093 - DNA, 25 bp, Homo sapien
caatgcatgaaatgccctctcgtgt

SEQ ID NO: 4150094 - DNA, 25 bp, Homo sapien
ttttcccatcaatgcatgaaatgcc

SEQ ID NO: 4150095 - DNA, 25 bp, Homo sapien
tgccctctcgtgttcccaagaagac

SEQ ID NO: 4150096 - DNA, 25 bp, Homo sapien
agagccaatccgagaactccctgct

SEQ ID NO: 4150097 - DNA, 25 bp, Homo sapien
acacaatgttactctctgggagcag

SEQ ID NO: 4150098 - DNA, 25 bp, Homo sapien
gctccaagttggaagagcaacagaa

SEQ ID NO: 4150099 - DNA, 25 bp, Homo sapien
gctgcttaaaccaatcaattggtgt

SEQ ID NO: 4150100 - DNA, 25 bp, Homo sapien
caggttcaagatttaattccaaatc

SEQ ID NO: 4150101 - DNA, 25 bp, Homo sapien
tcccaagataagaagtattagcact

SEQ ID NO: 4150102 - DNA, 25 bp, Homo sapien
tattagcactccataatgaatttcc

SEQ ID NO: 4150103 - DNA, 25 bp, Homo sapien
cacttctaatatcatagatcttgcg

SEQ ID NO: 4150104 - DNA, 25 bp, Homo sapien
taaaatccattattcttatgactag

SEQ ID NO: 4150105 - DNA, 25 bp, Homo sapien
ccattattcttatgactaggctggg

SEQ ID NO: 4150106 - DNA, 25 bp, Homo sapien
ttcttatgactaggctgggtgctgt

SEQ ID NO: 4150107 - DNA, 25 bp, Homo sapien
ttattcttatgactaggctgggtgc

SEQ ID NO: 4150108 - DNA, 25 bp, Homo sapien
ctcatacagggcctctgcacacaag

SEQ ID NO: 4150109 - DNA, 25 bp, Homo sapien
cctgccctatgtcttcatgcttcat

SEQ ID NO: 4150110 - DNA, 25 bp, Homo sapien
tgccctatgtcttcatgcttcatct

SEQ ID NO: 4150111 - DNA, 25 bp, Homo sapien
catgcttcatctcatacagggcctc

SEQ ID NO: 4150112 - DNA, 25 bp, Homo sapien
agccagccggagcaggaggataagg

SEQ ID NO: 4150113 - DNA, 25 bp, Homo sapien
aacccggagccagccggagcaggag

SEQ ID NO: 4150114 - DNA, 25 bp, Homo sapien
ccagccggagcaggaggataaggag

SEQ ID NO: 4150115 - DNA, 25 bp, Homo sapien
cggagccagccggagcaggaggata

SEQ ID NO: 4150116 - DNA, 25 bp, Homo sapien
cagggtaatacctatgagggaggta

SEQ ID NO: 4150117 - DNA, 25 bp, Homo sapien
agaacaggcagggtaatacctatga

SEQ ID NO: 4150118 - DNA, 25 bp, Homo sapien
atagaaatgggtggcgtaggtgcag

SEQ ID NO: 4150119 - DNA, 25 bp, Homo sapien
caggcagggtaatacctatgaggga

SEQ ID NO: 4150120 - DNA, 25 bp, Homo sapien
ggacttccagtaaactgcaacagac

SEQ ID NO: 4150121 - DNA, 25 bp, Homo sapien
gagtggacttccagtaaactgcaac

SEQ ID NO: 4150122 - DNA, 25 bp, Homo sapien
gtggacttccagtaaactgcaacag

SEQ ID NO: 4150123 - DNA, 25 bp, Homo sapien
caattccagacacaaagcttccaga

SEQ ID NO: 4150124 - DNA, 25 bp, Homo sapien
aatgcaaaaccaaagggtaacagat

SEQ ID NO: 4150125 - DNA, 25 bp, Homo sapien
accaaagggtaacagataaggccat

SEQ ID NO: 4150126 - DNA, 25 bp, Homo sapien
tgatgagctgtggtagcacgatgat

SEQ ID NO: 4150127 - DNA, 25 bp, Homo sapien
taacattagcttcaaagccatcaac

SEQ ID NO: 4150128 - DNA, 25 bp, Homo sapien
gatatacacaatggtttctaaagag

SEQ ID NO: 4150129 - DNA, 25 bp, Homo sapien
tatacacaatggtttctaaagagac

SEQ ID NO: 4150130 - DNA, 25 bp, Homo sapien
ctttgatatacacaatggtttctaa

SEQ ID NO: 4150131 - DNA, 25 bp, Homo sapien
ttgatatacacaatggtttctaaag

SEQ ID NO: 4150132 - DNA, 25 bp, Homo sapien
ggtgaagtgaccattataaggacag

SEQ ID NO: 4150133 - DNA, 25 bp, Homo sapien
atgaaatccatcaccttcagacttg

SEQ ID NO: 4150134 - DNA, 25 bp, Homo sapien
tctttcttgaacagtccggttgtac

SEQ ID NO: 4150135 - DNA, 25 bp, Homo sapien
cacccttcttagtgggagccttgga

SEQ ID NO: 4150136 - DNA, 25 bp, Homo sapien
gaagtttacatagaagacagcacga

SEQ ID NO: 4150137 - DNA, 25 bp, Homo sapien
tacctcatccttctatgacagagag

SEQ ID NO: 4150138 - DNA, 25 bp, Homo sapien
tattgggtcactgatatagtatacg

SEQ ID NO: 4150139 - DNA, 25 bp, Homo sapien
catgttgatgcctgtagactgtgtt

SEQ ID NO: 4150140 - DNA, 25 bp, Homo sapien
ccccaccagcgctgatatgtccatc

SEQ ID NO: 4150141 - DNA, 25 bp, Homo sapien
caccagcgctgatatgtccatcaca

SEQ ID NO: 4150142 - DNA, 25 bp, Homo sapien
ccagcgctgatatgtccatcacatc

SEQ ID NO: 4150143 - DNA, 25 bp, Homo sapien
gcgctgatatgtccatcacatccat

SEQ ID NO: 4150144 - DNA, 25 bp, Homo sapien
tttcaacccttggaactgaagctct

SEQ ID NO: 4150145 - DNA, 25 bp, Homo sapien
ctgaagctcttgtaactgaagggca

SEQ ID NO: 4150146 - DNA, 25 bp, Homo sapien
agggcaatcacagttgggagagcat

SEQ ID NO: 4150147 - DNA, 25 bp, Homo sapien
atgtaaatttaatatggacactctc

SEQ ID NO: 4150148 - DNA, 25 bp, Homo sapien
gacaacaaagctcagcagcgaaatc

SEQ ID NO: 4150149 - DNA, 25 bp, Homo sapien
caatgacattatcaacagacatacc

SEQ ID NO: 4150150 - DNA, 25 bp, Homo sapien
tcaacagacataccttgacatggct

SEQ ID NO: 4150151 - DNA, 25 bp, Homo sapien
aaaatacttcatgtattggagtcac

SEQ ID NO: 4150152 - DNA, 25 bp, Homo sapien
agcaggtcggcacaggtatcacact

SEQ ID NO: 4150153 - DNA, 25 bp, Homo sapien
gtaggatggagcaggtcggcacagg

SEQ ID NO: 4150154 - DNA, 25 bp, Homo sapien
caattacttatatctggaattttcc

SEQ ID NO: 4150155 - DNA, 25 bp, Homo sapien
gacacacacgttaaaattcatcaat

SEQ ID NO: 4150156 - DNA, 25 bp, Homo sapien
cttggcctgtgactagtctgactga

SEQ ID NO: 4150157 - DNA, 25 bp, Homo sapien
gcaagtggcaaagagcaccccttga

SEQ ID NO: 4150158 - DNA, 25 bp, Homo sapien
tacacccaatgtaaaagaagacttg

SEQ ID NO: 4150159 - DNA, 25 bp, Homo sapien
tctgactgattgtgggagggaacca

SEQ ID NO: 4150160 - DNA, 25 bp, Homo sapien
taggagccgtccagtctcgatgaga

SEQ ID NO: 4150161 - DNA, 25 bp, Homo sapien
tccagtatagtccagtaggagccgt

SEQ ID NO: 4150162 - DNA, 25 bp, Homo sapien
taagagctcacctgttctaacgggc

SEQ ID NO: 4150163 - DNA, 25 bp, Homo sapien
tggtttagaccccaccaggtgactg

SEQ ID NO: 4150164 - DNA, 25 bp, Homo sapien
ggcattcaatatagataatgcaaaa

SEQ ID NO: 4150165 - DNA, 25 bp, Homo sapien
tttgccagaatacattatagccatt

SEQ ID NO: 4150166 - DNA, 25 bp, Homo sapien
ttgccagaatacattatagccatta

SEQ ID NO: 4150167 - DNA, 25 bp, Homo sapien
aaggcattcaatatagataatgcaa

SEQ ID NO: 4150168 - DNA, 25 bp, Homo sapien
tgaaactttcacaagtccattttat

SEQ ID NO: 4150169 - DNA, 25 bp, Homo sapien
actttcacaagtccattttatatca

SEQ ID NO: 4150170 - DNA, 25 bp, Homo sapien
ttggaaatcgcctgcccagtgcctt

SEQ ID NO: 4150171 - DNA, 25 bp, Homo sapien
ctgggaccacctccattggaaatcg

SEQ ID NO: 4150172 - DNA, 25 bp, Homo sapien
taactgtaatcaccgcagtgtttct

SEQ ID NO: 4150173 - DNA, 25 bp, Homo sapien
ggagccctgattctattaactgtaa

SEQ ID NO: 4150174 - DNA, 25 bp, Homo sapien
cataagggagccctgattctattaa

SEQ ID NO: 4150175 - DNA, 25 bp, Homo sapien
ttaactgtaatcaccgcagtgtttc

SEQ ID NO: 4150176 - DNA, 25 bp, Homo sapien
gttctaaattggtagagtacttctg

SEQ ID NO: 4150177 - DNA, 25 bp, Homo sapien
agctctccagcatcagaagttctaa

SEQ ID NO: 4150178 - DNA, 25 bp, Homo sapien
agaagttctaaattggtagagtact

SEQ ID NO: 4150179 - DNA, 25 bp, Homo sapien
aattggtagagtacttctgtagcca

SEQ ID NO: 4150180 - DNA, 25 bp, Homo sapien
gctccttgtttcagtaactctaggt

SEQ ID NO: 4150181 - DNA, 25 bp, Homo sapien
tgcttggcggtcttccaaaccttca

SEQ ID NO: 4150182 - DNA, 25 bp, Homo sapien
cacttttttcgggagattgcatcag

SEQ ID NO: 4150183 - DNA, 25 bp, Homo sapien
tattgtgtgcttgccagatgcttgg

SEQ ID NO: 4150184 - DNA, 25 bp, Homo sapien
tcacatccctaataaatatgcgggc

SEQ ID NO: 4150185 - DNA, 25 bp, Homo sapien
tggcttctggctttatagctttcac

SEQ ID NO: 4150186 - DNA, 25 bp, Homo sapien
gcttctggctttatagctttcacca

SEQ ID NO: 4150187 - DNA, 25 bp, Homo sapien
caccttggcttctggctttatagct

SEQ ID NO: 4150188 - DNA, 25 bp, Homo sapien
cttggcttctggctttatagctttc

SEQ ID NO: 4150189 - DNA, 25 bp, Homo sapien
gggaattacactgcggctagatgtt

SEQ ID NO: 4150190 - DNA, 25 bp, Homo sapien
ggactccacacagaattcaccataa

SEQ ID NO: 4150191 - DNA, 25 bp, Homo sapien
tcaccataatagctgttcaagcgca

SEQ ID NO: 4150192 - DNA, 25 bp, Homo sapien
gatgttaacccatggagctcggtgc

SEQ ID NO: 4150193 - DNA, 25 bp, Homo sapien
caatggtcatcagtcaggaaatgga

SEQ ID NO: 4150194 - DNA, 25 bp, Homo sapien
aacacaagggagacagtactggagc

SEQ ID NO: 4150195 - DNA, 25 bp, Homo sapien
ctcaggtgtagtaagggatcatgct

SEQ ID NO: 4150196 - DNA, 25 bp, Homo sapien
gtaagacttatgatggaacactgct

SEQ ID NO: 4150197 - DNA, 25 bp, Homo sapien
cataaccacacttaaaggggtgagg

SEQ ID NO: 4150198 - DNA, 25 bp, Homo sapien
tgagggagggagctaacttgagtaa

SEQ ID NO: 4150199 - DNA, 25 bp, Homo sapien
tgtattgaactctaatttgtagctg

SEQ ID NO: 4150200 - DNA, 25 bp, Homo sapien
tgagtaaattttgagcacagtgctt

SEQ ID NO: 4150201 - DNA, 25 bp, Homo sapien
tgagaccggactcgcctcttccaac

SEQ ID NO: 4150202 - DNA, 25 bp, Homo sapien
tttgagaccggactcgcctcttcca

SEQ ID NO: 4150203 - DNA, 25 bp, Homo sapien
ttgagaccggactcgcctcttccaa

SEQ ID NO: 4150204 - DNA, 25 bp, Homo sapien
agaccggactcgcctcttccaactc

SEQ ID NO: 4150205 - DNA, 25 bp, Homo sapien
agtcgggctgggggcgactgggcgg

SEQ ID NO: 4150206 - DNA, 25 bp, Homo sapien
cggcgacggccggagtcgggctggg

SEQ ID NO: 4150207 - DNA, 25 bp, Homo sapien
gtcgggctgggggcgactgggcggc

SEQ ID NO: 4150208 - DNA, 25 bp, Homo sapien
gcgacggcgacggccggagtcgggc

SEQ ID NO: 4150209 - DNA, 25 bp, Homo sapien
catcaaccttgtgtggtcgagcaca

SEQ ID NO: 4150210 - DNA, 25 bp, Homo sapien
tgttctcgtaaactatcatctgtag

SEQ ID NO: 4150211 - DNA, 25 bp, Homo sapien
accttgtgtggtcgagcacacattg

SEQ ID NO: 4150212 - DNA, 25 bp, Homo sapien
tacacgcccatcaaccttgtgtggt

SEQ ID NO: 4150213 - DNA, 25 bp, Homo sapien
tccgcgacccataaaattgccagat

SEQ ID NO: 4150214 - DNA, 25 bp, Homo sapien
ttccctccgcgacccataaaattgc

SEQ ID NO: 4150215 - DNA, 25 bp, Homo sapien
cgacccataaaattgccagatccac

SEQ ID NO: 4150216 - DNA, 25 bp, Homo sapien
ccctccgcgacccataaaattgcca

SEQ ID NO: 4150217 - DNA, 25 bp, Homo sapien
accatcacctccaaatccattatat

SEQ ID NO: 4150218 - DNA, 25 bp, Homo sapien
tctactactataaccaggaccaccg

SEQ ID NO: 4150219 - DNA, 25 bp, Homo sapien
ataaccaggaccaccgccatagttg

SEQ ID NO: 4150220 - DNA, 25 bp, Homo sapien
caccgccatagttgccaccatcacc

SEQ ID NO: 4150221 - DNA, 25 bp, Homo sapien
attgtaaccatcatatcctccacct

SEQ ID NO: 4150222 - DNA, 25 bp, Homo sapien
accaccaccatagttaccaccgcca

SEQ ID NO: 4150223 - DNA, 25 bp, Homo sapien
taaccatcatatcctccacctccac

SEQ ID NO: 4150224 - DNA, 25 bp, Homo sapien
caccatagttaccaccgccaaaatt

SEQ ID NO: 4150225 - DNA, 25 bp, Homo sapien
taggcaagtagggttctcattcaac

SEQ ID NO: 4150226 - DNA, 25 bp, Homo sapien
ttttagatggtaggaaagacattcc

SEQ ID NO: 4150227 - DNA, 25 bp, Homo sapien
tactgtcaactacaaaccttaccca

SEQ ID NO: 4150228 - DNA, 25 bp, Homo sapien
catcaggttttactgtcaactacaa

SEQ ID NO: 4150229 - DNA, 25 bp, Homo sapien
gctctcctcttgatccaaggaaagc

SEQ ID NO: 4150230 - DNA, 25 bp, Homo sapien
ctcttgatccaaggaaagcccttct

SEQ ID NO: 4150231 - DNA, 25 bp, Homo sapien
caagcccatccctcaaccatgacat

SEQ ID NO: 4150232 - DNA, 25 bp, Homo sapien
ggaagtcaggcacgattgtcacctc

SEQ ID NO: 4150233 - DNA, 25 bp, Homo sapien
gacaccggcaggccatcaactgacc

SEQ ID NO: 4150234 - DNA, 25 bp, Homo sapien
acaaacagctggacgttgagaaaga

SEQ ID NO: 4150235 - DNA, 25 bp, Homo sapien
caaacagctggacgttgagaaagag

SEQ ID NO: 4150236 - DNA, 25 bp, Homo sapien
acagctggacgttgagaaagagcac

SEQ ID NO: 4150237 - DNA, 25 bp, Homo sapien
taaaaacccgagactgtagtgggca

SEQ ID NO: 4150238 - DNA, 25 bp, Homo sapien
acccgagactgtagtgggcacacac

SEQ ID NO: 4150239 - DNA, 25 bp, Homo sapien
aaaacccgagactgtagtgggcaca

SEQ ID NO: 4150240 - DNA, 25 bp, Homo sapien
cataaaaacccgagactgtagtggg

SEQ ID NO: 4150241 - DNA, 25 bp, Homo sapien
cccagatgatgttgggtgaatagtg

SEQ ID NO: 4150242 - DNA, 25 bp, Homo sapien
gggtggtgaagaaagctcttaattg

SEQ ID NO: 4150243 - DNA, 25 bp, Homo sapien
ctgctttgctgacattagttctggt

SEQ ID NO: 4150244 - DNA, 25 bp, Homo sapien
gacattagttctggtcccagatgat

SEQ ID NO: 4150245 - DNA, 25 bp, Homo sapien
tgaggcaagtactagatatgcacac

SEQ ID NO: 4150246 - DNA, 25 bp, Homo sapien
aagtactagatatgcacactttcct

SEQ ID NO: 4150247 - DNA, 25 bp, Homo sapien
ggcaagtactagatatgcacacttt

SEQ ID NO: 4150248 - DNA, 25 bp, Homo sapien
catgaggcaagtactagatatgcac

SEQ ID NO: 4150249 - DNA, 25 bp, Homo sapien
cacatcgatgttgcctatgaatatg

SEQ ID NO: 4150250 - DNA, 25 bp, Homo sapien
ctgtcacattcacatcgatgttgcc

SEQ ID NO: 4150251 - DNA, 25 bp, Homo sapien
gcctatgaatatgtagatactctca

SEQ ID NO: 4150252 - DNA, 25 bp, Homo sapien
tgaatatgtagatactctcaggaaa

SEQ ID NO: 4150253 - DNA, 25 bp, Homo sapien
tctgctccacgtcaatcacaaaggc

SEQ ID NO: 4150254 - DNA, 25 bp, Homo sapien
tgccttcagaggaatgtcatctatg

SEQ ID NO: 4150255 - DNA, 25 bp, Homo sapien
gaaactgcaggagatgcaatgccaa

SEQ ID NO: 4150256 - DNA, 25 bp, Homo sapien
tgcctcctagctaacattcacatgg

SEQ ID NO: 4150257 - DNA, 25 bp, Homo sapien
tgataggcaatgaatcaactccatc

SEQ ID NO: 4150258 - DNA, 25 bp, Homo sapien
cagtttgtgctctgataggcaatga

SEQ ID NO: 4150259 - DNA, 25 bp, Homo sapien
taggcaatgaatcaactccatcagc

SEQ ID NO: 4150260 - DNA, 25 bp, Homo sapien
tcaactccatcagcattgggaaggc

SEQ ID NO: 4150261 - DNA, 25 bp, Homo sapien
tatatccacgtctaaagccccatca

SEQ ID NO: 4150262 - DNA, 25 bp, Homo sapien
tatagtcacgggatagaaagacaaa

SEQ ID NO: 4150263 - DNA, 25 bp, Homo sapien
gaagcctgttattgaccttgtgtaa

SEQ ID NO: 4150264 - DNA, 25 bp, Homo sapien
tctgcacacaataacaaatcccatc

SEQ ID NO: 4150265 - DNA, 25 bp, Homo sapien
ttcacattgctttctttctggagct

SEQ ID NO: 4150266 - DNA, 25 bp, Homo sapien
ctgtgtttcatctttttcacattgc

SEQ ID NO: 4150267 - DNA, 25 bp, Homo sapien
tcaaatctgtgtttcatctttttca

SEQ ID NO: 4150268 - DNA, 25 bp, Homo sapien
aaatctgtgtttcatctttttcaca

SEQ ID NO: 4150269 - DNA, 25 bp, Homo sapien
gtctgttgccaagggttactgaagc

SEQ ID NO: 4150270 - DNA, 25 bp, Homo sapien
cagcttatgagtctgacccttccca

SEQ ID NO: 4150271 - DNA, 25 bp, Homo sapien
ggtggtttcacatctatccggtttc

SEQ ID NO: 4150272 - DNA, 25 bp, Homo sapien
tgaagaaacagatatcgtgcccact

SEQ ID NO: 4150273 - DNA, 25 bp, Homo sapien
ccattgaggagcaggctcttgtttc

SEQ ID NO: 4150274 - DNA, 25 bp, Homo sapien
gagatagatggtccattgaggagca

SEQ ID NO: 4150275 - DNA, 25 bp, Homo sapien
ggctcttgtttctcttgataggagt

SEQ ID NO: 4150276 - DNA, 25 bp, Homo sapien
cattgaggagatagatggtccattg

SEQ ID NO: 4150277 - DNA, 25 bp, Homo sapien
ttctcttgaatggatctcaggagga

SEQ ID NO: 4150278 - DNA, 25 bp, Homo sapien
ctcttgaatggatctcaggaggaaa

SEQ ID NO: 4150279 - DNA, 25 bp, Homo sapien
tcttgaatggatctcaggaggaaat

SEQ ID NO: 4150280 - DNA, 25 bp, Homo sapien
tctcttgaatggatctcaggaggaa

SEQ ID NO: 4150281 - DNA, 25 bp, Homo sapien
tttgtcttctttcgggaagcacaga

SEQ ID NO: 4150282 - DNA, 25 bp, Homo sapien
cattatcacatctgaatcccgcagg

SEQ ID NO: 4150283 - DNA, 25 bp, Homo sapien
cacttcaaatgtggagggatacacc

SEQ ID NO: 4150284 - DNA, 25 bp, Homo sapien
caaggaacaattcaaatttcgaggg

SEQ ID NO: 4150285 - DNA, 25 bp, Homo sapien
ctccactaaaactggatggatggct

SEQ ID NO: 4150286 - DNA, 25 bp, Homo sapien
tgcctccactaaaactggatggatg

SEQ ID NO: 4150287 - DNA, 25 bp, Homo sapien
tcttgcctccactaaaactggatgg

SEQ ID NO: 4150288 - DNA, 25 bp, Homo sapien
ccactaaaactggatggatggcttt

SEQ ID NO: 4150289 - DNA, 25 bp, Homo sapien
cagtagtcaatcagctttgcaaaac

SEQ ID NO: 4150290 - DNA, 25 bp, Homo sapien
agaggtgacagtagtcaatcagctt

SEQ ID NO: 4150291 - DNA, 25 bp, Homo sapien
cagctttgcaaaacaccacactttg

SEQ ID NO: 4150292 - DNA, 25 bp, Homo sapien
gctttgcaaaacaccacactttgtc

SEQ ID NO: 4150293 - DNA, 25 bp, Homo sapien
gccacactctgctagaaaatccagg

SEQ ID NO: 4150294 - DNA, 25 bp, Homo sapien
tcaaccttctgtgggcaatagaccc

SEQ ID NO: 4150295 - DNA, 25 bp, Homo sapien
tttgagaaggttttggagaagccac

SEQ ID NO: 4150296 - DNA, 25 bp, Homo sapien
taatttaccccaagtagcatggctg

SEQ ID NO: 4150297 - DNA, 25 bp, Homo sapien
ggaggatgggcttcactgttacctc

SEQ ID NO: 4150298 - DNA, 25 bp, Homo sapien
gggaggatgggcttcactgttacct

SEQ ID NO: 4150299 - DNA, 25 bp, Homo sapien
tgtgggaggatgggcttcactgtta

SEQ ID NO: 4150300 - DNA, 25 bp, Homo sapien
gtgtgggaggatgggcttcactgtt

SEQ ID NO: 4150301 - DNA, 25 bp, Homo sapien
agatgccaagctgtcatcagaacgt

SEQ ID NO: 4150302 - DNA, 25 bp, Homo sapien
cactggagatgccaagctgtcatca

SEQ ID NO: 4150303 - DNA, 25 bp, Homo sapien
gagatgccaagctgtcatcagaacg

SEQ ID NO: 4150304 - DNA, 25 bp, Homo sapien
tggagatgccaagctgtcatcagaa

SEQ ID NO: 4150305 - DNA, 25 bp, Homo sapien
gactgacactgcaggatccgcttcc

SEQ ID NO: 4150306 - DNA, 25 bp, Homo sapien
gaaggctcgactgacactgcaggat

SEQ ID NO: 4150307 - DNA, 25 bp, Homo sapien
ctgaaggctcgactgacactgcagg

SEQ ID NO: 4150308 - DNA, 25 bp, Homo sapien
ggctcgactgacactgcaggatccg

SEQ ID NO: 4150309 - DNA, 25 bp, Homo sapien
agagccccatcttcgaaagggacca

SEQ ID NO: 4150310 - DNA, 25 bp, Homo sapien
caaaggctgcaatgctgagtcagga

SEQ ID NO: 4150311 - DNA, 25 bp, Homo sapien
gagccccatcttcgaaagggaccat

SEQ ID NO: 4150312 - DNA, 25 bp, Homo sapien
aaggctgcaatgctgagtcaggagc

SEQ ID NO: 4150313 - DNA, 25 bp, Homo sapien
cctcaggttgtataaatatgagtcc

SEQ ID NO: 4150314 - DNA, 25 bp, Homo sapien
tttgcctcaggttgtataaatatga

SEQ ID NO: 4150315 - DNA, 25 bp, Homo sapien
gtatttgcctcaggttgtataaata

SEQ ID NO: 4150316 - DNA, 25 bp, Homo sapien
caggttgtataaatatgagtccata

SEQ ID NO: 4150317 - DNA, 25 bp, Homo sapien
taattctattctggtctctacacca

SEQ ID NO: 4150318 - DNA, 25 bp, Homo sapien
tcacttccccttaattctattctgg

SEQ ID NO: 4150319 - DNA, 25 bp, Homo sapien
catattcccttcaatcttgctgtag

SEQ ID NO: 4150320 - DNA, 25 bp, Homo sapien
acatcccagccttgtcgccagaagg

SEQ ID NO: 4150321 - DNA, 25 bp, Homo sapien
tcgtcctctccaacctgcgctgggt

SEQ ID NO: 4150322 - DNA, 25 bp, Homo sapien
gcagcccgtcctcgctgggctgacc

SEQ ID NO: 4150323 - DNA, 25 bp, Homo sapien
gcccgtcctcgctgggctgaccctg

SEQ ID NO: 4150324 - DNA, 25 bp, Homo sapien
gtcctctccaacctgcgctgggttg

SEQ ID NO: 4150325 - DNA, 25 bp, Homo sapien
ccatgtgcctggtcacggtgctcag

SEQ ID NO: 4150326 - DNA, 25 bp, Homo sapien
ttttggagacatggaagagagacat

SEQ ID NO: 4150327 - DNA, 25 bp, Homo sapien
atgtgcctggtcacggtgctcagga

SEQ ID NO: 4150328 - DNA, 25 bp, Homo sapien
tgcctggtcacggtgctcaggaacc

SEQ ID NO: 4150329 - DNA, 25 bp, Homo sapien
gcatgatgagaaggaaatctttaga

SEQ ID NO: 4150330 - DNA, 25 bp, Homo sapien
ttcttcttgcatgatgagaaggaaa

SEQ ID NO: 4150331 - DNA, 25 bp, Homo sapien
acagaacagtaaatagtctgtgcct

SEQ ID NO: 4150332 - DNA, 25 bp, Homo sapien
tcttgcatgatgagaaggaaatctt

SEQ ID NO: 4150333 - DNA, 25 bp, Homo sapien
tatctggacatgaacgagctggagt

SEQ ID NO: 4150334 - DNA, 25 bp, Homo sapien
catgaacgagctggagtgtgtgttt

SEQ ID NO: 4150335 - DNA, 25 bp, Homo sapien
gacatgaacgagctggagtgtgtgt

SEQ ID NO: 4150336 - DNA, 25 bp, Homo sapien
tctggacatgaacgagctggagtgt

SEQ ID NO: 4150337 - DNA, 25 bp, Homo sapien
tggatttggatgtgttcccacggtc

SEQ ID NO: 4150338 - DNA, 25 bp, Homo sapien
gatgtgttcccacggtctccaatct

SEQ ID NO: 4150339 - DNA, 25 bp, Homo sapien
tcagcaccaccttgtcacggagatg

SEQ ID NO: 4150340 - DNA, 25 bp, Homo sapien
tccagagtcagagctacgtgattcc

SEQ ID NO: 4150341 - DNA, 25 bp, Homo sapien
ttgtggcccaatatttccatcgctg

SEQ ID NO: 4150342 - DNA, 25 bp, Homo sapien
gtggcccaatatttccatcgctgcc

SEQ ID NO: 4150343 - DNA, 25 bp, Homo sapien
cttttgtggcccaatatttccatcg

SEQ ID NO: 4150344 - DNA, 25 bp, Homo sapien
ttttgtggcccaatatttccatcgc

SEQ ID NO: 4150345 - DNA, 25 bp, Homo sapien
gtgagatggtttccccaacattgaa

SEQ ID NO: 4150346 - DNA, 25 bp, Homo sapien
cccaacattgaaaaagcttcttagg

SEQ ID NO: 4150347 - DNA, 25 bp, Homo sapien
ctgtgagatggtttccccaacattg

SEQ ID NO: 4150348 - DNA, 25 bp, Homo sapien
tccccaacattgaaaaagcttctta

SEQ ID NO: 4150349 - DNA, 25 bp, Homo sapien
caaaatcgagagatttggccccgat

SEQ ID NO: 4150350 - DNA, 25 bp, Homo sapien
atttggccccgatattaaagcacag

SEQ ID NO: 4150351 - DNA, 25 bp, Homo sapien
aaatcgagagatttggccccgatat

SEQ ID NO: 4150352 - DNA, 25 bp, Homo sapien
atcgagagatttggccccgatatta

SEQ ID NO: 4150353 - DNA, 25 bp, Homo sapien
ccatttcaacctaaacaggcagtgg

SEQ ID NO: 4150354 - DNA, 25 bp, Homo sapien
aatcacccaaataggtggcaaatcg

SEQ ID NO: 4150355 - DNA, 25 bp, Homo sapien
aggctggaccatttcaacctaaaca

SEQ ID NO: 4150356 - DNA, 25 bp, Homo sapien
tcacccaaataggtggcaaatcgag

SEQ ID NO: 4150357 - DNA, 25 bp, Homo sapien
tctcttggtactggccacggccatg

SEQ ID NO: 4150358 - DNA, 25 bp, Homo sapien
ctgagcagctctatggaggcctggt

SEQ ID NO: 4150359 - DNA, 25 bp, Homo sapien
tggtactggccacggccatgctgag

SEQ ID NO: 4150360 - DNA, 25 bp, Homo sapien
ccatgctgagcagctctatggaggc

SEQ ID NO: 4150361 - DNA, 25 bp, Homo sapien
cttcatcttgcaggacagagtcttg

SEQ ID NO: 4150362 - DNA, 25 bp, Homo sapien
ggacagagtcttggccgcagactga

SEQ ID NO: 4150363 - DNA, 25 bp, Homo sapien
catcttgcaggacagagtcttggcc

SEQ ID NO: 4150364 - DNA, 25 bp, Homo sapien
aggacagagtcttggccgcagactg

SEQ ID NO: 4150365 - DNA, 25 bp, Homo sapien
gaccagctaaggtgcgcctgctcac

SEQ ID NO: 4150366 - DNA, 25 bp, Homo sapien
accagctaaggtgcgcctgctcact

SEQ ID NO: 4150367 - DNA, 25 bp, Homo sapien
ccagctaaggtgcgcctgctcactg

SEQ ID NO: 4150368 - DNA, 25 bp, Homo sapien
gatccctgagcaatgtgaagctgag

SEQ ID NO: 4150369 - DNA, 25 bp, Homo sapien
catgagctgtaccaagatccctgag

SEQ ID NO: 4150370 - DNA, 25 bp, Homo sapien
gaatcttggagttacacatgagctg

SEQ ID NO: 4150371 - DNA, 25 bp, Homo sapien
aaaagagcctacatccagttggtca

SEQ ID NO: 4150372 - DNA, 25 bp, Homo sapien
gatctgctcttgttctggtagtctt

SEQ ID NO: 4150373 - DNA, 25 bp, Homo sapien
tctgctcttgttctggtagtcttct

SEQ ID NO: 4150374 - DNA, 25 bp, Homo sapien
gctcttgttctggtagtcttcttca

SEQ ID NO: 4150375 - DNA, 25 bp, Homo sapien
ctttgatctgctcttgttctggtag

SEQ ID NO: 4150376 - DNA, 25 bp, Homo sapien
ttttggatttgccacttgcgtcttc

SEQ ID NO: 4150377 - DNA, 25 bp, Homo sapien
ctttttggatttgccacttgcgtct

SEQ ID NO: 4150378 - DNA, 25 bp, Homo sapien
agctttttggatttgccacttgcgt

SEQ ID NO: 4150379 - DNA, 25 bp, Homo sapien
acttgcgtcttcttcaagttttaga

SEQ ID NO: 4150380 - DNA, 25 bp, Homo sapien
ccctgaatggagagtgcgtgccgcc

SEQ ID NO: 4150381 - DNA, 25 bp, Homo sapien
aatggagagtgcgtgccgcccagct

SEQ ID NO: 4150382 - DNA, 25 bp, Homo sapien
tggagagtgcgtgccgcccagcttc

SEQ ID NO: 4150383 - DNA, 25 bp, Homo sapien
ctgaatggagagtgcgtgccgccca

SEQ ID NO: 4150384 - DNA, 25 bp, Homo sapien
tgtgaaggccaaccgctctgtggct

SEQ ID NO: 4150385 - DNA, 25 bp, Homo sapien
tctgtgaaggccaaccgctctgtgg

SEQ ID NO: 4150386 - DNA, 25 bp, Homo sapien
ctgtgaaggccaaccgctctgtggc

SEQ ID NO: 4150387 - DNA, 25 bp, Homo sapien
aaccccaagtgccccaggggtcatg

SEQ ID NO: 4150388 - DNA, 25 bp, Homo sapien
ccccaagtgccccaggggtcatgca

SEQ ID NO: 4150389 - DNA, 25 bp, Homo sapien
caaccccaagtgccccaggggtcat

SEQ ID NO: 4150390 - DNA, 25 bp, Homo sapien
ccaagtgccccaggggtcatgcaga

SEQ ID NO: 4150391 - DNA, 25 bp, Homo sapien
taaagctgccagcaggacagagaag

SEQ ID NO: 4150392 - DNA, 25 bp, Homo sapien
ctgccagcaggacagagaagtcttc

SEQ ID NO: 4150393 - DNA, 25 bp, Homo sapien
tgccagcaggacagagaagtcttcg

SEQ ID NO: 4150394 - DNA, 25 bp, Homo sapien
cagcaggacagagaagtcttcgtcc

SEQ ID NO: 4150395 - DNA, 25 bp, Homo sapien
tggccccaggcccaagacactcccc

SEQ ID NO: 4150396 - DNA, 25 bp, Homo sapien
gatgtgctggaaatgcttctggtag

SEQ ID NO: 4150397 - DNA, 25 bp, Homo sapien
ttctggtagatgaggcggctgtaat

SEQ ID NO: 4150398 - DNA, 25 bp, Homo sapien
tcctcggccctccagccagggggtg

SEQ ID NO: 4150399 - DNA, 25 bp, Homo sapien
agatgaggcggctgtaatactccct

SEQ ID NO: 4150400 - DNA, 25 bp, Homo sapien
cacacgcaggcaaacagctcctgaa

SEQ ID NO: 4150401 - DNA, 25 bp, Homo sapien
acgcaggcaaacagctcctgaacat

SEQ ID NO: 4150402 - DNA, 25 bp, Homo sapien
cacgcaggcaaacagctcctgaaca

SEQ ID NO: 4150403 - DNA, 25 bp, Homo sapien
ggcacacgcaggcaaacagctcctg

SEQ ID NO: 4150404 - DNA, 25 bp, Homo sapien
tgcagagagaaccaagggaacccga

SEQ ID NO: 4150405 - DNA, 25 bp, Homo sapien
agagagaaccaagggaacccgagag

SEQ ID NO: 4150406 - DNA, 25 bp, Homo sapien
agagaaccaagggaacccgagagct

SEQ ID NO: 4150407 - DNA, 25 bp, Homo sapien
ctgcagagagaaccaagggaacccg

SEQ ID NO: 4150408 - DNA, 25 bp, Homo sapien
cctcaaagaccaggccattttcttc

SEQ ID NO: 4150409 - DNA, 25 bp, Homo sapien
aagaccaggccattttcttcatgtt

SEQ ID NO: 4150410 - DNA, 25 bp, Homo sapien
tctgagtcctcaaagaccaggccat

SEQ ID NO: 4150411 - DNA, 25 bp, Homo sapien
caaagaccaggccattttcttcatg

SEQ ID NO: 4150412 - DNA, 25 bp, Homo sapien
cctggcgtggtggcagacatggcta

SEQ ID NO: 4150413 - DNA, 25 bp, Homo sapien
ctggcgtggtggcagacatggctac

SEQ ID NO: 4150414 - DNA, 25 bp, Homo sapien
tctggaaacttccccgtatgtccca

SEQ ID NO: 4150415 - DNA, 25 bp, Homo sapien
gtatgtcccactttcccacacttgg

SEQ ID NO: 4150416 - DNA, 25 bp, Homo sapien
cctggagcaccttccggcctctaca

SEQ ID NO: 4150417 - DNA, 25 bp, Homo sapien
tggagcaccttccggcctctacatg

SEQ ID NO: 4150418 - DNA, 25 bp, Homo sapien
cttccggaactggtttagcttgcct

SEQ ID NO: 4150419 - DNA, 25 bp, Homo sapien
ctggtttagcttgcctgcaggatca

SEQ ID NO: 4150420 - DNA, 25 bp, Homo sapien
tttagcttgcctgcaggatcaggaa

SEQ ID NO: 4150421 - DNA, 25 bp, Homo sapien
tcctgcaggttcttccggaactggt

SEQ ID NO: 4150422 - DNA, 25 bp, Homo sapien
gatttctagtcccatcctggtggcc

SEQ ID NO: 4150423 - DNA, 25 bp, Homo sapien
ggcatggtgcctgctgctagccatt

SEQ ID NO: 4150424 - DNA, 25 bp, Homo sapien
tgggttcagatctctgcttctgtcc

SEQ ID NO: 4150425 - DNA, 25 bp, Homo sapien
cctggtggccaattctaggtacctg

SEQ ID NO: 4150426 - DNA, 25 bp, Homo sapien
tcatatctgtactacgtcattttta

SEQ ID NO: 4150427 - DNA, 25 bp, Homo sapien
acgttcatatctgtactacgtcatt

SEQ ID NO: 4150428 - DNA, 25 bp, Homo sapien
tatctgtactacgtcatttttatga

SEQ ID NO: 4150429 - DNA, 25 bp, Homo sapien
tctgtactacgtcatttttatgaat

SEQ ID NO: 4150430 - DNA, 25 bp, Homo sapien
aatgctcatgtctagccttctaaga

SEQ ID NO: 4150431 - DNA, 25 bp, Homo sapien
ggcagaagcagacttgctgaatgaa

SEQ ID NO: 4150432 - DNA, 25 bp, Homo sapien
tggggatgtcgagaggccattcctc

SEQ ID NO: 4150433 - DNA, 25 bp, Homo sapien
acatggggatgtcgagaggccattc

SEQ ID NO: 4150434 - DNA, 25 bp, Homo sapien
caggacccgccaacctggactctac

SEQ ID NO: 4150435 - DNA, 25 bp, Homo sapien
tgactccgccccaggacccgccaac

SEQ ID NO: 4150436 - DNA, 25 bp, Homo sapien
tccaggatcgccctatcctgactcc

SEQ ID NO: 4150437 - DNA, 25 bp, Homo sapien
aggatcgccctatcctgactccgcc

SEQ ID NO: 4150438 - DNA, 25 bp, Homo sapien
tcccctgccctgcgtcaactgcact

SEQ ID NO: 4150439 - DNA, 25 bp, Homo sapien
acagcaacgagacagagcggagtgc

SEQ ID NO: 4150440 - DNA, 25 bp, Homo sapien
gagtgcgaacatcgatactgtcatg

SEQ ID NO: 4150441 - DNA, 25 bp, Homo sapien
gacagagcggagtgcgaacatcgat

SEQ ID NO: 4150442 - DNA, 25 bp, Homo sapien
gaacatcgatactgtcatgaactgg

SEQ ID NO: 4150443 - DNA, 25 bp, Homo sapien
taaaaaaagctagtcggcttcatcc

SEQ ID NO: 4150444 - DNA, 25 bp, Homo sapien
ttggcattctacaggtagaaacact

SEQ ID NO: 4150445 - DNA, 25 bp, Homo sapien
tactttttggcattctacaggtaga

SEQ ID NO: 4150446 - DNA, 25 bp, Homo sapien
gcttcatcctcgcaaagatgccatc

SEQ ID NO: 4150447 - DNA, 25 bp, Homo sapien
aggagacatcagtctccccatcttc

SEQ ID NO: 4150448 - DNA, 25 bp, Homo sapien
tggatcctcgagttgagtcaataca

SEQ ID NO: 4150449 - DNA, 25 bp, Homo sapien
gagtcaatacatcttgaaccaggca

SEQ ID NO: 4150450 - DNA, 25 bp, Homo sapien
tcttgaaccaggcacggactgaagc

SEQ ID NO: 4150451 - DNA, 25 bp, Homo sapien
tagggaaggtaatatctcacctgcc

SEQ ID NO: 4150452 - DNA, 25 bp, Homo sapien
caggtggtagggaaggtaatatctc

SEQ ID NO: 4150453 - DNA, 25 bp, Homo sapien
tcgcatcatagactatgactgccag

SEQ ID NO: 4150454 - DNA, 25 bp, Homo sapien
tccacaaagctgaatcgcatcatag

SEQ ID NO: 4150455 - DNA, 25 bp, Homo sapien
ttaatcaagagtggctgggtacggt

SEQ ID NO: 4150456 - DNA, 25 bp, Homo sapien
agttaatcaagagtggctgggtacg

SEQ ID NO: 4150457 - DNA, 25 bp, Homo sapien
taagttaatcaagagtggctgggta

SEQ ID NO: 4150458 - DNA, 25 bp, Homo sapien
attaagttaatcaagagtggctggg

SEQ ID NO: 4150459 - DNA, 25 bp, Homo sapien
acgctgatgccacactacgataagg

SEQ ID NO: 4150460 - DNA, 25 bp, Homo sapien
cgctgatgccacactacgataaggg

SEQ ID NO: 4150461 - DNA, 25 bp, Homo sapien
tagccacgctgatgccacactacga

SEQ ID NO: 4150462 - DNA, 25 bp, Homo sapien
ccacgctgatgccacactacgataa

SEQ ID NO: 4150463 - DNA, 25 bp, Homo sapien
ggatttgaactcactttgggttcag

SEQ ID NO: 4150464 - DNA, 25 bp, Homo sapien
gatttgaactcactttgggttcagc

SEQ ID NO: 4150465 - DNA, 25 bp, Homo sapien
cagagacaaggacttccggagaccc

SEQ ID NO: 4150466 - DNA, 25 bp, Homo sapien
ctctctggatcaccgcccagagaca

SEQ ID NO: 4150467 - DNA, 25 bp, Homo sapien
tctggatcaccgcccagagacaagg

SEQ ID NO: 4150468 - DNA, 25 bp, Homo sapien
caaggacttccggagaccctggctt

SEQ ID NO: 4150469 - DNA, 25 bp, Homo sapien
cagagctcacggagtcattcacaac

SEQ ID NO: 4150470 - DNA, 25 bp, Homo sapien
gtcattcacaacacgatgtttaaca

SEQ ID NO: 4150471 - DNA, 25 bp, Homo sapien
gagtcattcacaacacgatgtttaa

SEQ ID NO: 4150472 - DNA, 25 bp, Homo sapien
ttcacaacacgatgtttaacactga

SEQ ID NO: 4150473 - DNA, 25 bp, Homo sapien
gcactgggctctttctttagtgaca

SEQ ID NO: 4150474 - DNA, 25 bp, Homo sapien
gcctcctgggatgaagtagttctcc

SEQ ID NO: 4150475 - DNA, 25 bp, Homo sapien
ggcaacatccattcgaagagcttat

SEQ ID NO: 4150476 - DNA, 25 bp, Homo sapien
cattgcctggattccataagcagaa

SEQ ID NO: 4150477 - DNA, 25 bp, Homo sapien
atggtatctgaagccccatgaaggc

SEQ ID NO: 4150478 - DNA, 25 bp, Homo sapien
ccaagccaatagtccagccaaaaat

SEQ ID NO: 4150479 - DNA, 25 bp, Homo sapien
atcccaagccaatagtccagccaaa

SEQ ID NO: 4150480 - DNA, 25 bp, Homo sapien
ccattcctcatggtatctgaagccc

SEQ ID NO: 4150481 - DNA, 25 bp, Homo sapien
acttcaccaccatcccgggtaagca

SEQ ID NO: 4150482 - DNA, 25 bp, Homo sapien
gctgccgcctgtcctactgggtagc

SEQ ID NO: 4150483 - DNA, 25 bp, Homo sapien
tgacagggctcggggctctccagct

SEQ ID NO: 4150484 - DNA, 25 bp, Homo sapien
tgccgcctgtcctactgggtagcca

SEQ ID NO: 4150485 - DNA, 25 bp, Homo sapien
tgctgctgccgcctgtcctactggg

SEQ ID NO: 4150486 - DNA, 25 bp, Homo sapien
agatcttgtggtaagcccctttgta

SEQ ID NO: 4150487 - DNA, 25 bp, Homo sapien
ctctgtgatgacaggaactgtgtgt

SEQ ID NO: 4150488 - DNA, 25 bp, Homo sapien
tgtgaccacatatctcgccttatgg

SEQ ID NO: 4150489 - DNA, 25 bp, Homo sapien
tctatggagactcacacttcctact

SEQ ID NO: 4150490 - DNA, 25 bp, Homo sapien
aaggctgttgcccatagtaaccaga

SEQ ID NO: 4150491 - DNA, 25 bp, Homo sapien
gaaaacaaggctgttgcccatagta

SEQ ID NO: 4150492 - DNA, 25 bp, Homo sapien
gctgttgcccatagtaaccagaaag

SEQ ID NO: 4150493 - DNA, 25 bp, Homo sapien
aacaaggctgttgcccatagtaacc

SEQ ID NO: 4150494 - DNA, 25 bp, Homo sapien
aagaagttgagtgtttaagactgct

SEQ ID NO: 4150495 - DNA, 25 bp, Homo sapien
agaagttgagtgtttaagactgctg

SEQ ID NO: 4150496 - DNA, 25 bp, Homo sapien
gttgagtgtttaagactgctgtttg

SEQ ID NO: 4150497 - DNA, 25 bp, Homo sapien
agttgagtgtttaagactgctgttt

SEQ ID NO: 4150498 - DNA, 25 bp, Homo sapien
ggcctcaagtaatcctcccacctcg

SEQ ID NO: 4150499 - DNA, 25 bp, Homo sapien
actgtgttttccaggctggcttcaa

SEQ ID NO: 4150500 - DNA, 25 bp, Homo sapien
tcactgtgttttccaggctggcttc

SEQ ID NO: 4150501 - DNA, 25 bp, Homo sapien
aaactcctggcctcaagtaatcctc

SEQ ID NO: 4150502 - DNA, 25 bp, Homo sapien
gcctttgggtactgcatgagaccag

SEQ ID NO: 4150503 - DNA, 25 bp, Homo sapien
ctagtaagcctttgggtactgcatg

SEQ ID NO: 4150504 - DNA, 25 bp, Homo sapien
tgttcattggcgcatgtattgtctt

SEQ ID NO: 4150505 - DNA, 25 bp, Homo sapien
gttcattggcgcatgtattgtcttg

SEQ ID NO: 4150506 - DNA, 25 bp, Homo sapien
atgcttaattgcacatgtttgacta

SEQ ID NO: 4150507 - DNA, 25 bp, Homo sapien
acatgcttaattgcacatgtttgac

SEQ ID NO: 4150508 - DNA, 25 bp, Homo sapien
catgcttaattgcacatgtttgact

SEQ ID NO: 4150509 - DNA, 25 bp, Homo sapien
tgcttaattgcacatgtttgactaa

SEQ ID NO: 4150510 - DNA, 25 bp, Homo sapien
gactttgcacttgatgtctcttgtc

SEQ ID NO: 4150511 - DNA, 25 bp, Homo sapien
tgactttgcacttgatgtctcttgt

SEQ ID NO: 4150512 - DNA, 25 bp, Homo sapien
tcttgtagacgttgttgggtcattt

SEQ ID NO: 4150513 - DNA, 25 bp, Homo sapien
gtattggactctatctttccctgta

SEQ ID NO: 4150514 - DNA, 25 bp, Homo sapien
cttgtagacgttgttgggtcatttt

SEQ ID NO: 4150515 - DNA, 25 bp, Homo sapien
ttcttgtagacgttgttgggtcatt

SEQ ID NO: 4150516 - DNA, 25 bp, Homo sapien
caaatcagggtctttaggatattaa

SEQ ID NO: 4150517 - DNA, 25 bp, Homo sapien
aaacgtttttgatagagaataattg

SEQ ID NO: 4150518 - DNA, 25 bp, Homo sapien
gatagagaataattgtacacattta

SEQ ID NO: 4150519 - DNA, 25 bp, Homo sapien
tgtgagattctggtacatgcatgca

SEQ ID NO: 4150520 - DNA, 25 bp, Homo sapien
tattgtcttctgctcttggtcacag

SEQ ID NO: 4150521 - DNA, 25 bp, Homo sapien
gtcacagaggctgccacaatccgca

SEQ ID NO: 4150522 - DNA, 25 bp, Homo sapien
tcctgtgacaatatccagagacagc

SEQ ID NO: 4150523 - DNA, 25 bp, Homo sapien
aatccgcatgtcaagtcctcctgtg

SEQ ID NO: 4150524 - DNA, 25 bp, Homo sapien
gcctcattaacttctattctgcagc

SEQ ID NO: 4150525 - DNA, 25 bp, Homo sapien
gaagcctcattaacttctattctgc

SEQ ID NO: 4150526 - DNA, 25 bp, Homo sapien
aagcctcattaacttctattctgca

SEQ ID NO: 4150527 - DNA, 25 bp, Homo sapien
agcctcattaacttctattctgcag

SEQ ID NO: 4150528 - DNA, 25 bp, Homo sapien
gacgtgtacataagccagatttatg

SEQ ID NO: 4150529 - DNA, 25 bp, Homo sapien
gaagcattgctgtaaacatgtctcg

SEQ ID NO: 4150530 - DNA, 25 bp, Homo sapien
gactggacgtgtacataagccagat

SEQ ID NO: 4150531 - DNA, 25 bp, Homo sapien
ctatgactggacgtgtacataagcc

SEQ ID NO: 4150532 - DNA, 25 bp, Homo sapien
agagaaggtttttgtgagttcctat

SEQ ID NO: 4150533 - DNA, 25 bp, Homo sapien
gtttttgtgagttcctatgcatagt

SEQ ID NO: 4150534 - DNA, 25 bp, Homo sapien
tgtgagttcctatgcatagtggaga

SEQ ID NO: 4150535 - DNA, 25 bp, Homo sapien
ttcctatgcatagtggagacctgtt

SEQ ID NO: 4150536 - DNA, 25 bp, Homo sapien
gagctcaaagccacgattgttttct

SEQ ID NO: 4150537 - DNA, 25 bp, Homo sapien
gtttggagtcaaagtggctgttgta

SEQ ID NO: 4150538 - DNA, 25 bp, Homo sapien
tggagtcaaagtggctgttgtatta

SEQ ID NO: 4150539 - DNA, 25 bp, Homo sapien
gccttgtgtgtttagagctcaaagc

SEQ ID NO: 4150540 - DNA, 25 bp, Homo sapien
aacttgttcaaagccccagtcgagg

SEQ ID NO: 4150541 - DNA, 25 bp, Homo sapien
agagggtcccatggtccttgcttgg

SEQ ID NO: 4150542 - DNA, 25 bp, Homo sapien
cgcagagtccttggtccacgaatgt

SEQ ID NO: 4150543 - DNA, 25 bp, Homo sapien
ccttgcttggtgttggccgactcat

SEQ ID NO: 4150544 - DNA, 25 bp, Homo sapien
tccattttgactccactgaaggggg

SEQ ID NO: 4150545 - DNA, 25 bp, Homo sapien
tgggttggagggtcattgaggccat

SEQ ID NO: 4150546 - DNA, 25 bp, Homo sapien
acatgggttggagggtcattgaggc

SEQ ID NO: 4150547 - DNA, 25 bp, Homo sapien
gactccactgaagggggcatcaaag

SEQ ID NO: 4150548 - DNA, 25 bp, Homo sapien
tgttaccctggattcctccgagcgc

SEQ ID NO: 4150549 - DNA, 25 bp, Homo sapien
tactcgggaatctcttgtcggctgt

SEQ ID NO: 4150550 - DNA, 25 bp, Homo sapien
tcttatcgtacctttaccctagaga

SEQ ID NO: 4150551 - DNA, 25 bp, Homo sapien
tttctagtcgggtaggatgagagac

SEQ ID NO: 4150552 - DNA, 25 bp, Homo sapien
tgcatcaggacataaacctctggga

SEQ ID NO: 4150553 - DNA, 25 bp, Homo sapien
taagtatcaatgttacatggacaaa

SEQ ID NO: 4150554 - DNA, 25 bp, Homo sapien
tacatgagtcaggatatgaagttct

SEQ ID NO: 4150555 - DNA, 25 bp, Homo sapien
tgttgtatgtgcaattttccatgga

SEQ ID NO: 4150556 - DNA, 25 bp, Homo sapien
gagtaacaaggcagtattactgtaa

SEQ ID NO: 4150557 - DNA, 25 bp, Homo sapien
taaggagaatgtcagcaaattacat

SEQ ID NO: 4150558 - DNA, 25 bp, Homo sapien
taaacatgtctcacctgccgccaca

SEQ ID NO: 4150559 - DNA, 25 bp, Homo sapien
gaatgtcagcaaattacatgtgagc

SEQ ID NO: 4150560 - DNA, 25 bp, Homo sapien
tggcaaacagtgtgcagatggctgc

SEQ ID NO: 4150561 - DNA, 25 bp, Homo sapien
gctgcccagtcagacaagatggcaa

SEQ ID NO: 4150562 - DNA, 25 bp, Homo sapien
catctggagctcggctgcccagtca

SEQ ID NO: 4150563 - DNA, 25 bp, Homo sapien
tcggctgcccagtcagacaagatgg

SEQ ID NO: 4150564 - DNA, 25 bp, Homo sapien
acggccctcttgactgacccattca

SEQ ID NO: 4150565 - DNA, 25 bp, Homo sapien
cctgtcggcttaagttgcaaggtgt

SEQ ID NO: 4150566 - DNA, 25 bp, Homo sapien
ggcttgaaagcctgtcggcttaagt

SEQ ID NO: 4150567 - DNA, 25 bp, Homo sapien
cttgtccctcagaccatcctcctcg

SEQ ID NO: 4150568 - DNA, 25 bp, Homo sapien
gagccccgggacaggagccagggcc

SEQ ID NO: 4150569 - DNA, 25 bp, Homo sapien
cagctgaggatcagagccccgggac

SEQ ID NO: 4150570 - DNA, 25 bp, Homo sapien
tggggggtggtttgagagtgcagct

SEQ ID NO: 4150571 - DNA, 25 bp, Homo sapien
cattggggggtggtttgagagtgca

SEQ ID NO: 4150572 - DNA, 25 bp, Homo sapien
tacaaaacccagtgaggccagctgt

SEQ ID NO: 4150573 - DNA, 25 bp, Homo sapien
gaggccagctgtcttggcgctgcca

SEQ ID NO: 4150574 - DNA, 25 bp, Homo sapien
ggccagctgtcttggcgctgccact

SEQ ID NO: 4150575 - DNA, 25 bp, Homo sapien
cagcttacaaaacccagtgaggcca

SEQ ID NO: 4150576 - DNA, 25 bp, Homo sapien
ccttcaagtatctgagcagctcctg

SEQ ID NO: 4150577 - DNA, 25 bp, Homo sapien
tctgcgcactgggggctgtttgcct

SEQ ID NO: 4150578 - DNA, 25 bp, Homo sapien
gtctgcgcactgggggctgtttgcc

SEQ ID NO: 4150579 - DNA, 25 bp, Homo sapien
gcgcactgggggctgtttgccttct

SEQ ID NO: 4150580 - DNA, 25 bp, Homo sapien
gctcctggtcttgcaaactgtggtt

SEQ ID NO: 4150581 - DNA, 25 bp, Homo sapien
tgctcctggtcttgcaaactgtggt

SEQ ID NO: 4150582 - DNA, 25 bp, Homo sapien
gtactggaggtgaatggtcaagtct

SEQ ID NO: 4150583 - DNA, 25 bp, Homo sapien
tcaggtactggaggtgaatggtcaa

SEQ ID NO: 4150584 - DNA, 25 bp, Homo sapien
gaggtgaatggtcaagtctgatctc

SEQ ID NO: 4150585 - DNA, 25 bp, Homo sapien
actggaggtgaatggtcaagtctga

SEQ ID NO: 4150586 - DNA, 25 bp, Homo sapien
gttctcgcatccccctcggctgaaa

SEQ ID NO: 4150587 - DNA, 25 bp, Homo sapien
tcgcatccccctcggctgaaagtgc

SEQ ID NO: 4150588 - DNA, 25 bp, Homo sapien
tgcaggttggtagacggtactttga

SEQ ID NO: 4150589 - DNA, 25 bp, Homo sapien
tgtgcaggttggtagacggtacttt

SEQ ID NO: 4150590 - DNA, 25 bp, Homo sapien
cctgcagagccggctctccaagaca

SEQ ID NO: 4150591 - DNA, 25 bp, Homo sapien
ctgcagagccggctctccaagacag

SEQ ID NO: 4150592 - DNA, 25 bp, Homo sapien
tgcagagccggctctccaagacagg

SEQ ID NO: 4150593 - DNA, 25 bp, Homo sapien
caagggtaactcgttggagtccctg

SEQ ID NO: 4150594 - DNA, 25 bp, Homo sapien
ggttatcaacctcaaccattgctga

SEQ ID NO: 4150595 - DNA, 25 bp, Homo sapien
tttggttatcaacctcaaccattgc

SEQ ID NO: 4150596 - DNA, 25 bp, Homo sapien
gagcattcaagggtaactcgttgga

SEQ ID NO: 4150597 - DNA, 25 bp, Homo sapien
ttctgaacccattgaagcagcacgg

SEQ ID NO: 4150598 - DNA, 25 bp, Homo sapien
cattctgaacccattgaagcagcac

SEQ ID NO: 4150599 - DNA, 25 bp, Homo sapien
ggctgcatcagagcccccgctgccc

SEQ ID NO: 4150600 - DNA, 25 bp, Homo sapien
atgggctgcatcagagcccccgctg

SEQ ID NO: 4150601 - DNA, 25 bp, Homo sapien
acacgtgggcccctgagtcaccggg

SEQ ID NO: 4150602 - DNA, 25 bp, Homo sapien
ccctttcttgttgagcagcgagagt

SEQ ID NO: 4150603 - DNA, 25 bp, Homo sapien
tcttgttgagcagcgagagttgaga

SEQ ID NO: 4150604 - DNA, 25 bp, Homo sapien
cggtgtcttgcacacgtgggcccct

SEQ ID NO: 4150605 - DNA, 25 bp, Homo sapien
ggcagctccgaagccactggcaaga

SEQ ID NO: 4150606 - DNA, 25 bp, Homo sapien
gacgacgtccctcccgaggagaaga

SEQ ID NO: 4150607 - DNA, 25 bp, Homo sapien
gagccatggccagtccttccggcag

SEQ ID NO: 4150608 - DNA, 25 bp, Homo sapien
agctcagccgagaggccgctcgcgc

SEQ ID NO: 4150609 - DNA, 25 bp, Homo sapien
ttacccaatgcccttccctagtctc

SEQ ID NO: 4150610 - DNA, 25 bp, Homo sapien
tatgagggctgcctgacacggatgt

SEQ ID NO: 4150611 - DNA, 25 bp, Homo sapien
cttatgagggctgcctgacacggat

SEQ ID NO: 4150612 - DNA, 25 bp, Homo sapien
tcttatgagggctgcctgacacgga

SEQ ID NO: 4150613 - DNA, 25 bp, Homo sapien
tctcttatgagggctgcctgacacg

SEQ ID NO: 4150614 - DNA, 25 bp, Homo sapien
ggtacaagaggtacccatgcttctt

SEQ ID NO: 4150615 - DNA, 25 bp, Homo sapien
acaagaggtacccatgcttcttgaa

SEQ ID NO: 4150616 - DNA, 25 bp, Homo sapien
caagaggtacccatgcttcttgaag

SEQ ID NO: 4150617 - DNA, 25 bp, Homo sapien
gtacaagaggtacccatgcttcttg

SEQ ID NO: 4150618 - DNA, 25 bp, Homo sapien
tgtccacagacccagaacgagtggc

SEQ ID NO: 4150619 - DNA, 25 bp, Homo sapien
acagacccagaacgagtggcatccc

SEQ ID NO: 4150620 - DNA, 25 bp, Homo sapien
tccacagacccagaacgagtggcat

SEQ ID NO: 4150621 - DNA, 25 bp, Homo sapien
ccacagacccagaacgagtggcatc

SEQ ID NO: 4150622 - DNA, 25 bp, Homo sapien
aggcttctgtgaggcctccatctgc

SEQ ID NO: 4150623 - DNA, 25 bp, Homo sapien
gaggctgccctgaagtcagacagaa

SEQ ID NO: 4150624 - DNA, 25 bp, Homo sapien
tgggttcttgccctgagaggctgcc

SEQ ID NO: 4150625 - DNA, 25 bp, Homo sapien
cttgaatgggtggttctgggcccca

SEQ ID NO: 4150626 - DNA, 25 bp, Homo sapien
ctgctcaggccggttattgcagagc

SEQ ID NO: 4150627 - DNA, 25 bp, Homo sapien
aggccggttattgcagagcagttcc

SEQ ID NO: 4150628 - DNA, 25 bp, Homo sapien
caggccggttattgcagagcagttc

SEQ ID NO: 4150629 - DNA, 25 bp, Homo sapien
gctcaggccggttattgcagagcag

SEQ ID NO: 4150630 - DNA, 25 bp, Homo sapien
ttgaagggcatacagctgacggagc

SEQ ID NO: 4150631 - DNA, 25 bp, Homo sapien
tgttgaagggcatacagctgacgga

SEQ ID NO: 4150632 - DNA, 25 bp, Homo sapien
tgaagggcatacagctgacggagct

SEQ ID NO: 4150633 - DNA, 25 bp, Homo sapien
aagggcatacagctgacggagctga

SEQ ID NO: 4150634 - DNA, 25 bp, Homo sapien
gagcagtgctcagatgagcaggcag

SEQ ID NO: 4150635 - DNA, 25 bp, Homo sapien
gggagcagtgctcagatgagcaggc

SEQ ID NO: 4150636 - DNA, 25 bp, Homo sapien
ggagcagtgctcagatgagcaggca

SEQ ID NO: 4150637 - DNA, 25 bp, Homo sapien
ccccagagctattctctgtagaaag

SEQ ID NO: 4150638 - DNA, 25 bp, Homo sapien
cgccccagagctattctctgtagaa

SEQ ID NO: 4150639 - DNA, 25 bp, Homo sapien
caaacgccccagagctattctctgt

SEQ ID NO: 4150640 - DNA, 25 bp, Homo sapien
aacgccccagagctattctctgtag

SEQ ID NO: 4150641 - DNA, 25 bp, Homo sapien
agcagcataggcagcgggggacagg

SEQ ID NO: 4150642 - DNA, 25 bp, Homo sapien
gacagcaggcaagggaagcagcata

SEQ ID NO: 4150643 - DNA, 25 bp, Homo sapien
caagggaagcagcataggcagcggg

SEQ ID NO: 4150644 - DNA, 25 bp, Homo sapien
tgacagcaggcaagggaagcagcat

SEQ ID NO: 4150645 - DNA, 25 bp, Homo sapien
ctccctcaggctcccaggacggcaa

SEQ ID NO: 4150646 - DNA, 25 bp, Homo sapien
ggcaagggaagagctccctcaggct

SEQ ID NO: 4150647 - DNA, 25 bp, Homo sapien
ctgccagcaggcaagggaagagctc

SEQ ID NO: 4150648 - DNA, 25 bp, Homo sapien
agcaggcaagggaagagctccctca

SEQ ID NO: 4150649 - DNA, 25 bp, Homo sapien
tcaggctcccagggcggcaacctcc

SEQ ID NO: 4150650 - DNA, 25 bp, Homo sapien
aggctcccagggcggcaacctcctc

SEQ ID NO: 4150651 - DNA, 25 bp, Homo sapien
gcaacctcctcctccacgttgggct

SEQ ID NO: 4150652 - DNA, 25 bp, Homo sapien
cggcaacctcctcctccacgttggg

SEQ ID NO: 4150653 - DNA, 25 bp, Homo sapien
tcagggcggcaacttcctcctccat

SEQ ID NO: 4150654 - DNA, 25 bp, Homo sapien
tcaggctctcagggcggcaacttcc

SEQ ID NO: 4150655 - DNA, 25 bp, Homo sapien
ctctcagggcggcaacttcctcctc

SEQ ID NO: 4150656 - DNA, 25 bp, Homo sapien
aggctctcagggcggcaacttcctc

SEQ ID NO: 4150657 - DNA, 25 bp, Homo sapien
agaagcgggtgtgcgccccttagtt

SEQ ID NO: 4150658 - DNA, 25 bp, Homo sapien
gcgggtgcttgaagattcctccagg

SEQ ID NO: 4150659 - DNA, 25 bp, Homo sapien
ttagttctccgagcctgccgggagc

SEQ ID NO: 4150660 - DNA, 25 bp, Homo sapien
cattccagtttgacgcaggtcaggc

SEQ ID NO: 4150661 - DNA, 25 bp, Homo sapien
tctctcacatgtccaaaggcagagt

SEQ ID NO: 4150662 - DNA, 25 bp, Homo sapien
tgaaaggtgcgctctctcacatgtc

SEQ ID NO: 4150663 - DNA, 25 bp, Homo sapien
agtgaaaggtgcgctctctcacatg

SEQ ID NO: 4150664 - DNA, 25 bp, Homo sapien
gtgaaaggtgcgctctctcacatgt

SEQ ID NO: 4150665 - DNA, 25 bp, Homo sapien
ctgtaaaggagatctgttggaaagg

SEQ ID NO: 4150666 - DNA, 25 bp, Homo sapien
gcagtgctgttcccggccttgagct

SEQ ID NO: 4150667 - DNA, 25 bp, Homo sapien
cagtgctgttcccggccttgagctt

SEQ ID NO: 4150668 - DNA, 25 bp, Homo sapien
tggcagatatccttggaactgattt

SEQ ID NO: 4150669 - DNA, 25 bp, Homo sapien
gtcttggcagatatccttggaactg

SEQ ID NO: 4150670 - DNA, 25 bp, Homo sapien
cttggcagatatccttggaactgat

SEQ ID NO: 4150671 - DNA, 25 bp, Homo sapien
tgctctgtcttggcagatatccttg

SEQ ID NO: 4150672 - DNA, 25 bp, Homo sapien
ttattcaacgtcaagttgcactcct

SEQ ID NO: 4150673 - DNA, 25 bp, Homo sapien
tttattcaacgtcaagttgcactcc

SEQ ID NO: 4150674 - DNA, 25 bp, Homo sapien
tattcaacgtcaagttgcactcctc

SEQ ID NO: 4150675 - DNA, 25 bp, Homo sapien
tttttattcaacgtcaagttgcact

SEQ ID NO: 4150676 - DNA, 25 bp, Homo sapien
tagggcccgagacctatgccgcttg

SEQ ID NO: 4150677 - DNA, 25 bp, Homo sapien
ctagggcccgagacctatgccgctt

SEQ ID NO: 4150678 - DNA, 25 bp, Homo sapien
gggctaggtcttgataaacagcctc

SEQ ID NO: 4150679 - DNA, 25 bp, Homo sapien
ctgggctaggtcttgataaacagcc

SEQ ID NO: 4150680 - DNA, 25 bp, Homo sapien
tgggctaggtcttgataaacagcct

SEQ ID NO: 4150681 - DNA, 25 bp, Homo sapien
gagtgagcagtgtcagctgctcaca

SEQ ID NO: 4150682 - DNA, 25 bp, Homo sapien
agccgagtgagcagtgtcagctgct

SEQ ID NO: 4150683 - DNA, 25 bp, Homo sapien
cccccggagccgagtgagcagtgtc

SEQ ID NO: 4150684 - DNA, 25 bp, Homo sapien
ccccggagccgagtgagcagtgtca

SEQ ID NO: 4150685 - DNA, 25 bp, Homo sapien
aggctcagttatctcctgcccaggg

SEQ ID NO: 4150686 - DNA, 25 bp, Homo sapien
tgcctgagtggccatggaatacaag

SEQ ID NO: 4150687 - DNA, 25 bp, Homo sapien
gcagggaagacataagctgcctgag

SEQ ID NO: 4150688 - DNA, 25 bp, Homo sapien
tccagggctgaatccccaggaccag

SEQ ID NO: 4150689 - DNA, 25 bp, Homo sapien
agcttagcctcatctgatccactga

SEQ ID NO: 4150690 - DNA, 25 bp, Homo sapien
taaaatttgtctatagccttagcgg

SEQ ID NO: 4150691 - DNA, 25 bp, Homo sapien
gccttagcggtctgcaaaattcagg

SEQ ID NO: 4150692 - DNA, 25 bp, Homo sapien
aatttcttggtaaagcggctcatgc

SEQ ID NO: 4150693 - DNA, 25 bp, Homo sapien
tgttagtactccatgggttcaggct

SEQ ID NO: 4150694 - DNA, 25 bp, Homo sapien
gtgggccgagcactcagcctgcact

SEQ ID NO: 4150695 - DNA, 25 bp, Homo sapien
ctgggcacccaacattttcccggag

SEQ ID NO: 4150696 - DNA, 25 bp, Homo sapien
gctggcgatccggagggcccgtgcg

SEQ ID NO: 4150697 - DNA, 25 bp, Homo sapien
gggcaattcgctcattccttgggag

SEQ ID NO: 4150698 - DNA, 25 bp, Homo sapien
aacaagggaagtctccactgtggcc

SEQ ID NO: 4150699 - DNA, 25 bp, Homo sapien
cacgcttcgctggaggtttctgggt

SEQ ID NO: 4150700 - DNA, 25 bp, Homo sapien
tgcaacaagggaagtctccactgtg

SEQ ID NO: 4150701 - DNA, 25 bp, Homo sapien
cctgcaacaagggaagtctccactg

SEQ ID NO: 4150702 - DNA, 25 bp, Homo sapien
aacgtcccgtgcatcacggcctgac

SEQ ID NO: 4150703 - DNA, 25 bp, Homo sapien
gagaaaagaaacgtcccgtgcatca

SEQ ID NO: 4150704 - DNA, 25 bp, Homo sapien
gaaaagaaacgtcccgtgcatcacg

SEQ ID NO: 4150705 - DNA, 25 bp, Homo sapien
aagaaacgtcccgtgcatcacggcc

SEQ ID NO: 4150706 - DNA, 25 bp, Homo sapien
tcattttcatgtagaaaacgagagc

SEQ ID NO: 4150707 - DNA, 25 bp, Homo sapien
gcagtggtgtggaactcgttcattt

SEQ ID NO: 4150708 - DNA, 25 bp, Homo sapien
cgttcattttcatgtagaaaacgag

SEQ ID NO: 4150709 - DNA, 25 bp, Homo sapien
tttcatgtagaaaacgagagcgaaa

SEQ ID NO: 4150710 - DNA, 25 bp, Homo sapien
gtggaactgaacttccatgacagtc

SEQ ID NO: 4150711 - DNA, 25 bp, Homo sapien
gggtgtcgccgttgccgtgatagtc

SEQ ID NO: 4150712 - DNA, 25 bp, Homo sapien
agtcttgagttttccatgccctctc

SEQ ID NO: 4150713 - DNA, 25 bp, Homo sapien
catgacagtcttgagttttccatgc

SEQ ID NO: 4150714 - DNA, 25 bp, Homo sapien
catgcatgaactcggggcccaaggt

SEQ ID NO: 4150715 - DNA, 25 bp, Homo sapien
cacctccaccccgttatgaacatgc

SEQ ID NO: 4150716 - DNA, 25 bp, Homo sapien
cgttatgaacatgcatgaactcggg

SEQ ID NO: 4150717 - DNA, 25 bp, Homo sapien
caaagccgaaaaccacagggaccag

SEQ ID NO: 4150718 - DNA, 25 bp, Homo sapien
tgtccgaaggtgtcgggagggccat

SEQ ID NO: 4150719 - DNA, 25 bp, Homo sapien
ctgtccgaaggtgtcgggagggcca

SEQ ID NO: 4150720 - DNA, 25 bp, Homo sapien
ggtgcctggcccttcgattctgaaa

SEQ ID NO: 4150721 - DNA, 25 bp, Homo sapien
gatccttctcaaaggctcggaggag

SEQ ID NO: 4150722 - DNA, 25 bp, Homo sapien
cgatgcctggaaagcgatccttctc

SEQ ID NO: 4150723 - DNA, 25 bp, Homo sapien
ggtgctgcctcagctggcgtgacct

SEQ ID NO: 4150724 - DNA, 25 bp, Homo sapien
gagggagcagggtgacacccgctgg

SEQ ID NO: 4150725 - DNA, 25 bp, Homo sapien
acccgctgggggccgcgttgcacag

SEQ ID NO: 4150726 - DNA, 25 bp, Homo sapien
gtgacacccgctgggggccgcgttg

SEQ ID NO: 4150727 - DNA, 25 bp, Homo sapien
cctgcgtgcgcgggcgccctgccac

SEQ ID NO: 4150728 - DNA, 25 bp, Homo sapien
tgagcacgcgcccagcaggccgtcg

SEQ ID NO: 4150729 - DNA, 25 bp, Homo sapien
tcatttactggggtgcggaggcctc

SEQ ID NO: 4150730 - DNA, 25 bp, Homo sapien
cttgcccctgtgactcagcttgagg

SEQ ID NO: 4150731 - DNA, 25 bp, Homo sapien
tgactcagcttgagggggcccaagc

SEQ ID NO: 4150732 - DNA, 25 bp, Homo sapien
ctccggtgggacgtgggtggcgcaa

SEQ ID NO: 4150733 - DNA, 25 bp, Homo sapien
ccggtgggacgtgggtggcgcaagc

SEQ ID NO: 4150734 - DNA, 25 bp, Homo sapien
tgggacgtgggtggcgcaagcacac

SEQ ID NO: 4150735 - DNA, 25 bp, Homo sapien
ggtgggacgtgggtggcgcaagcac

SEQ ID NO: 4150736 - DNA, 25 bp, Homo sapien
tgagtgcagacgagcgccccggctc

SEQ ID NO: 4150737 - DNA, 25 bp, Homo sapien
gctggcatctgtgcttgacgcagag

SEQ ID NO: 4150738 - DNA, 25 bp, Homo sapien
cgcgagcttcggaggtggaggtgcc

SEQ ID NO: 4150739 - DNA, 25 bp, Homo sapien
ctgtgcttgacgcagaggcctccgg

SEQ ID NO: 4150740 - DNA, 25 bp, Homo sapien
ggttgacgggagctcatctaacagg

SEQ ID NO: 4150741 - DNA, 25 bp, Homo sapien
tcccccagtgacaccggatctagga

SEQ ID NO: 4150742 - DNA, 25 bp, Homo sapien
gaggagtggttccagcggagcaggc

SEQ ID NO: 4150743 - DNA, 25 bp, Homo sapien
gacaccggatctaggaaaggttgtg

SEQ ID NO: 4150744 - DNA, 25 bp, Homo sapien
tggttccagcggagcaggctcttcc

SEQ ID NO: 4150745 - DNA, 25 bp, Homo sapien
cctctgttcttccctccctgccctg

SEQ ID NO: 4150746 - DNA, 25 bp, Homo sapien
cctgccctctgttcttccctccctg

SEQ ID NO: 4150747 - DNA, 25 bp, Homo sapien
ctgccctctgttcttccctccctgc

SEQ ID NO: 4150748 - DNA, 25 bp, Homo sapien
ctgttcttccctccctgccctggtt

SEQ ID NO: 4150749 - DNA, 25 bp, Homo sapien
gcagaagaccgtttttctgtctgcc

SEQ ID NO: 4150750 - DNA, 25 bp, Homo sapien
ctggaggcagaagaccgtttttctg

SEQ ID NO: 4150751 - DNA, 25 bp, Homo sapien
ggaggcagaagaccgtttttctgtc

SEQ ID NO: 4150752 - DNA, 25 bp, Homo sapien
aggcagaagaccgtttttctgtctg

SEQ ID NO: 4150753 - DNA, 25 bp, Homo sapien
gggaattcgctcattccttcggaaa

SEQ ID NO: 4150754 - DNA, 25 bp, Homo sapien
gagtctccgctcattgctctctggg

SEQ ID NO: 4150755 - DNA, 25 bp, Homo sapien
ggaattcgtctgaatcgctctggga

SEQ ID NO: 4150756 - DNA, 25 bp, Homo sapien
acccaacattttcccggattgctgg

SEQ ID NO: 4150757 - DNA, 25 bp, Homo sapien
ggggcggcagagacttgagtaacag

SEQ ID NO: 4150758 - DNA, 25 bp, Homo sapien
ttcatgtagacaatgagagcgaaag

SEQ ID NO: 4150759 - DNA, 25 bp, Homo sapien
catgtagacaatgagagcgaaagca

SEQ ID NO: 4150760 - DNA, 25 bp, Homo sapien
catggtcacgctttccgggggcggc

SEQ ID NO: 4150761 - DNA, 25 bp, Homo sapien
gaacacgagagaaacccaagcggcg

SEQ ID NO: 4150762 - DNA, 25 bp, Homo sapien
ctgaacacgagagaaacccaagcgg

SEQ ID NO: 4150763 - DNA, 25 bp, Homo sapien
cgagagaaacccaagcggcggcccg

SEQ ID NO: 4150764 - DNA, 25 bp, Homo sapien
acacgagagaaacccaagcggcggc

SEQ ID NO: 4150765 - DNA, 25 bp, Homo sapien
agcaacagcagggcggcgccacact

SEQ ID NO: 4150766 - DNA, 25 bp, Homo sapien
aatcaggcgcgcgtatctggacccg

SEQ ID NO: 4150767 - DNA, 25 bp, Homo sapien
acactggtcctgcgcgaggctggcc

SEQ ID NO: 4150768 - DNA, 25 bp, Homo sapien
cagcgccgcgactggcggtgcttag

SEQ ID NO: 4150769 - DNA, 25 bp, Homo sapien
caacacgtctggcagccgactttac

SEQ ID NO: 4150770 - DNA, 25 bp, Homo sapien
cggtgagctccaacacgtctggcag

SEQ ID NO: 4150771 - DNA, 25 bp, Homo sapien
acacgtctggcagccgactttacag

SEQ ID NO: 4150772 - DNA, 25 bp, Homo sapien
gagctccaacacgtctggcagccga

SEQ ID NO: 4150773 - DNA, 25 bp, Homo sapien
ccaagattttaatgtccagacactg

SEQ ID NO: 4150774 - DNA, 25 bp, Homo sapien
tttttaaacctctcatatggtgctg

SEQ ID NO: 4150775 - DNA, 25 bp, Homo sapien
tatggtgctgcatgcccaagatttt

SEQ ID NO: 4150776 - DNA, 25 bp, Homo sapien
ctgaagaacatctactaccatcaac

SEQ ID NO: 4150777 - DNA, 25 bp, Homo sapien
tggaaacctggcaactaagggctcc

SEQ ID NO: 4150778 - DNA, 25 bp, Homo sapien
gagtgatcaattaagccagccctag

SEQ ID NO: 4150779 - DNA, 25 bp, Homo sapien
gatcccattgtcctgaaaacgcaag

SEQ ID NO: 4150780 - DNA, 25 bp, Homo sapien
ggtagagcaccaagcgaactttcag

SEQ ID NO: 4150781 - DNA, 25 bp, Homo sapien
agtcctgaaatcaccgtttcctcat

SEQ ID NO: 4150782 - DNA, 25 bp, Homo sapien
tgaaatcaccgtttcctcatcccca

SEQ ID NO: 4150783 - DNA, 25 bp, Homo sapien
atcaccgtttcctcatccccagcag

SEQ ID NO: 4150784 - DNA, 25 bp, Homo sapien
cccagcagtgatggcatgctgcaga

SEQ ID NO: 4150785 - DNA, 25 bp, Homo sapien
cgtgagagtaaagcaagacggcaga

SEQ ID NO: 4150786 - DNA, 25 bp, Homo sapien
aaagcaagacggcagaaagaaggct

SEQ ID NO: 4150787 - DNA, 25 bp, Homo sapien
attctgattcttgggcgtgagagta

SEQ ID NO: 4150788 - DNA, 25 bp, Homo sapien
cttgggcgtgagagtaaagcaagac

SEQ ID NO: 4150789 - DNA, 25 bp, Homo sapien
taaattagctttagaggccaggcgc

SEQ ID NO: 4150790 - DNA, 25 bp, Homo sapien
agaatttgaatgaacggcgtagtcc

SEQ ID NO: 4150791 - DNA, 25 bp, Homo sapien
aaggatggagaaggccctcagaagc

SEQ ID NO: 4150792 - DNA, 25 bp, Homo sapien
ctgactatgacaacttaaagtcatt

SEQ ID NO: 4150793 - DNA, 25 bp, Homo sapien
gactgcgccgaagtttcatgggacc

SEQ ID NO: 4150794 - DNA, 25 bp, Homo sapien
tgttacaaaaagagctcggttccca

SEQ ID NO: 4150795 - DNA, 25 bp, Homo sapien
tcctggaacgagttgtgtgagcccc

SEQ ID NO: 4150796 - DNA, 25 bp, Homo sapien
gactactggtcaattctggagccca

SEQ ID NO: 4150797 - DNA, 25 bp, Homo sapien
gaagaaaccgtggtatatatgcaca

SEQ ID NO: 4150798 - DNA, 25 bp, Homo sapien
gatgaagaaaccgtggtatatatgc

SEQ ID NO: 4150799 - DNA, 25 bp, Homo sapien
ggatgaagaaaccgtggtatatatg

SEQ ID NO: 4150800 - DNA, 25 bp, Homo sapien
tcaaagatcagttgattgtaaatat

SEQ ID NO: 4150801 - DNA, 25 bp, Homo sapien
cagttgattgtaaatatttgtgtta

SEQ ID NO: 4150802 - DNA, 25 bp, Homo sapien
tttgtgttaatttctgggttctcca

SEQ ID NO: 4150803 - DNA, 25 bp, Homo sapien
tgtcaaagatcagttgattgtaaat

SEQ ID NO: 4150804 - DNA, 25 bp, Homo sapien
gaaaagatgccgtattcaataaatg

SEQ ID NO: 4150805 - DNA, 25 bp, Homo sapien
catgcttcacagaagtagataaagc

SEQ ID NO: 4150806 - DNA, 25 bp, Homo sapien
tcattccatgataatggagagaaag

SEQ ID NO: 4150807 - DNA, 25 bp, Homo sapien
gaaagaacctaagtagccaaggcaa

SEQ ID NO: 4150808 - DNA, 25 bp, Homo sapien
ctgagctttggcctgtctggaacat

SEQ ID NO: 4150809 - DNA, 25 bp, Homo sapien
gggtgccctgtgctgacctggcctt

SEQ ID NO: 4150810 - DNA, 25 bp, Homo sapien
ctggtttggcctgggtgccctgtgc

SEQ ID NO: 4150811 - DNA, 25 bp, Homo sapien
tcctcctggagaaggtagagatgct

SEQ ID NO: 4150812 - DNA, 25 bp, Homo sapien
agaatcaacttaaaacttgaacctg

SEQ ID NO: 4150813 - DNA, 25 bp, Homo sapien
taagtgattcctggacatgctttga

SEQ ID NO: 4150814 - DNA, 25 bp, Homo sapien
tcttaacagtaagtgattcctggac

SEQ ID NO: 4150815 - DNA, 25 bp, Homo sapien
ggataagattaagatcgatcccatt

SEQ ID NO: 4150816 - DNA, 25 bp, Homo sapien
ctctgaacaggaataggcaactgtg

SEQ ID NO: 4150817 - DNA, 25 bp, Homo sapien
tgtgcacctgttacgccgtgcttga

SEQ ID NO: 4150818 - DNA, 25 bp, Homo sapien
gatctggggccctctgatgaggcca

SEQ ID NO: 4150819 - DNA, 25 bp, Homo sapien
tgattgggccgttcttgtcatctgg

SEQ ID NO: 4150820 - DNA, 25 bp, Homo sapien
tctggcatggtgtcctcctaggtcg

SEQ ID NO: 4150821 - DNA, 25 bp, Homo sapien
aggaaagcgctgggtcccaagagta

SEQ ID NO: 4150822 - DNA, 25 bp, Homo sapien
gttgtccctccttgttgctcctgct

SEQ ID NO: 4150823 - DNA, 25 bp, Homo sapien
gccaagtatgccacgtgatggagaa

SEQ ID NO: 4150824 - DNA, 25 bp, Homo sapien
tcagatgtattggagttccactgaa

SEQ ID NO: 4150825 - DNA, 25 bp, Homo sapien
tttaatatgtcacgccagtctccca

SEQ ID NO: 4150826 - DNA, 25 bp, Homo sapien
ttgctagtgcgttctgtaccttcag

SEQ ID NO: 4150827 - DNA, 25 bp, Homo sapien
tcaagtttaaaggacgtatttgcca

SEQ ID NO: 4150828 - DNA, 25 bp, Homo sapien
ttaaatgatcctcgtagacaaccac

SEQ ID NO: 4150829 - DNA, 25 bp, Homo sapien
ctctatttctcagactgaagtgcag

SEQ ID NO: 4150830 - DNA, 25 bp, Homo sapien
ccttaaatgatcctcgtagacaacc

SEQ ID NO: 4150831 - DNA, 25 bp, Homo sapien
tctcactctatttctcagactgaag

SEQ ID NO: 4150832 - DNA, 25 bp, Homo sapien
caggtctcctggcaacaagtttctt

SEQ ID NO: 4150833 - DNA, 25 bp, Homo sapien
aaaatgttgatccaggtttcagtta

SEQ ID NO: 4150834 - DNA, 25 bp, Homo sapien
gacaggtctcctggcaacaagtttc

SEQ ID NO: 4150835 - DNA, 25 bp, Homo sapien
caggtttcagttatatatcttttgt

SEQ ID NO: 4150836 - DNA, 25 bp, Homo sapien
tggtcttattctgcttatctctgct

SEQ ID NO: 4150837 - DNA, 25 bp, Homo sapien
tctggtcttattctgcttatctctg

SEQ ID NO: 4150838 - DNA, 25 bp, Homo sapien
ctcctcctgagtttgggtatgtcat

SEQ ID NO: 4150839 - DNA, 25 bp, Homo sapien
tcctcctgagtttgggtatgtcatg

SEQ ID NO: 4150840 - DNA, 25 bp, Homo sapien
tggtccctgagaatgacgctcagtc

SEQ ID NO: 4150841 - DNA, 25 bp, Homo sapien
tgcaggtctctgattagtgcccagt

SEQ ID NO: 4150842 - DNA, 25 bp, Homo sapien
cctgagaatggcgtttgtgcctttt

SEQ ID NO: 4150843 - DNA, 25 bp, Homo sapien
gaatgacgctcagtcctggtccctg

SEQ ID NO: 4150844 - DNA, 25 bp, Homo sapien
cctgtctaacggttggtcattccca

SEQ ID NO: 4150845 - DNA, 25 bp, Homo sapien
ggcaggaggtaggtgctgccctgca

SEQ ID NO: 4150846 - DNA, 25 bp, Homo sapien
tgcaggccctgtctaacggttggtc

SEQ ID NO: 4150847 - DNA, 25 bp, Homo sapien
tctaacggttggtcattcccatggg

SEQ ID NO: 4150848 - DNA, 25 bp, Homo sapien
cacagtgaggactgaatcaggttgt

SEQ ID NO: 4150849 - DNA, 25 bp, Homo sapien
ccacagtgaggactgaatcaggttg

SEQ ID NO: 4150850 - DNA, 25 bp, Homo sapien
tagcacagcactcccattgttttgg

SEQ ID NO: 4150851 - DNA, 25 bp, Homo sapien
tttgggttccggttttagcacagca

SEQ ID NO: 4150852 - DNA, 25 bp, Homo sapien
ttagcacagcactcccattgttttg

SEQ ID NO: 4150853 - DNA, 25 bp, Homo sapien
tccggttttagcacagcactcccat

SEQ ID NO: 4150854 - DNA, 25 bp, Homo sapien
tgtggtggaacatatttcacaccag

SEQ ID NO: 4150855 - DNA, 25 bp, Homo sapien
ctgtggtggaacatatttcacacca

SEQ ID NO: 4150856 - DNA, 25 bp, Homo sapien
caccagcctggcagtaaacacttgt

SEQ ID NO: 4150857 - DNA, 25 bp, Homo sapien
gctgctaaagcatagtgtgttgtgt

SEQ ID NO: 4150858 - DNA, 25 bp, Homo sapien
ggtcgtcatccgctaaagcacggcg

SEQ ID NO: 4150859 - DNA, 25 bp, Homo sapien
tcgtcatccgctaaagcacggcgtg

SEQ ID NO: 4150860 - DNA, 25 bp, Homo sapien
gtcatccgctaaagcacggcgtgtt

SEQ ID NO: 4150861 - DNA, 25 bp, Homo sapien
gaagtgcaggtgcaggccgcggacc

SEQ ID NO: 4150862 - DNA, 25 bp, Homo sapien
ggcctgaagtgcaggtgcaggccgc

SEQ ID NO: 4150863 - DNA, 25 bp, Homo sapien
ctgaagtgcaggtgcaggccgcgga

SEQ ID NO: 4150864 - DNA, 25 bp, Homo sapien
acaggcgtggggtcccggcagtgaa

SEQ ID NO: 4150865 - DNA, 25 bp, Homo sapien
ttctatgtccctgcgggtcggtgcg

SEQ ID NO: 4150866 - DNA, 25 bp, Homo sapien
cacccagaggcggtcttgtagctgg

SEQ ID NO: 4150867 - DNA, 25 bp, Homo sapien
cctccggaagtgcggcacccagagg

SEQ ID NO: 4150868 - DNA, 25 bp, Homo sapien
cgggtcggtgcgagggcgaagagga

SEQ ID NO: 4150869 - DNA, 25 bp, Homo sapien
agcctcatgggaaatgtagtgtcac

SEQ ID NO: 4150870 - DNA, 25 bp, Homo sapien
tgggcaaaacagaatgtccggcttg

SEQ ID NO: 4150871 - DNA, 25 bp, Homo sapien
cagaatgtccggcttgggttcctaa

SEQ ID NO: 4150872 - DNA, 25 bp, Homo sapien
aaccggggaccgcagagcctcatgg

SEQ ID NO: 4150873 - DNA, 25 bp, Homo sapien
tccgggtctctgggtaactggactc

SEQ ID NO: 4150874 - DNA, 25 bp, Homo sapien
cgggtctctgggtaactggactcac

SEQ ID NO: 4150875 - DNA, 25 bp, Homo sapien
ccgggtctctgggtaactggactca

SEQ ID NO: 4150876 - DNA, 25 bp, Homo sapien
caattgcaagatccgaggagatgaa

SEQ ID NO: 4150877 - DNA, 25 bp, Homo sapien
gcaattgcaagatccgaggagatga

SEQ ID NO: 4150878 - DNA, 25 bp, Homo sapien
gagcaattgcaagatccgaggagat

SEQ ID NO: 4150879 - DNA, 25 bp, Homo sapien
ggagcaattgcaagatccgaggaga

SEQ ID NO: 4150880 - DNA, 25 bp, Homo sapien
gatttccgctatgtaacccctgcca

SEQ ID NO: 4150881 - DNA, 25 bp, Homo sapien
tccgatattggagacaacagggctc

SEQ ID NO: 4150882 - DNA, 25 bp, Homo sapien
gatccccagataccataccaatagg

SEQ ID NO: 4150883 - DNA, 25 bp, Homo sapien
taatctaggcgtctgagaaagcaag

SEQ ID NO: 4150884 - DNA, 25 bp, Homo sapien
tgtttctgaacactgaagtagttca

SEQ ID NO: 4150885 - DNA, 25 bp, Homo sapien
gtagttcatcgaaattattttccag

SEQ ID NO: 4150886 - DNA, 25 bp, Homo sapien
tctgaacactgaagtagttcatcga

SEQ ID NO: 4150887 - DNA, 25 bp, Homo sapien
cactgaagtagttcatcgaaattat

SEQ ID NO: 4150888 - DNA, 25 bp, Homo sapien
gcttgcacacttgattgtacgctac

SEQ ID NO: 4150889 - DNA, 25 bp, Homo sapien
agtcatcatcaacagtcccggagcc

SEQ ID NO: 4150890 - DNA, 25 bp, Homo sapien
gtcatcatcaacagtcccggagccc

SEQ ID NO: 4150891 - DNA, 25 bp, Homo sapien
acagtcatcatcaacagtcccggag

SEQ ID NO: 4150892 - DNA, 25 bp, Homo sapien
catcatcaacagtcccggagcccat

SEQ ID NO: 4150893 - DNA, 25 bp, Homo sapien
aaacactttctcatgcacaaaccac

SEQ ID NO: 4150894 - DNA, 25 bp, Homo sapien
tcagatgttaaacactttctcatgc

SEQ ID NO: 4150895 - DNA, 25 bp, Homo sapien
gatgttaaacactttctcatgcaca

SEQ ID NO: 4150896 - DNA, 25 bp, Homo sapien
taaacactttctcatgcacaaacca

SEQ ID NO: 4150897 - DNA, 25 bp, Homo sapien
taaatgtagactcgccagcaaagcc

SEQ ID NO: 4150898 - DNA, 25 bp, Homo sapien
ataaatgtagactcgccagcaaagc

SEQ ID NO: 4150899 - DNA, 25 bp, Homo sapien
gataaatgtagactcgccagcaaag

SEQ ID NO: 4150900 - DNA, 25 bp, Homo sapien
tgcaggagccacacttaacgggcta

SEQ ID NO: 4150901 - DNA, 25 bp, Homo sapien
gccagactgccttagagggacttag

SEQ ID NO: 4150902 - DNA, 25 bp, Homo sapien
ggttttcaaactccactacgcaatg

SEQ ID NO: 4150903 - DNA, 25 bp, Homo sapien
tctaatacgacctacctacctggct

SEQ ID NO: 4150904 - DNA, 25 bp, Homo sapien
caaggttgaagggtgactagcagac

SEQ ID NO: 4150905 - DNA, 25 bp, Homo sapien
acagtcaagtgtcaaaaatgttacc

SEQ ID NO: 4150906 - DNA, 25 bp, Homo sapien
gctgattggatttgctggcaaggtt

SEQ ID NO: 4150907 - DNA, 25 bp, Homo sapien
aactgccacagtcaagtgtcaaaaa

SEQ ID NO: 4150908 - DNA, 25 bp, Homo sapien
cttccaatggcggtaattctagctg

SEQ ID NO: 4150909 - DNA, 25 bp, Homo sapien
tctagctgagtgttattctttaagc

SEQ ID NO: 4150910 - DNA, 25 bp, Homo sapien
tggcggtaattctagctgagtgtta

SEQ ID NO: 4150911 - DNA, 25 bp, Homo sapien
gctgagtgttattctttaagctcaa

SEQ ID NO: 4150912 - DNA, 25 bp, Homo sapien
ggatagcacaatgatgttgtttgaa

SEQ ID NO: 4150913 - DNA, 25 bp, Homo sapien
ggttactggagatatggatagcaca

SEQ ID NO: 4150914 - DNA, 25 bp, Homo sapien
cggtttgctagatgaagctgactca

SEQ ID NO: 4150915 - DNA, 25 bp, Homo sapien
gctgactcatagtgtggttactgga

SEQ ID NO: 4150916 - DNA, 25 bp, Homo sapien
ctccagctgagtggataagcctcct

SEQ ID NO: 4150917 - DNA, 25 bp, Homo sapien
cataagtggaccgaggattgttcat

SEQ ID NO: 4150918 - DNA, 25 bp, Homo sapien
ccttcataagtggaccgaggattgt

SEQ ID NO: 4150919 - DNA, 25 bp, Homo sapien
ggataagcctccttcataagtggac

SEQ ID NO: 4150920 - DNA, 25 bp, Homo sapien
catttccactagaattcatagagag

SEQ ID NO: 4150921 - DNA, 25 bp, Homo sapien
atttccactagaattcatagagaga

SEQ ID NO: 4150922 - DNA, 25 bp, Homo sapien
tttccatttccactagaattcatag

SEQ ID NO: 4150923 - DNA, 25 bp, Homo sapien
tccatttccactagaattcatagag

SEQ ID NO: 4150924 - DNA, 25 bp, Homo sapien
tgtaaagccccacacaatttgcatg

SEQ ID NO: 4150925 - DNA, 25 bp, Homo sapien
gactggaacttatgaccatagtgac

SEQ ID NO: 4150926 - DNA, 25 bp, Homo sapien
tcacaggtttaaagtgcaaggcaac

SEQ ID NO: 4150927 - DNA, 25 bp, Homo sapien
taattcacgcccattacaagaagct

SEQ ID NO: 4150928 - DNA, 25 bp, Homo sapien
atgttaattcgtggtctagaaggca

SEQ ID NO: 4150929 - DNA, 25 bp, Homo sapien
tgttaattcgtggtctagaaggcat

SEQ ID NO: 4150930 - DNA, 25 bp, Homo sapien
catgttaattcgtggtctagaaggc

SEQ ID NO: 4150931 - DNA, 25 bp, Homo sapien
tgaaatctccccaaatgctttctct

SEQ ID NO: 4150932 - DNA, 25 bp, Homo sapien
ttgaaatctccccaaatgctttctc

SEQ ID NO: 4150933 - DNA, 25 bp, Homo sapien
attttgaaatctccccaaatgcttt

SEQ ID NO: 4150934 - DNA, 25 bp, Homo sapien
acaattttgaaatctccccaaatgc

SEQ ID NO: 4150935 - DNA, 25 bp, Homo sapien
accataattctctaatgagagtgga

SEQ ID NO: 4150936 - DNA, 25 bp, Homo sapien
tgagagtggaactacctagtagctt

SEQ ID NO: 4150937 - DNA, 25 bp, Homo sapien
cccagaggatgagggttatgctagt

SEQ ID NO: 4150938 - DNA, 25 bp, Homo sapien
tcatcagaggaccaaaccataattc

SEQ ID NO: 4150939 - DNA, 25 bp, Homo sapien
gatgactcagattcagactctccaa

SEQ ID NO: 4150940 - DNA, 25 bp, Homo sapien
gactctccaaatacatccgaatctg

SEQ ID NO: 4150941 - DNA, 25 bp, Homo sapien
gactgagttgtgcaaaagatgactc

SEQ ID NO: 4150942 - DNA, 25 bp, Homo sapien
tgctaaatccaacactaggactgag

SEQ ID NO: 4150943 - DNA, 25 bp, Homo sapien
tatactctcatcatctacccttccc

SEQ ID NO: 4150944 - DNA, 25 bp, Homo sapien
cacatcctatactctcatcatctac

SEQ ID NO: 4150945 - DNA, 25 bp, Homo sapien
cttctcatttcctactccacatcct

SEQ ID NO: 4150946 - DNA, 25 bp, Homo sapien
catttcctactccacatcctatact

SEQ ID NO: 4150947 - DNA, 25 bp, Homo sapien
catttcttggatattatgttctgat

SEQ ID NO: 4150948 - DNA, 25 bp, Homo sapien
tttgagtataatatgcctacatgca

SEQ ID NO: 4150949 - DNA, 25 bp, Homo sapien
ttgcttgcatagcttctgaaaggaa

SEQ ID NO: 4150950 - DNA, 25 bp, Homo sapien
ctgaagtttgagtataatatgccta

SEQ ID NO: 4150951 - DNA, 25 bp, Homo sapien
ttaagagcgctttgccgcatccatc

SEQ ID NO: 4150952 - DNA, 25 bp, Homo sapien
catctggtcactggatgggccgatc

SEQ ID NO: 4150953 - DNA, 25 bp, Homo sapien
catgtctctcttagtggcactgtgt

SEQ ID NO: 4150954 - DNA, 25 bp, Homo sapien
tctgaggattaagagcgctttgccg

SEQ ID NO: 4150955 - DNA, 25 bp, Homo sapien
gctttaccgccacctaactcagaag

SEQ ID NO: 4150956 - DNA, 25 bp, Homo sapien
catatcagtcagttgtcccatctca

SEQ ID NO: 4150957 - DNA, 25 bp, Homo sapien
gatgatagaggaagaatgaattctc

SEQ ID NO: 4150958 - DNA, 25 bp, Homo sapien
cctgaaagctgtattctatcctgta

SEQ ID NO: 4150959 - DNA, 25 bp, Homo sapien
ggaactcatctatgcagaaggatat

SEQ ID NO: 4150960 - DNA, 25 bp, Homo sapien
tatgagatctgcactgggaacgggt

SEQ ID NO: 4150961 - DNA, 25 bp, Homo sapien
tcccaagaacggaccatgtagctct

SEQ ID NO: 4150962 - DNA, 25 bp, Homo sapien
ctccaggagcaagttcaggtgctag

SEQ ID NO: 4150963 - DNA, 25 bp, Homo sapien
taacacgtacacctacatgatgaca

SEQ ID NO: 4150964 - DNA, 25 bp, Homo sapien
taaggaatcaaatgtgatgatatta

SEQ ID NO: 4150965 - DNA, 25 bp, Homo sapien
ttaacacgtacacctacatgatgac

SEQ ID NO: 4150966 - DNA, 25 bp, Homo sapien
atgtgatgatattaacacgtacacc

SEQ ID NO: 4150967 - DNA, 25 bp, Homo sapien
aaaacataatgataacggtcctctc

SEQ ID NO: 4150968 - DNA, 25 bp, Homo sapien
gtggacagtctgtaaacgtaatcag

SEQ ID NO: 4150969 - DNA, 25 bp, Homo sapien
ccagtatgtacgtggacagtctgta

SEQ ID NO: 4150970 - DNA, 25 bp, Homo sapien
aggtgtctgtggtccagtatgtacg

SEQ ID NO: 4150971 - DNA, 25 bp, Homo sapien
acaaattgacttcacctagccggag

SEQ ID NO: 4150972 - DNA, 25 bp, Homo sapien
gacaaattgacttcacctagccgga

SEQ ID NO: 4150973 - DNA, 25 bp, Homo sapien
caaattgacttcacctagccggagc

SEQ ID NO: 4150974 - DNA, 25 bp, Homo sapien
caacttcggcataagcactgcgtca

SEQ ID NO: 4150975 - DNA, 25 bp, Homo sapien
gggctcgtatgtcctggaaatcaac

SEQ ID NO: 4150976 - DNA, 25 bp, Homo sapien
ggcataagcactgcgtcaacagcag

SEQ ID NO: 4150977 - DNA, 25 bp, Homo sapien
tatgtcctggaaatcaacttcggca

SEQ ID NO: 4150978 - DNA, 25 bp, Homo sapien
tatgtatttttcaaagtattcaggc

SEQ ID NO: 4150979 - DNA, 25 bp, Homo sapien
cttatgtatttttcaaagtattcag

SEQ ID NO: 4150980 - DNA, 25 bp, Homo sapien
atgtatttttcaaagtattcaggca

SEQ ID NO: 4150981 - DNA, 25 bp, Homo sapien
tgtatttttcaaagtattcaggcat

SEQ ID NO: 4150982 - DNA, 25 bp, Homo sapien
gaagaattatgtgctcctcctcgaa

SEQ ID NO: 4150983 - DNA, 25 bp, Homo sapien
agactagaaactgagccatcctttg

SEQ ID NO: 4150984 - DNA, 25 bp, Homo sapien
cacttcataccctctttttcgtaag

SEQ ID NO: 4150985 - DNA, 25 bp, Homo sapien
ttttcgtaagagaaacttggagagc

SEQ ID NO: 4150986 - DNA, 25 bp, Homo sapien
cattaattttataccctgggctaag

SEQ ID NO: 4150987 - DNA, 25 bp, Homo sapien
agaggctgtcgggtcttcggccaca

SEQ ID NO: 4150988 - DNA, 25 bp, Homo sapien
aggactagactgactgggccttctg

SEQ ID NO: 4150989 - DNA, 25 bp, Homo sapien
ttttgctgttttagagaggtgcctg

SEQ ID NO: 4150990 - DNA, 25 bp, Homo sapien
tgaactccgaggatatcaattctct

SEQ ID NO: 4150991 - DNA, 25 bp, Homo sapien
aaagaaatcttacagagtgggtgga

SEQ ID NO: 4150992 - DNA, 25 bp, Homo sapien
gtggagttggctacctaagccagga

SEQ ID NO: 4150993 - DNA, 25 bp, Homo sapien
agacttagtctgcttcccggccaaa

SEQ ID NO: 4150994 - DNA, 25 bp, Homo sapien
cagtgtccgacaataaaaaggcttc

SEQ ID NO: 4150995 - DNA, 25 bp, Homo sapien
taggtaatttgccactcagctctcc

SEQ ID NO: 4150996 - DNA, 25 bp, Homo sapien
tagaaatgtgccaaattacccagaa

SEQ ID NO: 4150997 - DNA, 25 bp, Homo sapien
caattcggatagctggcaaacaggg

SEQ ID NO: 4150998 - DNA, 25 bp, Homo sapien
cattcaaaggtactgtaggcttcaa

SEQ ID NO: 4150999 - DNA, 25 bp, Homo sapien
tcacaactctagagggtagaagttc

SEQ ID NO: 4151000 - DNA, 25 bp, Homo sapien
agcatcatatccctcaagcatgtgt

SEQ ID NO: 4151001 - DNA, 25 bp, Homo sapien
ggcttgcagatgcaatactccattc

SEQ ID NO: 4151002 - DNA, 25 bp, Homo sapien
gggaaataagaatcaggtccttcat

SEQ ID NO: 4151003 - DNA, 25 bp, Homo sapien
tgggtattaaaagctcttgggtcat

SEQ ID NO: 4151004 - DNA, 25 bp, Homo sapien
tatttaatgtgggtattaaaagctc

SEQ ID NO: 4151005 - DNA, 25 bp, Homo sapien
aatgtgggtattaaaagctcttggg

SEQ ID NO: 4151006 - DNA, 25 bp, Homo sapien
cttctctttatttaatgtgggtatt

SEQ ID NO: 4151007 - DNA, 25 bp, Homo sapien
catggagactttttgattggagcag

SEQ ID NO: 4151008 - DNA, 25 bp, Homo sapien
gattgaacacacgtaagaagtctaa

SEQ ID NO: 4151009 - DNA, 25 bp, Homo sapien
gctggcatggtagtacaacagaaac

SEQ ID NO: 4151010 - DNA, 25 bp, Homo sapien
actagaatttgtagccctgatggcc

SEQ ID NO: 4151011 - DNA, 25 bp, Homo sapien
catggactttgattcggggaatatg

SEQ ID NO: 4151012 - DNA, 25 bp, Homo sapien
gaaatatcatggactttgattcggg

SEQ ID NO: 4151013 - DNA, 25 bp, Homo sapien
ttgaaatatcatggactttgattcg

SEQ ID NO: 4151014 - DNA, 25 bp, Homo sapien
tttgaaaataacatgcaatatgatg

SEQ ID NO: 4151015 - DNA, 25 bp, Homo sapien
gcatctctctagaaccatccacaag

SEQ ID NO: 4151016 - DNA, 25 bp, Homo sapien
gttcatgtggctctcgcatatcagc

SEQ ID NO: 4151017 - DNA, 25 bp, Homo sapien
tcacctggaccagcattgcactttt

SEQ ID NO: 4151018 - DNA, 25 bp, Homo sapien
ggctctcgcatatcagcactgggat

SEQ ID NO: 4151019 - DNA, 25 bp, Homo sapien
caggtgctctcattagttaagggaa

SEQ ID NO: 4151020 - DNA, 25 bp, Homo sapien
aacaggtgctctcattagttaaggg

SEQ ID NO: 4151021 - DNA, 25 bp, Homo sapien
gaaacaggtgctctcattagttaag

SEQ ID NO: 4151022 - DNA, 25 bp, Homo sapien
ggtgctctcattagttaagggaatt

SEQ ID NO: 4151023 - DNA, 25 bp, Homo sapien
tctggcccctttggcctctggtgtc

SEQ ID NO: 4151024 - DNA, 25 bp, Homo sapien
catatgggcctgcagacattccggt

SEQ ID NO: 4151025 - DNA, 25 bp, Homo sapien
cagtctggcccctttggcctctggt

SEQ ID NO: 4151026 - DNA, 25 bp, Homo sapien
gacattccggttcagtctggcccct

SEQ ID NO: 4151027 - DNA, 25 bp, Homo sapien
agtcagcacttggaatatattggct

SEQ ID NO: 4151028 - DNA, 25 bp, Homo sapien
tcacatttcagagtcagcacttgga

SEQ ID NO: 4151029 - DNA, 25 bp, Homo sapien
catttcagagtcagcacttggaata

SEQ ID NO: 4151030 - DNA, 25 bp, Homo sapien
tcagagtcagcacttggaatatatt

SEQ ID NO: 4151031 - DNA, 25 bp, Homo sapien
agtacgcagtcagccctgcttctac

SEQ ID NO: 4151032 - DNA, 25 bp, Homo sapien
tcagtacgcagtcagccctgcttct

SEQ ID NO: 4151033 - DNA, 25 bp, Homo sapien
cagtacgcagtcagccctgcttcta

SEQ ID NO: 4151034 - DNA, 25 bp, Homo sapien
atttcacaaaatttctcacatcctc

SEQ ID NO: 4151035 - DNA, 25 bp, Homo sapien
aatttcacaaaatttctcacatcct

SEQ ID NO: 4151036 - DNA, 25 bp, Homo sapien
agcattaatcattgaaaaacctgag

SEQ ID NO: 4151037 - DNA, 25 bp, Homo sapien
atagcattaatcattgaaaaacctg

SEQ ID NO: 4151038 - DNA, 25 bp, Homo sapien
gagcatcaaaacgaagagaagttca

SEQ ID NO: 4151039 - DNA, 25 bp, Homo sapien
agttcaagcctagtaattttctcca

SEQ ID NO: 4151040 - DNA, 25 bp, Homo sapien
cgaagagaagttcaagcctagtaat

SEQ ID NO: 4151041 - DNA, 25 bp, Homo sapien
gagaggaagagcatcaaaacgaaga

SEQ ID NO: 4151042 - DNA, 25 bp, Homo sapien
ccaagcctgccccaataaccatttc

SEQ ID NO: 4151043 - DNA, 25 bp, Homo sapien
ccacacgtatacactggtctttgaa

SEQ ID NO: 4151044 - DNA, 25 bp, Homo sapien
ctcacaggccacacgtatacactgg

SEQ ID NO: 4151045 - DNA, 25 bp, Homo sapien
tttctgtctcaatggtagttcctgt

SEQ ID NO: 4151046 - DNA, 25 bp, Homo sapien
gcaaccacattgactgggattgaaa

SEQ ID NO: 4151047 - DNA, 25 bp, Homo sapien
tttggcacgtcaaagtactcccatg

SEQ ID NO: 4151048 - DNA, 25 bp, Homo sapien
tactcccatgagtaaccccgtttca

SEQ ID NO: 4151049 - DNA, 25 bp, Homo sapien
gagaaaaaatctccgtcctgcattc

SEQ ID NO: 4151050 - DNA, 25 bp, Homo sapien
gtatggtctgatacctgacatcccc

SEQ ID NO: 4151051 - DNA, 25 bp, Homo sapien
gaggaataatgctataatcagactt

SEQ ID NO: 4151052 - DNA, 25 bp, Homo sapien
taatccaggctacaaccaactgttt

SEQ ID NO: 4151053 - DNA, 25 bp, Homo sapien
caagtatggtctgatacctgacatt

SEQ ID NO: 4151054 - DNA, 25 bp, Homo sapien
ggagcgtcacatccacgagctgctt

SEQ ID NO: 4151055 - DNA, 25 bp, Homo sapien
gactccctctgatccgttgagctgt

SEQ ID NO: 4151056 - DNA, 25 bp, Homo sapien
ggagttctgacaaccagtctgcttg

SEQ ID NO: 4151057 - DNA, 25 bp, Homo sapien
tgcttcctgcgctgagtgtgcagct

SEQ ID NO: 4151058 - DNA, 25 bp, Homo sapien
attatgtcgttaaaaccaaacagag

SEQ ID NO: 4151059 - DNA, 25 bp, Homo sapien
tatgtcgttaaaaccaaacagagga

SEQ ID NO: 4151060 - DNA, 25 bp, Homo sapien
tgtgttaattatggatgaatcatct

SEQ ID NO: 4151061 - DNA, 25 bp, Homo sapien
gtgttaattatggatgaatcatctg

SEQ ID NO: 4151062 - DNA, 25 bp, Homo sapien
tattgtgttaattatggatgaatca

SEQ ID NO: 4151063 - DNA, 25 bp, Homo sapien
ttgtgttaattatggatgaatcatc

SEQ ID NO: 4151064 - DNA, 25 bp, Homo sapien
tgcctatgtgactcttgctcccgct

SEQ ID NO: 4151065 - DNA, 25 bp, Homo sapien
ttaggagaaacaccgacacttagat

SEQ ID NO: 4151066 - DNA, 25 bp, Homo sapien
tagatgtccactgatagttctcctt

SEQ ID NO: 4151067 - DNA, 25 bp, Homo sapien
cattgggcacggattgatacattct

SEQ ID NO: 4151068 - DNA, 25 bp, Homo sapien
ctgggatatcaggtatgagcctgaa

SEQ ID NO: 4151069 - DNA, 25 bp, Homo sapien
agtgtattcttatgacgcccaggct

SEQ ID NO: 4151070 - DNA, 25 bp, Homo sapien
gctggggcatactggggcaatcata

SEQ ID NO: 4151071 - DNA, 25 bp, Homo sapien
caggtatgagcctgaaaatctattt

SEQ ID NO: 4151072 - DNA, 25 bp, Homo sapien
gaccaaggaacctgtatcgctgcag

SEQ ID NO: 4151073 - DNA, 25 bp, Homo sapien
gacctttagaaggtgatgtgagcag

SEQ ID NO: 4151074 - DNA, 25 bp, Homo sapien
ccagctgaagaacaggtaatgatct

SEQ ID NO: 4151075 - DNA, 25 bp, Homo sapien
ccatacgaaacaagctgtgggctgg

SEQ ID NO: 4151076 - DNA, 25 bp, Homo sapien
gcaagtgtttgaagcctcaaaggta

SEQ ID NO: 4151077 - DNA, 25 bp, Homo sapien
ttttcagcatatgggtaactgacgg

SEQ ID NO: 4151078 - DNA, 25 bp, Homo sapien
actgacggatttttagctttagact

SEQ ID NO: 4151079 - DNA, 25 bp, Homo sapien
atagtgcttgggcagacgatgcaag

SEQ ID NO: 4151080 - DNA, 25 bp, Homo sapien
gatggcggacagtgcttgggcggat

SEQ ID NO: 4151081 - DNA, 25 bp, Homo sapien
actgatactgactgtgtgtgagaca

SEQ ID NO: 4151082 - DNA, 25 bp, Homo sapien
gacagtgcttgggcggacgatgctg

SEQ ID NO: 4151083 - DNA, 25 bp, Homo sapien
cggacagtgcttgggcggatgatgc

SEQ ID NO: 4151084 - DNA, 25 bp, Homo sapien
ggcaatttagatttgtggttagacg

SEQ ID NO: 4151085 - DNA, 25 bp, Homo sapien
tctctgtggataaattcctccagtg

SEQ ID NO: 4151086 - DNA, 25 bp, Homo sapien
aaagaacagttgagctttgccaaac

SEQ ID NO: 4151087 - DNA, 25 bp, Homo sapien
gatttgtggttagacggccttggct

SEQ ID NO: 4151088 - DNA, 25 bp, Homo sapien
ggtagatcccaatgagatatcttcg

SEQ ID NO: 4151089 - DNA, 25 bp, Homo sapien
tgggtagatcccaatgagatatctt

SEQ ID NO: 4151090 - DNA, 25 bp, Homo sapien
gatcccaatgagatatcttcgttca

SEQ ID NO: 4151091 - DNA, 25 bp, Homo sapien
ggcttttgggtagatcccaatgaga

SEQ ID NO: 4151092 - DNA, 25 bp, Homo sapien
tatcccgcaatgtgctaggactcat

SEQ ID NO: 4151093 - DNA, 25 bp, Homo sapien
tggaatttttcccatcgagtcaggg

SEQ ID NO: 4151094 - DNA, 25 bp, Homo sapien
tgtggtaaatttgggcacaaaccac

SEQ ID NO: 4151095 - DNA, 25 bp, Homo sapien
caaaccacaggaagttgtgatgcag

SEQ ID NO: 4151096 - DNA, 25 bp, Homo sapien
caaggaaaatctcattattcttcag

SEQ ID NO: 4151097 - DNA, 25 bp, Homo sapien
taattcgcttattcttccttgcctt

SEQ ID NO: 4151098 - DNA, 25 bp, Homo sapien
ccttcactttcaaccaataatgtcc

SEQ ID NO: 4151099 - DNA, 25 bp, Homo sapien
ccccatttgtggtcaagtgtttgat

SEQ ID NO: 4151100 - DNA, 25 bp, Homo sapien
gtacatcaacaagtcctacaacatt

SEQ ID NO: 4151101 - DNA, 25 bp, Homo sapien
ttaaagatctcctttgaaacatgga

SEQ ID NO: 4151102 - DNA, 25 bp, Homo sapien
taagttgtctccattgttgaggtca

SEQ ID NO: 4151103 - DNA, 25 bp, Homo sapien
gatggctggatgatacttgaacttt

SEQ ID NO: 4151104 - DNA, 25 bp, Homo sapien
cctattcttcgaatgtttcttaaat

SEQ ID NO: 4151105 - DNA, 25 bp, Homo sapien
tcctattcttcgaatgtttcttaaa

SEQ ID NO: 4151106 - DNA, 25 bp, Homo sapien
tactaaacttgctactctgcactgt

SEQ ID NO: 4151107 - DNA, 25 bp, Homo sapien
tactctgcactgtaattgtttgtgt

SEQ ID NO: 4151108 - DNA, 25 bp, Homo sapien
catctctgaggaattactggacata

SEQ ID NO: 4151109 - DNA, 25 bp, Homo sapien
tattctgtatgaactaacttgtttt

SEQ ID NO: 4151110 - DNA, 25 bp, Homo sapien
tagagggttcctaaacgtgtcaagc

SEQ ID NO: 4151111 - DNA, 25 bp, Homo sapien
ttttgctccagcaaccaactgcgta

SEQ ID NO: 4151112 - DNA, 25 bp, Homo sapien
gctgtgcatagcaaagaggccatga

SEQ ID NO: 4151113 - DNA, 25 bp, Homo sapien
catgatttagttctcttcagcagcg

SEQ ID NO: 4151114 - DNA, 25 bp, Homo sapien
cctctaagtctcaaagagaagctga

SEQ ID NO: 4151115 - DNA, 25 bp, Homo sapien
ccttgaaggtcactaggatgctgca

SEQ ID NO: 4151116 - DNA, 25 bp, Homo sapien
tacagttaggagtgtttcccttgaa

SEQ ID NO: 4151117 - DNA, 25 bp, Homo sapien
gagaagctgaaccacccttgaaggt

SEQ ID NO: 4151118 - DNA, 25 bp, Homo sapien
actcagggttcttaacagtaccata

SEQ ID NO: 4151119 - DNA, 25 bp, Homo sapien
tggcagttgcggcacatcagatatg

SEQ ID NO: 4151120 - DNA, 25 bp, Homo sapien
tcattatgactgacctgtgaccacc

SEQ ID NO: 4151121 - DNA, 25 bp, Homo sapien
tcagatatgccagatgcacgtcagt

SEQ ID NO: 4151122 - DNA, 25 bp, Homo sapien
catgctctgacatctgccagttccg

SEQ ID NO: 4151123 - DNA, 25 bp, Homo sapien
tccagtgccttatcagggacgctct

SEQ ID NO: 4151124 - DNA, 25 bp, Homo sapien
catcctctgggaataccctgaacgg

SEQ ID NO: 4151125 - DNA, 25 bp, Homo sapien
cagcctgtcttgtcacatgctctga

SEQ ID NO: 4151126 - DNA, 25 bp, Homo sapien
gaaaacctgatctatatctctttgc

SEQ ID NO: 4151127 - DNA, 25 bp, Homo sapien
caagtcacacaattcttggatgttg

SEQ ID NO: 4151128 - DNA, 25 bp, Homo sapien
tctaatttgcgggtacgctttccat

SEQ ID NO: 4151129 - DNA, 25 bp, Homo sapien
gggtacgctttccatacaagtcaca

SEQ ID NO: 4151130 - DNA, 25 bp, Homo sapien
cagactggctccgtccgttgcagat

SEQ ID NO: 4151131 - DNA, 25 bp, Homo sapien
aagtctatggccagatgtatacggc

SEQ ID NO: 4151132 - DNA, 25 bp, Homo sapien
tatacggccctgtttgatcgttgag

SEQ ID NO: 4151133 - DNA, 25 bp, Homo sapien
tgcataacacactcataatcggtct

SEQ ID NO: 4151134 - DNA, 25 bp, Homo sapien
cattgcctttgttaaaagcctgttt

SEQ ID NO: 4151135 - DNA, 25 bp, Homo sapien
ttgttaattgctcatccttacttaa

SEQ ID NO: 4151136 - DNA, 25 bp, Homo sapien
caccttcattgcctttgttaaaagc

SEQ ID NO: 4151137 - DNA, 25 bp, Homo sapien
gttaattgctcatccttacttaatc

SEQ ID NO: 4151138 - DNA, 25 bp, Homo sapien
tacctttatcttcacttgctttaac

SEQ ID NO: 4151139 - DNA, 25 bp, Homo sapien
ttacctttatcttcacttgctttaa

SEQ ID NO: 4151140 - DNA, 25 bp, Homo sapien
ctgtcatccggtggacttttacctt

SEQ ID NO: 4151141 - DNA, 25 bp, Homo sapien
gtgcatgtcagaggtatgggatact

SEQ ID NO: 4151142 - DNA, 25 bp, Homo sapien
ccagtctttctaccagattttgcat

SEQ ID NO: 4151143 - DNA, 25 bp, Homo sapien
catgtcagaggtatgggatactgcc

SEQ ID NO: 4151144 - DNA, 25 bp, Homo sapien
cactgccctctccagtctttctacc

SEQ ID NO: 4151145 - DNA, 25 bp, Homo sapien
ttgcacatatggagctgtctccata

SEQ ID NO: 4151146 - DNA, 25 bp, Homo sapien
cttgcacatatggagctgtctccat

SEQ ID NO: 4151147 - DNA, 25 bp, Homo sapien
tgcacatatggagctgtctccatac

SEQ ID NO: 4151148 - DNA, 25 bp, Homo sapien
tcgctccaacgtcaaacctgtgtgg

SEQ ID NO: 4151149 - DNA, 25 bp, Homo sapien
tgctggctgttgacactgagaatct

SEQ ID NO: 4151150 - DNA, 25 bp, Homo sapien
gaatctgtaaccaacagcgctcgct

SEQ ID NO: 4151151 - DNA, 25 bp, Homo sapien
ggaccagcaagcagtgagtcaaatg

SEQ ID NO: 4151152 - DNA, 25 bp, Homo sapien
gattaaacaacttgctgcctcggtt

SEQ ID NO: 4151153 - DNA, 25 bp, Homo sapien
tgattaaacaacttgctgcctcggt

SEQ ID NO: 4151154 - DNA, 25 bp, Homo sapien
attaaacaacttgctgcctcggttc

SEQ ID NO: 4151155 - DNA, 25 bp, Homo sapien
tttcacataagtgccaggcttgggg

SEQ ID NO: 4151156 - DNA, 25 bp, Homo sapien
ttctttcacataagtgccaggcttg

SEQ ID NO: 4151157 - DNA, 25 bp, Homo sapien
gtgccaggcttgggggccatagcca

SEQ ID NO: 4151158 - DNA, 25 bp, Homo sapien
tgccaggcttgggggccatagccac

SEQ ID NO: 4151159 - DNA, 25 bp, Homo sapien
gactcggtttgtataaaacatggca

SEQ ID NO: 4151160 - DNA, 25 bp, Homo sapien
gcagctctgtccgtatacttaaata

SEQ ID NO: 4151161 - DNA, 25 bp, Homo sapien
ctttgtactctttgaggactcggtt

SEQ ID NO: 4151162 - DNA, 25 bp, Homo sapien
tacttaaataagctttgacccagtc

SEQ ID NO: 4151163 - DNA, 25 bp, Homo sapien
tccaggcagtccagtggtatggaac

SEQ ID NO: 4151164 - DNA, 25 bp, Homo sapien
tcttttgccacagccccgttttgct

SEQ ID NO: 4151165 - DNA, 25 bp, Homo sapien
atggcagagtccactcagttctttt

SEQ ID NO: 4151166 - DNA, 25 bp, Homo sapien
cgttttgctccaggcagtccagtgg

SEQ ID NO: 4151167 - DNA, 25 bp, Homo sapien
catctgagcctcaactggtagagac

SEQ ID NO: 4151168 - DNA, 25 bp, Homo sapien
ctcatctgagcctcaactggtagag

SEQ ID NO: 4151169 - DNA, 25 bp, Homo sapien
tcatctgagcctcaactggtagaga

SEQ ID NO: 4151170 - DNA, 25 bp, Homo sapien
ttaccctccagttcaagtacagctg

SEQ ID NO: 4151171 - DNA, 25 bp, Homo sapien
cccctgattaatctgcgcaaacagg

SEQ ID NO: 4151172 - DNA, 25 bp, Homo sapien
tgcatactggaccactctgagcctt

SEQ ID NO: 4151173 - DNA, 25 bp, Homo sapien
catgattcagggcatgtgtgatgct

SEQ ID NO: 4151174 - DNA, 25 bp, Homo sapien
atcctcaatcaccaggttggaaaca

SEQ ID NO: 4151175 - DNA, 25 bp, Homo sapien
ccatttgtttcagctctgcatcctc

SEQ ID NO: 4151176 - DNA, 25 bp, Homo sapien
agctctgcatcctcaatcaccaggt

SEQ ID NO: 4151177 - DNA, 25 bp, Homo sapien
ttgtatatgtaagccatttgtttca

SEQ ID NO: 4151178 - DNA, 25 bp, Homo sapien
tgatttgcaatgtcatgttgacaca

SEQ ID NO: 4151179 - DNA, 25 bp, Homo sapien
ccttgatttgcaatgtcatgttgac

SEQ ID NO: 4151180 - DNA, 25 bp, Homo sapien
gcccttgatttgcaatgtcatgttg

SEQ ID NO: 4151181 - DNA, 25 bp, Homo sapien
tttgcccttgatttgcaatgtcatg

SEQ ID NO: 4151182 - DNA, 25 bp, Homo sapien
tggcagccatctgttttgttgatgg

SEQ ID NO: 4151183 - DNA, 25 bp, Homo sapien
tctgcccatgctgtagggtcttgaa

SEQ ID NO: 4151184 - DNA, 25 bp, Homo sapien
atgctgtagggtcttgaactgttca

SEQ ID NO: 4151185 - DNA, 25 bp, Homo sapien
taaagtcatctctgtaggaaggtgc

SEQ ID NO: 4151186 - DNA, 25 bp, Homo sapien
gactctcctatctcatggttgaggc

SEQ ID NO: 4151187 - DNA, 25 bp, Homo sapien
tccaagactccattaacttccctgg

SEQ ID NO: 4151188 - DNA, 25 bp, Homo sapien
ctacagcagctagcaccagagactc

SEQ ID NO: 4151189 - DNA, 25 bp, Homo sapien
tgtttgtcctagaggcgaaaaactg

SEQ ID NO: 4151190 - DNA, 25 bp, Homo sapien
gcagcactgtgcaagattgttacat

SEQ ID NO: 4151191 - DNA, 25 bp, Homo sapien
cagcactgtgcaagattgttacata

SEQ ID NO: 4151192 - DNA, 25 bp, Homo sapien
tgtcctagaggcgaaaaactgaaat

SEQ ID NO: 4151193 - DNA, 25 bp, Homo sapien
caaaaggtttctgcacgggcagggc

SEQ ID NO: 4151194 - DNA, 25 bp, Homo sapien
ggagaacctcagctagcacagtgtg

SEQ ID NO: 4151195 - DNA, 25 bp, Homo sapien
gccccaaccaaccatggctgaaagg

SEQ ID NO: 4151196 - DNA, 25 bp, Homo sapien
tttgcccgtgccctacagattgtgg

SEQ ID NO: 4151197 - DNA, 25 bp, Homo sapien
tgggcaaagtgagtggacctacaca

SEQ ID NO: 4151198 - DNA, 25 bp, Homo sapien
tacattcatgcataaagtccagctg

SEQ ID NO: 4151199 - DNA, 25 bp, Homo sapien
tacacactgttcagactgggcctgt

SEQ ID NO: 4151200 - DNA, 25 bp, Homo sapien
gatgctagggctgtaaacaaccatg

SEQ ID NO: 4151201 - DNA, 25 bp, Homo sapien
cagtgtgggactaaaccttgaaggg

SEQ ID NO: 4151202 - DNA, 25 bp, Homo sapien
tgagccctactgaggtggaaagaaa

SEQ ID NO: 4151203 - DNA, 25 bp, Homo sapien
gagtatatattgagaggagttccta

SEQ ID NO: 4151204 - DNA, 25 bp, Homo sapien
gaaaagacgaaggaagctaggtcca

SEQ ID NO: 4151205 - DNA, 25 bp, Homo sapien
gcccagtatacttcaggcttccttc

SEQ ID NO: 4151206 - DNA, 25 bp, Homo sapien
cagtatacttcaggcttccttcctc

SEQ ID NO: 4151207 - DNA, 25 bp, Homo sapien
taaagcccagtatacttcaggcttc

SEQ ID NO: 4151208 - DNA, 25 bp, Homo sapien
tcacataaagcccagtatacttcag

SEQ ID NO: 4151209 - DNA, 25 bp, Homo sapien
taggtagagggcgaatggtgagaaa

SEQ ID NO: 4151210 - DNA, 25 bp, Homo sapien
taagcttgagttatttgcaggaaat

SEQ ID NO: 4151211 - DNA, 25 bp, Homo sapien
gcaggaaatccagcacggaatgaca

SEQ ID NO: 4151212 - DNA, 25 bp, Homo sapien
gcacggaatgacaaatagaacaggt

SEQ ID NO: 4151213 - DNA, 25 bp, Homo sapien
gcactcaggtactcaaaagaggcag

SEQ ID NO: 4151214 - DNA, 25 bp, Homo sapien
gagttggagcactcaggtactcaaa

SEQ ID NO: 4151215 - DNA, 25 bp, Homo sapien
tggagcactcaggtactcaaaagag

SEQ ID NO: 4151216 - DNA, 25 bp, Homo sapien
gcttgttgagttggagcactcaggt

SEQ ID NO: 4151217 - DNA, 25 bp, Homo sapien
ggcttgttatcttgcgtttctgacg

SEQ ID NO: 4151218 - DNA, 25 bp, Homo sapien
gtttctgacgttgccatgagaagca

SEQ ID NO: 4151219 - DNA, 25 bp, Homo sapien
atgagaagcacatgcccatagcctg

SEQ ID NO: 4151220 - DNA, 25 bp, Homo sapien
tcaaagcaccgtttggttgggcttg

SEQ ID NO: 4151221 - DNA, 25 bp, Homo sapien
gaaacataaacaggatttgtacaca

SEQ ID NO: 4151222 - DNA, 25 bp, Homo sapien
cataaacaggatttgtacacaaatt

SEQ ID NO: 4151223 - DNA, 25 bp, Homo sapien
atgaaacataaacaggatttgtaca

SEQ ID NO: 4151224 - DNA, 25 bp, Homo sapien
aattcacaagttcattaacatctgt

SEQ ID NO: 4151225 - DNA, 25 bp, Homo sapien
tcaaagtgctaccatttgaaaagtg

SEQ ID NO: 4151226 - DNA, 25 bp, Homo sapien
agaaaaccccctgctggaaagcctg

SEQ ID NO: 4151227 - DNA, 25 bp, Homo sapien
taatgaaaacaattgcctggcagtc

SEQ ID NO: 4151228 - DNA, 25 bp, Homo sapien
cccctgctggaaagcctggcatatt

SEQ ID NO: 4151229 - DNA, 25 bp, Homo sapien
aggattatcaatgtagaactgtttc

SEQ ID NO: 4151230 - DNA, 25 bp, Homo sapien
tcaggattatcaatgtagaactgtt

SEQ ID NO: 4151231 - DNA, 25 bp, Homo sapien
ggattatcaatgtagaactgtttcc

SEQ ID NO: 4151232 - DNA, 25 bp, Homo sapien
caggattatcaatgtagaactgttt

SEQ ID NO: 4151233 - DNA, 25 bp, Homo sapien
tggagcagccgaaaaaccacagaag

SEQ ID NO: 4151234 - DNA, 25 bp, Homo sapien
tgtgtgtgagttctgtcaggcctct

SEQ ID NO: 4151235 - DNA, 25 bp, Homo sapien
gattgaccctccatatgaccttcca

SEQ ID NO: 4151236 - DNA, 25 bp, Homo sapien
tggtctgcaggagccacgaaatctg

SEQ ID NO: 4151237 - DNA, 25 bp, Homo sapien
gcttccctgattccacgctattcga

SEQ ID NO: 4151238 - DNA, 25 bp, Homo sapien
tattgaattcatcagccgtctaccc

SEQ ID NO: 4151239 - DNA, 25 bp, Homo sapien
taaaaaccgggtagcatgtgacata

SEQ ID NO: 4151240 - DNA, 25 bp, Homo sapien
tctaagttcacaatgaccttctggt

SEQ ID NO: 4151241 - DNA, 25 bp, Homo sapien
aagcagtttccctacatggttgtcg

SEQ ID NO: 4151242 - DNA, 25 bp, Homo sapien
aaatactcatgccttgggaacgtgc

SEQ ID NO: 4151243 - DNA, 25 bp, Homo sapien
gagctcaagaaaagtgggacacaca

SEQ ID NO: 4151244 - DNA, 25 bp, Homo sapien
taaaccattcggagcagcctctgag

SEQ ID NO: 4151245 - DNA, 25 bp, Homo sapien
gtttttagaaatcagattaatctgt

SEQ ID NO: 4151246 - DNA, 25 bp, Homo sapien
tgacataagaatatctataggtggg

SEQ ID NO: 4151247 - DNA, 25 bp, Homo sapien
actttttgacgtattcattttgaca

SEQ ID NO: 4151248 - DNA, 25 bp, Homo sapien
tctataggtgggaagtaaggactcc

SEQ ID NO: 4151249 - DNA, 25 bp, Homo sapien
tccaattactgtccatggaccagca

SEQ ID NO: 4151250 - DNA, 25 bp, Homo sapien
cacagcatcttaggctcagtctaga

SEQ ID NO: 4151251 - DNA, 25 bp, Homo sapien
tgggagcctatgagatcacacagca

SEQ ID NO: 4151252 - DNA, 25 bp, Homo sapien
agtccagcctgtgtaacttagcaag

SEQ ID NO: 4151253 - DNA, 25 bp, Homo sapien
cctccatctggtcttaataggtaaa

SEQ ID NO: 4151254 - DNA, 25 bp, Homo sapien
tgaaacttcccctcaaacatatgaa

SEQ ID NO: 4151255 - DNA, 25 bp, Homo sapien
tcagcttccaaatttcgtacatatg

SEQ ID NO: 4151256 - DNA, 25 bp, Homo sapien
taataggtaaacatattagacatga

SEQ ID NO: 4151257 - DNA, 25 bp, Homo sapien
ggtggcctctagcaaagagtataag

SEQ ID NO: 4151258 - DNA, 25 bp, Homo sapien
ggacctctttaggtggcctctagca

SEQ ID NO: 4151259 - DNA, 25 bp, Homo sapien
aaatcaaagtacttgctgccagaga

SEQ ID NO: 4151260 - DNA, 25 bp, Homo sapien
tataagggtgagagctaaatcaaag

SEQ ID NO: 4151261 - DNA, 25 bp, Homo sapien
aaaggaaactggcaggacgactgag

SEQ ID NO: 4151262 - DNA, 25 bp, Homo sapien
agggcagagaaagtattgagagcaa

SEQ ID NO: 4151263 - DNA, 25 bp, Homo sapien
aacactgaggaaatcaacatttggg

SEQ ID NO: 4151264 - DNA, 25 bp, Homo sapien
caacatttggggagcggttattgaa

SEQ ID NO: 4151265 - DNA, 25 bp, Homo sapien
ccactgaaggtatagtaaggctgac

SEQ ID NO: 4151266 - DNA, 25 bp, Homo sapien
cccactgaaggtatagtaaggctga

SEQ ID NO: 4151267 - DNA, 25 bp, Homo sapien
aatgggatggcacttcaagaagaca

SEQ ID NO: 4151268 - DNA, 25 bp, Homo sapien
ggatggcacttcaagaagacaaagc

SEQ ID NO: 4151269 - DNA, 25 bp, Homo sapien
ctttccttccacgttcaatctgaag

SEQ ID NO: 4151270 - DNA, 25 bp, Homo sapien
tccttccacgttcaatctgaaggtc

SEQ ID NO: 4151271 - DNA, 25 bp, Homo sapien
acgttcaatctgaaggtctttgcca

SEQ ID NO: 4151272 - DNA, 25 bp, Homo sapien
tccacgttcaatctgaaggtctttg

SEQ ID NO: 4151273 - DNA, 25 bp, Homo sapien
tctgcacttagggagattgctctct

SEQ ID NO: 4151274 - DNA, 25 bp, Homo sapien
catctgcctgcaccatagtataagg

SEQ ID NO: 4151275 - DNA, 25 bp, Homo sapien
gacaggcagtactctaggcatatga

SEQ ID NO: 4151276 - DNA, 25 bp, Homo sapien
tattgtactctaactgggagacagg

SEQ ID NO: 4151277 - DNA, 25 bp, Homo sapien
tatatcctaaattctttgttgcaat

SEQ ID NO: 4151278 - DNA, 25 bp, Homo sapien
ggttgaaattaatacattagcagtt

SEQ ID NO: 4151279 - DNA, 25 bp, Homo sapien
tacacaattatgttcacgtattcat

SEQ ID NO: 4151280 - DNA, 25 bp, Homo sapien
acgtgtggtaaaggtaagcaatcct

SEQ ID NO: 4151281 - DNA, 25 bp, Homo sapien
cagtttatatctctaccgcacacca

SEQ ID NO: 4151282 - DNA, 25 bp, Homo sapien
gtcattgacctagcagcaacattag

SEQ ID NO: 4151283 - DNA, 25 bp, Homo sapien
taaaaccctgactcctgatcttctc

SEQ ID NO: 4151284 - DNA, 25 bp, Homo sapien
catgctatgtatcatgtcattgacc

SEQ ID NO: 4151285 - DNA, 25 bp, Homo sapien
gggcacagctaaacagttatcttta

SEQ ID NO: 4151286 - DNA, 25 bp, Homo sapien
aatatgcgggattctctggctctct

SEQ ID NO: 4151287 - DNA, 25 bp, Homo sapien
cccttacatcatgaatatgcgggat

SEQ ID NO: 4151288 - DNA, 25 bp, Homo sapien
tacgcgaacaatatgcctatctggg

SEQ ID NO: 4151289 - DNA, 25 bp, Homo sapien
taagtacctaagtttccatctagcc

SEQ ID NO: 4151290 - DNA, 25 bp, Homo sapien
cttgctaaagactttctcctgctgg

SEQ ID NO: 4151291 - DNA, 25 bp, Homo sapien
tgaagctcctggtgaacctcaacat

SEQ ID NO: 4151292 - DNA, 25 bp, Homo sapien
gtctcttgctaaagactttctcctg

SEQ ID NO: 4151293 - DNA, 25 bp, Homo sapien
ttgacacaattcctcagtccttcct

SEQ ID NO: 4151294 - DNA, 25 bp, Homo sapien
tgaaaaaaggtggtcagttattcca

SEQ ID NO: 4151295 - DNA, 25 bp, Homo sapien
ccttgtccttcatgatctatgtact

SEQ ID NO: 4151296 - DNA, 25 bp, Homo sapien
taatctgggtttatcttaagttgga

SEQ ID NO: 4151297 - DNA, 25 bp, Homo sapien
tggaaatttaattgggcccaggaca

SEQ ID NO: 4151298 - DNA, 25 bp, Homo sapien
ccagtcaggacaagtttgaatggaa

SEQ ID NO: 4151299 - DNA, 25 bp, Homo sapien
gcccaggacagccataaattctatt

SEQ ID NO: 4151300 - DNA, 25 bp, Homo sapien
tcagaaaggcttaaagaatgtccag

SEQ ID NO: 4151301 - DNA, 25 bp, Homo sapien
tttgctgattttcgatatcctctca

SEQ ID NO: 4151302 - DNA, 25 bp, Homo sapien
gctttgctgattttcgatatcctct

SEQ ID NO: 4151303 - DNA, 25 bp, Homo sapien
tgtttcgctcttgtttagcttccca

SEQ ID NO: 4151304 - DNA, 25 bp, Homo sapien
ttgctgattttcgatatcctctcag

SEQ ID NO: 4151305 - DNA, 25 bp, Homo sapien
gctgctggtctgtaagatatcctgc

SEQ ID NO: 4151306 - DNA, 25 bp, Homo sapien
atcctgcagggagcgacatcctcca

SEQ ID NO: 4151307 - DNA, 25 bp, Homo sapien
tttgttggaaattaagctgctttga

SEQ ID NO: 4151308 - DNA, 25 bp, Homo sapien
gctgctttgaagtcccatctacagt

SEQ ID NO: 4151309 - DNA, 25 bp, Homo sapien
taaaaaggtaagaggagatccagat

SEQ ID NO: 4151310 - DNA, 25 bp, Homo sapien
attgaatggaggtcagtgtgttgcc

SEQ ID NO: 4151311 - DNA, 25 bp, Homo sapien
gaatcttcggtggtaactaattgaa

SEQ ID NO: 4151312 - DNA, 25 bp, Homo sapien
tgtcctagccaagcaattttaccca

SEQ ID NO: 4151313 - DNA, 25 bp, Homo sapien
tgactctgttgaccaccattctttc

SEQ ID NO: 4151314 - DNA, 25 bp, Homo sapien
ctcacgcaattcatctctgtagcgt

SEQ ID NO: 4151315 - DNA, 25 bp, Homo sapien
gtttgactctgttgaccaccattct

SEQ ID NO: 4151316 - DNA, 25 bp, Homo sapien
catctctgtagcgtttgactctgtt

SEQ ID NO: 4151317 - DNA, 25 bp, Homo sapien
tcagctagtccttgcaagaaccagt

SEQ ID NO: 4151318 - DNA, 25 bp, Homo sapien
tatccttcaggaaaattgtcccctg

SEQ ID NO: 4151319 - DNA, 25 bp, Homo sapien
ttactaattcctcgtatccttcagg

SEQ ID NO: 4151320 - DNA, 25 bp, Homo sapien
agctagtccttgcaagaaccagtgg

SEQ ID NO: 4151321 - DNA, 25 bp, Homo sapien
catgaggccataagttgcatttacc

SEQ ID NO: 4151322 - DNA, 25 bp, Homo sapien
catgctctgtgcctcaacaggagac

SEQ ID NO: 4151323 - DNA, 25 bp, Homo sapien
tacaaggcatcaatggttcagggct

SEQ ID NO: 4151324 - DNA, 25 bp, Homo sapien
tacagagaacgagcagcacattagg

SEQ ID NO: 4151325 - DNA, 25 bp, Homo sapien
tctgcagcctttgctatcccatgtc

SEQ ID NO: 4151326 - DNA, 25 bp, Homo sapien
agcctttgctatcccatgtcctcag

SEQ ID NO: 4151327 - DNA, 25 bp, Homo sapien
ctttgctatcccatgtcctcagaag

SEQ ID NO: 4151328 - DNA, 25 bp, Homo sapien
tgcagcctttgctatcccatgtcct

SEQ ID NO: 4151329 - DNA, 25 bp, Homo sapien
cttgacgagttacttctcaacctgc

SEQ ID NO: 4151330 - DNA, 25 bp, Homo sapien
acttctcaacctgctgtattctgac

SEQ ID NO: 4151331 - DNA, 25 bp, Homo sapien
tctgtctccataactccaaggcatt

SEQ ID NO: 4151332 - DNA, 25 bp, Homo sapien
cgagttacttctcaacctgctgtat

SEQ ID NO: 4151333 - DNA, 25 bp, Homo sapien
ctttcagtgctgtttttccgttgtg

SEQ ID NO: 4151334 - DNA, 25 bp, Homo sapien
ttcagtgctgtttttccgttgtgtg

SEQ ID NO: 4151335 - DNA, 25 bp, Homo sapien
tttcagtgctgtttttccgttgtgt

SEQ ID NO: 4151336 - DNA, 25 bp, Homo sapien
gataccttggtcttgaactttcagc

SEQ ID NO: 4151337 - DNA, 25 bp, Homo sapien
tgataccttggtcttgaactttcag

SEQ ID NO: 4151338 - DNA, 25 bp, Homo sapien
gatgataccttggtcttgaactttc

SEQ ID NO: 4151339 - DNA, 25 bp, Homo sapien
cctgatgataccttggtcttgaact

SEQ ID NO: 4151340 - DNA, 25 bp, Homo sapien
cagaacattcgtagaattagaaaag

SEQ ID NO: 4151341 - DNA, 25 bp, Homo sapien
tagaaaaggtaattgatcggaatcc

SEQ ID NO: 4151342 - DNA, 25 bp, Homo sapien
taattgatcggaatcctttgtcttc

SEQ ID NO: 4151343 - DNA, 25 bp, Homo sapien
tttgaaagtcacgtgcactttttat

SEQ ID NO: 4151344 - DNA, 25 bp, Homo sapien
gatggtatagctaactcactcccta

SEQ ID NO: 4151345 - DNA, 25 bp, Homo sapien
cctggactagggttgtgccatctta

SEQ ID NO: 4151346 - DNA, 25 bp, Homo sapien
tcatgtcccatagcaggatgcaaac

SEQ ID NO: 4151347 - DNA, 25 bp, Homo sapien
tctttccatggcacgtattttggcc

SEQ ID NO: 4151348 - DNA, 25 bp, Homo sapien
tggaagagcagctgaaggaagtatc

SEQ ID NO: 4151349 - DNA, 25 bp, Homo sapien
gagcagctgaaggaagtatcggagc

SEQ ID NO: 4151350 - DNA, 25 bp, Homo sapien
gcagctgaaggaagtatcggagcat

SEQ ID NO: 4151351 - DNA, 25 bp, Homo sapien
aagagcagctgaaggaagtatcgga

SEQ ID NO: 4151352 - DNA, 25 bp, Homo sapien
ttattcaatgacttgaagccccaca

SEQ ID NO: 4151353 - DNA, 25 bp, Homo sapien
ttcaatgacttgaagccccacagaa

SEQ ID NO: 4151354 - DNA, 25 bp, Homo sapien
ttaaaaggagcatatttgtagcagt

SEQ ID NO: 4151355 - DNA, 25 bp, Homo sapien
tcttaaaaggagcatatttgtagca

SEQ ID NO: 4151356 - DNA, 25 bp, Homo sapien
tccacgaaggtctactaagttagca

SEQ ID NO: 4151357 - DNA, 25 bp, Homo sapien
ggtggtctggacctgaatgtgcaat

SEQ ID NO: 4151358 - DNA, 25 bp, Homo sapien
aaatgcttgtgaaaagacttccacg

SEQ ID NO: 4151359 - DNA, 25 bp, Homo sapien
ccacttgttaggttagctagaagac

SEQ ID NO: 4151360 - DNA, 25 bp, Homo sapien
tgtatgtatcaaggtgagtttctcc

SEQ ID NO: 4151361 - DNA, 25 bp, Homo sapien
cagtacaaatagctttctcatcaag

SEQ ID NO: 4151362 - DNA, 25 bp, Homo sapien
tcctgtgagttaccagatagaacac

SEQ ID NO: 4151363 - DNA, 25 bp, Homo sapien
aacatgtttacatcgcatttcactg

SEQ ID NO: 4151364 - DNA, 25 bp, Homo sapien
catagttgtgcacaattaggtttaa

SEQ ID NO: 4151365 - DNA, 25 bp, Homo sapien
caagttatctactttcctaccagag

SEQ ID NO: 4151366 - DNA, 25 bp, Homo sapien
tagctcagcttattggactcaaaga

SEQ ID NO: 4151367 - DNA, 25 bp, Homo sapien
aacttacctaaattccacagagatg

SEQ ID NO: 4151368 - DNA, 25 bp, Homo sapien
taagactaggttgagggaaaagcag

SEQ ID NO: 4151369 - DNA, 25 bp, Homo sapien
tatgactgggcttagcaattaacag

SEQ ID NO: 4151370 - DNA, 25 bp, Homo sapien
gctactaggagatcaactaacatga

SEQ ID NO: 4151371 - DNA, 25 bp, Homo sapien
aaaagcaggtgacttacggaaggtg

SEQ ID NO: 4151372 - DNA, 25 bp, Homo sapien
gaaagataaagatccccagttcgat

SEQ ID NO: 4151373 - DNA, 25 bp, Homo sapien
tgctttgcaacttcgagatcttggg

SEQ ID NO: 4151374 - DNA, 25 bp, Homo sapien
caatgtattggcaggcttaaaggga

SEQ ID NO: 4151375 - DNA, 25 bp, Homo sapien
gaagaaagtataaagcactgcagag

SEQ ID NO: 4151376 - DNA, 25 bp, Homo sapien
tatgaacttctgtgataagctgcgg

SEQ ID NO: 4151377 - DNA, 25 bp, Homo sapien
gctgcggtggaagtgcaggcaccat

SEQ ID NO: 4151378 - DNA, 25 bp, Homo sapien
ttgatatgaacttctgtgataagct

SEQ ID NO: 4151379 - DNA, 25 bp, Homo sapien
acttctgtgataagctgcggtggaa

SEQ ID NO: 4151380 - DNA, 25 bp, Homo sapien
tttagccgtactatttctctctgta

SEQ ID NO: 4151381 - DNA, 25 bp, Homo sapien
actttagccgtactatttctctctg

SEQ ID NO: 4151382 - DNA, 25 bp, Homo sapien
ttagccgtactatttctctctgtaa

SEQ ID NO: 4151383 - DNA, 25 bp, Homo sapien
aactttagccgtactatttctctct

SEQ ID NO: 4151384 - DNA, 25 bp, Homo sapien
gcaaggtttctctgctgcgtttctc

SEQ ID NO: 4151385 - DNA, 25 bp, Homo sapien
tgtgcaaggtttctctgctgcgttt

SEQ ID NO: 4151386 - DNA, 25 bp, Homo sapien
tctctgctgcgtttctctgcagcca

SEQ ID NO: 4151387 - DNA, 25 bp, Homo sapien
ggcctctgtgcaaggtttctctgct

SEQ ID NO: 4151388 - DNA, 25 bp, Homo sapien
gccatcttcaaaaggcggcatgaac

SEQ ID NO: 4151389 - DNA, 25 bp, Homo sapien
ggcggcatgaactgctgtacctcag

SEQ ID NO: 4151390 - DNA, 25 bp, Homo sapien
acactctgcatcaagcgcaattttg

SEQ ID NO: 4151391 - DNA, 25 bp, Homo sapien
tcaacactctgcatcaagcgcaatt

SEQ ID NO: 4151392 - DNA, 25 bp, Homo sapien
tattgaatccagtttcgtgaatgca

SEQ ID NO: 4151393 - DNA, 25 bp, Homo sapien
gccatcactttataacgtgaccata

SEQ ID NO: 4151394 - DNA, 25 bp, Homo sapien
cagtttcgtgaatgcaactgtgctc

SEQ ID NO: 4151395 - DNA, 25 bp, Homo sapien
tataacgtgaccatattgaatccag

SEQ ID NO: 4151396 - DNA, 25 bp, Homo sapien
gccaaattggcagtaatattgcaag

SEQ ID NO: 4151397 - DNA, 25 bp, Homo sapien
agtaaagaactgagctcccggggtg

SEQ ID NO: 4151398 - DNA, 25 bp, Homo sapien
gcaaggcctctcacatgccgttgtg

SEQ ID NO: 4151399 - DNA, 25 bp, Homo sapien
catgccgttgtgatggattagaagg

SEQ ID NO: 4151400 - DNA, 25 bp, Homo sapien
gatgatcctcctgtgtcttaaacat

SEQ ID NO: 4151401 - DNA, 25 bp, Homo sapien
aagatgatcctcctgtgtcttaaac

SEQ ID NO: 4151402 - DNA, 25 bp, Homo sapien
gttttgccgttttcaagatgatcct

SEQ ID NO: 4151403 - DNA, 25 bp, Homo sapien
ttgccgttttcaagatgatcctcct

SEQ ID NO: 4151404 - DNA, 25 bp, Homo sapien
aagtaacctttcacctctggtagtg

SEQ ID NO: 4151405 - DNA, 25 bp, Homo sapien
tgatgcaaagttttgagtgtaaggg

SEQ ID NO: 4151406 - DNA, 25 bp, Homo sapien
tctaagtaaattgcttgatgcaaag

SEQ ID NO: 4151407 - DNA, 25 bp, Homo sapien
cctcctgagtagcagttgttcgtaa

SEQ ID NO: 4151408 - DNA, 25 bp, Homo sapien
ttttctgatttgacggcttaaaggc

SEQ ID NO: 4151409 - DNA, 25 bp, Homo sapien
cagtaagggagaatcatcacgtttt

SEQ ID NO: 4151410 - DNA, 25 bp, Homo sapien
gaagctgtcagatgtccaatcgtct

SEQ ID NO: 4151411 - DNA, 25 bp, Homo sapien
tgaactgcaatcctaggtatgcctt

SEQ ID NO: 4151412 - DNA, 25 bp, Homo sapien
aatatggaggtctgaataagtctac

SEQ ID NO: 4151413 - DNA, 25 bp, Homo sapien
cacaaattgctgtcttagagaaacc

SEQ ID NO: 4151414 - DNA, 25 bp, Homo sapien
taataccactggatacacaaattgc

SEQ ID NO: 4151415 - DNA, 25 bp, Homo sapien
gaaaccactgcttgtctattcagtg

SEQ ID NO: 4151416 - DNA, 25 bp, Homo sapien
gagccaccatggccagtggttttgt

SEQ ID NO: 4151417 - DNA, 25 bp, Homo sapien
tgtttttttaatggaatctcgctct

SEQ ID NO: 4151418 - DNA, 25 bp, Homo sapien
caccatggccagtggttttgtttgt

SEQ ID NO: 4151419 - DNA, 25 bp, Homo sapien
gccaccatggccagtggttttgttt

SEQ ID NO: 4151420 - DNA, 25 bp, Homo sapien
gattccaatcccagtactatccaca

SEQ ID NO: 4151421 - DNA, 25 bp, Homo sapien
tatattaagaactagatgataccca

SEQ ID NO: 4151422 - DNA, 25 bp, Homo sapien
ttaaaacctatgtgattccaatccc

SEQ ID NO: 4151423 - DNA, 25 bp, Homo sapien
tacccaaaaggtgatcaaataatta

SEQ ID NO: 4151424 - DNA, 25 bp, Homo sapien
atcaacaatgtaagacttttgagat

SEQ ID NO: 4151425 - DNA, 25 bp, Homo sapien
ggccatatccctaacttcatcaaca

SEQ ID NO: 4151426 - DNA, 25 bp, Homo sapien
ttcttgtggctgaaatatccagtat

SEQ ID NO: 4151427 - DNA, 25 bp, Homo sapien
cttggccatatccctaacttcatca

SEQ ID NO: 4151428 - DNA, 25 bp, Homo sapien
caagtttcaagtaactgtggccagt

SEQ ID NO: 4151429 - DNA, 25 bp, Homo sapien
tccaggctcacactttgaagctttg

SEQ ID NO: 4151430 - DNA, 25 bp, Homo sapien
tgagaatggttcttcagaacaaacc

SEQ ID NO: 4151431 - DNA, 25 bp, Homo sapien
ttctgaacttttgaaccatgttggc

SEQ ID NO: 4151432 - DNA, 25 bp, Homo sapien
caaatcgtacttacaggtgtggtag

SEQ ID NO: 4151433 - DNA, 25 bp, Homo sapien
ctggaaccaaatcgtacttacaggt

SEQ ID NO: 4151434 - DNA, 25 bp, Homo sapien
gtgtggataccccagtggttgcgct

SEQ ID NO: 4151435 - DNA, 25 bp, Homo sapien
tgtggtagagtgtggataccccagt

SEQ ID NO: 4151436 - DNA, 25 bp, Homo sapien
tcaaactttttctaggaggatggca

SEQ ID NO: 4151437 - DNA, 25 bp, Homo sapien
caaactttttctaggaggatggcaa

SEQ ID NO: 4151438 - DNA, 25 bp, Homo sapien
gcaacactttgcaggcgggcagact

SEQ ID NO: 4151439 - DNA, 25 bp, Homo sapien
gaatccgaactcctacgtggtgagg

SEQ ID NO: 4151440 - DNA, 25 bp, Homo sapien
taacagagggtacttcaaaggctgc

SEQ ID NO: 4151441 - DNA, 25 bp, Homo sapien
tctgaggatagtgcaccaggcggct

SEQ ID NO: 4151442 - DNA, 25 bp, Homo sapien
cacagagcagtagttgtgtaaacat

SEQ ID NO: 4151443 - DNA, 25 bp, Homo sapien
agagcagtagttgtgtaaacatcag

SEQ ID NO: 4151444 - DNA, 25 bp, Homo sapien
acagagcagtagttgtgtaaacatc

SEQ ID NO: 4151445 - DNA, 25 bp, Homo sapien
cagagcagtagttgtgtaaacatca

SEQ ID NO: 4151446 - DNA, 25 bp, Homo sapien
atagctgatgcttcccccttcgtgg

SEQ ID NO: 4151447 - DNA, 25 bp, Homo sapien
tctaaattcttcattcgatttaacg

SEQ ID NO: 4151448 - DNA, 25 bp, Homo sapien
gtggagcctcgcccagtctcacttt

SEQ ID NO: 4151449 - DNA, 25 bp, Homo sapien
tctccctaggatctaaattcttcat

SEQ ID NO: 4151450 - DNA, 25 bp, Homo sapien
tctgtaatgtgcttctcacaatctt

SEQ ID NO: 4151451 - DNA, 25 bp, Homo sapien
gttttctgtaatgtgcttctcacaa

SEQ ID NO: 4151452 - DNA, 25 bp, Homo sapien
ttgttttctgtaatgtgcttctcac

SEQ ID NO: 4151453 - DNA, 25 bp, Homo sapien
tgtaatgtgcttctcacaatctttt

SEQ ID NO: 4151454 - DNA, 25 bp, Homo sapien
gcctgtcatcctggcccagggacca

SEQ ID NO: 4151455 - DNA, 25 bp, Homo sapien
cttctctgtattgcttcaattttgg

SEQ ID NO: 4151456 - DNA, 25 bp, Homo sapien
tttgcctgtcatcctggcccaggga

SEQ ID NO: 4151457 - DNA, 25 bp, Homo sapien
aatttgcctgtcatcctggcccagg

SEQ ID NO: 4151458 - DNA, 25 bp, Homo sapien
taaactcttcgattatccaactgaa

SEQ ID NO: 4151459 - DNA, 25 bp, Homo sapien
actcttcgattatccaactgaacat

SEQ ID NO: 4151460 - DNA, 25 bp, Homo sapien
ttaaactcttcgattatccaactga

SEQ ID NO: 4151461 - DNA, 25 bp, Homo sapien
aactcttcgattatccaactgaaca

SEQ ID NO: 4151462 - DNA, 25 bp, Homo sapien
ctacaaaacatgacggaataaagac

SEQ ID NO: 4151463 - DNA, 25 bp, Homo sapien
tcgcccttagagacgatgacatcgg

SEQ ID NO: 4151464 - DNA, 25 bp, Homo sapien
gggaaagtcctcctggcgaagacgc

SEQ ID NO: 4151465 - DNA, 25 bp, Homo sapien
tccgccttgcagttcagagtcgtgg

SEQ ID NO: 4151466 - DNA, 25 bp, Homo sapien
taaggatccgctgggcagaagcatc

SEQ ID NO: 4151467 - DNA, 25 bp, Homo sapien
ttgatactatcttgaccagacttct

SEQ ID NO: 4151468 - DNA, 25 bp, Homo sapien
acaccctggcttgatactatcttga

SEQ ID NO: 4151469 - DNA, 25 bp, Homo sapien
tggcttgatactatcttgaccagac

SEQ ID NO: 4151470 - DNA, 25 bp, Homo sapien
ccctggcttgatactatcttgacca

SEQ ID NO: 4151471 - DNA, 25 bp, Homo sapien
cctggtcgatagatcaagctgctgt

SEQ ID NO: 4151472 - DNA, 25 bp, Homo sapien
gctacaatctctgtgaggaccccct

SEQ ID NO: 4151473 - DNA, 25 bp, Homo sapien
tgctgtcatctatttgccacctggg

SEQ ID NO: 4151474 - DNA, 25 bp, Homo sapien
gctgccatctctagaggctgccact

SEQ ID NO: 4151475 - DNA, 25 bp, Homo sapien
aatctctactctctgcactggcaca

SEQ ID NO: 4151476 - DNA, 25 bp, Homo sapien
tcatttaatctctactctctgcact

SEQ ID NO: 4151477 - DNA, 25 bp, Homo sapien
catttaatctctactctctgcactg

SEQ ID NO: 4151478 - DNA, 25 bp, Homo sapien
ctctactctctgcactggcacagtg

SEQ ID NO: 4151479 - DNA, 25 bp, Homo sapien
tcatgttttgggcattcttgccaaa

SEQ ID NO: 4151480 - DNA, 25 bp, Homo sapien
gccaaactcccatgaacaaacattc

SEQ ID NO: 4151481 - DNA, 25 bp, Homo sapien
ttgggcattcttgccaaactcccat

SEQ ID NO: 4151482 - DNA, 25 bp, Homo sapien
ttttgggcattcttgccaaactccc

SEQ ID NO: 4151483 - DNA, 25 bp, Homo sapien
tgacatttcagttgtaatggtgaat

SEQ ID NO: 4151484 - DNA, 25 bp, Homo sapien
agctgatctttctccgatagtgaca

SEQ ID NO: 4151485 - DNA, 25 bp, Homo sapien
cctgggctcttcccgactagctggg

SEQ ID NO: 4151486 - DNA, 25 bp, Homo sapien
gctggaatgcgacggcggcgcgatc

SEQ ID NO: 4151487 - DNA, 25 bp, Homo sapien
ttttaccagcaatattatcaattac

SEQ ID NO: 4151488 - DNA, 25 bp, Homo sapien
tgtaagattaaggaaatgcctcatt

SEQ ID NO: 4151489 - DNA, 25 bp, Homo sapien
caaggtgaacgaggactgtgtagac

SEQ ID NO: 4151490 - DNA, 25 bp, Homo sapien
tgtagacatggatacatgaacagct

SEQ ID NO: 4151491 - DNA, 25 bp, Homo sapien
gaaattatccctatgtactactaaa

SEQ ID NO: 4151492 - DNA, 25 bp, Homo sapien
ttaatagagcagagtactaaattgc

SEQ ID NO: 4151493 - DNA, 25 bp, Homo sapien
cccaggacggaatgtgttttaatag

SEQ ID NO: 4151494 - DNA, 25 bp, Homo sapien
tgattttaacaaaggcatgatgcaa

SEQ ID NO: 4151495 - DNA, 25 bp, Homo sapien
aaaatatatgagcatcatcagattt

SEQ ID NO: 4151496 - DNA, 25 bp, Homo sapien
gcatcatcagatttatttccttctg

SEQ ID NO: 4151497 - DNA, 25 bp, Homo sapien
ttccttctgaataaaatagataaga

SEQ ID NO: 4151498 - DNA, 25 bp, Homo sapien
tatgagcatcatcagatttatttcc

SEQ ID NO: 4151499 - DNA, 25 bp, Homo sapien
gaacattcacgatatcctcacggca

SEQ ID NO: 4151500 - DNA, 25 bp, Homo sapien
gagcgcagtgaacggcagataccat

SEQ ID NO: 4151501 - DNA, 25 bp, Homo sapien
tacgggcttctaggctgatctacgg

SEQ ID NO: 4151502 - DNA, 25 bp, Homo sapien
caactgcagttaatgacacggcgtc

SEQ ID NO: 4151503 - DNA, 25 bp, Homo sapien
aggctgcactacttcattccagtct

SEQ ID NO: 4151504 - DNA, 25 bp, Homo sapien
tgaggctgcactacttcattccagt

SEQ ID NO: 4151505 - DNA, 25 bp, Homo sapien
tttgaggctgcactacttcattcca

SEQ ID NO: 4151506 - DNA, 25 bp, Homo sapien
gtttgaggctgcactacttcattcc

SEQ ID NO: 4151507 - DNA, 25 bp, Homo sapien
gactgtacaattagactcccctgga

SEQ ID NO: 4151508 - DNA, 25 bp, Homo sapien
gaggatgtccctcgaaatcagtggg

SEQ ID NO: 4151509 - DNA, 25 bp, Homo sapien
gacttgtccgggctcaacagactgt

SEQ ID NO: 4151510 - DNA, 25 bp, Homo sapien
tctcttacaggcaggcagtcgtctg

SEQ ID NO: 4151511 - DNA, 25 bp, Homo sapien
tagaaccttatcaaagatgcacagg

SEQ ID NO: 4151512 - DNA, 25 bp, Homo sapien
cagaaaggtcactgctatccaacta

SEQ ID NO: 4151513 - DNA, 25 bp, Homo sapien
ccagcagagccaaattcatacgtta

SEQ ID NO: 4151514 - DNA, 25 bp, Homo sapien
tatcaagaatgggtcataaatccag

SEQ ID NO: 4151515 - DNA, 25 bp, Homo sapien
tggcacactactgacagaagacgac

SEQ ID NO: 4151516 - DNA, 25 bp, Homo sapien
caagcccagacaataggcagggtca

SEQ ID NO: 4151517 - DNA, 25 bp, Homo sapien
tgtatctcgctgattgtggcacact

SEQ ID NO: 4151518 - DNA, 25 bp, Homo sapien
tctcctctgtagtaatgacccacgg

SEQ ID NO: 4151519 - DNA, 25 bp, Homo sapien
aactgagagctgtcacatccgtcat

SEQ ID NO: 4151520 - DNA, 25 bp, Homo sapien
tatgcatgcattcgccactaaaaga

SEQ ID NO: 4151521 - DNA, 25 bp, Homo sapien
cgggacagctatgtcacatcccttg

SEQ ID NO: 4151522 - DNA, 25 bp, Homo sapien
gtcatctccactcggcctggttaaa

SEQ ID NO: 4151523 - DNA, 25 bp, Homo sapien
ttaatgtgcatccagtaacttcggg

SEQ ID NO: 4151524 - DNA, 25 bp, Homo sapien
gatacaacgaacatactcacaggtg

SEQ ID NO: 4151525 - DNA, 25 bp, Homo sapien
gcactatccagtatggtggccacag

SEQ ID NO: 4151526 - DNA, 25 bp, Homo sapien
gaagatttggatccagtaggcctgg

SEQ ID NO: 4151527 - DNA, 25 bp, Homo sapien
taatatcatctaagagtgtgtacac

SEQ ID NO: 4151528 - DNA, 25 bp, Homo sapien
cacacatttgtccttaataaagagt

SEQ ID NO: 4151529 - DNA, 25 bp, Homo sapien
caaacattgcttgaagagtggtcat

SEQ ID NO: 4151530 - DNA, 25 bp, Homo sapien
tctcttcaggttatgcaaaagtatt

SEQ ID NO: 4151531 - DNA, 25 bp, Homo sapien
gtgtagaatcaactttatgagaacc

SEQ ID NO: 4151532 - DNA, 25 bp, Homo sapien
actttatgagaaccaaattggcaca

SEQ ID NO: 4151533 - DNA, 25 bp, Homo sapien
tcaactttatgagaaccaaattggc

SEQ ID NO: 4151534 - DNA, 25 bp, Homo sapien
tagggatgtgtagaatcaactttat

SEQ ID NO: 4151535 - DNA, 25 bp, Homo sapien
catacgtgtggatgcaatcagagca

SEQ ID NO: 4151536 - DNA, 25 bp, Homo sapien
gacactggaaatggagtcactgctg

SEQ ID NO: 4151537 - DNA, 25 bp, Homo sapien
gcaaataagaacacggacacatatt

SEQ ID NO: 4151538 - DNA, 25 bp, Homo sapien
aaataatccaagtttccaagtgaag

SEQ ID NO: 4151539 - DNA, 25 bp, Homo sapien
gctgatttatgaagcttccccggtg

SEQ ID NO: 4151540 - DNA, 25 bp, Homo sapien
taataccacctaggcagcatatgag

SEQ ID NO: 4151541 - DNA, 25 bp, Homo sapien
ccccggtgtcagtctgggagcatga

SEQ ID NO: 4151542 - DNA, 25 bp, Homo sapien
gatcatgccggaacactcacttgct

SEQ ID NO: 4151543 - DNA, 25 bp, Homo sapien
tgtgccacagagaagatacgtattt

SEQ ID NO: 4151544 - DNA, 25 bp, Homo sapien
ttctccaataaagtgacgtgtgcca

SEQ ID NO: 4151545 - DNA, 25 bp, Homo sapien
gctcaagaatcgaccagtctcaccg

SEQ ID NO: 4151546 - DNA, 25 bp, Homo sapien
gaaagcacagaaatccccaacatgg

SEQ ID NO: 4151547 - DNA, 25 bp, Homo sapien
tttttccaggagtgctttcctctct

SEQ ID NO: 4151548 - DNA, 25 bp, Homo sapien
gttgtttgccagttatatcctctag

SEQ ID NO: 4151549 - DNA, 25 bp, Homo sapien
aggcaatgtcccatcactggtaatt

SEQ ID NO: 4151550 - DNA, 25 bp, Homo sapien
tcactggtaattgtcaccgggctgt

SEQ ID NO: 4151551 - DNA, 25 bp, Homo sapien
ccacagtctttacttaacacctttg

SEQ ID NO: 4151552 - DNA, 25 bp, Homo sapien
cagagtctctatggagagattgttg

SEQ ID NO: 4151553 - DNA, 25 bp, Homo sapien
gatacctgcttgtgtcagctcacta

SEQ ID NO: 4151554 - DNA, 25 bp, Homo sapien
gattgttgagagcaccaactcattg

SEQ ID NO: 4151555 - DNA, 25 bp, Homo sapien
tcagtgaattacagagtatgaaatt

SEQ ID NO: 4151556 - DNA, 25 bp, Homo sapien
acagtctggagcctgaccgggtaga

SEQ ID NO: 4151557 - DNA, 25 bp, Homo sapien
gcctgaccgggtagattataatgac

SEQ ID NO: 4151558 - DNA, 25 bp, Homo sapien
gaaattacagagacagtctggagcc

SEQ ID NO: 4151559 - DNA, 25 bp, Homo sapien
taccgcaagtgtgagttataatcag

SEQ ID NO: 4151560 - DNA, 25 bp, Homo sapien
tagctgcgattacatttgtgacaat

SEQ ID NO: 4151561 - DNA, 25 bp, Homo sapien
gataagttagcttaagaggatctaa

SEQ ID NO: 4151562 - DNA, 25 bp, Homo sapien
aaaacttatagctttcacttcctgc

SEQ ID NO: 4151563 - DNA, 25 bp, Homo sapien
gtgatgcatgttcccatacccctga

SEQ ID NO: 4151564 - DNA, 25 bp, Homo sapien
gaataaactcggtgttcaagaaaca

SEQ ID NO: 4151565 - DNA, 25 bp, Homo sapien
catatacccgcttacatgtttcaca

SEQ ID NO: 4151566 - DNA, 25 bp, Homo sapien
tacccctgataacagagggcacaga

SEQ ID NO: 4151567 - DNA, 25 bp, Homo sapien
ccaattggtgggcagtccctggctc

SEQ ID NO: 4151568 - DNA, 25 bp, Homo sapien
ggacatttatcacccaatgggcctg

SEQ ID NO: 4151569 - DNA, 25 bp, Homo sapien
gaaaaatgtgtcgtcagcctagagg

SEQ ID NO: 4151570 - DNA, 25 bp, Homo sapien
tagtccgaatcaatgtgagtggccc

SEQ ID NO: 4151571 - DNA, 25 bp, Homo sapien
ctatgacttaactcaagccattttt

SEQ ID NO: 4151572 - DNA, 25 bp, Homo sapien
gaaattttccattgaacgagtctaa

SEQ ID NO: 4151573 - DNA, 25 bp, Homo sapien
gcttaatcaggtgtaagcaggaaat

SEQ ID NO: 4151574 - DNA, 25 bp, Homo sapien
gcaaacaagtttgcaactccaccta

SEQ ID NO: 4151575 - DNA, 25 bp, Homo sapien
ctgatgcttaatagcaagttgcttt

SEQ ID NO: 4151576 - DNA, 25 bp, Homo sapien
gacagaaaccatggcgaaggcttag

SEQ ID NO: 4151577 - DNA, 25 bp, Homo sapien
gatatcttagggacaaaacatgcca

SEQ ID NO: 4151578 - DNA, 25 bp, Homo sapien
taacctggacttgagcatttcagca

SEQ ID NO: 4151579 - DNA, 25 bp, Homo sapien
gctgctgccatatcagtagctgtca

SEQ ID NO: 4151580 - DNA, 25 bp, Homo sapien
cagtccctggagcatgctgaagtgt

SEQ ID NO: 4151581 - DNA, 25 bp, Homo sapien
gggtgggctcattttgaagtctcat

SEQ ID NO: 4151582 - DNA, 25 bp, Homo sapien
aagtgtagagcacgtttaacatggg

SEQ ID NO: 4151583 - DNA, 25 bp, Homo sapien
catgctgaagtgtagagcacgttta

SEQ ID NO: 4151584 - DNA, 25 bp, Homo sapien
gcaaaacacaagagactaagacagt

SEQ ID NO: 4151585 - DNA, 25 bp, Homo sapien
gaactgcgagccaaatcaatttctc

SEQ ID NO: 4151586 - DNA, 25 bp, Homo sapien
gaatgctgcagcaagaaggccaaca

SEQ ID NO: 4151587 - DNA, 25 bp, Homo sapien
cttagttatagtgggagtcagttcc

SEQ ID NO: 4151588 - DNA, 25 bp, Homo sapien
tccctgatacggcttgctttggccc

SEQ ID NO: 4151589 - DNA, 25 bp, Homo sapien
ttttccctgatacggcttgctttgg

SEQ ID NO: 4151590 - DNA, 25 bp, Homo sapien
gctggaaagccggtcttttccctga

SEQ ID NO: 4151591 - DNA, 25 bp, Homo sapien
ccggtcttttccctgatacggcttg

SEQ ID NO: 4151592 - DNA, 25 bp, Homo sapien
tcagccttgtgctgtacttgcttac

SEQ ID NO: 4151593 - DNA, 25 bp, Homo sapien
tggtgctgccgtaaaaatacattcc

SEQ ID NO: 4151594 - DNA, 25 bp, Homo sapien
agacaataaagaaggctggccagag

SEQ ID NO: 4151595 - DNA, 25 bp, Homo sapien
ccctcagcgtgtcccacaggtagtg

SEQ ID NO: 4151596 - DNA, 25 bp, Homo sapien
gatgagctcataaacggcctgaccc

SEQ ID NO: 4151597 - DNA, 25 bp, Homo sapien
tatctcctcagatacgtgacaggct

SEQ ID NO: 4151598 - DNA, 25 bp, Homo sapien
gattgattagaaaccgtgagcctgg

SEQ ID NO: 4151599 - DNA, 25 bp, Homo sapien
ggaaattgctttcccatacgctatc

SEQ ID NO: 4151600 - DNA, 25 bp, Homo sapien
tccaagaggtcacacaaacgcagtt

SEQ ID NO: 4151601 - DNA, 25 bp, Homo sapien
ctgttgtggtgcacaaatagagaga

SEQ ID NO: 4151602 - DNA, 25 bp, Homo sapien
tctgttgtggtgcacaaatagagag

SEQ ID NO: 4151603 - DNA, 25 bp, Homo sapien
gttgtggtgcacaaatagagagaag

SEQ ID NO: 4151604 - DNA, 25 bp, Homo sapien
ttctgttgtggtgcacaaatagaga

SEQ ID NO: 4151605 - DNA, 25 bp, Homo sapien
tcaatcctaagtaactattcttata

SEQ ID NO: 4151606 - DNA, 25 bp, Homo sapien
tggccagaaaccattctaaaaaaca

SEQ ID NO: 4151607 - DNA, 25 bp, Homo sapien
tacacaaacagtttgaaccactgag

SEQ ID NO: 4151608 - DNA, 25 bp, Homo sapien
tatttaacatgccatttcaatccta

SEQ ID NO: 4151609 - DNA, 25 bp, Homo sapien
ttgctggtgcttgccttagaatcca

SEQ ID NO: 4151610 - DNA, 25 bp, Homo sapien
gtaaattgtatgctttgctggtgct

SEQ ID NO: 4151611 - DNA, 25 bp, Homo sapien
tggcctgtaacgttgtgtgagagca

SEQ ID NO: 4151612 - DNA, 25 bp, Homo sapien
ttgatatcgcattcagcaatccatc

SEQ ID NO: 4151613 - DNA, 25 bp, Homo sapien
gaattcttcacccaaaaaagcttca

SEQ ID NO: 4151614 - DNA, 25 bp, Homo sapien
tcttcatctaagtcacaaccttcag

SEQ ID NO: 4151615 - DNA, 25 bp, Homo sapien
tcacaaccttcagaatttccttgga

SEQ ID NO: 4151616 - DNA, 25 bp, Homo sapien
tcatctaagtcacaaccttcagaat

SEQ ID NO: 4151617 - DNA, 25 bp, Homo sapien
tgctaatctgacaagctccatctgg

SEQ ID NO: 4151618 - DNA, 25 bp, Homo sapien
cactaaagagagctacatgagtcta

SEQ ID NO: 4151619 - DNA, 25 bp, Homo sapien
gaaagaaagctatcccactaaagag

SEQ ID NO: 4151620 - DNA, 25 bp, Homo sapien
tagcggcatatgtccatggctggtc

SEQ ID NO: 4151621 - DNA, 25 bp, Homo sapien
cctgagtagctggtgtgatcttagc

SEQ ID NO: 4151622 - DNA, 25 bp, Homo sapien
ccaccgctttatgggttccagcgat

SEQ ID NO: 4151623 - DNA, 25 bp, Homo sapien
ctgcaaccaccgctttatgggttcc

SEQ ID NO: 4151624 - DNA, 25 bp, Homo sapien
gcaaccaccgctttatgggttccag

SEQ ID NO: 4151625 - DNA, 25 bp, Homo sapien
taaattatggacagatagaaagtcc

SEQ ID NO: 4151626 - DNA, 25 bp, Homo sapien
caaaatggacagtaaagtaccttgc

SEQ ID NO: 4151627 - DNA, 25 bp, Homo sapien
atctcaaccgcccaagcagctggaa

SEQ ID NO: 4151628 - DNA, 25 bp, Homo sapien
cgcttgagttaactccgacccaata

SEQ ID NO: 4151629 - DNA, 25 bp, Homo sapien
gattgtttgcatttgcgtcccagct

SEQ ID NO: 4151630 - DNA, 25 bp, Homo sapien
ccatgtaactcaaggtgaaagcacg

SEQ ID NO: 4151631 - DNA, 25 bp, Homo sapien
tgaaagcacggatcttggaaccaga

SEQ ID NO: 4151632 - DNA, 25 bp, Homo sapien
cagttgcctcctgacagctctaaga

SEQ ID NO: 4151633 - DNA, 25 bp, Homo sapien
tcaaatactgagaaacaatttcact

SEQ ID NO: 4151634 - DNA, 25 bp, Homo sapien
atggatgaatcaagtcaatcaaata

SEQ ID NO: 4151635 - DNA, 25 bp, Homo sapien
gaatcaagtcaatcaaatactgaga

SEQ ID NO: 4151636 - DNA, 25 bp, Homo sapien
aatggatgaatcaagtcaatcaaat

SEQ ID NO: 4151637 - DNA, 25 bp, Homo sapien
cgctctagcgctctctgtttttaac

SEQ ID NO: 4151638 - DNA, 25 bp, Homo sapien
tgcttagagtgaggaagcgcatccg

SEQ ID NO: 4151639 - DNA, 25 bp, Homo sapien
ttttctgcttagagtgaggaagcgc

SEQ ID NO: 4151640 - DNA, 25 bp, Homo sapien
tgggtaaatttgtaataagtcgctc

SEQ ID NO: 4151641 - DNA, 25 bp, Homo sapien
tgtctcagagattgatagctgctca

SEQ ID NO: 4151642 - DNA, 25 bp, Homo sapien
cactagcactcatgatagataagcc

SEQ ID NO: 4151643 - DNA, 25 bp, Homo sapien
tgctgtgacctatcctctcccttaa

SEQ ID NO: 4151644 - DNA, 25 bp, Homo sapien
tatggtgtccttcaccttatgcaaa

SEQ ID NO: 4151645 - DNA, 25 bp, Homo sapien
tcagcctaaggtctttcttatagca

SEQ ID NO: 4151646 - DNA, 25 bp, Homo sapien
cctgaaccaactaagacagatagct

SEQ ID NO: 4151647 - DNA, 25 bp, Homo sapien
tctttatagtaggatttccagacaa

SEQ ID NO: 4151648 - DNA, 25 bp, Homo sapien
aacaaaacgatttgctcttatctga

SEQ ID NO: 4151649 - DNA, 25 bp, Homo sapien
gaaagttttcctctcaacaccatgc

SEQ ID NO: 4151650 - DNA, 25 bp, Homo sapien
cacacacctaagttgggacagagaa

SEQ ID NO: 4151651 - DNA, 25 bp, Homo sapien
tggctattcagcaaggttactcact

SEQ ID NO: 4151652 - DNA, 25 bp, Homo sapien
taactaggtatactgcttatccttg

SEQ ID NO: 4151653 - DNA, 25 bp, Homo sapien
gcatcaagtttcacatagcccctca

SEQ ID NO: 4151654 - DNA, 25 bp, Homo sapien
attttactcaatgggcagctctgcc

SEQ ID NO: 4151655 - DNA, 25 bp, Homo sapien
ttacagggcctatcaaattttctca

SEQ ID NO: 4151656 - DNA, 25 bp, Homo sapien
tccggttcactcttacggtgcagaa

SEQ ID NO: 4151657 - DNA, 25 bp, Homo sapien
ttagcattctaaatcacacacccac

SEQ ID NO: 4151658 - DNA, 25 bp, Homo sapien
ggtggtctgccaacgctcattagca

SEQ ID NO: 4151659 - DNA, 25 bp, Homo sapien
ttggtgtaaaaatgggtggcatcac

SEQ ID NO: 4151660 - DNA, 25 bp, Homo sapien
gattacagcaggagctacggtggtc

SEQ ID NO: 4151661 - DNA, 25 bp, Homo sapien
tgattcgacctaggtttctcctagg

SEQ ID NO: 4151662 - DNA, 25 bp, Homo sapien
gggtgtaggtcaagcgacctaagac

SEQ ID NO: 4151663 - DNA, 25 bp, Homo sapien
ccaacatggtgcttgattcgaccta

SEQ ID NO: 4151664 - DNA, 25 bp, Homo sapien
agaccaactggacccaacatggtgc

SEQ ID NO: 4151665 - DNA, 25 bp, Homo sapien
tctcttctggacataggttgctgct

SEQ ID NO: 4151666 - DNA, 25 bp, Homo sapien
gacccaggcccaagactgatatttg

SEQ ID NO: 4151667 - DNA, 25 bp, Homo sapien
tagcctaggcttccacacagtggag

SEQ ID NO: 4151668 - DNA, 25 bp, Homo sapien
ggatttagcaaccataccaggtggg

SEQ ID NO: 4151669 - DNA, 25 bp, Homo sapien
caagtaagagatggaaacgagagtc

SEQ ID NO: 4151670 - DNA, 25 bp, Homo sapien
taagagatggaaacgagagtcaggc

SEQ ID NO: 4151671 - DNA, 25 bp, Homo sapien
gagagtcaggcattgtggtgtccat

SEQ ID NO: 4151672 - DNA, 25 bp, Homo sapien
gatggaaacgagagtcaggcattgt

SEQ ID NO: 4151673 - DNA, 25 bp, Homo sapien
aaatgtctgagctagttgtccaaca

SEQ ID NO: 4151674 - DNA, 25 bp, Homo sapien
gaatatccatatgtcccctgtaaaa

SEQ ID NO: 4151675 - DNA, 25 bp, Homo sapien
tgttagaagacatactgcaagtgac

SEQ ID NO: 4151676 - DNA, 25 bp, Homo sapien
gacatcagccctagagctttactca

SEQ ID NO: 4151677 - DNA, 25 bp, Homo sapien
tttctgattgagatcccactgtccc

SEQ ID NO: 4151678 - DNA, 25 bp, Homo sapien
tgggtgttccaggagcaaatccttt

SEQ ID NO: 4151679 - DNA, 25 bp, Homo sapien
gatctttgaactcagagaacactgg

SEQ ID NO: 4151680 - DNA, 25 bp, Homo sapien
gcttggctgctcagagattgcccaa

SEQ ID NO: 4151681 - DNA, 25 bp, Homo sapien
atgggaaattctgcaactactttga

SEQ ID NO: 4151682 - DNA, 25 bp, Homo sapien
gaccttgagaattaattcctgccac

SEQ ID NO: 4151683 - DNA, 25 bp, Homo sapien
actatgtcctgtgagagtcctctct

SEQ ID NO: 4151684 - DNA, 25 bp, Homo sapien
ttagactatgtcctgtgagagtcct

SEQ ID NO: 4151685 - DNA, 25 bp, Homo sapien
gtcctctcttcagaccttgagaatt

SEQ ID NO: 4151686 - DNA, 25 bp, Homo sapien
gacagttccatcttccactctctga

SEQ ID NO: 4151687 - DNA, 25 bp, Homo sapien
agttccatcttccactctctgaatg

SEQ ID NO: 4151688 - DNA, 25 bp, Homo sapien
gttccatcttccactctctgaatgc

SEQ ID NO: 4151689 - DNA, 25 bp, Homo sapien
ctgtttctgacagttccatcttcca

SEQ ID NO: 4151690 - DNA, 25 bp, Homo sapien
aaatgatccagataaaccagcggta

SEQ ID NO: 4151691 - DNA, 25 bp, Homo sapien
gcacattcactgagcaaatgatcca

SEQ ID NO: 4151692 - DNA, 25 bp, Homo sapien
taaaccagcggtaggaattggagca

SEQ ID NO: 4151693 - DNA, 25 bp, Homo sapien
ctccaatgagattctgtgcacaggc

SEQ ID NO: 4151694 - DNA, 25 bp, Homo sapien
ggtccctgcatatatctccaggctc

SEQ ID NO: 4151695 - DNA, 25 bp, Homo sapien
accaggtccctgcatatatctccag

SEQ ID NO: 4151696 - DNA, 25 bp, Homo sapien
caggtccctgcatatatctccaggc

SEQ ID NO: 4151697 - DNA, 25 bp, Homo sapien
tccctgcatatatctccaggctcat

SEQ ID NO: 4151698 - DNA, 25 bp, Homo sapien
ctgccgagtgacatctgggcagtgt

SEQ ID NO: 4151699 - DNA, 25 bp, Homo sapien
gcaggttggaccttcgctgtaacca

SEQ ID NO: 4151700 - DNA, 25 bp, Homo sapien
tccctcctttcattaaggagaacag

SEQ ID NO: 4151701 - DNA, 25 bp, Homo sapien
gggcagtgtgacattcagggcagag

SEQ ID NO: 4151702 - DNA, 25 bp, Homo sapien
gttttgtcggaagtcatctcgtaac

SEQ ID NO: 4151703 - DNA, 25 bp, Homo sapien
gggttttgtcggaagtcatctcgta

SEQ ID NO: 4151704 - DNA, 25 bp, Homo sapien
ggttttgtcggaagtcatctcgtaa

SEQ ID NO: 4151705 - DNA, 25 bp, Homo sapien
ttttgtcggaagtcatctcgtaaca

SEQ ID NO: 4151706 - DNA, 25 bp, Homo sapien
cagtaacctgcaaagattaatcacc

SEQ ID NO: 4151707 - DNA, 25 bp, Homo sapien
aaacgatatcccaaaatgtggtgct

SEQ ID NO: 4151708 - DNA, 25 bp, Homo sapien
ggtcattaccatgcctactggacag

SEQ ID NO: 4151709 - DNA, 25 bp, Homo sapien
taaatcccctgtctgaaatctcagt

SEQ ID NO: 4151710 - DNA, 25 bp, Homo sapien
catgtacgttggctcttatcagaga

SEQ ID NO: 4151711 - DNA, 25 bp, Homo sapien
tgatttgaccaatggaactacagca

SEQ ID NO: 4151712 - DNA, 25 bp, Homo sapien
caacttgtcatgttctagaaaggaa

SEQ ID NO: 4151713 - DNA, 25 bp, Homo sapien
cacaggcaaacacaactcatgtacg

SEQ ID NO: 4151714 - DNA, 25 bp, Homo sapien
ctggtattggagatcatcagttttc

SEQ ID NO: 4151715 - DNA, 25 bp, Homo sapien
ggagatcatcagttttccaccacgg

SEQ ID NO: 4151716 - DNA, 25 bp, Homo sapien
agatcatcagttttccaccacggat

SEQ ID NO: 4151717 - DNA, 25 bp, Homo sapien
ggtattggagatcatcagttttcca

SEQ ID NO: 4151718 - DNA, 25 bp, Homo sapien
agacagtcagctctgctgggtcact

SEQ ID NO: 4151719 - DNA, 25 bp, Homo sapien
aagacagtcagctctgctgggtcac

SEQ ID NO: 4151720 - DNA, 25 bp, Homo sapien
tttctctggggacctatgcagggct

SEQ ID NO: 4151721 - DNA, 25 bp, Homo sapien
ttgggatggcgtctcccaagccagc

SEQ ID NO: 4151722 - DNA, 25 bp, Homo sapien
agccagcaaaatacgtttctctggg

SEQ ID NO: 4151723 - DNA, 25 bp, Homo sapien
tctctggggacctatgcagggcttt

SEQ ID NO: 4151724 - DNA, 25 bp, Homo sapien
tggacttgacaacgaaattctacag

SEQ ID NO: 4151725 - DNA, 25 bp, Homo sapien
cagttggttgaggatctccttggac

SEQ ID NO: 4151726 - DNA, 25 bp, Homo sapien
cacctggttaattggcctcctgaga

SEQ ID NO: 4151727 - DNA, 25 bp, Homo sapien
tcctccagtaccacctggttaattg

SEQ ID NO: 4151728 - DNA, 25 bp, Homo sapien
gaacagaatggtatacctcaaaggg

SEQ ID NO: 4151729 - DNA, 25 bp, Homo sapien
ttagttatgctttgggccacagagg

SEQ ID NO: 4151730 - DNA, 25 bp, Homo sapien
gccacagaggtgacaaagggtatcc

SEQ ID NO: 4151731 - DNA, 25 bp, Homo sapien
gaacgggcagtcattgatggaggcc

SEQ ID NO: 4151732 - DNA, 25 bp, Homo sapien
gtgcttatgcaaatctcacatttca

SEQ ID NO: 4151733 - DNA, 25 bp, Homo sapien
ttcttctgacaagctattatgaaca

SEQ ID NO: 4151734 - DNA, 25 bp, Homo sapien
gaatttgcaggcatacgtaaaaatg

SEQ ID NO: 4151735 - DNA, 25 bp, Homo sapien
tgaacattcctttctcggctgtgga

SEQ ID NO: 4151736 - DNA, 25 bp, Homo sapien
cactaacaatgacattattgttccc

SEQ ID NO: 4151737 - DNA, 25 bp, Homo sapien
cagagaactttaatatcaactacag

SEQ ID NO: 4151738 - DNA, 25 bp, Homo sapien
ctatcactaacaatgacattattgt

SEQ ID NO: 4151739 - DNA, 25 bp, Homo sapien
gcagagaactttaatatcaactaca

SEQ ID NO: 4151740 - DNA, 25 bp, Homo sapien
ttcattcttataacctcctccagtg

SEQ ID NO: 4151741 - DNA, 25 bp, Homo sapien
cattcttataacctcctccagtgat

SEQ ID NO: 4151742 - DNA, 25 bp, Homo sapien
ttcttataacctcctccagtgatat

SEQ ID NO: 4151743 - DNA, 25 bp, Homo sapien
attcttataacctcctccagtgata

SEQ ID NO: 4151744 - DNA, 25 bp, Homo sapien
ctgtgtagaaaatgaactggtttta

SEQ ID NO: 4151745 - DNA, 25 bp, Homo sapien
tgtgtagaaaatgaactggttttat

SEQ ID NO: 4151746 - DNA, 25 bp, Homo sapien
tgtagaaaatgaactggttttatta

SEQ ID NO: 4151747 - DNA, 25 bp, Homo sapien
atgaactggttttattaaatagtag

SEQ ID NO: 4151748 - DNA, 25 bp, Homo sapien
tttaattcttagtgtgtaatcgtct

SEQ ID NO: 4151749 - DNA, 25 bp, Homo sapien
tagtgtgtaatcgtctttgatgtca

SEQ ID NO: 4151750 - DNA, 25 bp, Homo sapien
tcttagtgtgtaatcgtctttgatg

SEQ ID NO: 4151751 - DNA, 25 bp, Homo sapien
tgtgtaatcgtctttgatgtcatac

SEQ ID NO: 4151752 - DNA, 25 bp, Homo sapien
agtgtagcagaggcttccatttttc

SEQ ID NO: 4151753 - DNA, 25 bp, Homo sapien
gagtgtagcagaggcttccattttt

SEQ ID NO: 4151754 - DNA, 25 bp, Homo sapien
aacccgattctcagcaatacacata

SEQ ID NO: 4151755 - DNA, 25 bp, Homo sapien
tgagtgtagcagaggcttccatttt

SEQ ID NO: 4151756 - DNA, 25 bp, Homo sapien
tccctcacacctttcctgcaacttc

SEQ ID NO: 4151757 - DNA, 25 bp, Homo sapien
ctgcaacttcaaacttctccgaacc

SEQ ID NO: 4151758 - DNA, 25 bp, Homo sapien
tgcaacttcaaacttctccgaacct

SEQ ID NO: 4151759 - DNA, 25 bp, Homo sapien
ccctcacacctttcctgcaacttca

SEQ ID NO: 4151760 - DNA, 25 bp, Homo sapien
tggcctaacatatagggtgtgtttg

SEQ ID NO: 4151761 - DNA, 25 bp, Homo sapien
gcagtggtacgaaaagcctggttta

SEQ ID NO: 4151762 - DNA, 25 bp, Homo sapien
tagtggaaccctaatgtggcctaac

SEQ ID NO: 4151763 - DNA, 25 bp, Homo sapien
tcagaccataggcaataaggcaatt

SEQ ID NO: 4151764 - DNA, 25 bp, Homo sapien
actggacaccaacataactagcctt

SEQ ID NO: 4151765 - DNA, 25 bp, Homo sapien
gccttaatcctttatcaataccagt

SEQ ID NO: 4151766 - DNA, 25 bp, Homo sapien
taacatcattgtgagagcccatccc

SEQ ID NO: 4151767 - DNA, 25 bp, Homo sapien
tatcaataccagttgcacaaaaatt

SEQ ID NO: 4151768 - DNA, 25 bp, Homo sapien
tctcttggccgaaccacaaactgtg

SEQ ID NO: 4151769 - DNA, 25 bp, Homo sapien
gggaaatgtcactgttcgaccttga

SEQ ID NO: 4151770 - DNA, 25 bp, Homo sapien
gttcgaccttgagcaacaatctgat

SEQ ID NO: 4151771 - DNA, 25 bp, Homo sapien
acaatctgatctcttggccgaacca

SEQ ID NO: 4151772 - DNA, 25 bp, Homo sapien
tgaggaagaccaccagtaggtctct

SEQ ID NO: 4151773 - DNA, 25 bp, Homo sapien
tctctggccaaggttttagatttcc

SEQ ID NO: 4151774 - DNA, 25 bp, Homo sapien
tctggaacatgtagtaataacagaa

SEQ ID NO: 4151775 - DNA, 25 bp, Homo sapien
gaatgtgatgaggaagaccaccagt

SEQ ID NO: 4151776 - DNA, 25 bp, Homo sapien
gcttcctgccacagttaaagcctgg

SEQ ID NO: 4151777 - DNA, 25 bp, Homo sapien
catcagtaacctccagttgagcttt

SEQ ID NO: 4151778 - DNA, 25 bp, Homo sapien
taaagcctggcagatgtagtaaccc

SEQ ID NO: 4151779 - DNA, 25 bp, Homo sapien
acccgcgtcggaacgttgaatgttg

SEQ ID NO: 4151780 - DNA, 25 bp, Homo sapien
tgtagaattataggtggaggtctat

SEQ ID NO: 4151781 - DNA, 25 bp, Homo sapien
ttgtagaattataggtggaggtcta

SEQ ID NO: 4151782 - DNA, 25 bp, Homo sapien
cttgtagaattataggtggaggtct

SEQ ID NO: 4151783 - DNA, 25 bp, Homo sapien
taatctgcagtgtgccttgctcttg

SEQ ID NO: 4151784 - DNA, 25 bp, Homo sapien
cagctaattacaggaagaggatcac

SEQ ID NO: 4151785 - DNA, 25 bp, Homo sapien
gatcaccagtggctttacatttcag

SEQ ID NO: 4151786 - DNA, 25 bp, Homo sapien
gctcttggatctctacccggaaaag

SEQ ID NO: 4151787 - DNA, 25 bp, Homo sapien
aagtctctccacttgaacttgtagc

SEQ ID NO: 4151788 - DNA, 25 bp, Homo sapien
cacaagtataagtgccagtatcaga

SEQ ID NO: 4151789 - DNA, 25 bp, Homo sapien
gtagccacacaagtataagtgccag

SEQ ID NO: 4151790 - DNA, 25 bp, Homo sapien
tccacttgaacttgtagccacacaa

SEQ ID NO: 4151791 - DNA, 25 bp, Homo sapien
gatatatgcacttgctggaagggtt

SEQ ID NO: 4151792 - DNA, 25 bp, Homo sapien
tagtttttactgattgttgctccag

SEQ ID NO: 4151793 - DNA, 25 bp, Homo sapien
ttcttagtaacatcagtgacctgcg

SEQ ID NO: 4151794 - DNA, 25 bp, Homo sapien
ggccctggcaggtcacttaaatcat

SEQ ID NO: 4151795 - DNA, 25 bp, Homo sapien
gcacaggatctgacatgggacttgg

SEQ ID NO: 4151796 - DNA, 25 bp, Homo sapien
tattgggccgcagtcctcttacagt

SEQ ID NO: 4151797 - DNA, 25 bp, Homo sapien
gatcgctctgaccatgaataagtag

SEQ ID NO: 4151798 - DNA, 25 bp, Homo sapien
tgggacttgggtcactgagaccttg

SEQ ID NO: 4151799 - DNA, 25 bp, Homo sapien
actggattatgaagacggacaagga

SEQ ID NO: 4151800 - DNA, 25 bp, Homo sapien
aaccgtggtgggagtcagcacaact

SEQ ID NO: 4151801 - DNA, 25 bp, Homo sapien
catgtgacctgaaccgtggtgggag

SEQ ID NO: 4151802 - DNA, 25 bp, Homo sapien
cggacaaggacatctcctagctctt

SEQ ID NO: 4151803 - DNA, 25 bp, Homo sapien
cactcggtagccttggataaactgg

SEQ ID NO: 4151804 - DNA, 25 bp, Homo sapien
tgaagtctgacgatacatcactcgg

SEQ ID NO: 4151805 - DNA, 25 bp, Homo sapien
gacagcacttcgttcagtcgggact

SEQ ID NO: 4151806 - DNA, 25 bp, Homo sapien
taaattctgccacgaagatgtcgcc

SEQ ID NO: 4151807 - DNA, 25 bp, Homo sapien
cactaatacttgtgctattgtagct

SEQ ID NO: 4151808 - DNA, 25 bp, Homo sapien
attccattctggtgatctggaggag

SEQ ID NO: 4151809 - DNA, 25 bp, Homo sapien
ataattccattctggtgatctggag

SEQ ID NO: 4151810 - DNA, 25 bp, Homo sapien
actaatacttgtgctattgtagctt

SEQ ID NO: 4151811 - DNA, 25 bp, Homo sapien
acctctacccggtattgaatacctg

SEQ ID NO: 4151812 - DNA, 25 bp, Homo sapien
tgaatacctgggaataatccaccaa

SEQ ID NO: 4151813 - DNA, 25 bp, Homo sapien
tattacggaccgaatggctgcatcc

SEQ ID NO: 4151814 - DNA, 25 bp, Homo sapien
aacccctgcactggtactagctgca

SEQ ID NO: 4151815 - DNA, 25 bp, Homo sapien
caaccatatgctaaaacccatcaga

SEQ ID NO: 4151816 - DNA, 25 bp, Homo sapien
agctataaaggctggttgcttcacc

SEQ ID NO: 4151817 - DNA, 25 bp, Homo sapien
gcaggcaccaccaataccagctata

SEQ ID NO: 4151818 - DNA, 25 bp, Homo sapien
cagcataattactgagtcccttcct

SEQ ID NO: 4151819 - DNA, 25 bp, Homo sapien
tcagcgatgaaggcagagaaccgga

SEQ ID NO: 4151820 - DNA, 25 bp, Homo sapien
cttcagcgatgaaggcagagaaccg

SEQ ID NO: 4151821 - DNA, 25 bp, Homo sapien
ttcagcgatgaaggcagagaaccgg

SEQ ID NO: 4151822 - DNA, 25 bp, Homo sapien
ctttgcatctgctcaacactggcta

SEQ ID NO: 4151823 - DNA, 25 bp, Homo sapien
tctgctcaacactggctataggcac

SEQ ID NO: 4151824 - DNA, 25 bp, Homo sapien
tgcatctgctcaacactggctatag

SEQ ID NO: 4151825 - DNA, 25 bp, Homo sapien
gctcaacactggctataggcacatg

SEQ ID NO: 4151826 - DNA, 25 bp, Homo sapien
ttccattgctcattagtcctccatc

SEQ ID NO: 4151827 - DNA, 25 bp, Homo sapien
cttccattgctcattagtcctccat

SEQ ID NO: 4151828 - DNA, 25 bp, Homo sapien
tcatttgggccactgttgctattat

SEQ ID NO: 4151829 - DNA, 25 bp, Homo sapien
aagccatggatagctgggatcacca

SEQ ID NO: 4151830 - DNA, 25 bp, Homo sapien
gctggccaagaatcagcaagccatg

SEQ ID NO: 4151831 - DNA, 25 bp, Homo sapien
tactggcaagctcgtggctggccaa

SEQ ID NO: 4151832 - DNA, 25 bp, Homo sapien
ctggaactgttgtaactggttttgg

SEQ ID NO: 4151833 - DNA, 25 bp, Homo sapien
gttgctgttttatccccttggcctg

SEQ ID NO: 4151834 - DNA, 25 bp, Homo sapien
ggctccatctgagagcatcgttgct

SEQ ID NO: 4151835 - DNA, 25 bp, Homo sapien
ctggttttggtagtgaagtcaatgc

SEQ ID NO: 4151836 - DNA, 25 bp, Homo sapien
cagccaattcatgtatgctgttgga

SEQ ID NO: 4151837 - DNA, 25 bp, Homo sapien
tggatcaggcagatcgacagccaat

SEQ ID NO: 4151838 - DNA, 25 bp, Homo sapien
ggaatgcaagatctgtgtcgtggca

SEQ ID NO: 4151839 - DNA, 25 bp, Homo sapien
tagagaataaccaaatcccatcaga

SEQ ID NO: 4151840 - DNA, 25 bp, Homo sapien
tgtgtggcattctattagacaatcc

SEQ ID NO: 4151841 - DNA, 25 bp, Homo sapien
tagacaatccctcagccaatcggta

SEQ ID NO: 4151842 - DNA, 25 bp, Homo sapien
gccaatcggtagtcaggaatgtaaa

SEQ ID NO: 4151843 - DNA, 25 bp, Homo sapien
ggtgctgaaatcctgagactggttg

SEQ ID NO: 4151844 - DNA, 25 bp, Homo sapien
tcatggttgaaagttagagtgtgtc

SEQ ID NO: 4151845 - DNA, 25 bp, Homo sapien
gagtgtgtctactacaacctcctca

SEQ ID NO: 4151846 - DNA, 25 bp, Homo sapien
gctttgatgcttggtagcctgtgac

SEQ ID NO: 4151847 - DNA, 25 bp, Homo sapien
tagaaatgcacaaagtcatcagcca

SEQ ID NO: 4151848 - DNA, 25 bp, Homo sapien
ggcccaagtggatccattgtttttc

SEQ ID NO: 4151849 - DNA, 25 bp, Homo sapien
tagagggacattggcccaagtggat

SEQ ID NO: 4151850 - DNA, 25 bp, Homo sapien
gttgttccactgcatagtgttccag

SEQ ID NO: 4151851 - DNA, 25 bp, Homo sapien
tagtgttccagctccgtgccaggaa

SEQ ID NO: 4151852 - DNA, 25 bp, Homo sapien
aaatagtgacctgggaattataagg

SEQ ID NO: 4151853 - DNA, 25 bp, Homo sapien
taaaggaagccaatgttatgacata

SEQ ID NO: 4151854 - DNA, 25 bp, Homo sapien
gacaaaaaatattcgcgtatgtgtg

SEQ ID NO: 4151855 - DNA, 25 bp, Homo sapien
ttttagcttacataaaggcccagtc

SEQ ID NO: 4151856 - DNA, 25 bp, Homo sapien
atttacatgatattagccattctgc

SEQ ID NO: 4151857 - DNA, 25 bp, Homo sapien
cattctgctagccattctgctgcaa

SEQ ID NO: 4151858 - DNA, 25 bp, Homo sapien
tattccatgctttatctacctgcct

SEQ ID NO: 4151859 - DNA, 25 bp, Homo sapien
tttcagggtgatgattaccattagc

SEQ ID NO: 4151860 - DNA, 25 bp, Homo sapien
ttacactcgttcgttgccaaggata

SEQ ID NO: 4151861 - DNA, 25 bp, Homo sapien
tacactcgttcgttgccaaggatat

SEQ ID NO: 4151862 - DNA, 25 bp, Homo sapien
tcgttcgttgccaaggatatcatac

SEQ ID NO: 4151863 - DNA, 25 bp, Homo sapien
cactcgttcgttgccaaggatatca

SEQ ID NO: 4151864 - DNA, 25 bp, Homo sapien
aagaagccacgcctcgaacaggagg

SEQ ID NO: 4151865 - DNA, 25 bp, Homo sapien
ggctcttgtcaactcatccaggtga

SEQ ID NO: 4151866 - DNA, 25 bp, Homo sapien
gagttgcagtggactgctgtccaaa

SEQ ID NO: 4151867 - DNA, 25 bp, Homo sapien
tggtgggcaccagctatcactgtca

SEQ ID NO: 4151868 - DNA, 25 bp, Homo sapien
gttacagttacagttacagctccag

SEQ ID NO: 4151869 - DNA, 25 bp, Homo sapien
gagcactttagcctgaaatacagca

SEQ ID NO: 4151870 - DNA, 25 bp, Homo sapien
gaaagcatgggtctcttgacttaat

SEQ ID NO: 4151871 - DNA, 25 bp, Homo sapien
gattctggtgtagccaagagcactt

SEQ ID NO: 4151872 - DNA, 25 bp, Homo sapien
ggctccagacacataacctaacggt

SEQ ID NO: 4151873 - DNA, 25 bp, Homo sapien
ccaggagtctggtccagtgctctca

SEQ ID NO: 4151874 - DNA, 25 bp, Homo sapien
gtcacagagctgtctagattgtcca

SEQ ID NO: 4151875 - DNA, 25 bp, Homo sapien
caaatcagaaatcaaggctccagac

SEQ ID NO: 4151876 - DNA, 25 bp, Homo sapien
atcttacaataaggaagtagttgac

SEQ ID NO: 4151877 - DNA, 25 bp, Homo sapien
gcattttaatgttaccaataggtca

SEQ ID NO: 4151878 - DNA, 25 bp, Homo sapien
cagaaatagatggagtggaataaat

SEQ ID NO: 4151879 - DNA, 25 bp, Homo sapien
cattttaatgttaccaataggtcag

SEQ ID NO: 4151880 - DNA, 25 bp, Homo sapien
catcccagtgttgttattgaactaa

SEQ ID NO: 4151881 - DNA, 25 bp, Homo sapien
gttattgaactaatattctgattgg

SEQ ID NO: 4151882 - DNA, 25 bp, Homo sapien
tgttgttattgaactaatattctga

SEQ ID NO: 4151883 - DNA, 25 bp, Homo sapien
cagtgttgttattgaactaatattc

SEQ ID NO: 4151884 - DNA, 25 bp, Homo sapien
ttttccaaaagagagctgcgatgtg

SEQ ID NO: 4151885 - DNA, 25 bp, Homo sapien
tgtaattttagtcaagaggccagga

SEQ ID NO: 4151886 - DNA, 25 bp, Homo sapien
gaaatgatatcctgtgagacctcct

SEQ ID NO: 4151887 - DNA, 25 bp, Homo sapien
cctgaggatctagcatagtgacaca

SEQ ID NO: 4151888 - DNA, 25 bp, Homo sapien
tgccaccagtgcttgtgcaaaactg

SEQ ID NO: 4151889 - DNA, 25 bp, Homo sapien
gaaaagttacgatcctcatcagatg

SEQ ID NO: 4151890 - DNA, 25 bp, Homo sapien
ggagctacctacactagatctatga

SEQ ID NO: 4151891 - DNA, 25 bp, Homo sapien
gcaaaactgccgctggcaaagatag

SEQ ID NO: 4151892 - DNA, 25 bp, Homo sapien
tgtccaaggacaagattctctcatg

SEQ ID NO: 4151893 - DNA, 25 bp, Homo sapien
taaagaaagccctacagtcagactc

SEQ ID NO: 4151894 - DNA, 25 bp, Homo sapien
taagctatttgaactggtaagaccg

SEQ ID NO: 4151895 - DNA, 25 bp, Homo sapien
tcttggctctgcaaaactagcatca

SEQ ID NO: 4151896 - DNA, 25 bp, Homo sapien
cctctgactttgactcagggctgca

SEQ ID NO: 4151897 - DNA, 25 bp, Homo sapien
ttttagtgggccgaggcctctgact

SEQ ID NO: 4151898 - DNA, 25 bp, Homo sapien
gcaatgctggttgttggtccatccg

SEQ ID NO: 4151899 - DNA, 25 bp, Homo sapien
cttcccttcgatgaggcaatgctgg

SEQ ID NO: 4151900 - DNA, 25 bp, Homo sapien
ttaaacaaggccatattgccaggtt

SEQ ID NO: 4151901 - DNA, 25 bp, Homo sapien
tactcttaaatgctcactaaaaagc

SEQ ID NO: 4151902 - DNA, 25 bp, Homo sapien
gaagcaatggctaatctaccatgac

SEQ ID NO: 4151903 - DNA, 25 bp, Homo sapien
taaatgattgcatggagcacgtctc

SEQ ID NO: 4151904 - DNA, 25 bp, Homo sapien
atggtaaatatttgcatatttaaac

SEQ ID NO: 4151905 - DNA, 25 bp, Homo sapien
ggtaaatatttgcatatttaaacaa

SEQ ID NO: 4151906 - DNA, 25 bp, Homo sapien
acaatggtaaatatttgcatattta

SEQ ID NO: 4151907 - DNA, 25 bp, Homo sapien
caatggtaaatatttgcatatttaa

SEQ ID NO: 4151908 - DNA, 25 bp, Homo sapien
gtatatttacacgaacatagatggt

SEQ ID NO: 4151909 - DNA, 25 bp, Homo sapien
tttcgttgttatgcaagtgtcacgt

SEQ ID NO: 4151910 - DNA, 25 bp, Homo sapien
gcaagtgtcacgtagtatatttaca

SEQ ID NO: 4151911 - DNA, 25 bp, Homo sapien
tgtcacgtagtatatttacacgaac

SEQ ID NO: 4151912 - DNA, 25 bp, Homo sapien
tgcagagtccagatttgtggagaaa

SEQ ID NO: 4151913 - DNA, 25 bp, Homo sapien
agtccagatttgtggagaaaattta

SEQ ID NO: 4151914 - DNA, 25 bp, Homo sapien
cagagtccagatttgtggagaaaat

SEQ ID NO: 4151915 - DNA, 25 bp, Homo sapien
tccagatttgtggagaaaatttatg

SEQ ID NO: 4151916 - DNA, 25 bp, Homo sapien
cctttggcaggtgattcgatgatga

SEQ ID NO: 4151917 - DNA, 25 bp, Homo sapien
accctataaaacacaccccagagag

SEQ ID NO: 4151918 - DNA, 25 bp, Homo sapien
tcctcatgaagggatgagcacccta

SEQ ID NO: 4151919 - DNA, 25 bp, Homo sapien
gagagaaccttgtcccttccgctat

SEQ ID NO: 4151920 - DNA, 25 bp, Homo sapien
cctatgtcccaaaagccaaagatat

SEQ ID NO: 4151921 - DNA, 25 bp, Homo sapien
agactttaatagaagaagtttgctg

SEQ ID NO: 4151922 - DNA, 25 bp, Homo sapien
gatatttactatctagactttaata

SEQ ID NO: 4151923 - DNA, 25 bp, Homo sapien
ctatgtcccaaaagccaaagatatt

SEQ ID NO: 4151924 - DNA, 25 bp, Homo sapien
gaatgtcaccctcgggaaatttaga

SEQ ID NO: 4151925 - DNA, 25 bp, Homo sapien
aatttagaactgtatgccgtgtcat

SEQ ID NO: 4151926 - DNA, 25 bp, Homo sapien
gcctttacccatgtatgtggcacat

SEQ ID NO: 4151927 - DNA, 25 bp, Homo sapien
agtaataaccaatgttcagagtaaa

SEQ ID NO: 4151928 - DNA, 25 bp, Homo sapien
tcttttggccatagcatcattgaaa

SEQ ID NO: 4151929 - DNA, 25 bp, Homo sapien
tcattcaaggtgtaaagggcagttc

SEQ ID NO: 4151930 - DNA, 25 bp, Homo sapien
tctttgcccttatacaggtattacc

SEQ ID NO: 4151931 - DNA, 25 bp, Homo sapien
agtgttttcagttacatattgaggc

SEQ ID NO: 4151932 - DNA, 25 bp, Homo sapien
aaaattttgaataatgtttagaatg

SEQ ID NO: 4151933 - DNA, 25 bp, Homo sapien
aattttgaataatgtttagaatgga

SEQ ID NO: 4151934 - DNA, 25 bp, Homo sapien
aaattttgaataatgtttagaatgg

SEQ ID NO: 4151935 - DNA, 25 bp, Homo sapien
tcttgtcgttctgtggagcttatcc

SEQ ID NO: 4151936 - DNA, 25 bp, Homo sapien
tgagttttccacgttaccagcctgc

SEQ ID NO: 4151937 - DNA, 25 bp, Homo sapien
tttgtcgctgccactctagggaggt

SEQ ID NO: 4151938 - DNA, 25 bp, Homo sapien
tagggaggttctagctggacaatcc

SEQ ID NO: 4151939 - DNA, 25 bp, Homo sapien
gagcaatgcccgttggaatcagcct

SEQ ID NO: 4151940 - DNA, 25 bp, Homo sapien
taaaattgtcatctactggcccttg

SEQ ID NO: 4151941 - DNA, 25 bp, Homo sapien
tactgagccgtttagatgaagcctg

SEQ ID NO: 4151942 - DNA, 25 bp, Homo sapien
tctcttgggatcaaagaccctgtgg

SEQ ID NO: 4151943 - DNA, 25 bp, Homo sapien
ctgtccttgactgttggagcccata

SEQ ID NO: 4151944 - DNA, 25 bp, Homo sapien
ccagtggatcccttagaagaagctg

SEQ ID NO: 4151945 - DNA, 25 bp, Homo sapien
ttgctatagggcaccaaggcctcct

SEQ ID NO: 4151946 - DNA, 25 bp, Homo sapien
tcaagaaggtcgctggcattgcgct

SEQ ID NO: 4151947 - DNA, 25 bp, Homo sapien
gagtcatcacttccatgagtccgga

SEQ ID NO: 4151948 - DNA, 25 bp, Homo sapien
tactgcgaactgaacatactctcgg

SEQ ID NO: 4151949 - DNA, 25 bp, Homo sapien
tatttggaaacagcccgagtatgcc

SEQ ID NO: 4151950 - DNA, 25 bp, Homo sapien
cattgggtggcgtaaacttcacttc

SEQ ID NO: 4151951 - DNA, 25 bp, Homo sapien
tacactggcatacctgagtttgggc

SEQ ID NO: 4151952 - DNA, 25 bp, Homo sapien
tataacgacgtgacaaaaattggct

SEQ ID NO: 4151953 - DNA, 25 bp, Homo sapien
gcacagttgcttcccagtagtgaag

SEQ ID NO: 4151954 - DNA, 25 bp, Homo sapien
gaaggtatgatgctatgcccacgtt

SEQ ID NO: 4151955 - DNA, 25 bp, Homo sapien
ctttatcagcgtctgttagtcacta

SEQ ID NO: 4151956 - DNA, 25 bp, Homo sapien
tttagcatgtctacaaacaggtttg

SEQ ID NO: 4151957 - DNA, 25 bp, Homo sapien
attaatgcagagttctaaaagtggc

SEQ ID NO: 4151958 - DNA, 25 bp, Homo sapien
gtcactactaaaagtcaacaccagt

SEQ ID NO: 4151959 - DNA, 25 bp, Homo sapien
gaagaccttgcttattggctctttc

SEQ ID NO: 4151960 - DNA, 25 bp, Homo sapien
tcttagcttcaaaacattcatcaaa

SEQ ID NO: 4151961 - DNA, 25 bp, Homo sapien
ttatttgaagaccttgcttattggc

SEQ ID NO: 4151962 - DNA, 25 bp, Homo sapien
ttggctctttcctcttagcttcaaa

SEQ ID NO: 4151963 - DNA, 25 bp, Homo sapien
gccttgatatgccagggaattctta

SEQ ID NO: 4151964 - DNA, 25 bp, Homo sapien
cactagccttgatatgccagggaat

SEQ ID NO: 4151965 - DNA, 25 bp, Homo sapien
cattcactagccttgatatgccagg

SEQ ID NO: 4151966 - DNA, 25 bp, Homo sapien
ctagccttgatatgccagggaattc

SEQ ID NO: 4151967 - DNA, 25 bp, Homo sapien
ctctctggtcacagatgatgatggt

SEQ ID NO: 4151968 - DNA, 25 bp, Homo sapien
ccactctctggtcacagatgatgat

SEQ ID NO: 4151969 - DNA, 25 bp, Homo sapien
tgcattcagcattcttcgtagctct

SEQ ID NO: 4151970 - DNA, 25 bp, Homo sapien
tcttcgtagctctgctatactcacc

SEQ ID NO: 4151971 - DNA, 25 bp, Homo sapien
tcagtatttgctccaatgagtgtaa

SEQ ID NO: 4151972 - DNA, 25 bp, Homo sapien
gagatgttgttatgtcccacgaagg

SEQ ID NO: 4151973 - DNA, 25 bp, Homo sapien
tctctgagtcctgttgagatgttgt

SEQ ID NO: 4151974 - DNA, 25 bp, Homo sapien
gattgcttgcaaagatgctgccgct

SEQ ID NO: 4151975 - DNA, 25 bp, Homo sapien
ggccactaggctcccctcgaggagt

SEQ ID NO: 4151976 - DNA, 25 bp, Homo sapien
agaaggagaaattggctgctctttc

SEQ ID NO: 4151977 - DNA, 25 bp, Homo sapien
tcccctcgaggagtttgtgtagcat

SEQ ID NO: 4151978 - DNA, 25 bp, Homo sapien
ctagaaggagaaattggctgctctt

SEQ ID NO: 4151979 - DNA, 25 bp, Homo sapien
ggtcacatgccggtctcggattctt

SEQ ID NO: 4151980 - DNA, 25 bp, Homo sapien
catatgcactgcgtgccaggtcttt

SEQ ID NO: 4151981 - DNA, 25 bp, Homo sapien
cggtctcggattcttagtcctccct

SEQ ID NO: 4151982 - DNA, 25 bp, Homo sapien
tcttttcactcctcgtacttctcat

SEQ ID NO: 4151983 - DNA, 25 bp, Homo sapien
caattcctctagacattcagacagc

SEQ ID NO: 4151984 - DNA, 25 bp, Homo sapien
aaagaaatcacggaacaagaatggg

SEQ ID NO: 4151985 - DNA, 25 bp, Homo sapien
tgcacttgcttttccttcgcccaga

SEQ ID NO: 4151986 - DNA, 25 bp, Homo sapien
cttccagaggcggataattaatcac

SEQ ID NO: 4151987 - DNA, 25 bp, Homo sapien
ggttttccatatccctagcttcatc

SEQ ID NO: 4151988 - DNA, 25 bp, Homo sapien
gttttccatatccctagcttcatcc

SEQ ID NO: 4151989 - DNA, 25 bp, Homo sapien
ttttccatatccctagcttcatcct

SEQ ID NO: 4151990 - DNA, 25 bp, Homo sapien
aggttttccatatccctagcttcat

SEQ ID NO: 4151991 - DNA, 25 bp, Homo sapien
cattcaatttccctactgacttggg

SEQ ID NO: 4151992 - DNA, 25 bp, Homo sapien
taagccttagtcatgtatttaattg

SEQ ID NO: 4151993 - DNA, 25 bp, Homo sapien
ttgacatttgtggtcgttgctgttt

SEQ ID NO: 4151994 - DNA, 25 bp, Homo sapien
gtttgcacttttctggagtggttct

SEQ ID NO: 4151995 - DNA, 25 bp, Homo sapien
tcagttctggggtcgtgggaaggta

SEQ ID NO: 4151996 - DNA, 25 bp, Homo sapien
ctcaattttcacagccatgtatatt

SEQ ID NO: 4151997 - DNA, 25 bp, Homo sapien
tttcatagtccattgttatgaccat

SEQ ID NO: 4151998 - DNA, 25 bp, Homo sapien
tatttcatagtccattgttatgacc

SEQ ID NO: 4151999 - DNA, 25 bp, Homo sapien
atgtatatttcatagtccattgtta

SEQ ID NO: 4152000 - DNA, 25 bp, Homo sapien
taatgttgcattcatacgtataact

SEQ ID NO: 4152001 - DNA, 25 bp, Homo sapien
tgcattcatacgtataactaagcat

SEQ ID NO: 4152002 - DNA, 25 bp, Homo sapien
ccttaatgttgcattcatacgtata

SEQ ID NO: 4152003 - DNA, 25 bp, Homo sapien
tgttgcattcatacgtataactaag

SEQ ID NO: 4152004 - DNA, 25 bp, Homo sapien
caatgaagcataagagactggcgtc

SEQ ID NO: 4152005 - DNA, 25 bp, Homo sapien
gattgactggatacagtctgctgcc

SEQ ID NO: 4152006 - DNA, 25 bp, Homo sapien
ctaagtggttaaagcaaagtgatgg

SEQ ID NO: 4152007 - DNA, 25 bp, Homo sapien
ggaaggattcttcagggtagtgaac

SEQ ID NO: 4152008 - DNA, 25 bp, Homo sapien
ctagcatattagcaagggtgaaatc

SEQ ID NO: 4152009 - DNA, 25 bp, Homo sapien
agtttaagttcacaggtcatgggct

SEQ ID NO: 4152010 - DNA, 25 bp, Homo sapien
ggtcatagccctgaacaactagcat

SEQ ID NO: 4152011 - DNA, 25 bp, Homo sapien
ttcacaggtcatgggctccgggtca

SEQ ID NO: 4152012 - DNA, 25 bp, Homo sapien
actgtcgtaaaggtccttccagtca

SEQ ID NO: 4152013 - DNA, 25 bp, Homo sapien
tggcattggaactgtcgtaaaggtc

SEQ ID NO: 4152014 - DNA, 25 bp, Homo sapien
cttcccactgcagcttgtctgattg

SEQ ID NO: 4152015 - DNA, 25 bp, Homo sapien
tctgattgtaagatgatcattgaag

SEQ ID NO: 4152016 - DNA, 25 bp, Homo sapien
tctgaaggcagttttaaagctctca

SEQ ID NO: 4152017 - DNA, 25 bp, Homo sapien
ctgaaggcagttttaaagctctcac

SEQ ID NO: 4152018 - DNA, 25 bp, Homo sapien
ctatctgaaggcagttttaaagctc

SEQ ID NO: 4152019 - DNA, 25 bp, Homo sapien
tatctgaaggcagttttaaagctct

SEQ ID NO: 4152020 - DNA, 25 bp, Homo sapien
ggagtcctcattaaccgctctgagc

SEQ ID NO: 4152021 - DNA, 25 bp, Homo sapien
tgtatcagaatatgataggagtcct

SEQ ID NO: 4152022 - DNA, 25 bp, Homo sapien
accgctctgagctctttgtaataaa

SEQ ID NO: 4152023 - DNA, 25 bp, Homo sapien
gggttgtactgaatatgcaggagct

SEQ ID NO: 4152024 - DNA, 25 bp, Homo sapien
tcctgttgaaatacgaatgagtccc

SEQ ID NO: 4152025 - DNA, 25 bp, Homo sapien
gtccctttggtgataggcttggcaa

SEQ ID NO: 4152026 - DNA, 25 bp, Homo sapien
caagatgcgtaccagtgaccaggat

SEQ ID NO: 4152027 - DNA, 25 bp, Homo sapien
cacattgtgagatcttccagaatcg

SEQ ID NO: 4152028 - DNA, 25 bp, Homo sapien
ggaagaaacagtatgaagatcaaga

SEQ ID NO: 4152029 - DNA, 25 bp, Homo sapien
aggaaactgaagcaatatttttgga

SEQ ID NO: 4152030 - DNA, 25 bp, Homo sapien
tatgaataccaccttatactaatgt

SEQ ID NO: 4152031 - DNA, 25 bp, Homo sapien
tgtaaaccatttagagtagaactga

SEQ ID NO: 4152032 - DNA, 25 bp, Homo sapien
gagtgacgcatttacatgtgcatct

SEQ ID NO: 4152033 - DNA, 25 bp, Homo sapien
gctcgtactgaacgtgtttcatgtg

SEQ ID NO: 4152034 - DNA, 25 bp, Homo sapien
cccctgtttgctcgtactgaacgtg

SEQ ID NO: 4152035 - DNA, 25 bp, Homo sapien
gtttcatgtgtataaggagtgacgc

SEQ ID NO: 4152036 - DNA, 25 bp, Homo sapien
ccagagacagtccaccttgcagtgg

SEQ ID NO: 4152037 - DNA, 25 bp, Homo sapien
tggctctgaacctcgggacctacat

SEQ ID NO: 4152038 - DNA, 25 bp, Homo sapien
catctccagagacagtccaccttgc

SEQ ID NO: 4152039 - DNA, 25 bp, Homo sapien
ggctctgaacctcgggacctacatc

SEQ ID NO: 4152040 - DNA, 25 bp, Homo sapien
aaaaggcccctatgacagcaacaca

SEQ ID NO: 4152041 - DNA, 25 bp, Homo sapien
tgacaccatagacatctcaactgct

SEQ ID NO: 4152042 - DNA, 25 bp, Homo sapien
tgcttgtgtcgtaattgaagaggac

SEQ ID NO: 4152043 - DNA, 25 bp, Homo sapien
cactaaggaaaaggcatcaatttga

SEQ ID NO: 4152044 - DNA, 25 bp, Homo sapien
atcatgtcaggaccagtagaaatca

SEQ ID NO: 4152045 - DNA, 25 bp, Homo sapien
aatcatgtcaggaccagtagaaatc

SEQ ID NO: 4152046 - DNA, 25 bp, Homo sapien
tcatgtcaggaccagtagaaatcat

SEQ ID NO: 4152047 - DNA, 25 bp, Homo sapien
gaatgaggtttacttcactttgacg

SEQ ID NO: 4152048 - DNA, 25 bp, Homo sapien
atgaggtttacttcactttgacgtt

SEQ ID NO: 4152049 - DNA, 25 bp, Homo sapien
ttgaatgaggtttacttcactttga

SEQ ID NO: 4152050 - DNA, 25 bp, Homo sapien
aatgaggtttacttcactttgacgt

SEQ ID NO: 4152051 - DNA, 25 bp, Homo sapien
gcttttgctttttagtgacattcac

SEQ ID NO: 4152052 - DNA, 25 bp, Homo sapien
tctggtcattaagcagcttttgctt

SEQ ID NO: 4152053 - DNA, 25 bp, Homo sapien
tcttgttctgaaatgatgcctgctt

SEQ ID NO: 4152054 - DNA, 25 bp, Homo sapien
gctttttagtgacattcactgattt

SEQ ID NO: 4152055 - DNA, 25 bp, Homo sapien
tctttgacatggtgcattggcattt

SEQ ID NO: 4152056 - DNA, 25 bp, Homo sapien
gatgtccagtatagtggccaacccc

SEQ ID NO: 4152057 - DNA, 25 bp, Homo sapien
gcatttggccctcaacagctctgtg

SEQ ID NO: 4152058 - DNA, 25 bp, Homo sapien
cctaactctaagctttgatgtccag

SEQ ID NO: 4152059 - DNA, 25 bp, Homo sapien
caacatcactatttttcgacagctg

SEQ ID NO: 4152060 - DNA, 25 bp, Homo sapien
agctgactcaatagctcagcaggca

SEQ ID NO: 4152061 - DNA, 25 bp, Homo sapien
tgactcaatagctcagcaggcattt

SEQ ID NO: 4152062 - DNA, 25 bp, Homo sapien
cactatttttcgacagctgactcaa

SEQ ID NO: 4152063 - DNA, 25 bp, Homo sapien
tctttatcaggaccggtcagctgcc

SEQ ID NO: 4152064 - DNA, 25 bp, Homo sapien
tcagtttagtcatctggtgaagctg

SEQ ID NO: 4152065 - DNA, 25 bp, Homo sapien
tgaagctgtctaaaagacatttctt

SEQ ID NO: 4152066 - DNA, 25 bp, Homo sapien
agaaccccaagattcagttcctgga

SEQ ID NO: 4152067 - DNA, 25 bp, Homo sapien
taagcagctggggtatgagaattcc

SEQ ID NO: 4152068 - DNA, 25 bp, Homo sapien
cactgcttgctgtttctgtatcatc

SEQ ID NO: 4152069 - DNA, 25 bp, Homo sapien
tgagaattcctgtcccactgcttgc

SEQ ID NO: 4152070 - DNA, 25 bp, Homo sapien
gtatcatcaccagaattgagtgtta

SEQ ID NO: 4152071 - DNA, 25 bp, Homo sapien
tgtcagctttggaaacctggatgcc

SEQ ID NO: 4152072 - DNA, 25 bp, Homo sapien
aatcttgtgacatgattcagctatg

SEQ ID NO: 4152073 - DNA, 25 bp, Homo sapien
ttcagctatgatatattctattggt

SEQ ID NO: 4152074 - DNA, 25 bp, Homo sapien
gtcagctttggaaacctggatgccc

SEQ ID NO: 4152075 - DNA, 25 bp, Homo sapien
gggacatgtcatcacaagccttcgg

SEQ ID NO: 4152076 - DNA, 25 bp, Homo sapien
gacatgtcatcacaagccttcgggg

SEQ ID NO: 4152077 - DNA, 25 bp, Homo sapien
catgtcatcacaagccttcggggca

SEQ ID NO: 4152078 - DNA, 25 bp, Homo sapien
atgtcatcacaagccttcggggcac

SEQ ID NO: 4152079 - DNA, 25 bp, Homo sapien
ataaggtacatttccatgatgtatc

SEQ ID NO: 4152080 - DNA, 25 bp, Homo sapien
tagaataaggtacatttccatgatg

SEQ ID NO: 4152081 - DNA, 25 bp, Homo sapien
ttattagaataaggtacatttccat

SEQ ID NO: 4152082 - DNA, 25 bp, Homo sapien
gatgttactggttttattagaataa

SEQ ID NO: 4152083 - DNA, 25 bp, Homo sapien
gagagaaaggtgtgccctattgtct

SEQ ID NO: 4152084 - DNA, 25 bp, Homo sapien
agagagaaaggtgtgccctattgtc

SEQ ID NO: 4152085 - DNA, 25 bp, Homo sapien
cctgagcattgatatatcggcattg

SEQ ID NO: 4152086 - DNA, 25 bp, Homo sapien
gatatatcggcattgtagcccaaag

SEQ ID NO: 4152087 - DNA, 25 bp, Homo sapien
gcattgtagcccaaagcaggccgaa

SEQ ID NO: 4152088 - DNA, 25 bp, Homo sapien
caggccgaacgtgagaagtgtttcc

SEQ ID NO: 4152089 - DNA, 25 bp, Homo sapien
ctttagactctttatatgccagaag

SEQ ID NO: 4152090 - DNA, 25 bp, Homo sapien
tttagactctttatatgccagaaga

SEQ ID NO: 4152091 - DNA, 25 bp, Homo sapien
ttagactctttatatgccagaagaa

SEQ ID NO: 4152092 - DNA, 25 bp, Homo sapien
ttactgctttcattagtccgttctg

SEQ ID NO: 4152093 - DNA, 25 bp, Homo sapien
tcttactgctttcattagtccgttc

SEQ ID NO: 4152094 - DNA, 25 bp, Homo sapien
actgctttcattagtccgttctggg

SEQ ID NO: 4152095 - DNA, 25 bp, Homo sapien
gtcttactgctttcattagtccgtt

SEQ ID NO: 4152096 - DNA, 25 bp, Homo sapien
ggtaatattttagtcaatgtggcac

SEQ ID NO: 4152097 - DNA, 25 bp, Homo sapien
ctggtaatattttagtcaatgtggc

SEQ ID NO: 4152098 - DNA, 25 bp, Homo sapien
taaaaggtggcatcttttctggtaa

SEQ ID NO: 4152099 - DNA, 25 bp, Homo sapien
ttctggtaatattttagtcaatgtg

SEQ ID NO: 4152100 - DNA, 25 bp, Homo sapien
tctcaatttctttttcgctctccat

SEQ ID NO: 4152101 - DNA, 25 bp, Homo sapien
tttctcaatttctttttcgctctcc

SEQ ID NO: 4152102 - DNA, 25 bp, Homo sapien
cctttctcctcttttctcaatttct

SEQ ID NO: 4152103 - DNA, 25 bp, Homo sapien
cttttctcaatttctttttcgctct

SEQ ID NO: 4152104 - DNA, 25 bp, Homo sapien
taatatctccacaacgcaccaggga

SEQ ID NO: 4152105 - DNA, 25 bp, Homo sapien
aaatctgatcatgtccctctgctcc

SEQ ID NO: 4152106 - DNA, 25 bp, Homo sapien
tatatcctatcttgggtttaatatc

SEQ ID NO: 4152107 - DNA, 25 bp, Homo sapien
tttaacaggctccttatatcctatc

SEQ ID NO: 4152108 - DNA, 25 bp, Homo sapien
tctcacgaggttacagtcaggatgc

SEQ ID NO: 4152109 - DNA, 25 bp, Homo sapien
aatttggaagcagctcgttggagcg

SEQ ID NO: 4152110 - DNA, 25 bp, Homo sapien
tggttcactgatgttgctggcaaat

SEQ ID NO: 4152111 - DNA, 25 bp, Homo sapien
gacttagagatgctatcggatccca

SEQ ID NO: 4152112 - DNA, 25 bp, Homo sapien
tagaggcagacatcctacctcctct

SEQ ID NO: 4152113 - DNA, 25 bp, Homo sapien
caactaccttcactcatagataagt

SEQ ID NO: 4152114 - DNA, 25 bp, Homo sapien
atattccacaggttagaggcagaca

SEQ ID NO: 4152115 - DNA, 25 bp, Homo sapien
cacaacaactaccttcactcataga

SEQ ID NO: 4152116 - DNA, 25 bp, Homo sapien
ctgggaagatttttgttcatgagaa

SEQ ID NO: 4152117 - DNA, 25 bp, Homo sapien
tgggaagatttttgttcatgagaaa

SEQ ID NO: 4152118 - DNA, 25 bp, Homo sapien
aagatttttgttcatgagaaaaatt

SEQ ID NO: 4152119 - DNA, 25 bp, Homo sapien
ggaagatttttgttcatgagaaaaa

SEQ ID NO: 4152120 - DNA, 25 bp, Homo sapien
ttctggccgccaagcatgagctgag

SEQ ID NO: 4152121 - DNA, 25 bp, Homo sapien
aaattggtgcttctcgttccttcgg

SEQ ID NO: 4152122 - DNA, 25 bp, Homo sapien
cataaaaacgactctggaaaagcat

SEQ ID NO: 4152123 - DNA, 25 bp, Homo sapien
tccttcggtgaatacaatttatgtg

SEQ ID NO: 4152124 - DNA, 25 bp, Homo sapien
aaatagaggcaggaaggtactctgg

SEQ ID NO: 4152125 - DNA, 25 bp, Homo sapien
tatttgcctttgagataagctcagt

SEQ ID NO: 4152126 - DNA, 25 bp, Homo sapien
tttatggctgcaggcgagataccga

SEQ ID NO: 4152127 - DNA, 25 bp, Homo sapien
tcaaaacaatgtgagggccattggg

SEQ ID NO: 4152128 - DNA, 25 bp, Homo sapien
caatgtgaagggcagattagaagag

SEQ ID NO: 4152129 - DNA, 25 bp, Homo sapien
gagtcttctaaagtgggttggtcag

SEQ ID NO: 4152130 - DNA, 25 bp, Homo sapien
taggagaagttacccaggaatcaat

SEQ ID NO: 4152131 - DNA, 25 bp, Homo sapien
attagaagagatccggtttggaggc

SEQ ID NO: 4152132 - DNA, 25 bp, Homo sapien
gagaaacccactccgatgatccaat

SEQ ID NO: 4152133 - DNA, 25 bp, Homo sapien
ttcattagaaagctattgaagaaaa

SEQ ID NO: 4152134 - DNA, 25 bp, Homo sapien
tcatgagaaacccactccgatgatc

SEQ ID NO: 4152135 - DNA, 25 bp, Homo sapien
catgagaaacccactccgatgatcc

SEQ ID NO: 4152136 - DNA, 25 bp, Homo sapien
actggaagcataacactggcatttg

SEQ ID NO: 4152137 - DNA, 25 bp, Homo sapien
tactggaagcataacactggcattt

SEQ ID NO: 4152138 - DNA, 25 bp, Homo sapien
ctggaagcataacactggcatttgc

SEQ ID NO: 4152139 - DNA, 25 bp, Homo sapien
tggaagcataacactggcatttgcc

SEQ ID NO: 4152140 - DNA, 25 bp, Homo sapien
catgatcttatcatgggaaaactgc

SEQ ID NO: 4152141 - DNA, 25 bp, Homo sapien
catggcatgatcttatcatgggaaa

SEQ ID NO: 4152142 - DNA, 25 bp, Homo sapien
tgatcttatcatgggaaaactgctt

SEQ ID NO: 4152143 - DNA, 25 bp, Homo sapien
gcatggcatgatcttatcatgggaa

SEQ ID NO: 4152144 - DNA, 25 bp, Homo sapien
ggcacatctcatgtcgaggcaggca

SEQ ID NO: 4152145 - DNA, 25 bp, Homo sapien
acagtcacggcacatgaaaggcaca

SEQ ID NO: 4152146 - DNA, 25 bp, Homo sapien
catctcatgtcgaggcaggcaagag

SEQ ID NO: 4152147 - DNA, 25 bp, Homo sapien
ctccctttgggttcctctcgcaaca

SEQ ID NO: 4152148 - DNA, 25 bp, Homo sapien
tttcacacccgtcaaatggttctga

SEQ ID NO: 4152149 - DNA, 25 bp, Homo sapien
ccttctacaagcaggtggggctaca

SEQ ID NO: 4152150 - DNA, 25 bp, Homo sapien
tccagccgaatgtgtgtttctacag

SEQ ID NO: 4152151 - DNA, 25 bp, Homo sapien
tacagctgctagtctttcacacccg

SEQ ID NO: 4152152 - DNA, 25 bp, Homo sapien
tatagtgaaagtttccagttttcaa

SEQ ID NO: 4152153 - DNA, 25 bp, Homo sapien
atagtgaaagtttccagttttcaat

SEQ ID NO: 4152154 - DNA, 25 bp, Homo sapien
ccacagccgatggaaggaataactg

SEQ ID NO: 4152155 - DNA, 25 bp, Homo sapien
agtcaatccacagccgatggaagga

SEQ ID NO: 4152156 - DNA, 25 bp, Homo sapien
gccaagaatcagtgaataaccgagg

SEQ ID NO: 4152157 - DNA, 25 bp, Homo sapien
taactgggagcatatcagtgaacaa

SEQ ID NO: 4152158 - DNA, 25 bp, Homo sapien
tctcctggctcccaggagttcatca

SEQ ID NO: 4152159 - DNA, 25 bp, Homo sapien
aaactttgtgcagatacccacttga

SEQ ID NO: 4152160 - DNA, 25 bp, Homo sapien
ttctgaccttggctagctcaccact

SEQ ID NO: 4152161 - DNA, 25 bp, Homo sapien
tggctagctcaccacttcttaggca

SEQ ID NO: 4152162 - DNA, 25 bp, Homo sapien
acttccctagctcttatcctatatg

SEQ ID NO: 4152163 - DNA, 25 bp, Homo sapien
gctcttatcctatatgagtttgaag

SEQ ID NO: 4152164 - DNA, 25 bp, Homo sapien
agcagggtcaagtttactctgccca

SEQ ID NO: 4152165 - DNA, 25 bp, Homo sapien
catctgcacgaagaacctcagcagg

SEQ ID NO: 4152166 - DNA, 25 bp, Homo sapien
agagtgccagtgattttgaggttca

SEQ ID NO: 4152167 - DNA, 25 bp, Homo sapien
agtgccagtgattttgaggttcata

SEQ ID NO: 4152168 - DNA, 25 bp, Homo sapien
gaagagtgccagtgattttgaggtt

SEQ ID NO: 4152169 - DNA, 25 bp, Homo sapien
ttggaagagtgccagtgattttgag

SEQ ID NO: 4152170 - DNA, 25 bp, Homo sapien
ccgcccatgtcagggggattttatg

SEQ ID NO: 4152171 - DNA, 25 bp, Homo sapien
tatttgatggaaccgcccatgtcag

SEQ ID NO: 4152172 - DNA, 25 bp, Homo sapien
gcaataacccgtttatttgatggaa

SEQ ID NO: 4152173 - DNA, 25 bp, Homo sapien
ccgtttatttgatggaaccgcccat

SEQ ID NO: 4152174 - DNA, 25 bp, Homo sapien
tcatacagctctgacagagaggtct

SEQ ID NO: 4152175 - DNA, 25 bp, Homo sapien
ggggtcacaatcatacagctctgac

SEQ ID NO: 4152176 - DNA, 25 bp, Homo sapien
tagcagcgtagatcatattctccaa

SEQ ID NO: 4152177 - DNA, 25 bp, Homo sapien
cagagaggtctagcagcgtagatca

SEQ ID NO: 4152178 - DNA, 25 bp, Homo sapien
taggtgacatcttctgtggtaaact

SEQ ID NO: 4152179 - DNA, 25 bp, Homo sapien
taaactgtgcctgatatggccccac

SEQ ID NO: 4152180 - DNA, 25 bp, Homo sapien
ttccaagggctaggtttaggtgaca

SEQ ID NO: 4152181 - DNA, 25 bp, Homo sapien
catcttctgtggtaaactgtgcctg

SEQ ID NO: 4152182 - DNA, 25 bp, Homo sapien
ctgttgcaagaagaaggctaccata

SEQ ID NO: 4152183 - DNA, 25 bp, Homo sapien
ggattttcagagtcacttaactctg

SEQ ID NO: 4152184 - DNA, 25 bp, Homo sapien
taaagcttcatagaacagtccaact

SEQ ID NO: 4152185 - DNA, 25 bp, Homo sapien
ggctaccataggtggattttcagag

SEQ ID NO: 4152186 - DNA, 25 bp, Homo sapien
aaattcagtgtgctgattgatagct

SEQ ID NO: 4152187 - DNA, 25 bp, Homo sapien
ttcagtgtgctgattgatagctcta

SEQ ID NO: 4152188 - DNA, 25 bp, Homo sapien
ggaaaattcagtgtgctgattgata

SEQ ID NO: 4152189 - DNA, 25 bp, Homo sapien
cagtgtgctgattgatagctctaat

SEQ ID NO: 4152190 - DNA, 25 bp, Homo sapien
gaatcaaactgtagctttgatggtg

SEQ ID NO: 4152191 - DNA, 25 bp, Homo sapien
cactgtgttggaaaggtcaacatgc

SEQ ID NO: 4152192 - DNA, 25 bp, Homo sapien
tgtagctttgatggtggatagcaaa

SEQ ID NO: 4152193 - DNA, 25 bp, Homo sapien
ggaaaggtcaacatgcagaaaatgc

SEQ ID NO: 4152194 - DNA, 25 bp, Homo sapien
acagacctagagagtttggaggctc

SEQ ID NO: 4152195 - DNA, 25 bp, Homo sapien
gcagaagaaagatcctcatggctca

SEQ ID NO: 4152196 - DNA, 25 bp, Homo sapien
gaagctggactactctgtgttctac

SEQ ID NO: 4152197 - DNA, 25 bp, Homo sapien
cagccaggtcagtgtaaatctacac

SEQ ID NO: 4152198 - DNA, 25 bp, Homo sapien
ttggtgacccatgtgaaatgaatta

SEQ ID NO: 4152199 - DNA, 25 bp, Homo sapien
ccttacacagttggagttgatagcc

SEQ ID NO: 4152200 - DNA, 25 bp, Homo sapien
tctggtagacaggtgtccttacaca

SEQ ID NO: 4152201 - DNA, 25 bp, Homo sapien
taatctcaagcctgttctggtagac

SEQ ID NO: 4152202 - DNA, 25 bp, Homo sapien
gattctactctccaccacacagtgt

SEQ ID NO: 4152203 - DNA, 25 bp, Homo sapien
ggcctcacagcgaatcttgattcta

SEQ ID NO: 4152204 - DNA, 25 bp, Homo sapien
atttctgaaagtaaatggtggcctc

SEQ ID NO: 4152205 - DNA, 25 bp, Homo sapien
ttgattctactctccaccacacagt

SEQ ID NO: 4152206 - DNA, 25 bp, Homo sapien
tcgagattgtatagttactcctact

SEQ ID NO: 4152207 - DNA, 25 bp, Homo sapien
caccgagctggaaagctctgattgt

SEQ ID NO: 4152208 - DNA, 25 bp, Homo sapien
tttctgtcccatctagcaggccctt

SEQ ID NO: 4152209 - DNA, 25 bp, Homo sapien
tcccctgggtatatatcgagattgt

SEQ ID NO: 4152210 - DNA, 25 bp, Homo sapien
gagagctatgcctattgtaacacca

SEQ ID NO: 4152211 - DNA, 25 bp, Homo sapien
ccagttttacctctaaacactgaga

SEQ ID NO: 4152212 - DNA, 25 bp, Homo sapien
tgtaacaccatacttcaatctcatg

SEQ ID NO: 4152213 - DNA, 25 bp, Homo sapien
tcaaaggcatcagtagatccaatct

SEQ ID NO: 4152214 - DNA, 25 bp, Homo sapien
ttgggagtatacgatatttctaaag

SEQ ID NO: 4152215 - DNA, 25 bp, Homo sapien
cttgggagtatacgatatttctaaa

SEQ ID NO: 4152216 - DNA, 25 bp, Homo sapien
tgggagtatacgatatttctaaaga

SEQ ID NO: 4152217 - DNA, 25 bp, Homo sapien
gggagtatacgatatttctaaagaa

SEQ ID NO: 4152218 - DNA, 25 bp, Homo sapien
aaaggaaccaccattgtagcaggac

SEQ ID NO: 4152219 - DNA, 25 bp, Homo sapien
aaggaaccaccattgtagcaggacg

SEQ ID NO: 4152220 - DNA, 25 bp, Homo sapien
aggaaccaccattgtagcaggacga

SEQ ID NO: 4152221 - DNA, 25 bp, Homo sapien
taaaggaaccaccattgtagcagga

SEQ ID NO: 4152222 - DNA, 25 bp, Homo sapien
agctgtgtgatttctctagcagctc

SEQ ID NO: 4152223 - DNA, 25 bp, Homo sapien
gaacgtatagcagtccctgtctagc

SEQ ID NO: 4152224 - DNA, 25 bp, Homo sapien
caggttggaggccatgaatatatag

SEQ ID NO: 4152225 - DNA, 25 bp, Homo sapien
tgaatgtatagaagtccatgaacgt

SEQ ID NO: 4152226 - DNA, 25 bp, Homo sapien
tcttagggtcctaggcagaggctcc

SEQ ID NO: 4152227 - DNA, 25 bp, Homo sapien
caggaaatgccctcactgtggtggg

SEQ ID NO: 4152228 - DNA, 25 bp, Homo sapien
gctgttgagtcaagaggtccccaaa

SEQ ID NO: 4152229 - DNA, 25 bp, Homo sapien
taaaggtcacccactaaagaatgag

SEQ ID NO: 4152230 - DNA, 25 bp, Homo sapien
caaggtagggaatcatgaatatcct

SEQ ID NO: 4152231 - DNA, 25 bp, Homo sapien
tgattcaaggtagggaatcatgaat

SEQ ID NO: 4152232 - DNA, 25 bp, Homo sapien
cggcattgattcaaggtagggaatc

SEQ ID NO: 4152233 - DNA, 25 bp, Homo sapien
gatggcggcattgattcaaggtagg

SEQ ID NO: 4152234 - DNA, 25 bp, Homo sapien
tattcacggacaaagaggctactgg

SEQ ID NO: 4152235 - DNA, 25 bp, Homo sapien
gctactgggagaagttcatgctgcc

SEQ ID NO: 4152236 - DNA, 25 bp, Homo sapien
ggcaagtacccacacaatatagagc

SEQ ID NO: 4152237 - DNA, 25 bp, Homo sapien
tgtccatttaactggaaagccctag

SEQ ID NO: 4152238 - DNA, 25 bp, Homo sapien
gcagaggccgtatagtctaaaactc

SEQ ID NO: 4152239 - DNA, 25 bp, Homo sapien
cacatgccccatgccttttaaagat

SEQ ID NO: 4152240 - DNA, 25 bp, Homo sapien
gatacaacatctagaaaactcagta

SEQ ID NO: 4152241 - DNA, 25 bp, Homo sapien
ccacccgactgtgggagcagaggcc

SEQ ID NO: 4152242 - DNA, 25 bp, Homo sapien
gccttgtaagtgattaacgtgagaa

SEQ ID NO: 4152243 - DNA, 25 bp, Homo sapien
gtgaagacatggcattcgggctacc

SEQ ID NO: 4152244 - DNA, 25 bp, Homo sapien
taaacagccattctacaggagatcc

SEQ ID NO: 4152245 - DNA, 25 bp, Homo sapien
tgagaattggaatcagcccttccat

SEQ ID NO: 4152246 - DNA, 25 bp, Homo sapien
ggcagaacaatggaactcaatcagt

SEQ ID NO: 4152247 - DNA, 25 bp, Homo sapien
tttgtgaatcatagggagagtccac

SEQ ID NO: 4152248 - DNA, 25 bp, Homo sapien
gagtccacactataggaatcatgta

SEQ ID NO: 4152249 - DNA, 25 bp, Homo sapien
cagctgctatgtaggtcccagtcaa

SEQ ID NO: 4152250 - DNA, 25 bp, Homo sapien
gttccataggtatgatgattctggg

SEQ ID NO: 4152251 - DNA, 25 bp, Homo sapien
tattgttccataggtatgatgattc

SEQ ID NO: 4152252 - DNA, 25 bp, Homo sapien
ccccacaaactccactgttttattg

SEQ ID NO: 4152253 - DNA, 25 bp, Homo sapien
actccactgttttattgttccatag

SEQ ID NO: 4152254 - DNA, 25 bp, Homo sapien
tggtgaccatggcattgggaaagat

SEQ ID NO: 4152255 - DNA, 25 bp, Homo sapien
ttggtgaccatggcattgggaaaga

SEQ ID NO: 4152256 - DNA, 25 bp, Homo sapien
catcgatgacacgacacgtaactac

SEQ ID NO: 4152257 - DNA, 25 bp, Homo sapien
tcagcgtcatcgatgacatgacaca

SEQ ID NO: 4152258 - DNA, 25 bp, Homo sapien
tcagcgtcatcgatgacacgacaca

SEQ ID NO: 4152259 - DNA, 25 bp, Homo sapien
ccaatggacatggaagcgtcatcga

SEQ ID NO: 4152260 - DNA, 25 bp, Homo sapien
tccataatgatcatgttgtgcctgt

SEQ ID NO: 4152261 - DNA, 25 bp, Homo sapien
tgcctgtcagaagttgacttcatca

SEQ ID NO: 4152262 - DNA, 25 bp, Homo sapien
atcatgttgtgcctgtcagaagttg

SEQ ID NO: 4152263 - DNA, 25 bp, Homo sapien
agaagttgacttcatcactaaaact

SEQ ID NO: 4152264 - DNA, 25 bp, Homo sapien
gtctagttgacctgtctccttttcc

SEQ ID NO: 4152265 - DNA, 25 bp, Homo sapien
tgtctagttgacctgtctccttttc

SEQ ID NO: 4152266 - DNA, 25 bp, Homo sapien
tcggttgacggtaaatacattgcag

SEQ ID NO: 4152267 - DNA, 25 bp, Homo sapien
tatagatttctttctcggttgacgg

SEQ ID NO: 4152268 - DNA, 25 bp, Homo sapien
agcatcttccacatccggataaata

SEQ ID NO: 4152269 - DNA, 25 bp, Homo sapien
tcaattgtcggtaaattcagcatct

SEQ ID NO: 4152270 - DNA, 25 bp, Homo sapien
ggcaacttctttcaaattgtccctc

SEQ ID NO: 4152271 - DNA, 25 bp, Homo sapien
tcttccctgagaatgctgtggcaac

SEQ ID NO: 4152272 - DNA, 25 bp, Homo sapien
tccctctgtcctaatgccagtgatg

SEQ ID NO: 4152273 - DNA, 25 bp, Homo sapien
aatgccagtgatgtggataccagga

SEQ ID NO: 4152274 - DNA, 25 bp, Homo sapien
tcggttcaccgaagacaggagagag

SEQ ID NO: 4152275 - DNA, 25 bp, Homo sapien
gaaaaccacagcgtgatcactccaa

SEQ ID NO: 4152276 - DNA, 25 bp, Homo sapien
gagttgggcgtgagtaactgatcac

SEQ ID NO: 4152277 - DNA, 25 bp, Homo sapien
tttcagtatcgtagggaccaaggga

SEQ ID NO: 4152278 - DNA, 25 bp, Homo sapien
gatcattagggtagcatacacgttc

SEQ ID NO: 4152279 - DNA, 25 bp, Homo sapien
tgtgacttctccaacaatgaggtgc

SEQ ID NO: 4152280 - DNA, 25 bp, Homo sapien
gggcatatgtcaggttcaatactgt

SEQ ID NO: 4152281 - DNA, 25 bp, Homo sapien
taagttttgcgaaggatgccaagta

SEQ ID NO: 4152282 - DNA, 25 bp, Homo sapien
tactgctgctagaagtaatgttggc

SEQ ID NO: 4152283 - DNA, 25 bp, Homo sapien
taatgttggcacaaatttgttgcta

SEQ ID NO: 4152284 - DNA, 25 bp, Homo sapien
tcacggtgccaatctgctgctgaaa

SEQ ID NO: 4152285 - DNA, 25 bp, Homo sapien
aaattatggactctgtcacggtgcc

SEQ ID NO: 4152286 - DNA, 25 bp, Homo sapien
tgttgacttccaataggcatcctgc

SEQ ID NO: 4152287 - DNA, 25 bp, Homo sapien
ctccctccgtgtagtacatgagata

SEQ ID NO: 4152288 - DNA, 25 bp, Homo sapien
tcatagaaggcagaaatgggatgta

SEQ ID NO: 4152289 - DNA, 25 bp, Homo sapien
gagaaggcccattgaaggagcaaga

SEQ ID NO: 4152290 - DNA, 25 bp, Homo sapien
taatctgagaagagtgagcagttat

SEQ ID NO: 4152291 - DNA, 25 bp, Homo sapien
cagcctgcagaatcactcgcttaat

SEQ ID NO: 4152292 - DNA, 25 bp, Homo sapien
ctctgagccattcttggataatctg

SEQ ID NO: 4152293 - DNA, 25 bp, Homo sapien
aaattatttgcatggaacttgcctg

SEQ ID NO: 4152294 - DNA, 25 bp, Homo sapien
cagatcgtgatatggagattcttga

SEQ ID NO: 4152295 - DNA, 25 bp, Homo sapien
cactgagtctgtgtgaccggctgaa

SEQ ID NO: 4152296 - DNA, 25 bp, Homo sapien
tgtgaccggctgaagtccattcctt

SEQ ID NO: 4152297 - DNA, 25 bp, Homo sapien
agtccattccttccagatcgtgata

SEQ ID NO: 4152298 - DNA, 25 bp, Homo sapien
tagcaaggcctgttactcaccaaga

SEQ ID NO: 4152299 - DNA, 25 bp, Homo sapien
aaactgaagggagcttagcaaggcc

SEQ ID NO: 4152300 - DNA, 25 bp, Homo sapien
tatagatgctatcgtcatcagggaa

SEQ ID NO: 4152301 - DNA, 25 bp, Homo sapien
ttggctaagtctgataaaaaggcgg

SEQ ID NO: 4152302 - DNA, 25 bp, Homo sapien
cggccgcctgactccttaatgctga

SEQ ID NO: 4152303 - DNA, 25 bp, Homo sapien
tcatgggcatttgcccgtggctctg

SEQ ID NO: 4152304 - DNA, 25 bp, Homo sapien
tactattgtagcaggtccggagagg

SEQ ID NO: 4152305 - DNA, 25 bp, Homo sapien
taatgctgaactatgatgtgactgg

SEQ ID NO: 4152306 - DNA, 25 bp, Homo sapien
tgtccctgcttctaggaagatcttc

SEQ ID NO: 4152307 - DNA, 25 bp, Homo sapien
tggtgtccctgcttctaggaagatc

SEQ ID NO: 4152308 - DNA, 25 bp, Homo sapien
ggtgtccctgcttctaggaagatct

SEQ ID NO: 4152309 - DNA, 25 bp, Homo sapien
tccctgcttctaggaagatcttctc

SEQ ID NO: 4152310 - DNA, 25 bp, Homo sapien
aaaggaatttcataacttttgacat

SEQ ID NO: 4152311 - DNA, 25 bp, Homo sapien
ctttgctattctccacctatcagag

SEQ ID NO: 4152312 - DNA, 25 bp, Homo sapien
agagcctttgaccttagtcatggga

SEQ ID NO: 4152313 - DNA, 25 bp, Homo sapien
tattctccacctatcagagcctttg

SEQ ID NO: 4152314 - DNA, 25 bp, Homo sapien
ggtgcactacaagtctgttgttcag

SEQ ID NO: 4152315 - DNA, 25 bp, Homo sapien
gttgttcagatgcatacagtatatc

SEQ ID NO: 4152316 - DNA, 25 bp, Homo sapien
tcaataaaatggtgcactacaagtc

SEQ ID NO: 4152317 - DNA, 25 bp, Homo sapien
cagatgcatacagtatatctctgga

SEQ ID NO: 4152318 - DNA, 25 bp, Homo sapien
tgtttggcatgatcagatgattgtg

SEQ ID NO: 4152319 - DNA, 25 bp, Homo sapien
cttccccgttatttgtttggcatga

SEQ ID NO: 4152320 - DNA, 25 bp, Homo sapien
ggcatgatcagatgattgtgctatc

SEQ ID NO: 4152321 - DNA, 25 bp, Homo sapien
gatcagatgattgtgctatcgacat

SEQ ID NO: 4152322 - DNA, 25 bp, Homo sapien
cactttagtagctttttgcattgct

SEQ ID NO: 4152323 - DNA, 25 bp, Homo sapien
tcactttagtagctttttgcattgc

SEQ ID NO: 4152324 - DNA, 25 bp, Homo sapien
aagatgggctatggtcatcactgaa

SEQ ID NO: 4152325 - DNA, 25 bp, Homo sapien
taggattcagttctagcatcatctc

SEQ ID NO: 4152326 - DNA, 25 bp, Homo sapien
catacctccaccactagattgtgag

SEQ ID NO: 4152327 - DNA, 25 bp, Homo sapien
tcatctctctgcgataataccttaa

SEQ ID NO: 4152328 - DNA, 25 bp, Homo sapien
tttctggcattatttagtgagtaag

SEQ ID NO: 4152329 - DNA, 25 bp, Homo sapien
ggcattatttagtgagtaagtgaag

SEQ ID NO: 4152330 - DNA, 25 bp, Homo sapien
tcctttcatgtaatgttttctggca

SEQ ID NO: 4152331 - DNA, 25 bp, Homo sapien
ttatttagtgagtaagtgaaggcat

SEQ ID NO: 4152332 - DNA, 25 bp, Homo sapien
aatatcttaaatcttttcgcagcta

SEQ ID NO: 4152333 - DNA, 25 bp, Homo sapien
tatcttaaatcttttcgcagctaca

SEQ ID NO: 4152334 - DNA, 25 bp, Homo sapien
cttaaatcttttcgcagctacaggg

SEQ ID NO: 4152335 - DNA, 25 bp, Homo sapien
tcttaaatcttttcgcagctacagg

SEQ ID NO: 4152336 - DNA, 25 bp, Homo sapien
caagctgttatcaatatggctgcaa

SEQ ID NO: 4152337 - DNA, 25 bp, Homo sapien
tatggctgcaacagaccactgatca

SEQ ID NO: 4152338 - DNA, 25 bp, Homo sapien
tattcagaggcatagcgacaaaagc

SEQ ID NO: 4152339 - DNA, 25 bp, Homo sapien
tgatcagtctcaagccacatgcgat

SEQ ID NO: 4152340 - DNA, 25 bp, Homo sapien
tgtggccaatgtcgaaacctacaag

SEQ ID NO: 4152341 - DNA, 25 bp, Homo sapien
aaagttccatagaaaaggcgtgcag

SEQ ID NO: 4152342 - DNA, 25 bp, Homo sapien
agataagtatcaggtctgaccccag

SEQ ID NO: 4152343 - DNA, 25 bp, Homo sapien
ggcgtgcagtactaagggaacaatc

SEQ ID NO: 4152344 - DNA, 25 bp, Homo sapien
tcaaagtagtggtacgaagcagtcc

SEQ ID NO: 4152345 - DNA, 25 bp, Homo sapien
taacggagttagcagaggcacattc

SEQ ID NO: 4152346 - DNA, 25 bp, Homo sapien
taaataggcctcttgacgatgcagc

SEQ ID NO: 4152347 - DNA, 25 bp, Homo sapien
tatgtcaagatcagacgagctcctg

SEQ ID NO: 4152348 - DNA, 25 bp, Homo sapien
aggagttcatggctccatctctaca

SEQ ID NO: 4152349 - DNA, 25 bp, Homo sapien
tctgaagtactaatattgtcatgac

SEQ ID NO: 4152350 - DNA, 25 bp, Homo sapien
tcaattgtacatgttggtgtgcacc

SEQ ID NO: 4152351 - DNA, 25 bp, Homo sapien
gttttagataattctagatcagtgg

SEQ ID NO: 4152352 - DNA, 25 bp, Homo sapien
gcttctctctgatgatcaagtgtgt

SEQ ID NO: 4152353 - DNA, 25 bp, Homo sapien
caagtgtgtttaaactcctggctga

SEQ ID NO: 4152354 - DNA, 25 bp, Homo sapien
tcccactgggataattgctttttct

SEQ ID NO: 4152355 - DNA, 25 bp, Homo sapien
caagctgtgcaaagagccacgtgtt

SEQ ID NO: 4152356 - DNA, 25 bp, Homo sapien
tgtaaattcagaattagagccagat

SEQ ID NO: 4152357 - DNA, 25 bp, Homo sapien
aattagagccagatggttggaagag

SEQ ID NO: 4152358 - DNA, 25 bp, Homo sapien
ggaaagtgaaaattgcccataagac

SEQ ID NO: 4152359 - DNA, 25 bp, Homo sapien
tcaggctgtcttagctgtgactgta

SEQ ID NO: 4152360 - DNA, 25 bp, Homo sapien
atttggcattcagcccactccttgc

SEQ ID NO: 4152361 - DNA, 25 bp, Homo sapien
caaatttggcattcagcccactcct

SEQ ID NO: 4152362 - DNA, 25 bp, Homo sapien
aatttggcattcagcccactccttg

SEQ ID NO: 4152363 - DNA, 25 bp, Homo sapien
tcacaaatttggcattcagcccact

SEQ ID NO: 4152364 - DNA, 25 bp, Homo sapien
gaagattgcatgcttattgctacag

SEQ ID NO: 4152365 - DNA, 25 bp, Homo sapien
tgaaagacaattgaagattgcatgc

SEQ ID NO: 4152366 - DNA, 25 bp, Homo sapien
tattgctacagttttggttatagga

SEQ ID NO: 4152367 - DNA, 25 bp, Homo sapien
caattgaagattgcatgcttattgc

SEQ ID NO: 4152368 - DNA, 25 bp, Homo sapien
ttttagccagaggtgactaaaggaa

SEQ ID NO: 4152369 - DNA, 25 bp, Homo sapien
tatctgctggaaggcaagccttatc

SEQ ID NO: 4152370 - DNA, 25 bp, Homo sapien
tgtctctttaactgtaggcagatat

SEQ ID NO: 4152371 - DNA, 25 bp, Homo sapien
gccaacacatattgaatatctgctg

SEQ ID NO: 4152372 - DNA, 25 bp, Homo sapien
cattttgtgcttttgtcgctgatgt

SEQ ID NO: 4152373 - DNA, 25 bp, Homo sapien
ggcattttgtgcttttgtcgctgat

SEQ ID NO: 4152374 - DNA, 25 bp, Homo sapien
atggcattttgtgcttttgtcgctg

SEQ ID NO: 4152375 - DNA, 25 bp, Homo sapien
ttgtgcttttgtcgctgatgtttgt

SEQ ID NO: 4152376 - DNA, 25 bp, Homo sapien
tcatacaatgatgtgctttgatcat

SEQ ID NO: 4152377 - DNA, 25 bp, Homo sapien
tctaatccattcattttggccctca

SEQ ID NO: 4152378 - DNA, 25 bp, Homo sapien
tcaggacagctgaacatctaatcca

SEQ ID NO: 4152379 - DNA, 25 bp, Homo sapien
gaaacagctgaattcatcatacaat

SEQ ID NO: 4152380 - DNA, 25 bp, Homo sapien
catcaggctctctgattttgcacat

SEQ ID NO: 4152381 - DNA, 25 bp, Homo sapien
tgcatcaggctctctgattttgcac

SEQ ID NO: 4152382 - DNA, 25 bp, Homo sapien
gagggctgcatcaggctctctgatt

SEQ ID NO: 4152383 - DNA, 25 bp, Homo sapien
gctgcatcaggctctctgattttgc

SEQ ID NO: 4152384 - DNA, 25 bp, Homo sapien
gcctttccttttatctgcattctcc

SEQ ID NO: 4152385 - DNA, 25 bp, Homo sapien
attctccccactgttcacttgcagt

SEQ ID NO: 4152386 - DNA, 25 bp, Homo sapien
tcacttgcagtccaaaactacctgg

SEQ ID NO: 4152387 - DNA, 25 bp, Homo sapien
aaaactacctggcacactctggcca

SEQ ID NO: 4152388 - DNA, 25 bp, Homo sapien
cattagctgtataataacattcatg

SEQ ID NO: 4152389 - DNA, 25 bp, Homo sapien
cattctcttcattataatcctatag

SEQ ID NO: 4152390 - DNA, 25 bp, Homo sapien
caggtctgttattgtcattctcttc

SEQ ID NO: 4152391 - DNA, 25 bp, Homo sapien
tcttgcttttagtaacatctcacag

SEQ ID NO: 4152392 - DNA, 25 bp, Homo sapien
ttctcgaaaggatgaactgataaca

SEQ ID NO: 4152393 - DNA, 25 bp, Homo sapien
tcaaaactgcattctcgaaaggatg

SEQ ID NO: 4152394 - DNA, 25 bp, Homo sapien
tgaactgataacaggaatgaattcc

SEQ ID NO: 4152395 - DNA, 25 bp, Homo sapien
aactgataacaggaatgaattcctc

SEQ ID NO: 4152396 - DNA, 25 bp, Homo sapien
tatggaagataacaggacaggtggt

SEQ ID NO: 4152397 - DNA, 25 bp, Homo sapien
taatctgtcttcacggagtggagac

SEQ ID NO: 4152398 - DNA, 25 bp, Homo sapien
gttaaaatggccaacgtgccttgta

SEQ ID NO: 4152399 - DNA, 25 bp, Homo sapien
ggacatatgggtacagttatcctgg

SEQ ID NO: 4152400 - DNA, 25 bp, Homo sapien
agtgacaaggctgttcttgggccat

SEQ ID NO: 4152401 - DNA, 25 bp, Homo sapien
cgtgttagcacatactatttccatt

SEQ ID NO: 4152402 - DNA, 25 bp, Homo sapien
aaatttgccatgtcacacgcagtgg

SEQ ID NO: 4152403 - DNA, 25 bp, Homo sapien
catttgacggcccagaggttgaggc

SEQ ID NO: 4152404 - DNA, 25 bp, Homo sapien
tactttgagattatgaaaccgaggc

SEQ ID NO: 4152405 - DNA, 25 bp, Homo sapien
tttttaagcgccatagagagggtac

SEQ ID NO: 4152406 - DNA, 25 bp, Homo sapien
ttcttcccttagcggcatttcaatt

SEQ ID NO: 4152407 - DNA, 25 bp, Homo sapien
tttcttcccttagcggcatttcaat

SEQ ID NO: 4152408 - DNA, 25 bp, Homo sapien
ctttcttcccttagcggcatttcaa

SEQ ID NO: 4152409 - DNA, 25 bp, Homo sapien
tcagctcagaggtacactgactgcc

SEQ ID NO: 4152410 - DNA, 25 bp, Homo sapien
gatgcttgtctataccactaggtat

SEQ ID NO: 4152411 - DNA, 25 bp, Homo sapien
ttattgagtacctgccacatgctag

SEQ ID NO: 4152412 - DNA, 25 bp, Homo sapien
actgactgcctccaagaatgatgct

SEQ ID NO: 4152413 - DNA, 25 bp, Homo sapien
tgcttttgagatgttttgagaaagc

SEQ ID NO: 4152414 - DNA, 25 bp, Homo sapien
ctgtgtgcttttgagatgttttgag

SEQ ID NO: 4152415 - DNA, 25 bp, Homo sapien
tttgagatgttttgagaaagctcca

SEQ ID NO: 4152416 - DNA, 25 bp, Homo sapien
ttgagatgttttgagaaagctccat

SEQ ID NO: 4152417 - DNA, 25 bp, Homo sapien
aaatgacaaggcggaggagtgttct

SEQ ID NO: 4152418 - DNA, 25 bp, Homo sapien
gtgttctctgacagtaccagggaag

SEQ ID NO: 4152419 - DNA, 25 bp, Homo sapien
tttaaaatgacaaggcggaggagtg

SEQ ID NO: 4152420 - DNA, 25 bp, Homo sapien
atgacaaggcggaggagtgttctct

SEQ ID NO: 4152421 - DNA, 25 bp, Homo sapien
tcctacagaatcatcagtgctggga

SEQ ID NO: 4152422 - DNA, 25 bp, Homo sapien
ggttggacgcctgtgataaaagagc

SEQ ID NO: 4152423 - DNA, 25 bp, Homo sapien
tcaactatggtgagaagagctttgc

SEQ ID NO: 4152424 - DNA, 25 bp, Homo sapien
gagctgtttatatcaccctgcagtg

SEQ ID NO: 4152425 - DNA, 25 bp, Homo sapien
cactgtgatcgaggaatggaacctg

SEQ ID NO: 4152426 - DNA, 25 bp, Homo sapien
actgtgatcgaggaatggaacctga

SEQ ID NO: 4152427 - DNA, 25 bp, Homo sapien
ctgtgatcgaggaatggaacctgat

SEQ ID NO: 4152428 - DNA, 25 bp, Homo sapien
gtgatcgaggaatggaacctgatat

SEQ ID NO: 4152429 - DNA, 25 bp, Homo sapien
gcttggcatctcacaatctaatagc

SEQ ID NO: 4152430 - DNA, 25 bp, Homo sapien
ttccccaacattagtcatctgtgta

SEQ ID NO: 4152431 - DNA, 25 bp, Homo sapien
catctgtgtattctggtaccagtaa

SEQ ID NO: 4152432 - DNA, 25 bp, Homo sapien
cagctccaggtaggaaaatcccagg

SEQ ID NO: 4152433 - DNA, 25 bp, Homo sapien
agcagttctaacatgtgtattgcac

SEQ ID NO: 4152434 - DNA, 25 bp, Homo sapien
ctttctggagcagttctaacatgtg

SEQ ID NO: 4152435 - DNA, 25 bp, Homo sapien
gcttagcacttattcgatgccatag

SEQ ID NO: 4152436 - DNA, 25 bp, Homo sapien
actgtgccttaattctttgctcttg

SEQ ID NO: 4152437 - DNA, 25 bp, Homo sapien
tcttaagaagcttgccttcctcact

SEQ ID NO: 4152438 - DNA, 25 bp, Homo sapien
caagttacttgtactaactgaactg

SEQ ID NO: 4152439 - DNA, 25 bp, Homo sapien
tcaataaacctatcagtgtcaccct

SEQ ID NO: 4152440 - DNA, 25 bp, Homo sapien
actgaactgagccatttggccttaa

SEQ ID NO: 4152441 - DNA, 25 bp, Homo sapien
cattttctgttcgttcaataagggc

SEQ ID NO: 4152442 - DNA, 25 bp, Homo sapien
tagtgctgaaccatcactatggtct

SEQ ID NO: 4152443 - DNA, 25 bp, Homo sapien
gcttgggacacatgaatagctgtca

SEQ ID NO: 4152444 - DNA, 25 bp, Homo sapien
tctgcatttgatcagcttgggacac

SEQ ID NO: 4152445 - DNA, 25 bp, Homo sapien
gaggttggcttagcgagatgatatc

SEQ ID NO: 4152446 - DNA, 25 bp, Homo sapien
caccaggatccaggattggtatcac

SEQ ID NO: 4152447 - DNA, 25 bp, Homo sapien
gatgatatctacaccaggatccagg

SEQ ID NO: 4152448 - DNA, 25 bp, Homo sapien
gatccaggattggtatcactttcac

SEQ ID NO: 4152449 - DNA, 25 bp, Homo sapien
ttcatggttactgatcatggaaggg

SEQ ID NO: 4152450 - DNA, 25 bp, Homo sapien
ttactgatcatggaagggttgagcc

SEQ ID NO: 4152451 - DNA, 25 bp, Homo sapien
tggttactgatcatggaagggttga

SEQ ID NO: 4152452 - DNA, 25 bp, Homo sapien
catggttactgatcatggaagggtt

SEQ ID NO: 4152453 - DNA, 25 bp, Homo sapien
gatgcagatgcacgtggctttcgag

SEQ ID NO: 4152454 - DNA, 25 bp, Homo sapien
attgttcttcttgcacactggagga

SEQ ID NO: 4152455 - DNA, 25 bp, Homo sapien
aaacattgtctgctggtgatgcaga

SEQ ID NO: 4152456 - DNA, 25 bp, Homo sapien
caaggcaagtaattggtactcctca

SEQ ID NO: 4152457 - DNA, 25 bp, Homo sapien
tactttggctgctatcgccgccgcc

SEQ ID NO: 4152458 - DNA, 25 bp, Homo sapien
agcagctctcacaccccaactttgc

SEQ ID NO: 4152459 - DNA, 25 bp, Homo sapien
gctcgccgggagacggagaagcact

SEQ ID NO: 4152460 - DNA, 25 bp, Homo sapien
cgggtggcccgctgctgactgggct

SEQ ID NO: 4152461 - DNA, 25 bp, Homo sapien
ttgaggagcagaacttgcctgacca

SEQ ID NO: 4152462 - DNA, 25 bp, Homo sapien
gaaatattgaggagcagaacttgcc

SEQ ID NO: 4152463 - DNA, 25 bp, Homo sapien
tggatggaaatattgaggagcagaa

SEQ ID NO: 4152464 - DNA, 25 bp, Homo sapien
tgagggcgcagttgggcacccctgg

SEQ ID NO: 4152465 - DNA, 25 bp, Homo sapien
ttggaccaggaggatttttgaagtc

SEQ ID NO: 4152466 - DNA, 25 bp, Homo sapien
taagttggaccaggaggatttttga

SEQ ID NO: 4152467 - DNA, 25 bp, Homo sapien
aggttccatttggagaaaggtgcag

SEQ ID NO: 4152468 - DNA, 25 bp, Homo sapien
tgaagtctttggctgggaggttcca

SEQ ID NO: 4152469 - DNA, 25 bp, Homo sapien
aggtcgttggttgcaccagcagcaa

SEQ ID NO: 4152470 - DNA, 25 bp, Homo sapien
caaaatgtcgctctaaggtcgttgg

SEQ ID NO: 4152471 - DNA, 25 bp, Homo sapien
gagtttccacaaaatgtcgctctaa

SEQ ID NO: 4152472 - DNA, 25 bp, Homo sapien
tccattaggtaatgaatgtgctcac

SEQ ID NO: 4152473 - DNA, 25 bp, Homo sapien
cttttcagtcccccgactgtcttca

SEQ ID NO: 4152474 - DNA, 25 bp, Homo sapien
ttttcagtcccccgactgtcttcat

SEQ ID NO: 4152475 - DNA, 25 bp, Homo sapien
tgtactcgaaatctgaagacctgca

SEQ ID NO: 4152476 - DNA, 25 bp, Homo sapien
gtactcgaaatctgaagacctgcag

SEQ ID NO: 4152477 - DNA, 25 bp, Homo sapien
caggtgccagagtagctatatctgt

SEQ ID NO: 4152478 - DNA, 25 bp, Homo sapien
tctccaaagcgttctcaggtgccag

SEQ ID NO: 4152479 - DNA, 25 bp, Homo sapien
gaccatctgctagattggcatagcc

SEQ ID NO: 4152480 - DNA, 25 bp, Homo sapien
ttgcccctggaagctactctatctg

SEQ ID NO: 4152481 - DNA, 25 bp, Homo sapien
aaagccttcaaagtagtacatgccg

SEQ ID NO: 4152482 - DNA, 25 bp, Homo sapien
acatgccgatatcatgatgctcacc

SEQ ID NO: 4152483 - DNA, 25 bp, Homo sapien
gtagtacatgccgatatcatgatgc

SEQ ID NO: 4152484 - DNA, 25 bp, Homo sapien
tcaaagtagtacatgccgatatcat

SEQ ID NO: 4152485 - DNA, 25 bp, Homo sapien
catgtctcatactccaaaagtcttt

SEQ ID NO: 4152486 - DNA, 25 bp, Homo sapien
tcatgtctcatactccaaaagtctt

SEQ ID NO: 4152487 - DNA, 25 bp, Homo sapien
tgtctcatactccaaaagtcttttc

SEQ ID NO: 4152488 - DNA, 25 bp, Homo sapien
gtctcatactccaaaagtcttttcc

SEQ ID NO: 4152489 - DNA, 25 bp, Homo sapien
taatgaaaaagtggccagttttgta

SEQ ID NO: 4152490 - DNA, 25 bp, Homo sapien
aaaagtggccagttttgtaggccat

SEQ ID NO: 4152491 - DNA, 25 bp, Homo sapien
ctgctcagtgttcttacatttcatt

SEQ ID NO: 4152492 - DNA, 25 bp, Homo sapien
tgctcagtgttcttacatttcattt

SEQ ID NO: 4152493 - DNA, 25 bp, Homo sapien
gccttctgctccgtgcctttctgtt

SEQ ID NO: 4152494 - DNA, 25 bp, Homo sapien
gccatctgtgacactgtgggtttct

SEQ ID NO: 4152495 - DNA, 25 bp, Homo sapien
tctgttcggatttcacactgatgct

SEQ ID NO: 4152496 - DNA, 25 bp, Homo sapien
cagccatctgtgacactgtgggttt

SEQ ID NO: 4152497 - DNA, 25 bp, Homo sapien
gtgcaatttgtaaagtttggcagcc

SEQ ID NO: 4152498 - DNA, 25 bp, Homo sapien
cgtttgagggaaaagcccatctgat

SEQ ID NO: 4152499 - DNA, 25 bp, Homo sapien
tggcagccaattcaggtcctaatat

SEQ ID NO: 4152500 - DNA, 25 bp, Homo sapien
tttgttgaagttccactgagtcagg

SEQ ID NO: 4152501 - DNA, 25 bp, Homo sapien
cagccttatctcctacccatcccca

SEQ ID NO: 4152502 - DNA, 25 bp, Homo sapien
ttttcagccttatctcctacccatc

SEQ ID NO: 4152503 - DNA, 25 bp, Homo sapien
ttcagccttatctcctacccatccc

SEQ ID NO: 4152504 - DNA, 25 bp, Homo sapien
attttcagccttatctcctacccat

SEQ ID NO: 4152505 - DNA, 25 bp, Homo sapien
ctacgtaagaccgactgacattaaa

SEQ ID NO: 4152506 - DNA, 25 bp, Homo sapien
ttttagagtcatctacgtaagaccg

SEQ ID NO: 4152507 - DNA, 25 bp, Homo sapien
gagtcatctacgtaagaccgactga

SEQ ID NO: 4152508 - DNA, 25 bp, Homo sapien
catctacgtaagaccgactgacatt

SEQ ID NO: 4152509 - DNA, 25 bp, Homo sapien
caagagcgtgtgttgacctggaatt

SEQ ID NO: 4152510 - DNA, 25 bp, Homo sapien
caggatatattgcagtgaatcaaaa

SEQ ID NO: 4152511 - DNA, 25 bp, Homo sapien
cagtgaatcaaaacaagagcgtgtg

SEQ ID NO: 4152512 - DNA, 25 bp, Homo sapien
gtgttgacctggaattaagtgccat

SEQ ID NO: 4152513 - DNA, 25 bp, Homo sapien
tttgttcgtatgttgccaatcaatc

SEQ ID NO: 4152514 - DNA, 25 bp, Homo sapien
tgttcgtatgttgccaatcaatcat

SEQ ID NO: 4152515 - DNA, 25 bp, Homo sapien
ctttttgttcgtatgttgccaatca

SEQ ID NO: 4152516 - DNA, 25 bp, Homo sapien
agactttttgttcgtatgttgccaa

SEQ ID NO: 4152517 - DNA, 25 bp, Homo sapien
tattcaactgccagtgataagtgag

SEQ ID NO: 4152518 - DNA, 25 bp, Homo sapien
ggagctatgggatataaaaggcccc

SEQ ID NO: 4152519 - DNA, 25 bp, Homo sapien
ggtgagggcgcacactttcttgcag

SEQ ID NO: 4152520 - DNA, 25 bp, Homo sapien
gcagcatgataaataaggttcttcc

SEQ ID NO: 4152521 - DNA, 25 bp, Homo sapien
ttcactgtttaattttactttgctc

SEQ ID NO: 4152522 - DNA, 25 bp, Homo sapien
cactgtttaattttactttgctcct

SEQ ID NO: 4152523 - DNA, 25 bp, Homo sapien
tattcttcttcactgtttaatttta

SEQ ID NO: 4152524 - DNA, 25 bp, Homo sapien
tcttcactgtttaattttactttgc

SEQ ID NO: 4152525 - DNA, 25 bp, Homo sapien
aagactctgagccatacatgtccgg

SEQ ID NO: 4152526 - DNA, 25 bp, Homo sapien
cacagagggctcatataatccaatg

SEQ ID NO: 4152527 - DNA, 25 bp, Homo sapien
aattgatgaactttcaagcacagag

SEQ ID NO: 4152528 - DNA, 25 bp, Homo sapien
catgtccggttcttgttgtggtgca

SEQ ID NO: 4152529 - DNA, 25 bp, Homo sapien
tgtcagattagtgacgtctataaac

SEQ ID NO: 4152530 - DNA, 25 bp, Homo sapien
ctgttagtgctttccaatatatggt

SEQ ID NO: 4152531 - DNA, 25 bp, Homo sapien
caaagattgtcagattagtgacgtc

SEQ ID NO: 4152532 - DNA, 25 bp, Homo sapien
tatatggttgaatcaaagattgtca

SEQ ID NO: 4152533 - DNA, 25 bp, Homo sapien
tcctattttgtgtgcctgagggaca

SEQ ID NO: 4152534 - DNA, 25 bp, Homo sapien
ttgaaagccactgggtagtttccca

SEQ ID NO: 4152535 - DNA, 25 bp, Homo sapien
tcacaggtaccacacaggtaattag

SEQ ID NO: 4152536 - DNA, 25 bp, Homo sapien
tgggtagtttcccattcacaggtac

SEQ ID NO: 4152537 - DNA, 25 bp, Homo sapien
ggagttccttcgtagtgacagagca

SEQ ID NO: 4152538 - DNA, 25 bp, Homo sapien
cctgggacctgtaacctcttgtgag

SEQ ID NO: 4152539 - DNA, 25 bp, Homo sapien
tgaaatctgattaacgtccgtagtc

SEQ ID NO: 4152540 - DNA, 25 bp, Homo sapien
gctgagcgatggatacctgggacct

SEQ ID NO: 4152541 - DNA, 25 bp, Homo sapien
tcagggaagtgaacgtcgagaggat

SEQ ID NO: 4152542 - DNA, 25 bp, Homo sapien
cgtcgagaggattgaaaactcggca

SEQ ID NO: 4152543 - DNA, 25 bp, Homo sapien
caaatgtgaccctggaactctcgtt

SEQ ID NO: 4152544 - DNA, 25 bp, Homo sapien
ggattgaaaactcggcaaacatcat

SEQ ID NO: 4152545 - DNA, 25 bp, Homo sapien
tacacttgactaaggtccccttgga

SEQ ID NO: 4152546 - DNA, 25 bp, Homo sapien
atttccagtacacttgactaaggtc

SEQ ID NO: 4152547 - DNA, 25 bp, Homo sapien
atcatctgaaatgcaaccttggctg

SEQ ID NO: 4152548 - DNA, 25 bp, Homo sapien
ctttcctggccatcatctgaaatgc

SEQ ID NO: 4152549 - DNA, 25 bp, Homo sapien
gtgtcgaaggttacttgaatcctcc

SEQ ID NO: 4152550 - DNA, 25 bp, Homo sapien
tccttggtgtcgaaggttacttgaa

SEQ ID NO: 4152551 - DNA, 25 bp, Homo sapien
tcaactgtccttggtgtcgaaggtt

SEQ ID NO: 4152552 - DNA, 25 bp, Homo sapien
gttacttgaatcctccacagagctg

SEQ ID NO: 4152553 - DNA, 25 bp, Homo sapien
tagagcatcctggaaaagctttgtc

SEQ ID NO: 4152554 - DNA, 25 bp, Homo sapien
ttaattggtgtgatcgatggtctgc

SEQ ID NO: 4152555 - DNA, 25 bp, Homo sapien
gaactaaagctgtccttcgtgaact

SEQ ID NO: 4152556 - DNA, 25 bp, Homo sapien
tagatgctttgccagaactagagca

SEQ ID NO: 4152557 - DNA, 25 bp, Homo sapien
tatttaggaatgcatcagggtctgc

SEQ ID NO: 4152558 - DNA, 25 bp, Homo sapien
gcagttcttagcatttccgagaggt

SEQ ID NO: 4152559 - DNA, 25 bp, Homo sapien
taaatgggctccacattccgtaagc

SEQ ID NO: 4152560 - DNA, 25 bp, Homo sapien
ctcggacagaacgaaagctgggtca

SEQ ID NO: 4152561 - DNA, 25 bp, Homo sapien
tcgatggctgagataacttctcctg

SEQ ID NO: 4152562 - DNA, 25 bp, Homo sapien
atggctgagataacttctcctgtgg

SEQ ID NO: 4152563 - DNA, 25 bp, Homo sapien
tctcgatggctgagataacttctcc

SEQ ID NO: 4152564 - DNA, 25 bp, Homo sapien
tgctctcgatggctgagataacttc

SEQ ID NO: 4152565 - DNA, 25 bp, Homo sapien
tctgctgaataaaatgacaggattg

SEQ ID NO: 4152566 - DNA, 25 bp, Homo sapien
aatgacaggattggctccaggtttc

SEQ ID NO: 4152567 - DNA, 25 bp, Homo sapien
cattcccagtaagagccttcaggtt

SEQ ID NO: 4152568 - DNA, 25 bp, Homo sapien
tcaggttcgtctgtgacagaactct

SEQ ID NO: 4152569 - DNA, 25 bp, Homo sapien
agtggatttccgcaaaaactacact

SEQ ID NO: 4152570 - DNA, 25 bp, Homo sapien
tgtcgtcagtaatgctgaatactga

SEQ ID NO: 4152571 - DNA, 25 bp, Homo sapien
catatacctgtgaatctctagtgga

SEQ ID NO: 4152572 - DNA, 25 bp, Homo sapien
aactacactttatatttgtcgtcag

SEQ ID NO: 4152573 - DNA, 25 bp, Homo sapien
cggtggacaattggttgttaccagg

SEQ ID NO: 4152574 - DNA, 25 bp, Homo sapien
cattcggtggacaattggttgttac

SEQ ID NO: 4152575 - DNA, 25 bp, Homo sapien
atataaacactcttcatgtgggcat

SEQ ID NO: 4152576 - DNA, 25 bp, Homo sapien
tcttcatgtgggcatgtgttttcct

SEQ ID NO: 4152577 - DNA, 25 bp, Homo sapien
taggctttgcgtgtttgtgggccca

SEQ ID NO: 4152578 - DNA, 25 bp, Homo sapien
tataacctggattaggctttgcgtg

SEQ ID NO: 4152579 - DNA, 25 bp, Homo sapien
ataactctataacctggattaggct

SEQ ID NO: 4152580 - DNA, 25 bp, Homo sapien
ttgcgtgtttgtgggcccatcctca

SEQ ID NO: 4152581 - DNA, 25 bp, Homo sapien
ttgtcttgacactctaagagatgcc

SEQ ID NO: 4152582 - DNA, 25 bp, Homo sapien
tgacactctaagagatgcctgtttt

SEQ ID NO: 4152583 - DNA, 25 bp, Homo sapien
ggtcttgtcttgacactctaagaga

SEQ ID NO: 4152584 - DNA, 25 bp, Homo sapien
tcttgacactctaagagatgcctgt

SEQ ID NO: 4152585 - DNA, 25 bp, Homo sapien
tgtagatgtgcagtattaatttctg

SEQ ID NO: 4152586 - DNA, 25 bp, Homo sapien
gttgtagatgtgcagtattaatttc

SEQ ID NO: 4152587 - DNA, 25 bp, Homo sapien
tgtagccagctactctttaggctga

SEQ ID NO: 4152588 - DNA, 25 bp, Homo sapien
tagatgtgcagtattaatttctgag

SEQ ID NO: 4152589 - DNA, 25 bp, Homo sapien
ggtatttgccagatctatgaatcaa

SEQ ID NO: 4152590 - DNA, 25 bp, Homo sapien
gtatcagtggtatttgccagatcta

SEQ ID NO: 4152591 - DNA, 25 bp, Homo sapien
caatttgaagcatgatttttcactc

SEQ ID NO: 4152592 - DNA, 25 bp, Homo sapien
acagctgctagtatcagtggtattt

SEQ ID NO: 4152593 - DNA, 25 bp, Homo sapien
tgcaaaatcaatctttcattgttgc

SEQ ID NO: 4152594 - DNA, 25 bp, Homo sapien
ggagttcctatcacaacagaaaagt

SEQ ID NO: 4152595 - DNA, 25 bp, Homo sapien
aggagttcctatcacaacagaaaag

SEQ ID NO: 4152596 - DNA, 25 bp, Homo sapien
agttcctatcacaacagaaaagtct

SEQ ID NO: 4152597 - DNA, 25 bp, Homo sapien
caggatgctgcaatacctatttttt

SEQ ID NO: 4152598 - DNA, 25 bp, Homo sapien
tctttatttcttggtaacaggatgc

SEQ ID NO: 4152599 - DNA, 25 bp, Homo sapien
ttttcaagtatgtcttaaatccgtg

SEQ ID NO: 4152600 - DNA, 25 bp, Homo sapien
tatgtcttaaatccgtgaactctct

SEQ ID NO: 4152601 - DNA, 25 bp, Homo sapien
actcttctgagtggcccattcttcc

SEQ ID NO: 4152602 - DNA, 25 bp, Homo sapien
aactcttctgagtggcccattcttc

SEQ ID NO: 4152603 - DNA, 25 bp, Homo sapien
ttggtcattttcattcagattcaga

SEQ ID NO: 4152604 - DNA, 25 bp, Homo sapien
cattcagattcagaataagtctcat

SEQ ID NO: 4152605 - DNA, 25 bp, Homo sapien
tttcattcagattcagaataagtct

SEQ ID NO: 4152606 - DNA, 25 bp, Homo sapien
gattcattttggtcattttcattca

SEQ ID NO: 4152607 - DNA, 25 bp, Homo sapien
ggaggctggtaggagcagcatgtgc

SEQ ID NO: 4152608 - DNA, 25 bp, Homo sapien
agggaggctggtaggagcagcatgt

SEQ ID NO: 4152609 - DNA, 25 bp, Homo sapien
gggaggctggtaggagcagcatgtg

SEQ ID NO: 4152610 - DNA, 25 bp, Homo sapien
gccattgagagtttcttaaagatct

SEQ ID NO: 4152611 - DNA, 25 bp, Homo sapien
tctgagctgaaattttcagcgccat

SEQ ID NO: 4152612 - DNA, 25 bp, Homo sapien
ctgaaattttcagcgccattgagag

SEQ ID NO: 4152613 - DNA, 25 bp, Homo sapien
taccacaagaatagcatgcttcttg

SEQ ID NO: 4152614 - DNA, 25 bp, Homo sapien
gctttaacagtgtatccttgtgata

SEQ ID NO: 4152615 - DNA, 25 bp, Homo sapien
gtgctgctttaacagtgtatccttg

SEQ ID NO: 4152616 - DNA, 25 bp, Homo sapien
tacaatgatttgaatccaaaacaac

SEQ ID NO: 4152617 - DNA, 25 bp, Homo sapien
tattttattaggtgtgtcttagttc

SEQ ID NO: 4152618 - DNA, 25 bp, Homo sapien
tgtctgaatcgacccatctgctctc

SEQ ID NO: 4152619 - DNA, 25 bp, Homo sapien
tgatgtctgaatcgacccatctgct

SEQ ID NO: 4152620 - DNA, 25 bp, Homo sapien
gatgtctgaatcgacccatctgctc

SEQ ID NO: 4152621 - DNA, 25 bp, Homo sapien
aatgatgtctgaatcgacccatctg

SEQ ID NO: 4152622 - DNA, 25 bp, Homo sapien
tcgcatttactatgttgacagattt

SEQ ID NO: 4152623 - DNA, 25 bp, Homo sapien
ttctcgcatttactatgttgacaga

SEQ ID NO: 4152624 - DNA, 25 bp, Homo sapien
caattctcgcatttactatgttgac

SEQ ID NO: 4152625 - DNA, 25 bp, Homo sapien
tctcgcatttactatgttgacagat

SEQ ID NO: 4152626 - DNA, 25 bp, Homo sapien
gctgggttaagattgacattttgac

SEQ ID NO: 4152627 - DNA, 25 bp, Homo sapien
ctgtgctgggttaagattgacattt

SEQ ID NO: 4152628 - DNA, 25 bp, Homo sapien
gatttcaaaaaatcctggggcttca

SEQ ID NO: 4152629 - DNA, 25 bp, Homo sapien
gtgctgggttaagattgacattttg

SEQ ID NO: 4152630 - DNA, 25 bp, Homo sapien
ttcatgcacagccttttgtgtatga

SEQ ID NO: 4152631 - DNA, 25 bp, Homo sapien
cagccttttgtgtatgaatcttttt

SEQ ID NO: 4152632 - DNA, 25 bp, Homo sapien
tttgtgtatgaatctttttgttaca

SEQ ID NO: 4152633 - DNA, 25 bp, Homo sapien
atctttttgttacatctttgtgcat

SEQ ID NO: 4152634 - DNA, 25 bp, Homo sapien
tgaaaaagcccttgttgttcttgaa

SEQ ID NO: 4152635 - DNA, 25 bp, Homo sapien
tctcggtggtagagtatgtgttccc

SEQ ID NO: 4152636 - DNA, 25 bp, Homo sapien
tcttaggcttgcaagttctcggtgg

SEQ ID NO: 4152637 - DNA, 25 bp, Homo sapien
ctaatgtatagcctttgagctggca

SEQ ID NO: 4152638 - DNA, 25 bp, Homo sapien
cattttagtcgtgacttccacagga

SEQ ID NO: 4152639 - DNA, 25 bp, Homo sapien
tattcatattcgctgccattgttcc

SEQ ID NO: 4152640 - DNA, 25 bp, Homo sapien
attcatattcgctgccattgttcca

SEQ ID NO: 4152641 - DNA, 25 bp, Homo sapien
gttccatggcaaccttacaagttga

SEQ ID NO: 4152642 - DNA, 25 bp, Homo sapien
tacaagttgagcaaatgatgatggt

SEQ ID NO: 4152643 - DNA, 25 bp, Homo sapien
acagtgctctcctcacagatgggcc

SEQ ID NO: 4152644 - DNA, 25 bp, Homo sapien
gtgctctcctcacagatgggcccag

SEQ ID NO: 4152645 - DNA, 25 bp, Homo sapien
ggcacagtgctctcctcacagatgg

SEQ ID NO: 4152646 - DNA, 25 bp, Homo sapien
gcacagtgctctcctcacagatggg

SEQ ID NO: 4152647 - DNA, 25 bp, Homo sapien
tggcatccacatgctgttgaatatg

SEQ ID NO: 4152648 - DNA, 25 bp, Homo sapien
ggcatccacatgctgttgaatatga

SEQ ID NO: 4152649 - DNA, 25 bp, Homo sapien
catccacatgctgttgaatatgaca

SEQ ID NO: 4152650 - DNA, 25 bp, Homo sapien
cttggcatccacatgctgttgaata

SEQ ID NO: 4152651 - DNA, 25 bp, Homo sapien
aaaagatcagttatttgatgagttc

SEQ ID NO: 4152652 - DNA, 25 bp, Homo sapien
tgatgagttccacaggctatcactc

SEQ ID NO: 4152653 - DNA, 25 bp, Homo sapien
atgagttccacaggctatcactctg

SEQ ID NO: 4152654 - DNA, 25 bp, Homo sapien
tttgatgagttccacaggctatcac

SEQ ID NO: 4152655 - DNA, 25 bp, Homo sapien
tctcccatttgctgtctctgcacta

SEQ ID NO: 4152656 - DNA, 25 bp, Homo sapien
gctgtctctgcactacactgattca

SEQ ID NO: 4152657 - DNA, 25 bp, Homo sapien
ctgattcagggctgcaactcttatc

SEQ ID NO: 4152658 - DNA, 25 bp, Homo sapien
atgcaattttgttctcactctccca

SEQ ID NO: 4152659 - DNA, 25 bp, Homo sapien
taaaatagcagagatgccaaaatcc

SEQ ID NO: 4152660 - DNA, 25 bp, Homo sapien
atgccaaaatccaacacagacatag

SEQ ID NO: 4152661 - DNA, 25 bp, Homo sapien
caaaatccaacacagacatagaaac

SEQ ID NO: 4152662 - DNA, 25 bp, Homo sapien
ccaacacagacatagaaacactcat

SEQ ID NO: 4152663 - DNA, 25 bp, Homo sapien
ctattagctgttggtacaccaatcc

SEQ ID NO: 4152664 - DNA, 25 bp, Homo sapien
tattagctgttggtacaccaatcca

SEQ ID NO: 4152665 - DNA, 25 bp, Homo sapien
ttagctgttggtacaccaatccatt

SEQ ID NO: 4152666 - DNA, 25 bp, Homo sapien
agctgttggtacaccaatccattca

SEQ ID NO: 4152667 - DNA, 25 bp, Homo sapien
tcatcttgtaagtgatgattggcat

SEQ ID NO: 4152668 - DNA, 25 bp, Homo sapien
taggaacatcatcttgtaagtgatg

SEQ ID NO: 4152669 - DNA, 25 bp, Homo sapien
aaaacgcccaggataaggtcattag

SEQ ID NO: 4152670 - DNA, 25 bp, Homo sapien
aacgcccaggataaggtcattagga

SEQ ID NO: 4152671 - DNA, 25 bp, Homo sapien
catcttctttatggacattaatcct

SEQ ID NO: 4152672 - DNA, 25 bp, Homo sapien
tatagacttggttattacacgttca

SEQ ID NO: 4152673 - DNA, 25 bp, Homo sapien
catcattctttagtgtcagtggtat

SEQ ID NO: 4152674 - DNA, 25 bp, Homo sapien
cctattacgatgatctgtggattat

SEQ ID NO: 4152675 - DNA, 25 bp, Homo sapien
taccatgtctcagctcattgctaac

SEQ ID NO: 4152676 - DNA, 25 bp, Homo sapien
tgctaaccccagatttgtcattgtc

SEQ ID NO: 4152677 - DNA, 25 bp, Homo sapien
cagctcattgctaaccccagatttg

SEQ ID NO: 4152678 - DNA, 25 bp, Homo sapien
cccagatttgtcattgtcccattgt

SEQ ID NO: 4152679 - DNA, 25 bp, Homo sapien
cctgccactgtgcaactcttagcaa

SEQ ID NO: 4152680 - DNA, 25 bp, Homo sapien
actgtgcaactcttagcaacacttg

SEQ ID NO: 4152681 - DNA, 25 bp, Homo sapien
gcaactcttagcaacacttgttaat

SEQ ID NO: 4152682 - DNA, 25 bp, Homo sapien
cacttgttaatacttcctgaggcat

SEQ ID NO: 4152683 - DNA, 25 bp, Homo sapien
ttttgattgcactagctaaggcttg

SEQ ID NO: 4152684 - DNA, 25 bp, Homo sapien
agctgcttttgattgcactagctaa

SEQ ID NO: 4152685 - DNA, 25 bp, Homo sapien
ctaaggcttgtgttgggcagattgc

SEQ ID NO: 4152686 - DNA, 25 bp, Homo sapien
tgattgcactagctaaggcttgtgt

SEQ ID NO: 4152687 - DNA, 25 bp, Homo sapien
tctcattgaccatgaactcatctgt

SEQ ID NO: 4152688 - DNA, 25 bp, Homo sapien
ccatgaactcatctgtataacttgc

SEQ ID NO: 4152689 - DNA, 25 bp, Homo sapien
cattgaccatgaactcatctgtata

SEQ ID NO: 4152690 - DNA, 25 bp, Homo sapien
tgaactcatctgtataacttgccat

SEQ ID NO: 4152691 - DNA, 25 bp, Homo sapien
ccagattcaattccacctcttccac

SEQ ID NO: 4152692 - DNA, 25 bp, Homo sapien
tggcttgaccatctccagattcaat

SEQ ID NO: 4152693 - DNA, 25 bp, Homo sapien
tgaattcgtacagtcaatggaagag

SEQ ID NO: 4152694 - DNA, 25 bp, Homo sapien
ttcactacttgaattcgtacagtca

SEQ ID NO: 4152695 - DNA, 25 bp, Homo sapien
cactacttgaattcgtacagtcaat

SEQ ID NO: 4152696 - DNA, 25 bp, Homo sapien
tacttgaattcgtacagtcaatgga

SEQ ID NO: 4152697 - DNA, 25 bp, Homo sapien
atgcagaacatgtagagaggtagga

SEQ ID NO: 4152698 - DNA, 25 bp, Homo sapien
gtctgcagatccctgtgtcccacga

SEQ ID NO: 4152699 - DNA, 25 bp, Homo sapien
cagaacatgtagagaggtaggattt

SEQ ID NO: 4152700 - DNA, 25 bp, Homo sapien
tgtgtcccacgatctcttttagcta

SEQ ID NO: 4152701 - DNA, 25 bp, Homo sapien
caaactttggtcatggttaaataat

SEQ ID NO: 4152702 - DNA, 25 bp, Homo sapien
tcaaactttggtcatggttaaataa

SEQ ID NO: 4152703 - DNA, 25 bp, Homo sapien
ttcaaactttggtcatggttaaata

SEQ ID NO: 4152704 - DNA, 25 bp, Homo sapien
ctttttagatcaccattgtagattc

SEQ ID NO: 4152705 - DNA, 25 bp, Homo sapien
ctgtacatccctagagaccatggtc

SEQ ID NO: 4152706 - DNA, 25 bp, Homo sapien
ccctagagaccatggtccatgtttt

SEQ ID NO: 4152707 - DNA, 25 bp, Homo sapien
ttagatcaccattgtagattcttct

SEQ ID NO: 4152708 - DNA, 25 bp, Homo sapien
gtgatggaaaatggtaccagtcctg

SEQ ID NO: 4152709 - DNA, 25 bp, Homo sapien
tgttgctgacggcagaagacagtga

SEQ ID NO: 4152710 - DNA, 25 bp, Homo sapien
tggagaaagctcacatgttgctgac

SEQ ID NO: 4152711 - DNA, 25 bp, Homo sapien
gacagtgatggaaaatggtaccagt

SEQ ID NO: 4152712 - DNA, 25 bp, Homo sapien
catcagcaattctacagatagtttt

SEQ ID NO: 4152713 - DNA, 25 bp, Homo sapien
gattcatggtgattaagatcatcag

SEQ ID NO: 4152714 - DNA, 25 bp, Homo sapien
gaatcaatgttctataggattcatg

SEQ ID NO: 4152715 - DNA, 25 bp, Homo sapien
tggcgttactcttcttgtacatgat

SEQ ID NO: 4152716 - DNA, 25 bp, Homo sapien
gacgggctcttctgtgtgaacgaca

SEQ ID NO: 4152717 - DNA, 25 bp, Homo sapien
ctatcaaggaaacaagtagttgcac

SEQ ID NO: 4152718 - DNA, 25 bp, Homo sapien
tgcagggcatcacaagaacatgtag

SEQ ID NO: 4152719 - DNA, 25 bp, Homo sapien
tgaaacaccataccagtgatgcctg

SEQ ID NO: 4152720 - DNA, 25 bp, Homo sapien
cagttttcttggtttggtgaaccag

SEQ ID NO: 4152721 - DNA, 25 bp, Homo sapien
cattagggtatacactatctgtagc

SEQ ID NO: 4152722 - DNA, 25 bp, Homo sapien
tagtgcaactgtatctgctatgttc

SEQ ID NO: 4152723 - DNA, 25 bp, Homo sapien
catcactggacggaaaatttaccta

SEQ ID NO: 4152724 - DNA, 25 bp, Homo sapien
gtgacaaacccacagtccccacagc

SEQ ID NO: 4152725 - DNA, 25 bp, Homo sapien
cacagtccccacagcacttggtgtt

SEQ ID NO: 4152726 - DNA, 25 bp, Homo sapien
tccccacagcacttggtgtttgcat

SEQ ID NO: 4152727 - DNA, 25 bp, Homo sapien
cagtccccacagcacttggtgtttg

SEQ ID NO: 4152728 - DNA, 25 bp, Homo sapien
ccactgaatcacagtgatcaatggt

SEQ ID NO: 4152729 - DNA, 25 bp, Homo sapien
gtcacacagtcaaagctccttttct

SEQ ID NO: 4152730 - DNA, 25 bp, Homo sapien
agtggccaactggtttttgagaatc

SEQ ID NO: 4152731 - DNA, 25 bp, Homo sapien
atctttttcgcagttaagtggccaa

SEQ ID NO: 4152732 - DNA, 25 bp, Homo sapien
ggccaatcacagtatggtatttctg

SEQ ID NO: 4152733 - DNA, 25 bp, Homo sapien
tctctttctttgacaggttttccta

SEQ ID NO: 4152734 - DNA, 25 bp, Homo sapien
cacagttgtggccaatcacagtatg

SEQ ID NO: 4152735 - DNA, 25 bp, Homo sapien
acttcacagttgtggccaatcacag

SEQ ID NO: 4152736 - DNA, 25 bp, Homo sapien
atattcactaccaccatggctgcca

SEQ ID NO: 4152737 - DNA, 25 bp, Homo sapien
cacttccacaaccaccaccaacgtt

SEQ ID NO: 4152738 - DNA, 25 bp, Homo sapien
catgaccactaaagtttcctccacg

SEQ ID NO: 4152739 - DNA, 25 bp, Homo sapien
accatattcactaccaccatggctg

SEQ ID NO: 4152740 - DNA, 25 bp, Homo sapien
ctcgattgttatagctgtcatagct

SEQ ID NO: 4152741 - DNA, 25 bp, Homo sapien
acttctatagcctttgcttcctcca

SEQ ID NO: 4152742 - DNA, 25 bp, Homo sapien
actcccgccataaccactgtcctgg

SEQ ID NO: 4152743 - DNA, 25 bp, Homo sapien
cataaccactgtcctggtttccgta

SEQ ID NO: 4152744 - DNA, 25 bp, Homo sapien
tcagagattccgtcttcaaaatttc

SEQ ID NO: 4152745 - DNA, 25 bp, Homo sapien
agagattccgtcttcaaaatttcct

SEQ ID NO: 4152746 - DNA, 25 bp, Homo sapien
cagagattccgtcttcaaaatttcc

SEQ ID NO: 4152747 - DNA, 25 bp, Homo sapien
gtcagagattccgtcttcaaaattt

SEQ ID NO: 4152748 - DNA, 25 bp, Homo sapien
cagtgactgacagatttttgtgtct

SEQ ID NO: 4152749 - DNA, 25 bp, Homo sapien
ttttgtgtctcattgcacaaatccg

SEQ ID NO: 4152750 - DNA, 25 bp, Homo sapien
caaatccgtgtcctgagcaaaatca

SEQ ID NO: 4152751 - DNA, 25 bp, Homo sapien
ggtgccacagtgactgacagatttt

SEQ ID NO: 4152752 - DNA, 25 bp, Homo sapien
caatttatttaagtccctccaattg

SEQ ID NO: 4152753 - DNA, 25 bp, Homo sapien
gtgcttgaactatagatcaaagtat

SEQ ID NO: 4152754 - DNA, 25 bp, Homo sapien
cccttgtggattattacgataagaa

SEQ ID NO: 4152755 - DNA, 25 bp, Homo sapien
tgatcgatgttccatttgacctctg

SEQ ID NO: 4152756 - DNA, 25 bp, Homo sapien
gacctctgtgatgccctcttgccat

SEQ ID NO: 4152757 - DNA, 25 bp, Homo sapien
gcagcccgcagtgagagagagacac

SEQ ID NO: 4152758 - DNA, 25 bp, Homo sapien
gcttgccaaaatgtaacgccaaagg

SEQ ID NO: 4152759 - DNA, 25 bp, Homo sapien
ggcaggcttgccaaaatgtaacgcc

SEQ ID NO: 4152760 - DNA, 25 bp, Homo sapien
cacgtgatggtccagatgcctttcc

SEQ ID NO: 4152761 - DNA, 25 bp, Homo sapien
tttttagcctagtgagggaccagcg

SEQ ID NO: 4152762 - DNA, 25 bp, Homo sapien
ctcttgtagcttgatggtctcgaac

SEQ ID NO: 4152763 - DNA, 25 bp, Homo sapien
acctgggcggctgtcgttctggcta

SEQ ID NO: 4152764 - DNA, 25 bp, Homo sapien
ctctagattggacaccccaactcct

SEQ ID NO: 4152765 - DNA, 25 bp, Homo sapien
catccctctggttcttatcgtataa

SEQ ID NO: 4152766 - DNA, 25 bp, Homo sapien
atggtacttattgtatctatagaaa

SEQ ID NO: 4152767 - DNA, 25 bp, Homo sapien
cattgcaaatccattttatacactg

SEQ ID NO: 4152768 - DNA, 25 bp, Homo sapien
catcctttacctcaaaccattgcaa

SEQ ID NO: 4152769 - DNA, 25 bp, Homo sapien
gttgaagagagcatcgatgctgcct

SEQ ID NO: 4152770 - DNA, 25 bp, Homo sapien
gagagcatcgatgctgcctttgttg

SEQ ID NO: 4152771 - DNA, 25 bp, Homo sapien
caatgatgccttccttgggactgaa

SEQ ID NO: 4152772 - DNA, 25 bp, Homo sapien
aagtttcccaggatggtagagctga

SEQ ID NO: 4152773 - DNA, 25 bp, Homo sapien
tgacccattgacattgaccaggaac

SEQ ID NO: 4152774 - DNA, 25 bp, Homo sapien
gagatctggatagcttggactccac

SEQ ID NO: 4152775 - DNA, 25 bp, Homo sapien
catttgggatgctcctcgaagcaca

SEQ ID NO: 4152776 - DNA, 25 bp, Homo sapien
tcacgttagcatttgggatgctcct

SEQ ID NO: 4152777 - DNA, 25 bp, Homo sapien
gttagcatttgggatgctcctcgaa

SEQ ID NO: 4152778 - DNA, 25 bp, Homo sapien
tttgggatgctcctcgaagcacaca

SEQ ID NO: 4152779 - DNA, 25 bp, Homo sapien
taaagtatccttatatgatgactgt

SEQ ID NO: 4152780 - DNA, 25 bp, Homo sapien
tatcaagcaaagtttggtcagctgt

SEQ ID NO: 4152781 - DNA, 25 bp, Homo sapien
atttgtgttatttgcctatcaagca

SEQ ID NO: 4152782 - DNA, 25 bp, Homo sapien
tgaagttttctgtataaagtatcct

SEQ ID NO: 4152783 - DNA, 25 bp, Homo sapien
caagagttgaatacggggccattcc

SEQ ID NO: 4152784 - DNA, 25 bp, Homo sapien
ccaggtggtgtcctgggaaagctac

SEQ ID NO: 4152785 - DNA, 25 bp, Homo sapien
aggtgaggaactagaaacatcagag

SEQ ID NO: 4152786 - DNA, 25 bp, Homo sapien
ctgctctgtacactgggagcccagg

SEQ ID NO: 4152787 - DNA, 25 bp, Homo sapien
gctggacgtatcaccttttggaagt

SEQ ID NO: 4152788 - DNA, 25 bp, Homo sapien
acctcactgctatgtctgttcccag

SEQ ID NO: 4152789 - DNA, 25 bp, Homo sapien
catgtggagataaggagttgtgtgc

SEQ ID NO: 4152790 - DNA, 25 bp, Homo sapien
catgtgaatcaaatagcacctgccc

SEQ ID NO: 4152791 - DNA, 25 bp, Homo sapien
aatggagcagagaggcatggtattt

SEQ ID NO: 4152792 - DNA, 25 bp, Homo sapien
ggctctttggtagtcgtcagaaata

SEQ ID NO: 4152793 - DNA, 25 bp, Homo sapien
catggtatttgatgtgccatattcc

SEQ ID NO: 4152794 - DNA, 25 bp, Homo sapien
gatgtttctcaagggtattggctct

SEQ ID NO: 4152795 - DNA, 25 bp, Homo sapien
gttttatacccacttgatgccaaga

SEQ ID NO: 4152796 - DNA, 25 bp, Homo sapien
caagattggctgtttggctcattag

SEQ ID NO: 4152797 - DNA, 25 bp, Homo sapien
ggctcattagatgttattgctgatt

SEQ ID NO: 4152798 - DNA, 25 bp, Homo sapien
tctgctcttgcctagagtctctata

SEQ ID NO: 4152799 - DNA, 25 bp, Homo sapien
tcttgtgtggttccagatagaaggc

SEQ ID NO: 4152800 - DNA, 25 bp, Homo sapien
tgtctcaggtggatatttgatgctt

SEQ ID NO: 4152801 - DNA, 25 bp, Homo sapien
taagcttgactgagcgaataggcaa

SEQ ID NO: 4152802 - DNA, 25 bp, Homo sapien
caaggtgtgttccttacgtatatgc

SEQ ID NO: 4152803 - DNA, 25 bp, Homo sapien
cagtcttgggctcttttgcagggag

SEQ ID NO: 4152804 - DNA, 25 bp, Homo sapien
tatgaggccattccatatgacagtc

SEQ ID NO: 4152805 - DNA, 25 bp, Homo sapien
ggaatcggccttactgacaccttga

SEQ ID NO: 4152806 - DNA, 25 bp, Homo sapien
taaacttggcagttggctactcccc

SEQ ID NO: 4152807 - DNA, 25 bp, Homo sapien
gaaaattctgaacactgggcatggc

SEQ ID NO: 4152808 - DNA, 25 bp, Homo sapien
ggaaccgagagaagtgctagaccca

SEQ ID NO: 4152809 - DNA, 25 bp, Homo sapien
gaaagatacttcttacctggcggca

SEQ ID NO: 4152810 - DNA, 25 bp, Homo sapien
tatcagctgaagctcaaacccgttg

SEQ ID NO: 4152811 - DNA, 25 bp, Homo sapien
tgtattgtcttttctgattgatttg

SEQ ID NO: 4152812 - DNA, 25 bp, Homo sapien
ttgtattgtcttttctgattgattt

SEQ ID NO: 4152813 - DNA, 25 bp, Homo sapien
tattgtcttttctgattgatttgtc

SEQ ID NO: 4152814 - DNA, 25 bp, Homo sapien
ttgtcttttctgattgatttgtcat

SEQ ID NO: 4152815 - DNA, 25 bp, Homo sapien
gtgaggttgctgagaagaatactac

SEQ ID NO: 4152816 - DNA, 25 bp, Homo sapien
ggttgctgagaagaatactactttc

SEQ ID NO: 4152817 - DNA, 25 bp, Homo sapien
gaggttgctgagaagaatactactt

SEQ ID NO: 4152818 - DNA, 25 bp, Homo sapien
tgaggttgctgagaagaatactact

SEQ ID NO: 4152819 - DNA, 25 bp, Homo sapien
tccaggtgcgggtaattgagttgcc

SEQ ID NO: 4152820 - DNA, 25 bp, Homo sapien
taggatacagaaagtcaatagctac

SEQ ID NO: 4152821 - DNA, 25 bp, Homo sapien
tcaatatgaaactgcctaggataca

SEQ ID NO: 4152822 - DNA, 25 bp, Homo sapien
tgagttgcctcaagatcaatatgaa

SEQ ID NO: 4152823 - DNA, 25 bp, Homo sapien
taaataagcgcaaacgaaaggctag

SEQ ID NO: 4152824 - DNA, 25 bp, Homo sapien
ttgggaggacgttcaagtagacacg

SEQ ID NO: 4152825 - DNA, 25 bp, Homo sapien
tgagagtcacatatccttgggagga

SEQ ID NO: 4152826 - DNA, 25 bp, Homo sapien
tagacacgtaagttgtaagtaagcc

SEQ ID NO: 4152827 - DNA, 25 bp, Homo sapien
cctctttggtatttaagcttcaagc

SEQ ID NO: 4152828 - DNA, 25 bp, Homo sapien
gaagcgtacacttcccctcttactg

SEQ ID NO: 4152829 - DNA, 25 bp, Homo sapien
cgttcttgccttttactccactctg

SEQ ID NO: 4152830 - DNA, 25 bp, Homo sapien
ttgaacttctctgttgcctgcgttc

SEQ ID NO: 4152831 - DNA, 25 bp, Homo sapien
ttttattagcagtcctcaagatcaa

SEQ ID NO: 4152832 - DNA, 25 bp, Homo sapien
tactagagcttactttgaccatatg

SEQ ID NO: 4152833 - DNA, 25 bp, Homo sapien
aaaattgttcccaaatactagagct

SEQ ID NO: 4152834 - DNA, 25 bp, Homo sapien
gaccatatgatacggtttagctgtg

SEQ ID NO: 4152835 - DNA, 25 bp, Homo sapien
cttggatttgtacactacatacatt

SEQ ID NO: 4152836 - DNA, 25 bp, Homo sapien
catattcaagtgcaattatctgagc

SEQ ID NO: 4152837 - DNA, 25 bp, Homo sapien
caactgatgcctagttatctttaaa

SEQ ID NO: 4152838 - DNA, 25 bp, Homo sapien
ctgtattatacgctaggacttggat

SEQ ID NO: 4152839 - DNA, 25 bp, Homo sapien
catcctgggtgttcatgtaatctat

SEQ ID NO: 4152840 - DNA, 25 bp, Homo sapien
taaactaccttaaaatcatgcacct

SEQ ID NO: 4152841 - DNA, 25 bp, Homo sapien
gctatacttcgtttcagatatctaa

SEQ ID NO: 4152842 - DNA, 25 bp, Homo sapien
tactagataatctagctatacttcg

SEQ ID NO: 4152843 - DNA, 25 bp, Homo sapien
gcgcgtgccagctgtgaaatcatta

SEQ ID NO: 4152844 - DNA, 25 bp, Homo sapien
aaacattgatgccatgcgcgtgcca

SEQ ID NO: 4152845 - DNA, 25 bp, Homo sapien
tatagcatctgaataggcagagtgc

SEQ ID NO: 4152846 - DNA, 25 bp, Homo sapien
gaaatcattagtaggtgaaacaccc

SEQ ID NO: 4152847 - DNA, 25 bp, Homo sapien
tccacaggttcagatataccacagg

SEQ ID NO: 4152848 - DNA, 25 bp, Homo sapien
tacatgaagctctccgtagggctct

SEQ ID NO: 4152849 - DNA, 25 bp, Homo sapien
agggctcctggacctcttcacaggg

SEQ ID NO: 4152850 - DNA, 25 bp, Homo sapien
cagtgaaatcacacctatggttgat

SEQ ID NO: 4152851 - DNA, 25 bp, Homo sapien
tttctaatgccatgattagaacttc

SEQ ID NO: 4152852 - DNA, 25 bp, Homo sapien
tctaatgccatgattagaacttctt

SEQ ID NO: 4152853 - DNA, 25 bp, Homo sapien
taatgccatgattagaacttcttgc

SEQ ID NO: 4152854 - DNA, 25 bp, Homo sapien
aatgccatgattagaacttcttgca

SEQ ID NO: 4152855 - DNA, 25 bp, Homo sapien
tagatgtccaaagtagcttttattc

SEQ ID NO: 4152856 - DNA, 25 bp, Homo sapien
cttctgcaatgagtagatgtccaaa

SEQ ID NO: 4152857 - DNA, 25 bp, Homo sapien
aacttctgcaatgagtagatgtcca

SEQ ID NO: 4152858 - DNA, 25 bp, Homo sapien
ccaacttctgcaatgagtagatgtc

SEQ ID NO: 4152859 - DNA, 25 bp, Homo sapien
gaaatctgtacgtagaaaatcagtg

SEQ ID NO: 4152860 - DNA, 25 bp, Homo sapien
cagttgtatggagaaatgaacgttc

SEQ ID NO: 4152861 - DNA, 25 bp, Homo sapien
caggagacacagattactaggcaga

SEQ ID NO: 4152862 - DNA, 25 bp, Homo sapien
tcaaccttcaagtcaacggcagttt

SEQ ID NO: 4152863 - DNA, 25 bp, Homo sapien
gaggagcgcaccggagaaagaacac

SEQ ID NO: 4152864 - DNA, 25 bp, Homo sapien
ggagcgcaccggagaaagaacacac

SEQ ID NO: 4152865 - DNA, 25 bp, Homo sapien
ttgagaggagcgcaccggagaaaga

SEQ ID NO: 4152866 - DNA, 25 bp, Homo sapien
gcacgtacgttgagaggagcgcacc

SEQ ID NO: 4152867 - DNA, 25 bp, Homo sapien
cgcacgtacgttgagaggagcgcac

SEQ ID NO: 4152868 - DNA, 25 bp, Homo sapien
ttgagaggagcgcacgtacgttgag

SEQ ID NO: 4152869 - DNA, 25 bp, Homo sapien
acgtacgttgagaggagcgcacgta

SEQ ID NO: 4152870 - DNA, 25 bp, Homo sapien
acgttgagaggagcgcacgtacgtt

SEQ ID NO: 4152871 - DNA, 25 bp, Homo sapien
caggtcctgtgcacacgcatatagg

SEQ ID NO: 4152872 - DNA, 25 bp, Homo sapien
tgccacgtcccctatcctgtgcctg

SEQ ID NO: 4152873 - DNA, 25 bp, Homo sapien
ggacaagcgctcctgttttcatgcc

SEQ ID NO: 4152874 - DNA, 25 bp, Homo sapien
ggctagggcttcacctcaggtcctg

SEQ ID NO: 4152875 - DNA, 25 bp, Homo sapien
tggctacaagaaactttccaggctg

SEQ ID NO: 4152876 - DNA, 25 bp, Homo sapien
tgagatacaccagatgtcctgtggc

SEQ ID NO: 4152877 - DNA, 25 bp, Homo sapien
ggtaatagcttcttgcgatatgcca

SEQ ID NO: 4152878 - DNA, 25 bp, Homo sapien
gagcacggcggttcatactgggtaa

SEQ ID NO: 4152879 - DNA, 25 bp, Homo sapien
gatctccagactagagtccagctca

SEQ ID NO: 4152880 - DNA, 25 bp, Homo sapien
gactagagtccagctcatttacgac

SEQ ID NO: 4152881 - DNA, 25 bp, Homo sapien
tccagctcatttacgaccaagaaaa

SEQ ID NO: 4152882 - DNA, 25 bp, Homo sapien
tgattcctaaatccgatctccagac

SEQ ID NO: 4152883 - DNA, 25 bp, Homo sapien
gtcctcgttgttcagctgccattta

SEQ ID NO: 4152884 - DNA, 25 bp, Homo sapien
tatatggtatttgctttgctgttcc

SEQ ID NO: 4152885 - DNA, 25 bp, Homo sapien
tttgcttcaaataatgggctccatc

SEQ ID NO: 4152886 - DNA, 25 bp, Homo sapien
tggtgtctgttgttctgctgtttgt

SEQ ID NO: 4152887 - DNA, 25 bp, Homo sapien
cagcctccatactctcacgccggtc

SEQ ID NO: 4152888 - DNA, 25 bp, Homo sapien
gcctcagctggaataatttctcctt

SEQ ID NO: 4152889 - DNA, 25 bp, Homo sapien
ggcctcagctggaataatttctcct

SEQ ID NO: 4152890 - DNA, 25 bp, Homo sapien
agcctccatactctcacgccggtcc

SEQ ID NO: 4152891 - DNA, 25 bp, Homo sapien
taaacatttctagagtcacagtatg

SEQ ID NO: 4152892 - DNA, 25 bp, Homo sapien
cacagtatgctaatattaaatgttg

SEQ ID NO: 4152893 - DNA, 25 bp, Homo sapien
acatatggaacttgctcacttaaca

SEQ ID NO: 4152894 - DNA, 25 bp, Homo sapien
aacatatggaacttgctcacttaac

SEQ ID NO: 4152895 - DNA, 25 bp, Homo sapien
gagccagtggaattgtgccagttga

SEQ ID NO: 4152896 - DNA, 25 bp, Homo sapien
gaagttcaaaagcatgagaaccaga

SEQ ID NO: 4152897 - DNA, 25 bp, Homo sapien
tgcaacctggagactaaggagagcc

SEQ ID NO: 4152898 - DNA, 25 bp, Homo sapien
ttcaacttcggtgcgggataaggcc

SEQ ID NO: 4152899 - DNA, 25 bp, Homo sapien
tcctttgtcctcaaagaggtgtcag

SEQ ID NO: 4152900 - DNA, 25 bp, Homo sapien
caaagaggtgtcagtaatagttagg

SEQ ID NO: 4152901 - DNA, 25 bp, Homo sapien
cctcaaagaggtgtcagtaatagtt

SEQ ID NO: 4152902 - DNA, 25 bp, Homo sapien
tgtcctcaaagaggtgtcagtaata

SEQ ID NO: 4152903 - DNA, 25 bp, Homo sapien
tgtgagccaattcttgtatcctacc

SEQ ID NO: 4152904 - DNA, 25 bp, Homo sapien
gatacggctatctgtgtgagtcttg

SEQ ID NO: 4152905 - DNA, 25 bp, Homo sapien
gagtcttgttcttgaaccaatttac

SEQ ID NO: 4152906 - DNA, 25 bp, Homo sapien
gttgttgttaggatgagatcaaggc

SEQ ID NO: 4152907 - DNA, 25 bp, Homo sapien
ctgaaaatagttgtatcaaagctca

SEQ ID NO: 4152908 - DNA, 25 bp, Homo sapien
gcaaaagcttacttgtatattcacc

SEQ ID NO: 4152909 - DNA, 25 bp, Homo sapien
gcaccaagcctcatgctaaatttag

SEQ ID NO: 4152910 - DNA, 25 bp, Homo sapien
gaacgtcttctgaatacttatgatg

SEQ ID NO: 4152911 - DNA, 25 bp, Homo sapien
aagaaactgagtagcatatccacag

SEQ ID NO: 4152912 - DNA, 25 bp, Homo sapien
tatgcccagttagaattactttttg

SEQ ID NO: 4152913 - DNA, 25 bp, Homo sapien
tctgcaaagatcaaacctgggacta

SEQ ID NO: 4152914 - DNA, 25 bp, Homo sapien
gctcctggcccatcatattaatttc

SEQ ID NO: 4152915 - DNA, 25 bp, Homo sapien
tggcttccgtaagatctagaggtct

SEQ ID NO: 4152916 - DNA, 25 bp, Homo sapien
tgttcctggaatagaaacgagctct

SEQ ID NO: 4152917 - DNA, 25 bp, Homo sapien
ggataacctgtttcagcagacctga

SEQ ID NO: 4152918 - DNA, 25 bp, Homo sapien
cttttgcagctgttttgagccccaa

SEQ ID NO: 4152919 - DNA, 25 bp, Homo sapien
catcctgttcctgccaatgtataga

SEQ ID NO: 4152920 - DNA, 25 bp, Homo sapien
cactgcactcagcatttagcaaact

SEQ ID NO: 4152921 - DNA, 25 bp, Homo sapien
taagagattataggcaacttgctga

SEQ ID NO: 4152922 - DNA, 25 bp, Homo sapien
tagcaaactcttatattcatcctgt

SEQ ID NO: 4152923 - DNA, 25 bp, Homo sapien
cacaagcatattgtagagctgtata

SEQ ID NO: 4152924 - DNA, 25 bp, Homo sapien
tggcaacattcttaccttataaaat

SEQ ID NO: 4152925 - DNA, 25 bp, Homo sapien
ttcactaataaccttagctaatggc

SEQ ID NO: 4152926 - DNA, 25 bp, Homo sapien
tcacttaagctccactaaatttatt

SEQ ID NO: 4152927 - DNA, 25 bp, Homo sapien
atcgaattggaccaaagggagtttg

SEQ ID NO: 4152928 - DNA, 25 bp, Homo sapien
ctggaaagtatcgaattggaccaaa

SEQ ID NO: 4152929 - DNA, 25 bp, Homo sapien
gaattggaccaaagggagtttgatg

SEQ ID NO: 4152930 - DNA, 25 bp, Homo sapien
aagtatcgaattggaccaaagggag

SEQ ID NO: 4152931 - DNA, 25 bp, Homo sapien
acagaacaaagttggtcgggtgcag

SEQ ID NO: 4152932 - DNA, 25 bp, Homo sapien
tcacatgttggctgtagaaaaacct

SEQ ID NO: 4152933 - DNA, 25 bp, Homo sapien
gattctattgtctcaccagatgaaa

SEQ ID NO: 4152934 - DNA, 25 bp, Homo sapien
gctatatttaacagtttctacgagg

SEQ ID NO: 4152935 - DNA, 25 bp, Homo sapien
tatttggatgtagaagggagcagcc

SEQ ID NO: 4152936 - DNA, 25 bp, Homo sapien
gttggctgcaaatgtacccttctga

SEQ ID NO: 4152937 - DNA, 25 bp, Homo sapien
gatgacagctggaagttcgaaactt

SEQ ID NO: 4152938 - DNA, 25 bp, Homo sapien
cagattatcctgaaggttggctgca

SEQ ID NO: 4152939 - DNA, 25 bp, Homo sapien
ctgccatttccctgcactagagtct

SEQ ID NO: 4152940 - DNA, 25 bp, Homo sapien
tccctgcactagagtctgtctggta

SEQ ID NO: 4152941 - DNA, 25 bp, Homo sapien
tttctcctactgccattggttttta

SEQ ID NO: 4152942 - DNA, 25 bp, Homo sapien
gagtctgtctggtattactattgtc

SEQ ID NO: 4152943 - DNA, 25 bp, Homo sapien
caaagagcttatgcacgtctgcgat

SEQ ID NO: 4152944 - DNA, 25 bp, Homo sapien
gagcttatgcacgtctgcgatgtca

SEQ ID NO: 4152945 - DNA, 25 bp, Homo sapien
ttatgcacgtctgcgatgtcattag

SEQ ID NO: 4152946 - DNA, 25 bp, Homo sapien
tgcacgtctgcgatgtcattagaaa

SEQ ID NO: 4152947 - DNA, 25 bp, Homo sapien
tgaaaataacccaactatccaccat

SEQ ID NO: 4152948 - DNA, 25 bp, Homo sapien
cttgaccgggtctcttatgttcatg

SEQ ID NO: 4152949 - DNA, 25 bp, Homo sapien
cgggtctcttatgttcatggatctc

SEQ ID NO: 4152950 - DNA, 25 bp, Homo sapien
gtgaaaataacccaactatccacca

SEQ ID NO: 4152951 - DNA, 25 bp, Homo sapien
ctaagttggataagaatacactgga

SEQ ID NO: 4152952 - DNA, 25 bp, Homo sapien
gttggataagaatacactggatgag

SEQ ID NO: 4152953 - DNA, 25 bp, Homo sapien
taagttggataagaatacactggat

SEQ ID NO: 4152954 - DNA, 25 bp, Homo sapien
ggataagaatacactggatgagttc

SEQ ID NO: 4152955 - DNA, 25 bp, Homo sapien
gttccagtccactatagatgagggt

SEQ ID NO: 4152956 - DNA, 25 bp, Homo sapien
ccagtccactatagatgagggtctt

SEQ ID NO: 4152957 - DNA, 25 bp, Homo sapien
agtccactatagatgagggtcttaa

SEQ ID NO: 4152958 - DNA, 25 bp, Homo sapien
ttccagtccactatagatgagggtc

SEQ ID NO: 4152959 - DNA, 25 bp, Homo sapien
atgtgcacaagcagagggggggata

SEQ ID NO: 4152960 - DNA, 25 bp, Homo sapien
cagtcaccatatcgtacaatacatc

SEQ ID NO: 4152961 - DNA, 25 bp, Homo sapien
attttcaagaatacattgtcattga

SEQ ID NO: 4152962 - DNA, 25 bp, Homo sapien
tgcatatccttgggccaacatctcc

SEQ ID NO: 4152963 - DNA, 25 bp, Homo sapien
cagtatcttgcagtcgataacctgt

SEQ ID NO: 4152964 - DNA, 25 bp, Homo sapien
atatctgtaagcagtttccaagtca

SEQ ID NO: 4152965 - DNA, 25 bp, Homo sapien
cagcttgggccaattggtcctggat

SEQ ID NO: 4152966 - DNA, 25 bp, Homo sapien
tcttgcagtcgataacctgtcacct

SEQ ID NO: 4152967 - DNA, 25 bp, Homo sapien
ggagtggggaacccaatccagtcat

SEQ ID NO: 4152968 - DNA, 25 bp, Homo sapien
gggagtggggaacccaatccagtca

SEQ ID NO: 4152969 - DNA, 25 bp, Homo sapien
aaaagattgccgtgggcttgagccc

SEQ ID NO: 4152970 - DNA, 25 bp, Homo sapien
taatttagctttgttgtctccatgt

SEQ ID NO: 4152971 - DNA, 25 bp, Homo sapien
tatgtagccaatctagcattctctg

SEQ ID NO: 4152972 - DNA, 25 bp, Homo sapien
gcattctctgtcatagtaactgata

SEQ ID NO: 4152973 - DNA, 25 bp, Homo sapien
cttagtaataatggcatagaaatat

SEQ ID NO: 4152974 - DNA, 25 bp, Homo sapien
tggaaacccattactaatacaatgt

SEQ ID NO: 4152975 - DNA, 25 bp, Homo sapien
aatggcatagaaatattggaaaccc

SEQ ID NO: 4152976 - DNA, 25 bp, Homo sapien
ttggaaacccattactaatacaatg

SEQ ID NO: 4152977 - DNA, 25 bp, Homo sapien
gtaagccaagttaagcgaggctgtg

SEQ ID NO: 4152978 - DNA, 25 bp, Homo sapien
tcctgtaagccaagttaagcgaggc

SEQ ID NO: 4152979 - DNA, 25 bp, Homo sapien
accccattttcaggccattggctgt

SEQ ID NO: 4152980 - DNA, 25 bp, Homo sapien
ctgtgaaaagtggtgaggactagga

SEQ ID NO: 4152981 - DNA, 25 bp, Homo sapien
agggcacaaatctccatggttgaaa

SEQ ID NO: 4152982 - DNA, 25 bp, Homo sapien
tagtagggcacaaatctccatggtt

SEQ ID NO: 4152983 - DNA, 25 bp, Homo sapien
catagtagggcacaaatctccatgg

SEQ ID NO: 4152984 - DNA, 25 bp, Homo sapien
ttcatagtagggcacaaatctccat

SEQ ID NO: 4152985 - DNA, 25 bp, Homo sapien
tggtcactacaaggccctctataaa

SEQ ID NO: 4152986 - DNA, 25 bp, Homo sapien
aaaaccaacacaaaatgcttaatgc

SEQ ID NO: 4152987 - DNA, 25 bp, Homo sapien
cagtctggtcactacaaggccctct

SEQ ID NO: 4152988 - DNA, 25 bp, Homo sapien
gtctggtcactacaaggccctctat

SEQ ID NO: 4152989 - DNA, 25 bp, Homo sapien
tggcttctagctccgggtctacatc

SEQ ID NO: 4152990 - DNA, 25 bp, Homo sapien
taatgtgggcattctcatcgcagtc

SEQ ID NO: 4152991 - DNA, 25 bp, Homo sapien
tacattggttatcagaggataggac

SEQ ID NO: 4152992 - DNA, 25 bp, Homo sapien
tgtcgtcctgcagaatctttcatca

SEQ ID NO: 4152993 - DNA, 25 bp, Homo sapien
gattcattcaaacgctatgcctgga

SEQ ID NO: 4152994 - DNA, 25 bp, Homo sapien
aacgtcaatttggtttacatgcccg

SEQ ID NO: 4152995 - DNA, 25 bp, Homo sapien
ttagagaagttacatcaaggaacca

SEQ ID NO: 4152996 - DNA, 25 bp, Homo sapien
tcagcagtctgaatccaggccgggt

SEQ ID NO: 4152997 - DNA, 25 bp, Homo sapien
tgtcataccgaccttcatgttggtg

SEQ ID NO: 4152998 - DNA, 25 bp, Homo sapien
tctctaccctaagcttacactggag

SEQ ID NO: 4152999 - DNA, 25 bp, Homo sapien
ggatggctcctgtacacgtctatgg

SEQ ID NO: 4153000 - DNA, 25 bp, Homo sapien
agtcatttaggcctgttatcacacc

SEQ ID NO: 4153001 - DNA, 25 bp, Homo sapien
taaatcagtcgttctaacaggaggt

SEQ ID NO: 4153002 - DNA, 25 bp, Homo sapien
gagggagacataaggtgtataagca

SEQ ID NO: 4153003 - DNA, 25 bp, Homo sapien
ttaatgtgggatgataggtagctcc

SEQ ID NO: 4153004 - DNA, 25 bp, Homo sapien
tccataagtagcatagagggagaca

SEQ ID NO: 4153005 - DNA, 25 bp, Homo sapien
tatcacatatcataacaatcttata

SEQ ID NO: 4153006 - DNA, 25 bp, Homo sapien
caatcttatattgtaccagagagat

SEQ ID NO: 4153007 - DNA, 25 bp, Homo sapien
tattgtaccagagagatattaaaca

SEQ ID NO: 4153008 - DNA, 25 bp, Homo sapien
cagagagatattaaacattgcactt

SEQ ID NO: 4153009 - DNA, 25 bp, Homo sapien
gaaacagtcttccacatgcatttgg

SEQ ID NO: 4153010 - DNA, 25 bp, Homo sapien
tcaatcaagctgtggcatagaggga

SEQ ID NO: 4153011 - DNA, 25 bp, Homo sapien
caagactggaatcaagtggcctgat

SEQ ID NO: 4153012 - DNA, 25 bp, Homo sapien
caggatgatcctgaacttccgggcc

SEQ ID NO: 4153013 - DNA, 25 bp, Homo sapien
tcagtgaaacctacagctgaaaatc

SEQ ID NO: 4153014 - DNA, 25 bp, Homo sapien
tgtttcagtgaaacctacagctgaa

SEQ ID NO: 4153015 - DNA, 25 bp, Homo sapien
cctacagctgaaaatcgaatttcca

SEQ ID NO: 4153016 - DNA, 25 bp, Homo sapien
gaaacctacagctgaaaatcgaatt

SEQ ID NO: 4153017 - DNA, 25 bp, Homo sapien
ctccagcagaaaggaataaaagtgc

SEQ ID NO: 4153018 - DNA, 25 bp, Homo sapien
tgtaatttttctttggatctgttct

SEQ ID NO: 4153019 - DNA, 25 bp, Homo sapien
taaaagtgctattacatttcttttg

SEQ ID NO: 4153020 - DNA, 25 bp, Homo sapien
ttgtaatttttctttggatctgttc

SEQ ID NO: 4153021 - DNA, 25 bp, Homo sapien
cattcaacatagtctgattctggta

SEQ ID NO: 4153022 - DNA, 25 bp, Homo sapien
taacggcctcttgaagaaaattggc

SEQ ID NO: 4153023 - DNA, 25 bp, Homo sapien
tattgtgctgctgatttgagtgcta

SEQ ID NO: 4153024 - DNA, 25 bp, Homo sapien
tgattctggtaagtttattgtgctg

SEQ ID NO: 4153025 - DNA, 25 bp, Homo sapien
agtgtggatcaattctagcaggtgt

SEQ ID NO: 4153026 - DNA, 25 bp, Homo sapien
gctggagtgtggtccattgacaatg

SEQ ID NO: 4153027 - DNA, 25 bp, Homo sapien
agacgctggagtgtggtccattgac

SEQ ID NO: 4153028 - DNA, 25 bp, Homo sapien
tgtggatcaattctagcaggtgtgt

SEQ ID NO: 4153029 - DNA, 25 bp, Homo sapien
aggtgggaagaagcatcaacatgag

SEQ ID NO: 4153030 - DNA, 25 bp, Homo sapien
gctgccttgggtgttcgctcagatg

SEQ ID NO: 4153031 - DNA, 25 bp, Homo sapien
ctcagatgcatctctagtaagtatc

SEQ ID NO: 4153032 - DNA, 25 bp, Homo sapien
gcatcaacatgagttaacccttcaa

SEQ ID NO: 4153033 - DNA, 25 bp, Homo sapien
tcagatgaccagcactattgccatt

SEQ ID NO: 4153034 - DNA, 25 bp, Homo sapien
gcactattgccattaaccttaaata

SEQ ID NO: 4153035 - DNA, 25 bp, Homo sapien
tgaccagcactattgccattaacct

SEQ ID NO: 4153036 - DNA, 25 bp, Homo sapien
cagcactattgccattaaccttaaa

SEQ ID NO: 4153037 - DNA, 25 bp, Homo sapien
gcaattctttgatgttccagtcaga

SEQ ID NO: 4153038 - DNA, 25 bp, Homo sapien
aaagcaattctttgatgttccagtc

SEQ ID NO: 4153039 - DNA, 25 bp, Homo sapien
tgctgactattgtcatcataattgg

SEQ ID NO: 4153040 - DNA, 25 bp, Homo sapien
taattggatatccactccatggaaa

SEQ ID NO: 4153041 - DNA, 25 bp, Homo sapien
ctcaaccaactgccatctagacctc

SEQ ID NO: 4153042 - DNA, 25 bp, Homo sapien
tcaaccaactgccatctagacctct

SEQ ID NO: 4153043 - DNA, 25 bp, Homo sapien
caaccaactgccatctagacctctg

SEQ ID NO: 4153044 - DNA, 25 bp, Homo sapien
ccagaatcagagagcctatggaaag

SEQ ID NO: 4153045 - DNA, 25 bp, Homo sapien
cctcctccagatactttgtggtcac

SEQ ID NO: 4153046 - DNA, 25 bp, Homo sapien
ctccagatactttgtggtcaccctg

SEQ ID NO: 4153047 - DNA, 25 bp, Homo sapien
tgagacagccactttgtacctcgtt

SEQ ID NO: 4153048 - DNA, 25 bp, Homo sapien
tgtacctcgttctgccatgcattgc

SEQ ID NO: 4153049 - DNA, 25 bp, Homo sapien
aaatggcttgttgtttgcagcccac

SEQ ID NO: 4153050 - DNA, 25 bp, Homo sapien
ttgcagcatatctattctcctcggg

SEQ ID NO: 4153051 - DNA, 25 bp, Homo sapien
tattctcctcgggaggcatttaaat

SEQ ID NO: 4153052 - DNA, 25 bp, Homo sapien
atttaaatggcttgttgtttgcagc

SEQ ID NO: 4153053 - DNA, 25 bp, Homo sapien
ccagtgtctgagcttgttaccatac

SEQ ID NO: 4153054 - DNA, 25 bp, Homo sapien
taccatacatcggtttaagcagact

SEQ ID NO: 4153055 - DNA, 25 bp, Homo sapien
cggtttaagcagactctcattttct

SEQ ID NO: 4153056 - DNA, 25 bp, Homo sapien
gtgaagtttttccagtgtctgagct

SEQ ID NO: 4153057 - DNA, 25 bp, Homo sapien
ccattgttgacaggcaagttcccca

SEQ ID NO: 4153058 - DNA, 25 bp, Homo sapien
actgcctcattgtgaagccacctca

SEQ ID NO: 4153059 - DNA, 25 bp, Homo sapien
gcctcattgtgaagccacctcacaa

SEQ ID NO: 4153060 - DNA, 25 bp, Homo sapien
tgagcaaagtagaacaggatttggg

SEQ ID NO: 4153061 - DNA, 25 bp, Homo sapien
cgtgtgagtctttcttggagatccc

SEQ ID NO: 4153062 - DNA, 25 bp, Homo sapien
cattgttccatccagtactcgtgtg

SEQ ID NO: 4153063 - DNA, 25 bp, Homo sapien
tcttctatatgatagtaaagcattg

SEQ ID NO: 4153064 - DNA, 25 bp, Homo sapien
gagtctttcttggagatcccaacac

SEQ ID NO: 4153065 - DNA, 25 bp, Homo sapien
gaattttgctgcattattggctggg

SEQ ID NO: 4153066 - DNA, 25 bp, Homo sapien
ctattccagtggataagaccgtcaa

SEQ ID NO: 4153067 - DNA, 25 bp, Homo sapien
gaatagaattttgctgcattattgg

SEQ ID NO: 4153068 - DNA, 25 bp, Homo sapien
gataagaccgtcaaagaatagaatt

SEQ ID NO: 4153069 - DNA, 25 bp, Homo sapien
tcatgattagcatgcacagaaggag

SEQ ID NO: 4153070 - DNA, 25 bp, Homo sapien
tttggaacagtacagataaatcctc

SEQ ID NO: 4153071 - DNA, 25 bp, Homo sapien
ggtattctcagtaccatgcctctcc

SEQ ID NO: 4153072 - DNA, 25 bp, Homo sapien
cacagtgcggaaatgtaatgaagct

SEQ ID NO: 4153073 - DNA, 25 bp, Homo sapien
ctacaacctgaaggtggcttctaac

SEQ ID NO: 4153074 - DNA, 25 bp, Homo sapien
tacaacctgaaggtggcttctaact

SEQ ID NO: 4153075 - DNA, 25 bp, Homo sapien
tcagtatcaggatgctttggaactg

SEQ ID NO: 4153076 - DNA, 25 bp, Homo sapien
ctcagtatcaggatgctttggaact

SEQ ID NO: 4153077 - DNA, 25 bp, Homo sapien
cctcagtatcaggatgctttggaac

SEQ ID NO: 4153078 - DNA, 25 bp, Homo sapien
ttcataaggattctatctttagctt

SEQ ID NO: 4153079 - DNA, 25 bp, Homo sapien
agatcaaggtgtttgttgtgtatgc

SEQ ID NO: 4153080 - DNA, 25 bp, Homo sapien
ttttcataaggattctatctttagc

SEQ ID NO: 4153081 - DNA, 25 bp, Homo sapien
tctttagcttttctgaagatcaagg

SEQ ID NO: 4153082 - DNA, 25 bp, Homo sapien
gctcgtttcatagcagggcgatcat

SEQ ID NO: 4153083 - DNA, 25 bp, Homo sapien
gcccctgtgctgagagctcgtttca

SEQ ID NO: 4153084 - DNA, 25 bp, Homo sapien
gtctgaatacatgtttggattctca

SEQ ID NO: 4153085 - DNA, 25 bp, Homo sapien
tatggtgcttgcagagtgatgtagc

SEQ ID NO: 4153086 - DNA, 25 bp, Homo sapien
agtggaactttctccatatttaagc

SEQ ID NO: 4153087 - DNA, 25 bp, Homo sapien
catgctgaaaagcaatgaattgtca

SEQ ID NO: 4153088 - DNA, 25 bp, Homo sapien
aagtggaactttctccatatttaag

SEQ ID NO: 4153089 - DNA, 25 bp, Homo sapien
tttcatgctgaaaagcaatgaattg

SEQ ID NO: 4153090 - DNA, 25 bp, Homo sapien
tctgttgcccatggatgagatacct

SEQ ID NO: 4153091 - DNA, 25 bp, Homo sapien
tgtactgactgatagcgattgaatg

SEQ ID NO: 4153092 - DNA, 25 bp, Homo sapien
tatgagtaaatgcatgggttgtggc

SEQ ID NO: 4153093 - DNA, 25 bp, Homo sapien
actgagggcacgtataaatggaggc

SEQ ID NO: 4153094 - DNA, 25 bp, Homo sapien
tatctatcagtactctgttctctct

SEQ ID NO: 4153095 - DNA, 25 bp, Homo sapien
gctattgaaatctacctgctgttta

SEQ ID NO: 4153096 - DNA, 25 bp, Homo sapien
tgctattgaaatctacctgctgttt

SEQ ID NO: 4153097 - DNA, 25 bp, Homo sapien
cagaataatatatctatcagtactc

SEQ ID NO: 4153098 - DNA, 25 bp, Homo sapien
aatttcagctcttgctaccctgctg

SEQ ID NO: 4153099 - DNA, 25 bp, Homo sapien
tttctccaagaatcatgtacaattt

SEQ ID NO: 4153100 - DNA, 25 bp, Homo sapien
gctcttgctaccctgctgtacgaat

SEQ ID NO: 4153101 - DNA, 25 bp, Homo sapien
cctgctgtacgaattgatcctgtgc

SEQ ID NO: 4153102 - DNA, 25 bp, Homo sapien
cctgtcccttggcaattgttactgg

SEQ ID NO: 4153103 - DNA, 25 bp, Homo sapien
tgctgaaagagtttggtttcactct

SEQ ID NO: 4153104 - DNA, 25 bp, Homo sapien
ggcaattgttactggctttaatgtt

SEQ ID NO: 4153105 - DNA, 25 bp, Homo sapien
tgtgcactgctgaaagagtttggtt

SEQ ID NO: 4153106 - DNA, 25 bp, Homo sapien
aaagcatcccttctgtcatagacgg

SEQ ID NO: 4153107 - DNA, 25 bp, Homo sapien
aaccgcagtgttgagaagtgagtcc

SEQ ID NO: 4153108 - DNA, 25 bp, Homo sapien
tcgaagaggtggactgaatgaagcc

SEQ ID NO: 4153109 - DNA, 25 bp, Homo sapien
gaaaattcagaacgataaaccgcag

SEQ ID NO: 4153110 - DNA, 25 bp, Homo sapien
caggctcctgccttattggagcagc

SEQ ID NO: 4153111 - DNA, 25 bp, Homo sapien
ctcctgccttattggagcagccaca

SEQ ID NO: 4153112 - DNA, 25 bp, Homo sapien
gctcctgccttattggagcagccac

SEQ ID NO: 4153113 - DNA, 25 bp, Homo sapien
ggctcctgccttattggagcagcca

SEQ ID NO: 4153114 - DNA, 25 bp, Homo sapien
gctaatcagtaagattgaggactta

SEQ ID NO: 4153115 - DNA, 25 bp, Homo sapien
aaaggcctgaagctttctagatctt

SEQ ID NO: 4153116 - DNA, 25 bp, Homo sapien
tctcctatcctgttgctaatcagta

SEQ ID NO: 4153117 - DNA, 25 bp, Homo sapien
gaagctttctagatcttgcctgcat

SEQ ID NO: 4153118 - DNA, 25 bp, Homo sapien
ctggttctatttggccttgtacctt

SEQ ID NO: 4153119 - DNA, 25 bp, Homo sapien
gtagtacagctggaaatatatattt

SEQ ID NO: 4153120 - DNA, 25 bp, Homo sapien
tatttagttgtagtacagctggaaa

SEQ ID NO: 4153121 - DNA, 25 bp, Homo sapien
tagttgtagtacagctggaaatata

SEQ ID NO: 4153122 - DNA, 25 bp, Homo sapien
gcttatatttagttgtagtacagct

SEQ ID NO: 4153123 - DNA, 25 bp, Homo sapien
tccaaatcttgtctctgttctatgt

SEQ ID NO: 4153124 - DNA, 25 bp, Homo sapien
attgtactgctaaatccatctccga

SEQ ID NO: 4153125 - DNA, 25 bp, Homo sapien
tacaccgtgcctgatcttttgataa

SEQ ID NO: 4153126 - DNA, 25 bp, Homo sapien
gacttggagagtgccattgtactgc

SEQ ID NO: 4153127 - DNA, 25 bp, Homo sapien
ggatgttgacacgacccataacttc

SEQ ID NO: 4153128 - DNA, 25 bp, Homo sapien
ggagcatccaatgtaagcatatcaa

SEQ ID NO: 4153129 - DNA, 25 bp, Homo sapien
agcttgctgggagattcgacttcac

SEQ ID NO: 4153130 - DNA, 25 bp, Homo sapien
caaatagaatcagcaagagcttgct

SEQ ID NO: 4153131 - DNA, 25 bp, Homo sapien
aatcctagaatgctgaagttccaag

SEQ ID NO: 4153132 - DNA, 25 bp, Homo sapien
ctacagatgaatcctagaatgctga

SEQ ID NO: 4153133 - DNA, 25 bp, Homo sapien
tacagatgaatcctagaatgctgaa

SEQ ID NO: 4153134 - DNA, 25 bp, Homo sapien
gatgaatcctagaatgctgaagttc

SEQ ID NO: 4153135 - DNA, 25 bp, Homo sapien
gagaagttgatgaataagataaaag

SEQ ID NO: 4153136 - DNA, 25 bp, Homo sapien
ccatgtatcctatatagtgtttttg

SEQ ID NO: 4153137 - DNA, 25 bp, Homo sapien
catttttgccatgtatcctatatag

SEQ ID NO: 4153138 - DNA, 25 bp, Homo sapien
taagataaaagaatcctcatgccat

SEQ ID NO: 4153139 - DNA, 25 bp, Homo sapien
cggaaattgggataactctttgcct

SEQ ID NO: 4153140 - DNA, 25 bp, Homo sapien
ggaaattgggataactctttgcctc

SEQ ID NO: 4153141 - DNA, 25 bp, Homo sapien
ttgtgtcctcttcgctggaatctta

SEQ ID NO: 4153142 - DNA, 25 bp, Homo sapien
tcccggatagattcaggcataacct

SEQ ID NO: 4153143 - DNA, 25 bp, Homo sapien
catcatcctgtctgggagctttaat

SEQ ID NO: 4153144 - DNA, 25 bp, Homo sapien
tcttagggccttgacatcatcctgt

SEQ ID NO: 4153145 - DNA, 25 bp, Homo sapien
taaacacatattgagggcttctttc

SEQ ID NO: 4153146 - DNA, 25 bp, Homo sapien
cagtgtttcaaaggaatgggcaaag

SEQ ID NO: 4153147 - DNA, 25 bp, Homo sapien
gaatgccgtacaactgcatttcatg

SEQ ID NO: 4153148 - DNA, 25 bp, Homo sapien
gagtgatggcatattggctaagttg

SEQ ID NO: 4153149 - DNA, 25 bp, Homo sapien
gctgctacccctcggaaatcttgaa

SEQ ID NO: 4153150 - DNA, 25 bp, Homo sapien
gataccatagtcattgcttcctctg

SEQ ID NO: 4153151 - DNA, 25 bp, Homo sapien
caaaaagtgttgaagcgtagatacc

SEQ ID NO: 4153152 - DNA, 25 bp, Homo sapien
cctcctcatagctgtcattttctaa

SEQ ID NO: 4153153 - DNA, 25 bp, Homo sapien
cgatgtcccagggaaacaaaccagg

SEQ ID NO: 4153154 - DNA, 25 bp, Homo sapien
ttacatccgatgtcccagggaaaca

SEQ ID NO: 4153155 - DNA, 25 bp, Homo sapien
acactgggatcaggagcctcaacgc

SEQ ID NO: 4153156 - DNA, 25 bp, Homo sapien
tcaacgcagttttctgaagtcactg

SEQ ID NO: 4153157 - DNA, 25 bp, Homo sapien
gggatcatacaggaggttgtctgaa

SEQ ID NO: 4153158 - DNA, 25 bp, Homo sapien
gtttccctctcgcattcagctttca

SEQ ID NO: 4153159 - DNA, 25 bp, Homo sapien
cccatcagggttatagccattgcta

SEQ ID NO: 4153160 - DNA, 25 bp, Homo sapien
tgtctgaataagaagcctgttcttc

SEQ ID NO: 4153161 - DNA, 25 bp, Homo sapien
tggatctgccgaattgaagaggcct

SEQ ID NO: 4153162 - DNA, 25 bp, Homo sapien
tagccaagccatcaagtgtctgaaa

SEQ ID NO: 4153163 - DNA, 25 bp, Homo sapien
cagaatacagttgtctagccaagcc

SEQ ID NO: 4153164 - DNA, 25 bp, Homo sapien
tttcaagtcatcttagcagctagga

SEQ ID NO: 4153165 - DNA, 25 bp, Homo sapien
tggttttcacttttagattgctcat

SEQ ID NO: 4153166 - DNA, 25 bp, Homo sapien
tactgaaatgtttagattggttttc

SEQ ID NO: 4153167 - DNA, 25 bp, Homo sapien
gagaaatgttttcaatgtagaggga

SEQ ID NO: 4153168 - DNA, 25 bp, Homo sapien
tgtaggacaatactctataagagaa

SEQ ID NO: 4153169 - DNA, 25 bp, Homo sapien
cataatgggcgtccctattctcttt

SEQ ID NO: 4153170 - DNA, 25 bp, Homo sapien
acataatgggcgtccctattctctt

SEQ ID NO: 4153171 - DNA, 25 bp, Homo sapien
aacataatgggcgtccctattctct

SEQ ID NO: 4153172 - DNA, 25 bp, Homo sapien
cactttatcaagtgcctgagcaaac

SEQ ID NO: 4153173 - DNA, 25 bp, Homo sapien
gagccattgaatttaagagtcttca

SEQ ID NO: 4153174 - DNA, 25 bp, Homo sapien
tgaacagacactttatcaagtgcct

SEQ ID NO: 4153175 - DNA, 25 bp, Homo sapien
acagacactttatcaagtgcctgag

SEQ ID NO: 4153176 - DNA, 25 bp, Homo sapien
gttatagtcgtctagtcactggaga

SEQ ID NO: 4153177 - DNA, 25 bp, Homo sapien
catcagtgggagtgaagtgagttta

SEQ ID NO: 4153178 - DNA, 25 bp, Homo sapien
cgttatagtcgtctagtcactggag

SEQ ID NO: 4153179 - DNA, 25 bp, Homo sapien
gggagtgaagtgagtttagtgcaga

SEQ ID NO: 4153180 - DNA, 25 bp, Homo sapien
aataacatgctaaattcatattcca

SEQ ID NO: 4153181 - DNA, 25 bp, Homo sapien
aatgtatcttacaatattgatgtgg

SEQ ID NO: 4153182 - DNA, 25 bp, Homo sapien
cttgaaatgggtgatgtcttagatt

SEQ ID NO: 4153183 - DNA, 25 bp, Homo sapien
taaattcatattccaaaaacctaca

SEQ ID NO: 4153184 - DNA, 25 bp, Homo sapien
tatagattgtattttaatagtgaga

SEQ ID NO: 4153185 - DNA, 25 bp, Homo sapien
gagacaaaaattcaactgataagaa

SEQ ID NO: 4153186 - DNA, 25 bp, Homo sapien
tttaatagtgagagacaaaaattca

SEQ ID NO: 4153187 - DNA, 25 bp, Homo sapien
agattgtattttaatagtgagagac

SEQ ID NO: 4153188 - DNA, 25 bp, Homo sapien
taagacagaactccaactctttgcc

SEQ ID NO: 4153189 - DNA, 25 bp, Homo sapien
caaaacgaggatatatttgcctttc

SEQ ID NO: 4153190 - DNA, 25 bp, Homo sapien
ccctctagcacatagtgttttgttt

SEQ ID NO: 4153191 - DNA, 25 bp, Homo sapien
aacgaggatatatttgcctttccgg

SEQ ID NO: 4153192 - DNA, 25 bp, Homo sapien
gactaccgagttggaacagcattgc

SEQ ID NO: 4153193 - DNA, 25 bp, Homo sapien
gctaattcttgcaggcctacgtgag

SEQ ID NO: 4153194 - DNA, 25 bp, Homo sapien
cctaaccgcattaagctggagacta

SEQ ID NO: 4153195 - DNA, 25 bp, Homo sapien
tcttggctcacagttaggtacagca

SEQ ID NO: 4153196 - DNA, 25 bp, Homo sapien
ccggttgcaaggcagattactccaa

SEQ ID NO: 4153197 - DNA, 25 bp, Homo sapien
tactccaaagatggttcctagaggg

SEQ ID NO: 4153198 - DNA, 25 bp, Homo sapien
agccattgtgacagcagagaccaag

SEQ ID NO: 4153199 - DNA, 25 bp, Homo sapien
ccatgtggttaaaaggtcatctccc

SEQ ID NO: 4153200 - DNA, 25 bp, Homo sapien
ggctttaaagtcaagctcaattcct

SEQ ID NO: 4153201 - DNA, 25 bp, Homo sapien
gccttgataaccagtttcaccaatt

SEQ ID NO: 4153202 - DNA, 25 bp, Homo sapien
tattggctttaaagtcaagctcaat

SEQ ID NO: 4153203 - DNA, 25 bp, Homo sapien
tggtcaatgccttgataaccagttt

SEQ ID NO: 4153204 - DNA, 25 bp, Homo sapien
tagaagaaggctttgatcagtctca

SEQ ID NO: 4153205 - DNA, 25 bp, Homo sapien
tatgattgttaccaaatcaccaggg

SEQ ID NO: 4153206 - DNA, 25 bp, Homo sapien
catgaggaatgaccggtctggcatc

SEQ ID NO: 4153207 - DNA, 25 bp, Homo sapien
cattgcatgccatgatttggtgagc

SEQ ID NO: 4153208 - DNA, 25 bp, Homo sapien
tatctttgcctggagtagttccctg

SEQ ID NO: 4153209 - DNA, 25 bp, Homo sapien
tttctcttgcttactacgctctagc

SEQ ID NO: 4153210 - DNA, 25 bp, Homo sapien
tacgctctagccactccagtgcttt

SEQ ID NO: 4153211 - DNA, 25 bp, Homo sapien
gcctggagtagttccctggtatcca

SEQ ID NO: 4153212 - DNA, 25 bp, Homo sapien
tttaagccttcaatccaggttctgc

SEQ ID NO: 4153213 - DNA, 25 bp, Homo sapien
taagccttcaatccaggttctgcct

SEQ ID NO: 4153214 - DNA, 25 bp, Homo sapien
attctttaagccttcaatccaggtt

SEQ ID NO: 4153215 - DNA, 25 bp, Homo sapien
tctttaagccttcaatccaggttct

SEQ ID NO: 4153216 - DNA, 25 bp, Homo sapien
tgttgagtgttttgcgggatgtggt

SEQ ID NO: 4153217 - DNA, 25 bp, Homo sapien
aatgttgagtgttttgcgggatgtg

SEQ ID NO: 4153218 - DNA, 25 bp, Homo sapien
agtgttttgcgggatgtggtttttg

SEQ ID NO: 4153219 - DNA, 25 bp, Homo sapien
tgagtgttttgcgggatgtggtttt

SEQ ID NO: 4153220 - DNA, 25 bp, Homo sapien
caagggatgtctgaaggatgggttc

SEQ ID NO: 4153221 - DNA, 25 bp, Homo sapien
ggatgtctgaaggatgggttccaaa

SEQ ID NO: 4153222 - DNA, 25 bp, Homo sapien
atgtctgaaggatgggttccaaagt

SEQ ID NO: 4153223 - DNA, 25 bp, Homo sapien
agggatgtctgaaggatgggttcca

SEQ ID NO: 4153224 - DNA, 25 bp, Homo sapien
ccctctgctttcgttgaccatgtgg

SEQ ID NO: 4153225 - DNA, 25 bp, Homo sapien
tggacgcgcatgcattttggagact

SEQ ID NO: 4153226 - DNA, 25 bp, Homo sapien
tctgcagagcagttagagtcggctg

SEQ ID NO: 4153227 - DNA, 25 bp, Homo sapien
tatctgtaaagaggtcgggtgaaat

SEQ ID NO: 4153228 - DNA, 25 bp, Homo sapien
ttgccgaatgtgtgtttgcagttca

SEQ ID NO: 4153229 - DNA, 25 bp, Homo sapien
ctttgccgaatgtgtgtttgcagtt

SEQ ID NO: 4153230 - DNA, 25 bp, Homo sapien
gcagttcatattaaactgtgcatca

SEQ ID NO: 4153231 - DNA, 25 bp, Homo sapien
ttaaactgtgcatcacactgtttct

SEQ ID NO: 4153232 - DNA, 25 bp, Homo sapien
ctttgcacccaactgagaggaggaa

SEQ ID NO: 4153233 - DNA, 25 bp, Homo sapien
tttgcacccaactgagaggaggaag

SEQ ID NO: 4153234 - DNA, 25 bp, Homo sapien
tagaagttgaagaagggtgattcct

SEQ ID NO: 4153235 - DNA, 25 bp, Homo sapien
agaagttgaagaagggtgattcctt

SEQ ID NO: 4153236 - DNA, 25 bp, Homo sapien
aattttgtatgctagagctgttagc

SEQ ID NO: 4153237 - DNA, 25 bp, Homo sapien
gctccacaggaagtacgataaaatg

SEQ ID NO: 4153238 - DNA, 25 bp, Homo sapien
aatgaaattttgtatgctagagctg

SEQ ID NO: 4153239 - DNA, 25 bp, Homo sapien
catcggccatataggaagagcttcc

SEQ ID NO: 4153240 - DNA, 25 bp, Homo sapien
gaatgtgagtgtcccttgttgtaag

SEQ ID NO: 4153241 - DNA, 25 bp, Homo sapien
tggtttcagaatgtgagtgtccctt

SEQ ID NO: 4153242 - DNA, 25 bp, Homo sapien
tgtgtaggtcatggcagttttccca

SEQ ID NO: 4153243 - DNA, 25 bp, Homo sapien
tcccttgttgtaagaagatgctgaa

SEQ ID NO: 4153244 - DNA, 25 bp, Homo sapien
gatgtttttatatagacggtattgt

SEQ ID NO: 4153245 - DNA, 25 bp, Homo sapien
tgttatttgttaatgacattgtggt

SEQ ID NO: 4153246 - DNA, 25 bp, Homo sapien
agacggtattgttaattgttatttg

SEQ ID NO: 4153247 - DNA, 25 bp, Homo sapien
tatttgttaatgacattgtggttta

SEQ ID NO: 4153248 - DNA, 25 bp, Homo sapien
ttgggaattttgtggttgctctttc

SEQ ID NO: 4153249 - DNA, 25 bp, Homo sapien
caaccaaggctctattgcattgtga

SEQ ID NO: 4153250 - DNA, 25 bp, Homo sapien
tctttctcaagtggagtggaaatgc

SEQ ID NO: 4153251 - DNA, 25 bp, Homo sapien
tgcattaatggaaagatctggctga

SEQ ID NO: 4153252 - DNA, 25 bp, Homo sapien
tgctggctgtgtgttttgaatttaa

SEQ ID NO: 4153253 - DNA, 25 bp, Homo sapien
agaagaatatagttaggggacacat

SEQ ID NO: 4153254 - DNA, 25 bp, Homo sapien
atgctggctgtgtgttttgaattta

SEQ ID NO: 4153255 - DNA, 25 bp, Homo sapien
taggggacacattattgtcttttgg

SEQ ID NO: 4153256 - DNA, 25 bp, Homo sapien
caatttcacttggattcggcccaga

SEQ ID NO: 4153257 - DNA, 25 bp, Homo sapien
gaatcttgctaaagtgaggtgactc

SEQ ID NO: 4153258 - DNA, 25 bp, Homo sapien
tgaggtgactcattatgacttgcat

SEQ ID NO: 4153259 - DNA, 25 bp, Homo sapien
ttctaacttcgttgtcccatgaatc

SEQ ID NO: 4153260 - DNA, 25 bp, Homo sapien
tttttaatgctaaatgcatcatgtc

SEQ ID NO: 4153261 - DNA, 25 bp, Homo sapien
ccacgttgaccttttcattgaggta

SEQ ID NO: 4153262 - DNA, 25 bp, Homo sapien
taatgctaaatgcatcatgtccgtc

SEQ ID NO: 4153263 - DNA, 25 bp, Homo sapien
ctagtccacgttgaccttttcattg

SEQ ID NO: 4153264 - DNA, 25 bp, Homo sapien
tctacagtatctgtacaagtttgca

SEQ ID NO: 4153265 - DNA, 25 bp, Homo sapien
gatgcagttgatctgcatccttgcc

SEQ ID NO: 4153266 - DNA, 25 bp, Homo sapien
acagtatctgtacaagtttgcattc

SEQ ID NO: 4153267 - DNA, 25 bp, Homo sapien
gcattccactggatgcagttgatct

SEQ ID NO: 4153268 - DNA, 25 bp, Homo sapien
tgagtttactaatagcaggagtaac

SEQ ID NO: 4153269 - DNA, 25 bp, Homo sapien
ggtcatactgagtttactaatagca

SEQ ID NO: 4153270 - DNA, 25 bp, Homo sapien
tactaatagcaggagtaactttgaa

SEQ ID NO: 4153271 - DNA, 25 bp, Homo sapien
tggttagaggaatggtcatactgag

SEQ ID NO: 4153272 - DNA, 25 bp, Homo sapien
atctgactgctaagtgttcatattc

SEQ ID NO: 4153273 - DNA, 25 bp, Homo sapien
tcatctgactgctaagtgttcatat

SEQ ID NO: 4153274 - DNA, 25 bp, Homo sapien
catctgactgctaagtgttcatatt

SEQ ID NO: 4153275 - DNA, 25 bp, Homo sapien
aaggcccacggctgattaatactgt

SEQ ID NO: 4153276 - DNA, 25 bp, Homo sapien
gaggtctgtcttcatatccacttat

SEQ ID NO: 4153277 - DNA, 25 bp, Homo sapien
cctgggtttggtgggtccatctctc

SEQ ID NO: 4153278 - DNA, 25 bp, Homo sapien
aaggcacgtcttaaagtcgttcaag

SEQ ID NO: 4153279 - DNA, 25 bp, Homo sapien
cacctaggtaggcagatatgtacgc

SEQ ID NO: 4153280 - DNA, 25 bp, Homo sapien
tatgtacgctaggatcgtgctcgtg

SEQ ID NO: 4153281 - DNA, 25 bp, Homo sapien
tgaacggcctttcttgacgaccgga

SEQ ID NO: 4153282 - DNA, 25 bp, Homo sapien
acagtacgtgggaaaatggccggca

SEQ ID NO: 4153283 - DNA, 25 bp, Homo sapien
ggtggtcagcaattatgagaatcat

SEQ ID NO: 4153284 - DNA, 25 bp, Homo sapien
ctttcattctgcatgcccttatctt

SEQ ID NO: 4153285 - DNA, 25 bp, Homo sapien
ttcattctgcatgcccttatcttgg

SEQ ID NO: 4153286 - DNA, 25 bp, Homo sapien
ttggtggtcagcaattatgagaatc

SEQ ID NO: 4153287 - DNA, 25 bp, Homo sapien
acccgattccagagtccctttgtga

SEQ ID NO: 4153288 - DNA, 25 bp, Homo sapien
cgattccagagtccctttgtgacat

SEQ ID NO: 4153289 - DNA, 25 bp, Homo sapien
aacccgattccagagtccctttgtg

SEQ ID NO: 4153290 - DNA, 25 bp, Homo sapien
tcctggtaaacccgattccagagtc

SEQ ID NO: 4153291 - DNA, 25 bp, Homo sapien
actgtatcctcttgtccccctgaca

SEQ ID NO: 4153292 - DNA, 25 bp, Homo sapien
gtatcctcttgtccccctgacattt

SEQ ID NO: 4153293 - DNA, 25 bp, Homo sapien
cctcttgtccccctgacatttgcta

SEQ ID NO: 4153294 - DNA, 25 bp, Homo sapien
ctactgtatcctcttgtccccctga

SEQ ID NO: 4153295 - DNA, 25 bp, Homo sapien
agcttcggactttggggctgattca

SEQ ID NO: 4153296 - DNA, 25 bp, Homo sapien
gaacagcttcggactttggggctga

SEQ ID NO: 4153297 - DNA, 25 bp, Homo sapien
ggtcctgaacagcttcggactttgg

SEQ ID NO: 4153298 - DNA, 25 bp, Homo sapien
gtcctgaacagcttcggactttggg

SEQ ID NO: 4153299 - DNA, 25 bp, Homo sapien
ccagagttcatagtacataggatca

SEQ ID NO: 4153300 - DNA, 25 bp, Homo sapien
gagttcatagtacataggatcaagg

SEQ ID NO: 4153301 - DNA, 25 bp, Homo sapien
ttcatagtacataggatcaaggcca

SEQ ID NO: 4153302 - DNA, 25 bp, Homo sapien
tagtacataggatcaaggccaaaga

SEQ ID NO: 4153303 - DNA, 25 bp, Homo sapien
gctctttttcatcagccctcaagtc

SEQ ID NO: 4153304 - DNA, 25 bp, Homo sapien
catcagccctcaagtctccaaggag

SEQ ID NO: 4153305 - DNA, 25 bp, Homo sapien
taatgtgtctgagtgctctttttca

SEQ ID NO: 4153306 - DNA, 25 bp, Homo sapien
gtaattgtataagacataatgtgtc

SEQ ID NO: 4153307 - DNA, 25 bp, Homo sapien
caattccatattgcacatgcagctt

SEQ ID NO: 4153308 - DNA, 25 bp, Homo sapien
tttccaattccatattgcacatgca

SEQ ID NO: 4153309 - DNA, 25 bp, Homo sapien
attccatattgcacatgcagcttcc

SEQ ID NO: 4153310 - DNA, 25 bp, Homo sapien
tccaattccatattgcacatgcagc

SEQ ID NO: 4153311 - DNA, 25 bp, Homo sapien
tgtagttctctattgctacgcatct

SEQ ID NO: 4153312 - DNA, 25 bp, Homo sapien
tgtctatcatttacatactccagag

SEQ ID NO: 4153313 - DNA, 25 bp, Homo sapien
tccacagccctcgtttgtagttctc

SEQ ID NO: 4153314 - DNA, 25 bp, Homo sapien
gctctcaaatgatctgaaacctttg

SEQ ID NO: 4153315 - DNA, 25 bp, Homo sapien
ttggccacgtacaaatgcttttaga

SEQ ID NO: 4153316 - DNA, 25 bp, Homo sapien
aaaatgcagaagcacttatctagcc

SEQ ID NO: 4153317 - DNA, 25 bp, Homo sapien
tcttgggagactattgcaaatgact

SEQ ID NO: 4153318 - DNA, 25 bp, Homo sapien
tagccttccataatttggtgcccca

SEQ ID NO: 4153319 - DNA, 25 bp, Homo sapien
gcaaatgactttgtgaactaccaat

SEQ ID NO: 4153320 - DNA, 25 bp, Homo sapien
tggagattccatggctacgaaaggc

SEQ ID NO: 4153321 - DNA, 25 bp, Homo sapien
tatgcacagatccaagagcccactg

SEQ ID NO: 4153322 - DNA, 25 bp, Homo sapien
cgctacagcatagtcaagtttggac

SEQ ID NO: 4153323 - DNA, 25 bp, Homo sapien
gctgtctgggacgtaaaatttcaaa

SEQ ID NO: 4153324 - DNA, 25 bp, Homo sapien
ttcgctaatgctctcagccagttgt

SEQ ID NO: 4153325 - DNA, 25 bp, Homo sapien
gctaatgctctcagccagttgttga

SEQ ID NO: 4153326 - DNA, 25 bp, Homo sapien
aatgctctcagccagttgttgaaaa

SEQ ID NO: 4153327 - DNA, 25 bp, Homo sapien
tctcagccagttgttgaaaaatagc

SEQ ID NO: 4153328 - DNA, 25 bp, Homo sapien
gtttatgaggtattccatctgtgcc

SEQ ID NO: 4153329 - DNA, 25 bp, Homo sapien
gctcatgtcataaagtatgctcaga

SEQ ID NO: 4153330 - DNA, 25 bp, Homo sapien
tcagctgctcatgtcataaagtatg

SEQ ID NO: 4153331 - DNA, 25 bp, Homo sapien
tccgtagtacaaggaatcatgttta

SEQ ID NO: 4153332 - DNA, 25 bp, Homo sapien
ttttctagcacaaagctatctctca

SEQ ID NO: 4153333 - DNA, 25 bp, Homo sapien
gcacaaagctatctctcaaggccat

SEQ ID NO: 4153334 - DNA, 25 bp, Homo sapien
ccaaattttctagcacaaagctatc

SEQ ID NO: 4153335 - DNA, 25 bp, Homo sapien
gactctctggatcctacagtccttc

SEQ ID NO: 4153336 - DNA, 25 bp, Homo sapien
cctcatggtgagtgaagctttctat

SEQ ID NO: 4153337 - DNA, 25 bp, Homo sapien
ctttggcatttgtaacgctggacct

SEQ ID NO: 4153338 - DNA, 25 bp, Homo sapien
gtcattcgtaactcaggttctgtag

SEQ ID NO: 4153339 - DNA, 25 bp, Homo sapien
cttcctgtcattcgtaactcaggtt

SEQ ID NO: 4153340 - DNA, 25 bp, Homo sapien
tacacatttaggataccaggaacac

SEQ ID NO: 4153341 - DNA, 25 bp, Homo sapien
catggttaggaattgtgccaggctc

SEQ ID NO: 4153342 - DNA, 25 bp, Homo sapien
gatcagccatattgtagcaactgcc

SEQ ID NO: 4153343 - DNA, 25 bp, Homo sapien
tattcacctcagaacatcagctagt

SEQ ID NO: 4153344 - DNA, 25 bp, Homo sapien
ggcatctgcagtgctacttcctgag

SEQ ID NO: 4153345 - DNA, 25 bp, Homo sapien
tacttcctgagtagtcagtatgcat

SEQ ID NO: 4153346 - DNA, 25 bp, Homo sapien
gcagtgctacttcctgagtagtcag

SEQ ID NO: 4153347 - DNA, 25 bp, Homo sapien
tctgcagtgctacttcctgagtagt

SEQ ID NO: 4153348 - DNA, 25 bp, Homo sapien
cagaggattatgtcctgaaagcgta

SEQ ID NO: 4153349 - DNA, 25 bp, Homo sapien
agcgtaagtaactctttgaatcaat

SEQ ID NO: 4153350 - DNA, 25 bp, Homo sapien
gcttgtgcttcacatccagtagaga

SEQ ID NO: 4153351 - DNA, 25 bp, Homo sapien
tagatgcagcaaccgaagcttgtgc

SEQ ID NO: 4153352 - DNA, 25 bp, Homo sapien
gattgaactagctctcttgactcag

SEQ ID NO: 4153353 - DNA, 25 bp, Homo sapien
gccaggatcgcctgctccacaacac

SEQ ID NO: 4153354 - DNA, 25 bp, Homo sapien
gggaacgcaaagcaggcgattgaac

SEQ ID NO: 4153355 - DNA, 25 bp, Homo sapien
agctctcttgactcagagatgccag

SEQ ID NO: 4153356 - DNA, 25 bp, Homo sapien
ttcttgtcatcatttgcagaagctt

SEQ ID NO: 4153357 - DNA, 25 bp, Homo sapien
tttactcgcattaaagctcagctgc

SEQ ID NO: 4153358 - DNA, 25 bp, Homo sapien
attttactcgcattaaagctcagct

SEQ ID NO: 4153359 - DNA, 25 bp, Homo sapien
ttttactcgcattaaagctcagctg

SEQ ID NO: 4153360 - DNA, 25 bp, Homo sapien
tgcttcaggcacaaacagatttgaa

SEQ ID NO: 4153361 - DNA, 25 bp, Homo sapien
atcaaaagtgcttcaggcacaaaca

SEQ ID NO: 4153362 - DNA, 25 bp, Homo sapien
agtgcttcaggcacaaacagatttg

SEQ ID NO: 4153363 - DNA, 25 bp, Homo sapien
aaaagtgcttcaggcacaaacagat

SEQ ID NO: 4153364 - DNA, 25 bp, Homo sapien
ctgtctaacttaagcctccgttctt

SEQ ID NO: 4153365 - DNA, 25 bp, Homo sapien
tatgctgactgtctaacttaagcct

SEQ ID NO: 4153366 - DNA, 25 bp, Homo sapien
aatgtatgctgactgtctaacttaa

SEQ ID NO: 4153367 - DNA, 25 bp, Homo sapien
gctgactgtctaacttaagcctccg

SEQ ID NO: 4153368 - DNA, 25 bp, Homo sapien
tctttcagtagattatgaattccca

SEQ ID NO: 4153369 - DNA, 25 bp, Homo sapien
tcattgtgtagttctttcagtagat

SEQ ID NO: 4153370 - DNA, 25 bp, Homo sapien
ctttcagtagattatgaattcccag

SEQ ID NO: 4153371 - DNA, 25 bp, Homo sapien
ttcattgtgtagttctttcagtaga

SEQ ID NO: 4153372 - DNA, 25 bp, Homo sapien
ttcctgccaaaaccaggtaccatgg

SEQ ID NO: 4153373 - DNA, 25 bp, Homo sapien
tcctgccaaaaccaggtaccatggg

SEQ ID NO: 4153374 - DNA, 25 bp, Homo sapien
actggtcctggactagtatcccaga

SEQ ID NO: 4153375 - DNA, 25 bp, Homo sapien
ttttccttgaaagcatggctcaccc

SEQ ID NO: 4153376 - DNA, 25 bp, Homo sapien
catgccacttaagatagtttcatca

SEQ ID NO: 4153377 - DNA, 25 bp, Homo sapien
tttacaaaatcgtagcatgccactt

SEQ ID NO: 4153378 - DNA, 25 bp, Homo sapien
agaacactactgttactcctgaaga

SEQ ID NO: 4153379 - DNA, 25 bp, Homo sapien
attttcttactccttgatgtaagag

SEQ ID NO: 4153380 - DNA, 25 bp, Homo sapien
acactactgttactcctgaagagac

SEQ ID NO: 4153381 - DNA, 25 bp, Homo sapien
tcttactccttgatgtaagagaaca

SEQ ID NO: 4153382 - DNA, 25 bp, Homo sapien
agtacttcctgcccgccgttcaaat

SEQ ID NO: 4153383 - DNA, 25 bp, Homo sapien
gagccccacgttgtgcaccacaaat

SEQ ID NO: 4153384 - DNA, 25 bp, Homo sapien
aggaaacagagactttcactaggcc

SEQ ID NO: 4153385 - DNA, 25 bp, Homo sapien
ggccagactccctactcgagtactt

SEQ ID NO: 4153386 - DNA, 25 bp, Homo sapien
aagccatgccacaggagttacaagc

SEQ ID NO: 4153387 - DNA, 25 bp, Homo sapien
gaagccatgccacaggagttacaag

SEQ ID NO: 4153388 - DNA, 25 bp, Homo sapien
ttcccaggatttgtcagcattatct

SEQ ID NO: 4153389 - DNA, 25 bp, Homo sapien
tacagcctctagatatggaaaatgc

SEQ ID NO: 4153390 - DNA, 25 bp, Homo sapien
ttcttttgacccagatacagcctct

SEQ ID NO: 4153391 - DNA, 25 bp, Homo sapien
gctgcacgatgagagagaagctgct

SEQ ID NO: 4153392 - DNA, 25 bp, Homo sapien
gggagatcacagtctacagactcat

SEQ ID NO: 4153393 - DNA, 25 bp, Homo sapien
gtgctttaccaacactacaaccata

SEQ ID NO: 4153394 - DNA, 25 bp, Homo sapien
aattcctttattttcggcatattag

SEQ ID NO: 4153395 - DNA, 25 bp, Homo sapien
gaacacaattccaagtactgtaatt

SEQ ID NO: 4153396 - DNA, 25 bp, Homo sapien
gtcttatcttgcaaagctgactcag

SEQ ID NO: 4153397 - DNA, 25 bp, Homo sapien
gaatatcttccacttgaccttccag

SEQ ID NO: 4153398 - DNA, 25 bp, Homo sapien
tgctctgtgccctaagaagatgact

SEQ ID NO: 4153399 - DNA, 25 bp, Homo sapien
cagtgagctcccacatattctggct

SEQ ID NO: 4153400 - DNA, 25 bp, Homo sapien
ttgtggtagctggactttggatgat

SEQ ID NO: 4153401 - DNA, 25 bp, Homo sapien
gattcaatccagacatattgtggta

SEQ ID NO: 4153402 - DNA, 25 bp, Homo sapien
gaatccttaagattcaatccagaca

SEQ ID NO: 4153403 - DNA, 25 bp, Homo sapien
tattgtggtagctggactttggatg

SEQ ID NO: 4153404 - DNA, 25 bp, Homo sapien
tggtccaagtttgcctcactgggaa

SEQ ID NO: 4153405 - DNA, 25 bp, Homo sapien
ccttctgtataagcctgcagggcat

SEQ ID NO: 4153406 - DNA, 25 bp, Homo sapien
caagcatattgttagtccgtagccc

SEQ ID NO: 4153407 - DNA, 25 bp, Homo sapien
ggattgcagctgatgtgtaacctct

SEQ ID NO: 4153408 - DNA, 25 bp, Homo sapien
cgaccacgaaaagtcttttgcttgg

SEQ ID NO: 4153409 - DNA, 25 bp, Homo sapien
taccctcacgtctgcagttttagtg

SEQ ID NO: 4153410 - DNA, 25 bp, Homo sapien
tagaagcgggcagtgataaccttgt

SEQ ID NO: 4153411 - DNA, 25 bp, Homo sapien
tttctctattgcaaagctctctaac

SEQ ID NO: 4153412 - DNA, 25 bp, Homo sapien
atttgagcttcacagaccataaggg

SEQ ID NO: 4153413 - DNA, 25 bp, Homo sapien
cacagaccataaggggtgagcacgg

SEQ ID NO: 4153414 - DNA, 25 bp, Homo sapien
aagcctgaatttgagcttcacagac

SEQ ID NO: 4153415 - DNA, 25 bp, Homo sapien
tgaaacccatgtggacatgaaggtg

SEQ ID NO: 4153416 - DNA, 25 bp, Homo sapien
atgtcatgtgttaacttgagaaact

SEQ ID NO: 4153417 - DNA, 25 bp, Homo sapien
ttatgtcatgtgttaacttgagaaa

SEQ ID NO: 4153418 - DNA, 25 bp, Homo sapien
attatgtcatgtgttaacttgagaa

SEQ ID NO: 4153419 - DNA, 25 bp, Homo sapien
tatgtcatgtgttaacttgagaaac

SEQ ID NO: 4153420 - DNA, 25 bp, Homo sapien
tctattgaagctgtaacacactctg

SEQ ID NO: 4153421 - DNA, 25 bp, Homo sapien
gagcttgtttagtctattgaagctg

SEQ ID NO: 4153422 - DNA, 25 bp, Homo sapien
gcggccctggtttcactccaaaata

SEQ ID NO: 4153423 - DNA, 25 bp, Homo sapien
tgtttagctcataaggcggccctgg

SEQ ID NO: 4153424 - DNA, 25 bp, Homo sapien
attttctcaggacatgtgaacatag

SEQ ID NO: 4153425 - DNA, 25 bp, Homo sapien
tgtgaacatagagataatgtgagca

SEQ ID NO: 4153426 - DNA, 25 bp, Homo sapien
tttctcaggacatgtgaacatagag

SEQ ID NO: 4153427 - DNA, 25 bp, Homo sapien
tagagataatgtgagcagaggacat

SEQ ID NO: 4153428 - DNA, 25 bp, Homo sapien
gccagaatatatgagatcccgtgac

SEQ ID NO: 4153429 - DNA, 25 bp, Homo sapien
gagtggcttattatgacaatgacag

SEQ ID NO: 4153430 - DNA, 25 bp, Homo sapien
tccatatgaccaagagtggcttatt

SEQ ID NO: 4153431 - DNA, 25 bp, Homo sapien
atgacagccagaatatatgagatcc

SEQ ID NO: 4153432 - DNA, 25 bp, Homo sapien
caggaatagcttctaagagagtacc

SEQ ID NO: 4153433 - DNA, 25 bp, Homo sapien
cagaattgcactgagagagcttcag

SEQ ID NO: 4153434 - DNA, 25 bp, Homo sapien
ggagattagtacagaattgcactga

SEQ ID NO: 4153435 - DNA, 25 bp, Homo sapien
tattctttttcgctagcacagagga

SEQ ID NO: 4153436 - DNA, 25 bp, Homo sapien
ttctttttcgctagcacagaggaga

SEQ ID NO: 4153437 - DNA, 25 bp, Homo sapien
agcctcctgtcacttaattcccagg

SEQ ID NO: 4153438 - DNA, 25 bp, Homo sapien
ttcatcaagcagatttccacttatc

SEQ ID NO: 4153439 - DNA, 25 bp, Homo sapien
ttatcccatcagtttcagtaaggca

SEQ ID NO: 4153440 - DNA, 25 bp, Homo sapien
taaggcataagacatccccacaaac

SEQ ID NO: 4153441 - DNA, 25 bp, Homo sapien
ggtattgagttaatttgggcctcag

SEQ ID NO: 4153442 - DNA, 25 bp, Homo sapien
tgttggtattgagttaatttgggcc

SEQ ID NO: 4153443 - DNA, 25 bp, Homo sapien
tcttatagtgtccttatgttgtgtt

SEQ ID NO: 4153444 - DNA, 25 bp, Homo sapien
cttatgttgtgttggtattgagtta

SEQ ID NO: 4153445 - DNA, 25 bp, Homo sapien
tttttaaacctctagcgagatgacc

SEQ ID NO: 4153446 - DNA, 25 bp, Homo sapien
taatggtaaactaaccttgcattcc

SEQ ID NO: 4153447 - DNA, 25 bp, Homo sapien
tgagaacatttgatttcttccccag

SEQ ID NO: 4153448 - DNA, 25 bp, Homo sapien
taaacccttcttagttgcaatgtag

SEQ ID NO: 4153449 - DNA, 25 bp, Homo sapien
cgaacgatgatcacagacgtgacct

SEQ ID NO: 4153450 - DNA, 25 bp, Homo sapien
cagaagaagcctccttcagccagat

SEQ ID NO: 4153451 - DNA, 25 bp, Homo sapien
tgcccaaatgttgcttgccatcagt

SEQ ID NO: 4153452 - DNA, 25 bp, Homo sapien
tttggtacttggtctcgaacgatga

SEQ ID NO: 4153453 - DNA, 25 bp, Homo sapien
ttaaaacccctgaagatgcatgcct

SEQ ID NO: 4153454 - DNA, 25 bp, Homo sapien
aagtttgatttaaggcctagtctag

SEQ ID NO: 4153455 - DNA, 25 bp, Homo sapien
tattttcatcacagcatcaatgtag

SEQ ID NO: 4153456 - DNA, 25 bp, Homo sapien
cctagtctagatgacataatgttac

SEQ ID NO: 4153457 - DNA, 25 bp, Homo sapien
gtggttcttgcaacacttgtaggcc

SEQ ID NO: 4153458 - DNA, 25 bp, Homo sapien
cccaagggctctcagtggttcttgc

SEQ ID NO: 4153459 - DNA, 25 bp, Homo sapien
gttcttgcaacacttgtaggcctgc

SEQ ID NO: 4153460 - DNA, 25 bp, Homo sapien
caagggctctcagtggttcttgcaa

SEQ ID NO: 4153461 - DNA, 25 bp, Homo sapien
ctttagcagctgtttcatgtaggtg

SEQ ID NO: 4153462 - DNA, 25 bp, Homo sapien
tgtggaaagctttagcattagtact

SEQ ID NO: 4153463 - DNA, 25 bp, Homo sapien
gggttgataaaacgtgtcagcacaa

SEQ ID NO: 4153464 - DNA, 25 bp, Homo sapien
gcattagtacttttagcagcaacag

SEQ ID NO: 4153465 - DNA, 25 bp, Homo sapien
cctctgtaaacgtgggaaagtgcct

SEQ ID NO: 4153466 - DNA, 25 bp, Homo sapien
gactccactatacatccagttgcag

SEQ ID NO: 4153467 - DNA, 25 bp, Homo sapien
gtaaacgtgggaaagtgcctcctgc

SEQ ID NO: 4153468 - DNA, 25 bp, Homo sapien
caggccttcgaccagctgtcattct

SEQ ID NO: 4153469 - DNA, 25 bp, Homo sapien
ctgtggatcgcttctgagagcacat

SEQ ID NO: 4153470 - DNA, 25 bp, Homo sapien
actgtggatcgcttctgagagcaca

SEQ ID NO: 4153471 - DNA, 25 bp, Homo sapien
cactgtggatcgcttctgagagcac

SEQ ID NO: 4153472 - DNA, 25 bp, Homo sapien
gaatcccgtaagaacctggctctgg

SEQ ID NO: 4153473 - DNA, 25 bp, Homo sapien
tgagacggacattttcatgctcatc

SEQ ID NO: 4153474 - DNA, 25 bp, Homo sapien
cagatataaacttctctgataggac

SEQ ID NO: 4153475 - DNA, 25 bp, Homo sapien
gccatttgtgggaataaccacagat

SEQ ID NO: 4153476 - DNA, 25 bp, Homo sapien
tgaagtcagtttgagtcgttctcat

SEQ ID NO: 4153477 - DNA, 25 bp, Homo sapien
caagactattgactctgccatgatt

SEQ ID NO: 4153478 - DNA, 25 bp, Homo sapien
ttttctcctgaaaacggtgcttatg

SEQ ID NO: 4153479 - DNA, 25 bp, Homo sapien
gaaaacggtgcttatgaaattcaaa

SEQ ID NO: 4153480 - DNA, 25 bp, Homo sapien
gatatttgacagttggttcttaaca

SEQ ID NO: 4153481 - DNA, 25 bp, Homo sapien
gtttttcaggcttttgctgctcatc

SEQ ID NO: 4153482 - DNA, 25 bp, Homo sapien
tctgcattctttacagctctgtagt

SEQ ID NO: 4153483 - DNA, 25 bp, Homo sapien
acatgggatctagagagagtacaca

SEQ ID NO: 4153484 - DNA, 25 bp, Homo sapien
catgggatctagagagagtacacag

SEQ ID NO: 4153485 - DNA, 25 bp, Homo sapien
gacatgggatctagagagagtacac

SEQ ID NO: 4153486 - DNA, 25 bp, Homo sapien
gagagagtacacagctggcatgcat

SEQ ID NO: 4153487 - DNA, 25 bp, Homo sapien
tataagacaattctaacatactctg

SEQ ID NO: 4153488 - DNA, 25 bp, Homo sapien
ttttgggctactgttttgccactga

SEQ ID NO: 4153489 - DNA, 25 bp, Homo sapien
catataggatcttcataggagtctc

SEQ ID NO: 4153490 - DNA, 25 bp, Homo sapien
actctgataacatataggatcttca

SEQ ID NO: 4153491 - DNA, 25 bp, Homo sapien
aattggagcatggagatctattgcc

SEQ ID NO: 4153492 - DNA, 25 bp, Homo sapien
taagattgctctgtgagtaaacaaa

SEQ ID NO: 4153493 - DNA, 25 bp, Homo sapien
tattgccgctaagattgctctgtga

SEQ ID NO: 4153494 - DNA, 25 bp, Homo sapien
caaaaggttggttctttgatccaga

SEQ ID NO: 4153495 - DNA, 25 bp, Homo sapien
taggtactgacacaaagtatgtacc

SEQ ID NO: 4153496 - DNA, 25 bp, Homo sapien
tgcagtaggtactgacacaaagtat

SEQ ID NO: 4153497 - DNA, 25 bp, Homo sapien
tactgacacaaagtatgtaccatcc

SEQ ID NO: 4153498 - DNA, 25 bp, Homo sapien
acaaagtatgtaccatccaggacag

SEQ ID NO: 4153499 - DNA, 25 bp, Homo sapien
ggcattatcaatagtggcccaggtc

SEQ ID NO: 4153500 - DNA, 25 bp, Homo sapien
cagaggcattatcaatagtggccca

SEQ ID NO: 4153501 - DNA, 25 bp, Homo sapien
cattatcaatagtggcccaggtctc

SEQ ID NO: 4153502 - DNA, 25 bp, Homo sapien
gaggcattatcaatagtggcccagg

SEQ ID NO: 4153503 - DNA, 25 bp, Homo sapien
tatctcactactcttctgtgtctct

SEQ ID NO: 4153504 - DNA, 25 bp, Homo sapien
ttctgtgtctctttcgaactccttt

SEQ ID NO: 4153505 - DNA, 25 bp, Homo sapien
ttatcctgatggcttacttcacttg

SEQ ID NO: 4153506 - DNA, 25 bp, Homo sapien
ttctccaatgttatcctgatggctt

SEQ ID NO: 4153507 - DNA, 25 bp, Homo sapien
atccaatcagtcacaaccattgcca

SEQ ID NO: 4153508 - DNA, 25 bp, Homo sapien
tctgatgaatctctcccccttactt

SEQ ID NO: 4153509 - DNA, 25 bp, Homo sapien
aaccattgccaatttaatcttgaaa

SEQ ID NO: 4153510 - DNA, 25 bp, Homo sapien
tttctctgatgaatctctccccctt

SEQ ID NO: 4153511 - DNA, 25 bp, Homo sapien
ctgtttgctcttttattttctgact

SEQ ID NO: 4153512 - DNA, 25 bp, Homo sapien
gtttgctcttttattttctgactca

SEQ ID NO: 4153513 - DNA, 25 bp, Homo sapien
gctcttttattttctgactcattcc

SEQ ID NO: 4153514 - DNA, 25 bp, Homo sapien
tgctcttttattttctgactcattc

SEQ ID NO: 4153515 - DNA, 25 bp, Homo sapien
aataatgatacaatagaagcagaga

SEQ ID NO: 4153516 - DNA, 25 bp, Homo sapien
tgcttatacaaacaaacagatgttc

SEQ ID NO: 4153517 - DNA, 25 bp, Homo sapien
tgtacctgtttggtgctgatacccc

SEQ ID NO: 4153518 - DNA, 25 bp, Homo sapien
tagttcttgagtctgagcgctgggc

SEQ ID NO: 4153519 - DNA, 25 bp, Homo sapien
acttttctagtggccactcagaggt

SEQ ID NO: 4153520 - DNA, 25 bp, Homo sapien
gggcactgtgcttactgccaacttt

SEQ ID NO: 4153521 - DNA, 25 bp, Homo sapien
caacttttctagtggccactcagag

SEQ ID NO: 4153522 - DNA, 25 bp, Homo sapien
atgggcactgtgcttactgccaact

SEQ ID NO: 4153523 - DNA, 25 bp, Homo sapien
cccagtggaattcatctgtgtcaaa

SEQ ID NO: 4153524 - DNA, 25 bp, Homo sapien
taactcaaaggttcaagttcaaaga

SEQ ID NO: 4153525 - DNA, 25 bp, Homo sapien
agactcagataaggctagtcccttc

SEQ ID NO: 4153526 - DNA, 25 bp, Homo sapien
tcaagttcaaagactcagataaggc

SEQ ID NO: 4153527 - DNA, 25 bp, Homo sapien
aaaggttcaagttcaaagactcaga

SEQ ID NO: 4153528 - DNA, 25 bp, Homo sapien
tgaaatcaagaggtagtagggccat

SEQ ID NO: 4153529 - DNA, 25 bp, Homo sapien
caagaggtagtagggccatgttgtc

SEQ ID NO: 4153530 - DNA, 25 bp, Homo sapien
attctgaaatcaagaggtagtaggg

SEQ ID NO: 4153531 - DNA, 25 bp, Homo sapien
tttcctagcttccaagggctccctg

SEQ ID NO: 4153532 - DNA, 25 bp, Homo sapien
gcataagatagatattcttattcct

SEQ ID NO: 4153533 - DNA, 25 bp, Homo sapien
gatagatattcttattccttaatct

SEQ ID NO: 4153534 - DNA, 25 bp, Homo sapien
taggcataagatagatattcttatt

SEQ ID NO: 4153535 - DNA, 25 bp, Homo sapien
ctccctctgaagttggaataggcat

SEQ ID NO: 4153536 - DNA, 25 bp, Homo sapien
cacatgctcttgacagttcatcttc

SEQ ID NO: 4153537 - DNA, 25 bp, Homo sapien
taagatggaatctaaaatatgctct

SEQ ID NO: 4153538 - DNA, 25 bp, Homo sapien
ttctcatgaaaagactcacagctgt

SEQ ID NO: 4153539 - DNA, 25 bp, Homo sapien
tcttcattatagactaactgccttc

SEQ ID NO: 4153540 - DNA, 25 bp, Homo sapien
gcagtacatttgatccgaaacatct

SEQ ID NO: 4153541 - DNA, 25 bp, Homo sapien
attcccataagcagtacatttgatc

SEQ ID NO: 4153542 - DNA, 25 bp, Homo sapien
ccataagcagtacatttgatccgaa

SEQ ID NO: 4153543 - DNA, 25 bp, Homo sapien
catttgatccgaaacatctttcctt

SEQ ID NO: 4153544 - DNA, 25 bp, Homo sapien
cattcaggctggtacaggcagaaca

SEQ ID NO: 4153545 - DNA, 25 bp, Homo sapien
tacagtaggtcagacatgagcacag

SEQ ID NO: 4153546 - DNA, 25 bp, Homo sapien
ccacatgctggtaggtcgctgtaca

SEQ ID NO: 4153547 - DNA, 25 bp, Homo sapien
ggtatacgacctaggaacattcagg

SEQ ID NO: 4153548 - DNA, 25 bp, Homo sapien
caacaagctgttcctttttaataga

SEQ ID NO: 4153549 - DNA, 25 bp, Homo sapien
ggagattgaatctgtcataatactg

SEQ ID NO: 4153550 - DNA, 25 bp, Homo sapien
tttcttatcaacaagctgttccttt

SEQ ID NO: 4153551 - DNA, 25 bp, Homo sapien
taatactggactgctttcttatcaa

SEQ ID NO: 4153552 - DNA, 25 bp, Homo sapien
gctgagatatgtgtgttctgtctgg

SEQ ID NO: 4153553 - DNA, 25 bp, Homo sapien
ccaacagcctgatgcttgtacagtg

SEQ ID NO: 4153554 - DNA, 25 bp, Homo sapien
gccaacagcctgatgcttgtacagt

SEQ ID NO: 4153555 - DNA, 25 bp, Homo sapien
tctgtctggactgctgccccactga

SEQ ID NO: 4153556 - DNA, 25 bp, Homo sapien
gatttctgcgtatttggcatgctgg

SEQ ID NO: 4153557 - DNA, 25 bp, Homo sapien
tagttgaactcatactgaaaggctg

SEQ ID NO: 4153558 - DNA, 25 bp, Homo sapien
gccaagtttacgttctcagtcatca

SEQ ID NO: 4153559 - DNA, 25 bp, Homo sapien
gctcagtccagttgcgatttctgcg

SEQ ID NO: 4153560 - DNA, 25 bp, Homo sapien
gtctatgacatagtcatgtctctgg

SEQ ID NO: 4153561 - DNA, 25 bp, Homo sapien
tgacatagtcatgtctctggtgtaa

SEQ ID NO: 4153562 - DNA, 25 bp, Homo sapien
tagtcatgtctctggtgtaatttcc

SEQ ID NO: 4153563 - DNA, 25 bp, Homo sapien
catagtcatgtctctggtgtaattt

SEQ ID NO: 4153564 - DNA, 25 bp, Homo sapien
ctgagagttgagccagatttttgtg

SEQ ID NO: 4153565 - DNA, 25 bp, Homo sapien
tacacgcaatatttgagtctgagca

SEQ ID NO: 4153566 - DNA, 25 bp, Homo sapien
aaatatttgccaggccgaccgagtg

SEQ ID NO: 4153567 - DNA, 25 bp, Homo sapien
tcttgaagggtgatcaggataagct

SEQ ID NO: 4153568 - DNA, 25 bp, Homo sapien
ccgagtggcagtggcattacacgca

SEQ ID NO: 4153569 - DNA, 25 bp, Homo sapien
tgtaaccatgtaagtgtagctctgc

SEQ ID NO: 4153570 - DNA, 25 bp, Homo sapien
caaatatccctgagactcttctgga

SEQ ID NO: 4153571 - DNA, 25 bp, Homo sapien
aattcaggacgattgtttcagggcc

SEQ ID NO: 4153572 - DNA, 25 bp, Homo sapien
taatcctgagtacaaaactcttcca

SEQ ID NO: 4153573 - DNA, 25 bp, Homo sapien
tctcttcagccaatgtagttaggtt

SEQ ID NO: 4153574 - DNA, 25 bp, Homo sapien
caaactctactgtctttgtcagtga

SEQ ID NO: 4153575 - DNA, 25 bp, Homo sapien
tattttaaagttctgcacgtctgct

SEQ ID NO: 4153576 - DNA, 25 bp, Homo sapien
aagaaataaatcaagcctgctcctt

SEQ ID NO: 4153577 - DNA, 25 bp, Homo sapien
tttctcgtggttaataattcttcaa

SEQ ID NO: 4153578 - DNA, 25 bp, Homo sapien
ttcttcaaagttaaaccagcttgtc

SEQ ID NO: 4153579 - DNA, 25 bp, Homo sapien
ttttctcgtggttaataattcttca

SEQ ID NO: 4153580 - DNA, 25 bp, Homo sapien
tcaaagttaaaccagcttgtcttca

SEQ ID NO: 4153581 - DNA, 25 bp, Homo sapien
taacacacccagcagcattacgaac

SEQ ID NO: 4153582 - DNA, 25 bp, Homo sapien
caaactcaacctgaatgtaaatgtc

SEQ ID NO: 4153583 - DNA, 25 bp, Homo sapien
ccaactctcgaaagtatgattttga

SEQ ID NO: 4153584 - DNA, 25 bp, Homo sapien
gcttctgccactctaatctaacaca

SEQ ID NO: 4153585 - DNA, 25 bp, Homo sapien
cataactgccattattctgcacggc

SEQ ID NO: 4153586 - DNA, 25 bp, Homo sapien
tcacataactgccattattctgcac

SEQ ID NO: 4153587 - DNA, 25 bp, Homo sapien
tgccattattctgcacggctttggc

SEQ ID NO: 4153588 - DNA, 25 bp, Homo sapien
taactgccattattctgcacggctt

SEQ ID NO: 4153589 - DNA, 25 bp, Homo sapien
ttccagttttatgcaaggacctctc

SEQ ID NO: 4153590 - DNA, 25 bp, Homo sapien
tccagttttatgcaaggacctctct

SEQ ID NO: 4153591 - DNA, 25 bp, Homo sapien
tttccagttttatgcaaggacctct

SEQ ID NO: 4153592 - DNA, 25 bp, Homo sapien
cagaagtcacgaatgtggtatgatt

SEQ ID NO: 4153593 - DNA, 25 bp, Homo sapien
agaagtcacgaatgtggtatgattg

SEQ ID NO: 4153594 - DNA, 25 bp, Homo sapien
gaagtcacgaatgtggtatgattgt

SEQ ID NO: 4153595 - DNA, 25 bp, Homo sapien
tagtcagccaggtagcctttttact

SEQ ID NO: 4153596 - DNA, 25 bp, Homo sapien
cagccaggtagcctttttactcctg

SEQ ID NO: 4153597 - DNA, 25 bp, Homo sapien
ttggtagtcagccaggtagcctttt

SEQ ID NO: 4153598 - DNA, 25 bp, Homo sapien
ggtagtcagccaggtagccttttta

SEQ ID NO: 4153599 - DNA, 25 bp, Homo sapien
tcattctgagtctgagctcctatca

SEQ ID NO: 4153600 - DNA, 25 bp, Homo sapien
agtctgagctcctatcacagctgat

SEQ ID NO: 4153601 - DNA, 25 bp, Homo sapien
ttaatctcattctgagtctgagctc

SEQ ID NO: 4153602 - DNA, 25 bp, Homo sapien
tgagctcctatcacagctgatttca

SEQ ID NO: 4153603 - DNA, 25 bp, Homo sapien
tcttcagtgtttataacaccaatcc

SEQ ID NO: 4153604 - DNA, 25 bp, Homo sapien
gtgtttataacaccaatcctataac

SEQ ID NO: 4153605 - DNA, 25 bp, Homo sapien
ccggtttatcagtgcagtcattctc

SEQ ID NO: 4153606 - DNA, 25 bp, Homo sapien
tgttctttcccggtttatcagtgca

SEQ ID NO: 4153607 - DNA, 25 bp, Homo sapien
tcttaccaggttggctgcctttgcc

SEQ ID NO: 4153608 - DNA, 25 bp, Homo sapien
tggctcttaccaggttggctgcctt

SEQ ID NO: 4153609 - DNA, 25 bp, Homo sapien
taccaggttggctgcctttgcctag

SEQ ID NO: 4153610 - DNA, 25 bp, Homo sapien
gctcttaccaggttggctgcctttg

SEQ ID NO: 4153611 - DNA, 25 bp, Homo sapien
cagaagatgtctacagtcgcctgac

SEQ ID NO: 4153612 - DNA, 25 bp, Homo sapien
tagttttatcatggtaggcaaggca

SEQ ID NO: 4153613 - DNA, 25 bp, Homo sapien
caacacctgtgtttgggtagggagt

SEQ ID NO: 4153614 - DNA, 25 bp, Homo sapien
ccttctgggtagtgatgctgctgca

SEQ ID NO: 4153615 - DNA, 25 bp, Homo sapien
ttcaactggcgaatgtaggcaaagt

SEQ ID NO: 4153616 - DNA, 25 bp, Homo sapien
agctctttatgtcctctgcttctgt

SEQ ID NO: 4153617 - DNA, 25 bp, Homo sapien
gctctttatgtcctctgcttctgtt

SEQ ID NO: 4153618 - DNA, 25 bp, Homo sapien
tgatgaggtttggtgtcacatataa

SEQ ID NO: 4153619 - DNA, 25 bp, Homo sapien
attgatgaggtttggtgtcacatat

SEQ ID NO: 4153620 - DNA, 25 bp, Homo sapien
agctttggagctcaaggcttttccc

SEQ ID NO: 4153621 - DNA, 25 bp, Homo sapien
tatctggctccagggtgatactgac

SEQ ID NO: 4153622 - DNA, 25 bp, Homo sapien
gatactgacgaagtctggtaatgca

SEQ ID NO: 4153623 - DNA, 25 bp, Homo sapien
tggtaatgcagtaggctgctcaccc

SEQ ID NO: 4153624 - DNA, 25 bp, Homo sapien
aaccaggtggtagcctcatgttctg

SEQ ID NO: 4153625 - DNA, 25 bp, Homo sapien
tgtgaccgaatagccatgtatgcct

SEQ ID NO: 4153626 - DNA, 25 bp, Homo sapien
tactcagccataggaagtaacctgg

SEQ ID NO: 4153627 - DNA, 25 bp, Homo sapien
tgttctgggcccactagggctactc

SEQ ID NO: 4153628 - DNA, 25 bp, Homo sapien
aatatctatccatttgattggaata

SEQ ID NO: 4153629 - DNA, 25 bp, Homo sapien
ttatatggttgaccataagattcac

SEQ ID NO: 4153630 - DNA, 25 bp, Homo sapien
cttaagtattgtatcattgaaataa

SEQ ID NO: 4153631 - DNA, 25 bp, Homo sapien
taatgcacacatttgtccttgagct

SEQ ID NO: 4153632 - DNA, 25 bp, Homo sapien
atttctattctgatctgcgatcccg

SEQ ID NO: 4153633 - DNA, 25 bp, Homo sapien
tgcgatcccgtacatgctatctaca

SEQ ID NO: 4153634 - DNA, 25 bp, Homo sapien
catggctctagttgcagccacgagt

SEQ ID NO: 4153635 - DNA, 25 bp, Homo sapien
ttaacggcctgtgcgccacatggct

SEQ ID NO: 4153636 - DNA, 25 bp, Homo sapien
aaaggacagagtcatcactttagtt

SEQ ID NO: 4153637 - DNA, 25 bp, Homo sapien
ttcaaaggacagagtcatcacttta

SEQ ID NO: 4153638 - DNA, 25 bp, Homo sapien
tcatcactttagtttcaacaggcca

SEQ ID NO: 4153639 - DNA, 25 bp, Homo sapien
tcactttagtttcaacaggccacat

SEQ ID NO: 4153640 - DNA, 25 bp, Homo sapien
tgggcagtgcttagttaccctaggg

SEQ ID NO: 4153641 - DNA, 25 bp, Homo sapien
cctagggtcaaagctagaggttggc

SEQ ID NO: 4153642 - DNA, 25 bp, Homo sapien
cagtgcttagttaccctagggtcaa

SEQ ID NO: 4153643 - DNA, 25 bp, Homo sapien
agttaccctagggtcaaagctagag

SEQ ID NO: 4153644 - DNA, 25 bp, Homo sapien
ctggtgccctggtagttgcttttca

SEQ ID NO: 4153645 - DNA, 25 bp, Homo sapien
tggtgccctggtagttgcttttcag

SEQ ID NO: 4153646 - DNA, 25 bp, Homo sapien
tgctggtgccctggtagttgctttt

SEQ ID NO: 4153647 - DNA, 25 bp, Homo sapien
gctggtgccctggtagttgcttttc

SEQ ID NO: 4153648 - DNA, 25 bp, Homo sapien
tattatgtgaattgcctctccacac

SEQ ID NO: 4153649 - DNA, 25 bp, Homo sapien
ttacgaagtttcaagttcatattgc

SEQ ID NO: 4153650 - DNA, 25 bp, Homo sapien
gttcatattgctctattatgtgaat

SEQ ID NO: 4153651 - DNA, 25 bp, Homo sapien
tcatatcattggtctgcttcttgta

SEQ ID NO: 4153652 - DNA, 25 bp, Homo sapien
tgacatcaatactgtatagtggagg

SEQ ID NO: 4153653 - DNA, 25 bp, Homo sapien
tcaatactgtatagtggagggtcag

SEQ ID NO: 4153654 - DNA, 25 bp, Homo sapien
tcctttgggtgaccgcttccaaaga

SEQ ID NO: 4153655 - DNA, 25 bp, Homo sapien
gaccgcttccaaagatgacatcaat

SEQ ID NO: 4153656 - DNA, 25 bp, Homo sapien
tggtaagacagcagaattggcagtt

SEQ ID NO: 4153657 - DNA, 25 bp, Homo sapien
ttggtggctgccgatatagttgatg

SEQ ID NO: 4153658 - DNA, 25 bp, Homo sapien
gttgatgctaccttgctgtagggtc

SEQ ID NO: 4153659 - DNA, 25 bp, Homo sapien
gacagcagaattggcagtttatttc

SEQ ID NO: 4153660 - DNA, 25 bp, Homo sapien
ataattttgagagtggatgcttttc

SEQ ID NO: 4153661 - DNA, 25 bp, Homo sapien
gatgttataattttgagagtggatg

SEQ ID NO: 4153662 - DNA, 25 bp, Homo sapien
gttataattttgagagtggatgctt

SEQ ID NO: 4153663 - DNA, 25 bp, Homo sapien
tatgatgttataattttgagagtgg

SEQ ID NO: 4153664 - DNA, 25 bp, Homo sapien
cataagcatcgagccagtagaactc

SEQ ID NO: 4153665 - DNA, 25 bp, Homo sapien
gaactcttgtgacctattttctgct

SEQ ID NO: 4153666 - DNA, 25 bp, Homo sapien
gagccagtagaactcttgtgaccta

SEQ ID NO: 4153667 - DNA, 25 bp, Homo sapien
cctgtcaccataagcatcgagccag

SEQ ID NO: 4153668 - DNA, 25 bp, Homo sapien
gctgcttggcttctttgcaccgtag

SEQ ID NO: 4153669 - DNA, 25 bp, Homo sapien
ttggcttctttgcaccgtagccctc

SEQ ID NO: 4153670 - DNA, 25 bp, Homo sapien
tgcttggcttctttgcaccgtagcc

SEQ ID NO: 4153671 - DNA, 25 bp, Homo sapien
gtttggctcccctgctgcttggctt

SEQ ID NO: 4153672 - DNA, 25 bp, Homo sapien
aacaagctggtctttggcataagcc

SEQ ID NO: 4153673 - DNA, 25 bp, Homo sapien
ttttagcgggcttttcagagttaca

SEQ ID NO: 4153674 - DNA, 25 bp, Homo sapien
taggcatcctccaagaacaagctgg

SEQ ID NO: 4153675 - DNA, 25 bp, Homo sapien
tctctgaacaaaatggccctaggca

SEQ ID NO: 4153676 - DNA, 25 bp, Homo sapien
tccaagggaggtactgtttccaatg

SEQ ID NO: 4153677 - DNA, 25 bp, Homo sapien
tttgttagcttaatatccaagggag

SEQ ID NO: 4153678 - DNA, 25 bp, Homo sapien
gcccactaaactggctttgctggtg

SEQ ID NO: 4153679 - DNA, 25 bp, Homo sapien
tgcagcccactaaactggctttgct

SEQ ID NO: 4153680 - DNA, 25 bp, Homo sapien
tggagtcttgctctgttgcccaggc

SEQ ID NO: 4153681 - DNA, 25 bp, Homo sapien
tgtgtatgtgccacatttttttctt

SEQ ID NO: 4153682 - DNA, 25 bp, Homo sapien
atggagtcttgctctgttgcccagg

SEQ ID NO: 4153683 - DNA, 25 bp, Homo sapien
ggtgtgtatgtgccacatttttttc

SEQ ID NO: 4153684 - DNA, 25 bp, Homo sapien
tggtatcatctatttgggaggtata

SEQ ID NO: 4153685 - DNA, 25 bp, Homo sapien
ctgtggtatcatctatttgggaggt

SEQ ID NO: 4153686 - DNA, 25 bp, Homo sapien
ggtatcatctatttgggaggtatag

SEQ ID NO: 4153687 - DNA, 25 bp, Homo sapien
tgtggtatcatctatttgggaggta

SEQ ID NO: 4153688 - DNA, 25 bp, Homo sapien
cctcaggaaacattcatggcagaaa

SEQ ID NO: 4153689 - DNA, 25 bp, Homo sapien
caggaaacattcatggcagaaaggg

SEQ ID NO: 4153690 - DNA, 25 bp, Homo sapien
tcaggaaacattcatggcagaaagg

SEQ ID NO: 4153691 - DNA, 25 bp, Homo sapien
ggaaacattcatggcagaaagggaa

SEQ ID NO: 4153692 - DNA, 25 bp, Homo sapien
cattctcatctatgggcttgacaga

SEQ ID NO: 4153693 - DNA, 25 bp, Homo sapien
tctggagacagcctacattcctgac

SEQ ID NO: 4153694 - DNA, 25 bp, Homo sapien
cacagtgtccaccataagcagttca

SEQ ID NO: 4153695 - DNA, 25 bp, Homo sapien
gaagtggtccttattgtctggagac

SEQ ID NO: 4153696 - DNA, 25 bp, Homo sapien
acattccaggacttggttcagattc

SEQ ID NO: 4153697 - DNA, 25 bp, Homo sapien
tggttcagattcatggcttttaggc

SEQ ID NO: 4153698 - DNA, 25 bp, Homo sapien
tcacattccaggacttggttcagat

SEQ ID NO: 4153699 - DNA, 25 bp, Homo sapien
gttcagattcatggcttttaggcag

SEQ ID NO: 4153700 - DNA, 25 bp, Homo sapien
caggtaagagaatattgtaatcacc

SEQ ID NO: 4153701 - DNA, 25 bp, Homo sapien
tatagcatgtcatgtttatcaggta

SEQ ID NO: 4153702 - DNA, 25 bp, Homo sapien
tattgtaatcaccatattccagtga

SEQ ID NO: 4153703 - DNA, 25 bp, Homo sapien
cagtgaaatcacaccctgttcttca

SEQ ID NO: 4153704 - DNA, 25 bp, Homo sapien
aaaaggatgctgttagtggatttct

SEQ ID NO: 4153705 - DNA, 25 bp, Homo sapien
aaggatgctgttagtggatttcttc

SEQ ID NO: 4153706 - DNA, 25 bp, Homo sapien
acaagctgaatccactttgatgaaa

SEQ ID NO: 4153707 - DNA, 25 bp, Homo sapien
ggagcctggagctggttgataatat

SEQ ID NO: 4153708 - DNA, 25 bp, Homo sapien
tcttctgtaggttcactggactcat

SEQ ID NO: 4153709 - DNA, 25 bp, Homo sapien
gtgggctctgactccggccacaacc

SEQ ID NO: 4153710 - DNA, 25 bp, Homo sapien
tatatcgctgcctgtaaatactccg

SEQ ID NO: 4153711 - DNA, 25 bp, Homo sapien
tattgattagctagtaagtctctgg

SEQ ID NO: 4153712 - DNA, 25 bp, Homo sapien
cagcattaaagaggagataatctct

SEQ ID NO: 4153713 - DNA, 25 bp, Homo sapien
tgaggcctgcatgcaaatgtctgtc

SEQ ID NO: 4153714 - DNA, 25 bp, Homo sapien
gagttggcaccttttgctctgcaaa

SEQ ID NO: 4153715 - DNA, 25 bp, Homo sapien
tttggatgaaggtgtagtagcacag

SEQ ID NO: 4153716 - DNA, 25 bp, Homo sapien
cttgacaagtgcttttggatgaagg

SEQ ID NO: 4153717 - DNA, 25 bp, Homo sapien
gcatcaggcaacttccgcacagttt

SEQ ID NO: 4153718 - DNA, 25 bp, Homo sapien
tatgagaaaggttcttcctcagcag

SEQ ID NO: 4153719 - DNA, 25 bp, Homo sapien
tcacgattagaattataagaacacg

SEQ ID NO: 4153720 - DNA, 25 bp, Homo sapien
ggtcacttggtccatcaaagcatat

SEQ ID NO: 4153721 - DNA, 25 bp, Homo sapien
caaagcatatcctttatagtactcc

SEQ ID NO: 4153722 - DNA, 25 bp, Homo sapien
tcttggttcagcttaatagactctt

SEQ ID NO: 4153723 - DNA, 25 bp, Homo sapien
taatagaggactatgaaacacaact

SEQ ID NO: 4153724 - DNA, 25 bp, Homo sapien
cacaactgccacagaactttgctgt

SEQ ID NO: 4153725 - DNA, 25 bp, Homo sapien
tgtttgtccaagatactatgcactg

SEQ ID NO: 4153726 - DNA, 25 bp, Homo sapien
tacacaggattatgctaggcccaga

SEQ ID NO: 4153727 - DNA, 25 bp, Homo sapien
ggactgcctaatagctctctggaga

SEQ ID NO: 4153728 - DNA, 25 bp, Homo sapien
tgtgctgcacaaagaattcccagta

SEQ ID NO: 4153729 - DNA, 25 bp, Homo sapien
caaaatagccggctgccatcaagtc

SEQ ID NO: 4153730 - DNA, 25 bp, Homo sapien
cagtatcagttaagggtgctttccc

SEQ ID NO: 4153731 - DNA, 25 bp, Homo sapien
cattaaaggcaaagtaccaggtagc

SEQ ID NO: 4153732 - DNA, 25 bp, Homo sapien
cagctaattagagttcaccgaggag

SEQ ID NO: 4153733 - DNA, 25 bp, Homo sapien
ctttgagcagggaacatgagaggcc

SEQ ID NO: 4153734 - DNA, 25 bp, Homo sapien
taggcaatgagtttagagcaatctg

SEQ ID NO: 4153735 - DNA, 25 bp, Homo sapien
ttttaggcaatgagtttagagcaat

SEQ ID NO: 4153736 - DNA, 25 bp, Homo sapien
gcaatctgacaaatgctgctgactt

SEQ ID NO: 4153737 - DNA, 25 bp, Homo sapien
caatgagtttagagcaatctgacaa

SEQ ID NO: 4153738 - DNA, 25 bp, Homo sapien
tgcaatttcaaagtaggccccttaa

SEQ ID NO: 4153739 - DNA, 25 bp, Homo sapien
tacgttttaggatgcttttcatgca

SEQ ID NO: 4153740 - DNA, 25 bp, Homo sapien
tatcaagaaaatgtacattatctgt

SEQ ID NO: 4153741 - DNA, 25 bp, Homo sapien
ttaggatgcttttcatgcaatttca

SEQ ID NO: 4153742 - DNA, 25 bp, Homo sapien
ttcttgaggacaatacaatgtcact

SEQ ID NO: 4153743 - DNA, 25 bp, Homo sapien
caaaatcagaggttttatccgtcat

SEQ ID NO: 4153744 - DNA, 25 bp, Homo sapien
ttgcaaaatcagaggttttatccgt

SEQ ID NO: 4153745 - DNA, 25 bp, Homo sapien
tcttgaatgttgcaaaatcagaggt

SEQ ID NO: 4153746 - DNA, 25 bp, Homo sapien
gcaaaatcagaggttttatccgtca

SEQ ID NO: 4153747 - DNA, 25 bp, Homo sapien
agatatactgcccttctcccgcctc

SEQ ID NO: 4153748 - DNA, 25 bp, Homo sapien
tagatatactgcccttctcccgcct

SEQ ID NO: 4153749 - DNA, 25 bp, Homo sapien
ttagatatactgcccttctcccgcc

SEQ ID NO: 4153750 - DNA, 25 bp, Homo sapien
acataagcttccgtgttaggcaatg

SEQ ID NO: 4153751 - DNA, 25 bp, Homo sapien
ataagcttccgtgttaggcaatggg

SEQ ID NO: 4153752 - DNA, 25 bp, Homo sapien
gcaaataatcgctcctttcgacagg

SEQ ID NO: 4153753 - DNA, 25 bp, Homo sapien
gggtagttgctgcaaataatcgctc

SEQ ID NO: 4153754 - DNA, 25 bp, Homo sapien
tttttataaaacgttcagcaatcca

SEQ ID NO: 4153755 - DNA, 25 bp, Homo sapien
tcagcaatccaagtttgaagtactt

SEQ ID NO: 4153756 - DNA, 25 bp, Homo sapien
tttataaaacgttcagcaatccaag

SEQ ID NO: 4153757 - DNA, 25 bp, Homo sapien
cagcaatccaagtttgaagtacttt

SEQ ID NO: 4153758 - DNA, 25 bp, Homo sapien
caagtttcaggaaggctgaaggctc

SEQ ID NO: 4153759 - DNA, 25 bp, Homo sapien
gaaggctgaaggctcctttaaaagc

SEQ ID NO: 4153760 - DNA, 25 bp, Homo sapien
tgaaggctcctttaaaagccatatt

SEQ ID NO: 4153761 - DNA, 25 bp, Homo sapien
gctgaaggctcctttaaaagccata

SEQ ID NO: 4153762 - DNA, 25 bp, Homo sapien
gaaaaaatattccatctatgttgaa

SEQ ID NO: 4153763 - DNA, 25 bp, Homo sapien
tgttgaaaacactaagattttcagc

SEQ ID NO: 4153764 - DNA, 25 bp, Homo sapien
gagaaaaaatattccatctatgttg

SEQ ID NO: 4153765 - DNA, 25 bp, Homo sapien
tgtaattaggcagctgagaaaaaat

SEQ ID NO: 4153766 - DNA, 25 bp, Homo sapien
caggctttatcgatgatttcttcca

SEQ ID NO: 4153767 - DNA, 25 bp, Homo sapien
aggctttatcgatgatttcttccat

SEQ ID NO: 4153768 - DNA, 25 bp, Homo sapien
caaactgagaataattagaatcata

SEQ ID NO: 4153769 - DNA, 25 bp, Homo sapien
aactgagaataattagaatcataga

SEQ ID NO: 4153770 - DNA, 25 bp, Homo sapien
atcaaactgagaataattagaatca

SEQ ID NO: 4153771 - DNA, 25 bp, Homo sapien
ctgagaataattagaatcatagagc

SEQ ID NO: 4153772 - DNA, 25 bp, Homo sapien
ctgaagacattggattctattttat

SEQ ID NO: 4153773 - DNA, 25 bp, Homo sapien
actgaagacattggattctatttta

SEQ ID NO: 4153774 - DNA, 25 bp, Homo sapien
tgaagacattggattctattttata

SEQ ID NO: 4153775 - DNA, 25 bp, Homo sapien
tatgtgcagcatcgtcttgggagac

SEQ ID NO: 4153776 - DNA, 25 bp, Homo sapien
cacggcaaattctgaggaggtccca

SEQ ID NO: 4153777 - DNA, 25 bp, Homo sapien
gacaggtcccgctctgaaccaaaaa

SEQ ID NO: 4153778 - DNA, 25 bp, Homo sapien
aaactggccgtttgactgaatcagg

SEQ ID NO: 4153779 - DNA, 25 bp, Homo sapien
tttgccaaagttgacgtagttgaga

SEQ ID NO: 4153780 - DNA, 25 bp, Homo sapien
tgtccacgtcaatgcttcttatttc

SEQ ID NO: 4153781 - DNA, 25 bp, Homo sapien
gtgtccacgtcaatgcttcttattt

SEQ ID NO: 4153782 - DNA, 25 bp, Homo sapien
ttgacgtagttgagattcatttctg

SEQ ID NO: 4153783 - DNA, 25 bp, Homo sapien
ttcatcagtgtagcatttttatctt

SEQ ID NO: 4153784 - DNA, 25 bp, Homo sapien
gatcttttacataagaaatggtttc

SEQ ID NO: 4153785 - DNA, 25 bp, Homo sapien
aggtattgatcttttacataagaaa

SEQ ID NO: 4153786 - DNA, 25 bp, Homo sapien
tttcatcagtgtagcatttttatct

SEQ ID NO: 4153787 - DNA, 25 bp, Homo sapien
gagaaattagacttgtaggagccat

SEQ ID NO: 4153788 - DNA, 25 bp, Homo sapien
gtggcaatcttgagataggttacaa

SEQ ID NO: 4153789 - DNA, 25 bp, Homo sapien
caatcttgagataggttacaagagc

SEQ ID NO: 4153790 - DNA, 25 bp, Homo sapien
gacttagagaaattagacttgtagg

SEQ ID NO: 4153791 - DNA, 25 bp, Homo sapien
gcacgctgcaggagctgtaatagaa

SEQ ID NO: 4153792 - DNA, 25 bp, Homo sapien
ctgcaggagctgtaatagaagtgac

SEQ ID NO: 4153793 - DNA, 25 bp, Homo sapien
ggagctgtaatagaagtgactgtct

SEQ ID NO: 4153794 - DNA, 25 bp, Homo sapien
taatagaagtgactgtctaattgtc

SEQ ID NO: 4153795 - DNA, 25 bp, Homo sapien
ttttatgcctccatagagaaagcat

SEQ ID NO: 4153796 - DNA, 25 bp, Homo sapien
attttatgcctccatagagaaagca

SEQ ID NO: 4153797 - DNA, 25 bp, Homo sapien
cctcttaggcagatgtgatcttcat

SEQ ID NO: 4153798 - DNA, 25 bp, Homo sapien
cacctcttaggcagatgtgatcttc

SEQ ID NO: 4153799 - DNA, 25 bp, Homo sapien
gacttgctaaagaagataatctgct

SEQ ID NO: 4153800 - DNA, 25 bp, Homo sapien
ggacttgctaaagaagataatctgc

SEQ ID NO: 4153801 - DNA, 25 bp, Homo sapien
aatctgctagcttttcctggagtag

SEQ ID NO: 4153802 - DNA, 25 bp, Homo sapien
aagaagataatctgctagcttttcc

SEQ ID NO: 4153803 - DNA, 25 bp, Homo sapien
cttcattatcacctctactaggatg

SEQ ID NO: 4153804 - DNA, 25 bp, Homo sapien
ttttggtcatcagtaaaatttagca

SEQ ID NO: 4153805 - DNA, 25 bp, Homo sapien
caaggaattcttcttaagtctccaa

SEQ ID NO: 4153806 - DNA, 25 bp, Homo sapien
aaatttagcatagcttttggaccag

SEQ ID NO: 4153807 - DNA, 25 bp, Homo sapien
gtccatttgaatgactagtcctgaa

SEQ ID NO: 4153808 - DNA, 25 bp, Homo sapien
tgtgctttcactgtgagtgtcatac

SEQ ID NO: 4153809 - DNA, 25 bp, Homo sapien
tgactcttgcatacaaatttagctg

SEQ ID NO: 4153810 - DNA, 25 bp, Homo sapien
gaactgttggcttgatgttttgtgc

SEQ ID NO: 4153811 - DNA, 25 bp, Homo sapien
aaaagaagacgtgtgatagagggaa

SEQ ID NO: 4153812 - DNA, 25 bp, Homo sapien
tactcgaaaagaagacgtgtgatag

SEQ ID NO: 4153813 - DNA, 25 bp, Homo sapien
cctttactcgaaaagaagacgtgtg

SEQ ID NO: 4153814 - DNA, 25 bp, Homo sapien
cttccacgctcacatttatgaaaaa

SEQ ID NO: 4153815 - DNA, 25 bp, Homo sapien
accaatataatgtgtcgttaggaca

SEQ ID NO: 4153816 - DNA, 25 bp, Homo sapien
taatgtgtcgttaggacaattgttc

SEQ ID NO: 4153817 - DNA, 25 bp, Homo sapien
agtataagaccaatataatgtgtcg

SEQ ID NO: 4153818 - DNA, 25 bp, Homo sapien
tctgaaactctttcagtataagacc

SEQ ID NO: 4153819 - DNA, 25 bp, Homo sapien
ttattatatacaccatgggatactg

SEQ ID NO: 4153820 - DNA, 25 bp, Homo sapien
ggaaaattggaagttattatataca

SEQ ID NO: 4153821 - DNA, 25 bp, Homo sapien
tattatatacaccatgggatactgt

SEQ ID NO: 4153822 - DNA, 25 bp, Homo sapien
tggaagttattatatacaccatggg

SEQ ID NO: 4153823 - DNA, 25 bp, Homo sapien
ctgttgctccttcagtggactatag

SEQ ID NO: 4153824 - DNA, 25 bp, Homo sapien
tgttgctccttcagtggactatagg

SEQ ID NO: 4153825 - DNA, 25 bp, Homo sapien
tacatttgtgttcgatgagtgagta

SEQ ID NO: 4153826 - DNA, 25 bp, Homo sapien
acatttgtgttcgatgagtgagtaa

SEQ ID NO: 4153827 - DNA, 25 bp, Homo sapien
ctacatttgtgttcgatgagtgagt

SEQ ID NO: 4153828 - DNA, 25 bp, Homo sapien
tattaggtgtggcgcctaggaccca

SEQ ID NO: 4153829 - DNA, 25 bp, Homo sapien
gtattaggtgtggcgcctaggaccc

SEQ ID NO: 4153830 - DNA, 25 bp, Homo sapien
cagactgctttcaactgtggagaca

SEQ ID NO: 4153831 - DNA, 25 bp, Homo sapien
ttgagggaagatgatcatcaaggtt

SEQ ID NO: 4153832 - DNA, 25 bp, Homo sapien
caaaatctggcgaatccagcaggga

SEQ ID NO: 4153833 - DNA, 25 bp, Homo sapien
gtggagacaaaatctggcgaatcca

SEQ ID NO: 4153834 - DNA, 25 bp, Homo sapien
gtctcactgtaaatgatgtttttga

SEQ ID NO: 4153835 - DNA, 25 bp, Homo sapien
tcactgtaaatgatgtttttgaaat

SEQ ID NO: 4153836 - DNA, 25 bp, Homo sapien
ctgtaaatgatgtttttgaaatggt

SEQ ID NO: 4153837 - DNA, 25 bp, Homo sapien
cttgtctcactgtaaatgatgtttt

SEQ ID NO: 4153838 - DNA, 25 bp, Homo sapien
cactaccagagtcagtctcttttgc

SEQ ID NO: 4153839 - DNA, 25 bp, Homo sapien
gggcctacacactaccagagtcagt

SEQ ID NO: 4153840 - DNA, 25 bp, Homo sapien
tcatatatgggcctacacactacca

SEQ ID NO: 4153841 - DNA, 25 bp, Homo sapien
ctactcttcatatatgggcctacac

SEQ ID NO: 4153842 - DNA, 25 bp, Homo sapien
taaagactgcttcctcttggtacaa

SEQ ID NO: 4153843 - DNA, 25 bp, Homo sapien
caggacatttgtagtcagtttgcag

SEQ ID NO: 4153844 - DNA, 25 bp, Homo sapien
gcagtataatttcctcaagaacctg

SEQ ID NO: 4153845 - DNA, 25 bp, Homo sapien
gactgattggtaccagaagctttca

SEQ ID NO: 4153846 - DNA, 25 bp, Homo sapien
tagctgaaggttgacataaatggca

SEQ ID NO: 4153847 - DNA, 25 bp, Homo sapien
ataaatggcagccatccactgtgct

SEQ ID NO: 4153848 - DNA, 25 bp, Homo sapien
tctgttttcatagtatgctgggtca

SEQ ID NO: 4153849 - DNA, 25 bp, Homo sapien
gctgggtcaacttttgttgcgaatc

SEQ ID NO: 4153850 - DNA, 25 bp, Homo sapien
tggagaaggtctctgtgtactccac

SEQ ID NO: 4153851 - DNA, 25 bp, Homo sapien
gaaggtctctgtgtactccactcag

SEQ ID NO: 4153852 - DNA, 25 bp, Homo sapien
gagtggagaaggtctctgtgtactc

SEQ ID NO: 4153853 - DNA, 25 bp, Homo sapien
tctgtgtactccactcagagagtca

SEQ ID NO: 4153854 - DNA, 25 bp, Homo sapien
tactcttcagagtttaagagcctgt

SEQ ID NO: 4153855 - DNA, 25 bp, Homo sapien
acaggacacttggtatactcttcag

SEQ ID NO: 4153856 - DNA, 25 bp, Homo sapien
ggtgaacttcttggaacaggacact

SEQ ID NO: 4153857 - DNA, 25 bp, Homo sapien
cttcttggaacaggacacttggtat

SEQ ID NO: 4153858 - DNA, 25 bp, Homo sapien
cagcatgtgctgattcagttgtatc

SEQ ID NO: 4153859 - DNA, 25 bp, Homo sapien
gcacgtgaaagcacgattgtcagca

SEQ ID NO: 4153860 - DNA, 25 bp, Homo sapien
tgaaagcacgattgtcagcatgtgc

SEQ ID NO: 4153861 - DNA, 25 bp, Homo sapien
ctatgaagcacgtgaaagcacgatt

SEQ ID NO: 4153862 - DNA, 25 bp, Homo sapien
gataaccagtaaaggtccaaatcac

SEQ ID NO: 4153863 - DNA, 25 bp, Homo sapien
cctttgaggtttgctcttcaatttg

SEQ ID NO: 4153864 - DNA, 25 bp, Homo sapien
attgacatctaatctcaggaacttc

SEQ ID NO: 4153865 - DNA, 25 bp, Homo sapien
tgtattatgcctttgaggtttgctc

SEQ ID NO: 4153866 - DNA, 25 bp, Homo sapien
catctaatctcaggaacttcagttt

SEQ ID NO: 4153867 - DNA, 25 bp, Homo sapien
tatggtccacgctgatttatcctga

SEQ ID NO: 4153868 - DNA, 25 bp, Homo sapien
caattttcagctcccgaagtgtgca

SEQ ID NO: 4153869 - DNA, 25 bp, Homo sapien
tcagacttggaggtcgagcaagacc

SEQ ID NO: 4153870 - DNA, 25 bp, Homo sapien
gaacttctaggaccaatctaaggga

SEQ ID NO: 4153871 - DNA, 25 bp, Homo sapien
gatttctttcagatgctaaatgcat

SEQ ID NO: 4153872 - DNA, 25 bp, Homo sapien
cttttcattaggctgccctgatttc

SEQ ID NO: 4153873 - DNA, 25 bp, Homo sapien
ctgcttttcattaggctgccctgat

SEQ ID NO: 4153874 - DNA, 25 bp, Homo sapien
cctgatttctttcagatgctaaatg

SEQ ID NO: 4153875 - DNA, 25 bp, Homo sapien
tccttttctgtgtaattccatgacc

SEQ ID NO: 4153876 - DNA, 25 bp, Homo sapien
tttccttttctgtgtaattccatga

SEQ ID NO: 4153877 - DNA, 25 bp, Homo sapien
ccttttctgtgtaattccatgacca

SEQ ID NO: 4153878 - DNA, 25 bp, Homo sapien
cttttctgtgtaattccatgaccat

SEQ ID NO: 4153879 - DNA, 25 bp, Homo sapien
aggctcttctggtgatattggtgga

SEQ ID NO: 4153880 - DNA, 25 bp, Homo sapien
gaagagggagcatcaatatacatat

SEQ ID NO: 4153881 - DNA, 25 bp, Homo sapien
ccattgaaatccgaagcctgaagag

SEQ ID NO: 4153882 - DNA, 25 bp, Homo sapien
caagagtgatctctgaaaggctctt

SEQ ID NO: 4153883 - DNA, 25 bp, Homo sapien
tcatgttctgtgacatgacttttca

SEQ ID NO: 4153884 - DNA, 25 bp, Homo sapien
catgttctgtgacatgacttttcac

SEQ ID NO: 4153885 - DNA, 25 bp, Homo sapien
tgaatggtcgctatcctttctgtac

SEQ ID NO: 4153886 - DNA, 25 bp, Homo sapien
ccttgctgaatggtcgctatccttt

SEQ ID NO: 4153887 - DNA, 25 bp, Homo sapien
tttcactctaggaaacaggagcatc

SEQ ID NO: 4153888 - DNA, 25 bp, Homo sapien
aacaggagcatccttgctgaatggt

SEQ ID NO: 4153889 - DNA, 25 bp, Homo sapien
ccagagttgacctggtcagaggaca

SEQ ID NO: 4153890 - DNA, 25 bp, Homo sapien
ggagcggcctgtttggcccaaaaca

SEQ ID NO: 4153891 - DNA, 25 bp, Homo sapien
aggtgtggcctatcttcttggagcg

SEQ ID NO: 4153892 - DNA, 25 bp, Homo sapien
ttccgcagtgccagtccagaaaagg

SEQ ID NO: 4153893 - DNA, 25 bp, Homo sapien
ccaaggccggcagcgggagatcact

SEQ ID NO: 4153894 - DNA, 25 bp, Homo sapien
tattctcagctgcttcacggtccaa

SEQ ID NO: 4153895 - DNA, 25 bp, Homo sapien
tgttgctattagtattctcagctgc

SEQ ID NO: 4153896 - DNA, 25 bp, Homo sapien
gatcacttaggcgtccatcacccat

SEQ ID NO: 4153897 - DNA, 25 bp, Homo sapien
ccccgaggctggtcttgctctgaca

SEQ ID NO: 4153898 - DNA, 25 bp, Homo sapien
gtcccagcccccgaggctggtcttg

SEQ ID NO: 4153899 - DNA, 25 bp, Homo sapien
cagcccccgaggctggtcttgctct

SEQ ID NO: 4153900 - DNA, 25 bp, Homo sapien
gcccccgaggctggtcttgctctga

SEQ ID NO: 4153901 - DNA, 25 bp, Homo sapien
ctgcacctcctagggctggctctct

SEQ ID NO: 4153902 - DNA, 25 bp, Homo sapien
cgagtcatagactgatgaggcaagt

SEQ ID NO: 4153903 - DNA, 25 bp, Homo sapien
gcagtaaggcgagtcatagactgat

SEQ ID NO: 4153904 - DNA, 25 bp, Homo sapien
tccaatgctaggtgcccagaagttt

SEQ ID NO: 4153905 - DNA, 25 bp, Homo sapien
tagactgagattccaatgctaggtg

SEQ ID NO: 4153906 - DNA, 25 bp, Homo sapien
gcaagtgccgtctcaatttgggcct

SEQ ID NO: 4153907 - DNA, 25 bp, Homo sapien
tcacttacaacagggtgcagccact

SEQ ID NO: 4153908 - DNA, 25 bp, Homo sapien
ggctaactccaagggtgcatgcatg

SEQ ID NO: 4153909 - DNA, 25 bp, Homo sapien
ccaaattgcttcgacagggttgcct

SEQ ID NO: 4153910 - DNA, 25 bp, Homo sapien
ccataatcccctctatgatccagtc

SEQ ID NO: 4153911 - DNA, 25 bp, Homo sapien
cccctctatgatccagtcacattga

SEQ ID NO: 4153912 - DNA, 25 bp, Homo sapien
ctctatgatccagtcacattgagct

SEQ ID NO: 4153913 - DNA, 25 bp, Homo sapien
ccccataatcccctctatgatccag

SEQ ID NO: 4153914 - DNA, 25 bp, Homo sapien
caactgtggctactgttgggacttc

SEQ ID NO: 4153915 - DNA, 25 bp, Homo sapien
tcaggcaccaactgtggctactgtt

SEQ ID NO: 4153916 - DNA, 25 bp, Homo sapien
tgggacttcagactgagaaggagtt

SEQ ID NO: 4153917 - DNA, 25 bp, Homo sapien
tactgttgggacttcagactgagaa

SEQ ID NO: 4153918 - DNA, 25 bp, Homo sapien
gctgattgcattcaactggtggtcc

SEQ ID NO: 4153919 - DNA, 25 bp, Homo sapien
ctaatttgtcttctggtggttccat

SEQ ID NO: 4153920 - DNA, 25 bp, Homo sapien
gtggtccaggatgataactgagcac

SEQ ID NO: 4153921 - DNA, 25 bp, Homo sapien
tgaactggacatgtgctgattgcat

SEQ ID NO: 4153922 - DNA, 25 bp, Homo sapien
aaaaacagattcatccctgttccta

SEQ ID NO: 4153923 - DNA, 25 bp, Homo sapien
aaaacagattcatccctgttcctac

SEQ ID NO: 4153924 - DNA, 25 bp, Homo sapien
gctgatggtggacagcaaatctatg

SEQ ID NO: 4153925 - DNA, 25 bp, Homo sapien
ttgctccctattttgctgatggtgg

SEQ ID NO: 4153926 - DNA, 25 bp, Homo sapien
ctccctattttgctgatggtggaca

SEQ ID NO: 4153927 - DNA, 25 bp, Homo sapien
ggtggacagcaaatctatgtgagtc

SEQ ID NO: 4153928 - DNA, 25 bp, Homo sapien
gatggacagcatgatacgactagtg

SEQ ID NO: 4153929 - DNA, 25 bp, Homo sapien
ggctctggttgatggacagcatgat

SEQ ID NO: 4153930 - DNA, 25 bp, Homo sapien
tacgactagtgaatccaattgacat

SEQ ID NO: 4153931 - DNA, 25 bp, Homo sapien
aattgacatcaatccacagccttct

SEQ ID NO: 4153932 - DNA, 25 bp, Homo sapien
tggccaaccacaaaccaatcaatcc

SEQ ID NO: 4153933 - DNA, 25 bp, Homo sapien
ctggtcgccatgggattctccctct

SEQ ID NO: 4153934 - DNA, 25 bp, Homo sapien
ggtcgccatgggattctccctcttg

SEQ ID NO: 4153935 - DNA, 25 bp, Homo sapien
ccaaccacaaaccaatcaatcctag

SEQ ID NO: 4153936 - DNA, 25 bp, Homo sapien
gactctctggaacaatattctgcca

SEQ ID NO: 4153937 - DNA, 25 bp, Homo sapien
aacattaaggctgtatcttgatcag

SEQ ID NO: 4153938 - DNA, 25 bp, Homo sapien
gttcctcaaagacaccaagtatatt

SEQ ID NO: 4153939 - DNA, 25 bp, Homo sapien
gaagcctgcctaaaatttagtcaag

SEQ ID NO: 4153940 - DNA, 25 bp, Homo sapien
gatctgctttactatcttgcttggt

SEQ ID NO: 4153941 - DNA, 25 bp, Homo sapien
tggatctgctttactatcttgcttg

SEQ ID NO: 4153942 - DNA, 25 bp, Homo sapien
tcagccatgctgtctaaggaagatt

SEQ ID NO: 4153943 - DNA, 25 bp, Homo sapien
actcagccatgctgtctaaggaaga

SEQ ID NO: 4153944 - DNA, 25 bp, Homo sapien
ctggcactggatttttcagattcca

SEQ ID NO: 4153945 - DNA, 25 bp, Homo sapien
cttctggcactggatttttcagatt

SEQ ID NO: 4153946 - DNA, 25 bp, Homo sapien
ctcacaggtatgtggcacttctggc

SEQ ID NO: 4153947 - DNA, 25 bp, Homo sapien
cacttctggcactggatttttcaga

SEQ ID NO: 4153948 - DNA, 25 bp, Homo sapien
ccagatgtcacaaagtggtggttca

SEQ ID NO: 4153949 - DNA, 25 bp, Homo sapien
cagatgtcacaaagtggtggttcat

SEQ ID NO: 4153950 - DNA, 25 bp, Homo sapien
ggcattcaaactgtacaatgtgtaa

SEQ ID NO: 4153951 - DNA, 25 bp, Homo sapien
tgtctgtattcagggctctgagcac

SEQ ID NO: 4153952 - DNA, 25 bp, Homo sapien
cttgttggcgtggatactatggaga

SEQ ID NO: 4153953 - DNA, 25 bp, Homo sapien
ggagattccggatatggcattcaaa

SEQ ID NO: 4153954 - DNA, 25 bp, Homo sapien
ttggccatcttgaaacacccagcaa

SEQ ID NO: 4153955 - DNA, 25 bp, Homo sapien
ggacattatccaagtatcgaggata

SEQ ID NO: 4153956 - DNA, 25 bp, Homo sapien
catatatggacattatccaagtatc

SEQ ID NO: 4153957 - DNA, 25 bp, Homo sapien
tatatggacattatccaagtatcga

SEQ ID NO: 4153958 - DNA, 25 bp, Homo sapien
tatggacattatccaagtatcgagg

SEQ ID NO: 4153959 - DNA, 25 bp, Homo sapien
gcaagtgacatgacaaagcctaaaa

SEQ ID NO: 4153960 - DNA, 25 bp, Homo sapien
gtgctcttagagtcatccccataga

SEQ ID NO: 4153961 - DNA, 25 bp, Homo sapien
aatagtcttcacaaattttgctggg

SEQ ID NO: 4153962 - DNA, 25 bp, Homo sapien
ctcttgctgtcataccagactccac

SEQ ID NO: 4153963 - DNA, 25 bp, Homo sapien
tagagtcatccccatagattttatg

SEQ ID NO: 4153964 - DNA, 25 bp, Homo sapien
agcaagcaagcagcactgccgctcg

SEQ ID NO: 4153965 - DNA, 25 bp, Homo sapien
aagcagcgctagtggcggtagcagc

SEQ ID NO: 4153966 - DNA, 25 bp, Homo sapien
tttggagcttgccttcctctcggcg

SEQ ID NO: 4153967 - DNA, 25 bp, Homo sapien
gctgcggtgttcgaacccgcggact

SEQ ID NO: 4153968 - DNA, 25 bp, Homo sapien
ttgtagcaggagcccgcagacactg

SEQ ID NO: 4153969 - DNA, 25 bp, Homo sapien
cagacactgtagaagcggagaacgg

SEQ ID NO: 4153970 - DNA, 25 bp, Homo sapien
cggagaacggcgctgcgtttccaaa

SEQ ID NO: 4153971 - DNA, 25 bp, Homo sapien
gaacggcgctgcgtttccaaatcat

SEQ ID NO: 4153972 - DNA, 25 bp, Homo sapien
gatggagagggtcgctcaagagcgt

SEQ ID NO: 4153973 - DNA, 25 bp, Homo sapien
tcaagagcgtgatgtgggaggtggc

SEQ ID NO: 4153974 - DNA, 25 bp, Homo sapien
ggctgagccagtgttagaaattcga

SEQ ID NO: 4153975 - DNA, 25 bp, Homo sapien
agaagttgatgttccctgcgccggg

SEQ ID NO: 4153976 - DNA, 25 bp, Homo sapien
ttttaaagacacacggatatgatga

SEQ ID NO: 4153977 - DNA, 25 bp, Homo sapien
gcaatgcacacggtgctgtcgctgc

SEQ ID NO: 4153978 - DNA, 25 bp, Homo sapien
tgttctcgcccgtcttggtagctcg

SEQ ID NO: 4153979 - DNA, 25 bp, Homo sapien
ccccggggatgttattgcaatgcac

SEQ ID NO: 4153980 - DNA, 25 bp, Homo sapien
gacacccgggttacttgtgtgagga

SEQ ID NO: 4153981 - DNA, 25 bp, Homo sapien
tccccagtctatatcccggaggagg

SEQ ID NO: 4153982 - DNA, 25 bp, Homo sapien
tgtctcagcgcggattaaaaaccta

SEQ ID NO: 4153983 - DNA, 25 bp, Homo sapien
tgcataaataaaattcggtccccag

SEQ ID NO: 4153984 - DNA, 25 bp, Homo sapien
tggaagctatagaaaagttgattct

SEQ ID NO: 4153985 - DNA, 25 bp, Homo sapien
atcctctcagtggaagctatagaaa

SEQ ID NO: 4153986 - DNA, 25 bp, Homo sapien
cctctcagtggaagctatagaaaag

SEQ ID NO: 4153987 - DNA, 25 bp, Homo sapien
ctcagtggaagctatagaaaagttg

SEQ ID NO: 4153988 - DNA, 25 bp, Homo sapien
tgtagagagcttttcatagaaggga

SEQ ID NO: 4153989 - DNA, 25 bp, Homo sapien
ttgaaagagagaatgtagcagtagt

SEQ ID NO: 4153990 - DNA, 25 bp, Homo sapien
taattagtattgaaaagagtggtcc

SEQ ID NO: 4153991 - DNA, 25 bp, Homo sapien
gaatgagaatgtcttctgtgtcaaa

SEQ ID NO: 4153992 - DNA, 25 bp, Homo sapien
tactggaaagatccttgcaggccat

SEQ ID NO: 4153993 - DNA, 25 bp, Homo sapien
cagtacaattcagagtcccctaggt

SEQ ID NO: 4153994 - DNA, 25 bp, Homo sapien
caatctaggaggtgctttgaaccta

SEQ ID NO: 4153995 - DNA, 25 bp, Homo sapien
tgcaggccatgagaagagtacagat

SEQ ID NO: 4153996 - DNA, 25 bp, Homo sapien
tcttgtcaagcgagagtccatgagt

SEQ ID NO: 4153997 - DNA, 25 bp, Homo sapien
caaatgagaccacttctgactggga

SEQ ID NO: 4153998 - DNA, 25 bp, Homo sapien
tgaggataatcaaaccaggcatgca

SEQ ID NO: 4153999 - DNA, 25 bp, Homo sapien
taatgactgcctccaagactttcgt

SEQ ID NO: 4154000 - DNA, 25 bp, Homo sapien
gaattccctattccaggccttcgca

SEQ ID NO: 4154001 - DNA, 25 bp, Homo sapien
cttgtaagaggccatttgatgaccc

SEQ ID NO: 4154002 - DNA, 25 bp, Homo sapien
cattaagtttcacccaagcatgaca

SEQ ID NO: 4154003 - DNA, 25 bp, Homo sapien
gattaacctaagcacaaatctgctc

SEQ ID NO: 4154004 - DNA, 25 bp, Homo sapien
tgcagtctcagctcattacaatctc

SEQ ID NO: 4154005 - DNA, 25 bp, Homo sapien
tttttgcattttcagtagaggcagg

SEQ ID NO: 4154006 - DNA, 25 bp, Homo sapien
tctctgcctcccaggttcaagcgat

SEQ ID NO: 4154007 - DNA, 25 bp, Homo sapien
ttacaggtgcgcaccttcatgcccg

SEQ ID NO: 4154008 - DNA, 25 bp, Homo sapien
tatacctcatgacttgttgctgatg

SEQ ID NO: 4154009 - DNA, 25 bp, Homo sapien
gaaaccaccaggcaacataagtagg

SEQ ID NO: 4154010 - DNA, 25 bp, Homo sapien
tattaaaggactgtactggatggca

SEQ ID NO: 4154011 - DNA, 25 bp, Homo sapien
cataagtaggattcaactgctgttc

SEQ ID NO: 4154012 - DNA, 25 bp, Homo sapien
ggaaaaaaggatacccacatgtaga

SEQ ID NO: 4154013 - DNA, 25 bp, Homo sapien
agtagatttcataaaagtaatgatc

SEQ ID NO: 4154014 - DNA, 25 bp, Homo sapien
gaaaactctcttggacagtggacta

SEQ ID NO: 4154015 - DNA, 25 bp, Homo sapien
ggactaagcaaacatttcttgagga

SEQ ID NO: 4154016 - DNA, 25 bp, Homo sapien
aatgagggatagtgatacatagtca

SEQ ID NO: 4154017 - DNA, 25 bp, Homo sapien
gaaatgctgcacattatgttggaga

SEQ ID NO: 4154018 - DNA, 25 bp, Homo sapien
cagtgctactctctagattgtttga

SEQ ID NO: 4154019 - DNA, 25 bp, Homo sapien
tgacaaccaaaacctaacattctta

SEQ ID NO: 4154020 - DNA, 25 bp, Homo sapien
gggatataatagagttacttctagc

SEQ ID NO: 4154021 - DNA, 25 bp, Homo sapien
tagtcaattttacagggtgggttca

SEQ ID NO: 4154022 - DNA, 25 bp, Homo sapien
gttttaccagaaataccatagtcaa

SEQ ID NO: 4154023 - DNA, 25 bp, Homo sapien
tctagcttgaaggataacattcttt

SEQ ID NO: 4154024 - DNA, 25 bp, Homo sapien
ccaattatgcaggaaattgtgcagg

SEQ ID NO: 4154025 - DNA, 25 bp, Homo sapien
cacaaggctctgaattggatctggt

SEQ ID NO: 4154026 - DNA, 25 bp, Homo sapien
tgtgcaggaactagtatagatgact

SEQ ID NO: 4154027 - DNA, 25 bp, Homo sapien
ctcccaaaaggataatttctctctg

SEQ ID NO: 4154028 - DNA, 25 bp, Homo sapien
aatcccagaagtctggctagtctcc

SEQ ID NO: 4154029 - DNA, 25 bp, Homo sapien
tggctagtctccacataagctttgg

SEQ ID NO: 4154030 - DNA, 25 bp, Homo sapien
cacataagctttggaaaggcctcga

SEQ ID NO: 4154031 - DNA, 25 bp, Homo sapien
gaagtctggctagtctccacataag

SEQ ID NO: 4154032 - DNA, 25 bp, Homo sapien
tatcacttcacaaagtttaaacaag

SEQ ID NO: 4154033 - DNA, 25 bp, Homo sapien
aacaatcagttataagcaccaatac

SEQ ID NO: 4154034 - DNA, 25 bp, Homo sapien
gttataagcaccaatactacattta

SEQ ID NO: 4154035 - DNA, 25 bp, Homo sapien
tctataaacaatcagttataagcac

SEQ ID NO: 4154036 - DNA, 25 bp, Homo sapien
aatatctgaccttggacatgctgcg

SEQ ID NO: 4154037 - DNA, 25 bp, Homo sapien
tatgttttatgtgtacaagccacag

SEQ ID NO: 4154038 - DNA, 25 bp, Homo sapien
tgctgcttccctcaagaaactgctc

SEQ ID NO: 4154039 - DNA, 25 bp, Homo sapien
gatggctacaccatatataaagtgc

SEQ ID NO: 4154040 - DNA, 25 bp, Homo sapien
tcagtccccgccaatagaaatgtgg

SEQ ID NO: 4154041 - DNA, 25 bp, Homo sapien
ttgtttggcacatcaaaatctcaat

SEQ ID NO: 4154042 - DNA, 25 bp, Homo sapien
tgtgggcaagaacaactcatgttgt

SEQ ID NO: 4154043 - DNA, 25 bp, Homo sapien
cagcaacaaggaaatccagagaaac

SEQ ID NO: 4154044 - DNA, 25 bp, Homo sapien
catgtgttttttggattcacaaatg

SEQ ID NO: 4154045 - DNA, 25 bp, Homo sapien
ttttttggattcacaaatgtcttct

SEQ ID NO: 4154046 - DNA, 25 bp, Homo sapien
gtgttttttggattcacaaatgtct

SEQ ID NO: 4154047 - DNA, 25 bp, Homo sapien
tcatgtgttttttggattcacaaat

SEQ ID NO: 4154048 - DNA, 25 bp, Homo sapien
ttatctatgcaaccatttacagaca

SEQ ID NO: 4154049 - DNA, 25 bp, Homo sapien
gtgtgatggtgcaggcctgttgttc

SEQ ID NO: 4154050 - DNA, 25 bp, Homo sapien
taccatgataacaggctcacacctg

SEQ ID NO: 4154051 - DNA, 25 bp, Homo sapien
aaacattgcaaaaccctatctatac

SEQ ID NO: 4154052 - DNA, 25 bp, Homo sapien
tgttcattagggtcatcgtcctgat

SEQ ID NO: 4154053 - DNA, 25 bp, Homo sapien
gggtcatcgtcctgatttatattgg

SEQ ID NO: 4154054 - DNA, 25 bp, Homo sapien
catcgtcctgatttatattggctct

SEQ ID NO: 4154055 - DNA, 25 bp, Homo sapien
tggtggacaatctgttcattagggt

SEQ ID NO: 4154056 - DNA, 25 bp, Homo sapien
tcatctaattgcattctataaaggt

SEQ ID NO: 4154057 - DNA, 25 bp, Homo sapien
aaggttctttgccatccaattatta

SEQ ID NO: 4154058 - DNA, 25 bp, Homo sapien
cttttcatctaattgcattctataa

SEQ ID NO: 4154059 - DNA, 25 bp, Homo sapien
attctataaaggttctttgccatcc

SEQ ID NO: 4154060 - DNA, 25 bp, Homo sapien
aaactgtggattccctgaacttgga

SEQ ID NO: 4154061 - DNA, 25 bp, Homo sapien
tagtaggccatgtgaaccctgagcc

SEQ ID NO: 4154062 - DNA, 25 bp, Homo sapien
tcataagtggggatcccagccctgc

SEQ ID NO: 4154063 - DNA, 25 bp, Homo sapien
gaacttggaggaataacatgtaact

SEQ ID NO: 4154064 - DNA, 25 bp, Homo sapien
agacataagcaaactcttcaatgaa

SEQ ID NO: 4154065 - DNA, 25 bp, Homo sapien
tacagacataagcaaactcttcaat

SEQ ID NO: 4154066 - DNA, 25 bp, Homo sapien
cagacataagcaaactcttcaatga

SEQ ID NO: 4154067 - DNA, 25 bp, Homo sapien
atacagacataagcaaactcttcaa

SEQ ID NO: 4154068 - DNA, 25 bp, Homo sapien
tgttactccgcttcttgtaatactt

SEQ ID NO: 4154069 - DNA, 25 bp, Homo sapien
cttgttactccgcttcttgtaatac

SEQ ID NO: 4154070 - DNA, 25 bp, Homo sapien
ttactccgcttcttgtaatacttca

SEQ ID NO: 4154071 - DNA, 25 bp, Homo sapien
tcttgttactccgcttcttgtaata

SEQ ID NO: 4154072 - DNA, 25 bp, Homo sapien
cctgcagagcctgattaatgggcat

SEQ ID NO: 4154073 - DNA, 25 bp, Homo sapien
tcatactcatttggtctcagaaact

SEQ ID NO: 4154074 - DNA, 25 bp, Homo sapien
gccaactctagtgttatatgcatat

SEQ ID NO: 4154075 - DNA, 25 bp, Homo sapien
ttggtctcagaaactcaaatcctgc

SEQ ID NO: 4154076 - DNA, 25 bp, Homo sapien
gatgcccaaggcttgataatttcag

SEQ ID NO: 4154077 - DNA, 25 bp, Homo sapien
agtttttgaccaagagcaccatttc

SEQ ID NO: 4154078 - DNA, 25 bp, Homo sapien
gaaggcaattacagactttttcctg

SEQ ID NO: 4154079 - DNA, 25 bp, Homo sapien
catttcactattgtgctggaaggca

SEQ ID NO: 4154080 - DNA, 25 bp, Homo sapien
gaccagagaaaatgatctatcatat

SEQ ID NO: 4154081 - DNA, 25 bp, Homo sapien
cctacttggaaatgtagtcacactt

SEQ ID NO: 4154082 - DNA, 25 bp, Homo sapien
tttctagctatccagttaaaaatga

SEQ ID NO: 4154083 - DNA, 25 bp, Homo sapien
accattgtgatttctggaacttcag

SEQ ID NO: 4154084 - DNA, 25 bp, Homo sapien
gttccccaggtttcatagttcttca

SEQ ID NO: 4154085 - DNA, 25 bp, Homo sapien
ccaggtttcatagttcttcattcca

SEQ ID NO: 4154086 - DNA, 25 bp, Homo sapien
tccccaggtttcatagttcttcatt

SEQ ID NO: 4154087 - DNA, 25 bp, Homo sapien
ctctttagttccccaggtttcatag

SEQ ID NO: 4154088 - DNA, 25 bp, Homo sapien
gagatggaacgtaaataaggtcgaa

SEQ ID NO: 4154089 - DNA, 25 bp, Homo sapien
taaggtcgaaataggaggtcactgc

SEQ ID NO: 4154090 - DNA, 25 bp, Homo sapien
aaatgatctaaagtagggccttact

SEQ ID NO: 4154091 - DNA, 25 bp, Homo sapien
gtaagagtgatcttcttagaggaga

SEQ ID NO: 4154092 - DNA, 25 bp, Homo sapien
gatttgaaattctgtatctaaatga

SEQ ID NO: 4154093 - DNA, 25 bp, Homo sapien
tgtatctaaatgattggggccagag

SEQ ID NO: 4154094 - DNA, 25 bp, Homo sapien
gagtgatttggataattgtttcagt

SEQ ID NO: 4154095 - DNA, 25 bp, Homo sapien
gagtgctcctttggtttgagtgatt

SEQ ID NO: 4154096 - DNA, 25 bp, Homo sapien
tggacgaataagcacaggagaaact

SEQ ID NO: 4154097 - DNA, 25 bp, Homo sapien
tcctgtctggacaatagtaggagac

SEQ ID NO: 4154098 - DNA, 25 bp, Homo sapien
gcagggagttctgactggtgtatca

SEQ ID NO: 4154099 - DNA, 25 bp, Homo sapien
tagttctgttctagtgctgaggcac

SEQ ID NO: 4154100 - DNA, 25 bp, Homo sapien
cgattatttaaaagagctgtagagg

SEQ ID NO: 4154101 - DNA, 25 bp, Homo sapien
tagagtttataacggctaagagaca

SEQ ID NO: 4154102 - DNA, 25 bp, Homo sapien
gatgtgtcaaatgagtagtgagtcc

SEQ ID NO: 4154103 - DNA, 25 bp, Homo sapien
tgtttataaggctgcatgcatggca

SEQ ID NO: 4154104 - DNA, 25 bp, Homo sapien
tgaactatttctctcacagtgattt

SEQ ID NO: 4154105 - DNA, 25 bp, Homo sapien
taataatggttgcagattgtcctac

SEQ ID NO: 4154106 - DNA, 25 bp, Homo sapien
gaatattaaacgcattttagaggga

SEQ ID NO: 4154107 - DNA, 25 bp, Homo sapien
gtcattaaggtaactgatctccatg

SEQ ID NO: 4154108 - DNA, 25 bp, Homo sapien
ctgtgcccaaaactgaaagagctgc

SEQ ID NO: 4154109 - DNA, 25 bp, Homo sapien
ggcactgtgcccaaaactgaaagag

SEQ ID NO: 4154110 - DNA, 25 bp, Homo sapien
caggcactgtgcccaaaactgaaag

SEQ ID NO: 4154111 - DNA, 25 bp, Homo sapien
actgtgcccaaaactgaaagagctg

SEQ ID NO: 4154112 - DNA, 25 bp, Homo sapien
taacatgaactatgtgggccattag

SEQ ID NO: 4154113 - DNA, 25 bp, Homo sapien
cacagtagcaatccacagggtagcc

SEQ ID NO: 4154114 - DNA, 25 bp, Homo sapien
tagctgtctacctgtttcaaaaaca

SEQ ID NO: 4154115 - DNA, 25 bp, Homo sapien
caaaaacatgtatggtgctgtttag

SEQ ID NO: 4154116 - DNA, 25 bp, Homo sapien
gtaaccattgcgttcactctctgtg

SEQ ID NO: 4154117 - DNA, 25 bp, Homo sapien
tgtgcatctgtagctaatgacaggt

SEQ ID NO: 4154118 - DNA, 25 bp, Homo sapien
tatccaccagtttttagaagtatta

SEQ ID NO: 4154119 - DNA, 25 bp, Homo sapien
atgacaggtagtaaccattgcgttc

SEQ ID NO: 4154120 - DNA, 25 bp, Homo sapien
ctactggtggtgaataggagaagca

SEQ ID NO: 4154121 - DNA, 25 bp, Homo sapien
aataaatcctattcttagtcaacca

SEQ ID NO: 4154122 - DNA, 25 bp, Homo sapien
ctggaaatatctactggtggtgaat

SEQ ID NO: 4154123 - DNA, 25 bp, Homo sapien
tagtcaaccaattagattttctatg

SEQ ID NO: 4154124 - DNA, 25 bp, Homo sapien
aaatagcacagtttatccttgaaag

SEQ ID NO: 4154125 - DNA, 25 bp, Homo sapien
acttacatccaagaatgagcattta

SEQ ID NO: 4154126 - DNA, 25 bp, Homo sapien
tgtttcatctccataataaccggag

SEQ ID NO: 4154127 - DNA, 25 bp, Homo sapien
ttaagtgggctaggtattactgtcc

SEQ ID NO: 4154128 - DNA, 25 bp, Homo sapien
tagggagaagatacccacacgatgt

SEQ ID NO: 4154129 - DNA, 25 bp, Homo sapien
tgagactatgacactgcagctgact

SEQ ID NO: 4154130 - DNA, 25 bp, Homo sapien
gtaaattggaatgcaaccacaagga

SEQ ID NO: 4154131 - DNA, 25 bp, Homo sapien
ttcaaaggcgagatttgatgctcca

SEQ ID NO: 4154132 - DNA, 25 bp, Homo sapien
ctgcagagggcaaggccttgcagag

SEQ ID NO: 4154133 - DNA, 25 bp, Homo sapien
agactctggttctgtgcagaaccag

SEQ ID NO: 4154134 - DNA, 25 bp, Homo sapien
ttttttgtagactctggttctgtgc

SEQ ID NO: 4154135 - DNA, 25 bp, Homo sapien
taattttttgtagactctggttctg

SEQ ID NO: 4154136 - DNA, 25 bp, Homo sapien
tttttgtagactctggttctgtgca

SEQ ID NO: 4154137 - DNA, 25 bp, Homo sapien
ttttccaggtaagaaaaatcaggca

SEQ ID NO: 4154138 - DNA, 25 bp, Homo sapien
catgtggaacataaagcagcctgtg

SEQ ID NO: 4154139 - DNA, 25 bp, Homo sapien
ggatgttgaagatctcgacgttaca

SEQ ID NO: 4154140 - DNA, 25 bp, Homo sapien
caacgtaagagctagcaggtaacca

SEQ ID NO: 4154141 - DNA, 25 bp, Homo sapien
caggagtaatgtttgacactatcaa

SEQ ID NO: 4154142 - DNA, 25 bp, Homo sapien
ggccatcctggtctcagacgcttga

SEQ ID NO: 4154143 - DNA, 25 bp, Homo sapien
gatcccttctcagccgttgtctcaa

SEQ ID NO: 4154144 - DNA, 25 bp, Homo sapien
tataactaagtccaacaactgacct

SEQ ID NO: 4154145 - DNA, 25 bp, Homo sapien
aaggatccctctgtgtcagcctaca

SEQ ID NO: 4154146 - DNA, 25 bp, Homo sapien
tctcaggatccaacagtaaaaattc

SEQ ID NO: 4154147 - DNA, 25 bp, Homo sapien
gaaaattctgcttaacatccccgtg

SEQ ID NO: 4154148 - DNA, 25 bp, Homo sapien
ggcataagtaattctcgtgggaggc

SEQ ID NO: 4154149 - DNA, 25 bp, Homo sapien
catccccgtggctcagtacttttag

SEQ ID NO: 4154150 - DNA, 25 bp, Homo sapien
tagcattaccattttcagcgtgaca

SEQ ID NO: 4154151 - DNA, 25 bp, Homo sapien
ctattcaaatatagacaggcccagg

SEQ ID NO: 4154152 - DNA, 25 bp, Homo sapien
tctatgcagttcttatacagtctcc

SEQ ID NO: 4154153 - DNA, 25 bp, Homo sapien
taaggaaatactcaaagtcaacagc

SEQ ID NO: 4154154 - DNA, 25 bp, Homo sapien
gacccacaagttgaggcaaaactct

SEQ ID NO: 4154155 - DNA, 25 bp, Homo sapien
ttagacacgataatgtaattcaata

SEQ ID NO: 4154156 - DNA, 25 bp, Homo sapien
ggttgatttagacacgataatgtaa

SEQ ID NO: 4154157 - DNA, 25 bp, Homo sapien
gatatgatttatttcgacatatgaa

SEQ ID NO: 4154158 - DNA, 25 bp, Homo sapien
ttcgacatatgaataatgattctcc

SEQ ID NO: 4154159 - DNA, 25 bp, Homo sapien
tgagtccacctacggccatgattct

SEQ ID NO: 4154160 - DNA, 25 bp, Homo sapien
aatgtgagagcccttgaatgcgacc

SEQ ID NO: 4154161 - DNA, 25 bp, Homo sapien
tgatgtgactcattcccttagaaac

SEQ ID NO: 4154162 - DNA, 25 bp, Homo sapien
gacagggctgaagatctaattttgc

SEQ ID NO: 4154163 - DNA, 25 bp, Homo sapien
tcaggacgctttgcaatgataatgc

SEQ ID NO: 4154164 - DNA, 25 bp, Homo sapien
tgtgactaattcttgctaatgtggg

SEQ ID NO: 4154165 - DNA, 25 bp, Homo sapien
gatttttaagaagtggactggtctc

SEQ ID NO: 4154166 - DNA, 25 bp, Homo sapien
aaggaacttagatcctagatggcag

SEQ ID NO: 4154167 - DNA, 25 bp, Homo sapien
ggtactgccagatttaattggtaaa

SEQ ID NO: 4154168 - DNA, 25 bp, Homo sapien
ctatggtactgccagatttaattgg

SEQ ID NO: 4154169 - DNA, 25 bp, Homo sapien
ctgttgtcatttctatggtactgcc

SEQ ID NO: 4154170 - DNA, 25 bp, Homo sapien
tactgccagatttaattggtaaaaa

SEQ ID NO: 4154171 - DNA, 25 bp, Homo sapien
gaaatcagttgaactggcctctgat

SEQ ID NO: 4154172 - DNA, 25 bp, Homo sapien
cgtttgttcgtgttggcattttcaa

SEQ ID NO: 4154173 - DNA, 25 bp, Homo sapien
gattcaaaatgtgttcgtttgttcg

SEQ ID NO: 4154174 - DNA, 25 bp, Homo sapien
caagaaatcagttgaactggcctct

SEQ ID NO: 4154175 - DNA, 25 bp, Homo sapien
gaaacaggagcccataatttagtgg

SEQ ID NO: 4154176 - DNA, 25 bp, Homo sapien
taatggagatttacgcacaaaaggg

SEQ ID NO: 4154177 - DNA, 25 bp, Homo sapien
aaaacacagttttcggctatgcatc

SEQ ID NO: 4154178 - DNA, 25 bp, Homo sapien
aaggttagtatcagagggctccatt

SEQ ID NO: 4154179 - DNA, 25 bp, Homo sapien
tacaaacacgtacagcaaggattat

SEQ ID NO: 4154180 - DNA, 25 bp, Homo sapien
gaaattggcaagttttgtgaccgag

SEQ ID NO: 4154181 - DNA, 25 bp, Homo sapien
tactgtggtatgacaggtaagcagc

SEQ ID NO: 4154182 - DNA, 25 bp, Homo sapien
aagtgaggcaattacgggcatgacc

SEQ ID NO: 4154183 - DNA, 25 bp, Homo sapien
aaatacaagcattatagtggaggca

SEQ ID NO: 4154184 - DNA, 25 bp, Homo sapien
tccacgaaatttgagaactatagtc

SEQ ID NO: 4154185 - DNA, 25 bp, Homo sapien
tatagcaaagtctcagcggtttaga

SEQ ID NO: 4154186 - DNA, 25 bp, Homo sapien
ttcctggtcacatgacggaggcatt

SEQ ID NO: 4154187 - DNA, 25 bp, Homo sapien
tcgttttgatacttagtgccaccat

SEQ ID NO: 4154188 - DNA, 25 bp, Homo sapien
caagaaatagataaaacgaatgttc

SEQ ID NO: 4154189 - DNA, 25 bp, Homo sapien
tgttcgttttgatacttagtgccac

SEQ ID NO: 4154190 - DNA, 25 bp, Homo sapien
agaaatagataaaacgaatgttcgt

SEQ ID NO: 4154191 - DNA, 25 bp, Homo sapien
tatcctaattttgcagagcaggaga

SEQ ID NO: 4154192 - DNA, 25 bp, Homo sapien
catacgcagctacactaattgagca

SEQ ID NO: 4154193 - DNA, 25 bp, Homo sapien
taggcagttctgagattgtgcaaac

SEQ ID NO: 4154194 - DNA, 25 bp, Homo sapien
tccattcagcttgtttaggctccaa

SEQ ID NO: 4154195 - DNA, 25 bp, Homo sapien
caagtccttctagatctctcactcc

SEQ ID NO: 4154196 - DNA, 25 bp, Homo sapien
agtgattgggccaagtccttctaga

SEQ ID NO: 4154197 - DNA, 25 bp, Homo sapien
cagtgattgggccaagtccttctag

SEQ ID NO: 4154198 - DNA, 25 bp, Homo sapien
tatcgagctctatctttgtgaacag

SEQ ID NO: 4154199 - DNA, 25 bp, Homo sapien
ccagttacatgataattatctatcg

SEQ ID NO: 4154200 - DNA, 25 bp, Homo sapien
agtcattattaagtcacttgtgaac

SEQ ID NO: 4154201 - DNA, 25 bp, Homo sapien
gttgcggtgagttcaaattgctcca

SEQ ID NO: 4154202 - DNA, 25 bp, Homo sapien
tatgggaaacatacttttcaaacca

SEQ ID NO: 4154203 - DNA, 25 bp, Homo sapien
tcctacatgattatgggaaacatac

SEQ ID NO: 4154204 - DNA, 25 bp, Homo sapien
tttcttcaatagctcctacatgatt

SEQ ID NO: 4154205 - DNA, 25 bp, Homo sapien
tcaatagctcctacatgattatggg

SEQ ID NO: 4154206 - DNA, 25 bp, Homo sapien
gggccactgagctaaccagaaatat

SEQ ID NO: 4154207 - DNA, 25 bp, Homo sapien
taagaaattcaaccctgcatctatc

SEQ ID NO: 4154208 - DNA, 25 bp, Homo sapien
caagtgacttttacttgggtattct

SEQ ID NO: 4154209 - DNA, 25 bp, Homo sapien
cactatataatcaagctcaattttc

SEQ ID NO: 4154210 - DNA, 25 bp, Homo sapien
tttgactagtcctctcactgcaggg

SEQ ID NO: 4154211 - DNA, 25 bp, Homo sapien
tcttcctgcgcttagataaacatca

SEQ ID NO: 4154212 - DNA, 25 bp, Homo sapien
tgtaacacgcctataatcttcatgg

SEQ ID NO: 4154213 - DNA, 25 bp, Homo sapien
ccatactttcggtaatggtcttcag

SEQ ID NO: 4154214 - DNA, 25 bp, Homo sapien
cagtacttaggaatggagttatagc

SEQ ID NO: 4154215 - DNA, 25 bp, Homo sapien
caatgggtaaaatgccagtacttag

SEQ ID NO: 4154216 - DNA, 25 bp, Homo sapien
gtaatatccaactattgaaaactaa

SEQ ID NO: 4154217 - DNA, 25 bp, Homo sapien
agcactgagtacattcgttaaaaca

SEQ ID NO: 4154218 - DNA, 25 bp, Homo sapien
tataacatttaggaggagagggcaa

SEQ ID NO: 4154219 - DNA, 25 bp, Homo sapien
tcttgcaaatgttagagccactcaa

SEQ ID NO: 4154220 - DNA, 25 bp, Homo sapien
gatattcagtgaatcgggttcacag

SEQ ID NO: 4154221 - DNA, 25 bp, Homo sapien
tcttcaagtggcaagtcatccccag

SEQ ID NO: 4154222 - DNA, 25 bp, Homo sapien
actaacttccggcatccagatggcc

SEQ ID NO: 4154223 - DNA, 25 bp, Homo sapien
taagcattgaccagaatttaaacta

SEQ ID NO: 4154224 - DNA, 25 bp, Homo sapien
cagaatttaaactaacttccggcat

SEQ ID NO: 4154225 - DNA, 25 bp, Homo sapien
tccaaattaagcattgaccagaatt

SEQ ID NO: 4154226 - DNA, 25 bp, Homo sapien
tattcatgcaagatcataaccagga

SEQ ID NO: 4154227 - DNA, 25 bp, Homo sapien
gatacctgagagatggacattgcac

SEQ ID NO: 4154228 - DNA, 25 bp, Homo sapien
tgcaccagtaatcctaacttcttgg

SEQ ID NO: 4154229 - DNA, 25 bp, Homo sapien
tagtaaagcagggaataagatcacg

SEQ ID NO: 4154230 - DNA, 25 bp, Homo sapien
tgtaaaagctagatgaccataaagc

SEQ ID NO: 4154231 - DNA, 25 bp, Homo sapien
caagtggtagtcattatattgggaa

SEQ ID NO: 4154232 - DNA, 25 bp, Homo sapien
tctatggatgtcctcatgaacaggc

SEQ ID NO: 4154233 - DNA, 25 bp, Homo sapien
tgaacaggctaagtaatctaaataa

SEQ ID NO: 4154234 - DNA, 25 bp, Homo sapien
tctgtataagttttactagcaaaat

SEQ ID NO: 4154235 - DNA, 25 bp, Homo sapien
aaaaacttctctacatgtgaactat

SEQ ID NO: 4154236 - DNA, 25 bp, Homo sapien
aacttctctacatgtgaactatcca

SEQ ID NO: 4154237 - DNA, 25 bp, Homo sapien
tgtcaaaggccacttctgtataagt

SEQ ID NO: 4154238 - DNA, 25 bp, Homo sapien
tagagataaactaaggtcaaggtag

SEQ ID NO: 4154239 - DNA, 25 bp, Homo sapien
aagtggtcttaccaaaatgggtatg

SEQ ID NO: 4154240 - DNA, 25 bp, Homo sapien
caaggtaggtagtatgattcataag

SEQ ID NO: 4154241 - DNA, 25 bp, Homo sapien
tattagtaatttcttcccttagaga

SEQ ID NO: 4154242 - DNA, 25 bp, Homo sapien
caaatatccaattgtgcctatgagg

SEQ ID NO: 4154243 - DNA, 25 bp, Homo sapien
tattaaagtcaaatatccaattgtg

SEQ ID NO: 4154244 - DNA, 25 bp, Homo sapien
catgaactttcttattcacgtcttc

SEQ ID NO: 4154245 - DNA, 25 bp, Homo sapien
tccaattgtgcctatgaggactctg

SEQ ID NO: 4154246 - DNA, 25 bp, Homo sapien
tacagcctctataccctagcataga

SEQ ID NO: 4154247 - DNA, 25 bp, Homo sapien
taaatctacactatgatggaatgca

SEQ ID NO: 4154248 - DNA, 25 bp, Homo sapien
tagcatgcatccttacagatttggt

SEQ ID NO: 4154249 - DNA, 25 bp, Homo sapien
tcctcgctgaggtgtgcatttaaac

SEQ ID NO: 4154250 - DNA, 25 bp, Homo sapien
tgtgccaactgagttattctaaagt

SEQ ID NO: 4154251 - DNA, 25 bp, Homo sapien
tagttttaatgccacacacactgtg

SEQ ID NO: 4154252 - DNA, 25 bp, Homo sapien
ggtgaaaacctaattggcattttga

SEQ ID NO: 4154253 - DNA, 25 bp, Homo sapien
gcaggagatctggttgatattttaa

SEQ ID NO: 4154254 - DNA, 25 bp, Homo sapien
tcatgcccgatgtcagatgttacag

SEQ ID NO: 4154255 - DNA, 25 bp, Homo sapien
cacgggagcatagtgtgcgatgcaa

SEQ ID NO: 4154256 - DNA, 25 bp, Homo sapien
ggctgaccctgaatttcatgcccga

SEQ ID NO: 4154257 - DNA, 25 bp, Homo sapien
cctgtatctactaaaggctgaccct

SEQ ID NO: 4154258 - DNA, 25 bp, Homo sapien
acagggctgtctatctaagtatgag

SEQ ID NO: 4154259 - DNA, 25 bp, Homo sapien
tccctgctgactataactagtttac

SEQ ID NO: 4154260 - DNA, 25 bp, Homo sapien
tagtttactcaaaactgggtagcag

SEQ ID NO: 4154261 - DNA, 25 bp, Homo sapien
gtaatggcctcccattatatctggc

SEQ ID NO: 4154262 - DNA, 25 bp, Homo sapien
tccttacttccccagtagtgtaatg

SEQ ID NO: 4154263 - DNA, 25 bp, Homo sapien
tgccggctgagaacgtagccctctc

SEQ ID NO: 4154264 - DNA, 25 bp, Homo sapien
tgtaatgggtaacagaaatatctca

SEQ ID NO: 4154265 - DNA, 25 bp, Homo sapien
catttgtcacaaaagcgcttctcct

SEQ ID NO: 4154266 - DNA, 25 bp, Homo sapien
ccagagagggtgcatctcactgaga

SEQ ID NO: 4154267 - DNA, 25 bp, Homo sapien
gggtgcatctcactgagagcctgcc

SEQ ID NO: 4154268 - DNA, 25 bp, Homo sapien
gagagggtgcatctcactgagagcc

SEQ ID NO: 4154269 - DNA, 25 bp, Homo sapien
cccagagagggtgcatctcactgag

SEQ ID NO: 4154270 - DNA, 25 bp, Homo sapien
aatctaagatggagactagattctt

SEQ ID NO: 4154271 - DNA, 25 bp, Homo sapien
gttataagaatgtaagcagtcttgt

SEQ ID NO: 4154272 - DNA, 25 bp, Homo sapien
ctaagatggagactagattcttctg

SEQ ID NO: 4154273 - DNA, 25 bp, Homo sapien
tgtaagcagtcttgttatttcccat

SEQ ID NO: 4154274 - DNA, 25 bp, Homo sapien
tctcagggaagataacagtaatgct

SEQ ID NO: 4154275 - DNA, 25 bp, Homo sapien
tatgagttccatcgtatggatgcgg

SEQ ID NO: 4154276 - DNA, 25 bp, Homo sapien
gcaggtctgacgtgacaaatttctt

SEQ ID NO: 4154277 - DNA, 25 bp, Homo sapien
tgtaggcaattcctataagccaacg

SEQ ID NO: 4154278 - DNA, 25 bp, Homo sapien
ttagtgtaggttcagcacttgtcag

SEQ ID NO: 4154279 - DNA, 25 bp, Homo sapien
caacctaaaaggtctgctctcagaa

SEQ ID NO: 4154280 - DNA, 25 bp, Homo sapien
gatatataatatgccagccaaggcc

SEQ ID NO: 4154281 - DNA, 25 bp, Homo sapien
gctctcagaacagtaatttgacaca

SEQ ID NO: 4154282 - DNA, 25 bp, Homo sapien
tgtcatgttcaatacttgtaagatt

SEQ ID NO: 4154283 - DNA, 25 bp, Homo sapien
tactgtcatgaatgtcatgttcaat

SEQ ID NO: 4154284 - DNA, 25 bp, Homo sapien
gaatgtcatgttcaatacttgtaag

SEQ ID NO: 4154285 - DNA, 25 bp, Homo sapien
gacaggaatactgtcatgaatgtca

SEQ ID NO: 4154286 - DNA, 25 bp, Homo sapien
tttgaagcagccgctggtaccaagg

SEQ ID NO: 4154287 - DNA, 25 bp, Homo sapien
ggttgcacaagaagagaacaaacat

SEQ ID NO: 4154288 - DNA, 25 bp, Homo sapien
tctttgaagcagccgctggtaccaa

SEQ ID NO: 4154289 - DNA, 25 bp, Homo sapien
ttctttgaagcagccgctggtacca

SEQ ID NO: 4154290 - DNA, 25 bp, Homo sapien
gactagggccttacacataaactca

SEQ ID NO: 4154291 - DNA, 25 bp, Homo sapien
gaaatctcctgaaaatgactaagac

SEQ ID NO: 4154292 - DNA, 25 bp, Homo sapien
tgaaatgacctactggccatgccac

SEQ ID NO: 4154293 - DNA, 25 bp, Homo sapien
aacttgcattcccttaacctgtctg

SEQ ID NO: 4154294 - DNA, 25 bp, Homo sapien
aaattgcagaaatcggtagactcag

SEQ ID NO: 4154295 - DNA, 25 bp, Homo sapien
aatgtgatcacctagtagaaagaac

SEQ ID NO: 4154296 - DNA, 25 bp, Homo sapien
aagcacagtaggctgaaaattgcca

SEQ ID NO: 4154297 - DNA, 25 bp, Homo sapien
ttttcaagctgaaagaggtcagtgg

SEQ ID NO: 4154298 - DNA, 25 bp, Homo sapien
tattgaatttagttaccccattgtg

SEQ ID NO: 4154299 - DNA, 25 bp, Homo sapien
tccatagtgttacaaagaatccaag

SEQ ID NO: 4154300 - DNA, 25 bp, Homo sapien
ttcagagtaaatgcgatctccttca

SEQ ID NO: 4154301 - DNA, 25 bp, Homo sapien
acccattagtcattccttgtcccat

SEQ ID NO: 4154302 - DNA, 25 bp, Homo sapien
gcctcttccagcgttcctttataat

SEQ ID NO: 4154303 - DNA, 25 bp, Homo sapien
cctcttccagcgttcctttataatg

SEQ ID NO: 4154304 - DNA, 25 bp, Homo sapien
tcttccagcgttcctttataatgtc

SEQ ID NO: 4154305 - DNA, 25 bp, Homo sapien
caaagccaggactgtctttccgctt

SEQ ID NO: 4154306 - DNA, 25 bp, Homo sapien
aagcaatgtcttttattctctggta

SEQ ID NO: 4154307 - DNA, 25 bp, Homo sapien
gcaatgtcttttattctctggtaag

SEQ ID NO: 4154308 - DNA, 25 bp, Homo sapien
tcaagcaatgtcttttattctctgg

SEQ ID NO: 4154309 - DNA, 25 bp, Homo sapien
caatgtcttttattctctggtaaga

SEQ ID NO: 4154310 - DNA, 25 bp, Homo sapien
gcagccgccggcttatttgtacatt

SEQ ID NO: 4154311 - DNA, 25 bp, Homo sapien
ttgggagcagtatccttctggctta

SEQ ID NO: 4154312 - DNA, 25 bp, Homo sapien
ggcttatgcccaatattgacacagt

SEQ ID NO: 4154313 - DNA, 25 bp, Homo sapien
atgccttcgaagcagccgccggctt

SEQ ID NO: 4154314 - DNA, 25 bp, Homo sapien
tcatttttagtggtttttacagcca

SEQ ID NO: 4154315 - DNA, 25 bp, Homo sapien
tgcttcatttttagtggtttttaca

SEQ ID NO: 4154316 - DNA, 25 bp, Homo sapien
ctgtgcttcatttttagtggttttt

SEQ ID NO: 4154317 - DNA, 25 bp, Homo sapien
catttttagtggtttttacagccat

SEQ ID NO: 4154318 - DNA, 25 bp, Homo sapien
atagagatagatgcttcttgactgt

SEQ ID NO: 4154319 - DNA, 25 bp, Homo sapien
taaggtttgcaaaatatcctcctcc

SEQ ID NO: 4154320 - DNA, 25 bp, Homo sapien
aaggtttgcaaaatatcctcctcct

SEQ ID NO: 4154321 - DNA, 25 bp, Homo sapien
ttcttgactgtcagtggcattttgt

SEQ ID NO: 4154322 - DNA, 25 bp, Homo sapien
catgtgctgtgtctatgacaggact

SEQ ID NO: 4154323 - DNA, 25 bp, Homo sapien
acataacatcattgtcttcccctcc

SEQ ID NO: 4154324 - DNA, 25 bp, Homo sapien
tgattatcaggatcaaagccagctg

SEQ ID NO: 4154325 - DNA, 25 bp, Homo sapien
tgacaggacttatatttggaataaa

SEQ ID NO: 4154326 - DNA, 25 bp, Homo sapien
gaatcctagcgttcactatggccat

SEQ ID NO: 4154327 - DNA, 25 bp, Homo sapien
atcccgtagaccgaatcctagcgtt

SEQ ID NO: 4154328 - DNA, 25 bp, Homo sapien
gtagaccgaatcctagcgttcacta

SEQ ID NO: 4154329 - DNA, 25 bp, Homo sapien
gaccgaatcctagcgttcactatgg

SEQ ID NO: 4154330 - DNA, 25 bp, Homo sapien
cagaccaaggcagggaagaaacaaa

SEQ ID NO: 4154331 - DNA, 25 bp, Homo sapien
gggaagaaacaaagctggctggcag

SEQ ID NO: 4154332 - DNA, 25 bp, Homo sapien
ctgccagaccaaggcagggaagaaa

SEQ ID NO: 4154333 - DNA, 25 bp, Homo sapien
caaggcagggaagaaacaaagctgg

SEQ ID NO: 4154334 - DNA, 25 bp, Homo sapien
gagcatggccatcagtctggtgccg

SEQ ID NO: 4154335 - DNA, 25 bp, Homo sapien
gcccagccactgtggagcatggcca

SEQ ID NO: 4154336 - DNA, 25 bp, Homo sapien
tctggtgccgcttgccagtttccac

SEQ ID NO: 4154337 - DNA, 25 bp, Homo sapien
cagagacaggaagtactttggagac

SEQ ID NO: 4154338 - DNA, 25 bp, Homo sapien
attcagcctgccttttagagtacaa

SEQ ID NO: 4154339 - DNA, 25 bp, Homo sapien
tcatccatttgaattcagcctgcct

SEQ ID NO: 4154340 - DNA, 25 bp, Homo sapien
cagcctgccttttagagtacaacac

SEQ ID NO: 4154341 - DNA, 25 bp, Homo sapien
catccatttgaattcagcctgcctt

SEQ ID NO: 4154342 - DNA, 25 bp, Homo sapien
cttgtccaataaatcttgcatcaac

SEQ ID NO: 4154343 - DNA, 25 bp, Homo sapien
ttccttgtccaataaatcttgcatc

SEQ ID NO: 4154344 - DNA, 25 bp, Homo sapien
caataaatcttgcatcaacatccat

SEQ ID NO: 4154345 - DNA, 25 bp, Homo sapien
tccaataaatcttgcatcaacatcc

SEQ ID NO: 4154346 - DNA, 25 bp, Homo sapien
atgtggagatacaggcacgcttttt

SEQ ID NO: 4154347 - DNA, 25 bp, Homo sapien
tgtggagatacaggcacgctttttc

SEQ ID NO: 4154348 - DNA, 25 bp, Homo sapien
tggagatacaggcacgctttttcac

SEQ ID NO: 4154349 - DNA, 25 bp, Homo sapien
gatgtggagatacaggcacgctttt

SEQ ID NO: 4154350 - DNA, 25 bp, Homo sapien
gcagttccaccttcaacaacggtta

SEQ ID NO: 4154351 - DNA, 25 bp, Homo sapien
cagagtctgttgagctggatttgac

SEQ ID NO: 4154352 - DNA, 25 bp, Homo sapien
ccactggagggaggtgttatcattt

SEQ ID NO: 4154353 - DNA, 25 bp, Homo sapien
tcttgtcgtcaaagtacagagtctg

SEQ ID NO: 4154354 - DNA, 25 bp, Homo sapien
aacatttgaaagaaaatgtattcac

SEQ ID NO: 4154355 - DNA, 25 bp, Homo sapien
aaacatttgaaagaaaatgtattca

SEQ ID NO: 4154356 - DNA, 25 bp, Homo sapien
caaaatgcttgcttactgctgtttc

SEQ ID NO: 4154357 - DNA, 25 bp, Homo sapien
aaaatgcttgcttactgctgtttcc

SEQ ID NO: 4154358 - DNA, 25 bp, Homo sapien
gtttccaagggtggctcacaagagc

SEQ ID NO: 4154359 - DNA, 25 bp, Homo sapien
aaatgcttgcttactgctgtttcca

SEQ ID NO: 4154360 - DNA, 25 bp, Homo sapien
attatgagatatgactgcctttcct

SEQ ID NO: 4154361 - DNA, 25 bp, Homo sapien
tgcaattatgagatatgactgcctt

SEQ ID NO: 4154362 - DNA, 25 bp, Homo sapien
atttgcaattatgagatatgactgc

SEQ ID NO: 4154363 - DNA, 25 bp, Homo sapien
caattatgagatatgactgcctttc

SEQ ID NO: 4154364 - DNA, 25 bp, Homo sapien
catggatatcctcatagaaacaaag

SEQ ID NO: 4154365 - DNA, 25 bp, Homo sapien
taggtgaccgcttttggtgaacacc

SEQ ID NO: 4154366 - DNA, 25 bp, Homo sapien
ggtgaacaccacattgtaagtcatg

SEQ ID NO: 4154367 - DNA, 25 bp, Homo sapien
aacaaagaaagtaggtgttgtcatt

SEQ ID NO: 4154368 - DNA, 25 bp, Homo sapien
caattattgaatgtgtggttcagca

SEQ ID NO: 4154369 - DNA, 25 bp, Homo sapien
caatagatccgttatgaaaaagtac

SEQ ID NO: 4154370 - DNA, 25 bp, Homo sapien
gctaagggaaaagtgttcaatcaac

SEQ ID NO: 4154371 - DNA, 25 bp, Homo sapien
taaataagtcatgcttacagcaggt

SEQ ID NO: 4154372 - DNA, 25 bp, Homo sapien
tagtttattatcattgcaggtgcag

SEQ ID NO: 4154373 - DNA, 25 bp, Homo sapien
ttcaggtaatagaggagtagtttat

SEQ ID NO: 4154374 - DNA, 25 bp, Homo sapien
ttattatcattgcaggtgcagaaac

SEQ ID NO: 4154375 - DNA, 25 bp, Homo sapien
tagaggagtagtttattatcattgc

SEQ ID NO: 4154376 - DNA, 25 bp, Homo sapien
accacctgggctgtggcttcaaaca

SEQ ID NO: 4154377 - DNA, 25 bp, Homo sapien
cacctgggctgtggcttcaaacagc

SEQ ID NO: 4154378 - DNA, 25 bp, Homo sapien
ggctgtggcttcaaacagcttgcag

SEQ ID NO: 4154379 - DNA, 25 bp, Homo sapien
ctgggctgtggcttcaaacagcttg

SEQ ID NO: 4154380 - DNA, 25 bp, Homo sapien
tggtcacataggcagcccaacaacc

SEQ ID NO: 4154381 - DNA, 25 bp, Homo sapien
cactgtagaaaagatgctggctctc

SEQ ID NO: 4154382 - DNA, 25 bp, Homo sapien
caaccagcttacactgtagaaaaga

SEQ ID NO: 4154383 - DNA, 25 bp, Homo sapien
gcccaacaaccagcttacactgtag

SEQ ID NO: 4154384 - DNA, 25 bp, Homo sapien
tagggcacaaatttgttattctcac

SEQ ID NO: 4154385 - DNA, 25 bp, Homo sapien
tgccatgatatagatgccttgttta

SEQ ID NO: 4154386 - DNA, 25 bp, Homo sapien
aggaaagtagtagggcacaaatttg

SEQ ID NO: 4154387 - DNA, 25 bp, Homo sapien
ccttgtttagctgccagaggaaagt

SEQ ID NO: 4154388 - DNA, 25 bp, Homo sapien
gaaccagctcgatcctattgtccct

SEQ ID NO: 4154389 - DNA, 25 bp, Homo sapien
aattcatgccaggaagcgcgaacca

SEQ ID NO: 4154390 - DNA, 25 bp, Homo sapien
ccagaacggtgagatatgccttgga

SEQ ID NO: 4154391 - DNA, 25 bp, Homo sapien
taaagaacaggtgtactgtccttca

SEQ ID NO: 4154392 - DNA, 25 bp, Homo sapien
cctccataactggtgatgagaatcc

SEQ ID NO: 4154393 - DNA, 25 bp, Homo sapien
tgaaccatcttatatcagctgcagg

SEQ ID NO: 4154394 - DNA, 25 bp, Homo sapien
tgagaatccactaatctgaggcttt

SEQ ID NO: 4154395 - DNA, 25 bp, Homo sapien
ggtttactaccagatgttttgcaag

SEQ ID NO: 4154396 - DNA, 25 bp, Homo sapien
ccggtccactcggaagtccagtgtg

SEQ ID NO: 4154397 - DNA, 25 bp, Homo sapien
tggcattgagggattcgtgatctac

SEQ ID NO: 4154398 - DNA, 25 bp, Homo sapien
cgtgatctactctgcagatgaccgc

SEQ ID NO: 4154399 - DNA, 25 bp, Homo sapien
gaatgtcttgcgatttgcatcctct

SEQ ID NO: 4154400 - DNA, 25 bp, Homo sapien
gattaacccatcttcttcgtttcca

SEQ ID NO: 4154401 - DNA, 25 bp, Homo sapien
catttgggccagtcttttaggttat

SEQ ID NO: 4154402 - DNA, 25 bp, Homo sapien
cctccttctcattcatggaaagttc

SEQ ID NO: 4154403 - DNA, 25 bp, Homo sapien
tatgctccataaatcccagattaac

SEQ ID NO: 4154404 - DNA, 25 bp, Homo sapien
tcaaatctgatcagataccattgct

SEQ ID NO: 4154405 - DNA, 25 bp, Homo sapien
caaatctgatcagataccattgctg

SEQ ID NO: 4154406 - DNA, 25 bp, Homo sapien
ggagtcgatggtataatcttaactg

SEQ ID NO: 4154407 - DNA, 25 bp, Homo sapien
tgtccttcttgtggaaaaggagtcg

SEQ ID NO: 4154408 - DNA, 25 bp, Homo sapien
tggaaaaggagtcgatggtataatc

SEQ ID NO: 4154409 - DNA, 25 bp, Homo sapien
gatggtataatcttaactgatggtg

SEQ ID NO: 4154410 - DNA, 25 bp, Homo sapien
tacacatccaagattatttctaggt

SEQ ID NO: 4154411 - DNA, 25 bp, Homo sapien
ttacacatccaagattatttctagg

SEQ ID NO: 4154412 - DNA, 25 bp, Homo sapien
acacatccaagattatttctaggta

SEQ ID NO: 4154413 - DNA, 25 bp, Homo sapien
cacatccaagattatttctaggtaa

SEQ ID NO: 4154414 - DNA, 25 bp, Homo sapien
tcacatcccctcttttaggttcttg

SEQ ID NO: 4154415 - DNA, 25 bp, Homo sapien
acatcccctcttttaggttcttgct

SEQ ID NO: 4154416 - DNA, 25 bp, Homo sapien
ttaatcgttcacatcccctctttta

SEQ ID NO: 4154417 - DNA, 25 bp, Homo sapien
aatcgttcacatcccctcttttagg

SEQ ID NO: 4154418 - DNA, 25 bp, Homo sapien
gtaattctccgccatcctttgtcca

SEQ ID NO: 4154419 - DNA, 25 bp, Homo sapien
gaacatattccgcactgctttggcc

SEQ ID NO: 4154420 - DNA, 25 bp, Homo sapien
tgtggcttcacatcgatatgtacca

SEQ ID NO: 4154421 - DNA, 25 bp, Homo sapien
ccattcggtcaggatctggtaattc

SEQ ID NO: 4154422 - DNA, 25 bp, Homo sapien
gctaaatttagggtcaagtactgac

SEQ ID NO: 4154423 - DNA, 25 bp, Homo sapien
aatctgttgcttaatgattgctgca

SEQ ID NO: 4154424 - DNA, 25 bp, Homo sapien
gaaaaatatgatagatggattggaa

SEQ ID NO: 4154425 - DNA, 25 bp, Homo sapien
ctgacaactctaaaggaaatgaatt

SEQ ID NO: 4154426 - DNA, 25 bp, Homo sapien
catgatttggtccaatactttaagt

SEQ ID NO: 4154427 - DNA, 25 bp, Homo sapien
tcacatgatttggtccaatacttta

SEQ ID NO: 4154428 - DNA, 25 bp, Homo sapien
atgatttggtccaatactttaagtt

SEQ ID NO: 4154429 - DNA, 25 bp, Homo sapien
cacatgatttggtccaatactttaa

SEQ ID NO: 4154430 - DNA, 25 bp, Homo sapien
ggatgatagtagtgggaagcaaagt

SEQ ID NO: 4154431 - DNA, 25 bp, Homo sapien
ttgggctggttgttatggctacagt

SEQ ID NO: 4154432 - DNA, 25 bp, Homo sapien
tatggctacagtggttgtgactgtt

SEQ ID NO: 4154433 - DNA, 25 bp, Homo sapien
tagtgggaagcaaagtgttgggaac

SEQ ID NO: 4154434 - DNA, 25 bp, Homo sapien
tcagtggtggaagtaagtgcagata

SEQ ID NO: 4154435 - DNA, 25 bp, Homo sapien
tcatcaaacttaatggatagggagt

SEQ ID NO: 4154436 - DNA, 25 bp, Homo sapien
taaagcaatggaagggtatcagagg

SEQ ID NO: 4154437 - DNA, 25 bp, Homo sapien
cagaaatcgcacagaaattttcagg

SEQ ID NO: 4154438 - DNA, 25 bp, Homo sapien
cagattattagaatgtgctaaaagc

SEQ ID NO: 4154439 - DNA, 25 bp, Homo sapien
acagattattagaatgtgctaaaag

SEQ ID NO: 4154440 - DNA, 25 bp, Homo sapien
gtttcatgacaatcagtgcacagat

SEQ ID NO: 4154441 - DNA, 25 bp, Homo sapien
ttcatgacaatcagtgcacagatta

SEQ ID NO: 4154442 - DNA, 25 bp, Homo sapien
acggaggagagccaggtcggccggc

SEQ ID NO: 4154443 - DNA, 25 bp, Homo sapien
ggtcggactgcgtgcgcttcgcgtg

SEQ ID NO: 4154444 - DNA, 25 bp, Homo sapien
ccgctggtccgggtcacggaggaga

SEQ ID NO: 4154445 - DNA, 25 bp, Homo sapien
gtcggactgcgtgcgcttcgcgtgc

SEQ ID NO: 4154446 - DNA, 25 bp, Homo sapien
cctcatcttgcccttcaccctcttc

SEQ ID NO: 4154447 - DNA, 25 bp, Homo sapien
caagggatagaggtaaaatgtcctc

SEQ ID NO: 4154448 - DNA, 25 bp, Homo sapien
tgtcctcatcttgcccttcaccctc

SEQ ID NO: 4154449 - DNA, 25 bp, Homo sapien
cttcaagggatagaggtaaaatgtc

SEQ ID NO: 4154450 - DNA, 25 bp, Homo sapien
gatttcttcggcctcctgtccatcc

SEQ ID NO: 4154451 - DNA, 25 bp, Homo sapien
atttcttcggcctcctgtccatcca

SEQ ID NO: 4154452 - DNA, 25 bp, Homo sapien
ctgccagctacacagttactccatc

SEQ ID NO: 4154453 - DNA, 25 bp, Homo sapien
tgccagctacacagttactccatct

SEQ ID NO: 4154454 - DNA, 25 bp, Homo sapien
agttaccttggtgaacactgtggta

SEQ ID NO: 4154455 - DNA, 25 bp, Homo sapien
caagttaccttggtgaacactgtgg

SEQ ID NO: 4154456 - DNA, 25 bp, Homo sapien
gttaccttggtgaacactgtggtat

SEQ ID NO: 4154457 - DNA, 25 bp, Homo sapien
aagttaccttggtgaacactgtggt

SEQ ID NO: 4154458 - DNA, 25 bp, Homo sapien
ggtgtattgaatttgagttgtccca

SEQ ID NO: 4154459 - DNA, 25 bp, Homo sapien
gcatggtgttcctccggtgtattga

SEQ ID NO: 4154460 - DNA, 25 bp, Homo sapien
ttctacacatgtcagcatggtgttc

SEQ ID NO: 4154461 - DNA, 25 bp, Homo sapien
tcagcatggtgttcctccggtgtat

SEQ ID NO: 4154462 - DNA, 25 bp, Homo sapien
agtgaagcttggctgagagcgtgtc

SEQ ID NO: 4154463 - DNA, 25 bp, Homo sapien
aacagtgaagcttggctgagagcgt

SEQ ID NO: 4154464 - DNA, 25 bp, Homo sapien
gcttggctgagagcgtgtcagtatt

SEQ ID NO: 4154465 - DNA, 25 bp, Homo sapien
agcgtgtcagtattgggtaagtcac

SEQ ID NO: 4154466 - DNA, 25 bp, Homo sapien
ggtggatggaagctctatatctttc

SEQ ID NO: 4154467 - DNA, 25 bp, Homo sapien
cttcatagatggtggatggaagctc

SEQ ID NO: 4154468 - DNA, 25 bp, Homo sapien
ggatggaagctctatatctttcctc

SEQ ID NO: 4154469 - DNA, 25 bp, Homo sapien
gatggtggatggaagctctatatct

SEQ ID NO: 4154470 - DNA, 25 bp, Homo sapien
tatagggtttaacgtgtgtgtccgc

SEQ ID NO: 4154471 - DNA, 25 bp, Homo sapien
gtgtgtccgccattaaatccaggtt

SEQ ID NO: 4154472 - DNA, 25 bp, Homo sapien
tattttcgatggttttggaattatc

SEQ ID NO: 4154473 - DNA, 25 bp, Homo sapien
cgatggttttggaattatctgtggg

SEQ ID NO: 4154474 - DNA, 25 bp, Homo sapien
atgtgttggcctgtgattaacaaaa

SEQ ID NO: 4154475 - DNA, 25 bp, Homo sapien
gataatgtgttggcctgtgattaac

SEQ ID NO: 4154476 - DNA, 25 bp, Homo sapien
taatgtgttggcctgtgattaacaa

SEQ ID NO: 4154477 - DNA, 25 bp, Homo sapien
attaacaaaatttgtgctagctttt

SEQ ID NO: 4154478 - DNA, 25 bp, Homo sapien
tcccataaacatggtgagtcatttc

SEQ ID NO: 4154479 - DNA, 25 bp, Homo sapien
tatttagttcatggaggctctccca

SEQ ID NO: 4154480 - DNA, 25 bp, Homo sapien
taggctatgcctcatatagaacgtt

SEQ ID NO: 4154481 - DNA, 25 bp, Homo sapien
tacataatgggaaaatacttttgcc

SEQ ID NO: 4154482 - DNA, 25 bp, Homo sapien
ttcctcaagggctccacaccaaact

SEQ ID NO: 4154483 - DNA, 25 bp, Homo sapien
ctcttttagtactcatccctttgac

SEQ ID NO: 4154484 - DNA, 25 bp, Homo sapien
tgcttctcttttagtactcatccct

SEQ ID NO: 4154485 - DNA, 25 bp, Homo sapien
ttctcttttagtactcatccctttg

SEQ ID NO: 4154486 - DNA, 25 bp, Homo sapien
cattcagattaaattgtttgtgttt

SEQ ID NO: 4154487 - DNA, 25 bp, Homo sapien
ttcagattaaattgtttgtgtttgt

SEQ ID NO: 4154488 - DNA, 25 bp, Homo sapien
tcattcagattaaattgtttgtgtt

SEQ ID NO: 4154489 - DNA, 25 bp, Homo sapien
attcagattaaattgtttgtgtttg

SEQ ID NO: 4154490 - DNA, 25 bp, Homo sapien
cacattctgtgatatggacatatat

SEQ ID NO: 4154491 - DNA, 25 bp, Homo sapien
acattctgtgatatggacatatatc

SEQ ID NO: 4154492 - DNA, 25 bp, Homo sapien
ctccatctgaaaatatgtgtgtgta

SEQ ID NO: 4154493 - DNA, 25 bp, Homo sapien
tgaaaatatgtgtgtgtatgtctgc

SEQ ID NO: 4154494 - DNA, 25 bp, Homo sapien
tctgaaaatatgtgtgtgtatgtct

SEQ ID NO: 4154495 - DNA, 25 bp, Homo sapien
aaaatatgtgtgtgtatgtctgcat

SEQ ID NO: 4154496 - DNA, 25 bp, Homo sapien
ttctggccagccaaagcattaggat

SEQ ID NO: 4154497 - DNA, 25 bp, Homo sapien
ccaagcagaaagatagaacacagcg

SEQ ID NO: 4154498 - DNA, 25 bp, Homo sapien
tcctatgagagcatggtcagggcca

SEQ ID NO: 4154499 - DNA, 25 bp, Homo sapien
tatgccttgccagatatcgaccaag

SEQ ID NO: 4154500 - DNA, 25 bp, Homo sapien
catctggtgcatcttcagctccttt

SEQ ID NO: 4154501 - DNA, 25 bp, Homo sapien
ggctgccttcagcattgataatggc

SEQ ID NO: 4154502 - DNA, 25 bp, Homo sapien
tgataatggctgtatcagcatctgg

SEQ ID NO: 4154503 - DNA, 25 bp, Homo sapien
ttggctgccttcagcattgataatg

SEQ ID NO: 4154504 - DNA, 25 bp, Homo sapien
tctgaaaattgtgccctatggatac

SEQ ID NO: 4154505 - DNA, 25 bp, Homo sapien
tttaaaacctgaggctgtgcactgg

SEQ ID NO: 4154506 - DNA, 25 bp, Homo sapien
tgcaattcgtacacatggctcctgt

SEQ ID NO: 4154507 - DNA, 25 bp, Homo sapien
tacttgtgaaagctgtccaatggca

SEQ ID NO: 4154508 - DNA, 25 bp, Homo sapien
aatccttgggtgatgacttaactgc

SEQ ID NO: 4154509 - DNA, 25 bp, Homo sapien
tgctccatattctactaagggtgtg

SEQ ID NO: 4154510 - DNA, 25 bp, Homo sapien
tctatgcagacaaaatgaagtgggc

SEQ ID NO: 4154511 - DNA, 25 bp, Homo sapien
taagcgccgctaagtacacattgaa

SEQ ID NO: 4154512 - DNA, 25 bp, Homo sapien
tcatctgattcactaggtgattccc

SEQ ID NO: 4154513 - DNA, 25 bp, Homo sapien
tctgattcactaggtgattcccaag

SEQ ID NO: 4154514 - DNA, 25 bp, Homo sapien
ttttcagccagtgcagattcctctc

SEQ ID NO: 4154515 - DNA, 25 bp, Homo sapien
ggcttccagatatttgcatcccaat

SEQ ID NO: 4154516 - DNA, 25 bp, Homo sapien
tttagcatacgccagtccttctgag

SEQ ID NO: 4154517 - DNA, 25 bp, Homo sapien
tgttattttagcatacgccagtcct

SEQ ID NO: 4154518 - DNA, 25 bp, Homo sapien
tagcatacgccagtccttctgagcc

SEQ ID NO: 4154519 - DNA, 25 bp, Homo sapien
tattttagcatacgccagtccttct

SEQ ID NO: 4154520 - DNA, 25 bp, Homo sapien
ttcataggccttagacaacaaactc

SEQ ID NO: 4154521 - DNA, 25 bp, Homo sapien
cataggccttagacaacaaactcat

SEQ ID NO: 4154522 - DNA, 25 bp, Homo sapien
caattcataggccttagacaacaaa

SEQ ID NO: 4154523 - DNA, 25 bp, Homo sapien
aattcataggccttagacaacaaac

SEQ ID NO: 4154524 - DNA, 25 bp, Homo sapien
ctggtggagtggtgtagtcgtggaa

SEQ ID NO: 4154525 - DNA, 25 bp, Homo sapien
ttggggcttcccaaggcattcaaca

SEQ ID NO: 4154526 - DNA, 25 bp, Homo sapien
tacttcgggtaactctgctgcctct

SEQ ID NO: 4154527 - DNA, 25 bp, Homo sapien
aggcattcaacaggacaagtacttc

SEQ ID NO: 4154528 - DNA, 25 bp, Homo sapien
tgatgctaatgaattctatcgggcc

SEQ ID NO: 4154529 - DNA, 25 bp, Homo sapien
atgctaatgaattctatcgggccac

SEQ ID NO: 4154530 - DNA, 25 bp, Homo sapien
tatcgctgtctttgatgctaatgaa

SEQ ID NO: 4154531 - DNA, 25 bp, Homo sapien
cttatcgctgtctttgatgctaatg

SEQ ID NO: 4154532 - DNA, 25 bp, Homo sapien
gataaatgttcaaacttgggctgta

SEQ ID NO: 4154533 - DNA, 25 bp, Homo sapien
ctgagaagaaccttggctgtaggca

SEQ ID NO: 4154534 - DNA, 25 bp, Homo sapien
gcattgcaatgagactgactgttga

SEQ ID NO: 4154535 - DNA, 25 bp, Homo sapien
gatgtcccatgtgttatgcccattg

SEQ ID NO: 4154536 - DNA, 25 bp, Homo sapien
caggtcaaacagaacctcaaaaatg

SEQ ID NO: 4154537 - DNA, 25 bp, Homo sapien
cacactttgagaaatccaagctaat

SEQ ID NO: 4154538 - DNA, 25 bp, Homo sapien
tcccaattatagaatctcactctcc

SEQ ID NO: 4154539 - DNA, 25 bp, Homo sapien
tgtttttggcccaattcacactttg

SEQ ID NO: 4154540 - DNA, 25 bp, Homo sapien
ctctcagcttgacatgagaattcat

SEQ ID NO: 4154541 - DNA, 25 bp, Homo sapien
gaccattctcaactctcagcttgac

SEQ ID NO: 4154542 - DNA, 25 bp, Homo sapien
attctcaactctcagcttgacatga

SEQ ID NO: 4154543 - DNA, 25 bp, Homo sapien
tcaactctcagcttgacatgagaat

SEQ ID NO: 4154544 - DNA, 25 bp, Homo sapien
tcccccgcatttggttagtggctat

SEQ ID NO: 4154545 - DNA, 25 bp, Homo sapien
tgtacccacacttcccccgcatttg

SEQ ID NO: 4154546 - DNA, 25 bp, Homo sapien
gaatgatgaactgagaaagcatcca

SEQ ID NO: 4154547 - DNA, 25 bp, Homo sapien
acaggtctggtgaaacaactcatga

SEQ ID NO: 4154548 - DNA, 25 bp, Homo sapien
ccaactgttcatgcagacctgtaaa

SEQ ID NO: 4154549 - DNA, 25 bp, Homo sapien
gatgaactgagaaagcatccaactg

SEQ ID NO: 4154550 - DNA, 25 bp, Homo sapien
aaacatacaggatgcttcatgaatt

SEQ ID NO: 4154551 - DNA, 25 bp, Homo sapien
tactaatctttgtgtcattctaatt

SEQ ID NO: 4154552 - DNA, 25 bp, Homo sapien
ttaatatatgtactgttgaagtgag

SEQ ID NO: 4154553 - DNA, 25 bp, Homo sapien
atatatgtactgttgaagtgagcag

SEQ ID NO: 4154554 - DNA, 25 bp, Homo sapien
gattaggaggagcacggagacctct

SEQ ID NO: 4154555 - DNA, 25 bp, Homo sapien
gaagacaccgtagaaagcatctcca

SEQ ID NO: 4154556 - DNA, 25 bp, Homo sapien
gtagacattcgttttgaagacaccg

SEQ ID NO: 4154557 - DNA, 25 bp, Homo sapien
tctcaggtcgggtttgtctcacagc

SEQ ID NO: 4154558 - DNA, 25 bp, Homo sapien
ttattgtggccattactttgctgct

SEQ ID NO: 4154559 - DNA, 25 bp, Homo sapien
ttgttattgtggccattactttgct

SEQ ID NO: 4154560 - DNA, 25 bp, Homo sapien
gttattgtggccattactttgctgc

SEQ ID NO: 4154561 - DNA, 25 bp, Homo sapien
tattaatttttatgatatccttcat

SEQ ID NO: 4154562 - DNA, 25 bp, Homo sapien
tatattgttgcatgataatcctggc

SEQ ID NO: 4154563 - DNA, 25 bp, Homo sapien
gcatgataatcctggcggttggcac

SEQ ID NO: 4154564 - DNA, 25 bp, Homo sapien
cctggcggttggcactaatattatc

SEQ ID NO: 4154565 - DNA, 25 bp, Homo sapien
gcactaatattatcaggcagtccta

SEQ ID NO: 4154566 - DNA, 25 bp, Homo sapien
catttttgccccaccaagatgttgt

SEQ ID NO: 4154567 - DNA, 25 bp, Homo sapien
taatctctggcgtttgctgctactg

SEQ ID NO: 4154568 - DNA, 25 bp, Homo sapien
aagcattggccctttcactgttgag

SEQ ID NO: 4154569 - DNA, 25 bp, Homo sapien
ggcctggacccaaccaagcattggc

SEQ ID NO: 4154570 - DNA, 25 bp, Homo sapien
tttcaagcaggtcacaactttaggc

SEQ ID NO: 4154571 - DNA, 25 bp, Homo sapien
tcagcaatttgagtgtcggacattg

SEQ ID NO: 4154572 - DNA, 25 bp, Homo sapien
taccatgtaacgcttgtagggctct

SEQ ID NO: 4154573 - DNA, 25 bp, Homo sapien
gaaactctgacaaatatgtccatgg

SEQ ID NO: 4154574 - DNA, 25 bp, Homo sapien
ttaatgcgttgctacattgtcagca

SEQ ID NO: 4154575 - DNA, 25 bp, Homo sapien
tcaaggaaggtcatcttctatcagg

SEQ ID NO: 4154576 - DNA, 25 bp, Homo sapien
cttatggaccttgagagtttgcttg

SEQ ID NO: 4154577 - DNA, 25 bp, Homo sapien
caatcatgatgattgatcaggtgac

SEQ ID NO: 4154578 - DNA, 25 bp, Homo sapien
tgacgatgtcatagccagaccaccc

SEQ ID NO: 4154579 - DNA, 25 bp, Homo sapien
aactcttttgccctgtttcccacat

SEQ ID NO: 4154580 - DNA, 25 bp, Homo sapien
acgttcaagaccctttctccttcat

SEQ ID NO: 4154581 - DNA, 25 bp, Homo sapien
tctccttcattcaaactcttttgcc

SEQ ID NO: 4154582 - DNA, 25 bp, Homo sapien
cacgttcaagaccctttctccttca

SEQ ID NO: 4154583 - DNA, 25 bp, Homo sapien
tctgcccagttgtatcagggaatac

SEQ ID NO: 4154584 - DNA, 25 bp, Homo sapien
accagacagaccgtttccgtaccat

SEQ ID NO: 4154585 - DNA, 25 bp, Homo sapien
tccgtaccatggaacatctgcccag

SEQ ID NO: 4154586 - DNA, 25 bp, Homo sapien
tcattgctgttcagaaacgtctcct

SEQ ID NO: 4154587 - DNA, 25 bp, Homo sapien
gaatttttggtccacctctactgta

SEQ ID NO: 4154588 - DNA, 25 bp, Homo sapien
cagaggtcaaaagcggagctggtct

SEQ ID NO: 4154589 - DNA, 25 bp, Homo sapien
gctggtctcagcattagctttcaag

SEQ ID NO: 4154590 - DNA, 25 bp, Homo sapien
tgtaatccaggtatgatgacttatc

SEQ ID NO: 4154591 - DNA, 25 bp, Homo sapien
tcttcttcaatagcctatcttcatg

SEQ ID NO: 4154592 - DNA, 25 bp, Homo sapien
tcttcaatagcctatcttcatgcat

SEQ ID NO: 4154593 - DNA, 25 bp, Homo sapien
ttcttcaatagcctatcttcatgca

SEQ ID NO: 4154594 - DNA, 25 bp, Homo sapien
ttcttcttcaatagcctatcttcat

SEQ ID NO: 4154595 - DNA, 25 bp, Homo sapien
ctgaggacagaggccaagtaattct

SEQ ID NO: 4154596 - DNA, 25 bp, Homo sapien
gaggccaagtaattcttcattaaac

SEQ ID NO: 4154597 - DNA, 25 bp, Homo sapien
gaggacagaggccaagtaattcttc

SEQ ID NO: 4154598 - DNA, 25 bp, Homo sapien
ggccaagtaattcttcattaaacac

SEQ ID NO: 4154599 - DNA, 25 bp, Homo sapien
tctgtgtgcgccaagtgcgtgcgtt

SEQ ID NO: 4154600 - DNA, 25 bp, Homo sapien
catggggtaagtgtttgtctgtgtg

SEQ ID NO: 4154601 - DNA, 25 bp, Homo sapien
agtgcgtgcgttttcatttccaatg

SEQ ID NO: 4154602 - DNA, 25 bp, Homo sapien
tgtgtgcgccaagtgcgtgcgtttt

SEQ ID NO: 4154603 - DNA, 25 bp, Homo sapien
gggtttgttggcaactgagctttcc

SEQ ID NO: 4154604 - DNA, 25 bp, Homo sapien
tcagggtttgttggcaactgagctt

SEQ ID NO: 4154605 - DNA, 25 bp, Homo sapien
agggtttgttggcaactgagctttc

SEQ ID NO: 4154606 - DNA, 25 bp, Homo sapien
gttggcaactgagctttccaaatca

SEQ ID NO: 4154607 - DNA, 25 bp, Homo sapien
ctgcagatacgaacagaaaagcagg

SEQ ID NO: 4154608 - DNA, 25 bp, Homo sapien
gaatcactgataccaccattctccc

SEQ ID NO: 4154609 - DNA, 25 bp, Homo sapien
actccacagcattgaaaaaggcact

SEQ ID NO: 4154610 - DNA, 25 bp, Homo sapien
tcactgataccaccattctcccatc

SEQ ID NO: 4154611 - DNA, 25 bp, Homo sapien
gataccaccattctcccatcctgta

SEQ ID NO: 4154612 - DNA, 25 bp, Homo sapien
actgaacaggcccaactgaaatgaa

SEQ ID NO: 4154613 - DNA, 25 bp, Homo sapien
gaggttgtcccaaatcagtcaagcc

SEQ ID NO: 4154614 - DNA, 25 bp, Homo sapien
tcctagacagccagaactcggtcat

SEQ ID NO: 4154615 - DNA, 25 bp, Homo sapien
ccaagaaaatcagtaggctcataag

SEQ ID NO: 4154616 - DNA, 25 bp, Homo sapien
catcatagtggatcccagcaggtaa

SEQ ID NO: 4154617 - DNA, 25 bp, Homo sapien
taaatgtggccgctttggttaagac

SEQ ID NO: 4154618 - DNA, 25 bp, Homo sapien
tctgcgatgataaaaggctggaccc

SEQ ID NO: 4154619 - DNA, 25 bp, Homo sapien
ggaacagcctcagtggtagacatca

SEQ ID NO: 4154620 - DNA, 25 bp, Homo sapien
ttggaaatgctacttgagatgcctt

SEQ ID NO: 4154621 - DNA, 25 bp, Homo sapien
tccaaatttggcagatgctatcttg

SEQ ID NO: 4154622 - DNA, 25 bp, Homo sapien
tacttgagatgccttcatccctcat

SEQ ID NO: 4154623 - DNA, 25 bp, Homo sapien
ttactccaaatttggcagatgctat

SEQ ID NO: 4154624 - DNA, 25 bp, Homo sapien
gaaaatcattattgtcaacaggctt

SEQ ID NO: 4154625 - DNA, 25 bp, Homo sapien
tggaaaatcattattgtcaacaggc

SEQ ID NO: 4154626 - DNA, 25 bp, Homo sapien
ggaaaatcattattgtcaacaggct

SEQ ID NO: 4154627 - DNA, 25 bp, Homo sapien
taatttcctcaagttcatcctccat

SEQ ID NO: 4154628 - DNA, 25 bp, Homo sapien
caagttcagaggttccacctggtag

SEQ ID NO: 4154629 - DNA, 25 bp, Homo sapien
tctgataatttcctcaagttcatcc

SEQ ID NO: 4154630 - DNA, 25 bp, Homo sapien
aaatcaagttcagaggttccacctg

SEQ ID NO: 4154631 - DNA, 25 bp, Homo sapien
tgtggaaattgtgaatttcggtgtc

SEQ ID NO: 4154632 - DNA, 25 bp, Homo sapien
taatactgttgtggaaattgtgaat

SEQ ID NO: 4154633 - DNA, 25 bp, Homo sapien
actgttgtggaaattgtgaatttcg

SEQ ID NO: 4154634 - DNA, 25 bp, Homo sapien
ttaatactgttgtggaaattgtgaa

SEQ ID NO: 4154635 - DNA, 25 bp, Homo sapien
gccattatcacattgccctttctca

SEQ ID NO: 4154636 - DNA, 25 bp, Homo sapien
tcaaggctggccattatcacattgc

SEQ ID NO: 4154637 - DNA, 25 bp, Homo sapien
agcagtgttggcagcatttttggga

SEQ ID NO: 4154638 - DNA, 25 bp, Homo sapien
cagcagtgttggcagcatttttggg

SEQ ID NO: 4154639 - DNA, 25 bp, Homo sapien
tgctcttaagttatagaaaatcaaa

SEQ ID NO: 4154640 - DNA, 25 bp, Homo sapien
ttaagatggtcgagaaatatgtttt

SEQ ID NO: 4154641 - DNA, 25 bp, Homo sapien
tctttgtcagttattaaatcagtgt

SEQ ID NO: 4154642 - DNA, 25 bp, Homo sapien
cagagcatttgcacagtaatgccag

SEQ ID NO: 4154643 - DNA, 25 bp, Homo sapien
tatgctgtggggctcatgttctgag

SEQ ID NO: 4154644 - DNA, 25 bp, Homo sapien
ccaagtcgttgtaggattcatcatc

SEQ ID NO: 4154645 - DNA, 25 bp, Homo sapien
tgggccctgactaaccagcagcaat

SEQ ID NO: 4154646 - DNA, 25 bp, Homo sapien
aaaaccaagtcgttgtaggattcat

SEQ ID NO: 4154647 - DNA, 25 bp, Homo sapien
gcatcttagaactgtgtattagcca

SEQ ID NO: 4154648 - DNA, 25 bp, Homo sapien
taacaactatctgaacacaggagag

SEQ ID NO: 4154649 - DNA, 25 bp, Homo sapien
ggtgccacacactcgcaatggtttc

SEQ ID NO: 4154650 - DNA, 25 bp, Homo sapien
tagaagcctacactgttcaatcccc

SEQ ID NO: 4154651 - DNA, 25 bp, Homo sapien
gcagaataagcaatctttgctgaat

SEQ ID NO: 4154652 - DNA, 25 bp, Homo sapien
ttgctgaatgaactgataaggtctt

SEQ ID NO: 4154653 - DNA, 25 bp, Homo sapien
ggtggttgaaatatgcatgaaaggc

SEQ ID NO: 4154654 - DNA, 25 bp, Homo sapien
tgaaatactgatatgcagaataagc

SEQ ID NO: 4154655 - DNA, 25 bp, Homo sapien
caagtgtaaccagtctttgagttgc

SEQ ID NO: 4154656 - DNA, 25 bp, Homo sapien
ttttttgtcagtgcatccaagtgta

SEQ ID NO: 4154657 - DNA, 25 bp, Homo sapien
ggtttagatgctaattttttgtcag

SEQ ID NO: 4154658 - DNA, 25 bp, Homo sapien
ccagtctttgagttgcagtgatcat

SEQ ID NO: 4154659 - DNA, 25 bp, Homo sapien
tttaattctataggattcaggctcc

SEQ ID NO: 4154660 - DNA, 25 bp, Homo sapien
tgcttagagcttgtgatagcgttca

SEQ ID NO: 4154661 - DNA, 25 bp, Homo sapien
gatagcgttcagtaccattctccaa

SEQ ID NO: 4154662 - DNA, 25 bp, Homo sapien
ccattctccaatctgagagtgtggt

SEQ ID NO: 4154663 - DNA, 25 bp, Homo sapien
ttaatcacgaaccagcctcaagtta

SEQ ID NO: 4154664 - DNA, 25 bp, Homo sapien
taatcacgaaccagcctcaagttac

SEQ ID NO: 4154665 - DNA, 25 bp, Homo sapien
tgcgtagcatgattttacattgctg

SEQ ID NO: 4154666 - DNA, 25 bp, Homo sapien
cttgcgtagcatgattttacattgc

SEQ ID NO: 4154667 - DNA, 25 bp, Homo sapien
ccaacattgacttgcgtagcatgat

SEQ ID NO: 4154668 - DNA, 25 bp, Homo sapien
cattgacttgcgtagcatgatttta

SEQ ID NO: 4154669 - DNA, 25 bp, Homo sapien
tttcttgtcaagattatttcaacac

SEQ ID NO: 4154670 - DNA, 25 bp, Homo sapien
catgctcttgtcatttcttgtcaag

SEQ ID NO: 4154671 - DNA, 25 bp, Homo sapien
aatatccaatatctctactttgcag

SEQ ID NO: 4154672 - DNA, 25 bp, Homo sapien
aacacctgctacttcccatttttag

SEQ ID NO: 4154673 - DNA, 25 bp, Homo sapien
aaagaagcatgaaaccttcccaggt

SEQ ID NO: 4154674 - DNA, 25 bp, Homo sapien
aagaagcatgaaaccttcccaggtg

SEQ ID NO: 4154675 - DNA, 25 bp, Homo sapien
aaaagaagcatgaaaccttcccagg

SEQ ID NO: 4154676 - DNA, 25 bp, Homo sapien
ctgaccaaagtacaggtacttcaga

SEQ ID NO: 4154677 - DNA, 25 bp, Homo sapien
tgaccaaagtacaggtacttcagag

SEQ ID NO: 4154678 - DNA, 25 bp, Homo sapien
gaccaaagtacaggtacttcagagt

SEQ ID NO: 4154679 - DNA, 25 bp, Homo sapien
ttatctcgacccagtatctcagctc

SEQ ID NO: 4154680 - DNA, 25 bp, Homo sapien
cgttttcagcatttactctgactgg

SEQ ID NO: 4154681 - DNA, 25 bp, Homo sapien
gactggaactcgtagtctgaaaata

SEQ ID NO: 4154682 - DNA, 25 bp, Homo sapien
cacaggctcattaggcttcgaggga

SEQ ID NO: 4154683 - DNA, 25 bp, Homo sapien
ctccagctgggttacttgaaagtga

SEQ ID NO: 4154684 - DNA, 25 bp, Homo sapien
tctggtccagatgacactcagtttg

SEQ ID NO: 4154685 - DNA, 25 bp, Homo sapien
taatagcagcaatctcatgaggtcc

SEQ ID NO: 4154686 - DNA, 25 bp, Homo sapien
taaagccttctacgttattctggtc

SEQ ID NO: 4154687 - DNA, 25 bp, Homo sapien
cctctattcagcatgttccaagtct

SEQ ID NO: 4154688 - DNA, 25 bp, Homo sapien
ctacgtgtctggcacttctgttccc

SEQ ID NO: 4154689 - DNA, 25 bp, Homo sapien
catgttccaagtctgctcctgttct

SEQ ID NO: 4154690 - DNA, 25 bp, Homo sapien
gttctccaaatattatctacgtgtc

SEQ ID NO: 4154691 - DNA, 25 bp, Homo sapien
ctacagatcacttcatccaacaatc

SEQ ID NO: 4154692 - DNA, 25 bp, Homo sapien
cagatcacttcatccaacaatcaca

SEQ ID NO: 4154693 - DNA, 25 bp, Homo sapien
tacagatcacttcatccaacaatca

SEQ ID NO: 4154694 - DNA, 25 bp, Homo sapien
tctacagatcacttcatccaacaat

SEQ ID NO: 4154695 - DNA, 25 bp, Homo sapien
ttggaatcttcttctagcgattgtc

SEQ ID NO: 4154696 - DNA, 25 bp, Homo sapien
tgtcgctttgaaccaaacttcttac

SEQ ID NO: 4154697 - DNA, 25 bp, Homo sapien
tcagaacaagctgttcttggaatct

SEQ ID NO: 4154698 - DNA, 25 bp, Homo sapien
tctagcgattgtcgctttgaaccaa

SEQ ID NO: 4154699 - DNA, 25 bp, Homo sapien
tggaaaatgacattgtcagatcatc

SEQ ID NO: 4154700 - DNA, 25 bp, Homo sapien
atctttctatcagtcccttggaaaa

SEQ ID NO: 4154701 - DNA, 25 bp, Homo sapien
caatctttctatcagtcccttggaa

SEQ ID NO: 4154702 - DNA, 25 bp, Homo sapien
tcaatctttctatcagtcccttgga

SEQ ID NO: 4154703 - DNA, 25 bp, Homo sapien
gcctgtttattctgattcagtccaa

SEQ ID NO: 4154704 - DNA, 25 bp, Homo sapien
tcaaatctgttccagcactgagtct

SEQ ID NO: 4154705 - DNA, 25 bp, Homo sapien
gagaacaagtgtctgcattgcctgt

SEQ ID NO: 4154706 - DNA, 25 bp, Homo sapien
cactgagtcttgattgtgattcaga

SEQ ID NO: 4154707 - DNA, 25 bp, Homo sapien
taaaggcaccaaacagcactctctg

SEQ ID NO: 4154708 - DNA, 25 bp, Homo sapien
acaaagtccggcagccaagtgccat

SEQ ID NO: 4154709 - DNA, 25 bp, Homo sapien
cagcactgtgtgtctagctcgaagt

SEQ ID NO: 4154710 - DNA, 25 bp, Homo sapien
ctgaaggattgtaaaggcaccaaac

SEQ ID NO: 4154711 - DNA, 25 bp, Homo sapien
tatatgctatttcaagcgtgttttg

SEQ ID NO: 4154712 - DNA, 25 bp, Homo sapien
cagcagaccagcatagatgggagtg

SEQ ID NO: 4154713 - DNA, 25 bp, Homo sapien
ttttcagcagaccagcatagatggg

SEQ ID NO: 4154714 - DNA, 25 bp, Homo sapien
tgttttttcagcagaccagcataga

SEQ ID NO: 4154715 - DNA, 25 bp, Homo sapien
aaacccttcccacatgtatcatatt

SEQ ID NO: 4154716 - DNA, 25 bp, Homo sapien
gaatccctgactccaatagaaaccc

SEQ ID NO: 4154717 - DNA, 25 bp, Homo sapien
ggtgtgatctccaagtgaagtcttt

SEQ ID NO: 4154718 - DNA, 25 bp, Homo sapien
atgagcttgaaggtgtgatctccaa

SEQ ID NO: 4154719 - DNA, 25 bp, Homo sapien
ctttttgggagacaggcatagaaag

SEQ ID NO: 4154720 - DNA, 25 bp, Homo sapien
tggctctaaggctttgaattgctgg

SEQ ID NO: 4154721 - DNA, 25 bp, Homo sapien
gctggaatgcgttactaaaaaagac

SEQ ID NO: 4154722 - DNA, 25 bp, Homo sapien
agatcaggctcctctctaatttgga

SEQ ID NO: 4154723 - DNA, 25 bp, Homo sapien
ctctgtcccctactctctgaagaat

SEQ ID NO: 4154724 - DNA, 25 bp, Homo sapien
tgatacttcggtcagtccttcccct

SEQ ID NO: 4154725 - DNA, 25 bp, Homo sapien
tctgtcccctactctctgaagaatt

SEQ ID NO: 4154726 - DNA, 25 bp, Homo sapien
cttctcctgatacttcggtcagtcc

SEQ ID NO: 4154727 - DNA, 25 bp, Homo sapien
tcatctaatgagtagttcatcttat

SEQ ID NO: 4154728 - DNA, 25 bp, Homo sapien
taaggtgagcgtgcacaattcttag

SEQ ID NO: 4154729 - DNA, 25 bp, Homo sapien
catcttatttaggattatgtctaca

SEQ ID NO: 4154730 - DNA, 25 bp, Homo sapien
gttaataaatcactgacaaattgcc

SEQ ID NO: 4154731 - DNA, 25 bp, Homo sapien
ctgctgttattgaataatatgtata

SEQ ID NO: 4154732 - DNA, 25 bp, Homo sapien
cttctgctgttattgaataatatgt

SEQ ID NO: 4154733 - DNA, 25 bp, Homo sapien
catcatcttctgctgttattgaata

SEQ ID NO: 4154734 - DNA, 25 bp, Homo sapien
tcttctgctgttattgaataatatg

SEQ ID NO: 4154735 - DNA, 25 bp, Homo sapien
ggtgaatatttcacttgtaacttaa

SEQ ID NO: 4154736 - DNA, 25 bp, Homo sapien
ctactgtggctgaaactgattgggt

SEQ ID NO: 4154737 - DNA, 25 bp, Homo sapien
ttgggtgaatatttcacttgtaact

SEQ ID NO: 4154738 - DNA, 25 bp, Homo sapien
tgaatatttcacttgtaacttaaag

SEQ ID NO: 4154739 - DNA, 25 bp, Homo sapien
caattgctttacgtcctccacaaag

SEQ ID NO: 4154740 - DNA, 25 bp, Homo sapien
tcctgttgcgccatcagactgagaa

SEQ ID NO: 4154741 - DNA, 25 bp, Homo sapien
caaagcctctttttggtgatatcaa

SEQ ID NO: 4154742 - DNA, 25 bp, Homo sapien
ttttcatttcctgttgcgccatcag

SEQ ID NO: 4154743 - DNA, 25 bp, Homo sapien
tgtctcctcttctatgtgaaccaga

SEQ ID NO: 4154744 - DNA, 25 bp, Homo sapien
tattcagatgtctcctcttctatgt

SEQ ID NO: 4154745 - DNA, 25 bp, Homo sapien
ctcctcttctatgtgaaccagaaac

SEQ ID NO: 4154746 - DNA, 25 bp, Homo sapien
ttatacatattcagatgtctcctct

SEQ ID NO: 4154747 - DNA, 25 bp, Homo sapien
ccttgacaagagtgtgacttatgcc

SEQ ID NO: 4154748 - DNA, 25 bp, Homo sapien
tgctcacagatctggtgacctcctc

SEQ ID NO: 4154749 - DNA, 25 bp, Homo sapien
atgccacttcgggaggctgctcaca

SEQ ID NO: 4154750 - DNA, 25 bp, Homo sapien
gacttatgccacttcgggaggctgc

SEQ ID NO: 4154751 - DNA, 25 bp, Homo sapien
ttttgtcactaacaacccgtgtgct

SEQ ID NO: 4154752 - DNA, 25 bp, Homo sapien
tttgtcactaacaacccgtgtgctc

SEQ ID NO: 4154753 - DNA, 25 bp, Homo sapien
gcccagacactctgcaggccagatt

SEQ ID NO: 4154754 - DNA, 25 bp, Homo sapien
gggaacttgcttggacttgatctga

SEQ ID NO: 4154755 - DNA, 25 bp, Homo sapien
cacgatgttgtaaagcctgagcttc

SEQ ID NO: 4154756 - DNA, 25 bp, Homo sapien
gatggaatgtttctgagttacacga

SEQ ID NO: 4154757 - DNA, 25 bp, Homo sapien
tgtacagtaacatattcaatggttc

SEQ ID NO: 4154758 - DNA, 25 bp, Homo sapien
gcataagccattgcgccatgctcaa

SEQ ID NO: 4154759 - DNA, 25 bp, Homo sapien
gatgcgtgctaccacacaaggctaa

SEQ ID NO: 4154760 - DNA, 25 bp, Homo sapien
aggacttggagccattattctacct

SEQ ID NO: 4154761 - DNA, 25 bp, Homo sapien
tattcactcttcaaatgcaggtctc

SEQ ID NO: 4154762 - DNA, 25 bp, Homo sapien
gaaataccatgaactttcagacttg

SEQ ID NO: 4154763 - DNA, 25 bp, Homo sapien
gccgtggctagagcaaaagttaata

SEQ ID NO: 4154764 - DNA, 25 bp, Homo sapien
tgtacatttctttctatgccgtggc

SEQ ID NO: 4154765 - DNA, 25 bp, Homo sapien
gggaattgcaccatgtacactttta

SEQ ID NO: 4154766 - DNA, 25 bp, Homo sapien
tgaatcttgtagtgctctctgggaa

SEQ ID NO: 4154767 - DNA, 25 bp, Homo sapien
cttttacaacctacagaaatcgtca

SEQ ID NO: 4154768 - DNA, 25 bp, Homo sapien
taccaattccattgtataagcaaac

SEQ ID NO: 4154769 - DNA, 25 bp, Homo sapien
tggaaaagaactcggctgttaggcc

SEQ ID NO: 4154770 - DNA, 25 bp, Homo sapien
tacagatgcctatcagttgagtaag

SEQ ID NO: 4154771 - DNA, 25 bp, Homo sapien
cattaaattgagctcccaaaggtct

SEQ ID NO: 4154772 - DNA, 25 bp, Homo sapien
taacaggcaggctctggaagttgga

SEQ ID NO: 4154773 - DNA, 25 bp, Homo sapien
tgagtaagcctgtaacccctcagct

SEQ ID NO: 4154774 - DNA, 25 bp, Homo sapien
ttagctgcattacgttgagtaagcc

SEQ ID NO: 4154775 - DNA, 25 bp, Homo sapien
gggctcataaaaatcctggtcaatg

SEQ ID NO: 4154776 - DNA, 25 bp, Homo sapien
tccttagatgcaaaatggagaggac

SEQ ID NO: 4154777 - DNA, 25 bp, Homo sapien
tttaggcattccaaaggccgttagc

SEQ ID NO: 4154778 - DNA, 25 bp, Homo sapien
ggccgttagcaagcatttggattat

SEQ ID NO: 4154779 - DNA, 25 bp, Homo sapien
aatagattctttggcgttggagtgc

SEQ ID NO: 4154780 - DNA, 25 bp, Homo sapien
tagggctgaaatgcctagctaaaga

SEQ ID NO: 4154781 - DNA, 25 bp, Homo sapien
tttaggtttttgttgaacatattgc

SEQ ID NO: 4154782 - DNA, 25 bp, Homo sapien
tgtgcacctgaaatttaagtttagg

SEQ ID NO: 4154783 - DNA, 25 bp, Homo sapien
gttttccgataagcacaaatgtgca

SEQ ID NO: 4154784 - DNA, 25 bp, Homo sapien
ctgttttccgataagcacaaatgtg

SEQ ID NO: 4154785 - DNA, 25 bp, Homo sapien
tccgtacatgggaagtgacccctaa

SEQ ID NO: 4154786 - DNA, 25 bp, Homo sapien
tggccctaatgcagtcatccgagaa

SEQ ID NO: 4154787 - DNA, 25 bp, Homo sapien
gaaactgtttgaccataactggcta

SEQ ID NO: 4154788 - DNA, 25 bp, Homo sapien
atttttagactatgcaatgcgtggg

SEQ ID NO: 4154789 - DNA, 25 bp, Homo sapien
gaagagataagaactctctgggcta

SEQ ID NO: 4154790 - DNA, 25 bp, Homo sapien
gaaatagcgaagagttgtacaggaa

SEQ ID NO: 4154791 - DNA, 25 bp, Homo sapien
agataagaactctctgggctagaag

SEQ ID NO: 4154792 - DNA, 25 bp, Homo sapien
agaagaaatagcgaagagttgtaca

SEQ ID NO: 4154793 - DNA, 25 bp, Homo sapien
cacagttgttttgcaccctacttcc

SEQ ID NO: 4154794 - DNA, 25 bp, Homo sapien
tacttcccctcgtacttctaagatg

SEQ ID NO: 4154795 - DNA, 25 bp, Homo sapien
tcgtacttctaagatggtgggtcct

SEQ ID NO: 4154796 - DNA, 25 bp, Homo sapien
ggtcacagttgttttgcaccctact

SEQ ID NO: 4154797 - DNA, 25 bp, Homo sapien
aacactggactcaatttaacattca

SEQ ID NO: 4154798 - DNA, 25 bp, Homo sapien
taagtccacgaacactggactcaat

SEQ ID NO: 4154799 - DNA, 25 bp, Homo sapien
cacgaacactggactcaatttaaca

SEQ ID NO: 4154800 - DNA, 25 bp, Homo sapien
aacatttaagtccacgaacactgga

SEQ ID NO: 4154801 - DNA, 25 bp, Homo sapien
ttacatttgctccataacattctct

SEQ ID NO: 4154802 - DNA, 25 bp, Homo sapien
ctgtgttgttaataacagtaggatc

SEQ ID NO: 4154803 - DNA, 25 bp, Homo sapien
tacatttgctccataacattctctg

SEQ ID NO: 4154804 - DNA, 25 bp, Homo sapien
taacagtaggatcttaaatgaagcc

SEQ ID NO: 4154805 - DNA, 25 bp, Homo sapien
caggcatggcttttgtacgagacgg

SEQ ID NO: 4154806 - DNA, 25 bp, Homo sapien
aatgtcaagctcaggttcaactcgc

SEQ ID NO: 4154807 - DNA, 25 bp, Homo sapien
gaaacgcagtcttgaggctcctgta

SEQ ID NO: 4154808 - DNA, 25 bp, Homo sapien
ttcaactcgcgctttggaacccagg

SEQ ID NO: 4154809 - DNA, 25 bp, Homo sapien
tcccttaaaaggcagatagaattct

SEQ ID NO: 4154810 - DNA, 25 bp, Homo sapien
ccacaagaggtagcgggaaagatct

SEQ ID NO: 4154811 - DNA, 25 bp, Homo sapien
gctgatctgaaacgagattttacag

SEQ ID NO: 4154812 - DNA, 25 bp, Homo sapien
tttaagagaactgccaaatactgat

SEQ ID NO: 4154813 - DNA, 25 bp, Homo sapien
taccctggcaagtgtgcgcagccat

SEQ ID NO: 4154814 - DNA, 25 bp, Homo sapien
gcagaactaaagaggggctgaacac

SEQ ID NO: 4154815 - DNA, 25 bp, Homo sapien
tgttttgcagaccatgctccatgca

SEQ ID NO: 4154816 - DNA, 25 bp, Homo sapien
gggaccaagccaacctcatctgctg

SEQ ID NO: 4154817 - DNA, 25 bp, Homo sapien
tgtttttcactctggactggattac

SEQ ID NO: 4154818 - DNA, 25 bp, Homo sapien
ttagatatgacactgtgtttttcac

SEQ ID NO: 4154819 - DNA, 25 bp, Homo sapien
tcagtccatgggtcataaagactta

SEQ ID NO: 4154820 - DNA, 25 bp, Homo sapien
ttttcactctggactggattaccat

SEQ ID NO: 4154821 - DNA, 25 bp, Homo sapien
atcaatttcatgtgtgccttctaga

SEQ ID NO: 4154822 - DNA, 25 bp, Homo sapien
aatcaatttcatgtgtgccttctag

SEQ ID NO: 4154823 - DNA, 25 bp, Homo sapien
caatttcatgtgtgccttctagatg

SEQ ID NO: 4154824 - DNA, 25 bp, Homo sapien
tcaatttcatgtgtgccttctagat

SEQ ID NO: 4154825 - DNA, 25 bp, Homo sapien
attttgctgacctttggtaacctgg

SEQ ID NO: 4154826 - DNA, 25 bp, Homo sapien
tgacctttggtaacctggagatgac

SEQ ID NO: 4154827 - DNA, 25 bp, Homo sapien
tttttggagtagattttgctgacct

SEQ ID NO: 4154828 - DNA, 25 bp, Homo sapien
tttggtaacctggagatgactgtgt

SEQ ID NO: 4154829 - DNA, 25 bp, Homo sapien
tgtttcttgggggaacgtagccaca

SEQ ID NO: 4154830 - DNA, 25 bp, Homo sapien
tcttgggggaacgtagccacagaga

SEQ ID NO: 4154831 - DNA, 25 bp, Homo sapien
ttgggggaacgtagccacagagaga

SEQ ID NO: 4154832 - DNA, 25 bp, Homo sapien
tgcttgtttcttgggggaacgtagc

SEQ ID NO: 4154833 - DNA, 25 bp, Homo sapien
tagaagccgtttgaatctggaaagg

SEQ ID NO: 4154834 - DNA, 25 bp, Homo sapien
tagattccatcgttccagctcagga

SEQ ID NO: 4154835 - DNA, 25 bp, Homo sapien
ttctgctagattccatcgttccagc

SEQ ID NO: 4154836 - DNA, 25 bp, Homo sapien
atagaagccgtttgaatctggaaag

SEQ ID NO: 4154837 - DNA, 25 bp, Homo sapien
tccataactgggagaagccaaattg

SEQ ID NO: 4154838 - DNA, 25 bp, Homo sapien
aaacagcaatatccgtttgtcggga

SEQ ID NO: 4154839 - DNA, 25 bp, Homo sapien
actttcataactgggttatagaatc

SEQ ID NO: 4154840 - DNA, 25 bp, Homo sapien
taactagttacaatccataactggg

SEQ ID NO: 4154841 - DNA, 25 bp, Homo sapien
gcagctactcccttgaaaacatcta

SEQ ID NO: 4154842 - DNA, 25 bp, Homo sapien
gatgttgttgctccaaagatgtttt

SEQ ID NO: 4154843 - DNA, 25 bp, Homo sapien
ccagagcatctacagccaggtcctg

SEQ ID NO: 4154844 - DNA, 25 bp, Homo sapien
tgtttttggcgccagagcatctaca

SEQ ID NO: 4154845 - DNA, 25 bp, Homo sapien
cctggatatacttgtcgttgacctc

SEQ ID NO: 4154846 - DNA, 25 bp, Homo sapien
gttttctagctttgtgccttcaaag

SEQ ID NO: 4154847 - DNA, 25 bp, Homo sapien
tagctttgtgccttcaaagacctgt

SEQ ID NO: 4154848 - DNA, 25 bp, Homo sapien
ttctagctttgtgccttcaaagacc

SEQ ID NO: 4154849 - DNA, 25 bp, Homo sapien
gctttgtgccttcaaagacctgtct

SEQ ID NO: 4154850 - DNA, 25 bp, Homo sapien
tgtttattaaggtcactgttgacat

SEQ ID NO: 4154851 - DNA, 25 bp, Homo sapien
tgtgtagtaatcgtactcctccctg

SEQ ID NO: 4154852 - DNA, 25 bp, Homo sapien
tagtctctgcactcaagaccgggcc

SEQ ID NO: 4154853 - DNA, 25 bp, Homo sapien
cttgaacgcatgagaggcaataagc

SEQ ID NO: 4154854 - DNA, 25 bp, Homo sapien
tggcatagagctgtgcttgaacgca

SEQ ID NO: 4154855 - DNA, 25 bp, Homo sapien
agctggatgagggatctccgggctc

SEQ ID NO: 4154856 - DNA, 25 bp, Homo sapien
aaagctggatgagggatctccgggc

SEQ ID NO: 4154857 - DNA, 25 bp, Homo sapien
aagctggatgagggatctccgggct

SEQ ID NO: 4154858 - DNA, 25 bp, Homo sapien
tctgtgcgcgggttgggtgatgatt

SEQ ID NO: 4154859 - DNA, 25 bp, Homo sapien
ggacagtgatcagccttgcttagcg

SEQ ID NO: 4154860 - DNA, 25 bp, Homo sapien
gatcagccttgcttagcgcttcacc

SEQ ID NO: 4154861 - DNA, 25 bp, Homo sapien
tgatgattgaggacagtgatcagcc

SEQ ID NO: 4154862 - DNA, 25 bp, Homo sapien
tcaggtgaccgggaactaacacact

SEQ ID NO: 4154863 - DNA, 25 bp, Homo sapien
cagttcctcctgcaccgggagttgg

SEQ ID NO: 4154864 - DNA, 25 bp, Homo sapien
gagaagtcacttctaggcggcgcct

SEQ ID NO: 4154865 - DNA, 25 bp, Homo sapien
cactacggagtttgaagccgcggcc

SEQ ID NO: 4154866 - DNA, 25 bp, Homo sapien
ggaaggcttgtatccgcagctaccg

SEQ ID NO: 4154867 - DNA, 25 bp, Homo sapien
gcaggacccgcggaaggcttgtatc

SEQ ID NO: 4154868 - DNA, 25 bp, Homo sapien
gggtcgccaggcaggacccgcggaa

SEQ ID NO: 4154869 - DNA, 25 bp, Homo sapien
gtggcggagcggagagacagcagga

SEQ ID NO: 4154870 - DNA, 25 bp, Homo sapien
ttttcttcttgaagagggacgccat

SEQ ID NO: 4154871 - DNA, 25 bp, Homo sapien
gttttcttcttgaagagggacgcca

SEQ ID NO: 4154872 - DNA, 25 bp, Homo sapien
atccacggttttcttcttgaagagg

SEQ ID NO: 4154873 - DNA, 25 bp, Homo sapien
catccacggttttcttcttgaagag

SEQ ID NO: 4154874 - DNA, 25 bp, Homo sapien
tgaagagcaacaatcgaagcagagg

SEQ ID NO: 4154875 - DNA, 25 bp, Homo sapien
tagtatatcgcccaactgaagagca

SEQ ID NO: 4154876 - DNA, 25 bp, Homo sapien
tattgacactcaagggccagctagc

SEQ ID NO: 4154877 - DNA, 25 bp, Homo sapien
gctagcctcctcgaaacgctcagga

SEQ ID NO: 4154878 - DNA, 25 bp, Homo sapien
agcaaaaaggtggtatcgtaaagtg

SEQ ID NO: 4154879 - DNA, 25 bp, Homo sapien
aaaggtggtatcgtaaagtgcaagt

SEQ ID NO: 4154880 - DNA, 25 bp, Homo sapien
ggtggtatcgtaaagtgcaagttaa

SEQ ID NO: 4154881 - DNA, 25 bp, Homo sapien
caaaaaggtggtatcgtaaagtgca

SEQ ID NO: 4154882 - DNA, 25 bp, Homo sapien
tgtggatgaaggatttaagggctat

SEQ ID NO: 4154883 - DNA, 25 bp, Homo sapien
ctttgtggatgaaggatttaagggc

SEQ ID NO: 4154884 - DNA, 25 bp, Homo sapien
tttgtggatgaaggatttaagggct

SEQ ID NO: 4154885 - DNA, 25 bp, Homo sapien
ggatgaaggatttaagggctatgaa

SEQ ID NO: 4154886 - DNA, 25 bp, Homo sapien
ctgcaagctctgtaacagctagtgt

SEQ ID NO: 4154887 - DNA, 25 bp, Homo sapien
gggaatagtgggcactgtgacactg

SEQ ID NO: 4154888 - DNA, 25 bp, Homo sapien
taacagctagtgtcagtgggaatag

SEQ ID NO: 4154889 - DNA, 25 bp, Homo sapien
gctctgtaacagctagtgtcagtgg

SEQ ID NO: 4154890 - DNA, 25 bp, Homo sapien
attcagtgagataaaaagggtctgg

SEQ ID NO: 4154891 - DNA, 25 bp, Homo sapien
tcagtgagataaaaagggtctggaa

SEQ ID NO: 4154892 - DNA, 25 bp, Homo sapien
ttcagtgagataaaaagggtctgga

SEQ ID NO: 4154893 - DNA, 25 bp, Homo sapien
cattcagtgagataaaaagggtctg

SEQ ID NO: 4154894 - DNA, 25 bp, Homo sapien
caccattgtgaactgcttaatgggt

SEQ ID NO: 4154895 - DNA, 25 bp, Homo sapien
tagtggtaacacaccattgtgaatg

SEQ ID NO: 4154896 - DNA, 25 bp, Homo sapien
tggtggtaacacaccattgtgaact

SEQ ID NO: 4154897 - DNA, 25 bp, Homo sapien
tggtaacacaccattgtgaatgaat

SEQ ID NO: 4154898 - DNA, 25 bp, Homo sapien
ggaggtgatggttgcgttgagccga

SEQ ID NO: 4154899 - DNA, 25 bp, Homo sapien
atctgggaggtgatggttgcgttga

SEQ ID NO: 4154900 - DNA, 25 bp, Homo sapien
ggtgatggttgcgttgagccgagat

SEQ ID NO: 4154901 - DNA, 25 bp, Homo sapien
gatggttgcgttgagccgagatcat

SEQ ID NO: 4154902 - DNA, 25 bp, Homo sapien
ttctctaaagctgctcgatctctga

SEQ ID NO: 4154903 - DNA, 25 bp, Homo sapien
tatagccctctgtgtacctcgtaac

SEQ ID NO: 4154904 - DNA, 25 bp, Homo sapien
cgatctctgattatagccctctgtg

SEQ ID NO: 4154905 - DNA, 25 bp, Homo sapien
cgtaactctcgattctgttccttta

SEQ ID NO: 4154906 - DNA, 25 bp, Homo sapien
cagatcagtatttgcttcaccagga

SEQ ID NO: 4154907 - DNA, 25 bp, Homo sapien
ttcaaataaccaatacctggaaaca

SEQ ID NO: 4154908 - DNA, 25 bp, Homo sapien
aaaccatgttcacaaaaactttgat

SEQ ID NO: 4154909 - DNA, 25 bp, Homo sapien
tgtccactggctggtaaacagataa

SEQ ID NO: 4154910 - DNA, 25 bp, Homo sapien
gatgcacaagttgtttggctaaaac

SEQ ID NO: 4154911 - DNA, 25 bp, Homo sapien
aagcttccttattaccaatcttggc

SEQ ID NO: 4154912 - DNA, 25 bp, Homo sapien
tctgtttccgtagatgcacaagttg

SEQ ID NO: 4154913 - DNA, 25 bp, Homo sapien
agcaaaagttctcgtcttctgtttc

SEQ ID NO: 4154914 - DNA, 25 bp, Homo sapien
gctgtagtagacattgctccagcca

SEQ ID NO: 4154915 - DNA, 25 bp, Homo sapien
gtagtagacattgctccagccatct

SEQ ID NO: 4154916 - DNA, 25 bp, Homo sapien
agtagacattgctccagccatcttc

SEQ ID NO: 4154917 - DNA, 25 bp, Homo sapien
tgtagtagacattgctccagccatc

SEQ ID NO: 4154918 - DNA, 25 bp, Homo sapien
tagatcaccctactcaaaggtctgt

SEQ ID NO: 4154919 - DNA, 25 bp, Homo sapien
tatagtgggtaggttccaagagaca

SEQ ID NO: 4154920 - DNA, 25 bp, Homo sapien
tgactaacagtatcaaggagtgctt

SEQ ID NO: 4154921 - DNA, 25 bp, Homo sapien
gacatatcttaagcctccaattgaa

SEQ ID NO: 4154922 - DNA, 25 bp, Homo sapien
tgtaatgtcttttgtggatccatct

SEQ ID NO: 4154923 - DNA, 25 bp, Homo sapien
taatgtcttttgtggatccatcttc

SEQ ID NO: 4154924 - DNA, 25 bp, Homo sapien
ttgtaatgtcttttgtggatccatc

SEQ ID NO: 4154925 - DNA, 25 bp, Homo sapien
tttgtaatgtcttttgtggatccat

SEQ ID NO: 4154926 - DNA, 25 bp, Homo sapien
gaattggtagtacaaaccaacagcc

SEQ ID NO: 4154927 - DNA, 25 bp, Homo sapien
aataatctaatgttgacgagggtgc

SEQ ID NO: 4154928 - DNA, 25 bp, Homo sapien
taagcaaagctaaactggtatatcc

SEQ ID NO: 4154929 - DNA, 25 bp, Homo sapien
aagggtcggtcattcattattggtg

SEQ ID NO: 4154930 - DNA, 25 bp, Homo sapien
tgtatattacagaaggcaaactcag

SEQ ID NO: 4154931 - DNA, 25 bp, Homo sapien
gatagtcacagctacatgtttaaga

SEQ ID NO: 4154932 - DNA, 25 bp, Homo sapien
cagtctagcccaactattttgtata

SEQ ID NO: 4154933 - DNA, 25 bp, Homo sapien
catatttgagccattaaatctggaa

SEQ ID NO: 4154934 - DNA, 25 bp, Homo sapien
tgattcacaatatcctggctttctt

SEQ ID NO: 4154935 - DNA, 25 bp, Homo sapien
aaagatgtcatcaagtgtatcattg

SEQ ID NO: 4154936 - DNA, 25 bp, Homo sapien
gtcatcagaaccgtcaaagatgtca

SEQ ID NO: 4154937 - DNA, 25 bp, Homo sapien
caatttcatcaagaacttgattcac

SEQ ID NO: 4154938 - DNA, 25 bp, Homo sapien
aagccttgagttgccgttcaatctc

SEQ ID NO: 4154939 - DNA, 25 bp, Homo sapien
tcctaaagccttgagttgccgttca

SEQ ID NO: 4154940 - DNA, 25 bp, Homo sapien
aatctactcctaaagccttgagttg

SEQ ID NO: 4154941 - DNA, 25 bp, Homo sapien
cttgagttgccgttcaatctcttca

SEQ ID NO: 4154942 - DNA, 25 bp, Homo sapien
aaaagattctaaatagccatgggtt

SEQ ID NO: 4154943 - DNA, 25 bp, Homo sapien
tctttaagttggtgcctaatggcat

SEQ ID NO: 4154944 - DNA, 25 bp, Homo sapien
gagaagtcaactttttacacatcat

SEQ ID NO: 4154945 - DNA, 25 bp, Homo sapien
gcatcattgtcattctttggcaaaa

SEQ ID NO: 4154946 - DNA, 25 bp, Homo sapien
ctatttaaggcaggtgtcaagcaca

SEQ ID NO: 4154947 - DNA, 25 bp, Homo sapien
cagtagtgacatcaaagggacaagt

SEQ ID NO: 4154948 - DNA, 25 bp, Homo sapien
catatttcaattaggcccacagaga

SEQ ID NO: 4154949 - DNA, 25 bp, Homo sapien
ccaggataatctttgtattgaggcc

SEQ ID NO: 4154950 - DNA, 25 bp, Homo sapien
gtgtcacatgtatactagtcctaag

SEQ ID NO: 4154951 - DNA, 25 bp, Homo sapien
cattagataccaaggcaatttcacc

SEQ ID NO: 4154952 - DNA, 25 bp, Homo sapien
tgtccaccatcccaaattaaccagg

SEQ ID NO: 4154953 - DNA, 25 bp, Homo sapien
tcctcctagcaatccgtgtcacatg

SEQ ID NO: 4154954 - DNA, 25 bp, Homo sapien
ttagcaggaaccaaaaagagcaaaa

SEQ ID NO: 4154955 - DNA, 25 bp, Homo sapien
tagcaggaaccaaaaagagcaaaaa

SEQ ID NO: 4154956 - DNA, 25 bp, Homo sapien
catttggatgtaaatctgctggcta

SEQ ID NO: 4154957 - DNA, 25 bp, Homo sapien
gctagtagaagcaaactgtaatgtg

SEQ ID NO: 4154958 - DNA, 25 bp, Homo sapien
aacttagaatagtgactgttttgca

SEQ ID NO: 4154959 - DNA, 25 bp, Homo sapien
tctgagaattttatcgacaagaaca

SEQ ID NO: 4154960 - DNA, 25 bp, Homo sapien
tgtaaagcacatcaccagaaatatc

SEQ ID NO: 4154961 - DNA, 25 bp, Homo sapien
ttattctcagaagccacattgtcta

SEQ ID NO: 4154962 - DNA, 25 bp, Homo sapien
tctaaggaacatcttgagtgcagat

SEQ ID NO: 4154963 - DNA, 25 bp, Homo sapien
cgcagacatatgagtatgggtttat

SEQ ID NO: 4154964 - DNA, 25 bp, Homo sapien
taggagttgctgctgaaggcccggg

SEQ ID NO: 4154965 - DNA, 25 bp, Homo sapien
gggccagaggtgaacaccttgtaga

SEQ ID NO: 4154966 - DNA, 25 bp, Homo sapien
ttgtgtaggagttgctgctgaaggc

SEQ ID NO: 4154967 - DNA, 25 bp, Homo sapien
ggccagaggtgaacaccttgtagaa

SEQ ID NO: 4154968 - DNA, 25 bp, Homo sapien
gcttgagaaactgatgtggacacca

SEQ ID NO: 4154969 - DNA, 25 bp, Homo sapien
gaagcttgagaaactgatgtggaca

SEQ ID NO: 4154970 - DNA, 25 bp, Homo sapien
gaaactgatgtggacaccaggccca

SEQ ID NO: 4154971 - DNA, 25 bp, Homo sapien
cgggagaagcttgagaaactgatgt

SEQ ID NO: 4154972 - DNA, 25 bp, Homo sapien
gtgcatgttactcagagtcatcttc

SEQ ID NO: 4154973 - DNA, 25 bp, Homo sapien
ctgtgcatgttactcagagtcatct

SEQ ID NO: 4154974 - DNA, 25 bp, Homo sapien
tgctgtgcatgttactcagagtcat

SEQ ID NO: 4154975 - DNA, 25 bp, Homo sapien
gctgtgcatgttactcagagtcatc

SEQ ID NO: 4154976 - DNA, 25 bp, Homo sapien
gctgcctgaggaagttgatctcatc

SEQ ID NO: 4154977 - DNA, 25 bp, Homo sapien
catcagtcagcccttccaggtgaga

SEQ ID NO: 4154978 - DNA, 25 bp, Homo sapien
tctcatcagtcagcccttccaggtg

SEQ ID NO: 4154979 - DNA, 25 bp, Homo sapien
atctcatcagtcagcccttccaggt

SEQ ID NO: 4154980 - DNA, 25 bp, Homo sapien
taggacagctcccggatctcctctt

SEQ ID NO: 4154981 - DNA, 25 bp, Homo sapien
cagctcccggatctcctcttcatac

SEQ ID NO: 4154982 - DNA, 25 bp, Homo sapien
ctaggacagctcccggatctcctct

SEQ ID NO: 4154983 - DNA, 25 bp, Homo sapien
gacagctcccggatctcctcttcat

SEQ ID NO: 4154984 - DNA, 25 bp, Homo sapien
cgatgatgctgcccatgtccaggga

SEQ ID NO: 4154985 - DNA, 25 bp, Homo sapien
atcagcgatgatgctgcccatgtcc

SEQ ID NO: 4154986 - DNA, 25 bp, Homo sapien
gatgctgcccatgtccagggagcag

SEQ ID NO: 4154987 - DNA, 25 bp, Homo sapien
gatgatgctgcccatgtccagggag

SEQ ID NO: 4154988 - DNA, 25 bp, Homo sapien
ctttgtatgacacaggtcatcccca

SEQ ID NO: 4154989 - DNA, 25 bp, Homo sapien
atctccagctcctcatatttgatct

SEQ ID NO: 4154990 - DNA, 25 bp, Homo sapien
catgcttcccagcaagcatctccag

SEQ ID NO: 4154991 - DNA, 25 bp, Homo sapien
ttgtatgacacaggtcatccccatg

SEQ ID NO: 4154992 - DNA, 25 bp, Homo sapien
gggccccagctcatacagcttggtg

SEQ ID NO: 4154993 - DNA, 25 bp, Homo sapien
cgggccccagctcatacagcttggt

SEQ ID NO: 4154994 - DNA, 25 bp, Homo sapien
ggcgggccccagctcatacagcttg

SEQ ID NO: 4154995 - DNA, 25 bp, Homo sapien
gcgggccccagctcatacagcttgg

SEQ ID NO: 4154996 - DNA, 25 bp, Homo sapien
gctcctgccactcatgcagctgctg

SEQ ID NO: 4154997 - DNA, 25 bp, Homo sapien
tcctgccactcatgcagctgctgta

SEQ ID NO: 4154998 - DNA, 25 bp, Homo sapien
ctggatttcatcagctcctgccact

SEQ ID NO: 4154999 - DNA, 25 bp, Homo sapien
cagctcctgccactcatgcagctgc

SEQ ID NO: 4155000 - DNA, 25 bp, Homo sapien
tggcaatctcaatgtccagagccag

SEQ ID NO: 4155001 - DNA, 25 bp, Homo sapien
ggtggcaatctcaatgtccagagcc

SEQ ID NO: 4155002 - DNA, 25 bp, Homo sapien
gtaggtggcaatctcaatgtccaga

SEQ ID NO: 4155003 - DNA, 25 bp, Homo sapien
taggtggcaatctcaatgtccagag

SEQ ID NO: 4155004 - DNA, 25 bp, Homo sapien
ctgcatgttctgcatccccaactcc

SEQ ID NO: 4155005 - DNA, 25 bp, Homo sapien
catgttctgcatgttctgcatcccc

SEQ ID NO: 4155006 - DNA, 25 bp, Homo sapien
gcatgttctgcatccccaactccag

SEQ ID NO: 4155007 - DNA, 25 bp, Homo sapien
gttctgcatgttctgcatccccaac

SEQ ID NO: 4155008 - DNA, 25 bp, Homo sapien
ggggcttgtgacgtccccataggct

SEQ ID NO: 4155009 - DNA, 25 bp, Homo sapien
ggtggagcccatgccagagccaaag

SEQ ID NO: 4155010 - DNA, 25 bp, Homo sapien
ctaaaggaggtggagcccatgccag

SEQ ID NO: 4155011 - DNA, 25 bp, Homo sapien
ggaggtggagcccatgccagagcca

SEQ ID NO: 4155012 - DNA, 25 bp, Homo sapien
taaaggaggtggagcccatgccaga

SEQ ID NO: 4155013 - DNA, 25 bp, Homo sapien
accagcatcccattgtgggtcttga

SEQ ID NO: 4155014 - DNA, 25 bp, Homo sapien
acaccagcatcccattgtgggtctt

SEQ ID NO: 4155015 - DNA, 25 bp, Homo sapien
gcatcccattgtgggtcttgatcct

SEQ ID NO: 4155016 - DNA, 25 bp, Homo sapien
cagcatcccattgtgggtcttgatc

SEQ ID NO: 4155017 - DNA, 25 bp, Homo sapien
cttctattactcttgatgtgatatt

SEQ ID NO: 4155018 - DNA, 25 bp, Homo sapien
ctattactcttgatgtgatattgcc

SEQ ID NO: 4155019 - DNA, 25 bp, Homo sapien
tctattactcttgatgtgatattgc

SEQ ID NO: 4155020 - DNA, 25 bp, Homo sapien
tattactcttgatgtgatattgcca

SEQ ID NO: 4155021 - DNA, 25 bp, Homo sapien
gccatgtgcttcatcgtaggcacag

SEQ ID NO: 4155022 - DNA, 25 bp, Homo sapien
gaggccatgtgcttcatcgtaggca

SEQ ID NO: 4155023 - DNA, 25 bp, Homo sapien
tgtgcttcatcgtaggcacagtgaa

SEQ ID NO: 4155024 - DNA, 25 bp, Homo sapien
tgcttcatcgtaggcacagtgaaat

SEQ ID NO: 4155025 - DNA, 25 bp, Homo sapien
aagacttgaaagtagatggaaaggg

SEQ ID NO: 4155026 - DNA, 25 bp, Homo sapien
gatcaactggggaaacgttttctga

SEQ ID NO: 4155027 - DNA, 25 bp, Homo sapien
tagatggaaaggggtaagactgctt

SEQ ID NO: 4155028 - DNA, 25 bp, Homo sapien
gtgaagacttgaaagtagatggaaa

SEQ ID NO: 4155029 - DNA, 25 bp, Homo sapien
ctgcaaaatccattttgatgttttc

SEQ ID NO: 4155030 - DNA, 25 bp, Homo sapien
tgcaaaatccattttgatgttttcc

SEQ ID NO: 4155031 - DNA, 25 bp, Homo sapien
gcaaaatccattttgatgttttcca

SEQ ID NO: 4155032 - DNA, 25 bp, Homo sapien
caaaatccattttgatgttttccat

SEQ ID NO: 4155033 - DNA, 25 bp, Homo sapien
tgtgatgatgtagatcaggcacagc

SEQ ID NO: 4155034 - DNA, 25 bp, Homo sapien
tgatgatgtagatcaggcacagcca

SEQ ID NO: 4155035 - DNA, 25 bp, Homo sapien
caggcacagccaaggtggtgctgat

SEQ ID NO: 4155036 - DNA, 25 bp, Homo sapien
gatgatgtagatcaggcacagccaa

SEQ ID NO: 4155037 - DNA, 25 bp, Homo sapien
tttctccaagcctatcttctagtcc

SEQ ID NO: 4155038 - DNA, 25 bp, Homo sapien
aaatttctccaagcctatcttctag

SEQ ID NO: 4155039 - DNA, 25 bp, Homo sapien
ccaaatttctccaagcctatcttct

SEQ ID NO: 4155040 - DNA, 25 bp, Homo sapien
tccaagcctatcttctagtcccgcc

SEQ ID NO: 4155041 - DNA, 25 bp, Homo sapien
ttgggcccagcgagcatccttgtaa

SEQ ID NO: 4155042 - DNA, 25 bp, Homo sapien
cagcgagcatccttgtaatacattc

SEQ ID NO: 4155043 - DNA, 25 bp, Homo sapien
tctaagatatctaccgttgaggaga

SEQ ID NO: 4155044 - DNA, 25 bp, Homo sapien
tgccgtttacaatcaacaaagtgct

SEQ ID NO: 4155045 - DNA, 25 bp, Homo sapien
ttctgaagtccggcattattgctac

SEQ ID NO: 4155046 - DNA, 25 bp, Homo sapien
tttctgaagtccggcattattgcta

SEQ ID NO: 4155047 - DNA, 25 bp, Homo sapien
ttatttctgaagtccggcattattg

SEQ ID NO: 4155048 - DNA, 25 bp, Homo sapien
tatttctgaagtccggcattattgc

SEQ ID NO: 4155049 - DNA, 25 bp, Homo sapien
cctgtgaacgtagagactgatatct

SEQ ID NO: 4155050 - DNA, 25 bp, Homo sapien
cttgttcaataatgagctggttaca

SEQ ID NO: 4155051 - DNA, 25 bp, Homo sapien
tacatttatcagtagtgcatttgtg

SEQ ID NO: 4155052 - DNA, 25 bp, Homo sapien
ccctggaaaccagcttgttcaataa

SEQ ID NO: 4155053 - DNA, 25 bp, Homo sapien
tctgatttcaccttatattctccat

SEQ ID NO: 4155054 - DNA, 25 bp, Homo sapien
tattctccattcaaatgatagatag

SEQ ID NO: 4155055 - DNA, 25 bp, Homo sapien
gtttctcaggttttgaataattctg

SEQ ID NO: 4155056 - DNA, 25 bp, Homo sapien
tcaaatgatagataggctcatcaat

SEQ ID NO: 4155057 - DNA, 25 bp, Homo sapien
catactatgttgtaactgatcagtg

SEQ ID NO: 4155058 - DNA, 25 bp, Homo sapien
atcagtgtcaaagcctttccttaga

SEQ ID NO: 4155059 - DNA, 25 bp, Homo sapien
gtcaaagcctttccttagagcagct

SEQ ID NO: 4155060 - DNA, 25 bp, Homo sapien
aattcatactatgttgtaactgatc

SEQ ID NO: 4155061 - DNA, 25 bp, Homo sapien
cctgaatctcggtaaaggaactgag

SEQ ID NO: 4155062 - DNA, 25 bp, Homo sapien
tctagcaggatgtgtctatcacagc

SEQ ID NO: 4155063 - DNA, 25 bp, Homo sapien
ttgacttttcgagtccagaacctgg

SEQ ID NO: 4155064 - DNA, 25 bp, Homo sapien
aaaggattgccctgatgtctagcag

SEQ ID NO: 4155065 - DNA, 25 bp, Homo sapien
tcccaactcacactggtcttacttt

SEQ ID NO: 4155066 - DNA, 25 bp, Homo sapien
tgagccagtgactaacaagaatgaa

SEQ ID NO: 4155067 - DNA, 25 bp, Homo sapien
gaaattccttcaaggctgatttttg

SEQ ID NO: 4155068 - DNA, 25 bp, Homo sapien
cggatagaggaaggtttcccatcaa

SEQ ID NO: 4155069 - DNA, 25 bp, Homo sapien
catttccaagttggtggcaagggat

SEQ ID NO: 4155070 - DNA, 25 bp, Homo sapien
tttccaagttggtggcaagggataa

SEQ ID NO: 4155071 - DNA, 25 bp, Homo sapien
tccaagttggtggcaagggataaac

SEQ ID NO: 4155072 - DNA, 25 bp, Homo sapien
tcatttccaagttggtggcaaggga

SEQ ID NO: 4155073 - DNA, 25 bp, Homo sapien
aaccagttggcaatttcagatgctg

SEQ ID NO: 4155074 - DNA, 25 bp, Homo sapien
gatgctgttcccacatatacctttg

SEQ ID NO: 4155075 - DNA, 25 bp, Homo sapien
taaaggtaaccagttggcaatttca

SEQ ID NO: 4155076 - DNA, 25 bp, Homo sapien
tatacctttggattgactagttgca

SEQ ID NO: 4155077 - DNA, 25 bp, Homo sapien
tgacatatgtggaatttaggtctag

SEQ ID NO: 4155078 - DNA, 25 bp, Homo sapien
tcaatgacatatgtggaatttaggt

SEQ ID NO: 4155079 - DNA, 25 bp, Homo sapien
tttaggtctagcttttagggctaca

SEQ ID NO: 4155080 - DNA, 25 bp, Homo sapien
ttaggtctagcttttagggctacag

SEQ ID NO: 4155081 - DNA, 25 bp, Homo sapien
tgagttgccttgaacgtgttactgg

SEQ ID NO: 4155082 - DNA, 25 bp, Homo sapien
agggttgagcaggagtttaactctt

SEQ ID NO: 4155083 - DNA, 25 bp, Homo sapien
ctctgagttgccttgaacgtgttac

SEQ ID NO: 4155084 - DNA, 25 bp, Homo sapien
gagttgccttgaacgtgttactggc

SEQ ID NO: 4155085 - DNA, 25 bp, Homo sapien
catcaagcttcatgggatatttgag

SEQ ID NO: 4155086 - DNA, 25 bp, Homo sapien
cttggtgttgcatagagtttgaaga

SEQ ID NO: 4155087 - DNA, 25 bp, Homo sapien
gctcatcaagcttcatgggatattt

SEQ ID NO: 4155088 - DNA, 25 bp, Homo sapien
tatttgagaggtgagtcctttcttg

SEQ ID NO: 4155089 - DNA, 25 bp, Homo sapien
tgacaccaacttgtacatggcctac

SEQ ID NO: 4155090 - DNA, 25 bp, Homo sapien
aggccagcaaaaccaataacaccaa

SEQ ID NO: 4155091 - DNA, 25 bp, Homo sapien
gccagcaaaaccaataacaccaagt

SEQ ID NO: 4155092 - DNA, 25 bp, Homo sapien
cctccttgagaaactttatcatctt

SEQ ID NO: 4155093 - DNA, 25 bp, Homo sapien
cttctgaaagaactaaaattccaat

SEQ ID NO: 4155094 - DNA, 25 bp, Homo sapien
tctgaaagaactaaaattccaattc

SEQ ID NO: 4155095 - DNA, 25 bp, Homo sapien
tccaattcctccttgagaaacttta

SEQ ID NO: 4155096 - DNA, 25 bp, Homo sapien
tctgtagaccccaagaaacctgtgc

SEQ ID NO: 4155097 - DNA, 25 bp, Homo sapien
tgaacaactctatagatcccaaagt

SEQ ID NO: 4155098 - DNA, 25 bp, Homo sapien
ggtgcgtacactcacagtgggcctt

SEQ ID NO: 4155099 - DNA, 25 bp, Homo sapien
caattataattgcaagaggagctca

SEQ ID NO: 4155100 - DNA, 25 bp, Homo sapien
ttgattacggccaaagatgacctct

SEQ ID NO: 4155101 - DNA, 25 bp, Homo sapien
accctggacaacttgattacggcca

SEQ ID NO: 4155102 - DNA, 25 bp, Homo sapien
caggccaggctacattgacaggaag

SEQ ID NO: 4155103 - DNA, 25 bp, Homo sapien
ttcacatgaacaacacgactttggc

SEQ ID NO: 4155104 - DNA, 25 bp, Homo sapien
gtgctgatgaatgacacagattcct

SEQ ID NO: 4155105 - DNA, 25 bp, Homo sapien
cgcaagttgaataccatgaaaaggg

SEQ ID NO: 4155106 - DNA, 25 bp, Homo sapien
gaactggcttcttggtcccgctcaa

SEQ ID NO: 4155107 - DNA, 25 bp, Homo sapien
tatttgtagacaaggatctgttgga

SEQ ID NO: 4155108 - DNA, 25 bp, Homo sapien
acctccggtcacttttgactctggg

SEQ ID NO: 4155109 - DNA, 25 bp, Homo sapien
gggcctttctcatgtaatgaacttg

SEQ ID NO: 4155110 - DNA, 25 bp, Homo sapien
ttctcatgtaatgaacttgattctg

SEQ ID NO: 4155111 - DNA, 25 bp, Homo sapien
ctacctccggtcacttttgactctg

SEQ ID NO: 4155112 - DNA, 25 bp, Homo sapien
ttctgctggaaattgacagcattcc

SEQ ID NO: 4155113 - DNA, 25 bp, Homo sapien
tccatctattacagtgggggaataa

SEQ ID NO: 4155114 - DNA, 25 bp, Homo sapien
gctctatatcttcacttaactcttc

SEQ ID NO: 4155115 - DNA, 25 bp, Homo sapien
ttttgctctatatcttcacttaact

SEQ ID NO: 4155116 - DNA, 25 bp, Homo sapien
ctgcttttccatctattacagtggg

SEQ ID NO: 4155117 - DNA, 25 bp, Homo sapien
caaattcagcatccggatatgtcta

SEQ ID NO: 4155118 - DNA, 25 bp, Homo sapien
tggccattgtaagcccacaagacaa

SEQ ID NO: 4155119 - DNA, 25 bp, Homo sapien
caatatgccaatagtgaggattgca

SEQ ID NO: 4155120 - DNA, 25 bp, Homo sapien
gatatgtctaggtcccacaatatgc

SEQ ID NO: 4155121 - DNA, 25 bp, Homo sapien
ggtaatggaagcacctcacaggaac

SEQ ID NO: 4155122 - DNA, 25 bp, Homo sapien
aatggaagcacctcacaggaactga

SEQ ID NO: 4155123 - DNA, 25 bp, Homo sapien
tgggtaatggaagcacctcacagga

SEQ ID NO: 4155124 - DNA, 25 bp, Homo sapien
taatggaagcacctcacaggaactg

SEQ ID NO: 4155125 - DNA, 25 bp, Homo sapien
tcccaggattcaccaccacatcttc

SEQ ID NO: 4155126 - DNA, 25 bp, Homo sapien
ctatcctcgcagaattgtggcagac

SEQ ID NO: 4155127 - DNA, 25 bp, Homo sapien
cagctatcctcgcagaattgtggca

SEQ ID NO: 4155128 - DNA, 25 bp, Homo sapien
agcagcagctatcctcgcagaattg

SEQ ID NO: 4155129 - DNA, 25 bp, Homo sapien
gaatgttcagttctcccctgggagc

SEQ ID NO: 4155130 - DNA, 25 bp, Homo sapien
tacaccgctgctggttgctcagtgc

SEQ ID NO: 4155131 - DNA, 25 bp, Homo sapien
gccactgcttgtgttattggagaaa

SEQ ID NO: 4155132 - DNA, 25 bp, Homo sapien
tagaatatcgtcctttaagttggga

SEQ ID NO: 4155133 - DNA, 25 bp, Homo sapien
ggtctcccacttgggtgccactttc

SEQ ID NO: 4155134 - DNA, 25 bp, Homo sapien
tctcccacttgggtgccactttctg

SEQ ID NO: 4155135 - DNA, 25 bp, Homo sapien
ctgggtctcccacttgggtgccact

SEQ ID NO: 4155136 - DNA, 25 bp, Homo sapien
actgggtctcccacttgggtgccac

SEQ ID NO: 4155137 - DNA, 25 bp, Homo sapien
gagagctgaaatgtatgggtctttg

SEQ ID NO: 4155138 - DNA, 25 bp, Homo sapien
gctgaaatgtatgggtctttgtcac

SEQ ID NO: 4155139 - DNA, 25 bp, Homo sapien
aatgtatgggtctttgtcacaaagc

SEQ ID NO: 4155140 - DNA, 25 bp, Homo sapien
tatgggtctttgtcacaaagctcac

SEQ ID NO: 4155141 - DNA, 25 bp, Homo sapien
gattagggacacaatgttgaacaga

SEQ ID NO: 4155142 - DNA, 25 bp, Homo sapien
tgattagggacacaatgttgaacag

SEQ ID NO: 4155143 - DNA, 25 bp, Homo sapien
ctgattagggacacaatgttgaaca

SEQ ID NO: 4155144 - DNA, 25 bp, Homo sapien
ctctcttgcttctgtcactttttcg

SEQ ID NO: 4155145 - DNA, 25 bp, Homo sapien
cttctgtcactttttcgcctccctg

SEQ ID NO: 4155146 - DNA, 25 bp, Homo sapien
ttgcttctgtcactttttcgcctcc

SEQ ID NO: 4155147 - DNA, 25 bp, Homo sapien
tcttgcttctgtcactttttcgcct

SEQ ID NO: 4155148 - DNA, 25 bp, Homo sapien
agcagcgcctgtcgccagctttcgg

SEQ ID NO: 4155149 - DNA, 25 bp, Homo sapien
gccgcgacgctgactgcgcgctggg

SEQ ID NO: 4155150 - DNA, 25 bp, Homo sapien
ctggggaagtcttgcgccgcccttg

SEQ ID NO: 4155151 - DNA, 25 bp, Homo sapien
ctggcgctccctgcagcagtcggag

SEQ ID NO: 4155152 - DNA, 25 bp, Homo sapien
cgccagctgcgggcgtgacccgcac

SEQ ID NO: 4155153 - DNA, 25 bp, Homo sapien
gcgccagctgcgggcgtgacccgca

SEQ ID NO: 4155154 - DNA, 25 bp, Homo sapien
ctgcgcgccagctgcgggcgtgacc

SEQ ID NO: 4155155 - DNA, 25 bp, Homo sapien
gcgcgccagctgcgggcgtgacccg

SEQ ID NO: 4155156 - DNA, 25 bp, Homo sapien
attctggcccgtgccccgtctctct

SEQ ID NO: 4155157 - DNA, 25 bp, Homo sapien
ccctccttccgctgctggattctgg

SEQ ID NO: 4155158 - DNA, 25 bp, Homo sapien
tcccaccgagagatggattcgaaga

SEQ ID NO: 4155159 - DNA, 25 bp, Homo sapien
ccaccgagagatggattcgaagact

SEQ ID NO: 4155160 - DNA, 25 bp, Homo sapien
tggaaaactgcaagcgatttccgat

SEQ ID NO: 4155161 - DNA, 25 bp, Homo sapien
ttggaaaactgcaagcgatttccga

SEQ ID NO: 4155162 - DNA, 25 bp, Homo sapien
gttggaaaactgcaagcgatttccg

SEQ ID NO: 4155163 - DNA, 25 bp, Homo sapien
catgcaaactgaaataacctcaaca

SEQ ID NO: 4155164 - DNA, 25 bp, Homo sapien
ggccacctctttcatgcaaactgaa

SEQ ID NO: 4155165 - DNA, 25 bp, Homo sapien
caacatcacatccagcattggaacc

SEQ ID NO: 4155166 - DNA, 25 bp, Homo sapien
tccagcattggaacctccccaaatg

SEQ ID NO: 4155167 - DNA, 25 bp, Homo sapien
tcagcttgacaatcggcctagaggg

SEQ ID NO: 4155168 - DNA, 25 bp, Homo sapien
gcagatagacatacaggagttggaa

SEQ ID NO: 4155169 - DNA, 25 bp, Homo sapien
gaagtcccggtgaagaactgtcctg

SEQ ID NO: 4155170 - DNA, 25 bp, Homo sapien
tgagaacctctgaagtcccggtgaa

SEQ ID NO: 4155171 - DNA, 25 bp, Homo sapien
agtttcacagtccaattcattctct

SEQ ID NO: 4155172 - DNA, 25 bp, Homo sapien
attgaattgtgggttttcatcacca

SEQ ID NO: 4155173 - DNA, 25 bp, Homo sapien
catcaccatttcgtctcctcatgtt

SEQ ID NO: 4155174 - DNA, 25 bp, Homo sapien
gagaagttcatgaaagtttcacagt

SEQ ID NO: 4155175 - DNA, 25 bp, Homo sapien
cttcatggtttaaagctgggaatgc

SEQ ID NO: 4155176 - DNA, 25 bp, Homo sapien
ttcttcatggtttaaagctgggaat

SEQ ID NO: 4155177 - DNA, 25 bp, Homo sapien
tcttcatggtttaaagctgggaatg

SEQ ID NO: 4155178 - DNA, 25 bp, Homo sapien
ttcatggtttaaagctgggaatgct

SEQ ID NO: 4155179 - DNA, 25 bp, Homo sapien
aactagtctgttatcccactgagga

SEQ ID NO: 4155180 - DNA, 25 bp, Homo sapien
tgaggatagttatcaccctgccaaa

SEQ ID NO: 4155181 - DNA, 25 bp, Homo sapien
tttcaccttgaaacactattggcca

SEQ ID NO: 4155182 - DNA, 25 bp, Homo sapien
aatgatcagtggctctggcctttcc

SEQ ID NO: 4155183 - DNA, 25 bp, Homo sapien
cactcccagttcatgttatgccagg

SEQ ID NO: 4155184 - DNA, 25 bp, Homo sapien
gcactgtttcgtccagaaggttgaa

SEQ ID NO: 4155185 - DNA, 25 bp, Homo sapien
taatcgaacgtgaatgacactccca

SEQ ID NO: 4155186 - DNA, 25 bp, Homo sapien
gtccaccctagaaatgaaccacatg

SEQ ID NO: 4155187 - DNA, 25 bp, Homo sapien
caaaaggtaatcacagcaatcaagg

SEQ ID NO: 4155188 - DNA, 25 bp, Homo sapien
gatagttggtagattagggtccctg

SEQ ID NO: 4155189 - DNA, 25 bp, Homo sapien
caatgcatgtgcacagttcaatcgg

SEQ ID NO: 4155190 - DNA, 25 bp, Homo sapien
ttctgacactggtagggtccctcta

SEQ ID NO: 4155191 - DNA, 25 bp, Homo sapien
tgatctctgatcgaggaaaatctgt

SEQ ID NO: 4155192 - DNA, 25 bp, Homo sapien
tctgatctctgatcgaggaaaatct

SEQ ID NO: 4155193 - DNA, 25 bp, Homo sapien
gatctctgatcgaggaaaatctgtt

SEQ ID NO: 4155194 - DNA, 25 bp, Homo sapien
gattctgatctctgatcgaggaaaa

SEQ ID NO: 4155195 - DNA, 25 bp, Homo sapien
aatcacaagcagtatgccgggctgc

SEQ ID NO: 4155196 - DNA, 25 bp, Homo sapien
cattgagcattgctgaatcacaagc

SEQ ID NO: 4155197 - DNA, 25 bp, Homo sapien
cacaccagatgttgcaccttcagca

SEQ ID NO: 4155198 - DNA, 25 bp, Homo sapien
tcatgcttctcatgtgcttgccaca

SEQ ID NO: 4155199 - DNA, 25 bp, Homo sapien
gccccatgaaaagccagaacattgg

SEQ ID NO: 4155200 - DNA, 25 bp, Homo sapien
ttagtgacccctaggcatccaaagt

SEQ ID NO: 4155201 - DNA, 25 bp, Homo sapien
tagcacctatctgtggtactgtggt

SEQ ID NO: 4155202 - DNA, 25 bp, Homo sapien
ctggtttgtggagggctatcatgaa

SEQ ID NO: 4155203 - DNA, 25 bp, Homo sapien
tgggtgctcccttctggcctataga

SEQ ID NO: 4155204 - DNA, 25 bp, Homo sapien
tgttaggtccattaagtctgtagtg

SEQ ID NO: 4155205 - DNA, 25 bp, Homo sapien
ttgtaagcgaggtattgaaatcacc

SEQ ID NO: 4155206 - DNA, 25 bp, Homo sapien
tttgtgacctaacatcttacctatc

SEQ ID NO: 4155207 - DNA, 25 bp, Homo sapien
actccattatcatgttgaatagaag

SEQ ID NO: 4155208 - DNA, 25 bp, Homo sapien
aactccattatcatgttgaatagaa

SEQ ID NO: 4155209 - DNA, 25 bp, Homo sapien
gaactccattatcatgttgaataga

SEQ ID NO: 4155210 - DNA, 25 bp, Homo sapien
aatgcattatactctcagggtgaat

SEQ ID NO: 4155211 - DNA, 25 bp, Homo sapien
atgcattatactctcagggtgaata

SEQ ID NO: 4155212 - DNA, 25 bp, Homo sapien
gcattatactctcagggtgaatatt

SEQ ID NO: 4155213 - DNA, 25 bp, Homo sapien
tgcattatactctcagggtgaatat

SEQ ID NO: 4155214 - DNA, 25 bp, Homo sapien
gagattctggttcgttgtgtctttt

SEQ ID NO: 4155215 - DNA, 25 bp, Homo sapien
gtgtctttttttctcattgatttca

SEQ ID NO: 4155216 - DNA, 25 bp, Homo sapien
ttgttgattgtttcaaaaaaacagc

SEQ ID NO: 4155217 - DNA, 25 bp, Homo sapien
tctttttttctcattgatttcaaag

SEQ ID NO: 4155218 - DNA, 25 bp, Homo sapien
cagttcccctttatacctctggtag

SEQ ID NO: 4155219 - DNA, 25 bp, Homo sapien
tcttcgtggtcaggcattctggcca

SEQ ID NO: 4155220 - DNA, 25 bp, Homo sapien
caaagatgctgtcaagagccattgg

SEQ ID NO: 4155221 - DNA, 25 bp, Homo sapien
tacaatgtgtatggacaagtggcca

SEQ ID NO: 4155222 - DNA, 25 bp, Homo sapien
gaaagaacaccagttattgtcatgg

SEQ ID NO: 4155223 - DNA, 25 bp, Homo sapien
tcaaaattgaatgtgagaaaacatt

SEQ ID NO: 4155224 - DNA, 25 bp, Homo sapien
cagtttagtttggtaggcagcatta

SEQ ID NO: 4155225 - DNA, 25 bp, Homo sapien
ttctttgttctataggaattacaga

SEQ ID NO: 4155226 - DNA, 25 bp, Homo sapien
agtcatataatgacttgttcagtca

SEQ ID NO: 4155227 - DNA, 25 bp, Homo sapien
ggcaatgtcttaaccatatgtgtct

SEQ ID NO: 4155228 - DNA, 25 bp, Homo sapien
cttaaccatatgtgtcttgtcatgc

SEQ ID NO: 4155229 - DNA, 25 bp, Homo sapien
ccatccttgtcaaggagtatggtaa

SEQ ID NO: 4155230 - DNA, 25 bp, Homo sapien
tccttgtcaaggagtatggtaacct

SEQ ID NO: 4155231 - DNA, 25 bp, Homo sapien
actggagtccaagagtatgtttagc

SEQ ID NO: 4155232 - DNA, 25 bp, Homo sapien
gtttagatcctaaatatctctgtta

SEQ ID NO: 4155233 - DNA, 25 bp, Homo sapien
ttttagagtatgggccatatagtga

SEQ ID NO: 4155234 - DNA, 25 bp, Homo sapien
tatgtctgactgtgtgttcaatttt

SEQ ID NO: 4155235 - DNA, 25 bp, Homo sapien
ttcgtcttggctgtcgttggtttat

SEQ ID NO: 4155236 - DNA, 25 bp, Homo sapien
cctgatttgactttcgtcttggctg

SEQ ID NO: 4155237 - DNA, 25 bp, Homo sapien
taaggagcttttgtgcttagactat

SEQ ID NO: 4155238 - DNA, 25 bp, Homo sapien
tttgtatcatgaaattttgctaaag

SEQ ID NO: 4155239 - DNA, 25 bp, Homo sapien
tggagccttatttctcggctctcca

SEQ ID NO: 4155240 - DNA, 25 bp, Homo sapien
ttgcagttgttttgaggtcttcatc

SEQ ID NO: 4155241 - DNA, 25 bp, Homo sapien
tgttgcagttgttttgaggtcttca

SEQ ID NO: 4155242 - DNA, 25 bp, Homo sapien
aggtgtggagccttatttctcggct

SEQ ID NO: 4155243 - DNA, 25 bp, Homo sapien
ctcaatgatcattaaggagtaggtt

SEQ ID NO: 4155244 - DNA, 25 bp, Homo sapien
tgcatatagctgttaagtccctttg

SEQ ID NO: 4155245 - DNA, 25 bp, Homo sapien
tatttttaactcaatgatcattaag

SEQ ID NO: 4155246 - DNA, 25 bp, Homo sapien
gcatatagctgttaagtccctttgt

SEQ ID NO: 4155247 - DNA, 25 bp, Homo sapien
ttgaccttatttagattttctctct

SEQ ID NO: 4155248 - DNA, 25 bp, Homo sapien
attttcagcttggtcagtcttggtg

SEQ ID NO: 4155249 - DNA, 25 bp, Homo sapien
ttttcagcttggtcagtcttggtgt

SEQ ID NO: 4155250 - DNA, 25 bp, Homo sapien
cttagcccattttttgatggaattt

SEQ ID NO: 4155251 - DNA, 25 bp, Homo sapien
gatgttagccctctgtcagatgtat

SEQ ID NO: 4155252 - DNA, 25 bp, Homo sapien
tgttagccctctgtcagatgtatag

SEQ ID NO: 4155253 - DNA, 25 bp, Homo sapien
tggatgttagccctctgtcagatgt

SEQ ID NO: 4155254 - DNA, 25 bp, Homo sapien
gggtttcatgactgcactagccagt

SEQ ID NO: 4155255 - DNA, 25 bp, Homo sapien
gaagatagtttctgcatgaccctaa

SEQ ID NO: 4155256 - DNA, 25 bp, Homo sapien
gacaaagcagttccaggtggtcaag

SEQ ID NO: 4155257 - DNA, 25 bp, Homo sapien
tagtcatgactgatgcacaggagct

SEQ ID NO: 4155258 - DNA, 25 bp, Homo sapien
tctcctagtgggtagtaaacaggct

SEQ ID NO: 4155259 - DNA, 25 bp, Homo sapien
cagtcttgagatggtgtagagtcta

SEQ ID NO: 4155260 - DNA, 25 bp, Homo sapien
taaacaggcttgctactaagagctc

SEQ ID NO: 4155261 - DNA, 25 bp, Homo sapien
gctatggatctatccggttctggga

SEQ ID NO: 4155262 - DNA, 25 bp, Homo sapien
tttggcgaccaagaagggacctcta

SEQ ID NO: 4155263 - DNA, 25 bp, Homo sapien
tggaggaaaatatcgggcacccttc

SEQ ID NO: 4155264 - DNA, 25 bp, Homo sapien
taaaaacgattagcgtggctgctgg

SEQ ID NO: 4155265 - DNA, 25 bp, Homo sapien
aaaatcagagaacccgaggcttgcc

SEQ ID NO: 4155266 - DNA, 25 bp, Homo sapien
tgtgcaaaaaatgataggagatgtg

SEQ ID NO: 4155267 - DNA, 25 bp, Homo sapien
gtagaatattactcgcttagaaatg

SEQ ID NO: 4155268 - DNA, 25 bp, Homo sapien
tgaaacatctttttagactccataa

SEQ ID NO: 4155269 - DNA, 25 bp, Homo sapien
agaggtcatcaacaagtgacttcac

SEQ ID NO: 4155270 - DNA, 25 bp, Homo sapien
tgtgagacaatgagactctagccaa

SEQ ID NO: 4155271 - DNA, 25 bp, Homo sapien
tcatttacatgattgggaacacaag

SEQ ID NO: 4155272 - DNA, 25 bp, Homo sapien
gattcctctgttactcgatgggcaa

SEQ ID NO: 4155273 - DNA, 25 bp, Homo sapien
gactaaggtatcatgagatagccca

SEQ ID NO: 4155274 - DNA, 25 bp, Homo sapien
ctgctcttgaagagatcctgtctgg

SEQ ID NO: 4155275 - DNA, 25 bp, Homo sapien
cggctcttgaaacgccctccaggct

SEQ ID NO: 4155276 - DNA, 25 bp, Homo sapien
cactccacggctcttgaaacgccct

SEQ ID NO: 4155277 - DNA, 25 bp, Homo sapien
tctctaattcactgcactccacggc

SEQ ID NO: 4155278 - DNA, 25 bp, Homo sapien
gattaatatagctgaaaaatggata

SEQ ID NO: 4155279 - DNA, 25 bp, Homo sapien
taaaagattaatatagctgaaaaat

SEQ ID NO: 4155280 - DNA, 25 bp, Homo sapien
aagattaatatagctgaaaaatgga

SEQ ID NO: 4155281 - DNA, 25 bp, Homo sapien
tttaaaagattaatatagctgaaaa

SEQ ID NO: 4155282 - DNA, 25 bp, Homo sapien
aagttttgatcagatgaatttaaga

SEQ ID NO: 4155283 - DNA, 25 bp, Homo sapien
caagttttgatcagatgaatttaag

SEQ ID NO: 4155284 - DNA, 25 bp, Homo sapien
ttaacagttcctctgaggtcaagtt

SEQ ID NO: 4155285 - DNA, 25 bp, Homo sapien
tttaacagttcctctgaggtcaagt

SEQ ID NO: 4155286 - DNA, 25 bp, Homo sapien
caagaaaatctgtgactgcaaggga

SEQ ID NO: 4155287 - DNA, 25 bp, Homo sapien
aataattgcagcgatcacaagggag

SEQ ID NO: 4155288 - DNA, 25 bp, Homo sapien
ccagacagagtgagggacaccagaa

SEQ ID NO: 4155289 - DNA, 25 bp, Homo sapien
gataccgatccaaagctatagctga

SEQ ID NO: 4155290 - DNA, 25 bp, Homo sapien
ggaattgagatacccaagccatgcc

SEQ ID NO: 4155291 - DNA, 25 bp, Homo sapien
taacatcgacatcgcacaagctttt

SEQ ID NO: 4155292 - DNA, 25 bp, Homo sapien
caagattaatcccagggtagtggct

SEQ ID NO: 4155293 - DNA, 25 bp, Homo sapien
gtagtggctgctttccgttctcttg

SEQ ID NO: 4155294 - DNA, 25 bp, Homo sapien
tgctttggctcactgaactagtaga

SEQ ID NO: 4155295 - DNA, 25 bp, Homo sapien
cactaagtaagagttgctccttccc

SEQ ID NO: 4155296 - DNA, 25 bp, Homo sapien
gagagcaattataacaacgtcaccc

SEQ ID NO: 4155297 - DNA, 25 bp, Homo sapien
ggtcttcccaaaggtagtctatgac

SEQ ID NO: 4155298 - DNA, 25 bp, Homo sapien
tatcagtgattacccatcgtcagca

SEQ ID NO: 4155299 - DNA, 25 bp, Homo sapien
tgaacatgccccaccaaatacttgc

SEQ ID NO: 4155300 - DNA, 25 bp, Homo sapien
tgtgtaaacaacttccatgccagat

SEQ ID NO: 4155301 - DNA, 25 bp, Homo sapien
gccccagtgctgtgtatttgacatg

SEQ ID NO: 4155302 - DNA, 25 bp, Homo sapien
aacaggaaacccacaatgcagaaca

SEQ ID NO: 4155303 - DNA, 25 bp, Homo sapien
gaaacccacaatgcagaacaccagg

SEQ ID NO: 4155304 - DNA, 25 bp, Homo sapien
tgcgtgtcaaatgccctctgactca

SEQ ID NO: 4155305 - DNA, 25 bp, Homo sapien
tgcagaacaccaggttgcgtgtcaa

SEQ ID NO: 4155306 - DNA, 25 bp, Homo sapien
tctgcatgaacccagtcgctgatgt

SEQ ID NO: 4155307 - DNA, 25 bp, Homo sapien
ccagtcgctgatgtgaagggtaggg

SEQ ID NO: 4155308 - DNA, 25 bp, Homo sapien
ccgtgaggctcctgttactgcgcat

SEQ ID NO: 4155309 - DNA, 25 bp, Homo sapien
gtcagcgtagttagggaatccgtga

SEQ ID NO: 4155310 - DNA, 25 bp, Homo sapien
tcagagagattgaggataaaaggga

SEQ ID NO: 4155311 - DNA, 25 bp, Homo sapien
tctcactcttcctagtgatgataaa

SEQ ID NO: 4155312 - DNA, 25 bp, Homo sapien
tcctagtgatgataaagtcagagag

SEQ ID NO: 4155313 - DNA, 25 bp, Homo sapien
aagtcagagagattgaggataaaag

SEQ ID NO: 4155314 - DNA, 25 bp, Homo sapien
tctgatcggcacagatcagaaaaag

SEQ ID NO: 4155315 - DNA, 25 bp, Homo sapien
aacatgcagaattagcaaaagcttc

SEQ ID NO: 4155316 - DNA, 25 bp, Homo sapien
aaaccccaggtgaattaaacatgca

SEQ ID NO: 4155317 - DNA, 25 bp, Homo sapien
aaagtttggtataggatgctagtcc

SEQ ID NO: 4155318 - DNA, 25 bp, Homo sapien
tatagctcaacaactgaggcattgg

SEQ ID NO: 4155319 - DNA, 25 bp, Homo sapien
caggctgtaatctagatactggaca

SEQ ID NO: 4155320 - DNA, 25 bp, Homo sapien
catacaaagatggataagtcacagc

SEQ ID NO: 4155321 - DNA, 25 bp, Homo sapien
atttatacatcacggctgccctaag

SEQ ID NO: 4155322 - DNA, 25 bp, Homo sapien
agccctattaggtaagatccaacag

SEQ ID NO: 4155323 - DNA, 25 bp, Homo sapien
ttggtatagaattcctttaggtctg

SEQ ID NO: 4155324 - DNA, 25 bp, Homo sapien
taaaatcagaccttctaatcttggg

SEQ ID NO: 4155325 - DNA, 25 bp, Homo sapien
tctgtttgaatggtaatccaagccc

SEQ ID NO: 4155326 - DNA, 25 bp, Homo sapien
catagatttcttaggtaaatacaat

SEQ ID NO: 4155327 - DNA, 25 bp, Homo sapien
tcatagatttcttaggtaaatacaa

SEQ ID NO: 4155328 - DNA, 25 bp, Homo sapien
tagatttcttaggtaaatacaattc

SEQ ID NO: 4155329 - DNA, 25 bp, Homo sapien
agatttcttaggtaaatacaattct

SEQ ID NO: 4155330 - DNA, 25 bp, Homo sapien
agatctccaagctgaaacttccacg

SEQ ID NO: 4155331 - DNA, 25 bp, Homo sapien
tgtggtttgacttaccccagctacc

SEQ ID NO: 4155332 - DNA, 25 bp, Homo sapien
gggtgtataacaagcctgaaggaca

SEQ ID NO: 4155333 - DNA, 25 bp, Homo sapien
ccagctaccgttaaatgaggacaaa

SEQ ID NO: 4155334 - DNA, 25 bp, Homo sapien
tcagatccctagcagaaatgactgt

SEQ ID NO: 4155335 - DNA, 25 bp, Homo sapien
ggttatccaagtagcttagcccagc

SEQ ID NO: 4155336 - DNA, 25 bp, Homo sapien
cagctaagttctatcagagacccaa

SEQ ID NO: 4155337 - DNA, 25 bp, Homo sapien
caacgtcaatgccaaaagccaaggg

SEQ ID NO: 4155338 - DNA, 25 bp, Homo sapien
aagtcagaccagctacggagggcat

SEQ ID NO: 4155339 - DNA, 25 bp, Homo sapien
tctgaatcatgttcgcaagtctgcc

SEQ ID NO: 4155340 - DNA, 25 bp, Homo sapien
gattgttgactaggaggttaccacc

SEQ ID NO: 4155341 - DNA, 25 bp, Homo sapien
ggaagccaacatcccacttgagaag

SEQ ID NO: 4155342 - DNA, 25 bp, Homo sapien
ttttggaaaacggaggtatacatgc

SEQ ID NO: 4155343 - DNA, 25 bp, Homo sapien
ggttctgctgtatactagactctat

SEQ ID NO: 4155344 - DNA, 25 bp, Homo sapien
tcatcttcatatagaattatggcag

SEQ ID NO: 4155345 - DNA, 25 bp, Homo sapien
tatggcagtttataggcccacctgt

SEQ ID NO: 4155346 - DNA, 25 bp, Homo sapien
gaaagagagttcatgttacccagct

SEQ ID NO: 4155347 - DNA, 25 bp, Homo sapien
ggtttcaatgcccataaggctgtca

SEQ ID NO: 4155348 - DNA, 25 bp, Homo sapien
catgactgtctgatacgttggcaat

SEQ ID NO: 4155349 - DNA, 25 bp, Homo sapien
catttggtatttagtgcagtgctca

SEQ ID NO: 4155350 - DNA, 25 bp, Homo sapien
cataattggtactgatttgtgaggg

SEQ ID NO: 4155351 - DNA, 25 bp, Homo sapien
agtataggcctttcacattagcaca

SEQ ID NO: 4155352 - DNA, 25 bp, Homo sapien
tactagataggaatcataactgtct

SEQ ID NO: 4155353 - DNA, 25 bp, Homo sapien
tcttgaaattacgaaaacattggaa

SEQ ID NO: 4155354 - DNA, 25 bp, Homo sapien
tgattttagaaacacctgcgtggtg

SEQ ID NO: 4155355 - DNA, 25 bp, Homo sapien
cacagggaaaatcgggtgcaagccc

SEQ ID NO: 4155356 - DNA, 25 bp, Homo sapien
cattccctgctaagtatcaagacga

SEQ ID NO: 4155357 - DNA, 25 bp, Homo sapien
aaagtgccaggatttgatgcgtctc

SEQ ID NO: 4155358 - DNA, 25 bp, Homo sapien
cgaggcgttcggcctcttggtcgct

SEQ ID NO: 4155359 - DNA, 25 bp, Homo sapien
ttctccgaggcgttcggcctcttgg

SEQ ID NO: 4155360 - DNA, 25 bp, Homo sapien
ggcccagcggggactccacaatggc

SEQ ID NO: 4155361 - DNA, 25 bp, Homo sapien
agggcccagcggggactccacaatg

SEQ ID NO: 4155362 - DNA, 25 bp, Homo sapien
agaagcgtcggcagtaatcccgact

SEQ ID NO: 4155363 - DNA, 25 bp, Homo sapien
cgtcggcagtaatcccgactgctga

SEQ ID NO: 4155364 - DNA, 25 bp, Homo sapien
gccgccgcagttgccgctgccagcg

SEQ ID NO: 4155365 - DNA, 25 bp, Homo sapien
taatcccgactgctgattccgacgc

SEQ ID NO: 4155366 - DNA, 25 bp, Homo sapien
tgacaagtcggggcggccaacggac

SEQ ID NO: 4155367 - DNA, 25 bp, Homo sapien
gtcggggcggccaacggacgcctca

SEQ ID NO: 4155368 - DNA, 25 bp, Homo sapien
gtgacaagtcggggcggccaacgga

SEQ ID NO: 4155369 - DNA, 25 bp, Homo sapien
tcggggcggccaacggacgcctcac

SEQ ID NO: 4155370 - DNA, 25 bp, Homo sapien
tcagcgtctacgccaactggagaac

SEQ ID NO: 4155371 - DNA, 25 bp, Homo sapien
gtctacgccaactggagaaccggcc

SEQ ID NO: 4155372 - DNA, 25 bp, Homo sapien
gcgtctacgccaactggagaaccgg

SEQ ID NO: 4155373 - DNA, 25 bp, Homo sapien
ccggcccagcgggatcttgtgaggg

SEQ ID NO: 4155374 - DNA, 25 bp, Homo sapien
aaaccaaaattcacttggtatcctg

SEQ ID NO: 4155375 - DNA, 25 bp, Homo sapien
tggtgagcctggtgaggtttaaacc

SEQ ID NO: 4155376 - DNA, 25 bp, Homo sapien
tgagcctggtgaggtttaaaccaaa

SEQ ID NO: 4155377 - DNA, 25 bp, Homo sapien
tggcacactggtgagcctggtgagg

SEQ ID NO: 4155378 - DNA, 25 bp, Homo sapien
gcctcacatttttcttgttcccagt

SEQ ID NO: 4155379 - DNA, 25 bp, Homo sapien
ctgacagcctcacatttttcttgtt

SEQ ID NO: 4155380 - DNA, 25 bp, Homo sapien
cacatttttcttgttcccagtccat

SEQ ID NO: 4155381 - DNA, 25 bp, Homo sapien
ctcacatttttcttgttcccagtcc

SEQ ID NO: 4155382 - DNA, 25 bp, Homo sapien
aggtactcacacatctttccaatgt

SEQ ID NO: 4155383 - DNA, 25 bp, Homo sapien
gtactcacacatctttccaatgttt

SEQ ID NO: 4155384 - DNA, 25 bp, Homo sapien
caggtactcacacatctttccaatg

SEQ ID NO: 4155385 - DNA, 25 bp, Homo sapien
ggtactcacacatctttccaatgtt

SEQ ID NO: 4155386 - DNA, 25 bp, Homo sapien
gaaaagagtccagaatacagtcagt

SEQ ID NO: 4155387 - DNA, 25 bp, Homo sapien
taaaatattagatcggcatgaacac

SEQ ID NO: 4155388 - DNA, 25 bp, Homo sapien
gagatgacaatgctctctgaagcca

SEQ ID NO: 4155389 - DNA, 25 bp, Homo sapien
tatgaatctgggtaggtcaacaggt

SEQ ID NO: 4155390 - DNA, 25 bp, Homo sapien
aacaaagggcagtctgaagaacctg

SEQ ID NO: 4155391 - DNA, 25 bp, Homo sapien
cattcatctgggaatgatgcactgg

SEQ ID NO: 4155392 - DNA, 25 bp, Homo sapien
cagcaaggctactcaaaacatattg

SEQ ID NO: 4155393 - DNA, 25 bp, Homo sapien
gatgcactggctgttgtaaaacaac

SEQ ID NO: 4155394 - DNA, 25 bp, Homo sapien
caatttttaaagacgcacagtgtac

SEQ ID NO: 4155395 - DNA, 25 bp, Homo sapien
gccaggtataatcaaaaagttcaaa

SEQ ID NO: 4155396 - DNA, 25 bp, Homo sapien
aactgcctcactcttacaaatctaa

SEQ ID NO: 4155397 - DNA, 25 bp, Homo sapien
tacgtaagcttgagtaagacttgcc

SEQ ID NO: 4155398 - DNA, 25 bp, Homo sapien
tatctaactggcagagccgtaggtt

SEQ ID NO: 4155399 - DNA, 25 bp, Homo sapien
tactgatcagcctagttctacatag

SEQ ID NO: 4155400 - DNA, 25 bp, Homo sapien
tctacatagaatcagggtcatcaat

SEQ ID NO: 4155401 - DNA, 25 bp, Homo sapien
ttcagaagaacctgcctgtggctgt

SEQ ID NO: 4155402 - DNA, 25 bp, Homo sapien
ttatgtatgggccaagacaatccct

SEQ ID NO: 4155403 - DNA, 25 bp, Homo sapien
cactgtatatgtaggctataccgca

SEQ ID NO: 4155404 - DNA, 25 bp, Homo sapien
aaagctgtttatgtgtacagggcac

SEQ ID NO: 4155405 - DNA, 25 bp, Homo sapien
gacctatgacatgactacacactca

SEQ ID NO: 4155406 - DNA, 25 bp, Homo sapien
acatttttgctgacctccaagacag

SEQ ID NO: 4155407 - DNA, 25 bp, Homo sapien
gtacagcaagttagctcacccagca

SEQ ID NO: 4155408 - DNA, 25 bp, Homo sapien
catgggcagtagtagaaaagctagt

SEQ ID NO: 4155409 - DNA, 25 bp, Homo sapien
tgtcattccttcagagtacagcaag

SEQ ID NO: 4155410 - DNA, 25 bp, Homo sapien
gatgggcaatactcattgggaccta

SEQ ID NO: 4155411 - DNA, 25 bp, Homo sapien
caatactaagtttctaacgatggcc

SEQ ID NO: 4155412 - DNA, 25 bp, Homo sapien
tgttcgtcaatataaagagtcagga

SEQ ID NO: 4155413 - DNA, 25 bp, Homo sapien
caaagaaatagaacgctagacgacc

SEQ ID NO: 4155414 - DNA, 25 bp, Homo sapien
atgctatccctccccgctttcccca

SEQ ID NO: 4155415 - DNA, 25 bp, Homo sapien
tccccgctttccccaccccatgaca

SEQ ID NO: 4155416 - DNA, 25 bp, Homo sapien
tgctatccctccccgctttccccac

SEQ ID NO: 4155417 - DNA, 25 bp, Homo sapien
tatcctttaagggctcttcataaaa

SEQ ID NO: 4155418 - DNA, 25 bp, Homo sapien
ctttaagggctcttcataaaactca

SEQ ID NO: 4155419 - DNA, 25 bp, Homo sapien
gacaaagtgtgaagtagtaaactgt

SEQ ID NO: 4155420 - DNA, 25 bp, Homo sapien
gtctattttaagtgtagacaaagtg

SEQ ID NO: 4155421 - DNA, 25 bp, Homo sapien
taagtgtagacaaagtgtgaagtag

SEQ ID NO: 4155422 - DNA, 25 bp, Homo sapien
tattttaagtgtagacaaagtgtga

SEQ ID NO: 4155423 - DNA, 25 bp, Homo sapien
gggctgaatgtaaaactcatgtttg

SEQ ID NO: 4155424 - DNA, 25 bp, Homo sapien
tatacgcataaagaggatatgtgct

SEQ ID NO: 4155425 - DNA, 25 bp, Homo sapien
tatagtatgagtacatgtgcgtaag

SEQ ID NO: 4155426 - DNA, 25 bp, Homo sapien
taggcctctatcgactaccactcag

SEQ ID NO: 4155427 - DNA, 25 bp, Homo sapien
ccaaacatcaaagtaaactgaacct

SEQ ID NO: 4155428 - DNA, 25 bp, Homo sapien
aatacgctataatcacactaatgtc

SEQ ID NO: 4155429 - DNA, 25 bp, Homo sapien
aggtacttgtcctaatgctcagaca

SEQ ID NO: 4155430 - DNA, 25 bp, Homo sapien
ttttcaaaaatacgctataatcaca

SEQ ID NO: 4155431 - DNA, 25 bp, Homo sapien
tactctagacatacagatgactgcc

SEQ ID NO: 4155432 - DNA, 25 bp, Homo sapien
gcctagcacctagtaagcgctcaaa

SEQ ID NO: 4155433 - DNA, 25 bp, Homo sapien
aaggtaagcaaggtagcaagctccc

SEQ ID NO: 4155434 - DNA, 25 bp, Homo sapien
gatgactgccccgaaaattcaacta

SEQ ID NO: 4155435 - DNA, 25 bp, Homo sapien
gagatggagtcttaactttgatgcc

SEQ ID NO: 4155436 - DNA, 25 bp, Homo sapien
tggagtcttaactttgatgcccagg

SEQ ID NO: 4155437 - DNA, 25 bp, Homo sapien
tagtctcaatctcttgacctcatga

SEQ ID NO: 4155438 - DNA, 25 bp, Homo sapien
agtctcaatctcttgacctcatgat

SEQ ID NO: 4155439 - DNA, 25 bp, Homo sapien
acagcttgcaacactggatcttccc

SEQ ID NO: 4155440 - DNA, 25 bp, Homo sapien
ccatctctaatgattcgagtcacca

SEQ ID NO: 4155441 - DNA, 25 bp, Homo sapien
cacatttccatatctgcggaggtga

SEQ ID NO: 4155442 - DNA, 25 bp, Homo sapien
gagtcaccagttccagattcacatt

SEQ ID NO: 4155443 - DNA, 25 bp, Homo sapien
aatgttggtttgattttgaatctcc

SEQ ID NO: 4155444 - DNA, 25 bp, Homo sapien
ttggtttgattttgaatctcctgaa

SEQ ID NO: 4155445 - DNA, 25 bp, Homo sapien
tttgattttgaatctcctgaagtac

SEQ ID NO: 4155446 - DNA, 25 bp, Homo sapien
gtttgattttgaatctcctgaagta

SEQ ID NO: 4155447 - DNA, 25 bp, Homo sapien
gtctttttagtctaagattacatac

SEQ ID NO: 4155448 - DNA, 25 bp, Homo sapien
tagcattttccttagtaggagttta

SEQ ID NO: 4155449 - DNA, 25 bp, Homo sapien
taaaaggctgaatcctaatctgtca

SEQ ID NO: 4155450 - DNA, 25 bp, Homo sapien
tattcagttatatggttggaaaaag

SEQ ID NO: 4155451 - DNA, 25 bp, Homo sapien
ggcacgtagttcaaagaacagtgga

SEQ ID NO: 4155452 - DNA, 25 bp, Homo sapien
ctggcacgtagttcaaagaacagtg

SEQ ID NO: 4155453 - DNA, 25 bp, Homo sapien
gcacgtagttcaaagaacagtggat

SEQ ID NO: 4155454 - DNA, 25 bp, Homo sapien
tggcacgtagttcaaagaacagtgg

SEQ ID NO: 4155455 - DNA, 25 bp, Homo sapien
gacatgtgaagagtgcttgatggaa

SEQ ID NO: 4155456 - DNA, 25 bp, Homo sapien
taagagccattgcttcgggtatgcg

SEQ ID NO: 4155457 - DNA, 25 bp, Homo sapien
ctgatttctgggtgatttatacaag

SEQ ID NO: 4155458 - DNA, 25 bp, Homo sapien
gaatagctgatcttctacaggtgac

SEQ ID NO: 4155459 - DNA, 25 bp, Homo sapien
tggtaataggcaaaaatagtctcaa

SEQ ID NO: 4155460 - DNA, 25 bp, Homo sapien
gaccttaagttatggtgccaaaaga

SEQ ID NO: 4155461 - DNA, 25 bp, Homo sapien
aatttaacaacaacagtgggctact

SEQ ID NO: 4155462 - DNA, 25 bp, Homo sapien
tctccatcacatcaaaagtgcaatg

SEQ ID NO: 4155463 - DNA, 25 bp, Homo sapien
gagttgcaaggctaacatagttttg

SEQ ID NO: 4155464 - DNA, 25 bp, Homo sapien
gattcacagagttgcaaggctaaca

SEQ ID NO: 4155465 - DNA, 25 bp, Homo sapien
cagatacagtacatatccccattct

SEQ ID NO: 4155466 - DNA, 25 bp, Homo sapien
gaaaggattcacagagttgcaaggc

SEQ ID NO: 4155467 - DNA, 25 bp, Homo sapien
ctcacattagttgctgttcttaaaa

SEQ ID NO: 4155468 - DNA, 25 bp, Homo sapien
ttaaaagctggtagcattgatctac

SEQ ID NO: 4155469 - DNA, 25 bp, Homo sapien
gctgttcttaaaagctggtagcatt

SEQ ID NO: 4155470 - DNA, 25 bp, Homo sapien
gaaatatgactctcacattagttgc

SEQ ID NO: 4155471 - DNA, 25 bp, Homo sapien
gatgactggcaaaacctcacactgt

SEQ ID NO: 4155472 - DNA, 25 bp, Homo sapien
tccaaaaagagaacaggctgcttcc

SEQ ID NO: 4155473 - DNA, 25 bp, Homo sapien
gctaccctttaatgtcaccagatgg

SEQ ID NO: 4155474 - DNA, 25 bp, Homo sapien
tacagggaggaatactaccttgcca

SEQ ID NO: 4155475 - DNA, 25 bp, Homo sapien
gatacgcttctaaggagcgctccag

SEQ ID NO: 4155476 - DNA, 25 bp, Homo sapien
taacatacaacgatgccttgggaca

SEQ ID NO: 4155477 - DNA, 25 bp, Homo sapien
taaagctcttcaacagtacgatacg

SEQ ID NO: 4155478 - DNA, 25 bp, Homo sapien
catgaaggtcgagttgtagagcaca

SEQ ID NO: 4155479 - DNA, 25 bp, Homo sapien
tgagctgcagcaatttgctgcctct

SEQ ID NO: 4155480 - DNA, 25 bp, Homo sapien
tcttaacatgattcttcaaatgctt

SEQ ID NO: 4155481 - DNA, 25 bp, Homo sapien
cctctgtatcttcttaacatgattc

SEQ ID NO: 4155482 - DNA, 25 bp, Homo sapien
atcctgttgagctgcagcaatttgc

SEQ ID NO: 4155483 - DNA, 25 bp, Homo sapien
tttcaatgaattcagccacatgctc

SEQ ID NO: 4155484 - DNA, 25 bp, Homo sapien
atcatccccacattcagttaaaggc

SEQ ID NO: 4155485 - DNA, 25 bp, Homo sapien
tcatccccacattcagttaaaggct

SEQ ID NO: 4155486 - DNA, 25 bp, Homo sapien
atccccacattcagttaaaggcttg

SEQ ID NO: 4155487 - DNA, 25 bp, Homo sapien
ccccacattcagttaaaggcttgaa

SEQ ID NO: 4155488 - DNA, 25 bp, Homo sapien
ggatggcacacagttccattgattt

SEQ ID NO: 4155489 - DNA, 25 bp, Homo sapien
cttttggatggcacacagttccatt

SEQ ID NO: 4155490 - DNA, 25 bp, Homo sapien
tttggatggcacacagttccattga

SEQ ID NO: 4155491 - DNA, 25 bp, Homo sapien
tccattgattttatgaattactgaa

SEQ ID NO: 4155492 - DNA, 25 bp, Homo sapien
caagagcaggacacttaaagtttcc

SEQ ID NO: 4155493 - DNA, 25 bp, Homo sapien
ctggaacggcagcttaaacgactcg

SEQ ID NO: 4155494 - DNA, 25 bp, Homo sapien
tgagcttcatgttcatacagcagag

SEQ ID NO: 4155495 - DNA, 25 bp, Homo sapien
taaatatccggacacaaccaagagc

SEQ ID NO: 4155496 - DNA, 25 bp, Homo sapien
tatacatgtctttggttctgtagac

SEQ ID NO: 4155497 - DNA, 25 bp, Homo sapien
cagtgtcatcagaacgttcgtttcc

SEQ ID NO: 4155498 - DNA, 25 bp, Homo sapien
gtgtccattgactatatcactacta

SEQ ID NO: 4155499 - DNA, 25 bp, Homo sapien
tagaaactggcagactaatagtttg

SEQ ID NO: 4155500 - DNA, 25 bp, Homo sapien
tcaaatccaaagagtgtctgacatt

SEQ ID NO: 4155501 - DNA, 25 bp, Homo sapien
caggcatctactctatcagtcagaa

SEQ ID NO: 4155502 - DNA, 25 bp, Homo sapien
ttatacacgttatcttgatcagaac

SEQ ID NO: 4155503 - DNA, 25 bp, Homo sapien
tgcgttttggcatactaagataccg

SEQ ID NO: 4155504 - DNA, 25 bp, Homo sapien
ctacagatacctctactaagaagac

SEQ ID NO: 4155505 - DNA, 25 bp, Homo sapien
cattttctctttctacagatacctc

SEQ ID NO: 4155506 - DNA, 25 bp, Homo sapien
tctactaagaagacagaagacttac

SEQ ID NO: 4155507 - DNA, 25 bp, Homo sapien
tctctttctacagatacctctacta

SEQ ID NO: 4155508 - DNA, 25 bp, Homo sapien
tgatattagtagacagacaagctct

SEQ ID NO: 4155509 - DNA, 25 bp, Homo sapien
tgcacaagttcataggcaaagccct

SEQ ID NO: 4155510 - DNA, 25 bp, Homo sapien
gaataacctttgatacagtgaagaa

SEQ ID NO: 4155511 - DNA, 25 bp, Homo sapien
caagttttattgacattcgaccgga

SEQ ID NO: 4155512 - DNA, 25 bp, Homo sapien
gatgctacctggaagaaattcccca

SEQ ID NO: 4155513 - DNA, 25 bp, Homo sapien
tataagcgaaactgaacatgctgct

SEQ ID NO: 4155514 - DNA, 25 bp, Homo sapien
gaactgttggaagtttatgcaccct

SEQ ID NO: 4155515 - DNA, 25 bp, Homo sapien
taatccttttggagtctaagccagc

SEQ ID NO: 4155516 - DNA, 25 bp, Homo sapien
cagtgtccttgtccacggagattcc

SEQ ID NO: 4155517 - DNA, 25 bp, Homo sapien
tgtccttgtccacggagattcccct

SEQ ID NO: 4155518 - DNA, 25 bp, Homo sapien
agtgtccttgtccacggagattccc

SEQ ID NO: 4155519 - DNA, 25 bp, Homo sapien
gtgtccttgtccacggagattcccc

SEQ ID NO: 4155520 - DNA, 25 bp, Homo sapien
gctgaaccttcagtgtgatttgaaa

SEQ ID NO: 4155521 - DNA, 25 bp, Homo sapien
ccaaacatgaaaggagtacggctga

SEQ ID NO: 4155522 - DNA, 25 bp, Homo sapien
gcagttcaatggctcagttttaatt

SEQ ID NO: 4155523 - DNA, 25 bp, Homo sapien
cttgaaatgagacactattgttgat

SEQ ID NO: 4155524 - DNA, 25 bp, Homo sapien
tatccgcaagggagctggttaccga

SEQ ID NO: 4155525 - DNA, 25 bp, Homo sapien
tcttgttgttctccgtcgaagggcc

SEQ ID NO: 4155526 - DNA, 25 bp, Homo sapien
gaggtcaatcaggaaacgcagtgcc

SEQ ID NO: 4155527 - DNA, 25 bp, Homo sapien
tatctcaattaagggaagtgctggg

SEQ ID NO: 4155528 - DNA, 25 bp, Homo sapien
catagggccatgatctcgtcgttgt

SEQ ID NO: 4155529 - DNA, 25 bp, Homo sapien
tgacagtgtcgcatagggccatgat

SEQ ID NO: 4155530 - DNA, 25 bp, Homo sapien
accaggcggttggtgacagtgtcgc

SEQ ID NO: 4155531 - DNA, 25 bp, Homo sapien
gtcgttgtccagtaggccaagtagg

SEQ ID NO: 4155532 - DNA, 25 bp, Homo sapien
caagtcggcgtagtggttccagagc

SEQ ID NO: 4155533 - DNA, 25 bp, Homo sapien
cggcagcccaagtcggcgtagtggt

SEQ ID NO: 4155534 - DNA, 25 bp, Homo sapien
tggatctgcggctgcggccaacatt

SEQ ID NO: 4155535 - DNA, 25 bp, Homo sapien
gcggccaacattcccgaggattctg

SEQ ID NO: 4155536 - DNA, 25 bp, Homo sapien
taacaatcccctgtgttgccaagta

SEQ ID NO: 4155537 - DNA, 25 bp, Homo sapien
tcggtggacttttctacgcctcaga

SEQ ID NO: 4155538 - DNA, 25 bp, Homo sapien
cttaaatataacttctcggtggact

SEQ ID NO: 4155539 - DNA, 25 bp, Homo sapien
cagtagctggaggtataacaatccc

SEQ ID NO: 4155540 - DNA, 25 bp, Homo sapien
gaggtggtcctagaaaaggattctg

SEQ ID NO: 4155541 - DNA, 25 bp, Homo sapien
tctcctaggcgacgaaaatcaactt

SEQ ID NO: 4155542 - DNA, 25 bp, Homo sapien
tcttgaggtggtcctagaaaaggat

SEQ ID NO: 4155543 - DNA, 25 bp, Homo sapien
gaaccaatgacagaattcttctcct

SEQ ID NO: 4155544 - DNA, 25 bp, Homo sapien
ccacaaaagggcagcggatgagtcc

SEQ ID NO: 4155545 - DNA, 25 bp, Homo sapien
tcacgatttctgctccatggtagtc

SEQ ID NO: 4155546 - DNA, 25 bp, Homo sapien
tttactagtgacagcaaacgaaggc

SEQ ID NO: 4155547 - DNA, 25 bp, Homo sapien
tgtttcctcgatggacagtcccagc

SEQ ID NO: 4155548 - DNA, 25 bp, Homo sapien
catgatatgtaagtctgtagtccag

SEQ ID NO: 4155549 - DNA, 25 bp, Homo sapien
tcagacattactgatatagtatttg

SEQ ID NO: 4155550 - DNA, 25 bp, Homo sapien
tagcgctttagagggtcaggtaaac

SEQ ID NO: 4155551 - DNA, 25 bp, Homo sapien
tttcaggctgacagtacttagcgct

SEQ ID NO: 4155552 - DNA, 25 bp, Homo sapien
ctttcagaatacttgctgcaactcg

SEQ ID NO: 4155553 - DNA, 25 bp, Homo sapien
ctggtttctaaggcacacagttagc

SEQ ID NO: 4155554 - DNA, 25 bp, Homo sapien
catgaaacttaaagaggggaagcct

SEQ ID NO: 4155555 - DNA, 25 bp, Homo sapien
atcctttcccacatgaaaagtgcag

SEQ ID NO: 4155556 - DNA, 25 bp, Homo sapien
tacaattatccagagttagacaaaa

SEQ ID NO: 4155557 - DNA, 25 bp, Homo sapien
gaagcctggaccattattaatcctt

SEQ ID NO: 4155558 - DNA, 25 bp, Homo sapien
tggactacagctgataactttgaaa

SEQ ID NO: 4155559 - DNA, 25 bp, Homo sapien
caattcgtattcctcgtaagaggca

SEQ ID NO: 4155560 - DNA, 25 bp, Homo sapien
actgttgtctgaagcctaggtaaga

SEQ ID NO: 4155561 - DNA, 25 bp, Homo sapien
taaatccatgatcagcaaacagttg

SEQ ID NO: 4155562 - DNA, 25 bp, Homo sapien
taaatctgaacgatacactattctt

SEQ ID NO: 4155563 - DNA, 25 bp, Homo sapien
tacaataacagtgtaactagcagtt

SEQ ID NO: 4155564 - DNA, 25 bp, Homo sapien
aaactctaagagcaacacaactata

SEQ ID NO: 4155565 - DNA, 25 bp, Homo sapien
ttctcgttaaatgcctaaaactcta

SEQ ID NO: 4155566 - DNA, 25 bp, Homo sapien
cctgcacaagtagagttcaatcctg

SEQ ID NO: 4155567 - DNA, 25 bp, Homo sapien
taaaggtccagatggtctccccagt

SEQ ID NO: 4155568 - DNA, 25 bp, Homo sapien
tttggctgttctcacaaaaggctga

SEQ ID NO: 4155569 - DNA, 25 bp, Homo sapien
caggtagcctcaggaatctcagggt

SEQ ID NO: 4155570 - DNA, 25 bp, Homo sapien
tatcctaaggataacattacagtgg

SEQ ID NO: 4155571 - DNA, 25 bp, Homo sapien
gatcacatacatagataggcccgga

SEQ ID NO: 4155572 - DNA, 25 bp, Homo sapien
taacacagtagagtagtcgtctggg

SEQ ID NO: 4155573 - DNA, 25 bp, Homo sapien
tccagacatggagaataagacacac

SEQ ID NO: 4155574 - DNA, 25 bp, Homo sapien
caaacaatgtgtgaaagtgagtgga

SEQ ID NO: 4155575 - DNA, 25 bp, Homo sapien
gcctacttagtagatgattgtacca

SEQ ID NO: 4155576 - DNA, 25 bp, Homo sapien
tacgtgggcataaaacagaggtcta

SEQ ID NO: 4155577 - DNA, 25 bp, Homo sapien
tgagtggatcaaactaggtggcgat

SEQ ID NO: 4155578 - DNA, 25 bp, Homo sapien
aacaaggtgctctgataaatactga

SEQ ID NO: 4155579 - DNA, 25 bp, Homo sapien
tttaacagataagcaaaggtctagg

SEQ ID NO: 4155580 - DNA, 25 bp, Homo sapien
ggcaggcagcctcaaaggtgaaaat

SEQ ID NO: 4155581 - DNA, 25 bp, Homo sapien
taatatctagtctctgtgcaaagca

SEQ ID NO: 4155582 - DNA, 25 bp, Homo sapien
tgttgaaacgcccaacacaagtgct

SEQ ID NO: 4155583 - DNA, 25 bp, Homo sapien
tataggacttccagtgattaggaca

SEQ ID NO: 4155584 - DNA, 25 bp, Homo sapien
gaacaagctacttttcgtaccagtg

SEQ ID NO: 4155585 - DNA, 25 bp, Homo sapien
tcaatgactttatgagcagcactca

SEQ ID NO: 4155586 - DNA, 25 bp, Homo sapien
gactgagcctttgcacgagagttgt

SEQ ID NO: 4155587 - DNA, 25 bp, Homo sapien
ttgcattcaactcagggaagcattc

SEQ ID NO: 4155588 - DNA, 25 bp, Homo sapien
gctgataggccacttgcgcaaggta

SEQ ID NO: 4155589 - DNA, 25 bp, Homo sapien
tagatgatgttaaatgggttcccaa

SEQ ID NO: 4155590 - DNA, 25 bp, Homo sapien
ctgcactccccaaccagccctggtg

SEQ ID NO: 4155591 - DNA, 25 bp, Homo sapien
tgcacccaggaacccggcatttaca

SEQ ID NO: 4155592 - DNA, 25 bp, Homo sapien
gcactccccaaccagccctggtgtg

SEQ ID NO: 4155593 - DNA, 25 bp, Homo sapien
aggaacccggcatttacattagata

SEQ ID NO: 4155594 - DNA, 25 bp, Homo sapien
gagtcatgagtaaaattccccttgc

SEQ ID NO: 4155595 - DNA, 25 bp, Homo sapien
gcccctcctggcaaagatgattcct

SEQ ID NO: 4155596 - DNA, 25 bp, Homo sapien
gctgtgaactctgacggctggcgtc

SEQ ID NO: 4155597 - DNA, 25 bp, Homo sapien
catgagaagcgtgattcaggaacaa

SEQ ID NO: 4155598 - DNA, 25 bp, Homo sapien
tcatggtgcctctttaccatgtcgt

SEQ ID NO: 4155599 - DNA, 25 bp, Homo sapien
tgcctctttaccatgtcgtgcctct

SEQ ID NO: 4155600 - DNA, 25 bp, Homo sapien
tttaccatgtcgtgcctcttcacgc

SEQ ID NO: 4155601 - DNA, 25 bp, Homo sapien
ggtgcctctttaccatgtcgtgcct

SEQ ID NO: 4155602 - DNA, 25 bp, Homo sapien
ggaaccagaattcacgatgagattg

SEQ ID NO: 4155603 - DNA, 25 bp, Homo sapien
tttatttcacatactatcctttcac

SEQ ID NO: 4155604 - DNA, 25 bp, Homo sapien
cagaattcacgatgagattgggttg

SEQ ID NO: 4155605 - DNA, 25 bp, Homo sapien
tcacatactatcctttcactaggat

SEQ ID NO: 4155606 - DNA, 25 bp, Homo sapien
tctgtctcctgaagagagattcagg

SEQ ID NO: 4155607 - DNA, 25 bp, Homo sapien
tatttgtgaagtgtcctgatataag

SEQ ID NO: 4155608 - DNA, 25 bp, Homo sapien
cctcatttaattcatcaccattcag

SEQ ID NO: 4155609 - DNA, 25 bp, Homo sapien
gtgaagtgtcctgatataaggtgac

SEQ ID NO: 4155610 - DNA, 25 bp, Homo sapien
taatagcagtcatgaatcagtgacc

SEQ ID NO: 4155611 - DNA, 25 bp, Homo sapien
ttcctactaatctgaaggtgagtca

SEQ ID NO: 4155612 - DNA, 25 bp, Homo sapien
tctgctttccgcatctatagagatg

SEQ ID NO: 4155613 - DNA, 25 bp, Homo sapien
atcagtgacctgtatggcaaattca

SEQ ID NO: 4155614 - DNA, 25 bp, Homo sapien
ttctgtatgggcaggaaattcaggc

SEQ ID NO: 4155615 - DNA, 25 bp, Homo sapien
cacagaaatcttgggcacaccaata

SEQ ID NO: 4155616 - DNA, 25 bp, Homo sapien
ggtgacttctcatcaaattctgtat

SEQ ID NO: 4155617 - DNA, 25 bp, Homo sapien
tcaggccagaagtgaacttgagaat

SEQ ID NO: 4155618 - DNA, 25 bp, Homo sapien
tggttctccagatgtaaccatgcca

SEQ ID NO: 4155619 - DNA, 25 bp, Homo sapien
tccccatataaacaacgctgattcc

SEQ ID NO: 4155620 - DNA, 25 bp, Homo sapien
cactccagctgcacggggtttctca

SEQ ID NO: 4155621 - DNA, 25 bp, Homo sapien
tatttgatatgcgaggccgccactc

SEQ ID NO: 4155622 - DNA, 25 bp, Homo sapien
ctttctgtgccttgagaaaaaacct

SEQ ID NO: 4155623 - DNA, 25 bp, Homo sapien
tttgctgtggtaactttgaaagaaa

SEQ ID NO: 4155624 - DNA, 25 bp, Homo sapien
acagacgtagcttaagattcctctt

SEQ ID NO: 4155625 - DNA, 25 bp, Homo sapien
cgtagcttaagattcctctttaaga

SEQ ID NO: 4155626 - DNA, 25 bp, Homo sapien
tagcttaagattcctctttaagaat

SEQ ID NO: 4155627 - DNA, 25 bp, Homo sapien
cgacagacgtagcttaagattcctc

SEQ ID NO: 4155628 - DNA, 25 bp, Homo sapien
cctcttgtaaatgtactaaactaat

SEQ ID NO: 4155629 - DNA, 25 bp, Homo sapien
ctgtagccatcaatgtatctctgat

SEQ ID NO: 4155630 - DNA, 25 bp, Homo sapien
tctctgattctcaggtctatattcc

SEQ ID NO: 4155631 - DNA, 25 bp, Homo sapien
gattctcaggtctatattcctcttg

SEQ ID NO: 4155632 - DNA, 25 bp, Homo sapien
ccagctctatgttcaagccttactg

SEQ ID NO: 4155633 - DNA, 25 bp, Homo sapien
cagctctatgttcaagccttactga

SEQ ID NO: 4155634 - DNA, 25 bp, Homo sapien
gcttgtttgaagaaagacggtttgc

SEQ ID NO: 4155635 - DNA, 25 bp, Homo sapien
agtaagcttcccaaattacggaatg

SEQ ID NO: 4155636 - DNA, 25 bp, Homo sapien
cctgctttgggatgaactttagcct

SEQ ID NO: 4155637 - DNA, 25 bp, Homo sapien
aaattacggaatgcttgtttgaaga

SEQ ID NO: 4155638 - DNA, 25 bp, Homo sapien
ggtccttgcggccttcagccctgtt

SEQ ID NO: 4155639 - DNA, 25 bp, Homo sapien
aggtccttgcggccttcagccctgt

SEQ ID NO: 4155640 - DNA, 25 bp, Homo sapien
gaggtccttgcggccttcagccctg

SEQ ID NO: 4155641 - DNA, 25 bp, Homo sapien
caatgtagccctaatgccacatctt

SEQ ID NO: 4155642 - DNA, 25 bp, Homo sapien
taattctcggaatccctgatgtagc

SEQ ID NO: 4155643 - DNA, 25 bp, Homo sapien
tatgagaatactaaggtcttgaaca

SEQ ID NO: 4155644 - DNA, 25 bp, Homo sapien
tactccaactttgcacaatgtagcc

SEQ ID NO: 4155645 - DNA, 25 bp, Homo sapien
cagcccaagaataaggcttaattcg

SEQ ID NO: 4155646 - DNA, 25 bp, Homo sapien
tggccagcccaagaataaggcttaa

SEQ ID NO: 4155647 - DNA, 25 bp, Homo sapien
gcccaagaataaggcttaattcgaa

SEQ ID NO: 4155648 - DNA, 25 bp, Homo sapien
gccagcccaagaataaggcttaatt

SEQ ID NO: 4155649 - DNA, 25 bp, Homo sapien
gataatgacccacagggttaggtta

SEQ ID NO: 4155650 - DNA, 25 bp, Homo sapien
atgacccacagggttaggttactgt

SEQ ID NO: 4155651 - DNA, 25 bp, Homo sapien
aatgacccacagggttaggttactg

SEQ ID NO: 4155652 - DNA, 25 bp, Homo sapien
cagggttaggttactgttatttcag

SEQ ID NO: 4155653 - DNA, 25 bp, Homo sapien
ctgtggttctgtgacagcgtctcca

SEQ ID NO: 4155654 - DNA, 25 bp, Homo sapien
ctttggcagactccttctttttggc

SEQ ID NO: 4155655 - DNA, 25 bp, Homo sapien
tttctgggctgctgtagagctttgg

SEQ ID NO: 4155656 - DNA, 25 bp, Homo sapien
ctgctgtagagctttggcagactcc

SEQ ID NO: 4155657 - DNA, 25 bp, Homo sapien
ctgcggtgtctttgccattggcctc

SEQ ID NO: 4155658 - DNA, 25 bp, Homo sapien
gtctttgccattggcctcatttctg

SEQ ID NO: 4155659 - DNA, 25 bp, Homo sapien
tttgccattggcctcatttctgcca

SEQ ID NO: 4155660 - DNA, 25 bp, Homo sapien
ttgccattggcctcatttctgccac

SEQ ID NO: 4155661 - DNA, 25 bp, Homo sapien
caggatgccagtgacagctcgagca

SEQ ID NO: 4155662 - DNA, 25 bp, Homo sapien
gccagtgacagctcgagcagtagct

SEQ ID NO: 4155663 - DNA, 25 bp, Homo sapien
ggatgccagtgacagctcgagcagt

SEQ ID NO: 4155664 - DNA, 25 bp, Homo sapien
tcttcatttcaaagtcctctagctc

SEQ ID NO: 4155665 - DNA, 25 bp, Homo sapien
agccaatgaggccataatgacggac

SEQ ID NO: 4155666 - DNA, 25 bp, Homo sapien
agggatgggcactccatgtttccca

SEQ ID NO: 4155667 - DNA, 25 bp, Homo sapien
ccatgtttcccaacagcagagagca

SEQ ID NO: 4155668 - DNA, 25 bp, Homo sapien
cataatgacggactgagttcaattc

SEQ ID NO: 4155669 - DNA, 25 bp, Homo sapien
ccctctccagcatggccggctctct

SEQ ID NO: 4155670 - DNA, 25 bp, Homo sapien
ccagcatggccggctctctgtcgac

SEQ ID NO: 4155671 - DNA, 25 bp, Homo sapien
ctccagcatggccggctctctgtcg

SEQ ID NO: 4155672 - DNA, 25 bp, Homo sapien
cttcatgagccagtcactctgcctc

SEQ ID NO: 4155673 - DNA, 25 bp, Homo sapien
ggtatgaaacccagtctgtgcaaga

SEQ ID NO: 4155674 - DNA, 25 bp, Homo sapien
tcctccaggtgctcatagagttcca

SEQ ID NO: 4155675 - DNA, 25 bp, Homo sapien
catagagttccacgagcttctcaca

SEQ ID NO: 4155676 - DNA, 25 bp, Homo sapien
aacccagtctgtgcaagatctgtga

SEQ ID NO: 4155677 - DNA, 25 bp, Homo sapien
ggaatgcgaggcaaggactaagata

SEQ ID NO: 4155678 - DNA, 25 bp, Homo sapien
tgcaagcatctaggtctgggtggtt

SEQ ID NO: 4155679 - DNA, 25 bp, Homo sapien
aaccacatgcaagcatctaggtctg

SEQ ID NO: 4155680 - DNA, 25 bp, Homo sapien
cgaggcaaggactaagatatgctga

SEQ ID NO: 4155681 - DNA, 25 bp, Homo sapien
cttcatgtgtgcaatctgatcttgc

SEQ ID NO: 4155682 - DNA, 25 bp, Homo sapien
tgcaatctgatcttgctcccagtga

SEQ ID NO: 4155683 - DNA, 25 bp, Homo sapien
gtgtgcaatctgatcttgctcccag

SEQ ID NO: 4155684 - DNA, 25 bp, Homo sapien
tgatcttgctcccagtgaaacctct

SEQ ID NO: 4155685 - DNA, 25 bp, Homo sapien
ttggcactgccatgaccaaacctcg

SEQ ID NO: 4155686 - DNA, 25 bp, Homo sapien
ggccagcttggcactgccatgacca

SEQ ID NO: 4155687 - DNA, 25 bp, Homo sapien
catgaccaaacctcgcaatgtagtt

SEQ ID NO: 4155688 - DNA, 25 bp, Homo sapien
actgccatgaccaaacctcgcaatg

SEQ ID NO: 4155689 - DNA, 25 bp, Homo sapien
tttgcaccataatgacaggtggagg

SEQ ID NO: 4155690 - DNA, 25 bp, Homo sapien
catcttttgtatacttgaagctcac

SEQ ID NO: 4155691 - DNA, 25 bp, Homo sapien
cagagccactcgtgtgtcaaggtca

SEQ ID NO: 4155692 - DNA, 25 bp, Homo sapien
cactcgtgtgtcaaggtcaattcca

SEQ ID NO: 4155693 - DNA, 25 bp, Homo sapien
catctgggggtagtagctctctagt

SEQ ID NO: 4155694 - DNA, 25 bp, Homo sapien
aaatgctgatggtaatgccctatct

SEQ ID NO: 4155695 - DNA, 25 bp, Homo sapien
agtagctctctagttaacagcttca

SEQ ID NO: 4155696 - DNA, 25 bp, Homo sapien
acttcatgtactccaaagtcaagag

SEQ ID NO: 4155697 - DNA, 25 bp, Homo sapien
agaccatatggcccaatgatcttcc

SEQ ID NO: 4155698 - DNA, 25 bp, Homo sapien
ctgttgtttcccagtgagaccatat

SEQ ID NO: 4155699 - DNA, 25 bp, Homo sapien
catatggcccaatgatcttcctcat

SEQ ID NO: 4155700 - DNA, 25 bp, Homo sapien
gaccatatggcccaatgatcttcct

SEQ ID NO: 4155701 - DNA, 25 bp, Homo sapien
ctgacaagttctggattgggctcac

SEQ ID NO: 4155702 - DNA, 25 bp, Homo sapien
catctgacaagttctggattgggct

SEQ ID NO: 4155703 - DNA, 25 bp, Homo sapien
ctgcccatctgacaagttctggatt

SEQ ID NO: 4155704 - DNA, 25 bp, Homo sapien
ggccagccaggccagacacacttgg

SEQ ID NO: 4155705 - DNA, 25 bp, Homo sapien
taccctgaaacccattgatggcatc

SEQ ID NO: 4155706 - DNA, 25 bp, Homo sapien
tgcaggatgcatagccctagggtcc

SEQ ID NO: 4155707 - DNA, 25 bp, Homo sapien
gaccagtacgaaagtccttgtccag

SEQ ID NO: 4155708 - DNA, 25 bp, Homo sapien
agatggagatcctgatgcgagcccg

SEQ ID NO: 4155709 - DNA, 25 bp, Homo sapien
ctccccgggccaaatctagggcttg

SEQ ID NO: 4155710 - DNA, 25 bp, Homo sapien
acaagaggctctgtttccgctccca

SEQ ID NO: 4155711 - DNA, 25 bp, Homo sapien
gtgtgaacaagaggctctgtttccg

SEQ ID NO: 4155712 - DNA, 25 bp, Homo sapien
tggagtgtgaacaagaggctctgtt

SEQ ID NO: 4155713 - DNA, 25 bp, Homo sapien
aaatgagggtgtggagtgtgaacaa

SEQ ID NO: 4155714 - DNA, 25 bp, Homo sapien
catccctatagctgtagtgattcct

SEQ ID NO: 4155715 - DNA, 25 bp, Homo sapien
caccacactctagctgctgaaatgt

SEQ ID NO: 4155716 - DNA, 25 bp, Homo sapien
accacactctagctgctgaaatgtc

SEQ ID NO: 4155717 - DNA, 25 bp, Homo sapien
tcatccctatagctgtagtgattcc

SEQ ID NO: 4155718 - DNA, 25 bp, Homo sapien
ccattatgttgctttgtactcttct

SEQ ID NO: 4155719 - DNA, 25 bp, Homo sapien
gcgactctgagacagggacacaata

SEQ ID NO: 4155720 - DNA, 25 bp, Homo sapien
ttaagttctgttggcgactctgaga

SEQ ID NO: 4155721 - DNA, 25 bp, Homo sapien
tctgagacagggacacaatatctgg

SEQ ID NO: 4155722 - DNA, 25 bp, Homo sapien
tgttggcgactctgagacagggaca

SEQ ID NO: 4155723 - DNA, 25 bp, Homo sapien
ttaatcagcatcttccaaatcctta

SEQ ID NO: 4155724 - DNA, 25 bp, Homo sapien
taatcagcatcttccaaatccttaa

SEQ ID NO: 4155725 - DNA, 25 bp, Homo sapien
gcatcttccaaatccttaagcactg

SEQ ID NO: 4155726 - DNA, 25 bp, Homo sapien
tcagcatcttccaaatccttaagca

SEQ ID NO: 4155727 - DNA, 25 bp, Homo sapien
tgttatcaatacctaggcttccatt

SEQ ID NO: 4155728 - DNA, 25 bp, Homo sapien
gaagttacacacatccttagttcta

SEQ ID NO: 4155729 - DNA, 25 bp, Homo sapien
aattactacttccaagccatggtgg

SEQ ID NO: 4155730 - DNA, 25 bp, Homo sapien
cactcacctgtgtactatgcataac

SEQ ID NO: 4155731 - DNA, 25 bp, Homo sapien
ccttcctaccctgataccagtcgtc

SEQ ID NO: 4155732 - DNA, 25 bp, Homo sapien
taccctgataccagtcgtcatccat

SEQ ID NO: 4155733 - DNA, 25 bp, Homo sapien
cctaccctgataccagtcgtcatcc

SEQ ID NO: 4155734 - DNA, 25 bp, Homo sapien
ttcctaccctgataccagtcgtcat

SEQ ID NO: 4155735 - DNA, 25 bp, Homo sapien
tcttctgcacttagataaatgtcca

SEQ ID NO: 4155736 - DNA, 25 bp, Homo sapien
taaatgtccagtatatctaccgcct

SEQ ID NO: 4155737 - DNA, 25 bp, Homo sapien
tctaaaacagagaatgcctgtagaa

SEQ ID NO: 4155738 - DNA, 25 bp, Homo sapien
aattaaccatagaaataagctgtca

SEQ ID NO: 4155739 - DNA, 25 bp, Homo sapien
atctcaggacgaggaccagatccca

SEQ ID NO: 4155740 - DNA, 25 bp, Homo sapien
tggcataagtgcaagccactgaggt

SEQ ID NO: 4155741 - DNA, 25 bp, Homo sapien
ccagatcccagccctaacttggcat

SEQ ID NO: 4155742 - DNA, 25 bp, Homo sapien
ccctaatctcaggacgaggaccaga

SEQ ID NO: 4155743 - DNA, 25 bp, Homo sapien
cctgcttccaaccagctatgggttt

SEQ ID NO: 4155744 - DNA, 25 bp, Homo sapien
tcctaggggcattgataagcctatg

SEQ ID NO: 4155745 - DNA, 25 bp, Homo sapien
tatgaacttccaaaggccagagttg

SEQ ID NO: 4155746 - DNA, 25 bp, Homo sapien
ccagagttgcttcaatcagggggac

SEQ ID NO: 4155747 - DNA, 25 bp, Homo sapien
ttatttaaaaataagattgatatca

SEQ ID NO: 4155748 - DNA, 25 bp, Homo sapien
tttaaaaataagattgatatcatac

SEQ ID NO: 4155749 - DNA, 25 bp, Homo sapien
tatttaaaaataagattgatatcat

SEQ ID NO: 4155750 - DNA, 25 bp, Homo sapien
gtgagggtacttgtttcacacaagc

SEQ ID NO: 4155751 - DNA, 25 bp, Homo sapien
caagcttctagtgtccatggcatag

SEQ ID NO: 4155752 - DNA, 25 bp, Homo sapien
tctgttctccagaccattgtgaggg

SEQ ID NO: 4155753 - DNA, 25 bp, Homo sapien
tattctctgattctgacgagccgtt

SEQ ID NO: 4155754 - DNA, 25 bp, Homo sapien
gaactcgcctttgtaattcgcttca

SEQ ID NO: 4155755 - DNA, 25 bp, Homo sapien
ttctgaactcgcctttgtaattcgc

SEQ ID NO: 4155756 - DNA, 25 bp, Homo sapien
tctgaactcgcctttgtaattcgct

SEQ ID NO: 4155757 - DNA, 25 bp, Homo sapien
tctttctgaactcgcctttgtaatt

SEQ ID NO: 4155758 - DNA, 25 bp, Homo sapien
tctgtggccaattgtatggctacat

SEQ ID NO: 4155759 - DNA, 25 bp, Homo sapien
cagaatctggattctgtggccaatt

SEQ ID NO: 4155760 - DNA, 25 bp, Homo sapien
ggattctgtggccaattgtatggct

SEQ ID NO: 4155761 - DNA, 25 bp, Homo sapien
tggccaattgtatggctacatcggt

SEQ ID NO: 4155762 - DNA, 25 bp, Homo sapien
ggctacaccgtgatatccacagggc

SEQ ID NO: 4155763 - DNA, 25 bp, Homo sapien
gagtggggctacaccgtgatatcca

SEQ ID NO: 4155764 - DNA, 25 bp, Homo sapien
ctccgtgtcggccacatgagagtgg

SEQ ID NO: 4155765 - DNA, 25 bp, Homo sapien
atgagagtggggctacaccgtgata

SEQ ID NO: 4155766 - DNA, 25 bp, Homo sapien
tttactctgtcacctttatgaaaac

SEQ ID NO: 4155767 - DNA, 25 bp, Homo sapien
cctttactctgtcacctttatgaaa

SEQ ID NO: 4155768 - DNA, 25 bp, Homo sapien
gcctaagtagacatgacattgaaca

SEQ ID NO: 4155769 - DNA, 25 bp, Homo sapien
tgaaaactgcctaagtagacatgac

SEQ ID NO: 4155770 - DNA, 25 bp, Homo sapien
ctgtgaacaattgactgagataatt

SEQ ID NO: 4155771 - DNA, 25 bp, Homo sapien
tgactgtgaacaattgactgagata

SEQ ID NO: 4155772 - DNA, 25 bp, Homo sapien
tgaacaattgactgagataattcac

SEQ ID NO: 4155773 - DNA, 25 bp, Homo sapien
aacaattgactgagataattcacta

SEQ ID NO: 4155774 - DNA, 25 bp, Homo sapien
tgagggcagtatgccatgaattctg

SEQ ID NO: 4155775 - DNA, 25 bp, Homo sapien
acatctgccacaaattgagcaggac

SEQ ID NO: 4155776 - DNA, 25 bp, Homo sapien
gggatttgaatttggtctaactctg

SEQ ID NO: 4155777 - DNA, 25 bp, Homo sapien
gataaattcttaggtaccttcaatg

SEQ ID NO: 4155778 - DNA, 25 bp, Homo sapien
ttctataggaaaggaagcaccacag

SEQ ID NO: 4155779 - DNA, 25 bp, Homo sapien
ctacaagggagatcaaaataagttc

SEQ ID NO: 4155780 - DNA, 25 bp, Homo sapien
gacaggcatgatttcgggaaccaca

SEQ ID NO: 4155781 - DNA, 25 bp, Homo sapien
ggcagtggctggaaagtcaatgaaa

SEQ ID NO: 4155782 - DNA, 25 bp, Homo sapien
aacactgaggtttctcatgcttgtt

SEQ ID NO: 4155783 - DNA, 25 bp, Homo sapien
acactgaggtttctcatgcttgttg

SEQ ID NO: 4155784 - DNA, 25 bp, Homo sapien
tgttgatgtgttaatgtattggctg

SEQ ID NO: 4155785 - DNA, 25 bp, Homo sapien
gaccataatatgctagtggcaccat

SEQ ID NO: 4155786 - DNA, 25 bp, Homo sapien
ctgaggacagttggtagaagtagtc

SEQ ID NO: 4155787 - DNA, 25 bp, Homo sapien
gtctaatggcacaaagtgttgacca

SEQ ID NO: 4155788 - DNA, 25 bp, Homo sapien
gcaaagtgattgctatgggattgca

SEQ ID NO: 4155789 - DNA, 25 bp, Homo sapien
gaccttcttattggagcccagtgga

SEQ ID NO: 4155790 - DNA, 25 bp, Homo sapien
gcccagtggaggtactgcaaagtga

SEQ ID NO: 4155791 - DNA, 25 bp, Homo sapien
tggaccttcttattggagcccagtg

SEQ ID NO: 4155792 - DNA, 25 bp, Homo sapien
tgcaacaaatgagagttcagggctc

SEQ ID NO: 4155793 - DNA, 25 bp, Homo sapien
gacgttgtttgagctttggagtgca

SEQ ID NO: 4155794 - DNA, 25 bp, Homo sapien
tttgagcaggccacaatgaacttct

SEQ ID NO: 4155795 - DNA, 25 bp, Homo sapien
tccagtggaggcctattgaaggtgt

SEQ ID NO: 4155796 - DNA, 25 bp, Homo sapien
gattgcgctgcaatgaagatgtcca

SEQ ID NO: 4155797 - DNA, 25 bp, Homo sapien
gggtcccaaggaagatgatgtccaa

SEQ ID NO: 4155798 - DNA, 25 bp, Homo sapien
gggtaattgtaaactcagggctgct

SEQ ID NO: 4155799 - DNA, 25 bp, Homo sapien
gatgtccaaaggtagtccaatgagg

SEQ ID NO: 4155800 - DNA, 25 bp, Homo sapien
cataatttgatgacaagcgaggacc

SEQ ID NO: 4155801 - DNA, 25 bp, Homo sapien
gagattttaggcaggaagcacaagc

SEQ ID NO: 4155802 - DNA, 25 bp, Homo sapien
ttttgccctcagaattggcctcagg

SEQ ID NO: 4155803 - DNA, 25 bp, Homo sapien
gcctcaggtgttggtatgacagaaa

SEQ ID NO: 4155804 - DNA, 25 bp, Homo sapien
atttgcttcatattaagtccctgga

SEQ ID NO: 4155805 - DNA, 25 bp, Homo sapien
gagaaaggataagaactaatttcac

SEQ ID NO: 4155806 - DNA, 25 bp, Homo sapien
caagatgagaaagtctctggtagag

SEQ ID NO: 4155807 - DNA, 25 bp, Homo sapien
cctggatatcccgttcagatgtggg

SEQ ID NO: 4155808 - DNA, 25 bp, Homo sapien
taccttacggaatacaggacgtgag

SEQ ID NO: 4155809 - DNA, 25 bp, Homo sapien
ctgggatgcagctggtaatctttgc

SEQ ID NO: 4155810 - DNA, 25 bp, Homo sapien
tgcaggcaaccgatggtagctaagt

SEQ ID NO: 4155811 - DNA, 25 bp, Homo sapien
cttcgatttggttttctgggatgca

SEQ ID NO: 4155812 - DNA, 25 bp, Homo sapien
catagggaaacagattagcatagat

SEQ ID NO: 4155813 - DNA, 25 bp, Homo sapien
gggaaacagattagcatagattggc

SEQ ID NO: 4155814 - DNA, 25 bp, Homo sapien
taaacatagggaaacagattagcat

SEQ ID NO: 4155815 - DNA, 25 bp, Homo sapien
tctttaaacatagggaaacagatta

SEQ ID NO: 4155816 - DNA, 25 bp, Homo sapien
tgtctcttgactgttatgtagtgtg

SEQ ID NO: 4155817 - DNA, 25 bp, Homo sapien
aaactcataggatctactttctgtc

SEQ ID NO: 4155818 - DNA, 25 bp, Homo sapien
tagtgtgttctcatgtccagccctt

SEQ ID NO: 4155819 - DNA, 25 bp, Homo sapien
cttaactggtatgactgaacgtgaa

SEQ ID NO: 4155820 - DNA, 25 bp, Homo sapien
tcattgagcgtactcccttgttctt

SEQ ID NO: 4155821 - DNA, 25 bp, Homo sapien
aagaatctagtccactagcccgtcc

SEQ ID NO: 4155822 - DNA, 25 bp, Homo sapien
cagggagaccaagaatctagtccac

SEQ ID NO: 4155823 - DNA, 25 bp, Homo sapien
tccaggcacccaactgtcaatcatt

SEQ ID NO: 4155824 - DNA, 25 bp, Homo sapien
attcagatggcagagaagcaaaatt

SEQ ID NO: 4155825 - DNA, 25 bp, Homo sapien
tcaattcagatggcagagaagcaaa

SEQ ID NO: 4155826 - DNA, 25 bp, Homo sapien
agatggcagagaagcaaaattttac

SEQ ID NO: 4155827 - DNA, 25 bp, Homo sapien
tcagatggcagagaagcaaaatttt

SEQ ID NO: 4155828 - DNA, 25 bp, Homo sapien
ttgacgctgaaccataataaaagat

SEQ ID NO: 4155829 - DNA, 25 bp, Homo sapien
gcagtttgacgctgaaccataataa

SEQ ID NO: 4155830 - DNA, 25 bp, Homo sapien
tgacgctgaaccataataaaagatg

SEQ ID NO: 4155831 - DNA, 25 bp, Homo sapien
gtttgacgctgaaccataataaaag

SEQ ID NO: 4155832 - DNA, 25 bp, Homo sapien
tccatttgatttcaggcaactaatg

SEQ ID NO: 4155833 - DNA, 25 bp, Homo sapien
caagccatcttagagtctgccaata

SEQ ID NO: 4155834 - DNA, 25 bp, Homo sapien
catcttagagtctgccaatattata

SEQ ID NO: 4155835 - DNA, 25 bp, Homo sapien
tccaagccatcttagagtctgccaa

SEQ ID NO: 4155836 - DNA, 25 bp, Homo sapien
atgatgcaggacttccatgtttttg

SEQ ID NO: 4155837 - DNA, 25 bp, Homo sapien
gaatttatgatgcaggacttccatg

SEQ ID NO: 4155838 - DNA, 25 bp, Homo sapien
ttggagaatttatgatgcaggactt

SEQ ID NO: 4155839 - DNA, 25 bp, Homo sapien
gagaatttatgatgcaggacttcca

SEQ ID NO: 4155840 - DNA, 25 bp, Homo sapien
accgccagctatttgatgcttgaca

SEQ ID NO: 4155841 - DNA, 25 bp, Homo sapien
tagatgcagcaatacagtaatgacc

SEQ ID NO: 4155842 - DNA, 25 bp, Homo sapien
cacagaaggtactgatgaacaggtt

SEQ ID NO: 4155843 - DNA, 25 bp, Homo sapien
tcaaaagtgaaacaaccgccagcta

SEQ ID NO: 4155844 - DNA, 25 bp, Homo sapien
ggtttagtctgataactccactcct

SEQ ID NO: 4155845 - DNA, 25 bp, Homo sapien
atgtaaatgaaggtgggtttagtct

SEQ ID NO: 4155846 - DNA, 25 bp, Homo sapien
ttagtctgataactccactcctctt

SEQ ID NO: 4155847 - DNA, 25 bp, Homo sapien
ggtgggtttagtctgataactccac

SEQ ID NO: 4155848 - DNA, 25 bp, Homo sapien
tctccaaaactaagccttgtgggct

SEQ ID NO: 4155849 - DNA, 25 bp, Homo sapien
gatctcacctgctctagggattctc

SEQ ID NO: 4155850 - DNA, 25 bp, Homo sapien
tagcctacagccatcaatctctgct

SEQ ID NO: 4155851 - DNA, 25 bp, Homo sapien
aagccttgtgggctccctattcctc

SEQ ID NO: 4155852 - DNA, 25 bp, Homo sapien
ctattctgtgacgataatataaggc

SEQ ID NO: 4155853 - DNA, 25 bp, Homo sapien
ttctgtgacgataatataaggctgc

SEQ ID NO: 4155854 - DNA, 25 bp, Homo sapien
tattctgtgacgataatataaggct

SEQ ID NO: 4155855 - DNA, 25 bp, Homo sapien
ctgtgacgataatataaggctgctt

SEQ ID NO: 4155856 - DNA, 25 bp, Homo sapien
tctccagtctattaacccgatcact

SEQ ID NO: 4155857 - DNA, 25 bp, Homo sapien
ccagtctattaacccgatcactggc

SEQ ID NO: 4155858 - DNA, 25 bp, Homo sapien
ttgacaagatagctttttctccagt

SEQ ID NO: 4155859 - DNA, 25 bp, Homo sapien
ttttctccagtctattaacccgatc

SEQ ID NO: 4155860 - DNA, 25 bp, Homo sapien
tactttaagctccagttcctggacc

SEQ ID NO: 4155861 - DNA, 25 bp, Homo sapien
taaagtcattccagctgccacatta

SEQ ID NO: 4155862 - DNA, 25 bp, Homo sapien
tggaggttgaacacaattactttaa

SEQ ID NO: 4155863 - DNA, 25 bp, Homo sapien
aatccctcgacactcttcctaaagt

SEQ ID NO: 4155864 - DNA, 25 bp, Homo sapien
acgtgctgcactcgccctttgcttt

SEQ ID NO: 4155865 - DNA, 25 bp, Homo sapien
aaaaacgtgctgcactcgccctttg

SEQ ID NO: 4155866 - DNA, 25 bp, Homo sapien
aactcaaaaaacgtgctgcactcgc

SEQ ID NO: 4155867 - DNA, 25 bp, Homo sapien
tcaaaaaacgtgctgcactcgccct

SEQ ID NO: 4155868 - DNA, 25 bp, Homo sapien
tgttagaagcacagttctgtgtcat

SEQ ID NO: 4155869 - DNA, 25 bp, Homo sapien
agggttctttgtccagcgtggtctc

SEQ ID NO: 4155870 - DNA, 25 bp, Homo sapien
ctttaactaccgaaacatcttccag

SEQ ID NO: 4155871 - DNA, 25 bp, Homo sapien
tggtctctttaactaccgaaacatc

SEQ ID NO: 4155872 - DNA, 25 bp, Homo sapien
tgtccagcgtggtctctttaactac

SEQ ID NO: 4155873 - DNA, 25 bp, Homo sapien
ttggtgtttctcactgtggtactca

SEQ ID NO: 4155874 - DNA, 25 bp, Homo sapien
taaagatgggtctttctttctcttg

SEQ ID NO: 4155875 - DNA, 25 bp, Homo sapien
aaacagattaaagatgggtctttct

SEQ ID NO: 4155876 - DNA, 25 bp, Homo sapien
ctcttggtgtttctcactgtggtac

SEQ ID NO: 4155877 - DNA, 25 bp, Homo sapien
ctccttcagtaagccaaacagtccg

SEQ ID NO: 4155878 - DNA, 25 bp, Homo sapien
ccttcagtaagccaaacagtccgtt

SEQ ID NO: 4155879 - DNA, 25 bp, Homo sapien
tactccttcagtaagccaaacagtc

SEQ ID NO: 4155880 - DNA, 25 bp, Homo sapien
ctttactccttcagtaagccaaaca

SEQ ID NO: 4155881 - DNA, 25 bp, Homo sapien
cgcaaggccagcggtcttcttcagc

SEQ ID NO: 4155882 - DNA, 25 bp, Homo sapien
cggtcttcttcagcacactcgccat

SEQ ID NO: 4155883 - DNA, 25 bp, Homo sapien
agcggtcttcttcagcacactcgcc

SEQ ID NO: 4155884 - DNA, 25 bp, Homo sapien
caaggccagcggtcttcttcagcac

SEQ ID NO: 4155885 - DNA, 25 bp, Homo sapien
tcttggcttctcatgtggactcttg

SEQ ID NO: 4155886 - DNA, 25 bp, Homo sapien
gcttctcatgtggactcttgcatac

SEQ ID NO: 4155887 - DNA, 25 bp, Homo sapien
ttggcttctcatgtggactcttgca

SEQ ID NO: 4155888 - DNA, 25 bp, Homo sapien
tattcttggcttctcatgtggactc

SEQ ID NO: 4155889 - DNA, 25 bp, Homo sapien
tcaagttggtcttccaatttttgaa

SEQ ID NO: 4155890 - DNA, 25 bp, Homo sapien
agttcatttttacccaggagaatca

SEQ ID NO: 4155891 - DNA, 25 bp, Homo sapien
tcatttttacccaggagaatcatct

SEQ ID NO: 4155892 - DNA, 25 bp, Homo sapien
tagttcatttttacccaggagaatc

SEQ ID NO: 4155893 - DNA, 25 bp, Homo sapien
ttctggtgccagaaaggcaagatca

SEQ ID NO: 4155894 - DNA, 25 bp, Homo sapien
gatggcactaacacccacaatgcct

SEQ ID NO: 4155895 - DNA, 25 bp, Homo sapien
cacaatgcctgcttgaatggatagc

SEQ ID NO: 4155896 - DNA, 25 bp, Homo sapien
gcttgaatggatagcactgcattta

SEQ ID NO: 4155897 - DNA, 25 bp, Homo sapien
tttgcagtaagcactgctatgtgaa

SEQ ID NO: 4155898 - DNA, 25 bp, Homo sapien
aaagttgcaatcatggcttttgcag

SEQ ID NO: 4155899 - DNA, 25 bp, Homo sapien
tgcagtaagcactgctatgtgaagt

SEQ ID NO: 4155900 - DNA, 25 bp, Homo sapien
aagttgcaatcatggcttttgcagt

SEQ ID NO: 4155901 - DNA, 25 bp, Homo sapien
ccttcacgatctctggtagtttctc

SEQ ID NO: 4155902 - DNA, 25 bp, Homo sapien
agccttcgtcatggcaccatatgga

SEQ ID NO: 4155903 - DNA, 25 bp, Homo sapien
gagcctgaataccaagccaattttg

SEQ ID NO: 4155904 - DNA, 25 bp, Homo sapien
tttggaacagttttcaccttcacga

SEQ ID NO: 4155905 - DNA, 25 bp, Homo sapien
gagaggagacaggctctcttcccat

SEQ ID NO: 4155906 - DNA, 25 bp, Homo sapien
tcaaatataggagaaataacaagag

SEQ ID NO: 4155907 - DNA, 25 bp, Homo sapien
taggagaaataacaagagaggagac

SEQ ID NO: 4155908 - DNA, 25 bp, Homo sapien
ccacttccaaatggataatcaaata

SEQ ID NO: 4155909 - DNA, 25 bp, Homo sapien
tcatttctaacactctgctcaggca

SEQ ID NO: 4155910 - DNA, 25 bp, Homo sapien
gctcaggcatctcatcaacatacaa

SEQ ID NO: 4155911 - DNA, 25 bp, Homo sapien
ttatcatttctaacactctgctcag

SEQ ID NO: 4155912 - DNA, 25 bp, Homo sapien
ttctaacactctgctcaggcatctc

SEQ ID NO: 4155913 - DNA, 25 bp, Homo sapien
caatcctgctgtagtcattatgctt

SEQ ID NO: 4155914 - DNA, 25 bp, Homo sapien
agaagatttcagaagacaagctttc

SEQ ID NO: 4155915 - DNA, 25 bp, Homo sapien
tcttatatctttctcagaagatttc

SEQ ID NO: 4155916 - DNA, 25 bp, Homo sapien
tctcttcatcaacttggttttcttc

SEQ ID NO: 4155917 - DNA, 25 bp, Homo sapien
ggagacagggttccaaatattgagt

SEQ ID NO: 4155918 - DNA, 25 bp, Homo sapien
tgacaaagcatgcacacagtggaga

SEQ ID NO: 4155919 - DNA, 25 bp, Homo sapien
agacagggttccaaatattgagttc

SEQ ID NO: 4155920 - DNA, 25 bp, Homo sapien
tttgctgacaaagcatgcacacagt

SEQ ID NO: 4155921 - DNA, 25 bp, Homo sapien
tactggtagccctgtgatccactct

SEQ ID NO: 4155922 - DNA, 25 bp, Homo sapien
gcatgggtccttgcattagctgtga

SEQ ID NO: 4155923 - DNA, 25 bp, Homo sapien
gtggttgtgctcagcatgggtcctt

SEQ ID NO: 4155924 - DNA, 25 bp, Homo sapien
ggtagccctgtgatccactctcagc

SEQ ID NO: 4155925 - DNA, 25 bp, Homo sapien
gactggaagcttcgactgcacacag

SEQ ID NO: 4155926 - DNA, 25 bp, Homo sapien
gaactctcaactgtgaaagggtccg

SEQ ID NO: 4155927 - DNA, 25 bp, Homo sapien
cacaacatttggcaagactggaagc

SEQ ID NO: 4155928 - DNA, 25 bp, Homo sapien
tgcacacaggtccaagttggcatag

SEQ ID NO: 4155929 - DNA, 25 bp, Homo sapien
gaaaatagtgtcctagccagttgcc

SEQ ID NO: 4155930 - DNA, 25 bp, Homo sapien
ggttttgactccacgtgtattgcca

SEQ ID NO: 4155931 - DNA, 25 bp, Homo sapien
tcactttttcttcgtctacacgtgg

SEQ ID NO: 4155932 - DNA, 25 bp, Homo sapien
actgaaaatagtgtcctagccagtt

SEQ ID NO: 4155933 - DNA, 25 bp, Homo sapien
gagtgacttggcccccaagtgaaca

SEQ ID NO: 4155934 - DNA, 25 bp, Homo sapien
gggatgtcttttatggaggttaaga

SEQ ID NO: 4155935 - DNA, 25 bp, Homo sapien
gtcttttatggaggttaagagtgac

SEQ ID NO: 4155936 - DNA, 25 bp, Homo sapien
tgacttggcccccaagtgaacaaag

SEQ ID NO: 4155937 - DNA, 25 bp, Homo sapien
agacaggcaattcctgattagcccc

SEQ ID NO: 4155938 - DNA, 25 bp, Homo sapien
caattcctgattagcccctggattt

SEQ ID NO: 4155939 - DNA, 25 bp, Homo sapien
ggcaattcctgattagcccctggat

SEQ ID NO: 4155940 - DNA, 25 bp, Homo sapien
caggcaattcctgattagcccctgg

SEQ ID NO: 4155941 - DNA, 25 bp, Homo sapien
tgctccagcctgcttcggtgtcaca

SEQ ID NO: 4155942 - DNA, 25 bp, Homo sapien
tcatgctccagcctgcttcggtgtc

SEQ ID NO: 4155943 - DNA, 25 bp, Homo sapien
tccagcctgcttcggtgtcacacat

SEQ ID NO: 4155944 - DNA, 25 bp, Homo sapien
agcctgcttcggtgtcacacattca

SEQ ID NO: 4155945 - DNA, 25 bp, Homo sapien
aggtctttgatgatacaacaaccac

SEQ ID NO: 4155946 - DNA, 25 bp, Homo sapien
tctttgatgatacaacaaccacagt

SEQ ID NO: 4155947 - DNA, 25 bp, Homo sapien
aacaaccacagtacatcaatagggt

SEQ ID NO: 4155948 - DNA, 25 bp, Homo sapien
catcaatagggtttgaaagcaagag

SEQ ID NO: 4155949 - DNA, 25 bp, Homo sapien
aggcatccatggaggaaattacagc

SEQ ID NO: 4155950 - DNA, 25 bp, Homo sapien
tccaaggaaggcatccatggaggaa

SEQ ID NO: 4155951 - DNA, 25 bp, Homo sapien
tctagaacccatggatccaaggaag

SEQ ID NO: 4155952 - DNA, 25 bp, Homo sapien
gaggaaattacagctctcagaagag

SEQ ID NO: 4155953 - DNA, 25 bp, Homo sapien
caaggcgctgggtatcaatgtgctc

SEQ ID NO: 4155954 - DNA, 25 bp, Homo sapien
cttttaggttagtgcattttcccat

SEQ ID NO: 4155955 - DNA, 25 bp, Homo sapien
tcaccactaagtaccaccgaaactg

SEQ ID NO: 4155956 - DNA, 25 bp, Homo sapien
cagccgtgggttctattatttgcca

SEQ ID NO: 4155957 - DNA, 25 bp, Homo sapien
aagagactctggattgggtttaatg

SEQ ID NO: 4155958 - DNA, 25 bp, Homo sapien
tgcattctgaacaagaaagttggag

SEQ ID NO: 4155959 - DNA, 25 bp, Homo sapien
caagaaagttggagattaagaagaa

SEQ ID NO: 4155960 - DNA, 25 bp, Homo sapien
gattgggtttaatgcattctgaaca

SEQ ID NO: 4155961 - DNA, 25 bp, Homo sapien
agttcttcctccttcgtacatttct

SEQ ID NO: 4155962 - DNA, 25 bp, Homo sapien
taaaggtagatcgataaaatttctc

SEQ ID NO: 4155963 - DNA, 25 bp, Homo sapien
cttcatctattgtagctgcttcccc

SEQ ID NO: 4155964 - DNA, 25 bp, Homo sapien
tgaactaagtcatccgcagcaacca

SEQ ID NO: 4155965 - DNA, 25 bp, Homo sapien
tgacacactgtttgccttataaatt

SEQ ID NO: 4155966 - DNA, 25 bp, Homo sapien
cacactgacagctggcagtaattgc

SEQ ID NO: 4155967 - DNA, 25 bp, Homo sapien
agctgcaattatcttctgaacactg

SEQ ID NO: 4155968 - DNA, 25 bp, Homo sapien
gctgtaagctgcaattatcttctga

SEQ ID NO: 4155969 - DNA, 25 bp, Homo sapien
ggcagtaattgctgtaagctgcaat

SEQ ID NO: 4155970 - DNA, 25 bp, Homo sapien
tgtccctccaccgccatagcttcat

SEQ ID NO: 4155971 - DNA, 25 bp, Homo sapien
tcaggtttttgtacttctgtccctc

SEQ ID NO: 4155972 - DNA, 25 bp, Homo sapien
tagcttcatctcttcccaggctcga

SEQ ID NO: 4155973 - DNA, 25 bp, Homo sapien
ttcatctcttcccaggctcgaatct

SEQ ID NO: 4155974 - DNA, 25 bp, Homo sapien
tttcactgtgaagagacaagcatca

SEQ ID NO: 4155975 - DNA, 25 bp, Homo sapien
ttttcactgtgaagagacaagcatc

SEQ ID NO: 4155976 - DNA, 25 bp, Homo sapien
cttgaatcaataccgaaagttccca

SEQ ID NO: 4155977 - DNA, 25 bp, Homo sapien
agctagctgagggtgatatcgtgaa

SEQ ID NO: 4155978 - DNA, 25 bp, Homo sapien
tttcggcactcattgaattcatggg

SEQ ID NO: 4155979 - DNA, 25 bp, Homo sapien
caaggttccttgtacattggtccat

SEQ ID NO: 4155980 - DNA, 25 bp, Homo sapien
aaatgtctggtgcacttggtgccac

SEQ ID NO: 4155981 - DNA, 25 bp, Homo sapien
cagaaatgtctggtgcacttggtgc

SEQ ID NO: 4155982 - DNA, 25 bp, Homo sapien
tagcagaaatgtctggtgcacttgg

SEQ ID NO: 4155983 - DNA, 25 bp, Homo sapien
agaattagcagaaatgtctggtgca

SEQ ID NO: 4155984 - DNA, 25 bp, Homo sapien
tgattcaaactctgatcatctttat

SEQ ID NO: 4155985 - DNA, 25 bp, Homo sapien
cacatgattcaaactctgatcatct

SEQ ID NO: 4155986 - DNA, 25 bp, Homo sapien
atttttgcactcttcagggccacca

SEQ ID NO: 4155987 - DNA, 25 bp, Homo sapien
ttttgcactcttcagggccaccatc

SEQ ID NO: 4155988 - DNA, 25 bp, Homo sapien
tcaaagacttgtcagaatttgatac

SEQ ID NO: 4155989 - DNA, 25 bp, Homo sapien
aacatctgtctttccattgctatta

SEQ ID NO: 4155990 - DNA, 25 bp, Homo sapien
gagaagctaggtattctgatgtatc

SEQ ID NO: 4155991 - DNA, 25 bp, Homo sapien
tcatatggcaattgtcctttgggct

SEQ ID NO: 4155992 - DNA, 25 bp, Homo sapien
gacactgcagcacatgagaaacaac

SEQ ID NO: 4155993 - DNA, 25 bp, Homo sapien
tgtggtcttgtctctatcctctgga

SEQ ID NO: 4155994 - DNA, 25 bp, Homo sapien
attacggtccctattctcatccctt

SEQ ID NO: 4155995 - DNA, 25 bp, Homo sapien
attctattttcattacggtccctat

SEQ ID NO: 4155996 - DNA, 25 bp, Homo sapien
taaggtgtcaaagttcaagacatct

SEQ ID NO: 4155997 - DNA, 25 bp, Homo sapien
gttcaagacatctcttttagctatt

SEQ ID NO: 4155998 - DNA, 25 bp, Homo sapien
tgctggatcaagcttgcgcacctgc

SEQ ID NO: 4155999 - DNA, 25 bp, Homo sapien
cagtcatggacaggatgggcctcca

SEQ ID NO: 4156000 - DNA, 25 bp, Homo sapien
catggacaggatgggcctccatttg

SEQ ID NO: 4156001 - DNA, 25 bp, Homo sapien
tgggcaggtagacaagtcgacttgt

SEQ ID NO: 4156002 - DNA, 25 bp, Homo sapien
tacatttctctcccatgtcattcat

SEQ ID NO: 4156003 - DNA, 25 bp, Homo sapien
ccttacatttctctcccatgtcatt

SEQ ID NO: 4156004 - DNA, 25 bp, Homo sapien
cctgccttacatttctctcccatgt

SEQ ID NO: 4156005 - DNA, 25 bp, Homo sapien
tgccttacatttctctcccatgtca

SEQ ID NO: 4156006 - DNA, 25 bp, Homo sapien
taatttggatggcagtagggttaca

SEQ ID NO: 4156007 - DNA, 25 bp, Homo sapien
tttggatggcagtagggttacaaga

SEQ ID NO: 4156008 - DNA, 25 bp, Homo sapien
gatggcagtagggttacaagaatgt

SEQ ID NO: 4156009 - DNA, 25 bp, Homo sapien
cagtagggttacaagaatgttgtct

SEQ ID NO: 4156010 - DNA, 25 bp, Homo sapien
aagatgttttattgaggctccaatc

SEQ ID NO: 4156011 - DNA, 25 bp, Homo sapien
tgaacaagccaaccctacttaattc

SEQ ID NO: 4156012 - DNA, 25 bp, Homo sapien
tccaggacactcataggaacattct

SEQ ID NO: 4156013 - DNA, 25 bp, Homo sapien
agctgacattttggtggttataaga

SEQ ID NO: 4156014 - DNA, 25 bp, Homo sapien
ataaatgtcttgccgaaagagttca

SEQ ID NO: 4156015 - DNA, 25 bp, Homo sapien
tgtcttgccgaaagagttcagacat

SEQ ID NO: 4156016 - DNA, 25 bp, Homo sapien
aaatgtcttgccgaaagagttcaga

SEQ ID NO: 4156017 - DNA, 25 bp, Homo sapien
aatgtcttgccgaaagagttcagac

SEQ ID NO: 4156018 - DNA, 25 bp, Homo sapien
agctttgacaagcaattcatccgtc

SEQ ID NO: 4156019 - DNA, 25 bp, Homo sapien
tgctatcttatccagctcctcgtca

SEQ ID NO: 4156020 - DNA, 25 bp, Homo sapien
tatagagaaccttatattcatggat

SEQ ID NO: 4156021 - DNA, 25 bp, Homo sapien
ccgtcaagtagggatcaactctaaa

SEQ ID NO: 4156022 - DNA, 25 bp, Homo sapien
gggcagtcagtagaagcccaggctg

SEQ ID NO: 4156023 - DNA, 25 bp, Homo sapien
ggagggcagtcagtagaagcccagg

SEQ ID NO: 4156024 - DNA, 25 bp, Homo sapien
tattttatagctgtgacagcaaggc

SEQ ID NO: 4156025 - DNA, 25 bp, Homo sapien
ggaatcattgtgatctgaaaagcca

SEQ ID NO: 4156026 - DNA, 25 bp, Homo sapien
acagcaaggctatgacagatgacac

SEQ ID NO: 4156027 - DNA, 25 bp, Homo sapien
tgtctgaaaggattaaagtcaagca

SEQ ID NO: 4156028 - DNA, 25 bp, Homo sapien
ttctaaactccaataatgtgtcatc

SEQ ID NO: 4156029 - DNA, 25 bp, Homo sapien
tataaatctctcagggtgagagcct

SEQ ID NO: 4156030 - DNA, 25 bp, Homo sapien
tcatcctcagtctgactggaaacag

SEQ ID NO: 4156031 - DNA, 25 bp, Homo sapien
aagttctcacttacaccagtttcac

SEQ ID NO: 4156032 - DNA, 25 bp, Homo sapien
gcacttcatctgaagtgcagaatga

SEQ ID NO: 4156033 - DNA, 25 bp, Homo sapien
aaaatgtgttcaacccttccaacag

SEQ ID NO: 4156034 - DNA, 25 bp, Homo sapien
catctgaagtgcagaatgatctacc

SEQ ID NO: 4156035 - DNA, 25 bp, Homo sapien
aatgatctacccactgagaactgtg

SEQ ID NO: 4156036 - DNA, 25 bp, Homo sapien
tcagatagcttctctcataagactt

SEQ ID NO: 4156037 - DNA, 25 bp, Homo sapien
gatagcttctctcataagactttgt

SEQ ID NO: 4156038 - DNA, 25 bp, Homo sapien
ctgtgaaactcagatagcttctctc

SEQ ID NO: 4156039 - DNA, 25 bp, Homo sapien
gaaactcagatagcttctctcataa

SEQ ID NO: 4156040 - DNA, 25 bp, Homo sapien
attctcatggtcatttttgatggac

SEQ ID NO: 4156041 - DNA, 25 bp, Homo sapien
gctgccaattcttgcagggattaaa

SEQ ID NO: 4156042 - DNA, 25 bp, Homo sapien
ctcaagtcctgtgggaagtcctgct

SEQ ID NO: 4156043 - DNA, 25 bp, Homo sapien
tcttgcagggattaaaattctcatg

SEQ ID NO: 4156044 - DNA, 25 bp, Homo sapien
taatggcaatgaagttggttgtagc

SEQ ID NO: 4156045 - DNA, 25 bp, Homo sapien
tggttgtagcaacagggtattggac

SEQ ID NO: 4156046 - DNA, 25 bp, Homo sapien
gaagttggttgtagcaacagggtat

SEQ ID NO: 4156047 - DNA, 25 bp, Homo sapien
caatgaagttggttgtagcaacagg

SEQ ID NO: 4156048 - DNA, 25 bp, Homo sapien
ttcccctccgattttaacagtgaca

SEQ ID NO: 4156049 - DNA, 25 bp, Homo sapien
tggggcacttcctcaggtgcatcct

SEQ ID NO: 4156050 - DNA, 25 bp, Homo sapien
ggggcacttcctcaggtgcatcctg

SEQ ID NO: 4156051 - DNA, 25 bp, Homo sapien
tgaagagagttgccaaatatgataa

SEQ ID NO: 4156052 - DNA, 25 bp, Homo sapien
attatccctgcacctactggcactg

SEQ ID NO: 4156053 - DNA, 25 bp, Homo sapien
gccttttgtatccactgccagtgtg

SEQ ID NO: 4156054 - DNA, 25 bp, Homo sapien
gaatgagaagctcattaacatggcc

SEQ ID NO: 4156055 - DNA, 25 bp, Homo sapien
ggtgatgaccgtggggctctccaga

SEQ ID NO: 4156056 - DNA, 25 bp, Homo sapien
acaggaagttggtcatcaacaagaa

SEQ ID NO: 4156057 - DNA, 25 bp, Homo sapien
aacaggaagttggtcatcaacaaga

SEQ ID NO: 4156058 - DNA, 25 bp, Homo sapien
tcatcaacaagaatcccacctccat

SEQ ID NO: 4156059 - DNA, 25 bp, Homo sapien
tgttgatgtccggtcaccagggttg

SEQ ID NO: 4156060 - DNA, 25 bp, Homo sapien
cacggcaagtttcagggcattgtca

SEQ ID NO: 4156061 - DNA, 25 bp, Homo sapien
tccctgagaaacgatagtgacagtg

SEQ ID NO: 4156062 - DNA, 25 bp, Homo sapien
tacatgatttccacgttcctgtgtg

SEQ ID NO: 4156063 - DNA, 25 bp, Homo sapien
cctgttcaacagatagccacatctt

SEQ ID NO: 4156064 - DNA, 25 bp, Homo sapien
aatctctctcattatagatctgaat

SEQ ID NO: 4156065 - DNA, 25 bp, Homo sapien
tccctgttcaacagatagccacatc

SEQ ID NO: 4156066 - DNA, 25 bp, Homo sapien
atctctctcattatagatctgaata

SEQ ID NO: 4156067 - DNA, 25 bp, Homo sapien
tggctttttctaccaatatgccagt

SEQ ID NO: 4156068 - DNA, 25 bp, Homo sapien
ttttctaccaatatgccagtcttca

SEQ ID NO: 4156069 - DNA, 25 bp, Homo sapien
ggaatgaagattggctttttctacc

SEQ ID NO: 4156070 - DNA, 25 bp, Homo sapien
aaggaatgaagattggctttttcta

SEQ ID NO: 4156071 - DNA, 25 bp, Homo sapien
tttgatctttatcacttctctggtg

SEQ ID NO: 4156072 - DNA, 25 bp, Homo sapien
ctttatcacttctctggtgaagtgg

SEQ ID NO: 4156073 - DNA, 25 bp, Homo sapien
ttttaacctgatttgatctttatca

SEQ ID NO: 4156074 - DNA, 25 bp, Homo sapien
gaagtggacatatttcaaacaatat

SEQ ID NO: 4156075 - DNA, 25 bp, Homo sapien
ggcttcaccaccagaaaagacttaa

SEQ ID NO: 4156076 - DNA, 25 bp, Homo sapien
tatggcttcaccaccagaaaagact

SEQ ID NO: 4156077 - DNA, 25 bp, Homo sapien
ctgtgaatatggcttcaccaccaga

SEQ ID NO: 4156078 - DNA, 25 bp, Homo sapien
gaatatggcttcaccaccagaaaag

SEQ ID NO: 4156079 - DNA, 25 bp, Homo sapien
ccttagcatggtaagcacagtcctc

SEQ ID NO: 4156080 - DNA, 25 bp, Homo sapien
ttagcatggtaagcacagtcctcag

SEQ ID NO: 4156081 - DNA, 25 bp, Homo sapien
agtcctcagtgagggctagccccat

SEQ ID NO: 4156082 - DNA, 25 bp, Homo sapien
cccttagcatggtaagcacagtcct

SEQ ID NO: 4156083 - DNA, 25 bp, Homo sapien
ttttttattgtcaagtcgccggcat

SEQ ID NO: 4156084 - DNA, 25 bp, Homo sapien
gctataagccgtgctctccactaga

SEQ ID NO: 4156085 - DNA, 25 bp, Homo sapien
tcacttccctcgatttcatgaaaga

SEQ ID NO: 4156086 - DNA, 25 bp, Homo sapien
gtcgccggcatagggcactgctata

SEQ ID NO: 4156087 - DNA, 25 bp, Homo sapien
aacaaatgaaggaatagagtcacat

SEQ ID NO: 4156088 - DNA, 25 bp, Homo sapien
caaatgaaggaatagagtcacatac

SEQ ID NO: 4156089 - DNA, 25 bp, Homo sapien
ctaaacaaatgaaggaatagagtca

SEQ ID NO: 4156090 - DNA, 25 bp, Homo sapien
taaacaaatgaaggaatagagtcac

SEQ ID NO: 4156091 - DNA, 25 bp, Homo sapien
catgcaggaagtctgtctgttgggt

SEQ ID NO: 4156092 - DNA, 25 bp, Homo sapien
gaagtctgtctgttgggtggtatca

SEQ ID NO: 4156093 - DNA, 25 bp, Homo sapien
tgtctgttgggtggtatcatcacat

SEQ ID NO: 4156094 - DNA, 25 bp, Homo sapien
acatgcaggaagtctgtctgttggg

SEQ ID NO: 4156095 - DNA, 25 bp, Homo sapien
agagcgggatggcacgcagctggct

SEQ ID NO: 4156096 - DNA, 25 bp, Homo sapien
gaagcagagcgggatggcacgcagc

SEQ ID NO: 4156097 - DNA, 25 bp, Homo sapien
ctgctcgggaaggagaccgggtggg

SEQ ID NO: 4156098 - DNA, 25 bp, Homo sapien
ctgaagcagagcgggatggcacgca

SEQ ID NO: 4156099 - DNA, 25 bp, Homo sapien
atgctccgctcgcaggctgatgtca

SEQ ID NO: 4156100 - DNA, 25 bp, Homo sapien
ctgggtcctagtgccgtcttcagcg

SEQ ID NO: 4156101 - DNA, 25 bp, Homo sapien
gcaggctgatgtcaagtttgacact

SEQ ID NO: 4156102 - DNA, 25 bp, Homo sapien
ctggctgcctttccgcgaaccccgc

SEQ ID NO: 4156103 - DNA, 25 bp, Homo sapien
ctgatgtgagggggagcgctctgat

SEQ ID NO: 4156104 - DNA, 25 bp, Homo sapien
tgatgtgagggggagcgctctgatt

SEQ ID NO: 4156105 - DNA, 25 bp, Homo sapien
gatgtgagggggagcgctctgattg

SEQ ID NO: 4156106 - DNA, 25 bp, Homo sapien
gagcatatctccatgaagcatgcca

SEQ ID NO: 4156107 - DNA, 25 bp, Homo sapien
aaggaggaggatggagagctgacaa

SEQ ID NO: 4156108 - DNA, 25 bp, Homo sapien
ggaggatggagagctgacaatccat

SEQ ID NO: 4156109 - DNA, 25 bp, Homo sapien
ggaggaggatggagagctgacaatc

SEQ ID NO: 4156110 - DNA, 25 bp, Homo sapien
aggaggatggagagctgacaatcca

SEQ ID NO: 4156111 - DNA, 25 bp, Homo sapien
aatcagttccccgaagctgtcgaga

SEQ ID NO: 4156112 - DNA, 25 bp, Homo sapien
gaaggctgcggaatcagttccccga

SEQ ID NO: 4156113 - DNA, 25 bp, Homo sapien
cccgaagctgtcgagaacagagcag

SEQ ID NO: 4156114 - DNA, 25 bp, Homo sapien
tcattggaaggctgcggaatcagtt

SEQ ID NO: 4156115 - DNA, 25 bp, Homo sapien
gttaagacaccctgatggtgggtgt

SEQ ID NO: 4156116 - DNA, 25 bp, Homo sapien
gagaatagtttgtggttaagacacc

SEQ ID NO: 4156117 - DNA, 25 bp, Homo sapien
tttgtggttaagacaccctgatggt

SEQ ID NO: 4156118 - DNA, 25 bp, Homo sapien
ctagcggagaatagtttgtggttaa

SEQ ID NO: 4156119 - DNA, 25 bp, Homo sapien
gtgagcaagcagtgaactgttgaga

SEQ ID NO: 4156120 - DNA, 25 bp, Homo sapien
tgttgagagacaccgttgttttccc

SEQ ID NO: 4156121 - DNA, 25 bp, Homo sapien
ctttaatttgatgcagagtgagcaa

SEQ ID NO: 4156122 - DNA, 25 bp, Homo sapien
tgaactgttgagagacaccgttgtt

SEQ ID NO: 4156123 - DNA, 25 bp, Homo sapien
gcgttacgcgcacccggagatgttt

SEQ ID NO: 4156124 - DNA, 25 bp, Homo sapien
accctggtcgcgctccgggaactga

SEQ ID NO: 4156125 - DNA, 25 bp, Homo sapien
agggctgagactgcgttacgcgcac

SEQ ID NO: 4156126 - DNA, 25 bp, Homo sapien
cagccaggcgcggagagacttgtgc

SEQ ID NO: 4156127 - DNA, 25 bp, Homo sapien
aaggagtacgccgtgctctcccagt

SEQ ID NO: 4156128 - DNA, 25 bp, Homo sapien
tgttcgcttaactttgcaccttcgc

SEQ ID NO: 4156129 - DNA, 25 bp, Homo sapien
tcctcctggcgctcgtgttcgctta

SEQ ID NO: 4156130 - DNA, 25 bp, Homo sapien
tactgacgcccaggtaaggagggtc

SEQ ID NO: 4156131 - DNA, 25 bp, Homo sapien
atgctttctcaatccggcagcgaac

SEQ ID NO: 4156132 - DNA, 25 bp, Homo sapien
tccggcagcgaaccttgcagaatat

SEQ ID NO: 4156133 - DNA, 25 bp, Homo sapien
ttctcaatccggcagcgaaccttgc

SEQ ID NO: 4156134 - DNA, 25 bp, Homo sapien
aatccggcagcgaaccttgcagaat

SEQ ID NO: 4156135 - DNA, 25 bp, Homo sapien
catgtgatggataagagatccagcc

SEQ ID NO: 4156136 - DNA, 25 bp, Homo sapien
atgtgatggataagagatccagccc

SEQ ID NO: 4156137 - DNA, 25 bp, Homo sapien
ccatgtgatggataagagatccagc

SEQ ID NO: 4156138 - DNA, 25 bp, Homo sapien
cccatgtgatggataagagatccag

SEQ ID NO: 4156139 - DNA, 25 bp, Homo sapien
agaggtagttaagcctgctatataa

SEQ ID NO: 4156140 - DNA, 25 bp, Homo sapien
cacagaggtagttaagcctgctata

SEQ ID NO: 4156141 - DNA, 25 bp, Homo sapien
cagaggtagttaagcctgctatata

SEQ ID NO: 4156142 - DNA, 25 bp, Homo sapien
acagaggtagttaagcctgctatat

SEQ ID NO: 4156143 - DNA, 25 bp, Homo sapien
gtgaaagtttcaaggccagattaca

SEQ ID NO: 4156144 - DNA, 25 bp, Homo sapien
gcttgtagttagaaaggatcttgca

SEQ ID NO: 4156145 - DNA, 25 bp, Homo sapien
aaaaagtattatgcagaaccacaga

SEQ ID NO: 4156146 - DNA, 25 bp, Homo sapien
tgttggcacctgtgacccaatttgt

SEQ ID NO: 4156147 - DNA, 25 bp, Homo sapien
tgagtctccttagaaactgcgtcta

SEQ ID NO: 4156148 - DNA, 25 bp, Homo sapien
tcagcttccgtgaattctgagtctc

SEQ ID NO: 4156149 - DNA, 25 bp, Homo sapien
tctaaaatgtcgtccttcccctgtc

SEQ ID NO: 4156150 - DNA, 25 bp, Homo sapien
ctgaactgataggatgctccaatat

SEQ ID NO: 4156151 - DNA, 25 bp, Homo sapien
ggccaactggacttttaacgtctgc

SEQ ID NO: 4156152 - DNA, 25 bp, Homo sapien
tatatatcccttggccaactggact

SEQ ID NO: 4156153 - DNA, 25 bp, Homo sapien
tggacttttaacgtctgcactctac

SEQ ID NO: 4156154 - DNA, 25 bp, Homo sapien
ctgagaactaatgctatatatccct

SEQ ID NO: 4156155 - DNA, 25 bp, Homo sapien
caatattgggcatacctcagtactt

SEQ ID NO: 4156156 - DNA, 25 bp, Homo sapien
aatattgggcatacctcagtacttt

SEQ ID NO: 4156157 - DNA, 25 bp, Homo sapien
gtttatttccccttgtacactcata

SEQ ID NO: 4156158 - DNA, 25 bp, Homo sapien
tatttccccttgtacactcatagcc

SEQ ID NO: 4156159 - DNA, 25 bp, Homo sapien
ttatttccccttgtacactcatagc

SEQ ID NO: 4156160 - DNA, 25 bp, Homo sapien
tttccccttgtacactcatagccat

SEQ ID NO: 4156161 - DNA, 25 bp, Homo sapien
ccttgaaaacagaggtgtacattgc

SEQ ID NO: 4156162 - DNA, 25 bp, Homo sapien
gaagataatgcaaacagaaccagca

SEQ ID NO: 4156163 - DNA, 25 bp, Homo sapien
ccaaattgcttgtaagggatggtga

SEQ ID NO: 4156164 - DNA, 25 bp, Homo sapien
tttggcaagataccacaagtccttg

SEQ ID NO: 4156165 - DNA, 25 bp, Homo sapien
ccgagattcaacaacgaaacaagtt

SEQ ID NO: 4156166 - DNA, 25 bp, Homo sapien
agataagagcaactgagcgtctcag

SEQ ID NO: 4156167 - DNA, 25 bp, Homo sapien
cagtcaacagacttggtgctccaaa

SEQ ID NO: 4156168 - DNA, 25 bp, Homo sapien
gcgtctcagttcttagggttttaca

SEQ ID NO: 4156169 - DNA, 25 bp, Homo sapien
taaatcttctgagctgagttcctgg

SEQ ID NO: 4156170 - DNA, 25 bp, Homo sapien
gagcttcagaatacggtccccaaga

SEQ ID NO: 4156171 - DNA, 25 bp, Homo sapien
gccagcattgcaggaacacttgcca

SEQ ID NO: 4156172 - DNA, 25 bp, Homo sapien
ggtaccgtgtctggaaacatagcca

SEQ ID NO: 4156173 - DNA, 25 bp, Homo sapien
atagaatgtttttcttccaggtggt

SEQ ID NO: 4156174 - DNA, 25 bp, Homo sapien
tacataaaagagatagaatgttttt

SEQ ID NO: 4156175 - DNA, 25 bp, Homo sapien
ctacataaaagagatagaatgtttt

SEQ ID NO: 4156176 - DNA, 25 bp, Homo sapien
gagatagaatgtttttcttccaggt

SEQ ID NO: 4156177 - DNA, 25 bp, Homo sapien
tcattcacactcatgagcaccttgc

SEQ ID NO: 4156178 - DNA, 25 bp, Homo sapien
attcacactcatgagcaccttgcag

SEQ ID NO: 4156179 - DNA, 25 bp, Homo sapien
cattcacactcatgagcaccttgca

SEQ ID NO: 4156180 - DNA, 25 bp, Homo sapien
tactggaggacttacagaaatttgc

SEQ ID NO: 4156181 - DNA, 25 bp, Homo sapien
cttttgtcccagaactagagtcttg

SEQ ID NO: 4156182 - DNA, 25 bp, Homo sapien
tggctattccagaggatcagatggc

SEQ ID NO: 4156183 - DNA, 25 bp, Homo sapien
ttgggaagaacagcccctgctttgg

SEQ ID NO: 4156184 - DNA, 25 bp, Homo sapien
tgacactgaataatgagagcgtaac

SEQ ID NO: 4156185 - DNA, 25 bp, Homo sapien
gattgacctgagtgacactgaataa

SEQ ID NO: 4156186 - DNA, 25 bp, Homo sapien
tgaataatgagagcgtaactgttca

SEQ ID NO: 4156187 - DNA, 25 bp, Homo sapien
ctttaataattcagattgacctgag

SEQ ID NO: 4156188 - DNA, 25 bp, Homo sapien
tcccttgcaagctctttgacacaac

SEQ ID NO: 4156189 - DNA, 25 bp, Homo sapien
tcattgtgtcccttgcaagctcttt

SEQ ID NO: 4156190 - DNA, 25 bp, Homo sapien
gtgtcccttgcaagctctttgacac

SEQ ID NO: 4156191 - DNA, 25 bp, Homo sapien
cattgtgtcccttgcaagctctttg

SEQ ID NO: 4156192 - DNA, 25 bp, Homo sapien
gacaggttgatttcctacctggaag

SEQ ID NO: 4156193 - DNA, 25 bp, Homo sapien
agacactgagagcaaagggagccct

SEQ ID NO: 4156194 - DNA, 25 bp, Homo sapien
gtttccatgactcttcttgacaggt

SEQ ID NO: 4156195 - DNA, 25 bp, Homo sapien
tggattgtttagcaacggcagacac

SEQ ID NO: 4156196 - DNA, 25 bp, Homo sapien
tggcattccattcgccccatgaaac

SEQ ID NO: 4156197 - DNA, 25 bp, Homo sapien
catggcattccattcgccccatgaa

SEQ ID NO: 4156198 - DNA, 25 bp, Homo sapien
caggtaaaggaagcccatggccttc

SEQ ID NO: 4156199 - DNA, 25 bp, Homo sapien
taaaggaagcccatggccttctgga

SEQ ID NO: 4156200 - DNA, 25 bp, Homo sapien
tacagaagagaaagcgtcacaaaat

SEQ ID NO: 4156201 - DNA, 25 bp, Homo sapien
gcgtcacaaaataggccattgcgca

SEQ ID NO: 4156202 - DNA, 25 bp, Homo sapien
taggccattgcgcatgaagtccaca

SEQ ID NO: 4156203 - DNA, 25 bp, Homo sapien
ttgcgcatgaagtccacaagatcac

SEQ ID NO: 4156204 - DNA, 25 bp, Homo sapien
gctctcatttcactatgtggcaatg

SEQ ID NO: 4156205 - DNA, 25 bp, Homo sapien
tctctttttgacctaatttggcctg

SEQ ID NO: 4156206 - DNA, 25 bp, Homo sapien
tctatgttcaggtgctctatttccc

SEQ ID NO: 4156207 - DNA, 25 bp, Homo sapien
aaaactggatagaagtgggttctct

SEQ ID NO: 4156208 - DNA, 25 bp, Homo sapien
tcatggtgataaagctggcaatatg

SEQ ID NO: 4156209 - DNA, 25 bp, Homo sapien
cagagagactgattaagtgttaaca

SEQ ID NO: 4156210 - DNA, 25 bp, Homo sapien
gccagagagactgattaagtgttaa

SEQ ID NO: 4156211 - DNA, 25 bp, Homo sapien
tatggatgggaaatagtgccagaga

SEQ ID NO: 4156212 - DNA, 25 bp, Homo sapien
ttttcaagtatcgtatagtatagcc

SEQ ID NO: 4156213 - DNA, 25 bp, Homo sapien
tcaataatcttgataatttgtgcag

SEQ ID NO: 4156214 - DNA, 25 bp, Homo sapien
gataatttgtgcagtacctaggaag

SEQ ID NO: 4156215 - DNA, 25 bp, Homo sapien
cctaggaagtgattatgtgactctc

SEQ ID NO: 4156216 - DNA, 25 bp, Homo sapien
attaccatccaatgccttgtagaaa

SEQ ID NO: 4156217 - DNA, 25 bp, Homo sapien
ttaccatccaatgccttgtagaaac

SEQ ID NO: 4156218 - DNA, 25 bp, Homo sapien
accatccaatgccttgtagaaacct

SEQ ID NO: 4156219 - DNA, 25 bp, Homo sapien
ccatccaatgccttgtagaaacctg

SEQ ID NO: 4156220 - DNA, 25 bp, Homo sapien
accatcttcctgagtagaactgtga

SEQ ID NO: 4156221 - DNA, 25 bp, Homo sapien
agtagaactgtgaggcgggcactta

SEQ ID NO: 4156222 - DNA, 25 bp, Homo sapien
gaggcgggcacttagcacacttcat

SEQ ID NO: 4156223 - DNA, 25 bp, Homo sapien
ccatcttcctgagtagaactgtgag

SEQ ID NO: 4156224 - DNA, 25 bp, Homo sapien
gagggtctttgtctgcccggaagta

SEQ ID NO: 4156225 - DNA, 25 bp, Homo sapien
gcccggaagtaattattctcacacc

SEQ ID NO: 4156226 - DNA, 25 bp, Homo sapien
catggatggagggtctttgtctgcc

SEQ ID NO: 4156227 - DNA, 25 bp, Homo sapien
tttgtctgcccggaagtaattattc

SEQ ID NO: 4156228 - DNA, 25 bp, Homo sapien
aactccagtccaggataactgaggt

SEQ ID NO: 4156229 - DNA, 25 bp, Homo sapien
ctgtcgagggaggaagcggacattt

SEQ ID NO: 4156230 - DNA, 25 bp, Homo sapien
aactgaggtctcgtttatattagag

SEQ ID NO: 4156231 - DNA, 25 bp, Homo sapien
tacatatgatgttgaaggtaacatc

SEQ ID NO: 4156232 - DNA, 25 bp, Homo sapien
gttagtatgtgccagaaggtctgtc

SEQ ID NO: 4156233 - DNA, 25 bp, Homo sapien
tgctgaccgcagcaaactgtcttgg

SEQ ID NO: 4156234 - DNA, 25 bp, Homo sapien
ccattaacggcatcaatctcaaagg

SEQ ID NO: 4156235 - DNA, 25 bp, Homo sapien
cctgattagttgtgatgctgaccgc

SEQ ID NO: 4156236 - DNA, 25 bp, Homo sapien
agagcagaagccgagtttatactca

SEQ ID NO: 4156237 - DNA, 25 bp, Homo sapien
gagggatgtccataatgtaagccaa

SEQ ID NO: 4156238 - DNA, 25 bp, Homo sapien
taatgtaagccaaatgaagagcaga

SEQ ID NO: 4156239 - DNA, 25 bp, Homo sapien
aatcttgacaaccagctcagaggtg

SEQ ID NO: 4156240 - DNA, 25 bp, Homo sapien
tcagcttgaaatatagcgctccgga

SEQ ID NO: 4156241 - DNA, 25 bp, Homo sapien
tagcgctccggaaaaccatttgcca

SEQ ID NO: 4156242 - DNA, 25 bp, Homo sapien
gaaatatagcgctccggaaaaccat

SEQ ID NO: 4156243 - DNA, 25 bp, Homo sapien
aaccatttgccacatgatcataatt

SEQ ID NO: 4156244 - DNA, 25 bp, Homo sapien
actcgatctcacaaactaaattaaa

SEQ ID NO: 4156245 - DNA, 25 bp, Homo sapien
tttatatccacgtcaaagatagagg

SEQ ID NO: 4156246 - DNA, 25 bp, Homo sapien
aagaatcaacaaactcgatctcaca

SEQ ID NO: 4156247 - DNA, 25 bp, Homo sapien
tcatgcttcccctttatatccacgt

SEQ ID NO: 4156248 - DNA, 25 bp, Homo sapien
ataacgccgcgtacctacaactatc

SEQ ID NO: 4156249 - DNA, 25 bp, Homo sapien
aataacgccgcgtacctacaactat

SEQ ID NO: 4156250 - DNA, 25 bp, Homo sapien
cagaaataacgccgcgtacctacaa

SEQ ID NO: 4156251 - DNA, 25 bp, Homo sapien
cctcagaaataacgccgcgtaccta

SEQ ID NO: 4156252 - DNA, 25 bp, Homo sapien
cctaaggactatatttcagttaact

SEQ ID NO: 4156253 - DNA, 25 bp, Homo sapien
taatttccatgtgctttagttaaca

SEQ ID NO: 4156254 - DNA, 25 bp, Homo sapien
tagtaatatatctgcttttggaaac

SEQ ID NO: 4156255 - DNA, 25 bp, Homo sapien
tacaacaagttagcatcaaaagtct

SEQ ID NO: 4156256 - DNA, 25 bp, Homo sapien
tcctttgcaacccataggaaaaaga

SEQ ID NO: 4156257 - DNA, 25 bp, Homo sapien
tgtgtaccaggcagtcaagatttta

SEQ ID NO: 4156258 - DNA, 25 bp, Homo sapien
tgcggccatggacaagacacttatt

SEQ ID NO: 4156259 - DNA, 25 bp, Homo sapien
cagccttacttagattttgtgcaaa

SEQ ID NO: 4156260 - DNA, 25 bp, Homo sapien
catatgaagctttcttgttgcagcc

SEQ ID NO: 4156261 - DNA, 25 bp, Homo sapien
tctgcattgctcattacaggagtca

SEQ ID NO: 4156262 - DNA, 25 bp, Homo sapien
taaaaaaagtgtaggctgtgtgcag

SEQ ID NO: 4156263 - DNA, 25 bp, Homo sapien
gtgactgcatttaagacgaagggct

SEQ ID NO: 4156264 - DNA, 25 bp, Homo sapien
ttatacaatgctcaaggaacatctt

SEQ ID NO: 4156265 - DNA, 25 bp, Homo sapien
atgctcaaggaacatctttccatat

SEQ ID NO: 4156266 - DNA, 25 bp, Homo sapien
tgctcaaggaacatctttccatatt

SEQ ID NO: 4156267 - DNA, 25 bp, Homo sapien
tacaatgctcaaggaacatctttcc

SEQ ID NO: 4156268 - DNA, 25 bp, Homo sapien
caataggtaccaaaatgtcgacgat

SEQ ID NO: 4156269 - DNA, 25 bp, Homo sapien
ctgatagaagtggacccagaatgaa

SEQ ID NO: 4156270 - DNA, 25 bp, Homo sapien
gacccagaatgaaaagattcctgca

SEQ ID NO: 4156271 - DNA, 25 bp, Homo sapien
aaatgtcgacgatagttaagggcat

SEQ ID NO: 4156272 - DNA, 25 bp, Homo sapien
cgcctgcctttatggagatctgaaa

SEQ ID NO: 4156273 - DNA, 25 bp, Homo sapien
tgaaggatttgaagtactacagctc

SEQ ID NO: 4156274 - DNA, 25 bp, Homo sapien
tgtgtctgtacaatatccctttgga

SEQ ID NO: 4156275 - DNA, 25 bp, Homo sapien
tcttccaggatacctaatgggccta

SEQ ID NO: 4156276 - DNA, 25 bp, Homo sapien
cattgtctatgcttgggtttactaa

SEQ ID NO: 4156277 - DNA, 25 bp, Homo sapien
aaaatttgcattgtctatgcttggg

SEQ ID NO: 4156278 - DNA, 25 bp, Homo sapien
gggtttactaatacttctcagtctc

SEQ ID NO: 4156279 - DNA, 25 bp, Homo sapien
ctatgcttgggtttactaatacttc

SEQ ID NO: 4156280 - DNA, 25 bp, Homo sapien
ccacacttcagtcagggcgacagag

SEQ ID NO: 4156281 - DNA, 25 bp, Homo sapien
aaagttaataattgaacctcagccg

SEQ ID NO: 4156282 - DNA, 25 bp, Homo sapien
aagttaataattgaacctcagccga

SEQ ID NO: 4156283 - DNA, 25 bp, Homo sapien
accaccacacttcagtcagggcgac

SEQ ID NO: 4156284 - DNA, 25 bp, Homo sapien
gaggcaattgcttgaagcttgtgcc

SEQ ID NO: 4156285 - DNA, 25 bp, Homo sapien
ggcaattgcttgaagcttgtgccat

SEQ ID NO: 4156286 - DNA, 25 bp, Homo sapien
aggcaattgcttgaagcttgtgcca

SEQ ID NO: 4156287 - DNA, 25 bp, Homo sapien
gactttataactgttgaatttcttc

SEQ ID NO: 4156288 - DNA, 25 bp, Homo sapien
tgagcaggactttataactgttgaa

SEQ ID NO: 4156289 - DNA, 25 bp, Homo sapien
atgaaagctttgtgggctgttttgg

SEQ ID NO: 4156290 - DNA, 25 bp, Homo sapien
tgggggtctgtccaaattttactgc

SEQ ID NO: 4156291 - DNA, 25 bp, Homo sapien
ttcttaatcgtcaggacaggtgatg

SEQ ID NO: 4156292 - DNA, 25 bp, Homo sapien
agatgctatttctggaggtccgatc

SEQ ID NO: 4156293 - DNA, 25 bp, Homo sapien
gacctcgtagtccaatatgatccca

SEQ ID NO: 4156294 - DNA, 25 bp, Homo sapien
tgttcaggttcttgccaggacaaag

SEQ ID NO: 4156295 - DNA, 25 bp, Homo sapien
gatggtaacatttgtgcctcttgcc

SEQ ID NO: 4156296 - DNA, 25 bp, Homo sapien
cgggctcggatttggaatacgtata

SEQ ID NO: 4156297 - DNA, 25 bp, Homo sapien
tgccctcagaatggtataacttgtt

SEQ ID NO: 4156298 - DNA, 25 bp, Homo sapien
tacgtatatagtgtcaggcttgagg

SEQ ID NO: 4156299 - DNA, 25 bp, Homo sapien
caaatactgtatacagacacagggc

SEQ ID NO: 4156300 - DNA, 25 bp, Homo sapien
cagtgagaataaacgatcagacatc

SEQ ID NO: 4156301 - DNA, 25 bp, Homo sapien
tgcaatgtcccaagcaatatacctt

SEQ ID NO: 4156302 - DNA, 25 bp, Homo sapien
ttgaatcacgcaatgaacctggaat

SEQ ID NO: 4156303 - DNA, 25 bp, Homo sapien
tcttgtattggtggaagctaccttc

SEQ ID NO: 4156304 - DNA, 25 bp, Homo sapien
cacatgcacagtgagtacctactat

SEQ ID NO: 4156305 - DNA, 25 bp, Homo sapien
gatgttccccaatttccagatagaa

SEQ ID NO: 4156306 - DNA, 25 bp, Homo sapien
agttcaccctaataatgctcagctg

SEQ ID NO: 4156307 - DNA, 25 bp, Homo sapien
tctctctcaaaagagtgattcagag

SEQ ID NO: 4156308 - DNA, 25 bp, Homo sapien
gactcacagaggctatctaaagcac

SEQ ID NO: 4156309 - DNA, 25 bp, Homo sapien
ggttattttgattagccagcttata

SEQ ID NO: 4156310 - DNA, 25 bp, Homo sapien
cctacacagagtgctggctttctct

SEQ ID NO: 4156311 - DNA, 25 bp, Homo sapien
tgacaacagtgaggagaataattgc

SEQ ID NO: 4156312 - DNA, 25 bp, Homo sapien
gctactgccgctgaaatggcgatca

SEQ ID NO: 4156313 - DNA, 25 bp, Homo sapien
ttggctactttcaccagagatggag

SEQ ID NO: 4156314 - DNA, 25 bp, Homo sapien
caatcaaaacatagatgacaacagt

SEQ ID NO: 4156315 - DNA, 25 bp, Homo sapien
gcccattgccaaaatgaagtctttt

SEQ ID NO: 4156316 - DNA, 25 bp, Homo sapien
aatgcccattgccaaaatgaagtct

SEQ ID NO: 4156317 - DNA, 25 bp, Homo sapien
catgttttgacttatagccacagaa

SEQ ID NO: 4156318 - DNA, 25 bp, Homo sapien
atgttttgacttatagccacagaac

SEQ ID NO: 4156319 - DNA, 25 bp, Homo sapien
tggtctgttcgctgtagaagcactg

SEQ ID NO: 4156320 - DNA, 25 bp, Homo sapien
tagaagcactggctgctgatcttta

SEQ ID NO: 4156321 - DNA, 25 bp, Homo sapien
cactggctgctgatctttaactgct

SEQ ID NO: 4156322 - DNA, 25 bp, Homo sapien
ccccaagtaaaatggtctgttcgct

SEQ ID NO: 4156323 - DNA, 25 bp, Homo sapien
cacagatcagcttatatgcttcttc

SEQ ID NO: 4156324 - DNA, 25 bp, Homo sapien
tcttccatataagcatgaatccttc

SEQ ID NO: 4156325 - DNA, 25 bp, Homo sapien
tatgcttcttccatataagcatgaa

SEQ ID NO: 4156326 - DNA, 25 bp, Homo sapien
ttttgagctcacagatcagcttata

SEQ ID NO: 4156327 - DNA, 25 bp, Homo sapien
gtatgtgggtcaacataagtcctga

SEQ ID NO: 4156328 - DNA, 25 bp, Homo sapien
ggtggcatccaattccttggcaaac

SEQ ID NO: 4156329 - DNA, 25 bp, Homo sapien
tccaacaactttatcaatggatatg

SEQ ID NO: 4156330 - DNA, 25 bp, Homo sapien
tgtgggtcaacataagtcctgagac

SEQ ID NO: 4156331 - DNA, 25 bp, Homo sapien
agtactaagttggcagtagggtcat

SEQ ID NO: 4156332 - DNA, 25 bp, Homo sapien
agtgcactcttgtgaggaaacatta

SEQ ID NO: 4156333 - DNA, 25 bp, Homo sapien
aaagtgcactcttgtgaggaaacat

SEQ ID NO: 4156334 - DNA, 25 bp, Homo sapien
gaaaagtgcactcttgtgaggaaac

SEQ ID NO: 4156335 - DNA, 25 bp, Homo sapien
ggagaaaagtgcactcttgtgagga

SEQ ID NO: 4156336 - DNA, 25 bp, Homo sapien
gaacagcaacaaaatgtaaggaatt

SEQ ID NO: 4156337 - DNA, 25 bp, Homo sapien
agaacagcaacaaaatgtaaggaat

SEQ ID NO: 4156338 - DNA, 25 bp, Homo sapien
caactttcagggtcttaatggccac

SEQ ID NO: 4156339 - DNA, 25 bp, Homo sapien
tttggtaacaactccttccagtcga

SEQ ID NO: 4156340 - DNA, 25 bp, Homo sapien
ctccttccagtcgaatgatattggg

SEQ ID NO: 4156341 - DNA, 25 bp, Homo sapien
aaggaagttttaagcgaccactgca

SEQ ID NO: 4156342 - DNA, 25 bp, Homo sapien
gtattagtgccatttggaaaatgct

SEQ ID NO: 4156343 - DNA, 25 bp, Homo sapien
agtgagaataagtattagtgccatt

SEQ ID NO: 4156344 - DNA, 25 bp, Homo sapien
gaataagtattagtgccatttggaa

SEQ ID NO: 4156345 - DNA, 25 bp, Homo sapien
cctttttagtcatgctaaagtgaga

SEQ ID NO: 4156346 - DNA, 25 bp, Homo sapien
caagtagaaacctgtttgggttcag

SEQ ID NO: 4156347 - DNA, 25 bp, Homo sapien
gtaacgatataaaagaataagtaga

SEQ ID NO: 4156348 - DNA, 25 bp, Homo sapien
tattttagtcacttgtcatcaaata

SEQ ID NO: 4156349 - DNA, 25 bp, Homo sapien
taagtatctattatgatccaggatt

SEQ ID NO: 4156350 - DNA, 25 bp, Homo sapien
ctcctgtttaagaccatcaggctca

SEQ ID NO: 4156351 - DNA, 25 bp, Homo sapien
ttaagaccatcaggctcaaaaacat

SEQ ID NO: 4156352 - DNA, 25 bp, Homo sapien
tgtttaagaccatcaggctcaaaaa

SEQ ID NO: 4156353 - DNA, 25 bp, Homo sapien
gaccatcaggctcaaaaacattaaa

SEQ ID NO: 4156354 - DNA, 25 bp, Homo sapien
tgctactttgaagatcagagactct

SEQ ID NO: 4156355 - DNA, 25 bp, Homo sapien
ctttgaagatcagagactctctcac

SEQ ID NO: 4156356 - DNA, 25 bp, Homo sapien
tgccccccgctttctgctactttga

SEQ ID NO: 4156357 - DNA, 25 bp, Homo sapien
ctgtgccccccgctttctgctactt

SEQ ID NO: 4156358 - DNA, 25 bp, Homo sapien
taggaaactatccaaggaaccattc

SEQ ID NO: 4156359 - DNA, 25 bp, Homo sapien
cgtaggaaactatccaaggaaccat

SEQ ID NO: 4156360 - DNA, 25 bp, Homo sapien
aggaaactatccaaggaaccattct

SEQ ID NO: 4156361 - DNA, 25 bp, Homo sapien
aatgacagtaaactgggcatcgtgt

SEQ ID NO: 4156362 - DNA, 25 bp, Homo sapien
tgacagtaaactgggcatcgtgttt

SEQ ID NO: 4156363 - DNA, 25 bp, Homo sapien
ctgaatgacagtaaactgggcatcg

SEQ ID NO: 4156364 - DNA, 25 bp, Homo sapien
gaatgacagtaaactgggcatcgtg

SEQ ID NO: 4156365 - DNA, 25 bp, Homo sapien
tcaagatgttccgagcagcgaggtc

SEQ ID NO: 4156366 - DNA, 25 bp, Homo sapien
catgccagatgctatccctcgaagc

SEQ ID NO: 4156367 - DNA, 25 bp, Homo sapien
aaccttacacaccaagttactgttg

SEQ ID NO: 4156368 - DNA, 25 bp, Homo sapien
cgcgaaagtccgaaatcagaaacct

SEQ ID NO: 4156369 - DNA, 25 bp, Homo sapien
gcctcagcaaattgttttgaatgat

SEQ ID NO: 4156370 - DNA, 25 bp, Homo sapien
tccaaaaggaatgcctcagcaaatt

SEQ ID NO: 4156371 - DNA, 25 bp, Homo sapien
accaggatctcttatccaaaaggaa

SEQ ID NO: 4156372 - DNA, 25 bp, Homo sapien
tttaatgcagattaaccaggatctc

SEQ ID NO: 4156373 - DNA, 25 bp, Homo sapien
tgggcctcttggaatcagtgcaatt

SEQ ID NO: 4156374 - DNA, 25 bp, Homo sapien
ggcctcttggaatcagtgcaattat

SEQ ID NO: 4156375 - DNA, 25 bp, Homo sapien
aaggtgggcctcttggaatcagtgc

SEQ ID NO: 4156376 - DNA, 25 bp, Homo sapien
ggtgggcctcttggaatcagtgcaa

SEQ ID NO: 4156377 - DNA, 25 bp, Homo sapien
tcatatttagagtgacaaaggactt

SEQ ID NO: 4156378 - DNA, 25 bp, Homo sapien
gacaaaggactttggagagtttatc

SEQ ID NO: 4156379 - DNA, 25 bp, Homo sapien
tatttagagtgacaaaggactttgg

SEQ ID NO: 4156380 - DNA, 25 bp, Homo sapien
ttgtcaggtcatatttagagtgaca

SEQ ID NO: 4156381 - DNA, 25 bp, Homo sapien
aaatcagcaatgcatagaacatata

SEQ ID NO: 4156382 - DNA, 25 bp, Homo sapien
gcaatgcatagaacatataatatac

SEQ ID NO: 4156383 - DNA, 25 bp, Homo sapien
tcagcaatgcatagaacatataata

SEQ ID NO: 4156384 - DNA, 25 bp, Homo sapien
aatcagcaatgcatagaacatataa

SEQ ID NO: 4156385 - DNA, 25 bp, Homo sapien
aatcccataactccatacatcgctg

SEQ ID NO: 4156386 - DNA, 25 bp, Homo sapien
tacatcgctggctgacgtgaacttg

SEQ ID NO: 4156387 - DNA, 25 bp, Homo sapien
atcctgattggacatctcccagtat

SEQ ID NO: 4156388 - DNA, 25 bp, Homo sapien
gaacttgcggtaggctatagcttct

SEQ ID NO: 4156389 - DNA, 25 bp, Homo sapien
ccagcatcagctgatacaaggcagc

SEQ ID NO: 4156390 - DNA, 25 bp, Homo sapien
gataagcttgtccagaatactaaca

SEQ ID NO: 4156391 - DNA, 25 bp, Homo sapien
caaacttgggtctgttgttcctgtc

SEQ ID NO: 4156392 - DNA, 25 bp, Homo sapien
tgatcttcaggctgccgggattccg

SEQ ID NO: 4156393 - DNA, 25 bp, Homo sapien
cataaagcaagtcctcagtgaccta

SEQ ID NO: 4156394 - DNA, 25 bp, Homo sapien
aagcaagtcctcagtgacctacaaa

SEQ ID NO: 4156395 - DNA, 25 bp, Homo sapien
aagtcctcagtgacctacaaagaga

SEQ ID NO: 4156396 - DNA, 25 bp, Homo sapien
agtcctcagtgacctacaaagagac

SEQ ID NO: 4156397 - DNA, 25 bp, Homo sapien
gaatctgggcctttgagcagctgca

SEQ ID NO: 4156398 - DNA, 25 bp, Homo sapien
gcgttttttcagacccagccccaga

SEQ ID NO: 4156399 - DNA, 25 bp, Homo sapien
ttttcagacccagccccagacattg

SEQ ID NO: 4156400 - DNA, 25 bp, Homo sapien
cagctgcaggcattggcgttttttc

SEQ ID NO: 4156401 - DNA, 25 bp, Homo sapien
ctgttgtgcggaaggtagtgatatc

SEQ ID NO: 4156402 - DNA, 25 bp, Homo sapien
tagtgatatccacattgctttggtc

SEQ ID NO: 4156403 - DNA, 25 bp, Homo sapien
ttggtccagaagaaggtttgatggc

SEQ ID NO: 4156404 - DNA, 25 bp, Homo sapien
tgctttggtccagaagaaggtttga

SEQ ID NO: 4156405 - DNA, 25 bp, Homo sapien
attgtgtcacaagaactgtactcca

SEQ ID NO: 4156406 - DNA, 25 bp, Homo sapien
tcttggctattgtgtcacaagaact

SEQ ID NO: 4156407 - DNA, 25 bp, Homo sapien
tgtcacaagaactgtactccacacc

SEQ ID NO: 4156408 - DNA, 25 bp, Homo sapien
agaactgtactccacacccgtgaag

SEQ ID NO: 4156409 - DNA, 25 bp, Homo sapien
tactgatgatcttcttctgtggccc

SEQ ID NO: 4156410 - DNA, 25 bp, Homo sapien
cattctttgattgcgtttctagagc

SEQ ID NO: 4156411 - DNA, 25 bp, Homo sapien
gagctttaatgctactgatgatctt

SEQ ID NO: 4156412 - DNA, 25 bp, Homo sapien
tgggccattctttgattgcgtttct

SEQ ID NO: 4156413 - DNA, 25 bp, Homo sapien
ctattctcggaagctctaacacggc

SEQ ID NO: 4156414 - DNA, 25 bp, Homo sapien
tacacattttgaggcggttgctaga

SEQ ID NO: 4156415 - DNA, 25 bp, Homo sapien
gttcctgtacaaagagatggccgta

SEQ ID NO: 4156416 - DNA, 25 bp, Homo sapien
tatccgaaggagcacaatctaagtc

SEQ ID NO: 4156417 - DNA, 25 bp, Homo sapien
tgagtaatattttgaaaagacaagt

SEQ ID NO: 4156418 - DNA, 25 bp, Homo sapien
ctgagtaatattttgaaaagacaag

SEQ ID NO: 4156419 - DNA, 25 bp, Homo sapien
attttacattagtaagaggccatct

SEQ ID NO: 4156420 - DNA, 25 bp, Homo sapien
tacattagtaagaggccatctacat

SEQ ID NO: 4156421 - DNA, 25 bp, Homo sapien
tttacattagtaagaggccatctac

SEQ ID NO: 4156422 - DNA, 25 bp, Homo sapien
tttccactacaaatcattttacatt

SEQ ID NO: 4156423 - DNA, 25 bp, Homo sapien
caataggtgatgcaacaacaatggt

SEQ ID NO: 4156424 - DNA, 25 bp, Homo sapien
gctgcacgaggaagggttacctaac

SEQ ID NO: 4156425 - DNA, 25 bp, Homo sapien
cctcagctagaagtaaagatagggc

SEQ ID NO: 4156426 - DNA, 25 bp, Homo sapien
tgtcagtattaagtacagggttcta

SEQ ID NO: 4156427 - DNA, 25 bp, Homo sapien
ttaacatacgtccataaatcactgg

SEQ ID NO: 4156428 - DNA, 25 bp, Homo sapien
aacaatttgtattggcttcctccca

SEQ ID NO: 4156429 - DNA, 25 bp, Homo sapien
caagggtttggcttccatcattgag

SEQ ID NO: 4156430 - DNA, 25 bp, Homo sapien
tatatgaagcatacctatggcagtt

SEQ ID NO: 4156431 - DNA, 25 bp, Homo sapien
gaactattgcattgtactgaaggtc

SEQ ID NO: 4156432 - DNA, 25 bp, Homo sapien
tctacggttgatatccaaaatggtt

SEQ ID NO: 4156433 - DNA, 25 bp, Homo sapien
ttatgactgaactattgcattgtac

SEQ ID NO: 4156434 - DNA, 25 bp, Homo sapien
tgtgtccttttcataacacgtggct

SEQ ID NO: 4156435 - DNA, 25 bp, Homo sapien
tgtggaagacaatgcggcaattcct

SEQ ID NO: 4156436 - DNA, 25 bp, Homo sapien
aagacaatgcggcaattcctcaagg

SEQ ID NO: 4156437 - DNA, 25 bp, Homo sapien
ccattgtggaagacaatgcggcaat

SEQ ID NO: 4156438 - DNA, 25 bp, Homo sapien
gtggaagacaatgcggcaattcctc

SEQ ID NO: 4156439 - DNA, 25 bp, Homo sapien
gagaaaggaaggaattgaatcccca

SEQ ID NO: 4156440 - DNA, 25 bp, Homo sapien
ccataacctctatgactttctcgat

SEQ ID NO: 4156441 - DNA, 25 bp, Homo sapien
cagaaactggtttcaagacaatccc

SEQ ID NO: 4156442 - DNA, 25 bp, Homo sapien
gaaggaattgaatccccagaaactg

SEQ ID NO: 4156443 - DNA, 25 bp, Homo sapien
tctattgctttctccttactccaca

SEQ ID NO: 4156444 - DNA, 25 bp, Homo sapien
actctattgctttctccttactcca

SEQ ID NO: 4156445 - DNA, 25 bp, Homo sapien
ctattgctttctccttactccacat

SEQ ID NO: 4156446 - DNA, 25 bp, Homo sapien
tactctattgctttctccttactcc

SEQ ID NO: 4156447 - DNA, 25 bp, Homo sapien
agtgaattcaggagacgtgctatgt

SEQ ID NO: 4156448 - DNA, 25 bp, Homo sapien
ctctatccttaataaactgccatgt

SEQ ID NO: 4156449 - DNA, 25 bp, Homo sapien
gacgtgctatgttcctgagcatgga

SEQ ID NO: 4156450 - DNA, 25 bp, Homo sapien
ttgggtgacggctgttttcagtgaa

SEQ ID NO: 4156451 - DNA, 25 bp, Homo sapien
tcacagacacacgttttgaaaccag

SEQ ID NO: 4156452 - DNA, 25 bp, Homo sapien
tgtaatgtggaaaatctgtatcaca

SEQ ID NO: 4156453 - DNA, 25 bp, Homo sapien
cacgttttgaaaccagtgtcggaca

SEQ ID NO: 4156454 - DNA, 25 bp, Homo sapien
cagacacacgttttgaaaccagtgt

SEQ ID NO: 4156455 - DNA, 25 bp, Homo sapien
tgaaagatcactgatgaaaggcaac

SEQ ID NO: 4156456 - DNA, 25 bp, Homo sapien
tgcatattagatccgaggcaggtcc

SEQ ID NO: 4156457 - DNA, 25 bp, Homo sapien
cctgtgaagagcaaactggagtgaa

SEQ ID NO: 4156458 - DNA, 25 bp, Homo sapien
ggcaactgaaagtccacagttttca

SEQ ID NO: 4156459 - DNA, 25 bp, Homo sapien
ggagtgctccttctacgaaactgca

SEQ ID NO: 4156460 - DNA, 25 bp, Homo sapien
tctgggaaggctatctttaggtaca

SEQ ID NO: 4156461 - DNA, 25 bp, Homo sapien
tacgcttcatgattgtggaggacac

SEQ ID NO: 4156462 - DNA, 25 bp, Homo sapien
aaaattatgacttcctcttgtgcag

SEQ ID NO: 4156463 - DNA, 25 bp, Homo sapien
cgttttttccttaactgctccagag

SEQ ID NO: 4156464 - DNA, 25 bp, Homo sapien
gatatcattgacatccctaggtaaa

SEQ ID NO: 4156465 - DNA, 25 bp, Homo sapien
aaggctctgcatgaaaaacgctttc

SEQ ID NO: 4156466 - DNA, 25 bp, Homo sapien
tgctccagagttgttgatatcattg

SEQ ID NO: 4156467 - DNA, 25 bp, Homo sapien
cattcaacgaatattcttccaacat

SEQ ID NO: 4156468 - DNA, 25 bp, Homo sapien
acagtttctctgcatacagctgaca

SEQ ID NO: 4156469 - DNA, 25 bp, Homo sapien
ctttacgcagataccttccacagtt

SEQ ID NO: 4156470 - DNA, 25 bp, Homo sapien
tcacgtgttccaccctttacgcaga

SEQ ID NO: 4156471 - DNA, 25 bp, Homo sapien
ggatagttgacgaagagacattttt

SEQ ID NO: 4156472 - DNA, 25 bp, Homo sapien
ataccgataggaagtggagttggca

SEQ ID NO: 4156473 - DNA, 25 bp, Homo sapien
gagacattttttgataccgatagga

SEQ ID NO: 4156474 - DNA, 25 bp, Homo sapien
tagaatagaatgttacgcagattga

SEQ ID NO: 4156475 - DNA, 25 bp, Homo sapien
caggtcttagacaaagagttgtaga

SEQ ID NO: 4156476 - DNA, 25 bp, Homo sapien
tgagctgggagacataagtcacagc

SEQ ID NO: 4156477 - DNA, 25 bp, Homo sapien
tgttggtatgaaatggctctgtgcc

SEQ ID NO: 4156478 - DNA, 25 bp, Homo sapien
tctgtgcctgcaacagaccatgtga

SEQ ID NO: 4156479 - DNA, 25 bp, Homo sapien
tcaaatgctaatcctcgtaacacct

SEQ ID NO: 4156480 - DNA, 25 bp, Homo sapien
cagttcaaatgctaatcctcgtaac

SEQ ID NO: 4156481 - DNA, 25 bp, Homo sapien
gttcaaatgctaatcctcgtaacac

SEQ ID NO: 4156482 - DNA, 25 bp, Homo sapien
aaatgctaatcctcgtaacacctca

SEQ ID NO: 4156483 - DNA, 25 bp, Homo sapien
tgaattatctgcttgaatgtcttta

SEQ ID NO: 4156484 - DNA, 25 bp, Homo sapien
tactttttgacatgattatcccagc

SEQ ID NO: 4156485 - DNA, 25 bp, Homo sapien
tagtgacccttgagagctagttttt

SEQ ID NO: 4156486 - DNA, 25 bp, Homo sapien
tataatctccatgtttggtctcgtc

SEQ ID NO: 4156487 - DNA, 25 bp, Homo sapien
tctaaaaatcgctgattccttccca

SEQ ID NO: 4156488 - DNA, 25 bp, Homo sapien
aagagctcaagagaatattgcacat

SEQ ID NO: 4156489 - DNA, 25 bp, Homo sapien
cccagagtgatttgtttcacatcat

SEQ ID NO: 4156490 - DNA, 25 bp, Homo sapien
tgcacatcagttctaaaaatcgctg

SEQ ID NO: 4156491 - DNA, 25 bp, Homo sapien
catctaatgaaagctctggattaaa

SEQ ID NO: 4156492 - DNA, 25 bp, Homo sapien
tctgatatgtcatctaatgaaagct

SEQ ID NO: 4156493 - DNA, 25 bp, Homo sapien
tgtcatctaatgaaagctctggatt

SEQ ID NO: 4156494 - DNA, 25 bp, Homo sapien
tcatgatggttccactgcatttcac

SEQ ID NO: 4156495 - DNA, 25 bp, Homo sapien
tagacaaagacatggcaaacagcat

SEQ ID NO: 4156496 - DNA, 25 bp, Homo sapien
caaacagcatgaggattcgatgtag

SEQ ID NO: 4156497 - DNA, 25 bp, Homo sapien
ccaagtcatgttgcttttactgata

SEQ ID NO: 4156498 - DNA, 25 bp, Homo sapien
tgctcatgaggagagtgatctcact

SEQ ID NO: 4156499 - DNA, 25 bp, Homo sapien
tagagatagagacgcatatgacttc

SEQ ID NO: 4156500 - DNA, 25 bp, Homo sapien
gaagggaacgcaccaatatttagaa

SEQ ID NO: 4156501 - DNA, 25 bp, Homo sapien
tctctgcaataaaatgaagggaacg

SEQ ID NO: 4156502 - DNA, 25 bp, Homo sapien
aaaatacaggtagcaccgaggtctc

SEQ ID NO: 4156503 - DNA, 25 bp, Homo sapien
tcctggtgggttggcccagtcccca

SEQ ID NO: 4156504 - DNA, 25 bp, Homo sapien
tattctgacagtggaaaattaattc

SEQ ID NO: 4156505 - DNA, 25 bp, Homo sapien
tgtcttgattgctttcccacagtgc

SEQ ID NO: 4156506 - DNA, 25 bp, Homo sapien
gcttccaccatgactctgtgcacca

SEQ ID NO: 4156507 - DNA, 25 bp, Homo sapien
ttgaaacctccagaatagatgatga

SEQ ID NO: 4156508 - DNA, 25 bp, Homo sapien
ggaagatgtgtttagcaagaaacat

SEQ ID NO: 4156509 - DNA, 25 bp, Homo sapien
tgttagggtgtgtaggaagatgtgt

SEQ ID NO: 4156510 - DNA, 25 bp, Homo sapien
actccaggttgaaacctccagaata

SEQ ID NO: 4156511 - DNA, 25 bp, Homo sapien
tgtggacttccatccggaatatcac

SEQ ID NO: 4156512 - DNA, 25 bp, Homo sapien
tccggaatatcacactggatgatgc

SEQ ID NO: 4156513 - DNA, 25 bp, Homo sapien
gtgtggacttccatccggaatatca

SEQ ID NO: 4156514 - DNA, 25 bp, Homo sapien
gcctcatggaccattgagagtggct

SEQ ID NO: 4156515 - DNA, 25 bp, Homo sapien
gctggtgtacagctggttttaagaa

SEQ ID NO: 4156516 - DNA, 25 bp, Homo sapien
tgagctgggtgcctcatggaccatt

SEQ ID NO: 4156517 - DNA, 25 bp, Homo sapien
agtggctggtgtacagctggtttta

SEQ ID NO: 4156518 - DNA, 25 bp, Homo sapien
tgacgatcccttttcccacgggaga

SEQ ID NO: 4156519 - DNA, 25 bp, Homo sapien
gggagatgcatcataaacactgata

SEQ ID NO: 4156520 - DNA, 25 bp, Homo sapien
ttagatggcatatattggatttact

SEQ ID NO: 4156521 - DNA, 25 bp, Homo sapien
tgaaacaatcaactgaagctcagtc

SEQ ID NO: 4156522 - DNA, 25 bp, Homo sapien
tagttgatggtgctctacactttca

SEQ ID NO: 4156523 - DNA, 25 bp, Homo sapien
tcagttgcagcaacacaacacagag

SEQ ID NO: 4156524 - DNA, 25 bp, Homo sapien
gctgtgcccctttcccatagttgat

SEQ ID NO: 4156525 - DNA, 25 bp, Homo sapien
gctggcttcatgcttaggagacaat

SEQ ID NO: 4156526 - DNA, 25 bp, Homo sapien
ggctccaggcagtctattaataggc

SEQ ID NO: 4156527 - DNA, 25 bp, Homo sapien
tcctaaggctacttgttttgagaga

SEQ ID NO: 4156528 - DNA, 25 bp, Homo sapien
tgcacctgctgcgattctctccaat

SEQ ID NO: 4156529 - DNA, 25 bp, Homo sapien
gattgttgtgcactttgtgatatac

SEQ ID NO: 4156530 - DNA, 25 bp, Homo sapien
ggtaacagcataaggaatttcaagt

SEQ ID NO: 4156531 - DNA, 25 bp, Homo sapien
gagtaaagtttaacgccagtagtgc

SEQ ID NO: 4156532 - DNA, 25 bp, Homo sapien
aactctctaggcgaaaggctcagcg

SEQ ID NO: 4156533 - DNA, 25 bp, Homo sapien
aggctcagcgctagcaatgatgtga

SEQ ID NO: 4156534 - DNA, 25 bp, Homo sapien
aaaggactgacaattcaggggaaca

SEQ ID NO: 4156535 - DNA, 25 bp, Homo sapien
ttccctccttcaaaggactgacaat

SEQ ID NO: 4156536 - DNA, 25 bp, Homo sapien
aggactgacaattcaggggaacaac

SEQ ID NO: 4156537 - DNA, 25 bp, Homo sapien
taattcctgtaactgagaataaaca

SEQ ID NO: 4156538 - DNA, 25 bp, Homo sapien
gaaggtgacaattgctcccggaatg

SEQ ID NO: 4156539 - DNA, 25 bp, Homo sapien
gtgacaattgctcccggaatgactg

SEQ ID NO: 4156540 - DNA, 25 bp, Homo sapien
attgctcccggaatgactggatttg

SEQ ID NO: 4156541 - DNA, 25 bp, Homo sapien
caattgctcccggaatgactggatt

SEQ ID NO: 4156542 - DNA, 25 bp, Homo sapien
tcttgacaggacatttctccatgga

SEQ ID NO: 4156543 - DNA, 25 bp, Homo sapien
ctccatggatttccgtatgtagttc

SEQ ID NO: 4156544 - DNA, 25 bp, Homo sapien
gaatggctgatagcaacgacaggat

SEQ ID NO: 4156545 - DNA, 25 bp, Homo sapien
caggatcatggtcagggtgttttca

SEQ ID NO: 4156546 - DNA, 25 bp, Homo sapien
acacagaccctgacttgtgcaggaa

SEQ ID NO: 4156547 - DNA, 25 bp, Homo sapien
cagtatacatgtgactgtgaacatc

SEQ ID NO: 4156548 - DNA, 25 bp, Homo sapien
aaaaagctctgagcagcatgaaaca

SEQ ID NO: 4156549 - DNA, 25 bp, Homo sapien
gccaaaaaagctctgagcagcatga

SEQ ID NO: 4156550 - DNA, 25 bp, Homo sapien
gcttctgcttccctagattatcctt

SEQ ID NO: 4156551 - DNA, 25 bp, Homo sapien
cagcttctgcttccctagattatcc

SEQ ID NO: 4156552 - DNA, 25 bp, Homo sapien
cgtttggcctttcagcttctgcttc

SEQ ID NO: 4156553 - DNA, 25 bp, Homo sapien
tctgcttccctagattatccttgct

SEQ ID NO: 4156554 - DNA, 25 bp, Homo sapien
tgttcttttacgttggcggtgcttg

SEQ ID NO: 4156555 - DNA, 25 bp, Homo sapien
ttaaccatgggatgtaaactgttct

SEQ ID NO: 4156556 - DNA, 25 bp, Homo sapien
aattaccagatgattaacactgtga

SEQ ID NO: 4156557 - DNA, 25 bp, Homo sapien
tttacgttggcggtgcttgaggcca

SEQ ID NO: 4156558 - DNA, 25 bp, Homo sapien
tttggtctcctggtctctcagtttt

SEQ ID NO: 4156559 - DNA, 25 bp, Homo sapien
ggtctctcagttttagaacttagaa

SEQ ID NO: 4156560 - DNA, 25 bp, Homo sapien
ggtctcctggtctctcagttttaga

SEQ ID NO: 4156561 - DNA, 25 bp, Homo sapien
cctggtctctcagttttagaactta

SEQ ID NO: 4156562 - DNA, 25 bp, Homo sapien
tatatgtactgccaaggcgaacact

SEQ ID NO: 4156563 - DNA, 25 bp, Homo sapien
agtatatgtactgccaaggcgaaca

SEQ ID NO: 4156564 - DNA, 25 bp, Homo sapien
tagtatatgtactgccaaggcgaac

SEQ ID NO: 4156565 - DNA, 25 bp, Homo sapien
ttagtatatgtactgccaaggcgaa

SEQ ID NO: 4156566 - DNA, 25 bp, Homo sapien
ttccaagagtcgtgggacttggcag

SEQ ID NO: 4156567 - DNA, 25 bp, Homo sapien
aaacttccaagagtcgtgggacttg

SEQ ID NO: 4156568 - DNA, 25 bp, Homo sapien
acttccaagagtcgtgggacttggc

SEQ ID NO: 4156569 - DNA, 25 bp, Homo sapien
ccaagagtcgtgggacttggcagtc

SEQ ID NO: 4156570 - DNA, 25 bp, Homo sapien
aaggtccaataaaggctctctttgc

SEQ ID NO: 4156571 - DNA, 25 bp, Homo sapien
tctccaaggtccaataaaggctctc

SEQ ID NO: 4156572 - DNA, 25 bp, Homo sapien
caaggtccaataaaggctctctttg

SEQ ID NO: 4156573 - DNA, 25 bp, Homo sapien
tccaaggtccaataaaggctctctt

SEQ ID NO: 4156574 - DNA, 25 bp, Homo sapien
tgatgcagtagaatgagcactggct

SEQ ID NO: 4156575 - DNA, 25 bp, Homo sapien
caattttctacagcctaagtggagc

SEQ ID NO: 4156576 - DNA, 25 bp, Homo sapien
ggtgggagtggtgctctttccaatt

SEQ ID NO: 4156577 - DNA, 25 bp, Homo sapien
tcttgccacactgaccctatggttt

SEQ ID NO: 4156578 - DNA, 25 bp, Homo sapien
ccaagaaaagtcgtgattatgcaaa

SEQ ID NO: 4156579 - DNA, 25 bp, Homo sapien
gcctgacctgcattttagtttacag

SEQ ID NO: 4156580 - DNA, 25 bp, Homo sapien
cctgacctgcattttagtttacagt

SEQ ID NO: 4156581 - DNA, 25 bp, Homo sapien
cattttagtttacagtactgataac

SEQ ID NO: 4156582 - DNA, 25 bp, Homo sapien
tagtttacagtactgataacacgat

SEQ ID NO: 4156583 - DNA, 25 bp, Homo sapien
tgatcagtttggaaacagtcttttt

SEQ ID NO: 4156584 - DNA, 25 bp, Homo sapien
gattgatcagtttggaaacagtctt

SEQ ID NO: 4156585 - DNA, 25 bp, Homo sapien
tttgattgatcagtttggaaacagt

SEQ ID NO: 4156586 - DNA, 25 bp, Homo sapien
tgattgatcagtttggaaacagtct

SEQ ID NO: 4156587 - DNA, 25 bp, Homo sapien
actttgaggcctatggtgaaaaagg

SEQ ID NO: 4156588 - DNA, 25 bp, Homo sapien
aaaactagacagaagtattctgaga

SEQ ID NO: 4156589 - DNA, 25 bp, Homo sapien
ctgagaaacttctttctaatgtgtg

SEQ ID NO: 4156590 - DNA, 25 bp, Homo sapien
cactttgaggcctatggtgaaaaag

SEQ ID NO: 4156591 - DNA, 25 bp, Homo sapien
ttgtggaatctgcaaatcgatattt

SEQ ID NO: 4156592 - DNA, 25 bp, Homo sapien
tctttttgtggaatctgcaaatcga

SEQ ID NO: 4156593 - DNA, 25 bp, Homo sapien
ggaatctgcaaatcgatatttggag

SEQ ID NO: 4156594 - DNA, 25 bp, Homo sapien
tttttgtggaatctgcaaatcgata

SEQ ID NO: 4156595 - DNA, 25 bp, Homo sapien
tatcatactgaatcgacaaacacca

SEQ ID NO: 4156596 - DNA, 25 bp, Homo sapien
atatcatactgaatcgacaaacacc

SEQ ID NO: 4156597 - DNA, 25 bp, Homo sapien
tcccagaagaaactctacaaaccag

SEQ ID NO: 4156598 - DNA, 25 bp, Homo sapien
ccagaagaaactctacaaaccagaa

SEQ ID NO: 4156599 - DNA, 25 bp, Homo sapien
gaaggaaatgctaaacatggaaggg

SEQ ID NO: 4156600 - DNA, 25 bp, Homo sapien
gactaacagcagatatcccagaaga

SEQ ID NO: 4156601 - DNA, 25 bp, Homo sapien
tctgcttccctagattatccttgcc

SEQ ID NO: 4156602 - DNA, 25 bp, Homo sapien
tcagcctctgcttccctagattatc

SEQ ID NO: 4156603 - DNA, 25 bp, Homo sapien
gcctctgcttccctagattatcctt

SEQ ID NO: 4156604 - DNA, 25 bp, Homo sapien
tccctagattatccttgcctttcat

SEQ ID NO: 4156605 - DNA, 25 bp, Homo sapien
gcgcttgaggccagtcctttgttat

SEQ ID NO: 4156606 - DNA, 25 bp, Homo sapien
tgaggccagtcctttgttatgaatc

SEQ ID NO: 4156607 - DNA, 25 bp, Homo sapien
cttggcagcgcttgaggccagtcct

SEQ ID NO: 4156608 - DNA, 25 bp, Homo sapien
tggcagcgcttgaggccagtccttt

SEQ ID NO: 4156609 - DNA, 25 bp, Homo sapien
agtttctgaaggaatcttcactgag

SEQ ID NO: 4156610 - DNA, 25 bp, Homo sapien
gagtttctgaaggaatcttcactga

SEQ ID NO: 4156611 - DNA, 25 bp, Homo sapien
ctgcagtgaagtcagggagtttctg

SEQ ID NO: 4156612 - DNA, 25 bp, Homo sapien
aagtcagggagtttctgaaggaatc

SEQ ID NO: 4156613 - DNA, 25 bp, Homo sapien
caacacgttgctggtagtgatggga

SEQ ID NO: 4156614 - DNA, 25 bp, Homo sapien
cagggaccttgagatctggatgaaa

SEQ ID NO: 4156615 - DNA, 25 bp, Homo sapien
taaattatggtaagaacctcaggga

SEQ ID NO: 4156616 - DNA, 25 bp, Homo sapien
tctggatgaaatattggcaacacgt

SEQ ID NO: 4156617 - DNA, 25 bp, Homo sapien
atctttgatgatccacaatttctgc

SEQ ID NO: 4156618 - DNA, 25 bp, Homo sapien
agtatatgcactgccaaggcaaaca

SEQ ID NO: 4156619 - DNA, 25 bp, Homo sapien
tttagtatatgcactgccaaggcaa

SEQ ID NO: 4156620 - DNA, 25 bp, Homo sapien
tagtatatgcactgccaaggcaaac

SEQ ID NO: 4156621 - DNA, 25 bp, Homo sapien
tatatgcactgccaaggcaaacact

SEQ ID NO: 4156622 - DNA, 25 bp, Homo sapien
gaaagtggtaggacttggcagtcat

SEQ ID NO: 4156623 - DNA, 25 bp, Homo sapien
cgaaagtggtaggacttggcagtca

SEQ ID NO: 4156624 - DNA, 25 bp, Homo sapien
ccgaaagtggtaggacttggcagtc

SEQ ID NO: 4156625 - DNA, 25 bp, Homo sapien
gtcaaataataaggctctctttgca

SEQ ID NO: 4156626 - DNA, 25 bp, Homo sapien
ggtcaaataataaggctctctttgc

SEQ ID NO: 4156627 - DNA, 25 bp, Homo sapien
cttagaaacagagttgttcattgac

SEQ ID NO: 4156628 - DNA, 25 bp, Homo sapien
ttagaaacagagttgttcattgaca

SEQ ID NO: 4156629 - DNA, 25 bp, Homo sapien
tagaaacagagttgttcattgacac

SEQ ID NO: 4156630 - DNA, 25 bp, Homo sapien
agaaacagagttgttcattgacaca

SEQ ID NO: 4156631 - DNA, 25 bp, Homo sapien
gctgacgcagtagaccaagcactgg

SEQ ID NO: 4156632 - DNA, 25 bp, Homo sapien
cagctgacgcagtagaccaagcact

SEQ ID NO: 4156633 - DNA, 25 bp, Homo sapien
agcagctgacgcagtagaccaagca

SEQ ID NO: 4156634 - DNA, 25 bp, Homo sapien
gaagcagctgacgcagtagaccaag

SEQ ID NO: 4156635 - DNA, 25 bp, Homo sapien
tactcactttgaagtgtgccctaca

SEQ ID NO: 4156636 - DNA, 25 bp, Homo sapien
tatctcctgagatgtagcatcgcct

SEQ ID NO: 4156637 - DNA, 25 bp, Homo sapien
tcaagaggacgcttcttgtatctcc

SEQ ID NO: 4156638 - DNA, 25 bp, Homo sapien
cagtgcactgctgagtatactcact

SEQ ID NO: 4156639 - DNA, 25 bp, Homo sapien
tacaaaagacagaattcagggatgg

SEQ ID NO: 4156640 - DNA, 25 bp, Homo sapien
tactgtgatgcatttcaagtggcag

SEQ ID NO: 4156641 - DNA, 25 bp, Homo sapien
caaatgtgggagttcatagttttcc

SEQ ID NO: 4156642 - DNA, 25 bp, Homo sapien
taaggaggtaagattgccacgtgcc

SEQ ID NO: 4156643 - DNA, 25 bp, Homo sapien
gtgtggcttcacatttaaaccagta

SEQ ID NO: 4156644 - DNA, 25 bp, Homo sapien
catcatgaactagtgtctaaatacc

SEQ ID NO: 4156645 - DNA, 25 bp, Homo sapien
acaaaagtgcgtgtaattaaatact

SEQ ID NO: 4156646 - DNA, 25 bp, Homo sapien
gaattgaatggagggtcctaatgcc

SEQ ID NO: 4156647 - DNA, 25 bp, Homo sapien
tgaactatcataaagctttgcaggg

SEQ ID NO: 4156648 - DNA, 25 bp, Homo sapien
gttcagtgtggtttgcataaatctc

SEQ ID NO: 4156649 - DNA, 25 bp, Homo sapien
taagatggtctatgaagtgataaca

SEQ ID NO: 4156650 - DNA, 25 bp, Homo sapien
catctttagttataccatctggaac

SEQ ID NO: 4156651 - DNA, 25 bp, Homo sapien
gtctgggacctctccttctagctcg

SEQ ID NO: 4156652 - DNA, 25 bp, Homo sapien
tctcttcttatgagaccaatgaggg

SEQ ID NO: 4156653 - DNA, 25 bp, Homo sapien
caagagagtgaccaacctgtgttgg

SEQ ID NO: 4156654 - DNA, 25 bp, Homo sapien
cagaatggtgatcctattaaactcc

SEQ ID NO: 4156655 - DNA, 25 bp, Homo sapien
caacttaatgatactaatattaaca

SEQ ID NO: 4156656 - DNA, 25 bp, Homo sapien
gtgtatcaacttaatgatactaata

SEQ ID NO: 4156657 - DNA, 25 bp, Homo sapien
tgccagttggaggttgtgtatcaac

SEQ ID NO: 4156658 - DNA, 25 bp, Homo sapien
gtcaaatttgccagttggaggttgt

SEQ ID NO: 4156659 - DNA, 25 bp, Homo sapien
tccgcgcgcttcgaaatgagggtcc

SEQ ID NO: 4156660 - DNA, 25 bp, Homo sapien
gtaatcaatagcgtctcttctccct

SEQ ID NO: 4156661 - DNA, 25 bp, Homo sapien
gcttcccgtctcagaggcaaactgt

SEQ ID NO: 4156662 - DNA, 25 bp, Homo sapien
ctgttccgccgaggctcgctgggtc

SEQ ID NO: 4156663 - DNA, 25 bp, Homo sapien
ttgttgtatatgtgctgatgaagtg

SEQ ID NO: 4156664 - DNA, 25 bp, Homo sapien
attatggaccgcttcatgaatttgc

SEQ ID NO: 4156665 - DNA, 25 bp, Homo sapien
tccaattgttgtatatgtgctgatg

SEQ ID NO: 4156666 - DNA, 25 bp, Homo sapien
caattgttgtatatgtgctgatgaa

SEQ ID NO: 4156667 - DNA, 25 bp, Homo sapien
gacgactgccctcttagccaaggaa

SEQ ID NO: 4156668 - DNA, 25 bp, Homo sapien
gaccaaagacgcagatacaccgtag

SEQ ID NO: 4156669 - DNA, 25 bp, Homo sapien
ctaagccttgctaaccgcgtgggtc

SEQ ID NO: 4156670 - DNA, 25 bp, Homo sapien
tacaccgtagccgagttagcgggac

SEQ ID NO: 4156671 - DNA, 25 bp, Homo sapien
acttcccatccgagcccggagcgga

SEQ ID NO: 4156672 - DNA, 25 bp, Homo sapien
tccgagcccggagcggacaccggca

SEQ ID NO: 4156673 - DNA, 25 bp, Homo sapien
ccggagcggacaccggcaccccgct

SEQ ID NO: 4156674 - DNA, 25 bp, Homo sapien
gggcctccggcactccgagacgccc

SEQ ID NO: 4156675 - DNA, 25 bp, Homo sapien
ctcccgccaccgcttgaaccagccg

SEQ ID NO: 4156676 - DNA, 25 bp, Homo sapien
tgaaccagccgcagcaactggccat

SEQ ID NO: 4156677 - DNA, 25 bp, Homo sapien
gccgcagcaactggccatcagactg

SEQ ID NO: 4156678 - DNA, 25 bp, Homo sapien
accgcttgaaccagccgcagcaact

SEQ ID NO: 4156679 - DNA, 25 bp, Homo sapien
gaatgaaagcatcccttgcggcctg

SEQ ID NO: 4156680 - DNA, 25 bp, Homo sapien
caacggtaagcattgtcaatcgcaa

SEQ ID NO: 4156681 - DNA, 25 bp, Homo sapien
gaaagtcgaccagacaacaaggcta

SEQ ID NO: 4156682 - DNA, 25 bp, Homo sapien
ttgcggcctgggatagactcgtcca

SEQ ID NO: 4156683 - DNA, 25 bp, Homo sapien
cccttggcccaattccagactagaa

SEQ ID NO: 4156684 - DNA, 25 bp, Homo sapien
cagggctccaaagatcggccagctt

SEQ ID NO: 4156685 - DNA, 25 bp, Homo sapien
taaaggatagttcattctcatggca

SEQ ID NO: 4156686 - DNA, 25 bp, Homo sapien
caagatctctttataggttaggcct

SEQ ID NO: 4156687 - DNA, 25 bp, Homo sapien
taccagcattatcaagtcccaccat

SEQ ID NO: 4156688 - DNA, 25 bp, Homo sapien
ttatcaagtcccaccatcaaaagag

SEQ ID NO: 4156689 - DNA, 25 bp, Homo sapien
tccctttgctgttgcggttttacca

SEQ ID NO: 4156690 - DNA, 25 bp, Homo sapien
gctgttgcggttttaccagcattat

SEQ ID NO: 4156691 - DNA, 25 bp, Homo sapien
atagcttgaggctaggcattccaga

SEQ ID NO: 4156692 - DNA, 25 bp, Homo sapien
agaagaatagcttgaggctaggcat

SEQ ID NO: 4156693 - DNA, 25 bp, Homo sapien
aatagcttgaggctaggcattccag

SEQ ID NO: 4156694 - DNA, 25 bp, Homo sapien
agaatagcttgaggctaggcattcc

SEQ ID NO: 4156695 - DNA, 25 bp, Homo sapien
cctttagatcagcagcaccagggac

SEQ ID NO: 4156696 - DNA, 25 bp, Homo sapien
gggaccagttttgcagaagacaatt

SEQ ID NO: 4156697 - DNA, 25 bp, Homo sapien
accagggaccagttttgcagaagac

SEQ ID NO: 4156698 - DNA, 25 bp, Homo sapien
ccagttttgcagaagacaatttttc

SEQ ID NO: 4156699 - DNA, 25 bp, Homo sapien
tattaccccataggattcagcatag

SEQ ID NO: 4156700 - DNA, 25 bp, Homo sapien
cagtaggagctacatcttcagggta

SEQ ID NO: 4156701 - DNA, 25 bp, Homo sapien
taggctttcccgatatcctaggatg

SEQ ID NO: 4156702 - DNA, 25 bp, Homo sapien
tagtaattcttccagattccccgaa

SEQ ID NO: 4156703 - DNA, 25 bp, Homo sapien
tgagggctggtagtgcaaaagtcct

SEQ ID NO: 4156704 - DNA, 25 bp, Homo sapien
taaaaaatgttcacccacatggacg

SEQ ID NO: 4156705 - DNA, 25 bp, Homo sapien
tactttcagtttgctatgcctcacg

SEQ ID NO: 4156706 - DNA, 25 bp, Homo sapien
gacaagacggcaagggcaaatattt

SEQ ID NO: 4156707 - DNA, 25 bp, Homo sapien
catacatacgagttagtgttctttc

SEQ ID NO: 4156708 - DNA, 25 bp, Homo sapien
ccaagttgattatcatacatacgag

SEQ ID NO: 4156709 - DNA, 25 bp, Homo sapien
tcccagaacaagttgtccaagttga

SEQ ID NO: 4156710 - DNA, 25 bp, Homo sapien
caagttgtccaagttgattatcata

SEQ ID NO: 4156711 - DNA, 25 bp, Homo sapien
tatttcaaggaccataatttgggca

SEQ ID NO: 4156712 - DNA, 25 bp, Homo sapien
aaatatttatatcggctggacgtgg

SEQ ID NO: 4156713 - DNA, 25 bp, Homo sapien
caaggtacaatcagaaaggaactat

SEQ ID NO: 4156714 - DNA, 25 bp, Homo sapien
aaggaactatttgctatctctctgc

SEQ ID NO: 4156715 - DNA, 25 bp, Homo sapien
gccttgctcaaagtttgacagactc

SEQ ID NO: 4156716 - DNA, 25 bp, Homo sapien
gaaaaccaatatattctacagaaaa

SEQ ID NO: 4156717 - DNA, 25 bp, Homo sapien
taccactatcacacctaacaaaatt

SEQ ID NO: 4156718 - DNA, 25 bp, Homo sapien
caggatttaccacaatttaccacta

SEQ ID NO: 4156719 - DNA, 25 bp, Homo sapien
taaatgtactgattacagaacacac

SEQ ID NO: 4156720 - DNA, 25 bp, Homo sapien
aaatgtactgattacagaacacact

SEQ ID NO: 4156721 - DNA, 25 bp, Homo sapien
aatgtactgattacagaacacacta

SEQ ID NO: 4156722 - DNA, 25 bp, Homo sapien
gctcattgaccaatttttccagaga

SEQ ID NO: 4156723 - DNA, 25 bp, Homo sapien
ttccagagatagacattcaatgaca

SEQ ID NO: 4156724 - DNA, 25 bp, Homo sapien
tctgacacaggcacttgtgctcatt

SEQ ID NO: 4156725 - DNA, 25 bp, Homo sapien
gacatcagcttctcctaaagctcct

SEQ ID NO: 4156726 - DNA, 25 bp, Homo sapien
aaagtctcttgcaataacatgtagc

SEQ ID NO: 4156727 - DNA, 25 bp, Homo sapien
tcttgttcctcaagagcacgctgct

SEQ ID NO: 4156728 - DNA, 25 bp, Homo sapien
cataccccgagattgctgaacatgg

SEQ ID NO: 4156729 - DNA, 25 bp, Homo sapien
catgtagcagccaataaaggccttt

SEQ ID NO: 4156730 - DNA, 25 bp, Homo sapien
tattggctggaaaggattcgttggt

SEQ ID NO: 4156731 - DNA, 25 bp, Homo sapien
gaccactggttccatcgagttcagc

SEQ ID NO: 4156732 - DNA, 25 bp, Homo sapien
tgggtccaactcagccagaccactg

SEQ ID NO: 4156733 - DNA, 25 bp, Homo sapien
ctcaatgattacagatgctattggc

SEQ ID NO: 4156734 - DNA, 25 bp, Homo sapien
tctctctttcaagttttccttcatt

SEQ ID NO: 4156735 - DNA, 25 bp, Homo sapien
tttctctctttcaagttttccttca

SEQ ID NO: 4156736 - DNA, 25 bp, Homo sapien
ttctctctttcaagttttccttcat

SEQ ID NO: 4156737 - DNA, 25 bp, Homo sapien
cattgtgattaacctggccttgtgt

SEQ ID NO: 4156738 - DNA, 25 bp, Homo sapien
tctttaactgctgtgttaatgcctc

SEQ ID NO: 4156739 - DNA, 25 bp, Homo sapien
ctgattccaatgatggccggtctgt

SEQ ID NO: 4156740 - DNA, 25 bp, Homo sapien
taattttctactagtccaaattcat

SEQ ID NO: 4156741 - DNA, 25 bp, Homo sapien
gtacttcagactagggagtggtgac

SEQ ID NO: 4156742 - DNA, 25 bp, Homo sapien
ataggataatagtggagagaaggtc

SEQ ID NO: 4156743 - DNA, 25 bp, Homo sapien
tacttcagactagggagtggtgacg

SEQ ID NO: 4156744 - DNA, 25 bp, Homo sapien
tacacagacacagtaaccatctgat

SEQ ID NO: 4156745 - DNA, 25 bp, Homo sapien
tgacgttgagttcagaaagcaagac

SEQ ID NO: 4156746 - DNA, 25 bp, Homo sapien
tagataagcaaagtacggtacatgg

SEQ ID NO: 4156747 - DNA, 25 bp, Homo sapien
gatatgatggactacctcagagcaa

SEQ ID NO: 4156748 - DNA, 25 bp, Homo sapien
tgaatgcccaccaacaagtgactag

SEQ ID NO: 4156749 - DNA, 25 bp, Homo sapien
aaacatcttgactatttaactttgg

SEQ ID NO: 4156750 - DNA, 25 bp, Homo sapien
tctgggaaaagaagctattcattat

SEQ ID NO: 4156751 - DNA, 25 bp, Homo sapien
tacaaggctatgcatggcagctcac

SEQ ID NO: 4156752 - DNA, 25 bp, Homo sapien
tacaataaccaaatgtgtacttgca

SEQ ID NO: 4156753 - DNA, 25 bp, Homo sapien
acatgaaacttcatgtctttatgaa

SEQ ID NO: 4156754 - DNA, 25 bp, Homo sapien
tataaacatgaaacttcatgtcttt

SEQ ID NO: 4156755 - DNA, 25 bp, Homo sapien
acttcatgtctttatgaaaaagtgc

SEQ ID NO: 4156756 - DNA, 25 bp, Homo sapien
aacttcatgtctttatgaaaaagtg

SEQ ID NO: 4156757 - DNA, 25 bp, Homo sapien
ggcgttggactctcaggagcacagt

SEQ ID NO: 4156758 - DNA, 25 bp, Homo sapien
gggtggcgttggactctcaggagca

SEQ ID NO: 4156759 - DNA, 25 bp, Homo sapien
tgggggtggcgttggactctcagga

SEQ ID NO: 4156760 - DNA, 25 bp, Homo sapien
gtggcgttggactctcaggagcaca

SEQ ID NO: 4156761 - DNA, 25 bp, Homo sapien
tcagtatcagtatcaatttactcac

SEQ ID NO: 4156762 - DNA, 25 bp, Homo sapien
ttcagtatcagtatcaatttactca

SEQ ID NO: 4156763 - DNA, 25 bp, Homo sapien
ttcaccaagaggctcaagttttgga

SEQ ID NO: 4156764 - DNA, 25 bp, Homo sapien
cattatgatgtgtttcaccaagagg

SEQ ID NO: 4156765 - DNA, 25 bp, Homo sapien
agttttggaagtctagtgactttag

SEQ ID NO: 4156766 - DNA, 25 bp, Homo sapien
tgtgtttcaccaagaggctcaagtt

SEQ ID NO: 4156767 - DNA, 25 bp, Homo sapien
ggcaccaacattccatcctgttgag

SEQ ID NO: 4156768 - DNA, 25 bp, Homo sapien
aatgcacaaaacagttatggtacat

SEQ ID NO: 4156769 - DNA, 25 bp, Homo sapien
tagactttagacattttagacattt

SEQ ID NO: 4156770 - DNA, 25 bp, Homo sapien
tggtacatcaagatttttgacacag

SEQ ID NO: 4156771 - DNA, 25 bp, Homo sapien
atcatgagcatcactgttaggtcgc

SEQ ID NO: 4156772 - DNA, 25 bp, Homo sapien
catgagcatcactgttaggtcgctg

SEQ ID NO: 4156773 - DNA, 25 bp, Homo sapien
gcatcactgttaggtcgctgtggca

SEQ ID NO: 4156774 - DNA, 25 bp, Homo sapien
tgagcatcactgttaggtcgctgtg

SEQ ID NO: 4156775 - DNA, 25 bp, Homo sapien
cttgctgatattaagagaactcctc

SEQ ID NO: 4156776 - DNA, 25 bp, Homo sapien
tattaagagaactcctccatacgtc

SEQ ID NO: 4156777 - DNA, 25 bp, Homo sapien
gctgatattaagagaactcctccat

SEQ ID NO: 4156778 - DNA, 25 bp, Homo sapien
gatattaagagaactcctccatacg

SEQ ID NO: 4156779 - DNA, 25 bp, Homo sapien
tgccccagtcatcaatttacaagat

SEQ ID NO: 4156780 - DNA, 25 bp, Homo sapien
tccttgagtattaatcttctcacta

SEQ ID NO: 4156781 - DNA, 25 bp, Homo sapien
gtaattatcaagtcaggtccttgag

SEQ ID NO: 4156782 - DNA, 25 bp, Homo sapien
aattattatggttatcttgccccag

SEQ ID NO: 4156783 - DNA, 25 bp, Homo sapien
gaatcacctaaaagagtcactgcag

SEQ ID NO: 4156784 - DNA, 25 bp, Homo sapien
tgctgactagagtacaggtgacctg

SEQ ID NO: 4156785 - DNA, 25 bp, Homo sapien
tagggagcaccttgatctctgaaag

SEQ ID NO: 4156786 - DNA, 25 bp, Homo sapien
cactcagtgtggttgctaagtccca

SEQ ID NO: 4156787 - DNA, 25 bp, Homo sapien
tcaaatcctctaacatcatatggtg

SEQ ID NO: 4156788 - DNA, 25 bp, Homo sapien
tatcatgtatactacgtaatatgca

SEQ ID NO: 4156789 - DNA, 25 bp, Homo sapien
tgttgaccaacagctttaacgcaag

SEQ ID NO: 4156790 - DNA, 25 bp, Homo sapien
catatggtgaaatgctatttgtagc

SEQ ID NO: 4156791 - DNA, 25 bp, Homo sapien
tttgttctttggatcagttggaata

SEQ ID NO: 4156792 - DNA, 25 bp, Homo sapien
taacctatgccatgcttaattgaaa

SEQ ID NO: 4156793 - DNA, 25 bp, Homo sapien
tgcaggtgaactgctccacgatgtt

SEQ ID NO: 4156794 - DNA, 25 bp, Homo sapien
tagcagaatctcagttgcaaagcat

SEQ ID NO: 4156795 - DNA, 25 bp, Homo sapien
cctctggaaagaacaagtcgcagga

SEQ ID NO: 4156796 - DNA, 25 bp, Homo sapien
gagttagaagtcattgctccagaga

SEQ ID NO: 4156797 - DNA, 25 bp, Homo sapien
gaatggaacattgctagaagagtta

SEQ ID NO: 4156798 - DNA, 25 bp, Homo sapien
tttcattgtaagacttttggagcca

SEQ ID NO: 4156799 - DNA, 25 bp, Homo sapien
gatactgatttgctcgcgctataga

SEQ ID NO: 4156800 - DNA, 25 bp, Homo sapien
gctatagaattcttgtcgaagaggc

SEQ ID NO: 4156801 - DNA, 25 bp, Homo sapien
tcttgtcgaagaggcttagctcccg

SEQ ID NO: 4156802 - DNA, 25 bp, Homo sapien
cctcttcaatttctcgcgagatact

SEQ ID NO: 4156803 - DNA, 25 bp, Homo sapien
aaacagtctgacttccgggattcgc

SEQ ID NO: 4156804 - DNA, 25 bp, Homo sapien
gcgaatcagtatcaaaaagcctcca

SEQ ID NO: 4156805 - DNA, 25 bp, Homo sapien
caaacaacaggtgtacgcgaatcag

SEQ ID NO: 4156806 - DNA, 25 bp, Homo sapien
gggattcgcgggcatccactttcat

SEQ ID NO: 4156807 - DNA, 25 bp, Homo sapien
ccagaagcgtctcattcagatagag

SEQ ID NO: 4156808 - DNA, 25 bp, Homo sapien
attcagatagaggtacccagccggg

SEQ ID NO: 4156809 - DNA, 25 bp, Homo sapien
cgtctcattcagatagaggtaccca

SEQ ID NO: 4156810 - DNA, 25 bp, Homo sapien
gaagcgtctcattcagatagaggta

SEQ ID NO: 4156811 - DNA, 25 bp, Homo sapien
tccagctggctcatgctttgcaggg

SEQ ID NO: 4156812 - DNA, 25 bp, Homo sapien
gactggaaaacatatcaaggacgtg

SEQ ID NO: 4156813 - DNA, 25 bp, Homo sapien
gcgagaggatcatttcccagttcaa

SEQ ID NO: 4156814 - DNA, 25 bp, Homo sapien
ctttgcagggacgaggcgagaggat

SEQ ID NO: 4156815 - DNA, 25 bp, Homo sapien
ccttacatgtaccaaaactgtacat

SEQ ID NO: 4156816 - DNA, 25 bp, Homo sapien
tccaaatgtgaagcaaaggttaaaa

SEQ ID NO: 4156817 - DNA, 25 bp, Homo sapien
tgaaatggaagcaataccttacatg

SEQ ID NO: 4156818 - DNA, 25 bp, Homo sapien
tttactgaacgtcaacattagcaag

SEQ ID NO: 4156819 - DNA, 25 bp, Homo sapien
gttttgcaagcttcccctctgattt

SEQ ID NO: 4156820 - DNA, 25 bp, Homo sapien
caaaatgatccaacacaactttgca

SEQ ID NO: 4156821 - DNA, 25 bp, Homo sapien
ctgttttgcaagcttcccctctgat

SEQ ID NO: 4156822 - DNA, 25 bp, Homo sapien
gtattccaggcatctccgagttctt

SEQ ID NO: 4156823 - DNA, 25 bp, Homo sapien
catctgttccataagtctctgtttg

SEQ ID NO: 4156824 - DNA, 25 bp, Homo sapien
tctctgtttgggtcagttgctgatc

SEQ ID NO: 4156825 - DNA, 25 bp, Homo sapien
caaaccaagccactcagttgacgct

SEQ ID NO: 4156826 - DNA, 25 bp, Homo sapien
aagaccatctttacagggcatacag

SEQ ID NO: 4156827 - DNA, 25 bp, Homo sapien
tatccaatatgttaaatcttgaagg

SEQ ID NO: 4156828 - DNA, 25 bp, Homo sapien
aaaggttaaatcctgcatgtttcct

SEQ ID NO: 4156829 - DNA, 25 bp, Homo sapien
ttgcagtcaatttttccaatcctga

SEQ ID NO: 4156830 - DNA, 25 bp, Homo sapien
tattaattcaggaacaacattagct

SEQ ID NO: 4156831 - DNA, 25 bp, Homo sapien
gacaaatctctattcgttcttcttt

SEQ ID NO: 4156832 - DNA, 25 bp, Homo sapien
caattagttaacatcagacaggaca

SEQ ID NO: 4156833 - DNA, 25 bp, Homo sapien
tatttgtgtatgtagacaggtagag

SEQ ID NO: 4156834 - DNA, 25 bp, Homo sapien
ggagtagaacactttcaattagtta

SEQ ID NO: 4156835 - DNA, 25 bp, Homo sapien
aatgatcggaaacacagttatacag

SEQ ID NO: 4156836 - DNA, 25 bp, Homo sapien
gcttggcttgcatcatgtgcctacc

SEQ ID NO: 4156837 - DNA, 25 bp, Homo sapien
tatacagaaggagcggcttggcttg

SEQ ID NO: 4156838 - DNA, 25 bp, Homo sapien
aaaatctatccagtgttgagtcatg

SEQ ID NO: 4156839 - DNA, 25 bp, Homo sapien
ctggagttgcctatgtgaggaatgg

SEQ ID NO: 4156840 - DNA, 25 bp, Homo sapien
gattgaaatgtaacacctgcgactg

SEQ ID NO: 4156841 - DNA, 25 bp, Homo sapien
cctatgtgaggaatgggtggattga

SEQ ID NO: 4156842 - DNA, 25 bp, Homo sapien
acacctgcgactggaagcgtgccat

SEQ ID NO: 4156843 - DNA, 25 bp, Homo sapien
tggacaagcacactgcagcagagct

SEQ ID NO: 4156844 - DNA, 25 bp, Homo sapien
tcggcccggagttctgctaaggtaa

SEQ ID NO: 4156845 - DNA, 25 bp, Homo sapien
aattgaatcggttaagcaggacagc

SEQ ID NO: 4156846 - DNA, 25 bp, Homo sapien
tctttctgaagggattcggcccgga

SEQ ID NO: 4156847 - DNA, 25 bp, Homo sapien
gactttttggattgtccaatactat

SEQ ID NO: 4156848 - DNA, 25 bp, Homo sapien
ggctagtctcaactgaaatgtgatg

SEQ ID NO: 4156849 - DNA, 25 bp, Homo sapien
agtctcaactgaaatgtgatgtaac

SEQ ID NO: 4156850 - DNA, 25 bp, Homo sapien
tactataccctcttctcacatgtgg

SEQ ID NO: 4156851 - DNA, 25 bp, Homo sapien
gacttgttatggactaggccagtgc

SEQ ID NO: 4156852 - DNA, 25 bp, Homo sapien
ggccagtgctatttgctgcagacac

SEQ ID NO: 4156853 - DNA, 25 bp, Homo sapien
ttgttatggactaggccagtgctat

SEQ ID NO: 4156854 - DNA, 25 bp, Homo sapien
aggccagtgctatttgctgcagaca

SEQ ID NO: 4156855 - DNA, 25 bp, Homo sapien
accaatttcaaatgtttttatctgt

SEQ ID NO: 4156856 - DNA, 25 bp, Homo sapien
taccaatttcaaatgtttttatctg

SEQ ID NO: 4156857 - DNA, 25 bp, Homo sapien
tagccaatgatggttaggcactccc

SEQ ID NO: 4156858 - DNA, 25 bp, Homo sapien
tagtgatgcataagctgggtccaca

SEQ ID NO: 4156859 - DNA, 25 bp, Homo sapien
cgaagcatactttctgaggaggcaa

SEQ ID NO: 4156860 - DNA, 25 bp, Homo sapien
gaggaacacggcatcaaagttgaag

SEQ ID NO: 4156861 - DNA, 25 bp, Homo sapien
tagccagacctcaggacaatgtttc

SEQ ID NO: 4156862 - DNA, 25 bp, Homo sapien
taccaaacttgatggactactccat

SEQ ID NO: 4156863 - DNA, 25 bp, Homo sapien
taaatcaaggtccataatagccaga

SEQ ID NO: 4156864 - DNA, 25 bp, Homo sapien
ccagtatactctgtgctctaccaaa

SEQ ID NO: 4156865 - DNA, 25 bp, Homo sapien
attgcggcagacgcaggaactgtcc

SEQ ID NO: 4156866 - DNA, 25 bp, Homo sapien
taaaagcttcctgtcccacaggaac

SEQ ID NO: 4156867 - DNA, 25 bp, Homo sapien
tgcggcagacgcaggaactgtcctg

SEQ ID NO: 4156868 - DNA, 25 bp, Homo sapien
cggcagacgcaggaactgtcctggc

SEQ ID NO: 4156869 - DNA, 25 bp, Homo sapien
tctgccatccaattcagacacttta

SEQ ID NO: 4156870 - DNA, 25 bp, Homo sapien
acatttatcaaaggctgtgggatga

SEQ ID NO: 4156871 - DNA, 25 bp, Homo sapien
cctcaatctcagactatcatattca

SEQ ID NO: 4156872 - DNA, 25 bp, Homo sapien
aagattccaacgtctgccttagcca

SEQ ID NO: 4156873 - DNA, 25 bp, Homo sapien
tgggcgtccatcagtttgtcacaat

SEQ ID NO: 4156874 - DNA, 25 bp, Homo sapien
tcaaaattttccagggtactgagaa

SEQ ID NO: 4156875 - DNA, 25 bp, Homo sapien
taatagtggtattactgggcgtcca

SEQ ID NO: 4156876 - DNA, 25 bp, Homo sapien
gcttcctttgaaccatgctgaccat

SEQ ID NO: 4156877 - DNA, 25 bp, Homo sapien
cagctctatctgtagaagaggcaaa

SEQ ID NO: 4156878 - DNA, 25 bp, Homo sapien
tttgaacacggagcatccactaaca

SEQ ID NO: 4156879 - DNA, 25 bp, Homo sapien
cctttgacttatcctacaggatgcc

SEQ ID NO: 4156880 - DNA, 25 bp, Homo sapien
aaccagcttcgatcatttgaacacg

SEQ ID NO: 4156881 - DNA, 25 bp, Homo sapien
ttattgttgtgtatcagtcagaagt

SEQ ID NO: 4156882 - DNA, 25 bp, Homo sapien
attgttgtgtatcagtcagaagttg

SEQ ID NO: 4156883 - DNA, 25 bp, Homo sapien
ttgttgtgtatcagtcagaagttgg

SEQ ID NO: 4156884 - DNA, 25 bp, Homo sapien
tattgttgtgtatcagtcagaagtt

SEQ ID NO: 4156885 - DNA, 25 bp, Homo sapien
gctggtgtagcaggaataattaaga

SEQ ID NO: 4156886 - DNA, 25 bp, Homo sapien
tgtaaggaataacaatggcaaggct

SEQ ID NO: 4156887 - DNA, 25 bp, Homo sapien
taatattctcagaaagcctgtttgc

SEQ ID NO: 4156888 - DNA, 25 bp, Homo sapien
tacaatgttaataagccatcacaag

SEQ ID NO: 4156889 - DNA, 25 bp, Homo sapien
actggtatagcctttttggagaaca

SEQ ID NO: 4156890 - DNA, 25 bp, Homo sapien
tggagaacaattcaacacagctatt

SEQ ID NO: 4156891 - DNA, 25 bp, Homo sapien
aatagatcctcttgaatgtttcacg

SEQ ID NO: 4156892 - DNA, 25 bp, Homo sapien
gaaaaatgctagcagacctgtcgga

SEQ ID NO: 4156893 - DNA, 25 bp, Homo sapien
caagacttgtagatgtcaggactcc

SEQ ID NO: 4156894 - DNA, 25 bp, Homo sapien
gaggagtggccactacagaagagcc

SEQ ID NO: 4156895 - DNA, 25 bp, Homo sapien
ctgggacataagaaggtgcctatct

SEQ ID NO: 4156896 - DNA, 25 bp, Homo sapien
taatcatatagccaagggactagga

SEQ ID NO: 4156897 - DNA, 25 bp, Homo sapien
cagcttcagacagatcctacaggag

SEQ ID NO: 4156898 - DNA, 25 bp, Homo sapien
cctacaggaggttaccagaagaagg

SEQ ID NO: 4156899 - DNA, 25 bp, Homo sapien
ctatgatggcttcccaaggttgtcc

SEQ ID NO: 4156900 - DNA, 25 bp, Homo sapien
gtaattagtagatggccagactcca

SEQ ID NO: 4156901 - DNA, 25 bp, Homo sapien
tagccttcatagctgtataagccag

SEQ ID NO: 4156902 - DNA, 25 bp, Homo sapien
ccttcatagctgtataagccagttc

SEQ ID NO: 4156903 - DNA, 25 bp, Homo sapien
gggacttagccttcatagctgtata

SEQ ID NO: 4156904 - DNA, 25 bp, Homo sapien
gcaaatttgggacttagccttcata

SEQ ID NO: 4156905 - DNA, 25 bp, Homo sapien
cctttgcacttgacctgcgatgttg

SEQ ID NO: 4156906 - DNA, 25 bp, Homo sapien
tgcacttgacctgcgatgttgactc

SEQ ID NO: 4156907 - DNA, 25 bp, Homo sapien
cacttgacctgcgatgttgactctt

SEQ ID NO: 4156908 - DNA, 25 bp, Homo sapien
cttgacctgcgatgttgactcttcc

SEQ ID NO: 4156909 - DNA, 25 bp, Homo sapien
cttctgatgtggcttcctggaagct

SEQ ID NO: 4156910 - DNA, 25 bp, Homo sapien
ctgattctgccattaatcctcaact

SEQ ID NO: 4156911 - DNA, 25 bp, Homo sapien
tcctcaacttcatgaaactttcttc

SEQ ID NO: 4156912 - DNA, 25 bp, Homo sapien
tcatgaaactttcttctgatgtggc

SEQ ID NO: 4156913 - DNA, 25 bp, Homo sapien
aatgttgccaatgttggctgattct

SEQ ID NO: 4156914 - DNA, 25 bp, Homo sapien
ttacaaacaatatgttcctggctta

SEQ ID NO: 4156915 - DNA, 25 bp, Homo sapien
taaagctgtacaaaagtacatagaa

SEQ ID NO: 4156916 - DNA, 25 bp, Homo sapien
caatatgttcctggcttaatgcaaa

SEQ ID NO: 4156917 - DNA, 25 bp, Homo sapien
tatctggaatcactaagagcccaca

SEQ ID NO: 4156918 - DNA, 25 bp, Homo sapien
tgtccataggcatgatgttaccgtg

SEQ ID NO: 4156919 - DNA, 25 bp, Homo sapien
gtatacaagtatccctccaggacgt

SEQ ID NO: 4156920 - DNA, 25 bp, Homo sapien
aatgtgaagtcgtgggagcaagtcc

SEQ ID NO: 4156921 - DNA, 25 bp, Homo sapien
cattttcctgtgctccatgatttct

SEQ ID NO: 4156922 - DNA, 25 bp, Homo sapien
ttttcctgtgctccatgatttcttc

SEQ ID NO: 4156923 - DNA, 25 bp, Homo sapien
gctccatgatttcttcaatttggct

SEQ ID NO: 4156924 - DNA, 25 bp, Homo sapien
catgatttcttcaatttggctacat

SEQ ID NO: 4156925 - DNA, 25 bp, Homo sapien
ttgccagaactagaaatagtgctgc

SEQ ID NO: 4156926 - DNA, 25 bp, Homo sapien
gttagtctcagaataccaatcagtt

SEQ ID NO: 4156927 - DNA, 25 bp, Homo sapien
cagacccagagaaagttactgcata

SEQ ID NO: 4156928 - DNA, 25 bp, Homo sapien
tttgataagcgggaaaatggtcgga

SEQ ID NO: 4156929 - DNA, 25 bp, Homo sapien
gcccctccagattgtgaatgtaaga

SEQ ID NO: 4156930 - DNA, 25 bp, Homo sapien
gacttcctgatgatataaaccgggt

SEQ ID NO: 4156931 - DNA, 25 bp, Homo sapien
ggcactgggttctggtaatcacaca

SEQ ID NO: 4156932 - DNA, 25 bp, Homo sapien
taaaccgggttacatatgcttgcaa

SEQ ID NO: 4156933 - DNA, 25 bp, Homo sapien
ccttggcaaactataaacagaactg

SEQ ID NO: 4156934 - DNA, 25 bp, Homo sapien
acttcatatatctatacagtctgtc

SEQ ID NO: 4156935 - DNA, 25 bp, Homo sapien
tgttaaagctggatctacaagaggc

SEQ ID NO: 4156936 - DNA, 25 bp, Homo sapien
cagtctgtctatacattggctgaac

SEQ ID NO: 4156937 - DNA, 25 bp, Homo sapien
ggaacattcacgttctcccctggga

SEQ ID NO: 4156938 - DNA, 25 bp, Homo sapien
ctaataatatatgaggccgagcaca

SEQ ID NO: 4156939 - DNA, 25 bp, Homo sapien
gacctcggagccagttttgatcgcg

SEQ ID NO: 4156940 - DNA, 25 bp, Homo sapien
aaaaggtcaaacaaggctcccactg

SEQ ID NO: 4156941 - DNA, 25 bp, Homo sapien
gaatagggtatgacacaaaaggagg

SEQ ID NO: 4156942 - DNA, 25 bp, Homo sapien
cactggagatttctgggtatcaaaa

SEQ ID NO: 4156943 - DNA, 25 bp, Homo sapien
ggtaaagtcagttaataatcttgag

SEQ ID NO: 4156944 - DNA, 25 bp, Homo sapien
gaaggcagagaataccctccactgg

SEQ ID NO: 4156945 - DNA, 25 bp, Homo sapien
gctttacaattgacactgcaagtct

SEQ ID NO: 4156946 - DNA, 25 bp, Homo sapien
tacaattgacactgcaagtctgctc

SEQ ID NO: 4156947 - DNA, 25 bp, Homo sapien
ttactctttgctttacaattgacac

SEQ ID NO: 4156948 - DNA, 25 bp, Homo sapien
gacactgcaagtctgctccaaattt

SEQ ID NO: 4156949 - DNA, 25 bp, Homo sapien
tatttggtcacatagccaggtgtgc

SEQ ID NO: 4156950 - DNA, 25 bp, Homo sapien
cataaaggcttcttggataagggtc

SEQ ID NO: 4156951 - DNA, 25 bp, Homo sapien
tgcttatctcccaggcataaaggct

SEQ ID NO: 4156952 - DNA, 25 bp, Homo sapien
gaactgcaggacaccttgatttcca

SEQ ID NO: 4156953 - DNA, 25 bp, Homo sapien
tggcaagtatggcactctcctgctt

SEQ ID NO: 4156954 - DNA, 25 bp, Homo sapien
gattctagtaatcgactgctccttc

SEQ ID NO: 4156955 - DNA, 25 bp, Homo sapien
cattaccattgagcatccaaaatta

SEQ ID NO: 4156956 - DNA, 25 bp, Homo sapien
taacaaatccaatctgtttgctgct

SEQ ID NO: 4156957 - DNA, 25 bp, Homo sapien
ttcttatgcttcacgagttgcaatg

SEQ ID NO: 4156958 - DNA, 25 bp, Homo sapien
aacttgaaacaagatttcttatgct

SEQ ID NO: 4156959 - DNA, 25 bp, Homo sapien
cagaaccgttgttctctcctgaggg

SEQ ID NO: 4156960 - DNA, 25 bp, Homo sapien
caatgtgaaatatgactcagaaccg

SEQ ID NO: 4156961 - DNA, 25 bp, Homo sapien
ctctcaccctggtgtccaaagatgg

SEQ ID NO: 4156962 - DNA, 25 bp, Homo sapien
ttacgtggattcataagatctctgg

SEQ ID NO: 4156963 - DNA, 25 bp, Homo sapien
gcagctcaccccagaaattaaatta

SEQ ID NO: 4156964 - DNA, 25 bp, Homo sapien
aagatggcttctgtgtaacaaaagg

SEQ ID NO: 4156965 - DNA, 25 bp, Homo sapien
gcaatattccgacttccctgcagat

SEQ ID NO: 4156966 - DNA, 25 bp, Homo sapien
tagatttggcaatattccgacttcc

SEQ ID NO: 4156967 - DNA, 25 bp, Homo sapien
tgaggagttttagatttggcaatat

SEQ ID NO: 4156968 - DNA, 25 bp, Homo sapien
gagttttagatttggcaatattccg

SEQ ID NO: 4156969 - DNA, 25 bp, Homo sapien
tactttggcaaagggcactctatta

SEQ ID NO: 4156970 - DNA, 25 bp, Homo sapien
tttggctctaatgctactttggcaa

SEQ ID NO: 4156971 - DNA, 25 bp, Homo sapien
tcaccatttctgaatttggctctaa

SEQ ID NO: 4156972 - DNA, 25 bp, Homo sapien
gctctaatgctactttggcaaaggg

SEQ ID NO: 4156973 - DNA, 25 bp, Homo sapien
aacagatgtacaaaagtgacactgg

SEQ ID NO: 4156974 - DNA, 25 bp, Homo sapien
agatgtacaaaagtgacactgggca

SEQ ID NO: 4156975 - DNA, 25 bp, Homo sapien
acagatgtacaaaagtgacactggg

SEQ ID NO: 4156976 - DNA, 25 bp, Homo sapien
cagatgtacaaaagtgacactgggc

SEQ ID NO: 4156977 - DNA, 25 bp, Homo sapien
ggatgctctttcaagccaactgggt

SEQ ID NO: 4156978 - DNA, 25 bp, Homo sapien
tctggaccagcaaattcgtaaatac

SEQ ID NO: 4156979 - DNA, 25 bp, Homo sapien
gaacctgtacaaagatctggaccag

SEQ ID NO: 4156980 - DNA, 25 bp, Homo sapien
tccacctgtgcaaaggaacctgtac

SEQ ID NO: 4156981 - DNA, 25 bp, Homo sapien
gagcaataatggatttccgcgtttc

SEQ ID NO: 4156982 - DNA, 25 bp, Homo sapien
ccaaatctcatatcttctatgtgaa

SEQ ID NO: 4156983 - DNA, 25 bp, Homo sapien
tggatcattcccagggccatatctg

SEQ ID NO: 4156984 - DNA, 25 bp, Homo sapien
aaaatccgacatcacttgaagccca

SEQ ID NO: 4156985 - DNA, 25 bp, Homo sapien
gagagttggctgatgaatgtagata

SEQ ID NO: 4156986 - DNA, 25 bp, Homo sapien
gcaatttctattagtagccatggtt

SEQ ID NO: 4156987 - DNA, 25 bp, Homo sapien
tatgtctctatgaaccaaattttgc

SEQ ID NO: 4156988 - DNA, 25 bp, Homo sapien
cttgtctcatttcagtgggaggaga

SEQ ID NO: 4156989 - DNA, 25 bp, Homo sapien
caaattcccaccaattaactcagac

SEQ ID NO: 4156990 - DNA, 25 bp, Homo sapien
tcagactgacacaggtttgtgacat

SEQ ID NO: 4156991 - DNA, 25 bp, Homo sapien
tattgaaacaagagggggcagtcgt

SEQ ID NO: 4156992 - DNA, 25 bp, Homo sapien
aggattagtttcaaattgcttgtat

SEQ ID NO: 4156993 - DNA, 25 bp, Homo sapien
agttgtcactgattgattcacactg

SEQ ID NO: 4156994 - DNA, 25 bp, Homo sapien
ccagaagtctgagtctatgttagta

SEQ ID NO: 4156995 - DNA, 25 bp, Homo sapien
tcacactgcattcttctaactcctc

SEQ ID NO: 4156996 - DNA, 25 bp, Homo sapien
tatgttagtattatagtttcctatc

SEQ ID NO: 4156997 - DNA, 25 bp, Homo sapien
gatgccaactcccagaaacctgagg

SEQ ID NO: 4156998 - DNA, 25 bp, Homo sapien
tcctgatgccaactcccagaaacct

SEQ ID NO: 4156999 - DNA, 25 bp, Homo sapien
ccattctttatgatttggctgtcct

SEQ ID NO: 4157000 - DNA, 25 bp, Homo sapien
gcaagcaagcttttcaatgatttgc

SEQ ID NO: 4157001 - DNA, 25 bp, Homo sapien
tgcttgacacattgcaagtcctcat

SEQ ID NO: 4157002 - DNA, 25 bp, Homo sapien
caatgcttgacacattgcaagtcct

SEQ ID NO: 4157003 - DNA, 25 bp, Homo sapien
tcaatgcttgacacattgcaagtcc

SEQ ID NO: 4157004 - DNA, 25 bp, Homo sapien
aatgcttgacacattgcaagtcctc

SEQ ID NO: 4157005 - DNA, 25 bp, Homo sapien
ggtccctggccttctcagttgagag

SEQ ID NO: 4157006 - DNA, 25 bp, Homo sapien
ttggtccctggccttctcagttgag

SEQ ID NO: 4157007 - DNA, 25 bp, Homo sapien
cttctcagttgagagagtttgttct

SEQ ID NO: 4157008 - DNA, 25 bp, Homo sapien
cctggccttctcagttgagagagtt

SEQ ID NO: 4157009 - DNA, 25 bp, Homo sapien
gaaatgctttgacaatggccccatg

SEQ ID NO: 4157010 - DNA, 25 bp, Homo sapien
ggaagtaggaacaggtctcactaaa

SEQ ID NO: 4157011 - DNA, 25 bp, Homo sapien
ttttgcatttggtgatggacctggc

SEQ ID NO: 4157012 - DNA, 25 bp, Homo sapien
tgttcccagtattgcagaccatatg

SEQ ID NO: 4157013 - DNA, 25 bp, Homo sapien
ggaaggtgaatgattaaagctggca

SEQ ID NO: 4157014 - DNA, 25 bp, Homo sapien
ggtgaatgattaaagctggcagcct

SEQ ID NO: 4157015 - DNA, 25 bp, Homo sapien
cctcgctgtctttgcacaggggaag

SEQ ID NO: 4157016 - DNA, 25 bp, Homo sapien
attaaagctggcagcctcaccacag

SEQ ID NO: 4157017 - DNA, 25 bp, Homo sapien
ttgagagacaaagacgcagccttct

SEQ ID NO: 4157018 - DNA, 25 bp, Homo sapien
aacagttgatcaaattattgctacc

SEQ ID NO: 4157019 - DNA, 25 bp, Homo sapien
gctaccttgtaatactacatcatga

SEQ ID NO: 4157020 - DNA, 25 bp, Homo sapien
tctgaactgatgtgtcagcccaaat

SEQ ID NO: 4157021 - DNA, 25 bp, Homo sapien
ataatgctgtcatagcgaaactggg

SEQ ID NO: 4157022 - DNA, 25 bp, Homo sapien
tgctgtcatagcgaaactgggccat

SEQ ID NO: 4157023 - DNA, 25 bp, Homo sapien
taatgctgtcatagcgaaactgggc

SEQ ID NO: 4157024 - DNA, 25 bp, Homo sapien
aatgctgtcatagcgaaactgggcc

SEQ ID NO: 4157025 - DNA, 25 bp, Homo sapien
caaaattaggaggagctatgctaaa

SEQ ID NO: 4157026 - DNA, 25 bp, Homo sapien
taggaggagctatgctaaattttac

SEQ ID NO: 4157027 - DNA, 25 bp, Homo sapien
tgtgccaaaattaggaggagctatg

SEQ ID NO: 4157028 - DNA, 25 bp, Homo sapien
tgccaaaattaggaggagctatgct

SEQ ID NO: 4157029 - DNA, 25 bp, Homo sapien
ctatttgacgccaattctgaaaaac

SEQ ID NO: 4157030 - DNA, 25 bp, Homo sapien
tatttgacgccaattctgaaaaaca

SEQ ID NO: 4157031 - DNA, 25 bp, Homo sapien
catataaataggtaagaactctcct

SEQ ID NO: 4157032 - DNA, 25 bp, Homo sapien
atcatataaataggtaagaactctc

SEQ ID NO: 4157033 - DNA, 25 bp, Homo sapien
tataaataggtaagaactctcctcc

SEQ ID NO: 4157034 - DNA, 25 bp, Homo sapien
ataaataggtaagaactctcctcct

SEQ ID NO: 4157035 - DNA, 25 bp, Homo sapien
gagggttactcagatcagattggcc

SEQ ID NO: 4157036 - DNA, 25 bp, Homo sapien
cacttacggctatgatctactgcag

SEQ ID NO: 4157037 - DNA, 25 bp, Homo sapien
cagattggcctgtcccacatgaaaa

SEQ ID NO: 4157038 - DNA, 25 bp, Homo sapien
caaaagctctctgataggcagggtc

SEQ ID NO: 4157039 - DNA, 25 bp, Homo sapien
ccatatggtgttgaagtctactgtg

SEQ ID NO: 4157040 - DNA, 25 bp, Homo sapien
aattaagtgcttcagtgttgagtgc

SEQ ID NO: 4157041 - DNA, 25 bp, Homo sapien
ctttgtgagttttccgccttaatga

SEQ ID NO: 4157042 - DNA, 25 bp, Homo sapien
tctcctgaagacagcctacaggtgg

SEQ ID NO: 4157043 - DNA, 25 bp, Homo sapien
tccaaattttggaatttggcactga

SEQ ID NO: 4157044 - DNA, 25 bp, Homo sapien
taattccaaattttggaatttggca

SEQ ID NO: 4157045 - DNA, 25 bp, Homo sapien
aattttggaatttggcactgagcat

SEQ ID NO: 4157046 - DNA, 25 bp, Homo sapien
caaattttggaatttggcactgagc

SEQ ID NO: 4157047 - DNA, 25 bp, Homo sapien
agattactagttaactggtattctt

SEQ ID NO: 4157048 - DNA, 25 bp, Homo sapien
gaagattactagttaactggtattc

SEQ ID NO: 4157049 - DNA, 25 bp, Homo sapien
aagattactagttaactggtattct

SEQ ID NO: 4157050 - DNA, 25 bp, Homo sapien
cagtatcagagttctgaagattact

SEQ ID NO: 4157051 - DNA, 25 bp, Homo sapien
tatttccaatagttcgtagcatcaa

SEQ ID NO: 4157052 - DNA, 25 bp, Homo sapien
tattgttgcacatgaggctttccca

SEQ ID NO: 4157053 - DNA, 25 bp, Homo sapien
gagggctcttctacaagatctatat

SEQ ID NO: 4157054 - DNA, 25 bp, Homo sapien
tccaaagcgttgtgtaatgacccta

SEQ ID NO: 4157055 - DNA, 25 bp, Homo sapien
gacagccgggaagttatctcataga

SEQ ID NO: 4157056 - DNA, 25 bp, Homo sapien
aaagctcttgtactttcctggtaag

SEQ ID NO: 4157057 - DNA, 25 bp, Homo sapien
taatatgacttagctgacagccggg

SEQ ID NO: 4157058 - DNA, 25 bp, Homo sapien
aacaacaatgttccacccagcagag

SEQ ID NO: 4157059 - DNA, 25 bp, Homo sapien
aggaaagcattagtcagacccttga

SEQ ID NO: 4157060 - DNA, 25 bp, Homo sapien
ggaaagcattagtcagacccttgaa

SEQ ID NO: 4157061 - DNA, 25 bp, Homo sapien
taaagttaagctcccttgtggccca

SEQ ID NO: 4157062 - DNA, 25 bp, Homo sapien
taagctcccttgtggcccaatcaca

SEQ ID NO: 4157063 - DNA, 25 bp, Homo sapien
cacctaaagttaagctcccttgtgg

SEQ ID NO: 4157064 - DNA, 25 bp, Homo sapien
tgtggcccaatcacagcatgaactt

SEQ ID NO: 4157065 - DNA, 25 bp, Homo sapien
agcaaaaaatggttgctgaatgaag

SEQ ID NO: 4157066 - DNA, 25 bp, Homo sapien
gagagcaaaaaatggttgctgaatg

SEQ ID NO: 4157067 - DNA, 25 bp, Homo sapien
ctgtggagagcaaaaaatggttgct

SEQ ID NO: 4157068 - DNA, 25 bp, Homo sapien
tgtggagagcaaaaaatggttgctg

SEQ ID NO: 4157069 - DNA, 25 bp, Homo sapien
aagctagtaagtatctttgttcgtc

SEQ ID NO: 4157070 - DNA, 25 bp, Homo sapien
tgtctagtgggaagaaagctagtaa

SEQ ID NO: 4157071 - DNA, 25 bp, Homo sapien
tctttgttcgtcaagggtcagttta

SEQ ID NO: 4157072 - DNA, 25 bp, Homo sapien
cagcaggagtaaaggtccctggaat

SEQ ID NO: 4157073 - DNA, 25 bp, Homo sapien
ttgaggcaaagctccaggacaaagt

SEQ ID NO: 4157074 - DNA, 25 bp, Homo sapien
tctgtcgtttgcattatctcatctg

SEQ ID NO: 4157075 - DNA, 25 bp, Homo sapien
ttccaagttggactgcaatatgctt

SEQ ID NO: 4157076 - DNA, 25 bp, Homo sapien
tgatagttatcatctgtcgtttgca

SEQ ID NO: 4157077 - DNA, 25 bp, Homo sapien
ccttcatccttctttctatcctgtt

SEQ ID NO: 4157078 - DNA, 25 bp, Homo sapien
ctcaaattcaccttcatccttcttt

SEQ ID NO: 4157079 - DNA, 25 bp, Homo sapien
tcatccttctttctatcctgttcca

SEQ ID NO: 4157080 - DNA, 25 bp, Homo sapien
accttcatccttctttctatcctgt

SEQ ID NO: 4157081 - DNA, 25 bp, Homo sapien
tacggcagtgatgtatggcaggcaa

SEQ ID NO: 4157082 - DNA, 25 bp, Homo sapien
tgtacactgagagcaggtgatttct

SEQ ID NO: 4157083 - DNA, 25 bp, Homo sapien
ggcttggctttcatgtgtacactga

SEQ ID NO: 4157084 - DNA, 25 bp, Homo sapien
tcaccagtcctgtaaatgtacggca

SEQ ID NO: 4157085 - DNA, 25 bp, Homo sapien
tttggcacccttgtgctcctatgca

SEQ ID NO: 4157086 - DNA, 25 bp, Homo sapien
tccccgatatcctaaaccacattat

SEQ ID NO: 4157087 - DNA, 25 bp, Homo sapien
tctcattcccatccatggcacccag

SEQ ID NO: 4157088 - DNA, 25 bp, Homo sapien
cattatctgtctacgttcttttctc

SEQ ID NO: 4157089 - DNA, 25 bp, Homo sapien
gattgcaaggtatgggctcatctcc

SEQ ID NO: 4157090 - DNA, 25 bp, Homo sapien
aggtactccttggccacaggtggcc

SEQ ID NO: 4157091 - DNA, 25 bp, Homo sapien
attggtgattgcaaggtatgggctc

SEQ ID NO: 4157092 - DNA, 25 bp, Homo sapien
ggcaccacatacgaaacaaactgag

SEQ ID NO: 4157093 - DNA, 25 bp, Homo sapien
gattagaatgtttgcccagcgctca

SEQ ID NO: 4157094 - DNA, 25 bp, Homo sapien
gggaaacatatcctgacagagcaca

SEQ ID NO: 4157095 - DNA, 25 bp, Homo sapien
caagccgcagcagcctttaagggaa

SEQ ID NO: 4157096 - DNA, 25 bp, Homo sapien
aaaagataagcttgtcaagccgcag

SEQ ID NO: 4157097 - DNA, 25 bp, Homo sapien
aaaccgactgagcaaaaccatctcg

SEQ ID NO: 4157098 - DNA, 25 bp, Homo sapien
agcaaaaccgactgagcaaaaccat

SEQ ID NO: 4157099 - DNA, 25 bp, Homo sapien
gactgagcaaaaccatctcgtaggg

SEQ ID NO: 4157100 - DNA, 25 bp, Homo sapien
aaaaccatctcgtagggctgcaagg

SEQ ID NO: 4157101 - DNA, 25 bp, Homo sapien
tatgaccttccgttgacctgactga

SEQ ID NO: 4157102 - DNA, 25 bp, Homo sapien
caagtcattgcatagttcaaaacac

SEQ ID NO: 4157103 - DNA, 25 bp, Homo sapien
tgcaaatatgaccttccgttgacct

SEQ ID NO: 4157104 - DNA, 25 bp, Homo sapien
aacaacaaagactgcaaatatgacc

SEQ ID NO: 4157105 - DNA, 25 bp, Homo sapien
gaatgcatagaatgatcctgataat

SEQ ID NO: 4157106 - DNA, 25 bp, Homo sapien
tgtaccattgggaatgaacatgcaa

SEQ ID NO: 4157107 - DNA, 25 bp, Homo sapien
gctagaatttccataagttgggaac

SEQ ID NO: 4157108 - DNA, 25 bp, Homo sapien
tattcagtctactgtatctttcact

SEQ ID NO: 4157109 - DNA, 25 bp, Homo sapien
tggtctaagagacagtttgttgtga

SEQ ID NO: 4157110 - DNA, 25 bp, Homo sapien
gtggtctaagagacagtttgttgtg

SEQ ID NO: 4157111 - DNA, 25 bp, Homo sapien
aagagacagtttgttgtgatttctg

SEQ ID NO: 4157112 - DNA, 25 bp, Homo sapien
attctgcgaagttccataagccatc

SEQ ID NO: 4157113 - DNA, 25 bp, Homo sapien
gcattctgcgaagttccataagcca

SEQ ID NO: 4157114 - DNA, 25 bp, Homo sapien
cattctgcgaagttccataagccat

SEQ ID NO: 4157115 - DNA, 25 bp, Homo sapien
ggcattctgcgaagttccataagcc

SEQ ID NO: 4157116 - DNA, 25 bp, Homo sapien
caaacaagcgaagtatggtttcagc

SEQ ID NO: 4157117 - DNA, 25 bp, Homo sapien
tcccaaacaagcgaagtatggtttc

SEQ ID NO: 4157118 - DNA, 25 bp, Homo sapien
aacaagcgaagtatggtttcagccc

SEQ ID NO: 4157119 - DNA, 25 bp, Homo sapien
aagcgaagtatggtttcagcccaaa

SEQ ID NO: 4157120 - DNA, 25 bp, Homo sapien
tccaaaatgctaatatcatcatgcc

SEQ ID NO: 4157121 - DNA, 25 bp, Homo sapien
gaagtgtcagtatccgtagcctcca

SEQ ID NO: 4157122 - DNA, 25 bp, Homo sapien
ccaaagaagtgtcagtatccgtagc

SEQ ID NO: 4157123 - DNA, 25 bp, Homo sapien
tcatcatgcccaatcttcatgtgaa

SEQ ID NO: 4157124 - DNA, 25 bp, Homo sapien
ttcatgaacagtaaaagcctcagag

SEQ ID NO: 4157125 - DNA, 25 bp, Homo sapien
catgaacagtaaaagcctcagaggc

SEQ ID NO: 4157126 - DNA, 25 bp, Homo sapien
cagaggcaccagaattgacataaca

SEQ ID NO: 4157127 - DNA, 25 bp, Homo sapien
gaggcaccagaattgacataacaca

SEQ ID NO: 4157128 - DNA, 25 bp, Homo sapien
acaggctcccgccaccaccaagccc

SEQ ID NO: 4157129 - DNA, 25 bp, Homo sapien
caagcccagccaattttttgtattt

SEQ ID NO: 4157130 - DNA, 25 bp, Homo sapien
ccgcctcccggcacattcacgccat

SEQ ID NO: 4157131 - DNA, 25 bp, Homo sapien
agctccgcctcccggcacattcacg

SEQ ID NO: 4157132 - DNA, 25 bp, Homo sapien
aaggactttcgccagtggtctggca

SEQ ID NO: 4157133 - DNA, 25 bp, Homo sapien
taaaggactttcgccagtggtctgg

SEQ ID NO: 4157134 - DNA, 25 bp, Homo sapien
ataaaggactttcgccagtggtctg

SEQ ID NO: 4157135 - DNA, 25 bp, Homo sapien
aataaaggactttcgccagtggtct

SEQ ID NO: 4157136 - DNA, 25 bp, Homo sapien
caatgtgagggttaccaacatggcc

SEQ ID NO: 4157137 - DNA, 25 bp, Homo sapien
tagagaaggccatattctcaatgtg

SEQ ID NO: 4157138 - DNA, 25 bp, Homo sapien
catttcctcaagctcatcatctaga

SEQ ID NO: 4157139 - DNA, 25 bp, Homo sapien
caacatggcctctgatagtgactca

SEQ ID NO: 4157140 - DNA, 25 bp, Homo sapien
tttgacaactcatctcgttttagag

SEQ ID NO: 4157141 - DNA, 25 bp, Homo sapien
acaactcatctcgttttagagtcat

SEQ ID NO: 4157142 - DNA, 25 bp, Homo sapien
tgacaactcatctcgttttagagtc

SEQ ID NO: 4157143 - DNA, 25 bp, Homo sapien
ttttgacaactcatctcgttttaga

SEQ ID NO: 4157144 - DNA, 25 bp, Homo sapien
tacagtgaggtctgacatctctctc

SEQ ID NO: 4157145 - DNA, 25 bp, Homo sapien
cagttgagccccaagaccagctaca

SEQ ID NO: 4157146 - DNA, 25 bp, Homo sapien
cagctacagtgaggtctgacatctc

SEQ ID NO: 4157147 - DNA, 25 bp, Homo sapien
gaagagaagcttcatcaatgccttg

SEQ ID NO: 4157148 - DNA, 25 bp, Homo sapien
gtgctgtgtatctggcatttgtttc

SEQ ID NO: 4157149 - DNA, 25 bp, Homo sapien
tttccctttatagctctgtgaattt

SEQ ID NO: 4157150 - DNA, 25 bp, Homo sapien
catttggtttctcagcttggtgctg

SEQ ID NO: 4157151 - DNA, 25 bp, Homo sapien
gtttctttccctttatagctctgtg

SEQ ID NO: 4157152 - DNA, 25 bp, Homo sapien
tgttgaccatatgcagccacaatga

SEQ ID NO: 4157153 - DNA, 25 bp, Homo sapien
ttgatattccatatagcagtcaggg

SEQ ID NO: 4157154 - DNA, 25 bp, Homo sapien
gatgccaaacttctttattacttga

SEQ ID NO: 4157155 - DNA, 25 bp, Homo sapien
tactcagtaggatgcttgatattcc

SEQ ID NO: 4157156 - DNA, 25 bp, Homo sapien
aagaccggaggacaggcaggaattc

SEQ ID NO: 4157157 - DNA, 25 bp, Homo sapien
ttccccatgagctctaaactggtga

SEQ ID NO: 4157158 - DNA, 25 bp, Homo sapien
ctgtggcagaggcttgaagaccgga

SEQ ID NO: 4157159 - DNA, 25 bp, Homo sapien
ggaggacaggcaggaattctgatcc

SEQ ID NO: 4157160 - DNA, 25 bp, Homo sapien
tctggtattgtcatgcgagttacaa

SEQ ID NO: 4157161 - DNA, 25 bp, Homo sapien
gttacaaggcttagaagccctgcag

SEQ ID NO: 4157162 - DNA, 25 bp, Homo sapien
tctacttctggtattgtcatgcgag

SEQ ID NO: 4157163 - DNA, 25 bp, Homo sapien
tgtcatgcgagttacaaggcttaga

SEQ ID NO: 4157164 - DNA, 25 bp, Homo sapien
tcattgcatgaggatttaatagtct

SEQ ID NO: 4157165 - DNA, 25 bp, Homo sapien
gtcttggacccatagaagcaatgtg

SEQ ID NO: 4157166 - DNA, 25 bp, Homo sapien
gaaaagcagtcttgcaactcatgca

SEQ ID NO: 4157167 - DNA, 25 bp, Homo sapien
cccatagaagcaatgtgttgaatca

SEQ ID NO: 4157168 - DNA, 25 bp, Homo sapien
ccattccatttctatgggatacggg

SEQ ID NO: 4157169 - DNA, 25 bp, Homo sapien
gggcatagacttcattcggactgct

SEQ ID NO: 4157170 - DNA, 25 bp, Homo sapien
gacttcattcggactgcttcctgct

SEQ ID NO: 4157171 - DNA, 25 bp, Homo sapien
ctagatgactggctgtactgattcc

SEQ ID NO: 4157172 - DNA, 25 bp, Homo sapien
caagttacagtgtgggtacaagggc

SEQ ID NO: 4157173 - DNA, 25 bp, Homo sapien
tgtgctcaagttacagtgtgggtac

SEQ ID NO: 4157174 - DNA, 25 bp, Homo sapien
tccatcaagaggacggcatagaggg

SEQ ID NO: 4157175 - DNA, 25 bp, Homo sapien
tacaagggcacagtgatttgctcca

SEQ ID NO: 4157176 - DNA, 25 bp, Homo sapien
tactttgggctgtcaatattgtcac

SEQ ID NO: 4157177 - DNA, 25 bp, Homo sapien
atactttgggctgtcaatattgtca

SEQ ID NO: 4157178 - DNA, 25 bp, Homo sapien
ttaatactttgggctgtcaatattg

SEQ ID NO: 4157179 - DNA, 25 bp, Homo sapien
aatactttgggctgtcaatattgtc

SEQ ID NO: 4157180 - DNA, 25 bp, Homo sapien
gctacagaatacaggattttaacag

SEQ ID NO: 4157181 - DNA, 25 bp, Homo sapien
ttttaacagggtacttgtcatctcc

SEQ ID NO: 4157182 - DNA, 25 bp, Homo sapien
aaagtagcaacccaaagatttctgg

SEQ ID NO: 4157183 - DNA, 25 bp, Homo sapien
gatgtcactataagtctgtgtcctt

SEQ ID NO: 4157184 - DNA, 25 bp, Homo sapien
tggccgtcgccccaagatggcggac

SEQ ID NO: 4157185 - DNA, 25 bp, Homo sapien
cgctgcgtcggttgcccctgaggtg

SEQ ID NO: 4157186 - DNA, 25 bp, Homo sapien
ccctgaggtgtctgtgaggactaac

SEQ ID NO: 4157187 - DNA, 25 bp, Homo sapien
gacacgatgaggtggcgctgcgtcg

SEQ ID NO: 4157188 - DNA, 25 bp, Homo sapien
ttagaagttttccagtacatatcat

SEQ ID NO: 4157189 - DNA, 25 bp, Homo sapien
attattagaagttttccagtacata

SEQ ID NO: 4157190 - DNA, 25 bp, Homo sapien
gaagttttccagtacatatcataga

SEQ ID NO: 4157191 - DNA, 25 bp, Homo sapien
ccagtacatatcatagattattttg

SEQ ID NO: 4157192 - DNA, 25 bp, Homo sapien
ttgatatgtctgataccccatgagt

SEQ ID NO: 4157193 - DNA, 25 bp, Homo sapien
tcattccactaatatgttcagtttt

SEQ ID NO: 4157194 - DNA, 25 bp, Homo sapien
cccatgagtcaatcattccactaat

SEQ ID NO: 4157195 - DNA, 25 bp, Homo sapien
gatatgtctgataccccatgagtca

SEQ ID NO: 4157196 - DNA, 25 bp, Homo sapien
tgctgatgatctaactgtgggaaag

SEQ ID NO: 4157197 - DNA, 25 bp, Homo sapien
agaacaatttagctagggatccaag

SEQ ID NO: 4157198 - DNA, 25 bp, Homo sapien
gctagggatccaagtgacatttgct

SEQ ID NO: 4157199 - DNA, 25 bp, Homo sapien
gagataactattttctgggaagaac

SEQ ID NO: 4157200 - DNA, 25 bp, Homo sapien
ccagttggaaagcaatgaggttctt

SEQ ID NO: 4157201 - DNA, 25 bp, Homo sapien
ttctgttgccctttaattggcagtg

SEQ ID NO: 4157202 - DNA, 25 bp, Homo sapien
aatatttgatgtttcaactggaaaa

SEQ ID NO: 4157203 - DNA, 25 bp, Homo sapien
tcaactggaaaatggccggggccca

SEQ ID NO: 4157204 - DNA, 25 bp, Homo sapien
tgatctctagatgcccctaaacagc

SEQ ID NO: 4157205 - DNA, 25 bp, Homo sapien
taaacagcatcactacgtaagacgc

SEQ ID NO: 4157206 - DNA, 25 bp, Homo sapien
aacaagtgttgttcctgatctctag

SEQ ID NO: 4157207 - DNA, 25 bp, Homo sapien
ggaagctaccaaaccaaaatctcag

SEQ ID NO: 4157208 - DNA, 25 bp, Homo sapien
ggtggatcagcatagacagaaaaga

SEQ ID NO: 4157209 - DNA, 25 bp, Homo sapien
agtggagaaagtgttaattgcccca

SEQ ID NO: 4157210 - DNA, 25 bp, Homo sapien
aaagtgttaattgccccatgttcca

SEQ ID NO: 4157211 - DNA, 25 bp, Homo sapien
ggaatagcaccagttcaagatcagg

SEQ ID NO: 4157212 - DNA, 25 bp, Homo sapien
ttgttcttgacccatgtatacgtat

SEQ ID NO: 4157213 - DNA, 25 bp, Homo sapien
cttttgttcttgacccatgtatacg

SEQ ID NO: 4157214 - DNA, 25 bp, Homo sapien
gacccatgtatacgtataatttata

SEQ ID NO: 4157215 - DNA, 25 bp, Homo sapien
tcttgacccatgtatacgtataatt

SEQ ID NO: 4157216 - DNA, 25 bp, Homo sapien
cctgagttagttggttatatttcaa

SEQ ID NO: 4157217 - DNA, 25 bp, Homo sapien
acttctcgtaatcctacacatttta

SEQ ID NO: 4157218 - DNA, 25 bp, Homo sapien
gtctcctgagttagttggttatatt

SEQ ID NO: 4157219 - DNA, 25 bp, Homo sapien
ccacttctcgtaatcctacacattt

SEQ ID NO: 4157220 - DNA, 25 bp, Homo sapien
ttagaagtaatggagcattaaactg

SEQ ID NO: 4157221 - DNA, 25 bp, Homo sapien
ttaaactgcatcagcaataccatac

SEQ ID NO: 4157222 - DNA, 25 bp, Homo sapien
tgcatcagcaataccatacacaaag

SEQ ID NO: 4157223 - DNA, 25 bp, Homo sapien
actgcatcagcaataccatacacaa

SEQ ID NO: 4157224 - DNA, 25 bp, Homo sapien
gttaatcatcgatatctggaataaa

SEQ ID NO: 4157225 - DNA, 25 bp, Homo sapien
agttaatcatcgatatctggaataa

SEQ ID NO: 4157226 - DNA, 25 bp, Homo sapien
aagttaatcatcgatatctggaata

SEQ ID NO: 4157227 - DNA, 25 bp, Homo sapien
aaagttaatcatcgatatctggaat

SEQ ID NO: 4157228 - DNA, 25 bp, Homo sapien
taacgagaaagtacaattgaatttc

SEQ ID NO: 4157229 - DNA, 25 bp, Homo sapien
gcttcagcggatgttcaaatcaaca

SEQ ID NO: 4157230 - DNA, 25 bp, Homo sapien
gatttattaatgtaacgagaaagta

SEQ ID NO: 4157231 - DNA, 25 bp, Homo sapien
ggtgaaaaataagcttcagcggatg

SEQ ID NO: 4157232 - DNA, 25 bp, Homo sapien
tgaaggagatgtcagacagtgaatg

SEQ ID NO: 4157233 - DNA, 25 bp, Homo sapien
gtctaactcacatattaggtacaac

SEQ ID NO: 4157234 - DNA, 25 bp, Homo sapien
ttaaatgttgagcatggcgggctcc

SEQ ID NO: 4157235 - DNA, 25 bp, Homo sapien
gctctgtaccgccttcagattcctt

SEQ ID NO: 4157236 - DNA, 25 bp, Homo sapien
tttctagctgtccaaaaatgtccat

SEQ ID NO: 4157237 - DNA, 25 bp, Homo sapien
tgaattcatcaaataggctatccat

SEQ ID NO: 4157238 - DNA, 25 bp, Homo sapien
gaatcaggttgtttgcatctatgaa

SEQ ID NO: 4157239 - DNA, 25 bp, Homo sapien
tagacttttaattactggcaactgc

SEQ ID NO: 4157240 - DNA, 25 bp, Homo sapien
cacaattacctgctattaacctaga

SEQ ID NO: 4157241 - DNA, 25 bp, Homo sapien
tcatgaccagtaacccacactggac

SEQ ID NO: 4157242 - DNA, 25 bp, Homo sapien
tcaacaatggattcttcatgaccag

SEQ ID NO: 4157243 - DNA, 25 bp, Homo sapien
agctaagacttagtgttctcttctg

SEQ ID NO: 4157244 - DNA, 25 bp, Homo sapien
tctgaatccagactttgaaaacaat

SEQ ID NO: 4157245 - DNA, 25 bp, Homo sapien
acatgtaggacattaattttccacc

SEQ ID NO: 4157246 - DNA, 25 bp, Homo sapien
ggcattaatcgtgagcccagctccc

SEQ ID NO: 4157247 - DNA, 25 bp, Homo sapien
ttagcacttggttatccacataggg

SEQ ID NO: 4157248 - DNA, 25 bp, Homo sapien
ttgaacttttttctcgttgctgttg

SEQ ID NO: 4157249 - DNA, 25 bp, Homo sapien
tttttctcgttgctgttgtcattgg

SEQ ID NO: 4157250 - DNA, 25 bp, Homo sapien
ttttttctcgttgctgttgtcattg

SEQ ID NO: 4157251 - DNA, 25 bp, Homo sapien
aacttttttctcgttgctgttgtca

SEQ ID NO: 4157252 - DNA, 25 bp, Homo sapien
gaagagcatagaccaatgatcaaaa

SEQ ID NO: 4157253 - DNA, 25 bp, Homo sapien
tttgtgtatgagaagagcatagacc

SEQ ID NO: 4157254 - DNA, 25 bp, Homo sapien
tactgggcggcagtccttaaatctg

SEQ ID NO: 4157255 - DNA, 25 bp, Homo sapien
tgttctgctttgtgtatgagaagag

SEQ ID NO: 4157256 - DNA, 25 bp, Homo sapien
ttactatagccttccaatcaacctg

SEQ ID NO: 4157257 - DNA, 25 bp, Homo sapien
tctgtggtattactatagccttcca

SEQ ID NO: 4157258 - DNA, 25 bp, Homo sapien
ggtattactatagccttccaatcaa

SEQ ID NO: 4157259 - DNA, 25 bp, Homo sapien
ctggaatctgtggtattactatagc

SEQ ID NO: 4157260 - DNA, 25 bp, Homo sapien
aggtatagggaatattgtttattca

SEQ ID NO: 4157261 - DNA, 25 bp, Homo sapien
ctataggtatagggaatattgttta

SEQ ID NO: 4157262 - DNA, 25 bp, Homo sapien
tataggtatagggaatattgtttat

SEQ ID NO: 4157263 - DNA, 25 bp, Homo sapien
taggtatagggaatattgtttattc

SEQ ID NO: 4157264 - DNA, 25 bp, Homo sapien
ctttgtatgtgagaggatgctgggt

SEQ ID NO: 4157265 - DNA, 25 bp, Homo sapien
ttctttgtatgtgagaggatgctgg

SEQ ID NO: 4157266 - DNA, 25 bp, Homo sapien
ctttctttgtatgtgagaggatgct

SEQ ID NO: 4157267 - DNA, 25 bp, Homo sapien
tttctttgtatgtgagaggatgctg

SEQ ID NO: 4157268 - DNA, 25 bp, Homo sapien
tttataggctcttgacaactgtttg

SEQ ID NO: 4157269 - DNA, 25 bp, Homo sapien
ttgacaactgtttgcatagtcgacc

SEQ ID NO: 4157270 - DNA, 25 bp, Homo sapien
tgtttgcatagtcgaccagctcaat

SEQ ID NO: 4157271 - DNA, 25 bp, Homo sapien
catagtcgaccagctcaattcttcc

SEQ ID NO: 4157272 - DNA, 25 bp, Homo sapien
caattgttaagtaataggagtacat

SEQ ID NO: 4157273 - DNA, 25 bp, Homo sapien
aaaggtatattctctgacgactgtg

SEQ ID NO: 4157274 - DNA, 25 bp, Homo sapien
tattatcttcgtgttggaactggaa

SEQ ID NO: 4157275 - DNA, 25 bp, Homo sapien
tctgttcccagtatctaagaggaat

SEQ ID NO: 4157276 - DNA, 25 bp, Homo sapien
ggttttctcctaaatgatagaaggc

SEQ ID NO: 4157277 - DNA, 25 bp, Homo sapien
gatagaaggctctcatctttaatat

SEQ ID NO: 4157278 - DNA, 25 bp, Homo sapien
cagcagccgccaagggtatttctcc

SEQ ID NO: 4157279 - DNA, 25 bp, Homo sapien
cataatccaatcagaagaaaggcag

SEQ ID NO: 4157280 - DNA, 25 bp, Homo sapien
tggcagcactggtggtaggcatgta

SEQ ID NO: 4157281 - DNA, 25 bp, Homo sapien
cactggtggtaggcatgtaggcctc

SEQ ID NO: 4157282 - DNA, 25 bp, Homo sapien
gcagcactggtggtaggcatgtagg

SEQ ID NO: 4157283 - DNA, 25 bp, Homo sapien
agcactggtggtaggcatgtaggcc

SEQ ID NO: 4157284 - DNA, 25 bp, Homo sapien
cttaaagatagtgatggcagaggct

SEQ ID NO: 4157285 - DNA, 25 bp, Homo sapien
ccccattgatgttggtattgagtac

SEQ ID NO: 4157286 - DNA, 25 bp, Homo sapien
atccttaaagatagtgatggcagag

SEQ ID NO: 4157287 - DNA, 25 bp, Homo sapien
ccttaaagatagtgatggcagaggc

SEQ ID NO: 4157288 - DNA, 25 bp, Homo sapien
gcagctcattgtccaaaccagtggc

SEQ ID NO: 4157289 - DNA, 25 bp, Homo sapien
ccaagaaatggctcagccctctaca

SEQ ID NO: 4157290 - DNA, 25 bp, Homo sapien
agaaatggctcagccctctacaggc

SEQ ID NO: 4157291 - DNA, 25 bp, Homo sapien
ccagtggccaggatttggatatatt

SEQ ID NO: 4157292 - DNA, 25 bp, Homo sapien
catgcattgtccttgaggttcagac

SEQ ID NO: 4157293 - DNA, 25 bp, Homo sapien
cccaaggagtaggatggaggtcact

SEQ ID NO: 4157294 - DNA, 25 bp, Homo sapien
ttctgaatatatgccactgtgagcc

SEQ ID NO: 4157295 - DNA, 25 bp, Homo sapien
tattgaaggtcatcagatacggagc

SEQ ID NO: 4157296 - DNA, 25 bp, Homo sapien
catctcagtaatacaagttcatcat

SEQ ID NO: 4157297 - DNA, 25 bp, Homo sapien
aagttcatcatccccgaatctccag

SEQ ID NO: 4157298 - DNA, 25 bp, Homo sapien
tcatcatccccgaatctccaggaga

SEQ ID NO: 4157299 - DNA, 25 bp, Homo sapien
gcatctcagtaatacaagttcatca

SEQ ID NO: 4157300 - DNA, 25 bp, Homo sapien
ctggagaattcgtgaacactgaaca

SEQ ID NO: 4157301 - DNA, 25 bp, Homo sapien
tcgtgaacactgaacagtcttaatg

SEQ ID NO: 4157302 - DNA, 25 bp, Homo sapien
gagaattcgtgaacactgaacagtc

SEQ ID NO: 4157303 - DNA, 25 bp, Homo sapien
gaattcgtgaacactgaacagtctt

SEQ ID NO: 4157304 - DNA, 25 bp, Homo sapien
catactggcgtatggaagtagcact

SEQ ID NO: 4157305 - DNA, 25 bp, Homo sapien
gcactaaactgctgaaagatgtcag

SEQ ID NO: 4157306 - DNA, 25 bp, Homo sapien
ccttagagcatgttggagcacgaga

SEQ ID NO: 4157307 - DNA, 25 bp, Homo sapien
gagactgagctggtgcaacaggcat

SEQ ID NO: 4157308 - DNA, 25 bp, Homo sapien
gagggagaggtgtagagtcacaagt

SEQ ID NO: 4157309 - DNA, 25 bp, Homo sapien
aggtgtagagtcacaagtggtggcc

SEQ ID NO: 4157310 - DNA, 25 bp, Homo sapien
ggagaggtgtagagtcacaagtggt

SEQ ID NO: 4157311 - DNA, 25 bp, Homo sapien
gagagggagaggtgtagagtcacaa

SEQ ID NO: 4157312 - DNA, 25 bp, Homo sapien
agtatgacaatccatcagaacatac

SEQ ID NO: 4157313 - DNA, 25 bp, Homo sapien
aatccatcagaacatacacaggtca

SEQ ID NO: 4157314 - DNA, 25 bp, Homo sapien
tatgacaatccatcagaacatacac

SEQ ID NO: 4157315 - DNA, 25 bp, Homo sapien
gacaatccatcagaacatacacagg

SEQ ID NO: 4157316 - DNA, 25 bp, Homo sapien
tctccccatttcaaacaaagttgca

SEQ ID NO: 4157317 - DNA, 25 bp, Homo sapien
ctccccatttcaaacaaagttgcat

SEQ ID NO: 4157318 - DNA, 25 bp, Homo sapien
ctctccccatttcaaacaaagttgc

SEQ ID NO: 4157319 - DNA, 25 bp, Homo sapien
aaggactgatcactcaacagttctc

SEQ ID NO: 4157320 - DNA, 25 bp, Homo sapien
caaaggactgatcactcaacagttc

SEQ ID NO: 4157321 - DNA, 25 bp, Homo sapien
aaaggactgatcactcaacagttct

SEQ ID NO: 4157322 - DNA, 25 bp, Homo sapien
aggactgatcactcaacagttctct

SEQ ID NO: 4157323 - DNA, 25 bp, Homo sapien
cagcagaaatatggatggtgatggt

SEQ ID NO: 4157324 - DNA, 25 bp, Homo sapien
tcaaagaataagatgctcagcagaa

SEQ ID NO: 4157325 - DNA, 25 bp, Homo sapien
ggtgttaggaatttgttgaacatct

SEQ ID NO: 4157326 - DNA, 25 bp, Homo sapien
gatggtgttaggaatttgttgaaca

SEQ ID NO: 4157327 - DNA, 25 bp, Homo sapien
taagtcggcctgatcacaatttacc

SEQ ID NO: 4157328 - DNA, 25 bp, Homo sapien
gagtcagtgactgcaccttaccaaa

SEQ ID NO: 4157329 - DNA, 25 bp, Homo sapien
cacattgggtactggtatgcttcca

SEQ ID NO: 4157330 - DNA, 25 bp, Homo sapien
aattgaagctcgctgtagtccacgc

SEQ ID NO: 4157331 - DNA, 25 bp, Homo sapien
tggtggcaatcatggccatagagca

SEQ ID NO: 4157332 - DNA, 25 bp, Homo sapien
gacactgggagctgacgagcgttat

SEQ ID NO: 4157333 - DNA, 25 bp, Homo sapien
caaaatgatcataaggaggaaccaa

SEQ ID NO: 4157334 - DNA, 25 bp, Homo sapien
cacatagagttatgcagggcaagga

SEQ ID NO: 4157335 - DNA, 25 bp, Homo sapien
cactgctccacaacaagagtttttc

SEQ ID NO: 4157336 - DNA, 25 bp, Homo sapien
tcacaacttctattgacaacgtagc

SEQ ID NO: 4157337 - DNA, 25 bp, Homo sapien
actgggctcatttctagttcacaac

SEQ ID NO: 4157338 - DNA, 25 bp, Homo sapien
tagctgtccacctttagcattaaga

SEQ ID NO: 4157339 - DNA, 25 bp, Homo sapien
tatagtacacgttgtacttttccta

SEQ ID NO: 4157340 - DNA, 25 bp, Homo sapien
tctcgagtctgcataatccatgctt

SEQ ID NO: 4157341 - DNA, 25 bp, Homo sapien
gctgagcatgattgtagtaactgga

SEQ ID NO: 4157342 - DNA, 25 bp, Homo sapien
aatgaaaaggaccaggataaatgag

SEQ ID NO: 4157343 - DNA, 25 bp, Homo sapien
catgcttgcagcaccagaatgtaac

SEQ ID NO: 4157344 - DNA, 25 bp, Homo sapien
ctcgaatatctccactattgcatac

SEQ ID NO: 4157345 - DNA, 25 bp, Homo sapien
tccttgtactcgaatatctccacta

SEQ ID NO: 4157346 - DNA, 25 bp, Homo sapien
ctatagtctcatcagtaataatgct

SEQ ID NO: 4157347 - DNA, 25 bp, Homo sapien
actattgctaattccttgtactcga

SEQ ID NO: 4157348 - DNA, 25 bp, Homo sapien
ccagtacctaggccagtggaatgct

SEQ ID NO: 4157349 - DNA, 25 bp, Homo sapien
gaccagtacctaggccagtggaatg

SEQ ID NO: 4157350 - DNA, 25 bp, Homo sapien
cagtacctaggccagtggaatgctg

SEQ ID NO: 4157351 - DNA, 25 bp, Homo sapien
accagtacctaggccagtggaatgc

SEQ ID NO: 4157352 - DNA, 25 bp, Homo sapien
ctggactgctatgttgccctgcttc

SEQ ID NO: 4157353 - DNA, 25 bp, Homo sapien
cagagactgaacagattccacctgg

SEQ ID NO: 4157354 - DNA, 25 bp, Homo sapien
ctgcttcctgtcatatgtcatcttc

SEQ ID NO: 4157355 - DNA, 25 bp, Homo sapien
attccacctggactgctatgttgcc

SEQ ID NO: 4157356 - DNA, 25 bp, Homo sapien
tggatacagcgcactctgctgagca

SEQ ID NO: 4157357 - DNA, 25 bp, Homo sapien
tgcccatattacagctgtgttagga

SEQ ID NO: 4157358 - DNA, 25 bp, Homo sapien
cacaggagctccaatactgtctgaa

SEQ ID NO: 4157359 - DNA, 25 bp, Homo sapien
ggccatagtatctgtgcatgctaga

SEQ ID NO: 4157360 - DNA, 25 bp, Homo sapien
gattctcccttatgtgtagatttcc

SEQ ID NO: 4157361 - DNA, 25 bp, Homo sapien
ctcccttatgtgtagatttcccttg

SEQ ID NO: 4157362 - DNA, 25 bp, Homo sapien
ttctcccttatgtgtagatttccct

SEQ ID NO: 4157363 - DNA, 25 bp, Homo sapien
tctcccttatgtgtagatttccctt

SEQ ID NO: 4157364 - DNA, 25 bp, Homo sapien
cagtattaatattgctaacctccat

SEQ ID NO: 4157365 - DNA, 25 bp, Homo sapien
gcagtattaatattgctaacctcca

SEQ ID NO: 4157366 - DNA, 25 bp, Homo sapien
aggactaaactgaagcacatcgtag

SEQ ID NO: 4157367 - DNA, 25 bp, Homo sapien
cacatcgtagtaagcgaggctacta

SEQ ID NO: 4157368 - DNA, 25 bp, Homo sapien
aacctctttgaggaccttctgagtc

SEQ ID NO: 4157369 - DNA, 25 bp, Homo sapien
tactatagtggtagatgtcttcaga

SEQ ID NO: 4157370 - DNA, 25 bp, Homo sapien
tcaagggacttttatcatgtgtaca

SEQ ID NO: 4157371 - DNA, 25 bp, Homo sapien
tgtatatgcctttttacctccgaca

SEQ ID NO: 4157372 - DNA, 25 bp, Homo sapien
gggaaatctgatgtatatgcctttt

SEQ ID NO: 4157373 - DNA, 25 bp, Homo sapien
ctttttacctccgacattttcatgt

SEQ ID NO: 4157374 - DNA, 25 bp, Homo sapien
aactccacgtaaagggaaatctgat

SEQ ID NO: 4157375 - DNA, 25 bp, Homo sapien
caaggactttccaactgtcctctct

SEQ ID NO: 4157376 - DNA, 25 bp, Homo sapien
tgtcctctctggagagacatatatg

SEQ ID NO: 4157377 - DNA, 25 bp, Homo sapien
aactgtcctctctggagagacatat

SEQ ID NO: 4157378 - DNA, 25 bp, Homo sapien
tcaaggactttccaactgtcctctc

SEQ ID NO: 4157379 - DNA, 25 bp, Homo sapien
gaaaagatcctcagttgtcttctgc

SEQ ID NO: 4157380 - DNA, 25 bp, Homo sapien
aaaagatcctcagttgtcttctgcc

SEQ ID NO: 4157381 - DNA, 25 bp, Homo sapien
ctccttcttcatgatacatgatgct

SEQ ID NO: 4157382 - DNA, 25 bp, Homo sapien
ccttcttcatgatacatgatgctgt

SEQ ID NO: 4157383 - DNA, 25 bp, Homo sapien
tccttcttcatgatacatgatgctg

SEQ ID NO: 4157384 - DNA, 25 bp, Homo sapien
tctgttctactgtcccggtgctgca

SEQ ID NO: 4157385 - DNA, 25 bp, Homo sapien
tcagtcactttggtgctttcgtgag

SEQ ID NO: 4157386 - DNA, 25 bp, Homo sapien
ctgtaatacacggtcaattgagact

SEQ ID NO: 4157387 - DNA, 25 bp, Homo sapien
ggtgctttcgtgagtatttctgtaa

SEQ ID NO: 4157388 - DNA, 25 bp, Homo sapien
cttctcttcgaatatcactaccagg

SEQ ID NO: 4157389 - DNA, 25 bp, Homo sapien
tctcttcgaatatcactaccaggta

SEQ ID NO: 4157390 - DNA, 25 bp, Homo sapien
tcttcgaatatcactaccaggtacc

SEQ ID NO: 4157391 - DNA, 25 bp, Homo sapien
ttcgaatatcactaccaggtaccat

SEQ ID NO: 4157392 - DNA, 25 bp, Homo sapien
atttctcttcattatcagggacatc

SEQ ID NO: 4157393 - DNA, 25 bp, Homo sapien
tcatttctcttcattatcagggaca

SEQ ID NO: 4157394 - DNA, 25 bp, Homo sapien
catttctcttcattatcagggacat

SEQ ID NO: 4157395 - DNA, 25 bp, Homo sapien
agatctcccttgttactagaagcca

SEQ ID NO: 4157396 - DNA, 25 bp, Homo sapien
gatctcccttgttactagaagccat

SEQ ID NO: 4157397 - DNA, 25 bp, Homo sapien
aagatctcccttgttactagaagcc

SEQ ID NO: 4157398 - DNA, 25 bp, Homo sapien
tgtcttgtcaagtggaatatcgtaa

SEQ ID NO: 4157399 - DNA, 25 bp, Homo sapien
caagtggaatatcgtaatagtctag

SEQ ID NO: 4157400 - DNA, 25 bp, Homo sapien
ggaatatcgtaatagtctagaaatc

SEQ ID NO: 4157401 - DNA, 25 bp, Homo sapien
gccaagatgtcttgtcaagtggaat

SEQ ID NO: 4157402 - DNA, 25 bp, Homo sapien
cagtttggctcaactcttgctcgta

SEQ ID NO: 4157403 - DNA, 25 bp, Homo sapien
ctataaactgttgttcagtttggct

SEQ ID NO: 4157404 - DNA, 25 bp, Homo sapien
tttggctcaactcttgctcgtaaac

SEQ ID NO: 4157405 - DNA, 25 bp, Homo sapien
tataaactgttgttcagtttggctc

SEQ ID NO: 4157406 - DNA, 25 bp, Homo sapien
tttcgggctcagtgtggtgtagttt

SEQ ID NO: 4157407 - DNA, 25 bp, Homo sapien
ttaggtgtgagttcagtggccctca

SEQ ID NO: 4157408 - DNA, 25 bp, Homo sapien
ctgtttcgggctcagtgtggtgtag

SEQ ID NO: 4157409 - DNA, 25 bp, Homo sapien
gcttaggtgtgagttcagtggccct

SEQ ID NO: 4157410 - DNA, 25 bp, Homo sapien
ccttcgcagtccatgctgggctttt

SEQ ID NO: 4157411 - DNA, 25 bp, Homo sapien
gagatatagagccttcgcagtccat

SEQ ID NO: 4157412 - DNA, 25 bp, Homo sapien
aacatttcccaactgggagatatag

SEQ ID NO: 4157413 - DNA, 25 bp, Homo sapien
tttgccttctatgggaataacttta

SEQ ID NO: 4157414 - DNA, 25 bp, Homo sapien
gggaaatagattcaggtgaagcctt

SEQ ID NO: 4157415 - DNA, 25 bp, Homo sapien
caagtcttttgttccacaatggaga

SEQ ID NO: 4157416 - DNA, 25 bp, Homo sapien
catgggcacttcttagggcttttcc

SEQ ID NO: 4157417 - DNA, 25 bp, Homo sapien
caggcacagctgttagagaccccat

SEQ ID NO: 4157418 - DNA, 25 bp, Homo sapien
ttcactttgatgtagacaaaaccat

SEQ ID NO: 4157419 - DNA, 25 bp, Homo sapien
tgtagacaaaaccataatttagcat

SEQ ID NO: 4157420 - DNA, 25 bp, Homo sapien
tgatgtagacaaaaccataatttag

SEQ ID NO: 4157421 - DNA, 25 bp, Homo sapien
cactttgatgtagacaaaaccataa

SEQ ID NO: 4157422 - DNA, 25 bp, Homo sapien
tgtggctcttttcttgcaaatcacc

SEQ ID NO: 4157423 - DNA, 25 bp, Homo sapien
gatgactgctttgtctgtggctctt

SEQ ID NO: 4157424 - DNA, 25 bp, Homo sapien
gtggctcttttcttgcaaatcacca

SEQ ID NO: 4157425 - DNA, 25 bp, Homo sapien
ctttgatgactgctttgtctgtggc

SEQ ID NO: 4157426 - DNA, 25 bp, Homo sapien
ttctccaggtcctaatctactgtct

SEQ ID NO: 4157427 - DNA, 25 bp, Homo sapien
tgtctttaggggcaatccactctac

SEQ ID NO: 4157428 - DNA, 25 bp, Homo sapien
aggtcctaatctactgtctttaggg

SEQ ID NO: 4157429 - DNA, 25 bp, Homo sapien
atccactctactccgggctgcctct

SEQ ID NO: 4157430 - DNA, 25 bp, Homo sapien
tagggacataggtagacagagcact

SEQ ID NO: 4157431 - DNA, 25 bp, Homo sapien
gagcactggttgaaagagctccgtg

SEQ ID NO: 4157432 - DNA, 25 bp, Homo sapien
agagcactggttgaaagagctccgt

SEQ ID NO: 4157433 - DNA, 25 bp, Homo sapien
ctagggacataggtagacagagcac

SEQ ID NO: 4157434 - DNA, 25 bp, Homo sapien
cattactttcctgggacaagtattg

SEQ ID NO: 4157435 - DNA, 25 bp, Homo sapien
ttgacagggagcgtggttgccacat

SEQ ID NO: 4157436 - DNA, 25 bp, Homo sapien
gaaccccagtcactgtttcagacat

SEQ ID NO: 4157437 - DNA, 25 bp, Homo sapien
gccacataggtcacagagtttagct

SEQ ID NO: 4157438 - DNA, 25 bp, Homo sapien
gccacgtcaggatcagtctgcatac

SEQ ID NO: 4157439 - DNA, 25 bp, Homo sapien
tgccacgtcaggatcagtctgcata

SEQ ID NO: 4157440 - DNA, 25 bp, Homo sapien
cagtcacattccactgaacgctgct

SEQ ID NO: 4157441 - DNA, 25 bp, Homo sapien
ttagagaggtatagtgggcaatgta

SEQ ID NO: 4157442 - DNA, 25 bp, Homo sapien
catgagcagttagagaggtatagtg

SEQ ID NO: 4157443 - DNA, 25 bp, Homo sapien
agagggtccgcatgaggaggccatg

SEQ ID NO: 4157444 - DNA, 25 bp, Homo sapien
catgaggaggccatgagcagttaga

SEQ ID NO: 4157445 - DNA, 25 bp, Homo sapien
gctgcaggttccacggcatagatat

SEQ ID NO: 4157446 - DNA, 25 bp, Homo sapien
tccacggcatagatatcagttacag

SEQ ID NO: 4157447 - DNA, 25 bp, Homo sapien
agtgatgactgctgaatttctcaat

SEQ ID NO: 4157448 - DNA, 25 bp, Homo sapien
gcaattgctgcaggttccacggcat

SEQ ID NO: 4157449 - DNA, 25 bp, Homo sapien
tgagctgtagctcctcatttccaac

SEQ ID NO: 4157450 - DNA, 25 bp, Homo sapien
tccaacattagtgtttaagtgttta

SEQ ID NO: 4157451 - DNA, 25 bp, Homo sapien
ttagtgtttaagtgtttaacaggca

SEQ ID NO: 4157452 - DNA, 25 bp, Homo sapien
ctcatttccaacattagtgtttaag

SEQ ID NO: 4157453 - DNA, 25 bp, Homo sapien
attgtaagaattccagatgataagt

SEQ ID NO: 4157454 - DNA, 25 bp, Homo sapien
tcattgtttataatactgaaatcga

SEQ ID NO: 4157455 - DNA, 25 bp, Homo sapien
tgtaagaattccagatgataagttc

SEQ ID NO: 4157456 - DNA, 25 bp, Homo sapien
tataatactgaaatcgacattcaat

SEQ ID NO: 4157457 - DNA, 25 bp, Homo sapien
gatccacagttctcatacataaaat

SEQ ID NO: 4157458 - DNA, 25 bp, Homo sapien
ggagatccagatgaaagcgttctag

SEQ ID NO: 4157459 - DNA, 25 bp, Homo sapien
tggagatccagatgaaagcgttcta

SEQ ID NO: 4157460 - DNA, 25 bp, Homo sapien
tccacagttctcatacataaaattg

SEQ ID NO: 4157461 - DNA, 25 bp, Homo sapien
caggaaaccggatgcaagcacaatg

SEQ ID NO: 4157462 - DNA, 25 bp, Homo sapien
tggtctttcccgctttgccagtagt

SEQ ID NO: 4157463 - DNA, 25 bp, Homo sapien
tagttcccctacttgaatgattaag

SEQ ID NO: 4157464 - DNA, 25 bp, Homo sapien
gctttgactgcttaaaattgagccc

SEQ ID NO: 4157465 - DNA, 25 bp, Homo sapien
ggacaatagcgtgcattttgtaagg

SEQ ID NO: 4157466 - DNA, 25 bp, Homo sapien
caatagcgtgcattttgtaagggca

SEQ ID NO: 4157467 - DNA, 25 bp, Homo sapien
acaatagcgtgcattttgtaagggc

SEQ ID NO: 4157468 - DNA, 25 bp, Homo sapien
ttggacaatagcgtgcattttgtaa

SEQ ID NO: 4157469 - DNA, 25 bp, Homo sapien
agttttcagtcagataatagtagag

SEQ ID NO: 4157470 - DNA, 25 bp, Homo sapien
tcagataatagtagagaacttcaga

SEQ ID NO: 4157471 - DNA, 25 bp, Homo sapien
gacttagagcaggtgagtaatcggc

SEQ ID NO: 4157472 - DNA, 25 bp, Homo sapien
cttagagcaggtgagtaatcggccg

SEQ ID NO: 4157473 - DNA, 25 bp, Homo sapien
caactttgatcacttcttcaaccat

SEQ ID NO: 4157474 - DNA, 25 bp, Homo sapien
catatcccatagaatggaggtggaa

SEQ ID NO: 4157475 - DNA, 25 bp, Homo sapien
caaacatatgcccttacaaagattg

SEQ ID NO: 4157476 - DNA, 25 bp, Homo sapien
gatttaatatcttgtcgctctgcca

SEQ ID NO: 4157477 - DNA, 25 bp, Homo sapien
ggtacaccttgctaattcagtaaaa

SEQ ID NO: 4157478 - DNA, 25 bp, Homo sapien
tgagtaaggtttatggtgcaaggtc

SEQ ID NO: 4157479 - DNA, 25 bp, Homo sapien
agtaaggtttatggtgcaaggtctg

SEQ ID NO: 4157480 - DNA, 25 bp, Homo sapien
tggacagtccggtggggtccctgct

SEQ ID NO: 4157481 - DNA, 25 bp, Homo sapien
cttgagtaaggtttatggtgcaagg

SEQ ID NO: 4157482 - DNA, 25 bp, Homo sapien
agtagcctatagtcagtgaacaagt

SEQ ID NO: 4157483 - DNA, 25 bp, Homo sapien
gcagtagcctatagtcagtgaacaa

SEQ ID NO: 4157484 - DNA, 25 bp, Homo sapien
tgcagtagcctatagtcagtgaaca

SEQ ID NO: 4157485 - DNA, 25 bp, Homo sapien
cagtagcctatagtcagtgaacaag

SEQ ID NO: 4157486 - DNA, 25 bp, Homo sapien
aacactggcattgtagtctgtacgg

SEQ ID NO: 4157487 - DNA, 25 bp, Homo sapien
ctgatactcaatatgtgctcggggc

SEQ ID NO: 4157488 - DNA, 25 bp, Homo sapien
tacggagagccttgatattcttgcc

SEQ ID NO: 4157489 - DNA, 25 bp, Homo sapien
tactcaatatgtgctcggggccact

SEQ ID NO: 4157490 - DNA, 25 bp, Homo sapien
gccctcttccaaggtagggatgatt

SEQ ID NO: 4157491 - DNA, 25 bp, Homo sapien
ccaaggtagggatgattttcttcag

SEQ ID NO: 4157492 - DNA, 25 bp, Homo sapien
ttctccaattgtgtcaataccagca

SEQ ID NO: 4157493 - DNA, 25 bp, Homo sapien
tgcaggccctcttccaaggtaggga

SEQ ID NO: 4157494 - DNA, 25 bp, Homo sapien
gtgttggtaacttaagcattccaca

SEQ ID NO: 4157495 - DNA, 25 bp, Homo sapien
cattccacagcaacagattcgagcg

SEQ ID NO: 4157496 - DNA, 25 bp, Homo sapien
tttatagtgttggtaacttaagcat

SEQ ID NO: 4157497 - DNA, 25 bp, Homo sapien
caacagattcgagcggcagctggct

SEQ ID NO: 4157498 - DNA, 25 bp, Homo sapien
cctgctagactctgatgaatcaaca

SEQ ID NO: 4157499 - DNA, 25 bp, Homo sapien
cttcgaccccaataattcctcctgc

SEQ ID NO: 4157500 - DNA, 25 bp, Homo sapien
atgaatcaacagcctcaactcgcag

SEQ ID NO: 4157501 - DNA, 25 bp, Homo sapien
cagcctcaactcgcagtcaaagtca

SEQ ID NO: 4157502 - DNA, 25 bp, Homo sapien
gcattcctggaaaagcttgatggtg

SEQ ID NO: 4157503 - DNA, 25 bp, Homo sapien
tgatggtggtttgagtgttctctcg

SEQ ID NO: 4157504 - DNA, 25 bp, Homo sapien
cttgtcagtggaataaggacagcat

SEQ ID NO: 4157505 - DNA, 25 bp, Homo sapien
tggtggtttgagtgttctctcgaag

SEQ ID NO: 4157506 - DNA, 25 bp, Homo sapien
ggatgatctttatgcactctacaac

SEQ ID NO: 4157507 - DNA, 25 bp, Homo sapien
ctcatatataagatcaaggatgatc

SEQ ID NO: 4157508 - DNA, 25 bp, Homo sapien
ggagactcatatataagatcaagga

SEQ ID NO: 4157509 - DNA, 25 bp, Homo sapien
tttgatgggagactcatatataaga

SEQ ID NO: 4157510 - DNA, 25 bp, Homo sapien
aaaccaccataatcataggtttcat

SEQ ID NO: 4157511 - DNA, 25 bp, Homo sapien
aaaaccaccataatcataggtttca

SEQ ID NO: 4157512 - DNA, 25 bp, Homo sapien
taaaaccaccataatcataggtttc

SEQ ID NO: 4157513 - DNA, 25 bp, Homo sapien
actgggcgtccacagcggtcatcaa

SEQ ID NO: 4157514 - DNA, 25 bp, Homo sapien
ctgggcgtccacagcggtcatcaaa

SEQ ID NO: 4157515 - DNA, 25 bp, Homo sapien
ggcgtccacagcggtcatcaaacat

SEQ ID NO: 4157516 - DNA, 25 bp, Homo sapien
atgccatggtaacagtctccaggtc

SEQ ID NO: 4157517 - DNA, 25 bp, Homo sapien
catggtaacagtctccaggtctccc

SEQ ID NO: 4157518 - DNA, 25 bp, Homo sapien
gcactgaaaccaaccatgccatggt

SEQ ID NO: 4157519 - DNA, 25 bp, Homo sapien
cactgaaaccaaccatgccatggta

SEQ ID NO: 4157520 - DNA, 25 bp, Homo sapien
aatcatatctggagccaccctgtgg

SEQ ID NO: 4157521 - DNA, 25 bp, Homo sapien
ataatcatatctggagccaccctgt

SEQ ID NO: 4157522 - DNA, 25 bp, Homo sapien
aggaataatcatatctggagccacc

SEQ ID NO: 4157523 - DNA, 25 bp, Homo sapien
gaataatcatatctggagccaccct

SEQ ID NO: 4157524 - DNA, 25 bp, Homo sapien
taatggtaatgatccaatcttccaa

SEQ ID NO: 4157525 - DNA, 25 bp, Homo sapien
tggtaatgatccaatcttccaatcc

SEQ ID NO: 4157526 - DNA, 25 bp, Homo sapien
taatgatccaatcttccaatccttc

SEQ ID NO: 4157527 - DNA, 25 bp, Homo sapien
ctaatggtaatgatccaatcttcca

SEQ ID NO: 4157528 - DNA, 25 bp, Homo sapien
gtcccacccccaagtgttacagtga

SEQ ID NO: 4157529 - DNA, 25 bp, Homo sapien
cagaatactgcgtcacactataaaa

SEQ ID NO: 4157530 - DNA, 25 bp, Homo sapien
atttcagtgttagtttttgcacacc

SEQ ID NO: 4157531 - DNA, 25 bp, Homo sapien
gcagaacacctgtgaagcagaggcg

SEQ ID NO: 4157532 - DNA, 25 bp, Homo sapien
agttcttcacagctactaacataga

SEQ ID NO: 4157533 - DNA, 25 bp, Homo sapien
gacacacttacatgtccaacagagg

SEQ ID NO: 4157534 - DNA, 25 bp, Homo sapien
acacacttacatgtccaacagagga

SEQ ID NO: 4157535 - DNA, 25 bp, Homo sapien
gaatcctctatgagaacagctgtca

SEQ ID NO: 4157536 - DNA, 25 bp, Homo sapien
cctctatgagaacagctgtcatcat

SEQ ID NO: 4157537 - DNA, 25 bp, Homo sapien
atcctctatgagaacagctgtcatc

SEQ ID NO: 4157538 - DNA, 25 bp, Homo sapien
ctgaatcctctatgagaacagctgt

SEQ ID NO: 4157539 - DNA, 25 bp, Homo sapien
aatagcaatggtgaccaagatttca

SEQ ID NO: 4157540 - DNA, 25 bp, Homo sapien
tcccaggggcaagtaaggctgatca

SEQ ID NO: 4157541 - DNA, 25 bp, Homo sapien
gatgttaggcaaagaggcaatagca

SEQ ID NO: 4157542 - DNA, 25 bp, Homo sapien
ccaagatttcaacgtacagctgttc

SEQ ID NO: 4157543 - DNA, 25 bp, Homo sapien
tagcactgtatagtctttcaaccat

SEQ ID NO: 4157544 - DNA, 25 bp, Homo sapien
taaaaggaagcccatgaaatggtga

SEQ ID NO: 4157545 - DNA, 25 bp, Homo sapien
atttcatctgcacactgctcatttg

SEQ ID NO: 4157546 - DNA, 25 bp, Homo sapien
ctcatttgtgttttcggaagaggat

SEQ ID NO: 4157547 - DNA, 25 bp, Homo sapien
catcagatggttaagacgtggcaca

SEQ ID NO: 4157548 - DNA, 25 bp, Homo sapien
tgtggacattaaaccattggcagcc

SEQ ID NO: 4157549 - DNA, 25 bp, Homo sapien
gaaactatgggatctgtcaagcagt

SEQ ID NO: 4157550 - DNA, 25 bp, Homo sapien
cttcagcagagggtaataaacagac

SEQ ID NO: 4157551 - DNA, 25 bp, Homo sapien
tgactttgctttaggatgcagtcca

SEQ ID NO: 4157552 - DNA, 25 bp, Homo sapien
cagattttgttaccccaatgtgcag

SEQ ID NO: 4157553 - DNA, 25 bp, Homo sapien
agtccaggtttaggtctgcatagta

SEQ ID NO: 4157554 - DNA, 25 bp, Homo sapien
gggacgtatccttctcataggcaca

SEQ ID NO: 4157555 - DNA, 25 bp, Homo sapien
agaggatatatagtcatggttgaac

SEQ ID NO: 4157556 - DNA, 25 bp, Homo sapien
cagaaatctacaaagccgtatttgc

SEQ ID NO: 4157557 - DNA, 25 bp, Homo sapien
catggttgaacaatggtttaatctc

SEQ ID NO: 4157558 - DNA, 25 bp, Homo sapien
tcttcaatggaagctgcccacagaa

SEQ ID NO: 4157559 - DNA, 25 bp, Homo sapien
gacaagatcagcttgttccaatagc

SEQ ID NO: 4157560 - DNA, 25 bp, Homo sapien
tgaagaaatgtattttgcagcttct

SEQ ID NO: 4157561 - DNA, 25 bp, Homo sapien
aattcaaggtgctagtgacaagatc

SEQ ID NO: 4157562 - DNA, 25 bp, Homo sapien
agcttcttgagagtaactgcttgca

SEQ ID NO: 4157563 - DNA, 25 bp, Homo sapien
gctactgtggctgctattgatgaag

SEQ ID NO: 4157564 - DNA, 25 bp, Homo sapien
gcggacatagttgagagctgctact

SEQ ID NO: 4157565 - DNA, 25 bp, Homo sapien
gttgagagctgctactgtggctgct

SEQ ID NO: 4157566 - DNA, 25 bp, Homo sapien
ccattttagccacttgcggacatag

SEQ ID NO: 4157567 - DNA, 25 bp, Homo sapien
gtttattgattattttcacccacat

SEQ ID NO: 4157568 - DNA, 25 bp, Homo sapien
caggaagtttattgattattttcac

SEQ ID NO: 4157569 - DNA, 25 bp, Homo sapien
gaagtttattgattattttcaccca

SEQ ID NO: 4157570 - DNA, 25 bp, Homo sapien
agtttattgattattttcacccaca

SEQ ID NO: 4157571 - DNA, 25 bp, Homo sapien
cctgggtttctggatctcagaagaa

SEQ ID NO: 4157572 - DNA, 25 bp, Homo sapien
tggatctcagaagaatcctttgatt

SEQ ID NO: 4157573 - DNA, 25 bp, Homo sapien
gggtttctggatctcagaagaatcc

SEQ ID NO: 4157574 - DNA, 25 bp, Homo sapien
atccctgggtttctggatctcagaa

SEQ ID NO: 4157575 - DNA, 25 bp, Homo sapien
tctctctttcatagatattcagatt

SEQ ID NO: 4157576 - DNA, 25 bp, Homo sapien
cttgatttacatcacatggttctgc

SEQ ID NO: 4157577 - DNA, 25 bp, Homo sapien
tattcacctccatttgggatgtcat

SEQ ID NO: 4157578 - DNA, 25 bp, Homo sapien
gatttacatcacatggttctgcaac

SEQ ID NO: 4157579 - DNA, 25 bp, Homo sapien
tgagccagggaaatcctggagttga

SEQ ID NO: 4157580 - DNA, 25 bp, Homo sapien
aggtgagccagggaaatcctggagt

SEQ ID NO: 4157581 - DNA, 25 bp, Homo sapien
aggcaggtgagccagggaaatcctg

SEQ ID NO: 4157582 - DNA, 25 bp, Homo sapien
agccagggaaatcctggagttgagc

SEQ ID NO: 4157583 - DNA, 25 bp, Homo sapien
tcactaggaagctgcacaaggtggt

SEQ ID NO: 4157584 - DNA, 25 bp, Homo sapien
tcaagctgagcatcatcactaggaa

SEQ ID NO: 4157585 - DNA, 25 bp, Homo sapien
gtactcctccttgatcacatgttct

SEQ ID NO: 4157586 - DNA, 25 bp, Homo sapien
gctgttgtagtgtgatgcgtcaagc

SEQ ID NO: 4157587 - DNA, 25 bp, Homo sapien
tgtgagtaattcaaaccagaaagtg

SEQ ID NO: 4157588 - DNA, 25 bp, Homo sapien
gtaattcaaaccagaaagtgaagtc

SEQ ID NO: 4157589 - DNA, 25 bp, Homo sapien
tcacttgtgagtaattcaaaccaga

SEQ ID NO: 4157590 - DNA, 25 bp, Homo sapien
ctaaacatcacttgtgagtaattca

SEQ ID NO: 4157591 - DNA, 25 bp, Homo sapien
cccctcatcacattgtacagagcag

SEQ ID NO: 4157592 - DNA, 25 bp, Homo sapien
acacccctcatcacattgtacagag

SEQ ID NO: 4157593 - DNA, 25 bp, Homo sapien
catcacattgtacagagcagtttct

SEQ ID NO: 4157594 - DNA, 25 bp, Homo sapien
cctcatcacattgtacagagcagtt

SEQ ID NO: 4157595 - DNA, 25 bp, Homo sapien
cattctatcttctaaacaaagaacc

SEQ ID NO: 4157596 - DNA, 25 bp, Homo sapien
gtttttcgatttgcattctatcttc

SEQ ID NO: 4157597 - DNA, 25 bp, Homo sapien
gcattctatcttctaaacaaagaac

SEQ ID NO: 4157598 - DNA, 25 bp, Homo sapien
accaaatagtttttcgatttgcatt

SEQ ID NO: 4157599 - DNA, 25 bp, Homo sapien
catttgggggcagacagacagtgac

SEQ ID NO: 4157600 - DNA, 25 bp, Homo sapien
cttgtactctcctagtgtgcccaag

SEQ ID NO: 4157601 - DNA, 25 bp, Homo sapien
gacagacagtgacccaccaccttgt

SEQ ID NO: 4157602 - DNA, 25 bp, Homo sapien
gcggtagatgggtggtctgtggcat

SEQ ID NO: 4157603 - DNA, 25 bp, Homo sapien
ctgatatgcaaagtaccggaaggga

SEQ ID NO: 4157604 - DNA, 25 bp, Homo sapien
ccggaagggagacttggcaacgaca

SEQ ID NO: 4157605 - DNA, 25 bp, Homo sapien
tgcaaagtaccggaagggagacttg

SEQ ID NO: 4157606 - DNA, 25 bp, Homo sapien
taccggaagggagacttggcaacga

SEQ ID NO: 4157607 - DNA, 25 bp, Homo sapien
atctcccctaaagacttcatcttct

SEQ ID NO: 4157608 - DNA, 25 bp, Homo sapien
tcccctaaagacttcatcttcttta

SEQ ID NO: 4157609 - DNA, 25 bp, Homo sapien
tctcccctaaagacttcatcttctt

SEQ ID NO: 4157610 - DNA, 25 bp, Homo sapien
aatctcccctaaagacttcatcttc

SEQ ID NO: 4157611 - DNA, 25 bp, Homo sapien
tgacagcgcccacgggggtcaggtc

SEQ ID NO: 4157612 - DNA, 25 bp, Homo sapien
tgccgctctgggagtcatagcccag

SEQ ID NO: 4157613 - DNA, 25 bp, Homo sapien
tgggtgacagcgcccacgggggtca

SEQ ID NO: 4157614 - DNA, 25 bp, Homo sapien
gtgccgctctgggagtcatagccca

SEQ ID NO: 4157615 - DNA, 25 bp, Homo sapien
agggcacggtgctgggcgcccgtgt

SEQ ID NO: 4157616 - DNA, 25 bp, Homo sapien
ggtgctgggcgcccgtgtttcggta

SEQ ID NO: 4157617 - DNA, 25 bp, Homo sapien
gggcacggtgctgggcgcccgtgtt

SEQ ID NO: 4157618 - DNA, 25 bp, Homo sapien
ctgggcgcccgtgtttcggtagcac

SEQ ID NO: 4157619 - DNA, 25 bp, Homo sapien
acggcaggccggcgggcacctgctg

SEQ ID NO: 4157620 - DNA, 25 bp, Homo sapien
cttgacggcaggccggcgggcacct

SEQ ID NO: 4157621 - DNA, 25 bp, Homo sapien
ggcaggccggcgggcacctgctggc

SEQ ID NO: 4157622 - DNA, 25 bp, Homo sapien
ggcgggcacctgctggctgcgatct

SEQ ID NO: 4157623 - DNA, 25 bp, Homo sapien
gcttgtgctgatggcgcaggaccca

SEQ ID NO: 4157624 - DNA, 25 bp, Homo sapien
gttggatctcttggtggtgaagtgt

SEQ ID NO: 4157625 - DNA, 25 bp, Homo sapien
gtgttggatctcttggtggtgaagt

SEQ ID NO: 4157626 - DNA, 25 bp, Homo sapien
cccagtggggcagtgggaactggat

SEQ ID NO: 4157627 - DNA, 25 bp, Homo sapien
tttttatctttaactgtgataccta

SEQ ID NO: 4157628 - DNA, 25 bp, Homo sapien
ttatctttaactgtgatacctacaa

SEQ ID NO: 4157629 - DNA, 25 bp, Homo sapien
tttatctttaactgtgatacctaca

SEQ ID NO: 4157630 - DNA, 25 bp, Homo sapien
atctttaactgtgatacctacaata

SEQ ID NO: 4157631 - DNA, 25 bp, Homo sapien
tttcctttgggaagacgatttcatc

SEQ ID NO: 4157632 - DNA, 25 bp, Homo sapien
tgggaagacgatttcatctatgata

SEQ ID NO: 4157633 - DNA, 25 bp, Homo sapien
cagagaactggactttattggtttc

SEQ ID NO: 4157634 - DNA, 25 bp, Homo sapien
tgttaaaacagagaactggacttta

SEQ ID NO: 4157635 - DNA, 25 bp, Homo sapien
cattgaaatcctgagttcccctttt

SEQ ID NO: 4157636 - DNA, 25 bp, Homo sapien
cacattgaaatcctgagttcccctt

SEQ ID NO: 4157637 - DNA, 25 bp, Homo sapien
ttcacattgaaatcctgagttcccc

SEQ ID NO: 4157638 - DNA, 25 bp, Homo sapien
tcattcacattgaaatcctgagttc

SEQ ID NO: 4157639 - DNA, 25 bp, Homo sapien
ccgtcctcaaggtcgttgctgctgt

SEQ ID NO: 4157640 - DNA, 25 bp, Homo sapien
gggcccagtggagctccagaccgtc

SEQ ID NO: 4157641 - DNA, 25 bp, Homo sapien
tccttggtgtacttaggctgagtga

SEQ ID NO: 4157642 - DNA, 25 bp, Homo sapien
gctgttgcagtgcttccgccgcgtg

SEQ ID NO: 4157643 - DNA, 25 bp, Homo sapien
tcaaatcaaaagttgcccattgtac

SEQ ID NO: 4157644 - DNA, 25 bp, Homo sapien
gctgccggcaggatcacttcatggc

SEQ ID NO: 4157645 - DNA, 25 bp, Homo sapien
catggctaagacctttgatgagtct

SEQ ID NO: 4157646 - DNA, 25 bp, Homo sapien
tggtgttgtcatgtcccagatgccc

SEQ ID NO: 4157647 - DNA, 25 bp, Homo sapien
cctttgatgagtctgggagcttcct

SEQ ID NO: 4157648 - DNA, 25 bp, Homo sapien
gcatctgtctggttaccacgaccca

SEQ ID NO: 4157649 - DNA, 25 bp, Homo sapien
tccattatcacactgaattcaactc

SEQ ID NO: 4157650 - DNA, 25 bp, Homo sapien
aatgggctggcctttataccttgtc

SEQ ID NO: 4157651 - DNA, 25 bp, Homo sapien
gaattcaactccacaggtcattttg

SEQ ID NO: 4157652 - DNA, 25 bp, Homo sapien
ggatgaagacagccaatcgcagggg

SEQ ID NO: 4157653 - DNA, 25 bp, Homo sapien
agtaatattctaatggctgcatcgg

SEQ ID NO: 4157654 - DNA, 25 bp, Homo sapien
gacagccaatcgcaggggcaccagt

SEQ ID NO: 4157655 - DNA, 25 bp, Homo sapien
gtaatattctaatggctgcatcggg

SEQ ID NO: 4157656 - DNA, 25 bp, Homo sapien
tcattcaaccatttggtacaggcag

SEQ ID NO: 4157657 - DNA, 25 bp, Homo sapien
cacaggctgtgtctcattcaaccat

SEQ ID NO: 4157658 - DNA, 25 bp, Homo sapien
caaaaccagcgtgtagttagtgcca

SEQ ID NO: 4157659 - DNA, 25 bp, Homo sapien
cgtgtagttagtgccacaggctgtg

SEQ ID NO: 4157660 - DNA, 25 bp, Homo sapien
caaagagcacgtgtaaccatcataa

SEQ ID NO: 4157661 - DNA, 25 bp, Homo sapien
ccagcaaagagcacgtgtaaccatc

SEQ ID NO: 4157662 - DNA, 25 bp, Homo sapien
gcaaagagcacgtgtaaccatcata

SEQ ID NO: 4157663 - DNA, 25 bp, Homo sapien
cagcaaagagcacgtgtaaccatca

SEQ ID NO: 4157664 - DNA, 25 bp, Homo sapien
gtttcagaaacaggacggccagtac

SEQ ID NO: 4157665 - DNA, 25 bp, Homo sapien
caactgctgtgacaaggctctggct

SEQ ID NO: 4157666 - DNA, 25 bp, Homo sapien
gctggcaaatctctaactggcaact

SEQ ID NO: 4157667 - DNA, 25 bp, Homo sapien
gaagagcactactcccagtttcaga

SEQ ID NO: 4157668 - DNA, 25 bp, Homo sapien
agaatgcggagctccactgctcccg

SEQ ID NO: 4157669 - DNA, 25 bp, Homo sapien
ccgccgccctctagaatgcggagct

SEQ ID NO: 4157670 - DNA, 25 bp, Homo sapien
ttgtgcaggctccgctcctctgtcg

SEQ ID NO: 4157671 - DNA, 25 bp, Homo sapien
cggtcctgccttcgcccagccaggt

SEQ ID NO: 4157672 - DNA, 25 bp, Homo sapien
ccattcttcacagccttggtggtgg

SEQ ID NO: 4157673 - DNA, 25 bp, Homo sapien
ctttccattcttcacagccttggtg

SEQ ID NO: 4157674 - DNA, 25 bp, Homo sapien
ttggtggtggcccctgggcccgcag

SEQ ID NO: 4157675 - DNA, 25 bp, Homo sapien
tccattcttcacagccttggtggtg

SEQ ID NO: 4157676 - DNA, 25 bp, Homo sapien
tgaacccccaggcctctgtaatcaa

SEQ ID NO: 4157677 - DNA, 25 bp, Homo sapien
atttgcattgcctgaacccccaggc

SEQ ID NO: 4157678 - DNA, 25 bp, Homo sapien
gaacccccaggcctctgtaatcaac

SEQ ID NO: 4157679 - DNA, 25 bp, Homo sapien
cttatttgcattgcctgaaccccca

SEQ ID NO: 4157680 - DNA, 25 bp, Homo sapien
gatcttgtctcttcaatatcttctt

SEQ ID NO: 4157681 - DNA, 25 bp, Homo sapien
ctggatcttgtctcttcaatatctt

SEQ ID NO: 4157682 - DNA, 25 bp, Homo sapien
tctcttcaatatcttcttccttttc

SEQ ID NO: 4157683 - DNA, 25 bp, Homo sapien
ctcttcaatatcttcttccttttca

SEQ ID NO: 4157684 - DNA, 25 bp, Homo sapien
ccaccacctccgccttcttcccagt

SEQ ID NO: 4157685 - DNA, 25 bp, Homo sapien
cctccgccttcttcccagttatcac

SEQ ID NO: 4157686 - DNA, 25 bp, Homo sapien
acctccgccttcttcccagttatca

SEQ ID NO: 4157687 - DNA, 25 bp, Homo sapien
ccacctccgccttcttcccagttat

SEQ ID NO: 4157688 - DNA, 25 bp, Homo sapien
gctgttttattccagggacctgaag

SEQ ID NO: 4157689 - DNA, 25 bp, Homo sapien
cagagctgttttattccagggacct

SEQ ID NO: 4157690 - DNA, 25 bp, Homo sapien
tgttttattccagggacctgaagat

SEQ ID NO: 4157691 - DNA, 25 bp, Homo sapien
agctgttttattccagggacctgaa

SEQ ID NO: 4157692 - DNA, 25 bp, Homo sapien
caccactagtcattgccagttctgg

SEQ ID NO: 4157693 - DNA, 25 bp, Homo sapien
cacaccactagtcattgccagttct

SEQ ID NO: 4157694 - DNA, 25 bp, Homo sapien
gtcattgccagttctggggtttctg

SEQ ID NO: 4157695 - DNA, 25 bp, Homo sapien
actagtcattgccagttctggggtt

SEQ ID NO: 4157696 - DNA, 25 bp, Homo sapien
tccagctttctatgtgcttggcagt

SEQ ID NO: 4157697 - DNA, 25 bp, Homo sapien
ccttcattgtattgtgagtgactcc

SEQ ID NO: 4157698 - DNA, 25 bp, Homo sapien
tccttcattgtattgtgagtgactc

SEQ ID NO: 4157699 - DNA, 25 bp, Homo sapien
ggtggttagctgtagtctatttatc

SEQ ID NO: 4157700 - DNA, 25 bp, Homo sapien
tttatctcagaaggtttagcaaagc

SEQ ID NO: 4157701 - DNA, 25 bp, Homo sapien
gctgactagacgcatctgttcttta

SEQ ID NO: 4157702 - DNA, 25 bp, Homo sapien
gagaaaagtgacagggaacttctga

SEQ ID NO: 4157703 - DNA, 25 bp, Homo sapien
tccactaagaagaacaaaagtaatg

SEQ ID NO: 4157704 - DNA, 25 bp, Homo sapien
ttattcaaagggatgggcttcaaca

SEQ ID NO: 4157705 - DNA, 25 bp, Homo sapien
gggagcgcctcaccgcgaggacggg

SEQ ID NO: 4157706 - DNA, 25 bp, Homo sapien
ctcaagtgggcacttgcggagccaa

SEQ ID NO: 4157707 - DNA, 25 bp, Homo sapien
gcgcgcgcaagagcgagctcgggct

SEQ ID NO: 4157708 - DNA, 25 bp, Homo sapien
aggacctctcccgactcaagtgggc

SEQ ID NO: 4157709 - DNA, 25 bp, Homo sapien
cagtgtcccgcttgcgcgaggacta

SEQ ID NO: 4157710 - DNA, 25 bp, Homo sapien
ggaggcgaggggaattgcatccacc

SEQ ID NO: 4157711 - DNA, 25 bp, Homo sapien
agctgcttcggaggaggacgctgcc

SEQ ID NO: 4157712 - DNA, 25 bp, Homo sapien
cacagtgtcccgcttgcgcgaggac

SEQ ID NO: 4157713 - DNA, 25 bp, Homo sapien
tcccttaaagagaagtggcggcagc

SEQ ID NO: 4157714 - DNA, 25 bp, Homo sapien
ccttaaagagaagtggcggcagcgc

SEQ ID NO: 4157715 - DNA, 25 bp, Homo sapien
cccttaaagagaagtggcggcagcg

SEQ ID NO: 4157716 - DNA, 25 bp, Homo sapien
tctcccttaaagagaagtggcggca

SEQ ID NO: 4157717 - DNA, 25 bp, Homo sapien
tgcaaaagaaattcccggacttcgc

SEQ ID NO: 4157718 - DNA, 25 bp, Homo sapien
gcaaaagaaattcccggacttcgca

SEQ ID NO: 4157719 - DNA, 25 bp, Homo sapien
ttgttggagacgtgactgcagtcgc

SEQ ID NO: 4157720 - DNA, 25 bp, Homo sapien
acgtgactgcagtcgcctggccacg

SEQ ID NO: 4157721 - DNA, 25 bp, Homo sapien
gacccactcaaggccaatcagattt

SEQ ID NO: 4157722 - DNA, 25 bp, Homo sapien
cggatgcctacattccaggtgttgc

SEQ ID NO: 4157723 - DNA, 25 bp, Homo sapien
caggtgttgcactggttgatggcaa

SEQ ID NO: 4157724 - DNA, 25 bp, Homo sapien
tcagctgagttatacaaggagaaga

SEQ ID NO: 4157725 - DNA, 25 bp, Homo sapien
tcactttttgccttttattccattc

SEQ ID NO: 4157726 - DNA, 25 bp, Homo sapien
cactttttgccttttattccattct

SEQ ID NO: 4157727 - DNA, 25 bp, Homo sapien
accggccggtaatcaggactcagta

SEQ ID NO: 4157728 - DNA, 25 bp, Homo sapien
gttcttgcccactccagaattgtac

SEQ ID NO: 4157729 - DNA, 25 bp, Homo sapien
ttggtttgaattggcagtgttcttg

SEQ ID NO: 4157730 - DNA, 25 bp, Homo sapien
agacaccggccggtaatcaggactc

SEQ ID NO: 4157731 - DNA, 25 bp, Homo sapien
cacaggtgcatgatataagagtact

SEQ ID NO: 4157732 - DNA, 25 bp, Homo sapien
ttcgtggcagctgcaacacaggtgc

SEQ ID NO: 4157733 - DNA, 25 bp, Homo sapien
tctgaagaagggtaggtatttcctc

SEQ ID NO: 4157734 - DNA, 25 bp, Homo sapien
tcaatacaatgttccatcccgggac

SEQ ID NO: 4157735 - DNA, 25 bp, Homo sapien
tgagcatttgagacagtaccctttc

SEQ ID NO: 4157736 - DNA, 25 bp, Homo sapien
tgagacagtaccctttctaaaggct

SEQ ID NO: 4157737 - DNA, 25 bp, Homo sapien
gcatttgagacagtaccctttctaa

SEQ ID NO: 4157738 - DNA, 25 bp, Homo sapien
taagatcacatcatgccaccaggaa

SEQ ID NO: 4157739 - DNA, 25 bp, Homo sapien
tagtcattttcaacttcttcctcac

SEQ ID NO: 4157740 - DNA, 25 bp, Homo sapien
ttagtcattttcaacttcttcctca

SEQ ID NO: 4157741 - DNA, 25 bp, Homo sapien
acagttgttgtatcaagcaacacaa

SEQ ID NO: 4157742 - DNA, 25 bp, Homo sapien
tctcccagtacagttgttgtatcaa

SEQ ID NO: 4157743 - DNA, 25 bp, Homo sapien
ccagtacagttgttgtatcaagcaa

SEQ ID NO: 4157744 - DNA, 25 bp, Homo sapien
cctagctctcccagtacagttgttg

SEQ ID NO: 4157745 - DNA, 25 bp, Homo sapien
tgctgacatgtgcttcaacagggac

SEQ ID NO: 4157746 - DNA, 25 bp, Homo sapien
gtgctgacatgtgcttcaacaggga

SEQ ID NO: 4157747 - DNA, 25 bp, Homo sapien
tgtgctgacatgtgcttcaacaggg

SEQ ID NO: 4157748 - DNA, 25 bp, Homo sapien
gctgacatgtgcttcaacagggaca

SEQ ID NO: 4157749 - DNA, 25 bp, Homo sapien
caggtgctaactaccttaatctttc

SEQ ID NO: 4157750 - DNA, 25 bp, Homo sapien
tctctacaggtgctaactaccttaa

SEQ ID NO: 4157751 - DNA, 25 bp, Homo sapien
aacttggtcatctctacaggtgcta

SEQ ID NO: 4157752 - DNA, 25 bp, Homo sapien
ggtcatctctacaggtgctaactac

SEQ ID NO: 4157753 - DNA, 25 bp, Homo sapien
cacaaatggtactgggcctgtaatc

SEQ ID NO: 4157754 - DNA, 25 bp, Homo sapien
tcacaaatggtactgggcctgtaat

SEQ ID NO: 4157755 - DNA, 25 bp, Homo sapien
aaagcatagatcacataggacctac

SEQ ID NO: 4157756 - DNA, 25 bp, Homo sapien
agaggaaggcgaaccccaatgcaat

SEQ ID NO: 4157757 - DNA, 25 bp, Homo sapien
gaagttaaggtagaaatattcaaga

SEQ ID NO: 4157758 - DNA, 25 bp, Homo sapien
gaaagtctcagctcttttaccaaga

SEQ ID NO: 4157759 - DNA, 25 bp, Homo sapien
gctggccttgcactcctgacctcaa

SEQ ID NO: 4157760 - DNA, 25 bp, Homo sapien
tgattttttctattttttgtagaga

SEQ ID NO: 4157761 - DNA, 25 bp, Homo sapien
cacatcccaggaataattctcctgc

SEQ ID NO: 4157762 - DNA, 25 bp, Homo sapien
gccaccatgcctcgctgattttttc

SEQ ID NO: 4157763 - DNA, 25 bp, Homo sapien
gagtggaaatctgagactgcaggat

SEQ ID NO: 4157764 - DNA, 25 bp, Homo sapien
caaagacggatgacacttgacccat

SEQ ID NO: 4157765 - DNA, 25 bp, Homo sapien
cagagtggaaatctgagactgcagg

SEQ ID NO: 4157766 - DNA, 25 bp, Homo sapien
aagacggatgacacttgacccattt

SEQ ID NO: 4157767 - DNA, 25 bp, Homo sapien
tcctgtctcggtccactgaatagct

SEQ ID NO: 4157768 - DNA, 25 bp, Homo sapien
tattttaagcaggttactgaccctg

SEQ ID NO: 4157769 - DNA, 25 bp, Homo sapien
ggtgaggcctcccagttcgggtctc

SEQ ID NO: 4157770 - DNA, 25 bp, Homo sapien
tgaattagtactcccctgggatgga

SEQ ID NO: 4157771 - DNA, 25 bp, Homo sapien
ccttttagcagtgttgaaaataggt

SEQ ID NO: 4157772 - DNA, 25 bp, Homo sapien
gagctgcagcatgtacatccagagg

SEQ ID NO: 4157773 - DNA, 25 bp, Homo sapien
ctatggagctgcagcatgtacatcc

SEQ ID NO: 4157774 - DNA, 25 bp, Homo sapien
tgcagcatgtacatccagaggagaa

SEQ ID NO: 4157775 - DNA, 25 bp, Homo sapien
cttcttgtctggatgggtgtagtga

SEQ ID NO: 4157776 - DNA, 25 bp, Homo sapien
tcttgtctggatgggtgtagtgagg

SEQ ID NO: 4157777 - DNA, 25 bp, Homo sapien
ttcttgtctggatgggtgtagtgag

SEQ ID NO: 4157778 - DNA, 25 bp, Homo sapien
cttgtctggatgggtgtagtgagga

SEQ ID NO: 4157779 - DNA, 25 bp, Homo sapien
aggttgttgaatgtacacgggtatc

SEQ ID NO: 4157780 - DNA, 25 bp, Homo sapien
tgttgaatgtacacgggtatctcat

SEQ ID NO: 4157781 - DNA, 25 bp, Homo sapien
ccaaataaactaaggttgttgaatg

SEQ ID NO: 4157782 - DNA, 25 bp, Homo sapien
taaactaaggttgttgaatgtacac

SEQ ID NO: 4157783 - DNA, 25 bp, Homo sapien
gagatccagtttgtacgaagccagt

SEQ ID NO: 4157784 - DNA, 25 bp, Homo sapien
gaaaacacggactgaaaccagggca

SEQ ID NO: 4157785 - DNA, 25 bp, Homo sapien
tgagtttgaggatgcgatcacccaa

SEQ ID NO: 4157786 - DNA, 25 bp, Homo sapien
tctgagctgcatcacgggagatcca

SEQ ID NO: 4157787 - DNA, 25 bp, Homo sapien
ttcttcatatcctgtactgcagatg

SEQ ID NO: 4157788 - DNA, 25 bp, Homo sapien
cttcatatcctgtactgcagatgca

SEQ ID NO: 4157789 - DNA, 25 bp, Homo sapien
ttcatatcctgtactgcagatgcac

SEQ ID NO: 4157790 - DNA, 25 bp, Homo sapien
tcttcatatcctgtactgcagatgc

SEQ ID NO: 4157791 - DNA, 25 bp, Homo sapien
tgaatatgcacaattactatttgtt

SEQ ID NO: 4157792 - DNA, 25 bp, Homo sapien
acccatgaatatgcacaattactat

SEQ ID NO: 4157793 - DNA, 25 bp, Homo sapien
acacccatgaatatgcacaattact

SEQ ID NO: 4157794 - DNA, 25 bp, Homo sapien
catgaatatgcacaattactatttg

SEQ ID NO: 4157795 - DNA, 25 bp, Homo sapien
taggcggatacagcaattcatattg

SEQ ID NO: 4157796 - DNA, 25 bp, Homo sapien
gcaattcatattgtttaacgacttt

SEQ ID NO: 4157797 - DNA, 25 bp, Homo sapien
aaaaattaggcggatacagcaattc

SEQ ID NO: 4157798 - DNA, 25 bp, Homo sapien
tgtttaacgactttactgaaagcac

SEQ ID NO: 4157799 - DNA, 25 bp, Homo sapien
agcattttgcgatgttaacatttcc

SEQ ID NO: 4157800 - DNA, 25 bp, Homo sapien
aaacaatgtgaaaggtatagttcta

SEQ ID NO: 4157801 - DNA, 25 bp, Homo sapien
ggtatagttctaaacttaactagca

SEQ ID NO: 4157802 - DNA, 25 bp, Homo sapien
cacgaaaattataggtatttcattg

SEQ ID NO: 4157803 - DNA, 25 bp, Homo sapien
gtgctttgtgatcattcacatcatg

SEQ ID NO: 4157804 - DNA, 25 bp, Homo sapien
cagtgctttgtgatcattcacatca

SEQ ID NO: 4157805 - DNA, 25 bp, Homo sapien
tttgtgatcattcacatcatgtgat

SEQ ID NO: 4157806 - DNA, 25 bp, Homo sapien
gctttgtgatcattcacatcatgtg

SEQ ID NO: 4157807 - DNA, 25 bp, Homo sapien
aagcaaagttccagatgaatccata

SEQ ID NO: 4157808 - DNA, 25 bp, Homo sapien
tcaaaagtgatgcttaaatcttgct

SEQ ID NO: 4157809 - DNA, 25 bp, Homo sapien
aagtgatgcttaaatcttgctccag

SEQ ID NO: 4157810 - DNA, 25 bp, Homo sapien
gcaaagttccagatgaatccatatc

SEQ ID NO: 4157811 - DNA, 25 bp, Homo sapien
atgccagcaaatcctggtatctcat

SEQ ID NO: 4157812 - DNA, 25 bp, Homo sapien
ttctttatgctctctgcttgcacag

SEQ ID NO: 4157813 - DNA, 25 bp, Homo sapien
tctcatatttctttatgctctctgc

SEQ ID NO: 4157814 - DNA, 25 bp, Homo sapien
tatttctttatgctctctgcttgca

SEQ ID NO: 4157815 - DNA, 25 bp, Homo sapien
gcttcttgccccagagttagccaag

SEQ ID NO: 4157816 - DNA, 25 bp, Homo sapien
ggtcaaagcagccataacattccct

SEQ ID NO: 4157817 - DNA, 25 bp, Homo sapien
caataatgcaaggtaaagcagcagg

SEQ ID NO: 4157818 - DNA, 25 bp, Homo sapien
taatccagaataagaccctaacatg

SEQ ID NO: 4157819 - DNA, 25 bp, Homo sapien
tagaagcagcggcctttggaggctc

SEQ ID NO: 4157820 - DNA, 25 bp, Homo sapien
ctagaagcagcggcctttggaggct

SEQ ID NO: 4157821 - DNA, 25 bp, Homo sapien
tattttagtaatgctactcttttgc

SEQ ID NO: 4157822 - DNA, 25 bp, Homo sapien
agtaatgctactcttttgctttttc

SEQ ID NO: 4157823 - DNA, 25 bp, Homo sapien
actgtttcggggtggggccaagatg

SEQ ID NO: 4157824 - DNA, 25 bp, Homo sapien
ttaatattttagtaatgctactctt

SEQ ID NO: 4157825 - DNA, 25 bp, Homo sapien
tatagaagacaaaccttgatatgct

SEQ ID NO: 4157826 - DNA, 25 bp, Homo sapien
tggtggagggttcattaaatctact

SEQ ID NO: 4157827 - DNA, 25 bp, Homo sapien
gaggctgtcacagcaaatttaagac

SEQ ID NO: 4157828 - DNA, 25 bp, Homo sapien
tcataacataccactactccatggc

SEQ ID NO: 4157829 - DNA, 25 bp, Homo sapien
tatccagagatcgtcagctattagt

SEQ ID NO: 4157830 - DNA, 25 bp, Homo sapien
ggatgtggaatcacgctctccagtg

SEQ ID NO: 4157831 - DNA, 25 bp, Homo sapien
cagagtctgggagccttgtcaaata

SEQ ID NO: 4157832 - DNA, 25 bp, Homo sapien
tgaacttgataacgctctcagagtc

SEQ ID NO: 4157833 - DNA, 25 bp, Homo sapien
tgaatgttttaagtaatcgcaactg

SEQ ID NO: 4157834 - DNA, 25 bp, Homo sapien
tttgatatccatagtgatcatacca

SEQ ID NO: 4157835 - DNA, 25 bp, Homo sapien
ttgatatccatagtgatcataccac

SEQ ID NO: 4157836 - DNA, 25 bp, Homo sapien
taagtaatcgcaactgtaacttccc

SEQ ID NO: 4157837 - DNA, 25 bp, Homo sapien
atgggacaaggaagcattctggagc

SEQ ID NO: 4157838 - DNA, 25 bp, Homo sapien
tcaaatcaccctttatggtagtctg

SEQ ID NO: 4157839 - DNA, 25 bp, Homo sapien
ttccttgttcataaatggctacctt

SEQ ID NO: 4157840 - DNA, 25 bp, Homo sapien
tgtgtatttcacagttcgggaggct

SEQ ID NO: 4157841 - DNA, 25 bp, Homo sapien
tattaaggctagtactgattagttg

SEQ ID NO: 4157842 - DNA, 25 bp, Homo sapien
aggctagtactgattagttgttttt

SEQ ID NO: 4157843 - DNA, 25 bp, Homo sapien
ttaaggctagtactgattagttgtt

SEQ ID NO: 4157844 - DNA, 25 bp, Homo sapien
taaggctagtactgattagttgttt

SEQ ID NO: 4157845 - DNA, 25 bp, Homo sapien
aagctttaaagggagtgtatgcaag

SEQ ID NO: 4157846 - DNA, 25 bp, Homo sapien
gaaaattgagcatagctgacactga

SEQ ID NO: 4157847 - DNA, 25 bp, Homo sapien
aaactgccctcgaattgattaaaag

SEQ ID NO: 4157848 - DNA, 25 bp, Homo sapien
tgtgaaatcataactgcaaaagaga

SEQ ID NO: 4157849 - DNA, 25 bp, Homo sapien
tatacaaatggatcctagtaggtcc

SEQ ID NO: 4157850 - DNA, 25 bp, Homo sapien
tgaatatggtgaggaaactggaaac

SEQ ID NO: 4157851 - DNA, 25 bp, Homo sapien
tacacattagacagctgatgagata

SEQ ID NO: 4157852 - DNA, 25 bp, Homo sapien
gttaagactaggcaagagaagatgt

SEQ ID NO: 4157853 - DNA, 25 bp, Homo sapien
gatgacccatcatgagtgagttgga

SEQ ID NO: 4157854 - DNA, 25 bp, Homo sapien
gagagtccagaagacatacctttca

SEQ ID NO: 4157855 - DNA, 25 bp, Homo sapien
taatgtcatttcagtagaacccaca

SEQ ID NO: 4157856 - DNA, 25 bp, Homo sapien
gaaatgccagacctgccttggttta

SEQ ID NO: 4157857 - DNA, 25 bp, Homo sapien
gcagtggagccatcgaaaagaaggt

SEQ ID NO: 4157858 - DNA, 25 bp, Homo sapien
gagccatcgaaaagaaggtgacaca

SEQ ID NO: 4157859 - DNA, 25 bp, Homo sapien
gccatcgaaaagaaggtgacacaca

SEQ ID NO: 4157860 - DNA, 25 bp, Homo sapien
tgcagtggagccatcgaaaagaagg

SEQ ID NO: 4157861 - DNA, 25 bp, Homo sapien
tattttcccacaagagtaggatgca

SEQ ID NO: 4157862 - DNA, 25 bp, Homo sapien
tggagtcactttagtctgcacaaac

SEQ ID NO: 4157863 - DNA, 25 bp, Homo sapien
ggactgattgaaactagactgattt

SEQ ID NO: 4157864 - DNA, 25 bp, Homo sapien
tgcacaaactcatcaggactgattg

SEQ ID NO: 4157865 - DNA, 25 bp, Homo sapien
ctgcatgattctacattcttcaaga

SEQ ID NO: 4157866 - DNA, 25 bp, Homo sapien
actgcatgattctacattcttcaag

SEQ ID NO: 4157867 - DNA, 25 bp, Homo sapien
tgcatgattctacattcttcaagaa

SEQ ID NO: 4157868 - DNA, 25 bp, Homo sapien
tggaccagacaaatgcgttatcaac

SEQ ID NO: 4157869 - DNA, 25 bp, Homo sapien
catcttaacatcagagtatgggcac

SEQ ID NO: 4157870 - DNA, 25 bp, Homo sapien
tgggcacttgtgagaataaactatc

SEQ ID NO: 4157871 - DNA, 25 bp, Homo sapien
gagcacttgcaaaagacacctggaa

SEQ ID NO: 4157872 - DNA, 25 bp, Homo sapien
tgcatactctttaagtcagactgaa

SEQ ID NO: 4157873 - DNA, 25 bp, Homo sapien
catcaacagtttttaggattaggct

SEQ ID NO: 4157874 - DNA, 25 bp, Homo sapien
tattcccagatatgttttagtcaac

SEQ ID NO: 4157875 - DNA, 25 bp, Homo sapien
ggcactttgataagcactttgcata

SEQ ID NO: 4157876 - DNA, 25 bp, Homo sapien
aattttatacttcttgccactccct

SEQ ID NO: 4157877 - DNA, 25 bp, Homo sapien
gcaaaagctttatagaatcctggtc

SEQ ID NO: 4157878 - DNA, 25 bp, Homo sapien
gctttatagaatcctggtctgcaag

SEQ ID NO: 4157879 - DNA, 25 bp, Homo sapien
gaacattttgtgttcccagcaaaag

SEQ ID NO: 4157880 - DNA, 25 bp, Homo sapien
tatgttaaactgtgtggaggacatt

SEQ ID NO: 4157881 - DNA, 25 bp, Homo sapien
ttcagctcggaaataacccttttca

SEQ ID NO: 4157882 - DNA, 25 bp, Homo sapien
ttcacactgacagacagaagttgct

SEQ ID NO: 4157883 - DNA, 25 bp, Homo sapien
gccatagaaggtgggtctttttcag

SEQ ID NO: 4157884 - DNA, 25 bp, Homo sapien
tggtacatgccatagaaggtgggtc

SEQ ID NO: 4157885 - DNA, 25 bp, Homo sapien
caaatgtacatatataggacaatga

SEQ ID NO: 4157886 - DNA, 25 bp, Homo sapien
aaacaaatgtacatatataggacaa

SEQ ID NO: 4157887 - DNA, 25 bp, Homo sapien
atatataggacaatgaattatggcg

SEQ ID NO: 4157888 - DNA, 25 bp, Homo sapien
tgtacatatataggacaatgaatta

SEQ ID NO: 4157889 - DNA, 25 bp, Homo sapien
cactgtaatagctgtgaatggcttg

SEQ ID NO: 4157890 - DNA, 25 bp, Homo sapien
tgatcaggcctgtatgtcttgggat

SEQ ID NO: 4157891 - DNA, 25 bp, Homo sapien
gacacaaagtcaagtactatcacgg

SEQ ID NO: 4157892 - DNA, 25 bp, Homo sapien
tcaaaggtgtaattcacgtgagaca

SEQ ID NO: 4157893 - DNA, 25 bp, Homo sapien
cattacctctgcagtgtataacgta

SEQ ID NO: 4157894 - DNA, 25 bp, Homo sapien
gaacaacaaccagtgcattacctct

SEQ ID NO: 4157895 - DNA, 25 bp, Homo sapien
tatgactgcatagcacctgcaataa

SEQ ID NO: 4157896 - DNA, 25 bp, Homo sapien
cccatgagggatatttatgcatcaa

SEQ ID NO: 4157897 - DNA, 25 bp, Homo sapien
taatatggacttactcattaagata

SEQ ID NO: 4157898 - DNA, 25 bp, Homo sapien
tactgctgagaagtaatataaaaat

SEQ ID NO: 4157899 - DNA, 25 bp, Homo sapien
ggagggaagcatttcatcttattat

SEQ ID NO: 4157900 - DNA, 25 bp, Homo sapien
gagtacataaacagtggagggaagc

SEQ ID NO: 4157901 - DNA, 25 bp, Homo sapien
gtagctaaaaatcgttgtactagat

SEQ ID NO: 4157902 - DNA, 25 bp, Homo sapien
gctaaaaatcgttgtactagattgt

SEQ ID NO: 4157903 - DNA, 25 bp, Homo sapien
tccctgtagctaaaaatcgttgtac

SEQ ID NO: 4157904 - DNA, 25 bp, Homo sapien
accttcaaaatcatctgctgaagca

SEQ ID NO: 4157905 - DNA, 25 bp, Homo sapien
cacaatttgttttgggtcgactatc

SEQ ID NO: 4157906 - DNA, 25 bp, Homo sapien
caatcacaatgtgggcctaaggcag

SEQ ID NO: 4157907 - DNA, 25 bp, Homo sapien
cagaatggtcacttaagggcagaga

SEQ ID NO: 4157908 - DNA, 25 bp, Homo sapien
taaagaccctttagcaaatatcagc

SEQ ID NO: 4157909 - DNA, 25 bp, Homo sapien
cagttcctaaatgctgtgactggca

SEQ ID NO: 4157910 - DNA, 25 bp, Homo sapien
ctgtgactggcatttatggatttca

SEQ ID NO: 4157911 - DNA, 25 bp, Homo sapien
atgatttcagttcctaaatgctgtg

SEQ ID NO: 4157912 - DNA, 25 bp, Homo sapien
gatttcagttcctaaatgctgtgac

SEQ ID NO: 4157913 - DNA, 25 bp, Homo sapien
gcatgcaatcatgtcctaggccttc

SEQ ID NO: 4157914 - DNA, 25 bp, Homo sapien
ggaaactagcagtcattgggtctaa

SEQ ID NO: 4157915 - DNA, 25 bp, Homo sapien
gatagacagcatatgacagtggtcc

SEQ ID NO: 4157916 - DNA, 25 bp, Homo sapien
cctttaagaagtggccattagtagc

SEQ ID NO: 4157917 - DNA, 25 bp, Homo sapien
ataccacctctccttctatgttact

SEQ ID NO: 4157918 - DNA, 25 bp, Homo sapien
ccacctctccttctatgttactcat

SEQ ID NO: 4157919 - DNA, 25 bp, Homo sapien
ggcacctaataccacctctccttct

SEQ ID NO: 4157920 - DNA, 25 bp, Homo sapien
aataccacctctccttctatgttac

SEQ ID NO: 4157921 - DNA, 25 bp, Homo sapien
cagaattgggaaggcagctagtccc

SEQ ID NO: 4157922 - DNA, 25 bp, Homo sapien
agaattgggaaggcagctagtccca

SEQ ID NO: 4157923 - DNA, 25 bp, Homo sapien
gaattgggaaggcagctagtcccat

SEQ ID NO: 4157924 - DNA, 25 bp, Homo sapien
cagtgacacagttggcctttccatc

SEQ ID NO: 4157925 - DNA, 25 bp, Homo sapien
cacagttggcctttccatcatcaca

SEQ ID NO: 4157926 - DNA, 25 bp, Homo sapien
ctgcagaaaaccataacagggctga

SEQ ID NO: 4157927 - DNA, 25 bp, Homo sapien
ccataacagggctgacagtgacaca

SEQ ID NO: 4157928 - DNA, 25 bp, Homo sapien
tgacatcatggattttgttgatctt

SEQ ID NO: 4157929 - DNA, 25 bp, Homo sapien
gacatcatggattttgttgatcttc

SEQ ID NO: 4157930 - DNA, 25 bp, Homo sapien
ctaaaaaatgcaaaaatgagctggg

SEQ ID NO: 4157931 - DNA, 25 bp, Homo sapien
gtaatcctagcactttgggaggccg

SEQ ID NO: 4157932 - DNA, 25 bp, Homo sapien
aggcaggtggatcacctgaggtcag

SEQ ID NO: 4157933 - DNA, 25 bp, Homo sapien
gggctgtgcacagtggctcacgtct

SEQ ID NO: 4157934 - DNA, 25 bp, Homo sapien
tttctccatgattatatcctgaccc

SEQ ID NO: 4157935 - DNA, 25 bp, Homo sapien
aatttctccatgattatatcctgac

SEQ ID NO: 4157936 - DNA, 25 bp, Homo sapien
tctccatgattatatcctgacccat

SEQ ID NO: 4157937 - DNA, 25 bp, Homo sapien
ttctccatgattatatcctgaccca

SEQ ID NO: 4157938 - DNA, 25 bp, Homo sapien
acaatggtatgtgtgaggagttgtt

SEQ ID NO: 4157939 - DNA, 25 bp, Homo sapien
tatgtgtgaggagttgttgattagc

SEQ ID NO: 4157940 - DNA, 25 bp, Homo sapien
ttgatgatgctgacaatggtatgtg

SEQ ID NO: 4157941 - DNA, 25 bp, Homo sapien
caataaatatgggttgatgatgctg

SEQ ID NO: 4157942 - DNA, 25 bp, Homo sapien
ttctgtctccctcaccttgccttca

SEQ ID NO: 4157943 - DNA, 25 bp, Homo sapien
tcaccttgccttcagcataatccat

SEQ ID NO: 4157944 - DNA, 25 bp, Homo sapien
cctcaccttgccttcagcataatcc

SEQ ID NO: 4157945 - DNA, 25 bp, Homo sapien
tccctcaccttgccttcagcataat

SEQ ID NO: 4157946 - DNA, 25 bp, Homo sapien
ccagaatggctccattggaaaaagc

SEQ ID NO: 4157947 - DNA, 25 bp, Homo sapien
ggatgcccagtccttccttaccaca

SEQ ID NO: 4157948 - DNA, 25 bp, Homo sapien
catgatagggcaatgctattttggg

SEQ ID NO: 4157949 - DNA, 25 bp, Homo sapien
aaaagcaggtgcttgccatgatagg

SEQ ID NO: 4157950 - DNA, 25 bp, Homo sapien
ttataggaagctccaaataagacct

SEQ ID NO: 4157951 - DNA, 25 bp, Homo sapien
ataggaagctccaaataagacctac

SEQ ID NO: 4157952 - DNA, 25 bp, Homo sapien
tataggaagctccaaataagaccta

SEQ ID NO: 4157953 - DNA, 25 bp, Homo sapien
cagtctcttaatggagaggtcatga

SEQ ID NO: 4157954 - DNA, 25 bp, Homo sapien
gtctcttaatggagaggtcatgagg

SEQ ID NO: 4157955 - DNA, 25 bp, Homo sapien
tctcttaatggagaggtcatgaggg

SEQ ID NO: 4157956 - DNA, 25 bp, Homo sapien
ctcttaatggagaggtcatgaggga

SEQ ID NO: 4157957 - DNA, 25 bp, Homo sapien
tagctttcctggtttctgcctttct

SEQ ID NO: 4157958 - DNA, 25 bp, Homo sapien
agctttcctggtttctgcctttctg

SEQ ID NO: 4157959 - DNA, 25 bp, Homo sapien
ttagctttcctggtttctgcctttc

SEQ ID NO: 4157960 - DNA, 25 bp, Homo sapien
cttagctttcctggtttctgccttt

SEQ ID NO: 4157961 - DNA, 25 bp, Homo sapien
tgtctagttgaggacgttttcttct

SEQ ID NO: 4157962 - DNA, 25 bp, Homo sapien
cttcttccattgtagttttgtttgt

SEQ ID NO: 4157963 - DNA, 25 bp, Homo sapien
cagatgtctagttgaggacgttttc

SEQ ID NO: 4157964 - DNA, 25 bp, Homo sapien
tttttggcagatgtctagttgagga

SEQ ID NO: 4157965 - DNA, 25 bp, Homo sapien
tcactaaatggaagtgaacttgcca

SEQ ID NO: 4157966 - DNA, 25 bp, Homo sapien
gaattgccaaattatctcacttcac

SEQ ID NO: 4157967 - DNA, 25 bp, Homo sapien
tggaagtgaacttgccagggcattc

SEQ ID NO: 4157968 - DNA, 25 bp, Homo sapien
ttggttctcagtctcttgcgtgaat

SEQ ID NO: 4157969 - DNA, 25 bp, Homo sapien
aaaatgccggcgctatccgtgggta

SEQ ID NO: 4157970 - DNA, 25 bp, Homo sapien
tagtgccaaaatgccggcgctatcc

SEQ ID NO: 4157971 - DNA, 25 bp, Homo sapien
cgcaggtagtgccaaaatgccggcg

SEQ ID NO: 4157972 - DNA, 25 bp, Homo sapien
aatgccggcgctatccgtgggtaga

SEQ ID NO: 4157973 - DNA, 25 bp, Homo sapien
ggagaattcaagtaccagctactca

SEQ ID NO: 4157974 - DNA, 25 bp, Homo sapien
tgggagaattcaagtaccagctact

SEQ ID NO: 4157975 - DNA, 25 bp, Homo sapien
gggagaattcaagtaccagctactc

SEQ ID NO: 4157976 - DNA, 25 bp, Homo sapien
acattccaaagtttaactgagaaat

SEQ ID NO: 4157977 - DNA, 25 bp, Homo sapien
ctagaaacattccaaagtttaactg

SEQ ID NO: 4157978 - DNA, 25 bp, Homo sapien
cattccaaagtttaactgagaaatt

SEQ ID NO: 4157979 - DNA, 25 bp, Homo sapien
gaaacattccaaagtttaactgaga

SEQ ID NO: 4157980 - DNA, 25 bp, Homo sapien
ggaagagtaggtcagctgctcatgt

SEQ ID NO: 4157981 - DNA, 25 bp, Homo sapien
accttgtggaagagtaggtcagctg

SEQ ID NO: 4157982 - DNA, 25 bp, Homo sapien
ctgggggctttggaccttgtggaag

SEQ ID NO: 4157983 - DNA, 25 bp, Homo sapien
aagagtaggtcagctgctcatgttc

SEQ ID NO: 4157984 - DNA, 25 bp, Homo sapien
gtggctggcttaagacctgtgatga

SEQ ID NO: 4157985 - DNA, 25 bp, Homo sapien
tctcactcggatgtgaaatacatat

SEQ ID NO: 4157986 - DNA, 25 bp, Homo sapien
tatcctgtcgcagttctcactcgga

SEQ ID NO: 4157987 - DNA, 25 bp, Homo sapien
caaatttctgactgtagccactgta

SEQ ID NO: 4157988 - DNA, 25 bp, Homo sapien
gaaaccgaaacataatcttgcatct

SEQ ID NO: 4157989 - DNA, 25 bp, Homo sapien
ccagttggaagtcatagaagaatct

SEQ ID NO: 4157990 - DNA, 25 bp, Homo sapien
catttcaggaaagtggcatggaagc

SEQ ID NO: 4157991 - DNA, 25 bp, Homo sapien
gaagtgatgatttctcactggcaag

SEQ ID NO: 4157992 - DNA, 25 bp, Homo sapien
ggagtgttatacttggtctaccatg

SEQ ID NO: 4157993 - DNA, 25 bp, Homo sapien
gaaaagggcctaatgccataataac

SEQ ID NO: 4157994 - DNA, 25 bp, Homo sapien
tagttactcttcatcaagaccctgc

SEQ ID NO: 4157995 - DNA, 25 bp, Homo sapien
tctaagcattagtatgaaaagggcc

SEQ ID NO: 4157996 - DNA, 25 bp, Homo sapien
taaattcagtaagtaatattgccat

SEQ ID NO: 4157997 - DNA, 25 bp, Homo sapien
gtgataaattcagtaagtaatattg

SEQ ID NO: 4157998 - DNA, 25 bp, Homo sapien
gtgtgataaattcagtaagtaatat

SEQ ID NO: 4157999 - DNA, 25 bp, Homo sapien
gataaattcagtaagtaatattgcc

SEQ ID NO: 4158000 - DNA, 25 bp, Homo sapien
ctgaggcaataaagtcccacttttc

SEQ ID NO: 4158001 - DNA, 25 bp, Homo sapien
tttcattaagccagtacagttttgt

SEQ ID NO: 4158002 - DNA, 25 bp, Homo sapien
gttttgtcacttgaaatggagagtc

SEQ ID NO: 4158003 - DNA, 25 bp, Homo sapien
gccagtacagttttgtcacttgaaa

SEQ ID NO: 4158004 - DNA, 25 bp, Homo sapien
gagtgaatccgccaacagcggcggt

SEQ ID NO: 4158005 - DNA, 25 bp, Homo sapien
tcacgagaatctgtccttgttctgc

SEQ ID NO: 4158006 - DNA, 25 bp, Homo sapien
gaataaagtgaggatgacgaggaga

SEQ ID NO: 4158007 - DNA, 25 bp, Homo sapien
cagcggcggtggctatcacgagaat

SEQ ID NO: 4158008 - DNA, 25 bp, Homo sapien
atcttcggatctttccatattcagg

SEQ ID NO: 4158009 - DNA, 25 bp, Homo sapien
catcttcggatctttccatattcag

SEQ ID NO: 4158010 - DNA, 25 bp, Homo sapien
gtcatcttcggatctttccatattc

SEQ ID NO: 4158011 - DNA, 25 bp, Homo sapien
ttagtcatcttcggatctttccata

SEQ ID NO: 4158012 - DNA, 25 bp, Homo sapien
caaagctctgatgatggcagttagc

SEQ ID NO: 4158013 - DNA, 25 bp, Homo sapien
ttgccagagtccaaaatagtatggg

SEQ ID NO: 4158014 - DNA, 25 bp, Homo sapien
cagaaaacttagacctccaccagga

SEQ ID NO: 4158015 - DNA, 25 bp, Homo sapien
gacaacagtgcctgatggtggcaac

SEQ ID NO: 4158016 - DNA, 25 bp, Homo sapien
cttggcttttatgtaccactgacat

SEQ ID NO: 4158017 - DNA, 25 bp, Homo sapien
aatgcccattctgtaagtggtttct

SEQ ID NO: 4158018 - DNA, 25 bp, Homo sapien
cccattctgtaagtggtttcttctc

SEQ ID NO: 4158019 - DNA, 25 bp, Homo sapien
ttcttctcttctcttctgacttcat

SEQ ID NO: 4158020 - DNA, 25 bp, Homo sapien
tgcccattctgtaagtggtttcttc

SEQ ID NO: 4158021 - DNA, 25 bp, Homo sapien
tatgctaacctacctcttggaaaac

SEQ ID NO: 4158022 - DNA, 25 bp, Homo sapien
taaggttgccctgcgttaagtcatc

SEQ ID NO: 4158023 - DNA, 25 bp, Homo sapien
tatcccatgccagatatcagttctc

SEQ ID NO: 4158024 - DNA, 25 bp, Homo sapien
ccctgcagtgaatcttaaggttgcc

SEQ ID NO: 4158025 - DNA, 25 bp, Homo sapien
actgctagggatgggtcttcatatg

SEQ ID NO: 4158026 - DNA, 25 bp, Homo sapien
gcaaattcatggactgctagggatg

SEQ ID NO: 4158027 - DNA, 25 bp, Homo sapien
tcttgagggatcaatctcctttgca

SEQ ID NO: 4158028 - DNA, 25 bp, Homo sapien
gccccaatgactctctcaatacgaa

SEQ ID NO: 4158029 - DNA, 25 bp, Homo sapien
caggagatgaggtgatctatggtac

SEQ ID NO: 4158030 - DNA, 25 bp, Homo sapien
ttcagagggagacccagccatgcag

SEQ ID NO: 4158031 - DNA, 25 bp, Homo sapien
agcttctttggctgagaacataaag

SEQ ID NO: 4158032 - DNA, 25 bp, Homo sapien
tctggttccatttcaggtccttaat

SEQ ID NO: 4158033 - DNA, 25 bp, Homo sapien
ttctgagattctggtacttcctcca

SEQ ID NO: 4158034 - DNA, 25 bp, Homo sapien
catgttctgagattctggtacttcc

SEQ ID NO: 4158035 - DNA, 25 bp, Homo sapien
ttcccatgttctgagattctggtac

SEQ ID NO: 4158036 - DNA, 25 bp, Homo sapien
tctgagattctggtacttcctccat

SEQ ID NO: 4158037 - DNA, 25 bp, Homo sapien
agagtcaaactgtcatacagtgaca

SEQ ID NO: 4158038 - DNA, 25 bp, Homo sapien
gagtcaaactgtcatacagtgacat

SEQ ID NO: 4158039 - DNA, 25 bp, Homo sapien
aactggcccatgatactagcttctc

SEQ ID NO: 4158040 - DNA, 25 bp, Homo sapien
tccatgtggccacctttcaaagttt

SEQ ID NO: 4158041 - DNA, 25 bp, Homo sapien
tggtgacaaccccttctaggcgaat

SEQ ID NO: 4158042 - DNA, 25 bp, Homo sapien
ggtgtcttcaaacgcccactacaga

SEQ ID NO: 4158043 - DNA, 25 bp, Homo sapien
tccttttgggaaatgccacatgatg

SEQ ID NO: 4158044 - DNA, 25 bp, Homo sapien
attccaagctagtcttgtcagtctc

SEQ ID NO: 4158045 - DNA, 25 bp, Homo sapien
tgggaaatgccacatgatgattcca

SEQ ID NO: 4158046 - DNA, 25 bp, Homo sapien
ttccaagctagtcttgtcagtctct

SEQ ID NO: 4158047 - DNA, 25 bp, Homo sapien
gagctgaaccaccagagcaggtggc

SEQ ID NO: 4158048 - DNA, 25 bp, Homo sapien
tgagctgaaccaccagagcaggtgg

SEQ ID NO: 4158049 - DNA, 25 bp, Homo sapien
gtttggtagaaattcctccactcag

SEQ ID NO: 4158050 - DNA, 25 bp, Homo sapien
cacaggtttggtagaaattcctcca

SEQ ID NO: 4158051 - DNA, 25 bp, Homo sapien
aaagaagtgagtagggtaggcaaca

SEQ ID NO: 4158052 - DNA, 25 bp, Homo sapien
tagggtaggcaacacaggtttggta

SEQ ID NO: 4158053 - DNA, 25 bp, Homo sapien
tttgccctgaggatatatgtcatca

SEQ ID NO: 4158054 - DNA, 25 bp, Homo sapien
gcattaatggatttgcacaagcaag

SEQ ID NO: 4158055 - DNA, 25 bp, Homo sapien
taatgagatagctgactaagggctg

SEQ ID NO: 4158056 - DNA, 25 bp, Homo sapien
tctagagctgcatcccttaatgaga

SEQ ID NO: 4158057 - DNA, 25 bp, Homo sapien
gtttaccctttacatactggcgcat

SEQ ID NO: 4158058 - DNA, 25 bp, Homo sapien
tctcgtttaccctttacatactggc

SEQ ID NO: 4158059 - DNA, 25 bp, Homo sapien
tcgtttaccctttacatactggcgc

SEQ ID NO: 4158060 - DNA, 25 bp, Homo sapien
cgtttaccctttacatactggcgca

SEQ ID NO: 4158061 - DNA, 25 bp, Homo sapien
tgcggggcctggatgctatttaaaa

SEQ ID NO: 4158062 - DNA, 25 bp, Homo sapien
tagggcagcttccactgtgatttgt

SEQ ID NO: 4158063 - DNA, 25 bp, Homo sapien
catagggcagcttccactgtgattt

SEQ ID NO: 4158064 - DNA, 25 bp, Homo sapien
agggcagcttccactgtgatttgtc

SEQ ID NO: 4158065 - DNA, 25 bp, Homo sapien
tcatagggcagcttccactgtgatt

SEQ ID NO: 4158066 - DNA, 25 bp, Homo sapien
ggagtctagggatccattctccata

SEQ ID NO: 4158067 - DNA, 25 bp, Homo sapien
gacacagtctcttatacaatgatga

SEQ ID NO: 4158068 - DNA, 25 bp, Homo sapien
tgacacagtctcttatacaatgatg

SEQ ID NO: 4158069 - DNA, 25 bp, Homo sapien
ggtgacacagtctcttatacaatga

SEQ ID NO: 4158070 - DNA, 25 bp, Homo sapien
acagtctcttatacaatgatgattc

SEQ ID NO: 4158071 - DNA, 25 bp, Homo sapien
tattgaccagtatattccgagccgc

SEQ ID NO: 4158072 - DNA, 25 bp, Homo sapien
gccgctaggtctcgatgaacataac

SEQ ID NO: 4158073 - DNA, 25 bp, Homo sapien
tcatgcctgatgcaatgcctcggag

SEQ ID NO: 4158074 - DNA, 25 bp, Homo sapien
ggagcattccgaccaactggatgac

SEQ ID NO: 4158075 - DNA, 25 bp, Homo sapien
gtttctcttccacatgaggaccagt

SEQ ID NO: 4158076 - DNA, 25 bp, Homo sapien
tgctcacacaagctttccagaccat

SEQ ID NO: 4158077 - DNA, 25 bp, Homo sapien
gaggaccagtccagtaccataacca

SEQ ID NO: 4158078 - DNA, 25 bp, Homo sapien
gagctggactcgcactgctcacaca

SEQ ID NO: 4158079 - DNA, 25 bp, Homo sapien
tagcagaggttaagtgttagagttt

SEQ ID NO: 4158080 - DNA, 25 bp, Homo sapien
tatgcagaatagcagaggttaagtg

SEQ ID NO: 4158081 - DNA, 25 bp, Homo sapien
gcagaatagcagaggttaagtgtta

SEQ ID NO: 4158082 - DNA, 25 bp, Homo sapien
taagtgttagagtttggaagaggtc

SEQ ID NO: 4158083 - DNA, 25 bp, Homo sapien
cagttgggtgtaggctatgtcttct

SEQ ID NO: 4158084 - DNA, 25 bp, Homo sapien
attaaataccttcccctcatgctgc

SEQ ID NO: 4158085 - DNA, 25 bp, Homo sapien
tcttagaccgacagaaaatttggct

SEQ ID NO: 4158086 - DNA, 25 bp, Homo sapien
tcttaaagttggacatgttcaaggc

SEQ ID NO: 4158087 - DNA, 25 bp, Homo sapien
tttcaactgccgatatccattgtct

SEQ ID NO: 4158088 - DNA, 25 bp, Homo sapien
actgccgatatccattgtcttctgc

SEQ ID NO: 4158089 - DNA, 25 bp, Homo sapien
aaagactttcaactgccgatatcca

SEQ ID NO: 4158090 - DNA, 25 bp, Homo sapien
ttcaaagactttcaactgccgatat

SEQ ID NO: 4158091 - DNA, 25 bp, Homo sapien
ctgtcctatctaatgatgtgtaagg

SEQ ID NO: 4158092 - DNA, 25 bp, Homo sapien
cttctgtcctatctaatgatgtgta

SEQ ID NO: 4158093 - DNA, 25 bp, Homo sapien
tgcttgtgacttctgtcctatctaa

SEQ ID NO: 4158094 - DNA, 25 bp, Homo sapien
gtgacttctgtcctatctaatgatg

SEQ ID NO: 4158095 - DNA, 25 bp, Homo sapien
ctgcaattcccacggtttcttctat

SEQ ID NO: 4158096 - DNA, 25 bp, Homo sapien
aactgcaattcccacggtttcttct

SEQ ID NO: 4158097 - DNA, 25 bp, Homo sapien
tgcaattcccacggtttcttctatt

SEQ ID NO: 4158098 - DNA, 25 bp, Homo sapien
actgcaattcccacggtttcttcta

SEQ ID NO: 4158099 - DNA, 25 bp, Homo sapien
ctcagcatgtgcagttttaataaag

SEQ ID NO: 4158100 - DNA, 25 bp, Homo sapien
aaatgtatcatgaccctttggtagc

SEQ ID NO: 4158101 - DNA, 25 bp, Homo sapien
caaatgtcctgggttccattcattc

SEQ ID NO: 4158102 - DNA, 25 bp, Homo sapien
caagagggcacacctatacaaatgt

SEQ ID NO: 4158103 - DNA, 25 bp, Homo sapien
tagatccgatgagtgaaattctcct

SEQ ID NO: 4158104 - DNA, 25 bp, Homo sapien
attccacagctcctagatccgatga

SEQ ID NO: 4158105 - DNA, 25 bp, Homo sapien
aatatgattgttcgtggaggtcctt

SEQ ID NO: 4158106 - DNA, 25 bp, Homo sapien
tggaggtccttagccattccacagc

SEQ ID NO: 4158107 - DNA, 25 bp, Homo sapien
catttccttctcactactggagaac

SEQ ID NO: 4158108 - DNA, 25 bp, Homo sapien
tccatttccttctcactactggaga

SEQ ID NO: 4158109 - DNA, 25 bp, Homo sapien
ttccatttccttctcactactggag

SEQ ID NO: 4158110 - DNA, 25 bp, Homo sapien
tttccttctcactactggagaacat

SEQ ID NO: 4158111 - DNA, 25 bp, Homo sapien
ttaacttgttttcagcttcaaagga

SEQ ID NO: 4158112 - DNA, 25 bp, Homo sapien
acttgttttcagcttcaaaggacat

SEQ ID NO: 4158113 - DNA, 25 bp, Homo sapien
tctttaacttgttttcagcttcaaa

SEQ ID NO: 4158114 - DNA, 25 bp, Homo sapien
atggactcatctttctttaacttgt

SEQ ID NO: 4158115 - DNA, 25 bp, Homo sapien
catgatctaaccagtggatccctgg

SEQ ID NO: 4158116 - DNA, 25 bp, Homo sapien
catcatgatctaaccagtggatccc

SEQ ID NO: 4158117 - DNA, 25 bp, Homo sapien
tggaagcactctagcacaggctgcc

SEQ ID NO: 4158118 - DNA, 25 bp, Homo sapien
caagccaaattgaacagtgacagtt

SEQ ID NO: 4158119 - DNA, 25 bp, Homo sapien
catcatagtacttgttactaattgt

SEQ ID NO: 4158120 - DNA, 25 bp, Homo sapien
atcatagtacttgttactaattgtc

SEQ ID NO: 4158121 - DNA, 25 bp, Homo sapien
ttctttatcaccaagaggggctgca

SEQ ID NO: 4158122 - DNA, 25 bp, Homo sapien
gcatcatagtacttgttactaattg

SEQ ID NO: 4158123 - DNA, 25 bp, Homo sapien
actggtctaccagtgatgggaacgc

SEQ ID NO: 4158124 - DNA, 25 bp, Homo sapien
ctttggcctgtgtggagttgcctaa

SEQ ID NO: 4158125 - DNA, 25 bp, Homo sapien
ctgcactggtctaccagtgatggga

SEQ ID NO: 4158126 - DNA, 25 bp, Homo sapien
tggagttgcctaatattctattcct

SEQ ID NO: 4158127 - DNA, 25 bp, Homo sapien
taacatgacagaatctggatgtact

SEQ ID NO: 4158128 - DNA, 25 bp, Homo sapien
cactgcgtggcataacatgacagaa

SEQ ID NO: 4158129 - DNA, 25 bp, Homo sapien
cactggagcactgcgtggcataaca

SEQ ID NO: 4158130 - DNA, 25 bp, Homo sapien
gttttgctcaggtttaagtatatca

SEQ ID NO: 4158131 - DNA, 25 bp, Homo sapien
gacaagcagcatgcaatgtagagag

SEQ ID NO: 4158132 - DNA, 25 bp, Homo sapien
gagggaactggacttgtatcttgta

SEQ ID NO: 4158133 - DNA, 25 bp, Homo sapien
aacaacagtagagctgaatcctggc

SEQ ID NO: 4158134 - DNA, 25 bp, Homo sapien
gtactccaaagtatacacaagggtg

SEQ ID NO: 4158135 - DNA, 25 bp, Homo sapien
ctggaaaacaaattggagatttctt

SEQ ID NO: 4158136 - DNA, 25 bp, Homo sapien
aaacaaattggagatttcttagctg

SEQ ID NO: 4158137 - DNA, 25 bp, Homo sapien
aacaaattggagatttcttagctgg

SEQ ID NO: 4158138 - DNA, 25 bp, Homo sapien
gaaaacaaattggagatttcttagc

SEQ ID NO: 4158139 - DNA, 25 bp, Homo sapien
gctgtccaccttatggggatttttc

SEQ ID NO: 4158140 - DNA, 25 bp, Homo sapien
ctccatgcatcgcttgctgaggaga

SEQ ID NO: 4158141 - DNA, 25 bp, Homo sapien
atgacaatgccatagctccatgcat

SEQ ID NO: 4158142 - DNA, 25 bp, Homo sapien
ggagaattttctgtaggcgatggct

SEQ ID NO: 4158143 - DNA, 25 bp, Homo sapien
tcttggttagacatttcccaataag

SEQ ID NO: 4158144 - DNA, 25 bp, Homo sapien
cttggttagacatttcccaataagg

SEQ ID NO: 4158145 - DNA, 25 bp, Homo sapien
atcttggttagacatttcccaataa

SEQ ID NO: 4158146 - DNA, 25 bp, Homo sapien
gattctgcagattcagaattgttca

SEQ ID NO: 4158147 - DNA, 25 bp, Homo sapien
ctttgggaaactcattatattattc

SEQ ID NO: 4158148 - DNA, 25 bp, Homo sapien
gggaaactcattatattattcacta

SEQ ID NO: 4158149 - DNA, 25 bp, Homo sapien
tcactaaaacagattctgcagattc

SEQ ID NO: 4158150 - DNA, 25 bp, Homo sapien
agtgcactggggagtcaaaggatcc

SEQ ID NO: 4158151 - DNA, 25 bp, Homo sapien
agtggtccaggccttagtggaggca

SEQ ID NO: 4158152 - DNA, 25 bp, Homo sapien
tggtccaggccttagtggaggcaat

SEQ ID NO: 4158153 - DNA, 25 bp, Homo sapien
agtcaaaggatccaggaaggagctt

SEQ ID NO: 4158154 - DNA, 25 bp, Homo sapien
ctgtagacagttggcatccaaatct

SEQ ID NO: 4158155 - DNA, 25 bp, Homo sapien
tagacagttggcatccaaatctaga

SEQ ID NO: 4158156 - DNA, 25 bp, Homo sapien
catccaaatctagaatgcttagcat

SEQ ID NO: 4158157 - DNA, 25 bp, Homo sapien
gtagacagttggcatccaaatctag

SEQ ID NO: 4158158 - DNA, 25 bp, Homo sapien
cccagcttcttgtaagacttgtggc

SEQ ID NO: 4158159 - DNA, 25 bp, Homo sapien
gaaactggaagcttgctcttctcta

SEQ ID NO: 4158160 - DNA, 25 bp, Homo sapien
ctggaagcttgctcttctctaagag

SEQ ID NO: 4158161 - DNA, 25 bp, Homo sapien
cacagggttactattttccattggc

SEQ ID NO: 4158162 - DNA, 25 bp, Homo sapien
tagagatgctggacagcccatggga

SEQ ID NO: 4158163 - DNA, 25 bp, Homo sapien
agcatcagctggtgtagagatgctg

SEQ ID NO: 4158164 - DNA, 25 bp, Homo sapien
gtgtagagatgctggacagcccatg

SEQ ID NO: 4158165 - DNA, 25 bp, Homo sapien
gtagagatgctggacagcccatggg

SEQ ID NO: 4158166 - DNA, 25 bp, Homo sapien
caatgtcagtaaattttggtctgtg

SEQ ID NO: 4158167 - DNA, 25 bp, Homo sapien
tgtcaaggaagctgacaatgtcagt

SEQ ID NO: 4158168 - DNA, 25 bp, Homo sapien
ggatttcggatcagtttgtcaagga

SEQ ID NO: 4158169 - DNA, 25 bp, Homo sapien
tgaagggcactgggatttcggatca

SEQ ID NO: 4158170 - DNA, 25 bp, Homo sapien
caactagatggttatcaaggcattt

SEQ ID NO: 4158171 - DNA, 25 bp, Homo sapien
tatctatagcctgaaagaaaccata

SEQ ID NO: 4158172 - DNA, 25 bp, Homo sapien
tattattatctatagcctgaaagaa

SEQ ID NO: 4158173 - DNA, 25 bp, Homo sapien
tggtttccacaaagtcaacaactag

SEQ ID NO: 4158174 - DNA, 25 bp, Homo sapien
aagttattcttgtattgccccatct

SEQ ID NO: 4158175 - DNA, 25 bp, Homo sapien
aggatattccggaacttcaccaggg

SEQ ID NO: 4158176 - DNA, 25 bp, Homo sapien
gaaatcaggtcaaatgttgtaaacc

SEQ ID NO: 4158177 - DNA, 25 bp, Homo sapien
aaccctgctgccacgaagttattct

SEQ ID NO: 4158178 - DNA, 25 bp, Homo sapien
tgtgcatcatgtgtaaacgtaaagt

SEQ ID NO: 4158179 - DNA, 25 bp, Homo sapien
gctgactattcgtctctggtgtcca

SEQ ID NO: 4158180 - DNA, 25 bp, Homo sapien
aagtatgactccaattcttctaatg

SEQ ID NO: 4158181 - DNA, 25 bp, Homo sapien
gaaatcccttctcctgtatgtgcat

SEQ ID NO: 4158182 - DNA, 25 bp, Homo sapien
acaggtgcttgtggtactttcatac

SEQ ID NO: 4158183 - DNA, 25 bp, Homo sapien
ctgaggcacaaaacacaggtgcttg

SEQ ID NO: 4158184 - DNA, 25 bp, Homo sapien
aacacaggtgcttgtggtactttca

SEQ ID NO: 4158185 - DNA, 25 bp, Homo sapien
gcacaaaacacaggtgcttgtggta

SEQ ID NO: 4158186 - DNA, 25 bp, Homo sapien
gcgtagcaataatctgcagtgggcc

SEQ ID NO: 4158187 - DNA, 25 bp, Homo sapien
tagttgcaggttattcagaacggat

SEQ ID NO: 4158188 - DNA, 25 bp, Homo sapien
gtgtgcctatagtctgaacagaaga

SEQ ID NO: 4158189 - DNA, 25 bp, Homo sapien
aatcctggttggaagcataaacata

SEQ ID NO: 4158190 - DNA, 25 bp, Homo sapien
tcaggcaccaacagttaaagtatta

SEQ ID NO: 4158191 - DNA, 25 bp, Homo sapien
gaacacttcccatatacggcttata

SEQ ID NO: 4158192 - DNA, 25 bp, Homo sapien
cagtttggaagctacttgatcacaa

SEQ ID NO: 4158193 - DNA, 25 bp, Homo sapien
tctacatacatcactaaggaagccc

SEQ ID NO: 4158194 - DNA, 25 bp, Homo sapien
caagcaaactgcagatagtctatga

SEQ ID NO: 4158195 - DNA, 25 bp, Homo sapien
aaaatgtggctagctatatctggca

SEQ ID NO: 4158196 - DNA, 25 bp, Homo sapien
tatgagtgatgcacaaccatgcagg

SEQ ID NO: 4158197 - DNA, 25 bp, Homo sapien
taagctgtggtagggaaaaatcagg

SEQ ID NO: 4158198 - DNA, 25 bp, Homo sapien
cattctttaccgtctcttctgaaga

SEQ ID NO: 4158199 - DNA, 25 bp, Homo sapien
aatgtggttgggtgataagtaaaag

SEQ ID NO: 4158200 - DNA, 25 bp, Homo sapien
aactgactgccttgtagagcagaaa

SEQ ID NO: 4158201 - DNA, 25 bp, Homo sapien
gaagagcttctttagagcctttgct

SEQ ID NO: 4158202 - DNA, 25 bp, Homo sapien
cattggagttctatattccggcacc

SEQ ID NO: 4158203 - DNA, 25 bp, Homo sapien
caggaacctgagtggaaggcatata

SEQ ID NO: 4158204 - DNA, 25 bp, Homo sapien
ccttttgtaagagcagatgggtaca

SEQ ID NO: 4158205 - DNA, 25 bp, Homo sapien
tattaacttgtaagcatgccagcac

SEQ ID NO: 4158206 - DNA, 25 bp, Homo sapien
tttaatttcatactggcttttagaa

SEQ ID NO: 4158207 - DNA, 25 bp, Homo sapien
cagttttaatttcatactggctttt

SEQ ID NO: 4158208 - DNA, 25 bp, Homo sapien
ttttaatttcatactggcttttaga

SEQ ID NO: 4158209 - DNA, 25 bp, Homo sapien
cggagagtgtcgttaccgggcacca

SEQ ID NO: 4158210 - DNA, 25 bp, Homo sapien
tttctgggaagcgtttggcgttcgc

SEQ ID NO: 4158211 - DNA, 25 bp, Homo sapien
ggcaacgactgcaagacgatactgt

SEQ ID NO: 4158212 - DNA, 25 bp, Homo sapien
caccagcgtagcgttgtggcaacga

SEQ ID NO: 4158213 - DNA, 25 bp, Homo sapien
tctgggattgaagagctccgggaaa

SEQ ID NO: 4158214 - DNA, 25 bp, Homo sapien
ttggcaacaggagcttcttccggtc

SEQ ID NO: 4158215 - DNA, 25 bp, Homo sapien
cagtctgtgcatcagtcgctgagca

SEQ ID NO: 4158216 - DNA, 25 bp, Homo sapien
aagttgggaaaaccggcagcctctg

SEQ ID NO: 4158217 - DNA, 25 bp, Homo sapien
gatgcctggtaatgagcaaagccgt

SEQ ID NO: 4158218 - DNA, 25 bp, Homo sapien
ctacatgggaaggatgcctggtaat

SEQ ID NO: 4158219 - DNA, 25 bp, Homo sapien
tgcctggtaatgagcaaagccgtct

SEQ ID NO: 4158220 - DNA, 25 bp, Homo sapien
acatgggaaggatgcctggtaatga

SEQ ID NO: 4158221 - DNA, 25 bp, Homo sapien
ttttgaggttagtccggagggcgca

SEQ ID NO: 4158222 - DNA, 25 bp, Homo sapien
gatggaaatctggtgcgagggtccc

SEQ ID NO: 4158223 - DNA, 25 bp, Homo sapien
tcggtctccgggatggaaatctggt

SEQ ID NO: 4158224 - DNA, 25 bp, Homo sapien
tggcaacaggaatggacgcactcgt

SEQ ID NO: 4158225 - DNA, 25 bp, Homo sapien
cagagggtggcgctggctttaaaaa

SEQ ID NO: 4158226 - DNA, 25 bp, Homo sapien
acagagggtggcgctggctttaaaa

SEQ ID NO: 4158227 - DNA, 25 bp, Homo sapien
gacagagggtggcgctggctttaaa

SEQ ID NO: 4158228 - DNA, 25 bp, Homo sapien
ggacagagggtggcgctggctttaa

SEQ ID NO: 4158229 - DNA, 25 bp, Homo sapien
atattttgggacacacaatttagaa

SEQ ID NO: 4158230 - DNA, 25 bp, Homo sapien
cttgtattgtgactttccatcactt

SEQ ID NO: 4158231 - DNA, 25 bp, Homo sapien
acttttccatggattatcacttgat

SEQ ID NO: 4158232 - DNA, 25 bp, Homo sapien
cacttgatacttgttaatgaaatat

SEQ ID NO: 4158233 - DNA, 25 bp, Homo sapien
actttatcaataacaggcttccaag

SEQ ID NO: 4158234 - DNA, 25 bp, Homo sapien
ttatcaataacaggcttccaagaca

SEQ ID NO: 4158235 - DNA, 25 bp, Homo sapien
gtgaggctgcagcaactttatcaat

SEQ ID NO: 4158236 - DNA, 25 bp, Homo sapien
tgcagcaactttatcaataacaggc

SEQ ID NO: 4158237 - DNA, 25 bp, Homo sapien
tgtgattcaaatatttacaaaccag

SEQ ID NO: 4158238 - DNA, 25 bp, Homo sapien
atgtgattcaaatatttacaaacca

SEQ ID NO: 4158239 - DNA, 25 bp, Homo sapien
aatgtgattcaaatatttacaaacc

SEQ ID NO: 4158240 - DNA, 25 bp, Homo sapien
agtttgttaatgatcgtcgttttgc

SEQ ID NO: 4158241 - DNA, 25 bp, Homo sapien
tcttcaggccaagcaagactgaaag

SEQ ID NO: 4158242 - DNA, 25 bp, Homo sapien
ggcacaaaacatgaacctccttctt

SEQ ID NO: 4158243 - DNA, 25 bp, Homo sapien
ttgccactattatctagcccaaggc

SEQ ID NO: 4158244 - DNA, 25 bp, Homo sapien
tctctatgctgaatcctattgttgg

SEQ ID NO: 4158245 - DNA, 25 bp, Homo sapien
aatttctctatgctgaatcctattg

SEQ ID NO: 4158246 - DNA, 25 bp, Homo sapien
ttctctatgctgaatcctattgttg

SEQ ID NO: 4158247 - DNA, 25 bp, Homo sapien
ttgaatttctctatgctgaatccta

SEQ ID NO: 4158248 - DNA, 25 bp, Homo sapien
ccttgacctgacatgtcaaacactg

SEQ ID NO: 4158249 - DNA, 25 bp, Homo sapien
taatagtgttcccagagatttctgt

SEQ ID NO: 4158250 - DNA, 25 bp, Homo sapien
ttataatagtgttcccagagatttc

SEQ ID NO: 4158251 - DNA, 25 bp, Homo sapien
tctgtatcttccttgacctgacatg

SEQ ID NO: 4158252 - DNA, 25 bp, Homo sapien
aatctatcactactatcaatgacaa

SEQ ID NO: 4158253 - DNA, 25 bp, Homo sapien
ttaatctatcactactatcaatgac

SEQ ID NO: 4158254 - DNA, 25 bp, Homo sapien
taatctatcactactatcaatgaca

SEQ ID NO: 4158255 - DNA, 25 bp, Homo sapien
tcttaatctatcactactatcaatg

SEQ ID NO: 4158256 - DNA, 25 bp, Homo sapien
cagaagagtatcgagttcttctttg

SEQ ID NO: 4158257 - DNA, 25 bp, Homo sapien
ctggatgattcagaagagtatcgag

SEQ ID NO: 4158258 - DNA, 25 bp, Homo sapien
gatgattcagaagagtatcgagttc

SEQ ID NO: 4158259 - DNA, 25 bp, Homo sapien
gattcagaagagtatcgagttcttc

SEQ ID NO: 4158260 - DNA, 25 bp, Homo sapien
cagcaactgagacacttttacagat

SEQ ID NO: 4158261 - DNA, 25 bp, Homo sapien
taagattggaattcgacggtgttta

SEQ ID NO: 4158262 - DNA, 25 bp, Homo sapien
tctaaacacagcaactgagacactt

SEQ ID NO: 4158263 - DNA, 25 bp, Homo sapien
gccagggtttatctttgatgttctc

SEQ ID NO: 4158264 - DNA, 25 bp, Homo sapien
agccagtctacaccttcttgcaagc

SEQ ID NO: 4158265 - DNA, 25 bp, Homo sapien
ccagtctacaccttcttgcaagcct

SEQ ID NO: 4158266 - DNA, 25 bp, Homo sapien
aagccagtctacaccttcttgcaag

SEQ ID NO: 4158267 - DNA, 25 bp, Homo sapien
gaagccagtctacaccttcttgcaa

SEQ ID NO: 4158268 - DNA, 25 bp, Homo sapien
aggctgaagacacacagtattttgt

SEQ ID NO: 4158269 - DNA, 25 bp, Homo sapien
ctgaagacacacagtattttgtaat

SEQ ID NO: 4158270 - DNA, 25 bp, Homo sapien
ggaaacaaaggctgaagacacacag

SEQ ID NO: 4158271 - DNA, 25 bp, Homo sapien
aaggaaacaaaggctgaagacacac

SEQ ID NO: 4158272 - DNA, 25 bp, Homo sapien
taaatcctttagcaatatgtgatag

SEQ ID NO: 4158273 - DNA, 25 bp, Homo sapien
cattagggcctaacatttgtcccaa

SEQ ID NO: 4158274 - DNA, 25 bp, Homo sapien
gtgatagaagtaaatggaacaaggt

SEQ ID NO: 4158275 - DNA, 25 bp, Homo sapien
tctattactagatctgacaggaact

SEQ ID NO: 4158276 - DNA, 25 bp, Homo sapien
tatcatgagtgacaatagggtttcc

SEQ ID NO: 4158277 - DNA, 25 bp, Homo sapien
gaaactaagttgctgggttcacaga

SEQ ID NO: 4158278 - DNA, 25 bp, Homo sapien
taggtatcaagaccagagttggcaa

SEQ ID NO: 4158279 - DNA, 25 bp, Homo sapien
tggattgctactgacacctagtggc

SEQ ID NO: 4158280 - DNA, 25 bp, Homo sapien
tagggttttctagtccagagacact

SEQ ID NO: 4158281 - DNA, 25 bp, Homo sapien
gacactgtctttgactctgcagaga

SEQ ID NO: 4158282 - DNA, 25 bp, Homo sapien
ccagacagttgtgcacctagggttt

SEQ ID NO: 4158283 - DNA, 25 bp, Homo sapien
tgctcttaggctggtctgattcccc

SEQ ID NO: 4158284 - DNA, 25 bp, Homo sapien
aatactgttcgaggatttgctatcc

SEQ ID NO: 4158285 - DNA, 25 bp, Homo sapien
gagaggcctgtcaactgaaaactca

SEQ ID NO: 4158286 - DNA, 25 bp, Homo sapien
taatgatacctgctggtatgggaat

SEQ ID NO: 4158287 - DNA, 25 bp, Homo sapien
ccactgtattgagctcttgagaggc

SEQ ID NO: 4158288 - DNA, 25 bp, Homo sapien
tcatgtcttcacagtctggatctga

SEQ ID NO: 4158289 - DNA, 25 bp, Homo sapien
catgtcttcacagtctggatctgat

SEQ ID NO: 4158290 - DNA, 25 bp, Homo sapien
tgctgaggtttccaactattatctt

SEQ ID NO: 4158291 - DNA, 25 bp, Homo sapien
tttttgatgcataaacatcttttac

SEQ ID NO: 4158292 - DNA, 25 bp, Homo sapien
taaaaaggtcagagtccataaatgc

SEQ ID NO: 4158293 - DNA, 25 bp, Homo sapien
tatttgtcttagatagattccttga

SEQ ID NO: 4158294 - DNA, 25 bp, Homo sapien
gaacttgataattctagggagccct

SEQ ID NO: 4158295 - DNA, 25 bp, Homo sapien
cacaattcatactgcaaagtcataa

SEQ ID NO: 4158296 - DNA, 25 bp, Homo sapien
aattatgatgggatgagatggctta

SEQ ID NO: 4158297 - DNA, 25 bp, Homo sapien
tgtagaccttcactaagaacttgat

SEQ ID NO: 4158298 - DNA, 25 bp, Homo sapien
taaactagctaagatgctgagccat

SEQ ID NO: 4158299 - DNA, 25 bp, Homo sapien
tggttgctgtcccaagtaagagcct

SEQ ID NO: 4158300 - DNA, 25 bp, Homo sapien
cacaggctgaatagggccatataca

SEQ ID NO: 4158301 - DNA, 25 bp, Homo sapien
taactttttcgcagagagcttagaa

SEQ ID NO: 4158302 - DNA, 25 bp, Homo sapien
taaatttctgtcgtttataagccac

SEQ ID NO: 4158303 - DNA, 25 bp, Homo sapien
gtctatggtactttgttatagcaac

SEQ ID NO: 4158304 - DNA, 25 bp, Homo sapien
tttctgtcgtttataagccacccag

SEQ ID NO: 4158305 - DNA, 25 bp, Homo sapien
cccagtctatggtactttgttatag

SEQ ID NO: 4158306 - DNA, 25 bp, Homo sapien
gcacatgcaccagagttataagcaa

SEQ ID NO: 4158307 - DNA, 25 bp, Homo sapien
tgtgaagatgtaatgggattcatgc

SEQ ID NO: 4158308 - DNA, 25 bp, Homo sapien
gccttaagtattgcaactgactgaa

SEQ ID NO: 4158309 - DNA, 25 bp, Homo sapien
gggattcatgctcttatcaaacaga

SEQ ID NO: 4158310 - DNA, 25 bp, Homo sapien
taatcagaaagcagaaaataggtac

SEQ ID NO: 4158311 - DNA, 25 bp, Homo sapien
aggaaataatcagaaagcagaaaat

SEQ ID NO: 4158312 - DNA, 25 bp, Homo sapien
tttcatgaacaaaggaaataatcag

SEQ ID NO: 4158313 - DNA, 25 bp, Homo sapien
tttattttcatgaacaaaggaaata

SEQ ID NO: 4158314 - DNA, 25 bp, Homo sapien
tagtcgcagacgtacacaaacctat

SEQ ID NO: 4158315 - DNA, 25 bp, Homo sapien
tctagtcgcagacgtacacaaacct

SEQ ID NO: 4158316 - DNA, 25 bp, Homo sapien
agtcgcagacgtacacaaacctatt

SEQ ID NO: 4158317 - DNA, 25 bp, Homo sapien
ctctagtcgcagacgtacacaaacc

SEQ ID NO: 4158318 - DNA, 25 bp, Homo sapien
tataataaagttcccagaaatggca

SEQ ID NO: 4158319 - DNA, 25 bp, Homo sapien
taacccagcatctaaaaatgcacta

SEQ ID NO: 4158320 - DNA, 25 bp, Homo sapien
tcttgtgctgctatgcataaataaa

SEQ ID NO: 4158321 - DNA, 25 bp, Homo sapien
agaaatggcaagaggtaagagctga

SEQ ID NO: 4158322 - DNA, 25 bp, Homo sapien
gagtttcatggcaccccaaaataat

SEQ ID NO: 4158323 - DNA, 25 bp, Homo sapien
tagcaaaatgcgatacagagataca

SEQ ID NO: 4158324 - DNA, 25 bp, Homo sapien
tataaagactaagaacctgctcact

SEQ ID NO: 4158325 - DNA, 25 bp, Homo sapien
tgcatactccttctactttagggaa

SEQ ID NO: 4158326 - DNA, 25 bp, Homo sapien
aataacttgtgtgatatatgagaaa

SEQ ID NO: 4158327 - DNA, 25 bp, Homo sapien
aacttgtgtgatatatgagaaatcc

SEQ ID NO: 4158328 - DNA, 25 bp, Homo sapien
tataatactgtaattcaataacttg

SEQ ID NO: 4158329 - DNA, 25 bp, Homo sapien
ttgtgtgatatatgagaaatcctga

SEQ ID NO: 4158330 - DNA, 25 bp, Homo sapien
aactctttcaaaaacggcactgatc

SEQ ID NO: 4158331 - DNA, 25 bp, Homo sapien
tgtgacttttcctaaccgcgctgtg

SEQ ID NO: 4158332 - DNA, 25 bp, Homo sapien
catattttgcagtcgttacacagat

SEQ ID NO: 4158333 - DNA, 25 bp, Homo sapien
tcagacttttcacacgccatacttc

SEQ ID NO: 4158334 - DNA, 25 bp, Homo sapien
agggcagaccgactcgacgcgagct

SEQ ID NO: 4158335 - DNA, 25 bp, Homo sapien
agtcgcccagcgtgcgacgctaggc

SEQ ID NO: 4158336 - DNA, 25 bp, Homo sapien
gctaggctcgggcttacggctcaaa

SEQ ID NO: 4158337 - DNA, 25 bp, Homo sapien
tcaattactttctgtgaccgttgtg

SEQ ID NO: 4158338 - DNA, 25 bp, Homo sapien
ctgaagggaacggcctaggtgttgc

SEQ ID NO: 4158339 - DNA, 25 bp, Homo sapien
gagcccgaccgggcgccgcgggatg

SEQ ID NO: 4158340 - DNA, 25 bp, Homo sapien
acggcctaggtgttgcctggtgccc

SEQ ID NO: 4158341 - DNA, 25 bp, Homo sapien
aagggaacggcctaggtgttgcctg

SEQ ID NO: 4158342 - DNA, 25 bp, Homo sapien
cgagggggccgctggcccggggctg

SEQ ID NO: 4158343 - DNA, 25 bp, Homo sapien
gggagcgaagaaccgggagaagctg

SEQ ID NO: 4158344 - DNA, 25 bp, Homo sapien
ggagcgaagaaccgggagaagctgt

SEQ ID NO: 4158345 - DNA, 25 bp, Homo sapien
gagaacagaaagtggcgagcgaact

SEQ ID NO: 4158346 - DNA, 25 bp, Homo sapien
aggccgggagccttcatcccgcgaa

SEQ ID NO: 4158347 - DNA, 25 bp, Homo sapien
aaagtggcgagcgaactgcagcctg

SEQ ID NO: 4158348 - DNA, 25 bp, Homo sapien
catcccgcgaatatgtgcagggccc

SEQ ID NO: 4158349 - DNA, 25 bp, Homo sapien
cagaggagaggcgagtagtgcggca

SEQ ID NO: 4158350 - DNA, 25 bp, Homo sapien
tcaccccgatttaacctgcagagga

SEQ ID NO: 4158351 - DNA, 25 bp, Homo sapien
tttaacctgcagaggagaggcgagt

SEQ ID NO: 4158352 - DNA, 25 bp, Homo sapien
agaggagaggcgagtagtgcggcac

SEQ ID NO: 4158353 - DNA, 25 bp, Homo sapien
agcgcggagccaggcggggatcggg

SEQ ID NO: 4158354 - DNA, 25 bp, Homo sapien
gatcgggggatatgcgtccggctgc

SEQ ID NO: 4158355 - DNA, 25 bp, Homo sapien
tatgcgtccggctgccgggcaagaa

SEQ ID NO: 4158356 - DNA, 25 bp, Homo sapien
ccaggcggggatcgggggatatgcg

SEQ ID NO: 4158357 - DNA, 25 bp, Homo sapien
tttcctttttctgacttgtgctcat

SEQ ID NO: 4158358 - DNA, 25 bp, Homo sapien
ctttactgcttctgatgaaagtaca

SEQ ID NO: 4158359 - DNA, 25 bp, Homo sapien
ttttcctttttctgacttgtgctca

SEQ ID NO: 4158360 - DNA, 25 bp, Homo sapien
gcttctgatgaaagtacattttcct

SEQ ID NO: 4158361 - DNA, 25 bp, Homo sapien
gtgctgtggcacctggtatagtaaa

SEQ ID NO: 4158362 - DNA, 25 bp, Homo sapien
aagcagcccgtagcatgtgatgggt

SEQ ID NO: 4158363 - DNA, 25 bp, Homo sapien
ctccttaagcagcccgtagcatgtg

SEQ ID NO: 4158364 - DNA, 25 bp, Homo sapien
gctgtggcacctggtatagtaaaca

SEQ ID NO: 4158365 - DNA, 25 bp, Homo sapien
tttgtgaatcagctctatacttgtt

SEQ ID NO: 4158366 - DNA, 25 bp, Homo sapien
ttgtgaatcagctctatacttgttg

SEQ ID NO: 4158367 - DNA, 25 bp, Homo sapien
ttttgtgaatcagctctatacttgt

SEQ ID NO: 4158368 - DNA, 25 bp, Homo sapien
tgtgaatcagctctatacttgttgg

SEQ ID NO: 4158369 - DNA, 25 bp, Homo sapien
tgaagagcacagtaagcatgacctt

SEQ ID NO: 4158370 - DNA, 25 bp, Homo sapien
tatggagagagacgtaaagagacca

SEQ ID NO: 4158371 - DNA, 25 bp, Homo sapien
gggcagttcacaatctactgaagag

SEQ ID NO: 4158372 - DNA, 25 bp, Homo sapien
gagcacgagcaactagtccagactt

SEQ ID NO: 4158373 - DNA, 25 bp, Homo sapien
tagagatgatttccccgagatattg

SEQ ID NO: 4158374 - DNA, 25 bp, Homo sapien
tctgggttcttagggagccactgaa

SEQ ID NO: 4158375 - DNA, 25 bp, Homo sapien
tcctgcactggaagagtgactggct

SEQ ID NO: 4158376 - DNA, 25 bp, Homo sapien
gatcccgtcttcatgatggtcactg

SEQ ID NO: 4158377 - DNA, 25 bp, Homo sapien
tgaaaatctgggctgcaagggactt

SEQ ID NO: 4158378 - DNA, 25 bp, Homo sapien
tcagagtcttctaatgggccttcaa

SEQ ID NO: 4158379 - DNA, 25 bp, Homo sapien
gataacaacagtggcagtaccccag

SEQ ID NO: 4158380 - DNA, 25 bp, Homo sapien
tgttagtctgagaaaccggttcaca

SEQ ID NO: 4158381 - DNA, 25 bp, Homo sapien
catgacttgaagctatggattcacc

SEQ ID NO: 4158382 - DNA, 25 bp, Homo sapien
ggtttgcttgtcagaacactcactc

SEQ ID NO: 4158383 - DNA, 25 bp, Homo sapien
tgagtggcagcttgctttgatgagc

SEQ ID NO: 4158384 - DNA, 25 bp, Homo sapien
tcttctggagcttttacatgacttg

SEQ ID NO: 4158385 - DNA, 25 bp, Homo sapien
ccttagagaggtttccagagtcaaa

SEQ ID NO: 4158386 - DNA, 25 bp, Homo sapien
gagttccgccatttctgagtgacca

SEQ ID NO: 4158387 - DNA, 25 bp, Homo sapien
taaggcatctacctctggttctggc

SEQ ID NO: 4158388 - DNA, 25 bp, Homo sapien
tagctccaacccagttaagtgaggg

SEQ ID NO: 4158389 - DNA, 25 bp, Homo sapien
tatggctatatgctcctggcaggta

SEQ ID NO: 4158390 - DNA, 25 bp, Homo sapien
tttctatcataggagggactgcctc

SEQ ID NO: 4158391 - DNA, 25 bp, Homo sapien
cacgagattgtcaaattgggcagca

SEQ ID NO: 4158392 - DNA, 25 bp, Homo sapien
gctgttaactgacgctgcaggccca

SEQ ID NO: 4158393 - DNA, 25 bp, Homo sapien
tccccttcagcatgcgtttggtaaa

SEQ ID NO: 4158394 - DNA, 25 bp, Homo sapien
tttccatgtctactgtaacaggtgt

SEQ ID NO: 4158395 - DNA, 25 bp, Homo sapien
tgacaaggctatcgtcccagtcttg

SEQ ID NO: 4158396 - DNA, 25 bp, Homo sapien
cacttctggcatcataggtatcacc

SEQ ID NO: 4158397 - DNA, 25 bp, Homo sapien
taatgtaacgggtatcacttcagcc

SEQ ID NO: 4158398 - DNA, 25 bp, Homo sapien
gcagtctttcggtaagtagcttcca

SEQ ID NO: 4158399 - DNA, 25 bp, Homo sapien
gcaggtgctgtctcgtgtgcttcct

SEQ ID NO: 4158400 - DNA, 25 bp, Homo sapien
tctcaatgtctaccactgcgggtaa

SEQ ID NO: 4158401 - DNA, 25 bp, Homo sapien
ggctgggtagccctcataatcctta

SEQ ID NO: 4158402 - DNA, 25 bp, Homo sapien
ccttacttaatgtaggggattcata

SEQ ID NO: 4158403 - DNA, 25 bp, Homo sapien
gggtagccctcataatccttactta

SEQ ID NO: 4158404 - DNA, 25 bp, Homo sapien
gctgggtagccctcataatccttac

SEQ ID NO: 4158405 - DNA, 25 bp, Homo sapien
tctctcctcttgtcatatattgcag

SEQ ID NO: 4158406 - DNA, 25 bp, Homo sapien
tatatcctttgtcactataatctgt

SEQ ID NO: 4158407 - DNA, 25 bp, Homo sapien
tttgtcactataatctgtctctctc

SEQ ID NO: 4158408 - DNA, 25 bp, Homo sapien
tctcctcttgtcatatattgcagta

SEQ ID NO: 4158409 - DNA, 25 bp, Homo sapien
cagcggacgtatcatgaaacaagac

SEQ ID NO: 4158410 - DNA, 25 bp, Homo sapien
cagaacaggcatgctgtcagcggac

SEQ ID NO: 4158411 - DNA, 25 bp, Homo sapien
tggcaactggaaggtaacacgctcc

SEQ ID NO: 4158412 - DNA, 25 bp, Homo sapien
ctagatagaatgtcctcctgtgagc

SEQ ID NO: 4158413 - DNA, 25 bp, Homo sapien
ttcccaggtcttgggttacatctca

SEQ ID NO: 4158414 - DNA, 25 bp, Homo sapien
cccaggtcttgggttacatctcaga

SEQ ID NO: 4158415 - DNA, 25 bp, Homo sapien
tcttgggttacatctcagagtttgt

SEQ ID NO: 4158416 - DNA, 25 bp, Homo sapien
caggtcttgggttacatctcagagt

SEQ ID NO: 4158417 - DNA, 25 bp, Homo sapien
ctttcatggagatcatagataacca

SEQ ID NO: 4158418 - DNA, 25 bp, Homo sapien
ccatttggaaaagaccatgatgtag

SEQ ID NO: 4158419 - DNA, 25 bp, Homo sapien
aatattacagtagacttcttgttta

SEQ ID NO: 4158420 - DNA, 25 bp, Homo sapien
tgatgtagcatcaggaatattacag

SEQ ID NO: 4158421 - DNA, 25 bp, Homo sapien
aaagtttctttgtggatgccttctg

SEQ ID NO: 4158422 - DNA, 25 bp, Homo sapien
ttctagcacacatttctgacctcgg

SEQ ID NO: 4158423 - DNA, 25 bp, Homo sapien
tccagtcacgatttaacaccttttc

SEQ ID NO: 4158424 - DNA, 25 bp, Homo sapien
taagacacgtttgagagaacccaat

SEQ ID NO: 4158425 - DNA, 25 bp, Homo sapien
ctgtatgtagacaggacaacaggct

SEQ ID NO: 4158426 - DNA, 25 bp, Homo sapien
tgtgggaaaagctctatttctggaa

SEQ ID NO: 4158427 - DNA, 25 bp, Homo sapien
ggctgggtcagattgtgggaaaagc

SEQ ID NO: 4158428 - DNA, 25 bp, Homo sapien
gtatgtagacaggacaacaggctgg

SEQ ID NO: 4158429 - DNA, 25 bp, Homo sapien
gaaggacacagatttggagatattc

SEQ ID NO: 4158430 - DNA, 25 bp, Homo sapien
ttcacagtgaaggacacagatttgg

SEQ ID NO: 4158431 - DNA, 25 bp, Homo sapien
cagttcttccaaattggggactgct

SEQ ID NO: 4158432 - DNA, 25 bp, Homo sapien
gagatattcagttcttccaaattgg

SEQ ID NO: 4158433 - DNA, 25 bp, Homo sapien
taaaattaatatctgggtaggcaag

SEQ ID NO: 4158434 - DNA, 25 bp, Homo sapien
gtagaaatctcaaagagcccatggt

SEQ ID NO: 4158435 - DNA, 25 bp, Homo sapien
attaatatctgggtaggcaagccaa

SEQ ID NO: 4158436 - DNA, 25 bp, Homo sapien
catttgaagcggatgtaatgatttc

SEQ ID NO: 4158437 - DNA, 25 bp, Homo sapien
tttaagttcatgggcatttccactt

SEQ ID NO: 4158438 - DNA, 25 bp, Homo sapien
taagttcatgggcatttccactttc

SEQ ID NO: 4158439 - DNA, 25 bp, Homo sapien
ctttaagttcatgggcatttccact

SEQ ID NO: 4158440 - DNA, 25 bp, Homo sapien
aagttcatgggcatttccactttca

SEQ ID NO: 4158441 - DNA, 25 bp, Homo sapien
tctcttgagattccagggtataaca

SEQ ID NO: 4158442 - DNA, 25 bp, Homo sapien
tatcttgccaaataaaccccatgct

SEQ ID NO: 4158443 - DNA, 25 bp, Homo sapien
tgattacattgtttgggtcacccaa

SEQ ID NO: 4158444 - DNA, 25 bp, Homo sapien
tccatgttaggtttgcacagggtac

SEQ ID NO: 4158445 - DNA, 25 bp, Homo sapien
ccaattctgtgaaaatctccattat

SEQ ID NO: 4158446 - DNA, 25 bp, Homo sapien
cagaatctatatgttcactaaactc

SEQ ID NO: 4158447 - DNA, 25 bp, Homo sapien
aaactctttagcctgtccatggaag

SEQ ID NO: 4158448 - DNA, 25 bp, Homo sapien
tccaccaatgacacgaattgatcca

SEQ ID NO: 4158449 - DNA, 25 bp, Homo sapien
gcaccacaagcattactgtcttcaa

SEQ ID NO: 4158450 - DNA, 25 bp, Homo sapien
caccacaagcattactgtcttcaaa

SEQ ID NO: 4158451 - DNA, 25 bp, Homo sapien
aatgcaccacaagcattactgtctt

SEQ ID NO: 4158452 - DNA, 25 bp, Homo sapien
tgcaccacaagcattactgtcttca

SEQ ID NO: 4158453 - DNA, 25 bp, Homo sapien
tggatcttgttttactgccaaagcc

SEQ ID NO: 4158454 - DNA, 25 bp, Homo sapien
gatcttgttttactgccaaagccaa

SEQ ID NO: 4158455 - DNA, 25 bp, Homo sapien
tgtaatgtcaataaacttcccactt

SEQ ID NO: 4158456 - DNA, 25 bp, Homo sapien
tgatttgtaatgtcaataaacttcc

SEQ ID NO: 4158457 - DNA, 25 bp, Homo sapien
gttggattggccgtatcgacatgat

SEQ ID NO: 4158458 - DNA, 25 bp, Homo sapien
ggccgtatcgacatgattatattat

SEQ ID NO: 4158459 - DNA, 25 bp, Homo sapien
tgtattgttctccacagaagaactt

SEQ ID NO: 4158460 - DNA, 25 bp, Homo sapien
cacagaagaacttttgctggtaggc

SEQ ID NO: 4158461 - DNA, 25 bp, Homo sapien
caaatgcggaggttcatttatccca

SEQ ID NO: 4158462 - DNA, 25 bp, Homo sapien
ttggaaccctggtttgctgaatgct

SEQ ID NO: 4158463 - DNA, 25 bp, Homo sapien
tgtaaaatctatacattcaccttgg

SEQ ID NO: 4158464 - DNA, 25 bp, Homo sapien
gaacatggcatgagtgaagtcaaat

SEQ ID NO: 4158465 - DNA, 25 bp, Homo sapien
aaaagaacatggcatgagtgaagtc

SEQ ID NO: 4158466 - DNA, 25 bp, Homo sapien
gattttcccatggttcctcaaacta

SEQ ID NO: 4158467 - DNA, 25 bp, Homo sapien
tgccttcaagtatagcactctggga

SEQ ID NO: 4158468 - DNA, 25 bp, Homo sapien
caggcattaggctgggcactttaca

SEQ ID NO: 4158469 - DNA, 25 bp, Homo sapien
caactgcttatgatgcgccaggcat

SEQ ID NO: 4158470 - DNA, 25 bp, Homo sapien
gaggccttcttctaacacacagtga

SEQ ID NO: 4158471 - DNA, 25 bp, Homo sapien
ttgactttagatgctgggcaaccgc

SEQ ID NO: 4158472 - DNA, 25 bp, Homo sapien
caggaagtaaggtcagcatagaggc

SEQ ID NO: 4158473 - DNA, 25 bp, Homo sapien
cacagtgattaacaaacatgtcttc

SEQ ID NO: 4158474 - DNA, 25 bp, Homo sapien
ggagtaaagtaggattctaactatc

SEQ ID NO: 4158475 - DNA, 25 bp, Homo sapien
gtaggattctaactatctttttcca

SEQ ID NO: 4158476 - DNA, 25 bp, Homo sapien
aaatccatcctactgcagtatcatc

SEQ ID NO: 4158477 - DNA, 25 bp, Homo sapien
tgcagtatcatcagggtagattcct

SEQ ID NO: 4158478 - DNA, 25 bp, Homo sapien
agtgtaggtccttgttcagaacaga

SEQ ID NO: 4158479 - DNA, 25 bp, Homo sapien
caaaaaggctgatggagggttcttc

SEQ ID NO: 4158480 - DNA, 25 bp, Homo sapien
tcacaatgctccagagcaaaaaggc

SEQ ID NO: 4158481 - DNA, 25 bp, Homo sapien
cagcctcttctagatgtaactctct

SEQ ID NO: 4158482 - DNA, 25 bp, Homo sapien
tcataggacggagggaaccaattgt

SEQ ID NO: 4158483 - DNA, 25 bp, Homo sapien
taggcctgagtaggatttgtcttcc

SEQ ID NO: 4158484 - DNA, 25 bp, Homo sapien
ttgttttccatctgctgaatgctgt

SEQ ID NO: 4158485 - DNA, 25 bp, Homo sapien
tccagtttgggatctcattaggcct

SEQ ID NO: 4158486 - DNA, 25 bp, Homo sapien
gagcctcagcatttagatccactag

SEQ ID NO: 4158487 - DNA, 25 bp, Homo sapien
tcagtgcctgaaataggtggtactc

SEQ ID NO: 4158488 - DNA, 25 bp, Homo sapien
tgtgccaggaaagccattaatgttt

SEQ ID NO: 4158489 - DNA, 25 bp, Homo sapien
tattcaaccgtcacagcaatgagat

SEQ ID NO: 4158490 - DNA, 25 bp, Homo sapien
tattgaacacgtagtatgtgtaagc

SEQ ID NO: 4158491 - DNA, 25 bp, Homo sapien
tgtaagcagcatgctaaatgcattc

SEQ ID NO: 4158492 - DNA, 25 bp, Homo sapien
tctgtgccattatgttatttgtcag

SEQ ID NO: 4158493 - DNA, 25 bp, Homo sapien
tatgtgtaagcagcatgctaaatgc

SEQ ID NO: 4158494 - DNA, 25 bp, Homo sapien
ccctgggcacggttctttattctga

SEQ ID NO: 4158495 - DNA, 25 bp, Homo sapien
ggatttaaagagtcctcggcagtag

SEQ ID NO: 4158496 - DNA, 25 bp, Homo sapien
tccactatagggagaaatgcacaca

SEQ ID NO: 4158497 - DNA, 25 bp, Homo sapien
gactgtcagatattcaccctgggca

SEQ ID NO: 4158498 - DNA, 25 bp, Homo sapien
cggccaccaatcacatcaagacatg

SEQ ID NO: 4158499 - DNA, 25 bp, Homo sapien
gagataagagctgatagttccattt

SEQ ID NO: 4158500 - DNA, 25 bp, Homo sapien
actttagctccaggtgtgtcccggc

SEQ ID NO: 4158501 - DNA, 25 bp, Homo sapien
gttcagtccatagagctactttagc

SEQ ID NO: 4158502 - DNA, 25 bp, Homo sapien
aaatgaggagatttggaactgaaac

SEQ ID NO: 4158503 - DNA, 25 bp, Homo sapien
tatccagggacacaacattgggtat

SEQ ID NO: 4158504 - DNA, 25 bp, Homo sapien
ggaactgaaactaatatccagggac

SEQ ID NO: 4158505 - DNA, 25 bp, Homo sapien
caacattgggtatcatcaaaggccc

SEQ ID NO: 4158506 - DNA, 25 bp, Homo sapien
tacaattacatgagtcttgtcacaa

SEQ ID NO: 4158507 - DNA, 25 bp, Homo sapien
gggctgatttacaattacatgagtc

SEQ ID NO: 4158508 - DNA, 25 bp, Homo sapien
tacatgagtcttgtcacaataattt

SEQ ID NO: 4158509 - DNA, 25 bp, Homo sapien
cctccaggggctgatttacaattac

SEQ ID NO: 4158510 - DNA, 25 bp, Homo sapien
taagagcgatagtctcagaggctgg

SEQ ID NO: 4158511 - DNA, 25 bp, Homo sapien
taggaacactgagtaatggcaagaa

SEQ ID NO: 4158512 - DNA, 25 bp, Homo sapien
gaggacagtagcttcctttccacgt

SEQ ID NO: 4158513 - DNA, 25 bp, Homo sapien
ttccacgtccacaagacaatgacag

SEQ ID NO: 4158514 - DNA, 25 bp, Homo sapien
gaggcacgcaacacctatggacaaa

SEQ ID NO: 4158515 - DNA, 25 bp, Homo sapien
cacgtaacagtgcaagtttggccat

SEQ ID NO: 4158516 - DNA, 25 bp, Homo sapien
caataacgggccatcaggaacagga

SEQ ID NO: 4158517 - DNA, 25 bp, Homo sapien
tattcctaacaaagctgaggtccct

SEQ ID NO: 4158518 - DNA, 25 bp, Homo sapien
tatttaatccagtgtggtagaaaag

SEQ ID NO: 4158519 - DNA, 25 bp, Homo sapien
caacttctttaaagagcttctttgg

SEQ ID NO: 4158520 - DNA, 25 bp, Homo sapien
attgaatgtcattaacctggctttg

SEQ ID NO: 4158521 - DNA, 25 bp, Homo sapien
ggcacaattccaatgtatcatttag

SEQ ID NO: 4158522 - DNA, 25 bp, Homo sapien
taacgggcacatgaaagaaagaaca

SEQ ID NO: 4158523 - DNA, 25 bp, Homo sapien
tgtactaacgggcacatgaaagaaa

SEQ ID NO: 4158524 - DNA, 25 bp, Homo sapien
agaaagaacagcaaattaccaagtg

SEQ ID NO: 4158525 - DNA, 25 bp, Homo sapien
caagtgtctcagaaaatgacaaaac

SEQ ID NO: 4158526 - DNA, 25 bp, Homo sapien
ggacctgaaacttactacagatgag

SEQ ID NO: 4158527 - DNA, 25 bp, Homo sapien
gaaaagcaaagacctgagccgagga

SEQ ID NO: 4158528 - DNA, 25 bp, Homo sapien
gaaagcctggtattatccctctgga

SEQ ID NO: 4158529 - DNA, 25 bp, Homo sapien
cagctatttctgtcaaggacctgaa

SEQ ID NO: 4158530 - DNA, 25 bp, Homo sapien
gatgtgaatgtctgccggtgtgtca

SEQ ID NO: 4158531 - DNA, 25 bp, Homo sapien
caaagaaagcaaagcctacagggag

SEQ ID NO: 4158532 - DNA, 25 bp, Homo sapien
ggccggctccctgtaagcagatgaa

SEQ ID NO: 4158533 - DNA, 25 bp, Homo sapien
tttaatctcgcccatcaagacagag

SEQ ID NO: 4158534 - DNA, 25 bp, Homo sapien
gagacacgctctacagctgtgaaat

SEQ ID NO: 4158535 - DNA, 25 bp, Homo sapien
acacgtggcctgctaatggtcgcga

SEQ ID NO: 4158536 - DNA, 25 bp, Homo sapien
tggttacagagagtcgcacacgtgg

SEQ ID NO: 4158537 - DNA, 25 bp, Homo sapien
tcatgtcgggcctaagagacacgct

SEQ ID NO: 4158538 - DNA, 25 bp, Homo sapien
ttaattccaactactgtccgtatgt

SEQ ID NO: 4158539 - DNA, 25 bp, Homo sapien
tgactcttatcaaatggaacaaact

SEQ ID NO: 4158540 - DNA, 25 bp, Homo sapien
ctgtccgtatgtaagcatgttccat

SEQ ID NO: 4158541 - DNA, 25 bp, Homo sapien
tccaactactgtccgtatgtaagca

SEQ ID NO: 4158542 - DNA, 25 bp, Homo sapien
gtatcgatcttgacatcctcaaggg

SEQ ID NO: 4158543 - DNA, 25 bp, Homo sapien
cctcaagggcaaattgtaattgagt

SEQ ID NO: 4158544 - DNA, 25 bp, Homo sapien
tccaggttgcagtatcgatcttgac

SEQ ID NO: 4158545 - DNA, 25 bp, Homo sapien
tagtcagagatgaacatccaggttg

SEQ ID NO: 4158546 - DNA, 25 bp, Homo sapien
ggttggtgccctggatctcgtaaga

SEQ ID NO: 4158547 - DNA, 25 bp, Homo sapien
cagtgcggtcttccaacaaccaaag

SEQ ID NO: 4158548 - DNA, 25 bp, Homo sapien
tctcgtaagagcactgaggtggaat

SEQ ID NO: 4158549 - DNA, 25 bp, Homo sapien
tgacagtagcttaagatgggcaact

SEQ ID NO: 4158550 - DNA, 25 bp, Homo sapien
tggcttctttctgtcgctgcaggaa

SEQ ID NO: 4158551 - DNA, 25 bp, Homo sapien
ctgttgcatgagtgagtctcttggc

SEQ ID NO: 4158552 - DNA, 25 bp, Homo sapien
tgcaggaatttgcaggtcctggcca

SEQ ID NO: 4158553 - DNA, 25 bp, Homo sapien
tctgtcgctgcaggaatttgcaggt

SEQ ID NO: 4158554 - DNA, 25 bp, Homo sapien
gtcagaaagtgtaggctgtctcctc

SEQ ID NO: 4158555 - DNA, 25 bp, Homo sapien
ggtatgagcatagggtggacccact

SEQ ID NO: 4158556 - DNA, 25 bp, Homo sapien
ggtgtcagaaagtgtaggctgtctc

SEQ ID NO: 4158557 - DNA, 25 bp, Homo sapien
cttgtgtaggtatgagcatagggtg

SEQ ID NO: 4158558 - DNA, 25 bp, Homo sapien
tgaggacaaagtgagtcaccagaat

SEQ ID NO: 4158559 - DNA, 25 bp, Homo sapien
gaggacaaagtgagtcaccagaatc

SEQ ID NO: 4158560 - DNA, 25 bp, Homo sapien
cagggtgatgaggtagatgaccaag

SEQ ID NO: 4158561 - DNA, 25 bp, Homo sapien
cctgcagccctggatgatctgtgag

SEQ ID NO: 4158562 - DNA, 25 bp, Homo sapien
tagatgaccaagaacaccaggaaca

SEQ ID NO: 4158563 - DNA, 25 bp, Homo sapien
tgcagccctggatgatctgtgagtc

SEQ ID NO: 4158564 - DNA, 25 bp, Homo sapien
ttccagatgagagccatcaggccaa

SEQ ID NO: 4158565 - DNA, 25 bp, Homo sapien
tgcatctgcaaaggctaaactgcca

SEQ ID NO: 4158566 - DNA, 25 bp, Homo sapien
tctgcaaaggctaaactgccaagaa

SEQ ID NO: 4158567 - DNA, 25 bp, Homo sapien
tccagatgagagccatcaggccaag

SEQ ID NO: 4158568 - DNA, 25 bp, Homo sapien
aaaattgataagcatcttagaagtt

SEQ ID NO: 4158569 - DNA, 25 bp, Homo sapien
aaaaattgataagcatcttagaagt

SEQ ID NO: 4158570 - DNA, 25 bp, Homo sapien
aaattgataagcatcttagaagtta

SEQ ID NO: 4158571 - DNA, 25 bp, Homo sapien
aattgataagcatcttagaagttac

SEQ ID NO: 4158572 - DNA, 25 bp, Homo sapien
cacacttagccatggatagcatatg

SEQ ID NO: 4158573 - DNA, 25 bp, Homo sapien
cacttagccatggatagcatatgat

SEQ ID NO: 4158574 - DNA, 25 bp, Homo sapien
ggcacacttagccatggatagcata

SEQ ID NO: 4158575 - DNA, 25 bp, Homo sapien
gggtggcacacttagccatggatag

SEQ ID NO: 4158576 - DNA, 25 bp, Homo sapien
ggccatcactaccagcaggaagcat

SEQ ID NO: 4158577 - DNA, 25 bp, Homo sapien
aagcattctgtggttgcattggaac

SEQ ID NO: 4158578 - DNA, 25 bp, Homo sapien
ctgtggttgcattggaaccaaaaaa

SEQ ID NO: 4158579 - DNA, 25 bp, Homo sapien
aaagcaagggattgcatatggctac

SEQ ID NO: 4158580 - DNA, 25 bp, Homo sapien
tgagtacagaggctattggacatca

SEQ ID NO: 4158581 - DNA, 25 bp, Homo sapien
tacagaggctattggacatcaccac

SEQ ID NO: 4158582 - DNA, 25 bp, Homo sapien
agtacagaggctattggacatcacc

SEQ ID NO: 4158583 - DNA, 25 bp, Homo sapien
gtacagaggctattggacatcacca

SEQ ID NO: 4158584 - DNA, 25 bp, Homo sapien
taacaaacccacatgaatcgctgaa

SEQ ID NO: 4158585 - DNA, 25 bp, Homo sapien
tcagaagtatattaactgtaggatt

SEQ ID NO: 4158586 - DNA, 25 bp, Homo sapien
tcgctgaatgcagaaaaccaataaa

SEQ ID NO: 4158587 - DNA, 25 bp, Homo sapien
tggtgcaagaaattttgaacagctg

SEQ ID NO: 4158588 - DNA, 25 bp, Homo sapien
cagagagaatataggagtaagagac

SEQ ID NO: 4158589 - DNA, 25 bp, Homo sapien
cgataagagtcataaaagtgaagac

SEQ ID NO: 4158590 - DNA, 25 bp, Homo sapien
gacgataagagtcataaaagtgaag

SEQ ID NO: 4158591 - DNA, 25 bp, Homo sapien
tataggagtaagagacgataagagt

SEQ ID NO: 4158592 - DNA, 25 bp, Homo sapien
gcagatgggcactgcaagtagagaa

SEQ ID NO: 4158593 - DNA, 25 bp, Homo sapien
agcagatgggcactgcaagtagaga

SEQ ID NO: 4158594 - DNA, 25 bp, Homo sapien
agggcatctataacctctttgttcc

SEQ ID NO: 4158595 - DNA, 25 bp, Homo sapien
tgcagctgatccagacctagaactc

SEQ ID NO: 4158596 - DNA, 25 bp, Homo sapien
cttctcagggcatctataacctctt

SEQ ID NO: 4158597 - DNA, 25 bp, Homo sapien
cagctgatccagacctagaactcac

SEQ ID NO: 4158598 - DNA, 25 bp, Homo sapien
gctgagccttcatctaaagttaggt

SEQ ID NO: 4158599 - DNA, 25 bp, Homo sapien
tccactagccttttgtggagcgctg

SEQ ID NO: 4158600 - DNA, 25 bp, Homo sapien
gaagttgcttccactagccttttgt

SEQ ID NO: 4158601 - DNA, 25 bp, Homo sapien
gccttttgtggagcgctgagccttc

SEQ ID NO: 4158602 - DNA, 25 bp, Homo sapien
atttgcgaattttcaactgttccat

SEQ ID NO: 4158603 - DNA, 25 bp, Homo sapien
tcactaaagataacacaaagcggta

SEQ ID NO: 4158604 - DNA, 25 bp, Homo sapien
gacaatcactaaagataacacaaag

SEQ ID NO: 4158605 - DNA, 25 bp, Homo sapien
taacacaaagcggtagcattttatt

SEQ ID NO: 4158606 - DNA, 25 bp, Homo sapien
taaagataacacaaagcggtagcat

SEQ ID NO: 4158607 - DNA, 25 bp, Homo sapien
catggtcgatctgtaagtcctgtga

SEQ ID NO: 4158608 - DNA, 25 bp, Homo sapien
caaactctgtcacaagagtcttatt

SEQ ID NO: 4158609 - DNA, 25 bp, Homo sapien
gtcacaagagtcttatttccctctg

SEQ ID NO: 4158610 - DNA, 25 bp, Homo sapien
aagaggacgtgcagccatggtcgat

SEQ ID NO: 4158611 - DNA, 25 bp, Homo sapien
cgttccaaattagaactatcagtcc

SEQ ID NO: 4158612 - DNA, 25 bp, Homo sapien
actgggtgatgcactcagctaggga

SEQ ID NO: 4158613 - DNA, 25 bp, Homo sapien
ttatagaggttgaagtacaagcatc

SEQ ID NO: 4158614 - DNA, 25 bp, Homo sapien
ctatcagtccaaggttgcccaccat

SEQ ID NO: 4158615 - DNA, 25 bp, Homo sapien
tggataaagcaagggattacatatg

SEQ ID NO: 4158616 - DNA, 25 bp, Homo sapien
gcgctgagtttgttggacatcatca

SEQ ID NO: 4158617 - DNA, 25 bp, Homo sapien
aaatacttagcaactgagcgctgag

SEQ ID NO: 4158618 - DNA, 25 bp, Homo sapien
cttagcaactgagcgctgagtttgt

SEQ ID NO: 4158619 - DNA, 25 bp, Homo sapien
cgctgagtttgttggacatcatcac

SEQ ID NO: 4158620 - DNA, 25 bp, Homo sapien
cattagtgcgttaatagatggacca

SEQ ID NO: 4158621 - DNA, 25 bp, Homo sapien
taatgtattatgttaaacctgcaga

SEQ ID NO: 4158622 - DNA, 25 bp, Homo sapien
cagaatatcaaagagcacacgagta

SEQ ID NO: 4158623 - DNA, 25 bp, Homo sapien
cagaaagttagtcgcaatagtaaac

SEQ ID NO: 4158624 - DNA, 25 bp, Homo sapien
tccgtagtacaatgagacagaaagc

SEQ ID NO: 4158625 - DNA, 25 bp, Homo sapien
catgaagatcagagttccgtagtac

SEQ ID NO: 4158626 - DNA, 25 bp, Homo sapien
taagccagatgcaggacgcacatac

SEQ ID NO: 4158627 - DNA, 25 bp, Homo sapien
tgtcttggtcttcagctaagccaga

SEQ ID NO: 4158628 - DNA, 25 bp, Homo sapien
ttacttccttataactcttctcaat

SEQ ID NO: 4158629 - DNA, 25 bp, Homo sapien
tacttccttataactcttctcaatg

SEQ ID NO: 4158630 - DNA, 25 bp, Homo sapien
taaaagtgtccaagcatccagtttc

SEQ ID NO: 4158631 - DNA, 25 bp, Homo sapien
ttaaaagtgtccaagcatccagttt

SEQ ID NO: 4158632 - DNA, 25 bp, Homo sapien
caaattgacagactgcaaatagtga

SEQ ID NO: 4158633 - DNA, 25 bp, Homo sapien
gattgagaaagtgttagttttcctg

SEQ ID NO: 4158634 - DNA, 25 bp, Homo sapien
gacagattcaggtgtccactcagtt

SEQ ID NO: 4158635 - DNA, 25 bp, Homo sapien
cactcagtttctgtaagtcttttga

SEQ ID NO: 4158636 - DNA, 25 bp, Homo sapien
tagaagatctgtaagtccttggagg

SEQ ID NO: 4158637 - DNA, 25 bp, Homo sapien
gaagatctgtaagtccttggaggac

SEQ ID NO: 4158638 - DNA, 25 bp, Homo sapien
cttggaggacggagttcataatctg

SEQ ID NO: 4158639 - DNA, 25 bp, Homo sapien
gacggagttcataatctgtgtctta

SEQ ID NO: 4158640 - DNA, 25 bp, Homo sapien
gatgagagccatcaggccacggttg

SEQ ID NO: 4158641 - DNA, 25 bp, Homo sapien
tgcagaaggtattggacatcactag

SEQ ID NO: 4158642 - DNA, 25 bp, Homo sapien
tgcatctgcaaaggctaaactgccg

SEQ ID NO: 4158643 - DNA, 25 bp, Homo sapien
aaactgccgagggataagcacatgg

SEQ ID NO: 4158644 - DNA, 25 bp, Homo sapien
tattctcttcaatgcacctatgacc

SEQ ID NO: 4158645 - DNA, 25 bp, Homo sapien
ggatttaccagaggaattattatca

SEQ ID NO: 4158646 - DNA, 25 bp, Homo sapien
cataggagtaagagacgatgatagt

SEQ ID NO: 4158647 - DNA, 25 bp, Homo sapien
aatgcacctatgacctctttattcc

SEQ ID NO: 4158648 - DNA, 25 bp, Homo sapien
aagccatcaaccgaggctctggttg

SEQ ID NO: 4158649 - DNA, 25 bp, Homo sapien
ccaaggctttttgccagtttacaca

SEQ ID NO: 4158650 - DNA, 25 bp, Homo sapien
gttttgaggaaacatcagtcagatc

SEQ ID NO: 4158651 - DNA, 25 bp, Homo sapien
ggttcccagcagactaagccatcaa

SEQ ID NO: 4158652 - DNA, 25 bp, Homo sapien
agtgtccacccaaaccctgcccact

SEQ ID NO: 4158653 - DNA, 25 bp, Homo sapien
ccacccaaaccctgcccactttctg

SEQ ID NO: 4158654 - DNA, 25 bp, Homo sapien
ctcagtgtccacccaaaccctgccc

SEQ ID NO: 4158655 - DNA, 25 bp, Homo sapien
cacccaaaccctgcccactttctgg

SEQ ID NO: 4158656 - DNA, 25 bp, Homo sapien
cagcttttccttgttcacaacacca

SEQ ID NO: 4158657 - DNA, 25 bp, Homo sapien
cttttccttgttcacaacaccaggg

SEQ ID NO: 4158658 - DNA, 25 bp, Homo sapien
tcatgtcttggaatgtctgggcttt

SEQ ID NO: 4158659 - DNA, 25 bp, Homo sapien
gaatgtctgggcttttccttcagct

SEQ ID NO: 4158660 - DNA, 25 bp, Homo sapien
tgcttcagatctttctgccgagttt

SEQ ID NO: 4158661 - DNA, 25 bp, Homo sapien
gcaatttggcaaatgcttcagatct

SEQ ID NO: 4158662 - DNA, 25 bp, Homo sapien
aaatgcttcagatctttctgccgag

SEQ ID NO: 4158663 - DNA, 25 bp, Homo sapien
tggcaaatgcttcagatctttctgc

SEQ ID NO: 4158664 - DNA, 25 bp, Homo sapien
caaactctgtcagcaatgttgcatt

SEQ ID NO: 4158665 - DNA, 25 bp, Homo sapien
aacaaactctgtcagcaatgttgca

SEQ ID NO: 4158666 - DNA, 25 bp, Homo sapien
acaaactctgtcagcaatgttgcat

SEQ ID NO: 4158667 - DNA, 25 bp, Homo sapien
gaacaaactctgtcagcaatgttgc

SEQ ID NO: 4158668 - DNA, 25 bp, Homo sapien
gaatgccaggaacaggggtattttc

SEQ ID NO: 4158669 - DNA, 25 bp, Homo sapien
gatggtgatgagatatattaccaag

SEQ ID NO: 4158670 - DNA, 25 bp, Homo sapien
gatgagatatattaccaagaatgcc

SEQ ID NO: 4158671 - DNA, 25 bp, Homo sapien
atgccaggaacaggggtattttcca

SEQ ID NO: 4158672 - DNA, 25 bp, Homo sapien
ggtcactgtggatgatatccaagca

SEQ ID NO: 4158673 - DNA, 25 bp, Homo sapien
aaggtgagggtctttccagatgaca

SEQ ID NO: 4158674 - DNA, 25 bp, Homo sapien
tccaagcatccacaaaagctaaatt

SEQ ID NO: 4158675 - DNA, 25 bp, Homo sapien
gatgacagcaatcagaccaagattc

SEQ ID NO: 4158676 - DNA, 25 bp, Homo sapien
gaaaacattccgtggttacactgat

SEQ ID NO: 4158677 - DNA, 25 bp, Homo sapien
acaagattaatagccggatgcacag

SEQ ID NO: 4158678 - DNA, 25 bp, Homo sapien
tggtcataatggctggataaagtaa

SEQ ID NO: 4158679 - DNA, 25 bp, Homo sapien
aactgtatcttgcattcagagagag

SEQ ID NO: 4158680 - DNA, 25 bp, Homo sapien
gtacaagaaatcttagacaatggga

SEQ ID NO: 4158681 - DNA, 25 bp, Homo sapien
gaataaaaatccttcatggattaaa

SEQ ID NO: 4158682 - DNA, 25 bp, Homo sapien
cagtaaatgtgatgtactatgttgg

SEQ ID NO: 4158683 - DNA, 25 bp, Homo sapien
gttggagttacagaaggttagtctg

SEQ ID NO: 4158684 - DNA, 25 bp, Homo sapien
tctgcttgcggagatgcagggccca

SEQ ID NO: 4158685 - DNA, 25 bp, Homo sapien
cacaatgctgaatacctgaattgaa

SEQ ID NO: 4158686 - DNA, 25 bp, Homo sapien
acaatgctgaatacctgaattgaac

SEQ ID NO: 4158687 - DNA, 25 bp, Homo sapien
tgcttgcggagatgcagggcccaca

SEQ ID NO: 4158688 - DNA, 25 bp, Homo sapien
gatgacagtgtagaatagaggctcc

SEQ ID NO: 4158689 - DNA, 25 bp, Homo sapien
tgacagtgtagaatagaggctccac

SEQ ID NO: 4158690 - DNA, 25 bp, Homo sapien
atgacagtgtagaatagaggctcca

SEQ ID NO: 4158691 - DNA, 25 bp, Homo sapien
tgatgacagtgtagaatagaggctc

SEQ ID NO: 4158692 - DNA, 25 bp, Homo sapien
taacatttttgtgaatgaaactgtg

SEQ ID NO: 4158693 - DNA, 25 bp, Homo sapien
aacatttttgtgaatgaaactgtga

SEQ ID NO: 4158694 - DNA, 25 bp, Homo sapien
tttaacatttttgtgaatgaaactg

SEQ ID NO: 4158695 - DNA, 25 bp, Homo sapien
acatttttgtgaatgaaactgtgac

SEQ ID NO: 4158696 - DNA, 25 bp, Homo sapien
tttgcttcctcttgctgggcaccat

SEQ ID NO: 4158697 - DNA, 25 bp, Homo sapien
gtttttgcttcctcttgctgggcac

SEQ ID NO: 4158698 - DNA, 25 bp, Homo sapien
ttttgtttttgcttcctcttgctgg

SEQ ID NO: 4158699 - DNA, 25 bp, Homo sapien
tttttgtttttgcttcctcttgctg

SEQ ID NO: 4158700 - DNA, 25 bp, Homo sapien
acaaactctgtcagcaatgttgcat

SEQ ID NO: 4158701 - DNA, 25 bp, Homo sapien
gaacaaactctgtcagcaatgttgc

SEQ ID NO: 4158702 - DNA, 25 bp, Homo sapien
aacaaactctgtcagcaatgttgca

SEQ ID NO: 4158703 - DNA, 25 bp, Homo sapien
caaactctgtcagcaatgttgcatt

SEQ ID NO: 4158704 - DNA, 25 bp, Homo sapien
atgccaggaacaggggtattttcca

SEQ ID NO: 4158705 - DNA, 25 bp, Homo sapien
gaatgccaggaacaggggtattttc

SEQ ID NO: 4158706 - DNA, 25 bp, Homo sapien
gatgagatatattaccaagaatgcc

SEQ ID NO: 4158707 - DNA, 25 bp, Homo sapien
gatggtgatgagatatattaccaag

SEQ ID NO: 4158708 - DNA, 25 bp, Homo sapien
agctaagaagttgatcagcatcttc

SEQ ID NO: 4158709 - DNA, 25 bp, Homo sapien
gatgacagcaatcagaccaagattc

SEQ ID NO: 4158710 - DNA, 25 bp, Homo sapien
ttagctaagaagttgatcagcatct

SEQ ID NO: 4158711 - DNA, 25 bp, Homo sapien
gacagcaatcagaccaagattcccc

SEQ ID NO: 4158712 - DNA, 25 bp, Homo sapien
cactgattgcaaacgaaaacaactg

SEQ ID NO: 4158713 - DNA, 25 bp, Homo sapien
actgattgcaaacgaaaacaactgt

SEQ ID NO: 4158714 - DNA, 25 bp, Homo sapien
ctgattgcaaacgaaaacaactgta

SEQ ID NO: 4158715 - DNA, 25 bp, Homo sapien
cagtaaaagtgttgtattatgttgg

SEQ ID NO: 4158716 - DNA, 25 bp, Homo sapien
gttggagttacagaaggttagtctg

SEQ ID NO: 4158717 - DNA, 25 bp, Homo sapien
gaataaaaatccttcatggattaaa

SEQ ID NO: 4158718 - DNA, 25 bp, Homo sapien
aacaatgggataatgtcacagtaaa

SEQ ID NO: 4158719 - DNA, 25 bp, Homo sapien
agatataagaacagtccctatggta

SEQ ID NO: 4158720 - DNA, 25 bp, Homo sapien
tataagaacagtccctatggtaaaa

SEQ ID NO: 4158721 - DNA, 25 bp, Homo sapien
gatataagaacagtccctatggtaa

SEQ ID NO: 4158722 - DNA, 25 bp, Homo sapien
atataagaacagtccctatggtaaa

SEQ ID NO: 4158723 - DNA, 25 bp, Homo sapien
tatgacagtgtaaaatagagactcc

SEQ ID NO: 4158724 - DNA, 25 bp, Homo sapien
agatcatgggatttaataaaggaac

SEQ ID NO: 4158725 - DNA, 25 bp, Homo sapien
gagactccatcatatcttggtcatc

SEQ ID NO: 4158726 - DNA, 25 bp, Homo sapien
taagagatgagctccacaggtggag

SEQ ID NO: 4158727 - DNA, 25 bp, Homo sapien
tgaacatttttgtgaatgaagctat

SEQ ID NO: 4158728 - DNA, 25 bp, Homo sapien
acatttttgtgaatgaagctattac

SEQ ID NO: 4158729 - DNA, 25 bp, Homo sapien
cttttgaacatttttgtgaatgaag

SEQ ID NO: 4158730 - DNA, 25 bp, Homo sapien
tttgaacatttttgtgaatgaagct

SEQ ID NO: 4158731 - DNA, 25 bp, Homo sapien
aacaaactctgtcagcaatgttgca

SEQ ID NO: 4158732 - DNA, 25 bp, Homo sapien
acaaactctgtcagcaatgttgcat

SEQ ID NO: 4158733 - DNA, 25 bp, Homo sapien
gaacaaactctgtcagcaatgttgc

SEQ ID NO: 4158734 - DNA, 25 bp, Homo sapien
caaactctgtcagcaatgttgcatt

SEQ ID NO: 4158735 - DNA, 25 bp, Homo sapien
ggtcactgtggatgatatccaagca

SEQ ID NO: 4158736 - DNA, 25 bp, Homo sapien
tccaagcatccacaaaagctaaatt

SEQ ID NO: 4158737 - DNA, 25 bp, Homo sapien
aaggtgagggtctttccagatgaca

SEQ ID NO: 4158738 - DNA, 25 bp, Homo sapien
gatgacagcaatcagaccaagattc

SEQ ID NO: 4158739 - DNA, 25 bp, Homo sapien
ctgtggttacgccaattgcaatgga

SEQ ID NO: 4158740 - DNA, 25 bp, Homo sapien
atgccattgttgccaagagaaaaca

SEQ ID NO: 4158741 - DNA, 25 bp, Homo sapien
tgccattgttgccaagagaaaacat

SEQ ID NO: 4158742 - DNA, 25 bp, Homo sapien
gatcatatgccattgttgccaagag

SEQ ID NO: 4158743 - DNA, 25 bp, Homo sapien
atagcgatcatatgccattgttgcc

SEQ ID NO: 4158744 - DNA, 25 bp, Homo sapien
gtacaagaaatcttagacaatggga

SEQ ID NO: 4158745 - DNA, 25 bp, Homo sapien
acaagattaatagccggatgcacag

SEQ ID NO: 4158746 - DNA, 25 bp, Homo sapien
gataaagtaaaggtttgcatatggc

SEQ ID NO: 4158747 - DNA, 25 bp, Homo sapien
tggtcataatggctggataaagtaa

SEQ ID NO: 4158748 - DNA, 25 bp, Homo sapien
cttttctaagactgtgaagagaaca

SEQ ID NO: 4158749 - DNA, 25 bp, Homo sapien
tttctaagactgtgaagagaacaaa

SEQ ID NO: 4158750 - DNA, 25 bp, Homo sapien
gggccatagtataaacagacagaga

SEQ ID NO: 4158751 - DNA, 25 bp, Homo sapien
gagaagggggccatagtataaacag

SEQ ID NO: 4158752 - DNA, 25 bp, Homo sapien
taaacagacagagaagagatgggct

SEQ ID NO: 4158753 - DNA, 25 bp, Homo sapien
tagtataaacagacagagaagagat

SEQ ID NO: 4158754 - DNA, 25 bp, Homo sapien
tctgcttgcggagatgcagggccca

SEQ ID NO: 4158755 - DNA, 25 bp, Homo sapien
ctgcttgcggagatgcagggcccac

SEQ ID NO: 4158756 - DNA, 25 bp, Homo sapien
tgcttgcggagatgcagggcccaca

SEQ ID NO: 4158757 - DNA, 25 bp, Homo sapien
tgacagtgtagaatagaggctccac

SEQ ID NO: 4158758 - DNA, 25 bp, Homo sapien
gatgacagtgtagaatagaggctcc

SEQ ID NO: 4158759 - DNA, 25 bp, Homo sapien
atgacagtgtagaatagaggctcca

SEQ ID NO: 4158760 - DNA, 25 bp, Homo sapien
tgatgacagtgtagaatagaggctc

SEQ ID NO: 4158761 - DNA, 25 bp, Homo sapien
tattttgttacttgacctgtgagta

SEQ ID NO: 4158762 - DNA, 25 bp, Homo sapien
acctgtgagtagacttcctgtgaga

SEQ ID NO: 4158763 - DNA, 25 bp, Homo sapien
gttacttgacctgtgagtagacttc

SEQ ID NO: 4158764 - DNA, 25 bp, Homo sapien
tacactatggcagttccttcactgt

SEQ ID NO: 4158765 - DNA, 25 bp, Homo sapien
tggataaagtaaaggtttgcatatg

SEQ ID NO: 4158766 - DNA, 25 bp, Homo sapien
gataaagtaaaggtttgcatatggc

SEQ ID NO: 4158767 - DNA, 25 bp, Homo sapien
gatgcacagtccattggtcataatg

SEQ ID NO: 4158768 - DNA, 25 bp, Homo sapien
ggataaagtaaaggtttgcatatgg

SEQ ID NO: 4158769 - DNA, 25 bp, Homo sapien
cttgaattgaacatgagaaaataaa

SEQ ID NO: 4158770 - DNA, 25 bp, Homo sapien
attgaacatgagaaaataaaaacca

SEQ ID NO: 4158771 - DNA, 25 bp, Homo sapien
gaattgaacatgagaaaataaaaac

SEQ ID NO: 4158772 - DNA, 25 bp, Homo sapien
ttgaacatgagaaaataaaaaccat

SEQ ID NO: 4158773 - DNA, 25 bp, Homo sapien
agatcatgggatttaataaaggaac

SEQ ID NO: 4158774 - DNA, 25 bp, Homo sapien
gagactccatcatatcttggtcatc

SEQ ID NO: 4158775 - DNA, 25 bp, Homo sapien
gaactatgacagtgtaaaatagaga

SEQ ID NO: 4158776 - DNA, 25 bp, Homo sapien
cgaggggcccatagtataaagatac

SEQ ID NO: 4158777 - DNA, 25 bp, Homo sapien
tttgaacatttttgtgaatgaatct

SEQ ID NO: 4158778 - DNA, 25 bp, Homo sapien
tgaacatttttgtgaatgaatctat

SEQ ID NO: 4158779 - DNA, 25 bp, Homo sapien
tcctttgaacatttttgtgaatgaa

SEQ ID NO: 4158780 - DNA, 25 bp, Homo sapien
acatttttgtgaatgaatctattac

SEQ ID NO: 4158781 - DNA, 25 bp, Homo sapien
taaatcagtgctagaaagatggaga

SEQ ID NO: 4158782 - DNA, 25 bp, Homo sapien
cacatataggcacaatcaggtagca

SEQ ID NO: 4158783 - DNA, 25 bp, Homo sapien
ggtaagggccttggtaccagtgaca

SEQ ID NO: 4158784 - DNA, 25 bp, Homo sapien
tcaggtagcaatgatgatccaacaa

SEQ ID NO: 4158785 - DNA, 25 bp, Homo sapien
caaactctgtcagcaatgttgcatt

SEQ ID NO: 4158786 - DNA, 25 bp, Homo sapien
aacaaactctgtcagcaatgttgca

SEQ ID NO: 4158787 - DNA, 25 bp, Homo sapien
gaacaaactctgtcagcaatgttgc

SEQ ID NO: 4158788 - DNA, 25 bp, Homo sapien
acaaactctgtcagcaatgttgcat

SEQ ID NO: 4158789 - DNA, 25 bp, Homo sapien
tgaaggtgagggtctttccagatga

SEQ ID NO: 4158790 - DNA, 25 bp, Homo sapien
accaagattccccatgatggtgatg

SEQ ID NO: 4158791 - DNA, 25 bp, Homo sapien
aggtgagggtctttccagatgacag

SEQ ID NO: 4158792 - DNA, 25 bp, Homo sapien
gatgacagcaatcagaccaagattc

SEQ ID NO: 4158793 - DNA, 25 bp, Homo sapien
cactgattgcaaacgaaaaaaactg

SEQ ID NO: 4158794 - DNA, 25 bp, Homo sapien
tagccggatgcacagtccattggtc

SEQ ID NO: 4158795 - DNA, 25 bp, Homo sapien
cttagctaagaagttattcagcatc

SEQ ID NO: 4158796 - DNA, 25 bp, Homo sapien
ggtcataatggctggataaagtaaa

SEQ ID NO: 4158797 - DNA, 25 bp, Homo sapien
gattaaagcatgaagaagaccacct

SEQ ID NO: 4158798 - DNA, 25 bp, Homo sapien
tggattaaagcatgaagaagaccac

SEQ ID NO: 4158799 - DNA, 25 bp, Homo sapien
tcatggattaaagcatgaagaagac

SEQ ID NO: 4158800 - DNA, 25 bp, Homo sapien
catggattaaagcatgaagaagacc

SEQ ID NO: 4158801 - DNA, 25 bp, Homo sapien
taagagatgagctccacaggtggag

SEQ ID NO: 4158802 - DNA, 25 bp, Homo sapien
atacagataagagatgagctccaca

SEQ ID NO: 4158803 - DNA, 25 bp, Homo sapien
gaactatgacagtgtaaaatagaga

SEQ ID NO: 4158804 - DNA, 25 bp, Homo sapien
tgacagtgtaaaatagagactccat

SEQ ID NO: 4158805 - DNA, 25 bp, Homo sapien
accaagattccccatgatggtgatg

SEQ ID NO: 4158806 - DNA, 25 bp, Homo sapien
gttgatcagcatcttcggagtcact

SEQ ID NO: 4158807 - DNA, 25 bp, Homo sapien
tgaaggtgagggtctttccagatga

SEQ ID NO: 4158808 - DNA, 25 bp, Homo sapien
ttagctaagaagttgatcagcatct

SEQ ID NO: 4158809 - DNA, 25 bp, Homo sapien
gagagaggtatgtaatgggctccac

SEQ ID NO: 4158810 - DNA, 25 bp, Homo sapien
gtttaacaaacgcacaatgataggg

SEQ ID NO: 4158811 - DNA, 25 bp, Homo sapien
ggcttcccttatgcctttgttagac

SEQ ID NO: 4158812 - DNA, 25 bp, Homo sapien
aatgatagggtaaaatagatactcc

SEQ ID NO: 4158813 - DNA, 25 bp, Homo sapien
aatgacaagactaatagctggatgc

SEQ ID NO: 4158814 - DNA, 25 bp, Homo sapien
tggatgcatagtccgttggtcataa

SEQ ID NO: 4158815 - DNA, 25 bp, Homo sapien
ccattgatgccgagataaaacattc

SEQ ID NO: 4158816 - DNA, 25 bp, Homo sapien
caaactcccacggaataaatacatt

SEQ ID NO: 4158817 - DNA, 25 bp, Homo sapien
gattataaggaggacaagtgtataa

SEQ ID NO: 4158818 - DNA, 25 bp, Homo sapien
tataaggaggacaagtgtataagat

SEQ ID NO: 4158819 - DNA, 25 bp, Homo sapien
tttaagattataaggaggacaagtg

SEQ ID NO: 4158820 - DNA, 25 bp, Homo sapien
aagattataaggaggacaagtgtat

SEQ ID NO: 4158821 - DNA, 25 bp, Homo sapien
tgacagtgtaaaatagagactccat

SEQ ID NO: 4158822 - DNA, 25 bp, Homo sapien
taagagatgagctccacaggtggag

SEQ ID NO: 4158823 - DNA, 25 bp, Homo sapien
atacagataagagatgagctccaca

SEQ ID NO: 4158824 - DNA, 25 bp, Homo sapien
gagactccatcatatcttggtcatc

SEQ ID NO: 4158825 - DNA, 25 bp, Homo sapien
tttgaacatttttgtgaatgaagct

SEQ ID NO: 4158826 - DNA, 25 bp, Homo sapien
acatttttgtgaatgaagctattac

SEQ ID NO: 4158827 - DNA, 25 bp, Homo sapien
tgaacatttttgtgaatgaagctat

SEQ ID NO: 4158828 - DNA, 25 bp, Homo sapien
tcttttgaacatttttgtgaatgaa

SEQ ID NO: 4158829 - DNA, 25 bp, Homo sapien
catgaatccactgaatgcatccttc

SEQ ID NO: 4158830 - DNA, 25 bp, Homo sapien
atgaatccactgaatgcatccttca

SEQ ID NO: 4158831 - DNA, 25 bp, Homo sapien
tgaatccactgaatgcatccttcat

SEQ ID NO: 4158832 - DNA, 25 bp, Homo sapien
aggaacatttgcaatggaattgtga

SEQ ID NO: 4158833 - DNA, 25 bp, Homo sapien
ttgcaatggaattgtgagttgaaat

SEQ ID NO: 4158834 - DNA, 25 bp, Homo sapien
ggaacatttgcaatggaattgtgag

SEQ ID NO: 4158835 - DNA, 25 bp, Homo sapien
aacatttgcaatggaattgtgagtt

SEQ ID NO: 4158836 - DNA, 25 bp, Homo sapien
ggaagagcggtattttacagtcagg

SEQ ID NO: 4158837 - DNA, 25 bp, Homo sapien
tacagtcaggttgatgtaaaaatcc

SEQ ID NO: 4158838 - DNA, 25 bp, Homo sapien
gcggtattttacagtcaggttgatg

SEQ ID NO: 4158839 - DNA, 25 bp, Homo sapien
atgccaggaagagcggtattttaca

SEQ ID NO: 4158840 - DNA, 25 bp, Homo sapien
ggatatgaaggtgagggtctttcca

SEQ ID NO: 4158841 - DNA, 25 bp, Homo sapien
tgaaggtgagggtctttccagatga

SEQ ID NO: 4158842 - DNA, 25 bp, Homo sapien
cacaaaggctaaactcccaaggaat

SEQ ID NO: 4158843 - DNA, 25 bp, Homo sapien
gagaacaattagaccaagattcccc

SEQ ID NO: 4158844 - DNA, 25 bp, Homo sapien
agttgatcagcatcttcggagtcac

SEQ ID NO: 4158845 - DNA, 25 bp, Homo sapien
ttagctaagaagttgatcagcatct

SEQ ID NO: 4158846 - DNA, 25 bp, Homo sapien
aagaagttgatcagcatcttcggag

SEQ ID NO: 4158847 - DNA, 25 bp, Homo sapien
gctaagaagttgatcagcatcttcg

SEQ ID NO: 4158848 - DNA, 25 bp, Homo sapien
tctgtggttacagtggttacaaggg

SEQ ID NO: 4158849 - DNA, 25 bp, Homo sapien
ctgtggttacagtggttacaaggga

SEQ ID NO: 4158850 - DNA, 25 bp, Homo sapien
taaatgacaagactaatagctgaat

SEQ ID NO: 4158851 - DNA, 25 bp, Homo sapien
aatgacaagactaatagctgaatgc

SEQ ID NO: 4158852 - DNA, 25 bp, Homo sapien
tgacaagactaatagctgaatgcat

SEQ ID NO: 4158853 - DNA, 25 bp, Homo sapien
tataaatgacaagactaatagctga

SEQ ID NO: 4158854 - DNA, 25 bp, Homo sapien
cagagcccagatatttgaaggtgag

SEQ ID NO: 4158855 - DNA, 25 bp, Homo sapien
ccctttgatagacttcttttctaag

SEQ ID NO: 4158856 - DNA, 25 bp, Homo sapien
tgcggagatgcagagcccagatatt

SEQ ID NO: 4158857 - DNA, 25 bp, Homo sapien
aggtggagacagcttttcgtatccc

SEQ ID NO: 4158858 - DNA, 25 bp, Homo sapien
gaacatttttgtgaatgaagctatt

SEQ ID NO: 4158859 - DNA, 25 bp, Homo sapien
ttgaacatttttgtgaatgaagcta

SEQ ID NO: 4158860 - DNA, 25 bp, Homo sapien
gcttttgaacatttttgtgaatgaa

SEQ ID NO: 4158861 - DNA, 25 bp, Homo sapien
acatttttgtgaatgaagctattac

SEQ ID NO: 4158862 - DNA, 25 bp, Homo sapien
gaacaaactctgtcagcaatgttgt

SEQ ID NO: 4158863 - DNA, 25 bp, Homo sapien
gaagttgtgggtcattccagataag

SEQ ID NO: 4158864 - DNA, 25 bp, Homo sapien
gagatagatcaccaagaacaccaag

SEQ ID NO: 4158865 - DNA, 25 bp, Homo sapien
cagaccaaggttccacacaatagtg

SEQ ID NO: 4158866 - DNA, 25 bp, Homo sapien
cattcagacagagatatcatcctgt

SEQ ID NO: 4158867 - DNA, 25 bp, Homo sapien
gaaggttaatctgaatataaggact

SEQ ID NO: 4158868 - DNA, 25 bp, Homo sapien
cagccgtatgcatagtgaattgttc

SEQ ID NO: 4158869 - DNA, 25 bp, Homo sapien
ttcataatcactggatatagtaaag

SEQ ID NO: 4158870 - DNA, 25 bp, Homo sapien
aaggctttccttacgcctctaacag

SEQ ID NO: 4158871 - DNA, 25 bp, Homo sapien
tgcagggcgcaaatacatgaagata

SEQ ID NO: 4158872 - DNA, 25 bp, Homo sapien
taagaattaagaactgtcacaatgg

SEQ ID NO: 4158873 - DNA, 25 bp, Homo sapien
aaagacagagtctatcatatcttgg

SEQ ID NO: 4158874 - DNA, 25 bp, Homo sapien
tgtgatggtgcttgcctgtaattcc

SEQ ID NO: 4158875 - DNA, 25 bp, Homo sapien
agctacttgagaggctgagacacaa

SEQ ID NO: 4158876 - DNA, 25 bp, Homo sapien
gtgaaccgagatggcctgggctaca

SEQ ID NO: 4158877 - DNA, 25 bp, Homo sapien
gcagtgaaccgagatggcctgggct

SEQ ID NO: 4158878 - DNA, 25 bp, Homo sapien
cctcattggatgtaccctgagtgaa

SEQ ID NO: 4158879 - DNA, 25 bp, Homo sapien
tcctcattggatgtaccctgagtga

SEQ ID NO: 4158880 - DNA, 25 bp, Homo sapien
gatgacagcaatcagaccaagattt

SEQ ID NO: 4158881 - DNA, 25 bp, Homo sapien
aatcatactcttagctaaaaagctg

SEQ ID NO: 4158882 - DNA, 25 bp, Homo sapien
taaaaagctgatcagcatcttaggg

SEQ ID NO: 4158883 - DNA, 25 bp, Homo sapien
ggaatgtgaaggtgtgagtctttcc

SEQ ID NO: 4158884 - DNA, 25 bp, Homo sapien
atgcagggtgcacatacatgaagag

SEQ ID NO: 4158885 - DNA, 25 bp, Homo sapien
aaatagtgaatacctgtattgaacc

SEQ ID NO: 4158886 - DNA, 25 bp, Homo sapien
agtgaatacctgtattgaaccagac

SEQ ID NO: 4158887 - DNA, 25 bp, Homo sapien
agtcaaaatagtgaatacctgtatt

SEQ ID NO: 4158888 - DNA, 25 bp, Homo sapien
tgaaagaaatggtcaaaatccttta

SEQ ID NO: 4158889 - DNA, 25 bp, Homo sapien
tatcttgaaagaaatggtcaaaatc

SEQ ID NO: 4158890 - DNA, 25 bp, Homo sapien
tcttgaaagaaatggtcaaaatcct

SEQ ID NO: 4158891 - DNA, 25 bp, Homo sapien
ccatatcttgaaagaaatggtcaaa

SEQ ID NO: 4158892 - DNA, 25 bp, Homo sapien
ggaaagtatccctatatatgcagac

SEQ ID NO: 4158893 - DNA, 25 bp, Homo sapien
taatggccatatgatcctaaagcaa

SEQ ID NO: 4158894 - DNA, 25 bp, Homo sapien
tggcaaaaggttcatgctgactccc

SEQ ID NO: 4158895 - DNA, 25 bp, Homo sapien
tatcttaagcagtgccataatggcc

SEQ ID NO: 4158896 - DNA, 25 bp, Homo sapien
gaagaaatgaaaagtctgtacagac

SEQ ID NO: 4158897 - DNA, 25 bp, Homo sapien
tcatgaagaaatgaaaagtctgtac

SEQ ID NO: 4158898 - DNA, 25 bp, Homo sapien
caagagtgagtcatgaagaaatgaa

SEQ ID NO: 4158899 - DNA, 25 bp, Homo sapien
catgaagaaatgaaaagtctgtaca

SEQ ID NO: 4158900 - DNA, 25 bp, Homo sapien
ttgttaattggtctcctatccccat

SEQ ID NO: 4158901 - DNA, 25 bp, Homo sapien
aggagtgattttccctagccattcc

SEQ ID NO: 4158902 - DNA, 25 bp, Homo sapien
tgaggatgaattcagctgctaagga

SEQ ID NO: 4158903 - DNA, 25 bp, Homo sapien
gctaaggagtgattttccctagcca

SEQ ID NO: 4158904 - DNA, 25 bp, Homo sapien
ctatgaggatgaattcagctgctaa

SEQ ID NO: 4158905 - DNA, 25 bp, Homo sapien
tgtgccatacattcatacagggaaa

SEQ ID NO: 4158906 - DNA, 25 bp, Homo sapien
acattggtgtgagaagacgacgctc

SEQ ID NO: 4158907 - DNA, 25 bp, Homo sapien
tacagggaaataattctatcctcag

SEQ ID NO: 4158908 - DNA, 25 bp, Homo sapien
aaattaatgccaccagaccaagatt

SEQ ID NO: 4158909 - DNA, 25 bp, Homo sapien
gaatcatggaatgcaggtttccagc

SEQ ID NO: 4158910 - DNA, 25 bp, Homo sapien
ggtcatccgaatgcagagcgtcttg

SEQ ID NO: 4158911 - DNA, 25 bp, Homo sapien
aaggcccctgtggtcatccgaatgc

SEQ ID NO: 4158912 - DNA, 25 bp, Homo sapien
agagcgtcttggacatcatggtgtg

SEQ ID NO: 4158913 - DNA, 25 bp, Homo sapien
gatatatatcattagttcattaata

SEQ ID NO: 4158914 - DNA, 25 bp, Homo sapien
tacaggagagtctatacagtggaag

SEQ ID NO: 4158915 - DNA, 25 bp, Homo sapien
taagagatcaagacagtagcaatgg

SEQ ID NO: 4158916 - DNA, 25 bp, Homo sapien
gaattttattagacctgcagaaagt

SEQ ID NO: 4158917 - DNA, 25 bp, Homo sapien
ctccttcttcagatggtccaatata

SEQ ID NO: 4158918 - DNA, 25 bp, Homo sapien
cttcagatggtccaatatacatgag

SEQ ID NO: 4158919 - DNA, 25 bp, Homo sapien
cactggtgtatctttatctccttct

SEQ ID NO: 4158920 - DNA, 25 bp, Homo sapien
ttactattgcataaaatattgccac

SEQ ID NO: 4158921 - DNA, 25 bp, Homo sapien
ttctatgttccctctttatgaaagc

SEQ ID NO: 4158922 - DNA, 25 bp, Homo sapien
gctatagagcaagtttgtttaagaa

SEQ ID NO: 4158923 - DNA, 25 bp, Homo sapien
tttctatgttccctctttatgaaag

SEQ ID NO: 4158924 - DNA, 25 bp, Homo sapien
taaaaataaatttgctatagagcaa

SEQ ID NO: 4158925 - DNA, 25 bp, Homo sapien
ttatttgccacaaatagttgtgatg

SEQ ID NO: 4158926 - DNA, 25 bp, Homo sapien
tatttgccacaaatagttgtgatgt

SEQ ID NO: 4158927 - DNA, 25 bp, Homo sapien
tgccacaaatagttgtgatgtcttt

SEQ ID NO: 4158928 - DNA, 25 bp, Homo sapien
tttgccacaaatagttgtgatgtct

SEQ ID NO: 4158929 - DNA, 25 bp, Homo sapien
gaggatgaactcagctatcaaggag

SEQ ID NO: 4158930 - DNA, 25 bp, Homo sapien
gctaggtaggctcctgcagtcatct

SEQ ID NO: 4158931 - DNA, 25 bp, Homo sapien
tctacttcaatcatgggatgcaggt

SEQ ID NO: 4158932 - DNA, 25 bp, Homo sapien
ccttcattaactgcacctggtcgag

SEQ ID NO: 4158933 - DNA, 25 bp, Homo sapien
gttgccagaggggatgacatttgtt

SEQ ID NO: 4158934 - DNA, 25 bp, Homo sapien
agaggggatgacatttgtttcagaa

SEQ ID NO: 4158935 - DNA, 25 bp, Homo sapien
tcaagttgccagaggggatgacatt

SEQ ID NO: 4158936 - DNA, 25 bp, Homo sapien
gccagaggggatgacatttgtttca

SEQ ID NO: 4158937 - DNA, 25 bp, Homo sapien
ttttgttccagaggaccttcaggtg

SEQ ID NO: 4158938 - DNA, 25 bp, Homo sapien
gagcttgtgctgtccgaagggaact

SEQ ID NO: 4158939 - DNA, 25 bp, Homo sapien
aggtggaagacctgtaatcaagtga

SEQ ID NO: 4158940 - DNA, 25 bp, Homo sapien
tatcctcgcttttgctgaccaaggc

SEQ ID NO: 4158941 - DNA, 25 bp, Homo sapien
atgttctattctcaatatcttgtac

SEQ ID NO: 4158942 - DNA, 25 bp, Homo sapien
tcaatgttctattctcaatatcttg

SEQ ID NO: 4158943 - DNA, 25 bp, Homo sapien
aatgttctattctcaatatcttgta

SEQ ID NO: 4158944 - DNA, 25 bp, Homo sapien
caatgttctattctcaatatcttgt

SEQ ID NO: 4158945 - DNA, 25 bp, Homo sapien
ttgacagttactgctctgcccacca

SEQ ID NO: 4158946 - DNA, 25 bp, Homo sapien
agttactgctctgcccaccagcttt

SEQ ID NO: 4158947 - DNA, 25 bp, Homo sapien
cccaccagctttgtaaatggtctca

SEQ ID NO: 4158948 - DNA, 25 bp, Homo sapien
taaatggtctcagactggagatcca

SEQ ID NO: 4158949 - DNA, 25 bp, Homo sapien
cacattcactctggcccggatgatc

SEQ ID NO: 4158950 - DNA, 25 bp, Homo sapien
tcacattcactctggcccggatgat

SEQ ID NO: 4158951 - DNA, 25 bp, Homo sapien
ccccttggggaagtagtcacaactg

SEQ ID NO: 4158952 - DNA, 25 bp, Homo sapien
agtagtcacaactgctgcccaaacc

SEQ ID NO: 4158953 - DNA, 25 bp, Homo sapien
gcagtagagagcaaatctccatgtg

SEQ ID NO: 4158954 - DNA, 25 bp, Homo sapien
aattttgcagtagagagcaaatctc

SEQ ID NO: 4158955 - DNA, 25 bp, Homo sapien
ctccatgtgaaaggagtcatgggcc

SEQ ID NO: 4158956 - DNA, 25 bp, Homo sapien
gtagagagcaaatctccatgtgaaa

SEQ ID NO: 4158957 - DNA, 25 bp, Homo sapien
ccccaccacggtgatcagatagatg

SEQ ID NO: 4158958 - DNA, 25 bp, Homo sapien
gcagagtcttcagctcagggtgatc

SEQ ID NO: 4158959 - DNA, 25 bp, Homo sapien
gccaccaaactaatattccccacca

SEQ ID NO: 4158960 - DNA, 25 bp, Homo sapien
agtcttcagctcagggtgatctgta

SEQ ID NO: 4158961 - DNA, 25 bp, Homo sapien
ctcagaaaagaagttctctaacatt

SEQ ID NO: 4158962 - DNA, 25 bp, Homo sapien
aactgtactgcacattcatagaggg

SEQ ID NO: 4158963 - DNA, 25 bp, Homo sapien
tctgaatgcagagtttcttggacat

SEQ ID NO: 4158964 - DNA, 25 bp, Homo sapien
gaagaaagcagtctgcagtttccac

SEQ ID NO: 4158965 - DNA, 25 bp, Homo sapien
gaaccagttcattgatataaggatc

SEQ ID NO: 4158966 - DNA, 25 bp, Homo sapien
aaaagtggttgatgtgattcgatcc

SEQ ID NO: 4158967 - DNA, 25 bp, Homo sapien
taaggatcaacacaagagagtctat

SEQ ID NO: 4158968 - DNA, 25 bp, Homo sapien
gatgaatagaaccagttcattgata

SEQ ID NO: 4158969 - DNA, 25 bp, Homo sapien
cttcaagcaaatttggtctaacgta

SEQ ID NO: 4158970 - DNA, 25 bp, Homo sapien
aattgcagctggtatatctttatcc

SEQ ID NO: 4158971 - DNA, 25 bp, Homo sapien
tggtctaacgtacatgaagaaaaga

SEQ ID NO: 4158972 - DNA, 25 bp, Homo sapien
agctggtatatctttatccccttct

SEQ ID NO: 4158973 - DNA, 25 bp, Homo sapien
ttatttcttcatcagaatttttctt

SEQ ID NO: 4158974 - DNA, 25 bp, Homo sapien
catcagaatttttcttaagacactt

SEQ ID NO: 4158975 - DNA, 25 bp, Homo sapien
tttcttcatcagaatttttcttaag

SEQ ID NO: 4158976 - DNA, 25 bp, Homo sapien
atcagaatttttcttaagacactta

SEQ ID NO: 4158977 - DNA, 25 bp, Homo sapien
tagatgtcacttgtttccatctttc

SEQ ID NO: 4158978 - DNA, 25 bp, Homo sapien
tcacttgtttccatctttcttgaga

SEQ ID NO: 4158979 - DNA, 25 bp, Homo sapien
gtagatgtcacttgtttccatcttt

SEQ ID NO: 4158980 - DNA, 25 bp, Homo sapien
atgtcacttgtttccatctttcttg

SEQ ID NO: 4158981 - DNA, 25 bp, Homo sapien
cattgtactggtattgtgtagcatc

SEQ ID NO: 4158982 - DNA, 25 bp, Homo sapien
tgtagcatcggaagtgcaaaaatga

SEQ ID NO: 4158983 - DNA, 25 bp, Homo sapien
tattgtgtagcatcggaagtgcaaa

SEQ ID NO: 4158984 - DNA, 25 bp, Homo sapien
tactggtattgtgtagcatcggaag

SEQ ID NO: 4158985 - DNA, 25 bp, Homo sapien
ctgaaaaaaattgtagaggaataag

SEQ ID NO: 4158986 - DNA, 25 bp, Homo sapien
gccaccaaactaatattccccacca

SEQ ID NO: 4158987 - DNA, 25 bp, Homo sapien
ccccaccacggtgatcagatagatg

SEQ ID NO: 4158988 - DNA, 25 bp, Homo sapien
gcagagtcttcagctcagggtgatc

SEQ ID NO: 4158989 - DNA, 25 bp, Homo sapien
agtcttcagctcagggtgatctgta

SEQ ID NO: 4158990 - DNA, 25 bp, Homo sapien
cattcatagagggaaatccttttgc

SEQ ID NO: 4158991 - DNA, 25 bp, Homo sapien
gagtctatacaagggaagagtatca

SEQ ID NO: 4158992 - DNA, 25 bp, Homo sapien
agagtctatacaagggaagagtatc

SEQ ID NO: 4158993 - DNA, 25 bp, Homo sapien
gagagtctatacaagggaagagtat

SEQ ID NO: 4158994 - DNA, 25 bp, Homo sapien
gtctatacaagggaagagtatcaca

SEQ ID NO: 4158995 - DNA, 25 bp, Homo sapien
tagaaccagttcattgatgaaaggg

SEQ ID NO: 4158996 - DNA, 25 bp, Homo sapien
catttgttcacacttccttgagatt

SEQ ID NO: 4158997 - DNA, 25 bp, Homo sapien
gcaaatttggtctaatgtataggaa

SEQ ID NO: 4158998 - DNA, 25 bp, Homo sapien
tgaaaagtgggatgcacaagtagaa

SEQ ID NO: 4158999 - DNA, 25 bp, Homo sapien
tctccaacagtgacaaaggagagca

SEQ ID NO: 4159000 - DNA, 25 bp, Homo sapien
ctccaacagtgacaaaggagagcat

SEQ ID NO: 4159001 - DNA, 25 bp, Homo sapien
tgtagggatttgggaagaaccttga

SEQ ID NO: 4159002 - DNA, 25 bp, Homo sapien
ttctccaacagtgacaaaggagagc

SEQ ID NO: 4159003 - DNA, 25 bp, Homo sapien
tattgactgcagtagaccgttaggt

SEQ ID NO: 4159004 - DNA, 25 bp, Homo sapien
gctactactcctttgagactctgta

SEQ ID NO: 4159005 - DNA, 25 bp, Homo sapien
aaatataagagtgattccacttgct

SEQ ID NO: 4159006 - DNA, 25 bp, Homo sapien
cttgaatgtggtagttattgactgc

SEQ ID NO: 4159007 - DNA, 25 bp, Homo sapien
gaaggcatatcgtgtggcatgagca

SEQ ID NO: 4159008 - DNA, 25 bp, Homo sapien
tgtagatagccagtcaaccagcagt

SEQ ID NO: 4159009 - DNA, 25 bp, Homo sapien
tagagctccctgacaatgtatccgg

SEQ ID NO: 4159010 - DNA, 25 bp, Homo sapien
caagaattccagttcagccgggcga

SEQ ID NO: 4159011 - DNA, 25 bp, Homo sapien
ttgccacgggcattctccatctcct

SEQ ID NO: 4159012 - DNA, 25 bp, Homo sapien
tgtgcttgcatttgccgaagcttat

SEQ ID NO: 4159013 - DNA, 25 bp, Homo sapien
gctttgatcggactttgtgcttgca

SEQ ID NO: 4159014 - DNA, 25 bp, Homo sapien
gcttatatcccaccattgccacggg

SEQ ID NO: 4159015 - DNA, 25 bp, Homo sapien
tatcatttgcccctgtgtcttagag

SEQ ID NO: 4159016 - DNA, 25 bp, Homo sapien
tagttggaaaagtacatcgaaagac

SEQ ID NO: 4159017 - DNA, 25 bp, Homo sapien
tgaccagctctacatttaatctgtg

SEQ ID NO: 4159018 - DNA, 25 bp, Homo sapien
taactagtaaaaggactaccatcga

SEQ ID NO: 4159019 - DNA, 25 bp, Homo sapien
ggcaggggtcgcgtcgcggttccat

SEQ ID NO: 4159020 - DNA, 25 bp, Homo sapien
tggtttactgaccacatgatctcag

SEQ ID NO: 4159021 - DNA, 25 bp, Homo sapien
tcctttatctgtagactgaagttgt

SEQ ID NO: 4159022 - DNA, 25 bp, Homo sapien
gtttgctaccaagtcagttactctc

SEQ ID NO: 4159023 - DNA, 25 bp, Homo sapien
taatatccaagtttgctaccaagtc

SEQ ID NO: 4159024 - DNA, 25 bp, Homo sapien
tagtttggtagtgaaggagttgaaa

SEQ ID NO: 4159025 - DNA, 25 bp, Homo sapien
aatgaaccagccacactgatttgaa

SEQ ID NO: 4159026 - DNA, 25 bp, Homo sapien
ctagtttggtagtgaaggagttgaa

SEQ ID NO: 4159027 - DNA, 25 bp, Homo sapien
ggagttgaaatgaaccagccacact

SEQ ID NO: 4159028 - DNA, 25 bp, Homo sapien
tgctccctgcgtgccttgtcgccat

SEQ ID NO: 4159029 - DNA, 25 bp, Homo sapien
gatatctttataccctggtcatcag

SEQ ID NO: 4159030 - DNA, 25 bp, Homo sapien
gtagcctctagggttaatccaggag

SEQ ID NO: 4159031 - DNA, 25 bp, Homo sapien
tgtttttcccggtcgccgcacgctg

SEQ ID NO: 4159032 - DNA, 25 bp, Homo sapien
ctgctgaagcgagcaggaacacctc

SEQ ID NO: 4159033 - DNA, 25 bp, Homo sapien
tgtatgatacgatcccaggcctggg

SEQ ID NO: 4159034 - DNA, 25 bp, Homo sapien
catttggtggttagtccagagcttc

SEQ ID NO: 4159035 - DNA, 25 bp, Homo sapien
gggatgcccaaaatactagccctgg

SEQ ID NO: 4159036 - DNA, 25 bp, Homo sapien
aatgcgtcctgagtgttttctaggc

SEQ ID NO: 4159037 - DNA, 25 bp, Homo sapien
tgtgaagaggccgttcaggtcctct

SEQ ID NO: 4159038 - DNA, 25 bp, Homo sapien
acacgtagagacacctccaggttca

SEQ ID NO: 4159039 - DNA, 25 bp, Homo sapien
tcaggtcctctctcaggatgatcaa

SEQ ID NO: 4159040 - DNA, 25 bp, Homo sapien
tcaaatacgcttcatcagactctgg

SEQ ID NO: 4159041 - DNA, 25 bp, Homo sapien
ttataccacacctgtgtagcactga

SEQ ID NO: 4159042 - DNA, 25 bp, Homo sapien
gatcttctcttcattataccacacc

SEQ ID NO: 4159043 - DNA, 25 bp, Homo sapien
gccttctggtacctccacacatggg

SEQ ID NO: 4159044 - DNA, 25 bp, Homo sapien
gatgtcagagtttgggctcgtagca

SEQ ID NO: 4159045 - DNA, 25 bp, Homo sapien
ttgggctcgtagcatagtaataatc

SEQ ID NO: 4159046 - DNA, 25 bp, Homo sapien
gctcgtagcatagtaataatccaaa

SEQ ID NO: 4159047 - DNA, 25 bp, Homo sapien
cagagtttgggctcgtagcatagta

SEQ ID NO: 4159048 - DNA, 25 bp, Homo sapien
agacagaggtgtaaggaacatggga

SEQ ID NO: 4159049 - DNA, 25 bp, Homo sapien
gaaggaagacagaggtgtaaggaac

SEQ ID NO: 4159050 - DNA, 25 bp, Homo sapien
aggaagacagaggtgtaaggaacat

SEQ ID NO: 4159051 - DNA, 25 bp, Homo sapien
acagaggtgtaaggaacatgggagt

SEQ ID NO: 4159052 - DNA, 25 bp, Homo sapien
gaatttcctggatacgactggccac

SEQ ID NO: 4159053 - DNA, 25 bp, Homo sapien
taggagctccctttgcacaggaagg

SEQ ID NO: 4159054 - DNA, 25 bp, Homo sapien
tgaaatgcaacgctcccatgagaac

SEQ ID NO: 4159055 - DNA, 25 bp, Homo sapien
gagatgcttctttatccacccagag

SEQ ID NO: 4159056 - DNA, 25 bp, Homo sapien
caagggtcgaagaaggctgcttagc

SEQ ID NO: 4159057 - DNA, 25 bp, Homo sapien
taacaatcatgaagaaagggactgg

SEQ ID NO: 4159058 - DNA, 25 bp, Homo sapien
gttcaagcaggagcctttatccagg

SEQ ID NO: 4159059 - DNA, 25 bp, Homo sapien
tagtccaatttagagcccagtatga

SEQ ID NO: 4159060 - DNA, 25 bp, Homo sapien
catttgataactagataactgggta

SEQ ID NO: 4159061 - DNA, 25 bp, Homo sapien
cagctaagcattttatgagttccaa

SEQ ID NO: 4159062 - DNA, 25 bp, Homo sapien
gcaaatagatgttgaatcctgccat

SEQ ID NO: 4159063 - DNA, 25 bp, Homo sapien
tagttgctacaccattatgaatgag

SEQ ID NO: 4159064 - DNA, 25 bp, Homo sapien
gatgtttacaatagcatgcttgctg

SEQ ID NO: 4159065 - DNA, 25 bp, Homo sapien
tcagcttctaattaggctacaagga

SEQ ID NO: 4159066 - DNA, 25 bp, Homo sapien
ggtaattcattcaagtcaacagtgg

SEQ ID NO: 4159067 - DNA, 25 bp, Homo sapien
cagagtcttttgtggttgccactaa

SEQ ID NO: 4159068 - DNA, 25 bp, Homo sapien
caattacaggcttcaagtggccatc

SEQ ID NO: 4159069 - DNA, 25 bp, Homo sapien
cattgagcaaaatagataactgtcc

SEQ ID NO: 4159070 - DNA, 25 bp, Homo sapien
tcataggtgtcatagcatttgtgct

SEQ ID NO: 4159071 - DNA, 25 bp, Homo sapien
gaaaatgccatttgtgatagatcac

SEQ ID NO: 4159072 - DNA, 25 bp, Homo sapien
gataatcttttgtttcgataactgt

SEQ ID NO: 4159073 - DNA, 25 bp, Homo sapien
ataatcttttgtttcgataactgtt

SEQ ID NO: 4159074 - DNA, 25 bp, Homo sapien
cttttgtttcgataactgttttcat

SEQ ID NO: 4159075 - DNA, 25 bp, Homo sapien
tcttttgtttcgataactgttttca

SEQ ID NO: 4159076 - DNA, 25 bp, Homo sapien
tatagttgagagcatggtgtacagg

SEQ ID NO: 4159077 - DNA, 25 bp, Homo sapien
ggttctgaactttgcgtgagagtgc

SEQ ID NO: 4159078 - DNA, 25 bp, Homo sapien
gatcagtcaccaagtcacccctttg

SEQ ID NO: 4159079 - DNA, 25 bp, Homo sapien
gagagtgctctccttagttcagtaa

SEQ ID NO: 4159080 - DNA, 25 bp, Homo sapien
tgctactagaggaagaatgtggtcc

SEQ ID NO: 4159081 - DNA, 25 bp, Homo sapien
tacattaggccacgttttctgggtg

SEQ ID NO: 4159082 - DNA, 25 bp, Homo sapien
tcgtgagagtggagcaataaagaca

SEQ ID NO: 4159083 - DNA, 25 bp, Homo sapien
gacccagtggtccagtgtgtctctg

SEQ ID NO: 4159084 - DNA, 25 bp, Homo sapien
catctctgaactgcgagttgcctga

SEQ ID NO: 4159085 - DNA, 25 bp, Homo sapien
gattctgaagttggcaatgtctaca

SEQ ID NO: 4159086 - DNA, 25 bp, Homo sapien
tgtcaaatgtctccactgtgtttca

SEQ ID NO: 4159087 - DNA, 25 bp, Homo sapien
cactttatgattgggagattctgaa

SEQ ID NO: 4159088 - DNA, 25 bp, Homo sapien
tcaacgtgagtgtggtgcttaaaaa

SEQ ID NO: 4159089 - DNA, 25 bp, Homo sapien
gaactcaggagagctcagtctagaa

SEQ ID NO: 4159090 - DNA, 25 bp, Homo sapien
gacgtgccctcgtgtgtggaacaaa

SEQ ID NO: 4159091 - DNA, 25 bp, Homo sapien
gacaagccatcgttgctgtgcccta

SEQ ID NO: 4159092 - DNA, 25 bp, Homo sapien
tataaattattcagtctcgggcagt

SEQ ID NO: 4159093 - DNA, 25 bp, Homo sapien
ttataaattattcagtctcgggcag

SEQ ID NO: 4159094 - DNA, 25 bp, Homo sapien
taaattattcagtctcgggcagttc

SEQ ID NO: 4159095 - DNA, 25 bp, Homo sapien
attattcagtctcgggcagttcttt

SEQ ID NO: 4159096 - DNA, 25 bp, Homo sapien
gctcttaagagcaaatcacaacagg

SEQ ID NO: 4159097 - DNA, 25 bp, Homo sapien
gcatttcatacacacgtttcttagg

SEQ ID NO: 4159098 - DNA, 25 bp, Homo sapien
gaatgtgaaagcttatatccctgaa

SEQ ID NO: 4159099 - DNA, 25 bp, Homo sapien
tacatatcattatcgtggaacacgt

SEQ ID NO: 4159100 - DNA, 25 bp, Homo sapien
tgattacattggtcttgcccaggtc

SEQ ID NO: 4159101 - DNA, 25 bp, Homo sapien
tctggatctgctgatgggcactggt

SEQ ID NO: 4159102 - DNA, 25 bp, Homo sapien
tgttcaggccatcttttgtcagctt

SEQ ID NO: 4159103 - DNA, 25 bp, Homo sapien
gaggactctggaggtgagcctcttc

SEQ ID NO: 4159104 - DNA, 25 bp, Homo sapien
gaagggaccgtggatttcatattcc

SEQ ID NO: 4159105 - DNA, 25 bp, Homo sapien
tactcggttaatagcaactccacat

SEQ ID NO: 4159106 - DNA, 25 bp, Homo sapien
tgcagctcataagatgctactcggt

SEQ ID NO: 4159107 - DNA, 25 bp, Homo sapien
taagcatcactgatatgcagctcat

SEQ ID NO: 4159108 - DNA, 25 bp, Homo sapien
tttcaactcagcctgctccgagaag

SEQ ID NO: 4159109 - DNA, 25 bp, Homo sapien
taggaactgctttgcatgctccctt

SEQ ID NO: 4159110 - DNA, 25 bp, Homo sapien
ggaaggcagataataccctcacgtt

SEQ ID NO: 4159111 - DNA, 25 bp, Homo sapien
ggcaaaaggaggcattctcatatct

SEQ ID NO: 4159112 - DNA, 25 bp, Homo sapien
tgtgttctccaactgcacagcaaac

SEQ ID NO: 4159113 - DNA, 25 bp, Homo sapien
gtttcatcatccttagtagctgtga

SEQ ID NO: 4159114 - DNA, 25 bp, Homo sapien
taggacattggttaatgtgttctcc

SEQ ID NO: 4159115 - DNA, 25 bp, Homo sapien
cagcaaacttcagggcttgtaagcc

SEQ ID NO: 4159116 - DNA, 25 bp, Homo sapien
ttaggtctcttcaactgatgtctca

SEQ ID NO: 4159117 - DNA, 25 bp, Homo sapien
tgaactcctttacgaagtctatgag

SEQ ID NO: 4159118 - DNA, 25 bp, Homo sapien
gactcagcagacttttcagacaggc

SEQ ID NO: 4159119 - DNA, 25 bp, Homo sapien
ttctgatggtattccagaaaagcta

SEQ ID NO: 4159120 - DNA, 25 bp, Homo sapien
catgaagcagtccatttcctccaca

SEQ ID NO: 4159121 - DNA, 25 bp, Homo sapien
cctcctgtaaggtactgcatgaagc

SEQ ID NO: 4159122 - DNA, 25 bp, Homo sapien
atagaactgagtgattgtgtggtgc

SEQ ID NO: 4159123 - DNA, 25 bp, Homo sapien
tttgtgaactgatagaactgagtga

SEQ ID NO: 4159124 - DNA, 25 bp, Homo sapien
gagtagtgggccctaagaaatgcat

SEQ ID NO: 4159125 - DNA, 25 bp, Homo sapien
tttcaaacagagtagtgggccctaa

SEQ ID NO: 4159126 - DNA, 25 bp, Homo sapien
taattttcaaacagagtagtgggcc

SEQ ID NO: 4159127 - DNA, 25 bp, Homo sapien
tataattttcaaacagagtagtggg

SEQ ID NO: 4159128 - DNA, 25 bp, Homo sapien
gtttggcactagaaacagttacctg

SEQ ID NO: 4159129 - DNA, 25 bp, Homo sapien
ttggcactagaaacagttacctgta

SEQ ID NO: 4159130 - DNA, 25 bp, Homo sapien
tggcactagaaacagttacctgtaa

SEQ ID NO: 4159131 - DNA, 25 bp, Homo sapien
tttggcactagaaacagttacctgt

SEQ ID NO: 4159132 - DNA, 25 bp, Homo sapien
agttagctgttcatcccattttaga

SEQ ID NO: 4159133 - DNA, 25 bp, Homo sapien
tgttcatcccattttagattagaag

SEQ ID NO: 4159134 - DNA, 25 bp, Homo sapien
tcatcccattttagattagaagaac

SEQ ID NO: 4159135 - DNA, 25 bp, Homo sapien
tcccattttagattagaagaactac

SEQ ID NO: 4159136 - DNA, 25 bp, Homo sapien
gcttgtttcagatctgtcgttgcat

SEQ ID NO: 4159137 - DNA, 25 bp, Homo sapien
cttgtttcagatctgtcgttgcatt

SEQ ID NO: 4159138 - DNA, 25 bp, Homo sapien
agcttgtttcagatctgtcgttgca

SEQ ID NO: 4159139 - DNA, 25 bp, Homo sapien
tgtttcagatctgtcgttgcatttc

SEQ ID NO: 4159140 - DNA, 25 bp, Homo sapien
tcaattcaccagtttgtgctatgcc

SEQ ID NO: 4159141 - DNA, 25 bp, Homo sapien
aattcaccagtttgtgctatgccat

SEQ ID NO: 4159142 - DNA, 25 bp, Homo sapien
ctgtcaattcaccagtttgtgctat

SEQ ID NO: 4159143 - DNA, 25 bp, Homo sapien
tgtcaattcaccagtttgtgctatg

SEQ ID NO: 4159144 - DNA, 25 bp, Homo sapien
tattttcttgctcaatcaccaatcc

SEQ ID NO: 4159145 - DNA, 25 bp, Homo sapien
gattatctattccattcgtgccttc

SEQ ID NO: 4159146 - DNA, 25 bp, Homo sapien
gactagagtgcttgtaggtacatga

SEQ ID NO: 4159147 - DNA, 25 bp, Homo sapien
tccattaactacatacgagcagcat

SEQ ID NO: 4159148 - DNA, 25 bp, Homo sapien
cagcatgagttttggactagagtgc

SEQ ID NO: 4159149 - DNA, 25 bp, Homo sapien
tcagtatttcttgaactggaggatc

SEQ ID NO: 4159150 - DNA, 25 bp, Homo sapien
ctggaggatcttcaacagtagtact

SEQ ID NO: 4159151 - DNA, 25 bp, Homo sapien
cagtagtactagtgcaatttggaga

SEQ ID NO: 4159152 - DNA, 25 bp, Homo sapien
ttggtgcaaatgaggatgattctcc

SEQ ID NO: 4159153 - DNA, 25 bp, Homo sapien
gatttggctgtttcaaaagcagaac

SEQ ID NO: 4159154 - DNA, 25 bp, Homo sapien
catctggctgtcttgatttggctgt

SEQ ID NO: 4159155 - DNA, 25 bp, Homo sapien
cttgatttggctgtttcaaaagcag

SEQ ID NO: 4159156 - DNA, 25 bp, Homo sapien
tcttgatttggctgtttcaaaagca

SEQ ID NO: 4159157 - DNA, 25 bp, Homo sapien
gatccacataataggttctaccatg

SEQ ID NO: 4159158 - DNA, 25 bp, Homo sapien
cacataataggttctaccatgagga

SEQ ID NO: 4159159 - DNA, 25 bp, Homo sapien
gagtattatgatccacataataggt

SEQ ID NO: 4159160 - DNA, 25 bp, Homo sapien
tatgatccacataataggttctacc

SEQ ID NO: 4159161 - DNA, 25 bp, Homo sapien
ggttaaactgttgcatagctccctg

SEQ ID NO: 4159162 - DNA, 25 bp, Homo sapien
ttggttaaactgttgcatagctccc

SEQ ID NO: 4159163 - DNA, 25 bp, Homo sapien
tggttaaactgttgcatagctccct

SEQ ID NO: 4159164 - DNA, 25 bp, Homo sapien
tggcaaaggtccatgagggtcattt

SEQ ID NO: 4159165 - DNA, 25 bp, Homo sapien
ctggtggcaaaggtccatgagggtc

SEQ ID NO: 4159166 - DNA, 25 bp, Homo sapien
atgagggtcattttctgcggctaac

SEQ ID NO: 4159167 - DNA, 25 bp, Homo sapien
tcattttctgcggctaacattgaag

SEQ ID NO: 4159168 - DNA, 25 bp, Homo sapien
tgttgttcttgcattgtgattaaca

SEQ ID NO: 4159169 - DNA, 25 bp, Homo sapien
tcttgcattgtgattaacaaagtac

SEQ ID NO: 4159170 - DNA, 25 bp, Homo sapien
cattgtgattaacaaagtaccttac

SEQ ID NO: 4159171 - DNA, 25 bp, Homo sapien
tgttgttgttcttgcattgtgatta

SEQ ID NO: 4159172 - DNA, 25 bp, Homo sapien
ctaggccaccataatcaagtccttc

SEQ ID NO: 4159173 - DNA, 25 bp, Homo sapien
gctaggccaccataatcaagtcctt

SEQ ID NO: 4159174 - DNA, 25 bp, Homo sapien
taggccaccataatcaagtccttct

SEQ ID NO: 4159175 - DNA, 25 bp, Homo sapien
aggccaccataatcaagtccttctt

SEQ ID NO: 4159176 - DNA, 25 bp, Homo sapien
ctgcagagaatagttgttcttcccc

SEQ ID NO: 4159177 - DNA, 25 bp, Homo sapien
ttccccacatactcaaataagcatt

SEQ ID NO: 4159178 - DNA, 25 bp, Homo sapien
aataagcattacattgggttcaaaa

SEQ ID NO: 4159179 - DNA, 25 bp, Homo sapien
agagaatagttgttcttccccacat

SEQ ID NO: 4159180 - DNA, 25 bp, Homo sapien
atgaaatagtgccatggcaataaaa

SEQ ID NO: 4159181 - DNA, 25 bp, Homo sapien
ccatgaaatagtgccatggcaataa

SEQ ID NO: 4159182 - DNA, 25 bp, Homo sapien
tgaaatagtgccatggcaataaaac

SEQ ID NO: 4159183 - DNA, 25 bp, Homo sapien
catgaaatagtgccatggcaataaa

SEQ ID NO: 4159184 - DNA, 25 bp, Homo sapien
gaaaagtacagttctaagccacatt

SEQ ID NO: 4159185 - DNA, 25 bp, Homo sapien
agccacattcttcaatgttgttatc

SEQ ID NO: 4159186 - DNA, 25 bp, Homo sapien
cccaactctccatgtcaacagaaaa

SEQ ID NO: 4159187 - DNA, 25 bp, Homo sapien
tttccccaactctccatgtcaacag

SEQ ID NO: 4159188 - DNA, 25 bp, Homo sapien
acaaactgccagaaccgaatgattt

SEQ ID NO: 4159189 - DNA, 25 bp, Homo sapien
tgtgccacacaacgtaacctctaat

SEQ ID NO: 4159190 - DNA, 25 bp, Homo sapien
tgctgtgtgccacacaacgtaacct

SEQ ID NO: 4159191 - DNA, 25 bp, Homo sapien
aaactgccagaaccgaatgatttgc

SEQ ID NO: 4159192 - DNA, 25 bp, Homo sapien
caatcatttcaaaggacaacaaata

SEQ ID NO: 4159193 - DNA, 25 bp, Homo sapien
tcaatcatttcaaaggacaacaaat

SEQ ID NO: 4159194 - DNA, 25 bp, Homo sapien
tatccaaaggaattgcaacaaaagc

SEQ ID NO: 4159195 - DNA, 25 bp, Homo sapien
catgctgaagatatccaaaggaatt

SEQ ID NO: 4159196 - DNA, 25 bp, Homo sapien
cagagtgcctctgagcaggtaaaac

SEQ ID NO: 4159197 - DNA, 25 bp, Homo sapien
tgctcctgaaggttgatcagctgtt

SEQ ID NO: 4159198 - DNA, 25 bp, Homo sapien
gggtgacagcggtggttgggacaca

SEQ ID NO: 4159199 - DNA, 25 bp, Homo sapien
gacacacatctcttgtcatccagca

SEQ ID NO: 4159200 - DNA, 25 bp, Homo sapien
agcatgatcaaagcatctcgaagat

SEQ ID NO: 4159201 - DNA, 25 bp, Homo sapien
cttccatttggggagcatgatcaaa

SEQ ID NO: 4159202 - DNA, 25 bp, Homo sapien
gagcatgatcaaagcatctcgaaga

SEQ ID NO: 4159203 - DNA, 25 bp, Homo sapien
ttcttccatttggggagcatgatca

SEQ ID NO: 4159204 - DNA, 25 bp, Homo sapien
cagcaactgacaagttcatcccctt

SEQ ID NO: 4159205 - DNA, 25 bp, Homo sapien
cagggcctgaaaattgcttccagca

SEQ ID NO: 4159206 - DNA, 25 bp, Homo sapien
taggaaataccagattgattaaaac

SEQ ID NO: 4159207 - DNA, 25 bp, Homo sapien
cctttctacagtccacagggcctga

SEQ ID NO: 4159208 - DNA, 25 bp, Homo sapien
aggctttccagagctaagccttgaa

SEQ ID NO: 4159209 - DNA, 25 bp, Homo sapien
tttccagagctaagccttgaaagct

SEQ ID NO: 4159210 - DNA, 25 bp, Homo sapien
tgccatagggactttggaaaggctt

SEQ ID NO: 4159211 - DNA, 25 bp, Homo sapien
gctaagccttgaaagctgagtttca

SEQ ID NO: 4159212 - DNA, 25 bp, Homo sapien
atttttaaggtaactgtagtggcag

SEQ ID NO: 4159213 - DNA, 25 bp, Homo sapien
ttttaaggtaactgtagtggcagaa

SEQ ID NO: 4159214 - DNA, 25 bp, Homo sapien
agcagtaactaatggcatcaggctc

SEQ ID NO: 4159215 - DNA, 25 bp, Homo sapien
cagaagcagtaactaatggcatcag

SEQ ID NO: 4159216 - DNA, 25 bp, Homo sapien
gcaggcggcagaagtaaacactgag

SEQ ID NO: 4159217 - DNA, 25 bp, Homo sapien
ctggtttgtttggaaagctgcagga

SEQ ID NO: 4159218 - DNA, 25 bp, Homo sapien
tggtttgtttggaaagctgcaggag

SEQ ID NO: 4159219 - DNA, 25 bp, Homo sapien
gccaagaagacactcccatcccgcc

SEQ ID NO: 4159220 - DNA, 25 bp, Homo sapien
aaatcaccgcgaagggagggacgag

SEQ ID NO: 4159221 - DNA, 25 bp, Homo sapien
gcggggcggacaccagccgcgcgcc

SEQ ID NO: 4159222 - DNA, 25 bp, Homo sapien
aggatcgatttccacagccaagaag

SEQ ID NO: 4159223 - DNA, 25 bp, Homo sapien
ccccaaattcgaggaggaaggtgca

SEQ ID NO: 4159224 - DNA, 25 bp, Homo sapien
gagtcgcgggaagctcctcctgctc

SEQ ID NO: 4159225 - DNA, 25 bp, Homo sapien
cacatcgggccgcagaagcccgagg

SEQ ID NO: 4159226 - DNA, 25 bp, Homo sapien
aggcgggagcacagccgaaccccta

SEQ ID NO: 4159227 - DNA, 25 bp, Homo sapien
aagagtgacccgccgaggcccagga

SEQ ID NO: 4159228 - DNA, 25 bp, Homo sapien
gcaccgggctccgagacctgagggg

SEQ ID NO: 4159229 - DNA, 25 bp, Homo sapien
caggagcgacgaccgcagaggcgca

SEQ ID NO: 4159230 - DNA, 25 bp, Homo sapien
agtgcaaacccgcagcgaagccggc

SEQ ID NO: 4159231 - DNA, 25 bp, Homo sapien
gagggtcggggcagcacagacccca

SEQ ID NO: 4159232 - DNA, 25 bp, Homo sapien
gcacagaccccaggccgcccggacc

SEQ ID NO: 4159233 - DNA, 25 bp, Homo sapien
aaagccggagggtcggggcagcaca

SEQ ID NO: 4159234 - DNA, 25 bp, Homo sapien
ctgcaaagccggagggtcggggcag

SEQ ID NO: 4159235 - DNA, 25 bp, Homo sapien
atggtccctttacgcctccgcacgc

SEQ ID NO: 4159236 - DNA, 25 bp, Homo sapien
tgtggaggggcaaacagcgctccgt

SEQ ID NO: 4159237 - DNA, 25 bp, Homo sapien
gcgcacgccggctggctcgcgggtc

SEQ ID NO: 4159238 - DNA, 25 bp, Homo sapien
cgggtgccctctcggcggtggctgc

SEQ ID NO: 4159239 - DNA, 25 bp, Homo sapien
caatagtgaacgaggagctggacac

SEQ ID NO: 4159240 - DNA, 25 bp, Homo sapien
ttctcctaaactgcctcggagcttg

SEQ ID NO: 4159241 - DNA, 25 bp, Homo sapien
ctcgcgtacagacccttttacaaga

SEQ ID NO: 4159242 - DNA, 25 bp, Homo sapien
tcgccggcgattcgacaaaagaggg

SEQ ID NO: 4159243 - DNA, 25 bp, Homo sapien
tggtttctgggcgtcgctttttata

SEQ ID NO: 4159244 - DNA, 25 bp, Homo sapien
tgagattgccgggatctccggagcc

SEQ ID NO: 4159245 - DNA, 25 bp, Homo sapien
cggcggcctcaaaatgacaagttgc

SEQ ID NO: 4159246 - DNA, 25 bp, Homo sapien
aaagaggcttgagattgccgggatc

SEQ ID NO: 4159247 - DNA, 25 bp, Homo sapien
tccccgccaaccctcgctactgaaa

SEQ ID NO: 4159248 - DNA, 25 bp, Homo sapien
ccgccaaccctcgctactgaaaaat

SEQ ID NO: 4159249 - DNA, 25 bp, Homo sapien
cgccaaccctcgctactgaaaaatc

SEQ ID NO: 4159250 - DNA, 25 bp, Homo sapien
tgtccccgccaaccctcgctactga

SEQ ID NO: 4159251 - DNA, 25 bp, Homo sapien
aacacagaaatgtctccaacagaag

SEQ ID NO: 4159252 - DNA, 25 bp, Homo sapien
gaaaactgctgtgaaatccagtcgt

SEQ ID NO: 4159253 - DNA, 25 bp, Homo sapien
tgctgtgaaatccagtcgtctgcca

SEQ ID NO: 4159254 - DNA, 25 bp, Homo sapien
tcccataaggttccacatgatgtgg

SEQ ID NO: 4159255 - DNA, 25 bp, Homo sapien
gaaatgcgggaaacatggcattact

SEQ ID NO: 4159256 - DNA, 25 bp, Homo sapien
agggaaatgcgggaaacatggcatt

SEQ ID NO: 4159257 - DNA, 25 bp, Homo sapien
atgcgggaaacatggcattactcac

SEQ ID NO: 4159258 - DNA, 25 bp, Homo sapien
aatgcgggaaacatggcattactca

SEQ ID NO: 4159259 - DNA, 25 bp, Homo sapien
gaatactgtataggcgtctctgagc

SEQ ID NO: 4159260 - DNA, 25 bp, Homo sapien
aaaggaatactgtataggcgtctct

SEQ ID NO: 4159261 - DNA, 25 bp, Homo sapien
ctgtataggcgtctctgagctctgc

SEQ ID NO: 4159262 - DNA, 25 bp, Homo sapien
tactgtataggcgtctctgagctct

SEQ ID NO: 4159263 - DNA, 25 bp, Homo sapien
gccccaatctggtctaggaggatga

SEQ ID NO: 4159264 - DNA, 25 bp, Homo sapien
tattagtgcctaggactgctgaaac

SEQ ID NO: 4159265 - DNA, 25 bp, Homo sapien
cagggcacatcacagacagggagta

SEQ ID NO: 4159266 - DNA, 25 bp, Homo sapien
gaagagggatcagtaccatggcaga

SEQ ID NO: 4159267 - DNA, 25 bp, Homo sapien
gactttcccatagttgctagcaata

SEQ ID NO: 4159268 - DNA, 25 bp, Homo sapien
tgaagactttcccatagttgctagc

SEQ ID NO: 4159269 - DNA, 25 bp, Homo sapien
ctaaacttctgaaagttggtgattt

SEQ ID NO: 4159270 - DNA, 25 bp, Homo sapien
tcccatagttgctagcaatattcca

SEQ ID NO: 4159271 - DNA, 25 bp, Homo sapien
gaatctgtgtcctaaagaccctctg

SEQ ID NO: 4159272 - DNA, 25 bp, Homo sapien
gaatttgcgaaagagggaccaggct

SEQ ID NO: 4159273 - DNA, 25 bp, Homo sapien
taaagaccctctgttcgcaaaggtg

SEQ ID NO: 4159274 - DNA, 25 bp, Homo sapien
aaagactcaggacgctgcctgctga

SEQ ID NO: 4159275 - DNA, 25 bp, Homo sapien
cacctaagtgccaactgaatcattg

SEQ ID NO: 4159276 - DNA, 25 bp, Homo sapien
gaattacagatcttagagctgggaa

SEQ ID NO: 4159277 - DNA, 25 bp, Homo sapien
cacattacagctataggacacacac

SEQ ID NO: 4159278 - DNA, 25 bp, Homo sapien
cagtgaggacttacgtatcatacta

SEQ ID NO: 4159279 - DNA, 25 bp, Homo sapien
aagcagatgaccagatcctctcctg

SEQ ID NO: 4159280 - DNA, 25 bp, Homo sapien
gactcaggtccattgcaagtacaca

SEQ ID NO: 4159281 - DNA, 25 bp, Homo sapien
agttcctgttttcaagagctctctc

SEQ ID NO: 4159282 - DNA, 25 bp, Homo sapien
taacaggttgatgactgtggctact

SEQ ID NO: 4159283 - DNA, 25 bp, Homo sapien
taatgtacaggactccacagtgatg

SEQ ID NO: 4159284 - DNA, 25 bp, Homo sapien
gatatgtttaatacccagagcactg

SEQ ID NO: 4159285 - DNA, 25 bp, Homo sapien
taaatggccagcacagtactaagcc

SEQ ID NO: 4159286 - DNA, 25 bp, Homo sapien
tagtccaaatgcgtgagatcagctt

SEQ ID NO: 4159287 - DNA, 25 bp, Homo sapien
tcagtggcagacatactactctttc

SEQ ID NO: 4159288 - DNA, 25 bp, Homo sapien
cagcctgtgggcacctaatgtctaa

SEQ ID NO: 4159289 - DNA, 25 bp, Homo sapien
ggtgaggcacccttctgttccctgc

SEQ ID NO: 4159290 - DNA, 25 bp, Homo sapien
gcagcatctagatttaagccacaac

SEQ ID NO: 4159291 - DNA, 25 bp, Homo sapien
tttctcaaaccaaagggagcttgct

SEQ ID NO: 4159292 - DNA, 25 bp, Homo sapien
ggccacaggccatgcgttatactac

SEQ ID NO: 4159293 - DNA, 25 bp, Homo sapien
tgacaagtagcagaacgaggactca

SEQ ID NO: 4159294 - DNA, 25 bp, Homo sapien
gcaacgactttgttgagctgacaag

SEQ ID NO: 4159295 - DNA, 25 bp, Homo sapien
taatatggcattgccttctttttaa

SEQ ID NO: 4159296 - DNA, 25 bp, Homo sapien
ctttgccttcataagtagaatatac

SEQ ID NO: 4159297 - DNA, 25 bp, Homo sapien
aatcatggcgatgcagtatagaacc

SEQ ID NO: 4159298 - DNA, 25 bp, Homo sapien
cgatgcagtatagaacctgggagtc

SEQ ID NO: 4159299 - DNA, 25 bp, Homo sapien
tctctctcagtagaaagtgaataga

SEQ ID NO: 4159300 - DNA, 25 bp, Homo sapien
gcaaaggccaggttgttatacaaat

SEQ ID NO: 4159301 - DNA, 25 bp, Homo sapien
tggaaatactcactaaacgtgcaga

SEQ ID NO: 4159302 - DNA, 25 bp, Homo sapien
cagttccacggtctcaaaggtaggg

SEQ ID NO: 4159303 - DNA, 25 bp, Homo sapien
agtacataatagaggaagacagcac

SEQ ID NO: 4159304 - DNA, 25 bp, Homo sapien
gaatatggccacaagataccctctc

SEQ ID NO: 4159305 - DNA, 25 bp, Homo sapien
caatagacattcgttccccataata

SEQ ID NO: 4159306 - DNA, 25 bp, Homo sapien
tatgcaatgcagtacataatagagg

SEQ ID NO: 4159307 - DNA, 25 bp, Homo sapien
atctgctgacgcacaccggcagcga

SEQ ID NO: 4159308 - DNA, 25 bp, Homo sapien
atagacccttgccttgggatccggg

SEQ ID NO: 4159309 - DNA, 25 bp, Homo sapien
gggactctacaaatcacactattga

SEQ ID NO: 4159310 - DNA, 25 bp, Homo sapien
cagaaacacctgacctgaacaggtt

SEQ ID NO: 4159311 - DNA, 25 bp, Homo sapien
gctttgataaacaaggctggatctt

SEQ ID NO: 4159312 - DNA, 25 bp, Homo sapien
ggctggatcttatttctccgtttca

SEQ ID NO: 4159313 - DNA, 25 bp, Homo sapien
tccgtttcatttccacaggtgccac

SEQ ID NO: 4159314 - DNA, 25 bp, Homo sapien
gcagagaggcaaaagctggctttga

SEQ ID NO: 4159315 - DNA, 25 bp, Homo sapien
gacaggatattcaagctcttcctta

SEQ ID NO: 4159316 - DNA, 25 bp, Homo sapien
ggatattcaagctcttccttaaata

SEQ ID NO: 4159317 - DNA, 25 bp, Homo sapien
caggatattcaagctcttccttaaa

SEQ ID NO: 4159318 - DNA, 25 bp, Homo sapien
gatattcaagctcttccttaaatat

SEQ ID NO: 4159319 - DNA, 25 bp, Homo sapien
aagaatactggtttgattgagttcc

SEQ ID NO: 4159320 - DNA, 25 bp, Homo sapien
agaatactggtttgattgagttcct

SEQ ID NO: 4159321 - DNA, 25 bp, Homo sapien
aaagaatactggtttgattgagttc

SEQ ID NO: 4159322 - DNA, 25 bp, Homo sapien
gaacaattcgcttttttataatcaa

SEQ ID NO: 4159323 - DNA, 25 bp, Homo sapien
acacaaatagacctctctagcctca

SEQ ID NO: 4159324 - DNA, 25 bp, Homo sapien
gaaaataacatgagagcaacaaggg

SEQ ID NO: 4159325 - DNA, 25 bp, Homo sapien
taatcattatttgcattctatgtag

SEQ ID NO: 4159326 - DNA, 25 bp, Homo sapien
gtcactatcccataaatgacagctg

SEQ ID NO: 4159327 - DNA, 25 bp, Homo sapien
atgacagctgaaatccacacccaag

SEQ ID NO: 4159328 - DNA, 25 bp, Homo sapien
tatcagctatgacaagtctggggtc

SEQ ID NO: 4159329 - DNA, 25 bp, Homo sapien
cacacccaagcctaattataaggga

SEQ ID NO: 4159330 - DNA, 25 bp, Homo sapien
aaatcagccgcacacagaaaagggt

SEQ ID NO: 4159331 - DNA, 25 bp, Homo sapien
ccatacaaggaagcaatctttctaa

SEQ ID NO: 4159332 - DNA, 25 bp, Homo sapien
ctaccatacaaggaagcaatctttc

SEQ ID NO: 4159333 - DNA, 25 bp, Homo sapien
tcagccgcacacagaaaagggtgaa

SEQ ID NO: 4159334 - DNA, 25 bp, Homo sapien
catcccatagggcaaatcaaactta

SEQ ID NO: 4159335 - DNA, 25 bp, Homo sapien
cccatagggcaaatcaaacttatcg

SEQ ID NO: 4159336 - DNA, 25 bp, Homo sapien
tgatgttctcatcccatagggcaaa

SEQ ID NO: 4159337 - DNA, 25 bp, Homo sapien
tgttctcatcccatagggcaaatca

SEQ ID NO: 4159338 - DNA, 25 bp, Homo sapien
tagaataaagtaaggcaccagaact

SEQ ID NO: 4159339 - DNA, 25 bp, Homo sapien
tacatggatcacatggcggcagagc

SEQ ID NO: 4159340 - DNA, 25 bp, Homo sapien
tccactggttaaattaaaagactgc

SEQ ID NO: 4159341 - DNA, 25 bp, Homo sapien
gcttaaggagataagaatcgctgat

SEQ ID NO: 4159342 - DNA, 25 bp, Homo sapien
ctcaaaaatctagaacttaatgcta

SEQ ID NO: 4159343 - DNA, 25 bp, Homo sapien
gggcttttatgatccctcaaaaatc

SEQ ID NO: 4159344 - DNA, 25 bp, Homo sapien
acttaatgctatatagggccaatca

SEQ ID NO: 4159345 - DNA, 25 bp, Homo sapien
aatgttgaaggcttgtcaccttggg

SEQ ID NO: 4159346 - DNA, 25 bp, Homo sapien
taaaatagcacgattctgaaattga

SEQ ID NO: 4159347 - DNA, 25 bp, Homo sapien
cccaccctcacaggatcagttgaat

SEQ ID NO: 4159348 - DNA, 25 bp, Homo sapien
tgatacaactgcaattagccagcac

SEQ ID NO: 4159349 - DNA, 25 bp, Homo sapien
aattagccagcactacttcagcagg

SEQ ID NO: 4159350 - DNA, 25 bp, Homo sapien
ttttgaaagagcaagtcgaaaatat

SEQ ID NO: 4159351 - DNA, 25 bp, Homo sapien
ttgaaagagcaagtcgaaaatattc

SEQ ID NO: 4159352 - DNA, 25 bp, Homo sapien
gaaagagcaagtcgaaaatattccg

SEQ ID NO: 4159353 - DNA, 25 bp, Homo sapien
tgaaagagcaagtcgaaaatattcc

SEQ ID NO: 4159354 - DNA, 25 bp, Homo sapien
tacatgtgcatgtagtataaagtct

SEQ ID NO: 4159355 - DNA, 25 bp, Homo sapien
atacatgtgcatgtagtataaagtc

SEQ ID NO: 4159356 - DNA, 25 bp, Homo sapien
tgtaattacatcttgcatacatcaa

SEQ ID NO: 4159357 - DNA, 25 bp, Homo sapien
cttccaagggcatcatattgctgat

SEQ ID NO: 4159358 - DNA, 25 bp, Homo sapien
catcaattagctatagcagccttgc

SEQ ID NO: 4159359 - DNA, 25 bp, Homo sapien
tggctattgtgagagtcatggtaca

SEQ ID NO: 4159360 - DNA, 25 bp, Homo sapien
cttggaggctgaacatgatctatgg

SEQ ID NO: 4159361 - DNA, 25 bp, Homo sapien
tgatctatggacacgccattggcct

SEQ ID NO: 4159362 - DNA, 25 bp, Homo sapien
ttgttgattatgagaccacttggag

SEQ ID NO: 4159363 - DNA, 25 bp, Homo sapien
ccagcaatatggtatctcaaagtat

SEQ ID NO: 4159364 - DNA, 25 bp, Homo sapien
tagactgtttcaggggttcattcaa

SEQ ID NO: 4159365 - DNA, 25 bp, Homo sapien
agactgtttcaggggttcattcaac

SEQ ID NO: 4159366 - DNA, 25 bp, Homo sapien
ctgagctgagtaacacttctgaatc

SEQ ID NO: 4159367 - DNA, 25 bp, Homo sapien
gcagccactgagtaatagactgagc

SEQ ID NO: 4159368 - DNA, 25 bp, Homo sapien
tctgaatcctgagggttgttgagat

SEQ ID NO: 4159369 - DNA, 25 bp, Homo sapien
ggttgttgagatccccttttatctc

SEQ ID NO: 4159370 - DNA, 25 bp, Homo sapien
gcctacaatgccaggaccacatttg

SEQ ID NO: 4159371 - DNA, 25 bp, Homo sapien
tgcctacaatgccaggaccacattt

SEQ ID NO: 4159372 - DNA, 25 bp, Homo sapien
cctacaatgccaggaccacatttgt

SEQ ID NO: 4159373 - DNA, 25 bp, Homo sapien
tacaatgccaggaccacatttgtca

SEQ ID NO: 4159374 - DNA, 25 bp, Homo sapien
ggatgatggtccccgcagctttaca

SEQ ID NO: 4159375 - DNA, 25 bp, Homo sapien
gggatgatggtccccgcagctttac

SEQ ID NO: 4159376 - DNA, 25 bp, Homo sapien
ggggatgatggtccccgcagcttta

SEQ ID NO: 4159377 - DNA, 25 bp, Homo sapien
gatgatggtccccgcagctttacaa

SEQ ID NO: 4159378 - DNA, 25 bp, Homo sapien
cattcattgtaaaagtgggcgggca

SEQ ID NO: 4159379 - DNA, 25 bp, Homo sapien
gagacaaggccagaacatttagaga

SEQ ID NO: 4159380 - DNA, 25 bp, Homo sapien
ccaagacaagggactcaaggttcaa

SEQ ID NO: 4159381 - DNA, 25 bp, Homo sapien
ttagagaactagctgcagcagaggc

SEQ ID NO: 4159382 - DNA, 25 bp, Homo sapien
acatctcatgtcacagtaggttcca

SEQ ID NO: 4159383 - DNA, 25 bp, Homo sapien
acacatctcatgtcacagtaggttc

SEQ ID NO: 4159384 - DNA, 25 bp, Homo sapien
gtgtgcctgaaacctcgccttgtgg

SEQ ID NO: 4159385 - DNA, 25 bp, Homo sapien
gaaacctcgccttgtggacacatct

SEQ ID NO: 4159386 - DNA, 25 bp, Homo sapien
caagcattggctttgtcaggtaaac

SEQ ID NO: 4159387 - DNA, 25 bp, Homo sapien
taagacccgtgaaatcagcagacca

SEQ ID NO: 4159388 - DNA, 25 bp, Homo sapien
ccctcatggcatggaaagtctaaag

SEQ ID NO: 4159389 - DNA, 25 bp, Homo sapien
aaagttcacgcggtgttcctggcaa

SEQ ID NO: 4159390 - DNA, 25 bp, Homo sapien
aagtgcagttttctgtaccctgccc

SEQ ID NO: 4159391 - DNA, 25 bp, Homo sapien
tgtgttttacattatgcaggtctac

SEQ ID NO: 4159392 - DNA, 25 bp, Homo sapien
gcattacccactcctcgaagattct

SEQ ID NO: 4159393 - DNA, 25 bp, Homo sapien
ctccatataggactctgcatttgtg

SEQ ID NO: 4159394 - DNA, 25 bp, Homo sapien
tctcctaatgtcttattcttcaaaa

SEQ ID NO: 4159395 - DNA, 25 bp, Homo sapien
tttctcctaatgtcttattcttcaa

SEQ ID NO: 4159396 - DNA, 25 bp, Homo sapien
cataggagtcgattttttctcctaa

SEQ ID NO: 4159397 - DNA, 25 bp, Homo sapien
tcctaatgtcttattcttcaaaact

SEQ ID NO: 4159398 - DNA, 25 bp, Homo sapien
cacccatcaacaattccaacagcca

SEQ ID NO: 4159399 - DNA, 25 bp, Homo sapien
cttaaatcatgtggcttaaaagcag

SEQ ID NO: 4159400 - DNA, 25 bp, Homo sapien
cagattctggataaaaaagtcggaa

SEQ ID NO: 4159401 - DNA, 25 bp, Homo sapien
actgtcgtattagggtcattgtgaa

SEQ ID NO: 4159402 - DNA, 25 bp, Homo sapien
aaatgaagcagttcataagctgctg

SEQ ID NO: 4159403 - DNA, 25 bp, Homo sapien
aaggatctaatattcggatttgata

SEQ ID NO: 4159404 - DNA, 25 bp, Homo sapien
agttcataagctgctgttctgataa

SEQ ID NO: 4159405 - DNA, 25 bp, Homo sapien
tctaatattcggatttgataaggtt

SEQ ID NO: 4159406 - DNA, 25 bp, Homo sapien
tgagatggccttcaaagcgaaaaac

SEQ ID NO: 4159407 - DNA, 25 bp, Homo sapien
tataagaggaataagcactgcagtc

SEQ ID NO: 4159408 - DNA, 25 bp, Homo sapien
aacttgtccgaaagcattaactgcc

SEQ ID NO: 4159409 - DNA, 25 bp, Homo sapien
cctaggagtcattcagcctcattga

SEQ ID NO: 4159410 - DNA, 25 bp, Homo sapien
ggctcaagccccaaagagtatgcat

SEQ ID NO: 4159411 - DNA, 25 bp, Homo sapien
tagctgtggtattagcccagaggac

SEQ ID NO: 4159412 - DNA, 25 bp, Homo sapien
aaagcctgggaattttgaacacgtg

SEQ ID NO: 4159413 - DNA, 25 bp, Homo sapien
gagtcaggctccttatggcaaaagc

SEQ ID NO: 4159414 - DNA, 25 bp, Homo sapien
gacatatgtaaaacgccaatgtgat

SEQ ID NO: 4159415 - DNA, 25 bp, Homo sapien
catggtggcattcccatagtagtgc

SEQ ID NO: 4159416 - DNA, 25 bp, Homo sapien
gctaggtgaacttcgtgacatatgt

SEQ ID NO: 4159417 - DNA, 25 bp, Homo sapien
tagtgcaaaggactcttgaggtcag

SEQ ID NO: 4159418 - DNA, 25 bp, Homo sapien
tgaaatacttaagtgcttgtcttac

SEQ ID NO: 4159419 - DNA, 25 bp, Homo sapien
cttgaaatacttaagtgcttgtctt

SEQ ID NO: 4159420 - DNA, 25 bp, Homo sapien
ttcttgaaatacttaagtgcttgtc

SEQ ID NO: 4159421 - DNA, 25 bp, Homo sapien
ctcattcttgaaatacttaagtgct

SEQ ID NO: 4159422 - DNA, 25 bp, Homo sapien
gaaaaatacaattaccatcattctt

SEQ ID NO: 4159423 - DNA, 25 bp, Homo sapien
aattaccatcattctttcccaatct

SEQ ID NO: 4159424 - DNA, 25 bp, Homo sapien
tacaattaccatcattctttcccaa

SEQ ID NO: 4159425 - DNA, 25 bp, Homo sapien
aagaaaaatacaattaccatcattc

SEQ ID NO: 4159426 - DNA, 25 bp, Homo sapien
tctataatgtccttcaaaaagagct

SEQ ID NO: 4159427 - DNA, 25 bp, Homo sapien
tgtccttcaaaaagagctgctctgc

SEQ ID NO: 4159428 - DNA, 25 bp, Homo sapien
tcaatcttgagtcaagttgattacg

SEQ ID NO: 4159429 - DNA, 25 bp, Homo sapien
tgagtcaagttgattacgaggtttt

SEQ ID NO: 4159430 - DNA, 25 bp, Homo sapien
tgttagcatcatcttctgagtctgt

SEQ ID NO: 4159431 - DNA, 25 bp, Homo sapien
actgttagcatcatcttctgagtct

SEQ ID NO: 4159432 - DNA, 25 bp, Homo sapien
agcatcatcttctgagtctgtagag

SEQ ID NO: 4159433 - DNA, 25 bp, Homo sapien
ttagcatcatcttctgagtctgtag

SEQ ID NO: 4159434 - DNA, 25 bp, Homo sapien
aatccttagtaggaagtcatatccc

SEQ ID NO: 4159435 - DNA, 25 bp, Homo sapien
cataattatttgacgagtgcatcca

SEQ ID NO: 4159436 - DNA, 25 bp, Homo sapien
tgaatcaccaggcagcaacagacag

SEQ ID NO: 4159437 - DNA, 25 bp, Homo sapien
agagccaagtggtttcggcttgcca

SEQ ID NO: 4159438 - DNA, 25 bp, Homo sapien
gattctctggtgcaccctaggtagc

SEQ ID NO: 4159439 - DNA, 25 bp, Homo sapien
tggcttgcattggatcagattctct

SEQ ID NO: 4159440 - DNA, 25 bp, Homo sapien
ggaaggaagactagctcaccacatt

SEQ ID NO: 4159441 - DNA, 25 bp, Homo sapien
gccaggcaagctttccatctgaaga

SEQ ID NO: 4159442 - DNA, 25 bp, Homo sapien
caattgaacttcagcagccacactg

SEQ ID NO: 4159443 - DNA, 25 bp, Homo sapien
tctgggttagatcaactactactgt

SEQ ID NO: 4159444 - DNA, 25 bp, Homo sapien
caggttggttgtcagtaatcaagcc

SEQ ID NO: 4159445 - DNA, 25 bp, Homo sapien
tgtgggactctgcaaacatatgctg

SEQ ID NO: 4159446 - DNA, 25 bp, Homo sapien
catgtcacatgaaacgattctctgc

SEQ ID NO: 4159447 - DNA, 25 bp, Homo sapien
tgaacttgaagtccctaaactgcaa

SEQ ID NO: 4159448 - DNA, 25 bp, Homo sapien
tgtggcaccaattctaatgtaatcc

SEQ ID NO: 4159449 - DNA, 25 bp, Homo sapien
gaggtctatagaaacatcatgtcac

SEQ ID NO: 4159450 - DNA, 25 bp, Homo sapien
gaagagctgagcctgattcaaatgg

SEQ ID NO: 4159451 - DNA, 25 bp, Homo sapien
tacatatacggctttggagacaatc

SEQ ID NO: 4159452 - DNA, 25 bp, Homo sapien
cctgttggatgtgatgggtctagtc

SEQ ID NO: 4159453 - DNA, 25 bp, Homo sapien
tacatcggagacacaacaaatgtgg

SEQ ID NO: 4159454 - DNA, 25 bp, Homo sapien
tgtttttgatacctcctggcagctt

SEQ ID NO: 4159455 - DNA, 25 bp, Homo sapien
tcaggactgcgtgatcgtgcacttt

SEQ ID NO: 4159456 - DNA, 25 bp, Homo sapien
gagtagtcctatatgtcacctaggg

SEQ ID NO: 4159457 - DNA, 25 bp, Homo sapien
tcacctagggaacagacattatagc

SEQ ID NO: 4159458 - DNA, 25 bp, Homo sapien
tatggtggcacagttactgctcgcc

SEQ ID NO: 4159459 - DNA, 25 bp, Homo sapien
taatgcttcacagtatatggcctgg

SEQ ID NO: 4159460 - DNA, 25 bp, Homo sapien
tgactggcaataacgcacggtactg

SEQ ID NO: 4159461 - DNA, 25 bp, Homo sapien
cattaatgaactcgagatggctctg

SEQ ID NO: 4159462 - DNA, 25 bp, Homo sapien
gcaaaattacatgaatgagactttc

SEQ ID NO: 4159463 - DNA, 25 bp, Homo sapien
tatgttgtctgtaaatctaaagaac

SEQ ID NO: 4159464 - DNA, 25 bp, Homo sapien
gagaagtactagacagtatgtttaa

SEQ ID NO: 4159465 - DNA, 25 bp, Homo sapien
tctgtaaatctaaagaacatatgtg

SEQ ID NO: 4159466 - DNA, 25 bp, Homo sapien
aaaacttgtgtagtttgtcctgtgt

SEQ ID NO: 4159467 - DNA, 25 bp, Homo sapien
aaacttgtgtagtttgtcctgtgta

SEQ ID NO: 4159468 - DNA, 25 bp, Homo sapien
gaaaacttgtgtagtttgtcctgtg

SEQ ID NO: 4159469 - DNA, 25 bp, Homo sapien
cgggcaggtaactcacgtggtcttt

SEQ ID NO: 4159470 - DNA, 25 bp, Homo sapien
ggtctttgcatctcatttctatcag

SEQ ID NO: 4159471 - DNA, 25 bp, Homo sapien
agagggatgtcgctcccctacaggg

SEQ ID NO: 4159472 - DNA, 25 bp, Homo sapien
gaactccccgacactgttagaacaa

SEQ ID NO: 4159473 - DNA, 25 bp, Homo sapien
cacatttgtggtgctcacttcggca

SEQ ID NO: 4159474 - DNA, 25 bp, Homo sapien
gatgattagagcattttcagggaga

SEQ ID NO: 4159475 - DNA, 25 bp, Homo sapien
gatgccataaatttgttgtcctagc

SEQ ID NO: 4159476 - DNA, 25 bp, Homo sapien
tacctacgctttaaaatgaggatgc

SEQ ID NO: 4159477 - DNA, 25 bp, Homo sapien
tgaaaggaccctgtggacatccaga

SEQ ID NO: 4159478 - DNA, 25 bp, Homo sapien
tattgcctagtacatgggcagaggg

SEQ ID NO: 4159479 - DNA, 25 bp, Homo sapien
ctgttgagagggcagaagtcagaca

SEQ ID NO: 4159480 - DNA, 25 bp, Homo sapien
gacttgagagatcgtgctcttaccc

SEQ ID NO: 4159481 - DNA, 25 bp, Homo sapien
ggtttgtatgttggactaaaggcag

SEQ ID NO: 4159482 - DNA, 25 bp, Homo sapien
gataaattgcatcctcttgtaatgg

SEQ ID NO: 4159483 - DNA, 25 bp, Homo sapien
tcctttaccatgttatacctttaga

SEQ ID NO: 4159484 - DNA, 25 bp, Homo sapien
taaaggcaggagtgtacactgaaac

SEQ ID NO: 4159485 - DNA, 25 bp, Homo sapien
gaggtcctaggccaattttcattca

SEQ ID NO: 4159486 - DNA, 25 bp, Homo sapien
tactgtgttccttatagcacatggg

SEQ ID NO: 4159487 - DNA, 25 bp, Homo sapien
caggccacatgtcgctgcagcttat

SEQ ID NO: 4159488 - DNA, 25 bp, Homo sapien
tttataaaacgtagggtaggcatca

SEQ ID NO: 4159489 - DNA, 25 bp, Homo sapien
tcatatttgggagctaaaaacgtaa

SEQ ID NO: 4159490 - DNA, 25 bp, Homo sapien
tcatgaagttagagaatagactggt

SEQ ID NO: 4159491 - DNA, 25 bp, Homo sapien
actggaagtcactgtgttgtgaaat

SEQ ID NO: 4159492 - DNA, 25 bp, Homo sapien
caagcatggataagcaaatatcaca

SEQ ID NO: 4159493 - DNA, 25 bp, Homo sapien
agtatatgtgccaccgaagtgagca

SEQ ID NO: 4159494 - DNA, 25 bp, Homo sapien
aatgcttacaaatttgcgtgccatc

SEQ ID NO: 4159495 - DNA, 25 bp, Homo sapien
ggaatgcttacaaatttgcgtgcca

SEQ ID NO: 4159496 - DNA, 25 bp, Homo sapien
atggaatgcttacaaatttgcgtgc

SEQ ID NO: 4159497 - DNA, 25 bp, Homo sapien
ttatttaagtaccttgtcgatgctg

SEQ ID NO: 4159498 - DNA, 25 bp, Homo sapien
aatttatttaagtaccttgtcgatg

SEQ ID NO: 4159499 - DNA, 25 bp, Homo sapien
gcacccagtcgcatgtcttcttttg

SEQ ID NO: 4159500 - DNA, 25 bp, Homo sapien
tttatttaagtaccttgtcgatgct

SEQ ID NO: 4159501 - DNA, 25 bp, Homo sapien
cagatccttccaataaaatgcaata

SEQ ID NO: 4159502 - DNA, 25 bp, Homo sapien
ccagatccttccaataaaatgcaat

SEQ ID NO: 4159503 - DNA, 25 bp, Homo sapien
agatccttccaataaaatgcaatat

SEQ ID NO: 4159504 - DNA, 25 bp, Homo sapien
tgtggcttcattacccaaacttctt

SEQ ID NO: 4159505 - DNA, 25 bp, Homo sapien
cacagaggagtcatgagcagttagt

SEQ ID NO: 4159506 - DNA, 25 bp, Homo sapien
gagcagttagtgtcagctcaggagc

SEQ ID NO: 4159507 - DNA, 25 bp, Homo sapien
tagctttctaaatgaccagaagtcg

SEQ ID NO: 4159508 - DNA, 25 bp, Homo sapien
ttgacagtgagggaataattgtcct

SEQ ID NO: 4159509 - DNA, 25 bp, Homo sapien
ttgtccttgcctcagaccaggaagc

SEQ ID NO: 4159510 - DNA, 25 bp, Homo sapien
agccagagatcagggttgacagtga

SEQ ID NO: 4159511 - DNA, 25 bp, Homo sapien
aatgcgaaggagtaacacagctggg

SEQ ID NO: 4159512 - DNA, 25 bp, Homo sapien
gacctcggacaaatgattatgcttc

SEQ ID NO: 4159513 - DNA, 25 bp, Homo sapien
ctcggacaaatgattatgcttccat

SEQ ID NO: 4159514 - DNA, 25 bp, Homo sapien
acctcggacaaatgattatgcttcc

SEQ ID NO: 4159515 - DNA, 25 bp, Homo sapien
ggacaaatgattatgcttccattct

SEQ ID NO: 4159516 - DNA, 25 bp, Homo sapien
catgctaatgtatgccaaaggataa

SEQ ID NO: 4159517 - DNA, 25 bp, Homo sapien
gcaaggccattgataaaagatacat

SEQ ID NO: 4159518 - DNA, 25 bp, Homo sapien
gcaaatgtttggagaagacctctaa

SEQ ID NO: 4159519 - DNA, 25 bp, Homo sapien
catactggtcacaaagcttagattc

SEQ ID NO: 4159520 - DNA, 25 bp, Homo sapien
aatgagtatgagtggttgtaataat

SEQ ID NO: 4159521 - DNA, 25 bp, Homo sapien
tgagtatgagtggttgtaataatat

SEQ ID NO: 4159522 - DNA, 25 bp, Homo sapien
gaatgagtatgagtggttgtaataa

SEQ ID NO: 4159523 - DNA, 25 bp, Homo sapien
atgagtatgagtggttgtaataata

SEQ ID NO: 4159524 - DNA, 25 bp, Homo sapien
ctgggtcctctttgctgcttagtgg

SEQ ID NO: 4159525 - DNA, 25 bp, Homo sapien
gtagtttcagctgatcatttctcag

SEQ ID NO: 4159526 - DNA, 25 bp, Homo sapien
gcctaccttatacagcatttcagcc

SEQ ID NO: 4159527 - DNA, 25 bp, Homo sapien
tgggttcggcaaacattctctaatt

SEQ ID NO: 4159528 - DNA, 25 bp, Homo sapien
taaggatagacactaaggtcacagc

SEQ ID NO: 4159529 - DNA, 25 bp, Homo sapien
ctattgcaatatgggaaaagagacc

SEQ ID NO: 4159530 - DNA, 25 bp, Homo sapien
tttatagccaacgagcaaggtcggg

SEQ ID NO: 4159531 - DNA, 25 bp, Homo sapien
cctacagggcttataggcaactgac

SEQ ID NO: 4159532 - DNA, 25 bp, Homo sapien
cttctcctgataagtatacatattt

SEQ ID NO: 4159533 - DNA, 25 bp, Homo sapien
gagcaaggtaggtgtccatgccaga

SEQ ID NO: 4159534 - DNA, 25 bp, Homo sapien
ttgatgaactgagcaaggtaggtgt

SEQ ID NO: 4159535 - DNA, 25 bp, Homo sapien
ggatatttgatgaactgagcaaggt

SEQ ID NO: 4159536 - DNA, 25 bp, Homo sapien
gaactgagcaaggtaggtgtccatg

SEQ ID NO: 4159537 - DNA, 25 bp, Homo sapien
tcaaaaccactcaactacatggaag

SEQ ID NO: 4159538 - DNA, 25 bp, Homo sapien
aaaccactcaactacatggaagctg

SEQ ID NO: 4159539 - DNA, 25 bp, Homo sapien
gggtacataacaaaatgaaggcaga

SEQ ID NO: 4159540 - DNA, 25 bp, Homo sapien
aacaacctgctcctgaatgactact

SEQ ID NO: 4159541 - DNA, 25 bp, Homo sapien
tcctttctttgctgagatcaaactc

SEQ ID NO: 4159542 - DNA, 25 bp, Homo sapien
ctttgctgagatcaaactccctttt

SEQ ID NO: 4159543 - DNA, 25 bp, Homo sapien
tttctttgctgagatcaaactccct

SEQ ID NO: 4159544 - DNA, 25 bp, Homo sapien
tctttgctgagatcaaactcccttt

SEQ ID NO: 4159545 - DNA, 25 bp, Homo sapien
ctgtggtccgctagaggaagcagaa

SEQ ID NO: 4159546 - DNA, 25 bp, Homo sapien
agactggacatggtctgcaggaagc

SEQ ID NO: 4159547 - DNA, 25 bp, Homo sapien
cagactggacatggtctgcaggaag

SEQ ID NO: 4159548 - DNA, 25 bp, Homo sapien
cttgtggaagagtgtgtagctgtgg

SEQ ID NO: 4159549 - DNA, 25 bp, Homo sapien
aggactccagacacccaaggctgta

SEQ ID NO: 4159550 - DNA, 25 bp, Homo sapien
ccagacacccaaggctgtaagtcag

SEQ ID NO: 4159551 - DNA, 25 bp, Homo sapien
tccagacacccaaggctgtaagtca

SEQ ID NO: 4159552 - DNA, 25 bp, Homo sapien
agaaggactccagacacccaaggct

SEQ ID NO: 4159553 - DNA, 25 bp, Homo sapien
gcatgtcattttcctgtagaggcat

SEQ ID NO: 4159554 - DNA, 25 bp, Homo sapien
tagaggcattcaattgctaggaccc

SEQ ID NO: 4159555 - DNA, 25 bp, Homo sapien
tttcacctgccccagcaattatagg

SEQ ID NO: 4159556 - DNA, 25 bp, Homo sapien
tcaagactgacattacatatgagca

SEQ ID NO: 4159557 - DNA, 25 bp, Homo sapien
cctgaatcctgaacagagtctggtt

SEQ ID NO: 4159558 - DNA, 25 bp, Homo sapien
gtcctgaatcctgaacagagtctgg

SEQ ID NO: 4159559 - DNA, 25 bp, Homo sapien
tgaatcctgaacagagtctggttaa

SEQ ID NO: 4159560 - DNA, 25 bp, Homo sapien
atcctgaacagagtctggttaacca

SEQ ID NO: 4159561 - DNA, 25 bp, Homo sapien
tgggtcaccagaacagtttcctgta

SEQ ID NO: 4159562 - DNA, 25 bp, Homo sapien
ctgtactcaggtccctggcgaccat

SEQ ID NO: 4159563 - DNA, 25 bp, Homo sapien
gaaacttgcggggaggcacacctct

SEQ ID NO: 4159564 - DNA, 25 bp, Homo sapien
cttgcggggaggcacacctctctgg

SEQ ID NO: 4159565 - DNA, 25 bp, Homo sapien
tgtaggggaccactctatagagcca

SEQ ID NO: 4159566 - DNA, 25 bp, Homo sapien
accactctatagagccaggacacag

SEQ ID NO: 4159567 - DNA, 25 bp, Homo sapien
gggaccactctatagagccaggaca

SEQ ID NO: 4159568 - DNA, 25 bp, Homo sapien
tgcagtgtaggggaccactctatag

SEQ ID NO: 4159569 - DNA, 25 bp, Homo sapien
acagacctgctaggaccctgaagac

SEQ ID NO: 4159570 - DNA, 25 bp, Homo sapien
ttgcctatgttttgggtcacgtccc

SEQ ID NO: 4159571 - DNA, 25 bp, Homo sapien
gaagacctttacaggcattgcctat

SEQ ID NO: 4159572 - DNA, 25 bp, Homo sapien
cagtttgagtgtgctagtcacccgg

SEQ ID NO: 4159573 - DNA, 25 bp, Homo sapien
ttcttcagacattgtgattatgaaa

SEQ ID NO: 4159574 - DNA, 25 bp, Homo sapien
gttcttcagacattgtgattatgaa

SEQ ID NO: 4159575 - DNA, 25 bp, Homo sapien
cctaaatggctttcatgaggtgaga

SEQ ID NO: 4159576 - DNA, 25 bp, Homo sapien
gggcatgcatagtcacactgtttcc

SEQ ID NO: 4159577 - DNA, 25 bp, Homo sapien
caatttgacacgctggtagggttac

SEQ ID NO: 4159578 - DNA, 25 bp, Homo sapien
gggttaccatctgagtttcctctgg

SEQ ID NO: 4159579 - DNA, 25 bp, Homo sapien
tctccagtgcagctcgtgaagaagg

SEQ ID NO: 4159580 - DNA, 25 bp, Homo sapien
tgatcctaagtactgctatcctggg

SEQ ID NO: 4159581 - DNA, 25 bp, Homo sapien
tgactttcaaggatcattttgccag

SEQ ID NO: 4159582 - DNA, 25 bp, Homo sapien
gacccttaaccacacagccaagtat

SEQ ID NO: 4159583 - DNA, 25 bp, Homo sapien
gtaaggatggctacactacagtgct

SEQ ID NO: 4159584 - DNA, 25 bp, Homo sapien
cactttaccatcacttgcaggagag

SEQ ID NO: 4159585 - DNA, 25 bp, Homo sapien
cacaatacatgagtagaggaggcga

SEQ ID NO: 4159586 - DNA, 25 bp, Homo sapien
tgtgacacagcccttcggaaacagg

SEQ ID NO: 4159587 - DNA, 25 bp, Homo sapien
catgtcttcctatgttctgagccct

SEQ ID NO: 4159588 - DNA, 25 bp, Homo sapien
acactgctgaatagtgctttcacac

SEQ ID NO: 4159589 - DNA, 25 bp, Homo sapien
ttacagttccattgtggcttgggag

SEQ ID NO: 4159590 - DNA, 25 bp, Homo sapien
aacactgctgaatagtgctttcaca

SEQ ID NO: 4159591 - DNA, 25 bp, Homo sapien
tggcacagagctcaacttatcaatt

SEQ ID NO: 4159592 - DNA, 25 bp, Homo sapien
gggaactccaatcatttgtggacca

SEQ ID NO: 4159593 - DNA, 25 bp, Homo sapien
tgtggaccattgtgggcaacatgaa

SEQ ID NO: 4159594 - DNA, 25 bp, Homo sapien
gaaagatggtgaccagggaactcca

SEQ ID NO: 4159595 - DNA, 25 bp, Homo sapien
taccccagcaggacttgcttgaata

SEQ ID NO: 4159596 - DNA, 25 bp, Homo sapien
caaaggagcggtatttataccccag

SEQ ID NO: 4159597 - DNA, 25 bp, Homo sapien
caggacttgcttgaatacaaggaac

SEQ ID NO: 4159598 - DNA, 25 bp, Homo sapien
gagcggtatttataccccagcagga

SEQ ID NO: 4159599 - DNA, 25 bp, Homo sapien
tccactctattctgggcactagcaa

SEQ ID NO: 4159600 - DNA, 25 bp, Homo sapien
taataatgctccttagacgtggtct

SEQ ID NO: 4159601 - DNA, 25 bp, Homo sapien
cactagcaaagtcactatccctggg

SEQ ID NO: 4159602 - DNA, 25 bp, Homo sapien
cacttatttccctgtgaagctggcc

SEQ ID NO: 4159603 - DNA, 25 bp, Homo sapien
tgatcatatgtgtttgtcaacccat

SEQ ID NO: 4159604 - DNA, 25 bp, Homo sapien
catagaactgtgtactaagaagggt

SEQ ID NO: 4159605 - DNA, 25 bp, Homo sapien
tacacagctacaaaaaggacaaact

SEQ ID NO: 4159606 - DNA, 25 bp, Homo sapien
ggctgaatactgtcccatgtaaatg

SEQ ID NO: 4159607 - DNA, 25 bp, Homo sapien
ctctgaagggtaagcaaggagagtt

SEQ ID NO: 4159608 - DNA, 25 bp, Homo sapien
tgtggaaagcgtggctatgtatttg

SEQ ID NO: 4159609 - DNA, 25 bp, Homo sapien
tgctttgtctctgaagggtaagcaa

SEQ ID NO: 4159610 - DNA, 25 bp, Homo sapien
tatttgattatcgtttttgcttcca

SEQ ID NO: 4159611 - DNA, 25 bp, Homo sapien
gatgtggcacagcaatactgagtct

SEQ ID NO: 4159612 - DNA, 25 bp, Homo sapien
cctgttgctgcctgatgtggcacag

SEQ ID NO: 4159613 - DNA, 25 bp, Homo sapien
agcaatactgagtctatgaaccaga

SEQ ID NO: 4159614 - DNA, 25 bp, Homo sapien
tggaccccagaaagagatattggat

SEQ ID NO: 4159615 - DNA, 25 bp, Homo sapien
ctttgtctatcatcattgccttaac

SEQ ID NO: 4159616 - DNA, 25 bp, Homo sapien
tatcatcattgccttaaccttgcat

SEQ ID NO: 4159617 - DNA, 25 bp, Homo sapien
tctatcatcattgccttaaccttgc

SEQ ID NO: 4159618 - DNA, 25 bp, Homo sapien
tgtctatcatcattgccttaacctt

SEQ ID NO: 4159619 - DNA, 25 bp, Homo sapien
ccccaagttgcctactgaaaggaag

SEQ ID NO: 4159620 - DNA, 25 bp, Homo sapien
agtggagaatctccccaagttgcct

SEQ ID NO: 4159621 - DNA, 25 bp, Homo sapien
ttcaattgtgctttgatcagaaagt

SEQ ID NO: 4159622 - DNA, 25 bp, Homo sapien
aagaagccagagttgtgaattccac

SEQ ID NO: 4159623 - DNA, 25 bp, Homo sapien
aggagctgtccctggtattggtgct

SEQ ID NO: 4159624 - DNA, 25 bp, Homo sapien
tgtctctgaaccatattccaactca

SEQ ID NO: 4159625 - DNA, 25 bp, Homo sapien
actccccaaaatgtaacagtccttg

SEQ ID NO: 4159626 - DNA, 25 bp, Homo sapien
cccaaaatgtaacagtccttgtctc

SEQ ID NO: 4159627 - DNA, 25 bp, Homo sapien
ggcttccctgaagagacttaattgg

SEQ ID NO: 4159628 - DNA, 25 bp, Homo sapien
tgatttaggattatgacagctttca

SEQ ID NO: 4159629 - DNA, 25 bp, Homo sapien
ttatgatttaggattatgacagctt

SEQ ID NO: 4159630 - DNA, 25 bp, Homo sapien
tatcctaagagcaaccctgtctggt

SEQ ID NO: 4159631 - DNA, 25 bp, Homo sapien
cagctttcatggtcagtatcctaag

SEQ ID NO: 4159632 - DNA, 25 bp, Homo sapien
cctcagctgtattggtgtcctgaat

SEQ ID NO: 4159633 - DNA, 25 bp, Homo sapien
gacttggaattgatgttttattgag

SEQ ID NO: 4159634 - DNA, 25 bp, Homo sapien
tcaagcttggtgaggagatgacttg

SEQ ID NO: 4159635 - DNA, 25 bp, Homo sapien
cagttgatggaggacgctgataagt

SEQ ID NO: 4159636 - DNA, 25 bp, Homo sapien
tctatgcagatgtacgaagacctgg

SEQ ID NO: 4159637 - DNA, 25 bp, Homo sapien
tccacacctgcgagaagtattggct

SEQ ID NO: 4159638 - DNA, 25 bp, Homo sapien
caggtctgaagcgtgcatttccaca

SEQ ID NO: 4159639 - DNA, 25 bp, Homo sapien
catggctgagtaccactttggagat

SEQ ID NO: 4159640 - DNA, 25 bp, Homo sapien
gatagcactgctgtggagtgctgct

SEQ ID NO: 4159641 - DNA, 25 bp, Homo sapien
agcccactgagaaagcccttccgag

SEQ ID NO: 4159642 - DNA, 25 bp, Homo sapien
taatgactcccttcgtgcagcttgc

SEQ ID NO: 4159643 - DNA, 25 bp, Homo sapien
gcagcggtactttacctcaaatgga

SEQ ID NO: 4159644 - DNA, 25 bp, Homo sapien
agccaccacaacaaagtcctcaagg

SEQ ID NO: 4159645 - DNA, 25 bp, Homo sapien
actgcttctagggacttgagaaatg

SEQ ID NO: 4159646 - DNA, 25 bp, Homo sapien
tcaaaggcccctgagagattctgac

SEQ ID NO: 4159647 - DNA, 25 bp, Homo sapien
aatgaccagtctctttgatttccca

SEQ ID NO: 4159648 - DNA, 25 bp, Homo sapien
tccatgtgggtcaactgaggactca

SEQ ID NO: 4159649 - DNA, 25 bp, Homo sapien
tgaagacggtcagagagattccgcc

SEQ ID NO: 4159650 - DNA, 25 bp, Homo sapien
caaaggaatagtcagtctcagggca

SEQ ID NO: 4159651 - DNA, 25 bp, Homo sapien
tacaactttcctcctagccatgggc

SEQ ID NO: 4159652 - DNA, 25 bp, Homo sapien
cgcccgcgggtgaaaatcgccccat

SEQ ID NO: 4159653 - DNA, 25 bp, Homo sapien
agtaggtgggcagggaaggagcggc

SEQ ID NO: 4159654 - DNA, 25 bp, Homo sapien
ctctggaggagctggacactcttct

SEQ ID NO: 4159655 - DNA, 25 bp, Homo sapien
cggcgggcgggcagcctctggagga

SEQ ID NO: 4159656 - DNA, 25 bp, Homo sapien
tgggcagggaaggagcggcgggcgg

SEQ ID NO: 4159657 - DNA, 25 bp, Homo sapien
cttggcttttatgggcaggtgggag

SEQ ID NO: 4159658 - DNA, 25 bp, Homo sapien
agagaggctcgctggctcccacgga

SEQ ID NO: 4159659 - DNA, 25 bp, Homo sapien
aagggctgtgatccgctgctggtaa

SEQ ID NO: 4159660 - DNA, 25 bp, Homo sapien
tcgctggctcccacggagaggatcg

SEQ ID NO: 4159661 - DNA, 25 bp, Homo sapien
taacggtccatagctggtccggtgg

SEQ ID NO: 4159662 - DNA, 25 bp, Homo sapien
ggtcttgagcaattccccagaggaa

SEQ ID NO: 4159663 - DNA, 25 bp, Homo sapien
gatgtcgtgaaaagatagcctggtg

SEQ ID NO: 4159664 - DNA, 25 bp, Homo sapien
tagttaaaggagcagcggatcgcgc

SEQ ID NO: 4159665 - DNA, 25 bp, Homo sapien
aagttgcgtttcgtaacagagctcc

SEQ ID NO: 4159666 - DNA, 25 bp, Homo sapien
tcttgtgtctctagtgaaagcggca

SEQ ID NO: 4159667 - DNA, 25 bp, Homo sapien
tttctgtaggatcagcaagccctca

SEQ ID NO: 4159668 - DNA, 25 bp, Homo sapien
ccagagggttacttggaggaccaga

SEQ ID NO: 4159669 - DNA, 25 bp, Homo sapien
caatagttagaccagtgcacctttc

SEQ ID NO: 4159670 - DNA, 25 bp, Homo sapien
gaagtgagccccaaataaatagagg

SEQ ID NO: 4159671 - DNA, 25 bp, Homo sapien
gaatttgagtacacacgacttcagg

SEQ ID NO: 4159672 - DNA, 25 bp, Homo sapien
gacttcaggcttgtagacattctaa

SEQ ID NO: 4159673 - DNA, 25 bp, Homo sapien
gaccatggactttggactgtgacct

SEQ ID NO: 4159674 - DNA, 25 bp, Homo sapien
gcagagggtgctcaactgtgccact

SEQ ID NO: 4159675 - DNA, 25 bp, Homo sapien
gataacgggactagcacaatatctg

SEQ ID NO: 4159676 - DNA, 25 bp, Homo sapien
gcaatttgcttaacgagtggaggct

SEQ ID NO: 4159677 - DNA, 25 bp, Homo sapien
tgctggcggagagcttagccttctt

SEQ ID NO: 4159678 - DNA, 25 bp, Homo sapien
gagagcttagccttcttcgcagtgt

SEQ ID NO: 4159679 - DNA, 25 bp, Homo sapien
acctgctggcggagagcttagcctt

SEQ ID NO: 4159680 - DNA, 25 bp, Homo sapien
tccgctgacctgctggcggagagct

SEQ ID NO: 4159681 - DNA, 25 bp, Homo sapien
gggatgaggtaagatcttagatgag

SEQ ID NO: 4159682 - DNA, 25 bp, Homo sapien
gccacatttttcctggtgatgccac

SEQ ID NO: 4159683 - DNA, 25 bp, Homo sapien
tgagacactcagaacagccacattt

SEQ ID NO: 4159684 - DNA, 25 bp, Homo sapien
ggtaagatcttagatgagacactca

SEQ ID NO: 4159685 - DNA, 25 bp, Homo sapien
tactgaccagtgaagtaacttccct

SEQ ID NO: 4159686 - DNA, 25 bp, Homo sapien
gggagatgaggttttctagcttaac

SEQ ID NO: 4159687 - DNA, 25 bp, Homo sapien
gggattttagataaccactttgatc

SEQ ID NO: 4159688 - DNA, 25 bp, Homo sapien
cactttgatcatgtcaagctgacaa

SEQ ID NO: 4159689 - DNA, 25 bp, Homo sapien
gacagacaaccactgaaacactaat

SEQ ID NO: 4159690 - DNA, 25 bp, Homo sapien
gagagccacatcagacagagaaaaa

SEQ ID NO: 4159691 - DNA, 25 bp, Homo sapien
tgtatcttcccttaagcgcatcctg

SEQ ID NO: 4159692 - DNA, 25 bp, Homo sapien
acaatacgttagaatagaagagagc

SEQ ID NO: 4159693 - DNA, 25 bp, Homo sapien
ctgcccatttatggacattttattt

SEQ ID NO: 4159694 - DNA, 25 bp, Homo sapien
cccatttatggacattttatttctt

SEQ ID NO: 4159695 - DNA, 25 bp, Homo sapien
gcccatttatggacattttatttct

SEQ ID NO: 4159696 - DNA, 25 bp, Homo sapien
tgcccatttatggacattttatttc

SEQ ID NO: 4159697 - DNA, 25 bp, Homo sapien
cagttggagctaatttcttatgcat

SEQ ID NO: 4159698 - DNA, 25 bp, Homo sapien
tttatgtaagacttgagctacccac

SEQ ID NO: 4159699 - DNA, 25 bp, Homo sapien
aaacctaggcagagatgatactgaa

SEQ ID NO: 4159700 - DNA, 25 bp, Homo sapien
caaggagataaaaacctaggcagag

SEQ ID NO: 4159701 - DNA, 25 bp, Homo sapien
tcttgagatgacttcaagggtgagt

SEQ ID NO: 4159702 - DNA, 25 bp, Homo sapien
acttcaagggtgagttggtgaacgt

SEQ ID NO: 4159703 - DNA, 25 bp, Homo sapien
gtgagttggtgaacgtgtgagctcc

SEQ ID NO: 4159704 - DNA, 25 bp, Homo sapien
atgacttcaagggtgagttggtgaa

SEQ ID NO: 4159705 - DNA, 25 bp, Homo sapien
aatgtcagatgatagtttacaatgc

SEQ ID NO: 4159706 - DNA, 25 bp, Homo sapien
tcactttgtcatgtcaaggaagtct

SEQ ID NO: 4159707 - DNA, 25 bp, Homo sapien
tcattttgcaaccatgtatctgcta

SEQ ID NO: 4159708 - DNA, 25 bp, Homo sapien
aaattcactggcgaagctacctgga

SEQ ID NO: 4159709 - DNA, 25 bp, Homo sapien
gctgaagctgttctgagcgaggaac

SEQ ID NO: 4159710 - DNA, 25 bp, Homo sapien
tgagcgaggaactgtatggaaacgt

SEQ ID NO: 4159711 - DNA, 25 bp, Homo sapien
gccagcacactctgggtaattcact

SEQ ID NO: 4159712 - DNA, 25 bp, Homo sapien
tgtgtaaatggccaagtcctagctc

SEQ ID NO: 4159713 - DNA, 25 bp, Homo sapien
acagtcacaaaccattggcaacctg

SEQ ID NO: 4159714 - DNA, 25 bp, Homo sapien
gttgtccaatgtgaattatgctagt

SEQ ID NO: 4159715 - DNA, 25 bp, Homo sapien
cacagtcacaaaccattggcaacct

SEQ ID NO: 4159716 - DNA, 25 bp, Homo sapien
gaattatgctagtaagattttcttt

SEQ ID NO: 4159717 - DNA, 25 bp, Homo sapien
gcttttgacctaagggtggagccat

SEQ ID NO: 4159718 - DNA, 25 bp, Homo sapien
atgttggggagaccagtgagatcat

SEQ ID NO: 4159719 - DNA, 25 bp, Homo sapien
ggagccatactggtccccctcattt

SEQ ID NO: 4159720 - DNA, 25 bp, Homo sapien
gatcatgtctataaagtggattgac

SEQ ID NO: 4159721 - DNA, 25 bp, Homo sapien
aagcaaggaagatggtaatttgttc

SEQ ID NO: 4159722 - DNA, 25 bp, Homo sapien
agcaaggaagatggtaatttgttcc

SEQ ID NO: 4159723 - DNA, 25 bp, Homo sapien
tgttcccctgtttaaatgtgttcca

SEQ ID NO: 4159724 - DNA, 25 bp, Homo sapien
gtcagcatggccaagcagtggttga

SEQ ID NO: 4159725 - DNA, 25 bp, Homo sapien
ccagcagttgtttgaaaactatcac

SEQ ID NO: 4159726 - DNA, 25 bp, Homo sapien
tacatgctgtattgtgtccaagtca

SEQ ID NO: 4159727 - DNA, 25 bp, Homo sapien
tgggaattgtatggcctcaagcagg

SEQ ID NO: 4159728 - DNA, 25 bp, Homo sapien
cttctcttcggctgagcacaatgct

SEQ ID NO: 4159729 - DNA, 25 bp, Homo sapien
tcaaagcttctcttcggctgagcac

SEQ ID NO: 4159730 - DNA, 25 bp, Homo sapien
gcaacatatctttctagtgcattca

SEQ ID NO: 4159731 - DNA, 25 bp, Homo sapien
tccgtattcaccattgtctttcctt

SEQ ID NO: 4159732 - DNA, 25 bp, Homo sapien
gacttggaagattgcaaccttggct

SEQ ID NO: 4159733 - DNA, 25 bp, Homo sapien
aaactggtcttcctaggctttgaca

SEQ ID NO: 4159734 - DNA, 25 bp, Homo sapien
ggagatctacgctactatctgggag

SEQ ID NO: 4159735 - DNA, 25 bp, Homo sapien
ctcagatgactgctagaagttgccg

SEQ ID NO: 4159736 - DNA, 25 bp, Homo sapien
cataggtgtgaagggttttgctttc

SEQ ID NO: 4159737 - DNA, 25 bp, Homo sapien
ctataaagagaacataggtgtgaag

SEQ ID NO: 4159738 - DNA, 25 bp, Homo sapien
ttgctattatacaaacgtcacttct

SEQ ID NO: 4159739 - DNA, 25 bp, Homo sapien
tatacaaacgtcacttctcatgtgt

SEQ ID NO: 4159740 - DNA, 25 bp, Homo sapien
tgacagatgaggcaagcaaacttag

SEQ ID NO: 4159741 - DNA, 25 bp, Homo sapien
ggccactattggtgaatgaaatgca

SEQ ID NO: 4159742 - DNA, 25 bp, Homo sapien
gacctagaattactggaaaacctca

SEQ ID NO: 4159743 - DNA, 25 bp, Homo sapien
cctagatggttgaagtaacagttgc

SEQ ID NO: 4159744 - DNA, 25 bp, Homo sapien
catgtccttgttagtgagcaggtga

SEQ ID NO: 4159745 - DNA, 25 bp, Homo sapien
tataatactgtgacaaaagcatgct

SEQ ID NO: 4159746 - DNA, 25 bp, Homo sapien
tgaacataaaagtcagaccagaagt

SEQ ID NO: 4159747 - DNA, 25 bp, Homo sapien
tataatacagaatcatgatgtaaca

SEQ ID NO: 4159748 - DNA, 25 bp, Homo sapien
catgggatttcagacccgagagcac

SEQ ID NO: 4159749 - DNA, 25 bp, Homo sapien
gagcactgaagtagtgtccaagaat

SEQ ID NO: 4159750 - DNA, 25 bp, Homo sapien
tcagaacctggacctgcttgaccgc

SEQ ID NO: 4159751 - DNA, 25 bp, Homo sapien
gcctaaacaagtccagaacatcatg

SEQ ID NO: 4159752 - DNA, 25 bp, Homo sapien
ctcattccataggtgaaactggatc

SEQ ID NO: 4159753 - DNA, 25 bp, Homo sapien
actttgagtagcaagacgctagatg

SEQ ID NO: 4159754 - DNA, 25 bp, Homo sapien
ttctcattccataggtgaaactgga

SEQ ID NO: 4159755 - DNA, 25 bp, Homo sapien
tagcaagacgctagatgacttcttc

SEQ ID NO: 4159756 - DNA, 25 bp, Homo sapien
tagacaaggtaaatgcaggttgctg

SEQ ID NO: 4159757 - DNA, 25 bp, Homo sapien
gcttgtgagcatcttgtaccatgga

SEQ ID NO: 4159758 - DNA, 25 bp, Homo sapien
gaggagttattgattaaaactgggc

SEQ ID NO: 4159759 - DNA, 25 bp, Homo sapien
tgtaccatggatgtatgtagtttct

SEQ ID NO: 4159760 - DNA, 25 bp, Homo sapien
tctttgtatccttatactataagcg

SEQ ID NO: 4159761 - DNA, 25 bp, Homo sapien
acaaacattgtacagcactacaaaa

SEQ ID NO: 4159762 - DNA, 25 bp, Homo sapien
tgtatccttatactataagcgtttt

SEQ ID NO: 4159763 - DNA, 25 bp, Homo sapien
taaaacaaacattgtacagcactac

SEQ ID NO: 4159764 - DNA, 25 bp, Homo sapien
gcagttgacagttctggtaaccgaa

SEQ ID NO: 4159765 - DNA, 25 bp, Homo sapien
ggccctcttccagtattgcagttga

SEQ ID NO: 4159766 - DNA, 25 bp, Homo sapien
taataactccgatattgctgccttg

SEQ ID NO: 4159767 - DNA, 25 bp, Homo sapien
tggcaaagaaatgtgcaaggccctc

SEQ ID NO: 4159768 - DNA, 25 bp, Homo sapien
acaactccgtctcacaacagcatgt

SEQ ID NO: 4159769 - DNA, 25 bp, Homo sapien
actccgtctcacaacagcatgtctt

SEQ ID NO: 4159770 - DNA, 25 bp, Homo sapien
cagcatgtcttcatacatattcagg

SEQ ID NO: 4159771 - DNA, 25 bp, Homo sapien
tcatacatattcagggtatcctctt

SEQ ID NO: 4159772 - DNA, 25 bp, Homo sapien
tagggaccaaaatcaagaggacgca

SEQ ID NO: 4159773 - DNA, 25 bp, Homo sapien
aaatcaagaggacgcaagggacagc

SEQ ID NO: 4159774 - DNA, 25 bp, Homo sapien
ctagcgaatagggaccaaaatcaag

SEQ ID NO: 4159775 - DNA, 25 bp, Homo sapien
gaccaaaatcaagaggacgcaaggg

SEQ ID NO: 4159776 - DNA, 25 bp, Homo sapien
tgtagtggtactccccaaattctga

SEQ ID NO: 4159777 - DNA, 25 bp, Homo sapien
ctatctgtagtggtactccccaaat

SEQ ID NO: 4159778 - DNA, 25 bp, Homo sapien
tctgagtggcttggagaatgctctc

SEQ ID NO: 4159779 - DNA, 25 bp, Homo sapien
ttggcccattctccgtttctactcg

SEQ ID NO: 4159780 - DNA, 25 bp, Homo sapien
catagagtagtacatctgatttggt

SEQ ID NO: 4159781 - DNA, 25 bp, Homo sapien
gagtagtacatctgatttggtttca

SEQ ID NO: 4159782 - DNA, 25 bp, Homo sapien
ttctcatagagtagtacatctgatt

SEQ ID NO: 4159783 - DNA, 25 bp, Homo sapien
tcatagagtagtacatctgatttgg

SEQ ID NO: 4159784 - DNA, 25 bp, Homo sapien
caacatagcctatcttcaccagttt

SEQ ID NO: 4159785 - DNA, 25 bp, Homo sapien
gaatttccttcacaaaacaggctta

SEQ ID NO: 4159786 - DNA, 25 bp, Homo sapien
tttgatatgcatttcaacatagcct

SEQ ID NO: 4159787 - DNA, 25 bp, Homo sapien
caggcttaccacattcttatggttc

SEQ ID NO: 4159788 - DNA, 25 bp, Homo sapien
gacaggactgctgaatcaaatcaaa

SEQ ID NO: 4159789 - DNA, 25 bp, Homo sapien
tgctggtgccttcctgtgacacctc

SEQ ID NO: 4159790 - DNA, 25 bp, Homo sapien
aaagaccaatgtccttgctggtgcc

SEQ ID NO: 4159791 - DNA, 25 bp, Homo sapien
atttatacttgacaggactgctgaa

SEQ ID NO: 4159792 - DNA, 25 bp, Homo sapien
cagcccgtattacaactttgatctt

SEQ ID NO: 4159793 - DNA, 25 bp, Homo sapien
gcccgtattacaactttgatcttta

SEQ ID NO: 4159794 - DNA, 25 bp, Homo sapien
aactttgatctttacactcatgttc

SEQ ID NO: 4159795 - DNA, 25 bp, Homo sapien
ttacaactttgatctttacactcat

SEQ ID NO: 4159796 - DNA, 25 bp, Homo sapien
gataccaaggtgcagatatcttgcc

SEQ ID NO: 4159797 - DNA, 25 bp, Homo sapien
cattggctttggaccattggaaact

SEQ ID NO: 4159798 - DNA, 25 bp, Homo sapien
tatcttgccttatatgaagctaggg

SEQ ID NO: 4159799 - DNA, 25 bp, Homo sapien
gattcagaggtttagacaggcagga

SEQ ID NO: 4159800 - DNA, 25 bp, Homo sapien
ccttgtcaatccaatgtccctggta

SEQ ID NO: 4159801 - DNA, 25 bp, Homo sapien
ggctaccaaggaggcagatagcaga

SEQ ID NO: 4159802 - DNA, 25 bp, Homo sapien
cagtctatgtcaggggttagcccca

SEQ ID NO: 4159803 - DNA, 25 bp, Homo sapien
tgtctgcacttatcaacaactagaa

SEQ ID NO: 4159804 - DNA, 25 bp, Homo sapien
ctgtggtttccctgattctttgccc

SEQ ID NO: 4159805 - DNA, 25 bp, Homo sapien
tgtggtttccctgattctttgccct

SEQ ID NO: 4159806 - DNA, 25 bp, Homo sapien
ctgattctttgccctttcccaggtt

SEQ ID NO: 4159807 - DNA, 25 bp, Homo sapien
ttccctgattctttgccctttccca

SEQ ID NO: 4159808 - DNA, 25 bp, Homo sapien
ggcagtgttgatgacccattcccct

SEQ ID NO: 4159809 - DNA, 25 bp, Homo sapien
tggggcagtgttgatgacccattcc

SEQ ID NO: 4159810 - DNA, 25 bp, Homo sapien
gggcagtgttgatgacccattcccc

SEQ ID NO: 4159811 - DNA, 25 bp, Homo sapien
attcagtgaagtttggggcagtgtt

SEQ ID NO: 4159812 - DNA, 25 bp, Homo sapien
tctctgtgatagtctgttttgtggg

SEQ ID NO: 4159813 - DNA, 25 bp, Homo sapien
tcatgtgaactcttcaacagcactt

SEQ ID NO: 4159814 - DNA, 25 bp, Homo sapien
acagcactttgcaaagttccacaat

SEQ ID NO: 4159815 - DNA, 25 bp, Homo sapien
cttttctctgtgatagtctgttttg

SEQ ID NO: 4159816 - DNA, 25 bp, Homo sapien
ttcacatatggaggtgcacatgcag

SEQ ID NO: 4159817 - DNA, 25 bp, Homo sapien
catatggaggtgcacatgcagttta

SEQ ID NO: 4159818 - DNA, 25 bp, Homo sapien
tcttgattcacatatggaggtgcac

SEQ ID NO: 4159819 - DNA, 25 bp, Homo sapien
tttcttgattcacatatggaggtgc

SEQ ID NO: 4159820 - DNA, 25 bp, Homo sapien
tactctttgccatactgcaagtggg

SEQ ID NO: 4159821 - DNA, 25 bp, Homo sapien
catgtgaggtacttgctgacccagg

SEQ ID NO: 4159822 - DNA, 25 bp, Homo sapien
cagcggcttgatcccatagtaggca

SEQ ID NO: 4159823 - DNA, 25 bp, Homo sapien
tcagggaaatggtaagcagcactcc

SEQ ID NO: 4159824 - DNA, 25 bp, Homo sapien
ttcctttaattccaggtatcccatg

SEQ ID NO: 4159825 - DNA, 25 bp, Homo sapien
ggtatcccatgacctggcaaaccag

SEQ ID NO: 4159826 - DNA, 25 bp, Homo sapien
tgttcccctcgtaaactggctaatg

SEQ ID NO: 4159827 - DNA, 25 bp, Homo sapien
taattccaggtatcccatgacctgg

SEQ ID NO: 4159828 - DNA, 25 bp, Homo sapien
tgggatccccataggcccaatttcc

SEQ ID NO: 4159829 - DNA, 25 bp, Homo sapien
aaggccttgaggtcctggtagtcct

SEQ ID NO: 4159830 - DNA, 25 bp, Homo sapien
tgggtcctcgatcaccctttggtcc

SEQ ID NO: 4159831 - DNA, 25 bp, Homo sapien
tggcatcccgaagcccttgtctcct

SEQ ID NO: 4159832 - DNA, 25 bp, Homo sapien
tggctttccaattccgggtatccca

SEQ ID NO: 4159833 - DNA, 25 bp, Homo sapien
tctcccttaggtccgagaagccctg

SEQ ID NO: 4159834 - DNA, 25 bp, Homo sapien
aaaccaatagcacctggagggccca

SEQ ID NO: 4159835 - DNA, 25 bp, Homo sapien
ccttgggccctatgggacctggcaa

SEQ ID NO: 4159836 - DNA, 25 bp, Homo sapien
tggtggtgtagggggcatcacagct

SEQ ID NO: 4159837 - DNA, 25 bp, Homo sapien
gggtggtggtgtagggggcatcaca

SEQ ID NO: 4159838 - DNA, 25 bp, Homo sapien
ggtggtggtgtagggggcatcacag

SEQ ID NO: 4159839 - DNA, 25 bp, Homo sapien
tggtgtagggggcatcacagctggg

SEQ ID NO: 4159840 - DNA, 25 bp, Homo sapien
cacgggctcgttgttcttgaataga

SEQ ID NO: 4159841 - DNA, 25 bp, Homo sapien
taaatgcaggcatctcataggctgg

SEQ ID NO: 4159842 - DNA, 25 bp, Homo sapien
gggcatctggaggaacacccggtct

SEQ ID NO: 4159843 - DNA, 25 bp, Homo sapien
tctgcgggttgtagttctgtctgcc

SEQ ID NO: 4159844 - DNA, 25 bp, Homo sapien
atgggatacaataaatatcctgaaa

SEQ ID NO: 4159845 - DNA, 25 bp, Homo sapien
tatgtgcccaagcaaaaacctggaa

SEQ ID NO: 4159846 - DNA, 25 bp, Homo sapien
gactaaagcattaccagggtcccca

SEQ ID NO: 4159847 - DNA, 25 bp, Homo sapien
tcacaaaggccgattggttcaccca

SEQ ID NO: 4159848 - DNA, 25 bp, Homo sapien
taatagcaggctcgaaatgggtctt

SEQ ID NO: 4159849 - DNA, 25 bp, Homo sapien
gaaggagcccaatggatccatgctg

SEQ ID NO: 4159850 - DNA, 25 bp, Homo sapien
tgcagcactcaaaagggaaatacag

SEQ ID NO: 4159851 - DNA, 25 bp, Homo sapien
taattagtagtgacaagaacccctg

SEQ ID NO: 4159852 - DNA, 25 bp, Homo sapien
tcccctgtgggatgtcatactgcat

SEQ ID NO: 4159853 - DNA, 25 bp, Homo sapien
aataatagtccattgcattataggc

SEQ ID NO: 4159854 - DNA, 25 bp, Homo sapien
tactgcatataagtacagtcataca

SEQ ID NO: 4159855 - DNA, 25 bp, Homo sapien
ctgcatataagtacagtcatacaat

SEQ ID NO: 4159856 - DNA, 25 bp, Homo sapien
tagtccattgcattataggccacat

SEQ ID NO: 4159857 - DNA, 25 bp, Homo sapien
tcattatgactttgaagcaatactg

SEQ ID NO: 4159858 - DNA, 25 bp, Homo sapien
tttgacccgtgtctgagctgctctg

SEQ ID NO: 4159859 - DNA, 25 bp, Homo sapien
tttccatcatgctgatagcttcctt

SEQ ID NO: 4159860 - DNA, 25 bp, Homo sapien
tcatgctgatagcttccttctctga

SEQ ID NO: 4159861 - DNA, 25 bp, Homo sapien
gcggagctcccgctagacactgtcg

SEQ ID NO: 4159862 - DNA, 25 bp, Homo sapien
tcacgttgtctcaaagccaggcggc

SEQ ID NO: 4159863 - DNA, 25 bp, Homo sapien
gcagtttggaaacgcaacataaatc

SEQ ID NO: 4159864 - DNA, 25 bp, Homo sapien
gtcgcagtttccacacaggcgccga

SEQ ID NO: 4159865 - DNA, 25 bp, Homo sapien
ggcagaacatcacgggtaggcgacc

SEQ ID NO: 4159866 - DNA, 25 bp, Homo sapien
agctcaggtctcgacgtgggcagaa

SEQ ID NO: 4159867 - DNA, 25 bp, Homo sapien
aggtctcgacgtgggcagaacatca

SEQ ID NO: 4159868 - DNA, 25 bp, Homo sapien
ttcagctcaggtctcgacgtgggca

SEQ ID NO: 4159869 - DNA, 25 bp, Homo sapien
tggttctcccaccactcgtctccga

SEQ ID NO: 4159870 - DNA, 25 bp, Homo sapien
gctgcctgctccagtcggctggttc

SEQ ID NO: 4159871 - DNA, 25 bp, Homo sapien
actcgtctccgagatcgtctgccat

SEQ ID NO: 4159872 - DNA, 25 bp, Homo sapien
tgcctgctccagtcggctggttctc

SEQ ID NO: 4159873 - DNA, 25 bp, Homo sapien
cagctgtctgtttcacgtgttaaag

SEQ ID NO: 4159874 - DNA, 25 bp, Homo sapien
cgatcgccagaagcgaccagggctg

SEQ ID NO: 4159875 - DNA, 25 bp, Homo sapien
cattttccccgagatgcttgcgcgc

SEQ ID NO: 4159876 - DNA, 25 bp, Homo sapien
tgtggaaaggatccttcctggctgg

SEQ ID NO: 4159877 - DNA, 25 bp, Homo sapien
ggctctcttccttaagtcacgaaat

SEQ ID NO: 4159878 - DNA, 25 bp, Homo sapien
cattttcaactgcagaatcccttgg

SEQ ID NO: 4159879 - DNA, 25 bp, Homo sapien
gcttcacactgagaaagtacccaga

SEQ ID NO: 4159880 - DNA, 25 bp, Homo sapien
aaatctcaggcattgtgtttgctca

SEQ ID NO: 4159881 - DNA, 25 bp, Homo sapien
gcactaatgccactgtacaaacacc

SEQ ID NO: 4159882 - DNA, 25 bp, Homo sapien
ttgcactaatgccactgtacaaaca

SEQ ID NO: 4159883 - DNA, 25 bp, Homo sapien
aggcctgggcagcattgaaagggat

SEQ ID NO: 4159884 - DNA, 25 bp, Homo sapien
tcattgcactaatgccactgtacaa

SEQ ID NO: 4159885 - DNA, 25 bp, Homo sapien
tgatcatgctgtttgtagggctgaa

SEQ ID NO: 4159886 - DNA, 25 bp, Homo sapien
ctttgatcatgctgtttgtagggct

SEQ ID NO: 4159887 - DNA, 25 bp, Homo sapien
tgtagggctgaaatactcttcttcc

SEQ ID NO: 4159888 - DNA, 25 bp, Homo sapien
gtagggctgaaatactcttcttcct

SEQ ID NO: 4159889 - DNA, 25 bp, Homo sapien
tatacacttcaaacttagcatgcgc

SEQ ID NO: 4159890 - DNA, 25 bp, Homo sapien
cactgctcaggttcaacatctggga

SEQ ID NO: 4159891 - DNA, 25 bp, Homo sapien
gggcacatggtagggtcccacaaaa

SEQ ID NO: 4159892 - DNA, 25 bp, Homo sapien
gttccacatggaaggcccaactata

SEQ ID NO: 4159893 - DNA, 25 bp, Homo sapien
ttctcagactgccaataaggaagga

SEQ ID NO: 4159894 - DNA, 25 bp, Homo sapien
gaggctatcctgtccttactgcatg

SEQ ID NO: 4159895 - DNA, 25 bp, Homo sapien
gaagactagggagaacaatggacga

SEQ ID NO: 4159896 - DNA, 25 bp, Homo sapien
gaaatacgctttagggaggctatcc

SEQ ID NO: 4159897 - DNA, 25 bp, Homo sapien
taacttaataagactggcactccca

SEQ ID NO: 4159898 - DNA, 25 bp, Homo sapien
aaaggcaatcaagggatcaaggtcc

SEQ ID NO: 4159899 - DNA, 25 bp, Homo sapien
taaagacaagcaccaccaacttagg

SEQ ID NO: 4159900 - DNA, 25 bp, Homo sapien
gattcacggaaggaacatcacaacc

SEQ ID NO: 4159901 - DNA, 25 bp, Homo sapien
gacgaactgcaacaccaacgctatg

SEQ ID NO: 4159902 - DNA, 25 bp, Homo sapien
tgtttttaagtcaccttgggccaga

SEQ ID NO: 4159903 - DNA, 25 bp, Homo sapien
tagacatccaggcaaactgtgaaga

SEQ ID NO: 4159904 - DNA, 25 bp, Homo sapien
ggataatccatacttctgagcagag

SEQ ID NO: 4159905 - DNA, 25 bp, Homo sapien
gctttgggaaggtcaactattagca

SEQ ID NO: 4159906 - DNA, 25 bp, Homo sapien
gctggcatttcattggatattggac

SEQ ID NO: 4159907 - DNA, 25 bp, Homo sapien
gcctaagtagaccaagtctatgagt

SEQ ID NO: 4159908 - DNA, 25 bp, Homo sapien
gtctatgagtatctaaacccagcag

SEQ ID NO: 4159909 - DNA, 25 bp, Homo sapien
cagtttgaggcctattaccgggtca

SEQ ID NO: 4159910 - DNA, 25 bp, Homo sapien
cagggccgaagaccagtaccagttt

SEQ ID NO: 4159911 - DNA, 25 bp, Homo sapien
tttgagtccccacgtacaggagtcc

SEQ ID NO: 4159912 - DNA, 25 bp, Homo sapien
tttgactatggaaaccaagcccagg

SEQ ID NO: 4159913 - DNA, 25 bp, Homo sapien
tagtctagtaatgggacaaattagc

SEQ ID NO: 4159914 - DNA, 25 bp, Homo sapien
gaggtcaagtgagccctaagccact

SEQ ID NO: 4159915 - DNA, 25 bp, Homo sapien
aagtcagtcagccacctttcagagg

SEQ ID NO: 4159916 - DNA, 25 bp, Homo sapien
caaaaaagggcacgacaataaaatg

SEQ ID NO: 4159917 - DNA, 25 bp, Homo sapien
tcaaagccacaagaaccagggagtc

SEQ ID NO: 4159918 - DNA, 25 bp, Homo sapien
gagatgcctggaactactgaggtca

SEQ ID NO: 4159919 - DNA, 25 bp, Homo sapien
tgtctagaacctgccacaaggctgg

SEQ ID NO: 4159920 - DNA, 25 bp, Homo sapien
cagggagtcagaggcaacatgctat

SEQ ID NO: 4159921 - DNA, 25 bp, Homo sapien
gaaagctgaagctgtggagtaaccc

SEQ ID NO: 4159922 - DNA, 25 bp, Homo sapien
cattatgtatggagcaccaggtcag

SEQ ID NO: 4159923 - DNA, 25 bp, Homo sapien
tacagctgagatgagatgacccggc

SEQ ID NO: 4159924 - DNA, 25 bp, Homo sapien
ccaggtcagatacgccatgtgagac

SEQ ID NO: 4159925 - DNA, 25 bp, Homo sapien
atctgaatctgtgggtgtggtgaac

SEQ ID NO: 4159926 - DNA, 25 bp, Homo sapien
gaggtgtaatctatttcctcaatct

SEQ ID NO: 4159927 - DNA, 25 bp, Homo sapien
tgaatctgggctgacattgtgacat

SEQ ID NO: 4159928 - DNA, 25 bp, Homo sapien
tcctttgcaatgtggccttgtatct

SEQ ID NO: 4159929 - DNA, 25 bp, Homo sapien
tcagggctgccttaagctaaaaggg

SEQ ID NO: 4159930 - DNA, 25 bp, Homo sapien
gaatgttgatgctactatccccagc

SEQ ID NO: 4159931 - DNA, 25 bp, Homo sapien
gaaattctcattgattagcagcagg

SEQ ID NO: 4159932 - DNA, 25 bp, Homo sapien
tcagtcttctgttgcagctcagggc

SEQ ID NO: 4159933 - DNA, 25 bp, Homo sapien
cagttagcacagactcactccgtgt

SEQ ID NO: 4159934 - DNA, 25 bp, Homo sapien
gccatgagtgtcgtacagttagcac

SEQ ID NO: 4159935 - DNA, 25 bp, Homo sapien
gacagtctgccctctaaactcagca

SEQ ID NO: 4159936 - DNA, 25 bp, Homo sapien
atttaaagccttggatcactcccag

SEQ ID NO: 4159937 - DNA, 25 bp, Homo sapien
gccttagcattgtgcctgcagacag

SEQ ID NO: 4159938 - DNA, 25 bp, Homo sapien
gaatcagagtactaccttacagggt

SEQ ID NO: 4159939 - DNA, 25 bp, Homo sapien
caaactggcaggatcatagttccct

SEQ ID NO: 4159940 - DNA, 25 bp, Homo sapien
tacagggttgttttcagtgcctaac

SEQ ID NO: 4159941 - DNA, 25 bp, Homo sapien
tcaagtgatcgggtgtgagacacca

SEQ ID NO: 4159942 - DNA, 25 bp, Homo sapien
tgtcctataccatgcaatgttttag

SEQ ID NO: 4159943 - DNA, 25 bp, Homo sapien
ggtaaccatgtttctaatgcactac

SEQ ID NO: 4159944 - DNA, 25 bp, Homo sapien
gaaatatgctctacaggtctgattc

SEQ ID NO: 4159945 - DNA, 25 bp, Homo sapien
aagaggcgatgcttatgatccaaag

SEQ ID NO: 4159946 - DNA, 25 bp, Homo sapien
gctagagccctggacagaaataggt

SEQ ID NO: 4159947 - DNA, 25 bp, Homo sapien
gatccaaagcttacatggaggtggc

SEQ ID NO: 4159948 - DNA, 25 bp, Homo sapien
gaccactgggcgtgttataaagttg

SEQ ID NO: 4159949 - DNA, 25 bp, Homo sapien
cttgagatgtcaatctaatgattag

SEQ ID NO: 4159950 - DNA, 25 bp, Homo sapien
gtcaatctaatgattaggaagcagg

SEQ ID NO: 4159951 - DNA, 25 bp, Homo sapien
tgagatgtcaatctaatgattagga

SEQ ID NO: 4159952 - DNA, 25 bp, Homo sapien
taatgattaggaagcaggtaaaaag

SEQ ID NO: 4159953 - DNA, 25 bp, Homo sapien
actgtgcccggctggtacttccatt

SEQ ID NO: 4159954 - DNA, 25 bp, Homo sapien
tgtgcccggctggtacttccatttc

SEQ ID NO: 4159955 - DNA, 25 bp, Homo sapien
tgcccggctggtacttccatttctt

SEQ ID NO: 4159956 - DNA, 25 bp, Homo sapien
cactgtgcccggctggtacttccat

SEQ ID NO: 4159957 - DNA, 25 bp, Homo sapien
tcttcatgaagccgtcctcttttgg

SEQ ID NO: 4159958 - DNA, 25 bp, Homo sapien
catgaagccgtcctcttttggtttc

SEQ ID NO: 4159959 - DNA, 25 bp, Homo sapien
ttcatgaagccgtcctcttttggtt

SEQ ID NO: 4159960 - DNA, 25 bp, Homo sapien
tatggtgctctctcttcatgaagcc

SEQ ID NO: 4159961 - DNA, 25 bp, Homo sapien
tgatagccttcatgactatatagaa

SEQ ID NO: 4159962 - DNA, 25 bp, Homo sapien
taaaactacaacttctgggatttga

SEQ ID NO: 4159963 - DNA, 25 bp, Homo sapien
tgaaaagcactgaaagataggaacc

SEQ ID NO: 4159964 - DNA, 25 bp, Homo sapien
gtacctaactattccactcatgaag

SEQ ID NO: 4159965 - DNA, 25 bp, Homo sapien
tgaaatgtggctccaatcagatgac

SEQ ID NO: 4159966 - DNA, 25 bp, Homo sapien
ttccatcaaatgaaatgtggctcca

SEQ ID NO: 4159967 - DNA, 25 bp, Homo sapien
ggaaaattccatcaaatgaaatgtg

SEQ ID NO: 4159968 - DNA, 25 bp, Homo sapien
caaatgaaatgtggctccaatcaga

SEQ ID NO: 4159969 - DNA, 25 bp, Homo sapien
tctcaggatacatgttgctgacagc

SEQ ID NO: 4159970 - DNA, 25 bp, Homo sapien
catgtcagataatccaaggactctc

SEQ ID NO: 4159971 - DNA, 25 bp, Homo sapien
tagaggagtgattagcatggtcatc

SEQ ID NO: 4159972 - DNA, 25 bp, Homo sapien
tgcttactctcatttggtaggtgcc

SEQ ID NO: 4159973 - DNA, 25 bp, Homo sapien
ttgacaacacaaatgagcctcatct

SEQ ID NO: 4159974 - DNA, 25 bp, Homo sapien
catggtttgcaaatacactcttcca

SEQ ID NO: 4159975 - DNA, 25 bp, Homo sapien
aagttttgtggccacaacactgcag

SEQ ID NO: 4159976 - DNA, 25 bp, Homo sapien
tacccagactcatgtcaagaagcat

SEQ ID NO: 4159977 - DNA, 25 bp, Homo sapien
aaggtagcacatactccactttcag

SEQ ID NO: 4159978 - DNA, 25 bp, Homo sapien
tgggccagaaggtagcacatactcc

SEQ ID NO: 4159979 - DNA, 25 bp, Homo sapien
tctgggccagaaggtagcacatact

SEQ ID NO: 4159980 - DNA, 25 bp, Homo sapien
gccagaaggtagcacatactccact

SEQ ID NO: 4159981 - DNA, 25 bp, Homo sapien
caggctctgtttgcataaaaccagt

SEQ ID NO: 4159982 - DNA, 25 bp, Homo sapien
taaaaccagtcagttgtcatagcat

SEQ ID NO: 4159983 - DNA, 25 bp, Homo sapien
tcagacacactgtctcttgagagcc

SEQ ID NO: 4159984 - DNA, 25 bp, Homo sapien
gctttaagctgttcatccaacgaga

SEQ ID NO: 4159985 - DNA, 25 bp, Homo sapien
gcaacatcaaatcctttctgaaagt

SEQ ID NO: 4159986 - DNA, 25 bp, Homo sapien
aacatcaaatcctttctgaaagtgg

SEQ ID NO: 4159987 - DNA, 25 bp, Homo sapien
catcaaatcctttctgaaagtgggt

SEQ ID NO: 4159988 - DNA, 25 bp, Homo sapien
caaatcctttctgaaagtgggtggg

SEQ ID NO: 4159989 - DNA, 25 bp, Homo sapien
cattggacctaacaacagcattcaa

SEQ ID NO: 4159990 - DNA, 25 bp, Homo sapien
aaacaaccaccagctgttgcctgga

SEQ ID NO: 4159991 - DNA, 25 bp, Homo sapien
gctaaggcctattctccaacgtgaa

SEQ ID NO: 4159992 - DNA, 25 bp, Homo sapien
tgcttatcttgaatccagtactgga

SEQ ID NO: 4159993 - DNA, 25 bp, Homo sapien
ccagggtagcttgggacaataggca

SEQ ID NO: 4159994 - DNA, 25 bp, Homo sapien
taactgctcaagtaacggactgacg

SEQ ID NO: 4159995 - DNA, 25 bp, Homo sapien
tacaattaagaagactgtgcctagg

SEQ ID NO: 4159996 - DNA, 25 bp, Homo sapien
cggactgacgagcttgtaaaacatc

SEQ ID NO: 4159997 - DNA, 25 bp, Homo sapien
caaaagctgtattcaactgcccata

SEQ ID NO: 4159998 - DNA, 25 bp, Homo sapien
ttaggtggcagcaaatagtagcagc

SEQ ID NO: 4159999 - DNA, 25 bp, Homo sapien
caatggtaacagtagagtggaaacc

SEQ ID NO: 4160000 - DNA, 25 bp, Homo sapien
gggaattcggctagctgtctcctct

SEQ ID NO: 4160001 - DNA, 25 bp, Homo sapien
gaagataacacaaagctctaggagc

SEQ ID NO: 4160002 - DNA, 25 bp, Homo sapien
gagggtttgatggaagccttccaga

SEQ ID NO: 4160003 - DNA, 25 bp, Homo sapien
cattggctgccactcgatagaggtg

SEQ ID NO: 4160004 - DNA, 25 bp, Homo sapien
tgaatagttcaaggatgcagcctgc

SEQ ID NO: 4160005 - DNA, 25 bp, Homo sapien
taaatactagacatttgctatcaga

SEQ ID NO: 4160006 - DNA, 25 bp, Homo sapien
gaaagtctaggtttaaagcatgccc

SEQ ID NO: 4160007 - DNA, 25 bp, Homo sapien
tgctatcagattaaaagtgtctgct

SEQ ID NO: 4160008 - DNA, 25 bp, Homo sapien
tcaagcaggtgtactttgaactctg

SEQ ID NO: 4160009 - DNA, 25 bp, Homo sapien
catacgatatagacaatatgttctg

SEQ ID NO: 4160010 - DNA, 25 bp, Homo sapien
tcctgctgtatcagtacataaggag

SEQ ID NO: 4160011 - DNA, 25 bp, Homo sapien
tatgtaggacatggactgagatcgt

SEQ ID NO: 4160012 - DNA, 25 bp, Homo sapien
cttaacaatacatctgggagatcct

SEQ ID NO: 4160013 - DNA, 25 bp, Homo sapien
tctcaaaattaacttggaacacagg

SEQ ID NO: 4160014 - DNA, 25 bp, Homo sapien
gaacaaagacgcagtaaatcatgtg

SEQ ID NO: 4160015 - DNA, 25 bp, Homo sapien
caaaacactgatataacagggctac

SEQ ID NO: 4160016 - DNA, 25 bp, Homo sapien
gtttggctaagttccctggcattcc

SEQ ID NO: 4160017 - DNA, 25 bp, Homo sapien
ctggaaatgtaaaggctttgccttc

SEQ ID NO: 4160018 - DNA, 25 bp, Homo sapien
gagggtcagactccaccaagtggga

SEQ ID NO: 4160019 - DNA, 25 bp, Homo sapien
atcattaggaatgccaagaagccca

SEQ ID NO: 4160020 - DNA, 25 bp, Homo sapien
tgctgacatgtgcaatgtgttacag

SEQ ID NO: 4160021 - DNA, 25 bp, Homo sapien
tccaccaagtgggatcattatcatc

SEQ ID NO: 4160022 - DNA, 25 bp, Homo sapien
tctgtatatacaacaagctctagag

SEQ ID NO: 4160023 - DNA, 25 bp, Homo sapien
taaaactatgatctaccagttaggc

SEQ ID NO: 4160024 - DNA, 25 bp, Homo sapien
ggctaatcagacctggccttatcag

SEQ ID NO: 4160025 - DNA, 25 bp, Homo sapien
ttgcccaggccaggtcattccctgt

SEQ ID NO: 4160026 - DNA, 25 bp, Homo sapien
tttgtggccacttaatcattcgcag

SEQ ID NO: 4160027 - DNA, 25 bp, Homo sapien
tcagtagctttatgaccctcgctgg

SEQ ID NO: 4160028 - DNA, 25 bp, Homo sapien
tgaatgccctgtcagttaaaagagg

SEQ ID NO: 4160029 - DNA, 25 bp, Homo sapien
gaatcactgtttgcggaggcataaa

SEQ ID NO: 4160030 - DNA, 25 bp, Homo sapien
aggggagaaatgaggggcctctggg

SEQ ID NO: 4160031 - DNA, 25 bp, Homo sapien
aaggggagaaatgaggggcctctgg

SEQ ID NO: 4160032 - DNA, 25 bp, Homo sapien
aaaggggagaaatgaggggcctctg

SEQ ID NO: 4160033 - DNA, 25 bp, Homo sapien
ggggagaaatgaggggcctctggga

SEQ ID NO: 4160034 - DNA, 25 bp, Homo sapien
aaatgcttcaagcagctgccatact

SEQ ID NO: 4160035 - DNA, 25 bp, Homo sapien
gcaaatgcttcaagcagctgccata

SEQ ID NO: 4160036 - DNA, 25 bp, Homo sapien
caaatgcttcaagcagctgccatac

SEQ ID NO: 4160037 - DNA, 25 bp, Homo sapien
ctcttcctcctctttccccaactca

SEQ ID NO: 4160038 - DNA, 25 bp, Homo sapien
tcttcctcctctttccccaactcac

SEQ ID NO: 4160039 - DNA, 25 bp, Homo sapien
tattgaggtgggtgtccaaatgagt

SEQ ID NO: 4160040 - DNA, 25 bp, Homo sapien
tctggattattctaattgcacagca

SEQ ID NO: 4160041 - DNA, 25 bp, Homo sapien
cagcatatattgaggtgggtgtcca

SEQ ID NO: 4160042 - DNA, 25 bp, Homo sapien
catatattgaggtgggtgtccaaat

SEQ ID NO: 4160043 - DNA, 25 bp, Homo sapien
tcagtgttaatacttgctcctgagc

SEQ ID NO: 4160044 - DNA, 25 bp, Homo sapien
gattctcagtgttaatacttgctcc

SEQ ID NO: 4160045 - DNA, 25 bp, Homo sapien
gtgttaatacttgctcctgagctat

SEQ ID NO: 4160046 - DNA, 25 bp, Homo sapien
ccatggattctcagtgttaatactt

SEQ ID NO: 4160047 - DNA, 25 bp, Homo sapien
atttctttaagcctaagatataggg

SEQ ID NO: 4160048 - DNA, 25 bp, Homo sapien
tgtagggcgaatgctgaggaaccag

SEQ ID NO: 4160049 - DNA, 25 bp, Homo sapien
aacgacatctcagccaggacaaaga

SEQ ID NO: 4160050 - DNA, 25 bp, Homo sapien
cttgggccagacaggtgtagggcga

SEQ ID NO: 4160051 - DNA, 25 bp, Homo sapien
tatttgggaacaagtgagccagagg

SEQ ID NO: 4160052 - DNA, 25 bp, Homo sapien
aaacaaaacagggtgccaactgata

SEQ ID NO: 4160053 - DNA, 25 bp, Homo sapien
gaagcagtaccagggcttatttggg

SEQ ID NO: 4160054 - DNA, 25 bp, Homo sapien
ccctttaatggttggttgagatcat

SEQ ID NO: 4160055 - DNA, 25 bp, Homo sapien
tgaagacacctggttgatgggtcac

SEQ ID NO: 4160056 - DNA, 25 bp, Homo sapien
cagatgagagagttccctatatttc

SEQ ID NO: 4160057 - DNA, 25 bp, Homo sapien
cagtttcagtctgccgatcaagaca

SEQ ID NO: 4160058 - DNA, 25 bp, Homo sapien
ttgccacggagacaactggtcctct

SEQ ID NO: 4160059 - DNA, 25 bp, Homo sapien
gtagaagacgacttgcttttacttg

SEQ ID NO: 4160060 - DNA, 25 bp, Homo sapien
taacagtagaagacgacttgctttt

SEQ ID NO: 4160061 - DNA, 25 bp, Homo sapien
cttttcccgcagttaacagtagaag

SEQ ID NO: 4160062 - DNA, 25 bp, Homo sapien
cccgcagttaacagtagaagacgac

SEQ ID NO: 4160063 - DNA, 25 bp, Homo sapien
tactctccatcaacatgtgttcaat

SEQ ID NO: 4160064 - DNA, 25 bp, Homo sapien
tctccatcaacatgtgttcaattat

SEQ ID NO: 4160065 - DNA, 25 bp, Homo sapien
tacatcctacaaataagtcagaaca

SEQ ID NO: 4160066 - DNA, 25 bp, Homo sapien
tattttgatttctacatcctacaaa

SEQ ID NO: 4160067 - DNA, 25 bp, Homo sapien
aatgcaaagcatggcggaggacaca

SEQ ID NO: 4160068 - DNA, 25 bp, Homo sapien
gatgacagggcttagcaacattccc

SEQ ID NO: 4160069 - DNA, 25 bp, Homo sapien
tcctggcctacaatcacagggtgaa

SEQ ID NO: 4160070 - DNA, 25 bp, Homo sapien
ggaggacacagaatgcagcttggca

SEQ ID NO: 4160071 - DNA, 25 bp, Homo sapien
tctccttagagttgctgctcctgac

SEQ ID NO: 4160072 - DNA, 25 bp, Homo sapien
taattccttggaggcttttagctac

SEQ ID NO: 4160073 - DNA, 25 bp, Homo sapien
gatagcaaacgggataaagctgctt

SEQ ID NO: 4160074 - DNA, 25 bp, Homo sapien
tcatgatggatccagggacaatcac

SEQ ID NO: 4160075 - DNA, 25 bp, Homo sapien
tttgtgactgtttaggacaggaaca

SEQ ID NO: 4160076 - DNA, 25 bp, Homo sapien
taaaacattgtcacatcagatcaga

SEQ ID NO: 4160077 - DNA, 25 bp, Homo sapien
gaattttacactgctggttagtacc

SEQ ID NO: 4160078 - DNA, 25 bp, Homo sapien
ggcgaactgggctgtaaagctctga

SEQ ID NO: 4160079 - DNA, 25 bp, Homo sapien
cctgctttctcacacgggcccaggt

SEQ ID NO: 4160080 - DNA, 25 bp, Homo sapien
ctcacacgggcccaggtggcctttt

SEQ ID NO: 4160081 - DNA, 25 bp, Homo sapien
ctcgctgaggagtgctgtcccctgc

SEQ ID NO: 4160082 - DNA, 25 bp, Homo sapien
tcgctgaggagtgctgtcccctgct

SEQ ID NO: 4160083 - DNA, 25 bp, Homo sapien
ccacagactcctttgtcaagaggtt

SEQ ID NO: 4160084 - DNA, 25 bp, Homo sapien
tccacagactcctttgtcaagaggt

SEQ ID NO: 4160085 - DNA, 25 bp, Homo sapien
taacagcggctgaacagtgatcacc

SEQ ID NO: 4160086 - DNA, 25 bp, Homo sapien
tcaacaagatcactagtaacagcgg

SEQ ID NO: 4160087 - DNA, 25 bp, Homo sapien
tgatcaccaaggtctgtctccacgc

SEQ ID NO: 4160088 - DNA, 25 bp, Homo sapien
gaaagcacaactacttcaacaagat

SEQ ID NO: 4160089 - DNA, 25 bp, Homo sapien
taagtagcaattaccagagagcact

SEQ ID NO: 4160090 - DNA, 25 bp, Homo sapien
caagagagaacggataaacgatggc

SEQ ID NO: 4160091 - DNA, 25 bp, Homo sapien
tggtggcacccacacaaatctgtac

SEQ ID NO: 4160092 - DNA, 25 bp, Homo sapien
gctaagccccgaggaggaaagatga

SEQ ID NO: 4160093 - DNA, 25 bp, Homo sapien
tttggtgaccaaccatacactttct

SEQ ID NO: 4160094 - DNA, 25 bp, Homo sapien
caggatgtcctccactatcctattc

SEQ ID NO: 4160095 - DNA, 25 bp, Homo sapien
cactatcctattctttggtgaccaa

SEQ ID NO: 4160096 - DNA, 25 bp, Homo sapien
tattctttggtgaccaaccatacac

SEQ ID NO: 4160097 - DNA, 25 bp, Homo sapien
gaacacaattcccatatccaaagaa

SEQ ID NO: 4160098 - DNA, 25 bp, Homo sapien
tgaactctgtgaaggccgtaaggcc

SEQ ID NO: 4160099 - DNA, 25 bp, Homo sapien
catatccaaagaacaggaccctgag

SEQ ID NO: 4160100 - DNA, 25 bp, Homo sapien
aagaacaggaccctgagactgaact

SEQ ID NO: 4160101 - DNA, 25 bp, Homo sapien
ctgacctcaggttatccactcatct

SEQ ID NO: 4160102 - DNA, 25 bp, Homo sapien
aggttatccactcatctcagcctcc

SEQ ID NO: 4160103 - DNA, 25 bp, Homo sapien
ctcaggttatccactcatctcagcc

SEQ ID NO: 4160104 - DNA, 25 bp, Homo sapien
gacctcaggttatccactcatctca

SEQ ID NO: 4160105 - DNA, 25 bp, Homo sapien
ttcaggtatttgcttgcacaaactc

SEQ ID NO: 4160106 - DNA, 25 bp, Homo sapien
tttgataagtatctgaagttcagtt

SEQ ID NO: 4160107 - DNA, 25 bp, Homo sapien
tgtgtactggtgttgcataaatgtt

SEQ ID NO: 4160108 - DNA, 25 bp, Homo sapien
tgtactggtgttgcataaatgttag

SEQ ID NO: 4160109 - DNA, 25 bp, Homo sapien
caatgtgtactggtgttgcataaat

SEQ ID NO: 4160110 - DNA, 25 bp, Homo sapien
ctggtgttgcataaatgttaggttt

SEQ ID NO: 4160111 - DNA, 25 bp, Homo sapien
tctctgaaggtacaggaactggaac

SEQ ID NO: 4160112 - DNA, 25 bp, Homo sapien
caggaactggaactgtctcctgctg

SEQ ID NO: 4160113 - DNA, 25 bp, Homo sapien
ttataaaccagctgcatcaaatgcc

SEQ ID NO: 4160114 - DNA, 25 bp, Homo sapien
ttttataaaccagctgcatcaaatg

SEQ ID NO: 4160115 - DNA, 25 bp, Homo sapien
gtttttataaaccagctgcatcaaa

SEQ ID NO: 4160116 - DNA, 25 bp, Homo sapien
tataaaccagctgcatcaaatgcct

SEQ ID NO: 4160117 - DNA, 25 bp, Homo sapien
ctttggttgtatcaaaaaacattct

SEQ ID NO: 4160118 - DNA, 25 bp, Homo sapien
cgtctgctgctataatagtccttca

SEQ ID NO: 4160119 - DNA, 25 bp, Homo sapien
tctaattcaatcaccaagcgtctgc

SEQ ID NO: 4160120 - DNA, 25 bp, Homo sapien
ttttgcaagaacatcagtaattttc

SEQ ID NO: 4160121 - DNA, 25 bp, Homo sapien
ggttctgattttgcaagaacatcag

SEQ ID NO: 4160122 - DNA, 25 bp, Homo sapien
tcattggccttgaggaaacaggagt

SEQ ID NO: 4160123 - DNA, 25 bp, Homo sapien
taggtatgaggaaagactgtgagtc

SEQ ID NO: 4160124 - DNA, 25 bp, Homo sapien
gaggaaagactgtgagtcaaatcat

SEQ ID NO: 4160125 - DNA, 25 bp, Homo sapien
gagtcaaatcattggccttgaggaa

SEQ ID NO: 4160126 - DNA, 25 bp, Homo sapien
tcttctcactgtggttcttcctaag

SEQ ID NO: 4160127 - DNA, 25 bp, Homo sapien
taatgagctccagggctcggacggc

SEQ ID NO: 4160128 - DNA, 25 bp, Homo sapien
ctcggacggccgagctgcagatgat

SEQ ID NO: 4160129 - DNA, 25 bp, Homo sapien
tcagcatcaggaccgatttcttctc

SEQ ID NO: 4160130 - DNA, 25 bp, Homo sapien
tacagctgcccggaagcagttggaa

SEQ ID NO: 4160131 - DNA, 25 bp, Homo sapien
gcttgttgtgcctactcagaaatca

SEQ ID NO: 4160132 - DNA, 25 bp, Homo sapien
gaattcccatgatttcaggaccggc

SEQ ID NO: 4160133 - DNA, 25 bp, Homo sapien
tattttaagagtccacctccaggcc

SEQ ID NO: 4160134 - DNA, 25 bp, Homo sapien
caactgcacagggatttatcgatgt

SEQ ID NO: 4160135 - DNA, 25 bp, Homo sapien
tcagcaccatttctagctcgcttca

SEQ ID NO: 4160136 - DNA, 25 bp, Homo sapien
tggctgttggaaagtgcaggccccc

SEQ ID NO: 4160137 - DNA, 25 bp, Homo sapien
ttgaggacagacctaacatgggttt

SEQ ID NO: 4160138 - DNA, 25 bp, Homo sapien
aactttgccgtctcctctgaatgct

SEQ ID NO: 4160139 - DNA, 25 bp, Homo sapien
tataactttgccgtctcctctgaat

SEQ ID NO: 4160140 - DNA, 25 bp, Homo sapien
attttataactttgccgtctcctct

SEQ ID NO: 4160141 - DNA, 25 bp, Homo sapien
cgtctcctctgaatgctgtcatcga

SEQ ID NO: 4160142 - DNA, 25 bp, Homo sapien
ggagttcctacacccaggtgcacca

SEQ ID NO: 4160143 - DNA, 25 bp, Homo sapien
cttctccagcaactttacctgcgcc

SEQ ID NO: 4160144 - DNA, 25 bp, Homo sapien
aggtgcaccacacgcttctccagca

SEQ ID NO: 4160145 - DNA, 25 bp, Homo sapien
tccagcaactttacctgcgcctgga

SEQ ID NO: 4160146 - DNA, 25 bp, Homo sapien
gagagcctagactgacagaccttgg

SEQ ID NO: 4160147 - DNA, 25 bp, Homo sapien
aaaaggctagcctgtaaggatgctg

SEQ ID NO: 4160148 - DNA, 25 bp, Homo sapien
tagcgctgcgtacaagtaggaactc

SEQ ID NO: 4160149 - DNA, 25 bp, Homo sapien
tatgtaagggtgtcaagcgtagcgc

SEQ ID NO: 4160150 - DNA, 25 bp, Homo sapien
cctttcaaaggagttgagtccatgg

SEQ ID NO: 4160151 - DNA, 25 bp, Homo sapien
caaaggagttgagtccatggagtct

SEQ ID NO: 4160152 - DNA, 25 bp, Homo sapien
ttgagtccatggagtctgcagggct

SEQ ID NO: 4160153 - DNA, 25 bp, Homo sapien
gtccatggagtctgcagggctctca

SEQ ID NO: 4160154 - DNA, 25 bp, Homo sapien
tgctgtagtaaagacctcatgacat

SEQ ID NO: 4160155 - DNA, 25 bp, Homo sapien
tagtaaagacctcatgacataagct

SEQ ID NO: 4160156 - DNA, 25 bp, Homo sapien
taaagacctcatgacataagcttat

SEQ ID NO: 4160157 - DNA, 25 bp, Homo sapien
gacctcatgacataagcttattaaa

SEQ ID NO: 4160158 - DNA, 25 bp, Homo sapien
ctcgggaatgtccatcattctcctc

SEQ ID NO: 4160159 - DNA, 25 bp, Homo sapien
tcctcaacttctgatctctccagtt

SEQ ID NO: 4160160 - DNA, 25 bp, Homo sapien
tcgggaatgtccatcattctcctca

SEQ ID NO: 4160161 - DNA, 25 bp, Homo sapien
tctccagttccagtcaaaaaccaga

SEQ ID NO: 4160162 - DNA, 25 bp, Homo sapien
actcccatttccagaagttcgaata

SEQ ID NO: 4160163 - DNA, 25 bp, Homo sapien
catttccagaagttcgaatacctcc

SEQ ID NO: 4160164 - DNA, 25 bp, Homo sapien
cagaagttcgaatacctcctttctt

SEQ ID NO: 4160165 - DNA, 25 bp, Homo sapien
tccagaagttcgaatacctcctttc

SEQ ID NO: 4160166 - DNA, 25 bp, Homo sapien
gagtgcttgcaatgtatcagagtca

SEQ ID NO: 4160167 - DNA, 25 bp, Homo sapien
aagatgcaacttctactgtgaaaac

SEQ ID NO: 4160168 - DNA, 25 bp, Homo sapien
ctggaatcttcattaggacacagac

SEQ ID NO: 4160169 - DNA, 25 bp, Homo sapien
gtatcagagtcattaaataagatgc

SEQ ID NO: 4160170 - DNA, 25 bp, Homo sapien
tatataagagagttgtcaaaaggac

SEQ ID NO: 4160171 - DNA, 25 bp, Homo sapien
ttattatataagagagttgtcaaaa

SEQ ID NO: 4160172 - DNA, 25 bp, Homo sapien
tataagagagttgtcaaaaggacag

SEQ ID NO: 4160173 - DNA, 25 bp, Homo sapien
agagagttgtcaaaaggacagtttc

SEQ ID NO: 4160174 - DNA, 25 bp, Homo sapien
tatggggctgaaaagcccaaaatct

SEQ ID NO: 4160175 - DNA, 25 bp, Homo sapien
aagctgatgtcccaattcaagtctg

SEQ ID NO: 4160176 - DNA, 25 bp, Homo sapien
tgcaaagctgatgtcccaattcaag

SEQ ID NO: 4160177 - DNA, 25 bp, Homo sapien
caaagctgatgtcccaattcaagtc

SEQ ID NO: 4160178 - DNA, 25 bp, Homo sapien
ttcggtcctgcaggtgactcggata

SEQ ID NO: 4160179 - DNA, 25 bp, Homo sapien
ggatgatgcccatacaaaggcagaa

SEQ ID NO: 4160180 - DNA, 25 bp, Homo sapien
tattcctgttgcgaaaaagacaaag

SEQ ID NO: 4160181 - DNA, 25 bp, Homo sapien
tagccggtggatgggtaactcctgc

SEQ ID NO: 4160182 - DNA, 25 bp, Homo sapien
gacaaagaggactctcctggccgtg

SEQ ID NO: 4160183 - DNA, 25 bp, Homo sapien
atagagcaggtgcattccttgtcaa

SEQ ID NO: 4160184 - DNA, 25 bp, Homo sapien
tagaggcattttctcgcagttttgc

SEQ ID NO: 4160185 - DNA, 25 bp, Homo sapien
tgcacaatttgcacatattcttgtg

SEQ ID NO: 4160186 - DNA, 25 bp, Homo sapien
ctgaaaggtaaaagggaatagagca

SEQ ID NO: 4160187 - DNA, 25 bp, Homo sapien
cagttgtctattacttctggatcga

SEQ ID NO: 4160188 - DNA, 25 bp, Homo sapien
tctttgcccaccagttgtctattac

SEQ ID NO: 4160189 - DNA, 25 bp, Homo sapien
ccatacaatttgtagtacatataaa

SEQ ID NO: 4160190 - DNA, 25 bp, Homo sapien
tagatacaggttctgatagaagcca

SEQ ID NO: 4160191 - DNA, 25 bp, Homo sapien
caacagcgtggatgcaagaggatac

SEQ ID NO: 4160192 - DNA, 25 bp, Homo sapien
cagcgtggatgcaagaggatacagc

SEQ ID NO: 4160193 - DNA, 25 bp, Homo sapien
tggatgcaagaggatacagcaatga

SEQ ID NO: 4160194 - DNA, 25 bp, Homo sapien
ctcaacagcgtggatgcaagaggat

SEQ ID NO: 4160195 - DNA, 25 bp, Homo sapien
cgatgggggtcttattgtcggacat

SEQ ID NO: 4160196 - DNA, 25 bp, Homo sapien
acgatgggggtcttattgtcggaca

SEQ ID NO: 4160197 - DNA, 25 bp, Homo sapien
tagcaccacaaggaacgatgggggt

SEQ ID NO: 4160198 - DNA, 25 bp, Homo sapien
cacaaggaacgatgggggtcttatt

SEQ ID NO: 4160199 - DNA, 25 bp, Homo sapien
caccacgtaagtctactctttaaca

SEQ ID NO: 4160200 - DNA, 25 bp, Homo sapien
tgatttgtacagatgaattaatgtt

SEQ ID NO: 4160201 - DNA, 25 bp, Homo sapien
catacttatctgtccaccacgtaag

SEQ ID NO: 4160202 - DNA, 25 bp, Homo sapien
ttagattctgaaatttgacatactt

SEQ ID NO: 4160203 - DNA, 25 bp, Homo sapien
tttataagtccatcaatatgatgtc

SEQ ID NO: 4160204 - DNA, 25 bp, Homo sapien
aactgaagcaataggtgtcttaaac

SEQ ID NO: 4160205 - DNA, 25 bp, Homo sapien
ttaagtaagtatattcaagtgcccc

SEQ ID NO: 4160206 - DNA, 25 bp, Homo sapien
tattttataagtccatcaatatgat

SEQ ID NO: 4160207 - DNA, 25 bp, Homo sapien
tagagaatgaaagaacttctgcatt

SEQ ID NO: 4160208 - DNA, 25 bp, Homo sapien
tcagttttctttagaatgtagagaa

SEQ ID NO: 4160209 - DNA, 25 bp, Homo sapien
tctttagaatgtagagaatgaaaga

SEQ ID NO: 4160210 - DNA, 25 bp, Homo sapien
cttcagttttctttagaatgtagag

SEQ ID NO: 4160211 - DNA, 25 bp, Homo sapien
aaaataagggatatgatagagaaaa

SEQ ID NO: 4160212 - DNA, 25 bp, Homo sapien
aataagggatatgatagagaaaaaa

SEQ ID NO: 4160213 - DNA, 25 bp, Homo sapien
gaaaataagggatatgatagagaaa

SEQ ID NO: 4160214 - DNA, 25 bp, Homo sapien
aagaaaataagggatatgatagaga

SEQ ID NO: 4160215 - DNA, 25 bp, Homo sapien
aagtcatcattgaggaagccattgt

SEQ ID NO: 4160216 - DNA, 25 bp, Homo sapien
tcgactgagtcgaccatacagtttt

SEQ ID NO: 4160217 - DNA, 25 bp, Homo sapien
tctataaaatggtgtgttcgactga

SEQ ID NO: 4160218 - DNA, 25 bp, Homo sapien
gaggaagccattgtttcttggatcc

SEQ ID NO: 4160219 - DNA, 25 bp, Homo sapien
ataggttatgttgaaactataatta

SEQ ID NO: 4160220 - DNA, 25 bp, Homo sapien
tataggttatgttgaaactataatt

SEQ ID NO: 4160221 - DNA, 25 bp, Homo sapien
taggttatgttgaaactataattac

SEQ ID NO: 4160222 - DNA, 25 bp, Homo sapien
ctaactcccacatgctggctttgtg

SEQ ID NO: 4160223 - DNA, 25 bp, Homo sapien
taactcccacatgctggctttgtgc

SEQ ID NO: 4160224 - DNA, 25 bp, Homo sapien
tttctgactgagaaatgctcccact

SEQ ID NO: 4160225 - DNA, 25 bp, Homo sapien
tctgactgagaaatgctcccacttc

SEQ ID NO: 4160226 - DNA, 25 bp, Homo sapien
ctgactgagaaatgctcccacttcc

SEQ ID NO: 4160227 - DNA, 25 bp, Homo sapien
ttctgactgagaaatgctcccactt

SEQ ID NO: 4160228 - DNA, 25 bp, Homo sapien
tctccgtggaacctggttactggga

SEQ ID NO: 4160229 - DNA, 25 bp, Homo sapien
taggcaagacctaagaaaaggctat

SEQ ID NO: 4160230 - DNA, 25 bp, Homo sapien
catgtcatagctcctgtcactgtgt

SEQ ID NO: 4160231 - DNA, 25 bp, Homo sapien
tgccatcatggcaaaggaggccaac

SEQ ID NO: 4160232 - DNA, 25 bp, Homo sapien
gcagctcgagtttccacaaaccaat

SEQ ID NO: 4160233 - DNA, 25 bp, Homo sapien
cacaaaccaattggaatctcctgga

SEQ ID NO: 4160234 - DNA, 25 bp, Homo sapien
tccacaaaccaattggaatctcctg

SEQ ID NO: 4160235 - DNA, 25 bp, Homo sapien
agttctgcagctcgagtttccacaa

SEQ ID NO: 4160236 - DNA, 25 bp, Homo sapien
ccaacagacttagcgttatgtccca

SEQ ID NO: 4160237 - DNA, 25 bp, Homo sapien
taacatgaaggcaaagtgggtctct

SEQ ID NO: 4160238 - DNA, 25 bp, Homo sapien
gcagtaatgtgggtaaagcacctct

SEQ ID NO: 4160239 - DNA, 25 bp, Homo sapien
gcacctcttattgggctggcacata

SEQ ID NO: 4160240 - DNA, 25 bp, Homo sapien
ctcctagcccgggggtcagccgcca

SEQ ID NO: 4160241 - DNA, 25 bp, Homo sapien
gcacaggccgcgctctagcagcggc

SEQ ID NO: 4160242 - DNA, 25 bp, Homo sapien
gcgctgggccctctcctagcccggg

SEQ ID NO: 4160243 - DNA, 25 bp, Homo sapien
acaggccgcgctctagcagcggcca

SEQ ID NO: 4160244 - DNA, 25 bp, Homo sapien
ctgaggaggcggtgaaggtggccat

SEQ ID NO: 4160245 - DNA, 25 bp, Homo sapien
ggggtgcataacgtagctcctcctc

SEQ ID NO: 4160246 - DNA, 25 bp, Homo sapien
caggggtgcataacgtagctcctcc

SEQ ID NO: 4160247 - DNA, 25 bp, Homo sapien
gctcgggcaccccttgtaggtcttc

SEQ ID NO: 4160248 - DNA, 25 bp, Homo sapien
agacaggggtgcataacgtagctcc

SEQ ID NO: 4160249 - DNA, 25 bp, Homo sapien
ctcccgatggagtttggcaaggtcc

SEQ ID NO: 4160250 - DNA, 25 bp, Homo sapien
atggagtttggcaaggtccttttgg

SEQ ID NO: 4160251 - DNA, 25 bp, Homo sapien
cccgatggagtttggcaaggtcctt

SEQ ID NO: 4160252 - DNA, 25 bp, Homo sapien
ccgatggagtttggcaaggtccttt

SEQ ID NO: 4160253 - DNA, 25 bp, Homo sapien
tcatgtctcctcggcctccaggtgt

SEQ ID NO: 4160254 - DNA, 25 bp, Homo sapien
catgtctcctcggcctccaggtgtg

SEQ ID NO: 4160255 - DNA, 25 bp, Homo sapien
atgtctcctcggcctccaggtgtgg

SEQ ID NO: 4160256 - DNA, 25 bp, Homo sapien
tgtaagctgattcatatgctcagtc

SEQ ID NO: 4160257 - DNA, 25 bp, Homo sapien
ctgtaagctgattcatatgctcagt

SEQ ID NO: 4160258 - DNA, 25 bp, Homo sapien
gtaagctgattcatatgctcagtct

SEQ ID NO: 4160259 - DNA, 25 bp, Homo sapien
cagtgccttgcggaagcgttgccct

SEQ ID NO: 4160260 - DNA, 25 bp, Homo sapien
tgccttgcggaagcgttgccctttg

SEQ ID NO: 4160261 - DNA, 25 bp, Homo sapien
tttcagtgccttgcggaagcgttgc

SEQ ID NO: 4160262 - DNA, 25 bp, Homo sapien
ggctttcagtgccttgcggaagcgt

SEQ ID NO: 4160263 - DNA, 25 bp, Homo sapien
ttcgactgttgcccaagttttcact

SEQ ID NO: 4160264 - DNA, 25 bp, Homo sapien
tcgactgttgcccaagttttcactt

SEQ ID NO: 4160265 - DNA, 25 bp, Homo sapien
tttcgactgttgcccaagttttcac

SEQ ID NO: 4160266 - DNA, 25 bp, Homo sapien
gcagcttgttggttgtcacttttct

SEQ ID NO: 4160267 - DNA, 25 bp, Homo sapien
ctccagtaagatgatgatggaaagc

SEQ ID NO: 4160268 - DNA, 25 bp, Homo sapien
gcttgttggttgtcacttttctgga

SEQ ID NO: 4160269 - DNA, 25 bp, Homo sapien
agcagcagcttgttggttgtcactt

SEQ ID NO: 4160270 - DNA, 25 bp, Homo sapien
tcaatggttgcgaaagaatttgtag

SEQ ID NO: 4160271 - DNA, 25 bp, Homo sapien
tggttgcgaaagaatttgtagtaaa

SEQ ID NO: 4160272 - DNA, 25 bp, Homo sapien
ttgtagtaaaccaggcctcccagga

SEQ ID NO: 4160273 - DNA, 25 bp, Homo sapien
ttgcgaaagaatttgtagtaaacca

SEQ ID NO: 4160274 - DNA, 25 bp, Homo sapien
tgttgctgttccttcgcatttaagt

SEQ ID NO: 4160275 - DNA, 25 bp, Homo sapien
acatcatgcgttcacaaagtgaaag

SEQ ID NO: 4160276 - DNA, 25 bp, Homo sapien
ctaacatcatgcgttcacaaagtga

SEQ ID NO: 4160277 - DNA, 25 bp, Homo sapien
gctgttccttcgcatttaagtggct

SEQ ID NO: 4160278 - DNA, 25 bp, Homo sapien
tctccaagccagttgttcaacagcc

SEQ ID NO: 4160279 - DNA, 25 bp, Homo sapien
gatgacttctaacaccttgcacttg

SEQ ID NO: 4160280 - DNA, 25 bp, Homo sapien
gaacctagctgtcacatggtgtgga

SEQ ID NO: 4160281 - DNA, 25 bp, Homo sapien
gagcagccttcctaagaatcagttg

SEQ ID NO: 4160282 - DNA, 25 bp, Homo sapien
ataattacgactttcagacctaggg

SEQ ID NO: 4160283 - DNA, 25 bp, Homo sapien
gaattataattacgactttcagacc

SEQ ID NO: 4160284 - DNA, 25 bp, Homo sapien
tgcatacatttcctgggttgaatta

SEQ ID NO: 4160285 - DNA, 25 bp, Homo sapien
ctgtcaatataggagccttcgagtt

SEQ ID NO: 4160286 - DNA, 25 bp, Homo sapien
ggactggaggaacgcaacgtcacgg

SEQ ID NO: 4160287 - DNA, 25 bp, Homo sapien
tggaggaacgcaacgtcacggcgtc

SEQ ID NO: 4160288 - DNA, 25 bp, Homo sapien
aacgcaacgtcacggcgtcccgagg

SEQ ID NO: 4160289 - DNA, 25 bp, Homo sapien
ggaacgcaacgtcacggcgtcccga

SEQ ID NO: 4160290 - DNA, 25 bp, Homo sapien
ctccgagactcaatgtcgtaaaagg

SEQ ID NO: 4160291 - DNA, 25 bp, Homo sapien
aaggtcttcggaagtccagcactga

SEQ ID NO: 4160292 - DNA, 25 bp, Homo sapien
tcaatgtcgtaaaaggtcttcggaa

SEQ ID NO: 4160293 - DNA, 25 bp, Homo sapien
gtaaaaggtcttcggaagtccagca

SEQ ID NO: 4160294 - DNA, 25 bp, Homo sapien
tgccgaaaagtggatccggcgctga

SEQ ID NO: 4160295 - DNA, 25 bp, Homo sapien
ccacgtcactttgccgaaaagtgga

SEQ ID NO: 4160296 - DNA, 25 bp, Homo sapien
ccgaaaagtggatccggcgctgaga

SEQ ID NO: 4160297 - DNA, 25 bp, Homo sapien
tgctgttgacgtccacgtcactttg

SEQ ID NO: 4160298 - DNA, 25 bp, Homo sapien
cgccgctcgacgttggcagcggcgg

SEQ ID NO: 4160299 - DNA, 25 bp, Homo sapien
gtcgccgctcgacgttggcagcggc

SEQ ID NO: 4160300 - DNA, 25 bp, Homo sapien
cagcggcggcacatcttctccttcc

SEQ ID NO: 4160301 - DNA, 25 bp, Homo sapien
ccgtcgccgctcgacgttggcagcg

SEQ ID NO: 4160302 - DNA, 25 bp, Homo sapien
aggaggaccgttctgaggcccagca

SEQ ID NO: 4160303 - DNA, 25 bp, Homo sapien
cactccagcacactttggagactga

SEQ ID NO: 4160304 - DNA, 25 bp, Homo sapien
tgacagacgacacaggaggaccgtt

SEQ ID NO: 4160305 - DNA, 25 bp, Homo sapien
cacactttggagactgacagacgac

SEQ ID NO: 4160306 - DNA, 25 bp, Homo sapien
gttgtcttgtctatgcccttgctta

SEQ ID NO: 4160307 - DNA, 25 bp, Homo sapien
tgttagctccaagccatgtgtggat

SEQ ID NO: 4160308 - DNA, 25 bp, Homo sapien
gattctgcactaatatgttagctcc

SEQ ID NO: 4160309 - DNA, 25 bp, Homo sapien
tgaagacttggcacaaaaaagatgt

SEQ ID NO: 4160310 - DNA, 25 bp, Homo sapien
ctctcctattttccacttctttctc

SEQ ID NO: 4160311 - DNA, 25 bp, Homo sapien
tttccacttctttctctactggctc

SEQ ID NO: 4160312 - DNA, 25 bp, Homo sapien
tattttccacttctttctctactgg

SEQ ID NO: 4160313 - DNA, 25 bp, Homo sapien
tccacttctttctctactggctctt

SEQ ID NO: 4160314 - DNA, 25 bp, Homo sapien
actccccacgatctttcagaagcca

SEQ ID NO: 4160315 - DNA, 25 bp, Homo sapien
cactccccacgatctttcagaagcc

SEQ ID NO: 4160316 - DNA, 25 bp, Homo sapien
cacccactccccacgatctttcaga

SEQ ID NO: 4160317 - DNA, 25 bp, Homo sapien
cccactccccacgatctttcagaag

SEQ ID NO: 4160318 - DNA, 25 bp, Homo sapien
actttggccctcagatcagcaggca

SEQ ID NO: 4160319 - DNA, 25 bp, Homo sapien
acgtttcaagatcacaacctcctgc

SEQ ID NO: 4160320 - DNA, 25 bp, Homo sapien
tatatttctcaacgtttcaagatca

SEQ ID NO: 4160321 - DNA, 25 bp, Homo sapien
cttccaaactttggccctcagatca

SEQ ID NO: 4160322 - DNA, 25 bp, Homo sapien
aaatctaagccattattgttaaata

SEQ ID NO: 4160323 - DNA, 25 bp, Homo sapien
agcatatattacattccaaaatcta

SEQ ID NO: 4160324 - DNA, 25 bp, Homo sapien
gctacaaaagcatatattacattcc

SEQ ID NO: 4160325 - DNA, 25 bp, Homo sapien
ggccccataaacaccatttctaatg

SEQ ID NO: 4160326 - DNA, 25 bp, Homo sapien
catgatgccaaactatcaccttttc

SEQ ID NO: 4160327 - DNA, 25 bp, Homo sapien
gtctaaaataccatcccatgatgcc

SEQ ID NO: 4160328 - DNA, 25 bp, Homo sapien
caataaactgcaggcaatctttgtg

SEQ ID NO: 4160329 - DNA, 25 bp, Homo sapien
taaactgcaggcaatctttgtgaat

SEQ ID NO: 4160330 - DNA, 25 bp, Homo sapien
tcagtagatgtatccagctaaggga

SEQ ID NO: 4160331 - DNA, 25 bp, Homo sapien
gatgcaccaatggtttcagtagatg

SEQ ID NO: 4160332 - DNA, 25 bp, Homo sapien
ggtaattacagattcaatatccaaa

SEQ ID NO: 4160333 - DNA, 25 bp, Homo sapien
gctgcgtggcagttgaagatgcacc

SEQ ID NO: 4160334 - DNA, 25 bp, Homo sapien
taaaataacaattatggatcaaaca

SEQ ID NO: 4160335 - DNA, 25 bp, Homo sapien
ctttaccgccaaagtaaatctagca

SEQ ID NO: 4160336 - DNA, 25 bp, Homo sapien
taacaattatggatcaaacaatcct

SEQ ID NO: 4160337 - DNA, 25 bp, Homo sapien
taaatctagcaactttagctcaaag

SEQ ID NO: 4160338 - DNA, 25 bp, Homo sapien
cagtgttgctctcaagtacaaggca

SEQ ID NO: 4160339 - DNA, 25 bp, Homo sapien
aacacacagtgagtagaggcataca

SEQ ID NO: 4160340 - DNA, 25 bp, Homo sapien
gaaaaggccccaggttggcaattga

SEQ ID NO: 4160341 - DNA, 25 bp, Homo sapien
cactgtgcttgacgggattctgcca

SEQ ID NO: 4160342 - DNA, 25 bp, Homo sapien
ggtcaaagcacaggccatcataata

SEQ ID NO: 4160343 - DNA, 25 bp, Homo sapien
ttctactattacaagggaaggaggc

SEQ ID NO: 4160344 - DNA, 25 bp, Homo sapien
ggcaagaatgtatctaatgaatcag

SEQ ID NO: 4160345 - DNA, 25 bp, Homo sapien
tatacagaaactggaccttaagtca

SEQ ID NO: 4160346 - DNA, 25 bp, Homo sapien
ctcatggtattggatgagcaacctg

SEQ ID NO: 4160347 - DNA, 25 bp, Homo sapien
agctcaggctcatggtattggatga

SEQ ID NO: 4160348 - DNA, 25 bp, Homo sapien
tctttgtatcaagataagaacaaag

SEQ ID NO: 4160349 - DNA, 25 bp, Homo sapien
ccagttgagtgcataggagtctgga

SEQ ID NO: 4160350 - DNA, 25 bp, Homo sapien
taggacatgtcaacctctttaaagc

SEQ ID NO: 4160351 - DNA, 25 bp, Homo sapien
gacaatggagccacatattaactgt

SEQ ID NO: 4160352 - DNA, 25 bp, Homo sapien
cttaatcttagtgtatgaaatccaa

SEQ ID NO: 4160353 - DNA, 25 bp, Homo sapien
tccaaaggcaaaacatgtgaattca

SEQ ID NO: 4160354 - DNA, 25 bp, Homo sapien
gtgacttcagtggaacagtaacatg

SEQ ID NO: 4160355 - DNA, 25 bp, Homo sapien
tggaacagtaacatgcaaaaagact

SEQ ID NO: 4160356 - DNA, 25 bp, Homo sapien
cagtggaacagtaacatgcaaaaag

SEQ ID NO: 4160357 - DNA, 25 bp, Homo sapien
ttcagtggaacagtaacatgcaaaa

SEQ ID NO: 4160358 - DNA, 25 bp, Homo sapien
ttgctgtctgactcttgtgttaaaa

SEQ ID NO: 4160359 - DNA, 25 bp, Homo sapien
gtctgactcttgtgttaaaataact

SEQ ID NO: 4160360 - DNA, 25 bp, Homo sapien
tgtctgactcttgtgttaaaataac

SEQ ID NO: 4160361 - DNA, 25 bp, Homo sapien
gctgtctgactcttgtgttaaaata

SEQ ID NO: 4160362 - DNA, 25 bp, Homo sapien
taaaagaagccggtgttttgctgca

SEQ ID NO: 4160363 - DNA, 25 bp, Homo sapien
ctgcaataatactgagccagagaga

SEQ ID NO: 4160364 - DNA, 25 bp, Homo sapien
tctatattcagactggatggagtat

SEQ ID NO: 4160365 - DNA, 25 bp, Homo sapien
tcagactggatggagtattttccaa

SEQ ID NO: 4160366 - DNA, 25 bp, Homo sapien
gcatcatcatccttaattcccaaca

SEQ ID NO: 4160367 - DNA, 25 bp, Homo sapien
ggatctctgacacggagatggccag

SEQ ID NO: 4160368 - DNA, 25 bp, Homo sapien
cccttgtagctgattcgcttgaagg

SEQ ID NO: 4160369 - DNA, 25 bp, Homo sapien
caaagtactaccaaagagatggtga

SEQ ID NO: 4160370 - DNA, 25 bp, Homo sapien
tgcaggacggcaatccaccacaaag

SEQ ID NO: 4160371 - DNA, 25 bp, Homo sapien
agcattatattgttctgcaggacgg

SEQ ID NO: 4160372 - DNA, 25 bp, Homo sapien
aatgcccagcattatattgttctgc

SEQ ID NO: 4160373 - DNA, 25 bp, Homo sapien
taaatgcccagcattatattgttct

SEQ ID NO: 4160374 - DNA, 25 bp, Homo sapien
gccagactcaatggactgcttctgt

SEQ ID NO: 4160375 - DNA, 25 bp, Homo sapien
tgtaaaaagtgtgccaggaccatgt

SEQ ID NO: 4160376 - DNA, 25 bp, Homo sapien
tatggagccagactcaatggactgc

SEQ ID NO: 4160377 - DNA, 25 bp, Homo sapien
ctgtaaaaagtgtgccaggaccatg

SEQ ID NO: 4160378 - DNA, 25 bp, Homo sapien
ccataaatcctccactggcaatact

SEQ ID NO: 4160379 - DNA, 25 bp, Homo sapien
gagtaaaggcctccaagctagagca

SEQ ID NO: 4160380 - DNA, 25 bp, Homo sapien
ctgacgccaatgtgatgataactgt

SEQ ID NO: 4160381 - DNA, 25 bp, Homo sapien
gataacttttcttaactgacgccaa

SEQ ID NO: 4160382 - DNA, 25 bp, Homo sapien
taccataaggagatatcaatcaatc

SEQ ID NO: 4160383 - DNA, 25 bp, Homo sapien
atatccattttctggtccatccaca

SEQ ID NO: 4160384 - DNA, 25 bp, Homo sapien
gaggtactagcaatccaatggccat

SEQ ID NO: 4160385 - DNA, 25 bp, Homo sapien
tgatactgctccttgagcctgaggt

SEQ ID NO: 4160386 - DNA, 25 bp, Homo sapien
tccatccacattaatgtctgccagg

SEQ ID NO: 4160387 - DNA, 25 bp, Homo sapien
gttgatgtattctctataaaactga

SEQ ID NO: 4160388 - DNA, 25 bp, Homo sapien
ctctatcacttgagccattaggaga

SEQ ID NO: 4160389 - DNA, 25 bp, Homo sapien
gatccacaggagttgatgtattctc

SEQ ID NO: 4160390 - DNA, 25 bp, Homo sapien
cattaacggattttgtcttcaaagc

SEQ ID NO: 4160391 - DNA, 25 bp, Homo sapien
cccagagtgtacattataaagaaga

SEQ ID NO: 4160392 - DNA, 25 bp, Homo sapien
aaatcaaggcagaggacagaacaaa

SEQ ID NO: 4160393 - DNA, 25 bp, Homo sapien
tttccatcatcccaagtacaaagaa

SEQ ID NO: 4160394 - DNA, 25 bp, Homo sapien
tttttctcacccagagtgtacatta

SEQ ID NO: 4160395 - DNA, 25 bp, Homo sapien
tggccaaggaagattgaaagacatt

SEQ ID NO: 4160396 - DNA, 25 bp, Homo sapien
ctggccaaggaagattgaaagacat

SEQ ID NO: 4160397 - DNA, 25 bp, Homo sapien
cttagatctgtttggccttgcggaa

SEQ ID NO: 4160398 - DNA, 25 bp, Homo sapien
ctattaggacaatgcctggtgctac

SEQ ID NO: 4160399 - DNA, 25 bp, Homo sapien
gccttggtaggctgaatgctcttaa

SEQ ID NO: 4160400 - DNA, 25 bp, Homo sapien
tgttagcaaaagtggcataaggcct

SEQ ID NO: 4160401 - DNA, 25 bp, Homo sapien
cacggtaaggcttgcccactctgtc

SEQ ID NO: 4160402 - DNA, 25 bp, Homo sapien
ggctttacgccacggtaaggcttgc

SEQ ID NO: 4160403 - DNA, 25 bp, Homo sapien
tttacgccacggtaaggcttgccca

SEQ ID NO: 4160404 - DNA, 25 bp, Homo sapien
gctgaaaacaggctttacgccacgg

SEQ ID NO: 4160405 - DNA, 25 bp, Homo sapien
tatccaagtctgaatgtttacaacc

SEQ ID NO: 4160406 - DNA, 25 bp, Homo sapien
gacattgaagaactgtcaatttcat

SEQ ID NO: 4160407 - DNA, 25 bp, Homo sapien
cttttctatcatcatctgacattga

SEQ ID NO: 4160408 - DNA, 25 bp, Homo sapien
tgtttatccaagtctgaatgtttac

SEQ ID NO: 4160409 - DNA, 25 bp, Homo sapien
ttcaaaacaggtgttgtttcaacca

SEQ ID NO: 4160410 - DNA, 25 bp, Homo sapien
taaactattctcattcaatgcacca

SEQ ID NO: 4160411 - DNA, 25 bp, Homo sapien
gaggttaatctataaacaagtaagc

SEQ ID NO: 4160412 - DNA, 25 bp, Homo sapien
taacagataatcctgcaatgattga

SEQ ID NO: 4160413 - DNA, 25 bp, Homo sapien
agtacatatgtgttgcagtaaccaa

SEQ ID NO: 4160414 - DNA, 25 bp, Homo sapien
tacatatgtgttgcagtaaccaaca

SEQ ID NO: 4160415 - DNA, 25 bp, Homo sapien
tatgtgttgcagtaaccaacagatg

SEQ ID NO: 4160416 - DNA, 25 bp, Homo sapien
catatgtgttgcagtaaccaacaga

SEQ ID NO: 4160417 - DNA, 25 bp, Homo sapien
taagccaatcctttccgtgaaacaa

SEQ ID NO: 4160418 - DNA, 25 bp, Homo sapien
cttgtcgagactgtatataagccaa

SEQ ID NO: 4160419 - DNA, 25 bp, Homo sapien
ttccatacttgaaggtaatgagttc

SEQ ID NO: 4160420 - DNA, 25 bp, Homo sapien
ttttaactacagaattcagcgcttg

SEQ ID NO: 4160421 - DNA, 25 bp, Homo sapien
aacaaactctttatagtgaactaca

SEQ ID NO: 4160422 - DNA, 25 bp, Homo sapien
caaactctttatagtgaactacagt

SEQ ID NO: 4160423 - DNA, 25 bp, Homo sapien
aactctttatagtgaactacagtaa

SEQ ID NO: 4160424 - DNA, 25 bp, Homo sapien
gaattcagataatattatcttaagg

SEQ ID NO: 4160425 - DNA, 25 bp, Homo sapien
taagtgtaatcctaaatcccagtgg

SEQ ID NO: 4160426 - DNA, 25 bp, Homo sapien
caagccagcaattagtgcagcactg

SEQ ID NO: 4160427 - DNA, 25 bp, Homo sapien
tagtatcaatatcagtgtggtccac

SEQ ID NO: 4160428 - DNA, 25 bp, Homo sapien
tagtgacccacaatgagacaaaggg

SEQ ID NO: 4160429 - DNA, 25 bp, Homo sapien
tttcatgatctgctgttttatggct

SEQ ID NO: 4160430 - DNA, 25 bp, Homo sapien
tatggctttagttgcatcccctgca

SEQ ID NO: 4160431 - DNA, 25 bp, Homo sapien
gcatcccctgcatttggaatcaaat

SEQ ID NO: 4160432 - DNA, 25 bp, Homo sapien
ctttagttgcatcccctgcatttgg

SEQ ID NO: 4160433 - DNA, 25 bp, Homo sapien
tatatcaagtaatgcacctaggtgc

SEQ ID NO: 4160434 - DNA, 25 bp, Homo sapien
tattcagtcaggaggtatatgtcca

SEQ ID NO: 4160435 - DNA, 25 bp, Homo sapien
cagattgtgggtattgcaacttccc

SEQ ID NO: 4160436 - DNA, 25 bp, Homo sapien
tccataagggcacagggtcagttac

SEQ ID NO: 4160437 - DNA, 25 bp, Homo sapien
gacaggtaactgagtaaagctggca

SEQ ID NO: 4160438 - DNA, 25 bp, Homo sapien
acaggtaactgagtaaagctggcaa

SEQ ID NO: 4160439 - DNA, 25 bp, Homo sapien
gaaactgctgacttgggcactaggg

SEQ ID NO: 4160440 - DNA, 25 bp, Homo sapien
ctatgggtactgtgtccctctgtca

SEQ ID NO: 4160441 - DNA, 25 bp, Homo sapien
ccctctgtcacatgcagggaaactg

SEQ ID NO: 4160442 - DNA, 25 bp, Homo sapien
tgcagggaaactgctgacttgggca

SEQ ID NO: 4160443 - DNA, 25 bp, Homo sapien
ggaggagagaagggtctgcgttcat

SEQ ID NO: 4160444 - DNA, 25 bp, Homo sapien
agcgctggagatccggcggaccgcg

SEQ ID NO: 4160445 - DNA, 25 bp, Homo sapien
acctgcggcgcggactgagcgctgg

SEQ ID NO: 4160446 - DNA, 25 bp, Homo sapien
cggactgagcgctggagatccggcg

SEQ ID NO: 4160447 - DNA, 25 bp, Homo sapien
acaagcaccacctgcggcgcggact

SEQ ID NO: 4160448 - DNA, 25 bp, Homo sapien
cacaccgtggagaaatacacgtcca

SEQ ID NO: 4160449 - DNA, 25 bp, Homo sapien
agaaatacacgtccatcagcctctg

SEQ ID NO: 4160450 - DNA, 25 bp, Homo sapien
ctggaatcccgggagtgcgcccggc

SEQ ID NO: 4160451 - DNA, 25 bp, Homo sapien
accgcggcccacaccgtggagaaat

SEQ ID NO: 4160452 - DNA, 25 bp, Homo sapien
gatgaagctacaagcgcgagtgacg

SEQ ID NO: 4160453 - DNA, 25 bp, Homo sapien
caagcgcgagtgacgttatctgatt

SEQ ID NO: 4160454 - DNA, 25 bp, Homo sapien
tctgatttgatggaagaaatctgaa

SEQ ID NO: 4160455 - DNA, 25 bp, Homo sapien
ttgcgttgctgcctcccggatgaag

SEQ ID NO: 4160456 - DNA, 25 bp, Homo sapien
tcaggaaaatatttcgctccatatg

SEQ ID NO: 4160457 - DNA, 25 bp, Homo sapien
atatttcgctccatatggagaatta

SEQ ID NO: 4160458 - DNA, 25 bp, Homo sapien
gaaaatatttcgctccatatggaga

SEQ ID NO: 4160459 - DNA, 25 bp, Homo sapien
aatatttcgctccatatggagaatt

SEQ ID NO: 4160460 - DNA, 25 bp, Homo sapien
gaagaaacataccataagaaaaaga

SEQ ID NO: 4160461 - DNA, 25 bp, Homo sapien
ttgagagaagaaacataccataaga

SEQ ID NO: 4160462 - DNA, 25 bp, Homo sapien
agagaagaaacataccataagaaaa

SEQ ID NO: 4160463 - DNA, 25 bp, Homo sapien
ctttcattgagagaagaaacatacc

SEQ ID NO: 4160464 - DNA, 25 bp, Homo sapien
tctatactttgctagtaaagttcca

SEQ ID NO: 4160465 - DNA, 25 bp, Homo sapien
tatactttgctagtaaagttccatc

SEQ ID NO: 4160466 - DNA, 25 bp, Homo sapien
tagtaaagttccatcaggcccaaac

SEQ ID NO: 4160467 - DNA, 25 bp, Homo sapien
ctttctatactttgctagtaaagtt

SEQ ID NO: 4160468 - DNA, 25 bp, Homo sapien
tccccgggcagatacggaaggtgct

SEQ ID NO: 4160469 - DNA, 25 bp, Homo sapien
agcagggtccatggcagtaatgaca

SEQ ID NO: 4160470 - DNA, 25 bp, Homo sapien
cagggtccatggcagtaatgacaat

SEQ ID NO: 4160471 - DNA, 25 bp, Homo sapien
acaatatctttccccgggcagatac

SEQ ID NO: 4160472 - DNA, 25 bp, Homo sapien
gagaaactatcacccggactcaatg

SEQ ID NO: 4160473 - DNA, 25 bp, Homo sapien
atgtggagaaactatcacccggact

SEQ ID NO: 4160474 - DNA, 25 bp, Homo sapien
tatcacccggactcaatgttttaga

SEQ ID NO: 4160475 - DNA, 25 bp, Homo sapien
ggaacatcaatgtcaaacagatgga

SEQ ID NO: 4160476 - DNA, 25 bp, Homo sapien
tctggaagccgtaacaggaagctac

SEQ ID NO: 4160477 - DNA, 25 bp, Homo sapien
ggaagctacaatcaaatcaaagggc

SEQ ID NO: 4160478 - DNA, 25 bp, Homo sapien
taagcccgaactttccagatctgtg

SEQ ID NO: 4160479 - DNA, 25 bp, Homo sapien
tcaaagggcaaaatcgtgtcaaatc

SEQ ID NO: 4160480 - DNA, 25 bp, Homo sapien
catggtgtggcaggggaaatcctcc

SEQ ID NO: 4160481 - DNA, 25 bp, Homo sapien
cctccatgacataatgatcacaaaa

SEQ ID NO: 4160482 - DNA, 25 bp, Homo sapien
ttaactccctacagcatggtgtggc

SEQ ID NO: 4160483 - DNA, 25 bp, Homo sapien
aatgaaaagttaactccctacagca

SEQ ID NO: 4160484 - DNA, 25 bp, Homo sapien
ctctctgtgcgtagatttgtgcaag

SEQ ID NO: 4160485 - DNA, 25 bp, Homo sapien
tgcaaaccgcatgtcgtagcagatg

SEQ ID NO: 4160486 - DNA, 25 bp, Homo sapien
caagctctgcaaaccgcatgtcgta

SEQ ID NO: 4160487 - DNA, 25 bp, Homo sapien
cgcatgtcgtagcagatgcccagac

SEQ ID NO: 4160488 - DNA, 25 bp, Homo sapien
cggcttcgctgaagtaactcccaat

SEQ ID NO: 4160489 - DNA, 25 bp, Homo sapien
tcgctgaagtaactcccaatgggct

SEQ ID NO: 4160490 - DNA, 25 bp, Homo sapien
gctgaagtaactcccaatgggctgg

SEQ ID NO: 4160491 - DNA, 25 bp, Homo sapien
gaagtaactcccaatgggctggtcc

SEQ ID NO: 4160492 - DNA, 25 bp, Homo sapien
ctgtagtcaatagacaggaaagagg

SEQ ID NO: 4160493 - DNA, 25 bp, Homo sapien
ttctaacccaagtagatagatcctt

SEQ ID NO: 4160494 - DNA, 25 bp, Homo sapien
ggaaagaggtaaatcgtacattata

SEQ ID NO: 4160495 - DNA, 25 bp, Homo sapien
taaatctgacatttttctaacccaa

SEQ ID NO: 4160496 - DNA, 25 bp, Homo sapien
gggttcaccacggtgctgtgtcccc

SEQ ID NO: 4160497 - DNA, 25 bp, Homo sapien
aagggttcaccacggtgctgtgtcc

SEQ ID NO: 4160498 - DNA, 25 bp, Homo sapien
agggttcaccacggtgctgtgtccc

SEQ ID NO: 4160499 - DNA, 25 bp, Homo sapien
tgtgcaggaggccaactggaatctc

SEQ ID NO: 4160500 - DNA, 25 bp, Homo sapien
caatgtccccaagcctaatgtgcag

SEQ ID NO: 4160501 - DNA, 25 bp, Homo sapien
tgtttaccagatagccacagacaga

SEQ ID NO: 4160502 - DNA, 25 bp, Homo sapien
tctggacagtggaacctgatgcaag

SEQ ID NO: 4160503 - DNA, 25 bp, Homo sapien
aaccatctccaggaagggtgcggta

SEQ ID NO: 4160504 - DNA, 25 bp, Homo sapien
tgacctgtaaaaccatctccaggaa

SEQ ID NO: 4160505 - DNA, 25 bp, Homo sapien
ccatctccaggaagggtgcggtagc

SEQ ID NO: 4160506 - DNA, 25 bp, Homo sapien
atctccaggaagggtgcggtagctc

SEQ ID NO: 4160507 - DNA, 25 bp, Homo sapien
gtctgaatacacgattgcttcttct

SEQ ID NO: 4160508 - DNA, 25 bp, Homo sapien
ctatgtctgaatacacgattgcttc

SEQ ID NO: 4160509 - DNA, 25 bp, Homo sapien
tgtgccagctttggctagaacctcc

SEQ ID NO: 4160510 - DNA, 25 bp, Homo sapien
tctgtgccagctttggctagaacct

SEQ ID NO: 4160511 - DNA, 25 bp, Homo sapien
aacggggatttgctggcgtatttca

SEQ ID NO: 4160512 - DNA, 25 bp, Homo sapien
ctgatcgcttctgtctaaaaacggg

SEQ ID NO: 4160513 - DNA, 25 bp, Homo sapien
ggatttgctggcgtatttcagccag

SEQ ID NO: 4160514 - DNA, 25 bp, Homo sapien
catagaggtctgatcgcttctgtct

SEQ ID NO: 4160515 - DNA, 25 bp, Homo sapien
gattatgttgtagaatcatatcgtc

SEQ ID NO: 4160516 - DNA, 25 bp, Homo sapien
gaatttaatagggagttgattatgt

SEQ ID NO: 4160517 - DNA, 25 bp, Homo sapien
tcatatcgtcctattctgtgacaca

SEQ ID NO: 4160518 - DNA, 25 bp, Homo sapien
tgtagaatcatatcgtcctattctg

SEQ ID NO: 4160519 - DNA, 25 bp, Homo sapien
caacgggataagaggttcatgacac

SEQ ID NO: 4160520 - DNA, 25 bp, Homo sapien
taatgtggcgtggaaaatgtcagca

SEQ ID NO: 4160521 - DNA, 25 bp, Homo sapien
tcacaaactgcttggaggcaactta

SEQ ID NO: 4160522 - DNA, 25 bp, Homo sapien
caatcaccaggataccaagatctga

SEQ ID NO: 4160523 - DNA, 25 bp, Homo sapien
ggattctcaaaccaagctgtctaag

SEQ ID NO: 4160524 - DNA, 25 bp, Homo sapien
cttcctctaagaccagaagggcctg

SEQ ID NO: 4160525 - DNA, 25 bp, Homo sapien
tatccgtggagctagaaagtgttac

SEQ ID NO: 4160526 - DNA, 25 bp, Homo sapien
gttgttcaacaattactggcccatg

SEQ ID NO: 4160527 - DNA, 25 bp, Homo sapien
tagccagagggattataatacagca

SEQ ID NO: 4160528 - DNA, 25 bp, Homo sapien
tgattgacaaaggactagccagagg

SEQ ID NO: 4160529 - DNA, 25 bp, Homo sapien
tgctagggcaggattgcaccagctc

SEQ ID NO: 4160530 - DNA, 25 bp, Homo sapien
tccagaagttaaatgacaccgtgtc

SEQ ID NO: 4160531 - DNA, 25 bp, Homo sapien
gaagtagctgtggtacctggccaag

SEQ ID NO: 4160532 - DNA, 25 bp, Homo sapien
tctctgcagagatgatccatggcct

SEQ ID NO: 4160533 - DNA, 25 bp, Homo sapien
catgactaacattggctcttgggca

SEQ ID NO: 4160534 - DNA, 25 bp, Homo sapien
cctggaaggctatgaaacagcttac

SEQ ID NO: 4160535 - DNA, 25 bp, Homo sapien
ctttggaaaatattgaggaggtcac

SEQ ID NO: 4160536 - DNA, 25 bp, Homo sapien
gatctctaaggactaactacccagg

SEQ ID NO: 4160537 - DNA, 25 bp, Homo sapien
ggaagtttgagaccgctgcattttg

SEQ ID NO: 4160538 - DNA, 25 bp, Homo sapien
gaagcatgtgccattctatactgtc

SEQ ID NO: 4160539 - DNA, 25 bp, Homo sapien
gcagattgcttgtatgtaaaaccca

SEQ ID NO: 4160540 - DNA, 25 bp, Homo sapien
acatgtggctaaagggtcaaaaagg

SEQ ID NO: 4160541 - DNA, 25 bp, Homo sapien
aaaggatgtaagacttggagccaga

SEQ ID NO: 4160542 - DNA, 25 bp, Homo sapien
ggagctcgaggctgtaatgtgccat

SEQ ID NO: 4160543 - DNA, 25 bp, Homo sapien
tccctgtgcaacaaaagattagaac

SEQ ID NO: 4160544 - DNA, 25 bp, Homo sapien
tttatattcagttaaccgctttcag

SEQ ID NO: 4160545 - DNA, 25 bp, Homo sapien
ttgcagtcttgcagcttttattccc

SEQ ID NO: 4160546 - DNA, 25 bp, Homo sapien
gatgattccgtctatatatgtgtga

SEQ ID NO: 4160547 - DNA, 25 bp, Homo sapien
ggtaaggcccttgcatgtcattagt

SEQ ID NO: 4160548 - DNA, 25 bp, Homo sapien
ccaaatcggaaatggagatggccca

SEQ ID NO: 4160549 - DNA, 25 bp, Homo sapien
tctgtattcactttgcgatgccgcc

SEQ ID NO: 4160550 - DNA, 25 bp, Homo sapien
aagctattaacctggccaaatcgga

SEQ ID NO: 4160551 - DNA, 25 bp, Homo sapien
tcttaatcttttttgagcgaagctg

SEQ ID NO: 4160552 - DNA, 25 bp, Homo sapien
tttttgagcgaagctgtggattctt

SEQ ID NO: 4160553 - DNA, 25 bp, Homo sapien
cttttttgagcgaagctgtggattc

SEQ ID NO: 4160554 - DNA, 25 bp, Homo sapien
taatcttttttgagcgaagctgtgg

SEQ ID NO: 4160555 - DNA, 25 bp, Homo sapien
tatgaaaagactaagagccatacag

SEQ ID NO: 4160556 - DNA, 25 bp, Homo sapien
ttataaagaagatgtgctggctaca

SEQ ID NO: 4160557 - DNA, 25 bp, Homo sapien
tgtttgcagaattgtggtacactca

SEQ ID NO: 4160558 - DNA, 25 bp, Homo sapien
tattgcccttaagataattccctgg

SEQ ID NO: 4160559 - DNA, 25 bp, Homo sapien
cagcacagaaataggaaacgataac

SEQ ID NO: 4160560 - DNA, 25 bp, Homo sapien
tccttaaaccattcttaaggatgct

SEQ ID NO: 4160561 - DNA, 25 bp, Homo sapien
aaaataccatcgctggttgacccct

SEQ ID NO: 4160562 - DNA, 25 bp, Homo sapien
atcgctggttgacccctctccttaa

SEQ ID NO: 4160563 - DNA, 25 bp, Homo sapien
taattggtgccgacgatgagccaca

SEQ ID NO: 4160564 - DNA, 25 bp, Homo sapien
taagaaacccctaacaacgcagatg

SEQ ID NO: 4160565 - DNA, 25 bp, Homo sapien
tgcagcagccttcttcagcggtgag

SEQ ID NO: 4160566 - DNA, 25 bp, Homo sapien
taatccgttggtttctcgggcacgc

SEQ ID NO: 4160567 - DNA, 25 bp, Homo sapien
ggagaaaccggtgatcctgaaattc

SEQ ID NO: 4160568 - DNA, 25 bp, Homo sapien
ggagaaccatagttctggactctga

SEQ ID NO: 4160569 - DNA, 25 bp, Homo sapien
ttttaatcagtccattctggtgcca

SEQ ID NO: 4160570 - DNA, 25 bp, Homo sapien
tgtgatgttgttgcacttaacagca

SEQ ID NO: 4160571 - DNA, 25 bp, Homo sapien
taaatctttactatagcctgagagg

SEQ ID NO: 4160572 - DNA, 25 bp, Homo sapien
ataacaccgattccctttggagagg

SEQ ID NO: 4160573 - DNA, 25 bp, Homo sapien
ggctctacagtaccatcaattagga

SEQ ID NO: 4160574 - DNA, 25 bp, Homo sapien
cagtaagcgacactctatttggctc

SEQ ID NO: 4160575 - DNA, 25 bp, Homo sapien
tctgagggatggtctaatacaaaag

SEQ ID NO: 4160576 - DNA, 25 bp, Homo sapien
taagttaacaggcactcatcatatg

SEQ ID NO: 4160577 - DNA, 25 bp, Homo sapien
tcagaattgagcataggcagcagat

SEQ ID NO: 4160578 - DNA, 25 bp, Homo sapien
tgcccaaccctcttacagatacagg

SEQ ID NO: 4160579 - DNA, 25 bp, Homo sapien
tgcaaaagctgccaagtgactgcga

SEQ ID NO: 4160580 - DNA, 25 bp, Homo sapien
ctttttgagcctgcaggatgatgca

SEQ ID NO: 4160581 - DNA, 25 bp, Homo sapien
gctgccaagtgactgcgacagctgc

SEQ ID NO: 4160582 - DNA, 25 bp, Homo sapien
tctgagctgagaatttgagtatcat

SEQ ID NO: 4160583 - DNA, 25 bp, Homo sapien
aatcatatacgctgaatttaccact

SEQ ID NO: 4160584 - DNA, 25 bp, Homo sapien
taatgtgaatcatatacgctgaatt

SEQ ID NO: 4160585 - DNA, 25 bp, Homo sapien
tataatgtgaatcatatacgctgaa

SEQ ID NO: 4160586 - DNA, 25 bp, Homo sapien
tgtgaatcatatacgctgaatttac

SEQ ID NO: 4160587 - DNA, 25 bp, Homo sapien
gctagatactctcctaataaaatga

SEQ ID NO: 4160588 - DNA, 25 bp, Homo sapien
ctagatactctcctaataaaatgat

SEQ ID NO: 4160589 - DNA, 25 bp, Homo sapien
cacagcttgcaaggtagccagctgt

SEQ ID NO: 4160590 - DNA, 25 bp, Homo sapien
aggtagccagctgttgccatgtcat

SEQ ID NO: 4160591 - DNA, 25 bp, Homo sapien
gcttgcaaggtagccagctgttgcc

SEQ ID NO: 4160592 - DNA, 25 bp, Homo sapien
gcaaggtagccagctgttgccatgt

SEQ ID NO: 4160593 - DNA, 25 bp, Homo sapien
tgcgacagagggaaatatcacccaa

SEQ ID NO: 4160594 - DNA, 25 bp, Homo sapien
gcgacagagggaaatatcacccaac

SEQ ID NO: 4160595 - DNA, 25 bp, Homo sapien
cgacagagggaaatatcacccaaca

SEQ ID NO: 4160596 - DNA, 25 bp, Homo sapien
atgcgacagagggaaatatcaccca

SEQ ID NO: 4160597 - DNA, 25 bp, Homo sapien
tgtgctccatgtaaaggtgatgcca

SEQ ID NO: 4160598 - DNA, 25 bp, Homo sapien
gaagctgctcatccatttggcaaaa

SEQ ID NO: 4160599 - DNA, 25 bp, Homo sapien
gatgccaaatactgaaggcctgtcc

SEQ ID NO: 4160600 - DNA, 25 bp, Homo sapien
tggcgttcccggagtcctctctgat

SEQ ID NO: 4160601 - DNA, 25 bp, Homo sapien
tcttggtcctcatgagaatgccttc

SEQ ID NO: 4160602 - DNA, 25 bp, Homo sapien
cacagttgccgttcaaaggactctg

SEQ ID NO: 4160603 - DNA, 25 bp, Homo sapien
ggctccttgaatgacccatcctctg

SEQ ID NO: 4160604 - DNA, 25 bp, Homo sapien
gtggctacggcatcgaaattcttgg

SEQ ID NO: 4160605 - DNA, 25 bp, Homo sapien
taaatattcagtagctctgttacat

SEQ ID NO: 4160606 - DNA, 25 bp, Homo sapien
cttaaatattcagtagctctgttac

SEQ ID NO: 4160607 - DNA, 25 bp, Homo sapien
gcttaaatattcagtagctctgtta

SEQ ID NO: 4160608 - DNA, 25 bp, Homo sapien
aatattcagtagctctgttacatac

SEQ ID NO: 4160609 - DNA, 25 bp, Homo sapien
gccctgatggtttagcagacttcca

SEQ ID NO: 4160610 - DNA, 25 bp, Homo sapien
gatggtctgggaaggaagtacaacc

SEQ ID NO: 4160611 - DNA, 25 bp, Homo sapien
gcagctgacaacactccacatttct

SEQ ID NO: 4160612 - DNA, 25 bp, Homo sapien
tgctaaaggtttcggtcacaaagaa

SEQ ID NO: 4160613 - DNA, 25 bp, Homo sapien
caagtcatcttggagcagctacata

SEQ ID NO: 4160614 - DNA, 25 bp, Homo sapien
tatactctcaactaagatgccagca

SEQ ID NO: 4160615 - DNA, 25 bp, Homo sapien
catctgatgtcatgaggcagaagca

SEQ ID NO: 4160616 - DNA, 25 bp, Homo sapien
gcagaagcagagtattattcaggcc

SEQ ID NO: 4160617 - DNA, 25 bp, Homo sapien
tgggtggctctttaaataccttcca

SEQ ID NO: 4160618 - DNA, 25 bp, Homo sapien
ctatgtgggtggctctttaaatacc

SEQ ID NO: 4160619 - DNA, 25 bp, Homo sapien
tgagaagggttggtgaagctatgtg

SEQ ID NO: 4160620 - DNA, 25 bp, Homo sapien
gtgaagctatgtgggtggctcttta

SEQ ID NO: 4160621 - DNA, 25 bp, Homo sapien
caaggtcccacctcagagtgctgaa

SEQ ID NO: 4160622 - DNA, 25 bp, Homo sapien
aatttggactaagccaccctactgg

SEQ ID NO: 4160623 - DNA, 25 bp, Homo sapien
ccatgtggccttcggagtcagggac

SEQ ID NO: 4160624 - DNA, 25 bp, Homo sapien
tctggcatcagaatgaactgggctc

SEQ ID NO: 4160625 - DNA, 25 bp, Homo sapien
ttcgttgaagtccttattaaccaga

SEQ ID NO: 4160626 - DNA, 25 bp, Homo sapien
ggttttttgtattgagtgatggtcg

SEQ ID NO: 4160627 - DNA, 25 bp, Homo sapien
tgctttgttgtgtgagaattgagaa

SEQ ID NO: 4160628 - DNA, 25 bp, Homo sapien
gagcaaataatagggcccaagagcc

SEQ ID NO: 4160629 - DNA, 25 bp, Homo sapien
taaaccgtgtgttggatgggatctg

SEQ ID NO: 4160630 - DNA, 25 bp, Homo sapien
cttgggtccctagtcgcttctttgg

SEQ ID NO: 4160631 - DNA, 25 bp, Homo sapien
ggatctggccacgtctcgcattggg

SEQ ID NO: 4160632 - DNA, 25 bp, Homo sapien
agcttaaaatcagacagcggctggg

SEQ ID NO: 4160633 - DNA, 25 bp, Homo sapien
ttcccacaagtcttgggacatttca

SEQ ID NO: 4160634 - DNA, 25 bp, Homo sapien
tttcccacaagtcttgggacatttc

SEQ ID NO: 4160635 - DNA, 25 bp, Homo sapien
gaaagggtgctggacacttgaacaa

SEQ ID NO: 4160636 - DNA, 25 bp, Homo sapien
gacactggagtgaagctaccctgta

SEQ ID NO: 4160637 - DNA, 25 bp, Homo sapien
taaatactgatttcaccacggtgtg

SEQ ID NO: 4160638 - DNA, 25 bp, Homo sapien
ttcaggatacagaggctagagcacc

SEQ ID NO: 4160639 - DNA, 25 bp, Homo sapien
aacatttggaatgacccctccatca

SEQ ID NO: 4160640 - DNA, 25 bp, Homo sapien
tgtgacaacaaccacacggtcaacc

SEQ ID NO: 4160641 - DNA, 25 bp, Homo sapien
cacacggtcaaccttttgttctcca

SEQ ID NO: 4160642 - DNA, 25 bp, Homo sapien
ctccccagcaatgagtctgtgacaa

SEQ ID NO: 4160643 - DNA, 25 bp, Homo sapien
gacaatgccatcgtgtgggctccag

SEQ ID NO: 4160644 - DNA, 25 bp, Homo sapien
gacccatggtgaaatccctctctga

SEQ ID NO: 4160645 - DNA, 25 bp, Homo sapien
tgtgagagccaaagggcactctgta

SEQ ID NO: 4160646 - DNA, 25 bp, Homo sapien
cagtcttgggctatgtgtgtgaccc

SEQ ID NO: 4160647 - DNA, 25 bp, Homo sapien
ttactataggtctgtggtatatttt

SEQ ID NO: 4160648 - DNA, 25 bp, Homo sapien
tgcttactataggtctgtggtatat

SEQ ID NO: 4160649 - DNA, 25 bp, Homo sapien
cttactataggtctgtggtatattt

SEQ ID NO: 4160650 - DNA, 25 bp, Homo sapien
gcttactataggtctgtggtatatt

SEQ ID NO: 4160651 - DNA, 25 bp, Homo sapien
tgctgggagatactgcttaatgctc

SEQ ID NO: 4160652 - DNA, 25 bp, Homo sapien
tgccactcagtagctaacaatgctg

SEQ ID NO: 4160653 - DNA, 25 bp, Homo sapien
catgcgtactgaagatgtgccactc

SEQ ID NO: 4160654 - DNA, 25 bp, Homo sapien
ccccacgaatcatgcgtactgaaga

SEQ ID NO: 4160655 - DNA, 25 bp, Homo sapien
ctttgcttcttaggtaatgctgaaa

SEQ ID NO: 4160656 - DNA, 25 bp, Homo sapien
gcctttgcttcttaggtaatgctga

SEQ ID NO: 4160657 - DNA, 25 bp, Homo sapien
gcttcttaggtaatgctgaaaagtt

SEQ ID NO: 4160658 - DNA, 25 bp, Homo sapien
ttgcttcttaggtaatgctgaaaag

SEQ ID NO: 4160659 - DNA, 25 bp, Homo sapien
catccttggtctcagtagatcaggc

SEQ ID NO: 4160660 - DNA, 25 bp, Homo sapien
gagtcattggtcatccttggtctca

SEQ ID NO: 4160661 - DNA, 25 bp, Homo sapien
tctcagtagatcaggcacgttagaa

SEQ ID NO: 4160662 - DNA, 25 bp, Homo sapien
cttctgagtcattggtcatccttgg

SEQ ID NO: 4160663 - DNA, 25 bp, Homo sapien
catcctcgtactgcaaaggttgctt

SEQ ID NO: 4160664 - DNA, 25 bp, Homo sapien
gcctggctgtgacaccatgatgtga

SEQ ID NO: 4160665 - DNA, 25 bp, Homo sapien
gactcatgatccatcatgggccaaa

SEQ ID NO: 4160666 - DNA, 25 bp, Homo sapien
tcttgatgtggatcccatcctcgta

SEQ ID NO: 4160667 - DNA, 25 bp, Homo sapien
ggagcagttacaacccaaaggtcta

SEQ ID NO: 4160668 - DNA, 25 bp, Homo sapien
tgaacttccagtctgatttaggctg

SEQ ID NO: 4160669 - DNA, 25 bp, Homo sapien
gatttaggctgttcccactatgccc

SEQ ID NO: 4160670 - DNA, 25 bp, Homo sapien
ggtctagtcttggaggtgattcttc

SEQ ID NO: 4160671 - DNA, 25 bp, Homo sapien
caatattgagccttcctgttcataa

SEQ ID NO: 4160672 - DNA, 25 bp, Homo sapien
caacaccatactttcttgatcactg

SEQ ID NO: 4160673 - DNA, 25 bp, Homo sapien
tagtatcagtactacgattctgttc

SEQ ID NO: 4160674 - DNA, 25 bp, Homo sapien
tatcatgttggcgtattctgggtcc

SEQ ID NO: 4160675 - DNA, 25 bp, Homo sapien
agatatgtgtcttttatcagattta

SEQ ID NO: 4160676 - DNA, 25 bp, Homo sapien
tgtcattgggtttcaagagccattt

SEQ ID NO: 4160677 - DNA, 25 bp, Homo sapien
tgtttagatatgtgtcttttatcag

SEQ ID NO: 4160678 - DNA, 25 bp, Homo sapien
tttatattgtttagatatgtgtctt

SEQ ID NO: 4160679 - DNA, 25 bp, Homo sapien
attcagtcaacaaaggtctaacacc

SEQ ID NO: 4160680 - DNA, 25 bp, Homo sapien
aggaacttaaacaatcgaatgagca

SEQ ID NO: 4160681 - DNA, 25 bp, Homo sapien
taaacaatcgaatgagcaaaaaaca

SEQ ID NO: 4160682 - DNA, 25 bp, Homo sapien
tcaacaaaggtctaacacccagaat

SEQ ID NO: 4160683 - DNA, 25 bp, Homo sapien
cagagtttgatcagatttaaacaca

SEQ ID NO: 4160684 - DNA, 25 bp, Homo sapien
cattctcgtttgaaggagaccacgg

SEQ ID NO: 4160685 - DNA, 25 bp, Homo sapien
attctcgtttgaaggagaccacggg

SEQ ID NO: 4160686 - DNA, 25 bp, Homo sapien
gtagcacagagtttgatcagattta

SEQ ID NO: 4160687 - DNA, 25 bp, Homo sapien
tcttgcctgggcaaccttggtgtgg

SEQ ID NO: 4160688 - DNA, 25 bp, Homo sapien
atcttgcctgggcaaccttggtgtg

SEQ ID NO: 4160689 - DNA, 25 bp, Homo sapien
tatcttgcctgggcaaccttggtgt

SEQ ID NO: 4160690 - DNA, 25 bp, Homo sapien
cttatcttgcctgggcaaccttggt

SEQ ID NO: 4160691 - DNA, 25 bp, Homo sapien
gccatgccaactattgtaattccct

SEQ ID NO: 4160692 - DNA, 25 bp, Homo sapien
aggttccagggagggcatgacctct

SEQ ID NO: 4160693 - DNA, 25 bp, Homo sapien
tttggaaccaagatagcaggttcgc

SEQ ID NO: 4160694 - DNA, 25 bp, Homo sapien
cagaatactctttgtacaccaccaa

SEQ ID NO: 4160695 - DNA, 25 bp, Homo sapien
gagttgattccagtgaccttgttta

SEQ ID NO: 4160696 - DNA, 25 bp, Homo sapien
cccaggagttgattccagtgacctt

SEQ ID NO: 4160697 - DNA, 25 bp, Homo sapien
caggagttgattccagtgaccttgt

SEQ ID NO: 4160698 - DNA, 25 bp, Homo sapien
ggagttgattccagtgaccttgttt

SEQ ID NO: 4160699 - DNA, 25 bp, Homo sapien
aacattaacttggttaaggacacag

SEQ ID NO: 4160700 - DNA, 25 bp, Homo sapien
gaactgatggtgaaacataagatat

SEQ ID NO: 4160701 - DNA, 25 bp, Homo sapien
ggcatttgacaacattaacttggtt

SEQ ID NO: 4160702 - DNA, 25 bp, Homo sapien
aacataagatatctgccacacccaa

SEQ ID NO: 4160703 - DNA, 25 bp, Homo sapien
cacatacgggtggattttgacagat

SEQ ID NO: 4160704 - DNA, 25 bp, Homo sapien
ccttaaggaattcagtccactggag

SEQ ID NO: 4160705 - DNA, 25 bp, Homo sapien
tggaagctcccaagaagtagtaaat

SEQ ID NO: 4160706 - DNA, 25 bp, Homo sapien
taagtcaaagcatcgccttaaggaa

SEQ ID NO: 4160707 - DNA, 25 bp, Homo sapien
cccctgaagcagaatgagacttgac

SEQ ID NO: 4160708 - DNA, 25 bp, Homo sapien
caacgaggcctgtcagaaagacgac

SEQ ID NO: 4160709 - DNA, 25 bp, Homo sapien
tagctccagaagtacattgttccga

SEQ ID NO: 4160710 - DNA, 25 bp, Homo sapien
tgtccagcatttcccggccatgagt

SEQ ID NO: 4160711 - DNA, 25 bp, Homo sapien
tctgcattagaacatggatatattc

SEQ ID NO: 4160712 - DNA, 25 bp, Homo sapien
ggcctctgcattagaacatggatat

SEQ ID NO: 4160713 - DNA, 25 bp, Homo sapien
gctggggcctctgcattagaacatg

SEQ ID NO: 4160714 - DNA, 25 bp, Homo sapien
ttctaaaggcaagatgtgtcaacat

SEQ ID NO: 4160715 - DNA, 25 bp, Homo sapien
catgatccatcagatcccatgcagg

SEQ ID NO: 4160716 - DNA, 25 bp, Homo sapien
ttcatgatccatcagatcccatgca

SEQ ID NO: 4160717 - DNA, 25 bp, Homo sapien
gatccatcagatcccatgcaggacc

SEQ ID NO: 4160718 - DNA, 25 bp, Homo sapien
ctggggggatacaggacaaatccaa

SEQ ID NO: 4160719 - DNA, 25 bp, Homo sapien
gcataattcattccaacgatgacaa

SEQ ID NO: 4160720 - DNA, 25 bp, Homo sapien
ttcattccaacgatgacaatggtta

SEQ ID NO: 4160721 - DNA, 25 bp, Homo sapien
aatgaaagcataattcattccaacg

SEQ ID NO: 4160722 - DNA, 25 bp, Homo sapien
caggtaatgaaagcataattcattc

SEQ ID NO: 4160723 - DNA, 25 bp, Homo sapien
gctgcttcagcaatgaggcacaaag

SEQ ID NO: 4160724 - DNA, 25 bp, Homo sapien
gaatgatttcttcacccggtgcctc

SEQ ID NO: 4160725 - DNA, 25 bp, Homo sapien
gaacagagatagctgagagctagac

SEQ ID NO: 4160726 - DNA, 25 bp, Homo sapien
gatagctgagagctagacaaaggaa

SEQ ID NO: 4160727 - DNA, 25 bp, Homo sapien
aaggagatgaggcccagaagtcagc

SEQ ID NO: 4160728 - DNA, 25 bp, Homo sapien
taaggagatgaggcccagaagtcag

SEQ ID NO: 4160729 - DNA, 25 bp, Homo sapien
ctaaggagatgaggcccagaagtca

SEQ ID NO: 4160730 - DNA, 25 bp, Homo sapien
tataagtggataagaggcccattag

SEQ ID NO: 4160731 - DNA, 25 bp, Homo sapien
gaagagcatttccttggatgctggc

SEQ ID NO: 4160732 - DNA, 25 bp, Homo sapien
ccattaggggtatgaagcgttttga

SEQ ID NO: 4160733 - DNA, 25 bp, Homo sapien
ggtatgaagcgttttgaaacaggaa

SEQ ID NO: 4160734 - DNA, 25 bp, Homo sapien
ttaatgtgaatatgccaggtggagg

SEQ ID NO: 4160735 - DNA, 25 bp, Homo sapien
tgtgaatgtatattggacggctgct

SEQ ID NO: 4160736 - DNA, 25 bp, Homo sapien
cactggttacattaagactgtggga

SEQ ID NO: 4160737 - DNA, 25 bp, Homo sapien
gagcaagagctagagtcaccacaga

SEQ ID NO: 4160738 - DNA, 25 bp, Homo sapien
gacctaatagtgaacatcacaggag

SEQ ID NO: 4160739 - DNA, 25 bp, Homo sapien
catggtgaagacgacgggctgtaaa

SEQ ID NO: 4160740 - DNA, 25 bp, Homo sapien
tatgtgcagtaaacaatacttgttg

SEQ ID NO: 4160741 - DNA, 25 bp, Homo sapien
taagaaactggacctatcattaggg

SEQ ID NO: 4160742 - DNA, 25 bp, Homo sapien
aagtcaaggcccacgtcaagtctgg

SEQ ID NO: 4160743 - DNA, 25 bp, Homo sapien
tataaaggaagtgcatgaagcccgc

SEQ ID NO: 4160744 - DNA, 25 bp, Homo sapien
ctctagggttggcagcccaagtcaa

SEQ ID NO: 4160745 - DNA, 25 bp, Homo sapien
aaaacaattaagagaatcgctgggc

SEQ ID NO: 4160746 - DNA, 25 bp, Homo sapien
gattcttgttctcgttcagcatttt

SEQ ID NO: 4160747 - DNA, 25 bp, Homo sapien
ccaacttctgaggagcagagcctct

SEQ ID NO: 4160748 - DNA, 25 bp, Homo sapien
gcctcttaagtctagatttaaccaa

SEQ ID NO: 4160749 - DNA, 25 bp, Homo sapien
ttttcagaagtccaacttctgagga

SEQ ID NO: 4160750 - DNA, 25 bp, Homo sapien
tagtagcaagcccagtaaccttgag

SEQ ID NO: 4160751 - DNA, 25 bp, Homo sapien
gtacacttagagtcatccttagcca

SEQ ID NO: 4160752 - DNA, 25 bp, Homo sapien
actctagcccctgaataccatgatg

SEQ ID NO: 4160753 - DNA, 25 bp, Homo sapien
catagtgtgggcatccaactttaga

SEQ ID NO: 4160754 - DNA, 25 bp, Homo sapien
tttgcaaccatgtgtcctaaggatc

SEQ ID NO: 4160755 - DNA, 25 bp, Homo sapien
ccagtctctcgtggctttgcaacca

SEQ ID NO: 4160756 - DNA, 25 bp, Homo sapien
gaaagatcacacaccctaggaagac

SEQ ID NO: 4160757 - DNA, 25 bp, Homo sapien
aagacttctggcctactattccctg

SEQ ID NO: 4160758 - DNA, 25 bp, Homo sapien
gaaggacatggtgattgccagagac

SEQ ID NO: 4160759 - DNA, 25 bp, Homo sapien
ggctacttagggcacagactaggta

SEQ ID NO: 4160760 - DNA, 25 bp, Homo sapien
ggtagagccagaatcagaaacaaga

SEQ ID NO: 4160761 - DNA, 25 bp, Homo sapien
ctaaagctggttaatggtagagcca

SEQ ID NO: 4160762 - DNA, 25 bp, Homo sapien
agattcttaaaatgtgacaaccaga

SEQ ID NO: 4160763 - DNA, 25 bp, Homo sapien
ccatttctagattcttaaaatgtga

SEQ ID NO: 4160764 - DNA, 25 bp, Homo sapien
attcttaaaatgtgacaaccagaag

SEQ ID NO: 4160765 - DNA, 25 bp, Homo sapien
atttctagattcttaaaatgtgaca

SEQ ID NO: 4160766 - DNA, 25 bp, Homo sapien
aaatactggtctttgtgactaacat

SEQ ID NO: 4160767 - DNA, 25 bp, Homo sapien
ggtctttgtgactaacattgtacta

SEQ ID NO: 4160768 - DNA, 25 bp, Homo sapien
tactggtctttgtgactaacattgt

SEQ ID NO: 4160769 - DNA, 25 bp, Homo sapien
tctttgtgactaacattgtactaaa

SEQ ID NO: 4160770 - DNA, 25 bp, Homo sapien
aggtttgggtcatccctcaaggatt

SEQ ID NO: 4160771 - DNA, 25 bp, Homo sapien
gtttgggtcatccctcaaggattcg

SEQ ID NO: 4160772 - DNA, 25 bp, Homo sapien
tcctccaggtttgggtcatccctca

SEQ ID NO: 4160773 - DNA, 25 bp, Homo sapien
ctccaggtttgggtcatccctcaag

SEQ ID NO: 4160774 - DNA, 25 bp, Homo sapien
ttgtgggtctagcaaacagccccga

SEQ ID NO: 4160775 - DNA, 25 bp, Homo sapien
tatatgggacagaatgccatgaccc

SEQ ID NO: 4160776 - DNA, 25 bp, Homo sapien
catgtaactgctgctgatcgctcac

SEQ ID NO: 4160777 - DNA, 25 bp, Homo sapien
tcatatgccagaaacgtcctaaggt

SEQ ID NO: 4160778 - DNA, 25 bp, Homo sapien
gcatcattttgtggaaagtaactca

SEQ ID NO: 4160779 - DNA, 25 bp, Homo sapien
tgttcttaggaacttcctactctcc

SEQ ID NO: 4160780 - DNA, 25 bp, Homo sapien
aggtgttccagataggatcttcggg

SEQ ID NO: 4160781 - DNA, 25 bp, Homo sapien
tcttcggggctgattggttcctgga

SEQ ID NO: 4160782 - DNA, 25 bp, Homo sapien
catctcaggacggagcctctgagcg

SEQ ID NO: 4160783 - DNA, 25 bp, Homo sapien
gatgaaggctaatcccaacttcccc

SEQ ID NO: 4160784 - DNA, 25 bp, Homo sapien
agcgtctccacttgggaaaccacca

SEQ ID NO: 4160785 - DNA, 25 bp, Homo sapien
agcattgatgaaggctaatcccaac

SEQ ID NO: 4160786 - DNA, 25 bp, Homo sapien
gcaagcacaggaggatgccgggagc

SEQ ID NO: 4160787 - DNA, 25 bp, Homo sapien
ggatcaaacaggcaagcacaggagg

SEQ ID NO: 4160788 - DNA, 25 bp, Homo sapien
aagaggatgacggatcaaacaggca

SEQ ID NO: 4160789 - DNA, 25 bp, Homo sapien
gatgccgggagccaaatttctcctt

SEQ ID NO: 4160790 - DNA, 25 bp, Homo sapien
agaaaaacaagtcctcccctcagtg

SEQ ID NO: 4160791 - DNA, 25 bp, Homo sapien
gacttttgaggctaatccagtagga

SEQ ID NO: 4160792 - DNA, 25 bp, Homo sapien
cctaataaaaggtgcatactctgct

SEQ ID NO: 4160793 - DNA, 25 bp, Homo sapien
gatctgtcagatggatgtctttgta

SEQ ID NO: 4160794 - DNA, 25 bp, Homo sapien
gatcctgatcacaatcctccagatg

SEQ ID NO: 4160795 - DNA, 25 bp, Homo sapien
gccaccagcaccctaaggttccagg

SEQ ID NO: 4160796 - DNA, 25 bp, Homo sapien
agtcagtagtccacacacgacagcc

SEQ ID NO: 4160797 - DNA, 25 bp, Homo sapien
gatgcccagtcccaaaatgatgcca

SEQ ID NO: 4160798 - DNA, 25 bp, Homo sapien
gtgcttgatgaggaagtagattttc

SEQ ID NO: 4160799 - DNA, 25 bp, Homo sapien
gggtgcttgatgaggaagtagattt

SEQ ID NO: 4160800 - DNA, 25 bp, Homo sapien
tgcagaactctgtaggggtgcttga

SEQ ID NO: 4160801 - DNA, 25 bp, Homo sapien
cagaactctgtaggggtgcttgatg

SEQ ID NO: 4160802 - DNA, 25 bp, Homo sapien
ctttccactcttctgtacaaataca

SEQ ID NO: 4160803 - DNA, 25 bp, Homo sapien
tgtacaaatacatctgccattttcc

SEQ ID NO: 4160804 - DNA, 25 bp, Homo sapien
tcttctgtacaaatacatctgccat

SEQ ID NO: 4160805 - DNA, 25 bp, Homo sapien
cactcttctgtacaaatacatctgc

SEQ ID NO: 4160806 - DNA, 25 bp, Homo sapien
actttagcattatcccaagtaattt

SEQ ID NO: 4160807 - DNA, 25 bp, Homo sapien
ctttagcattatcccaagtaattta

SEQ ID NO: 4160808 - DNA, 25 bp, Homo sapien
tttagcattatcccaagtaatttac

SEQ ID NO: 4160809 - DNA, 25 bp, Homo sapien
ctggcaaaagtaaaacccatatagg

SEQ ID NO: 4160810 - DNA, 25 bp, Homo sapien
gccacatgtttgcaaggatggtcca

SEQ ID NO: 4160811 - DNA, 25 bp, Homo sapien
tggtccatatctgcccactgggatt

SEQ ID NO: 4160812 - DNA, 25 bp, Homo sapien
cccactgggattctggcaaaagtaa

SEQ ID NO: 4160813 - DNA, 25 bp, Homo sapien
agagactgcacaaccggactgccat

SEQ ID NO: 4160814 - DNA, 25 bp, Homo sapien
aaccggactgccattggattgcccg

SEQ ID NO: 4160815 - DNA, 25 bp, Homo sapien
actgcacaaccggactgccattgga

SEQ ID NO: 4160816 - DNA, 25 bp, Homo sapien
tccatatagagagagactgcacaac

SEQ ID NO: 4160817 - DNA, 25 bp, Homo sapien
aaaaccctagctttacacaattatg

SEQ ID NO: 4160818 - DNA, 25 bp, Homo sapien
cctagctttacacaattatgtccaa

SEQ ID NO: 4160819 - DNA, 25 bp, Homo sapien
tagctttacacaattatgtccaaac

SEQ ID NO: 4160820 - DNA, 25 bp, Homo sapien
aaccctagctttacacaattatgtc

SEQ ID NO: 4160821 - DNA, 25 bp, Homo sapien
tgttattaagtggtgctgtgacatc

SEQ ID NO: 4160822 - DNA, 25 bp, Homo sapien
ttattaagtggtgctgtgacatcct

SEQ ID NO: 4160823 - DNA, 25 bp, Homo sapien
gaagaaatgttattaagtggtgctg

SEQ ID NO: 4160824 - DNA, 25 bp, Homo sapien
aaatgttattaagtggtgctgtgac

SEQ ID NO: 4160825 - DNA, 25 bp, Homo sapien
gcgtagcactagtgatgttctcagc

SEQ ID NO: 4160826 - DNA, 25 bp, Homo sapien
tagcactagtgatgttctcagcagt

SEQ ID NO: 4160827 - DNA, 25 bp, Homo sapien
actcgcgtagcactagtgatgttct

SEQ ID NO: 4160828 - DNA, 25 bp, Homo sapien
cactcgcgtagcactagtgatgttc

SEQ ID NO: 4160829 - DNA, 25 bp, Homo sapien
tcaggtgaagcatttctggaagtgt

SEQ ID NO: 4160830 - DNA, 25 bp, Homo sapien
ggtgaagcatttctggaagtgttga

SEQ ID NO: 4160831 - DNA, 25 bp, Homo sapien
gaagcatttctggaagtgttgaata

SEQ ID NO: 4160832 - DNA, 25 bp, Homo sapien
agcatttctggaagtgttgaatatc

SEQ ID NO: 4160833 - DNA, 25 bp, Homo sapien
gagttgactcactgttactatggca

SEQ ID NO: 4160834 - DNA, 25 bp, Homo sapien
catctaggagttgactcactgttac

SEQ ID NO: 4160835 - DNA, 25 bp, Homo sapien
gactcactgttactatggcaacttt

SEQ ID NO: 4160836 - DNA, 25 bp, Homo sapien
actggcatctaggagttgactcact

SEQ ID NO: 4160837 - DNA, 25 bp, Homo sapien
tctgcacagagaagcgaacatttga

SEQ ID NO: 4160838 - DNA, 25 bp, Homo sapien
gactgtattgctatgttaggttcca

SEQ ID NO: 4160839 - DNA, 25 bp, Homo sapien
gattgattacccaaagacaaggaat

SEQ ID NO: 4160840 - DNA, 25 bp, Homo sapien
caaggaataagtctccatttgctca

SEQ ID NO: 4160841 - DNA, 25 bp, Homo sapien
ctagaaactagagaactgctagctc

SEQ ID NO: 4160842 - DNA, 25 bp, Homo sapien
ctgaagctcagtctgtgcatctggg

SEQ ID NO: 4160843 - DNA, 25 bp, Homo sapien
tgcatctgggttaaggccatccaca

SEQ ID NO: 4160844 - DNA, 25 bp, Homo sapien
tcgtcatattaagcaagacctgaag

SEQ ID NO: 4160845 - DNA, 25 bp, Homo sapien
cttgggacaccaggatggctaagcc

SEQ ID NO: 4160846 - DNA, 25 bp, Homo sapien
caggatggctaagcccagatgaggt

SEQ ID NO: 4160847 - DNA, 25 bp, Homo sapien
ggacaccaggatggctaagcccaga

SEQ ID NO: 4160848 - DNA, 25 bp, Homo sapien
caccaggatggctaagcccagatga

SEQ ID NO: 4160849 - DNA, 25 bp, Homo sapien
ggactaaagaccatgtcaacagaag

SEQ ID NO: 4160850 - DNA, 25 bp, Homo sapien
gaagcactctgatcttgctcatttt

SEQ ID NO: 4160851 - DNA, 25 bp, Homo sapien
gactaaaatccgatttagctgtaaa

SEQ ID NO: 4160852 - DNA, 25 bp, Homo sapien
gataaactacaaagccgcatgtctt

SEQ ID NO: 4160853 - DNA, 25 bp, Homo sapien
gcgcaggaatccatcagtgcccttg

SEQ ID NO: 4160854 - DNA, 25 bp, Homo sapien
aaattccaatagacacaggcatagg

SEQ ID NO: 4160855 - DNA, 25 bp, Homo sapien
tgacagccatatgtgtcccagtcct

SEQ ID NO: 4160856 - DNA, 25 bp, Homo sapien
ttagtagtatggttgcagcggcagc

SEQ ID NO: 4160857 - DNA, 25 bp, Homo sapien
tccaacgttggataatatgtcaagt

SEQ ID NO: 4160858 - DNA, 25 bp, Homo sapien
ccagaccagtaacagacagtgcaca

SEQ ID NO: 4160859 - DNA, 25 bp, Homo sapien
caagtgatttgggatattgataatc

SEQ ID NO: 4160860 - DNA, 25 bp, Homo sapien
acagtgcacatccaacgttggataa

SEQ ID NO: 4160861 - DNA, 25 bp, Homo sapien
gcgtagtcccttcacagtaacctgg

SEQ ID NO: 4160862 - DNA, 25 bp, Homo sapien
taagttcagttcatagcccagttgt

SEQ ID NO: 4160863 - DNA, 25 bp, Homo sapien
tgatagctaatctccaaaaatggcc

SEQ ID NO: 4160864 - DNA, 25 bp, Homo sapien
tacttcctggtaggtagccctgcgt

SEQ ID NO: 4160865 - DNA, 25 bp, Homo sapien
tgatatgcacagattgaccaaaacc

SEQ ID NO: 4160866 - DNA, 25 bp, Homo sapien
atgcacagattgaccaaaacccagg

SEQ ID NO: 4160867 - DNA, 25 bp, Homo sapien
tatgcacagattgaccaaaacccag

SEQ ID NO: 4160868 - DNA, 25 bp, Homo sapien
ccaggttactgaggtttttctgact

SEQ ID NO: 4160869 - DNA, 25 bp, Homo sapien
cttgtctgcaagttcttattggagt

SEQ ID NO: 4160870 - DNA, 25 bp, Homo sapien
gcaagttcttattggagttttcaat

SEQ ID NO: 4160871 - DNA, 25 bp, Homo sapien
tgtctgcaagttcttattggagttt

SEQ ID NO: 4160872 - DNA, 25 bp, Homo sapien
tctgcaagttcttattggagttttc

SEQ ID NO: 4160873 - DNA, 25 bp, Homo sapien
attcgggatgttaatggtgtctgtc

SEQ ID NO: 4160874 - DNA, 25 bp, Homo sapien
tcgcagtgcacatgggattcgggat

SEQ ID NO: 4160875 - DNA, 25 bp, Homo sapien
taacagaaaatagtgcagtaaggcg

SEQ ID NO: 4160876 - DNA, 25 bp, Homo sapien
cagtaaggcggcaatcgcagtgcac

SEQ ID NO: 4160877 - DNA, 25 bp, Homo sapien
gcagcgctgagtgcgttccaggtaa

SEQ ID NO: 4160878 - DNA, 25 bp, Homo sapien
gctgagtgcgttccaggtaaatgtc

SEQ ID NO: 4160879 - DNA, 25 bp, Homo sapien
gcgctgagtgcgttccaggtaaatg

SEQ ID NO: 4160880 - DNA, 25 bp, Homo sapien
ctgtgcagcgctgagtgcgttccag

SEQ ID NO: 4160881 - DNA, 25 bp, Homo sapien
aatgaaatgccgaggaagaggcttc

SEQ ID NO: 4160882 - DNA, 25 bp, Homo sapien
aagaatgaaatgccgaggaagaggc

SEQ ID NO: 4160883 - DNA, 25 bp, Homo sapien
aaagaatgaaatgccgaggaagagg

SEQ ID NO: 4160884 - DNA, 25 bp, Homo sapien
gaatgaaatgccgaggaagaggctt

SEQ ID NO: 4160885 - DNA, 25 bp, Homo sapien
cggtagtctaattcccactgtggat

SEQ ID NO: 4160886 - DNA, 25 bp, Homo sapien
tttctcttgccggtagtctaattcc

SEQ ID NO: 4160887 - DNA, 25 bp, Homo sapien
tatagccactactatagctgggact

SEQ ID NO: 4160888 - DNA, 25 bp, Homo sapien
taactcccactgttatagccactac

SEQ ID NO: 4160889 - DNA, 25 bp, Homo sapien
tacgatgaatgaccacaacagcgga

SEQ ID NO: 4160890 - DNA, 25 bp, Homo sapien
caacagcggactttttataacacca

SEQ ID NO: 4160891 - DNA, 25 bp, Homo sapien
cacagcactttgatcgagattgtaa

SEQ ID NO: 4160892 - DNA, 25 bp, Homo sapien
gataatggttacaggtacgatgaat

SEQ ID NO: 4160893 - DNA, 25 bp, Homo sapien
aactgaatgctcttgttgtatatca

SEQ ID NO: 4160894 - DNA, 25 bp, Homo sapien
tagtttctgctttttgtctctccaa

SEQ ID NO: 4160895 - DNA, 25 bp, Homo sapien
tgtctctccaactgaatgctcttgt

SEQ ID NO: 4160896 - DNA, 25 bp, Homo sapien
tcttgttgtatatcagggatgacaa

SEQ ID NO: 4160897 - DNA, 25 bp, Homo sapien
tgccaaattaaatttggctgtttcc

SEQ ID NO: 4160898 - DNA, 25 bp, Homo sapien
tatcctcgtctgacactttagctaa

SEQ ID NO: 4160899 - DNA, 25 bp, Homo sapien
taaactgtatcctcgtctgacactt

SEQ ID NO: 4160900 - DNA, 25 bp, Homo sapien
aatgtagccataaactgtatcctcg

SEQ ID NO: 4160901 - DNA, 25 bp, Homo sapien
aatatgtagctgaagacgatcctga

SEQ ID NO: 4160902 - DNA, 25 bp, Homo sapien
gaagacgatcctgatgctatcatca

SEQ ID NO: 4160903 - DNA, 25 bp, Homo sapien
gctatcatcattaactagcatcagg

SEQ ID NO: 4160904 - DNA, 25 bp, Homo sapien
catcaggtatgctagaatccaggta

SEQ ID NO: 4160905 - DNA, 25 bp, Homo sapien
cctggccattggaaacgtcaggctc

SEQ ID NO: 4160906 - DNA, 25 bp, Homo sapien
attggaaacgtcaggctcggcggtc

SEQ ID NO: 4160907 - DNA, 25 bp, Homo sapien
ctgggcctggccattggaaacgtca

SEQ ID NO: 4160908 - DNA, 25 bp, Homo sapien
ggtcacttccgggagcagatcgtgg

SEQ ID NO: 4160909 - DNA, 25 bp, Homo sapien
tatgaaatacctaattcttctccca

SEQ ID NO: 4160910 - DNA, 25 bp, Homo sapien
tagcagatatagaagacccgagttc

SEQ ID NO: 4160911 - DNA, 25 bp, Homo sapien
gctagaaatttgtgcacttaaggac

SEQ ID NO: 4160912 - DNA, 25 bp, Homo sapien
aaatgtaaagcccttctagtcactg

SEQ ID NO: 4160913 - DNA, 25 bp, Homo sapien
tcggccgcgtcactgaaggcaatga

SEQ ID NO: 4160914 - DNA, 25 bp, Homo sapien
tccttctcccaatagacgatagcaa

SEQ ID NO: 4160915 - DNA, 25 bp, Homo sapien
acagtgtacaggataaaaatttgca

SEQ ID NO: 4160916 - DNA, 25 bp, Homo sapien
gacttttgttctaacagtgtacagg

SEQ ID NO: 4160917 - DNA, 25 bp, Homo sapien
gtttccagtagcctaaagcgttcat

SEQ ID NO: 4160918 - DNA, 25 bp, Homo sapien
cgttcatgtaaggttggcaatgacc

SEQ ID NO: 4160919 - DNA, 25 bp, Homo sapien
cactttcagagagtgtgatttcctc

SEQ ID NO: 4160920 - DNA, 25 bp, Homo sapien
ctcagtactcggagaggtttccagt

SEQ ID NO: 4160921 - DNA, 25 bp, Homo sapien
caagtccattatgccgaataataat

SEQ ID NO: 4160922 - DNA, 25 bp, Homo sapien
tgtatgttgtgtgaaattcttcacc

SEQ ID NO: 4160923 - DNA, 25 bp, Homo sapien
aacagataaaactcaaacgaggtga

SEQ ID NO: 4160924 - DNA, 25 bp, Homo sapien
ggagtcattttgttctggaaggtaa

SEQ ID NO: 4160925 - DNA, 25 bp, Homo sapien
tttggacatttccaatcaaatccag

SEQ ID NO: 4160926 - DNA, 25 bp, Homo sapien
cagaaaatcctaaacgctctattaa

SEQ ID NO: 4160927 - DNA, 25 bp, Homo sapien
caatcaaatccagagtaatcatttc

SEQ ID NO: 4160928 - DNA, 25 bp, Homo sapien
aaacgctctattaatcttttggaca

SEQ ID NO: 4160929 - DNA, 25 bp, Homo sapien
tatttccgtttctcgccaatgggcg

SEQ ID NO: 4160930 - DNA, 25 bp, Homo sapien
tgcctaggccgaagagtccctgctt

SEQ ID NO: 4160931 - DNA, 25 bp, Homo sapien
cacgcacttccggttttctcgaaag

SEQ ID NO: 4160932 - DNA, 25 bp, Homo sapien
gatttaggaagcgtgagctgccccg

SEQ ID NO: 4160933 - DNA, 25 bp, Homo sapien
ggccaatcgcgctgacccaacaagc

SEQ ID NO: 4160934 - DNA, 25 bp, Homo sapien
caagcctagcgagaacttgggctct

SEQ ID NO: 4160935 - DNA, 25 bp, Homo sapien
cccctccttattgcgcgtggacata

SEQ ID NO: 4160936 - DNA, 25 bp, Homo sapien
aatgtcctttcgcccctccttattg

SEQ ID NO: 4160937 - DNA, 25 bp, Homo sapien
tctccgctgaatgggcggacgcgag

SEQ ID NO: 4160938 - DNA, 25 bp, Homo sapien
cggacgcgaggccactggactgggg

SEQ ID NO: 4160939 - DNA, 25 bp, Homo sapien
aggccactggactggggcgtcgcgg

SEQ ID NO: 4160940 - DNA, 25 bp, Homo sapien
tcggttgcccttcgcgaccgccgca

SEQ ID NO: 4160941 - DNA, 25 bp, Homo sapien
tcccagcgcctcctagtctcccggc

SEQ ID NO: 4160942 - DNA, 25 bp, Homo sapien
gcaacccccgtctccagtggccata

SEQ ID NO: 4160943 - DNA, 25 bp, Homo sapien
gcctcctcggacagagcgcccgcaa

SEQ ID NO: 4160944 - DNA, 25 bp, Homo sapien
tgccgcgcggttcgaacgaggccct

SEQ ID NO: 4160945 - DNA, 25 bp, Homo sapien
caaacttctggttctactacctcta

SEQ ID NO: 4160946 - DNA, 25 bp, Homo sapien
gtaagaccctgctcaatttcagagg

SEQ ID NO: 4160947 - DNA, 25 bp, Homo sapien
tgaaccaggttctaggttcggcgga

SEQ ID NO: 4160948 - DNA, 25 bp, Homo sapien
acctctaagggtaagaccctgctca

SEQ ID NO: 4160949 - DNA, 25 bp, Homo sapien
caggaaccagtgcttctttcctaaa

SEQ ID NO: 4160950 - DNA, 25 bp, Homo sapien
gtttcctattgactgtaaacatctt

SEQ ID NO: 4160951 - DNA, 25 bp, Homo sapien
aggaaccagtgcttctttcctaaag

SEQ ID NO: 4160952 - DNA, 25 bp, Homo sapien
ctatatatacaactctagagaaaga

SEQ ID NO: 4160953 - DNA, 25 bp, Homo sapien
ggaattcgccgaatatcctccccaa

SEQ ID NO: 4160954 - DNA, 25 bp, Homo sapien
aataggaattcgccgaatatcctcc

SEQ ID NO: 4160955 - DNA, 25 bp, Homo sapien
ttatgaataggaattcgccgaatat

SEQ ID NO: 4160956 - DNA, 25 bp, Homo sapien
tatgaataggaattcgccgaatatc

SEQ ID NO: 4160957 - DNA, 25 bp, Homo sapien
ttcatcattactcagaagttttcct

SEQ ID NO: 4160958 - DNA, 25 bp, Homo sapien
tcattactcagaagttttcctctga

SEQ ID NO: 4160959 - DNA, 25 bp, Homo sapien
tcatcattactcagaagttttcctc

SEQ ID NO: 4160960 - DNA, 25 bp, Homo sapien
catcattactcagaagttttcctct

SEQ ID NO: 4160961 - DNA, 25 bp, Homo sapien
ggcaggaactttacctaagccatcc

SEQ ID NO: 4160962 - DNA, 25 bp, Homo sapien
tccactctactaacagaatctaacg

SEQ ID NO: 4160963 - DNA, 25 bp, Homo sapien
atcaaaaactttttggccaagtgcg

SEQ ID NO: 4160964 - DNA, 25 bp, Homo sapien
taacggacacaaatcaaaacaatca

SEQ ID NO: 4160965 - DNA, 25 bp, Homo sapien
agtttcagtatcctactgcactgaa

SEQ ID NO: 4160966 - DNA, 25 bp, Homo sapien
cagtttcagtatcctactgcactga

SEQ ID NO: 4160967 - DNA, 25 bp, Homo sapien
ctctttttagctatgactaatgtgt

SEQ ID NO: 4160968 - DNA, 25 bp, Homo sapien
tctttttagctatgactaatgtgtt

SEQ ID NO: 4160969 - DNA, 25 bp, Homo sapien
cagcatagacataattaaatctccc

SEQ ID NO: 4160970 - DNA, 25 bp, Homo sapien
tttcatctttgctcctaaccactaa

SEQ ID NO: 4160971 - DNA, 25 bp, Homo sapien
tctcccagagtacctttcctcaaaa

SEQ ID NO: 4160972 - DNA, 25 bp, Homo sapien
gccatgttagatttatcccaagtat

SEQ ID NO: 4160973 - DNA, 25 bp, Homo sapien
acgattcactttatttcgaagttct

SEQ ID NO: 4160974 - DNA, 25 bp, Homo sapien
ataaacgattcactttatttcgaag

SEQ ID NO: 4160975 - DNA, 25 bp, Homo sapien
caataaacgattcactttatttcga

SEQ ID NO: 4160976 - DNA, 25 bp, Homo sapien
cgattcactttatttcgaagttcta

SEQ ID NO: 4160977 - DNA, 25 bp, Homo sapien
tccagtaggtctatgatgagatcca

SEQ ID NO: 4160978 - DNA, 25 bp, Homo sapien
gactagttgcgaaagaatcacccaa

SEQ ID NO: 4160979 - DNA, 25 bp, Homo sapien
cagacataaatactagtagagaggc

SEQ ID NO: 4160980 - DNA, 25 bp, Homo sapien
gatttccaggtgctacgctccagta

SEQ ID NO: 4160981 - DNA, 25 bp, Homo sapien
gccaaacgctgacataacattttta

SEQ ID NO: 4160982 - DNA, 25 bp, Homo sapien
atctgttaagccaaacgctgacata

SEQ ID NO: 4160983 - DNA, 25 bp, Homo sapien
taagccaaacgctgacataacattt

SEQ ID NO: 4160984 - DNA, 25 bp, Homo sapien
tgttaagccaaacgctgacataaca

SEQ ID NO: 4160985 - DNA, 25 bp, Homo sapien
aagactctgcactcttttggccggg

SEQ ID NO: 4160986 - DNA, 25 bp, Homo sapien
tctgccgaacaaggcctagcactct

SEQ ID NO: 4160987 - DNA, 25 bp, Homo sapien
cagactaatttctctaagggcaaac

SEQ ID NO: 4160988 - DNA, 25 bp, Homo sapien
tctaacttacatatggagccactat

SEQ ID NO: 4160989 - DNA, 25 bp, Homo sapien
gaagcaatgctgtcgggtgttcctg

SEQ ID NO: 4160990 - DNA, 25 bp, Homo sapien
gagctcctgtatatggtggctgctg

SEQ ID NO: 4160991 - DNA, 25 bp, Homo sapien
cttgagtctgagctcctgtatatgg

SEQ ID NO: 4160992 - DNA, 25 bp, Homo sapien
gggtgttcctgaacgatcttctgca

SEQ ID NO: 4160993 - DNA, 25 bp, Homo sapien
ctagaccacccacttcaattcaaca

SEQ ID NO: 4160994 - DNA, 25 bp, Homo sapien
cagcctagaccacccacttcaattc

SEQ ID NO: 4160995 - DNA, 25 bp, Homo sapien
tgcagcctagaccacccacttcaat

SEQ ID NO: 4160996 - DNA, 25 bp, Homo sapien
gcctagaccacccacttcaattcaa

SEQ ID NO: 4160997 - DNA, 25 bp, Homo sapien
tagcgttcttctccttaccagttac

SEQ ID NO: 4160998 - DNA, 25 bp, Homo sapien
ctgctcaaattataaccagtagttg

SEQ ID NO: 4160999 - DNA, 25 bp, Homo sapien
tattaacacattgtaagagattgct

SEQ ID NO: 4161000 - DNA, 25 bp, Homo sapien
catttctggcaacatcacatagtct

SEQ ID NO: 4161001 - DNA, 25 bp, Homo sapien
cacagactagcacacgttgacatta

SEQ ID NO: 4161002 - DNA, 25 bp, Homo sapien
agtgtgaaccttgttaggcccctca

SEQ ID NO: 4161003 - DNA, 25 bp, Homo sapien
taagaatcactgttgaggttgcagg

SEQ ID NO: 4161004 - DNA, 25 bp, Homo sapien
caaacgaatcttgaaacaattaggg

SEQ ID NO: 4161005 - DNA, 25 bp, Homo sapien
taggtactacccataattatgtgag

SEQ ID NO: 4161006 - DNA, 25 bp, Homo sapien
tcacaaatgagtaagagagtcacct

SEQ ID NO: 4161007 - DNA, 25 bp, Homo sapien
ccttgtgctacattatgatggctac

SEQ ID NO: 4161008 - DNA, 25 bp, Homo sapien
ttctgaaggacctatctgagcctgg

SEQ ID NO: 4161009 - DNA, 25 bp, Homo sapien
caatggaatagcaacctgtcagggt

SEQ ID NO: 4161010 - DNA, 25 bp, Homo sapien
tcaatgagtaaggaactcctggtca

SEQ ID NO: 4161011 - DNA, 25 bp, Homo sapien
tactgttctgtgtagagtctgcaca

SEQ ID NO: 4161012 - DNA, 25 bp, Homo sapien
taaggttccacgtagtagtagactg

SEQ ID NO: 4161013 - DNA, 25 bp, Homo sapien
gctgctcagccctatacgtgtctaa

SEQ ID NO: 4161014 - DNA, 25 bp, Homo sapien
taactttcggaatagaagtgaccag

SEQ ID NO: 4161015 - DNA, 25 bp, Homo sapien
gcttagaaaatgagacggagcccac

SEQ ID NO: 4161016 - DNA, 25 bp, Homo sapien
tgtatttgccctctaaaggtatggg

SEQ ID NO: 4161017 - DNA, 25 bp, Homo sapien
gcggctgctgtgcaccatagccggc

SEQ ID NO: 4161018 - DNA, 25 bp, Homo sapien
tgctgtgcaccatagccggcctgtt

SEQ ID NO: 4161019 - DNA, 25 bp, Homo sapien
tgcggctgctgtgcaccatagccgg

SEQ ID NO: 4161020 - DNA, 25 bp, Homo sapien
gctgctgtgcaccatagccggcctg

SEQ ID NO: 4161021 - DNA, 25 bp, Homo sapien
tttatctccccaccagaaaactgaa

SEQ ID NO: 4161022 - DNA, 25 bp, Homo sapien
gggaaaacttgcactaagtcgccta

SEQ ID NO: 4161023 - DNA, 25 bp, Homo sapien
tatcaatgtactacaaatcaaggaa

SEQ ID NO: 4161024 - DNA, 25 bp, Homo sapien
gataatgttagtaagacagctttgt

SEQ ID NO: 4161025 - DNA, 25 bp, Homo sapien
gcatagtgaggaccgaaatcccgag

SEQ ID NO: 4161026 - DNA, 25 bp, Homo sapien
tataaaatgcaaacgcctgagtccc

SEQ ID NO: 4161027 - DNA, 25 bp, Homo sapien
tagccttttatggagtaagtctgcc

SEQ ID NO: 4161028 - DNA, 25 bp, Homo sapien
taagtctgccaactccagtctaggt

SEQ ID NO: 4161029 - DNA, 25 bp, Homo sapien
ggaaactggcaaaccaacagtgtca

SEQ ID NO: 4161030 - DNA, 25 bp, Homo sapien
tctccaagcagagtatttagttgac

SEQ ID NO: 4161031 - DNA, 25 bp, Homo sapien
caagttaatagactagtaggatcag

SEQ ID NO: 4161032 - DNA, 25 bp, Homo sapien
cagtgtcaaagatggtccaatgtta

SEQ ID NO: 4161033 - DNA, 25 bp, Homo sapien
ctgcagctacttgcaatgaaacctc

SEQ ID NO: 4161034 - DNA, 25 bp, Homo sapien
gactggaatcctgtcagcattaaat

SEQ ID NO: 4161035 - DNA, 25 bp, Homo sapien
ctctccattgactggaatcctgtca

SEQ ID NO: 4161036 - DNA, 25 bp, Homo sapien
gctacttgcaatgaaacctctccat

SEQ ID NO: 4161037 - DNA, 25 bp, Homo sapien
cttttatctctaccatgaaacacac

SEQ ID NO: 4161038 - DNA, 25 bp, Homo sapien
tgtaacaagcagagtggtagattcc

SEQ ID NO: 4161039 - DNA, 25 bp, Homo sapien
tagtcttactgttaggtggaccaaa

SEQ ID NO: 4161040 - DNA, 25 bp, Homo sapien
taatccctgagagcaaattcctgac

SEQ ID NO: 4161041 - DNA, 25 bp, Homo sapien
gaccaagtagttatcaaagaggcat

SEQ ID NO: 4161042 - DNA, 25 bp, Homo sapien
ggttgttgaggtccagtctgctgac

SEQ ID NO: 4161043 - DNA, 25 bp, Homo sapien
taattgctcgcctggtactgctgtg

SEQ ID NO: 4161044 - DNA, 25 bp, Homo sapien
ggttacgcgcataaggattaggccc

SEQ ID NO: 4161045 - DNA, 25 bp, Homo sapien
tggtcttggttgataggccccaggt

SEQ ID NO: 4161046 - DNA, 25 bp, Homo sapien
ggaggccaatagctagcagctacat

SEQ ID NO: 4161047 - DNA, 25 bp, Homo sapien
taatatcctccggacaagggaagct

SEQ ID NO: 4161048 - DNA, 25 bp, Homo sapien
tagtactggagtcttttgggaggcc

SEQ ID NO: 4161049 - DNA, 25 bp, Homo sapien
gtaagatggctaaacctcaccctag

SEQ ID NO: 4161050 - DNA, 25 bp, Homo sapien
tttattcaggctctaccaaccccca

SEQ ID NO: 4161051 - DNA, 25 bp, Homo sapien
taaaccaacgattaccaaatgcatt

SEQ ID NO: 4161052 - DNA, 25 bp, Homo sapien
tcatcctatgaagtaataaagttca

SEQ ID NO: 4161053 - DNA, 25 bp, Homo sapien
taacctttcatcctatgaagtaata

SEQ ID NO: 4161054 - DNA, 25 bp, Homo sapien
ctaatcaagctgtatgtagagactg

SEQ ID NO: 4161055 - DNA, 25 bp, Homo sapien
ttgcggaggagtttaatagttacac

SEQ ID NO: 4161056 - DNA, 25 bp, Homo sapien
gatgtgtactcttcctattgatgag

SEQ ID NO: 4161057 - DNA, 25 bp, Homo sapien
cacgatgagattgcctaccatttta

SEQ ID NO: 4161058 - DNA, 25 bp, Homo sapien
caatcaatattgagacatttctctt

SEQ ID NO: 4161059 - DNA, 25 bp, Homo sapien
tgaagtttcttacttcaaataactg

SEQ ID NO: 4161060 - DNA, 25 bp, Homo sapien
tatagggtttaatcaggccaaaaca

SEQ ID NO: 4161061 - DNA, 25 bp, Homo sapien
tcttagacctatgatgtcattcatc

SEQ ID NO: 4161062 - DNA, 25 bp, Homo sapien
ttcacaagatgctcaaatactccag

SEQ ID NO: 4161063 - DNA, 25 bp, Homo sapien
ggcaacatctcttttggaattccta

SEQ ID NO: 4161064 - DNA, 25 bp, Homo sapien
tctcctccctgttgctaaatttggt

SEQ ID NO: 4161065 - DNA, 25 bp, Homo sapien
gtcatctggactgcattccatttag

SEQ ID NO: 4161066 - DNA, 25 bp, Homo sapien
cctcttgtgggttggactcaggtcc

SEQ ID NO: 4161067 - DNA, 25 bp, Homo sapien
gcagcaggtacagctaggcctcttg

SEQ ID NO: 4161068 - DNA, 25 bp, Homo sapien
gatgaacaaccaacagtgacccagg

SEQ ID NO: 4161069 - DNA, 25 bp, Homo sapien
catgggtgtctgcaagtcaactggg

SEQ ID NO: 4161070 - DNA, 25 bp, Homo sapien
tatagattcctaggcataacaccag

SEQ ID NO: 4161071 - DNA, 25 bp, Homo sapien
ggaagtcagtctcagattcattgta

SEQ ID NO: 4161072 - DNA, 25 bp, Homo sapien
caggtcctgtgggttatacttcaaa

SEQ ID NO: 4161073 - DNA, 25 bp, Homo sapien
gcttcatccggtgaggcctttagaa

SEQ ID NO: 4161074 - DNA, 25 bp, Homo sapien
cacagctaagttataaagagcggac

SEQ ID NO: 4161075 - DNA, 25 bp, Homo sapien
aagagcggaccacttttggcagaaa

SEQ ID NO: 4161076 - DNA, 25 bp, Homo sapien
tggccattattgaagccaggtggtg

SEQ ID NO: 4161077 - DNA, 25 bp, Homo sapien
tgcttttcatacaaactctaacccg

SEQ ID NO: 4161078 - DNA, 25 bp, Homo sapien
cccaagaggacttcaagcatatcca

SEQ ID NO: 4161079 - DNA, 25 bp, Homo sapien
gttgcccaagaggacttcaagcata

SEQ ID NO: 4161080 - DNA, 25 bp, Homo sapien
ccaagaggacttcaagcatatccat

SEQ ID NO: 4161081 - DNA, 25 bp, Homo sapien
tgcccaagaggacttcaagcatatc

SEQ ID NO: 4161082 - DNA, 25 bp, Homo sapien
ttaaatctatgtttggcattcaaag

SEQ ID NO: 4161083 - DNA, 25 bp, Homo sapien
ggcaacgcttaaatctatgtttggc

SEQ ID NO: 4161084 - DNA, 25 bp, Homo sapien
aagattctgtaatttggcatgtaac

SEQ ID NO: 4161085 - DNA, 25 bp, Homo sapien
tagttttactgaaagtgtgtttata

SEQ ID NO: 4161086 - DNA, 25 bp, Homo sapien
tcacgggttgtagcttttgctttcc

SEQ ID NO: 4161087 - DNA, 25 bp, Homo sapien
cttggtgcccacaactggtaattct

SEQ ID NO: 4161088 - DNA, 25 bp, Homo sapien
tccaccacggctgctttcacgggtt

SEQ ID NO: 4161089 - DNA, 25 bp, Homo sapien
tctggaacctgccacgatacaaccg

SEQ ID NO: 4161090 - DNA, 25 bp, Homo sapien
gagattgcaaactaacagcacagac

SEQ ID NO: 4161091 - DNA, 25 bp, Homo sapien
gccaagctggagattgcaaactaac

SEQ ID NO: 4161092 - DNA, 25 bp, Homo sapien
caggtccagccaagctggagattgc

SEQ ID NO: 4161093 - DNA, 25 bp, Homo sapien
gagtctgttgcctgttccatttcct

SEQ ID NO: 4161094 - DNA, 25 bp, Homo sapien
cagttacggtggcagcaagaatcac

SEQ ID NO: 4161095 - DNA, 25 bp, Homo sapien
aaagaccatcattgagtaccaggag

SEQ ID NO: 4161096 - DNA, 25 bp, Homo sapien
ggtgtgtgcacgacttctaaagact

SEQ ID NO: 4161097 - DNA, 25 bp, Homo sapien
gtattactcagaggttgtgctgccc

SEQ ID NO: 4161098 - DNA, 25 bp, Homo sapien
gaggctgcttcacaaaaacttgcag

SEQ ID NO: 4161099 - DNA, 25 bp, Homo sapien
cacagggtacctttagtggttgcca

SEQ ID NO: 4161100 - DNA, 25 bp, Homo sapien
gaaagctacgctactcatcgactga

SEQ ID NO: 4161101 - DNA, 25 bp, Homo sapien
tcatgacgtttagagagaggctgct

SEQ ID NO: 4161102 - DNA, 25 bp, Homo sapien
tatatcagctctgataatatgcagg

SEQ ID NO: 4161103 - DNA, 25 bp, Homo sapien
tatcagctctgataatatgcaggga

SEQ ID NO: 4161104 - DNA, 25 bp, Homo sapien
tttatatcagctctgataatatgca

SEQ ID NO: 4161105 - DNA, 25 bp, Homo sapien
cagctctgataatatgcagggaatg

SEQ ID NO: 4161106 - DNA, 25 bp, Homo sapien
tcaaagtccacatcaataccacaag

SEQ ID NO: 4161107 - DNA, 25 bp, Homo sapien
tgcgtccaagtccaaatgtaaagct

SEQ ID NO: 4161108 - DNA, 25 bp, Homo sapien
tatggcagcaatgtatcaccaaacc

SEQ ID NO: 4161109 - DNA, 25 bp, Homo sapien
caagaacaatgcctctagccaccaa

SEQ ID NO: 4161110 - DNA, 25 bp, Homo sapien
gagagtcatttgaacagaaagccca

SEQ ID NO: 4161111 - DNA, 25 bp, Homo sapien
gaaagcccatgctatgtgatccctt

SEQ ID NO: 4161112 - DNA, 25 bp, Homo sapien
tttgaacagaaagcccatgctatgt

SEQ ID NO: 4161113 - DNA, 25 bp, Homo sapien
tcatttgaacagaaagcccatgcta

SEQ ID NO: 4161114 - DNA, 25 bp, Homo sapien
catgctaaccatctctgtatacatc

SEQ ID NO: 4161115 - DNA, 25 bp, Homo sapien
tgctaaccatctctgtatacatcca

SEQ ID NO: 4161116 - DNA, 25 bp, Homo sapien
ttgtgcaagagccatgctaaccatc

SEQ ID NO: 4161117 - DNA, 25 bp, Homo sapien
gcaagagccatgctaaccatctctg

SEQ ID NO: 4161118 - DNA, 25 bp, Homo sapien
tctcttgccagttgagctttatgat

SEQ ID NO: 4161119 - DNA, 25 bp, Homo sapien
ccaatctcttgccagttgagcttta

SEQ ID NO: 4161120 - DNA, 25 bp, Homo sapien
tgcccaatctcttgccagttgagct

SEQ ID NO: 4161121 - DNA, 25 bp, Homo sapien
cctgcccaatctcttgccagttgag

SEQ ID NO: 4161122 - DNA, 25 bp, Homo sapien
tttgtagatagatgcaaaagattcc

SEQ ID NO: 4161123 - DNA, 25 bp, Homo sapien
tccacgtgtaaagtattgttaatac

SEQ ID NO: 4161124 - DNA, 25 bp, Homo sapien
tacttcttgttgtatggtagaattc

SEQ ID NO: 4161125 - DNA, 25 bp, Homo sapien
gatgcaaaagattccacgtgtaaag

SEQ ID NO: 4161126 - DNA, 25 bp, Homo sapien
gtacagagatgtagcatgtagtctc

SEQ ID NO: 4161127 - DNA, 25 bp, Homo sapien
gggacataatcatgaattcacagcc

SEQ ID NO: 4161128 - DNA, 25 bp, Homo sapien
tgcacacataacgtggtgaagttct

SEQ ID NO: 4161129 - DNA, 25 bp, Homo sapien
tctttggtgtaggactctatgctca

SEQ ID NO: 4161130 - DNA, 25 bp, Homo sapien
taacaagccaggaactcgtgctgcc

SEQ ID NO: 4161131 - DNA, 25 bp, Homo sapien
aaactttcagcacaagctgcagagc

SEQ ID NO: 4161132 - DNA, 25 bp, Homo sapien
tctcctggtggaactaccctgcgag

SEQ ID NO: 4161133 - DNA, 25 bp, Homo sapien
cctgcgaggaggaaataacaagcca

SEQ ID NO: 4161134 - DNA, 25 bp, Homo sapien
attgtaggatataatcccatgtaag

SEQ ID NO: 4161135 - DNA, 25 bp, Homo sapien
tgtaggatataatcccatgtaaggc

SEQ ID NO: 4161136 - DNA, 25 bp, Homo sapien
taggatataatcccatgtaaggcat

SEQ ID NO: 4161137 - DNA, 25 bp, Homo sapien
gtaggatataatcccatgtaaggca

SEQ ID NO: 4161138 - DNA, 25 bp, Homo sapien
cacttgcgtgtcttctcaggttcta

SEQ ID NO: 4161139 - DNA, 25 bp, Homo sapien
tctctgctatggtaactttatatgt

SEQ ID NO: 4161140 - DNA, 25 bp, Homo sapien
tgtgcttggaagaccctcatcatct

SEQ ID NO: 4161141 - DNA, 25 bp, Homo sapien
cttttataacccatattaatagtga

SEQ ID NO: 4161142 - DNA, 25 bp, Homo sapien
atttttcacggttctggaagctggg

SEQ ID NO: 4161143 - DNA, 25 bp, Homo sapien
aagtccatgatcaaagtgctggcat

SEQ ID NO: 4161144 - DNA, 25 bp, Homo sapien
ttatttttcacggttctggaagctg

SEQ ID NO: 4161145 - DNA, 25 bp, Homo sapien
aagctgggaagtccatgatcaaagt

SEQ ID NO: 4161146 - DNA, 25 bp, Homo sapien
ttagctgaagtcatctttttcaaac

SEQ ID NO: 4161147 - DNA, 25 bp, Homo sapien
gctccaggcataggtgcactgtttg

SEQ ID NO: 4161148 - DNA, 25 bp, Homo sapien
actgtgctccaggcataggtgcact

SEQ ID NO: 4161149 - DNA, 25 bp, Homo sapien
tgtgctccaggcataggtgcactgt

SEQ ID NO: 4161150 - DNA, 25 bp, Homo sapien
ttattggaaagctattgaggacctt

SEQ ID NO: 4161151 - DNA, 25 bp, Homo sapien
aaatagcctcctttaggtatgcatc

SEQ ID NO: 4161152 - DNA, 25 bp, Homo sapien
ccatattttgataatccgatgaagc

SEQ ID NO: 4161153 - DNA, 25 bp, Homo sapien
ttgataatccgatgaagcaacagaa

SEQ ID NO: 4161154 - DNA, 25 bp, Homo sapien
gcctcctttaggtatgcatcgcaca

SEQ ID NO: 4161155 - DNA, 25 bp, Homo sapien
tcacaatgccggaggagctgctaag

SEQ ID NO: 4161156 - DNA, 25 bp, Homo sapien
tcaaactggcagttgaaggcaaaat

SEQ ID NO: 4161157 - DNA, 25 bp, Homo sapien
aaggggtagtgaaagatccagagta

SEQ ID NO: 4161158 - DNA, 25 bp, Homo sapien
catgtttttcacaatgccggaggag

SEQ ID NO: 4161159 - DNA, 25 bp, Homo sapien
ccttctccaatatatagtgagtcag

SEQ ID NO: 4161160 - DNA, 25 bp, Homo sapien
tctccaatatatagtgagtcagtca

SEQ ID NO: 4161161 - DNA, 25 bp, Homo sapien
ttctccaatatatagtgagtcagtc

SEQ ID NO: 4161162 - DNA, 25 bp, Homo sapien
ctccaatatatagtgagtcagtcat

SEQ ID NO: 4161163 - DNA, 25 bp, Homo sapien
taacactcggggaggcggcattcag

SEQ ID NO: 4161164 - DNA, 25 bp, Homo sapien
gcggcattcagttttgaggtggctt

SEQ ID NO: 4161165 - DNA, 25 bp, Homo sapien
taatagtaacactcggggaggcggc

SEQ ID NO: 4161166 - DNA, 25 bp, Homo sapien
tctgtgatataatagtaacactcgg

SEQ ID NO: 4161167 - DNA, 25 bp, Homo sapien
tgctgacagctggattctggttgcc

SEQ ID NO: 4161168 - DNA, 25 bp, Homo sapien
tggagataggcaaaatgacgctcac

SEQ ID NO: 4161169 - DNA, 25 bp, Homo sapien
gacgctcactaggaagaactctagc

SEQ ID NO: 4161170 - DNA, 25 bp, Homo sapien
gatgcaccatgtggcttacttaggc

SEQ ID NO: 4161171 - DNA, 25 bp, Homo sapien
tgactctaattgaccaggaggccag

SEQ ID NO: 4161172 - DNA, 25 bp, Homo sapien
gttgactctaattgaccaggaggcc

SEQ ID NO: 4161173 - DNA, 25 bp, Homo sapien
ttgactctaattgaccaggaggcca

SEQ ID NO: 4161174 - DNA, 25 bp, Homo sapien
ggatgtctcccactctgccggaggc

SEQ ID NO: 4161175 - DNA, 25 bp, Homo sapien
tctggatgtctcccactctgccgga

SEQ ID NO: 4161176 - DNA, 25 bp, Homo sapien
tcctttctggatgtctcccactctg

SEQ ID NO: 4161177 - DNA, 25 bp, Homo sapien
cctgctgtcctttctggatgtctcc

SEQ ID NO: 4161178 - DNA, 25 bp, Homo sapien
gcttctgcatgtgccctgccttccc

SEQ ID NO: 4161179 - DNA, 25 bp, Homo sapien
aacacagtatctgtttcccgtcctt

SEQ ID NO: 4161180 - DNA, 25 bp, Homo sapien
tggaacacagtatctgtttcccgtc

SEQ ID NO: 4161181 - DNA, 25 bp, Homo sapien
tgccttccctggtttgagctcttcc

SEQ ID NO: 4161182 - DNA, 25 bp, Homo sapien
agttgctgaatgaaatatgtgatgc

SEQ ID NO: 4161183 - DNA, 25 bp, Homo sapien
ggaatgtgcttatggcagttgccaa

SEQ ID NO: 4161184 - DNA, 25 bp, Homo sapien
gcttgccctatgattggaatgtgct

SEQ ID NO: 4161185 - DNA, 25 bp, Homo sapien
cagcctctgaacagttgctgaatga

SEQ ID NO: 4161186 - DNA, 25 bp, Homo sapien
tctctctcgtttctttaacttttga

SEQ ID NO: 4161187 - DNA, 25 bp, Homo sapien
tggaattatctctcctcccttaact

SEQ ID NO: 4161188 - DNA, 25 bp, Homo sapien
ctctctcgtttctttaacttttgat

SEQ ID NO: 4161189 - DNA, 25 bp, Homo sapien
ttctttaacttttgattcttcatca

SEQ ID NO: 4161190 - DNA, 25 bp, Homo sapien
tgtcatgggcaagacttgaccagac

SEQ ID NO: 4161191 - DNA, 25 bp, Homo sapien
ggtctgtgttcctttcatgctctcg

SEQ ID NO: 4161192 - DNA, 25 bp, Homo sapien
tcctcggtattgattgtcatgggca

SEQ ID NO: 4161193 - DNA, 25 bp, Homo sapien
gtatcctggacagcacaccaaatat

SEQ ID NO: 4161194 - DNA, 25 bp, Homo sapien
tacctctttagttctgttccctgct

SEQ ID NO: 4161195 - DNA, 25 bp, Homo sapien
ttacctctttagttctgttccctgc

SEQ ID NO: 4161196 - DNA, 25 bp, Homo sapien
attagggttactgtggctgagctca

SEQ ID NO: 4161197 - DNA, 25 bp, Homo sapien
tattagggttactgtggctgagctc

SEQ ID NO: 4161198 - DNA, 25 bp, Homo sapien
ttagggttactgtggctgagctcat

SEQ ID NO: 4161199 - DNA, 25 bp, Homo sapien
ttgcatttttcagggtcacttgaca

SEQ ID NO: 4161200 - DNA, 25 bp, Homo sapien
tgggaagagggcattgaaaagatta

SEQ ID NO: 4161201 - DNA, 25 bp, Homo sapien
tcagattgcatttttcagggtcact

SEQ ID NO: 4161202 - DNA, 25 bp, Homo sapien
catctcagctgccttagtgctggga

SEQ ID NO: 4161203 - DNA, 25 bp, Homo sapien
cttgttcttccacactcactcatgc

SEQ ID NO: 4161204 - DNA, 25 bp, Homo sapien
cttccacactcactcatgccatagc

SEQ ID NO: 4161205 - DNA, 25 bp, Homo sapien
tcttccacactcactcatgccatag

SEQ ID NO: 4161206 - DNA, 25 bp, Homo sapien
gttcttccacactcactcatgccat

SEQ ID NO: 4161207 - DNA, 25 bp, Homo sapien
gctgccacatggatgcttaatctcc

SEQ ID NO: 4161208 - DNA, 25 bp, Homo sapien
tcctttgactctctgctacaccttt

SEQ ID NO: 4161209 - DNA, 25 bp, Homo sapien
acacctttttgtgcgttatctgaaa

SEQ ID NO: 4161210 - DNA, 25 bp, Homo sapien
gactctctgctacacctttttgtgc

SEQ ID NO: 4161211 - DNA, 25 bp, Homo sapien
ccaggagccatacactgactgatat

SEQ ID NO: 4161212 - DNA, 25 bp, Homo sapien
ggtgtagaatgtcaacccatccctg

SEQ ID NO: 4161213 - DNA, 25 bp, Homo sapien
gaaaatagtggtctgactagtctcc

SEQ ID NO: 4161214 - DNA, 25 bp, Homo sapien
tggaacctctccacccaagtttggc

SEQ ID NO: 4161215 - DNA, 25 bp, Homo sapien
ccaacccaaatctctttagtctgaa

SEQ ID NO: 4161216 - DNA, 25 bp, Homo sapien
cccaacccaaatctctttagtctga

SEQ ID NO: 4161217 - DNA, 25 bp, Homo sapien
caacccaaatctctttagtctgaat

SEQ ID NO: 4161218 - DNA, 25 bp, Homo sapien
aacccaaatctctttagtctgaata

SEQ ID NO: 4161219 - DNA, 25 bp, Homo sapien
acatgcatataaaaacccaaccatt

SEQ ID NO: 4161220 - DNA, 25 bp, Homo sapien
acacatgcatataaaaacccaacca

SEQ ID NO: 4161221 - DNA, 25 bp, Homo sapien
atttcacacatgcatataaaaaccc

SEQ ID NO: 4161222 - DNA, 25 bp, Homo sapien
acccaaccattatgcttataaacca

SEQ ID NO: 4161223 - DNA, 25 bp, Homo sapien
tggtagtgtgaaaatgacccaggga

SEQ ID NO: 4161224 - DNA, 25 bp, Homo sapien
gaatggtagtgtgaaaatgacccag

SEQ ID NO: 4161225 - DNA, 25 bp, Homo sapien
atggtagtgtgaaaatgacccaggg

SEQ ID NO: 4161226 - DNA, 25 bp, Homo sapien
aatggtagtgtgaaaatgacccagg

SEQ ID NO: 4161227 - DNA, 25 bp, Homo sapien
ctgcctaggctctgcattagaagca

SEQ ID NO: 4161228 - DNA, 25 bp, Homo sapien
ttagaagcaggcaattggaagggcc

SEQ ID NO: 4161229 - DNA, 25 bp, Homo sapien
caaaaggcacactgtagaggttggc

SEQ ID NO: 4161230 - DNA, 25 bp, Homo sapien
gaatgcgagagtccaacacaggagt

SEQ ID NO: 4161231 - DNA, 25 bp, Homo sapien
gtttactaagaagagcactggactg

SEQ ID NO: 4161232 - DNA, 25 bp, Homo sapien
gaaagttctctactctctgggaagg

SEQ ID NO: 4161233 - DNA, 25 bp, Homo sapien
ggtttactaagaagagcactggact

SEQ ID NO: 4161234 - DNA, 25 bp, Homo sapien
cttttactggaaagttctctactct

SEQ ID NO: 4161235 - DNA, 25 bp, Homo sapien
gataaagctagaaagtctgaacatt

SEQ ID NO: 4161236 - DNA, 25 bp, Homo sapien
ttcattcccaatttgtgtgtgttgg

SEQ ID NO: 4161237 - DNA, 25 bp, Homo sapien
tcctaaattaatgtgcaagtaatgt

SEQ ID NO: 4161238 - DNA, 25 bp, Homo sapien
tcaaagatatcactgtcctttatca

SEQ ID NO: 4161239 - DNA, 25 bp, Homo sapien
tccacgagttttcttacaagccaaa

SEQ ID NO: 4161240 - DNA, 25 bp, Homo sapien
gctaacatgactaggaatttatgcc

SEQ ID NO: 4161241 - DNA, 25 bp, Homo sapien
acaccgcaggctcctaaagtattgg

SEQ ID NO: 4161242 - DNA, 25 bp, Homo sapien
tgtagactccattaatttggctagg

SEQ ID NO: 4161243 - DNA, 25 bp, Homo sapien
catctttgtacctgtaaatgagtcg

SEQ ID NO: 4161244 - DNA, 25 bp, Homo sapien
gagtaagaacatggactcgtcacat

SEQ ID NO: 4161245 - DNA, 25 bp, Homo sapien
cttgaagtccctatcttaaatgaaa

SEQ ID NO: 4161246 - DNA, 25 bp, Homo sapien
ggcaatgaattccttatcttggatt

SEQ ID NO: 4161247 - DNA, 25 bp, Homo sapien
gactgattattggtgtgtgtcacca

SEQ ID NO: 4161248 - DNA, 25 bp, Homo sapien
tctagggcagtgtaggtgactttca

SEQ ID NO: 4161249 - DNA, 25 bp, Homo sapien
atggatgagtggtaggtacatttaa

SEQ ID NO: 4161250 - DNA, 25 bp, Homo sapien
tcctgagattaagcaatcccccaag

SEQ ID NO: 4161251 - DNA, 25 bp, Homo sapien
ttttccttgaactacacaatcctgt

SEQ ID NO: 4161252 - DNA, 25 bp, Homo sapien
ccgttgtcttgggttcaggcatttc

SEQ ID NO: 4161253 - DNA, 25 bp, Homo sapien
gaagctgaaagatattatgacggaa

SEQ ID NO: 4161254 - DNA, 25 bp, Homo sapien
taatcagtggagaattagagctttc

SEQ ID NO: 4161255 - DNA, 25 bp, Homo sapien
tgggttatggaaaagtaaggatgat

SEQ ID NO: 4161256 - DNA, 25 bp, Homo sapien
attagaacactctgtattaagccag

SEQ ID NO: 4161257 - DNA, 25 bp, Homo sapien
tatcttcaagagattcagacccaat

SEQ ID NO: 4161258 - DNA, 25 bp, Homo sapien
gatgataatcacagtaaaaggagtc

SEQ ID NO: 4161259 - DNA, 25 bp, Homo sapien
gagacaacaataccaaggaagaaca

SEQ ID NO: 4161260 - DNA, 25 bp, Homo sapien
gacaacaataccaaggaagaacagg

SEQ ID NO: 4161261 - DNA, 25 bp, Homo sapien
caacaataccaaggaagaacaggtt

SEQ ID NO: 4161262 - DNA, 25 bp, Homo sapien
agagacaacaataccaaggaagaac

SEQ ID NO: 4161263 - DNA, 25 bp, Homo sapien
tataactgggggtctggcaatcatc

SEQ ID NO: 4161264 - DNA, 25 bp, Homo sapien
agaacatataactgggggtctggca

SEQ ID NO: 4161265 - DNA, 25 bp, Homo sapien
tatgtctcttcgtagtcaaaggttt

SEQ ID NO: 4161266 - DNA, 25 bp, Homo sapien
ggcaatcatcttatgtctcttcgta

SEQ ID NO: 4161267 - DNA, 25 bp, Homo sapien
ttaaactgtaaattgtcatgtccac

SEQ ID NO: 4161268 - DNA, 25 bp, Homo sapien
actcatccacacttttacagctttt

SEQ ID NO: 4161269 - DNA, 25 bp, Homo sapien
tttttaaactgtaaattgtcatgtc

SEQ ID NO: 4161270 - DNA, 25 bp, Homo sapien
ttacactcatccacacttttacagc

SEQ ID NO: 4161271 - DNA, 25 bp, Homo sapien
tttgccacgttctctacatctgtag

SEQ ID NO: 4161272 - DNA, 25 bp, Homo sapien
atttgtagagtttctatgaattatc

SEQ ID NO: 4161273 - DNA, 25 bp, Homo sapien
ccacatttaacacacttgtatggtt

SEQ ID NO: 4161274 - DNA, 25 bp, Homo sapien
aaagctttgccacgttctctacatc

SEQ ID NO: 4161275 - DNA, 25 bp, Homo sapien
tgtttgtacaagtactgtcacatct

SEQ ID NO: 4161276 - DNA, 25 bp, Homo sapien
agttggaggtgtttgtacaagtact

SEQ ID NO: 4161277 - DNA, 25 bp, Homo sapien
ttgagaacttatgactaggcatggt

SEQ ID NO: 4161278 - DNA, 25 bp, Homo sapien
gagaacttatgactaggcatggtgg

SEQ ID NO: 4161279 - DNA, 25 bp, Homo sapien
agtggcacaattgtagctgccacct

SEQ ID NO: 4161280 - DNA, 25 bp, Homo sapien
gcacaattgtagctgccaccttgaa

SEQ ID NO: 4161281 - DNA, 25 bp, Homo sapien
gggtgaaaccccataatgaattatg

SEQ ID NO: 4161282 - DNA, 25 bp, Homo sapien
tggcacaattgtagctgccaccttg

SEQ ID NO: 4161283 - DNA, 25 bp, Homo sapien
ttatccgccggcctctgccgcccaa

SEQ ID NO: 4161284 - DNA, 25 bp, Homo sapien
tcaagttatccgccggcctctgccg

SEQ ID NO: 4161285 - DNA, 25 bp, Homo sapien
agttatccgccggcctctgccgccc

SEQ ID NO: 4161286 - DNA, 25 bp, Homo sapien
aagttatccgccggcctctgccgcc

SEQ ID NO: 4161287 - DNA, 25 bp, Homo sapien
ctttgttgttgcattgcgtggtaca

SEQ ID NO: 4161288 - DNA, 25 bp, Homo sapien
tgttgttgcattgcgtggtacactg

SEQ ID NO: 4161289 - DNA, 25 bp, Homo sapien
gttgcattgcgtggtacactgggcc

SEQ ID NO: 4161290 - DNA, 25 bp, Homo sapien
ggctttgttgttgcattgcgtggta

SEQ ID NO: 4161291 - DNA, 25 bp, Homo sapien
ttcctttggatagtgcctgtccttc

SEQ ID NO: 4161292 - DNA, 25 bp, Homo sapien
tcagcttcaaggtcatattctcaga

SEQ ID NO: 4161293 - DNA, 25 bp, Homo sapien
gctggaagatgttcagtaagtgctt

SEQ ID NO: 4161294 - DNA, 25 bp, Homo sapien
actccagattatactagcatcgttg

SEQ ID NO: 4161295 - DNA, 25 bp, Homo sapien
taaagcctgcttgatcgtgatgaat

SEQ ID NO: 4161296 - DNA, 25 bp, Homo sapien
tgcatatgttgaacccccgtttcat

SEQ ID NO: 4161297 - DNA, 25 bp, Homo sapien
tgaataagctttttggtatgctggt

SEQ ID NO: 4161298 - DNA, 25 bp, Homo sapien
ccgtttcatcccaggtgtaaagcct

SEQ ID NO: 4161299 - DNA, 25 bp, Homo sapien
gcagaaacagacatctgcaacttgt

SEQ ID NO: 4161300 - DNA, 25 bp, Homo sapien
cagacatctgcaacttgtaatcaac

SEQ ID NO: 4161301 - DNA, 25 bp, Homo sapien
gcaacttgtaatcaactggttgtaa

SEQ ID NO: 4161302 - DNA, 25 bp, Homo sapien
taatcaactggttgtaaacacctct

SEQ ID NO: 4161303 - DNA, 25 bp, Homo sapien
agatgggtaatacgctgacctggta

SEQ ID NO: 4161304 - DNA, 25 bp, Homo sapien
tgggtaatacgctgacctggtaaca

SEQ ID NO: 4161305 - DNA, 25 bp, Homo sapien
taatacgctgacctggtaacaaggt

SEQ ID NO: 4161306 - DNA, 25 bp, Homo sapien
tacgctgacctggtaacaaggttca

SEQ ID NO: 4161307 - DNA, 25 bp, Homo sapien
gccttcctcgtaattccaccaatgt

SEQ ID NO: 4161308 - DNA, 25 bp, Homo sapien
tccttgcgtctcatcggcccatgga

SEQ ID NO: 4161309 - DNA, 25 bp, Homo sapien
tcatcggcccatggatcttcccggt

SEQ ID NO: 4161310 - DNA, 25 bp, Homo sapien
cttcccggttggcttgtcactctct

SEQ ID NO: 4161311 - DNA, 25 bp, Homo sapien
cacaggtcctcagggtgattatcca

SEQ ID NO: 4161312 - DNA, 25 bp, Homo sapien
gaaactagccgctgaagcctccaat

SEQ ID NO: 4161313 - DNA, 25 bp, Homo sapien
tgtggacaagtcagagggacctagc

SEQ ID NO: 4161314 - DNA, 25 bp, Homo sapien
agcctccaatggaacaagtaccagg

SEQ ID NO: 4161315 - DNA, 25 bp, Homo sapien
tgaaagttaaaagagtaatagtata

SEQ ID NO: 4161316 - DNA, 25 bp, Homo sapien
ctgaaagttaaaagagtaatagtat

SEQ ID NO: 4161317 - DNA, 25 bp, Homo sapien
agttaaaagagtaatagtatataag

SEQ ID NO: 4161318 - DNA, 25 bp, Homo sapien
ttaaaagagtaatagtatataagtg

SEQ ID NO: 4161319 - DNA, 25 bp, Homo sapien
tcttctttatcagcctcaggtggga

SEQ ID NO: 4161320 - DNA, 25 bp, Homo sapien
tacatcatagtgtgcctgcaatgcc

SEQ ID NO: 4161321 - DNA, 25 bp, Homo sapien
tattgcctgttgactccactgacca

SEQ ID NO: 4161322 - DNA, 25 bp, Homo sapien
tgaccagctcgaaagaccccatggt

SEQ ID NO: 4161323 - DNA, 25 bp, Homo sapien
agaaaaagctcccaccttgaaccat

SEQ ID NO: 4161324 - DNA, 25 bp, Homo sapien
gagaaaaagctcccaccttgaacca

SEQ ID NO: 4161325 - DNA, 25 bp, Homo sapien
gagagaaaaagctcccaccttgaac

SEQ ID NO: 4161326 - DNA, 25 bp, Homo sapien
gagagagaaaaagctcccaccttga

SEQ ID NO: 4161327 - DNA, 25 bp, Homo sapien
gctggtgtcctacgtgatgttcaga

SEQ ID NO: 4161328 - DNA, 25 bp, Homo sapien
tcagagtcgataagtgcaacagcat

SEQ ID NO: 4161329 - DNA, 25 bp, Homo sapien
taggacttgtcacccattcacggca

SEQ ID NO: 4161330 - DNA, 25 bp, Homo sapien
gaagtaatcccatatgtaagccgtg

SEQ ID NO: 4161331 - DNA, 25 bp, Homo sapien
tcttccttaccctgtgggggctcca

SEQ ID NO: 4161332 - DNA, 25 bp, Homo sapien
tgagaaatgcagcatccctccccac

SEQ ID NO: 4161333 - DNA, 25 bp, Homo sapien
catcttgtccctgcctgccgggggg

SEQ ID NO: 4161334 - DNA, 25 bp, Homo sapien
gaaaactctggacttgaatcctgtt

SEQ ID NO: 4161335 - DNA, 25 bp, Homo sapien
ggtccctggacagatcacaggctga

SEQ ID NO: 4161336 - DNA, 25 bp, Homo sapien
ctcctccccatcacactctgcctcc

SEQ ID NO: 4161337 - DNA, 25 bp, Homo sapien
gttcttttcagcggggagacaaata

SEQ ID NO: 4161338 - DNA, 25 bp, Homo sapien
cactctctccgcactcgatgggggt

SEQ ID NO: 4161339 - DNA, 25 bp, Homo sapien
accccgcccccatgcttgccatgcc

SEQ ID NO: 4161340 - DNA, 25 bp, Homo sapien
aattgattactgcccagctgagaaa

SEQ ID NO: 4161341 - DNA, 25 bp, Homo sapien
aggctcacaactgaaatagttaccc

SEQ ID NO: 4161342 - DNA, 25 bp, Homo sapien
cagaatctgtattagcaaagttgca

SEQ ID NO: 4161343 - DNA, 25 bp, Homo sapien
tgttgtcattatatcaaaccacagc

SEQ ID NO: 4161344 - DNA, 25 bp, Homo sapien
tcgcttgaggccagatttccatacc

SEQ ID NO: 4161345 - DNA, 25 bp, Homo sapien
gcctggcgaacagcccgtctctagt

SEQ ID NO: 4161346 - DNA, 25 bp, Homo sapien
tacacagccgaccagagcggtcgct

SEQ ID NO: 4161347 - DNA, 25 bp, Homo sapien
ctacacagccgaccagagcggtcgc

SEQ ID NO: 4161348 - DNA, 25 bp, Homo sapien
gaccctggaggacgaaggactccga

SEQ ID NO: 4161349 - DNA, 25 bp, Homo sapien
ctccgacgtacggacgcccagggat

SEQ ID NO: 4161350 - DNA, 25 bp, Homo sapien
tagtggttcccgctggcgcaaagaa

SEQ ID NO: 4161351 - DNA, 25 bp, Homo sapien
gatccgcgccgaagctagcacgcag

SEQ ID NO: 4161352 - DNA, 25 bp, Homo sapien
ccgtgggccttccgaacgcacatgc

SEQ ID NO: 4161353 - DNA, 25 bp, Homo sapien
ccttccgaacgcacatgctccacta

SEQ ID NO: 4161354 - DNA, 25 bp, Homo sapien
gtgggccttccgaacgcacatgctc

SEQ ID NO: 4161355 - DNA, 25 bp, Homo sapien
gggccttccgaacgcacatgctcca

SEQ ID NO: 4161356 - DNA, 25 bp, Homo sapien
tccacttatccaactctagctcttc

SEQ ID NO: 4161357 - DNA, 25 bp, Homo sapien
cagaagggggtgtactctcattttt

SEQ ID NO: 4161358 - DNA, 25 bp, Homo sapien
ctgcaaaattgttaagttatttctc

SEQ ID NO: 4161359 - DNA, 25 bp, Homo sapien
attgttaagttatttctcttcctat

SEQ ID NO: 4161360 - DNA, 25 bp, Homo sapien
attcttcttgcacactagatttcat

SEQ ID NO: 4161361 - DNA, 25 bp, Homo sapien
tgccaagcaatctccacatctcaat

SEQ ID NO: 4161362 - DNA, 25 bp, Homo sapien
tctctgccaagcaatctccacatct

SEQ ID NO: 4161363 - DNA, 25 bp, Homo sapien
tctctggtggcagctagaggatctt

SEQ ID NO: 4161364 - DNA, 25 bp, Homo sapien
ggcagctagaggatcttcatcctta

SEQ ID NO: 4161365 - DNA, 25 bp, Homo sapien
attccataagggttttgagctcttc

SEQ ID NO: 4161366 - DNA, 25 bp, Homo sapien
gctcttcttcagtgatgtgttctgg

SEQ ID NO: 4161367 - DNA, 25 bp, Homo sapien
cttcttcagtgatgtgttctggtac

SEQ ID NO: 4161368 - DNA, 25 bp, Homo sapien
tgagctcttcttcagtgatgtgttc

SEQ ID NO: 4161369 - DNA, 25 bp, Homo sapien
ccaaaggttgtccaaactgcatggc

SEQ ID NO: 4161370 - DNA, 25 bp, Homo sapien
gcattcagttgccaggttcagccgt

SEQ ID NO: 4161371 - DNA, 25 bp, Homo sapien
taaaagctgggaaacagtattctgc

SEQ ID NO: 4161372 - DNA, 25 bp, Homo sapien
tcctcagtggtttctagcagcttga

SEQ ID NO: 4161373 - DNA, 25 bp, Homo sapien
gaacgaattgcagagcctcttgcca

SEQ ID NO: 4161374 - DNA, 25 bp, Homo sapien
ctcttgagaatgctgagaaatctcc

SEQ ID NO: 4161375 - DNA, 25 bp, Homo sapien
tagtctgttgataaactcttgagaa

SEQ ID NO: 4161376 - DNA, 25 bp, Homo sapien
gttttctcttgggaacgaattgcag

SEQ ID NO: 4161377 - DNA, 25 bp, Homo sapien
cagaactgtatttctaacgcattta

SEQ ID NO: 4161378 - DNA, 25 bp, Homo sapien
acaaccctacagtcagttgggaaag

SEQ ID NO: 4161379 - DNA, 25 bp, Homo sapien
cagatatttaattgggaaaagacac

SEQ ID NO: 4161380 - DNA, 25 bp, Homo sapien
aaagacacaaccctacagtcagttg

SEQ ID NO: 4161381 - DNA, 25 bp, Homo sapien
ttttattatctttctacagtaaaca

SEQ ID NO: 4161382 - DNA, 25 bp, Homo sapien
tttctacagtaaacaaagtataatc

SEQ ID NO: 4161383 - DNA, 25 bp, Homo sapien
tatctttctacagtaaacaaagtat

SEQ ID NO: 4161384 - DNA, 25 bp, Homo sapien
tattatctttctacagtaaacaaag

SEQ ID NO: 4161385 - DNA, 25 bp, Homo sapien
tccataaaaaagtctaccaatggta

SEQ ID NO: 4161386 - DNA, 25 bp, Homo sapien
gacaaagagatgcacggggaaagct

SEQ ID NO: 4161387 - DNA, 25 bp, Homo sapien
ccagtttactgtaaaagatattaca

SEQ ID NO: 4161388 - DNA, 25 bp, Homo sapien
ctatttaactgggataaagattatt

SEQ ID NO: 4161389 - DNA, 25 bp, Homo sapien
cgcccaacaaccatcgagtttttgg

SEQ ID NO: 4161390 - DNA, 25 bp, Homo sapien
tgcagccacgccaaggacgtcacga

SEQ ID NO: 4161391 - DNA, 25 bp, Homo sapien
accatcgagtttttggggccagccg

SEQ ID NO: 4161392 - DNA, 25 bp, Homo sapien
acgaccccgcccaacaaccatcgag

SEQ ID NO: 4161393 - DNA, 25 bp, Homo sapien
tcgtctcccgccttcccgtccgcca

SEQ ID NO: 4161394 - DNA, 25 bp, Homo sapien
cgtctcccgccttcccgtccgccat

SEQ ID NO: 4161395 - DNA, 25 bp, Homo sapien
tctcgtctcccgccttcccgtccgc

SEQ ID NO: 4161396 - DNA, 25 bp, Homo sapien
gctcaaagaaaggcccggagcatcc

SEQ ID NO: 4161397 - DNA, 25 bp, Homo sapien
ctcaaagaaaggcccggagcatccc

SEQ ID NO: 4161398 - DNA, 25 bp, Homo sapien
tcaaagaaaggcccggagcatccca

SEQ ID NO: 4161399 - DNA, 25 bp, Homo sapien
agctcaaagaaaggcccggagcatc

SEQ ID NO: 4161400 - DNA, 25 bp, Homo sapien
cgagttcggtctccctttctggcgc

SEQ ID NO: 4161401 - DNA, 25 bp, Homo sapien
tgtgatgtgcgtctccggtgtggcg

SEQ ID NO: 4161402 - DNA, 25 bp, Homo sapien
atctcccttctcctcggaatcaggg

SEQ ID NO: 4161403 - DNA, 25 bp, Homo sapien
ttatgtctcatgagcgtctccggtg

SEQ ID NO: 4161404 - DNA, 25 bp, Homo sapien
gaacgtgtgatcaccgttatgcaga

SEQ ID NO: 4161405 - DNA, 25 bp, Homo sapien
gcgactgaagaagattcgggcccat

SEQ ID NO: 4161406 - DNA, 25 bp, Homo sapien
gttatgcagaatccacgccagtaca

SEQ ID NO: 4161407 - DNA, 25 bp, Homo sapien
tcctagccaatggtctggacaacaa

SEQ ID NO: 4161408 - DNA, 25 bp, Homo sapien
ggtgtgggccgaagatatgctcatg

SEQ ID NO: 4161409 - DNA, 25 bp, Homo sapien
tgtgggccgaagatatgctcatgtg

SEQ ID NO: 4161410 - DNA, 25 bp, Homo sapien
agggtgtgggccgaagatatgctca

SEQ ID NO: 4161411 - DNA, 25 bp, Homo sapien
tgggccgaagatatgctcatgtggt

SEQ ID NO: 4161412 - DNA, 25 bp, Homo sapien
ttcaatcactgaaaaacggaactca

SEQ ID NO: 4161413 - DNA, 25 bp, Homo sapien
acggaactcaatttatgaagcacag

SEQ ID NO: 4161414 - DNA, 25 bp, Homo sapien
tgacatttcatagtggagcccaaac

SEQ ID NO: 4161415 - DNA, 25 bp, Homo sapien
cctgctggctttatatgtagaaaca

SEQ ID NO: 4161416 - DNA, 25 bp, Homo sapien
cccagtttgcccgttcaccatatgg

SEQ ID NO: 4161417 - DNA, 25 bp, Homo sapien
gactaagaacatatcaggcggtaag

SEQ ID NO: 4161418 - DNA, 25 bp, Homo sapien
tcgaacacagactgacaagtaaagg

SEQ ID NO: 4161419 - DNA, 25 bp, Homo sapien
ccaagagatggccttgattaacagt

SEQ ID NO: 4161420 - DNA, 25 bp, Homo sapien
cactgtttgttagagtatacagcag

SEQ ID NO: 4161421 - DNA, 25 bp, Homo sapien
actgagattgtgtggcagtagaaga

SEQ ID NO: 4161422 - DNA, 25 bp, Homo sapien
caggaactgagattgtgtggcagta

SEQ ID NO: 4161423 - DNA, 25 bp, Homo sapien
gagtatacagcaggaactgagattg

SEQ ID NO: 4161424 - DNA, 25 bp, Homo sapien
gcagattgatgggagcagcaacctc

SEQ ID NO: 4161425 - DNA, 25 bp, Homo sapien
aaagcatcgttataaggaagatacc

SEQ ID NO: 4161426 - DNA, 25 bp, Homo sapien
gatgggagcagcaacctcaaaaagc

SEQ ID NO: 4161427 - DNA, 25 bp, Homo sapien
aacctcaaaaagcatcgttataagg

SEQ ID NO: 4161428 - DNA, 25 bp, Homo sapien
cttagttttcacaggtttttctgct

SEQ ID NO: 4161429 - DNA, 25 bp, Homo sapien
ggaagaaacagtcttagttttcaca

SEQ ID NO: 4161430 - DNA, 25 bp, Homo sapien
ggtttttctgcttcttcttcaggtc

SEQ ID NO: 4161431 - DNA, 25 bp, Homo sapien
ctggaagaaacagtcttagttttca

SEQ ID NO: 4161432 - DNA, 25 bp, Homo sapien
cagctgatcgcttctcagcgctgcg

SEQ ID NO: 4161433 - DNA, 25 bp, Homo sapien
tttctttgtcgtctgactacctatg

SEQ ID NO: 4161434 - DNA, 25 bp, Homo sapien
ttctttgtcgtctgactacctatgg

SEQ ID NO: 4161435 - DNA, 25 bp, Homo sapien
tgtgcccagccaacgcagaaaaatt

SEQ ID NO: 4161436 - DNA, 25 bp, Homo sapien
tagtaaacgccacgtttccaaagca

SEQ ID NO: 4161437 - DNA, 25 bp, Homo sapien
tcagacccttcttaaacagggtgct

SEQ ID NO: 4161438 - DNA, 25 bp, Homo sapien
acagggtgctaatcatctaagttca

SEQ ID NO: 4161439 - DNA, 25 bp, Homo sapien
tatgcagttaggtctatacaagttt

SEQ ID NO: 4161440 - DNA, 25 bp, Homo sapien
gggaccatctatagtagaagtacac

SEQ ID NO: 4161441 - DNA, 25 bp, Homo sapien
aagtactgatgttataagctcaatg

SEQ ID NO: 4161442 - DNA, 25 bp, Homo sapien
gatttaggaactatgttcatgcaca

SEQ ID NO: 4161443 - DNA, 25 bp, Homo sapien
tgctcctgcctacatttaagtccaa

SEQ ID NO: 4161444 - DNA, 25 bp, Homo sapien
gactcattatggaatacaagccctt

SEQ ID NO: 4161445 - DNA, 25 bp, Homo sapien
ttaactgcctttgcatgaaatgccc

SEQ ID NO: 4161446 - DNA, 25 bp, Homo sapien
caagcccttaaattcggtctcatgg

SEQ ID NO: 4161447 - DNA, 25 bp, Homo sapien
acttaaggtccttagcattacctgc

SEQ ID NO: 4161448 - DNA, 25 bp, Homo sapien
gtcagaaatacatcacctagccggg

SEQ ID NO: 4161449 - DNA, 25 bp, Homo sapien
tgctatcacattaccaacttaaggt

SEQ ID NO: 4161450 - DNA, 25 bp, Homo sapien
cctgcctggactactgtcagaaata

SEQ ID NO: 4161451 - DNA, 25 bp, Homo sapien
gttaggatctacaatatcacttacc

SEQ ID NO: 4161452 - DNA, 25 bp, Homo sapien
gggtacttggtacaggcaagagaaa

SEQ ID NO: 4161453 - DNA, 25 bp, Homo sapien
caaaaatgtggattatcagtgggta

SEQ ID NO: 4161454 - DNA, 25 bp, Homo sapien
gaaaatgattagtaataccttccca

SEQ ID NO: 4161455 - DNA, 25 bp, Homo sapien
tgaaagagtttttggagcaagagtt

SEQ ID NO: 4161456 - DNA, 25 bp, Homo sapien
gaaagagtttttggagcaagagttg

SEQ ID NO: 4161457 - DNA, 25 bp, Homo sapien
actgaaagagtttttggagcaagag

SEQ ID NO: 4161458 - DNA, 25 bp, Homo sapien
ctgaaagagtttttggagcaagagt

SEQ ID NO: 4161459 - DNA, 25 bp, Homo sapien
cataggtcattcataacatgggaag

SEQ ID NO: 4161460 - DNA, 25 bp, Homo sapien
tattgaattgttatccctcctaggg

SEQ ID NO: 4161461 - DNA, 25 bp, Homo sapien
tcctagggatatgggaagtgagcac

SEQ ID NO: 4161462 - DNA, 25 bp, Homo sapien
gaccacatgctttttgagtagaact

SEQ ID NO: 4161463 - DNA, 25 bp, Homo sapien
tcttatccacttaagaacatatggc

SEQ ID NO: 4161464 - DNA, 25 bp, Homo sapien
aaccctgcctaatgttttagtatct

SEQ ID NO: 4161465 - DNA, 25 bp, Homo sapien
tgcgcgcggccacagaattatttct

SEQ ID NO: 4161466 - DNA, 25 bp, Homo sapien
tcttcccaaatcactccagtcctct

SEQ ID NO: 4161467 - DNA, 25 bp, Homo sapien
catgttagccagatggtcttgacct

SEQ ID NO: 4161468 - DNA, 25 bp, Homo sapien
tgttagccagatggtcttgacctcc

SEQ ID NO: 4161469 - DNA, 25 bp, Homo sapien
atgttagccagatggtcttgacctc

SEQ ID NO: 4161470 - DNA, 25 bp, Homo sapien
gcctgtcttctacggtgctgatttt

SEQ ID NO: 4161471 - DNA, 25 bp, Homo sapien
tcctaacataatcgcatgagggagg

SEQ ID NO: 4161472 - DNA, 25 bp, Homo sapien
gagtttgacaccaaagcaaaggttc

SEQ ID NO: 4161473 - DNA, 25 bp, Homo sapien
tagctactaaatgctgcccattgtg

SEQ ID NO: 4161474 - DNA, 25 bp, Homo sapien
cttccaatattcttcatcctcatct

SEQ ID NO: 4161475 - DNA, 25 bp, Homo sapien
ttcatcctcatctttgcttctggag

SEQ ID NO: 4161476 - DNA, 25 bp, Homo sapien
gcttctggaggcatttcctctggtt

SEQ ID NO: 4161477 - DNA, 25 bp, Homo sapien
atctttgcttctggaggcatttcct

SEQ ID NO: 4161478 - DNA, 25 bp, Homo sapien
ttaaaaactgttctgcccaaatgca

SEQ ID NO: 4161479 - DNA, 25 bp, Homo sapien
tcttcatgaggattgaaccatgtct

SEQ ID NO: 4161480 - DNA, 25 bp, Homo sapien
taatcatctagtacacagaacatgc

SEQ ID NO: 4161481 - DNA, 25 bp, Homo sapien
gaaatcatgtgcaagttatttttgt

SEQ ID NO: 4161482 - DNA, 25 bp, Homo sapien
gaagtcaatgtgatagctggccacc

SEQ ID NO: 4161483 - DNA, 25 bp, Homo sapien
tgtttaggcgggacaacaacgtcat

SEQ ID NO: 4161484 - DNA, 25 bp, Homo sapien
tatacagctaagtgtggcaaccact

SEQ ID NO: 4161485 - DNA, 25 bp, Homo sapien
ttctagaatttcagatccagcaggc

SEQ ID NO: 4161486 - DNA, 25 bp, Homo sapien
tattgaaggagtttggtccagctga

SEQ ID NO: 4161487 - DNA, 25 bp, Homo sapien
gtttggtccagctgatgttggtgta

SEQ ID NO: 4161488 - DNA, 25 bp, Homo sapien
tggtccagctgatgttggtgtatcc

SEQ ID NO: 4161489 - DNA, 25 bp, Homo sapien
ttattgaaggagtttggtccagctg

SEQ ID NO: 4161490 - DNA, 25 bp, Homo sapien
ttatatttcgctcccacagcttctg

SEQ ID NO: 4161491 - DNA, 25 bp, Homo sapien
tgagattttatatttcgctcccaca

SEQ ID NO: 4161492 - DNA, 25 bp, Homo sapien
gattttatatttcgctcccacagct

SEQ ID NO: 4161493 - DNA, 25 bp, Homo sapien
tttatatttcgctcccacagcttct

SEQ ID NO: 4161494 - DNA, 25 bp, Homo sapien
tttattagtgtaccactcaatcttt

SEQ ID NO: 4161495 - DNA, 25 bp, Homo sapien
catttattagtgtaccactcaatct

SEQ ID NO: 4161496 - DNA, 25 bp, Homo sapien
tattagtgtaccactcaatctttta

SEQ ID NO: 4161497 - DNA, 25 bp, Homo sapien
tagtgtaccactcaatcttttaaaa

SEQ ID NO: 4161498 - DNA, 25 bp, Homo sapien
aatgtcttgaaatctgtatataaaa

SEQ ID NO: 4161499 - DNA, 25 bp, Homo sapien
tatctgtaacctttggaaactaatc

SEQ ID NO: 4161500 - DNA, 25 bp, Homo sapien
taccaccaataaaacagtctgaagc

SEQ ID NO: 4161501 - DNA, 25 bp, Homo sapien
ttaccaactaaaagacctcagcaag

SEQ ID NO: 4161502 - DNA, 25 bp, Homo sapien
gagccagacaagtttaggtaataag

SEQ ID NO: 4161503 - DNA, 25 bp, Homo sapien
tgttaggaatatacacaggctgctt

SEQ ID NO: 4161504 - DNA, 25 bp, Homo sapien
ggagcccagcgggccatcagtcacc

SEQ ID NO: 4161505 - DNA, 25 bp, Homo sapien
gcccagcgggccatcagtcaccaat

SEQ ID NO: 4161506 - DNA, 25 bp, Homo sapien
cagcgggccatcagtcaccaatccc

SEQ ID NO: 4161507 - DNA, 25 bp, Homo sapien
agcccagcgggccatcagtcaccaa

SEQ ID NO: 4161508 - DNA, 25 bp, Homo sapien
ctggttatgagagcagcaaaaaaac

SEQ ID NO: 4161509 - DNA, 25 bp, Homo sapien
gatctacaacgtcagggagctggaa

SEQ ID NO: 4161510 - DNA, 25 bp, Homo sapien
cggaggtactaacaacagggttcat

SEQ ID NO: 4161511 - DNA, 25 bp, Homo sapien
tcttactgtgctgctatcactcaca

SEQ ID NO: 4161512 - DNA, 25 bp, Homo sapien
tgtcatccttgctctgcggcatgtc

SEQ ID NO: 4161513 - DNA, 25 bp, Homo sapien
tgcggcatgtcaatctctgtatact

SEQ ID NO: 4161514 - DNA, 25 bp, Homo sapien
aagcatggactgtttcaggaatttg

SEQ ID NO: 4161515 - DNA, 25 bp, Homo sapien
tgctctgcggcatgtcaatctctgt

SEQ ID NO: 4161516 - DNA, 25 bp, Homo sapien
ttataaataccactgcaatcttacc

SEQ ID NO: 4161517 - DNA, 25 bp, Homo sapien
ctagttgtgaccaatgagttataaa

SEQ ID NO: 4161518 - DNA, 25 bp, Homo sapien
aaataccactgcaatcttaccagcc

SEQ ID NO: 4161519 - DNA, 25 bp, Homo sapien
gtaactagttgtgaccaatgagtta

SEQ ID NO: 4161520 - DNA, 25 bp, Homo sapien
tcctcgtccaattccacgtctaatg

SEQ ID NO: 4161521 - DNA, 25 bp, Homo sapien
taaaaaacagtttcagtacagtgcc

SEQ ID NO: 4161522 - DNA, 25 bp, Homo sapien
cctctttgcgagcacatcttattcg

SEQ ID NO: 4161523 - DNA, 25 bp, Homo sapien
cagaaaagatgcaccctcttcatcc

SEQ ID NO: 4161524 - DNA, 25 bp, Homo sapien
ggagaaaatacgtcttacactgagc

SEQ ID NO: 4161525 - DNA, 25 bp, Homo sapien
tacaaagaactagcctaggctcagg

SEQ ID NO: 4161526 - DNA, 25 bp, Homo sapien
ggcattacattctagattagtggta

SEQ ID NO: 4161527 - DNA, 25 bp, Homo sapien
aactttttggagcttagagttggca

SEQ ID NO: 4161528 - DNA, 25 bp, Homo sapien
gagaagcccactaacaacagtagac

SEQ ID NO: 4161529 - DNA, 25 bp, Homo sapien
cagtttgagtgaaatccataagtgc

SEQ ID NO: 4161530 - DNA, 25 bp, Homo sapien
tatgtatgtcttccacacacggact

SEQ ID NO: 4161531 - DNA, 25 bp, Homo sapien
gctgtttccagtcatgaggctgtgg

SEQ ID NO: 4161532 - DNA, 25 bp, Homo sapien
gtaaaatccgaaaagctgccgcctg

SEQ ID NO: 4161533 - DNA, 25 bp, Homo sapien
tccttcggactaagggagccgtcga

SEQ ID NO: 4161534 - DNA, 25 bp, Homo sapien
tgtcaagcgaggaaagctaccgggc

SEQ ID NO: 4161535 - DNA, 25 bp, Homo sapien
gcaccgagggcaatgtcaagcgtaa

SEQ ID NO: 4161536 - DNA, 25 bp, Homo sapien
gcgcgctggagaagtgcagttcccc

SEQ ID NO: 4161537 - DNA, 25 bp, Homo sapien
cagcagccattttgtcagtcgccag

SEQ ID NO: 4161538 - DNA, 25 bp, Homo sapien
ttgtcagtcgccagcggatcccgcg

SEQ ID NO: 4161539 - DNA, 25 bp, Homo sapien
ccagcggatcccgcgcgctggagaa

SEQ ID NO: 4161540 - DNA, 25 bp, Homo sapien
gcaactaagtagatcccaagcctgg

SEQ ID NO: 4161541 - DNA, 25 bp, Homo sapien
taaagactccctcgaactgcagtga

SEQ ID NO: 4161542 - DNA, 25 bp, Homo sapien
tgtactaggccgtgtctgcagctgg

SEQ ID NO: 4161543 - DNA, 25 bp, Homo sapien
tattggcccaaaggataatgcgtgc

SEQ ID NO: 4161544 - DNA, 25 bp, Homo sapien
tttgtaagaccaaagccaggtgatc

SEQ ID NO: 4161545 - DNA, 25 bp, Homo sapien
gactttacacggtcataggtgacct

SEQ ID NO: 4161546 - DNA, 25 bp, Homo sapien
taagtattaggatgttgctggtgca

SEQ ID NO: 4161547 - DNA, 25 bp, Homo sapien
gagagtgtatatagtcccagctggg

SEQ ID NO: 4161548 - DNA, 25 bp, Homo sapien
tgcttaggtgctgcctttgtaggtg

SEQ ID NO: 4161549 - DNA, 25 bp, Homo sapien
gctgaaactttcacaggcttcacaa

SEQ ID NO: 4161550 - DNA, 25 bp, Homo sapien
cagtttagcgttttccaccaactcg

SEQ ID NO: 4161551 - DNA, 25 bp, Homo sapien
caggcttcacaatcttttgcttagg

SEQ ID NO: 4161552 - DNA, 25 bp, Homo sapien
aaaaatctaatctgccagtttagcg

SEQ ID NO: 4161553 - DNA, 25 bp, Homo sapien
caccaactcggggagctgaaacttt

SEQ ID NO: 4161554 - DNA, 25 bp, Homo sapien
aaagtttcagctccccgagttggtg

SEQ ID NO: 4161555 - DNA, 25 bp, Homo sapien
cgagttggtggaaaacgctaaactg

SEQ ID NO: 4161556 - DNA, 25 bp, Homo sapien
gcaaaagattgtgaagcctgtgaaa

SEQ ID NO: 4161557 - DNA, 25 bp, Homo sapien
caaaggcagcacctaagcaaaagat

SEQ ID NO: 4161558 - DNA, 25 bp, Homo sapien
cgctaaactggcagattagattttt

SEQ ID NO: 4161559 - DNA, 25 bp, Homo sapien
gcctgtgaaagtttcagctccccga

SEQ ID NO: 4161560 - DNA, 25 bp, Homo sapien
cagccattgcagtctttttagatgc

SEQ ID NO: 4161561 - DNA, 25 bp, Homo sapien
cttagcagcagccattgcagtcttt

SEQ ID NO: 4161562 - DNA, 25 bp, Homo sapien
cagcagccattgcagtctttttaga

SEQ ID NO: 4161563 - DNA, 25 bp, Homo sapien
tagatgcttgcttagccttttttgc

SEQ ID NO: 4161564 - DNA, 25 bp, Homo sapien
tagccttttttgcttccttagcagc

SEQ ID NO: 4161565 - DNA, 25 bp, Homo sapien
gatgcttgcttagccttttttgctt

SEQ ID NO: 4161566 - DNA, 25 bp, Homo sapien
taaaaagactgcaatggctgctgct

SEQ ID NO: 4161567 - DNA, 25 bp, Homo sapien
ggaagcaaaaaaggctaagcaagca

SEQ ID NO: 4161568 - DNA, 25 bp, Homo sapien
aaagactgcaatggctgctgctaag

SEQ ID NO: 4161569 - DNA, 25 bp, Homo sapien
gcatctaaaaagactgcaatggctg

SEQ ID NO: 4161570 - DNA, 25 bp, Homo sapien
gcaaaaaaggctaagcaagcatcta

SEQ ID NO: 4161571 - DNA, 25 bp, Homo sapien
gctgctaaggaagcaaaaaaggcta

SEQ ID NO: 4161572 - DNA, 25 bp, Homo sapien
cgtttagtcttttctcgagagcagg

SEQ ID NO: 4161573 - DNA, 25 bp, Homo sapien
gcaggaaatctaggctcatagcaaa

SEQ ID NO: 4161574 - DNA, 25 bp, Homo sapien
tacaccgggacatcagttacataaa

SEQ ID NO: 4161575 - DNA, 25 bp, Homo sapien
gtccgacctggctcacaataaataa

SEQ ID NO: 4161576 - DNA, 25 bp, Homo sapien
caaaaggctgtcacataactggcag

SEQ ID NO: 4161577 - DNA, 25 bp, Homo sapien
tgtgtcacactatgaaggtccttgc

SEQ ID NO: 4161578 - DNA, 25 bp, Homo sapien
ttatttattgtgagccaggtcggac

SEQ ID NO: 4161579 - DNA, 25 bp, Homo sapien
cagttatgtgacagccttttggtcc

SEQ ID NO: 4161580 - DNA, 25 bp, Homo sapien
tgggacggacaagagcagaatgctt

SEQ ID NO: 4161581 - DNA, 25 bp, Homo sapien
tctcgagaaaagactaaacgcaagg

SEQ ID NO: 4161582 - DNA, 25 bp, Homo sapien
gcaaggaccttcatagtgtgacaca

SEQ ID NO: 4161583 - DNA, 25 bp, Homo sapien
tatgtaactgatgtcccggtgtaag

SEQ ID NO: 4161584 - DNA, 25 bp, Homo sapien
tcatcgcgaggcgaaagatctcgtt

SEQ ID NO: 4161585 - DNA, 25 bp, Homo sapien
gacagctgacttcctctggcgcaat

SEQ ID NO: 4161586 - DNA, 25 bp, Homo sapien
cctggccctccttgatgacgtaatc

SEQ ID NO: 4161587 - DNA, 25 bp, Homo sapien
gattgggaaccacgggtcgtgctta

SEQ ID NO: 4161588 - DNA, 25 bp, Homo sapien
aatatccttcgatgctcctggccct

SEQ ID NO: 4161589 - DNA, 25 bp, Homo sapien
tctgcccgaggatgtaagcggattg

SEQ ID NO: 4161590 - DNA, 25 bp, Homo sapien
gaaaacgagatctttcgcctcgcga

SEQ ID NO: 4161591 - DNA, 25 bp, Homo sapien
gaattgcgccagaggaagtcagctg

SEQ ID NO: 4161592 - DNA, 25 bp, Homo sapien
agggccaggagcatcgaaggatatt

SEQ ID NO: 4161593 - DNA, 25 bp, Homo sapien
tgaagtaagcacgacccgtggttcc

SEQ ID NO: 4161594 - DNA, 25 bp, Homo sapien
gattacgtcatcaaggagggccagg

SEQ ID NO: 4161595 - DNA, 25 bp, Homo sapien
caatccgcttacatcctcgggcaga

SEQ ID NO: 4161596 - DNA, 25 bp, Homo sapien
taggatacttggcagtaagagaggc

SEQ ID NO: 4161597 - DNA, 25 bp, Homo sapien
taagagaggcagaatgggccgggcg

SEQ ID NO: 4161598 - DNA, 25 bp, Homo sapien
tcacattccctgcagccggaagatg

SEQ ID NO: 4161599 - DNA, 25 bp, Homo sapien
tctctttatgagaagagaggacacc

SEQ ID NO: 4161600 - DNA, 25 bp, Homo sapien
tcaacttcactaggcagcaactccg

SEQ ID NO: 4161601 - DNA, 25 bp, Homo sapien
gaattcaagaattgcctctggccac

SEQ ID NO: 4161602 - DNA, 25 bp, Homo sapien
aatatgtagcatcatagaagggctc

SEQ ID NO: 4161603 - DNA, 25 bp, Homo sapien
tccgaattgtagttcttaggcaggt

SEQ ID NO: 4161604 - DNA, 25 bp, Homo sapien
tgacagtaggtgacgttatcccaca

SEQ ID NO: 4161605 - DNA, 25 bp, Homo sapien
tgaaccccaaagtcagtctcagtaa

SEQ ID NO: 4161606 - DNA, 25 bp, Homo sapien
cctgactgaggtttagttgggccta

SEQ ID NO: 4161607 - DNA, 25 bp, Homo sapien
cagctatcagtagggcctggctcag

SEQ ID NO: 4161608 - DNA, 25 bp, Homo sapien
cagccctaaggcgttttcttcctat

SEQ ID NO: 4161609 - DNA, 25 bp, Homo sapien
tggaggatccgcgccgtctctgagt

SEQ ID NO: 4161610 - DNA, 25 bp, Homo sapien
catatggaggatccgcgccgtctct

SEQ ID NO: 4161611 - DNA, 25 bp, Homo sapien
aggatccgcgccgtctctgagttcc

SEQ ID NO: 4161612 - DNA, 25 bp, Homo sapien
tcgtcaacttgtcctcaatgaccac

SEQ ID NO: 4161613 - DNA, 25 bp, Homo sapien
gtcaacttgtcctcaatgaccacgc

SEQ ID NO: 4161614 - DNA, 25 bp, Homo sapien
tctcgtcaacttgtcctcaatgacc

SEQ ID NO: 4161615 - DNA, 25 bp, Homo sapien
tcaacttgtcctcaatgaccacgct

SEQ ID NO: 4161616 - DNA, 25 bp, Homo sapien
gaagcggctactgatttaccataca

SEQ ID NO: 4161617 - DNA, 25 bp, Homo sapien
tcacatctagtctcagctcgggcag

SEQ ID NO: 4161618 - DNA, 25 bp, Homo sapien
taacttgtcctcctagagtgagccc

SEQ ID NO: 4161619 - DNA, 25 bp, Homo sapien
taaaattaccaggaaccgccatgcc

SEQ ID NO: 4161620 - DNA, 25 bp, Homo sapien
agtccacggacacagagatccacac

SEQ ID NO: 4161621 - DNA, 25 bp, Homo sapien
cccacggtcagtccacggacacaga

SEQ ID NO: 4161622 - DNA, 25 bp, Homo sapien
ttctaatgtggtgtcaggccaaagc

SEQ ID NO: 4161623 - DNA, 25 bp, Homo sapien
tgtcaggccaaagcctccataattc

SEQ ID NO: 4161624 - DNA, 25 bp, Homo sapien
aggatccgcgccgtctctgagttcc

SEQ ID NO: 4161625 - DNA, 25 bp, Homo sapien
catatggaggatccgcgccgtctct

SEQ ID NO: 4161626 - DNA, 25 bp, Homo sapien
cagccctaaggcgttttcttcctat

SEQ ID NO: 4161627 - DNA, 25 bp, Homo sapien
tggaggatccgcgccgtctctgagt

SEQ ID NO: 4161628 - DNA, 25 bp, Homo sapien
gccctgcaagttatttatgtagcta

SEQ ID NO: 4161629 - DNA, 25 bp, Homo sapien
tcattttacactgagccctgcaagt

SEQ ID NO: 4161630 - DNA, 25 bp, Homo sapien
gtagctagtcctgtctataggtggg

SEQ ID NO: 4161631 - DNA, 25 bp, Homo sapien
tgaaaaagggacctcacactttcat

SEQ ID NO: 4161632 - DNA, 25 bp, Homo sapien
cgtcaaatcacctatggcccctgga

SEQ ID NO: 4161633 - DNA, 25 bp, Homo sapien
gctgcactggctgagtaaatgtcct

SEQ ID NO: 4161634 - DNA, 25 bp, Homo sapien
tgggccatgtgggtgcgtcaaatca

SEQ ID NO: 4161635 - DNA, 25 bp, Homo sapien
ccctggataccagtgagtgctgcac

SEQ ID NO: 4161636 - DNA, 25 bp, Homo sapien
ggcactgtgctaaggagggtcccat

SEQ ID NO: 4161637 - DNA, 25 bp, Homo sapien
ccagctgattgcatggtgcctgtcc

SEQ ID NO: 4161638 - DNA, 25 bp, Homo sapien
gagccagcttcaagttgtgtgacca

SEQ ID NO: 4161639 - DNA, 25 bp, Homo sapien
tcttgtaatctaaaggcagagccag

SEQ ID NO: 4161640 - DNA, 25 bp, Homo sapien
tccatcagtctattatggggttttt

SEQ ID NO: 4161641 - DNA, 25 bp, Homo sapien
ccatcagtctattatggggtttttt

SEQ ID NO: 4161642 - DNA, 25 bp, Homo sapien
catccatcagtctattatggggttt

SEQ ID NO: 4161643 - DNA, 25 bp, Homo sapien
tccatccatcagtctattatggggt

SEQ ID NO: 4161644 - DNA, 25 bp, Homo sapien
aacaaggcaagttagccacatgagg

SEQ ID NO: 4161645 - DNA, 25 bp, Homo sapien
tccttagcttgtactgaattgacag

SEQ ID NO: 4161646 - DNA, 25 bp, Homo sapien
ggacacaggacacaaacatcaatag

SEQ ID NO: 4161647 - DNA, 25 bp, Homo sapien
cacaggagatcccatttctaaaaaa

SEQ ID NO: 4161648 - DNA, 25 bp, Homo sapien
cagttactcagaaggtaaggtggca

SEQ ID NO: 4161649 - DNA, 25 bp, Homo sapien
gcatgggtaactccaggccttgtct

SEQ ID NO: 4161650 - DNA, 25 bp, Homo sapien
gcctggcgcttactatgcaaatgaa

SEQ ID NO: 4161651 - DNA, 25 bp, Homo sapien
tatcaaattcgatggcaaagcctgg

SEQ ID NO: 4161652 - DNA, 25 bp, Homo sapien
gtcctgcatcttgtttccagttcag

SEQ ID NO: 4161653 - DNA, 25 bp, Homo sapien
ctttttgcgttaagatgtcattcca

SEQ ID NO: 4161654 - DNA, 25 bp, Homo sapien
tcattccactcagtgtctgcgttgg

SEQ ID NO: 4161655 - DNA, 25 bp, Homo sapien
tgcgttggggtcctgcatcttgttt

SEQ ID NO: 4161656 - DNA, 25 bp, Homo sapien
ctgcctcctcttccaattctttcag

SEQ ID NO: 4161657 - DNA, 25 bp, Homo sapien
ggatgcgctgctcctcttctgcctc

SEQ ID NO: 4161658 - DNA, 25 bp, Homo sapien
ctcttccaattctttcagactttcc

SEQ ID NO: 4161659 - DNA, 25 bp, Homo sapien
tggaggatgcgctgctcctcttctg

SEQ ID NO: 4161660 - DNA, 25 bp, Homo sapien
atcttcatatgttttcaccactgac

SEQ ID NO: 4161661 - DNA, 25 bp, Homo sapien
tcgtcttcatgatcctccagctctt

SEQ ID NO: 4161662 - DNA, 25 bp, Homo sapien
gtcttcatgatcctccagctcttcc

SEQ ID NO: 4161663 - DNA, 25 bp, Homo sapien
tcttccaaagtcatatcttcatatg

SEQ ID NO: 4161664 - DNA, 25 bp, Homo sapien
ctctgctgtctgcacatttcaatag

SEQ ID NO: 4161665 - DNA, 25 bp, Homo sapien
tgctgtctgcacatttcaatagcac

SEQ ID NO: 4161666 - DNA, 25 bp, Homo sapien
tgtctgcacatttcaatagcacatt

SEQ ID NO: 4161667 - DNA, 25 bp, Homo sapien
tctctgctgtctgcacatttcaata

SEQ ID NO: 4161668 - DNA, 25 bp, Homo sapien
cacaagccctcaccagctttggtaa

SEQ ID NO: 4161669 - DNA, 25 bp, Homo sapien
agccctcaccagctttggtaacttc

SEQ ID NO: 4161670 - DNA, 25 bp, Homo sapien
tgaggttctgatttatcagggcaca

SEQ ID NO: 4161671 - DNA, 25 bp, Homo sapien
gttctgatttatcagggcacagagg

SEQ ID NO: 4161672 - DNA, 25 bp, Homo sapien
tatgcaggttgttgaaatggctttg

SEQ ID NO: 4161673 - DNA, 25 bp, Homo sapien
ctatcaggataattgggtatgcagg

SEQ ID NO: 4161674 - DNA, 25 bp, Homo sapien
gataattgggtatgcaggttgttga

SEQ ID NO: 4161675 - DNA, 25 bp, Homo sapien
ggtatgcaggttgttgaaatggctt

SEQ ID NO: 4161676 - DNA, 25 bp, Homo sapien
ccaggtaaacaaatatcggggcaga

SEQ ID NO: 4161677 - DNA, 25 bp, Homo sapien
ggaccaataaactgagccttgatat

SEQ ID NO: 4161678 - DNA, 25 bp, Homo sapien
catctcttgtcaggttcatgccacc

SEQ ID NO: 4161679 - DNA, 25 bp, Homo sapien
ctccttccaggtaaacaaatatcgg

SEQ ID NO: 4161680 - DNA, 25 bp, Homo sapien
ccctcctcatgaggacagagtgcca

SEQ ID NO: 4161681 - DNA, 25 bp, Homo sapien
cctcctcatgaggacagagtgccac

SEQ ID NO: 4161682 - DNA, 25 bp, Homo sapien
acatttgtcacaagaaagttcggca

SEQ ID NO: 4161683 - DNA, 25 bp, Homo sapien
taacagaatttccagcaatgattat

SEQ ID NO: 4161684 - DNA, 25 bp, Homo sapien
agttcggcatgtgatagcagctgta

SEQ ID NO: 4161685 - DNA, 25 bp, Homo sapien
aatccagacatttgtcacaagaaag

SEQ ID NO: 4161686 - DNA, 25 bp, Homo sapien
caaagtgaaagtttcgataatctca

SEQ ID NO: 4161687 - DNA, 25 bp, Homo sapien
cccagccactcatgaggcaggtggg

SEQ ID NO: 4161688 - DNA, 25 bp, Homo sapien
tggctagtcctaaatgagatgtgct

SEQ ID NO: 4161689 - DNA, 25 bp, Homo sapien
tcaccccttagagatgcattgtcta

SEQ ID NO: 4161690 - DNA, 25 bp, Homo sapien
catgttctgactaggcaggatgcgg

SEQ ID NO: 4161691 - DNA, 25 bp, Homo sapien
tctatttaagattcctgctttaagc

SEQ ID NO: 4161692 - DNA, 25 bp, Homo sapien
ttaagcatgttctgactaggcagga

SEQ ID NO: 4161693 - DNA, 25 bp, Homo sapien
ccagctgacattgcattctatttaa

SEQ ID NO: 4161694 - DNA, 25 bp, Homo sapien
cctcatatttagctgatacacaggg

SEQ ID NO: 4161695 - DNA, 25 bp, Homo sapien
ttctagccctgacattgcattcttt

SEQ ID NO: 4161696 - DNA, 25 bp, Homo sapien
gaatattttagaatctcatcttgag

SEQ ID NO: 4161697 - DNA, 25 bp, Homo sapien
ctcatcttgagttggttaattcttc

SEQ ID NO: 4161698 - DNA, 25 bp, Homo sapien
taacaaagtctgaaccatggagacc

SEQ ID NO: 4161699 - DNA, 25 bp, Homo sapien
caaagctagaccatggaagaatccc

SEQ ID NO: 4161700 - DNA, 25 bp, Homo sapien
gctgggtaccaactagcacacctgg

SEQ ID NO: 4161701 - DNA, 25 bp, Homo sapien
gaaactagagcccaaaatccatgac

SEQ ID NO: 4161702 - DNA, 25 bp, Homo sapien
taataataccaggcaaccgtcctcc

SEQ ID NO: 4161703 - DNA, 25 bp, Homo sapien
ctaataataccaggcaaccgtcctc

SEQ ID NO: 4161704 - DNA, 25 bp, Homo sapien
ggcaaagccgcgtccacgcgcgcca

SEQ ID NO: 4161705 - DNA, 25 bp, Homo sapien
caaagccgcgtccacgcgcgccacc

SEQ ID NO: 4161706 - DNA, 25 bp, Homo sapien
tccgggaggcaaagccgcgtccacg

SEQ ID NO: 4161707 - DNA, 25 bp, Homo sapien
gaggcaaagccgcgtccacgcgcgc

SEQ ID NO: 4161708 - DNA, 25 bp, Homo sapien
tctaagccatgaagacgggcctcga

SEQ ID NO: 4161709 - DNA, 25 bp, Homo sapien
tggtcaagaaaggtcatcgcagccc

SEQ ID NO: 4161710 - DNA, 25 bp, Homo sapien
ttagattttatcacggccactggcc

SEQ ID NO: 4161711 - DNA, 25 bp, Homo sapien
gaaaatgcactcctggtctaagcca

SEQ ID NO: 4161712 - DNA, 25 bp, Homo sapien
tgatttttatccagaatcaaagtgt

SEQ ID NO: 4161713 - DNA, 25 bp, Homo sapien
tgtcctgaccaattgaccactgatc

SEQ ID NO: 4161714 - DNA, 25 bp, Homo sapien
tctgtagtccctgtcctgaccaatt

SEQ ID NO: 4161715 - DNA, 25 bp, Homo sapien
atctgatttttatccagaatcaaag

SEQ ID NO: 4161716 - DNA, 25 bp, Homo sapien
cgaagcaacgtcagcttggccacac

SEQ ID NO: 4161717 - DNA, 25 bp, Homo sapien
cacacagccaatgctattatgaggc

SEQ ID NO: 4161718 - DNA, 25 bp, Homo sapien
ggcaaatttaatacacgaagcaacg

SEQ ID NO: 4161719 - DNA, 25 bp, Homo sapien
cgaaccagccgattattagctactg

SEQ ID NO: 4161720 - DNA, 25 bp, Homo sapien
cctatctgggatatattattgtctg

SEQ ID NO: 4161721 - DNA, 25 bp, Homo sapien
gctgtagagctgtgcagctattgat

SEQ ID NO: 4161722 - DNA, 25 bp, Homo sapien
tgtctgataaatcgagatgctgtag

SEQ ID NO: 4161723 - DNA, 25 bp, Homo sapien
tcagggataccaatttagatagatc

SEQ ID NO: 4161724 - DNA, 25 bp, Homo sapien
taataactgaagttactaatattgg

SEQ ID NO: 4161725 - DNA, 25 bp, Homo sapien
ggtcgagtgagattgtactactaca

SEQ ID NO: 4161726 - DNA, 25 bp, Homo sapien
aatctcaacctcaccaaagattatg

SEQ ID NO: 4161727 - DNA, 25 bp, Homo sapien
tggtgatgtacacatgcctatggtc

SEQ ID NO: 4161728 - DNA, 25 bp, Homo sapien
gacttgtccaaaaacacatgcttgg

SEQ ID NO: 4161729 - DNA, 25 bp, Homo sapien
ctgttaatgctacaagggtccttga

SEQ ID NO: 4161730 - DNA, 25 bp, Homo sapien
gcatagcaactaggcatgctgtgag

SEQ ID NO: 4161731 - DNA, 25 bp, Homo sapien
taaattggcctattgtgacaacacc

SEQ ID NO: 4161732 - DNA, 25 bp, Homo sapien
taggtaagcaggtgccattctaaga

SEQ ID NO: 4161733 - DNA, 25 bp, Homo sapien
acttctgggtaggtaagcaggtgcc

SEQ ID NO: 4161734 - DNA, 25 bp, Homo sapien
ctcatttaagtctcggatttcattt

SEQ ID NO: 4161735 - DNA, 25 bp, Homo sapien
ttttctgccaaagaaagtatagcaa

SEQ ID NO: 4161736 - DNA, 25 bp, Homo sapien
actctgaggtttaggcaccagctga

SEQ ID NO: 4161737 - DNA, 25 bp, Homo sapien
tacggccgatagtcaaatcctggga

SEQ ID NO: 4161738 - DNA, 25 bp, Homo sapien
ccaattcagttaaggatgccaaaaa

SEQ ID NO: 4161739 - DNA, 25 bp, Homo sapien
gttgccatcacacaaggattgttca

SEQ ID NO: 4161740 - DNA, 25 bp, Homo sapien
ttgctattgagctaccctcccatct

SEQ ID NO: 4161741 - DNA, 25 bp, Homo sapien
aaaaatttgctattgagctaccctc

SEQ ID NO: 4161742 - DNA, 25 bp, Homo sapien
aatttgctattgagctaccctccca

SEQ ID NO: 4161743 - DNA, 25 bp, Homo sapien
aaaatttgctattgagctaccctcc

SEQ ID NO: 4161744 - DNA, 25 bp, Homo sapien
cgtcccctagagtggtttatgagca

SEQ ID NO: 4161745 - DNA, 25 bp, Homo sapien
agttgtaccatttatcgtcccctag

SEQ ID NO: 4161746 - DNA, 25 bp, Homo sapien
tttgggagacctaagtagctatttc

SEQ ID NO: 4161747 - DNA, 25 bp, Homo sapien
cattccaattgcaccacatccttag

SEQ ID NO: 4161748 - DNA, 25 bp, Homo sapien
agtttgaagacctagtgtagaagtg

SEQ ID NO: 4161749 - DNA, 25 bp, Homo sapien
ttgaagacctagtgtagaagtgagg

SEQ ID NO: 4161750 - DNA, 25 bp, Homo sapien
cccttgccttgactatagagccatt

SEQ ID NO: 4161751 - DNA, 25 bp, Homo sapien
gactatagagccattcagctttcaa

SEQ ID NO: 4161752 - DNA, 25 bp, Homo sapien
gatgcccttgtttcaacaggaacaa

SEQ ID NO: 4161753 - DNA, 25 bp, Homo sapien
aggaataagggatgcccttgtttca

SEQ ID NO: 4161754 - DNA, 25 bp, Homo sapien
gaggagacaactcttcattttggct

SEQ ID NO: 4161755 - DNA, 25 bp, Homo sapien
tatctggcaatcttgaacagggctt

SEQ ID NO: 4161756 - DNA, 25 bp, Homo sapien
tctaggcccaagttaatgccctgca

SEQ ID NO: 4161757 - DNA, 25 bp, Homo sapien
cgtctgtatgtcttccaggtgcaga

SEQ ID NO: 4161758 - DNA, 25 bp, Homo sapien
gacagtcctgatgcaactggcataa

SEQ ID NO: 4161759 - DNA, 25 bp, Homo sapien
aatatctcgtagtgtgtacagaggc

SEQ ID NO: 4161760 - DNA, 25 bp, Homo sapien
tgctcagttgactcaggaaaaaatg

SEQ ID NO: 4161761 - DNA, 25 bp, Homo sapien
aaatgtaagactgtggttatcatcc

SEQ ID NO: 4161762 - DNA, 25 bp, Homo sapien
caagatagcactgattattgttggc

SEQ ID NO: 4161763 - DNA, 25 bp, Homo sapien
tgttggctcaggacaaggtaatagt

SEQ ID NO: 4161764 - DNA, 25 bp, Homo sapien
gcattctgcgtagccggatttcgta

SEQ ID NO: 4161765 - DNA, 25 bp, Homo sapien
gatttcgtaacgcacatctttggct

SEQ ID NO: 4161766 - DNA, 25 bp, Homo sapien
ccaacaggcctgaagcttggtggct

SEQ ID NO: 4161767 - DNA, 25 bp, Homo sapien
tgaagggcaactttgtcttgtccca

SEQ ID NO: 4161768 - DNA, 25 bp, Homo sapien
ctgaaagcttcttcttgtacaaatt

SEQ ID NO: 4161769 - DNA, 25 bp, Homo sapien
ctggttccaaaggaatctgaaagct

SEQ ID NO: 4161770 - DNA, 25 bp, Homo sapien
attttttaatacgttcttcatctct

SEQ ID NO: 4161771 - DNA, 25 bp, Homo sapien
tccaaaggaatctgaaagcttcttc

SEQ ID NO: 4161772 - DNA, 25 bp, Homo sapien
tgggcaatatggcaagaccccattt

SEQ ID NO: 4161773 - DNA, 25 bp, Homo sapien
gagtgggaatgggccaaagcaattc

SEQ ID NO: 4161774 - DNA, 25 bp, Homo sapien
caggagtgggaatgggccaaagcaa

SEQ ID NO: 4161775 - DNA, 25 bp, Homo sapien
aggagtgggaatgggccaaagcaat

SEQ ID NO: 4161776 - DNA, 25 bp, Homo sapien
agtgggaatgggccaaagcaattct

SEQ ID NO: 4161777 - DNA, 25 bp, Homo sapien
ttttgatcacaagaggactcctggc

SEQ ID NO: 4161778 - DNA, 25 bp, Homo sapien
tcagtatgccaggaacttagacgct

SEQ ID NO: 4161779 - DNA, 25 bp, Homo sapien
tctcttgaggagctacatcagaagc

SEQ ID NO: 4161780 - DNA, 25 bp, Homo sapien
tctgactgtgtcaatggaattcccc

SEQ ID NO: 4161781 - DNA, 25 bp, Homo sapien
tgactctcatctacagaagcaccgt

SEQ ID NO: 4161782 - DNA, 25 bp, Homo sapien
aggaggagatatgccatgactctca

SEQ ID NO: 4161783 - DNA, 25 bp, Homo sapien
gaagcaccgtcagacaatgtatcta

SEQ ID NO: 4161784 - DNA, 25 bp, Homo sapien
tgtctggctaatttcaccttgcaaa

SEQ ID NO: 4161785 - DNA, 25 bp, Homo sapien
accaacatgcaatagctgaaatgta

SEQ ID NO: 4161786 - DNA, 25 bp, Homo sapien
gtaacaccaacatgcaatagctgaa

SEQ ID NO: 4161787 - DNA, 25 bp, Homo sapien
tgcaatagctgaaatgtagaatcac

SEQ ID NO: 4161788 - DNA, 25 bp, Homo sapien
catgcaatagctgaaatgtagaatc

SEQ ID NO: 4161789 - DNA, 25 bp, Homo sapien
taagtggatatctgcctcccaaaag

SEQ ID NO: 4161790 - DNA, 25 bp, Homo sapien
aatgttcttcactatgggacagagg

SEQ ID NO: 4161791 - DNA, 25 bp, Homo sapien
aagtgaatggccacggaccttctgc

SEQ ID NO: 4161792 - DNA, 25 bp, Homo sapien
gaagggcacctaatgactacaacag

SEQ ID NO: 4161793 - DNA, 25 bp, Homo sapien
aagtcgtctcaacctgagtgctacg

SEQ ID NO: 4161794 - DNA, 25 bp, Homo sapien
ctatcaacaaataccatgagctggg

SEQ ID NO: 4161795 - DNA, 25 bp, Homo sapien
gaactatgatcatggcaccgcacca

SEQ ID NO: 4161796 - DNA, 25 bp, Homo sapien
gaaaaatacgtcttaccatacagga

SEQ ID NO: 4161797 - DNA, 25 bp, Homo sapien
taaacaatgaagtctcggctgggca

SEQ ID NO: 4161798 - DNA, 25 bp, Homo sapien
gaaatcctgctaacaagtgctgatg

SEQ ID NO: 4161799 - DNA, 25 bp, Homo sapien
taactatggacagcaagtgaggcac

SEQ ID NO: 4161800 - DNA, 25 bp, Homo sapien
taaaaacacacgctcaagatggcac

SEQ ID NO: 4161801 - DNA, 25 bp, Homo sapien
gcgccaggccgctagccccccgctt

SEQ ID NO: 4161802 - DNA, 25 bp, Homo sapien
gccccggtcggtcgccgcagcgcca

SEQ ID NO: 4161803 - DNA, 25 bp, Homo sapien
tgacgccccggtcggtcgccgcagc

SEQ ID NO: 4161804 - DNA, 25 bp, Homo sapien
ggatcctgacgccccggtcggtcgc

SEQ ID NO: 4161805 - DNA, 25 bp, Homo sapien
tttcgctgcggcgtggaggtccgaa

SEQ ID NO: 4161806 - DNA, 25 bp, Homo sapien
cgtggaggtccgaactgtaccgagc

SEQ ID NO: 4161807 - DNA, 25 bp, Homo sapien
gtccgaactgtaccgagctgtggcg

SEQ ID NO: 4161808 - DNA, 25 bp, Homo sapien
cagaagtctttcgctgcggcgtgga

SEQ ID NO: 4161809 - DNA, 25 bp, Homo sapien
aacagtccaccgtgtgacagcagcg

SEQ ID NO: 4161810 - DNA, 25 bp, Homo sapien
gctcagtaaggccagaacagtccac

SEQ ID NO: 4161811 - DNA, 25 bp, Homo sapien
cagagcagcgatgagccgagagata

SEQ ID NO: 4161812 - DNA, 25 bp, Homo sapien
atctgatgtccccaaacggcagctc

SEQ ID NO: 4161813 - DNA, 25 bp, Homo sapien
ttacactcgtttctccccatacgac

SEQ ID NO: 4161814 - DNA, 25 bp, Homo sapien
agttacactcgtttctccccatacg

SEQ ID NO: 4161815 - DNA, 25 bp, Homo sapien
gttacactcgtttctccccatacga

SEQ ID NO: 4161816 - DNA, 25 bp, Homo sapien
caggcaagagagttatacatgatat

SEQ ID NO: 4161817 - DNA, 25 bp, Homo sapien
aggagtgggcataggaacgtttcct

SEQ ID NO: 4161818 - DNA, 25 bp, Homo sapien
ccttggctgaaggtcaaaactttat

SEQ ID NO: 4161819 - DNA, 25 bp, Homo sapien
aatgatcttgttttcccctacagaa

SEQ ID NO: 4161820 - DNA, 25 bp, Homo sapien
gatgcttactggaactagaaattag

SEQ ID NO: 4161821 - DNA, 25 bp, Homo sapien
ttttttcatgccacatgtgaagcac

SEQ ID NO: 4161822 - DNA, 25 bp, Homo sapien
ctcaggcaattttgaccagaggtcc

SEQ ID NO: 4161823 - DNA, 25 bp, Homo sapien
tacgtctaactttccttccagcatg

SEQ ID NO: 4161824 - DNA, 25 bp, Homo sapien
accatgatcatcacaccaatgtact

SEQ ID NO: 4161825 - DNA, 25 bp, Homo sapien
catgatcatcacaccaatgtactcc

SEQ ID NO: 4161826 - DNA, 25 bp, Homo sapien
gaaccatgatcatcacaccaatgta

SEQ ID NO: 4161827 - DNA, 25 bp, Homo sapien
tgaaccatgatcatcacaccaatgt

SEQ ID NO: 4161828 - DNA, 25 bp, Homo sapien
gagactagctgaggcaagatagtga

SEQ ID NO: 4161829 - DNA, 25 bp, Homo sapien
gactagctgaggcaagatagtgaga

SEQ ID NO: 4161830 - DNA, 25 bp, Homo sapien
tgtcacctcttggcagtttttgttt

SEQ ID NO: 4161831 - DNA, 25 bp, Homo sapien
ttgagactagctgaggcaagatagt

SEQ ID NO: 4161832 - DNA, 25 bp, Homo sapien
cctcagagttcccatagcacttatt

SEQ ID NO: 4161833 - DNA, 25 bp, Homo sapien
tttcacttctctgctgatctctatt

SEQ ID NO: 4161834 - DNA, 25 bp, Homo sapien
tctctgctgatctctatttgtattt

SEQ ID NO: 4161835 - DNA, 25 bp, Homo sapien
agcacttattattttcacttctctg

SEQ ID NO: 4161836 - DNA, 25 bp, Homo sapien
aggagacaagggtgagccattccaa

SEQ ID NO: 4161837 - DNA, 25 bp, Homo sapien
aaccacaatgacaatgccaatcagc

SEQ ID NO: 4161838 - DNA, 25 bp, Homo sapien
acaaaggagacaagggtgagccatt

SEQ ID NO: 4161839 - DNA, 25 bp, Homo sapien
tgaaccagtcccaaccacaatgaca

SEQ ID NO: 4161840 - DNA, 25 bp, Homo sapien
atgggtaacaggatcccaaaatcct

SEQ ID NO: 4161841 - DNA, 25 bp, Homo sapien
aggaaagtcaagcttgaaaaatggg

SEQ ID NO: 4161842 - DNA, 25 bp, Homo sapien
gagaggaaagtcaagcttgaaaaat

SEQ ID NO: 4161843 - DNA, 25 bp, Homo sapien
gggagaggaaagtcaagcttgaaaa

SEQ ID NO: 4161844 - DNA, 25 bp, Homo sapien
agtacccttaagagctcttatgcag

SEQ ID NO: 4161845 - DNA, 25 bp, Homo sapien
gtcttgttcacccatggccgacacc

SEQ ID NO: 4161846 - DNA, 25 bp, Homo sapien
tttgcttctatcctgctagtaccct

SEQ ID NO: 4161847 - DNA, 25 bp, Homo sapien
gacaccatgctaccttcactcttta

SEQ ID NO: 4161848 - DNA, 25 bp, Homo sapien
agcagaaaagccgtagtttgaagaa

SEQ ID NO: 4161849 - DNA, 25 bp, Homo sapien
cagaaaagccgtagtttgaagaaat

SEQ ID NO: 4161850 - DNA, 25 bp, Homo sapien
gtagtttgaagaaattggtccacat

SEQ ID NO: 4161851 - DNA, 25 bp, Homo sapien
gccgtagtttgaagaaattggtcca

SEQ ID NO: 4161852 - DNA, 25 bp, Homo sapien
aacattgatgaccagcaccaccacc

SEQ ID NO: 4161853 - DNA, 25 bp, Homo sapien
agtaacattgatgaccagcaccacc

SEQ ID NO: 4161854 - DNA, 25 bp, Homo sapien
gagtaacattgatgaccagcaccac

SEQ ID NO: 4161855 - DNA, 25 bp, Homo sapien
ctgagtaacattgatgaccagcacc

SEQ ID NO: 4161856 - DNA, 25 bp, Homo sapien
ctgaaacagtctcatggtccaagta

SEQ ID NO: 4161857 - DNA, 25 bp, Homo sapien
caaactgtccactgctgtcgatgaa

SEQ ID NO: 4161858 - DNA, 25 bp, Homo sapien
gaaacaaactgtccactgctgtcga

SEQ ID NO: 4161859 - DNA, 25 bp, Homo sapien
attcctgtcacctgggaggaaacaa

SEQ ID NO: 4161860 - DNA, 25 bp, Homo sapien
tagggatttcggctaattcctgtca

SEQ ID NO: 4161861 - DNA, 25 bp, Homo sapien
ctggctggacagggtctgctgatca

SEQ ID NO: 4161862 - DNA, 25 bp, Homo sapien
gacagggtctgctgatcatagccac

SEQ ID NO: 4161863 - DNA, 25 bp, Homo sapien
gctggacagggtctgctgatcatag

SEQ ID NO: 4161864 - DNA, 25 bp, Homo sapien
tggacagggtctgctgatcatagcc

SEQ ID NO: 4161865 - DNA, 25 bp, Homo sapien
ccaccttaaagaaggcagcagagtt

SEQ ID NO: 4161866 - DNA, 25 bp, Homo sapien
tgcacatgaaccagcacctcaagct

SEQ ID NO: 4161867 - DNA, 25 bp, Homo sapien
ggaacctgccggtgcaaggcagcca

SEQ ID NO: 4161868 - DNA, 25 bp, Homo sapien
cttgagggagtgaattctggcctgc

SEQ ID NO: 4161869 - DNA, 25 bp, Homo sapien
ggaagacacacgttgcactcagtag

SEQ ID NO: 4161870 - DNA, 25 bp, Homo sapien
ggctccccagtgtagaggtctgtaa

SEQ ID NO: 4161871 - DNA, 25 bp, Homo sapien
tcctgtaagcgctgaagaactctga

SEQ ID NO: 4161872 - DNA, 25 bp, Homo sapien
gagatacggatactttaactttgcc

SEQ ID NO: 4161873 - DNA, 25 bp, Homo sapien
gcactctctgcagcggttaggagac

SEQ ID NO: 4161874 - DNA, 25 bp, Homo sapien
gaaagcactctctgcagcggttagg

SEQ ID NO: 4161875 - DNA, 25 bp, Homo sapien
aagaaagcactctctgcagcggtta

SEQ ID NO: 4161876 - DNA, 25 bp, Homo sapien
tctgcagcggttaggagacctttca

SEQ ID NO: 4161877 - DNA, 25 bp, Homo sapien
gcatgtctgaaacctgaacccacga

SEQ ID NO: 4161878 - DNA, 25 bp, Homo sapien
gaagggcagggacaaacacattatt

SEQ ID NO: 4161879 - DNA, 25 bp, Homo sapien
taggccactaagtagactgacaacg

SEQ ID NO: 4161880 - DNA, 25 bp, Homo sapien
ggtatgaccaaaagctgacttcagg

SEQ ID NO: 4161881 - DNA, 25 bp, Homo sapien
ctacagaagtcattattgggacaac

SEQ ID NO: 4161882 - DNA, 25 bp, Homo sapien
cacactgagtaagcatagattagat

SEQ ID NO: 4161883 - DNA, 25 bp, Homo sapien
gaagtcaagtgagctgaaggttaca

SEQ ID NO: 4161884 - DNA, 25 bp, Homo sapien
caaaattgccaatgttgtacaaaac

SEQ ID NO: 4161885 - DNA, 25 bp, Homo sapien
ttaagagagcacatataaactactt

SEQ ID NO: 4161886 - DNA, 25 bp, Homo sapien
catgagtttagacttttatggtaag

SEQ ID NO: 4161887 - DNA, 25 bp, Homo sapien
aaggaagtgtacaggcctggccaca

SEQ ID NO: 4161888 - DNA, 25 bp, Homo sapien
tggccacattacagcataatcaaat

SEQ ID NO: 4161889 - DNA, 25 bp, Homo sapien
ttttcaggctgcaagtatacgctgc

SEQ ID NO: 4161890 - DNA, 25 bp, Homo sapien
tactcgaagataagggtggtgcctc

SEQ ID NO: 4161891 - DNA, 25 bp, Homo sapien
tggactcagagaatggctcacactg

SEQ ID NO: 4161892 - DNA, 25 bp, Homo sapien
tgtactactcaagggaggcagcagg

SEQ ID NO: 4161893 - DNA, 25 bp, Homo sapien
gactggcattttgatattgacacca

SEQ ID NO: 4161894 - DNA, 25 bp, Homo sapien
agttacccaatcaggtccactggag

SEQ ID NO: 4161895 - DNA, 25 bp, Homo sapien
tgggaatcacagttacccaatcagg

SEQ ID NO: 4161896 - DNA, 25 bp, Homo sapien
caggtccactggagttgactggcat

SEQ ID NO: 4161897 - DNA, 25 bp, Homo sapien
cttgagatagttctagactgttagt

SEQ ID NO: 4161898 - DNA, 25 bp, Homo sapien
cactctgtaatgttgtcagggtcat

SEQ ID NO: 4161899 - DNA, 25 bp, Homo sapien
cattgcctgattgttgagtcaccaa

SEQ ID NO: 4161900 - DNA, 25 bp, Homo sapien
aactgacgcatcttaaactttctgg

SEQ ID NO: 4161901 - DNA, 25 bp, Homo sapien
gtaaggtattcaaaccattgcctga

SEQ ID NO: 4161902 - DNA, 25 bp, Homo sapien
agtgagtctgcttatttcaaagctg

SEQ ID NO: 4161903 - DNA, 25 bp, Homo sapien
gatgtgggaaagagttacgaaacaa

SEQ ID NO: 4161904 - DNA, 25 bp, Homo sapien
tgcttatttcaaagctgatgtggga

SEQ ID NO: 4161905 - DNA, 25 bp, Homo sapien
aagctgatgtgggaaagagttacga

SEQ ID NO: 4161906 - DNA, 25 bp, Homo sapien
ccacattcttgggactacccaagtt

SEQ ID NO: 4161907 - DNA, 25 bp, Homo sapien
cccacattcttgggactacccaagt

SEQ ID NO: 4161908 - DNA, 25 bp, Homo sapien
cacattcttgggactacccaagtta

SEQ ID NO: 4161909 - DNA, 25 bp, Homo sapien
tgtaccagtcgctgttgaaaaggct

SEQ ID NO: 4161910 - DNA, 25 bp, Homo sapien
cagcttgtgcggtagataatgggcc

SEQ ID NO: 4161911 - DNA, 25 bp, Homo sapien
gagccgccggatgtacacttccaaa

SEQ ID NO: 4161912 - DNA, 25 bp, Homo sapien
gacgagatatactccaacccctgag

SEQ ID NO: 4161913 - DNA, 25 bp, Homo sapien
taagctttctctagttaaccgccag

SEQ ID NO: 4161914 - DNA, 25 bp, Homo sapien
taaccgccagaagatggattacttg

SEQ ID NO: 4161915 - DNA, 25 bp, Homo sapien
tgagcactcgccacaaaggttggtt

SEQ ID NO: 4161916 - DNA, 25 bp, Homo sapien
aagtagtcacccctcctaggagaag

SEQ ID NO: 4161917 - DNA, 25 bp, Homo sapien
aaaggtctgttttgcattcgctgaa

SEQ ID NO: 4161918 - DNA, 25 bp, Homo sapien
tcatactggaacaccaaaggtctgt

SEQ ID NO: 4161919 - DNA, 25 bp, Homo sapien
cactatttccttgaacagggtccag

SEQ ID NO: 4161920 - DNA, 25 bp, Homo sapien
ctcttaaaaagaggcccgatggcct

SEQ ID NO: 4161921 - DNA, 25 bp, Homo sapien
gcagcgaggcctagatttgtggatt

SEQ ID NO: 4161922 - DNA, 25 bp, Homo sapien
atcctctctttcgaaccgggttgcg

SEQ ID NO: 4161923 - DNA, 25 bp, Homo sapien
tcagcgataataacccaagtacgtg

SEQ ID NO: 4161924 - DNA, 25 bp, Homo sapien
gaggttacatgataagcagcagcta

SEQ ID NO: 4161925 - DNA, 25 bp, Homo sapien
tactcaaacataggagagtgactcc

SEQ ID NO: 4161926 - DNA, 25 bp, Homo sapien
tattttgccccaaagcaagtatggc

SEQ ID NO: 4161927 - DNA, 25 bp, Homo sapien
catgcctacggttggtgggaaagta

SEQ ID NO: 4161928 - DNA, 25 bp, Homo sapien
tacagctgtaagaatgaatgagggc

SEQ ID NO: 4161929 - DNA, 25 bp, Homo sapien
cgtcatctgcactgtgcactgatgt

SEQ ID NO: 4161930 - DNA, 25 bp, Homo sapien
tccgtcatctgcactgtgcactgat

SEQ ID NO: 4161931 - DNA, 25 bp, Homo sapien
ccgtcatctgcactgtgcactgatg

SEQ ID NO: 4161932 - DNA, 25 bp, Homo sapien
ttccgtcatctgcactgtgcactga

SEQ ID NO: 4161933 - DNA, 25 bp, Homo sapien
gggccctcgagatcttcctgttaac

SEQ ID NO: 4161934 - DNA, 25 bp, Homo sapien
aaaggtgaagttcagccagggccct

SEQ ID NO: 4161935 - DNA, 25 bp, Homo sapien
caagaaagccaaaaggtgaagttca

SEQ ID NO: 4161936 - DNA, 25 bp, Homo sapien
agccagggccctcgagatcttcctg

SEQ ID NO: 4161937 - DNA, 25 bp, Homo sapien
ccaaaactgagagggggcatgatgc

SEQ ID NO: 4161938 - DNA, 25 bp, Homo sapien
ggagcctcttcaccaaaactgagag

SEQ ID NO: 4161939 - DNA, 25 bp, Homo sapien
agagggggcatgatgctctccaagc

SEQ ID NO: 4161940 - DNA, 25 bp, Homo sapien
agcctcttcaccaaaactgagaggg

SEQ ID NO: 4161941 - DNA, 25 bp, Homo sapien
tacgtagagagttcccggagagcct

SEQ ID NO: 4161942 - DNA, 25 bp, Homo sapien
tactgaacagaaaggccatcgatgc

SEQ ID NO: 4161943 - DNA, 25 bp, Homo sapien
tacaatgttccggacacgcttccag

SEQ ID NO: 4161944 - DNA, 25 bp, Homo sapien
tatataagataatgccaggtggcca

SEQ ID NO: 4161945 - DNA, 25 bp, Homo sapien
tgaccaaccaggctatggcacagac

SEQ ID NO: 4161946 - DNA, 25 bp, Homo sapien
tgtctttgtggagcttatacctggc

SEQ ID NO: 4161947 - DNA, 25 bp, Homo sapien
tatatacttcccaataggccacctg

SEQ ID NO: 4161948 - DNA, 25 bp, Homo sapien
caaagcacagtataccatattgagg

SEQ ID NO: 4161949 - DNA, 25 bp, Homo sapien
tcagtaacacgaaactgagtatagt

SEQ ID NO: 4161950 - DNA, 25 bp, Homo sapien
ttcagtaacacgaaactgagtatag

SEQ ID NO: 4161951 - DNA, 25 bp, Homo sapien
cagtaacacgaaactgagtatagtt

SEQ ID NO: 4161952 - DNA, 25 bp, Homo sapien
agtaacacgaaactgagtatagttt

SEQ ID NO: 4161953 - DNA, 25 bp, Homo sapien
ggctctctactgcttttagcatgga

SEQ ID NO: 4161954 - DNA, 25 bp, Homo sapien
tcttcttagaatgacagatgtccaa

SEQ ID NO: 4161955 - DNA, 25 bp, Homo sapien
atgacagatgtccaagtcctgcctt

SEQ ID NO: 4161956 - DNA, 25 bp, Homo sapien
gcatggagtccagtcttcttagaat

SEQ ID NO: 4161957 - DNA, 25 bp, Homo sapien
tagggatcgaatgtaggcaatgtcc

SEQ ID NO: 4161958 - DNA, 25 bp, Homo sapien
gactgccatcggcataccaatggaa

SEQ ID NO: 4161959 - DNA, 25 bp, Homo sapien
cactaacactaatggcagctgaaga

SEQ ID NO: 4161960 - DNA, 25 bp, Homo sapien
ttctaagaattcctccacaccaggg

SEQ ID NO: 4161961 - DNA, 25 bp, Homo sapien
aatgtacaataacttttcgaatctc

SEQ ID NO: 4161962 - DNA, 25 bp, Homo sapien
caatgggtataactaatggtgcctt

SEQ ID NO: 4161963 - DNA, 25 bp, Homo sapien
accactgtctacttgcagaaagaaa

SEQ ID NO: 4161964 - DNA, 25 bp, Homo sapien
tcgaatctcatcatttatcctgaaa

SEQ ID NO: 4161965 - DNA, 25 bp, Homo sapien
agggagctgtcggcgggcggacggc

SEQ ID NO: 4161966 - DNA, 25 bp, Homo sapien
gctcagggagctgtcggcgggcgga

SEQ ID NO: 4161967 - DNA, 25 bp, Homo sapien
gggagctgtcggcgggcggacggcg

SEQ ID NO: 4161968 - DNA, 25 bp, Homo sapien
tcagggagctgtcggcgggcggacg

SEQ ID NO: 4161969 - DNA, 25 bp, Homo sapien
ggcgacgcgccgtagaagtagctca

SEQ ID NO: 4161970 - DNA, 25 bp, Homo sapien
aggacaccgacgaggcagaggagaa

SEQ ID NO: 4161971 - DNA, 25 bp, Homo sapien
caagaccgagcagctggcgtcgcag

SEQ ID NO: 4161972 - DNA, 25 bp, Homo sapien
tgagcgggctggtcatgaggccgca

SEQ ID NO: 4161973 - DNA, 25 bp, Homo sapien
tcggccgagcggtttctgaagcccc

SEQ ID NO: 4161974 - DNA, 25 bp, Homo sapien
gagcgagcgatctcctggtcactcg

SEQ ID NO: 4161975 - DNA, 25 bp, Homo sapien
aagctgcttcttagagagcgagcga

SEQ ID NO: 4161976 - DNA, 25 bp, Homo sapien
cgaagggcgtgtaggtcaggcaggc

SEQ ID NO: 4161977 - DNA, 25 bp, Homo sapien
caagaccgcaaaaattccgggcaga

SEQ ID NO: 4161978 - DNA, 25 bp, Homo sapien
ggcttcaccttgataacagcagttt

SEQ ID NO: 4161979 - DNA, 25 bp, Homo sapien
gagttggttttcagcccggcttcac

SEQ ID NO: 4161980 - DNA, 25 bp, Homo sapien
gaaaggaaaccaattcgcagcccat

SEQ ID NO: 4161981 - DNA, 25 bp, Homo sapien
ctgagttctttacccgaacaccttg

SEQ ID NO: 4161982 - DNA, 25 bp, Homo sapien
tttatgacttcggatgtgcaacagg

SEQ ID NO: 4161983 - DNA, 25 bp, Homo sapien
tcatccacagcttggccagaagcct

SEQ ID NO: 4161984 - DNA, 25 bp, Homo sapien
cttcggatgtgcaacaggagttcct

SEQ ID NO: 4161985 - DNA, 25 bp, Homo sapien
actgttctatgttcacaccttgtgt

SEQ ID NO: 4161986 - DNA, 25 bp, Homo sapien
aactgttctatgttcacaccttgtg

SEQ ID NO: 4161987 - DNA, 25 bp, Homo sapien
tgaactgttctatgttcacaccttg

SEQ ID NO: 4161988 - DNA, 25 bp, Homo sapien
tctgaactgttctatgttcacacct

SEQ ID NO: 4161989 - DNA, 25 bp, Homo sapien
caggtccatcagacaacgaatcggg

SEQ ID NO: 4161990 - DNA, 25 bp, Homo sapien
gagctggccttttgcaagcaggtcc

SEQ ID NO: 4161991 - DNA, 25 bp, Homo sapien
cttttcccactgtatgatactgtgt

SEQ ID NO: 4161992 - DNA, 25 bp, Homo sapien
attgggaatgcaacagagctggcct

SEQ ID NO: 4161993 - DNA, 25 bp, Homo sapien
ttccatgctctccccgggcgttggt

SEQ ID NO: 4161994 - DNA, 25 bp, Homo sapien
tcttaatgttgataatgttctgaag

SEQ ID NO: 4161995 - DNA, 25 bp, Homo sapien
cctgtttgggttcattgagatgaac

SEQ ID NO: 4161996 - DNA, 25 bp, Homo sapien
ctctccccgggcgttggtgtttgag

SEQ ID NO: 4161997 - DNA, 25 bp, Homo sapien
tgggagcccctgacttggaatggtt

SEQ ID NO: 4161998 - DNA, 25 bp, Homo sapien
tacatgctggttctgtggagaatac

SEQ ID NO: 4161999 - DNA, 25 bp, Homo sapien
tggagaatactggtacagggaagcc

SEQ ID NO: 4162000 - DNA, 25 bp, Homo sapien
gaagcctggtctatcatttgttggg

SEQ ID NO: 4162001 - DNA, 25 bp, Homo sapien
caaagaggtttggttcataagcggg

SEQ ID NO: 4162002 - DNA, 25 bp, Homo sapien
tgtgattctggaccatcaaagaggt

SEQ ID NO: 4162003 - DNA, 25 bp, Homo sapien
tgcatgggattagcaatattctcag

SEQ ID NO: 4162004 - DNA, 25 bp, Homo sapien
cctttgatcaccaagaagggaaact

SEQ ID NO: 4162005 - DNA, 25 bp, Homo sapien
tgatttccctaactgtgtggtgttc

SEQ ID NO: 4162006 - DNA, 25 bp, Homo sapien
tgtggtgttcattggatttcccatg

SEQ ID NO: 4162007 - DNA, 25 bp, Homo sapien
acctgccactgaaaaagtgatttcc

SEQ ID NO: 4162008 - DNA, 25 bp, Homo sapien
gtgtcaccatctgcatcctttgaaa

SEQ ID NO: 4162009 - DNA, 25 bp, Homo sapien
gataatacaccccagttggaacagg

SEQ ID NO: 4162010 - DNA, 25 bp, Homo sapien
catggaaaggaaagcgggtgaatca

SEQ ID NO: 4162011 - DNA, 25 bp, Homo sapien
tatattggtacactcaaatgaaaca

SEQ ID NO: 4162012 - DNA, 25 bp, Homo sapien
gaacaggatgggttaggctatcaga

SEQ ID NO: 4162013 - DNA, 25 bp, Homo sapien
ctgtccattgtgctctttaatatcc

SEQ ID NO: 4162014 - DNA, 25 bp, Homo sapien
ccattgtgctctttaatatccagca

SEQ ID NO: 4162015 - DNA, 25 bp, Homo sapien
gctctttaatatccagcatgtgaag

SEQ ID NO: 4162016 - DNA, 25 bp, Homo sapien
tcccttgggcaacagcaatatgaag

SEQ ID NO: 4162017 - DNA, 25 bp, Homo sapien
cctgcacaatgagatgctgattggc

SEQ ID NO: 4162018 - DNA, 25 bp, Homo sapien
agatcctgcacaatgagatgctgat

SEQ ID NO: 4162019 - DNA, 25 bp, Homo sapien
tgtgccccgatgttcaccagatcct

SEQ ID NO: 4162020 - DNA, 25 bp, Homo sapien
caatgagatgctgattggcagccac

SEQ ID NO: 4162021 - DNA, 25 bp, Homo sapien
tgcctcaagatccacaaactgatta

SEQ ID NO: 4162022 - DNA, 25 bp, Homo sapien
caaactgattacttcccactgctcc

SEQ ID NO: 4162023 - DNA, 25 bp, Homo sapien
catcatagttagttgcctcaagatc

SEQ ID NO: 4162024 - DNA, 25 bp, Homo sapien
agttgcctcaagatccacaaactga

SEQ ID NO: 4162025 - DNA, 25 bp, Homo sapien
aggtgaatgaggctgttgatttctc

SEQ ID NO: 4162026 - DNA, 25 bp, Homo sapien
catggaccacagcattgtgggctat

SEQ ID NO: 4162027 - DNA, 25 bp, Homo sapien
gctcccatttgaattaggcacttaa

SEQ ID NO: 4162028 - DNA, 25 bp, Homo sapien
gtatcaaccagactcttattcttca

SEQ ID NO: 4162029 - DNA, 25 bp, Homo sapien
ggaagcaaggtcttttgctatataa

SEQ ID NO: 4162030 - DNA, 25 bp, Homo sapien
gtacttggaagcaaggtcttttgct

SEQ ID NO: 4162031 - DNA, 25 bp, Homo sapien
cccatacattgctactcacaccatt

SEQ ID NO: 4162032 - DNA, 25 bp, Homo sapien
tgggcttcttaaccacccatacatt

SEQ ID NO: 4162033 - DNA, 25 bp, Homo sapien
tcagagactcactttgaatgctccc

SEQ ID NO: 4162034 - DNA, 25 bp, Homo sapien
tatatgcctcttgtcacaatgtacc

SEQ ID NO: 4162035 - DNA, 25 bp, Homo sapien
gaatgtctgattcagcttcagagac

SEQ ID NO: 4162036 - DNA, 25 bp, Homo sapien
ggtagcctccctgtagagttatatt

SEQ ID NO: 4162037 - DNA, 25 bp, Homo sapien
gggctgtgcggccacttttgcgatc

SEQ ID NO: 4162038 - DNA, 25 bp, Homo sapien
tgcagggctgtgcggccacttttgc

SEQ ID NO: 4162039 - DNA, 25 bp, Homo sapien
gctccaaaaagaggcgaatgagttc

SEQ ID NO: 4162040 - DNA, 25 bp, Homo sapien
aaaagaggcgaatgagttccagatt

SEQ ID NO: 4162041 - DNA, 25 bp, Homo sapien
atgaattatcagacatcaggaaggg

SEQ ID NO: 4162042 - DNA, 25 bp, Homo sapien
gaaggccattccaactctggtgtac

SEQ ID NO: 4162043 - DNA, 25 bp, Homo sapien
aaaactttgagagggtgtacagaag

SEQ ID NO: 4162044 - DNA, 25 bp, Homo sapien
gaaatgaattatcagacatcaggaa

SEQ ID NO: 4162045 - DNA, 25 bp, Homo sapien
catcaacaggcggacagcatctaat

SEQ ID NO: 4162046 - DNA, 25 bp, Homo sapien
aatgcactggctgttcgttctccaa

SEQ ID NO: 4162047 - DNA, 25 bp, Homo sapien
tgtcaaccgatactgcaagctggca

SEQ ID NO: 4162048 - DNA, 25 bp, Homo sapien
ttccgagtacttgggtctgctccct

SEQ ID NO: 4162049 - DNA, 25 bp, Homo sapien
ttcctctccctcctgtgcctctcac

SEQ ID NO: 4162050 - DNA, 25 bp, Homo sapien
gaaggctcatacattacaagactaa

SEQ ID NO: 4162051 - DNA, 25 bp, Homo sapien
tgatagagtccacctgaagagcaac

SEQ ID NO: 4162052 - DNA, 25 bp, Homo sapien
tgtacccgggactattgtgagcact

SEQ ID NO: 4162053 - DNA, 25 bp, Homo sapien
gctgtttccaaacgaagagtaactc

SEQ ID NO: 4162054 - DNA, 25 bp, Homo sapien
aaagatcccggctcattcagagtga

SEQ ID NO: 4162055 - DNA, 25 bp, Homo sapien
tacacgtaacttcatggatcacaga

SEQ ID NO: 4162056 - DNA, 25 bp, Homo sapien
gaagtcagcctcaactaacaggaac

SEQ ID NO: 4162057 - DNA, 25 bp, Homo sapien
gggatacaactgatagctgctagaa

SEQ ID NO: 4162058 - DNA, 25 bp, Homo sapien
tctctgctgaatggactttcccttc

SEQ ID NO: 4162059 - DNA, 25 bp, Homo sapien
tctgctgaatggactttcccttcag

SEQ ID NO: 4162060 - DNA, 25 bp, Homo sapien
ctctgctgaatggactttcccttca

SEQ ID NO: 4162061 - DNA, 25 bp, Homo sapien
ctagccaggctccaagctaatggag

SEQ ID NO: 4162062 - DNA, 25 bp, Homo sapien
gccaatataaggcaaatggtctatg

SEQ ID NO: 4162063 - DNA, 25 bp, Homo sapien
tgtacagatacatcaggactgccta

SEQ ID NO: 4162064 - DNA, 25 bp, Homo sapien
tgacagtgagtgttgctagccaggc

SEQ ID NO: 4162065 - DNA, 25 bp, Homo sapien
taatagtgaactaaatatgtttgtt

SEQ ID NO: 4162066 - DNA, 25 bp, Homo sapien
tataatagtgaactaaatatgtttg

SEQ ID NO: 4162067 - DNA, 25 bp, Homo sapien
cccactatataatagtgaactaaat

SEQ ID NO: 4162068 - DNA, 25 bp, Homo sapien
ataacccactatataatagtgaact

SEQ ID NO: 4162069 - DNA, 25 bp, Homo sapien
ctagatcccagatacctgggtatga

SEQ ID NO: 4162070 - DNA, 25 bp, Homo sapien
agatgtctagatcccagatacctgg

SEQ ID NO: 4162071 - DNA, 25 bp, Homo sapien
aaattcagatgtctagatcccagat

SEQ ID NO: 4162072 - DNA, 25 bp, Homo sapien
caaattcagatgtctagatcccaga

SEQ ID NO: 4162073 - DNA, 25 bp, Homo sapien
aatacattcctcaggcatgccagcg

SEQ ID NO: 4162074 - DNA, 25 bp, Homo sapien
tagtccaatgactgaagcctgtcca

SEQ ID NO: 4162075 - DNA, 25 bp, Homo sapien
caaggtggcaagatcctgcctgtac

SEQ ID NO: 4162076 - DNA, 25 bp, Homo sapien
aactcccagggactaaggccaaatg

SEQ ID NO: 4162077 - DNA, 25 bp, Homo sapien
caatgtgatcaatccaaagggtatc

SEQ ID NO: 4162078 - DNA, 25 bp, Homo sapien
taacgtgtctacaagacatactggg

SEQ ID NO: 4162079 - DNA, 25 bp, Homo sapien
aaagaatttaagtactcagctgcaa

SEQ ID NO: 4162080 - DNA, 25 bp, Homo sapien
caaggtgattataactaacgtgtct

SEQ ID NO: 4162081 - DNA, 25 bp, Homo sapien
tctatctagggaaataaggcactag

SEQ ID NO: 4162082 - DNA, 25 bp, Homo sapien
cagacttctcctagtaaacttagca

SEQ ID NO: 4162083 - DNA, 25 bp, Homo sapien
tctaaacatgtgaatgatcgacagc

SEQ ID NO: 4162084 - DNA, 25 bp, Homo sapien
tgttaaatcttgtatactttcagga

SEQ ID NO: 4162085 - DNA, 25 bp, Homo sapien
gaaatgtgccacccatgcaatgttt

SEQ ID NO: 4162086 - DNA, 25 bp, Homo sapien
aaatgtgccacccatgcaatgtttc

SEQ ID NO: 4162087 - DNA, 25 bp, Homo sapien
aatgtgccacccatgcaatgtttct

SEQ ID NO: 4162088 - DNA, 25 bp, Homo sapien
agaaatgtgccacccatgcaatgtt

SEQ ID NO: 4162089 - DNA, 25 bp, Homo sapien
aagcagacagccacgggtaagccca

SEQ ID NO: 4162090 - DNA, 25 bp, Homo sapien
gcaactaatgggaaattcatattca

SEQ ID NO: 4162091 - DNA, 25 bp, Homo sapien
ggtaagcccagttgaagtagtgcca

SEQ ID NO: 4162092 - DNA, 25 bp, Homo sapien
agttgcaagttgagtttctatacgc

SEQ ID NO: 4162093 - DNA, 25 bp, Homo sapien
ggtgattaacgcagctccacagaaa

SEQ ID NO: 4162094 - DNA, 25 bp, Homo sapien
ccttggtgattaacgcagctccaca

SEQ ID NO: 4162095 - DNA, 25 bp, Homo sapien
tctccttggtgattaacgcagctcc

SEQ ID NO: 4162096 - DNA, 25 bp, Homo sapien
gcctctccttggtgattaacgcagc

SEQ ID NO: 4162097 - DNA, 25 bp, Homo sapien
tctgcttggctactcccttgcttga

SEQ ID NO: 4162098 - DNA, 25 bp, Homo sapien
tactcccttgcttgactcattttca

SEQ ID NO: 4162099 - DNA, 25 bp, Homo sapien
ctctctccctaatgaagaccatggg

SEQ ID NO: 4162100 - DNA, 25 bp, Homo sapien
agcattctgcttggctactcccttg

SEQ ID NO: 4162101 - DNA, 25 bp, Homo sapien
gataccccagttatagctgctaggt

SEQ ID NO: 4162102 - DNA, 25 bp, Homo sapien
gccacagccctgattgtgagggata

SEQ ID NO: 4162103 - DNA, 25 bp, Homo sapien
tttaatacgtatagccaagacacag

SEQ ID NO: 4162104 - DNA, 25 bp, Homo sapien
gatggagttccccatacagtccaaa

SEQ ID NO: 4162105 - DNA, 25 bp, Homo sapien
cccaccttgaaagaatcagactctg

SEQ ID NO: 4162106 - DNA, 25 bp, Homo sapien
agtgccgttacatgagggatcccag

SEQ ID NO: 4162107 - DNA, 25 bp, Homo sapien
tcttgtcacaaacctgtggtccatc

SEQ ID NO: 4162108 - DNA, 25 bp, Homo sapien
gcttctgtcagaatgagtgccgtta

SEQ ID NO: 4162109 - DNA, 25 bp, Homo sapien
tggtatttcaagtttgctatgggtt

SEQ ID NO: 4162110 - DNA, 25 bp, Homo sapien
tattaaatcctagtcaagccaagcc

SEQ ID NO: 4162111 - DNA, 25 bp, Homo sapien
caagtttgctatgggtttatcggga

SEQ ID NO: 4162112 - DNA, 25 bp, Homo sapien
ccttcataagttgaggcacatctgt

SEQ ID NO: 4162113 - DNA, 25 bp, Homo sapien
agtgtagataacttactccctttgg

SEQ ID NO: 4162114 - DNA, 25 bp, Homo sapien
gagaagccaggaaatagcagaacaa

SEQ ID NO: 4162115 - DNA, 25 bp, Homo sapien
gaacagtgtagataacttactccct

SEQ ID NO: 4162116 - DNA, 25 bp, Homo sapien
cagtgtagataacttactccctttg

SEQ ID NO: 4162117 - DNA, 25 bp, Homo sapien
tctttaatcttgaatcgcttttgtg

SEQ ID NO: 4162118 - DNA, 25 bp, Homo sapien
gtattgtgagaaataggcatccagt

SEQ ID NO: 4162119 - DNA, 25 bp, Homo sapien
cttttgtgtattgtgagaaataggc

SEQ ID NO: 4162120 - DNA, 25 bp, Homo sapien
aatcttgaatcgcttttgtgtattg

SEQ ID NO: 4162121 - DNA, 25 bp, Homo sapien
ctgaacaaataattatgttggtcat

SEQ ID NO: 4162122 - DNA, 25 bp, Homo sapien
tatggatttgtaccatgggttggaa

SEQ ID NO: 4162123 - DNA, 25 bp, Homo sapien
ctgtatcttctctagagttctgggt

SEQ ID NO: 4162124 - DNA, 25 bp, Homo sapien
tcatggtgccatgtttcatacagag

SEQ ID NO: 4162125 - DNA, 25 bp, Homo sapien
gcctggaacttaaatcctatcagat

SEQ ID NO: 4162126 - DNA, 25 bp, Homo sapien
cattctgtcttccttattgaaacta

SEQ ID NO: 4162127 - DNA, 25 bp, Homo sapien
tgaaactattattcatagtcaaggt

SEQ ID NO: 4162128 - DNA, 25 bp, Homo sapien
attgaaactattattcatagtcaag

SEQ ID NO: 4162129 - DNA, 25 bp, Homo sapien
ttctgtcttccttattgaaactatt

SEQ ID NO: 4162130 - DNA, 25 bp, Homo sapien
ggctccatttttcgtctgcctgtca

SEQ ID NO: 4162131 - DNA, 25 bp, Homo sapien
gccatttggctccatttttcgtctg

SEQ ID NO: 4162132 - DNA, 25 bp, Homo sapien
ctccatgccatttggctccattttt

SEQ ID NO: 4162133 - DNA, 25 bp, Homo sapien
tttggctccatttttcgtctgcctg

SEQ ID NO: 4162134 - DNA, 25 bp, Homo sapien
caaggtaaaatccagcagtgatgac

SEQ ID NO: 4162135 - DNA, 25 bp, Homo sapien
tcttgaatgaatgcccagcattttg

SEQ ID NO: 4162136 - DNA, 25 bp, Homo sapien
gacagttcatccattacttcaaagt

SEQ ID NO: 4162137 - DNA, 25 bp, Homo sapien
tgtgcctaacacagagtgagcttct

SEQ ID NO: 4162138 - DNA, 25 bp, Homo sapien
gcttcctttccactggaggccctca

SEQ ID NO: 4162139 - DNA, 25 bp, Homo sapien
cttcctttccactggaggccctcat

SEQ ID NO: 4162140 - DNA, 25 bp, Homo sapien
atgcttcctttccactggaggccct

SEQ ID NO: 4162141 - DNA, 25 bp, Homo sapien
catgcttcctttccactggaggccc

SEQ ID NO: 4162142 - DNA, 25 bp, Homo sapien
taaattcgtcttccctcacaacctg

SEQ ID NO: 4162143 - DNA, 25 bp, Homo sapien
gacaagccctggttggttgagttat

SEQ ID NO: 4162144 - DNA, 25 bp, Homo sapien
gtaggattgtattcagacaagccct

SEQ ID NO: 4162145 - DNA, 25 bp, Homo sapien
ctgggagtaaattcgtcttccctca

SEQ ID NO: 4162146 - DNA, 25 bp, Homo sapien
tctctgacccagctaaaaaaggttc

SEQ ID NO: 4162147 - DNA, 25 bp, Homo sapien
ttcatcaatgggactagacttccag

SEQ ID NO: 4162148 - DNA, 25 bp, Homo sapien
tcatgtgattagcttggacccaacc

SEQ ID NO: 4162149 - DNA, 25 bp, Homo sapien
agtcacgctgatcttgggagggaaa

SEQ ID NO: 4162150 - DNA, 25 bp, Homo sapien
ttgtgcatcatacaccacataatct

SEQ ID NO: 4162151 - DNA, 25 bp, Homo sapien
tcatacaccacataatcttttaatg

SEQ ID NO: 4162152 - DNA, 25 bp, Homo sapien
gtgcatcatacaccacataatcttt

SEQ ID NO: 4162153 - DNA, 25 bp, Homo sapien
gcatcatacaccacataatctttta

SEQ ID NO: 4162154 - DNA, 25 bp, Homo sapien
caagagttggcacttattcaggaca

SEQ ID NO: 4162155 - DNA, 25 bp, Homo sapien
cagcactggtcctgccatttggaac

SEQ ID NO: 4162156 - DNA, 25 bp, Homo sapien
tgtacatgattgagtagccaagagt

SEQ ID NO: 4162157 - DNA, 25 bp, Homo sapien
catttggaacagtacccactaagat

SEQ ID NO: 4162158 - DNA, 25 bp, Homo sapien
caatcatgtacaccaacaattgatg

SEQ ID NO: 4162159 - DNA, 25 bp, Homo sapien
cagtactcaatcatgtacaccaaca

SEQ ID NO: 4162160 - DNA, 25 bp, Homo sapien
tactcaatcatgtacaccaacaatt

SEQ ID NO: 4162161 - DNA, 25 bp, Homo sapien
tcagtactcaatcatgtacaccaac

SEQ ID NO: 4162162 - DNA, 25 bp, Homo sapien
cttctgaagggctcgcagcacaggg

SEQ ID NO: 4162163 - DNA, 25 bp, Homo sapien
ggcctgtgccctcaccttagcccag

SEQ ID NO: 4162164 - DNA, 25 bp, Homo sapien
gcttctgaagggctcgcagcacagg

SEQ ID NO: 4162165 - DNA, 25 bp, Homo sapien
tgtgccctcaccttagcccagtgac

SEQ ID NO: 4162166 - DNA, 25 bp, Homo sapien
tcatagcccgatcatcagaaaggat

SEQ ID NO: 4162167 - DNA, 25 bp, Homo sapien
aaaggatgccactcatcccaggacc

SEQ ID NO: 4162168 - DNA, 25 bp, Homo sapien
cagaaaggatgccactcatcccagg

SEQ ID NO: 4162169 - DNA, 25 bp, Homo sapien
ctcatagcccgatcatcagaaagga

SEQ ID NO: 4162170 - DNA, 25 bp, Homo sapien
gtgaaattccctgcgctattgtcac

SEQ ID NO: 4162171 - DNA, 25 bp, Homo sapien
aaattccctgcgctattgtcacatc

SEQ ID NO: 4162172 - DNA, 25 bp, Homo sapien
agtgaaattccctgcgctattgtca

SEQ ID NO: 4162173 - DNA, 25 bp, Homo sapien
attccctgcgctattgtcacatctc

SEQ ID NO: 4162174 - DNA, 25 bp, Homo sapien
tactcgtttttggatttagatttga

SEQ ID NO: 4162175 - DNA, 25 bp, Homo sapien
gccctatttgacacccctggacagg

SEQ ID NO: 4162176 - DNA, 25 bp, Homo sapien
aggtactgatactctgggataaggg

SEQ ID NO: 4162177 - DNA, 25 bp, Homo sapien
cctggacagggccagaggtactgat

SEQ ID NO: 4162178 - DNA, 25 bp, Homo sapien
tccatccagcggagtcaagtgtgcc

SEQ ID NO: 4162179 - DNA, 25 bp, Homo sapien
tctttgtacatgatttttctagcca

SEQ ID NO: 4162180 - DNA, 25 bp, Homo sapien
atctttgtacatgatttttctagcc

SEQ ID NO: 4162181 - DNA, 25 bp, Homo sapien
ttttctagccagtggatgatgatac

SEQ ID NO: 4162182 - DNA, 25 bp, Homo sapien
cacttcaacataattgctttctgca

SEQ ID NO: 4162183 - DNA, 25 bp, Homo sapien
tatgagtcacttcaacataattgct

SEQ ID NO: 4162184 - DNA, 25 bp, Homo sapien
ttttgatggcatatgagtcacttca

SEQ ID NO: 4162185 - DNA, 25 bp, Homo sapien
tggcatatgagtcacttcaacataa

SEQ ID NO: 4162186 - DNA, 25 bp, Homo sapien
ttctttcatcaatcctctagaatct

SEQ ID NO: 4162187 - DNA, 25 bp, Homo sapien
gtttgttctttcatcaatcctctag

SEQ ID NO: 4162188 - DNA, 25 bp, Homo sapien
tgcccatttctttccatgaccactg

SEQ ID NO: 4162189 - DNA, 25 bp, Homo sapien
ccatttctttccatgaccactgccc

SEQ ID NO: 4162190 - DNA, 25 bp, Homo sapien
ggaccagcaagtctgtatcaccaac

SEQ ID NO: 4162191 - DNA, 25 bp, Homo sapien
caaatcaccagcacgttcacgagga

SEQ ID NO: 4162192 - DNA, 25 bp, Homo sapien
tctctcactgagactagacaatact

SEQ ID NO: 4162193 - DNA, 25 bp, Homo sapien
actgacagacagattgcccttggag

SEQ ID NO: 4162194 - DNA, 25 bp, Homo sapien
cggaataccctgtatgtaccacatg

SEQ ID NO: 4162195 - DNA, 25 bp, Homo sapien
aattagccctcacaactactctgta

SEQ ID NO: 4162196 - DNA, 25 bp, Homo sapien
acatgttgtgcgtctaaattagccc

SEQ ID NO: 4162197 - DNA, 25 bp, Homo sapien
gatgagtcaataggagcaatgaatt

SEQ ID NO: 4162198 - DNA, 25 bp, Homo sapien
gctgtcagctaagcttactgaccat

SEQ ID NO: 4162199 - DNA, 25 bp, Homo sapien
ggctgtcagctaagcttactgacca

SEQ ID NO: 4162200 - DNA, 25 bp, Homo sapien
gggctagtcagacctagttgtttgt

SEQ ID NO: 4162201 - DNA, 25 bp, Homo sapien
tagtcagacctagttgtttgtgcat

SEQ ID NO: 4162202 - DNA, 25 bp, Homo sapien
ccagggctagtcagacctagttgtt

SEQ ID NO: 4162203 - DNA, 25 bp, Homo sapien
agacctagttgtttgtgcatttctc

SEQ ID NO: 4162204 - DNA, 25 bp, Homo sapien
gttccaggccctcttctaagcactt

SEQ ID NO: 4162205 - DNA, 25 bp, Homo sapien
tatgttccaggccctcttctaagca

SEQ ID NO: 4162206 - DNA, 25 bp, Homo sapien
tgttccaggccctcttctaagcact

SEQ ID NO: 4162207 - DNA, 25 bp, Homo sapien
atgttccaggccctcttctaagcac

SEQ ID NO: 4162208 - DNA, 25 bp, Homo sapien
gggtcactggtgcctgacccatggc

SEQ ID NO: 4162209 - DNA, 25 bp, Homo sapien
gataagagaggctcctttaaccaaa

SEQ ID NO: 4162210 - DNA, 25 bp, Homo sapien
tctgataagagaggctcctttaacc

SEQ ID NO: 4162211 - DNA, 25 bp, Homo sapien
agggtcactggtgcctgacccatgg

SEQ ID NO: 4162212 - DNA, 25 bp, Homo sapien
caaagtcttgatcggcacccagatc

SEQ ID NO: 4162213 - DNA, 25 bp, Homo sapien
gtcaaagtcttgatcggcacccaga

SEQ ID NO: 4162214 - DNA, 25 bp, Homo sapien
tgatcggcacccagatctgtgctca

SEQ ID NO: 4162215 - DNA, 25 bp, Homo sapien
tcttgatcggcacccagatctgtgc

SEQ ID NO: 4162216 - DNA, 25 bp, Homo sapien
ggtgaagagacaatagccattttcc

SEQ ID NO: 4162217 - DNA, 25 bp, Homo sapien
aagaattgccaggtgaggctactca

SEQ ID NO: 4162218 - DNA, 25 bp, Homo sapien
caaagatgtaaggaggaggcgaaaa

SEQ ID NO: 4162219 - DNA, 25 bp, Homo sapien
agtgcaaattgcgtgaatcacagca

SEQ ID NO: 4162220 - DNA, 25 bp, Homo sapien
tgccatggacgaacagctcctcata

SEQ ID NO: 4162221 - DNA, 25 bp, Homo sapien
tactgcataggtcgtctggcgtgga

SEQ ID NO: 4162222 - DNA, 25 bp, Homo sapien
aattaatctcgtattggctacacag

SEQ ID NO: 4162223 - DNA, 25 bp, Homo sapien
tcagccagaacccaaggtttgccat

SEQ ID NO: 4162224 - DNA, 25 bp, Homo sapien
agattacctgggtttctaggtgtca

SEQ ID NO: 4162225 - DNA, 25 bp, Homo sapien
tacatggcagtggtaagatcagggc

SEQ ID NO: 4162226 - DNA, 25 bp, Homo sapien
tcagagagctgccaaatactttttc

SEQ ID NO: 4162227 - DNA, 25 bp, Homo sapien
taggtgtcagaagtagctggttttc

SEQ ID NO: 4162228 - DNA, 25 bp, Homo sapien
gcttaggcaatttgtgaatgctcag

SEQ ID NO: 4162229 - DNA, 25 bp, Homo sapien
gagttcatgtgttctctctccaaaa

SEQ ID NO: 4162230 - DNA, 25 bp, Homo sapien
tcacgacgtcccataaaaagcacaa

SEQ ID NO: 4162231 - DNA, 25 bp, Homo sapien
cattggtattttagctgaaagcttc

SEQ ID NO: 4162232 - DNA, 25 bp, Homo sapien
gccactagcattaaaagaaagattg

SEQ ID NO: 4162233 - DNA, 25 bp, Homo sapien
aagggtggtaatacttctgcgagca

SEQ ID NO: 4162234 - DNA, 25 bp, Homo sapien
tttatgtcaatatgtgccactagca

SEQ ID NO: 4162235 - DNA, 25 bp, Homo sapien
ggatccaccctaatgaggttctgtg

SEQ ID NO: 4162236 - DNA, 25 bp, Homo sapien
gtgtccagtaatactttactgaaga

SEQ ID NO: 4162237 - DNA, 25 bp, Homo sapien
cagtgtccagtaatactttactgaa

SEQ ID NO: 4162238 - DNA, 25 bp, Homo sapien
acagtgtccagtaatactttactga

SEQ ID NO: 4162239 - DNA, 25 bp, Homo sapien
agtgtccagtaatactttactgaag

SEQ ID NO: 4162240 - DNA, 25 bp, Homo sapien
taagacaccaaacggatctgtgctg

SEQ ID NO: 4162241 - DNA, 25 bp, Homo sapien
tgttgctgtttgcaagtaccaccaa

SEQ ID NO: 4162242 - DNA, 25 bp, Homo sapien
attcacagagtaatgtaagacacca

SEQ ID NO: 4162243 - DNA, 25 bp, Homo sapien
ggactggaatcctcagatagctgag

SEQ ID NO: 4162244 - DNA, 25 bp, Homo sapien
tctagctgatatccacacaagagtt

SEQ ID NO: 4162245 - DNA, 25 bp, Homo sapien
cctcttctagctgatatccacacaa

SEQ ID NO: 4162246 - DNA, 25 bp, Homo sapien
cttctagctgatatccacacaagag

SEQ ID NO: 4162247 - DNA, 25 bp, Homo sapien
ctcttctagctgatatccacacaag

SEQ ID NO: 4162248 - DNA, 25 bp, Homo sapien
gccttccctttcctgcagcaaacag

SEQ ID NO: 4162249 - DNA, 25 bp, Homo sapien
tccctttcctgcagcaaacaggtcc

SEQ ID NO: 4162250 - DNA, 25 bp, Homo sapien
ctgccttccctttcctgcagcaaac

SEQ ID NO: 4162251 - DNA, 25 bp, Homo sapien
cttccctttcctgcagcaaacaggt

SEQ ID NO: 4162252 - DNA, 25 bp, Homo sapien
catcaatggtcccaagtgcaagatt

SEQ ID NO: 4162253 - DNA, 25 bp, Homo sapien
ctctaggcatcaacacatcttcatg

SEQ ID NO: 4162254 - DNA, 25 bp, Homo sapien
gccttatccgatcttggttatcaaa

SEQ ID NO: 4162255 - DNA, 25 bp, Homo sapien
tcctccaaacaaagtcggcctttca

SEQ ID NO: 4162256 - DNA, 25 bp, Homo sapien
tgctgcttattagaattaacctcac

SEQ ID NO: 4162257 - DNA, 25 bp, Homo sapien
ggtctgaattgaccctctgagccca

SEQ ID NO: 4162258 - DNA, 25 bp, Homo sapien
gcttattagaattaacctcacatct

SEQ ID NO: 4162259 - DNA, 25 bp, Homo sapien
ttgagctagtagactccccttttgg

SEQ ID NO: 4162260 - DNA, 25 bp, Homo sapien
ctgagctttaaaacgtaacttgtct

SEQ ID NO: 4162261 - DNA, 25 bp, Homo sapien
tcttctcccatgactgagctttaaa

SEQ ID NO: 4162262 - DNA, 25 bp, Homo sapien
cttctcccatgactgagctttaaaa

SEQ ID NO: 4162263 - DNA, 25 bp, Homo sapien
catgactgagctttaaaacgtaact

SEQ ID NO: 4162264 - DNA, 25 bp, Homo sapien
gctccctcatgataatacggtgtga

SEQ ID NO: 4162265 - DNA, 25 bp, Homo sapien
tcagagtcatctcacactggcatct

SEQ ID NO: 4162266 - DNA, 25 bp, Homo sapien
tcagatcacacatcctcctcagtgg

SEQ ID NO: 4162267 - DNA, 25 bp, Homo sapien
tacggtgtgagaaactctaggagcc

SEQ ID NO: 4162268 - DNA, 25 bp, Homo sapien
cagcttaatgcaaatctggaacact

SEQ ID NO: 4162269 - DNA, 25 bp, Homo sapien
tagttacacagccaccgggtgacag

SEQ ID NO: 4162270 - DNA, 25 bp, Homo sapien
acagccaccgggtgacagcttaatg

SEQ ID NO: 4162271 - DNA, 25 bp, Homo sapien
tcacaaaagcagctagttacacagc

SEQ ID NO: 4162272 - DNA, 25 bp, Homo sapien
cgtgtagttgatactgccgctctat

SEQ ID NO: 4162273 - DNA, 25 bp, Homo sapien
ttgatactgccgctctatctcctct

SEQ ID NO: 4162274 - DNA, 25 bp, Homo sapien
cggtgcatattacgtgtagttgata

SEQ ID NO: 4162275 - DNA, 25 bp, Homo sapien
tattacgtgtagttgatactgccgc

SEQ ID NO: 4162276 - DNA, 25 bp, Homo sapien
atattgtcgaaggaacttattttca

SEQ ID NO: 4162277 - DNA, 25 bp, Homo sapien
tgtcgaaggaacttattttcaggcc

SEQ ID NO: 4162278 - DNA, 25 bp, Homo sapien
ggatatattgtcgaaggaacttatt

SEQ ID NO: 4162279 - DNA, 25 bp, Homo sapien
ttgtcgaaggaacttattttcaggc

SEQ ID NO: 4162280 - DNA, 25 bp, Homo sapien
cagtcaacatgattaacagcccaag

SEQ ID NO: 4162281 - DNA, 25 bp, Homo sapien
atgacagatcggcttccctcttagc

SEQ ID NO: 4162282 - DNA, 25 bp, Homo sapien
taccgccatctcgtggacagaaagt

SEQ ID NO: 4162283 - DNA, 25 bp, Homo sapien
tggcttccctgcgatccacaaacaa

SEQ ID NO: 4162284 - DNA, 25 bp, Homo sapien
ttatcctttctgctcctgttaggac

SEQ ID NO: 4162285 - DNA, 25 bp, Homo sapien
gttatcctttctgctcctgttagga

SEQ ID NO: 4162286 - DNA, 25 bp, Homo sapien
tgttaggactgcctcagcacttggg

SEQ ID NO: 4162287 - DNA, 25 bp, Homo sapien
gctcctgttaggactgcctcagcac

SEQ ID NO: 4162288 - DNA, 25 bp, Homo sapien
caaagctggaagggtaccaagaact

SEQ ID NO: 4162289 - DNA, 25 bp, Homo sapien
ccttcaggttccagattcaggatct

SEQ ID NO: 4162290 - DNA, 25 bp, Homo sapien
cagagttagagaatccaaagctgga

SEQ ID NO: 4162291 - DNA, 25 bp, Homo sapien
ctaggcaaggtaaaactcaatagaa

SEQ ID NO: 4162292 - DNA, 25 bp, Homo sapien
caattcctcttcaatcaccattgct

SEQ ID NO: 4162293 - DNA, 25 bp, Homo sapien
catcctccaattcctcttcaatcac

SEQ ID NO: 4162294 - DNA, 25 bp, Homo sapien
tcctccaattcctcttcaatcacca

SEQ ID NO: 4162295 - DNA, 25 bp, Homo sapien
tcctcttcaatcaccattgctttca

SEQ ID NO: 4162296 - DNA, 25 bp, Homo sapien
caaagtctcctgctatgaacttcaa

SEQ ID NO: 4162297 - DNA, 25 bp, Homo sapien
gcttgctcgtcgtcattagttccag

SEQ ID NO: 4162298 - DNA, 25 bp, Homo sapien
ttccaagagaatcaatggccccagg

SEQ ID NO: 4162299 - DNA, 25 bp, Homo sapien
gaatcaagagtaatgagtttcggct

SEQ ID NO: 4162300 - DNA, 25 bp, Homo sapien
tgccccaactcaggcaaagatgata

SEQ ID NO: 4162301 - DNA, 25 bp, Homo sapien
taccacacctcagaccataaccaat

SEQ ID NO: 4162302 - DNA, 25 bp, Homo sapien
cctgtaccacacctcagaccataac

SEQ ID NO: 4162303 - DNA, 25 bp, Homo sapien
caaaagaatttacaggcctgtacca

SEQ ID NO: 4162304 - DNA, 25 bp, Homo sapien
tcagaactgcgtgttgtgcaggcac

SEQ ID NO: 4162305 - DNA, 25 bp, Homo sapien
tactaggtaacccatgcaggccaag

SEQ ID NO: 4162306 - DNA, 25 bp, Homo sapien
acattctggcaattaggactggaca

SEQ ID NO: 4162307 - DNA, 25 bp, Homo sapien
caaattagcacaaagtcagcggctc

SEQ ID NO: 4162308 - DNA, 25 bp, Homo sapien
gggccattttagaggcccaacctca

SEQ ID NO: 4162309 - DNA, 25 bp, Homo sapien
gggaggcattcctttctcagggatg

SEQ ID NO: 4162310 - DNA, 25 bp, Homo sapien
ggcccaacctcagggaggcattcct

SEQ ID NO: 4162311 - DNA, 25 bp, Homo sapien
cataaaagacggccacacccaaggg

SEQ ID NO: 4162312 - DNA, 25 bp, Homo sapien
cacatgactaggttctaagcccctt

SEQ ID NO: 4162313 - DNA, 25 bp, Homo sapien
gactaggttctaagccccttcttga

SEQ ID NO: 4162314 - DNA, 25 bp, Homo sapien
ttcttgactcctgttacagtgactt

SEQ ID NO: 4162315 - DNA, 25 bp, Homo sapien
ccttcttgactcctgttacagtgac

SEQ ID NO: 4162316 - DNA, 25 bp, Homo sapien
caatagcattgacggagcgttggca

SEQ ID NO: 4162317 - DNA, 25 bp, Homo sapien
aaaaggtctatgtgggtgcagtcac

SEQ ID NO: 4162318 - DNA, 25 bp, Homo sapien
caactggacaaatgtggagactttt

SEQ ID NO: 4162319 - DNA, 25 bp, Homo sapien
tcactaatggagttactgagtcccg

SEQ ID NO: 4162320 - DNA, 25 bp, Homo sapien
cgttgctaagcttgtcttccagcac

SEQ ID NO: 4162321 - DNA, 25 bp, Homo sapien
agttgcatcggtttatactaagtgc

SEQ ID NO: 4162322 - DNA, 25 bp, Homo sapien
ttgctaagcttgtcttccagcacaa

SEQ ID NO: 4162323 - DNA, 25 bp, Homo sapien
cagcacaaaaccagttgcatcggtt

SEQ ID NO: 4162324 - DNA, 25 bp, Homo sapien
caggaactagctttactaggtaact

SEQ ID NO: 4162325 - DNA, 25 bp, Homo sapien
acatgatcaattccaggaactagct

SEQ ID NO: 4162326 - DNA, 25 bp, Homo sapien
tagctttactaggtaactgatattg

SEQ ID NO: 4162327 - DNA, 25 bp, Homo sapien
tactaggtaactgatattgaataac

SEQ ID NO: 4162328 - DNA, 25 bp, Homo sapien
ttttatactgtacagatgtcgtgag

SEQ ID NO: 4162329 - DNA, 25 bp, Homo sapien
ggtatatgtgaagtgagctatcatc

SEQ ID NO: 4162330 - DNA, 25 bp, Homo sapien
cagatgtcgtgagtggtatatgtga

SEQ ID NO: 4162331 - DNA, 25 bp, Homo sapien
agtgagctatcatcagcctgatgag

SEQ ID NO: 4162332 - DNA, 25 bp, Homo sapien
tgcctgaccttaccaaactttttca

SEQ ID NO: 4162333 - DNA, 25 bp, Homo sapien
tgactgagtgttcaaatgcctgacc

SEQ ID NO: 4162334 - DNA, 25 bp, Homo sapien
tcagaaaagagtcaaggcttcaaat

SEQ ID NO: 4162335 - DNA, 25 bp, Homo sapien
tgtgctaggttctgccgcatgtgac

SEQ ID NO: 4162336 - DNA, 25 bp, Homo sapien
atcattgtaattagagatgatgcca

SEQ ID NO: 4162337 - DNA, 25 bp, Homo sapien
tcattgtaattagagatgatgccac

SEQ ID NO: 4162338 - DNA, 25 bp, Homo sapien
catcattgtaattagagatgatgcc

SEQ ID NO: 4162339 - DNA, 25 bp, Homo sapien
caagacaacactcgcaagaacaatg

SEQ ID NO: 4162340 - DNA, 25 bp, Homo sapien
gactgagccatcgtttcctttctgt

SEQ ID NO: 4162341 - DNA, 25 bp, Homo sapien
ggagagacgaggacaatttataaca

SEQ ID NO: 4162342 - DNA, 25 bp, Homo sapien
tagcattggtacacagtttctcctg

SEQ ID NO: 4162343 - DNA, 25 bp, Homo sapien
atgctattttagcacagtccctaaa

SEQ ID NO: 4162344 - DNA, 25 bp, Homo sapien
agatgctattttagcacagtcccta

SEQ ID NO: 4162345 - DNA, 25 bp, Homo sapien
aattgaattgtatgggattggggga

SEQ ID NO: 4162346 - DNA, 25 bp, Homo sapien
gaaattgaattgtatgggattgggg

SEQ ID NO: 4162347 - DNA, 25 bp, Homo sapien
cctgcacatggaaaacctgagcatc

SEQ ID NO: 4162348 - DNA, 25 bp, Homo sapien
ccctgcacatggaaaacctgagcat

SEQ ID NO: 4162349 - DNA, 25 bp, Homo sapien
tcccctgcacatggaaaacctgagc

SEQ ID NO: 4162350 - DNA, 25 bp, Homo sapien
ttcccctgcacatggaaaacctgag

SEQ ID NO: 4162351 - DNA, 25 bp, Homo sapien
tggaggttggcatcacagttgtagc

SEQ ID NO: 4162352 - DNA, 25 bp, Homo sapien
tgtagccgttgaactgagcagaccc

SEQ ID NO: 4162353 - DNA, 25 bp, Homo sapien
agcagcagcaaccatatttgttcca

SEQ ID NO: 4162354 - DNA, 25 bp, Homo sapien
gcagaccccggaagcactctaattg

SEQ ID NO: 4162355 - DNA, 25 bp, Homo sapien
ctctgcagtgggagtccccatgcct

SEQ ID NO: 4162356 - DNA, 25 bp, Homo sapien
atgaccactgctggaaaggtgttgt

SEQ ID NO: 4162357 - DNA, 25 bp, Homo sapien
ggtgttgttattgatgaaccctctg

SEQ ID NO: 4162358 - DNA, 25 bp, Homo sapien
cagtgccagatctgtttccgaataa

SEQ ID NO: 4162359 - DNA, 25 bp, Homo sapien
tatttcctacttgcactgaagttgc

SEQ ID NO: 4162360 - DNA, 25 bp, Homo sapien
catttccataagcactgactccagg

SEQ ID NO: 4162361 - DNA, 25 bp, Homo sapien
ggtgggtctggagtatcaatatatc

SEQ ID NO: 4162362 - DNA, 25 bp, Homo sapien
taaagaagcccaggtagatagctga

SEQ ID NO: 4162363 - DNA, 25 bp, Homo sapien
tactgtttaaatctctgaacagata

SEQ ID NO: 4162364 - DNA, 25 bp, Homo sapien
ctggagttgctatactgtttaaatc

SEQ ID NO: 4162365 - DNA, 25 bp, Homo sapien
gtttaaatctctgaacagataaaat

SEQ ID NO: 4162366 - DNA, 25 bp, Homo sapien
ctgtttaaatctctgaacagataaa

SEQ ID NO: 4162367 - DNA, 25 bp, Homo sapien
aaggagcaggttcaaagtgctgaca

SEQ ID NO: 4162368 - DNA, 25 bp, Homo sapien
aggagcaggttcaaagtgctgacaa

SEQ ID NO: 4162369 - DNA, 25 bp, Homo sapien
aaaggagcaggttcaaagtgctgac

SEQ ID NO: 4162370 - DNA, 25 bp, Homo sapien
ttagtggcttggacagctgcaaata

SEQ ID NO: 4162371 - DNA, 25 bp, Homo sapien
cttggacagctgcaaatactttggt

SEQ ID NO: 4162372 - DNA, 25 bp, Homo sapien
tggggataattaactgctggttgta

SEQ ID NO: 4162373 - DNA, 25 bp, Homo sapien
caaaggtaatcctatactggggata

SEQ ID NO: 4162374 - DNA, 25 bp, Homo sapien
ctaaggaaaagatcatatcgaatgt

SEQ ID NO: 4162375 - DNA, 25 bp, Homo sapien
gaaaagatcatatcgaatgtcatca

SEQ ID NO: 4162376 - DNA, 25 bp, Homo sapien
atcgaatgtcatcatttgggtttcc

SEQ ID NO: 4162377 - DNA, 25 bp, Homo sapien
gggtagtatagcaataatccattaa

SEQ ID NO: 4162378 - DNA, 25 bp, Homo sapien
ttcacaaatcggaacacttcaaaag

SEQ ID NO: 4162379 - DNA, 25 bp, Homo sapien
agtgcaagaagacagtggacatttt

SEQ ID NO: 4162380 - DNA, 25 bp, Homo sapien
tgctctgcagagcttggtaacgcag

SEQ ID NO: 4162381 - DNA, 25 bp, Homo sapien
tggcttcggccattctcaatgacgg

SEQ ID NO: 4162382 - DNA, 25 bp, Homo sapien
aacaaatgaaattccacaccggcgc

SEQ ID NO: 4162383 - DNA, 25 bp, Homo sapien
tccacaccggcgcagaattgtttct

SEQ ID NO: 4162384 - DNA, 25 bp, Homo sapien
acaccggcgcagaattgtttcttta

SEQ ID NO: 4162385 - DNA, 25 bp, Homo sapien
tgaaattccacaccggcgcagaatt

SEQ ID NO: 4162386 - DNA, 25 bp, Homo sapien
actccgagtaatgatgggaccagca

SEQ ID NO: 4162387 - DNA, 25 bp, Homo sapien
cactccgagtaatgatgggaccagc

SEQ ID NO: 4162388 - DNA, 25 bp, Homo sapien
ctccgagtaatgatgggaccagcag

SEQ ID NO: 4162389 - DNA, 25 bp, Homo sapien
aactttcttttgactgtgggatggg

SEQ ID NO: 4162390 - DNA, 25 bp, Homo sapien
ctttcttttgactgtgggatgggca

SEQ ID NO: 4162391 - DNA, 25 bp, Homo sapien
actttcttttgactgtgggatgggc

SEQ ID NO: 4162392 - DNA, 25 bp, Homo sapien
acgtccacccataatctccttgagt

SEQ ID NO: 4162393 - DNA, 25 bp, Homo sapien
gtccacccataatctccttgagtaa

SEQ ID NO: 4162394 - DNA, 25 bp, Homo sapien
ccacccataatctccttgagtaagg

SEQ ID NO: 4162395 - DNA, 25 bp, Homo sapien
tgttatctcctcttacgtccaccca

SEQ ID NO: 4162396 - DNA, 25 bp, Homo sapien
aagttgcgaattgttggttggagtc

SEQ ID NO: 4162397 - DNA, 25 bp, Homo sapien
caagttgcgaattgttggttggagt

SEQ ID NO: 4162398 - DNA, 25 bp, Homo sapien
ctggaagggaggcatacttggagaa

SEQ ID NO: 4162399 - DNA, 25 bp, Homo sapien
tggaagggaggcatacttggagaac

SEQ ID NO: 4162400 - DNA, 25 bp, Homo sapien
tatcagtgcgctggtgatggcgttc

SEQ ID NO: 4162401 - DNA, 25 bp, Homo sapien
aagggccagtgagcacagaagaaga

SEQ ID NO: 4162402 - DNA, 25 bp, Homo sapien
agactgggtttcttatgccattcaa

SEQ ID NO: 4162403 - DNA, 25 bp, Homo sapien
gaagagaaaagctcgtaactcccag

SEQ ID NO: 4162404 - DNA, 25 bp, Homo sapien
catttattctaggaccacgtgtgca

SEQ ID NO: 4162405 - DNA, 25 bp, Homo sapien
gatctagggccacttagcagtagcc

SEQ ID NO: 4162406 - DNA, 25 bp, Homo sapien
tacggctcgccacgtacataagtga

SEQ ID NO: 4162407 - DNA, 25 bp, Homo sapien
tatggtcagacatgaaaatcggcca

SEQ ID NO: 4162408 - DNA, 25 bp, Homo sapien
actgctggaagcacagctgcaacag

SEQ ID NO: 4162409 - DNA, 25 bp, Homo sapien
ctgcaacagcagctgaactgtttac

SEQ ID NO: 4162410 - DNA, 25 bp, Homo sapien
tggaagcacagctgcaacagcagct

SEQ ID NO: 4162411 - DNA, 25 bp, Homo sapien
ctcactgctggaagcacagctgcaa

SEQ ID NO: 4162412 - DNA, 25 bp, Homo sapien
tacgttgcttcccaagtgacatgtg

SEQ ID NO: 4162413 - DNA, 25 bp, Homo sapien
gaaacagcagccgttccaaaagcat

SEQ ID NO: 4162414 - DNA, 25 bp, Homo sapien
tattgcctggcatcgaaaatatggg

SEQ ID NO: 4162415 - DNA, 25 bp, Homo sapien
taagtccggactaatgggtcacaaa

SEQ ID NO: 4162416 - DNA, 25 bp, Homo sapien
cctgcatatttctggcgttggaagc

SEQ ID NO: 4162417 - DNA, 25 bp, Homo sapien
gaaaagcctgaagtagtcctcaaaa

SEQ ID NO: 4162418 - DNA, 25 bp, Homo sapien
aatgttacctgtttgatagacatag

SEQ ID NO: 4162419 - DNA, 25 bp, Homo sapien
aaatattttacaactctgaccttct

SEQ ID NO: 4162420 - DNA, 25 bp, Homo sapien
taataatgggcaatcagaagatgtg

SEQ ID NO: 4162421 - DNA, 25 bp, Homo sapien
ttgcaaagcctcacatatggtgttt

SEQ ID NO: 4162422 - DNA, 25 bp, Homo sapien
aatttctgtaataatgggcaatcag

SEQ ID NO: 4162423 - DNA, 25 bp, Homo sapien
gatgtgacatcttcagtcagtgctg

SEQ ID NO: 4162424 - DNA, 25 bp, Homo sapien
ttcacagatgaagcctgttgacttc

SEQ ID NO: 4162425 - DNA, 25 bp, Homo sapien
ctgggtccacgaggctctgctggct

SEQ ID NO: 4162426 - DNA, 25 bp, Homo sapien
gcttcacagatgaagcctgttgact

SEQ ID NO: 4162427 - DNA, 25 bp, Homo sapien
tggcttcacagatgaagcctgttga

SEQ ID NO: 4162428 - DNA, 25 bp, Homo sapien
tgtggatctgctatggcctgagtat

SEQ ID NO: 4162429 - DNA, 25 bp, Homo sapien
tctgctatggcctgagtataggaga

SEQ ID NO: 4162430 - DNA, 25 bp, Homo sapien
gaatatctgtggatctgctatggcc

SEQ ID NO: 4162431 - DNA, 25 bp, Homo sapien
tatggcctgagtataggagaaggca

SEQ ID NO: 4162432 - DNA, 25 bp, Homo sapien
ccgatgggtcagtactgctggtctc

SEQ ID NO: 4162433 - DNA, 25 bp, Homo sapien
tatgcttccaagctatccgatgggt

SEQ ID NO: 4162434 - DNA, 25 bp, Homo sapien
tcgttatatttgtatgcttccaagc

SEQ ID NO: 4162435 - DNA, 25 bp, Homo sapien
gctggtctctattaagtaactgcac

SEQ ID NO: 4162436 - DNA, 25 bp, Homo sapien
aagttggcatctgtctcagtaagca

SEQ ID NO: 4162437 - DNA, 25 bp, Homo sapien
gaatccctcgttctgaaagacctga

SEQ ID NO: 4162438 - DNA, 25 bp, Homo sapien
tgaaagacctgaataagtaatgctg

SEQ ID NO: 4162439 - DNA, 25 bp, Homo sapien
tccttttcaagtagatggtatccaa

SEQ ID NO: 4162440 - DNA, 25 bp, Homo sapien
ccatgttttgtctgggcaaaccctt

SEQ ID NO: 4162441 - DNA, 25 bp, Homo sapien
tcccacaaagccgagttccttctct

SEQ ID NO: 4162442 - DNA, 25 bp, Homo sapien
caaaccctttccgaggagaccagca

SEQ ID NO: 4162443 - DNA, 25 bp, Homo sapien
ccgaggagaccagcatcctgttgat

SEQ ID NO: 4162444 - DNA, 25 bp, Homo sapien
gaagtatagctccatgaattagttg

SEQ ID NO: 4162445 - DNA, 25 bp, Homo sapien
ctgttttaaacggatgaaattgatt

SEQ ID NO: 4162446 - DNA, 25 bp, Homo sapien
tacaatatctgtttaagaaattggc

SEQ ID NO: 4162447 - DNA, 25 bp, Homo sapien
tatctgtttaagaaattggcacaca

SEQ ID NO: 4162448 - DNA, 25 bp, Homo sapien
tgtgatacgttaccaccatgaagta

SEQ ID NO: 4162449 - DNA, 25 bp, Homo sapien
aaattctcttctgatgtctccaggt

SEQ ID NO: 4162450 - DNA, 25 bp, Homo sapien
tctactgctctgtgatacgttacca

SEQ ID NO: 4162451 - DNA, 25 bp, Homo sapien
tataggttctactgctctgtgatac

SEQ ID NO: 4162452 - DNA, 25 bp, Homo sapien
cacaataggtataggaaccacagca

SEQ ID NO: 4162453 - DNA, 25 bp, Homo sapien
tactctggccaaaacatgtacaatg

SEQ ID NO: 4162454 - DNA, 25 bp, Homo sapien
ttgcacttggtgtgggcactttcca

SEQ ID NO: 4162455 - DNA, 25 bp, Homo sapien
caagtccctcaggattgttaaggca

SEQ ID NO: 4162456 - DNA, 25 bp, Homo sapien
aaacatatttcatgttgtggtccat

SEQ ID NO: 4162457 - DNA, 25 bp, Homo sapien
tcaatttgagaaacatatttcatgt

SEQ ID NO: 4162458 - DNA, 25 bp, Homo sapien
aatttgagaaacatatttcatgttg

SEQ ID NO: 4162459 - DNA, 25 bp, Homo sapien
gagaaacatatttcatgttgtggtc

SEQ ID NO: 4162460 - DNA, 25 bp, Homo sapien
ctggtcatcagatcatccctagaat

SEQ ID NO: 4162461 - DNA, 25 bp, Homo sapien
ctgtagaagttggagcatggtgtct

SEQ ID NO: 4162462 - DNA, 25 bp, Homo sapien
gagactgtagaagttggagcatggt

SEQ ID NO: 4162463 - DNA, 25 bp, Homo sapien
tggtcatcagatcatccctagaata

SEQ ID NO: 4162464 - DNA, 25 bp, Homo sapien
ttggagtcaatgttgcagctgttaa

SEQ ID NO: 4162465 - DNA, 25 bp, Homo sapien
cttggagtcaatgttgcagctgtta

SEQ ID NO: 4162466 - DNA, 25 bp, Homo sapien
gttctgaaatacagactcctgtgcc

SEQ ID NO: 4162467 - DNA, 25 bp, Homo sapien
gcagtgatataggtctgttctgaaa

SEQ ID NO: 4162468 - DNA, 25 bp, Homo sapien
taggtctgttctgaaatacagactc

SEQ ID NO: 4162469 - DNA, 25 bp, Homo sapien
ctttggcagtgatataggtctgttc

SEQ ID NO: 4162470 - DNA, 25 bp, Homo sapien
cacaaggctggcatagacaggaaga

SEQ ID NO: 4162471 - DNA, 25 bp, Homo sapien
agcaggctcacaaggctggcataga

SEQ ID NO: 4162472 - DNA, 25 bp, Homo sapien
gttccaaccgcacgacatccccatt

SEQ ID NO: 4162473 - DNA, 25 bp, Homo sapien
atccccattcagcaggctcacaagg

SEQ ID NO: 4162474 - DNA, 25 bp, Homo sapien
tttttctggcattcgaataaaagta

SEQ ID NO: 4162475 - DNA, 25 bp, Homo sapien
tggtttttctggcattcgaataaaa

SEQ ID NO: 4162476 - DNA, 25 bp, Homo sapien
ttctggcattcgaataaaagtaaaa

SEQ ID NO: 4162477 - DNA, 25 bp, Homo sapien
tctggcattcgaataaaagtaaaaa

SEQ ID NO: 4162478 - DNA, 25 bp, Homo sapien
agcttccagtgcaagtgtccttgtg

SEQ ID NO: 4162479 - DNA, 25 bp, Homo sapien
acactctttgtccttatctacccag

SEQ ID NO: 4162480 - DNA, 25 bp, Homo sapien
tccttgtgccctggtgcctgatatc

SEQ ID NO: 4162481 - DNA, 25 bp, Homo sapien
tgtcctggacttagcaaagcatgat

SEQ ID NO: 4162482 - DNA, 25 bp, Homo sapien
taaatgtcaccggtagacagttcat

SEQ ID NO: 4162483 - DNA, 25 bp, Homo sapien
tttgccataaattcctgaaatagac

SEQ ID NO: 4162484 - DNA, 25 bp, Homo sapien
tgaaatagacatctagcccataaag

SEQ ID NO: 4162485 - DNA, 25 bp, Homo sapien
ctacttttggatcagatgtttgcca

SEQ ID NO: 4162486 - DNA, 25 bp, Homo sapien
ttggcctttaatgggtctcttttgc

SEQ ID NO: 4162487 - DNA, 25 bp, Homo sapien
cttcagcttcaccagtcgtttggcc

SEQ ID NO: 4162488 - DNA, 25 bp, Homo sapien
ttgctgtttatcactgtctatcccc

SEQ ID NO: 4162489 - DNA, 25 bp, Homo sapien
cagtcgtttggcctttaatgggtct

SEQ ID NO: 4162490 - DNA, 25 bp, Homo sapien
ctgtgacactctcattcagtttcat

SEQ ID NO: 4162491 - DNA, 25 bp, Homo sapien
agctcatccagaagcttgtgtgtaa

SEQ ID NO: 4162492 - DNA, 25 bp, Homo sapien
gctcatccagaagcttgtgtgtaag

SEQ ID NO: 4162493 - DNA, 25 bp, Homo sapien
gagctcatccagaagcttgtgtgta

SEQ ID NO: 4162494 - DNA, 25 bp, Homo sapien
cacatgatgcctctgttaagtttgg

SEQ ID NO: 4162495 - DNA, 25 bp, Homo sapien
taaaacccataagcctccagaacaa

SEQ ID NO: 4162496 - DNA, 25 bp, Homo sapien
gttattatatccacgctctcacatg

SEQ ID NO: 4162497 - DNA, 25 bp, Homo sapien
tccagaacaaacttattataactgt

SEQ ID NO: 4162498 - DNA, 25 bp, Homo sapien
tcagtgatgctcacactgtgcacca

SEQ ID NO: 4162499 - DNA, 25 bp, Homo sapien
aggttctgtgaaggagcctaactgt

SEQ ID NO: 4162500 - DNA, 25 bp, Homo sapien
catgctctaaatcagtgatgctcac

SEQ ID NO: 4162501 - DNA, 25 bp, Homo sapien
gaaggagcctaactgtttaaagatg

SEQ ID NO: 4162502 - DNA, 25 bp, Homo sapien
taacttgtctgatataggagggatg

SEQ ID NO: 4162503 - DNA, 25 bp, Homo sapien
tgtgcaaaagcttgttcgaagaact

SEQ ID NO: 4162504 - DNA, 25 bp, Homo sapien
gagtctgtgattatggaccaactaa

SEQ ID NO: 4162505 - DNA, 25 bp, Homo sapien
tataaatgctgtgatgacggttgtg

SEQ ID NO: 4162506 - DNA, 25 bp, Homo sapien
tcttcatcagcaaccgttacactcc

SEQ ID NO: 4162507 - DNA, 25 bp, Homo sapien
tcatcagcaaccgttacactccaat

SEQ ID NO: 4162508 - DNA, 25 bp, Homo sapien
atcagcaaccgttacactccaattc

SEQ ID NO: 4162509 - DNA, 25 bp, Homo sapien
gcaaccgttacactccaattccgtg

SEQ ID NO: 4162510 - DNA, 25 bp, Homo sapien
tctggaaagcttgaaggtctccgaa

SEQ ID NO: 4162511 - DNA, 25 bp, Homo sapien
aggaagctgatatctccctggacac

SEQ ID NO: 4162512 - DNA, 25 bp, Homo sapien
ggaggctaatttcgtctcagaagca

SEQ ID NO: 4162513 - DNA, 25 bp, Homo sapien
taaaaactggcaactggcctgcaga

SEQ ID NO: 4162514 - DNA, 25 bp, Homo sapien
aaggacgatgctacgctgcttccca

SEQ ID NO: 4162515 - DNA, 25 bp, Homo sapien
taccatagcaacagcaaggacgatg

SEQ ID NO: 4162516 - DNA, 25 bp, Homo sapien
gatatattgttcctatgtgctggcc

SEQ ID NO: 4162517 - DNA, 25 bp, Homo sapien
cagagaggtttcctgaaggctcaac

SEQ ID NO: 4162518 - DNA, 25 bp, Homo sapien
cctaagacatttatcttgagcacca

SEQ ID NO: 4162519 - DNA, 25 bp, Homo sapien
aatcagcgtgactccactttcatca

SEQ ID NO: 4162520 - DNA, 25 bp, Homo sapien
ccactgggtatgagtcttcccctaa

SEQ ID NO: 4162521 - DNA, 25 bp, Homo sapien
cagtccatgagccacgatatttcac

SEQ ID NO: 4162522 - DNA, 25 bp, Homo sapien
gctggcagctgattttctcaggtgg

SEQ ID NO: 4162523 - DNA, 25 bp, Homo sapien
tggcagctgattttctcaggtggtt

SEQ ID NO: 4162524 - DNA, 25 bp, Homo sapien
tcccatttacttcaagacttctggc

SEQ ID NO: 4162525 - DNA, 25 bp, Homo sapien
ctggcagctgattttctcaggtggt

SEQ ID NO: 4162526 - DNA, 25 bp, Homo sapien
tgatggaagcttcttcctttgacat

SEQ ID NO: 4162527 - DNA, 25 bp, Homo sapien
aatctgatggaagcttcttcctttg

SEQ ID NO: 4162528 - DNA, 25 bp, Homo sapien
caatctgatggaagcttcttccttt

SEQ ID NO: 4162529 - DNA, 25 bp, Homo sapien
tctgatggaagcttcttcctttgac

SEQ ID NO: 4162530 - DNA, 25 bp, Homo sapien
tccacaagtataaccgcagccaacc

SEQ ID NO: 4162531 - DNA, 25 bp, Homo sapien
agtataaccgcagccaacctacaac

SEQ ID NO: 4162532 - DNA, 25 bp, Homo sapien
caagtataaccgcagccaacctaca

SEQ ID NO: 4162533 - DNA, 25 bp, Homo sapien
cacaagtataaccgcagccaaccta

SEQ ID NO: 4162534 - DNA, 25 bp, Homo sapien
taaaagcaggggaaagtctatcaaa

SEQ ID NO: 4162535 - DNA, 25 bp, Homo sapien
ggaaagtctatcaaaggtaattggc

SEQ ID NO: 4162536 - DNA, 25 bp, Homo sapien
gcaggggaaagtctatcaaaggtaa

SEQ ID NO: 4162537 - DNA, 25 bp, Homo sapien
ctatcaaaggtaattggctctgttt

SEQ ID NO: 4162538 - DNA, 25 bp, Homo sapien
gaaccgccagctgacacacttctgt

SEQ ID NO: 4162539 - DNA, 25 bp, Homo sapien
tcacttaatcataaagccatgaggt

SEQ ID NO: 4162540 - DNA, 25 bp, Homo sapien
ggtttgagctcaggaaccgccagct

SEQ ID NO: 4162541 - DNA, 25 bp, Homo sapien
cttagtgtcaagaggtgttgaagcc

SEQ ID NO: 4162542 - DNA, 25 bp, Homo sapien
ccccagctgctggttctgtatccat

SEQ ID NO: 4162543 - DNA, 25 bp, Homo sapien
ttccccagctgctggttctgtatcc

SEQ ID NO: 4162544 - DNA, 25 bp, Homo sapien
ccctttttgttccccagctgctggt

SEQ ID NO: 4162545 - DNA, 25 bp, Homo sapien
ctttttgttccccagctgctggttc

SEQ ID NO: 4162546 - DNA, 25 bp, Homo sapien
gacaccaacaggtttgccctggagg

SEQ ID NO: 4162547 - DNA, 25 bp, Homo sapien
tattttgacaccaacaggtttgccc

SEQ ID NO: 4162548 - DNA, 25 bp, Homo sapien
cgatgaaagcgcttcgtctcattat

SEQ ID NO: 4162549 - DNA, 25 bp, Homo sapien
cagaggcttgcagaatcatgaggaa

SEQ ID NO: 4162550 - DNA, 25 bp, Homo sapien
ctggctctgcatcaatgctgggcat

SEQ ID NO: 4162551 - DNA, 25 bp, Homo sapien
ccacagtgaagcctggctctgcatc

SEQ ID NO: 4162552 - DNA, 25 bp, Homo sapien
cctggctctgcatcaatgctgggca

SEQ ID NO: 4162553 - DNA, 25 bp, Homo sapien
cagtgaagcctggctctgcatcaat

SEQ ID NO: 4162554 - DNA, 25 bp, Homo sapien
gagaggccgtaaagactcagacctc

SEQ ID NO: 4162555 - DNA, 25 bp, Homo sapien
gcctcagggttgctcgatatgggta

SEQ ID NO: 4162556 - DNA, 25 bp, Homo sapien
ggtaactgccaagacctattaggag

SEQ ID NO: 4162557 - DNA, 25 bp, Homo sapien
tccctcagagcctcagggttgctcg

SEQ ID NO: 4162558 - DNA, 25 bp, Homo sapien
caaaatgcagagacccactaacaag

SEQ ID NO: 4162559 - DNA, 25 bp, Homo sapien
tcaaaatgcagagacccactaacaa

SEQ ID NO: 4162560 - DNA, 25 bp, Homo sapien
ttcaaaatgcagagacccactaaca

SEQ ID NO: 4162561 - DNA, 25 bp, Homo sapien
atgcagagacccactaacaagaatc

SEQ ID NO: 4162562 - DNA, 25 bp, Homo sapien
tatgaagaatgttttggtaataact

SEQ ID NO: 4162563 - DNA, 25 bp, Homo sapien
ctattgttgccaggtatgtagcctt

SEQ ID NO: 4162564 - DNA, 25 bp, Homo sapien
cactattgttgccaggtatgtagcc

SEQ ID NO: 4162565 - DNA, 25 bp, Homo sapien
gttcactattgttgccaggtatgta

SEQ ID NO: 4162566 - DNA, 25 bp, Homo sapien
ttcactattgttgccaggtatgtag

SEQ ID NO: 4162567 - DNA, 25 bp, Homo sapien
ctctttccttctgcttattgtctac

SEQ ID NO: 4162568 - DNA, 25 bp, Homo sapien
cccttagaaattccacattgttctc

SEQ ID NO: 4162569 - DNA, 25 bp, Homo sapien
tccttctgcttattgtctaccctca

SEQ ID NO: 4162570 - DNA, 25 bp, Homo sapien
tagaaattccacattgttctctttc

SEQ ID NO: 4162571 - DNA, 25 bp, Homo sapien
tgaggagcctctcgtaggattctgt

SEQ ID NO: 4162572 - DNA, 25 bp, Homo sapien
tacttgaggagcctctcgtaggatt

SEQ ID NO: 4162573 - DNA, 25 bp, Homo sapien
gaggagcctctcgtaggattctgtg

SEQ ID NO: 4162574 - DNA, 25 bp, Homo sapien
cttgaggagcctctcgtaggattct

SEQ ID NO: 4162575 - DNA, 25 bp, Homo sapien
aagactaagttcagcaaagaaaaag

SEQ ID NO: 4162576 - DNA, 25 bp, Homo sapien
cagcaaagaaaaaggaaaagcaact

SEQ ID NO: 4162577 - DNA, 25 bp, Homo sapien
agactaagttcagcaaagaaaaagg

SEQ ID NO: 4162578 - DNA, 25 bp, Homo sapien
gactaagttcagcaaagaaaaagga

SEQ ID NO: 4162579 - DNA, 25 bp, Homo sapien
ctggaattatccgaactatttgatt

SEQ ID NO: 4162580 - DNA, 25 bp, Homo sapien
ggtgcctggaattatccgaactatt

SEQ ID NO: 4162581 - DNA, 25 bp, Homo sapien
gcctggaattatccgaactatttga

SEQ ID NO: 4162582 - DNA, 25 bp, Homo sapien
tggtgcctggaattatccgaactat

SEQ ID NO: 4162583 - DNA, 25 bp, Homo sapien
ttataccatttgctgcaatcgccat

SEQ ID NO: 4162584 - DNA, 25 bp, Homo sapien
actccttgttctcttaatccatttt

SEQ ID NO: 4162585 - DNA, 25 bp, Homo sapien
agtaatttgcatgccaacttgccaa

SEQ ID NO: 4162586 - DNA, 25 bp, Homo sapien
gtaacctgaatagagccagtaattt

SEQ ID NO: 4162587 - DNA, 25 bp, Homo sapien
tgccaacttgccaaaatgcagctgt

SEQ ID NO: 4162588 - DNA, 25 bp, Homo sapien
caaaatgcagctgtcaccatttcca

SEQ ID NO: 4162589 - DNA, 25 bp, Homo sapien
tggcttggggtgtccatacttggtg

SEQ ID NO: 4162590 - DNA, 25 bp, Homo sapien
tctccaactcataatcagttaccat

SEQ ID NO: 4162591 - DNA, 25 bp, Homo sapien
tggtctccaactcataatcagttac

SEQ ID NO: 4162592 - DNA, 25 bp, Homo sapien
cagttaccattattggcttggggtg

SEQ ID NO: 4162593 - DNA, 25 bp, Homo sapien
gtctgacatgtatcaatcatctgta

SEQ ID NO: 4162594 - DNA, 25 bp, Homo sapien
tgctctcatgctttcattgaacaca

SEQ ID NO: 4162595 - DNA, 25 bp, Homo sapien
taatccatgttcatataatgatgaa

SEQ ID NO: 4162596 - DNA, 25 bp, Homo sapien
tcttccaacatctatatttaccctt

SEQ ID NO: 4162597 - DNA, 25 bp, Homo sapien
tggagttaaggatttcaccctcgcc

SEQ ID NO: 4162598 - DNA, 25 bp, Homo sapien
tcgccagccctttgattgcaggcca

SEQ ID NO: 4162599 - DNA, 25 bp, Homo sapien
ggaccaggatcattactataaactt

SEQ ID NO: 4162600 - DNA, 25 bp, Homo sapien
ttagtctgtttagcccttgccagag

SEQ ID NO: 4162601 - DNA, 25 bp, Homo sapien
ctggccgaagatcaacttccaacat

SEQ ID NO: 4162602 - DNA, 25 bp, Homo sapien
tgaatttcacaacttaaactgggca

SEQ ID NO: 4162603 - DNA, 25 bp, Homo sapien
tcttgaagggtctcttacaggactg

SEQ ID NO: 4162604 - DNA, 25 bp, Homo sapien
tagctcactgttagtcccaagaaaa

SEQ ID NO: 4162605 - DNA, 25 bp, Homo sapien
aaactgggcatgcatcttactaggc

SEQ ID NO: 4162606 - DNA, 25 bp, Homo sapien
ttggttacaaaagtggagccatttg

SEQ ID NO: 4162607 - DNA, 25 bp, Homo sapien
gttacaaaagtggagccatttgttc

SEQ ID NO: 4162608 - DNA, 25 bp, Homo sapien
tgttggttacaaaagtggagccatt

SEQ ID NO: 4162609 - DNA, 25 bp, Homo sapien
ctctgttggttacaaaagtggagcc

SEQ ID NO: 4162610 - DNA, 25 bp, Homo sapien
agaccctcagtacagatgcagattt

SEQ ID NO: 4162611 - DNA, 25 bp, Homo sapien
cctcagtacagatgcagatttgaca

SEQ ID NO: 4162612 - DNA, 25 bp, Homo sapien
cagtacagatgcagatttgacaatg

SEQ ID NO: 4162613 - DNA, 25 bp, Homo sapien
gtacagatgcagatttgacaatggt

SEQ ID NO: 4162614 - DNA, 25 bp, Homo sapien
tccagtccaaattggtccatgtgtg

SEQ ID NO: 4162615 - DNA, 25 bp, Homo sapien
attccagtccaaattggtccatgtg

SEQ ID NO: 4162616 - DNA, 25 bp, Homo sapien
cagtccaaattggtccatgtgtgga

SEQ ID NO: 4162617 - DNA, 25 bp, Homo sapien
ttgagttgtcagatgttttgtttgt

SEQ ID NO: 4162618 - DNA, 25 bp, Homo sapien
ttttacagaagagcatagtgttggg

SEQ ID NO: 4162619 - DNA, 25 bp, Homo sapien
gcacaggaagtcaagttgttggaga

SEQ ID NO: 4162620 - DNA, 25 bp, Homo sapien
gtgttggggtgaccaccatatatga

SEQ ID NO: 4162621 - DNA, 25 bp, Homo sapien
aagtcaagttgttggagagagaaac

SEQ ID NO: 4162622 - DNA, 25 bp, Homo sapien
cagcatagccactcacaatcttcag

SEQ ID NO: 4162623 - DNA, 25 bp, Homo sapien
tcacaatcttcaggaacattcctct

SEQ ID NO: 4162624 - DNA, 25 bp, Homo sapien
tcataataatctgcaccagcatagc

SEQ ID NO: 4162625 - DNA, 25 bp, Homo sapien
taataatctgcaccagcatagccac

SEQ ID NO: 4162626 - DNA, 25 bp, Homo sapien
acaccaattgtgcagtggagtttcc

SEQ ID NO: 4162627 - DNA, 25 bp, Homo sapien
cagagttcaatggattagcctcacc

SEQ ID NO: 4162628 - DNA, 25 bp, Homo sapien
cacccagagttcaatggattagcct

SEQ ID NO: 4162629 - DNA, 25 bp, Homo sapien
cagtcctccaccaacaccaattgtg

SEQ ID NO: 4162630 - DNA, 25 bp, Homo sapien
aaatgtgaagatcaattaatagcta

SEQ ID NO: 4162631 - DNA, 25 bp, Homo sapien
gatagttgatggaagggaaattaac

SEQ ID NO: 4162632 - DNA, 25 bp, Homo sapien
ctgctggcacatgggtgtcattgat

SEQ ID NO: 4162633 - DNA, 25 bp, Homo sapien
tagctatgaactttaccctgctggc

SEQ ID NO: 4162634 - DNA, 25 bp, Homo sapien
tcagtatggaaagtttgacatagcc

SEQ ID NO: 4162635 - DNA, 25 bp, Homo sapien
tgatgaggtgatttcagtatggaaa

SEQ ID NO: 4162636 - DNA, 25 bp, Homo sapien
cttttgccagaggaacatactagtt

SEQ ID NO: 4162637 - DNA, 25 bp, Homo sapien
cttgaacatctctaagtgcatgcaa

SEQ ID NO: 4162638 - DNA, 25 bp, Homo sapien
tcaagcattcctctgtggttcaaag

SEQ ID NO: 4162639 - DNA, 25 bp, Homo sapien
caaagatggctcaaatcatgcccag

SEQ ID NO: 4162640 - DNA, 25 bp, Homo sapien
atcatgcccaggtaaaccgggacgg

SEQ ID NO: 4162641 - DNA, 25 bp, Homo sapien
actcaagcattcctctgtggttcaa

SEQ ID NO: 4162642 - DNA, 25 bp, Homo sapien
gtaaattgcctcatgaatgtttttc

SEQ ID NO: 4162643 - DNA, 25 bp, Homo sapien
taggtaacaaggtgtaaattgcctc

SEQ ID NO: 4162644 - DNA, 25 bp, Homo sapien
actattgtaggagtctgcctattaa

SEQ ID NO: 4162645 - DNA, 25 bp, Homo sapien
tccttccagcatgtgactattgtag

SEQ ID NO: 4162646 - DNA, 25 bp, Homo sapien
tcttaatgattcaacgactactttt

SEQ ID NO: 4162647 - DNA, 25 bp, Homo sapien
taatgattcaacgactacttttatg

SEQ ID NO: 4162648 - DNA, 25 bp, Homo sapien
gattcaacgactacttttatgtcca

SEQ ID NO: 4162649 - DNA, 25 bp, Homo sapien
tgtaatcttaatgattcaacgacta

SEQ ID NO: 4162650 - DNA, 25 bp, Homo sapien
atgatgagatgacacaaactccttt

SEQ ID NO: 4162651 - DNA, 25 bp, Homo sapien
tgagatgacacaaactcctttctct

SEQ ID NO: 4162652 - DNA, 25 bp, Homo sapien
gatgagatgacacaaactcctttct

SEQ ID NO: 4162653 - DNA, 25 bp, Homo sapien
tgatgagatgacacaaactcctttc

SEQ ID NO: 4162654 - DNA, 25 bp, Homo sapien
ctccactaaaagctgatttttataa

SEQ ID NO: 4162655 - DNA, 25 bp, Homo sapien
ttttataaatcagcaatagctcaga

SEQ ID NO: 4162656 - DNA, 25 bp, Homo sapien
tttttataaatcagcaatagctcag

SEQ ID NO: 4162657 - DNA, 25 bp, Homo sapien
tgatttttataaatcagcaatagct

SEQ ID NO: 4162658 - DNA, 25 bp, Homo sapien
ttctcacaggaatcaggatccgcat

SEQ ID NO: 4162659 - DNA, 25 bp, Homo sapien
gatttgggggcctgtttccaacatg

SEQ ID NO: 4162660 - DNA, 25 bp, Homo sapien
tttgggggcctgtttccaacatgcc

SEQ ID NO: 4162661 - DNA, 25 bp, Homo sapien
tgggggcctgtttccaacatgcccc

SEQ ID NO: 4162662 - DNA, 25 bp, Homo sapien
agagtatgtttgtggcagaggcctc

SEQ ID NO: 4162663 - DNA, 25 bp, Homo sapien
cctgactaatgatctggcagagtat

SEQ ID NO: 4162664 - DNA, 25 bp, Homo sapien
gcttcttgacctgactaatgatctg

SEQ ID NO: 4162665 - DNA, 25 bp, Homo sapien
cttggatgcttcttgacctgactaa

SEQ ID NO: 4162666 - DNA, 25 bp, Homo sapien
ccagaaacaagagatacagtgctgc

SEQ ID NO: 4162667 - DNA, 25 bp, Homo sapien
tccagtatctccaactccaataaat

SEQ ID NO: 4162668 - DNA, 25 bp, Homo sapien
acagtgctgctccagtatctccaac

SEQ ID NO: 4162669 - DNA, 25 bp, Homo sapien
aacttgtactgatcattgggatcca

SEQ ID NO: 4162670 - DNA, 25 bp, Homo sapien
tatttgctgattccatgtaaaccca

SEQ ID NO: 4162671 - DNA, 25 bp, Homo sapien
tacctgctaagcatgaagcaccttt

SEQ ID NO: 4162672 - DNA, 25 bp, Homo sapien
ccatcgcaggtagaagtattactta

SEQ ID NO: 4162673 - DNA, 25 bp, Homo sapien
gaccagcttgtcagagtacaaccac

SEQ ID NO: 4162674 - DNA, 25 bp, Homo sapien
agtccctagtctattaccattcatg

SEQ ID NO: 4162675 - DNA, 25 bp, Homo sapien
aaagggcttattaccatttgccaat

SEQ ID NO: 4162676 - DNA, 25 bp, Homo sapien
caaagtttcaagaactacctgctgt

SEQ ID NO: 4162677 - DNA, 25 bp, Homo sapien
tacctgctgtagctcataaccaaag

SEQ ID NO: 4162678 - DNA, 25 bp, Homo sapien
tgccaggccgagaaactaatttatg

SEQ ID NO: 4162679 - DNA, 25 bp, Homo sapien
tttgatacatgttgggataccttgc

SEQ ID NO: 4162680 - DNA, 25 bp, Homo sapien
taggtacaacaacattactgtgtgg

SEQ ID NO: 4162681 - DNA, 25 bp, Homo sapien
gataccttgcaattgtacatccagt

SEQ ID NO: 4162682 - DNA, 25 bp, Homo sapien
ctagaacatggcaatattttcctga

SEQ ID NO: 4162683 - DNA, 25 bp, Homo sapien
agttatttctgacttaaacagcatc

SEQ ID NO: 4162684 - DNA, 25 bp, Homo sapien
gttatttctgacttaaacagcatca

SEQ ID NO: 4162685 - DNA, 25 bp, Homo sapien
cctgtcttcagagcatggttgaaaa

SEQ ID NO: 4162686 - DNA, 25 bp, Homo sapien
tggttgaaaatcagtgtgggagtac

SEQ ID NO: 4162687 - DNA, 25 bp, Homo sapien
ggagtacctctgaaacagtcactag

SEQ ID NO: 4162688 - DNA, 25 bp, Homo sapien
cagtgtgggagtacctctgaaacag

SEQ ID NO: 4162689 - DNA, 25 bp, Homo sapien
gcattatttatgcagcagactgtaa

SEQ ID NO: 4162690 - DNA, 25 bp, Homo sapien
ttctctcggactttttcatcaatgc

SEQ ID NO: 4162691 - DNA, 25 bp, Homo sapien
ttctgtgttctctcggactttttca

SEQ ID NO: 4162692 - DNA, 25 bp, Homo sapien
atgggaacagatttctaatgcatta

SEQ ID NO: 4162693 - DNA, 25 bp, Homo sapien
caatttatttctgcatttgcggctc

SEQ ID NO: 4162694 - DNA, 25 bp, Homo sapien
aatttatttctgcatttgcggctca

SEQ ID NO: 4162695 - DNA, 25 bp, Homo sapien
atttatttctgcatttgcggctcat

SEQ ID NO: 4162696 - DNA, 25 bp, Homo sapien
gactgtgaatttgccctctggcccc

SEQ ID NO: 4162697 - DNA, 25 bp, Homo sapien
gcaaaacacttaggcagggcggtag

SEQ ID NO: 4162698 - DNA, 25 bp, Homo sapien
tggccccttggggtcgagcaccagt

SEQ ID NO: 4162699 - DNA, 25 bp, Homo sapien
ccttggggtcgagcaccagttgtgc

SEQ ID NO: 4162700 - DNA, 25 bp, Homo sapien
ctattgatcaaaggcgaccttgtgt

SEQ ID NO: 4162701 - DNA, 25 bp, Homo sapien
ccttcagtcatccacattaaagcaa

SEQ ID NO: 4162702 - DNA, 25 bp, Homo sapien
tagattgcacattcttgagtgtcaa

SEQ ID NO: 4162703 - DNA, 25 bp, Homo sapien
gcgaccttgtgtgcatcagttcctg

SEQ ID NO: 4162704 - DNA, 25 bp, Homo sapien
tctcacactcgtggcctttattcca

SEQ ID NO: 4162705 - DNA, 25 bp, Homo sapien
attctcacactcgtggcctttattc

SEQ ID NO: 4162706 - DNA, 25 bp, Homo sapien
tgtttctccttcattaatcaagtac

SEQ ID NO: 4162707 - DNA, 25 bp, Homo sapien
tcattaatcaagtactgagtgtcta

SEQ ID NO: 4162708 - DNA, 25 bp, Homo sapien
tgcagagaagtgaaacgtgaacatc

SEQ ID NO: 4162709 - DNA, 25 bp, Homo sapien
tgtcttaaccaatcccatcatggta

SEQ ID NO: 4162710 - DNA, 25 bp, Homo sapien
gaacatcatggcaattgtcttaacc

SEQ ID NO: 4162711 - DNA, 25 bp, Homo sapien
tattgctatttccatcaaaagataa

SEQ ID NO: 4162712 - DNA, 25 bp, Homo sapien
agaacttgatccattcttgcagccc

SEQ ID NO: 4162713 - DNA, 25 bp, Homo sapien
ctcagcagaacttgatccattcttg

SEQ ID NO: 4162714 - DNA, 25 bp, Homo sapien
gcagaacttgatccattcttgcagc

SEQ ID NO: 4162715 - DNA, 25 bp, Homo sapien
aacttgatccattcttgcagcccat

SEQ ID NO: 4162716 - DNA, 25 bp, Homo sapien
taaacgtactgaatataactcctga

SEQ ID NO: 4162717 - DNA, 25 bp, Homo sapien
tatctgaacatacttcaataaacgt

SEQ ID NO: 4162718 - DNA, 25 bp, Homo sapien
gaataaattgaaccaaatcatgttg

SEQ ID NO: 4162719 - DNA, 25 bp, Homo sapien
gcttcaccttctactgaagatttct

SEQ ID NO: 4162720 - DNA, 25 bp, Homo sapien
caccaaatggaaaaggatatgtttt

SEQ ID NO: 4162721 - DNA, 25 bp, Homo sapien
acaattcctaatggaaaatgctgat

SEQ ID NO: 4162722 - DNA, 25 bp, Homo sapien
aacaattcctaatggaaaatgctga

SEQ ID NO: 4162723 - DNA, 25 bp, Homo sapien
tgagcaccacttgaaaactcgtttg

SEQ ID NO: 4162724 - DNA, 25 bp, Homo sapien
gcaccagtactgacaatatttggga

SEQ ID NO: 4162725 - DNA, 25 bp, Homo sapien
tagatggtggttctcaacgcgtggc

SEQ ID NO: 4162726 - DNA, 25 bp, Homo sapien
agtgcctggtcaaattagccatgtg

SEQ ID NO: 4162727 - DNA, 25 bp, Homo sapien
cagctcatggatagccgtgttgttg

SEQ ID NO: 4162728 - DNA, 25 bp, Homo sapien
caaataccattgcaagaaatccttg

SEQ ID NO: 4162729 - DNA, 25 bp, Homo sapien
catgaatggccccaagatgcaccta

SEQ ID NO: 4162730 - DNA, 25 bp, Homo sapien
gaaatccttgcatctgaacatggcc

SEQ ID NO: 4162731 - DNA, 25 bp, Homo sapien
tagactacttccctctcagcccagt

SEQ ID NO: 4162732 - DNA, 25 bp, Homo sapien
catggcatcctggtgctcttgatac

SEQ ID NO: 4162733 - DNA, 25 bp, Homo sapien
ctctcagcccagtcctcccaaattt

SEQ ID NO: 4162734 - DNA, 25 bp, Homo sapien
ttggccatggcatcctggtgctctt

SEQ ID NO: 4162735 - DNA, 25 bp, Homo sapien
tcacctgatggttgttaaaaactcc

SEQ ID NO: 4162736 - DNA, 25 bp, Homo sapien
gattcacctgatggttgttaaaaac

SEQ ID NO: 4162737 - DNA, 25 bp, Homo sapien
cagattcacctgatggttgttaaaa

SEQ ID NO: 4162738 - DNA, 25 bp, Homo sapien
ttcacctgatggttgttaaaaactc

SEQ ID NO: 4162739 - DNA, 25 bp, Homo sapien
ggtcaaggtagaaccaggtcagaga

SEQ ID NO: 4162740 - DNA, 25 bp, Homo sapien
aggtcaaggtagaaccaggtcagag

SEQ ID NO: 4162741 - DNA, 25 bp, Homo sapien
caggtcaaggtagaaccaggtcaga

SEQ ID NO: 4162742 - DNA, 25 bp, Homo sapien
gtcaaggtagaaccaggtcagagag

SEQ ID NO: 4162743 - DNA, 25 bp, Homo sapien
ttcaaatgtttcatcacaggccaga

SEQ ID NO: 4162744 - DNA, 25 bp, Homo sapien
tcacaggccagattgtagacatgaa

SEQ ID NO: 4162745 - DNA, 25 bp, Homo sapien
tagacatgaagtaggcgaatggccc

SEQ ID NO: 4162746 - DNA, 25 bp, Homo sapien
ccactctgcattgatctcctcttga

SEQ ID NO: 4162747 - DNA, 25 bp, Homo sapien
gccctgggttatcttcttaaacatg

SEQ ID NO: 4162748 - DNA, 25 bp, Homo sapien
tatctgtagtctgagcaatgtgctt

SEQ ID NO: 4162749 - DNA, 25 bp, Homo sapien
caatatgtgtacttcgccctgggtt

SEQ ID NO: 4162750 - DNA, 25 bp, Homo sapien
cagagctccttgttgcctacacata

SEQ ID NO: 4162751 - DNA, 25 bp, Homo sapien
gagccgcgataacttttgcgaatgt

SEQ ID NO: 4162752 - DNA, 25 bp, Homo sapien
ccagagccgcgataacttttgcgaa

SEQ ID NO: 4162753 - DNA, 25 bp, Homo sapien
gataacttttgcgaatgttttccat

SEQ ID NO: 4162754 - DNA, 25 bp, Homo sapien
ctccccagagccgcgataacttttg

SEQ ID NO: 4162755 - DNA, 25 bp, Homo sapien
tatcttagggcgagtgagacagttt

SEQ ID NO: 4162756 - DNA, 25 bp, Homo sapien
tctactacaagaaatacggcgcgtt

SEQ ID NO: 4162757 - DNA, 25 bp, Homo sapien
tcaacaatggtgaactgctttaggg

SEQ ID NO: 4162758 - DNA, 25 bp, Homo sapien
tgaataaatgttacggccatgacac

SEQ ID NO: 4162759 - DNA, 25 bp, Homo sapien
taatgaagcgtaaaggaagctgtcc

SEQ ID NO: 4162760 - DNA, 25 bp, Homo sapien
gctggcgagagggtgtttaacaata

SEQ ID NO: 4162761 - DNA, 25 bp, Homo sapien
gaataactacattgtatgtgttgat

SEQ ID NO: 4162762 - DNA, 25 bp, Homo sapien
caaaattttcttgatggagaataac

SEQ ID NO: 4162763 - DNA, 25 bp, Homo sapien
ctagtgacctttgtgtataagcctc

SEQ ID NO: 4162764 - DNA, 25 bp, Homo sapien
cggatgtcctagtgacctttgtgta

SEQ ID NO: 4162765 - DNA, 25 bp, Homo sapien
gtttattctaggttccacggatgtc

SEQ ID NO: 4162766 - DNA, 25 bp, Homo sapien
taggttccacggatgtcctagtgac

SEQ ID NO: 4162767 - DNA, 25 bp, Homo sapien
ttaaatgaacaagtacagtcgttta

SEQ ID NO: 4162768 - DNA, 25 bp, Homo sapien
gcatatcatacttcatcggcaattc

SEQ ID NO: 4162769 - DNA, 25 bp, Homo sapien
tacttcatcggcaattcaatttgtt

SEQ ID NO: 4162770 - DNA, 25 bp, Homo sapien
caagtacagtcgtttatattttagc

SEQ ID NO: 4162771 - DNA, 25 bp, Homo sapien
tcgctggctaccacgggatccagct

SEQ ID NO: 4162772 - DNA, 25 bp, Homo sapien
tggctaccacgggatccagctgcac

SEQ ID NO: 4162773 - DNA, 25 bp, Homo sapien
agtggagtctcgctggctaccacgg

SEQ ID NO: 4162774 - DNA, 25 bp, Homo sapien
gagtctcgctggctaccacgggatc

SEQ ID NO: 4162775 - DNA, 25 bp, Homo sapien
acatgctgatccccgtttccatggg

SEQ ID NO: 4162776 - DNA, 25 bp, Homo sapien
aacatgctgatccccgtttccatgg

SEQ ID NO: 4162777 - DNA, 25 bp, Homo sapien
catgctgatccccgtttccatgggc

SEQ ID NO: 4162778 - DNA, 25 bp, Homo sapien
tgagcacaggctttcaatgtggaag

SEQ ID NO: 4162779 - DNA, 25 bp, Homo sapien
agcacaggctttcaatgtggaagga

SEQ ID NO: 4162780 - DNA, 25 bp, Homo sapien
ggtctgatccgcggaggaatgtctc

SEQ ID NO: 4162781 - DNA, 25 bp, Homo sapien
gcatggtctgatccgcggaggaatg

SEQ ID NO: 4162782 - DNA, 25 bp, Homo sapien
gtgtaacaccaaggagcgtgtccgg

SEQ ID NO: 4162783 - DNA, 25 bp, Homo sapien
agtgtaacaccaaggagcgtgtccg

SEQ ID NO: 4162784 - DNA, 25 bp, Homo sapien
gccaacaactccgagagtactgcag

SEQ ID NO: 4162785 - DNA, 25 bp, Homo sapien
caactccgagagtactgcaggcctc

SEQ ID NO: 4162786 - DNA, 25 bp, Homo sapien
tccgagagtactgcaggcctccatc

SEQ ID NO: 4162787 - DNA, 25 bp, Homo sapien
caacaactccgagagtactgcaggc

SEQ ID NO: 4162788 - DNA, 25 bp, Homo sapien
tctgtcctgagtcatcaaggttgcc

SEQ ID NO: 4162789 - DNA, 25 bp, Homo sapien
tgtatctgattattaggccccgcaa

SEQ ID NO: 4162790 - DNA, 25 bp, Homo sapien
tgatgtcatcaatcggccccatgaa

SEQ ID NO: 4162791 - DNA, 25 bp, Homo sapien
gaagggtcacaacagtcaaccacag

SEQ ID NO: 4162792 - DNA, 25 bp, Homo sapien
taataggccgtgagccaaaagagca

SEQ ID NO: 4162793 - DNA, 25 bp, Homo sapien
tcataagacccctatcccagaagag

SEQ ID NO: 4162794 - DNA, 25 bp, Homo sapien
tatgatgagacggaaagggatcacc

SEQ ID NO: 4162795 - DNA, 25 bp, Homo sapien
gatcacctttgtacctctgcactgg

SEQ ID NO: 4162796 - DNA, 25 bp, Homo sapien
tattcttgacgatctgggtgggccc

SEQ ID NO: 4162797 - DNA, 25 bp, Homo sapien
tccaatgtgctcaagttactgatct

SEQ ID NO: 4162798 - DNA, 25 bp, Homo sapien
catgagagtcgttataagagggagg

SEQ ID NO: 4162799 - DNA, 25 bp, Homo sapien
caaggaatgtaggtagcctccagaa

SEQ ID NO: 4162800 - DNA, 25 bp, Homo sapien
tacatgcttgtagtgtctcttccac

SEQ ID NO: 4162801 - DNA, 25 bp, Homo sapien
gacacagtcctaccagattagggcc

SEQ ID NO: 4162802 - DNA, 25 bp, Homo sapien
tcacaattatggagacgggaagttc

SEQ ID NO: 4162803 - DNA, 25 bp, Homo sapien
taaggtgttagctagttgatttctc

SEQ ID NO: 4162804 - DNA, 25 bp, Homo sapien
tggaacaccaaaggcactgaagtca

SEQ ID NO: 4162805 - DNA, 25 bp, Homo sapien
ggaacaccaaaggcactgaagtcat

SEQ ID NO: 4162806 - DNA, 25 bp, Homo sapien
ctggaacaccaaaggcactgaagtc

SEQ ID NO: 4162807 - DNA, 25 bp, Homo sapien
cagagctactgaaagccactgtagc

SEQ ID NO: 4162808 - DNA, 25 bp, Homo sapien
agagctactgaaagccactgtagcc

SEQ ID NO: 4162809 - DNA, 25 bp, Homo sapien
tgaggcctgcaactgctctcttttc

SEQ ID NO: 4162810 - DNA, 25 bp, Homo sapien
cttagaatatgctccacatgcagtt

SEQ ID NO: 4162811 - DNA, 25 bp, Homo sapien
attctgtaattgctgggtggaattt

SEQ ID NO: 4162812 - DNA, 25 bp, Homo sapien
cacatgcagttgagaacaatgtata

SEQ ID NO: 4162813 - DNA, 25 bp, Homo sapien
tccacatgcagttgagaacaatgta

SEQ ID NO: 4162814 - DNA, 25 bp, Homo sapien
ttttccatattgaagatctctgtaa

SEQ ID NO: 4162815 - DNA, 25 bp, Homo sapien
gtaaagttcagtgtattataaatca

SEQ ID NO: 4162816 - DNA, 25 bp, Homo sapien
aagtaaagttcagtgtattataaat

SEQ ID NO: 4162817 - DNA, 25 bp, Homo sapien
aaagttcagtgtattataaatcatg

SEQ ID NO: 4162818 - DNA, 25 bp, Homo sapien
tcagtgtattataaatcatgtaaac

SEQ ID NO: 4162819 - DNA, 25 bp, Homo sapien
gcccagaacgactagcttatactca

SEQ ID NO: 4162820 - DNA, 25 bp, Homo sapien
gagcccagaacgactagcttatact

SEQ ID NO: 4162821 - DNA, 25 bp, Homo sapien
ccagaacgactagcttatactcatg

SEQ ID NO: 4162822 - DNA, 25 bp, Homo sapien
ctgagcccagaacgactagcttata

SEQ ID NO: 4162823 - DNA, 25 bp, Homo sapien
aatccctcattgctgaagatttttc

SEQ ID NO: 4162824 - DNA, 25 bp, Homo sapien
aattattaccgaccagaatcattgg

SEQ ID NO: 4162825 - DNA, 25 bp, Homo sapien
taaaggcagagcagactttcgaatg

SEQ ID NO: 4162826 - DNA, 25 bp, Homo sapien
tgtacgaatcttctatcataggatc

SEQ ID NO: 4162827 - DNA, 25 bp, Homo sapien
gaatgcagtgttggcccactgtctt

SEQ ID NO: 4162828 - DNA, 25 bp, Homo sapien
taagaatgcagtgttggcccactgt

SEQ ID NO: 4162829 - DNA, 25 bp, Homo sapien
tgcagtgttggcccactgtcttgtt

SEQ ID NO: 4162830 - DNA, 25 bp, Homo sapien
gcagtgttggcccactgtcttgtta

SEQ ID NO: 4162831 - DNA, 25 bp, Homo sapien
cagaattgacagaaagaccaggaat

SEQ ID NO: 4162832 - DNA, 25 bp, Homo sapien
cataaaagcttaatggcttgaggca

SEQ ID NO: 4162833 - DNA, 25 bp, Homo sapien
tgaggcaaatccaactgagttcctt

SEQ ID NO: 4162834 - DNA, 25 bp, Homo sapien
aaaagcaatactgattttggcgcca

SEQ ID NO: 4162835 - DNA, 25 bp, Homo sapien
ggcttagtgttctaaaatctagtga

SEQ ID NO: 4162836 - DNA, 25 bp, Homo sapien
agggtggcttagtgttctaaaatct

SEQ ID NO: 4162837 - DNA, 25 bp, Homo sapien
agtgttctaaaatctagtgactgac

SEQ ID NO: 4162838 - DNA, 25 bp, Homo sapien
tgtataaatttagggtggcttagtg

SEQ ID NO: 4162839 - DNA, 25 bp, Homo sapien
tctgctggtagtgagtgcctgaaaa

SEQ ID NO: 4162840 - DNA, 25 bp, Homo sapien
tgtctgctggtagtgagtgcctgaa

SEQ ID NO: 4162841 - DNA, 25 bp, Homo sapien
actgtgtctgctggtagtgagtgcc

SEQ ID NO: 4162842 - DNA, 25 bp, Homo sapien
ggtagtgagtgcctgaaaagctgca

SEQ ID NO: 4162843 - DNA, 25 bp, Homo sapien
gttgttgttagtatatcttctgatg

SEQ ID NO: 4162844 - DNA, 25 bp, Homo sapien
ctaaaattatggtccctggaatatt

SEQ ID NO: 4162845 - DNA, 25 bp, Homo sapien
gatgttatcagcaatgtttctttcc

SEQ ID NO: 4162846 - DNA, 25 bp, Homo sapien
tctgtcttctattgatcttcaaatt

SEQ ID NO: 4162847 - DNA, 25 bp, Homo sapien
agtggcagtaaccagtccatccgac

SEQ ID NO: 4162848 - DNA, 25 bp, Homo sapien
caccaaggtgttgcctaatgcttcg

SEQ ID NO: 4162849 - DNA, 25 bp, Homo sapien
ccactgcagtcaagatgtagtaaca

SEQ ID NO: 4162850 - DNA, 25 bp, Homo sapien
aattaattcttgattgccactgcag

SEQ ID NO: 4162851 - DNA, 25 bp, Homo sapien
ctgagggagaaattttccacccaca

SEQ ID NO: 4162852 - DNA, 25 bp, Homo sapien
tccctgtctccagcatgtgactggc

SEQ ID NO: 4162853 - DNA, 25 bp, Homo sapien
tacgaggacctcttcctttcctgca

SEQ ID NO: 4162854 - DNA, 25 bp, Homo sapien
gtctccagcatgtgactggccacac

SEQ ID NO: 4162855 - DNA, 25 bp, Homo sapien
cctgtctccagcatgtgactggcca

SEQ ID NO: 4162856 - DNA, 25 bp, Homo sapien
agagagacataggaggtacgcagca

SEQ ID NO: 4162857 - DNA, 25 bp, Homo sapien
ccagccctgtatacatttgatcgat

SEQ ID NO: 4162858 - DNA, 25 bp, Homo sapien
tttgatcgatgggaggaaggtcccc

SEQ ID NO: 4162859 - DNA, 25 bp, Homo sapien
gagaatgttcaatgaactgctcagg

SEQ ID NO: 4162860 - DNA, 25 bp, Homo sapien
tcacctaggcccaagtaattgtctg

SEQ ID NO: 4162861 - DNA, 25 bp, Homo sapien
caggtcctgggccaatgccatgaac

SEQ ID NO: 4162862 - DNA, 25 bp, Homo sapien
gcttcatgcatgctgggtctttgac

SEQ ID NO: 4162863 - DNA, 25 bp, Homo sapien
gaccatcactacatggtgacaggac

SEQ ID NO: 4162864 - DNA, 25 bp, Homo sapien
gatttattgcgaatctctgagaacc

SEQ ID NO: 4162865 - DNA, 25 bp, Homo sapien
tcttcatcttggttaccttgatttc

SEQ ID NO: 4162866 - DNA, 25 bp, Homo sapien
tcctctattggaataggccatctgc

SEQ ID NO: 4162867 - DNA, 25 bp, Homo sapien
cgtttgcatgaataaagtcctctat

SEQ ID NO: 4162868 - DNA, 25 bp, Homo sapien
gcatcaatttcagtgttcgaacaag

SEQ ID NO: 4162869 - DNA, 25 bp, Homo sapien
cttcgtccctactgttaatgttctg

SEQ ID NO: 4162870 - DNA, 25 bp, Homo sapien
gggcctggttccaacatgaaagcat

SEQ ID NO: 4162871 - DNA, 25 bp, Homo sapien
gaacaagtacaaaaacatctcgatg

SEQ ID NO: 4162872 - DNA, 25 bp, Homo sapien
agcaggactccacagtgtatcacca

SEQ ID NO: 4162873 - DNA, 25 bp, Homo sapien
tacgtcatttccatcctcttaggtg

SEQ ID NO: 4162874 - DNA, 25 bp, Homo sapien
tacatgcgtttcctggacgatcctg

SEQ ID NO: 4162875 - DNA, 25 bp, Homo sapien
gagtgatcagcccttacatgcgttt

SEQ ID NO: 4162876 - DNA, 25 bp, Homo sapien
cgtgtttcaataggtaacctgtatc

SEQ ID NO: 4162877 - DNA, 25 bp, Homo sapien
taggtaacctgtatcaattcttggt

SEQ ID NO: 4162878 - DNA, 25 bp, Homo sapien
tcaaattcttcataacgtgtttcaa

SEQ ID NO: 4162879 - DNA, 25 bp, Homo sapien
aattcttggtaaccctaggcagttg

SEQ ID NO: 4162880 - DNA, 25 bp, Homo sapien
cttgttttactaagactgcctcaaa

SEQ ID NO: 4162881 - DNA, 25 bp, Homo sapien
gcagctcttgtgaagggtttccatt

SEQ ID NO: 4162882 - DNA, 25 bp, Homo sapien
cataaactgtgattgcactgtccac

SEQ ID NO: 4162883 - DNA, 25 bp, Homo sapien
gaatgcaaagctgagggtatgcagc

SEQ ID NO: 4162884 - DNA, 25 bp, Homo sapien
ataagcttcacttgaaagattgacc

SEQ ID NO: 4162885 - DNA, 25 bp, Homo sapien
taagcttcacttgaaagattgacca

SEQ ID NO: 4162886 - DNA, 25 bp, Homo sapien
aagcttcacttgaaagattgaccat

SEQ ID NO: 4162887 - DNA, 25 bp, Homo sapien
ttcccaggaacaatgtaggctctat

SEQ ID NO: 4162888 - DNA, 25 bp, Homo sapien
cctgaatagtgccaatgctgctgat

SEQ ID NO: 4162889 - DNA, 25 bp, Homo sapien
tttcacagcactcctaattcccagg

SEQ ID NO: 4162890 - DNA, 25 bp, Homo sapien
aacttttaattcttggatcagggca

SEQ ID NO: 4162891 - DNA, 25 bp, Homo sapien
tcattgaataattctgcccagaagg

SEQ ID NO: 4162892 - DNA, 25 bp, Homo sapien
attctgcccagaaggtttttcccat

SEQ ID NO: 4162893 - DNA, 25 bp, Homo sapien
attcattgaataattctgcccagaa

SEQ ID NO: 4162894 - DNA, 25 bp, Homo sapien
ttgaataattctgcccagaaggttt

SEQ ID NO: 4162895 - DNA, 25 bp, Homo sapien
gaccatacaacaaattcaatggtat

SEQ ID NO: 4162896 - DNA, 25 bp, Homo sapien
aagaccatacaacaaattcaatggt

SEQ ID NO: 4162897 - DNA, 25 bp, Homo sapien
aaagaccatacaacaaattcaatgg

SEQ ID NO: 4162898 - DNA, 25 bp, Homo sapien
ctgccaaagaccatacaacaaattc

SEQ ID NO: 4162899 - DNA, 25 bp, Homo sapien
gaaaatgtctgaattttgagcacca

SEQ ID NO: 4162900 - DNA, 25 bp, Homo sapien
ttgagcaccagtgcagttacaagag

SEQ ID NO: 4162901 - DNA, 25 bp, Homo sapien
agcaccagtgcagttacaagaggca

SEQ ID NO: 4162902 - DNA, 25 bp, Homo sapien
ccagcactggcacatcttccataaa

SEQ ID NO: 4162903 - DNA, 25 bp, Homo sapien
tgttatgactattggagctcaattc

SEQ ID NO: 4162904 - DNA, 25 bp, Homo sapien
catgttatgactattggagctcaat

SEQ ID NO: 4162905 - DNA, 25 bp, Homo sapien
tatgactattggagctcaattcagc

SEQ ID NO: 4162906 - DNA, 25 bp, Homo sapien
ttatgactattggagctcaattcag

SEQ ID NO: 4162907 - DNA, 25 bp, Homo sapien
ttcaattttacacaggttccttctg

SEQ ID NO: 4162908 - DNA, 25 bp, Homo sapien
attttacacaggttccttctgtcct

SEQ ID NO: 4162909 - DNA, 25 bp, Homo sapien
cttagcagtttcaattttacacagg

SEQ ID NO: 4162910 - DNA, 25 bp, Homo sapien
gcagtttcaattttacacaggttcc

SEQ ID NO: 4162911 - DNA, 25 bp, Homo sapien
ccccttcttccagtgactcatgata

SEQ ID NO: 4162912 - DNA, 25 bp, Homo sapien
tatctaaatttttggagccactgtc

SEQ ID NO: 4162913 - DNA, 25 bp, Homo sapien
gatattttcccagtctctgtcaaca

SEQ ID NO: 4162914 - DNA, 25 bp, Homo sapien
taaatttttggagccactgtcactc

SEQ ID NO: 4162915 - DNA, 25 bp, Homo sapien
ttgtgtactccgcaagctccgcagc

SEQ ID NO: 4162916 - DNA, 25 bp, Homo sapien
tgcctcttccaggagtgcgatcttg

SEQ ID NO: 4162917 - DNA, 25 bp, Homo sapien
caggagtgcgatcttggttgtgtac

SEQ ID NO: 4162918 - DNA, 25 bp, Homo sapien
gcgatcttggttgtgtactccgcaa

SEQ ID NO: 4162919 - DNA, 25 bp, Homo sapien
tcctccttggtcttcaccaggtcat

SEQ ID NO: 4162920 - DNA, 25 bp, Homo sapien
gctcctccttggtcttcaccaggtc

SEQ ID NO: 4162921 - DNA, 25 bp, Homo sapien
cagctcctccttggtcttcaccagg

SEQ ID NO: 4162922 - DNA, 25 bp, Homo sapien
ggtgcagctcctccttggtcttcac

SEQ ID NO: 4162923 - DNA, 25 bp, Homo sapien
ccgcttcggtgatgtgtttctcttc

SEQ ID NO: 4162924 - DNA, 25 bp, Homo sapien
tagcccgtgggctcagagccctcgt

SEQ ID NO: 4162925 - DNA, 25 bp, Homo sapien
gcgctcgttcttctccgcttcggtg

SEQ ID NO: 4162926 - DNA, 25 bp, Homo sapien
cgttcttctccgcttcggtgatgtg

SEQ ID NO: 4162927 - DNA, 25 bp, Homo sapien
ggacagctcgccgctcagcgtcagc

SEQ ID NO: 4162928 - DNA, 25 bp, Homo sapien
gacagctcgccgctcagcgtcagca

SEQ ID NO: 4162929 - DNA, 25 bp, Homo sapien
acagctcgccgctcagcgtcagcag

SEQ ID NO: 4162930 - DNA, 25 bp, Homo sapien
ggatgatgtaattatgagtcctctt

SEQ ID NO: 4162931 - DNA, 25 bp, Homo sapien
atggccccgaactggtcgatgcgct

SEQ ID NO: 4162932 - DNA, 25 bp, Homo sapien
tggccccgaactggtcgatgcgctg

SEQ ID NO: 4162933 - DNA, 25 bp, Homo sapien
ttgtggatgatgtaattatgagtcc

SEQ ID NO: 4162934 - DNA, 25 bp, Homo sapien
tccactgagtggacaggggagtaaa

SEQ ID NO: 4162935 - DNA, 25 bp, Homo sapien
tcattttggcaagtagacatcttgt

SEQ ID NO: 4162936 - DNA, 25 bp, Homo sapien
aaggagtcaacttcaactcattttg

SEQ ID NO: 4162937 - DNA, 25 bp, Homo sapien
gatgaagcattggacgatggcaaaa

SEQ ID NO: 4162938 - DNA, 25 bp, Homo sapien
tgtaggacttgtatttggccctggc

SEQ ID NO: 4162939 - DNA, 25 bp, Homo sapien
tggtataacatgaaggtagcagctg

SEQ ID NO: 4162940 - DNA, 25 bp, Homo sapien
cactctgatgggttatgtcagccaa

SEQ ID NO: 4162941 - DNA, 25 bp, Homo sapien
gattgttaggaatccactgcgctgg

SEQ ID NO: 4162942 - DNA, 25 bp, Homo sapien
ctcttgcttgagtattgttggtgta

SEQ ID NO: 4162943 - DNA, 25 bp, Homo sapien
gaattggatagcattcctactttgg

SEQ ID NO: 4162944 - DNA, 25 bp, Homo sapien
tagatgtaggatcttatcatctgaa

SEQ ID NO: 4162945 - DNA, 25 bp, Homo sapien
tctttgccagttggatgcgtccagg

SEQ ID NO: 4162946 - DNA, 25 bp, Homo sapien
tgagctgtaaagttattaatgttgc

SEQ ID NO: 4162947 - DNA, 25 bp, Homo sapien
agacagcctcatggtgagctgtaaa

SEQ ID NO: 4162948 - DNA, 25 bp, Homo sapien
aacagcaaggatcctgttttcttga

SEQ ID NO: 4162949 - DNA, 25 bp, Homo sapien
gtgtacaacagcaaggatcctgttt

SEQ ID NO: 4162950 - DNA, 25 bp, Homo sapien
gagactagaaaccaaatctattgtt

SEQ ID NO: 4162951 - DNA, 25 bp, Homo sapien
tagttcaatgagactagaaaccaaa

SEQ ID NO: 4162952 - DNA, 25 bp, Homo sapien
aatgttagttcaatgagactagaaa

SEQ ID NO: 4162953 - DNA, 25 bp, Homo sapien
atgagactagaaaccaaatctattg

SEQ ID NO: 4162954 - DNA, 25 bp, Homo sapien
ctgattggttaagttgcaaagccat

SEQ ID NO: 4162955 - DNA, 25 bp, Homo sapien
gatgttcgcgtgtcccatatgtatg

SEQ ID NO: 4162956 - DNA, 25 bp, Homo sapien
gtatgtgttcttatgattctcttca

SEQ ID NO: 4162957 - DNA, 25 bp, Homo sapien
ttagtagatagatgttcgcgtgtcc

SEQ ID NO: 4162958 - DNA, 25 bp, Homo sapien
cgcgtgtcccatatgtatgtgttct

SEQ ID NO: 4162959 - DNA, 25 bp, Homo sapien
tgtctgatcataatacagtattgcc

SEQ ID NO: 4162960 - DNA, 25 bp, Homo sapien
gtgacaccatgcaagctctctgata

SEQ ID NO: 4162961 - DNA, 25 bp, Homo sapien
tatgactgcaatttaccagccagca

SEQ ID NO: 4162962 - DNA, 25 bp, Homo sapien
tctgtgtcctgagaaacgtaggtaa

SEQ ID NO: 4162963 - DNA, 25 bp, Homo sapien
gatactcttacggtcccgtcagcca

SEQ ID NO: 4162964 - DNA, 25 bp, Homo sapien
cgttgcagtttagctttctcctaga

SEQ ID NO: 4162965 - DNA, 25 bp, Homo sapien
attactcaggttgtcgttgcagttt

SEQ ID NO: 4162966 - DNA, 25 bp, Homo sapien
agctttctcctagatactcttacgg

SEQ ID NO: 4162967 - DNA, 25 bp, Homo sapien
tctcttcgaggggtagatggaagac

SEQ ID NO: 4162968 - DNA, 25 bp, Homo sapien
acaggtgcagcttatgagtaacctg

SEQ ID NO: 4162969 - DNA, 25 bp, Homo sapien
ttatgagtaacctggacagcagcca

SEQ ID NO: 4162970 - DNA, 25 bp, Homo sapien
gcagcttatgagtaacctggacagc

SEQ ID NO: 4162971 - DNA, 25 bp, Homo sapien
cagacccaacagcaggttttgcgag

SEQ ID NO: 4162972 - DNA, 25 bp, Homo sapien
acagcaggttttgcgagttctgaca

SEQ ID NO: 4162973 - DNA, 25 bp, Homo sapien
cccaacagcaggttttgcgagttct

SEQ ID NO: 4162974 - DNA, 25 bp, Homo sapien
gttttgcgagttctgacattggtaa

SEQ ID NO: 4162975 - DNA, 25 bp, Homo sapien
cagctcccgtgatcccaatgtggta

SEQ ID NO: 4162976 - DNA, 25 bp, Homo sapien
tatgttttccacacctaggtcatcc

SEQ ID NO: 4162977 - DNA, 25 bp, Homo sapien
tgtgtcacaaacgtatcaagcatga

SEQ ID NO: 4162978 - DNA, 25 bp, Homo sapien
aatgttcttcactgacacctagagt

SEQ ID NO: 4162979 - DNA, 25 bp, Homo sapien
cagctgcggtctctctgtgctataa

SEQ ID NO: 4162980 - DNA, 25 bp, Homo sapien
ttgccagacatactgaccacctgtg

SEQ ID NO: 4162981 - DNA, 25 bp, Homo sapien
caaggtaactcccaagttttgccag

SEQ ID NO: 4162982 - DNA, 25 bp, Homo sapien
gatagagggtattcagcaggatgac

SEQ ID NO: 4162983 - DNA, 25 bp, Homo sapien
ttagttgttagtctcttgcaggcag

SEQ ID NO: 4162984 - DNA, 25 bp, Homo sapien
acacctgttgtatgagagtttacta

SEQ ID NO: 4162985 - DNA, 25 bp, Homo sapien
tgtctaatgagaaagacgacatacc

SEQ ID NO: 4162986 - DNA, 25 bp, Homo sapien
tttgcctgaagctatcaaagaaggt

SEQ ID NO: 4162987 - DNA, 25 bp, Homo sapien
gctaagtgctataaggtaccctgaa

SEQ ID NO: 4162988 - DNA, 25 bp, Homo sapien
gacttagcaaaagttagccgttggc

SEQ ID NO: 4162989 - DNA, 25 bp, Homo sapien
aattggttaagtatgcctgtggcac

SEQ ID NO: 4162990 - DNA, 25 bp, Homo sapien
cctgagctgatcataggagcatgtt

SEQ ID NO: 4162991 - DNA, 25 bp, Homo sapien
caaagccttgtattagacttagcaa

SEQ ID NO: 4162992 - DNA, 25 bp, Homo sapien
ttcttcatagaacaatacttttcct

SEQ ID NO: 4162993 - DNA, 25 bp, Homo sapien
tacacctcagatttgggtctgaagc

SEQ ID NO: 4162994 - DNA, 25 bp, Homo sapien
catacacctcagatttgggtctgaa

SEQ ID NO: 4162995 - DNA, 25 bp, Homo sapien
acacctcagatttgggtctgaagcc

SEQ ID NO: 4162996 - DNA, 25 bp, Homo sapien
atacacctcagatttgggtctgaag

SEQ ID NO: 4162997 - DNA, 25 bp, Homo sapien
ggtctgttggcgtctccgtctccat

SEQ ID NO: 4162998 - DNA, 25 bp, Homo sapien
ggaaggatgtctgccagatcagctt

SEQ ID NO: 4162999 - DNA, 25 bp, Homo sapien
tcagcttctaactgttggaattggc

SEQ ID NO: 4163000 - DNA, 25 bp, Homo sapien
tttcacgtgaacacaatctattggg

SEQ ID NO: 4163001 - DNA, 25 bp, Homo sapien
accaggacagggaatgcatgctggt

SEQ ID NO: 4163002 - DNA, 25 bp, Homo sapien
gtttctgagcaccaatgagacacac

SEQ ID NO: 4163003 - DNA, 25 bp, Homo sapien
gaagaccaggacagggaatgcatgc

SEQ ID NO: 4163004 - DNA, 25 bp, Homo sapien
ggtggtttctgagcaccaatgagac

SEQ ID NO: 4163005 - DNA, 25 bp, Homo sapien
ttccacagtgcaactcagagatgtt

SEQ ID NO: 4163006 - DNA, 25 bp, Homo sapien
gcaactcagagatgttccccaaacc

SEQ ID NO: 4163007 - DNA, 25 bp, Homo sapien
cagtgcaactcagagatgttcccca

SEQ ID NO: 4163008 - DNA, 25 bp, Homo sapien
ctcagagatgttccccaaaccaaac

SEQ ID NO: 4163009 - DNA, 25 bp, Homo sapien
ttgtgggtgtgcatcctgccagagt

SEQ ID NO: 4163010 - DNA, 25 bp, Homo sapien
ctccttgactgcacattcaactttg

SEQ ID NO: 4163011 - DNA, 25 bp, Homo sapien
tgttcacaagtgtttgtgggtgtgc

SEQ ID NO: 4163012 - DNA, 25 bp, Homo sapien
cttgactgcacattcaactttggtc

SEQ ID NO: 4163013 - DNA, 25 bp, Homo sapien
aattgtagcatcctatgaaagaagc

SEQ ID NO: 4163014 - DNA, 25 bp, Homo sapien
tagaattgtagcatcctatgaaaga

SEQ ID NO: 4163015 - DNA, 25 bp, Homo sapien
taatgtagaattgtagcatcctatg

SEQ ID NO: 4163016 - DNA, 25 bp, Homo sapien
tgtagaattgtagcatcctatgaaa

SEQ ID NO: 4163017 - DNA, 25 bp, Homo sapien
agattccagcagtacagagtgtcat

SEQ ID NO: 4163018 - DNA, 25 bp, Homo sapien
aaagattccagcagtacagagtgtc

SEQ ID NO: 4163019 - DNA, 25 bp, Homo sapien
aagattccagcagtacagagtgtca

SEQ ID NO: 4163020 - DNA, 25 bp, Homo sapien
ctttccagcttaaagattccagcag

SEQ ID NO: 4163021 - DNA, 25 bp, Homo sapien
tccataagagccctggctgttgctg

SEQ ID NO: 4163022 - DNA, 25 bp, Homo sapien
aggataatgaagaatgatgtagccc

SEQ ID NO: 4163023 - DNA, 25 bp, Homo sapien
gataatgaagaatgatgtagcccat

SEQ ID NO: 4163024 - DNA, 25 bp, Homo sapien
cttataattgattggaaaggagtac

SEQ ID NO: 4163025 - DNA, 25 bp, Homo sapien
tataattgattggaaaggagtacat

SEQ ID NO: 4163026 - DNA, 25 bp, Homo sapien
catccgatgatgttaaggctctttc

SEQ ID NO: 4163027 - DNA, 25 bp, Homo sapien
tattcatccgatgatgttaaggctc

SEQ ID NO: 4163028 - DNA, 25 bp, Homo sapien
ttcatccgatgatgttaaggctctt

SEQ ID NO: 4163029 - DNA, 25 bp, Homo sapien
ttattcatccgatgatgttaaggct

SEQ ID NO: 4163030 - DNA, 25 bp, Homo sapien
gctgacacaaaaggtttgtatttaa

SEQ ID NO: 4163031 - DNA, 25 bp, Homo sapien
gtcctgtaaataagagcctatgtcc

SEQ ID NO: 4163032 - DNA, 25 bp, Homo sapien
gcctatgtccacatgtcagacaaaa

SEQ ID NO: 4163033 - DNA, 25 bp, Homo sapien
ctgatagtttttagagctgacacaa

SEQ ID NO: 4163034 - DNA, 25 bp, Homo sapien
tccagcagctgcgctatcaagaaca

SEQ ID NO: 4163035 - DNA, 25 bp, Homo sapien
ccagcagctgcgctatcaagaacat

SEQ ID NO: 4163036 - DNA, 25 bp, Homo sapien
tttccagcagctgcgctatcaagaa

SEQ ID NO: 4163037 - DNA, 25 bp, Homo sapien
ctttccagcagctgcgctatcaaga

SEQ ID NO: 4163038 - DNA, 25 bp, Homo sapien
tctgttacagacagttgcaggttgc

SEQ ID NO: 4163039 - DNA, 25 bp, Homo sapien
caaagtaagacttcttatggttact

SEQ ID NO: 4163040 - DNA, 25 bp, Homo sapien
tggctgcaggttttagaccctttaa

SEQ ID NO: 4163041 - DNA, 25 bp, Homo sapien
tatggttacttaagttgtggctgca

SEQ ID NO: 4163042 - DNA, 25 bp, Homo sapien
cagaggcaaaatgacgtgagtctct

SEQ ID NO: 4163043 - DNA, 25 bp, Homo sapien
tgcctgcagcccacttaaatttctc

SEQ ID NO: 4163044 - DNA, 25 bp, Homo sapien
ggcagaggcaaaatgacgtgagtct

SEQ ID NO: 4163045 - DNA, 25 bp, Homo sapien
acagttctacatggttgtggaggct

SEQ ID NO: 4163046 - DNA, 25 bp, Homo sapien
ggaagatgttcaaatagggtccttc

SEQ ID NO: 4163047 - DNA, 25 bp, Homo sapien
ttaacactcgtagatatttttcagt

SEQ ID NO: 4163048 - DNA, 25 bp, Homo sapien
tgagatatcccccagctcatgcaga

SEQ ID NO: 4163049 - DNA, 25 bp, Homo sapien
gatgttcaaatagggtccttcattt

SEQ ID NO: 4163050 - DNA, 25 bp, Homo sapien
tccgtatgacatcggcatttcatgg

SEQ ID NO: 4163051 - DNA, 25 bp, Homo sapien
cagggttgaaaagatcactgagaca

SEQ ID NO: 4163052 - DNA, 25 bp, Homo sapien
catttcatggagttgatggacaggg

SEQ ID NO: 4163053 - DNA, 25 bp, Homo sapien
catgatctgctaaatgagctttaat

SEQ ID NO: 4163054 - DNA, 25 bp, Homo sapien
aatctggtactttaatcaattcttt

SEQ ID NO: 4163055 - DNA, 25 bp, Homo sapien
ctctcccctcaagaatgttaggcca

SEQ ID NO: 4163056 - DNA, 25 bp, Homo sapien
taggccacaacttatcaggccccat

SEQ ID NO: 4163057 - DNA, 25 bp, Homo sapien
tcaagaatgttaggccacaacttat

SEQ ID NO: 4163058 - DNA, 25 bp, Homo sapien
gaatgttaggccacaacttatcagg

SEQ ID NO: 4163059 - DNA, 25 bp, Homo sapien
ttagatgtgagaactggactctcca

SEQ ID NO: 4163060 - DNA, 25 bp, Homo sapien
agatgtgagaactggactctccaag

SEQ ID NO: 4163061 - DNA, 25 bp, Homo sapien
tagatgtgagaactggactctccaa

SEQ ID NO: 4163062 - DNA, 25 bp, Homo sapien
gtgtgacaagaggacagaacctcgg

SEQ ID NO: 4163063 - DNA, 25 bp, Homo sapien
tccaaagccagatccctgaattgtt

SEQ ID NO: 4163064 - DNA, 25 bp, Homo sapien
caagaggacagaacctcggcattcc

SEQ ID NO: 4163065 - DNA, 25 bp, Homo sapien
gggaagtgtttgaagaccaattcta

SEQ ID NO: 4163066 - DNA, 25 bp, Homo sapien
ctcccaagtgtccatccaccctcct

SEQ ID NO: 4163067 - DNA, 25 bp, Homo sapien
accctcctcctgctatgggctctga

SEQ ID NO: 4163068 - DNA, 25 bp, Homo sapien
tcctcctgctatgggctctgaactc

SEQ ID NO: 4163069 - DNA, 25 bp, Homo sapien
ccaccctcctcctgctatgggctct

SEQ ID NO: 4163070 - DNA, 25 bp, Homo sapien
tcctagttccctgaatcttaactcc

SEQ ID NO: 4163071 - DNA, 25 bp, Homo sapien
cagaatcagctttggggtggttgaa

SEQ ID NO: 4163072 - DNA, 25 bp, Homo sapien
aatcttaactccatctaagtccagg

SEQ ID NO: 4163073 - DNA, 25 bp, Homo sapien
cagttctatcctagttccctgaatc

SEQ ID NO: 4163074 - DNA, 25 bp, Homo sapien
tgagtttagtaactcctgcatcagc

SEQ ID NO: 4163075 - DNA, 25 bp, Homo sapien
tagctttgagtttagtaactcctgc

SEQ ID NO: 4163076 - DNA, 25 bp, Homo sapien
gctttgagtttagtaactcctgcat

SEQ ID NO: 4163077 - DNA, 25 bp, Homo sapien
ttgagtttagtaactcctgcatcag

SEQ ID NO: 4163078 - DNA, 25 bp, Homo sapien
gaagtgttttgaactggccagtaag

SEQ ID NO: 4163079 - DNA, 25 bp, Homo sapien
tcttttactggtcccaggagtgaag

SEQ ID NO: 4163080 - DNA, 25 bp, Homo sapien
gcttgctgtgacctgccccactttg

SEQ ID NO: 4163081 - DNA, 25 bp, Homo sapien
gggcttgctgtgacctgccccactt

SEQ ID NO: 4163082 - DNA, 25 bp, Homo sapien
ctaagccataggcctaaaattggtg

SEQ ID NO: 4163083 - DNA, 25 bp, Homo sapien
cttactaagccataggcctaaaatt

SEQ ID NO: 4163084 - DNA, 25 bp, Homo sapien
aagccataggcctaaaattggtgga

SEQ ID NO: 4163085 - DNA, 25 bp, Homo sapien
tactaagccataggcctaaaattgg

SEQ ID NO: 4163086 - DNA, 25 bp, Homo sapien
ctgttgagggtgcactgacccctcc

SEQ ID NO: 4163087 - DNA, 25 bp, Homo sapien
ttttcacatgaagagtcaaattggt

SEQ ID NO: 4163088 - DNA, 25 bp, Homo sapien
gaagagtcaaattggtagccagaga

SEQ ID NO: 4163089 - DNA, 25 bp, Homo sapien
cacatgaagagtcaaattggtagcc

SEQ ID NO: 4163090 - DNA, 25 bp, Homo sapien
caaattggtagccagagagatgtaa

SEQ ID NO: 4163091 - DNA, 25 bp, Homo sapien
agcaagccaatcagcaactgatggt

SEQ ID NO: 4163092 - DNA, 25 bp, Homo sapien
tcccaggcgaaggtgagtggtagtg

SEQ ID NO: 4163093 - DNA, 25 bp, Homo sapien
aggggttcccaggcgaaggtgagtg

SEQ ID NO: 4163094 - DNA, 25 bp, Homo sapien
cccaggcgaaggtgagtggtagtgc

SEQ ID NO: 4163095 - DNA, 25 bp, Homo sapien
ttaactcggagcatgctgactttct

SEQ ID NO: 4163096 - DNA, 25 bp, Homo sapien
cttagtaatgtgctctaagctgact

SEQ ID NO: 4163097 - DNA, 25 bp, Homo sapien
gctctaagctgactatagcattcag

SEQ ID NO: 4163098 - DNA, 25 bp, Homo sapien
taagctgactatagcattcagtagt

SEQ ID NO: 4163099 - DNA, 25 bp, Homo sapien
taatgtgctctaagctgactatagc

SEQ ID NO: 4163100 - DNA, 25 bp, Homo sapien
ttagacatcctcctcattgctgaag

SEQ ID NO: 4163101 - DNA, 25 bp, Homo sapien
tagacatcctcctcattgctgaagc

SEQ ID NO: 4163102 - DNA, 25 bp, Homo sapien
gcattgaaacatggccttgtagagg

SEQ ID NO: 4163103 - DNA, 25 bp, Homo sapien
ggaatgttctgtggtgttaaattgt

SEQ ID NO: 4163104 - DNA, 25 bp, Homo sapien
catggccttgtagaggaatgttctg

SEQ ID NO: 4163105 - DNA, 25 bp, Homo sapien
ctaatagcattgaaacatggccttg

SEQ ID NO: 4163106 - DNA, 25 bp, Homo sapien
cttgcagggtcattaccatatatca

SEQ ID NO: 4163107 - DNA, 25 bp, Homo sapien
ttagtgcttgcagggtcattaccat

SEQ ID NO: 4163108 - DNA, 25 bp, Homo sapien
tgtacaattagtgcttgcagggtca

SEQ ID NO: 4163109 - DNA, 25 bp, Homo sapien
ggatggatgtacaattagtgcttgc

SEQ ID NO: 4163110 - DNA, 25 bp, Homo sapien
atgaggcatgcccacgcgaaaacca

SEQ ID NO: 4163111 - DNA, 25 bp, Homo sapien
gctacaacttgatgaggcatgccca

SEQ ID NO: 4163112 - DNA, 25 bp, Homo sapien
aacttgatgaggcatgcccacgcga

SEQ ID NO: 4163113 - DNA, 25 bp, Homo sapien
tgcgctctttggctacaacttgatg

SEQ ID NO: 4163114 - DNA, 25 bp, Homo sapien
ggcagagcagggcagtgcaggatct

SEQ ID NO: 4163115 - DNA, 25 bp, Homo sapien
agtgcaggatctctctagcctgggc

SEQ ID NO: 4163116 - DNA, 25 bp, Homo sapien
ggcagtgcaggatctctctagcctg

SEQ ID NO: 4163117 - DNA, 25 bp, Homo sapien
caaggagccagacatctggctggca

SEQ ID NO: 4163118 - DNA, 25 bp, Homo sapien
aactttggatcttggaagcccaact

SEQ ID NO: 4163119 - DNA, 25 bp, Homo sapien
tcactgtaaggtggtaaggtaccat

SEQ ID NO: 4163120 - DNA, 25 bp, Homo sapien
ccttcaatgactggggacaactttg

SEQ ID NO: 4163121 - DNA, 25 bp, Homo sapien
cactgtaaggtggtaaggtaccatt

SEQ ID NO: 4163122 - DNA, 25 bp, Homo sapien
tttagtaatggctttacacagatct

SEQ ID NO: 4163123 - DNA, 25 bp, Homo sapien
tagtaatggctttacacagatcttc

SEQ ID NO: 4163124 - DNA, 25 bp, Homo sapien
gtaatggctttacacagatcttcat

SEQ ID NO: 4163125 - DNA, 25 bp, Homo sapien
agtaatggctttacacagatcttca

SEQ ID NO: 4163126 - DNA, 25 bp, Homo sapien
ctttttactgtgactcctggagtga

SEQ ID NO: 4163127 - DNA, 25 bp, Homo sapien
taagcaataagagcatcaaagtgtg

SEQ ID NO: 4163128 - DNA, 25 bp, Homo sapien
ccatatgccacaggattctcaaggg

SEQ ID NO: 4163129 - DNA, 25 bp, Homo sapien
aaggctggcaaaggcttttatgctc

SEQ ID NO: 4163130 - DNA, 25 bp, Homo sapien
ttaaaagctgctgttggtggccttt

SEQ ID NO: 4163131 - DNA, 25 bp, Homo sapien
gctgttggtggccttttaggtacat

SEQ ID NO: 4163132 - DNA, 25 bp, Homo sapien
ttttggtcaggttttctctcattaa

SEQ ID NO: 4163133 - DNA, 25 bp, Homo sapien
ttctttttggtcaggttttctctca

SEQ ID NO: 4163134 - DNA, 25 bp, Homo sapien
gtgcctataacagccactcctgagg

SEQ ID NO: 4163135 - DNA, 25 bp, Homo sapien
gagatccaaggaaatagaggttgtg

SEQ ID NO: 4163136 - DNA, 25 bp, Homo sapien
ggctccttcttgacgattgactttg

SEQ ID NO: 4163137 - DNA, 25 bp, Homo sapien
gaaacgcttgcaagcccttggtgcc

SEQ ID NO: 4163138 - DNA, 25 bp, Homo sapien
gcttgtccataaggggaatttagat

SEQ ID NO: 4163139 - DNA, 25 bp, Homo sapien
aaactcagtcgtagttcctaggact

SEQ ID NO: 4163140 - DNA, 25 bp, Homo sapien
ccaaactcagtcgtagttcctagga

SEQ ID NO: 4163141 - DNA, 25 bp, Homo sapien
actcagtcgtagttcctaggacttt

SEQ ID NO: 4163142 - DNA, 25 bp, Homo sapien
caaagccttgcccttgtaagaatga

SEQ ID NO: 4163143 - DNA, 25 bp, Homo sapien
aaaggcttctgcaattgtttggtta

SEQ ID NO: 4163144 - DNA, 25 bp, Homo sapien
tttgccttcatgctgaagcagccac

SEQ ID NO: 4163145 - DNA, 25 bp, Homo sapien
gagttgccaatctcttttgccttca

SEQ ID NO: 4163146 - DNA, 25 bp, Homo sapien
aattttgccatattgaacaatgata

SEQ ID NO: 4163147 - DNA, 25 bp, Homo sapien
ttgccatattgaacaatgatacagc

SEQ ID NO: 4163148 - DNA, 25 bp, Homo sapien
caaattttgccatattgaacaatga

SEQ ID NO: 4163149 - DNA, 25 bp, Homo sapien
ttttgccatattgaacaatgataca

SEQ ID NO: 4163150 - DNA, 25 bp, Homo sapien
tatttgttgaagcatagcaggagcc

SEQ ID NO: 4163151 - DNA, 25 bp, Homo sapien
gtatttgttgaagcatagcaggagc

SEQ ID NO: 4163152 - DNA, 25 bp, Homo sapien
atttgttgaagcatagcaggagcca

SEQ ID NO: 4163153 - DNA, 25 bp, Homo sapien
tctaaagattgaaccacctcccagg

SEQ ID NO: 4163154 - DNA, 25 bp, Homo sapien
cccggctggcatagacttggtttta

SEQ ID NO: 4163155 - DNA, 25 bp, Homo sapien
gggcaacccctgtactggactgatt

SEQ ID NO: 4163156 - DNA, 25 bp, Homo sapien
aagactacgtgagtcgactgcccgg

SEQ ID NO: 4163157 - DNA, 25 bp, Homo sapien
cctcgctgaggtttaaaaatcgact

SEQ ID NO: 4163158 - DNA, 25 bp, Homo sapien
gcgaaccttgggtccaagagcggga

SEQ ID NO: 4163159 - DNA, 25 bp, Homo sapien
tgtcctgtaaagagaatagtggggc

SEQ ID NO: 4163160 - DNA, 25 bp, Homo sapien
cagagatttttctccgccgtgctgc

SEQ ID NO: 4163161 - DNA, 25 bp, Homo sapien
gagccctgggactaacactttctgt

SEQ ID NO: 4163162 - DNA, 25 bp, Homo sapien
cactttctgtgatgttgcagcgccc

SEQ ID NO: 4163163 - DNA, 25 bp, Homo sapien
caatgtgcatgaaacgccaggtgct

SEQ ID NO: 4163164 - DNA, 25 bp, Homo sapien
gccaggtccgccaataagaagcaag

SEQ ID NO: 4163165 - DNA, 25 bp, Homo sapien
tgagtaattcggaaaggtgtaagcg

SEQ ID NO: 4163166 - DNA, 25 bp, Homo sapien
tcggttctctgccgcacgcaacttt

SEQ ID NO: 4163167 - DNA, 25 bp, Homo sapien
taagcggttcttttcgctggtatct

SEQ ID NO: 4163168 - DNA, 25 bp, Homo sapien
tgtggcgctgcaccttcggttctct

SEQ ID NO: 4163169 - DNA, 25 bp, Homo sapien
cggagtccacgccgcaggagggggc

SEQ ID NO: 4163170 - DNA, 25 bp, Homo sapien
agtccacgccgcaggagggggcgtc

SEQ ID NO: 4163171 - DNA, 25 bp, Homo sapien
gagtccacgccgcaggagggggcgt

SEQ ID NO: 4163172 - DNA, 25 bp, Homo sapien
tccacgccgcaggagggggcgtcgt

SEQ ID NO: 4163173 - DNA, 25 bp, Homo sapien
tggcggagatcaagaggcagaagag

SEQ ID NO: 4163174 - DNA, 25 bp, Homo sapien
gcctgaagacggtggcggagatcaa

SEQ ID NO: 4163175 - DNA, 25 bp, Homo sapien
ctggcctgaagacggtggcggagat

SEQ ID NO: 4163176 - DNA, 25 bp, Homo sapien
aagacggtggcggagatcaagaggc

SEQ ID NO: 4163177 - DNA, 25 bp, Homo sapien
gaactgaggctctatgagcaggtcc

SEQ ID NO: 4163178 - DNA, 25 bp, Homo sapien
aaagtgccggcagttatttcatccg

SEQ ID NO: 4163179 - DNA, 25 bp, Homo sapien
gacgtggacttggatacccagagac

SEQ ID NO: 4163180 - DNA, 25 bp, Homo sapien
taagctttagcaggtttcgcaaggg

SEQ ID NO: 4163181 - DNA, 25 bp, Homo sapien
aactgtgagcgcacggaataccctg

SEQ ID NO: 4163182 - DNA, 25 bp, Homo sapien
gctgctctgtcaggcaactgtgagc

SEQ ID NO: 4163183 - DNA, 25 bp, Homo sapien
tggcaactgtctacgcagggataga

SEQ ID NO: 4163184 - DNA, 25 bp, Homo sapien
gaacaacttgtgtcagccgccaggc

SEQ ID NO: 4163185 - DNA, 25 bp, Homo sapien
tgagcttgccgacagctgaagggat

SEQ ID NO: 4163186 - DNA, 25 bp, Homo sapien
gatgtgcacggataaaaggaagtga

SEQ ID NO: 4163187 - DNA, 25 bp, Homo sapien
ctgagcttgccgacagctgaaggga

SEQ ID NO: 4163188 - DNA, 25 bp, Homo sapien
gaagggatgtgcacggataaaagga

SEQ ID NO: 4163189 - DNA, 25 bp, Homo sapien
tgaactatggtttcacagtccccgc

SEQ ID NO: 4163190 - DNA, 25 bp, Homo sapien
aaaaccaactgtgggcgtgtggacg

SEQ ID NO: 4163191 - DNA, 25 bp, Homo sapien
tagaaaaacctatcctgcgacgtgg

SEQ ID NO: 4163192 - DNA, 25 bp, Homo sapien
gatttgtcagagaacgcagacgcct

SEQ ID NO: 4163193 - DNA, 25 bp, Homo sapien
ctgtggcgccaaaagaaccaccgtg

SEQ ID NO: 4163194 - DNA, 25 bp, Homo sapien
gcaatgccagctcggtaattcaccg

SEQ ID NO: 4163195 - DNA, 25 bp, Homo sapien
gaaaccacggatctgagggtccagg

SEQ ID NO: 4163196 - DNA, 25 bp, Homo sapien
tcagtgtagacacggcgcctttagt

SEQ ID NO: 4163197 - DNA, 25 bp, Homo sapien
tcggatcctcagattcacggtggct

SEQ ID NO: 4163198 - DNA, 25 bp, Homo sapien
ctatgcagagggctccgaagaaggc

SEQ ID NO: 4163199 - DNA, 25 bp, Homo sapien
agggctccgaagaaggcgcacttac

SEQ ID NO: 4163200 - DNA, 25 bp, Homo sapien
cccaccgggctctgctatgcagagg

SEQ ID NO: 4163201 - DNA, 25 bp, Homo sapien
gctctgctatgcagagggctccgaa

SEQ ID NO: 4163202 - DNA, 25 bp, Homo sapien
ttcaaaacaggtaacgtggcacgcc

SEQ ID NO: 4163203 - DNA, 25 bp, Homo sapien
tgtagcgactacaagccgaaagacc

SEQ ID NO: 4163204 - DNA, 25 bp, Homo sapien
tacaaaatgtcaccacaggctgacg

SEQ ID NO: 4163205 - DNA, 25 bp, Homo sapien
actgctccggaaatgaagagtggcc

SEQ ID NO: 4163206 - DNA, 25 bp, Homo sapien
tgttttggattgtgcgcaactctga

SEQ ID NO: 4163207 - DNA, 25 bp, Homo sapien
tgtgcgcaactctgatttccccttc

SEQ ID NO: 4163208 - DNA, 25 bp, Homo sapien
ttggattgtgcgcaactctgatttc

SEQ ID NO: 4163209 - DNA, 25 bp, Homo sapien
ttagaagatgttttggattgtgcgc

SEQ ID NO: 4163210 - DNA, 25 bp, Homo sapien
aaatgtggctgtctcttaatcctga

SEQ ID NO: 4163211 - DNA, 25 bp, Homo sapien
caaagtggcattagtcagaccaccc

SEQ ID NO: 4163212 - DNA, 25 bp, Homo sapien
tggcccaatctcatgtataataaag

SEQ ID NO: 4163213 - DNA, 25 bp, Homo sapien
tttacaaaatggaagaggttatggc

SEQ ID NO: 4163214 - DNA, 25 bp, Homo sapien
gaatagtcttcttataccgtggaga

SEQ ID NO: 4163215 - DNA, 25 bp, Homo sapien
gacagttcatgaagatcaagcctgg

SEQ ID NO: 4163216 - DNA, 25 bp, Homo sapien
gaagcagtggagctccctctattga

SEQ ID NO: 4163217 - DNA, 25 bp, Homo sapien
aaggtggcattttctaacagcaaag

SEQ ID NO: 4163218 - DNA, 25 bp, Homo sapien
cctttaagcttcacttgtcctccag

SEQ ID NO: 4163219 - DNA, 25 bp, Homo sapien
tgaagagaggtccactcattcctct

SEQ ID NO: 4163220 - DNA, 25 bp, Homo sapien
cctctctgaagagaggtccactcat

SEQ ID NO: 4163221 - DNA, 25 bp, Homo sapien
tcctttaagcttcacttgtcctcca

SEQ ID NO: 4163222 - DNA, 25 bp, Homo sapien
ggtgactgggaaatctcaatctgca

SEQ ID NO: 4163223 - DNA, 25 bp, Homo sapien
taacttgacaatgatcctggtaacc

SEQ ID NO: 4163224 - DNA, 25 bp, Homo sapien
tgatcactactaaaagccctcagca

SEQ ID NO: 4163225 - DNA, 25 bp, Homo sapien
ggtaaccgttactgattcaacaatg

SEQ ID NO: 4163226 - DNA, 25 bp, Homo sapien
agctttttccttcagcaattgcatg

SEQ ID NO: 4163227 - DNA, 25 bp, Homo sapien
gctttttccttcagcaattgcatgc

SEQ ID NO: 4163228 - DNA, 25 bp, Homo sapien
ccttcagcaattgcatgctgttttg

SEQ ID NO: 4163229 - DNA, 25 bp, Homo sapien
tttccttcagcaattgcatgctgtt

SEQ ID NO: 4163230 - DNA, 25 bp, Homo sapien
taaacacaagtgtagtcattccagc

SEQ ID NO: 4163231 - DNA, 25 bp, Homo sapien
tataaatggctctcctaaacatgct

SEQ ID NO: 4163232 - DNA, 25 bp, Homo sapien
ttgctcttggcagaaggaacaaagc

SEQ ID NO: 4163233 - DNA, 25 bp, Homo sapien
tgcaataaatgaaccactggccatc

SEQ ID NO: 4163234 - DNA, 25 bp, Homo sapien
agcttctcatctttggatgtctaga

SEQ ID NO: 4163235 - DNA, 25 bp, Homo sapien
ttagggaggttctattttgtgtata

SEQ ID NO: 4163236 - DNA, 25 bp, Homo sapien
tttgtcttgactagataacgatgac

SEQ ID NO: 4163237 - DNA, 25 bp, Homo sapien
tacatgcctagtcaatgatcttttt

SEQ ID NO: 4163238 - DNA, 25 bp, Homo sapien
tgaaacccacttaatcttggtggac

SEQ ID NO: 4163239 - DNA, 25 bp, Homo sapien
tagtcactgttagtatatagcagag

SEQ ID NO: 4163240 - DNA, 25 bp, Homo sapien
gtggtgtatcgcatctattgactta

SEQ ID NO: 4163241 - DNA, 25 bp, Homo sapien
ccttatcttgttccagttatctggg

SEQ ID NO: 4163242 - DNA, 25 bp, Homo sapien
tatatgatgagtgatttatcggcac

SEQ ID NO: 4163243 - DNA, 25 bp, Homo sapien
tgtacaaggtcacgtgtcactatgc

SEQ ID NO: 4163244 - DNA, 25 bp, Homo sapien
cactatgctagttggtggtagaact

SEQ ID NO: 4163245 - DNA, 25 bp, Homo sapien
gagatgttactaacctgtacaaggt

SEQ ID NO: 4163246 - DNA, 25 bp, Homo sapien
cacaggatgaggagcaatacggagc

SEQ ID NO: 4163247 - DNA, 25 bp, Homo sapien
gaacttaagaatacggcaatgcata

SEQ ID NO: 4163248 - DNA, 25 bp, Homo sapien
ggaattaggcaaaggacatgtcatg

SEQ ID NO: 4163249 - DNA, 25 bp, Homo sapien
taagtaagaggtaacatgatcagac

SEQ ID NO: 4163250 - DNA, 25 bp, Homo sapien
gaatggttaacaaagcctagcatct

SEQ ID NO: 4163251 - DNA, 25 bp, Homo sapien
ccgcgctgggatttgagcttaggtt

SEQ ID NO: 4163252 - DNA, 25 bp, Homo sapien
cagggtgagtcagcatcaatgtact

SEQ ID NO: 4163253 - DNA, 25 bp, Homo sapien
agtaccagaggtagcaagtggccgc

SEQ ID NO: 4163254 - DNA, 25 bp, Homo sapien
taaaaactgattgaaagaggcacat

SEQ ID NO: 4163255 - DNA, 25 bp, Homo sapien
tcagagaccccatagatgcagttgt

SEQ ID NO: 4163256 - DNA, 25 bp, Homo sapien
aatagtgccatactcaacctctcag

SEQ ID NO: 4163257 - DNA, 25 bp, Homo sapien
gaccacagccatatattagtaggag

SEQ ID NO: 4163258 - DNA, 25 bp, Homo sapien
cgtgactcagaaatcaagtcgtcta

SEQ ID NO: 4163259 - DNA, 25 bp, Homo sapien
tggcgtcaatctgaacgtgactcag

SEQ ID NO: 4163260 - DNA, 25 bp, Homo sapien
tagaaccattagtgtttccctgact

SEQ ID NO: 4163261 - DNA, 25 bp, Homo sapien
tttggcctcactgtagagtttcagg

SEQ ID NO: 4163262 - DNA, 25 bp, Homo sapien
tgaatgcattaccagtaccactgga

SEQ ID NO: 4163263 - DNA, 25 bp, Homo sapien
taagtgcctatcgacccatgaatgg

SEQ ID NO: 4163264 - DNA, 25 bp, Homo sapien
tacaaggatatggaaccaccctaag

SEQ ID NO: 4163265 - DNA, 25 bp, Homo sapien
tgaaaaagacatgtgcacaggtatg

SEQ ID NO: 4163266 - DNA, 25 bp, Homo sapien
taaattaccattaacgtctactatg

SEQ ID NO: 4163267 - DNA, 25 bp, Homo sapien
gggatcgagtacctcttaatagaat

SEQ ID NO: 4163268 - DNA, 25 bp, Homo sapien
gggatttgcaattagggatcgagta

SEQ ID NO: 4163269 - DNA, 25 bp, Homo sapien
tggcattgtgctaggaacttccaac

SEQ ID NO: 4163270 - DNA, 25 bp, Homo sapien
tccctgccatcctaaaatacactgg

SEQ ID NO: 4163271 - DNA, 25 bp, Homo sapien
ggattttaatccctgccatcctaaa

SEQ ID NO: 4163272 - DNA, 25 bp, Homo sapien
ggatggattttaatccctgccatcc

SEQ ID NO: 4163273 - DNA, 25 bp, Homo sapien
aaaatacactggcaacaagttgtcc

SEQ ID NO: 4163274 - DNA, 25 bp, Homo sapien
taaatcctccctagtagatactgaa

SEQ ID NO: 4163275 - DNA, 25 bp, Homo sapien
ggactatcaagctcatactttaagg

SEQ ID NO: 4163276 - DNA, 25 bp, Homo sapien
catacccagtagcagaagatcaata

SEQ ID NO: 4163277 - DNA, 25 bp, Homo sapien
gccaaggagtccgaattatgaataa

SEQ ID NO: 4163278 - DNA, 25 bp, Homo sapien
tacacataacatgttaatggtgtac

SEQ ID NO: 4163279 - DNA, 25 bp, Homo sapien
cagtgagctatactcactatacttc

SEQ ID NO: 4163280 - DNA, 25 bp, Homo sapien
gaattagtgattgaatggataatgt

SEQ ID NO: 4163281 - DNA, 25 bp, Homo sapien
ggtgtacttgatctcttataaaggg

SEQ ID NO: 4163282 - DNA, 25 bp, Homo sapien
aaatctcactatacatataaccaag

SEQ ID NO: 4163283 - DNA, 25 bp, Homo sapien
tttagtgagcatttaggccgggtgc

SEQ ID NO: 4163284 - DNA, 25 bp, Homo sapien
gtattatcaaagacaggtgtttgcc

SEQ ID NO: 4163285 - DNA, 25 bp, Homo sapien
aggtgtttgccttaacctcttccag

SEQ ID NO: 4163286 - DNA, 25 bp, Homo sapien
cgcaggtgctgccattgcaatggta

SEQ ID NO: 4163287 - DNA, 25 bp, Homo sapien
cacactagtgagcatgtcttcagga

SEQ ID NO: 4163288 - DNA, 25 bp, Homo sapien
tgggtcatcgggttattgcctggaa

SEQ ID NO: 4163289 - DNA, 25 bp, Homo sapien
ttcaggaaagctacttccgcccagt

SEQ ID NO: 4163290 - DNA, 25 bp, Homo sapien
caaactacaaggaaatttgttggag

SEQ ID NO: 4163291 - DNA, 25 bp, Homo sapien
aaaccagaagagagcgggaactaag

SEQ ID NO: 4163292 - DNA, 25 bp, Homo sapien
gctgtcccatctctatgcaagtcta

SEQ ID NO: 4163293 - DNA, 25 bp, Homo sapien
ctattagagtgggtaagaaaccaga

SEQ ID NO: 4163294 - DNA, 25 bp, Homo sapien
tttgtgggataataatcaggatttt

SEQ ID NO: 4163295 - DNA, 25 bp, Homo sapien
ttaattagtctacggctacgaaatc

SEQ ID NO: 4163296 - DNA, 25 bp, Homo sapien
tggagtccaagttatgcagatcaca

SEQ ID NO: 4163297 - DNA, 25 bp, Homo sapien
tgttgactctcaaattacctgatat

SEQ ID NO: 4163298 - DNA, 25 bp, Homo sapien
gaaaaagcgaataaatgtaattctc

SEQ ID NO: 4163299 - DNA, 25 bp, Homo sapien
tatccaaaatgacaacagaccccag

SEQ ID NO: 4163300 - DNA, 25 bp, Homo sapien
aatgggacggatccttgttatccaa

SEQ ID NO: 4163301 - DNA, 25 bp, Homo sapien
tggaatctcccttgggcataactct

SEQ ID NO: 4163302 - DNA, 25 bp, Homo sapien
tagatgggagaatagaatgggacgg

SEQ ID NO: 4163303 - DNA, 25 bp, Homo sapien
tcttcttataaacctgtgacataag

SEQ ID NO: 4163304 - DNA, 25 bp, Homo sapien
tccagtgtagctgatagaacctggg

SEQ ID NO: 4163305 - DNA, 25 bp, Homo sapien
tgggggcagaaacacttcattttct

SEQ ID NO: 4163306 - DNA, 25 bp, Homo sapien
tcctccagtgtagctgatagaacct

SEQ ID NO: 4163307 - DNA, 25 bp, Homo sapien
cctagtggtctcaaatagagatgag

SEQ ID NO: 4163308 - DNA, 25 bp, Homo sapien
gtccaggcctagtggtctcaaatag

SEQ ID NO: 4163309 - DNA, 25 bp, Homo sapien
gatgccgaaacatgtgaaagtgact

SEQ ID NO: 4163310 - DNA, 25 bp, Homo sapien
gctgctgtaaagatgccgaaacatg

SEQ ID NO: 4163311 - DNA, 25 bp, Homo sapien
gcacagactaatgatatcttgcaaa

SEQ ID NO: 4163312 - DNA, 25 bp, Homo sapien
catattagttcaaatgagctaccca

SEQ ID NO: 4163313 - DNA, 25 bp, Homo sapien
tacatttttgtcttcgaggagtttc

SEQ ID NO: 4163314 - DNA, 25 bp, Homo sapien
tagtctatccatataccctgctaga

SEQ ID NO: 4163315 - DNA, 25 bp, Homo sapien
cactaaaagcactgggctttagggt

SEQ ID NO: 4163316 - DNA, 25 bp, Homo sapien
cttcctttggcaactaacagtgttt

SEQ ID NO: 4163317 - DNA, 25 bp, Homo sapien
cttcacaggtagaggtctgcaaagc

SEQ ID NO: 4163318 - DNA, 25 bp, Homo sapien
acttcacaggtagaggtctgcaaag

SEQ ID NO: 4163319 - DNA, 25 bp, Homo sapien
ttcacaggtagaggtctgcaaagcc

SEQ ID NO: 4163320 - DNA, 25 bp, Homo sapien
caagtcggcaaggtatgataatggt

SEQ ID NO: 4163321 - DNA, 25 bp, Homo sapien
gataatggtatctccatatgctgaa

SEQ ID NO: 4163322 - DNA, 25 bp, Homo sapien
gattctgaggtacgtcaagtcggca

SEQ ID NO: 4163323 - DNA, 25 bp, Homo sapien
gaatttacagtataccatccaaggc

SEQ ID NO: 4163324 - DNA, 25 bp, Homo sapien
ctccattttcagacccacttgtacc

SEQ ID NO: 4163325 - DNA, 25 bp, Homo sapien
ttcagacccacttgtaccttcatac

SEQ ID NO: 4163326 - DNA, 25 bp, Homo sapien
ttttcagacccacttgtaccttcat

SEQ ID NO: 4163327 - DNA, 25 bp, Homo sapien
tttcagacccacttgtaccttcata

SEQ ID NO: 4163328 - DNA, 25 bp, Homo sapien
catagtatggttaggattctgcagc

SEQ ID NO: 4163329 - DNA, 25 bp, Homo sapien
caatttcttcgggtactctgacaac

SEQ ID NO: 4163330 - DNA, 25 bp, Homo sapien
gagaaatgctgtgctgccttaccac

SEQ ID NO: 4163331 - DNA, 25 bp, Homo sapien
tgtgttaaaccaccccttgagtgca

SEQ ID NO: 4163332 - DNA, 25 bp, Homo sapien
caagtgcattgtgtggtagtctccc

SEQ ID NO: 4163333 - DNA, 25 bp, Homo sapien
ggcactaatagactctgtcctcaga

SEQ ID NO: 4163334 - DNA, 25 bp, Homo sapien
caaagttacctcgagtgaactggat

SEQ ID NO: 4163335 - DNA, 25 bp, Homo sapien
cctcagaggccttaacttcacattt

SEQ ID NO: 4163336 - DNA, 25 bp, Homo sapien
ctgaaggcaataaatactggggagc

SEQ ID NO: 4163337 - DNA, 25 bp, Homo sapien
gcaataaatactggggagccatcgg

SEQ ID NO: 4163338 - DNA, 25 bp, Homo sapien
ggcaataaatactggggagccatcg

SEQ ID NO: 4163339 - DNA, 25 bp, Homo sapien
aaggcaataaatactggggagccat

SEQ ID NO: 4163340 - DNA, 25 bp, Homo sapien
gacaaagtgtagttttctgagaggt

SEQ ID NO: 4163341 - DNA, 25 bp, Homo sapien
tattctggtacatcgtcgtactgca

SEQ ID NO: 4163342 - DNA, 25 bp, Homo sapien
gactattgtaggtgcctcaaacacg

SEQ ID NO: 4163343 - DNA, 25 bp, Homo sapien
aaacacgttgtcctcagttactagc

SEQ ID NO: 4163344 - DNA, 25 bp, Homo sapien
ggtactggccatcaatcccacttag

SEQ ID NO: 4163345 - DNA, 25 bp, Homo sapien
taagtccccttatatagatacctgc

SEQ ID NO: 4163346 - DNA, 25 bp, Homo sapien
taaagaacatggtctggtactggcc

SEQ ID NO: 4163347 - DNA, 25 bp, Homo sapien
taaccagtcaataaaggtcaggatg

SEQ ID NO: 4163348 - DNA, 25 bp, Homo sapien
tggaaagtgccttctaagctgaaag

SEQ ID NO: 4163349 - DNA, 25 bp, Homo sapien
caggcatgactgcaaacacttggtt

SEQ ID NO: 4163350 - DNA, 25 bp, Homo sapien
gacttaacctctgtagctactgtgg

SEQ ID NO: 4163351 - DNA, 25 bp, Homo sapien
gccactggcaaatgcaggatgcaga

SEQ ID NO: 4163352 - DNA, 25 bp, Homo sapien
gtgttgactcaaaacggctcctccc

SEQ ID NO: 4163353 - DNA, 25 bp, Homo sapien
cagatgcaaatggtcgtgttgactc

SEQ ID NO: 4163354 - DNA, 25 bp, Homo sapien
tttttggcatgtagccagctcacag

SEQ ID NO: 4163355 - DNA, 25 bp, Homo sapien
tagtgaagacggcacaactgctctg

SEQ ID NO: 4163356 - DNA, 25 bp, Homo sapien
ttcatggcaacatgtagtatgtgcc

SEQ ID NO: 4163357 - DNA, 25 bp, Homo sapien
cagtatcttgaacaatgatatataa

SEQ ID NO: 4163358 - DNA, 25 bp, Homo sapien
caggggcagctgatattcatggcaa

SEQ ID NO: 4163359 - DNA, 25 bp, Homo sapien
tcttacagtgtttattctaaatctg

SEQ ID NO: 4163360 - DNA, 25 bp, Homo sapien
ttgcttacaatttcaggtttagatg

SEQ ID NO: 4163361 - DNA, 25 bp, Homo sapien
tacaatttcaggtttagatggttgc

SEQ ID NO: 4163362 - DNA, 25 bp, Homo sapien
ttttagctgctctgtttcgagaaac

SEQ ID NO: 4163363 - DNA, 25 bp, Homo sapien
tgctctgtttcgagaaacagtgctt

SEQ ID NO: 4163364 - DNA, 25 bp, Homo sapien
gactgtgagcatgttgtaccctctg

SEQ ID NO: 4163365 - DNA, 25 bp, Homo sapien
tgagactgtgagcatgttgtaccct

SEQ ID NO: 4163366 - DNA, 25 bp, Homo sapien
ggttacctgagactgtgagcatgtt

SEQ ID NO: 4163367 - DNA, 25 bp, Homo sapien
cctgagactgtgagcatgttgtacc

SEQ ID NO: 4163368 - DNA, 25 bp, Homo sapien
cttcaaggggatgtagcacttttcc

SEQ ID NO: 4163369 - DNA, 25 bp, Homo sapien
ccatgtgatattgccatctggataa

SEQ ID NO: 4163370 - DNA, 25 bp, Homo sapien
ttttccattcctgtaccatgtgata

SEQ ID NO: 4163371 - DNA, 25 bp, Homo sapien
tattgccatctggataactgtcttc

SEQ ID NO: 4163372 - DNA, 25 bp, Homo sapien
ttgtatgtcagccttggttgtcttg

SEQ ID NO: 4163373 - DNA, 25 bp, Homo sapien
cttggttgtcttgtactccagggtg

SEQ ID NO: 4163374 - DNA, 25 bp, Homo sapien
agatggtccataatatgtcaccgag

SEQ ID NO: 4163375 - DNA, 25 bp, Homo sapien
tccataatatgtcaccgagcaggtg

SEQ ID NO: 4163376 - DNA, 25 bp, Homo sapien
gcaatttccttctgatgtaggtgtc

SEQ ID NO: 4163377 - DNA, 25 bp, Homo sapien
cactccttgaatgtgaggactgtct

SEQ ID NO: 4163378 - DNA, 25 bp, Homo sapien
gactgtcttaaactgcttctttgtg

SEQ ID NO: 4163379 - DNA, 25 bp, Homo sapien
gtgttttcaccatgaagcccactgt

SEQ ID NO: 4163380 - DNA, 25 bp, Homo sapien
tctgggggagggttgccattcccta

SEQ ID NO: 4163381 - DNA, 25 bp, Homo sapien
tgtattgtcacctgctctgtaggat

SEQ ID NO: 4163382 - DNA, 25 bp, Homo sapien
acttgtattgtcacctgctctgtag

SEQ ID NO: 4163383 - DNA, 25 bp, Homo sapien
agcacttgtattgtcacctgctctg

SEQ ID NO: 4163384 - DNA, 25 bp, Homo sapien
ctacaatgagaacagttgtatttct

SEQ ID NO: 4163385 - DNA, 25 bp, Homo sapien
cagttgtatttcttgatgaagatag

SEQ ID NO: 4163386 - DNA, 25 bp, Homo sapien
agaacagttgtatttcttgatgaag

SEQ ID NO: 4163387 - DNA, 25 bp, Homo sapien
gttgtatttcttgatgaagatagca

SEQ ID NO: 4163388 - DNA, 25 bp, Homo sapien
tagaggcaaaatgtcagatgattat

SEQ ID NO: 4163389 - DNA, 25 bp, Homo sapien
agaggcaaaatgtcagatgattata

SEQ ID NO: 4163390 - DNA, 25 bp, Homo sapien
atagaggcaaaatgtcagatgatta

SEQ ID NO: 4163391 - DNA, 25 bp, Homo sapien
tgatagctgttgaagcaatcatgct

SEQ ID NO: 4163392 - DNA, 25 bp, Homo sapien
gcattgcgcctcacatccgtcagtg

SEQ ID NO: 4163393 - DNA, 25 bp, Homo sapien
tcagggaacacttgtagtctcctgt

SEQ ID NO: 4163394 - DNA, 25 bp, Homo sapien
tccgtcagtgtgtaagtatttgagc

SEQ ID NO: 4163395 - DNA, 25 bp, Homo sapien
gccagccttgagactagtttagaca

SEQ ID NO: 4163396 - DNA, 25 bp, Homo sapien
gatataaatattcccctagggccta

SEQ ID NO: 4163397 - DNA, 25 bp, Homo sapien
tagcctagtttttcaagccagcctt

SEQ ID NO: 4163398 - DNA, 25 bp, Homo sapien
taattggactatagcatgattagcc

SEQ ID NO: 4163399 - DNA, 25 bp, Homo sapien
tattgtgcatgacacgggtagggca

SEQ ID NO: 4163400 - DNA, 25 bp, Homo sapien
cattcctgctagcagatattgtgca

SEQ ID NO: 4163401 - DNA, 25 bp, Homo sapien
gggtagggcatcaccaatctgtcta

SEQ ID NO: 4163402 - DNA, 25 bp, Homo sapien
ttcatccataccacagttgcattcc

SEQ ID NO: 4163403 - DNA, 25 bp, Homo sapien
gagcagtttcgcagacatagtttcc

SEQ ID NO: 4163404 - DNA, 25 bp, Homo sapien
tgaagactagaaaatgacgggctag

SEQ ID NO: 4163405 - DNA, 25 bp, Homo sapien
ggctagatcgaagcctgatgttatc

SEQ ID NO: 4163406 - DNA, 25 bp, Homo sapien
gaaaatgacgggctagatcgaagcc

SEQ ID NO: 4163407 - DNA, 25 bp, Homo sapien
tgtccattgaatggctggctttgga

SEQ ID NO: 4163408 - DNA, 25 bp, Homo sapien
ttttagatagtccactgggatcagt

SEQ ID NO: 4163409 - DNA, 25 bp, Homo sapien
ggaaaaccttccacatggcagatta

SEQ ID NO: 4163410 - DNA, 25 bp, Homo sapien
tccactgccagtaattgtccattga

SEQ ID NO: 4163411 - DNA, 25 bp, Homo sapien
tgtctgtattaccagtacctaaagg

SEQ ID NO: 4163412 - DNA, 25 bp, Homo sapien
tacctaaaggttcttttttgctgca

SEQ ID NO: 4163413 - DNA, 25 bp, Homo sapien
tatgtctgtattaccagtacctaaa

SEQ ID NO: 4163414 - DNA, 25 bp, Homo sapien
ttctatgtctgtattaccagtacct

SEQ ID NO: 4163415 - DNA, 25 bp, Homo sapien
tctgctgtgcaagttaatgtaacat

SEQ ID NO: 4163416 - DNA, 25 bp, Homo sapien
caggggaaatgataattttactata

SEQ ID NO: 4163417 - DNA, 25 bp, Homo sapien
gcagagacattcaaggagtttactg

SEQ ID NO: 4163418 - DNA, 25 bp, Homo sapien
tcttcaggggaaatgataattttac

SEQ ID NO: 4163419 - DNA, 25 bp, Homo sapien
cacttatctcgtctgcctcatcgtg

SEQ ID NO: 4163420 - DNA, 25 bp, Homo sapien
tatctcgtctgcctcatcgtgttct

SEQ ID NO: 4163421 - DNA, 25 bp, Homo sapien
tcgtctgcctcatcgtgttctggaa

SEQ ID NO: 4163422 - DNA, 25 bp, Homo sapien
ctgcctcatcgtgttctggaatact

SEQ ID NO: 4163423 - DNA, 25 bp, Homo sapien
gaagagtcggcagcatagtacctac

SEQ ID NO: 4163424 - DNA, 25 bp, Homo sapien
aagaagagtcggcagcatagtacct

SEQ ID NO: 4163425 - DNA, 25 bp, Homo sapien
aggaagaagagtcggcagcatagta

SEQ ID NO: 4163426 - DNA, 25 bp, Homo sapien
tcaaggaagaagagtcggcagcata

SEQ ID NO: 4163427 - DNA, 25 bp, Homo sapien
acaccagcaacaagggcagcaagga

SEQ ID NO: 4163428 - DNA, 25 bp, Homo sapien
cagcaaggaggagaccaacaacgat

SEQ ID NO: 4163429 - DNA, 25 bp, Homo sapien
atgtacagccagtagacgacaccag

SEQ ID NO: 4163430 - DNA, 25 bp, Homo sapien
tgcctggtcattcaccttttctctg

SEQ ID NO: 4163431 - DNA, 25 bp, Homo sapien
tgtcactgcaaagacacctggcagt

SEQ ID NO: 4163432 - DNA, 25 bp, Homo sapien
cctggcagtccctacaagatgtact

SEQ ID NO: 4163433 - DNA, 25 bp, Homo sapien
aattatatgcacgactggagtgagc

SEQ ID NO: 4163434 - DNA, 25 bp, Homo sapien
ttctcccagtgaaagtcaatgaacg

SEQ ID NO: 4163435 - DNA, 25 bp, Homo sapien
tgaaaataccctagaacgcaagctg

SEQ ID NO: 4163436 - DNA, 25 bp, Homo sapien
tattcatagagggacaaatggtgtc

SEQ ID NO: 4163437 - DNA, 25 bp, Homo sapien
cagctaattttcaaggtacagggaa

SEQ ID NO: 4163438 - DNA, 25 bp, Homo sapien
gatatcaggaaacctgtacacacag

SEQ ID NO: 4163439 - DNA, 25 bp, Homo sapien
tggtgaacttttcgattaggtaaca

SEQ ID NO: 4163440 - DNA, 25 bp, Homo sapien
aatatcaactctgtcagagttggtg

SEQ ID NO: 4163441 - DNA, 25 bp, Homo sapien
gatgaatgttcagatcaggtggtag

SEQ ID NO: 4163442 - DNA, 25 bp, Homo sapien
ggctctcacctaaagacaccatgaa

SEQ ID NO: 4163443 - DNA, 25 bp, Homo sapien
tggaaacttcgcatttggaatcctc

SEQ ID NO: 4163444 - DNA, 25 bp, Homo sapien
gaccaatcatagtttagggagggaa

SEQ ID NO: 4163445 - DNA, 25 bp, Homo sapien
agggcagggccttctacactagtca

SEQ ID NO: 4163446 - DNA, 25 bp, Homo sapien
gcttttgttacacatcgatgctggt

SEQ ID NO: 4163447 - DNA, 25 bp, Homo sapien
ttaggtactacccacacagtttgga

SEQ ID NO: 4163448 - DNA, 25 bp, Homo sapien
tatgataagctccttggatgacccc

SEQ ID NO: 4163449 - DNA, 25 bp, Homo sapien
taaaccctcagaaaagtacagaatg

SEQ ID NO: 4163450 - DNA, 25 bp, Homo sapien
ccacagggtggcaagaattccaaat

SEQ ID NO: 4163451 - DNA, 25 bp, Homo sapien
tcataacttgtttggagcaactaga

SEQ ID NO: 4163452 - DNA, 25 bp, Homo sapien
gcaactagagagtgatacataaaga

SEQ ID NO: 4163453 - DNA, 25 bp, Homo sapien
gccactcctttcatctaaagtaaga

SEQ ID NO: 4163454 - DNA, 25 bp, Homo sapien
catctaaagtaagaatcataacttg

SEQ ID NO: 4163455 - DNA, 25 bp, Homo sapien
gacttttgttggagccccactgcaa

SEQ ID NO: 4163456 - DNA, 25 bp, Homo sapien
aatttggtctacctttggcttgctc

SEQ ID NO: 4163457 - DNA, 25 bp, Homo sapien
ggcttgctcctattcctaaggcatg

SEQ ID NO: 4163458 - DNA, 25 bp, Homo sapien
caaaagaactgtagagaccctacag

SEQ ID NO: 4163459 - DNA, 25 bp, Homo sapien
tccatattaccgaggtccttgttta

SEQ ID NO: 4163460 - DNA, 25 bp, Homo sapien
ttcttccatattaccgaggtccttg

SEQ ID NO: 4163461 - DNA, 25 bp, Homo sapien
tattaccgaggtccttgtttacatg

SEQ ID NO: 4163462 - DNA, 25 bp, Homo sapien
tcttccatattaccgaggtccttgt

SEQ ID NO: 4163463 - DNA, 25 bp, Homo sapien
ctggacaactaggacagtttctctc

SEQ ID NO: 4163464 - DNA, 25 bp, Homo sapien
ggcgtgagccattgcctatacctgg

SEQ ID NO: 4163465 - DNA, 25 bp, Homo sapien
tactgaacccaaacaccaattcaaa

SEQ ID NO: 4163466 - DNA, 25 bp, Homo sapien
tgaaggatatagaaccggaaatacc

SEQ ID NO: 4163467 - DNA, 25 bp, Homo sapien
cactttctgagtcacgaaagtttcc

SEQ ID NO: 4163468 - DNA, 25 bp, Homo sapien
tcgtgggatttgtcttcaagtacag

SEQ ID NO: 4163469 - DNA, 25 bp, Homo sapien
caggcattgcttcatccattctaca

SEQ ID NO: 4163470 - DNA, 25 bp, Homo sapien
ttataaaactccattgtccccaagc

SEQ ID NO: 4163471 - DNA, 25 bp, Homo sapien
tcttcaaatcacactatttcgtggg

SEQ ID NO: 4163472 - DNA, 25 bp, Homo sapien
cctgtgacagcttggtagaatgaac

SEQ ID NO: 4163473 - DNA, 25 bp, Homo sapien
tggtggcatatcaaagagtcggctc

SEQ ID NO: 4163474 - DNA, 25 bp, Homo sapien
taattagggcaatatgagtgtcccc

SEQ ID NO: 4163475 - DNA, 25 bp, Homo sapien
aaaccaggcttctgcttgaaagagc

SEQ ID NO: 4163476 - DNA, 25 bp, Homo sapien
tattaaacggagtcactattgccca

SEQ ID NO: 4163477 - DNA, 25 bp, Homo sapien
cataccaatgcactacggaagcttt

SEQ ID NO: 4163478 - DNA, 25 bp, Homo sapien
taattaaccattgcaagtggaaacc

SEQ ID NO: 4163479 - DNA, 25 bp, Homo sapien
tatacagcatcgagtctaagaatat

SEQ ID NO: 4163480 - DNA, 25 bp, Homo sapien
tccaggcactgaatcgatggtaata

SEQ ID NO: 4163481 - DNA, 25 bp, Homo sapien
gagtttctcatgttctgctctcgag

SEQ ID NO: 4163482 - DNA, 25 bp, Homo sapien
tgctctcgaggttctgacagctgtt

SEQ ID NO: 4163483 - DNA, 25 bp, Homo sapien
caaactttctgctttcggtccagag

SEQ ID NO: 4163484 - DNA, 25 bp, Homo sapien
cctcaaaagttgaggatttggaatt

SEQ ID NO: 4163485 - DNA, 25 bp, Homo sapien
ttttcttcttagcatcttcgtgcat

SEQ ID NO: 4163486 - DNA, 25 bp, Homo sapien
tgttgccaaagagttaaattggaga

SEQ ID NO: 4163487 - DNA, 25 bp, Homo sapien
tggagagccgaaacctcaaaagttg

SEQ ID NO: 4163488 - DNA, 25 bp, Homo sapien
tccacaaacaattcctataatcaca

SEQ ID NO: 4163489 - DNA, 25 bp, Homo sapien
ctataatcacatatagggagtgaac

SEQ ID NO: 4163490 - DNA, 25 bp, Homo sapien
tatcttttaggcatagacgggtatg

SEQ ID NO: 4163491 - DNA, 25 bp, Homo sapien
gacgggtatgttaatccatttccac

SEQ ID NO: 4163492 - DNA, 25 bp, Homo sapien
actgaacacaaacttcccacttttg

SEQ ID NO: 4163493 - DNA, 25 bp, Homo sapien
cacaaacttcccacttttgtagaag

SEQ ID NO: 4163494 - DNA, 25 bp, Homo sapien
tgaacacaaacttcccacttttgta

SEQ ID NO: 4163495 - DNA, 25 bp, Homo sapien
ctgaacacaaacttcccacttttgt

SEQ ID NO: 4163496 - DNA, 25 bp, Homo sapien
gcagaatcccttgcctgaatataat

SEQ ID NO: 4163497 - DNA, 25 bp, Homo sapien
caatgacatgaattactgaaaacct

SEQ ID NO: 4163498 - DNA, 25 bp, Homo sapien
acatttggtgaggaatgtggtgtca

SEQ ID NO: 4163499 - DNA, 25 bp, Homo sapien
taggccttttgagcttacagtattt

SEQ ID NO: 4163500 - DNA, 25 bp, Homo sapien
aatattgcctgatcaaaaggaagat

SEQ ID NO: 4163501 - DNA, 25 bp, Homo sapien
ttgtgaatattgcctgatcaaaagg

SEQ ID NO: 4163502 - DNA, 25 bp, Homo sapien
gtcactgtcatttgtgaatattgcc

SEQ ID NO: 4163503 - DNA, 25 bp, Homo sapien
tgtcactgtcatttgtgaatattgc

SEQ ID NO: 4163504 - DNA, 25 bp, Homo sapien
acttgaataagtgggctgtagcccc

SEQ ID NO: 4163505 - DNA, 25 bp, Homo sapien
catgttatctctttccaagcagcag

SEQ ID NO: 4163506 - DNA, 25 bp, Homo sapien
tattgcccacagtcagctgaccatt

SEQ ID NO: 4163507 - DNA, 25 bp, Homo sapien
cagatagtgatgctttattgcccac

SEQ ID NO: 4163508 - DNA, 25 bp, Homo sapien
aaaatttgaagcctgacaattccag

SEQ ID NO: 4163509 - DNA, 25 bp, Homo sapien
ttgagtctgcgagtgcacggaagtc

SEQ ID NO: 4163510 - DNA, 25 bp, Homo sapien
tgtataggaacacctggttgtccag

SEQ ID NO: 4163511 - DNA, 25 bp, Homo sapien
taaaaggagtcaaggtacagctccg

SEQ ID NO: 4163512 - DNA, 25 bp, Homo sapien
aaattaacttactgatatgtggcca

SEQ ID NO: 4163513 - DNA, 25 bp, Homo sapien
tcactgcaacttaaaagggtcccat

SEQ ID NO: 4163514 - DNA, 25 bp, Homo sapien
tatgtggccaatatcaacccttctc

SEQ ID NO: 4163515 - DNA, 25 bp, Homo sapien
tctggagatagaaggacttatcctc

SEQ ID NO: 4163516 - DNA, 25 bp, Homo sapien
tgtttacagtttggcaaagttgcag

SEQ ID NO: 4163517 - DNA, 25 bp, Homo sapien
tcacagaccctttgtagcgtggtca

SEQ ID NO: 4163518 - DNA, 25 bp, Homo sapien
ttggaaaccatcactattgagagat

SEQ ID NO: 4163519 - DNA, 25 bp, Homo sapien
cattcacaagatgctttgaaggttc

SEQ ID NO: 4163520 - DNA, 25 bp, Homo sapien
taatacattatactgtctaaagaaa

SEQ ID NO: 4163521 - DNA, 25 bp, Homo sapien
agcccctttatgactttcattgtga

SEQ ID NO: 4163522 - DNA, 25 bp, Homo sapien
gctattgcatatcatagagcataaa

SEQ ID NO: 4163523 - DNA, 25 bp, Homo sapien
aaccgtgtgtattagctttcctcct

SEQ ID NO: 4163524 - DNA, 25 bp, Homo sapien
gcactagtgtcataatccattccgg

SEQ ID NO: 4163525 - DNA, 25 bp, Homo sapien
tccggtccaagcaggaagtatagtg

SEQ ID NO: 4163526 - DNA, 25 bp, Homo sapien
gatagatgcctcctgacctgtggaa

SEQ ID NO: 4163527 - DNA, 25 bp, Homo sapien
gacacacaagttatggacgtacaac

SEQ ID NO: 4163528 - DNA, 25 bp, Homo sapien
gttcttctgtagctaaatctgacaa

SEQ ID NO: 4163529 - DNA, 25 bp, Homo sapien
caaatgtaagtagtgcttggaacca

SEQ ID NO: 4163530 - DNA, 25 bp, Homo sapien
tgtgaactctttttgctacacagaa

SEQ ID NO: 4163531 - DNA, 25 bp, Homo sapien
taaagctgggaaatatgcaaatgta

SEQ ID NO: 4163532 - DNA, 25 bp, Homo sapien
gtttagtagttttcataagcggcaa

SEQ ID NO: 4163533 - DNA, 25 bp, Homo sapien
agcttcaaatctagtagcatcttcc

SEQ ID NO: 4163534 - DNA, 25 bp, Homo sapien
tataaaagtcaataccctgtcaatg

SEQ ID NO: 4163535 - DNA, 25 bp, Homo sapien
tgtggaacacaagggaatttataaa

SEQ ID NO: 4163536 - DNA, 25 bp, Homo sapien
cttgggaagagtgttagaagaagct

SEQ ID NO: 4163537 - DNA, 25 bp, Homo sapien
taaatttgccctcctaagctctaga

SEQ ID NO: 4163538 - DNA, 25 bp, Homo sapien
taactagttatatctcagcagcatg

SEQ ID NO: 4163539 - DNA, 25 bp, Homo sapien
tgtgatcacacttgtcttgggaaga

SEQ ID NO: 4163540 - DNA, 25 bp, Homo sapien
tcttgaagcatggtgccctcgggat

SEQ ID NO: 4163541 - DNA, 25 bp, Homo sapien
taatcagcttgtgggatgtcgactc

SEQ ID NO: 4163542 - DNA, 25 bp, Homo sapien
tctgacccagtgcttatgcggaaac

SEQ ID NO: 4163543 - DNA, 25 bp, Homo sapien
tccatcatgtggaaagcgtgccttc

SEQ ID NO: 4163544 - DNA, 25 bp, Homo sapien
tctactacgttggttgggcatgctg

SEQ ID NO: 4163545 - DNA, 25 bp, Homo sapien
gcgtgtctgccaagaagctatgata

SEQ ID NO: 4163546 - DNA, 25 bp, Homo sapien
gaactctgagacacaatccttagct

SEQ ID NO: 4163547 - DNA, 25 bp, Homo sapien
tttgagcagctgcaatatcccatgt

SEQ ID NO: 4163548 - DNA, 25 bp, Homo sapien
tgagtaatagtccatggtgtaaata

SEQ ID NO: 4163549 - DNA, 25 bp, Homo sapien
gcttgttggtctatgtgcacttagg

SEQ ID NO: 4163550 - DNA, 25 bp, Homo sapien
tatccgcttgttggtctatgtgcac

SEQ ID NO: 4163551 - DNA, 25 bp, Homo sapien
ttctttatccgcttgttggtctatg

SEQ ID NO: 4163552 - DNA, 25 bp, Homo sapien
aagaaagcacatactacatagcaaa

SEQ ID NO: 4163553 - DNA, 25 bp, Homo sapien
tatcaaaggatgcatagtgggatgg

SEQ ID NO: 4163554 - DNA, 25 bp, Homo sapien
taggtatcaaaggatgcatagtggg

SEQ ID NO: 4163555 - DNA, 25 bp, Homo sapien
aaaatccaaagttagacgggcatgg

SEQ ID NO: 4163556 - DNA, 25 bp, Homo sapien
ggtcttacaatgatgggaaatccca

SEQ ID NO: 4163557 - DNA, 25 bp, Homo sapien
gattgtttgggttttagtggcagaa

SEQ ID NO: 4163558 - DNA, 25 bp, Homo sapien
ccctatgtctagatggttagagatg

SEQ ID NO: 4163559 - DNA, 25 bp, Homo sapien
tattaggcagtcatcattttaggtc

SEQ ID NO: 4163560 - DNA, 25 bp, Homo sapien
tcagagccccttagttcattttacc

SEQ ID NO: 4163561 - DNA, 25 bp, Homo sapien
tgggcatgcttgtgtgctccaccaa

SEQ ID NO: 4163562 - DNA, 25 bp, Homo sapien
tcttaaagcatctggaaaccagagg

SEQ ID NO: 4163563 - DNA, 25 bp, Homo sapien
tggcttattactccagggccagctt

SEQ ID NO: 4163564 - DNA, 25 bp, Homo sapien
tgatttgtaagggaagataatgcct

SEQ ID NO: 4163565 - DNA, 25 bp, Homo sapien
taagttattgctggacctcatgtgt

SEQ ID NO: 4163566 - DNA, 25 bp, Homo sapien
gtggttataatgtaacgtgccaaca

SEQ ID NO: 4163567 - DNA, 25 bp, Homo sapien
tgtcttaccaccaaacagtgtgatc

SEQ ID NO: 4163568 - DNA, 25 bp, Homo sapien
tagatcttgaaggattagcaactaa

SEQ ID NO: 4163569 - DNA, 25 bp, Homo sapien
tggagtccaacttaattagtcacct

SEQ ID NO: 4163570 - DNA, 25 bp, Homo sapien
tagcaactaattgtcatccttgaga

SEQ ID NO: 4163571 - DNA, 25 bp, Homo sapien
gaccctttactgttctggagtccaa

SEQ ID NO: 4163572 - DNA, 25 bp, Homo sapien
ttgcagcctgaagccgtaagacatg

SEQ ID NO: 4163573 - DNA, 25 bp, Homo sapien
gcaaagtggtatgcggcttcagaga

SEQ ID NO: 4163574 - DNA, 25 bp, Homo sapien
ttaatgtcctactactgatggtggc

SEQ ID NO: 4163575 - DNA, 25 bp, Homo sapien
gaatatagacagcttcccattgagg

SEQ ID NO: 4163576 - DNA, 25 bp, Homo sapien
cctttagaccttgctgatttctcct

SEQ ID NO: 4163577 - DNA, 25 bp, Homo sapien
ccttttgctgaacctgtcttcactt

SEQ ID NO: 4163578 - DNA, 25 bp, Homo sapien
ctccttttgctgaacctgtcttcac

SEQ ID NO: 4163579 - DNA, 25 bp, Homo sapien
cttccataagcctttagaccttgct

SEQ ID NO: 4163580 - DNA, 25 bp, Homo sapien
tcgttgtaaactatgtgtgaagctc

SEQ ID NO: 4163581 - DNA, 25 bp, Homo sapien
cagggagtgaacacacatagtcttt

SEQ ID NO: 4163582 - DNA, 25 bp, Homo sapien
gaaaggagcgccatattatattaca

SEQ ID NO: 4163583 - DNA, 25 bp, Homo sapien
tgtatgtaaataccacgcatcttgc

SEQ ID NO: 4163584 - DNA, 25 bp, Homo sapien
ccaagatgttttgatgttggcagca

SEQ ID NO: 4163585 - DNA, 25 bp, Homo sapien
gaggtagaaagtgtgataactctgc

SEQ ID NO: 4163586 - DNA, 25 bp, Homo sapien
ggcattggaattccccagagtaaga

SEQ ID NO: 4163587 - DNA, 25 bp, Homo sapien
catttataacacctaaggcattgga

SEQ ID NO: 4163588 - DNA, 25 bp, Homo sapien
aagattgattctgtatccgggttac

SEQ ID NO: 4163589 - DNA, 25 bp, Homo sapien
tctgtatccgggttaccaacgcttc

SEQ ID NO: 4163590 - DNA, 25 bp, Homo sapien
tataagattgattctgtatccgggt

SEQ ID NO: 4163591 - DNA, 25 bp, Homo sapien
ttgattctgtatccgggttaccaac

SEQ ID NO: 4163592 - DNA, 25 bp, Homo sapien
tttcttgcttactcttgaataacat

SEQ ID NO: 4163593 - DNA, 25 bp, Homo sapien
tcagttctgaggtatgttctacttg

SEQ ID NO: 4163594 - DNA, 25 bp, Homo sapien
gatctaagcataaatatcacctcct

SEQ ID NO: 4163595 - DNA, 25 bp, Homo sapien
cttcagcctcacttgtctaatttca

SEQ ID NO: 4163596 - DNA, 25 bp, Homo sapien
tcattattcaagattatatgatcag

SEQ ID NO: 4163597 - DNA, 25 bp, Homo sapien
aatgaatggaaactgcgatggctat

SEQ ID NO: 4163598 - DNA, 25 bp, Homo sapien
cattattcaagattatatgatcaga

SEQ ID NO: 4163599 - DNA, 25 bp, Homo sapien
gaatggaaactgcgatggctataac

SEQ ID NO: 4163600 - DNA, 25 bp, Homo sapien
gattagcctaatcactatccttgga

SEQ ID NO: 4163601 - DNA, 25 bp, Homo sapien
tatcaaggcctttcatgtggcagtt

SEQ ID NO: 4163602 - DNA, 25 bp, Homo sapien
tggcatagctaacattcccactcta

SEQ ID NO: 4163603 - DNA, 25 bp, Homo sapien
taaaatggtgttaggagcctgggta

SEQ ID NO: 4163604 - DNA, 25 bp, Homo sapien
aaatttaccagttgggatctgcaca

SEQ ID NO: 4163605 - DNA, 25 bp, Homo sapien
tatattggtaaagagtgccctagca

SEQ ID NO: 4163606 - DNA, 25 bp, Homo sapien
tcttatcaaggactattgaggtggc

SEQ ID NO: 4163607 - DNA, 25 bp, Homo sapien
gattgccagcctttatataatgcct

SEQ ID NO: 4163608 - DNA, 25 bp, Homo sapien
gaacttggctttgcagtggaatacc

SEQ ID NO: 4163609 - DNA, 25 bp, Homo sapien
gataatcctatagcctcaagagtgc

SEQ ID NO: 4163610 - DNA, 25 bp, Homo sapien
gaagcactcaagaaagaatgcctgc

SEQ ID NO: 4163611 - DNA, 25 bp, Homo sapien
tcaagagtgcttggaatctagccca

SEQ ID NO: 4163612 - DNA, 25 bp, Homo sapien
agtcagcattgtgggcacctcaggt

SEQ ID NO: 4163613 - DNA, 25 bp, Homo sapien
tagctataggcctcatgctgtacat

SEQ ID NO: 4163614 - DNA, 25 bp, Homo sapien
taaaaagccggtatatctacaagtg

SEQ ID NO: 4163615 - DNA, 25 bp, Homo sapien
actttgattatcttccgttaccgca

SEQ ID NO: 4163616 - DNA, 25 bp, Homo sapien
tccgagtccaattcctttctgacgt

SEQ ID NO: 4163617 - DNA, 25 bp, Homo sapien
tattggttagctccttcgtgccttg

SEQ ID NO: 4163618 - DNA, 25 bp, Homo sapien
ttctgacgtgctgcgagcgggcctt

SEQ ID NO: 4163619 - DNA, 25 bp, Homo sapien
cactttcgttcccgggagagtccag

SEQ ID NO: 4163620 - DNA, 25 bp, Homo sapien
tatcaggttacgtggttagagcaag

SEQ ID NO: 4163621 - DNA, 25 bp, Homo sapien
aaatctatgtaaaggtgactccgac

SEQ ID NO: 4163622 - DNA, 25 bp, Homo sapien
tcaaggctgtaaaggaaaactcagg

SEQ ID NO: 4163623 - DNA, 25 bp, Homo sapien
tatcacctgactggttgcaaaggca

SEQ ID NO: 4163624 - DNA, 25 bp, Homo sapien
tagaccctgagaaaacatgtggcaa

SEQ ID NO: 4163625 - DNA, 25 bp, Homo sapien
gcagaggacgagttatccacaagga

SEQ ID NO: 4163626 - DNA, 25 bp, Homo sapien
ccacaaggaatttggaagagaagct

SEQ ID NO: 4163627 - DNA, 25 bp, Homo sapien
aaagaaaatgcttccatcaggtact

SEQ ID NO: 4163628 - DNA, 25 bp, Homo sapien
gcagtattacagctgataaagccat

SEQ ID NO: 4163629 - DNA, 25 bp, Homo sapien
aggaaatccttcataacaactaagt

SEQ ID NO: 4163630 - DNA, 25 bp, Homo sapien
ccttttctggccaggtactcatatc

SEQ ID NO: 4163631 - DNA, 25 bp, Homo sapien
cctgggctggcagtattacagctga

SEQ ID NO: 4163632 - DNA, 25 bp, Homo sapien
tgaagtgtgtcaccttcccaataac

SEQ ID NO: 4163633 - DNA, 25 bp, Homo sapien
gtcaccttcccaataacacagcctt

SEQ ID NO: 4163634 - DNA, 25 bp, Homo sapien
ctgaagtgtgtcaccttcccaataa

SEQ ID NO: 4163635 - DNA, 25 bp, Homo sapien
gtgtgtcaccttcccaataacacag

SEQ ID NO: 4163636 - DNA, 25 bp, Homo sapien
taaatatgaacgaacttctggaatg

SEQ ID NO: 4163637 - DNA, 25 bp, Homo sapien
ataaatatgaacgaacttctggaat

SEQ ID NO: 4163638 - DNA, 25 bp, Homo sapien
tatgaacgaacttctggaatgaccc

SEQ ID NO: 4163639 - DNA, 25 bp, Homo sapien
aatatgaacgaacttctggaatgac

SEQ ID NO: 4163640 - DNA, 25 bp, Homo sapien
ctaattctcatggttgggcctgttg

SEQ ID NO: 4163641 - DNA, 25 bp, Homo sapien
taattctcatggttgggcctgttgt

SEQ ID NO: 4163642 - DNA, 25 bp, Homo sapien
gctttttagcattgaagtacatgag

SEQ ID NO: 4163643 - DNA, 25 bp, Homo sapien
tgctttttagcattgaagtacatga

SEQ ID NO: 4163644 - DNA, 25 bp, Homo sapien
ctgctttttagcattgaagtacatg

SEQ ID NO: 4163645 - DNA, 25 bp, Homo sapien
tctgctttttagcattgaagtacat

SEQ ID NO: 4163646 - DNA, 25 bp, Homo sapien
cagagcccaagcttttgttgtagga

SEQ ID NO: 4163647 - DNA, 25 bp, Homo sapien
cacagacactttgacgggtgaggaa

SEQ ID NO: 4163648 - DNA, 25 bp, Homo sapien
cactacatgatatcagaccggactg

SEQ ID NO: 4163649 - DNA, 25 bp, Homo sapien
gagagagacccttgatacgctatgc

SEQ ID NO: 4163650 - DNA, 25 bp, Homo sapien
gagtgtttgtaattgggaaggaaga

SEQ ID NO: 4163651 - DNA, 25 bp, Homo sapien
tgagtgtttgtaattgggaaggaag

SEQ ID NO: 4163652 - DNA, 25 bp, Homo sapien
caacaagtgtaggttgagtgtttgt

SEQ ID NO: 4163653 - DNA, 25 bp, Homo sapien
acaagtgtaggttgagtgtttgtaa

SEQ ID NO: 4163654 - DNA, 25 bp, Homo sapien
tcatgggttcatggaacaaatcaag

SEQ ID NO: 4163655 - DNA, 25 bp, Homo sapien
ctgctttggtcaaattgtacttcag

SEQ ID NO: 4163656 - DNA, 25 bp, Homo sapien
aagggggcatcgagtcaccactgct

SEQ ID NO: 4163657 - DNA, 25 bp, Homo sapien
tgtacttcagtcaaccaaatcttca

SEQ ID NO: 4163658 - DNA, 25 bp, Homo sapien
tcaaggaaagaaggaatccgcattc

SEQ ID NO: 4163659 - DNA, 25 bp, Homo sapien
ctttaaatatctgtccccaagaaat

SEQ ID NO: 4163660 - DNA, 25 bp, Homo sapien
gaaattgccttatacttgggccact

SEQ ID NO: 4163661 - DNA, 25 bp, Homo sapien
aataagcctcctccaatgatgattc

SEQ ID NO: 4163662 - DNA, 25 bp, Homo sapien
tgctgcataatgaatgagtccctta

SEQ ID NO: 4163663 - DNA, 25 bp, Homo sapien
tttcaaccattgtcaacctgcaaag

SEQ ID NO: 4163664 - DNA, 25 bp, Homo sapien
catagccaatgaagtgaatggatcc

SEQ ID NO: 4163665 - DNA, 25 bp, Homo sapien
ttctggtcatgagggcctagaatca

SEQ ID NO: 4163666 - DNA, 25 bp, Homo sapien
ctgaatgacggaaccactggaatcc

SEQ ID NO: 4163667 - DNA, 25 bp, Homo sapien
gaatgacggaaccactggaatcccc

SEQ ID NO: 4163668 - DNA, 25 bp, Homo sapien
agacctggggcaatgtgtccatatg

SEQ ID NO: 4163669 - DNA, 25 bp, Homo sapien
tgacggaaccactggaatcccctgc

SEQ ID NO: 4163670 - DNA, 25 bp, Homo sapien
gtaatgctcttcatcatccaacaaa

SEQ ID NO: 4163671 - DNA, 25 bp, Homo sapien
ctttaagtacttcaagatagttata

SEQ ID NO: 4163672 - DNA, 25 bp, Homo sapien
gtacttcaagatagttataatagaa

SEQ ID NO: 4163673 - DNA, 25 bp, Homo sapien
ccaacaaagtacattgccgaatcat

SEQ ID NO: 4163674 - DNA, 25 bp, Homo sapien
gctgatactgtcaaaactttgtatg

SEQ ID NO: 4163675 - DNA, 25 bp, Homo sapien
gatactgtcaaaactttgtatgaaa

SEQ ID NO: 4163676 - DNA, 25 bp, Homo sapien
agatccagtgaagattgggatgggg

SEQ ID NO: 4163677 - DNA, 25 bp, Homo sapien
ggaatggagaatgtgtctctgcttc

SEQ ID NO: 4163678 - DNA, 25 bp, Homo sapien
aagcgtatgtgacatatcttctatc

SEQ ID NO: 4163679 - DNA, 25 bp, Homo sapien
aaagcgtatgtgacatatcttctat

SEQ ID NO: 4163680 - DNA, 25 bp, Homo sapien
agcgtatgtgacatatcttctatct

SEQ ID NO: 4163681 - DNA, 25 bp, Homo sapien
tactgccatgtgtttttattctgct

SEQ ID NO: 4163682 - DNA, 25 bp, Homo sapien
tttctccttctttcttggctacatt

SEQ ID NO: 4163683 - DNA, 25 bp, Homo sapien
ttgtttctccttctttcttggctac

SEQ ID NO: 4163684 - DNA, 25 bp, Homo sapien
tccttctttcttggctacattgcat

SEQ ID NO: 4163685 - DNA, 25 bp, Homo sapien
tctccttctttcttggctacattgc

SEQ ID NO: 4163686 - DNA, 25 bp, Homo sapien
ggcaaggactctggtaatttaatca

SEQ ID NO: 4163687 - DNA, 25 bp, Homo sapien
tgagaatacagaagttatcagcttc

SEQ ID NO: 4163688 - DNA, 25 bp, Homo sapien
aacaaagaaccatctaaaagtcctg

SEQ ID NO: 4163689 - DNA, 25 bp, Homo sapien
taaccactttcagattgatcatcca

SEQ ID NO: 4163690 - DNA, 25 bp, Homo sapien
aggatatttaactctgctacagtgg

SEQ ID NO: 4163691 - DNA, 25 bp, Homo sapien
tccccaggatatttaactctgctac

SEQ ID NO: 4163692 - DNA, 25 bp, Homo sapien
atttaactctgctacagtggaggac

SEQ ID NO: 4163693 - DNA, 25 bp, Homo sapien
gatatttaactctgctacagtggag

SEQ ID NO: 4163694 - DNA, 25 bp, Homo sapien
taccaaagatcgtgggctttcccac

SEQ ID NO: 4163695 - DNA, 25 bp, Homo sapien
ctgatttataagcatgaggttcatg

SEQ ID NO: 4163696 - DNA, 25 bp, Homo sapien
ggaataagcccagtcataataccaa

SEQ ID NO: 4163697 - DNA, 25 bp, Homo sapien
tcccaccttgtaaggatgcttctga

SEQ ID NO: 4163698 - DNA, 25 bp, Homo sapien
aaagagacaatgtacctgaatctca

SEQ ID NO: 4163699 - DNA, 25 bp, Homo sapien
cttatagcactcaatgcccacatca

SEQ ID NO: 4163700 - DNA, 25 bp, Homo sapien
gacaatgtacctgaatctcagggac

SEQ ID NO: 4163701 - DNA, 25 bp, Homo sapien
taagagggaaacttatagcactcaa

SEQ ID NO: 4163702 - DNA, 25 bp, Homo sapien
gacatatccaggcaagggagtgaat

SEQ ID NO: 4163703 - DNA, 25 bp, Homo sapien
gagtgaatcatgaatcgggcctgaa

SEQ ID NO: 4163704 - DNA, 25 bp, Homo sapien
cagcaaactgtggtagccctataga

SEQ ID NO: 4163705 - DNA, 25 bp, Homo sapien
gcagaaagtgacacaacagcatcaa

SEQ ID NO: 4163706 - DNA, 25 bp, Homo sapien
caaatccccctctgtgagaaacacc

SEQ ID NO: 4163707 - DNA, 25 bp, Homo sapien
tccccctctgtgagaaacacccaag

SEQ ID NO: 4163708 - DNA, 25 bp, Homo sapien
aatccccctctgtgagaaacaccca

SEQ ID NO: 4163709 - DNA, 25 bp, Homo sapien
cccctctgtgagaaacacccaagaa

SEQ ID NO: 4163710 - DNA, 25 bp, Homo sapien
ccgcgccggcgagcgccgccgggga

SEQ ID NO: 4163711 - DNA, 25 bp, Homo sapien
gcgccggcgagcgccgccggggagg

SEQ ID NO: 4163712 - DNA, 25 bp, Homo sapien
cggcgagcgccgccggggaggcagc

SEQ ID NO: 4163713 - DNA, 25 bp, Homo sapien
gccggcgagcgccgccggggaggca

SEQ ID NO: 4163714 - DNA, 25 bp, Homo sapien
tgcttttgagcagccagtgtttgtc

SEQ ID NO: 4163715 - DNA, 25 bp, Homo sapien
tgtctttcaagataccccagcagcc

SEQ ID NO: 4163716 - DNA, 25 bp, Homo sapien
tttgcaaggattttctggctcagct

SEQ ID NO: 4163717 - DNA, 25 bp, Homo sapien
ggacaaatgccttttagcggcccat

SEQ ID NO: 4163718 - DNA, 25 bp, Homo sapien
gaaatgcttcttaacccttatctct

SEQ ID NO: 4163719 - DNA, 25 bp, Homo sapien
aatgcttcttaacccttatctctct

SEQ ID NO: 4163720 - DNA, 25 bp, Homo sapien
ctagaaatgcttcttaacccttatc

SEQ ID NO: 4163721 - DNA, 25 bp, Homo sapien
tagaaatgcttcttaacccttatct

SEQ ID NO: 4163722 - DNA, 25 bp, Homo sapien
taaccacagaaatcggtaatttggc

SEQ ID NO: 4163723 - DNA, 25 bp, Homo sapien
gagtttttcacagcatttattccaa

SEQ ID NO: 4163724 - DNA, 25 bp, Homo sapien
gaaatcggtaatttggcaagtcacc

SEQ ID NO: 4163725 - DNA, 25 bp, Homo sapien
caatatcctctttatataaccacag

SEQ ID NO: 4163726 - DNA, 25 bp, Homo sapien
tcctaactggcagtccggggaccca

SEQ ID NO: 4163727 - DNA, 25 bp, Homo sapien
catctggtcttgtgctctgtagtct

SEQ ID NO: 4163728 - DNA, 25 bp, Homo sapien
caatggtgtgtcctacatctggtct

SEQ ID NO: 4163729 - DNA, 25 bp, Homo sapien
gggacccaatggtgtgtcctacatc

SEQ ID NO: 4163730 - DNA, 25 bp, Homo sapien
aggcctctctggtcccttggtgctc

SEQ ID NO: 4163731 - DNA, 25 bp, Homo sapien
atttactccaccctgataaggaggc

SEQ ID NO: 4163732 - DNA, 25 bp, Homo sapien
tgataaggaggcctctctggtccct

SEQ ID NO: 4163733 - DNA, 25 bp, Homo sapien
caccctgataaggaggcctctctgg

SEQ ID NO: 4163734 - DNA, 25 bp, Homo sapien
atcttttacttatgatgaagatgac

SEQ ID NO: 4163735 - DNA, 25 bp, Homo sapien
aatttcttccaactttgtcttccat

SEQ ID NO: 4163736 - DNA, 25 bp, Homo sapien
caggttcagacttttctgcaaggtg

SEQ ID NO: 4163737 - DNA, 25 bp, Homo sapien
ttcagacttttctgcaaggtgtgca

SEQ ID NO: 4163738 - DNA, 25 bp, Homo sapien
tgcaggttcagacttttctgcaagg

SEQ ID NO: 4163739 - DNA, 25 bp, Homo sapien
gacttttctgcaaggtgtgcaaggg

SEQ ID NO: 4163740 - DNA, 25 bp, Homo sapien
attacggtaacctgtcacttcttgt

SEQ ID NO: 4163741 - DNA, 25 bp, Homo sapien
ctggattacggtaacctgtcacttc

SEQ ID NO: 4163742 - DNA, 25 bp, Homo sapien
tgtcacttcttgtctaataggaaac

SEQ ID NO: 4163743 - DNA, 25 bp, Homo sapien
ctgtcacttcttgtctaataggaaa

SEQ ID NO: 4163744 - DNA, 25 bp, Homo sapien
ccagtcagaactgattagatcagga

SEQ ID NO: 4163745 - DNA, 25 bp, Homo sapien
tcaggaattattgccagaaccaaag

SEQ ID NO: 4163746 - DNA, 25 bp, Homo sapien
tgccagaaccaaagcgtccaatgag

SEQ ID NO: 4163747 - DNA, 25 bp, Homo sapien
aagcgtccaatgagttttcttggca

SEQ ID NO: 4163748 - DNA, 25 bp, Homo sapien
atatgtgcttgaggggatggttact

SEQ ID NO: 4163749 - DNA, 25 bp, Homo sapien
ttaccaatgactgggaaaggtagtg

SEQ ID NO: 4163750 - DNA, 25 bp, Homo sapien
aaggatatgtgcttgaggggatggt

SEQ ID NO: 4163751 - DNA, 25 bp, Homo sapien
agatggttaccaatgactgggaaag

SEQ ID NO: 4163752 - DNA, 25 bp, Homo sapien
tagaactgaggcttcaataattgca

SEQ ID NO: 4163753 - DNA, 25 bp, Homo sapien
attgccatccactcaagtcacagct

SEQ ID NO: 4163754 - DNA, 25 bp, Homo sapien
ggagtaattaatcagaccgctagac

SEQ ID NO: 4163755 - DNA, 25 bp, Homo sapien
gagaaacacgcttgtcatagacttt

SEQ ID NO: 4163756 - DNA, 25 bp, Homo sapien
ctagcttgtgtccacaggaatatcc

SEQ ID NO: 4163757 - DNA, 25 bp, Homo sapien
gtgtccacaggaatatccacaacca

SEQ ID NO: 4163758 - DNA, 25 bp, Homo sapien
acaggaatatccacaaccatacaat

SEQ ID NO: 4163759 - DNA, 25 bp, Homo sapien
atatccacaaccatacaatatcttc

SEQ ID NO: 4163760 - DNA, 25 bp, Homo sapien
gtgacaaatgtcctcttttcctcat

SEQ ID NO: 4163761 - DNA, 25 bp, Homo sapien
caagccagaggtttagtgggtccca

SEQ ID NO: 4163762 - DNA, 25 bp, Homo sapien
tctccaagttcgcaagccagaggtt

SEQ ID NO: 4163763 - DNA, 25 bp, Homo sapien
tcttgatgtgacaaatgtcctcttt

SEQ ID NO: 4163764 - DNA, 25 bp, Homo sapien
caacaaatagatcctgtactgagtc

SEQ ID NO: 4163765 - DNA, 25 bp, Homo sapien
cttcaacaaatagatcctgtactga

SEQ ID NO: 4163766 - DNA, 25 bp, Homo sapien
acaaatagatcctgtactgagtcat

SEQ ID NO: 4163767 - DNA, 25 bp, Homo sapien
tcaacaaatagatcctgtactgagt

SEQ ID NO: 4163768 - DNA, 25 bp, Homo sapien
ttagtgatagggcttcgaagaacac

SEQ ID NO: 4163769 - DNA, 25 bp, Homo sapien
catcctcactatgagtgtagcccac

SEQ ID NO: 4163770 - DNA, 25 bp, Homo sapien
tgagtcatcctcactatgagtgtag

SEQ ID NO: 4163771 - DNA, 25 bp, Homo sapien
gatagggcttcgaagaacactctct

SEQ ID NO: 4163772 - DNA, 25 bp, Homo sapien
gtgaattatatggtacgtaactcat

SEQ ID NO: 4163773 - DNA, 25 bp, Homo sapien
gcagcagatctagcagatctcccag

SEQ ID NO: 4163774 - DNA, 25 bp, Homo sapien
accttatacaaaacagctccagctg

SEQ ID NO: 4163775 - DNA, 25 bp, Homo sapien
catatctcaatacagttgttatgta

SEQ ID NO: 4163776 - DNA, 25 bp, Homo sapien
tatcgaaggatccaaagggtaagag

SEQ ID NO: 4163777 - DNA, 25 bp, Homo sapien
aattgagatttaagtgcagcacgga

SEQ ID NO: 4163778 - DNA, 25 bp, Homo sapien
gctgtgacctgtacctttcgtgctg

SEQ ID NO: 4163779 - DNA, 25 bp, Homo sapien
aagggcacacatgatcagagaggtg

SEQ ID NO: 4163780 - DNA, 25 bp, Homo sapien
ccaaggtgtagagggactatcagaa

SEQ ID NO: 4163781 - DNA, 25 bp, Homo sapien
ttattcaatgctgcctaggactgtg

SEQ ID NO: 4163782 - DNA, 25 bp, Homo sapien
gagctcatcagataacccctccaga

SEQ ID NO: 4163783 - DNA, 25 bp, Homo sapien
tacattgtcacagctatccaaggtg

SEQ ID NO: 4163784 - DNA, 25 bp, Homo sapien
ccccgaaaatagatcagaatgtgaa

SEQ ID NO: 4163785 - DNA, 25 bp, Homo sapien
gaaaatagatcagaatgtgaattcc

SEQ ID NO: 4163786 - DNA, 25 bp, Homo sapien
catccccgaaaatagatcagaatgt

SEQ ID NO: 4163787 - DNA, 25 bp, Homo sapien
tagatcagaatgtgaattccaattt

SEQ ID NO: 4163788 - DNA, 25 bp, Homo sapien
tcttaaaagccttgtgctaacagag

SEQ ID NO: 4163789 - DNA, 25 bp, Homo sapien
cagttttcttacagtacaattgaca

SEQ ID NO: 4163790 - DNA, 25 bp, Homo sapien
tcttgtacatctaatcccatcttga

SEQ ID NO: 4163791 - DNA, 25 bp, Homo sapien
gagtctggcaagtacctatagttaa

SEQ ID NO: 4163792 - DNA, 25 bp, Homo sapien
ttctgtaacttgattaaagcattca

SEQ ID NO: 4163793 - DNA, 25 bp, Homo sapien
acaggaatcctttactactttatag

SEQ ID NO: 4163794 - DNA, 25 bp, Homo sapien
ttaaagcattcataaaaaggcaatg

SEQ ID NO: 4163795 - DNA, 25 bp, Homo sapien
tatgcattattccacaggagctttc

SEQ ID NO: 4163796 - DNA, 25 bp, Homo sapien
gaatcctgtgtcatgcaaagtggtg

SEQ ID NO: 4163797 - DNA, 25 bp, Homo sapien
caggtacaagtagtaaaactgcagc

SEQ ID NO: 4163798 - DNA, 25 bp, Homo sapien
ggtgacaatgagattcaggtacaag

SEQ ID NO: 4163799 - DNA, 25 bp, Homo sapien
gatattttccggcattttgacagat

SEQ ID NO: 4163800 - DNA, 25 bp, Homo sapien
gattccactacttggtgcctggcag

SEQ ID NO: 4163801 - DNA, 25 bp, Homo sapien
gatgatttcctgaccgagattccac

SEQ ID NO: 4163802 - DNA, 25 bp, Homo sapien
catttcaacttaggcaggtggctag

SEQ ID NO: 4163803 - DNA, 25 bp, Homo sapien
tgctcaagatgggtgccagtaggcc

SEQ ID NO: 4163804 - DNA, 25 bp, Homo sapien
gatagttaacacaccagatgtctgg

SEQ ID NO: 4163805 - DNA, 25 bp, Homo sapien
tagggccgatctgctgatagttaac

SEQ ID NO: 4163806 - DNA, 25 bp, Homo sapien
gatgctcctgttttagactcctgtc

SEQ ID NO: 4163807 - DNA, 25 bp, Homo sapien
caaggcagcatgtgcgcttcatcac

SEQ ID NO: 4163808 - DNA, 25 bp, Homo sapien
cttctctagctttctgtctccttgg

SEQ ID NO: 4163809 - DNA, 25 bp, Homo sapien
tctagctttctgtctccttggtgtt

SEQ ID NO: 4163810 - DNA, 25 bp, Homo sapien
ggtgttgttgaaatcgacctggcat

SEQ ID NO: 4163811 - DNA, 25 bp, Homo sapien
ccttggtgttgttgaaatcgacctg

SEQ ID NO: 4163812 - DNA, 25 bp, Homo sapien
tccatagccatgttcgaaggtgctc

SEQ ID NO: 4163813 - DNA, 25 bp, Homo sapien
catgttcgaaggtgctctgggcaag

SEQ ID NO: 4163814 - DNA, 25 bp, Homo sapien
accttttaatagaaggccttgactg

SEQ ID NO: 4163815 - DNA, 25 bp, Homo sapien
cttttaatagaaggccttgactgga

SEQ ID NO: 4163816 - DNA, 25 bp, Homo sapien
cttattttgactacattggacctta

SEQ ID NO: 4163817 - DNA, 25 bp, Homo sapien
tttgactacattggaccttacagcc

SEQ ID NO: 4163818 - DNA, 25 bp, Homo sapien
gtacgcagacataatgacttatttt

SEQ ID NO: 4163819 - DNA, 25 bp, Homo sapien
gactacattggaccttacagcctgc

SEQ ID NO: 4163820 - DNA, 25 bp, Homo sapien
accacctccgaggaactgtgtcccg

SEQ ID NO: 4163821 - DNA, 25 bp, Homo sapien
tgtgtcccgcattggcattcctttg

SEQ ID NO: 4163822 - DNA, 25 bp, Homo sapien
aactgtgtcccgcattggcattcct

SEQ ID NO: 4163823 - DNA, 25 bp, Homo sapien
tcccgcattggcattcctttggcag

SEQ ID NO: 4163824 - DNA, 25 bp, Homo sapien
gagtaaaggatcttagatgacggac

SEQ ID NO: 4163825 - DNA, 25 bp, Homo sapien
gtagaatagattgttgcatcctgga

SEQ ID NO: 4163826 - DNA, 25 bp, Homo sapien
tctgcagccttgaggatttattggc

SEQ ID NO: 4163827 - DNA, 25 bp, Homo sapien
ggatctctcagagcagcattaaaaa

SEQ ID NO: 4163828 - DNA, 25 bp, Homo sapien
ctgtgacataaacgaaagtctcatt

SEQ ID NO: 4163829 - DNA, 25 bp, Homo sapien
tgaagaacagcattaccagaatgac

SEQ ID NO: 4163830 - DNA, 25 bp, Homo sapien
ccaagttattgtctatgatgaagaa

SEQ ID NO: 4163831 - DNA, 25 bp, Homo sapien
tatgagcaaagctaccatctctggc

SEQ ID NO: 4163832 - DNA, 25 bp, Homo sapien
cagaagctatgtaggtgcagaggca

SEQ ID NO: 4163833 - DNA, 25 bp, Homo sapien
cagtatggagccaaagagcaggcca

SEQ ID NO: 4163834 - DNA, 25 bp, Homo sapien
taaagattaggtaggagcaacacgc

SEQ ID NO: 4163835 - DNA, 25 bp, Homo sapien
aaattgaaagctttgtccccagtgc

SEQ ID NO: 4163836 - DNA, 25 bp, Homo sapien
tgtatgttcgtaagctacaaagtgt

SEQ ID NO: 4163837 - DNA, 25 bp, Homo sapien
agtgtgcatttttcctcatgtggct

SEQ ID NO: 4163838 - DNA, 25 bp, Homo sapien
tgttaaagcttgatgctcttggaaa

SEQ ID NO: 4163839 - DNA, 25 bp, Homo sapien
tgttcgtaagctacaaagtgtgcat

SEQ ID NO: 4163840 - DNA, 25 bp, Homo sapien
ggccgcctgcagagcacaataatca

SEQ ID NO: 4163841 - DNA, 25 bp, Homo sapien
tacaaaggaaagacacatactgtag

SEQ ID NO: 4163842 - DNA, 25 bp, Homo sapien
ggctgtgaaagggaaactattgtct

SEQ ID NO: 4163843 - DNA, 25 bp, Homo sapien
gaagtactcacatggagatttttag

SEQ ID NO: 4163844 - DNA, 25 bp, Homo sapien
ctgactatgaatcagttgagatgaa

SEQ ID NO: 4163845 - DNA, 25 bp, Homo sapien
caaggactttgatcggcaactgact

SEQ ID NO: 4163846 - DNA, 25 bp, Homo sapien
gatgaatcagtaccttcagacaaac

SEQ ID NO: 4163847 - DNA, 25 bp, Homo sapien
caagtgcagtactgagaaagagtag

SEQ ID NO: 4163848 - DNA, 25 bp, Homo sapien
ctcccactgctgtgtactcacacag

SEQ ID NO: 4163849 - DNA, 25 bp, Homo sapien
acagccttcactatctgcatttgtc

SEQ ID NO: 4163850 - DNA, 25 bp, Homo sapien
actgctgtgtactcacacagccttc

SEQ ID NO: 4163851 - DNA, 25 bp, Homo sapien
tcacacagccttcactatctgcatt

SEQ ID NO: 4163852 - DNA, 25 bp, Homo sapien
ccacatgaactttagctttgctgtt

SEQ ID NO: 4163853 - DNA, 25 bp, Homo sapien
tgccacatgaactttagctttgctg

SEQ ID NO: 4163854 - DNA, 25 bp, Homo sapien
ctgccacatgaactttagctttgct

SEQ ID NO: 4163855 - DNA, 25 bp, Homo sapien
acatgaactttagctttgctgttca

SEQ ID NO: 4163856 - DNA, 25 bp, Homo sapien
tgtccgaccagttcttcattgctga

SEQ ID NO: 4163857 - DNA, 25 bp, Homo sapien
ggggaatgcctacatctggaatttc

SEQ ID NO: 4163858 - DNA, 25 bp, Homo sapien
taaattttgtccgaccagttcttca

SEQ ID NO: 4163859 - DNA, 25 bp, Homo sapien
cctggggggaatgcctacatctgga

SEQ ID NO: 4163860 - DNA, 25 bp, Homo sapien
ctgatgtgttttattgcgatttgca

SEQ ID NO: 4163861 - DNA, 25 bp, Homo sapien
aagcaaggtgtgtggtaattgctcc

SEQ ID NO: 4163862 - DNA, 25 bp, Homo sapien
aacagagcagggatgaatccgcttc

SEQ ID NO: 4163863 - DNA, 25 bp, Homo sapien
tggtaattgctccactgagaacaga

SEQ ID NO: 4163864 - DNA, 25 bp, Homo sapien
atctgtagcccatttttgactccca

SEQ ID NO: 4163865 - DNA, 25 bp, Homo sapien
tctgtagcccatttttgactcccat

SEQ ID NO: 4163866 - DNA, 25 bp, Homo sapien
tcaatctgtagcccatttttgactc

SEQ ID NO: 4163867 - DNA, 25 bp, Homo sapien
aaattcaatctgtagcccatttttg

SEQ ID NO: 4163868 - DNA, 25 bp, Homo sapien
cagtccttcaaaattccctcaattt

SEQ ID NO: 4163869 - DNA, 25 bp, Homo sapien
tttggattggtaatatttgctaaaa

SEQ ID NO: 4163870 - DNA, 25 bp, Homo sapien
ccctcaattttggattggtaatatt

SEQ ID NO: 4163871 - DNA, 25 bp, Homo sapien
acagtccttcaaaattccctcaatt

SEQ ID NO: 4163872 - DNA, 25 bp, Homo sapien
catccttgttgattgacgcgcctga

SEQ ID NO: 4163873 - DNA, 25 bp, Homo sapien
gattgacgcgcctgatggctttcat

SEQ ID NO: 4163874 - DNA, 25 bp, Homo sapien
gacctacaccatggttggtatttct

SEQ ID NO: 4163875 - DNA, 25 bp, Homo sapien
tgttccatcagcatgacctacacca

SEQ ID NO: 4163876 - DNA, 25 bp, Homo sapien
cattcgcatttgcagagcaagcagc

SEQ ID NO: 4163877 - DNA, 25 bp, Homo sapien
gcagcagcctatctctgggatgatc

SEQ ID NO: 4163878 - DNA, 25 bp, Homo sapien
taccactaactttgctgaaacctgc

SEQ ID NO: 4163879 - DNA, 25 bp, Homo sapien
tacggcaaatgtggtttggctcaca

SEQ ID NO: 4163880 - DNA, 25 bp, Homo sapien
tcattgtaggaaaatgatctcacaa

SEQ ID NO: 4163881 - DNA, 25 bp, Homo sapien
ggaaaatgatctcacaaataaattc

SEQ ID NO: 4163882 - DNA, 25 bp, Homo sapien
tacagccatacgtcttgattaactt

SEQ ID NO: 4163883 - DNA, 25 bp, Homo sapien
aaatgaaatgatgttgacaccatac

SEQ ID NO: 4163884 - DNA, 25 bp, Homo sapien
gagtggaaaaggatcaaagaaatct

SEQ ID NO: 4163885 - DNA, 25 bp, Homo sapien
aaaggctagtcaaataaagcagtgg

SEQ ID NO: 4163886 - DNA, 25 bp, Homo sapien
tgtaaacaccactgcacgaggacca

SEQ ID NO: 4163887 - DNA, 25 bp, Homo sapien
gtaaccggttatgatcaattagttg

SEQ ID NO: 4163888 - DNA, 25 bp, Homo sapien
tccactttgaaatatagtgcactgc

SEQ ID NO: 4163889 - DNA, 25 bp, Homo sapien
tgaaatatagtgcactgcaaataac

SEQ ID NO: 4163890 - DNA, 25 bp, Homo sapien
cctattgcagccaaatcagtatctt

SEQ ID NO: 4163891 - DNA, 25 bp, Homo sapien
cagtatcttggataagctcagttac

SEQ ID NO: 4163892 - DNA, 25 bp, Homo sapien
tgtacttagtcactctgtgtggaca

SEQ ID NO: 4163893 - DNA, 25 bp, Homo sapien
gatctccattagtggaaatattcat

SEQ ID NO: 4163894 - DNA, 25 bp, Homo sapien
ctggctgatctccattagtggaaat

SEQ ID NO: 4163895 - DNA, 25 bp, Homo sapien
tctcccttcatgtacttagtcactc

SEQ ID NO: 4163896 - DNA, 25 bp, Homo sapien
aaactgagctttcttcattaccttc

SEQ ID NO: 4163897 - DNA, 25 bp, Homo sapien
gaagaggatgcccaatccaagcctg

SEQ ID NO: 4163898 - DNA, 25 bp, Homo sapien
tggaagggatattcttgctaaactg

SEQ ID NO: 4163899 - DNA, 25 bp, Homo sapien
ccaagcctgaagaagagcgctggag

SEQ ID NO: 4163900 - DNA, 25 bp, Homo sapien
caagcatctgctgcactaggaaccc

SEQ ID NO: 4163901 - DNA, 25 bp, Homo sapien
gctgcactaggaaccccaacactgg

SEQ ID NO: 4163902 - DNA, 25 bp, Homo sapien
ctagcaagcatctgctgcactagga

SEQ ID NO: 4163903 - DNA, 25 bp, Homo sapien
atctgctgcactaggaaccccaaca

SEQ ID NO: 4163904 - DNA, 25 bp, Homo sapien
cttctcctgcaacaggaactgtggt

SEQ ID NO: 4163905 - DNA, 25 bp, Homo sapien
tgcaacaggaactgtggtcctggca

SEQ ID NO: 4163906 - DNA, 25 bp, Homo sapien
caacaggaactgtggtcctggcagt

SEQ ID NO: 4163907 - DNA, 25 bp, Homo sapien
tcctgcaacaggaactgtggtcctg

SEQ ID NO: 4163908 - DNA, 25 bp, Homo sapien
agagcattactcatgtgaggtggaa

SEQ ID NO: 4163909 - DNA, 25 bp, Homo sapien
tactcatgtgaggtggaatggaaca

SEQ ID NO: 4163910 - DNA, 25 bp, Homo sapien
ttaagagcgtgaaatataagcttgt

SEQ ID NO: 4163911 - DNA, 25 bp, Homo sapien
cgtgaaatataagcttgtacacctc

SEQ ID NO: 4163912 - DNA, 25 bp, Homo sapien
ggtaccagagtggtccctgaggccc

SEQ ID NO: 4163913 - DNA, 25 bp, Homo sapien
gctgatccctctgccagaccaacat

SEQ ID NO: 4163914 - DNA, 25 bp, Homo sapien
tctgcaggtaccagagtggtccctg

SEQ ID NO: 4163915 - DNA, 25 bp, Homo sapien
ggatcccttctggatgctgatccct

SEQ ID NO: 4163916 - DNA, 25 bp, Homo sapien
caggggcgttacactcccacaggta

SEQ ID NO: 4163917 - DNA, 25 bp, Homo sapien
gatgggtaggactaagagcagattc

SEQ ID NO: 4163918 - DNA, 25 bp, Homo sapien
cattgatactgctgggtccatgagc

SEQ ID NO: 4163919 - DNA, 25 bp, Homo sapien
agatgtgcgtgctgctcttagcagg

SEQ ID NO: 4163920 - DNA, 25 bp, Homo sapien
cacctttgcaaatcttatatccttt

SEQ ID NO: 4163921 - DNA, 25 bp, Homo sapien
tatggcttgctgccacctttgcaaa

SEQ ID NO: 4163922 - DNA, 25 bp, Homo sapien
atggcttgctgccacctttgcaaat

SEQ ID NO: 4163923 - DNA, 25 bp, Homo sapien
ctttgcaaatcttatatcctttcat

SEQ ID NO: 4163924 - DNA, 25 bp, Homo sapien
actcaataaagtctttaccgcattt

SEQ ID NO: 4163925 - DNA, 25 bp, Homo sapien
tatactcaataaagtctttaccgca

SEQ ID NO: 4163926 - DNA, 25 bp, Homo sapien
atactcaataaagtctttaccgcat

SEQ ID NO: 4163927 - DNA, 25 bp, Homo sapien
tactcaataaagtctttaccgcatt

SEQ ID NO: 4163928 - DNA, 25 bp, Homo sapien
agggaatgcctttcaatacccggca

SEQ ID NO: 4163929 - DNA, 25 bp, Homo sapien
ttcaatacccggcatgaaactcttt

SEQ ID NO: 4163930 - DNA, 25 bp, Homo sapien
tgcctttcaatacccggcatgaaac

SEQ ID NO: 4163931 - DNA, 25 bp, Homo sapien
caatacccggcatgaaactctttcc

SEQ ID NO: 4163932 - DNA, 25 bp, Homo sapien
ggtgctgccttagacactttctcag

SEQ ID NO: 4163933 - DNA, 25 bp, Homo sapien
acaaatgcctttggcctgctcccat

SEQ ID NO: 4163934 - DNA, 25 bp, Homo sapien
gtatcttctagtcctgtgcaccctg

SEQ ID NO: 4163935 - DNA, 25 bp, Homo sapien
tctcagtgtttgttcctgccacttc

SEQ ID NO: 4163936 - DNA, 25 bp, Homo sapien
tatcttcatggtaggagaaatctgg

SEQ ID NO: 4163937 - DNA, 25 bp, Homo sapien
atcttcatggtaggagaaatctgga

SEQ ID NO: 4163938 - DNA, 25 bp, Homo sapien
tcttcatggtaggagaaatctggag

SEQ ID NO: 4163939 - DNA, 25 bp, Homo sapien
tttatcttcatggtaggagaaatct

SEQ ID NO: 4163940 - DNA, 25 bp, Homo sapien
ccatagagttttggtgactaaggga

SEQ ID NO: 4163941 - DNA, 25 bp, Homo sapien
ttgcccgatactgtagaaaaacagg

SEQ ID NO: 4163942 - DNA, 25 bp, Homo sapien
taaagtgaaggctacatttgcccga

SEQ ID NO: 4163943 - DNA, 25 bp, Homo sapien
tgtgttactccctttcgaatcttga

SEQ ID NO: 4163944 - DNA, 25 bp, Homo sapien
ataaattacttgggtagtgtagcca

SEQ ID NO: 4163945 - DNA, 25 bp, Homo sapien
tccctgagcacgaaatttttttcca

SEQ ID NO: 4163946 - DNA, 25 bp, Homo sapien
tatccctgagcacgaaatttttttc

SEQ ID NO: 4163947 - DNA, 25 bp, Homo sapien
atatcggatggctgtaaatgtgtgg

SEQ ID NO: 4163948 - DNA, 25 bp, Homo sapien
gtttgtcaaatatcggatggctgta

SEQ ID NO: 4163949 - DNA, 25 bp, Homo sapien
tcaggtttgtcaaatatcggatggc

SEQ ID NO: 4163950 - DNA, 25 bp, Homo sapien
gtcaaatatcggatggctgtaaatg

SEQ ID NO: 4163951 - DNA, 25 bp, Homo sapien
tgtttatggagttacgtgaaatctt

SEQ ID NO: 4163952 - DNA, 25 bp, Homo sapien
gttacgtgaaatcttctgagcattt

SEQ ID NO: 4163953 - DNA, 25 bp, Homo sapien
tatggagttacgtgaaatcttctga

SEQ ID NO: 4163954 - DNA, 25 bp, Homo sapien
tggagttacgtgaaatcttctgagc

SEQ ID NO: 4163955 - DNA, 25 bp, Homo sapien
caaataagaggacttaaacctctat

SEQ ID NO: 4163956 - DNA, 25 bp, Homo sapien
cttaaacctctataatttagtctat

SEQ ID NO: 4163957 - DNA, 25 bp, Homo sapien
aactcttttgtccgacatatttctt

SEQ ID NO: 4163958 - DNA, 25 bp, Homo sapien
tatcaaagtaactcttttgtccgac

SEQ ID NO: 4163959 - DNA, 25 bp, Homo sapien
atagcttgtttagctgaccttagta

SEQ ID NO: 4163960 - DNA, 25 bp, Homo sapien
actgaaaggataaaaagcaacattt

SEQ ID NO: 4163961 - DNA, 25 bp, Homo sapien
gtactgaaaggataaaaagcaacat

SEQ ID NO: 4163962 - DNA, 25 bp, Homo sapien
tagtactgaaaggataaaaagcaac

SEQ ID NO: 4163963 - DNA, 25 bp, Homo sapien
cctgaacatctaggcctaggaagtt

SEQ ID NO: 4163964 - DNA, 25 bp, Homo sapien
caatcttgtccctgaacatctaggc

SEQ ID NO: 4163965 - DNA, 25 bp, Homo sapien
tcttgtccctgaacatctaggccta

SEQ ID NO: 4163966 - DNA, 25 bp, Homo sapien
tgtccctgaacatctaggcctagga

SEQ ID NO: 4163967 - DNA, 25 bp, Homo sapien
tgttgttgccttcttccacaactac

SEQ ID NO: 4163968 - DNA, 25 bp, Homo sapien
tttctttctgttgttgccttcttcc

SEQ ID NO: 4163969 - DNA, 25 bp, Homo sapien
tctgttgttgccttcttccacaact

SEQ ID NO: 4163970 - DNA, 25 bp, Homo sapien
tctttctgttgttgccttcttccac

SEQ ID NO: 4163971 - DNA, 25 bp, Homo sapien
tgtgatccttgtggatgcccctaga

SEQ ID NO: 4163972 - DNA, 25 bp, Homo sapien
tatgaaccccatggcttctctcgtg

SEQ ID NO: 4163973 - DNA, 25 bp, Homo sapien
tagtgcttcttattatcagtattca

SEQ ID NO: 4163974 - DNA, 25 bp, Homo sapien
gacgtgcagagatatatgaacccca

SEQ ID NO: 4163975 - DNA, 25 bp, Homo sapien
tgtggtgcatgcgaaaatttgcctg

SEQ ID NO: 4163976 - DNA, 25 bp, Homo sapien
ggtgcatgcgaaaatttgcctggaa

SEQ ID NO: 4163977 - DNA, 25 bp, Homo sapien
tttcttcactgtggtgcatgcgaaa

SEQ ID NO: 4163978 - DNA, 25 bp, Homo sapien
tcactgtggtgcatgcgaaaatttg

SEQ ID NO: 4163979 - DNA, 25 bp, Homo sapien
tagtgcttgatcttcgtgggcctct

SEQ ID NO: 4163980 - DNA, 25 bp, Homo sapien
cttctttgctagtgcttgatcttcg

SEQ ID NO: 4163981 - DNA, 25 bp, Homo sapien
tttgctagtgcttgatcttcgtggg

SEQ ID NO: 4163982 - DNA, 25 bp, Homo sapien
tgcttgatcttcgtgggcctctgtg

SEQ ID NO: 4163983 - DNA, 25 bp, Homo sapien
tacattggccagaaaaggtgctatc

SEQ ID NO: 4163984 - DNA, 25 bp, Homo sapien
acattggccagaaaaggtgctatct

SEQ ID NO: 4163985 - DNA, 25 bp, Homo sapien
cattggccagaaaaggtgctatctg

SEQ ID NO: 4163986 - DNA, 25 bp, Homo sapien
atttgcatgttatccactcacagga

SEQ ID NO: 4163987 - DNA, 25 bp, Homo sapien
tttgcatgttatccactcacaggag

SEQ ID NO: 4163988 - DNA, 25 bp, Homo sapien
tccactcacaggagctatgcaaatc

SEQ ID NO: 4163989 - DNA, 25 bp, Homo sapien
ggagctatgcaaatcacctatcatt

SEQ ID NO: 4163990 - DNA, 25 bp, Homo sapien
gaggtggtgtgattctccataaaga

SEQ ID NO: 4163991 - DNA, 25 bp, Homo sapien
aaagagtgtagattttctgaggtgg

SEQ ID NO: 4163992 - DNA, 25 bp, Homo sapien
tatttcataatggtctgtaaaagag

SEQ ID NO: 4163993 - DNA, 25 bp, Homo sapien
tgcaaccccatctactctatgaaga

SEQ ID NO: 4163994 - DNA, 25 bp, Homo sapien
agtctgagctatagggaaactctct

SEQ ID NO: 4163995 - DNA, 25 bp, Homo sapien
tgagtctgagctatagggaaactct

SEQ ID NO: 4163996 - DNA, 25 bp, Homo sapien
cactccaaagacatcaaagtcatca

SEQ ID NO: 4163997 - DNA, 25 bp, Homo sapien
acagtgagtctgagctatagggaaa

SEQ ID NO: 4163998 - DNA, 25 bp, Homo sapien
cgtgaccaacctgggtgtgaatgct

SEQ ID NO: 4163999 - DNA, 25 bp, Homo sapien
cagtttcactcttggcatcatggaa

SEQ ID NO: 4164000 - DNA, 25 bp, Homo sapien
tagcatcagctgaactcgttggctt

SEQ ID NO: 4164001 - DNA, 25 bp, Homo sapien
aactcgttggcttgtgagtgctgcc

SEQ ID NO: 4164002 - DNA, 25 bp, Homo sapien
tctttagcattagtttttggctgac

SEQ ID NO: 4164003 - DNA, 25 bp, Homo sapien
gaaggctgttcattccttgcacttt

SEQ ID NO: 4164004 - DNA, 25 bp, Homo sapien
ggctgacatactggctttctgtcat

SEQ ID NO: 4164005 - DNA, 25 bp, Homo sapien
tagcagaaggctgttcattccttgc

SEQ ID NO: 4164006 - DNA, 25 bp, Homo sapien
ctcaagttatagaagacggcaaaac

SEQ ID NO: 4164007 - DNA, 25 bp, Homo sapien
ttatagaagacggcaaaacctttca

SEQ ID NO: 4164008 - DNA, 25 bp, Homo sapien
tatagaagacggcaaaacctttcat

SEQ ID NO: 4164009 - DNA, 25 bp, Homo sapien
caagttatagaagacggcaaaacct

SEQ ID NO: 4164010 - DNA, 25 bp, Homo sapien
tgcgaagaagccagctcccatgggg

SEQ ID NO: 4164011 - DNA, 25 bp, Homo sapien
caattttctattgtaaaacccatag

SEQ ID NO: 4164012 - DNA, 25 bp, Homo sapien
ggctgcctttactgctgaaactgtg

SEQ ID NO: 4164013 - DNA, 25 bp, Homo sapien
gctgcctttactgctgaaactgtga

SEQ ID NO: 4164014 - DNA, 25 bp, Homo sapien
ctgcctttactgctgaaactgtgaa

SEQ ID NO: 4164015 - DNA, 25 bp, Homo sapien
ctctccttcgtgagagtgatgtggg

SEQ ID NO: 4164016 - DNA, 25 bp, Homo sapien
tcaaatgtgtgccagatgagtctcc

SEQ ID NO: 4164017 - DNA, 25 bp, Homo sapien
tgaggccactgcctcgacacatggc

SEQ ID NO: 4164018 - DNA, 25 bp, Homo sapien
attctggttcctgcaatgtgtgagg

SEQ ID NO: 4164019 - DNA, 25 bp, Homo sapien
ttaatgtatacagtaatgatttatt

SEQ ID NO: 4164020 - DNA, 25 bp, Homo sapien
gtatacagtaatgatttatttcttg

SEQ ID NO: 4164021 - DNA, 25 bp, Homo sapien
tgtatacagtaatgatttatttctt

SEQ ID NO: 4164022 - DNA, 25 bp, Homo sapien
aatgtatacagtaatgatttatttc

SEQ ID NO: 4164023 - DNA, 25 bp, Homo sapien
tttgtacctcaaacctcttgctttc

SEQ ID NO: 4164024 - DNA, 25 bp, Homo sapien
tgtacctcaaacctcttgctttcca

SEQ ID NO: 4164025 - DNA, 25 bp, Homo sapien
gtacctcaaacctcttgctttccat

SEQ ID NO: 4164026 - DNA, 25 bp, Homo sapien
cttttgtacctcaaacctcttgctt

SEQ ID NO: 4164027 - DNA, 25 bp, Homo sapien
gcaggtccggaatgtggagagaaac

SEQ ID NO: 4164028 - DNA, 25 bp, Homo sapien
acagcgggtttactgactgcaaggc

SEQ ID NO: 4164029 - DNA, 25 bp, Homo sapien
tgtggagagaaaccccactggcata

SEQ ID NO: 4164030 - DNA, 25 bp, Homo sapien
cactggcatacagcgggtttactga

SEQ ID NO: 4164031 - DNA, 25 bp, Homo sapien
agagatcaaggccacacctgccctc

SEQ ID NO: 4164032 - DNA, 25 bp, Homo sapien
cagagatcaaggccacacctgccct

SEQ ID NO: 4164033 - DNA, 25 bp, Homo sapien
acacctgccctccaatttttgctca

SEQ ID NO: 4164034 - DNA, 25 bp, Homo sapien
cacctgccctccaatttttgctcac

SEQ ID NO: 4164035 - DNA, 25 bp, Homo sapien
gactggtttatgaactggaccagga

SEQ ID NO: 4164036 - DNA, 25 bp, Homo sapien
gaggactggtttatgaactggacca

SEQ ID NO: 4164037 - DNA, 25 bp, Homo sapien
ctggtttatgaactggaccaggatg

SEQ ID NO: 4164038 - DNA, 25 bp, Homo sapien
ggactggtttatgaactggaccagg

SEQ ID NO: 4164039 - DNA, 25 bp, Homo sapien
ttgcagaaagcaggatcatcatccg

SEQ ID NO: 4164040 - DNA, 25 bp, Homo sapien
tagctagtggttgttttgcagaaag

SEQ ID NO: 4164041 - DNA, 25 bp, Homo sapien
tcatcatccgcatgaggtctttgaa

SEQ ID NO: 4164042 - DNA, 25 bp, Homo sapien
gagcagaattctgattatttgtagc

SEQ ID NO: 4164043 - DNA, 25 bp, Homo sapien
acaggtctttgtagtctctcctctc

SEQ ID NO: 4164044 - DNA, 25 bp, Homo sapien
ctacaggtctttgtagtctctcctc

SEQ ID NO: 4164045 - DNA, 25 bp, Homo sapien
ggtctttgtagtctctcctctccac

SEQ ID NO: 4164046 - DNA, 25 bp, Homo sapien
tttgtagtctctcctctccactgct

SEQ ID NO: 4164047 - DNA, 25 bp, Homo sapien
aagggtgatttgagcggttgcctct

SEQ ID NO: 4164048 - DNA, 25 bp, Homo sapien
gcctctcagagttccagtggcattt

SEQ ID NO: 4164049 - DNA, 25 bp, Homo sapien
cagagttccagtggcatttggcttt

SEQ ID NO: 4164050 - DNA, 25 bp, Homo sapien
taaacttgagtatatctattactct

SEQ ID NO: 4164051 - DNA, 25 bp, Homo sapien
aattgttgcagcatcccttctactg

SEQ ID NO: 4164052 - DNA, 25 bp, Homo sapien
tgttcttcaatctgagcagggctca

SEQ ID NO: 4164053 - DNA, 25 bp, Homo sapien
caaagccgcttacagtagctgggac

SEQ ID NO: 4164054 - DNA, 25 bp, Homo sapien
ttttctaaacagaagagagctggag

SEQ ID NO: 4164055 - DNA, 25 bp, Homo sapien
tcagagatggtccagacagaagcac

SEQ ID NO: 4164056 - DNA, 25 bp, Homo sapien
tggcattggccagacagggacgttc

SEQ ID NO: 4164057 - DNA, 25 bp, Homo sapien
gatttatctatacggtggtccagca

SEQ ID NO: 4164058 - DNA, 25 bp, Homo sapien
tcatattgaaacactacagcgcagg

SEQ ID NO: 4164059 - DNA, 25 bp, Homo sapien
gtgaggagctgacgccaacacccaa

SEQ ID NO: 4164060 - DNA, 25 bp, Homo sapien
gcgtgaggagctgacgccaacaccc

SEQ ID NO: 4164061 - DNA, 25 bp, Homo sapien
ctgcgtgaggagctgacgccaacac

SEQ ID NO: 4164062 - DNA, 25 bp, Homo sapien
aggagctgacgccaacacccaaagc

SEQ ID NO: 4164063 - DNA, 25 bp, Homo sapien
ctttcaaataagaatcagttgcatg

SEQ ID NO: 4164064 - DNA, 25 bp, Homo sapien
taaattcgtccttatcccaaagctg

SEQ ID NO: 4164065 - DNA, 25 bp, Homo sapien
atgttccaatcctggaggtctctga

SEQ ID NO: 4164066 - DNA, 25 bp, Homo sapien
ggtgctaaattcgtccttatcccaa

SEQ ID NO: 4164067 - DNA, 25 bp, Homo sapien
actcctggtcgttcccttcacactc

SEQ ID NO: 4164068 - DNA, 25 bp, Homo sapien
ctcctggtcgttcccttcacactca

SEQ ID NO: 4164069 - DNA, 25 bp, Homo sapien
cctggtcgttcccttcacactcaca

SEQ ID NO: 4164070 - DNA, 25 bp, Homo sapien
ttcacactcacactccttcacattc

SEQ ID NO: 4164071 - DNA, 25 bp, Homo sapien
caatgaggtcacagaatccagtgca

SEQ ID NO: 4164072 - DNA, 25 bp, Homo sapien
ttggttaactcagtagcaaggctat

SEQ ID NO: 4164073 - DNA, 25 bp, Homo sapien
tctttctgtgtacacccaccgtttc

SEQ ID NO: 4164074 - DNA, 25 bp, Homo sapien
aatgggcacactgaatagcatgcag

SEQ ID NO: 4164075 - DNA, 25 bp, Homo sapien
ccagatcaatgatgatggaattgct

SEQ ID NO: 4164076 - DNA, 25 bp, Homo sapien
gaacctgccgtttcctcataggcct

SEQ ID NO: 4164077 - DNA, 25 bp, Homo sapien
tcatgggaacctgccgtttcctcat

SEQ ID NO: 4164078 - DNA, 25 bp, Homo sapien
cccatctcatgggaacctgccgttt

SEQ ID NO: 4164079 - DNA, 25 bp, Homo sapien
tctgcttgcagctgatctgattccc

SEQ ID NO: 4164080 - DNA, 25 bp, Homo sapien
gatttttatagcagatacctccctt

SEQ ID NO: 4164081 - DNA, 25 bp, Homo sapien
ctttgatgggcttctggacctccct

SEQ ID NO: 4164082 - DNA, 25 bp, Homo sapien
tggacctccctgaaatctgcttgca

SEQ ID NO: 4164083 - DNA, 25 bp, Homo sapien
gctgttctgatagtttttagtgtca

SEQ ID NO: 4164084 - DNA, 25 bp, Homo sapien
tcatgggaacagtttccattatgct

SEQ ID NO: 4164085 - DNA, 25 bp, Homo sapien
gccaggcccagaccctattgctgtg

SEQ ID NO: 4164086 - DNA, 25 bp, Homo sapien
tttagtgtcaggagtgattttgtgg

SEQ ID NO: 4164087 - DNA, 25 bp, Homo sapien
tccctgtgacccctgctaggctaaa

SEQ ID NO: 4164088 - DNA, 25 bp, Homo sapien
gttgtctctgacagcttcggaaggg

SEQ ID NO: 4164089 - DNA, 25 bp, Homo sapien
tgttgctgctcagtattattcctgg

SEQ ID NO: 4164090 - DNA, 25 bp, Homo sapien
gaatggtcaggtttagaggctctgc

SEQ ID NO: 4164091 - DNA, 25 bp, Homo sapien
ggtggtccttgagagcctcttagag

SEQ ID NO: 4164092 - DNA, 25 bp, Homo sapien
tggtggtccttgagagcctcttaga

SEQ ID NO: 4164093 - DNA, 25 bp, Homo sapien
gcttttgcacttgtgtagcagcttt

SEQ ID NO: 4164094 - DNA, 25 bp, Homo sapien
gtatggatattttcggtctaagacc

SEQ ID NO: 4164095 - DNA, 25 bp, Homo sapien
gttttggtgattgcttttgcacttg

SEQ ID NO: 4164096 - DNA, 25 bp, Homo sapien
tgaggatattgccactgttttggtg

SEQ ID NO: 4164097 - DNA, 25 bp, Homo sapien
ggagatccactctggcagacctcca

SEQ ID NO: 4164098 - DNA, 25 bp, Homo sapien
atggagatccactctggcagacctc

SEQ ID NO: 4164099 - DNA, 25 bp, Homo sapien
ggatggagatccactctggcagacc

SEQ ID NO: 4164100 - DNA, 25 bp, Homo sapien
gagatccactctggcagacctccag

SEQ ID NO: 4164101 - DNA, 25 bp, Homo sapien
catctcggtttggattgcagaaaac

SEQ ID NO: 4164102 - DNA, 25 bp, Homo sapien
ctccctacgtcttgtttaagcctgg

SEQ ID NO: 4164103 - DNA, 25 bp, Homo sapien
ccttgcacagccatatagataatat

SEQ ID NO: 4164104 - DNA, 25 bp, Homo sapien
caatggaaattgttagagctcctcc

SEQ ID NO: 4164105 - DNA, 25 bp, Homo sapien
cctctcagggcagttaggatgagtt

SEQ ID NO: 4164106 - DNA, 25 bp, Homo sapien
tgggccatttgtgagcctcagctct

SEQ ID NO: 4164107 - DNA, 25 bp, Homo sapien
gcagaaacgggctccacggaaaagc

SEQ ID NO: 4164108 - DNA, 25 bp, Homo sapien
gatttgatcatggaaacctctcagg

SEQ ID NO: 4164109 - DNA, 25 bp, Homo sapien
tttttctcgtgctcaagtttcagct

SEQ ID NO: 4164110 - DNA, 25 bp, Homo sapien
tcttgctaccatattgaatctcctg

SEQ ID NO: 4164111 - DNA, 25 bp, Homo sapien
tatctggtagggctagactgcatca

SEQ ID NO: 4164112 - DNA, 25 bp, Homo sapien
tatagccccataaaagtactttcaa

SEQ ID NO: 4164113 - DNA, 25 bp, Homo sapien
tgtcactcgtggagaagccaacgga

SEQ ID NO: 4164114 - DNA, 25 bp, Homo sapien
cagggctccggtcttctatctggga

SEQ ID NO: 4164115 - DNA, 25 bp, Homo sapien
taaggatccagtccggaaagggatg

SEQ ID NO: 4164116 - DNA, 25 bp, Homo sapien
ggttcgccgggctgtctgcaacttt

SEQ ID NO: 4164117 - DNA, 25 bp, Homo sapien
tgcctaggctggtcagacggagcaa

SEQ ID NO: 4164118 - DNA, 25 bp, Homo sapien
cacgcgatgctggattgcctaggct

SEQ ID NO: 4164119 - DNA, 25 bp, Homo sapien
tgtgcccagcggcactggtaccacg

SEQ ID NO: 4164120 - DNA, 25 bp, Homo sapien
tcggaatccacggaagaaaattcac

SEQ ID NO: 4164121 - DNA, 25 bp, Homo sapien
tgattagagggtctaggcagaagaa

SEQ ID NO: 4164122 - DNA, 25 bp, Homo sapien
acttcttgattagagggtctaggca

SEQ ID NO: 4164123 - DNA, 25 bp, Homo sapien
ggcagaagaattctaaggtatttaa

SEQ ID NO: 4164124 - DNA, 25 bp, Homo sapien
agtgggtaaacttcttgattagagg

SEQ ID NO: 4164125 - DNA, 25 bp, Homo sapien
gattaggctctaatcttcacagtcc

SEQ ID NO: 4164126 - DNA, 25 bp, Homo sapien
gacgaatacgctacagagacagttc

SEQ ID NO: 4164127 - DNA, 25 bp, Homo sapien
tgtaaggccagcagctaagagtggt

SEQ ID NO: 4164128 - DNA, 25 bp, Homo sapien
actggcgctctagcctctgtgctgg

SEQ ID NO: 4164129 - DNA, 25 bp, Homo sapien
acctgggtcctaactgcaaaactat

SEQ ID NO: 4164130 - DNA, 25 bp, Homo sapien
gagggattcaagagactgtgaacta

SEQ ID NO: 4164131 - DNA, 25 bp, Homo sapien
caagagactgtgaactaaacctggg

SEQ ID NO: 4164132 - DNA, 25 bp, Homo sapien
cctgggtcctaactgcaaaactatg

SEQ ID NO: 4164133 - DNA, 25 bp, Homo sapien
gacttgttacatgcaacgacacgga

SEQ ID NO: 4164134 - DNA, 25 bp, Homo sapien
tcctggtggcctaggagactgccag

SEQ ID NO: 4164135 - DNA, 25 bp, Homo sapien
tggttgcccggacatgtttgtgtta

SEQ ID NO: 4164136 - DNA, 25 bp, Homo sapien
tcttgagctgagttgtggttgcccg

SEQ ID NO: 4164137 - DNA, 25 bp, Homo sapien
caagtctgctgtccgaaggtctgag

SEQ ID NO: 4164138 - DNA, 25 bp, Homo sapien
tggtgtcagtcccagttcaagggca

SEQ ID NO: 4164139 - DNA, 25 bp, Homo sapien
gcttacacaataatggaggccgaga

SEQ ID NO: 4164140 - DNA, 25 bp, Homo sapien
tctgggatctttagcgaatgcctgg

SEQ ID NO: 4164141 - DNA, 25 bp, Homo sapien
tctgggctgcacatcatactactgc

SEQ ID NO: 4164142 - DNA, 25 bp, Homo sapien
tcggagatgtcctcagatgggcaag

SEQ ID NO: 4164143 - DNA, 25 bp, Homo sapien
agctctggagttaaaacggccctcg

SEQ ID NO: 4164144 - DNA, 25 bp, Homo sapien
tataatgtaggtccaatgacagcct

SEQ ID NO: 4164145 - DNA, 25 bp, Homo sapien
ttcaagcgagcgaagcaaactcctc

SEQ ID NO: 4164146 - DNA, 25 bp, Homo sapien
gccagttggtggctagacatcagac

SEQ ID NO: 4164147 - DNA, 25 bp, Homo sapien
tacgcaccacctcattaagaacggg

SEQ ID NO: 4164148 - DNA, 25 bp, Homo sapien
aacgggacccttgtgagccatagac

SEQ ID NO: 4164149 - DNA, 25 bp, Homo sapien
ttaggcttcttttagtacatggcac

SEQ ID NO: 4164150 - DNA, 25 bp, Homo sapien
tattaagtgtataagctctggcact

SEQ ID NO: 4164151 - DNA, 25 bp, Homo sapien
tgcagaacaagacatgggcatcttt

SEQ ID NO: 4164152 - DNA, 25 bp, Homo sapien
cataactcttgatggtctgatgaga

SEQ ID NO: 4164153 - DNA, 25 bp, Homo sapien
ccattgagtacaccctaatatccgg

SEQ ID NO: 4164154 - DNA, 25 bp, Homo sapien
taatatccggtgataaacattcatc

SEQ ID NO: 4164155 - DNA, 25 bp, Homo sapien
gataaacattcatcaccctatctta

SEQ ID NO: 4164156 - DNA, 25 bp, Homo sapien
ccctttatacttaccattgagtaca

SEQ ID NO: 4164157 - DNA, 25 bp, Homo sapien
actgagcatctgcagtactgctatc

SEQ ID NO: 4164158 - DNA, 25 bp, Homo sapien
attcaccatcaagtctttatcactg

SEQ ID NO: 4164159 - DNA, 25 bp, Homo sapien
gcagtactgctatcgacatacctat

SEQ ID NO: 4164160 - DNA, 25 bp, Homo sapien
tcgacatacctattcaccatcaagt

SEQ ID NO: 4164161 - DNA, 25 bp, Homo sapien
tttcaggaatgaatttccagcatcc

SEQ ID NO: 4164162 - DNA, 25 bp, Homo sapien
tttaatgaagaatgggagaacagaa

SEQ ID NO: 4164163 - DNA, 25 bp, Homo sapien
cagaaaacaactacttggtacatat

SEQ ID NO: 4164164 - DNA, 25 bp, Homo sapien
gctcatgattactagaattcttctg

SEQ ID NO: 4164165 - DNA, 25 bp, Homo sapien
cactatttgtgctagcgttggtaac

SEQ ID NO: 4164166 - DNA, 25 bp, Homo sapien
catattggccgctctgaactcagac

SEQ ID NO: 4164167 - DNA, 25 bp, Homo sapien
gcagaagggttagttcaataccagc

SEQ ID NO: 4164168 - DNA, 25 bp, Homo sapien
catgcatggctgagattggaaatcc

SEQ ID NO: 4164169 - DNA, 25 bp, Homo sapien
taagccagcatacagattagtagag

SEQ ID NO: 4164170 - DNA, 25 bp, Homo sapien
tgctagatgccaagggaaggattta

SEQ ID NO: 4164171 - DNA, 25 bp, Homo sapien
gaggacctctttcagtatacttagg

SEQ ID NO: 4164172 - DNA, 25 bp, Homo sapien
ttattcttgagagatagaggacctc

SEQ ID NO: 4164173 - DNA, 25 bp, Homo sapien
gaaggactgagatttccgagaaaat

SEQ ID NO: 4164174 - DNA, 25 bp, Homo sapien
agagttttcctgaaggactgagatt

SEQ ID NO: 4164175 - DNA, 25 bp, Homo sapien
tgagatttccgagaaaatatttgtc

SEQ ID NO: 4164176 - DNA, 25 bp, Homo sapien
tttcctgaaggactgagatttccga

SEQ ID NO: 4164177 - DNA, 25 bp, Homo sapien
agcgcttgatattctctgagacagg

SEQ ID NO: 4164178 - DNA, 25 bp, Homo sapien
gaacaggctgtagacttaactggaa

SEQ ID NO: 4164179 - DNA, 25 bp, Homo sapien
gacatttagccgctgagcaagaaac

SEQ ID NO: 4164180 - DNA, 25 bp, Homo sapien
ccttatcaatagtatgtaaatagag

SEQ ID NO: 4164181 - DNA, 25 bp, Homo sapien
actgaatcgttctctacctgtcctt

SEQ ID NO: 4164182 - DNA, 25 bp, Homo sapien
tgtcctttctggcaatgtgttttgg

SEQ ID NO: 4164183 - DNA, 25 bp, Homo sapien
agaaatgacactgaatcgttctcta

SEQ ID NO: 4164184 - DNA, 25 bp, Homo sapien
tgacactgaatcgttctctacctgt

SEQ ID NO: 4164185 - DNA, 25 bp, Homo sapien
gttatgaggacggttgacatctgca

SEQ ID NO: 4164186 - DNA, 25 bp, Homo sapien
gatatcctccagttatgaggacggt

SEQ ID NO: 4164187 - DNA, 25 bp, Homo sapien
tgctagtgtttcaccattagaaata

SEQ ID NO: 4164188 - DNA, 25 bp, Homo sapien
gaaatatgatatcctccagttatga

SEQ ID NO: 4164189 - DNA, 25 bp, Homo sapien
gaaaggactcttcaacctgaactgg

SEQ ID NO: 4164190 - DNA, 25 bp, Homo sapien
aaggactcttcaacctgaactggaa

SEQ ID NO: 4164191 - DNA, 25 bp, Homo sapien
tcaacctgaactggaaaagagatgc

SEQ ID NO: 4164192 - DNA, 25 bp, Homo sapien
aaaggactcttcaacctgaactgga

SEQ ID NO: 4164193 - DNA, 25 bp, Homo sapien
gggattttgggtcatggcaagatat

SEQ ID NO: 4164194 - DNA, 25 bp, Homo sapien
gggtcatggcaagatatatgtaact

SEQ ID NO: 4164195 - DNA, 25 bp, Homo sapien
gtttgggcacgtgtgaacatatgtg

SEQ ID NO: 4164196 - DNA, 25 bp, Homo sapien
gtgtgaacatatgttgtatgaacat

SEQ ID NO: 4164197 - DNA, 25 bp, Homo sapien
aagtatgtccaaaatgggatgacac

SEQ ID NO: 4164198 - DNA, 25 bp, Homo sapien
aagaagggaagaaagtagccagctg

SEQ ID NO: 4164199 - DNA, 25 bp, Homo sapien
tggagctgagtaatctgcatttgaa

SEQ ID NO: 4164200 - DNA, 25 bp, Homo sapien
gcagcctcctgtgaggatgtggatt

SEQ ID NO: 4164201 - DNA, 25 bp, Homo sapien
gcaaacaccaagacagcgtttgtgt

SEQ ID NO: 4164202 - DNA, 25 bp, Homo sapien
caccaagacagcgtttgtgtgcatt

SEQ ID NO: 4164203 - DNA, 25 bp, Homo sapien
gacagcgtttgtgtgcatttccttt

SEQ ID NO: 4164204 - DNA, 25 bp, Homo sapien
gcagcaaacaccaagacagcgtttg

SEQ ID NO: 4164205 - DNA, 25 bp, Homo sapien
cattcaacgactccacatctatgtg

SEQ ID NO: 4164206 - DNA, 25 bp, Homo sapien
tctatgtgctgaacggctctatcca

SEQ ID NO: 4164207 - DNA, 25 bp, Homo sapien
caatttgattcattcaacgactcca

SEQ ID NO: 4164208 - DNA, 25 bp, Homo sapien
ccaataactcggtgaggtagtccat

SEQ ID NO: 4164209 - DNA, 25 bp, Homo sapien
ttcttctcattaggaatccatggtc

SEQ ID NO: 4164210 - DNA, 25 bp, Homo sapien
tttgcagttaaatttcttctctgag

SEQ ID NO: 4164211 - DNA, 25 bp, Homo sapien
gttaaatttcttctctgagttagtg

SEQ ID NO: 4164212 - DNA, 25 bp, Homo sapien
tggtcattaaccaaatttgcagtta

SEQ ID NO: 4164213 - DNA, 25 bp, Homo sapien
ttaagattcttgagtttattctaaa

SEQ ID NO: 4164214 - DNA, 25 bp, Homo sapien
gcaaaggcagttccatgggaaaatt

SEQ ID NO: 4164215 - DNA, 25 bp, Homo sapien
gtgcaaaggcagttccatgggaaaa

SEQ ID NO: 4164216 - DNA, 25 bp, Homo sapien
gaacctttgcaacataataatgctc

SEQ ID NO: 4164217 - DNA, 25 bp, Homo sapien
tcaaaaagcccctagaactaacatc

SEQ ID NO: 4164218 - DNA, 25 bp, Homo sapien
tcctcacaaactagaaggaggatgg

SEQ ID NO: 4164219 - DNA, 25 bp, Homo sapien
tatcaatagacgcagggaaggcatt

SEQ ID NO: 4164220 - DNA, 25 bp, Homo sapien
atttttgacgtaaaaacatctggag

SEQ ID NO: 4164221 - DNA, 25 bp, Homo sapien
ctaaataaacctaattatctccatt

SEQ ID NO: 4164222 - DNA, 25 bp, Homo sapien
aaaacatctggagaatgctaaataa

SEQ ID NO: 4164223 - DNA, 25 bp, Homo sapien
aaataaacctaattatctccattat

SEQ ID NO: 4164224 - DNA, 25 bp, Homo sapien
tgctggcaggtattggaatcaggcc

SEQ ID NO: 4164225 - DNA, 25 bp, Homo sapien
tattaaggatgggaaccgtacagat

SEQ ID NO: 4164226 - DNA, 25 bp, Homo sapien
aaagaatgacatattgcagataaag

SEQ ID NO: 4164227 - DNA, 25 bp, Homo sapien
gccaagaagtatgtaaacatgccga

SEQ ID NO: 4164228 - DNA, 25 bp, Homo sapien
gctatgaagcaattctacaaggagg

SEQ ID NO: 4164229 - DNA, 25 bp, Homo sapien
tagctcgcagtccaacagacttagg

SEQ ID NO: 4164230 - DNA, 25 bp, Homo sapien
tttctgagagacacgaaagtgtgct

SEQ ID NO: 4164231 - DNA, 25 bp, Homo sapien
gacttaggccccatggctatgaagc

SEQ ID NO: 4164232 - DNA, 25 bp, Homo sapien
gcatacaggctatatataagtaatt

SEQ ID NO: 4164233 - DNA, 25 bp, Homo sapien
aagaatgaatgtcagcttgtgatag

SEQ ID NO: 4164234 - DNA, 25 bp, Homo sapien
ataaaacaggtgatctgggcatgtg

SEQ ID NO: 4164235 - DNA, 25 bp, Homo sapien
ttaagtaagaatgaatgtcagcttg

SEQ ID NO: 4164236 - DNA, 25 bp, Homo sapien
gaaccacggtgttcagttggacaca

SEQ ID NO: 4164237 - DNA, 25 bp, Homo sapien
atcaagtcatgatgcagacttcagg

SEQ ID NO: 4164238 - DNA, 25 bp, Homo sapien
tgtttgtgcggatcctcaatcccag

SEQ ID NO: 4164239 - DNA, 25 bp, Homo sapien
tttcagcaacttggaatgctctgct

SEQ ID NO: 4164240 - DNA, 25 bp, Homo sapien
ggcaagaaggtggtgggccaaatca

SEQ ID NO: 4164241 - DNA, 25 bp, Homo sapien
tgtccacccattgcggcctctggtg

SEQ ID NO: 4164242 - DNA, 25 bp, Homo sapien
catggttttacccaagtggctgcca

SEQ ID NO: 4164243 - DNA, 25 bp, Homo sapien
cctctggtgccgcagtggtggttcc

SEQ ID NO: 4164244 - DNA, 25 bp, Homo sapien
tccaccagatcgcagagttcactca

SEQ ID NO: 4164245 - DNA, 25 bp, Homo sapien
gtacaaaagctagacaacaggagaa

SEQ ID NO: 4164246 - DNA, 25 bp, Homo sapien
accctgtcattaggtataatcactg

SEQ ID NO: 4164247 - DNA, 25 bp, Homo sapien
taatctgtccaaaaacattcgcatc

SEQ ID NO: 4164248 - DNA, 25 bp, Homo sapien
tcactgttaatttgttggatgtcta

SEQ ID NO: 4164249 - DNA, 25 bp, Homo sapien
gctcaccgaccacagtagaaataaa

SEQ ID NO: 4164250 - DNA, 25 bp, Homo sapien
agtgtgctcaccgaccacagtagaa

SEQ ID NO: 4164251 - DNA, 25 bp, Homo sapien
tgtgctcaccgaccacagtagaaat

SEQ ID NO: 4164252 - DNA, 25 bp, Homo sapien
tggagtgtgctcaccgaccacagta

SEQ ID NO: 4164253 - DNA, 25 bp, Homo sapien
cagtttttacactcttgatatatgc

SEQ ID NO: 4164254 - DNA, 25 bp, Homo sapien
gtttttacactcttgatatatgctg

SEQ ID NO: 4164255 - DNA, 25 bp, Homo sapien
aatattgctcgaagaaggagggaaa

SEQ ID NO: 4164256 - DNA, 25 bp, Homo sapien
ttaatattgctcgaagaaggaggga

SEQ ID NO: 4164257 - DNA, 25 bp, Homo sapien
taatattgctcgaagaaggagggaa

SEQ ID NO: 4164258 - DNA, 25 bp, Homo sapien
attttcaatgggactcctccagcgt

SEQ ID NO: 4164259 - DNA, 25 bp, Homo sapien
tcctccagcgtgcactttcctaatt

SEQ ID NO: 4164260 - DNA, 25 bp, Homo sapien
tggaagagccgacattttcaatggg

SEQ ID NO: 4164261 - DNA, 25 bp, Homo sapien
ctacagcagtggaagagccgacatt

SEQ ID NO: 4164262 - DNA, 25 bp, Homo sapien
tatgaccaagacataaagtgtgtgg

SEQ ID NO: 4164263 - DNA, 25 bp, Homo sapien
taaccgttttcagctttagcgctgc

SEQ ID NO: 4164264 - DNA, 25 bp, Homo sapien
ttgctgcccaatataccatgcaggg

SEQ ID NO: 4164265 - DNA, 25 bp, Homo sapien
gggaaagcatttcgattagaggcaa

SEQ ID NO: 4164266 - DNA, 25 bp, Homo sapien
caatagacactgttaggtgattagc

SEQ ID NO: 4164267 - DNA, 25 bp, Homo sapien
tgattagcttcttatagagcagccc

SEQ ID NO: 4164268 - DNA, 25 bp, Homo sapien
tagaacactctggaaatcatcagcc

SEQ ID NO: 4164269 - DNA, 25 bp, Homo sapien
caagaggcaaggtgttggaaaacag

SEQ ID NO: 4164270 - DNA, 25 bp, Homo sapien
gagatttgaagtccacatctgccta

SEQ ID NO: 4164271 - DNA, 25 bp, Homo sapien
gaagtccacatctgcctagcagcag

SEQ ID NO: 4164272 - DNA, 25 bp, Homo sapien
atttttaagagactgtctgaccttg

SEQ ID NO: 4164273 - DNA, 25 bp, Homo sapien
tagcagcagcttttacccttttggt

SEQ ID NO: 4164274 - DNA, 25 bp, Homo sapien
cagtcatttggctgaaaagttcaac

SEQ ID NO: 4164275 - DNA, 25 bp, Homo sapien
cagttgaatcttggtgccgaatctt

SEQ ID NO: 4164276 - DNA, 25 bp, Homo sapien
tcttggagcactactggaagattca

SEQ ID NO: 4164277 - DNA, 25 bp, Homo sapien
catcagatgtcacagtgggatatcc

SEQ ID NO: 4164278 - DNA, 25 bp, Homo sapien
tagacaatgtatcgtggagcaggaa

SEQ ID NO: 4164279 - DNA, 25 bp, Homo sapien
tgtcaccttcttctttaatgccttg

SEQ ID NO: 4164280 - DNA, 25 bp, Homo sapien
tagtcgttgtgcattgtttgtcttc

SEQ ID NO: 4164281 - DNA, 25 bp, Homo sapien
cttctttcatagagaggatatcttt

SEQ ID NO: 4164282 - DNA, 25 bp, Homo sapien
cagtatctctgggttatgacctggg

SEQ ID NO: 4164283 - DNA, 25 bp, Homo sapien
ggactttggataactgggcactttc

SEQ ID NO: 4164284 - DNA, 25 bp, Homo sapien
tcaaaatgggcccagtgaatggaca

SEQ ID NO: 4164285 - DNA, 25 bp, Homo sapien
ggttcctcaggaagaatggttggcc

SEQ ID NO: 4164286 - DNA, 25 bp, Homo sapien
gagcctccaggttacatttattttg

SEQ ID NO: 4164287 - DNA, 25 bp, Homo sapien
ttattttgtgccaagcaaagcagaa

SEQ ID NO: 4164288 - DNA, 25 bp, Homo sapien
ttttgtgccaagcaaagcagaacat

SEQ ID NO: 4164289 - DNA, 25 bp, Homo sapien
tattttgtgccaagcaaagcagaac

SEQ ID NO: 4164290 - DNA, 25 bp, Homo sapien
tgtcttggcccccacttagttgctg

SEQ ID NO: 4164291 - DNA, 25 bp, Homo sapien
ctgtcttggcccccacttagttgct

SEQ ID NO: 4164292 - DNA, 25 bp, Homo sapien
gtcttggcccccacttagttgctgt

SEQ ID NO: 4164293 - DNA, 25 bp, Homo sapien
gttgcaggtgtccctttttatcaaa

SEQ ID NO: 4164294 - DNA, 25 bp, Homo sapien
cagttgcaggtgtccctttttatca

SEQ ID NO: 4164295 - DNA, 25 bp, Homo sapien
tcaaagaggcaagcttcccctgaat

SEQ ID NO: 4164296 - DNA, 25 bp, Homo sapien
atcaaagaggcaagcttcccctgaa

SEQ ID NO: 4164297 - DNA, 25 bp, Homo sapien
ggaagatagactcttcctcacttgt

SEQ ID NO: 4164298 - DNA, 25 bp, Homo sapien
ccagacattgggacacaattggaga

SEQ ID NO: 4164299 - DNA, 25 bp, Homo sapien
tgaagaccagacattgggacacaat

SEQ ID NO: 4164300 - DNA, 25 bp, Homo sapien
tgtagattcaaccttatgcaacaga

SEQ ID NO: 4164301 - DNA, 25 bp, Homo sapien
tcagactgctagaagtttaaggctg

SEQ ID NO: 4164302 - DNA, 25 bp, Homo sapien
gataagttccagagatagcagtgct

SEQ ID NO: 4164303 - DNA, 25 bp, Homo sapien
tgtgtcaggataagttccagagata

SEQ ID NO: 4164304 - DNA, 25 bp, Homo sapien
aagtttaaggctgaatgtgtcagga

SEQ ID NO: 4164305 - DNA, 25 bp, Homo sapien
tgatggggaacctagaattccccga

SEQ ID NO: 4164306 - DNA, 25 bp, Homo sapien
tttagaggataatttcatggcgtac

SEQ ID NO: 4164307 - DNA, 25 bp, Homo sapien
ctttaagtatttcacgccactctct

SEQ ID NO: 4164308 - DNA, 25 bp, Homo sapien
ttttgcatttatcctgctcgctgat

SEQ ID NO: 4164309 - DNA, 25 bp, Homo sapien
tcatggcgtacaaaattctaggttg

SEQ ID NO: 4164310 - DNA, 25 bp, Homo sapien
cgggaatccgactacactgaacgtt

SEQ ID NO: 4164311 - DNA, 25 bp, Homo sapien
gttattgttctcaccaccgataggg

SEQ ID NO: 4164312 - DNA, 25 bp, Homo sapien
tcagagtcctcttcgatccagcatg

SEQ ID NO: 4164313 - DNA, 25 bp, Homo sapien
ccatcccgggagaaggcaagtgctt

SEQ ID NO: 4164314 - DNA, 25 bp, Homo sapien
gtgccaagtggaccccggttctgct

SEQ ID NO: 4164315 - DNA, 25 bp, Homo sapien
gagaacagagctagctaagcctcct

SEQ ID NO: 4164316 - DNA, 25 bp, Homo sapien
ggcatttccgttatcctctcgaaga

SEQ ID NO: 4164317 - DNA, 25 bp, Homo sapien
ccacagcgtactggcagggagaaca

SEQ ID NO: 4164318 - DNA, 25 bp, Homo sapien
gcgcgcggggttgcggctgaacctg

SEQ ID NO: 4164319 - DNA, 25 bp, Homo sapien
gccgcgcgcggggttgcggctgaac

SEQ ID NO: 4164320 - DNA, 25 bp, Homo sapien
gcggggttgcggctgaacctgacca

SEQ ID NO: 4164321 - DNA, 25 bp, Homo sapien
tgggcttcggcctcgccccgccgcg

SEQ ID NO: 4164322 - DNA, 25 bp, Homo sapien
ggtggcctcctagaaagatcgccgg

SEQ ID NO: 4164323 - DNA, 25 bp, Homo sapien
ggtggtggtccctcgccaaatagtc

SEQ ID NO: 4164324 - DNA, 25 bp, Homo sapien
taccggcagggaggaaatcgcctcg

SEQ ID NO: 4164325 - DNA, 25 bp, Homo sapien
aatagtcagcgtttggttctccgcg

SEQ ID NO: 4164326 - DNA, 25 bp, Homo sapien
tctatttttgactcacgaggatcca

SEQ ID NO: 4164327 - DNA, 25 bp, Homo sapien
catgcccggccatgtatcaaatctt

SEQ ID NO: 4164328 - DNA, 25 bp, Homo sapien
acacaactcatgctgactggtctca

SEQ ID NO: 4164329 - DNA, 25 bp, Homo sapien
catgtgttacatgtaggcctcctat

SEQ ID NO: 4164330 - DNA, 25 bp, Homo sapien
tgctgcagaggatgggttgataggc

SEQ ID NO: 4164331 - DNA, 25 bp, Homo sapien
tttgcacttgggtcaaaattgctac

SEQ ID NO: 4164332 - DNA, 25 bp, Homo sapien
tagcctcccctgacaaattaaggtg

SEQ ID NO: 4164333 - DNA, 25 bp, Homo sapien
tcttaatacctgcaggatgcctcct

SEQ ID NO: 4164334 - DNA, 25 bp, Homo sapien
ggccagaagtcaggatcaggaagcc

SEQ ID NO: 4164335 - DNA, 25 bp, Homo sapien
tatttgccttgccaataggaccatg

SEQ ID NO: 4164336 - DNA, 25 bp, Homo sapien
ccttgccaataggaccatgctgttc

SEQ ID NO: 4164337 - DNA, 25 bp, Homo sapien
ttctggcctgctgccaatttaggct

SEQ ID NO: 4164338 - DNA, 25 bp, Homo sapien
ggttaatcttgttattcatctcctc

SEQ ID NO: 4164339 - DNA, 25 bp, Homo sapien
tggtcgtggtgatgcatgtctgtta

SEQ ID NO: 4164340 - DNA, 25 bp, Homo sapien
ctggtcgtggtgatgcatgtctgtt

SEQ ID NO: 4164341 - DNA, 25 bp, Homo sapien
tcgtggtgatgcatgtctgttatcc

SEQ ID NO: 4164342 - DNA, 25 bp, Homo sapien
cagctactcaggaggctgaggcagg

SEQ ID NO: 4164343 - DNA, 25 bp, Homo sapien
tcccgaagacttcatggtatcacag

SEQ ID NO: 4164344 - DNA, 25 bp, Homo sapien
tgcaagcatctccatcaaggtagtg

SEQ ID NO: 4164345 - DNA, 25 bp, Homo sapien
tcacaggagttttgttgtcagccca

SEQ ID NO: 4164346 - DNA, 25 bp, Homo sapien
tattggtgagctcctgtgacaaacc

SEQ ID NO: 4164347 - DNA, 25 bp, Homo sapien
cattgttaacctcaggactggctac

SEQ ID NO: 4164348 - DNA, 25 bp, Homo sapien
gacagaagggatttcccagaaagga

SEQ ID NO: 4164349 - DNA, 25 bp, Homo sapien
tagtaataaggtgcccagacagaag

SEQ ID NO: 4164350 - DNA, 25 bp, Homo sapien
tacacttgtgaaaccagtcctggtt

SEQ ID NO: 4164351 - DNA, 25 bp, Homo sapien
tagggtttagcattacaatgcccat

SEQ ID NO: 4164352 - DNA, 25 bp, Homo sapien
atttgttcaattgtagggtttagca

SEQ ID NO: 4164353 - DNA, 25 bp, Homo sapien
ttgtagggtttagcattacaatgcc

SEQ ID NO: 4164354 - DNA, 25 bp, Homo sapien
tcaattgtagggtttagcattacaa

SEQ ID NO: 4164355 - DNA, 25 bp, Homo sapien
catgtgattattcagagatcctggc

SEQ ID NO: 4164356 - DNA, 25 bp, Homo sapien
aaatctgctccatgtgattattcag

SEQ ID NO: 4164357 - DNA, 25 bp, Homo sapien
tcaccatgtccttggtccactggat

SEQ ID NO: 4164358 - DNA, 25 bp, Homo sapien
tgtccttggtccactggattctctt

SEQ ID NO: 4164359 - DNA, 25 bp, Homo sapien
tggagaagagctggtctaaggactt

SEQ ID NO: 4164360 - DNA, 25 bp, Homo sapien
tgtgaatggagaagagctggtctaa

SEQ ID NO: 4164361 - DNA, 25 bp, Homo sapien
aagggctctccaaagtgtgaatgga

SEQ ID NO: 4164362 - DNA, 25 bp, Homo sapien
aggagagctagcaattcagaagggc

SEQ ID NO: 4164363 - DNA, 25 bp, Homo sapien
ccatctactctagacatgaccaagt

SEQ ID NO: 4164364 - DNA, 25 bp, Homo sapien
ccaagtccatagctgcagcagagtc

SEQ ID NO: 4164365 - DNA, 25 bp, Homo sapien
agacatgaccaagtccatagctgca

SEQ ID NO: 4164366 - DNA, 25 bp, Homo sapien
tgaccaagtccatagctgcagcaga

SEQ ID NO: 4164367 - DNA, 25 bp, Homo sapien
aggagcattgtctgaaggtgcagtt

SEQ ID NO: 4164368 - DNA, 25 bp, Homo sapien
ggtgcagttgcaatacaggaagtac

SEQ ID NO: 4164369 - DNA, 25 bp, Homo sapien
tggagacaggagataggcgataggc

SEQ ID NO: 4164370 - DNA, 25 bp, Homo sapien
tacagttggcgagaaagtctgcttt

SEQ ID NO: 4164371 - DNA, 25 bp, Homo sapien
ccctcagcggccagtcagggtttct

SEQ ID NO: 4164372 - DNA, 25 bp, Homo sapien
gtttctctatgggaaagtggagaga

SEQ ID NO: 4164373 - DNA, 25 bp, Homo sapien
tgcaacccggagagactgaaaacac

SEQ ID NO: 4164374 - DNA, 25 bp, Homo sapien
cgtgtgtgtagctagccctcagcgg

SEQ ID NO: 4164375 - DNA, 25 bp, Homo sapien
cggctcgcaagtgagtaggaaaaca

SEQ ID NO: 4164376 - DNA, 25 bp, Homo sapien
aaacagaaagtgaggggagtgcgcc

SEQ ID NO: 4164377 - DNA, 25 bp, Homo sapien
ctcctgccgcggagtccttggggct

SEQ ID NO: 4164378 - DNA, 25 bp, Homo sapien
ctgcagcccggcggctcgcaagtga

SEQ ID NO: 4164379 - DNA, 25 bp, Homo sapien
cacactccgggcgtaaaagtctgct

SEQ ID NO: 4164380 - DNA, 25 bp, Homo sapien
tccataacggaggagcaacgagtgg

SEQ ID NO: 4164381 - DNA, 25 bp, Homo sapien
tccgggcgtaaaagtctgctaaaca

SEQ ID NO: 4164382 - DNA, 25 bp, Homo sapien
aacacctttccataacggaggagca

SEQ ID NO: 4164383 - DNA, 25 bp, Homo sapien
caaatggaaagtacacagggaggaa

SEQ ID NO: 4164384 - DNA, 25 bp, Homo sapien
aggcaaatggaaagtacacagggag

SEQ ID NO: 4164385 - DNA, 25 bp, Homo sapien
aggaagatgaactgcggcaaagcct

SEQ ID NO: 4164386 - DNA, 25 bp, Homo sapien
cagggaggaagatgaactgcggcaa

SEQ ID NO: 4164387 - DNA, 25 bp, Homo sapien
taaactgacttatgctgtgggaaac

SEQ ID NO: 4164388 - DNA, 25 bp, Homo sapien
gagagagtaagcaaatgtcagtcac

SEQ ID NO: 4164389 - DNA, 25 bp, Homo sapien
gctgtaaccccaataaagcatcttc

SEQ ID NO: 4164390 - DNA, 25 bp, Homo sapien
tgcttccctgtacgaacagtttgca

SEQ ID NO: 4164391 - DNA, 25 bp, Homo sapien
taaacgctagatttaccacactgcc

SEQ ID NO: 4164392 - DNA, 25 bp, Homo sapien
tcctaatttctccaaacatgtaagt

SEQ ID NO: 4164393 - DNA, 25 bp, Homo sapien
aattagtgcactaaacgctagattt

SEQ ID NO: 4164394 - DNA, 25 bp, Homo sapien
tagatttaccacactgccaatccca

SEQ ID NO: 4164395 - DNA, 25 bp, Homo sapien
tacacattatgtcagcaatccagga

SEQ ID NO: 4164396 - DNA, 25 bp, Homo sapien
aatggacactaccagaaaggtctag

SEQ ID NO: 4164397 - DNA, 25 bp, Homo sapien
ggttttctgcagattaggctcactg

SEQ ID NO: 4164398 - DNA, 25 bp, Homo sapien
tccacttgggagtcatatatctgaa

SEQ ID NO: 4164399 - DNA, 25 bp, Homo sapien
tgtgaaatgcaaactagggcttcag

SEQ ID NO: 4164400 - DNA, 25 bp, Homo sapien
gagctcttagtgaacaaaccaccta

SEQ ID NO: 4164401 - DNA, 25 bp, Homo sapien
taggaaacaatatagatgagccacc

SEQ ID NO: 4164402 - DNA, 25 bp, Homo sapien
cattttgacactccgattggcctgc

SEQ ID NO: 4164403 - DNA, 25 bp, Homo sapien
tgaaaagtgtggctttataaatatt

SEQ ID NO: 4164404 - DNA, 25 bp, Homo sapien
catgagttgcacaacatcttcagac

SEQ ID NO: 4164405 - DNA, 25 bp, Homo sapien
gagttgcacaacatcttcagaccta

SEQ ID NO: 4164406 - DNA, 25 bp, Homo sapien
gttgcacaacatcttcagacctatt

SEQ ID NO: 4164407 - DNA, 25 bp, Homo sapien
aatataccccttgcttttacccatg

SEQ ID NO: 4164408 - DNA, 25 bp, Homo sapien
ttaaagcacaggtatgccacgttgg

SEQ ID NO: 4164409 - DNA, 25 bp, Homo sapien
ggagcatttgatgtaacaattgtca

SEQ ID NO: 4164410 - DNA, 25 bp, Homo sapien
tttagtagtatagagctgtgaagcc

SEQ ID NO: 4164411 - DNA, 25 bp, Homo sapien
aaggtaccctcagtggtgaaatgtt

SEQ ID NO: 4164412 - DNA, 25 bp, Homo sapien
gtgaaatgttaaacaatgagatgga

SEQ ID NO: 4164413 - DNA, 25 bp, Homo sapien
aatgttaaacaatgagatggacttc

SEQ ID NO: 4164414 - DNA, 25 bp, Homo sapien
caggagagataccactcaggcccat

SEQ ID NO: 4164415 - DNA, 25 bp, Homo sapien
tcactatctagattctcgaacttac

SEQ ID NO: 4164416 - DNA, 25 bp, Homo sapien
ttctgggtatatctgtacagtttta

SEQ ID NO: 4164417 - DNA, 25 bp, Homo sapien
tttgtattctctcacataactggca

SEQ ID NO: 4164418 - DNA, 25 bp, Homo sapien
gaagacaatccccattaatacatga

SEQ ID NO: 4164419 - DNA, 25 bp, Homo sapien
gaaagccatgccttattgccatagg

SEQ ID NO: 4164420 - DNA, 25 bp, Homo sapien
tatggcctccagtagacagaatgaa

SEQ ID NO: 4164421 - DNA, 25 bp, Homo sapien
tgaatgccacgtgggaagcctagga

SEQ ID NO: 4164422 - DNA, 25 bp, Homo sapien
taagaaattcagtgggagcctagac

SEQ ID NO: 4164423 - DNA, 25 bp, Homo sapien
agatggggtttcgctatgttggcca

SEQ ID NO: 4164424 - DNA, 25 bp, Homo sapien
cagtcaaattttttatttcttatag

SEQ ID NO: 4164425 - DNA, 25 bp, Homo sapien
gatggggtttcgctatgttggccag

SEQ ID NO: 4164426 - DNA, 25 bp, Homo sapien
catgcccagtcaaattttttatttc

SEQ ID NO: 4164427 - DNA, 25 bp, Homo sapien
ctaaagaggagcaagaaaggtcatt

SEQ ID NO: 4164428 - DNA, 25 bp, Homo sapien
aggtcattattgctcttgttaagaa

SEQ ID NO: 4164429 - DNA, 25 bp, Homo sapien
gaggagcaagaaaggtcattattgc

SEQ ID NO: 4164430 - DNA, 25 bp, Homo sapien
tgttaagaaaataactccatggata

SEQ ID NO: 4164431 - DNA, 25 bp, Homo sapien
taatgcatcatcactacctactgag

SEQ ID NO: 4164432 - DNA, 25 bp, Homo sapien
gacacagacagggtaatggatttcc

SEQ ID NO: 4164433 - DNA, 25 bp, Homo sapien
actgaatatcccaccaattgccatt

SEQ ID NO: 4164434 - DNA, 25 bp, Homo sapien
gcaagacccaaactggaccagggga

SEQ ID NO: 4164435 - DNA, 25 bp, Homo sapien
caaccatgtcactgagccaaatgaa

SEQ ID NO: 4164436 - DNA, 25 bp, Homo sapien
ttctaccaaactgtgaggaggatta

SEQ ID NO: 4164437 - DNA, 25 bp, Homo sapien
ccctttctaccaaactgtgaggagg

SEQ ID NO: 4164438 - DNA, 25 bp, Homo sapien
ttttacaaccatgtcactgagccaa

SEQ ID NO: 4164439 - DNA, 25 bp, Homo sapien
tagaatccaagaggttaagtgcctt

SEQ ID NO: 4164440 - DNA, 25 bp, Homo sapien
attagaatctaggtgtcagagtccc

SEQ ID NO: 4164441 - DNA, 25 bp, Homo sapien
cagagtccctagatatgtgatgaaa

SEQ ID NO: 4164442 - DNA, 25 bp, Homo sapien
aagtgccttgttcatactgacacag

SEQ ID NO: 4164443 - DNA, 25 bp, Homo sapien
cccttccccatctaatagtccccag

SEQ ID NO: 4164444 - DNA, 25 bp, Homo sapien
cttccccatctaatagtccccaggg

SEQ ID NO: 4164445 - DNA, 25 bp, Homo sapien
tcccttccccatctaatagtcccca

SEQ ID NO: 4164446 - DNA, 25 bp, Homo sapien
tacatttgctgtatccaatccactg

SEQ ID NO: 4164447 - DNA, 25 bp, Homo sapien
tcggtgatgccagaaagaaaggatc

SEQ ID NO: 4164448 - DNA, 25 bp, Homo sapien
tcctgatcattccagggcaggctct

SEQ ID NO: 4164449 - DNA, 25 bp, Homo sapien
cattagtaatcgaagatgcagcatc

SEQ ID NO: 4164450 - DNA, 25 bp, Homo sapien
tcacatcagtgtaaaaaccagggtt

SEQ ID NO: 4164451 - DNA, 25 bp, Homo sapien
tatacagaacttaagacctatgcat

SEQ ID NO: 4164452 - DNA, 25 bp, Homo sapien
tggtatatcaagtagaagccacaaa

SEQ ID NO: 4164453 - DNA, 25 bp, Homo sapien
caccagtgtacgcttttgttaatac

SEQ ID NO: 4164454 - DNA, 25 bp, Homo sapien
catccctgaagaatacagagtggta

SEQ ID NO: 4164455 - DNA, 25 bp, Homo sapien
tagggatatccattatttggcctca

SEQ ID NO: 4164456 - DNA, 25 bp, Homo sapien
caaatcgaagccaaacagaataacc

SEQ ID NO: 4164457 - DNA, 25 bp, Homo sapien
gaactctctttgataagccaaatcg

SEQ ID NO: 4164458 - DNA, 25 bp, Homo sapien
cacttgtctggcatctagggatatc

SEQ ID NO: 4164459 - DNA, 25 bp, Homo sapien
gaggttaagagaccaagaattctaa

SEQ ID NO: 4164460 - DNA, 25 bp, Homo sapien
aagacacatgtttgctttcacccat

SEQ ID NO: 4164461 - DNA, 25 bp, Homo sapien
gataccacctaggaggaactgagaa

SEQ ID NO: 4164462 - DNA, 25 bp, Homo sapien
catgtgagtcgacgaggaaaaaact

SEQ ID NO: 4164463 - DNA, 25 bp, Homo sapien
agagaaaacgcccactagactacag

SEQ ID NO: 4164464 - DNA, 25 bp, Homo sapien
tcaatgacactggtatacgaaagag

SEQ ID NO: 4164465 - DNA, 25 bp, Homo sapien
ccatgagacatgacactacaaagtt

SEQ ID NO: 4164466 - DNA, 25 bp, Homo sapien
cccctgtgtggaggattgagatgat

SEQ ID NO: 4164467 - DNA, 25 bp, Homo sapien
gcttagggagaagctacaaatacct

SEQ ID NO: 4164468 - DNA, 25 bp, Homo sapien
gttaataatataaaggcaaccacaa

SEQ ID NO: 4164469 - DNA, 25 bp, Homo sapien
tacctataactgtagatgttgtgag

SEQ ID NO: 4164470 - DNA, 25 bp, Homo sapien
ggagaataagagaatactcaagttc

SEQ ID NO: 4164471 - DNA, 25 bp, Homo sapien
gttgtaccacttcactaacccagga

SEQ ID NO: 4164472 - DNA, 25 bp, Homo sapien
tggacacttggacagtaacaacagt

SEQ ID NO: 4164473 - DNA, 25 bp, Homo sapien
tatactgccctctacagccttgagt

SEQ ID NO: 4164474 - DNA, 25 bp, Homo sapien
tgaaacaattctaatggccagtggt

SEQ ID NO: 4164475 - DNA, 25 bp, Homo sapien
ttttacattgtcaaacatacaagaa

SEQ ID NO: 4164476 - DNA, 25 bp, Homo sapien
gcctcaacacattttacattgtcaa

SEQ ID NO: 4164477 - DNA, 25 bp, Homo sapien
cctggcctcaacacattttacattg

SEQ ID NO: 4164478 - DNA, 25 bp, Homo sapien
tggcctcaacacattttacattgtc

SEQ ID NO: 4164479 - DNA, 25 bp, Homo sapien
tgaactaaatggaggcctgcaactg

SEQ ID NO: 4164480 - DNA, 25 bp, Homo sapien
ccccggaagagaataatgtgcagcg

SEQ ID NO: 4164481 - DNA, 25 bp, Homo sapien
taggtctatgaagcaccccagtggt

SEQ ID NO: 4164482 - DNA, 25 bp, Homo sapien
aagtcaccaaggaagctggtccccg

SEQ ID NO: 4164483 - DNA, 25 bp, Homo sapien
gaaatgttttcagtgcggcagtcta

SEQ ID NO: 4164484 - DNA, 25 bp, Homo sapien
acagagctggttataacaccggcac

SEQ ID NO: 4164485 - DNA, 25 bp, Homo sapien
tctttcagtgaaagcagaccagctt

SEQ ID NO: 4164486 - DNA, 25 bp, Homo sapien
taacaccggcacgatgtgacaacaa

SEQ ID NO: 4164487 - DNA, 25 bp, Homo sapien
cagaaaagcccaggaaggtatcaga

SEQ ID NO: 4164488 - DNA, 25 bp, Homo sapien
aatttgttacacttcaacagataac

SEQ ID NO: 4164489 - DNA, 25 bp, Homo sapien
cacagctaagtgactcctaaattcc

SEQ ID NO: 4164490 - DNA, 25 bp, Homo sapien
tatcagatatgctaggaacaggaat

SEQ ID NO: 4164491 - DNA, 25 bp, Homo sapien
taggatgagcagcaagctaaacagt

SEQ ID NO: 4164492 - DNA, 25 bp, Homo sapien
tcctgtccaggtgattaggatgagc

SEQ ID NO: 4164493 - DNA, 25 bp, Homo sapien
tattgtaatggaaaagactcctgtc

SEQ ID NO: 4164494 - DNA, 25 bp, Homo sapien
taggatgagcctaaaaatgagccca

SEQ ID NO: 4164495 - DNA, 25 bp, Homo sapien
gaagccactcagttcaacccatcga

SEQ ID NO: 4164496 - DNA, 25 bp, Homo sapien
cacaggattacagaatgttggaggc

SEQ ID NO: 4164497 - DNA, 25 bp, Homo sapien
tccatcagggaagtccaatcacatt

SEQ ID NO: 4164498 - DNA, 25 bp, Homo sapien
tcacatttccatagctgacgccaag

SEQ ID NO: 4164499 - DNA, 25 bp, Homo sapien
cagaaagaattgttccaggtatatt

SEQ ID NO: 4164500 - DNA, 25 bp, Homo sapien
ttccaggtatattaattccaaggat

SEQ ID NO: 4164501 - DNA, 25 bp, Homo sapien
aggtatattaattccaaggatattc

SEQ ID NO: 4164502 - DNA, 25 bp, Homo sapien
ccaggtatattaattccaaggatat

SEQ ID NO: 4164503 - DNA, 25 bp, Homo sapien
ttgggaagattcataagctctatca

SEQ ID NO: 4164504 - DNA, 25 bp, Homo sapien
tgggaagattcataagctctatcaa

SEQ ID NO: 4164505 - DNA, 25 bp, Homo sapien
catcaggaataacgacagggaagcc

SEQ ID NO: 4164506 - DNA, 25 bp, Homo sapien
ctacatcaggaataacgacagggaa

SEQ ID NO: 4164507 - DNA, 25 bp, Homo sapien
tccattgtgatttcagtggaacatc

SEQ ID NO: 4164508 - DNA, 25 bp, Homo sapien
cagtggaacatcagaacttccagct

SEQ ID NO: 4164509 - DNA, 25 bp, Homo sapien
ccagcttctgtgatgcagcaggatt

SEQ ID NO: 4164510 - DNA, 25 bp, Homo sapien
tcaagtcaagactttccattgtgat

SEQ ID NO: 4164511 - DNA, 25 bp, Homo sapien
tgacagcacataattcttgactgcc

SEQ ID NO: 4164512 - DNA, 25 bp, Homo sapien
taatggagatcaataaaagtcacac

SEQ ID NO: 4164513 - DNA, 25 bp, Homo sapien
tcacacttccttgatcatgctgaga

SEQ ID NO: 4164514 - DNA, 25 bp, Homo sapien
tccaggtaagtaagtaagatgtacc

SEQ ID NO: 4164515 - DNA, 25 bp, Homo sapien
tgatttcaagatgcagctacaccca

SEQ ID NO: 4164516 - DNA, 25 bp, Homo sapien
cccagattgggaaaactctaggcat

SEQ ID NO: 4164517 - DNA, 25 bp, Homo sapien
ttcagataccagtaaagcaatccca

SEQ ID NO: 4164518 - DNA, 25 bp, Homo sapien
tcaattaaagccaacagcagtacaa

SEQ ID NO: 4164519 - DNA, 25 bp, Homo sapien
caaaaggggaaggtagacacataat

SEQ ID NO: 4164520 - DNA, 25 bp, Homo sapien
tagaagcaatattcagtgatatagt

SEQ ID NO: 4164521 - DNA, 25 bp, Homo sapien
catagaagcaatattcagtgatata

SEQ ID NO: 4164522 - DNA, 25 bp, Homo sapien
aagcaatattcagtgatatagttac

SEQ ID NO: 4164523 - DNA, 25 bp, Homo sapien
cattgctcagatggctacttagtga

SEQ ID NO: 4164524 - DNA, 25 bp, Homo sapien
cataattaactgtattctggctgac

SEQ ID NO: 4164525 - DNA, 25 bp, Homo sapien
aacaggtcagataaagtgtccggct

SEQ ID NO: 4164526 - DNA, 25 bp, Homo sapien
tgaagtctgccatggtaatcttggt

SEQ ID NO: 4164527 - DNA, 25 bp, Homo sapien
aatttgaagactaatccaggcccaa

SEQ ID NO: 4164528 - DNA, 25 bp, Homo sapien
actagagctcgctgcctacacagag

SEQ ID NO: 4164529 - DNA, 25 bp, Homo sapien
gacttttccggcatcttaatcactg

SEQ ID NO: 4164530 - DNA, 25 bp, Homo sapien
cagccctttctggtggtacaagcca

SEQ ID NO: 4164531 - DNA, 25 bp, Homo sapien
tacgaattcatcacgtttactgagc

SEQ ID NO: 4164532 - DNA, 25 bp, Homo sapien
tgcttatcaacaccaagttcagtgg

SEQ ID NO: 4164533 - DNA, 25 bp, Homo sapien
gaaatgttatgagcaagttccccgc

SEQ ID NO: 4164534 - DNA, 25 bp, Homo sapien
actcctctccctgaacgaagtctgg

SEQ ID NO: 4164535 - DNA, 25 bp, Homo sapien
cagaagttttcagtggcccatatgc

SEQ ID NO: 4164536 - DNA, 25 bp, Homo sapien
tcagaagttttcagtggcccatatg

SEQ ID NO: 4164537 - DNA, 25 bp, Homo sapien
gctcagaagttttcagtggcccata

SEQ ID NO: 4164538 - DNA, 25 bp, Homo sapien
tgctcagaagttttcagtggcccat

SEQ ID NO: 4164539 - DNA, 25 bp, Homo sapien
aaccagtctttccaatgtctacctt

SEQ ID NO: 4164540 - DNA, 25 bp, Homo sapien
accagtctttccaatgtctaccttt

SEQ ID NO: 4164541 - DNA, 25 bp, Homo sapien
cacttattagcagcgtaaccttggg

SEQ ID NO: 4164542 - DNA, 25 bp, Homo sapien
taaacctcttgctaggaactgatgc

SEQ ID NO: 4164543 - DNA, 25 bp, Homo sapien
taaaaggatacccaaacatgtgagg

SEQ ID NO: 4164544 - DNA, 25 bp, Homo sapien
tctagtctcactaaacccagggtac

SEQ ID NO: 4164545 - DNA, 25 bp, Homo sapien
taccaggtactgctagaggcttggg

SEQ ID NO: 4164546 - DNA, 25 bp, Homo sapien
agatgataccaggtactgctagagg

SEQ ID NO: 4164547 - DNA, 25 bp, Homo sapien
gataccaggtactgctagaggcttg

SEQ ID NO: 4164548 - DNA, 25 bp, Homo sapien
tgataccaggtactgctagaggctt

SEQ ID NO: 4164549 - DNA, 25 bp, Homo sapien
agtggaacaattcgcctctggtatt

SEQ ID NO: 4164550 - DNA, 25 bp, Homo sapien
ggaacaattcgcctctggtatttct

SEQ ID NO: 4164551 - DNA, 25 bp, Homo sapien
gaacaattcgcctctggtatttctc

SEQ ID NO: 4164552 - DNA, 25 bp, Homo sapien
tacagtggaacaattcgcctctggt

SEQ ID NO: 4164553 - DNA, 25 bp, Homo sapien
tggctcgaaggcgttacggtactta

SEQ ID NO: 4164554 - DNA, 25 bp, Homo sapien
ctttctggctcgaaggcgttacggt

SEQ ID NO: 4164555 - DNA, 25 bp, Homo sapien
tctggctcgaaggcgttacggtact

SEQ ID NO: 4164556 - DNA, 25 bp, Homo sapien
ttctggctcgaaggcgttacggtac

SEQ ID NO: 4164557 - DNA, 25 bp, Homo sapien
aaactgctgtgggagcctaagaaaa

SEQ ID NO: 4164558 - DNA, 25 bp, Homo sapien
tgtgggagcctaagaaaagcagctt

SEQ ID NO: 4164559 - DNA, 25 bp, Homo sapien
tgggagcctaagaaaagcagctttc

SEQ ID NO: 4164560 - DNA, 25 bp, Homo sapien
tgctgtgggagcctaagaaaagcag

SEQ ID NO: 4164561 - DNA, 25 bp, Homo sapien
caaagcagcttctgtagagcaatcc

SEQ ID NO: 4164562 - DNA, 25 bp, Homo sapien
gcttctgtagagcaatccagatcag

SEQ ID NO: 4164563 - DNA, 25 bp, Homo sapien
ttctgtagagcaatccagatcagtg

SEQ ID NO: 4164564 - DNA, 25 bp, Homo sapien
gcagcttctgtagagcaatccagat

SEQ ID NO: 4164565 - DNA, 25 bp, Homo sapien
aatacagctcactgctgtagcttga

SEQ ID NO: 4164566 - DNA, 25 bp, Homo sapien
taatatccggtactctaaaatcagc

SEQ ID NO: 4164567 - DNA, 25 bp, Homo sapien
agtaatatccggtactctaaaatca

SEQ ID NO: 4164568 - DNA, 25 bp, Homo sapien
tatccggtactctaaaatcagcatt

SEQ ID NO: 4164569 - DNA, 25 bp, Homo sapien
aatcagcatttctcagtgaggaagc

SEQ ID NO: 4164570 - DNA, 25 bp, Homo sapien
tcacatcaatccaaccattcgtgtg

SEQ ID NO: 4164571 - DNA, 25 bp, Homo sapien
tgtgctcagggaagaactacctgga

SEQ ID NO: 4164572 - DNA, 25 bp, Homo sapien
actacctggaacactgagaggctcc

SEQ ID NO: 4164573 - DNA, 25 bp, Homo sapien
aaatcaatggggagttcaagtgccc

SEQ ID NO: 4164574 - DNA, 25 bp, Homo sapien
ctctgggactcattcaaagcagtgt

SEQ ID NO: 4164575 - DNA, 25 bp, Homo sapien
tgggactcattcaaagcagtgtgta

SEQ ID NO: 4164576 - DNA, 25 bp, Homo sapien
atctctgggactcattcaaagcagt

SEQ ID NO: 4164577 - DNA, 25 bp, Homo sapien
ggactcattcaaagcagtgtgtaga

SEQ ID NO: 4164578 - DNA, 25 bp, Homo sapien
cattggcaagaactcaaagcacagg

SEQ ID NO: 4164579 - DNA, 25 bp, Homo sapien
aacctgaggcagagataacatattt

SEQ ID NO: 4164580 - DNA, 25 bp, Homo sapien
tccattcgtcaaatgggtagaacat

SEQ ID NO: 4164581 - DNA, 25 bp, Homo sapien
gaagacaagttcatggagtctccat

SEQ ID NO: 4164582 - DNA, 25 bp, Homo sapien
tgtgtttgcctcagctcatgtctct

SEQ ID NO: 4164583 - DNA, 25 bp, Homo sapien
cttctgcgcagtcctttctctgctc

SEQ ID NO: 4164584 - DNA, 25 bp, Homo sapien
ttctgcgcagtcctttctctgctct

SEQ ID NO: 4164585 - DNA, 25 bp, Homo sapien
gcttctgcgcagtcctttctctgct

SEQ ID NO: 4164586 - DNA, 25 bp, Homo sapien
ctcctgctgggctggtgcctgacct

SEQ ID NO: 4164587 - DNA, 25 bp, Homo sapien
gggctggtgcctgacctgctctcca

SEQ ID NO: 4164588 - DNA, 25 bp, Homo sapien
ctgctgggctggtgcctgacctgct

SEQ ID NO: 4164589 - DNA, 25 bp, Homo sapien
ctgacctgctctccacacccgccac

SEQ ID NO: 4164590 - DNA, 25 bp, Homo sapien
tagtgttttgacaactcccctgcac

SEQ ID NO: 4164591 - DNA, 25 bp, Homo sapien
caagacccgggtcaaatatctcttc

SEQ ID NO: 4164592 - DNA, 25 bp, Homo sapien
aagccctaagtcaaagtccatcact

SEQ ID NO: 4164593 - DNA, 25 bp, Homo sapien
ctgttaggtcaagcacttatcatag

SEQ ID NO: 4164594 - DNA, 25 bp, Homo sapien
tctgctgaatgatccttatttctat

SEQ ID NO: 4164595 - DNA, 25 bp, Homo sapien
ctgctgaatgatccttatttctatt

SEQ ID NO: 4164596 - DNA, 25 bp, Homo sapien
actgaagacactttcgttttggtcg

SEQ ID NO: 4164597 - DNA, 25 bp, Homo sapien
ctgaagacactttcgttttggtcgt

SEQ ID NO: 4164598 - DNA, 25 bp, Homo sapien
ctttgctagcaatggatgccactga

SEQ ID NO: 4164599 - DNA, 25 bp, Homo sapien
gtttctttgctagcaatggatgcca

SEQ ID NO: 4164600 - DNA, 25 bp, Homo sapien
caaagactgggggcaagtgcagcca

SEQ ID NO: 4164601 - DNA, 25 bp, Homo sapien
cacaaagactgggggcaagtgcagc

SEQ ID NO: 4164602 - DNA, 25 bp, Homo sapien
atcacaaagactgggggcaagtgca

SEQ ID NO: 4164603 - DNA, 25 bp, Homo sapien
acaaagactgggggcaagtgcagcc

SEQ ID NO: 4164604 - DNA, 25 bp, Homo sapien
ggttatgtgactgaagagccagctg

SEQ ID NO: 4164605 - DNA, 25 bp, Homo sapien
tgctgaggcctgatgccagagaaag

SEQ ID NO: 4164606 - DNA, 25 bp, Homo sapien
tatgtgactgaagagccagctgctg

SEQ ID NO: 4164607 - DNA, 25 bp, Homo sapien
ctgcatggttatgtgactgaagagc

SEQ ID NO: 4164608 - DNA, 25 bp, Homo sapien
ccttagagggtatccagatgatgtc

SEQ ID NO: 4164609 - DNA, 25 bp, Homo sapien
taattcctgatgaaagccaagagag

SEQ ID NO: 4164610 - DNA, 25 bp, Homo sapien
ggcaaggcccctgttcttatactga

SEQ ID NO: 4164611 - DNA, 25 bp, Homo sapien
ccaagagagactgaatggatgtcaa

SEQ ID NO: 4164612 - DNA, 25 bp, Homo sapien
tagcacctcggttatcaagcctggg

SEQ ID NO: 4164613 - DNA, 25 bp, Homo sapien
ggctcgctgctctggtgattcatca

SEQ ID NO: 4164614 - DNA, 25 bp, Homo sapien
tgcattcattggtctccgggctcgc

SEQ ID NO: 4164615 - DNA, 25 bp, Homo sapien
aacatcttgctctaggccatcggcc

SEQ ID NO: 4164616 - DNA, 25 bp, Homo sapien
tcacaggcttgtttgtggtaggaca

SEQ ID NO: 4164617 - DNA, 25 bp, Homo sapien
tttctttcgtggattgacagtgggt

SEQ ID NO: 4164618 - DNA, 25 bp, Homo sapien
tgtggtaggacaccatttgtagcca

SEQ ID NO: 4164619 - DNA, 25 bp, Homo sapien
tctttcgtggattgacagtgggtgt

SEQ ID NO: 4164620 - DNA, 25 bp, Homo sapien
aggtcccataacaaatggcaccatc

SEQ ID NO: 4164621 - DNA, 25 bp, Homo sapien
ctaaaggtcccataacaaatggcac

SEQ ID NO: 4164622 - DNA, 25 bp, Homo sapien
tactaaaggtcccataacaaatggc

SEQ ID NO: 4164623 - DNA, 25 bp, Homo sapien
agtactaaaggtcccataacaaatg

SEQ ID NO: 4164624 - DNA, 25 bp, Homo sapien
tcatggtaataaatgatttagcata

SEQ ID NO: 4164625 - DNA, 25 bp, Homo sapien
tatttcatggtaataaatgatttag

SEQ ID NO: 4164626 - DNA, 25 bp, Homo sapien
catggtaataaatgatttagcatac

SEQ ID NO: 4164627 - DNA, 25 bp, Homo sapien
tttcatggtaataaatgatttagca

SEQ ID NO: 4164628 - DNA, 25 bp, Homo sapien
ctctggtgtgccaagagcatgttct

SEQ ID NO: 4164629 - DNA, 25 bp, Homo sapien
gcatgttctccagctaacagcagca

SEQ ID NO: 4164630 - DNA, 25 bp, Homo sapien
cggaggatgtgtgatttgtcaatca

SEQ ID NO: 4164631 - DNA, 25 bp, Homo sapien
tacggaggatgtgtgatttgtcaat

SEQ ID NO: 4164632 - DNA, 25 bp, Homo sapien
cttacggaggatgtgtgatttgtca

SEQ ID NO: 4164633 - DNA, 25 bp, Homo sapien
gaggatgtgtgatttgtcaatcaag

SEQ ID NO: 4164634 - DNA, 25 bp, Homo sapien
tctctgagagcccaacgagcatact

SEQ ID NO: 4164635 - DNA, 25 bp, Homo sapien
tcaatttcatcaacgcagcttaggg

SEQ ID NO: 4164636 - DNA, 25 bp, Homo sapien
tcttgtgaaggatgcctcctttatc

SEQ ID NO: 4164637 - DNA, 25 bp, Homo sapien
ttctctttcgagcccagctctcttt

SEQ ID NO: 4164638 - DNA, 25 bp, Homo sapien
gaaacaatggtgacttctgacgtaa

SEQ ID NO: 4164639 - DNA, 25 bp, Homo sapien
ttctgacgtaattcaggagattctg

SEQ ID NO: 4164640 - DNA, 25 bp, Homo sapien
caatggtgacttctgacgtaattca

SEQ ID NO: 4164641 - DNA, 25 bp, Homo sapien
ggtgacttctgacgtaattcaggag

SEQ ID NO: 4164642 - DNA, 25 bp, Homo sapien
cagagtgggacgtacttgaagatat

SEQ ID NO: 4164643 - DNA, 25 bp, Homo sapien
aagcatcagagtgggacgtacttga

SEQ ID NO: 4164644 - DNA, 25 bp, Homo sapien
catcagagtgggacgtacttgaaga

SEQ ID NO: 4164645 - DNA, 25 bp, Homo sapien
gcatcagagtgggacgtacttgaag

SEQ ID NO: 4164646 - DNA, 25 bp, Homo sapien
tactggctgaagctacatcacattg

SEQ ID NO: 4164647 - DNA, 25 bp, Homo sapien
taacaggtcgtattcaccactgcaa

SEQ ID NO: 4164648 - DNA, 25 bp, Homo sapien
tcggctgacaaaccaaggaagtctg

SEQ ID NO: 4164649 - DNA, 25 bp, Homo sapien
tggtgtgtgctctcttcggctgaca

SEQ ID NO: 4164650 - DNA, 25 bp, Homo sapien
taaatgctcaaggttgctggaagcc

SEQ ID NO: 4164651 - DNA, 25 bp, Homo sapien
tttacaggtacagggaagcatttta

SEQ ID NO: 4164652 - DNA, 25 bp, Homo sapien
gtgtgtcactcccacatatcctgtg

SEQ ID NO: 4164653 - DNA, 25 bp, Homo sapien
tggatgcactacctgcctttagagt

SEQ ID NO: 4164654 - DNA, 25 bp, Homo sapien
cagactttccacagcgttttacagg

SEQ ID NO: 4164655 - DNA, 25 bp, Homo sapien
tcagcaccacccaactgcgaagtgt

SEQ ID NO: 4164656 - DNA, 25 bp, Homo sapien
ccagttgaaagagtgcagactttcc

SEQ ID NO: 4164657 - DNA, 25 bp, Homo sapien
cacccaactgcgaagtgtttgaaga

SEQ ID NO: 4164658 - DNA, 25 bp, Homo sapien
aaactgctactagaatgtcctggtg

SEQ ID NO: 4164659 - DNA, 25 bp, Homo sapien
gaaaactgctactagaatgtcctgg

SEQ ID NO: 4164660 - DNA, 25 bp, Homo sapien
gagaaaactgctactagaatgtcct

SEQ ID NO: 4164661 - DNA, 25 bp, Homo sapien
caacagagaaaactgctactagaat

SEQ ID NO: 4164662 - DNA, 25 bp, Homo sapien
gagaagacatttgttggaagcaaca

SEQ ID NO: 4164663 - DNA, 25 bp, Homo sapien
gacatttgttggaagcaacaacccc

SEQ ID NO: 4164664 - DNA, 25 bp, Homo sapien
ttctcactaaggagaagacatttgt

SEQ ID NO: 4164665 - DNA, 25 bp, Homo sapien
gaagacatttgttggaagcaacaac

SEQ ID NO: 4164666 - DNA, 25 bp, Homo sapien
catatgcctgaattaggaccttccc

SEQ ID NO: 4164667 - DNA, 25 bp, Homo sapien
tgcctgaattaggaccttccccagg

SEQ ID NO: 4164668 - DNA, 25 bp, Homo sapien
atgcctgaattaggaccttccccag

SEQ ID NO: 4164669 - DNA, 25 bp, Homo sapien
tatgcctgaattaggaccttcccca

SEQ ID NO: 4164670 - DNA, 25 bp, Homo sapien
atcttctcacaccttaagtccacag

SEQ ID NO: 4164671 - DNA, 25 bp, Homo sapien
tcttctcacaccttaagtccacagg

SEQ ID NO: 4164672 - DNA, 25 bp, Homo sapien
taactcacttgctggcaaattgatc

SEQ ID NO: 4164673 - DNA, 25 bp, Homo sapien
ttgatctgatgtgaactcagctggc

SEQ ID NO: 4164674 - DNA, 25 bp, Homo sapien
ctacctgtccacttgaaattagaaa

SEQ ID NO: 4164675 - DNA, 25 bp, Homo sapien
tcaaactctgttcagatatctgcct

SEQ ID NO: 4164676 - DNA, 25 bp, Homo sapien
ttccaccatcggattcttttgcttt

SEQ ID NO: 4164677 - DNA, 25 bp, Homo sapien
ttcttccaccatcggattcttttgc

SEQ ID NO: 4164678 - DNA, 25 bp, Homo sapien
cttccaccatcggattcttttgctt

SEQ ID NO: 4164679 - DNA, 25 bp, Homo sapien
tcttccaccatcggattcttttgct

SEQ ID NO: 4164680 - DNA, 25 bp, Homo sapien
gcttttctggcttgtttaatgctgc

SEQ ID NO: 4164681 - DNA, 25 bp, Homo sapien
ccatgaggatggcacatatgatcct

SEQ ID NO: 4164682 - DNA, 25 bp, Homo sapien
catatgatcctttctactgggaaca

SEQ ID NO: 4164683 - DNA, 25 bp, Homo sapien
gctgcgggatcctcaatgatcataa

SEQ ID NO: 4164684 - DNA, 25 bp, Homo sapien
tcttgactctttggtggtgtctgag

SEQ ID NO: 4164685 - DNA, 25 bp, Homo sapien
tgccacttgaggatgtgcggacctt

SEQ ID NO: 4164686 - DNA, 25 bp, Homo sapien
tcaatggtatatatgacgctctcaa

SEQ ID NO: 4164687 - DNA, 25 bp, Homo sapien
aatgaaatctggaggtcttgactct

SEQ ID NO: 4164688 - DNA, 25 bp, Homo sapien
tcaacattagctcgcagagaggtga

SEQ ID NO: 4164689 - DNA, 25 bp, Homo sapien
gagaggtgagcatgccctcagacac

SEQ ID NO: 4164690 - DNA, 25 bp, Homo sapien
gacaccagggttttataaagagcac

SEQ ID NO: 4164691 - DNA, 25 bp, Homo sapien
gatttcctggaaccacaagtttcta

SEQ ID NO: 4164692 - DNA, 25 bp, Homo sapien
ccactggtcccactctgactaaatg

SEQ ID NO: 4164693 - DNA, 25 bp, Homo sapien
tccaacacccttcatgatcagagga

SEQ ID NO: 4164694 - DNA, 25 bp, Homo sapien
actggtcccactctgactaaatgtc

SEQ ID NO: 4164695 - DNA, 25 bp, Homo sapien
catgatcagaggagtttccttttcc

SEQ ID NO: 4164696 - DNA, 25 bp, Homo sapien
acagtcttcttttggctttgtcttc

SEQ ID NO: 4164697 - DNA, 25 bp, Homo sapien
tcttcttttggctttgtcttcttga

SEQ ID NO: 4164698 - DNA, 25 bp, Homo sapien
ccaaggagacagtcttcttttggct

SEQ ID NO: 4164699 - DNA, 25 bp, Homo sapien
tcttttggctttgtcttcttgaact

SEQ ID NO: 4164700 - DNA, 25 bp, Homo sapien
cacatttccggtcaaatgtaacagg

SEQ ID NO: 4164701 - DNA, 25 bp, Homo sapien
taacaggactatattgagggaggct

SEQ ID NO: 4164702 - DNA, 25 bp, Homo sapien
tgctggttttagtcggttctgagga

SEQ ID NO: 4164703 - DNA, 25 bp, Homo sapien
cttttttcttgggacaggtacacat

SEQ ID NO: 4164704 - DNA, 25 bp, Homo sapien
atatttgctgacaattttgtggaat

SEQ ID NO: 4164705 - DNA, 25 bp, Homo sapien
tatatttgctgacaattttgtggaa

SEQ ID NO: 4164706 - DNA, 25 bp, Homo sapien
cttctgtagggtgaatggcatccaa

SEQ ID NO: 4164707 - DNA, 25 bp, Homo sapien
cttgtttgaccatttatccccactt

SEQ ID NO: 4164708 - DNA, 25 bp, Homo sapien
ttgtttgaccatttatccccacttc

SEQ ID NO: 4164709 - DNA, 25 bp, Homo sapien
atggcatccaagaagagttgcttgt

SEQ ID NO: 4164710 - DNA, 25 bp, Homo sapien
aaaaatgtcagctcttttaaaatat

SEQ ID NO: 4164711 - DNA, 25 bp, Homo sapien
ctacaaaaatgtcagctcttttaaa

SEQ ID NO: 4164712 - DNA, 25 bp, Homo sapien
caaaaatgtcagctcttttaaaata

SEQ ID NO: 4164713 - DNA, 25 bp, Homo sapien
tacaaaaatgtcagctcttttaaaa

SEQ ID NO: 4164714 - DNA, 25 bp, Homo sapien
gaatgagccttatccaacatcctgg

SEQ ID NO: 4164715 - DNA, 25 bp, Homo sapien
tttaacagagattcctagtcctagg

SEQ ID NO: 4164716 - DNA, 25 bp, Homo sapien
gcactgtggatcgtgtgtgaaaatc

SEQ ID NO: 4164717 - DNA, 25 bp, Homo sapien
aaagagatcgagttagattgggcac

SEQ ID NO: 4164718 - DNA, 25 bp, Homo sapien
taggtctcccatgagctgaaacagc

SEQ ID NO: 4164719 - DNA, 25 bp, Homo sapien
tctaattgcctttggtaggtctccc

SEQ ID NO: 4164720 - DNA, 25 bp, Homo sapien
ggaatgtagcaataagagaccgtct

SEQ ID NO: 4164721 - DNA, 25 bp, Homo sapien
tgtaccccatgaggccactagagtg

SEQ ID NO: 4164722 - DNA, 25 bp, Homo sapien
ttggtgcgtatcatctgagagtgat

SEQ ID NO: 4164723 - DNA, 25 bp, Homo sapien
tcatctgagagtgatgatgcaagct

SEQ ID NO: 4164724 - DNA, 25 bp, Homo sapien
tggtgcgtatcatctgagagtgatg

SEQ ID NO: 4164725 - DNA, 25 bp, Homo sapien
tctgagagtgatgatgcaagctcac

SEQ ID NO: 4164726 - DNA, 25 bp, Homo sapien
gaactgactgcggaaagaagaacca

SEQ ID NO: 4164727 - DNA, 25 bp, Homo sapien
tcataggctgggaaacagtactcct

SEQ ID NO: 4164728 - DNA, 25 bp, Homo sapien
gactaatgttctgacccaagggtta

SEQ ID NO: 4164729 - DNA, 25 bp, Homo sapien
cataggctaccatcagagatctggc

SEQ ID NO: 4164730 - DNA, 25 bp, Homo sapien
ggagaatttacactcagagttttca

SEQ ID NO: 4164731 - DNA, 25 bp, Homo sapien
ccgtctgaatggagaatttacactc

SEQ ID NO: 4164732 - DNA, 25 bp, Homo sapien
tgaatggagaatttacactcagagt

SEQ ID NO: 4164733 - DNA, 25 bp, Homo sapien
cgtctgaatggagaatttacactca

SEQ ID NO: 4164734 - DNA, 25 bp, Homo sapien
aggaaataccatgcatagttatgca

SEQ ID NO: 4164735 - DNA, 25 bp, Homo sapien
aacagaaggcaccaaaattgctctt

SEQ ID NO: 4164736 - DNA, 25 bp, Homo sapien
caccaaaattgctcttagaaggaaa

SEQ ID NO: 4164737 - DNA, 25 bp, Homo sapien
gaaataccatgcatagttatgcaca

SEQ ID NO: 4164738 - DNA, 25 bp, Homo sapien
aaggttcttgcgttgttgttggctc

SEQ ID NO: 4164739 - DNA, 25 bp, Homo sapien
accttatgaacaggctccatggtgt

SEQ ID NO: 4164740 - DNA, 25 bp, Homo sapien
ggccatctgctgtcctgacaaggtg

SEQ ID NO: 4164741 - DNA, 25 bp, Homo sapien
tggctctggagtgttgaaaatggat

SEQ ID NO: 4164742 - DNA, 25 bp, Homo sapien
gattggacacctctggtctaaagct

SEQ ID NO: 4164743 - DNA, 25 bp, Homo sapien
tgtatttcattgtggctcaagacaa

SEQ ID NO: 4164744 - DNA, 25 bp, Homo sapien
gacacctctggtctaaagctctctc

SEQ ID NO: 4164745 - DNA, 25 bp, Homo sapien
cctctggtctaaagctctctcttct

SEQ ID NO: 4164746 - DNA, 25 bp, Homo sapien
gaacagcaaacagacaacaggccat

SEQ ID NO: 4164747 - DNA, 25 bp, Homo sapien
ctaccaggaacagcaaacagacaac

SEQ ID NO: 4164748 - DNA, 25 bp, Homo sapien
caggaacagcaaacagacaacaggc

SEQ ID NO: 4164749 - DNA, 25 bp, Homo sapien
taccaggaacagcaaacagacaaca

SEQ ID NO: 4164750 - DNA, 25 bp, Homo sapien
tccggtcattctactgccaaagagg

SEQ ID NO: 4164751 - DNA, 25 bp, Homo sapien
tgggctcctccggtcattctactgc

SEQ ID NO: 4164752 - DNA, 25 bp, Homo sapien
ctcctccggtcattctactgccaaa

SEQ ID NO: 4164753 - DNA, 25 bp, Homo sapien
cctccggtcattctactgccaaaga

SEQ ID NO: 4164754 - DNA, 25 bp, Homo sapien
tgaaatgctgtgcaagtatgcctgc

SEQ ID NO: 4164755 - DNA, 25 bp, Homo sapien
tgtagatgctgtaaaagagccctta

SEQ ID NO: 4164756 - DNA, 25 bp, Homo sapien
taaccagttctaatgagagcccaag

SEQ ID NO: 4164757 - DNA, 25 bp, Homo sapien
caacacttaggatggcctatacagc

SEQ ID NO: 4164758 - DNA, 25 bp, Homo sapien
tcagttgctttagggagactcctct

SEQ ID NO: 4164759 - DNA, 25 bp, Homo sapien
ccccgacctcggtgttgtgtgagca

SEQ ID NO: 4164760 - DNA, 25 bp, Homo sapien
ggcatttctggagtactgctccgcg

SEQ ID NO: 4164761 - DNA, 25 bp, Homo sapien
gaggctaaagaacgcagacacggca

SEQ ID NO: 4164762 - DNA, 25 bp, Homo sapien
agaggacgatgaataacaagtgtgt

SEQ ID NO: 4164763 - DNA, 25 bp, Homo sapien
aaaagtcacttattcagcatatgtt

SEQ ID NO: 4164764 - DNA, 25 bp, Homo sapien
tcccttcctaagattttatatctga

SEQ ID NO: 4164765 - DNA, 25 bp, Homo sapien
gaataacaagtgtgttccaatatct

SEQ ID NO: 4164766 - DNA, 25 bp, Homo sapien
cactggtcagcgcaggaaataagta

SEQ ID NO: 4164767 - DNA, 25 bp, Homo sapien
gtacaggagcctgcggcatttcttt

SEQ ID NO: 4164768 - DNA, 25 bp, Homo sapien
tttggctgtccatcatgggtgagcg

SEQ ID NO: 4164769 - DNA, 25 bp, Homo sapien
ccatcatgggtgagcggagttgacc

SEQ ID NO: 4164770 - DNA, 25 bp, Homo sapien
ctcggtaaagacaaggctagggtag

SEQ ID NO: 4164771 - DNA, 25 bp, Homo sapien
tagcatccctcggtaaagacaaggc

SEQ ID NO: 4164772 - DNA, 25 bp, Homo sapien
gcatccctcggtaaagacaaggcta

SEQ ID NO: 4164773 - DNA, 25 bp, Homo sapien
atccctcggtaaagacaaggctagg

SEQ ID NO: 4164774 - DNA, 25 bp, Homo sapien
tacttccagcatcgcagagaagggc

SEQ ID NO: 4164775 - DNA, 25 bp, Homo sapien
gaatatatggaccacgaggccgagc

SEQ ID NO: 4164776 - DNA, 25 bp, Homo sapien
taaagccgaggtagcccattaggat

SEQ ID NO: 4164777 - DNA, 25 bp, Homo sapien
taatcttcaaatcactgctagcgag

SEQ ID NO: 4164778 - DNA, 25 bp, Homo sapien
tttttattcacgcttgttgcttctt

SEQ ID NO: 4164779 - DNA, 25 bp, Homo sapien
gtctttttattcacgcttgttgctt

SEQ ID NO: 4164780 - DNA, 25 bp, Homo sapien
tctttttattcacgcttgttgcttc

SEQ ID NO: 4164781 - DNA, 25 bp, Homo sapien
ttattcacgcttgttgcttctttgt

SEQ ID NO: 4164782 - DNA, 25 bp, Homo sapien
cagtatgaatcataccaccatagat

SEQ ID NO: 4164783 - DNA, 25 bp, Homo sapien
tagatcaaatttggccagaagagga

SEQ ID NO: 4164784 - DNA, 25 bp, Homo sapien
tcataccaccatagatcaaatttgg

SEQ ID NO: 4164785 - DNA, 25 bp, Homo sapien
caaatttggccagaagaggaacctt

SEQ ID NO: 4164786 - DNA, 25 bp, Homo sapien
ccaagttatcaggaaatctttggag

SEQ ID NO: 4164787 - DNA, 25 bp, Homo sapien
tctgtgcataaaaatcgatttaagc

SEQ ID NO: 4164788 - DNA, 25 bp, Homo sapien
ttggagggagcagtaatgttcacaa

SEQ ID NO: 4164789 - DNA, 25 bp, Homo sapien
aaatcgatttaagcacatgatcagt

SEQ ID NO: 4164790 - DNA, 25 bp, Homo sapien
ggctcttagagctgaggcactcatg

SEQ ID NO: 4164791 - DNA, 25 bp, Homo sapien
tggtgggccacagagcgaaatcagt

SEQ ID NO: 4164792 - DNA, 25 bp, Homo sapien
gaaatggagaaaacgttgctgagcc

SEQ ID NO: 4164793 - DNA, 25 bp, Homo sapien
gctgagctccagatcgcaaaccttc

SEQ ID NO: 4164794 - DNA, 25 bp, Homo sapien
tgtttacaccaactctaaagagaac

SEQ ID NO: 4164795 - DNA, 25 bp, Homo sapien
ggcatgtttacaccaactctaaaga

SEQ ID NO: 4164796 - DNA, 25 bp, Homo sapien
ttacatggcatgtttacaccaactc

SEQ ID NO: 4164797 - DNA, 25 bp, Homo sapien
tttattacatggcatgtttacacca

SEQ ID NO: 4164798 - DNA, 25 bp, Homo sapien
catacatctaagaaagcaataattc

SEQ ID NO: 4164799 - DNA, 25 bp, Homo sapien
tattgacttttactacacatacatc

SEQ ID NO: 4164800 - DNA, 25 bp, Homo sapien
actttagcatgttatacacatgact

SEQ ID NO: 4164801 - DNA, 25 bp, Homo sapien
gcatgttatacacatgacttacatg

SEQ ID NO: 4164802 - DNA, 25 bp, Homo sapien
taaaggcacatactctacggccagt

SEQ ID NO: 4164803 - DNA, 25 bp, Homo sapien
ggcacatactctacggccagtagtg

SEQ ID NO: 4164804 - DNA, 25 bp, Homo sapien
atactctacggccagtagtgtgaac

SEQ ID NO: 4164805 - DNA, 25 bp, Homo sapien
tggtacattaaaggcacatactcta

SEQ ID NO: 4164806 - DNA, 25 bp, Homo sapien
cccagaagcgttcacccaagtggcg

SEQ ID NO: 4164807 - DNA, 25 bp, Homo sapien
gcgttcacccaagtggcgtactgaa

SEQ ID NO: 4164808 - DNA, 25 bp, Homo sapien
cccaagtggcgtactgaagcatatc

SEQ ID NO: 4164809 - DNA, 25 bp, Homo sapien
gaagcgttcacccaagtggcgtact

SEQ ID NO: 4164810 - DNA, 25 bp, Homo sapien
gctctccagccagtgcttagccgcc

SEQ ID NO: 4164811 - DNA, 25 bp, Homo sapien
atgctctccagccagtgcttagccg

SEQ ID NO: 4164812 - DNA, 25 bp, Homo sapien
tctccagccagtgcttagccgccat

SEQ ID NO: 4164813 - DNA, 25 bp, Homo sapien
tgatgctctccagccagtgcttagc

SEQ ID NO: 4164814 - DNA, 25 bp, Homo sapien
ttagagtgcagcgagtccgctggaa

SEQ ID NO: 4164815 - DNA, 25 bp, Homo sapien
gagtttcagagcctgctctacaggc

SEQ ID NO: 4164816 - DNA, 25 bp, Homo sapien
gggtgcgtagagcttccagccagtg

SEQ ID NO: 4164817 - DNA, 25 bp, Homo sapien
acgtttcacatccaagagtttcaga

SEQ ID NO: 4164818 - DNA, 25 bp, Homo sapien
ctaactgtatctttcccgcaggcag

SEQ ID NO: 4164819 - DNA, 25 bp, Homo sapien
ccagagcagtgggtttctaactgta

SEQ ID NO: 4164820 - DNA, 25 bp, Homo sapien
gacttgtctgctacctcaggttcag

SEQ ID NO: 4164821 - DNA, 25 bp, Homo sapien
ctctggagctgagcgttcctggaca

SEQ ID NO: 4164822 - DNA, 25 bp, Homo sapien
aagcattatccttacatggccccgg

SEQ ID NO: 4164823 - DNA, 25 bp, Homo sapien
cacctttgaggatgattgtttaaac

SEQ ID NO: 4164824 - DNA, 25 bp, Homo sapien
tacatggccccggtttccagtcact

SEQ ID NO: 4164825 - DNA, 25 bp, Homo sapien
gcacctttgaggatgattgtttaaa

SEQ ID NO: 4164826 - DNA, 25 bp, Homo sapien
cagagtagtacagaaggaactctaa

SEQ ID NO: 4164827 - DNA, 25 bp, Homo sapien
agaaggaactctaatgcgcaggcgc

SEQ ID NO: 4164828 - DNA, 25 bp, Homo sapien
gcagcagcaaatgtgcgtgatctgg

SEQ ID NO: 4164829 - DNA, 25 bp, Homo sapien
gcgcaggcgcttcggtggggcagca

SEQ ID NO: 4164830 - DNA, 25 bp, Homo sapien
tttaggacggctagaggagatgtca

SEQ ID NO: 4164831 - DNA, 25 bp, Homo sapien
cgaggaggagctttgtccataatct

SEQ ID NO: 4164832 - DNA, 25 bp, Homo sapien
cactctccttcattgataacataga

SEQ ID NO: 4164833 - DNA, 25 bp, Homo sapien
gataacatagacaatcagaattgcc

SEQ ID NO: 4164834 - DNA, 25 bp, Homo sapien
tgagataatgagcacacaattgcct

SEQ ID NO: 4164835 - DNA, 25 bp, Homo sapien
tgaggcctgaggttcggcttgctca

SEQ ID NO: 4164836 - DNA, 25 bp, Homo sapien
cctggatacctgaaggaatggagac

SEQ ID NO: 4164837 - DNA, 25 bp, Homo sapien
ggaatggagacagcggcagaaaaca

SEQ ID NO: 4164838 - DNA, 25 bp, Homo sapien
ggctctgctgttcctagtgactcca

SEQ ID NO: 4164839 - DNA, 25 bp, Homo sapien
ctaatctccttccactatctttggg

SEQ ID NO: 4164840 - DNA, 25 bp, Homo sapien
aatttccctctttctcgttctgaga

SEQ ID NO: 4164841 - DNA, 25 bp, Homo sapien
tctgatgttcagatcatctccaggc

SEQ ID NO: 4164842 - DNA, 25 bp, Homo sapien
tccacgtgtgcaggatgccggtaac

SEQ ID NO: 4164843 - DNA, 25 bp, Homo sapien
ttggatctcccttcaaaaaagaaca

SEQ ID NO: 4164844 - DNA, 25 bp, Homo sapien
cggtaactgacagccgccagccagt

SEQ ID NO: 4164845 - DNA, 25 bp, Homo sapien
aaaagaacaaactatccacgtgtgc

SEQ ID NO: 4164846 - DNA, 25 bp, Homo sapien
tctaatttgtacttgaccatatttt

SEQ ID NO: 4164847 - DNA, 25 bp, Homo sapien
ttttccgatgtcccaccataattca

SEQ ID NO: 4164848 - DNA, 25 bp, Homo sapien
tttccgatgtcccaccataattcat

SEQ ID NO: 4164849 - DNA, 25 bp, Homo sapien
gttgtagctgaagacgttcttccat

SEQ ID NO: 4164850 - DNA, 25 bp, Homo sapien
tgttgtagctgaagacgttcttcca

SEQ ID NO: 4164851 - DNA, 25 bp, Homo sapien
ctttgttgtagctgaagacgttctt

SEQ ID NO: 4164852 - DNA, 25 bp, Homo sapien
tttgttgtagctgaagacgttcttc

SEQ ID NO: 4164853 - DNA, 25 bp, Homo sapien
tcagtcagtttttcccctgcaacac

SEQ ID NO: 4164854 - DNA, 25 bp, Homo sapien
acccaacattacaatcctctgtggg

SEQ ID NO: 4164855 - DNA, 25 bp, Homo sapien
cattacaatcctctgtgggatcttc

SEQ ID NO: 4164856 - DNA, 25 bp, Homo sapien
ccaacattacaatcctctgtgggat

SEQ ID NO: 4164857 - DNA, 25 bp, Homo sapien
agaaggaacagaagcccgtggactc

SEQ ID NO: 4164858 - DNA, 25 bp, Homo sapien
caatctgtagtgctcaccccaacaa

SEQ ID NO: 4164859 - DNA, 25 bp, Homo sapien
aggaagccaagaagacaatctgtag

SEQ ID NO: 4164860 - DNA, 25 bp, Homo sapien
cctgaaagtgccctaataagtccac

SEQ ID NO: 4164861 - DNA, 25 bp, Homo sapien
ttggtttctcttccagttcccctca

SEQ ID NO: 4164862 - DNA, 25 bp, Homo sapien
tcacttggtttctcttccagttccc

SEQ ID NO: 4164863 - DNA, 25 bp, Homo sapien
tggtttctcttccagttcccctcac

SEQ ID NO: 4164864 - DNA, 25 bp, Homo sapien
gatggcatgggatggtggaaggacc

SEQ ID NO: 4164865 - DNA, 25 bp, Homo sapien
gtcaaacagctcccttactttctgg

SEQ ID NO: 4164866 - DNA, 25 bp, Homo sapien
gaggagtgggatggcatgggatggt

SEQ ID NO: 4164867 - DNA, 25 bp, Homo sapien
tcaaacagctcccttactttctggg

SEQ ID NO: 4164868 - DNA, 25 bp, Homo sapien
cttctgaaattgcatggagcaggaa

SEQ ID NO: 4164869 - DNA, 25 bp, Homo sapien
ttctgaaattgcatggagcaggaac

SEQ ID NO: 4164870 - DNA, 25 bp, Homo sapien
ctgaaattgcatggagcaggaacct

SEQ ID NO: 4164871 - DNA, 25 bp, Homo sapien
tctgaaattgcatggagcaggaacc

SEQ ID NO: 4164872 - DNA, 25 bp, Homo sapien
ctgaaagtcacagagaacaggggaa

SEQ ID NO: 4164873 - DNA, 25 bp, Homo sapien
aaagtcacagagaacaggggaaggc

SEQ ID NO: 4164874 - DNA, 25 bp, Homo sapien
tgaaagtcacagagaacaggggaag

SEQ ID NO: 4164875 - DNA, 25 bp, Homo sapien
agtcacagagaacaggggaaggcat

SEQ ID NO: 4164876 - DNA, 25 bp, Homo sapien
catgggatgcttttgccctagaggg

SEQ ID NO: 4164877 - DNA, 25 bp, Homo sapien
cctgtgatctctctacaaagctctg

SEQ ID NO: 4164878 - DNA, 25 bp, Homo sapien
cactcaggttgctgtacacctgtga

SEQ ID NO: 4164879 - DNA, 25 bp, Homo sapien
gggcagctgcgtgtcccttcggccc

SEQ ID NO: 4164880 - DNA, 25 bp, Homo sapien
ggcaacagatcattctccaggcagt

SEQ ID NO: 4164881 - DNA, 25 bp, Homo sapien
cagtgggtatggacagatcattttc

SEQ ID NO: 4164882 - DNA, 25 bp, Homo sapien
cccttagcatagcttggcatttggc

SEQ ID NO: 4164883 - DNA, 25 bp, Homo sapien
ggcatttggctaggcccgaagtcat

SEQ ID NO: 4164884 - DNA, 25 bp, Homo sapien
tgtcaacatgcagtcaagtctatgg

SEQ ID NO: 4164885 - DNA, 25 bp, Homo sapien
catatatgggcggtgacttccacca

SEQ ID NO: 4164886 - DNA, 25 bp, Homo sapien
ccgccgcgcgcagtaatggatctct

SEQ ID NO: 4164887 - DNA, 25 bp, Homo sapien
cgcagttcggcggtatggatcctac

SEQ ID NO: 4164888 - DNA, 25 bp, Homo sapien
gggtccaagtgataaggtctttata

SEQ ID NO: 4164889 - DNA, 25 bp, Homo sapien
agggagcaactgtatgggtccaagt

SEQ ID NO: 4164890 - DNA, 25 bp, Homo sapien
ggagggagcaactgtatgggtccaa

SEQ ID NO: 4164891 - DNA, 25 bp, Homo sapien
gtatgggtccaagtgataaggtctt

SEQ ID NO: 4164892 - DNA, 25 bp, Homo sapien
ccagaaacgtttgaccttgtgcaag

SEQ ID NO: 4164893 - DNA, 25 bp, Homo sapien
tctgggctccggctggtacaacagt

SEQ ID NO: 4164894 - DNA, 25 bp, Homo sapien
gaagcgctggactgggatcattagc

SEQ ID NO: 4164895 - DNA, 25 bp, Homo sapien
cactggttgtcaggagaccttgtcc

SEQ ID NO: 4164896 - DNA, 25 bp, Homo sapien
gggagagaggagtcctccctgaaga

SEQ ID NO: 4164897 - DNA, 25 bp, Homo sapien
ccagggatgctgattgaccaggctc

SEQ ID NO: 4164898 - DNA, 25 bp, Homo sapien
gggatgctgattgaccaggctcaag

SEQ ID NO: 4164899 - DNA, 25 bp, Homo sapien
tcaatgtggcaagggagaccaggga

SEQ ID NO: 4164900 - DNA, 25 bp, Homo sapien
tgccagagagctaccacttcatcag

SEQ ID NO: 4164901 - DNA, 25 bp, Homo sapien
ttgccagagagctaccacttcatca

SEQ ID NO: 4164902 - DNA, 25 bp, Homo sapien
gccagagagctaccacttcatcagg

SEQ ID NO: 4164903 - DNA, 25 bp, Homo sapien
tttcagctgcgtgggcaggacacca

SEQ ID NO: 4164904 - DNA, 25 bp, Homo sapien
tctgaacatgacttgcaatgcatac

SEQ ID NO: 4164905 - DNA, 25 bp, Homo sapien
gacaccaggctatttgcaacagcaa

SEQ ID NO: 4164906 - DNA, 25 bp, Homo sapien
ttttgatgcccctttatttcagctg

SEQ ID NO: 4164907 - DNA, 25 bp, Homo sapien
tagttggcacgcagtacatggtagc

SEQ ID NO: 4164908 - DNA, 25 bp, Homo sapien
gcattttagcaagatctccgggaag

SEQ ID NO: 4164909 - DNA, 25 bp, Homo sapien
tcataatgtacccacagatcagctg

SEQ ID NO: 4164910 - DNA, 25 bp, Homo sapien
tgcagtctagtcaacactccctggc

SEQ ID NO: 4164911 - DNA, 25 bp, Homo sapien
acttgattcagtgacaacctattgg

SEQ ID NO: 4164912 - DNA, 25 bp, Homo sapien
gcaagaatatgatgcacttgattca

SEQ ID NO: 4164913 - DNA, 25 bp, Homo sapien
gacaacctattggatgagcttgcat

SEQ ID NO: 4164914 - DNA, 25 bp, Homo sapien
gcatagtgaggagacaatctgtact

SEQ ID NO: 4164915 - DNA, 25 bp, Homo sapien
aagggttgctgaagtctgctttgca

SEQ ID NO: 4164916 - DNA, 25 bp, Homo sapien
agtctgctttgcaggtagatgtcaa

SEQ ID NO: 4164917 - DNA, 25 bp, Homo sapien
caggtagatgtcaagtgctaaggtt

SEQ ID NO: 4164918 - DNA, 25 bp, Homo sapien
aagaggaacaaagggttgctgaagt

SEQ ID NO: 4164919 - DNA, 25 bp, Homo sapien
gccatgatgtggtggtgcctgagga

SEQ ID NO: 4164920 - DNA, 25 bp, Homo sapien
agctgccacgtctttgagctgctga

SEQ ID NO: 4164921 - DNA, 25 bp, Homo sapien
tgccatgatgtggtggtgcctgagg

SEQ ID NO: 4164922 - DNA, 25 bp, Homo sapien
cagtaatttcaaagctgctgaagct

SEQ ID NO: 4164923 - DNA, 25 bp, Homo sapien
gaagcttttctgtacaatcacacac

SEQ ID NO: 4164924 - DNA, 25 bp, Homo sapien
ttctgtacaagcacacagtaatttc

SEQ ID NO: 4164925 - DNA, 25 bp, Homo sapien
tagaaagcatttctgtacaagcaca

SEQ ID NO: 4164926 - DNA, 25 bp, Homo sapien
agaggtcacagattcaagtgcctca

SEQ ID NO: 4164927 - DNA, 25 bp, Homo sapien
tatatccctggctttgtgtacaaca

SEQ ID NO: 4164928 - DNA, 25 bp, Homo sapien
cctttccctatatccctggctttgt

SEQ ID NO: 4164929 - DNA, 25 bp, Homo sapien
ggctttgtgtacaacagaggtcaca

SEQ ID NO: 4164930 - DNA, 25 bp, Homo sapien
tgccatttgccactcaggcatgcct

SEQ ID NO: 4164931 - DNA, 25 bp, Homo sapien
agcaatgagccagaagctgctgaga

SEQ ID NO: 4164932 - DNA, 25 bp, Homo sapien
gcagaggtggccgtgtcagcgagca

SEQ ID NO: 4164933 - DNA, 25 bp, Homo sapien
aggtggccgtgtcagcgagcaatga

SEQ ID NO: 4164934 - DNA, 25 bp, Homo sapien
cctctgaatgttttctctcgggctc

SEQ ID NO: 4164935 - DNA, 25 bp, Homo sapien
tgaatgttttctctcgggctccctt

SEQ ID NO: 4164936 - DNA, 25 bp, Homo sapien
tccatttggataatgtacataaact

SEQ ID NO: 4164937 - DNA, 25 bp, Homo sapien
ggataatgtacataaactccctcct

SEQ ID NO: 4164938 - DNA, 25 bp, Homo sapien
actaggatggtaggaaggcagccat

SEQ ID NO: 4164939 - DNA, 25 bp, Homo sapien
ttctgtggcagtgacggacttcccg

SEQ ID NO: 4164940 - DNA, 25 bp, Homo sapien
tccacaagcaattgtgtgacatgct

SEQ ID NO: 4164941 - DNA, 25 bp, Homo sapien
gacggtgctacttcttccacaagca

SEQ ID NO: 4164942 - DNA, 25 bp, Homo sapien
caagtcagcctcatttggaccagtt

SEQ ID NO: 4164943 - DNA, 25 bp, Homo sapien
cttaggtatgcaggttcaatagcgg

SEQ ID NO: 4164944 - DNA, 25 bp, Homo sapien
tgccagattggctaccaagtcagcc

SEQ ID NO: 4164945 - DNA, 25 bp, Homo sapien
tggaccagttccataagttataagg

SEQ ID NO: 4164946 - DNA, 25 bp, Homo sapien
ctgaataactagacgaagtgcaaca

SEQ ID NO: 4164947 - DNA, 25 bp, Homo sapien
gacgaagtgcaacaccatcatcctc

SEQ ID NO: 4164948 - DNA, 25 bp, Homo sapien
catcatcctccaaggtcttggccag

SEQ ID NO: 4164949 - DNA, 25 bp, Homo sapien
aggcacaaatctcttgacacctttt

SEQ ID NO: 4164950 - DNA, 25 bp, Homo sapien
tttgactgattttgagttttgcgtg

SEQ ID NO: 4164951 - DNA, 25 bp, Homo sapien
gattttgagttttgcgtgtcttcgg

SEQ ID NO: 4164952 - DNA, 25 bp, Homo sapien
tttgcgtgtcttcggtgatttacca

SEQ ID NO: 4164953 - DNA, 25 bp, Homo sapien
tgagttttgcgtgtcttcggtgatt

SEQ ID NO: 4164954 - DNA, 25 bp, Homo sapien
ataaccacctttttagtgtgtgcct

SEQ ID NO: 4164955 - DNA, 25 bp, Homo sapien
gtgcctcagtttctaatatttgcag

SEQ ID NO: 4164956 - DNA, 25 bp, Homo sapien
ttctaatatttgcaggggcactgcc

SEQ ID NO: 4164957 - DNA, 25 bp, Homo sapien
cagtttctaatatttgcaggggcac

SEQ ID NO: 4164958 - DNA, 25 bp, Homo sapien
ctgatttggccacggctcatagtca

SEQ ID NO: 4164959 - DNA, 25 bp, Homo sapien
atttggccacggctcatagtcacag

SEQ ID NO: 4164960 - DNA, 25 bp, Homo sapien
gtcacagaggcacaaccagggtctc

SEQ ID NO: 4164961 - DNA, 25 bp, Homo sapien
catagtcacagaggcacaaccaggg

SEQ ID NO: 4164962 - DNA, 25 bp, Homo sapien
gccactcttttatctctggagacag

SEQ ID NO: 4164963 - DNA, 25 bp, Homo sapien
agtcagggcaatgcgtctcactcgc

SEQ ID NO: 4164964 - DNA, 25 bp, Homo sapien
caaacagccgcatataacaacacag

SEQ ID NO: 4164965 - DNA, 25 bp, Homo sapien
gcttgcagccagatacggtgctgtg

SEQ ID NO: 4164966 - DNA, 25 bp, Homo sapien
attcctgggcatcctgtcctactga

SEQ ID NO: 4164967 - DNA, 25 bp, Homo sapien
tactgatgaatttctcactgggaga

SEQ ID NO: 4164968 - DNA, 25 bp, Homo sapien
gcaggaacaggggtgaaacctgcac

SEQ ID NO: 4164969 - DNA, 25 bp, Homo sapien
ctgggagagcaccagataatggcat

SEQ ID NO: 4164970 - DNA, 25 bp, Homo sapien
ggtctctgtccctgcgaaatccccc

SEQ ID NO: 4164971 - DNA, 25 bp, Homo sapien
gtccctgcgaaatcccccttcactg

SEQ ID NO: 4164972 - DNA, 25 bp, Homo sapien
taatagcgaataggggggtctctgt

SEQ ID NO: 4164973 - DNA, 25 bp, Homo sapien
ctaatagcgaataggggggtctctg

SEQ ID NO: 4164974 - DNA, 25 bp, Homo sapien
caaacactgggcaagcttcgaaatg

SEQ ID NO: 4164975 - DNA, 25 bp, Homo sapien
agaaaatagcatggttcttttccca

SEQ ID NO: 4164976 - DNA, 25 bp, Homo sapien
cactgggcaagcttcgaaatgttga

SEQ ID NO: 4164977 - DNA, 25 bp, Homo sapien
cccatgcccctgttgtaattaccaa

SEQ ID NO: 4164978 - DNA, 25 bp, Homo sapien
taaaatgcgctctgcgaaacctcgc

SEQ ID NO: 4164979 - DNA, 25 bp, Homo sapien
cacactgagaaaagcggcgttccac

SEQ ID NO: 4164980 - DNA, 25 bp, Homo sapien
gcccatcggcatgggcatccgagga

SEQ ID NO: 4164981 - DNA, 25 bp, Homo sapien
aggtgagtgcactcgcccatcggca

SEQ ID NO: 4164982 - DNA, 25 bp, Homo sapien
aagccattgttgagaattagatccc

SEQ ID NO: 4164983 - DNA, 25 bp, Homo sapien
gaactccagtgttgctatgtgcaag

SEQ ID NO: 4164984 - DNA, 25 bp, Homo sapien
gagaaatgattgtcgggcaaccgtt

SEQ ID NO: 4164985 - DNA, 25 bp, Homo sapien
taacagggctatcccgtaattggaa

SEQ ID NO: 4164986 - DNA, 25 bp, Homo sapien
atttacattttgctaacctagtttg

SEQ ID NO: 4164987 - DNA, 25 bp, Homo sapien
tgtagctgtccaaaataataacata

SEQ ID NO: 4164988 - DNA, 25 bp, Homo sapien
tagagggagctgtattcctttatac

SEQ ID NO: 4164989 - DNA, 25 bp, Homo sapien
ttccttgattgtgtagctgtccaaa

SEQ ID NO: 4164990 - DNA, 25 bp, Homo sapien
ggaccaagtagtttgcccatggcaa

SEQ ID NO: 4164991 - DNA, 25 bp, Homo sapien
cagaaaactgagcatactagcaaga

SEQ ID NO: 4164992 - DNA, 25 bp, Homo sapien
gcaaacctaaatttatgacctgctg

SEQ ID NO: 4164993 - DNA, 25 bp, Homo sapien
tcatgttgggaccaagtagtttgcc

SEQ ID NO: 4164994 - DNA, 25 bp, Homo sapien
tagtgacacggtagcaccagttgca

SEQ ID NO: 4164995 - DNA, 25 bp, Homo sapien
cctctttgaacatggtctagtgaca

SEQ ID NO: 4164996 - DNA, 25 bp, Homo sapien
gaaggagccagacttgttctcagag

SEQ ID NO: 4164997 - DNA, 25 bp, Homo sapien
atgtgtgtcaccatcaggccaacag

SEQ ID NO: 4164998 - DNA, 25 bp, Homo sapien
ggttgtcacctatgagacccttacg

SEQ ID NO: 4164999 - DNA, 25 bp, Homo sapien
tacacttgtgtttaagcaccatggc

SEQ ID NO: 4165000 - DNA, 25 bp, Homo sapien
aactgaagtgaagtgatggactccg

SEQ ID NO: 4165001 - DNA, 25 bp, Homo sapien
cgatttggagagtagtaagacgtga

SEQ ID NO: 4165002 - DNA, 25 bp, Homo sapien
tctaagaatcttgagtgcctcttcc

SEQ ID NO: 4165003 - DNA, 25 bp, Homo sapien
caacccagcaaacagagattatcag

SEQ ID NO: 4165004 - DNA, 25 bp, Homo sapien
atgtctggctggtgggtacttccca

SEQ ID NO: 4165005 - DNA, 25 bp, Homo sapien
gaatgaggttcagggtgcttcctag

SEQ ID NO: 4165006 - DNA, 25 bp, Homo sapien
tagcaaagtgcagcatttaactcag

SEQ ID NO: 4165007 - DNA, 25 bp, Homo sapien
taaagtctgtgaccttacctgccct

SEQ ID NO: 4165008 - DNA, 25 bp, Homo sapien
tcctcggtcatgtaaatagtttgct

SEQ ID NO: 4165009 - DNA, 25 bp, Homo sapien
tttaactcaggaagctatattcccc

SEQ ID NO: 4165010 - DNA, 25 bp, Homo sapien
tagaggaatactcagagctatctga

SEQ ID NO: 4165011 - DNA, 25 bp, Homo sapien
gactgagcttgtaagacacaggagc

SEQ ID NO: 4165012 - DNA, 25 bp, Homo sapien
gctcatgtactgtattccttcaact

SEQ ID NO: 4165013 - DNA, 25 bp, Homo sapien
aaactggaaagacccagggagtgat

SEQ ID NO: 4165014 - DNA, 25 bp, Homo sapien
tgaccttccgaacctagcacaaagg

SEQ ID NO: 4165015 - DNA, 25 bp, Homo sapien
gacttaaggtcagggaacgctgtga

SEQ ID NO: 4165016 - DNA, 25 bp, Homo sapien
aatattaaagagagcaaccgggaag

SEQ ID NO: 4165017 - DNA, 25 bp, Homo sapien
cagctgagtctagatggtgcgcctt

SEQ ID NO: 4165018 - DNA, 25 bp, Homo sapien
ttaggatgaaggtgcacactaacgg

SEQ ID NO: 4165019 - DNA, 25 bp, Homo sapien
ggacataagctattaaaactacagc

SEQ ID NO: 4165020 - DNA, 25 bp, Homo sapien
caagatggacataagctattaaaac

SEQ ID NO: 4165021 - DNA, 25 bp, Homo sapien
gatgaaggtgcacactaacgggcat

SEQ ID NO: 4165022 - DNA, 25 bp, Homo sapien
aagtgtgatgacacagggagcaccc

SEQ ID NO: 4165023 - DNA, 25 bp, Homo sapien
ccagcgcagcagcaatttgtccaga

SEQ ID NO: 4165024 - DNA, 25 bp, Homo sapien
cccagaagtacaattaggaagtgtg

SEQ ID NO: 4165025 - DNA, 25 bp, Homo sapien
cttcagaggacccagaagtacaatt

SEQ ID NO: 4165026 - DNA, 25 bp, Homo sapien
gcattgtgagccaataggtgcattc

SEQ ID NO: 4165027 - DNA, 25 bp, Homo sapien
acagcattgtgagccaataggtgca

SEQ ID NO: 4165028 - DNA, 25 bp, Homo sapien
tttcacagcattgtgagccaatagg

SEQ ID NO: 4165029 - DNA, 25 bp, Homo sapien
gtgagccaataggtgcattctgcct

SEQ ID NO: 4165030 - DNA, 25 bp, Homo sapien
ttcttttgctgccccattccgtggg

SEQ ID NO: 4165031 - DNA, 25 bp, Homo sapien
tgccccattccgtgggagaccctat

SEQ ID NO: 4165032 - DNA, 25 bp, Homo sapien
tgaacacttgctgccccctatttct

SEQ ID NO: 4165033 - DNA, 25 bp, Homo sapien
ttgctgccccattccgtgggagacc

SEQ ID NO: 4165034 - DNA, 25 bp, Homo sapien
tatcacctaggcagacatggcattg

SEQ ID NO: 4165035 - DNA, 25 bp, Homo sapien
agaggagcctcctgttcattccggg

SEQ ID NO: 4165036 - DNA, 25 bp, Homo sapien
tgtccgtggacaatatcagcaagag

SEQ ID NO: 4165037 - DNA, 25 bp, Homo sapien
ttgacactagatgggcagaggagcc

SEQ ID NO: 4165038 - DNA, 25 bp, Homo sapien
gggaactgcaatccattatgaatga

SEQ ID NO: 4165039 - DNA, 25 bp, Homo sapien
tcctgagtggggaactgcaatccat

SEQ ID NO: 4165040 - DNA, 25 bp, Homo sapien
agctctcagttgtatcatgtagttt

SEQ ID NO: 4165041 - DNA, 25 bp, Homo sapien
tatgcatggatagcttccaagctct

SEQ ID NO: 4165042 - DNA, 25 bp, Homo sapien
gccaggaacgtgaccactgtgtcca

SEQ ID NO: 4165043 - DNA, 25 bp, Homo sapien
taaggatgtaggattctggaggaac

SEQ ID NO: 4165044 - DNA, 25 bp, Homo sapien
gccttaggctccaattcaagaacac

SEQ ID NO: 4165045 - DNA, 25 bp, Homo sapien
gcaggcaccccgtgggagtgtataa

SEQ ID NO: 4165046 - DNA, 25 bp, Homo sapien
gaggaacccacaaaagtcctggagc

SEQ ID NO: 4165047 - DNA, 25 bp, Homo sapien
atcaagcactggttagagatgaccc

SEQ ID NO: 4165048 - DNA, 25 bp, Homo sapien
cctctttttcaatcggaagcaaagg

SEQ ID NO: 4165049 - DNA, 25 bp, Homo sapien
cacctgttaaattgtgtgctgcaca

SEQ ID NO: 4165050 - DNA, 25 bp, Homo sapien
ctgaggagctgatacagtttgctgt

SEQ ID NO: 4165051 - DNA, 25 bp, Homo sapien
cttcactggtaacacttgggtctga

SEQ ID NO: 4165052 - DNA, 25 bp, Homo sapien
ctggtaacacttgggtctgagagac

SEQ ID NO: 4165053 - DNA, 25 bp, Homo sapien
tggacacccttcactggtaacactt

SEQ ID NO: 4165054 - DNA, 25 bp, Homo sapien
acacccttcactggtaacacttggg

SEQ ID NO: 4165055 - DNA, 25 bp, Homo sapien
taaagctggattggataacactaca

SEQ ID NO: 4165056 - DNA, 25 bp, Homo sapien
gcaagcagaggatcaaagcgtggta

SEQ ID NO: 4165057 - DNA, 25 bp, Homo sapien
gttccacgcagttaagaacttggca

SEQ ID NO: 4165058 - DNA, 25 bp, Homo sapien
cgtggtatcagctttagcagtggta

SEQ ID NO: 4165059 - DNA, 25 bp, Homo sapien
tagactcactcgatgaaaagttgcc

SEQ ID NO: 4165060 - DNA, 25 bp, Homo sapien
tgacattgactcatactcgtagaag

SEQ ID NO: 4165061 - DNA, 25 bp, Homo sapien
tgttcagtaacaataggatctggtc

SEQ ID NO: 4165062 - DNA, 25 bp, Homo sapien
catacttcagagatagtgtgaggca

SEQ ID NO: 4165063 - DNA, 25 bp, Homo sapien
cagccatcggtattagcaccaccat

SEQ ID NO: 4165064 - DNA, 25 bp, Homo sapien
ggacccaagaattagtccagccatc

SEQ ID NO: 4165065 - DNA, 25 bp, Homo sapien
caagaattagtccagccatcggtat

SEQ ID NO: 4165066 - DNA, 25 bp, Homo sapien
tagtccagccatcggtattagcacc

SEQ ID NO: 4165067 - DNA, 25 bp, Homo sapien
ctcagctctgactccctttatatcc

SEQ ID NO: 4165068 - DNA, 25 bp, Homo sapien
gctcagctctgactccctttatatc

SEQ ID NO: 4165069 - DNA, 25 bp, Homo sapien
tcagctctgactccctttatatcct

SEQ ID NO: 4165070 - DNA, 25 bp, Homo sapien
cagaggccagttcaatgtgcactga

SEQ ID NO: 4165071 - DNA, 25 bp, Homo sapien
agggcacagaaagccagtccccgca

SEQ ID NO: 4165072 - DNA, 25 bp, Homo sapien
agtccccgcagaggccagttcaatg

SEQ ID NO: 4165073 - DNA, 25 bp, Homo sapien
ccccgcagaggccagttcaatgtgc

SEQ ID NO: 4165074 - DNA, 25 bp, Homo sapien
ggctctgggtttgacatctcctaac

SEQ ID NO: 4165075 - DNA, 25 bp, Homo sapien
aggctctgggtttgacatctcctaa

SEQ ID NO: 4165076 - DNA, 25 bp, Homo sapien
gtagccatccactttcagggggaaa

SEQ ID NO: 4165077 - DNA, 25 bp, Homo sapien
agatcaacaggtggttttcctctca

SEQ ID NO: 4165078 - DNA, 25 bp, Homo sapien
gagctctcataataaaactctgtac

SEQ ID NO: 4165079 - DNA, 25 bp, Homo sapien
taggctcccaagaccaaccaaaggc

SEQ ID NO: 4165080 - DNA, 25 bp, Homo sapien
aaagcgggacgtccctttgagcagc

SEQ ID NO: 4165081 - DNA, 25 bp, Homo sapien
tgcctaccaaccctggcgaacagtt

SEQ ID NO: 4165082 - DNA, 25 bp, Homo sapien
gacactattttgcactgcctaccaa

SEQ ID NO: 4165083 - DNA, 25 bp, Homo sapien
tgagcagcctcaagaatatgatgac

SEQ ID NO: 4165084 - DNA, 25 bp, Homo sapien
agctgaagctgctccgctacgagga

SEQ ID NO: 4165085 - DNA, 25 bp, Homo sapien
cgttctgcgatgactgctgctctgg

SEQ ID NO: 4165086 - DNA, 25 bp, Homo sapien
gttcctccggaagagcaacctgaag

SEQ ID NO: 4165087 - DNA, 25 bp, Homo sapien
tcgtcacgacgtcgggtttggaaga

SEQ ID NO: 4165088 - DNA, 25 bp, Homo sapien
taacagccaggcaacgtaatacagt

SEQ ID NO: 4165089 - DNA, 25 bp, Homo sapien
tttcctagcactggagtaacagcca

SEQ ID NO: 4165090 - DNA, 25 bp, Homo sapien
aacctctcgttggaaagttcctgca

SEQ ID NO: 4165091 - DNA, 25 bp, Homo sapien
gctgacccagatgcccgcttaattg

SEQ ID NO: 4165092 - DNA, 25 bp, Homo sapien
cagtaaacagcaggacctcacagtt

SEQ ID NO: 4165093 - DNA, 25 bp, Homo sapien
cacagtggtaggcagatcatgtata

SEQ ID NO: 4165094 - DNA, 25 bp, Homo sapien
gaaagaattggctggtttacaagca

SEQ ID NO: 4165095 - DNA, 25 bp, Homo sapien
ttgccctattgggaaaggcactgcc

SEQ ID NO: 4165096 - DNA, 25 bp, Homo sapien
tgaggactccatcatatggcatgag

SEQ ID NO: 4165097 - DNA, 25 bp, Homo sapien
tataccagggactggcaagcgatgc

SEQ ID NO: 4165098 - DNA, 25 bp, Homo sapien
cacagacgttggtcaatgaggactc

SEQ ID NO: 4165099 - DNA, 25 bp, Homo sapien
aagatttgaccagactataccaggg

SEQ ID NO: 4165100 - DNA, 25 bp, Homo sapien
tctagtcaaatgctaagtagtccat

SEQ ID NO: 4165101 - DNA, 25 bp, Homo sapien
tacttagaaattcataccgtctagt

SEQ ID NO: 4165102 - DNA, 25 bp, Homo sapien
tcataccgtctagtcaaatgctaag

SEQ ID NO: 4165103 - DNA, 25 bp, Homo sapien
tcaaatgctaagtagtccataagaa

SEQ ID NO: 4165104 - DNA, 25 bp, Homo sapien
tcgattacatgacttgaagagaact

SEQ ID NO: 4165105 - DNA, 25 bp, Homo sapien
taggcttccaacagtaaaactagga

SEQ ID NO: 4165106 - DNA, 25 bp, Homo sapien
cccttgacttcaggactgtattgca

SEQ ID NO: 4165107 - DNA, 25 bp, Homo sapien
aaagtccatgtagcaaggaaatacc

SEQ ID NO: 4165108 - DNA, 25 bp, Homo sapien
tggtctctcaagctttcaaatcagc

SEQ ID NO: 4165109 - DNA, 25 bp, Homo sapien
gagatgtaccacaagggcatccagt

SEQ ID NO: 4165110 - DNA, 25 bp, Homo sapien
cttccccaaatccaattcttgatgg

SEQ ID NO: 4165111 - DNA, 25 bp, Homo sapien
tttcaaatcagccttgagatgtacc

SEQ ID NO: 4165112 - DNA, 25 bp, Homo sapien
aaaacagctgtgttttgtccatttt

SEQ ID NO: 4165113 - DNA, 25 bp, Homo sapien
caaaacagctgtgttttgtccattt

SEQ ID NO: 4165114 - DNA, 25 bp, Homo sapien
ttgtccattttctctgctatgatgt

SEQ ID NO: 4165115 - DNA, 25 bp, Homo sapien
tgttttgtccattttctctgctatg

SEQ ID NO: 4165116 - DNA, 25 bp, Homo sapien
ctcagctttccttttgaccggggag

SEQ ID NO: 4165117 - DNA, 25 bp, Homo sapien
ccggggaggttgcaggtgacatgga

SEQ ID NO: 4165118 - DNA, 25 bp, Homo sapien
cttttgaccggggaggttgcaggtg

SEQ ID NO: 4165119 - DNA, 25 bp, Homo sapien
ttgaccggggaggttgcaggtgaca

SEQ ID NO: 4165120 - DNA, 25 bp, Homo sapien
tctgagggttctctgatagctgaag

SEQ ID NO: 4165121 - DNA, 25 bp, Homo sapien
tgtctccaaagctgcaagtctcaat

SEQ ID NO: 4165122 - DNA, 25 bp, Homo sapien
ggatccatcttggtcatatctgagg

SEQ ID NO: 4165123 - DNA, 25 bp, Homo sapien
gagactgtaattcccattctatgga

SEQ ID NO: 4165124 - DNA, 25 bp, Homo sapien
tcactgacttctgcgagctggaaca

SEQ ID NO: 4165125 - DNA, 25 bp, Homo sapien
ttgatgatgactggctataccctcc

SEQ ID NO: 4165126 - DNA, 25 bp, Homo sapien
aatgttctggtgagactggcccgga

SEQ ID NO: 4165127 - DNA, 25 bp, Homo sapien
gaaacccagggtaattcatgccact

SEQ ID NO: 4165128 - DNA, 25 bp, Homo sapien
tgacacatttaagacaatactcata

SEQ ID NO: 4165129 - DNA, 25 bp, Homo sapien
aaaaactgaagaactatatttgtga

SEQ ID NO: 4165130 - DNA, 25 bp, Homo sapien
aagacaatactcatatgcatgggca

SEQ ID NO: 4165131 - DNA, 25 bp, Homo sapien
tttaagacaatactcatatgcatgg

SEQ ID NO: 4165132 - DNA, 25 bp, Homo sapien
tggccacaatcatgaaataaggaaa

SEQ ID NO: 4165133 - DNA, 25 bp, Homo sapien
aatggccacaatcatgaaataagga

SEQ ID NO: 4165134 - DNA, 25 bp, Homo sapien
atggccacaatcatgaaataaggaa

SEQ ID NO: 4165135 - DNA, 25 bp, Homo sapien
gctttagtatattccacatcaccat

SEQ ID NO: 4165136 - DNA, 25 bp, Homo sapien
cacaatctgtgcagggttagtattc

SEQ ID NO: 4165137 - DNA, 25 bp, Homo sapien
atcacaatctgtgcagggttagtat

SEQ ID NO: 4165138 - DNA, 25 bp, Homo sapien
cagaggaggtgcgttctaggcttta

SEQ ID NO: 4165139 - DNA, 25 bp, Homo sapien
gctcagagtcaattcttccaaataa

SEQ ID NO: 4165140 - DNA, 25 bp, Homo sapien
tggtgctcagagtcaattcttccaa

SEQ ID NO: 4165141 - DNA, 25 bp, Homo sapien
tttttggtgctcagagtcaattctt

SEQ ID NO: 4165142 - DNA, 25 bp, Homo sapien
cagtgagtttttggtgctcagagtc

SEQ ID NO: 4165143 - DNA, 25 bp, Homo sapien
tcccaaggaggaaggcataatagag

SEQ ID NO: 4165144 - DNA, 25 bp, Homo sapien
tgtgtttgagtctggaaacaggtga

SEQ ID NO: 4165145 - DNA, 25 bp, Homo sapien
acaggtgaaaggtgaaaccgcagtc

SEQ ID NO: 4165146 - DNA, 25 bp, Homo sapien
tgctgcacttcccaaggaggaaggc

SEQ ID NO: 4165147 - DNA, 25 bp, Homo sapien
tcttgtgcagaacatattagtcatg

SEQ ID NO: 4165148 - DNA, 25 bp, Homo sapien
gtcttgtgcagaacatattagtcat

SEQ ID NO: 4165149 - DNA, 25 bp, Homo sapien
aagaaagacagtgctgtctgtgcct

SEQ ID NO: 4165150 - DNA, 25 bp, Homo sapien
cttgagatccactcagagatgttat

SEQ ID NO: 4165151 - DNA, 25 bp, Homo sapien
aggaagaaagacagtgctgtctgtg

SEQ ID NO: 4165152 - DNA, 25 bp, Homo sapien
gagatccactcagagatgttatgag

SEQ ID NO: 4165153 - DNA, 25 bp, Homo sapien
ctacagtcaagagcagagaagttat

SEQ ID NO: 4165154 - DNA, 25 bp, Homo sapien
tcaagagcagagaagttataaagag

SEQ ID NO: 4165155 - DNA, 25 bp, Homo sapien
tacagtcaagagcagagaagttata

SEQ ID NO: 4165156 - DNA, 25 bp, Homo sapien
cagtcaagagcagagaagttataaa

SEQ ID NO: 4165157 - DNA, 25 bp, Homo sapien
gcatatctgggatcttggctttcca

SEQ ID NO: 4165158 - DNA, 25 bp, Homo sapien
tcggatcccctctcaaatgaagaag

SEQ ID NO: 4165159 - DNA, 25 bp, Homo sapien
cagtgtattacgacttcggatcccc

SEQ ID NO: 4165160 - DNA, 25 bp, Homo sapien
actgcctttgtagtaactgtgaacc

SEQ ID NO: 4165161 - DNA, 25 bp, Homo sapien
tcgtccagcgccctgtccatgtttg

SEQ ID NO: 4165162 - DNA, 25 bp, Homo sapien
gataattggacgaggataaacactt

SEQ ID NO: 4165163 - DNA, 25 bp, Homo sapien
tttcatacttcatcacgggtgtgag

SEQ ID NO: 4165164 - DNA, 25 bp, Homo sapien
taacacgctgcatattaagaagctg

SEQ ID NO: 4165165 - DNA, 25 bp, Homo sapien
gagaatcgggattcattgataattg

SEQ ID NO: 4165166 - DNA, 25 bp, Homo sapien
tacaggttgacatgagagtgaaacg

SEQ ID NO: 4165167 - DNA, 25 bp, Homo sapien
gctcagatagtaagccaggacagag

SEQ ID NO: 4165168 - DNA, 25 bp, Homo sapien
gagagtgaaacgtgttcactttgca

SEQ ID NO: 4165169 - DNA, 25 bp, Homo sapien
tgaaagattaagatccatcaaattc

SEQ ID NO: 4165170 - DNA, 25 bp, Homo sapien
ctgaaagattaagatccatcaaatt

SEQ ID NO: 4165171 - DNA, 25 bp, Homo sapien
catagagaagtcactctggtttatc

SEQ ID NO: 4165172 - DNA, 25 bp, Homo sapien
aattcatagagaagtcactctggtt

SEQ ID NO: 4165173 - DNA, 25 bp, Homo sapien
cactgtgtggatggtaagtaaagta

SEQ ID NO: 4165174 - DNA, 25 bp, Homo sapien
cagcgcatggagtcatcaaaatgtg

SEQ ID NO: 4165175 - DNA, 25 bp, Homo sapien
tcagcgcatggagtcatcaaaatgt

SEQ ID NO: 4165176 - DNA, 25 bp, Homo sapien
atcgcagagggcaccaaaatccata

SEQ ID NO: 4165177 - DNA, 25 bp, Homo sapien
gccaaaatcgcagagggcaccaaaa

SEQ ID NO: 4165178 - DNA, 25 bp, Homo sapien
ccataagcctttgttatgggaagct

SEQ ID NO: 4165179 - DNA, 25 bp, Homo sapien
tccataagcctttgttatgggaagc

SEQ ID NO: 4165180 - DNA, 25 bp, Homo sapien
ggtgaattttgtgaatgacattcca

SEQ ID NO: 4165181 - DNA, 25 bp, Homo sapien
gtatatagtttggtgtacctctgct

SEQ ID NO: 4165182 - DNA, 25 bp, Homo sapien
tagctgtttgggcatgtatttccat

SEQ ID NO: 4165183 - DNA, 25 bp, Homo sapien
gctgcagtgaatatgcttgtatata

SEQ ID NO: 4165184 - DNA, 25 bp, Homo sapien
gacagggaagagtgaaattaggtat

SEQ ID NO: 4165185 - DNA, 25 bp, Homo sapien
ctgtagatcagagacagggaagagt

SEQ ID NO: 4165186 - DNA, 25 bp, Homo sapien
cagggaagagtgaaattaggtattt

SEQ ID NO: 4165187 - DNA, 25 bp, Homo sapien
gagacagggaagagtgaaattaggt

SEQ ID NO: 4165188 - DNA, 25 bp, Homo sapien
ttgggctccatcagcagggtgtctg

SEQ ID NO: 4165189 - DNA, 25 bp, Homo sapien
tgttgggctccatcagcagggtgtc

SEQ ID NO: 4165190 - DNA, 25 bp, Homo sapien
agggtgtctgctcctcctggcttct

SEQ ID NO: 4165191 - DNA, 25 bp, Homo sapien
cttgttgggctccatcagcagggtg

SEQ ID NO: 4165192 - DNA, 25 bp, Homo sapien
taaagtggccaatactgtgacagag

SEQ ID NO: 4165193 - DNA, 25 bp, Homo sapien
gtcatgaaactacaaccagggagct

SEQ ID NO: 4165194 - DNA, 25 bp, Homo sapien
cttctctcagacatgggaggctgac

SEQ ID NO: 4165195 - DNA, 25 bp, Homo sapien
ccatctcactgcagaagtatggaat

SEQ ID NO: 4165196 - DNA, 25 bp, Homo sapien
tgctccaaagccggggaataaaggc

SEQ ID NO: 4165197 - DNA, 25 bp, Homo sapien
ggaataaaggcagttcagtcagctc

SEQ ID NO: 4165198 - DNA, 25 bp, Homo sapien
taaatgtgtatggttgatccaggtg

SEQ ID NO: 4165199 - DNA, 25 bp, Homo sapien
gtaaatgtgtatggttgatccaggt

SEQ ID NO: 4165200 - DNA, 25 bp, Homo sapien
cgccattatcgggtgcactgggaca

SEQ ID NO: 4165201 - DNA, 25 bp, Homo sapien
ttatcgggtgcactgggacagcgct

SEQ ID NO: 4165202 - DNA, 25 bp, Homo sapien
tgcactgggacagcgctcaccagga

SEQ ID NO: 4165203 - DNA, 25 bp, Homo sapien
cattttcttcgccattatcgggtgc

SEQ ID NO: 4165204 - DNA, 25 bp, Homo sapien
taattatagacattgggaaaagcct

SEQ ID NO: 4165205 - DNA, 25 bp, Homo sapien
tgggcggcaaaaagctttagtctat

SEQ ID NO: 4165206 - DNA, 25 bp, Homo sapien
ccatgtatttaagcaagtagagcct

SEQ ID NO: 4165207 - DNA, 25 bp, Homo sapien
gaataagtacattggctcaccctca

SEQ ID NO: 4165208 - DNA, 25 bp, Homo sapien
cagattgggaatcaacccctagtga

SEQ ID NO: 4165209 - DNA, 25 bp, Homo sapien
tccagattcttagtggagagctcac

SEQ ID NO: 4165210 - DNA, 25 bp, Homo sapien
tatactcaatgcaggtagtgggtca

SEQ ID NO: 4165211 - DNA, 25 bp, Homo sapien
tagaattgtctgctccgacaggcca

SEQ ID NO: 4165212 - DNA, 25 bp, Homo sapien
tgtacctattgaaccgtcctctagg

SEQ ID NO: 4165213 - DNA, 25 bp, Homo sapien
gtttgctgtacctattgaaccgtcc

SEQ ID NO: 4165214 - DNA, 25 bp, Homo sapien
tgctgtacctattgaaccgtcctct

SEQ ID NO: 4165215 - DNA, 25 bp, Homo sapien
tttgctgtacctattgaaccgtcct

SEQ ID NO: 4165216 - DNA, 25 bp, Homo sapien
agggactcagcttggttctggacat

SEQ ID NO: 4165217 - DNA, 25 bp, Homo sapien
gggactcagcttggttctggacatg

SEQ ID NO: 4165218 - DNA, 25 bp, Homo sapien
aagaatagcatcccctgctttgaaa

SEQ ID NO: 4165219 - DNA, 25 bp, Homo sapien
aagggactcagcttggttctggaca

SEQ ID NO: 4165220 - DNA, 25 bp, Homo sapien
tagacacatacgtgactttgtacca

SEQ ID NO: 4165221 - DNA, 25 bp, Homo sapien
ttgtaccatatcaatttggagtcca

SEQ ID NO: 4165222 - DNA, 25 bp, Homo sapien
taccatatcaatttggagtccaaga

SEQ ID NO: 4165223 - DNA, 25 bp, Homo sapien
tctttccacagtagacacatacgtg

SEQ ID NO: 4165224 - DNA, 25 bp, Homo sapien
tgctactcctgattctggttcctga

SEQ ID NO: 4165225 - DNA, 25 bp, Homo sapien
tatcaaagccactgagaagtgggcc

SEQ ID NO: 4165226 - DNA, 25 bp, Homo sapien
taagcggttccttttgtaagatgag

SEQ ID NO: 4165227 - DNA, 25 bp, Homo sapien
tgtgtggctaagtaggtaaacacct

SEQ ID NO: 4165228 - DNA, 25 bp, Homo sapien
taaatgaagttaatggcagaggctc

SEQ ID NO: 4165229 - DNA, 25 bp, Homo sapien
gagtggctgagtgagaacaatgtgt

SEQ ID NO: 4165230 - DNA, 25 bp, Homo sapien
gggcaagttgcaattagaagtgaaa

SEQ ID NO: 4165231 - DNA, 25 bp, Homo sapien
cacacatagtgtttgcagtgctttc

SEQ ID NO: 4165232 - DNA, 25 bp, Homo sapien
tcttaaagacacaaccatgatacca

SEQ ID NO: 4165233 - DNA, 25 bp, Homo sapien
tatggcctagaaccagtgataactc

SEQ ID NO: 4165234 - DNA, 25 bp, Homo sapien
tccaatgacatatataagaaccaag

SEQ ID NO: 4165235 - DNA, 25 bp, Homo sapien
gataactcagtagcaacgaccagca

SEQ ID NO: 4165236 - DNA, 25 bp, Homo sapien
ctgtatctctgggtgtgcattagca

SEQ ID NO: 4165237 - DNA, 25 bp, Homo sapien
ggacctctaagaagacatttcgcca

SEQ ID NO: 4165238 - DNA, 25 bp, Homo sapien
tgcattagcaattgaaaggacctct

SEQ ID NO: 4165239 - DNA, 25 bp, Homo sapien
cacagttcaggaaaagtctctggct

SEQ ID NO: 4165240 - DNA, 25 bp, Homo sapien
gaagcactggcctagaacattgcct

SEQ ID NO: 4165241 - DNA, 25 bp, Homo sapien
cagaccctcactactcaacatgtgg

SEQ ID NO: 4165242 - DNA, 25 bp, Homo sapien
gatcccttggtggttcatatgcaca

SEQ ID NO: 4165243 - DNA, 25 bp, Homo sapien
tgtggcccatggacatcgcttggga

SEQ ID NO: 4165244 - DNA, 25 bp, Homo sapien
acctaagtgcttattaattgtgaaa

SEQ ID NO: 4165245 - DNA, 25 bp, Homo sapien
tgtccactctagaggaacactctca

SEQ ID NO: 4165246 - DNA, 25 bp, Homo sapien
tatgaatagtttgatttgtaaaagc

SEQ ID NO: 4165247 - DNA, 25 bp, Homo sapien
caaactaaggaatgtctaaatcgtg

SEQ ID NO: 4165248 - DNA, 25 bp, Homo sapien
gaaatgctgccttcagtcgcatctc

SEQ ID NO: 4165249 - DNA, 25 bp, Homo sapien
tgccttcagtcgcatctctggaggg

SEQ ID NO: 4165250 - DNA, 25 bp, Homo sapien
cagtcgcatctctggagggccatca

SEQ ID NO: 4165251 - DNA, 25 bp, Homo sapien
cgcatctctggagggccatcattta

SEQ ID NO: 4165252 - DNA, 25 bp, Homo sapien
tgctggcaaggttaatttgtttact

SEQ ID NO: 4165253 - DNA, 25 bp, Homo sapien
tcagttctatactcatctgtgtttc

SEQ ID NO: 4165254 - DNA, 25 bp, Homo sapien
acttcttttgggcattcgggctctt

SEQ ID NO: 4165255 - DNA, 25 bp, Homo sapien
cttttgggcattcgggctctttcat

SEQ ID NO: 4165256 - DNA, 25 bp, Homo sapien
cctttcaacatgtagatgaactttt

SEQ ID NO: 4165257 - DNA, 25 bp, Homo sapien
gtagatgaacttttcctctaagaga

SEQ ID NO: 4165258 - DNA, 25 bp, Homo sapien
tataatttcctttcaacatgtagat

SEQ ID NO: 4165259 - DNA, 25 bp, Homo sapien
gatgaacttttcctctaagagaatt

SEQ ID NO: 4165260 - DNA, 25 bp, Homo sapien
gtgcagagatccagcattttgatca

SEQ ID NO: 4165261 - DNA, 25 bp, Homo sapien
cttctctggatcaatagcgaatagc

SEQ ID NO: 4165262 - DNA, 25 bp, Homo sapien
tcaatagcgaatagctcagtgcaga

SEQ ID NO: 4165263 - DNA, 25 bp, Homo sapien
tgatcagagattgggaggtagtaaa

SEQ ID NO: 4165264 - DNA, 25 bp, Homo sapien
gcacaatgctcacttttggattaag

SEQ ID NO: 4165265 - DNA, 25 bp, Homo sapien
gaatttacctgaagaatccaagaga

SEQ ID NO: 4165266 - DNA, 25 bp, Homo sapien
taataaacccgttctgtcatctgta

SEQ ID NO: 4165267 - DNA, 25 bp, Homo sapien
gctcttggtgttaatggaagcaatt

SEQ ID NO: 4165268 - DNA, 25 bp, Homo sapien
ggaccagtaatgtgcatatcagtgt

SEQ ID NO: 4165269 - DNA, 25 bp, Homo sapien
gacaggaccagtaatgtgcatatca

SEQ ID NO: 4165270 - DNA, 25 bp, Homo sapien
ctgacaggaccagtaatgtgcatat

SEQ ID NO: 4165271 - DNA, 25 bp, Homo sapien
caggaccagtaatgtgcatatcagt

SEQ ID NO: 4165272 - DNA, 25 bp, Homo sapien
ctacaagctcatccgcttccccagg

SEQ ID NO: 4165273 - DNA, 25 bp, Homo sapien
tgctgaactcaaattggcaacccag

SEQ ID NO: 4165274 - DNA, 25 bp, Homo sapien
agctctgctgaactcaaattggcaa

SEQ ID NO: 4165275 - DNA, 25 bp, Homo sapien
acagctctgctgaactcaaattggc

SEQ ID NO: 4165276 - DNA, 25 bp, Homo sapien
tgccagcaactccagttgaaggagt

SEQ ID NO: 4165277 - DNA, 25 bp, Homo sapien
ccagcaactccagttgaaggagtac

SEQ ID NO: 4165278 - DNA, 25 bp, Homo sapien
ggtgagtcctgaaatgccagcaact

SEQ ID NO: 4165279 - DNA, 25 bp, Homo sapien
agaacaagtcgggtgagtcctgaaa

SEQ ID NO: 4165280 - DNA, 25 bp, Homo sapien
caacaaagtgacacacgtctccaca

SEQ ID NO: 4165281 - DNA, 25 bp, Homo sapien
ggctctcagtgattaccaataaata

SEQ ID NO: 4165282 - DNA, 25 bp, Homo sapien
aaaacttggtcactgctcatgcctg

SEQ ID NO: 4165283 - DNA, 25 bp, Homo sapien
gatcatcactttaccttggctctca

SEQ ID NO: 4165284 - DNA, 25 bp, Homo sapien
gattttactgctagagaagtttgtc

SEQ ID NO: 4165285 - DNA, 25 bp, Homo sapien
tatactgctgtagcataatttctaa

SEQ ID NO: 4165286 - DNA, 25 bp, Homo sapien
gattatttagatcttaagaccaaac

SEQ ID NO: 4165287 - DNA, 25 bp, Homo sapien
caaactttcttggtataacagtcct

SEQ ID NO: 4165288 - DNA, 25 bp, Homo sapien
gtcaagcacagatcattttcctgag

SEQ ID NO: 4165289 - DNA, 25 bp, Homo sapien
cacaaactcagcataaccaataatg

SEQ ID NO: 4165290 - DNA, 25 bp, Homo sapien
actctgggacttatattctaaacct

SEQ ID NO: 4165291 - DNA, 25 bp, Homo sapien
tacaaataagaaccctggaaatcac

SEQ ID NO: 4165292 - DNA, 25 bp, Homo sapien
gtctctcaggtttcttaggccaacc

SEQ ID NO: 4165293 - DNA, 25 bp, Homo sapien
gccatgtatactaccaaggaggcag

SEQ ID NO: 4165294 - DNA, 25 bp, Homo sapien
gcaacaggccatgtatactaccaag

SEQ ID NO: 4165295 - DNA, 25 bp, Homo sapien
atacaagcaacaggccatgtatact

SEQ ID NO: 4165296 - DNA, 25 bp, Homo sapien
ccacatttgtggatgtttttgacct

SEQ ID NO: 4165297 - DNA, 25 bp, Homo sapien
tttttgacctcacaaccatctggga

SEQ ID NO: 4165298 - DNA, 25 bp, Homo sapien
catggggccttagttgcatgctcct

SEQ ID NO: 4165299 - DNA, 25 bp, Homo sapien
gcatgctccttattttgcagatttg

SEQ ID NO: 4165300 - DNA, 25 bp, Homo sapien
ggtgctttataagtaagcagctgta

SEQ ID NO: 4165301 - DNA, 25 bp, Homo sapien
ctcttggagttgtgtaacgcgggtt

SEQ ID NO: 4165302 - DNA, 25 bp, Homo sapien
gagacaaatttaatgcctggtaatt

SEQ ID NO: 4165303 - DNA, 25 bp, Homo sapien
acgcgggttgctgccccttacttct

SEQ ID NO: 4165304 - DNA, 25 bp, Homo sapien
tcacatagaatataatgctaggggt

SEQ ID NO: 4165305 - DNA, 25 bp, Homo sapien
gaatataatgctaggggtcccacag

SEQ ID NO: 4165306 - DNA, 25 bp, Homo sapien
catagaatataatgctaggggtccc

SEQ ID NO: 4165307 - DNA, 25 bp, Homo sapien
tagaatataatgctaggggtcccac

SEQ ID NO: 4165308 - DNA, 25 bp, Homo sapien
ctttgaataaacctcgtctggaaga

SEQ ID NO: 4165309 - DNA, 25 bp, Homo sapien
tcctttgaataaacctcgtctggaa

SEQ ID NO: 4165310 - DNA, 25 bp, Homo sapien
cctttgaataaacctcgtctggaag

SEQ ID NO: 4165311 - DNA, 25 bp, Homo sapien
ttattggcaaatctttgtcggcaca

SEQ ID NO: 4165312 - DNA, 25 bp, Homo sapien
aaatgccttgtctaggattattggc

SEQ ID NO: 4165313 - DNA, 25 bp, Homo sapien
tgccttgtctaggattattggcaaa

SEQ ID NO: 4165314 - DNA, 25 bp, Homo sapien
gcaaatctttgtcggcacaatcttt

SEQ ID NO: 4165315 - DNA, 25 bp, Homo sapien
tccagaagccgcagaataagcaggg

SEQ ID NO: 4165316 - DNA, 25 bp, Homo sapien
caggaaggttgtgcactgaaagaga

SEQ ID NO: 4165317 - DNA, 25 bp, Homo sapien
tgggcgtggcgtctctctgttgtcc

SEQ ID NO: 4165318 - DNA, 25 bp, Homo sapien
ggttgcataagtagagatcgctcca

SEQ ID NO: 4165319 - DNA, 25 bp, Homo sapien
tggcccaccccggccgtcaccgaga

SEQ ID NO: 4165320 - DNA, 25 bp, Homo sapien
ctggcccaccccggccgtcaccgag

SEQ ID NO: 4165321 - DNA, 25 bp, Homo sapien
caacatgaaggacgaggaagcgcac

SEQ ID NO: 4165322 - DNA, 25 bp, Homo sapien
caagcgaccatttctcaggtagagg

SEQ ID NO: 4165323 - DNA, 25 bp, Homo sapien
gatttctcgccttcacgggatctca

SEQ ID NO: 4165324 - DNA, 25 bp, Homo sapien
gatgacgcacaaacgaaaaactggc

SEQ ID NO: 4165325 - DNA, 25 bp, Homo sapien
taatgccaataggttgactctgaga

SEQ ID NO: 4165326 - DNA, 25 bp, Homo sapien
agaaactaccatccccgggcagaag

SEQ ID NO: 4165327 - DNA, 25 bp, Homo sapien
tcccaggccgcctcaaaatctaggg

SEQ ID NO: 4165328 - DNA, 25 bp, Homo sapien
gactaatttgccacataatgccaat

SEQ ID NO: 4165329 - DNA, 25 bp, Homo sapien
ccggagcaatacctggcccagggtc

SEQ ID NO: 4165330 - DNA, 25 bp, Homo sapien
cgagtaacaccctccggagcaatac

SEQ ID NO: 4165331 - DNA, 25 bp, Homo sapien
aactgacgctaacgagtaacaccct

SEQ ID NO: 4165332 - DNA, 25 bp, Homo sapien
taacgagtaacaccctccggagcaa

SEQ ID NO: 4165333 - DNA, 25 bp, Homo sapien
atcaatcatgccagagagaaacaga

SEQ ID NO: 4165334 - DNA, 25 bp, Homo sapien
caatgtgtcagcaaagttggttctg

SEQ ID NO: 4165335 - DNA, 25 bp, Homo sapien
ttggttctgataagggtgctcttct

SEQ ID NO: 4165336 - DNA, 25 bp, Homo sapien
atcaatgtgtcagcaaagttggttc

SEQ ID NO: 4165337 - DNA, 25 bp, Homo sapien
ctgataagggtgctcttctgggctg

SEQ ID NO: 4165338 - DNA, 25 bp, Homo sapien
tattcacgtcaaagcaggcacagct

SEQ ID NO: 4165339 - DNA, 25 bp, Homo sapien
aataccaagggttcagtctagatcc

SEQ ID NO: 4165340 - DNA, 25 bp, Homo sapien
gctttaattgggtgctacagctggg

SEQ ID NO: 4165341 - DNA, 25 bp, Homo sapien
gctggccgcctggaaagataatcac

SEQ ID NO: 4165342 - DNA, 25 bp, Homo sapien
tgaatctctgtgatgaaaggttttc

SEQ ID NO: 4165343 - DNA, 25 bp, Homo sapien
ctgagatgaatctctgtgatgaaag

SEQ ID NO: 4165344 - DNA, 25 bp, Homo sapien
tgatgaaaggttttccaggagaaag

SEQ ID NO: 4165345 - DNA, 25 bp, Homo sapien
gatgaaaggttttccaggagaaaga

SEQ ID NO: 4165346 - DNA, 25 bp, Homo sapien
taattcagcatagggtaattcccaa

SEQ ID NO: 4165347 - DNA, 25 bp, Homo sapien
tgaacccatctaaaacaccctgagg

SEQ ID NO: 4165348 - DNA, 25 bp, Homo sapien
tttctgatcctaccctaagcccgga

SEQ ID NO: 4165349 - DNA, 25 bp, Homo sapien
caagcacaagactggatgaagtttc

SEQ ID NO: 4165350 - DNA, 25 bp, Homo sapien
ccaactgactttaaatactgccctt

SEQ ID NO: 4165351 - DNA, 25 bp, Homo sapien
aaaaatcttattccactgcttgcca

SEQ ID NO: 4165352 - DNA, 25 bp, Homo sapien
tattccactgcttgccaactgactt

SEQ ID NO: 4165353 - DNA, 25 bp, Homo sapien
tacaaaaatcttattccactgcttg

SEQ ID NO: 4165354 - DNA, 25 bp, Homo sapien
aaaattcatctggtagagaatccat

SEQ ID NO: 4165355 - DNA, 25 bp, Homo sapien
caaaaaattcatctggtagagaatc

SEQ ID NO: 4165356 - DNA, 25 bp, Homo sapien
cacaaaaaattcatctggtagagaa

SEQ ID NO: 4165357 - DNA, 25 bp, Homo sapien
aaaaattcatctggtagagaatcca

SEQ ID NO: 4165358 - DNA, 25 bp, Homo sapien
cttcctcctctgtacaaataaagcc

SEQ ID NO: 4165359 - DNA, 25 bp, Homo sapien
tcctcctctgtacaaataaagccaa

SEQ ID NO: 4165360 - DNA, 25 bp, Homo sapien
acttcctcctctgtacaaataaagc

SEQ ID NO: 4165361 - DNA, 25 bp, Homo sapien
ttcctcctctgtacaaataaagcca

SEQ ID NO: 4165362 - DNA, 25 bp, Homo sapien
cagttgaccagatgatttttctagc

SEQ ID NO: 4165363 - DNA, 25 bp, Homo sapien
tccttcctctgatcctccacagcag

SEQ ID NO: 4165364 - DNA, 25 bp, Homo sapien
cctctgatcctccacagcaggatgc

SEQ ID NO: 4165365 - DNA, 25 bp, Homo sapien
agatgatttttctagcttattctca

SEQ ID NO: 4165366 - DNA, 25 bp, Homo sapien
ttctaatagtaggttaacagggaca

SEQ ID NO: 4165367 - DNA, 25 bp, Homo sapien
tagtaggttaacagggacaagatca

SEQ ID NO: 4165368 - DNA, 25 bp, Homo sapien
cagggacaagatcagtaggtatgtc

SEQ ID NO: 4165369 - DNA, 25 bp, Homo sapien
accttttggtagagtattaattgca

SEQ ID NO: 4165370 - DNA, 25 bp, Homo sapien
acattttatgagttaggagaacaaa

SEQ ID NO: 4165371 - DNA, 25 bp, Homo sapien
agtcccctgtcccagactggcatgt

SEQ ID NO: 4165372 - DNA, 25 bp, Homo sapien
tgttacaggttattagcaggactgg

SEQ ID NO: 4165373 - DNA, 25 bp, Homo sapien
taggagaacaaaagcagtcccctgt

SEQ ID NO: 4165374 - DNA, 25 bp, Homo sapien
tgccagcttgaatgttcctaagtgc

SEQ ID NO: 4165375 - DNA, 25 bp, Homo sapien
caagaaacgtaaagtcaaagcagga

SEQ ID NO: 4165376 - DNA, 25 bp, Homo sapien
ttcctaagtgctgcttctagctgtg

SEQ ID NO: 4165377 - DNA, 25 bp, Homo sapien
gcttctagctgtgtaatcaagaaac

SEQ ID NO: 4165378 - DNA, 25 bp, Homo sapien
accatccacctttaaaaatacaatg

SEQ ID NO: 4165379 - DNA, 25 bp, Homo sapien
taccccataaaatgtacacctatat

SEQ ID NO: 4165380 - DNA, 25 bp, Homo sapien
taataatataacgaacactgaagta

SEQ ID NO: 4165381 - DNA, 25 bp, Homo sapien
tattttaggtatcaagaacacatta

SEQ ID NO: 4165382 - DNA, 25 bp, Homo sapien
aataaccaatattaatctggtgtgc

SEQ ID NO: 4165383 - DNA, 25 bp, Homo sapien
ataataaccaatattaatctggtgt

SEQ ID NO: 4165384 - DNA, 25 bp, Homo sapien
aacagtaatgtcaaataataaccaa

SEQ ID NO: 4165385 - DNA, 25 bp, Homo sapien
aaacagtaatgtcaaataataacca

SEQ ID NO: 4165386 - DNA, 25 bp, Homo sapien
tgagcacatcgcagtaaaccacgtc

SEQ ID NO: 4165387 - DNA, 25 bp, Homo sapien
catcgcagtaaaccacgtccaaaat

SEQ ID NO: 4165388 - DNA, 25 bp, Homo sapien
ttttgagcacatcgcagtaaaccac

SEQ ID NO: 4165389 - DNA, 25 bp, Homo sapien
ctcttttgagcacatcgcagtaaac

SEQ ID NO: 4165390 - DNA, 25 bp, Homo sapien
gaaattctagcagtcctccattata

SEQ ID NO: 4165391 - DNA, 25 bp, Homo sapien
ttatgaaattctagcagtcctccat

SEQ ID NO: 4165392 - DNA, 25 bp, Homo sapien
cttcatcttctgtaggatctatgtc

SEQ ID NO: 4165393 - DNA, 25 bp, Homo sapien
ggatctatgtcaaaccaatggtcat

SEQ ID NO: 4165394 - DNA, 25 bp, Homo sapien
ggtaactacaaatcgtctgcttcat

SEQ ID NO: 4165395 - DNA, 25 bp, Homo sapien
caagatcgttcacaatctaggtaac

SEQ ID NO: 4165396 - DNA, 25 bp, Homo sapien
caatctaggtaactacaaatcgtct

SEQ ID NO: 4165397 - DNA, 25 bp, Homo sapien
atgtcagcttcacaagatcgttcac

SEQ ID NO: 4165398 - DNA, 25 bp, Homo sapien
ttccagcaaattttatggaaataaa

SEQ ID NO: 4165399 - DNA, 25 bp, Homo sapien
ctggatactttaaattcttgaactt

SEQ ID NO: 4165400 - DNA, 25 bp, Homo sapien
attgcagcatccttaccatgtcacc

SEQ ID NO: 4165401 - DNA, 25 bp, Homo sapien
attttaacaattccaggtacatcac

SEQ ID NO: 4165402 - DNA, 25 bp, Homo sapien
tccaggtacatcacattgcagcatc

SEQ ID NO: 4165403 - DNA, 25 bp, Homo sapien
ttaccatgtcacctgtacatccttc

SEQ ID NO: 4165404 - DNA, 25 bp, Homo sapien
caatggtgatatattcatcctttct

SEQ ID NO: 4165405 - DNA, 25 bp, Homo sapien
ttcaatggtgatatattcatccttt

SEQ ID NO: 4165406 - DNA, 25 bp, Homo sapien
tcaatggtgatatattcatcctttc

SEQ ID NO: 4165407 - DNA, 25 bp, Homo sapien
tatcagttattttcagagatatcaa

SEQ ID NO: 4165408 - DNA, 25 bp, Homo sapien
attttaaactgatcttcggtcttat

SEQ ID NO: 4165409 - DNA, 25 bp, Homo sapien
gatcttcggtcttatatcagtatca

SEQ ID NO: 4165410 - DNA, 25 bp, Homo sapien
ttattttcagagatatcaactttct

SEQ ID NO: 4165411 - DNA, 25 bp, Homo sapien
taagagctaacaggaggcataagtc

SEQ ID NO: 4165412 - DNA, 25 bp, Homo sapien
gagatgtcagaagatggcggttcca

SEQ ID NO: 4165413 - DNA, 25 bp, Homo sapien
tgtatttgcacagtctcaggatgtc

SEQ ID NO: 4165414 - DNA, 25 bp, Homo sapien
ctggtactggtatgcctaggtagac

SEQ ID NO: 4165415 - DNA, 25 bp, Homo sapien
cctgttattgactgtagagcaattc

SEQ ID NO: 4165416 - DNA, 25 bp, Homo sapien
gactgcctgttattgactgtagagc

SEQ ID NO: 4165417 - DNA, 25 bp, Homo sapien
gctgactgcctgttattgactgtag

SEQ ID NO: 4165418 - DNA, 25 bp, Homo sapien
ctgcctgttattgactgtagagcaa

SEQ ID NO: 4165419 - DNA, 25 bp, Homo sapien
tttctgcaaactgtatctcagggtg

SEQ ID NO: 4165420 - DNA, 25 bp, Homo sapien
gtattgaggtcccatctttattaat

SEQ ID NO: 4165421 - DNA, 25 bp, Homo sapien
aagattcactgggtattgaggtccc

SEQ ID NO: 4165422 - DNA, 25 bp, Homo sapien
atattgtactccatgagaggtggac

SEQ ID NO: 4165423 - DNA, 25 bp, Homo sapien
ggaccattccaattcaagctctgta

SEQ ID NO: 4165424 - DNA, 25 bp, Homo sapien
cacacatggatgtaacaaaggagga

SEQ ID NO: 4165425 - DNA, 25 bp, Homo sapien
aaatacggagattccattctggacg

SEQ ID NO: 4165426 - DNA, 25 bp, Homo sapien
ggacgaatttcattctacctctgcg

SEQ ID NO: 4165427 - DNA, 25 bp, Homo sapien
ttgttcacaataaacacatctagca

SEQ ID NO: 4165428 - DNA, 25 bp, Homo sapien
tgttcacaataaacacatctagcat

SEQ ID NO: 4165429 - DNA, 25 bp, Homo sapien
cttttggttgttcacaataaacaca

SEQ ID NO: 4165430 - DNA, 25 bp, Homo sapien
acttggtcttcttttgagtctttat

SEQ ID NO: 4165431 - DNA, 25 bp, Homo sapien
cttggtcttcttttgagtctttatt

SEQ ID NO: 4165432 - DNA, 25 bp, Homo sapien
tttataagtctactgactgagtgtg

SEQ ID NO: 4165433 - DNA, 25 bp, Homo sapien
tactgactgagtgtggatttgcttg

SEQ ID NO: 4165434 - DNA, 25 bp, Homo sapien
taagtctactgactgagtgtggatt

SEQ ID NO: 4165435 - DNA, 25 bp, Homo sapien
gtctactgactgagtgtggatttgc

SEQ ID NO: 4165436 - DNA, 25 bp, Homo sapien
caattcatccaggctatagaacttg

SEQ ID NO: 4165437 - DNA, 25 bp, Homo sapien
gcaattcatccaggctatagaactt

SEQ ID NO: 4165438 - DNA, 25 bp, Homo sapien
tgcaattcatccaggctatagaact

SEQ ID NO: 4165439 - DNA, 25 bp, Homo sapien
tatgcaattcatccaggctatagaa

SEQ ID NO: 4165440 - DNA, 25 bp, Homo sapien
taaagagtcacaggaaaaaccagat

SEQ ID NO: 4165441 - DNA, 25 bp, Homo sapien
aaggcaggcaccctctctaatcatg

SEQ ID NO: 4165442 - DNA, 25 bp, Homo sapien
tcgaaaaacgtttgcaagaaatgca

SEQ ID NO: 4165443 - DNA, 25 bp, Homo sapien
ccaggaaatggtttgagggctaaag

SEQ ID NO: 4165444 - DNA, 25 bp, Homo sapien
tcgtcacatagttcttgtgctgtgg

SEQ ID NO: 4165445 - DNA, 25 bp, Homo sapien
cagttgagtgaatcggctactgagg

SEQ ID NO: 4165446 - DNA, 25 bp, Homo sapien
gcattcgtcacatagttcttgtgct

SEQ ID NO: 4165447 - DNA, 25 bp, Homo sapien
gtgcattcgtcacatagttcttgtg

SEQ ID NO: 4165448 - DNA, 25 bp, Homo sapien
gtgccttaggattgacttcgcaatg

SEQ ID NO: 4165449 - DNA, 25 bp, Homo sapien
ttgtgccttaggattgacttcgcaa

SEQ ID NO: 4165450 - DNA, 25 bp, Homo sapien
tcttgtgccttaggattgacttcgc

SEQ ID NO: 4165451 - DNA, 25 bp, Homo sapien
gttcttgtgccttaggattgacttc

SEQ ID NO: 4165452 - DNA, 25 bp, Homo sapien
tgctgctgctggataccactaccgg

SEQ ID NO: 4165453 - DNA, 25 bp, Homo sapien
gtctcaagtcaaacactcaatttag

SEQ ID NO: 4165454 - DNA, 25 bp, Homo sapien
taaacagtaccagttacttgcctgt

SEQ ID NO: 4165455 - DNA, 25 bp, Homo sapien
acctcccctcaattacagcatttaa

SEQ ID NO: 4165456 - DNA, 25 bp, Homo sapien
ccatagtctgtagttactttgccag

SEQ ID NO: 4165457 - DNA, 25 bp, Homo sapien
gcctttgacgagcaagcctttcctt

SEQ ID NO: 4165458 - DNA, 25 bp, Homo sapien
ttataaagctgcctttgacgagcaa

SEQ ID NO: 4165459 - DNA, 25 bp, Homo sapien
gtttctccatagtctgtagttactt

SEQ ID NO: 4165460 - DNA, 25 bp, Homo sapien
tttcttgccaccgaaaagtcactgt

SEQ ID NO: 4165461 - DNA, 25 bp, Homo sapien
cactgttctcaactgtcttttgaaa

SEQ ID NO: 4165462 - DNA, 25 bp, Homo sapien
ccaaaagcaacttgttgattaagag

SEQ ID NO: 4165463 - DNA, 25 bp, Homo sapien
caacttgttgattaagagatgcgat

SEQ ID NO: 4165464 - DNA, 25 bp, Homo sapien
tgacaccttcccatgaaagtggagc

SEQ ID NO: 4165465 - DNA, 25 bp, Homo sapien
gagagatgtacaagttcagctcccc

SEQ ID NO: 4165466 - DNA, 25 bp, Homo sapien
tggaatataagatcagctccttgct

SEQ ID NO: 4165467 - DNA, 25 bp, Homo sapien
tgcctcagtgcagacgagagatgta

SEQ ID NO: 4165468 - DNA, 25 bp, Homo sapien
tcttggtagatacatcctgtggtca

SEQ ID NO: 4165469 - DNA, 25 bp, Homo sapien
gcctcagctatgtggcacaaatttt

SEQ ID NO: 4165470 - DNA, 25 bp, Homo sapien
tcttggtatctctccgttactgatg

SEQ ID NO: 4165471 - DNA, 25 bp, Homo sapien
tccattgtgacctgagaacatgctt

SEQ ID NO: 4165472 - DNA, 25 bp, Homo sapien
gctctttaaggttcttgatttcatt

SEQ ID NO: 4165473 - DNA, 25 bp, Homo sapien
tgctctttaaggttcttgatttcat

SEQ ID NO: 4165474 - DNA, 25 bp, Homo sapien
gttgctctttaaggttcttgatttc

SEQ ID NO: 4165475 - DNA, 25 bp, Homo sapien
aagttgctctttaaggttcttgatt

SEQ ID NO: 4165476 - DNA, 25 bp, Homo sapien
aatatcagcctcaaaagtaccccgg

SEQ ID NO: 4165477 - DNA, 25 bp, Homo sapien
tcagagagagtgcacccaaagaaaa

SEQ ID NO: 4165478 - DNA, 25 bp, Homo sapien
gataaattacatcaatatgccagcc

SEQ ID NO: 4165479 - DNA, 25 bp, Homo sapien
tatttgcctaagatactcccagttt

SEQ ID NO: 4165480 - DNA, 25 bp, Homo sapien
taaagactcgcaatattacatcaag

SEQ ID NO: 4165481 - DNA, 25 bp, Homo sapien
agactcgcaatattacatcaagcag

SEQ ID NO: 4165482 - DNA, 25 bp, Homo sapien
gatcattaaagactcgcaatattac

SEQ ID NO: 4165483 - DNA, 25 bp, Homo sapien
tcattaaagactcgcaatattacat

SEQ ID NO: 4165484 - DNA, 25 bp, Homo sapien
ctgcgttcagtttgcttacgtatgt

SEQ ID NO: 4165485 - DNA, 25 bp, Homo sapien
tcagtttgcttacgtatgttttcat

SEQ ID NO: 4165486 - DNA, 25 bp, Homo sapien
gcttacgtatgttttcattgtgctt

SEQ ID NO: 4165487 - DNA, 25 bp, Homo sapien
tgcttacgtatgttttcattgtgct

SEQ ID NO: 4165488 - DNA, 25 bp, Homo sapien
caccctggcaagctgattgagacat

SEQ ID NO: 4165489 - DNA, 25 bp, Homo sapien
tctgctctagatgaagcaaaccaaa

SEQ ID NO: 4165490 - DNA, 25 bp, Homo sapien
cttgctgccatgtgagtcaccctgg

SEQ ID NO: 4165491 - DNA, 25 bp, Homo sapien
ttttcagtctgctctagatgaagca

SEQ ID NO: 4165492 - DNA, 25 bp, Homo sapien
ggagacacttgctaacatctctaaa

SEQ ID NO: 4165493 - DNA, 25 bp, Homo sapien
tcaaccgtggagacacttgctaaca

SEQ ID NO: 4165494 - DNA, 25 bp, Homo sapien
agattatattcaaccgtggagacac

SEQ ID NO: 4165495 - DNA, 25 bp, Homo sapien
gaactctgatgtcacatatgtaaaa

SEQ ID NO: 4165496 - DNA, 25 bp, Homo sapien
aaacaacaacaacaagagcttctgg

SEQ ID NO: 4165497 - DNA, 25 bp, Homo sapien
aacaacaacaacaagagcttctggt

SEQ ID NO: 4165498 - DNA, 25 bp, Homo sapien
aatctttcagcagctattattgtac

SEQ ID NO: 4165499 - DNA, 25 bp, Homo sapien
ctttcagcagctattattgtacata

SEQ ID NO: 4165500 - DNA, 25 bp, Homo sapien
actcattagacttctcagtgcttca

SEQ ID NO: 4165501 - DNA, 25 bp, Homo sapien
ttgtacatagtactcattagacttc

SEQ ID NO: 4165502 - DNA, 25 bp, Homo sapien
ggtgtaccccatgagattataaatt

SEQ ID NO: 4165503 - DNA, 25 bp, Homo sapien
catacgatttaggtgttaatactga

SEQ ID NO: 4165504 - DNA, 25 bp, Homo sapien
caattagaatccaccttgtttcata

SEQ ID NO: 4165505 - DNA, 25 bp, Homo sapien
tgtttccctcaacatattctgtagg

SEQ ID NO: 4165506 - DNA, 25 bp, Homo sapien
tatccattataacatcccacgccag

SEQ ID NO: 4165507 - DNA, 25 bp, Homo sapien
tccaatgaagcaggaaagccttagt

SEQ ID NO: 4165508 - DNA, 25 bp, Homo sapien
tttgagtacgaatgaggttgctgcc

SEQ ID NO: 4165509 - DNA, 25 bp, Homo sapien
cccatgttggaagcaagttttggac

SEQ ID NO: 4165510 - DNA, 25 bp, Homo sapien
gtttctaacatctgccacaatggca

SEQ ID NO: 4165511 - DNA, 25 bp, Homo sapien
cacaatggcattccaactgtctacc

SEQ ID NO: 4165512 - DNA, 25 bp, Homo sapien
actgtctaccgcagcctttaattga

SEQ ID NO: 4165513 - DNA, 25 bp, Homo sapien
cctgaggaatgcaatcttgtttcta

SEQ ID NO: 4165514 - DNA, 25 bp, Homo sapien
aaacacattattactcagaccgcat

SEQ ID NO: 4165515 - DNA, 25 bp, Homo sapien
tgctgatagtgttgtgaaatcacaa

SEQ ID NO: 4165516 - DNA, 25 bp, Homo sapien
gcatggtcctacaccagtacttaag

SEQ ID NO: 4165517 - DNA, 25 bp, Homo sapien
ctttagattacctgtagcatggtcc

SEQ ID NO: 4165518 - DNA, 25 bp, Homo sapien
gactggaggcaaggtactcaaggca

SEQ ID NO: 4165519 - DNA, 25 bp, Homo sapien
ctggactggaggcaaggtactcaag

SEQ ID NO: 4165520 - DNA, 25 bp, Homo sapien
ggactggaggcaaggtactcaaggc

SEQ ID NO: 4165521 - DNA, 25 bp, Homo sapien
agctggactggaggcaaggtactca

SEQ ID NO: 4165522 - DNA, 25 bp, Homo sapien
agagtggtgacttctaacttcatcc

SEQ ID NO: 4165523 - DNA, 25 bp, Homo sapien
tcacaagaggtcttcctaagaactg

SEQ ID NO: 4165524 - DNA, 25 bp, Homo sapien
taaagaaagattctttcacaagagg

SEQ ID NO: 4165525 - DNA, 25 bp, Homo sapien
gaacagtaagtatgggtctaaagaa

SEQ ID NO: 4165526 - DNA, 25 bp, Homo sapien
agttgcagagacgactcccgggcaa

SEQ ID NO: 4165527 - DNA, 25 bp, Homo sapien
gacaggtagcctcgacaataataag

SEQ ID NO: 4165528 - DNA, 25 bp, Homo sapien
caaattgcaagagttaacactgtaa

SEQ ID NO: 4165529 - DNA, 25 bp, Homo sapien
caataataagcagagtccacctgac

SEQ ID NO: 4165530 - DNA, 25 bp, Homo sapien
ttcttatagaatggtgggcaagcaa

SEQ ID NO: 4165531 - DNA, 25 bp, Homo sapien
tgatggagggatcactccgcagacc

SEQ ID NO: 4165532 - DNA, 25 bp, Homo sapien
ggcacagcgtctcccacaggcgctg

SEQ ID NO: 4165533 - DNA, 25 bp, Homo sapien
gtctgtaattctctcccaattcatg

SEQ ID NO: 4165534 - DNA, 25 bp, Homo sapien
gaaaggcagttttcagcctgtctgt

SEQ ID NO: 4165535 - DNA, 25 bp, Homo sapien
tgggcttatatagcatacaatcaac

SEQ ID NO: 4165536 - DNA, 25 bp, Homo sapien
tctttctactaaaggtagactgtga

SEQ ID NO: 4165537 - DNA, 25 bp, Homo sapien
taaatcctaaagatgtttgggctta

SEQ ID NO: 4165538 - DNA, 25 bp, Homo sapien
tacttttagtaaatgagcataccta

SEQ ID NO: 4165539 - DNA, 25 bp, Homo sapien
cctatcgcatgattgatatgtagca

SEQ ID NO: 4165540 - DNA, 25 bp, Homo sapien
tgaggatgtacccaccaaaggagat

SEQ ID NO: 4165541 - DNA, 25 bp, Homo sapien
tccttagtacctttgaggatgtacc

SEQ ID NO: 4165542 - DNA, 25 bp, Homo sapien
tatgtagcatacagacaggactctt

SEQ ID NO: 4165543 - DNA, 25 bp, Homo sapien
gggaaatcttgcaaacaatttcatc

SEQ ID NO: 4165544 - DNA, 25 bp, Homo sapien
cagttcagacaaggattttccataa

SEQ ID NO: 4165545 - DNA, 25 bp, Homo sapien
tcttgcaaacaatttcatcaaatgt

SEQ ID NO: 4165546 - DNA, 25 bp, Homo sapien
taagcatccttcaatttccgtaaga

SEQ ID NO: 4165547 - DNA, 25 bp, Homo sapien
gactaggtgaaacacaattaacatt

SEQ ID NO: 4165548 - DNA, 25 bp, Homo sapien
ggagaatgactaggtgaaacacaat

SEQ ID NO: 4165549 - DNA, 25 bp, Homo sapien
ctgtgatggagaatgactaggtgaa

SEQ ID NO: 4165550 - DNA, 25 bp, Homo sapien
gaaacacaattaacatttgacactg

SEQ ID NO: 4165551 - DNA, 25 bp, Homo sapien
aaatgtgttcagaatcaaaaatttc

SEQ ID NO: 4165552 - DNA, 25 bp, Homo sapien
gtgttcagaatcaaaaatttcagtc

SEQ ID NO: 4165553 - DNA, 25 bp, Homo sapien
atgtgttcagaatcaaaaatttcag

SEQ ID NO: 4165554 - DNA, 25 bp, Homo sapien
tgttcagaatcaaaaatttcagtct

SEQ ID NO: 4165555 - DNA, 25 bp, Homo sapien
ttgtgagcgcaaggcaaaactgaaa

SEQ ID NO: 4165556 - DNA, 25 bp, Homo sapien
ggagacagattctcatgacagatca

SEQ ID NO: 4165557 - DNA, 25 bp, Homo sapien
ctgagcatggaatttgtgagcgcaa

SEQ ID NO: 4165558 - DNA, 25 bp, Homo sapien
ctcatgacagatcacacaaggctct

SEQ ID NO: 4165559 - DNA, 25 bp, Homo sapien
ttctgtgtggtacccaaaagctcag

SEQ ID NO: 4165560 - DNA, 25 bp, Homo sapien
aaaagctcagagttatatccagtgg

SEQ ID NO: 4165561 - DNA, 25 bp, Homo sapien
tccatggctatgtatgggaaaagca

SEQ ID NO: 4165562 - DNA, 25 bp, Homo sapien
tatccagtggaacttgtgagacaac

SEQ ID NO: 4165563 - DNA, 25 bp, Homo sapien
ccttcttctgtagggtggatggaga

SEQ ID NO: 4165564 - DNA, 25 bp, Homo sapien
tattcgaaggaactgcctactgtgt

SEQ ID NO: 4165565 - DNA, 25 bp, Homo sapien
gcaaatatagaagcctgaagagact

SEQ ID NO: 4165566 - DNA, 25 bp, Homo sapien
tctaacatcaaaactcaagcctgag

SEQ ID NO: 4165567 - DNA, 25 bp, Homo sapien
taaagccttacgctgtggatcgtca

SEQ ID NO: 4165568 - DNA, 25 bp, Homo sapien
tatataaataatggagggccaggtc

SEQ ID NO: 4165569 - DNA, 25 bp, Homo sapien
tatataccaatagcaactgtgtggc

SEQ ID NO: 4165570 - DNA, 25 bp, Homo sapien
cagttgtcactctatgcatcagggt

SEQ ID NO: 4165571 - DNA, 25 bp, Homo sapien
aacgtggagtctgcacgttggacat

SEQ ID NO: 4165572 - DNA, 25 bp, Homo sapien
tcagatcttgggcaactgccggctg

SEQ ID NO: 4165573 - DNA, 25 bp, Homo sapien
ccagggaattcttctggtagcaaaa

SEQ ID NO: 4165574 - DNA, 25 bp, Homo sapien
cacgttggacatgtcccctgttgca

SEQ ID NO: 4165575 - DNA, 25 bp, Homo sapien
ctttagcactatattgaagagcaca

SEQ ID NO: 4165576 - DNA, 25 bp, Homo sapien
agttttacaccactcaaacaagcag

SEQ ID NO: 4165577 - DNA, 25 bp, Homo sapien
cagttcatttcacaagtcctgaaga

SEQ ID NO: 4165578 - DNA, 25 bp, Homo sapien
gagcttcctttgcatagacaccccg

SEQ ID NO: 4165579 - DNA, 25 bp, Homo sapien
aagaccctcattctagaggtaccca

SEQ ID NO: 4165580 - DNA, 25 bp, Homo sapien
gtacccactgtatacctggaggaaa

SEQ ID NO: 4165581 - DNA, 25 bp, Homo sapien
gatttaagacatgctactccaaaat

SEQ ID NO: 4165582 - DNA, 25 bp, Homo sapien
gaggaaaaggacatccttatctctg

SEQ ID NO: 4165583 - DNA, 25 bp, Homo sapien
ggatgggaccaaacaatctagctta

SEQ ID NO: 4165584 - DNA, 25 bp, Homo sapien
taagcagtgacgcatgtgccctgac

SEQ ID NO: 4165585 - DNA, 25 bp, Homo sapien
aaagtaaactatctggacccatcgc

SEQ ID NO: 4165586 - DNA, 25 bp, Homo sapien
tgttcgcacatgtgggagtgttccg

SEQ ID NO: 4165587 - DNA, 25 bp, Homo sapien
tctcttgacataactgggtaattgt

SEQ ID NO: 4165588 - DNA, 25 bp, Homo sapien
ttgctttgactgtggaaaacaggca

SEQ ID NO: 4165589 - DNA, 25 bp, Homo sapien
tcagattgcagtccctcacatgaca

SEQ ID NO: 4165590 - DNA, 25 bp, Homo sapien
acaattctcttgtaattgctttgac

SEQ ID NO: 4165591 - DNA, 25 bp, Homo sapien
taagacattacaagccagctccaac

SEQ ID NO: 4165592 - DNA, 25 bp, Homo sapien
ttttagacaaggtccagtggtatgc

SEQ ID NO: 4165593 - DNA, 25 bp, Homo sapien
ggtgtaaatactccaattgccgcag

SEQ ID NO: 4165594 - DNA, 25 bp, Homo sapien
tagatatgaaacttagcccagtggg

SEQ ID NO: 4165595 - DNA, 25 bp, Homo sapien
gaggtgaaactgtgaatatgaagca

SEQ ID NO: 4165596 - DNA, 25 bp, Homo sapien
gaatatgaagcaaagaacatttatc

SEQ ID NO: 4165597 - DNA, 25 bp, Homo sapien
tccccataaatttaaatggaggtga

SEQ ID NO: 4165598 - DNA, 25 bp, Homo sapien
cataaatttaaatggaggtgaaact

SEQ ID NO: 4165599 - DNA, 25 bp, Homo sapien
tgtgcaattctaagacattcttggc

SEQ ID NO: 4165600 - DNA, 25 bp, Homo sapien
tatatgaccatgaccttaaggtgtg

SEQ ID NO: 4165601 - DNA, 25 bp, Homo sapien
tgctagacaaggtgattaaaggctc

SEQ ID NO: 4165602 - DNA, 25 bp, Homo sapien
tttacatgtctagatgactgccatc

SEQ ID NO: 4165603 - DNA, 25 bp, Homo sapien
ttcaagtagtttcagaatatgctta

SEQ ID NO: 4165604 - DNA, 25 bp, Homo sapien
tgaagtaaagatttcaagtagtttc

SEQ ID NO: 4165605 - DNA, 25 bp, Homo sapien
caagtagtttcagaatatgcttata

SEQ ID NO: 4165606 - DNA, 25 bp, Homo sapien
taaagatttcaagtagtttcagaat

SEQ ID NO: 4165607 - DNA, 25 bp, Homo sapien
tttcaacattggacaggtcttccag

SEQ ID NO: 4165608 - DNA, 25 bp, Homo sapien
agaacacttcatctaaaggctgcag

SEQ ID NO: 4165609 - DNA, 25 bp, Homo sapien
tatgctcctgactgatgagtgggtc

SEQ ID NO: 4165610 - DNA, 25 bp, Homo sapien
cattggacttaatctggactatgga

SEQ ID NO: 4165611 - DNA, 25 bp, Homo sapien
cacgcgagtagtgatcatgcaaaag

SEQ ID NO: 4165612 - DNA, 25 bp, Homo sapien
gaattgatgagcttaaagacaggcc

SEQ ID NO: 4165613 - DNA, 25 bp, Homo sapien
aagaaaacaatgaagcatgcctgca

SEQ ID NO: 4165614 - DNA, 25 bp, Homo sapien
gcctgcaagatagcctcaaaaaagc

SEQ ID NO: 4165615 - DNA, 25 bp, Homo sapien
tgattcgtgctagttcagtcaccat

SEQ ID NO: 4165616 - DNA, 25 bp, Homo sapien
tcactgtcttgtagagaagaagcac

SEQ ID NO: 4165617 - DNA, 25 bp, Homo sapien
tctgtatgccttaagagcccgagga

SEQ ID NO: 4165618 - DNA, 25 bp, Homo sapien
tctggagaagacgaacaaagtgaaa

SEQ ID NO: 4165619 - DNA, 25 bp, Homo sapien
ttgatgagctcactcttcaaagttc

SEQ ID NO: 4165620 - DNA, 25 bp, Homo sapien
tttcacttctcacacaaaaggagtt

SEQ ID NO: 4165621 - DNA, 25 bp, Homo sapien
tttgtgatctctgttcatgtctgaa

SEQ ID NO: 4165622 - DNA, 25 bp, Homo sapien
caggttggtgacactctttgtgatc

SEQ ID NO: 4165623 - DNA, 25 bp, Homo sapien
agtttcctcacccattgaatcatgg

SEQ ID NO: 4165624 - DNA, 25 bp, Homo sapien
tgatgtagcagattttttgaagtat

SEQ ID NO: 4165625 - DNA, 25 bp, Homo sapien
ccagtttcctcacccattgaatcat

SEQ ID NO: 4165626 - DNA, 25 bp, Homo sapien
ttcctcacccattgaatcatggagt

SEQ ID NO: 4165627 - DNA, 25 bp, Homo sapien
taatggaaggaacgatagaaattaa

SEQ ID NO: 4165628 - DNA, 25 bp, Homo sapien
gtgttgtttgtataatggaaggaac

SEQ ID NO: 4165629 - DNA, 25 bp, Homo sapien
gtttgtataatggaaggaacgatag

SEQ ID NO: 4165630 - DNA, 25 bp, Homo sapien
tgtataatggaaggaacgatagaaa

SEQ ID NO: 4165631 - DNA, 25 bp, Homo sapien
cagacacaccgccagatataaaaag

SEQ ID NO: 4165632 - DNA, 25 bp, Homo sapien
acaccagacacaccgccagatataa

SEQ ID NO: 4165633 - DNA, 25 bp, Homo sapien
tagttcctagttactgccagagtgt

SEQ ID NO: 4165634 - DNA, 25 bp, Homo sapien
caggtgaacctgagcaaggctacct

SEQ ID NO: 4165635 - DNA, 25 bp, Homo sapien
tagctgttcattagagggcactctg

SEQ ID NO: 4165636 - DNA, 25 bp, Homo sapien
cattcagggtattgatgtgtccagt

SEQ ID NO: 4165637 - DNA, 25 bp, Homo sapien
caatataattagctgctcacttggt

SEQ ID NO: 4165638 - DNA, 25 bp, Homo sapien
cagagaggttagctatagcagaagc

SEQ ID NO: 4165639 - DNA, 25 bp, Homo sapien
cctctctcattatcccttccccagt

SEQ ID NO: 4165640 - DNA, 25 bp, Homo sapien
ctcattatcccttccccagtgttcc

SEQ ID NO: 4165641 - DNA, 25 bp, Homo sapien
tccccagtgttccttcttgtaatca

SEQ ID NO: 4165642 - DNA, 25 bp, Homo sapien
atcccttccccagtgttccttcttg

SEQ ID NO: 4165643 - DNA, 25 bp, Homo sapien
ggactggcttacttgaggacaccat

SEQ ID NO: 4165644 - DNA, 25 bp, Homo sapien
catttagggactggcttacttgagg

SEQ ID NO: 4165645 - DNA, 25 bp, Homo sapien
ctgacatttagggactggcttactt

SEQ ID NO: 4165646 - DNA, 25 bp, Homo sapien
tagggactggcttacttgaggacac

SEQ ID NO: 4165647 - DNA, 25 bp, Homo sapien
ttatctgtgcctcggattcttttct

SEQ ID NO: 4165648 - DNA, 25 bp, Homo sapien
gatgttgctctgttatgttaaaagc

SEQ ID NO: 4165649 - DNA, 25 bp, Homo sapien
cagcatgacagtaaaacttatcttt

SEQ ID NO: 4165650 - DNA, 25 bp, Homo sapien
tatatggattaaaaatcctcctaca

SEQ ID NO: 4165651 - DNA, 25 bp, Homo sapien
attttttgaacgtgacacatgatca

SEQ ID NO: 4165652 - DNA, 25 bp, Homo sapien
ggttggtgctaaataaggcacattc

SEQ ID NO: 4165653 - DNA, 25 bp, Homo sapien
gacacatgatcactacacgcacaat

SEQ ID NO: 4165654 - DNA, 25 bp, Homo sapien
ggtggttggtgctaaataaggcaca

SEQ ID NO: 4165655 - DNA, 25 bp, Homo sapien
gtgatataaccaaagccaagcccaa

SEQ ID NO: 4165656 - DNA, 25 bp, Homo sapien
cacatagtgggaaatattgaagatc

SEQ ID NO: 4165657 - DNA, 25 bp, Homo sapien
acaatgctagaagtccccagaggaa

SEQ ID NO: 4165658 - DNA, 25 bp, Homo sapien
aagcccaacaatgctagaagtcccc

SEQ ID NO: 4165659 - DNA, 25 bp, Homo sapien
tgtggtcactggagtagctgtacat

SEQ ID NO: 4165660 - DNA, 25 bp, Homo sapien
gtgtggtcactggagtagctgtaca

SEQ ID NO: 4165661 - DNA, 25 bp, Homo sapien
tggtcactggagtagctgtacattt

SEQ ID NO: 4165662 - DNA, 25 bp, Homo sapien
ggtgtggtcactggagtagctgtac

SEQ ID NO: 4165663 - DNA, 25 bp, Homo sapien
aaaatgacggagaatccaagagcag

SEQ ID NO: 4165664 - DNA, 25 bp, Homo sapien
taaaatgacggagaatccaagagca

SEQ ID NO: 4165665 - DNA, 25 bp, Homo sapien
ctaaaatgacggagaatccaagagc

SEQ ID NO: 4165666 - DNA, 25 bp, Homo sapien
tagagcacttgaaaagaagggtctt

SEQ ID NO: 4165667 - DNA, 25 bp, Homo sapien
caaagtttggcggaaaggatactgg

SEQ ID NO: 4165668 - DNA, 25 bp, Homo sapien
attgccagtgctttagagcacttga

SEQ ID NO: 4165669 - DNA, 25 bp, Homo sapien
tcgccaaagtttggcggaaaggata

SEQ ID NO: 4165670 - DNA, 25 bp, Homo sapien
taccataaattggtgtgtcttcaat

SEQ ID NO: 4165671 - DNA, 25 bp, Homo sapien
gtgtcttcaatataatactcatcaa

SEQ ID NO: 4165672 - DNA, 25 bp, Homo sapien
aaatcatatcatctaagttaccata

SEQ ID NO: 4165673 - DNA, 25 bp, Homo sapien
tcatatcatctaagttaccataaat

SEQ ID NO: 4165674 - DNA, 25 bp, Homo sapien
agatttctctggtcgggctttcatt

SEQ ID NO: 4165675 - DNA, 25 bp, Homo sapien
tctctggtcgggctttcatttgttc

SEQ ID NO: 4165676 - DNA, 25 bp, Homo sapien
cagatttctctggtcgggctttcat

SEQ ID NO: 4165677 - DNA, 25 bp, Homo sapien
gaggagcaagctcacacttgtattt

SEQ ID NO: 4165678 - DNA, 25 bp, Homo sapien
tactaggctttctgattaactcttc

SEQ ID NO: 4165679 - DNA, 25 bp, Homo sapien
gattagagatttggatatgaagaga

SEQ ID NO: 4165680 - DNA, 25 bp, Homo sapien
cctagttaatagaagactgagatac

SEQ ID NO: 4165681 - DNA, 25 bp, Homo sapien
tgagctcattttggattggccttgg

SEQ ID NO: 4165682 - DNA, 25 bp, Homo sapien
gcccagtgggcttctccggactaga

SEQ ID NO: 4165683 - DNA, 25 bp, Homo sapien
gacctgggtcaatactaaagaaaga

SEQ ID NO: 4165684 - DNA, 25 bp, Homo sapien
tattattttcttatctgccttcccc

SEQ ID NO: 4165685 - DNA, 25 bp, Homo sapien
tattgcatgtagttgctcatctcca

SEQ ID NO: 4165686 - DNA, 25 bp, Homo sapien
taaggtggtcttagaaacgctggca

SEQ ID NO: 4165687 - DNA, 25 bp, Homo sapien
ccttaacgctgtgatcaagtgaggc

SEQ ID NO: 4165688 - DNA, 25 bp, Homo sapien
tgtttcctgggctttctacgcttcc

SEQ ID NO: 4165689 - DNA, 25 bp, Homo sapien
tagtttataggttctctcttagcac

SEQ ID NO: 4165690 - DNA, 25 bp, Homo sapien
ggatcaatccaaacagtctgatggg

SEQ ID NO: 4165691 - DNA, 25 bp, Homo sapien
tcttagcacggatcaatccaaacag

SEQ ID NO: 4165692 - DNA, 25 bp, Homo sapien
tctgatgggatcatcatgaatgttt

SEQ ID NO: 4165693 - DNA, 25 bp, Homo sapien
catttggcatgcataagtgtaagct

SEQ ID NO: 4165694 - DNA, 25 bp, Homo sapien
agctgtgaataagaggtaagccacc

SEQ ID NO: 4165695 - DNA, 25 bp, Homo sapien
ccaagtgactatctctggctagtag

SEQ ID NO: 4165696 - DNA, 25 bp, Homo sapien
tattgcccattggtgagaaaggaga

SEQ ID NO: 4165697 - DNA, 25 bp, Homo sapien
gcgtgtatcacacttaaggacagag

SEQ ID NO: 4165698 - DNA, 25 bp, Homo sapien
ggcatattataatcaaattagaacc

SEQ ID NO: 4165699 - DNA, 25 bp, Homo sapien
tataatcaaattagaaccagtaata

SEQ ID NO: 4165700 - DNA, 25 bp, Homo sapien
caatcagaaaaatagcgtgtatcac

SEQ ID NO: 4165701 - DNA, 25 bp, Homo sapien
gagtcgccgtcaagtattcagttaa

SEQ ID NO: 4165702 - DNA, 25 bp, Homo sapien
taagtactggtcagtgcacgcaagt

SEQ ID NO: 4165703 - DNA, 25 bp, Homo sapien
tgtcgattatcaacagccaaagtgg

SEQ ID NO: 4165704 - DNA, 25 bp, Homo sapien
tcaggcaatgaaggacaaaggtcgg

SEQ ID NO: 4165705 - DNA, 25 bp, Homo sapien
gggaaagtgcatatgcaaaaccggg

SEQ ID NO: 4165706 - DNA, 25 bp, Homo sapien
ctcgatttcctgtgagacacgtggc

SEQ ID NO: 4165707 - DNA, 25 bp, Homo sapien
gggactgttgttgatagccccaaac

SEQ ID NO: 4165708 - DNA, 25 bp, Homo sapien
tgatagccccaaacaccgactgggc

SEQ ID NO: 4165709 - DNA, 25 bp, Homo sapien
taggaaatgtctatcatatccaaca

SEQ ID NO: 4165710 - DNA, 25 bp, Homo sapien
ctaggaaatgtctatcatatccaac

SEQ ID NO: 4165711 - DNA, 25 bp, Homo sapien
ggaaatgtctatcatatccaacagc

SEQ ID NO: 4165712 - DNA, 25 bp, Homo sapien
aggaaatgtctatcatatccaacag

SEQ ID NO: 4165713 - DNA, 25 bp, Homo sapien
taatgcgtgaccaggtgtggaaacc

SEQ ID NO: 4165714 - DNA, 25 bp, Homo sapien
gatagtcatggtggttgtaatgcgt

SEQ ID NO: 4165715 - DNA, 25 bp, Homo sapien
atctctttgagcgtcccatccccat

SEQ ID NO: 4165716 - DNA, 25 bp, Homo sapien
ggaaaccataacttctcacatctct

SEQ ID NO: 4165717 - DNA, 25 bp, Homo sapien
cagattgctgcctatggactctacg

SEQ ID NO: 4165718 - DNA, 25 bp, Homo sapien
cgctcttgaagagaaacaattgctg

SEQ ID NO: 4165719 - DNA, 25 bp, Homo sapien
ggactctacgtcacaggcgatttac

SEQ ID NO: 4165720 - DNA, 25 bp, Homo sapien
ggaaatgatgcctttagcacctcaa

SEQ ID NO: 4165721 - DNA, 25 bp, Homo sapien
tcagtactcagtatttgtttctggg

SEQ ID NO: 4165722 - DNA, 25 bp, Homo sapien
cagtactcagtatttgtttctgggg

SEQ ID NO: 4165723 - DNA, 25 bp, Homo sapien
actcagtatttgtttctggggacag

SEQ ID NO: 4165724 - DNA, 25 bp, Homo sapien
gtactcagtatttgtttctggggac

SEQ ID NO: 4165725 - DNA, 25 bp, Homo sapien
gaagaatttatcaatggcatggcaa

SEQ ID NO: 4165726 - DNA, 25 bp, Homo sapien
cctggagattgtttacaagagcttc

SEQ ID NO: 4165727 - DNA, 25 bp, Homo sapien
gcttcgacttctccaatgtgctgag

SEQ ID NO: 4165728 - DNA, 25 bp, Homo sapien
aatctgtaatgggaagcagccagac

SEQ ID NO: 4165729 - DNA, 25 bp, Homo sapien
ccatttgggtcactttggacgtgac

SEQ ID NO: 4165730 - DNA, 25 bp, Homo sapien
tggacgtgacgtcatccttatcaat

SEQ ID NO: 4165731 - DNA, 25 bp, Homo sapien
cacaatgccaaggtagtgtctggcc

SEQ ID NO: 4165732 - DNA, 25 bp, Homo sapien
gagtagtagttagagacctttgaag

SEQ ID NO: 4165733 - DNA, 25 bp, Homo sapien
gagtggcagttgtaaagttgcttct

SEQ ID NO: 4165734 - DNA, 25 bp, Homo sapien
gaatctaagttctggacacatagcc

SEQ ID NO: 4165735 - DNA, 25 bp, Homo sapien
ttcgccagcgtcttctcaaagcaca

SEQ ID NO: 4165736 - DNA, 25 bp, Homo sapien
caatgtgccgatggaagatgtgaat

SEQ ID NO: 4165737 - DNA, 25 bp, Homo sapien
catatctgtacccagactgacagag

SEQ ID NO: 4165738 - DNA, 25 bp, Homo sapien
tcataccatgtgccactgaactata

SEQ ID NO: 4165739 - DNA, 25 bp, Homo sapien
tgtacccagactgacagagggtcct

SEQ ID NO: 4165740 - DNA, 25 bp, Homo sapien
tatctgtacccagactgacagaggg

SEQ ID NO: 4165741 - DNA, 25 bp, Homo sapien
ggatcaggactcacgctctctgcag

SEQ ID NO: 4165742 - DNA, 25 bp, Homo sapien
ggacaagggatcaggactcacgctc

SEQ ID NO: 4165743 - DNA, 25 bp, Homo sapien
cctgggacaagggatcaggactcac

SEQ ID NO: 4165744 - DNA, 25 bp, Homo sapien
gatcaggactcacgctctctgcagg

SEQ ID NO: 4165745 - DNA, 25 bp, Homo sapien
gagtcagaggagtgcttacgcttca

SEQ ID NO: 4165746 - DNA, 25 bp, Homo sapien
tcacgggtgagaggatatgctccat

SEQ ID NO: 4165747 - DNA, 25 bp, Homo sapien
caatattggctactggtcacgggtg

SEQ ID NO: 4165748 - DNA, 25 bp, Homo sapien
tctgtagagtaatgcccaggtagtc

SEQ ID NO: 4165749 - DNA, 25 bp, Homo sapien
taagcaatgttgagcacaggactac

SEQ ID NO: 4165750 - DNA, 25 bp, Homo sapien
cgataagcaatgttgagcacaggac

SEQ ID NO: 4165751 - DNA, 25 bp, Homo sapien
caggactacttgaagcattttatag

SEQ ID NO: 4165752 - DNA, 25 bp, Homo sapien
tgttgagcacaggactacttgaagc

SEQ ID NO: 4165753 - DNA, 25 bp, Homo sapien
accagccagcattgctttagccttg

SEQ ID NO: 4165754 - DNA, 25 bp, Homo sapien
tatttttgaccctgaagcattcata

SEQ ID NO: 4165755 - DNA, 25 bp, Homo sapien
gaccctgaagcattcataggtgaat

SEQ ID NO: 4165756 - DNA, 25 bp, Homo sapien
ttgctttagccttgcaggcatccac

SEQ ID NO: 4165757 - DNA, 25 bp, Homo sapien
caatcattttgctagttcccgagaa

SEQ ID NO: 4165758 - DNA, 25 bp, Homo sapien
caagaggcagagtttaccaggcaaa

SEQ ID NO: 4165759 - DNA, 25 bp, Homo sapien
tacaagtagaggcaggagagtacct

SEQ ID NO: 4165760 - DNA, 25 bp, Homo sapien
tggagtacggacaagatcaaggccc

SEQ ID NO: 4165761 - DNA, 25 bp, Homo sapien
ggaaacacaagtcatgatctctgag

SEQ ID NO: 4165762 - DNA, 25 bp, Homo sapien
tgtagaacacatcttgcatcagtta

SEQ ID NO: 4165763 - DNA, 25 bp, Homo sapien
cttgcatcagttattctgattatca

SEQ ID NO: 4165764 - DNA, 25 bp, Homo sapien
aaacacaagtcatgatctctgagtg

SEQ ID NO: 4165765 - DNA, 25 bp, Homo sapien
tcaaagcaatccatgtttcacgagc

SEQ ID NO: 4165766 - DNA, 25 bp, Homo sapien
tggttttggcacaatgccattccaa

SEQ ID NO: 4165767 - DNA, 25 bp, Homo sapien
catggatataccctcagatctctaa

SEQ ID NO: 4165768 - DNA, 25 bp, Homo sapien
tactgggcagtagacatgtcaaagg

SEQ ID NO: 4165769 - DNA, 25 bp, Homo sapien
cagagtggtttaatgaaactacttt

SEQ ID NO: 4165770 - DNA, 25 bp, Homo sapien
atgaacagagtggtttaatgaaact

SEQ ID NO: 4165771 - DNA, 25 bp, Homo sapien
ttcccataaatgccatcgttttggt

SEQ ID NO: 4165772 - DNA, 25 bp, Homo sapien
ataaatgccatcgttttggtaaatg

SEQ ID NO: 4165773 - DNA, 25 bp, Homo sapien
ttatcgctgagagtggaagctggaa

SEQ ID NO: 4165774 - DNA, 25 bp, Homo sapien
ttgtgcactgttatcgctgagagtg

SEQ ID NO: 4165775 - DNA, 25 bp, Homo sapien
ctgttatcgctgagagtggaagctg

SEQ ID NO: 4165776 - DNA, 25 bp, Homo sapien
gcactgttatcgctgagagtggaag

SEQ ID NO: 4165777 - DNA, 25 bp, Homo sapien
tcagtgcccacagccagagcttccc

SEQ ID NO: 4165778 - DNA, 25 bp, Homo sapien
aggctgcctgtccacgggtgtggca

SEQ ID NO: 4165779 - DNA, 25 bp, Homo sapien
ctgtcatgacattccttttcttctt

SEQ ID NO: 4165780 - DNA, 25 bp, Homo sapien
tcaatttctagctcagtgcccacag

SEQ ID NO: 4165781 - DNA, 25 bp, Homo sapien
tgtgttataatcaatgtgccacctt

SEQ ID NO: 4165782 - DNA, 25 bp, Homo sapien
agacctcagctgtgtgttataatca

SEQ ID NO: 4165783 - DNA, 25 bp, Homo sapien
ctagtgtgatcgagacctcagctgt

SEQ ID NO: 4165784 - DNA, 25 bp, Homo sapien
tataatcaatgtgccacctttgctt

SEQ ID NO: 4165785 - DNA, 25 bp, Homo sapien
agactgttctgaagcacatcgattt

SEQ ID NO: 4165786 - DNA, 25 bp, Homo sapien
tgaagcacatcgatttccacacgac

SEQ ID NO: 4165787 - DNA, 25 bp, Homo sapien
tgttctgaagcacatcgatttccac

SEQ ID NO: 4165788 - DNA, 25 bp, Homo sapien
catcgatttccacacgactgactgg

SEQ ID NO: 4165789 - DNA, 25 bp, Homo sapien
tgaggaagcaccgtgaaccgaggtc

SEQ ID NO: 4165790 - DNA, 25 bp, Homo sapien
caccgtgaaccgaggtctgggctct

SEQ ID NO: 4165791 - DNA, 25 bp, Homo sapien
tgaaccgaggtctgggctctgactt

SEQ ID NO: 4165792 - DNA, 25 bp, Homo sapien
cccagaatctgaggaagcaccgtga

SEQ ID NO: 4165793 - DNA, 25 bp, Homo sapien
cacccttagccctttccagatgagg

SEQ ID NO: 4165794 - DNA, 25 bp, Homo sapien
tgagggctgtgctctagcatggctc

SEQ ID NO: 4165795 - DNA, 25 bp, Homo sapien
ccttagccctttccagatgagggct

SEQ ID NO: 4165796 - DNA, 25 bp, Homo sapien
tagccctttccagatgagggctgtg

SEQ ID NO: 4165797 - DNA, 25 bp, Homo sapien
atcatcaccacaactcttaacccta

SEQ ID NO: 4165798 - DNA, 25 bp, Homo sapien
cccatcatcaccacaactcttaacc

SEQ ID NO: 4165799 - DNA, 25 bp, Homo sapien
catcatcaccacaactcttaaccct

SEQ ID NO: 4165800 - DNA, 25 bp, Homo sapien
tcatcaccacaactcttaaccctac

SEQ ID NO: 4165801 - DNA, 25 bp, Homo sapien
tatccagagataaccctaagggctg

SEQ ID NO: 4165802 - DNA, 25 bp, Homo sapien
gagtgcccagcaacccaagtgatgg

SEQ ID NO: 4165803 - DNA, 25 bp, Homo sapien
tttgctagtctcttggccatccagg

SEQ ID NO: 4165804 - DNA, 25 bp, Homo sapien
taataatgatgcctacccggtaagg

SEQ ID NO: 4165805 - DNA, 25 bp, Homo sapien
ttgtattttctccaaatttgtccat

SEQ ID NO: 4165806 - DNA, 25 bp, Homo sapien
gttgtattttctccaaatttgtcca

SEQ ID NO: 4165807 - DNA, 25 bp, Homo sapien
cacgttgtattttctccaaatttgt

SEQ ID NO: 4165808 - DNA, 25 bp, Homo sapien
gacttaattgactaagtgggatgac

SEQ ID NO: 4165809 - DNA, 25 bp, Homo sapien
gccctggaacttcctctaagaatga

SEQ ID NO: 4165810 - DNA, 25 bp, Homo sapien
agccagcttctcgatggcaaacaga

SEQ ID NO: 4165811 - DNA, 25 bp, Homo sapien
aatgagcttccactgacttaattga

SEQ ID NO: 4165812 - DNA, 25 bp, Homo sapien
ctaggcaccgtagcacaggggccag

SEQ ID NO: 4165813 - DNA, 25 bp, Homo sapien
taggcaccgtagcacaggggccagg

SEQ ID NO: 4165814 - DNA, 25 bp, Homo sapien
tcaagctggctagccactcagtgag

SEQ ID NO: 4165815 - DNA, 25 bp, Homo sapien
tgtcagtttaggctgcccctgcttg

SEQ ID NO: 4165816 - DNA, 25 bp, Homo sapien
ttctccagatggctgtcataggcca

SEQ ID NO: 4165817 - DNA, 25 bp, Homo sapien
gccttttcaagctggctagccactc

SEQ ID NO: 4165818 - DNA, 25 bp, Homo sapien
gcgccgtttcttaagccggtctgaa

SEQ ID NO: 4165819 - DNA, 25 bp, Homo sapien
cttaagccggtctgaaaagcgcaat

SEQ ID NO: 4165820 - DNA, 25 bp, Homo sapien
cgcgcacggtgcgcacacacactgg

SEQ ID NO: 4165821 - DNA, 25 bp, Homo sapien
cgcacggtgcgcacacacactggcc

SEQ ID NO: 4165822 - DNA, 25 bp, Homo sapien
gatgtgcctgatctactccatcttc

SEQ ID NO: 4165823 - DNA, 25 bp, Homo sapien
tgatgtgcctgatctactccatctt

SEQ ID NO: 4165824 - DNA, 25 bp, Homo sapien
atgatgtgcctgatctactccatct

SEQ ID NO: 4165825 - DNA, 25 bp, Homo sapien
tcaaaaaccagattctttcaatttc

SEQ ID NO: 4165826 - DNA, 25 bp, Homo sapien
cagattctttcaatttctctggggt

SEQ ID NO: 4165827 - DNA, 25 bp, Homo sapien
gattctttcaatttctctggggtta

SEQ ID NO: 4165828 - DNA, 25 bp, Homo sapien
caatttctctggggttaaaattgct

SEQ ID NO: 4165829 - DNA, 25 bp, Homo sapien
cttattctgagttgtagagatggcc

SEQ ID NO: 4165830 - DNA, 25 bp, Homo sapien
tcttggcttcgtcctcagaagagat

SEQ ID NO: 4165831 - DNA, 25 bp, Homo sapien
gctcttggcttcgtcctcagaagag

SEQ ID NO: 4165832 - DNA, 25 bp, Homo sapien
gagatggcctgtttcacagctgtct

SEQ ID NO: 4165833 - DNA, 25 bp, Homo sapien
ctccaagtggttcctatgagccctc

SEQ ID NO: 4165834 - DNA, 25 bp, Homo sapien
tgggtgacagcattattccctaggg

SEQ ID NO: 4165835 - DNA, 25 bp, Homo sapien
ccccatactgtagggacacatatgt

SEQ ID NO: 4165836 - DNA, 25 bp, Homo sapien
gaaatgagagtaccggtttatgcct

SEQ ID NO: 4165837 - DNA, 25 bp, Homo sapien
ttaaaaagtcagagtgtgggccagg

SEQ ID NO: 4165838 - DNA, 25 bp, Homo sapien
taattattctacactacttagttag

SEQ ID NO: 4165839 - DNA, 25 bp, Homo sapien
tacttagttagtagtcttctgtaaa

SEQ ID NO: 4165840 - DNA, 25 bp, Homo sapien
tgcccagacaaggatttttctactt

SEQ ID NO: 4165841 - DNA, 25 bp, Homo sapien
ccattcctcaggatctctcagagaa

SEQ ID NO: 4165842 - DNA, 25 bp, Homo sapien
gatcttacactgtctcatctctttc

SEQ ID NO: 4165843 - DNA, 25 bp, Homo sapien
accattcctcaggatctctcagaga

SEQ ID NO: 4165844 - DNA, 25 bp, Homo sapien
tcagagaaggcccaatacttatgat

SEQ ID NO: 4165845 - DNA, 25 bp, Homo sapien
gcctcagtgtatgctcagtcttctt

SEQ ID NO: 4165846 - DNA, 25 bp, Homo sapien
agaatgtagtttcctatgcagccct

SEQ ID NO: 4165847 - DNA, 25 bp, Homo sapien
cagtcttctttagaatgtagtttcc

SEQ ID NO: 4165848 - DNA, 25 bp, Homo sapien
tgcaaacatgctgtaagctgccagt

SEQ ID NO: 4165849 - DNA, 25 bp, Homo sapien
agacagatccagactctgtctttaa

SEQ ID NO: 4165850 - DNA, 25 bp, Homo sapien
tggcactctggcctgacagacagat

SEQ ID NO: 4165851 - DNA, 25 bp, Homo sapien
gcactctggcctgacagacagatcc

SEQ ID NO: 4165852 - DNA, 25 bp, Homo sapien
ggcactctggcctgacagacagatc

SEQ ID NO: 4165853 - DNA, 25 bp, Homo sapien
aagacagttggagctataaactccc

SEQ ID NO: 4165854 - DNA, 25 bp, Homo sapien
gctatgctcccagaatgctaagagg

SEQ ID NO: 4165855 - DNA, 25 bp, Homo sapien
tctgcttgtagatacttcccctgct

SEQ ID NO: 4165856 - DNA, 25 bp, Homo sapien
aatgtccttggctttacgattctgc

SEQ ID NO: 4165857 - DNA, 25 bp, Homo sapien
tgggaaagaatcctcaaaaatgtta

SEQ ID NO: 4165858 - DNA, 25 bp, Homo sapien
ttttgcccgtttaatgaagatacta

SEQ ID NO: 4165859 - DNA, 25 bp, Homo sapien
aacttatagtcctgcgagtctggga

SEQ ID NO: 4165860 - DNA, 25 bp, Homo sapien
tatgattcacatacaaaaagctgca

SEQ ID NO: 4165861 - DNA, 25 bp, Homo sapien
tttcatagccatgactagaagtatg

SEQ ID NO: 4165862 - DNA, 25 bp, Homo sapien
tgctgtatttctcagtagaatccat

SEQ ID NO: 4165863 - DNA, 25 bp, Homo sapien
caagtttcatagccatgactagaag

SEQ ID NO: 4165864 - DNA, 25 bp, Homo sapien
tctgtttgctgtatttctcagtaga

SEQ ID NO: 4165865 - DNA, 25 bp, Homo sapien
tgtagatacctgcatctaatgcctc

SEQ ID NO: 4165866 - DNA, 25 bp, Homo sapien
ccgaaaggtatctctgtaagtagca

SEQ ID NO: 4165867 - DNA, 25 bp, Homo sapien
tctgcctttcggtggagggctcctt

SEQ ID NO: 4165868 - DNA, 25 bp, Homo sapien
taagtagcaacgtaacaacatgttc

SEQ ID NO: 4165869 - DNA, 25 bp, Homo sapien
caaatcgaccgtaaagcagccagga

SEQ ID NO: 4165870 - DNA, 25 bp, Homo sapien
agcgctgcctctggctcgcagagct

SEQ ID NO: 4165871 - DNA, 25 bp, Homo sapien
ggcttgtacaaagcggactgcctgc

SEQ ID NO: 4165872 - DNA, 25 bp, Homo sapien
aaggaagcctctataccatggcttg

SEQ ID NO: 4165873 - DNA, 25 bp, Homo sapien
gccaagcattatcctcgtttctggg

SEQ ID NO: 4165874 - DNA, 25 bp, Homo sapien
tggacttgaatgggtggggtgcagt

SEQ ID NO: 4165875 - DNA, 25 bp, Homo sapien
gatgtggacttgaatgggtggggtg

SEQ ID NO: 4165876 - DNA, 25 bp, Homo sapien
tgtggacttgaatgggtggggtgca

SEQ ID NO: 4165877 - DNA, 25 bp, Homo sapien
aatgctatccctgcaattgttgaaa

SEQ ID NO: 4165878 - DNA, 25 bp, Homo sapien
gaaaataacactcagcaaccactgc

SEQ ID NO: 4165879 - DNA, 25 bp, Homo sapien
taagcccatactgatattcaaagaa

SEQ ID NO: 4165880 - DNA, 25 bp, Homo sapien
tgtgcttcctaatgtgaggcattga

SEQ ID NO: 4165881 - DNA, 25 bp, Homo sapien
atttatgtggtgaaattgtgaagaa

SEQ ID NO: 4165882 - DNA, 25 bp, Homo sapien
tgaaattgtgaagaaaaccaaggga

SEQ ID NO: 4165883 - DNA, 25 bp, Homo sapien
tggtgaaattgtgaagaaaaccaag

SEQ ID NO: 4165884 - DNA, 25 bp, Homo sapien
tgtgaagaaaaccaagggaattata

SEQ ID NO: 4165885 - DNA, 25 bp, Homo sapien
ccacactgttcttgaggctttagga

SEQ ID NO: 4165886 - DNA, 25 bp, Homo sapien
atccacactgttcttgaggctttag

SEQ ID NO: 4165887 - DNA, 25 bp, Homo sapien
tttaatccacactgttcttgaggct

SEQ ID NO: 4165888 - DNA, 25 bp, Homo sapien
taatccacactgttcttgaggcttt

SEQ ID NO: 4165889 - DNA, 25 bp, Homo sapien
taattagatgagacagagaaagccg

SEQ ID NO: 4165890 - DNA, 25 bp, Homo sapien
gtttccctgcgcagaacaataaaga

SEQ ID NO: 4165891 - DNA, 25 bp, Homo sapien
cagcactcagagtgggcataggcca

SEQ ID NO: 4165892 - DNA, 25 bp, Homo sapien
gctagcagcctactttttagaacag

SEQ ID NO: 4165893 - DNA, 25 bp, Homo sapien
tccaccaattcactaccaaagctct

SEQ ID NO: 4165894 - DNA, 25 bp, Homo sapien
cttccaccaattcactaccaaagct

SEQ ID NO: 4165895 - DNA, 25 bp, Homo sapien
cacttccaccaattcactaccaaag

SEQ ID NO: 4165896 - DNA, 25 bp, Homo sapien
caccaattcactaccaaagctctga

SEQ ID NO: 4165897 - DNA, 25 bp, Homo sapien
gtactcccagctcccagtcaggatt

SEQ ID NO: 4165898 - DNA, 25 bp, Homo sapien
ttcatcactgtactcccagctccca

SEQ ID NO: 4165899 - DNA, 25 bp, Homo sapien
cattcatcactgtactcccagctcc

SEQ ID NO: 4165900 - DNA, 25 bp, Homo sapien
actcccagctcccagtcaggattcg

SEQ ID NO: 4165901 - DNA, 25 bp, Homo sapien
tgggccccgaaaaatatgagattcc

SEQ ID NO: 4165902 - DNA, 25 bp, Homo sapien
ccaggcaagccattagaggaagaag

SEQ ID NO: 4165903 - DNA, 25 bp, Homo sapien
gagattcctcagtcacaagtgttgc

SEQ ID NO: 4165904 - DNA, 25 bp, Homo sapien
aagagcctgaaagcacttgactggt

SEQ ID NO: 4165905 - DNA, 25 bp, Homo sapien
tgctgatctagtatcacaagcagct

SEQ ID NO: 4165906 - DNA, 25 bp, Homo sapien
ttgctgatctagtatcacaagcagc

SEQ ID NO: 4165907 - DNA, 25 bp, Homo sapien
ctgatctagtatcacaagcagcttt

SEQ ID NO: 4165908 - DNA, 25 bp, Homo sapien
atttgctgatctagtatcacaagca

SEQ ID NO: 4165909 - DNA, 25 bp, Homo sapien
ctcagaatgttccccttacaagcta

SEQ ID NO: 4165910 - DNA, 25 bp, Homo sapien
gaatgttccccttacaagctactcc

SEQ ID NO: 4165911 - DNA, 25 bp, Homo sapien
cttacaagctactcccacaattgtc

SEQ ID NO: 4165912 - DNA, 25 bp, Homo sapien
taaataaatcttgcttaagcttaga

SEQ ID NO: 4165913 - DNA, 25 bp, Homo sapien
gctttccattgcctgtaattaagga

SEQ ID NO: 4165914 - DNA, 25 bp, Homo sapien
attaaggatgtctgcaaccaccata

SEQ ID NO: 4165915 - DNA, 25 bp, Homo sapien
ccagcaatgaccttcgctttccatt

SEQ ID NO: 4165916 - DNA, 25 bp, Homo sapien
cagtttggggcttgattaattctca

SEQ ID NO: 4165917 - DNA, 25 bp, Homo sapien
ctgaatacaatcatggtgatcaaac

SEQ ID NO: 4165918 - DNA, 25 bp, Homo sapien
aaggtgccatcgtgtttggctcatc

SEQ ID NO: 4165919 - DNA, 25 bp, Homo sapien
agaaggtgccatcgtgtttggctca

SEQ ID NO: 4165920 - DNA, 25 bp, Homo sapien
tgagaaggtgccatcgtgtttggct

SEQ ID NO: 4165921 - DNA, 25 bp, Homo sapien
cacgagcacatgagaagtcttcttc

SEQ ID NO: 4165922 - DNA, 25 bp, Homo sapien
gtgatagaggaataagccaataatt

SEQ ID NO: 4165923 - DNA, 25 bp, Homo sapien
taattcaggaatagtcacgagcaca

SEQ ID NO: 4165924 - DNA, 25 bp, Homo sapien
agactccagtatcacaggtagtgat

SEQ ID NO: 4165925 - DNA, 25 bp, Homo sapien
tgataaccattccaggttacgatga

SEQ ID NO: 4165926 - DNA, 25 bp, Homo sapien
taaagcttctgataaccattccagg

SEQ ID NO: 4165927 - DNA, 25 bp, Homo sapien
gatgatctcaccaagccctaatttc

SEQ ID NO: 4165928 - DNA, 25 bp, Homo sapien
ccattccaggttacgatgatctcac

SEQ ID NO: 4165929 - DNA, 25 bp, Homo sapien
tatttccaaactaagcatggccttg

SEQ ID NO: 4165930 - DNA, 25 bp, Homo sapien
gatacttgtgatccaacagttgaga

SEQ ID NO: 4165931 - DNA, 25 bp, Homo sapien
taataaagtcccaagtagcatttcc

SEQ ID NO: 4165932 - DNA, 25 bp, Homo sapien
tgttgccaatgaggatcagaaatac

SEQ ID NO: 4165933 - DNA, 25 bp, Homo sapien
ttctcagggcgttttcaggtctttc

SEQ ID NO: 4165934 - DNA, 25 bp, Homo sapien
catggagttagcctccttatggagt

SEQ ID NO: 4165935 - DNA, 25 bp, Homo sapien
cttatggagttcttcaaattttgga

SEQ ID NO: 4165936 - DNA, 25 bp, Homo sapien
gtttgtgatgtagatgccaagctgc

SEQ ID NO: 4165937 - DNA, 25 bp, Homo sapien
tagtcactagatggacagtgcatcc

SEQ ID NO: 4165938 - DNA, 25 bp, Homo sapien
caaagccaagagacgcagcaagatc

SEQ ID NO: 4165939 - DNA, 25 bp, Homo sapien
gtcttgccttacagctgatgcaggg

SEQ ID NO: 4165940 - DNA, 25 bp, Homo sapien
gatcatcttcagttattagggtcag

SEQ ID NO: 4165941 - DNA, 25 bp, Homo sapien
agaaagatcaggcagttcacaattt

SEQ ID NO: 4165942 - DNA, 25 bp, Homo sapien
gaatataccaaattaatcgaagcat

SEQ ID NO: 4165943 - DNA, 25 bp, Homo sapien
caaagcgaatataccaaattaatcg

SEQ ID NO: 4165944 - DNA, 25 bp, Homo sapien
aaagatcaggcagttcacaatttcc

SEQ ID NO: 4165945 - DNA, 25 bp, Homo sapien
gactctgagctttcagcgtcaaaca

SEQ ID NO: 4165946 - DNA, 25 bp, Homo sapien
tactcagctgacacgatcagatgtg

SEQ ID NO: 4165947 - DNA, 25 bp, Homo sapien
tcatttcaatgaatctagagattga

SEQ ID NO: 4165948 - DNA, 25 bp, Homo sapien
acattgatcagagtgccatttctcc

SEQ ID NO: 4165949 - DNA, 25 bp, Homo sapien
ccaaatggatggagttgtatacata

SEQ ID NO: 4165950 - DNA, 25 bp, Homo sapien
taaaacgtgcacagctttttgtaca

SEQ ID NO: 4165951 - DNA, 25 bp, Homo sapien
taactctataactctctttccccag

SEQ ID NO: 4165952 - DNA, 25 bp, Homo sapien
tactatctgaagttgtactgtaact

SEQ ID NO: 4165953 - DNA, 25 bp, Homo sapien
ttagttactccccagacaatggtaa

SEQ ID NO: 4165954 - DNA, 25 bp, Homo sapien
caagtcccttgcgaagactgcagcc

SEQ ID NO: 4165955 - DNA, 25 bp, Homo sapien
tcttataaattgcaccaagtccctt

SEQ ID NO: 4165956 - DNA, 25 bp, Homo sapien
ggatttacatctacctcaccagcca

SEQ ID NO: 4165957 - DNA, 25 bp, Homo sapien
cttgatgtgagcaaccaactccaga

SEQ ID NO: 4165958 - DNA, 25 bp, Homo sapien
gatgtgagcaaccaactccagaagg

SEQ ID NO: 4165959 - DNA, 25 bp, Homo sapien
cagaaggggcactagttgccattgc

SEQ ID NO: 4165960 - DNA, 25 bp, Homo sapien
ctccagaaggggcactagttgccat

SEQ ID NO: 4165961 - DNA, 25 bp, Homo sapien
gcattaatccaaaaggtgctcaaaa

SEQ ID NO: 4165962 - DNA, 25 bp, Homo sapien
ggcattaatccaaaaggtgctcaaa

SEQ ID NO: 4165963 - DNA, 25 bp, Homo sapien
ataattcccaataaagtcactcaaa

SEQ ID NO: 4165964 - DNA, 25 bp, Homo sapien
taattcccaataaagtcactcaaaa

SEQ ID NO: 4165965 - DNA, 25 bp, Homo sapien
ctaggcacagttcagcccttcctcc

SEQ ID NO: 4165966 - DNA, 25 bp, Homo sapien
ccagagagtggaatggagctttgac

SEQ ID NO: 4165967 - DNA, 25 bp, Homo sapien
acatatccttggctaggtctctcat

SEQ ID NO: 4165968 - DNA, 25 bp, Homo sapien
gatgtgacctcttactaagtgaaca

SEQ ID NO: 4165969 - DNA, 25 bp, Homo sapien
caaaacgattcaccactatgctcaa

SEQ ID NO: 4165970 - DNA, 25 bp, Homo sapien
tttgcagaagatgtgacctcttact

SEQ ID NO: 4165971 - DNA, 25 bp, Homo sapien
tctcattgttggcaccgtgtgctaa

SEQ ID NO: 4165972 - DNA, 25 bp, Homo sapien
gttggcaccgtgtgctaacttcaca

SEQ ID NO: 4165973 - DNA, 25 bp, Homo sapien
ggcaccgtgtgctaacttcacatga

SEQ ID NO: 4165974 - DNA, 25 bp, Homo sapien
ccgtgtgctaacttcacatgactgg

SEQ ID NO: 4165975 - DNA, 25 bp, Homo sapien
ctgctgctgcccagcatagtgagag

SEQ ID NO: 4165976 - DNA, 25 bp, Homo sapien
ctgcccagcatagtgagagagtatc

SEQ ID NO: 4165977 - DNA, 25 bp, Homo sapien
tgtgatcctgtggctgactgtgagc

SEQ ID NO: 4165978 - DNA, 25 bp, Homo sapien
ctttgtgatcctgtggctgactgtg

SEQ ID NO: 4165979 - DNA, 25 bp, Homo sapien
ctctctggctgtgctatctgaaaaa

SEQ ID NO: 4165980 - DNA, 25 bp, Homo sapien
tatcaaggccatgcaatcgttttgg

SEQ ID NO: 4165981 - DNA, 25 bp, Homo sapien
ccctgagtgactaggttaaacagaa

SEQ ID NO: 4165982 - DNA, 25 bp, Homo sapien
tgtttactacagcataaggctaccc

SEQ ID NO: 4165983 - DNA, 25 bp, Homo sapien
tctcaaaggctggtcttatctcact

SEQ ID NO: 4165984 - DNA, 25 bp, Homo sapien
ggctctcaaaggctggtcttatctc

SEQ ID NO: 4165985 - DNA, 25 bp, Homo sapien
aaaggctggtcttatctcacttttg

SEQ ID NO: 4165986 - DNA, 25 bp, Homo sapien
gctggtcttatctcacttttggcca

SEQ ID NO: 4165987 - DNA, 25 bp, Homo sapien
tttgggtccagcaacttaaacaggc

SEQ ID NO: 4165988 - DNA, 25 bp, Homo sapien
agcacactcagactgccctatgttt

SEQ ID NO: 4165989 - DNA, 25 bp, Homo sapien
tatttgctgggagttgccacgcaga

SEQ ID NO: 4165990 - DNA, 25 bp, Homo sapien
tgccacgcagactttaacatcgcct

SEQ ID NO: 4165991 - DNA, 25 bp, Homo sapien
gaggcatttactaaccagttaccag

SEQ ID NO: 4165992 - DNA, 25 bp, Homo sapien
accacagatggtcagcaacaaaatg

SEQ ID NO: 4165993 - DNA, 25 bp, Homo sapien
cagctacagatggactaagtgaaga

SEQ ID NO: 4165994 - DNA, 25 bp, Homo sapien
taccttaggcctagacagttacgtg

SEQ ID NO: 4165995 - DNA, 25 bp, Homo sapien
gaaacagaaaacaatcaatggagaa

SEQ ID NO: 4165996 - DNA, 25 bp, Homo sapien
aacaatcaatggagaagacattctg

SEQ ID NO: 4165997 - DNA, 25 bp, Homo sapien
cagaaaacaatcaatggagaagaca

SEQ ID NO: 4165998 - DNA, 25 bp, Homo sapien
aaaacaatcaatggagaagacattc

SEQ ID NO: 4165999 - DNA, 25 bp, Homo sapien
taggagttttacatactacgaagag

SEQ ID NO: 4166000 - DNA, 25 bp, Homo sapien
tgccctaggagttttacatactacg

SEQ ID NO: 4166001 - DNA, 25 bp, Homo sapien
tttacatactacgaagagtttggaa

SEQ ID NO: 4166002 - DNA, 25 bp, Homo sapien
aaatgacattttgccctaggagttt

SEQ ID NO: 4166003 - DNA, 25 bp, Homo sapien
taagcaggtgctagcaaaacccctc

SEQ ID NO: 4166004 - DNA, 25 bp, Homo sapien
ccagatatggtggttggcgatcaca

SEQ ID NO: 4166005 - DNA, 25 bp, Homo sapien
gaataaaaagctccaccgactgtcc

SEQ ID NO: 4166006 - DNA, 25 bp, Homo sapien
gtaaacttggaaggcaatctcggcc

SEQ ID NO: 4166007 - DNA, 25 bp, Homo sapien
catttaactcgaagggaactcagcg

SEQ ID NO: 4166008 - DNA, 25 bp, Homo sapien
gaatagctgcttgcacctgtagaac

SEQ ID NO: 4166009 - DNA, 25 bp, Homo sapien
caaaacgaatgaatgggtgggtcca

SEQ ID NO: 4166010 - DNA, 25 bp, Homo sapien
aaactactggtgaagttggctagca

SEQ ID NO: 4166011 - DNA, 25 bp, Homo sapien
tccataatgcttcacttctatctaa

SEQ ID NO: 4166012 - DNA, 25 bp, Homo sapien
tccctctatctctaatgctccataa

SEQ ID NO: 4166013 - DNA, 25 bp, Homo sapien
taattctgactctgagtatctgttc

SEQ ID NO: 4166014 - DNA, 25 bp, Homo sapien
gactctgagtatctgttcctcatac

SEQ ID NO: 4166015 - DNA, 25 bp, Homo sapien
actataatttcggagagtaatgttc

SEQ ID NO: 4166016 - DNA, 25 bp, Homo sapien
tataatttcggagagtaatgttcat

SEQ ID NO: 4166017 - DNA, 25 bp, Homo sapien
aatactataatttcggagagtaatg

SEQ ID NO: 4166018 - DNA, 25 bp, Homo sapien
gaaatactataatttcggagagtaa

SEQ ID NO: 4166019 - DNA, 25 bp, Homo sapien
gaaagtgacttccataatcactgct

SEQ ID NO: 4166020 - DNA, 25 bp, Homo sapien
tctaagaaagtgacttccataatca

SEQ ID NO: 4166021 - DNA, 25 bp, Homo sapien
aatcactgctaaggctttcactact

SEQ ID NO: 4166022 - DNA, 25 bp, Homo sapien
gtgacttccataatcactgctaagg

SEQ ID NO: 4166023 - DNA, 25 bp, Homo sapien
acttctctggaagatcctgcactga

SEQ ID NO: 4166024 - DNA, 25 bp, Homo sapien
catgacaatataccacttctctgga

SEQ ID NO: 4166025 - DNA, 25 bp, Homo sapien
cttctctggaagatcctgcactgac

SEQ ID NO: 4166026 - DNA, 25 bp, Homo sapien
ttctctggaagatcctgcactgact

SEQ ID NO: 4166027 - DNA, 25 bp, Homo sapien
ttgatcatagatcccgccgctgttg

SEQ ID NO: 4166028 - DNA, 25 bp, Homo sapien
ttagaaagggtttcaccttgatcat

SEQ ID NO: 4166029 - DNA, 25 bp, Homo sapien
ttcaccttgatcatagatcccgccg

SEQ ID NO: 4166030 - DNA, 25 bp, Homo sapien
accttgatcatagatcccgccgctg

SEQ ID NO: 4166031 - DNA, 25 bp, Homo sapien
gctctttgcttaatcgtgagcaagt

SEQ ID NO: 4166032 - DNA, 25 bp, Homo sapien
ctggcttgcttaacaaacttcttct

SEQ ID NO: 4166033 - DNA, 25 bp, Homo sapien
cgtgagcaagtaatttgtaggaaga

SEQ ID NO: 4166034 - DNA, 25 bp, Homo sapien
ccttcttactgaccaagaacagatg

SEQ ID NO: 4166035 - DNA, 25 bp, Homo sapien
caaggtccagagtttagctagagta

SEQ ID NO: 4166036 - DNA, 25 bp, Homo sapien
tacattgagctaagaggcaaaggac

SEQ ID NO: 4166037 - DNA, 25 bp, Homo sapien
caaaggactctgatttcggaagctg

SEQ ID NO: 4166038 - DNA, 25 bp, Homo sapien
cagaactaacggacttcaaggtcca

SEQ ID NO: 4166039 - DNA, 25 bp, Homo sapien
atattcttatcctgttagagtccat

SEQ ID NO: 4166040 - DNA, 25 bp, Homo sapien
ttcccatcattacacgaagagtgtc

SEQ ID NO: 4166041 - DNA, 25 bp, Homo sapien
aatcgccgagactgctctttaaatc

SEQ ID NO: 4166042 - DNA, 25 bp, Homo sapien
tattggcgttttatctcttgactcc

SEQ ID NO: 4166043 - DNA, 25 bp, Homo sapien
aatgttatctctgcacttactttcc

SEQ ID NO: 4166044 - DNA, 25 bp, Homo sapien
gaataacaccaccaattacaaccat

SEQ ID NO: 4166045 - DNA, 25 bp, Homo sapien
aatgggaataacaccaccaattaca

SEQ ID NO: 4166046 - DNA, 25 bp, Homo sapien
gcaatgggaataacaccaccaatta

SEQ ID NO: 4166047 - DNA, 25 bp, Homo sapien
tgggaataacaccaccaattacaac

SEQ ID NO: 4166048 - DNA, 25 bp, Homo sapien
gaccctgaagcatttacctaatgtt

SEQ ID NO: 4166049 - DNA, 25 bp, Homo sapien
ccaagaccctgaagcatttacctaa

SEQ ID NO: 4166050 - DNA, 25 bp, Homo sapien
agaccaagaccctgaagcatttacc

SEQ ID NO: 4166051 - DNA, 25 bp, Homo sapien
aagaccctgaagcatttacctaatg

SEQ ID NO: 4166052 - DNA, 25 bp, Homo sapien
aagactgtcaaaagcttggcttggc

SEQ ID NO: 4166053 - DNA, 25 bp, Homo sapien
tttgtttggctcttctcttactcca

SEQ ID NO: 4166054 - DNA, 25 bp, Homo sapien
gcattgtgaagactgtcaaaagctt

SEQ ID NO: 4166055 - DNA, 25 bp, Homo sapien
ttgtttggctcttctcttactccac

SEQ ID NO: 4166056 - DNA, 25 bp, Homo sapien
attcacaggaacttcctagaatttt

SEQ ID NO: 4166057 - DNA, 25 bp, Homo sapien
ttcacaggaacttcctagaattttc

SEQ ID NO: 4166058 - DNA, 25 bp, Homo sapien
gctgtttcccaacaaggtggctagg

SEQ ID NO: 4166059 - DNA, 25 bp, Homo sapien
tagggaagcaaagtcgccctggaga

SEQ ID NO: 4166060 - DNA, 25 bp, Homo sapien
taaagccaacatctcccagctgttt

SEQ ID NO: 4166061 - DNA, 25 bp, Homo sapien
gaagccccaacaaaagagctgacat

SEQ ID NO: 4166062 - DNA, 25 bp, Homo sapien
tagagtggtgtcaaaatgtttgtca

SEQ ID NO: 4166063 - DNA, 25 bp, Homo sapien
cataatttttagagtggtgtcaaaa

SEQ ID NO: 4166064 - DNA, 25 bp, Homo sapien
tttcctttctgcttattttccataa

SEQ ID NO: 4166065 - DNA, 25 bp, Homo sapien
tttccataatttttagagtggtgtc

SEQ ID NO: 4166066 - DNA, 25 bp, Homo sapien
tgtcagtcagtgttcgaggcacaaa

SEQ ID NO: 4166067 - DNA, 25 bp, Homo sapien
gaggcacaaaattactctcagggag

SEQ ID NO: 4166068 - DNA, 25 bp, Homo sapien
gaaacgtgagacttaacactgtgga

SEQ ID NO: 4166069 - DNA, 25 bp, Homo sapien
cactgtggactttaagagactgcta

SEQ ID NO: 4166070 - DNA, 25 bp, Homo sapien
cactggggctagggtgcatactcac

SEQ ID NO: 4166071 - DNA, 25 bp, Homo sapien
tctcgcatattcttgtaaatgcttc

SEQ ID NO: 4166072 - DNA, 25 bp, Homo sapien
ttttggaaatctcagggtttgtctc

SEQ ID NO: 4166073 - DNA, 25 bp, Homo sapien
agtaatagttttgacccagtctctg

SEQ ID NO: 4166074 - DNA, 25 bp, Homo sapien
taatagttttgacccagtctctgga

SEQ ID NO: 4166075 - DNA, 25 bp, Homo sapien
cctgggaattgtaatcatggcaggg

SEQ ID NO: 4166076 - DNA, 25 bp, Homo sapien
gtggttccacaatggctcgacactt

SEQ ID NO: 4166077 - DNA, 25 bp, Homo sapien
ttgtacaatcacataccctgggaat

SEQ ID NO: 4166078 - DNA, 25 bp, Homo sapien
cataccctgggaattgtaatcatgg

SEQ ID NO: 4166079 - DNA, 25 bp, Homo sapien
ttaacaactgactcggagcacccca

SEQ ID NO: 4166080 - DNA, 25 bp, Homo sapien
acgtgttctcggttcttcaccagga

SEQ ID NO: 4166081 - DNA, 25 bp, Homo sapien
tccatgtgtcatggctgtatctcca

SEQ ID NO: 4166082 - DNA, 25 bp, Homo sapien
gaaatacatcgcaggccacacgtgt

SEQ ID NO: 4166083 - DNA, 25 bp, Homo sapien
gttaaggagtcattaaagggttgca

SEQ ID NO: 4166084 - DNA, 25 bp, Homo sapien
ggttgcagccaaatgacagtcaaaa

SEQ ID NO: 4166085 - DNA, 25 bp, Homo sapien
ctgaatggttgggttaaggagtcat

SEQ ID NO: 4166086 - DNA, 25 bp, Homo sapien
aggagtcattaaagggttgcagcca

SEQ ID NO: 4166087 - DNA, 25 bp, Homo sapien
ttaaaaggtgactttatatccctca

SEQ ID NO: 4166088 - DNA, 25 bp, Homo sapien
ttatatccctcacaaagggccccat

SEQ ID NO: 4166089 - DNA, 25 bp, Homo sapien
ggtgactttatatccctcacaaagg

SEQ ID NO: 4166090 - DNA, 25 bp, Homo sapien
gactttatatccctcacaaagggcc

SEQ ID NO: 4166091 - DNA, 25 bp, Homo sapien
tcttttcaacttccatgatactatt

SEQ ID NO: 4166092 - DNA, 25 bp, Homo sapien
tctcttttcaacttccatgatacta

SEQ ID NO: 4166093 - DNA, 25 bp, Homo sapien
ctcttttcaacttccatgatactat

SEQ ID NO: 4166094 - DNA, 25 bp, Homo sapien
ttttcaacttccatgatactatttg

SEQ ID NO: 4166095 - DNA, 25 bp, Homo sapien
tccattttctccctcgatttagatg

SEQ ID NO: 4166096 - DNA, 25 bp, Homo sapien
ttctccctcgatttagatgaatcac

SEQ ID NO: 4166097 - DNA, 25 bp, Homo sapien
tcagggcttgcagggttaaaatgat

SEQ ID NO: 4166098 - DNA, 25 bp, Homo sapien
cctgatatgtcagcaatgtttcttc

SEQ ID NO: 4166099 - DNA, 25 bp, Homo sapien
tttatactttattactccatctttc

SEQ ID NO: 4166100 - DNA, 25 bp, Homo sapien
ctttatactttattactccatcttt

SEQ ID NO: 4166101 - DNA, 25 bp, Homo sapien
tctaaccaggtagtttctacccaga

SEQ ID NO: 4166102 - DNA, 25 bp, Homo sapien
taaccaggtagtttctacccagagc

SEQ ID NO: 4166103 - DNA, 25 bp, Homo sapien
accaggtagtttctacccagagcat

SEQ ID NO: 4166104 - DNA, 25 bp, Homo sapien
ctgcttcagcgcttattttatatat

SEQ ID NO: 4166105 - DNA, 25 bp, Homo sapien
gcacgctgagttcacttctcgcatg

SEQ ID NO: 4166106 - DNA, 25 bp, Homo sapien
tcaccagtctgcacgctgagttcac

SEQ ID NO: 4166107 - DNA, 25 bp, Homo sapien
cagtctgcacgctgagttcacttct

SEQ ID NO: 4166108 - DNA, 25 bp, Homo sapien
gctgagttcacttctcgcatgtcat

SEQ ID NO: 4166109 - DNA, 25 bp, Homo sapien
gggtagaaagaagctcctgcattcc

SEQ ID NO: 4166110 - DNA, 25 bp, Homo sapien
ttaataatgccaacaggacctgagc

SEQ ID NO: 4166111 - DNA, 25 bp, Homo sapien
ttcttccctggctaccccatgggta

SEQ ID NO: 4166112 - DNA, 25 bp, Homo sapien
gaagcaaagtccagtagtcggcagt

SEQ ID NO: 4166113 - DNA, 25 bp, Homo sapien
aaaaaacagatgccgtagcagcaca

SEQ ID NO: 4166114 - DNA, 25 bp, Homo sapien
taaaaaacagatgccgtagcagcac

SEQ ID NO: 4166115 - DNA, 25 bp, Homo sapien
gtcataaaaaacagatgccgtagca

SEQ ID NO: 4166116 - DNA, 25 bp, Homo sapien
cataaaaaacagatgccgtagcagc

SEQ ID NO: 4166117 - DNA, 25 bp, Homo sapien
tgtatccagactgcccactagaaag

SEQ ID NO: 4166118 - DNA, 25 bp, Homo sapien
gaaagcccctcttgaactggactta

SEQ ID NO: 4166119 - DNA, 25 bp, Homo sapien
taagtgattgtgtatccagactgcc

SEQ ID NO: 4166120 - DNA, 25 bp, Homo sapien
actagaaagcccctcttgaactgga

SEQ ID NO: 4166121 - DNA, 25 bp, Homo sapien
tctatgggccatattagggtatcag

SEQ ID NO: 4166122 - DNA, 25 bp, Homo sapien
tcttcactcacttttcgtgtcaaaa

SEQ ID NO: 4166123 - DNA, 25 bp, Homo sapien
ttcatgagatagatccctgcgtccc

SEQ ID NO: 4166124 - DNA, 25 bp, Homo sapien
tgggccatattagggtatcagtctc

SEQ ID NO: 4166125 - DNA, 25 bp, Homo sapien
ttttgaatgtctacacgcactgact

SEQ ID NO: 4166126 - DNA, 25 bp, Homo sapien
caaagcacgtacacatggttttgaa

SEQ ID NO: 4166127 - DNA, 25 bp, Homo sapien
tgaatgtctacacgcactgactcca

SEQ ID NO: 4166128 - DNA, 25 bp, Homo sapien
agtttgcaaagcacgtacacatggt

SEQ ID NO: 4166129 - DNA, 25 bp, Homo sapien
tttatccatcataaagttctgtgtc

SEQ ID NO: 4166130 - DNA, 25 bp, Homo sapien
ccttggtttatccatcataaagttc

SEQ ID NO: 4166131 - DNA, 25 bp, Homo sapien
ttggtttatccatcataaagttctg

SEQ ID NO: 4166132 - DNA, 25 bp, Homo sapien
ggtttatccatcataaagttctgtg

SEQ ID NO: 4166133 - DNA, 25 bp, Homo sapien
caagtatcactgagcttgttagcat

SEQ ID NO: 4166134 - DNA, 25 bp, Homo sapien
attgggtctttctaatttgatagct

SEQ ID NO: 4166135 - DNA, 25 bp, Homo sapien
tgggtctttctaatttgatagcttg

SEQ ID NO: 4166136 - DNA, 25 bp, Homo sapien
ttattgggtctttctaatttgatag

SEQ ID NO: 4166137 - DNA, 25 bp, Homo sapien
gggtctttctaatttgatagcttgt

SEQ ID NO: 4166138 - DNA, 25 bp, Homo sapien
caccattgcatggaggtttttcttg

SEQ ID NO: 4166139 - DNA, 25 bp, Homo sapien
gataaagcgaatgctgggttgaatg

SEQ ID NO: 4166140 - DNA, 25 bp, Homo sapien
tctggcaaagataaagcgaatgctg

SEQ ID NO: 4166141 - DNA, 25 bp, Homo sapien
gggttgaatgagatacccatcacca

SEQ ID NO: 4166142 - DNA, 25 bp, Homo sapien
gttcaagcttcccaggtcacacacg

SEQ ID NO: 4166143 - DNA, 25 bp, Homo sapien
acacgctgccttcggtgaggtccat

SEQ ID NO: 4166144 - DNA, 25 bp, Homo sapien
tgcttatcagcatgtggtaattcag

SEQ ID NO: 4166145 - DNA, 25 bp, Homo sapien
gtcacacacgctgccttcggtgagg

SEQ ID NO: 4166146 - DNA, 25 bp, Homo sapien
tactgactaacactatatgggctgc

SEQ ID NO: 4166147 - DNA, 25 bp, Homo sapien
ctgctgggcaggtagacgtctaagc

SEQ ID NO: 4166148 - DNA, 25 bp, Homo sapien
gcaggtagacgtctaagcggagacc

SEQ ID NO: 4166149 - DNA, 25 bp, Homo sapien
gtctaagcggagaccagagcatcca

SEQ ID NO: 4166150 - DNA, 25 bp, Homo sapien
ggatcaggaatactggcccagctta

SEQ ID NO: 4166151 - DNA, 25 bp, Homo sapien
caaggtctctcagggcattgcagtt

SEQ ID NO: 4166152 - DNA, 25 bp, Homo sapien
aacagatggcccacaatttggaagc

SEQ ID NO: 4166153 - DNA, 25 bp, Homo sapien
gaagcttactacgacatgatcacag

SEQ ID NO: 4166154 - DNA, 25 bp, Homo sapien
caaaatgtcctcatcgtgctctgga

SEQ ID NO: 4166155 - DNA, 25 bp, Homo sapien
tcagccctgcttggggatcactagt

SEQ ID NO: 4166156 - DNA, 25 bp, Homo sapien
gccctgcttggggatcactagtcat

SEQ ID NO: 4166157 - DNA, 25 bp, Homo sapien
gtcagccctgcttggggatcactag

SEQ ID NO: 4166158 - DNA, 25 bp, Homo sapien
ccagtcagccctgcttggggatcac

SEQ ID NO: 4166159 - DNA, 25 bp, Homo sapien
tctcgtttgctccttgacaggccat

SEQ ID NO: 4166160 - DNA, 25 bp, Homo sapien
tctgatctgatctcgtttgctcctt

SEQ ID NO: 4166161 - DNA, 25 bp, Homo sapien
gcaagccacatgtacagagctcttt

SEQ ID NO: 4166162 - DNA, 25 bp, Homo sapien
cattttgtaaatcatgtacagcaag

SEQ ID NO: 4166163 - DNA, 25 bp, Homo sapien
cttgtttttacaggcttaatgtaga

SEQ ID NO: 4166164 - DNA, 25 bp, Homo sapien
aagaagccaaagactctctggtcat

SEQ ID NO: 4166165 - DNA, 25 bp, Homo sapien
tctcatctaatggagatttccacca

SEQ ID NO: 4166166 - DNA, 25 bp, Homo sapien
gaatggcatgttgtaacatctcatc

SEQ ID NO: 4166167 - DNA, 25 bp, Homo sapien
tgcaccctgtctagcttttcccaga

SEQ ID NO: 4166168 - DNA, 25 bp, Homo sapien
gaacttcattgaatctatgcaccct

SEQ ID NO: 4166169 - DNA, 25 bp, Homo sapien
cctaaggatacaccagcttctgctg

SEQ ID NO: 4166170 - DNA, 25 bp, Homo sapien
ttctgctgcccacattaactttata

SEQ ID NO: 4166171 - DNA, 25 bp, Homo sapien
aacactgtagctgatggtatcttcc

SEQ ID NO: 4166172 - DNA, 25 bp, Homo sapien
cagttccaaaacactgtagctgatg

SEQ ID NO: 4166173 - DNA, 25 bp, Homo sapien
gtagctgatggtatcttcctttccg

SEQ ID NO: 4166174 - DNA, 25 bp, Homo sapien
tggtatcttcctttccgtcagctac

SEQ ID NO: 4166175 - DNA, 25 bp, Homo sapien
gtatcttaaggactcctacatatga

SEQ ID NO: 4166176 - DNA, 25 bp, Homo sapien
taaggactcctacatatgataaacc

SEQ ID NO: 4166177 - DNA, 25 bp, Homo sapien
atatgataaaccaccccataagtat

SEQ ID NO: 4166178 - DNA, 25 bp, Homo sapien
agtatttgtgaaacccttaggtgtg

SEQ ID NO: 4166179 - DNA, 25 bp, Homo sapien
agtcacctttctcaggtgtacagtg

SEQ ID NO: 4166180 - DNA, 25 bp, Homo sapien
gtggtccacaaagcgaccagctcct

SEQ ID NO: 4166181 - DNA, 25 bp, Homo sapien
tacagtggtccacaaagcgaccagc

SEQ ID NO: 4166182 - DNA, 25 bp, Homo sapien
tcaggtgtacagtggtccacaaagc

SEQ ID NO: 4166183 - DNA, 25 bp, Homo sapien
caagaggcagcaggatcccgtgtct

SEQ ID NO: 4166184 - DNA, 25 bp, Homo sapien
ctgcatggtgtccacccaagaggca

SEQ ID NO: 4166185 - DNA, 25 bp, Homo sapien
aggcagcaggatcccgtgtcttcct

SEQ ID NO: 4166186 - DNA, 25 bp, Homo sapien
tgcatggtgtccacccaagaggcag

SEQ ID NO: 4166187 - DNA, 25 bp, Homo sapien
gtgtaagtactgataaattaaatgt

SEQ ID NO: 4166188 - DNA, 25 bp, Homo sapien
aatggaagagtgtaagtactgataa

SEQ ID NO: 4166189 - DNA, 25 bp, Homo sapien
ttctattccttgtaacgctggaagc

SEQ ID NO: 4166190 - DNA, 25 bp, Homo sapien
caagcataactgatatactcatggc

SEQ ID NO: 4166191 - DNA, 25 bp, Homo sapien
gagttagcaattgcccctagggaaa

SEQ ID NO: 4166192 - DNA, 25 bp, Homo sapien
agtagtgtaactgcctaatgggttc

SEQ ID NO: 4166193 - DNA, 25 bp, Homo sapien
tagggaaaacttagctcctcacaac

SEQ ID NO: 4166194 - DNA, 25 bp, Homo sapien
caatcctgtagctagttagtagtgt

SEQ ID NO: 4166195 - DNA, 25 bp, Homo sapien
tgttcaacgtctctgttagtgtatg

SEQ ID NO: 4166196 - DNA, 25 bp, Homo sapien
cagttttgaagaggcctcaactttg

SEQ ID NO: 4166197 - DNA, 25 bp, Homo sapien
tccttcagtgttctgacctatagct

SEQ ID NO: 4166198 - DNA, 25 bp, Homo sapien
tgcttcctgttcaacgtctctgtta

SEQ ID NO: 4166199 - DNA, 25 bp, Homo sapien
tcggaacttgtgaggaccagtttgc

SEQ ID NO: 4166200 - DNA, 25 bp, Homo sapien
ccagtttgctaaaggaaatatgact

SEQ ID NO: 4166201 - DNA, 25 bp, Homo sapien
tactgtgactaacaacctctaagag

SEQ ID NO: 4166202 - DNA, 25 bp, Homo sapien
ctagggtcagtgtgaagagaatact

SEQ ID NO: 4166203 - DNA, 25 bp, Homo sapien
ttccatagatggaaagagcttattc

SEQ ID NO: 4166204 - DNA, 25 bp, Homo sapien
taatccatgctatgcccctgtccaa

SEQ ID NO: 4166205 - DNA, 25 bp, Homo sapien
ttctctgttgccataatccatgcta

SEQ ID NO: 4166206 - DNA, 25 bp, Homo sapien
gttccaaacgttccatagatggaaa

SEQ ID NO: 4166207 - DNA, 25 bp, Homo sapien
gcccctcaattgattctgaaccagg

SEQ ID NO: 4166208 - DNA, 25 bp, Homo sapien
tttggtagggtctcaggacttggat

SEQ ID NO: 4166209 - DNA, 25 bp, Homo sapien
ctgacctgcccctcaattgattctg

SEQ ID NO: 4166210 - DNA, 25 bp, Homo sapien
caattgattctgaaccaggatcact

SEQ ID NO: 4166211 - DNA, 25 bp, Homo sapien
gaagattggggaagtgacagagagg

SEQ ID NO: 4166212 - DNA, 25 bp, Homo sapien
ctgcagaagattggggaagtgacag

SEQ ID NO: 4166213 - DNA, 25 bp, Homo sapien
cagaagattggggaagtgacagaga

SEQ ID NO: 4166214 - DNA, 25 bp, Homo sapien
aagattggggaagtgacagagaggt

SEQ ID NO: 4166215 - DNA, 25 bp, Homo sapien
ctcccaagatggtgctcatgtgagc

SEQ ID NO: 4166216 - DNA, 25 bp, Homo sapien
gctgacaacttgcaacagatcccac

SEQ ID NO: 4166217 - DNA, 25 bp, Homo sapien
cccaagatggtgctcatgtgagcag

SEQ ID NO: 4166218 - DNA, 25 bp, Homo sapien
ggagttggtcctggcattgctgaca

SEQ ID NO: 4166219 - DNA, 25 bp, Homo sapien
gagccactccaattgctggccgctt

SEQ ID NO: 4166220 - DNA, 25 bp, Homo sapien
tggagccactccaattgctggccgc

SEQ ID NO: 4166221 - DNA, 25 bp, Homo sapien
ccactccaattgctggccgcttcac

SEQ ID NO: 4166222 - DNA, 25 bp, Homo sapien
gccactccaattgctggccgcttca

SEQ ID NO: 4166223 - DNA, 25 bp, Homo sapien
gctgccttaatcgttgaggacacca

SEQ ID NO: 4166224 - DNA, 25 bp, Homo sapien
accaaaggctgccttaatcgttgag

SEQ ID NO: 4166225 - DNA, 25 bp, Homo sapien
tctgggctttcccttgcatcttgtt

SEQ ID NO: 4166226 - DNA, 25 bp, Homo sapien
attctgggctttcccttgcatcttg

SEQ ID NO: 4166227 - DNA, 25 bp, Homo sapien
ttagtgacagtgtcctctcgatgat

SEQ ID NO: 4166228 - DNA, 25 bp, Homo sapien
cagtgtcctctcgatgattggagca

SEQ ID NO: 4166229 - DNA, 25 bp, Homo sapien
gtgacagtgtcctctcgatgattgg

SEQ ID NO: 4166230 - DNA, 25 bp, Homo sapien
gacagtgtcctctcgatgattggag

SEQ ID NO: 4166231 - DNA, 25 bp, Homo sapien
gctgatattgtgagtctgctgacca

SEQ ID NO: 4166232 - DNA, 25 bp, Homo sapien
tcttctgctttgacaatttttctcc

SEQ ID NO: 4166233 - DNA, 25 bp, Homo sapien
caaccacttggtcagtgtaggggct

SEQ ID NO: 4166234 - DNA, 25 bp, Homo sapien
ccccaggtgcgcaaacaggctgttc

SEQ ID NO: 4166235 - DNA, 25 bp, Homo sapien
tgtaaacacccttgcacttcaacca

SEQ ID NO: 4166236 - DNA, 25 bp, Homo sapien
gtaaacacccttgcacttcaaccag

SEQ ID NO: 4166237 - DNA, 25 bp, Homo sapien
aaacacccttgcacttcaaccagct

SEQ ID NO: 4166238 - DNA, 25 bp, Homo sapien
ttgtaaacacccttgcacttcaacc

SEQ ID NO: 4166239 - DNA, 25 bp, Homo sapien
cttgtatagccttgagattgtgaag

SEQ ID NO: 4166240 - DNA, 25 bp, Homo sapien
ttcttgtatagccttgagattgtga

SEQ ID NO: 4166241 - DNA, 25 bp, Homo sapien
gctgcttgttcgcacaggctgtcat

SEQ ID NO: 4166242 - DNA, 25 bp, Homo sapien
gatgctgcttgttcgcacaggctgt

SEQ ID NO: 4166243 - DNA, 25 bp, Homo sapien
cagcagcattgtcagaaaaaacttc

SEQ ID NO: 4166244 - DNA, 25 bp, Homo sapien
ttcttgatagcatctgggcagcaat

SEQ ID NO: 4166245 - DNA, 25 bp, Homo sapien
gcagcagcattgtcagaaaaaactt

SEQ ID NO: 4166246 - DNA, 25 bp, Homo sapien
agcagcattgtcagaaaaaacttcc

SEQ ID NO: 4166247 - DNA, 25 bp, Homo sapien
tccccaagacacatagaactttcac

SEQ ID NO: 4166248 - DNA, 25 bp, Homo sapien
ctccccaagacacatagaactttca

SEQ ID NO: 4166249 - DNA, 25 bp, Homo sapien
ttctccccaagacacatagaacttt

SEQ ID NO: 4166250 - DNA, 25 bp, Homo sapien
tctccccaagacacatagaactttc

SEQ ID NO: 4166251 - DNA, 25 bp, Homo sapien
cagtgccagcccagatcacagaaca

SEQ ID NO: 4166252 - DNA, 25 bp, Homo sapien
gccagcccagatcacagaacaagac

SEQ ID NO: 4166253 - DNA, 25 bp, Homo sapien
tcaaagtacagtgccagcccagatc

SEQ ID NO: 4166254 - DNA, 25 bp, Homo sapien
gtgccagcccagatcacagaacaag

SEQ ID NO: 4166255 - DNA, 25 bp, Homo sapien
ctagtccacttcgttaataacgttg

SEQ ID NO: 4166256 - DNA, 25 bp, Homo sapien
tgctgcgaaaagaataggtatggtc

SEQ ID NO: 4166257 - DNA, 25 bp, Homo sapien
cgttaataacgttgctgcgaaaaga

SEQ ID NO: 4166258 - DNA, 25 bp, Homo sapien
taacgttgctgcgaaaagaataggt

SEQ ID NO: 4166259 - DNA, 25 bp, Homo sapien
ccttgggctgcgcagttatctggac

SEQ ID NO: 4166260 - DNA, 25 bp, Homo sapien
taaattgctcactattgcctgcagc

SEQ ID NO: 4166261 - DNA, 25 bp, Homo sapien
tgcctgcagcatgctaggtcttgtc

SEQ ID NO: 4166262 - DNA, 25 bp, Homo sapien
gacatgtgccaggttcaagctccat

SEQ ID NO: 4166263 - DNA, 25 bp, Homo sapien
tgcctggctttttcaacgacctggg

SEQ ID NO: 4166264 - DNA, 25 bp, Homo sapien
ttgcctggctttttcaacgacctgg

SEQ ID NO: 4166265 - DNA, 25 bp, Homo sapien
ctggcaggacattggctacagcctt

SEQ ID NO: 4166266 - DNA, 25 bp, Homo sapien
tggcaggacattggctacagcctta

SEQ ID NO: 4166267 - DNA, 25 bp, Homo sapien
ggcaggacattggctacagccttac

SEQ ID NO: 4166268 - DNA, 25 bp, Homo sapien
ctgtcagtctgtgcgatggattagg

SEQ ID NO: 4166269 - DNA, 25 bp, Homo sapien
tggattaggttcagtcacaatgtct

SEQ ID NO: 4166270 - DNA, 25 bp, Homo sapien
cagtctgtgcgatggattaggttca

SEQ ID NO: 4166271 - DNA, 25 bp, Homo sapien
tgctgtcagtctgtgcgatggatta

SEQ ID NO: 4166272 - DNA, 25 bp, Homo sapien
tcatcgcagcagcaaacactgtagg

SEQ ID NO: 4166273 - DNA, 25 bp, Homo sapien
tcagaatgccagtaaaaagatggac

SEQ ID NO: 4166274 - DNA, 25 bp, Homo sapien
gccttatagcccttcagaatgccag

SEQ ID NO: 4166275 - DNA, 25 bp, Homo sapien
ttgggtcctgtaaaattgcccagcc

SEQ ID NO: 4166276 - DNA, 25 bp, Homo sapien
tgctgaatcagggatttggatccct

SEQ ID NO: 4166277 - DNA, 25 bp, Homo sapien
tgtttccagattattcttgtacaac

SEQ ID NO: 4166278 - DNA, 25 bp, Homo sapien
ccctttggtgtgactctaaatttga

SEQ ID NO: 4166279 - DNA, 25 bp, Homo sapien
gagtcctccagattatactgctttc

SEQ ID NO: 4166280 - DNA, 25 bp, Homo sapien
caagccgtggtttcgtattgagtga

SEQ ID NO: 4166281 - DNA, 25 bp, Homo sapien
tgcctgcctgaatttgggacacgtt

SEQ ID NO: 4166282 - DNA, 25 bp, Homo sapien
cttcttggcaccaagccgtggtttc

SEQ ID NO: 4166283 - DNA, 25 bp, Homo sapien
atggtagataaggctttctgatgct

SEQ ID NO: 4166284 - DNA, 25 bp, Homo sapien
taaaagaacattatggagagctgag

SEQ ID NO: 4166285 - DNA, 25 bp, Homo sapien
gagagctgagttcctaaagctggag

SEQ ID NO: 4166286 - DNA, 25 bp, Homo sapien
aacattatggagagctgagttccta

SEQ ID NO: 4166287 - DNA, 25 bp, Homo sapien
cctaaagctggagtttcaagagaaa

SEQ ID NO: 4166288 - DNA, 25 bp, Homo sapien
tggagtatgtgaggatccaaatgac

SEQ ID NO: 4166289 - DNA, 25 bp, Homo sapien
agtatgtgaggatccaaatgactta

SEQ ID NO: 4166290 - DNA, 25 bp, Homo sapien
gagtatgtgaggatccaaatgactt

SEQ ID NO: 4166291 - DNA, 25 bp, Homo sapien
ctggagtatgtgaggatccaaatga

SEQ ID NO: 4166292 - DNA, 25 bp, Homo sapien
gctgtggagattcttatgtcttcaa

SEQ ID NO: 4166293 - DNA, 25 bp, Homo sapien
gacatgcgtataacatgtgttcaaa

SEQ ID NO: 4166294 - DNA, 25 bp, Homo sapien
tcaaagactccccttcttgcagtaa

SEQ ID NO: 4166295 - DNA, 25 bp, Homo sapien
aatttgctgacatgcgtataacatg

SEQ ID NO: 4166296 - DNA, 25 bp, Homo sapien
gaagagagaattggacaccaccctc

SEQ ID NO: 4166297 - DNA, 25 bp, Homo sapien
tgtcagcaaacgcattcctgcaaac

SEQ ID NO: 4166298 - DNA, 25 bp, Homo sapien
tcagcaaacgcattcctgcaaacac

SEQ ID NO: 4166299 - DNA, 25 bp, Homo sapien
aatgtcagcaaacgcattcctgcaa

SEQ ID NO: 4166300 - DNA, 25 bp, Homo sapien
tcaatgtcagcaaacgcattcctgc

SEQ ID NO: 4166301 - DNA, 25 bp, Homo sapien
tggcaaacccactgtgtcaaggtgg

SEQ ID NO: 4166302 - DNA, 25 bp, Homo sapien
gaaaacccaggcgtaatctgcagcc

SEQ ID NO: 4166303 - DNA, 25 bp, Homo sapien
gacgaagccttctgagcagtggtca

SEQ ID NO: 4166304 - DNA, 25 bp, Homo sapien
tggttaccccttgccagcagacagt

SEQ ID NO: 4166305 - DNA, 25 bp, Homo sapien
tttaagagattaagtagctaacgcc

SEQ ID NO: 4166306 - DNA, 25 bp, Homo sapien
tccagaggctatctcagattccgtg

SEQ ID NO: 4166307 - DNA, 25 bp, Homo sapien
tataaggataccactgttctagcag

SEQ ID NO: 4166308 - DNA, 25 bp, Homo sapien
taacgccttaaatgaacagggctgc

SEQ ID NO: 4166309 - DNA, 25 bp, Homo sapien
gtcttcttcggacccagatataagt

SEQ ID NO: 4166310 - DNA, 25 bp, Homo sapien
ccagatataagtccctggggagatg

SEQ ID NO: 4166311 - DNA, 25 bp, Homo sapien
tctgtcttcttcggacccagatata

SEQ ID NO: 4166312 - DNA, 25 bp, Homo sapien
gatataagtccctggggagatggca

SEQ ID NO: 4166313 - DNA, 25 bp, Homo sapien
tgggctgcaggactgaacaaaatcc

SEQ ID NO: 4166314 - DNA, 25 bp, Homo sapien
ccagttggatccagacaagagctgc

SEQ ID NO: 4166315 - DNA, 25 bp, Homo sapien
tccctgtctaaggaagtgggctggc

SEQ ID NO: 4166316 - DNA, 25 bp, Homo sapien
ccagctgagaccagttggatccaga

SEQ ID NO: 4166317 - DNA, 25 bp, Homo sapien
gatttggatgaagatcatccctgtc

SEQ ID NO: 4166318 - DNA, 25 bp, Homo sapien
gagagcatactcatactcagacaaa

SEQ ID NO: 4166319 - DNA, 25 bp, Homo sapien
tctaagaagtctgagttacatgggt

SEQ ID NO: 4166320 - DNA, 25 bp, Homo sapien
tgagttacatgggttcctgttcttc

SEQ ID NO: 4166321 - DNA, 25 bp, Homo sapien
gcatactcatactcagacaaatttt

SEQ ID NO: 4166322 - DNA, 25 bp, Homo sapien
tacctcattgcatcgaatttctcct

SEQ ID NO: 4166323 - DNA, 25 bp, Homo sapien
acctcattgcatcgaatttctcctg

SEQ ID NO: 4166324 - DNA, 25 bp, Homo sapien
cctcattgcatcgaatttctcctgt

SEQ ID NO: 4166325 - DNA, 25 bp, Homo sapien
ttacctcattgcatcgaatttctcc

SEQ ID NO: 4166326 - DNA, 25 bp, Homo sapien
actgcgtggggttagtctgctcatt

SEQ ID NO: 4166327 - DNA, 25 bp, Homo sapien
ggaagtctagccgtttatccagtgc

SEQ ID NO: 4166328 - DNA, 25 bp, Homo sapien
tgactgcgtggggttagtctgctca

SEQ ID NO: 4166329 - DNA, 25 bp, Homo sapien
ccaaaggctctgaatggggaagtct

SEQ ID NO: 4166330 - DNA, 25 bp, Homo sapien
tatggtgtccaaaggtctctgattc

SEQ ID NO: 4166331 - DNA, 25 bp, Homo sapien
ctatggtgtccaaaggtctctgatt

SEQ ID NO: 4166332 - DNA, 25 bp, Homo sapien
atggtgtccaaaggtctctgattcc

SEQ ID NO: 4166333 - DNA, 25 bp, Homo sapien
gcacagtaccggcagcttgaccttg

SEQ ID NO: 4166334 - DNA, 25 bp, Homo sapien
cagtcctcaggcctgacactattaa

SEQ ID NO: 4166335 - DNA, 25 bp, Homo sapien
gacaatttggactgtccagcgtagg

SEQ ID NO: 4166336 - DNA, 25 bp, Homo sapien
tgtaggtcctgtcatctccacgaga

SEQ ID NO: 4166337 - DNA, 25 bp, Homo sapien
gagaggcgacctcgggaagtattaa

SEQ ID NO: 4166338 - DNA, 25 bp, Homo sapien
catttgcccgtataagaagagcgtc

SEQ ID NO: 4166339 - DNA, 25 bp, Homo sapien
tcttgcctgttttcgtttgatggca

SEQ ID NO: 4166340 - DNA, 25 bp, Homo sapien
taagaagagcgtctgtggtccacca

SEQ ID NO: 4166341 - DNA, 25 bp, Homo sapien
tccgttgcccatgctaaaggttcct

SEQ ID NO: 4166342 - DNA, 25 bp, Homo sapien
ctgtgtaggaagctggacgcagcct

SEQ ID NO: 4166343 - DNA, 25 bp, Homo sapien
ccaaggcacgtttgcacaggcattt

SEQ ID NO: 4166344 - DNA, 25 bp, Homo sapien
cgcagcctgctggactagtaatctt

SEQ ID NO: 4166345 - DNA, 25 bp, Homo sapien
gcgggacaatcacgctcggccttct

SEQ ID NO: 4166346 - DNA, 25 bp, Homo sapien
ggccccggcgccgactgaggcgagg

SEQ ID NO: 4166347 - DNA, 25 bp, Homo sapien
ggctgcgggacaatcacgctcggcc

SEQ ID NO: 4166348 - DNA, 25 bp, Homo sapien
ccgactgaggcgagggctgcgggac

SEQ ID NO: 4166349 - DNA, 25 bp, Homo sapien
cgtcgccgacgccactgccgaggct

SEQ ID NO: 4166350 - DNA, 25 bp, Homo sapien
ttggccgaacgctggcggctgcctc

SEQ ID NO: 4166351 - DNA, 25 bp, Homo sapien
ctgccggctgacacttggccgaacg

SEQ ID NO: 4166352 - DNA, 25 bp, Homo sapien
agctctagcgccgtcgctgccggct

SEQ ID NO: 4166353 - DNA, 25 bp, Homo sapien
gaaagttgtgctttgccgcctccag

SEQ ID NO: 4166354 - DNA, 25 bp, Homo sapien
ggaaagttgtgctttgccgcctcca

SEQ ID NO: 4166355 - DNA, 25 bp, Homo sapien
ccaaccgcctcgctgctccagagaa

SEQ ID NO: 4166356 - DNA, 25 bp, Homo sapien
gggcgcggcgaaaagtttccagcca

SEQ ID NO: 4166357 - DNA, 25 bp, Homo sapien
aagtcctcggcactcgctcgcacaa

SEQ ID NO: 4166358 - DNA, 25 bp, Homo sapien
gccggctcagcattcgctggcctgg

SEQ ID NO: 4166359 - DNA, 25 bp, Homo sapien
aagcaccatcgccaaccctcggcca

SEQ ID NO: 4166360 - DNA, 25 bp, Homo sapien
agcaccatcgccaaccctcggccat

SEQ ID NO: 4166361 - DNA, 25 bp, Homo sapien
gaagcaccatcgccaaccctcggcc

SEQ ID NO: 4166362 - DNA, 25 bp, Homo sapien
atgagcgaggaagtaacggtccccg

SEQ ID NO: 4166363 - DNA, 25 bp, Homo sapien
cagagaatgagcgaggaagtaacgg

SEQ ID NO: 4166364 - DNA, 25 bp, Homo sapien
gaatgagcgaggaagtaacggtccc

SEQ ID NO: 4166365 - DNA, 25 bp, Homo sapien
ttcccagagaatgagcgaggaagta

SEQ ID NO: 4166366 - DNA, 25 bp, Homo sapien
aaaaagcggcaaacgtgcatcccgg

SEQ ID NO: 4166367 - DNA, 25 bp, Homo sapien
gaaaaaaagcggcaaacgtgcatcc

SEQ ID NO: 4166368 - DNA, 25 bp, Homo sapien
gcaaacgtgcatcccggcaccttaa

SEQ ID NO: 4166369 - DNA, 25 bp, Homo sapien
aagcggcaaacgtgcatcccggcac

SEQ ID NO: 4166370 - DNA, 25 bp, Homo sapien
ccatgagaagtggacccggaggctt

SEQ ID NO: 4166371 - DNA, 25 bp, Homo sapien
gaggcttcattccatcgggctccgg

SEQ ID NO: 4166372 - DNA, 25 bp, Homo sapien
gagggtcaatctagagagctccaga

SEQ ID NO: 4166373 - DNA, 25 bp, Homo sapien
gagactaactcccaaatatgacagg

SEQ ID NO: 4166374 - DNA, 25 bp, Homo sapien
ttctgagactagtgtttcacagaaa

SEQ ID NO: 4166375 - DNA, 25 bp, Homo sapien
cttctgagactagtgtttcacagaa

SEQ ID NO: 4166376 - DNA, 25 bp, Homo sapien
tctgagactagtgtttcacagaaac

SEQ ID NO: 4166377 - DNA, 25 bp, Homo sapien
caaaatagccaccataattgctgag

SEQ ID NO: 4166378 - DNA, 25 bp, Homo sapien
tagtcctgtgcccttaaagagaagt

SEQ ID NO: 4166379 - DNA, 25 bp, Homo sapien
actaggcagtttattgtcaggctta

SEQ ID NO: 4166380 - DNA, 25 bp, Homo sapien
caagcttgataaacaatgcacagtt

SEQ ID NO: 4166381 - DNA, 25 bp, Homo sapien
aaaacaagcttgataaacaatgcag

SEQ ID NO: 4166382 - DNA, 25 bp, Homo sapien
tattttagatgactgtagagggcag

SEQ ID NO: 4166383 - DNA, 25 bp, Homo sapien
gaaaaatctagagtgactattttag

SEQ ID NO: 4166384 - DNA, 25 bp, Homo sapien
tagattaactgtgactaaactttac

SEQ ID NO: 4166385 - DNA, 25 bp, Homo sapien
gatttcttaatccttgaagacaggg

SEQ ID NO: 4166386 - DNA, 25 bp, Homo sapien
tctctcatccgtatttacaactgct

SEQ ID NO: 4166387 - DNA, 25 bp, Homo sapien
ggatctatgttgtgcactccttaca

SEQ ID NO: 4166388 - DNA, 25 bp, Homo sapien
caactgctccccatcgcttgtatta

SEQ ID NO: 4166389 - DNA, 25 bp, Homo sapien
tgataaagatacacccgagagtgga

SEQ ID NO: 4166390 - DNA, 25 bp, Homo sapien
cactttcagtcacggctggagcggc

SEQ ID NO: 4166391 - DNA, 25 bp, Homo sapien
ttagagccactggagggaacacggc

SEQ ID NO: 4166392 - DNA, 25 bp, Homo sapien
gaagcatgctccttaccttgggaaa

SEQ ID NO: 4166393 - DNA, 25 bp, Homo sapien
aaaaccctagatggactgaagacct

SEQ ID NO: 4166394 - DNA, 25 bp, Homo sapien
taattgaaagtacacaaacagacct

SEQ ID NO: 4166395 - DNA, 25 bp, Homo sapien
tacttggaaaaatacagatccctct

SEQ ID NO: 4166396 - DNA, 25 bp, Homo sapien
gaaagagcatgagcaaaatacttgg

SEQ ID NO: 4166397 - DNA, 25 bp, Homo sapien
ctacacttaacagctacgaatttaa

SEQ ID NO: 4166398 - DNA, 25 bp, Homo sapien
cacttaacagctacgaatttaagtt

SEQ ID NO: 4166399 - DNA, 25 bp, Homo sapien
aattcacactgactacacttaacag

SEQ ID NO: 4166400 - DNA, 25 bp, Homo sapien
aagggactgacaattcacactgact

SEQ ID NO: 4166401 - DNA, 25 bp, Homo sapien
aattgttgcatcattaagtgagtaa

SEQ ID NO: 4166402 - DNA, 25 bp, Homo sapien
catgtggctccacaataattggtcc

SEQ ID NO: 4166403 - DNA, 25 bp, Homo sapien
tggtgaactgcaacagtctgtgaac

SEQ ID NO: 4166404 - DNA, 25 bp, Homo sapien
ttttaaacaagactcttccctgata

SEQ ID NO: 4166405 - DNA, 25 bp, Homo sapien
ccaagcgggaatgtaacagctttgc

SEQ ID NO: 4166406 - DNA, 25 bp, Homo sapien
gggcatttccaagcgggaatgtaac

SEQ ID NO: 4166407 - DNA, 25 bp, Homo sapien
atttccaagcgggaatgtaacagct

SEQ ID NO: 4166408 - DNA, 25 bp, Homo sapien
tgggcatttccaagcgggaatgtaa

SEQ ID NO: 4166409 - DNA, 25 bp, Homo sapien
tactttaacgtggtcctactctata

SEQ ID NO: 4166410 - DNA, 25 bp, Homo sapien
cataagtcacttgggaatcttgcta

SEQ ID NO: 4166411 - DNA, 25 bp, Homo sapien
cattcaataagcctaagagggatct

SEQ ID NO: 4166412 - DNA, 25 bp, Homo sapien
tgagaggcagcacaactactgaata

SEQ ID NO: 4166413 - DNA, 25 bp, Homo sapien
tcccaatcttagagctcctgctggt

SEQ ID NO: 4166414 - DNA, 25 bp, Homo sapien
gtatcttagcatatttgtgcacaag

SEQ ID NO: 4166415 - DNA, 25 bp, Homo sapien
caagtatatccctagaattgctact

SEQ ID NO: 4166416 - DNA, 25 bp, Homo sapien
tcctgctggtccatatactcaccag

SEQ ID NO: 4166417 - DNA, 25 bp, Homo sapien
ttttatcaggctcacagtgggttca

SEQ ID NO: 4166418 - DNA, 25 bp, Homo sapien
cttttatcaggctcacagtgggttc

SEQ ID NO: 4166419 - DNA, 25 bp, Homo sapien
tttatcaggctcacagtgggttcaa

SEQ ID NO: 4166420 - DNA, 25 bp, Homo sapien
tccaaggctggatgttttacaacac

SEQ ID NO: 4166421 - DNA, 25 bp, Homo sapien
gagtatcggatgtccttttccaagg

SEQ ID NO: 4166422 - DNA, 25 bp, Homo sapien
tatgtgcaacgggttttccagtggc

SEQ ID NO: 4166423 - DNA, 25 bp, Homo sapien
cagtggctgcgatgcaaatggctgc

SEQ ID NO: 4166424 - DNA, 25 bp, Homo sapien
tatcctgttaccgaaacttcaggag

SEQ ID NO: 4166425 - DNA, 25 bp, Homo sapien
ttcctacaaaccaatttccatcata

SEQ ID NO: 4166426 - DNA, 25 bp, Homo sapien
gagattaacaccttttcttcctaca

SEQ ID NO: 4166427 - DNA, 25 bp, Homo sapien
ttccatcatatcctgttaccgaaac

SEQ ID NO: 4166428 - DNA, 25 bp, Homo sapien
cagatttgaagggtggtggatttgc

SEQ ID NO: 4166429 - DNA, 25 bp, Homo sapien
aagggtggtggatttgcatcagcat

SEQ ID NO: 4166430 - DNA, 25 bp, Homo sapien
agggtggtggatttgcatcagcatt

SEQ ID NO: 4166431 - DNA, 25 bp, Homo sapien
acagatttgaagggtggtggatttg

SEQ ID NO: 4166432 - DNA, 25 bp, Homo sapien
gaaatgtagatgactttttggtcac

SEQ ID NO: 4166433 - DNA, 25 bp, Homo sapien
gaagccaataaaccatcaggccatt

SEQ ID NO: 4166434 - DNA, 25 bp, Homo sapien
accaagggaattggtcactttacag

SEQ ID NO: 4166435 - DNA, 25 bp, Homo sapien
ccagaataattgaaagtcaatggat

SEQ ID NO: 4166436 - DNA, 25 bp, Homo sapien
tccagtagtgactcagccaatgagc

SEQ ID NO: 4166437 - DNA, 25 bp, Homo sapien
aatgtgcctgctatgtttgaagaac

SEQ ID NO: 4166438 - DNA, 25 bp, Homo sapien
tcattgtgggtaaaatgggaagccc

SEQ ID NO: 4166439 - DNA, 25 bp, Homo sapien
gaagggctctgtaagtcattgtaag

SEQ ID NO: 4166440 - DNA, 25 bp, Homo sapien
ctgaagggtggtagtagtaggagga

SEQ ID NO: 4166441 - DNA, 25 bp, Homo sapien
tgaagggtggtagtagtaggaggat

SEQ ID NO: 4166442 - DNA, 25 bp, Homo sapien
ttgagggatgccactgaattgtagg

SEQ ID NO: 4166443 - DNA, 25 bp, Homo sapien
cagttgagggatgccactgaattgt

SEQ ID NO: 4166444 - DNA, 25 bp, Homo sapien
cagcagttgagggatgccactgaat

SEQ ID NO: 4166445 - DNA, 25 bp, Homo sapien
tcagcagttgagggatgccactgaa

SEQ ID NO: 4166446 - DNA, 25 bp, Homo sapien
gaaacgtccgtcttctcctatagca

SEQ ID NO: 4166447 - DNA, 25 bp, Homo sapien
caaagtagtctccacgaaacgtccg

SEQ ID NO: 4166448 - DNA, 25 bp, Homo sapien
tacaagtactatgaagagagcccca

SEQ ID NO: 4166449 - DNA, 25 bp, Homo sapien
cactacactagcaatgatcgtggca

SEQ ID NO: 4166450 - DNA, 25 bp, Homo sapien
gttgaagaacatctatttgtgattc

SEQ ID NO: 4166451 - DNA, 25 bp, Homo sapien
tacactgtctgggtaagaatcaagc

SEQ ID NO: 4166452 - DNA, 25 bp, Homo sapien
ctttacgtattagattgttcactgg

SEQ ID NO: 4166453 - DNA, 25 bp, Homo sapien
tgttcatcactgacaaacttcattc

SEQ ID NO: 4166454 - DNA, 25 bp, Homo sapien
tacacaatgtcaaggtagttccctt

SEQ ID NO: 4166455 - DNA, 25 bp, Homo sapien
tcttgagacagtagtacagcattga

SEQ ID NO: 4166456 - DNA, 25 bp, Homo sapien
tgcctcacaccaataaagtactctg

SEQ ID NO: 4166457 - DNA, 25 bp, Homo sapien
gcagcttagatacactgaactcaga

SEQ ID NO: 4166458 - DNA, 25 bp, Homo sapien
tattactcttgcaggtattttggac

SEQ ID NO: 4166459 - DNA, 25 bp, Homo sapien
tactaccacagttttagtgcaacaa

SEQ ID NO: 4166460 - DNA, 25 bp, Homo sapien
catcatgttcactgagtttactacc

SEQ ID NO: 4166461 - DNA, 25 bp, Homo sapien
ggaaagccattccatcaggctaaat

SEQ ID NO: 4166462 - DNA, 25 bp, Homo sapien
caatgtccattagcaagtgttaccg

SEQ ID NO: 4166463 - DNA, 25 bp, Homo sapien
aaaaggagatgaatgccaatgtcca

SEQ ID NO: 4166464 - DNA, 25 bp, Homo sapien
aaataaggctactgctaatgtacca

SEQ ID NO: 4166465 - DNA, 25 bp, Homo sapien
tacttcagtattccgaaatgctctc

SEQ ID NO: 4166466 - DNA, 25 bp, Homo sapien
gtaagcctccactgtagaagcaatt

SEQ ID NO: 4166467 - DNA, 25 bp, Homo sapien
cactatttgcaagataccatgaaca

SEQ ID NO: 4166468 - DNA, 25 bp, Homo sapien
tcagcttcaaaatagttgtcacaat

SEQ ID NO: 4166469 - DNA, 25 bp, Homo sapien
tttcactggcaaaatggtcactttt

SEQ ID NO: 4166470 - DNA, 25 bp, Homo sapien
aagaagatataagtgaactttattt

SEQ ID NO: 4166471 - DNA, 25 bp, Homo sapien
taagaagatataagtgaactttatt

SEQ ID NO: 4166472 - DNA, 25 bp, Homo sapien
ctggccacctcatcgtttaaattaa

SEQ ID NO: 4166473 - DNA, 25 bp, Homo sapien
gcactagtatcagattcttacaaca

SEQ ID NO: 4166474 - DNA, 25 bp, Homo sapien
aaatacactgctaatttccttcaga

SEQ ID NO: 4166475 - DNA, 25 bp, Homo sapien
taaacaacagtgcaatgcttcccaa

SEQ ID NO: 4166476 - DNA, 25 bp, Homo sapien
gttagcaaatagaaccctactaggc

SEQ ID NO: 4166477 - DNA, 25 bp, Homo sapien
ggctaacacctaatacacaggttgg

SEQ ID NO: 4166478 - DNA, 25 bp, Homo sapien
gcaaaatatttagccgtgggttatc

SEQ ID NO: 4166479 - DNA, 25 bp, Homo sapien
cctactaggcacgtggtaaaatact

SEQ ID NO: 4166480 - DNA, 25 bp, Homo sapien
cagggttaatagatctaggcatcga

SEQ ID NO: 4166481 - DNA, 25 bp, Homo sapien
tgaactgggaggtacacttaaagga

SEQ ID NO: 4166482 - DNA, 25 bp, Homo sapien
taggcatcgagcaccaaatggcagc

SEQ ID NO: 4166483 - DNA, 25 bp, Homo sapien
taaagttgataggaagcagcatgac

SEQ ID NO: 4166484 - DNA, 25 bp, Homo sapien
taatactggtactaataactggcaa

SEQ ID NO: 4166485 - DNA, 25 bp, Homo sapien
tttgcatggcaatctaaccagatat

SEQ ID NO: 4166486 - DNA, 25 bp, Homo sapien
gatcaaatgcatcagcagaccagtt

SEQ ID NO: 4166487 - DNA, 25 bp, Homo sapien
gtatcattcctgcaaataattggca

SEQ ID NO: 4166488 - DNA, 25 bp, Homo sapien
ctttgtagtattagaataggctggt

SEQ ID NO: 4166489 - DNA, 25 bp, Homo sapien
ttgtagtattagaataggctggtag

SEQ ID NO: 4166490 - DNA, 25 bp, Homo sapien
tctttgtagtattagaataggctgg

SEQ ID NO: 4166491 - DNA, 25 bp, Homo sapien
ctctttgtagtattagaataggctg

SEQ ID NO: 4166492 - DNA, 25 bp, Homo sapien
cgtttccaatgaatagattctgaaa

SEQ ID NO: 4166493 - DNA, 25 bp, Homo sapien
tcaataacgtttccaatgaatagat

SEQ ID NO: 4166494 - DNA, 25 bp, Homo sapien
gaaacattataactctgtcattcat

SEQ ID NO: 4166495 - DNA, 25 bp, Homo sapien
ccaagtcactcatttcaataacgtt

SEQ ID NO: 4166496 - DNA, 25 bp, Homo sapien
taaatgtgggtaacatagtttagat

SEQ ID NO: 4166497 - DNA, 25 bp, Homo sapien
tgtgggtaacatagtttagattgcc

SEQ ID NO: 4166498 - DNA, 25 bp, Homo sapien
gggtaacatagtttagattgccaaa

SEQ ID NO: 4166499 - DNA, 25 bp, Homo sapien
acatagtttagattgccaaaaagaa

SEQ ID NO: 4166500 - DNA, 25 bp, Homo sapien
taattgttgggacccagacacggca

SEQ ID NO: 4166501 - DNA, 25 bp, Homo sapien
tataacgccgactaatgaagaggtc

SEQ ID NO: 4166502 - DNA, 25 bp, Homo sapien
tacagaactagcactattggttttg

SEQ ID NO: 4166503 - DNA, 25 bp, Homo sapien
ttggagcagggtagaagcctccact

SEQ ID NO: 4166504 - DNA, 25 bp, Homo sapien
gcataccttttctacaatgtgcaaa

SEQ ID NO: 4166505 - DNA, 25 bp, Homo sapien
tattctcgatatgtaaagagtacct

SEQ ID NO: 4166506 - DNA, 25 bp, Homo sapien
tatgttatccaagagccaggttaga

SEQ ID NO: 4166507 - DNA, 25 bp, Homo sapien
gtggcattatgctaaaacccttcct

SEQ ID NO: 4166508 - DNA, 25 bp, Homo sapien
actttgtcaagataggatggtcttt

SEQ ID NO: 4166509 - DNA, 25 bp, Homo sapien
ttttttcgaggagtcagcagcacag

SEQ ID NO: 4166510 - DNA, 25 bp, Homo sapien
gcaagaacagctccaattaccgctc

SEQ ID NO: 4166511 - DNA, 25 bp, Homo sapien
taccgctccagctacagctatggaa

SEQ ID NO: 4166512 - DNA, 25 bp, Homo sapien
tctacagcaaggtgcaatttctgcc

SEQ ID NO: 4166513 - DNA, 25 bp, Homo sapien
tatgtccttcggttaccacttcatg

SEQ ID NO: 4166514 - DNA, 25 bp, Homo sapien
gagacactggtcatctgattctaca

SEQ ID NO: 4166515 - DNA, 25 bp, Homo sapien
tgccgtttgtaaagagcttcacagt

SEQ ID NO: 4166516 - DNA, 25 bp, Homo sapien
gaaataggtctttctgaggcaaagg

SEQ ID NO: 4166517 - DNA, 25 bp, Homo sapien
ctgaaataggtctttctgaggcaaa

SEQ ID NO: 4166518 - DNA, 25 bp, Homo sapien
catacagaggaggtggtttatgtgt

SEQ ID NO: 4166519 - DNA, 25 bp, Homo sapien
aggcaaaggtggggatcgttcttca

SEQ ID NO: 4166520 - DNA, 25 bp, Homo sapien
ttaatgcataatgactaaacaacac

SEQ ID NO: 4166521 - DNA, 25 bp, Homo sapien
cattatcttaagtgtactcatgaac

SEQ ID NO: 4166522 - DNA, 25 bp, Homo sapien
tatactggccataacttcttgtttg

SEQ ID NO: 4166523 - DNA, 25 bp, Homo sapien
aaaacttaggtattgctatgtaatc

SEQ ID NO: 4166524 - DNA, 25 bp, Homo sapien
cacggaatctcctgatcatgatttc

SEQ ID NO: 4166525 - DNA, 25 bp, Homo sapien
ttgatagttcaagcgattgaaaagc

SEQ ID NO: 4166526 - DNA, 25 bp, Homo sapien
tgctgctagactgaaattactatta

SEQ ID NO: 4166527 - DNA, 25 bp, Homo sapien
cattccccataatattgctgctaga

SEQ ID NO: 4166528 - DNA, 25 bp, Homo sapien
gaatgagaccttagaaaacacctct

SEQ ID NO: 4166529 - DNA, 25 bp, Homo sapien
agtgctgacacactgcataaccagt

SEQ ID NO: 4166530 - DNA, 25 bp, Homo sapien
cataaccagtatgaccagcttaaca

SEQ ID NO: 4166531 - DNA, 25 bp, Homo sapien
cacgcattacaatactacgtagaca

SEQ ID NO: 4166532 - DNA, 25 bp, Homo sapien
ctggaaacatgttaaaatattcaga

SEQ ID NO: 4166533 - DNA, 25 bp, Homo sapien
gtctggaaacatgttaaaatattca

SEQ ID NO: 4166534 - DNA, 25 bp, Homo sapien
tcgtagtgtctggaaacatgttaaa

SEQ ID NO: 4166535 - DNA, 25 bp, Homo sapien
ggaaacatgttaaaatattcagatc

SEQ ID NO: 4166536 - DNA, 25 bp, Homo sapien
ctgtcatcacaggtactgcccattc

SEQ ID NO: 4166537 - DNA, 25 bp, Homo sapien
tgcccattcatcactaaaatgtaag

SEQ ID NO: 4166538 - DNA, 25 bp, Homo sapien
tatgaatcaaacagtgtagactcca

SEQ ID NO: 4166539 - DNA, 25 bp, Homo sapien
ttaactacatattctcagtgctagc

SEQ ID NO: 4166540 - DNA, 25 bp, Homo sapien
gaggttaaatcacaaagcgtgaccc

SEQ ID NO: 4166541 - DNA, 25 bp, Homo sapien
ccatatcaatgatataagtgccaac

SEQ ID NO: 4166542 - DNA, 25 bp, Homo sapien
tcaaggtctatgtaacccagaggtt

SEQ ID NO: 4166543 - DNA, 25 bp, Homo sapien
tccttttaactatgactgagatttt

SEQ ID NO: 4166544 - DNA, 25 bp, Homo sapien
taggaagctaccatgctggagagac

SEQ ID NO: 4166545 - DNA, 25 bp, Homo sapien
tatggtaacacagctttcacttgcc

SEQ ID NO: 4166546 - DNA, 25 bp, Homo sapien
cataaccttgccttatgagtgggcc

SEQ ID NO: 4166547 - DNA, 25 bp, Homo sapien
gatatatgacaacacacagagagca

SEQ ID NO: 4166548 - DNA, 25 bp, Homo sapien
gatgcaggttcagaaatagatcttc

SEQ ID NO: 4166549 - DNA, 25 bp, Homo sapien
atcactggtcttgtaaagatgtgga

SEQ ID NO: 4166550 - DNA, 25 bp, Homo sapien
ggttcagaaatagatcttccttgtt

SEQ ID NO: 4166551 - DNA, 25 bp, Homo sapien
ttgtaaagatgtggagcagatgcag

SEQ ID NO: 4166552 - DNA, 25 bp, Homo sapien
tagtttcatcaacacacccgaacac

SEQ ID NO: 4166553 - DNA, 25 bp, Homo sapien
ccctcaaagatggtagctgtctttt

SEQ ID NO: 4166554 - DNA, 25 bp, Homo sapien
cacacccgaacaccctcaaagatgg

SEQ ID NO: 4166555 - DNA, 25 bp, Homo sapien
ccttagtttcatcaacacacccgaa

SEQ ID NO: 4166556 - DNA, 25 bp, Homo sapien
ttaggacaagtcagtagaagccatc

SEQ ID NO: 4166557 - DNA, 25 bp, Homo sapien
taaacagtagctaccaaatggaggg

SEQ ID NO: 4166558 - DNA, 25 bp, Homo sapien
gaacatagcctctggtaacaacata

SEQ ID NO: 4166559 - DNA, 25 bp, Homo sapien
agtccttgactattccttgtggcag

SEQ ID NO: 4166560 - DNA, 25 bp, Homo sapien
ggaagaaaacacaaaaagatgtgca

SEQ ID NO: 4166561 - DNA, 25 bp, Homo sapien
tggaagaaaacacaaaaagatgtgc

SEQ ID NO: 4166562 - DNA, 25 bp, Homo sapien
ctggaagaaaacacaaaaagatgtg

SEQ ID NO: 4166563 - DNA, 25 bp, Homo sapien
agagtgctgaagattgccaacttct

SEQ ID NO: 4166564 - DNA, 25 bp, Homo sapien
ctccggtcttggtagcacatttgat

SEQ ID NO: 4166565 - DNA, 25 bp, Homo sapien
gggtacatctgctgaatgccatctt

SEQ ID NO: 4166566 - DNA, 25 bp, Homo sapien
gactctcttagggtcgttattttga

SEQ ID NO: 4166567 - DNA, 25 bp, Homo sapien
tctcgtgggtcgatgtagactctct

SEQ ID NO: 4166568 - DNA, 25 bp, Homo sapien
caggacctcagtgctcaacaaagaa

SEQ ID NO: 4166569 - DNA, 25 bp, Homo sapien
agacttccaatacccttagagtggg

SEQ ID NO: 4166570 - DNA, 25 bp, Homo sapien
tgaattacagatgaacaggctagca

SEQ ID NO: 4166571 - DNA, 25 bp, Homo sapien
catttgttagaacgcccattggaaa

SEQ ID NO: 4166572 - DNA, 25 bp, Homo sapien
gcagagctgcaaccataagtagata

SEQ ID NO: 4166573 - DNA, 25 bp, Homo sapien
ggttgcaaatgataccccagacagg

SEQ ID NO: 4166574 - DNA, 25 bp, Homo sapien
tattacataccccaaagagcatgga

SEQ ID NO: 4166575 - DNA, 25 bp, Homo sapien
gtttaaggtaagcatgcacacccca

SEQ ID NO: 4166576 - DNA, 25 bp, Homo sapien
taggagtgtcgccactcctgggagt

SEQ ID NO: 4166577 - DNA, 25 bp, Homo sapien
acacagcaatgagcatatcgaacaa

SEQ ID NO: 4166578 - DNA, 25 bp, Homo sapien
ctttccagttgtccagtataggagt

SEQ ID NO: 4166579 - DNA, 25 bp, Homo sapien
aaacacagcaatgagcatatcgaac

SEQ ID NO: 4166580 - DNA, 25 bp, Homo sapien
tgtgagcgcccaaactggcaaaggc

SEQ ID NO: 4166581 - DNA, 25 bp, Homo sapien
gggtgcctgcttaacgtctgacata

SEQ ID NO: 4166582 - DNA, 25 bp, Homo sapien
gacttggctgactgaatctgctaga

SEQ ID NO: 4166583 - DNA, 25 bp, Homo sapien
gacgcagcacttggtctaagacctg

SEQ ID NO: 4166584 - DNA, 25 bp, Homo sapien
taagacccctgtgaggtagagagca

SEQ ID NO: 4166585 - DNA, 25 bp, Homo sapien
taggtcatggtaccaaggatcctgc

SEQ ID NO: 4166586 - DNA, 25 bp, Homo sapien
catttagaggacagtaccctgccca

SEQ ID NO: 4166587 - DNA, 25 bp, Homo sapien
tattaggactcacaacacctgggcg

SEQ ID NO: 4166588 - DNA, 25 bp, Homo sapien
agtattctgaattgagctagagcac

SEQ ID NO: 4166589 - DNA, 25 bp, Homo sapien
cttgaagactctccatattaggcac

SEQ ID NO: 4166590 - DNA, 25 bp, Homo sapien
gtatatatctagaaaccaccacatt

SEQ ID NO: 4166591 - DNA, 25 bp, Homo sapien
ttgggtattctctgacaagcaagaa

SEQ ID NO: 4166592 - DNA, 25 bp, Homo sapien
atctgtgctagaatgtcctttgcat

SEQ ID NO: 4166593 - DNA, 25 bp, Homo sapien
ttcacagcagggcacatctgtgcta

SEQ ID NO: 4166594 - DNA, 25 bp, Homo sapien
tgactttggaaagcaggactatgcc

SEQ ID NO: 4166595 - DNA, 25 bp, Homo sapien
acagggataacaaggctgactttgg

SEQ ID NO: 4166596 - DNA, 25 bp, Homo sapien
tatttcaggattgtgccagagtcct

SEQ ID NO: 4166597 - DNA, 25 bp, Homo sapien
tctatttcaggattgtgccagagtc

SEQ ID NO: 4166598 - DNA, 25 bp, Homo sapien
ctatttcaggattgtgccagagtcc

SEQ ID NO: 4166599 - DNA, 25 bp, Homo sapien
ttctatttcaggattgtgccagagt

SEQ ID NO: 4166600 - DNA, 25 bp, Homo sapien
gcatcaccatggaaaggccagactg

SEQ ID NO: 4166601 - DNA, 25 bp, Homo sapien
gataaggtggcagctcttacccaag

SEQ ID NO: 4166602 - DNA, 25 bp, Homo sapien
tcagacctactatctggcgagccag

SEQ ID NO: 4166603 - DNA, 25 bp, Homo sapien
caagcagagagcacttagcagggag

SEQ ID NO: 4166604 - DNA, 25 bp, Homo sapien
tatcctacctttgatcagtatgcca

SEQ ID NO: 4166605 - DNA, 25 bp, Homo sapien
gctctcctgagggatacaatttcaa

SEQ ID NO: 4166606 - DNA, 25 bp, Homo sapien
gaacatctgattaccatttagagca

SEQ ID NO: 4166607 - DNA, 25 bp, Homo sapien
tacagaactgcattactgactctgc

SEQ ID NO: 4166608 - DNA, 25 bp, Homo sapien
caaagcacagccttgaagtatctat

SEQ ID NO: 4166609 - DNA, 25 bp, Homo sapien
gatacatctgtctgttttgacaaag

SEQ ID NO: 4166610 - DNA, 25 bp, Homo sapien
taaaatcagcagattggcaacaatt

SEQ ID NO: 4166611 - DNA, 25 bp, Homo sapien
tgatagctcttggtttatgtgccag

SEQ ID NO: 4166612 - DNA, 25 bp, Homo sapien
gcatctagttctcataaagcttcaa

SEQ ID NO: 4166613 - DNA, 25 bp, Homo sapien
aatattgtagcatcactgtcttgcg

SEQ ID NO: 4166614 - DNA, 25 bp, Homo sapien
tcaggtgggtacaatgggcaacaat

SEQ ID NO: 4166615 - DNA, 25 bp, Homo sapien
gagaaaacaagaggtcactaaagaa

SEQ ID NO: 4166616 - DNA, 25 bp, Homo sapien
gacccacatgagaagttttgttaca

SEQ ID NO: 4166617 - DNA, 25 bp, Homo sapien
gagcagcaagccattcgtgaaggat

SEQ ID NO: 4166618 - DNA, 25 bp, Homo sapien
tcaaaccacattaatgacccacatg

SEQ ID NO: 4166619 - DNA, 25 bp, Homo sapien
tagggtgtccgtctcctgagtacaa

SEQ ID NO: 4166620 - DNA, 25 bp, Homo sapien
taaagcatgaagcacaaaatgagag

SEQ ID NO: 4166621 - DNA, 25 bp, Homo sapien
aaaatgagagagtaagtcttattat

SEQ ID NO: 4166622 - DNA, 25 bp, Homo sapien
tgaagcacaaaatgagagagtaagt

SEQ ID NO: 4166623 - DNA, 25 bp, Homo sapien
gcacaaaatgagagagtaagtctta

SEQ ID NO: 4166624 - DNA, 25 bp, Homo sapien
gaaaaatagcgccaagtctcaaaca

SEQ ID NO: 4166625 - DNA, 25 bp, Homo sapien
tgtgcttaaagaggaaagtgtcacg

SEQ ID NO: 4166626 - DNA, 25 bp, Homo sapien
aaatagcgccaagtctcaaacaaga

SEQ ID NO: 4166627 - DNA, 25 bp, Homo sapien
cgtctctgaagaaacaatgttgact

SEQ ID NO: 4166628 - DNA, 25 bp, Homo sapien
agtgagccccacatcaaccatgcca

SEQ ID NO: 4166629 - DNA, 25 bp, Homo sapien
gtgagccccacatcaaccatgccat

SEQ ID NO: 4166630 - DNA, 25 bp, Homo sapien
gtagagcaagctgtgccctcttttc

SEQ ID NO: 4166631 - DNA, 25 bp, Homo sapien
gatgcagtagagcaagctgtgccct

SEQ ID NO: 4166632 - DNA, 25 bp, Homo sapien
ggtgacctgatgcagtagagcaagc

SEQ ID NO: 4166633 - DNA, 25 bp, Homo sapien
ttagcagcacactgaggtgacctga

SEQ ID NO: 4166634 - DNA, 25 bp, Homo sapien
tacataagcggacagtagttctgca

SEQ ID NO: 4166635 - DNA, 25 bp, Homo sapien
tttacataagcggacagtagttctg

SEQ ID NO: 4166636 - DNA, 25 bp, Homo sapien
cataagcggacagtagttctgcagc

SEQ ID NO: 4166637 - DNA, 25 bp, Homo sapien
ctcatttacataagcggacagtagt

SEQ ID NO: 4166638 - DNA, 25 bp, Homo sapien
agaaggctccacttcagagaagatc

SEQ ID NO: 4166639 - DNA, 25 bp, Homo sapien
cttcacacaccttatatctttgaat

SEQ ID NO: 4166640 - DNA, 25 bp, Homo sapien
tgagaaggctccacttcagagaaga

SEQ ID NO: 4166641 - DNA, 25 bp, Homo sapien
ttcacacaccttatatctttgaatg

SEQ ID NO: 4166642 - DNA, 25 bp, Homo sapien
tctcagatctgtgaaacctgttcct

SEQ ID NO: 4166643 - DNA, 25 bp, Homo sapien
gtaataatctatgtgttctctttca

SEQ ID NO: 4166644 - DNA, 25 bp, Homo sapien
aactttagaagccacgtaataatct

SEQ ID NO: 4166645 - DNA, 25 bp, Homo sapien
tctctcatttctgctccgtctttta

SEQ ID NO: 4166646 - DNA, 25 bp, Homo sapien
aacatcagcgggctcagctgtgaca

SEQ ID NO: 4166647 - DNA, 25 bp, Homo sapien
tggaaaacgtcgagggagcctgctc

SEQ ID NO: 4166648 - DNA, 25 bp, Homo sapien
gaaactccgtggttgcgttactatg

SEQ ID NO: 4166649 - DNA, 25 bp, Homo sapien
gctgtgacattttcggggaaactcc

SEQ ID NO: 4166650 - DNA, 25 bp, Homo sapien
gattgccagctgtatcccctgtgtt

SEQ ID NO: 4166651 - DNA, 25 bp, Homo sapien
tgtttgatggcacaaccagaagttc

SEQ ID NO: 4166652 - DNA, 25 bp, Homo sapien
tgcatacatcaatagacatcaaggc

SEQ ID NO: 4166653 - DNA, 25 bp, Homo sapien
caaggcaacccaaagatgatgtaaa

SEQ ID NO: 4166654 - DNA, 25 bp, Homo sapien
agcagacctgtggtagctctgtgtc

SEQ ID NO: 4166655 - DNA, 25 bp, Homo sapien
gctctgtgtctcttattctgccctt

SEQ ID NO: 4166656 - DNA, 25 bp, Homo sapien
gaatattcttggctgtcgctcctga

SEQ ID NO: 4166657 - DNA, 25 bp, Homo sapien
cagctgtcaccctgtggttgtctgg

SEQ ID NO: 4166658 - DNA, 25 bp, Homo sapien
gatgccagctgtcaccctgtggttg

SEQ ID NO: 4166659 - DNA, 25 bp, Homo sapien
gggctagtgccgaatattcttggct

SEQ ID NO: 4166660 - DNA, 25 bp, Homo sapien
tttgaaatcaggcaatgttatgctg

SEQ ID NO: 4166661 - DNA, 25 bp, Homo sapien
aatcaggcaatgttatgctgccaaa

SEQ ID NO: 4166662 - DNA, 25 bp, Homo sapien
tcaggcaatgttatgctgccaaatt

SEQ ID NO: 4166663 - DNA, 25 bp, Homo sapien
gaaatcaggcaatgttatgctgcca

SEQ ID NO: 4166664 - DNA, 25 bp, Homo sapien
ttataccagtacattgctgttttgg

SEQ ID NO: 4166665 - DNA, 25 bp, Homo sapien
tgttttggtgactatggtcttatag

SEQ ID NO: 4166666 - DNA, 25 bp, Homo sapien
ttttataccagtacattgctgtttt

SEQ ID NO: 4166667 - DNA, 25 bp, Homo sapien
gctgttttggtgactatggtcttat

SEQ ID NO: 4166668 - DNA, 25 bp, Homo sapien
tcctattagtgccatagcacagccc

SEQ ID NO: 4166669 - DNA, 25 bp, Homo sapien
cctattagtgccatagcacagccca

SEQ ID NO: 4166670 - DNA, 25 bp, Homo sapien
ctcctattagtgccatagcacagcc

SEQ ID NO: 4166671 - DNA, 25 bp, Homo sapien
tagaaacagatttgttggtcaaaat

SEQ ID NO: 4166672 - DNA, 25 bp, Homo sapien
atgaagcattagaaacagatttgtt

SEQ ID NO: 4166673 - DNA, 25 bp, Homo sapien
gcattagaaacagatttgttggtca

SEQ ID NO: 4166674 - DNA, 25 bp, Homo sapien
ttaaaatctccacattaaatgaagc

SEQ ID NO: 4166675 - DNA, 25 bp, Homo sapien
acactcaggccggtaccccgctgga

SEQ ID NO: 4166676 - DNA, 25 bp, Homo sapien
ccacactcaggccggtaccccgctg

SEQ ID NO: 4166677 - DNA, 25 bp, Homo sapien
ctcaggccggtaccccgctggaggt

SEQ ID NO: 4166678 - DNA, 25 bp, Homo sapien
gcccacactcaggccggtaccccgc

SEQ ID NO: 4166679 - DNA, 25 bp, Homo sapien
ggcgatgccccgcacactggcaccc

SEQ ID NO: 4166680 - DNA, 25 bp, Homo sapien
ctaggcgatgccccgcacactggca

SEQ ID NO: 4166681 - DNA, 25 bp, Homo sapien
gcgatgccccgcacactggcacccc

SEQ ID NO: 4166682 - DNA, 25 bp, Homo sapien
taggcgatgccccgcacactggcac

SEQ ID NO: 4166683 - DNA, 25 bp, Homo sapien
ccatgatgagaccatagaggccgag

SEQ ID NO: 4166684 - DNA, 25 bp, Homo sapien
gattagggccatgatgagaccatag

SEQ ID NO: 4166685 - DNA, 25 bp, Homo sapien
cacctcggcaaagacgagtatcaga

SEQ ID NO: 4166686 - DNA, 25 bp, Homo sapien
tatcagaatcatgcccacaaatagt

SEQ ID NO: 4166687 - DNA, 25 bp, Homo sapien
gtggcagcaacactccgcagactgg

SEQ ID NO: 4166688 - DNA, 25 bp, Homo sapien
caggtgatgggaattgcccccaccg

SEQ ID NO: 4166689 - DNA, 25 bp, Homo sapien
ctggcacggctatcccaggtgatgg

SEQ ID NO: 4166690 - DNA, 25 bp, Homo sapien
acactccgcagactggcacggctat

SEQ ID NO: 4166691 - DNA, 25 bp, Homo sapien
taccacacacgcctgggtctgttta

SEQ ID NO: 4166692 - DNA, 25 bp, Homo sapien
cagccacccacttcgtgctaaaaaa

SEQ ID NO: 4166693 - DNA, 25 bp, Homo sapien
tgaaacgtagacaggaaagtaatgt

SEQ ID NO: 4166694 - DNA, 25 bp, Homo sapien
caattgatgttttcaagcaaactcc

SEQ ID NO: 4166695 - DNA, 25 bp, Homo sapien
gtatctggatgatgtaatagacagc

SEQ ID NO: 4166696 - DNA, 25 bp, Homo sapien
tatctggatgatgtaatagacagca

SEQ ID NO: 4166697 - DNA, 25 bp, Homo sapien
tctggatgatgtaatagacagcaca

SEQ ID NO: 4166698 - DNA, 25 bp, Homo sapien
taatagacagcacagtatttccatt

SEQ ID NO: 4166699 - DNA, 25 bp, Homo sapien
taacccgtgacaattctgagaaaac

SEQ ID NO: 4166700 - DNA, 25 bp, Homo sapien
tgacatgccttcaatagtgttggcc

SEQ ID NO: 4166701 - DNA, 25 bp, Homo sapien
taggctctcgttcccactgtcataa

SEQ ID NO: 4166702 - DNA, 25 bp, Homo sapien
caaggcaggatacaggtttcaggca

SEQ ID NO: 4166703 - DNA, 25 bp, Homo sapien
tctgcacgaagaagcctactgtctg

SEQ ID NO: 4166704 - DNA, 25 bp, Homo sapien
gccaagtgtagcataaacattttct

SEQ ID NO: 4166705 - DNA, 25 bp, Homo sapien
tggtgaccttggaccattgcatctg

SEQ ID NO: 4166706 - DNA, 25 bp, Homo sapien
gggatgatagacagcaatcaggtct

SEQ ID NO: 4166707 - DNA, 25 bp, Homo sapien
tcgtaccttccactgactgaacaag

SEQ ID NO: 4166708 - DNA, 25 bp, Homo sapien
tggatacagaacaagcatacactcg

SEQ ID NO: 4166709 - DNA, 25 bp, Homo sapien
tttagtctgaatgccctctggatac

SEQ ID NO: 4166710 - DNA, 25 bp, Homo sapien
caagacatattccttaagtgcagag

SEQ ID NO: 4166711 - DNA, 25 bp, Homo sapien
cgcaccacgagactatatcccacac

SEQ ID NO: 4166712 - DNA, 25 bp, Homo sapien
cggcgcaccacgagactatatccca

SEQ ID NO: 4166713 - DNA, 25 bp, Homo sapien
attgcgcttttcagaccggcttaaa

SEQ ID NO: 4166714 - DNA, 25 bp, Homo sapien
cgaatattgcgcttttcagaccggc

SEQ ID NO: 4166715 - DNA, 25 bp, Homo sapien
atctctatttctatcgtatggttgc

SEQ ID NO: 4166716 - DNA, 25 bp, Homo sapien
cgtatggttgctgttccattcatct

SEQ ID NO: 4166717 - DNA, 25 bp, Homo sapien
tgcataggtgaactcagatgaaatt

SEQ ID NO: 4166718 - DNA, 25 bp, Homo sapien
ccatgcataggtgaactcagatgaa

SEQ ID NO: 4166719 - DNA, 25 bp, Homo sapien
aggacccaagaatccgtgctgctgt

SEQ ID NO: 4166720 - DNA, 25 bp, Homo sapien
gaaggacccaagaatccgtgctgct

SEQ ID NO: 4166721 - DNA, 25 bp, Homo sapien
gaaagaaggacccaagaatccgtgc

SEQ ID NO: 4166722 - DNA, 25 bp, Homo sapien
aagaaggacccaagaatccgtgctg

SEQ ID NO: 4166723 - DNA, 25 bp, Homo sapien
tgactgtggtggagctcctcaagat

SEQ ID NO: 4166724 - DNA, 25 bp, Homo sapien
catcgaagatttggactggagagag

SEQ ID NO: 4166725 - DNA, 25 bp, Homo sapien
ctcaagattttgttaggaccgactc

SEQ ID NO: 4166726 - DNA, 25 bp, Homo sapien
taatgtggcaagagaacttccgccc

SEQ ID NO: 4166727 - DNA, 25 bp, Homo sapien
tgctctgcagcataatagggtgctt

SEQ ID NO: 4166728 - DNA, 25 bp, Homo sapien
tcattctttagcatcctaccctcat

SEQ ID NO: 4166729 - DNA, 25 bp, Homo sapien
ccagtgagtctgtagaacaaaagcc

SEQ ID NO: 4166730 - DNA, 25 bp, Homo sapien
gggaaacagactccagcactgttac

SEQ ID NO: 4166731 - DNA, 25 bp, Homo sapien
tctaccaagacatccgtggagttat

SEQ ID NO: 4166732 - DNA, 25 bp, Homo sapien
ctaccaagacatccgtggagttatt

SEQ ID NO: 4166733 - DNA, 25 bp, Homo sapien
ctctaccaagacatccgtggagtta

SEQ ID NO: 4166734 - DNA, 25 bp, Homo sapien
taccaagacatccgtggagttattt

SEQ ID NO: 4166735 - DNA, 25 bp, Homo sapien
gacacttgtgctatctgaccctgaa

SEQ ID NO: 4166736 - DNA, 25 bp, Homo sapien
cagccagttgttaagactttccagg

SEQ ID NO: 4166737 - DNA, 25 bp, Homo sapien
cctggatacaggcacactaaatatg

SEQ ID NO: 4166738 - DNA, 25 bp, Homo sapien
taattgatgagggtatgtaaccagc

SEQ ID NO: 4166739 - DNA, 25 bp, Homo sapien
tatgtgccatgaactccattagagc

SEQ ID NO: 4166740 - DNA, 25 bp, Homo sapien
ttccacagtatctgctagaatcagt

SEQ ID NO: 4166741 - DNA, 25 bp, Homo sapien
gaacgtaagagagtgggtaaatgat

SEQ ID NO: 4166742 - DNA, 25 bp, Homo sapien
catagctgatttatgaacgtaagag

SEQ ID NO: 4166743 - DNA, 25 bp, Homo sapien
agtgacgacggctggacatttggac

SEQ ID NO: 4166744 - DNA, 25 bp, Homo sapien
tcagaaccttattatgttgcaaaag

SEQ ID NO: 4166745 - DNA, 25 bp, Homo sapien
ggacatttggactcagaaccttatt

SEQ ID NO: 4166746 - DNA, 25 bp, Homo sapien
cagtgcaagtgacgacggctggaca

SEQ ID NO: 4166747 - DNA, 25 bp, Homo sapien
gaagcagagcttaatcttcctagga

SEQ ID NO: 4166748 - DNA, 25 bp, Homo sapien
gaccaccagtatgaataaaagcttg

SEQ ID NO: 4166749 - DNA, 25 bp, Homo sapien
gtggaaggacaaagaactgtgagcc

SEQ ID NO: 4166750 - DNA, 25 bp, Homo sapien
agcacatgtactggtggagtttcca

SEQ ID NO: 4166751 - DNA, 25 bp, Homo sapien
taaatgggctatctcctatagagat

SEQ ID NO: 4166752 - DNA, 25 bp, Homo sapien
taggtcaacttaaggatctaggact

SEQ ID NO: 4166753 - DNA, 25 bp, Homo sapien
taaacttctggctatactcctaggt

SEQ ID NO: 4166754 - DNA, 25 bp, Homo sapien
ttagaacgtgcactataaatgggct

SEQ ID NO: 4166755 - DNA, 25 bp, Homo sapien
ggaaatacattctttagtaagcagg

SEQ ID NO: 4166756 - DNA, 25 bp, Homo sapien
tctttagtaagcaggtaaatcttct

SEQ ID NO: 4166757 - DNA, 25 bp, Homo sapien
aatacattctttagtaagcaggtaa

SEQ ID NO: 4166758 - DNA, 25 bp, Homo sapien
tgtgatatttgctttgggaaataca

SEQ ID NO: 4166759 - DNA, 25 bp, Homo sapien
atatctgacttctctggactcctgg

SEQ ID NO: 4166760 - DNA, 25 bp, Homo sapien
tctgtgtatatatcagtagtctctg

SEQ ID NO: 4166761 - DNA, 25 bp, Homo sapien
tctgatctgagcgaggaagtgtgtc

SEQ ID NO: 4166762 - DNA, 25 bp, Homo sapien
gaaggacgaaggagctcatatctga

SEQ ID NO: 4166763 - DNA, 25 bp, Homo sapien
gctggtttattactatgtacccttg

SEQ ID NO: 4166764 - DNA, 25 bp, Homo sapien
tggagacagagccatacaccaaatg

SEQ ID NO: 4166765 - DNA, 25 bp, Homo sapien
caagttgtctgattgggctggttta

SEQ ID NO: 4166766 - DNA, 25 bp, Homo sapien
gagccatacaccaaatggtcaagtt

SEQ ID NO: 4166767 - DNA, 25 bp, Homo sapien
tccaagactgcagccctattatgtc

SEQ ID NO: 4166768 - DNA, 25 bp, Homo sapien
tgacaaatctatgtgagaatcagct

SEQ ID NO: 4166769 - DNA, 25 bp, Homo sapien
tacctccacattgttccaagactgc

SEQ ID NO: 4166770 - DNA, 25 bp, Homo sapien
tgagaatcagctacctccacattgt

SEQ ID NO: 4166771 - DNA, 25 bp, Homo sapien
tcacagtctccaacattaataccct

SEQ ID NO: 4166772 - DNA, 25 bp, Homo sapien
cacagtctccaacattaataccctt

SEQ ID NO: 4166773 - DNA, 25 bp, Homo sapien
cctgggtgtgtccatttgagtaggc

SEQ ID NO: 4166774 - DNA, 25 bp, Homo sapien
tcctcagagcttgtataagccctta

SEQ ID NO: 4166775 - DNA, 25 bp, Homo sapien
tgtcataagagggtaagctgccgcc

SEQ ID NO: 4166776 - DNA, 25 bp, Homo sapien
catagggcaactggcttaattccgg

SEQ ID NO: 4166777 - DNA, 25 bp, Homo sapien
tgccagtttccagatcattgcattt

SEQ ID NO: 4166778 - DNA, 25 bp, Homo sapien
ccagtttccagatcattgcatttac

SEQ ID NO: 4166779 - DNA, 25 bp, Homo sapien
ctctgccagtttccagatcattgca

SEQ ID NO: 4166780 - DNA, 25 bp, Homo sapien
tctgccagtttccagatcattgcat

SEQ ID NO: 4166781 - DNA, 25 bp, Homo sapien
aacccaaatgcagaatttagcagaa

SEQ ID NO: 4166782 - DNA, 25 bp, Homo sapien
aaaacccaaatgcagaatttagcag

SEQ ID NO: 4166783 - DNA, 25 bp, Homo sapien
caaatgcagaatttagcagaaacac

SEQ ID NO: 4166784 - DNA, 25 bp, Homo sapien
cccaaaacccaaatgcagaatttag

SEQ ID NO: 4166785 - DNA, 25 bp, Homo sapien
gagggtctgttgaggaaatttcaga

SEQ ID NO: 4166786 - DNA, 25 bp, Homo sapien
gagaaggttgggtgtcaagggtaga

SEQ ID NO: 4166787 - DNA, 25 bp, Homo sapien
aacactcagtggagggtctgttgag

SEQ ID NO: 4166788 - DNA, 25 bp, Homo sapien
gggtagattctgtaacactcagtgg

SEQ ID NO: 4166789 - DNA, 25 bp, Homo sapien
aatagctcagtgtgaaaacattctt

SEQ ID NO: 4166790 - DNA, 25 bp, Homo sapien
tagctcagtgtgaaaacattcttac

SEQ ID NO: 4166791 - DNA, 25 bp, Homo sapien
caatagctcagtgtgaaaacattct

SEQ ID NO: 4166792 - DNA, 25 bp, Homo sapien
tcaatagctcagtgtgaaaacattc

SEQ ID NO: 4166793 - DNA, 25 bp, Homo sapien
tagtcatggttgtacaagtctgtga

SEQ ID NO: 4166794 - DNA, 25 bp, Homo sapien
taaatgggcaagttaatgtgacgtg

SEQ ID NO: 4166795 - DNA, 25 bp, Homo sapien
caatttcagccccaaaaaagtcata

SEQ ID NO: 4166796 - DNA, 25 bp, Homo sapien
tagctaagaaacaggcatgaatgat

SEQ ID NO: 4166797 - DNA, 25 bp, Homo sapien
tatcaacctgtgacagcgactgcag

SEQ ID NO: 4166798 - DNA, 25 bp, Homo sapien
gcgactgcaggctacatgccaaagg

SEQ ID NO: 4166799 - DNA, 25 bp, Homo sapien
gaaaaatgccatgattaaccggcag

SEQ ID NO: 4166800 - DNA, 25 bp, Homo sapien
tgccaaaggttaccagccaaaggaa

SEQ ID NO: 4166801 - DNA, 25 bp, Homo sapien
ctgtgtggtcaggataacgtgggca

SEQ ID NO: 4166802 - DNA, 25 bp, Homo sapien
tgtgtggtcaggataacgtgggcac

SEQ ID NO: 4166803 - DNA, 25 bp, Homo sapien
tggtcaggataacgtgggcactgac

SEQ ID NO: 4166804 - DNA, 25 bp, Homo sapien
tgtggtcaggataacgtgggcactg

SEQ ID NO: 4166805 - DNA, 25 bp, Homo sapien
catctaaacacatttgaatcagctt

SEQ ID NO: 4166806 - DNA, 25 bp, Homo sapien
aactacatctaaacacatttgaatc

SEQ ID NO: 4166807 - DNA, 25 bp, Homo sapien
tcaactacatctaaacacatttgaa

SEQ ID NO: 4166808 - DNA, 25 bp, Homo sapien
tacatctaaacacatttgaatcagc

SEQ ID NO: 4166809 - DNA, 25 bp, Homo sapien
gccattccccataaagagggaccca

SEQ ID NO: 4166810 - DNA, 25 bp, Homo sapien
tcttcttacgccattccccataaag

SEQ ID NO: 4166811 - DNA, 25 bp, Homo sapien
tccctcttcttcttacgccattccc

SEQ ID NO: 4166812 - DNA, 25 bp, Homo sapien
cataaagagggacccaagccagcag

SEQ ID NO: 4166813 - DNA, 25 bp, Homo sapien
gttgaggagtggtgtttggcctcaa

SEQ ID NO: 4166814 - DNA, 25 bp, Homo sapien
tgaggagtggtgtttggcctcaagg

SEQ ID NO: 4166815 - DNA, 25 bp, Homo sapien
caagggtcactgaagatgtagctgg

SEQ ID NO: 4166816 - DNA, 25 bp, Homo sapien
aaggcactcacatctacaagggtca

SEQ ID NO: 4166817 - DNA, 25 bp, Homo sapien
gaggtccagggatagttgaagcctc

SEQ ID NO: 4166818 - DNA, 25 bp, Homo sapien
tgaagcctcgggtagtcatactgga

SEQ ID NO: 4166819 - DNA, 25 bp, Homo sapien
attttttggtatctgtcccactgga

SEQ ID NO: 4166820 - DNA, 25 bp, Homo sapien
gatagttgaagcctcgggtagtcat

SEQ ID NO: 4166821 - DNA, 25 bp, Homo sapien
tatggttatgtctctttgttaagcc

SEQ ID NO: 4166822 - DNA, 25 bp, Homo sapien
gatccttttgctgaacagtctcctc

SEQ ID NO: 4166823 - DNA, 25 bp, Homo sapien
tctgccacaccatctttgatagaca

SEQ ID NO: 4166824 - DNA, 25 bp, Homo sapien
tatgttccccagattatagcttgct

SEQ ID NO: 4166825 - DNA, 25 bp, Homo sapien
gagatggggcttcactgttagccag

SEQ ID NO: 4166826 - DNA, 25 bp, Homo sapien
gctggcctgaccgtgcctgtaggag

SEQ ID NO: 4166827 - DNA, 25 bp, Homo sapien
gattccagttggaagatctcaccca

SEQ ID NO: 4166828 - DNA, 25 bp, Homo sapien
ctactgtggtttgctacgggtctac

SEQ ID NO: 4166829 - DNA, 25 bp, Homo sapien
aacgactagtctgggcactcttctg

SEQ ID NO: 4166830 - DNA, 25 bp, Homo sapien
cccatgtgcatggaatgtttttgca

SEQ ID NO: 4166831 - DNA, 25 bp, Homo sapien
tttggctgtcagcttgcctgttgtt

SEQ ID NO: 4166832 - DNA, 25 bp, Homo sapien
ttcttttttgtggtaattgtgaatg

SEQ ID NO: 4166833 - DNA, 25 bp, Homo sapien
ttgaagaggctcttcacttcctttg

SEQ ID NO: 4166834 - DNA, 25 bp, Homo sapien
gtccacctggtccacaaatgtggcc

SEQ ID NO: 4166835 - DNA, 25 bp, Homo sapien
cctggtccacaaatgtggccctcat

SEQ ID NO: 4166836 - DNA, 25 bp, Homo sapien
cacctggtccacaaatgtggccctc

SEQ ID NO: 4166837 - DNA, 25 bp, Homo sapien
tccacctggtccacaaatgtggccc

SEQ ID NO: 4166838 - DNA, 25 bp, Homo sapien
ctgccgccaggatgcacacactgat

SEQ ID NO: 4166839 - DNA, 25 bp, Homo sapien
atgcacacactgatgctagcttctg

SEQ ID NO: 4166840 - DNA, 25 bp, Homo sapien
tctgccgccaggatgcacacactga

SEQ ID NO: 4166841 - DNA, 25 bp, Homo sapien
cacacactgatgctagcttctgtgc

SEQ ID NO: 4166842 - DNA, 25 bp, Homo sapien
atatcaaagtccattattactaaag

SEQ ID NO: 4166843 - DNA, 25 bp, Homo sapien
tcaatcatattatgacacattaggc

SEQ ID NO: 4166844 - DNA, 25 bp, Homo sapien
atagttgtcaatcatattatgacac

SEQ ID NO: 4166845 - DNA, 25 bp, Homo sapien
tatcaaagtccattattactaaagt

SEQ ID NO: 4166846 - DNA, 25 bp, Homo sapien
taagagtccattctttagggcttga

SEQ ID NO: 4166847 - DNA, 25 bp, Homo sapien
ttacaggacaatttgtcatagctat

SEQ ID NO: 4166848 - DNA, 25 bp, Homo sapien
gccctccagaagaggtaagagtcca

SEQ ID NO: 4166849 - DNA, 25 bp, Homo sapien
cagctgcagttgctgacaaaggtgt

SEQ ID NO: 4166850 - DNA, 25 bp, Homo sapien
cctgacggggatgaactgtatgttt

SEQ ID NO: 4166851 - DNA, 25 bp, Homo sapien
aagtgttgagcctgcacctgacggg

SEQ ID NO: 4166852 - DNA, 25 bp, Homo sapien
tatgtttcactaggtatccgtgaaa

SEQ ID NO: 4166853 - DNA, 25 bp, Homo sapien
catgaagtgttgagcctgcacctga

SEQ ID NO: 4166854 - DNA, 25 bp, Homo sapien
tgaaaatgctctggctgtgctggta

SEQ ID NO: 4166855 - DNA, 25 bp, Homo sapien
cagtgatatggacgtgattagtttt

SEQ ID NO: 4166856 - DNA, 25 bp, Homo sapien
tcgtagatccattggcagttgtggg

SEQ ID NO: 4166857 - DNA, 25 bp, Homo sapien
gacgtgattagttttcgtagatcca

SEQ ID NO: 4166858 - DNA, 25 bp, Homo sapien
gctggaggctggtactggaggttgt

SEQ ID NO: 4166859 - DNA, 25 bp, Homo sapien
tggaggttgtctgcatagagtcctg

SEQ ID NO: 4166860 - DNA, 25 bp, Homo sapien
gagccgaacggcagtgattgttgtc

SEQ ID NO: 4166861 - DNA, 25 bp, Homo sapien
tgagccgaacggcagtgattgttgt

SEQ ID NO: 4166862 - DNA, 25 bp, Homo sapien
tgttttgccctagttctaagaggga

SEQ ID NO: 4166863 - DNA, 25 bp, Homo sapien
ccctagttctaagagggaatgcttt

SEQ ID NO: 4166864 - DNA, 25 bp, Homo sapien
tttgccctagttctaagagggaatg

SEQ ID NO: 4166865 - DNA, 25 bp, Homo sapien
tcttgttttgccctagttctaagag

SEQ ID NO: 4166866 - DNA, 25 bp, Homo sapien
actagcagggtagaagcgttctctg

SEQ ID NO: 4166867 - DNA, 25 bp, Homo sapien
ggtagaagcgttctctgttcaccac

SEQ ID NO: 4166868 - DNA, 25 bp, Homo sapien
tacaggtagtgtttgattatatgag

SEQ ID NO: 4166869 - DNA, 25 bp, Homo sapien
gattatggtgcagccaacacccaag

SEQ ID NO: 4166870 - DNA, 25 bp, Homo sapien
tctttgggcttattgaccacaatac

SEQ ID NO: 4166871 - DNA, 25 bp, Homo sapien
aagctgctacaatcactggccagga

SEQ ID NO: 4166872 - DNA, 25 bp, Homo sapien
agagtaaagctgctacaatcactgg

SEQ ID NO: 4166873 - DNA, 25 bp, Homo sapien
caaaagagtaaagctgctacaatca

SEQ ID NO: 4166874 - DNA, 25 bp, Homo sapien
aatgcaagtgtacttgatgggaggt

SEQ ID NO: 4166875 - DNA, 25 bp, Homo sapien
tctccatctcatgataaggcagatc

SEQ ID NO: 4166876 - DNA, 25 bp, Homo sapien
taaggcagatcactttcgttgggct

SEQ ID NO: 4166877 - DNA, 25 bp, Homo sapien
tttcgttgggctcttgaatgcaagt

SEQ ID NO: 4166878 - DNA, 25 bp, Homo sapien
gggaaaacaggtcactcacttctga

SEQ ID NO: 4166879 - DNA, 25 bp, Homo sapien
tgatggacatacacacgaaggcact

SEQ ID NO: 4166880 - DNA, 25 bp, Homo sapien
tcaaataagaggatcaggcatgggc

SEQ ID NO: 4166881 - DNA, 25 bp, Homo sapien
gaaaccattgttgtccctccatcag

SEQ ID NO: 4166882 - DNA, 25 bp, Homo sapien
taattgaactgaagtgtgacagcca

SEQ ID NO: 4166883 - DNA, 25 bp, Homo sapien
gcccggccacgacaggtagatttct

SEQ ID NO: 4166884 - DNA, 25 bp, Homo sapien
tggccaccacaagagttaagcacct

SEQ ID NO: 4166885 - DNA, 25 bp, Homo sapien
tgcatgaccctgagtgtgaatacct

SEQ ID NO: 4166886 - DNA, 25 bp, Homo sapien
agcaaagcaacagccatacatatga

SEQ ID NO: 4166887 - DNA, 25 bp, Homo sapien
aagctagcatttgtttcttgagaac

SEQ ID NO: 4166888 - DNA, 25 bp, Homo sapien
tgttaaatacaaatagccatacaca

SEQ ID NO: 4166889 - DNA, 25 bp, Homo sapien
tactgatgattaagtcttgttaaat

SEQ ID NO: 4166890 - DNA, 25 bp, Homo sapien
caatcacaatgccacagtctttgaa

SEQ ID NO: 4166891 - DNA, 25 bp, Homo sapien
tactttctggtgatagttgaatggc

SEQ ID NO: 4166892 - DNA, 25 bp, Homo sapien
tttgtggcattcacccagggtagct

SEQ ID NO: 4166893 - DNA, 25 bp, Homo sapien
ggcaaatgtgcataagtttgtggca

SEQ ID NO: 4166894 - DNA, 25 bp, Homo sapien
tatccttcccagagtattacatttg

SEQ ID NO: 4166895 - DNA, 25 bp, Homo sapien
gatcacttggtcaagttcttgtcta

SEQ ID NO: 4166896 - DNA, 25 bp, Homo sapien
ttggaggagcacaagatccctgtct

SEQ ID NO: 4166897 - DNA, 25 bp, Homo sapien
tctctgccctaatactccataggtg

SEQ ID NO: 4166898 - DNA, 25 bp, Homo sapien
gtttgagggaggaatgaaagtctct

SEQ ID NO: 4166899 - DNA, 25 bp, Homo sapien
gggagccccaagtaggaatgatgag

SEQ ID NO: 4166900 - DNA, 25 bp, Homo sapien
gatgggtaaaagtcctgtaggagga

SEQ ID NO: 4166901 - DNA, 25 bp, Homo sapien
ctgcagggactgctgtaaactgtga

SEQ ID NO: 4166902 - DNA, 25 bp, Homo sapien
cacatgtgtgggatcttgctgcagg

SEQ ID NO: 4166903 - DNA, 25 bp, Homo sapien
tcacccagctcaagccaaaagactg

SEQ ID NO: 4166904 - DNA, 25 bp, Homo sapien
gactgtatgataaagatcagaggag

SEQ ID NO: 4166905 - DNA, 25 bp, Homo sapien
aaccaacataggtggtgctgggacg

SEQ ID NO: 4166906 - DNA, 25 bp, Homo sapien
acagcagcagcaattacctccagga

SEQ ID NO: 4166907 - DNA, 25 bp, Homo sapien
tgaaagacacacagaagtgcagccg

SEQ ID NO: 4166908 - DNA, 25 bp, Homo sapien
tctgtggacgtttcagggcgacgct

SEQ ID NO: 4166909 - DNA, 25 bp, Homo sapien
tcactgggctggtacacaagctggg

SEQ ID NO: 4166910 - DNA, 25 bp, Homo sapien
cagtgtacagacatgcctgcgggtc

SEQ ID NO: 4166911 - DNA, 25 bp, Homo sapien
tcctggccttcctaactgctagcat

SEQ ID NO: 4166912 - DNA, 25 bp, Homo sapien
ggagcgaggccatccagtcggcatt

SEQ ID NO: 4166913 - DNA, 25 bp, Homo sapien
ggcattgcagacctccgatgatgtc

SEQ ID NO: 4166914 - DNA, 25 bp, Homo sapien
gggagcagatggtccccatcctgag

SEQ ID NO: 4166915 - DNA, 25 bp, Homo sapien
tttagtgtgcctgtgctcctaagtt

SEQ ID NO: 4166916 - DNA, 25 bp, Homo sapien
ttagtgtgcctgtgctcctaagttc

SEQ ID NO: 4166917 - DNA, 25 bp, Homo sapien
ctttagtgtgcctgtgctcctaagt

SEQ ID NO: 4166918 - DNA, 25 bp, Homo sapien
ctgctaaagcctcatgctggtcttt

SEQ ID NO: 4166919 - DNA, 25 bp, Homo sapien
gagaagcaagatatatcgatctggg

SEQ ID NO: 4166920 - DNA, 25 bp, Homo sapien
aggagaatgatgtataaagtcacaa

SEQ ID NO: 4166921 - DNA, 25 bp, Homo sapien
gggcattcgaaggagaatgatgtat

SEQ ID NO: 4166922 - DNA, 25 bp, Homo sapien
ccaaagcgctagcaacataaacatc

SEQ ID NO: 4166923 - DNA, 25 bp, Homo sapien
tagcttttgacatacttgaagcagt

SEQ ID NO: 4166924 - DNA, 25 bp, Homo sapien
catctctggcattaatagcttttga

SEQ ID NO: 4166925 - DNA, 25 bp, Homo sapien
cacagtgaatactggtagctggagt

SEQ ID NO: 4166926 - DNA, 25 bp, Homo sapien
aatttagagatagactcttggaaag

SEQ ID NO: 4166927 - DNA, 25 bp, Homo sapien
gtagctgaactatggatgtaacaca

SEQ ID NO: 4166928 - DNA, 25 bp, Homo sapien
tccatctttttgacaaggtgtacct

SEQ ID NO: 4166929 - DNA, 25 bp, Homo sapien
tctttttaggcctctcgagtgtgct

SEQ ID NO: 4166930 - DNA, 25 bp, Homo sapien
ggtaagttgagagcgctaatgcaca

SEQ ID NO: 4166931 - DNA, 25 bp, Homo sapien
ttacagtcaacagtcattaacggtg

SEQ ID NO: 4166932 - DNA, 25 bp, Homo sapien
caaccttagatgcatatcagaatca

SEQ ID NO: 4166933 - DNA, 25 bp, Homo sapien
cagtaaatatggacatacaagtccc

SEQ ID NO: 4166934 - DNA, 25 bp, Homo sapien
taatgtaaagtggtgatcctcaacc

SEQ ID NO: 4166935 - DNA, 25 bp, Homo sapien
tccacacacgattgtcttctctttc

SEQ ID NO: 4166936 - DNA, 25 bp, Homo sapien
gtctgctatgacatacttctttcca

SEQ ID NO: 4166937 - DNA, 25 bp, Homo sapien
cagtcctgccgcctttgtctgctat

SEQ ID NO: 4166938 - DNA, 25 bp, Homo sapien
atgccttactccacacacgattgtc

SEQ ID NO: 4166939 - DNA, 25 bp, Homo sapien
gatgaagtagatctcctggtcggca

SEQ ID NO: 4166940 - DNA, 25 bp, Homo sapien
ttctcccacagagttcgcagcgtca

SEQ ID NO: 4166941 - DNA, 25 bp, Homo sapien
tggtttggaagacacacgcaggtca

SEQ ID NO: 4166942 - DNA, 25 bp, Homo sapien
caggtcaaagtagcggatcccagct

SEQ ID NO: 4166943 - DNA, 25 bp, Homo sapien
actgggtaacggctgttcttgttgt

SEQ ID NO: 4166944 - DNA, 25 bp, Homo sapien
ttctaatggttttgagtaatgtctg

SEQ ID NO: 4166945 - DNA, 25 bp, Homo sapien
tttgagtaatgtctgactgactgct

SEQ ID NO: 4166946 - DNA, 25 bp, Homo sapien
ctgaactgggtaacggctgttcttg

SEQ ID NO: 4166947 - DNA, 25 bp, Homo sapien
cacttgtggtgtttgcccagggcgc

SEQ ID NO: 4166948 - DNA, 25 bp, Homo sapien
ccaagaagaggattagtttgcgcac

SEQ ID NO: 4166949 - DNA, 25 bp, Homo sapien
gaagggacagtggtagaaaataaga

SEQ ID NO: 4166950 - DNA, 25 bp, Homo sapien
tgaggcccgctcactcagagtggtc

SEQ ID NO: 4166951 - DNA, 25 bp, Homo sapien
ccccgggcaatggtcttcactctgg

SEQ ID NO: 4166952 - DNA, 25 bp, Homo sapien
caagccccgggcaatggtcttcact

SEQ ID NO: 4166953 - DNA, 25 bp, Homo sapien
ctatgaaccagcgtgttcttgaggc

SEQ ID NO: 4166954 - DNA, 25 bp, Homo sapien
tgaaccagcgtgttcttgaggcccc

SEQ ID NO: 4166955 - DNA, 25 bp, Homo sapien
gagttctgtgtcagcttcgggtagc

SEQ ID NO: 4166956 - DNA, 25 bp, Homo sapien
agttctgtgtcagcttcgggtagca

SEQ ID NO: 4166957 - DNA, 25 bp, Homo sapien
gttctgtgtcagcttcgggtagcat

SEQ ID NO: 4166958 - DNA, 25 bp, Homo sapien
aggatccctggagcctgagcagaga

SEQ ID NO: 4166959 - DNA, 25 bp, Homo sapien
gagaaatgcagtgaaaggtatgtac

SEQ ID NO: 4166960 - DNA, 25 bp, Homo sapien
gagcctgagcagagaaatgcagtga

SEQ ID NO: 4166961 - DNA, 25 bp, Homo sapien
cagagaaatgcagtgaaaggtatgt

SEQ ID NO: 4166962 - DNA, 25 bp, Homo sapien
ccacgaagtcagatgtgatgatgtt

SEQ ID NO: 4166963 - DNA, 25 bp, Homo sapien
agtcagatgtgatgatgttgacacc

SEQ ID NO: 4166964 - DNA, 25 bp, Homo sapien
ctcctgtaggaggtcattcaacttg

SEQ ID NO: 4166965 - DNA, 25 bp, Homo sapien
gatgacagtcgcagcaaagtccacc

SEQ ID NO: 4166966 - DNA, 25 bp, Homo sapien
taccctggatcaacaaattcaacat

SEQ ID NO: 4166967 - DNA, 25 bp, Homo sapien
tggatcaacaaattcaacattaagg

SEQ ID NO: 4166968 - DNA, 25 bp, Homo sapien
tcaacaaattcaacattaaggttaa

SEQ ID NO: 4166969 - DNA, 25 bp, Homo sapien
gatcaacaaattcaacattaaggtt

SEQ ID NO: 4166970 - DNA, 25 bp, Homo sapien
tcctcaagggtgcaagctaaaagcc

SEQ ID NO: 4166971 - DNA, 25 bp, Homo sapien
tatctatctcttgttgggccccacg

SEQ ID NO: 4166972 - DNA, 25 bp, Homo sapien
tacagaacgtatagggtggaagacc

SEQ ID NO: 4166973 - DNA, 25 bp, Homo sapien
atggaacagtcagcagcccttgggt

SEQ ID NO: 4166974 - DNA, 25 bp, Homo sapien
aggaagaagtagtttcatttccatc

SEQ ID NO: 4166975 - DNA, 25 bp, Homo sapien
tcccaggaagaagtagtttcatttc

SEQ ID NO: 4166976 - DNA, 25 bp, Homo sapien
tacttcccaggaagaagtagtttca

SEQ ID NO: 4166977 - DNA, 25 bp, Homo sapien
cttcccaggaagaagtagtttcatt

SEQ ID NO: 4166978 - DNA, 25 bp, Homo sapien
ggaaccaagaaagatttagcacagg

SEQ ID NO: 4166979 - DNA, 25 bp, Homo sapien
taacggagcggagtctcatggctgt

SEQ ID NO: 4166980 - DNA, 25 bp, Homo sapien
catggctgtgctccaatcattagcc

SEQ ID NO: 4166981 - DNA, 25 bp, Homo sapien
gatcacatgctcagctaacggagcg

SEQ ID NO: 4166982 - DNA, 25 bp, Homo sapien
tgccatcctacatcacactgttggg

SEQ ID NO: 4166983 - DNA, 25 bp, Homo sapien
gaagaatagcatatctgcacacccc

SEQ ID NO: 4166984 - DNA, 25 bp, Homo sapien
ggtgccattcctagataagttctgc

SEQ ID NO: 4166985 - DNA, 25 bp, Homo sapien
gggaaagcccacctctcaagagtcc

SEQ ID NO: 4166986 - DNA, 25 bp, Homo sapien
tgtaagtgacaacgctatggtgcca

SEQ ID NO: 4166987 - DNA, 25 bp, Homo sapien
aatccagaagctacggagagcgtcc

SEQ ID NO: 4166988 - DNA, 25 bp, Homo sapien
ttaatgtttgtgagcaagcccctgc

SEQ ID NO: 4166989 - DNA, 25 bp, Homo sapien
tctagactgttgatgggcttgcctc

SEQ ID NO: 4166990 - DNA, 25 bp, Homo sapien
aatcaaatacaagagaacacatcag

SEQ ID NO: 4166991 - DNA, 25 bp, Homo sapien
tattacagttaagcctatttaggta

SEQ ID NO: 4166992 - DNA, 25 bp, Homo sapien
tatatttattattacagttaagcct

SEQ ID NO: 4166993 - DNA, 25 bp, Homo sapien
gtatatttattattacagttaagcc

SEQ ID NO: 4166994 - DNA, 25 bp, Homo sapien
ttattattacagttaagcctattta

SEQ ID NO: 4166995 - DNA, 25 bp, Homo sapien
tagaagtggaccaataacaaaatgt

SEQ ID NO: 4166996 - DNA, 25 bp, Homo sapien
caaaattagaagtggaccaataaca

SEQ ID NO: 4166997 - DNA, 25 bp, Homo sapien
attagaagtggaccaataacaaaat

SEQ ID NO: 4166998 - DNA, 25 bp, Homo sapien
gacaaaattagaagtggaccaataa

SEQ ID NO: 4166999 - DNA, 25 bp, Homo sapien
tgcagccaggtatattgacagatgt

SEQ ID NO: 4167000 - DNA, 25 bp, Homo sapien
tgctgcttttcaatcccgactcttc

SEQ ID NO: 4167001 - DNA, 25 bp, Homo sapien
tgggatgttgggaagacacattaac

SEQ ID NO: 4167002 - DNA, 25 bp, Homo sapien
tggcccatggctgttccagcgattg

SEQ ID NO: 4167003 - DNA, 25 bp, Homo sapien
ggtttatgtctacaatggcctccac

SEQ ID NO: 4167004 - DNA, 25 bp, Homo sapien
caacattcttgagaggtagccacag

SEQ ID NO: 4167005 - DNA, 25 bp, Homo sapien
cccgaaagttgtatgtggtgaccat

SEQ ID NO: 4167006 - DNA, 25 bp, Homo sapien
ctaatgactataggagccaggaacc

SEQ ID NO: 4167007 - DNA, 25 bp, Homo sapien
tagtcaatctgaagaatagtctccc

SEQ ID NO: 4167008 - DNA, 25 bp, Homo sapien
gcatgggttgccatgcccgacctag

SEQ ID NO: 4167009 - DNA, 25 bp, Homo sapien
gccaatgcatttgatcaccccaaga

SEQ ID NO: 4167010 - DNA, 25 bp, Homo sapien
tgtctgtccctaaggcagccttcag

SEQ ID NO: 4167011 - DNA, 25 bp, Homo sapien
cttacaagaagggacacgagcacag

SEQ ID NO: 4167012 - DNA, 25 bp, Homo sapien
tgggcaagtcacgtcacctttaagg

SEQ ID NO: 4167013 - DNA, 25 bp, Homo sapien
caaccgaggtctcctatgtgctgta

SEQ ID NO: 4167014 - DNA, 25 bp, Homo sapien
tgaggccacgaaagccgaagtgact

SEQ ID NO: 4167015 - DNA, 25 bp, Homo sapien
gagaaaatatggtgaccctcaacca

SEQ ID NO: 4167016 - DNA, 25 bp, Homo sapien
gaagaatagtagtatcccagttaga

SEQ ID NO: 4167017 - DNA, 25 bp, Homo sapien
taaccaaatgatgtgcagtctgctg

SEQ ID NO: 4167018 - DNA, 25 bp, Homo sapien
atattaagccaaaccagacatgtgt

SEQ ID NO: 4167019 - DNA, 25 bp, Homo sapien
taatatcattagctacctcatagga

SEQ ID NO: 4167020 - DNA, 25 bp, Homo sapien
taagacggattgaaataacacatgc

SEQ ID NO: 4167021 - DNA, 25 bp, Homo sapien
gattgctggtaagacggattgaaat

SEQ ID NO: 4167022 - DNA, 25 bp, Homo sapien
tccaactattaggagagaataatat

SEQ ID NO: 4167023 - DNA, 25 bp, Homo sapien
tctctcagtaggaagtgtctcaaca

SEQ ID NO: 4167024 - DNA, 25 bp, Homo sapien
ggacttccaggattaggtctcagca

SEQ ID NO: 4167025 - DNA, 25 bp, Homo sapien
gaacctatatgagttcgtcagggaa

SEQ ID NO: 4167026 - DNA, 25 bp, Homo sapien
gcttgaggctgtaatctgaaaccat

SEQ ID NO: 4167027 - DNA, 25 bp, Homo sapien
gaagctcaggccactaggaacatct

SEQ ID NO: 4167028 - DNA, 25 bp, Homo sapien
ggctgccacacctcacaagaaagtg

SEQ ID NO: 4167029 - DNA, 25 bp, Homo sapien
gattgtggaaccaagaaccctgagc

SEQ ID NO: 4167030 - DNA, 25 bp, Homo sapien
taaacagggacatgagttggctggc

SEQ ID NO: 4167031 - DNA, 25 bp, Homo sapien
tgcagctgttgggtactcatataac

SEQ ID NO: 4167032 - DNA, 25 bp, Homo sapien
tctgcaaggaaacgtgtaatggaca

SEQ ID NO: 4167033 - DNA, 25 bp, Homo sapien
tcaatgactacctctgttgaggcaa

SEQ ID NO: 4167034 - DNA, 25 bp, Homo sapien
caaactgggactcatgctacatgcc

SEQ ID NO: 4167035 - DNA, 25 bp, Homo sapien
ccagatgaaaatgattacctgcagc

SEQ ID NO: 4167036 - DNA, 25 bp, Homo sapien
gagatcacaggttggcttagaacaa

SEQ ID NO: 4167037 - DNA, 25 bp, Homo sapien
catatatggttcaatagggcagaga

SEQ ID NO: 4167038 - DNA, 25 bp, Homo sapien
ctggcatatatggttcaatagggca

SEQ ID NO: 4167039 - DNA, 25 bp, Homo sapien
gatgaaggatttgttcacgtcccat

SEQ ID NO: 4167040 - DNA, 25 bp, Homo sapien
ttctgcctttttaggatgaaggatt

SEQ ID NO: 4167041 - DNA, 25 bp, Homo sapien
agctgctagtgactcattctcccta

SEQ ID NO: 4167042 - DNA, 25 bp, Homo sapien
ttttaggatgaaggatttgttcacg

SEQ ID NO: 4167043 - DNA, 25 bp, Homo sapien
gagccaagggttaagagtgtttcac

SEQ ID NO: 4167044 - DNA, 25 bp, Homo sapien
cacgcctgcctattgagaatgagaa

SEQ ID NO: 4167045 - DNA, 25 bp, Homo sapien
tggaagccaagcctcagactttttt

SEQ ID NO: 4167046 - DNA, 25 bp, Homo sapien
gcaaactggaactgcactggcatgt

SEQ ID NO: 4167047 - DNA, 25 bp, Homo sapien
ttagctaggcaccgcttcttctttc

SEQ ID NO: 4167048 - DNA, 25 bp, Homo sapien
tttctcaaaacccatgattgctgag

SEQ ID NO: 4167049 - DNA, 25 bp, Homo sapien
cactggaactttcatgagaactaac

SEQ ID NO: 4167050 - DNA, 25 bp, Homo sapien
gattgctgagatgctgacagtttca

SEQ ID NO: 4167051 - DNA, 25 bp, Homo sapien
cagccttacttgagtgagaccccta

SEQ ID NO: 4167052 - DNA, 25 bp, Homo sapien
cctgaaggaggaaactgcaccctaa

SEQ ID NO: 4167053 - DNA, 25 bp, Homo sapien
gaggtctcaataactaaggagccct

SEQ ID NO: 4167054 - DNA, 25 bp, Homo sapien
cactgacaggtgtttatagagctca

SEQ ID NO: 4167055 - DNA, 25 bp, Homo sapien
gatgcgccaagccactcggggctcg

SEQ ID NO: 4167056 - DNA, 25 bp, Homo sapien
cagatgcgccaagccactcggggct

SEQ ID NO: 4167057 - DNA, 25 bp, Homo sapien
atgcagatgcgccaagccactcggg

SEQ ID NO: 4167058 - DNA, 25 bp, Homo sapien
taaatgcagatgcgccaagccactc

SEQ ID NO: 4167059 - DNA, 25 bp, Homo sapien
tattttcatgtttccccgacattgt

SEQ ID NO: 4167060 - DNA, 25 bp, Homo sapien
tttcatgtttccccgacattgtctt

SEQ ID NO: 4167061 - DNA, 25 bp, Homo sapien
ctgaactggggaatgaaaccacacc

SEQ ID NO: 4167062 - DNA, 25 bp, Homo sapien
gcagaatccaatccatcgagagtat

SEQ ID NO: 4167063 - DNA, 25 bp, Homo sapien
atttccttggaaatatacttaagtg

SEQ ID NO: 4167064 - DNA, 25 bp, Homo sapien
tgtaagctccttagagataagaatc

SEQ ID NO: 4167065 - DNA, 25 bp, Homo sapien
tatgctgattggtggcctttatttc

SEQ ID NO: 4167066 - DNA, 25 bp, Homo sapien
tcctgcagcaaatgatgctgcctcc

SEQ ID NO: 4167067 - DNA, 25 bp, Homo sapien
ttcttctgaaggctatgagggaagc

SEQ ID NO: 4167068 - DNA, 25 bp, Homo sapien
ttctgaaggctatgagggaagcatc

SEQ ID NO: 4167069 - DNA, 25 bp, Homo sapien
tgaaggctatgagggaagcatccat

SEQ ID NO: 4167070 - DNA, 25 bp, Homo sapien
tctgaaggctatgagggaagcatcc

SEQ ID NO: 4167071 - DNA, 25 bp, Homo sapien
tgttcccacaagtgagagctcaaca

SEQ ID NO: 4167072 - DNA, 25 bp, Homo sapien
gttcccacaagtgagagctcaacat

SEQ ID NO: 4167073 - DNA, 25 bp, Homo sapien
cagaaaactaaatacagttatgttc

SEQ ID NO: 4167074 - DNA, 25 bp, Homo sapien
tcttaacgccattcacaagagcaaa

SEQ ID NO: 4167075 - DNA, 25 bp, Homo sapien
ccattcacaagagcaaaaatgtgga

SEQ ID NO: 4167076 - DNA, 25 bp, Homo sapien
tgttcatcttaacgccattcacaag

SEQ ID NO: 4167077 - DNA, 25 bp, Homo sapien
tgtatgttcatcttaacgccattca

SEQ ID NO: 4167078 - DNA, 25 bp, Homo sapien
atgcttaagaatttgagagttgaga

SEQ ID NO: 4167079 - DNA, 25 bp, Homo sapien
tatgcttaagaatttgagagttgag

SEQ ID NO: 4167080 - DNA, 25 bp, Homo sapien
gcttaagaatttgagagttgagagt

SEQ ID NO: 4167081 - DNA, 25 bp, Homo sapien
caggcatctgatagaaccttgagca

SEQ ID NO: 4167082 - DNA, 25 bp, Homo sapien
gaaccttgagcaacaggcataattt

SEQ ID NO: 4167083 - DNA, 25 bp, Homo sapien
cagagacctctttgattgaccagga

SEQ ID NO: 4167084 - DNA, 25 bp, Homo sapien
actgttttttccatcgccttgataa

SEQ ID NO: 4167085 - DNA, 25 bp, Homo sapien
tgactacgtagttcccatagagagc

SEQ ID NO: 4167086 - DNA, 25 bp, Homo sapien
gagtggtgcctccttaattgttggt

SEQ ID NO: 4167087 - DNA, 25 bp, Homo sapien
gaagatatctgccaattatgtaacc

SEQ ID NO: 4167088 - DNA, 25 bp, Homo sapien
gcagactaataaggagttctattgg

SEQ ID NO: 4167089 - DNA, 25 bp, Homo sapien
atattgtagggacctagttctgctc

SEQ ID NO: 4167090 - DNA, 25 bp, Homo sapien
tcccatgtgactcactggagatggc

SEQ ID NO: 4167091 - DNA, 25 bp, Homo sapien
cactggagatggcaagattgttgat

SEQ ID NO: 4167092 - DNA, 25 bp, Homo sapien
ataaatattgtagggacctagttct

SEQ ID NO: 4167093 - DNA, 25 bp, Homo sapien
aagtcccataactagaacttcttca

SEQ ID NO: 4167094 - DNA, 25 bp, Homo sapien
agtcccataactagaacttcttcat

SEQ ID NO: 4167095 - DNA, 25 bp, Homo sapien
taagaactgctcatatataaaggag

SEQ ID NO: 4167096 - DNA, 25 bp, Homo sapien
taataacactacatgaaccatgcag

SEQ ID NO: 4167097 - DNA, 25 bp, Homo sapien
ctgggaggctgttagtctttctttt

SEQ ID NO: 4167098 - DNA, 25 bp, Homo sapien
ttcaagagcagcaagcaaccagcat

SEQ ID NO: 4167099 - DNA, 25 bp, Homo sapien
tgcggttactaaatgaggacttgtc

SEQ ID NO: 4167100 - DNA, 25 bp, Homo sapien
atgccagatgcggttactaaatgag

SEQ ID NO: 4167101 - DNA, 25 bp, Homo sapien
tactaaatgaggacttgtcaacctt

SEQ ID NO: 4167102 - DNA, 25 bp, Homo sapien
gacttgtcaaccttgtttggtttca

SEQ ID NO: 4167103 - DNA, 25 bp, Homo sapien
tgcaatcagggctacatgcttttac

SEQ ID NO: 4167104 - DNA, 25 bp, Homo sapien
cattctgaggacagtttcccacagc

SEQ ID NO: 4167105 - DNA, 25 bp, Homo sapien
cataaggaaacgtttcctctggaga

SEQ ID NO: 4167106 - DNA, 25 bp, Homo sapien
ttcctgaaaggtccctcaagcataa

SEQ ID NO: 4167107 - DNA, 25 bp, Homo sapien
ctaaatcaatcagtgcacaggagga

SEQ ID NO: 4167108 - DNA, 25 bp, Homo sapien
tgacagatagactggaagttccctg

SEQ ID NO: 4167109 - DNA, 25 bp, Homo sapien
tcctgagcaactggaactaccagtg

SEQ ID NO: 4167110 - DNA, 25 bp, Homo sapien
ggtaggaagcattaccagcatctaa

SEQ ID NO: 4167111 - DNA, 25 bp, Homo sapien
gaacagtcacttagctactcagaaa

SEQ ID NO: 4167112 - DNA, 25 bp, Homo sapien
taattgcatgcctttgcgagatggg

SEQ ID NO: 4167113 - DNA, 25 bp, Homo sapien
gagttgagtgagcatgataccttcc

SEQ ID NO: 4167114 - DNA, 25 bp, Homo sapien
taatgctgtcaataggagaagggaa

SEQ ID NO: 4167115 - DNA, 25 bp, Homo sapien
gaggcaagagcgtactgaggaactt

SEQ ID NO: 4167116 - DNA, 25 bp, Homo sapien
gaaatcaacccagatacattattgg

SEQ ID NO: 4167117 - DNA, 25 bp, Homo sapien
atgctgtgctggtttgatgaatttc

SEQ ID NO: 4167118 - DNA, 25 bp, Homo sapien
tatataagtaacttccatgctgtgc

SEQ ID NO: 4167119 - DNA, 25 bp, Homo sapien
agagggtgaccacaatcaaacccat

SEQ ID NO: 4167120 - DNA, 25 bp, Homo sapien
cagtaccaggggtaatggaagagac

SEQ ID NO: 4167121 - DNA, 25 bp, Homo sapien
gagacaaagagggtgaccacaatca

SEQ ID NO: 4167122 - DNA, 25 bp, Homo sapien
ttgcaccctctcagtaccaggggta

SEQ ID NO: 4167123 - DNA, 25 bp, Homo sapien
ccagagtaactgagagcccaaccca

SEQ ID NO: 4167124 - DNA, 25 bp, Homo sapien
gccagagtaactgagagcccaaccc

SEQ ID NO: 4167125 - DNA, 25 bp, Homo sapien
tcaagagcatgggtagtgaaagcag

SEQ ID NO: 4167126 - DNA, 25 bp, Homo sapien
caaggcaaactgtctcataggctga

SEQ ID NO: 4167127 - DNA, 25 bp, Homo sapien
gaaatatatctgtagggcatccaag

SEQ ID NO: 4167128 - DNA, 25 bp, Homo sapien
ccaagtgaagtgcagggtagagaac

SEQ ID NO: 4167129 - DNA, 25 bp, Homo sapien
caaaggataaactgggatcagtgcc

SEQ ID NO: 4167130 - DNA, 25 bp, Homo sapien
aaaggataaactgggatcagtgcca

SEQ ID NO: 4167131 - DNA, 25 bp, Homo sapien
cttccttgggcacctctctcttggt

SEQ ID NO: 4167132 - DNA, 25 bp, Homo sapien
tccttgggcacctctctcttggtat

SEQ ID NO: 4167133 - DNA, 25 bp, Homo sapien
cttgggcacctctctcttggtatcc

SEQ ID NO: 4167134 - DNA, 25 bp, Homo sapien
ttgggcacctctctcttggtatcct

SEQ ID NO: 4167135 - DNA, 25 bp, Homo sapien
gagtagtcgtattggagcctcctcc

SEQ ID NO: 4167136 - DNA, 25 bp, Homo sapien
ttcagtgaagtaagatatggtggcc

SEQ ID NO: 4167137 - DNA, 25 bp, Homo sapien
tgaacaagcaggtgaccaaagttct

SEQ ID NO: 4167138 - DNA, 25 bp, Homo sapien
actctgctggagtctaaaggcttgg

SEQ ID NO: 4167139 - DNA, 25 bp, Homo sapien
tctcaaagctacgttcgcagcaacg

SEQ ID NO: 4167140 - DNA, 25 bp, Homo sapien
tcgggccgcaatggtgggctccgcg

SEQ ID NO: 4167141 - DNA, 25 bp, Homo sapien
cacccagggagttcgagcaacgaag

SEQ ID NO: 4167142 - DNA, 25 bp, Homo sapien
agcaacgaagttggtgacctgcccc

SEQ ID NO: 4167143 - DNA, 25 bp, Homo sapien
ttcccggcggcgagagaaggcaggc

SEQ ID NO: 4167144 - DNA, 25 bp, Homo sapien
gcgcgctccttgcgccacgccacac

SEQ ID NO: 4167145 - DNA, 25 bp, Homo sapien
cagcccgttcccggcggcgagagaa

SEQ ID NO: 4167146 - DNA, 25 bp, Homo sapien
gtgcagcccgttcccggcggcgaga

SEQ ID NO: 4167147 - DNA, 25 bp, Homo sapien
gccgccgccctagcgcctagccttt

SEQ ID NO: 4167148 - DNA, 25 bp, Homo sapien
cctgactcgcggtgagcagtcagcg

SEQ ID NO: 4167149 - DNA, 25 bp, Homo sapien
tccaaaccgccgctctacgctggcg

SEQ ID NO: 4167150 - DNA, 25 bp, Homo sapien
ctgtctccctccgtgagcccgccgg

SEQ ID NO: 4167151 - DNA, 25 bp, Homo sapien
gcctgggcactgccgaccccagccc

SEQ ID NO: 4167152 - DNA, 25 bp, Homo sapien
tgggcactgccgaccccagcccggg

SEQ ID NO: 4167153 - DNA, 25 bp, Homo sapien
ccagcccgggcttttgtccctacag

SEQ ID NO: 4167154 - DNA, 25 bp, Homo sapien
agctgcgcagcctgggcactgccga

SEQ ID NO: 4167155 - DNA, 25 bp, Homo sapien
tatgggagggaaactctccgatctt

SEQ ID NO: 4167156 - DNA, 25 bp, Homo sapien
tgggagggaaactctccgatcttgc

SEQ ID NO: 4167157 - DNA, 25 bp, Homo sapien
ggaaactctccgatcttgccgccat

SEQ ID NO: 4167158 - DNA, 25 bp, Homo sapien
gagggaaactctccgatcttgccgc

SEQ ID NO: 4167159 - DNA, 25 bp, Homo sapien
tgtggctttgatatctcaggacacc

SEQ ID NO: 4167160 - DNA, 25 bp, Homo sapien
tcaggacaccgattacacagttgct

SEQ ID NO: 4167161 - DNA, 25 bp, Homo sapien
tgaacctattacaacaggcagctgt

SEQ ID NO: 4167162 - DNA, 25 bp, Homo sapien
gacacatcctcggaattcaccaggt

SEQ ID NO: 4167163 - DNA, 25 bp, Homo sapien
tttaaatgtctgttgtattgtgctg

SEQ ID NO: 4167164 - DNA, 25 bp, Homo sapien
tgtattgtgctgtgttgtgttagag

SEQ ID NO: 4167165 - DNA, 25 bp, Homo sapien
taaatgtctgttgtattgtgctgtg

SEQ ID NO: 4167166 - DNA, 25 bp, Homo sapien
ctgtgttgtgttagagaagagggac

SEQ ID NO: 4167167 - DNA, 25 bp, Homo sapien
attgacaaggtgacaacaggaggga

SEQ ID NO: 4167168 - DNA, 25 bp, Homo sapien
ggagagcacacaagaggcattgaca

SEQ ID NO: 4167169 - DNA, 25 bp, Homo sapien
gactgcagctgagtatagaggaaga

SEQ ID NO: 4167170 - DNA, 25 bp, Homo sapien
gcaggagggacgtgattgcacacat

SEQ ID NO: 4167171 - DNA, 25 bp, Homo sapien
gaagcttagtttacgtgccacagct

SEQ ID NO: 4167172 - DNA, 25 bp, Homo sapien
gaactcctaggaaatgtggaccagt

SEQ ID NO: 4167173 - DNA, 25 bp, Homo sapien
ggtgacttttctgaccccatgagtg

SEQ ID NO: 4167174 - DNA, 25 bp, Homo sapien
catgagtgacaacaacggctactga

SEQ ID NO: 4167175 - DNA, 25 bp, Homo sapien
gatgggccaggtacccaactgtcca

SEQ ID NO: 4167176 - DNA, 25 bp, Homo sapien
cacactttgtgagcaaattcaggca

SEQ ID NO: 4167177 - DNA, 25 bp, Homo sapien
agtctggctgcataaatcctggtga

SEQ ID NO: 4167178 - DNA, 25 bp, Homo sapien
tgtccataaaggtgccttgggctcc

SEQ ID NO: 4167179 - DNA, 25 bp, Homo sapien
cccttgttaggcctacatctgaaca

SEQ ID NO: 4167180 - DNA, 25 bp, Homo sapien
agaacaatcccttgttaggcctaca

SEQ ID NO: 4167181 - DNA, 25 bp, Homo sapien
tctgaacaaacaatcttgcagtctg

SEQ ID NO: 4167182 - DNA, 25 bp, Homo sapien
atctgaacaaacaatcttgcagtct

SEQ ID NO: 4167183 - DNA, 25 bp, Homo sapien
aaatctagctccttttgtatgtagc

SEQ ID NO: 4167184 - DNA, 25 bp, Homo sapien
taaatctagctccttttgtatgtag

SEQ ID NO: 4167185 - DNA, 25 bp, Homo sapien
ttgtaaatctagctccttttgtatg

SEQ ID NO: 4167186 - DNA, 25 bp, Homo sapien
tagctccttttgtatgtagctatgc

SEQ ID NO: 4167187 - DNA, 25 bp, Homo sapien
tcgttctcaacagaatgcaccacag

SEQ ID NO: 4167188 - DNA, 25 bp, Homo sapien
acagaatgcaccacagagtcttcct

SEQ ID NO: 4167189 - DNA, 25 bp, Homo sapien
tgggaatcgttctcaacagaatgca

SEQ ID NO: 4167190 - DNA, 25 bp, Homo sapien
gttttgggaatcgttctcaacagaa

SEQ ID NO: 4167191 - DNA, 25 bp, Homo sapien
tcctggtcgcaaaaactctgtctga

SEQ ID NO: 4167192 - DNA, 25 bp, Homo sapien
tgaatgactcgggtttgtccccaca

SEQ ID NO: 4167193 - DNA, 25 bp, Homo sapien
tgtacaacctgggaagtgatcggct

SEQ ID NO: 4167194 - DNA, 25 bp, Homo sapien
tgatcggctgtaggctcccatgtga

SEQ ID NO: 4167195 - DNA, 25 bp, Homo sapien
gaggtcaatcactgttgagatgaag

SEQ ID NO: 4167196 - DNA, 25 bp, Homo sapien
ggctgccctgtagatgctggttaat

SEQ ID NO: 4167197 - DNA, 25 bp, Homo sapien
ttaacattaattcctggaggccttc

SEQ ID NO: 4167198 - DNA, 25 bp, Homo sapien
gaggccttcaagatagccaaacaag

SEQ ID NO: 4167199 - DNA, 25 bp, Homo sapien
taaaattcccaactcctctgttatg

SEQ ID NO: 4167200 - DNA, 25 bp, Homo sapien
ttatacttgtgagaagtccgcagag

SEQ ID NO: 4167201 - DNA, 25 bp, Homo sapien
ccatacacaagcaaatttaatgata

SEQ ID NO: 4167202 - DNA, 25 bp, Homo sapien
tcttaaagagaagtttgtaagactc

SEQ ID NO: 4167203 - DNA, 25 bp, Homo sapien
gatatctattcctgaactactttta

SEQ ID NO: 4167204 - DNA, 25 bp, Homo sapien
tcaggcagaccctaaatacagaaaa

SEQ ID NO: 4167205 - DNA, 25 bp, Homo sapien
atcaggcagaccctaaatacagaaa

SEQ ID NO: 4167206 - DNA, 25 bp, Homo sapien
ataatttccaagatatctattcctg

SEQ ID NO: 4167207 - DNA, 25 bp, Homo sapien
tacctagaactaaatgcttatcatc

SEQ ID NO: 4167208 - DNA, 25 bp, Homo sapien
tgtatagagcttctctattacctag

SEQ ID NO: 4167209 - DNA, 25 bp, Homo sapien
gaatgcatttatactgagatatctt

SEQ ID NO: 4167210 - DNA, 25 bp, Homo sapien
tgggaaccagggatgcaaactacag

SEQ ID NO: 4167211 - DNA, 25 bp, Homo sapien
tctgaccacgtttcagagattagag

SEQ ID NO: 4167212 - DNA, 25 bp, Homo sapien
tagaaacattagatctatcatctgc

SEQ ID NO: 4167213 - DNA, 25 bp, Homo sapien
acaagcaagactctcagacctgtag

SEQ ID NO: 4167214 - DNA, 25 bp, Homo sapien
tatcatctgctcaatggtacacaag

SEQ ID NO: 4167215 - DNA, 25 bp, Homo sapien
caacttatgtacctgacaatggcca

SEQ ID NO: 4167216 - DNA, 25 bp, Homo sapien
tcaggatgtagcaaatggaagggcc

SEQ ID NO: 4167217 - DNA, 25 bp, Homo sapien
caaaaattcagcttaaggcttaggc

SEQ ID NO: 4167218 - DNA, 25 bp, Homo sapien
gccacatcaggaaggagattcaagt

SEQ ID NO: 4167219 - DNA, 25 bp, Homo sapien
tacttactttaagggctaatatcca

SEQ ID NO: 4167220 - DNA, 25 bp, Homo sapien
cacacacgcaaaccagcaatttgta

SEQ ID NO: 4167221 - DNA, 25 bp, Homo sapien
aattggcagcccaactttgctaatg

SEQ ID NO: 4167222 - DNA, 25 bp, Homo sapien
tctctaatgacccaaggtgatctga

SEQ ID NO: 4167223 - DNA, 25 bp, Homo sapien
gcacaatcactaaacctattagctg

SEQ ID NO: 4167224 - DNA, 25 bp, Homo sapien
tttagatatactaagccaggcatgg

SEQ ID NO: 4167225 - DNA, 25 bp, Homo sapien
cactaaacctattagctgatgataa

SEQ ID NO: 4167226 - DNA, 25 bp, Homo sapien
ccaatagtttcagaggctaagggga

SEQ ID NO: 4167227 - DNA, 25 bp, Homo sapien
gaaggtggttacatgaaacagcagg

SEQ ID NO: 4167228 - DNA, 25 bp, Homo sapien
tttgtggaaaccctgcagcgagcaa

SEQ ID NO: 4167229 - DNA, 25 bp, Homo sapien
atctgtaactagcagaggctgggtc

SEQ ID NO: 4167230 - DNA, 25 bp, Homo sapien
cagcctgggccacaattaatcaatc

SEQ ID NO: 4167231 - DNA, 25 bp, Homo sapien
ctttctaaatctgagaatagtgtta

SEQ ID NO: 4167232 - DNA, 25 bp, Homo sapien
aaacaaacaatggcatgtcttcttt

SEQ ID NO: 4167233 - DNA, 25 bp, Homo sapien
ttctaaatctgagaatagtgttaag

SEQ ID NO: 4167234 - DNA, 25 bp, Homo sapien
tctttctaaatctgagaatagtgtt

SEQ ID NO: 4167235 - DNA, 25 bp, Homo sapien
tgcaacctccagcatccgggttcaa

SEQ ID NO: 4167236 - DNA, 25 bp, Homo sapien
tgtgccaccacgtctggctaatttt

SEQ ID NO: 4167237 - DNA, 25 bp, Homo sapien
acctccagcatccgggttcaagtga

SEQ ID NO: 4167238 - DNA, 25 bp, Homo sapien
gtgccaccacgtctggctaattttt

SEQ ID NO: 4167239 - DNA, 25 bp, Homo sapien
tccagaaggaagtctgcacagtgcc

SEQ ID NO: 4167240 - DNA, 25 bp, Homo sapien
cactttagcttgatcaagttccaga

SEQ ID NO: 4167241 - DNA, 25 bp, Homo sapien
gaaattatgctattgctcttcacca

SEQ ID NO: 4167242 - DNA, 25 bp, Homo sapien
cttacatagacagtgttccagaagg

SEQ ID NO: 4167243 - DNA, 25 bp, Homo sapien
tccagctggacttgaagagcagaat

SEQ ID NO: 4167244 - DNA, 25 bp, Homo sapien
tgtccagctggacttgaagagcaga

SEQ ID NO: 4167245 - DNA, 25 bp, Homo sapien
cagctggacttgaagagcagaatct

SEQ ID NO: 4167246 - DNA, 25 bp, Homo sapien
tgtgtccagctggacttgaagagca

SEQ ID NO: 4167247 - DNA, 25 bp, Homo sapien
catccaagggcccttgtaactaaca

SEQ ID NO: 4167248 - DNA, 25 bp, Homo sapien
ggactgtgtctgacattgttcccac

SEQ ID NO: 4167249 - DNA, 25 bp, Homo sapien
caggacggtacacatactgcataaa

SEQ ID NO: 4167250 - DNA, 25 bp, Homo sapien
caaccagtgtaggtcacaggacggt

SEQ ID NO: 4167251 - DNA, 25 bp, Homo sapien
ggcactcatagctacacactctcat

SEQ ID NO: 4167252 - DNA, 25 bp, Homo sapien
cacggcaggcactcatagctacaca

SEQ ID NO: 4167253 - DNA, 25 bp, Homo sapien
gcaggcactcatagctacacactct

SEQ ID NO: 4167254 - DNA, 25 bp, Homo sapien
catagctacacactctcatcttggg

SEQ ID NO: 4167255 - DNA, 25 bp, Homo sapien
ttcactgcctgaacttctggactcc

SEQ ID NO: 4167256 - DNA, 25 bp, Homo sapien
tttcactgcctgaacttctggactc

SEQ ID NO: 4167257 - DNA, 25 bp, Homo sapien
cctttcactgcctgaacttctggac

SEQ ID NO: 4167258 - DNA, 25 bp, Homo sapien
ctccctttcactgcctgaacttctg

SEQ ID NO: 4167259 - DNA, 25 bp, Homo sapien
ggatggtctccagacgctgtctctc

SEQ ID NO: 4167260 - DNA, 25 bp, Homo sapien
gaggatggtctccagacgctgtctc

SEQ ID NO: 4167261 - DNA, 25 bp, Homo sapien
aggatggtctccagacgctgtctct

SEQ ID NO: 4167262 - DNA, 25 bp, Homo sapien
cacggtggtcccagtagataagcga

SEQ ID NO: 4167263 - DNA, 25 bp, Homo sapien
ggagtctttccggtggcacctgtat

SEQ ID NO: 4167264 - DNA, 25 bp, Homo sapien
tatcttgtgtcagggctcatgaggg

SEQ ID NO: 4167265 - DNA, 25 bp, Homo sapien
acagcttgccaagtctgcatcaggg

SEQ ID NO: 4167266 - DNA, 25 bp, Homo sapien
ctttggtaggatacttagataagag

SEQ ID NO: 4167267 - DNA, 25 bp, Homo sapien
gtcactgagtagttcatcattcctg

SEQ ID NO: 4167268 - DNA, 25 bp, Homo sapien
ggaggagtccgggtgaggtcactga

SEQ ID NO: 4167269 - DNA, 25 bp, Homo sapien
gactcgctggaagctttcggaaagg

SEQ ID NO: 4167270 - DNA, 25 bp, Homo sapien
ggtttctaaggaagcccaatggctg

SEQ ID NO: 4167271 - DNA, 25 bp, Homo sapien
taaatcctagtatctttgctgggcc

SEQ ID NO: 4167272 - DNA, 25 bp, Homo sapien
caagatctgctcgtgtacgcaccaa

SEQ ID NO: 4167273 - DNA, 25 bp, Homo sapien
caagggcggtatcctgttgggtcaa

SEQ ID NO: 4167274 - DNA, 25 bp, Homo sapien
gtgattcaacgattcagcatttagt

SEQ ID NO: 4167275 - DNA, 25 bp, Homo sapien
ttctaaagtgattcaacgattcagc

SEQ ID NO: 4167276 - DNA, 25 bp, Homo sapien
gcatttagtacctcaggtttgttag

SEQ ID NO: 4167277 - DNA, 25 bp, Homo sapien
ttgttaggacaaaggtaagcagctc

SEQ ID NO: 4167278 - DNA, 25 bp, Homo sapien
tctgaaagactcatccatctgatca

SEQ ID NO: 4167279 - DNA, 25 bp, Homo sapien
tgttcagaatgactatccgggtttc

SEQ ID NO: 4167280 - DNA, 25 bp, Homo sapien
gcttaagttcctcgaggttgttcag

SEQ ID NO: 4167281 - DNA, 25 bp, Homo sapien
gactatccgggtttcttccattgca

SEQ ID NO: 4167282 - DNA, 25 bp, Homo sapien
tctgttctccatccaaaagagcaca

SEQ ID NO: 4167283 - DNA, 25 bp, Homo sapien
tccggtttagatgatccaaaatctc

SEQ ID NO: 4167284 - DNA, 25 bp, Homo sapien
ttctgttctccatccaaaagagcac

SEQ ID NO: 4167285 - DNA, 25 bp, Homo sapien
cagttcagctattttccggtttaga

SEQ ID NO: 4167286 - DNA, 25 bp, Homo sapien
taattctgacatgctggtaaccaag

SEQ ID NO: 4167287 - DNA, 25 bp, Homo sapien
taaccaagaaattgatgtgtagcat

SEQ ID NO: 4167288 - DNA, 25 bp, Homo sapien
gatcaaatgcccttatttataggtc

SEQ ID NO: 4167289 - DNA, 25 bp, Homo sapien
gactaccattttgagctcattctct

SEQ ID NO: 4167290 - DNA, 25 bp, Homo sapien
aaaggatgaaagaagaccagtggca

SEQ ID NO: 4167291 - DNA, 25 bp, Homo sapien
gccaaagctagggcaaaggaagtaa

SEQ ID NO: 4167292 - DNA, 25 bp, Homo sapien
aaagaagaccagtggcaggtgggcc

SEQ ID NO: 4167293 - DNA, 25 bp, Homo sapien
tgaaagaagaccagtggcaggtggg

SEQ ID NO: 4167294 - DNA, 25 bp, Homo sapien
tgcaagcaggcaccattagaacttt

SEQ ID NO: 4167295 - DNA, 25 bp, Homo sapien
catctagaagaatatgcaagcaggc

SEQ ID NO: 4167296 - DNA, 25 bp, Homo sapien
catacaagggggcatctagaagaat

SEQ ID NO: 4167297 - DNA, 25 bp, Homo sapien
gcaggcaccattagaactttttgca

SEQ ID NO: 4167298 - DNA, 25 bp, Homo sapien
tgctcggagtaaagctcctgaagcc

SEQ ID NO: 4167299 - DNA, 25 bp, Homo sapien
cagttgttgttgtaactgttccctc

SEQ ID NO: 4167300 - DNA, 25 bp, Homo sapien
aggacaattgtccagctgggtcttc

SEQ ID NO: 4167301 - DNA, 25 bp, Homo sapien
tgttccctcatggactcaggacaat

SEQ ID NO: 4167302 - DNA, 25 bp, Homo sapien
tgacttgtccaagactaatggataa

SEQ ID NO: 4167303 - DNA, 25 bp, Homo sapien
ttgcagcccatagaagttgaatgac

SEQ ID NO: 4167304 - DNA, 25 bp, Homo sapien
tcatatatgaggatattgcagccca

SEQ ID NO: 4167305 - DNA, 25 bp, Homo sapien
aaaacatcaagatactccccgactc

SEQ ID NO: 4167306 - DNA, 25 bp, Homo sapien
agtcagttgcttactccacatctgg

SEQ ID NO: 4167307 - DNA, 25 bp, Homo sapien
taaaccactgcatgaaaataatggc

SEQ ID NO: 4167308 - DNA, 25 bp, Homo sapien
caaagtggccatatgactcagaata

SEQ ID NO: 4167309 - DNA, 25 bp, Homo sapien
tatatacactttgctagtcagttgc

SEQ ID NO: 4167310 - DNA, 25 bp, Homo sapien
tactcacatggatccactcacctgg

SEQ ID NO: 4167311 - DNA, 25 bp, Homo sapien
tggctcacagctctacatagctaac

SEQ ID NO: 4167312 - DNA, 25 bp, Homo sapien
tctacatagctaacataaccaaagc

SEQ ID NO: 4167313 - DNA, 25 bp, Homo sapien
cataatctacatccaaaaggaagag

SEQ ID NO: 4167314 - DNA, 25 bp, Homo sapien
gcacaaagggtgactcaaaaggtta

SEQ ID NO: 4167315 - DNA, 25 bp, Homo sapien
gatattcagcaacttcacgcaggag

SEQ ID NO: 4167316 - DNA, 25 bp, Homo sapien
gagctgttgagtcaagttctccttt

SEQ ID NO: 4167317 - DNA, 25 bp, Homo sapien
aaacgatgttccgttgatattcagc

SEQ ID NO: 4167318 - DNA, 25 bp, Homo sapien
tagacggctctcatgttcaagctgc

SEQ ID NO: 4167319 - DNA, 25 bp, Homo sapien
cctgctgaacaatgtgattggcttg

SEQ ID NO: 4167320 - DNA, 25 bp, Homo sapien
tgctgaacaatgtgattggcttgct

SEQ ID NO: 4167321 - DNA, 25 bp, Homo sapien
ctgagcctgctgaacaatgtgattg

SEQ ID NO: 4167322 - DNA, 25 bp, Homo sapien
gagcctgctgaacaatgtgattggc

SEQ ID NO: 4167323 - DNA, 25 bp, Homo sapien
acatttgtctatgattcatcttgaa

SEQ ID NO: 4167324 - DNA, 25 bp, Homo sapien
tgttgatgacataatatctgatgat

SEQ ID NO: 4167325 - DNA, 25 bp, Homo sapien
tgtccttgccatggctggggctaaa

SEQ ID NO: 4167326 - DNA, 25 bp, Homo sapien
cacataattgttgatgatgtaatat

SEQ ID NO: 4167327 - DNA, 25 bp, Homo sapien
tcttttccaaattacaaagattctc

SEQ ID NO: 4167328 - DNA, 25 bp, Homo sapien
tccccccagagaggctggagtattt

SEQ ID NO: 4167329 - DNA, 25 bp, Homo sapien
tttccccccagagaggctggagtat

SEQ ID NO: 4167330 - DNA, 25 bp, Homo sapien
ccccagagaggctggagtatttctt

SEQ ID NO: 4167331 - DNA, 25 bp, Homo sapien
aggcaacataaagcgacatgtaaaa

SEQ ID NO: 4167332 - DNA, 25 bp, Homo sapien
acataaagcgacatgtaaaatcata

SEQ ID NO: 4167333 - DNA, 25 bp, Homo sapien
gcaacataaagcgacatgtaaaatc

SEQ ID NO: 4167334 - DNA, 25 bp, Homo sapien
aaggcaacataaagcgacatgtaaa

SEQ ID NO: 4167335 - DNA, 25 bp, Homo sapien
gcaagaactgtgaactgtcaactct

SEQ ID NO: 4167336 - DNA, 25 bp, Homo sapien
gcctatgctactgcagtaatctcca

SEQ ID NO: 4167337 - DNA, 25 bp, Homo sapien
gaataatggcatgattccggacacc

SEQ ID NO: 4167338 - DNA, 25 bp, Homo sapien
ccaattcatctggatgccacaagct

SEQ ID NO: 4167339 - DNA, 25 bp, Homo sapien
ggcaggctcagtggcaacagcatca

SEQ ID NO: 4167340 - DNA, 25 bp, Homo sapien
tggctggctcgccagcacagctgtg

SEQ ID NO: 4167341 - DNA, 25 bp, Homo sapien
aaggggatagattcgtggaattgcc

SEQ ID NO: 4167342 - DNA, 25 bp, Homo sapien
taatctcatttacactgatatagcc

SEQ ID NO: 4167343 - DNA, 25 bp, Homo sapien
acatttgtcatgcacgttctcgtgg

SEQ ID NO: 4167344 - DNA, 25 bp, Homo sapien
cctcattttcagttggccgtgggtt

SEQ ID NO: 4167345 - DNA, 25 bp, Homo sapien
cacgttctcgtggacctcattttca

SEQ ID NO: 4167346 - DNA, 25 bp, Homo sapien
tcattttcagttggccgtgggttaa

SEQ ID NO: 4167347 - DNA, 25 bp, Homo sapien
gacagatgtagccatgaattcaggc

SEQ ID NO: 4167348 - DNA, 25 bp, Homo sapien
gccttctgtgtttcttagctggtaa

SEQ ID NO: 4167349 - DNA, 25 bp, Homo sapien
gaggaggtgtgtcatttaaaggtaa

SEQ ID NO: 4167350 - DNA, 25 bp, Homo sapien
ttaaaggtaaaggatcgacagatgt

SEQ ID NO: 4167351 - DNA, 25 bp, Homo sapien
catgtggatggcagaacagccagtg

SEQ ID NO: 4167352 - DNA, 25 bp, Homo sapien
tttcacttctgtagtgcctgcggcc

SEQ ID NO: 4167353 - DNA, 25 bp, Homo sapien
tgttcactgatagatttgagctagt

SEQ ID NO: 4167354 - DNA, 25 bp, Homo sapien
caaattattatgatggtcgccatgt

SEQ ID NO: 4167355 - DNA, 25 bp, Homo sapien
atgcaaagcaaaatagcaaaacttg

SEQ ID NO: 4167356 - DNA, 25 bp, Homo sapien
ctttaaatgcaaatgcaaagcaaaa

SEQ ID NO: 4167357 - DNA, 25 bp, Homo sapien
aagcaaaatagcaaaacttgactaa

SEQ ID NO: 4167358 - DNA, 25 bp, Homo sapien
aatgcaaatgcaaagcaaaatagca

SEQ ID NO: 4167359 - DNA, 25 bp, Homo sapien
gcaaagtatcactcagatagaggcc

SEQ ID NO: 4167360 - DNA, 25 bp, Homo sapien
cagatagaggccttctttatgctgt

SEQ ID NO: 4167361 - DNA, 25 bp, Homo sapien
ggttttctttcgaggcaaagtatca

SEQ ID NO: 4167362 - DNA, 25 bp, Homo sapien
tctccccatagtagcactgctgaaa

SEQ ID NO: 4167363 - DNA, 25 bp, Homo sapien
ataatgacaagaagactcatggaat

SEQ ID NO: 4167364 - DNA, 25 bp, Homo sapien
gtcctgatgtctgcctaacaagtaa

SEQ ID NO: 4167365 - DNA, 25 bp, Homo sapien
aaggcctttacacatcagtgaatat

SEQ ID NO: 4167366 - DNA, 25 bp, Homo sapien
atgggaagcccgtggtttctcccag

SEQ ID NO: 4167367 - DNA, 25 bp, Homo sapien
gacctttaggaaatggccacatccc

SEQ ID NO: 4167368 - DNA, 25 bp, Homo sapien
atctaagtgtacagggcagagaagg

SEQ ID NO: 4167369 - DNA, 25 bp, Homo sapien
ggcagagaaggtaagtctttgcatt

SEQ ID NO: 4167370 - DNA, 25 bp, Homo sapien
gagggagtacttcaggcaagctgca

SEQ ID NO: 4167371 - DNA, 25 bp, Homo sapien
agcatcctccgagattctgagtctt

SEQ ID NO: 4167372 - DNA, 25 bp, Homo sapien
ctgagcatcctccgagattctgagt

SEQ ID NO: 4167373 - DNA, 25 bp, Homo sapien
tactctgtcctaggggcagatgggc

SEQ ID NO: 4167374 - DNA, 25 bp, Homo sapien
ctgttactctgtcctaggggcagat

SEQ ID NO: 4167375 - DNA, 25 bp, Homo sapien
tcagctctctgttttaaactctcct

SEQ ID NO: 4167376 - DNA, 25 bp, Homo sapien
cgctgtcagttctattaacagtgct

SEQ ID NO: 4167377 - DNA, 25 bp, Homo sapien
ggaatagttcacaagttgttcaaaa

SEQ ID NO: 4167378 - DNA, 25 bp, Homo sapien
tcaaagttctttgcacgactcacgc

SEQ ID NO: 4167379 - DNA, 25 bp, Homo sapien
gactgtgctcctcgtaattacccta

SEQ ID NO: 4167380 - DNA, 25 bp, Homo sapien
aataagatgcctcctagtgacaagc

SEQ ID NO: 4167381 - DNA, 25 bp, Homo sapien
taggcatcagtaggacgaaaagcac

SEQ ID NO: 4167382 - DNA, 25 bp, Homo sapien
gaaacatctgcctatgaagcttggg

SEQ ID NO: 4167383 - DNA, 25 bp, Homo sapien
tccatgctatcagagctatcgaggc

SEQ ID NO: 4167384 - DNA, 25 bp, Homo sapien
tatcgaggctcagagtatcaaaggc

SEQ ID NO: 4167385 - DNA, 25 bp, Homo sapien
gcctggtccttgtagctgtgatctg

SEQ ID NO: 4167386 - DNA, 25 bp, Homo sapien
tagagatgttgtctggtgagcaagc

SEQ ID NO: 4167387 - DNA, 25 bp, Homo sapien
tcttcagctagcaagaatccaaggg

SEQ ID NO: 4167388 - DNA, 25 bp, Homo sapien
ccattagccagtgaggagatacaaa

SEQ ID NO: 4167389 - DNA, 25 bp, Homo sapien
gaatacctgacttcatgggtggaaa

SEQ ID NO: 4167390 - DNA, 25 bp, Homo sapien
caggcatgcaggacgtataagggca

SEQ ID NO: 4167391 - DNA, 25 bp, Homo sapien
cacacatggggtcaagggaggtgca

SEQ ID NO: 4167392 - DNA, 25 bp, Homo sapien
gggtcaagggaggtgcataacaaaa

SEQ ID NO: 4167393 - DNA, 25 bp, Homo sapien
acacacacatggggtcaagggaggt

SEQ ID NO: 4167394 - DNA, 25 bp, Homo sapien
aagggaggtgcataacaaaatccaa

SEQ ID NO: 4167395 - DNA, 25 bp, Homo sapien
ttgagaatattggtttagactgaga

SEQ ID NO: 4167396 - DNA, 25 bp, Homo sapien
ccttttgagaatattggtttagact

SEQ ID NO: 4167397 - DNA, 25 bp, Homo sapien
tttgagaatattggtttagactgag

SEQ ID NO: 4167398 - DNA, 25 bp, Homo sapien
cttttgagaatattggtttagactg

SEQ ID NO: 4167399 - DNA, 25 bp, Homo sapien
tctattctagcaatatttgaagtgc

SEQ ID NO: 4167400 - DNA, 25 bp, Homo sapien
tattctagcaatatttgaagtgctg

SEQ ID NO: 4167401 - DNA, 25 bp, Homo sapien
tcttctattctagcaatatttgaag

SEQ ID NO: 4167402 - DNA, 25 bp, Homo sapien
ttctagcaatatttgaagtgctggc

SEQ ID NO: 4167403 - DNA, 25 bp, Homo sapien
agcagccgcgtcttttctgcatgag

SEQ ID NO: 4167404 - DNA, 25 bp, Homo sapien
tggattcgagcagccgcgtcttttc

SEQ ID NO: 4167405 - DNA, 25 bp, Homo sapien
cctggattcgagcagccgcgtcttt

SEQ ID NO: 4167406 - DNA, 25 bp, Homo sapien
tcgagcagccgcgtcttttctgcat

SEQ ID NO: 4167407 - DNA, 25 bp, Homo sapien
gaaaacaactcataaccatgcctgg

SEQ ID NO: 4167408 - DNA, 25 bp, Homo sapien
tcttctaactgaaggccatggtccc

SEQ ID NO: 4167409 - DNA, 25 bp, Homo sapien
acagacctccggcatgaaaatatga

SEQ ID NO: 4167410 - DNA, 25 bp, Homo sapien
taaggaggagtattgtctgatgcca

SEQ ID NO: 4167411 - DNA, 25 bp, Homo sapien
ctattaacttctgcctctggctagt

SEQ ID NO: 4167412 - DNA, 25 bp, Homo sapien
ttctattaacttctgcctctggcta

SEQ ID NO: 4167413 - DNA, 25 bp, Homo sapien
cttcctgtaatcgtttttccaggat

SEQ ID NO: 4167414 - DNA, 25 bp, Homo sapien
tctattaacttctgcctctggctag

SEQ ID NO: 4167415 - DNA, 25 bp, Homo sapien
ccaggaaagcatcctcagacacaga

SEQ ID NO: 4167416 - DNA, 25 bp, Homo sapien
tgctaatgctcagtgcccaggaaag

SEQ ID NO: 4167417 - DNA, 25 bp, Homo sapien
tcttaacccttacatgtcaagtgct

SEQ ID NO: 4167418 - DNA, 25 bp, Homo sapien
tatgcattcagattgaccgaccaac

SEQ ID NO: 4167419 - DNA, 25 bp, Homo sapien
tggaaaagtgcaaaacccattgcat

SEQ ID NO: 4167420 - DNA, 25 bp, Homo sapien
acaggtgtcaatattgtggccagca

SEQ ID NO: 4167421 - DNA, 25 bp, Homo sapien
tacatggctccgcaaatcaaagtct

SEQ ID NO: 4167422 - DNA, 25 bp, Homo sapien
gagaatgttcgcttgttccgatcaa

SEQ ID NO: 4167423 - DNA, 25 bp, Homo sapien
aaagtcttccttccggacaggcagg

SEQ ID NO: 4167424 - DNA, 25 bp, Homo sapien
tataaacataacctgacctcactgg

SEQ ID NO: 4167425 - DNA, 25 bp, Homo sapien
cctggtgatgctcataaatactgac

SEQ ID NO: 4167426 - DNA, 25 bp, Homo sapien
tactgacagtcaccccaaaacaggg

SEQ ID NO: 4167427 - DNA, 25 bp, Homo sapien
ggtagggtatgtttcttgtcagcca

SEQ ID NO: 4167428 - DNA, 25 bp, Homo sapien
tcacctggccgatagatgagagaat

SEQ ID NO: 4167429 - DNA, 25 bp, Homo sapien
gcagttggccaggtcatgaaaccac

SEQ ID NO: 4167430 - DNA, 25 bp, Homo sapien
taactggaacctcacccaaagagct

SEQ ID NO: 4167431 - DNA, 25 bp, Homo sapien
tttacatgggtctgaagcttggagc

SEQ ID NO: 4167432 - DNA, 25 bp, Homo sapien
taagattaattcagagaacttgggc

SEQ ID NO: 4167433 - DNA, 25 bp, Homo sapien
ttcagagaacttgggctagtgcatg

SEQ ID NO: 4167434 - DNA, 25 bp, Homo sapien
gttaaatactttatcgccactgagg

SEQ ID NO: 4167435 - DNA, 25 bp, Homo sapien
ctgcaaagacagataagtgttaaat

SEQ ID NO: 4167436 - DNA, 25 bp, Homo sapien
aatagacttcttcaatggcttgaaa

SEQ ID NO: 4167437 - DNA, 25 bp, Homo sapien
gcattcttgaggtgatcataataga

SEQ ID NO: 4167438 - DNA, 25 bp, Homo sapien
tcttgaggtgatcataatagacttc

SEQ ID NO: 4167439 - DNA, 25 bp, Homo sapien
taatagacttcttcaatggcttgaa

SEQ ID NO: 4167440 - DNA, 25 bp, Homo sapien
tagccctactaggacttgctcacga

SEQ ID NO: 4167441 - DNA, 25 bp, Homo sapien
tttgtaaagctctagcagggtacct

SEQ ID NO: 4167442 - DNA, 25 bp, Homo sapien
gcagagtcgtttcgcagggtttccc

SEQ ID NO: 4167443 - DNA, 25 bp, Homo sapien
gcttctttttagaaccctggcagag

SEQ ID NO: 4167444 - DNA, 25 bp, Homo sapien
tagattctgtcatgagtcttgacgc

SEQ ID NO: 4167445 - DNA, 25 bp, Homo sapien
taactataacatccatccagatccg

SEQ ID NO: 4167446 - DNA, 25 bp, Homo sapien
ccagatccgcatggcttctggcgat

SEQ ID NO: 4167447 - DNA, 25 bp, Homo sapien
gacgctaaaggtgagtaacggatta

SEQ ID NO: 4167448 - DNA, 25 bp, Homo sapien
gggatggatctgttgggttttctca

SEQ ID NO: 4167449 - DNA, 25 bp, Homo sapien
tgccctgaagtggactgttgcctca

SEQ ID NO: 4167450 - DNA, 25 bp, Homo sapien
gagtgtttacagctcaagggatgga

SEQ ID NO: 4167451 - DNA, 25 bp, Homo sapien
tcattcttgtaagagattattgccg

SEQ ID NO: 4167452 - DNA, 25 bp, Homo sapien
caaaagaattgtacccagtcaggct

SEQ ID NO: 4167453 - DNA, 25 bp, Homo sapien
tatagtagcttacaccagtggtgac

SEQ ID NO: 4167454 - DNA, 25 bp, Homo sapien
tcctatgaagagagtacagtgcaga

SEQ ID NO: 4167455 - DNA, 25 bp, Homo sapien
acagaatgcctgttgcgtaacctgg

SEQ ID NO: 4167456 - DNA, 25 bp, Homo sapien
aaaataagagatgagtttattttca

SEQ ID NO: 4167457 - DNA, 25 bp, Homo sapien
aataagagatgagtttattttcaaa

SEQ ID NO: 4167458 - DNA, 25 bp, Homo sapien
caaaataagagatgagtttattttc

SEQ ID NO: 4167459 - DNA, 25 bp, Homo sapien
aaataagagatgagtttattttcaa

SEQ ID NO: 4167460 - DNA, 25 bp, Homo sapien
tttgtaagcaataggatgtaaccag

SEQ ID NO: 4167461 - DNA, 25 bp, Homo sapien
tgtaaccagagatacttctattgga

SEQ ID NO: 4167462 - DNA, 25 bp, Homo sapien
caatatgatgtcagagtttttcagg

SEQ ID NO: 4167463 - DNA, 25 bp, Homo sapien
gtcatttgcgattaattcatcctcc

SEQ ID NO: 4167464 - DNA, 25 bp, Homo sapien
ttggatatagtgaatccagcatgtc

SEQ ID NO: 4167465 - DNA, 25 bp, Homo sapien
tgagaacctggactgttggaacagt

SEQ ID NO: 4167466 - DNA, 25 bp, Homo sapien
gcatgtctttggagtcgtgagaacc

SEQ ID NO: 4167467 - DNA, 25 bp, Homo sapien
ggcaaagtttggatatagtgaatcc

SEQ ID NO: 4167468 - DNA, 25 bp, Homo sapien
ttcgtagttgtccccgcaccctgca

SEQ ID NO: 4167469 - DNA, 25 bp, Homo sapien
tagttgtccccgcaccctgcagtgt

SEQ ID NO: 4167470 - DNA, 25 bp, Homo sapien
cgtagttgtccccgcaccctgcagt

SEQ ID NO: 4167471 - DNA, 25 bp, Homo sapien
cttcgtagttgtccccgcaccctgc

SEQ ID NO: 4167472 - DNA, 25 bp, Homo sapien
tgaggtatccgtgcaagcagcacgc

SEQ ID NO: 4167473 - DNA, 25 bp, Homo sapien
cagctccgacaaggtacccaggccg

SEQ ID NO: 4167474 - DNA, 25 bp, Homo sapien
ccgtggcgcccgctgaggtatccgt

SEQ ID NO: 4167475 - DNA, 25 bp, Homo sapien
cgtgcaagcagcacgctgaggccac

SEQ ID NO: 4167476 - DNA, 25 bp, Homo sapien
gattaaggaatgagagtgacgtctt

SEQ ID NO: 4167477 - DNA, 25 bp, Homo sapien
taaggaatgagagtgacgtcttttg

SEQ ID NO: 4167478 - DNA, 25 bp, Homo sapien
ctggtcgattaaggaatgagagtga

SEQ ID NO: 4167479 - DNA, 25 bp, Homo sapien
tcgattaaggaatgagagtgacgtc

SEQ ID NO: 4167480 - DNA, 25 bp, Homo sapien
taccattcatataagaaagatagcc

SEQ ID NO: 4167481 - DNA, 25 bp, Homo sapien
aaaactcctcaatcgccaacgcttt

SEQ ID NO: 4167482 - DNA, 25 bp, Homo sapien
gaaagatagccagggatgaagataa

SEQ ID NO: 4167483 - DNA, 25 bp, Homo sapien
cgccaacgcttttgtaccattcata

SEQ ID NO: 4167484 - DNA, 25 bp, Homo sapien
gagactgtatgaaagccaactagta

SEQ ID NO: 4167485 - DNA, 25 bp, Homo sapien
tcacaagatgcaagtttacagacca

SEQ ID NO: 4167486 - DNA, 25 bp, Homo sapien
ccagggttgtcagcgtggcacaaag

SEQ ID NO: 4167487 - DNA, 25 bp, Homo sapien
gaagtaattctccactgtaatgcta

SEQ ID NO: 4167488 - DNA, 25 bp, Homo sapien
ccttgggaaatagaacagggcaact

SEQ ID NO: 4167489 - DNA, 25 bp, Homo sapien
tgaaacgattttggatccttgggaa

SEQ ID NO: 4167490 - DNA, 25 bp, Homo sapien
tacagtagtactcacttcatcaggg

SEQ ID NO: 4167491 - DNA, 25 bp, Homo sapien
ctttcccagagcctagttcaaatga

SEQ ID NO: 4167492 - DNA, 25 bp, Homo sapien
catcagctaagtcatcaattataga

SEQ ID NO: 4167493 - DNA, 25 bp, Homo sapien
ggcccatcagctaagtcatcaatta

SEQ ID NO: 4167494 - DNA, 25 bp, Homo sapien
tgagttaccatctgaacttccaact

SEQ ID NO: 4167495 - DNA, 25 bp, Homo sapien
ctgtggcccatcagctaagtcatca

SEQ ID NO: 4167496 - DNA, 25 bp, Homo sapien
gcagctgtagctacaccaataagag

SEQ ID NO: 4167497 - DNA, 25 bp, Homo sapien
gcaattgcagcatgaagcataagcc

SEQ ID NO: 4167498 - DNA, 25 bp, Homo sapien
gaccttctctggtcgtgcaattgca

SEQ ID NO: 4167499 - DNA, 25 bp, Homo sapien
tgtcactaaggtatctgcagctgta

SEQ ID NO: 4167500 - DNA, 25 bp, Homo sapien
ggaactgaggctgcttttaggctaa

SEQ ID NO: 4167501 - DNA, 25 bp, Homo sapien
gactgacaatatctgtctggagagt

SEQ ID NO: 4167502 - DNA, 25 bp, Homo sapien
ctgctagcctagggaccatattttt

SEQ ID NO: 4167503 - DNA, 25 bp, Homo sapien
ctgattcagggtaaaacccaagaat

SEQ ID NO: 4167504 - DNA, 25 bp, Homo sapien
agagtattttgatggcatgctccac

SEQ ID NO: 4167505 - DNA, 25 bp, Homo sapien
tgtactgaacgttataaactccttc

SEQ ID NO: 4167506 - DNA, 25 bp, Homo sapien
ctgtactgaacgttataaactcctt

SEQ ID NO: 4167507 - DNA, 25 bp, Homo sapien
ccttcttcagagtattttgatggca

SEQ ID NO: 4167508 - DNA, 25 bp, Homo sapien
tcatgccatggagcaatcttatggg

SEQ ID NO: 4167509 - DNA, 25 bp, Homo sapien
tgtgttttcggaggatgacatccac

SEQ ID NO: 4167510 - DNA, 25 bp, Homo sapien
tgagtactcgatcggcaacctgcat

SEQ ID NO: 4167511 - DNA, 25 bp, Homo sapien
tgtatgccaaggtacaatgtcatcc

SEQ ID NO: 4167512 - DNA, 25 bp, Homo sapien
ttatccctcttccaatcttctggat

SEQ ID NO: 4167513 - DNA, 25 bp, Homo sapien
gtttacataccaactaaacatgtga

SEQ ID NO: 4167514 - DNA, 25 bp, Homo sapien
tcttcacaatttgcattacttatgc

SEQ ID NO: 4167515 - DNA, 25 bp, Homo sapien
aaacctaaagtatcaggatctttca

SEQ ID NO: 4167516 - DNA, 25 bp, Homo sapien
caattaagagctggcatagctaaca

SEQ ID NO: 4167517 - DNA, 25 bp, Homo sapien
gaagtaatgttacaaatttctgtct

SEQ ID NO: 4167518 - DNA, 25 bp, Homo sapien
taaagtattatccttattgtgaact

SEQ ID NO: 4167519 - DNA, 25 bp, Homo sapien
tcctaattagaaaaggatgcaatta

SEQ ID NO: 4167520 - DNA, 25 bp, Homo sapien
gaatcctccgccagtggaatcacag

SEQ ID NO: 4167521 - DNA, 25 bp, Homo sapien
tctaaggttaagtagtcaggtcggc

SEQ ID NO: 4167522 - DNA, 25 bp, Homo sapien
gctggtcacaaaggtagtctctgcc

SEQ ID NO: 4167523 - DNA, 25 bp, Homo sapien
gaacgtcttctgatttaggtggcaa

SEQ ID NO: 4167524 - DNA, 25 bp, Homo sapien
tcgcgcctggaagaatggcacattg

SEQ ID NO: 4167525 - DNA, 25 bp, Homo sapien
ttctaccaactgtccatctgtcggg

SEQ ID NO: 4167526 - DNA, 25 bp, Homo sapien
gacagccgattgtctacgaggccag

SEQ ID NO: 4167527 - DNA, 25 bp, Homo sapien
tcaaccagggccgttgctaagagcc

SEQ ID NO: 4167528 - DNA, 25 bp, Homo sapien
agaaaagcacagctacccgccagta

SEQ ID NO: 4167529 - DNA, 25 bp, Homo sapien
tacccgccagtaactctagaataaa

SEQ ID NO: 4167530 - DNA, 25 bp, Homo sapien
ctatcccgcctatcaatgagaccag

SEQ ID NO: 4167531 - DNA, 25 bp, Homo sapien
tatcaatgagaccagatgatataac

SEQ ID NO: 4167532 - DNA, 25 bp, Homo sapien
gcgtggtttaaatcaaggagccaat

SEQ ID NO: 4167533 - DNA, 25 bp, Homo sapien
tttaaatcaaggagccaatgaagcc

SEQ ID NO: 4167534 - DNA, 25 bp, Homo sapien
gggcgtggtttaaatcaaggagcca

SEQ ID NO: 4167535 - DNA, 25 bp, Homo sapien
tcaaggagccaatgaagccaatggg

SEQ ID NO: 4167536 - DNA, 25 bp, Homo sapien
gaagagaagacacgcgcggcatcca

SEQ ID NO: 4167537 - DNA, 25 bp, Homo sapien
aagaagagaagacacgcgcggcatc

SEQ ID NO: 4167538 - DNA, 25 bp, Homo sapien
acgcgcggcatccacacaatagcag

SEQ ID NO: 4167539 - DNA, 25 bp, Homo sapien
agacacgcgcggcatccacacaata

SEQ ID NO: 4167540 - DNA, 25 bp, Homo sapien
tgcacctctcggcttaagccatagc

SEQ ID NO: 4167541 - DNA, 25 bp, Homo sapien
ttaagccatagctcgggcccctgtt

SEQ ID NO: 4167542 - DNA, 25 bp, Homo sapien
gcgggtgctctatgtcctcggcgca

SEQ ID NO: 4167543 - DNA, 25 bp, Homo sapien
cactgcaggatgatccagtccacca

SEQ ID NO: 4167544 - DNA, 25 bp, Homo sapien
ggtctccgcagcttttaggaactgg

SEQ ID NO: 4167545 - DNA, 25 bp, Homo sapien
ggttctgacaccataggtctccgca

SEQ ID NO: 4167546 - DNA, 25 bp, Homo sapien
tatgggctcttgtcctggtgggtat

SEQ ID NO: 4167547 - DNA, 25 bp, Homo sapien
gactctgagatcttgggtatgggct

SEQ ID NO: 4167548 - DNA, 25 bp, Homo sapien
taggttagggtatatcactcatctc

SEQ ID NO: 4167549 - DNA, 25 bp, Homo sapien
tctgtaattgtcaccatataatggg

SEQ ID NO: 4167550 - DNA, 25 bp, Homo sapien
gcagtgaactattaaagggaaccta

SEQ ID NO: 4167551 - DNA, 25 bp, Homo sapien
gagaggacttgctcttaggcagtga

SEQ ID NO: 4167552 - DNA, 25 bp, Homo sapien
gatagtcccccagactcaaggaata

SEQ ID NO: 4167553 - DNA, 25 bp, Homo sapien
gataaaatgctgtcaatggatagtc

SEQ ID NO: 4167554 - DNA, 25 bp, Homo sapien
gactggttggtgaatacaaggataa

SEQ ID NO: 4167555 - DNA, 25 bp, Homo sapien
aaaatgctgtcaatggatagtcccc

SEQ ID NO: 4167556 - DNA, 25 bp, Homo sapien
ggaaaggcagatggaaagtgagaat

SEQ ID NO: 4167557 - DNA, 25 bp, Homo sapien
cagatggaaagtgagaatggagtat

SEQ ID NO: 4167558 - DNA, 25 bp, Homo sapien
aaggcagatggaaagtgagaatgga

SEQ ID NO: 4167559 - DNA, 25 bp, Homo sapien
atacagaattacaggggaaaggcag

SEQ ID NO: 4167560 - DNA, 25 bp, Homo sapien
gggcaaatattaaggctctctttag

SEQ ID NO: 4167561 - DNA, 25 bp, Homo sapien
gcaaatattaaggctctctttagac

SEQ ID NO: 4167562 - DNA, 25 bp, Homo sapien
ggcaaatattaaggctctctttaga

SEQ ID NO: 4167563 - DNA, 25 bp, Homo sapien
gtgaaccgtctgcagttttttggcc

SEQ ID NO: 4167564 - DNA, 25 bp, Homo sapien
tgacctgtcctaaactgagaagatg

SEQ ID NO: 4167565 - DNA, 25 bp, Homo sapien
acaactggcttgtgtgtgacagaga

SEQ ID NO: 4167566 - DNA, 25 bp, Homo sapien
gagccctgttacctaagcagcccag

SEQ ID NO: 4167567 - DNA, 25 bp, Homo sapien
cagcccagtgaccattaacccatgg

SEQ ID NO: 4167568 - DNA, 25 bp, Homo sapien
tgactgcaacgctgcctaaagccat

SEQ ID NO: 4167569 - DNA, 25 bp, Homo sapien
aacgctgcctaaagccatcagggtc

SEQ ID NO: 4167570 - DNA, 25 bp, Homo sapien
ggatggctctccccgatagcagcca

SEQ ID NO: 4167571 - DNA, 25 bp, Homo sapien
ccttggtgactgcaacgctgcctaa

SEQ ID NO: 4167572 - DNA, 25 bp, Homo sapien
tactgggacaacatagatattaacc

SEQ ID NO: 4167573 - DNA, 25 bp, Homo sapien
taatcaattatttgccacagggcac

SEQ ID NO: 4167574 - DNA, 25 bp, Homo sapien
tataatttgtcatccggactaggac

SEQ ID NO: 4167575 - DNA, 25 bp, Homo sapien
gactaggacgctgttgagagtgaaa

SEQ ID NO: 4167576 - DNA, 25 bp, Homo sapien
gtagccacatgggaacacggtagtt

SEQ ID NO: 4167577 - DNA, 25 bp, Homo sapien
tatgcaattagacaggctctgctgg

SEQ ID NO: 4167578 - DNA, 25 bp, Homo sapien
gagccgtggcgctactctgagctat

SEQ ID NO: 4167579 - DNA, 25 bp, Homo sapien
ccagaattccagcaaagagtagggc

SEQ ID NO: 4167580 - DNA, 25 bp, Homo sapien
ctggcgaagctgctcctcggaaaag

SEQ ID NO: 4167581 - DNA, 25 bp, Homo sapien
ccatctgcaggcctattacgttctg

SEQ ID NO: 4167582 - DNA, 25 bp, Homo sapien
ggcctattacgttctgtccctggcg

SEQ ID NO: 4167583 - DNA, 25 bp, Homo sapien
gcgaagctgctcctcggaaaagcct

SEQ ID NO: 4167584 - DNA, 25 bp, Homo sapien
agaccatggtgtggaacattcgtcc

SEQ ID NO: 4167585 - DNA, 25 bp, Homo sapien
ggtcagaaggtgactaactatttct

SEQ ID NO: 4167586 - DNA, 25 bp, Homo sapien
cagaaggtgactaactatttctttt

SEQ ID NO: 4167587 - DNA, 25 bp, Homo sapien
tgtggaacattcgtcctctctacca

SEQ ID NO: 4167588 - DNA, 25 bp, Homo sapien
ggcagcagtaggcaacgcggattct

SEQ ID NO: 4167589 - DNA, 25 bp, Homo sapien
ttctcggcggaaatgcagcacttgc

SEQ ID NO: 4167590 - DNA, 25 bp, Homo sapien
cacttgcaaaaaccagggacagaag

SEQ ID NO: 4167591 - DNA, 25 bp, Homo sapien
cagcacttgcaaaaaccagggacag

SEQ ID NO: 4167592 - DNA, 25 bp, Homo sapien
aaacggaagcggagtctttgcatag

SEQ ID NO: 4167593 - DNA, 25 bp, Homo sapien
tactttattaggtgcattctataag

SEQ ID NO: 4167594 - DNA, 25 bp, Homo sapien
agctcaggaaaacggaagcggagtc

SEQ ID NO: 4167595 - DNA, 25 bp, Homo sapien
aagttgaagaggagaatttttggca

SEQ ID NO: 4167596 - DNA, 25 bp, Homo sapien
tcactagaagtccttgatgacactc

SEQ ID NO: 4167597 - DNA, 25 bp, Homo sapien
aaatccccttactcagagatacagg

SEQ ID NO: 4167598 - DNA, 25 bp, Homo sapien
gacactcgcctacagttagccacag

SEQ ID NO: 4167599 - DNA, 25 bp, Homo sapien
gtccttgatgacactcgcctacagt

SEQ ID NO: 4167600 - DNA, 25 bp, Homo sapien
aaatggcagcccttttgttcagtcc

SEQ ID NO: 4167601 - DNA, 25 bp, Homo sapien
gcctggcattcgagatttcctcagt

SEQ ID NO: 4167602 - DNA, 25 bp, Homo sapien
agatgtgaacaaatgccctagaacc

SEQ ID NO: 4167603 - DNA, 25 bp, Homo sapien
tgcccttaaaaagctctcattggag

SEQ ID NO: 4167604 - DNA, 25 bp, Homo sapien
caatggccgggtacatgctgatgtt

SEQ ID NO: 4167605 - DNA, 25 bp, Homo sapien
ccatcataagcagtttagaagacgg

SEQ ID NO: 4167606 - DNA, 25 bp, Homo sapien
tatgaccaaagacaatcgcaatggc

SEQ ID NO: 4167607 - DNA, 25 bp, Homo sapien
aagacggtggagagatttctatttc

SEQ ID NO: 4167608 - DNA, 25 bp, Homo sapien
gattccatcggccagcagagctcat

SEQ ID NO: 4167609 - DNA, 25 bp, Homo sapien
cacagggtgtcgttggcaccgcctg

SEQ ID NO: 4167610 - DNA, 25 bp, Homo sapien
gtgtcgttggcaccgcctggtaact

SEQ ID NO: 4167611 - DNA, 25 bp, Homo sapien
tggtaactggtgattccatcggcca

SEQ ID NO: 4167612 - DNA, 25 bp, Homo sapien
tgggcactgggtgtcaacagaaagc

SEQ ID NO: 4167613 - DNA, 25 bp, Homo sapien
tctgaattagatccatggtgggaag

SEQ ID NO: 4167614 - DNA, 25 bp, Homo sapien
tggaacctcatcaccctgtgggcac

SEQ ID NO: 4167615 - DNA, 25 bp, Homo sapien
gcagtcagtcctcagtaaacctggg

SEQ ID NO: 4167616 - DNA, 25 bp, Homo sapien
ggtgcggctgaaacatcgctgtttt

SEQ ID NO: 4167617 - DNA, 25 bp, Homo sapien
caggtgcggctgaaacatcgctgtt

SEQ ID NO: 4167618 - DNA, 25 bp, Homo sapien
gcggctgaaacatcgctgttttctt

SEQ ID NO: 4167619 - DNA, 25 bp, Homo sapien
gctgaaacatcgctgttttctttgt

SEQ ID NO: 4167620 - DNA, 25 bp, Homo sapien
ggcaacggtggtcgtctcactggca

SEQ ID NO: 4167621 - DNA, 25 bp, Homo sapien
ctggcaacggtggtcgtctcactgg

SEQ ID NO: 4167622 - DNA, 25 bp, Homo sapien
aacggtggtcgtctcactggcagct

SEQ ID NO: 4167623 - DNA, 25 bp, Homo sapien
tgaccacttggactgagatattgga

SEQ ID NO: 4167624 - DNA, 25 bp, Homo sapien
ctttgccaatgggtctttgtggtgg

SEQ ID NO: 4167625 - DNA, 25 bp, Homo sapien
ttggctttgccaatgggtctttgtg

SEQ ID NO: 4167626 - DNA, 25 bp, Homo sapien
ccacagaagtgtccaggctatgact

SEQ ID NO: 4167627 - DNA, 25 bp, Homo sapien
gctatgactgctaggatgaataaaa

SEQ ID NO: 4167628 - DNA, 25 bp, Homo sapien
tcggtattcgggaagaaactcaatg

SEQ ID NO: 4167629 - DNA, 25 bp, Homo sapien
gatgcgaaacatcccagcaaagtaa

SEQ ID NO: 4167630 - DNA, 25 bp, Homo sapien
cacttgctgcacagtccgtgacact

SEQ ID NO: 4167631 - DNA, 25 bp, Homo sapien
aaactcaatgttggtgatgcgaaac

SEQ ID NO: 4167632 - DNA, 25 bp, Homo sapien
agcactattgtctttgatgtgccct

SEQ ID NO: 4167633 - DNA, 25 bp, Homo sapien
ttcaataagtaaaagctgctctgag

SEQ ID NO: 4167634 - DNA, 25 bp, Homo sapien
cactattgtctttgatgtgccctct

SEQ ID NO: 4167635 - DNA, 25 bp, Homo sapien
gcactattgtctttgatgtgccctc

SEQ ID NO: 4167636 - DNA, 25 bp, Homo sapien
tttcacctataaagtggtaatcaaa

SEQ ID NO: 4167637 - DNA, 25 bp, Homo sapien
gttgcctaaacctgtttaggcagga

SEQ ID NO: 4167638 - DNA, 25 bp, Homo sapien
tttttcacctataaagtggtaatca

SEQ ID NO: 4167639 - DNA, 25 bp, Homo sapien
tcacctataaagtggtaatcaaaac

SEQ ID NO: 4167640 - DNA, 25 bp, Homo sapien
gacatctgcaacaacagactgctca

SEQ ID NO: 4167641 - DNA, 25 bp, Homo sapien
cagatgttgtataaaccaggtttat

SEQ ID NO: 4167642 - DNA, 25 bp, Homo sapien
ctgcaacaacagactgctcataaaa

SEQ ID NO: 4167643 - DNA, 25 bp, Homo sapien
ctcataaaatttggagaaggcagat

SEQ ID NO: 4167644 - DNA, 25 bp, Homo sapien
agatggcggcaacacagtcttcaca

SEQ ID NO: 4167645 - DNA, 25 bp, Homo sapien
tccccacagaggtccggtttatgat

SEQ ID NO: 4167646 - DNA, 25 bp, Homo sapien
gcacgtggcatgacaaaaacaatcc

SEQ ID NO: 4167647 - DNA, 25 bp, Homo sapien
caaaagtggacaaggaggccgcctt

SEQ ID NO: 4167648 - DNA, 25 bp, Homo sapien
tatggttgacgagtaatccgaccga

SEQ ID NO: 4167649 - DNA, 25 bp, Homo sapien
ttgacgagtaatccgaccgaagccc

SEQ ID NO: 4167650 - DNA, 25 bp, Homo sapien
cagatcctatggttgacgagtaatc

SEQ ID NO: 4167651 - DNA, 25 bp, Homo sapien
tcctatggttgacgagtaatccgac

SEQ ID NO: 4167652 - DNA, 25 bp, Homo sapien
ttattttagatcctagactcaacca

SEQ ID NO: 4167653 - DNA, 25 bp, Homo sapien
tcttttgtgcttaaggcagtttgaa

SEQ ID NO: 4167654 - DNA, 25 bp, Homo sapien
taacgccagcacactccatgtatgt

SEQ ID NO: 4167655 - DNA, 25 bp, Homo sapien
tgtatgtcccacttacatgagccag

SEQ ID NO: 4167656 - DNA, 25 bp, Homo sapien
caagagcaatcaggaaatacgtgga

SEQ ID NO: 4167657 - DNA, 25 bp, Homo sapien
tcagaggtgggcacataacccaggc

SEQ ID NO: 4167658 - DNA, 25 bp, Homo sapien
tcatgtgaaggacatatggccagcc

SEQ ID NO: 4167659 - DNA, 25 bp, Homo sapien
gaataggcatgtcagtcaatccaga

SEQ ID NO: 4167660 - DNA, 25 bp, Homo sapien
tggagacagcaccattttcctttat

SEQ ID NO: 4167661 - DNA, 25 bp, Homo sapien
agacagcaccattttcctttatttt

SEQ ID NO: 4167662 - DNA, 25 bp, Homo sapien
ctgtggagacagcaccattttcctt

SEQ ID NO: 4167663 - DNA, 25 bp, Homo sapien
tgtggagacagcaccattttccttt

SEQ ID NO: 4167664 - DNA, 25 bp, Homo sapien
tgcatagaagtactgagagcagcct

SEQ ID NO: 4167665 - DNA, 25 bp, Homo sapien
gcatagaagtactgagagcagcctt

SEQ ID NO: 4167666 - DNA, 25 bp, Homo sapien
atagaagtactgagagcagcctttg

SEQ ID NO: 4167667 - DNA, 25 bp, Homo sapien
ctgcatagaagtactgagagcagcc

SEQ ID NO: 4167668 - DNA, 25 bp, Homo sapien
tcggcttcgatttggatggacttga

SEQ ID NO: 4167669 - DNA, 25 bp, Homo sapien
gagacgaatcaggtagcccactatg

SEQ ID NO: 4167670 - DNA, 25 bp, Homo sapien
gcccactatggccaccagcttgaag

SEQ ID NO: 4167671 - DNA, 25 bp, Homo sapien
tgaggctgcagaaatctccagcggg

SEQ ID NO: 4167672 - DNA, 25 bp, Homo sapien
tgctgctccggatgggcaaaaggga

SEQ ID NO: 4167673 - DNA, 25 bp, Homo sapien
ggcaaaagggagtcgtaaatggtca

SEQ ID NO: 4167674 - DNA, 25 bp, Homo sapien
agtcgtaaatggtcagggagtcagt

SEQ ID NO: 4167675 - DNA, 25 bp, Homo sapien
cgtaaatggtcagggagtcagtgac

SEQ ID NO: 4167676 - DNA, 25 bp, Homo sapien
accaagaagagtacctgcatcgtac

SEQ ID NO: 4167677 - DNA, 25 bp, Homo sapien
ccaccaagaagagtacctgcatcgt

SEQ ID NO: 4167678 - DNA, 25 bp, Homo sapien
caccaagaagagtacctgcatcgta

SEQ ID NO: 4167679 - DNA, 25 bp, Homo sapien
tatatgaggagacttaaatgtcacc

SEQ ID NO: 4167680 - DNA, 25 bp, Homo sapien
caccaacatgagattatttgtagaa

SEQ ID NO: 4167681 - DNA, 25 bp, Homo sapien
gacctcaaaatatgcccggattcct

SEQ ID NO: 4167682 - DNA, 25 bp, Homo sapien
tcctgagagcctccgtatatgagga

SEQ ID NO: 4167683 - DNA, 25 bp, Homo sapien
tagtagctcgggtaatatgggcttg

SEQ ID NO: 4167684 - DNA, 25 bp, Homo sapien
cattttggaggatagtagctcgggt

SEQ ID NO: 4167685 - DNA, 25 bp, Homo sapien
ttccaggtacacttgcattttggag

SEQ ID NO: 4167686 - DNA, 25 bp, Homo sapien
ggtacacttgcattttggaggatag

SEQ ID NO: 4167687 - DNA, 25 bp, Homo sapien
ctcagatgagcagtgaaagtttctg

SEQ ID NO: 4167688 - DNA, 25 bp, Homo sapien
cagatgagcagtgaaagtttctgtg

SEQ ID NO: 4167689 - DNA, 25 bp, Homo sapien
agatgagcagtgaaagtttctgtgg

SEQ ID NO: 4167690 - DNA, 25 bp, Homo sapien
tcagatgagcagtgaaagtttctgt

SEQ ID NO: 4167691 - DNA, 25 bp, Homo sapien
gctcattaatttcccaccatccatg

SEQ ID NO: 4167692 - DNA, 25 bp, Homo sapien
tttcagtgctatgccaagagttgat

SEQ ID NO: 4167693 - DNA, 25 bp, Homo sapien
ctttcatactcttcttggttattga

SEQ ID NO: 4167694 - DNA, 25 bp, Homo sapien
tattgaatagttatagaatttcagt

SEQ ID NO: 4167695 - DNA, 25 bp, Homo sapien
gttgactgatgttgtaactgccata

SEQ ID NO: 4167696 - DNA, 25 bp, Homo sapien
gctgggcactcgaaaaattgtctga

SEQ ID NO: 4167697 - DNA, 25 bp, Homo sapien
ccaaaagtggcttgtctgaaagcct

SEQ ID NO: 4167698 - DNA, 25 bp, Homo sapien
tgtctgatgatccatgtaggagcca

SEQ ID NO: 4167699 - DNA, 25 bp, Homo sapien
taatgatccattccctgattcaaga

SEQ ID NO: 4167700 - DNA, 25 bp, Homo sapien
tcattcccgatcttgaatcattcat

SEQ ID NO: 4167701 - DNA, 25 bp, Homo sapien
gagttcgtaggtaaacattagagaa

SEQ ID NO: 4167702 - DNA, 25 bp, Homo sapien
tcctcttcaaccaggcttctgatta

SEQ ID NO: 4167703 - DNA, 25 bp, Homo sapien
ctgagggacacataaaccggaggag

SEQ ID NO: 4167704 - DNA, 25 bp, Homo sapien
gggacacataaaccggaggagcatc

SEQ ID NO: 4167705 - DNA, 25 bp, Homo sapien
aaaccggaggagcatctaaaagatc

SEQ ID NO: 4167706 - DNA, 25 bp, Homo sapien
cacataaaccggaggagcatctaaa

SEQ ID NO: 4167707 - DNA, 25 bp, Homo sapien
agcagtcatttactccatcacaacg

SEQ ID NO: 4167708 - DNA, 25 bp, Homo sapien
agtcatttactccatcacaacgctg

SEQ ID NO: 4167709 - DNA, 25 bp, Homo sapien
aaagcagtcatttactccatcacaa

SEQ ID NO: 4167710 - DNA, 25 bp, Homo sapien
catttactccatcacaacgctgggc

SEQ ID NO: 4167711 - DNA, 25 bp, Homo sapien
catcccggccattctcacagtccct

SEQ ID NO: 4167712 - DNA, 25 bp, Homo sapien
gcagttttgctcatcccggccattc

SEQ ID NO: 4167713 - DNA, 25 bp, Homo sapien
agttttgctcatcccggccattctc

SEQ ID NO: 4167714 - DNA, 25 bp, Homo sapien
gctcatcccggccattctcacagtc

SEQ ID NO: 4167715 - DNA, 25 bp, Homo sapien
agcaaatatcattgccacacttaaa

SEQ ID NO: 4167716 - DNA, 25 bp, Homo sapien
atatcattgccacacttaaaagttc

SEQ ID NO: 4167717 - DNA, 25 bp, Homo sapien
cacttaaaagttctgttgttgcatg

SEQ ID NO: 4167718 - DNA, 25 bp, Homo sapien
cttaaaagttctgttgttgcatgga

SEQ ID NO: 4167719 - DNA, 25 bp, Homo sapien
ctgggaactgactcactaggtagca

SEQ ID NO: 4167720 - DNA, 25 bp, Homo sapien
aagggcatgtgatttaaaggtagac

SEQ ID NO: 4167721 - DNA, 25 bp, Homo sapien
gactcactaggtagcaatttgaaat

SEQ ID NO: 4167722 - DNA, 25 bp, Homo sapien
tggagaaagggcatgtgatttaaag

SEQ ID NO: 4167723 - DNA, 25 bp, Homo sapien
cagggtgtctgtgcctccgatgatg

SEQ ID NO: 4167724 - DNA, 25 bp, Homo sapien
ctgtgcctccgatgatgcggtgaag

SEQ ID NO: 4167725 - DNA, 25 bp, Homo sapien
ggtgtctgtgcctccgatgatgcgg

SEQ ID NO: 4167726 - DNA, 25 bp, Homo sapien
gtctgtgcctccgatgatgcggtga

SEQ ID NO: 4167727 - DNA, 25 bp, Homo sapien
cagatccaacaaagtggaggctgac

SEQ ID NO: 4167728 - DNA, 25 bp, Homo sapien
gatgactgaggcaccacagtaggca

SEQ ID NO: 4167729 - DNA, 25 bp, Homo sapien
acagtaggcagatccaacaaagtgg

SEQ ID NO: 4167730 - DNA, 25 bp, Homo sapien
actccctggagatgactgaggcacc

SEQ ID NO: 4167731 - DNA, 25 bp, Homo sapien
cagtccatggtgtgggatctgacag

SEQ ID NO: 4167732 - DNA, 25 bp, Homo sapien
gactgttatagtactcgtggaccac

SEQ ID NO: 4167733 - DNA, 25 bp, Homo sapien
tacatcccgaggtgtgcagtccatg

SEQ ID NO: 4167734 - DNA, 25 bp, Homo sapien
ggagacaaacttggcattcccctga

SEQ ID NO: 4167735 - DNA, 25 bp, Homo sapien
gagcatccgagaagtgatgatcccg

SEQ ID NO: 4167736 - DNA, 25 bp, Homo sapien
cgcttgctgcagaacgagggagcct

SEQ ID NO: 4167737 - DNA, 25 bp, Homo sapien
gatgatcccgtaggtggaaacacag

SEQ ID NO: 4167738 - DNA, 25 bp, Homo sapien
aacacagagcgtttgatcaatgagc

SEQ ID NO: 4167739 - DNA, 25 bp, Homo sapien
caccaggaaagtttggtcgtccact

SEQ ID NO: 4167740 - DNA, 25 bp, Homo sapien
cactttttcttcgacaagataaagg

SEQ ID NO: 4167741 - DNA, 25 bp, Homo sapien
catgtccccagctaacaatgccagt

SEQ ID NO: 4167742 - DNA, 25 bp, Homo sapien
gctaacaatgccagtcaaaatccat

SEQ ID NO: 4167743 - DNA, 25 bp, Homo sapien
tatgaatccagggaacaaagtttga

SEQ ID NO: 4167744 - DNA, 25 bp, Homo sapien
catatttatgaatccagggaacaaa

SEQ ID NO: 4167745 - DNA, 25 bp, Homo sapien
gaatccagggaacaaagtttgacac

SEQ ID NO: 4167746 - DNA, 25 bp, Homo sapien
acatatttatgaatccagggaacaa

SEQ ID NO: 4167747 - DNA, 25 bp, Homo sapien
tatttttaacataaatcacagtaaa

SEQ ID NO: 4167748 - DNA, 25 bp, Homo sapien
tctatttttaacataaatcacagta

SEQ ID NO: 4167749 - DNA, 25 bp, Homo sapien
atcacagtaaaaatacaactggtac

SEQ ID NO: 4167750 - DNA, 25 bp, Homo sapien
cacagtaaaaatacaactggtacaa

SEQ ID NO: 4167751 - DNA, 25 bp, Homo sapien
ctcattttattagtaattattgcat

SEQ ID NO: 4167752 - DNA, 25 bp, Homo sapien
gctccaacaggtggatcttgcaaga

SEQ ID NO: 4167753 - DNA, 25 bp, Homo sapien
tgctccaacaggtggatcttgcaag

SEQ ID NO: 4167754 - DNA, 25 bp, Homo sapien
ctccaacaggtggatcttgcaagaa

SEQ ID NO: 4167755 - DNA, 25 bp, Homo sapien
tctgctccaacaggtggatcttgca

SEQ ID NO: 4167756 - DNA, 25 bp, Homo sapien
tcagggcgctgcctgctatgccttt

SEQ ID NO: 4167757 - DNA, 25 bp, Homo sapien
tccatgtgccggcagggaaagtctg

SEQ ID NO: 4167758 - DNA, 25 bp, Homo sapien
ttctggctgccgctcgagcaccgag

SEQ ID NO: 4167759 - DNA, 25 bp, Homo sapien
gagagctccagctcgtctactggct

SEQ ID NO: 4167760 - DNA, 25 bp, Homo sapien
attcagagcactcgagcgcgcccca

SEQ ID NO: 4167761 - DNA, 25 bp, Homo sapien
cggtgactcggctccattcagagca

SEQ ID NO: 4167762 - DNA, 25 bp, Homo sapien
actgctcgggccgaaaggtgtcgcg

SEQ ID NO: 4167763 - DNA, 25 bp, Homo sapien
gccaggcccgggtcctactactgtc

SEQ ID NO: 4167764 - DNA, 25 bp, Homo sapien
actgccctgtccggtttcaggttca

SEQ ID NO: 4167765 - DNA, 25 bp, Homo sapien
tgactgccctgtccggtttcaggtt

SEQ ID NO: 4167766 - DNA, 25 bp, Homo sapien
tgccctgtccggtttcaggttcaaa

SEQ ID NO: 4167767 - DNA, 25 bp, Homo sapien
actgactgccctgtccggtttcagg

SEQ ID NO: 4167768 - DNA, 25 bp, Homo sapien
ttgcatcttccaaccacattcttat

SEQ ID NO: 4167769 - DNA, 25 bp, Homo sapien
tgtaatgacacctaggaaaatggag

SEQ ID NO: 4167770 - DNA, 25 bp, Homo sapien
taatgacacctaggaaaatggaggt

SEQ ID NO: 4167771 - DNA, 25 bp, Homo sapien
ctgtaatgacacctaggaaaatgga

SEQ ID NO: 4167772 - DNA, 25 bp, Homo sapien
actgtaatgacacctaggaaaatgg

SEQ ID NO: 4167773 - DNA, 25 bp, Homo sapien
cctttcggtgagcaggtgaggcaat

SEQ ID NO: 4167774 - DNA, 25 bp, Homo sapien
ttcagcaacacactcctctggaatc

SEQ ID NO: 4167775 - DNA, 25 bp, Homo sapien
cagcaacacactcctctggaatctt

SEQ ID NO: 4167776 - DNA, 25 bp, Homo sapien
gcaggtgaggcaattcctcttcagc

SEQ ID NO: 4167777 - DNA, 25 bp, Homo sapien
gaaactgattctgatgtgacctgga

SEQ ID NO: 4167778 - DNA, 25 bp, Homo sapien
tctggagtaatcatcacaggatacc

SEQ ID NO: 4167779 - DNA, 25 bp, Homo sapien
gaaatctcatgcgtgggtacccaga

SEQ ID NO: 4167780 - DNA, 25 bp, Homo sapien
ggatggaatcgcctcttcaggagct

SEQ ID NO: 4167781 - DNA, 25 bp, Homo sapien
aagaaaggagttattgacctgacaa

SEQ ID NO: 4167782 - DNA, 25 bp, Homo sapien
tatttggttgacgaatgaagggcag

SEQ ID NO: 4167783 - DNA, 25 bp, Homo sapien
ataagacagcaatacctttaggtgc

SEQ ID NO: 4167784 - DNA, 25 bp, Homo sapien
aggaatctgtcacctcactatgcct

SEQ ID NO: 4167785 - DNA, 25 bp, Homo sapien
cttttatatccagaaacttctgaaa

SEQ ID NO: 4167786 - DNA, 25 bp, Homo sapien
tatatccagaaacttctgaaacttg

SEQ ID NO: 4167787 - DNA, 25 bp, Homo sapien
tatccagaaacttctgaaacttgac

SEQ ID NO: 4167788 - DNA, 25 bp, Homo sapien
tttatatccagaaacttctgaaact

SEQ ID NO: 4167789 - DNA, 25 bp, Homo sapien
cattgaatgtgggtatagagaaaaa

SEQ ID NO: 4167790 - DNA, 25 bp, Homo sapien
cccagctggtggcagataattggtt

SEQ ID NO: 4167791 - DNA, 25 bp, Homo sapien
tcagaattgaactggattgcaagac

SEQ ID NO: 4167792 - DNA, 25 bp, Homo sapien
cctcccgtaactggcatcttaaatg

SEQ ID NO: 4167793 - DNA, 25 bp, Homo sapien
cagagagggcgatgtactgtacaca

SEQ ID NO: 4167794 - DNA, 25 bp, Homo sapien
gcgatgtactgtacacatctgtgag

SEQ ID NO: 4167795 - DNA, 25 bp, Homo sapien
tgaagtaaaataacgacccagagag

SEQ ID NO: 4167796 - DNA, 25 bp, Homo sapien
acgacccagagagggcgatgtactg

SEQ ID NO: 4167797 - DNA, 25 bp, Homo sapien
ctttaatactaaacaaggagaatgt

SEQ ID NO: 4167798 - DNA, 25 bp, Homo sapien
actcctgtattacttgtgctcctca

SEQ ID NO: 4167799 - DNA, 25 bp, Homo sapien
aagcaaatgcctatacatgtatcac

SEQ ID NO: 4167800 - DNA, 25 bp, Homo sapien
actcgcatcacagcacgacctgaga

SEQ ID NO: 4167801 - DNA, 25 bp, Homo sapien
tgatgatcaacacctacacagccag

SEQ ID NO: 4167802 - DNA, 25 bp, Homo sapien
tggcaggtcacagggtaaatttaca

SEQ ID NO: 4167803 - DNA, 25 bp, Homo sapien
gagctctgccctctaattatcgcta

SEQ ID NO: 4167804 - DNA, 25 bp, Homo sapien
gagggccagagtctgactttcagaa

SEQ ID NO: 4167805 - DNA, 25 bp, Homo sapien
cagaacttctgaacgttgacagaga

SEQ ID NO: 4167806 - DNA, 25 bp, Homo sapien
gggtccagaacttctgaacgttgac

SEQ ID NO: 4167807 - DNA, 25 bp, Homo sapien
gaacttctgaacgttgacagagacc

SEQ ID NO: 4167808 - DNA, 25 bp, Homo sapien
tccagaacttctgaacgttgacaga

SEQ ID NO: 4167809 - DNA, 25 bp, Homo sapien
ttaaggcacagccaaagtttcctac

SEQ ID NO: 4167810 - DNA, 25 bp, Homo sapien
tgttctcagcattgcccccacaaag

SEQ ID NO: 4167811 - DNA, 25 bp, Homo sapien
gtgccagggatatttagtttaacca

SEQ ID NO: 4167812 - DNA, 25 bp, Homo sapien
ccaattctttatttgacctatgaaa

SEQ ID NO: 4167813 - DNA, 25 bp, Homo sapien
tcatcacaaaaagttgaggtgatcc

SEQ ID NO: 4167814 - DNA, 25 bp, Homo sapien
agttgaggtgatcctaacctcctcc

SEQ ID NO: 4167815 - DNA, 25 bp, Homo sapien
tgtcctggaagaacatactgtccta

SEQ ID NO: 4167816 - DNA, 25 bp, Homo sapien
gaatcctcttccatagattcatcac

SEQ ID NO: 4167817 - DNA, 25 bp, Homo sapien
tctgatcacggaaatcctgtagcaa

SEQ ID NO: 4167818 - DNA, 25 bp, Homo sapien
ctgatggaaccccaaattgcaggtc

SEQ ID NO: 4167819 - DNA, 25 bp, Homo sapien
gggatgttggatcaagccccagact

SEQ ID NO: 4167820 - DNA, 25 bp, Homo sapien
tcatacgttactgtggcattttcac

SEQ ID NO: 4167821 - DNA, 25 bp, Homo sapien
catgcctgcgatgagtccctcttct

SEQ ID NO: 4167822 - DNA, 25 bp, Homo sapien
gcctgcatgcctgcgatgagtccct

SEQ ID NO: 4167823 - DNA, 25 bp, Homo sapien
ctctgtgcacccttccctttgagag

SEQ ID NO: 4167824 - DNA, 25 bp, Homo sapien
tctgtgcacccttccctttgagagg

SEQ ID NO: 4167825 - DNA, 25 bp, Homo sapien
gcactgctttcagacagagaccagc

SEQ ID NO: 4167826 - DNA, 25 bp, Homo sapien
cttagagccagactgtagaatcggg

SEQ ID NO: 4167827 - DNA, 25 bp, Homo sapien
gttgctggtgcttctgtattaatcc

SEQ ID NO: 4167828 - DNA, 25 bp, Homo sapien
tgtcaagactggacccagctgaagc

SEQ ID NO: 4167829 - DNA, 25 bp, Homo sapien
tcattgcctgaagacactgagtccc

SEQ ID NO: 4167830 - DNA, 25 bp, Homo sapien
cacaggaaggtttgtagcactaggc

SEQ ID NO: 4167831 - DNA, 25 bp, Homo sapien
tcacaggaacaacgaggagctgcaa

SEQ ID NO: 4167832 - DNA, 25 bp, Homo sapien
tagtcttcgtaacctggctgcctgc

SEQ ID NO: 4167833 - DNA, 25 bp, Homo sapien
gacacgaacatgtgtaaaggaaggc

SEQ ID NO: 4167834 - DNA, 25 bp, Homo sapien
ttcttattcaaatcccaccagtgct

SEQ ID NO: 4167835 - DNA, 25 bp, Homo sapien
acgaacatgtgtaaaggaaggcaaa

SEQ ID NO: 4167836 - DNA, 25 bp, Homo sapien
tcttattcaaatcccaccagtgctt

SEQ ID NO: 4167837 - DNA, 25 bp, Homo sapien
tgttgaccagacctactcagaggag

SEQ ID NO: 4167838 - DNA, 25 bp, Homo sapien
tcatcgggttctctgtacaaggcca

SEQ ID NO: 4167839 - DNA, 25 bp, Homo sapien
caggcggtacactcataactgcgag

SEQ ID NO: 4167840 - DNA, 25 bp, Homo sapien
tatatcaggtggtcagaggtcactc

SEQ ID NO: 4167841 - DNA, 25 bp, Homo sapien
tacacttgtaccttgatttcctggg

SEQ ID NO: 4167842 - DNA, 25 bp, Homo sapien
cagccaaggtcacgatgcagtcagc

SEQ ID NO: 4167843 - DNA, 25 bp, Homo sapien
tagaggttgtcagaatgctcagcca

SEQ ID NO: 4167844 - DNA, 25 bp, Homo sapien
tgaacaagatcaatatggtccccag

SEQ ID NO: 4167845 - DNA, 25 bp, Homo sapien
gagaacgaagtatgtcaagccctgg

SEQ ID NO: 4167846 - DNA, 25 bp, Homo sapien
gaaataaatcagaagggccacggca

SEQ ID NO: 4167847 - DNA, 25 bp, Homo sapien
tctggacacggatactctcaagggt

SEQ ID NO: 4167848 - DNA, 25 bp, Homo sapien
tctcaagggtcatgacgaggatccc

SEQ ID NO: 4167849 - DNA, 25 bp, Homo sapien
ccatccgtggacagctaagtgttaa

SEQ ID NO: 4167850 - DNA, 25 bp, Homo sapien
gaaattgccaggttgtacagtaacc

SEQ ID NO: 4167851 - DNA, 25 bp, Homo sapien
ggtacccaggttcttgttcagcatc

SEQ ID NO: 4167852 - DNA, 25 bp, Homo sapien
ttaccattgaacctacagtgcccag

SEQ ID NO: 4167853 - DNA, 25 bp, Homo sapien
caaaatggcagaccactggttgtca

SEQ ID NO: 4167854 - DNA, 25 bp, Homo sapien
tctttttctcgtacacaaaatggca

SEQ ID NO: 4167855 - DNA, 25 bp, Homo sapien
taatagtataccaagattccttccg

SEQ ID NO: 4167856 - DNA, 25 bp, Homo sapien
ttccatacacaaggaagaagcattc

SEQ ID NO: 4167857 - DNA, 25 bp, Homo sapien
tggaactacaatatgcaactaaagc

SEQ ID NO: 4167858 - DNA, 25 bp, Homo sapien
gaacacttatcttatgaggtaggaa

SEQ ID NO: 4167859 - DNA, 25 bp, Homo sapien
ttaattcctataacatgccatcagg

SEQ ID NO: 4167860 - DNA, 25 bp, Homo sapien
tgtggctaaaacttggactcgctat

SEQ ID NO: 4167861 - DNA, 25 bp, Homo sapien
aactcagaatagaatgcaacttcct

SEQ ID NO: 4167862 - DNA, 25 bp, Homo sapien
aaactaagacggtaagactgagagc

SEQ ID NO: 4167863 - DNA, 25 bp, Homo sapien
tgttaactagtacaatagggctaga

SEQ ID NO: 4167864 - DNA, 25 bp, Homo sapien
gactgagagcaagacaagaatgtcc

SEQ ID NO: 4167865 - DNA, 25 bp, Homo sapien
tttcaggcatggtaaaggtaaggca

SEQ ID NO: 4167866 - DNA, 25 bp, Homo sapien
ggaatctatatcattatttcaggca

SEQ ID NO: 4167867 - DNA, 25 bp, Homo sapien
caaccacttctaaaatgttgtttat

SEQ ID NO: 4167868 - DNA, 25 bp, Homo sapien
agaaggtgatgagcccaaaggaatc

SEQ ID NO: 4167869 - DNA, 25 bp, Homo sapien
tgtgcttttccggtttgtctctaag

SEQ ID NO: 4167870 - DNA, 25 bp, Homo sapien
tgtcctcagctacagagctggaatt

SEQ ID NO: 4167871 - DNA, 25 bp, Homo sapien
cagtgtcctaactggagcccagagt

SEQ ID NO: 4167872 - DNA, 25 bp, Homo sapien
gcgtgaataccctgcttggatgctg

SEQ ID NO: 4167873 - DNA, 25 bp, Homo sapien
tttggaaaggcaccacttttgtggc

SEQ ID NO: 4167874 - DNA, 25 bp, Homo sapien
tcatcatagtcccaaaaaccaatac

SEQ ID NO: 4167875 - DNA, 25 bp, Homo sapien
gagtcacagttcctactccccccac

SEQ ID NO: 4167876 - DNA, 25 bp, Homo sapien
ggaaaggcaccacttttgtggcatg

SEQ ID NO: 4167877 - DNA, 25 bp, Homo sapien
gatcttctatgacaggtagttacca

SEQ ID NO: 4167878 - DNA, 25 bp, Homo sapien
gaggttatggtcaaggaaaagccca

SEQ ID NO: 4167879 - DNA, 25 bp, Homo sapien
tagttaccaagccagataagaggtt

SEQ ID NO: 4167880 - DNA, 25 bp, Homo sapien
atccagatgaaatgggcagaagagc

SEQ ID NO: 4167881 - DNA, 25 bp, Homo sapien
aagtttgtcagctatgtggaatgca

SEQ ID NO: 4167882 - DNA, 25 bp, Homo sapien
gacagattaaaaccgatatgtgccc

SEQ ID NO: 4167883 - DNA, 25 bp, Homo sapien
tgattgtgcccaaagttccatagtg

SEQ ID NO: 4167884 - DNA, 25 bp, Homo sapien
ccatagtgagtaagcaggaaagata

SEQ ID NO: 4167885 - DNA, 25 bp, Homo sapien
cttccattaagccacattataaggt

SEQ ID NO: 4167886 - DNA, 25 bp, Homo sapien
cattataaggtagggcctcacatcc

SEQ ID NO: 4167887 - DNA, 25 bp, Homo sapien
acgatgaaagtatctggtcagcagc

SEQ ID NO: 4167888 - DNA, 25 bp, Homo sapien
tactctccttctgatcatgacgatg

SEQ ID NO: 4167889 - DNA, 25 bp, Homo sapien
gctaattattcctatgagtgcctca

SEQ ID NO: 4167890 - DNA, 25 bp, Homo sapien
gaagcaacatatgcctatgaaggca

SEQ ID NO: 4167891 - DNA, 25 bp, Homo sapien
gcaaaatggtattccagcccctgga

SEQ ID NO: 4167892 - DNA, 25 bp, Homo sapien
caacatagagcaattcagcccactg

SEQ ID NO: 4167893 - DNA, 25 bp, Homo sapien
tacagcgaagggcatagatacaggc

SEQ ID NO: 4167894 - DNA, 25 bp, Homo sapien
gatctttttggtgagaaacactgcc

SEQ ID NO: 4167895 - DNA, 25 bp, Homo sapien
tacagaggaatgctgccatggcggt

SEQ ID NO: 4167896 - DNA, 25 bp, Homo sapien
gcctcatttgggaagatctacgttt

SEQ ID NO: 4167897 - DNA, 25 bp, Homo sapien
gtcttgattgcctgaaaatctgctg

SEQ ID NO: 4167898 - DNA, 25 bp, Homo sapien
aaacttctttcttcgtcttgattgc

SEQ ID NO: 4167899 - DNA, 25 bp, Homo sapien
tctttcttcgtcttgattgcctgaa

SEQ ID NO: 4167900 - DNA, 25 bp, Homo sapien
ctgctgcatattctttagtacccat

SEQ ID NO: 4167901 - DNA, 25 bp, Homo sapien
tctccacatcggagagccttttctc

SEQ ID NO: 4167902 - DNA, 25 bp, Homo sapien
tgcagccaaccatgccaagagcttc

SEQ ID NO: 4167903 - DNA, 25 bp, Homo sapien
acatcggagagccttttctcccaat

SEQ ID NO: 4167904 - DNA, 25 bp, Homo sapien
cattatctccacatcggagagcctt

SEQ ID NO: 4167905 - DNA, 25 bp, Homo sapien
cttcagagtcagtaagatgtctgcg

SEQ ID NO: 4167906 - DNA, 25 bp, Homo sapien
gagtcagtaagatgtctgcgttgtg

SEQ ID NO: 4167907 - DNA, 25 bp, Homo sapien
agtaagatgtctgcgttgtgtggta

SEQ ID NO: 4167908 - DNA, 25 bp, Homo sapien
ctgcgttgtgtggtaggagagttta

SEQ ID NO: 4167909 - DNA, 25 bp, Homo sapien
tctggaagttgacctttcctactgg

SEQ ID NO: 4167910 - DNA, 25 bp, Homo sapien
cctgaggctccggatggtgagctct

SEQ ID NO: 4167911 - DNA, 25 bp, Homo sapien
acaccacgggatactcctcctgagg

SEQ ID NO: 4167912 - DNA, 25 bp, Homo sapien
ttcctactggtactttctctctcag

SEQ ID NO: 4167913 - DNA, 25 bp, Homo sapien
gctgctcttgagattgtcctgcaac

SEQ ID NO: 4167914 - DNA, 25 bp, Homo sapien
tgaagttacaggtctcccactgctg

SEQ ID NO: 4167915 - DNA, 25 bp, Homo sapien
tccaggttctgatgcaccatctggg

SEQ ID NO: 4167916 - DNA, 25 bp, Homo sapien
gccccagaccacctacaggcaaagg

SEQ ID NO: 4167917 - DNA, 25 bp, Homo sapien
atctactcatttgatgatgactcct

SEQ ID NO: 4167918 - DNA, 25 bp, Homo sapien
atttgatgatgactcctcaagcttt

SEQ ID NO: 4167919 - DNA, 25 bp, Homo sapien
tctactcatttgatgatgactcctc

SEQ ID NO: 4167920 - DNA, 25 bp, Homo sapien
tgatgatgactcctcaagctttggc

SEQ ID NO: 4167921 - DNA, 25 bp, Homo sapien
tacttatgaagctaacactgttgca

SEQ ID NO: 4167922 - DNA, 25 bp, Homo sapien
ttgaggtgcttgataaaaagactac

SEQ ID NO: 4167923 - DNA, 25 bp, Homo sapien
tgtgcacgggcttatgctataacct

SEQ ID NO: 4167924 - DNA, 25 bp, Homo sapien
atctgggacaagttagcctaaaaca

SEQ ID NO: 4167925 - DNA, 25 bp, Homo sapien
aatacggtggatatttttctattcg

SEQ ID NO: 4167926 - DNA, 25 bp, Homo sapien
ggtggatatttttctattcgtaatg

SEQ ID NO: 4167927 - DNA, 25 bp, Homo sapien
gataaatacggtggatatttttcta

SEQ ID NO: 4167928 - DNA, 25 bp, Homo sapien
gatatttttctattcgtaatgattg

SEQ ID NO: 4167929 - DNA, 25 bp, Homo sapien
catacaaagagcttggaattcatca

SEQ ID NO: 4167930 - DNA, 25 bp, Homo sapien
tcttcagagaattaaaggcacaggg

SEQ ID NO: 4167931 - DNA, 25 bp, Homo sapien
gcagagacgtgaatagaaaggcact

SEQ ID NO: 4167932 - DNA, 25 bp, Homo sapien
cagcaagaacctggattcaaggtca

SEQ ID NO: 4167933 - DNA, 25 bp, Homo sapien
gaaaacagatagtcgaggagtaggt

SEQ ID NO: 4167934 - DNA, 25 bp, Homo sapien
gggacaatcttctcattattcatta

SEQ ID NO: 4167935 - DNA, 25 bp, Homo sapien
cacagtctccatagagatggtgcat

SEQ ID NO: 4167936 - DNA, 25 bp, Homo sapien
tacaaaatcaggcattggagcacca

SEQ ID NO: 4167937 - DNA, 25 bp, Homo sapien
tctttctcagagtaatacagaggat

SEQ ID NO: 4167938 - DNA, 25 bp, Homo sapien
gcacctataggtagacaaatagaag

SEQ ID NO: 4167939 - DNA, 25 bp, Homo sapien
ggataacgatgacaacacatgaaat

SEQ ID NO: 4167940 - DNA, 25 bp, Homo sapien
taaaatgttatgagtgcacctatag

SEQ ID NO: 4167941 - DNA, 25 bp, Homo sapien
tctcaaatgaagtattggttcacac

SEQ ID NO: 4167942 - DNA, 25 bp, Homo sapien
gaagagaatggctcattgcattctc

SEQ ID NO: 4167943 - DNA, 25 bp, Homo sapien
ggctgtctcaaatgaagtattggtt

SEQ ID NO: 4167944 - DNA, 25 bp, Homo sapien
aagagaatggctcattgcattctcc

SEQ ID NO: 4167945 - DNA, 25 bp, Homo sapien
tagtgatcaaactgcagtaaatgtc

SEQ ID NO: 4167946 - DNA, 25 bp, Homo sapien
agtgatcaaactgcagtaaatgtca

SEQ ID NO: 4167947 - DNA, 25 bp, Homo sapien
aagaagaaatttgcttacataattt

SEQ ID NO: 4167948 - DNA, 25 bp, Homo sapien
aaaagaagaaatttgcttacataat

SEQ ID NO: 4167949 - DNA, 25 bp, Homo sapien
ttgaaaaagaagaaatttgcttaca

SEQ ID NO: 4167950 - DNA, 25 bp, Homo sapien
gaaaaagaagaaatttgcttacata

SEQ ID NO: 4167951 - DNA, 25 bp, Homo sapien
tcatgatgtgatcaattctttggtg

SEQ ID NO: 4167952 - DNA, 25 bp, Homo sapien
ccacttgcattaatgatgaggattc

SEQ ID NO: 4167953 - DNA, 25 bp, Homo sapien
gatttcacctttcatgatgtgatca

SEQ ID NO: 4167954 - DNA, 25 bp, Homo sapien
atttaagcaattccgtaatgatttc

SEQ ID NO: 4167955 - DNA, 25 bp, Homo sapien
aggtggctgactgcggatgtgcgcc

SEQ ID NO: 4167956 - DNA, 25 bp, Homo sapien
gcaggcgggaggagcgtcacctgtg

SEQ ID NO: 4167957 - DNA, 25 bp, Homo sapien
cgggaggagcgtcacctgtgcccct

SEQ ID NO: 4167958 - DNA, 25 bp, Homo sapien
cgaggtggctgactgcggatgtgcg

SEQ ID NO: 4167959 - DNA, 25 bp, Homo sapien
ctgtaaggagagggcccccaattgt

SEQ ID NO: 4167960 - DNA, 25 bp, Homo sapien
agggcccccaattgtcctggtcaga

SEQ ID NO: 4167961 - DNA, 25 bp, Homo sapien
aaggagagggcccccaattgtcctg

SEQ ID NO: 4167962 - DNA, 25 bp, Homo sapien
gagagggcccccaattgtcctggtc

SEQ ID NO: 4167963 - DNA, 25 bp, Homo sapien
atcattgatggtggtctttcctagg

SEQ ID NO: 4167964 - DNA, 25 bp, Homo sapien
taatcattgatggtggtctttccta

SEQ ID NO: 4167965 - DNA, 25 bp, Homo sapien
atggtggtctttcctaggagtgtag

SEQ ID NO: 4167966 - DNA, 25 bp, Homo sapien
ctggtaatcattgatggtggtcttt

SEQ ID NO: 4167967 - DNA, 25 bp, Homo sapien
agtcatcttgccatacagatcctcc

SEQ ID NO: 4167968 - DNA, 25 bp, Homo sapien
ttttatgagcctgattacagtcatc

SEQ ID NO: 4167969 - DNA, 25 bp, Homo sapien
gcattttctgcttaggtcttttgga

SEQ ID NO: 4167970 - DNA, 25 bp, Homo sapien
agtgccaaaggggtcccatctccct

SEQ ID NO: 4167971 - DNA, 25 bp, Homo sapien
gaagccaccattgtcaagagcgagg

SEQ ID NO: 4167972 - DNA, 25 bp, Homo sapien
gcagcgtggcttcaacacaatagca

SEQ ID NO: 4167973 - DNA, 25 bp, Homo sapien
taagtcagggtagaggcagttgaac

SEQ ID NO: 4167974 - DNA, 25 bp, Homo sapien
tgtgtctgggcagaaatcctcggcc

SEQ ID NO: 4167975 - DNA, 25 bp, Homo sapien
atgacccaaaccaggctgtaggtag

SEQ ID NO: 4167976 - DNA, 25 bp, Homo sapien
caaaccaggctgtaggtagacagat

SEQ ID NO: 4167977 - DNA, 25 bp, Homo sapien
acccaaaccaggctgtaggtagaca

SEQ ID NO: 4167978 - DNA, 25 bp, Homo sapien
tgacccaaaccaggctgtaggtaga

SEQ ID NO: 4167979 - DNA, 25 bp, Homo sapien
aggaagagctaggaacttcggtaga

SEQ ID NO: 4167980 - DNA, 25 bp, Homo sapien
taggaacttcggtagataagtagat

SEQ ID NO: 4167981 - DNA, 25 bp, Homo sapien
cagtggtaaagtgagtgtggcctcc

SEQ ID NO: 4167982 - DNA, 25 bp, Homo sapien
taagtagatggcacaaccaaatttg

SEQ ID NO: 4167983 - DNA, 25 bp, Homo sapien
cctgtgatgaatgttgtggaccaga

SEQ ID NO: 4167984 - DNA, 25 bp, Homo sapien
ggagatgggcatgaagcctatctga

SEQ ID NO: 4167985 - DNA, 25 bp, Homo sapien
gcctatctgatcttcaccagcatca

SEQ ID NO: 4167986 - DNA, 25 bp, Homo sapien
gattcctctggtcagttgataagtc

SEQ ID NO: 4167987 - DNA, 25 bp, Homo sapien
ttacaattctttgctacctctatgg

SEQ ID NO: 4167988 - DNA, 25 bp, Homo sapien
ctttgctacctctatggaatctcac

SEQ ID NO: 4167989 - DNA, 25 bp, Homo sapien
gaaatttacaattctttgctacctc

SEQ ID NO: 4167990 - DNA, 25 bp, Homo sapien
aattctttgctacctctatggaatc

SEQ ID NO: 4167991 - DNA, 25 bp, Homo sapien
catcctccagggtgatattccagaa

SEQ ID NO: 4167992 - DNA, 25 bp, Homo sapien
tctgccatgtcacaatgagggcttc

SEQ ID NO: 4167993 - DNA, 25 bp, Homo sapien
accccatggttctcgctgaaggtga

SEQ ID NO: 4167994 - DNA, 25 bp, Homo sapien
cagctgggtaatgtttatcttgtcc

SEQ ID NO: 4167995 - DNA, 25 bp, Homo sapien
cagttcctcttgtgtctaattttct

SEQ ID NO: 4167996 - DNA, 25 bp, Homo sapien
aggatggagactggcctagtacaaa

SEQ ID NO: 4167997 - DNA, 25 bp, Homo sapien
tcctcttgtgtctaattttctgatc

SEQ ID NO: 4167998 - DNA, 25 bp, Homo sapien
ttgtgtctaattttctgatctgcag

SEQ ID NO: 4167999 - DNA, 25 bp, Homo sapien
gcaagtgatatttaggtggtcttca

SEQ ID NO: 4168000 - DNA, 25 bp, Homo sapien
cagtggcagagcaagtgatatttag

SEQ ID NO: 4168001 - DNA, 25 bp, Homo sapien
cttcagagaatttgtagtgaaggga

SEQ ID NO: 4168002 - DNA, 25 bp, Homo sapien
gcagagcaagtgatatttaggtggt

SEQ ID NO: 4168003 - DNA, 25 bp, Homo sapien
gaccgagggaccttccagaagacca

SEQ ID NO: 4168004 - DNA, 25 bp, Homo sapien
gatgctggtaacagacgtggtccca

SEQ ID NO: 4168005 - DNA, 25 bp, Homo sapien
tactattttcaatccctgaccgagg

SEQ ID NO: 4168006 - DNA, 25 bp, Homo sapien
tgcttaaagtcggtcacagtcccca

SEQ ID NO: 4168007 - DNA, 25 bp, Homo sapien
ttgctttaaaatgggtgacgaaagc

SEQ ID NO: 4168008 - DNA, 25 bp, Homo sapien
aaatgggtgacgaaagcacttcaga

SEQ ID NO: 4168009 - DNA, 25 bp, Homo sapien
caaatctcccccagattgagcccct

SEQ ID NO: 4168010 - DNA, 25 bp, Homo sapien
agcacttcagataggtccctttctc

SEQ ID NO: 4168011 - DNA, 25 bp, Homo sapien
ctaaaacttcttgtctttataatct

SEQ ID NO: 4168012 - DNA, 25 bp, Homo sapien
actgcttcatcaagagtcagtgctt

SEQ ID NO: 4168013 - DNA, 25 bp, Homo sapien
acacagagaaaagacgtggctatta

SEQ ID NO: 4168014 - DNA, 25 bp, Homo sapien
gtttattgctcataatttctccaaa

SEQ ID NO: 4168015 - DNA, 25 bp, Homo sapien
cagtaaagaggtgggtgtagaaagc

SEQ ID NO: 4168016 - DNA, 25 bp, Homo sapien
ttagtctgggttttcagggactcca

SEQ ID NO: 4168017 - DNA, 25 bp, Homo sapien
tagtctgggttttcagggactccaa

SEQ ID NO: 4168018 - DNA, 25 bp, Homo sapien
tgaccaaatttacctaaatatccaa

SEQ ID NO: 4168019 - DNA, 25 bp, Homo sapien
atttacctaaatatccaatttctga

SEQ ID NO: 4168020 - DNA, 25 bp, Homo sapien
aatttacctaaatatccaatttctg

SEQ ID NO: 4168021 - DNA, 25 bp, Homo sapien
ttgaccaaatttacctaaatatcca

SEQ ID NO: 4168022 - DNA, 25 bp, Homo sapien
ctcggtcctgattccggtgacgttt

SEQ ID NO: 4168023 - DNA, 25 bp, Homo sapien
taagattgagattaggacgagaaga

SEQ ID NO: 4168024 - DNA, 25 bp, Homo sapien
gacgtttccagtacagtaagattga

SEQ ID NO: 4168025 - DNA, 25 bp, Homo sapien
gaaacaatgcttagcaatagcggaa

SEQ ID NO: 4168026 - DNA, 25 bp, Homo sapien
tatatcttcaaatgactcacaaatt

SEQ ID NO: 4168027 - DNA, 25 bp, Homo sapien
cattttttgaactccctgtgacaac

SEQ ID NO: 4168028 - DNA, 25 bp, Homo sapien
caaatgactcacaaattgtcattaa

SEQ ID NO: 4168029 - DNA, 25 bp, Homo sapien
aaacacattgttgccattcccttat

SEQ ID NO: 4168030 - DNA, 25 bp, Homo sapien
caatatcttagactggcgtttatga

SEQ ID NO: 4168031 - DNA, 25 bp, Homo sapien
tcacaatatcttagactggcgttta

SEQ ID NO: 4168032 - DNA, 25 bp, Homo sapien
cacaatatcttagactggcgtttat

SEQ ID NO: 4168033 - DNA, 25 bp, Homo sapien
atatcttagactggcgtttatgagg

SEQ ID NO: 4168034 - DNA, 25 bp, Homo sapien
gttaggttattgtgaagagaaggaa

SEQ ID NO: 4168035 - DNA, 25 bp, Homo sapien
tctacatggattagctagtacttga

SEQ ID NO: 4168036 - DNA, 25 bp, Homo sapien
cccattcataggttaggttattgtg

SEQ ID NO: 4168037 - DNA, 25 bp, Homo sapien
acattgtcaggaacccattcatagg

SEQ ID NO: 4168038 - DNA, 25 bp, Homo sapien
gaactgctctactgcatctgggctg

SEQ ID NO: 4168039 - DNA, 25 bp, Homo sapien
taaactagtgtccacggagactcag

SEQ ID NO: 4168040 - DNA, 25 bp, Homo sapien
taattgtgcctcatgaaatgcggaa

SEQ ID NO: 4168041 - DNA, 25 bp, Homo sapien
cagaactagcagcattggtcagtca

SEQ ID NO: 4168042 - DNA, 25 bp, Homo sapien
cgtactgcatgttatgtaaattggc

SEQ ID NO: 4168043 - DNA, 25 bp, Homo sapien
tggccacccatacccttgaactgaa

SEQ ID NO: 4168044 - DNA, 25 bp, Homo sapien
tctgggatgacgtcctgtctggtgt

SEQ ID NO: 4168045 - DNA, 25 bp, Homo sapien
tggcatgtccaaatggtcccagtct

SEQ ID NO: 4168046 - DNA, 25 bp, Homo sapien
agggcatacgtaatcctaggaaata

SEQ ID NO: 4168047 - DNA, 25 bp, Homo sapien
catacgtaatcctaggaaataatgg

SEQ ID NO: 4168048 - DNA, 25 bp, Homo sapien
taggaaataatggtttagaaaatca

SEQ ID NO: 4168049 - DNA, 25 bp, Homo sapien
taatcctaggaaataatggtttaga

SEQ ID NO: 4168050 - DNA, 25 bp, Homo sapien
taggagcccaagtcagtctgtgagc

SEQ ID NO: 4168051 - DNA, 25 bp, Homo sapien
taaagtgactaacagaggtccccac

SEQ ID NO: 4168052 - DNA, 25 bp, Homo sapien
caagtcctacaacagacctgagagg

SEQ ID NO: 4168053 - DNA, 25 bp, Homo sapien
tagaccagggaatcactttcagggt

SEQ ID NO: 4168054 - DNA, 25 bp, Homo sapien
aaccaaggattctagcaaggccagc

SEQ ID NO: 4168055 - DNA, 25 bp, Homo sapien
taagcaggaactggactagatacca

SEQ ID NO: 4168056 - DNA, 25 bp, Homo sapien
gattcaacatcattccactagctgg

SEQ ID NO: 4168057 - DNA, 25 bp, Homo sapien
ttaacgcatggaaaaagaagccagc

SEQ ID NO: 4168058 - DNA, 25 bp, Homo sapien
catcttttaggaggggaaagataga

SEQ ID NO: 4168059 - DNA, 25 bp, Homo sapien
ggagggttttacatatgatgggaaa

SEQ ID NO: 4168060 - DNA, 25 bp, Homo sapien
ttcccaagagaatatcataagccaa

SEQ ID NO: 4168061 - DNA, 25 bp, Homo sapien
gaggaggggagggttttacatatga

SEQ ID NO: 4168062 - DNA, 25 bp, Homo sapien
tatttcataactcagtctctcacac

SEQ ID NO: 4168063 - DNA, 25 bp, Homo sapien
gttctggtcctgctctctggatctt

SEQ ID NO: 4168064 - DNA, 25 bp, Homo sapien
taagagataagatctcgccctgtca

SEQ ID NO: 4168065 - DNA, 25 bp, Homo sapien
tcttgagcagattcaataataggaa

SEQ ID NO: 4168066 - DNA, 25 bp, Homo sapien
tgctctccactccttaaaggagacg

SEQ ID NO: 4168067 - DNA, 25 bp, Homo sapien
taaaggagacgtatacctcaatgcc

SEQ ID NO: 4168068 - DNA, 25 bp, Homo sapien
gacgtatacctcaatgccctgggat

SEQ ID NO: 4168069 - DNA, 25 bp, Homo sapien
cactccttaaaggagacgtatacct

SEQ ID NO: 4168070 - DNA, 25 bp, Homo sapien
actcttagcatcctagaaagaagca

SEQ ID NO: 4168071 - DNA, 25 bp, Homo sapien
aaggataaagtctgcgaagccctca

SEQ ID NO: 4168072 - DNA, 25 bp, Homo sapien
gaaaataactcttagcatcctagaa

SEQ ID NO: 4168073 - DNA, 25 bp, Homo sapien
tgaaaaggataaagtctgcgaagcc

SEQ ID NO: 4168074 - DNA, 25 bp, Homo sapien
agaacaccaaaactgtttccgcact

SEQ ID NO: 4168075 - DNA, 25 bp, Homo sapien
tccgcactcaagatgcgtgcatgtg

SEQ ID NO: 4168076 - DNA, 25 bp, Homo sapien
tcatgtggattgtgctgtggttaca

SEQ ID NO: 4168077 - DNA, 25 bp, Homo sapien
tgtgctgtggttacaaagaacacca

SEQ ID NO: 4168078 - DNA, 25 bp, Homo sapien
atgctatagtacaagccactagcct

SEQ ID NO: 4168079 - DNA, 25 bp, Homo sapien
cttccttacacatcaagctcgagga

SEQ ID NO: 4168080 - DNA, 25 bp, Homo sapien
tatagtacaagccactagcctgcct

SEQ ID NO: 4168081 - DNA, 25 bp, Homo sapien
ttacacatcaagctcgaggatttgc

SEQ ID NO: 4168082 - DNA, 25 bp, Homo sapien
tgtagtatgagctcaattgtcctgg

SEQ ID NO: 4168083 - DNA, 25 bp, Homo sapien
gaaatttcttggtatctcactgggt

SEQ ID NO: 4168084 - DNA, 25 bp, Homo sapien
cccagtgcccacatgttgaggtctt

SEQ ID NO: 4168085 - DNA, 25 bp, Homo sapien
gatgtccgatcactctgccttaggt

SEQ ID NO: 4168086 - DNA, 25 bp, Homo sapien
gcttaagagatcgtgactgctgcag

SEQ ID NO: 4168087 - DNA, 25 bp, Homo sapien
taaagctagaagatcaactgggctc

SEQ ID NO: 4168088 - DNA, 25 bp, Homo sapien
tgtgtttctacacggcaaccatgga

SEQ ID NO: 4168089 - DNA, 25 bp, Homo sapien
gcattgcaagaacattgaacccagt

SEQ ID NO: 4168090 - DNA, 25 bp, Homo sapien
gtaaagatactgtgcttacagtggg

SEQ ID NO: 4168091 - DNA, 25 bp, Homo sapien
tgttgggaagaaagtagggctgcca

SEQ ID NO: 4168092 - DNA, 25 bp, Homo sapien
agtgaacaagatagtagctcttctt

SEQ ID NO: 4168093 - DNA, 25 bp, Homo sapien
caaaaattgaatagcctgtaaagat

SEQ ID NO: 4168094 - DNA, 25 bp, Homo sapien
tagtgtgcgatgattaaggatggaa

SEQ ID NO: 4168095 - DNA, 25 bp, Homo sapien
ttaaatggctgcctgttagagggag

SEQ ID NO: 4168096 - DNA, 25 bp, Homo sapien
gatataacacacttatccacacagt

SEQ ID NO: 4168097 - DNA, 25 bp, Homo sapien
tagactgatggcataccacatagaa

SEQ ID NO: 4168098 - DNA, 25 bp, Homo sapien
gtttttccatcactgatatgtgcag

SEQ ID NO: 4168099 - DNA, 25 bp, Homo sapien
gcagtttttccatcactgatatgtg

SEQ ID NO: 4168100 - DNA, 25 bp, Homo sapien
gacgaagcaaagccttctacttgag

SEQ ID NO: 4168101 - DNA, 25 bp, Homo sapien
tttccatcactgatatgtgcaggaa

SEQ ID NO: 4168102 - DNA, 25 bp, Homo sapien
aagtgctaggcatgctaataaaagc

SEQ ID NO: 4168103 - DNA, 25 bp, Homo sapien
cagggttttatctacagtgggacac

SEQ ID NO: 4168104 - DNA, 25 bp, Homo sapien
tatgtaacccataagccataaggtt

SEQ ID NO: 4168105 - DNA, 25 bp, Homo sapien
gacactcaggactctacctgtggag

SEQ ID NO: 4168106 - DNA, 25 bp, Homo sapien
taacatcaggggcaagacttttcca

SEQ ID NO: 4168107 - DNA, 25 bp, Homo sapien
gattgctggttctctgatcacctgg

SEQ ID NO: 4168108 - DNA, 25 bp, Homo sapien
tgaaagcaactgagtctgcaagtga

SEQ ID NO: 4168109 - DNA, 25 bp, Homo sapien
ggttgtctaacatcaggggcaagac

SEQ ID NO: 4168110 - DNA, 25 bp, Homo sapien
ggcattggcgtgtacctaacttcag

SEQ ID NO: 4168111 - DNA, 25 bp, Homo sapien
tatggaacaggcattggcgtgtacc

SEQ ID NO: 4168112 - DNA, 25 bp, Homo sapien
acaggcattggcgtgtacctaactt

SEQ ID NO: 4168113 - DNA, 25 bp, Homo sapien
tggcgtgtacctaacttcagctgtg

SEQ ID NO: 4168114 - DNA, 25 bp, Homo sapien
aacctctcctgggctgacattggtt

SEQ ID NO: 4168115 - DNA, 25 bp, Homo sapien
ccaacctctcctgggctgacattgg

SEQ ID NO: 4168116 - DNA, 25 bp, Homo sapien
tctcttaagcgggctgcctgacaca

SEQ ID NO: 4168117 - DNA, 25 bp, Homo sapien
ctctcctgggctgacattggtttca

SEQ ID NO: 4168118 - DNA, 25 bp, Homo sapien
ccatgtcacatgtgaagagagtgga

SEQ ID NO: 4168119 - DNA, 25 bp, Homo sapien
taaaccttgagatttaggctgaaag

SEQ ID NO: 4168120 - DNA, 25 bp, Homo sapien
cagtctaaaagatgagccacaaagt

SEQ ID NO: 4168121 - DNA, 25 bp, Homo sapien
cattcttatggctatacatgggaaa

SEQ ID NO: 4168122 - DNA, 25 bp, Homo sapien
cctgttggtagctgaaaaaatgatc

SEQ ID NO: 4168123 - DNA, 25 bp, Homo sapien
taaggtaccttaagcaatttagcag

SEQ ID NO: 4168124 - DNA, 25 bp, Homo sapien
tactcacgataaagactccctgttg

SEQ ID NO: 4168125 - DNA, 25 bp, Homo sapien
tctgttaggttcaaaagtatgctcc

SEQ ID NO: 4168126 - DNA, 25 bp, Homo sapien
ctcgacttttcagggaccaggcgcc

SEQ ID NO: 4168127 - DNA, 25 bp, Homo sapien
tcctcaaggtaagccaggccagggt

SEQ ID NO: 4168128 - DNA, 25 bp, Homo sapien
tgccgggagctgtcaggcacatgct

SEQ ID NO: 4168129 - DNA, 25 bp, Homo sapien
aagtggctgagtacctgaccccggt

SEQ ID NO: 4168130 - DNA, 25 bp, Homo sapien
tctaagccgcctattgcagaacaaa

SEQ ID NO: 4168131 - DNA, 25 bp, Homo sapien
tctagccccgtagtagcagcagtag

SEQ ID NO: 4168132 - DNA, 25 bp, Homo sapien
gcagcagtagcctttagggtccata

SEQ ID NO: 4168133 - DNA, 25 bp, Homo sapien
tacagtaggtataggcgaaaaagcc

SEQ ID NO: 4168134 - DNA, 25 bp, Homo sapien
tccctcagaagagcttctagtggaa

SEQ ID NO: 4168135 - DNA, 25 bp, Homo sapien
tcagaagagcttctagtggaagaac

SEQ ID NO: 4168136 - DNA, 25 bp, Homo sapien
aagagcttctagtggaagaacgcac

SEQ ID NO: 4168137 - DNA, 25 bp, Homo sapien
gaagagcttctagtggaagaacgca

SEQ ID NO: 4168138 - DNA, 25 bp, Homo sapien
caaagcctcccagcgtactgtagga

SEQ ID NO: 4168139 - DNA, 25 bp, Homo sapien
cacacatgcgcagtagggctcttca

SEQ ID NO: 4168140 - DNA, 25 bp, Homo sapien
gctgaggacactaaaccccaggttg

SEQ ID NO: 4168141 - DNA, 25 bp, Homo sapien
tactgtaggaatagcgcatagagcc

SEQ ID NO: 4168142 - DNA, 25 bp, Homo sapien
ggctatgactatatcagcaccaaga

SEQ ID NO: 4168143 - DNA, 25 bp, Homo sapien
caaataccattgatcgtgaggacaa

SEQ ID NO: 4168144 - DNA, 25 bp, Homo sapien
gaacgaccttgttggcagaccctaa

SEQ ID NO: 4168145 - DNA, 25 bp, Homo sapien
tagaaccagattagacctgctgaca

SEQ ID NO: 4168146 - DNA, 25 bp, Homo sapien
ggcagaatacttcactagtaagatg

SEQ ID NO: 4168147 - DNA, 25 bp, Homo sapien
tgacaaggagcatattacaggatga

SEQ ID NO: 4168148 - DNA, 25 bp, Homo sapien
tatggcacctagcaggaatgtatac

SEQ ID NO: 4168149 - DNA, 25 bp, Homo sapien
gatgcgacttgagcttaaagcaatg

SEQ ID NO: 4168150 - DNA, 25 bp, Homo sapien
tataacagaaccaaaggcaagagag

SEQ ID NO: 4168151 - DNA, 25 bp, Homo sapien
aagtgctccatgcatataccaagtc

SEQ ID NO: 4168152 - DNA, 25 bp, Homo sapien
atataacagaaccaaaggcaagaga

SEQ ID NO: 4168153 - DNA, 25 bp, Homo sapien
ataacagaaccaaaggcaagagaga

SEQ ID NO: 4168154 - DNA, 25 bp, Homo sapien
caataactagtaagaagtactcaat

SEQ ID NO: 4168155 - DNA, 25 bp, Homo sapien
tcactcaataactagtaagaagtac

SEQ ID NO: 4168156 - DNA, 25 bp, Homo sapien
ctcaataactagtaagaagtactca

SEQ ID NO: 4168157 - DNA, 25 bp, Homo sapien
ctcaatacagttttgtggaattaaa

SEQ ID NO: 4168158 - DNA, 25 bp, Homo sapien
ctttatcctctagacaatctctgca

SEQ ID NO: 4168159 - DNA, 25 bp, Homo sapien
tatcttatgcactttgaacctgctg

SEQ ID NO: 4168160 - DNA, 25 bp, Homo sapien
gctgctaatacttagcctagtgcct

SEQ ID NO: 4168161 - DNA, 25 bp, Homo sapien
aagtcttgaggacaaggtctatatc

SEQ ID NO: 4168162 - DNA, 25 bp, Homo sapien
gcacacagaaaactagcttcaccag

SEQ ID NO: 4168163 - DNA, 25 bp, Homo sapien
caagcacacagaaaactagcttcac

SEQ ID NO: 4168164 - DNA, 25 bp, Homo sapien
gcttcaccagttctgagcacacatt

SEQ ID NO: 4168165 - DNA, 25 bp, Homo sapien
cacagtagttggaagataatcatac

SEQ ID NO: 4168166 - DNA, 25 bp, Homo sapien
tatttcaaatttctactttgatgat

SEQ ID NO: 4168167 - DNA, 25 bp, Homo sapien
aagcatatttcaaatttctactttg

SEQ ID NO: 4168168 - DNA, 25 bp, Homo sapien
cttccaggaagcatatttcaaattt

SEQ ID NO: 4168169 - DNA, 25 bp, Homo sapien
caggaagcatatttcaaatttctac

SEQ ID NO: 4168170 - DNA, 25 bp, Homo sapien
tagaagacaatcaagttatccagga

SEQ ID NO: 4168171 - DNA, 25 bp, Homo sapien
agaaaggcaggaatggaccacttca

SEQ ID NO: 4168172 - DNA, 25 bp, Homo sapien
gttgaagataggacaggacatagaa

SEQ ID NO: 4168173 - DNA, 25 bp, Homo sapien
tggttgaagataggacaggacatag

SEQ ID NO: 4168174 - DNA, 25 bp, Homo sapien
cctgaatagaagagctgttgttata

SEQ ID NO: 4168175 - DNA, 25 bp, Homo sapien
gcactatcctgaatagaagagctgt

SEQ ID NO: 4168176 - DNA, 25 bp, Homo sapien
gctgttgttataatgctaaaatttg

SEQ ID NO: 4168177 - DNA, 25 bp, Homo sapien
ttcagcactatcctgaatagaagag

SEQ ID NO: 4168178 - DNA, 25 bp, Homo sapien
aataaagtcaggagggaagcccact

SEQ ID NO: 4168179 - DNA, 25 bp, Homo sapien
aaaaggcatcgtgatgaaatccacg

SEQ ID NO: 4168180 - DNA, 25 bp, Homo sapien
tcaaggccacaatagacaaaaataa

SEQ ID NO: 4168181 - DNA, 25 bp, Homo sapien
tgtaaagttttagtcccggcagtca

SEQ ID NO: 4168182 - DNA, 25 bp, Homo sapien
gccaagacggatgtgactgaaaact

SEQ ID NO: 4168183 - DNA, 25 bp, Homo sapien
gctgtggtgttccatttagcttcag

SEQ ID NO: 4168184 - DNA, 25 bp, Homo sapien
tggctgtggtgttccatttagcttc

SEQ ID NO: 4168185 - DNA, 25 bp, Homo sapien
ccaagacggatgtgactgaaaactc

SEQ ID NO: 4168186 - DNA, 25 bp, Homo sapien
aacactggactataataagaacatg

SEQ ID NO: 4168187 - DNA, 25 bp, Homo sapien
aataagggctactgaaaatgcactg

SEQ ID NO: 4168188 - DNA, 25 bp, Homo sapien
tcagtgagctggttcccttccttca

SEQ ID NO: 4168189 - DNA, 25 bp, Homo sapien
acggttactcctctgaaggcccaga

SEQ ID NO: 4168190 - DNA, 25 bp, Homo sapien
cagttcttaatctgatcacggttac

SEQ ID NO: 4168191 - DNA, 25 bp, Homo sapien
tggaacgctcccaaagattgccact

SEQ ID NO: 4168192 - DNA, 25 bp, Homo sapien
tttcttgcctaggtgcgtattccgg

SEQ ID NO: 4168193 - DNA, 25 bp, Homo sapien
ggtaacctgggccatcaagacatgg

SEQ ID NO: 4168194 - DNA, 25 bp, Homo sapien
gattgccacttagatctcggatcct

SEQ ID NO: 4168195 - DNA, 25 bp, Homo sapien
taactatgctttaaatttgggaaga

SEQ ID NO: 4168196 - DNA, 25 bp, Homo sapien
tgggaagaacaagcaaaaaggaaca

SEQ ID NO: 4168197 - DNA, 25 bp, Homo sapien
caagcaaaaaggaacaccctcacaa

SEQ ID NO: 4168198 - DNA, 25 bp, Homo sapien
tccttgaattaactatgctttaaat

SEQ ID NO: 4168199 - DNA, 25 bp, Homo sapien
ttagaaagtatcttcatctgactca

SEQ ID NO: 4168200 - DNA, 25 bp, Homo sapien
atcactcttgggtttggtaagtctt

SEQ ID NO: 4168201 - DNA, 25 bp, Homo sapien
tcatcactcttgggtttggtaagtc

SEQ ID NO: 4168202 - DNA, 25 bp, Homo sapien
tgactcatcactcttgggtttggta

SEQ ID NO: 4168203 - DNA, 25 bp, Homo sapien
tctgtaaacatacaggcctgccagt

SEQ ID NO: 4168204 - DNA, 25 bp, Homo sapien
gcctttgggtactctaagccttgga

SEQ ID NO: 4168205 - DNA, 25 bp, Homo sapien
caaaatgactatctctagggcctca

SEQ ID NO: 4168206 - DNA, 25 bp, Homo sapien
tatctacgagagttaactggctgca

SEQ ID NO: 4168207 - DNA, 25 bp, Homo sapien
aaatgacagagtggcaacacaagac

SEQ ID NO: 4168208 - DNA, 25 bp, Homo sapien
acatcccaccctaaatgacagagtg

SEQ ID NO: 4168209 - DNA, 25 bp, Homo sapien
taaatgacagagtggcaacacaaga

SEQ ID NO: 4168210 - DNA, 25 bp, Homo sapien
tctacatcccaccctaaatgacaga

SEQ ID NO: 4168211 - DNA, 25 bp, Homo sapien
tcattaagtggcaagttaacataag

SEQ ID NO: 4168212 - DNA, 25 bp, Homo sapien
tctgtatgtgatacctttgtaagaa

SEQ ID NO: 4168213 - DNA, 25 bp, Homo sapien
ttcctagaaaggtcctgctgtacct

SEQ ID NO: 4168214 - DNA, 25 bp, Homo sapien
tgttttgtatgccacatttcctaga

SEQ ID NO: 4168215 - DNA, 25 bp, Homo sapien
cattgcgtatatatggtacattgca

SEQ ID NO: 4168216 - DNA, 25 bp, Homo sapien
tgcttgcttctgtttcgccttcagc

SEQ ID NO: 4168217 - DNA, 25 bp, Homo sapien
cagaactgcgagtcatttaaacccc

SEQ ID NO: 4168218 - DNA, 25 bp, Homo sapien
taatacaccacccttctcactttgg

SEQ ID NO: 4168219 - DNA, 25 bp, Homo sapien
aggttatactatcctcatttcaggg

SEQ ID NO: 4168220 - DNA, 25 bp, Homo sapien
tcctctccaggttatactatcctca

SEQ ID NO: 4168221 - DNA, 25 bp, Homo sapien
tcacatgacaattgctcctctccag

SEQ ID NO: 4168222 - DNA, 25 bp, Homo sapien
gggcatgtaggatatggtttccaga

SEQ ID NO: 4168223 - DNA, 25 bp, Homo sapien
tgtatgtggatcttgaaaacccacg

SEQ ID NO: 4168224 - DNA, 25 bp, Homo sapien
tcaagttatcccctctgtatgtgga

SEQ ID NO: 4168225 - DNA, 25 bp, Homo sapien
ccagtctagtccagcttacaagtga

SEQ ID NO: 4168226 - DNA, 25 bp, Homo sapien
aggatatggcctatttaatcgagcc

SEQ ID NO: 4168227 - DNA, 25 bp, Homo sapien
ccttgactcgaaacagaatagttgg

SEQ ID NO: 4168228 - DNA, 25 bp, Homo sapien
gactatagatatcaccctttaacca

SEQ ID NO: 4168229 - DNA, 25 bp, Homo sapien
aattattgagtactaaagataggcc

SEQ ID NO: 4168230 - DNA, 25 bp, Homo sapien
aactggcatgaagctttttgcacca

SEQ ID NO: 4168231 - DNA, 25 bp, Homo sapien
tagtctgaaactactctggtgatca

SEQ ID NO: 4168232 - DNA, 25 bp, Homo sapien
tgtaaggatcagctccggctaagag

SEQ ID NO: 4168233 - DNA, 25 bp, Homo sapien
gatgggtgacatcgttatgctctgc

SEQ ID NO: 4168234 - DNA, 25 bp, Homo sapien
cataaagaccctgttgggaatgaca

SEQ ID NO: 4168235 - DNA, 25 bp, Homo sapien
caagtacttcatattggctccacca

SEQ ID NO: 4168236 - DNA, 25 bp, Homo sapien
tacagaggctcagactagtagagaa

SEQ ID NO: 4168237 - DNA, 25 bp, Homo sapien
ggtcaatggcttctggatactcaca

SEQ ID NO: 4168238 - DNA, 25 bp, Homo sapien
tagtagagaacagttaggtacgccg

SEQ ID NO: 4168239 - DNA, 25 bp, Homo sapien
catgtacttacctgtgtgactggag

SEQ ID NO: 4168240 - DNA, 25 bp, Homo sapien
tcaaggtgaggcacagttaacatgc

SEQ ID NO: 4168241 - DNA, 25 bp, Homo sapien
gagatgttttacctatgggcctcag

SEQ ID NO: 4168242 - DNA, 25 bp, Homo sapien
gagtgctcttcacttcaggtcaagg

SEQ ID NO: 4168243 - DNA, 25 bp, Homo sapien
ggcatttagcatcatgatggcacca

SEQ ID NO: 4168244 - DNA, 25 bp, Homo sapien
catcctctaacaataatgggaaggc

SEQ ID NO: 4168245 - DNA, 25 bp, Homo sapien
taatatttatgagcttcccctcaga

SEQ ID NO: 4168246 - DNA, 25 bp, Homo sapien
gcaaactcagcttccctcaaacaat

SEQ ID NO: 4168247 - DNA, 25 bp, Homo sapien
gggcacagggatcaaagccatgaat

SEQ ID NO: 4168248 - DNA, 25 bp, Homo sapien
tgcggtcacctgcactgaaggcaaa

SEQ ID NO: 4168249 - DNA, 25 bp, Homo sapien
tgtcagctctgtgagtgcaccaaca

SEQ ID NO: 4168250 - DNA, 25 bp, Homo sapien
tcttgcagaccctgatagcaccagc

SEQ ID NO: 4168251 - DNA, 25 bp, Homo sapien
caaacttacagaggtcccagtatca

SEQ ID NO: 4168252 - DNA, 25 bp, Homo sapien
tacacatttagtgcttgagcctcca

SEQ ID NO: 4168253 - DNA, 25 bp, Homo sapien
ccgaatttctacagatttgtgaggc

SEQ ID NO: 4168254 - DNA, 25 bp, Homo sapien
tgggtcttctgggatgtaacatcat

SEQ ID NO: 4168255 - DNA, 25 bp, Homo sapien
ttcaggacaaatctgcagtgcaaag

SEQ ID NO: 4168256 - DNA, 25 bp, Homo sapien
tgacccagtttcacgaatttttcga

SEQ ID NO: 4168257 - DNA, 25 bp, Homo sapien
cactgtcgtttattgaaggccatct

SEQ ID NO: 4168258 - DNA, 25 bp, Homo sapien
taagacctcaaaaggagaaatcctc

SEQ ID NO: 4168259 - DNA, 25 bp, Homo sapien
caacaaaagccccactaagacctca

SEQ ID NO: 4168260 - DNA, 25 bp, Homo sapien
gcacactgtgcttgattttccgctt

SEQ ID NO: 4168261 - DNA, 25 bp, Homo sapien
ggcacactgtgcttgattttccgct

SEQ ID NO: 4168262 - DNA, 25 bp, Homo sapien
cacactgtgcttgattttccgcttc

SEQ ID NO: 4168263 - DNA, 25 bp, Homo sapien
acactgtgcttgattttccgcttcc

SEQ ID NO: 4168264 - DNA, 25 bp, Homo sapien
gaaagttaatttactcagtcagtaa

SEQ ID NO: 4168265 - DNA, 25 bp, Homo sapien
tttggtacagaatatagaatcctga

SEQ ID NO: 4168266 - DNA, 25 bp, Homo sapien
ccaagaaagttaatttactcagtca

SEQ ID NO: 4168267 - DNA, 25 bp, Homo sapien
tagaatcctgacctcccaagaaagt

SEQ ID NO: 4168268 - DNA, 25 bp, Homo sapien
aaaacagaggcccagaatggttaag

SEQ ID NO: 4168269 - DNA, 25 bp, Homo sapien
tcaagtgctttccttatgcctggca

SEQ ID NO: 4168270 - DNA, 25 bp, Homo sapien
ggcatactggcactatatcactgaa

SEQ ID NO: 4168271 - DNA, 25 bp, Homo sapien
tgttgaacttcattcccacagaggc

SEQ ID NO: 4168272 - DNA, 25 bp, Homo sapien
cagctggatcaggagtatgtagaca

SEQ ID NO: 4168273 - DNA, 25 bp, Homo sapien
tactagggccagaccttatcagcac

SEQ ID NO: 4168274 - DNA, 25 bp, Homo sapien
taaagaatagcactctaggcaaatg

SEQ ID NO: 4168275 - DNA, 25 bp, Homo sapien
tatcagcacataacagagttcacct

SEQ ID NO: 4168276 - DNA, 25 bp, Homo sapien
tggctagtgtgtggatcagaacccc

SEQ ID NO: 4168277 - DNA, 25 bp, Homo sapien
gggtcctcagctcggtcaagaatgt

SEQ ID NO: 4168278 - DNA, 25 bp, Homo sapien
tcccgggcggtaacagttgctgcaa

SEQ ID NO: 4168279 - DNA, 25 bp, Homo sapien
catatcccgttaggctggaagccat

SEQ ID NO: 4168280 - DNA, 25 bp, Homo sapien
tgttttatgacctccgtgcatcgca

SEQ ID NO: 4168281 - DNA, 25 bp, Homo sapien
tacaagcatgctgactgggaaactg

SEQ ID NO: 4168282 - DNA, 25 bp, Homo sapien
ttggatttcctgcttaatgtaactg

SEQ ID NO: 4168283 - DNA, 25 bp, Homo sapien
ggagcatccagagcattagttgaaa

SEQ ID NO: 4168284 - DNA, 25 bp, Homo sapien
gaaagaaaaggcatcggctcagctc

SEQ ID NO: 4168285 - DNA, 25 bp, Homo sapien
ggctcagctctcagatcaggacagg

SEQ ID NO: 4168286 - DNA, 25 bp, Homo sapien
gatctgtggcggtactctgaaagct

SEQ ID NO: 4168287 - DNA, 25 bp, Homo sapien
tacaaagacttagaaggacagctcc

SEQ ID NO: 4168288 - DNA, 25 bp, Homo sapien
ctcagaacccgttcttcaaacactt

SEQ ID NO: 4168289 - DNA, 25 bp, Homo sapien
tcaaacactttaccttgccgccttg

SEQ ID NO: 4168290 - DNA, 25 bp, Homo sapien
tatttacgaccaacatctgagttca

SEQ ID NO: 4168291 - DNA, 25 bp, Homo sapien
gccgccttgccccaaaggttgtata

SEQ ID NO: 4168292 - DNA, 25 bp, Homo sapien
agccaatcaacaaaaagctgccggg

SEQ ID NO: 4168293 - DNA, 25 bp, Homo sapien
tgagcctttcagagccaaaccagct

SEQ ID NO: 4168294 - DNA, 25 bp, Homo sapien
tagatggtggacgaagccaagttgc

SEQ ID NO: 4168295 - DNA, 25 bp, Homo sapien
tgccgggtgacaatctccatttgtg

SEQ ID NO: 4168296 - DNA, 25 bp, Homo sapien
tcaaaacatctatccctgctcctgg

SEQ ID NO: 4168297 - DNA, 25 bp, Homo sapien
taatggctgatcaaaacatctatcc

SEQ ID NO: 4168298 - DNA, 25 bp, Homo sapien
gctcccgtgagctgtgtgcacagaa

SEQ ID NO: 4168299 - DNA, 25 bp, Homo sapien
cccactcaggcctatgactttagca

SEQ ID NO: 4168300 - DNA, 25 bp, Homo sapien
aaataagagctatctggcagggagg

SEQ ID NO: 4168301 - DNA, 25 bp, Homo sapien
aaaataagagctatctggcagggag

SEQ ID NO: 4168302 - DNA, 25 bp, Homo sapien
aaaattgttatcatcacatgcaggc

SEQ ID NO: 4168303 - DNA, 25 bp, Homo sapien
tctgaggggtcaggactaagaacca

SEQ ID NO: 4168304 - DNA, 25 bp, Homo sapien
gctttagaggtatttgcaaggacct

SEQ ID NO: 4168305 - DNA, 25 bp, Homo sapien
gctaacaacaaggttcatgacagtt

SEQ ID NO: 4168306 - DNA, 25 bp, Homo sapien
gaaaccttgatgaccatagactgac

SEQ ID NO: 4168307 - DNA, 25 bp, Homo sapien
ttgaagggggaaaccttgatgacca

SEQ ID NO: 4168308 - DNA, 25 bp, Homo sapien
aagatcagaaccagacatttgaagg

SEQ ID NO: 4168309 - DNA, 25 bp, Homo sapien
ttattcaaagatcagaaccagacat

SEQ ID NO: 4168310 - DNA, 25 bp, Homo sapien
ggatctgaaggtacttggggccagg

SEQ ID NO: 4168311 - DNA, 25 bp, Homo sapien
gatctgaaggtacttggggccaggg

SEQ ID NO: 4168312 - DNA, 25 bp, Homo sapien
tagagaatgacccacattgtggact

SEQ ID NO: 4168313 - DNA, 25 bp, Homo sapien
cttggaaggaggttagagaatgacc

SEQ ID NO: 4168314 - DNA, 25 bp, Homo sapien
cacattgtggactccttggtctctg

SEQ ID NO: 4168315 - DNA, 25 bp, Homo sapien
gaaggaggttagagaatgacccaca

SEQ ID NO: 4168316 - DNA, 25 bp, Homo sapien
tgagggccattttcatgctcacaaa

SEQ ID NO: 4168317 - DNA, 25 bp, Homo sapien
caaattgtcatctgggttagaatat

SEQ ID NO: 4168318 - DNA, 25 bp, Homo sapien
ctcacaaatatctctgctagcaggg

SEQ ID NO: 4168319 - DNA, 25 bp, Homo sapien
gaatatccaggtctactacttcctt

SEQ ID NO: 4168320 - DNA, 25 bp, Homo sapien
ccttgtaatacgcacgtaaagtact

SEQ ID NO: 4168321 - DNA, 25 bp, Homo sapien
tgtccttgtaatacgcacgtaaagt

SEQ ID NO: 4168322 - DNA, 25 bp, Homo sapien
tgaaaatgtccttgtaatacgcacg

SEQ ID NO: 4168323 - DNA, 25 bp, Homo sapien
aaaatgtccttgtaatacgcacgta

SEQ ID NO: 4168324 - DNA, 25 bp, Homo sapien
ttaagttacggacttgtctattcca

SEQ ID NO: 4168325 - DNA, 25 bp, Homo sapien
tgtcttagaattcatagtgtatatc

SEQ ID NO: 4168326 - DNA, 25 bp, Homo sapien
tcataaatatgtctactgtgcaaat

SEQ ID NO: 4168327 - DNA, 25 bp, Homo sapien
atttcataaatatgtctactgtgca

SEQ ID NO: 4168328 - DNA, 25 bp, Homo sapien
ttagaattcatagtgtatatcaaga

SEQ ID NO: 4168329 - DNA, 25 bp, Homo sapien
caaggcaaagcattggagaccactg

SEQ ID NO: 4168330 - DNA, 25 bp, Homo sapien
ccagatgtgtgtgcagtagaattcc

SEQ ID NO: 4168331 - DNA, 25 bp, Homo sapien
aactgttacccttggttgcacctgg

SEQ ID NO: 4168332 - DNA, 25 bp, Homo sapien
ttaccagggaaacaagccaaccagc

SEQ ID NO: 4168333 - DNA, 25 bp, Homo sapien
ctcccttcgtggttctctgcctttt

SEQ ID NO: 4168334 - DNA, 25 bp, Homo sapien
cactgaagggctgtcctcccttcgt

SEQ ID NO: 4168335 - DNA, 25 bp, Homo sapien
tgaagggctgtcctcccttcgtggt

SEQ ID NO: 4168336 - DNA, 25 bp, Homo sapien
gctgtcctcccttcgtggttctctg

SEQ ID NO: 4168337 - DNA, 25 bp, Homo sapien
ttcacatccatttcactggaagaaa

SEQ ID NO: 4168338 - DNA, 25 bp, Homo sapien
cacatccatttcactggaagaaatc

SEQ ID NO: 4168339 - DNA, 25 bp, Homo sapien
aacttctttcatccattattttcac

SEQ ID NO: 4168340 - DNA, 25 bp, Homo sapien
ttttcacatccatttcactggaaga

SEQ ID NO: 4168341 - DNA, 25 bp, Homo sapien
ctatatgacgagaaatgtgtctcca

SEQ ID NO: 4168342 - DNA, 25 bp, Homo sapien
tctcaagtggattgtgttccaatcc

SEQ ID NO: 4168343 - DNA, 25 bp, Homo sapien
ggataacatgcccaaactcaagatt

SEQ ID NO: 4168344 - DNA, 25 bp, Homo sapien
gttccaatccggtgtagcctttctg

SEQ ID NO: 4168345 - DNA, 25 bp, Homo sapien
tctaagatcctatgtttctgtggca

SEQ ID NO: 4168346 - DNA, 25 bp, Homo sapien
ctcctctaagatcctatgtttctgt

SEQ ID NO: 4168347 - DNA, 25 bp, Homo sapien
gcatctgggtataactgcagaactt

SEQ ID NO: 4168348 - DNA, 25 bp, Homo sapien
tgtggcatctgggtataactgcaga

SEQ ID NO: 4168349 - DNA, 25 bp, Homo sapien
gaaaccagcagatccaccggtagtg

SEQ ID NO: 4168350 - DNA, 25 bp, Homo sapien
tgccatcgaacactagagcaaggct

SEQ ID NO: 4168351 - DNA, 25 bp, Homo sapien
aaaattcctcggtgcctggttctga

SEQ ID NO: 4168352 - DNA, 25 bp, Homo sapien
gagcaaggctatctgtgttcaccca

SEQ ID NO: 4168353 - DNA, 25 bp, Homo sapien
aacttgctgttccagggtcaatgat

SEQ ID NO: 4168354 - DNA, 25 bp, Homo sapien
caatgatatacatgcccaacaaatt

SEQ ID NO: 4168355 - DNA, 25 bp, Homo sapien
gtagatctgtgcactttcaacttgc

SEQ ID NO: 4168356 - DNA, 25 bp, Homo sapien
gttttgctgtctcaggggacgcaga

SEQ ID NO: 4168357 - DNA, 25 bp, Homo sapien
gaggataaatcatgtcaggtaggaa

SEQ ID NO: 4168358 - DNA, 25 bp, Homo sapien
aggataaatcatgtcaggtaggaac

SEQ ID NO: 4168359 - DNA, 25 bp, Homo sapien
agaggataaatcatgtcaggtagga

SEQ ID NO: 4168360 - DNA, 25 bp, Homo sapien
taaagtgtccaactcaggaacagac

SEQ ID NO: 4168361 - DNA, 25 bp, Homo sapien
tgggatagaatgacctcttggagcc

SEQ ID NO: 4168362 - DNA, 25 bp, Homo sapien
gaaaaatccttggaagtgtgccagg

SEQ ID NO: 4168363 - DNA, 25 bp, Homo sapien
aaaagtctgagaacagccattcggg

SEQ ID NO: 4168364 - DNA, 25 bp, Homo sapien
tacccaggataattagtcaaggaaa

SEQ ID NO: 4168365 - DNA, 25 bp, Homo sapien
tcacatatgatgtacatcctaaaca

SEQ ID NO: 4168366 - DNA, 25 bp, Homo sapien
taaacataccacaacaagatcccaa

SEQ ID NO: 4168367 - DNA, 25 bp, Homo sapien
tctattcaccattatactggaagtt

SEQ ID NO: 4168368 - DNA, 25 bp, Homo sapien
tagttccttgtggtatagagttagg

SEQ ID NO: 4168369 - DNA, 25 bp, Homo sapien
tttcaaaaagccaacctgagtttca

SEQ ID NO: 4168370 - DNA, 25 bp, Homo sapien
tctgataactgtgggtttaatttgt

SEQ ID NO: 4168371 - DNA, 25 bp, Homo sapien
tctagttccttgtggtatagagtta

SEQ ID NO: 4168372 - DNA, 25 bp, Homo sapien
aactaaatatctattggggttatgc

SEQ ID NO: 4168373 - DNA, 25 bp, Homo sapien
gttaggtgtgattacttacatagtc

SEQ ID NO: 4168374 - DNA, 25 bp, Homo sapien
tcctttgctttgctagatttgtcaa

SEQ ID NO: 4168375 - DNA, 25 bp, Homo sapien
acttacatagtcgattacattttac

SEQ ID NO: 4168376 - DNA, 25 bp, Homo sapien
cactgatgatcttcttgttaccaaa

SEQ ID NO: 4168377 - DNA, 25 bp, Homo sapien
cctctttacttggtataatagtcca

SEQ ID NO: 4168378 - DNA, 25 bp, Homo sapien
ttaggttaagactgttctgcatatg

SEQ ID NO: 4168379 - DNA, 25 bp, Homo sapien
taccaaatcacaaagcttcttaatt

SEQ ID NO: 4168380 - DNA, 25 bp, Homo sapien
aagtcaagtgatctgaatctttcag

SEQ ID NO: 4168381 - DNA, 25 bp, Homo sapien
tgtagaaagctcttatagcaacttg

SEQ ID NO: 4168382 - DNA, 25 bp, Homo sapien
ttcagatcttgttgtagaaagctct

SEQ ID NO: 4168383 - DNA, 25 bp, Homo sapien
tgatctgaatctttcagtagttcag

SEQ ID NO: 4168384 - DNA, 25 bp, Homo sapien
tagaaggaagggagtgccccactgt

SEQ ID NO: 4168385 - DNA, 25 bp, Homo sapien
gagggtctcaccatgcgcacagttc

SEQ ID NO: 4168386 - DNA, 25 bp, Homo sapien
taagaggatcctgtactgagaagtt

SEQ ID NO: 4168387 - DNA, 25 bp, Homo sapien
cacatagacgtgaaggaaggggcta

SEQ ID NO: 4168388 - DNA, 25 bp, Homo sapien
cctgtggcctgggttgcgcgtgcgt

SEQ ID NO: 4168389 - DNA, 25 bp, Homo sapien
aagacgggcagagagattttactcc

SEQ ID NO: 4168390 - DNA, 25 bp, Homo sapien
ctgtggcctgggttgcgcgtgcgtg

SEQ ID NO: 4168391 - DNA, 25 bp, Homo sapien
ctattatagcggctcagtcgctcta

SEQ ID NO: 4168392 - DNA, 25 bp, Homo sapien
gctctagcaccgcaggcatttcaaa

SEQ ID NO: 4168393 - DNA, 25 bp, Homo sapien
tctagcaccgcaggcatttcaaaga

SEQ ID NO: 4168394 - DNA, 25 bp, Homo sapien
tagcggctcagtcgctctagcaccg

SEQ ID NO: 4168395 - DNA, 25 bp, Homo sapien
cgtgaagatgttgtccgccctggct

SEQ ID NO: 4168396 - DNA, 25 bp, Homo sapien
tccgggcttgggtcaaagatacgca

SEQ ID NO: 4168397 - DNA, 25 bp, Homo sapien
tgcggttccgttcagtggccgtgaa

SEQ ID NO: 4168398 - DNA, 25 bp, Homo sapien
gcacctcagcaaaagcttgggacgt

SEQ ID NO: 4168399 - DNA, 25 bp, Homo sapien
aagcggttagcgctgtgacgccggc

SEQ ID NO: 4168400 - DNA, 25 bp, Homo sapien
gacggccagggaagcggttagcgct

SEQ ID NO: 4168401 - DNA, 25 bp, Homo sapien
ggtgaaccgtgagaatcgcctctca

SEQ ID NO: 4168402 - DNA, 25 bp, Homo sapien
cgcgcaggtgaaccgtgagaatcgc

SEQ ID NO: 4168403 - DNA, 25 bp, Homo sapien
cagttgttctaaatgacggccgtac

SEQ ID NO: 4168404 - DNA, 25 bp, Homo sapien
gagatgccttttagcagacttagaa

SEQ ID NO: 4168405 - DNA, 25 bp, Homo sapien
tatctctgggcaatggtgcacttag

SEQ ID NO: 4168406 - DNA, 25 bp, Homo sapien
cagtctctgcttacagtgggtcgac

SEQ ID NO: 4168407 - DNA, 25 bp, Homo sapien
ccttgattagagatgattttccaac

SEQ ID NO: 4168408 - DNA, 25 bp, Homo sapien
cttgattagagatgattttccaaca

SEQ ID NO: 4168409 - DNA, 25 bp, Homo sapien
tagataggtctctaccatgtcaaca

SEQ ID NO: 4168410 - DNA, 25 bp, Homo sapien
aacctggcatgtccaccactgtaaa

SEQ ID NO: 4168411 - DNA, 25 bp, Homo sapien
tcttcaggtgctctaaagccataac

SEQ ID NO: 4168412 - DNA, 25 bp, Homo sapien
tccttcgttcttttagataggtctc

SEQ ID NO: 4168413 - DNA, 25 bp, Homo sapien
tatcacttgattacataaggagaca

SEQ ID NO: 4168414 - DNA, 25 bp, Homo sapien
ccggcgtgcctggtctatatgggaa

SEQ ID NO: 4168415 - DNA, 25 bp, Homo sapien
taaatattaccctaacactaacaga

SEQ ID NO: 4168416 - DNA, 25 bp, Homo sapien
tgtaaagctacaacaaacaagatac

SEQ ID NO: 4168417 - DNA, 25 bp, Homo sapien
ctatggcaatattgtctgttttttg

SEQ ID NO: 4168418 - DNA, 25 bp, Homo sapien
caacgctatccactaataaaaatgt

SEQ ID NO: 4168419 - DNA, 25 bp, Homo sapien
ttgaattccaacaacgctatccact

SEQ ID NO: 4168420 - DNA, 25 bp, Homo sapien
ggcaatattgtctgttttttgaatt

SEQ ID NO: 4168421 - DNA, 25 bp, Homo sapien
tcacacagatgcacgtagaactgat

SEQ ID NO: 4168422 - DNA, 25 bp, Homo sapien
accatgattcaaaggaagtacttac

SEQ ID NO: 4168423 - DNA, 25 bp, Homo sapien
tatttctaattgcaaccatgattca

SEQ ID NO: 4168424 - DNA, 25 bp, Homo sapien
cagatgcacgtagaactgatatttc

SEQ ID NO: 4168425 - DNA, 25 bp, Homo sapien
catgctttttagtcataaaagatgc

SEQ ID NO: 4168426 - DNA, 25 bp, Homo sapien
gcaggagtgtggtgtcatgatacat

SEQ ID NO: 4168427 - DNA, 25 bp, Homo sapien
tggtgtcatgatacatatattggtt

SEQ ID NO: 4168428 - DNA, 25 bp, Homo sapien
catagcccttgttacgatcatttgt

SEQ ID NO: 4168429 - DNA, 25 bp, Homo sapien
tctggatctgaagcacttgttttaa

SEQ ID NO: 4168430 - DNA, 25 bp, Homo sapien
tgttaacaaatttctggatctgaag

SEQ ID NO: 4168431 - DNA, 25 bp, Homo sapien
gttacactggctataaagcatctca

SEQ ID NO: 4168432 - DNA, 25 bp, Homo sapien
ttcctgttacactggctataaagca

SEQ ID NO: 4168433 - DNA, 25 bp, Homo sapien
aagcatctcaacaggtggattccag

SEQ ID NO: 4168434 - DNA, 25 bp, Homo sapien
gtggattccagaaaaggtcacagca

SEQ ID NO: 4168435 - DNA, 25 bp, Homo sapien
cgtcaaacccttctgtacatagttg

SEQ ID NO: 4168436 - DNA, 25 bp, Homo sapien
tatcgatgcttaacagaaaagcagc

SEQ ID NO: 4168437 - DNA, 25 bp, Homo sapien
tgaatcttcagctaaaccgggaacc

SEQ ID NO: 4168438 - DNA, 25 bp, Homo sapien
gatcctcctgaagttacagatgcac

SEQ ID NO: 4168439 - DNA, 25 bp, Homo sapien
ctgatggcattaggacacacaggcc

SEQ ID NO: 4168440 - DNA, 25 bp, Homo sapien
catatgtaagcttttggctcaggct

SEQ ID NO: 4168441 - DNA, 25 bp, Homo sapien
tgtggcaaccagtttcaagcagggc

SEQ ID NO: 4168442 - DNA, 25 bp, Homo sapien
tacaggaactgcctagcacttgggt

SEQ ID NO: 4168443 - DNA, 25 bp, Homo sapien
aagatgcagattagccctttcccag

SEQ ID NO: 4168444 - DNA, 25 bp, Homo sapien
taaggacaatatagcatggactggg

SEQ ID NO: 4168445 - DNA, 25 bp, Homo sapien
ggaccatagggcttatttgctgaga

SEQ ID NO: 4168446 - DNA, 25 bp, Homo sapien
ggcaaaaaagcttcacatgtgtcca

SEQ ID NO: 4168447 - DNA, 25 bp, Homo sapien
tgatcaacaaggtttgccactgctt

SEQ ID NO: 4168448 - DNA, 25 bp, Homo sapien
ttggctccattatacataggtccgc

SEQ ID NO: 4168449 - DNA, 25 bp, Homo sapien
gctaagatctggaagtaccacctgg

SEQ ID NO: 4168450 - DNA, 25 bp, Homo sapien
taggtccgcctctgaatactaaagt

SEQ ID NO: 4168451 - DNA, 25 bp, Homo sapien
taatgagaagggtagcaaactggtg

SEQ ID NO: 4168452 - DNA, 25 bp, Homo sapien
ccataataacattgtgaggtagaca

SEQ ID NO: 4168453 - DNA, 25 bp, Homo sapien
tagtgctccttcatagattgccctg

SEQ ID NO: 4168454 - DNA, 25 bp, Homo sapien
gatgtatcctatggctggagacgca

SEQ ID NO: 4168455 - DNA, 25 bp, Homo sapien
aaagcaaccggcttaaacatctgga

SEQ ID NO: 4168456 - DNA, 25 bp, Homo sapien
taagagtgtctagtgtgctgagcct

SEQ ID NO: 4168457 - DNA, 25 bp, Homo sapien
ctaaattgggatgtactcaaactgc

SEQ ID NO: 4168458 - DNA, 25 bp, Homo sapien
caaagctgtatcattggaggaagaa

SEQ ID NO: 4168459 - DNA, 25 bp, Homo sapien
catgggactgcatctagacagatac

SEQ ID NO: 4168460 - DNA, 25 bp, Homo sapien
tcaagaataatggagggaacaatcc

SEQ ID NO: 4168461 - DNA, 25 bp, Homo sapien
tttgagggaggtattgacaaaccca

SEQ ID NO: 4168462 - DNA, 25 bp, Homo sapien
gatgggcattgatactggcaacaag

SEQ ID NO: 4168463 - DNA, 25 bp, Homo sapien
tcatgtaagtactagaattggcctg

SEQ ID NO: 4168464 - DNA, 25 bp, Homo sapien
gcatgctggcagataaagtggtatt

SEQ ID NO: 4168465 - DNA, 25 bp, Homo sapien
tatgcttatgttactgctgcagctg

SEQ ID NO: 4168466 - DNA, 25 bp, Homo sapien
cccctaaatggaacacagaaagtag

SEQ ID NO: 4168467 - DNA, 25 bp, Homo sapien
tccattgtgtcctgagtaaagacca

SEQ ID NO: 4168468 - DNA, 25 bp, Homo sapien
tatgtttagaatgcccagcctcacc

SEQ ID NO: 4168469 - DNA, 25 bp, Homo sapien
gatagattatattccagccaacctg

SEQ ID NO: 4168470 - DNA, 25 bp, Homo sapien
tctgagtctgcttacctggtcctgt

SEQ ID NO: 4168471 - DNA, 25 bp, Homo sapien
tgagcaagacaaaatgttggacatt

SEQ ID NO: 4168472 - DNA, 25 bp, Homo sapien
gagtaaatgggtacatagcaagttg

SEQ ID NO: 4168473 - DNA, 25 bp, Homo sapien
gacattaagaaacagttccctgggc

SEQ ID NO: 4168474 - DNA, 25 bp, Homo sapien
gctataccatagagtagagcctctc

SEQ ID NO: 4168475 - DNA, 25 bp, Homo sapien
tgcaatgcaaagatacagcttcttg

SEQ ID NO: 4168476 - DNA, 25 bp, Homo sapien
cacatgaggcgtaagtgtacaccaa

SEQ ID NO: 4168477 - DNA, 25 bp, Homo sapien
gggagttagagagttattacacatg

SEQ ID NO: 4168478 - DNA, 25 bp, Homo sapien
tgacatgtgccctaccttcaaggtg

SEQ ID NO: 4168479 - DNA, 25 bp, Homo sapien
ctcgcatgatggctgcggtgccgcc

SEQ ID NO: 4168480 - DNA, 25 bp, Homo sapien
gctggacgtgctctcgcgtagctcc

SEQ ID NO: 4168481 - DNA, 25 bp, Homo sapien
gcgtagctccgcctttcgtaagtcc

SEQ ID NO: 4168482 - DNA, 25 bp, Homo sapien
gaaccgtgtgagaatccctaaggcg

SEQ ID NO: 4168483 - DNA, 25 bp, Homo sapien
tcctccactcttggtaatgatctca

SEQ ID NO: 4168484 - DNA, 25 bp, Homo sapien
caaggaagctcggatttcaacatcc

SEQ ID NO: 4168485 - DNA, 25 bp, Homo sapien
aggaagctcggatttcaacatccat

SEQ ID NO: 4168486 - DNA, 25 bp, Homo sapien
gccctcctccactcttggtaatgat

SEQ ID NO: 4168487 - DNA, 25 bp, Homo sapien
gactttatcacttaggctcccttgc

SEQ ID NO: 4168488 - DNA, 25 bp, Homo sapien
tcagtgagatacacgaagaggtgtg

SEQ ID NO: 4168489 - DNA, 25 bp, Homo sapien
gggaaaagtggccaaatatgctgcc

SEQ ID NO: 4168490 - DNA, 25 bp, Homo sapien
caaggaggcagtggtcaacaatacc

SEQ ID NO: 4168491 - DNA, 25 bp, Homo sapien
tttagagagtaatcttggtgcggcc

SEQ ID NO: 4168492 - DNA, 25 bp, Homo sapien
cataacgactgatctctgaggcaaa

SEQ ID NO: 4168493 - DNA, 25 bp, Homo sapien
tagccgttctcagcatcaggtgact

SEQ ID NO: 4168494 - DNA, 25 bp, Homo sapien
tgtgaagtgtcagcgcaaaggtcca

SEQ ID NO: 4168495 - DNA, 25 bp, Homo sapien
taacagcttttagcccctgctcccc

SEQ ID NO: 4168496 - DNA, 25 bp, Homo sapien
gatctaacagcttttagcccctgct

SEQ ID NO: 4168497 - DNA, 25 bp, Homo sapien
ccttcaagcctgatctaacagcttt

SEQ ID NO: 4168498 - DNA, 25 bp, Homo sapien
tctaacagcttttagcccctgctcc

SEQ ID NO: 4168499 - DNA, 25 bp, Homo sapien
gactgggccaagttgagggtcatcc

SEQ ID NO: 4168500 - DNA, 25 bp, Homo sapien
gccggttgagagagtagagcctcct

SEQ ID NO: 4168501 - DNA, 25 bp, Homo sapien
ttaagactgtcagggacgcagatcc

SEQ ID NO: 4168502 - DNA, 25 bp, Homo sapien
cctcctgacgcgaagcactgagaag

SEQ ID NO: 4168503 - DNA, 25 bp, Homo sapien
caggagtgcaattctttcttcaaag

SEQ ID NO: 4168504 - DNA, 25 bp, Homo sapien
ggagtgcaattctttcttcaaagtg

SEQ ID NO: 4168505 - DNA, 25 bp, Homo sapien
gagtgcaattctttcttcaaagtgg

SEQ ID NO: 4168506 - DNA, 25 bp, Homo sapien
gtgcaattctttcttcaaagtggaa

SEQ ID NO: 4168507 - DNA, 25 bp, Homo sapien
gtgtaggttcactttgcagggctgt

SEQ ID NO: 4168508 - DNA, 25 bp, Homo sapien
tttgtccacttggtcaccactggcc

SEQ ID NO: 4168509 - DNA, 25 bp, Homo sapien
gatgccctttgtccacttggtcacc

SEQ ID NO: 4168510 - DNA, 25 bp, Homo sapien
tggtcaccactggccttgcaggcat

SEQ ID NO: 4168511 - DNA, 25 bp, Homo sapien
agagatgccctttgtccacttggtc

SEQ ID NO: 4168512 - DNA, 25 bp, Homo sapien
agcgcctgacgtgaattaggcacac

SEQ ID NO: 4168513 - DNA, 25 bp, Homo sapien
ggcacacaacagacatagttcttga

SEQ ID NO: 4168514 - DNA, 25 bp, Homo sapien
cagacatagttcttgaactgtcccc

SEQ ID NO: 4168515 - DNA, 25 bp, Homo sapien
tgacgtgaattaggcacacaacaga

SEQ ID NO: 4168516 - DNA, 25 bp, Homo sapien
ttctgtaagatcaatgtcatggaac

SEQ ID NO: 4168517 - DNA, 25 bp, Homo sapien
aagagtcaagaacctcctctccctt

SEQ ID NO: 4168518 - DNA, 25 bp, Homo sapien
aaagagtcaagaacctcctctccct

SEQ ID NO: 4168519 - DNA, 25 bp, Homo sapien
tctggagtttctgaggcatccacgg

SEQ ID NO: 4168520 - DNA, 25 bp, Homo sapien
agtttctgaggcatccacggaggag

SEQ ID NO: 4168521 - DNA, 25 bp, Homo sapien
cccctggttaagaacgctgtgccta

SEQ ID NO: 4168522 - DNA, 25 bp, Homo sapien
caaatggcactgtacatcaagatca

SEQ ID NO: 4168523 - DNA, 25 bp, Homo sapien
tattcaaactcaggcaccctatgag

SEQ ID NO: 4168524 - DNA, 25 bp, Homo sapien
atgaatactcccctgatgtagctga

SEQ ID NO: 4168525 - DNA, 25 bp, Homo sapien
gtggcaaaatgggagtcgtcccctc

SEQ ID NO: 4168526 - DNA, 25 bp, Homo sapien
tttatatcctctccgatcctcatgg

SEQ ID NO: 4168527 - DNA, 25 bp, Homo sapien
cacttcgtggcgttgaaaaaggact

SEQ ID NO: 4168528 - DNA, 25 bp, Homo sapien
ttaagtactgtgaagagttggctgg

SEQ ID NO: 4168529 - DNA, 25 bp, Homo sapien
caagactcagggatgtcgagccaac

SEQ ID NO: 4168530 - DNA, 25 bp, Homo sapien
cacatggagcattaaggcagcaaaa

SEQ ID NO: 4168531 - DNA, 25 bp, Homo sapien
tctatggtgcctttcccagtgggaa

SEQ ID NO: 4168532 - DNA, 25 bp, Homo sapien
caatggatgggcagaaaccttcagc

SEQ ID NO: 4168533 - DNA, 25 bp, Homo sapien
ccatacctgcacatagttaatcctg

SEQ ID NO: 4168534 - DNA, 25 bp, Homo sapien
tatgggtttgggactcaatttacaa

SEQ ID NO: 4168535 - DNA, 25 bp, Homo sapien
gggatcaaatccagaagaagcaaac

SEQ ID NO: 4168536 - DNA, 25 bp, Homo sapien
catggaaactcagacaagaacaggc

SEQ ID NO: 4168537 - DNA, 25 bp, Homo sapien
ttcatacaccgacctgtttgtgtga

SEQ ID NO: 4168538 - DNA, 25 bp, Homo sapien
tcatatattcatacaccgacctgtt

SEQ ID NO: 4168539 - DNA, 25 bp, Homo sapien
tatattcatacaccgacctgtttgt

SEQ ID NO: 4168540 - DNA, 25 bp, Homo sapien
cctcatatattcatacaccgacctg

SEQ ID NO: 4168541 - DNA, 25 bp, Homo sapien
ctcatatggtcccactacgacaggg

SEQ ID NO: 4168542 - DNA, 25 bp, Homo sapien
gaaactcaatcttacttctgggctg

SEQ ID NO: 4168543 - DNA, 25 bp, Homo sapien
ggactcttccctacaaatgctacag

SEQ ID NO: 4168544 - DNA, 25 bp, Homo sapien
aaatatgtcttctctggcctagagg

SEQ ID NO: 4168545 - DNA, 25 bp, Homo sapien
tttctatctttgacaggtacagcat

SEQ ID NO: 4168546 - DNA, 25 bp, Homo sapien
cccttttctatctttgacaggtaca

SEQ ID NO: 4168547 - DNA, 25 bp, Homo sapien
ttcccaatcccttttctatctttga

SEQ ID NO: 4168548 - DNA, 25 bp, Homo sapien
cttcccaatcccttttctatctttg

SEQ ID NO: 4168549 - DNA, 25 bp, Homo sapien
caggactgccaagattttatcccta

SEQ ID NO: 4168550 - DNA, 25 bp, Homo sapien
gccaagattttatccctactttgtg

SEQ ID NO: 4168551 - DNA, 25 bp, Homo sapien
gattttatccctactttgtgctatt

SEQ ID NO: 4168552 - DNA, 25 bp, Homo sapien
gactgccaagattttatccctactt

SEQ ID NO: 4168553 - DNA, 25 bp, Homo sapien
ccatcatctccatgtttggggccca

SEQ ID NO: 4168554 - DNA, 25 bp, Homo sapien
catctccatgtttggggcccagagg

SEQ ID NO: 4168555 - DNA, 25 bp, Homo sapien
ccagagggccagagcggggagggag

SEQ ID NO: 4168556 - DNA, 25 bp, Homo sapien
catgtttggggcccagaggttaaag

SEQ ID NO: 4168557 - DNA, 25 bp, Homo sapien
cccagtggtttttgaatgatatccc

SEQ ID NO: 4168558 - DNA, 25 bp, Homo sapien
gaatgatatcccttcagcttcagcc

SEQ ID NO: 4168559 - DNA, 25 bp, Homo sapien
acacaaaccctgcaacccagtggtt

SEQ ID NO: 4168560 - DNA, 25 bp, Homo sapien
gctgctaaaatctggcagccacaca

SEQ ID NO: 4168561 - DNA, 25 bp, Homo sapien
gattcccatgtaggaggacagtgct

SEQ ID NO: 4168562 - DNA, 25 bp, Homo sapien
gctgaaaaccagtaaggcagtctga

SEQ ID NO: 4168563 - DNA, 25 bp, Homo sapien
tcctgggtgattcccatgtaggagg

SEQ ID NO: 4168564 - DNA, 25 bp, Homo sapien
aggaggacagtgctgaaaaccagta

SEQ ID NO: 4168565 - DNA, 25 bp, Homo sapien
taatgtaattccaatggggcacact

SEQ ID NO: 4168566 - DNA, 25 bp, Homo sapien
tttctaatgtaattccaatggggca

SEQ ID NO: 4168567 - DNA, 25 bp, Homo sapien
tctaatgtaattccaatggggcaca

SEQ ID NO: 4168568 - DNA, 25 bp, Homo sapien
ttctaatgtaattccaatggggcac

SEQ ID NO: 4168569 - DNA, 25 bp, Homo sapien
ttagccacttgtaaatctgaatatg

SEQ ID NO: 4168570 - DNA, 25 bp, Homo sapien
cttttagccacttgtaaatctgaat

SEQ ID NO: 4168571 - DNA, 25 bp, Homo sapien
tcttttagccacttgtaaatctgaa

SEQ ID NO: 4168572 - DNA, 25 bp, Homo sapien
gccacttgtaaatctgaatatgaag

SEQ ID NO: 4168573 - DNA, 25 bp, Homo sapien
ggagggggccatgtgaccccagtcc

SEQ ID NO: 4168574 - DNA, 25 bp, Homo sapien
ctggacatcacatcacaacaatgtt

SEQ ID NO: 4168575 - DNA, 25 bp, Homo sapien
gagggggccatgtgaccccagtcct

SEQ ID NO: 4168576 - DNA, 25 bp, Homo sapien
ggacatcacatcacaacaatgttgc

SEQ ID NO: 4168577 - DNA, 25 bp, Homo sapien
gatcaagtgaacaggtctcaggacc

SEQ ID NO: 4168578 - DNA, 25 bp, Homo sapien
gtctgagagggaataagagctcgtt

SEQ ID NO: 4168579 - DNA, 25 bp, Homo sapien
tggctgtcttgaacttagctgaaaa

SEQ ID NO: 4168580 - DNA, 25 bp, Homo sapien
tggtctctctgaaaaattcatttgg

SEQ ID NO: 4168581 - DNA, 25 bp, Homo sapien
ctggtactagggcaataaaatctta

SEQ ID NO: 4168582 - DNA, 25 bp, Homo sapien
tatagaacatcataactgctggtac

SEQ ID NO: 4168583 - DNA, 25 bp, Homo sapien
catgggctcagctataagttctata

SEQ ID NO: 4168584 - DNA, 25 bp, Homo sapien
ataaaatcttaacagtctcggccgg

SEQ ID NO: 4168585 - DNA, 25 bp, Homo sapien
gagcagagttttctttagggttaca

SEQ ID NO: 4168586 - DNA, 25 bp, Homo sapien
tctttagggttacagcggagtgtga

SEQ ID NO: 4168587 - DNA, 25 bp, Homo sapien
cggagtgtgagatcgtgggagataa

SEQ ID NO: 4168588 - DNA, 25 bp, Homo sapien
ggtgagtcactgatcaatggctcag

SEQ ID NO: 4168589 - DNA, 25 bp, Homo sapien
aaaaatttctttgatgccgagcctc

SEQ ID NO: 4168590 - DNA, 25 bp, Homo sapien
tccataagggcactataaggctaag

SEQ ID NO: 4168591 - DNA, 25 bp, Homo sapien
gagagctggccgcaatgataccgct

SEQ ID NO: 4168592 - DNA, 25 bp, Homo sapien
gggccatgtgaaagacgctcgctat

SEQ ID NO: 4168593 - DNA, 25 bp, Homo sapien
tccctctgtagcaagtgatgtattt

SEQ ID NO: 4168594 - DNA, 25 bp, Homo sapien
cctggaatttccctctgtagcaagt

SEQ ID NO: 4168595 - DNA, 25 bp, Homo sapien
gatgagaggaagttgacacttggcc

SEQ ID NO: 4168596 - DNA, 25 bp, Homo sapien
ctccaggtctctgagatttggaaac

SEQ ID NO: 4168597 - DNA, 25 bp, Homo sapien
tagacattgtgctaatattggctta

SEQ ID NO: 4168598 - DNA, 25 bp, Homo sapien
gtttgttacacatgatcttttagac

SEQ ID NO: 4168599 - DNA, 25 bp, Homo sapien
cccagactaaagtgccatgacttga

SEQ ID NO: 4168600 - DNA, 25 bp, Homo sapien
tactccttttcttaacacttagagc

SEQ ID NO: 4168601 - DNA, 25 bp, Homo sapien
gcttgtgaatcatcattgtggtcaa

SEQ ID NO: 4168602 - DNA, 25 bp, Homo sapien
ggagatgtggttcgtctcctgtttc

SEQ ID NO: 4168603 - DNA, 25 bp, Homo sapien
gcctgtccaagtgcaagccaaagga

SEQ ID NO: 4168604 - DNA, 25 bp, Homo sapien
ggtcccatagtctggcctgctcaag

SEQ ID NO: 4168605 - DNA, 25 bp, Homo sapien
gctctcccaattctttaagtttgtc

SEQ ID NO: 4168606 - DNA, 25 bp, Homo sapien
cttgcactggtatgtggatttagac

SEQ ID NO: 4168607 - DNA, 25 bp, Homo sapien
ggtatgtggatttagacaggccttc

SEQ ID NO: 4168608 - DNA, 25 bp, Homo sapien
gtaggacagccgaagacagcttgca

SEQ ID NO: 4168609 - DNA, 25 bp, Homo sapien
tccttggtgtctaactgggcttgat

SEQ ID NO: 4168610 - DNA, 25 bp, Homo sapien
gatcttcataaagactatatggtga

SEQ ID NO: 4168611 - DNA, 25 bp, Homo sapien
gccaacttcgggcattccttccttg

SEQ ID NO: 4168612 - DNA, 25 bp, Homo sapien
tatatggtgaagttagcttttcctc

SEQ ID NO: 4168613 - DNA, 25 bp, Homo sapien
cattgtccagtactctttgttaggt

SEQ ID NO: 4168614 - DNA, 25 bp, Homo sapien
tgttgtcccacttcttaagtttcca

SEQ ID NO: 4168615 - DNA, 25 bp, Homo sapien
gggtatttaagagccaccagctggc

SEQ ID NO: 4168616 - DNA, 25 bp, Homo sapien
agctggtagtgcctatgttgtccca

SEQ ID NO: 4168617 - DNA, 25 bp, Homo sapien
tctgtgaagccttcactgaatgcaa

SEQ ID NO: 4168618 - DNA, 25 bp, Homo sapien
ctgtgaagccttcactgaatgcaat

SEQ ID NO: 4168619 - DNA, 25 bp, Homo sapien
gagactcataaacaaccatggatgg

SEQ ID NO: 4168620 - DNA, 25 bp, Homo sapien
ctgatctaccggcttcaaccatgga

SEQ ID NO: 4168621 - DNA, 25 bp, Homo sapien
taaaacttcatgagaggttctgcca

SEQ ID NO: 4168622 - DNA, 25 bp, Homo sapien
tggaatggtcatccctgtctagaga

SEQ ID NO: 4168623 - DNA, 25 bp, Homo sapien
aggtttataagagttccaagctgtc

SEQ ID NO: 4168624 - DNA, 25 bp, Homo sapien
gtttgtgtagattgctctggaacca

SEQ ID NO: 4168625 - DNA, 25 bp, Homo sapien
cccagggaatagttctcaaagaaca

SEQ ID NO: 4168626 - DNA, 25 bp, Homo sapien
gatagggtgcaggatacctattgtc

SEQ ID NO: 4168627 - DNA, 25 bp, Homo sapien
agggcagacaagcactgcagtttcc

SEQ ID NO: 4168628 - DNA, 25 bp, Homo sapien
agtctgaagatttttggctctgttt

SEQ ID NO: 4168629 - DNA, 25 bp, Homo sapien
ctctgtttgtgctggtcatgtctgt

SEQ ID NO: 4168630 - DNA, 25 bp, Homo sapien
gcagacaagcactgcagtttccctg

SEQ ID NO: 4168631 - DNA, 25 bp, Homo sapien
gggcctgctactgtagaaagctggg

SEQ ID NO: 4168632 - DNA, 25 bp, Homo sapien
tccaccaagaggatttaggcattca

SEQ ID NO: 4168633 - DNA, 25 bp, Homo sapien
cctctctttttacaggggcctgcta

SEQ ID NO: 4168634 - DNA, 25 bp, Homo sapien
gctgggacccatgtttgacaagagg

SEQ ID NO: 4168635 - DNA, 25 bp, Homo sapien
catgttagtagagcttctgagccac

SEQ ID NO: 4168636 - DNA, 25 bp, Homo sapien
cacatgtgattccatgttagtagag

SEQ ID NO: 4168637 - DNA, 25 bp, Homo sapien
tttgtgtaggcagaacattgtctca

SEQ ID NO: 4168638 - DNA, 25 bp, Homo sapien
gattccatgttagtagagcttctga

SEQ ID NO: 4168639 - DNA, 25 bp, Homo sapien
tggtggttgaaagggcacaactgtt

SEQ ID NO: 4168640 - DNA, 25 bp, Homo sapien
aaggtcacagttgtagccaccagca

SEQ ID NO: 4168641 - DNA, 25 bp, Homo sapien
agttggtggttgaaagggcacaact

SEQ ID NO: 4168642 - DNA, 25 bp, Homo sapien
tgcagcgtttgtttatgtcttttgc

SEQ ID NO: 4168643 - DNA, 25 bp, Homo sapien
tctctattgctcacttgctctggac

SEQ ID NO: 4168644 - DNA, 25 bp, Homo sapien
tattgctcacttgctctggactcat

SEQ ID NO: 4168645 - DNA, 25 bp, Homo sapien
cttctctattgctcacttgctctgg

SEQ ID NO: 4168646 - DNA, 25 bp, Homo sapien
ctattgctcacttgctctggactca

SEQ ID NO: 4168647 - DNA, 25 bp, Homo sapien
cacgtctgctcagggttgagtgctg

SEQ ID NO: 4168648 - DNA, 25 bp, Homo sapien
tcacgtctgctcagggttgagtgct

SEQ ID NO: 4168649 - DNA, 25 bp, Homo sapien
gctcagggttgagtgctgtctgtcc

SEQ ID NO: 4168650 - DNA, 25 bp, Homo sapien
gtctgctcagggttgagtgctgtct

SEQ ID NO: 4168651 - DNA, 25 bp, Homo sapien
gaatcggtgtgtctaaatgggccca

SEQ ID NO: 4168652 - DNA, 25 bp, Homo sapien
tccacaccccagagatatgcatgtt

SEQ ID NO: 4168653 - DNA, 25 bp, Homo sapien
ggttcttgctttgtgccatgtgctg

SEQ ID NO: 4168654 - DNA, 25 bp, Homo sapien
ttcaccaggtaatccagtttccttc

SEQ ID NO: 4168655 - DNA, 25 bp, Homo sapien
ttactccacccacctcattcgctgt

SEQ ID NO: 4168656 - DNA, 25 bp, Homo sapien
gttactccacccacctcattcgctg

SEQ ID NO: 4168657 - DNA, 25 bp, Homo sapien
ctccacccacctcattcgctgtcat

SEQ ID NO: 4168658 - DNA, 25 bp, Homo sapien
gatgccagttactccacccacctca

SEQ ID NO: 4168659 - DNA, 25 bp, Homo sapien
actgtacagtcaaccatcagtgcat

SEQ ID NO: 4168660 - DNA, 25 bp, Homo sapien
cattaactgtacagtcaaccatcag

SEQ ID NO: 4168661 - DNA, 25 bp, Homo sapien
attaactgtacagtcaaccatcagt

SEQ ID NO: 4168662 - DNA, 25 bp, Homo sapien
aatttaacagggaggcccaagctgc

SEQ ID NO: 4168663 - DNA, 25 bp, Homo sapien
tcatggagggaaggttgaccggcct

SEQ ID NO: 4168664 - DNA, 25 bp, Homo sapien
agcagaatttaacagggaggcccaa

SEQ ID NO: 4168665 - DNA, 25 bp, Homo sapien
tccctggacagtggttggaagctct

SEQ ID NO: 4168666 - DNA, 25 bp, Homo sapien
cttcctcatctcccgccatctgttc

SEQ ID NO: 4168667 - DNA, 25 bp, Homo sapien
ttcctcatctcccgccatctgttct

SEQ ID NO: 4168668 - DNA, 25 bp, Homo sapien
tttgccgcgtcgtccattgacagcg

SEQ ID NO: 4168669 - DNA, 25 bp, Homo sapien
agggtttgccgcgtcgtccattgac

SEQ ID NO: 4168670 - DNA, 25 bp, Homo sapien
ggtttgccgcgtcgtccattgacag

SEQ ID NO: 4168671 - DNA, 25 bp, Homo sapien
gcgtcgtccattgacagcgccctga

SEQ ID NO: 4168672 - DNA, 25 bp, Homo sapien
ctggagcaacaaaggagccgaggac

SEQ ID NO: 4168673 - DNA, 25 bp, Homo sapien
agctttttggatgactgaactcgca

SEQ ID NO: 4168674 - DNA, 25 bp, Homo sapien
tgactgaactcgcaaacaattcctt

SEQ ID NO: 4168675 - DNA, 25 bp, Homo sapien
acacaacacgctcggtgacaccggg

SEQ ID NO: 4168676 - DNA, 25 bp, Homo sapien
cctctgcgccaacagctagggatgc

SEQ ID NO: 4168677 - DNA, 25 bp, Homo sapien
ggtccgctgagttcctcattttagt

SEQ ID NO: 4168678 - DNA, 25 bp, Homo sapien
ttagaagacgccaactatgagaaac

SEQ ID NO: 4168679 - DNA, 25 bp, Homo sapien
aacagctagggatgcttccctcaag

SEQ ID NO: 4168680 - DNA, 25 bp, Homo sapien
gacacagagataaaccctaattcat

SEQ ID NO: 4168681 - DNA, 25 bp, Homo sapien
tcattacccacatcagtggctttgc

SEQ ID NO: 4168682 - DNA, 25 bp, Homo sapien
gctttgccgaaatttgaacccagac

SEQ ID NO: 4168683 - DNA, 25 bp, Homo sapien
gataaaccctaattcattacccaca

SEQ ID NO: 4168684 - DNA, 25 bp, Homo sapien
taaatgtcgacaagacttcatgggt

SEQ ID NO: 4168685 - DNA, 25 bp, Homo sapien
gggttccaggaagcttgttctgaaa

SEQ ID NO: 4168686 - DNA, 25 bp, Homo sapien
tcttctactttcgagctgctaccct

SEQ ID NO: 4168687 - DNA, 25 bp, Homo sapien
gctgctaccctcagacggtataaat

SEQ ID NO: 4168688 - DNA, 25 bp, Homo sapien
tgaagtttagtccagattccactca

SEQ ID NO: 4168689 - DNA, 25 bp, Homo sapien
tccactcaaagttggactcccaata

SEQ ID NO: 4168690 - DNA, 25 bp, Homo sapien
gaagtttagtccagattccactcaa

SEQ ID NO: 4168691 - DNA, 25 bp, Homo sapien
agttggactcccaatacttgaggat

SEQ ID NO: 4168692 - DNA, 25 bp, Homo sapien
ggcactgtgttgactgactgcattt

SEQ ID NO: 4168693 - DNA, 25 bp, Homo sapien
cagaagtctgtacattggatgatcc

SEQ ID NO: 4168694 - DNA, 25 bp, Homo sapien
catccattcataatgacagaggtaa

SEQ ID NO: 4168695 - DNA, 25 bp, Homo sapien
tggatgatccattagactcttggct

SEQ ID NO: 4168696 - DNA, 25 bp, Homo sapien
cttctcctgaccagtaaaaagtatc

SEQ ID NO: 4168697 - DNA, 25 bp, Homo sapien
catggaggacctgcttgatcagact

SEQ ID NO: 4168698 - DNA, 25 bp, Homo sapien
tccccagggtgttttctgtacaagc

SEQ ID NO: 4168699 - DNA, 25 bp, Homo sapien
tatctactgggccaaatatcttctc

SEQ ID NO: 4168700 - DNA, 25 bp, Homo sapien
tgggaaaggcagcttgtctggaggg

SEQ ID NO: 4168701 - DNA, 25 bp, Homo sapien
cacgaccaaaatgcctctaatccag

SEQ ID NO: 4168702 - DNA, 25 bp, Homo sapien
ggctgggaaaggcagcttgtctgga

SEQ ID NO: 4168703 - DNA, 25 bp, Homo sapien
acacgaccaaaatgcctctaatcca

SEQ ID NO: 4168704 - DNA, 25 bp, Homo sapien
tatttggccacgagtccttttcctc

SEQ ID NO: 4168705 - DNA, 25 bp, Homo sapien
ttggccacgagtccttttcctctct

SEQ ID NO: 4168706 - DNA, 25 bp, Homo sapien
ttaaccagaattatttggccacgag

SEQ ID NO: 4168707 - DNA, 25 bp, Homo sapien
cagaattatttggccacgagtcctt

SEQ ID NO: 4168708 - DNA, 25 bp, Homo sapien
tgaggactctatcagtgggctctcc

SEQ ID NO: 4168709 - DNA, 25 bp, Homo sapien
gactgctcccaacgcatttcgtgtg

SEQ ID NO: 4168710 - DNA, 25 bp, Homo sapien
tctacgtaatttgcctagggtcaca

SEQ ID NO: 4168711 - DNA, 25 bp, Homo sapien
caaggactggcatcgaacggtgcac

SEQ ID NO: 4168712 - DNA, 25 bp, Homo sapien
tggggtttgggatttgcctgtgtaa

SEQ ID NO: 4168713 - DNA, 25 bp, Homo sapien
cctcttaggatctttatccctattt

SEQ ID NO: 4168714 - DNA, 25 bp, Homo sapien
tttggtgtcagcataagacctctta

SEQ ID NO: 4168715 - DNA, 25 bp, Homo sapien
agacctcttaggatctttatcccta

SEQ ID NO: 4168716 - DNA, 25 bp, Homo sapien
tggatcagatggtccacgtgacccc

SEQ ID NO: 4168717 - DNA, 25 bp, Homo sapien
ttcgaggctgactcaagaaagaggc

SEQ ID NO: 4168718 - DNA, 25 bp, Homo sapien
gaaagaggcacttctttgcagggaa

SEQ ID NO: 4168719 - DNA, 25 bp, Homo sapien
agtggctggtgagtgttctgaatcc

SEQ ID NO: 4168720 - DNA, 25 bp, Homo sapien
agtgactgcccaggttttggtggaa

SEQ ID NO: 4168721 - DNA, 25 bp, Homo sapien
ttttggtggaaaagagggttctgca

SEQ ID NO: 4168722 - DNA, 25 bp, Homo sapien
caaccacccaatgtcctttcaatta

SEQ ID NO: 4168723 - DNA, 25 bp, Homo sapien
ttaaggcaagctgcattgtcaggca

SEQ ID NO: 4168724 - DNA, 25 bp, Homo sapien
tacagacttcttttggaaagagtaa

SEQ ID NO: 4168725 - DNA, 25 bp, Homo sapien
tcactgttggaaggtggtagaaaag

SEQ ID NO: 4168726 - DNA, 25 bp, Homo sapien
taaccttgtggcatccatctttgac

SEQ ID NO: 4168727 - DNA, 25 bp, Homo sapien
tggtagaaaagctggattacagact

SEQ ID NO: 4168728 - DNA, 25 bp, Homo sapien
ggcacaggacaacaaaatcaactcg

SEQ ID NO: 4168729 - DNA, 25 bp, Homo sapien
tttggcacaggacaacaaaatcaac

SEQ ID NO: 4168730 - DNA, 25 bp, Homo sapien
cacaggacaacaaaatcaactcgca

SEQ ID NO: 4168731 - DNA, 25 bp, Homo sapien
agtttggcacaggacaacaaaatca

SEQ ID NO: 4168732 - DNA, 25 bp, Homo sapien
tgaaagtgcctatgggaaacaatgg

SEQ ID NO: 4168733 - DNA, 25 bp, Homo sapien
agaggaagactggaacactgactcc

SEQ ID NO: 4168734 - DNA, 25 bp, Homo sapien
gaagaacacagtgtattatcccagg

SEQ ID NO: 4168735 - DNA, 25 bp, Homo sapien
aagcgctcgagggagcaagccaacc

SEQ ID NO: 4168736 - DNA, 25 bp, Homo sapien
caactgagttgggtctaacgggact

SEQ ID NO: 4168737 - DNA, 25 bp, Homo sapien
catggaaggagcctgaatggccaac

SEQ ID NO: 4168738 - DNA, 25 bp, Homo sapien
tatgctctgaacctggtgacaagcc

SEQ ID NO: 4168739 - DNA, 25 bp, Homo sapien
gaagtgtccctaacaagcctgtgct

SEQ ID NO: 4168740 - DNA, 25 bp, Homo sapien
caagtatatctgctggaagtcaggc

SEQ ID NO: 4168741 - DNA, 25 bp, Homo sapien
tatgtgtggcaataaccctgacaga

SEQ ID NO: 4168742 - DNA, 25 bp, Homo sapien
cctgacagagtggtgcgagtatctc

SEQ ID NO: 4168743 - DNA, 25 bp, Homo sapien
ttactactggtgacaaacaacttgg

SEQ ID NO: 4168744 - DNA, 25 bp, Homo sapien
tgccacagccaagctaagggcatta

SEQ ID NO: 4168745 - DNA, 25 bp, Homo sapien
cattaggcgcctctttgcattacgg

SEQ ID NO: 4168746 - DNA, 25 bp, Homo sapien
caagctaagggcattaggcgcctct

SEQ ID NO: 4168747 - DNA, 25 bp, Homo sapien
cgcctctttgcattacgggagtggg

SEQ ID NO: 4168748 - DNA, 25 bp, Homo sapien
tctgtgcacatgtgtaagggagtat

SEQ ID NO: 4168749 - DNA, 25 bp, Homo sapien
gagaagtaggagttcccgggagagc

SEQ ID NO: 4168750 - DNA, 25 bp, Homo sapien
tgcagatgtgtgcaggtttgagtct

SEQ ID NO: 4168751 - DNA, 25 bp, Homo sapien
cagatgtgtgcaggtttgagtctgt

SEQ ID NO: 4168752 - DNA, 25 bp, Homo sapien
aggactgccatggtggtgttggggg

SEQ ID NO: 4168753 - DNA, 25 bp, Homo sapien
gaggactgccatggtggtgttgggg

SEQ ID NO: 4168754 - DNA, 25 bp, Homo sapien
tgaggactgccatggtggtgttggg

SEQ ID NO: 4168755 - DNA, 25 bp, Homo sapien
caaaaggtcctggtacccagagagt

SEQ ID NO: 4168756 - DNA, 25 bp, Homo sapien
ttcaaaaggtcctggtacccagaga

SEQ ID NO: 4168757 - DNA, 25 bp, Homo sapien
gtcctggtacccagagagttctaat

SEQ ID NO: 4168758 - DNA, 25 bp, Homo sapien
aaggtcctggtacccagagagttct

SEQ ID NO: 4168759 - DNA, 25 bp, Homo sapien
cattgcatgagttcccagttatggg

SEQ ID NO: 4168760 - DNA, 25 bp, Homo sapien
tatgggattttagggaactagcttg

SEQ ID NO: 4168761 - DNA, 25 bp, Homo sapien
agagttgatgtagaacagtgggaca

SEQ ID NO: 4168762 - DNA, 25 bp, Homo sapien
tagcttgttcaagtcatgccccaat

SEQ ID NO: 4168763 - DNA, 25 bp, Homo sapien
aacgtcccataagccgccagggtca

SEQ ID NO: 4168764 - DNA, 25 bp, Homo sapien
acaaaggtctgaagccaacgtccca

SEQ ID NO: 4168765 - DNA, 25 bp, Homo sapien
gagatactgccgtccctggcaacac

SEQ ID NO: 4168766 - DNA, 25 bp, Homo sapien
ggtcacacaaagagatactgccgtc

SEQ ID NO: 4168767 - DNA, 25 bp, Homo sapien
aggcctcattcctctccacgccgtc

SEQ ID NO: 4168768 - DNA, 25 bp, Homo sapien
aggaggcaagccagtgtgacctcag

SEQ ID NO: 4168769 - DNA, 25 bp, Homo sapien
agtcagcaaagcagcctgctgtggc

SEQ ID NO: 4168770 - DNA, 25 bp, Homo sapien
tcaagtcagcaaagcagcctgctgt

SEQ ID NO: 4168771 - DNA, 25 bp, Homo sapien
agatcacagtgcctccgggcttctg

SEQ ID NO: 4168772 - DNA, 25 bp, Homo sapien
tggctagtgtcacagtggctggcac

SEQ ID NO: 4168773 - DNA, 25 bp, Homo sapien
cccacagtgtggttgttaagggcag

SEQ ID NO: 4168774 - DNA, 25 bp, Homo sapien
cattcaggcgccaggttacattcat

SEQ ID NO: 4168775 - DNA, 25 bp, Homo sapien
aggcagcatgaatggtgggggcttc

SEQ ID NO: 4168776 - DNA, 25 bp, Homo sapien
ggagggaccgcaccatggcagggag

SEQ ID NO: 4168777 - DNA, 25 bp, Homo sapien
gatgaggagggaccgcaccatggca

SEQ ID NO: 4168778 - DNA, 25 bp, Homo sapien
gagagatgaggagggaccgcaccat

SEQ ID NO: 4168779 - DNA, 25 bp, Homo sapien
tatgcttgcccctcacagagagaca

SEQ ID NO: 4168780 - DNA, 25 bp, Homo sapien
gatgaccaagtaggaaggcacggca

SEQ ID NO: 4168781 - DNA, 25 bp, Homo sapien
cagatacagcctctacttggagtga

SEQ ID NO: 4168782 - DNA, 25 bp, Homo sapien
cactgggcattactaggcagctact

SEQ ID NO: 4168783 - DNA, 25 bp, Homo sapien
taagagcggttattaggaccatccg

SEQ ID NO: 4168784 - DNA, 25 bp, Homo sapien
gaccatccgtcagtgagcacatgga

SEQ ID NO: 4168785 - DNA, 25 bp, Homo sapien
tataatggcaactagaaacacctgt

SEQ ID NO: 4168786 - DNA, 25 bp, Homo sapien
tcagttgggagggaccttagaagcc

SEQ ID NO: 4168787 - DNA, 25 bp, Homo sapien
tcctccaagctttgcagttccactc

SEQ ID NO: 4168788 - DNA, 25 bp, Homo sapien
ctccaagctttgcagttccactcca

SEQ ID NO: 4168789 - DNA, 25 bp, Homo sapien
cctccaagctttgcagttccactcc

SEQ ID NO: 4168790 - DNA, 25 bp, Homo sapien
tccaagctttgcagttccactccac

SEQ ID NO: 4168791 - DNA, 25 bp, Homo sapien
gaggacagcgagatgggcacctcca

SEQ ID NO: 4168792 - DNA, 25 bp, Homo sapien
cagaggacagcgagatgggcacctc

SEQ ID NO: 4168793 - DNA, 25 bp, Homo sapien
aggacagcgagatgggcacctccac

SEQ ID NO: 4168794 - DNA, 25 bp, Homo sapien
agaggacagcgagatgggcacctcc

SEQ ID NO: 4168795 - DNA, 25 bp, Homo sapien
cacggatctgtctgggtacttgcac

SEQ ID NO: 4168796 - DNA, 25 bp, Homo sapien
taataggactagtgtagccaatgcc

SEQ ID NO: 4168797 - DNA, 25 bp, Homo sapien
tgagcagaacttacaccacggatct

SEQ ID NO: 4168798 - DNA, 25 bp, Homo sapien
taaatatagaatgggactcctggct

SEQ ID NO: 4168799 - DNA, 25 bp, Homo sapien
ttcctttcagttgaggtgggattta

SEQ ID NO: 4168800 - DNA, 25 bp, Homo sapien
cacccagatttgagcagtggaagaa

SEQ ID NO: 4168801 - DNA, 25 bp, Homo sapien
tttcagttgaggtgggatttacacc

SEQ ID NO: 4168802 - DNA, 25 bp, Homo sapien
gatgccaagcacattagttgttaaa

SEQ ID NO: 4168803 - DNA, 25 bp, Homo sapien
aacaggtcagaagtcctggtctttg

SEQ ID NO: 4168804 - DNA, 25 bp, Homo sapien
cagctacttcattaacttgtccgca

SEQ ID NO: 4168805 - DNA, 25 bp, Homo sapien
taatcaaacgctagtagacccactt

SEQ ID NO: 4168806 - DNA, 25 bp, Homo sapien
cccaacaggtcagaagtcctggtct

SEQ ID NO: 4168807 - DNA, 25 bp, Homo sapien
tcgcacccttcttttgcatcctctc

SEQ ID NO: 4168808 - DNA, 25 bp, Homo sapien
acccttcttttgcatcctctctttg

SEQ ID NO: 4168809 - DNA, 25 bp, Homo sapien
ttcttttgcatcctctctttgtgca

SEQ ID NO: 4168810 - DNA, 25 bp, Homo sapien
cctcccctcgcacccttcttttgca

SEQ ID NO: 4168811 - DNA, 25 bp, Homo sapien
tacaaatagggttagcaggcctccg

SEQ ID NO: 4168812 - DNA, 25 bp, Homo sapien
gtttcctggccgagtccctaggctg

SEQ ID NO: 4168813 - DNA, 25 bp, Homo sapien
acctgcccttgcctgttggctggtg

SEQ ID NO: 4168814 - DNA, 25 bp, Homo sapien
tgcagaaagatggatcaggtttcat

SEQ ID NO: 4168815 - DNA, 25 bp, Homo sapien
gactggcaggcgagccttcctggct

SEQ ID NO: 4168816 - DNA, 25 bp, Homo sapien
ccgtgcctcctaagcttaagcctta

SEQ ID NO: 4168817 - DNA, 25 bp, Homo sapien
aggcaggaccgagggcaccccagct

SEQ ID NO: 4168818 - DNA, 25 bp, Homo sapien
agcagttcggtccttggccctgtcc

SEQ ID NO: 4168819 - DNA, 25 bp, Homo sapien
ttggagacagaaggctgtgcagtgg

SEQ ID NO: 4168820 - DNA, 25 bp, Homo sapien
gcaacccagtggtagaaaacactgt

SEQ ID NO: 4168821 - DNA, 25 bp, Homo sapien
ctcagcaacccagtggtagaaaaca

SEQ ID NO: 4168822 - DNA, 25 bp, Homo sapien
gacagcccctctgttctgatgccaa

SEQ ID NO: 4168823 - DNA, 25 bp, Homo sapien
ggaaaattcctcaggcgctgtgaag

SEQ ID NO: 4168824 - DNA, 25 bp, Homo sapien
tgagctgtgagtgattgtgagctca

SEQ ID NO: 4168825 - DNA, 25 bp, Homo sapien
ggcgctgtgaagcactctcctccat

SEQ ID NO: 4168826 - DNA, 25 bp, Homo sapien
ctggaaaattcctcaggcgctgtga

SEQ ID NO: 4168827 - DNA, 25 bp, Homo sapien
ctgccaagtcaggaggctccccaca

SEQ ID NO: 4168828 - DNA, 25 bp, Homo sapien
atatctaagtgtggccaatggaagc

SEQ ID NO: 4168829 - DNA, 25 bp, Homo sapien
tcttgagacgttatgtgggatctga

SEQ ID NO: 4168830 - DNA, 25 bp, Homo sapien
tttccaggctgaacaagcatgatgc

SEQ ID NO: 4168831 - DNA, 25 bp, Homo sapien
gcgggtcaaggcgagatctctcata

SEQ ID NO: 4168832 - DNA, 25 bp, Homo sapien
ctggggaaaggtgcagagagaatcc

SEQ ID NO: 4168833 - DNA, 25 bp, Homo sapien
tggggaaaggtgcagagagaatccc

SEQ ID NO: 4168834 - DNA, 25 bp, Homo sapien
ggggaaaggtgcagagagaatccca

SEQ ID NO: 4168835 - DNA, 25 bp, Homo sapien
gggaaaggtgcagagagaatcccat

SEQ ID NO: 4168836 - DNA, 25 bp, Homo sapien
cagccccttgttgtctacaggagtt

SEQ ID NO: 4168837 - DNA, 25 bp, Homo sapien
tgtgccttggtgttgtcagtcatga

SEQ ID NO: 4168838 - DNA, 25 bp, Homo sapien
tatcaggggatcctccgagttcttc

SEQ ID NO: 4168839 - DNA, 25 bp, Homo sapien
cagcagagcaaaagtgtgacatttc

SEQ ID NO: 4168840 - DNA, 25 bp, Homo sapien
tccacttcaatcacgtgctgcacat

SEQ ID NO: 4168841 - DNA, 25 bp, Homo sapien
cactcttgtttgacgctgtaccgga

SEQ ID NO: 4168842 - DNA, 25 bp, Homo sapien
ggcaggcaatgactgctgtgtttcc

SEQ ID NO: 4168843 - DNA, 25 bp, Homo sapien
cacatctaacttgaagtcctggaga

SEQ ID NO: 4168844 - DNA, 25 bp, Homo sapien
caggtaaagctatggccatcagtgc

SEQ ID NO: 4168845 - DNA, 25 bp, Homo sapien
agtgctgagctttgccctggtggcc

SEQ ID NO: 4168846 - DNA, 25 bp, Homo sapien
gcctcacgggtgttcagattctgta

SEQ ID NO: 4168847 - DNA, 25 bp, Homo sapien
tggagtcaggtcaagtaaggtctac

SEQ ID NO: 4168848 - DNA, 25 bp, Homo sapien
ggcgcacacgtagcctgtcgctgga

SEQ ID NO: 4168849 - DNA, 25 bp, Homo sapien
cgctggagccggaggttttcacttc

SEQ ID NO: 4168850 - DNA, 25 bp, Homo sapien
tgggttgtaggctgcacacttgtac

SEQ ID NO: 4168851 - DNA, 25 bp, Homo sapien
acaatctggaggttccctgagggca

SEQ ID NO: 4168852 - DNA, 25 bp, Homo sapien
ttccatcagtgatcccccatccccc

SEQ ID NO: 4168853 - DNA, 25 bp, Homo sapien
tttgtgagcccttccatcagtgatc

SEQ ID NO: 4168854 - DNA, 25 bp, Homo sapien
ttccatctttgtgagcccttccatc

SEQ ID NO: 4168855 - DNA, 25 bp, Homo sapien
tgtgagcccttccatcagtgatccc

SEQ ID NO: 4168856 - DNA, 25 bp, Homo sapien
tccggctgagctgaatggaatccac

SEQ ID NO: 4168857 - DNA, 25 bp, Homo sapien
tccaggcaagcgcacagaaaggtag

SEQ ID NO: 4168858 - DNA, 25 bp, Homo sapien
catatagggcagaacagcagcctgg

SEQ ID NO: 4168859 - DNA, 25 bp, Homo sapien
tgggatcaaacagccattccgggtc

SEQ ID NO: 4168860 - DNA, 25 bp, Homo sapien
gggcaaggacagaaggcgtgtggac

SEQ ID NO: 4168861 - DNA, 25 bp, Homo sapien
ggcaaggacagaaggcgtgtggacc

SEQ ID NO: 4168862 - DNA, 25 bp, Homo sapien
gcaaggacagaaggcgtgtggacca

SEQ ID NO: 4168863 - DNA, 25 bp, Homo sapien
caaggacagaaggcgtgtggaccag

SEQ ID NO: 4168864 - DNA, 25 bp, Homo sapien
tgttgtagccggtgacactggaccc

SEQ ID NO: 4168865 - DNA, 25 bp, Homo sapien
cattgtcggccatgcagcggtaggt

SEQ ID NO: 4168866 - DNA, 25 bp, Homo sapien
tcctcctcgctggtggtgtcgatga

SEQ ID NO: 4168867 - DNA, 25 bp, Homo sapien
acattgtagaggatgaccgctgccc

SEQ ID NO: 4168868 - DNA, 25 bp, Homo sapien
ggttcccacgcacctcacaggtaag

SEQ ID NO: 4168869 - DNA, 25 bp, Homo sapien
catgcactggtagacgccttcgtcc

SEQ ID NO: 4168870 - DNA, 25 bp, Homo sapien
aggtaagcttggcactctggcccca

SEQ ID NO: 4168871 - DNA, 25 bp, Homo sapien
cagctgggatagctccatggtgacc

SEQ ID NO: 4168872 - DNA, 25 bp, Homo sapien
ctccgtggaagacagcgctggtgtc

SEQ ID NO: 4168873 - DNA, 25 bp, Homo sapien
tccgtggaagacagcgctggtgtcc

SEQ ID NO: 4168874 - DNA, 25 bp, Homo sapien
cgtggaagacagcgctggtgtccct

SEQ ID NO: 4168875 - DNA, 25 bp, Homo sapien
catcagctgtaccgccacccactct

SEQ ID NO: 4168876 - DNA, 25 bp, Homo sapien
ggtgtgccagtagccagctcagcat

SEQ ID NO: 4168877 - DNA, 25 bp, Homo sapien
ctcagggttgccgagtttggagggt

SEQ ID NO: 4168878 - DNA, 25 bp, Homo sapien
tgatacaggaggtgtgccagtagcc

SEQ ID NO: 4168879 - DNA, 25 bp, Homo sapien
gccgagtttggagggtgatacagga

SEQ ID NO: 4168880 - DNA, 25 bp, Homo sapien
cttgcggtgtttcaccacatagtag

SEQ ID NO: 4168881 - DNA, 25 bp, Homo sapien
acatagtagaggattggcgcccggc

SEQ ID NO: 4168882 - DNA, 25 bp, Homo sapien
tgaggatgatgggagcctcggcggg

SEQ ID NO: 4168883 - DNA, 25 bp, Homo sapien
ggccgccacaccagttcatatgagt

SEQ ID NO: 4168884 - DNA, 25 bp, Homo sapien
tcttacagggaatttcatgtcctca

SEQ ID NO: 4168885 - DNA, 25 bp, Homo sapien
gctttgagctcaaatgcctgcttgt

SEQ ID NO: 4168886 - DNA, 25 bp, Homo sapien
taagagcacggccttgagcgagagt

SEQ ID NO: 4168887 - DNA, 25 bp, Homo sapien
caacccaagccatgacagattctga

SEQ ID NO: 4168888 - DNA, 25 bp, Homo sapien
cacggcatggcctttgccaatctgc

SEQ ID NO: 4168889 - DNA, 25 bp, Homo sapien
gagcctggcatttccggatcaccac

SEQ ID NO: 4168890 - DNA, 25 bp, Homo sapien
ttgccaatctgcctcttctgcgagg

SEQ ID NO: 4168891 - DNA, 25 bp, Homo sapien
gcttcacggccacctattggcctga

SEQ ID NO: 4168892 - DNA, 25 bp, Homo sapien
ggaatgccagagatggtccaatcgt

SEQ ID NO: 4168893 - DNA, 25 bp, Homo sapien
ggtccaatcgtcagaggaatttgtg

SEQ ID NO: 4168894 - DNA, 25 bp, Homo sapien
tctcccgcacagttgtaagctgcca

SEQ ID NO: 4168895 - DNA, 25 bp, Homo sapien
agtctggtgagggtcaggcggtgct

SEQ ID NO: 4168896 - DNA, 25 bp, Homo sapien
catgatctcgggtttgggccgccgt

SEQ ID NO: 4168897 - DNA, 25 bp, Homo sapien
ctgctctttgctggccatgatctcg

SEQ ID NO: 4168898 - DNA, 25 bp, Homo sapien
ggactggctccagggtcgtctctct

SEQ ID NO: 4168899 - DNA, 25 bp, Homo sapien
actggctccagggtcgtctctctgg

SEQ ID NO: 4168900 - DNA, 25 bp, Homo sapien
gcaagaccccattcagccatgggaa

SEQ ID NO: 4168901 - DNA, 25 bp, Homo sapien
gccatgggaacaggcctctgaggca

SEQ ID NO: 4168902 - DNA, 25 bp, Homo sapien
ctgactgcgcgtccgtccctgctgc

SEQ ID NO: 4168903 - DNA, 25 bp, Homo sapien
aggcagttccagtcctgactgcgcg

SEQ ID NO: 4168904 - DNA, 25 bp, Homo sapien
cgtacactgaggtctcggaggccgt

SEQ ID NO: 4168905 - DNA, 25 bp, Homo sapien
gaatccaggtcacgtacactgaggt

SEQ ID NO: 4168906 - DNA, 25 bp, Homo sapien
cacacggaaggactggattgggaac

SEQ ID NO: 4168907 - DNA, 25 bp, Homo sapien
taggcccgtgatctccacggacagc

SEQ ID NO: 4168908 - DNA, 25 bp, Homo sapien
tgaccgcatccgtgaaggtgatata

SEQ ID NO: 4168909 - DNA, 25 bp, Homo sapien
gctgtagcccgacaccacgtagggc

SEQ ID NO: 4168910 - DNA, 25 bp, Homo sapien
tgatataaggacctgccacgggcct

SEQ ID NO: 4168911 - DNA, 25 bp, Homo sapien
ccacttgagcatgatggtggtctca

SEQ ID NO: 4168912 - DNA, 25 bp, Homo sapien
tgtagtcactatcattgtcactgtc

SEQ ID NO: 4168913 - DNA, 25 bp, Homo sapien
cttccaccatatccttcttgtagtc

SEQ ID NO: 4168914 - DNA, 25 bp, Homo sapien
ccatggattggggtgttgttgttac

SEQ ID NO: 4168915 - DNA, 25 bp, Homo sapien
cactgtctgtgggtcgataatagat

SEQ ID NO: 4168916 - DNA, 25 bp, Homo sapien
cttaatgtcgtaggaggtctctggc

SEQ ID NO: 4168917 - DNA, 25 bp, Homo sapien
tcacagatcatcacgttgctgaact

SEQ ID NO: 4168918 - DNA, 25 bp, Homo sapien
gaagcactgcatcttaatgtcgtag

SEQ ID NO: 4168919 - DNA, 25 bp, Homo sapien
gtctcacagatcatcacgttgctga

SEQ ID NO: 4168920 - DNA, 25 bp, Homo sapien
caggcacagggaatggtgactctgc

SEQ ID NO: 4168921 - DNA, 25 bp, Homo sapien
gagagtgaaacatgaccaagtctga

SEQ ID NO: 4168922 - DNA, 25 bp, Homo sapien
caggagagagaacccaaagagcttc

SEQ ID NO: 4168923 - DNA, 25 bp, Homo sapien
tcgctggaaacaccaagacaggaga

SEQ ID NO: 4168924 - DNA, 25 bp, Homo sapien
gaagcggtgtagtgcttttgggaag

SEQ ID NO: 4168925 - DNA, 25 bp, Homo sapien
ccggcagaagcggtgtagtgctttt

SEQ ID NO: 4168926 - DNA, 25 bp, Homo sapien
agcggtgtagtgcttttgggaagaa

SEQ ID NO: 4168927 - DNA, 25 bp, Homo sapien
cttccggcagaagcggtgtagtgct

SEQ ID NO: 4168928 - DNA, 25 bp, Homo sapien
gcggagacctgagccttatatttca

SEQ ID NO: 4168929 - DNA, 25 bp, Homo sapien
aaatctggtgttgtggcggagacct

SEQ ID NO: 4168930 - DNA, 25 bp, Homo sapien
ccatgcactagagttggactgggtc

SEQ ID NO: 4168931 - DNA, 25 bp, Homo sapien
gaatggtgtccacactcagcatgaa

SEQ ID NO: 4168932 - DNA, 25 bp, Homo sapien
ttgggggtggcagtcgaccaggctg

SEQ ID NO: 4168933 - DNA, 25 bp, Homo sapien
gttgggggtggcagtcgaccaggct

SEQ ID NO: 4168934 - DNA, 25 bp, Homo sapien
gggggtggcagtcgaccaggctggc

SEQ ID NO: 4168935 - DNA, 25 bp, Homo sapien
tgggggtggcagtcgaccaggctgg

SEQ ID NO: 4168936 - DNA, 25 bp, Homo sapien
tcgctggagcgagccaccatggccc

SEQ ID NO: 4168937 - DNA, 25 bp, Homo sapien
cgatgatgagaacgatggagcccag

SEQ ID NO: 4168938 - DNA, 25 bp, Homo sapien
tggagcccaggacgaccccgacaat

SEQ ID NO: 4168939 - DNA, 25 bp, Homo sapien
ccgacaatcagatagggcaggtcgc

SEQ ID NO: 4168940 - DNA, 25 bp, Homo sapien
caccatagtatacgggcaggagggt

SEQ ID NO: 4168941 - DNA, 25 bp, Homo sapien
ggagtcctcccaatggcaccatagt

SEQ ID NO: 4168942 - DNA, 25 bp, Homo sapien
gggcagcccctattcatgtggatcc

SEQ ID NO: 4168943 - DNA, 25 bp, Homo sapien
ttcatgcccgggtagcccactgcag

SEQ ID NO: 4168944 - DNA, 25 bp, Homo sapien
ccgcccacacccaagaatgcgctac

SEQ ID NO: 4168945 - DNA, 25 bp, Homo sapien
ccactccctcctgggtgtcccatac

SEQ ID NO: 4168946 - DNA, 25 bp, Homo sapien
gagggaggaggccccccaaggcagc

SEQ ID NO: 4168947 - DNA, 25 bp, Homo sapien
aggaggccccccaaggcagcccagc

SEQ ID NO: 4168948 - DNA, 25 bp, Homo sapien
cagccactccctcctgggtgtccca

SEQ ID NO: 4168949 - DNA, 25 bp, Homo sapien
aagagtaatgagacggccacgccgg

SEQ ID NO: 4168950 - DNA, 25 bp, Homo sapien
aggaagagtaatgagacggccacgc

SEQ ID NO: 4168951 - DNA, 25 bp, Homo sapien
ggtaactttccagtcttcactcaac

SEQ ID NO: 4168952 - DNA, 25 bp, Homo sapien
caaaaggaagagtaatgagacggcc

SEQ ID NO: 4168953 - DNA, 25 bp, Homo sapien
tatccattgccaagatgggtctgcc

SEQ ID NO: 4168954 - DNA, 25 bp, Homo sapien
agatgggtctgcctcagcaggctgc

SEQ ID NO: 4168955 - DNA, 25 bp, Homo sapien
tgatctggtgactttgggggtcata

SEQ ID NO: 4168956 - DNA, 25 bp, Homo sapien
gggtcatatccattgccaagatggg

SEQ ID NO: 4168957 - DNA, 25 bp, Homo sapien
cctcaggcagaaagggcatcgcaat

SEQ ID NO: 4168958 - DNA, 25 bp, Homo sapien
tagtgacggaggattccgagatgcc

SEQ ID NO: 4168959 - DNA, 25 bp, Homo sapien
cagaggagcatgattgtcagtcacg

SEQ ID NO: 4168960 - DNA, 25 bp, Homo sapien
tttgaacatcaagaggtaccacacc

SEQ ID NO: 4168961 - DNA, 25 bp, Homo sapien
cgtcgggcagtgtgtataagaaaga

SEQ ID NO: 4168962 - DNA, 25 bp, Homo sapien
cagctggtgagtggagtcgtcgggc

SEQ ID NO: 4168963 - DNA, 25 bp, Homo sapien
acaggactgtcgggggctctcctca

SEQ ID NO: 4168964 - DNA, 25 bp, Homo sapien
taagaaagagccctcgtccgggcta

SEQ ID NO: 4168965 - DNA, 25 bp, Homo sapien
tgaaatgcacagaccaaaaagggct

SEQ ID NO: 4168966 - DNA, 25 bp, Homo sapien
catgttgcagtagaacccacttgga

SEQ ID NO: 4168967 - DNA, 25 bp, Homo sapien
tgaggaccgcagcttatcatgttgc

SEQ ID NO: 4168968 - DNA, 25 bp, Homo sapien
taaggagactagcatggaggaagac

SEQ ID NO: 4168969 - DNA, 25 bp, Homo sapien
acctcttcaactggcacaaggccca

SEQ ID NO: 4168970 - DNA, 25 bp, Homo sapien
tccaggttcctgtcctacgtaggcc

SEQ ID NO: 4168971 - DNA, 25 bp, Homo sapien
ttccaggttcctgtcctacgtaggc

SEQ ID NO: 4168972 - DNA, 25 bp, Homo sapien
ctacgtaggcccctacggggtgctg

SEQ ID NO: 4168973 - DNA, 25 bp, Homo sapien
ctaaattgtgagaggtggtgtttca

SEQ ID NO: 4168974 - DNA, 25 bp, Homo sapien
gaggtggtgtttcaaaagacacacg

SEQ ID NO: 4168975 - DNA, 25 bp, Homo sapien
aggtggtgtttcaaaagacacacgc

SEQ ID NO: 4168976 - DNA, 25 bp, Homo sapien
atatagtctttctgggatatcagct

SEQ ID NO: 4168977 - DNA, 25 bp, Homo sapien
tatatagtctttctgggatatcagc

SEQ ID NO: 4168978 - DNA, 25 bp, Homo sapien
caatatatagtctttctgggatatc

SEQ ID NO: 4168979 - DNA, 25 bp, Homo sapien
atatatagtctttctgggatatcag

SEQ ID NO: 4168980 - DNA, 25 bp, Homo sapien
gtagcaccggatccagccatctgtg

SEQ ID NO: 4168981 - DNA, 25 bp, Homo sapien
tttttacagagatatgttgccacgg

SEQ ID NO: 4168982 - DNA, 25 bp, Homo sapien
tgctcgtgatgaaccatgtgcctgg

SEQ ID NO: 4168983 - DNA, 25 bp, Homo sapien
acatcttggtctgttctcatgggca

SEQ ID NO: 4168984 - DNA, 25 bp, Homo sapien
aagtccagttggtaagagaactatg

SEQ ID NO: 4168985 - DNA, 25 bp, Homo sapien
cccttgtggactaaacggtaatgtg

SEQ ID NO: 4168986 - DNA, 25 bp, Homo sapien
tggtaagagaactatgaacctgttt

SEQ ID NO: 4168987 - DNA, 25 bp, Homo sapien
tctgttgtacaacggttcccttgtg

SEQ ID NO: 4168988 - DNA, 25 bp, Homo sapien
gatacacagtataagggcatggagt

SEQ ID NO: 4168989 - DNA, 25 bp, Homo sapien
gaaggctcccgagattaaggaacag

SEQ ID NO: 4168990 - DNA, 25 bp, Homo sapien
caactccaggcggaaaggatttcgg

SEQ ID NO: 4168991 - DNA, 25 bp, Homo sapien
tttagcagaggaattgaaggctccc

SEQ ID NO: 4168992 - DNA, 25 bp, Homo sapien
tcttccagaaatggatcagtgtcac

SEQ ID NO: 4168993 - DNA, 25 bp, Homo sapien
cttggagcattctagggacttcacc

SEQ ID NO: 4168994 - DNA, 25 bp, Homo sapien
tcagtgtcactggtttgctcatggc

SEQ ID NO: 4168995 - DNA, 25 bp, Homo sapien
tattctgggctatagtttggtctgg

SEQ ID NO: 4168996 - DNA, 25 bp, Homo sapien
tttcttcactattcatgcagtgaag

SEQ ID NO: 4168997 - DNA, 25 bp, Homo sapien
ccaatactgtcaaaccccaatagac

SEQ ID NO: 4168998 - DNA, 25 bp, Homo sapien
ctcagacatatagtattcataatca

SEQ ID NO: 4168999 - DNA, 25 bp, Homo sapien
aatactgtcaaaccccaatagacac

SEQ ID NO: 4169000 - DNA, 25 bp, Homo sapien
aatctggacagcactaacagtgtat

SEQ ID NO: 4169001 - DNA, 25 bp, Homo sapien
gtataaaagatgaggatcatgtctg

SEQ ID NO: 4169002 - DNA, 25 bp, Homo sapien
agagtaagaatctggacagcactaa

SEQ ID NO: 4169003 - DNA, 25 bp, Homo sapien
gatgaggatcatgtctgatattagc

SEQ ID NO: 4169004 - DNA, 25 bp, Homo sapien
gctccagttagagcagctgctcagt

SEQ ID NO: 4169005 - DNA, 25 bp, Homo sapien
cttctttccatagacttggaacata

SEQ ID NO: 4169006 - DNA, 25 bp, Homo sapien
gaactatggctaaacgtcatcccga

SEQ ID NO: 4169007 - DNA, 25 bp, Homo sapien
tgtgattcctatgtgcatccctgca

SEQ ID NO: 4169008 - DNA, 25 bp, Homo sapien
cagactggtattgctatcggaagac

SEQ ID NO: 4169009 - DNA, 25 bp, Homo sapien
caaaaattggcctgaagcgtccggt

SEQ ID NO: 4169010 - DNA, 25 bp, Homo sapien
atggggcaacatgctgctttgggaa

SEQ ID NO: 4169011 - DNA, 25 bp, Homo sapien
tcttttttccacatacctgccaggt

SEQ ID NO: 4169012 - DNA, 25 bp, Homo sapien
tttttccacatacctgccaggtgct

SEQ ID NO: 4169013 - DNA, 25 bp, Homo sapien
ctctcagggtcagaatggggcaaca

SEQ ID NO: 4169014 - DNA, 25 bp, Homo sapien
gtctggtttggaaatattatatctt

SEQ ID NO: 4169015 - DNA, 25 bp, Homo sapien
tctggtaagtttacattcgtttgta

SEQ ID NO: 4169016 - DNA, 25 bp, Homo sapien
tctgtgtctggtttggaaatattat

SEQ ID NO: 4169017 - DNA, 25 bp, Homo sapien
gtgtctggtttggaaatattatatc

SEQ ID NO: 4169018 - DNA, 25 bp, Homo sapien
ttggagactgttgcgccatgaccga

SEQ ID NO: 4169019 - DNA, 25 bp, Homo sapien
catttactcctgatgcacgtgggca

SEQ ID NO: 4169020 - DNA, 25 bp, Homo sapien
taagaaggtataaaaactgctccac

SEQ ID NO: 4169021 - DNA, 25 bp, Homo sapien
cagattagtgggagttcaactttcc

SEQ ID NO: 4169022 - DNA, 25 bp, Homo sapien
tcttgtaagtatttaatgataggaa

SEQ ID NO: 4169023 - DNA, 25 bp, Homo sapien
tgtttgcgggaagcagtatctctca

SEQ ID NO: 4169024 - DNA, 25 bp, Homo sapien
tgtgcaaccatagcatttgtaggct

SEQ ID NO: 4169025 - DNA, 25 bp, Homo sapien
gaggtaaataaggatcacagaggca

SEQ ID NO: 4169026 - DNA, 25 bp, Homo sapien
ggagaggtcccaaagcttcctacat

SEQ ID NO: 4169027 - DNA, 25 bp, Homo sapien
tcaaagagtgatgggaagaagtctc

SEQ ID NO: 4169028 - DNA, 25 bp, Homo sapien
aagagtgatgggaagaagtctctga

SEQ ID NO: 4169029 - DNA, 25 bp, Homo sapien
tacatcaaagagtgatgggaagaag

SEQ ID NO: 4169030 - DNA, 25 bp, Homo sapien
accagatgatcaggatactgatggg

SEQ ID NO: 4169031 - DNA, 25 bp, Homo sapien
tagttgcaccctcctactggtgggt

SEQ ID NO: 4169032 - DNA, 25 bp, Homo sapien
tggaaaaccaaagtgcaccacaatg

SEQ ID NO: 4169033 - DNA, 25 bp, Homo sapien
gaactttggtagtggacctctggaa

SEQ ID NO: 4169034 - DNA, 25 bp, Homo sapien
gattataattagctgtcttgcagag

SEQ ID NO: 4169035 - DNA, 25 bp, Homo sapien
taagcctggatctaatgaaacgaaa

SEQ ID NO: 4169036 - DNA, 25 bp, Homo sapien
tggtctagaacccaaacttcgactg

SEQ ID NO: 4169037 - DNA, 25 bp, Homo sapien
gatagttatccagcatacaagcgtg

SEQ ID NO: 4169038 - DNA, 25 bp, Homo sapien
gaatacaatgaatgtccccgatagg

SEQ ID NO: 4169039 - DNA, 25 bp, Homo sapien
tgtaaatgtggtgggtcacaattgt

SEQ ID NO: 4169040 - DNA, 25 bp, Homo sapien
tacccagccagaatttagaccgatc

SEQ ID NO: 4169041 - DNA, 25 bp, Homo sapien
tcaaatacgtgtgcaccctggctgc

SEQ ID NO: 4169042 - DNA, 25 bp, Homo sapien
cgctagtctcgaaaagtcaacctga

SEQ ID NO: 4169043 - DNA, 25 bp, Homo sapien
gacgaagggccgatcaaatactgat

SEQ ID NO: 4169044 - DNA, 25 bp, Homo sapien
tagacatgatcgaaatcggcgcccc

SEQ ID NO: 4169045 - DNA, 25 bp, Homo sapien
tgaggttcaccaccccgctgtagac

SEQ ID NO: 4169046 - DNA, 25 bp, Homo sapien
atcggcgcccctggcagcgtcgaag

SEQ ID NO: 4169047 - DNA, 25 bp, Homo sapien
tagttgaaagagtagatgttctcgg

SEQ ID NO: 4169048 - DNA, 25 bp, Homo sapien
ggagtcgagcgaggggagcgagtgt

SEQ ID NO: 4169049 - DNA, 25 bp, Homo sapien
cgagcgaggggagcgagtgtcttac

SEQ ID NO: 4169050 - DNA, 25 bp, Homo sapien
ctaggagtcgagcgaggggagcgag

SEQ ID NO: 4169051 - DNA, 25 bp, Homo sapien
gtcgagcgaggggagcgagtgtctt

SEQ ID NO: 4169052 - DNA, 25 bp, Homo sapien
acatgtcaaccagtcgatgagttct

SEQ ID NO: 4169053 - DNA, 25 bp, Homo sapien
gtcaaccagtcgatgagttctccca

SEQ ID NO: 4169054 - DNA, 25 bp, Homo sapien
catgtcaaccagtcgatgagttctc

SEQ ID NO: 4169055 - DNA, 25 bp, Homo sapien
aattttgcgggaagcaaggctgccc

SEQ ID NO: 4169056 - DNA, 25 bp, Homo sapien
gtgatatcaatagggtccacagcag

SEQ ID NO: 4169057 - DNA, 25 bp, Homo sapien
gagtttcaagttcactggcagtggt

SEQ ID NO: 4169058 - DNA, 25 bp, Homo sapien
cccatttggtacattcaattgtgag

SEQ ID NO: 4169059 - DNA, 25 bp, Homo sapien
catccaaaacccttgcatgttctgg

SEQ ID NO: 4169060 - DNA, 25 bp, Homo sapien
agcatccaaaacccttgcatgttct

SEQ ID NO: 4169061 - DNA, 25 bp, Homo sapien
cagcatccaaaacccttgcatgttc

SEQ ID NO: 4169062 - DNA, 25 bp, Homo sapien
gcatccaaaacccttgcatgttctg

SEQ ID NO: 4169063 - DNA, 25 bp, Homo sapien
gttgaaggtagatggcagcaacacc

SEQ ID NO: 4169064 - DNA, 25 bp, Homo sapien
gtttctaacaaacgccccagcttca

SEQ ID NO: 4169065 - DNA, 25 bp, Homo sapien
tgtctgggcccacgaagttgtttct

SEQ ID NO: 4169066 - DNA, 25 bp, Homo sapien
gcagagatgatctatgccacttgaa

SEQ ID NO: 4169067 - DNA, 25 bp, Homo sapien
ccaatcatctgcaaacatcttcctc

SEQ ID NO: 4169068 - DNA, 25 bp, Homo sapien
catcaaatggtggatgatgtgggtc

SEQ ID NO: 4169069 - DNA, 25 bp, Homo sapien
tgggcactaacacctactagctagg

SEQ ID NO: 4169070 - DNA, 25 bp, Homo sapien
tataagcccaatcaccccgggcaaa

SEQ ID NO: 4169071 - DNA, 25 bp, Homo sapien
tcgccctcggtttcttcaattgtag

SEQ ID NO: 4169072 - DNA, 25 bp, Homo sapien
tttggttgtgttcgctgggtgtacc

SEQ ID NO: 4169073 - DNA, 25 bp, Homo sapien
taactgtttgagtaactgtgctgtg

SEQ ID NO: 4169074 - DNA, 25 bp, Homo sapien
tgggtgtacctctacagctcctcct

SEQ ID NO: 4169075 - DNA, 25 bp, Homo sapien
ctgtgctgtgtttggttgtgttcgc

SEQ ID NO: 4169076 - DNA, 25 bp, Homo sapien
gctgtctagtcttccgactccaggg

SEQ ID NO: 4169077 - DNA, 25 bp, Homo sapien
cagggctgtacttgctagaagggca

SEQ ID NO: 4169078 - DNA, 25 bp, Homo sapien
gacactctcatagctcagtcctgca

SEQ ID NO: 4169079 - DNA, 25 bp, Homo sapien
catgtaagcctgaaactggagattc

SEQ ID NO: 4169080 - DNA, 25 bp, Homo sapien
cgggtagttgagattctcagaggaa

SEQ ID NO: 4169081 - DNA, 25 bp, Homo sapien
tgttcacatacaccctcacggctgt

SEQ ID NO: 4169082 - DNA, 25 bp, Homo sapien
ccacaacaaggaccgggtagttgag

SEQ ID NO: 4169083 - DNA, 25 bp, Homo sapien
acctctttctgctggcgaaccacaa

SEQ ID NO: 4169084 - DNA, 25 bp, Homo sapien
tacaaatatcagttgctgcaagggt

SEQ ID NO: 4169085 - DNA, 25 bp, Homo sapien
ttctgagggacataaggtgcggctc

SEQ ID NO: 4169086 - DNA, 25 bp, Homo sapien
ggtgccatggatgcgacatctacaa

SEQ ID NO: 4169087 - DNA, 25 bp, Homo sapien
caagggtcccgtctcattggttgct

SEQ ID NO: 4169088 - DNA, 25 bp, Homo sapien
gaggcaggtggattagattcccaaa

SEQ ID NO: 4169089 - DNA, 25 bp, Homo sapien
aacacaaacaattgggaggacagtt

SEQ ID NO: 4169090 - DNA, 25 bp, Homo sapien
cactgtgctctgctagtaaagttgg

SEQ ID NO: 4169091 - DNA, 25 bp, Homo sapien
tcattatggcgagaagagcgcagaa

SEQ ID NO: 4169092 - DNA, 25 bp, Homo sapien
tgccacgttggctgaaattccccaa

SEQ ID NO: 4169093 - DNA, 25 bp, Homo sapien
tatcccctaatagctccccgattgc

SEQ ID NO: 4169094 - DNA, 25 bp, Homo sapien
tgcctgccacgttggctgaaattcc

SEQ ID NO: 4169095 - DNA, 25 bp, Homo sapien
ccgattgcctgccacgttggctgaa

SEQ ID NO: 4169096 - DNA, 25 bp, Homo sapien
gctggcagtaaagtgaaaggcaaca

SEQ ID NO: 4169097 - DNA, 25 bp, Homo sapien
agaggggctggcagtaaagtgaaag

SEQ ID NO: 4169098 - DNA, 25 bp, Homo sapien
ggcagtaaagtgaaaggcaacattt

SEQ ID NO: 4169099 - DNA, 25 bp, Homo sapien
gggctggcagtaaagtgaaaggcaa

SEQ ID NO: 4169100 - DNA, 25 bp, Homo sapien
ccttcccataggcaagaattagcac

SEQ ID NO: 4169101 - DNA, 25 bp, Homo sapien
tatacgtaaatctccgtgaatctcc

SEQ ID NO: 4169102 - DNA, 25 bp, Homo sapien
gaaactaaatctgcgcagggctctg

SEQ ID NO: 4169103 - DNA, 25 bp, Homo sapien
gaattagcactagactcatcctccc

SEQ ID NO: 4169104 - DNA, 25 bp, Homo sapien
tcagacaccactttaatgataactg

SEQ ID NO: 4169105 - DNA, 25 bp, Homo sapien
ccacgtctttgggaaacttgtatag

SEQ ID NO: 4169106 - DNA, 25 bp, Homo sapien
catggataagccatttcagacacca

SEQ ID NO: 4169107 - DNA, 25 bp, Homo sapien
gataactgagtccacgtctttggga

SEQ ID NO: 4169108 - DNA, 25 bp, Homo sapien
gaaggttggcaagttatcagcactc

SEQ ID NO: 4169109 - DNA, 25 bp, Homo sapien
agaaggttggcaagttatcagcact

SEQ ID NO: 4169110 - DNA, 25 bp, Homo sapien
aggttggcaagttatcagcactcac

SEQ ID NO: 4169111 - DNA, 25 bp, Homo sapien
aaggttggcaagttatcagcactca

SEQ ID NO: 4169112 - DNA, 25 bp, Homo sapien
tgtggtcgagatcatacaccgggca

SEQ ID NO: 4169113 - DNA, 25 bp, Homo sapien
ctttcttggtcatggactgatagac

SEQ ID NO: 4169114 - DNA, 25 bp, Homo sapien
gcagctttcttggtcatggactgat

SEQ ID NO: 4169115 - DNA, 25 bp, Homo sapien
tgatagacaccattaaattccacat

SEQ ID NO: 4169116 - DNA, 25 bp, Homo sapien
ccttatgataggcggtaagaaagag

SEQ ID NO: 4169117 - DNA, 25 bp, Homo sapien
tatgataggcggtaagaaagaggta

SEQ ID NO: 4169118 - DNA, 25 bp, Homo sapien
acaaccttatgataggcggtaagaa

SEQ ID NO: 4169119 - DNA, 25 bp, Homo sapien
aacaaccttatgataggcggtaaga

SEQ ID NO: 4169120 - DNA, 25 bp, Homo sapien
cacgaagaactgctcgcctggaaaa

SEQ ID NO: 4169121 - DNA, 25 bp, Homo sapien
gaagaactgctcgcctggaaaatcc

SEQ ID NO: 4169122 - DNA, 25 bp, Homo sapien
agaactgctcgcctggaaaatcctt

SEQ ID NO: 4169123 - DNA, 25 bp, Homo sapien
cgaagaactgctcgcctggaaaatc

SEQ ID NO: 4169124 - DNA, 25 bp, Homo sapien
cctggatgaagaaagatcctccaca

SEQ ID NO: 4169125 - DNA, 25 bp, Homo sapien
gatgaagaaagatcctccacaggca

SEQ ID NO: 4169126 - DNA, 25 bp, Homo sapien
gaaagatcctccacaggcataatct

SEQ ID NO: 4169127 - DNA, 25 bp, Homo sapien
gaagaaagatcctccacaggcataa

SEQ ID NO: 4169128 - DNA, 25 bp, Homo sapien
agggacaatggtcacttcaaggttc

SEQ ID NO: 4169129 - DNA, 25 bp, Homo sapien
tcacttcaaggttcttttttcgctg

SEQ ID NO: 4169130 - DNA, 25 bp, Homo sapien
tcttttttcgctgtagattccaggt

SEQ ID NO: 4169131 - DNA, 25 bp, Homo sapien
tttttcgctgtagattccaggtctg

SEQ ID NO: 4169132 - DNA, 25 bp, Homo sapien
aaggcatcccaagtagaaggacagg

SEQ ID NO: 4169133 - DNA, 25 bp, Homo sapien
ggcatcccaagtagaaggacaggaa

SEQ ID NO: 4169134 - DNA, 25 bp, Homo sapien
atcccaagtagaaggacaggaagat

SEQ ID NO: 4169135 - DNA, 25 bp, Homo sapien
gcatcccaagtagaaggacaggaag

SEQ ID NO: 4169136 - DNA, 25 bp, Homo sapien
tttgaaagtaacttgcatacaacca

SEQ ID NO: 4169137 - DNA, 25 bp, Homo sapien
gcaagaataagaacatagaatacca

SEQ ID NO: 4169138 - DNA, 25 bp, Homo sapien
ttctcacctccccataaagatgtaa

SEQ ID NO: 4169139 - DNA, 25 bp, Homo sapien
caaacaattgttagcttattacctc

SEQ ID NO: 4169140 - DNA, 25 bp, Homo sapien
aatattctgaattagatcgtagtga

SEQ ID NO: 4169141 - DNA, 25 bp, Homo sapien
ggttatgcaacagtgaatatcctaa

SEQ ID NO: 4169142 - DNA, 25 bp, Homo sapien
aaggggcgaattttatggtctatga

SEQ ID NO: 4169143 - DNA, 25 bp, Homo sapien
gatcgtagtgatggttatgcaacag

SEQ ID NO: 4169144 - DNA, 25 bp, Homo sapien
ttgtcatgtatattagtttcctact

SEQ ID NO: 4169145 - DNA, 25 bp, Homo sapien
ggctgcaggggagtattcattttct

SEQ ID NO: 4169146 - DNA, 25 bp, Homo sapien
caaaatgtgccttatatggctaaaa

SEQ ID NO: 4169147 - DNA, 25 bp, Homo sapien
ctgtatttcctgactcacagcccct

SEQ ID NO: 4169148 - DNA, 25 bp, Homo sapien
atgctcctaagacagtgaaaacctc

SEQ ID NO: 4169149 - DNA, 25 bp, Homo sapien
gatttgtctactaggatctcttcaa

SEQ ID NO: 4169150 - DNA, 25 bp, Homo sapien
tgaaaacctcagcattttacatttg

SEQ ID NO: 4169151 - DNA, 25 bp, Homo sapien
ccttatagattttgttgcggatttg

SEQ ID NO: 4169152 - DNA, 25 bp, Homo sapien
catcattggacccaaagcttccatc

SEQ ID NO: 4169153 - DNA, 25 bp, Homo sapien
tcattggacccaaagcttccatcaa

SEQ ID NO: 4169154 - DNA, 25 bp, Homo sapien
atcattggacccaaagcttccatca

SEQ ID NO: 4169155 - DNA, 25 bp, Homo sapien
ccgtattaagtctagtgggatcctc

SEQ ID NO: 4169156 - DNA, 25 bp, Homo sapien
ttctctggatataagcacccaaggc

SEQ ID NO: 4169157 - DNA, 25 bp, Homo sapien
gccttaggctaagttccacagatat

SEQ ID NO: 4169158 - DNA, 25 bp, Homo sapien
gcagagtagcgcacagattttctga

SEQ ID NO: 4169159 - DNA, 25 bp, Homo sapien
tggcagcaatgggatgagatgccac

SEQ ID NO: 4169160 - DNA, 25 bp, Homo sapien
tcccttcgggtgtgctggcagcaat

SEQ ID NO: 4169161 - DNA, 25 bp, Homo sapien
tattgtcccataattgctcccttcg

SEQ ID NO: 4169162 - DNA, 25 bp, Homo sapien
cagcaatgggatgagatgccaccat

SEQ ID NO: 4169163 - DNA, 25 bp, Homo sapien
gcatctgctctgttaactatttgga

SEQ ID NO: 4169164 - DNA, 25 bp, Homo sapien
tattagaatctaagggcatctgctc

SEQ ID NO: 4169165 - DNA, 25 bp, Homo sapien
ggagcccattcgtctctgcaaaaag

SEQ ID NO: 4169166 - DNA, 25 bp, Homo sapien
ctgccatcaaaagccgtggagagcc

SEQ ID NO: 4169167 - DNA, 25 bp, Homo sapien
gcatggtgtcgaagtcgctctcctc

SEQ ID NO: 4169168 - DNA, 25 bp, Homo sapien
tgactggcccggtggcccaccatcg

SEQ ID NO: 4169169 - DNA, 25 bp, Homo sapien
ccatcggaggaggacatctgccttc

SEQ ID NO: 4169170 - DNA, 25 bp, Homo sapien
gtcgaagtcgctctcctccacggag

SEQ ID NO: 4169171 - DNA, 25 bp, Homo sapien
aaagtgcgaattaacagagtattgc

SEQ ID NO: 4169172 - DNA, 25 bp, Homo sapien
aaaaagtgcgaattaacagagtatt

SEQ ID NO: 4169173 - DNA, 25 bp, Homo sapien
tgcttttagtctgtaggtacatttg

SEQ ID NO: 4169174 - DNA, 25 bp, Homo sapien
ttgcttttagtctgtaggtacattt

SEQ ID NO: 4169175 - DNA, 25 bp, Homo sapien
attctccggtccttcctggacaaat

SEQ ID NO: 4169176 - DNA, 25 bp, Homo sapien
ccctctcttgcattggggcatttgg

SEQ ID NO: 4169177 - DNA, 25 bp, Homo sapien
gggcatttggtacacagtatcttgt

SEQ ID NO: 4169178 - DNA, 25 bp, Homo sapien
aaagtaaccagaagctgattatgtg

SEQ ID NO: 4169179 - DNA, 25 bp, Homo sapien
aacttgcaaaagtaaccagaagctg

SEQ ID NO: 4169180 - DNA, 25 bp, Homo sapien
cgcgtaaaacacagcaatggtgatg

SEQ ID NO: 4169181 - DNA, 25 bp, Homo sapien
ctggatcacgggcagcgcgtaaaac

SEQ ID NO: 4169182 - DNA, 25 bp, Homo sapien
taggtaatgaccagctggatcacgg

SEQ ID NO: 4169183 - DNA, 25 bp, Homo sapien
tgtctgataggtaatgaccagctgg

SEQ ID NO: 4169184 - DNA, 25 bp, Homo sapien
cagtggtgctcaaacctcatgaagt

SEQ ID NO: 4169185 - DNA, 25 bp, Homo sapien
taaacatgaggcaggtagacacgag

SEQ ID NO: 4169186 - DNA, 25 bp, Homo sapien
gtgtaccctcttatgcagccccaag

SEQ ID NO: 4169187 - DNA, 25 bp, Homo sapien
ggactacgaaagaatgcgaacattg

SEQ ID NO: 4169188 - DNA, 25 bp, Homo sapien
tcaggacgcccaaggggtgagcaca

SEQ ID NO: 4169189 - DNA, 25 bp, Homo sapien
tgtcctggttgccagtgacatttac

SEQ ID NO: 4169190 - DNA, 25 bp, Homo sapien
gtaacagatgtcctggttgccagtg

SEQ ID NO: 4169191 - DNA, 25 bp, Homo sapien
gttgtagtaacagatgtcctggttg

SEQ ID NO: 4169192 - DNA, 25 bp, Homo sapien
aggaagcccagaagcacgtggccca

SEQ ID NO: 4169193 - DNA, 25 bp, Homo sapien
gatgtcgcggcgcaagactatcagc

SEQ ID NO: 4169194 - DNA, 25 bp, Homo sapien
ccagggctctccgatggaggatgtc

SEQ ID NO: 4169195 - DNA, 25 bp, Homo sapien
gcccagattgctgagaatgttgttg

SEQ ID NO: 4169196 - DNA, 25 bp, Homo sapien
gtttggatccataacccttcctagc

SEQ ID NO: 4169197 - DNA, 25 bp, Homo sapien
tcctgtttggatccataacccttcc

SEQ ID NO: 4169198 - DNA, 25 bp, Homo sapien
tgtttggatccataacccttcctag

SEQ ID NO: 4169199 - DNA, 25 bp, Homo sapien
ttggatccataacccttcctagctc

SEQ ID NO: 4169200 - DNA, 25 bp, Homo sapien
catcatcaatgcaatgcccatagcg

SEQ ID NO: 4169201 - DNA, 25 bp, Homo sapien
gcccatagcgtagaagagaccaaag

SEQ ID NO: 4169202 - DNA, 25 bp, Homo sapien
ggaagttggaataattagggcagac

SEQ ID NO: 4169203 - DNA, 25 bp, Homo sapien
agggcagacatggtagcaagcactg

SEQ ID NO: 4169204 - DNA, 25 bp, Homo sapien
gattggtgaagcaacctgggtctga

SEQ ID NO: 4169205 - DNA, 25 bp, Homo sapien
gtgaagcaacctgggtctgagctaa

SEQ ID NO: 4169206 - DNA, 25 bp, Homo sapien
ggacagggctgattggtctaaagat

SEQ ID NO: 4169207 - DNA, 25 bp, Homo sapien
aagatagtcccaccttttttgctga

SEQ ID NO: 4169208 - DNA, 25 bp, Homo sapien
gtggcgggtctgatagagcttcagc

SEQ ID NO: 4169209 - DNA, 25 bp, Homo sapien
gcacaggccagcgatcatgtacatg

SEQ ID NO: 4169210 - DNA, 25 bp, Homo sapien
catgcacaggccagcgatcatgtac

SEQ ID NO: 4169211 - DNA, 25 bp, Homo sapien
tgggtggcgggtctgatagagcttc

SEQ ID NO: 4169212 - DNA, 25 bp, Homo sapien
ctagcgaggccagaacgtggattgc

SEQ ID NO: 4169213 - DNA, 25 bp, Homo sapien
cagaaccatacgtcattttttccaa

SEQ ID NO: 4169214 - DNA, 25 bp, Homo sapien
gaaacgacccatataatatatctgg

SEQ ID NO: 4169215 - DNA, 25 bp, Homo sapien
ctatcttgaaacgacccatataata

SEQ ID NO: 4169216 - DNA, 25 bp, Homo sapien
cagatatcgaatgccagtctgggtc

SEQ ID NO: 4169217 - DNA, 25 bp, Homo sapien
cacagatatcgaatgccagtctggg

SEQ ID NO: 4169218 - DNA, 25 bp, Homo sapien
tcagctctgttatgaatccttctcc

SEQ ID NO: 4169219 - DNA, 25 bp, Homo sapien
tttccagaatgtggatctcagctct

SEQ ID NO: 4169220 - DNA, 25 bp, Homo sapien
gtcagggtcaaagacgggctgtgtt

SEQ ID NO: 4169221 - DNA, 25 bp, Homo sapien
tgtgtgttataatgttacatgaaca

SEQ ID NO: 4169222 - DNA, 25 bp, Homo sapien
ggtcaaagacgggctgtgtttctgt

SEQ ID NO: 4169223 - DNA, 25 bp, Homo sapien
tgttataatgttacatgaacagtca

SEQ ID NO: 4169224 - DNA, 25 bp, Homo sapien
acaaatgcatggtgagaaggcttag

SEQ ID NO: 4169225 - DNA, 25 bp, Homo sapien
ctgataatacaaatgcatggtgaga

SEQ ID NO: 4169226 - DNA, 25 bp, Homo sapien
gagaaggcttagtcaacaaaaatac

SEQ ID NO: 4169227 - DNA, 25 bp, Homo sapien
gcatggtgagaaggcttagtcaaca

SEQ ID NO: 4169228 - DNA, 25 bp, Homo sapien
tacagtctgtgtagaacaccatggc

SEQ ID NO: 4169229 - DNA, 25 bp, Homo sapien
aacaccatggcagcccgccggaaaa

SEQ ID NO: 4169230 - DNA, 25 bp, Homo sapien
ggctacactgctggatacagtctgt

SEQ ID NO: 4169231 - DNA, 25 bp, Homo sapien
catatatagaggtcggctacactgc

SEQ ID NO: 4169232 - DNA, 25 bp, Homo sapien
tagtgcttatagctcctgcccaagc

SEQ ID NO: 4169233 - DNA, 25 bp, Homo sapien
tagctcctgcccaagctctagagtg

SEQ ID NO: 4169234 - DNA, 25 bp, Homo sapien
tgaataaaccctccagactcaattc

SEQ ID NO: 4169235 - DNA, 25 bp, Homo sapien
gctctagagtgctcacggatttcca

SEQ ID NO: 4169236 - DNA, 25 bp, Homo sapien
gaccagttaaccagattccccacaa

SEQ ID NO: 4169237 - DNA, 25 bp, Homo sapien
cagttaaccagattccccacaacca

SEQ ID NO: 4169238 - DNA, 25 bp, Homo sapien
ggaccagttaaccagattccccaca

SEQ ID NO: 4169239 - DNA, 25 bp, Homo sapien
gttaaccagattccccacaaccagc

SEQ ID NO: 4169240 - DNA, 25 bp, Homo sapien
tttgagtctctagaacaagcagtcc

SEQ ID NO: 4169241 - DNA, 25 bp, Homo sapien
aatgacagtcaaggaaagctaaacc

SEQ ID NO: 4169242 - DNA, 25 bp, Homo sapien
caagcagtcctaccttctccttaat

SEQ ID NO: 4169243 - DNA, 25 bp, Homo sapien
tgctacacgagaatgtcctactacc

SEQ ID NO: 4169244 - DNA, 25 bp, Homo sapien
gataggactcagattctcatgactt

SEQ ID NO: 4169245 - DNA, 25 bp, Homo sapien
tcctctgaaggcatgcctcttcatt

SEQ ID NO: 4169246 - DNA, 25 bp, Homo sapien
gaggagctcatcatctaggagctac

SEQ ID NO: 4169247 - DNA, 25 bp, Homo sapien
tccttactgttcactgggattacag

SEQ ID NO: 4169248 - DNA, 25 bp, Homo sapien
ggaggtagcccactatcagataatc

SEQ ID NO: 4169249 - DNA, 25 bp, Homo sapien
tcaggaccatacgaaagtaattctt

SEQ ID NO: 4169250 - DNA, 25 bp, Homo sapien
tagtataccaggcaactcttgtaca

SEQ ID NO: 4169251 - DNA, 25 bp, Homo sapien
agataatcacggtgtaagtctgtca

SEQ ID NO: 4169252 - DNA, 25 bp, Homo sapien
caggtacagcaaaaggttacagatg

SEQ ID NO: 4169253 - DNA, 25 bp, Homo sapien
gcggtatatcaatccaaagagggcg

SEQ ID NO: 4169254 - DNA, 25 bp, Homo sapien
gatgaagatgcccagcatgtaggaa

SEQ ID NO: 4169255 - DNA, 25 bp, Homo sapien
gtccctggggcggtatatcaatcca

SEQ ID NO: 4169256 - DNA, 25 bp, Homo sapien
ctgggaggaccttttcagagctgcg

SEQ ID NO: 4169257 - DNA, 25 bp, Homo sapien
cagaagagcgggactgggaggacct

SEQ ID NO: 4169258 - DNA, 25 bp, Homo sapien
agaaaaaatatagggcggcagccca

SEQ ID NO: 4169259 - DNA, 25 bp, Homo sapien
acagcggtggccacgatgcagaaga

SEQ ID NO: 4169260 - DNA, 25 bp, Homo sapien
cacaaaggccgtgtattgtgtgatt

SEQ ID NO: 4169261 - DNA, 25 bp, Homo sapien
atgttacagcatgcttgaacctagg

SEQ ID NO: 4169262 - DNA, 25 bp, Homo sapien
aatgctgatgcatatgaggtttctt

SEQ ID NO: 4169263 - DNA, 25 bp, Homo sapien
cagagacaaaaggtagatttagtag

SEQ ID NO: 4169264 - DNA, 25 bp, Homo sapien
ctcgcggttcttctcccgggattcg

SEQ ID NO: 4169265 - DNA, 25 bp, Homo sapien
catggtcatcgaagaaatccagcag

SEQ ID NO: 4169266 - DNA, 25 bp, Homo sapien
tccagcagaatgcactcgcggttct

SEQ ID NO: 4169267 - DNA, 25 bp, Homo sapien
cagatgtcatggtcatcgaagaaat

SEQ ID NO: 4169268 - DNA, 25 bp, Homo sapien
tactactgccccacgtggaatcttt

SEQ ID NO: 4169269 - DNA, 25 bp, Homo sapien
caagagtcaaaggaataaagtcctg

SEQ ID NO: 4169270 - DNA, 25 bp, Homo sapien
tttatacagattggccaagcttccc

SEQ ID NO: 4169271 - DNA, 25 bp, Homo sapien
taaagagggctttagacgtgaaaca

SEQ ID NO: 4169272 - DNA, 25 bp, Homo sapien
tctggtctctccgaaccacatcaag

SEQ ID NO: 4169273 - DNA, 25 bp, Homo sapien
gaagacagggatctggtctctccga

SEQ ID NO: 4169274 - DNA, 25 bp, Homo sapien
tcagaagacagggatctggtctctc

SEQ ID NO: 4169275 - DNA, 25 bp, Homo sapien
tctccgaaccacatcaaggtcatca

SEQ ID NO: 4169276 - DNA, 25 bp, Homo sapien
cattgctggcaagtctccgtgaggg

SEQ ID NO: 4169277 - DNA, 25 bp, Homo sapien
gaaggaatatgtaagcacccaggac

SEQ ID NO: 4169278 - DNA, 25 bp, Homo sapien
tctacagagggtgagtggagcatct

SEQ ID NO: 4169279 - DNA, 25 bp, Homo sapien
taaaacatctatcccagtagggcag

SEQ ID NO: 4169280 - DNA, 25 bp, Homo sapien
gacaatacgttcatcctgagagctg

SEQ ID NO: 4169281 - DNA, 25 bp, Homo sapien
tacgtcatactccaggcaacaaggg

SEQ ID NO: 4169282 - DNA, 25 bp, Homo sapien
taaagtgacagatgacggactcgct

SEQ ID NO: 4169283 - DNA, 25 bp, Homo sapien
tcaggtgcaaccgagagacaacatt

SEQ ID NO: 4169284 - DNA, 25 bp, Homo sapien
gctgtccagtgtaaacaggccccgc

SEQ ID NO: 4169285 - DNA, 25 bp, Homo sapien
tcgtgaacaacggtatccatctagt

SEQ ID NO: 4169286 - DNA, 25 bp, Homo sapien
caggccccgccttggagttcattga

SEQ ID NO: 4169287 - DNA, 25 bp, Homo sapien
gagcaaagggtacttcttcgtgaac

SEQ ID NO: 4169288 - DNA, 25 bp, Homo sapien
tagtgtggacacccgatcggcatag

SEQ ID NO: 4169289 - DNA, 25 bp, Homo sapien
cctggactccagcgatcctccagcc

SEQ ID NO: 4169290 - DNA, 25 bp, Homo sapien
tgtggacacccgatcggcatagcgc

SEQ ID NO: 4169291 - DNA, 25 bp, Homo sapien
ctcctggactccagcgatcctccag

SEQ ID NO: 4169292 - DNA, 25 bp, Homo sapien
taaaaagcccaactgacagcttagt

SEQ ID NO: 4169293 - DNA, 25 bp, Homo sapien
tacaggaggtgaaacaggagtacgt

SEQ ID NO: 4169294 - DNA, 25 bp, Homo sapien
tagcatgtcagagttccaaaccaag

SEQ ID NO: 4169295 - DNA, 25 bp, Homo sapien
tccagttcagtgcaggtagttcctt

SEQ ID NO: 4169296 - DNA, 25 bp, Homo sapien
cattgtattagggtgtgaatattct

SEQ ID NO: 4169297 - DNA, 25 bp, Homo sapien
caaatgcattgtattagggtgtgaa

SEQ ID NO: 4169298 - DNA, 25 bp, Homo sapien
ttgtattagggtgtgaatattctga

SEQ ID NO: 4169299 - DNA, 25 bp, Homo sapien
gtattagggtgtgaatattctgaac

SEQ ID NO: 4169300 - DNA, 25 bp, Homo sapien
tgaggaccttgttggacacagagct

SEQ ID NO: 4169301 - DNA, 25 bp, Homo sapien
ctcctctgttatagcaaagggccag

SEQ ID NO: 4169302 - DNA, 25 bp, Homo sapien
catgctgataagaagcgtgaggacc

SEQ ID NO: 4169303 - DNA, 25 bp, Homo sapien
gacaccttctcgacaagtacagctg

SEQ ID NO: 4169304 - DNA, 25 bp, Homo sapien
ttttggatttaactatattctgtct

SEQ ID NO: 4169305 - DNA, 25 bp, Homo sapien
tggatttaactatattctgtctgca

SEQ ID NO: 4169306 - DNA, 25 bp, Homo sapien
tttggatttaactatattctgtctg

SEQ ID NO: 4169307 - DNA, 25 bp, Homo sapien
ttggatttaactatattctgtctgc

SEQ ID NO: 4169308 - DNA, 25 bp, Homo sapien
gagatgattactcctttgccttgaa

SEQ ID NO: 4169309 - DNA, 25 bp, Homo sapien
tattgggcccaccatgtatggatca

SEQ ID NO: 4169310 - DNA, 25 bp, Homo sapien
gctccatgtcaaatagggctcaggg

SEQ ID NO: 4169311 - DNA, 25 bp, Homo sapien
tatcttccctttgataggtaggcac

SEQ ID NO: 4169312 - DNA, 25 bp, Homo sapien
tatgtctgagtcatgagtgacagtc

SEQ ID NO: 4169313 - DNA, 25 bp, Homo sapien
tatgttgttttataccggttcagga

SEQ ID NO: 4169314 - DNA, 25 bp, Homo sapien
ggaaatacacgaagttatgtctgag

SEQ ID NO: 4169315 - DNA, 25 bp, Homo sapien
tcacagagtccgttataaaaagtgg

SEQ ID NO: 4169316 - DNA, 25 bp, Homo sapien
taattggctcctgcttacgtgtagc

SEQ ID NO: 4169317 - DNA, 25 bp, Homo sapien
tgcttagctgtgttcagacatagta

SEQ ID NO: 4169318 - DNA, 25 bp, Homo sapien
gtgttcagaccatagtacccttatt

SEQ ID NO: 4169319 - DNA, 25 bp, Homo sapien
cattgcaatgtaaagtcctcaaagc

SEQ ID NO: 4169320 - DNA, 25 bp, Homo sapien
gagcttcatgaataagttactcaag

SEQ ID NO: 4169321 - DNA, 25 bp, Homo sapien
caacagataaacacagtagtcaaaa

SEQ ID NO: 4169322 - DNA, 25 bp, Homo sapien
taagctgcaacgttcaaatttttct

SEQ ID NO: 4169323 - DNA, 25 bp, Homo sapien
tttgtacttgaaaggtccagtgtgc

SEQ ID NO: 4169324 - DNA, 25 bp, Homo sapien
agttaactccagtgaatacctcttc

SEQ ID NO: 4169325 - DNA, 25 bp, Homo sapien
agcttcctaagggttggtcagagca

SEQ ID NO: 4169326 - DNA, 25 bp, Homo sapien
tttctgctgccaactaagcagcttc

SEQ ID NO: 4169327 - DNA, 25 bp, Homo sapien
tctaaagactcagcaaaagggtcat

SEQ ID NO: 4169328 - DNA, 25 bp, Homo sapien
ggaacagcaccttgaatattccttt

SEQ ID NO: 4169329 - DNA, 25 bp, Homo sapien
caggaacagcaccttgaatattcct

SEQ ID NO: 4169330 - DNA, 25 bp, Homo sapien
accaggaacagcaccttgaatattc

SEQ ID NO: 4169331 - DNA, 25 bp, Homo sapien
gaacagcaccttgaatattcctttt

SEQ ID NO: 4169332 - DNA, 25 bp, Homo sapien
ggagagatgcatagaaattgtttta

SEQ ID NO: 4169333 - DNA, 25 bp, Homo sapien
taacaaagtgaactcaaggaccagc

SEQ ID NO: 4169334 - DNA, 25 bp, Homo sapien
tgcttggcctaggtacaggttttta

SEQ ID NO: 4169335 - DNA, 25 bp, Homo sapien
aagccccacagaagtttataatacg

SEQ ID NO: 4169336 - DNA, 25 bp, Homo sapien
gttctgttcgactccccatcaatgg

SEQ ID NO: 4169337 - DNA, 25 bp, Homo sapien
ggccagcctcaatcaaagcatatca

SEQ ID NO: 4169338 - DNA, 25 bp, Homo sapien
tcaatggagccaatactgtaatagg

SEQ ID NO: 4169339 - DNA, 25 bp, Homo sapien
tacatttggtgctttggccagcctc

SEQ ID NO: 4169340 - DNA, 25 bp, Homo sapien
ttcctggggacccttgcgtgcggca

SEQ ID NO: 4169341 - DNA, 25 bp, Homo sapien
tggtggggcgtcagcgcccgcggcg

SEQ ID NO: 4169342 - DNA, 25 bp, Homo sapien
gccagggctgcgctaagtgcgcctc

SEQ ID NO: 4169343 - DNA, 25 bp, Homo sapien
ggacccttgcgtgcggcacctggtg

SEQ ID NO: 4169344 - DNA, 25 bp, Homo sapien
cgcagcctgattggcgggttgagtg

SEQ ID NO: 4169345 - DNA, 25 bp, Homo sapien
ttgagtgaaagaggcgggaacgcgg

SEQ ID NO: 4169346 - DNA, 25 bp, Homo sapien
cgcgcccagggtaggctgttcgctt

SEQ ID NO: 4169347 - DNA, 25 bp, Homo sapien
ccagggtaggctgttcgcttgctga

SEQ ID NO: 4169348 - DNA, 25 bp, Homo sapien
tgcgagcagcgtcaagtcagcaaca

SEQ ID NO: 4169349 - DNA, 25 bp, Homo sapien
tataagcaacattacaggccttccg

SEQ ID NO: 4169350 - DNA, 25 bp, Homo sapien
taaccgcaactaggtggaggacacc

SEQ ID NO: 4169351 - DNA, 25 bp, Homo sapien
caccttctggaagttagcccacgga

SEQ ID NO: 4169352 - DNA, 25 bp, Homo sapien
gaagtaatgtcctatgttgagctgg

SEQ ID NO: 4169353 - DNA, 25 bp, Homo sapien
gaactattgggaaaccatggtgtgg

SEQ ID NO: 4169354 - DNA, 25 bp, Homo sapien
aaagctgggcacaagttcatatgcc

SEQ ID NO: 4169355 - DNA, 25 bp, Homo sapien
catatgcctatgagtcagtaaagac

SEQ ID NO: 4169356 - DNA, 25 bp, Homo sapien
caaagtgcagtagacttcaacaatc

SEQ ID NO: 4169357 - DNA, 25 bp, Homo sapien
ttagcgttaagcacctttatcttca

SEQ ID NO: 4169358 - DNA, 25 bp, Homo sapien
tcaacaatcttgagtgccaagaata

SEQ ID NO: 4169359 - DNA, 25 bp, Homo sapien
tgtaaaattgcggtataaagtctca

SEQ ID NO: 4169360 - DNA, 25 bp, Homo sapien
gcttagatgggctgtgacacaaaaa

SEQ ID NO: 4169361 - DNA, 25 bp, Homo sapien
taatatcccagctagagatatggcc

SEQ ID NO: 4169362 - DNA, 25 bp, Homo sapien
tgcacatctgttggaggacatccca

SEQ ID NO: 4169363 - DNA, 25 bp, Homo sapien
tcattttccggcacacacggagtgg

SEQ ID NO: 4169364 - DNA, 25 bp, Homo sapien
gagctagtgcaagctatattctgcc

SEQ ID NO: 4169365 - DNA, 25 bp, Homo sapien
tgttgccattcagtcacttggtctg

SEQ ID NO: 4169366 - DNA, 25 bp, Homo sapien
tgtgggccaacagaaagtttatggc

SEQ ID NO: 4169367 - DNA, 25 bp, Homo sapien
ggacggtcctgtgctaaacccataa

SEQ ID NO: 4169368 - DNA, 25 bp, Homo sapien
aaaaatgtgccttgtatgacagaac

SEQ ID NO: 4169369 - DNA, 25 bp, Homo sapien
tgaagctgcactgcatcgaggcatg

SEQ ID NO: 4169370 - DNA, 25 bp, Homo sapien
catcgctagtccttatgatggagtc

SEQ ID NO: 4169371 - DNA, 25 bp, Homo sapien
taaagtgtgaaagctcggattctca

SEQ ID NO: 4169372 - DNA, 25 bp, Homo sapien
gctgtgtgatatctgaagcgatact

SEQ ID NO: 4169373 - DNA, 25 bp, Homo sapien
tgcacatgtgatcagtagagtggga

SEQ ID NO: 4169374 - DNA, 25 bp, Homo sapien
gtagacacattcttcccatcgtgaa

SEQ ID NO: 4169375 - DNA, 25 bp, Homo sapien
ccatcgtgaacgtgagagctatatt

SEQ ID NO: 4169376 - DNA, 25 bp, Homo sapien
agaataatcaatactttctgagttg

SEQ ID NO: 4169377 - DNA, 25 bp, Homo sapien
aagaataatcaatactttctgagtt

SEQ ID NO: 4169378 - DNA, 25 bp, Homo sapien
gaataatcaatactttctgagttgg

SEQ ID NO: 4169379 - DNA, 25 bp, Homo sapien
gatatcggtggtaacgacggcctca

SEQ ID NO: 4169380 - DNA, 25 bp, Homo sapien
gcggcgactacgacggcgttgatat

SEQ ID NO: 4169381 - DNA, 25 bp, Homo sapien
ctaagggtgcggagacctaagggcg

SEQ ID NO: 4169382 - DNA, 25 bp, Homo sapien
cgaggagagattcagggcgaagacg

SEQ ID NO: 4169383 - DNA, 25 bp, Homo sapien
agactgtaccgaccgaggacccaga

SEQ ID NO: 4169384 - DNA, 25 bp, Homo sapien
tgtaccgaccgaggacccagaggct

SEQ ID NO: 4169385 - DNA, 25 bp, Homo sapien
aggtgcagagactgtaccgaccgag

SEQ ID NO: 4169386 - DNA, 25 bp, Homo sapien
cgaggacccagaggctgtcaccacg

SEQ ID NO: 4169387 - DNA, 25 bp, Homo sapien
taaatatgttactacgaagatacac

SEQ ID NO: 4169388 - DNA, 25 bp, Homo sapien
gaagatacacaaccacttcagctgt

SEQ ID NO: 4169389 - DNA, 25 bp, Homo sapien
aagtcgctatcatttcaccataggg

SEQ ID NO: 4169390 - DNA, 25 bp, Homo sapien
cattgcaaaactactaacccttgtg

SEQ ID NO: 4169391 - DNA, 25 bp, Homo sapien
ggaaatcctttctaatcaccagtag

SEQ ID NO: 4169392 - DNA, 25 bp, Homo sapien
cattccataaaatgcctcggccata

SEQ ID NO: 4169393 - DNA, 25 bp, Homo sapien
tgaaacactgttgcagctaacactc

SEQ ID NO: 4169394 - DNA, 25 bp, Homo sapien
gaggatagcttaaacctaagaggag

SEQ ID NO: 4169395 - DNA, 25 bp, Homo sapien
ggtaaactggacttcaaatctctgc

SEQ ID NO: 4169396 - DNA, 25 bp, Homo sapien
tattagctcaaaaaggctctactcc

SEQ ID NO: 4169397 - DNA, 25 bp, Homo sapien
tgtgaccttggatttgacataacgc

SEQ ID NO: 4169398 - DNA, 25 bp, Homo sapien
tcaacaagtggtggtagaaccaacg

SEQ ID NO: 4169399 - DNA, 25 bp, Homo sapien
tgtgctcaggtatattaacccaatg

SEQ ID NO: 4169400 - DNA, 25 bp, Homo sapien
caaaggttcataaactgtgctcagg

SEQ ID NO: 4169401 - DNA, 25 bp, Homo sapien
cctctcgtttatttaatggatggaa

SEQ ID NO: 4169402 - DNA, 25 bp, Homo sapien
atggatggaatagaagaggacaaag

SEQ ID NO: 4169403 - DNA, 25 bp, Homo sapien
ctttacaattaccatattactctcg

SEQ ID NO: 4169404 - DNA, 25 bp, Homo sapien
tcgttactgagcaaattttgatggc

SEQ ID NO: 4169405 - DNA, 25 bp, Homo sapien
gcaaattttgatggctttgccaaaa

SEQ ID NO: 4169406 - DNA, 25 bp, Homo sapien
gggataacacgtgcgagccaccaag

SEQ ID NO: 4169407 - DNA, 25 bp, Homo sapien
tacaagagcataccaagaaatttcc

SEQ ID NO: 4169408 - DNA, 25 bp, Homo sapien
tacggtagactgctatagcatcctg

SEQ ID NO: 4169409 - DNA, 25 bp, Homo sapien
tcttacctcgctaccaaatctagtt

SEQ ID NO: 4169410 - DNA, 25 bp, Homo sapien
caaatctagttgttcttatcttgaa

SEQ ID NO: 4169411 - DNA, 25 bp, Homo sapien
ctgagaccccatgcacataaccaaa

SEQ ID NO: 4169412 - DNA, 25 bp, Homo sapien
catcgagtattttgggtagcttgga

SEQ ID NO: 4169413 - DNA, 25 bp, Homo sapien
tctttatcttcatcgagtattttgg

SEQ ID NO: 4169414 - DNA, 25 bp, Homo sapien
tcttcatcgagtattttgggtagct

SEQ ID NO: 4169415 - DNA, 25 bp, Homo sapien
tcactatgagatcgcctaaggacaa

SEQ ID NO: 4169416 - DNA, 25 bp, Homo sapien
taaggataatacatcactgaccagg

SEQ ID NO: 4169417 - DNA, 25 bp, Homo sapien
ttccaggagcagtttactacacagt

SEQ ID NO: 4169418 - DNA, 25 bp, Homo sapien
gctagatgagcccttatgacagaga

SEQ ID NO: 4169419 - DNA, 25 bp, Homo sapien
aaaaggatgccattgttccattacc

SEQ ID NO: 4169420 - DNA, 25 bp, Homo sapien
aagaattaagatgcactgaaatacc

SEQ ID NO: 4169421 - DNA, 25 bp, Homo sapien
ttaagaattaagatgcactgaaata

SEQ ID NO: 4169422 - DNA, 25 bp, Homo sapien
aaaaaaggatgccattgttccatta

SEQ ID NO: 4169423 - DNA, 25 bp, Homo sapien
tgaacttactattttggaccatgtg

SEQ ID NO: 4169424 - DNA, 25 bp, Homo sapien
gaccatgtggtctagtaagcaaaaa

SEQ ID NO: 4169425 - DNA, 25 bp, Homo sapien
gaaggttgccatatttttagacacg

SEQ ID NO: 4169426 - DNA, 25 bp, Homo sapien
tagacacgtgtaagaataaaccaat

SEQ ID NO: 4169427 - DNA, 25 bp, Homo sapien
tcatacatggctgcacccgccatgt

SEQ ID NO: 4169428 - DNA, 25 bp, Homo sapien
cctccaatcgaataatctctccaac

SEQ ID NO: 4169429 - DNA, 25 bp, Homo sapien
tctccaaccaattcgctgtggccca

SEQ ID NO: 4169430 - DNA, 25 bp, Homo sapien
cccgccatgtcacaggctgtaacca

SEQ ID NO: 4169431 - DNA, 25 bp, Homo sapien
tctgactgctgatatccgacaaagg

SEQ ID NO: 4169432 - DNA, 25 bp, Homo sapien
taatgccaggaccaagctctacaga

SEQ ID NO: 4169433 - DNA, 25 bp, Homo sapien
tgctaagagcagacacgtttactcc

SEQ ID NO: 4169434 - DNA, 25 bp, Homo sapien
taccagtgcgaagtacaggatctcc

SEQ ID NO: 4169435 - DNA, 25 bp, Homo sapien
aattccataaatgtctccgccagtg

SEQ ID NO: 4169436 - DNA, 25 bp, Homo sapien
gcgagttctcactgacaattccata

SEQ ID NO: 4169437 - DNA, 25 bp, Homo sapien
cccaggtggagcaatgtaagttaca

SEQ ID NO: 4169438 - DNA, 25 bp, Homo sapien
tctccgccagtgatatgactaccaa

SEQ ID NO: 4169439 - DNA, 25 bp, Homo sapien
aggccatacttgcaccatggtgaac

SEQ ID NO: 4169440 - DNA, 25 bp, Homo sapien
tcgaacttgacgtacaggccatact

SEQ ID NO: 4169441 - DNA, 25 bp, Homo sapien
caacagaggatgattggctggcagc

SEQ ID NO: 4169442 - DNA, 25 bp, Homo sapien
caccttcaaattcaagctccaagac

SEQ ID NO: 4169443 - DNA, 25 bp, Homo sapien
tacgctttttaagcagtcgtagaaa

SEQ ID NO: 4169444 - DNA, 25 bp, Homo sapien
aatacatcctttatgctgggagatc

SEQ ID NO: 4169445 - DNA, 25 bp, Homo sapien
tgggagatctattcctgtgcatgct

SEQ ID NO: 4169446 - DNA, 25 bp, Homo sapien
tgagtgacataataaattgcttggt

SEQ ID NO: 4169447 - DNA, 25 bp, Homo sapien
tgtgatatcactgtctttccacagc

SEQ ID NO: 4169448 - DNA, 25 bp, Homo sapien
tgttagaatacttggatagagactg

SEQ ID NO: 4169449 - DNA, 25 bp, Homo sapien
ggctccagggatagcagtagttcct

SEQ ID NO: 4169450 - DNA, 25 bp, Homo sapien
ctccagggatagcagtagttcctcc

SEQ ID NO: 4169451 - DNA, 25 bp, Homo sapien
tgctccacggtgctatgaagaagat

SEQ ID NO: 4169452 - DNA, 25 bp, Homo sapien
taatgcctcttacaatcagtgttcc

SEQ ID NO: 4169453 - DNA, 25 bp, Homo sapien
cacacataaagttcacatctataaa

SEQ ID NO: 4169454 - DNA, 25 bp, Homo sapien
tcagtgttcctaaagtaatattccc

SEQ ID NO: 4169455 - DNA, 25 bp, Homo sapien
tataaatagaggcttctctagcagc

SEQ ID NO: 4169456 - DNA, 25 bp, Homo sapien
cagtataaatagaggcttctctagc

SEQ ID NO: 4169457 - DNA, 25 bp, Homo sapien
cagcaacaggcatattggaggtatt

SEQ ID NO: 4169458 - DNA, 25 bp, Homo sapien
ggtattggctaccaaagctgtcctc

SEQ ID NO: 4169459 - DNA, 25 bp, Homo sapien
tagcccatgtcacggaagtactctg

SEQ ID NO: 4169460 - DNA, 25 bp, Homo sapien
catcatactgacatgatagcccatg

SEQ ID NO: 4169461 - DNA, 25 bp, Homo sapien
gcccatctagaggtagagtcagcca

SEQ ID NO: 4169462 - DNA, 25 bp, Homo sapien
tgcaggcatttcagctaaacgacca

SEQ ID NO: 4169463 - DNA, 25 bp, Homo sapien
tcgttcataaaacgaggccagacgg

SEQ ID NO: 4169464 - DNA, 25 bp, Homo sapien
ggccagacgggcaccaagataggct

SEQ ID NO: 4169465 - DNA, 25 bp, Homo sapien
tcaccctgcctgctcgttcataaaa

SEQ ID NO: 4169466 - DNA, 25 bp, Homo sapien
caccaagataggctggatatccact

SEQ ID NO: 4169467 - DNA, 25 bp, Homo sapien
accaagagtggcagatgtaactgga

SEQ ID NO: 4169468 - DNA, 25 bp, Homo sapien
cgataccaagagtggcagatgtaac

SEQ ID NO: 4169469 - DNA, 25 bp, Homo sapien
aacgataccaagagtggcagatgta

SEQ ID NO: 4169470 - DNA, 25 bp, Homo sapien
ctgaacgataccaagagtggcagat

SEQ ID NO: 4169471 - DNA, 25 bp, Homo sapien
gctagtttcttatctaagccccaga

SEQ ID NO: 4169472 - DNA, 25 bp, Homo sapien
gtcatagtattcatccaaggcacgc

SEQ ID NO: 4169473 - DNA, 25 bp, Homo sapien
tgctgtagctgatgagccaattgac

SEQ ID NO: 4169474 - DNA, 25 bp, Homo sapien
tcgtcctcagaggaacgaactctgt

SEQ ID NO: 4169475 - DNA, 25 bp, Homo sapien
gcattgcatactatctgagaagtct

SEQ ID NO: 4169476 - DNA, 25 bp, Homo sapien
tacaggcacaagaatgtaactcacc

SEQ ID NO: 4169477 - DNA, 25 bp, Homo sapien
taggcatgctggtcttaatcctagt

SEQ ID NO: 4169478 - DNA, 25 bp, Homo sapien
taactcacctgtttaaggccaatag

SEQ ID NO: 4169479 - DNA, 25 bp, Homo sapien
gattttcggtaccatctttgcaata

SEQ ID NO: 4169480 - DNA, 25 bp, Homo sapien
tgctccactggtccgctggtctgtt

SEQ ID NO: 4169481 - DNA, 25 bp, Homo sapien
tcacagactgaaacaatctatcctc

SEQ ID NO: 4169482 - DNA, 25 bp, Homo sapien
tgtcactggtctgttacctttaacc

SEQ ID NO: 4169483 - DNA, 25 bp, Homo sapien
ggcgagatctcttttcactgtagtc

SEQ ID NO: 4169484 - DNA, 25 bp, Homo sapien
gtgatcatcacacctcagctttcca

SEQ ID NO: 4169485 - DNA, 25 bp, Homo sapien
cagtggcgagatctcttttcactgt

SEQ ID NO: 4169486 - DNA, 25 bp, Homo sapien
gtggcgagatctcttttcactgtag

SEQ ID NO: 4169487 - DNA, 25 bp, Homo sapien
ttgttttgatccacccatgctgctg

SEQ ID NO: 4169488 - DNA, 25 bp, Homo sapien
tcacagtagaggacattcagatttc

SEQ ID NO: 4169489 - DNA, 25 bp, Homo sapien
gcttccagctctcatgtatttcatc

SEQ ID NO: 4169490 - DNA, 25 bp, Homo sapien
tggtgtgcaccctccctattttacc

SEQ ID NO: 4169491 - DNA, 25 bp, Homo sapien
gtggcatgcgcctctagacccagct

SEQ ID NO: 4169492 - DNA, 25 bp, Homo sapien
ggcatgcgcctctagacccagctac

SEQ ID NO: 4169493 - DNA, 25 bp, Homo sapien
ggtggcatgcgcctctagacccagc

SEQ ID NO: 4169494 - DNA, 25 bp, Homo sapien
catgcgcctctagacccagctactt

SEQ ID NO: 4169495 - DNA, 25 bp, Homo sapien
ttactgtgaaacaaatctctagagc

SEQ ID NO: 4169496 - DNA, 25 bp, Homo sapien
aaatctctagagcttttccatcttg

SEQ ID NO: 4169497 - DNA, 25 bp, Homo sapien
tgaaacaaatctctagagcttttcc

SEQ ID NO: 4169498 - DNA, 25 bp, Homo sapien
attactgtgaaacaaatctctagag

SEQ ID NO: 4169499 - DNA, 25 bp, Homo sapien
cataaggagtatatccattttgttg

SEQ ID NO: 4169500 - DNA, 25 bp, Homo sapien
tctttgataagttttgctacctcca

SEQ ID NO: 4169501 - DNA, 25 bp, Homo sapien
ctttgataagttttgctacctccag

SEQ ID NO: 4169502 - DNA, 25 bp, Homo sapien
tcataaggagtatatccattttgtt

SEQ ID NO: 4169503 - DNA, 25 bp, Homo sapien
ggtttcaacagctctacgagccata

SEQ ID NO: 4169504 - DNA, 25 bp, Homo sapien
gattttattgtcactctgggcagtg

SEQ ID NO: 4169505 - DNA, 25 bp, Homo sapien
tactgtcttgtagaatgggcagaac

SEQ ID NO: 4169506 - DNA, 25 bp, Homo sapien
gaggatgtctcccatgtgctcacga

SEQ ID NO: 4169507 - DNA, 25 bp, Homo sapien
tcttcaaggctacggaatgcattct

SEQ ID NO: 4169508 - DNA, 25 bp, Homo sapien
tgcatgtcttcaagaagttgtgcat

SEQ ID NO: 4169509 - DNA, 25 bp, Homo sapien
ttgcctcaccatctttcagtggatc

SEQ ID NO: 4169510 - DNA, 25 bp, Homo sapien
tgcatagtcgcttttgatctttgcc

SEQ ID NO: 4169511 - DNA, 25 bp, Homo sapien
agggaggcccttcacaacactagaa

SEQ ID NO: 4169512 - DNA, 25 bp, Homo sapien
gggtcatcaccctacatacaagttt

SEQ ID NO: 4169513 - DNA, 25 bp, Homo sapien
cacctaggacaaagagggtcatcac

SEQ ID NO: 4169514 - DNA, 25 bp, Homo sapien
cataggcactagtctcaaagctgca

SEQ ID NO: 4169515 - DNA, 25 bp, Homo sapien
caggaatcactacagcccagctggt

SEQ ID NO: 4169516 - DNA, 25 bp, Homo sapien
tcccaaagaggaagcaacggtgcca

SEQ ID NO: 4169517 - DNA, 25 bp, Homo sapien
taattggctccacttaggaccagac

SEQ ID NO: 4169518 - DNA, 25 bp, Homo sapien
tggtccttaaaggtgcaaacagcct

SEQ ID NO: 4169519 - DNA, 25 bp, Homo sapien
tgaggatcactagatcctgggaagt

SEQ ID NO: 4169520 - DNA, 25 bp, Homo sapien
agagcaagcccatatcacaaaagag

SEQ ID NO: 4169521 - DNA, 25 bp, Homo sapien
gaaaacagcatctatatgtgaatca

SEQ ID NO: 4169522 - DNA, 25 bp, Homo sapien
aactgggtgtggcaagtcccagcta

SEQ ID NO: 4169523 - DNA, 25 bp, Homo sapien
tccatatggacatcttcacagagct

SEQ ID NO: 4169524 - DNA, 25 bp, Homo sapien
cctggtactggctattggtttggga

SEQ ID NO: 4169525 - DNA, 25 bp, Homo sapien
ttggtttgggacctcaattcctctc

SEQ ID NO: 4169526 - DNA, 25 bp, Homo sapien
cagagctgcttcagtcctcattgca

SEQ ID NO: 4169527 - DNA, 25 bp, Homo sapien
ggacatgcctcattaacatcaacac

SEQ ID NO: 4169528 - DNA, 25 bp, Homo sapien
ccatgatgaaagaggggattggaca

SEQ ID NO: 4169529 - DNA, 25 bp, Homo sapien
ttctggctctattagaccagctgga

SEQ ID NO: 4169530 - DNA, 25 bp, Homo sapien
tattgcctcggacacctgctacttg

SEQ ID NO: 4169531 - DNA, 25 bp, Homo sapien
ccgccgcggcaccgccccgcgcgca

SEQ ID NO: 4169532 - DNA, 25 bp, Homo sapien
gcgcaccgcaccgcaccgccccgcg

SEQ ID NO: 4169533 - DNA, 25 bp, Homo sapien
ccgcgcgcaccgcaccgcaccgccc

SEQ ID NO: 4169534 - DNA, 25 bp, Homo sapien
ccgccccgcgcgcaccgcaccgcac

SEQ ID NO: 4169535 - DNA, 25 bp, Homo sapien
gacggacagtcggagcgccctccat

SEQ ID NO: 4169536 - DNA, 25 bp, Homo sapien
ctgacggacagtcggagcgccctcc

SEQ ID NO: 4169537 - DNA, 25 bp, Homo sapien
tgacggacagtcggagcgccctcca

SEQ ID NO: 4169538 - DNA, 25 bp, Homo sapien
caattatgtaaatttggcccctgtt

SEQ ID NO: 4169539 - DNA, 25 bp, Homo sapien
ccacagttggactaggattttcctc

SEQ ID NO: 4169540 - DNA, 25 bp, Homo sapien
tctacatcttcctgtaagtcggtgg

SEQ ID NO: 4169541 - DNA, 25 bp, Homo sapien
tcctgtaagtcggtggcaaggcttg

SEQ ID NO: 4169542 - DNA, 25 bp, Homo sapien
caagcagtagtctcattttccagtg

SEQ ID NO: 4169543 - DNA, 25 bp, Homo sapien
tttcatcgaaccagacaacagtgca

SEQ ID NO: 4169544 - DNA, 25 bp, Homo sapien
gagctacagtgtaagtggaatccac

SEQ ID NO: 4169545 - DNA, 25 bp, Homo sapien
tcttgacaatacagtgagctacagt

SEQ ID NO: 4169546 - DNA, 25 bp, Homo sapien
tacgctgcagccatccagagactgg

SEQ ID NO: 4169547 - DNA, 25 bp, Homo sapien
caggccttggcctaaaggtctggag

SEQ ID NO: 4169548 - DNA, 25 bp, Homo sapien
caagactcacaaaaggggaagccga

SEQ ID NO: 4169549 - DNA, 25 bp, Homo sapien
gcgacctgcaagactcacaaaaggg

SEQ ID NO: 4169550 - DNA, 25 bp, Homo sapien
ttatcttcatctgccccggagactg

SEQ ID NO: 4169551 - DNA, 25 bp, Homo sapien
gattatcttcatctgccccggagac

SEQ ID NO: 4169552 - DNA, 25 bp, Homo sapien
tgattatcttcatctgccccggaga

SEQ ID NO: 4169553 - DNA, 25 bp, Homo sapien
atgattatcttcatctgccccggag

SEQ ID NO: 4169554 - DNA, 25 bp, Homo sapien
tgtatcaggtagatgtgtgaactgt

SEQ ID NO: 4169555 - DNA, 25 bp, Homo sapien
cagcctctctgtatcaggtagatgt

SEQ ID NO: 4169556 - DNA, 25 bp, Homo sapien
tgtctttataggtggaacttgaaat

SEQ ID NO: 4169557 - DNA, 25 bp, Homo sapien
ctctgtatcaggtagatgtgtgaac

SEQ ID NO: 4169558 - DNA, 25 bp, Homo sapien
tgctatagaaacatagccagttttc

SEQ ID NO: 4169559 - DNA, 25 bp, Homo sapien
tagtcgtccctgaagcaaaatgtcc

SEQ ID NO: 4169560 - DNA, 25 bp, Homo sapien
cccatctgaagatgttgctatagaa

SEQ ID NO: 4169561 - DNA, 25 bp, Homo sapien
cagttttctgaaaggtatagtcgtc

SEQ ID NO: 4169562 - DNA, 25 bp, Homo sapien
caacacgtttgtatttacatgcaca

SEQ ID NO: 4169563 - DNA, 25 bp, Homo sapien
tacatgcacactaatttagatgcac

SEQ ID NO: 4169564 - DNA, 25 bp, Homo sapien
gcagccattaagatatatgttcaag

SEQ ID NO: 4169565 - DNA, 25 bp, Homo sapien
tctctaactatactggagctcaatg

SEQ ID NO: 4169566 - DNA, 25 bp, Homo sapien
ggagttaataagtacacgcttgtat

SEQ ID NO: 4169567 - DNA, 25 bp, Homo sapien
ttgaaggagttaataagtacacgct

SEQ ID NO: 4169568 - DNA, 25 bp, Homo sapien
gaaggagttaataagtacacgcttg

SEQ ID NO: 4169569 - DNA, 25 bp, Homo sapien
gttaataagtacacgcttgtattct

SEQ ID NO: 4169570 - DNA, 25 bp, Homo sapien
tcactttctgtaactatctggatag

SEQ ID NO: 4169571 - DNA, 25 bp, Homo sapien
gatgagtcgagcagttttttccttg

SEQ ID NO: 4169572 - DNA, 25 bp, Homo sapien
actatctggatagcgtttgggatga

SEQ ID NO: 4169573 - DNA, 25 bp, Homo sapien
cgtttgggatgagtcgagcagtttt

SEQ ID NO: 4169574 - DNA, 25 bp, Homo sapien
tcacattatgtaatataacaaagat

SEQ ID NO: 4169575 - DNA, 25 bp, Homo sapien
ttatgtaatataacaaagataggaa

SEQ ID NO: 4169576 - DNA, 25 bp, Homo sapien
tgtaatataacaaagataggaaagt

SEQ ID NO: 4169577 - DNA, 25 bp, Homo sapien
tataacaaagataggaaagttttca

SEQ ID NO: 4169578 - DNA, 25 bp, Homo sapien
cacagggccctaaccaattttccag

SEQ ID NO: 4169579 - DNA, 25 bp, Homo sapien
tgtgctaatgttaccctgcctagaa

SEQ ID NO: 4169580 - DNA, 25 bp, Homo sapien
taaccactaatataactgcatacag

SEQ ID NO: 4169581 - DNA, 25 bp, Homo sapien
caaatctctgttcaccaggagcatt

SEQ ID NO: 4169582 - DNA, 25 bp, Homo sapien
ctgttgttagtactgtgaattggct

SEQ ID NO: 4169583 - DNA, 25 bp, Homo sapien
ttagtactgtgaattggctcacttt

SEQ ID NO: 4169584 - DNA, 25 bp, Homo sapien
gtactgtgaattggctcacttttct

SEQ ID NO: 4169585 - DNA, 25 bp, Homo sapien
tgttgttagtactgtgaattggctc

SEQ ID NO: 4169586 - DNA, 25 bp, Homo sapien
gaggtaacttctatccctggcacca

SEQ ID NO: 4169587 - DNA, 25 bp, Homo sapien
aagatactgaggtaacttctatccc

SEQ ID NO: 4169588 - DNA, 25 bp, Homo sapien
acattctgccacaacctaaagatac

SEQ ID NO: 4169589 - DNA, 25 bp, Homo sapien
ctatccctggcaccaaaagatgtga

SEQ ID NO: 4169590 - DNA, 25 bp, Homo sapien
catctttgtccctgtgtgccaccat

SEQ ID NO: 4169591 - DNA, 25 bp, Homo sapien
tgggcctctgtacgaggtctatata

SEQ ID NO: 4169592 - DNA, 25 bp, Homo sapien
aattcacaaatacactaggaggttc

SEQ ID NO: 4169593 - DNA, 25 bp, Homo sapien
gacctagcatatcgtctattctgga

SEQ ID NO: 4169594 - DNA, 25 bp, Homo sapien
cagctccgccagccccccgggggca

SEQ ID NO: 4169595 - DNA, 25 bp, Homo sapien
aggcccccacggcccagctccgcca

SEQ ID NO: 4169596 - DNA, 25 bp, Homo sapien
cggaggcccccacggcccagctccg

SEQ ID NO: 4169597 - DNA, 25 bp, Homo sapien
cggcccagctccgccagccccccgg

SEQ ID NO: 4169598 - DNA, 25 bp, Homo sapien
tatcatatcgaacagtttggtactg

SEQ ID NO: 4169599 - DNA, 25 bp, Homo sapien
gggaggatatcatatcgaacagttt

SEQ ID NO: 4169600 - DNA, 25 bp, Homo sapien
ggatatcatatcgaacagtttggta

SEQ ID NO: 4169601 - DNA, 25 bp, Homo sapien
gataaggggaggatatcatatcgaa

SEQ ID NO: 4169602 - DNA, 25 bp, Homo sapien
cccatcatggtgggagtgaataagt

SEQ ID NO: 4169603 - DNA, 25 bp, Homo sapien
ggcctaacaggccggactgcggcct

SEQ ID NO: 4169604 - DNA, 25 bp, Homo sapien
cctaacaggccggactgcggcctca

SEQ ID NO: 4169605 - DNA, 25 bp, Homo sapien
aggaggcctaacaggccggactgcg

SEQ ID NO: 4169606 - DNA, 25 bp, Homo sapien
ggaggcctaacaggccggactgcgg

SEQ ID NO: 4169607 - DNA, 25 bp, Homo sapien
ggctcaccacttccaggaagaaatc

SEQ ID NO: 4169608 - DNA, 25 bp, Homo sapien
ccagctcgtaccactggctcaccac

SEQ ID NO: 4169609 - DNA, 25 bp, Homo sapien
cacttccaggaagaaatccacatgg

SEQ ID NO: 4169610 - DNA, 25 bp, Homo sapien
gctcgtaccactggctcaccacttc

SEQ ID NO: 4169611 - DNA, 25 bp, Homo sapien
ctgtctgtaatatctcctcttaagg

SEQ ID NO: 4169612 - DNA, 25 bp, Homo sapien
ttctgctattgtccagtttacctgc

SEQ ID NO: 4169613 - DNA, 25 bp, Homo sapien
atatctcctcttaaggatgcttctg

SEQ ID NO: 4169614 - DNA, 25 bp, Homo sapien
acagcaaagccatagatctccatgc

SEQ ID NO: 4169615 - DNA, 25 bp, Homo sapien
tagggagttatccaggatcacaatg

SEQ ID NO: 4169616 - DNA, 25 bp, Homo sapien
gatgtagctgctcaactgcaaagtg

SEQ ID NO: 4169617 - DNA, 25 bp, Homo sapien
gatggcattgtctggatggctcctg

SEQ ID NO: 4169618 - DNA, 25 bp, Homo sapien
atggctcctgtaagcccctagggag

SEQ ID NO: 4169619 - DNA, 25 bp, Homo sapien
agaatgaacgtcagcggtgaacctg

SEQ ID NO: 4169620 - DNA, 25 bp, Homo sapien
cggctcagcacagaatgaacgtcag

SEQ ID NO: 4169621 - DNA, 25 bp, Homo sapien
gcacagaatgaacgtcagcggtgaa

SEQ ID NO: 4169622 - DNA, 25 bp, Homo sapien
tcagcacagaatgaacgtcagcggt

SEQ ID NO: 4169623 - DNA, 25 bp, Homo sapien
ttggacagggcatcagatggcatcc

SEQ ID NO: 4169624 - DNA, 25 bp, Homo sapien
tggacagggcatcagatggcatccc

SEQ ID NO: 4169625 - DNA, 25 bp, Homo sapien
caacccaagtggagggggattagct

SEQ ID NO: 4169626 - DNA, 25 bp, Homo sapien
acagggcatcagatggcatcccaag

SEQ ID NO: 4169627 - DNA, 25 bp, Homo sapien
cccagcccatgtgtccatccagact

SEQ ID NO: 4169628 - DNA, 25 bp, Homo sapien
catgaagttaagagtgaggctgctt

SEQ ID NO: 4169629 - DNA, 25 bp, Homo sapien
cagactccaagtggagtgtagggct

SEQ ID NO: 4169630 - DNA, 25 bp, Homo sapien
gggtttccatggagtgtgaacatga

SEQ ID NO: 4169631 - DNA, 25 bp, Homo sapien
aatccagtggcccaaaatcccagta

SEQ ID NO: 4169632 - DNA, 25 bp, Homo sapien
gtgaagaattagatcagttttgtac

SEQ ID NO: 4169633 - DNA, 25 bp, Homo sapien
agtcctgcctcttcacaaacactga

SEQ ID NO: 4169634 - DNA, 25 bp, Homo sapien
gcaggagtgaagaattagatcagtt

SEQ ID NO: 4169635 - DNA, 25 bp, Homo sapien
aaagacacaaagctggttacaggtc

SEQ ID NO: 4169636 - DNA, 25 bp, Homo sapien
aaaagacacaaagctggttacaggt

SEQ ID NO: 4169637 - DNA, 25 bp, Homo sapien
aagacacaaagctggttacaggtct

SEQ ID NO: 4169638 - DNA, 25 bp, Homo sapien
taaagttgtgaagtgttccctctat

SEQ ID NO: 4169639 - DNA, 25 bp, Homo sapien
tcagcatggtgcacatttgatctcc

SEQ ID NO: 4169640 - DNA, 25 bp, Homo sapien
aaacagttggttcaccaatgaagcc

SEQ ID NO: 4169641 - DNA, 25 bp, Homo sapien
tgtgtcattgttcataagggatact

SEQ ID NO: 4169642 - DNA, 25 bp, Homo sapien
ggtcgccacaatcaggttaattaac

SEQ ID NO: 4169643 - DNA, 25 bp, Homo sapien
ccaacaatgtacttgagggatccac

SEQ ID NO: 4169644 - DNA, 25 bp, Homo sapien
gcaagaacagatctatggtaaacat

SEQ ID NO: 4169645 - DNA, 25 bp, Homo sapien
atgcatatacattgtggtcgccaca

SEQ ID NO: 4169646 - DNA, 25 bp, Homo sapien
gcgatgtcgctggtgccttgctaga

SEQ ID NO: 4169647 - DNA, 25 bp, Homo sapien
taaccaagcatagtctgcgatgtcg

SEQ ID NO: 4169648 - DNA, 25 bp, Homo sapien
gaatgcacctcacggattctgagca

SEQ ID NO: 4169649 - DNA, 25 bp, Homo sapien
cacaaatgtgacattggaaggacat

SEQ ID NO: 4169650 - DNA, 25 bp, Homo sapien
agaagatcaatttctggcccagaaa

SEQ ID NO: 4169651 - DNA, 25 bp, Homo sapien
gagagtctctccctttcagcctaca

SEQ ID NO: 4169652 - DNA, 25 bp, Homo sapien
tgtagtaccagcactctttccaagg

SEQ ID NO: 4169653 - DNA, 25 bp, Homo sapien
tgccatctctatgcacagcagagct

SEQ ID NO: 4169654 - DNA, 25 bp, Homo sapien
catttaaacctagctcagtgccata

SEQ ID NO: 4169655 - DNA, 25 bp, Homo sapien
cctcagcatttaaacctagctcagt

SEQ ID NO: 4169656 - DNA, 25 bp, Homo sapien
acctagctcagtgccatagttctgc

SEQ ID NO: 4169657 - DNA, 25 bp, Homo sapien
catagttctgctggagcagttgcca

SEQ ID NO: 4169658 - DNA, 25 bp, Homo sapien
cacatcctcaatcgacagtgacaag

SEQ ID NO: 4169659 - DNA, 25 bp, Homo sapien
ggctgcacatcctcaatcgacagtg

SEQ ID NO: 4169660 - DNA, 25 bp, Homo sapien
ctcaatcgacagtgacaagttttcc

SEQ ID NO: 4169661 - DNA, 25 bp, Homo sapien
cttggctgcacatcctcaatcgaca

SEQ ID NO: 4169662 - DNA, 25 bp, Homo sapien
aatgactctgtttctgaaacccgac

SEQ ID NO: 4169663 - DNA, 25 bp, Homo sapien
ctggtaaaactgattgacttggata

SEQ ID NO: 4169664 - DNA, 25 bp, Homo sapien
gatgaatttccatcgaatgactctg

SEQ ID NO: 4169665 - DNA, 25 bp, Homo sapien
gaaacccgactaattgattcactgg

SEQ ID NO: 4169666 - DNA, 25 bp, Homo sapien
aacggtctggagcagaaaacataca

SEQ ID NO: 4169667 - DNA, 25 bp, Homo sapien
agcactcctagtactcagaatatgg

SEQ ID NO: 4169668 - DNA, 25 bp, Homo sapien
gcaagtgattgaagcacactggaat

SEQ ID NO: 4169669 - DNA, 25 bp, Homo sapien
ggcagagggagcaaactgagaatca

SEQ ID NO: 4169670 - DNA, 25 bp, Homo sapien
caaagttggtaagagactctttttg

SEQ ID NO: 4169671 - DNA, 25 bp, Homo sapien
gaatctgaagtgctgcttttgtcca

SEQ ID NO: 4169672 - DNA, 25 bp, Homo sapien
catttttattcaagtccagtgactt

SEQ ID NO: 4169673 - DNA, 25 bp, Homo sapien
catcaacagaatctgaagtgctgct

SEQ ID NO: 4169674 - DNA, 25 bp, Homo sapien
attcaagtccagtgactttgatggc

SEQ ID NO: 4169675 - DNA, 25 bp, Homo sapien
gagacacctggtcattaactcaagt

SEQ ID NO: 4169676 - DNA, 25 bp, Homo sapien
caagttctgcatagttaactagctg

SEQ ID NO: 4169677 - DNA, 25 bp, Homo sapien
gacgtgtgagcatatcacactgcct

SEQ ID NO: 4169678 - DNA, 25 bp, Homo sapien
tgtcactctacctatgacgtgtgag

SEQ ID NO: 4169679 - DNA, 25 bp, Homo sapien
tctctggatctaggtgcccacagaa

SEQ ID NO: 4169680 - DNA, 25 bp, Homo sapien
ggaggagattgaacattgcctgtga

SEQ ID NO: 4169681 - DNA, 25 bp, Homo sapien
tgtgattgataggtaagtccacctc

SEQ ID NO: 4169682 - DNA, 25 bp, Homo sapien
ccaggggggatcgtccctccagttg

SEQ ID NO: 4169683 - DNA, 25 bp, Homo sapien
caccgtgctcaaccaagaaaaacca

SEQ ID NO: 4169684 - DNA, 25 bp, Homo sapien
gccaccgtgctcaaccaagaaaaac

SEQ ID NO: 4169685 - DNA, 25 bp, Homo sapien
taaacagcgtatgactaatccatgc

SEQ ID NO: 4169686 - DNA, 25 bp, Homo sapien
cgtatgactaatccatgcccagctg

SEQ ID NO: 4169687 - DNA, 25 bp, Homo sapien
caggtaaacagcgtatgactaatcc

SEQ ID NO: 4169688 - DNA, 25 bp, Homo sapien
ctaaattcaggtaaacagcgtatga

SEQ ID NO: 4169689 - DNA, 25 bp, Homo sapien
ctgggggccagagtagatcttccta

SEQ ID NO: 4169690 - DNA, 25 bp, Homo sapien
tgggggccagagtagatcttcctaa

SEQ ID NO: 4169691 - DNA, 25 bp, Homo sapien
actgggggccagagtagatcttcct

SEQ ID NO: 4169692 - DNA, 25 bp, Homo sapien
ctcttgagattaaaagcgtgtgcca

SEQ ID NO: 4169693 - DNA, 25 bp, Homo sapien
tagagatgggctttcctcacattgg

SEQ ID NO: 4169694 - DNA, 25 bp, Homo sapien
gggctttcctcacattggccagact

SEQ ID NO: 4169695 - DNA, 25 bp, Homo sapien
actcttgagattaaaagcgtgtgcc

SEQ ID NO: 4169696 - DNA, 25 bp, Homo sapien
gcaaaagctccccatgtttcagaaa

SEQ ID NO: 4169697 - DNA, 25 bp, Homo sapien
gatgccccatcgatacagaataaaa

SEQ ID NO: 4169698 - DNA, 25 bp, Homo sapien
tcacagaaataattgccgaggctcc

SEQ ID NO: 4169699 - DNA, 25 bp, Homo sapien
catctattttataccgccagaagga

SEQ ID NO: 4169700 - DNA, 25 bp, Homo sapien
tacggttgataaaaagtcttccatg

SEQ ID NO: 4169701 - DNA, 25 bp, Homo sapien
gcactgatatgaaaaatacggttga

SEQ ID NO: 4169702 - DNA, 25 bp, Homo sapien
tgaagatctttctcaggaacatttt

SEQ ID NO: 4169703 - DNA, 25 bp, Homo sapien
cttccatgaagatctttctcaggaa

SEQ ID NO: 4169704 - DNA, 25 bp, Homo sapien
ctgcataaagcgtgaactggtaaag

SEQ ID NO: 4169705 - DNA, 25 bp, Homo sapien
caaatttctgcataaagcgtgaact

SEQ ID NO: 4169706 - DNA, 25 bp, Homo sapien
cataaagcgtgaactggtaaagagc

SEQ ID NO: 4169707 - DNA, 25 bp, Homo sapien
tttctgcataaagcgtgaactggta

SEQ ID NO: 4169708 - DNA, 25 bp, Homo sapien
tctaggtctagccagcaacatactc

SEQ ID NO: 4169709 - DNA, 25 bp, Homo sapien
taaagcttctgactaattctaggtc

SEQ ID NO: 4169710 - DNA, 25 bp, Homo sapien
tttagaagtagctggaagcctttgc

SEQ ID NO: 4169711 - DNA, 25 bp, Homo sapien
ttgaagccagatatatcagaaaaca

SEQ ID NO: 4169712 - DNA, 25 bp, Homo sapien
cattaggtttataaattcatgagca

SEQ ID NO: 4169713 - DNA, 25 bp, Homo sapien
cgatgtcagatgcatatggcttttt

SEQ ID NO: 4169714 - DNA, 25 bp, Homo sapien
cactggcaccgatgtcagatgcata

SEQ ID NO: 4169715 - DNA, 25 bp, Homo sapien
ctcaagtgaacactggcaccgatgt

SEQ ID NO: 4169716 - DNA, 25 bp, Homo sapien
aaatctgtcagtcttctcactattg

SEQ ID NO: 4169717 - DNA, 25 bp, Homo sapien
aatctgtcagtcttctcactattgt

SEQ ID NO: 4169718 - DNA, 25 bp, Homo sapien
atctgtcagtcttctcactattgtc

SEQ ID NO: 4169719 - DNA, 25 bp, Homo sapien
gattgttggagtagggtcatatccc

SEQ ID NO: 4169720 - DNA, 25 bp, Homo sapien
gggtcatatcccactaaaaacagtc

SEQ ID NO: 4169721 - DNA, 25 bp, Homo sapien
cacatctgattgttggagtagggtc

SEQ ID NO: 4169722 - DNA, 25 bp, Homo sapien
ctttttggttcacatctgattgttg

SEQ ID NO: 4169723 - DNA, 25 bp, Homo sapien
aagttctgcagtccaaggggtagat

SEQ ID NO: 4169724 - DNA, 25 bp, Homo sapien
caagttctgcagtccaaggggtaga

SEQ ID NO: 4169725 - DNA, 25 bp, Homo sapien
ccaagttctgcagtccaaggggtag

SEQ ID NO: 4169726 - DNA, 25 bp, Homo sapien
tccaagttctgcagtccaaggggta

SEQ ID NO: 4169727 - DNA, 25 bp, Homo sapien
ctattaaggactatagtgtaggtca

SEQ ID NO: 4169728 - DNA, 25 bp, Homo sapien
cagtaagtggactattaaggactat

SEQ ID NO: 4169729 - DNA, 25 bp, Homo sapien
gcagtgcattttccagtaagtggac

SEQ ID NO: 4169730 - DNA, 25 bp, Homo sapien
tgcttttcagtggcagcagtgcatt

SEQ ID NO: 4169731 - DNA, 25 bp, Homo sapien
gatcggatgatacagtatctgttca

SEQ ID NO: 4169732 - DNA, 25 bp, Homo sapien
gcttcccgactttctttatacagtg

SEQ ID NO: 4169733 - DNA, 25 bp, Homo sapien
tctaccaaataaaatcgtgcttccc

SEQ ID NO: 4169734 - DNA, 25 bp, Homo sapien
gttcacggtatagaagtaatcatgg

SEQ ID NO: 4169735 - DNA, 25 bp, Homo sapien
ttgaaatagtcctccaaagaactcc

SEQ ID NO: 4169736 - DNA, 25 bp, Homo sapien
aaagatttgacaaggccccatggct

SEQ ID NO: 4169737 - DNA, 25 bp, Homo sapien
tgaaatagtcctccaaagaactcca

SEQ ID NO: 4169738 - DNA, 25 bp, Homo sapien
taaagatttgacaaggccccatggc

SEQ ID NO: 4169739 - DNA, 25 bp, Homo sapien
ggttcgccttctccttcgtaggcca

SEQ ID NO: 4169740 - DNA, 25 bp, Homo sapien
taatatcccctttggcacctaagcc

SEQ ID NO: 4169741 - DNA, 25 bp, Homo sapien
ttctgctgttcggttgaaggttcgc

SEQ ID NO: 4169742 - DNA, 25 bp, Homo sapien
ccttctccttcgtaggccagtaagt

SEQ ID NO: 4169743 - DNA, 25 bp, Homo sapien
agcccgaggttacactgagccatga

SEQ ID NO: 4169744 - DNA, 25 bp, Homo sapien
ttacaaacaagaggcacattctgct

SEQ ID NO: 4169745 - DNA, 25 bp, Homo sapien
tcatctctgtttaccaggtgacaac

SEQ ID NO: 4169746 - DNA, 25 bp, Homo sapien
aggagacctcctgacatattcttac

SEQ ID NO: 4169747 - DNA, 25 bp, Homo sapien
tcattaccacaataagagtgacgtt

SEQ ID NO: 4169748 - DNA, 25 bp, Homo sapien
taccacaataagagtgacgttatag

SEQ ID NO: 4169749 - DNA, 25 bp, Homo sapien
gagtgacgttatagttttccatttc

SEQ ID NO: 4169750 - DNA, 25 bp, Homo sapien
aaaatactcattaccacaataagag

SEQ ID NO: 4169751 - DNA, 25 bp, Homo sapien
gtattattggcacttccccagcatg

SEQ ID NO: 4169752 - DNA, 25 bp, Homo sapien
taatgtattggttttcacagcagcc

SEQ ID NO: 4169753 - DNA, 25 bp, Homo sapien
tcttaggcacagcagagttacgtaa

SEQ ID NO: 4169754 - DNA, 25 bp, Homo sapien
gaataatccgaactcacaggtttgg

SEQ ID NO: 4169755 - DNA, 25 bp, Homo sapien
ggagacggtaaaaggactgagcagc

SEQ ID NO: 4169756 - DNA, 25 bp, Homo sapien
agcttcagaaacagtgtcacattca

SEQ ID NO: 4169757 - DNA, 25 bp, Homo sapien
gcagcatgttctatctttgacagct

SEQ ID NO: 4169758 - DNA, 25 bp, Homo sapien
ctcttcttggaggcggagacggtaa

SEQ ID NO: 4169759 - DNA, 25 bp, Homo sapien
catcagagccccataaatttgcaaa

SEQ ID NO: 4169760 - DNA, 25 bp, Homo sapien
aaaacaggctgtttatggctacagg

SEQ ID NO: 4169761 - DNA, 25 bp, Homo sapien
aataatatggtgaatacaggtcagg

SEQ ID NO: 4169762 - DNA, 25 bp, Homo sapien
tacaggatagttagcagaccacagt

SEQ ID NO: 4169763 - DNA, 25 bp, Homo sapien
tcggagcactccctttaaacgatgg

SEQ ID NO: 4169764 - DNA, 25 bp, Homo sapien
aaacgatgggcctgatctttattct

SEQ ID NO: 4169765 - DNA, 25 bp, Homo sapien
ctgttcaagcatcactatggagtct

SEQ ID NO: 4169766 - DNA, 25 bp, Homo sapien
catcactatggagtctcggagcact

SEQ ID NO: 4169767 - DNA, 25 bp, Homo sapien
gaaaccatgcgggaagaacatcagg

SEQ ID NO: 4169768 - DNA, 25 bp, Homo sapien
tgcaacagcatgaagagacgtggcc

SEQ ID NO: 4169769 - DNA, 25 bp, Homo sapien
caaattaagcgtagtgacagactcg

SEQ ID NO: 4169770 - DNA, 25 bp, Homo sapien
tacagactagtcagggatccagaac

SEQ ID NO: 4169771 - DNA, 25 bp, Homo sapien
tatttagtagatcaaacgttttctg

SEQ ID NO: 4169772 - DNA, 25 bp, Homo sapien
gaagcataatgagtgagctcttcag

SEQ ID NO: 4169773 - DNA, 25 bp, Homo sapien
cagccatgccagtcttattcttatt

SEQ ID NO: 4169774 - DNA, 25 bp, Homo sapien
tagatcaaacgttttctgaagcata

SEQ ID NO: 4169775 - DNA, 25 bp, Homo sapien
tccaccatgaaagactgctaagctg

SEQ ID NO: 4169776 - DNA, 25 bp, Homo sapien
tgtactgggacatacgtgcccctga

SEQ ID NO: 4169777 - DNA, 25 bp, Homo sapien
tacccctaggtatgcttcgttggaa

SEQ ID NO: 4169778 - DNA, 25 bp, Homo sapien
gatacagcatggcagaagacccttt

SEQ ID NO: 4169779 - DNA, 25 bp, Homo sapien
tgcgccaggtccacgcgcgcttccg

SEQ ID NO: 4169780 - DNA, 25 bp, Homo sapien
cccggctcggtgcgccaggtccacg

SEQ ID NO: 4169781 - DNA, 25 bp, Homo sapien
ctcggtgcgccaggtccacgcgcgc

SEQ ID NO: 4169782 - DNA, 25 bp, Homo sapien
ggtgcgccaggtccacgcgcgcttc

SEQ ID NO: 4169783 - DNA, 25 bp, Homo sapien
accacagcccgccgcggcccgggcg

SEQ ID NO: 4169784 - DNA, 25 bp, Homo sapien
agcccgccgcggcccgggcggcgcg

SEQ ID NO: 4169785 - DNA, 25 bp, Homo sapien
gccgcggcccgggcggcgcgcccgc

SEQ ID NO: 4169786 - DNA, 25 bp, Homo sapien
gaccacagcccgccgcggcccgggc

SEQ ID NO: 4169787 - DNA, 25 bp, Homo sapien
ccgggcgtgacggcaggagtctccg

SEQ ID NO: 4169788 - DNA, 25 bp, Homo sapien
gggcgtgacggcaggagtctccggg

SEQ ID NO: 4169789 - DNA, 25 bp, Homo sapien
cccgggcgtgacggcaggagtctcc

SEQ ID NO: 4169790 - DNA, 25 bp, Homo sapien
cgggcgtgacggcaggagtctccgg

SEQ ID NO: 4169791 - DNA, 25 bp, Homo sapien
agatgggtcggcttccccggaggca

SEQ ID NO: 4169792 - DNA, 25 bp, Homo sapien
caactgcagccaaagaggcggaggg

SEQ ID NO: 4169793 - DNA, 25 bp, Homo sapien
cggaggcacagacgcgtctcccgat

SEQ ID NO: 4169794 - DNA, 25 bp, Homo sapien
cctctggccggaggtgcaactgcag

SEQ ID NO: 4169795 - DNA, 25 bp, Homo sapien
ctgggcaggcgccgtctgggcacca

SEQ ID NO: 4169796 - DNA, 25 bp, Homo sapien
tcccgttttcatcaggcttctgtgg

SEQ ID NO: 4169797 - DNA, 25 bp, Homo sapien
gggtcccgttttcatcaggcttctg

SEQ ID NO: 4169798 - DNA, 25 bp, Homo sapien
gcttctgtggctccgcctggccaca

SEQ ID NO: 4169799 - DNA, 25 bp, Homo sapien
atctcgtaaataggtccacgcctct

SEQ ID NO: 4169800 - DNA, 25 bp, Homo sapien
tctcgtaaataggtccacgcctctc

SEQ ID NO: 4169801 - DNA, 25 bp, Homo sapien
gcgtaagaagccctcagaaggtaaa

SEQ ID NO: 4169802 - DNA, 25 bp, Homo sapien
aagaagccctcagaaggtaaaggtg

SEQ ID NO: 4169803 - DNA, 25 bp, Homo sapien
ctgtcaccatgaggcgtaagaagcc

SEQ ID NO: 4169804 - DNA, 25 bp, Homo sapien
catgaggcgtaagaagccctcagaa

SEQ ID NO: 4169805 - DNA, 25 bp, Homo sapien
ctgcccttctgtgtcatgatttgca

SEQ ID NO: 4169806 - DNA, 25 bp, Homo sapien
tgcccttctgtgtcatgatttgcac

SEQ ID NO: 4169807 - DNA, 25 bp, Homo sapien
ccttcatccagatcttgacaatcac

SEQ ID NO: 4169808 - DNA, 25 bp, Homo sapien
ttgacaatcacacaaacaagtagcc

SEQ ID NO: 4169809 - DNA, 25 bp, Homo sapien
tctatgtactcgcagcagcacaggg

SEQ ID NO: 4169810 - DNA, 25 bp, Homo sapien
tcttttccccattccgatctatgta

SEQ ID NO: 4169811 - DNA, 25 bp, Homo sapien
cagacagctgtgcactactgcgtaa

SEQ ID NO: 4169812 - DNA, 25 bp, Homo sapien
gggccagcgtcaagaaatgctctgt

SEQ ID NO: 4169813 - DNA, 25 bp, Homo sapien
ggttgaaagtacacatggcagttct

SEQ ID NO: 4169814 - DNA, 25 bp, Homo sapien
caagagcaaattctagcattctggg

SEQ ID NO: 4169815 - DNA, 25 bp, Homo sapien
ctctggctgtaaagatttacatgta

SEQ ID NO: 4169816 - DNA, 25 bp, Homo sapien
caagtctctggctgtaaagatttac

SEQ ID NO: 4169817 - DNA, 25 bp, Homo sapien
gtctctggctgtaaagatttacatg

SEQ ID NO: 4169818 - DNA, 25 bp, Homo sapien
aagtctctggctgtaaagatttaca

SEQ ID NO: 4169819 - DNA, 25 bp, Homo sapien
gagtatcagaaataacccgcaggta

SEQ ID NO: 4169820 - DNA, 25 bp, Homo sapien
ttagagatctgtcaccgcttgctgg

SEQ ID NO: 4169821 - DNA, 25 bp, Homo sapien
tgtgcgattgttgagactgcccgac

SEQ ID NO: 4169822 - DNA, 25 bp, Homo sapien
taagccaaggaattcggaggcgatc

SEQ ID NO: 4169823 - DNA, 25 bp, Homo sapien
ttacatgaatttacactttccaagt

SEQ ID NO: 4169824 - DNA, 25 bp, Homo sapien
tttccaagtctccaaatgtttccaa

SEQ ID NO: 4169825 - DNA, 25 bp, Homo sapien
tccaagtctccaaatgtttccaaca

SEQ ID NO: 4169826 - DNA, 25 bp, Homo sapien
caagtctccaaatgtttccaacata

SEQ ID NO: 4169827 - DNA, 25 bp, Homo sapien
actggcaggtacaaaagcccatttc

SEQ ID NO: 4169828 - DNA, 25 bp, Homo sapien
tctgtctctacaaatggtgtccaag

SEQ ID NO: 4169829 - DNA, 25 bp, Homo sapien
caagaagatcaaaagggcaagtata

SEQ ID NO: 4169830 - DNA, 25 bp, Homo sapien
tccaaggtcagtgtgatcccataca

SEQ ID NO: 4169831 - DNA, 25 bp, Homo sapien
ctccaggacaatagaaaagagctgt

SEQ ID NO: 4169832 - DNA, 25 bp, Homo sapien
ggctcactaatgagacaggctgcca

SEQ ID NO: 4169833 - DNA, 25 bp, Homo sapien
gatgaggtgctgtgaatcgcctgca

SEQ ID NO: 4169834 - DNA, 25 bp, Homo sapien
caaggtagggaagctcctctcaggc

SEQ ID NO: 4169835 - DNA, 25 bp, Homo sapien
tggatgtaggaacaccgagacattc

SEQ ID NO: 4169836 - DNA, 25 bp, Homo sapien
cccagtcttctgtcggagggcctgc

SEQ ID NO: 4169837 - DNA, 25 bp, Homo sapien
gtgtccacgatgagcccgcagagga

SEQ ID NO: 4169838 - DNA, 25 bp, Homo sapien
cacagagtaccacacgcaggtgaag

SEQ ID NO: 4169839 - DNA, 25 bp, Homo sapien
gacttcccgctcagtcacattgtag

SEQ ID NO: 4169840 - DNA, 25 bp, Homo sapien
cagggtggtggaatgcacgtgtgcc

SEQ ID NO: 4169841 - DNA, 25 bp, Homo sapien
actggtgccagttccgcaggaagcc

SEQ ID NO: 4169842 - DNA, 25 bp, Homo sapien
ccagggtggagaactggtgccagtt

SEQ ID NO: 4169843 - DNA, 25 bp, Homo sapien
tggagaactggtgccagttccgcag

SEQ ID NO: 4169844 - DNA, 25 bp, Homo sapien
cgtgaccctcatgacggctctgtga

SEQ ID NO: 4169845 - DNA, 25 bp, Homo sapien
taaacctgagcatggccctataatg

SEQ ID NO: 4169846 - DNA, 25 bp, Homo sapien
gacaacttagcatcaatccatctgg

SEQ ID NO: 4169847 - DNA, 25 bp, Homo sapien
aaagtctcttaagttgtggcgtcag

SEQ ID NO: 4169848 - DNA, 25 bp, Homo sapien
agagagtaaagcatccccacaggag

SEQ ID NO: 4169849 - DNA, 25 bp, Homo sapien
cagccacagtcacaagtgtgctagc

SEQ ID NO: 4169850 - DNA, 25 bp, Homo sapien
tccccacaggagtgtctgttctcct

SEQ ID NO: 4169851 - DNA, 25 bp, Homo sapien
cagtcacaagtgtgctagcacctta

SEQ ID NO: 4169852 - DNA, 25 bp, Homo sapien
ggcacagagcctatcattcgttaaa

SEQ ID NO: 4169853 - DNA, 25 bp, Homo sapien
taatcgagcccgtgatgttactcag

SEQ ID NO: 4169854 - DNA, 25 bp, Homo sapien
tatggtgaccatcttaaggacagct

SEQ ID NO: 4169855 - DNA, 25 bp, Homo sapien
caacttgttattgtcggaagagcca

SEQ ID NO: 4169856 - DNA, 25 bp, Homo sapien
gtatcttcgtgccaataaacctgaa

SEQ ID NO: 4169857 - DNA, 25 bp, Homo sapien
gaataatacacagagtcccttccta

SEQ ID NO: 4169858 - DNA, 25 bp, Homo sapien
tgctcctttcggtacagacgcctgg

SEQ ID NO: 4169859 - DNA, 25 bp, Homo sapien
tagttccagatcataaaaggctcca

SEQ ID NO: 4169860 - DNA, 25 bp, Homo sapien
tcagggtaacctatcaaagaggcgc

SEQ ID NO: 4169861 - DNA, 25 bp, Homo sapien
tacaaaagggtgcacatgtcaagct

SEQ ID NO: 4169862 - DNA, 25 bp, Homo sapien
cagattccaaacaggtgcctcagga

SEQ ID NO: 4169863 - DNA, 25 bp, Homo sapien
tcatttcaggaacgctcggctggaa

SEQ ID NO: 4169864 - DNA, 25 bp, Homo sapien
ggagaaattgccaccgggaacataa

SEQ ID NO: 4169865 - DNA, 25 bp, Homo sapien
ggcgccagctagactttttaccgaa

SEQ ID NO: 4169866 - DNA, 25 bp, Homo sapien
cataacagtttagggctagggacag

SEQ ID NO: 4169867 - DNA, 25 bp, Homo sapien
gaaattgagtctttagcagcccata

SEQ ID NO: 4169868 - DNA, 25 bp, Homo sapien
taccaccactgaggtcaaaacgttg

SEQ ID NO: 4169869 - DNA, 25 bp, Homo sapien
gcttaacgaatgactgtaaagtgga

SEQ ID NO: 4169870 - DNA, 25 bp, Homo sapien
tctcctaagtatgcagccttcaatg

SEQ ID NO: 4169871 - DNA, 25 bp, Homo sapien
aaaacgttgaacattgctgtcgcac

SEQ ID NO: 4169872 - DNA, 25 bp, Homo sapien
catttttaggatacattatagagga

SEQ ID NO: 4169873 - DNA, 25 bp, Homo sapien
ccagtacgtgattgatctgcaggaa

SEQ ID NO: 4169874 - DNA, 25 bp, Homo sapien
aactgtaagttatcattccatcagc

SEQ ID NO: 4169875 - DNA, 25 bp, Homo sapien
tgtttcttgtctcacagtgctcaag

SEQ ID NO: 4169876 - DNA, 25 bp, Homo sapien
taattaagcatctttatgattctat

SEQ ID NO: 4169877 - DNA, 25 bp, Homo sapien
tctggttttaattaagcatctttat

SEQ ID NO: 4169878 - DNA, 25 bp, Homo sapien
ggttttaattaagcatctttatgat

SEQ ID NO: 4169879 - DNA, 25 bp, Homo sapien
taccttatctggttttaattaagca

SEQ ID NO: 4169880 - DNA, 25 bp, Homo sapien
tctctctcaggagactgctgtgccc

SEQ ID NO: 4169881 - DNA, 25 bp, Homo sapien
cagtggttgtatgctcagtcctccc

SEQ ID NO: 4169882 - DNA, 25 bp, Homo sapien
catcagcacagtcctttaaatagtt

SEQ ID NO: 4169883 - DNA, 25 bp, Homo sapien
caggcaacttgcagggttcccttca

SEQ ID NO: 4169884 - DNA, 25 bp, Homo sapien
cagcaagttcaggtcttagcactgt

SEQ ID NO: 4169885 - DNA, 25 bp, Homo sapien
tattccaggatataacagacatagt

SEQ ID NO: 4169886 - DNA, 25 bp, Homo sapien
taggcttttccatggaacccagcag

SEQ ID NO: 4169887 - DNA, 25 bp, Homo sapien
tggaggttaccatgatttcctctct

SEQ ID NO: 4169888 - DNA, 25 bp, Homo sapien
tgcgtgtcagtttagcaacttgcca

SEQ ID NO: 4169889 - DNA, 25 bp, Homo sapien
taagtactagcccactgtgttgggt

SEQ ID NO: 4169890 - DNA, 25 bp, Homo sapien
cccgggaaaagaccattctgacagt

SEQ ID NO: 4169891 - DNA, 25 bp, Homo sapien
tcatgagcaccagatcccagataga

SEQ ID NO: 4169892 - DNA, 25 bp, Homo sapien
acagttcactaccacgtgttgcaaa

SEQ ID NO: 4169893 - DNA, 25 bp, Homo sapien
caaaccattcgactctttcagtctt

SEQ ID NO: 4169894 - DNA, 25 bp, Homo sapien
tcagacccctcaaactcctcacagt

SEQ ID NO: 4169895 - DNA, 25 bp, Homo sapien
ctaccacgtgttgcaaaattctctg

SEQ ID NO: 4169896 - DNA, 25 bp, Homo sapien
aacttacagaaaccaatccaccagg

SEQ ID NO: 4169897 - DNA, 25 bp, Homo sapien
ggcgacgctcacacgatttatgaga

SEQ ID NO: 4169898 - DNA, 25 bp, Homo sapien
tacagaaaccaatccaccaggacac

SEQ ID NO: 4169899 - DNA, 25 bp, Homo sapien
ccttttatctcagaggtgtcggcga

SEQ ID NO: 4169900 - DNA, 25 bp, Homo sapien
gaagttccatctggtacacaagcac

SEQ ID NO: 4169901 - DNA, 25 bp, Homo sapien
gaagtctagttttcagcgctgtact

SEQ ID NO: 4169902 - DNA, 25 bp, Homo sapien
cgctgtactctaataggctgggagc

SEQ ID NO: 4169903 - DNA, 25 bp, Homo sapien
tgaggctgataaaatccccagctgg

SEQ ID NO: 4169904 - DNA, 25 bp, Homo sapien
gacagccattaactaccttggtaag

SEQ ID NO: 4169905 - DNA, 25 bp, Homo sapien
ttatttttcctaggcgacagccatt

SEQ ID NO: 4169906 - DNA, 25 bp, Homo sapien
ttaactaccttggtaagactcagct

SEQ ID NO: 4169907 - DNA, 25 bp, Homo sapien
taggcgacagccattaactaccttg

SEQ ID NO: 4169908 - DNA, 25 bp, Homo sapien
ccatggcaggaaccccgtggatatt

SEQ ID NO: 4169909 - DNA, 25 bp, Homo sapien
atattatgcagcgtgtgatgggtga

SEQ ID NO: 4169910 - DNA, 25 bp, Homo sapien
cagcgtaagctgagccatggcagga

SEQ ID NO: 4169911 - DNA, 25 bp, Homo sapien
agggatgacagcgtaagctgagcca

SEQ ID NO: 4169912 - DNA, 25 bp, Homo sapien
gccacagttgatacttgaatcattg

SEQ ID NO: 4169913 - DNA, 25 bp, Homo sapien
aaatcgacaatttatatatatgaac

SEQ ID NO: 4169914 - DNA, 25 bp, Homo sapien
taaggtaactaagctgctgccacag

SEQ ID NO: 4169915 - DNA, 25 bp, Homo sapien
cagattagggccagaagatgtataa

SEQ ID NO: 4169916 - DNA, 25 bp, Homo sapien
ccaactccttctttatattctgtca

SEQ ID NO: 4169917 - DNA, 25 bp, Homo sapien
tattctgtcaagacttcatgatgtt

SEQ ID NO: 4169918 - DNA, 25 bp, Homo sapien
tccttctttatattctgtcaagact

SEQ ID NO: 4169919 - DNA, 25 bp, Homo sapien
cttctttatattctgtcaagacttc

SEQ ID NO: 4169920 - DNA, 25 bp, Homo sapien
aagaacccttgaaagtgcttacatc

SEQ ID NO: 4169921 - DNA, 25 bp, Homo sapien
agaacccttgaaagtgcttacatca

SEQ ID NO: 4169922 - DNA, 25 bp, Homo sapien
aaagaacccttgaaagtgcttacat

SEQ ID NO: 4169923 - DNA, 25 bp, Homo sapien
gacactgtattatagcagggagcag

SEQ ID NO: 4169924 - DNA, 25 bp, Homo sapien
cttgtttgttacataaccagccggg

SEQ ID NO: 4169925 - DNA, 25 bp, Homo sapien
ttgttacataaccagccgggcaggg

SEQ ID NO: 4169926 - DNA, 25 bp, Homo sapien
gactggatcgtgcagggagcagtac

SEQ ID NO: 4169927 - DNA, 25 bp, Homo sapien
ggctgactggatcgtgcagggagca

SEQ ID NO: 4169928 - DNA, 25 bp, Homo sapien
aaaaatccaacaaagcatggcgccg

SEQ ID NO: 4169929 - DNA, 25 bp, Homo sapien
tataagggatcatcccagacagtgg

SEQ ID NO: 4169930 - DNA, 25 bp, Homo sapien
tctgagggatacaccataggctgac

SEQ ID NO: 4169931 - DNA, 25 bp, Homo sapien
gcagccttggagacccttctgaaaa

SEQ ID NO: 4169932 - DNA, 25 bp, Homo sapien
tctccatcggagaggcactggaacc

SEQ ID NO: 4169933 - DNA, 25 bp, Homo sapien
agtgatcggtcaacagactttctga

SEQ ID NO: 4169934 - DNA, 25 bp, Homo sapien
gaagggccttctgaattgccatgaa

SEQ ID NO: 4169935 - DNA, 25 bp, Homo sapien
tgcagccgcagacagttatccaaga

SEQ ID NO: 4169936 - DNA, 25 bp, Homo sapien
accttcaatcactccaatgatcaca

SEQ ID NO: 4169937 - DNA, 25 bp, Homo sapien
atctccaccttcaatcactccaatg

SEQ ID NO: 4169938 - DNA, 25 bp, Homo sapien
aatcactccaatgatcacactcttc

SEQ ID NO: 4169939 - DNA, 25 bp, Homo sapien
tcaatcactccaatgatcacactct

SEQ ID NO: 4169940 - DNA, 25 bp, Homo sapien
tgatgacagcaagcgtagtctagcc

SEQ ID NO: 4169941 - DNA, 25 bp, Homo sapien
tagtctagcctccagggttgttgga

SEQ ID NO: 4169942 - DNA, 25 bp, Homo sapien
gcagctctgcagtgactgatgacag

SEQ ID NO: 4169943 - DNA, 25 bp, Homo sapien
gccgcttggctgtctctcgtgctga

SEQ ID NO: 4169944 - DNA, 25 bp, Homo sapien
tgagactattaatggcactcggcca

SEQ ID NO: 4169945 - DNA, 25 bp, Homo sapien
ttctgaaatcaaggccaggacagcc

SEQ ID NO: 4169946 - DNA, 25 bp, Homo sapien
gcaacctgcaccttccgggagtaat

SEQ ID NO: 4169947 - DNA, 25 bp, Homo sapien
tttaatatacaatcggccagcactc

SEQ ID NO: 4169948 - DNA, 25 bp, Homo sapien
tggccgactaacaccagatatgagc

SEQ ID NO: 4169949 - DNA, 25 bp, Homo sapien
tctttcaatacactcgagcacctca

SEQ ID NO: 4169950 - DNA, 25 bp, Homo sapien
tcaggattcggctggtaatcaaaac

SEQ ID NO: 4169951 - DNA, 25 bp, Homo sapien
ccccgctctgttacttgataaggga

SEQ ID NO: 4169952 - DNA, 25 bp, Homo sapien
caaaccaataaaaaggcttgaatga

SEQ ID NO: 4169953 - DNA, 25 bp, Homo sapien
tgatcagataagaagtggccattgg

SEQ ID NO: 4169954 - DNA, 25 bp, Homo sapien
aatgatgatcagataagaagtggcc

SEQ ID NO: 4169955 - DNA, 25 bp, Homo sapien
aaaaggcttgaatgatgatcagata

SEQ ID NO: 4169956 - DNA, 25 bp, Homo sapien
gttgcaaccagttgtttcaattttc

SEQ ID NO: 4169957 - DNA, 25 bp, Homo sapien
cttggttgcaaccagttgtttcaat

SEQ ID NO: 4169958 - DNA, 25 bp, Homo sapien
tggttgcaaccagttgtttcaattt

SEQ ID NO: 4169959 - DNA, 25 bp, Homo sapien
ttgcaaccagttgtttcaattttct

SEQ ID NO: 4169960 - DNA, 25 bp, Homo sapien
tggctccagtcttctgacaagacga

SEQ ID NO: 4169961 - DNA, 25 bp, Homo sapien
tgacaagacgaagtctacaaattca

SEQ ID NO: 4169962 - DNA, 25 bp, Homo sapien
tccagtcttctgacaagacgaagtc

SEQ ID NO: 4169963 - DNA, 25 bp, Homo sapien
tcttctgacaagacgaagtctacaa

SEQ ID NO: 4169964 - DNA, 25 bp, Homo sapien
ttaacaaagaacacaatgagtcagg

SEQ ID NO: 4169965 - DNA, 25 bp, Homo sapien
gaccctggagtttttctctgactga

SEQ ID NO: 4169966 - DNA, 25 bp, Homo sapien
gactgatgcaaactccgagtctggg

SEQ ID NO: 4169967 - DNA, 25 bp, Homo sapien
cagaagaaattcatgtggtcgctca

SEQ ID NO: 4169968 - DNA, 25 bp, Homo sapien
gatgtatgcccgagtgtgattctta

SEQ ID NO: 4169969 - DNA, 25 bp, Homo sapien
atcataagcaggactccggccagca

SEQ ID NO: 4169970 - DNA, 25 bp, Homo sapien
ggaacatcctctcaccagcgggtta

SEQ ID NO: 4169971 - DNA, 25 bp, Homo sapien
cactttttagtgcttcccggatgta

SEQ ID NO: 4169972 - DNA, 25 bp, Homo sapien
tcatgactataagcttccggaggcc

SEQ ID NO: 4169973 - DNA, 25 bp, Homo sapien
tatccaagcccagttaagtcacaag

SEQ ID NO: 4169974 - DNA, 25 bp, Homo sapien
tcatcacaggagcaatgttcaagcc

SEQ ID NO: 4169975 - DNA, 25 bp, Homo sapien
ctctaatcgttaggccaggcagggc

SEQ ID NO: 4169976 - DNA, 25 bp, Homo sapien
attttgtttaacagacctactacat

SEQ ID NO: 4169977 - DNA, 25 bp, Homo sapien
tattttgtttaacagacctactaca

SEQ ID NO: 4169978 - DNA, 25 bp, Homo sapien
ttgtttaacagacctactacattta

SEQ ID NO: 4169979 - DNA, 25 bp, Homo sapien
tcatggaagctctcaaaacaatgaa

SEQ ID NO: 4169980 - DNA, 25 bp, Homo sapien
atcatggaagctctcaaaacaatga

SEQ ID NO: 4169981 - DNA, 25 bp, Homo sapien
tatcatggaagctctcaaaacaatg

SEQ ID NO: 4169982 - DNA, 25 bp, Homo sapien
ttatcatggaagctctcaaaacaat

SEQ ID NO: 4169983 - DNA, 25 bp, Homo sapien
gctgttaagaaagagaagactgtta

SEQ ID NO: 4169984 - DNA, 25 bp, Homo sapien
tttgatagcaactctaaagcagtgg

SEQ ID NO: 4169985 - DNA, 25 bp, Homo sapien
tttgaggctgaaagagatgattacg

SEQ ID NO: 4169986 - DNA, 25 bp, Homo sapien
gagacaagctgaaaccatccaaggc

SEQ ID NO: 4169987 - DNA, 25 bp, Homo sapien
aaaggaggtcactttcaagcctatg

SEQ ID NO: 4169988 - DNA, 25 bp, Homo sapien
ggaaaggaggtcactttcaagccta

SEQ ID NO: 4169989 - DNA, 25 bp, Homo sapien
cctcccactttccattccgcttctt

SEQ ID NO: 4169990 - DNA, 25 bp, Homo sapien
tccttctcccagtaatatcatccat

SEQ ID NO: 4169991 - DNA, 25 bp, Homo sapien
caagtagaacttgacactggaacat

SEQ ID NO: 4169992 - DNA, 25 bp, Homo sapien
tgcacttgagggtactggggtcacc

SEQ ID NO: 4169993 - DNA, 25 bp, Homo sapien
agattgtgcacttgagggtactggg

SEQ ID NO: 4169994 - DNA, 25 bp, Homo sapien
tactggggtcacctccaagtagaac

SEQ ID NO: 4169995 - DNA, 25 bp, Homo sapien
aactgggttgtcgttccttcactgg

SEQ ID NO: 4169996 - DNA, 25 bp, Homo sapien
aagcaaagaaaatagggccaactgg

SEQ ID NO: 4169997 - DNA, 25 bp, Homo sapien
ccatcagcatagacaggtagggctg

SEQ ID NO: 4169998 - DNA, 25 bp, Homo sapien
tctgatacccaggtgacaggtggag

SEQ ID NO: 4169999 - DNA, 25 bp, Homo sapien
ttaggcaaccagttttggatagcct

SEQ ID NO: 4170000 - DNA, 25 bp, Homo sapien
gcaattccacaggttactccggctt

SEQ ID NO: 4170001 - DNA, 25 bp, Homo sapien
tgtttatgtgcataacatggaaacc

SEQ ID NO: 4170002 - DNA, 25 bp, Homo sapien
gtctctgatgcctgacaaggtgttt

SEQ ID NO: 4170003 - DNA, 25 bp, Homo sapien
tgacagcaggtgtgatttcacaagc

SEQ ID NO: 4170004 - DNA, 25 bp, Homo sapien
tgagggcctgccatgagcctttcca

SEQ ID NO: 4170005 - DNA, 25 bp, Homo sapien
atttcttgtatgaacgagtgccaaa

SEQ ID NO: 4170006 - DNA, 25 bp, Homo sapien
gaacgagtgccaaaagcctgataaa

SEQ ID NO: 4170007 - DNA, 25 bp, Homo sapien
cactgaggttttaatccagaaaaat

SEQ ID NO: 4170008 - DNA, 25 bp, Homo sapien
gcctgataaatgaacactgaggttt

SEQ ID NO: 4170009 - DNA, 25 bp, Homo sapien
tcttgtgatctgaagaacaacaaca

SEQ ID NO: 4170010 - DNA, 25 bp, Homo sapien
tccaaaaggtccagtcttgtgatct

SEQ ID NO: 4170011 - DNA, 25 bp, Homo sapien
ctgtcagtatccaaaaggtccagtc

SEQ ID NO: 4170012 - DNA, 25 bp, Homo sapien
aaaggtccagtcttgtgatctgaag

SEQ ID NO: 4170013 - DNA, 25 bp, Homo sapien
tatcgatagtccaattcctcaaatc

SEQ ID NO: 4170014 - DNA, 25 bp, Homo sapien
ctaattccttccacaaagggcagtg

SEQ ID NO: 4170015 - DNA, 25 bp, Homo sapien
gcacgtcatctccacagagttacca

SEQ ID NO: 4170016 - DNA, 25 bp, Homo sapien
gcagtggcccccacatgcacgtcat

SEQ ID NO: 4170017 - DNA, 25 bp, Homo sapien
gcaagagcgtgctgacacatgggct

SEQ ID NO: 4170018 - DNA, 25 bp, Homo sapien
tgagcagtgccgagacttatggagt

SEQ ID NO: 4170019 - DNA, 25 bp, Homo sapien
cagcagtgacttcccagtatggcgt

SEQ ID NO: 4170020 - DNA, 25 bp, Homo sapien
gaagcatcttgtaacttgtcccaca

SEQ ID NO: 4170021 - DNA, 25 bp, Homo sapien
caatgctccaccctttgggggctaa

SEQ ID NO: 4170022 - DNA, 25 bp, Homo sapien
tgaagctattatgcttcaatgctcc

SEQ ID NO: 4170023 - DNA, 25 bp, Homo sapien
gctattatgcttcaatgctccaccc

SEQ ID NO: 4170024 - DNA, 25 bp, Homo sapien
agctattatgcttcaatgctccacc

SEQ ID NO: 4170025 - DNA, 25 bp, Homo sapien
taacccgctggtaaaactctgttca

SEQ ID NO: 4170026 - DNA, 25 bp, Homo sapien
caaaaatgttgcaccgccatctggg

SEQ ID NO: 4170027 - DNA, 25 bp, Homo sapien
caagagaagttgacagctgtgccat

SEQ ID NO: 4170028 - DNA, 25 bp, Homo sapien
taagtctagactgagcaggcttcac

SEQ ID NO: 4170029 - DNA, 25 bp, Homo sapien
taatcgtgccatgcagtcagacctg

SEQ ID NO: 4170030 - DNA, 25 bp, Homo sapien
tgtgcgtgcaaagaataatcgctgc

SEQ ID NO: 4170031 - DNA, 25 bp, Homo sapien
aaataacagaccaaggatccagagc

SEQ ID NO: 4170032 - DNA, 25 bp, Homo sapien
tgtacacacatttgctagccacagt

SEQ ID NO: 4170033 - DNA, 25 bp, Homo sapien
gaacacccagtgctcaatatacttg

SEQ ID NO: 4170034 - DNA, 25 bp, Homo sapien
catatctgaggaggtaagtaaccac

SEQ ID NO: 4170035 - DNA, 25 bp, Homo sapien
tctatgagatatgtgggaaggcctt

SEQ ID NO: 4170036 - DNA, 25 bp, Homo sapien
tgaaaggtacaaaggccttgcctcg

SEQ ID NO: 4170037 - DNA, 25 bp, Homo sapien
tatctgtagtcggaagtactctctg

SEQ ID NO: 4170038 - DNA, 25 bp, Homo sapien
tgtgcacgtttgtgcgcaagcttgc

SEQ ID NO: 4170039 - DNA, 25 bp, Homo sapien
tctgagacttgtagttcggctggcg

SEQ ID NO: 4170040 - DNA, 25 bp, Homo sapien
tgcacgcggctctctggtatctgta

SEQ ID NO: 4170041 - DNA, 25 bp, Homo sapien
tgttgtattctgtgtagcggccatc

SEQ ID NO: 4170042 - DNA, 25 bp, Homo sapien
cccctgggagaagtactggacggca

SEQ ID NO: 4170043 - DNA, 25 bp, Homo sapien
gaggattctgcaacataaactgtga

SEQ ID NO: 4170044 - DNA, 25 bp, Homo sapien
ccagagcgatttggtgctgttacac

SEQ ID NO: 4170045 - DNA, 25 bp, Homo sapien
tattcgccagaactgtccaatttgc

SEQ ID NO: 4170046 - DNA, 25 bp, Homo sapien
aatatcagcgtctttgggtctctcc

SEQ ID NO: 4170047 - DNA, 25 bp, Homo sapien
tgctaaaagtcaacgtgccaggcca

SEQ ID NO: 4170048 - DNA, 25 bp, Homo sapien
caaacagctgctatgacgagcaaag

SEQ ID NO: 4170049 - DNA, 25 bp, Homo sapien
acagaacagctggccgggtctggca

SEQ ID NO: 4170050 - DNA, 25 bp, Homo sapien
tctgacagaacagctggccgggtct

SEQ ID NO: 4170051 - DNA, 25 bp, Homo sapien
ggtggggtggatccttagtctctcc

SEQ ID NO: 4170052 - DNA, 25 bp, Homo sapien
tgacagaacagctggccgggtctgg

SEQ ID NO: 4170053 - DNA, 25 bp, Homo sapien
ttaagcattttctaattaacttgcc

SEQ ID NO: 4170054 - DNA, 25 bp, Homo sapien
aattaagcattttctaattaacttg

SEQ ID NO: 4170055 - DNA, 25 bp, Homo sapien
tctaattaagcattttctaattaac

SEQ ID NO: 4170056 - DNA, 25 bp, Homo sapien
aagcattttctaattaacttgccct

SEQ ID NO: 4170057 - DNA, 25 bp, Homo sapien
gctcaaatgttcaccagtagaggaa

SEQ ID NO: 4170058 - DNA, 25 bp, Homo sapien
taaggccgcagataaacaagtacca

SEQ ID NO: 4170059 - DNA, 25 bp, Homo sapien
gatataactgtaccaatgcaacatg

SEQ ID NO: 4170060 - DNA, 25 bp, Homo sapien
ccttggaggagagtatgtcaatatc

SEQ ID NO: 4170061 - DNA, 25 bp, Homo sapien
caagatcggtggcttgtacacggga

SEQ ID NO: 4170062 - DNA, 25 bp, Homo sapien
agtgctggcctagactgtaaaaccc

SEQ ID NO: 4170063 - DNA, 25 bp, Homo sapien
tgcaaggtcttctatctcaggccag

SEQ ID NO: 4170064 - DNA, 25 bp, Homo sapien
tagaatcaagggcaacatcctgcgg

SEQ ID NO: 4170065 - DNA, 25 bp, Homo sapien
tctgccactgaaagtagccgactgc

SEQ ID NO: 4170066 - DNA, 25 bp, Homo sapien
tgtagggacttacaggccagggact

SEQ ID NO: 4170067 - DNA, 25 bp, Homo sapien
tttattcaaagagctcaagggcatc

SEQ ID NO: 4170068 - DNA, 25 bp, Homo sapien
gataggacggtaaaactgagcctct

SEQ ID NO: 4170069 - DNA, 25 bp, Homo sapien
ggcccagatcaggaggagacaccag

SEQ ID NO: 4170070 - DNA, 25 bp, Homo sapien
agatcaggaggagacaccagcgcat

SEQ ID NO: 4170071 - DNA, 25 bp, Homo sapien
cccagatcaggaggagacaccagcg

SEQ ID NO: 4170072 - DNA, 25 bp, Homo sapien
cagatcaggaggagacaccagcgca

SEQ ID NO: 4170073 - DNA, 25 bp, Homo sapien
ctgggtcagcagctggccttcaacc

SEQ ID NO: 4170074 - DNA, 25 bp, Homo sapien
ggtcagcagctggccttcaaccttc

SEQ ID NO: 4170075 - DNA, 25 bp, Homo sapien
atgtgagtcctgggtcagcagctgg

SEQ ID NO: 4170076 - DNA, 25 bp, Homo sapien
tgagtcctgggtcagcagctggcct

SEQ ID NO: 4170077 - DNA, 25 bp, Homo sapien
gatgtgccaccccaagtcagcatta

SEQ ID NO: 4170078 - DNA, 25 bp, Homo sapien
cagtgtacgtcccatcagggtaggt

SEQ ID NO: 4170079 - DNA, 25 bp, Homo sapien
tatcgttcacggtcagcgactggag

SEQ ID NO: 4170080 - DNA, 25 bp, Homo sapien
tgatagatgcagaagtactcccctg

SEQ ID NO: 4170081 - DNA, 25 bp, Homo sapien
gtgatgggtcctctggcatatgaca

SEQ ID NO: 4170082 - DNA, 25 bp, Homo sapien
tcctgccgtctggtgatgggtcctc

SEQ ID NO: 4170083 - DNA, 25 bp, Homo sapien
ggtgatgggtcctctggcatatgac

SEQ ID NO: 4170084 - DNA, 25 bp, Homo sapien
ctgttcccggtcctgccgtctggtg

SEQ ID NO: 4170085 - DNA, 25 bp, Homo sapien
agatgaccaccagcgtcgcggccat

SEQ ID NO: 4170086 - DNA, 25 bp, Homo sapien
tcgcggccatggctccaagcaatgg

SEQ ID NO: 4170087 - DNA, 25 bp, Homo sapien
tggctccaagcaatggaatctggaa

SEQ ID NO: 4170088 - DNA, 25 bp, Homo sapien
tttctagtcaacgcgaccaccacga

SEQ ID NO: 4170089 - DNA, 25 bp, Homo sapien
cccatgactgcggtgtgcagccgga

SEQ ID NO: 4170090 - DNA, 25 bp, Homo sapien
caagatgggtaggaaacaggtccag

SEQ ID NO: 4170091 - DNA, 25 bp, Homo sapien
gggacaacggaagagcataaataac

SEQ ID NO: 4170092 - DNA, 25 bp, Homo sapien
gcactcgggaagatcacatctgggt

SEQ ID NO: 4170093 - DNA, 25 bp, Homo sapien
tgggtaacctagcactaccagagag

SEQ ID NO: 4170094 - DNA, 25 bp, Homo sapien
tctcccgagtgggtggaattatgtc

SEQ ID NO: 4170095 - DNA, 25 bp, Homo sapien
aaagctctagcatatatagatgccc

SEQ ID NO: 4170096 - DNA, 25 bp, Homo sapien
gactttcccaatagcaccagccata

SEQ ID NO: 4170097 - DNA, 25 bp, Homo sapien
ttacttcctgttcactaagcttagt

SEQ ID NO: 4170098 - DNA, 25 bp, Homo sapien
tacttcctgttcactaagcttagtg

SEQ ID NO: 4170099 - DNA, 25 bp, Homo sapien
ttcctgttcactaagcttagtgagg

SEQ ID NO: 4170100 - DNA, 25 bp, Homo sapien
tgttcactaagcttagtgaggcagc

SEQ ID NO: 4170101 - DNA, 25 bp, Homo sapien
tctgtaactcaggacattgaagtag

SEQ ID NO: 4170102 - DNA, 25 bp, Homo sapien
actcaggacattgaagtagtcatgc

SEQ ID NO: 4170103 - DNA, 25 bp, Homo sapien
cattgaagtagtcatgcagctcggc

SEQ ID NO: 4170104 - DNA, 25 bp, Homo sapien
agtagtcatgcagctcggcacagtc

SEQ ID NO: 4170105 - DNA, 25 bp, Homo sapien
gtctctgtgaagaagctgcagttac

SEQ ID NO: 4170106 - DNA, 25 bp, Homo sapien
cagtctctgtgaagaagctgcagtt

SEQ ID NO: 4170107 - DNA, 25 bp, Homo sapien
agtctctgtgaagaagctgcagtta

SEQ ID NO: 4170108 - DNA, 25 bp, Homo sapien
cacgcagcactgatggagagtacag

SEQ ID NO: 4170109 - DNA, 25 bp, Homo sapien
acgcagcactgatggagagtacagc

SEQ ID NO: 4170110 - DNA, 25 bp, Homo sapien
caaaagtgtatcttccagaagatgc

SEQ ID NO: 4170111 - DNA, 25 bp, Homo sapien
acaaaagtgtatcttccagaagatg

SEQ ID NO: 4170112 - DNA, 25 bp, Homo sapien
caaactgtcgtctcttcctgaaggc

SEQ ID NO: 4170113 - DNA, 25 bp, Homo sapien
gaaacttgaaatgcctgcccagaga

SEQ ID NO: 4170114 - DNA, 25 bp, Homo sapien
tacgtggtggatagcgcatgtctcc

SEQ ID NO: 4170115 - DNA, 25 bp, Homo sapien
ccagcacaaagtcgtcagggagtga

SEQ ID NO: 4170116 - DNA, 25 bp, Homo sapien
tcagttgctccaagccagttttgtt

SEQ ID NO: 4170117 - DNA, 25 bp, Homo sapien
tgcttgtatcactctgtgcacggta

SEQ ID NO: 4170118 - DNA, 25 bp, Homo sapien
caggtgggcatggaacactgcttgt

SEQ ID NO: 4170119 - DNA, 25 bp, Homo sapien
taccctccaatctttgcaggtgggc

SEQ ID NO: 4170120 - DNA, 25 bp, Homo sapien
taagaggaacctgggctgaatgact

SEQ ID NO: 4170121 - DNA, 25 bp, Homo sapien
cattgtatcttagtatggaaaggaa

SEQ ID NO: 4170122 - DNA, 25 bp, Homo sapien
gtatgtttagacctaaaatacacac

SEQ ID NO: 4170123 - DNA, 25 bp, Homo sapien
tttttgcaattgctactgtgtacac

SEQ ID NO: 4170124 - DNA, 25 bp, Homo sapien
acacacactgtatgtttagacctaa

SEQ ID NO: 4170125 - DNA, 25 bp, Homo sapien
ttcccgccgcagtgttgtgataaga

SEQ ID NO: 4170126 - DNA, 25 bp, Homo sapien
tacctgttggctgaatggctagctg

SEQ ID NO: 4170127 - DNA, 25 bp, Homo sapien
caatgaagtttactgtggtgactgc

SEQ ID NO: 4170128 - DNA, 25 bp, Homo sapien
gtgactgctgaaaggtgaacccatt

SEQ ID NO: 4170129 - DNA, 25 bp, Homo sapien
tgctgctaaggtgcccggagtccag

SEQ ID NO: 4170130 - DNA, 25 bp, Homo sapien
taagcatgtgctagtgtctgaaccc

SEQ ID NO: 4170131 - DNA, 25 bp, Homo sapien
taatcactcaggcacgagcctggca

SEQ ID NO: 4170132 - DNA, 25 bp, Homo sapien
acccagttcagtttatctccagttg

SEQ ID NO: 4170133 - DNA, 25 bp, Homo sapien
gtacatgacagcctaaatccgtttg

SEQ ID NO: 4170134 - DNA, 25 bp, Homo sapien
aatgaggtgagcaatggcaagcagc

SEQ ID NO: 4170135 - DNA, 25 bp, Homo sapien
gattgtgggaccgaataatatcacg

SEQ ID NO: 4170136 - DNA, 25 bp, Homo sapien
ggccccttggactcgcgtttcatgt

SEQ ID NO: 4170137 - DNA, 25 bp, Homo sapien
gaaatgtcaaaaacactggactgtg

SEQ ID NO: 4170138 - DNA, 25 bp, Homo sapien
gaagtttgtacccactgctgtttat

SEQ ID NO: 4170139 - DNA, 25 bp, Homo sapien
tactgattcaagatgcgtgttaaaa

SEQ ID NO: 4170140 - DNA, 25 bp, Homo sapien
gaaaagtttgcccttaaggatatgc

SEQ ID NO: 4170141 - DNA, 25 bp, Homo sapien
catggacacgcttcagtcctctgac

SEQ ID NO: 4170142 - DNA, 25 bp, Homo sapien
gtgactcattggtatcagcatatgc

SEQ ID NO: 4170143 - DNA, 25 bp, Homo sapien
actggcccgtttacccatacaaatg

SEQ ID NO: 4170144 - DNA, 25 bp, Homo sapien
gacttcccatgtgctacctcatgtg

SEQ ID NO: 4170145 - DNA, 25 bp, Homo sapien
caaacaggttaaatgtggaagaaag

SEQ ID NO: 4170146 - DNA, 25 bp, Homo sapien
agagcagagatcttgtcattattgc

SEQ ID NO: 4170147 - DNA, 25 bp, Homo sapien
catagtttaaactacaatgctgaaa

SEQ ID NO: 4170148 - DNA, 25 bp, Homo sapien
ccagccttcctcataccactggatt

SEQ ID NO: 4170149 - DNA, 25 bp, Homo sapien
gaatgctccgcaacagaaggaaacc

SEQ ID NO: 4170150 - DNA, 25 bp, Homo sapien
gagcccctgccattgaaactttgca

SEQ ID NO: 4170151 - DNA, 25 bp, Homo sapien
tatagttaacgtaaagagcccctgc

SEQ ID NO: 4170152 - DNA, 25 bp, Homo sapien
gagatggtgcccgaagtctgcctgt

SEQ ID NO: 4170153 - DNA, 25 bp, Homo sapien
gctttggtggtcaagggattacact

SEQ ID NO: 4170154 - DNA, 25 bp, Homo sapien
tcacaatggtatttacaggagacct

SEQ ID NO: 4170155 - DNA, 25 bp, Homo sapien
ctacaacaggctcaagggatatgct

SEQ ID NO: 4170156 - DNA, 25 bp, Homo sapien
cactaagaggacattgactgcacca

SEQ ID NO: 4170157 - DNA, 25 bp, Homo sapien
ttgaggccccttccctaagattaca

SEQ ID NO: 4170158 - DNA, 25 bp, Homo sapien
cagaaagttgtcagccttgttagtc

SEQ ID NO: 4170159 - DNA, 25 bp, Homo sapien
tgaaggactcttctggaactcaaag

SEQ ID NO: 4170160 - DNA, 25 bp, Homo sapien
ttctggcacagtaggaaaggatcac

SEQ ID NO: 4170161 - DNA, 25 bp, Homo sapien
ggagggtgaagacccagacaaactg

SEQ ID NO: 4170162 - DNA, 25 bp, Homo sapien
tggagggtgaagacccagacaaact

SEQ ID NO: 4170163 - DNA, 25 bp, Homo sapien
cttgttgttcttgcctatctctcat

SEQ ID NO: 4170164 - DNA, 25 bp, Homo sapien
ccttgttgttcttgcctatctctca

SEQ ID NO: 4170165 - DNA, 25 bp, Homo sapien
cccttgttgttcttgcctatctctc

SEQ ID NO: 4170166 - DNA, 25 bp, Homo sapien
caaccccaggcactagagggaacag

SEQ ID NO: 4170167 - DNA, 25 bp, Homo sapien
gggtgctgccgaaatgccaaaatca

SEQ ID NO: 4170168 - DNA, 25 bp, Homo sapien
cagagggagattggcactgcattgc

SEQ ID NO: 4170169 - DNA, 25 bp, Homo sapien
taatatctactgcaagatacccagg

SEQ ID NO: 4170170 - DNA, 25 bp, Homo sapien
acatcgcctctcagctttaatgaag

SEQ ID NO: 4170171 - DNA, 25 bp, Homo sapien
tctggtccaatattcttgccatgat

SEQ ID NO: 4170172 - DNA, 25 bp, Homo sapien
taatatcacattcacaacaacttcg

SEQ ID NO: 4170173 - DNA, 25 bp, Homo sapien
caagtcctgtgacatttagagtact

SEQ ID NO: 4170174 - DNA, 25 bp, Homo sapien
agagcattgcccaaaagactgactg

SEQ ID NO: 4170175 - DNA, 25 bp, Homo sapien
gagcattgcccaaaagactgactga

SEQ ID NO: 4170176 - DNA, 25 bp, Homo sapien
tcaccagagcattgcccaaaagact

SEQ ID NO: 4170177 - DNA, 25 bp, Homo sapien
tctgaggaatccgtaaaatggtggc

SEQ ID NO: 4170178 - DNA, 25 bp, Homo sapien
gaagacttctcagcgtgaacactgg

SEQ ID NO: 4170179 - DNA, 25 bp, Homo sapien
ggaactctttatccacagaggctaa

SEQ ID NO: 4170180 - DNA, 25 bp, Homo sapien
tgcatggaaagcctcagttgaataa

SEQ ID NO: 4170181 - DNA, 25 bp, Homo sapien
tatattgtctttctatatccaaaag

SEQ ID NO: 4170182 - DNA, 25 bp, Homo sapien
agaagtctgtaactgtaaccatagg

SEQ ID NO: 4170183 - DNA, 25 bp, Homo sapien
tgtctttctatatccaaaagaagtc

SEQ ID NO: 4170184 - DNA, 25 bp, Homo sapien
tgtaactgtaaccataggtatttct

SEQ ID NO: 4170185 - DNA, 25 bp, Homo sapien
tgcagcttgttgaatccacagcaaa

SEQ ID NO: 4170186 - DNA, 25 bp, Homo sapien
tccataataaggtataacagaagtc

SEQ ID NO: 4170187 - DNA, 25 bp, Homo sapien
tgtaatgtttcagaattgggagaaa

SEQ ID NO: 4170188 - DNA, 25 bp, Homo sapien
aacagaagtcttcaactggtgagca

SEQ ID NO: 4170189 - DNA, 25 bp, Homo sapien
taactttcaagtctccggtgcaaga

SEQ ID NO: 4170190 - DNA, 25 bp, Homo sapien
tagtgacttcttgaggaggcaccaa

SEQ ID NO: 4170191 - DNA, 25 bp, Homo sapien
taaaatgcaatcacaggtgcccggg

SEQ ID NO: 4170192 - DNA, 25 bp, Homo sapien
gcccagctgggtataaaagtcccta

SEQ ID NO: 4170193 - DNA, 25 bp, Homo sapien
gcaatgtaccttagccgatccctgg

SEQ ID NO: 4170194 - DNA, 25 bp, Homo sapien
tgcatgatgggtaaaaatgccctgg

SEQ ID NO: 4170195 - DNA, 25 bp, Homo sapien
tgccctgggttgaaacaagaaacat

SEQ ID NO: 4170196 - DNA, 25 bp, Homo sapien
taggctccaccttttgctccgtaaa

SEQ ID NO: 4170197 - DNA, 25 bp, Homo sapien
ataaagccatatgttgcttccttgt

SEQ ID NO: 4170198 - DNA, 25 bp, Homo sapien
ggatctgttacaattctacacaggg

SEQ ID NO: 4170199 - DNA, 25 bp, Homo sapien
tgtgtacttccctcacacaggaaca

SEQ ID NO: 4170200 - DNA, 25 bp, Homo sapien
ggataatttcctgctcatattctag

SEQ ID NO: 4170201 - DNA, 25 bp, Homo sapien
cagtcctaaagccttgagctatgtg

SEQ ID NO: 4170202 - DNA, 25 bp, Homo sapien
tatttccacttaccaccaatagagg

SEQ ID NO: 4170203 - DNA, 25 bp, Homo sapien
gatttctaagaggagtcctgccaag

SEQ ID NO: 4170204 - DNA, 25 bp, Homo sapien
tggtcccacagtgcttaattcagtg

SEQ ID NO: 4170205 - DNA, 25 bp, Homo sapien
gaactgtatgtccaaaactgatctg

SEQ ID NO: 4170206 - DNA, 25 bp, Homo sapien
atgcaaccagctagatctgacccat

SEQ ID NO: 4170207 - DNA, 25 bp, Homo sapien
gtctgcgttgacatgctgcaggtga

SEQ ID NO: 4170208 - DNA, 25 bp, Homo sapien
catgccctgttttgtgtctgcgttg

SEQ ID NO: 4170209 - DNA, 25 bp, Homo sapien
caggtgacatcagttgcaaggggat

SEQ ID NO: 4170210 - DNA, 25 bp, Homo sapien
gactttcattactgcaattccttcc

SEQ ID NO: 4170211 - DNA, 25 bp, Homo sapien
tgctttagccccgtctgtgttgtgc

SEQ ID NO: 4170212 - DNA, 25 bp, Homo sapien
tgtgttgtgctctcgcagaacagtc

SEQ ID NO: 4170213 - DNA, 25 bp, Homo sapien
catgttttgagggaatgccatcaca

SEQ ID NO: 4170214 - DNA, 25 bp, Homo sapien
tgaaatccttgatggttcctccaca

SEQ ID NO: 4170215 - DNA, 25 bp, Homo sapien
tggctaaaaaaacgtgctgaaatcc

SEQ ID NO: 4170216 - DNA, 25 bp, Homo sapien
caatggctaaaaaaacgtgctgaaa

SEQ ID NO: 4170217 - DNA, 25 bp, Homo sapien
aaatccttgatggttcctccacact

SEQ ID NO: 4170218 - DNA, 25 bp, Homo sapien
tcatttcaactttggaatgacggcg

SEQ ID NO: 4170219 - DNA, 25 bp, Homo sapien
tcaactttggaatgacggcgtaagt

SEQ ID NO: 4170220 - DNA, 25 bp, Homo sapien
actttggaatgacggcgtaagtgtc

SEQ ID NO: 4170221 - DNA, 25 bp, Homo sapien
gaatgacggcgtaagtgtctttcag

SEQ ID NO: 4170222 - DNA, 25 bp, Homo sapien
atgcatggagataatttcggacgtc

SEQ ID NO: 4170223 - DNA, 25 bp, Homo sapien
tggtgcccacggtttttggtaatgc

SEQ ID NO: 4170224 - DNA, 25 bp, Homo sapien
taactcctgagcacttttgcttctc

SEQ ID NO: 4170225 - DNA, 25 bp, Homo sapien
agataatttcggacgtctgcttctc

SEQ ID NO: 4170226 - DNA, 25 bp, Homo sapien
gcagtctgcagtagttgggaaaagt

SEQ ID NO: 4170227 - DNA, 25 bp, Homo sapien
agtaacagtcactggctcattgtac

SEQ ID NO: 4170228 - DNA, 25 bp, Homo sapien
gaaattcagtaacagtcactggctc

SEQ ID NO: 4170229 - DNA, 25 bp, Homo sapien
gaagcagtctgcagtagttgggaaa

SEQ ID NO: 4170230 - DNA, 25 bp, Homo sapien
agtccgtcggcttgatggcatgaga

SEQ ID NO: 4170231 - DNA, 25 bp, Homo sapien
ccgtcggcttgatggcatgagagtt

SEQ ID NO: 4170232 - DNA, 25 bp, Homo sapien
ttttgaaagtccgtcggcttgatgg

SEQ ID NO: 4170233 - DNA, 25 bp, Homo sapien
aaagtccgtcggcttgatggcatga

SEQ ID NO: 4170234 - DNA, 25 bp, Homo sapien
gggcaaaacatcagatccttagaat

SEQ ID NO: 4170235 - DNA, 25 bp, Homo sapien
ttaggtgccctttcaccgtagctcc

SEQ ID NO: 4170236 - DNA, 25 bp, Homo sapien
gaatgtgcaaacttctgtgctacca

SEQ ID NO: 4170237 - DNA, 25 bp, Homo sapien
tccagccgggatacccgaagagggc

SEQ ID NO: 4170238 - DNA, 25 bp, Homo sapien
cattgtaggagctgtacattttcct

SEQ ID NO: 4170239 - DNA, 25 bp, Homo sapien
taggagctgtacattttcctgtgtg

SEQ ID NO: 4170240 - DNA, 25 bp, Homo sapien
tgtaggagctgtacattttcctgtg

SEQ ID NO: 4170241 - DNA, 25 bp, Homo sapien
gtgcacccatctacaatctgtccat

SEQ ID NO: 4170242 - DNA, 25 bp, Homo sapien
acttcgaggaaaagccagtgccctt

SEQ ID NO: 4170243 - DNA, 25 bp, Homo sapien
gacagttacatccttcacttcgagg

SEQ ID NO: 4170244 - DNA, 25 bp, Homo sapien
ggcctgaatagactgggaagtttct

SEQ ID NO: 4170245 - DNA, 25 bp, Homo sapien
tgaactaaaattgatgcagcctaag

SEQ ID NO: 4170246 - DNA, 25 bp, Homo sapien
cagtgatacaggcaaagcgtgcccc

SEQ ID NO: 4170247 - DNA, 25 bp, Homo sapien
cagagcaggagttcttgacctggag

SEQ ID NO: 4170248 - DNA, 25 bp, Homo sapien
gaggccttggactctactggtacca

SEQ ID NO: 4170249 - DNA, 25 bp, Homo sapien
cattactgggcctttcttttagagg

SEQ ID NO: 4170250 - DNA, 25 bp, Homo sapien
ctgctttctgtgatggtccaagaca

SEQ ID NO: 4170251 - DNA, 25 bp, Homo sapien
ggtccaagacattccaaaggccaat

SEQ ID NO: 4170252 - DNA, 25 bp, Homo sapien
tccaagacattccaaaggccaatcc

SEQ ID NO: 4170253 - DNA, 25 bp, Homo sapien
gctttctgtgatggtccaagacatt

SEQ ID NO: 4170254 - DNA, 25 bp, Homo sapien
aatctgctaagtgggtgtagacaaa

SEQ ID NO: 4170255 - DNA, 25 bp, Homo sapien
agcatgtaaatagggtaagggatat

SEQ ID NO: 4170256 - DNA, 25 bp, Homo sapien
ccctgataacgagccagaaatctgc

SEQ ID NO: 4170257 - DNA, 25 bp, Homo sapien
ctgtgaataaaccttttagtccctg

SEQ ID NO: 4170258 - DNA, 25 bp, Homo sapien
gttcctgttcttccagataattaat

SEQ ID NO: 4170259 - DNA, 25 bp, Homo sapien
ctgttcttccagataattaattccc

SEQ ID NO: 4170260 - DNA, 25 bp, Homo sapien
tccagataattaattcccttagtaa

SEQ ID NO: 4170261 - DNA, 25 bp, Homo sapien
tgtatgttcctgttcttccagataa

SEQ ID NO: 4170262 - DNA, 25 bp, Homo sapien
caaagaaggcaagagacaatggtcc

SEQ ID NO: 4170263 - DNA, 25 bp, Homo sapien
ttctctacttgcttcatcatgatag

SEQ ID NO: 4170264 - DNA, 25 bp, Homo sapien
gaagagagcttgttctatttaaggt

SEQ ID NO: 4170265 - DNA, 25 bp, Homo sapien
caatggtccaggagattccattctc

SEQ ID NO: 4170266 - DNA, 25 bp, Homo sapien
tgttgttgttggcttgtctaacttt

SEQ ID NO: 4170267 - DNA, 25 bp, Homo sapien
ttgttggcttgtctaactttttcat

SEQ ID NO: 4170268 - DNA, 25 bp, Homo sapien
tgttgttggcttgtctaactttttc

SEQ ID NO: 4170269 - DNA, 25 bp, Homo sapien
gttgttggcttgtctaactttttca

SEQ ID NO: 4170270 - DNA, 25 bp, Homo sapien
ttcctgtcgtaggaagtatttcatc

SEQ ID NO: 4170271 - DNA, 25 bp, Homo sapien
tattcctgtcgtaggaagtatttca

SEQ ID NO: 4170272 - DNA, 25 bp, Homo sapien
cacaagtgagcatgtattcctgtcg

SEQ ID NO: 4170273 - DNA, 25 bp, Homo sapien
gagcatgtattcctgtcgtaggaag

SEQ ID NO: 4170274 - DNA, 25 bp, Homo sapien
cagatccagacctagaaatcaggag

SEQ ID NO: 4170275 - DNA, 25 bp, Homo sapien
aggaatacccgagaaattcccacat

SEQ ID NO: 4170276 - DNA, 25 bp, Homo sapien
aagtgcaaggaatacccgagaaatt

SEQ ID NO: 4170277 - DNA, 25 bp, Homo sapien
ccttcattcatccttaagttcaagt

SEQ ID NO: 4170278 - DNA, 25 bp, Homo sapien
catccttaagttcaagtgcaaggaa

SEQ ID NO: 4170279 - DNA, 25 bp, Homo sapien
tctgctctctggatgtatgggtctg

SEQ ID NO: 4170280 - DNA, 25 bp, Homo sapien
tctgtgtagttgatttagttcccgc

SEQ ID NO: 4170281 - DNA, 25 bp, Homo sapien
tgagctgcaacccatgctgttgtct

SEQ ID NO: 4170282 - DNA, 25 bp, Homo sapien
tagttcccgccatgcaaggcattta

SEQ ID NO: 4170283 - DNA, 25 bp, Homo sapien
gcttgtcatttcttgccaccctggt

SEQ ID NO: 4170284 - DNA, 25 bp, Homo sapien
catttcttggatcagcagggtaacc

SEQ ID NO: 4170285 - DNA, 25 bp, Homo sapien
gaggtgcccacagcggttctcaact

SEQ ID NO: 4170286 - DNA, 25 bp, Homo sapien
tctatgtacggtggtggcagcttct

SEQ ID NO: 4170287 - DNA, 25 bp, Homo sapien
taagggcttccaagacagatctgca

SEQ ID NO: 4170288 - DNA, 25 bp, Homo sapien
aacgccaacaatgaaacgggctgta

SEQ ID NO: 4170289 - DNA, 25 bp, Homo sapien
tgaaacgggctgtagagaagtgacc

SEQ ID NO: 4170290 - DNA, 25 bp, Homo sapien
gaagtgacctactgtctgttcgcct

SEQ ID NO: 4170291 - DNA, 25 bp, Homo sapien
caggccatactcaaagtagacatct

SEQ ID NO: 4170292 - DNA, 25 bp, Homo sapien
acaggccatactcaaagtagacatc

SEQ ID NO: 4170293 - DNA, 25 bp, Homo sapien
gccatactcaaagtagacatctgca

SEQ ID NO: 4170294 - DNA, 25 bp, Homo sapien
ggccatactcaaagtagacatctgc

SEQ ID NO: 4170295 - DNA, 25 bp, Homo sapien
tatgtaaagctagctcggcaggctc

SEQ ID NO: 4170296 - DNA, 25 bp, Homo sapien
tcaggatatgatataagctccgggt

SEQ ID NO: 4170297 - DNA, 25 bp, Homo sapien
tgtttatgtaaagctagctcggcag

SEQ ID NO: 4170298 - DNA, 25 bp, Homo sapien
tatgatataagctccgggtattggg

SEQ ID NO: 4170299 - DNA, 25 bp, Homo sapien
ggaacatgaaaactgtcctcactga

SEQ ID NO: 4170300 - DNA, 25 bp, Homo sapien
gaacatgaaaactgtcctcactgat

SEQ ID NO: 4170301 - DNA, 25 bp, Homo sapien
taataccccgaatactaataacaca

SEQ ID NO: 4170302 - DNA, 25 bp, Homo sapien
tgcagacttcgccttttaatacccc

SEQ ID NO: 4170303 - DNA, 25 bp, Homo sapien
ggatgacagcaagcctcatgagatc

SEQ ID NO: 4170304 - DNA, 25 bp, Homo sapien
gagatcatcctgcagacttcgcctt

SEQ ID NO: 4170305 - DNA, 25 bp, Homo sapien
gccgttaccttttactagagctgat

SEQ ID NO: 4170306 - DNA, 25 bp, Homo sapien
agatgtgattccgtttgtagcaaag

SEQ ID NO: 4170307 - DNA, 25 bp, Homo sapien
tgttcaacaaactggaccatagagg

SEQ ID NO: 4170308 - DNA, 25 bp, Homo sapien
caaaattacactctatgctctgggc

SEQ ID NO: 4170309 - DNA, 25 bp, Homo sapien
cattagagtcaccaaagcaaggagg

SEQ ID NO: 4170310 - DNA, 25 bp, Homo sapien
gcaaggaggttgttggaattcatca

SEQ ID NO: 4170311 - DNA, 25 bp, Homo sapien
cacttcttggatattacttctattg

SEQ ID NO: 4170312 - DNA, 25 bp, Homo sapien
gatatcccattcaacattagagtca

SEQ ID NO: 4170313 - DNA, 25 bp, Homo sapien
gtctgcgtctatacttagccagctt

SEQ ID NO: 4170314 - DNA, 25 bp, Homo sapien
actctgcgattgagtttcaccgtct

SEQ ID NO: 4170315 - DNA, 25 bp, Homo sapien
gagtttcaccgtctgcgtctatact

SEQ ID NO: 4170316 - DNA, 25 bp, Homo sapien
actcagtagatctgttctgtagacc

SEQ ID NO: 4170317 - DNA, 25 bp, Homo sapien
tgaaacgagtttttgagttatacga

SEQ ID NO: 4170318 - DNA, 25 bp, Homo sapien
ccagaaacaagaactcgttaatcca

SEQ ID NO: 4170319 - DNA, 25 bp, Homo sapien
caagaactcgttaatccattctgca

SEQ ID NO: 4170320 - DNA, 25 bp, Homo sapien
tttgagttatacgagggccagaaac

SEQ ID NO: 4170321 - DNA, 25 bp, Homo sapien
tgggtccaatcttggtcactacaca

SEQ ID NO: 4170322 - DNA, 25 bp, Homo sapien
ggaaagcgatccaagttcatgtgca

SEQ ID NO: 4170323 - DNA, 25 bp, Homo sapien
tggtttgcatcattagtttcttggc

SEQ ID NO: 4170324 - DNA, 25 bp, Homo sapien
tctatcatcgactttttgggtccaa

SEQ ID NO: 4170325 - DNA, 25 bp, Homo sapien
cactagagggcagtagggatacaca

SEQ ID NO: 4170326 - DNA, 25 bp, Homo sapien
caacatatggtcgatgtggaaacat

SEQ ID NO: 4170327 - DNA, 25 bp, Homo sapien
tatgtgcaacatatggtcgatgtgg

SEQ ID NO: 4170328 - DNA, 25 bp, Homo sapien
ggatacacatccacagcaaccaata

SEQ ID NO: 4170329 - DNA, 25 bp, Homo sapien
tctcttacccttaatgcctctgaaa

SEQ ID NO: 4170330 - DNA, 25 bp, Homo sapien
tacccttaatgcctctgaaaggctg

SEQ ID NO: 4170331 - DNA, 25 bp, Homo sapien
ttaatgcctctgaaaggctgctggg

SEQ ID NO: 4170332 - DNA, 25 bp, Homo sapien
ccttaatgcctctgaaaggctgctg

SEQ ID NO: 4170333 - DNA, 25 bp, Homo sapien
gattcaaaagctgttaggctacggc

SEQ ID NO: 4170334 - DNA, 25 bp, Homo sapien
cggcatgacccagtacaaaagtttt

SEQ ID NO: 4170335 - DNA, 25 bp, Homo sapien
tactgcaggcttgaaactcgattag

SEQ ID NO: 4170336 - DNA, 25 bp, Homo sapien
tagcccagctattaaaaccaggagg

SEQ ID NO: 4170337 - DNA, 25 bp, Homo sapien
ttgagcaacagcacaaccatggagc

SEQ ID NO: 4170338 - DNA, 25 bp, Homo sapien
ctgttgagcaacagcacaaccatgg

SEQ ID NO: 4170339 - DNA, 25 bp, Homo sapien
gcacaaccatggagcaacagaagag

SEQ ID NO: 4170340 - DNA, 25 bp, Homo sapien
caacagcacaaccatggagcaacag

SEQ ID NO: 4170341 - DNA, 25 bp, Homo sapien
caaccaagtaggctgtagtttgctg

SEQ ID NO: 4170342 - DNA, 25 bp, Homo sapien
aaccaagtaggctgtagtttgctga

SEQ ID NO: 4170343 - DNA, 25 bp, Homo sapien
ctcaaccaagtaggctgtagtttgc

SEQ ID NO: 4170344 - DNA, 25 bp, Homo sapien
accaagtaggctgtagtttgctgac

SEQ ID NO: 4170345 - DNA, 25 bp, Homo sapien
tcctccttctttgcccttactttca

SEQ ID NO: 4170346 - DNA, 25 bp, Homo sapien
agctgaggaaaggttaatttcttct

SEQ ID NO: 4170347 - DNA, 25 bp, Homo sapien
ttctttgcccttactttcacacatt

SEQ ID NO: 4170348 - DNA, 25 bp, Homo sapien
gctgaggaaaggttaatttcttcta

SEQ ID NO: 4170349 - DNA, 25 bp, Homo sapien
cactgacagtttgttaggaccaagc

SEQ ID NO: 4170350 - DNA, 25 bp, Homo sapien
cctagtcaggtatgctttggataac

SEQ ID NO: 4170351 - DNA, 25 bp, Homo sapien
tacagaattgtaaggcctggagcag

SEQ ID NO: 4170352 - DNA, 25 bp, Homo sapien
ggatgggcctgtccacactgacagt

SEQ ID NO: 4170353 - DNA, 25 bp, Homo sapien
tacagggacattcgtagtgcagtgg

SEQ ID NO: 4170354 - DNA, 25 bp, Homo sapien
ctttacatgtctgagtggcaactgc

SEQ ID NO: 4170355 - DNA, 25 bp, Homo sapien
aggttctgacgggtacagggacatt

SEQ ID NO: 4170356 - DNA, 25 bp, Homo sapien
gcgtcgtccccaaacacacgcttta

SEQ ID NO: 4170357 - DNA, 25 bp, Homo sapien
tgtaccacccgtcaccaccagcaac

SEQ ID NO: 4170358 - DNA, 25 bp, Homo sapien
gtttgccctcactgtaccacccgtc

SEQ ID NO: 4170359 - DNA, 25 bp, Homo sapien
tttgccctcactgtaccacccgtca

SEQ ID NO: 4170360 - DNA, 25 bp, Homo sapien
ctcactgtaccacccgtcaccacca

SEQ ID NO: 4170361 - DNA, 25 bp, Homo sapien
caagtctgcgatgaccctctcaggc

SEQ ID NO: 4170362 - DNA, 25 bp, Homo sapien
ctttctcaagtctgcgatgaccctc

SEQ ID NO: 4170363 - DNA, 25 bp, Homo sapien
tcaagtctgcgatgaccctctcagg

SEQ ID NO: 4170364 - DNA, 25 bp, Homo sapien
tctcaagtctgcgatgaccctctca

SEQ ID NO: 4170365 - DNA, 25 bp, Homo sapien
taagtagtcatagtttgcctctgga

SEQ ID NO: 4170366 - DNA, 25 bp, Homo sapien
cagaatgctttaactctgtttgatg

SEQ ID NO: 4170367 - DNA, 25 bp, Homo sapien
taacactttccgtttttcagaatgc

SEQ ID NO: 4170368 - DNA, 25 bp, Homo sapien
tgttgttgtcatcgctatcgaagaa

SEQ ID NO: 4170369 - DNA, 25 bp, Homo sapien
tcattctgggattcttcgtggatct

SEQ ID NO: 4170370 - DNA, 25 bp, Homo sapien
ataaaagttgttcaggatgcatctt

SEQ ID NO: 4170371 - DNA, 25 bp, Homo sapien
aataaaagttgttcaggatgcatct

SEQ ID NO: 4170372 - DNA, 25 bp, Homo sapien
taaaagttgttcaggatgcatcttc

SEQ ID NO: 4170373 - DNA, 25 bp, Homo sapien
aaaagttgttcaggatgcatcttct

SEQ ID NO: 4170374 - DNA, 25 bp, Homo sapien
tccctccaagatctagattcggcat

SEQ ID NO: 4170375 - DNA, 25 bp, Homo sapien
agatgagatcgtgccgtgcctaaaa

SEQ ID NO: 4170376 - DNA, 25 bp, Homo sapien
tccttctccctccaagatctagatt

SEQ ID NO: 4170377 - DNA, 25 bp, Homo sapien
tgcctttttagatgagatcgtgccg

SEQ ID NO: 4170378 - DNA, 25 bp, Homo sapien
aaactcctggatattcagagctgaa

SEQ ID NO: 4170379 - DNA, 25 bp, Homo sapien
tctctgactcaaagggaaacctccc

SEQ ID NO: 4170380 - DNA, 25 bp, Homo sapien
tgatgtggcactcaatgctctaggg

SEQ ID NO: 4170381 - DNA, 25 bp, Homo sapien
aaatgagcctcttaacagtgtgtga

SEQ ID NO: 4170382 - DNA, 25 bp, Homo sapien
gagccagctgtaactatagcacttt

SEQ ID NO: 4170383 - DNA, 25 bp, Homo sapien
agtaacaggctagcaaattctctgc

SEQ ID NO: 4170384 - DNA, 25 bp, Homo sapien
ccccaatagaggaacagaccagaaa

SEQ ID NO: 4170385 - DNA, 25 bp, Homo sapien
ctcagtactgtgagcttgctagagc

SEQ ID NO: 4170386 - DNA, 25 bp, Homo sapien
caaaacaagtcttatgcgacaggtc

SEQ ID NO: 4170387 - DNA, 25 bp, Homo sapien
cattacagggcatagactggattca

SEQ ID NO: 4170388 - DNA, 25 bp, Homo sapien
tcctaacttgccactaatttaaggc

SEQ ID NO: 4170389 - DNA, 25 bp, Homo sapien
ggtcagtgtttcattcctaacttgc

SEQ ID NO: 4170390 - DNA, 25 bp, Homo sapien
catgttcctaactagcaggttcccc

SEQ ID NO: 4170391 - DNA, 25 bp, Homo sapien
cttctagtacatgcatgccacatgt

SEQ ID NO: 4170392 - DNA, 25 bp, Homo sapien
tgcatgccacatgttcctaactagc

SEQ ID NO: 4170393 - DNA, 25 bp, Homo sapien
tagtacatgcatgccacatgttcct

SEQ ID NO: 4170394 - DNA, 25 bp, Homo sapien
ggttgtttgggacttctctgtgctc

SEQ ID NO: 4170395 - DNA, 25 bp, Homo sapien
gacaggcagccattgagtgaacagt

SEQ ID NO: 4170396 - DNA, 25 bp, Homo sapien
ataattccccaaaggtcagcctaca

SEQ ID NO: 4170397 - DNA, 25 bp, Homo sapien
gtagttgtaatctctgctgtcccag

SEQ ID NO: 4170398 - DNA, 25 bp, Homo sapien
caaaccagctatgttctattctgaa

SEQ ID NO: 4170399 - DNA, 25 bp, Homo sapien
gacataatgtctcggagagagaaca

SEQ ID NO: 4170400 - DNA, 25 bp, Homo sapien
tataatacgcacactcccaaatctc

SEQ ID NO: 4170401 - DNA, 25 bp, Homo sapien
caactaactagagttctgtgggtac

SEQ ID NO: 4170402 - DNA, 25 bp, Homo sapien
agattaacactgttatgtgtgaatc

SEQ ID NO: 4170403 - DNA, 25 bp, Homo sapien
tgctagctggtaatgttgcccatta

SEQ ID NO: 4170404 - DNA, 25 bp, Homo sapien
tttacatttaagattaacactgtta

SEQ ID NO: 4170405 - DNA, 25 bp, Homo sapien
atgatgctagctggtaatgttgccc

SEQ ID NO: 4170406 - DNA, 25 bp, Homo sapien
tctgcaccgtccacaacaggctttg

SEQ ID NO: 4170407 - DNA, 25 bp, Homo sapien
tgcaccgtccacaacaggctttgcc

SEQ ID NO: 4170408 - DNA, 25 bp, Homo sapien
caccgtccacaacaggctttgccat

SEQ ID NO: 4170409 - DNA, 25 bp, Homo sapien
ctctgcaccgtccacaacaggcttt

SEQ ID NO: 4170410 - DNA, 25 bp, Homo sapien
tttcccaactccaaggtctccatca

SEQ ID NO: 4170411 - DNA, 25 bp, Homo sapien
actccaaggtctccatcaacttctg

SEQ ID NO: 4170412 - DNA, 25 bp, Homo sapien
ctaccagttatccttcttggcctcc

SEQ ID NO: 4170413 - DNA, 25 bp, Homo sapien
cccaactccaaggtctccatcaact

SEQ ID NO: 4170414 - DNA, 25 bp, Homo sapien
attgtctggcatcaggcttactcaa

SEQ ID NO: 4170415 - DNA, 25 bp, Homo sapien
atattgtctggcatcaggcttactc

SEQ ID NO: 4170416 - DNA, 25 bp, Homo sapien
aatattgtctggcatcaggcttact

SEQ ID NO: 4170417 - DNA, 25 bp, Homo sapien
tattgtctggcatcaggcttactca

SEQ ID NO: 4170418 - DNA, 25 bp, Homo sapien
ccttagagatgggagttctcagtgt

SEQ ID NO: 4170419 - DNA, 25 bp, Homo sapien
tttattcttaccttagagatgggag

SEQ ID NO: 4170420 - DNA, 25 bp, Homo sapien
cttaccttagagatgggagttctca

SEQ ID NO: 4170421 - DNA, 25 bp, Homo sapien
ttcttaccttagagatgggagttct

SEQ ID NO: 4170422 - DNA, 25 bp, Homo sapien
gatagtgagatgttgttatcctcca

SEQ ID NO: 4170423 - DNA, 25 bp, Homo sapien
cactggcatgcttaccctgtttagt

SEQ ID NO: 4170424 - DNA, 25 bp, Homo sapien
tgttatcctccattgatagagagga

SEQ ID NO: 4170425 - DNA, 25 bp, Homo sapien
taattgctaatagtggatagtgaga

SEQ ID NO: 4170426 - DNA, 25 bp, Homo sapien
ctccctttcattcccaaactgtctt

SEQ ID NO: 4170427 - DNA, 25 bp, Homo sapien
aaaatgtctgtgcagcttaccatgc

SEQ ID NO: 4170428 - DNA, 25 bp, Homo sapien
cacacttgtgccagaagagaaactg

SEQ ID NO: 4170429 - DNA, 25 bp, Homo sapien
gattgaaagatgctgcgttgctggt

SEQ ID NO: 4170430 - DNA, 25 bp, Homo sapien
gccaatgaatacaggtggcctctaa

SEQ ID NO: 4170431 - DNA, 25 bp, Homo sapien
gagatgtaggtcaggcaagcagata

SEQ ID NO: 4170432 - DNA, 25 bp, Homo sapien
tggttctcagctaaacacgtgtgcc

SEQ ID NO: 4170433 - DNA, 25 bp, Homo sapien
gagactgcgtgtttcatgtcaaaag

SEQ ID NO: 4170434 - DNA, 25 bp, Homo sapien
gagttaactttacccatgcaaggcg

SEQ ID NO: 4170435 - DNA, 25 bp, Homo sapien
ctttgatttcaagtgtctggttttg

SEQ ID NO: 4170436 - DNA, 25 bp, Homo sapien
gtagcaagtcttgggcctgagccca

SEQ ID NO: 4170437 - DNA, 25 bp, Homo sapien
aatggaaccccactgacacctttag

SEQ ID NO: 4170438 - DNA, 25 bp, Homo sapien
gagccaagtgctatcaatggaaccc

SEQ ID NO: 4170439 - DNA, 25 bp, Homo sapien
ctctgtggctttgttaacagaagct

SEQ ID NO: 4170440 - DNA, 25 bp, Homo sapien
cactctgtggctttgttaacagaag

SEQ ID NO: 4170441 - DNA, 25 bp, Homo sapien
tccactctgtggctttgttaacaga

SEQ ID NO: 4170442 - DNA, 25 bp, Homo sapien
ccactctgtggctttgttaacagaa

SEQ ID NO: 4170443 - DNA, 25 bp, Homo sapien
taaaaacgtaagtgcatatagggtc

SEQ ID NO: 4170444 - DNA, 25 bp, Homo sapien
cagaactcataagggaatatccaag

SEQ ID NO: 4170445 - DNA, 25 bp, Homo sapien
aattttcccctgaatgaggcagttg

SEQ ID NO: 4170446 - DNA, 25 bp, Homo sapien
tccaagaatgggatgaattttcccc

SEQ ID NO: 4170447 - DNA, 25 bp, Homo sapien
cctgctgacgttttggctctgctaa

SEQ ID NO: 4170448 - DNA, 25 bp, Homo sapien
gaaagtatggaacaaacaggccctg

SEQ ID NO: 4170449 - DNA, 25 bp, Homo sapien
cctccgagctaaagcatctgcagca

SEQ ID NO: 4170450 - DNA, 25 bp, Homo sapien
cagttgcacaaatgacttgcttgtc

SEQ ID NO: 4170451 - DNA, 25 bp, Homo sapien
tagtaattctctttgaggtagaaaa

SEQ ID NO: 4170452 - DNA, 25 bp, Homo sapien
tcacaagtctgaatggtaaacagat

SEQ ID NO: 4170453 - DNA, 25 bp, Homo sapien
catttccccttaatgggagccagaa

SEQ ID NO: 4170454 - DNA, 25 bp, Homo sapien
cctctaagtgcttgaaatggcattc

SEQ ID NO: 4170455 - DNA, 25 bp, Homo sapien
cacctatactaatagctggtgagct

SEQ ID NO: 4170456 - DNA, 25 bp, Homo sapien
tagctgtattagttcacctatacta

SEQ ID NO: 4170457 - DNA, 25 bp, Homo sapien
caaacacctgagcatgcttatccat

SEQ ID NO: 4170458 - DNA, 25 bp, Homo sapien
gctggtgagctagcaccaaacacct

SEQ ID NO: 4170459 - DNA, 25 bp, Homo sapien
agttttcttcaggagagaaagcaga

SEQ ID NO: 4170460 - DNA, 25 bp, Homo sapien
tagttttcttcaggagagaaagcag

SEQ ID NO: 4170461 - DNA, 25 bp, Homo sapien
gttttcttcaggagagaaagcagac

SEQ ID NO: 4170462 - DNA, 25 bp, Homo sapien
ttagttttcttcaggagagaaagca

SEQ ID NO: 4170463 - DNA, 25 bp, Homo sapien
aagaattttgtttgtgtgccttggc

SEQ ID NO: 4170464 - DNA, 25 bp, Homo sapien
gaattttgtttgtgtgccttggcat

SEQ ID NO: 4170465 - DNA, 25 bp, Homo sapien
ccatgtgcttttgaattggaagaag

SEQ ID NO: 4170466 - DNA, 25 bp, Homo sapien
gaagaagaattttgtttgtgtgcct

SEQ ID NO: 4170467 - DNA, 25 bp, Homo sapien
tttaatgcagtcactgattacagtg

SEQ ID NO: 4170468 - DNA, 25 bp, Homo sapien
gagttttaatgcagtcactgattac

SEQ ID NO: 4170469 - DNA, 25 bp, Homo sapien
catttgagttaaaactgattttgtc

SEQ ID NO: 4170470 - DNA, 25 bp, Homo sapien
gttttaatgcagtcactgattacag

SEQ ID NO: 4170471 - DNA, 25 bp, Homo sapien
gggaagaacctgaatcattttttgc

SEQ ID NO: 4170472 - DNA, 25 bp, Homo sapien
catttggaccaaactgccaagtttt

SEQ ID NO: 4170473 - DNA, 25 bp, Homo sapien
ctccaaagacgccatttggaccaaa

SEQ ID NO: 4170474 - DNA, 25 bp, Homo sapien
tacccagatattggctgcaccggta

SEQ ID NO: 4170475 - DNA, 25 bp, Homo sapien
tcagctatgccagacatccttaagg

SEQ ID NO: 4170476 - DNA, 25 bp, Homo sapien
atccttaaggaagttgacatttgtg

SEQ ID NO: 4170477 - DNA, 25 bp, Homo sapien
tccttaaggaagttgacatttgtgt

SEQ ID NO: 4170478 - DNA, 25 bp, Homo sapien
ccttaaggaagttgacatttgtgta

SEQ ID NO: 4170479 - DNA, 25 bp, Homo sapien
ccttcatcttctcgtttcagcaaaa

SEQ ID NO: 4170480 - DNA, 25 bp, Homo sapien
ccatagctccttctagataggacca

SEQ ID NO: 4170481 - DNA, 25 bp, Homo sapien
atatgccccacagtagaccaccagt

SEQ ID NO: 4170482 - DNA, 25 bp, Homo sapien
tagataggaccaagctttacttttc

SEQ ID NO: 4170483 - DNA, 25 bp, Homo sapien
gtgctcctcacaatactcaattttt

SEQ ID NO: 4170484 - DNA, 25 bp, Homo sapien
tattaccttttccattgttccagtg

SEQ ID NO: 4170485 - DNA, 25 bp, Homo sapien
gttccagtgctcctcacaatactca

SEQ ID NO: 4170486 - DNA, 25 bp, Homo sapien
actttccatattaccttttccattg

SEQ ID NO: 4170487 - DNA, 25 bp, Homo sapien
tagagcactctacggacaatggcag

SEQ ID NO: 4170488 - DNA, 25 bp, Homo sapien
tccaagtaggtacagcgatccagcg

SEQ ID NO: 4170489 - DNA, 25 bp, Homo sapien
aaaagcattcgattgtgtggcagca

SEQ ID NO: 4170490 - DNA, 25 bp, Homo sapien
ttttagcgggcacaacttagagcac

SEQ ID NO: 4170491 - DNA, 25 bp, Homo sapien
caggaaccatagtcctggtgagtgg

SEQ ID NO: 4170492 - DNA, 25 bp, Homo sapien
atttgatgtgtcaaggattttattc

SEQ ID NO: 4170493 - DNA, 25 bp, Homo sapien
gatcaggaaccatagtcctggtgag

SEQ ID NO: 4170494 - DNA, 25 bp, Homo sapien
cttggatcaggaaccatagtcctgg

SEQ ID NO: 4170495 - DNA, 25 bp, Homo sapien
gcctggacaccctcaagagactgtg

SEQ ID NO: 4170496 - DNA, 25 bp, Homo sapien
tggaacactgtgaactcgacaaact

SEQ ID NO: 4170497 - DNA, 25 bp, Homo sapien
agagcagggagcttaacagccaggc

SEQ ID NO: 4170498 - DNA, 25 bp, Homo sapien
gaagttagatcgtaagaggctccag

SEQ ID NO: 4170499 - DNA, 25 bp, Homo sapien
ggtgggtcctcattactcctcttaa

SEQ ID NO: 4170500 - DNA, 25 bp, Homo sapien
catcatgtgacttgagattgctttc

SEQ ID NO: 4170501 - DNA, 25 bp, Homo sapien
tctaagtctgttcagataccaagac

SEQ ID NO: 4170502 - DNA, 25 bp, Homo sapien
gatagttatcagtctccacctggca

SEQ ID NO: 4170503 - DNA, 25 bp, Homo sapien
ctcatttgtgaattggcccctttgc

SEQ ID NO: 4170504 - DNA, 25 bp, Homo sapien
gtatgccatcctaaatcctgcttgg

SEQ ID NO: 4170505 - DNA, 25 bp, Homo sapien
gctggtcctcagatttgtagtccta

SEQ ID NO: 4170506 - DNA, 25 bp, Homo sapien
tgtggagactcttattatgaaaggc

SEQ ID NO: 4170507 - DNA, 25 bp, Homo sapien
tgaaagctgccaccaaagtcctccc

SEQ ID NO: 4170508 - DNA, 25 bp, Homo sapien
gctgccaccaaagtcctccctaact

SEQ ID NO: 4170509 - DNA, 25 bp, Homo sapien
tcctgcagttttagctcaagctgaa

SEQ ID NO: 4170510 - DNA, 25 bp, Homo sapien
cctgcagttttagctcaagctgaaa

SEQ ID NO: 4170511 - DNA, 25 bp, Homo sapien
gttagaattagaatattcttcaagc

SEQ ID NO: 4170512 - DNA, 25 bp, Homo sapien
agggtagggcttcctagttgggcag

SEQ ID NO: 4170513 - DNA, 25 bp, Homo sapien
cctttgatgcagctggtctgtcaga

SEQ ID NO: 4170514 - DNA, 25 bp, Homo sapien
tgtcagagggcggaaagttagaatt

SEQ ID NO: 4170515 - DNA, 25 bp, Homo sapien
tactcgttgagcagaactatcactc

SEQ ID NO: 4170516 - DNA, 25 bp, Homo sapien
ggacggccctgtcaatactcgttga

SEQ ID NO: 4170517 - DNA, 25 bp, Homo sapien
tgcactgtatccttctccaaccgag

SEQ ID NO: 4170518 - DNA, 25 bp, Homo sapien
gacctgacgtgacccaagcaaattg

SEQ ID NO: 4170519 - DNA, 25 bp, Homo sapien
tagcatctagaattgtaagcgaagt

SEQ ID NO: 4170520 - DNA, 25 bp, Homo sapien
tgtgtggtagcctcatatgatttct

SEQ ID NO: 4170521 - DNA, 25 bp, Homo sapien
ggatcattagaacactaaagtgcag

SEQ ID NO: 4170522 - DNA, 25 bp, Homo sapien
taagcgaagtgaatatgtgaaaggt

SEQ ID NO: 4170523 - DNA, 25 bp, Homo sapien
ctaagttgtaagctggtatatttct

SEQ ID NO: 4170524 - DNA, 25 bp, Homo sapien
cctgactctagcatgatctgtaccc

SEQ ID NO: 4170525 - DNA, 25 bp, Homo sapien
tggaggcagtgctgctaagttgtaa

SEQ ID NO: 4170526 - DNA, 25 bp, Homo sapien
gttttccctgactctagcatgatct

SEQ ID NO: 4170527 - DNA, 25 bp, Homo sapien
ccttgtcttggatggtggctttgtt

SEQ ID NO: 4170528 - DNA, 25 bp, Homo sapien
cctatagcgggatgaacagattttg

SEQ ID NO: 4170529 - DNA, 25 bp, Homo sapien
catcactgaagcctatagcgggatg

SEQ ID NO: 4170530 - DNA, 25 bp, Homo sapien
tccttgtcttggatggtggctttgt

SEQ ID NO: 4170531 - DNA, 25 bp, Homo sapien
ctggaaaggaaagagagtaaggatt

SEQ ID NO: 4170532 - DNA, 25 bp, Homo sapien
tggaaaggaaagagagtaaggatta

SEQ ID NO: 4170533 - DNA, 25 bp, Homo sapien
ttgcatgtagccaaagattcagtct

SEQ ID NO: 4170534 - DNA, 25 bp, Homo sapien
tctggttgtcaactggtgatcttgc

SEQ ID NO: 4170535 - DNA, 25 bp, Homo sapien
tccctatggattgttaagggccctg

SEQ ID NO: 4170536 - DNA, 25 bp, Homo sapien
tgtggcgcctgtcactagcagtcaa

SEQ ID NO: 4170537 - DNA, 25 bp, Homo sapien
aacgtggaggagatatgattcctgc

SEQ ID NO: 4170538 - DNA, 25 bp, Homo sapien
taggcattgaactgaacgtggagga

SEQ ID NO: 4170539 - DNA, 25 bp, Homo sapien
atgcattaggcattgaactgaacgt

SEQ ID NO: 4170540 - DNA, 25 bp, Homo sapien
gaacgtggaggagatatgattcctg

SEQ ID NO: 4170541 - DNA, 25 bp, Homo sapien
gatgaggtttctctgtgttggtcag

SEQ ID NO: 4170542 - DNA, 25 bp, Homo sapien
atgaggtttctctgtgttggtcaga

SEQ ID NO: 4170543 - DNA, 25 bp, Homo sapien
atggagtttcactcttgttgctcag

SEQ ID NO: 4170544 - DNA, 25 bp, Homo sapien
caccgcgcccggcctgaactctttt

SEQ ID NO: 4170545 - DNA, 25 bp, Homo sapien
gatgagtcgatagcaaatctgaccc

SEQ ID NO: 4170546 - DNA, 25 bp, Homo sapien
taaacacatttctgggatttcgctg

SEQ ID NO: 4170547 - DNA, 25 bp, Homo sapien
tgtacccagtagtgatgaaaagaga

SEQ ID NO: 4170548 - DNA, 25 bp, Homo sapien
tctccttagatccagaacagtctcc

SEQ ID NO: 4170549 - DNA, 25 bp, Homo sapien
ggtgggcctgggctccttttgatca

SEQ ID NO: 4170550 - DNA, 25 bp, Homo sapien
ggcctcttcattcccacagttaagg

SEQ ID NO: 4170551 - DNA, 25 bp, Homo sapien
gggctccttttgatcatgggcctct

SEQ ID NO: 4170552 - DNA, 25 bp, Homo sapien
tcaagtttccaggttggtgggcctg

SEQ ID NO: 4170553 - DNA, 25 bp, Homo sapien
gtgatctgatatctcctgggttaga

SEQ ID NO: 4170554 - DNA, 25 bp, Homo sapien
atgtgatctgatatctcctgggtta

SEQ ID NO: 4170555 - DNA, 25 bp, Homo sapien
gatatatagacagattagtaactaa

SEQ ID NO: 4170556 - DNA, 25 bp, Homo sapien
tctcctgggttagatatatagacag

SEQ ID NO: 4170557 - DNA, 25 bp, Homo sapien
gcatttaaagtccaacctgcatccc

SEQ ID NO: 4170558 - DNA, 25 bp, Homo sapien
tattagaactgatttgtgcatttaa

SEQ ID NO: 4170559 - DNA, 25 bp, Homo sapien
tttgtgcatttaaagtccaacctgc

SEQ ID NO: 4170560 - DNA, 25 bp, Homo sapien
tttaaagtccaacctgcatccccat

SEQ ID NO: 4170561 - DNA, 25 bp, Homo sapien
aatacagttaaccaaatagcagtca

SEQ ID NO: 4170562 - DNA, 25 bp, Homo sapien
atacagttaaccaaatagcagtcat

SEQ ID NO: 4170563 - DNA, 25 bp, Homo sapien
ttccaatctcattactaaagtctgt

SEQ ID NO: 4170564 - DNA, 25 bp, Homo sapien
gagcatttacagctttccggagagt

SEQ ID NO: 4170565 - DNA, 25 bp, Homo sapien
tctcattactaaagtctgttctgag

SEQ ID NO: 4170566 - DNA, 25 bp, Homo sapien
ccggagagtctgagtttggctgaat

SEQ ID NO: 4170567 - DNA, 25 bp, Homo sapien
tgctgtcatcctgatcatctgcatt

SEQ ID NO: 4170568 - DNA, 25 bp, Homo sapien
taacctgcaggctagggcctatttc

SEQ ID NO: 4170569 - DNA, 25 bp, Homo sapien
tcagtgtttaaagtgtaacctgcag

SEQ ID NO: 4170570 - DNA, 25 bp, Homo sapien
tctccgtgttgctttgacttggtac

SEQ ID NO: 4170571 - DNA, 25 bp, Homo sapien
gtaaacttttgcaatccagaggcta

SEQ ID NO: 4170572 - DNA, 25 bp, Homo sapien
ttgcaatccagaggctagagacctc

SEQ ID NO: 4170573 - DNA, 25 bp, Homo sapien
cttttgcaatccagaggctagagac

SEQ ID NO: 4170574 - DNA, 25 bp, Homo sapien
gcaatccagaggctagagacctctt

SEQ ID NO: 4170575 - DNA, 25 bp, Homo sapien
gcagccacggctgaatcgagtcttt

SEQ ID NO: 4170576 - DNA, 25 bp, Homo sapien
gatctttggagtgacttctgccaca

SEQ ID NO: 4170577 - DNA, 25 bp, Homo sapien
tgagggcaccgtgctgatgagcacc

SEQ ID NO: 4170578 - DNA, 25 bp, Homo sapien
ctatcaagggtagcccatgtggttc

SEQ ID NO: 4170579 - DNA, 25 bp, Homo sapien
ttgtttctgcccctaccttctctta

SEQ ID NO: 4170580 - DNA, 25 bp, Homo sapien
tgtttctgcccctaccttctcttac

SEQ ID NO: 4170581 - DNA, 25 bp, Homo sapien
tttctgcccctaccttctcttactc

SEQ ID NO: 4170582 - DNA, 25 bp, Homo sapien
tctcaataccagctagccttctcat

SEQ ID NO: 4170583 - DNA, 25 bp, Homo sapien
ttcagattgataacactctcaatac

SEQ ID NO: 4170584 - DNA, 25 bp, Homo sapien
gcttttttatccgtttctgtgccca

SEQ ID NO: 4170585 - DNA, 25 bp, Homo sapien
acaggcttttttatccgtttctgtg

SEQ ID NO: 4170586 - DNA, 25 bp, Homo sapien
gaagtactagtgctctgcagaagtt

SEQ ID NO: 4170587 - DNA, 25 bp, Homo sapien
ttatcaccatcccagttttgagaat

SEQ ID NO: 4170588 - DNA, 25 bp, Homo sapien
gttttgagaatatcctactctgttc

SEQ ID NO: 4170589 - DNA, 25 bp, Homo sapien
agaagtactagtgctctgcagaagt

SEQ ID NO: 4170590 - DNA, 25 bp, Homo sapien
aattctgttcaaggttggctctggt

SEQ ID NO: 4170591 - DNA, 25 bp, Homo sapien
tggtaatatgggctaaggatgcaat

SEQ ID NO: 4170592 - DNA, 25 bp, Homo sapien
gaggtaaatttcatccacactttgg

SEQ ID NO: 4170593 - DNA, 25 bp, Homo sapien
tgtgacctattgagagcaggatgca

SEQ ID NO: 4170594 - DNA, 25 bp, Homo sapien
tagagcgagtgtaatataaggatca

SEQ ID NO: 4170595 - DNA, 25 bp, Homo sapien
agccatgctttgttctgcatgagtg

SEQ ID NO: 4170596 - DNA, 25 bp, Homo sapien
tgcatgagtgttttaatagagcgag

SEQ ID NO: 4170597 - DNA, 25 bp, Homo sapien
aatcagtacagccatgctttgttct

SEQ ID NO: 4170598 - DNA, 25 bp, Homo sapien
cagtgttaaccttcctccatcattg

SEQ ID NO: 4170599 - DNA, 25 bp, Homo sapien
ctcagtgttaaccttcctccatcat

SEQ ID NO: 4170600 - DNA, 25 bp, Homo sapien
tcagtgttaaccttcctccatcatt

SEQ ID NO: 4170601 - DNA, 25 bp, Homo sapien
ttctcccttctcctttccgctagca

SEQ ID NO: 4170602 - DNA, 25 bp, Homo sapien
tttgtacctgctctgcattcttccc

SEQ ID NO: 4170603 - DNA, 25 bp, Homo sapien
gcattcttcccttgttctcccttct

SEQ ID NO: 4170604 - DNA, 25 bp, Homo sapien
ctttgtacctgctctgcattcttcc

SEQ ID NO: 4170605 - DNA, 25 bp, Homo sapien
acttgctgtagattataagtgccct

SEQ ID NO: 4170606 - DNA, 25 bp, Homo sapien
gtgcccttaatatctccagtatctc

SEQ ID NO: 4170607 - DNA, 25 bp, Homo sapien
tctccagtatctccacagagaattt

SEQ ID NO: 4170608 - DNA, 25 bp, Homo sapien
tgctgtagattataagtgcccttaa

SEQ ID NO: 4170609 - DNA, 25 bp, Homo sapien
tatgcatcctgctaagcctcttctg

SEQ ID NO: 4170610 - DNA, 25 bp, Homo sapien
catgttctccatatcagaagatgta

SEQ ID NO: 4170611 - DNA, 25 bp, Homo sapien
tttcctcagtgagtgctttcatgtt

SEQ ID NO: 4170612 - DNA, 25 bp, Homo sapien
ctcagtgagtgctttcatgttctcc

SEQ ID NO: 4170613 - DNA, 25 bp, Homo sapien
tgcattgtgccgagtaagtacctag

SEQ ID NO: 4170614 - DNA, 25 bp, Homo sapien
tttgatacttgcataacagtgtgag

SEQ ID NO: 4170615 - DNA, 25 bp, Homo sapien
tgggattattatgtaatggttacac

SEQ ID NO: 4170616 - DNA, 25 bp, Homo sapien
tgtaatggttacacagtttgaatat

SEQ ID NO: 4170617 - DNA, 25 bp, Homo sapien
tctcgcctgcctccatataagacat

SEQ ID NO: 4170618 - DNA, 25 bp, Homo sapien
aatgaatacatcctgtttaaaccta

SEQ ID NO: 4170619 - DNA, 25 bp, Homo sapien
taatcttcgtgtgttgtgtgaggca

SEQ ID NO: 4170620 - DNA, 25 bp, Homo sapien
tagctcccataatcttcgtgtgttg

SEQ ID NO: 4170621 - DNA, 25 bp, Homo sapien
catgtatcccaaaaggcaatttgaa

SEQ ID NO: 4170622 - DNA, 25 bp, Homo sapien
caatttgaaagcaccgttctctgag

SEQ ID NO: 4170623 - DNA, 25 bp, Homo sapien
tggctctaaatgcaccccttcatgt

SEQ ID NO: 4170624 - DNA, 25 bp, Homo sapien
tcaggttggctctaaatgcacccct

SEQ ID NO: 4170625 - DNA, 25 bp, Homo sapien
ctcattgactttacacttctttttc

SEQ ID NO: 4170626 - DNA, 25 bp, Homo sapien
tggcactttgtgtatgttgcccact

SEQ ID NO: 4170627 - DNA, 25 bp, Homo sapien
ttgcatctggtgaaatgaaggagac

SEQ ID NO: 4170628 - DNA, 25 bp, Homo sapien
gattgcatctggtgaaatgaaggag

SEQ ID NO: 4170629 - DNA, 25 bp, Homo sapien
tttgtgtatgttgcccactgagcat

SEQ ID NO: 4170630 - DNA, 25 bp, Homo sapien
tatgtagtcgccaacagtgagttgg

SEQ ID NO: 4170631 - DNA, 25 bp, Homo sapien
gaggagcactattcatatcaaagac

SEQ ID NO: 4170632 - DNA, 25 bp, Homo sapien
tcaaagacaactggtcctacttcca

SEQ ID NO: 4170633 - DNA, 25 bp, Homo sapien
tattttttgagtcctggcgcaaagt

SEQ ID NO: 4170634 - DNA, 25 bp, Homo sapien
ctgcagacgtttggagggggtgtgc

SEQ ID NO: 4170635 - DNA, 25 bp, Homo sapien
gtgcacatgtctgaatggagttgga

SEQ ID NO: 4170636 - DNA, 25 bp, Homo sapien
cataaggttcctgatatggtgcaca

SEQ ID NO: 4170637 - DNA, 25 bp, Homo sapien
aaacaacaccagacttcagtgcatt

SEQ ID NO: 4170638 - DNA, 25 bp, Homo sapien
gaaagtgctgcattgatgttgagga

SEQ ID NO: 4170639 - DNA, 25 bp, Homo sapien
tctatcagcttgactgtcatacata

SEQ ID NO: 4170640 - DNA, 25 bp, Homo sapien
ttatctatcagcttgactgtcatac

SEQ ID NO: 4170641 - DNA, 25 bp, Homo sapien
ctatcagcttgactgtcatacatac

SEQ ID NO: 4170642 - DNA, 25 bp, Homo sapien
tatctatcagcttgactgtcataca

SEQ ID NO: 4170643 - DNA, 25 bp, Homo sapien
gaaactcagaacctgtaggaacgcc

SEQ ID NO: 4170644 - DNA, 25 bp, Homo sapien
taagcattgaatgcatcactttttt

SEQ ID NO: 4170645 - DNA, 25 bp, Homo sapien
accctgggtatttggccagagggca

SEQ ID NO: 4170646 - DNA, 25 bp, Homo sapien
ccatcagctatgtcaccctgggtat

SEQ ID NO: 4170647 - DNA, 25 bp, Homo sapien
gataacagctgaattccggtcttct

SEQ ID NO: 4170648 - DNA, 25 bp, Homo sapien
tgtcataagtttcctacttgagcag

SEQ ID NO: 4170649 - DNA, 25 bp, Homo sapien
cataggcactgttggaagggcttgt

SEQ ID NO: 4170650 - DNA, 25 bp, Homo sapien
tcctacttgagcagttataagccat

SEQ ID NO: 4170651 - DNA, 25 bp, Homo sapien
tcaatatagcaagttaatcagacaa

SEQ ID NO: 4170652 - DNA, 25 bp, Homo sapien
ggatcgttgtttcccttcttctaga

SEQ ID NO: 4170653 - DNA, 25 bp, Homo sapien
taggtgcatttgttccctaagacaa

SEQ ID NO: 4170654 - DNA, 25 bp, Homo sapien
ttatagcttctaatcatgtcttgcc

SEQ ID NO: 4170655 - DNA, 25 bp, Homo sapien
cattatgtccattcgaagatgtcaa

SEQ ID NO: 4170656 - DNA, 25 bp, Homo sapien
gaataattctatgactaccctctgc

SEQ ID NO: 4170657 - DNA, 25 bp, Homo sapien
ccattacatattagatcagggttca

SEQ ID NO: 4170658 - DNA, 25 bp, Homo sapien
ccctcatgattgtggagattgcaaa

SEQ ID NO: 4170659 - DNA, 25 bp, Homo sapien
ttctctgtttggacgagagctattg

SEQ ID NO: 4170660 - DNA, 25 bp, Homo sapien
tctgtttggacgagagctattgtaa

SEQ ID NO: 4170661 - DNA, 25 bp, Homo sapien
tgtttggacgagagctattgtaaga

SEQ ID NO: 4170662 - DNA, 25 bp, Homo sapien
tttggacgagagctattgtaagaat

SEQ ID NO: 4170663 - DNA, 25 bp, Homo sapien
agcaggaggtagccgccctgggcag

SEQ ID NO: 4170664 - DNA, 25 bp, Homo sapien
gaagcaggaggtagccgccctgggc

SEQ ID NO: 4170665 - DNA, 25 bp, Homo sapien
aagcaggaggtagccgccctgggca

SEQ ID NO: 4170666 - DNA, 25 bp, Homo sapien
ggctctttgtcattaaggtccactc

SEQ ID NO: 4170667 - DNA, 25 bp, Homo sapien
taaggtccactcttgtgatagtagc

SEQ ID NO: 4170668 - DNA, 25 bp, Homo sapien
ccacattggcagagaggagacttac

SEQ ID NO: 4170669 - DNA, 25 bp, Homo sapien
gtagcacattatcctgctgattgga

SEQ ID NO: 4170670 - DNA, 25 bp, Homo sapien
gcagtgaatgaggaatgacaccagc

SEQ ID NO: 4170671 - DNA, 25 bp, Homo sapien
gaggtggcagtgaatgaggaatgac

SEQ ID NO: 4170672 - DNA, 25 bp, Homo sapien
gtggcagtgaatgaggaatgacacc

SEQ ID NO: 4170673 - DNA, 25 bp, Homo sapien
aggaggtggcagtgaatgaggaatg

SEQ ID NO: 4170674 - DNA, 25 bp, Homo sapien
gaggctataggtggtctgcagaagg

SEQ ID NO: 4170675 - DNA, 25 bp, Homo sapien
agtgtgaggctataggtggtctgca

SEQ ID NO: 4170676 - DNA, 25 bp, Homo sapien
tgtgaggctataggtggtctgcaga

SEQ ID NO: 4170677 - DNA, 25 bp, Homo sapien
gtctgcagaagggttgctaaggctt

SEQ ID NO: 4170678 - DNA, 25 bp, Homo sapien
gaacatctgttcaatgccaactctg

SEQ ID NO: 4170679 - DNA, 25 bp, Homo sapien
tatccttgttagcatcagctgcttc

SEQ ID NO: 4170680 - DNA, 25 bp, Homo sapien
tcttgggaacatctgttcaatgcca

SEQ ID NO: 4170681 - DNA, 25 bp, Homo sapien
gggtatttgcctcttgggaacatct

SEQ ID NO: 4170682 - DNA, 25 bp, Homo sapien
gaactggtttgagatgtaaattgct

SEQ ID NO: 4170683 - DNA, 25 bp, Homo sapien
gcagtttttatgtcccactgatgag

SEQ ID NO: 4170684 - DNA, 25 bp, Homo sapien
ttgctttcctttgattgaaccaggg

SEQ ID NO: 4170685 - DNA, 25 bp, Homo sapien
ggcaactgagttgattctgtataaa

SEQ ID NO: 4170686 - DNA, 25 bp, Homo sapien
attctgccagtaagcatgtcacaat

SEQ ID NO: 4170687 - DNA, 25 bp, Homo sapien
gattctgccagtaagcatgtcacaa

SEQ ID NO: 4170688 - DNA, 25 bp, Homo sapien
ggattctgccagtaagcatgtcaca

SEQ ID NO: 4170689 - DNA, 25 bp, Homo sapien
ttttaatccttgtgttcccagtatc

SEQ ID NO: 4170690 - DNA, 25 bp, Homo sapien
ctggaaacctcttgagtacaagggt

SEQ ID NO: 4170691 - DNA, 25 bp, Homo sapien
cctcttgagtacaagggttgtggtt

SEQ ID NO: 4170692 - DNA, 25 bp, Homo sapien
tgtactggaaacctcttgagtacaa

SEQ ID NO: 4170693 - DNA, 25 bp, Homo sapien
tctcagaacttcttttagcaatcta

SEQ ID NO: 4170694 - DNA, 25 bp, Homo sapien
gattcaattactgggcctcagtatc

SEQ ID NO: 4170695 - DNA, 25 bp, Homo sapien
gtttctcatgatattcagccttaga

SEQ ID NO: 4170696 - DNA, 25 bp, Homo sapien
cactcacacaggataacatgatagt

SEQ ID NO: 4170697 - DNA, 25 bp, Homo sapien
tatgtctaagcacagctcatcttca

SEQ ID NO: 4170698 - DNA, 25 bp, Homo sapien
tcattgatgatacctccagaatagg

SEQ ID NO: 4170699 - DNA, 25 bp, Homo sapien
ccaaataatggtaagagtgctacag

SEQ ID NO: 4170700 - DNA, 25 bp, Homo sapien
gtgctacagaggcaaagtcattgat

SEQ ID NO: 4170701 - DNA, 25 bp, Homo sapien
gtctgtgcttattaagctgtgtgac

SEQ ID NO: 4170702 - DNA, 25 bp, Homo sapien
ttgcaggtctgtgcttattaagctg

SEQ ID NO: 4170703 - DNA, 25 bp, Homo sapien
ttaatattaacttgcaggtctgtgc

SEQ ID NO: 4170704 - DNA, 25 bp, Homo sapien
taacttgcaggtctgtgcttattaa

SEQ ID NO: 4170705 - DNA, 25 bp, Homo sapien
tgatgacgaatatgacaataagggt

SEQ ID NO: 4170706 - DNA, 25 bp, Homo sapien
cattgttactgggacggccgtctgt

SEQ ID NO: 4170707 - DNA, 25 bp, Homo sapien
ttttatgtaatagctcctagttgga

SEQ ID NO: 4170708 - DNA, 25 bp, Homo sapien
ctctattgagagtggtgatgacgaa

SEQ ID NO: 4170709 - DNA, 25 bp, Homo sapien
ctgtacatgaaaaaggacatcaata

SEQ ID NO: 4170710 - DNA, 25 bp, Homo sapien
tgtacatgaaaaaggacatcaataa

SEQ ID NO: 4170711 - DNA, 25 bp, Homo sapien
ctggcggtgaatggcatagctagat

SEQ ID NO: 4170712 - DNA, 25 bp, Homo sapien
cagttcttcttgaagcacacgagga

SEQ ID NO: 4170713 - DNA, 25 bp, Homo sapien
atgggggtagtcacggcagtcattc

SEQ ID NO: 4170714 - DNA, 25 bp, Homo sapien
cttgaagcacacgaggagagcagag

SEQ ID NO: 4170715 - DNA, 25 bp, Homo sapien
tagtggcaccttcttagcttactgc

SEQ ID NO: 4170716 - DNA, 25 bp, Homo sapien
gtgtagtggcaccttcttagcttac

SEQ ID NO: 4170717 - DNA, 25 bp, Homo sapien
gagtgtagtggcaccttcttagctt

SEQ ID NO: 4170718 - DNA, 25 bp, Homo sapien
gtagtggcaccttcttagcttactg

SEQ ID NO: 4170719 - DNA, 25 bp, Homo sapien
tactgagtattgtccttcagtacaa

SEQ ID NO: 4170720 - DNA, 25 bp, Homo sapien
gagtattgtccttcagtacaataca

SEQ ID NO: 4170721 - DNA, 25 bp, Homo sapien
tattgtccttcagtacaatacagag

SEQ ID NO: 4170722 - DNA, 25 bp, Homo sapien
gtccttcagtacaatacagagccat

SEQ ID NO: 4170723 - DNA, 25 bp, Homo sapien
gaacttggacccctgaattgtagta

SEQ ID NO: 4170724 - DNA, 25 bp, Homo sapien
tggacccctgaattgtagtaaccaa

SEQ ID NO: 4170725 - DNA, 25 bp, Homo sapien
tcagggaacttggacccctgaattg

SEQ ID NO: 4170726 - DNA, 25 bp, Homo sapien
ttggacccctgaattgtagtaacca

SEQ ID NO: 4170727 - DNA, 25 bp, Homo sapien
cttatcactgacaagttcacacttc

SEQ ID NO: 4170728 - DNA, 25 bp, Homo sapien
gattgtgcaatctgtttggctgcta

SEQ ID NO: 4170729 - DNA, 25 bp, Homo sapien
caagatcgctagttgagattgtgca

SEQ ID NO: 4170730 - DNA, 25 bp, Homo sapien
tccaaattatgtgggcattctgcag

SEQ ID NO: 4170731 - DNA, 25 bp, Homo sapien
gatcgagaccacttactcatactaa

SEQ ID NO: 4170732 - DNA, 25 bp, Homo sapien
actaatcattgcacacagaaaatac

SEQ ID NO: 4170733 - DNA, 25 bp, Homo sapien
tgtattcagtgatcgagaccactta

SEQ ID NO: 4170734 - DNA, 25 bp, Homo sapien
tcaagcacaccccatgtattcagtg

SEQ ID NO: 4170735 - DNA, 25 bp, Homo sapien
cgaagtccggatcccaagagcatgt

SEQ ID NO: 4170736 - DNA, 25 bp, Homo sapien
caaacaaggtttggagcgaagtccg

SEQ ID NO: 4170737 - DNA, 25 bp, Homo sapien
gcagatgggaactaatgaggacaca

SEQ ID NO: 4170738 - DNA, 25 bp, Homo sapien
gctgcttggcccctttttgtacaaa

SEQ ID NO: 4170739 - DNA, 25 bp, Homo sapien
cgacgtggtgttagcattccttctt

SEQ ID NO: 4170740 - DNA, 25 bp, Homo sapien
atccgacgtggtgttagcattcctt

SEQ ID NO: 4170741 - DNA, 25 bp, Homo sapien
gtcaaagtgtgttgagttgaggcat

SEQ ID NO: 4170742 - DNA, 25 bp, Homo sapien
ttgtcaaagtgtgttgagttgaggc

SEQ ID NO: 4170743 - DNA, 25 bp, Homo sapien
aactgtgtgggaatctgaagacacg

SEQ ID NO: 4170744 - DNA, 25 bp, Homo sapien
gacacgccacttaacaactcaggat

SEQ ID NO: 4170745 - DNA, 25 bp, Homo sapien
ccaatgcgagtgaaacaactctagc

SEQ ID NO: 4170746 - DNA, 25 bp, Homo sapien
gaaacaactctagcaattacatgaa

SEQ ID NO: 4170747 - DNA, 25 bp, Homo sapien
tctgcatctggaatggtgctaatag

SEQ ID NO: 4170748 - DNA, 25 bp, Homo sapien
ctgcatctggaatggtgctaatagt

SEQ ID NO: 4170749 - DNA, 25 bp, Homo sapien
ctgaagtacagatgtaaacaagctt

SEQ ID NO: 4170750 - DNA, 25 bp, Homo sapien
gaagtacagatgtaaacaagcttct

SEQ ID NO: 4170751 - DNA, 25 bp, Homo sapien
tacagatgtaaacaagcttcttaac

SEQ ID NO: 4170752 - DNA, 25 bp, Homo sapien
agtacagatgtaaacaagcttctta

SEQ ID NO: 4170753 - DNA, 25 bp, Homo sapien
tcaggctctcttaaccatgtagtag

SEQ ID NO: 4170754 - DNA, 25 bp, Homo sapien
cctggatagcactgatgcactgcat

SEQ ID NO: 4170755 - DNA, 25 bp, Homo sapien
actgcatactgtgtagttggccacc

SEQ ID NO: 4170756 - DNA, 25 bp, Homo sapien
gtgtgattcgaaatagcttagtgcc

SEQ ID NO: 4170757 - DNA, 25 bp, Homo sapien
ctcgtctttctgctgttgtagcttg

SEQ ID NO: 4170758 - DNA, 25 bp, Homo sapien
tcgtctttctgctgttgtagcttgt

SEQ ID NO: 4170759 - DNA, 25 bp, Homo sapien
cgtctttctgctgttgtagcttgtt

SEQ ID NO: 4170760 - DNA, 25 bp, Homo sapien
gtctttctgctgttgtagcttgttt

SEQ ID NO: 4170761 - DNA, 25 bp, Homo sapien
tctttgctcagggttgtggttgctg

SEQ ID NO: 4170762 - DNA, 25 bp, Homo sapien
caaaatcttccttgcggtgatctta

SEQ ID NO: 4170763 - DNA, 25 bp, Homo sapien
tgtgaggtcgcccttgccactgctc

SEQ ID NO: 4170764 - DNA, 25 bp, Homo sapien
ggttggctgccttggcgtctttgct

SEQ ID NO: 4170765 - DNA, 25 bp, Homo sapien
tcctggggttactcttctgtatggt

SEQ ID NO: 4170766 - DNA, 25 bp, Homo sapien
tctccgtgtcctacactgctaaggt

SEQ ID NO: 4170767 - DNA, 25 bp, Homo sapien
agtctctccgtgtcctacactgcta

SEQ ID NO: 4170768 - DNA, 25 bp, Homo sapien
cgtgtcctacactgctaaggtactt

SEQ ID NO: 4170769 - DNA, 25 bp, Homo sapien
tgctatcaactggactctacagggg

SEQ ID NO: 4170770 - DNA, 25 bp, Homo sapien
ctctacaggggcctgtaacatttac

SEQ ID NO: 4170771 - DNA, 25 bp, Homo sapien
gactctacaggggcctgtaacattt

SEQ ID NO: 4170772 - DNA, 25 bp, Homo sapien
gctatcaactggactctacaggggc

SEQ ID NO: 4170773 - DNA, 25 bp, Homo sapien
ccagttgttagcaccctccgtcgct

SEQ ID NO: 4170774 - DNA, 25 bp, Homo sapien
tgtgctcctgcaccccagttgttag

SEQ ID NO: 4170775 - DNA, 25 bp, Homo sapien
cttgtgctcctgcaccccagttgtt

SEQ ID NO: 4170776 - DNA, 25 bp, Homo sapien
ccccagttgttagcaccctccgtcg

SEQ ID NO: 4170777 - DNA, 25 bp, Homo sapien
accatacaaatatcctgcctcactg

SEQ ID NO: 4170778 - DNA, 25 bp, Homo sapien
aaccatacaaatatcctgcctcact

SEQ ID NO: 4170779 - DNA, 25 bp, Homo sapien
aattcttgactggtggactggctgc

SEQ ID NO: 4170780 - DNA, 25 bp, Homo sapien
ttgaggtcgctgctgatattgggtc

SEQ ID NO: 4170781 - DNA, 25 bp, Homo sapien
ttagcagcaccgatgttgaggtcgc

SEQ ID NO: 4170782 - DNA, 25 bp, Homo sapien
ttactcaaccttcttctgcctcggg

SEQ ID NO: 4170783 - DNA, 25 bp, Homo sapien
tcatgatttctccttattggatttt

SEQ ID NO: 4170784 - DNA, 25 bp, Homo sapien
catgatttctccttattggattttg

SEQ ID NO: 4170785 - DNA, 25 bp, Homo sapien
atgatttctccttattggattttgc

SEQ ID NO: 4170786 - DNA, 25 bp, Homo sapien
atgaacaaagaagccctgttatgag

SEQ ID NO: 4170787 - DNA, 25 bp, Homo sapien
gttatgagacaagtattatttgaca

SEQ ID NO: 4170788 - DNA, 25 bp, Homo sapien
aagaagccctgttatgagacaagta

SEQ ID NO: 4170789 - DNA, 25 bp, Homo sapien
agacatggtgaatgaacaaagaagc

SEQ ID NO: 4170790 - DNA, 25 bp, Homo sapien
tattctctaggttaaaactagcgtg

SEQ ID NO: 4170791 - DNA, 25 bp, Homo sapien
aactagcgtgatgtgtttcataaca

SEQ ID NO: 4170792 - DNA, 25 bp, Homo sapien
gaaagttaatttaggcaacagcact

SEQ ID NO: 4170793 - DNA, 25 bp, Homo sapien
ggaaggtgactcttttcttatagaa

SEQ ID NO: 4170794 - DNA, 25 bp, Homo sapien
tgccttcttaatggtggatgacttg

SEQ ID NO: 4170795 - DNA, 25 bp, Homo sapien
ctcaattctagcttgggttagggaa

SEQ ID NO: 4170796 - DNA, 25 bp, Homo sapien
gagtctacggtggagaaaattatct

SEQ ID NO: 4170797 - DNA, 25 bp, Homo sapien
gcatccaagatgagtcgtaaacagt

SEQ ID NO: 4170798 - DNA, 25 bp, Homo sapien
cccgggttcttgctattctcctgcc

SEQ ID NO: 4170799 - DNA, 25 bp, Homo sapien
tagtagacacgaggtttcaccgcgt

SEQ ID NO: 4170800 - DNA, 25 bp, Homo sapien
gtagacacgaggtttcaccgcgtta

SEQ ID NO: 4170801 - DNA, 25 bp, Homo sapien
gggttcttgctattctcctgcctta

SEQ ID NO: 4170802 - DNA, 25 bp, Homo sapien
ttttgccaactaatgttagaatctc

SEQ ID NO: 4170803 - DNA, 25 bp, Homo sapien
gccaactaatgttagaatctccttt

SEQ ID NO: 4170804 - DNA, 25 bp, Homo sapien
tttgccaactaatgttagaatctcc

SEQ ID NO: 4170805 - DNA, 25 bp, Homo sapien
aatttttgccaactaatgttagaat

SEQ ID NO: 4170806 - DNA, 25 bp, Homo sapien
aatgatctgttcatgtaatgacatg

SEQ ID NO: 4170807 - DNA, 25 bp, Homo sapien
ttaatgatctgttcatgtaatgaca

SEQ ID NO: 4170808 - DNA, 25 bp, Homo sapien
gttcatgtaatgacatgatgttcat

SEQ ID NO: 4170809 - DNA, 25 bp, Homo sapien
gatctgttcatgtaatgacatgatg

SEQ ID NO: 4170810 - DNA, 25 bp, Homo sapien
tcaaacattccgtttagcagtggga

SEQ ID NO: 4170811 - DNA, 25 bp, Homo sapien
tgaatacctccaccttaggatgcat

SEQ ID NO: 4170812 - DNA, 25 bp, Homo sapien
aaatgaatacctccaccttaggatg

SEQ ID NO: 4170813 - DNA, 25 bp, Homo sapien
aaactctaataatatatccaaatcc

SEQ ID NO: 4170814 - DNA, 25 bp, Homo sapien
ccaaaatgaatacctccaccttagg

SEQ ID NO: 4170815 - DNA, 25 bp, Homo sapien
aggtacagttatgtgttttctgatt

SEQ ID NO: 4170816 - DNA, 25 bp, Homo sapien
ggtacagttatgtgttttctgattt

SEQ ID NO: 4170817 - DNA, 25 bp, Homo sapien
tgtgttttctgatttttgtgctcat

SEQ ID NO: 4170818 - DNA, 25 bp, Homo sapien
ttatgtgttttctgatttttgtgct

SEQ ID NO: 4170819 - DNA, 25 bp, Homo sapien
ttgccttctcattggaggtctgaag

SEQ ID NO: 4170820 - DNA, 25 bp, Homo sapien
agcttggaaaaaagtatgcctgata

SEQ ID NO: 4170821 - DNA, 25 bp, Homo sapien
ccttctcattggaggtctgaagctt

SEQ ID NO: 4170822 - DNA, 25 bp, Homo sapien
gcttggaaaaaagtatgcctgatac

SEQ ID NO: 4170823 - DNA, 25 bp, Homo sapien
tcaatggtgcattgtggcagtttgc

SEQ ID NO: 4170824 - DNA, 25 bp, Homo sapien
caatgctgacactttgaagagttgc

SEQ ID NO: 4170825 - DNA, 25 bp, Homo sapien
ttcattgatagtgtatgggagagag

SEQ ID NO: 4170826 - DNA, 25 bp, Homo sapien
gaagagttgccctgttattgcagct

SEQ ID NO: 4170827 - DNA, 25 bp, Homo sapien
ctggatgcacaagaacagtcatcat

SEQ ID NO: 4170828 - DNA, 25 bp, Homo sapien
gaacagtcatcatagagagacaggc

SEQ ID NO: 4170829 - DNA, 25 bp, Homo sapien
gcacaagaacagtcatcatagagag

SEQ ID NO: 4170830 - DNA, 25 bp, Homo sapien
catagagagacaggctctcagggtc

SEQ ID NO: 4170831 - DNA, 25 bp, Homo sapien
ggcattgttagtttcaataggctgc

SEQ ID NO: 4170832 - DNA, 25 bp, Homo sapien
ttcagagtttggatgatcctcttcg

SEQ ID NO: 4170833 - DNA, 25 bp, Homo sapien
tttggatgatcctcttcggcagcag

SEQ ID NO: 4170834 - DNA, 25 bp, Homo sapien
agcagcagcaggcattgttagtttc

SEQ ID NO: 4170835 - DNA, 25 bp, Homo sapien
cctaaattgatatcattagatggat

SEQ ID NO: 4170836 - DNA, 25 bp, Homo sapien
gatatcattagatggatttaagttg

SEQ ID NO: 4170837 - DNA, 25 bp, Homo sapien
ttttcctcctaaattgatatcatta

SEQ ID NO: 4170838 - DNA, 25 bp, Homo sapien
tatcattagatggatttaagttgga

SEQ ID NO: 4170839 - DNA, 25 bp, Homo sapien
tttgtagaacgtcccctttagcagc

SEQ ID NO: 4170840 - DNA, 25 bp, Homo sapien
tttagcagcagagcatgaattggaa

SEQ ID NO: 4170841 - DNA, 25 bp, Homo sapien
cagtgatttatttaggctccacagg

SEQ ID NO: 4170842 - DNA, 25 bp, Homo sapien
cctgtagggcattttttgaatatcc

SEQ ID NO: 4170843 - DNA, 25 bp, Homo sapien
cttctttcacattcccacagcaatt

SEQ ID NO: 4170844 - DNA, 25 bp, Homo sapien
gctccttctttcacattcccacagc

SEQ ID NO: 4170845 - DNA, 25 bp, Homo sapien
tgaggtgctccttctttcacattcc

SEQ ID NO: 4170846 - DNA, 25 bp, Homo sapien
tccttctttcacattcccacagcaa

SEQ ID NO: 4170847 - DNA, 25 bp, Homo sapien
tttctgtgaattactgttgtaatta

SEQ ID NO: 4170848 - DNA, 25 bp, Homo sapien
ttgtgatttgttgttgcaattcctt

SEQ ID NO: 4170849 - DNA, 25 bp, Homo sapien
tccttttatagtatgaacttctttc

SEQ ID NO: 4170850 - DNA, 25 bp, Homo sapien
gaattactgttgtaattaaattgtg

SEQ ID NO: 4170851 - DNA, 25 bp, Homo sapien
ccagtgttgcaatcagcagtccaga

SEQ ID NO: 4170852 - DNA, 25 bp, Homo sapien
tctgcacttgcataaccagtgttgc

SEQ ID NO: 4170853 - DNA, 25 bp, Homo sapien
gcagtccagagcctagataccaaga

SEQ ID NO: 4170854 - DNA, 25 bp, Homo sapien
tgcagaccctgttggagcaccattg

SEQ ID NO: 4170855 - DNA, 25 bp, Homo sapien
gaaagaacactggattgagaggcat

SEQ ID NO: 4170856 - DNA, 25 bp, Homo sapien
ctaccaaatagggaaggctgtcatc

SEQ ID NO: 4170857 - DNA, 25 bp, Homo sapien
tagtaacgttttccagcatagcggt

SEQ ID NO: 4170858 - DNA, 25 bp, Homo sapien
ggtcagtccaggcattaaagcactt

SEQ ID NO: 4170859 - DNA, 25 bp, Homo sapien
ccacattttcttttcgatcaagata

SEQ ID NO: 4170860 - DNA, 25 bp, Homo sapien
cccctttgtttcatgacagaaatta

SEQ ID NO: 4170861 - DNA, 25 bp, Homo sapien
ttaagacggttcagcataacattat

SEQ ID NO: 4170862 - DNA, 25 bp, Homo sapien
cgatcaagataatttcgatatgctt

SEQ ID NO: 4170863 - DNA, 25 bp, Homo sapien
ccccattagaaattcatctctcatc

SEQ ID NO: 4170864 - DNA, 25 bp, Homo sapien
tcccccattagaaattcatctctca

SEQ ID NO: 4170865 - DNA, 25 bp, Homo sapien
tcctcttcccccattagaaattcat

SEQ ID NO: 4170866 - DNA, 25 bp, Homo sapien
tcttcccccattagaaattcatctc

SEQ ID NO: 4170867 - DNA, 25 bp, Homo sapien
gctttgtttggcttacatttgttga

SEQ ID NO: 4170868 - DNA, 25 bp, Homo sapien
tttggcttacatttgttgatgatgt

SEQ ID NO: 4170869 - DNA, 25 bp, Homo sapien
tgtttggcttacatttgttgatgat

SEQ ID NO: 4170870 - DNA, 25 bp, Homo sapien
taactgctttgtttggcttacattt

SEQ ID NO: 4170871 - DNA, 25 bp, Homo sapien
cttgggctttagaggtttgtgaact

SEQ ID NO: 4170872 - DNA, 25 bp, Homo sapien
cattgggacgaagagcttgggcttt

SEQ ID NO: 4170873 - DNA, 25 bp, Homo sapien
tggctgctgtgacctataaacaact

SEQ ID NO: 4170874 - DNA, 25 bp, Homo sapien
tgagaaagcaatagacattgggacg

SEQ ID NO: 4170875 - DNA, 25 bp, Homo sapien
cattccgcgggaatcaagcgtgacc

SEQ ID NO: 4170876 - DNA, 25 bp, Homo sapien
cataatctgctttttccggcaggat

SEQ ID NO: 4170877 - DNA, 25 bp, Homo sapien
gagtcgttggtacttcaggcgttca

SEQ ID NO: 4170878 - DNA, 25 bp, Homo sapien
ttaccacccaggatattgaattctg

SEQ ID NO: 4170879 - DNA, 25 bp, Homo sapien
ttggcctctgctgctgccactctca

SEQ ID NO: 4170880 - DNA, 25 bp, Homo sapien
cctctgctgctgccactctcaggcc

SEQ ID NO: 4170881 - DNA, 25 bp, Homo sapien
cctctccatacctcccttggcctct

SEQ ID NO: 4170882 - DNA, 25 bp, Homo sapien
ggcctctgctgctgccactctcagg

SEQ ID NO: 4170883 - DNA, 25 bp, Homo sapien
tcttgtgggttgtttacagtctgtc

SEQ ID NO: 4170884 - DNA, 25 bp, Homo sapien
cagcttgagggcttgttatggccac

SEQ ID NO: 4170885 - DNA, 25 bp, Homo sapien
atcttcatcagaggttttggtttga

SEQ ID NO: 4170886 - DNA, 25 bp, Homo sapien
cctgtttgctggagtgaagtctggc

SEQ ID NO: 4170887 - DNA, 25 bp, Homo sapien
ctaagcatcttcgtggtgaccgttc

SEQ ID NO: 4170888 - DNA, 25 bp, Homo sapien
aagcatcttcgtggtgaccgttcat

SEQ ID NO: 4170889 - DNA, 25 bp, Homo sapien
gcatcttcgtggtgaccgttcattt

SEQ ID NO: 4170890 - DNA, 25 bp, Homo sapien
catcttcgtggtgaccgttcatttc

SEQ ID NO: 4170891 - DNA, 25 bp, Homo sapien
gatggaatgaaagagtgcccactag

SEQ ID NO: 4170892 - DNA, 25 bp, Homo sapien
tcagccagggctatcgtcatttcat

SEQ ID NO: 4170893 - DNA, 25 bp, Homo sapien
ttaactcaataggagagcctcagtc

SEQ ID NO: 4170894 - DNA, 25 bp, Homo sapien
catcaatgtgagcaacccaaaaagg

SEQ ID NO: 4170895 - DNA, 25 bp, Homo sapien
ttagtggtttacacatcaagcagtt

SEQ ID NO: 4170896 - DNA, 25 bp, Homo sapien
atgtggacatggcttaactgggtcc

SEQ ID NO: 4170897 - DNA, 25 bp, Homo sapien
gtggtttacacatcaagcagtttct

SEQ ID NO: 4170898 - DNA, 25 bp, Homo sapien
gatcaggaatgtggacatggcttaa

SEQ ID NO: 4170899 - DNA, 25 bp, Homo sapien
tggtctctttttccaacactctagt

SEQ ID NO: 4170900 - DNA, 25 bp, Homo sapien
gaagaagtgtggtattatcatcaca

SEQ ID NO: 4170901 - DNA, 25 bp, Homo sapien
cctggcttaaggtggtatttgtcag

SEQ ID NO: 4170902 - DNA, 25 bp, Homo sapien
taaagagtagacagtcatcaaaaca

SEQ ID NO: 4170903 - DNA, 25 bp, Homo sapien
ctggttcgatggtctctacacttta

SEQ ID NO: 4170904 - DNA, 25 bp, Homo sapien
tttaggtccactgcacctcttatcc

SEQ ID NO: 4170905 - DNA, 25 bp, Homo sapien
actgcacctcttatccctgaagaca

SEQ ID NO: 4170906 - DNA, 25 bp, Homo sapien
tctacactttaggtccactgcacct

SEQ ID NO: 4170907 - DNA, 25 bp, Homo sapien
tcagagcagagcttatatctgctcc

SEQ ID NO: 4170908 - DNA, 25 bp, Homo sapien
cttccccaataatgcataaacgctt

SEQ ID NO: 4170909 - DNA, 25 bp, Homo sapien
cccaataatgcataaacgctttcag

SEQ ID NO: 4170910 - DNA, 25 bp, Homo sapien
tgctcctgaaatattgcttgttgtc

SEQ ID NO: 4170911 - DNA, 25 bp, Homo sapien
tctctgcagacactatcactagcag

SEQ ID NO: 4170912 - DNA, 25 bp, Homo sapien
gcagacactatcactagcagtctga

SEQ ID NO: 4170913 - DNA, 25 bp, Homo sapien
cagtaaaaaggctggtaataattat

SEQ ID NO: 4170914 - DNA, 25 bp, Homo sapien
gacactatcactagcagtctgagcc

SEQ ID NO: 4170915 - DNA, 25 bp, Homo sapien
caactgggtggaatagtaatcctat

SEQ ID NO: 4170916 - DNA, 25 bp, Homo sapien
agtaatgggacaactgggtggaata

SEQ ID NO: 4170917 - DNA, 25 bp, Homo sapien
taatgggacaactgggtggaatagt

SEQ ID NO: 4170918 - DNA, 25 bp, Homo sapien
gggacaactgggtggaatagtaatc

SEQ ID NO: 4170919 - DNA, 25 bp, Homo sapien
tttacgtttgctttttacaacagca

SEQ ID NO: 4170920 - DNA, 25 bp, Homo sapien
accactgcatctccccccttttgta

SEQ ID NO: 4170921 - DNA, 25 bp, Homo sapien
caggcttcttatatgggtatatttt

SEQ ID NO: 4170922 - DNA, 25 bp, Homo sapien
catcagccaaataatgaacatagtg

SEQ ID NO: 4170923 - DNA, 25 bp, Homo sapien
tatttttgcctccagcctagtggga

SEQ ID NO: 4170924 - DNA, 25 bp, Homo sapien
tctgtacactgtcaagagacgctct

SEQ ID NO: 4170925 - DNA, 25 bp, Homo sapien
cagtgatgtatgaatccagactgca

SEQ ID NO: 4170926 - DNA, 25 bp, Homo sapien
gaaacatctttttgactcaagttgg

SEQ ID NO: 4170927 - DNA, 25 bp, Homo sapien
tcgcagaagtggatccttcagtctc

SEQ ID NO: 4170928 - DNA, 25 bp, Homo sapien
tcgtcgcagaagtggatccttcagt

SEQ ID NO: 4170929 - DNA, 25 bp, Homo sapien
ggagtcgtcgcagaagtggatcctt

SEQ ID NO: 4170930 - DNA, 25 bp, Homo sapien
agggagtcgtcgcagaagtggatcc

SEQ ID NO: 4170931 - DNA, 25 bp, Homo sapien
ggtttttctcaatctggttccatct

SEQ ID NO: 4170932 - DNA, 25 bp, Homo sapien
cagattctggtaattggtgggtatt

SEQ ID NO: 4170933 - DNA, 25 bp, Homo sapien
atggcaggcacagattctggtaatt

SEQ ID NO: 4170934 - DNA, 25 bp, Homo sapien
gacttctcttgtctggttcagccat

SEQ ID NO: 4170935 - DNA, 25 bp, Homo sapien
tttcatccgttctggtttcaggaga

SEQ ID NO: 4170936 - DNA, 25 bp, Homo sapien
cgtagatttgcagagtcatgtggaa

SEQ ID NO: 4170937 - DNA, 25 bp, Homo sapien
aggagaatataagttcagacgtaga

SEQ ID NO: 4170938 - DNA, 25 bp, Homo sapien
ctaatgagtttcatccgttctggtt

SEQ ID NO: 4170939 - DNA, 25 bp, Homo sapien
gacatgttaagcgttatttcatcca

SEQ ID NO: 4170940 - DNA, 25 bp, Homo sapien
tgtatgtgttaacattcaatggctt

SEQ ID NO: 4170941 - DNA, 25 bp, Homo sapien
cccagagcacaaacaatctgtgtca

SEQ ID NO: 4170942 - DNA, 25 bp, Homo sapien
tataggtccttaacaggtaatcgca

SEQ ID NO: 4170943 - DNA, 25 bp, Homo sapien
actgtgattgccaaatctgtgtcac

SEQ ID NO: 4170944 - DNA, 25 bp, Homo sapien
gaatatgatgtaactttcttgactg

SEQ ID NO: 4170945 - DNA, 25 bp, Homo sapien
tgccataactgtgattgccaaatct

SEQ ID NO: 4170946 - DNA, 25 bp, Homo sapien
tctgtgtcacaattccaacacgtga

SEQ ID NO: 4170947 - DNA, 25 bp, Homo sapien
tcaaagcatcaaatttgttgttcat

SEQ ID NO: 4170948 - DNA, 25 bp, Homo sapien
tttcaaagcatcaaatttgttgttc

SEQ ID NO: 4170949 - DNA, 25 bp, Homo sapien
ttcaaagcatcaaatttgttgttca

SEQ ID NO: 4170950 - DNA, 25 bp, Homo sapien
ctttcaaagcatcaaatttgttgtt

SEQ ID NO: 4170951 - DNA, 25 bp, Homo sapien
agccttcctcttgttactgctctta

SEQ ID NO: 4170952 - DNA, 25 bp, Homo sapien
ccttcctcttgttactgctcttatt

SEQ ID NO: 4170953 - DNA, 25 bp, Homo sapien
gccttcctcttgttactgctcttat

SEQ ID NO: 4170954 - DNA, 25 bp, Homo sapien
ttcctcttgttactgctcttattct

SEQ ID NO: 4170955 - DNA, 25 bp, Homo sapien
gtggcctgtcagatcctttggacat

SEQ ID NO: 4170956 - DNA, 25 bp, Homo sapien
tggcctgtcagatcctttggacata

SEQ ID NO: 4170957 - DNA, 25 bp, Homo sapien
tgtggcctgtcagatcctttggaca

SEQ ID NO: 4170958 - DNA, 25 bp, Homo sapien
ggcctgtcagatcctttggacatac

SEQ ID NO: 4170959 - DNA, 25 bp, Homo sapien
atttttatttgcattatcctcccac

SEQ ID NO: 4170960 - DNA, 25 bp, Homo sapien
ttccgcagccaaataatcctcttgt

SEQ ID NO: 4170961 - DNA, 25 bp, Homo sapien
caaataatcctcttgtcaccatttt

SEQ ID NO: 4170962 - DNA, 25 bp, Homo sapien
tcaagcccttccgcagccaaataat

SEQ ID NO: 4170963 - DNA, 25 bp, Homo sapien
gccccacagatctcctccccaacca

SEQ ID NO: 4170964 - DNA, 25 bp, Homo sapien
caacatggccaaaatgagattctcc

SEQ ID NO: 4170965 - DNA, 25 bp, Homo sapien
tttcccccaacatggccaaaatgag

SEQ ID NO: 4170966 - DNA, 25 bp, Homo sapien
ccaaaatgagattctcccagcaatg

SEQ ID NO: 4170967 - DNA, 25 bp, Homo sapien
ccaggctgcctggcgttttgatgct

SEQ ID NO: 4170968 - DNA, 25 bp, Homo sapien
gccaaagtgtatcccagattcacgt

SEQ ID NO: 4170969 - DNA, 25 bp, Homo sapien
caaggatagtgccatccagagatgg

SEQ ID NO: 4170970 - DNA, 25 bp, Homo sapien
taatgacaccagcttcaaggatagt

SEQ ID NO: 4170971 - DNA, 25 bp, Homo sapien
cattaaatcaaggtaaacattaatc

SEQ ID NO: 4170972 - DNA, 25 bp, Homo sapien
ctgatgagacattaaatcaaggtaa

SEQ ID NO: 4170973 - DNA, 25 bp, Homo sapien
aggtaaacattaatcccccaggctg

SEQ ID NO: 4170974 - DNA, 25 bp, Homo sapien
atcaaggtaaacattaatcccccag

SEQ ID NO: 4170975 - DNA, 25 bp, Homo sapien
tctcttgaagaaacggccatgcttc

SEQ ID NO: 4170976 - DNA, 25 bp, Homo sapien
cattccctctagggctaaaggcttg

SEQ ID NO: 4170977 - DNA, 25 bp, Homo sapien
tctctcttgaagaaacggccatgct

SEQ ID NO: 4170978 - DNA, 25 bp, Homo sapien
aaaggcttgaagtttaagtctctct

SEQ ID NO: 4170979 - DNA, 25 bp, Homo sapien
aaaagcggcgcaccaggagatcata

SEQ ID NO: 4170980 - DNA, 25 bp, Homo sapien
gcggcgcaccaggagatcatatcct

SEQ ID NO: 4170981 - DNA, 25 bp, Homo sapien
aagcggcgcaccaggagatcatatc

SEQ ID NO: 4170982 - DNA, 25 bp, Homo sapien
aaaaaagcggcgcaccaggagatca

SEQ ID NO: 4170983 - DNA, 25 bp, Homo sapien
tgaaacatcgaatgtcgggaggagc

SEQ ID NO: 4170984 - DNA, 25 bp, Homo sapien
gatggtgaaacatcgaatgtcggga

SEQ ID NO: 4170985 - DNA, 25 bp, Homo sapien
aaacatcgaatgtcgggaggagcca

SEQ ID NO: 4170986 - DNA, 25 bp, Homo sapien
acttgatggtgaaacatcgaatgtc

SEQ ID NO: 4170987 - DNA, 25 bp, Homo sapien
ctgcattttctaatccattcaccat

SEQ ID NO: 4170988 - DNA, 25 bp, Homo sapien
cacagaattatagagggagccacac

SEQ ID NO: 4170989 - DNA, 25 bp, Homo sapien
caacacagaattatagagggagcca

SEQ ID NO: 4170990 - DNA, 25 bp, Homo sapien
cattgatccaagtggacaccaacac

SEQ ID NO: 4170991 - DNA, 25 bp, Homo sapien
tcagcctcggatagcattgatccaa

SEQ ID NO: 4170992 - DNA, 25 bp, Homo sapien
tgagagtttggacaaataggcaagg

SEQ ID NO: 4170993 - DNA, 25 bp, Homo sapien
tcctgagagtttggacaaataggca

SEQ ID NO: 4170994 - DNA, 25 bp, Homo sapien
ggagaactaaccaactgtagttcag

SEQ ID NO: 4170995 - DNA, 25 bp, Homo sapien
aactgtagttcagaacctcggacag

SEQ ID NO: 4170996 - DNA, 25 bp, Homo sapien
cattgctttcagttttgtccagaaa

SEQ ID NO: 4170997 - DNA, 25 bp, Homo sapien
aatggcaaacctctttaattgggct

SEQ ID NO: 4170998 - DNA, 25 bp, Homo sapien
actgaagaagtatccattgctttca

SEQ ID NO: 4170999 - DNA, 25 bp, Homo sapien
gtccagaaaagtgccccggtcaatg

SEQ ID NO: 4171000 - DNA, 25 bp, Homo sapien
gaaatgatgtgctgtgtgtgtttat

SEQ ID NO: 4171001 - DNA, 25 bp, Homo sapien
tagaaatgatgtgctgtgtgtgttt

SEQ ID NO: 4171002 - DNA, 25 bp, Homo sapien
ctgaactccggtctttagcgctgct

SEQ ID NO: 4171003 - DNA, 25 bp, Homo sapien
ggtctttagcgctgctgctttagct

SEQ ID NO: 4171004 - DNA, 25 bp, Homo sapien
caccttcttcttcggtcctatgcct

SEQ ID NO: 4171005 - DNA, 25 bp, Homo sapien
ttcttcttcggtcctatgcctgtgt

SEQ ID NO: 4171006 - DNA, 25 bp, Homo sapien
agcaccttcttcttcggtcctatgc

SEQ ID NO: 4171007 - DNA, 25 bp, Homo sapien
ccttcttcttcggtcctatgcctgt

SEQ ID NO: 4171008 - DNA, 25 bp, Homo sapien
acttgctggcaagaattctatgtcc

SEQ ID NO: 4171009 - DNA, 25 bp, Homo sapien
cagtggaatggtatatcgaaaggct

SEQ ID NO: 4171010 - DNA, 25 bp, Homo sapien
cagctataacacaacaatcaaaggg

SEQ ID NO: 4171011 - DNA, 25 bp, Homo sapien
tataggactacactggaacaaaact

SEQ ID NO: 4171012 - DNA, 25 bp, Homo sapien
ctcctggcataggttctggctgctg

SEQ ID NO: 4171013 - DNA, 25 bp, Homo sapien
tcctggcataggttctggctgctgc

SEQ ID NO: 4171014 - DNA, 25 bp, Homo sapien
ttgggtcacaattctgttttcatat

SEQ ID NO: 4171015 - DNA, 25 bp, Homo sapien
ggtcacaattctgttttcatattcc

SEQ ID NO: 4171016 - DNA, 25 bp, Homo sapien
tcacaattctgttttcatattccat

SEQ ID NO: 4171017 - DNA, 25 bp, Homo sapien
ttttgggtcacaattctgttttcat

SEQ ID NO: 4171018 - DNA, 25 bp, Homo sapien
tgaaccggtatcaatgtgaaaccag

SEQ ID NO: 4171019 - DNA, 25 bp, Homo sapien
ggctctgaaccggtatcaatgtgaa

SEQ ID NO: 4171020 - DNA, 25 bp, Homo sapien
gacataaaggctctgaaccggtatc

SEQ ID NO: 4171021 - DNA, 25 bp, Homo sapien
ttccatgtaagacataaaggctctg

SEQ ID NO: 4171022 - DNA, 25 bp, Homo sapien
catgtgaaagtttgttacctggtta

SEQ ID NO: 4171023 - DNA, 25 bp, Homo sapien
tatacgtaataagtgtaggatgtca

SEQ ID NO: 4171024 - DNA, 25 bp, Homo sapien
tttttccctgatcaaattgtcctca

SEQ ID NO: 4171025 - DNA, 25 bp, Homo sapien
ccaataattgggtttcatctgcaaa

SEQ ID NO: 4171026 - DNA, 25 bp, Homo sapien
aagggcccctcatccagcagcggac

SEQ ID NO: 4171027 - DNA, 25 bp, Homo sapien
cggactgactagtagtgacttgtgt

SEQ ID NO: 4171028 - DNA, 25 bp, Homo sapien
cagcagcggactgactagtagtgac

SEQ ID NO: 4171029 - DNA, 25 bp, Homo sapien
cctcatccagcagcggactgactag

SEQ ID NO: 4171030 - DNA, 25 bp, Homo sapien
actcattagcatgtctactcagttt

SEQ ID NO: 4171031 - DNA, 25 bp, Homo sapien
ctcattagcatgtctactcagtttc

SEQ ID NO: 4171032 - DNA, 25 bp, Homo sapien
gaactcattagcatgtctactcagt

SEQ ID NO: 4171033 - DNA, 25 bp, Homo sapien
agaactcattagcatgtctactcag

SEQ ID NO: 4171034 - DNA, 25 bp, Homo sapien
tacagatcatcatcccagacactag

SEQ ID NO: 4171035 - DNA, 25 bp, Homo sapien
tcatcatcccagacactaggaaatt

SEQ ID NO: 4171036 - DNA, 25 bp, Homo sapien
caggctattaatatcgttttttcga

SEQ ID NO: 4171037 - DNA, 25 bp, Homo sapien
cagatacctctgtaacctctcttgg

SEQ ID NO: 4171038 - DNA, 25 bp, Homo sapien
gcctgggatagcctagagccgtaaa

SEQ ID NO: 4171039 - DNA, 25 bp, Homo sapien
tctatgaacaatggagagcctgtcc

SEQ ID NO: 4171040 - DNA, 25 bp, Homo sapien
gaagtttccagaacatacacctaga

SEQ ID NO: 4171041 - DNA, 25 bp, Homo sapien
cagtaactaagacaagcatggcagt

SEQ ID NO: 4171042 - DNA, 25 bp, Homo sapien
tctaaacctcaggataaaactggag

SEQ ID NO: 4171043 - DNA, 25 bp, Homo sapien
aactggagaaacagagccccaaatc

SEQ ID NO: 4171044 - DNA, 25 bp, Homo sapien
caaatattccttcaggtctaaacct

SEQ ID NO: 4171045 - DNA, 25 bp, Homo sapien
tctgcagaataagggccttcagcca

SEQ ID NO: 4171046 - DNA, 25 bp, Homo sapien
ctcctcaacaggattctgactagaa

SEQ ID NO: 4171047 - DNA, 25 bp, Homo sapien
cctcaacaggattctgactagaaat

SEQ ID NO: 4171048 - DNA, 25 bp, Homo sapien
tcaacaggattctgactagaaataa

SEQ ID NO: 4171049 - DNA, 25 bp, Homo sapien
aacaggattctgactagaaataaca

SEQ ID NO: 4171050 - DNA, 25 bp, Homo sapien
attgcaaatgcagctcctaagtcgt

SEQ ID NO: 4171051 - DNA, 25 bp, Homo sapien
catttcaatctcagggaaatagatg

SEQ ID NO: 4171052 - DNA, 25 bp, Homo sapien
atcgtatcgagggtttgggaatccg

SEQ ID NO: 4171053 - DNA, 25 bp, Homo sapien
tgggaatccgaggtcattttgactg

SEQ ID NO: 4171054 - DNA, 25 bp, Homo sapien
tctcccactgggtgactgagtggat

SEQ ID NO: 4171055 - DNA, 25 bp, Homo sapien
cattcactagcttggcttctgactt

SEQ ID NO: 4171056 - DNA, 25 bp, Homo sapien
tatgtttgggatcttcattcactag

SEQ ID NO: 4171057 - DNA, 25 bp, Homo sapien
gagtcactggatttatgtttgggat

SEQ ID NO: 4171058 - DNA, 25 bp, Homo sapien
cacagcatccaaatacctccgccat

SEQ ID NO: 4171059 - DNA, 25 bp, Homo sapien
cacacagcatccaaatacctccgcc

SEQ ID NO: 4171060 - DNA, 25 bp, Homo sapien
agccacacagcatccaaatacctcc

SEQ ID NO: 4171061 - DNA, 25 bp, Homo sapien
tctaatgtcattatctactccagcc

SEQ ID NO: 4171062 - DNA, 25 bp, Homo sapien
agacttgatttgtcaggccttcttt

SEQ ID NO: 4171063 - DNA, 25 bp, Homo sapien
gacacagctacctctatttgcctct

SEQ ID NO: 4171064 - DNA, 25 bp, Homo sapien
ccttgcaaattccttgattggtatc

SEQ ID NO: 4171065 - DNA, 25 bp, Homo sapien
caaattccttgattggtatccaggg

SEQ ID NO: 4171066 - DNA, 25 bp, Homo sapien
ggctgttattggagtatggctgtcc

SEQ ID NO: 4171067 - DNA, 25 bp, Homo sapien
ttattggagtatggctgtcccggat

SEQ ID NO: 4171068 - DNA, 25 bp, Homo sapien
tttctgtgattctgacatattcaca

SEQ ID NO: 4171069 - DNA, 25 bp, Homo sapien
tcataccatattattctgcacctgg

SEQ ID NO: 4171070 - DNA, 25 bp, Homo sapien
gacacaatcataccatattattctg

SEQ ID NO: 4171071 - DNA, 25 bp, Homo sapien
caatcataccatattattctgcacc

SEQ ID NO: 4171072 - DNA, 25 bp, Homo sapien
cacaatcataccatattattctgca

SEQ ID NO: 4171073 - DNA, 25 bp, Homo sapien
aggaggcgcgcagcgggcttctgca

SEQ ID NO: 4171074 - DNA, 25 bp, Homo sapien
ttaggtttccctgcgctccggagcc

SEQ ID NO: 4171075 - DNA, 25 bp, Homo sapien
aagcagggtctccatagaaaccagg

SEQ ID NO: 4171076 - DNA, 25 bp, Homo sapien
ctccggagccgccattgacatcaag

SEQ ID NO: 4171077 - DNA, 25 bp, Homo sapien
tcctttttcatgtcatgcagcgtca

SEQ ID NO: 4171078 - DNA, 25 bp, Homo sapien
cctttttcatgtcatgcagcgtcat

SEQ ID NO: 4171079 - DNA, 25 bp, Homo sapien
aaagtcaaagggctgcatcttgtga

SEQ ID NO: 4171080 - DNA, 25 bp, Homo sapien
gtccaaagtcaaagggctgcatctt

SEQ ID NO: 4171081 - DNA, 25 bp, Homo sapien
agtcaaagggctgcatcttgtgagg

SEQ ID NO: 4171082 - DNA, 25 bp, Homo sapien
aagtccaaagtcaaagggctgcatc

SEQ ID NO: 4171083 - DNA, 25 bp, Homo sapien
ctttgggaatggatgacggagtaag

SEQ ID NO: 4171084 - DNA, 25 bp, Homo sapien
cactggatgtgtgaaattctttggg

SEQ ID NO: 4171085 - DNA, 25 bp, Homo sapien
gtggcttgcgacctgcccacaccag

SEQ ID NO: 4171086 - DNA, 25 bp, Homo sapien
cagtggcttgcgacctgcccacacc

SEQ ID NO: 4171087 - DNA, 25 bp, Homo sapien
agtggcttgcgacctgcccacacca

SEQ ID NO: 4171088 - DNA, 25 bp, Homo sapien
ttagaatgaaaagatttggtcaagt

SEQ ID NO: 4171089 - DNA, 25 bp, Homo sapien
gctgacctttcttcgctagttgccc

SEQ ID NO: 4171090 - DNA, 25 bp, Homo sapien
tgacctttcttcgctagttgccccc

SEQ ID NO: 4171091 - DNA, 25 bp, Homo sapien
ctgacctttcttcgctagttgcccc

SEQ ID NO: 4171092 - DNA, 25 bp, Homo sapien
agtgtctaagccatcccatctctgg

SEQ ID NO: 4171093 - DNA, 25 bp, Homo sapien
tttcacccattcctgagtgtctaag

SEQ ID NO: 4171094 - DNA, 25 bp, Homo sapien
catctctggcagtaggcccatctgt

SEQ ID NO: 4171095 - DNA, 25 bp, Homo sapien
gcccatctgtattccagctgccttg

SEQ ID NO: 4171096 - DNA, 25 bp, Homo sapien
cttgccaaattctgacatccctgct

SEQ ID NO: 4171097 - DNA, 25 bp, Homo sapien
ccttgccaaattctgacatccctgc

SEQ ID NO: 4171098 - DNA, 25 bp, Homo sapien
gtgggctccccttgttcaaatatct

SEQ ID NO: 4171099 - DNA, 25 bp, Homo sapien
tcctttatctgctggctgtactgct

SEQ ID NO: 4171100 - DNA, 25 bp, Homo sapien
ggtctgttcaccatcctgtgggctc

SEQ ID NO: 4171101 - DNA, 25 bp, Homo sapien
tgtactgctgttgatggtgccagca

SEQ ID NO: 4171102 - DNA, 25 bp, Homo sapien
ttcaggtattttgtgcaaggtacgg

SEQ ID NO: 4171103 - DNA, 25 bp, Homo sapien
cctttcaggtattttgtgcaaggta

SEQ ID NO: 4171104 - DNA, 25 bp, Homo sapien
caggtattttgtgcaaggtacggag

SEQ ID NO: 4171105 - DNA, 25 bp, Homo sapien
tattttgtgcaaggtacggagagtc

SEQ ID NO: 4171106 - DNA, 25 bp, Homo sapien
attctggttggcaagcatctcttcc

SEQ ID NO: 4171107 - DNA, 25 bp, Homo sapien
aattctggttggcaagcatctcttc

SEQ ID NO: 4171108 - DNA, 25 bp, Homo sapien
ctgaaattctggttggcaagcatct

SEQ ID NO: 4171109 - DNA, 25 bp, Homo sapien
gaaattctggttggcaagcatctct

SEQ ID NO: 4171110 - DNA, 25 bp, Homo sapien
ggtcagtgttactttcctcaaagct

SEQ ID NO: 4171111 - DNA, 25 bp, Homo sapien
accagtgccaccctgcagcttgagg

SEQ ID NO: 4171112 - DNA, 25 bp, Homo sapien
cagcttgaggtcagtgttactttcc

SEQ ID NO: 4171113 - DNA, 25 bp, Homo sapien
ccctgcagcttgaggtcagtgttac

SEQ ID NO: 4171114 - DNA, 25 bp, Homo sapien
cagttaagcaatggtgacccagaaa

SEQ ID NO: 4171115 - DNA, 25 bp, Homo sapien
agttaagcaatggtgacccagaaat

SEQ ID NO: 4171116 - DNA, 25 bp, Homo sapien
tcagttaagcaatggtgacccagaa

SEQ ID NO: 4171117 - DNA, 25 bp, Homo sapien
tcagagtgacctctatcaagagtct

SEQ ID NO: 4171118 - DNA, 25 bp, Homo sapien
tcaagagtctcctccataaggagtt

SEQ ID NO: 4171119 - DNA, 25 bp, Homo sapien
gagtgacctctatcaagagtctcct

SEQ ID NO: 4171120 - DNA, 25 bp, Homo sapien
ccataaggagttgggaagtggttat

SEQ ID NO: 4171121 - DNA, 25 bp, Homo sapien
gaactttgtgctcatggctattttt

SEQ ID NO: 4171122 - DNA, 25 bp, Homo sapien
agtgctgttcaacttgtacccattg

SEQ ID NO: 4171123 - DNA, 25 bp, Homo sapien
ctgcaagtcccacagtgctgttcaa

SEQ ID NO: 4171124 - DNA, 25 bp, Homo sapien
aacttgtacccattgaactttgtgc

SEQ ID NO: 4171125 - DNA, 25 bp, Homo sapien
ttgatgctcttcaagggttttagag

SEQ ID NO: 4171126 - DNA, 25 bp, Homo sapien
gagaactgaggtcaaggatgatcca

SEQ ID NO: 4171127 - DNA, 25 bp, Homo sapien
tggctatgatctgtatggtttctgc

SEQ ID NO: 4171128 - DNA, 25 bp, Homo sapien
taattggcctttctaattagaggga

SEQ ID NO: 4171129 - DNA, 25 bp, Homo sapien
ccctccatccccagcaaggtgcttg

SEQ ID NO: 4171130 - DNA, 25 bp, Homo sapien
ctccatccccagcaaggtgcttggt

SEQ ID NO: 4171131 - DNA, 25 bp, Homo sapien
ccatccccagcaaggtgcttggttt

SEQ ID NO: 4171132 - DNA, 25 bp, Homo sapien
cacttttgcccccctccatccccag

SEQ ID NO: 4171133 - DNA, 25 bp, Homo sapien
caaactttgtcctcaagtggcctgg

SEQ ID NO: 4171134 - DNA, 25 bp, Homo sapien
gaagccaagattcccagaatcagct

SEQ ID NO: 4171135 - DNA, 25 bp, Homo sapien
ggaagagaatgtgaggcagtcccat

SEQ ID NO: 4171136 - DNA, 25 bp, Homo sapien
gaccagggaacttccattgaatcca

SEQ ID NO: 4171137 - DNA, 25 bp, Homo sapien
ccgggcagttgctaaaatccaattt

SEQ ID NO: 4171138 - DNA, 25 bp, Homo sapien
gaagctctgttgaatgcagttggga

SEQ ID NO: 4171139 - DNA, 25 bp, Homo sapien
gttgggagatcaggacaccataccg

SEQ ID NO: 4171140 - DNA, 25 bp, Homo sapien
taagcctataggcttgaagctctgt

SEQ ID NO: 4171141 - DNA, 25 bp, Homo sapien
gcctattttcatcactagatgggaa

SEQ ID NO: 4171142 - DNA, 25 bp, Homo sapien
tgcctattttcatcactagatggga

SEQ ID NO: 4171143 - DNA, 25 bp, Homo sapien
cctattttcatcactagatgggaac

SEQ ID NO: 4171144 - DNA, 25 bp, Homo sapien
ctgcctattttcatcactagatggg

SEQ ID NO: 4171145 - DNA, 25 bp, Homo sapien
caccttcagacttatcagcacccga

SEQ ID NO: 4171146 - DNA, 25 bp, Homo sapien
gcagggactccacccatttgctgct

SEQ ID NO: 4171147 - DNA, 25 bp, Homo sapien
ggcagggactccacccatttgctgc

SEQ ID NO: 4171148 - DNA, 25 bp, Homo sapien
ctttgccaccttcagacttatcagc

SEQ ID NO: 4171149 - DNA, 25 bp, Homo sapien
gcctatatcctgaataatattgttt

SEQ ID NO: 4171150 - DNA, 25 bp, Homo sapien
ccccatcctgtcagcccaaagcttc

SEQ ID NO: 4171151 - DNA, 25 bp, Homo sapien
tatatcctgaataatattgtttaga

SEQ ID NO: 4171152 - DNA, 25 bp, Homo sapien
aaaaccccatcctgtcagcccaaag

SEQ ID NO: 4171153 - DNA, 25 bp, Homo sapien
caccttctcggtcatagtggggcat

SEQ ID NO: 4171154 - DNA, 25 bp, Homo sapien
agcacttggtttccacaccttctcg

SEQ ID NO: 4171155 - DNA, 25 bp, Homo sapien
cacaccttctcggtcatagtggggc

SEQ ID NO: 4171156 - DNA, 25 bp, Homo sapien
ggtttccacaccttctcggtcatag

SEQ ID NO: 4171157 - DNA, 25 bp, Homo sapien
tccgtctctttctcggaattgttct

SEQ ID NO: 4171158 - DNA, 25 bp, Homo sapien
tcacacacaccagggcagttagcag

SEQ ID NO: 4171159 - DNA, 25 bp, Homo sapien
tagcagcaactgtaaggtccacagc

SEQ ID NO: 4171160 - DNA, 25 bp, Homo sapien
tattgctcatcgcacatgctcgctc

SEQ ID NO: 4171161 - DNA, 25 bp, Homo sapien
ggttgtctcgtcccttgccttcttc

SEQ ID NO: 4171162 - DNA, 25 bp, Homo sapien
ctgtttggttcttctcatacagcac

SEQ ID NO: 4171163 - DNA, 25 bp, Homo sapien
tggttcttctcatacagcacagcat

SEQ ID NO: 4171164 - DNA, 25 bp, Homo sapien
gtttggttcttctcatacagcacag

SEQ ID NO: 4171165 - DNA, 25 bp, Homo sapien
tttggttcttctcatacagcacagc

SEQ ID NO: 4171166 - DNA, 25 bp, Homo sapien
ctttcccatcccatcggagctccta

SEQ ID NO: 4171167 - DNA, 25 bp, Homo sapien
caatcggctgctgatcttaggaagg

SEQ ID NO: 4171168 - DNA, 25 bp, Homo sapien
aatcggctgctgatcttaggaaggg

SEQ ID NO: 4171169 - DNA, 25 bp, Homo sapien
ctcctaggggcgtggtccaccctct

SEQ ID NO: 4171170 - DNA, 25 bp, Homo sapien
actttgcacatcagagtgaatgctt

SEQ ID NO: 4171171 - DNA, 25 bp, Homo sapien
ttacatgcgaatttctacaactcta

SEQ ID NO: 4171172 - DNA, 25 bp, Homo sapien
gggctgttggtgagatagagcccca

SEQ ID NO: 4171173 - DNA, 25 bp, Homo sapien
ttgcacatcagagtgaatgcttggg

SEQ ID NO: 4171174 - DNA, 25 bp, Homo sapien
ggaagaatcgcctgcaccaagcagc

SEQ ID NO: 4171175 - DNA, 25 bp, Homo sapien
aggaagaatcgcctgcaccaagcag

SEQ ID NO: 4171176 - DNA, 25 bp, Homo sapien
ctaggaagaatcgcctgcaccaagc

SEQ ID NO: 4171177 - DNA, 25 bp, Homo sapien
tgcaccaagcagcaaggcagcatcc

SEQ ID NO: 4171178 - DNA, 25 bp, Homo sapien
tcccataggcttcgttgttcaactt

SEQ ID NO: 4171179 - DNA, 25 bp, Homo sapien
ctaatttcatatgatcgctgctttt

SEQ ID NO: 4171180 - DNA, 25 bp, Homo sapien
cctggttcccataggcttcgttgtt

SEQ ID NO: 4171181 - DNA, 25 bp, Homo sapien
taggcttcgttgttcaacttactaa

SEQ ID NO: 4171182 - DNA, 25 bp, Homo sapien
ccatctgtggtcattaacgatccca

SEQ ID NO: 4171183 - DNA, 25 bp, Homo sapien
gatgatgttcagaagtgaggtctga

SEQ ID NO: 4171184 - DNA, 25 bp, Homo sapien
ttcagaagtgaggtctgagccatct

SEQ ID NO: 4171185 - DNA, 25 bp, Homo sapien
agtgaggtctgagccatctgtggtc

SEQ ID NO: 4171186 - DNA, 25 bp, Homo sapien
tgccttagtcctaaccaaattttgc

SEQ ID NO: 4171187 - DNA, 25 bp, Homo sapien
tgcccaattatggactgtgccagaa

SEQ ID NO: 4171188 - DNA, 25 bp, Homo sapien
ccaagtctgtatggtcttagctctg

SEQ ID NO: 4171189 - DNA, 25 bp, Homo sapien
gactgatcattgtaagctggccaac

SEQ ID NO: 4171190 - DNA, 25 bp, Homo sapien
agggtcaagcaaggaagctctatgg

SEQ ID NO: 4171191 - DNA, 25 bp, Homo sapien
ttttaggatcgtcccctcaaggctc

SEQ ID NO: 4171192 - DNA, 25 bp, Homo sapien
gtataatagaccgagccttctcatg

SEQ ID NO: 4171193 - DNA, 25 bp, Homo sapien
ttctcaccattccagaggatgggaa

SEQ ID NO: 4171194 - DNA, 25 bp, Homo sapien
cctgcatgcataggtgccataaatg

SEQ ID NO: 4171195 - DNA, 25 bp, Homo sapien
tttgctcccctagccaaaagctgct

SEQ ID NO: 4171196 - DNA, 25 bp, Homo sapien
aagttcttgccctatcaggccgttt

SEQ ID NO: 4171197 - DNA, 25 bp, Homo sapien
gctgctaatggcacaaagttcttgc

SEQ ID NO: 4171198 - DNA, 25 bp, Homo sapien
tttcctctgaacagccagccaaagt

SEQ ID NO: 4171199 - DNA, 25 bp, Homo sapien
ttcctctgaacagccagccaaagtt

SEQ ID NO: 4171200 - DNA, 25 bp, Homo sapien
gaacacttgggaaagtgctgtctaa

SEQ ID NO: 4171201 - DNA, 25 bp, Homo sapien
caggtgatccatagaacacttggga

SEQ ID NO: 4171202 - DNA, 25 bp, Homo sapien
cacttgggaaagtgctgtctaattc

SEQ ID NO: 4171203 - DNA, 25 bp, Homo sapien
ggtgatccatagaacacttgggaaa

SEQ ID NO: 4171204 - DNA, 25 bp, Homo sapien
gaaagaagcaattatctcccaaaca

SEQ ID NO: 4171205 - DNA, 25 bp, Homo sapien
tccccggaagcaggctgcggttgct

SEQ ID NO: 4171206 - DNA, 25 bp, Homo sapien
ccaaacaagagattgtggagattcg

SEQ ID NO: 4171207 - DNA, 25 bp, Homo sapien
gggccctgggctgacgcttttgttc

SEQ ID NO: 4171208 - DNA, 25 bp, Homo sapien
gaagatttttcctcaagcctcccag

SEQ ID NO: 4171209 - DNA, 25 bp, Homo sapien
gaataaggactaggtcgaactgctc

SEQ ID NO: 4171210 - DNA, 25 bp, Homo sapien
tgttatgacctcgtcacccaggtga

SEQ ID NO: 4171211 - DNA, 25 bp, Homo sapien
gagcaggactttgtcatcgccagtg

SEQ ID NO: 4171212 - DNA, 25 bp, Homo sapien
tccaggtcactaatgctggagcctt

SEQ ID NO: 4171213 - DNA, 25 bp, Homo sapien
tcgctccaggtcactaatgctggag

SEQ ID NO: 4171214 - DNA, 25 bp, Homo sapien
tctcgctccaggtcactaatgctgg

SEQ ID NO: 4171215 - DNA, 25 bp, Homo sapien
aggtcactaatgctggagccttcat

SEQ ID NO: 4171216 - DNA, 25 bp, Homo sapien
gaatgtgacaacttaacaatgctgg

SEQ ID NO: 4171217 - DNA, 25 bp, Homo sapien
tcccatcaggattttatgcaaaatg

SEQ ID NO: 4171218 - DNA, 25 bp, Homo sapien
gcgtgtggtccaacattagcaataa

SEQ ID NO: 4171219 - DNA, 25 bp, Homo sapien
caatgctggtcacaaaataatgtct

SEQ ID NO: 4171220 - DNA, 25 bp, Homo sapien
gctagcctgaattttggttgcggcc

SEQ ID NO: 4171221 - DNA, 25 bp, Homo sapien
tatgtgtccacggaagctagcctga

SEQ ID NO: 4171222 - DNA, 25 bp, Homo sapien
gctttgccgggctcatcaggcttgg

SEQ ID NO: 4171223 - DNA, 25 bp, Homo sapien
gctgcttcggcagtagtggtgcctt

SEQ ID NO: 4171224 - DNA, 25 bp, Homo sapien
ggcatcttcagccttggaggacggc

SEQ ID NO: 4171225 - DNA, 25 bp, Homo sapien
gtggaagctttagtggcactttctg

SEQ ID NO: 4171226 - DNA, 25 bp, Homo sapien
ggacggcgagttatcagtggaagct

SEQ ID NO: 4171227 - DNA, 25 bp, Homo sapien
ctttagtggcactttctgtctcagc

SEQ ID NO: 4171228 - DNA, 25 bp, Homo sapien
cccagtctccgttggaggctgggct

SEQ ID NO: 4171229 - DNA, 25 bp, Homo sapien
catcattggttaaaccgaggcgctt

SEQ ID NO: 4171230 - DNA, 25 bp, Homo sapien
tatttggacccttggatgacaaaca

SEQ ID NO: 4171231 - DNA, 25 bp, Homo sapien
aggttttctcccaaggagcacacgg

SEQ ID NO: 4171232 - DNA, 25 bp, Homo sapien
gagcacacggtggttcagtccgtat

SEQ ID NO: 4171233 - DNA, 25 bp, Homo sapien
tgatggcatcaatttgcaagatgta

SEQ ID NO: 4171234 - DNA, 25 bp, Homo sapien
tcagggaatggcaataggaaactcc

SEQ ID NO: 4171235 - DNA, 25 bp, Homo sapien
ggaatggcaataggaaactcctccc

SEQ ID NO: 4171236 - DNA, 25 bp, Homo sapien
tccctcttttcttgatcattactga

SEQ ID NO: 4171237 - DNA, 25 bp, Homo sapien
ccaggctcaatcattactgataatg

SEQ ID NO: 4171238 - DNA, 25 bp, Homo sapien
gtaaccttggctgacttccaggctc

SEQ ID NO: 4171239 - DNA, 25 bp, Homo sapien
gtaaggacttggtaatgttgctgag

SEQ ID NO: 4171240 - DNA, 25 bp, Homo sapien
tggtaaccttggctgacttccaggc

SEQ ID NO: 4171241 - DNA, 25 bp, Homo sapien
ccccggaataacaatgatactgatt

SEQ ID NO: 4171242 - DNA, 25 bp, Homo sapien
cccggaataacaatgatactgattc

SEQ ID NO: 4171243 - DNA, 25 bp, Homo sapien
ccggaataacaatgatactgattcc

SEQ ID NO: 4171244 - DNA, 25 bp, Homo sapien
ctgtatctgttgattcttctttctc

SEQ ID NO: 4171245 - DNA, 25 bp, Homo sapien
ttctttctcagaagcacatctctct

SEQ ID NO: 4171246 - DNA, 25 bp, Homo sapien
tcttctttctcagaagcacatctct

SEQ ID NO: 4171247 - DNA, 25 bp, Homo sapien
ctttctcagaagcacatctctctaa

SEQ ID NO: 4171248 - DNA, 25 bp, Homo sapien
tgattgaagttagcaccgacctcca

SEQ ID NO: 4171249 - DNA, 25 bp, Homo sapien
ttttctaggcaaagagacgtcatac

SEQ ID NO: 4171250 - DNA, 25 bp, Homo sapien
tctgggcgttctcaaatagggaatc

SEQ ID NO: 4171251 - DNA, 25 bp, Homo sapien
tcctttgagaagactgcgctgatgg

SEQ ID NO: 4171252 - DNA, 25 bp, Homo sapien
ctattcagcagcttaaaacaactgc

SEQ ID NO: 4171253 - DNA, 25 bp, Homo sapien
tctattcagcagcttaaaacaactg

SEQ ID NO: 4171254 - DNA, 25 bp, Homo sapien
ctgttctattcagcagcttaaaaca

SEQ ID NO: 4171255 - DNA, 25 bp, Homo sapien
gttctattcagcagcttaaaacaac

SEQ ID NO: 4171256 - DNA, 25 bp, Homo sapien
ttcacatagggaatcaacgacaatc

SEQ ID NO: 4171257 - DNA, 25 bp, Homo sapien
ggtatccacatacaggatcttcaca

SEQ ID NO: 4171258 - DNA, 25 bp, Homo sapien
ctattagtgtcagaagaattgtgac

SEQ ID NO: 4171259 - DNA, 25 bp, Homo sapien
ataatttatgtggaccatcgatcat

SEQ ID NO: 4171260 - DNA, 25 bp, Homo sapien
cagtggcacctatggaagaactcag

SEQ ID NO: 4171261 - DNA, 25 bp, Homo sapien
tacctcaaggaagctgttcagtggc

SEQ ID NO: 4171262 - DNA, 25 bp, Homo sapien
caggagcaaaggtatgtgagtgaca

SEQ ID NO: 4171263 - DNA, 25 bp, Homo sapien
tatctgctcatacaacagtgcaatg

SEQ ID NO: 4171264 - DNA, 25 bp, Homo sapien
atgttcttggtcagcctcaggttcc

SEQ ID NO: 4171265 - DNA, 25 bp, Homo sapien
cgtcctgccgggcactttccttagg

SEQ ID NO: 4171266 - DNA, 25 bp, Homo sapien
ctcttctttaccctcgtcctgccgg

SEQ ID NO: 4171267 - DNA, 25 bp, Homo sapien
gcatgttcttggtcagcctcaggtt

SEQ ID NO: 4171268 - DNA, 25 bp, Homo sapien
gggccacacgcaccagatcaaataa

SEQ ID NO: 4171269 - DNA, 25 bp, Homo sapien
ggaaaggacagactcacagacgtga

SEQ ID NO: 4171270 - DNA, 25 bp, Homo sapien
tttggactcctcagatgaacggaac

SEQ ID NO: 4171271 - DNA, 25 bp, Homo sapien
gatcaaataacttggatacagtgca

SEQ ID NO: 4171272 - DNA, 25 bp, Homo sapien
ttttgttcattccatcacattgaaa

SEQ ID NO: 4171273 - DNA, 25 bp, Homo sapien
cctttttgttcattccatcacattg

SEQ ID NO: 4171274 - DNA, 25 bp, Homo sapien
catcacattgaaaaggaggaaaaca

SEQ ID NO: 4171275 - DNA, 25 bp, Homo sapien
cgctaattggcacatttgctttatt

SEQ ID NO: 4171276 - DNA, 25 bp, Homo sapien
tgatttattaatattcgggttgaaa

SEQ ID NO: 4171277 - DNA, 25 bp, Homo sapien
tagatcaggccctttgccaaatttc

SEQ ID NO: 4171278 - DNA, 25 bp, Homo sapien
ctggtccttctaactttgaagcatc

SEQ ID NO: 4171279 - DNA, 25 bp, Homo sapien
tcagctttgtagatcaggccctttg

SEQ ID NO: 4171280 - DNA, 25 bp, Homo sapien
tgaagcatctgactgtttttgtgcc

SEQ ID NO: 4171281 - DNA, 25 bp, Homo sapien
tcattttactcaaggttcaccaatt

SEQ ID NO: 4171282 - DNA, 25 bp, Homo sapien
cacctacattaaagaaggcaattca

SEQ ID NO: 4171283 - DNA, 25 bp, Homo sapien
tccaattgattgagtgaggcccacc

SEQ ID NO: 4171284 - DNA, 25 bp, Homo sapien
aaaaatgtattatagctaactggct

SEQ ID NO: 4171285 - DNA, 25 bp, Homo sapien
gagtgagtgttgcagaccttcgagt

SEQ ID NO: 4171286 - DNA, 25 bp, Homo sapien
cttcgagtgagtgttgcagaccttc

SEQ ID NO: 4171287 - DNA, 25 bp, Homo sapien
tcgagtgagtgttgcagaccttcga

SEQ ID NO: 4171288 - DNA, 25 bp, Homo sapien
accttcgagtgagtgttgcagacct

SEQ ID NO: 4171289 - DNA, 25 bp, Homo sapien
aggtcccacaacaggccaactgcag

SEQ ID NO: 4171290 - DNA, 25 bp, Homo sapien
cccacaacaggccaactgcaggctg

SEQ ID NO: 4171291 - DNA, 25 bp, Homo sapien
caaggtcccacaacaggccaactgc

SEQ ID NO: 4171292 - DNA, 25 bp, Homo sapien
caacaggccaactgcaggctgagga

SEQ ID NO: 4171293 - DNA, 25 bp, Homo sapien
actctggcccaaggctctctgactg

SEQ ID NO: 4171294 - DNA, 25 bp, Homo sapien
cccagagcccctggaactctggccc

SEQ ID NO: 4171295 - DNA, 25 bp, Homo sapien
cagagcccctggaactctggcccaa

SEQ ID NO: 4171296 - DNA, 25 bp, Homo sapien
gagcccctggaactctggcccaagg

SEQ ID NO: 4171297 - DNA, 25 bp, Homo sapien
tttgctcttcaccagagaatggaaa

SEQ ID NO: 4171298 - DNA, 25 bp, Homo sapien
tcaccagagaatggaaattgttcat

SEQ ID NO: 4171299 - DNA, 25 bp, Homo sapien
caggagcctcttttgaacccacttc

SEQ ID NO: 4171300 - DNA, 25 bp, Homo sapien
cacttccctaagtctttgctcttca

SEQ ID NO: 4171301 - DNA, 25 bp, Homo sapien
acagtatgaattgttgtgaaggcca

SEQ ID NO: 4171302 - DNA, 25 bp, Homo sapien
ttctagatgcattgagcacagatcc

SEQ ID NO: 4171303 - DNA, 25 bp, Homo sapien
tcctaagctgtcctagaggctcagg

SEQ ID NO: 4171304 - DNA, 25 bp, Homo sapien
gaggctcaggttagcatctatccaa

SEQ ID NO: 4171305 - DNA, 25 bp, Homo sapien
atataatggaccatatattaaacat

SEQ ID NO: 4171306 - DNA, 25 bp, Homo sapien
taatataatggaccatatattaaac

SEQ ID NO: 4171307 - DNA, 25 bp, Homo sapien
aggaacttctccattgaaataaatg

SEQ ID NO: 4171308 - DNA, 25 bp, Homo sapien
tctccattgaaataaatgtctgcca

SEQ ID NO: 4171309 - DNA, 25 bp, Homo sapien
actttatcatgaggacaaggtcttg

SEQ ID NO: 4171310 - DNA, 25 bp, Homo sapien
ggctttcttattgtctccactttat

SEQ ID NO: 4171311 - DNA, 25 bp, Homo sapien
ggctttagaaaagcgcatgctaatt

SEQ ID NO: 4171312 - DNA, 25 bp, Homo sapien
tagaagttggatgttagtattacct

SEQ ID NO: 4171313 - DNA, 25 bp, Homo sapien
catggcatgtcacaggccttaatta

SEQ ID NO: 4171314 - DNA, 25 bp, Homo sapien
tcaggaacagatccccatggcatgt

SEQ ID NO: 4171315 - DNA, 25 bp, Homo sapien
tgccgcaaatgctaggaagtgccat

SEQ ID NO: 4171316 - DNA, 25 bp, Homo sapien
tcaagtctttcgctctcacgtgggt

SEQ ID NO: 4171317 - DNA, 25 bp, Homo sapien
catagactcattgtgctgtagatac

SEQ ID NO: 4171318 - DNA, 25 bp, Homo sapien
taaagcatgccaagggaatggtcca

SEQ ID NO: 4171319 - DNA, 25 bp, Homo sapien
ggaataaatggatccatcagtctgg

SEQ ID NO: 4171320 - DNA, 25 bp, Homo sapien
ctgggtcggtgagaggaataaatgg

SEQ ID NO: 4171321 - DNA, 25 bp, Homo sapien
aataaatggatccatcagtctggcc

SEQ ID NO: 4171322 - DNA, 25 bp, Homo sapien
agaggaataaatggatccatcagtc

SEQ ID NO: 4171323 - DNA, 25 bp, Homo sapien
gctataacatacagtgggcccatgt

SEQ ID NO: 4171324 - DNA, 25 bp, Homo sapien
gcagtcagctataacatacagtggg

SEQ ID NO: 4171325 - DNA, 25 bp, Homo sapien
tgataccatcagcagtcagctataa

SEQ ID NO: 4171326 - DNA, 25 bp, Homo sapien
cagtgggcccatgtaactcattctc

SEQ ID NO: 4171327 - DNA, 25 bp, Homo sapien
ccagcctccaatcactttttttgtg

SEQ ID NO: 4171328 - DNA, 25 bp, Homo sapien
ccactgagccgggccacttttgttt

SEQ ID NO: 4171329 - DNA, 25 bp, Homo sapien
gccactgagccgggccacttttgtt

SEQ ID NO: 4171330 - DNA, 25 bp, Homo sapien
ctttttttgtgctagaatctcccat

SEQ ID NO: 4171331 - DNA, 25 bp, Homo sapien
tatatccctggcaatgcagttcgat

SEQ ID NO: 4171332 - DNA, 25 bp, Homo sapien
gaatctcccagtgttgtgttttgca

SEQ ID NO: 4171333 - DNA, 25 bp, Homo sapien
caggttgtgttctaagcacggtgcc

SEQ ID NO: 4171334 - DNA, 25 bp, Homo sapien
catgtgatggtaaggttctccagaa

SEQ ID NO: 4171335 - DNA, 25 bp, Homo sapien
tggcaccaggtttgttcacagctgc

SEQ ID NO: 4171336 - DNA, 25 bp, Homo sapien
ttatctttcaggttcaggcatggca

SEQ ID NO: 4171337 - DNA, 25 bp, Homo sapien
atggcaccaggtttgttcacagctg

SEQ ID NO: 4171338 - DNA, 25 bp, Homo sapien
tatctttcaggttcaggcatggcac

SEQ ID NO: 4171339 - DNA, 25 bp, Homo sapien
ctacactgggctttgctgcatccgt

SEQ ID NO: 4171340 - DNA, 25 bp, Homo sapien
tagtcagcgtttagcctagtagtca

SEQ ID NO: 4171341 - DNA, 25 bp, Homo sapien
cagtgaatattccagcctagtagtc

SEQ ID NO: 4171342 - DNA, 25 bp, Homo sapien
taccaccaggttagttcgatgattg

SEQ ID NO: 4171343 - DNA, 25 bp, Homo sapien
cataggcatgattccactgctgatg

SEQ ID NO: 4171344 - DNA, 25 bp, Homo sapien
tccattctcgggaggctcaattctt

SEQ ID NO: 4171345 - DNA, 25 bp, Homo sapien
gatacttaacagctatgagcctcag

SEQ ID NO: 4171346 - DNA, 25 bp, Homo sapien
agcatgtgtcacgttgcttagcaca

SEQ ID NO: 4171347 - DNA, 25 bp, Homo sapien
tatcggcctcctgctgtcggcattc

SEQ ID NO: 4171348 - DNA, 25 bp, Homo sapien
gtctcttcagtagcctgtgatctac

SEQ ID NO: 4171349 - DNA, 25 bp, Homo sapien
tgtctcttcagtagcctgtgatcta

SEQ ID NO: 4171350 - DNA, 25 bp, Homo sapien
ctgtctcttcagtagcctgtgatct

SEQ ID NO: 4171351 - DNA, 25 bp, Homo sapien
tattctctatttactcagtggttac

SEQ ID NO: 4171352 - DNA, 25 bp, Homo sapien
aagtaaccatgatcttttaatctga

SEQ ID NO: 4171353 - DNA, 25 bp, Homo sapien
taatgtttaggcctcaaagtaacca

SEQ ID NO: 4171354 - DNA, 25 bp, Homo sapien
tactcataatcctgaccttatgttt

SEQ ID NO: 4171355 - DNA, 25 bp, Homo sapien
tcattcttcttttgtaaggttccat

SEQ ID NO: 4171356 - DNA, 25 bp, Homo sapien
tttagccatctgtgccaaatcctga

SEQ ID NO: 4171357 - DNA, 25 bp, Homo sapien
gccatctgtgccaaatcctgattca

SEQ ID NO: 4171358 - DNA, 25 bp, Homo sapien
tctgtgccaaatcctgattcattct

SEQ ID NO: 4171359 - DNA, 25 bp, Homo sapien
ttgcaatatctttacatccagtgcc

SEQ ID NO: 4171360 - DNA, 25 bp, Homo sapien
gatgacttctgctcgtatttgtaaa

SEQ ID NO: 4171361 - DNA, 25 bp, Homo sapien
gtgccatctgcgagccctccgtagt

SEQ ID NO: 4171362 - DNA, 25 bp, Homo sapien
tgtaaacttgttggcattccttgca

SEQ ID NO: 4171363 - DNA, 25 bp, Homo sapien
ctctacttccctgatattactattt

SEQ ID NO: 4171364 - DNA, 25 bp, Homo sapien
ttgtccaccgctgctgatggtgacc

SEQ ID NO: 4171365 - DNA, 25 bp, Homo sapien
tcttgtccaccgctgctgatggtga

SEQ ID NO: 4171366 - DNA, 25 bp, Homo sapien
ggtgaccaagatatttgtatgggaa

SEQ ID NO: 4171367 - DNA, 25 bp, Homo sapien
gatggtgaccaagatatttgtatgg

SEQ ID NO: 4171368 - DNA, 25 bp, Homo sapien
catgctttgtacctatataaatgca

SEQ ID NO: 4171369 - DNA, 25 bp, Homo sapien
aaatctgatgcaaataaggactcct

SEQ ID NO: 4171370 - DNA, 25 bp, Homo sapien
agacacatgctttgtacctatataa

SEQ ID NO: 4171371 - DNA, 25 bp, Homo sapien
gatgcaaataaggactcctgctgcc

SEQ ID NO: 4171372 - DNA, 25 bp, Homo sapien
cacgcccagctgaaatagcaattta

SEQ ID NO: 4171373 - DNA, 25 bp, Homo sapien
cgcccagctgaaatagcaatttaaa

SEQ ID NO: 4171374 - DNA, 25 bp, Homo sapien
tatagcatttggacctagagaataa

SEQ ID NO: 4171375 - DNA, 25 bp, Homo sapien
tcttcatctatagcatttggaccta

SEQ ID NO: 4171376 - DNA, 25 bp, Homo sapien
catcctgatgcagaatccactgtga

SEQ ID NO: 4171377 - DNA, 25 bp, Homo sapien
cctgaaagcgaataatggtttttct

SEQ ID NO: 4171378 - DNA, 25 bp, Homo sapien
ttaaccattgttctttcactgtcaa

SEQ ID NO: 4171379 - DNA, 25 bp, Homo sapien
tgccaaaggcccagtaaggtacctg

SEQ ID NO: 4171380 - DNA, 25 bp, Homo sapien
tcagagtgtggtgaatatttcaaca

SEQ ID NO: 4171381 - DNA, 25 bp, Homo sapien
gtgaatatttcaacaagtcagctgc

SEQ ID NO: 4171382 - DNA, 25 bp, Homo sapien
tgtttcactccattgctctctagtt

SEQ ID NO: 4171383 - DNA, 25 bp, Homo sapien
cttctcagcaggctgtttcactcca

SEQ ID NO: 4171384 - DNA, 25 bp, Homo sapien
tctctttgtggaacaatctcattag

SEQ ID NO: 4171385 - DNA, 25 bp, Homo sapien
cattcttctctttgtggaacaatct

SEQ ID NO: 4171386 - DNA, 25 bp, Homo sapien
tggaacaatctcattagagaaatca

SEQ ID NO: 4171387 - DNA, 25 bp, Homo sapien
tgatccaaccccctgacacttgatt

SEQ ID NO: 4171388 - DNA, 25 bp, Homo sapien
gtttctgacagtgcattctcttcat

SEQ ID NO: 4171389 - DNA, 25 bp, Homo sapien
tttctgacagtgcattctcttcatt

SEQ ID NO: 4171390 - DNA, 25 bp, Homo sapien
caagattgtggtttgccattgtctg

SEQ ID NO: 4171391 - DNA, 25 bp, Homo sapien
gacgagcagcgtgtgaagcacagca

SEQ ID NO: 4171392 - DNA, 25 bp, Homo sapien
cctcaaggaccataaaggcaagatt

SEQ ID NO: 4171393 - DNA, 25 bp, Homo sapien
gacttccattctgctgggacgagca

SEQ ID NO: 4171394 - DNA, 25 bp, Homo sapien
caactctcgtaagataagactttta

SEQ ID NO: 4171395 - DNA, 25 bp, Homo sapien
tcaactctcgtaagataagactttt

SEQ ID NO: 4171396 - DNA, 25 bp, Homo sapien
ccaatgctggacacaaaaccataaa

SEQ ID NO: 4171397 - DNA, 25 bp, Homo sapien
aaccaatgctggacacaaaaccata

SEQ ID NO: 4171398 - DNA, 25 bp, Homo sapien
ggaaccaatgctggacacaaaacca

SEQ ID NO: 4171399 - DNA, 25 bp, Homo sapien
aaggaaccaatgctggacacaaaac

SEQ ID NO: 4171400 - DNA, 25 bp, Homo sapien
gttctaaatctccacgtgtacagtt

SEQ ID NO: 4171401 - DNA, 25 bp, Homo sapien
taagtgacaatagcttaatcaggac

SEQ ID NO: 4171402 - DNA, 25 bp, Homo sapien
gtagcatctcttgggcaaatgccca

SEQ ID NO: 4171403 - DNA, 25 bp, Homo sapien
cctgtttcggattagatttcagaag

SEQ ID NO: 4171404 - DNA, 25 bp, Homo sapien
tgctgctgaaaagcagacccgggga

SEQ ID NO: 4171405 - DNA, 25 bp, Homo sapien
cagacccggggattgatggcagaca

SEQ ID NO: 4171406 - DNA, 25 bp, Homo sapien
gcttgcacagagcagtcaagttggg

SEQ ID NO: 4171407 - DNA, 25 bp, Homo sapien
cacagagcagtcaagttgggcgtgt

SEQ ID NO: 4171408 - DNA, 25 bp, Homo sapien
ccatttggattgcaagtctgtgaca

SEQ ID NO: 4171409 - DNA, 25 bp, Homo sapien
gttatgatcaggcttaaatctcttc

SEQ ID NO: 4171410 - DNA, 25 bp, Homo sapien
catccatttggattgcaagtctgtg

SEQ ID NO: 4171411 - DNA, 25 bp, Homo sapien
cttcaatatgaaggttatgatcagg

SEQ ID NO: 4171412 - DNA, 25 bp, Homo sapien
ctagggttcgctctgtggacttgaa

SEQ ID NO: 4171413 - DNA, 25 bp, Homo sapien
tttcaaaagatgaaacacctattcc

SEQ ID NO: 4171414 - DNA, 25 bp, Homo sapien
atttatccaactcatttcaaaagat

SEQ ID NO: 4171415 - DNA, 25 bp, Homo sapien
ctatcctagggttcgctctgtggac

SEQ ID NO: 4171416 - DNA, 25 bp, Homo sapien
ttctaactgcaagaacaccccaaag

SEQ ID NO: 4171417 - DNA, 25 bp, Homo sapien
cttgttgtcttctaactgcaagaac

SEQ ID NO: 4171418 - DNA, 25 bp, Homo sapien
tgttgtcttctaactgcaagaacac

SEQ ID NO: 4171419 - DNA, 25 bp, Homo sapien
tgtcttctaactgcaagaacacccc

SEQ ID NO: 4171420 - DNA, 25 bp, Homo sapien
tatacccagcttggacaataaggag

SEQ ID NO: 4171421 - DNA, 25 bp, Homo sapien
taaacacaagggagagtgactggcc

SEQ ID NO: 4171422 - DNA, 25 bp, Homo sapien
gaatcagtacaataccagctggtgg

SEQ ID NO: 4171423 - DNA, 25 bp, Homo sapien
ggaaacaccccagagatcatgtgga

SEQ ID NO: 4171424 - DNA, 25 bp, Homo sapien
gctttagtcgactattcatatttaa

SEQ ID NO: 4171425 - DNA, 25 bp, Homo sapien
ggaacttgctttagtcgactattca

SEQ ID NO: 4171426 - DNA, 25 bp, Homo sapien
aattggaacttgctttagtcgacta

SEQ ID NO: 4171427 - DNA, 25 bp, Homo sapien
cttcaaaattggaacttgctttagt

SEQ ID NO: 4171428 - DNA, 25 bp, Homo sapien
tgtagttagaaagcttttagatgag

SEQ ID NO: 4171429 - DNA, 25 bp, Homo sapien
cttgtagttagaaagcttttagatg

SEQ ID NO: 4171430 - DNA, 25 bp, Homo sapien
ctttgtctggtttacttgtagttag

SEQ ID NO: 4171431 - DNA, 25 bp, Homo sapien
tttgtctggtttacttgtagttaga

SEQ ID NO: 4171432 - DNA, 25 bp, Homo sapien
tctggccctcatcaactactgctgc

SEQ ID NO: 4171433 - DNA, 25 bp, Homo sapien
actgccatcttgactgggtcctcat

SEQ ID NO: 4171434 - DNA, 25 bp, Homo sapien
gccattgcaaatgagagcttacact

SEQ ID NO: 4171435 - DNA, 25 bp, Homo sapien
tctgtatcacataggctgatgctgg

SEQ ID NO: 4171436 - DNA, 25 bp, Homo sapien
aatgcaggagaaattggcaccatcc

SEQ ID NO: 4171437 - DNA, 25 bp, Homo sapien
tatgcaatatcgaacttcagaaagc

SEQ ID NO: 4171438 - DNA, 25 bp, Homo sapien
acaaatgcaggagaaattggcacca

SEQ ID NO: 4171439 - DNA, 25 bp, Homo sapien
ctatgcaatatcgaacttcagaaag

SEQ ID NO: 4171440 - DNA, 25 bp, Homo sapien
aagcctcatcatcgttgcccacaag

SEQ ID NO: 4171441 - DNA, 25 bp, Homo sapien
tctttgcaaaggctgatctcaaagc

SEQ ID NO: 4171442 - DNA, 25 bp, Homo sapien
cctggcatcgcttttcaagggattt

SEQ ID NO: 4171443 - DNA, 25 bp, Homo sapien
gccaatcctggcatcgcttttcaag

SEQ ID NO: 4171444 - DNA, 25 bp, Homo sapien
tgctaccatggccagtctgtaagga

SEQ ID NO: 4171445 - DNA, 25 bp, Homo sapien
caaaggtgtggttctgccaaggaaa

SEQ ID NO: 4171446 - DNA, 25 bp, Homo sapien
aaatgtctggcagcaggagtaaccc

SEQ ID NO: 4171447 - DNA, 25 bp, Homo sapien
tacagtcctcatatggagataggtg

SEQ ID NO: 4171448 - DNA, 25 bp, Homo sapien
tgaggctctgtgaagtcacaagatt

SEQ ID NO: 4171449 - DNA, 25 bp, Homo sapien
aagttggtcaactcaaaagcccatg

SEQ ID NO: 4171450 - DNA, 25 bp, Homo sapien
caagattgcggctttgtctgcagtt

SEQ ID NO: 4171451 - DNA, 25 bp, Homo sapien
cctttatgtgtcacctgccttcgtt

SEQ ID NO: 4171452 - DNA, 25 bp, Homo sapien
attgatcagctctcctaaacacagg

SEQ ID NO: 4171453 - DNA, 25 bp, Homo sapien
gaaatcattcgctagagtgctctgg

SEQ ID NO: 4171454 - DNA, 25 bp, Homo sapien
ggccccgcagcatgttacggagaga

SEQ ID NO: 4171455 - DNA, 25 bp, Homo sapien
tgtttatgtgtgagaccgggagcca

SEQ ID NO: 4171456 - DNA, 25 bp, Homo sapien
ttcagcgaagacagattgctctcat

SEQ ID NO: 4171457 - DNA, 25 bp, Homo sapien
ctcctttcagcgaagacagattgct

SEQ ID NO: 4171458 - DNA, 25 bp, Homo sapien
ccttgacctgtgtctcttaagtccc

SEQ ID NO: 4171459 - DNA, 25 bp, Homo sapien
tcccttgacctgtgtctcttaagtc

SEQ ID NO: 4171460 - DNA, 25 bp, Homo sapien
cacaacttttagctgtgccaggtac

SEQ ID NO: 4171461 - DNA, 25 bp, Homo sapien
aaatatgtccctcactgctactgcc

SEQ ID NO: 4171462 - DNA, 25 bp, Homo sapien
aattgtagattccattacctctgga

SEQ ID NO: 4171463 - DNA, 25 bp, Homo sapien
gatgattcacaacttttagctgtgc

SEQ ID NO: 4171464 - DNA, 25 bp, Homo sapien
gaaaggtttattgtgagcactaggt

SEQ ID NO: 4171465 - DNA, 25 bp, Homo sapien
aaaggtttattgtgagcactaggta

SEQ ID NO: 4171466 - DNA, 25 bp, Homo sapien
ttgtatctagatcccactgtcttga

SEQ ID NO: 4171467 - DNA, 25 bp, Homo sapien
atggtattgtatctagatcccactg

SEQ ID NO: 4171468 - DNA, 25 bp, Homo sapien
gagggtcaatagttttcaatcgtgt

SEQ ID NO: 4171469 - DNA, 25 bp, Homo sapien
cttaggtttgtcagtattcagctta

SEQ ID NO: 4171470 - DNA, 25 bp, Homo sapien
ggtttgtcagtattcagcttatttt

SEQ ID NO: 4171471 - DNA, 25 bp, Homo sapien
tgtgataacttgagggtcaatagtt

SEQ ID NO: 4171472 - DNA, 25 bp, Homo sapien
gctctgaggctaaagagatggtact

SEQ ID NO: 4171473 - DNA, 25 bp, Homo sapien
tttcaaagccatactagcccaggga

SEQ ID NO: 4171474 - DNA, 25 bp, Homo sapien
catagggctcttcgtagaattcaga

SEQ ID NO: 4171475 - DNA, 25 bp, Homo sapien
gaattcagagtgtgaccttcatcct

SEQ ID NO: 4171476 - DNA, 25 bp, Homo sapien
tcatgtctcatattgatgtggccga

SEQ ID NO: 4171477 - DNA, 25 bp, Homo sapien
tttacacattgccaacagaaaattc

SEQ ID NO: 4171478 - DNA, 25 bp, Homo sapien
tggtacctagggtggtcatgtctca

SEQ ID NO: 4171479 - DNA, 25 bp, Homo sapien
ccgagattcaggttgagtttacaca

SEQ ID NO: 4171480 - DNA, 25 bp, Homo sapien
tgtggtggaagattatatttctcat

SEQ ID NO: 4171481 - DNA, 25 bp, Homo sapien
acatgttatgtggtggaagattata

SEQ ID NO: 4171482 - DNA, 25 bp, Homo sapien
tcatgagaagttcacgagaaacatg

SEQ ID NO: 4171483 - DNA, 25 bp, Homo sapien
cacgagaaacatgttatgtggtgga

SEQ ID NO: 4171484 - DNA, 25 bp, Homo sapien
gtttgttagagttattgcacttggc

SEQ ID NO: 4171485 - DNA, 25 bp, Homo sapien
gtggtttgttagagttattgcactt

SEQ ID NO: 4171486 - DNA, 25 bp, Homo sapien
ttgttagagttattgcacttggctt

SEQ ID NO: 4171487 - DNA, 25 bp, Homo sapien
ggtttgttagagttattgcacttgg

SEQ ID NO: 4171488 - DNA, 25 bp, Homo sapien
cactctgctgatttgagctctttgc

SEQ ID NO: 4171489 - DNA, 25 bp, Homo sapien
agtgtcctaaatcaccattattaag

SEQ ID NO: 4171490 - DNA, 25 bp, Homo sapien
cagtgtcctaaatcaccattattaa

SEQ ID NO: 4171491 - DNA, 25 bp, Homo sapien
gcaaacacattcattatgttgccag

SEQ ID NO: 4171492 - DNA, 25 bp, Homo sapien
gccagcaaacaagataggaattgca

SEQ ID NO: 4171493 - DNA, 25 bp, Homo sapien
tctttctttatcctccaattgctcc

SEQ ID NO: 4171494 - DNA, 25 bp, Homo sapien
tcattgcgctttgctattttctctt

SEQ ID NO: 4171495 - DNA, 25 bp, Homo sapien
tattgttcactgctacatccttcat

SEQ ID NO: 4171496 - DNA, 25 bp, Homo sapien
tgtattgttcactgctacatccttc

SEQ ID NO: 4171497 - DNA, 25 bp, Homo sapien
cagtgatggctttctctgtgaggaa

SEQ ID NO: 4171498 - DNA, 25 bp, Homo sapien
tgtgtattgttcactgctacatcct

SEQ ID NO: 4171499 - DNA, 25 bp, Homo sapien
gtcgatgtggaaactgttatgtttc

SEQ ID NO: 4171500 - DNA, 25 bp, Homo sapien
tagccattgtcgatgtggaaactgt

SEQ ID NO: 4171501 - DNA, 25 bp, Homo sapien
ttcccagtagccattgtcgatgtgg

SEQ ID NO: 4171502 - DNA, 25 bp, Homo sapien
cattgtcgatgtggaaactgttatg

SEQ ID NO: 4171503 - DNA, 25 bp, Homo sapien
taggaaatagattgtccaataacaa

SEQ ID NO: 4171504 - DNA, 25 bp, Homo sapien
tagattgtccaataacaatggtaac

SEQ ID NO: 4171505 - DNA, 25 bp, Homo sapien
tcaaaagggataggaaatagattgt

SEQ ID NO: 4171506 - DNA, 25 bp, Homo sapien
aacaatggtaactgtgtgaaatgca

SEQ ID NO: 4171507 - DNA, 25 bp, Homo sapien
attgctcctgtatccattcacatga

SEQ ID NO: 4171508 - DNA, 25 bp, Homo sapien
tactaaagttgacatcgtacagcac

SEQ ID NO: 4171509 - DNA, 25 bp, Homo sapien
gagttcaactttcgtatctgtacta

SEQ ID NO: 4171510 - DNA, 25 bp, Homo sapien
tcacatgatatttaatgtcctccat

SEQ ID NO: 4171511 - DNA, 25 bp, Homo sapien
cttgtttggctcatgaattgttgta

SEQ ID NO: 4171512 - DNA, 25 bp, Homo sapien
ctgatcggaacaatcagaaagccct

SEQ ID NO: 4171513 - DNA, 25 bp, Homo sapien
tctcactgatcggaacaatcagaaa

SEQ ID NO: 4171514 - DNA, 25 bp, Homo sapien
catgaattgttgtattaatatccaa

SEQ ID NO: 4171515 - DNA, 25 bp, Homo sapien
attatgacaaataactccatagatg

SEQ ID NO: 4171516 - DNA, 25 bp, Homo sapien
tgtcagtcatgtctattatgacaaa

SEQ ID NO: 4171517 - DNA, 25 bp, Homo sapien
ttaatgattccaaggcttgtcagtc

SEQ ID NO: 4171518 - DNA, 25 bp, Homo sapien
gattccaaggcttgtcagtcatgtc

SEQ ID NO: 4171519 - DNA, 25 bp, Homo sapien
gtctgcactcatgcagttcttgtct

SEQ ID NO: 4171520 - DNA, 25 bp, Homo sapien
ctatagtctgcactcatgcagttct

SEQ ID NO: 4171521 - DNA, 25 bp, Homo sapien
tatagtctgcactcatgcagttctt

SEQ ID NO: 4171522 - DNA, 25 bp, Homo sapien
tagtctgcactcatgcagttcttgt

SEQ ID NO: 4171523 - DNA, 25 bp, Homo sapien
gacgttgaatccttatcttagctat

SEQ ID NO: 4171524 - DNA, 25 bp, Homo sapien
gaaatttgctctacttctggcctat

SEQ ID NO: 4171525 - DNA, 25 bp, Homo sapien
atattagagttcactaaagggacac

SEQ ID NO: 4171526 - DNA, 25 bp, Homo sapien
gctggatatctcttcgacacactga

SEQ ID NO: 4171527 - DNA, 25 bp, Homo sapien
tactggaacttcttacttactgatg

SEQ ID NO: 4171528 - DNA, 25 bp, Homo sapien
tgcacacagtacaaagtgacccatt

SEQ ID NO: 4171529 - DNA, 25 bp, Homo sapien
caagtagttgggtgagagtgtaacc

SEQ ID NO: 4171530 - DNA, 25 bp, Homo sapien
tcagattccctgtggtctactgctc

SEQ ID NO: 4171531 - DNA, 25 bp, Homo sapien
aacagactgctcagtagcaacttca

SEQ ID NO: 4171532 - DNA, 25 bp, Homo sapien
cagcgcccatttttttcggtatcaa

SEQ ID NO: 4171533 - DNA, 25 bp, Homo sapien
tcattcctgagtaccaagaccacgg

SEQ ID NO: 4171534 - DNA, 25 bp, Homo sapien
cgaactcttcggaattgtctttcat

SEQ ID NO: 4171535 - DNA, 25 bp, Homo sapien
cgttttgtttgagcttttgtgcgga

SEQ ID NO: 4171536 - DNA, 25 bp, Homo sapien
tagggtttacatgtattgttactaa

SEQ ID NO: 4171537 - DNA, 25 bp, Homo sapien
cactgaacaaagagttgcacatatt

SEQ ID NO: 4171538 - DNA, 25 bp, Homo sapien
caataaaaggaacacagtacttata

SEQ ID NO: 4171539 - DNA, 25 bp, Homo sapien
cttcatagatctcataaatagcatg

SEQ ID NO: 4171540 - DNA, 25 bp, Homo sapien
tcatagatctcataaatagcatgca

SEQ ID NO: 4171541 - DNA, 25 bp, Homo sapien
ttcatagatctcataaatagcatgc

SEQ ID NO: 4171542 - DNA, 25 bp, Homo sapien
acatggttttctcactaaagtctgc

SEQ ID NO: 4171543 - DNA, 25 bp, Homo sapien
ttatttttgtaaccacaaagctgca

SEQ ID NO: 4171544 - DNA, 25 bp, Homo sapien
aggtccactgacatggttttctcac

SEQ ID NO: 4171545 - DNA, 25 bp, Homo sapien
actctgaactgactgccaaggtttt

SEQ ID NO: 4171546 - DNA, 25 bp, Homo sapien
actcatctgtggagacctcgatttt

SEQ ID NO: 4171547 - DNA, 25 bp, Homo sapien
ctgtggagacctcgatttttccctt

SEQ ID NO: 4171548 - DNA, 25 bp, Homo sapien
tctgtggagacctcgatttttccct

SEQ ID NO: 4171549 - DNA, 25 bp, Homo sapien
catctgtggagacctcgatttttcc

SEQ ID NO: 4171550 - DNA, 25 bp, Homo sapien
ccaaatccatagtgaagagtagaat

SEQ ID NO: 4171551 - DNA, 25 bp, Homo sapien
gtcaagataaaggaggcaactcttt

SEQ ID NO: 4171552 - DNA, 25 bp, Homo sapien
tgaaggtagaaaatagccgttccag

SEQ ID NO: 4171553 - DNA, 25 bp, Homo sapien
agtagatagaaagtccccaggctcc

SEQ ID NO: 4171554 - DNA, 25 bp, Homo sapien
tgcctccagcatagggtttggaagc

SEQ ID NO: 4171555 - DNA, 25 bp, Homo sapien
catgaaaaccactctcagggtcttg

SEQ ID NO: 4171556 - DNA, 25 bp, Homo sapien
cgtcccatgaaaaccactctcaggg

SEQ ID NO: 4171557 - DNA, 25 bp, Homo sapien
gtcttgcccagaagtgcctccagca

SEQ ID NO: 4171558 - DNA, 25 bp, Homo sapien
cgtacacccataagtgcttgctgcg

SEQ ID NO: 4171559 - DNA, 25 bp, Homo sapien
tgtttcacgtacacccataagtgct

SEQ ID NO: 4171560 - DNA, 25 bp, Homo sapien
tttagaggctctgtttcacgtacac

SEQ ID NO: 4171561 - DNA, 25 bp, Homo sapien
taagtgcttgctgcgtatctgatac

SEQ ID NO: 4171562 - DNA, 25 bp, Homo sapien
atatactcaaatctggacataaggc

SEQ ID NO: 4171563 - DNA, 25 bp, Homo sapien
tctctatacacttgtgtgcttgccc

SEQ ID NO: 4171564 - DNA, 25 bp, Homo sapien
tgccaatcttttcaggctgtctttg

SEQ ID NO: 4171565 - DNA, 25 bp, Homo sapien
gacataaggcatacgtacaagtagc

SEQ ID NO: 4171566 - DNA, 25 bp, Homo sapien
actggacttccatatagacgatttg

SEQ ID NO: 4171567 - DNA, 25 bp, Homo sapien
cagtgctgatgtggtctaatggtcc

SEQ ID NO: 4171568 - DNA, 25 bp, Homo sapien
tgcttcttgcacaactagtcacagt

SEQ ID NO: 4171569 - DNA, 25 bp, Homo sapien
ggatctctgaatctctgccctttag

SEQ ID NO: 4171570 - DNA, 25 bp, Homo sapien
cgacacggttaacagatggccttat

SEQ ID NO: 4171571 - DNA, 25 bp, Homo sapien
tctgagttggcaagaagtgggtcat

SEQ ID NO: 4171572 - DNA, 25 bp, Homo sapien
cctgagctgtcaggctcaatgctta

SEQ ID NO: 4171573 - DNA, 25 bp, Homo sapien
gacagtttccctaggcctaagtgaa

SEQ ID NO: 4171574 - DNA, 25 bp, Homo sapien
ttactcagtctctgctgccttaatg

SEQ ID NO: 4171575 - DNA, 25 bp, Homo sapien
gctgccttaatgtctggcttcaggg

SEQ ID NO: 4171576 - DNA, 25 bp, Homo sapien
agtctctgctgccttaatgtctggc

SEQ ID NO: 4171577 - DNA, 25 bp, Homo sapien
gccttaatgtctggcttcagggtgg

SEQ ID NO: 4171578 - DNA, 25 bp, Homo sapien
gttgtgtggtttctcgtgttctgtg

SEQ ID NO: 4171579 - DNA, 25 bp, Homo sapien
ccttgggaactgtagccaagttctt

SEQ ID NO: 4171580 - DNA, 25 bp, Homo sapien
tcaaacccttgggaactgtagccaa

SEQ ID NO: 4171581 - DNA, 25 bp, Homo sapien
tctgtgtattcaggttcaaaccctt

SEQ ID NO: 4171582 - DNA, 25 bp, Homo sapien
cttatcacactcctccataggcatt

SEQ ID NO: 4171583 - DNA, 25 bp, Homo sapien
cagccacgttatttaagtgattctg

SEQ ID NO: 4171584 - DNA, 25 bp, Homo sapien
ggctgctttaacagttccatcagtt

SEQ ID NO: 4171585 - DNA, 25 bp, Homo sapien
tccataggcattacaccagccacgt

SEQ ID NO: 4171586 - DNA, 25 bp, Homo sapien
ctttggccagctattgtaaccagat

SEQ ID NO: 4171587 - DNA, 25 bp, Homo sapien
cttgttctgattctaggccccctaa

SEQ ID NO: 4171588 - DNA, 25 bp, Homo sapien
atagcactagtccatgtctttggcc

SEQ ID NO: 4171589 - DNA, 25 bp, Homo sapien
cttggctggcagactaagtgttcta

SEQ ID NO: 4171590 - DNA, 25 bp, Homo sapien
tattttacagtctgaccttaagatg

SEQ ID NO: 4171591 - DNA, 25 bp, Homo sapien
tgctgctgcaaggacttgcattgcc

SEQ ID NO: 4171592 - DNA, 25 bp, Homo sapien
ccttaagatgctcttgatggtatgt

SEQ ID NO: 4171593 - DNA, 25 bp, Homo sapien
cagagttgtgtgacttctcttgtcc

SEQ ID NO: 4171594 - DNA, 25 bp, Homo sapien
tgcatcaaagcaggttggaataaaa

SEQ ID NO: 4171595 - DNA, 25 bp, Homo sapien
ccactgaaaggggtaagggacatgt

SEQ ID NO: 4171596 - DNA, 25 bp, Homo sapien
cttttgcatcaaagcaggttggaat

SEQ ID NO: 4171597 - DNA, 25 bp, Homo sapien
atgcacagcccagatgatttcagaa

SEQ ID NO: 4171598 - DNA, 25 bp, Homo sapien
cttgtcatttactttacaatcatag

SEQ ID NO: 4171599 - DNA, 25 bp, Homo sapien
tcatttactttacaatcatagagac

SEQ ID NO: 4171600 - DNA, 25 bp, Homo sapien
catttactttacaatcatagagaca

SEQ ID NO: 4171601 - DNA, 25 bp, Homo sapien
tgtcatttactttacaatcatagag

SEQ ID NO: 4171602 - DNA, 25 bp, Homo sapien
tcaagcctgggagttactctgtggc

SEQ ID NO: 4171603 - DNA, 25 bp, Homo sapien
tcagccaaaatgcttacagtgacgt

SEQ ID NO: 4171604 - DNA, 25 bp, Homo sapien
cagttaatgctagctcttggctggg

SEQ ID NO: 4171605 - DNA, 25 bp, Homo sapien
tggtaactggtaatatctggctgca

SEQ ID NO: 4171606 - DNA, 25 bp, Homo sapien
gcttatccagccaatacatgttcag

SEQ ID NO: 4171607 - DNA, 25 bp, Homo sapien
gtgctattctccgtactgagtccaa

SEQ ID NO: 4171608 - DNA, 25 bp, Homo sapien
aatgttgacttagtgctaccccagc

SEQ ID NO: 4171609 - DNA, 25 bp, Homo sapien
taagtctgccctatcccctcttagg

SEQ ID NO: 4171610 - DNA, 25 bp, Homo sapien
gaagagagtatgatcccttagcaaa

SEQ ID NO: 4171611 - DNA, 25 bp, Homo sapien
gagtatgatcccttagcaaaggggt

SEQ ID NO: 4171612 - DNA, 25 bp, Homo sapien
gagagtatgatcccttagcaaaggg

SEQ ID NO: 4171613 - DNA, 25 bp, Homo sapien
agagagtatgatcccttagcaaagg

SEQ ID NO: 4171614 - DNA, 25 bp, Homo sapien
gatcaaattcattgtaccgaggcat

SEQ ID NO: 4171615 - DNA, 25 bp, Homo sapien
tctgccatatgagaggttttcaaga

SEQ ID NO: 4171616 - DNA, 25 bp, Homo sapien
catatgagaggttttcaagaatgca

SEQ ID NO: 4171617 - DNA, 25 bp, Homo sapien
ggatcaaattcattgtaccgaggca

SEQ ID NO: 4171618 - DNA, 25 bp, Homo sapien
gagtttgcatagaagtgtctgacct

SEQ ID NO: 4171619 - DNA, 25 bp, Homo sapien
tttggattttgattcagcgatgtct

SEQ ID NO: 4171620 - DNA, 25 bp, Homo sapien
tcttggaaagaaccgagggtatatg

SEQ ID NO: 4171621 - DNA, 25 bp, Homo sapien
tcaataaggtgtggagtttgcatag

SEQ ID NO: 4171622 - DNA, 25 bp, Homo sapien
ttgtaacaaggtggttataaatagc

SEQ ID NO: 4171623 - DNA, 25 bp, Homo sapien
gttttggtaattgccagagccatgt

SEQ ID NO: 4171624 - DNA, 25 bp, Homo sapien
tgacaaggcctgaactaagtaaggt

SEQ ID NO: 4171625 - DNA, 25 bp, Homo sapien
ccatgtctccaatagcagtagagac

SEQ ID NO: 4171626 - DNA, 25 bp, Homo sapien
tgcctgccactcatttcattagttt

SEQ ID NO: 4171627 - DNA, 25 bp, Homo sapien
cgtttgtgcttagagaccagtagat

SEQ ID NO: 4171628 - DNA, 25 bp, Homo sapien
tcattagtttaagagaatgttcgtt

SEQ ID NO: 4171629 - DNA, 25 bp, Homo sapien
tagatttcgagatggcacagagcca

SEQ ID NO: 4171630 - DNA, 25 bp, Homo sapien
ctcctcctctgtgcacggttgcggt

SEQ ID NO: 4171631 - DNA, 25 bp, Homo sapien
ctgtgcacggttgcggtggaactct

SEQ ID NO: 4171632 - DNA, 25 bp, Homo sapien
cctctgtgcacggttgcggtggaac

SEQ ID NO: 4171633 - DNA, 25 bp, Homo sapien
ctcctctgtgcacggttgcggtgga

SEQ ID NO: 4171634 - DNA, 25 bp, Homo sapien
cttcaatcattgtgtattagcctag

SEQ ID NO: 4171635 - DNA, 25 bp, Homo sapien
caatcattgtgtattagcctagttt

SEQ ID NO: 4171636 - DNA, 25 bp, Homo sapien
ttcaatcattgtgtattagcctagt

SEQ ID NO: 4171637 - DNA, 25 bp, Homo sapien
gtcttcaatcattgtgtattagcct

SEQ ID NO: 4171638 - DNA, 25 bp, Homo sapien
tctcttgttggctcgcaatttttgc

SEQ ID NO: 4171639 - DNA, 25 bp, Homo sapien
tttctctgtgaatgcgccccactgg

SEQ ID NO: 4171640 - DNA, 25 bp, Homo sapien
gaagtttaaaatgaaggcggcacca

SEQ ID NO: 4171641 - DNA, 25 bp, Homo sapien
gcctcatcatgtgaccgtttctctg

SEQ ID NO: 4171642 - DNA, 25 bp, Homo sapien
caatatagcacgtagtgaagggctc

SEQ ID NO: 4171643 - DNA, 25 bp, Homo sapien
gcaacccaacatcgtaaggcacttt

SEQ ID NO: 4171644 - DNA, 25 bp, Homo sapien
tacaacatcctagtgagatagctgg

SEQ ID NO: 4171645 - DNA, 25 bp, Homo sapien
gatagctggatagctgggcagataa

SEQ ID NO: 4171646 - DNA, 25 bp, Homo sapien
ggtccactactgtcagagcaaggca

SEQ ID NO: 4171647 - DNA, 25 bp, Homo sapien
caaaaagtaatgacgaggatactgg

SEQ ID NO: 4171648 - DNA, 25 bp, Homo sapien
tactggacaggcacttaagagccct

SEQ ID NO: 4171649 - DNA, 25 bp, Homo sapien
gacgaggatactggacaggcactta

SEQ ID NO: 4171650 - DNA, 25 bp, Homo sapien
taatgttccagctaaaactgtcacc

SEQ ID NO: 4171651 - DNA, 25 bp, Homo sapien
ttatgggagtgctcattccttgggc

SEQ ID NO: 4171652 - DNA, 25 bp, Homo sapien
gatacattgacttttttacctggaa

SEQ ID NO: 4171653 - DNA, 25 bp, Homo sapien
tctgaggtaatcaagtccaagttgc

SEQ ID NO: 4171654 - DNA, 25 bp, Homo sapien
gctctcatacctgactattctttgg

SEQ ID NO: 4171655 - DNA, 25 bp, Homo sapien
tggaatgcccttaactaacctctgt

SEQ ID NO: 4171656 - DNA, 25 bp, Homo sapien
tcaatgtcatgtgggctcactacaa

SEQ ID NO: 4171657 - DNA, 25 bp, Homo sapien
tgcccagctaatggtccttgccttt

SEQ ID NO: 4171658 - DNA, 25 bp, Homo sapien
tgggcctggccatttggagtgtcag

SEQ ID NO: 4171659 - DNA, 25 bp, Homo sapien
gctccccatcaccaggctcatggcc

SEQ ID NO: 4171660 - DNA, 25 bp, Homo sapien
tgcctttgggagtggattgaagccc

SEQ ID NO: 4171661 - DNA, 25 bp, Homo sapien
tcagggcaggtgtgatatctccgca

SEQ ID NO: 4171662 - DNA, 25 bp, Homo sapien
ttgtggcctgtactgcttcatgcag

SEQ ID NO: 4171663 - DNA, 25 bp, Homo sapien
actgcttcatgcagtacatcctcag

SEQ ID NO: 4171664 - DNA, 25 bp, Homo sapien
ttcatgcagtacatcctcagagttc

SEQ ID NO: 4171665 - DNA, 25 bp, Homo sapien
gtggttgtggcctgtactgcttcat

SEQ ID NO: 4171666 - DNA, 25 bp, Homo sapien
tgaactacaattggtatctgagact

SEQ ID NO: 4171667 - DNA, 25 bp, Homo sapien
tctgagactttttctgtggataatt

SEQ ID NO: 4171668 - DNA, 25 bp, Homo sapien
ccctttgatgcagagtggcctttct

SEQ ID NO: 4171669 - DNA, 25 bp, Homo sapien
tgtggataatttgtacccataccct

SEQ ID NO: 4171670 - DNA, 25 bp, Homo sapien
tgttcccattgaggttgcagcttct

SEQ ID NO: 4171671 - DNA, 25 bp, Homo sapien
tttgtattcagccagggaccgtgga

SEQ ID NO: 4171672 - DNA, 25 bp, Homo sapien
tggtgctatgttcagtactcgctct

SEQ ID NO: 4171673 - DNA, 25 bp, Homo sapien
ggaccgtggagtattcccagtgtat

SEQ ID NO: 4171674 - DNA, 25 bp, Homo sapien
tcagatcataaaacctggtctagct

SEQ ID NO: 4171675 - DNA, 25 bp, Homo sapien
tggtcctactgagattgctctgcct

SEQ ID NO: 4171676 - DNA, 25 bp, Homo sapien
gcgtggattttaaccgaggcacgga

SEQ ID NO: 4171677 - DNA, 25 bp, Homo sapien
caggactgcctgttcgcagcgtgga

SEQ ID NO: 4171678 - DNA, 25 bp, Homo sapien
cagccggatcggaaacagttgccac

SEQ ID NO: 4171679 - DNA, 25 bp, Homo sapien
aacccaaaggcgcatcaggctttca

SEQ ID NO: 4171680 - DNA, 25 bp, Homo sapien
tggagctgtcgtcctgacaacccaa

SEQ ID NO: 4171681 - DNA, 25 bp, Homo sapien
caggctttcattgaggctggctgct

SEQ ID NO: 4171682 - DNA, 25 bp, Homo sapien
aggaaatcagccaggcctcagatgg

SEQ ID NO: 4171683 - DNA, 25 bp, Homo sapien
gatgcagcagtttttagctatttcc

SEQ ID NO: 4171684 - DNA, 25 bp, Homo sapien
cttcccgtatctggggggtagatca

SEQ ID NO: 4171685 - DNA, 25 bp, Homo sapien
gggtagatcaaaaagcgtagtagca

SEQ ID NO: 4171686 - DNA, 25 bp, Homo sapien
tgcaatattcttcccgtatctgggg

SEQ ID NO: 4171687 - DNA, 25 bp, Homo sapien
tttcaaggttgatggtctccgagcc

SEQ ID NO: 4171688 - DNA, 25 bp, Homo sapien
taggcgaacgaccaccatcggtcat

SEQ ID NO: 4171689 - DNA, 25 bp, Homo sapien
tccacccactccactaagggattgt

SEQ ID NO: 4171690 - DNA, 25 bp, Homo sapien
tgtccctgtgcactaggctaggcga

SEQ ID NO: 4171691 - DNA, 25 bp, Homo sapien
tccatgttccccttacttacaaaga

SEQ ID NO: 4171692 - DNA, 25 bp, Homo sapien
ctatctgtgattaattgtttggcta

SEQ ID NO: 4171693 - DNA, 25 bp, Homo sapien
tcagcacacagtagtctatctgtga

SEQ ID NO: 4171694 - DNA, 25 bp, Homo sapien
gtctatctgtgattaattgtttggc

SEQ ID NO: 4171695 - DNA, 25 bp, Homo sapien
agcttgttcagcacacagtagtcta

SEQ ID NO: 4171696 - DNA, 25 bp, Homo sapien
ttaaaataaaattgtcgtgcatggt

SEQ ID NO: 4171697 - DNA, 25 bp, Homo sapien
tgcatggttcctgtagaggtgagca

SEQ ID NO: 4171698 - DNA, 25 bp, Homo sapien
tcgtgcatggttcctgtagaggtga

SEQ ID NO: 4171699 - DNA, 25 bp, Homo sapien
aaattgtcgtgcatggttcctgtag

SEQ ID NO: 4171700 - DNA, 25 bp, Homo sapien
actctctccacacatttggtgtcac

SEQ ID NO: 4171701 - DNA, 25 bp, Homo sapien
ctccacacatttggtgtcacacatt

SEQ ID NO: 4171702 - DNA, 25 bp, Homo sapien
atttggtgtcacacatttttcttat

SEQ ID NO: 4171703 - DNA, 25 bp, Homo sapien
acacatttggtgtcacacatttttc

SEQ ID NO: 4171704 - DNA, 25 bp, Homo sapien
catgatggctttcgactcttaaaag

SEQ ID NO: 4171705 - DNA, 25 bp, Homo sapien
atgatggctttcgactcttaaaaga

SEQ ID NO: 4171706 - DNA, 25 bp, Homo sapien
tgatggctttcgactcttaaaagaa

SEQ ID NO: 4171707 - DNA, 25 bp, Homo sapien
tcatgatggctttcgactcttaaaa

SEQ ID NO: 4171708 - DNA, 25 bp, Homo sapien
acaatggaatatgggctggcaaagc

SEQ ID NO: 4171709 - DNA, 25 bp, Homo sapien
tcccaagactgcctgaataacgagg

SEQ ID NO: 4171710 - DNA, 25 bp, Homo sapien
ccagggatcatgcatgacttattca

SEQ ID NO: 4171711 - DNA, 25 bp, Homo sapien
gggctgataatatacccagggatca

SEQ ID NO: 4171712 - DNA, 25 bp, Homo sapien
gtcatgaatatggatgacatttact

SEQ ID NO: 4171713 - DNA, 25 bp, Homo sapien
ttagtcatgaatatggatgacattt

SEQ ID NO: 4171714 - DNA, 25 bp, Homo sapien
tcatgaatatggatgacatttactc

SEQ ID NO: 4171715 - DNA, 25 bp, Homo sapien
agtcatgaatatggatgacatttac

SEQ ID NO: 4171716 - DNA, 25 bp, Homo sapien
gccaacaaggaaatgacgctccaat

SEQ ID NO: 4171717 - DNA, 25 bp, Homo sapien
catcatgatttgacatagcaaaccc

SEQ ID NO: 4171718 - DNA, 25 bp, Homo sapien
agcaaaccctatcaaattctcccag

SEQ ID NO: 4171719 - DNA, 25 bp, Homo sapien
cccagtaatgttcctgttaaagtga

SEQ ID NO: 4171720 - DNA, 25 bp, Homo sapien
gcagagacctttaaccaagagcaag

SEQ ID NO: 4171721 - DNA, 25 bp, Homo sapien
gagagataatacattaccttgactc

SEQ ID NO: 4171722 - DNA, 25 bp, Homo sapien
aatacattaccttgactctccactc

SEQ ID NO: 4171723 - DNA, 25 bp, Homo sapien
aaggctctgctaaggtggagtggag

SEQ ID NO: 4171724 - DNA, 25 bp, Homo sapien
attttggtgattatcgccatcttga

SEQ ID NO: 4171725 - DNA, 25 bp, Homo sapien
cgccatcttgaacaggcaggaatga

SEQ ID NO: 4171726 - DNA, 25 bp, Homo sapien
acactttgcatctctgtccgtggtg

SEQ ID NO: 4171727 - DNA, 25 bp, Homo sapien
tgacactttgcatctctgtccgtgg

SEQ ID NO: 4171728 - DNA, 25 bp, Homo sapien
gggcttcgcagagcactcatcgggt

SEQ ID NO: 4171729 - DNA, 25 bp, Homo sapien
tcgacatagttgttactcagtgggc

SEQ ID NO: 4171730 - DNA, 25 bp, Homo sapien
caccagagatccttggagctcgaca

SEQ ID NO: 4171731 - DNA, 25 bp, Homo sapien
taggacaattaagtccctgctgccc

SEQ ID NO: 4171732 - DNA, 25 bp, Homo sapien
ttgcctctaaggcagctccaaggaa

SEQ ID NO: 4171733 - DNA, 25 bp, Homo sapien
gattccagtgccaacaaggatgtta

SEQ ID NO: 4171734 - DNA, 25 bp, Homo sapien
tgtggtgtccctgtttgtactccag

SEQ ID NO: 4171735 - DNA, 25 bp, Homo sapien
tggtgcaaatggcagagcaatgtca

SEQ ID NO: 4171736 - DNA, 25 bp, Homo sapien
tgagctacactatgctttatgagca

SEQ ID NO: 4171737 - DNA, 25 bp, Homo sapien
gagctacactatgctttatgagcat

SEQ ID NO: 4171738 - DNA, 25 bp, Homo sapien
agattctagagcctctcgactgaaa

SEQ ID NO: 4171739 - DNA, 25 bp, Homo sapien
gattctagagcctctcgactgaaat

SEQ ID NO: 4171740 - DNA, 25 bp, Homo sapien
ctgttgtcgagtacagattctagag

SEQ ID NO: 4171741 - DNA, 25 bp, Homo sapien
agggttgctgttgtcgagtacagat

SEQ ID NO: 4171742 - DNA, 25 bp, Homo sapien
caaactggaatgcaacaccccttat

SEQ ID NO: 4171743 - DNA, 25 bp, Homo sapien
tactagcacattgacgaaaaatgca

SEQ ID NO: 4171744 - DNA, 25 bp, Homo sapien
caccccttatatcttggaaacagaa

SEQ ID NO: 4171745 - DNA, 25 bp, Homo sapien
aaaatgcatatgttatgctgtctag

SEQ ID NO: 4171746 - DNA, 25 bp, Homo sapien
tgaattgaatcagaaacccccaaaa

SEQ ID NO: 4171747 - DNA, 25 bp, Homo sapien
cagagaggattgtagcttttgcagc

SEQ ID NO: 4171748 - DNA, 25 bp, Homo sapien
ttcacagaactattatgtgtagcct

SEQ ID NO: 4171749 - DNA, 25 bp, Homo sapien
actattatgtgtagcctgaattgaa

SEQ ID NO: 4171750 - DNA, 25 bp, Homo sapien
tgcttccttctcatgaaacgacttt

SEQ ID NO: 4171751 - DNA, 25 bp, Homo sapien
gcttccttctcatgaaacgactttc

SEQ ID NO: 4171752 - DNA, 25 bp, Homo sapien
cttccttctcatgaaacgactttct

SEQ ID NO: 4171753 - DNA, 25 bp, Homo sapien
tccttctcatgaaacgactttcttt

SEQ ID NO: 4171754 - DNA, 25 bp, Homo sapien
ctaccctctatcgaaactgaacgaa

SEQ ID NO: 4171755 - DNA, 25 bp, Homo sapien
cctctatcgaaactgaacgaactgt

SEQ ID NO: 4171756 - DNA, 25 bp, Homo sapien
tatcgaaactgaacgaactgtaatt

SEQ ID NO: 4171757 - DNA, 25 bp, Homo sapien
gtaattcccagaccctatttcatgg

SEQ ID NO: 4171758 - DNA, 25 bp, Homo sapien
ctatgtgagaaattggggttttaat

SEQ ID NO: 4171759 - DNA, 25 bp, Homo sapien
caatggtagagtcaaatagagcaga

SEQ ID NO: 4171760 - DNA, 25 bp, Homo sapien
tagtcattggctaaaacacaagacc

SEQ ID NO: 4171761 - DNA, 25 bp, Homo sapien
ttgagcaccagtgtgtatgtagtca

SEQ ID NO: 4171762 - DNA, 25 bp, Homo sapien
gccattgcctaggtgtcaaatcatt

SEQ ID NO: 4171763 - DNA, 25 bp, Homo sapien
tcctacctccctgtatcaagcatga

SEQ ID NO: 4171764 - DNA, 25 bp, Homo sapien
tacaccctcagtaaagcaaacagga

SEQ ID NO: 4171765 - DNA, 25 bp, Homo sapien
ccatgttttaagtagctacaggagc

SEQ ID NO: 4171766 - DNA, 25 bp, Homo sapien
taatttaaggccttccacaatgaac

SEQ ID NO: 4171767 - DNA, 25 bp, Homo sapien
tttgaagaaagacaggcgtcttcat

SEQ ID NO: 4171768 - DNA, 25 bp, Homo sapien
atttgaagaaagacaggcgtcttca

SEQ ID NO: 4171769 - DNA, 25 bp, Homo sapien
agatttgaagaaagacaggcgtctt

SEQ ID NO: 4171770 - DNA, 25 bp, Homo sapien
gatttgaagaaagacaggcgtcttc

SEQ ID NO: 4171771 - DNA, 25 bp, Homo sapien
gcattaattatctctcaccttggaa

SEQ ID NO: 4171772 - DNA, 25 bp, Homo sapien
tattctgacaagtggtgtactgcaa

SEQ ID NO: 4171773 - DNA, 25 bp, Homo sapien
cagtcttatattggtcatccctccc

SEQ ID NO: 4171774 - DNA, 25 bp, Homo sapien
tcagattccagaggtttaacgccat

SEQ ID NO: 4171775 - DNA, 25 bp, Homo sapien
ttatctgcttctgattcatcattct

SEQ ID NO: 4171776 - DNA, 25 bp, Homo sapien
caccctgaaattcatctaacttgct

SEQ ID NO: 4171777 - DNA, 25 bp, Homo sapien
tgattcatcattctctgcccacttt

SEQ ID NO: 4171778 - DNA, 25 bp, Homo sapien
cactttccaccctgaaattcatcta

SEQ ID NO: 4171779 - DNA, 25 bp, Homo sapien
taactcccaattacacttggcaaat

SEQ ID NO: 4171780 - DNA, 25 bp, Homo sapien
aaatgcacagatattccgtgtggca

SEQ ID NO: 4171781 - DNA, 25 bp, Homo sapien
cgtgtggcagtttagcatttaccca

SEQ ID NO: 4171782 - DNA, 25 bp, Homo sapien
gcaggagatgcacataactcccaat

SEQ ID NO: 4171783 - DNA, 25 bp, Homo sapien
ctttaattcttctggatgactgtac

SEQ ID NO: 4171784 - DNA, 25 bp, Homo sapien
ttcttctggatgactgtacagccat

SEQ ID NO: 4171785 - DNA, 25 bp, Homo sapien
ttaattcttctggatgactgtacag

SEQ ID NO: 4171786 - DNA, 25 bp, Homo sapien
aattcttctggatgactgtacagcc

SEQ ID NO: 4171787 - DNA, 25 bp, Homo sapien
tgaagtatgctctggaaatataaat

SEQ ID NO: 4171788 - DNA, 25 bp, Homo sapien
gaagtatgctctggaaatataaata

SEQ ID NO: 4171789 - DNA, 25 bp, Homo sapien
aagtatgctctggaaatataaatat

SEQ ID NO: 4171790 - DNA, 25 bp, Homo sapien
gtgaagtatgctctggaaatataaa

SEQ ID NO: 4171791 - DNA, 25 bp, Homo sapien
tatttctgggtcctgagcaatttga

SEQ ID NO: 4171792 - DNA, 25 bp, Homo sapien
cctgagcaatttgaacacttttaat

SEQ ID NO: 4171793 - DNA, 25 bp, Homo sapien
cacttttaattgtgctgaaaatcat

SEQ ID NO: 4171794 - DNA, 25 bp, Homo sapien
cacctatttctgggtcctgagcaat

SEQ ID NO: 4171795 - DNA, 25 bp, Homo sapien
gctgcctaaagctaataactaactt

SEQ ID NO: 4171796 - DNA, 25 bp, Homo sapien
ccacatgggagcatgtaagcctgaa

SEQ ID NO: 4171797 - DNA, 25 bp, Homo sapien
tgactattgcaagggttccacatgg

SEQ ID NO: 4171798 - DNA, 25 bp, Homo sapien
cagtttcacgttgactattgcaagg

SEQ ID NO: 4171799 - DNA, 25 bp, Homo sapien
ttctctttgcaaatgatttggtata

SEQ ID NO: 4171800 - DNA, 25 bp, Homo sapien
tctctttgcaaatgatttggtatac

SEQ ID NO: 4171801 - DNA, 25 bp, Homo sapien
cttctctttgcaaatgatttggtat

SEQ ID NO: 4171802 - DNA, 25 bp, Homo sapien
tcctcttggctataattttggcata

SEQ ID NO: 4171803 - DNA, 25 bp, Homo sapien
taattttggcataccactcaccttt

SEQ ID NO: 4171804 - DNA, 25 bp, Homo sapien
cacctttcatgccttgccttactat

SEQ ID NO: 4171805 - DNA, 25 bp, Homo sapien
ctttcatgccttgccttactatacc

SEQ ID NO: 4171806 - DNA, 25 bp, Homo sapien
ttgtctttctggcatccaatgctca

SEQ ID NO: 4171807 - DNA, 25 bp, Homo sapien
tctttgtctttctggcatccaatgc

SEQ ID NO: 4171808 - DNA, 25 bp, Homo sapien
ggtctttgtctttctggcatccaat

SEQ ID NO: 4171809 - DNA, 25 bp, Homo sapien
tgtctttctggcatccaatgctcat

SEQ ID NO: 4171810 - DNA, 25 bp, Homo sapien
tctgattaggaagcctatgtttttc

SEQ ID NO: 4171811 - DNA, 25 bp, Homo sapien
ctctgattaggaagcctatgttttt

SEQ ID NO: 4171812 - DNA, 25 bp, Homo sapien
taggaagcctatgtttttccacttc

SEQ ID NO: 4171813 - DNA, 25 bp, Homo sapien
ctgattaggaagcctatgtttttcc

SEQ ID NO: 4171814 - DNA, 25 bp, Homo sapien
ctctagcaagatatatctccatgtc

SEQ ID NO: 4171815 - DNA, 25 bp, Homo sapien
tctccatgtcttaagtctggaataa

SEQ ID NO: 4171816 - DNA, 25 bp, Homo sapien
taagtctggaataatctgggatctg

SEQ ID NO: 4171817 - DNA, 25 bp, Homo sapien
aagctcagagtggactttggtaccc

SEQ ID NO: 4171818 - DNA, 25 bp, Homo sapien
tgtggcagacccctttcagtaaaac

SEQ ID NO: 4171819 - DNA, 25 bp, Homo sapien
tgcttgagcatgatctgtgggtaca

SEQ ID NO: 4171820 - DNA, 25 bp, Homo sapien
tagatagaatggagggcaggtcctc

SEQ ID NO: 4171821 - DNA, 25 bp, Homo sapien
aagagaaatgcgctcacggttcgaa

SEQ ID NO: 4171822 - DNA, 25 bp, Homo sapien
tgttgccatggtccactgaacactt

SEQ ID NO: 4171823 - DNA, 25 bp, Homo sapien
cattctttgtgttgccatggtccac

SEQ ID NO: 4171824 - DNA, 25 bp, Homo sapien
tcttgactatcacttctgcatggca

SEQ ID NO: 4171825 - DNA, 25 bp, Homo sapien
tcatcttgactatcacttctgcatg

SEQ ID NO: 4171826 - DNA, 25 bp, Homo sapien
ttctggtagagaggtgccaagaaca

SEQ ID NO: 4171827 - DNA, 25 bp, Homo sapien
tgggatggttgttacttcagaggac

SEQ ID NO: 4171828 - DNA, 25 bp, Homo sapien
tacagtgtggttaaggagccgtgtc

SEQ ID NO: 4171829 - DNA, 25 bp, Homo sapien
gtgccaagaacagagggtacagtgt

SEQ ID NO: 4171830 - DNA, 25 bp, Homo sapien
ctattatggtaatagatgctttggg

SEQ ID NO: 4171831 - DNA, 25 bp, Homo sapien
ctggtgggtaaaagatgtatgcttc

SEQ ID NO: 4171832 - DNA, 25 bp, Homo sapien
tgtttcccatggctattatggtaat

SEQ ID NO: 4171833 - DNA, 25 bp, Homo sapien
tttcctggtgggtaaaagatgtatg

SEQ ID NO: 4171834 - DNA, 25 bp, Homo sapien
tctctcagaggtcaaacaggcacag

SEQ ID NO: 4171835 - DNA, 25 bp, Homo sapien
gaacataaggcgaacactggcattc

SEQ ID NO: 4171836 - DNA, 25 bp, Homo sapien
tgcagtttggcctccacaaggaagg

SEQ ID NO: 4171837 - DNA, 25 bp, Homo sapien
taaccctgtggctctacaagaggga

SEQ ID NO: 4171838 - DNA, 25 bp, Homo sapien
gattacactgaaaattgctatccat

SEQ ID NO: 4171839 - DNA, 25 bp, Homo sapien
ctggctgattacactgaaaattgct

SEQ ID NO: 4171840 - DNA, 25 bp, Homo sapien
ggctgattacactgaaaattgctat

SEQ ID NO: 4171841 - DNA, 25 bp, Homo sapien
ctgattacactgaaaattgctatcc

SEQ ID NO: 4171842 - DNA, 25 bp, Homo sapien
tgtgattagaagtgaaggaagcaaa

SEQ ID NO: 4171843 - DNA, 25 bp, Homo sapien
taggtagaattctcctgtggttttc

SEQ ID NO: 4171844 - DNA, 25 bp, Homo sapien
ccaggcagtggatacttgatgtatt

SEQ ID NO: 4171845 - DNA, 25 bp, Homo sapien
caaacatactaggtagaattctcct

SEQ ID NO: 4171846 - DNA, 25 bp, Homo sapien
tttccatgtcccatagcactgaagt

SEQ ID NO: 4171847 - DNA, 25 bp, Homo sapien
gactcttggccaattgcaggtagca

SEQ ID NO: 4171848 - DNA, 25 bp, Homo sapien
gattagatgggcttggtctgactct

SEQ ID NO: 4171849 - DNA, 25 bp, Homo sapien
gatgaacaagtaatgggctcttctg

SEQ ID NO: 4171850 - DNA, 25 bp, Homo sapien
acagatcttccctacggctgtgaat

SEQ ID NO: 4171851 - DNA, 25 bp, Homo sapien
cctacggctgtgaatgacaaggatt

SEQ ID NO: 4171852 - DNA, 25 bp, Homo sapien
gatttgtccaggactactggtctga

SEQ ID NO: 4171853 - DNA, 25 bp, Homo sapien
aggatttgtccaggactactggtct

SEQ ID NO: 4171854 - DNA, 25 bp, Homo sapien
caacaaatacctctttgctaagcaa

SEQ ID NO: 4171855 - DNA, 25 bp, Homo sapien
gcaatgaattgtagagcccaatatc

SEQ ID NO: 4171856 - DNA, 25 bp, Homo sapien
gatgcagtaattatacaacaaatac

SEQ ID NO: 4171857 - DNA, 25 bp, Homo sapien
tgctaagcaatgaattgtagagccc

SEQ ID NO: 4171858 - DNA, 25 bp, Homo sapien
tctatctgcgaatgatttggcaaca

SEQ ID NO: 4171859 - DNA, 25 bp, Homo sapien
tgacgattgcgctcagtgctcaggt

SEQ ID NO: 4171860 - DNA, 25 bp, Homo sapien
taaatgtgtcagaaacgtggcagta

SEQ ID NO: 4171861 - DNA, 25 bp, Homo sapien
catactatgtgcaagacccaattct

SEQ ID NO: 4171862 - DNA, 25 bp, Homo sapien
tcttctctcggtttttgtcgaggtc

SEQ ID NO: 4171863 - DNA, 25 bp, Homo sapien
taatttccctgttgtactgtcaagt

SEQ ID NO: 4171864 - DNA, 25 bp, Homo sapien
ggtcttcagttgttgatagtgattc

SEQ ID NO: 4171865 - DNA, 25 bp, Homo sapien
ctgtcaagtattggaacttattcct

SEQ ID NO: 4171866 - DNA, 25 bp, Homo sapien
ctcctgagtcagtgtaggacatccg

SEQ ID NO: 4171867 - DNA, 25 bp, Homo sapien
gtcagtgtaggacatccgctttctt

SEQ ID NO: 4171868 - DNA, 25 bp, Homo sapien
gtaaattatttacaggaactatgag

SEQ ID NO: 4171869 - DNA, 25 bp, Homo sapien
ttacaggaactatgagtctgcccat

SEQ ID NO: 4171870 - DNA, 25 bp, Homo sapien
catttttgaagaggacagttagctc

SEQ ID NO: 4171871 - DNA, 25 bp, Homo sapien
cagctgtattctaggtattctgacc

SEQ ID NO: 4171872 - DNA, 25 bp, Homo sapien
tgaccacacctgaaatatcacgttt

SEQ ID NO: 4171873 - DNA, 25 bp, Homo sapien
tagttgtattatagtcagcaggtct

SEQ ID NO: 4171874 - DNA, 25 bp, Homo sapien
ctttctagatgtcttgctaaatttt

SEQ ID NO: 4171875 - DNA, 25 bp, Homo sapien
ctagatgtcttgctaaattttaatt

SEQ ID NO: 4171876 - DNA, 25 bp, Homo sapien
tctagatgtcttgctaaattttaat

SEQ ID NO: 4171877 - DNA, 25 bp, Homo sapien
ttctagatgtcttgctaaattttaa

SEQ ID NO: 4171878 - DNA, 25 bp, Homo sapien
ttttgcccctcttgctagggtctca

SEQ ID NO: 4171879 - DNA, 25 bp, Homo sapien
aaaaatacagtctttgttctagcca

SEQ ID NO: 4171880 - DNA, 25 bp, Homo sapien
tcctaacttcaaccaggcattcagc

SEQ ID NO: 4171881 - DNA, 25 bp, Homo sapien
catgctccttgctgtaataagaact

SEQ ID NO: 4171882 - DNA, 25 bp, Homo sapien
agagtccggccacagcaggtccaaa

SEQ ID NO: 4171883 - DNA, 25 bp, Homo sapien
cgcacactggctgcaactaaccata

SEQ ID NO: 4171884 - DNA, 25 bp, Homo sapien
atgtccagtagagggagcctacata

SEQ ID NO: 4171885 - DNA, 25 bp, Homo sapien
tatcacaattgagagtccggccaca

SEQ ID NO: 4171886 - DNA, 25 bp, Homo sapien
gaagcagtagtaattatcataagtc

SEQ ID NO: 4171887 - DNA, 25 bp, Homo sapien
tttgtaactctgcagaagcagtagt

SEQ ID NO: 4171888 - DNA, 25 bp, Homo sapien
aattgatgtagcagatttgtaactc

SEQ ID NO: 4171889 - DNA, 25 bp, Homo sapien
taagtctcccggaagaatttgagca

SEQ ID NO: 4171890 - DNA, 25 bp, Homo sapien
gctttgagaagccttacaattgtag

SEQ ID NO: 4171891 - DNA, 25 bp, Homo sapien
aattgtaggtagtgcatcggttgtg

SEQ ID NO: 4171892 - DNA, 25 bp, Homo sapien
gaagccttacaattgtaggtagtgc

SEQ ID NO: 4171893 - DNA, 25 bp, Homo sapien
ttggtcagctttgagaagccttaca

SEQ ID NO: 4171894 - DNA, 25 bp, Homo sapien
ctttgtcgttgttgaaagccttcaa

SEQ ID NO: 4171895 - DNA, 25 bp, Homo sapien
gctttaaatcttatctcaaggacgc

SEQ ID NO: 4171896 - DNA, 25 bp, Homo sapien
tgcttgaaaaacacaggcctaagtt

SEQ ID NO: 4171897 - DNA, 25 bp, Homo sapien
tcaaggacgcttttcagcactccct

SEQ ID NO: 4171898 - DNA, 25 bp, Homo sapien
aggagaggtagtttgtggagtagaa

SEQ ID NO: 4171899 - DNA, 25 bp, Homo sapien
gaggtagtttgtggagtagaaggaa

SEQ ID NO: 4171900 - DNA, 25 bp, Homo sapien
gagaggtagtttgtggagtagaagg

SEQ ID NO: 4171901 - DNA, 25 bp, Homo sapien
ctgaaaaaggagaggtagtttgtgg

SEQ ID NO: 4171902 - DNA, 25 bp, Homo sapien
ttctcaaaagacatcccctctacag

SEQ ID NO: 4171903 - DNA, 25 bp, Homo sapien
atcccctctacagagtgataatttc

SEQ ID NO: 4171904 - DNA, 25 bp, Homo sapien
cagccaagaacacctctaattttgg

SEQ ID NO: 4171905 - DNA, 25 bp, Homo sapien
cctgtcagccaagaacacctctaat

SEQ ID NO: 4171906 - DNA, 25 bp, Homo sapien
catggaggcataagtgcacttgttg

SEQ ID NO: 4171907 - DNA, 25 bp, Homo sapien
tggagatgtgaggttactgtcatat

SEQ ID NO: 4171908 - DNA, 25 bp, Homo sapien
ttgacaaccgagagttgaaagattc

SEQ ID NO: 4171909 - DNA, 25 bp, Homo sapien
gagaaatacatttgacaaccgagag

SEQ ID NO: 4171910 - DNA, 25 bp, Homo sapien
tcactgaaaggccagatgacatgtg

SEQ ID NO: 4171911 - DNA, 25 bp, Homo sapien
tatgtgtgctcctctactgactcaa

SEQ ID NO: 4171912 - DNA, 25 bp, Homo sapien
tcagtttgacaggagatgtaagccc

SEQ ID NO: 4171913 - DNA, 25 bp, Homo sapien
caaatcacagagagcatccagtggt

SEQ ID NO: 4171914 - DNA, 25 bp, Homo sapien
cagtttgcagtcctgttgtttctca

SEQ ID NO: 4171915 - DNA, 25 bp, Homo sapien
gcattctgttcagtttgcagtcctg

SEQ ID NO: 4171916 - DNA, 25 bp, Homo sapien
ggataaggatcaagctgactcataa

SEQ ID NO: 4171917 - DNA, 25 bp, Homo sapien
taagaactctcagtccatggataag

SEQ ID NO: 4171918 - DNA, 25 bp, Homo sapien
attttcttacatctacgggctcaga

SEQ ID NO: 4171919 - DNA, 25 bp, Homo sapien
aacgcaaaaatcctaatgttggaga

SEQ ID NO: 4171920 - DNA, 25 bp, Homo sapien
aatcctaatgttggagaatccacga

SEQ ID NO: 4171921 - DNA, 25 bp, Homo sapien
ttcttacatctacgggctcagatct

SEQ ID NO: 4171922 - DNA, 25 bp, Homo sapien
gatgacatctaagcccatttcaaaa

SEQ ID NO: 4171923 - DNA, 25 bp, Homo sapien
tcagtattcttcatccctgcaggct

SEQ ID NO: 4171924 - DNA, 25 bp, Homo sapien
aatatccagttggtccaattagagg

SEQ ID NO: 4171925 - DNA, 25 bp, Homo sapien
gaatttctgattcccagtctggtca

SEQ ID NO: 4171926 - DNA, 25 bp, Homo sapien
gatagagttgcaggcattctgagaa

SEQ ID NO: 4171927 - DNA, 25 bp, Homo sapien
gagttgcaggcattctgagaactca

SEQ ID NO: 4171928 - DNA, 25 bp, Homo sapien
tagagttgcaggcattctgagaact

SEQ ID NO: 4171929 - DNA, 25 bp, Homo sapien
tgcaggcattctgagaactcattga

SEQ ID NO: 4171930 - DNA, 25 bp, Homo sapien
ttatgcagcagtagcctgtagattc

SEQ ID NO: 4171931 - DNA, 25 bp, Homo sapien
gcagcagtagcctgtagattcttgg

SEQ ID NO: 4171932 - DNA, 25 bp, Homo sapien
tgcagcagtagcctgtagattcttg

SEQ ID NO: 4171933 - DNA, 25 bp, Homo sapien
tatgcagcagtagcctgtagattct

SEQ ID NO: 4171934 - DNA, 25 bp, Homo sapien
ataaccagcacactgctaaagccat

SEQ ID NO: 4171935 - DNA, 25 bp, Homo sapien
tcgtataaatcatcctgttgctgct

SEQ ID NO: 4171936 - DNA, 25 bp, Homo sapien
gctgctgccgtcttctaaaagccag

SEQ ID NO: 4171937 - DNA, 25 bp, Homo sapien
tttctgctgtaggtcgtataaatca

SEQ ID NO: 4171938 - DNA, 25 bp, Homo sapien
gttgctgctgccgtcttctaaaagc

SEQ ID NO: 4171939 - DNA, 25 bp, Homo sapien
agagactgtcatatggacttcctag

SEQ ID NO: 4171940 - DNA, 25 bp, Homo sapien
tctcagcagagtatagttactactg

SEQ ID NO: 4171941 - DNA, 25 bp, Homo sapien
tcatatggacttcctagagttctca

SEQ ID NO: 4171942 - DNA, 25 bp, Homo sapien
cctagagttctcagcagagtatagt

SEQ ID NO: 4171943 - DNA, 25 bp, Homo sapien
taggaagatgttccagactcagttc

SEQ ID NO: 4171944 - DNA, 25 bp, Homo sapien
cataaaccgctacttcaggaacaca

SEQ ID NO: 4171945 - DNA, 25 bp, Homo sapien
tatacagaggtactgactgcctttg

SEQ ID NO: 4171946 - DNA, 25 bp, Homo sapien
catgggtatggatcacatttctgca

SEQ ID NO: 4171947 - DNA, 25 bp, Homo sapien
taggtcctggtgacttgcggtaagc

SEQ ID NO: 4171948 - DNA, 25 bp, Homo sapien
gctgtggttgctaagttactggcct

SEQ ID NO: 4171949 - DNA, 25 bp, Homo sapien
cacattaggagctcgttaggtcctg

SEQ ID NO: 4171950 - DNA, 25 bp, Homo sapien
ctggcctgttctgaaaaaccttgaa

SEQ ID NO: 4171951 - DNA, 25 bp, Homo sapien
gctgaaaggttgtcattggagtaac

SEQ ID NO: 4171952 - DNA, 25 bp, Homo sapien
ggagatttatttctataataggccc

SEQ ID NO: 4171953 - DNA, 25 bp, Homo sapien
ttctcttggatagggcggttctgga

SEQ ID NO: 4171954 - DNA, 25 bp, Homo sapien
atttctataataggcccactcagtg

SEQ ID NO: 4171955 - DNA, 25 bp, Homo sapien
ctggcagtgcgtgttattatcttca

SEQ ID NO: 4171956 - DNA, 25 bp, Homo sapien
tggcagtgcgtgttattatcttcat

SEQ ID NO: 4171957 - DNA, 25 bp, Homo sapien
gggctccccagccaatttgcctggc

SEQ ID NO: 4171958 - DNA, 25 bp, Homo sapien
ctctggagcacaaaacctctgggtt

SEQ ID NO: 4171959 - DNA, 25 bp, Homo sapien
tgattatgcccctgctatgtgcaag

SEQ ID NO: 4171960 - DNA, 25 bp, Homo sapien
aagcctgccattacccacaattctg

SEQ ID NO: 4171961 - DNA, 25 bp, Homo sapien
tgtttgctgtcattgctaatgccag

SEQ ID NO: 4171962 - DNA, 25 bp, Homo sapien
gggagattggcaggatcaacaggta

SEQ ID NO: 4171963 - DNA, 25 bp, Homo sapien
ggagattggcaggatcaacaggtac

SEQ ID NO: 4171964 - DNA, 25 bp, Homo sapien
aattaattatcaatgctatttgtgt

SEQ ID NO: 4171965 - DNA, 25 bp, Homo sapien
ttcagctaattaattatcaatgcta

SEQ ID NO: 4171966 - DNA, 25 bp, Homo sapien
gctaattaattatcaatgctatttg

SEQ ID NO: 4171967 - DNA, 25 bp, Homo sapien
cagctaattaattatcaatgctatt

SEQ ID NO: 4171968 - DNA, 25 bp, Homo sapien
catctcaggcgggatatagaaacta

SEQ ID NO: 4171969 - DNA, 25 bp, Homo sapien
ggagcatgccatacttagagggtga

SEQ ID NO: 4171970 - DNA, 25 bp, Homo sapien
tacctctgtcagacctagtgcttgg

SEQ ID NO: 4171971 - DNA, 25 bp, Homo sapien
aactcttaggcgatggagatgctgc

SEQ ID NO: 4171972 - DNA, 25 bp, Homo sapien
gctcaatctcttagcaagcaaccca

SEQ ID NO: 4171973 - DNA, 25 bp, Homo sapien
ttacagcaaaggctcaatctcttag

SEQ ID NO: 4171974 - DNA, 25 bp, Homo sapien
atgcttacttagttacagcaaaggc

SEQ ID NO: 4171975 - DNA, 25 bp, Homo sapien
tctcttagcaagcaacccattatta

SEQ ID NO: 4171976 - DNA, 25 bp, Homo sapien
cctttggattccttgatctacgaga

SEQ ID NO: 4171977 - DNA, 25 bp, Homo sapien
ccttgatctacgagagttttctctc

SEQ ID NO: 4171978 - DNA, 25 bp, Homo sapien
gattccttgatctacgagagttttc

SEQ ID NO: 4171979 - DNA, 25 bp, Homo sapien
tggattccttgatctacgagagttt

SEQ ID NO: 4171980 - DNA, 25 bp, Homo sapien
tgaaattctagtgctccagaaagcc

SEQ ID NO: 4171981 - DNA, 25 bp, Homo sapien
tgtaaattttgtgtgacaggtaggc

SEQ ID NO: 4171982 - DNA, 25 bp, Homo sapien
ttgctcaactccaattcccaagtca

SEQ ID NO: 4171983 - DNA, 25 bp, Homo sapien
taaaacacttatgaggatgagctgc

SEQ ID NO: 4171984 - DNA, 25 bp, Homo sapien
gagaaggctatatatggtatcacaa

SEQ ID NO: 4171985 - DNA, 25 bp, Homo sapien
ggagctatccctcgtaactgtcaag

SEQ ID NO: 4171986 - DNA, 25 bp, Homo sapien
tgtaatgttccctcttgagaaggct

SEQ ID NO: 4171987 - DNA, 25 bp, Homo sapien
cattttcggatgacgtgttcttata

SEQ ID NO: 4171988 - DNA, 25 bp, Homo sapien
cactgggctttgaaggtaggacctt

SEQ ID NO: 4171989 - DNA, 25 bp, Homo sapien
taataggcccttcaaacaattgttc

SEQ ID NO: 4171990 - DNA, 25 bp, Homo sapien
gcaaacttgactgcgttaacaaagg

SEQ ID NO: 4171991 - DNA, 25 bp, Homo sapien
tgttccagctatgtcagtatctcag

SEQ ID NO: 4171992 - DNA, 25 bp, Homo sapien
agatgttaactgtaatgttattaaa

SEQ ID NO: 4171993 - DNA, 25 bp, Homo sapien
tcaggaagctgcattaggatcagcg

SEQ ID NO: 4171994 - DNA, 25 bp, Homo sapien
ctgcattaggatcagcgggaggttt

SEQ ID NO: 4171995 - DNA, 25 bp, Homo sapien
tattattctcatcatactccttaga

SEQ ID NO: 4171996 - DNA, 25 bp, Homo sapien
aacactcaagaggtaccaggcgtac

SEQ ID NO: 4171997 - DNA, 25 bp, Homo sapien
cattttttgggtccagctctggtac

SEQ ID NO: 4171998 - DNA, 25 bp, Homo sapien
tgttacaaacatagttgccactgga

SEQ ID NO: 4171999 - DNA, 25 bp, Homo sapien
gaccactgttacgtcagactgcaca

SEQ ID NO: 4172000 - DNA, 25 bp, Homo sapien
atattgtttctagagaaattgacat

SEQ ID NO: 4172001 - DNA, 25 bp, Homo sapien
cttcttctggctgaatagacgtcat

SEQ ID NO: 4172002 - DNA, 25 bp, Homo sapien
tcttcttctggctgaatagacgtca

SEQ ID NO: 4172003 - DNA, 25 bp, Homo sapien
tggcttccgttgctctgcaattgct

SEQ ID NO: 4172004 - DNA, 25 bp, Homo sapien
tctggcttccgttgctctgcaattg

SEQ ID NO: 4172005 - DNA, 25 bp, Homo sapien
gcttccgttgctctgcaattgcttg

SEQ ID NO: 4172006 - DNA, 25 bp, Homo sapien
gcaattgcttgtggtacaggggctc

SEQ ID NO: 4172007 - DNA, 25 bp, Homo sapien
aacaaggaggcgaacgaggaacaag

SEQ ID NO: 4172008 - DNA, 25 bp, Homo sapien
ctgctgctgcgaacaaggaggcgaa

SEQ ID NO: 4172009 - DNA, 25 bp, Homo sapien
tgcgaacaaggaggcgaacgaggaa

SEQ ID NO: 4172010 - DNA, 25 bp, Homo sapien
ctgctgcgaacaaggaggcgaacga

SEQ ID NO: 4172011 - DNA, 25 bp, Homo sapien
gtggcgatttcggagctcctgtcta

SEQ ID NO: 4172012 - DNA, 25 bp, Homo sapien
ttggtggcgatttcggagctcctgt

SEQ ID NO: 4172013 - DNA, 25 bp, Homo sapien
ctcctgtctacagctgcgtctgaca

SEQ ID NO: 4172014 - DNA, 25 bp, Homo sapien
gcgatttcggagctcctgtctacag

SEQ ID NO: 4172015 - DNA, 25 bp, Homo sapien
ctgcttgcccgtagctgactcagct

SEQ ID NO: 4172016 - DNA, 25 bp, Homo sapien
cactttttcatctacctcattgtca

SEQ ID NO: 4172017 - DNA, 25 bp, Homo sapien
ttccactttttcatctacctcattg

SEQ ID NO: 4172018 - DNA, 25 bp, Homo sapien
tcagctgcctgcttgcccgtagctg

SEQ ID NO: 4172019 - DNA, 25 bp, Homo sapien
ggcctttttaaccatctcatacaaa

SEQ ID NO: 4172020 - DNA, 25 bp, Homo sapien
tttaaccatctcatacaaaccaact

SEQ ID NO: 4172021 - DNA, 25 bp, Homo sapien
ttggcctttttaaccatctcataca

SEQ ID NO: 4172022 - DNA, 25 bp, Homo sapien
tttttaaccatctcatacaaaccaa

SEQ ID NO: 4172023 - DNA, 25 bp, Homo sapien
gcctcacgctgtaccttaggatgga

SEQ ID NO: 4172024 - DNA, 25 bp, Homo sapien
cagtggttcggataatgaagtggaa

SEQ ID NO: 4172025 - DNA, 25 bp, Homo sapien
ggagaggggctacagcacccctagc

SEQ ID NO: 4172026 - DNA, 25 bp, Homo sapien
ctgaataacagtggttcggataatg

SEQ ID NO: 4172027 - DNA, 25 bp, Homo sapien
cgctggcacactcctaggatttctg

SEQ ID NO: 4172028 - DNA, 25 bp, Homo sapien
gaaacctctggaaacaggttctgcc

SEQ ID NO: 4172029 - DNA, 25 bp, Homo sapien
catccgctggcacactcctaggatt

SEQ ID NO: 4172030 - DNA, 25 bp, Homo sapien
tgcatagccaagaagtgcaagagcc

SEQ ID NO: 4172031 - DNA, 25 bp, Homo sapien
ctggagtcactaaatatttggttct

SEQ ID NO: 4172032 - DNA, 25 bp, Homo sapien
gaaagctatagcttgatttgttatg

SEQ ID NO: 4172033 - DNA, 25 bp, Homo sapien
gctatagcttgatttgttatgtgtt

SEQ ID NO: 4172034 - DNA, 25 bp, Homo sapien
agcttgatttgttatgtgttacaag

SEQ ID NO: 4172035 - DNA, 25 bp, Homo sapien
tgatttgttatgtgttacaagtgtt

SEQ ID NO: 4172036 - DNA, 25 bp, Homo sapien
tcaatgaacatgtcttcaccgatcc

SEQ ID NO: 4172037 - DNA, 25 bp, Homo sapien
tgtcttcaccgatcctgttactgta

SEQ ID NO: 4172038 - DNA, 25 bp, Homo sapien
ggcccaatgggtatttcaatgaaca

SEQ ID NO: 4172039 - DNA, 25 bp, Homo sapien
taatagcctgatttgatctcaaatg

SEQ ID NO: 4172040 - DNA, 25 bp, Homo sapien
aatcacagacgctgtggcctgtggt

SEQ ID NO: 4172041 - DNA, 25 bp, Homo sapien
ctcatgcaaatcacagacgctgtgg

SEQ ID NO: 4172042 - DNA, 25 bp, Homo sapien
ttactcatgcaaatcacagacgctg

SEQ ID NO: 4172043 - DNA, 25 bp, Homo sapien
ctaattactcatgcaaatcacagac

SEQ ID NO: 4172044 - DNA, 25 bp, Homo sapien
tttaactaaagagccacgttcagag

SEQ ID NO: 4172045 - DNA, 25 bp, Homo sapien
gtagtagcacagtaaaagttccaaa

SEQ ID NO: 4172046 - DNA, 25 bp, Homo sapien
gagaaggacccagtcgttcagggct

SEQ ID NO: 4172047 - DNA, 25 bp, Homo sapien
catgatctatagcaatcctgttaag

SEQ ID NO: 4172048 - DNA, 25 bp, Homo sapien
cttcaatgtttcccactgacttctt

SEQ ID NO: 4172049 - DNA, 25 bp, Homo sapien
aatgtttcccactgacttcttgtcc

SEQ ID NO: 4172050 - DNA, 25 bp, Homo sapien
atgtttcccactgacttcttgtcca

SEQ ID NO: 4172051 - DNA, 25 bp, Homo sapien
tcaatgtttcccactgacttcttgt

SEQ ID NO: 4172052 - DNA, 25 bp, Homo sapien
tgatgactgaatgatcagggctgtc

SEQ ID NO: 4172053 - DNA, 25 bp, Homo sapien
agagggactctaatacagtcctggg

SEQ ID NO: 4172054 - DNA, 25 bp, Homo sapien
tcatcataacaaacttgccaagtgt

SEQ ID NO: 4172055 - DNA, 25 bp, Homo sapien
ccttcacagtgatctctgatgactg

SEQ ID NO: 4172056 - DNA, 25 bp, Homo sapien
cttctcgtgaaagggaaatattttg

SEQ ID NO: 4172057 - DNA, 25 bp, Homo sapien
tctctaaatgagcttctcgtgaaag

SEQ ID NO: 4172058 - DNA, 25 bp, Homo sapien
taaatgagcttctcgtgaaagggaa

SEQ ID NO: 4172059 - DNA, 25 bp, Homo sapien
gtcttctctaaatgagcttctcgtg

SEQ ID NO: 4172060 - DNA, 25 bp, Homo sapien
tccagttgctggacaaagttaatta

SEQ ID NO: 4172061 - DNA, 25 bp, Homo sapien
cagttgctggacaaagttaattaat

SEQ ID NO: 4172062 - DNA, 25 bp, Homo sapien
tcttccaagtgacagccttgtctac

SEQ ID NO: 4172063 - DNA, 25 bp, Homo sapien
cttccaagtgacagccttgtctact

SEQ ID NO: 4172064 - DNA, 25 bp, Homo sapien
gagtatagatccattccgaatgtgc

SEQ ID NO: 4172065 - DNA, 25 bp, Homo sapien
tgtgcttgttgctaccacagtcaac

SEQ ID NO: 4172066 - DNA, 25 bp, Homo sapien
ctggagtatagatccattccgaatg

SEQ ID NO: 4172067 - DNA, 25 bp, Homo sapien
tccattccgaatgtgcttgttgcta

SEQ ID NO: 4172068 - DNA, 25 bp, Homo sapien
tcagtggtccatagtctgcatgcga

SEQ ID NO: 4172069 - DNA, 25 bp, Homo sapien
tttgttgaaagattgcatctgctgg

SEQ ID NO: 4172070 - DNA, 25 bp, Homo sapien
gcatctgctggttgtgcatgttctg

SEQ ID NO: 4172071 - DNA, 25 bp, Homo sapien
tcttaaggcagtgtgtagtaaccac

SEQ ID NO: 4172072 - DNA, 25 bp, Homo sapien
tcttttccaattccattaatgaaag

SEQ ID NO: 4172073 - DNA, 25 bp, Homo sapien
gcacactcatgctggaacccattaa

SEQ ID NO: 4172074 - DNA, 25 bp, Homo sapien
aagctcgatagcgagaaatgagaga

SEQ ID NO: 4172075 - DNA, 25 bp, Homo sapien
aacttgtgaattcaagtggaacttc

SEQ ID NO: 4172076 - DNA, 25 bp, Homo sapien
tatttcctagttgcatttccattca

SEQ ID NO: 4172077 - DNA, 25 bp, Homo sapien
tgctacttcaatgtttgttccactt

SEQ ID NO: 4172078 - DNA, 25 bp, Homo sapien
gttccacttagccaagtcttcagga

SEQ ID NO: 4172079 - DNA, 25 bp, Homo sapien
cagggtgcctgtgctttactgctac

SEQ ID NO: 4172080 - DNA, 25 bp, Homo sapien
cattggactgagaattgaaagctcg

SEQ ID NO: 4172081 - DNA, 25 bp, Homo sapien
tataactcaatgaaaggccttgaat

SEQ ID NO: 4172082 - DNA, 25 bp, Homo sapien
gaccttgaacattccgcttttgtga

SEQ ID NO: 4172083 - DNA, 25 bp, Homo sapien
tagaatctacaggaaacattggact

SEQ ID NO: 4172084 - DNA, 25 bp, Homo sapien
ctagagctcagagggaattctggca

SEQ ID NO: 4172085 - DNA, 25 bp, Homo sapien
gacactgacaaaaaggattcctaga

SEQ ID NO: 4172086 - DNA, 25 bp, Homo sapien
taagatggtaataacccctgagatc

SEQ ID NO: 4172087 - DNA, 25 bp, Homo sapien
tctcttttagggctgttagtcttaa

SEQ ID NO: 4172088 - DNA, 25 bp, Homo sapien
caatacgttctgaattttgacttcc

SEQ ID NO: 4172089 - DNA, 25 bp, Homo sapien
ttactctatggaggactacaggcat

SEQ ID NO: 4172090 - DNA, 25 bp, Homo sapien
gaatcaatacgttctgaattttgac

SEQ ID NO: 4172091 - DNA, 25 bp, Homo sapien
tcagggacatgttatttactctatg

SEQ ID NO: 4172092 - DNA, 25 bp, Homo sapien
cagcagatcaggattccacagtaca

SEQ ID NO: 4172093 - DNA, 25 bp, Homo sapien
gcagatcaggattccacagtacaca

SEQ ID NO: 4172094 - DNA, 25 bp, Homo sapien
tcacagcagatcaggattccacagt

SEQ ID NO: 4172095 - DNA, 25 bp, Homo sapien
cacagcagatcaggattccacagta

SEQ ID NO: 4172096 - DNA, 25 bp, Homo sapien
ggccttggccagcagtgatactcag

SEQ ID NO: 4172097 - DNA, 25 bp, Homo sapien
tgcagaatgtcggtttccaaagaaa

SEQ ID NO: 4172098 - DNA, 25 bp, Homo sapien
gacatacatagtctgggccttggcc

SEQ ID NO: 4172099 - DNA, 25 bp, Homo sapien
tcagatacatctcttaactaatgga

SEQ ID NO: 4172100 - DNA, 25 bp, Homo sapien
caacccagtctgcttgtaaccaatg

SEQ ID NO: 4172101 - DNA, 25 bp, Homo sapien
tgaggttaagggtgcagtccatagc

SEQ ID NO: 4172102 - DNA, 25 bp, Homo sapien
tgcctttgtaagatggctggctgag

SEQ ID NO: 4172103 - DNA, 25 bp, Homo sapien
tcaattgtggatttgcttacaccca

SEQ ID NO: 4172104 - DNA, 25 bp, Homo sapien
gcagaagctcttacttctttttgaa

SEQ ID NO: 4172105 - DNA, 25 bp, Homo sapien
ctttttgaaggtgtattcttcctgc

SEQ ID NO: 4172106 - DNA, 25 bp, Homo sapien
ttgtcctcctctcaaggattctgca

SEQ ID NO: 4172107 - DNA, 25 bp, Homo sapien
aggattctgcagaagctcttacttc

SEQ ID NO: 4172108 - DNA, 25 bp, Homo sapien
acacttgggaaagcataatgtccaa

SEQ ID NO: 4172109 - DNA, 25 bp, Homo sapien
caattacccggtgcactgccatttc

SEQ ID NO: 4172110 - DNA, 25 bp, Homo sapien
tatccgaaaattggtgatccacatg

SEQ ID NO: 4172111 - DNA, 25 bp, Homo sapien
gctgcataatgatggaaacacttgg

SEQ ID NO: 4172112 - DNA, 25 bp, Homo sapien
tccgaaaggtcatataactctgtct

SEQ ID NO: 4172113 - DNA, 25 bp, Homo sapien
tgtggatgtccattagtgtctggat

SEQ ID NO: 4172114 - DNA, 25 bp, Homo sapien
gttgtttatacccatccatcttgag

SEQ ID NO: 4172115 - DNA, 25 bp, Homo sapien
cattgagttcctcaaaatggctatt

SEQ ID NO: 4172116 - DNA, 25 bp, Homo sapien
ccctatcccggagggaacatgcatc

SEQ ID NO: 4172117 - DNA, 25 bp, Homo sapien
gctatacatagaccctatcccggag

SEQ ID NO: 4172118 - DNA, 25 bp, Homo sapien
catgcatcctattttctaaattcag

SEQ ID NO: 4172119 - DNA, 25 bp, Homo sapien
tttctaaattcaggggagatgcatc

SEQ ID NO: 4172120 - DNA, 25 bp, Homo sapien
atctccatccgtactaaatacaact

SEQ ID NO: 4172121 - DNA, 25 bp, Homo sapien
tctccatccgtactaaatacaactg

SEQ ID NO: 4172122 - DNA, 25 bp, Homo sapien
ctccatccgtactaaatacaactgt

SEQ ID NO: 4172123 - DNA, 25 bp, Homo sapien
gcatgcattattgatgtctggaaca

SEQ ID NO: 4172124 - DNA, 25 bp, Homo sapien
cttgcacgacaggttacataactgg
